(19) United States
(12) Patent Application Publication
(10) Pub. No.: US 2026/0041763 A1
(43) Pub. Date: Feb. 12, 2026

(54) COMPOSITIONS AND METHODS FOR OPTIMIZED COVID PEPTIDE VACCINES

(71) Applicant: Think Therapeutics, Inc., Newton, MA (US)

(72) Inventors: David Gifford, Newton, MA (US); Brandon Carter, Newton, MA (US)

(21) Appl. No.: 19/100,216

(22) PCT Filed: Aug. 30, 2023
(86) PCT No.: PCT/US2023/073207

§ 371 Date: Jan. 31, 2025

Related U.S. Application Data
(60) Provisional application No. 63/374,085, filed on Aug. 31, 2022.

(51) Int. Cl. A61K 39/215; A61K 39/00

(52) U.S. Cl. CPC A61K 39/215; A61K 2039/53

(57) ABSTRACT

Described herein is a composition comprising nucleic acid sequences encoding at least two amino acid sequences selected from the group consisting of SEQ ID NOs: 1 to 19. Also described herein is a composition comprising nucleic acid sequences encoding at least two amino acid sequences selected from the group consisting of SEQ ID NOs: 31 to 58.

### CROSS-REFERENCE TO RELATED APPLICATIONS

[0001] This application claims the benefit and priority of U.S. Provisional Application Ser. No. 63/374,085, filed on Aug. 31, 2022, the contents of each of which are herein incorporated by reference in their entirety.

### COPYRIGHT

[0002] This patent disclosure contains material that is subject to copyright protection. The copyright owner has no objection to the facsimile reproduction of the patent document or the patent disclosure as it appears in the U.S. Patent and Trademark Office patent file or records, but otherwise reserves any and all copyright rights.

### INCORPORATION BY REFERENCE

[0003] For countries that permit incorporation by reference, all of the references cited in this disclosure are hereby incorporated by reference in their entireties. In addition, any manufacturers' instructions or catalogues for any products cited or mentioned herein are incorporated by reference. Documents incorporated by reference into this text, or any teachings therein, can be used in the practice of the present invention. Documents incorporated by reference into this text are not admitted to be prior art.

### SEQUENCE LISTING

[0004] The instant application contains a Sequence Listing which has been submitted electronically in XML format and is hereby incorporated by reference in its entirety. The XML copy, created on Aug. 30, 2023, is named ThinkTx_002_WO1_SL.xml and is 86,034,858 bytes in size.

### FIELD OF THE INVENTION

[0005] The present invention relates generally to compositions, systems, and methods of peptide vaccines. More particularly, the present invention relates to compositions, systems, and methods of designing peptide vaccines to treat or prevent disease optimized based on predicted population immunogenicity.

### BACKGROUND

[0006] The goal of a peptide vaccine is to train the immune system to recognize and expand its capacity to engage cells that display target peptides to improve the immune response to cancerous cells or pathogens. A peptide vaccine can also be administered to someone who is already diseased to increase their immune response to a causal cancer, other diseases, or pathogen. Alternatively, a peptide vaccine can be administered to induce the immune system to have therapeutic tolerance to one or more peptides.

[0007] There exists a need for compositions, systems, and methods of peptide vaccines based on prediction of the target peptides that will be displayed to protect a host from cancer, other disease, or pathogen infection. We introduce novel prophylactic and therapeutic vaccines for Coronavirus disease (COVID) that include peptides from the SARS-CoV proteins Spike glycoprotein (S), Envelope small membrane protein (E), Membrane protein (M), Nucleoprotein (N), ORF1a, ORF1b, ORF3a, ORF6, ORF7a, ORF8, and ORF10.

### SUMMARY OF THE INVENTION

[0008] In one aspect, the invention provides for nucleic acid sequences encoding one or more amino acid sequences selected from the group consisting of SEQ ID NOs: 1 to 30.

[0009] In some embodiments, the nucleic acid sequences encode two or more amino acid sequences selected from the group consisting of SEQ ID NOs: 1 to 30.

[0010] In another aspect, the invention provides for a composition comprising nucleic acid sequences encoding one or more amino acid sequences selected from the group consisting of SEQ ID NOs: 1 to 30.

[0011] In some embodiments, the composition is administered to a subject. In some embodiments, the composition comprises nucleic acid sequences encoding two or more amino acid sequences selected from the group consisting of SEQ ID NOs: 1 to 30. In some embodiments, the nucleic acid sequences are administered in a construct for expression in vivo. In some embodiments, the in vivo administration of the nucleic acid sequences are configured to produce one or more peptides that is displayed by an HLA class I molecule. In some embodiments, the nucleic acid sequences are configured to allow expression of at least two peptides encoded by the nucleic acid sequences that are each displayed by a peptide specific set of HLA class I alleles, wherein all of the peptide specific sets of HLA class I alleles are not identical. In some embodiments, each of the one or more peptides is a modified or unmodified fragment of a SARS-CoV protein. In some embodiments, the composition is administered in an effective amount to a subject to prevent COVID. In some embodiments, the composition is administered in an effective amount to a subject to treat COVID.

[0012] In some embodiments, the composition comprises nucleic acid sequences encoding at least three amino acid sequences selected from the group consisting of SEQ ID NOs: 1 to 30.

[0013] In another aspect, the invention provides for a peptide composition comprising one or more peptides selected from the group consisting of SEQ ID NOs: 1 to 30.

[0014] In some embodiments, the peptide composition comprises two or more peptides selected from the group consisting of SEQ ID NOs: 1 to 30. In some embodiments, the composition is administered to a subject.

[0015] In some embodiments, the peptide composition comprises three or more peptides selected from the group consisting of SEQ ID NOs: 1 to 30.

[0016] In another aspect, the invention provides for a composition comprising nucleic acid sequences encoding one or more amino acid sequences selected from the group consisting of SEQ ID NOs: 1 to 19.

[0017] In some embodiments, the composition is administered to a subject. In some embodiments, the composition comprises nucleic acid sequences encoding two or more amino acid sequences selected from the group consisting of SEQ ID NOs: 1 to 19. In some embodiments, the nucleic acid sequences are administered in a construct for expression in vivo. In some embodiments, the in vivo administration of the nucleic acid sequences are configured to produce one or more peptides that is displayed by an HLA class I molecule. In some embodiments, the nucleic acid sequences are configured to allow expression of at least two peptides encoded by the nucleic acid sequences that are each displayed by a peptide specific set of HLA class I alleles, wherein all of the peptide specific sets of HLA class I alleles are not identical. In some embodiments, each of the one or more peptides is a modified or unmodified fragment of a SARS-CoV protein. In some embodiments, the composition is administered in an effective amount to a subject to prevent COVID. In some embodiments, the composition is administered in an effective amount to a subject to treat COVID.

[0018] In some embodiments, the composition comprises nucleic acid sequences encoding at least three amino acid sequences selected from the group consisting of SEQ ID NOs: 1 to 19.

[0019] In another aspect, the invention provides for a method of treating or preventing COVID by administering to a subject a composition comprising nucleic acid sequences encoding one or more amino acid sequences selected from the group consisting of SEQ ID NOs: 1 to 19.

[0020] In some embodiments, the composition comprises nucleic acid sequences encoding two or more amino acid sequences selected from the group consisting of SEQ ID NOs: 1 to 19.

[0021] In another aspect, the invention provides for a peptide composition comprising one or more peptides selected from the group consisting of SEQ ID NOs: 1 to 19.

[0022] In some embodiments, the peptide composition comprises two or more peptides selected from the group consisting of SEQ ID NOs: 1 to 19. In some embodiments a peptide in the peptide composition is displayed by an HLA class I molecule. In some embodiments, the at least two peptides are each capable of being displayed by a peptide specific set of HLA class I alleles, wherein all of the peptide specific sets of HLA class I alleles are not identical. In some embodiments, a peptide in the peptide composition is a modified or unmodified fragment of a SARS-CoV protein. In some embodiments, the peptide composition is administered in an effective amount to a subject to prevent COVID. In some embodiments, the peptide composition is administered in an effective amount to a subject to treat COVID.

[0023] In some embodiments, the peptide composition comprises three or more peptides selected from the group consisting of SEQ ID NOs: 1 to 19.

[0024] In another aspect, the invention provides for a method of treating or preventing COVID in a subject comprising administering to the subject a peptide composition comprising one or more peptides selected from the group consisting of SEQ ID NOs: 1 to 19.

[0025] In some embodiments, the peptide composition comprises two or more peptides selected from the group consisting of SEQ ID NOs: 1 to 19.

[0026] In another aspect, the invention provides for nucleic acid sequences encoding one or more amino acid sequences selected from the group consisting of SEQ ID NOs: 31 to 63.

[0027] In some embodiments, the nucleic acid sequences encode two or more amino acid sequences selected from the group consisting of SEQ ID NOs: 31 to 63.

[0028] In another aspect, the invention provides for a composition comprising nucleic acid sequences encoding one or more amino acid sequences selected from the group consisting of SEQ ID NOs: 31 to 63.

[0029] In some embodiments, the composition is administered to a subject. In some embodiments, the composition comprises nucleic acid sequences encoding two or more amino acid sequences selected from the group consisting of SEQ ID NOs: 31 to 63. In some embodiments, the nucleic acid sequences are administered in a construct for expression in vivo. In some embodiments, the in vivo administration of the nucleic acid sequences are configured to produce one or more peptides that is displayed by an HLA class II molecule. In some embodiments, the nucleic acid sequences are configured to allow expression of at least two peptides encoded by the nucleic acid sequences that are each displayed by a peptide specific set of HLA class II alleles, wherein all of the peptide specific sets of HLA class II alleles are not identical. In some embodiments, each of the one or more peptides is a modified or unmodified fragment of a SARS-CoV protein. In some embodiments, the composition is administered in an effective amount to a subject to prevent COVID. In some embodiments, the composition is administered in an effective amount to a subject to treat COVID.

[0030] In some embodiments, the composition comprises nucleic acid sequences encoding at least three amino acid sequences selected from the group consisting of SEQ ID NOs: 31 to 63.

[0031] In another aspect, the invention provides for a peptide composition comprising one or more peptides selected from the group consisting of SEQ ID NOs: 31 to 63.

[0032] In some embodiments, the peptide composition comprises two or more peptides selected from the group consisting of SEQ ID NOs: 31 to 63. In some embodiments, the composition is administered to a subject.

[0033] In some embodiments, the peptide composition comprises three or more peptides selected from the group consisting of SEQ ID NOs: 31 to 63.

[0034] In another aspect, the invention provides for nucleic acid sequences encoding one or more amino acid sequences selected from the group consisting of SEQ ID NOs: 31 to 58.

[0035] In some embodiments, the nucleic acid sequences encode two or more amino acid sequences selected from the group consisting of SEQ ID NOs: 31 to 58.

[0036] In another aspect, the invention provides for a composition comprising nucleic acid sequences encoding one or more amino acid sequences selected from the group consisting of SEQ ID NOs: 31 to 58.

[0037] In some embodiments, the composition comprises nucleic acid sequences encoding two or more amino acid sequences selected from the group consisting of SEQ ID NOs: 31 to 58. In some embodiments, the nucleic acid sequences are administered in a construct for expression in vivo. In some embodiments, the in vivo administration of the nucleic acid sequences are configured to produce one or more peptides that is displayed by an HLA class II molecule. In some embodiments, the nucleic acid sequences are configured to allow expression of at least two peptides encoded by the nucleic acid sequences that are each displayed by a peptide specific set of HLA class II alleles, wherein all of the peptide specific sets of HLA class II alleles are not identical. In some embodiments, each of the one or more peptides is a modified or unmodified fragment of a SARS-CoV protein. In some embodiments, the composition is administered in an effective amount to a subject to prevent COVID. In some embodiments, the composition is administered in an effective amount to a subject to treat COVID. In some embodiments, the composition comprises nucleic acid sequences encoding at least three amino acid sequences selected from the group consisting of SEQ ID NOs: 31 to 58.

[0038] In some embodiments, the composition comprises nucleic acid sequences encoding at least three amino acid sequences selected from the group consisting of SEQ ID NOs: 31 to 58.

[0039] In another aspect, the invention provides for a method of treating or preventing COVID by administering to a subject a composition comprising nucleic acid sequences encoding one or more amino acid sequences selected from the group consisting of SEQ ID NOs: 31 to 58.

[0040] In some embodiments, the composition comprises nucleic acid sequences encoding two or more amino acid sequences selected from the group consisting of SEQ ID NOs: 31 to 58.

[0041] In another aspect, the invention provides for a peptide composition comprising one or more peptides selected from the group consisting of SEQ ID NOs: 31 to 58.

[0042] In some embodiments, the peptide composition comprises two or more peptides selected from the group consisting of SEQ ID NOs: 31 to 58. In some embodiments a peptide in the peptide composition is displayed by an HLA class II molecule. In some embodiments, the at least two peptides are each capable of being displayed by a peptide specific set of HLA class II alleles, wherein all of the peptide specific sets of HLA class II alleles are not identical. In some embodiments, a peptide in the peptide composition is a modified or unmodified fragment of a SARS-CoV protein. In some embodiments, the peptide composition is administered in an effective amount to a subject to prevent COVID. In some embodiments, the peptide composition is administered in an effective amount to a subject to treat COVID.

[0043] In some embodiments, the peptide composition comprises three or more peptides selected from the group consisting of SEQ ID NOs: 31 to 58.

[0044] In another aspect, the invention provides for a method of treating or preventing COVID in a subject comprising administering to the subject a peptide composition comprising one or more peptides selected from the group consisting of SEQ ID NOs: 31 to 58.

[0045] In some embodiments, the peptide composition comprises two or more peptides selected from the group consisting of SEQ ID NOs: 31 to 58.

[0046] In some embodiments, the compositions, including peptide compositions, of the invention are immunogenic compositions. To this end, the invention provides for a method of inducing an immunogenic response in a subject comprising administering to the subject a composition of the invention.

[0047] In some embodiments, compositions, including peptide compositions, of the invention are vaccines.

### BRIEF DESCRIPTION OF THE DRAWINGS

[0048] The following figures depict illustrative embodiments of the invention.

[0049] FIG. 1 is a flow chart of a vaccine optimization method.

[0050] FIG. 2 is a flow chart of a vaccine optimization method with seed set compression.

[0051] FIG. 3 shows predicted population coverage for MHC class I vaccines by vaccine size for a COVID vaccine for 1, 3, and 5 predicted peptide-HLA hits per-individual.

[0052] FIG. 4 shows predicted population coverage for MHC class II vaccines by vaccine size for COVID vaccine for 1, 3, and 5 peptide-HLA hits per-individual.

[0053] FIG. 5 shows predicated peptide-HLA hits by vaccine size for a KRAS G12V vaccine for the HLA diplotype HLA-A02:03, HLA-A11:01, HLA-B55:02, HLA-B58:01, HLA-C03:02, HLA-C03:03.

[0054] FIG. 6 is a table showing the respective probabilities of target presentations for various mutated protein targets across different cancers.

[0055] FIG. 7 is a flow chart showing a multiple target (combined) vaccine optimization method.

[0056] FIG. 8 shows an example Python implementation of the MergeMulti function for combined vaccine design procedures.

### DETAILED DESCRIPTION OF THE INVENTION

[0057] The practice of the present invention can employ, unless otherwise indicated, conventional techniques of genetics, molecular biology, protein chemistry, computational biology, and formulation science, which are within the skill of the art.

[0058] In order that the present invention can be more readily understood, certain terms are first defined. Additional definitions are set forth throughout the disclosure. Unless defined otherwise, all technical and scientific terms used herein have the same meaning as commonly understood by one of ordinary skill in the art to which this invention is related.

[0059] Any headings provided herein are not limitations of the various aspects or embodiments of the invention, which can be had by reference to the specification as a whole. Accordingly, the terms defined immediately below are more fully defined by reference to the specification in its entirety.

[0060] All references cited in this disclosure are hereby incorporated by reference in their entireties. In addition, any manufacturers' instructions or catalogues for any products cited or mentioned herein are incorporated by reference. Documents incorporated by reference into this text, or any teachings therein, can be used in the practice of the present invention. Documents incorporated by reference into this text are not admitted to be prior art.

### Definitions

[0061] The phraseology or terminology in this disclosure is for the purpose of description and not of limitation, such that the terminology or phraseology of the present specification is to be interpreted by the skilled artisan in light of the teachings and guidance.

[0062] As used in this specification and the appended claims, the singular forms “a,” “an,” and “the” include plural referents, unless the context clearly dictates otherwise. The terms “a” (or “an”) as well as the terms “one or more” and “at least one” can be used interchangeably.

[0063] Furthermore, “and/or” is to be taken as specific disclosure of each of the two specified features or components with or without the other. Thus, the term “and/or” as used in a phrase such as “A and/or B” is intended to include A and B, A or B, A (alone), and B (alone). Likewise, the term “and/or” as used in a phrase such as “A, B, and/or C” is intended to include A, B, and C; A, B, or C; A or B; A or C; B or C; A and B; A and C; B and C; A (alone); B (alone); and C (alone).

[0064] Wherever embodiments are described with the language “comprising,” otherwise analogous embodiments described in terms of “consisting of” and/or “consisting essentially of” are included.

[0065] Units, prefixes, and symbols are denoted in their Système International d'Unités (SI) accepted form. Numeric ranges are inclusive of the numbers defining the range, and any individual value provided herein can serve as an endpoint for a range that includes other individual values provided herein. For example, a set of values such as 1, 2, 3, 8, 9, and 10 is also a disclosure of a range of numbers from 1-10, from 1-8, from 3-9, and so forth. Likewise, a disclosed range is a disclosure of each individual value (i.e., intermediate) encompassed by the range, including integers and fractions. For example, a stated range of 5-10 is also a disclosure of 5, 6, 7, 8, 9, and 10 individually, and of 5.2, 7.5, 8.7, and so forth.

[0066] Unless otherwise indicated, the terms “at least” or “about” preceding a series of elements is to be understood to refer to every element in the series. The term “about” preceding a numerical value includes ±10% of the recited value. For example, a concentration of about 1 mg/mL includes 0.9 mg/mL to 1.1 mg/mL. Likewise, a concentration range of about 10% to 10% (w/v) includes 0.9% (w/v) to 11% (w/v).

[0067] The term “nucleic acid” as used herein, in its broadest sense, refers to any compound and/or substance that is or can be incorporated into an oligonucleotide chain. In some embodiments, a nucleic acid is a compound and/or substance that is or can be incorporated into an oligonucleotide chain via a phosphodiester linkage. As will be clear from context, in some embodiments, “nucleic acid” refers to an individual nucleic acid residue (e.g., a nucleotide and/or nucleoside); in some embodiments, “nucleic acid” refers to an oligonucleotide chain comprising individual nucleic acid residues. In some embodiments, a “nucleic acid” is or comprises RNA; in some embodiments, a “nucleic acid” is or comprises DNA. In some embodiments, a nucleic acid is, comprises, or consists of one or more natural nucleic acid residues. In some embodiments, a nucleic acid is, comprises, or consists of one or more nucleic acid analogs. In some embodiments, a nucleic acid analog differs from a nucleic acid in that it does not utilize a phosphodiester backbone.

[0068] The term “peptide” refers to polymers of amino acids of any length. The polymer can be linear or branched, can comprise modified amino acids, and can be interrupted by non-amino acids. Except where indicated otherwise, e.g., for the abbreviations for the uncommon or unnatural amino acids set forth herein, the three-letter and one-letter abbreviations, as used in the art, are used herein to represent amino acid residues. Groups or strings of amino acid abbreviations are used to represent peptides. Except where specifically indicated, peptides are indicated with the N-terminus of the left and the sequence is written from the N-terminus to the C-terminus.

[0069] The term “composition,” such as a peptide composition, refers to a preparation that is in such form as to permit the biological activity of the active ingredient to be effective.

[0070] A “pharmaceutical composition” refers to a composition which contains no additional components that are unacceptably toxic to a subject to which the composition would be administered and that additionally comprises a pharmaceutically acceptable carrier, such as physiological saline.

[0071] An “immunogenic composition,” such as an immunogenic peptide composition, refers to a composition that can induce an immune response in a subject.

[0072] A “vaccine” or “vaccine composition,” such as a peptide vaccine,” is a composition that can generate acquired immunity against a pathogen or disease in a subject.

[0073] An “effective amount” of an active agent is an amount sufficient to carry out a specifically stated purpose.

[0074] A “subject” or “individual” or “animal” or “patient” or “mammal,” is any subject, particularly a mammalian subject, for whom diagnosis, prognosis, or therapy is desired. Mammalian subjects include humans, domestic animals, farm animals, sports animals, and laboratory animals including, e.g., humans, non-human primates, canines, felines, porcines, bovines, equines, rodents, including rats and mice, rabbits, etc. A subject can also include an in vitro culture of one or more cells that are exposed to the compositions described herein.

[0075] The term “identity” refers to the overall relatedness between polymeric molecules, e.g., between nucleic acid molecules (e.g., DNA molecules and/or RNA molecules) and/or between polypeptide molecules. Calculation of the percent identity of two nucleic acid or polypeptide sequences, for example, can be performed by aligning the two sequences for optimal comparison purposes (e.g., gaps can be introduced in one or both of a first and a second sequences for optimal alignment and non-identical sequences can be disregarded for comparison purposes). The comparison of sequences and determination of percent identity between two sequences can be accomplished using a mathematical algorithm. For example, the percent identity between two nucleotide sequences can be determined using the algorithm of Meyers and Miller (CABIOS, 1989, 4: 11-17), which has been incorporated into the ALIGN program (version 2.0). In some exemplary embodiments, nucleic acid sequence comparisons made with the ALIGN program use a PAM120 weight residue table, a gap length penalty of 12 and a gap penalty of 4. The percent identity between two nucleotide sequences can, alternatively, be determined using the GAP program in the GCG software package using an NWSgapdna.CMP matrix.

[0076] Terms such as “treating” or “treatment” or “to treat” or “alleviating” or “to alleviate” refer to therapeutic measures that cure, slow down, lessen symptoms of, and/or halt progression of a diagnosed pathologic condition or disorder. In certain embodiments, a subject is successfully “treated” for a disease or disorder if the patient shows total, partial, or transient alleviation or elimination of at least one symptom or measurable physical parameter associated with the disease or disorder.

[0077] The term “COVID” refers to any Coronavirus disease including SARS and COVID-19. The term “SARS-CoV” refers to any viral strain that causes COVID including SARS-CoV-1 and SARS-CoV-2. The term “strain variant” refers to different a variant of a given strain. For example SARS-CoV-2 Beta (B.1.351) is a strain variant of SARS-CoV-2.

### Composition/Vaccine Design Considerations

[0078] In some embodiments, the disclosure provides for compositions and vaccines that incorporate peptide sequences that will be displayed by Major Histocompatibility Complex (MHC) molecules on cells and train the immune system to recognize cancer or pathogen diseased cells. In some embodiments, the disclosure provides for compositions and vaccines that that incorporate peptide sequences that will be displayed by Major Histocompatibility Complex (MHC) molecules on cells to induce therapeutic tolerance in antigen-specific immunotherapy for autoimmune diseases (Alhadj et al., 2017; Gibson et al., 2015). In some embodiments, a composition or vaccine comprises one or more peptides. In some embodiments, a composition or vaccine is an mRNA or DNA construct administered for expression in vivo that encodes for one or more peptides.

[0079] It is to be understood that methods and procedures described herein for designing and preparing vaccines are applicable and cover methods and procedures for designing and preparing compositions, pharmaceutical compositions, and immunogenic compositions.

[0080] Peptide display by an MHC molecule is necessary, but not sufficient, for a peptide to be immunogenic and cause the recognition of the resulting peptide-MHC complex by an individual's T cells to trigger T cell activation, expansion, and immune memory. In some embodiments, ELISPOT (Slota et al., 2011) or the Multiplex Identification of Antigen-Specific T Cell Receptors Using a Combination of Immune Assays and Immune Receptor Sequencing (MIRA) assay (Klinger et al., 2015) are used to score peptide display (e.g., a peptide immunogenicity that requires peptide binding) by an MHC molecule (e.g., HLA allele) (e.g., measured as a peptide-HLA binding score). In some embodiments, experimental data from assays such as the ELISPOT (Slota et al., 2011) or the Multiplex Identification of Antigen-Specific T Cell Receptors Using a Combination of Immune Assays and Immune Receptor Sequencing (MIRA) assay (Klinger et al., 2015) can be used to produce a peptide-HLA immunogenicity metric with respect to a peptide and an HLA allele in a given experimental context or individual. In some embodiments, experimental data from assays such as the ELISPOT (Slota et al., 2011) or the Multiplex Identification of Antigen-Specific T Cell Receptors Using a Combination of Immune Assays and Immune Receptor Sequencing (MIRA) assay (Klinger et al., 2015) can be combined with machine learning based predictions for scoring peptide display (e.g., binding affinity) by an MHC molecule (e.g., HLA allele) (e.g., measured as a peptide-HLA binding score) or for determining a peptide-HLA immunogenicity metric. In some embodiments, the MHCflurry or NetMHCpan (Reynisson et al., 2020) computational methods (as known in the art) are used to predict MHC class I display of a peptide by an HLA allele (see Table 1). In some embodiments, the NetMHCIIpan computational method (Reynisson et al., 2020) is used to predict MHC class II display of a peptide by an HLA allele (see Table 2).

[0081] In some embodiments, computational methods such as MHCflurry (O'Donnell et al., 2018; O'Donnell et al., 2020; incorporated by reference in their entireties herein), NetMHCpan (Reynisson et al., 2020, incorporated by reference in its entirety herein), and NetMHCIIpan (Reynisson et al., 2020) are used to predict either MHC class I (MHCflurry, NetMHCpan) or class II (NetMHCIIpan) display of peptides by an HLA allele. In other embodiments, other methods of determining peptide-HLA binding are used as disclosed in International Publication No. WO 2005/042698, incorporated by reference in its entirety herein. NetMHCpan-4.1 and NetMHCIIpan-4.0 utilize the NNAlign_MA algorithm (Alvarez et al., 2019, incorporated by reference in its entirety herein) for predicting peptide-HLA binding. NNAlign_MA is in turn based upon the NNAlign (Nielsen et al., 2009, Nielsen et al., 2017, incorporated by reference in their entireties herein) neural network. NetMHCpan-4.1 (Reynisson et al., 2020) uses NNAlign_MA networks with at least 180 inputs that describe the peptide sequence (9×20=180 inputs). Networks with both 56 and 66 hidden neurons and two outputs are utilized (Alvarez et al., 2019). Each network architecture (56 or 66 hidden neurons) is trained with 5 different random parameter initializations and 5-fold cross-validation resulting in a total of 50 individual trained networks (2 architectures×5 initializations×5 cross-validation). These 50 trained networks are used as an ensemble with 25 networks having at least 10,800 parameters (180 inputs×56 neurons) and 25 networks consist of at least 11,880 parameters (180 inputs×66 neurons). Thus, the ensemble of 50 networks in NetMHCpan-4.1 consists of at least 567,000 parameters that must be evaluated with at least 567,000 arithmetic operations for computing peptide-MHC binding. NetMHCIIpan-4.1 (Reynisson et al., 2020) uses NNAlign_MA networks with at least 180 inputs that describe the peptide sequence (9×20=180 inputs). Networks with 2, 10, 20, 40, and 60 hidden neurons and two outputs are utilized (Alvarez et al., 2019). Each network architecture (2, 10, 20, 40, or 60 hidden neurons) is trained with 10 different random parameter initializations and 5-fold cross-validation resulting in a total of 250 individual trained networks (5 architectures×10 initializations×5 cross-validation). These 250 trained networks are used as an ensemble with 50 networks having at least 360 parameters (180 inputs×2 neurons), 50 networks having at least 1800 parameters (180 inputs×10 neurons), 50 networks having at least 3600 parameters (180 inputs×20 neurons), 50 networks having at least 7200 parameters (180 inputs×40 neurons), and 50 networks having at least 10,800 parameters (180 inputs×60 neurons). Thus, the ensemble of 250 networks in NetMHCIIpan-4.0 consists of at least 1,188,000 parameters that must be evaluated with at least 1,188,000 arithmetic operations for computing peptide-MHC binding.

[0082] In some embodiments, computational methods used to predict either MHC class I (e.g., MHCflurry, NetMHCpan) or class II (e.g., NetMHCIIpan) peptide-HLA binding scores or peptide-HLA immunogenicity metrics are based upon data from experimental mass spectrometry observations of peptides bound by MHC molecules. In some embodiments, computational methods used to predict either MHC class I (e.g., MHCflurry, NetMHCpan) or class II (e.g., NetMHCIIpan) peptide-HLA binding scores or peptide-HLA immunogenicity metrics are based upon data from experimental observations of peptide-MHC binding affinity. In some embodiments, experimental observations of peptide-MHC binding affinity or immunogenicity, including mass spectrometry measurements of peptide-HLA binding and measurements of T cell activation, can be found in databases such as the Immune Epitope Database (IEDB) (Vita et al., 2018). The output of MHCflurry 2.0 (O'Donnell et al., 2020, incorporated by reference in its entirety herein) is based upon 493,473 mass spectrometry measurements of peptide-HLA binding, and 219,596 affinity measurements of peptide-HLA binding. The output of NetMHCpan-4.1 (Reynisson et al., 2020) is based upon 665,492 mass spectrometry measurements of peptide-HLA binding, and 52,402 affinity measurements of peptide-HLA binding. The output of NetMHCIIpan-4.0 (Reynisson et al., 2020) is based upon 381,066 mass spectrometry measurements of peptide-HLA binding, and 44,861 affinity measurements of peptide-HLA binding.

[0083] A peptide is displayed by an MHC molecule when it binds within the groove of the MHC molecule and is transported to the cell surface where it can be recognized by a T cell receptor. A target peptide refers to a foreign peptide or a self-peptide. In some embodiments, a peptide that is part of the normal proteome in a healthy individual is a self-peptide, and a peptide that is not part of the normal proteome is a foreign peptide. In some embodiments, target peptides can be part of the normal proteome that exhibit aberrant expression (e.g., cancer-testis antigens such as NY-ESO-1). Foreign peptides can be generated by mutations in normal self-proteins in tumor cells that create epitopes called neoantigens, or by pathogenic infections. In some embodiments, a neoantigen is any subsequence of a human protein, where the subsequence contains one or more altered amino acids or protein modifications that do not appear in a healthy individual. Therefore, in this disclosure, foreign peptide refers to an amino acid sequence encoding a fragment of a target protein/peptide (or a full-length protein/peptide), the target protein/peptide consisting of a neoantigen protein, a pathogen proteome, or any other undesired protein that is non-self and is expected to be bound and displayed by an HLA allele.

[0084] The SARS-CoV proteins Spike glycoprotein (S), Envelope small membrane protein (E), Membrane protein (M), Nucleoprotein (N), ORF1a, ORF1b, ORF3a, ORF6, ORF7a, ORF8, and ORF10 are part of the SARS-CoV proteome, and their sequences vary by COVID strain and COVID strain variants. One example virus is the SARS-CoV-2 virus NCBI Taxon ID 2697049 (UniProt Proteome ID UP000464024). Another example virus is the SARS-CoV-1 virus NCBI Taxon ID 2901879 (UniProt Proteome ID UP000000354). In some embodiments, we consider multiple protein sequences from different SARS-CoV-2 variants, and the methods described are not restricted to specific strains or pathogen proteins. In some embodiments, the virus is severe acute respiratory syndrome coronavirus 2 (SARS-CoV-2). In some embodiments, the virus is Severe acute respiratory syndrome coronavirus 1 (SARS-CoV-1). In some embodiments, the Coronavirus disease is Coronavirus disease 2019 (COVID-19). In some embodiments, the Coronavirus disease is severe acute respiratory syndrome (SARS). Peptides that are conserved across SARS-CoV strains or strain variants can be used in compositions for prophylaxis or therapeutic benefit against the strains or strain variants.

[0085] A challenge for the design of peptide vaccines is the diversity of human MHC alleles (HLA alleles) that each have specific preferences for the peptide sequences they will display. The Human Leukocyte Antigen (HLA) loci, located within the MHC, encode the HLA class I and class II molecules. There are three classical class I loci (HLA-A, HLA-B, and HLA-C) and three loci that encode class II molecules (HLA-DR, HLA-DQ, and HLA-DP). An individual's HLA type describes the alleles they carry at each of these loci. Peptides of length of between about 8 and about 11 residues can bind to HLA class I (or MHC class I) molecules whereas those peptides of length of between about 13 and about 25 residues bind to HLA class II (or MHC class II) molecules (Rist et al., 2013; Chicz et al., 1992). Human populations that originate from different geographies have differing frequencies of HLA alleles, and these populations exhibit linkage disequilibrium between HLA loci that result in population specific haplotype frequencies. In some embodiments, methods are disclosed for creating effective vaccines that include consideration of the HLA allelic frequency in the target population, as well as linkage disequilibrium between HLA genes to achieve a set of peptides that is likely to be robustly displayed.

[0086] The present disclosure provides for compositions, systems, and methods of vaccine designs that produce immunity to single or multiple targets. In some embodiments, a target is a neoantigen protein sequence, a pathogen proteome, or any other undesired protein sequence that is non-self and is expected to be bound and displayed by an HLA molecule (also referred to herein as an HLA allele). When a target is present in an individual, it may result in multiple peptide sequences that are displayed by a variety of HLA alleles. In some embodiments, it may be desirable to create a vaccine that includes selected self-peptides, and thus these selected self-peptides are considered to be the target peptides for this purpose.

[0087] The term peptide-HLA binding is defined to be the binding of a peptide to an HLA allele, and can either be computationally predicted, experimentally observed, or computationally predicted using experimental observations. The metric of peptide-HLA binding can be expressed as affinity, percentile rank, binary at a predetermined threshold, probability, or other metrics as are known in the art. The term peptide-HLA immunogenicity metric is defined as the activation of T cells based upon their recognition of a peptide when bound by an HLA allele. The term peptide-HLA immunogenicity score is another term for a peptide-HLA immunogenicity metric, and the terms are interchangeable. A peptide-HLA immunogenicity metric can vary from individual to individual, and the metric for peptide-HLA immunogenicity can be expressed as a probability, a binary indicator, or other metric that relates to the likelihood that a peptide-HLA combination will be immunogenic. In some embodiments, peptide-HLA immunogenicity is defined as the induction of immune tolerance based upon the recognition of a peptide when bound by an HLA allele. A peptide-HLA immunogenicity metric can be computationally predicted, experimentally observed, or computationally predicted using experimental observations. In some embodiments, a peptide-HLA immunogenicity metric is based only upon peptide-HLA binding, since peptide-HLA binding is necessary for peptide-HLA immunogenicity. In some embodiments, peptide-HLA immunogenicity data or computational predictions of peptide-HLA immunogenicity can be included and combined with scores for peptide display in the methods disclosed herein. One way of combining the scores is using immunogenicity data for peptides assayed for immunogenicity in diseased or vaccinated individuals and assigning peptides to the HLA allele that displayed them in the individual by choosing the HLA allele that computational methods predict has the highest likelihood of display. For peptides that are not experimentally assayed, computational predictions of display can be used. In some embodiments, different computational methods of predicting peptide-HLA immunogenicity or peptide-HLA binding can be combined (Liu et al., 2020b). For a given set of peptides and a set of HLA alleles, the term peptide-HLA hits is the number of unique combinations of peptides and HLA alleles that exhibit peptide-HLA immunogenicity or binding at a predetermined threshold. For example, a peptide-HLA hit of 2 can mean that one peptide is predicted to be bound (or trigger T cell activation) by two different HLA alleles, two peptides are predicted to be bound (or trigger T cell activation) by two different HLA alleles, or two peptides are predicted to be bound (or trigger T cell activation) by the same HLA allele. For a given set of peptides and HLA frequencies, HLA haplotype frequencies, or HLA diplotype frequencies, the expected number of peptide-HLA hits is the average number of peptide-HLA hits in each set of HLAs that represent an individual, weighted by their frequency of occurrence.

[0088] Because immunogenicity may vary from individual to individual, one method to increase the probability of vaccine efficacy is to use a diverse set of target peptides (e.g., at least two peptides) to increase the chances that some subset of them will be immunogenic in a given individual. Prior research using mouse models has shown that most MHC displayed peptides are immunogenic, but immunogenicity varies from individual to individual as described in Croft et al. (2019). In some embodiments, experimental peptide-HLA immunogenicity data are used to determine which target peptides and their modifications will be effective immunogens in a vaccine.

[0089] Considerations for the design of peptide vaccines are outlined in Liu et al. (2020a) and (Liu et al., 2020b) and U.S. Pat. Nos. 11,058,751 and 11,161,892, which are incorporated by reference in their entireties herein.

[0090] Certain target peptides may not bind with high affinity to a wide range of HLA molecules. To increase the binding of target peptides to HLA molecules, their amino acid composition can be altered to change one or more anchor residues or other residues. In some embodiments, to increase the immunogenicity of a target peptide when displayed by HLA molecules, a target peptide's amino acid composition can be altered to change one or more residues. Anchor residues are amino acids that interact with an HLA molecule and have the largest influence on the affinity of a peptide for an HLA molecule. Peptides with one or more altered amino acid residues are called heteroclitic peptides. In some embodiments, heteroclitic peptides include target peptides with residue modifications at anchor positions. In some embodiments, heteroclitic peptides include target peptides with residue modifications at non-anchor positions. In some embodiments, heteroclitic peptides include target peptides with residue modifications that include unnatural amino acids and amino acid derivatives. Modifications to create heteroclitic peptides can improve the binding of peptides to both MHC class I and MHC class II molecules, and the modifications required can be both peptide and MHC class specific. Since peptide anchor residues face the MHC molecule groove, they are less visible than other peptide residues to T cell receptors. Thus, heteroclitic peptides with anchor residue modifications have been observed to induce a T cell response where the stimulated T cells also respond to unmodified peptides. It has been observed that the use of heteroclitic peptides in a vaccine can improve a vaccine's effectiveness (Zirlik et al., 2006). In some embodiments, the immunogenicity of heteroclitic peptides are experimentally determined and their ability to activate T cells that also recognize the corresponding base (also called seed) peptide of the heteroclitic peptide is determined, as is known in the art (Houghton et al., 2007). In some embodiments, these assays of the immunogenicity and cross-reactivity of heteroclitic peptides are performed when the heteroclitic peptides are displayed by specific HLA alleles.

### Peptide Vaccines to Induce Immunity to One or More Targets

[0091] In some embodiments, a method is provided for formulating peptide vaccines using a single vaccine design for one or more targets. In some embodiments, a single target is a foreign protein with a specific mutation (e.g., KRAS G12D). In some embodiments, a single target is a self-protein (e.g., a protein that is overexpressed in tumor cells such as cancer/testis antigens). In some embodiments, a single target is a pathogen protein (e.g., a protein contained in a viral proteome). In some embodiments, multiple targets can be used (e.g., different SARS-CoV proteins from the same or from different strains or variants).

[0092] In some embodiments, the method includes extracting peptides to construct a candidate set from all target proteome sequences (e.g., entire KRAS G12D protein) as described in Liu et al. (2020a).

[0093] FIGS. 1 and 2 depict flow charts for example vaccine design methods that can be used for MHC class I or MHC class II vaccine design. A Candidate Peptide Set (see FIGS. 1 and 2) is comprised of target peptides extracted by windowing an input protein sequence. In some embodiments, extracted target peptides are of amino acid length of between about 8 and about 10 (e.g., for MHC class I binding (Rist et al., 2013)). In some embodiments, the extracted target peptides presented by MHC class I molecules are longer than 10 amino acid residues, such as 11 residues (Trolle et al., 2016). In some embodiments, extracted target peptides are of length between about 13 and about 25 (e.g., for class II binding (Chicz et al., 1992)). In some embodiments, sliding windows of various size ranges described herein are used over the entire proteome. In some embodiments, other target peptide lengths for MHC class I and class IT sliding windows can be utilized. In some embodiments, computational predictions of proteasomal cleavage are used to filter or select peptides in the candidate set. One computational method for predicting proteasomal cleavage is described by Nielsen et al. (2005). In some embodiments, peptide mutation rates, glycosylation, cleavage sites, or other criteria can be used to filter peptides as described in Liu et al. (2020a). In some embodiments, peptides can be filtered based upon evolutionary sequence variation above a predetermined threshold. Evolutionary sequence variation can be computed with respect to other species, other pathogens, other pathogen strains, or other related organisms. In some embodiments, a first peptide set is the candidate set.

[0094] As shown in FIGS. 1-2, in some embodiments, the next step of the method includes scoring the target peptides in the candidate set for peptide-HLA binding to all considered HLA alleles as described in Liu et al. (2020a) and Liu et al. (2020b). In some embodiments, a first peptide set is the candidate set after scoring the target peptides. Scoring can be accomplished for human HLA molecules, mouse H-2 molecules, swine SLA molecules, or MHC molecules of any species for which prediction algorithms are available or can be developed. Thus, vaccines targeted at non-human species can be designed with the method. Scoring metrics can include the affinity for a target peptide to an HLA allele in nanomolar, eluted ligand, presentation, and other scores that can be expressed as percentile rank or any other metric. The candidate set may be further filtered to exclude peptides whose predicted binding cores do not contain a particular pathogenic or neoantigen target residue of interest or whose predicted binding cores contain the target residue in an anchor position. The candidate set may also be filtered for target peptides of specific lengths, such as length 9 for MHC class I, for example. In some embodiments, scoring of target peptides is accomplished with experimental data or a combination of experimental data and computational prediction methods. When computational models are unavailable to make peptide-HLA binding predictions for particular (peptide, HLA) pairs, the binding value for such pairs can be defined by the mean, median, minimum, or maximum immunogenicity value taken over supported pairs, a fixed value (such as an indication of no binding), or inferred using other techniques, including a function of the prediction of the most similar (peptide, HLA) pair available in the scoring model.

[0095] In some embodiments, a base set (also referred to as seed set herein) is constructed by selecting peptides from the scored candidate set using individual peptide-HLA binding or immunogenicity criteria (e.g., first peptide set) (FIG. 1). In some embodiments, since a given peptide has multiple peptide-HLA scores, the selection can be based on the peptide-HLA binding score or peptide-HLA immunogenicity metric with the best affinity or highest immunogenicity (e.g., predicted to bind the strongest or activate T cells the most for a given HLA allele). The criteria used for scoring peptide-HLA binding during the scoring procedure can accommodate different goals during the base set selection and vaccine design phases. For example, a target peptide with peptide-HLA binding affinities of 500 nM may be displayed by an individual that is diseased, but at a lower frequency than a target peptide with a 50 nM peptide-HLA binding affinity. During the combinatorial design phase of a vaccine, a more constrained affinity criteria may be used (e.g., when selecting a third peptide set, the Vaccine for Target(s) in FIGS. 1 and 2), such a 50 nM, to increase the probability that a vaccine peptide will be found and displayed by HLA molecules. In some embodiments, a relatively less constrained threshold (e.g., less than about 1000 nM or less than about 500 nM) of peptide-HLA immunogenicity or peptide-HLA binding is used as a first threshold for filtering candidate peptide-HLA scores (the first Peptide Scoring and Score Filtering step in FIGS. 1 and 2) and a relatively more constrained second threshold (e.g., less than about 50 nM) is used for filtering expanded set peptide-HLA scores (the second Peptide Filtering and Scoring step in FIGS. 1 and 2) for their scores for specific HLA alleles. In some embodiments, specific peptide-HLA scores are not used for modified peptides for a given HLA for vaccine design when their unmodified counterpart peptide does not pass the first less constrained threshold. This filtering of peptide-HLA scores is based on the observation that peptides that are not immunogenic enough for vaccine inclusion may be antigenic (meet the first filtering threshold) and thus recognized by T cell clonotypes expanded by a vaccine. A peptide is antigenic when it is recognized by a T cell receptor and results in a response such as CD8+ T cell cytotoxicity or CD4+ cell activation. Derivatives of an antigenic peptide may be strongly immunogenic, included in a vaccine, and thus activate and expand T cells that recognize the antigenic peptide. The expansion of T cells that recognize an unmodified antigenic peptide can provide an immune response that contributes to disease control. In some embodiments, peptides are scored for third peptide set (Vaccine for Target(s) in FIGS. 1 and 2) potential inclusion that have peptide-HLA binding affinities less than about 500 nM. In some embodiments, peptides are selected for the base set that have peptide-HLA binding affinities less than about 1000 nM for at least one HLA allele. Alternatively, predictions of peptide-HLA immunogenicity can be used to qualify target peptides for base set inclusion. In some embodiments, experimental observations of the immunogenicity of peptides in the context of their display by HLA alleles or experimental observation of the binding of peptides to HLA alleles can be used to score peptides for binding to HLA alleles or peptide-HLA immunogenicity.

[0096] In some embodiments, experimental observations of the display of peptides by specific HLA alleles in tumor cells can be used to score peptides for peptide-HLA binding or peptide-HLA immunogenicity. In some embodiments, experimental observations of the display of peptides tumor cells by a specific HLA allele can be used to score peptides for peptide-HLA binding or peptide-HLA immunogenicity for that HLA allele. In some embodiments, experimental observations of the display of peptides tumor cells can be used to score peptides for peptide-HLA binding or peptide-HLA immunogenicity, with the HLA allele(s) for a specific observed peptide selected from the HLA alleles present in the tumor that meet a predicted peptide-HLA binding or immunogenicity threshold. In some embodiments, mass spectrometry is used to experimentally determine the display of peptides by tumor cells as described by Bear et al. (2021) or Wang et al. (2019) and these data are used to score for peptide-HLA binding or peptide-HLA immunogenicity. In some embodiments, mass spectrometry is used to experimentally determine the display of peptides by tumor cells, and these experimental data are used to qualify the inclusion of base set (seed set) peptides for one or more HLA alleles for a vaccine. In some embodiments, mass spectrometry is used to experimentally determine the display of a peptide by tumor cells, and these experimental data are used to exclude peptide-HLA binding scores or peptide-HLA immunogenicity scores for the peptide when the peptide is not observed to be displayed by an HLA allele by mass spectrometry. In some embodiments, mass spectrometry is used to experimentally determine the display of peptides by tumor cells in an individual, and these experimental data are used to qualify the inclusion of base set (seed set) peptides for that individual for one or more HLA alleles. In some embodiments, mass spectrometry is used to experimentally determine the display of a peptide by tumor cells in an individual, and these experimental data are used to exclude peptide-HLA binding scores or peptide-HLA immunogenicity scores for the peptide when the peptide is not observed to be displayed by an HLA allele by mass spectrometry. In some embodiments, computational predictions of the immunogenicity of a peptide in the context of display by HLA alleles can used for scoring such as the methods of Ogishi et al. (2019) or Bulik-Sullivan et al. (2019).

[0097] In some embodiments, a peptide-HLA score or a peptide-HLA immunogenicity score for a first peptide in the base set (seed set) for a given HLA allele is eliminated and not considered during vaccine design if the wild-type peptide corresponding to the first peptide (e.g. the unmutated naturally occurring form for the peptide or a peptide in the respective species within a defined sequence edit distance) has a peptide-HLA score or a peptide-HLA immunogenicity score for the same HLA allele within a defined threshold. The threshold can be based upon the difference of the scores of the first peptide and the wild-type peptide, the ratio of the scores of the first peptide and the wild-type peptide, the score of the wild-type peptide, or other metrics. The defined threshold can be either greater than or less than a specified value. In some embodiments, the threshold is defined so that the wild-type peptide is not predicted to be presented. In some embodiments, when a peptide-HLA score or peptide-HLA immunogenicity score is eliminated for a first peptide during vaccine design, then peptide-HLA scores or peptide-HLA immunogenicity scores for all of its derivatives (e.g., heteroclitic peptide derivatives) for the same HLA allele are also eliminated and not considered during vaccine design.

[0098] In some embodiments, the method further includes running the OptiVax-Robust algorithm as described in Liu et al. (2020a) using the HLA haplotype frequencies of a population on the scored candidate set to construct a base set (also referred to as seed set herein) of target peptides (FIG. 2). In some embodiments, HLA diplotype frequencies can be provided to OptiVax. OptiVax-Robust includes algorithms to eliminate peptide redundancy that arises from the sliding window approach with varying window sizes, but other redundancy elimination measures can be used to enforce minimum edit distance constraints between target peptides in the candidate set. The size of the seed set is determined by a point of diminishing returns of population coverage as a function of the number of target peptides in the seed set. Other criteria can also be used, including a minimum number of vaccine target peptides, maximum number of vaccine target peptides, and desired predicted population coverage. In some embodiments, a predetermined population coverage is less than about 0.4, between about 0.4 and 0.5, between about 0.5 and 0.6, between about 0.6 and 0.7, between about 0.7 and 0.8, between about 0.8 and 0.9, or greater than about 0.9. Another possible criterion is a minimum number of expected peptide-HLA binding hits in each individual. In alternate embodiments, the method further includes running the OptiVax-Unlinked algorithm as described in Liu et al. (2020a) instead of OptiVax-Robust.

[0099] The OptiVax-Robust method uses binary predictions of peptide-HLA immunogenicity, and these binary predictions can be generated as described in Liu et al. (2020b). The OptiVax-Unlinked method uses the probability of target peptide binding to HLA alleles and can be generated as described in Liu et al. (2020a). In some embodiments, OptiVax-Unlinked and EvalVax-Unlinked are used with the probabilities of peptide-HLA immunogenicity. Either method can be used for the purposes described herein, and thus the term “OptiVax” refers to either the Robust or Unlinked method. In some embodiments, the observed probability of peptide-HLA immunogenicity in experimental assays can be used as the probability of peptide-HLA binding in EvalVax-Unlinked and OptiVax-Unlinked. In some embodiments, the HLA haplotype or HLA allele frequencies of a population provided to OptiVax for vaccine design describe the world's population. In alternative embodiments, the HLA haplotype or HLA allele frequencies of a population provided to OptiVax for vaccine design are specific to a geographic region. In alternative embodiments, the HLA haplotype or HLA allele frequencies of a population provided to OptiVax for vaccine design are specific to an ancestry. In alternative embodiments, the HLA haplotype or HLA allele frequencies of a population provided to OptiVax for vaccine design are specific to a race. In alternative embodiments, the HLA haplotype or HLA allele frequencies of a population provided to OptiVax for vaccine design are specific to individuals with risk factors such as genetic indicators of risk, age, exposure to chemicals, alcohol use, chronic inflammation, diet, hormones, immunosuppression, infectious agents, obesity, radiation, sunlight, or tobacco use. In alternative embodiments, the HLA haplotype or HLA allele frequencies of a population provided to OptiVax for vaccine design are specific to individuals that carry certain HLA alleles. In alternative embodiments, the HLA diplotypes provided to OptiVax for vaccine design describe a single individual, and are used to design an individualized vaccine.

[0100] In some embodiments, the base (or seed) set of target peptides (e.g., first peptide set) that results from OptiVax application to the candidate set of target peptides describes a set of unmodified target peptides that represent a possible compact vaccine design (Seed Set in FIG. 2). A base peptide is a target peptide that is included in the base or seed peptide set (e.g., first peptide set). In some embodiments, the seed set (e.g., first peptide set) is based upon filtering candidate peptide scores by predicted or observed affinity or immunogenicity with respect to HLA molecules (Seed Set in FIG. 1). However, to improve the display of the target peptides in a wide range of HLA haplotypes as possible, some embodiments include modifications of the seed (or base) set. In some embodiments, experimental assays can be used to ensure that a modified seed (or base) peptide activates T cells that also recognize the base/seed peptide.

[0101] For a given target peptide, the optimal anchor residue selection may depend upon the HLA allele that is binding to and displaying the target peptide and the class of the HLA allele (MHC class I or class II). A seed peptide set (e.g., first peptide set) can become an expanded set by including anchor residue modified peptides of either MHC class I or II peptides (FIGS. 1-2). Thus, one aspect of vaccine design is considering how to select a limited set of heteroclitic peptides that derive from the same target peptide for vaccine inclusion given that different heteroclitic peptides will have different and potentially overlapping population coverages.

[0102] In some embodiments, all possible anchor modifications for each base set of target peptide are considered. There are typically two anchor residues in peptides bound by MHC class I molecules, typically at positions 2 and 9 for 9-mer peptides. In some embodiments, anchors for 8-mers, 10-mers, and 11-mers are found at positions 2 and n, where n is the last position (8, 10, and 11, respectively). For MHC class I molecules, the last position n is called the “C” position herein for carboxyl terminus. In some embodiments, at each anchor position, 20 possible amino acids are attempted in order to select the best heteroclitic peptides. Thus, for MHC class I binding, 400 (i.e., 20 amino acids by 2 positions=202) minus 1 heteroclitic peptides are generated for each base target peptide. There are typically four anchor residues in peptides bound by MHC class II molecules, typically at positions 1, 4, 6, and 9 of the 9-mer binding core. Thus, for MHC class II binding there are 160,000 (i.e., 20 amino acids by 4 positions=204) minus 1 heteroclitic peptides generated for each base target peptide. In some embodiments, more than two (MHC class I) or four (MHC class II) positions are considered as anchors. Other methods, including Bayesian optimization, can be used to select optimal anchor residues to create heteroclitic peptides from each seed (or base) set peptide. Other methods of selecting optimal anchor residues are presented in “Machine learning optimization of peptides for presentation by class II MHCs” by Dai et al. (2020), incorporated in its entirety herein. In some embodiments, the anchor positions are determined by the HLA allele that presents a peptide, and thus the set of heteroclitic peptides includes for each set of HLA specific anchor positions, all possible anchor modifications.

[0103] In some embodiments, for all of the target peptides in the base/seed set, new peptide sequences with all possible anchor residue modifications (e.g., MHC class I or class II) are created resulting in a new heteroclitic base set (Expanded set in FIGS. 1-2) that includes all of the modifications. In some embodiments, anchor residue modifications of a peptide are not included in the heteroclitic base set if one or more of the peptide's anchor residue positions contains a substitution mutation that distinguishes the peptide from a self-peptide. In some embodiments, anchor residue modifications of a base/seed peptide are only included in the heteroclitic base set for peptide positions that do not contain a substitution mutation that distinguishes the base/seed peptide from a self-peptide. In some embodiments, anchor residue modifications of a peptide are not included in the heteroclitic base set when one or more of the peptide's mutations does not occur between a pair of its adjacent anchor residues. In some embodiments, for all of the target peptides in the base/seed set, new peptide sequences with anchor residue modifications (e.g., MHC class I or class II) at selected anchor locations are created resulting in a new heteroclitic base set (Expanded set in FIGS. 1-2) that includes the selected modifications. In some embodiments, the anchor residue positions used for modifying peptides are selected from anchor residue positions determined by the HLA alleles considered during vaccine evaluation. In some embodiments, the heteroclitic base set (Expanded set in FIGS. 1-2) also includes the original seed (or base) set (Seed Peptide Set in FIGS. 1-2). In some embodiments, the heteroclitic base set includes amino acid substitutions at non-anchor residues. In some embodiments, modifications of base peptide residues is accomplished to alter binding to T cell receptors to improve therapeutic efficacy (Candia, et al. 2016). In some embodiments, the heteroclitic base set includes amino acid substitutions of non-natural amino acid analogs. The heteroclitic base set is scored for HLA affinity, peptide-HLA immunogenicity, or other metrics as described herein (another round of Peptide Scoring and Score Filtering as shown in FIGS. 1-2). In some embodiments, the scoring predictions may be further updated for pairs of heteroclitic peptide and HLA allele, eliminating pairs where a heteroclitic peptide has a seed (or base) peptide from which it was derived that is not predicted to be displayed by the HLA allele at a specified threshold of peptide-HLA binding score or a specified peptide-HLA immunogenicity metric. In some embodiments, the peptide-HLA scores may also be filtered to ensure that predicted binding cores of the heteroclitic peptide displayed by a particular HLA allele align exactly in position with the binding cores of the respective seed (or base) set target peptide for that HLA allele. In some embodiments, the scoring predictions are filtered for an HLA allele to ensure that the heteroclitic peptides considered for that HLA allele are only modified at anchor positions determined by that HLA allele. Scoring produces a metric of peptide-HLA immunogenicity for peptides and HLA alleles that can be either binary, a probability of immunogenicity, or other metric of immunogenicity such as peptide-HLA affinity or percent rank, and can be based on computational predictions, experimental observations, or a combination of both computational predictions and experimental observations. In some embodiments, probabilities of peptide-HLA immunogenicity are utilized by OptiVax-Unlinked. In some embodiments, heteroclitic peptides are included in experimental assays such as MIRA (Klinger et al., 2015) or ELISPOT to determine their peptide-HLA immunogenicity metric with respect to specific HLA alleles. In some embodiments, the methods of Liu et al. (2020b), can be used to incorporate MIRA data for heteroclitic peptides into a model of peptide-HLA immunogenicity. In some embodiments, peptide-HLA immunogenicity metrics of heteroclitic peptides are experimentally determined and their ability to activate T cells that also recognize the corresponding seed (or base) peptide of the heteroclitic peptide is performed as is known in the art to qualify the heteroclitic peptide for vaccine inclusion (e.g., Houghton et al., 2007). In some embodiments, these assays of the immunogenicity and cross-reactivity of heteroclitic peptides are performed when the heteroclitic peptides are displayed by specific HLA alleles.

[0104] In some embodiments, experimental observations of the display of heteroclitic peptides by specific HLA alleles in cells can be used to score peptides for peptide-HLA binding or peptide-HLA immunogenicity. In some embodiments, mass spectrometry is used to experimentally determine the display of heteroclitic peptides by cells as described by Bear et al. (2021) or Wang et al. (2019) and these data are used to score for peptide-HLA binding or peptide-HLA immunogenicity. In some embodiments, mass spectrometry is used to experimentally determine the display of heteroclitic peptides by cells, and these experimental data are used to qualify the inclusion of heteroclitic peptides for inclusion in a vaccine. In some embodiments, mass spectrometry is used to experimentally determine the display of a peptide by tumor cells, and these experimental data are used to exclude peptide-HLA binding scores or peptide-HLA immunogenicity scores for the peptide when the peptide is not observed to be displayed by an HLA allele by mass spectrometry. In some embodiments, mass spectrometry is used to experimentally determine the display of a heteroclitic peptide by cells with an HLA allele found in an individual, and these experimental data are used to qualify the inclusion of the heteroclitic peptide for inclusion in a vaccine for the individual. In some embodiments, mass spectrometry is used to experimentally determine the display of a peptide by tumor cells in an individual, and these experimental data are used to exclude peptide-HLA binding scores or peptide-HLA immunogenicity scores for the peptide when the peptide is not observed to be displayed by an HLA allele by mass spectrometry. In some embodiments, computational predictions of the immunogenicity of a heteroclitic peptide in the context of display by HLA alleles can used for scoring such as the methods of Ogishi et al. (2019) or Bulik-Sullivan et al. (2019).

[0105] In some embodiments, a peptide in the heteroclitic base set is removed if (1) one of its anchor positions for an HLA allele corresponds to the location of a mutation in the base/seed peptide from which it was derived that distinguishes the base/seed peptide from a self-peptide, and (2) if the peptide-HLA binding or peptide-HLA immunogenicity of the self-peptide is stronger than a specified threshold for self-peptide binding or immunogenicity. This eliminates peptides in the heteroclitic base set that may cross-react with self-peptides as a result of sharing TCR facing residues with self-peptides. In some embodiments, the threshold for self-peptide binding is between approximately 500 nM to 1000 nM.

[0106] In some embodiments, redundant peptides in the heteroclitic base set are removed. In some embodiments, a redundant peptide is a first heteroclitic peptide that has peptide-HLA immunogenicity scores or peptide-HLA binding scores that are less immunogenic for all scored HLAs than a second heteroclitic peptide in the heteroclitic base set, where both the first and second heteroclitic peptides are derived from the same base (or seed) peptide. In some embodiments, peptide redundancy is determined by only comparing peptide-HLA immunogenicity scores or peptide-HLA binding scores for HLA alleles where the peptide-HLA immunogenicity scores or peptide-HLA binding scores for both peptides for an HLA allele are more immunogenic than a given threshold (e.g., 50 nM for binding). In some embodiments, a redundant peptide is a first heteroclitic peptide that has an average peptide-HLA immunogenicity score or peptide-HLA binding score that is less immunogenic than the average peptide-HLA immunogenicity score or peptide-HLA binding score of a second heteroclitic peptide in the heteroclitic base set, where both the first and second heteroclitic peptides are derived from the same base (or seed) peptide, and the average scores are computed for HLA alleles where the peptide-HLA immunogenicity scores or peptide-HLA binding scores for both peptides for an HLA allele are more immunogenic than a given threshold (e.g., 50 nM for binding). In some embodiments, a redundant peptide is a first heteroclitic peptide that has a weighted peptide-HLA immunogenicity score or peptide-HLA binding score that is less immunogenic than the weighted peptide-HLA immunogenicity score or peptide-HLA binding score of a second heteroclitic peptide in the heteroclitic base set, where both the first and second heteroclitic peptides are derived from the same base (or seed) peptide, and where the weighting is determined by the frequency of the HLA allele in a human population, and the weighted scores are computed for HLA alleles where the peptide-HLA immunogenicity scores or peptide-HLA binding scores for both peptides for an HLA allele are more immunogenic that a given threshold (e.g., 50 nM for binding).

[0107] In some embodiments, the next step involves scoring the heteroclitic base set (the second peptide set) and filtering the resulting scores to create a second peptide set by comparing the peptide-HLA immunogenicity scores or peptide-HLA binding scores of the peptides for one or more HLA alleles to a threshold. In some embodiments, an affinity criterion of about 50 nM is used to increase the probability that a vaccine peptide will be found and displayed by HLA molecules. In some embodiments, the affinity criteria is more constrained than 50 nM (i.e., <50 nM). In some embodiments, the affinity criteria is more constrained than about 500 nM (i.e., <500 nM). In some embodiments, individual peptide-HLA binding scores or immunogenicity metrics are determined and thus a peptide may be retained as long as it meets the criteria for at least one HLA allele, and only peptide-HLA scores that meet the criteria are considered for vaccine design.

[0108] In some embodiments, the next step involves inputting the second peptide set to OptiVax to select a compact set of vaccine peptides that maximizes predicted vaccine performance (Vaccine Performance Optimization; FIGS. 1-2). In some embodiments, predicted vaccine performance is a function of expected peptide-HLA binding affinity (e.g., a function of the distribution of peptide-HLA binding affinities across all peptide-HLA combinations for a given peptide set, or weighted by the occurrence of the HLA alleles in a population or individual). In some embodiments, predicted vaccine performance is the expected population coverage of a vaccine. In some embodiments, predicted vaccine performance is the expected number peptide-HLA hits produced by a vaccine in a population or individual. In some embodiments, predicted vaccine performance requires a minimum expected number of peptide-HLA hits (e.g., 1, 2, 3, 4, 5, 6, 7, 8, or more) produced by a vaccine. In some embodiments, predicted vaccine performance is a function of population coverage and expected number of peptide-HLA hits desired produced by a vaccine. In some embodiments, predicted vaccine performance is a metric that describes the overall immunogenic properties of a vaccine where all of the peptides in the vaccine are scored for peptide-HLA immunogenicity for two or more HLA alleles (e.g., three or more HLA alleles). In some embodiments, predicted vaccine performance excludes immunogenicity contributions by selected HLA alleles above a maximum number of peptide-HLA hits (e.g., 1, 2, 3, 4, 5, 6, 7, 8, or more). In some embodiments, predicted vaccine performance excludes immunogenicity contributions of individual HLA diplotypes above a maximum number of peptide-HLA hits (e.g., 1, 2, 3, 4, 5, 6, 7, 8, or more). In some embodiments, predicted vaccine performance is the fraction of covered HLA alleles, which is the expected fraction of HLA alleles in each individual that have a minimum number of peptides (e.g., 1, 2, 3, 4, 5, 6, 7, 8, or more) with predicted peptide-HLA immunogenicity produced by a vaccine. In some embodiments, predicted vaccine performance is the expected fraction of HLA alleles in a single individual that have a minimum number of peptides (e.g., 1, 2, 3, 4, 5, 6, 7, 8, or more) with predicted peptide-HLA immunogenicity produced by a vaccine.

[0109] In some embodiments, a vaccine is designed by the iterative selection of peptides from the heteroclitic base set (also referred to as Expanded set as shown in FIGS. 1-2) at progressively less stringent criteria for predicted peptide immunogenicity or display. In some embodiments, a peptide is retained if at least one of its peptide-HLA scores is not eliminated by the thresholds employed. In some embodiments, OptiVax is first used to design a vaccine with a desired vaccine performance with specific peptide qualification criteria (e.g., seed HLA-peptide scores from the candidate set must bind to at least one MHC molecule at 500 nM or stronger, and peptide-HLA scores from the expanded set must bind to at least one MHC molecule at 50 nM or stronger). The vaccine that results from this application of OptiVax is then used as the foundation for vaccine augmentation with less stringent criteria (e.g., seed peptide-HLA scores from the candidate set must bind to at least one MHC molecule at 1000 nM or stronger, and peptide HLA-scores from the expanded set must bind to at least one MHC molecule at 100 nM or stronger) to further improve the desired vaccine performance. Methods for vaccine augmentation are described in Liu et al. (2020b), incorporated by reference in its entirety herein. In some embodiments, multiple rounds of vaccine augmentation may be utilized. In some embodiments, the final augmented vaccine is the one selected.

[0110] In some embodiments, selection of peptide sets to meet a desired predicted vaccine performance can be accomplished by computational algorithms other than OptiVax. In some embodiments, integer linear programming or mixed-integer linear programming is employed for selecting peptide sets instead of OptiVax. One example of an integer programming method for peptide set selection is described by Toussaint et al. (2008), incorporated by reference in its entirety herein. An example solver for mixed-integer linear programming is Python-MIP that can be used in conjunction with Toussaint et al. (2008). A second example of methods for vaccine peptide selection is described in “Maximum n-times Coverage for Vaccine Design” by Liu et al. (2021), incorporated by reference in its entirety herein.

[0111] Predicted vaccine performance refers to a metric. Predicted vaccine performance can be expressed as a single numerical value, a plurality of numerical values, any number of non-numerical values, and a combination thereof. The value or values can be expressed in any mathematical or symbolic term and on any scale (e.g., nominal scale, ordinal scale, interval scale, or ratio scale).

[0112] A seed (or base) peptide and all of the modified peptides that are derived from that seed (or base) peptide comprise a single peptide family. In some embodiments, in the component of vaccine performance that is based on peptide-HLA immunogenicity for a given HLA allele, a maximum number of peptides (e.g., 1, 2, 3, 4, 5, 6, 7, 8, or more) that are in the same peptide family are given computational immunogenicity credit for that HLA allele. This limit on peptide family immunogenicity limits the credit caused by many modified versions of the same base peptide. In some embodiments, the methods described herein are included for running OptiVax with an EvalVax objective function that corresponds to a desired metric of predicted vaccine performance. In some embodiments, population coverage means the proportion of a subject population that presents one or more immunogenic peptides that activate T cells responsive to a seed (or base) target peptide. The metric of population coverage is computed using the HLA haplotype frequency in a given population such as a representative human population. In some embodiments, the metric of population coverage is computed using marginal HLA frequencies in a population. Maximizing population coverage means selecting a peptide set (either a base peptide set, a modified peptide set, or a combination of base and modified peptides; e.g., a first peptide set, second peptide set, or third peptide set) that collectively results in the greatest fraction of the population that has at least a minimum number (e.g., 1, 2, 3, 4, 5, 6, 7, 8, or more) of immunogenic peptide-HLA bindings based on proportions of HLA haplotypes in a given population (e.g., representative human population). In some embodiments, this process includes the OptiVax selection of heteroclitic peptides (as described in this disclosure) that activate T cells that respond to their corresponding seed (or base) peptide and the heteroclitic base peptides to improve population coverage. In some embodiments, the seed (or base) target peptides are always included in the final vaccine design. In some embodiments, peptides are only considered as candidates for a vaccine design (e.g., included in a first, second, and/or third peptide set) if they have been observed to be immunogenic in clinical data, animal models, or tissue culture models. In some embodiments, vaccine peptides are selected to be displayed by a peptide specific set of HLA class I or class II alleles, wherein for at least two peptides in a vaccine all of the peptide specific sets of HLA class I or class II alleles are not identical.

[0113] Although heteroclitic peptides are used as exemplary embodiments in this disclosure, any modified peptide could be used in place of a heteroclitic peptide. A modified peptide is a peptide that has one or more amino acid substitutions of a target base/seed peptide. The amino acid substitution could be located at an anchor position or any other non-anchor position.

[0114] In some embodiments, a candidate vaccine peptide (e.g., a base peptide or a modified peptide) is eliminated from vaccine inclusion if it activates T cells that recognize self-peptides (e.g., this can be achieved at the first and/or second round of Peptide Filtering and Sorting as shown in FIGS. 1-2). In some embodiments, a candidate vaccine peptide (e.g., a base peptide or a modified peptide) is computationally eliminated from vaccine inclusion if its outward facing amino acids when bound by an HLA allele are similar to outward facing self-peptide residues that are presented by the same HLA allele, where similarity can be defined by identity or defined similarity metrics such as BLOSUM matrices (BLOSUM matrices are known in the art). Testing a vaccine peptide for its ability to activate T cells that recognize self-peptides can be experimentally accomplished by the vaccination of animal models followed by ELISPOT or other immunogenicity assay or with human tissue protocols. In both cases, models with HLA alleles that present the vaccine peptide are used. In some embodiments, human primary blood mononuclear cells (PBMCs) are stimulated with a vaccine peptide, the T cells are allowed to grow, and then T cell activation with a self-peptide is assayed as described in Tapia-Calle et al. (2019) or other methods as known in the art. In some embodiments, the vaccine peptide is excluded from vaccine inclusion if the T cells are activated by the self-peptide. In some embodiments, computational predictions of the ability of a peptide to activate T cells that also recognize self-peptides can be utilized. These predictions can be based upon the modeling of the outward facing residues from the peptide-HLA complex and their interactions with other peptide residues. In some embodiments, a candidate vaccine peptide (e.g., a base peptide or a modified peptide) is eliminated from vaccine inclusion or experimentally tested for cross-reactivity if it is predicted to activate T cells that also recognize self-peptides based upon the structural similarity of the peptide-MHC complex of the candidate peptide (e.g., a base peptide or a modified peptide) and the peptide-MHC complex of a self-peptide. One method for the prediction of peptide-MHC structure is described by Park et al. (2013).

[0115] In some embodiments, the peptide-HLA binding score or peptide-HLA immunogenicity metric for a candidate heteroclitic vaccine peptide (e.g., a modified peptide) and HLA allele is eliminated from consideration during vaccine design if the candidate heteroclitic vaccine peptide does not activate T cells that recognize its corresponding base/seed target peptide (second round of Peptide Scoring and Score Filtering, FIGS. 1-2) for the given HLA allele. In some embodiments, a heteroclitic vaccine peptide (e.g., a modified peptide) is eliminated from a vaccine design if the candidate heteroclitic vaccine peptide does not activate T cells that recognize its corresponding base/seed target peptide (second round of Peptide Scoring and Score Filtering, FIGS. 1-2) for a given HLA allele. Testing a candidate heteroclitic peptide (e.g., a modified peptide) for its ability to activate T cells that recognize its corresponding seed (or base) target peptide with respect to the same HLA allele can be experimentally accomplished by the vaccination of animal models followed by ELISPOT or other immunogenicity assay or with human tissue protocols. In both cases, models with HLA alleles that present the heteroclitic peptide are used. In some embodiments, human PBMCs are stimulated with the heteroclitic peptide, the T cells are allowed to grow, and then T cell activation with the seed (or base) target peptide is assayed as described in Tapia-Calle et al. (2019) or using other methods known in the art. In some embodiments, computational predictions of the ability of a heteroclitic peptide to activate T cells that also recognize the corresponding seed (or base) target peptide can be utilized. These predictions can be based upon the modeling of the outward facing residues from the peptide-HLA complex and their interactions with other peptide residues. In some embodiments, the structural similarity of the peptide-HLA complex of a heteroclitic peptide and the peptide-HLA complex of the corresponding seed (or base) target is used to qualify heteroclitic peptides for vaccine inclusion or to require experimental immunogenicity testing before vaccine inclusion.

[0116] TCR Interface Divergence (TCRID) is the Least Root Mean Square Deviation of the difference between a first peptide's TCR facing residues' 3D positions and the corresponding residue positions of a second peptide with respect to a specific HLA allele. In some embodiments, other metrics are used for the TCRID instead of Least Root Mean Square Deviation. In some embodiments, other metrics are used for the TCRID that include position deviations in non-TCR facing residues and MHC residues from the specific HLA allele. In some embodiments, TCRID is used to predict if two peptides when displayed by a given HLA allele will activate the same T cell clonotypes. In some embodiments, FlexPepDock (London et al., 2011, incorporated by reference in its entirety herein) or DINC (Antunes et al., 2018, incorporated by reference in its entirety herein) in conjunction with the crystal structures of HLA molecules can be used to compute TCRID metrics for pairs of peptides given an HLA molecule. In some embodiments, TCRID is computed by (1) determining the 3D peptide-HLA structures for two different peptides bound by a specific HLA allele, (2) aligning the HLA alpha helices of the peptide-HLA structures, and (3) computing the Least Root Mean Square Deviation of the difference between the TCR facing residues of the two peptides with respect to the aligned alpha helix reference frame.

[0117] In some embodiments, the second Peptide Scoring and Score Filtering step in FIGS. 1 and 2 will eliminate the peptide-HLA binding or immunogenicity score for a heteroclitic peptide for a specific HLA allele when the HLA specific TCRID between the heteroclitic peptide and its corresponding base (or seed) peptide from which it was derived is over a first TCRID threshold. In some embodiments, the second Peptide Scoring and Score Filtering step in FIGS. 1 and 2 will eliminate all peptide-HLA binding or immunogenicity scores for a heteroclitic peptide when the HLA specific TCRID between the heteroclitic peptide and its corresponding unmutated self-peptide from which it was derived is under a second TCRID threshold. In some embodiments, the first Peptide Scoring and Score Filtering step in FIGS. 1 and 2 will eliminate all peptide-HLA binding or immunogenicity scores for a candidate peptide when the HLA specific TCRID between the peptide and its corresponding unmutated self-peptide is under a third TCRID threshold. In some embodiments, any of the TCRID thresholds are determined by experimentally observing or computationally predicting the cross-reactivity of TCR molecules to peptide-HLA complexes.

[0118] FIG. 3 shows predicted population coverage for a MHC class I vaccine by vaccine size for COVID. FIG. 4 shows predicted population coverage for a MHC class II vaccine by vaccine size for COVID.

[0119] OptiVax can be used to design a vaccine to maximize the fraction/proportion of the population whose HLA molecules are predicted to bind to and display at least p peptides from the vaccine. In some embodiments, this prediction (e.g., scoring) includes experimental immunogenicity data to directly predict at least p peptides will be immunogenic. The number p is input to OptiVax, and OptiVax can be run multiple times with varying values for p to obtain a predicted optimal target peptide set for different peptide counts p. Larger values of p will increase the redundancy of a vaccine at the cost of more peptides to achieve a desired population coverage. In some embodiments, it may not be possible to achieve a given population coverage given a specific heteroclitic base set. In some embodiments, the number p is a function of the desired size of a vaccine.

[0120] The methods described herein can be used to design separate vaccine formulations for MHC class I and class 11 based immunity.

[0121] In some embodiments, this procedure is used to create a vaccine for an individual. In some embodiments, the target peptides present in the individual are determined by sequencing the individual's tumor RNA or DNA, and identifying mutations that produce foreign peptides. One embodiment of this method is described in U.S. Pat. No. 10,738,355, incorporated in its entirety herein. In some embodiments, peptide sequencing methods are used to identify target peptides in the individual. One embodiment of this is described in U.S. Publication No. 2011/0257890. In some embodiments, the target peptides used for the individual's vaccine are selected when a self-peptide, foreign peptide, pathogen peptide or RNA encoding a self-peptide, foreign peptide, or pathogen peptide is observed in a specimen from the individual is present at a predetermined level. The target peptides in the individual are used to construct a vaccine as disclosed herein. For vaccine design, OptiVax is provided a diplotype comprising the HLA type of the individual. In an alternative embodiment, the HLA type of an individual is separated into multiple diplotypes with frequencies that sum to one, where each diplotype comprises one or more HLA alleles from the individual and a notation that the other allele positions should not be evaluated. The use of multiple diplotypes will cause OptiVax's objective function to increase the chance that immunogenic peptides will be displayed by all of the constructed diplotypes. This achieves the objective of maximizing the number of distinct HLA alleles in the individual that exhibit peptide-HLA immunogenicity and thus improves the allelic coverage of the vaccine in the individual.

[0122] FIG. 5 shows the predicted vaccine performance (predicted number of peptide-HLA hits) of ten example G12V MHC class I vaccines for a single individual with the MHC class I HLA diplotype HLA-A02:03, HLA-A11:01, HLA-B55:02, HLA-B58:01, HLA-C03:02, and HLA-C03:03. OptiVax was used to design ten G12V MHC class I vaccines for this HLA diplotype with peptide counts ranging from 1 to 10. For the results in FIG. 5, OptiVax was run with six synthetic diplotypes, each equally weighted, each with one HLA allele from the individual's HLA diplotype, and the other allele positions marked to not be evaluated.

### MHC Class I Vaccine Design Procedure

[0123] In some embodiments, MHC class I vaccine design procedures consist of the following computational steps.

[0124] In some embodiments, the inputs for the computation are:
[0125] P_{1 . . . n}: Peptide sequence (length n) containing the neoantigen(s) or pathogenic target(s) of interest (e.g., KRAS G12D, KRAS G12V, KRAS G12R, KRAS G12C, KRAS G13D). Pᵢ denotes the amino acid at position L
[0126] t: Position of target mutation in P, t∈[1, . . . n] (e.g., t=12 for KRAS G12D).
[0127] s: Substitution mutation s∈[true, false] is true if the mutation is a substitution, and false if the mutation is a deletion or insertion or the peptide does not contain a mutation (such as in pathogen targets). When the mutation is a deletion or insertion then t indicates the position immediately before the deletion or insertion.
[0128] τ₁: Threshold for potential presentation of peptides by MHC for peptide-MHC scoring (e.g., 500 nM binding affinity)
[0129] τ₂: Threshold for predicted display of peptides by MHC for peptide-MHC scoring (e.g., 50 nM binding affinity)
[0130] [symbol] : Set of HLA alleles (for HLA-A, HLA-B, HLA-C loci)
[0131] F: [symbol] → [symbol] : Population haplotype frequencies (for OptiVax optimization and coverage
[0132] N: Parameter for EvalVax and OptiVax objective function. Specifies minimum number of predicted per-individual hits for population coverage objective to consider the individual covered Default=1 (computes P(n≥1) population coverage).

[0133] In some embodiments, Peptide-HLA Scoring Functions used are:
[0134] ScorePotential: P× [symbol] → [symbol] : Scoring function mapping a (peptide, HLA allele) pair to a prediction of peptide-HLA display. If predicted affinity ≤τ₁, then returns 1, else returns 0. Options include MHCflurry, NetMHCpan, PUFFIN, ensembles, or alternative metrics or software may be used, including models calibrated against immunogenicity data.
[0135] SCOREDISPLAY: P× [symbol] → [symbol] : Scoring function mapping a (peptide, HLA allele) pair to a prediction of peptide-HLA display. If predicted affinity ≤2, then returns 1, else returns 0. Options include MHCflurry, NetMHCpan, PUFFIN, ensembles, or alternative metrics or software may be used, including models calibrated against immunogenicity data.

[0136] Next, from the seed protein sequence (P), a set [symbol] of windowed native peptides spanning the protein sequence(s) is constructed. P_{j . . . j+(k-1)} only produces set members when the subscripts are within the range of the defined seed protein P. In some embodiments, 8-mers, 9-mers, 10-mers, and 11-mers are produced, but this process can be performed with any desired window lengths and the resulting peptide sets combined. In some embodiments, only 9-mers are produced.

$$𝒫 = {⋃}_{k ∈ [ 8 , … , 11 ]} {𝒫}_{k}$$

$${𝒫}_{k} = \{ {P}_{j … j + ( k - 1 )} \vert j ∈ [ t - ( k - 1 ) , … , t ] , if s then j \neq \{ t - ( k - 1 ) , t - 1 \} \}$$

[0137] The second condition j≠{t−(k−1), t−1} excludes peptides where the mutation at t is in positions P2 or Pk of the windowed k-mer peptide (i.e., the anchor positions) and the mutation is a substitution.

MHC Class I Vaccine Design Procedure with Defined Peptide Set

[symbol]

[0138] Next, each peptide sequence in [symbol] is scored against all HLA alleles in [symbol] for potential presentation using SCOREPOTENTIAL (with threshold τ₁=500 nM) and store results in a | [symbol] |×| [symbol] | matrix S:

$$S [ p , h ] = SCOREPOTENTIAL ( p , h ) ∀ p ∈ 𝒫 , h ∈ ℋ$$

[0139] Note that S is a binary matrix where 1 indicates the HLA is predicted to potentially present the peptide, and 0 indicates no potential presentation.
   Define Base Set of Peptides B⊆ [symbol] :

$$B = \{ p ∈ 𝒫 \vert ∃ h s . t . S [ p , h ] = 1 \}$$

[0140] Thus, B contains the native peptides that are predicted to be potentially presented by at least 1 HLA.

Create a Set of all Heteroclitic Peptides B′ Stemming from Peptides in B:

$${B}^{′} = {⋃}_{b ∈ B} ANCHOR - MODIFIED ( b )$$

[0141] where ANCHOR-MODIFIED(b) returns a set of all 399 anchor-modified peptides stemming from b (with all possible modifications to the amino acids at P2 and P9).

[0142] Next, all heteroclitic candidate peptides (e.g., modified peptides) in B′ are scored against all HLA alleles in [symbol] for predicted display using SCOREDISPLAY (with threshold τ₂=50 nM), and store results in binary |B′|×| [symbol] | matrix S₁′:

$${S}_{1}^{′} [ {b}^{′} , h ] = SCOREDISPLAY ( {b}^{′} , h ) ∀ {b}^{′} ∈ {B}^{′} , h ∈ ℋ$$

[0143] Next, an updated scoring matrix S₂′ is computed for heteroclitic peptides conditioned on the potential presentation of the corresponding base peptides by each HLA:

$${S}_{2}^{′} [ {b}^{′} , h ] = \{ \begin{matrix}{S}_{1}^{′} [ {b}^{′} , h ] , & if S [ b , h ] = 1 \\ 0 , & otherwise\end{matrix} ∀ {b}^{′} ∈ {B}^{′} , h ∈ ℋ$$

[0144] where each heteroclitic peptide b′∈B′ is a mutation of base peptide b∈B. This condition enforces that if h was not predicted to potentially present b, then all heteroclitic peptides b′ derived from b will not be displayed by h (even if h would otherwise be predicted to display b′).

[0145] In some embodiments, OptiVax-Robust is used to design a final peptide set (e.g., third peptide set) from the union of base peptides and heteroclitic peptides B∪B′ (with corresponding scoring matrices S and S₂′ for B and B′, respectively). OptiVax will output m sets [symbol] ₛ for s∈[1, . . . , m] where m is the largest vaccine size requested from OptiVax. Let [symbol] ₖ denote the compact set of vaccine peptides output by OptiVax containing k peptides. Note that [symbol] ₖ₊₁ is not necessarily a superset of [symbol] ₖ. In alternate embodiments, OptiVax can be used to augment the base set B with peptides from B′ using scoring matrix S₂′ to have OptiVax return set [symbol] ₖ, and the final vaccine set [symbol] _{k+|B|} consists of peptides B∪ [symbol] ₖ.

[0146] In some embodiments, this procedure is repeated independently for each target of interest, and the resulting independent vaccine sets can be merged into a combined vaccine as described below.

### MHC Class II Vaccine Design Procedure

[0147] In some embodiments, MHC class II vaccine design procedures consist of the following computational steps.

[0148] In some embodiments, the inputs for the computation are:
[0149] P_{1 . . . n}: Peptide sequence(s) (length n) containing the neoantigen(s) or pathogenic target(s) of interest (e.g., KRAS G12D, KRAS G12V, KRAS G12R, KRAS G12C, KRAS G13D). Pᵢ denotes the amino acid at position i.
[0150] t: Position of target mutation in P, t∈[1, . . . , n] (e.g., t=12 for KRAS G12D).
[0151] s: Substitution mutation s G [true, false] is true if the mutation is a substitution, and false if the mutation is a deletion or insertion or the peptide does not contain a mutation (such as for pathogen targets). When the mutation is a deletion or insertion then t indicates the position immediately before the deletion or insertion.
[0152] τ₁: Threshold for potential presentation of peptides by MHC or peptide-MHC scoring (e.g., 500 nM binding affinity)
[0153] τ₂: Threshold for predicted display of peptides by MHC for peptide-MHC scoring (e.g., 50 nM binding affinity)
[0154] [symbol] : Set of HLA alleles (for HLA-DR, HLA-DQ, HLA-DP loci)
[0155] F: [symbol] → [symbol] : Population haplotype frequencies (for OptiVax optimization and coverage
[0156] N: Parameter for EvalVax and OptiVax objective function. Specifies minimum number of predicted per-individual hits for population coverage objective to consider the individual covered Default=1 (computes P(n≥1) population coverage).

[0157] In some embodiments, Peptide-HLA Scoring Functions used are:
[0158] SCOREPOTENTIAL: P× [symbol] → [symbol] : Scoring function mapping a (peptide, HLA allele) pair to a prediction of display. If predicted affinity ≤τ₁, then returns 1, else returns 0. Options include NetMHCIIpan, PUFFIN, ensembles, or alternative metrics or software may be used, including models calibrated against immunogenicity data.
[0159] SCOREDISPLAY: P× [symbol] → [symbol] : Scoring function mapping a (peptide, HLA allele) pair to a prediction of peptide-HLA display. If predicted affinity ≤τ₂, then returns 1, else returns 0. Options include NetMHCIIpan, PUFFIN, ensembles, or alternative metrics or software may be used, including models calibrated against immunogenicity data.
[0160] FindCore: P× [symbol] [1, . . . , n]: Function mapping a (peptide, HLA allele) pair to a prediction of the 9-mer binding core. The core may be specified as the offset position (index) into the peptide where the core begins.

[0161] Next, from the seed protein sequence (P), a set [symbol] of peptides spanning the protein sequence are constructed. P_{j . . . j+(k-1)} only produces set members when the subscripts are within the range of the defined seed protein P. Here, we extract all windowed peptides of length 13-25 spanning the target mutation, but this process can be performed using any desired window lengths (e.g., only 15-mers).

$$𝒫 = {⋃}_{k ∈ [ 13 , … , 25 ]} {𝒫}_{k}$$

$${𝒫}_{k} = \{ {P}_{j … j + ( k - 1 )} \vert j ∈ [ t - ( k - 1 ) , … , t ] \}$$

[0162] where [symbol] ₖ contains all sliding windows of length k, which are combined to form [symbol] . Note that here (unlike MHC class I), no peptides are excluded based on binding core or anchor residue positions (for MHC class II, filtering is performed as described in this disclosure).
   MHC Class II Vaccine Design Procedure with Defined Peptide Set

[symbol]

[0163] Next, each peptide sequence in [symbol] is scored against all HLA alleles in [symbol] for potential presentation using SCOREPOTENTIAL (with threshold τ₁=500 nM) and store results in a | [symbol] |×| [symbol] | matrix S₁:

$${S}_{1} [ p , h ] = SCOREPOTENTIAL ( p , h ) ∀ p ∈ 𝒫 , h ∈ ℋ$$

[0164] Note that S₁ is a binary matrix where 1 indicates the HLA is predicted to potentially present the peptide, and 0 indicates no potential presentation.

[0165] For each (peptide, HLA allele) pair (p, h), identify/predict the 9-mer binding core using FINDCORE. The predicted binding core is recorded in a matrix C:

$$C [ p , h ] = FINDCORE ( p , h ) ∀ p ∈ 𝒫 , h ∈ ℋ$$

[0166] Next, if not(s) then S₂[p,h]=S₁[p,h] otherwise an updated scoring matrix S₂ is computed for native peptides in [symbol] :

$${S}_{2} [ p , h ] = \{ \begin{matrix}{S}_{1} [ p , h ] , & \begin{matrix}if C [ p , h ] specifies {P}_{t} at a \\ non - anchor position inside core\end{matrix} \\ 0 , & otherwise\end{matrix} ∀ p ∈ 𝒫 , h ∈ ℋ$$

[0167] where Pₜ is the target residue of interest (e.g., the mutation site of KRAS G12D). This condition enforces the target residue to fall within the binding core at a non-anchor position for all (peptide, HLA allele) pairs with non-zero scores in S₂ and allows the binding core to vary by allele per peptide (as the binding cores of a particular peptide may differ based on the HLA allele presenting the peptide). Thus, for each pair (p, h), if the predicted binding core C[p, h] specifies the target residue Pₜ at an anchor position (P1, P4, P6, or P9 of the 9-mer core), or if Pₜ is not contained within the binding core, then S₂ [p, h]=0. In an alternate embodiment, Pₜ can be located outside of the core or inside the core in a non-anchor position. In some embodiments, Pₜ can only be located at specific positions inside and/or outside of the core. In some embodiments, the binding core predictions in C are accompanied by prediction confidences. In some embodiments, if the confidence for predicted core C[p, h] is below a desired threshold (e.g., 0.5, 0.6, 0.7, 0.8, or 0.9), then S₂ [p, h]=0.

[0168] Next, OptiVax-Robust is run with peptides [symbol] and scoring matrix S₂ to identify a non-redundant base set of peptides B⊆ [symbol] . (In alternate embodiments, B can be chosen as the entire set [symbol] rather than identifying a non-redundant base set.)

[0169] Next, a set of all heteroclitic peptides B′ is created stemming from peptides in B:

$${B}^{′} = {⋃}_{b ∈ ⋃ B} \{ ANCHOR - MODIFIED ( b , c ) ∀ c \vert ∃ h s . t . {S}_{2} [ b , h ] = 1 \}$$

[0170] where ANCHOR-MODIFIED(b,c) returns a set of all 20⁴−1 anchor-modified peptides stemming from b with all possible modifications to the amino acids at P1, P4, P6, and P9 of the 9-mer binding core c. Thus, for each base peptide b, the heteroclitic set B′ contains all anchor-modified peptides b′ with modifications to all unique cores of b identified for any HLA alleles that potentially present b with a valid core position as indicated by scoring matrix S₂.

[0171] Next, all heteroclitic candidate peptides (e.g., modified peptides) in B′ are scored against all HLA alleles in [symbol] for predicted display using SCOREDISPLAY (with threshold τ₂=50 nM), and store results in binary |B′|×| [symbol] | matrix S₁′:

$${S}_{1}^{′} [ {b}^{′} , h ] = ScoreDisplay ( {b}^{′} , h ) ∀ {b}^{′} ∈ {B}^{′} , h ∈ ℋ$$

[0172] For each (heteroclitic peptide, HLA allele) pair (b′,h), identify/predict the 9-mer binding core using FINDCORE. The predicted binding core is recorded in a matrix C′:

$${C}^{′} [ {b}^{′} , h ] = FINDCORE ( {b}^{′} , h ) ∀ {b}^{′} ∈ {B}^{′} , h ∈ ℋ$$

[0173] An updated scoring matrix S₂′ is computed for heteroclitic peptides conditioned on the identified binding cores of a heteroclitic and base peptides occurring at the same offset by a particular HLA:

$${S}_{2}^{′} [ {b}^{′} , h ] = \{ \begin{matrix}{S}_{1}^{′} [ {b}^{′} , h ] , & if {C}^{′} [ {b}^{′} , h ] = C [ b , h ] \\ 0 , & otherwise\end{matrix} ∀ {b}^{′} ∈ {B}^{′} , h ∈ ℋ$$

[0174] where each heteroclitic peptide b′∈B′ is a mutation of base peptide b∈B. This condition enforces the binding core of the heteroclitic peptide b′ to be at the same relative position as the base peptide b, and, implicitly, enforces that the target residue Pₜ still falls in a non-anchor position within the 9-mer binding core (Step 3).

[0175] An updated scoring matrix S′ is computed for heteroclitic peptides conditioned on the potential presentation of the corresponding base peptides by each HLA:

$${S}_{3}^{′} [ {b}^{′} , h ] = \{ \begin{matrix}{S}_{2}^{′} [ {b}^{′} , h ] , & if S [ b , h ] = 1 \\ 0 , & otherwise\end{matrix} ∀ {b}^{′} ∈ {B}^{′} , h ∈ ℋ$$

[0176] where each heteroclitic peptide b′∈B′ is a mutation of base peptide b∈B. This condition enforces that if h was not predicted to display b, then all heteroclitic peptides b′ derived from b will not be displayed by h (even if h would otherwise be predicted to display b′).

[0177] OptiVax-Robust is used to design a final peptide set (e.g., third peptide set) from the union of base peptides and heteroclitic peptides B∪B′ (with corresponding scoring matrices S₂ and S₃′ for B and B′, respectively). OptiVax will output m sets [symbol] ₛ for s∈[1, . . . , m] where m is the largest vaccine size requested from OptiVax. Let [symbol] ₖ denote the compact set of vaccine peptides output by OptiVax containing k peptides. Note that [symbol] ₖ₊₁ is not necessarily a superset of [symbol] ₖ. (In alternate embodiments, OptiVax can be used to augment the base set B with peptides from B′ using scoring matrix S₂′ to have OptiVax return set [symbol] ₖ, and the final vaccine set [symbol] _{k+|B|} consists of peptides B∪ [symbol] ₖ.)

[0178] In some embodiments, this procedure is repeated independently for each single target of interest, and the resulting independent vaccine sets can be merged into a combined vaccine as described below.

### MHC Class I or Class II Vaccine Design Method Prioritizing Peptide Conservation

[0179] In some embodiments, peptide sequences that are more conserved across strains, species, or other protein sources of interest are prioritized for vaccine inclusion. In some embodiments, a set of related protein sequences called protein variants are considered for vaccine design. A protein variant is one instance of a family of protein sequences, and protein variants can be sequences from various species, pathogen strains, viral strains, or other variations considered for vaccine design. In some embodiments, each protein variant has an associated probability called a protein variant probability, where the sum of all protein variant probabilities for the supplied set of protein variants is one. In some embodiments, multiple proteins of interest can be considered for the design of a single vaccine using an MHC Class I or Class II vaccine design method prioritizing peptide conservation. In these embodiments, protein variants for all proteins of interest are collectively considered for generating candidate peptides. In some embodiments, the protein variant probabilities across all of the considered multiple proteins sum to one.

[0180] A set of candidate peptides are created from each protein variant using a sliding window method that parses the protein variant into peptide sequences. In some embodiments, for MHC Class I 8-mers, 9-mers, 10-mers, and/or 11-mers are produced, but this process can be performed with any desired window lengths and the resulting peptide sets combined. In some embodiments, for MHC Class I, only 9-mers are produced. In some embodiments, for MHC Class II, all windowed peptides of length 13-25 are produced, but this process can be performed using any desired window lengths (e.g., only 15-mers). In some embodiments, peptides that are predicted to be glycosylated in a given protein variant are removed and not considered for that variant as described in Liu et al. (2020a), which is incorporated by reference herein in its entirety.

[0181] In some embodiments, for each generated peptide sequence (MHC Class I or Class II) conservation is defined as the fraction of input protein variants where the peptide sequence occurs. For example, if a given 9-mer peptide sequence occurs in the peptides generated from 90% of the protein variants provided as input, its conservation is 0.90. In some embodiments, conservation is defined for each generated peptide sequence (MHC Class I or Class II) as the sum of the protein variant frequencies where the peptide sequence occurs. For example, if a given 9-mer peptide sequence occurs in the peptides generated from protein variants with protein variant probabilities of 0.10 and 0.20, its conservation is 0.30. In some embodiments, this functionality is implemented by a ComputeConservation function that computes the sum of the frequencies of the protein variants that contain a peptide sequence. In some embodiments, when sufficient protein variants are not sufficient for computing expected future conservation a method of predicting conservation can be used to implement ComputeConservation, such as the one found in Hie et al. (2021), which is incorporated by reference herein in its entirely.

[0182] In some embodiments, vaccine design considers conservation by prioritizing peptides for vaccine inclusion that are more conserved than others to meet a desired vaccine performance metric. In some embodiments, the vaccine design method attempts to first design a vaccine with candidate peptides that all meet a first conservation threshold, and if the desired vaccine performance is not met, it iteratively adds additional peptides with less stringent conservation to attempt to meet the desired vaccine performance metric. In some embodiments, vaccine design prioritizing conservation proceeds by setting a vaccine design D to be an empty set, and then performing the steps of: (1) selecting candidate peptides in which each peptide passes a conservation threshold to create a candidate peptide set and is not in D, (2) selecting vaccine designs having varying peptide numbers/combinations from this candidate set to optimize a vaccine performance metric using methods disclosed herein for MHC Class I or Class II vaccine design to augment the vaccine design contained in D (one implementation of vaccine augmentation is described in (Liu et al., 2021), incorporated by reference in its entirety herein), (3) selecting the smallest vaccine peptide set design from Step 2 that either meets the desired vaccine performance metric or where adding one more peptide to the selected set does not provide a desired minimum improvement in the vaccine performance metric, (4) if a vaccine peptide set was found in Step 3, adding the vaccine peptide set design from Step 3 to the vaccine design D, and (5) determining whether the vaccine design D meets a desired vaccine performance metric objective, and if so, return vaccine design D as the final vaccine design. If at Step 6, the vaccine design D fails to meet the desired vaccine performance metric objective, the computation continues with the following steps: (6) setting an updated conservation threshold to be lower than the current conservation threshold (less constrained) and (7) repeating the process starting at Step 1 retaining the current vaccine design D and current candidate set until either a desired vaccine performance metric objective is reached at Step 6, or the updated conservation threshold is lower than a minimum desired conservation threshold. If on any iteration, the updated conservation threshold is lower than a minimum desired conservation threshold, the latest version of vaccine design D will be used as the final vaccine design. When the process completes, the final vaccine design D includes all of the peptides that can be used in a vaccine.

[0183] In some embodiments, MHC class I or class II vaccine design procedures consist of the following computational steps.

[0184] In some embodiments, the inputs for the computation are:
[0185] P_{j, 1 . . . n}_{ⱼ}: Peptide sequence of protein variant j of length nⱼ. P_{j,i} denotes the amino acid at position i of protein variant j, where j∈[1, . . . a] and a is the number of protein variants
[0186] Oⱼ: Protein variant probability of protein variant Pⱼ
[0187] tⱼ: Position in protein variant Pⱼ of the target mutation t∈[1, . . . n]
[0188] D: The vaccine design, initialized to the empty set Ø
[0189] s: Substitution mutation s∈[true, false] is true if the mutation is a substitution, and false if the mutation is a deletion or insertion or the peptide does not contain a mutation. When the mutation is a deletion or insertion then t indicates the position immediately before the deletion or insertion.
[0190] c₁: Initial conservation level of peptides
[0191] c_{c}: Current conservation threshold
[0192] c₂: Change in conservation level on each iteration
[0193] cₘ: Minimum final conservation
[0194] v: Target vaccine performance metric
[0195] v_{d}: Minimum change in vaccine performance metric to increase vaccine size
[0196] N: Parameter for EvalVax and OptiVax objective function. Specifies minimum number of predicted per-individual hits for population coverage objective to consider the individual covered. Default=1 (computes P(n≥1) population coverage).
[0197] COMPUTECONSERAVTION: S×X×O→ [symbol] : In some embodiments, computes the fraction offsets Xⱼ that contain sequence S. In some embodiments, sums all the Oⱼ where sequence S appears in Xⱼ

[0198] The protein variant sequences Pⱼ are used to produce windowed peptides that span the protein sequence(s) starting at each location m with a peptide length of k residues. The result is the set Xⱼ that contains all of the peptide sequences in protein variant Pⱼ. P_{j,m . . . m+(k-1)} only produces a sequence when the subscripts are within the range of the defined protein P. In some embodiments for MHC Class I, k is chosen to produce 8-mers, 9-mers, 10-mers, and 11-mers, but this process can be performed with any desired window lengths and the resulting peptide sets combined. In some embodiments for MHC Class I, only 9-mers are produced. In some embodiments for MHC Class II, we extract all windowed peptides of length 13-25, but this process can be performed using any desired window lengths (e.g., only 15-mers).

$${X}_{j} = {⋃}_{\begin{matrix}t ∈ [ 1 ¨ {n}_{j} ] \\ k ∈ [ \begin{matrix}8 - 11 MHC Class I \\ 13 - 25 MHC Class II\end{matrix} ]\end{matrix}} \{ \begin{matrix}{P}_{j , m… m + ( k - 1 )} \vert m ∈ [ t - ( k - 1 ) , … , t ] , \\ if s and MHC Class I then \\ m \neq \{ t - ( k - 1 ) , t - 1 \}\end{matrix} \}$$

[0199] In some embodiments for MHC Class I, the second condition m≠{t−(k−1), t—1} excludes peptides where the mutation at t is in positions P2 or Pk of the windowed k-mer peptide (i.e., the anchor positions) and the mutation is a substitution and if for MHC Class I design. MHC Class II anchor positions are filtered in the MHC Class II design method.

[0200] Create the set of all peptides B that occur in any input protein variant.

$$B = {⋃}_{j ∈ [ 1 , … , a ]} {X}_{j}$$

$$z = \vert B \vert$$

[0201] For each peptide B_{w} in B its conservation metric C_{w} is computed using COMPUTECONSERVATION

$${C}_{w} = COMPUTECONSERVATION ⌊ {B}_{w} , X , O ⌋$$

[0202] The current conservation threshold is then set to the initial conservation threshold

$${c}_{c} = {c}_{1}$$

[0203] At Step 1, candidate peptides are selected where each peptide passes a conservation threshold to create a candidate peptide set and is not in D. A set of peptide candidates [symbol] is defined such that each candidate peptide meets the current conservation threshold c_{c} and the peptide candidate is not already in D. D is set to empty (0 peptides) on the first iteration of the computational steps.

$$𝒫 = {⋃}_{w ∈ [ 1 , … , Z ]} {B}_{w} where {C}_{w} \geq {c}_{c} and {B}_{w} ∉ D$$

[0204] At Step 2, vaccine designs are selected having varying peptide numbers/combinations from the candidate set to optimize a vaccine performance metric using methods disclosed herein for MHC Class I or Class II vaccine design to augment the vaccine design contained in D. The peptide set [symbol] is provided to “MHC Class I Vaccine Design Procedure with Defined Peptide Set [symbol] ” for MHC Class I and “MHC Class II Vaccine Design Procedure with Defined Peptide Set [symbol] ” for MHC Class II. The peptide set [symbol] is provided as the set of candidates to augment the set D. Both the set [symbol] and D are provided to OptiVax which uses D as the fixed starting set and augments D with peptides from the set [symbol] using vaccine augmentation as described in (Liu et al., 2021), incorporated by reference in its entirety herein. OptiVax-Robust is used to augment the set D with peptides from [symbol] using the scoring matrices as defined in “MHC Class I Vaccine Design Procedure with Defined Peptide Set [symbol] ” for MHC Class I and “MHC Class II Vaccine Design Procedure with Defined Peptide Set [symbol] ” for MHC Class II, and returns sets [symbol] ₛ where each set [symbol] ₛ is a compact set of vaccine peptides output by OptiVax containing s peptides. In some embodiments, the steps to modify anchor positions are not utilized in the MHC Class I or MHC Class II vaccine design methods and only the base peptides B are utilized for vaccine design. In some embodiments, positions in addition to anchor positions are modified in the MHC Class I or MHC Class II vaccine design methods utilized to create B′.

[0205] At Step 3, the smallest vaccine peptide set design is selected from Step 2 that either meets the desired vaccine performance metric or where adding one more peptide to the selected set does not provide a desired minimum improvement in the vaccine performance metric. A vaccine design [symbol] ₛ is chosen that meets minimum requirements. In some embodiments, the vaccine design [symbol] ₛ is chosen with the value s chosen to be the minimum value of s such that the difference in vaccine performance between D∪ [symbol] ₛ and D∪ [symbol] ₛ₊₁ is less than v_{d}. In some embodiments, the value s is chosen to be the minimum value such that the vaccine performance metric of D∪ [symbol] ₛ meets the final vaccine performance metric v. In some embodiments, [symbol] ₛ₊₁ is not necessarily a superset of [symbol] ₛ.

[0206] At Step 4, if a vaccine peptide set was found in Step 3, it is added to the vaccine peptide set design D. If an acceptable vaccine design [symbol] ₛ was found in Step 4, the vaccine design set D is updated to consist of D∪ [symbol] ₛ

[0207] At Step 5, it is determined whether the vaccine design D meets a desired vaccine performance metric objective. If the vaccine design set D meets the final vaccine performance design metric v, return D as the final design.

[0208] At Step 6, the conservation threshold is updated to be lower than the current conservation threshold (less constrained). If the vaccine design set D does not meet the final vaccine performance design metric v, reduce c_{c}

$${c}_{c} = {c}_{c} - {c}_{2}$$

[0209] At Step 7, repeat the process starting at Step 1 retaining the current vaccine design D and current candidate set until either a desired vaccine performance metric objective is reached at Step 5, or the updated conservation threshold is lower than a minimum desired conservation threshold. If c_{c}<cₘ then return design set D as the final vaccine. If not, return to Step 1 and repeat all subsequent steps.

[0210] In some embodiments, this procedure is repeated independently for each pathogen gene variant or target variant of interest, and the resulting independent vaccine sets can be merged into a combined vaccine. In some embodiments, this procedure is repeated independently for each single SARS-CoV protein target of interest, and the resulting independent vaccine sets can be merged into a combined vaccine.

### Methods for Combining Multiple Vaccines

[0211] The above described methods will produce an optimized target peptide set (e.g., third peptide set) for one or more individual targets. In some embodiments, a method is provided for designing separate vaccines for MHC class I and class II based immunity for multiple targets (e.g., two or more targets such as KRAS G12D and KRAS G12V).

[0212] In some embodiments, a method is disclosed for producing a combined peptide vaccine for multiple targets by using a table of presentations for a disease that is based upon empirical data from sources such as the Cancer Genome Atlas (TCGA). In some embodiments, a method is disclosed for producing a combined peptide vaccine for multiple strains of a pathogen (e.g., SARS-CoV) that is based upon empirical data of strain prevalence where prevalence is used to represent the probability of the presentation of a given strain. In some embodiments, for a given strain presentation the probabilities of each pathogen protein target are identical and sum to one. In some embodiments, for a given strain presentation the probabilities of each pathogen protein target are vary based upon the observed or predicted immunogenicity of each protein (e.g., based upon the expression of the pathogen protein or its processing).

[0213] FIG. 6 shows one embodiment for factoring disease presentation type probabilities (e.g., pancreatic cancer, colorectal cancer, and skin cancer) by probability, for each disease presentation, of target presented for various mutation targets (e.g., KRAS G12D, KRAS G12V, and KRAS G12R). A presentation is a unique set of targets that are presented by one form of a disease (e.g., distinct type of cancer or cancer indication as shown in FIG. 6). For each presentation, FIG. 6 shows an example of the probability of that presentation, and the probability that a given target is observed. For a given presentation, there can be one or more targets, each having a probability. In some embodiments, the method for multi-target vaccine design will allocate peptide resources for inducing disease immunity based on the presentation and respective target probabilities as shown in FIG. 6, for example. In some embodiments, presentations correspond to the prevalence of targets in different human populations or different risk groups. The probability of a target in a population is computed by summing for each possible presentation the probability of that presentation times the probability of the target in that presentation. FIG. 6 shows weights used for merging individual vaccines for each target (row) into combined vaccines for each disease indication (column). Values indicate the observed fraction of cases containing each target mutation. Data are from The Cancer Genome Atlas (TCGA). For each disease indication, TCGA data are filtered to cases where the Primary Site is the indication.

[0214] In some embodiments, presentations are used to represent different strains of pathogens, where the probability of a presentation is based upon the prevalence of a given pathogen strain. In some embodiments, for a given strain presentation the probabilities of each pathogen protein target are identical and sum to one. In some embodiments, for a given strain presentation the probabilities of each pathogen protein target vary based upon the observed or predicted immunogenicity of each pathogen protein (e.g., based upon the expression of the pathogen protein or its processing).

[0215] In some embodiments, the same vaccine design will be generated for mutations to different proteins when the base peptides generated by the mutations to the different proteins are identical. For example, in some embodiments of base peptide selection the following mutations have identical vaccine designs because they share the same set of base peptides: HRAS Q61K, NRAS Q61K, and KRAS Q61K; HRAS Q61L, NRAS Q61L, and KRAS Q61L; HRAS Q61R, NRAS Q61R, and KRAS Q61R. Referring to FIG. 6, in some embodiments when two mutations have identical individual vaccine designs their presentation specific probabilities are added when weighting the individual vaccine design for inclusion in a combined vaccine as described below (e.g., for Thyroid Cancer NRAS Q61R and HRAS Q61R).

[0216] Referring to FIG. 7, in some embodiments, the method first includes designing an individual peptide vaccine for each target to create a combined vaccine design for multiple targets. This initially results in sets of target-specific vaccine designs. In some embodiments, the marginal predicted vaccine performance of each target-specific vaccine at size k is defined by predicted vaccine performance at size k minus the predicted vaccine performance of the vaccine at size k minus one (see FIGS. 3-11). The composition of a vaccine may change as the number of peptides used in the vaccine increases, and thus for computing contributions to a combined vaccine the marginal predicted vaccine performance of each target-specific vaccine is used instead of a specific set of peptides.

[0217] In some embodiments, the weighted marginal predicted vaccine performance of a target-specific vaccine design for each target specific vaccine size is computed as shown in FIG. 7. For a given target specific vaccine size, its weighted predicted vaccine performance is computed by multiplying its predicted vaccine performance times the probability of the target in the population (e.g., by using values as shown in FIG. 6). The marginal weighted predicted vaccine performance for a target specific vaccine is its weighted coverage at size k minus its coverage a size k minus one (e.g., see FIGS. 3-4). The marginal weighted predicted vaccine performance of a target specific vaccine of size one is its weighted predicted vaccine performance. The marginal weighted predicted vaccine performances for all vaccines are combined into a single list, and the combined list is sorted from largest to least by the weighted marginal predicted vaccine performances of the target specific vaccines as shown in FIG. 7. The combined vaccine of size n is then determined by the first n elements of this list. The peptides for the combined vaccine are determined by the individual peptide target vaccines whose sizes add to n and whose weighted predicted vaccine performances sums to the same sum as the first n elements of the sorted list. This maximizes the predicted vaccine performance of the combined vaccine of size n.

[0218] In some embodiments, the combined multiple target vaccine can be designed on its overall predicted coverage for the disease described depending on the presentation table used (e.g., see FIG. 6), by its predicted coverage for a specific indication, and/or by its predicted coverage for a specific target by adjusting the weighting used for predicted vaccine performance accordingly. Once a desired level of coverage is selected, the peptides of the combined vaccine are determined by the contributions of target-specific designs. For example, if the combined vaccine includes a target-specific vaccine of size k, then the vaccine peptides for this target at size k are used in the combined vaccine.

[0219] As an example of one embodiment, FIG. 6 shows mutations (e.g., KRAS G12D, G12V, and G12R) and their respective probabilities of occurring in an individual with different cancer indications (e.g., pancreatic cancer). The marginal population coverage of each target-specific vaccine at a given vaccine size is the improvement in coverage at that size and the size minus one. The coverage with no peptides is zero. The marginal coverage of each target-specific vaccine is multiplied by the probability of the target in the population as determined by the proportions as shown in FIG. 6 for a selected indication (e.g., pancreatic cancer). These weighted marginal coverages of all target-specific vaccines are sorted to determine the best target-specific compositions, and the resulting list describes the composition of a combined vaccine for the selected indication at each size k by taking the first k elements of the list. At each combined vaccine size, different components of the target-specific vaccines are utilized for the indication illustrated.

### Combined Vaccine Design Procedure

[0220] In some embodiments, the procedure described herein is used to combine individual compact vaccines optimized for different targets into a single optimized combined vaccine.

[0221] In some embodiments, the computational inputs for the procedure are:
[0222] [symbol] : Set of neoantigen or pathogenic targets of interest (e.g., KRAS G12D, KRAS G12V, KRAS G12R)
[0223] [symbol] : Vaccine sets optimized individually for each target. Let [symbol] _{t,k} denote the optimal vaccine set of exactly k peptides for target t∈ [symbol] (e.g., as computed by the procedures describe above). Note that [symbol] _{t,k+1} may not necessarily be a superset of [symbol] _{t,k}.
[0224] W: [symbol] →[0,1]: Target weighting function mapping each target t∈ [symbol] to a probability or weight of t in a particular presentation of interest (e.g., pancreatic cancer; see FIG. 6 for example).
[0225] POPULATIONCOVERGE: [symbol] →[0,1]: Function mapping a peptide set into population coverage (e.g., EvalVax). This function may also take as input additional parameters, including HLA haplotype frequencies and a minimum per-individual number of peptide-HLA hits N (here, we compute coverage as P(n≥1) using EvalVax-Robust).

[0226] At Step 1, for each target t (individually) compute optimized vaccines of sizes 1 to m (1 to m peptides; m is the largest vaccine size used for the computation) as the sets [symbol] ₖ where k denotes the size of the vaccine. Then, compute the vaccine performance for each vaccine size. For each target t (individually) and vaccine size (peptide count) k, the unweighted population coverage c_{t,k} is computed:

$${c}_{t , k} = PopulationCoverage ( {𝒱}_{t , k} ) ∀ t ∈ 𝒯 , k$$

[0227] In some embodiments, for each target t, c_{t,k} is generally monotonically increasing and concave down for increasing values of k (each additional peptide increases coverage but with decreasing returns).

[0228] At Step 2, vaccine marginal performance is computed and weighted by each target's prevalence weight. For each target t (individually), the marginal coverage m_{t,k} is computed of the k-th peptide added to the vaccine set:

$${m}_{t , k} = \{ \begin{matrix}{c}_{t , k} & if k = 1 \\ {c}_{t , k} - {c}_{t , k - 1} , & otherwise\end{matrix} ∀ t ∈ 𝒯 , k$$

[0229] In some embodiments, for each target t, m_{t,k} should be a monotonically decreasing function in k (by Step 1 above).

[0230] The weighted marginal population coverage \tilde{m}_{t,k} is computed using weights of each target in W:

$${\tilde{m}}_{t , k} = W ( t ) \cdot {m}_{t , k} ∀ t ∈ 𝒯 , k$$

[0231] The weighted marginal population coverage gives the effective marginal coverage of the k-th peptide in the vaccine weighted by the prevalence of the target in the presentation (by multiplication with the probability/weight of the target in the presentation).

[0232] At Step 3, the weighted vaccine performances are merged for all targets to produce combined vaccine designs at each peptide count. The individual vaccines are combined into a combined vaccine via the MergeMulti procedure called on the weighted marginal population coverage lists \tilde{m}ₜ=[\tilde{m}_{t,k}, k∈1, 2, . . . ]. FIG. 8 shows an example Python implementation of the MergeMulti function. This procedure takes as input multiple sorted (descending) lists and merges them into a single sorted (descending) list. Let M indicate the output of MergeMulti where each element Mk contains both the marginal weighted coverage and source (target) of the k-th peptide in the combined vaccine. The combined vaccine contains peptides from different targets. In particular, the combined vaccine with k peptides contains C_{t,k}=Σ_{j≤k} [symbol] {Mₖ from t} peptides from target t. C_{t,k} ∈[0, . . . , k] and Σₜ C_{t,k}=k (Ct,k gives the distribution of the k peptides in the combined vaccine across the targets).

[0233] At Step 4, a vaccine with a desired performance is selected. The final vaccine size k can vary based upon the specific population coverage goals of the vaccine. The marginal weighted coverage values of the combined vaccine Mk can be cumulatively summed over k to give the overall effective (target-weighted) population coverage of the combined vaccine containing k peptides as Σ_{j≤K}Mₖ (taking into account both the probabilities/weights of the targets in the presentation and the expected population coverage of peptides based on HLA display).

[0234] At Step 5, the vaccine peptides corresponding to the target coverage retrieved for the final vaccine size k. The optimal combined vaccine set [symbol] ₖ for the final vaccine size k is defined as:

$${\hat{𝒱}}_{k} = {⋃}_{t ∈ 𝒯} {𝒱}_{t , {C}_{t , k}}$$

[0235] Thus, the combined vaccine with k peptides is the combination of the optimal individual (C_{t,k})-peptide vaccines. The final vaccine size k can vary based upon the specific population coverage goals of the vaccine.

### MHC Class I Peptide Sequences

[0236] In some embodiments, a peptide composition comprises about 1 to 40 MHC class I peptides with each peptide consisting of 8 or more amino acids. In some embodiments, an MHC class I peptide composition is intended to prevent COVID. In some embodiments, an MHC class I peptide composition is intended to treat COVID.

[0237] In some embodiments, the amino acid sequence for a MHC class I peptide composition for COVID comprises one or more of the SEQ ID NOs: 1 to 30. In some embodiments, any one of the peptides in the COVID composition comprise an amino acid sequence 80, 81, 82, 83, 84, 85, 86, 87, 88, 89, 90, 91, 92, 93, 94, 95, 96, 97, 98 or 99% identical to SEQ ID NOs: 1 to 30.

[0238] In some embodiments, the amino acid sequence for a MHC class I peptide composition for COVID comprises two or more of the SEQ ID NOs: 1 to 30. In some embodiments, any one of the peptides in the COVID composition comprise an amino acid sequence 80, 81, 82, 83, 84, 85, 86, 87, 88, 89, 90, 91, 92, 93, 94, 95, 96, 97, 98 or 99% identical to SEQ ID NOs: 1 to 30.

[0239] Table 1 shows MHC class I peptide sequences described herein including the respective SEQ ID NO, amino acid sequence corresponding to the SEQ ID NO, the seed amino acid sequence (i.e., the amino acid sequence of the wild type protein fragment), the amino acid substitution (if any) for heteroclitic peptides at positions 2 and C (carboxyl terminus), and notes detailing embodiments in which the peptide may be included in a peptide composition as described herein. Table 1 also shows if the seed peptide is contained in SARS-CoV-1 and/or SARS-CoV-2. In some embodiments, composition peptides are selected depending upon the strain protection desired for SARS-CoV. In some embodiments, any combination of peptides listed in Table 1 (SEQ ID NOs: 1 to 30) may be used to create a peptide composition having between about 1 and about 40 peptides. In some embodiments, any one of the peptides (peptides 1 to 30; SEQ ID NOs: 1 to 30) in the composition comprises an amino acid sequence 80, 81, 82, 83, 84, 85, 86, 87, 88, 89, 90, 91, 92, 93, 94, 95, 96, 97, 98 or 99% identical to any of SEQ ID NOs: 1 to 30.

[0240] In some embodiments, Table 1 describes preferred peptides for compositions of a desired size. In some embodiments, a composition of size n is selected from a desired column of Table 1, and a peptide is included if it is annotated as having a number between 1 and n.

[0241] Additional amino acid sequences of MHC class I composition peptides are provided in Sequence Listings (SEQ ID NOs: 64 to 84878). In some embodiments, any combination of MHC class I peptides disclosed herein (SEQ ID NOs: 1 to 30 and SEQ ID NOs: 64 to 84878) may be used to create a peptide composition having between about 1 and about 40 peptides. In some embodiments, any one of the peptides (SEQ ID NOs: 1 to 30 and SEQ ID NOs: 64 to 84878) in the composition comprises or contains an amino acid sequence 80, 81, 82, 83, 84, 85, 86, 87, 88, 89, 90, 91, 92, 93, 94, 95, 96, 97, 98 or 99% identical to any of SEQ ID NOs: 1 to 30 or SEQ ID NOs: 64 to 84878.

[0242] In some embodiments, the composition comprising the MHC class I peptides disclosed herein is an immunogenic composition. In some embodiments, the composition is a vaccine.

### MHC Class II Peptide Sequences

[0243] In some embodiments, a peptide composition comprises about 1 to 40 MHC class II peptides with each peptide consisting of about 20 amino acids. In some embodiments, an MHC class II peptide composition is intended to prevent COVID. In some embodiments, an MHC class II peptide composition is intended to treat COVID.

[0244] In some embodiments, the amino acid sequence for a MHC class II peptide composition for COVID comprises one or more of the SEQ ID NOs: 31 to 63. In some embodiments, any one of the peptides in the COVID composition comprise an amino acid sequence 80, 81, 82, 83, 84, 85, 86, 87, 88, 89, 90, 91, 92, 93, 94, 95, 96, 97, 98 or 99% identical to SEQ ID NOs: 31 to 63.

[0245] In some embodiments, the amino acid sequence for a MHC class II peptide composition for COVID comprises two or more of the SEQ ID NOs: 31 to 63. In some embodiments, any one of the peptides in the COVID composition comprise an amino acid sequence 80, 81, 82, 83, 84, 85, 86, 87, 88, 89, 90, 91, 92, 93, 94, 95, 96, 97, 98 or 99% identical to SEQ ID NOs: 31 to 63.

[0246] Table 2 summarizes MHC class II peptide sequences described herein including the respective SEQ ID NO, amino acid sequence corresponding to the SEQ ID NO, the amino acid sequence corresponding to the peptide's binding core, the seed amino acid sequence (i.e., the amino acid sequence of the wild type protein fragment), the seed amino acid sequence of the binding core, and the amino acid substitution (if any) for heteroclitic peptides at positions 1, 4, 6, and 9. Table 2 also shows if the seed peptide is contained in SARS-CoV-1 and/or SARS-CoV-2. In some embodiments, composition peptides are selected depending upon the strain protection desired for SARS-CoV. Table 2 includes peptide sequences comprising SEQ ID NOs: 31 to 63. SEQ ID NOs: 31 to 63 (Table 2) encode for recombinant peptides. In some embodiments, any combination of peptides listed in Table 2 (SEQ ID NOs: 31 to 63) may be used to create a peptide composition having between about 1 and about 40 peptides. In some embodiments, any one of the peptides (peptides 31 to 63; SEQ ID NOs: 31 to 63) in the composition comprises an amino acid sequence 80, 81, 82, 83, 84, 85, 86, 87, 88, 89, 90, 91, 92, 93, 94, 95, 96, 97, 98 or 99% identical to any of SEQ ID NOs: 31 to 63.

[0247] In some embodiments, Table 2 describes preferred peptides for compositions of a desired size. In some embodiments, a composition of size n is selected from a desired column of Table 2, and a peptide is included if it is annotated as having a number between 1 and n.

[0248] Additional amino acid sequences of MHC class II composition peptides are provided in Sequence Listings (SEQ ID NOs: 84879 to 102214). In some embodiments, any combination of MHC class IT peptides disclosed herein (SEQ ID NOs: 31 to 63 and SEQ ID NOs: 84879 to 102214) may be used to create a peptide composition having between about 1 and about 40 peptides. In some embodiments, any one of the peptides (SEQ ID NOs: 31 to 63 and SEQ ID NOs: 84879 to 102214) in the composition comprises or contains an amino acid sequence 80, 81, 82, 83, 84, 85, 86, 87, 88, 89, 90, 91, 92, 93, 94, 95, 96, 97, 98 or 99% identical to any of SEQ ID NOs: 31 to 63 or SEQ ID NOs: 84879 to 102214.

[0249] In some embodiments, the composition comprising the MHC class II peptides disclosed herein is an immunogenic composition. In some embodiments, the composition is a vaccine.

[0250] In some embodiments, any combination of MHC class I and/or MHC class II peptides disclosed herein (SEQ ID NOs: 1 to 102215) may be used to create a peptide composition having between about 2 and about 40 peptides. In some embodiments, any one of the peptides (peptides 1 to 102215; SEQ ID NOs: 1 to 102215) in the composition comprises an amino acid sequence 80, 81, 82, 83, 84, 85, 86, 87, 88, 89, 90, 91, 92, 93, 94, 95, 96, 97, 98 or 99% identical to any of SEQ ID NOs: 1 to 102215.

[0251] In some embodiments, the composition comprising the MHC class I and/or MHC class II peptides disclosed herein is an immunogenic composition. In some embodiments, the composition is a vaccine.

TABLE 1
Example Composition Peptides (MHC class I)

| | | | | Hetero- | Hetero- | | | |
|---|---|---|---|---|---|---|---|---|
| | Sequence | | | clitic | clitic | | Seed | Seed |
| | corres- | | | Modifi- | Modifi- | | In | In |
| | ponding | | | cation | cation | Vaccine | SARS- | SARS- |
| SEQ ID NO | to SEQ ID | Seed | Seed SEQ ID NO | P2 | C-term | Sizes | CoV-2 | CoV-1 |
| SEQ ID NO: 1 | KYFDTYNLW | KQFDTYNLW | SEQ ID NO: 27 | Q2Y | — | 12-30 | True | True |
| SEQ ID NO: 2 | KMFAAETLK | KLFAAETLK | SEQ ID NO: 21 | L2M | — | 13-30 | True | True |
| SEQ ID NO: 3 | WVFGTTLDSK | WIFGTTLDSK | SEQ ID NO: 10358 | I2V | — | 14-30 | True | False |
| SEQ ID NO: 4 | LRIERFVSL | LMIERFVSL | SEQ ID NO: 30 | M2R | — | 15-30 | True | True |
| SEQ ID NO: 5 | YAFCTVNAL | YVFCTVNAL | SEQ ID NO: 20 | V2A | — | 16-30 | True | True |
| SEQ ID NO: 6 | KMFDTYNLF | KQFDTYNLW | SEQ ID NO: 27 | Q2M | W9F | 17-30 | True | True |
| SEQ ID NO: 7 | TTLPVNVAW | TTLPVNVAF | SEQ ID NO: 7058 | — | F9W | 18-30 | True | True |
| SEQ ID NO: 8 | KVFAAETLK | KLFAAETLK | SEQ ID NO: 21 | L2V | — | 19-30 | True | True |
| SEQ ID NO: 9 | VSDKYFDCY | VVDKYFDCY | SEQ ID NO: 6424 | V2S | — | 20-30 | True | True |
| SEQ ID NO: 10 | KYFDTYNLF | KQFDTYNLW | SEQ ID NO: 27 | Q2Y | W9F | 21-30 | True | True |
| SEQ ID NO: 11 | IAAGICASY | IGAGICASY | SEQ ID NO: 10108 | G2A | — | 22-30 | True | True |
| SEQ ID NO: 12 | YTFCTVNAM | YVFCTVNAL | SEQ ID NO: 20 | V2T | L9M | 23-30 | True | True |
| SEQ ID NO: 13 | WTFGTTLDSK | WIFGTTLDSK | SEQ ID NO: 10358 | I2T | — | 24-30 | True | False |
| SEQ ID NO: 14 | LMIERFVSM | LMIERFVSL | SEQ ID NO: 30 | —- | L9M | 25-30 | True | True |
| SEQ ID NO: 15 | IMDYDYYRY | ISDYDYYRY | SEQ ID NO: 23 | S2M | — | 26-30 | True | True |
| SEQ ID NO: 16 | KWFDTYNLF | KQFDTYNLW | SEQ ID NO: 27 | Q2W | W9F | 27-30 | True | True |
| SEQ ID NO: 17 | LMPRWYFYY | LSPRWYFYY | SEQ ID NO: 25 | S2M | — | 28-30 | True | True |
| SEQ ID NO: 18 | KTFAAETLK | KLFAAETLK | SEQ ID NO: 21 | L2T | — | 29-30 | True | True |
| SEQ ID NO: 19 | VTFLHVTYV | VVFLHVTYV | SEQ ID NO: 10258 | V2T | — | 30 | True | True |
| SEQ ID NO: 20 | YVFCTVNAL | YVFCTVNAL | SEQ ID NO: 20 | — | — | 1-30 | True | True |
| SEQ ID NO: 21 | KLFAAETLK | KLFAAETLK | SEQ ID NO: 21 | — | — | 2-30 | True | True |
| SEQ ID NO: 22 | IPFAMQMAY | IPFAMQMAY | SEQ ID NO: 22 | — | — | 3-30 | True | True |
| SEQ ID NO: 23 | ISDYDYYRY | ISDYDYYRY | SEQ ID NO: 23 | — | — | 4-30 | True | True |
| SEQ ID NO: 24 | FLLNKEMYL | FLLNKEMYL | SEQ ID NO: 24 | — | — | 5-30 | True | True |
| SEQ ID NO: 25 | LSPRWYFYY | LSPRWYFYY | SEQ ID NO: 25 | — | — | 6-30 | True | True |
| SEQ ID NO: 26 | SETKCTLKSF | SETKCTLKSF | SEQ ID NO: 26 | — | — | 7-30 | True | False |
| SEQ ID NO: 27 | KQFDTYNLW | KQFDTYNLW | SEQ ID NO: 27 | — | — | 8-30 | True | True |
| SEQ ID NO: 28 | SELVIGAVI | SELVIGAVI | SEQ ID NO: 28 | — | — | 9-30 | True | True |
| SEQ ID NO: 29 | FVFKNIDGY | FVFKNIDGY | SEQ ID NO: 29 | — | — | 10-30 | True | False |
| SEQ ID NO: 30 | LMIERFVSL | LMIERFVSL | SEQ ID NO: 30 | — | — | 11-30 | True | True |

TABLE 2
Example Composition Peptides (MHC class II)

| | Sequence | | | | | Hetero- | Hetero- | Hetero- | Hetero- | | | |
|---|---|---|---|---|---|---|---|---|---|---|---|---|
| | corres- | | | | | clitic | clitic | clitic | clitic | | Seed | Seed |
| | ponding | | | Seed | | Modiif- | Modifi- | Modifi- | Modifi- | | In | In |
| SEQ ID | to | | | SEQ | Seed | cation | cation | cation | cation | Vaccine | SARS- | SARS- |
| NO | SEQ ID | Core | Seed | ID NO | Core | P1 | P4 | P6 | P9 | Sizes | CoV-2 | CoV-1 |
| SEQ ID | GAGAALQI | FAMH | GAGAAL | SEQ | FAMQ | — | Q4H | A6F | F9V | 6-30 | True | True |
| NO: 31 | PFAMHMF | MFYRV | QIPFAMQ | ID NO: | MAYR | | | | | | | |
| | YRVN | | MAYRFN | 60 | F | | | | | | | |
| SEQ ID | GAGAALQI | FAMH | GAGAAL | SEQ | FAMQ | — | Q4H | A6S | F9I | 7-10 | True | True |
| NO: 32 | PFAMHMS | MSYRI | QIPFAMQ | ID NO: | MAYR | | | | | | | |
| | YRIN | | MAYRFN | 60 | F | | | | | | | |
| SEQ ID | SELVIGAII | IILNGA | SELVIGA | SEQ | VILRG | V1I | R4N | H6A | I9V | 8-30 | True | False |
| NO: 33 | LNGALRV | LRV | VILRGHL | ID NO: | HLRI | | | | | | | |
| | AGH | | RIAGH | 85459 | | | | | | | | |
| SEQ ID | GAGAAFQI | FQIHFF | GAGAAL | SEQ | LQIPF | L1F | P4H | A6F | M9T | 9-30 | True | True |
| NO: 34 | HFFMQTA | MQT | QIPFAMQ | ID NO: | AMQ | | | | | | | |
| | YRFN | | MAYRFN | 60 | M | | | | | | | |
| SEQ ID | SELIIGAVP | IIGAVP | SELVIGA | SEQ | VIGA | V1I | — | I6P | G9A | 10-30 | True | False |
| NO: 35 | LRAHLRIA | LRA | VILRGHL | ID NO: | VILRG | | | | | | | |
| | GH | | RIAGH | 85459 | | | | | | | | |
| SEQ ID | GAGAALQI | FAMH | GAGAAL | SEQ | FAMQ | — | Q4H | A6S | F9V | 11-30 | Truc | Truc |
| NO: 36 | PFAMHMS | MSYRV | QIPFAMQ | ID NO: | MAYR | | | | | | | |
| | YRVN | | MAYRFN | 60 | F | | | | | | | |
| SEQ ID | GAGAALQI | FAMM | GAGAAL | SEQ | FAMQ | — | Q4M | A6N | F9A | 11-30 | Truc | Truc |
| NO: 37 | PFAMMMN | MNYR | QIPFAMQ | ID NO: | MAYR | | | | | | | |
| | YRAN | A | MAYRFN | 60 | F | | | | | | | |
| SEQ ID | GAGAALQI | LAMYM | GAGAAL | SEQ | FAMQ | F1I | Q4Y | A6N | F9I | 12-30 | True | True |
| NO: 38 | PIAMYMN | NYRI | QIPFAMQ | ID NO: | MAYR | | | | | | | |
| | YRIN | | MAYRFN | 60 | F | | | | | | | |
| SEQ ID | VEAELQID | LQIDRI | VEAEVQI | SEQ | VQID | V1L | — | L6I | G9K | 13-18, | True | True |
| NO: 39 | RIITKRLQS | ITK | DRLITGR | ID NO: | RLITG | | | | | 20-30 | | |
| | LQ | | LQSLQ | 99751 | | | | | | | | |
| SEQ ID | GAGAALQI | LAMAM | GAGAAL | SEQ | FAMQ | F1I | Q4A | — | F9V | 14-30 | True | True |
| NO: 40 | PIAMAMA | AYRV | QIPFAMQ | ID NO: | MAYR | | | | | | | |
| | YRVN | | MAYRFN | 60 | F | | | | | | | |
| SEQ ID | VEAEFQIS | FQISRF | VEAEVQI | SEQ | VQID | V1F | D4S | L6F | G9T | 15-30 | True | True |
| NO: 41 | RFITTRLQS | ITT | DRLITGR | ID NO: | RLITG | | | | | | | |
| | LQ | | LQSLQ | 99751 | | | | | | | | |
| SEQ ID | VKDCVVL | VVLHS | VKDCVV | SEQ | VVLH | — | — | Y6F | S9T | 16-30 | True | False |
| NO: 42 | HSFFTTDY | FFTT | LHSYFTS | ID NO: | SYFTS | | | | | | | |
| | YQLY | | DYYQLY | 61 | | | | | | | | |
| SEQ ID | GAGAALQI | FAMSM | GAGAAL | SEQ | FAMQ | — | Q4S | — | F9I | 17-30 | True | True |
| NO: 43 | PFAMSMA | AYRI | QIPFAMQ | ID NO: | MAYR | | | | | | | |
| | YRIN | | MAYRFN | 60 | F | | | | | | | |
| SEQ ID | SELMIGAV | MIGAV | SELVIGA | SEQ | VIGA | V1M | — | I6P | G9A | 18-30 | True | False |
| NO: 44 | PLRAHLRI | PLRA | VILRGHL | ID NO: | VILRG | | | | | | | |
| | AGH | | RIAGH | 85459 | | | | | | | | |
| SEQ ID | GAGAALQI | FAMSM | GAGAAL | SEQ | FAMQ | — | Q4S | A6F | F9V | 19-30 | True | True |
| NO: 45 | PFAMSMF | FYRV | QIPFAMQ | ID NO: | MAYR | | | | | | | |
| | YRVN | | MAYRFN | 60 | F | | | | | | | |
| SEQ ID | VEAEFQID | FQIDRII | VEAEVQI | SEQ | VQID | V1F | — | L6I | G9Y | 19 | True | True |
| NO: 46 | RIITYRLOS | TY | DRLITGR | ID NO: | RLITG | | | | | | | |
| | LQ | | LQSLQ | 99751 | | | | | | | | |
| SEQ ID | GAGAALQI | FAMSM | GAGAAL | SEQ | FAMQ | — | Q4S | A6N | F9I | 20-30 | True | True |
| NO: 47 | PFAMSMN | NYRI | QIPFAMQ | ID NO: | MAYR | | | | | | | |
| | YRIN | | MAYRFN | 60 | F | | | | | | | |
| SEQ ID | VEAEVQID | FITTRF | VEAEVQI | SEQ | LITGR | L1F | G4T | L6F | — | 21, | True | True |
| NO: 48 | RFITTRFQS | QSL | DRLITGR | ID NO: | LOSL | | | | | 25-30 | | |
| | LQ | | LQSLQ | 99751 | | | | | | | | |
| SEQ ID | SELMIGAV | MIGAV | SELVIGA | SEQ | VIGA | V1M | — | 16P | G9S | 22-30 | True | False |
| NO: 49 | PLRSHLRI | PLRS | VILRGHL | ID NO: | VILRG | | | | | | | |
| | AGH | | RIAGH | 85459 | | | | | | | | |
| SEQ ID | VEAEVQID | FITNRF | VEAEVQI | SEQ | LITGR | L1F | G4N | L6F | — | 22-24 | True | True |
| NO: 50 | RFITNRFQS | QSL | DRLITGR | ID NO: | LQSL | | | | | | | |
| | LQ | | LQSLQ | 99751 | | | | | | | | |
| SEQ ID | GAGAALQI | FAMH | GAGAAL | SEQ | FAMQ | — | Q4H | A6F | F9L | 23-30 | True | True |
| NO: 51 | PFAMHMF | MFYRL | QIPFAMQ | ID NO: | MAYR | | | | | | | |
| | YRLN | | MAYRFN | 60 | F | | | | | | | |
| SEQ ID | GAGAALQI | FAMN | GAGAAL | SEQ | FAMQ | — | Q4N | — | F9I | 24-30 | True | True |
| NO: 52 | PFAMNMA | MAYRI | QIPFAMQ | ID NO: | MAYR | | | | | | | |
| | YRIN | | MAYRFN | 60 | F | | | | | | | |
| SEQ ID | VKDCVVL | VVLHS | VKDCVV | SEQ | VVLH | — | — | Y6F | S9V | 25-30 | True | False |
| NO: 53 | HSFFTVDY | FFTV | LHSYFTS | ID NO: | SYFTS | | | | | | | |
| | YQLY | | DYYQLY | 61 | | | | | | | | |
| SEQ ID | SELMIGAV | MIGAV | SELVIGA | SEQ | VIGA | V1M | — | I6A | G9A | 26-30 | True | False |
| NO: 54 | ALRAHLRI | ALRA | VILRGHL | ID NO: | VILRG | | | | | | | |
| | AGH | | RIAGH | 85459 | | | | | | | | |
| SEQ ID | GAGAALQI | FAMN | GAGAAL | SEQ | FAMQ | — | Q4N | A6F | F9V | 27-30 | Truc | Truc |
| NO: 55 | PFAMNMF | MFYRV | QIPFAMQ | ID NO: | MAYR | | | | | | | |
| | YRVN | | MAYRFN | 60 | F | | | | | | | |
| SEQ ID | SELIIGAVA | IIGAVA | SELVIGA | SEQ | VIGA | V1I | — | I6A | G9A | 28-30 | Truc | Falsc |
| NO: 56 | LRAHLRIA | LRA | VILRGHL | ID NO: | VILRG | | | | | | | |
| | GH | | RIAGH | 85459 | | | | | | | | |
| SEQ ID | SELNIGAV | NIGAV | SELVIGA | SEQ | VIGA | V1N | — | I6V | G9A | 29-30 | True | False |
| NO: 57 | VLRAHLRI | VLRA | VILRGHL | ID NO: | VILRG | | | | | | | |
| | AGII | | RIAGII | 85459 | | | | | | | | |
| SEQ ID | GAGAALQI | LAMNM | GAGAAL | SEQ | FAMQ | F1I | Q4N | — | F9L | 30 | True | True |
| NO: 58 | PIAMNMA | AYRL | QIPFAMQ | ID NO: | MAYR | | | | | | | |
| | YRLN | | MAYRFN | 60 | F | | | | | | | |
| SEQ ID | SFRLFART | — | SFRLFAR | SEQ | — | — | — | — | — | 1-30 | True | True |
| NO: 59 | RSMWSFN | | TRSMWSF | ID NO: | | | | | | | | |
| | PETN | | NPETN | 59 | | | | | | | | |
| SEQ ID | GAGAALQI | — | GAGAAL | SEQ | — | — | — | — | — | 2-30 | True | True |
| NO: 60 | PFAMQMA | | QIPFAMQ | ID NO: | | | | | | | | |
| | YRFN | | MAYRFN | 60 | | | | | | | | |
| SEQ ID | VKDCVVL | — | VKDCVV | SEQ | — | — | — | — | — | 3-30 | True | False |
| NO: 61 | HSYFTSDY | | LHSYFTS | ID NO: | | | | | | | | |
| | YQLY | | DYYQLY | 61 | | | | | | | | |
| SEQ ID | RLITGRLQ | — | RLITGRL | SEQ | — | — | — | — | — | 4-30 | True | True |
| NO: 62 | SLQTYVTQ | | QSLQTYV | ID NO: | | | | | | | | |
| | QLI | | TQQLI | 62 | | | | | | | | |
| SEQ ID | MAYRENGI | — | MAYRFN | SEQ | — | — | — | — | — | 5-30 | True | True |
| NO: 63 | GVTQNVL | | GIGVTQN | ID NO: | | | | | | | | |
| | YENQ | | VLYENQ | 63 | | | | | | | | |

mRNA and DNA Compositions

[0252] In some embodiments, composition peptides are encoded as mRNA or DNA molecules and are administered for expression in vivo as is known in the art. One example of the delivery of compositions by mRNA is found in Kranz et al. (2016), incorporated herein by reference. In some embodiments, composition peptides are encoded in more than one mRNA or DNA molecule as is found in Sahin et. al. (2017). In one embodiment, a construct comprises 40 peptides, including a 20-peptide combined MHC class I SARS-CoV composition and a 20-peptide MHC class II combined SARS-CoV composition, as optimized by the procedure described herein. Peptides are prepended with a secretion signal sequence at the N-terminus and followed by an MHC class I trafficking signal (MITD) (See Kreiter et al., 2008; Sahin et al., 2017, U.S. Pat. No. 8,637,006, incorporated by reference in their entireties herein). The MITD) has been shown to route antigens to pathways for HLA class I and class II presentation (Kreiter et al., 2008). Here we combine all peptides of each MHC class into a single construct using non-immunogenic glycine/serine linkers from Sahin et al. (2017), though it is also plausible to construct individual constructs containing single peptides with the same secretion and MITD signals as demonstrated by Kreiter et al. (2008).

[0253] In some embodiments, the amino acid sequence encoded by the mRNA composition comprises SEQ ID NO: 102215. Underlined amino acids correspond to the signal peptide (or leader) sequence. Bolded amino acids correspond to MHC class I (8-11 amino acids in length; 10 peptides) and MHC class II (13-25 amino acids in length; 10 peptides) peptide sequences. Italicized amino acids correspond to the trafficking signal. In alternate embodiments, any number and variation of peptide sequences disclosed herein can be included in an mRNA composition comprising the signal peptide sequence and the trafficking signal as shown in SEQ ID NO: 102215 below.

(SEQ ID NO: 102215)
MRVTAPRTLILLLSGALALTETWAGSGGSGGGGSGGFLLNKEMYLGGSGGGGSGGFV
FKNIDGYGGSGGGGSGGIPFAMQMAYGGSGGGGSGGISDYDYYRYGGSGGGGSGGK
LFAAETLKGGSGGGGSGGKQFDTYNLWGGSGGGGSGGLMIERFVSLGGSGGGGSGG
LSPRWYFYYGGSGGGGSGGSELVIGAVIGGSGGGGSGGSETKCTLKSFGGSGGGGSG
GYVFCTVNALGGSGGGGSGGKMFAAETLKGGSGGGGSGGKMFDTYNLFGGSGGGG
SGGKVFAAETLKGGSGGGGSGGKYFDTYNLWGGSGGGGSGGLRIERFVSLGGSGGG
GSGGTTLPVNVAWGGSGGGGSGGVSDKYFDCYGGSGGGGSGGWVFGTTLDSKGGS
GGGGSGGYAFCTVNALGGSGGGGSGGGAGAALQIPFAMQMAYRFNGGSGGGGSGG
MAYRFNGIGVTQNVLYENQGGSGGGGSGGRLITGRLQSLQTYVTQQLIGGSGGGGS
GGSFRLFARTRSMWSFNPETNGGSGGGGSGGVKDCVVLHSYFTSDYYQLYGGSGG
GGSGGGAGAAFQIHFFMQTAYRFNGGSGGGGSGGGAGAALQIPFAMHMFYRVNG
GSGGGGSGGGAGAALQIPFAMHMSYRVNGGSGGGGSGGGAGAALQIPFAMMMNY
RANGGSGGGGSGGGAGAALQIPFAMSMAYRINGGSGGGGSGGGAGAALQIPFAMS
MFYRVNGGSGGGGSGGGAGAALQIPFAMSMNYRINGGSGGGGSGGGAGAALQIPIA
MAMAYRVNGGSGGGGSGGGAGAALQIPIAMYMNYRINGGSGGGGSGGSELIIGAVP
LRAHLRIAGHGGSGGGGSGGSELMIGAVPLRAHLRIAGHGGSGGGGSGGSELVIGAI
ILNGALRVAGHGGSGGGGSGGVEAEFQISRFITTRLQSLQGGSGGGGSGGVEAELQI
DRIITKRLQSLQGGSGGGGSGGVKDCVVLHSFFTTDYYQLYGGSLGGGGSGIVGIVAG
LAVLAVVVIGAVVATVMCRRKSSGGKGGSYSQAASSDSAQGSDVSLTA.

[0254] In some embodiments, one or more MHC class I and/or MHC class II peptides disclosed herein (SEQ ID NO: 1 to 102215) can be encoded in one or more mRNA or DNA molecules and administered for expression in vivo. In some embodiments, between about 2 and about 40 peptide sequences are encoded in one or more mRNA constructs. In some embodiments, between about 2 and about 40 peptide sequences are encoded in one or more DNA constructs (i.e., nucleic acids encoding the amino acids sequences comprising on or more of SEQ ID NOs: 1 to 102215). In some embodiments, the amino acid sequence of the mRNA composition or the nucleic acid sequence of the DNA composition encodes for an amino acid sequence at least about 80, 81, 82, 83, 84, 85, 86, 87, 88, 89, 90, 91, 92, 93, 94, 95, 96, 97, 98 or 99% identical to any of SEQ ID NOs: 1 to 102215.

[0255] In some embodiments, mRNA encoded composition peptides are used as the payload of a self-amplifying RNA vaccine. In one embodiment, the mRNA sequence encoding the composition peptides replaces one or more structural proteins of an infectious alphavirus particle as described in Geall et al. (2012) that is incorporated herein by reference. As is described by Geall et al. (2012), self-amplifying RNA composition can increase the efficiency of antigen production in vivo.

[0256] In some embodiments, the composition comprising the nucleic acids sequence described herein is an immunogenic composition. In some embodiments, the composition is a vaccine.

### Non-Limiting Embodiments of the Subject Matter

[0257] In one aspect, the invention provides for nucleic acid sequences encoding one or more amino acid sequences selected from the group consisting of SEQ ID NOs: 1 to 30.

[0258] In some embodiments, the nucleic acid sequences encode two or more amino acid sequences selected from the group consisting of SEQ ID NOs: 1 to 30.

[0259] In another aspect, the invention provides for a composition comprising nucleic acid sequences encoding one or more amino acid sequences selected from the group consisting of SEQ ID NOs: 1 to 30.

[0260] In some embodiments, the composition is administered to a subject. In some embodiments, the composition comprises nucleic acid sequences encoding two or more amino acid sequences selected from the group consisting of SEQ ID NOs: 1 to 30. In some embodiments, the nucleic acid sequences are administered in a construct for expression in vivo. In some embodiments, the in vivo administration of the nucleic acid sequences are configured to produce one or more peptides that is displayed by an HLA class I molecule. In some embodiments, the nucleic acid sequences are configured to allow expression of at least two peptides encoded by the nucleic acid sequences that are each displayed by a peptide specific set of HLA class I alleles, wherein all of the peptide specific sets of HLA class I alleles are not identical. In some embodiments, each of the one or more peptides is a modified or unmodified fragment of a SARS-CoV protein. In some embodiments, the composition is administered in an effective amount to a subject to prevent COVID. In some embodiments, the composition is administered in an effective amount to a subject to treat COVID.

[0261] In some embodiments, the composition comprises nucleic acid sequences encoding at least three amino acid sequences selected from the group consisting of SEQ ID NOs: 1 to 30.

[0262] In another aspect, the invention provides for a peptide composition comprising one or more peptides selected from the group consisting of SEQ ID NOs: 1 to 30.

[0263] In some embodiments, the peptide composition comprises two or more peptides selected from the group consisting of SEQ ID NOs: 1 to 30. In some embodiments, the composition is administered to a subject.

[0264] In some embodiments, the peptide composition comprises three or more peptides selected from the group consisting of SEQ ID NOs: 1 to 30.

[0265] In another aspect, the invention provides for a composition comprising nucleic acid sequences encoding one or more amino acid sequences selected from the group consisting of SEQ ID NOs: 1 to 19.

[0266] In some embodiments, the composition is administered to a subject. In some embodiments, the composition comprises nucleic acid sequences encoding two or more amino acid sequences selected from the group consisting of SEQ ID NOs: 1 to 19. In some embodiments, the nucleic acid sequences are administered in a construct for expression in vivo. In some embodiments, the in vivo administration of the nucleic acid sequences are configured to produce one or more peptides that is displayed by an HLA class I molecule. In some embodiments, the nucleic acid sequences are configured to allow expression of at least two peptides encoded by the nucleic acid sequences that are each displayed by a peptide specific set of HLA class I alleles, wherein all of the peptide specific sets of HLA class I alleles are not identical. In some embodiments, each of the one or more peptides is a modified or unmodified fragment of a SARS-CoV protein. In some embodiments, the composition is administered in an effective amount to a subject to prevent COVID. In some embodiments, the composition is administered in an effective amount to a subject to treat COVID.

[0267] In some embodiments, the composition comprises nucleic acid sequences encoding at least three amino acid sequences selected from the group consisting of SEQ ID NOs: 1 to 19.

[0268] In another aspect, the invention provides for a method of treating or preventing COVID by administering to a subject a composition comprising nucleic acid sequences encoding one or more amino acid sequences selected from the group consisting of SEQ ID NOs: 1 to 19.

[0269] In some embodiments, the composition comprises nucleic acid sequences encoding two or more amino acid sequences selected from the group consisting of SEQ ID NOs: 1 to 19.

[0270] In another aspect, the invention provides for a peptide composition comprising one or more peptides selected from the group consisting of SEQ ID NOs: 1 to 19.

[0271] In some embodiments, the peptide composition comprises two or more peptides selected from the group consisting of SEQ ID NOs: 1 to 19. In some embodiments a peptide in the peptide composition is displayed by an HLA class I molecule. In some embodiments, the at least two peptides are each capable of being displayed by a peptide specific set of HLA class I alleles, wherein all of the peptide specific sets of HLA class I alleles are not identical. In some embodiments, a peptide in the peptide composition is a modified or unmodified fragment of a SARS-CoV protein. In some embodiments, the peptide composition is administered in an effective amount to a subject to prevent COVID. In some embodiments, the peptide composition is administered in an effective amount to a subject to treat COVID.

[0272] In some embodiments, the peptide composition comprises three or more peptides selected from the group consisting of SEQ ID NOs: 1 to 19.

[0273] In another aspect, the invention provides for a method of treating or preventing COVID in a subject comprising administering to the subject a peptide composition comprising one or more peptides selected from the group consisting of SEQ ID NOs: 1 to 19.

[0274] In some embodiments, the peptide composition comprises two or more peptides selected from the group consisting of SEQ ID NOs: 1 to 19.

[0275] In another aspect, the invention provides for nucleic acid sequences encoding one or more amino acid sequences selected from the group consisting of SEQ ID NOs: 31 to 63.

[0276] In some embodiments, the nucleic acid sequences encode two or more amino acid sequences selected from the group consisting of SEQ ID NOs: 31 to 63.

[0277] In another aspect, the invention provides for a composition comprising nucleic acid sequences encoding one or more amino acid sequences selected from the group consisting of SEQ ID NOs: 31 to 63.

[0278] In some embodiments, the composition is administered to a subject. In some embodiments, the composition comprises nucleic acid sequences encoding two or more amino acid sequences selected from the group consisting of SEQ ID NOs: 31 to 63. In some embodiments, the nucleic acid sequences are administered in a construct for expression in vivo. In some embodiments, the in vivo administration of the nucleic acid sequences are configured to produce one or more peptides that is displayed by an HLA class II molecule. In some embodiments, the nucleic acid sequences are configured to allow expression of at least two peptides encoded by the nucleic acid sequences that are each displayed by a peptide specific set of HLA class II alleles, wherein all of the peptide specific sets of HLA class II alleles are not identical. In some embodiments, each of the one or more peptides is a modified or unmodified fragment of a SARS-CoV protein. In some embodiments, the composition is administered in an effective amount to a subject to prevent COVID. In some embodiments, the composition is administered in an effective amount to a subject to treat COVID.

[0279] In some embodiments, the composition comprises nucleic acid sequences encoding at least three amino acid sequences selected from the group consisting of SEQ ID NOs: 31 to 63.

[0280] In another aspect, the invention provides for a peptide composition comprising one or more peptides selected from the group consisting of SEQ ID NOs: 31 to 63.

[0281] In some embodiments, the peptide composition comprises two or more peptides selected from the group consisting of SEQ ID NOs: 31 to 63. In some embodiments, the composition is administered to a subject.

[0282] In some embodiments, the peptide composition comprises three or more peptides selected from the group consisting of SEQ ID NOs: 31 to 63.

[0283] In another aspect, the invention provides for nucleic acid sequences encoding one or more amino acid sequences selected from the group consisting of SEQ ID NOs: 31 to 58.

[0284] In some embodiments, the nucleic acid sequences encode two or more amino acid sequences selected from the group consisting of SEQ ID NOs: 31 to 58.

[0285] In another aspect, the invention provides for a composition comprising nucleic acid sequences encoding one or more amino acid sequences selected from the group consisting of SEQ ID NOs: 31 to 58.

[0286] In some embodiments, the composition comprises nucleic acid sequences encoding two or more amino acid sequences selected from the group consisting of SEQ ID NOs: 31 to 58. In some embodiments, the nucleic acid sequences are administered in a construct for expression in vivo. In some embodiments, the in vivo administration of the nucleic acid sequences are configured to produce one or more peptides that is displayed by an HLA class II molecule. In some embodiments, the nucleic acid sequences are configured to allow expression of at least two peptides encoded by the nucleic acid sequences that are each displayed by a peptide specific set of HLA class II alleles, wherein all of the peptide specific sets of HLA class II alleles are not identical. In some embodiments, each of the one or more peptides is a modified or unmodified fragment of a SARS-CoV protein. In some embodiments, the composition is administered in an effective amount to a subject to prevent COVID. In some embodiments, the composition is administered in an effective amount to a subject to treat COVID. In some embodiments, the composition comprises nucleic acid sequences encoding at least three amino acid sequences selected from the group consisting of SEQ ID NOs: 31 to 58.

[0287] In some embodiments, the composition comprises nucleic acid sequences encoding at least three amino acid sequences selected from the group consisting of SEQ ID NOs: 31 to 58.

[0288] In another aspect, the invention provides for a method of treating or preventing COVID by administering to a subject a composition comprising nucleic acid sequences encoding one or more amino acid sequences selected from the group consisting of SEQ ID NOs: 31 to 58.

[0289] In some embodiments, the composition comprises nucleic acid sequences encoding two or more amino acid sequences selected from the group consisting of SEQ ID NOs: 31 to 58.

[0290] In another aspect, the invention provides for a peptide composition comprising one or more peptides selected from the group consisting of SEQ ID NOs: 31 to 58.

[0291] In some embodiments, the peptide composition comprises two or more peptides selected from the group consisting of SEQ ID NOs: 31 to 58. In some embodiments a peptide in the peptide composition is displayed by an HLA class II molecule. In some embodiments, the at least two peptides are each capable of being displayed by a peptide specific set of HLA class II alleles, wherein all of the peptide specific sets of HLA class II alleles are not identical. In some embodiments, a peptide in the peptide composition is a modified or unmodified fragment of a SARS-CoV protein. In some embodiments, the peptide composition is administered in an effective amount to a subject to prevent COVID. In some embodiments, the peptide composition is administered in an effective amount to a subject to treat COVID.

[0292] In some embodiments, the peptide composition comprises three or more peptides selected from the group consisting of SEQ ID NOs: 31 to 58.

[0293] In another aspect, the invention provides for a method of treating or preventing COVID in a subject comprising administering to the subject a peptide composition comprising one or more peptides selected from the group consisting of SEQ ID NOs: 31 to 58.

[0294] In some embodiments, the peptide composition comprises two or more peptides selected from the group consisting of SEQ ID NOs: 31 to 58.

[0295] In some embodiments, the compositions, including peptide compositions, of the invention are immunogenic compositions. To this end, the invention provides for a method of inducing an immunogenic response in a subject comprising administering to the subject a composition of the invention.

[0296] In some embodiments, compositions, including peptide compositions, of the invention are vaccines.

### Compositions

[0297] In some embodiments, the nucleic acid sequences of this disclosure are administered in a composition. In some embodiments, the nucleic acid sequences of this disclosure are administered in a pharmaceutical composition that includes a pharmaceutically acceptable carrier. In some embodiments, the pharmaceutical composition is in the form of a spray, aerosol, gel, solution, emulsion, lipid nanoparticle, nanoparticle, or suspension. In some embodiments, the composition or pharmaceutical composition is in the form of a cationic nanoemulsion, one example of which is described by Brito et al. (2014) that is incorporated herein by reference.

[0298] In some embodiments, the one or more peptides of this disclosure are administered in a composition. In some embodiments, the one or more peptides of this disclosure are administered in a pharmaceutical composition that includes a pharmaceutically acceptable carrier. In some embodiments, the composition or pharmaceutical composition is comprised of the third peptide set, as described in this disclosure. In some embodiments, the pharmaceutical composition is in the form of a spray, aerosol, gel, solution, emulsion, lipid nanoparticle, nanoparticle, or suspension. In some embodiments, the composition pharmaceutical composition is in the form of a cationic nanoemulsion, one example of which is described by Brito et al. (2014) that is incorporated herein by reference.

[0299] The composition is preferably administered to a subject with a pharmaceutically acceptable carrier, i.e., as a pharmaceutical composition. Typically, in some embodiments, an appropriate amount of a pharmaceutically acceptable salt is used in the formulation, which in some embodiments can render the formulation isotonic.

[0300] In certain embodiments, nucleic acid sequences are provided as an immunogenic composition comprising any one of the nucleic acid sequences described herein and a pharmaceutically acceptable carrier.

[0301] In certain embodiments, the peptides are provided as an immunogenic composition comprising any one of the peptides described herein and a pharmaceutically acceptable carrier. In certain embodiments, the immunogenic composition further comprises an adjuvant. In certain embodiments, the peptides are conjugated with other molecules to increase their effectiveness as is known by those practiced in the art. For example, peptides can be coupled to antibodies that recognize cell surface proteins on antigen presenting cells to enhance vaccine effectiveness. One such method for increasing the effectiveness of peptide delivery is described in Woodham, et al. (2018). In certain embodiments for the treatment of autoimmune disorders, the peptides are delivered with a composition and protocol designed to induce tolerance as is known in the art. Example methods for using peptides for immune tolerization are described in Alhadj et al. (2017) and Gibson et al. (2015).

[0302] In some embodiments, the pharmaceutically acceptable carrier is selected from the group consisting of saline, Ringer's solution, dextrose solution, and a combination thereof. Other suitable pharmaceutically acceptable carriers known in the art are contemplated. Suitable carriers and their formulations are described in Remington's Pharmaceutical Sciences, 2005, Mack Publishing Co. The pH of the solution is preferably from about 5 to about 8, and more preferably from about 7 to about 7.5. The formulation may also comprise a lyophilized powder. Further carriers include sustained release preparations such as semipermeable matrices of solid hydrophobic polymers, which matrices are in the form of shaped articles, e.g., films, liposomes or microparticles. It will be apparent to those persons skilled in the art that certain carriers may be more preferable depending upon, for instance, the route of administration and concentration of peptides being administered.

[0303] The phrase pharmaceutically acceptable carrier as used herein means a pharmaceutically acceptable material, composition or vehicle, such as a liquid or solid filler, diluent, excipient, solvent or encapsulating material, involved in carrying or transporting the subject pharmaceutical agent from one organ, or portion of the body, to another organ, or portion of the body. Each carrier is acceptable in the sense of being compatible with the other ingredients of the formulation and not injurious to the patient. Some examples of materials which can serve as pharmaceutically acceptable carriers include: sugars, such as lactose, glucose and sucrose; starches, such as corn starch and potato starch; cellulose, and its derivatives, such as sodium carboxymethyl cellulose, ethyl cellulose and cellulose acetate; powdered tragacanth; malt; gelatin; talc; excipients, such as cocoa butter and suppository waxes; oils, such as peanut oil, cottonseed oil, safflower oil, sesame oil, olive oil, corn oil and soybean oil; glycols, such as butylene glycol; polyols, such as glycerin, sorbitol, mannitol and polyethylene glycol; esters, such as ethyl oleate and ethyl laurate; agar; buffering agents, such as magnesium hydroxide and aluminum hydroxide; alginic acid; pyrogen-free water; isotonic saline; Ringer's solution; ethyl alcohol; phosphate buffer solutions; and other non-toxic compatible substances employed in pharmaceutical formulations. The term carrier denotes an organic or inorganic ingredient, natural or synthetic, with which the active ingredient is combined to facilitate the application. The components of the pharmaceutical compositions also are capable of being comingled with the compounds of the present invention, and with each other, in a manner such that there is no interaction which would substantially impair the desired pharmaceutical efficiency. The composition may also include additional agents such as an isotonicity agent, a preservative, a surfactant, and, a divalent cation, preferably, zinc.

[0304] The composition can also include an excipient, or an agent for stabilization of a peptide composition, such as a buffer, a reducing agent, a bulk protein, amino acids (such as e.g., glycine or praline) or a carbohydrate. Bulk proteins useful in formulating peptide compositions include albumin. Typical carbohydrates useful in formulating peptides include but are not limited to sucrose, mannitol, lactose, trehalose, or glucose.

[0305] Surfactants may also be used to prevent soluble and insoluble aggregation and/or precipitation of peptides or proteins included in the composition. Suitable surfactants include but are not limited to sorbitan trioleate, soya lecithin, and oleic acid. In certain cases, solution aerosols are preferred using solvents such as ethanol. Thus, formulations including peptides can also include a surfactant that can reduce or prevent surface-induced aggregation of peptides by atomization of the solution in forming an aerosol. Various conventional surfactants can be employed, such as polyoxyethylene fatty acid esters and alcohols, and polyoxyethylene sorbitol fatty acid esters. Amounts will generally range between 0.001% and 4% by weight of the formulation. In some embodiments, surfactants used with the present disclosure are polyoxyethylene sorbitan mono-oleate, polysorbate 80, polysorbate 20. Additional agents known in the art can also be included in the composition.

[0306] In some embodiments, the compositions and dosage forms further comprise one or more compounds that reduce the rate by which an active ingredient will decay, or the composition will change in character. So called stabilizers or preservatives may include, but are not limited to, amino acids, antioxidants, pH buffers, or salt buffers. Nonlimiting examples of antioxidants include butylated hydroxy anisole (BHA), ascorbic acid and derivatives thereof, tocopherol and derivatives thereof, butylated hydroxy anisole and cysteine. Nonlimiting examples of preservatives include parabens, such as methyl or propyl p-hydroxybenzoate and benzalkonium chloride. Additional nonlimiting examples of amino acids include glycine or proline.

[0307] The present invention also teaches the stabilization (preventing or minimizing thermally or mechanically induced soluble or insoluble aggregation and/or precipitation of an inhibitor protein) of liquid solutions containing peptides at neutral pH or less than neutral pH by the use of amino acids including proline or glycine, with or without divalent cations resulting in clear or nearly clear solutions that are stable at room temperature or preferred for pharmaceutical administration.

[0308] In one embodiment, the composition is of single unit or multiple unit dosage forms. Compositions of single unit or multiple unit dosage forms of the invention comprise a prophylactically or therapeutically effective amount of one or more compositions (e.g., a compound of the invention, or other prophylactic or therapeutic agent), typically, one or more vehicles, carriers, or excipients, stabilizing agents, and/or preservatives. Preferably, the vehicles, carriers, excipients, stabilizing agents and preservatives are pharmaceutically acceptable.

[0309] In some embodiments, the compositions and dosage forms comprise anhydrous compositions and dosage forms. Anhydrous compositions and dosage forms of the invention can be prepared using anhydrous or low moisture containing ingredients and low moisture or low humidity conditions. Compositions and dosage forms that comprise lactose and at least one active ingredient that comprise a primary or secondary amine are preferably anhydrous if substantial contact with moisture and/or humidity during manufacturing, packaging, and/or storage is expected. An anhydrous composition should be prepared and stored such that its anhydrous nature is maintained. Accordingly, anhydrous compositions are preferably packaged using materials known to prevent exposure to water such that they can be included in suitable formulary kits. Examples of suitable packaging include, but are not limited to, hermetically sealed foils, plastics, unit dose containers (e.g., vials), blister packs, and strip packs.

[0310] Suitable vehicles are well known to those skilled in the art of pharmacy, and non-limiting examples of suitable vehicles include glucose, sucrose, starch, lactose, gelatin, rice, silica gel, glycerol, talc, sodium chloride, dried skim milk, propylene glycol, water, sodium stearate, ethanol, and similar substances well known in the art. Saline solutions and aqueous dextrose and glycerol solutions can also be employed as liquid vehicles. Whether a particular vehicle is suitable for incorporation into a composition or dosage form depends on a variety of factors well known in the art including, but not limited to, the way in which the dosage form will be administered to a patient and the specific active ingredients in the dosage form. Pharmaceutical vehicles can be sterile liquids, such as water and oils, including those of petroleum, animal, vegetable or synthetic origin, such as peanut oil, soybean oil, mineral oil, sesame oil and the like.

[0311] The invention also provides that a composition can be packaged in a hermetically sealed container such as an ampoule or sachette indicating the quantity. In one embodiment, the composition can be supplied as a dry sterilized lyophilized powder in a delivery device suitable for administration to the lower airways of a patient. The compositions can, if desired, be presented in a pack or dispenser device that can contain one or more unit dosage forms containing the active ingredient. The pack can for example comprise metal or plastic foil, such as a blister pack. The pack or dispenser device can be accompanied by instructions for administration.

[0312] Methods of preparing these formulations or compositions include the step of bringing into association a compound of the present invention with the carrier and, optionally, one or more accessory ingredients. In general, the formulations are prepared by uniformly and intimately bringing into association a compound of the present invention with liquid carriers, or finely divided solid carriers, or both, and then, if necessary, shaping the product.

[0313] Formulations of the invention suitable for administration may be in the form of powders, granules, or as a solution or a suspension in an aqueous or non-aqueous liquid, or as an oil-in-water or water-in-oil liquid emulsion, or as an elixir or syrup, or as pastilles (using an inert base, such as gelatin and glycerin, or sucrose and acacia) and/or as mouthwashes and the like, each containing a predetermined amount of a compound of the present invention (e.g., peptides) as an active ingredient.

[0314] A liquid composition herein can be used as such with a delivery device, or they can be used for the preparation of pharmaceutically acceptable formulations comprising peptides that are prepared for example by the method of spray drying. The methods of spray freeze-drying peptides/proteins for pharmaceutical administration disclosed in Maa et al. (2021) are incorporated herein. In another embodiment, the liquid solutions herein are freeze spray dried and the spray-dried product is collected as a dispersible peptide-containing powder that is therapeutically effective when administered to an individual.

[0315] The compounds and compositions of the present invention can be employed in combination therapies, that is, the compounds and compositions can be administered concurrently with, prior to, or subsequent to, one or more other desired therapeutics or medical procedures (e.g., peptide vaccine can be used in combination therapy with another treatment such as chemotherapy, radiation, pharmaceutical agents, and/or another treatment). The particular combination of therapies (therapeutics or procedures) to employ in a combination regimen will take into account compatibility of the desired therapeutics and/or procedures and the desired therapeutic effect to be achieved. It will also be appreciated that the therapies employed may achieve a desired effect for the same disorder (for example, the compound of the present invention may be administered concurrently with another therapeutic or prophylactic).

[0316] The invention also provides a pharmaceutical pack or kit comprising one or more containers filled with one or more of the ingredients of the compositions of the invention. Optionally associated with such container(s) can be a notice in the form prescribed by a governmental agency regulating the manufacture, use or sale of pharmaceuticals or biological products, which notice reflects approval by the agency of manufacture, use or sale for human administration.

[0317] The current invention provides for dosage forms comprising nucleic acid sequences or peptides suitable for treating SARS-CoV infection. The dosage forms can be formulated, e.g., as sprays, aerosols, nanoparticles, liposomes, or other forms known to one of skill in the art. See, e.g., Remington's Pharmaceutical Sciences; Remington: The Science and Practice of Pharmacy supra; Pharmaceutical Dosage Forms and Drug Delivery Systems by Howard C., Ansel et al., Lippincott Williams & Wilkins; 7th edition (Oct. 1, 1999).

[0318] Generally, a dosage form used in the acute treatment of a disease may contain larger amounts of one or more of the active ingredients it comprises than a dosage form used in the chronic treatment of the same disease. In addition, the prophylactically and therapeutically effective dosage form may vary among different conditions. For example, a therapeutically effective dosage form may contain peptides that has an appropriate immunogenic action when intending to treat SARS-CoV infection. On the other hand, a different effective dosage may contain nucleic acid sequences or peptides that has an appropriate immunogenic action when intending to use the peptides of the invention as a prophylactic (e.g., vaccine) against SARS-CoV infection. These and other ways in which specific dosage forms encompassed by this invention will vary from one another and will be readily apparent to those skilled in the art. See, e.g., Remington's Pharmaceutical Sciences, 2005, Mack Publishing Co.; Remington: The Science and Practice of Pharmacy by Gennaro, Lippincott Williams & Wilkins; 20th edition (2003); Pharmaceutical Dosage Forms and Drug Delivery Systems by Howard C. Ansel et al., Lippincott Williams & Wilkins; 7th edition (Oct. 1, 1999); and Encyclopedia of Pharmaceutical Technology, edited by Swarbrick, J. & J. C. Boylan, Marcel Dekker, Inc., New York, 1988, which are incorporated herein by reference in their entirety.

[0319] The pH of a composition or dosage form may also be adjusted to improve delivery and/or stability of one or more active ingredients. Similarly, the polarity of a solvent carrier, its ionic strength, or tonicity can be adjusted to improve delivery. Compounds such as stearates can also be added to compositions or dosage forms to alter advantageously the hydrophilicity or lipophilicity of one or more active ingredients to improve delivery. In this regard, stearates can also serve as a lipid vehicle for the formulation, as an emulsifying agent or surfactant, and as a delivery enhancing or penetration-enhancing agent. Different salts, hydrates, or solvates of the active ingredients can be used to adjust further the properties of the resulting composition.

[0320] Compositions can be formulated with appropriate carriers and adjuvants using techniques to yield compositions suitable for immunization. The compositions can include an adjuvant, such as, for example but not limited to, alum, poly IC, MF-59, squalene-based adjuvants, or liposomal based adjuvants suitable for immunization.

[0321] In some embodiments, the compositions and methods comprise any suitable agent or immune modulation which could modulate mechanisms of host immune tolerance and release of the induced antibodies. In certain embodiments, an immunomodulatory agent is administered in at time and in an amount sufficient for transient modulation of the subject's immune response so as to induce an immune response.

### Expression Systems

[0322] In certain aspects, the invention provides culturing a cell line that expresses any one of the peptides of the invention in a culture medium comprising any of the peptides described herein.

[0323] Various expression systems for producing recombinant proteins/peptides are known in the art, and include, prokaryotic (e.g., bacteria), plant, insect, yeast, and mammalian expression systems. Suitable cell lines, can be transformed, transduced, or transfected with nucleic acids containing coding sequences for the peptides of the invention in order to produce the molecule of interest. Expression vectors containing such a nucleic acid sequence, which can be linked to at least one regulatory sequence in a manner that allows expression of the nucleotide sequence in a host cell, can be introduced via methods known in the art. Practitioners in the art understand that designing an expression vector can depend on factors, such as the choice of host cell to be transfected and/or the type and/or amount of desired protein to be expressed. Enhancer regions, which are those sequences found upstream or downstream of the promoter region in non-coding DNA regions, are also known in the art to be important in optimizing expression. If needed, origins of replication from viral sources can be employed, such as if a prokaryotic host is utilized for introduction of plasmid DNA. However, in eukaryotic organisms, chromosome integration is a common mechanism for DNA replication. For stable transfection of mammalian cells, a small fraction of cells can integrate introduced DNA into their genomes. The expression vector and transfection method utilized can be factors that contribute to a successful integration event. For stable amplification and expression of a desired protein, a vector containing DNA encoding a protein of interest is stably integrated into the genome of eukaryotic cells (for example mammalian cells), resulting in the stable expression of transfected genes. A gene that encodes a selectable marker (for example, resistance to antibiotics or drugs) can be introduced into host cells along with the gene of interest in order to identify and select clones that stably express a gene encoding a protein of interest. Cells containing the gene of interest can be identified by drug selection wherein cells that have incorporated the selectable marker gene will survive in the presence of the drug. Cells that have not incorporated the gene for the selectable marker die. Surviving cells can then be screened for the production of the desired protein molecule.

[0324] A host cell strain, which modulates the expression of the inserted sequences, or modifies and processes the nucleic acid in a specific fashion desired also may be chosen. Such modifications (for example, glycosylation and other post-translational modifications) and processing (for example, cleavage) of peptide/protein products may be important for the function of the peptide/protein. Different host cell strains have characteristic and specific mechanisms for the post-translational processing and modification of proteins and gene products. As such, appropriate host systems or cell lines can be chosen to ensure the correct modification and processing of the target protein expressed. Thus, eukaryotic host cells possessing the cellular machinery for proper processing of the primary transcript, glycosylation, and phosphorylation of the gene product may be used.

[0325] Various culturing parameters can be used with respect to the host cell being cultured. Appropriate culture conditions for mammalian cells are well known in the art (Cleveland W L, et al., 1983) or can be determined by the skilled artisan (see, for example, Animal Cell Culture: A Practical Approach 2nd Ed., Rickwood, D. and Hames, B. D., eds. (Oxford University Press: New York, 1992)). Cell culturing conditions can vary according to the type of host cell selected. Commercially available medium can be utilized.

[0326] Peptides of the invention can be purified from any human or non-human cell which expresses the peptide, including those which have been transfected with expression constructs that express peptides of the invention. For protein recovery, isolation and/or purification, the cell culture medium or cell lysate is centrifuged to remove particulate cells and cell debris. The desired peptide molecule is isolated or purified away from contaminating soluble proteins and peptides by suitable purification techniques. Non-limiting purification methods for proteins include: size exclusion chromatography; affinity chromatography; ion exchange chromatography; ethanol precipitation; reverse phase HPLC; chromatography on a resin, such as silica, or cation exchange resin, e.g., DEAE; chromatofocusing; SDS-PAGE; ammonium sulfate precipitation; gel filtration using, e.g., Sephadex G-75, Sepharose; protein A sepharose chromatography for removal of immunoglobulin contaminants; and the like. Other additives, such as protease inhibitors (e.g., PMSF or proteinase K) can be used to inhibit proteolytic degradation during purification. Purification procedures that can select for carbohydrates can also be used, e.g., ion-exchange soft gel chromatography, or HPLC using cation- or anion exchange resins, in which the more acidic fraction(s) is/are collected.

### Methods of Treatment

[0327] In one embodiment, the subject matter disclosed herein relates to a preventive medical treatment started after following diagnosis of SARS-CoV infection in order to prevent the infection from worsening or to cure the infection. In one embodiment, the subject matter disclosed herein relates to prophylaxis of subjects who are believed to be at risk for SARS-CoV infection or have previously been diagnosed with SARS-CoV infection. In one embodiment, said subjects can be administered a composition of the invention. The invention contemplates using any of the nucleic acid sequences or peptides produced by the systems and methods described herein. In one embodiment, the compositions described herein can be administered subcutaneously via syringe or any other suitable method know in the art.

[0328] The compound(s) or combination of compounds disclosed herein, or compositions may be administered to a cell, mammal, or human by any suitable means. Non-limiting examples of methods of administration include, among others, (a) administration though oral pathways, which includes administration in capsule, tablet, granule, spray, syrup, or other such forms; (b) administration through non-oral pathways such as intraocular, intranasal, intraauricular, rectal, vaginal, intraurethral, transmucosal, buccal, or transdermal, which includes administration as an aqueous suspension, an oily preparation or the like or as a drip, spray, suppository, salve, ointment or the like; (c) administration via injection, including subcutaneously, intraperitoneally, intravenously, intramuscularly, intradermally, intraorbitally, intracapsularly, intraspinally, intrasternally, or the like, including infusion pump delivery; (d) administration locally such as by injection directly in the renal or cardiac area, e.g., by depot implantation; (e) administration topically; as deemed appropriate by those of skill in the art for bringing the compound or combination of compounds disclosed herein into contact with living tissue; (f) administration via inhalation, including through aerosolized, nebulized, and powdered formulations; and (g) administration through implantation.

[0329] As will be readily apparent to one skilled in the art, the effective in vivo dose to be administered and the particular mode of administration will vary depending upon the age, weight and species treated, and the specific use for which the compound or combination of compounds disclosed herein are employed. The determination of effective dose levels, that is the dose levels necessary to achieve the desired result, can be accomplished by one skilled in the art using routine pharmacological methods. Typically, human clinical applications of products are commenced at lower dose levels, with dose level being increased until the desired effect is achieved. Alternatively, acceptable in vitro studies can be used to establish useful doses and routes of administration of the compositions identified by the present methods using established pharmacological methods. Effective animal doses from in vivo studies can be converted to appropriate human doses using conversion methods known in the art (e.g., see Nair A B, Jacob S. A simple practice guide for dose conversion between animals and human. Journal of basic and clinical pharmacy. 2016 March; 7(2):27.)

### Methods of Prevention

[0330] In some embodiments, the peptides prepared using methods of the invention can be used as a vaccine to promote an immune response against SARS-CoV infection. In some embodiments, the invention provides compositions and methods for induction of immune response, for example induction of antibodies to SARS-CoV antigens. In some embodiments, the antibodies are broadly neutralizing antibodies. In some embodiments, the invention provides compositions and methods for induction of immune response, for example induction of a T cell response to SARS-CoV antigens. In some embodiments, the compositions prepared using methods of the invention can be used as a vaccine to promote an immune response against a pathogen. In some embodiments, the nucleic acid sequences or peptides prepared using methods of the invention can be used to promote immune tolerance as an autoimmune disease therapeutic.

[0331] In some embodiments, the peptides prepared using methods of the invention can be combined with additional therapeutic components. In some embodiments, the combination can be encoded in one or more nucleic acids that encode the peptides produced with the methods described herein and additional therapeutic components (e.g., peptides or proteins) that are known in the art. In some embodiments, the combination is created by adding the peptides or proteins that encode the additional therapeutic components of the peptides that result from the methods described here for combined formulation and packaging. An example of the combination of components is the creation of SARS-CoV vaccines that contain components of four different strains of SARS-CoV known as quadrivalent vaccines. In some embodiments, peptide components to invoke an adaptative immune response can be added to such combined vaccines (e.g., SARS-CoV) by using one or more nucleic acids to encode the components and packaging the nucleic acids in a mRNA-LNP or DNA formulation, or separately formulating different components as mRNA-LNP or DNA and then combining them for packaging or immediately before administration to a person. In some embodiments, SARS-CoV or other vaccines that encode one or more protein fragments to produce an antibody response can be combined with a peptide vaccine using the methods described herein to produce a cellular immune response.

[0332] The compositions, systems, and methods disclosed herein are not to be limited in scope to the specific embodiments described herein. Indeed, various modifications of the compositions, systems, and methods in addition to those described will become apparent to those of skill in the art from the foregoing description.

### REFERENCES

[0333] 1. Alhadj A. M., et al., Metabolic and immune effects of immunotherapy with proinsulin peptide in human new-onset type 1 diabetes, Sci. Transl. Med., 2017, 9(402): eaaf7779.
[0334] 2. Alvarez B., et al., MHC Peptidome Deconvolution for Accurate MHC Binding Motif Characterization and Improved T-cell Epitope Predictions, Mol. Cell. Proteomics, 2019, 18(12): 2459-2477.
[0335] 3. Antunes D. A., et al., General Prediction of Peptide-MHC Binding Modes Using Incremental Docking: A Proof of Concept. Sci Rep., 2018 Mar. 12; 8(1):4327-4339.
[0336] 4. Bear A. S., et al., Biochemical and functional characterization of mutant KRAS epitopes validates this oncoprotein for immunological targeting. Nat Commun., 2021 Jul. 16; 12(1):4365-4380.
[0337] 5. Brito L. A., et al., A cationic nanoemulsion for the delivery of next-generation RNA vaccines, Mol. Ther., 2014, 22(12): 2118-2129.
[0338] 6. Bulik-Sullivan B., et al., Deep learning using tumor HLA peptide mass spectrometry datasets improves neoantigen identification, Nat Biotechnol., 2018, 37:55-63.
[0339] 7. Candia M., et al., On peptides and altered peptide ligands: from origin, mode of action and design to clinical application (immunotherapy), Int. Arch. Allergy Immunol., 2016, 170(4): 211-233.
[0340] 8. Chicz R. M., et al., Predominant naturally processed peptides bound to HLA-DR1 are derived from MHC-related molecules and are heterogeneous in size, Nature, 1992, 358(6389): 764-768.
[0341] 9. Cleveland W. L., et al., Routine large-scale production of monoclonal antibodies in a protein-free culture medium, J. Immunol. Methods, 1983, 56(2): 221-234.
[0342] 10. Croft N. P., et al., Most viral peptides displayed by class I MHC on infected cells are immunogenic, Proc. Natl. Acad. Sci. U.S.A., 2019, 116(8): 3112-3117.
[0343] 11. Dai Z., et al., Machine learning optimization of peptides for presentation by class II MHCs, bioRxiv, 2020.
[0344] 12. Geall A. J., et al., Nonviral delivery of self-amplifying RNA vaccines, Proc. Natl. Acad. Sci. USA., 2012, 109(36):14604-14609.
[0345] 13. Gibson V. B., et al., Proinsulin multi-peptide immunotherapy induces antigen-specific regulatory T cells and limits autoimmunity in a humanized model, Clin. Exp. Immunol., 2015, 182(3): 251-260.
[0346] 14. Hie B., et al., Learning the language of viral evolution and escape, Science, 2021 15; 371(6526):284-288.
[0347] 15. Houghton C. S., Immunological validation of the EpitOptimizer program for streamlined design of heteroclitic epitopes, Vaccine, 2007, 25(29): 5330-5342.
[0348] 16. Klinger M., et al., Multiplex identification of antigen-specific T cell receptors using a combination of immune assays and immune receptor sequencing, PLoS One, 2015, 10(10): e0141561.
[0349] 17. Kranz L. M., et al., Systemic RNA delivery to dendritic cells exploits antiviral defence for cancer immunotherapy, Nature, 2016, 534(7607): 396-401.
[0350] 18. Kreiter, S., et al., Increased antigen presentation efficiency by coupling antigens to MHC class I trafficking signals, J. Immunol., 2008, 180(1): 309-318.
[0351] 19. Liu G., et al., Computationally optimized SARS-CoV-2 MHC class I and II vaccine formulations predicted to target human haplotype distributions, Cell Syst., 2020a, 11(2): 131-144.
[0352] 20. Liu G., et al., Predicted cellular immunity population coverage gaps for sars-cov-2 subunit vaccines and their augmentation by compact peptide sets, Cell Syst., 2020b, 12(1): P102-P107.
[0353] 21. Liu G., et al., Maximum n-times Coverage for Vaccine Design, https://arxiv.org/abs/2101.10902v3, 2021.
[0354] 22. London N., et al., Rosetta FlexPepDock web server—high resolution modeling of peptide-protein interactions, Nucleic Acids Res., 2011 July; 39(Web Server issue):W249-253.
[0355] 23. Maa Y. F. & Prestrelski S. J., Biopharmaceutical powders: particle formation and formulation considerations, Curr. Pharm. Biotechnol., 2000, 1(3) 283-302.
[0356] 24. Ng A. W. R., et al., In silico-guided sequence modifications of K-ras epitopes improve immunological outcome against G12V and G13D mutant KRAS antigens, PeerJ, 2018, 6:e5056.
[0357] 25. Nielsen M., et al., The role of the proteasome in generating cytotoxic T-cell epitopes: insights obtained from improved predictions of proteasomal cleavage, Immunogenetics, 2005, 57(1-2): 33-41.
[0358] 26. Nielsen M., et al., Quantitative predictions of peptide binding to any HLA-DR molecule of known sequence: NetMHCIIpan. PLoS Comput. Biol., 2008, 4(7): e1000107.
[0359] 27. Nielsen M., et al., An artificial neural network-based alignment algorithm for MHC class II peptide binding prediction, BMC Bioinformatics, 2009, 10: 296.
[0360] 28. Nielsen M, et al., NNAlign: a platform to construct and evaluate artificial neural network models of receptor-ligand interactions, Nucleic Acids Res., 2017, 45(W1): W344-W349.
[0361] 29. O'Donnell T. J., et al., MHCflurry: open-source class I MHC binding affinity prediction, Cell Syst., 2018, 7(1): 129-132.
[0362] 30. O'Donnell T. J., et al., MHCflurry 2.0: Improved pan-allele prediction of MHC class I-presented peptides by incorporating antigen processing. Cell Syst., 2020, 11(1): 42-48.
[0363] 31. Ogishi M., et al., Quantitative prediction of the landscape of t cell epitope immunogenicity in sequence space, Front. Immunol., 2019, 10: 827.
[0364] 32. Park M. S., et al., Accurate structure prediction of peptide-MHC complexes for identifying highly immunogenic antigens, Mol. Immunol., 2013, 56(1-2): 81-90.
[0365] 33. Reynisson B., et al., NetMHCpan-4.1 and NetMHCIIpan-4.0: improved predictions of MHC antigen presentation by concurrent motif deconvolution and integration of MS MHC eluted ligand data, Nucleic Acids Res., 2020, 48(W1):W449-W454.
[0366] 34. Rist M. J., et al., HLA peptide length preferences control CD8+ T cell responses, J. Immunol., 2013, 191(2): 561-571.
[0367] 35. Sahin U., et al., Personalized RNA mutanome vaccines mobilize poly-specific therapeutic immunity against cancer, Nature, 2017, 547(7662): 222-226.
[0368] 36. Slota M., et al., ELISpot for measuring human immune responses to vaccines, Expert Rev. Vaccines, 2011, 10(3): 299-306.
[0369] 37. Tapia-Calle G., et al., A PBMC-based system to assess human t cell responses to SARS-CoV vaccine candidates in vitro, Vaccines (Basel), 2019, 7(4): 181.
[0370] 38. Toussaint N. C., et al., A mathematical framework for the selection of an optimal set of peptides for epitope-based vaccines. PLoS Comput. Biol., 2008, 4(12): e1000246.
[0371] 39. Trolle T., et al., The length distribution of class I-restricted T cell epitopes is determined by both peptide supply and MHC allele-specific binding preference, J. Immunol., 2016, 196(4): 1480-1487.
[0372] 40. Vita R., et al., The Immune Epitope Database (IEDB): 2018 update, Nucleic Acids Res., 2019, 47(D1): D339-D343.
[0373] 41. Woodham A. W., et al., Nanobody-antigen conjugates elicit hpv-specific antitumor immune responses, Cancer Immunol. Res., 2018, 6(7): 870-880.
[0374] 42. Zirlik, K. M., et al., Cytotoxic T cells generated against heteroclitic peptides kill primary tumor cells independent of the binding affinity of the native tumor antigen peptide, Blood, 2006, 108(12): 3865-3870.

What is claimed is:

1. A composition comprising nucleic acid sequences encoding at least two amino acid sequences selected from the group consisting of SEQ ID NOs: 1 to 2, SEQ ID NO: 4, SEQ ID NOs: 6 to 8, SEQ ID NOs: 10 to 12, and SEQ ID NOs: 14 to 19.

2. The composition of claim 1, wherein the nucleic acid sequences are encoded in a construct, and wherein the construct allows for in vivo expression of the sequences.

3. The composition of claim 2, wherein the construct allows for in vivo expression of one or more peptides encoded by the nucleic acid sequences that is displayed by an HLA class I molecule.

4. The composition of claim 2, wherein the construct allows for in vivo expression of at least two peptides encoded by the nucleic acid sequences that are each displayed by a peptide specific set of HLA class I alleles, and wherein all of the peptide specific sets of HLA class I alleles are not identical.

5. The composition of claim 1, wherein each of the at least two amino sequences comprises a heteroclitic modification of a fragment of a SARS-CoV protein.

6. The composition of claim 1, wherein the immunogenic composition is administered to a subject, and wherein the immunogenic composition is administered in an effective amount to the subject to promote an immune response against SARS-CoV or to treat SARS-CoV in the subject.

7. The composition of claim 1, wherein the nucleic acid sequences encode at least three amino acid sequences selected from the group consisting of SEQ ID NOs: 1 to 2, SEQ ID NO: 4, SEQ ID NOs: 6 to 8, SEQ ID NOs: 10 to 12, and SEQ ID NOs: 14 to 19.

8. A composition comprising nucleic acid sequences encoding at least two amino acid sequences selected from the group consisting of SEQ ID NOs: 31 to 58.

9. The composition of claim 8, wherein the nucleic acid sequences are encoded in a construct, and wherein the construct allows for in vivo expression of the sequences.

10. The composition of claim 9, wherein the construct allows for in vivo expression of one or more peptides encoded by the nucleic acid sequences that is displayed by an HLA class II molecule.

11. The composition of claim 9, wherein the construct allows for in vivo expression of at least two peptides encoded by the nucleic acid sequences that are each displayed by a peptide specific set of HLA class II alleles, and wherein all of the peptide specific sets of HLA class II alleles are not identical.

12. The composition of claim 8, wherein each of the at least two amino sequences comprises a heteroclitic modification of a fragment of a SARS-CoV protein.

13. The composition of claim 8, wherein the immunogenic composition is administered to a subject, and wherein the immunogenic composition is administered in an effective amount to the subject to promote an immune response against SARS-CoV or to treat SARS-CoV in the subject.

14. The composition of claim 8, wherein the nucleic acid sequences encode at least three amino acid sequences selected from the group consisting of SEQ ID NOs: 31 to 58.

The application's sequence listing, which the Patent Office published only in electronic form, follows.

SEQUENCE LISTING (102215 sequences)

SEQ ID NO: 1 - protein, 9 aa, synthetic construct
  source 1..9: note = Seed: KQFDTYNLW
KYFDTYNLW

SEQ ID NO: 2 - protein, 9 aa, synthetic construct
  source 1..9: note = Seed: KLFAAETLK
KMFAAETLK

SEQ ID NO: 3 - protein, 10 aa, synthetic construct
  source 1..10: note = Seed: WIFGTTLDSK
WVFGTTLDSK

SEQ ID NO: 4 - protein, 9 aa, synthetic construct
  source 1..9: note = Seed: LMIERFVSL
LRIERFVSL

SEQ ID NO: 5 - protein, 9 aa, synthetic construct
  source 1..9: note = Seed: YVFCTVNAL
YAFCTVNAL

SEQ ID NO: 6 - protein, 9 aa, synthetic construct
  source 1..9: note = Seed: KQFDTYNLW
KMFDTYNLF

SEQ ID NO: 7 - protein, 9 aa, synthetic construct
  source 1..9: note = Seed: TTLPVNVAF
TTLPVNVAW

SEQ ID NO: 8 - protein, 9 aa, synthetic construct
  source 1..9: note = Seed: KLFAAETLK
KVFAAETLK

SEQ ID NO: 9 - protein, 9 aa, synthetic construct
  source 1..9: note = Seed: VVDKYFDCY
VSDKYFDCY

SEQ ID NO: 10 - protein, 9 aa, synthetic construct
  source 1..9: note = Seed: KQFDTYNLW
KYFDTYNLF

SEQ ID NO: 11 - protein, 9 aa, synthetic construct
  source 1..9: note = Seed: IGAGICASY
IAAGICASY

SEQ ID NO: 12 - protein, 9 aa, synthetic construct
  source 1..9: note = Seed: YVFCTVNAL
YTFCTVNAM

SEQ ID NO: 13 - protein, 10 aa, synthetic construct
  source 1..10: note = Seed: WIFGTTLDSK
WTFGTTLDSK

SEQ ID NO: 14 - protein, 9 aa, synthetic construct
  source 1..9: note = Seed: LMIERFVSL
LMIERFVSM

SEQ ID NO: 15 - protein, 9 aa, synthetic construct
  source 1..9: note = Seed: ISDYDYYRY
IMDYDYYRY

SEQ ID NO: 16 - protein, 9 aa, synthetic construct
  source 1..9: note = Seed: KQFDTYNLW
KWFDTYNLF

SEQ ID NO: 17 - protein, 9 aa, synthetic construct
  source 1..9: note = Seed: LSPRWYFYY
LMPRWYFYY

SEQ ID NO: 18 - protein, 9 aa, synthetic construct
  source 1..9: note = Seed: KLFAAETLK
KTFAAETLK

SEQ ID NO: 19 - protein, 9 aa, synthetic construct
  source 1..9: note = Seed: VVFLHVTYV
VTFLHVTYV

SEQ ID NO: 20 - protein, 9 aa, Severe acute respiratory syndrome coronavirus 2
YVFCTVNAL

SEQ ID NO: 21 - protein, 9 aa, Severe acute respiratory syndrome coronavirus 2
KLFAAETLK

SEQ ID NO: 22 - protein, 9 aa, Severe acute respiratory syndrome coronavirus 2
IPFAMQMAY

SEQ ID NO: 23 - protein, 9 aa, Severe acute respiratory syndrome coronavirus 2
ISDYDYYRY

SEQ ID NO: 24 - protein, 9 aa, Severe acute respiratory syndrome coronavirus 2
FLLNKEMYL

SEQ ID NO: 25 - protein, 9 aa, Severe acute respiratory syndrome coronavirus 2
LSPRWYFYY

SEQ ID NO: 26 - protein, 10 aa, Severe acute respiratory syndrome coronavirus 2
SETKCTLKSF

SEQ ID NO: 27 - protein, 9 aa, Severe acute respiratory syndrome coronavirus 2
KQFDTYNLW

SEQ ID NO: 28 - protein, 9 aa, Severe acute respiratory syndrome coronavirus 2
SELVIGAVI

SEQ ID NO: 29 - protein, 9 aa, Severe acute respiratory syndrome coronavirus 2
FVFKNIDGY

SEQ ID NO: 30 - protein, 9 aa, Severe acute respiratory syndrome coronavirus 2
LMIERFVSL

SEQ ID NO: 31 - protein, 19 aa, synthetic construct
  source 1..19: note = Seed: GAGAALQIPFAMQMAYRFN
GAGAALQIPFAMHMFYRVN

SEQ ID NO: 32 - protein, 19 aa, synthetic construct
  source 1..19: note = Seed: GAGAALQIPFAMQMAYRFN
GAGAALQIPFAMHMSYRIN

SEQ ID NO: 33 - protein, 19 aa, synthetic construct
  source 1..19: note = Seed: SELVIGAVILRGHLRIAGH
SELVIGAIILNGALRVAGH

SEQ ID NO: 34 - protein, 19 aa, synthetic construct
  source 1..19: note = Seed: GAGAALQIPFAMQMAYRFN
GAGAAFQIHFFMQTAYRFN

SEQ ID NO: 35 - protein, 19 aa, synthetic construct
  source 1..19: note = Seed: SELVIGAVILRGHLRIAGH
SELIIGAVPLRAHLRIAGH

SEQ ID NO: 36 - protein, 19 aa, synthetic construct
  source 1..19: note = Seed: GAGAALQIPFAMQMAYRFN
GAGAALQIPFAMHMSYRVN

SEQ ID NO: 37 - protein, 19 aa, synthetic construct
  source 1..19: note = Seed: GAGAALQIPFAMQMAYRFN
GAGAALQIPFAMMMNYRAN

SEQ ID NO: 38 - protein, 19 aa, synthetic construct
  source 1..19: note = Seed: GAGAALQIPFAMQMAYRFN
GAGAALQIPIAMYMNYRIN

SEQ ID NO: 39 - protein, 19 aa, synthetic construct
  source 1..19: note = Seed: VEAEVQIDRLITGRLQSLQ
VEAELQIDRIITKRLQSLQ

SEQ ID NO: 40 - protein, 19 aa, synthetic construct
  source 1..19: note = Seed: GAGAALQIPFAMQMAYRFN
GAGAALQIPIAMAMAYRVN

SEQ ID NO: 41 - protein, 19 aa, synthetic construct
  source 1..19: note = Seed: VEAEVQIDRLITGRLQSLQ
VEAEFQISRFITTRLQSLQ

SEQ ID NO: 42 - protein, 19 aa, synthetic construct
  source 1..19: note = Seed: VKDCVVLHSYFTSDYYQLY
VKDCVVLHSFFTTDYYQLY

SEQ ID NO: 43 - protein, 19 aa, synthetic construct
  source 1..19: note = Seed: GAGAALQIPFAMQMAYRFN
GAGAALQIPFAMSMAYRIN

SEQ ID NO: 44 - protein, 19 aa, synthetic construct
  source 1..19: note = Seed: SELVIGAVILRGHLRIAGH
SELMIGAVPLRAHLRIAGH

SEQ ID NO: 45 - protein, 19 aa, synthetic construct
  source 1..19: note = Seed: GAGAALQIPFAMQMAYRFN
GAGAALQIPFAMSMFYRVN

SEQ ID NO: 46 - protein, 19 aa, synthetic construct
  source 1..19: note = Seed: VEAEVQIDRLITGRLQSLQ
VEAEFQIDRIITYRLQSLQ

SEQ ID NO: 47 - protein, 19 aa, synthetic construct
  source 1..19: note = Seed: GAGAALQIPFAMQMAYRFN
GAGAALQIPFAMSMNYRIN

SEQ ID NO: 48 - protein, 19 aa, synthetic construct
  source 1..19: note = Seed: VEAEVQIDRLITGRLQSLQ
VEAEVQIDRFITTRFQSLQ

SEQ ID NO: 49 - protein, 19 aa, synthetic construct
  source 1..19: note = Seed: SELVIGAVILRGHLRIAGH
SELMIGAVPLRSHLRIAGH

SEQ ID NO: 50 - protein, 19 aa, synthetic construct
  source 1..19: note = Seed: VEAEVQIDRLITGRLQSLQ
VEAEVQIDRFITNRFQSLQ

SEQ ID NO: 51 - protein, 19 aa, synthetic construct
  source 1..19: note = Seed: GAGAALQIPFAMQMAYRFN
GAGAALQIPFAMHMFYRLN

SEQ ID NO: 52 - protein, 19 aa, synthetic construct
  source 1..19: note = Seed: GAGAALQIPFAMQMAYRFN
GAGAALQIPFAMNMAYRIN

SEQ ID NO: 53 - protein, 19 aa, synthetic construct
  source 1..19: note = Seed: VKDCVVLHSYFTSDYYQLY
VKDCVVLHSFFTVDYYQLY

SEQ ID NO: 54 - protein, 19 aa, synthetic construct
  source 1..19: note = Seed: SELVIGAVILRGHLRIAGH
SELMIGAVALRAHLRIAGH

SEQ ID NO: 55 - protein, 19 aa, synthetic construct
  source 1..19: note = Seed: GAGAALQIPFAMQMAYRFN
GAGAALQIPFAMNMFYRVN

SEQ ID NO: 56 - protein, 19 aa, synthetic construct
  source 1..19: note = Seed: SELVIGAVILRGHLRIAGH
SELIIGAVALRAHLRIAGH

SEQ ID NO: 57 - protein, 19 aa, synthetic construct
  source 1..19: note = Seed: SELVIGAVILRGHLRIAGH
SELNIGAVVLRAHLRIAGH

SEQ ID NO: 58 - protein, 19 aa, synthetic construct
  source 1..19: note = Seed: GAGAALQIPFAMQMAYRFN
GAGAALQIPIAMNMAYRLN

SEQ ID NO: 59 - protein, 19 aa, Severe acute respiratory syndrome coronavirus 2
SFRLFARTRSMWSFNPETN

SEQ ID NO: 60 - protein, 19 aa, Severe acute respiratory syndrome coronavirus 2
GAGAALQIPFAMQMAYRFN

SEQ ID NO: 61 - protein, 19 aa, Severe acute respiratory syndrome coronavirus 2
VKDCVVLHSYFTSDYYQLY

SEQ ID NO: 62 - protein, 19 aa, Severe acute respiratory syndrome coronavirus 2
RLITGRLQSLQTYVTQQLI

SEQ ID NO: 63 - protein, 19 aa, Severe acute respiratory syndrome coronavirus 2
MAYRFNGIGVTQNVLYENQ

SEQ ID NO: 64 - protein, 8 aa, Severe acute respiratory syndrome coronavirus 2
IVNSVLLF

SEQ ID NO: 65 - protein, 8 aa, Severe acute respiratory syndrome coronavirus 2
VLLFLAFV

SEQ ID NO: 66 - protein, 8 aa, Severe acute respiratory syndrome coronavirus 2
LLFLAFVV

SEQ ID NO: 67 - protein, 8 aa, Severe acute respiratory syndrome coronavirus 2
FLAFVVFL

SEQ ID NO: 68 - protein, 8 aa, Severe acute respiratory syndrome coronavirus 2
FLLVTLAI

SEQ ID NO: 69 - protein, 8 aa, Severe acute respiratory syndrome coronavirus 2
TLAILTAL

SEQ ID NO: 70 - protein, 8 aa, Severe acute respiratory syndrome coronavirus 2
TALRLCAY

SEQ ID NO: 71 - protein, 8 aa, Severe acute respiratory syndrome coronavirus 2
VSLVKPSF

SEQ ID NO: 72 - protein, 8 aa, Severe acute respiratory syndrome coronavirus 2
LVKPSFYV

SEQ ID NO: 73 - protein, 8 aa, Severe acute respiratory syndrome coronavirus 2
VKPSFYVY

SEQ ID NO: 74 - protein, 8 aa, Severe acute respiratory syndrome coronavirus 2
VYSRVKNL

SEQ ID NO: 75 - protein, 9 aa, Severe acute respiratory syndrome coronavirus 2
FVSEETGTL

SEQ ID NO: 76 - protein, 9 aa, Severe acute respiratory syndrome coronavirus 2
VSEETGTLI

SEQ ID NO: 77 - protein, 9 aa, Severe acute respiratory syndrome coronavirus 2
SEETGTLIV

SEQ ID NO: 78 - protein, 9 aa, Severe acute respiratory syndrome coronavirus 2
TGTLIVNSV

SEQ ID NO: 79 - protein, 9 aa, Severe acute respiratory syndrome coronavirus 2
GTLIVNSVL

SEQ ID NO: 80 - protein, 9 aa, Severe acute respiratory syndrome coronavirus 2
TLIVNSVLL

SEQ ID NO: 81 - protein, 9 aa, Severe acute respiratory syndrome coronavirus 2
LIVNSVLLF

SEQ ID NO: 82 - protein, 9 aa, Severe acute respiratory syndrome coronavirus 2
IVNSVLLFL

SEQ ID NO: 83 - protein, 9 aa, Severe acute respiratory syndrome coronavirus 2
NSVLLFLAF

SEQ ID NO: 84 - protein, 9 aa, Severe acute respiratory syndrome coronavirus 2
SVLLFLAFV

SEQ ID NO: 85 - protein, 9 aa, Severe acute respiratory syndrome coronavirus 2
VLLFLAFVV

SEQ ID NO: 86 - protein, 9 aa, Severe acute respiratory syndrome coronavirus 2
LLFLAFVVF

SEQ ID NO: 87 - protein, 9 aa, Severe acute respiratory syndrome coronavirus 2
LFLAFVVFL

SEQ ID NO: 88 - protein, 9 aa, Severe acute respiratory syndrome coronavirus 2
FLAFVVFLL

SEQ ID NO: 89 - protein, 9 aa, Severe acute respiratory syndrome coronavirus 2
LAFVVFLLV

SEQ ID NO: 90 - protein, 9 aa, Severe acute respiratory syndrome coronavirus 2
FVVFLLVTL

SEQ ID NO: 91 - protein, 9 aa, Severe acute respiratory syndrome coronavirus 2
VFLLVTLAI

SEQ ID NO: 92 - protein, 9 aa, Severe acute respiratory syndrome coronavirus 2
FLLVTLAIL

SEQ ID NO: 93 - protein, 9 aa, Severe acute respiratory syndrome coronavirus 2
VTLAILTAL

SEQ ID NO: 94 - protein, 9 aa, Severe acute respiratory syndrome coronavirus 2
TLAILTALR

SEQ ID NO: 95 - protein, 9 aa, Severe acute respiratory syndrome coronavirus 2
LAILTALRL

SEQ ID NO: 96 - protein, 9 aa, Severe acute respiratory syndrome coronavirus 2
ILTALRLCA

SEQ ID NO: 97 - protein, 9 aa, Severe acute respiratory syndrome coronavirus 2
LTALRLCAY

SEQ ID NO: 98 - protein, 9 aa, Severe acute respiratory syndrome coronavirus 2
RLCAYCCNI

SEQ ID NO: 99 - protein, 9 aa, Severe acute respiratory syndrome coronavirus 2
AYCCNIVNV

SEQ ID NO: 100 - protein, 9 aa, Severe acute respiratory syndrome coronavirus 2
NIVNVSLVK

SEQ ID NO: 101 - protein, 9 aa, Severe acute respiratory syndrome coronavirus 2
VSLVKPSFY

SEQ ID NO: 102 - protein, 9 aa, Severe acute respiratory syndrome coronavirus 2
SLVKPSFYV

SEQ ID NO: 103 - protein, 9 aa, Severe acute respiratory syndrome coronavirus 2
LVKPSFYVY

SEQ ID NO: 104 - protein, 9 aa, Severe acute respiratory syndrome coronavirus 2
KPSFYVYSR

SEQ ID NO: 105 - protein, 9 aa, Severe acute respiratory syndrome coronavirus 2
SFYVYSRVK

SEQ ID NO: 106 - protein, 9 aa, Severe acute respiratory syndrome coronavirus 2
YVYSRVKNL

SEQ ID NO: 107 - protein, 9 aa, Severe acute respiratory syndrome coronavirus 2
YSRVKNLNS

SEQ ID NO: 108 - protein, 9 aa, Severe acute respiratory syndrome coronavirus 2
RVKNLNSSR

SEQ ID NO: 109 - protein, 9 aa, Severe acute respiratory syndrome coronavirus 2
SSRVPDLLV

SEQ ID NO: 110 - protein, 10 aa, Severe acute respiratory syndrome coronavirus 2
SFVSEETGTL

SEQ ID NO: 111 - protein, 10 aa, Severe acute respiratory syndrome coronavirus 2
FVSEETGTLI

SEQ ID NO: 112 - protein, 10 aa, Severe acute respiratory syndrome coronavirus 2
ETGTLIVNSV

SEQ ID NO: 113 - protein, 10 aa, Severe acute respiratory syndrome coronavirus 2
GTLIVNSVLL

SEQ ID NO: 114 - protein, 10 aa, Severe acute respiratory syndrome coronavirus 2
TLIVNSVLLF

SEQ ID NO: 115 - protein, 10 aa, Severe acute respiratory syndrome coronavirus 2
LIVNSVLLFL

SEQ ID NO: 116 - protein, 10 aa, Severe acute respiratory syndrome coronavirus 2
IVNSVLLFLA

SEQ ID NO: 117 - protein, 10 aa, Severe acute respiratory syndrome coronavirus 2
VNSVLLFLAF

SEQ ID NO: 118 - protein, 10 aa, Severe acute respiratory syndrome coronavirus 2
NSVLLFLAFV

SEQ ID NO: 119 - protein, 10 aa, Severe acute respiratory syndrome coronavirus 2
SVLLFLAFVV

SEQ ID NO: 120 - protein, 10 aa, Severe acute respiratory syndrome coronavirus 2
VLLFLAFVVF

SEQ ID NO: 121 - protein, 10 aa, Severe acute respiratory syndrome coronavirus 2
LLFLAFVVFL

SEQ ID NO: 122 - protein, 10 aa, Severe acute respiratory syndrome coronavirus 2
LFLAFVVFLL

SEQ ID NO: 123 - protein, 10 aa, Severe acute respiratory syndrome coronavirus 2
FLAFVVFLLV

SEQ ID NO: 124 - protein, 10 aa, Severe acute respiratory syndrome coronavirus 2
FVVFLLVTLA

SEQ ID NO: 125 - protein, 10 aa, Severe acute respiratory syndrome coronavirus 2
VFLLVTLAIL

SEQ ID NO: 126 - protein, 10 aa, Severe acute respiratory syndrome coronavirus 2
FLLVTLAILT

SEQ ID NO: 127 - protein, 10 aa, Severe acute respiratory syndrome coronavirus 2
LLVTLAILTA

SEQ ID NO: 128 - protein, 10 aa, Severe acute respiratory syndrome coronavirus 2
LVTLAILTAL

SEQ ID NO: 129 - protein, 10 aa, Severe acute respiratory syndrome coronavirus 2
VTLAILTALR

SEQ ID NO: 130 - protein, 10 aa, Severe acute respiratory syndrome coronavirus 2
TLAILTALRL

SEQ ID NO: 131 - protein, 10 aa, Severe acute respiratory syndrome coronavirus 2
ILTALRLCAY

SEQ ID NO: 132 - protein, 10 aa, Severe acute respiratory syndrome coronavirus 2
LRLCAYCCNI

SEQ ID NO: 133 - protein, 10 aa, Severe acute respiratory syndrome coronavirus 2
RLCAYCCNIV

SEQ ID NO: 134 - protein, 10 aa, Severe acute respiratory syndrome coronavirus 2
CAYCCNIVNV

SEQ ID NO: 135 - protein, 10 aa, Severe acute respiratory syndrome coronavirus 2
CNIVNVSLVK

SEQ ID NO: 136 - protein, 10 aa, Severe acute respiratory syndrome coronavirus 2
NVSLVKPSFY

SEQ ID NO: 137 - protein, 10 aa, Severe acute respiratory syndrome coronavirus 2
VSLVKPSFYV

SEQ ID NO: 138 - protein, 10 aa, Severe acute respiratory syndrome coronavirus 2
SLVKPSFYVY

SEQ ID NO: 139 - protein, 10 aa, Severe acute respiratory syndrome coronavirus 2
LVKPSFYVYS

SEQ ID NO: 140 - protein, 10 aa, Severe acute respiratory syndrome coronavirus 2
VKPSFYVYSR

SEQ ID NO: 141 - protein, 10 aa, Severe acute respiratory syndrome coronavirus 2
KPSFYVYSRV

SEQ ID NO: 142 - protein, 10 aa, Severe acute respiratory syndrome coronavirus 2
FYVYSRVKNL

SEQ ID NO: 143 - protein, 10 aa, Severe acute respiratory syndrome coronavirus 2
YSRVKNLNSS

SEQ ID NO: 144 - protein, 10 aa, Severe acute respiratory syndrome coronavirus 2
SRVKNLNSSR

SEQ ID NO: 145 - protein, 10 aa, Severe acute respiratory syndrome coronavirus 2
RVKNLNSSRV

SEQ ID NO: 146 - protein, 10 aa, Severe acute respiratory syndrome coronavirus 2
NLNSSRVPDL

SEQ ID NO: 147 - protein, 10 aa, Severe acute respiratory syndrome coronavirus 2
LNSSRVPDLL

SEQ ID NO: 148 - protein, 11 aa, Severe acute respiratory syndrome coronavirus 2
YSFVSEETGTL

SEQ ID NO: 149 - protein, 11 aa, Severe acute respiratory syndrome coronavirus 2
FVSEETGTLIV

SEQ ID NO: 150 - protein, 11 aa, Severe acute respiratory syndrome coronavirus 2
GTLIVNSVLLF

SEQ ID NO: 151 - protein, 11 aa, Severe acute respiratory syndrome coronavirus 2
TLIVNSVLLFL

SEQ ID NO: 152 - protein, 11 aa, Severe acute respiratory syndrome coronavirus 2
IVNSVLLFLAF

SEQ ID NO: 153 - protein, 11 aa, Severe acute respiratory syndrome coronavirus 2
NSVLLFLAFVV

SEQ ID NO: 154 - protein, 11 aa, Severe acute respiratory syndrome coronavirus 2
VLLFLAFVVFL

SEQ ID NO: 155 - protein, 11 aa, Severe acute respiratory syndrome coronavirus 2
LLFLAFVVFLL

SEQ ID NO: 156 - protein, 11 aa, Severe acute respiratory syndrome coronavirus 2
LFLAFVVFLLV

SEQ ID NO: 157 - protein, 11 aa, Severe acute respiratory syndrome coronavirus 2
FLAFVVFLLVT

SEQ ID NO: 158 - protein, 11 aa, Severe acute respiratory syndrome coronavirus 2
FLLVTLAILTA

SEQ ID NO: 159 - protein, 11 aa, Severe acute respiratory syndrome coronavirus 2
LLVTLAILTAL

SEQ ID NO: 160 - protein, 11 aa, Severe acute respiratory syndrome coronavirus 2
LVTLAILTALR

SEQ ID NO: 161 - protein, 11 aa, Severe acute respiratory syndrome coronavirus 2
VTLAILTALRL

SEQ ID NO: 162 - protein, 11 aa, Severe acute respiratory syndrome coronavirus 2
AILTALRLCAY

SEQ ID NO: 163 - protein, 11 aa, Severe acute respiratory syndrome coronavirus 2
AYCCNIVNVSL

SEQ ID NO: 164 - protein, 11 aa, Severe acute respiratory syndrome coronavirus 2
NVSLVKPSFYV

SEQ ID NO: 165 - protein, 11 aa, Severe acute respiratory syndrome coronavirus 2
VSLVKPSFYVY

SEQ ID NO: 166 - protein, 11 aa, Severe acute respiratory syndrome coronavirus 2
SLVKPSFYVYS

SEQ ID NO: 167 - protein, 11 aa, Severe acute respiratory syndrome coronavirus 2
LVKPSFYVYSR

SEQ ID NO: 168 - protein, 11 aa, Severe acute respiratory syndrome coronavirus 2
KPSFYVYSRVK

SEQ ID NO: 169 - protein, 11 aa, Severe acute respiratory syndrome coronavirus 2
SFYVYSRVKNL

SEQ ID NO: 170 - protein, 11 aa, Severe acute respiratory syndrome coronavirus 2
YSRVKNLNSSR

SEQ ID NO: 171 - protein, 8 aa, Severe acute respiratory syndrome coronavirus 2
MADSNGTI

SEQ ID NO: 172 - protein, 8 aa, Severe acute respiratory syndrome coronavirus 2
KLLEQWNL

SEQ ID NO: 173 - protein, 8 aa, Severe acute respiratory syndrome coronavirus 2
LEQWNLVI

SEQ ID NO: 174 - protein, 8 aa, Severe acute respiratory syndrome coronavirus 2
FLTWICLL

SEQ ID NO: 175 - protein, 8 aa, Severe acute respiratory syndrome coronavirus 2
TWICLLQF

SEQ ID NO: 176 - protein, 8 aa, Severe acute respiratory syndrome coronavirus 2
LQFAYANR

SEQ ID NO: 177 - protein, 8 aa, Severe acute respiratory syndrome coronavirus 2
AYANRNRF

SEQ ID NO: 178 - protein, 8 aa, Severe acute respiratory syndrome coronavirus 2
YANRNRFL

SEQ ID NO: 179 - protein, 8 aa, Severe acute respiratory syndrome coronavirus 2
FLYIIKLI

SEQ ID NO: 180 - protein, 8 aa, Severe acute respiratory syndrome coronavirus 2
LYIIKLIF

SEQ ID NO: 181 - protein, 8 aa, Severe acute respiratory syndrome coronavirus 2
YIIKLIFL

SEQ ID NO: 182 - protein, 8 aa, Severe acute respiratory syndrome coronavirus 2
KLIFLWLL

SEQ ID NO: 183 - protein, 8 aa, Severe acute respiratory syndrome coronavirus 2
FLWLLWPV

SEQ ID NO: 184 - protein, 8 aa, Severe acute respiratory syndrome coronavirus 2
WLLWPVTL

SEQ ID NO: 185 - protein, 8 aa, Severe acute respiratory syndrome coronavirus 2
LLWPVTLA

SEQ ID NO: 186 - protein, 8 aa, Severe acute respiratory syndrome coronavirus 2
WPVTLACF

SEQ ID NO: 187 - protein, 8 aa, Severe acute respiratory syndrome coronavirus 2
FVLAAVYR

SEQ ID NO: 188 - protein, 8 aa, Severe acute respiratory syndrome coronavirus 2
VLAAVYRI

SEQ ID NO: 189 - protein, 8 aa, Severe acute respiratory syndrome coronavirus 2
AMACLVGL

SEQ ID NO: 190 - protein, 8 aa, Severe acute respiratory syndrome coronavirus 2
LMWLSYFI

SEQ ID NO: 191 - protein, 8 aa, Severe acute respiratory syndrome coronavirus 2
LSYFIASF

SEQ ID NO: 192 - protein, 8 aa, Severe acute respiratory syndrome coronavirus 2
SYFIASFR

SEQ ID NO: 193 - protein, 8 aa, Severe acute respiratory syndrome coronavirus 2
YFIASFRL

SEQ ID NO: 194 - protein, 8 aa, Severe acute respiratory syndrome coronavirus 2
FIASFRLF

SEQ ID NO: 195 - protein, 8 aa, Severe acute respiratory syndrome coronavirus 2
ASFRLFAR

SEQ ID NO: 196 - protein, 8 aa, Severe acute respiratory syndrome coronavirus 2
LFARTRSM

SEQ ID NO: 197 - protein, 8 aa, Severe acute respiratory syndrome coronavirus 2
RTRSMWSF

SEQ ID NO: 198 - protein, 8 aa, Severe acute respiratory syndrome coronavirus 2
VPLHGTIL

SEQ ID NO: 199 - protein, 8 aa, Severe acute respiratory syndrome coronavirus 2
RPLLESEL

SEQ ID NO: 200 - protein, 8 aa, Severe acute respiratory syndrome coronavirus 2
SELVIGAV

SEQ ID NO: 201 - protein, 8 aa, Severe acute respiratory syndrome coronavirus 2
VILRGHLR

SEQ ID NO: 202 - protein, 8 aa, Severe acute respiratory syndrome coronavirus 2
LRIAGHHL

SEQ ID NO: 203 - protein, 8 aa, Severe acute respiratory syndrome coronavirus 2
LPKEITVA

SEQ ID NO: 204 - protein, 8 aa, Severe acute respiratory syndrome coronavirus 2
ATSRTLSY

SEQ ID NO: 205 - protein, 8 aa, Severe acute respiratory syndrome coronavirus 2
TSRTLSYY

SEQ ID NO: 206 - protein, 8 aa, Severe acute respiratory syndrome coronavirus 2
SGFAAYSR

SEQ ID NO: 207 - protein, 8 aa, Severe acute respiratory syndrome coronavirus 2
FAAYSRYR

SEQ ID NO: 208 - protein, 8 aa, Severe acute respiratory syndrome coronavirus 2
RYRIGNYK

SEQ ID NO: 209 - protein, 8 aa, Severe acute respiratory syndrome coronavirus 2
YRIGNYKL

SEQ ID NO: 210 - protein, 8 aa, Severe acute respiratory syndrome coronavirus 2
SSSDNIAL

SEQ ID NO: 211 - protein, 8 aa, Severe acute respiratory syndrome coronavirus 2
SSDNIALL

SEQ ID NO: 212 - protein, 9 aa, Severe acute respiratory syndrome coronavirus 2
GTITVEELK

SEQ ID NO: 213 - protein, 9 aa, Severe acute respiratory syndrome coronavirus 2
TITVEELKK

SEQ ID NO: 214 - protein, 9 aa, Severe acute respiratory syndrome coronavirus 2
ITVEELKKL

SEQ ID NO: 215 - protein, 9 aa, Severe acute respiratory syndrome coronavirus 2
KKLLEQWNL

SEQ ID NO: 216 - protein, 9 aa, Severe acute respiratory syndrome coronavirus 2
KLLEQWNLV

SEQ ID NO: 217 - protein, 9 aa, Severe acute respiratory syndrome coronavirus 2
LLEQWNLVI

SEQ ID NO: 218 - protein, 9 aa, Severe acute respiratory syndrome coronavirus 2
EQWNLVIGF

SEQ ID NO: 219 - protein, 9 aa, Severe acute respiratory syndrome coronavirus 2
QWNLVIGFL

SEQ ID NO: 220 - protein, 9 aa, Severe acute respiratory syndrome coronavirus 2
NLVIGFLFL

SEQ ID NO: 221 - protein, 9 aa, Severe acute respiratory syndrome coronavirus 2
LVIGFLFLT

SEQ ID NO: 222 - protein, 9 aa, Severe acute respiratory syndrome coronavirus 2
VIGFLFLTW

SEQ ID NO: 223 - protein, 9 aa, Severe acute respiratory syndrome coronavirus 2
FLFLTWICL

SEQ ID NO: 224 - protein, 9 aa, Severe acute respiratory syndrome coronavirus 2
LFLTWICLL

SEQ ID NO: 225 - protein, 9 aa, Severe acute respiratory syndrome coronavirus 2
LTWICLLQF

SEQ ID NO: 226 - protein, 9 aa, Severe acute respiratory syndrome coronavirus 2
WICLLQFAY

SEQ ID NO: 227 - protein, 9 aa, Severe acute respiratory syndrome coronavirus 2
LLQFAYANR

SEQ ID NO: 228 - protein, 9 aa, Severe acute respiratory syndrome coronavirus 2
QFAYANRNR

SEQ ID NO: 229 - protein, 9 aa, Severe acute respiratory syndrome coronavirus 2
FAYANRNRF

SEQ ID NO: 230 - protein, 9 aa, Severe acute respiratory syndrome coronavirus 2
AYANRNRFL

SEQ ID NO: 231 - protein, 9 aa, Severe acute respiratory syndrome coronavirus 2
YANRNRFLY

SEQ ID NO: 232 - protein, 9 aa, Severe acute respiratory syndrome coronavirus 2
ANRNRFLYI

SEQ ID NO: 233 - protein, 9 aa, Severe acute respiratory syndrome coronavirus 2
NRNRFLYII

SEQ ID NO: 234 - protein, 9 aa, Severe acute respiratory syndrome coronavirus 2
RNRFLYIIK

SEQ ID NO: 235 - protein, 9 aa, Severe acute respiratory syndrome coronavirus 2
NRFLYIIKL

SEQ ID NO: 236 - protein, 9 aa, Severe acute respiratory syndrome coronavirus 2
RFLYIIKLI

SEQ ID NO: 237 - protein, 9 aa, Severe acute respiratory syndrome coronavirus 2
FLYIIKLIF

SEQ ID NO: 238 - protein, 9 aa, Severe acute respiratory syndrome coronavirus 2
LYIIKLIFL

SEQ ID NO: 239 - protein, 9 aa, Severe acute respiratory syndrome coronavirus 2
YIIKLIFLW

SEQ ID NO: 240 - protein, 9 aa, Severe acute respiratory syndrome coronavirus 2
KLIFLWLLW

SEQ ID NO: 241 - protein, 9 aa, Severe acute respiratory syndrome coronavirus 2
IFLWLLWPV

SEQ ID NO: 242 - protein, 9 aa, Severe acute respiratory syndrome coronavirus 2
FLWLLWPVT

SEQ ID NO: 243 - protein, 9 aa, Severe acute respiratory syndrome coronavirus 2
LWLLWPVTL

SEQ ID NO: 244 - protein, 9 aa, Severe acute respiratory syndrome coronavirus 2
WLLWPVTLA

SEQ ID NO: 245 - protein, 9 aa, Severe acute respiratory syndrome coronavirus 2
LLWPVTLAC

SEQ ID NO: 246 - protein, 9 aa, Severe acute respiratory syndrome coronavirus 2
LWPVTLACF

SEQ ID NO: 247 - protein, 9 aa, Severe acute respiratory syndrome coronavirus 2
WPVTLACFV

SEQ ID NO: 248 - protein, 9 aa, Severe acute respiratory syndrome coronavirus 2
VTLACFVLA

SEQ ID NO: 249 - protein, 9 aa, Severe acute respiratory syndrome coronavirus 2
TLACFVLAA

SEQ ID NO: 250 - protein, 9 aa, Severe acute respiratory syndrome coronavirus 2
LACFVLAAV

SEQ ID NO: 251 - protein, 9 aa, Severe acute respiratory syndrome coronavirus 2
ACFVLAAVY

SEQ ID NO: 252 - protein, 9 aa, Severe acute respiratory syndrome coronavirus 2
CFVLAAVYR

SEQ ID NO: 253 - protein, 9 aa, Severe acute respiratory syndrome coronavirus 2
FVLAAVYRI

SEQ ID NO: 254 - protein, 9 aa, Severe acute respiratory syndrome coronavirus 2
LAAVYRINW

SEQ ID NO: 255 - protein, 9 aa, Severe acute respiratory syndrome coronavirus 2
AAVYRINWI

SEQ ID NO: 256 - protein, 9 aa, Severe acute respiratory syndrome coronavirus 2
VYRINWITG

SEQ ID NO: 257 - protein, 9 aa, Severe acute respiratory syndrome coronavirus 2
YRINWITGG

SEQ ID NO: 258 - protein, 9 aa, Severe acute respiratory syndrome coronavirus 2
RINWITGGI

SEQ ID NO: 259 - protein, 9 aa, Severe acute respiratory syndrome coronavirus 2
NWITGGIAI

SEQ ID NO: 260 - protein, 9 aa, Severe acute respiratory syndrome coronavirus 2
WITGGIAIA

SEQ ID NO: 261 - protein, 9 aa, Severe acute respiratory syndrome coronavirus 2
ITGGIAIAM

SEQ ID NO: 262 - protein, 9 aa, Severe acute respiratory syndrome coronavirus 2
GIAIAMACL

SEQ ID NO: 263 - protein, 9 aa, Severe acute respiratory syndrome coronavirus 2
IAIAMACLV

SEQ ID NO: 264 - protein, 9 aa, Severe acute respiratory syndrome coronavirus 2
IAMACLVGL

SEQ ID NO: 265 - protein, 9 aa, Severe acute respiratory syndrome coronavirus 2
AMACLVGLM

SEQ ID NO: 266 - protein, 9 aa, Severe acute respiratory syndrome coronavirus 2
MACLVGLMW

SEQ ID NO: 267 - protein, 9 aa, Severe acute respiratory syndrome coronavirus 2
CLVGLMWLS

SEQ ID NO: 268 - protein, 9 aa, Severe acute respiratory syndrome coronavirus 2
LVGLMWLSY

SEQ ID NO: 269 - protein, 9 aa, Severe acute respiratory syndrome coronavirus 2
VGLMWLSYF

SEQ ID NO: 270 - protein, 9 aa, Severe acute respiratory syndrome coronavirus 2
GLMWLSYFI

SEQ ID NO: 271 - protein, 9 aa, Severe acute respiratory syndrome coronavirus 2
LMWLSYFIA

SEQ ID NO: 272 - protein, 9 aa, Severe acute respiratory syndrome coronavirus 2
WLSYFIASF

SEQ ID NO: 273 - protein, 9 aa, Severe acute respiratory syndrome coronavirus 2
LSYFIASFR

SEQ ID NO: 274 - protein, 9 aa, Severe acute respiratory syndrome coronavirus 2
SYFIASFRL

SEQ ID NO: 275 - protein, 9 aa, Severe acute respiratory syndrome coronavirus 2
YFIASFRLF

SEQ ID NO: 276 - protein, 9 aa, Severe acute respiratory syndrome coronavirus 2
FIASFRLFA

SEQ ID NO: 277 - protein, 9 aa, Severe acute respiratory syndrome coronavirus 2
IASFRLFAR

SEQ ID NO: 278 - protein, 9 aa, Severe acute respiratory syndrome coronavirus 2
SFRLFARTR

SEQ ID NO: 279 - protein, 9 aa, Severe acute respiratory syndrome coronavirus 2
RLFARTRSM

SEQ ID NO: 280 - protein, 9 aa, Severe acute respiratory syndrome coronavirus 2
LFARTRSMW

SEQ ID NO: 281 - protein, 9 aa, Severe acute respiratory syndrome coronavirus 2
ARTRSMWSF

SEQ ID NO: 282 - protein, 9 aa, Severe acute respiratory syndrome coronavirus 2
RTRSMWSFN

SEQ ID NO: 283 - protein, 9 aa, Severe acute respiratory syndrome coronavirus 2
TRSMWSFNP

SEQ ID NO: 284 - protein, 9 aa, Severe acute respiratory syndrome coronavirus 2
RSMWSFNPE

SEQ ID NO: 285 - protein, 9 aa, Severe acute respiratory syndrome coronavirus 2
SMWSFNPET

SEQ ID NO: 286 - protein, 9 aa, Severe acute respiratory syndrome coronavirus 2
WSFNPETNI

SEQ ID NO: 287 - protein, 9 aa, Severe acute respiratory syndrome coronavirus 2
SFNPETNIL

SEQ ID NO: 288 - protein, 9 aa, Severe acute respiratory syndrome coronavirus 2
FNPETNILL

SEQ ID NO: 289 - protein, 9 aa, Severe acute respiratory syndrome coronavirus 2
TNILLNVPL

SEQ ID NO: 290 - protein, 9 aa, Severe acute respiratory syndrome coronavirus 2
LLNVPLHGT

SEQ ID NO: 291 - protein, 9 aa, Severe acute respiratory syndrome coronavirus 2
NVPLHGTIL

SEQ ID NO: 292 - protein, 9 aa, Severe acute respiratory syndrome coronavirus 2
HGTILTRPL

SEQ ID NO: 293 - protein, 9 aa, Severe acute respiratory syndrome coronavirus 2
GTILTRPLL

SEQ ID NO: 294 - protein, 9 aa, Severe acute respiratory syndrome coronavirus 2
RPLLESELV

SEQ ID NO: 295 - protein, 9 aa, Severe acute respiratory syndrome coronavirus 2
LESELVIGA

SEQ ID NO: 296 - protein, 9 aa, Severe acute respiratory syndrome coronavirus 2
ESELVIGAV

SEQ ID NO: 297 - protein, 9 aa, Severe acute respiratory syndrome coronavirus 2
LVIGAVILR

SEQ ID NO: 298 - protein, 9 aa, Severe acute respiratory syndrome coronavirus 2
AVILRGHLR

SEQ ID NO: 299 - protein, 9 aa, Severe acute respiratory syndrome coronavirus 2
ILRGHLRIA

SEQ ID NO: 300 - protein, 9 aa, Severe acute respiratory syndrome coronavirus 2
HLRIAGHHL

SEQ ID NO: 301 - protein, 9 aa, Severe acute respiratory syndrome coronavirus 2
RIAGHHLGR

SEQ ID NO: 302 - protein, 9 aa, Severe acute respiratory syndrome coronavirus 2
LPKEITVAT

SEQ ID NO: 303 - protein, 9 aa, Severe acute respiratory syndrome coronavirus 2
ITVATSRTL

SEQ ID NO: 304 - protein, 9 aa, Severe acute respiratory syndrome coronavirus 2
VATSRTLSY

SEQ ID NO: 305 - protein, 9 aa, Severe acute respiratory syndrome coronavirus 2
ATSRTLSYY

SEQ ID NO: 306 - protein, 9 aa, Severe acute respiratory syndrome coronavirus 2
TSRTLSYYK

SEQ ID NO: 307 - protein, 9 aa, Severe acute respiratory syndrome coronavirus 2
SRTLSYYKL

SEQ ID NO: 308 - protein, 9 aa, Severe acute respiratory syndrome coronavirus 2
RTLSYYKLG

SEQ ID NO: 309 - protein, 9 aa, Severe acute respiratory syndrome coronavirus 2
TLSYYKLGA

SEQ ID NO: 310 - protein, 9 aa, Severe acute respiratory syndrome coronavirus 2
SYYKLGASQ

SEQ ID NO: 311 - protein, 9 aa, Severe acute respiratory syndrome coronavirus 2
YYKLGASQR

SEQ ID NO: 312 - protein, 9 aa, Severe acute respiratory syndrome coronavirus 2
YKLGASQRV

SEQ ID NO: 313 - protein, 9 aa, Severe acute respiratory syndrome coronavirus 2
QRVAGDSGF

SEQ ID NO: 314 - protein, 9 aa, Severe acute respiratory syndrome coronavirus 2
RVAGDSGFA

SEQ ID NO: 315 - protein, 9 aa, Severe acute respiratory syndrome coronavirus 2
AGDSGFAAY

SEQ ID NO: 316 - protein, 9 aa, Severe acute respiratory syndrome coronavirus 2
DSGFAAYSR

SEQ ID NO: 317 - protein, 9 aa, Severe acute respiratory syndrome coronavirus 2
SGFAAYSRY

SEQ ID NO: 318 - protein, 9 aa, Severe acute respiratory syndrome coronavirus 2
GFAAYSRYR

SEQ ID NO: 319 - protein, 9 aa, Severe acute respiratory syndrome coronavirus 2
FAAYSRYRI

SEQ ID NO: 320 - protein, 9 aa, Severe acute respiratory syndrome coronavirus 2
AAYSRYRIG

SEQ ID NO: 321 - protein, 9 aa, Severe acute respiratory syndrome coronavirus 2
YSRYRIGNY

SEQ ID NO: 322 - protein, 9 aa, Severe acute respiratory syndrome coronavirus 2
SRYRIGNYK

SEQ ID NO: 323 - protein, 9 aa, Severe acute respiratory syndrome coronavirus 2
RYRIGNYKL

SEQ ID NO: 324 - protein, 9 aa, Severe acute respiratory syndrome coronavirus 2
DHSSSSDNI

SEQ ID NO: 325 - protein, 9 aa, Severe acute respiratory syndrome coronavirus 2
SSSSDNIAL

SEQ ID NO: 326 - protein, 9 aa, Severe acute respiratory syndrome coronavirus 2
SSSDNIALL

SEQ ID NO: 327 - protein, 9 aa, Severe acute respiratory syndrome coronavirus 2
SSDNIALLV

SEQ ID NO: 328 - protein, 10 aa, Severe acute respiratory syndrome coronavirus 2
MADSNGTITV

SEQ ID NO: 329 - protein, 10 aa, Severe acute respiratory syndrome coronavirus 2
NGTITVEELK

SEQ ID NO: 330 - protein, 10 aa, Severe acute respiratory syndrome coronavirus 2
GTITVEELKK

SEQ ID NO: 331 - protein, 10 aa, Severe acute respiratory syndrome coronavirus 2
EELKKLLEQW

SEQ ID NO: 332 - protein, 10 aa, Severe acute respiratory syndrome coronavirus 2
KKLLEQWNLV

SEQ ID NO: 333 - protein, 10 aa, Severe acute respiratory syndrome coronavirus 2
KLLEQWNLVI

SEQ ID NO: 334 - protein, 10 aa, Severe acute respiratory syndrome coronavirus 2
LEQWNLVIGF

SEQ ID NO: 335 - protein, 10 aa, Severe acute respiratory syndrome coronavirus 2
EQWNLVIGFL

SEQ ID NO: 336 - protein, 10 aa, Severe acute respiratory syndrome coronavirus 2
QWNLVIGFLF

SEQ ID NO: 337 - protein, 10 aa, Severe acute respiratory syndrome coronavirus 2
NLVIGFLFLT

SEQ ID NO: 338 - protein, 10 aa, Severe acute respiratory syndrome coronavirus 2
LVIGFLFLTW

SEQ ID NO: 339 - protein, 10 aa, Severe acute respiratory syndrome coronavirus 2
VIGFLFLTWI

SEQ ID NO: 340 - protein, 10 aa, Severe acute respiratory syndrome coronavirus 2
GFLFLTWICL

SEQ ID NO: 341 - protein, 10 aa, Severe acute respiratory syndrome coronavirus 2
FLFLTWICLL

SEQ ID NO: 342 - protein, 10 aa, Severe acute respiratory syndrome coronavirus 2
LTWICLLQFA

SEQ ID NO: 343 - protein, 10 aa, Severe acute respiratory syndrome coronavirus 2
TWICLLQFAY

SEQ ID NO: 344 - protein, 10 aa, Severe acute respiratory syndrome coronavirus 2
CLLQFAYANR

SEQ ID NO: 345 - protein, 10 aa, Severe acute respiratory syndrome coronavirus 2
LQFAYANRNR

SEQ ID NO: 346 - protein, 10 aa, Severe acute respiratory syndrome coronavirus 2
QFAYANRNRF

SEQ ID NO: 347 - protein, 10 aa, Severe acute respiratory syndrome coronavirus 2
FAYANRNRFL

SEQ ID NO: 348 - protein, 10 aa, Severe acute respiratory syndrome coronavirus 2
AYANRNRFLY

SEQ ID NO: 349 - protein, 10 aa, Severe acute respiratory syndrome coronavirus 2
YANRNRFLYI

SEQ ID NO: 350 - protein, 10 aa, Severe acute respiratory syndrome coronavirus 2
ANRNRFLYII

SEQ ID NO: 351 - protein, 10 aa, Severe acute respiratory syndrome coronavirus 2
NRNRFLYIIK

SEQ ID NO: 352 - protein, 10 aa, Severe acute respiratory syndrome coronavirus 2
RNRFLYIIKL

SEQ ID NO: 353 - protein, 10 aa, Severe acute respiratory syndrome coronavirus 2
NRFLYIIKLI

SEQ ID NO: 354 - protein, 10 aa, Severe acute respiratory syndrome coronavirus 2
RFLYIIKLIF

SEQ ID NO: 355 - protein, 10 aa, Severe acute respiratory syndrome coronavirus 2
FLYIIKLIFL

SEQ ID NO: 356 - protein, 10 aa, Severe acute respiratory syndrome coronavirus 2
LYIIKLIFLW

SEQ ID NO: 357 - protein, 10 aa, Severe acute respiratory syndrome coronavirus 2
YIIKLIFLWL

SEQ ID NO: 358 - protein, 10 aa, Severe acute respiratory syndrome coronavirus 2
LIFLWLLWPV

SEQ ID NO: 359 - protein, 10 aa, Severe acute respiratory syndrome coronavirus 2
FLWLLWPVTL

SEQ ID NO: 360 - protein, 10 aa, Severe acute respiratory syndrome coronavirus 2
LWLLWPVTLA

SEQ ID NO: 361 - protein, 10 aa, Severe acute respiratory syndrome coronavirus 2
WLLWPVTLAC

SEQ ID NO: 362 - protein, 10 aa, Severe acute respiratory syndrome coronavirus 2
LLWPVTLACF

SEQ ID NO: 363 - protein, 10 aa, Severe acute respiratory syndrome coronavirus 2
LWPVTLACFV

SEQ ID NO: 364 - protein, 10 aa, Severe acute respiratory syndrome coronavirus 2
WPVTLACFVL

SEQ ID NO: 365 - protein, 10 aa, Severe acute respiratory syndrome coronavirus 2
VTLACFVLAA

SEQ ID NO: 366 - protein, 10 aa, Severe acute respiratory syndrome coronavirus 2
TLACFVLAAV

SEQ ID NO: 367 - protein, 10 aa, Severe acute respiratory syndrome coronavirus 2
LACFVLAAVY

SEQ ID NO: 368 - protein, 10 aa, Severe acute respiratory syndrome coronavirus 2
ACFVLAAVYR

SEQ ID NO: 369 - protein, 10 aa, Severe acute respiratory syndrome coronavirus 2
CFVLAAVYRI

SEQ ID NO: 370 - protein, 10 aa, Severe acute respiratory syndrome coronavirus 2
FVLAAVYRIN

SEQ ID NO: 371 - protein, 10 aa, Severe acute respiratory syndrome coronavirus 2
VLAAVYRINW

SEQ ID NO: 372 - protein, 10 aa, Severe acute respiratory syndrome coronavirus 2
AVYRINWITG

SEQ ID NO: 373 - protein, 10 aa, Severe acute respiratory syndrome coronavirus 2
YRINWITGGI

SEQ ID NO: 374 - protein, 10 aa, Severe acute respiratory syndrome coronavirus 2
INWITGGIAI

SEQ ID NO: 375 - protein, 10 aa, Severe acute respiratory syndrome coronavirus 2
GIAIAMACLV

SEQ ID NO: 376 - protein, 10 aa, Severe acute respiratory syndrome coronavirus 2
AIAMACLVGL

SEQ ID NO: 377 - protein, 10 aa, Severe acute respiratory syndrome coronavirus 2
IAMACLVGLM

SEQ ID NO: 378 - protein, 10 aa, Severe acute respiratory syndrome coronavirus 2
AMACLVGLMW

SEQ ID NO: 379 - protein, 10 aa, Severe acute respiratory syndrome coronavirus 2
MACLVGLMWL

SEQ ID NO: 380 - protein, 10 aa, Severe acute respiratory syndrome coronavirus 2
CLVGLMWLSY

SEQ ID NO: 381 - protein, 10 aa, Severe acute respiratory syndrome coronavirus 2
VGLMWLSYFI

SEQ ID NO: 382 - protein, 10 aa, Severe acute respiratory syndrome coronavirus 2
GLMWLSYFIA

SEQ ID NO: 383 - protein, 10 aa, Severe acute respiratory syndrome coronavirus 2
LMWLSYFIAS

SEQ ID NO: 384 - protein, 10 aa, Severe acute respiratory syndrome coronavirus 2
MWLSYFIASF

SEQ ID NO: 385 - protein, 10 aa, Severe acute respiratory syndrome coronavirus 2
WLSYFIASFR

SEQ ID NO: 386 - protein, 10 aa, Severe acute respiratory syndrome coronavirus 2
LSYFIASFRL

SEQ ID NO: 387 - protein, 10 aa, Severe acute respiratory syndrome coronavirus 2
SYFIASFRLF

SEQ ID NO: 388 - protein, 10 aa, Severe acute respiratory syndrome coronavirus 2
YFIASFRLFA

SEQ ID NO: 389 - protein, 10 aa, Severe acute respiratory syndrome coronavirus 2
FIASFRLFAR

SEQ ID NO: 390 - protein, 10 aa, Severe acute respiratory syndrome coronavirus 2
ASFRLFARTR

SEQ ID NO: 391 - protein, 10 aa, Severe acute respiratory syndrome coronavirus 2
SFRLFARTRS

SEQ ID NO: 392 - protein, 10 aa, Severe acute respiratory syndrome coronavirus 2
FRLFARTRSM

SEQ ID NO: 393 - protein, 10 aa, Severe acute respiratory syndrome coronavirus 2
RLFARTRSMW

SEQ ID NO: 394 - protein, 10 aa, Severe acute respiratory syndrome coronavirus 2
FARTRSMWSF

SEQ ID NO: 395 - protein, 10 aa, Severe acute respiratory syndrome coronavirus 2
ARTRSMWSFN

SEQ ID NO: 396 - protein, 10 aa, Severe acute respiratory syndrome coronavirus 2
RTRSMWSFNP

SEQ ID NO: 397 - protein, 10 aa, Severe acute respiratory syndrome coronavirus 2
RSMWSFNPET

SEQ ID NO: 398 - protein, 10 aa, Severe acute respiratory syndrome coronavirus 2
MWSFNPETNI

SEQ ID NO: 399 - protein, 10 aa, Severe acute respiratory syndrome coronavirus 2
WSFNPETNIL

SEQ ID NO: 400 - protein, 10 aa, Severe acute respiratory syndrome coronavirus 2
SFNPETNILL

SEQ ID NO: 401 - protein, 10 aa, Severe acute respiratory syndrome coronavirus 2
ETNILLNVPL

SEQ ID NO: 402 - protein, 10 aa, Severe acute respiratory syndrome coronavirus 2
ILLNVPLHGT

SEQ ID NO: 403 - protein, 10 aa, Severe acute respiratory syndrome coronavirus 2
LLNVPLHGTI

SEQ ID NO: 404 - protein, 10 aa, Severe acute respiratory syndrome coronavirus 2
VPLHGTILTR

SEQ ID NO: 405 - protein, 10 aa, Severe acute respiratory syndrome coronavirus 2
LHGTILTRPL

SEQ ID NO: 406 - protein, 10 aa, Severe acute respiratory syndrome coronavirus 2
HGTILTRPLL

SEQ ID NO: 407 - protein, 10 aa, Severe acute respiratory syndrome coronavirus 2
LTRPLLESEL

SEQ ID NO: 408 - protein, 10 aa, Severe acute respiratory syndrome coronavirus 2
RPLLESELVI

SEQ ID NO: 409 - protein, 10 aa, Severe acute respiratory syndrome coronavirus 2
LLESELVIGA

SEQ ID NO: 410 - protein, 10 aa, Severe acute respiratory syndrome coronavirus 2
LESELVIGAV

SEQ ID NO: 411 - protein, 10 aa, Severe acute respiratory syndrome coronavirus 2
SELVIGAVIL

SEQ ID NO: 412 - protein, 10 aa, Severe acute respiratory syndrome coronavirus 2
ELVIGAVILR

SEQ ID NO: 413 - protein, 10 aa, Severe acute respiratory syndrome coronavirus 2
LVIGAVILRG

SEQ ID NO: 414 - protein, 10 aa, Severe acute respiratory syndrome coronavirus 2
GAVILRGHLR

SEQ ID NO: 415 - protein, 10 aa, Severe acute respiratory syndrome coronavirus 2
LRIAGHHLGR

SEQ ID NO: 416 - protein, 10 aa, Severe acute respiratory syndrome coronavirus 2
RIAGHHLGRC

SEQ ID NO: 417 - protein, 10 aa, Severe acute respiratory syndrome coronavirus 2
GRCDIKDLPK

SEQ ID NO: 418 - protein, 10 aa, Severe acute respiratory syndrome coronavirus 2
LPKEITVATS

SEQ ID NO: 419 - protein, 10 aa, Severe acute respiratory syndrome coronavirus 2
EITVATSRTL

SEQ ID NO: 420 - protein, 10 aa, Severe acute respiratory syndrome coronavirus 2
TVATSRTLSY

SEQ ID NO: 421 - protein, 10 aa, Severe acute respiratory syndrome coronavirus 2
VATSRTLSYY

SEQ ID NO: 422 - protein, 10 aa, Severe acute respiratory syndrome coronavirus 2
ATSRTLSYYK

SEQ ID NO: 423 - protein, 10 aa, Severe acute respiratory syndrome coronavirus 2
TSRTLSYYKL

SEQ ID NO: 424 - protein, 10 aa, Severe acute respiratory syndrome coronavirus 2
RTLSYYKLGA

SEQ ID NO: 425 - protein, 10 aa, Severe acute respiratory syndrome coronavirus 2
TLSYYKLGAS

SEQ ID NO: 426 - protein, 10 aa, Severe acute respiratory syndrome coronavirus 2
SYYKLGASQR

SEQ ID NO: 427 - protein, 10 aa, Severe acute respiratory syndrome coronavirus 2
YYKLGASQRV

SEQ ID NO: 428 - protein, 10 aa, Severe acute respiratory syndrome coronavirus 2
SQRVAGDSGF

SEQ ID NO: 429 - protein, 10 aa, Severe acute respiratory syndrome coronavirus 2
VAGDSGFAAY

SEQ ID NO: 430 - protein, 10 aa, Severe acute respiratory syndrome coronavirus 2
GDSGFAAYSR

SEQ ID NO: 431 - protein, 10 aa, Severe acute respiratory syndrome coronavirus 2
DSGFAAYSRY

SEQ ID NO: 432 - protein, 10 aa, Severe acute respiratory syndrome coronavirus 2
SGFAAYSRYR

SEQ ID NO: 433 - protein, 10 aa, Severe acute respiratory syndrome coronavirus 2
AYSRYRIGNY

SEQ ID NO: 434 - protein, 10 aa, Severe acute respiratory syndrome coronavirus 2
YSRYRIGNYK

SEQ ID NO: 435 - protein, 10 aa, Severe acute respiratory syndrome coronavirus 2
SRYRIGNYKL

SEQ ID NO: 436 - protein, 10 aa, Severe acute respiratory syndrome coronavirus 2
RYRIGNYKLN

SEQ ID NO: 437 - protein, 10 aa, Severe acute respiratory syndrome coronavirus 2
SSSDNIALLV

SEQ ID NO: 438 - protein, 11 aa, Severe acute respiratory syndrome coronavirus 2
SNGTITVEELK

SEQ ID NO: 439 - protein, 11 aa, Severe acute respiratory syndrome coronavirus 2
LKKLLEQWNLV

SEQ ID NO: 440 - protein, 11 aa, Severe acute respiratory syndrome coronavirus 2
KKLLEQWNLVI

SEQ ID NO: 441 - protein, 11 aa, Severe acute respiratory syndrome coronavirus 2
KLLEQWNLVIG

SEQ ID NO: 442 - protein, 11 aa, Severe acute respiratory syndrome coronavirus 2
LVIGFLFLTWI

SEQ ID NO: 443 - protein, 11 aa, Severe acute respiratory syndrome coronavirus 2
GFLFLTWICLL

SEQ ID NO: 444 - protein, 11 aa, Severe acute respiratory syndrome coronavirus 2
FLFLTWICLLQ

SEQ ID NO: 445 - protein, 11 aa, Severe acute respiratory syndrome coronavirus 2
FLTWICLLQFA

SEQ ID NO: 446 - protein, 11 aa, Severe acute respiratory syndrome coronavirus 2
LTWICLLQFAY

SEQ ID NO: 447 - protein, 11 aa, Severe acute respiratory syndrome coronavirus 2
ICLLQFAYANR

SEQ ID NO: 448 - protein, 11 aa, Severe acute respiratory syndrome coronavirus 2
LLQFAYANRNR

SEQ ID NO: 449 - protein, 11 aa, Severe acute respiratory syndrome coronavirus 2
LQFAYANRNRF

SEQ ID NO: 450 - protein, 11 aa, Severe acute respiratory syndrome coronavirus 2
FAYANRNRFLY

SEQ ID NO: 451 - protein, 11 aa, Severe acute respiratory syndrome coronavirus 2
AYANRNRFLYI

SEQ ID NO: 452 - protein, 11 aa, Severe acute respiratory syndrome coronavirus 2
YANRNRFLYII

SEQ ID NO: 453 - protein, 11 aa, Severe acute respiratory syndrome coronavirus 2
ANRNRFLYIIK

SEQ ID NO: 454 - protein, 11 aa, Severe acute respiratory syndrome coronavirus 2
NRNRFLYIIKL

SEQ ID NO: 455 - protein, 11 aa, Severe acute respiratory syndrome coronavirus 2
RFLYIIKLIFL

SEQ ID NO: 456 - protein, 11 aa, Severe acute respiratory syndrome coronavirus 2
YIIKLIFLWLL

SEQ ID NO: 457 - protein, 11 aa, Severe acute respiratory syndrome coronavirus 2
KLIFLWLLWPV

SEQ ID NO: 458 - protein, 11 aa, Severe acute respiratory syndrome coronavirus 2
LIFLWLLWPVT

SEQ ID NO: 459 - protein, 11 aa, Severe acute respiratory syndrome coronavirus 2
IFLWLLWPVTL

SEQ ID NO: 460 - protein, 11 aa, Severe acute respiratory syndrome coronavirus 2
FLWLLWPVTLA

SEQ ID NO: 461 - protein, 11 aa, Severe acute respiratory syndrome coronavirus 2
LLWPVTLACFV

SEQ ID NO: 462 - protein, 11 aa, Severe acute respiratory syndrome coronavirus 2
LWPVTLACFVL

SEQ ID NO: 463 - protein, 11 aa, Severe acute respiratory syndrome coronavirus 2
WPVTLACFVLA

SEQ ID NO: 464 - protein, 11 aa, Severe acute respiratory syndrome coronavirus 2
VTLACFVLAAV

SEQ ID NO: 465 - protein, 11 aa, Severe acute respiratory syndrome coronavirus 2
TLACFVLAAVY

SEQ ID NO: 466 - protein, 11 aa, Severe acute respiratory syndrome coronavirus 2
LACFVLAAVYR

SEQ ID NO: 467 - protein, 11 aa, Severe acute respiratory syndrome coronavirus 2
FVLAAVYRINW

SEQ ID NO: 468 - protein, 11 aa, Severe acute respiratory syndrome coronavirus 2
VLAAVYRINWI

SEQ ID NO: 469 - protein, 11 aa, Severe acute respiratory syndrome coronavirus 2
VYRINWITGGI

SEQ ID NO: 470 - protein, 11 aa, Severe acute respiratory syndrome coronavirus 2
YRINWITGGIA

SEQ ID NO: 471 - protein, 11 aa, Severe acute respiratory syndrome coronavirus 2
IAMACLVGLMW

SEQ ID NO: 472 - protein, 11 aa, Severe acute respiratory syndrome coronavirus 2
AMACLVGLMWL

SEQ ID NO: 473 - protein, 11 aa, Severe acute respiratory syndrome coronavirus 2
LVGLMWLSYFI

SEQ ID NO: 474 - protein, 11 aa, Severe acute respiratory syndrome coronavirus 2
VGLMWLSYFIA

SEQ ID NO: 475 - protein, 11 aa, Severe acute respiratory syndrome coronavirus 2
GLMWLSYFIAS

SEQ ID NO: 476 - protein, 11 aa, Severe acute respiratory syndrome coronavirus 2
LMWLSYFIASF

SEQ ID NO: 477 - protein, 11 aa, Severe acute respiratory syndrome coronavirus 2
MWLSYFIASFR

SEQ ID NO: 478 - protein, 11 aa, Severe acute respiratory syndrome coronavirus 2
WLSYFIASFRL

SEQ ID NO: 479 - protein, 11 aa, Severe acute respiratory syndrome coronavirus 2
LSYFIASFRLF

SEQ ID NO: 480 - protein, 11 aa, Severe acute respiratory syndrome coronavirus 2
SYFIASFRLFA

SEQ ID NO: 481 - protein, 11 aa, Severe acute respiratory syndrome coronavirus 2
YFIASFRLFAR

SEQ ID NO: 482 - protein, 11 aa, Severe acute respiratory syndrome coronavirus 2
IASFRLFARTR

SEQ ID NO: 483 - protein, 11 aa, Severe acute respiratory syndrome coronavirus 2
SFRLFARTRSM

SEQ ID NO: 484 - protein, 11 aa, Severe acute respiratory syndrome coronavirus 2
RLFARTRSMWS

SEQ ID NO: 485 - protein, 11 aa, Severe acute respiratory syndrome coronavirus 2
LFARTRSMWSF

SEQ ID NO: 486 - protein, 11 aa, Severe acute respiratory syndrome coronavirus 2
RTRSMWSFNPE

SEQ ID NO: 487 - protein, 11 aa, Severe acute respiratory syndrome coronavirus 2
SMWSFNPETNI

SEQ ID NO: 488 - protein, 11 aa, Severe acute respiratory syndrome coronavirus 2
MWSFNPETNIL

SEQ ID NO: 489 - protein, 11 aa, Severe acute respiratory syndrome coronavirus 2
WSFNPETNILL

SEQ ID NO: 490 - protein, 11 aa, Severe acute respiratory syndrome coronavirus 2
ILLNVPLHGTI

SEQ ID NO: 491 - protein, 11 aa, Severe acute respiratory syndrome coronavirus 2
NVPLHGTILTR

SEQ ID NO: 492 - protein, 11 aa, Severe acute respiratory syndrome coronavirus 2
LLESELVIGAV

SEQ ID NO: 493 - protein, 11 aa, Severe acute respiratory syndrome coronavirus 2
LESELVIGAVI

SEQ ID NO: 494 - protein, 11 aa, Severe acute respiratory syndrome coronavirus 2
SELVIGAVILR

SEQ ID NO: 495 - protein, 11 aa, Severe acute respiratory syndrome coronavirus 2
ELVIGAVILRG

SEQ ID NO: 496 - protein, 11 aa, Severe acute respiratory syndrome coronavirus 2
IGAVILRGHLR

SEQ ID NO: 497 - protein, 11 aa, Severe acute respiratory syndrome coronavirus 2
HLRIAGHHLGR

SEQ ID NO: 498 - protein, 11 aa, Severe acute respiratory syndrome coronavirus 2
KEITVATSRTL

SEQ ID NO: 499 - protein, 11 aa, Severe acute respiratory syndrome coronavirus 2
ITVATSRTLSY

SEQ ID NO: 500 - protein, 11 aa, Severe acute respiratory syndrome coronavirus 2
TVATSRTLSYY

SEQ ID NO: 501 - protein, 11 aa, Severe acute respiratory syndrome coronavirus 2
VATSRTLSYYK

SEQ ID NO: 502 - protein, 11 aa, Severe acute respiratory syndrome coronavirus 2
ATSRTLSYYKL

SEQ ID NO: 503 - protein, 11 aa, Severe acute respiratory syndrome coronavirus 2
LSYYKLGASQR

SEQ ID NO: 504 - protein, 11 aa, Severe acute respiratory syndrome coronavirus 2
SYYKLGASQRV

SEQ ID NO: 505 - protein, 11 aa, Severe acute respiratory syndrome coronavirus 2
ASQRVAGDSGF

SEQ ID NO: 506 - protein, 11 aa, Severe acute respiratory syndrome coronavirus 2
RVAGDSGFAAY

SEQ ID NO: 507 - protein, 11 aa, Severe acute respiratory syndrome coronavirus 2
AGDSGFAAYSR

SEQ ID NO: 508 - protein, 11 aa, Severe acute respiratory syndrome coronavirus 2
DSGFAAYSRYR

SEQ ID NO: 509 - protein, 11 aa, Severe acute respiratory syndrome coronavirus 2
SGFAAYSRYRI

SEQ ID NO: 510 - protein, 11 aa, Severe acute respiratory syndrome coronavirus 2
AAYSRYRIGNY

SEQ ID NO: 511 - protein, 11 aa, Severe acute respiratory syndrome coronavirus 2
AYSRYRIGNYK

SEQ ID NO: 512 - protein, 11 aa, Severe acute respiratory syndrome coronavirus 2
YSRYRIGNYKL

SEQ ID NO: 513 - protein, 11 aa, Severe acute respiratory syndrome coronavirus 2
SRYRIGNYKLN

SEQ ID NO: 514 - protein, 11 aa, Severe acute respiratory syndrome coronavirus 2
DHSSSSDNIAL

SEQ ID NO: 515 - protein, 8 aa, Severe acute respiratory syndrome coronavirus 2
LPNNTASW

SEQ ID NO: 516 - protein, 8 aa, Severe acute respiratory syndrome coronavirus 2
TASWFTAL

SEQ ID NO: 517 - protein, 8 aa, Severe acute respiratory syndrome coronavirus 2
FPRGQGVP

SEQ ID NO: 518 - protein, 8 aa, Severe acute respiratory syndrome coronavirus 2
PRGQGVPI

SEQ ID NO: 519 - protein, 8 aa, Severe acute respiratory syndrome coronavirus 2
GYYRRATR

SEQ ID NO: 520 - protein, 8 aa, Severe acute respiratory syndrome coronavirus 2
KMKDLSPR

SEQ ID NO: 521 - protein, 8 aa, Severe acute respiratory syndrome coronavirus 2
PRWYFYYL

SEQ ID NO: 522 - protein, 8 aa, Severe acute respiratory syndrome coronavirus 2
QLPQGTTL

SEQ ID NO: 523 - protein, 8 aa, Severe acute respiratory syndrome coronavirus 2
SSRGTSPA

SEQ ID NO: 524 - protein, 8 aa, Severe acute respiratory syndrome coronavirus 2
KPRQKRTA

SEQ ID NO: 525 - protein, 8 aa, Severe acute respiratory syndrome coronavirus 2
RQKRTATK

SEQ ID NO: 526 - protein, 8 aa, Severe acute respiratory syndrome coronavirus 2
AYNVTQAF

SEQ ID NO: 527 - protein, 8 aa, Severe acute respiratory syndrome coronavirus 2
HWPQIAQF

SEQ ID NO: 528 - protein, 8 aa, Severe acute respiratory syndrome coronavirus 2
FAPSASAF

SEQ ID NO: 529 - protein, 8 aa, Severe acute respiratory syndrome coronavirus 2
APSASAFF

SEQ ID NO: 530 - protein, 8 aa, Severe acute respiratory syndrome coronavirus 2
SASAFFGM

SEQ ID NO: 531 - protein, 8 aa, Severe acute respiratory syndrome coronavirus 2
SAFFGMSR

SEQ ID NO: 532 - protein, 8 aa, Severe acute respiratory syndrome coronavirus 2
FGMSRIGM

SEQ ID NO: 533 - protein, 8 aa, Severe acute respiratory syndrome coronavirus 2
MSRIGMEV

SEQ ID NO: 534 - protein, 8 aa, Severe acute respiratory syndrome coronavirus 2
VTPSGTWL

SEQ ID NO: 535 - protein, 8 aa, Severe acute respiratory syndrome coronavirus 2
TYTGAIKL

SEQ ID NO: 536 - protein, 8 aa, Severe acute respiratory syndrome coronavirus 2
KADETQAL

SEQ ID NO: 537 - protein, 8 aa, Severe acute respiratory syndrome coronavirus 2
KQQTVTLL

SEQ ID NO: 538 - protein, 9 aa, Severe acute respiratory syndrome coronavirus 2
QRNAPRITF

SEQ ID NO: 539 - protein, 9 aa, Severe acute respiratory syndrome coronavirus 2
APRITFGGP

SEQ ID NO: 540 - protein, 9 aa, Severe acute respiratory syndrome coronavirus 2
RSGARSKQR

SEQ ID NO: 541 - protein, 9 aa, Severe acute respiratory syndrome coronavirus 2
RSKQRRPQG

SEQ ID NO: 542 - protein, 9 aa, Severe acute respiratory syndrome coronavirus 2
KQRRPQGLP

SEQ ID NO: 543 - protein, 9 aa, Severe acute respiratory syndrome coronavirus 2
RPQGLPNNT

SEQ ID NO: 544 - protein, 9 aa, Severe acute respiratory syndrome coronavirus 2
GLPNNTASW

SEQ ID NO: 545 - protein, 9 aa, Severe acute respiratory syndrome coronavirus 2
LPNNTASWF

SEQ ID NO: 546 - protein, 9 aa, Severe acute respiratory syndrome coronavirus 2
NTASWFTAL

SEQ ID NO: 547 - protein, 9 aa, Severe acute respiratory syndrome coronavirus 2
TASWFTALT

SEQ ID NO: 548 - protein, 9 aa, Severe acute respiratory syndrome coronavirus 2
FTALTQHGK

SEQ ID NO: 549 - protein, 9 aa, Severe acute respiratory syndrome coronavirus 2
LKFPRGQGV

SEQ ID NO: 550 - protein, 9 aa, Severe acute respiratory syndrome coronavirus 2
FPRGQGVPI

SEQ ID NO: 551 - protein, 9 aa, Severe acute respiratory syndrome coronavirus 2
SPDDQIGYY

SEQ ID NO: 552 - protein, 9 aa, Severe acute respiratory syndrome coronavirus 2
IGYYRRATR

SEQ ID NO: 553 - protein, 9 aa, Severe acute respiratory syndrome coronavirus 2
GYYRRATRR

SEQ ID NO: 554 - protein, 9 aa, Severe acute respiratory syndrome coronavirus 2
YYRRATRRI

SEQ ID NO: 555 - protein, 9 aa, Severe acute respiratory syndrome coronavirus 2
RRATRRIRG

SEQ ID NO: 556 - protein, 9 aa, Severe acute respiratory syndrome coronavirus 2
RRIRGGDGK

SEQ ID NO: 557 - protein, 9 aa, Severe acute respiratory syndrome coronavirus 2
RIRGGDGKM

SEQ ID NO: 558 - protein, 9 aa, Severe acute respiratory syndrome coronavirus 2
KMKDLSPRW

SEQ ID NO: 559 - protein, 9 aa, Severe acute respiratory syndrome coronavirus 2
MKDLSPRWY

SEQ ID NO: 560 - protein, 9 aa, Severe acute respiratory syndrome coronavirus 2
DLSPRWYFY

SEQ ID NO: 561 - protein, 9 aa, Severe acute respiratory syndrome coronavirus 2
SPRWYFYYL

SEQ ID NO: 562 - protein, 9 aa, Severe acute respiratory syndrome coronavirus 2
FYYLGTGPE

SEQ ID NO: 563 - protein, 9 aa, Severe acute respiratory syndrome coronavirus 2
YYLGTGPEA

SEQ ID NO: 564 - protein, 9 aa, Severe acute respiratory syndrome coronavirus 2
TGPEAGLPY

SEQ ID NO: 565 - protein, 9 aa, Severe acute respiratory syndrome coronavirus 2
AGLPYGANK

SEQ ID NO: 566 - protein, 9 aa, Severe acute respiratory syndrome coronavirus 2
GANKDGIIW

SEQ ID NO: 567 - protein, 9 aa, Severe acute respiratory syndrome coronavirus 2
NKDGIIWVA

SEQ ID NO: 568 - protein, 9 aa, Severe acute respiratory syndrome coronavirus 2
IIWVATEGA

SEQ ID NO: 569 - protein, 9 aa, Severe acute respiratory syndrome coronavirus 2
IWVATEGAL

SEQ ID NO: 570 - protein, 9 aa, Severe acute respiratory syndrome coronavirus 2
DHIGTRNPA

SEQ ID NO: 571 - protein, 9 aa, Severe acute respiratory syndrome coronavirus 2
GTRNPANNA

SEQ ID NO: 572 - protein, 9 aa, Severe acute respiratory syndrome coronavirus 2
TRNPANNAA

SEQ ID NO: 573 - protein, 9 aa, Severe acute respiratory syndrome coronavirus 2
NPANNAAIV

SEQ ID NO: 574 - protein, 9 aa, Severe acute respiratory syndrome coronavirus 2
LQLPQGTTL

SEQ ID NO: 575 - protein, 9 aa, Severe acute respiratory syndrome coronavirus 2
GTTLPKGFY

SEQ ID NO: 576 - protein, 9 aa, Severe acute respiratory syndrome coronavirus 2
TTLPKGFYA

SEQ ID NO: 577 - protein, 9 aa, Severe acute respiratory syndrome coronavirus 2
KGFYAEGSR

SEQ ID NO: 578 - protein, 9 aa, Severe acute respiratory syndrome coronavirus 2
GSRGGSQAS

SEQ ID NO: 579 - protein, 9 aa, Severe acute respiratory syndrome coronavirus 2
RGGSQASSR

SEQ ID NO: 580 - protein, 9 aa, Severe acute respiratory syndrome coronavirus 2
QASSRSSSR

SEQ ID NO: 581 - protein, 9 aa, Severe acute respiratory syndrome coronavirus 2
SSRSSSRSR

SEQ ID NO: 582 - protein, 9 aa, Severe acute respiratory syndrome coronavirus 2
RSSSRSRNS

SEQ ID NO: 583 - protein, 9 aa, Severe acute respiratory syndrome coronavirus 2
SSRSRNSSR

SEQ ID NO: 584 - protein, 9 aa, Severe acute respiratory syndrome coronavirus 2
RSRNSSRNS

SEQ ID NO: 585 - protein, 9 aa, Severe acute respiratory syndrome coronavirus 2
SSRNSTPGS

SEQ ID NO: 586 - protein, 9 aa, Severe acute respiratory syndrome coronavirus 2
RNSTPGSSR

SEQ ID NO: 587 - protein, 9 aa, Severe acute respiratory syndrome coronavirus 2
SSRGTSPAR

SEQ ID NO: 588 - protein, 9 aa, Severe acute respiratory syndrome coronavirus 2
GTSPARMAG

SEQ ID NO: 589 - protein, 9 aa, Severe acute respiratory syndrome coronavirus 2
GGDAALALL

SEQ ID NO: 590 - protein, 9 aa, Severe acute respiratory syndrome coronavirus 2
GDAALALLL

SEQ ID NO: 591 - protein, 9 aa, Severe acute respiratory syndrome coronavirus 2
ALALLLLDR

SEQ ID NO: 592 - protein, 9 aa, Severe acute respiratory syndrome coronavirus 2
LLLDRLNQL

SEQ ID NO: 593 - protein, 9 aa, Severe acute respiratory syndrome coronavirus 2
RLNQLESKM

SEQ ID NO: 594 - protein, 9 aa, Severe acute respiratory syndrome coronavirus 2
QQQGQTVTK

SEQ ID NO: 595 - protein, 9 aa, Severe acute respiratory syndrome coronavirus 2
VTKKSAAEA

SEQ ID NO: 596 - protein, 9 aa, Severe acute respiratory syndrome coronavirus 2
KSAAEASKK

SEQ ID NO: 597 - protein, 9 aa, Severe acute respiratory syndrome coronavirus 2
ASKKPRQKR

SEQ ID NO: 598 - protein, 9 aa, Severe acute respiratory syndrome coronavirus 2
KPRQKRTAT

SEQ ID NO: 599 - protein, 9 aa, Severe acute respiratory syndrome coronavirus 2
RQKRTATKA

SEQ ID NO: 600 - protein, 9 aa, Severe acute respiratory syndrome coronavirus 2
QKRTATKAY

SEQ ID NO: 601 - protein, 9 aa, Severe acute respiratory syndrome coronavirus 2
RTATKAYNV

SEQ ID NO: 602 - protein, 9 aa, Severe acute respiratory syndrome coronavirus 2
ATKAYNVTQ

SEQ ID NO: 603 - protein, 9 aa, Severe acute respiratory syndrome coronavirus 2
KAYNVTQAF

SEQ ID NO: 604 - protein, 9 aa, Severe acute respiratory syndrome coronavirus 2
YNVTQAFGR

SEQ ID NO: 605 - protein, 9 aa, Severe acute respiratory syndrome coronavirus 2
NVTQAFGRR

SEQ ID NO: 606 - protein, 9 aa, Severe acute respiratory syndrome coronavirus 2
ELIRQGTDY

SEQ ID NO: 607 - protein, 9 aa, Severe acute respiratory syndrome coronavirus 2
LIRQGTDYK

SEQ ID NO: 608 - protein, 9 aa, Severe acute respiratory syndrome coronavirus 2
TDYKHWPQI

SEQ ID NO: 609 - protein, 9 aa, Severe acute respiratory syndrome coronavirus 2
KHWPQIAQF

SEQ ID NO: 610 - protein, 9 aa, Severe acute respiratory syndrome coronavirus 2
WPQIAQFAP

SEQ ID NO: 611 - protein, 9 aa, Severe acute respiratory syndrome coronavirus 2
AQFAPSASA

SEQ ID NO: 612 - protein, 9 aa, Severe acute respiratory syndrome coronavirus 2
QFAPSASAF

SEQ ID NO: 613 - protein, 9 aa, Severe acute respiratory syndrome coronavirus 2
FAPSASAFF

SEQ ID NO: 614 - protein, 9 aa, Severe acute respiratory syndrome coronavirus 2
ASAFFGMSR

SEQ ID NO: 615 - protein, 9 aa, Severe acute respiratory syndrome coronavirus 2
SAFFGMSRI

SEQ ID NO: 616 - protein, 9 aa, Severe acute respiratory syndrome coronavirus 2
FFGMSRIGM

SEQ ID NO: 617 - protein, 9 aa, Severe acute respiratory syndrome coronavirus 2
GMSRIGMEV

SEQ ID NO: 618 - protein, 9 aa, Severe acute respiratory syndrome coronavirus 2
MSRIGMEVT

SEQ ID NO: 619 - protein, 9 aa, Severe acute respiratory syndrome coronavirus 2
MEVTPSGTW

SEQ ID NO: 620 - protein, 9 aa, Severe acute respiratory syndrome coronavirus 2
EVTPSGTWL

SEQ ID NO: 621 - protein, 9 aa, Severe acute respiratory syndrome coronavirus 2
TPSGTWLTY

SEQ ID NO: 622 - protein, 9 aa, Severe acute respiratory syndrome coronavirus 2
GTWLTYTGA

SEQ ID NO: 623 - protein, 9 aa, Severe acute respiratory syndrome coronavirus 2
TWLTYTGAI

SEQ ID NO: 624 - protein, 9 aa, Severe acute respiratory syndrome coronavirus 2
WLTYTGAIK

SEQ ID NO: 625 - protein, 9 aa, Severe acute respiratory syndrome coronavirus 2
LTYTGAIKL

SEQ ID NO: 626 - protein, 9 aa, Severe acute respiratory syndrome coronavirus 2
KLDDKDPNF

SEQ ID NO: 627 - protein, 9 aa, Severe acute respiratory syndrome coronavirus 2
NFKDQVILL

SEQ ID NO: 628 - protein, 9 aa, Severe acute respiratory syndrome coronavirus 2
ILLNKHIDA

SEQ ID NO: 629 - protein, 9 aa, Severe acute respiratory syndrome coronavirus 2
LLNKHIDAY

SEQ ID NO: 630 - protein, 9 aa, Severe acute respiratory syndrome coronavirus 2
LNKHIDAYK

SEQ ID NO: 631 - protein, 9 aa, Severe acute respiratory syndrome coronavirus 2
KHIDAYKTF

SEQ ID NO: 632 - protein, 9 aa, Severe acute respiratory syndrome coronavirus 2
DAYKTFPPT

SEQ ID NO: 633 - protein, 9 aa, Severe acute respiratory syndrome coronavirus 2
KTFPPTEPK

SEQ ID NO: 634 - protein, 9 aa, Severe acute respiratory syndrome coronavirus 2
KKADETQAL

SEQ ID NO: 635 - protein, 9 aa, Severe acute respiratory syndrome coronavirus 2
TQALPQRQK

SEQ ID NO: 636 - protein, 9 aa, Severe acute respiratory syndrome coronavirus 2
QKKQQTVTL

SEQ ID NO: 637 - protein, 9 aa, Severe acute respiratory syndrome coronavirus 2
KKQQTVTLL

SEQ ID NO: 638 - protein, 9 aa, Severe acute respiratory syndrome coronavirus 2
QQTVTLLPA

SEQ ID NO: 639 - protein, 9 aa, Severe acute respiratory syndrome coronavirus 2
QTVTLLPAA

SEQ ID NO: 640 - protein, 9 aa, Severe acute respiratory syndrome coronavirus 2
VTLLPAADL

SEQ ID NO: 641 - protein, 9 aa, Severe acute respiratory syndrome coronavirus 2
LPAADLDDF

SEQ ID NO: 642 - protein, 9 aa, Severe acute respiratory syndrome coronavirus 2
FSKQLQQSM

SEQ ID NO: 643 - protein, 9 aa, Severe acute respiratory syndrome coronavirus 2
KQLQQSMSS

SEQ ID NO: 644 - protein, 9 aa, Severe acute respiratory syndrome coronavirus 2
QLQQSMSSA

SEQ ID NO: 645 - protein, 10 aa, Severe acute respiratory syndrome coronavirus 2
MSDNGPQNQR

SEQ ID NO: 646 - protein, 10 aa, Severe acute respiratory syndrome coronavirus 2
GPQNQRNAPR

SEQ ID NO: 647 - protein, 10 aa, Severe acute respiratory syndrome coronavirus 2
NQRNAPRITF

SEQ ID NO: 648 - protein, 10 aa, Severe acute respiratory syndrome coronavirus 2
APRITFGGPS

SEQ ID NO: 649 - protein, 10 aa, Severe acute respiratory syndrome coronavirus 2
STGSNQNGER

SEQ ID NO: 650 - protein, 10 aa, Severe acute respiratory syndrome coronavirus 2
RSGARSKQRR

SEQ ID NO: 651 - protein, 10 aa, Severe acute respiratory syndrome coronavirus 2
RSKQRRPQGL

SEQ ID NO: 652 - protein, 10 aa, Severe acute respiratory syndrome coronavirus 2
RPQGLPNNTA

SEQ ID NO: 653 - protein, 10 aa, Severe acute respiratory syndrome coronavirus 2
QGLPNNTASW

SEQ ID NO: 654 - protein, 10 aa, Severe acute respiratory syndrome coronavirus 2
GLPNNTASWF

SEQ ID NO: 655 - protein, 10 aa, Severe acute respiratory syndrome coronavirus 2
NNTASWFTAL

SEQ ID NO: 656 - protein, 10 aa, Severe acute respiratory syndrome coronavirus 2
NTASWFTALT

SEQ ID NO: 657 - protein, 10 aa, Severe acute respiratory syndrome coronavirus 2
WFTALTQHGK

SEQ ID NO: 658 - protein, 10 aa, Severe acute respiratory syndrome coronavirus 2
FTALTQHGKE

SEQ ID NO: 659 - protein, 10 aa, Severe acute respiratory syndrome coronavirus 2
TQHGKEDLKF

SEQ ID NO: 660 - protein, 10 aa, Severe acute respiratory syndrome coronavirus 2
HGKEDLKFPR

SEQ ID NO: 661 - protein, 10 aa, Severe acute respiratory syndrome coronavirus 2
KFPRGQGVPI

SEQ ID NO: 662 - protein, 10 aa, Severe acute respiratory syndrome coronavirus 2
FPRGQGVPIN

SEQ ID NO: 663 - protein, 10 aa, Severe acute respiratory syndrome coronavirus 2
SSPDDQIGYY

SEQ ID NO: 664 - protein, 10 aa, Severe acute respiratory syndrome coronavirus 2
QIGYYRRATR

SEQ ID NO: 665 - protein, 10 aa, Severe acute respiratory syndrome coronavirus 2
IGYYRRATRR

SEQ ID NO: 666 - protein, 10 aa, Severe acute respiratory syndrome coronavirus 2
YYRRATRRIR

SEQ ID NO: 667 - protein, 10 aa, Severe acute respiratory syndrome coronavirus 2
RRIRGGDGKM

SEQ ID NO: 668 - protein, 10 aa, Severe acute respiratory syndrome coronavirus 2
RIRGGDGKMK

SEQ ID NO: 669 - protein, 10 aa, Severe acute respiratory syndrome coronavirus 2
DGKMKDLSPR

SEQ ID NO: 670 - protein, 10 aa, Severe acute respiratory syndrome coronavirus 2
KMKDLSPRWY

SEQ ID NO: 671 - protein, 10 aa, Severe acute respiratory syndrome coronavirus 2
MKDLSPRWYF

SEQ ID NO: 672 - protein, 10 aa, Severe acute respiratory syndrome coronavirus 2
KDLSPRWYFY

SEQ ID NO: 673 - protein, 10 aa, Severe acute respiratory syndrome coronavirus 2
DLSPRWYFYY

SEQ ID NO: 674 - protein, 10 aa, Severe acute respiratory syndrome coronavirus 2
LSPRWYFYYL

SEQ ID NO: 675 - protein, 10 aa, Severe acute respiratory syndrome coronavirus 2
SPRWYFYYLG

SEQ ID NO: 676 - protein, 10 aa, Severe acute respiratory syndrome coronavirus 2
FYYLGTGPEA

SEQ ID NO: 677 - protein, 10 aa, Severe acute respiratory syndrome coronavirus 2
YLGTGPEAGL

SEQ ID NO: 678 - protein, 10 aa, Severe acute respiratory syndrome coronavirus 2
GTGPEAGLPY

SEQ ID NO: 679 - protein, 10 aa, Severe acute respiratory syndrome coronavirus 2
GPEAGLPYGA

SEQ ID NO: 680 - protein, 10 aa, Severe acute respiratory syndrome coronavirus 2
EAGLPYGANK

SEQ ID NO: 681 - protein, 10 aa, Severe acute respiratory syndrome coronavirus 2
LPYGANKDGI

SEQ ID NO: 682 - protein, 10 aa, Severe acute respiratory syndrome coronavirus 2
YGANKDGIIW

SEQ ID NO: 683 - protein, 10 aa, Severe acute respiratory syndrome coronavirus 2
GIIWVATEGA

SEQ ID NO: 684 - protein, 10 aa, Severe acute respiratory syndrome coronavirus 2
ATEGALNTPK

SEQ ID NO: 685 - protein, 10 aa, Severe acute respiratory syndrome coronavirus 2
NTPKDHIGTR

SEQ ID NO: 686 - protein, 10 aa, Severe acute respiratory syndrome coronavirus 2
IGTRNPANNA

SEQ ID NO: 687 - protein, 10 aa, Severe acute respiratory syndrome coronavirus 2
GTRNPANNAA

SEQ ID NO: 688 - protein, 10 aa, Severe acute respiratory syndrome coronavirus 2
RNPANNAAIV

SEQ ID NO: 689 - protein, 10 aa, Severe acute respiratory syndrome coronavirus 2
NPANNAAIVL

SEQ ID NO: 690 - protein, 10 aa, Severe acute respiratory syndrome coronavirus 2
VLQLPQGTTL

SEQ ID NO: 691 - protein, 10 aa, Severe acute respiratory syndrome coronavirus 2
QLPQGTTLPK

SEQ ID NO: 692 - protein, 10 aa, Severe acute respiratory syndrome coronavirus 2
QGTTLPKGFY

SEQ ID NO: 693 - protein, 10 aa, Severe acute respiratory syndrome coronavirus 2
AEGSRGGSQA

SEQ ID NO: 694 - protein, 10 aa, Severe acute respiratory syndrome coronavirus 2
SQASSRSSSR

SEQ ID NO: 695 - protein, 10 aa, Severe acute respiratory syndrome coronavirus 2
ASSRSSSRSR

SEQ ID NO: 696 - protein, 10 aa, Severe acute respiratory syndrome coronavirus 2
RSSSRSRNSS

SEQ ID NO: 697 - protein, 10 aa, Severe acute respiratory syndrome coronavirus 2
SSSRSRNSSR

SEQ ID NO: 698 - protein, 10 aa, Severe acute respiratory syndrome coronavirus 2
SRSRNSSRNS

SEQ ID NO: 699 - protein, 10 aa, Severe acute respiratory syndrome coronavirus 2
RSRNSSRNST

SEQ ID NO: 700 - protein, 10 aa, Severe acute respiratory syndrome coronavirus 2
SSRNSTPGSS

SEQ ID NO: 701 - protein, 10 aa, Severe acute respiratory syndrome coronavirus 2
GSSRGTSPAR

SEQ ID NO: 702 - protein, 10 aa, Severe acute respiratory syndrome coronavirus 2
SSRGTSPARM

SEQ ID NO: 703 - protein, 10 aa, Severe acute respiratory syndrome coronavirus 2
RGTSPARMAG

SEQ ID NO: 704 - protein, 10 aa, Severe acute respiratory syndrome coronavirus 2
RMAGNGGDAA

SEQ ID NO: 705 - protein, 10 aa, Severe acute respiratory syndrome coronavirus 2
MAGNGGDAAL

SEQ ID NO: 706 - protein, 10 aa, Severe acute respiratory syndrome coronavirus 2
AALALLLLDR

SEQ ID NO: 707 - protein, 10 aa, Severe acute respiratory syndrome coronavirus 2
ALALLLLDRL

SEQ ID NO: 708 - protein, 10 aa, Severe acute respiratory syndrome coronavirus 2
LLLLDRLNQL

SEQ ID NO: 709 - protein, 10 aa, Severe acute respiratory syndrome coronavirus 2
LLLDRLNQLE

SEQ ID NO: 710 - protein, 10 aa, Severe acute respiratory syndrome coronavirus 2
LDRLNQLESK

SEQ ID NO: 711 - protein, 10 aa, Severe acute respiratory syndrome coronavirus 2
KKSAAEASKK

SEQ ID NO: 712 - protein, 10 aa, Severe acute respiratory syndrome coronavirus 2
SAAEASKKPR

SEQ ID NO: 713 - protein, 10 aa, Severe acute respiratory syndrome coronavirus 2
KKPRQKRTAT

SEQ ID NO: 714 - protein, 10 aa, Severe acute respiratory syndrome coronavirus 2
KPRQKRTATK

SEQ ID NO: 715 - protein, 10 aa, Severe acute respiratory syndrome coronavirus 2
RQKRTATKAY

SEQ ID NO: 716 - protein, 10 aa, Severe acute respiratory syndrome coronavirus 2
KRTATKAYNV

SEQ ID NO: 717 - protein, 10 aa, Severe acute respiratory syndrome coronavirus 2
ATKAYNVTQA

SEQ ID NO: 718 - protein, 10 aa, Severe acute respiratory syndrome coronavirus 2
TKAYNVTQAF

SEQ ID NO: 719 - protein, 10 aa, Severe acute respiratory syndrome coronavirus 2
KAYNVTQAFG

SEQ ID NO: 720 - protein, 10 aa, Severe acute respiratory syndrome coronavirus 2
AYNVTQAFGR

SEQ ID NO: 721 - protein, 10 aa, Severe acute respiratory syndrome coronavirus 2
YNVTQAFGRR

SEQ ID NO: 722 - protein, 10 aa, Severe acute respiratory syndrome coronavirus 2
RGPEQTQGNF

SEQ ID NO: 723 - protein, 10 aa, Severe acute respiratory syndrome coronavirus 2
QELIRQGTDY

SEQ ID NO: 724 - protein, 10 aa, Severe acute respiratory syndrome coronavirus 2
ELIRQGTDYK

SEQ ID NO: 725 - protein, 10 aa, Severe acute respiratory syndrome coronavirus 2
YKHWPQIAQF

SEQ ID NO: 726 - protein, 10 aa, Severe acute respiratory syndrome coronavirus 2
WPQIAQFAPS

SEQ ID NO: 727 - protein, 10 aa, Severe acute respiratory syndrome coronavirus 2
IAQFAPSASA

SEQ ID NO: 728 - protein, 10 aa, Severe acute respiratory syndrome coronavirus 2
AQFAPSASAF

SEQ ID NO: 729 - protein, 10 aa, Severe acute respiratory syndrome coronavirus 2
QFAPSASAFF

SEQ ID NO: 730 - protein, 10 aa, Severe acute respiratory syndrome coronavirus 2
APSASAFFGM

SEQ ID NO: 731 - protein, 10 aa, Severe acute respiratory syndrome coronavirus 2
SASAFFGMSR

SEQ ID NO: 732 - protein, 10 aa, Severe acute respiratory syndrome coronavirus 2
ASAFFGMSRI

SEQ ID NO: 733 - protein, 10 aa, Severe acute respiratory syndrome coronavirus 2
AFFGMSRIGM

SEQ ID NO: 734 - protein, 10 aa, Severe acute respiratory syndrome coronavirus 2
FGMSRIGMEV

SEQ ID NO: 735 - protein, 10 aa, Severe acute respiratory syndrome coronavirus 2
GMSRIGMEVT

SEQ ID NO: 736 - protein, 10 aa, Severe acute respiratory syndrome coronavirus 2
GMEVTPSGTW

SEQ ID NO: 737 - protein, 10 aa, Severe acute respiratory syndrome coronavirus 2
MEVTPSGTWL

SEQ ID NO: 738 - protein, 10 aa, Severe acute respiratory syndrome coronavirus 2
EVTPSGTWLT

SEQ ID NO: 739 - protein, 10 aa, Severe acute respiratory syndrome coronavirus 2
VTPSGTWLTY

SEQ ID NO: 740 - protein, 10 aa, Severe acute respiratory syndrome coronavirus 2
TWLTYTGAIK

SEQ ID NO: 741 - protein, 10 aa, Severe acute respiratory syndrome coronavirus 2
WLTYTGAIKL

SEQ ID NO: 742 - protein, 10 aa, Severe acute respiratory syndrome coronavirus 2
KLDDKDPNFK

SEQ ID NO: 743 - protein, 10 aa, Severe acute respiratory syndrome coronavirus 2
ILLNKHIDAY

SEQ ID NO: 744 - protein, 10 aa, Severe acute respiratory syndrome coronavirus 2
LLNKHIDAYK

SEQ ID NO: 745 - protein, 10 aa, Severe acute respiratory syndrome coronavirus 2
NKHIDAYKTF

SEQ ID NO: 746 - protein, 10 aa, Severe acute respiratory syndrome coronavirus 2
YKTFPPTEPK

SEQ ID NO: 747 - protein, 10 aa, Severe acute respiratory syndrome coronavirus 2
KTFPPTEPKK

SEQ ID NO: 748 - protein, 10 aa, Severe acute respiratory syndrome coronavirus 2
ETQALPQRQK

SEQ ID NO: 749 - protein, 10 aa, Severe acute respiratory syndrome coronavirus 2
RQKKQQTVTL

SEQ ID NO: 750 - protein, 10 aa, Severe acute respiratory syndrome coronavirus 2
KQQTVTLLPA

SEQ ID NO: 751 - protein, 10 aa, Severe acute respiratory syndrome coronavirus 2
QQTVTLLPAA

SEQ ID NO: 752 - protein, 10 aa, Severe acute respiratory syndrome coronavirus 2
ADLDDFSKQL

SEQ ID NO: 753 - protein, 10 aa, Severe acute respiratory syndrome coronavirus 2
KQLQQSMSSA

SEQ ID NO: 754 - protein, 10 aa, Severe acute respiratory syndrome coronavirus 2
SMSSADSTQA

SEQ ID NO: 755 - protein, 11 aa, Severe acute respiratory syndrome coronavirus 2
GPQNQRNAPRI

SEQ ID NO: 756 - protein, 11 aa, Severe acute respiratory syndrome coronavirus 2
LPNNTASWFTA

SEQ ID NO: 757 - protein, 11 aa, Severe acute respiratory syndrome coronavirus 2
SWFTALTQHGK

SEQ ID NO: 758 - protein, 11 aa, Severe acute respiratory syndrome coronavirus 2
LKFPRGQGVPI

SEQ ID NO: 759 - protein, 11 aa, Severe acute respiratory syndrome coronavirus 2
KFPRGQGVPIN

SEQ ID NO: 760 - protein, 11 aa, Severe acute respiratory syndrome coronavirus 2
FPRGQGVPINT

SEQ ID NO: 761 - protein, 11 aa, Severe acute respiratory syndrome coronavirus 2
NSSPDDQIGYY

SEQ ID NO: 762 - protein, 11 aa, Severe acute respiratory syndrome coronavirus 2
SSPDDQIGYYR

SEQ ID NO: 763 - protein, 11 aa, Severe acute respiratory syndrome coronavirus 2
DQIGYYRRATR

SEQ ID NO: 764 - protein, 11 aa, Severe acute respiratory syndrome coronavirus 2
QIGYYRRATRR

SEQ ID NO: 765 - protein, 11 aa, Severe acute respiratory syndrome coronavirus 2
GYYRRATRRIR

SEQ ID NO: 766 - protein, 11 aa, Severe acute respiratory syndrome coronavirus 2
ATRRIRGGDGK

SEQ ID NO: 767 - protein, 11 aa, Severe acute respiratory syndrome coronavirus 2
RRIRGGDGKMK

SEQ ID NO: 768 - protein, 11 aa, Severe acute respiratory syndrome coronavirus 2
GKMKDLSPRWY

SEQ ID NO: 769 - protein, 11 aa, Severe acute respiratory syndrome coronavirus 2
KMKDLSPRWYF

SEQ ID NO: 770 - protein, 11 aa, Severe acute respiratory syndrome coronavirus 2
MKDLSPRWYFY

SEQ ID NO: 771 - protein, 11 aa, Severe acute respiratory syndrome coronavirus 2
KDLSPRWYFYY

SEQ ID NO: 772 - protein, 11 aa, Severe acute respiratory syndrome coronavirus 2
YYLGTGPEAGL

SEQ ID NO: 773 - protein, 11 aa, Severe acute respiratory syndrome coronavirus 2
HIGTRNPANNA

SEQ ID NO: 774 - protein, 11 aa, Severe acute respiratory syndrome coronavirus 2
LQLPQGTTLPK

SEQ ID NO: 775 - protein, 11 aa, Severe acute respiratory syndrome coronavirus 2
LPQGTTLPKGF

SEQ ID NO: 776 - protein, 11 aa, Severe acute respiratory syndrome coronavirus 2
GSQASSRSSSR

SEQ ID NO: 777 - protein, 11 aa, Severe acute respiratory syndrome coronavirus 2
RSSSRSRNSSR

SEQ ID NO: 778 - protein, 11 aa, Severe acute respiratory syndrome coronavirus 2
RNSSRNSTPGS

SEQ ID NO: 779 - protein, 11 aa, Severe acute respiratory syndrome coronavirus 2
SSRNSTPGSSR

SEQ ID NO: 780 - protein, 11 aa, Severe acute respiratory syndrome coronavirus 2
TPGSSRGTSPA

SEQ ID NO: 781 - protein, 11 aa, Severe acute respiratory syndrome coronavirus 2
SSRGTSPARMA

SEQ ID NO: 782 - protein, 11 aa, Severe acute respiratory syndrome coronavirus 2
RMAGNGGDAAL

SEQ ID NO: 783 - protein, 11 aa, Severe acute respiratory syndrome coronavirus 2
DAALALLLLDR

SEQ ID NO: 784 - protein, 11 aa, Severe acute respiratory syndrome coronavirus 2
ALLLLDRLNQL

SEQ ID NO: 785 - protein, 11 aa, Severe acute respiratory syndrome coronavirus 2
VTKKSAAEASK

SEQ ID NO: 786 - protein, 11 aa, Severe acute respiratory syndrome coronavirus 2
KSAAEASKKPR

SEQ ID NO: 787 - protein, 11 aa, Severe acute respiratory syndrome coronavirus 2
SKKPRQKRTAT

SEQ ID NO: 788 - protein, 11 aa, Severe acute respiratory syndrome coronavirus 2
KPRQKRTATKA

SEQ ID NO: 789 - protein, 11 aa, Severe acute respiratory syndrome coronavirus 2
PRQKRTATKAY

SEQ ID NO: 790 - protein, 11 aa, Severe acute respiratory syndrome coronavirus 2
RQKRTATKAYN

SEQ ID NO: 791 - protein, 11 aa, Severe acute respiratory syndrome coronavirus 2
ATKAYNVTQAF

SEQ ID NO: 792 - protein, 11 aa, Severe acute respiratory syndrome coronavirus 2
KAYNVTQAFGR

SEQ ID NO: 793 - protein, 11 aa, Severe acute respiratory syndrome coronavirus 2
AYNVTQAFGRR

SEQ ID NO: 794 - protein, 11 aa, Severe acute respiratory syndrome coronavirus 2
WPQIAQFAPSA

SEQ ID NO: 795 - protein, 11 aa, Severe acute respiratory syndrome coronavirus 2
IAQFAPSASAF

SEQ ID NO: 796 - protein, 11 aa, Severe acute respiratory syndrome coronavirus 2
AQFAPSASAFF

SEQ ID NO: 797 - protein, 11 aa, Severe acute respiratory syndrome coronavirus 2
FAPSASAFFGM

SEQ ID NO: 798 - protein, 11 aa, Severe acute respiratory syndrome coronavirus 2
PSASAFFGMSR

SEQ ID NO: 799 - protein, 11 aa, Severe acute respiratory syndrome coronavirus 2
SAFFGMSRIGM

SEQ ID NO: 800 - protein, 11 aa, Severe acute respiratory syndrome coronavirus 2
FFGMSRIGMEV

SEQ ID NO: 801 - protein, 11 aa, Severe acute respiratory syndrome coronavirus 2
IGMEVTPSGTW

SEQ ID NO: 802 - protein, 11 aa, Severe acute respiratory syndrome coronavirus 2
EVTPSGTWLTY

SEQ ID NO: 803 - protein, 11 aa, Severe acute respiratory syndrome coronavirus 2
GTWLTYTGAIK

SEQ ID NO: 804 - protein, 11 aa, Severe acute respiratory syndrome coronavirus 2
ILLNKHIDAYK

SEQ ID NO: 805 - protein, 11 aa, Severe acute respiratory syndrome coronavirus 2
AYKTFPPTEPK

SEQ ID NO: 806 - protein, 11 aa, Severe acute respiratory syndrome coronavirus 2
YKTFPPTEPKK

SEQ ID NO: 807 - protein, 11 aa, Severe acute respiratory syndrome coronavirus 2
KTFPPTEPKKD

SEQ ID NO: 808 - protein, 11 aa, Severe acute respiratory syndrome coronavirus 2
RQKKQQTVTLL

SEQ ID NO: 809 - protein, 8 aa, Severe acute respiratory syndrome coronavirus 2
GYINVFAF

SEQ ID NO: 810 - protein, 8 aa, Severe acute respiratory syndrome coronavirus 2
VFAFPFTI

SEQ ID NO: 811 - protein, 8 aa, Severe acute respiratory syndrome coronavirus 2
FAFPFTIY

SEQ ID NO: 812 - protein, 8 aa, Severe acute respiratory syndrome coronavirus 2
FPFTIYSL

SEQ ID NO: 813 - protein, 8 aa, Severe acute respiratory syndrome coronavirus 2
FTIYSLLL

SEQ ID NO: 814 - protein, 8 aa, Severe acute respiratory syndrome coronavirus 2
IYSLLLCR

SEQ ID NO: 815 - protein, 8 aa, Severe acute respiratory syndrome coronavirus 2
AQVDVVNF

SEQ ID NO: 816 - protein, 9 aa, Severe acute respiratory syndrome coronavirus 2
MGYINVFAF

SEQ ID NO: 817 - protein, 9 aa, Severe acute respiratory syndrome coronavirus 2
YINVFAFPF

SEQ ID NO: 818 - protein, 9 aa, Severe acute respiratory syndrome coronavirus 2
NVFAFPFTI

SEQ ID NO: 819 - protein, 9 aa, Severe acute respiratory syndrome coronavirus 2
VFAFPFTIY

SEQ ID NO: 820 - protein, 9 aa, Severe acute respiratory syndrome coronavirus 2
FAFPFTIYS

SEQ ID NO: 821 - protein, 9 aa, Severe acute respiratory syndrome coronavirus 2
AFPFTIYSL

SEQ ID NO: 822 - protein, 9 aa, Severe acute respiratory syndrome coronavirus 2
FPFTIYSLL

SEQ ID NO: 823 - protein, 9 aa, Severe acute respiratory syndrome coronavirus 2
PFTIYSLLL

SEQ ID NO: 824 - protein, 9 aa, Severe acute respiratory syndrome coronavirus 2
TIYSLLLCR

SEQ ID NO: 825 - protein, 9 aa, Severe acute respiratory syndrome coronavirus 2
IYSLLLCRM

SEQ ID NO: 826 - protein, 9 aa, Severe acute respiratory syndrome coronavirus 2
LLLCRMNSR

SEQ ID NO: 827 - protein, 9 aa, Severe acute respiratory syndrome coronavirus 2
CRMNSRNYI

SEQ ID NO: 828 - protein, 9 aa, Severe acute respiratory syndrome coronavirus 2
RMNSRNYIA

SEQ ID NO: 829 - protein, 9 aa, Severe acute respiratory syndrome coronavirus 2
NSRNYIAQV

SEQ ID NO: 830 - protein, 9 aa, Severe acute respiratory syndrome coronavirus 2
NYIAQVDVV

SEQ ID NO: 831 - protein, 9 aa, Severe acute respiratory syndrome coronavirus 2
IAQVDVVNF

SEQ ID NO: 832 - protein, 9 aa, Severe acute respiratory syndrome coronavirus 2
QVDVVNFNL

SEQ ID NO: 833 - protein, 10 aa, Severe acute respiratory syndrome coronavirus 2
GYINVFAFPF

SEQ ID NO: 834 - protein, 10 aa, Severe acute respiratory syndrome coronavirus 2
YINVFAFPFT

SEQ ID NO: 835 - protein, 10 aa, Severe acute respiratory syndrome coronavirus 2
INVFAFPFTI

SEQ ID NO: 836 - protein, 10 aa, Severe acute respiratory syndrome coronavirus 2
NVFAFPFTIY

SEQ ID NO: 837 - protein, 10 aa, Severe acute respiratory syndrome coronavirus 2
FAFPFTIYSL

SEQ ID NO: 838 - protein, 10 aa, Severe acute respiratory syndrome coronavirus 2
AFPFTIYSLL

SEQ ID NO: 839 - protein, 10 aa, Severe acute respiratory syndrome coronavirus 2
FPFTIYSLLL

SEQ ID NO: 840 - protein, 10 aa, Severe acute respiratory syndrome coronavirus 2
FTIYSLLLCR

SEQ ID NO: 841 - protein, 10 aa, Severe acute respiratory syndrome coronavirus 2
TIYSLLLCRM

SEQ ID NO: 842 - protein, 10 aa, Severe acute respiratory syndrome coronavirus 2
SLLLCRMNSR

SEQ ID NO: 843 - protein, 10 aa, Severe acute respiratory syndrome coronavirus 2
LLCRMNSRNY

SEQ ID NO: 844 - protein, 10 aa, Severe acute respiratory syndrome coronavirus 2
LCRMNSRNYI

SEQ ID NO: 845 - protein, 10 aa, Severe acute respiratory syndrome coronavirus 2
CRMNSRNYIA

SEQ ID NO: 846 - protein, 10 aa, Severe acute respiratory syndrome coronavirus 2
MNSRNYIAQV

SEQ ID NO: 847 - protein, 10 aa, Severe acute respiratory syndrome coronavirus 2
SRNYIAQVDV

SEQ ID NO: 848 - protein, 10 aa, Severe acute respiratory syndrome coronavirus 2
RNYIAQVDVV

SEQ ID NO: 849 - protein, 10 aa, Severe acute respiratory syndrome coronavirus 2
YIAQVDVVNF

SEQ ID NO: 850 - protein, 10 aa, Severe acute respiratory syndrome coronavirus 2
AQVDVVNFNL

SEQ ID NO: 851 - protein, 11 aa, Severe acute respiratory syndrome coronavirus 2
MGYINVFAFPF

SEQ ID NO: 852 - protein, 11 aa, Severe acute respiratory syndrome coronavirus 2
GYINVFAFPFT

SEQ ID NO: 853 - protein, 11 aa, Severe acute respiratory syndrome coronavirus 2
YINVFAFPFTI

SEQ ID NO: 854 - protein, 11 aa, Severe acute respiratory syndrome coronavirus 2
INVFAFPFTIY

SEQ ID NO: 855 - protein, 11 aa, Severe acute respiratory syndrome coronavirus 2
VFAFPFTIYSL

SEQ ID NO: 856 - protein, 11 aa, Severe acute respiratory syndrome coronavirus 2
FAFPFTIYSLL

SEQ ID NO: 857 - protein, 11 aa, Severe acute respiratory syndrome coronavirus 2
AFPFTIYSLLL

SEQ ID NO: 858 - protein, 11 aa, Severe acute respiratory syndrome coronavirus 2
FPFTIYSLLLC

SEQ ID NO: 859 - protein, 11 aa, Severe acute respiratory syndrome coronavirus 2
PFTIYSLLLCR

SEQ ID NO: 860 - protein, 11 aa, Severe acute respiratory syndrome coronavirus 2
FTIYSLLLCRM

SEQ ID NO: 861 - protein, 11 aa, Severe acute respiratory syndrome coronavirus 2
YSLLLCRMNSR

SEQ ID NO: 862 - protein, 11 aa, Severe acute respiratory syndrome coronavirus 2
LLLCRMNSRNY

SEQ ID NO: 863 - protein, 11 aa, Severe acute respiratory syndrome coronavirus 2
LLCRMNSRNYI

SEQ ID NO: 864 - protein, 11 aa, Severe acute respiratory syndrome coronavirus 2
RMNSRNYIAQV

SEQ ID NO: 865 - protein, 11 aa, Severe acute respiratory syndrome coronavirus 2
NYIAQVDVVNF

SEQ ID NO: 866 - protein, 8 aa, Severe acute respiratory syndrome coronavirus 2
AEAAVKPL

SEQ ID NO: 867 - protein, 8 aa, Severe acute respiratory syndrome coronavirus 2
QEIQLQAA

SEQ ID NO: 868 - protein, 8 aa, Severe acute respiratory syndrome coronavirus 2
LQAAVGEL

SEQ ID NO: 869 - protein, 8 aa, Severe acute respiratory syndrome coronavirus 2
GELLLLEW

SEQ ID NO: 870 - protein, 8 aa, Severe acute respiratory syndrome coronavirus 2
LLLEWLAM

SEQ ID NO: 871 - protein, 8 aa, Severe acute respiratory syndrome coronavirus 2
LLEWLAMA

SEQ ID NO: 872 - protein, 8 aa, Severe acute respiratory syndrome coronavirus 2
LEWLAMAV

SEQ ID NO: 873 - protein, 8 aa, Severe acute respiratory syndrome coronavirus 2
WLAMAVML

SEQ ID NO: 874 - protein, 8 aa, Severe acute respiratory syndrome coronavirus 2
LAMAVMLL

SEQ ID NO: 875 - protein, 8 aa, Severe acute respiratory syndrome coronavirus 2
AMAVMLLL

SEQ ID NO: 876 - protein, 9 aa, Severe acute respiratory syndrome coronavirus 2
MLQSCYNFL

SEQ ID NO: 877 - protein, 9 aa, Severe acute respiratory syndrome coronavirus 2
LQSCYNFLK

SEQ ID NO: 878 - protein, 9 aa, Severe acute respiratory syndrome coronavirus 2
FLKEQHCQK

SEQ ID NO: 879 - protein, 9 aa, Severe acute respiratory syndrome coronavirus 2
TQKGAEAAV

SEQ ID NO: 880 - protein, 9 aa, Severe acute respiratory syndrome coronavirus 2
AEAAVKPLL

SEQ ID NO: 881 - protein, 9 aa, Severe acute respiratory syndrome coronavirus 2
EAAVKPLLV

SEQ ID NO: 882 - protein, 9 aa, Severe acute respiratory syndrome coronavirus 2
AVKPLLVPH

SEQ ID NO: 883 - protein, 9 aa, Severe acute respiratory syndrome coronavirus 2
KPLLVPHHV

SEQ ID NO: 884 - protein, 9 aa, Severe acute respiratory syndrome coronavirus 2
LLVPHHVVA

SEQ ID NO: 885 - protein, 9 aa, Severe acute respiratory syndrome coronavirus 2
VPHHVVATV

SEQ ID NO: 886 - protein, 9 aa, Severe acute respiratory syndrome coronavirus 2
HVVATVQEI

SEQ ID NO: 887 - protein, 9 aa, Severe acute respiratory syndrome coronavirus 2
VATVQEIQL

SEQ ID NO: 888 - protein, 9 aa, Severe acute respiratory syndrome coronavirus 2
QEIQLQAAV

SEQ ID NO: 889 - protein, 9 aa, Severe acute respiratory syndrome coronavirus 2
QLQAAVGEL

SEQ ID NO: 890 - protein, 9 aa, Severe acute respiratory syndrome coronavirus 2
LQAAVGELL

SEQ ID NO: 891 - protein, 9 aa, Severe acute respiratory syndrome coronavirus 2
QAAVGELLL

SEQ ID NO: 892 - protein, 9 aa, Severe acute respiratory syndrome coronavirus 2
AAVGELLLL

SEQ ID NO: 893 - protein, 9 aa, Severe acute respiratory syndrome coronavirus 2
VGELLLLEW

SEQ ID NO: 894 - protein, 9 aa, Severe acute respiratory syndrome coronavirus 2
GELLLLEWL

SEQ ID NO: 895 - protein, 9 aa, Severe acute respiratory syndrome coronavirus 2
ELLLLEWLA

SEQ ID NO: 896 - protein, 9 aa, Severe acute respiratory syndrome coronavirus 2
LLLLEWLAM

SEQ ID NO: 897 - protein, 9 aa, Severe acute respiratory syndrome coronavirus 2
LLLEWLAMA

SEQ ID NO: 898 - protein, 9 aa, Severe acute respiratory syndrome coronavirus 2
LLEWLAMAV

SEQ ID NO: 899 - protein, 9 aa, Severe acute respiratory syndrome coronavirus 2
LEWLAMAVM

SEQ ID NO: 900 - protein, 9 aa, Severe acute respiratory syndrome coronavirus 2
WLAMAVMLL

SEQ ID NO: 901 - protein, 9 aa, Severe acute respiratory syndrome coronavirus 2
LAMAVMLLL

SEQ ID NO: 902 - protein, 9 aa, Severe acute respiratory syndrome coronavirus 2
AMAVMLLLL

SEQ ID NO: 903 - protein, 9 aa, Severe acute respiratory syndrome coronavirus 2
MLLLLCCCL

SEQ ID NO: 904 - protein, 10 aa, Severe acute respiratory syndrome coronavirus 2
MLQSCYNFLK

SEQ ID NO: 905 - protein, 10 aa, Severe acute respiratory syndrome coronavirus 2
NFLKEQHCQK

SEQ ID NO: 906 - protein, 10 aa, Severe acute respiratory syndrome coronavirus 2
FLKEQHCQKA

SEQ ID NO: 907 - protein, 10 aa, Severe acute respiratory syndrome coronavirus 2
STQKGAEAAV

SEQ ID NO: 908 - protein, 10 aa, Severe acute respiratory syndrome coronavirus 2
GAEAAVKPLL

SEQ ID NO: 909 - protein, 10 aa, Severe acute respiratory syndrome coronavirus 2
AEAAVKPLLV

SEQ ID NO: 910 - protein, 10 aa, Severe acute respiratory syndrome coronavirus 2
KPLLVPHHVV

SEQ ID NO: 911 - protein, 10 aa, Severe acute respiratory syndrome coronavirus 2
LLVPHHVVAT

SEQ ID NO: 912 - protein, 10 aa, Severe acute respiratory syndrome coronavirus 2
LVPHHVVATV

SEQ ID NO: 913 - protein, 10 aa, Severe acute respiratory syndrome coronavirus 2
HHVVATVQEI

SEQ ID NO: 914 - protein, 10 aa, Severe acute respiratory syndrome coronavirus 2
VQEIQLQAAV

SEQ ID NO: 915 - protein, 10 aa, Severe acute respiratory syndrome coronavirus 2
IQLQAAVGEL

SEQ ID NO: 916 - protein, 10 aa, Severe acute respiratory syndrome coronavirus 2
QLQAAVGELL

SEQ ID NO: 917 - protein, 10 aa, Severe acute respiratory syndrome coronavirus 2
LQAAVGELLL

SEQ ID NO: 918 - protein, 10 aa, Severe acute respiratory syndrome coronavirus 2
AVGELLLLEW

SEQ ID NO: 919 - protein, 10 aa, Severe acute respiratory syndrome coronavirus 2
GELLLLEWLA

SEQ ID NO: 920 - protein, 10 aa, Severe acute respiratory syndrome coronavirus 2
LLLLEWLAMA

SEQ ID NO: 921 - protein, 10 aa, Severe acute respiratory syndrome coronavirus 2
LLLEWLAMAV

SEQ ID NO: 922 - protein, 10 aa, Severe acute respiratory syndrome coronavirus 2
LLEWLAMAVM

SEQ ID NO: 923 - protein, 10 aa, Severe acute respiratory syndrome coronavirus 2
LEWLAMAVML

SEQ ID NO: 924 - protein, 10 aa, Severe acute respiratory syndrome coronavirus 2
EWLAMAVMLL

SEQ ID NO: 925 - protein, 10 aa, Severe acute respiratory syndrome coronavirus 2
WLAMAVMLLL

SEQ ID NO: 926 - protein, 10 aa, Severe acute respiratory syndrome coronavirus 2
LAMAVMLLLL

SEQ ID NO: 927 - protein, 10 aa, Severe acute respiratory syndrome coronavirus 2
AMAVMLLLLC

SEQ ID NO: 928 - protein, 11 aa, Severe acute respiratory syndrome coronavirus 2
STQKGAEAAVK

SEQ ID NO: 929 - protein, 11 aa, Severe acute respiratory syndrome coronavirus 2
AEAAVKPLLVP

SEQ ID NO: 930 - protein, 11 aa, Severe acute respiratory syndrome coronavirus 2
KPLLVPHHVVA

SEQ ID NO: 931 - protein, 11 aa, Severe acute respiratory syndrome coronavirus 2
LLVPHHVVATV

SEQ ID NO: 932 - protein, 11 aa, Severe acute respiratory syndrome coronavirus 2
LQAAVGELLLL

SEQ ID NO: 933 - protein, 11 aa, Severe acute respiratory syndrome coronavirus 2
AAVGELLLLEW

SEQ ID NO: 934 - protein, 11 aa, Severe acute respiratory syndrome coronavirus 2
GELLLLEWLAM

SEQ ID NO: 935 - protein, 11 aa, Severe acute respiratory syndrome coronavirus 2
ELLLLEWLAMA

SEQ ID NO: 936 - protein, 11 aa, Severe acute respiratory syndrome coronavirus 2
LLLLEWLAMAV

SEQ ID NO: 937 - protein, 11 aa, Severe acute respiratory syndrome coronavirus 2
LLLEWLAMAVM

SEQ ID NO: 938 - protein, 11 aa, Severe acute respiratory syndrome coronavirus 2
LLEWLAMAVML

SEQ ID NO: 939 - protein, 11 aa, Severe acute respiratory syndrome coronavirus 2
LEWLAMAVMLL

SEQ ID NO: 940 - protein, 11 aa, Severe acute respiratory syndrome coronavirus 2
WLAMAVMLLLL

SEQ ID NO: 941 - protein, 8 aa, Severe acute respiratory syndrome coronavirus 2
MESLVPGF

SEQ ID NO: 942 - protein, 8 aa, Severe acute respiratory syndrome coronavirus 2
NEKTHVQL

SEQ ID NO: 943 - protein, 8 aa, Severe acute respiratory syndrome coronavirus 2
KTHVQLSL

SEQ ID NO: 944 - protein, 8 aa, Severe acute respiratory syndrome coronavirus 2
VQLSLPVL

SEQ ID NO: 945 - protein, 8 aa, Severe acute respiratory syndrome coronavirus 2
QVRDVLVR

SEQ ID NO: 946 - protein, 8 aa, Severe acute respiratory syndrome coronavirus 2
VEVEKGVL

SEQ ID NO: 947 - protein, 8 aa, Severe acute respiratory syndrome coronavirus 2
LPQLEQPY

SEQ ID NO: 948 - protein, 8 aa, Severe acute respiratory syndrome coronavirus 2
LEQPYVFI

SEQ ID NO: 949 - protein, 8 aa, Severe acute respiratory syndrome coronavirus 2
RTAPHGHV

SEQ ID NO: 950 - protein, 8 aa, Severe acute respiratory syndrome coronavirus 2
TAPHGHVM

SEQ ID NO: 951 - protein, 8 aa, Severe acute respiratory syndrome coronavirus 2
APHGHVMV

SEQ ID NO: 952 - protein, 8 aa, Severe acute respiratory syndrome coronavirus 2
MVELVAEL

SEQ ID NO: 953 - protein, 8 aa, Severe acute respiratory syndrome coronavirus 2
GETLGVLV

SEQ ID NO: 954 - protein, 8 aa, Severe acute respiratory syndrome coronavirus 2
VAYRKVLL

SEQ ID NO: 955 - protein, 8 aa, Severe acute respiratory syndrome coronavirus 2
AYRKVLLR

SEQ ID NO: 956 - protein, 8 aa, Severe acute respiratory syndrome coronavirus 2
YRKVLLRK

SEQ ID NO: 957 - protein, 8 aa, Severe acute respiratory syndrome coronavirus 2
DELGTDPY

SEQ ID NO: 958 - protein, 8 aa, Severe acute respiratory syndrome coronavirus 2
RELNGGAY

SEQ ID NO: 959 - protein, 8 aa, Severe acute respiratory syndrome coronavirus 2
REHEHEIA

SEQ ID NO: 960 - protein, 8 aa, Severe acute respiratory syndrome coronavirus 2
HEHEIAWY

SEQ ID NO: 961 - protein, 8 aa, Severe acute respiratory syndrome coronavirus 2
EIAWYTER

SEQ ID NO: 962 - protein, 8 aa, Severe acute respiratory syndrome coronavirus 2
SYELQTPF

SEQ ID NO: 963 - protein, 8 aa, Severe acute respiratory syndrome coronavirus 2
GECPNFVF

SEQ ID NO: 964 - protein, 8 aa, Severe acute respiratory syndrome coronavirus 2
CPNFVFPL

SEQ ID NO: 965 - protein, 8 aa, Severe acute respiratory syndrome coronavirus 2
FVFPLNSI

SEQ ID NO: 966 - protein, 8 aa, Severe acute respiratory syndrome coronavirus 2
KLDGFMGR

SEQ ID NO: 967 - protein, 8 aa, Severe acute respiratory syndrome coronavirus 2
FMGRIRSV

SEQ ID NO: 968 - protein, 8 aa, Severe acute respiratory syndrome coronavirus 2
RIRSVYPV

SEQ ID NO: 969 - protein, 8 aa, Severe acute respiratory syndrome coronavirus 2
NQMCLSTL

SEQ ID NO: 970 - protein, 8 aa, Severe acute respiratory syndrome coronavirus 2
FVKATCEF

SEQ ID NO: 971 - protein, 8 aa, Severe acute respiratory syndrome coronavirus 2
YLPQNAVV

SEQ ID NO: 972 - protein, 8 aa, Severe acute respiratory syndrome coronavirus 2
IAFGGCVF

SEQ ID NO: 973 - protein, 8 aa, Severe acute respiratory syndrome coronavirus 2
KCAYWVPR

SEQ ID NO: 974 - protein, 8 aa, Severe acute respiratory syndrome coronavirus 2
VPRASANI

SEQ ID NO: 975 - protein, 8 aa, Severe acute respiratory syndrome coronavirus 2
KEKVNINI

SEQ ID NO: 976 - protein, 8 aa, Severe acute respiratory syndrome coronavirus 2
KLNEEIAI

SEQ ID NO: 977 - protein, 8 aa, Severe acute respiratory syndrome coronavirus 2
NEEIAIIL

SEQ ID NO: 978 - protein, 8 aa, Severe acute respiratory syndrome coronavirus 2
EEIAIILA

SEQ ID NO: 979 - protein, 8 aa, Severe acute respiratory syndrome coronavirus 2
IAIILASF

SEQ ID NO: 980 - protein, 8 aa, Severe acute respiratory syndrome coronavirus 2
FSASTSAF

SEQ ID NO: 981 - protein, 8 aa, Severe acute respiratory syndrome coronavirus 2
KSILSPLY

SEQ ID NO: 982 - protein, 8 aa, Severe acute respiratory syndrome coronavirus 2
ILSPLYAF

SEQ ID NO: 983 - protein, 8 aa, Severe acute respiratory syndrome coronavirus 2
VVRSIFSR

SEQ ID NO: 984 - protein, 8 aa, Severe acute respiratory syndrome coronavirus 2
RSIFSRTL

SEQ ID NO: 985 - protein, 8 aa, Severe acute respiratory syndrome coronavirus 2
ETAQNSVR

SEQ ID NO: 986 - protein, 8 aa, Severe acute respiratory syndrome coronavirus 2
AQNSVRVL

SEQ ID NO: 987 - protein, 8 aa, Severe acute respiratory syndrome coronavirus 2
SQYSLRLI

SEQ ID NO: 988 - protein, 8 aa, Severe acute respiratory syndrome coronavirus 2
RLIDAMMF

SEQ ID NO: 989 - protein, 8 aa, Severe acute respiratory syndrome coronavirus 2
SQWLTNIF

SEQ ID NO: 990 - protein, 8 aa, Severe acute respiratory syndrome coronavirus 2
YEKLKPVL

SEQ ID NO: 991 - protein, 8 aa, Severe acute respiratory syndrome coronavirus 2
KFKEGVEF

SEQ ID NO: 992 - protein, 8 aa, Severe acute respiratory syndrome coronavirus 2
FLRDGWEI

SEQ ID NO: 993 - protein, 8 aa, Severe acute respiratory syndrome coronavirus 2
ESVQTFFK

SEQ ID NO: 994 - protein, 8 aa, Severe acute respiratory syndrome coronavirus 2
FFKLVNKF

SEQ ID NO: 995 - protein, 8 aa, Severe acute respiratory syndrome coronavirus 2
LVNKFLAL

SEQ ID NO: 996 - protein, 8 aa, Severe acute respiratory syndrome coronavirus 2
ETFVTHSK

SEQ ID NO: 997 - protein, 8 aa, Severe acute respiratory syndrome coronavirus 2
REETGLLM

SEQ ID NO: 998 - protein, 8 aa, Severe acute respiratory syndrome coronavirus 2
ETGLLMPL

SEQ ID NO: 999 - protein, 8 aa, Severe acute respiratory syndrome coronavirus 2
APKEIIFL

SEQ ID NO: 1000 - protein, 8 aa, Severe acute respiratory syndrome coronavirus 2
IFLEGETL

SEQ ID NO: 1001 - protein, 8 aa, Severe acute respiratory syndrome coronavirus 2
LEQPTSEA

SEQ ID NO: 1002 - protein, 8 aa, Severe acute respiratory syndrome coronavirus 2
SEAVEAPL

SEQ ID NO: 1003 - protein, 8 aa, Severe acute respiratory syndrome coronavirus 2
APLVGTPV

SEQ ID NO: 1004 - protein, 8 aa, Severe acute respiratory syndrome coronavirus 2
TPVCINGL

SEQ ID NO: 1005 - protein, 8 aa, Severe acute respiratory syndrome coronavirus 2
ALAPNMMV

SEQ ID NO: 1006 - protein, 8 aa, Severe acute respiratory syndrome coronavirus 2
MMVTNNTF

SEQ ID NO: 1007 - protein, 8 aa, Severe acute respiratory syndrome coronavirus 2
VTNNTFTL

SEQ ID NO: 1008 - protein, 8 aa, Severe acute respiratory syndrome coronavirus 2
YKSVNITF

SEQ ID NO: 1009 - protein, 8 aa, Severe acute respiratory syndrome coronavirus 2
CSAYTVEL

SEQ ID NO: 1010 - protein, 8 aa, Severe acute respiratory syndrome coronavirus 2
NEFACVVA

SEQ ID NO: 1011 - protein, 8 aa, Severe acute respiratory syndrome coronavirus 2
DEWSMATY

SEQ ID NO: 1012 - protein, 8 aa, Severe acute respiratory syndrome coronavirus 2
EWSMATYY

SEQ ID NO: 1013 - protein, 8 aa, Severe acute respiratory syndrome coronavirus 2
WSMATYYL

SEQ ID NO: 1014 - protein, 8 aa, Severe acute respiratory syndrome coronavirus 2
SMATYYLF

SEQ ID NO: 1015 - protein, 8 aa, Severe acute respiratory syndrome coronavirus 2
LFDESGEF

SEQ ID NO: 1016 - protein, 8 aa, Severe acute respiratory syndrome coronavirus 2
FKLASHMY

SEQ ID NO: 1017 - protein, 8 aa, Severe acute respiratory syndrome coronavirus 2
ASHMYCSF

SEQ ID NO: 1018 - protein, 8 aa, Severe acute respiratory syndrome coronavirus 2
SHMYCSFY

SEQ ID NO: 1019 - protein, 8 aa, Severe acute respiratory syndrome coronavirus 2
YQGKPLEF

SEQ ID NO: 1020 - protein, 8 aa, Severe acute respiratory syndrome coronavirus 2
LEFGATSA

SEQ ID NO: 1021 - protein, 8 aa, Severe acute respiratory syndrome coronavirus 2
FGATSAAL

SEQ ID NO: 1022 - protein, 8 aa, Severe acute respiratory syndrome coronavirus 2
LEMELTPV

SEQ ID NO: 1023 - protein, 8 aa, Severe acute respiratory syndrome coronavirus 2
EVNSFSGY

SEQ ID NO: 1024 - protein, 8 aa, Severe acute respiratory syndrome coronavirus 2
NSFSGYLK

SEQ ID NO: 1025 - protein, 8 aa, Severe acute respiratory syndrome coronavirus 2
SFSGYLKL

SEQ ID NO: 1026 - protein, 8 aa, Severe acute respiratory syndrome coronavirus 2
YLKLTDNV

SEQ ID NO: 1027 - protein, 8 aa, Severe acute respiratory syndrome coronavirus 2
LKLTDNVY

SEQ ID NO: 1028 - protein, 8 aa, Severe acute respiratory syndrome coronavirus 2
KLTDNVYI

SEQ ID NO: 1029 - protein, 8 aa, Severe acute respiratory syndrome coronavirus 2
KVKPTVVV

SEQ ID NO: 1030 - protein, 8 aa, Severe acute respiratory syndrome coronavirus 2
NAANVYLK

SEQ ID NO: 1031 - protein, 8 aa, Severe acute respiratory syndrome coronavirus 2
YLKHGGGV

SEQ ID NO: 1032 - protein, 8 aa, Severe acute respiratory syndrome coronavirus 2
MQVESDDY

SEQ ID NO: 1033 - protein, 8 aa, Severe acute respiratory syndrome coronavirus 2
HNLAKHCL

SEQ ID NO: 1034 - protein, 8 aa, Severe acute respiratory syndrome coronavirus 2
IQLLKSAY

SEQ ID NO: 1035 - protein, 8 aa, Severe acute respiratory syndrome coronavirus 2
NFNQHEVL

SEQ ID NO: 1036 - protein, 8 aa, Severe acute respiratory syndrome coronavirus 2
HEVLLAPL

SEQ ID NO: 1037 - protein, 8 aa, Severe acute respiratory syndrome coronavirus 2
LLAPLLSA

SEQ ID NO: 1038 - protein, 8 aa, Severe acute respiratory syndrome coronavirus 2
GADPIHSL

SEQ ID NO: 1039 - protein, 8 aa, Severe acute respiratory syndrome coronavirus 2
RTNVYLAV

SEQ ID NO: 1040 - protein, 8 aa, Severe acute respiratory syndrome coronavirus 2
VEQKIAEI

SEQ ID NO: 1041 - protein, 8 aa, Severe acute respiratory syndrome coronavirus 2
VEEVTTTL

SEQ ID NO: 1042 - protein, 8 aa, Severe acute respiratory syndrome coronavirus 2
FLTENLLL

SEQ ID NO: 1043 - protein, 8 aa, Severe acute respiratory syndrome coronavirus 2
LTENLLLY

SEQ ID NO: 1044 - protein, 8 aa, Severe acute respiratory syndrome coronavirus 2
TENLLLYI

SEQ ID NO: 1045 - protein, 8 aa, Severe acute respiratory syndrome coronavirus 2
YIDINGNL

SEQ ID NO: 1046 - protein, 8 aa, Severe acute respiratory syndrome coronavirus 2
VSDIDITF

SEQ ID NO: 1047 - protein, 8 aa, Severe acute respiratory syndrome coronavirus 2
FLKKDAPY

SEQ ID NO: 1048 - protein, 8 aa, Severe acute respiratory syndrome coronavirus 2
QEGVLTAV

SEQ ID NO: 1049 - protein, 8 aa, Severe acute respiratory syndrome coronavirus 2
TEMLAKAL

SEQ ID NO: 1050 - protein, 8 aa, Severe acute respiratory syndrome coronavirus 2
EMLAKALR

SEQ ID NO: 1051 - protein, 8 aa, Severe acute respiratory syndrome coronavirus 2
RKVPTDNY

SEQ ID NO: 1052 - protein, 8 aa, Severe acute respiratory syndrome coronavirus 2
TDNYITTY

SEQ ID NO: 1053 - protein, 8 aa, Severe acute respiratory syndrome coronavirus 2
VEEAKTVL

SEQ ID NO: 1054 - protein, 8 aa, Severe acute respiratory syndrome coronavirus 2
FYILPSII

SEQ ID NO: 1055 - protein, 8 aa, Severe acute respiratory syndrome coronavirus 2
GTVSWNLR

SEQ ID NO: 1056 - protein, 8 aa, Severe acute respiratory syndrome coronavirus 2
VSWNLREM

SEQ ID NO: 1057 - protein, 8 aa, Severe acute respiratory syndrome coronavirus 2
REMLAHAE

SEQ ID NO: 1058 - protein, 8 aa, Severe acute respiratory syndrome coronavirus 2
YGARFYFY

SEQ ID NO: 1059 - protein, 8 aa, Severe acute respiratory syndrome coronavirus 2
RFYFYTSK

SEQ ID NO: 1060 - protein, 8 aa, Severe acute respiratory syndrome coronavirus 2
FYTSKTTV

SEQ ID NO: 1061 - protein, 8 aa, Severe acute respiratory syndrome coronavirus 2
VASLINTL

SEQ ID NO: 1062 - protein, 8 aa, Severe acute respiratory syndrome coronavirus 2
ETLVTMPL

SEQ ID NO: 1063 - protein, 8 aa, Severe acute respiratory syndrome coronavirus 2
VTMPLGYV

SEQ ID NO: 1064 - protein, 8 aa, Severe acute respiratory syndrome coronavirus 2
ARYMRSLK

SEQ ID NO: 1065 - protein, 8 aa, Severe acute respiratory syndrome coronavirus 2
RYMRSLKV

SEQ ID NO: 1066 - protein, 8 aa, Severe acute respiratory syndrome coronavirus 2
MRSLKVPA

SEQ ID NO: 1067 - protein, 8 aa, Severe acute respiratory syndrome coronavirus 2
SLKVPATV

SEQ ID NO: 1068 - protein, 8 aa, Severe acute respiratory syndrome coronavirus 2
SPDAVTAY

SEQ ID NO: 1069 - protein, 8 aa, Severe acute respiratory syndrome coronavirus 2
HFIETISL

SEQ ID NO: 1070 - protein, 8 aa, Severe acute respiratory syndrome coronavirus 2
YTSNPTTF

SEQ ID NO: 1071 - protein, 8 aa, Severe acute respiratory syndrome coronavirus 2
TFDNLKTL

SEQ ID NO: 1072 - protein, 8 aa, Severe acute respiratory syndrome coronavirus 2
NLKTLLSL

SEQ ID NO: 1073 - protein, 8 aa, Severe acute respiratory syndrome coronavirus 2
REVRTIKV

SEQ ID NO: 1074 - protein, 8 aa, Severe acute respiratory syndrome coronavirus 2
TQVVDMSM

SEQ ID NO: 1075 - protein, 8 aa, Severe acute respiratory syndrome coronavirus 2
VVDMSMTY

SEQ ID NO: 1076 - protein, 8 aa, Severe acute respiratory syndrome coronavirus 2
SMTYGQQF

SEQ ID NO: 1077 - protein, 8 aa, Severe acute respiratory syndrome coronavirus 2
GQQFGPTY

SEQ ID NO: 1078 - protein, 8 aa, Severe acute respiratory syndrome coronavirus 2
QQFGPTYL

SEQ ID NO: 1079 - protein, 8 aa, Severe acute respiratory syndrome coronavirus 2
HEGKTFYV

SEQ ID NO: 1080 - protein, 8 aa, Severe acute respiratory syndrome coronavirus 2
RVEAFEYY

SEQ ID NO: 1081 - protein, 8 aa, Severe acute respiratory syndrome coronavirus 2
FLGRYMSA

SEQ ID NO: 1082 - protein, 8 aa, Severe acute respiratory syndrome coronavirus 2
KYPQVNGL

SEQ ID NO: 1083 - protein, 8 aa, Severe acute respiratory syndrome coronavirus 2
WADNNCYL

SEQ ID NO: 1084 - protein, 8 aa, Severe acute respiratory syndrome coronavirus 2
CYLATALL

SEQ ID NO: 1085 - protein, 8 aa, Severe acute respiratory syndrome coronavirus 2
LATALLTL

SEQ ID NO: 1086 - protein, 8 aa, Severe acute respiratory syndrome coronavirus 2
LQQIELKF

SEQ ID NO: 1087 - protein, 8 aa, Severe acute respiratory syndrome coronavirus 2
LKFNPPAL

SEQ ID NO: 1088 - protein, 8 aa, Severe acute respiratory syndrome coronavirus 2
ALQDAYYR

SEQ ID NO: 1089 - protein, 8 aa, Severe acute respiratory syndrome coronavirus 2
GEAANFCA

SEQ ID NO: 1090 - protein, 8 aa, Severe acute respiratory syndrome coronavirus 2
RETMSYLF

SEQ ID NO: 1091 - protein, 8 aa, Severe acute respiratory syndrome coronavirus 2
YLFQHANL

SEQ ID NO: 1092 - protein, 8 aa, Severe acute respiratory syndrome coronavirus 2
RVLNVVCK

SEQ ID NO: 1093 - protein, 8 aa, Severe acute respiratory syndrome coronavirus 2
MYMGTLSY

SEQ ID NO: 1094 - protein, 8 aa, Severe acute respiratory syndrome coronavirus 2
QESPFVMM

SEQ ID NO: 1095 - protein, 8 aa, Severe acute respiratory syndrome coronavirus 2
SPFVMMSA

SEQ ID NO: 1096 - protein, 8 aa, Severe acute respiratory syndrome coronavirus 2
MSAPPAQY

SEQ ID NO: 1097 - protein, 8 aa, Severe acute respiratory syndrome coronavirus 2
YELKHGTF

SEQ ID NO: 1098 - protein, 8 aa, Severe acute respiratory syndrome coronavirus 2
TFTCASEY

SEQ ID NO: 1099 - protein, 8 aa, Severe acute respiratory syndrome coronavirus 2
HYKHITSK

SEQ ID NO: 1100 - protein, 8 aa, Severe acute respiratory syndrome coronavirus 2
VFYKENSY

SEQ ID NO: 1101 - protein, 8 aa, Severe acute respiratory syndrome coronavirus 2
TTIKPVTY

SEQ ID NO: 1102 - protein, 8 aa, Severe acute respiratory syndrome coronavirus 2
TIKPVTYK

SEQ ID NO: 1103 - protein, 8 aa, Severe acute respiratory syndrome coronavirus 2
YYKKDNSY

SEQ ID NO: 1104 - protein, 8 aa, Severe acute respiratory syndrome coronavirus 2
YKKDNSYF

SEQ ID NO: 1105 - protein, 8 aa, Severe acute respiratory syndrome coronavirus 2
SYFTEQPI

SEQ ID NO: 1106 - protein, 8 aa, Severe acute respiratory syndrome coronavirus 2
QPYPNASF

SEQ ID NO: 1107 - protein, 8 aa, Severe acute respiratory syndrome coronavirus 2
ASFDNFKF

SEQ ID NO: 1108 - protein, 8 aa, Severe acute respiratory syndrome coronavirus 2
FADDLNQL

SEQ ID NO: 1109 - protein, 8 aa, Severe acute respiratory syndrome coronavirus 2
RELKVTFF

SEQ ID NO: 1110 - protein, 8 aa, Severe acute respiratory syndrome coronavirus 2
DVVAIDYK

SEQ ID NO: 1111 - protein, 8 aa, Severe acute respiratory syndrome coronavirus 2
VAIDYKHY

SEQ ID NO: 1112 - protein, 8 aa, Severe acute respiratory syndrome coronavirus 2
YKHYTPSF

SEQ ID NO: 1113 - protein, 8 aa, Severe acute respiratory syndrome coronavirus 2
ATNKATYK

SEQ ID NO: 1114 - protein, 8 aa, Severe acute respiratory syndrome coronavirus 2
ATYKPNTW

SEQ ID NO: 1115 - protein, 8 aa, Severe acute respiratory syndrome coronavirus 2
TWCIRCLW

SEQ ID NO: 1116 - protein, 8 aa, Severe acute respiratory syndrome coronavirus 2
CLWSTKPV

SEQ ID NO: 1117 - protein, 8 aa, Severe acute respiratory syndrome coronavirus 2
SLKITEEV

SEQ ID NO: 1118 - protein, 8 aa, Severe acute respiratory syndrome coronavirus 2
HTDLMAAY

SEQ ID NO: 1119 - protein, 8 aa, Severe acute respiratory syndrome coronavirus 2
AYVDNSSL

SEQ ID NO: 1120 - protein, 8 aa, Severe acute respiratory syndrome coronavirus 2
LSRVLGLK

SEQ ID NO: 1121 - protein, 8 aa, Severe acute respiratory syndrome coronavirus 2
GLAAVNSV

SEQ ID NO: 1122 - protein, 8 aa, Severe acute respiratory syndrome coronavirus 2
AAVNSVPW

SEQ ID NO: 1123 - protein, 8 aa, Severe acute respiratory syndrome coronavirus 2
DTIANYAK

SEQ ID NO: 1124 - protein, 8 aa, Severe acute respiratory syndrome coronavirus 2
IANYAKPF

SEQ ID NO: 1125 - protein, 8 aa, Severe acute respiratory syndrome coronavirus 2
FLNKVVST

SEQ ID NO: 1126 - protein, 8 aa, Severe acute respiratory syndrome coronavirus 2
TTTNIVTR

SEQ ID NO: 1127 - protein, 8 aa, Severe acute respiratory syndrome coronavirus 2
YMPYFFTL

SEQ ID NO: 1128 - protein, 8 aa, Severe acute respiratory syndrome coronavirus 2
MPYFFTLL

SEQ ID NO: 1129 - protein, 8 aa, Severe acute respiratory syndrome coronavirus 2
LLLQLCTF

SEQ ID NO: 1130 - protein, 8 aa, Severe acute respiratory syndrome coronavirus 2
LQLCTFTR

SEQ ID NO: 1131 - protein, 8 aa, Severe acute respiratory syndrome coronavirus 2
NSRIKASM

SEQ ID NO: 1132 - protein, 8 aa, Severe acute respiratory syndrome coronavirus 2
RIKASMPT

SEQ ID NO: 1133 - protein, 8 aa, Severe acute respiratory syndrome coronavirus 2
LEASFNYL

SEQ ID NO: 1134 - protein, 8 aa, Severe acute respiratory syndrome coronavirus 2
EASFNYLK

SEQ ID NO: 1135 - protein, 8 aa, Severe acute respiratory syndrome coronavirus 2
NYLKSPNF

SEQ ID NO: 1136 - protein, 8 aa, Severe acute respiratory syndrome coronavirus 2
SPNFSKLI

SEQ ID NO: 1137 - protein, 8 aa, Severe acute respiratory syndrome coronavirus 2
FLLLSVCL

SEQ ID NO: 1138 - protein, 8 aa, Severe acute respiratory syndrome coronavirus 2
TAALGVLM

SEQ ID NO: 1139 - protein, 8 aa, Severe acute respiratory syndrome coronavirus 2
MPSYCTGY

SEQ ID NO: 1140 - protein, 8 aa, Severe acute respiratory syndrome coronavirus 2
SLDTYPSL

SEQ ID NO: 1141 - protein, 8 aa, Severe acute respiratory syndrome coronavirus 2
TYPSLETI

SEQ ID NO: 1142 - protein, 8 aa, Severe acute respiratory syndrome coronavirus 2
LETIQITI

SEQ ID NO: 1143 - protein, 8 aa, Severe acute respiratory syndrome coronavirus 2
IQITISSF

SEQ ID NO: 1144 - protein, 8 aa, Severe acute respiratory syndrome coronavirus 2
ITISSFKW

SEQ ID NO: 1145 - protein, 8 aa, Severe acute respiratory syndrome coronavirus 2
FKWDLTAF

SEQ ID NO: 1146 - protein, 8 aa, Severe acute respiratory syndrome coronavirus 2
WDLTAFGL

SEQ ID NO: 1147 - protein, 8 aa, Severe acute respiratory syndrome coronavirus 2
GLVAEWFL

SEQ ID NO: 1148 - protein, 8 aa, Severe acute respiratory syndrome coronavirus 2
VAEWFLAY

SEQ ID NO: 1149 - protein, 8 aa, Severe acute respiratory syndrome coronavirus 2
AEWFLAYI

SEQ ID NO: 1150 - protein, 8 aa, Severe acute respiratory syndrome coronavirus 2
EWFLAYIL

SEQ ID NO: 1151 - protein, 8 aa, Severe acute respiratory syndrome coronavirus 2
FLAYILFT

SEQ ID NO: 1152 - protein, 8 aa, Severe acute respiratory syndrome coronavirus 2
LAYILFTR

SEQ ID NO: 1153 - protein, 8 aa, Severe acute respiratory syndrome coronavirus 2
AYILFTRF

SEQ ID NO: 1154 - protein, 8 aa, Severe acute respiratory syndrome coronavirus 2
ILFTRFFY

SEQ ID NO: 1155 - protein, 8 aa, Severe acute respiratory syndrome coronavirus 2
LFTRFFYV

SEQ ID NO: 1156 - protein, 8 aa, Severe acute respiratory syndrome coronavirus 2
FTRFFYVL

SEQ ID NO: 1157 - protein, 8 aa, Severe acute respiratory syndrome coronavirus 2
RFFYVLGL

SEQ ID NO: 1158 - protein, 8 aa, Severe acute respiratory syndrome coronavirus 2
YVLGLAAI

SEQ ID NO: 1159 - protein, 8 aa, Severe acute respiratory syndrome coronavirus 2
GLAAIMQL

SEQ ID NO: 1160 - protein, 8 aa, Severe acute respiratory syndrome coronavirus 2
LAAIMQLF

SEQ ID NO: 1161 - protein, 8 aa, Severe acute respiratory syndrome coronavirus 2
IMQLFFSY

SEQ ID NO: 1162 - protein, 8 aa, Severe acute respiratory syndrome coronavirus 2
MQLFFSYF

SEQ ID NO: 1163 - protein, 8 aa, Severe acute respiratory syndrome coronavirus 2
QLFFSYFA

SEQ ID NO: 1164 - protein, 8 aa, Severe acute respiratory syndrome coronavirus 2
LFFSYFAV

SEQ ID NO: 1165 - protein, 8 aa, Severe acute respiratory syndrome coronavirus 2
FSYFAVHF

SEQ ID NO: 1166 - protein, 8 aa, Severe acute respiratory syndrome coronavirus 2
SYFAVHFI

SEQ ID NO: 1167 - protein, 8 aa, Severe acute respiratory syndrome coronavirus 2
HFISNSWL

SEQ ID NO: 1168 - protein, 8 aa, Severe acute respiratory syndrome coronavirus 2
ISNSWLMW

SEQ ID NO: 1169 - protein, 8 aa, Severe acute respiratory syndrome coronavirus 2
LMWLIINL

SEQ ID NO: 1170 - protein, 8 aa, Severe acute respiratory syndrome coronavirus 2
VQMAPISA

SEQ ID NO: 1171 - protein, 8 aa, Severe acute respiratory syndrome coronavirus 2
QMAPISAM

SEQ ID NO: 1172 - protein, 8 aa, Severe acute respiratory syndrome coronavirus 2
MAPISAMV

SEQ ID NO: 1173 - protein, 8 aa, Severe acute respiratory syndrome coronavirus 2
ISAMVRMY

SEQ ID NO: 1174 - protein, 8 aa, Severe acute respiratory syndrome coronavirus 2
SAMVRMYI

SEQ ID NO: 1175 - protein, 8 aa, Severe acute respiratory syndrome coronavirus 2
AMVRMYIF

SEQ ID NO: 1176 - protein, 8 aa, Severe acute respiratory syndrome coronavirus 2
VRMYIFFA

SEQ ID NO: 1177 - protein, 8 aa, Severe acute respiratory syndrome coronavirus 2
MYIFFASF

SEQ ID NO: 1178 - protein, 8 aa, Severe acute respiratory syndrome coronavirus 2
YIFFASFY

SEQ ID NO: 1179 - protein, 8 aa, Severe acute respiratory syndrome coronavirus 2
IFFASFYY

SEQ ID NO: 1180 - protein, 8 aa, Severe acute respiratory syndrome coronavirus 2
FFASFYYV

SEQ ID NO: 1181 - protein, 8 aa, Severe acute respiratory syndrome coronavirus 2
FASFYYVW

SEQ ID NO: 1182 - protein, 8 aa, Severe acute respiratory syndrome coronavirus 2
ASFYYVWK

SEQ ID NO: 1183 - protein, 8 aa, Severe acute respiratory syndrome coronavirus 2
FYYVWKSY

SEQ ID NO: 1184 - protein, 8 aa, Severe acute respiratory syndrome coronavirus 2
YYVWKSYV

SEQ ID NO: 1185 - protein, 8 aa, Severe acute respiratory syndrome coronavirus 2
STCMMCYK

SEQ ID NO: 1186 - protein, 8 aa, Severe acute respiratory syndrome coronavirus 2
MMCYKRNR

SEQ ID NO: 1187 - protein, 8 aa, Severe acute respiratory syndrome coronavirus 2
TTIVNGVR

SEQ ID NO: 1188 - protein, 8 aa, Severe acute respiratory syndrome coronavirus 2
GVRRSFYV

SEQ ID NO: 1189 - protein, 8 aa, Severe acute respiratory syndrome coronavirus 2
RRSFYVYA

SEQ ID NO: 1190 - protein, 8 aa, Severe acute respiratory syndrome coronavirus 2
YANGGKGF

SEQ ID NO: 1191 - protein, 8 aa, Severe acute respiratory syndrome coronavirus 2
KLHNWNCV

SEQ ID NO: 1192 - protein, 8 aa, Severe acute respiratory syndrome coronavirus 2
TFCAGSTF

SEQ ID NO: 1193 - protein, 8 aa, Severe acute respiratory syndrome coronavirus 2
SLQFKRPI

SEQ ID NO: 1194 - protein, 8 aa, Severe acute respiratory syndrome coronavirus 2
YIVDSVTV

SEQ ID NO: 1195 - protein, 8 aa, Severe acute respiratory syndrome coronavirus 2
KNGSIHLY

SEQ ID NO: 1196 - protein, 8 aa, Severe acute respiratory syndrome coronavirus 2
KTYERHSL

SEQ ID NO: 1197 - protein, 8 aa, Severe acute respiratory syndrome coronavirus 2
SLSHFVNL

SEQ ID NO: 1198 - protein, 8 aa, Severe acute respiratory syndrome coronavirus 2
SLPINVIV

SEQ ID NO: 1199 - protein, 8 aa, Severe acute respiratory syndrome coronavirus 2
LPINVIVF

SEQ ID NO: 1200 - protein, 8 aa, Severe acute respiratory syndrome coronavirus 2
SAKSASVY

SEQ ID NO: 1201 - protein, 8 aa, Severe acute respiratory syndrome coronavirus 2
AKSASVYY

SEQ ID NO: 1202 - protein, 8 aa, Severe acute respiratory syndrome coronavirus 2
SQLMCQPI

SEQ ID NO: 1203 - protein, 8 aa, Severe acute respiratory syndrome coronavirus 2
LLLDQALV

SEQ ID NO: 1204 - protein, 8 aa, Severe acute respiratory syndrome coronavirus 2
SSTFNVPM

SEQ ID NO: 1205 - protein, 8 aa, Severe acute respiratory syndrome coronavirus 2
PMEKLKTL

SEQ ID NO: 1206 - protein, 8 aa, Severe acute respiratory syndrome coronavirus 2
MEKLKTLV

SEQ ID NO: 1207 - protein, 8 aa, Severe acute respiratory syndrome coronavirus 2
STFISAAR

SEQ ID NO: 1208 - protein, 8 aa, Severe acute respiratory syndrome coronavirus 2
ISAARQGF

SEQ ID NO: 1209 - protein, 8 aa, Severe acute respiratory syndrome coronavirus 2
YMLTYNKV

SEQ ID NO: 1210 - protein, 8 aa, Severe acute respiratory syndrome coronavirus 2
TYNKVENM

SEQ ID NO: 1211 - protein, 8 aa, Severe acute respiratory syndrome coronavirus 2
KVENMTPR

SEQ ID NO: 1212 - protein, 8 aa, Severe acute respiratory syndrome coronavirus 2
SHSIALIW

SEQ ID NO: 1213 - protein, 8 aa, Severe acute respiratory syndrome coronavirus 2
SIALIWNV

SEQ ID NO: 1214 - protein, 8 aa, Severe acute respiratory syndrome coronavirus 2
FMSLSEQL

SEQ ID NO: 1215 - protein, 8 aa, Severe acute respiratory syndrome coronavirus 2
SEQLRKQI

SEQ ID NO: 1216 - protein, 8 aa, Severe acute respiratory syndrome coronavirus 2
AKKNNLPF

SEQ ID NO: 1217 - protein, 8 aa, Severe acute respiratory syndrome coronavirus 2
KKNNLPFK

SEQ ID NO: 1218 - protein, 8 aa, Severe acute respiratory syndrome coronavirus 2
LPFKLTCA

SEQ ID NO: 1219 - protein, 8 aa, Severe acute respiratory syndrome coronavirus 2
KLTCATTR

SEQ ID NO: 1220 - protein, 8 aa, Severe acute respiratory syndrome coronavirus 2
LIKVTLVF

SEQ ID NO: 1221 - protein, 8 aa, Severe acute respiratory syndrome coronavirus 2
FLFVAAIF

SEQ ID NO: 1222 - protein, 8 aa, Severe acute respiratory syndrome coronavirus 2
LFVAAIFY

SEQ ID NO: 1223 - protein, 8 aa, Severe acute respiratory syndrome coronavirus 2
FVAAIFYL

SEQ ID NO: 1224 - protein, 8 aa, Severe acute respiratory syndrome coronavirus 2
IFYLITPV

SEQ ID NO: 1225 - protein, 8 aa, Severe acute respiratory syndrome coronavirus 2
YLITPVHV

SEQ ID NO: 1226 - protein, 8 aa, Severe acute respiratory syndrome coronavirus 2
HTDFSSEI

SEQ ID NO: 1227 - protein, 8 aa, Severe acute respiratory syndrome coronavirus 2
FSSEIIGY

SEQ ID NO: 1228 - protein, 8 aa, Severe acute respiratory syndrome coronavirus 2
SEIIGYKA

SEQ ID NO: 1229 - protein, 8 aa, Severe acute respiratory syndrome coronavirus 2
FANKHADF

SEQ ID NO: 1230 - protein, 8 aa, Severe acute respiratory syndrome coronavirus 2
FSQRGGSY

SEQ ID NO: 1231 - protein, 8 aa, Severe acute respiratory syndrome coronavirus 2
CPLIAAVI

SEQ ID NO: 1232 - protein, 8 aa, Severe acute respiratory syndrome coronavirus 2
REVGFVVP

SEQ ID NO: 1233 - protein, 8 aa, Severe acute respiratory syndrome coronavirus 2
DFLHFLPR

SEQ ID NO: 1234 - protein, 8 aa, Severe acute respiratory syndrome coronavirus 2
FLHFLPRV

SEQ ID NO: 1235 - protein, 8 aa, Severe acute respiratory syndrome coronavirus 2
LHFLPRVF

SEQ ID NO: 1236 - protein, 8 aa, Severe acute respiratory syndrome coronavirus 2
FLPRVFSA

SEQ ID NO: 1237 - protein, 8 aa, Severe acute respiratory syndrome coronavirus 2
LPRVFSAV

SEQ ID NO: 1238 - protein, 8 aa, Severe acute respiratory syndrome coronavirus 2
KLIEYTDI

SEQ ID NO: 1239 - protein, 8 aa, Severe acute respiratory syndrome coronavirus 2
IATSACVL

SEQ ID NO: 1240 - protein, 8 aa, Severe acute respiratory syndrome coronavirus 2
LAAECTIF

SEQ ID NO: 1241 - protein, 8 aa, Severe acute respiratory syndrome coronavirus 2
VLEGSVAY

SEQ ID NO: 1242 - protein, 8 aa, Severe acute respiratory syndrome coronavirus 2
RPDTRYVL

SEQ ID NO: 1243 - protein, 8 aa, Severe acute respiratory syndrome coronavirus 2
VLMDGSII

SEQ ID NO: 1244 - protein, 8 aa, Severe acute respiratory syndrome coronavirus 2
IQFPNTYL

SEQ ID NO: 1245 - protein, 8 aa, Severe acute respiratory syndrome coronavirus 2
YLEGSVRV

SEQ ID NO: 1246 - protein, 8 aa, Severe acute respiratory syndrome coronavirus 2
STSGRWVL

SEQ ID NO: 1247 - protein, 8 aa, Severe acute respiratory syndrome coronavirus 2
VLNNDYYR

SEQ ID NO: 1248 - protein, 8 aa, Severe acute respiratory syndrome coronavirus 2
YYRSLPGV

SEQ ID NO: 1249 - protein, 8 aa, Severe acute respiratory syndrome coronavirus 2
LTNMFTPL

SEQ ID NO: 1250 - protein, 8 aa, Severe acute respiratory syndrome coronavirus 2
ALDISASI

SEQ ID NO: 1251 - protein, 8 aa, Severe acute respiratory syndrome coronavirus 2
IVVTCLAY

SEQ ID NO: 1252 - protein, 8 aa, Severe acute respiratory syndrome coronavirus 2
CLAYYFMR

SEQ ID NO: 1253 - protein, 8 aa, Severe acute respiratory syndrome coronavirus 2
LAYYFMRF

SEQ ID NO: 1254 - protein, 8 aa, Severe acute respiratory syndrome coronavirus 2
AYYFMRFR

SEQ ID NO: 1255 - protein, 8 aa, Severe acute respiratory syndrome coronavirus 2
YYFMRFRR

SEQ ID NO: 1256 - protein, 8 aa, Severe acute respiratory syndrome coronavirus 2
FMRFRRAF

SEQ ID NO: 1257 - protein, 8 aa, Severe acute respiratory syndrome coronavirus 2
MRFRRAFG

SEQ ID NO: 1258 - protein, 8 aa, Severe acute respiratory syndrome coronavirus 2
GEYSHVVA

SEQ ID NO: 1259 - protein, 8 aa, Severe acute respiratory syndrome coronavirus 2
EYSHVVAF

SEQ ID NO: 1260 - protein, 8 aa, Severe acute respiratory syndrome coronavirus 2
VAFNTLLF

SEQ ID NO: 1261 - protein, 8 aa, Severe acute respiratory syndrome coronavirus 2
LFLMSFTV

SEQ ID NO: 1262 - protein, 8 aa, Severe acute respiratory syndrome coronavirus 2
FLMSFTVL

SEQ ID NO: 1263 - protein, 8 aa, Severe acute respiratory syndrome coronavirus 2
MSFTVLCL

SEQ ID NO: 1264 - protein, 8 aa, Severe acute respiratory syndrome coronavirus 2
TVLCLTPV

SEQ ID NO: 1265 - protein, 8 aa, Severe acute respiratory syndrome coronavirus 2
VLCLTPVY

SEQ ID NO: 1266 - protein, 8 aa, Severe acute respiratory syndrome coronavirus 2
LTPVYSFL

SEQ ID NO: 1267 - protein, 8 aa, Severe acute respiratory syndrome coronavirus 2
YSFLPGVY

SEQ ID NO: 1268 - protein, 8 aa, Severe acute respiratory syndrome coronavirus 2
FLPGVYSV

SEQ ID NO: 1269 - protein, 8 aa, Severe acute respiratory syndrome coronavirus 2
LPGVYSVI

SEQ ID NO: 1270 - protein, 8 aa, Severe acute respiratory syndrome coronavirus 2
VYSVIYLY

SEQ ID NO: 1271 - protein, 8 aa, Severe acute respiratory syndrome coronavirus 2
YSVIYLYL

SEQ ID NO: 1272 - protein, 8 aa, Severe acute respiratory syndrome coronavirus 2
IYLYLTFY

SEQ ID NO: 1273 - protein, 8 aa, Severe acute respiratory syndrome coronavirus 2
YLYLTFYL

SEQ ID NO: 1274 - protein, 8 aa, Severe acute respiratory syndrome coronavirus 2
SFLAHIQW

SEQ ID NO: 1275 - protein, 8 aa, Severe acute respiratory syndrome coronavirus 2
FLAHIQWM

SEQ ID NO: 1276 - protein, 8 aa, Severe acute respiratory syndrome coronavirus 2
LAHIQWMV

SEQ ID NO: 1277 - protein, 8 aa, Severe acute respiratory syndrome coronavirus 2
WMVMFTPL

SEQ ID NO: 1278 - protein, 8 aa, Severe acute respiratory syndrome coronavirus 2
MVMFTPLV

SEQ ID NO: 1279 - protein, 8 aa, Severe acute respiratory syndrome coronavirus 2
MFTPLVPF

SEQ ID NO: 1280 - protein, 8 aa, Severe acute respiratory syndrome coronavirus 2
FTPLVPFW

SEQ ID NO: 1281 - protein, 8 aa, Severe acute respiratory syndrome coronavirus 2
VPFWITIA

SEQ ID NO: 1282 - protein, 8 aa, Severe acute respiratory syndrome coronavirus 2
PFWITIAY

SEQ ID NO: 1283 - protein, 8 aa, Severe acute respiratory syndrome coronavirus 2
ISTKHFYW

SEQ ID NO: 1284 - protein, 8 aa, Severe acute respiratory syndrome coronavirus 2
FYWFFSNY

SEQ ID NO: 1285 - protein, 8 aa, Severe acute respiratory syndrome coronavirus 2
YWFFSNYL

SEQ ID NO: 1286 - protein, 8 aa, Severe acute respiratory syndrome coronavirus 2
WFFSNYLK

SEQ ID NO: 1287 - protein, 8 aa, Severe acute respiratory syndrome coronavirus 2
YLKRRVVF

SEQ ID NO: 1288 - protein, 8 aa, Severe acute respiratory syndrome coronavirus 2
RRVVFNGV

SEQ ID NO: 1289 - protein, 8 aa, Severe acute respiratory syndrome coronavirus 2
VVFNGVSF

SEQ ID NO: 1290 - protein, 8 aa, Severe acute respiratory syndrome coronavirus 2
EEAALCTF

SEQ ID NO: 1291 - protein, 8 aa, Severe acute respiratory syndrome coronavirus 2
TFLLNKEM

SEQ ID NO: 1292 - protein, 8 aa, Severe acute respiratory syndrome coronavirus 2
LLNKEMYL

SEQ ID NO: 1293 - protein, 8 aa, Severe acute respiratory syndrome coronavirus 2
YLKLRSDV

SEQ ID NO: 1294 - protein, 8 aa, Severe acute respiratory syndrome coronavirus 2
LKLRSDVL

SEQ ID NO: 1295 - protein, 8 aa, Severe acute respiratory syndrome coronavirus 2
RSDVLLPL

SEQ ID NO: 1296 - protein, 8 aa, Severe acute respiratory syndrome coronavirus 2
VLLPLTQY

SEQ ID NO: 1297 - protein, 8 aa, Severe acute respiratory syndrome coronavirus 2
QYNRYLAL

SEQ ID NO: 1298 - protein, 8 aa, Severe acute respiratory syndrome coronavirus 2
RYLALYNK

SEQ ID NO: 1299 - protein, 8 aa, Severe acute respiratory syndrome coronavirus 2
YLALYNKY

SEQ ID NO: 1300 - protein, 8 aa, Severe acute respiratory syndrome coronavirus 2
LYNKYKYF

SEQ ID NO: 1301 - protein, 8 aa, Severe acute respiratory syndrome coronavirus 2
YKYFSGAM

SEQ ID NO: 1302 - protein, 8 aa, Severe acute respiratory syndrome coronavirus 2
AMDTTSYR

SEQ ID NO: 1303 - protein, 8 aa, Severe acute respiratory syndrome coronavirus 2
REAACCHL

SEQ ID NO: 1304 - protein, 8 aa, Severe acute respiratory syndrome coronavirus 2
TSITSAVL

SEQ ID NO: 1305 - protein, 8 aa, Severe acute respiratory syndrome coronavirus 2
AVLQSGFR

SEQ ID NO: 1306 - protein, 8 aa, Severe acute respiratory syndrome coronavirus 2
LQSGFRKM

SEQ ID NO: 1307 - protein, 8 aa, Severe acute respiratory syndrome coronavirus 2
KMAFPSGK

SEQ ID NO: 1308 - protein, 8 aa, Severe acute respiratory syndrome coronavirus 2
MAFPSGKV

SEQ ID NO: 1309 - protein, 8 aa, Severe acute respiratory syndrome coronavirus 2
TTTLNGLW

SEQ ID NO: 1310 - protein, 8 aa, Severe acute respiratory syndrome coronavirus 2
KSNHNFLV

SEQ ID NO: 1311 - protein, 8 aa, Severe acute respiratory syndrome coronavirus 2
NHNFLVQA

SEQ ID NO: 1312 - protein, 8 aa, Severe acute respiratory syndrome coronavirus 2
FLVQAGNV

SEQ ID NO: 1313 - protein, 8 aa, Severe acute respiratory syndrome coronavirus 2
HSMQNCVL

SEQ ID NO: 1314 - protein, 8 aa, Severe acute respiratory syndrome coronavirus 2
SMQNCVLK

SEQ ID NO: 1315 - protein, 8 aa, Severe acute respiratory syndrome coronavirus 2
MQNCVLKL

SEQ ID NO: 1316 - protein, 8 aa, Severe acute respiratory syndrome coronavirus 2
RIQPGQTF

SEQ ID NO: 1317 - protein, 8 aa, Severe acute respiratory syndrome coronavirus 2
TFSVLACY

SEQ ID NO: 1318 - protein, 8 aa, Severe acute respiratory syndrome coronavirus 2
MRPNFTIK

SEQ ID NO: 1319 - protein, 8 aa, Severe acute respiratory syndrome coronavirus 2
FTIKGSFL

SEQ ID NO: 1320 - protein, 8 aa, Severe acute respiratory syndrome coronavirus 2
YDCVSFCY

SEQ ID NO: 1321 - protein, 8 aa, Severe acute respiratory syndrome coronavirus 2
SFCYMHHM

SEQ ID NO: 1322 - protein, 8 aa, Severe acute respiratory syndrome coronavirus 2
CYMHHMEL

SEQ ID NO: 1323 - protein, 8 aa, Severe acute respiratory syndrome coronavirus 2
TDLEGNFY

SEQ ID NO: 1324 - protein, 8 aa, Severe acute respiratory syndrome coronavirus 2
ITVNVLAW

SEQ ID NO: 1325 - protein, 8 aa, Severe acute respiratory syndrome coronavirus 2
VLAWLYAA

SEQ ID NO: 1326 - protein, 8 aa, Severe acute respiratory syndrome coronavirus 2
TLNDFNLV

SEQ ID NO: 1327 - protein, 8 aa, Severe acute respiratory syndrome coronavirus 2
MKYNYEPL

SEQ ID NO: 1328 - protein, 8 aa, Severe acute respiratory syndrome coronavirus 2
AQTGIAVL

SEQ ID NO: 1329 - protein, 8 aa, Severe acute respiratory syndrome coronavirus 2
VLDMCASL

SEQ ID NO: 1330 - protein, 8 aa, Severe acute respiratory syndrome coronavirus 2
KELLQNGM

SEQ ID NO: 1331 - protein, 8 aa, Severe acute respiratory syndrome coronavirus 2
RTILGSAL

SEQ ID NO: 1332 - protein, 8 aa, Severe acute respiratory syndrome coronavirus 2
LEDEFTPF

SEQ ID NO: 1333 - protein, 8 aa, Severe acute respiratory syndrome coronavirus 2
DEFTPFDV

SEQ ID NO: 1334 - protein, 8 aa, Severe acute respiratory syndrome coronavirus 2
RQCSGVTF

SEQ ID NO: 1335 - protein, 8 aa, Severe acute respiratory syndrome coronavirus 2
TIKGTHHW

SEQ ID NO: 1336 - protein, 8 aa, Severe acute respiratory syndrome coronavirus 2
HHWLLLTI

SEQ ID NO: 1337 - protein, 8 aa, Severe acute respiratory syndrome coronavirus 2
LLTILTSL

SEQ ID NO: 1338 - protein, 8 aa, Severe acute respiratory syndrome coronavirus 2
LTILTSLL

SEQ ID NO: 1339 - protein, 8 aa, Severe acute respiratory syndrome coronavirus 2
QSTQWSLF

SEQ ID NO: 1340 - protein, 8 aa, Severe acute respiratory syndrome coronavirus 2
STQWSLFF

SEQ ID NO: 1341 - protein, 8 aa, Severe acute respiratory syndrome coronavirus 2
TQWSLFFF

SEQ ID NO: 1342 - protein, 8 aa, Severe acute respiratory syndrome coronavirus 2
QWSLFFFL

SEQ ID NO: 1343 - protein, 8 aa, Severe acute respiratory syndrome coronavirus 2
WSLFFFLY

SEQ ID NO: 1344 - protein, 8 aa, Severe acute respiratory syndrome coronavirus 2
FFLYENAF

SEQ ID NO: 1345 - protein, 8 aa, Severe acute respiratory syndrome coronavirus 2
FLYENAFL

SEQ ID NO: 1346 - protein, 8 aa, Severe acute respiratory syndrome coronavirus 2
YENAFLPF

SEQ ID NO: 1347 - protein, 8 aa, Severe acute respiratory syndrome coronavirus 2
NAFLPFAM

SEQ ID NO: 1348 - protein, 8 aa, Severe acute respiratory syndrome coronavirus 2
FLPFAMGI

SEQ ID NO: 1349 - protein, 8 aa, Severe acute respiratory syndrome coronavirus 2
LPFAMGII

SEQ ID NO: 1350 - protein, 8 aa, Severe acute respiratory syndrome coronavirus 2
FAMGIIAM

SEQ ID NO: 1351 - protein, 8 aa, Severe acute respiratory syndrome coronavirus 2
IAMSAFAM

SEQ ID NO: 1352 - protein, 8 aa, Severe acute respiratory syndrome coronavirus 2
AMSAFAMM

SEQ ID NO: 1353 - protein, 8 aa, Severe acute respiratory syndrome coronavirus 2
MSAFAMMF

SEQ ID NO: 1354 - protein, 8 aa, Severe acute respiratory syndrome coronavirus 2
SAFAMMFV

SEQ ID NO: 1355 - protein, 8 aa, Severe acute respiratory syndrome coronavirus 2
AMMFVKHK

SEQ ID NO: 1356 - protein, 8 aa, Severe acute respiratory syndrome coronavirus 2
FVKHKHAF

SEQ ID NO: 1357 - protein, 8 aa, Severe acute respiratory syndrome coronavirus 2
CLFLLPSL

SEQ ID NO: 1358 - protein, 8 aa, Severe acute respiratory syndrome coronavirus 2
FLLPSLAT

SEQ ID NO: 1359 - protein, 8 aa, Severe acute respiratory syndrome coronavirus 2
LLPSLATV

SEQ ID NO: 1360 - protein, 8 aa, Severe acute respiratory syndrome coronavirus 2
LPSLATVA

SEQ ID NO: 1361 - protein, 8 aa, Severe acute respiratory syndrome coronavirus 2
PSLATVAY

SEQ ID NO: 1362 - protein, 8 aa, Severe acute respiratory syndrome coronavirus 2
SLATVAYF

SEQ ID NO: 1363 - protein, 8 aa, Severe acute respiratory syndrome coronavirus 2
TVAYFNMV

SEQ ID NO: 1364 - protein, 8 aa, Severe acute respiratory syndrome coronavirus 2
VAYFNMVY

SEQ ID NO: 1365 - protein, 8 aa, Severe acute respiratory syndrome coronavirus 2
AYFNMVYM

SEQ ID NO: 1366 - protein, 8 aa, Severe acute respiratory syndrome coronavirus 2
MVYMPASW

SEQ ID NO: 1367 - protein, 8 aa, Severe acute respiratory syndrome coronavirus 2
VYMPASWV

SEQ ID NO: 1368 - protein, 8 aa, Severe acute respiratory syndrome coronavirus 2
YMPASWVM

SEQ ID NO: 1369 - protein, 8 aa, Severe acute respiratory syndrome coronavirus 2
WVMRIMTW

SEQ ID NO: 1370 - protein, 8 aa, Severe acute respiratory syndrome coronavirus 2
VMRIMTWL

SEQ ID NO: 1371 - protein, 8 aa, Severe acute respiratory syndrome coronavirus 2
IMTWLDMV

SEQ ID NO: 1372 - protein, 8 aa, Severe acute respiratory syndrome coronavirus 2
VMYASAVV

SEQ ID NO: 1373 - protein, 8 aa, Severe acute respiratory syndrome coronavirus 2
MYASAVVL

SEQ ID NO: 1374 - protein, 8 aa, Severe acute respiratory syndrome coronavirus 2
YASAVVLL

SEQ ID NO: 1375 - protein, 8 aa, Severe acute respiratory syndrome coronavirus 2
LMTARTVY

SEQ ID NO: 1376 - protein, 8 aa, Severe acute respiratory syndrome coronavirus 2
GARRVWTL

SEQ ID NO: 1377 - protein, 8 aa, Severe acute respiratory syndrome coronavirus 2
ARRVWTLM

SEQ ID NO: 1378 - protein, 8 aa, Severe acute respiratory syndrome coronavirus 2
RVWTLMNV

SEQ ID NO: 1379 - protein, 8 aa, Severe acute respiratory syndrome coronavirus 2
TLMNVLTL

SEQ ID NO: 1380 - protein, 8 aa, Severe acute respiratory syndrome coronavirus 2
LMNVLTLV

SEQ ID NO: 1381 - protein, 8 aa, Severe acute respiratory syndrome coronavirus 2
MNVLTLVY

SEQ ID NO: 1382 - protein, 8 aa, Severe acute respiratory syndrome coronavirus 2
NVLTLVYK

SEQ ID NO: 1383 - protein, 8 aa, Severe acute respiratory syndrome coronavirus 2
VLTLVYKV

SEQ ID NO: 1384 - protein, 8 aa, Severe acute respiratory syndrome coronavirus 2
ISMWALII

SEQ ID NO: 1385 - protein, 8 aa, Severe acute respiratory syndrome coronavirus 2
MWALIISV

SEQ ID NO: 1386 - protein, 8 aa, Severe acute respiratory syndrome coronavirus 2
TTVMFLAR

SEQ ID NO: 1387 - protein, 8 aa, Severe acute respiratory syndrome coronavirus 2
FLARGIVF

SEQ ID NO: 1388 - protein, 8 aa, Severe acute respiratory syndrome coronavirus 2
IVFMCVEY

SEQ ID NO: 1389 - protein, 8 aa, Severe acute respiratory syndrome coronavirus 2
VEYCPIFF

SEQ ID NO: 1390 - protein, 8 aa, Severe acute respiratory syndrome coronavirus 2
FFITGNTL

SEQ ID NO: 1391 - protein, 8 aa, Severe acute respiratory syndrome coronavirus 2
TLQCIMLV

SEQ ID NO: 1392 - protein, 8 aa, Severe acute respiratory syndrome coronavirus 2
LQCIMLVY

SEQ ID NO: 1393 - protein, 8 aa, Severe acute respiratory syndrome coronavirus 2
LVYCFLGY

SEQ ID NO: 1394 - protein, 8 aa, Severe acute respiratory syndrome coronavirus 2
VYCFLGYF

SEQ ID NO: 1395 - protein, 8 aa, Severe acute respiratory syndrome coronavirus 2
GYFCTCYF

SEQ ID NO: 1396 - protein, 8 aa, Severe acute respiratory syndrome coronavirus 2
GLFCLLNR

SEQ ID NO: 1397 - protein, 8 aa, Severe acute respiratory syndrome coronavirus 2
CLLNRYFR

SEQ ID NO: 1398 - protein, 8 aa, Severe acute respiratory syndrome coronavirus 2
LLNRYFRL

SEQ ID NO: 1399 - protein, 8 aa, Severe acute respiratory syndrome coronavirus 2
NRYFRLTL

SEQ ID NO: 1400 - protein, 8 aa, Severe acute respiratory syndrome coronavirus 2
FRLTLGVY

SEQ ID NO: 1401 - protein, 8 aa, Severe acute respiratory syndrome coronavirus 2
TLGVYDYL

SEQ ID NO: 1402 - protein, 8 aa, Severe acute respiratory syndrome coronavirus 2
YLVSTQEF

SEQ ID NO: 1403 - protein, 8 aa, Severe acute respiratory syndrome coronavirus 2
STQEFRYM

SEQ ID NO: 1404 - protein, 8 aa, Severe acute respiratory syndrome coronavirus 2
RYMNSQGL

SEQ ID NO: 1405 - protein, 8 aa, Severe acute respiratory syndrome coronavirus 2
YMNSQGLL

SEQ ID NO: 1406 - protein, 8 aa, Severe acute respiratory syndrome coronavirus 2
LLSVLQQL

SEQ ID NO: 1407 - protein, 8 aa, Severe acute respiratory syndrome coronavirus 2
VESSSKLW

SEQ ID NO: 1408 - protein, 8 aa, Severe acute respiratory syndrome coronavirus 2
FEKMVSLL

SEQ ID NO: 1409 - protein, 8 aa, Severe acute respiratory syndrome coronavirus 2
KMVSLLSV

SEQ ID NO: 1410 - protein, 8 aa, Severe acute respiratory syndrome coronavirus 2
MLDNRATL

SEQ ID NO: 1411 - protein, 8 aa, Severe acute respiratory syndrome coronavirus 2
LQAIASEF

SEQ ID NO: 1412 - protein, 8 aa, Severe acute respiratory syndrome coronavirus 2
IASEFSSL

SEQ ID NO: 1413 - protein, 8 aa, Severe acute respiratory syndrome coronavirus 2
SEFSSLPS

SEQ ID NO: 1414 - protein, 8 aa, Severe acute respiratory syndrome coronavirus 2
EFSSLPSY

SEQ ID NO: 1415 - protein, 8 aa, Severe acute respiratory syndrome coronavirus 2
LPSYAAFA

SEQ ID NO: 1416 - protein, 8 aa, Severe acute respiratory syndrome coronavirus 2
FATAQEAY

SEQ ID NO: 1417 - protein, 8 aa, Severe acute respiratory syndrome coronavirus 2
SEVVLKKL

SEQ ID NO: 1418 - protein, 8 aa, Severe acute respiratory syndrome coronavirus 2
LKKLKKSL

SEQ ID NO: 1419 - protein, 8 aa, Severe acute respiratory syndrome coronavirus 2
SEFDRDAA

SEQ ID NO: 1420 - protein, 8 aa, Severe acute respiratory syndrome coronavirus 2
MQRKLEKM

SEQ ID NO: 1421 - protein, 8 aa, Severe acute respiratory syndrome coronavirus 2
RAKVTSAM

SEQ ID NO: 1422 - protein, 8 aa, Severe acute respiratory syndrome coronavirus 2
VTSAMQTM

SEQ ID NO: 1423 - protein, 8 aa, Severe acute respiratory syndrome coronavirus 2
SAMQTMLF

SEQ ID NO: 1424 - protein, 8 aa, Severe acute respiratory syndrome coronavirus 2
MQTMLFTM

SEQ ID NO: 1425 - protein, 8 aa, Severe acute respiratory syndrome coronavirus 2
TMLFTMLR

SEQ ID NO: 1426 - protein, 8 aa, Severe acute respiratory syndrome coronavirus 2
MLFTMLRK

SEQ ID NO: 1427 - protein, 8 aa, Severe acute respiratory syndrome coronavirus 2
VPLNIIPL

SEQ ID NO: 1428 - protein, 8 aa, Severe acute respiratory syndrome coronavirus 2
LMVVIPDY

SEQ ID NO: 1429 - protein, 8 aa, Severe acute respiratory syndrome coronavirus 2
TFTYASAL

SEQ ID NO: 1430 - protein, 8 aa, Severe acute respiratory syndrome coronavirus 2
FTYASALW

SEQ ID NO: 1431 - protein, 8 aa, Severe acute respiratory syndrome coronavirus 2
YASALWEI

SEQ ID NO: 1432 - protein, 8 aa, Severe acute respiratory syndrome coronavirus 2
ALWEIQQV

SEQ ID NO: 1433 - protein, 8 aa, Severe acute respiratory syndrome coronavirus 2
LWEIQQVV

SEQ ID NO: 1434 - protein, 8 aa, Severe acute respiratory syndrome coronavirus 2
VQLSEISM

SEQ ID NO: 1435 - protein, 8 aa, Severe acute respiratory syndrome coronavirus 2
SPNLAWPL

SEQ ID NO: 1436 - protein, 8 aa, Severe acute respiratory syndrome coronavirus 2
NLAWPLIV

SEQ ID NO: 1437 - protein, 8 aa, Severe acute respiratory syndrome coronavirus 2
WPLIVTAL

SEQ ID NO: 1438 - protein, 8 aa, Severe acute respiratory syndrome coronavirus 2
RANSAVKL

SEQ ID NO: 1439 - protein, 8 aa, Severe acute respiratory syndrome coronavirus 2
NELSPVAL

SEQ ID NO: 1440 - protein, 8 aa, Severe acute respiratory syndrome coronavirus 2
ELSPVALR

SEQ ID NO: 1441 - protein, 8 aa, Severe acute respiratory syndrome coronavirus 2
SPVALRQM

SEQ ID NO: 1442 - protein, 8 aa, Severe acute respiratory syndrome coronavirus 2
RQMSCAAG

SEQ ID NO: 1443 - protein, 8 aa, Severe acute respiratory syndrome coronavirus 2
TDDNALAY

SEQ ID NO: 1444 - protein, 8 aa, Severe acute respiratory syndrome coronavirus 2
GRFVLALL

SEQ ID NO: 1445 - protein, 8 aa, Severe acute respiratory syndrome coronavirus 2
KVKYLYFI

SEQ ID NO: 1446 - protein, 8 aa, Severe acute respiratory syndrome coronavirus 2
YLYFIKGL

SEQ ID NO: 1447 - protein, 8 aa, Severe acute respiratory syndrome coronavirus 2
NLNRGMVL

SEQ ID NO: 1448 - protein, 8 aa, Severe acute respiratory syndrome coronavirus 2
SLAATVRL

SEQ ID NO: 1449 - protein, 8 aa, Severe acute respiratory syndrome coronavirus 2
VPANSTVL

SEQ ID NO: 1450 - protein, 8 aa, Severe acute respiratory syndrome coronavirus 2
TVLSFCAF

SEQ ID NO: 1451 - protein, 8 aa, Severe acute respiratory syndrome coronavirus 2
ASCCLYCR

SEQ ID NO: 1452 - protein, 8 aa, Severe acute respiratory syndrome coronavirus 2
REPMLQSA

SEQ ID NO: 1453 - protein, 8 aa, Severe acute respiratory syndrome coronavirus 2
SADAQSFL

SEQ ID NO: 1454 - protein, 9 aa, Severe acute respiratory syndrome coronavirus 2
SLVPGFNEK

SEQ ID NO: 1455 - protein, 9 aa, Severe acute respiratory syndrome coronavirus 2
EKTHVQLSL

SEQ ID NO: 1456 - protein, 9 aa, Severe acute respiratory syndrome coronavirus 2
KTHVQLSLP

SEQ ID NO: 1457 - protein, 9 aa, Severe acute respiratory syndrome coronavirus 2
THVQLSLPV

SEQ ID NO: 1458 - protein, 9 aa, Severe acute respiratory syndrome coronavirus 2
HVQLSLPVL

SEQ ID NO: 1459 - protein, 9 aa, Severe acute respiratory syndrome coronavirus 2
QLSLPVLQV

SEQ ID NO: 1460 - protein, 9 aa, Severe acute respiratory syndrome coronavirus 2
LSLPVLQVR

SEQ ID NO: 1461 - protein, 9 aa, Severe acute respiratory syndrome coronavirus 2
LPVLQVRDV

SEQ ID NO: 1462 - protein, 9 aa, Severe acute respiratory syndrome coronavirus 2
VLQVRDVLV

SEQ ID NO: 1463 - protein, 9 aa, Severe acute respiratory syndrome coronavirus 2
VRDVLVRGF

SEQ ID NO: 1464 - protein, 9 aa, Severe acute respiratory syndrome coronavirus 2
LVRGFGDSV

SEQ ID NO: 1465 - protein, 9 aa, Severe acute respiratory syndrome coronavirus 2
FGDSVEEVL

SEQ ID NO: 1466 - protein, 9 aa, Severe acute respiratory syndrome coronavirus 2
SVEEVLSEA

SEQ ID NO: 1467 - protein, 9 aa, Severe acute respiratory syndrome coronavirus 2
VLSEARQHL

SEQ ID NO: 1468 - protein, 9 aa, Severe acute respiratory syndrome coronavirus 2
LSEARQHLK

SEQ ID NO: 1469 - protein, 9 aa, Severe acute respiratory syndrome coronavirus 2
HLKDGTCGL

SEQ ID NO: 1470 - protein, 9 aa, Severe acute respiratory syndrome coronavirus 2
GLVEVEKGV

SEQ ID NO: 1471 - protein, 9 aa, Severe acute respiratory syndrome coronavirus 2
VEVEKGVLP

SEQ ID NO: 1472 - protein, 9 aa, Severe acute respiratory syndrome coronavirus 2
VEKGVLPQL

SEQ ID NO: 1473 - protein, 9 aa, Severe acute respiratory syndrome coronavirus 2
VLPQLEQPY

SEQ ID NO: 1474 - protein, 9 aa, Severe acute respiratory syndrome coronavirus 2
LPQLEQPYV

SEQ ID NO: 1475 - protein, 9 aa, Severe acute respiratory syndrome coronavirus 2
PQLEQPYVF

SEQ ID NO: 1476 - protein, 9 aa, Severe acute respiratory syndrome coronavirus 2
QLEQPYVFI

SEQ ID NO: 1477 - protein, 9 aa, Severe acute respiratory syndrome coronavirus 2
EQPYVFIKR

SEQ ID NO: 1478 - protein, 9 aa, Severe acute respiratory syndrome coronavirus 2
YVFIKRSDA

SEQ ID NO: 1479 - protein, 9 aa, Severe acute respiratory syndrome coronavirus 2
VFIKRSDAR

SEQ ID NO: 1480 - protein, 9 aa, Severe acute respiratory syndrome coronavirus 2
RTAPHGHVM

SEQ ID NO: 1481 - protein, 9 aa, Severe acute respiratory syndrome coronavirus 2
TAPHGHVMV

SEQ ID NO: 1482 - protein, 9 aa, Severe acute respiratory syndrome coronavirus 2
APHGHVMVE

SEQ ID NO: 1483 - protein, 9 aa, Severe acute respiratory syndrome coronavirus 2
VMVELVAEL

SEQ ID NO: 1484 - protein, 9 aa, Severe acute respiratory syndrome coronavirus 2
ELVAELEGI

SEQ ID NO: 1485 - protein, 9 aa, Severe acute respiratory syndrome coronavirus 2
VAELEGIQY

SEQ ID NO: 1486 - protein, 9 aa, Severe acute respiratory syndrome coronavirus 2
AELEGIQYG

SEQ ID NO: 1487 - protein, 9 aa, Severe acute respiratory syndrome coronavirus 2
ELEGIQYGR

SEQ ID NO: 1488 - protein, 9 aa, Severe acute respiratory syndrome coronavirus 2
IQYGRSGET

SEQ ID NO: 1489 - protein, 9 aa, Severe acute respiratory syndrome coronavirus 2
QYGRSGETL

SEQ ID NO: 1490 - protein, 9 aa, Severe acute respiratory syndrome coronavirus 2
GRSGETLGV

SEQ ID NO: 1491 - protein, 9 aa, Severe acute respiratory syndrome coronavirus 2
RSGETLGVL

SEQ ID NO: 1492 - protein, 9 aa, Severe acute respiratory syndrome coronavirus 2
GETLGVLVP

SEQ ID NO: 1493 - protein, 9 aa, Severe acute respiratory syndrome coronavirus 2
ETLGVLVPH

SEQ ID NO: 1494 - protein, 9 aa, Severe acute respiratory syndrome coronavirus 2
TLGVLVPHV

SEQ ID NO: 1495 - protein, 9 aa, Severe acute respiratory syndrome coronavirus 2
VLVPHVGEI

SEQ ID NO: 1496 - protein, 9 aa, Severe acute respiratory syndrome coronavirus 2
VPHVGEIPV

SEQ ID NO: 1497 - protein, 9 aa, Severe acute respiratory syndrome coronavirus 2
HVGEIPVAY

SEQ ID NO: 1498 - protein, 9 aa, Severe acute respiratory syndrome coronavirus 2
VGEIPVAYR

SEQ ID NO: 1499 - protein, 9 aa, Severe acute respiratory syndrome coronavirus 2
EIPVAYRKV

SEQ ID NO: 1500 - protein, 9 aa, Severe acute respiratory syndrome coronavirus 2
IPVAYRKVL

SEQ ID NO: 1501 - protein, 9 aa, Severe acute respiratory syndrome coronavirus 2
VAYRKVLLR

SEQ ID NO: 1502 - protein, 9 aa, Severe acute respiratory syndrome coronavirus 2
AYRKVLLRK

SEQ ID NO: 1503 - protein, 9 aa, Severe acute respiratory syndrome coronavirus 2
VLLRKNGNK

SEQ ID NO: 1504 - protein, 9 aa, Severe acute respiratory syndrome coronavirus 2
NKGAGGHSY

SEQ ID NO: 1505 - protein, 9 aa, Severe acute respiratory syndrome coronavirus 2
SYGADLKSF

SEQ ID NO: 1506 - protein, 9 aa, Severe acute respiratory syndrome coronavirus 2
GADLKSFDL

SEQ ID NO: 1507 - protein, 9 aa, Severe acute respiratory syndrome coronavirus 2
KSFDLGDEL

SEQ ID NO: 1508 - protein, 9 aa, Severe acute respiratory syndrome coronavirus 2
HSSGVTREL

SEQ ID NO: 1509 - protein, 9 aa, Severe acute respiratory syndrome coronavirus 2
SSGVTRELM

SEQ ID NO: 1510 - protein, 9 aa, Severe acute respiratory syndrome coronavirus 2
SGVTRELMR

SEQ ID NO: 1511 - protein, 9 aa, Severe acute respiratory syndrome coronavirus 2
VTRELMREL

SEQ ID NO: 1512 - protein, 9 aa, Severe acute respiratory syndrome coronavirus 2
LMRELNGGA

SEQ ID NO: 1513 - protein, 9 aa, Severe acute respiratory syndrome coronavirus 2
MRELNGGAY

SEQ ID NO: 1514 - protein, 9 aa, Severe acute respiratory syndrome coronavirus 2
RELNGGAYT

SEQ ID NO: 1515 - protein, 9 aa, Severe acute respiratory syndrome coronavirus 2
ELNGGAYTR

SEQ ID NO: 1516 - protein, 9 aa, Severe acute respiratory syndrome coronavirus 2
LNGGAYTRY

SEQ ID NO: 1517 - protein, 9 aa, Severe acute respiratory syndrome coronavirus 2
YTRYVDNNF

SEQ ID NO: 1518 - protein, 9 aa, Severe acute respiratory syndrome coronavirus 2
YPLECIKDL

SEQ ID NO: 1519 - protein, 9 aa, Severe acute respiratory syndrome coronavirus 2
LECIKDLLA

SEQ ID NO: 1520 - protein, 9 aa, Severe acute respiratory syndrome coronavirus 2
ECIKDLLAR

SEQ ID NO: 1521 - protein, 9 aa, Severe acute respiratory syndrome coronavirus 2
CIKDLLARA

SEQ ID NO: 1522 - protein, 9 aa, Severe acute respiratory syndrome coronavirus 2
RAGKASCTL

SEQ ID NO: 1523 - protein, 9 aa, Severe acute respiratory syndrome coronavirus 2
CTLSEQLDF

SEQ ID NO: 1524 - protein, 9 aa, Severe acute respiratory syndrome coronavirus 2
TLSEQLDFI

SEQ ID NO: 1525 - protein, 9 aa, Severe acute respiratory syndrome coronavirus 2
SEQLDFIDT

SEQ ID NO: 1526 - protein, 9 aa, Severe acute respiratory syndrome coronavirus 2
QLDFIDTKR

SEQ ID NO: 1527 - protein, 9 aa, Severe acute respiratory syndrome coronavirus 2
FIDTKRGVY

SEQ ID NO: 1528 - protein, 9 aa, Severe acute respiratory syndrome coronavirus 2
REHEHEIAW

SEQ ID NO: 1529 - protein, 9 aa, Severe acute respiratory syndrome coronavirus 2
HEHEIAWYT

SEQ ID NO: 1530 - protein, 9 aa, Severe acute respiratory syndrome coronavirus 2
HEIAWYTER

SEQ ID NO: 1531 - protein, 9 aa, Severe acute respiratory syndrome coronavirus 2
EIAWYTERS

SEQ ID NO: 1532 - protein, 9 aa, Severe acute respiratory syndrome coronavirus 2
AWYTERSEK

SEQ ID NO: 1533 - protein, 9 aa, Severe acute respiratory syndrome coronavirus 2
YTERSEKSY

SEQ ID NO: 1534 - protein, 9 aa, Severe acute respiratory syndrome coronavirus 2
ERSEKSYEL

SEQ ID NO: 1535 - protein, 9 aa, Severe acute respiratory syndrome coronavirus 2
SEKSYELQT

SEQ ID NO: 1536 - protein, 9 aa, Severe acute respiratory syndrome coronavirus 2
KSYELQTPF

SEQ ID NO: 1537 - protein, 9 aa, Severe acute respiratory syndrome coronavirus 2
YELQTPFEI

SEQ ID NO: 1538 - protein, 9 aa, Severe acute respiratory syndrome coronavirus 2
ELQTPFEIK

SEQ ID NO: 1539 - protein, 9 aa, Severe acute respiratory syndrome coronavirus 2
LQTPFEIKL

SEQ ID NO: 1540 - protein, 9 aa, Severe acute respiratory syndrome coronavirus 2
TPFEIKLAK

SEQ ID NO: 1541 - protein, 9 aa, Severe acute respiratory syndrome coronavirus 2
FEIKLAKKF

SEQ ID NO: 1542 - protein, 9 aa, Severe acute respiratory syndrome coronavirus 2
KLAKKFDTF

SEQ ID NO: 1543 - protein, 9 aa, Severe acute respiratory syndrome coronavirus 2
TFNGECPNF

SEQ ID NO: 1544 - protein, 9 aa, Severe acute respiratory syndrome coronavirus 2
GECPNFVFP

SEQ ID NO: 1545 - protein, 9 aa, Severe acute respiratory syndrome coronavirus 2
ECPNFVFPL

SEQ ID NO: 1546 - protein, 9 aa, Severe acute respiratory syndrome coronavirus 2
NFVFPLNSI

SEQ ID NO: 1547 - protein, 9 aa, Severe acute respiratory syndrome coronavirus 2
FVFPLNSII

SEQ ID NO: 1548 - protein, 9 aa, Severe acute respiratory syndrome coronavirus 2
FPLNSIIKT

SEQ ID NO: 1549 - protein, 9 aa, Severe acute respiratory syndrome coronavirus 2
SIIKTIQPR

SEQ ID NO: 1550 - protein, 9 aa, Severe acute respiratory syndrome coronavirus 2
IIKTIQPRV

SEQ ID NO: 1551 - protein, 9 aa, Severe acute respiratory syndrome coronavirus 2
KTIQPRVEK

SEQ ID NO: 1552 - protein, 9 aa, Severe acute respiratory syndrome coronavirus 2
TIQPRVEKK

SEQ ID NO: 1553 - protein, 9 aa, Severe acute respiratory syndrome coronavirus 2
QPRVEKKKL

SEQ ID NO: 1554 - protein, 9 aa, Severe acute respiratory syndrome coronavirus 2
KKLDGFMGR

SEQ ID NO: 1555 - protein, 9 aa, Severe acute respiratory syndrome coronavirus 2
KLDGFMGRI

SEQ ID NO: 1556 - protein, 9 aa, Severe acute respiratory syndrome coronavirus 2
GFMGRIRSV

SEQ ID NO: 1557 - protein, 9 aa, Severe acute respiratory syndrome coronavirus 2
FMGRIRSVY

SEQ ID NO: 1558 - protein, 9 aa, Severe acute respiratory syndrome coronavirus 2
MGRIRSVYP

SEQ ID NO: 1559 - protein, 9 aa, Severe acute respiratory syndrome coronavirus 2
GRIRSVYPV

SEQ ID NO: 1560 - protein, 9 aa, Severe acute respiratory syndrome coronavirus 2
RIRSVYPVA

SEQ ID NO: 1561 - protein, 9 aa, Severe acute respiratory syndrome coronavirus 2
YPVASPNEC

SEQ ID NO: 1562 - protein, 9 aa, Severe acute respiratory syndrome coronavirus 2
NQMCLSTLM

SEQ ID NO: 1563 - protein, 9 aa, Severe acute respiratory syndrome coronavirus 2
QMCLSTLMK

SEQ ID NO: 1564 - protein, 9 aa, Severe acute respiratory syndrome coronavirus 2
ETSWQTGDF

SEQ ID NO: 1565 - protein, 9 aa, Severe acute respiratory syndrome coronavirus 2
TSWQTGDFV

SEQ ID NO: 1566 - protein, 9 aa, Severe acute respiratory syndrome coronavirus 2
SWQTGDFVK

SEQ ID NO: 1567 - protein, 9 aa, Severe acute respiratory syndrome coronavirus 2
WQTGDFVKA

SEQ ID NO: 1568 - protein, 9 aa, Severe acute respiratory syndrome coronavirus 2
DFVKATCEF

SEQ ID NO: 1569 - protein, 9 aa, Severe acute respiratory syndrome coronavirus 2
CEFCGTENL

SEQ ID NO: 1570 - protein, 9 aa, Severe acute respiratory syndrome coronavirus 2
TENLTKEGA

SEQ ID NO: 1571 - protein, 9 aa, Severe acute respiratory syndrome coronavirus 2
KEGATTCGY

SEQ ID NO: 1572 - protein, 9 aa, Severe acute respiratory syndrome coronavirus 2
GYLPQNAVV

SEQ ID NO: 1573 - protein, 9 aa, Severe acute respiratory syndrome coronavirus 2
LPQNAVVKI

SEQ ID NO: 1574 - protein, 9 aa, Severe acute respiratory syndrome coronavirus 2
PQNAVVKIY

SEQ ID NO: 1575 - protein, 9 aa, Severe acute respiratory syndrome coronavirus 2
AVVKIYCPA

SEQ ID NO: 1576 - protein, 9 aa, Severe acute respiratory syndrome coronavirus 2
CPACHNSEV

SEQ ID NO: 1577 - protein, 9 aa, Severe acute respiratory syndrome coronavirus 2
SEVGPEHSL

SEQ ID NO: 1578 - protein, 9 aa, Severe acute respiratory syndrome coronavirus 2
GPEHSLAEY

SEQ ID NO: 1579 - protein, 9 aa, Severe acute respiratory syndrome coronavirus 2
SLAEYHNES

SEQ ID NO: 1580 - protein, 9 aa, Severe acute respiratory syndrome coronavirus 2
AEYHNESGL

SEQ ID NO: 1581 - protein, 9 aa, Severe acute respiratory syndrome coronavirus 2
NESGLKTIL

SEQ ID NO: 1582 - protein, 9 aa, Severe acute respiratory syndrome coronavirus 2
ESGLKTILR

SEQ ID NO: 1583 - protein, 9 aa, Severe acute respiratory syndrome coronavirus 2
SGLKTILRK

SEQ ID NO: 1584 - protein, 9 aa, Severe acute respiratory syndrome coronavirus 2
KTILRKGGR

SEQ ID NO: 1585 - protein, 9 aa, Severe acute respiratory syndrome coronavirus 2
RKGGRTIAF

SEQ ID NO: 1586 - protein, 9 aa, Severe acute respiratory syndrome coronavirus 2
RTIAFGGCV

SEQ ID NO: 1587 - protein, 9 aa, Severe acute respiratory syndrome coronavirus 2
TIAFGGCVF

SEQ ID NO: 1588 - protein, 9 aa, Severe acute respiratory syndrome coronavirus 2
AFGGCVFSY

SEQ ID NO: 1589 - protein, 9 aa, Severe acute respiratory syndrome coronavirus 2
FGGCVFSYV

SEQ ID NO: 1590 - protein, 9 aa, Severe acute respiratory syndrome coronavirus 2
FSYVGCHNK

SEQ ID NO: 1591 - protein, 9 aa, Severe acute respiratory syndrome coronavirus 2
NKCAYWVPR

SEQ ID NO: 1592 - protein, 9 aa, Severe acute respiratory syndrome coronavirus 2
CAYWVPRAS

SEQ ID NO: 1593 - protein, 9 aa, Severe acute respiratory syndrome coronavirus 2
AYWVPRASA

SEQ ID NO: 1594 - protein, 9 aa, Severe acute respiratory syndrome coronavirus 2
WVPRASANI

SEQ ID NO: 1595 - protein, 9 aa, Severe acute respiratory syndrome coronavirus 2
VPRASANIG

SEQ ID NO: 1596 - protein, 9 aa, Severe acute respiratory syndrome coronavirus 2
NIGCNHTGV

SEQ ID NO: 1597 - protein, 9 aa, Severe acute respiratory syndrome coronavirus 2
VVGEGSEGL

SEQ ID NO: 1598 - protein, 9 aa, Severe acute respiratory syndrome coronavirus 2
SEGLNDNLL

SEQ ID NO: 1599 - protein, 9 aa, Severe acute respiratory syndrome coronavirus 2
GLNDNLLEI

SEQ ID NO: 1600 - protein, 9 aa, Severe acute respiratory syndrome coronavirus 2
LEILQKEKV

SEQ ID NO: 1601 - protein, 9 aa, Severe acute respiratory syndrome coronavirus 2
ILQKEKVNI

SEQ ID NO: 1602 - protein, 9 aa, Severe acute respiratory syndrome coronavirus 2
KEKVNINIV

SEQ ID NO: 1603 - protein, 9 aa, Severe acute respiratory syndrome coronavirus 2
VNINIVGDF

SEQ ID NO: 1604 - protein, 9 aa, Severe acute respiratory syndrome coronavirus 2
NINIVGDFK

SEQ ID NO: 1605 - protein, 9 aa, Severe acute respiratory syndrome coronavirus 2
GDFKLNEEI

SEQ ID NO: 1606 - protein, 9 aa, Severe acute respiratory syndrome coronavirus 2
FKLNEEIAI

SEQ ID NO: 1607 - protein, 9 aa, Severe acute respiratory syndrome coronavirus 2
KLNEEIAII

SEQ ID NO: 1608 - protein, 9 aa, Severe acute respiratory syndrome coronavirus 2
NEEIAIILA

SEQ ID NO: 1609 - protein, 9 aa, Severe acute respiratory syndrome coronavirus 2
EEIAIILAS

SEQ ID NO: 1610 - protein, 9 aa, Severe acute respiratory syndrome coronavirus 2
EIAIILASF

SEQ ID NO: 1611 - protein, 9 aa, Severe acute respiratory syndrome coronavirus 2
AIILASFSA

SEQ ID NO: 1612 - protein, 9 aa, Severe acute respiratory syndrome coronavirus 2
ILASFSAST

SEQ ID NO: 1613 - protein, 9 aa, Severe acute respiratory syndrome coronavirus 2
ASFSASTSA

SEQ ID NO: 1614 - protein, 9 aa, Severe acute respiratory syndrome coronavirus 2
SFSASTSAF

SEQ ID NO: 1615 - protein, 9 aa, Severe acute respiratory syndrome coronavirus 2
FSASTSAFV

SEQ ID NO: 1616 - protein, 9 aa, Severe acute respiratory syndrome coronavirus 2
STSAFVETV

SEQ ID NO: 1617 - protein, 9 aa, Severe acute respiratory syndrome coronavirus 2
TSAFVETVK

SEQ ID NO: 1618 - protein, 9 aa, Severe acute respiratory syndrome coronavirus 2
AFVETVKGL

SEQ ID NO: 1619 - protein, 9 aa, Severe acute respiratory syndrome coronavirus 2
ETVKGLDYK

SEQ ID NO: 1620 - protein, 9 aa, Severe acute respiratory syndrome coronavirus 2
VKGLDYKAF

SEQ ID NO: 1621 - protein, 9 aa, Severe acute respiratory syndrome coronavirus 2
KGLDYKAFK

SEQ ID NO: 1622 - protein, 9 aa, Severe acute respiratory syndrome coronavirus 2
LDYKAFKQI

SEQ ID NO: 1623 - protein, 9 aa, Severe acute respiratory syndrome coronavirus 2
QIVESCGNF

SEQ ID NO: 1624 - protein, 9 aa, Severe acute respiratory syndrome coronavirus 2
IVESCGNFK

SEQ ID NO: 1625 - protein, 9 aa, Severe acute respiratory syndrome coronavirus 2
VESCGNFKV

SEQ ID NO: 1626 - protein, 9 aa, Severe acute respiratory syndrome coronavirus 2
KVTKGKAKK

SEQ ID NO: 1627 - protein, 9 aa, Severe acute respiratory syndrome coronavirus 2
KAKKGAWNI

SEQ ID NO: 1628 - protein, 9 aa, Severe acute respiratory syndrome coronavirus 2
GAWNIGEQK

SEQ ID NO: 1629 - protein, 9 aa, Severe acute respiratory syndrome coronavirus 2
GEQKSILSP

SEQ ID NO: 1630 - protein, 9 aa, Severe acute respiratory syndrome coronavirus 2
EQKSILSPL

SEQ ID NO: 1631 - protein, 9 aa, Severe acute respiratory syndrome coronavirus 2
QKSILSPLY

SEQ ID NO: 1632 - protein, 9 aa, Severe acute respiratory syndrome coronavirus 2
KSILSPLYA

SEQ ID NO: 1633 - protein, 9 aa, Severe acute respiratory syndrome coronavirus 2
SILSPLYAF

SEQ ID NO: 1634 - protein, 9 aa, Severe acute respiratory syndrome coronavirus 2
ILSPLYAFA

SEQ ID NO: 1635 - protein, 9 aa, Severe acute respiratory syndrome coronavirus 2
PLYAFASEA

SEQ ID NO: 1636 - protein, 9 aa, Severe acute respiratory syndrome coronavirus 2
LYAFASEAA

SEQ ID NO: 1637 - protein, 9 aa, Severe acute respiratory syndrome coronavirus 2
YAFASEAAR

SEQ ID NO: 1638 - protein, 9 aa, Severe acute respiratory syndrome coronavirus 2
FASEAARVV

SEQ ID NO: 1639 - protein, 9 aa, Severe acute respiratory syndrome coronavirus 2
ASEAARVVR

SEQ ID NO: 1640 - protein, 9 aa, Severe acute respiratory syndrome coronavirus 2
SEAARVVRS

SEQ ID NO: 1641 - protein, 9 aa, Severe acute respiratory syndrome coronavirus 2
EAARVVRSI

SEQ ID NO: 1642 - protein, 9 aa, Severe acute respiratory syndrome coronavirus 2
AARVVRSIF

SEQ ID NO: 1643 - protein, 9 aa, Severe acute respiratory syndrome coronavirus 2
RVVRSIFSR

SEQ ID NO: 1644 - protein, 9 aa, Severe acute respiratory syndrome coronavirus 2
VVRSIFSRT

SEQ ID NO: 1645 - protein, 9 aa, Severe acute respiratory syndrome coronavirus 2
VRSIFSRTL

SEQ ID NO: 1646 - protein, 9 aa, Severe acute respiratory syndrome coronavirus 2
RSIFSRTLE

SEQ ID NO: 1647 - protein, 9 aa, Severe acute respiratory syndrome coronavirus 2
SIFSRTLET

SEQ ID NO: 1648 - protein, 9 aa, Severe acute respiratory syndrome coronavirus 2
TLETAQNSV

SEQ ID NO: 1649 - protein, 9 aa, Severe acute respiratory syndrome coronavirus 2
ETAQNSVRV

SEQ ID NO: 1650 - protein, 9 aa, Severe acute respiratory syndrome coronavirus 2
TAQNSVRVL

SEQ ID NO: 1651 - protein, 9 aa, Severe acute respiratory syndrome coronavirus 2
SVRVLQKAA

SEQ ID NO: 1652 - protein, 9 aa, Severe acute respiratory syndrome coronavirus 2
VRVLQKAAI

SEQ ID NO: 1653 - protein, 9 aa, Severe acute respiratory syndrome coronavirus 2
VLQKAAITI

SEQ ID NO: 1654 - protein, 9 aa, Severe acute respiratory syndrome coronavirus 2
LQKAAITIL

SEQ ID NO: 1655 - protein, 9 aa, Severe acute respiratory syndrome coronavirus 2
AAITILDGI

SEQ ID NO: 1656 - protein, 9 aa, Severe acute respiratory syndrome coronavirus 2
TILDGISQY

SEQ ID NO: 1657 - protein, 9 aa, Severe acute respiratory syndrome coronavirus 2
ILDGISQYS

SEQ ID NO: 1658 - protein, 9 aa, Severe acute respiratory syndrome coronavirus 2
DGISQYSLR

SEQ ID NO: 1659 - protein, 9 aa, Severe acute respiratory syndrome coronavirus 2
GISQYSLRL

SEQ ID NO: 1660 - protein, 9 aa, Severe acute respiratory syndrome coronavirus 2
ISQYSLRLI

SEQ ID NO: 1661 - protein, 9 aa, Severe acute respiratory syndrome coronavirus 2
YSLRLIDAM

SEQ ID NO: 1662 - protein, 9 aa, Severe acute respiratory syndrome coronavirus 2
SLRLIDAMM

SEQ ID NO: 1663 - protein, 9 aa, Severe acute respiratory syndrome coronavirus 2
LRLIDAMMF

SEQ ID NO: 1664 - protein, 9 aa, Severe acute respiratory syndrome coronavirus 2
RLIDAMMFT

SEQ ID NO: 1665 - protein, 9 aa, Severe acute respiratory syndrome coronavirus 2
DAMMFTSDL

SEQ ID NO: 1666 - protein, 9 aa, Severe acute respiratory syndrome coronavirus 2
AMMFTSDLA

SEQ ID NO: 1667 - protein, 9 aa, Severe acute respiratory syndrome coronavirus 2
MMFTSDLAT

SEQ ID NO: 1668 - protein, 9 aa, Severe acute respiratory syndrome coronavirus 2
TSDLATNNL

SEQ ID NO: 1669 - protein, 9 aa, Severe acute respiratory syndrome coronavirus 2
LATNNLVVM

SEQ ID NO: 1670 - protein, 9 aa, Severe acute respiratory syndrome coronavirus 2
ATNNLVVMA

SEQ ID NO: 1671 - protein, 9 aa, Severe acute respiratory syndrome coronavirus 2
TNNLVVMAY

SEQ ID NO: 1672 - protein, 9 aa, Severe acute respiratory syndrome coronavirus 2
NNLVVMAYI

SEQ ID NO: 1673 - protein, 9 aa, Severe acute respiratory syndrome coronavirus 2
VMAYITGGV

SEQ ID NO: 1674 - protein, 9 aa, Severe acute respiratory syndrome coronavirus 2
MAYITGGVV

SEQ ID NO: 1675 - protein, 9 aa, Severe acute respiratory syndrome coronavirus 2
YITGGVVQL

SEQ ID NO: 1676 - protein, 9 aa, Severe acute respiratory syndrome coronavirus 2
GVVQLTSQW

SEQ ID NO: 1677 - protein, 9 aa, Severe acute respiratory syndrome coronavirus 2
VQLTSQWLT

SEQ ID NO: 1678 - protein, 9 aa, Severe acute respiratory syndrome coronavirus 2
LTSQWLTNI

SEQ ID NO: 1679 - protein, 9 aa, Severe acute respiratory syndrome coronavirus 2
TSQWLTNIF

SEQ ID NO: 1680 - protein, 9 aa, Severe acute respiratory syndrome coronavirus 2
WLTNIFGTV

SEQ ID NO: 1681 - protein, 9 aa, Severe acute respiratory syndrome coronavirus 2
LTNIFGTVY

SEQ ID NO: 1682 - protein, 9 aa, Severe acute respiratory syndrome coronavirus 2
NIFGTVYEK

SEQ ID NO: 1683 - protein, 9 aa, Severe acute respiratory syndrome coronavirus 2
IFGTVYEKL

SEQ ID NO: 1684 - protein, 9 aa, Severe acute respiratory syndrome coronavirus 2
TVYEKLKPV

SEQ ID NO: 1685 - protein, 9 aa, Severe acute respiratory syndrome coronavirus 2
VYEKLKPVL

SEQ ID NO: 1686 - protein, 9 aa, Severe acute respiratory syndrome coronavirus 2
KLKPVLDWL

SEQ ID NO: 1687 - protein, 9 aa, Severe acute respiratory syndrome coronavirus 2
VLDWLEEKF

SEQ ID NO: 1688 - protein, 9 aa, Severe acute respiratory syndrome coronavirus 2
EKFKEGVEF

SEQ ID NO: 1689 - protein, 9 aa, Severe acute respiratory syndrome coronavirus 2
KFKEGVEFL

SEQ ID NO: 1690 - protein, 9 aa, Severe acute respiratory syndrome coronavirus 2
EFLRDGWEI

SEQ ID NO: 1691 - protein, 9 aa, Severe acute respiratory syndrome coronavirus 2
FLRDGWEIV

SEQ ID NO: 1692 - protein, 9 aa, Severe acute respiratory syndrome coronavirus 2
WEIVKFIST

SEQ ID NO: 1693 - protein, 9 aa, Severe acute respiratory syndrome coronavirus 2
IVKFISTCA

SEQ ID NO: 1694 - protein, 9 aa, Severe acute respiratory syndrome coronavirus 2
VKFISTCAC

SEQ ID NO: 1695 - protein, 9 aa, Severe acute respiratory syndrome coronavirus 2
FISTCACEI

SEQ ID NO: 1696 - protein, 9 aa, Severe acute respiratory syndrome coronavirus 2
CEIVGGQIV

SEQ ID NO: 1697 - protein, 9 aa, Severe acute respiratory syndrome coronavirus 2
GGQIVTCAK

SEQ ID NO: 1698 - protein, 9 aa, Severe acute respiratory syndrome coronavirus 2
CAKEIKESV

SEQ ID NO: 1699 - protein, 9 aa, Severe acute respiratory syndrome coronavirus 2
KEIKESVQT

SEQ ID NO: 1700 - protein, 9 aa, Severe acute respiratory syndrome coronavirus 2
EIKESVQTF

SEQ ID NO: 1701 - protein, 9 aa, Severe acute respiratory syndrome coronavirus 2
IKESVQTFF

SEQ ID NO: 1702 - protein, 9 aa, Severe acute respiratory syndrome coronavirus 2
ESVQTFFKL

SEQ ID NO: 1703 - protein, 9 aa, Severe acute respiratory syndrome coronavirus 2
SVQTFFKLV

SEQ ID NO: 1704 - protein, 9 aa, Severe acute respiratory syndrome coronavirus 2
QTFFKLVNK

SEQ ID NO: 1705 - protein, 9 aa, Severe acute respiratory syndrome coronavirus 2
TFFKLVNKF

SEQ ID NO: 1706 - protein, 9 aa, Severe acute respiratory syndrome coronavirus 2
FFKLVNKFL

SEQ ID NO: 1707 - protein, 9 aa, Severe acute respiratory syndrome coronavirus 2
FKLVNKFLA

SEQ ID NO: 1708 - protein, 9 aa, Severe acute respiratory syndrome coronavirus 2
KLVNKFLAL

SEQ ID NO: 1709 - protein, 9 aa, Severe acute respiratory syndrome coronavirus 2
FLALCADSI

SEQ ID NO: 1710 - protein, 9 aa, Severe acute respiratory syndrome coronavirus 2
LALCADSII

SEQ ID NO: 1711 - protein, 9 aa, Severe acute respiratory syndrome coronavirus 2
ALCADSIII

SEQ ID NO: 1712 - protein, 9 aa, Severe acute respiratory syndrome coronavirus 2
DSIIIGGAK

SEQ ID NO: 1713 - protein, 9 aa, Severe acute respiratory syndrome coronavirus 2
IIIGGAKLK

SEQ ID NO: 1714 - protein, 9 aa, Severe acute respiratory syndrome coronavirus 2
GAKLKALNL

SEQ ID NO: 1715 - protein, 9 aa, Severe acute respiratory syndrome coronavirus 2
KALNLGETF

SEQ ID NO: 1716 - protein, 9 aa, Severe acute respiratory syndrome coronavirus 2
ALNLGETFV

SEQ ID NO: 1717 - protein, 9 aa, Severe acute respiratory syndrome coronavirus 2
TFVTHSKGL

SEQ ID NO: 1718 - protein, 9 aa, Severe acute respiratory syndrome coronavirus 2
FVTHSKGLY

SEQ ID NO: 1719 - protein, 9 aa, Severe acute respiratory syndrome coronavirus 2
VTHSKGLYR

SEQ ID NO: 1720 - protein, 9 aa, Severe acute respiratory syndrome coronavirus 2
KGLYRKCVK

SEQ ID NO: 1721 - protein, 9 aa, Severe acute respiratory syndrome coronavirus 2
LYRKCVKSR

SEQ ID NO: 1722 - protein, 9 aa, Severe acute respiratory syndrome coronavirus 2
KSREETGLL

SEQ ID NO: 1723 - protein, 9 aa, Severe acute respiratory syndrome coronavirus 2
SREETGLLM

SEQ ID NO: 1724 - protein, 9 aa, Severe acute respiratory syndrome coronavirus 2
REETGLLMP

SEQ ID NO: 1725 - protein, 9 aa, Severe acute respiratory syndrome coronavirus 2
EETGLLMPL

SEQ ID NO: 1726 - protein, 9 aa, Severe acute respiratory syndrome coronavirus 2
ETGLLMPLK

SEQ ID NO: 1727 - protein, 9 aa, Severe acute respiratory syndrome coronavirus 2
LLMPLKAPK

SEQ ID NO: 1728 - protein, 9 aa, Severe acute respiratory syndrome coronavirus 2
MPLKAPKEI

SEQ ID NO: 1729 - protein, 9 aa, Severe acute respiratory syndrome coronavirus 2
LKAPKEIIF

SEQ ID NO: 1730 - protein, 9 aa, Severe acute respiratory syndrome coronavirus 2
KAPKEIIFL

SEQ ID NO: 1731 - protein, 9 aa, Severe acute respiratory syndrome coronavirus 2
IIFLEGETL

SEQ ID NO: 1732 - protein, 9 aa, Severe acute respiratory syndrome coronavirus 2
FLEGETLPT

SEQ ID NO: 1733 - protein, 9 aa, Severe acute respiratory syndrome coronavirus 2
GETLPTEVL

SEQ ID NO: 1734 - protein, 9 aa, Severe acute respiratory syndrome coronavirus 2
LPTEVLTEE

SEQ ID NO: 1735 - protein, 9 aa, Severe acute respiratory syndrome coronavirus 2
TEVLTEEVV

SEQ ID NO: 1736 - protein, 9 aa, Severe acute respiratory syndrome coronavirus 2
VLTEEVVLK

SEQ ID NO: 1737 - protein, 9 aa, Severe acute respiratory syndrome coronavirus 2
LKTGDLQPL

SEQ ID NO: 1738 - protein, 9 aa, Severe acute respiratory syndrome coronavirus 2
LEQPTSEAV

SEQ ID NO: 1739 - protein, 9 aa, Severe acute respiratory syndrome coronavirus 2
QPTSEAVEA

SEQ ID NO: 1740 - protein, 9 aa, Severe acute respiratory syndrome coronavirus 2
SEAVEAPLV

SEQ ID NO: 1741 - protein, 9 aa, Severe acute respiratory syndrome coronavirus 2
VEAPLVGTP

SEQ ID NO: 1742 - protein, 9 aa, Severe acute respiratory syndrome coronavirus 2
EAPLVGTPV

SEQ ID NO: 1743 - protein, 9 aa, Severe acute respiratory syndrome coronavirus 2
APLVGTPVC

SEQ ID NO: 1744 - protein, 9 aa, Severe acute respiratory syndrome coronavirus 2
TPVCINGLM

SEQ ID NO: 1745 - protein, 9 aa, Severe acute respiratory syndrome coronavirus 2
LEIKDTEKY

SEQ ID NO: 1746 - protein, 9 aa, Severe acute respiratory syndrome coronavirus 2
KDTEKYCAL

SEQ ID NO: 1747 - protein, 9 aa, Severe acute respiratory syndrome coronavirus 2
TEKYCALAP

SEQ ID NO: 1748 - protein, 9 aa, Severe acute respiratory syndrome coronavirus 2
KYCALAPNM

SEQ ID NO: 1749 - protein, 9 aa, Severe acute respiratory syndrome coronavirus 2
YCALAPNMM

SEQ ID NO: 1750 - protein, 9 aa, Severe acute respiratory syndrome coronavirus 2
CALAPNMMV

SEQ ID NO: 1751 - protein, 9 aa, Severe acute respiratory syndrome coronavirus 2
ALAPNMMVT

SEQ ID NO: 1752 - protein, 9 aa, Severe acute respiratory syndrome coronavirus 2
NMMVTNNTF

SEQ ID NO: 1753 - protein, 9 aa, Severe acute respiratory syndrome coronavirus 2
MMVTNNTFT

SEQ ID NO: 1754 - protein, 9 aa, Severe acute respiratory syndrome coronavirus 2
MVTNNTFTL

SEQ ID NO: 1755 - protein, 9 aa, Severe acute respiratory syndrome coronavirus 2
VTNNTFTLK

SEQ ID NO: 1756 - protein, 9 aa, Severe acute respiratory syndrome coronavirus 2
NTFTLKGGA

SEQ ID NO: 1757 - protein, 9 aa, Severe acute respiratory syndrome coronavirus 2
FTLKGGAPT

SEQ ID NO: 1758 - protein, 9 aa, Severe acute respiratory syndrome coronavirus 2
TLKGGAPTK

SEQ ID NO: 1759 - protein, 9 aa, Severe acute respiratory syndrome coronavirus 2
VTFGDDTVI

SEQ ID NO: 1760 - protein, 9 aa, Severe acute respiratory syndrome coronavirus 2
FGDDTVIEV

SEQ ID NO: 1761 - protein, 9 aa, Severe acute respiratory syndrome coronavirus 2
DTVIEVQGY

SEQ ID NO: 1762 - protein, 9 aa, Severe acute respiratory syndrome coronavirus 2
TVIEVQGYK

SEQ ID NO: 1763 - protein, 9 aa, Severe acute respiratory syndrome coronavirus 2
IEVQGYKSV

SEQ ID NO: 1764 - protein, 9 aa, Severe acute respiratory syndrome coronavirus 2
GYKSVNITF

SEQ ID NO: 1765 - protein, 9 aa, Severe acute respiratory syndrome coronavirus 2
KSVNITFEL

SEQ ID NO: 1766 - protein, 9 aa, Severe acute respiratory syndrome coronavirus 2
NITFELDER

SEQ ID NO: 1767 - protein, 9 aa, Severe acute respiratory syndrome coronavirus 2
ITFELDERI

SEQ ID NO: 1768 - protein, 9 aa, Severe acute respiratory syndrome coronavirus 2
ELDERIDKV

SEQ ID NO: 1769 - protein, 9 aa, Severe acute respiratory syndrome coronavirus 2
RIDKVLNEK

SEQ ID NO: 1770 - protein, 9 aa, Severe acute respiratory syndrome coronavirus 2
KVLNEKCSA

SEQ ID NO: 1771 - protein, 9 aa, Severe acute respiratory syndrome coronavirus 2
VLNEKCSAY

SEQ ID NO: 1772 - protein, 9 aa, Severe acute respiratory syndrome coronavirus 2
NEKCSAYTV

SEQ ID NO: 1773 - protein, 9 aa, Severe acute respiratory syndrome coronavirus 2
YTVELGTEV

SEQ ID NO: 1774 - protein, 9 aa, Severe acute respiratory syndrome coronavirus 2
TEVNEFACV

SEQ ID NO: 1775 - protein, 9 aa, Severe acute respiratory syndrome coronavirus 2
EVNEFACVV

SEQ ID NO: 1776 - protein, 9 aa, Severe acute respiratory syndrome coronavirus 2
NEFACVVAD

SEQ ID NO: 1777 - protein, 9 aa, Severe acute respiratory syndrome coronavirus 2
FACVVADAV

SEQ ID NO: 1778 - protein, 9 aa, Severe acute respiratory syndrome coronavirus 2
CVVADAVIK

SEQ ID NO: 1779 - protein, 9 aa, Severe acute respiratory syndrome coronavirus 2
VADAVIKTL

SEQ ID NO: 1780 - protein, 9 aa, Severe acute respiratory syndrome coronavirus 2
AVIKTLQPV

SEQ ID NO: 1781 - protein, 9 aa, Severe acute respiratory syndrome coronavirus 2
KTLQPVSEL

SEQ ID NO: 1782 - protein, 9 aa, Severe acute respiratory syndrome coronavirus 2
TLQPVSELL

SEQ ID NO: 1783 - protein, 9 aa, Severe acute respiratory syndrome coronavirus 2
PVSELLTPL

SEQ ID NO: 1784 - protein, 9 aa, Severe acute respiratory syndrome coronavirus 2
SELLTPLGI

SEQ ID NO: 1785 - protein, 9 aa, Severe acute respiratory syndrome coronavirus 2
LLTPLGIDL

SEQ ID NO: 1786 - protein, 9 aa, Severe acute respiratory syndrome coronavirus 2
DEWSMATYY

SEQ ID NO: 1787 - protein, 9 aa, Severe acute respiratory syndrome coronavirus 2
EWSMATYYL

SEQ ID NO: 1788 - protein, 9 aa, Severe acute respiratory syndrome coronavirus 2
WSMATYYLF

SEQ ID NO: 1789 - protein, 9 aa, Severe acute respiratory syndrome coronavirus 2
YLFDESGEF

SEQ ID NO: 1790 - protein, 9 aa, Severe acute respiratory syndrome coronavirus 2
GEFKLASHM

SEQ ID NO: 1791 - protein, 9 aa, Severe acute respiratory syndrome coronavirus 2
KLASHMYCS

SEQ ID NO: 1792 - protein, 9 aa, Severe acute respiratory syndrome coronavirus 2
LASHMYCSF

SEQ ID NO: 1793 - protein, 9 aa, Severe acute respiratory syndrome coronavirus 2
ASHMYCSFY

SEQ ID NO: 1794 - protein, 9 aa, Severe acute respiratory syndrome coronavirus 2
HMYCSFYPP

SEQ ID NO: 1795 - protein, 9 aa, Severe acute respiratory syndrome coronavirus 2
EEFEPSTQY

SEQ ID NO: 1796 - protein, 9 aa, Severe acute respiratory syndrome coronavirus 2
FEPSTQYEY

SEQ ID NO: 1797 - protein, 9 aa, Severe acute respiratory syndrome coronavirus 2
YEYGTEDDY

SEQ ID NO: 1798 - protein, 9 aa, Severe acute respiratory syndrome coronavirus 2
DYQGKPLEF

SEQ ID NO: 1799 - protein, 9 aa, Severe acute respiratory syndrome coronavirus 2
LEFGATSAA

SEQ ID NO: 1800 - protein, 9 aa, Severe acute respiratory syndrome coronavirus 2
EFGATSAAL

SEQ ID NO: 1801 - protein, 9 aa, Severe acute respiratory syndrome coronavirus 2
SEDNQTTTI

SEQ ID NO: 1802 - protein, 9 aa, Severe acute respiratory syndrome coronavirus 2
NQTTTIQTI

SEQ ID NO: 1803 - protein, 9 aa, Severe acute respiratory syndrome coronavirus 2
QTTTIQTIV

SEQ ID NO: 1804 - protein, 9 aa, Severe acute respiratory syndrome coronavirus 2
TTIQTIVEV

SEQ ID NO: 1805 - protein, 9 aa, Severe acute respiratory syndrome coronavirus 2
TIVEVQPQL

SEQ ID NO: 1806 - protein, 9 aa, Severe acute respiratory syndrome coronavirus 2
VEVQPQLEM

SEQ ID NO: 1807 - protein, 9 aa, Severe acute respiratory syndrome coronavirus 2
QLEMELTPV

SEQ ID NO: 1808 - protein, 9 aa, Severe acute respiratory syndrome coronavirus 2
LEMELTPVV

SEQ ID NO: 1809 - protein, 9 aa, Severe acute respiratory syndrome coronavirus 2
MELTPVVQT

SEQ ID NO: 1810 - protein, 9 aa, Severe acute respiratory syndrome coronavirus 2
ELTPVVQTI

SEQ ID NO: 1811 - protein, 9 aa, Severe acute respiratory syndrome coronavirus 2
TPVVQTIEV

SEQ ID NO: 1812 - protein, 9 aa, Severe acute respiratory syndrome coronavirus 2
VQTIEVNSF

SEQ ID NO: 1813 - protein, 9 aa, Severe acute respiratory syndrome coronavirus 2
QTIEVNSFS

SEQ ID NO: 1814 - protein, 9 aa, Severe acute respiratory syndrome coronavirus 2
IEVNSFSGY

SEQ ID NO: 1815 - protein, 9 aa, Severe acute respiratory syndrome coronavirus 2
EVNSFSGYL

SEQ ID NO: 1816 - protein, 9 aa, Severe acute respiratory syndrome coronavirus 2
VNSFSGYLK

SEQ ID NO: 1817 - protein, 9 aa, Severe acute respiratory syndrome coronavirus 2
NSFSGYLKL

SEQ ID NO: 1818 - protein, 9 aa, Severe acute respiratory syndrome coronavirus 2
GYLKLTDNV

SEQ ID NO: 1819 - protein, 9 aa, Severe acute respiratory syndrome coronavirus 2
YLKLTDNVY

SEQ ID NO: 1820 - protein, 9 aa, Severe acute respiratory syndrome coronavirus 2
KLTDNVYIK

SEQ ID NO: 1821 - protein, 9 aa, Severe acute respiratory syndrome coronavirus 2
VYIKNADIV

SEQ ID NO: 1822 - protein, 9 aa, Severe acute respiratory syndrome coronavirus 2
KKVKPTVVV

SEQ ID NO: 1823 - protein, 9 aa, Severe acute respiratory syndrome coronavirus 2
KVKPTVVVN

SEQ ID NO: 1824 - protein, 9 aa, Severe acute respiratory syndrome coronavirus 2
KPTVVVNAA

SEQ ID NO: 1825 - protein, 9 aa, Severe acute respiratory syndrome coronavirus 2
TVVVNAANV

SEQ ID NO: 1826 - protein, 9 aa, Severe acute respiratory syndrome coronavirus 2
VVVNAANVY

SEQ ID NO: 1827 - protein, 9 aa, Severe acute respiratory syndrome coronavirus 2
VVNAANVYL

SEQ ID NO: 1828 - protein, 9 aa, Severe acute respiratory syndrome coronavirus 2
VNAANVYLK

SEQ ID NO: 1829 - protein, 9 aa, Severe acute respiratory syndrome coronavirus 2
VYLKHGGGV

SEQ ID NO: 1830 - protein, 9 aa, Severe acute respiratory syndrome coronavirus 2
YLKHGGGVA

SEQ ID NO: 1831 - protein, 9 aa, Severe acute respiratory syndrome coronavirus 2
GVAGALNKA

SEQ ID NO: 1832 - protein, 9 aa, Severe acute respiratory syndrome coronavirus 2
ALNKATNNA

SEQ ID NO: 1833 - protein, 9 aa, Severe acute respiratory syndrome coronavirus 2
LNKATNNAM

SEQ ID NO: 1834 - protein, 9 aa, Severe acute respiratory syndrome coronavirus 2
KATNNAMQV

SEQ ID NO: 1835 - protein, 9 aa, Severe acute respiratory syndrome coronavirus 2
AMQVESDDY

SEQ ID NO: 1836 - protein, 9 aa, Severe acute respiratory syndrome coronavirus 2
MQVESDDYI

SEQ ID NO: 1837 - protein, 9 aa, Severe acute respiratory syndrome coronavirus 2
VESDDYIAT

SEQ ID NO: 1838 - protein, 9 aa, Severe acute respiratory syndrome coronavirus 2
DYIATNGPL

SEQ ID NO: 1839 - protein, 9 aa, Severe acute respiratory syndrome coronavirus 2
YIATNGPLK

SEQ ID NO: 1840 - protein, 9 aa, Severe acute respiratory syndrome coronavirus 2
IATNGPLKV

SEQ ID NO: 1841 - protein, 9 aa, Severe acute respiratory syndrome coronavirus 2
GPLKVGGSC

SEQ ID NO: 1842 - protein, 9 aa, Severe acute respiratory syndrome coronavirus 2
LKVGGSCVL

SEQ ID NO: 1843 - protein, 9 aa, Severe acute respiratory syndrome coronavirus 2
VLSGHNLAK

SEQ ID NO: 1844 - protein, 9 aa, Severe acute respiratory syndrome coronavirus 2
GHNLAKHCL

SEQ ID NO: 1845 - protein, 9 aa, Severe acute respiratory syndrome coronavirus 2
NLAKHCLHV

SEQ ID NO: 1846 - protein, 9 aa, Severe acute respiratory syndrome coronavirus 2
LAKHCLHVV

SEQ ID NO: 1847 - protein, 9 aa, Severe acute respiratory syndrome coronavirus 2
CLHVVGPNV

SEQ ID NO: 1848 - protein, 9 aa, Severe acute respiratory syndrome coronavirus 2
HVVGPNVNK

SEQ ID NO: 1849 - protein, 9 aa, Severe acute respiratory syndrome coronavirus 2
DIQLLKSAY

SEQ ID NO: 1850 - protein, 9 aa, Severe acute respiratory syndrome coronavirus 2
LLKSAYENF

SEQ ID NO: 1851 - protein, 9 aa, Severe acute respiratory syndrome coronavirus 2
SAYENFNQH

SEQ ID NO: 1852 - protein, 9 aa, Severe acute respiratory syndrome coronavirus 2
YENFNQHEV

SEQ ID NO: 1853 - protein, 9 aa, Severe acute respiratory syndrome coronavirus 2
NFNQHEVLL

SEQ ID NO: 1854 - protein, 9 aa, Severe acute respiratory syndrome coronavirus 2
QHEVLLAPL

SEQ ID NO: 1855 - protein, 9 aa, Severe acute respiratory syndrome coronavirus 2
HEVLLAPLL

SEQ ID NO: 1856 - protein, 9 aa, Severe acute respiratory syndrome coronavirus 2
VLLAPLLSA

SEQ ID NO: 1857 - protein, 9 aa, Severe acute respiratory syndrome coronavirus 2
LLAPLLSAG

SEQ ID NO: 1858 - protein, 9 aa, Severe acute respiratory syndrome coronavirus 2
LAPLLSAGI

SEQ ID NO: 1859 - protein, 9 aa, Severe acute respiratory syndrome coronavirus 2
APLLSAGIF

SEQ ID NO: 1860 - protein, 9 aa, Severe acute respiratory syndrome coronavirus 2
LLSAGIFGA

SEQ ID NO: 1861 - protein, 9 aa, Severe acute respiratory syndrome coronavirus 2
FGADPIHSL

SEQ ID NO: 1862 - protein, 9 aa, Severe acute respiratory syndrome coronavirus 2
GADPIHSLR

SEQ ID NO: 1863 - protein, 9 aa, Severe acute respiratory syndrome coronavirus 2
SLRVCVDTV

SEQ ID NO: 1864 - protein, 9 aa, Severe acute respiratory syndrome coronavirus 2
LRVCVDTVR

SEQ ID NO: 1865 - protein, 9 aa, Severe acute respiratory syndrome coronavirus 2
CVDTVRTNV

SEQ ID NO: 1866 - protein, 9 aa, Severe acute respiratory syndrome coronavirus 2
DTVRTNVYL

SEQ ID NO: 1867 - protein, 9 aa, Severe acute respiratory syndrome coronavirus 2
TVRTNVYLA

SEQ ID NO: 1868 - protein, 9 aa, Severe acute respiratory syndrome coronavirus 2
VRTNVYLAV

SEQ ID NO: 1869 - protein, 9 aa, Severe acute respiratory syndrome coronavirus 2
RTNVYLAVF

SEQ ID NO: 1870 - protein, 9 aa, Severe acute respiratory syndrome coronavirus 2
NVYLAVFDK

SEQ ID NO: 1871 - protein, 9 aa, Severe acute respiratory syndrome coronavirus 2
YLAVFDKNL

SEQ ID NO: 1872 - protein, 9 aa, Severe acute respiratory syndrome coronavirus 2
LAVFDKNLY

SEQ ID NO: 1873 - protein, 9 aa, Severe acute respiratory syndrome coronavirus 2
NLYDKLVSS

SEQ ID NO: 1874 - protein, 9 aa, Severe acute respiratory syndrome coronavirus 2
LYDKLVSSF

SEQ ID NO: 1875 - protein, 9 aa, Severe acute respiratory syndrome coronavirus 2
YDKLVSSFL

SEQ ID NO: 1876 - protein, 9 aa, Severe acute respiratory syndrome coronavirus 2
KLVSSFLEM

SEQ ID NO: 1877 - protein, 9 aa, Severe acute respiratory syndrome coronavirus 2
LVSSFLEMK

SEQ ID NO: 1878 - protein, 9 aa, Severe acute respiratory syndrome coronavirus 2
SFLEMKSEK

SEQ ID NO: 1879 - protein, 9 aa, Severe acute respiratory syndrome coronavirus 2
LEMKSEKQV

SEQ ID NO: 1880 - protein, 9 aa, Severe acute respiratory syndrome coronavirus 2
SEKQVEQKI

SEQ ID NO: 1881 - protein, 9 aa, Severe acute respiratory syndrome coronavirus 2
VEQKIAEIP

SEQ ID NO: 1882 - protein, 9 aa, Severe acute respiratory syndrome coronavirus 2
IPKEEVKPF

SEQ ID NO: 1883 - protein, 9 aa, Severe acute respiratory syndrome coronavirus 2
FITESKPSV

SEQ ID NO: 1884 - protein, 9 aa, Severe acute respiratory syndrome coronavirus 2
ESKPSVEQR

SEQ ID NO: 1885 - protein, 9 aa, Severe acute respiratory syndrome coronavirus 2
KIKACVEEV

SEQ ID NO: 1886 - protein, 9 aa, Severe acute respiratory syndrome coronavirus 2
CVEEVTTTL

SEQ ID NO: 1887 - protein, 9 aa, Severe acute respiratory syndrome coronavirus 2
VTTTLEETK

SEQ ID NO: 1888 - protein, 9 aa, Severe acute respiratory syndrome coronavirus 2
TTTLEETKF

SEQ ID NO: 1889 - protein, 9 aa, Severe acute respiratory syndrome coronavirus 2
TTLEETKFL

SEQ ID NO: 1890 - protein, 9 aa, Severe acute respiratory syndrome coronavirus 2
ETKFLTENL

SEQ ID NO: 1891 - protein, 9 aa, Severe acute respiratory syndrome coronavirus 2
TKFLTENLL

SEQ ID NO: 1892 - protein, 9 aa, Severe acute respiratory syndrome coronavirus 2
KFLTENLLL

SEQ ID NO: 1893 - protein, 9 aa, Severe acute respiratory syndrome coronavirus 2
FLTENLLLY

SEQ ID NO: 1894 - protein, 9 aa, Severe acute respiratory syndrome coronavirus 2
LTENLLLYI

SEQ ID NO: 1895 - protein, 9 aa, Severe acute respiratory syndrome coronavirus 2
LYIDINGNL

SEQ ID NO: 1896 - protein, 9 aa, Severe acute respiratory syndrome coronavirus 2
NLHPDSATL

SEQ ID NO: 1897 - protein, 9 aa, Severe acute respiratory syndrome coronavirus 2
HPDSATLVS

SEQ ID NO: 1898 - protein, 9 aa, Severe acute respiratory syndrome coronavirus 2
DSATLVSDI

SEQ ID NO: 1899 - protein, 9 aa, Severe acute respiratory syndrome coronavirus 2
LVSDIDITF

SEQ ID NO: 1900 - protein, 9 aa, Severe acute respiratory syndrome coronavirus 2
VSDIDITFL

SEQ ID NO: 1901 - protein, 9 aa, Severe acute respiratory syndrome coronavirus 2
SDIDITFLK

SEQ ID NO: 1902 - protein, 9 aa, Severe acute respiratory syndrome coronavirus 2
DIDITFLKK

SEQ ID NO: 1903 - protein, 9 aa, Severe acute respiratory syndrome coronavirus 2
TFLKKDAPY

SEQ ID NO: 1904 - protein, 9 aa, Severe acute respiratory syndrome coronavirus 2
FLKKDAPYI

SEQ ID NO: 1905 - protein, 9 aa, Severe acute respiratory syndrome coronavirus 2
DAPYIVGDV

SEQ ID NO: 1906 - protein, 9 aa, Severe acute respiratory syndrome coronavirus 2
APYIVGDVV

SEQ ID NO: 1907 - protein, 9 aa, Severe acute respiratory syndrome coronavirus 2
VVQEGVLTA

SEQ ID NO: 1908 - protein, 9 aa, Severe acute respiratory syndrome coronavirus 2
VQEGVLTAV

SEQ ID NO: 1909 - protein, 9 aa, Severe acute respiratory syndrome coronavirus 2
QEGVLTAVV

SEQ ID NO: 1910 - protein, 9 aa, Severe acute respiratory syndrome coronavirus 2
VLTAVVIPT

SEQ ID NO: 1911 - protein, 9 aa, Severe acute respiratory syndrome coronavirus 2
LTAVVIPTK

SEQ ID NO: 1912 - protein, 9 aa, Severe acute respiratory syndrome coronavirus 2
TAVVIPTKK

SEQ ID NO: 1913 - protein, 9 aa, Severe acute respiratory syndrome coronavirus 2
KKAGGTTEM

SEQ ID NO: 1914 - protein, 9 aa, Severe acute respiratory syndrome coronavirus 2
GTTEMLAKA

SEQ ID NO: 1915 - protein, 9 aa, Severe acute respiratory syndrome coronavirus 2
EMLAKALRK

SEQ ID NO: 1916 - protein, 9 aa, Severe acute respiratory syndrome coronavirus 2
MLAKALRKV

SEQ ID NO: 1917 - protein, 9 aa, Severe acute respiratory syndrome coronavirus 2
LRKVPTDNY

SEQ ID NO: 1918 - protein, 9 aa, Severe acute respiratory syndrome coronavirus 2
RKVPTDNYI

SEQ ID NO: 1919 - protein, 9 aa, Severe acute respiratory syndrome coronavirus 2
VPTDNYITT

SEQ ID NO: 1920 - protein, 9 aa, Severe acute respiratory syndrome coronavirus 2
PTDNYITTY

SEQ ID NO: 1921 - protein, 9 aa, Severe acute respiratory syndrome coronavirus 2
ITTYPGQGL

SEQ ID NO: 1922 - protein, 9 aa, Severe acute respiratory syndrome coronavirus 2
YPGQGLNGY

SEQ ID NO: 1923 - protein, 9 aa, Severe acute respiratory syndrome coronavirus 2
GQGLNGYTV

SEQ ID NO: 1924 - protein, 9 aa, Severe acute respiratory syndrome coronavirus 2
NGYTVEEAK

SEQ ID NO: 1925 - protein, 9 aa, Severe acute respiratory syndrome coronavirus 2
YTVEEAKTV

SEQ ID NO: 1926 - protein, 9 aa, Severe acute respiratory syndrome coronavirus 2
TVLKKCKSA

SEQ ID NO: 1927 - protein, 9 aa, Severe acute respiratory syndrome coronavirus 2
VLKKCKSAF

SEQ ID NO: 1928 - protein, 9 aa, Severe acute respiratory syndrome coronavirus 2
LKKCKSAFY

SEQ ID NO: 1929 - protein, 9 aa, Severe acute respiratory syndrome coronavirus 2
KCKSAFYIL

SEQ ID NO: 1930 - protein, 9 aa, Severe acute respiratory syndrome coronavirus 2
KSAFYILPS

SEQ ID NO: 1931 - protein, 9 aa, Severe acute respiratory syndrome coronavirus 2
SAFYILPSI

SEQ ID NO: 1932 - protein, 9 aa, Severe acute respiratory syndrome coronavirus 2
AFYILPSII

SEQ ID NO: 1933 - protein, 9 aa, Severe acute respiratory syndrome coronavirus 2
LPSIISNEK

SEQ ID NO: 1934 - protein, 9 aa, Severe acute respiratory syndrome coronavirus 2
ISNEKQEIL

SEQ ID NO: 1935 - protein, 9 aa, Severe acute respiratory syndrome coronavirus 2
QEILGTVSW

SEQ ID NO: 1936 - protein, 9 aa, Severe acute respiratory syndrome coronavirus 2
ILGTVSWNL

SEQ ID NO: 1937 - protein, 9 aa, Severe acute respiratory syndrome coronavirus 2
LGTVSWNLR

SEQ ID NO: 1938 - protein, 9 aa, Severe acute respiratory syndrome coronavirus 2
TVSWNLREM

SEQ ID NO: 1939 - protein, 9 aa, Severe acute respiratory syndrome coronavirus 2
VSWNLREML

SEQ ID NO: 1940 - protein, 9 aa, Severe acute respiratory syndrome coronavirus 2
NLREMLAHA

SEQ ID NO: 1941 - protein, 9 aa, Severe acute respiratory syndrome coronavirus 2
REMLAHAEE

SEQ ID NO: 1942 - protein, 9 aa, Severe acute respiratory syndrome coronavirus 2
MLAHAEETR

SEQ ID NO: 1943 - protein, 9 aa, Severe acute respiratory syndrome coronavirus 2
AHAEETRKL

SEQ ID NO: 1944 - protein, 9 aa, Severe acute respiratory syndrome coronavirus 2
HAEETRKLM

SEQ ID NO: 1945 - protein, 9 aa, Severe acute respiratory syndrome coronavirus 2
EETRKLMPV

SEQ ID NO: 1946 - protein, 9 aa, Severe acute respiratory syndrome coronavirus 2
KLMPVCVET

SEQ ID NO: 1947 - protein, 9 aa, Severe acute respiratory syndrome coronavirus 2
MPVCVETKA

SEQ ID NO: 1948 - protein, 9 aa, Severe acute respiratory syndrome coronavirus 2
VETKAIVST

SEQ ID NO: 1949 - protein, 9 aa, Severe acute respiratory syndrome coronavirus 2
ETKAIVSTI

SEQ ID NO: 1950 - protein, 9 aa, Severe acute respiratory syndrome coronavirus 2
KAIVSTIQR

SEQ ID NO: 1951 - protein, 9 aa, Severe acute respiratory syndrome coronavirus 2
AIVSTIQRK

SEQ ID NO: 1952 - protein, 9 aa, Severe acute respiratory syndrome coronavirus 2
IVSTIQRKY

SEQ ID NO: 1953 - protein, 9 aa, Severe acute respiratory syndrome coronavirus 2
VSTIQRKYK

SEQ ID NO: 1954 - protein, 9 aa, Severe acute respiratory syndrome coronavirus 2
IQRKYKGIK

SEQ ID NO: 1955 - protein, 9 aa, Severe acute respiratory syndrome coronavirus 2
KIQEGVVDY

SEQ ID NO: 1956 - protein, 9 aa, Severe acute respiratory syndrome coronavirus 2
QEGVVDYGA

SEQ ID NO: 1957 - protein, 9 aa, Severe acute respiratory syndrome coronavirus 2
EGVVDYGAR

SEQ ID NO: 1958 - protein, 9 aa, Severe acute respiratory syndrome coronavirus 2
GVVDYGARF

SEQ ID NO: 1959 - protein, 9 aa, Severe acute respiratory syndrome coronavirus 2
VVDYGARFY

SEQ ID NO: 1960 - protein, 9 aa, Severe acute respiratory syndrome coronavirus 2
VDYGARFYF

SEQ ID NO: 1961 - protein, 9 aa, Severe acute respiratory syndrome coronavirus 2
DYGARFYFY

SEQ ID NO: 1962 - protein, 9 aa, Severe acute respiratory syndrome coronavirus 2
GARFYFYTS

SEQ ID NO: 1963 - protein, 9 aa, Severe acute respiratory syndrome coronavirus 2
ARFYFYTSK

SEQ ID NO: 1964 - protein, 9 aa, Severe acute respiratory syndrome coronavirus 2
FYFYTSKTT

SEQ ID NO: 1965 - protein, 9 aa, Severe acute respiratory syndrome coronavirus 2
YFYTSKTTV

SEQ ID NO: 1966 - protein, 9 aa, Severe acute respiratory syndrome coronavirus 2
FYTSKTTVA

SEQ ID NO: 1967 - protein, 9 aa, Severe acute respiratory syndrome coronavirus 2
YTSKTTVAS

SEQ ID NO: 1968 - protein, 9 aa, Severe acute respiratory syndrome coronavirus 2
TSKTTVASL

SEQ ID NO: 1969 - protein, 9 aa, Severe acute respiratory syndrome coronavirus 2
TTVASLINT

SEQ ID NO: 1970 - protein, 9 aa, Severe acute respiratory syndrome coronavirus 2
TVASLINTL

SEQ ID NO: 1971 - protein, 9 aa, Severe acute respiratory syndrome coronavirus 2
SLINTLNDL

SEQ ID NO: 1972 - protein, 9 aa, Severe acute respiratory syndrome coronavirus 2
TLNDLNETL

SEQ ID NO: 1973 - protein, 9 aa, Severe acute respiratory syndrome coronavirus 2
DLNETLVTM

SEQ ID NO: 1974 - protein, 9 aa, Severe acute respiratory syndrome coronavirus 2
NETLVTMPL

SEQ ID NO: 1975 - protein, 9 aa, Severe acute respiratory syndrome coronavirus 2
TLVTMPLGY

SEQ ID NO: 1976 - protein, 9 aa, Severe acute respiratory syndrome coronavirus 2
LVTMPLGYV

SEQ ID NO: 1977 - protein, 9 aa, Severe acute respiratory syndrome coronavirus 2
MPLGYVTHG

SEQ ID NO: 1978 - protein, 9 aa, Severe acute respiratory syndrome coronavirus 2
PLGYVTHGL

SEQ ID NO: 1979 - protein, 9 aa, Severe acute respiratory syndrome coronavirus 2
GYVTHGLNL

SEQ ID NO: 1980 - protein, 9 aa, Severe acute respiratory syndrome coronavirus 2
LNLEEAARY

SEQ ID NO: 1981 - protein, 9 aa, Severe acute respiratory syndrome coronavirus 2
EAARYMRSL

SEQ ID NO: 1982 - protein, 9 aa, Severe acute respiratory syndrome coronavirus 2
AARYMRSLK

SEQ ID NO: 1983 - protein, 9 aa, Severe acute respiratory syndrome coronavirus 2
ARYMRSLKV

SEQ ID NO: 1984 - protein, 9 aa, Severe acute respiratory syndrome coronavirus 2
YMRSLKVPA

SEQ ID NO: 1985 - protein, 9 aa, Severe acute respiratory syndrome coronavirus 2
MRSLKVPAT

SEQ ID NO: 1986 - protein, 9 aa, Severe acute respiratory syndrome coronavirus 2
RSLKVPATV

SEQ ID NO: 1987 - protein, 9 aa, Severe acute respiratory syndrome coronavirus 2
LKVPATVSV

SEQ ID NO: 1988 - protein, 9 aa, Severe acute respiratory syndrome coronavirus 2
VPATVSVSS

SEQ ID NO: 1989 - protein, 9 aa, Severe acute respiratory syndrome coronavirus 2
VSVSSPDAV

SEQ ID NO: 1990 - protein, 9 aa, Severe acute respiratory syndrome coronavirus 2
SSPDAVTAY

SEQ ID NO: 1991 - protein, 9 aa, Severe acute respiratory syndrome coronavirus 2
DAVTAYNGY

SEQ ID NO: 1992 - protein, 9 aa, Severe acute respiratory syndrome coronavirus 2
AVTAYNGYL

SEQ ID NO: 1993 - protein, 9 aa, Severe acute respiratory syndrome coronavirus 2
TAYNGYLTS

SEQ ID NO: 1994 - protein, 9 aa, Severe acute respiratory syndrome coronavirus 2
NGYLTSSSK

SEQ ID NO: 1995 - protein, 9 aa, Severe acute respiratory syndrome coronavirus 2
SSKTPEEHF

SEQ ID NO: 1996 - protein, 9 aa, Severe acute respiratory syndrome coronavirus 2
TPEEHFIET

SEQ ID NO: 1997 - protein, 9 aa, Severe acute respiratory syndrome coronavirus 2
EHFIETISL

SEQ ID NO: 1998 - protein, 9 aa, Severe acute respiratory syndrome coronavirus 2
ETISLAGSY

SEQ ID NO: 1999 - protein, 9 aa, Severe acute respiratory syndrome coronavirus 2
TISLAGSYK

SEQ ID NO: 2000 - protein, 9 aa, Severe acute respiratory syndrome coronavirus 2
AGSYKDWSY

SEQ ID NO: 2001 - protein, 9 aa, Severe acute respiratory syndrome coronavirus 2
SYKDWSYSG

SEQ ID NO: 2002 - protein, 9 aa, Severe acute respiratory syndrome coronavirus 2
SYSGQSTQL

SEQ ID NO: 2003 - protein, 9 aa, Severe acute respiratory syndrome coronavirus 2
QSTQLGIEF

SEQ ID NO: 2004 - protein, 9 aa, Severe acute respiratory syndrome coronavirus 2
TQLGIEFLK

SEQ ID NO: 2005 - protein, 9 aa, Severe acute respiratory syndrome coronavirus 2
QLGIEFLKR

SEQ ID NO: 2006 - protein, 9 aa, Severe acute respiratory syndrome coronavirus 2
FLKRGDKSV

SEQ ID NO: 2007 - protein, 9 aa, Severe acute respiratory syndrome coronavirus 2
LKRGDKSVY

SEQ ID NO: 2008 - protein, 9 aa, Severe acute respiratory syndrome coronavirus 2
KRGDKSVYY

SEQ ID NO: 2009 - protein, 9 aa, Severe acute respiratory syndrome coronavirus 2
SVYYTSNPT

SEQ ID NO: 2010 - protein, 9 aa, Severe acute respiratory syndrome coronavirus 2
VYYTSNPTT

SEQ ID NO: 2011 - protein, 9 aa, Severe acute respiratory syndrome coronavirus 2
YYTSNPTTF

SEQ ID NO: 2012 - protein, 9 aa, Severe acute respiratory syndrome coronavirus 2
YTSNPTTFH

SEQ ID NO: 2013 - protein, 9 aa, Severe acute respiratory syndrome coronavirus 2
TSNPTTFHL

SEQ ID NO: 2014 - protein, 9 aa, Severe acute respiratory syndrome coronavirus 2
TTFHLDGEV

SEQ ID NO: 2015 - protein, 9 aa, Severe acute respiratory syndrome coronavirus 2
TFHLDGEVI

SEQ ID NO: 2016 - protein, 9 aa, Severe acute respiratory syndrome coronavirus 2
HLDGEVITF

SEQ ID NO: 2017 - protein, 9 aa, Severe acute respiratory syndrome coronavirus 2
GEVITFDNL

SEQ ID NO: 2018 - protein, 9 aa, Severe acute respiratory syndrome coronavirus 2
EVITFDNLK

SEQ ID NO: 2019 - protein, 9 aa, Severe acute respiratory syndrome coronavirus 2
ITFDNLKTL

SEQ ID NO: 2020 - protein, 9 aa, Severe acute respiratory syndrome coronavirus 2
TFDNLKTLL

SEQ ID NO: 2021 - protein, 9 aa, Severe acute respiratory syndrome coronavirus 2
NLKTLLSLR

SEQ ID NO: 2022 - protein, 9 aa, Severe acute respiratory syndrome coronavirus 2
KTLLSLREV

SEQ ID NO: 2023 - protein, 9 aa, Severe acute respiratory syndrome coronavirus 2
TLLSLREVR

SEQ ID NO: 2024 - protein, 9 aa, Severe acute respiratory syndrome coronavirus 2
LSLREVRTI

SEQ ID NO: 2025 - protein, 9 aa, Severe acute respiratory syndrome coronavirus 2
SLREVRTIK

SEQ ID NO: 2026 - protein, 9 aa, Severe acute respiratory syndrome coronavirus 2
REVRTIKVF

SEQ ID NO: 2027 - protein, 9 aa, Severe acute respiratory syndrome coronavirus 2
RTIKVFTTV

SEQ ID NO: 2028 - protein, 9 aa, Severe acute respiratory syndrome coronavirus 2
KVFTTVDNI

SEQ ID NO: 2029 - protein, 9 aa, Severe acute respiratory syndrome coronavirus 2
FTTVDNINL

SEQ ID NO: 2030 - protein, 9 aa, Severe acute respiratory syndrome coronavirus 2
TTVDNINLH

SEQ ID NO: 2031 - protein, 9 aa, Severe acute respiratory syndrome coronavirus 2
NINLHTQVV

SEQ ID NO: 2032 - protein, 9 aa, Severe acute respiratory syndrome coronavirus 2
HTQVVDMSM

SEQ ID NO: 2033 - protein, 9 aa, Severe acute respiratory syndrome coronavirus 2
QVVDMSMTY

SEQ ID NO: 2034 - protein, 9 aa, Severe acute respiratory syndrome coronavirus 2
MSMTYGQQF

SEQ ID NO: 2035 - protein, 9 aa, Severe acute respiratory syndrome coronavirus 2
MTYGQQFGP

SEQ ID NO: 2036 - protein, 9 aa, Severe acute respiratory syndrome coronavirus 2
YGQQFGPTY

SEQ ID NO: 2037 - protein, 9 aa, Severe acute respiratory syndrome coronavirus 2
GQQFGPTYL

SEQ ID NO: 2038 - protein, 9 aa, Severe acute respiratory syndrome coronavirus 2
TKIKPHNSH

SEQ ID NO: 2039 - protein, 9 aa, Severe acute respiratory syndrome coronavirus 2
KIKPHNSHE

SEQ ID NO: 2040 - protein, 9 aa, Severe acute respiratory syndrome coronavirus 2
NSHEGKTFY

SEQ ID NO: 2041 - protein, 9 aa, Severe acute respiratory syndrome coronavirus 2
SHEGKTFYV

SEQ ID NO: 2042 - protein, 9 aa, Severe acute respiratory syndrome coronavirus 2
HEGKTFYVL

SEQ ID NO: 2043 - protein, 9 aa, Severe acute respiratory syndrome coronavirus 2
YVLPNDDTL

SEQ ID NO: 2044 - protein, 9 aa, Severe acute respiratory syndrome coronavirus 2
LPNDDTLRV

SEQ ID NO: 2045 - protein, 9 aa, Severe acute respiratory syndrome coronavirus 2
TLRVEAFEY

SEQ ID NO: 2046 - protein, 9 aa, Severe acute respiratory syndrome coronavirus 2
LRVEAFEYY

SEQ ID NO: 2047 - protein, 9 aa, Severe acute respiratory syndrome coronavirus 2
RVEAFEYYH

SEQ ID NO: 2048 - protein, 9 aa, Severe acute respiratory syndrome coronavirus 2
EAFEYYHTT

SEQ ID NO: 2049 - protein, 9 aa, Severe acute respiratory syndrome coronavirus 2
FEYYHTTDP

SEQ ID NO: 2050 - protein, 9 aa, Severe acute respiratory syndrome coronavirus 2
YYHTTDPSF

SEQ ID NO: 2051 - protein, 9 aa, Severe acute respiratory syndrome coronavirus 2
YHTTDPSFL

SEQ ID NO: 2052 - protein, 9 aa, Severe acute respiratory syndrome coronavirus 2
TTDPSFLGR

SEQ ID NO: 2053 - protein, 9 aa, Severe acute respiratory syndrome coronavirus 2
SFLGRYMSA

SEQ ID NO: 2054 - protein, 9 aa, Severe acute respiratory syndrome coronavirus 2
FLGRYMSAL

SEQ ID NO: 2055 - protein, 9 aa, Severe acute respiratory syndrome coronavirus 2
GRYMSALNH

SEQ ID NO: 2056 - protein, 9 aa, Severe acute respiratory syndrome coronavirus 2
RYMSALNHT

SEQ ID NO: 2057 - protein, 9 aa, Severe acute respiratory syndrome coronavirus 2
YMSALNHTK

SEQ ID NO: 2058 - protein, 9 aa, Severe acute respiratory syndrome coronavirus 2
MSALNHTKK

SEQ ID NO: 2059 - protein, 9 aa, Severe acute respiratory syndrome coronavirus 2
SALNHTKKW

SEQ ID NO: 2060 - protein, 9 aa, Severe acute respiratory syndrome coronavirus 2
ALNHTKKWK

SEQ ID NO: 2061 - protein, 9 aa, Severe acute respiratory syndrome coronavirus 2
HTKKWKYPQ

SEQ ID NO: 2062 - protein, 9 aa, Severe acute respiratory syndrome coronavirus 2
KWKYPQVNG

SEQ ID NO: 2063 - protein, 9 aa, Severe acute respiratory syndrome coronavirus 2
WKYPQVNGL

SEQ ID NO: 2064 - protein, 9 aa, Severe acute respiratory syndrome coronavirus 2
YPQVNGLTS

SEQ ID NO: 2065 - protein, 9 aa, Severe acute respiratory syndrome coronavirus 2
QVNGLTSIK

SEQ ID NO: 2066 - protein, 9 aa, Severe acute respiratory syndrome coronavirus 2
IKWADNNCY

SEQ ID NO: 2067 - protein, 9 aa, Severe acute respiratory syndrome coronavirus 2
KWADNNCYL

SEQ ID NO: 2068 - protein, 9 aa, Severe acute respiratory syndrome coronavirus 2
YLATALLTL

SEQ ID NO: 2069 - protein, 9 aa, Severe acute respiratory syndrome coronavirus 2
TALLTLQQI

SEQ ID NO: 2070 - protein, 9 aa, Severe acute respiratory syndrome coronavirus 2
LLTLQQIEL

SEQ ID NO: 2071 - protein, 9 aa, Severe acute respiratory syndrome coronavirus 2
LTLQQIELK

SEQ ID NO: 2072 - protein, 9 aa, Severe acute respiratory syndrome coronavirus 2
TLQQIELKF

SEQ ID NO: 2073 - protein, 9 aa, Severe acute respiratory syndrome coronavirus 2
IELKFNPPA

SEQ ID NO: 2074 - protein, 9 aa, Severe acute respiratory syndrome coronavirus 2
ELKFNPPAL

SEQ ID NO: 2075 - protein, 9 aa, Severe acute respiratory syndrome coronavirus 2
NPPALQDAY

SEQ ID NO: 2076 - protein, 9 aa, Severe acute respiratory syndrome coronavirus 2
ALQDAYYRA

SEQ ID NO: 2077 - protein, 9 aa, Severe acute respiratory syndrome coronavirus 2
LQDAYYRAR

SEQ ID NO: 2078 - protein, 9 aa, Severe acute respiratory syndrome coronavirus 2
YYRARAGEA

SEQ ID NO: 2079 - protein, 9 aa, Severe acute respiratory syndrome coronavirus 2
YRARAGEAA

SEQ ID NO: 2080 - protein, 9 aa, Severe acute respiratory syndrome coronavirus 2
RARAGEAAN

SEQ ID NO: 2081 - protein, 9 aa, Severe acute respiratory syndrome coronavirus 2
ARAGEAANF

SEQ ID NO: 2082 - protein, 9 aa, Severe acute respiratory syndrome coronavirus 2
GEAANFCAL

SEQ ID NO: 2083 - protein, 9 aa, Severe acute respiratory syndrome coronavirus 2
EAANFCALI

SEQ ID NO: 2084 - protein, 9 aa, Severe acute respiratory syndrome coronavirus 2
AANFCALIL

SEQ ID NO: 2085 - protein, 9 aa, Severe acute respiratory syndrome coronavirus 2
NFCALILAY

SEQ ID NO: 2086 - protein, 9 aa, Severe acute respiratory syndrome coronavirus 2
ALILAYCNK

SEQ ID NO: 2087 - protein, 9 aa, Severe acute respiratory syndrome coronavirus 2
ILAYCNKTV

SEQ ID NO: 2088 - protein, 9 aa, Severe acute respiratory syndrome coronavirus 2
YCNKTVGEL

SEQ ID NO: 2089 - protein, 9 aa, Severe acute respiratory syndrome coronavirus 2
KTVGELGDV

SEQ ID NO: 2090 - protein, 9 aa, Severe acute respiratory syndrome coronavirus 2
TVGELGDVR

SEQ ID NO: 2091 - protein, 9 aa, Severe acute respiratory syndrome coronavirus 2
DVRETMSYL

SEQ ID NO: 2092 - protein, 9 aa, Severe acute respiratory syndrome coronavirus 2
VRETMSYLF

SEQ ID NO: 2093 - protein, 9 aa, Severe acute respiratory syndrome coronavirus 2
ETMSYLFQH

SEQ ID NO: 2094 - protein, 9 aa, Severe acute respiratory syndrome coronavirus 2
TMSYLFQHA

SEQ ID NO: 2095 - protein, 9 aa, Severe acute respiratory syndrome coronavirus 2
MSYLFQHAN

SEQ ID NO: 2096 - protein, 9 aa, Severe acute respiratory syndrome coronavirus 2
SYLFQHANL

SEQ ID NO: 2097 - protein, 9 aa, Severe acute respiratory syndrome coronavirus 2
FQHANLDSC

SEQ ID NO: 2098 - protein, 9 aa, Severe acute respiratory syndrome coronavirus 2
HANLDSCKR

SEQ ID NO: 2099 - protein, 9 aa, Severe acute respiratory syndrome coronavirus 2
KRVLNVVCK

SEQ ID NO: 2100 - protein, 9 aa, Severe acute respiratory syndrome coronavirus 2
QQQTTLKGV

SEQ ID NO: 2101 - protein, 9 aa, Severe acute respiratory syndrome coronavirus 2
TTLKGVEAV

SEQ ID NO: 2102 - protein, 9 aa, Severe acute respiratory syndrome coronavirus 2
TLKGVEAVM

SEQ ID NO: 2103 - protein, 9 aa, Severe acute respiratory syndrome coronavirus 2
LKGVEAVMY

SEQ ID NO: 2104 - protein, 9 aa, Severe acute respiratory syndrome coronavirus 2
KGVEAVMYM

SEQ ID NO: 2105 - protein, 9 aa, Severe acute respiratory syndrome coronavirus 2
EAVMYMGTL

SEQ ID NO: 2106 - protein, 9 aa, Severe acute respiratory syndrome coronavirus 2
VMYMGTLSY

SEQ ID NO: 2107 - protein, 9 aa, Severe acute respiratory syndrome coronavirus 2
MYMGTLSYE

SEQ ID NO: 2108 - protein, 9 aa, Severe acute respiratory syndrome coronavirus 2
MGTLSYEQF

SEQ ID NO: 2109 - protein, 9 aa, Severe acute respiratory syndrome coronavirus 2
GTLSYEQFK

SEQ ID NO: 2110 - protein, 9 aa, Severe acute respiratory syndrome coronavirus 2
TLSYEQFKK

SEQ ID NO: 2111 - protein, 9 aa, Severe acute respiratory syndrome coronavirus 2
VQIPCTCGK

SEQ ID NO: 2112 - protein, 9 aa, Severe acute respiratory syndrome coronavirus 2
CTCGKQATK

SEQ ID NO: 2113 - protein, 9 aa, Severe acute respiratory syndrome coronavirus 2
YLVQQESPF

SEQ ID NO: 2114 - protein, 9 aa, Severe acute respiratory syndrome coronavirus 2
LVQQESPFV

SEQ ID NO: 2115 - protein, 9 aa, Severe acute respiratory syndrome coronavirus 2
VQQESPFVM

SEQ ID NO: 2116 - protein, 9 aa, Severe acute respiratory syndrome coronavirus 2
QQESPFVMM

SEQ ID NO: 2117 - protein, 9 aa, Severe acute respiratory syndrome coronavirus 2
QESPFVMMS

SEQ ID NO: 2118 - protein, 9 aa, Severe acute respiratory syndrome coronavirus 2
ESPFVMMSA

SEQ ID NO: 2119 - protein, 9 aa, Severe acute respiratory syndrome coronavirus 2
SPFVMMSAP

SEQ ID NO: 2120 - protein, 9 aa, Severe acute respiratory syndrome coronavirus 2
FVMMSAPPA

SEQ ID NO: 2121 - protein, 9 aa, Severe acute respiratory syndrome coronavirus 2
MMSAPPAQY

SEQ ID NO: 2122 - protein, 9 aa, Severe acute respiratory syndrome coronavirus 2
SAPPAQYEL

SEQ ID NO: 2123 - protein, 9 aa, Severe acute respiratory syndrome coronavirus 2
QYELKHGTF

SEQ ID NO: 2124 - protein, 9 aa, Severe acute respiratory syndrome coronavirus 2
YELKHGTFT

SEQ ID NO: 2125 - protein, 9 aa, Severe acute respiratory syndrome coronavirus 2
GTFTCASEY

SEQ ID NO: 2126 - protein, 9 aa, Severe acute respiratory syndrome coronavirus 2
CASEYTGNY

SEQ ID NO: 2127 - protein, 9 aa, Severe acute respiratory syndrome coronavirus 2
SEYTGNYQC

SEQ ID NO: 2128 - protein, 9 aa, Severe acute respiratory syndrome coronavirus 2
TGNYQCGHY

SEQ ID NO: 2129 - protein, 9 aa, Severe acute respiratory syndrome coronavirus 2
GNYQCGHYK

SEQ ID NO: 2130 - protein, 9 aa, Severe acute respiratory syndrome coronavirus 2
YQCGHYKHI

SEQ ID NO: 2131 - protein, 9 aa, Severe acute respiratory syndrome coronavirus 2
HITSKETLY

SEQ ID NO: 2132 - protein, 9 aa, Severe acute respiratory syndrome coronavirus 2
ETLYCIDGA

SEQ ID NO: 2133 - protein, 9 aa, Severe acute respiratory syndrome coronavirus 2
TLYCIDGAL

SEQ ID NO: 2134 - protein, 9 aa, Severe acute respiratory syndrome coronavirus 2
LYCIDGALL

SEQ ID NO: 2135 - protein, 9 aa, Severe acute respiratory syndrome coronavirus 2
CIDGALLTK

SEQ ID NO: 2136 - protein, 9 aa, Severe acute respiratory syndrome coronavirus 2
ALLTKSSEY

SEQ ID NO: 2137 - protein, 9 aa, Severe acute respiratory syndrome coronavirus 2
LLTKSSEYK

SEQ ID NO: 2138 - protein, 9 aa, Severe acute respiratory syndrome coronavirus 2
KSSEYKGPI

SEQ ID NO: 2139 - protein, 9 aa, Severe acute respiratory syndrome coronavirus 2
YKGPITDVF

SEQ ID NO: 2140 - protein, 9 aa, Severe acute respiratory syndrome coronavirus 2
DVFYKENSY

SEQ ID NO: 2141 - protein, 9 aa, Severe acute respiratory syndrome coronavirus 2
FYKENSYTT

SEQ ID NO: 2142 - protein, 9 aa, Severe acute respiratory syndrome coronavirus 2
KENSYTTTI

SEQ ID NO: 2143 - protein, 9 aa, Severe acute respiratory syndrome coronavirus 2
ENSYTTTIK

SEQ ID NO: 2144 - protein, 9 aa, Severe acute respiratory syndrome coronavirus 2
SYTTTIKPV

SEQ ID NO: 2145 - protein, 9 aa, Severe acute respiratory syndrome coronavirus 2
TTTIKPVTY

SEQ ID NO: 2146 - protein, 9 aa, Severe acute respiratory syndrome coronavirus 2
TTIKPVTYK

SEQ ID NO: 2147 - protein, 9 aa, Severe acute respiratory syndrome coronavirus 2
TIKPVTYKL

SEQ ID NO: 2148 - protein, 9 aa, Severe acute respiratory syndrome coronavirus 2
VTYKLDGVV

SEQ ID NO: 2149 - protein, 9 aa, Severe acute respiratory syndrome coronavirus 2
VVCTEIDPK

SEQ ID NO: 2150 - protein, 9 aa, Severe acute respiratory syndrome coronavirus 2
EIDPKLDNY

SEQ ID NO: 2151 - protein, 9 aa, Severe acute respiratory syndrome coronavirus 2
NYYKKDNSY

SEQ ID NO: 2152 - protein, 9 aa, Severe acute respiratory syndrome coronavirus 2
YYKKDNSYF

SEQ ID NO: 2153 - protein, 9 aa, Severe acute respiratory syndrome coronavirus 2
NSYFTEQPI

SEQ ID NO: 2154 - protein, 9 aa, Severe acute respiratory syndrome coronavirus 2
YFTEQPIDL

SEQ ID NO: 2155 - protein, 9 aa, Severe acute respiratory syndrome coronavirus 2
FTEQPIDLV

SEQ ID NO: 2156 - protein, 9 aa, Severe acute respiratory syndrome coronavirus 2
TEQPIDLVP

SEQ ID NO: 2157 - protein, 9 aa, Severe acute respiratory syndrome coronavirus 2
VPNQPYPNA

SEQ ID NO: 2158 - protein, 9 aa, Severe acute respiratory syndrome coronavirus 2
NQPYPNASF

SEQ ID NO: 2159 - protein, 9 aa, Severe acute respiratory syndrome coronavirus 2
YPNASFDNF

SEQ ID NO: 2160 - protein, 9 aa, Severe acute respiratory syndrome coronavirus 2
NASFDNFKF

SEQ ID NO: 2161 - protein, 9 aa, Severe acute respiratory syndrome coronavirus 2
ASFDNFKFV

SEQ ID NO: 2162 - protein, 9 aa, Severe acute respiratory syndrome coronavirus 2
KFVCDNIKF

SEQ ID NO: 2163 - protein, 9 aa, Severe acute respiratory syndrome coronavirus 2
FVCDNIKFA

SEQ ID NO: 2164 - protein, 9 aa, Severe acute respiratory syndrome coronavirus 2
KFADDLNQL

SEQ ID NO: 2165 - protein, 9 aa, Severe acute respiratory syndrome coronavirus 2
FADDLNQLT

SEQ ID NO: 2166 - protein, 9 aa, Severe acute respiratory syndrome coronavirus 2
DLNQLTGYK

SEQ ID NO: 2167 - protein, 9 aa, Severe acute respiratory syndrome coronavirus 2
TGYKKPASR

SEQ ID NO: 2168 - protein, 9 aa, Severe acute respiratory syndrome coronavirus 2
YKKPASREL

SEQ ID NO: 2169 - protein, 9 aa, Severe acute respiratory syndrome coronavirus 2
KPASRELKV

SEQ ID NO: 2170 - protein, 9 aa, Severe acute respiratory syndrome coronavirus 2
ASRELKVTF

SEQ ID NO: 2171 - protein, 9 aa, Severe acute respiratory syndrome coronavirus 2
RELKVTFFP

SEQ ID NO: 2172 - protein, 9 aa, Severe acute respiratory syndrome coronavirus 2
LKVTFFPDL

SEQ ID NO: 2173 - protein, 9 aa, Severe acute respiratory syndrome coronavirus 2
FFPDLNGDV

SEQ ID NO: 2174 - protein, 9 aa, Severe acute respiratory syndrome coronavirus 2
FPDLNGDVV

SEQ ID NO: 2175 - protein, 9 aa, Severe acute respiratory syndrome coronavirus 2
DLNGDVVAI

SEQ ID NO: 2176 - protein, 9 aa, Severe acute respiratory syndrome coronavirus 2
VVAIDYKHY

SEQ ID NO: 2177 - protein, 9 aa, Severe acute respiratory syndrome coronavirus 2
DYKHYTPSF

SEQ ID NO: 2178 - protein, 9 aa, Severe acute respiratory syndrome coronavirus 2
SFKKGAKLL

SEQ ID NO: 2179 - protein, 9 aa, Severe acute respiratory syndrome coronavirus 2
KLLHKPIVW

SEQ ID NO: 2180 - protein, 9 aa, Severe acute respiratory syndrome coronavirus 2
NATNKATYK

SEQ ID NO: 2181 - protein, 9 aa, Severe acute respiratory syndrome coronavirus 2
KATYKPNTW

SEQ ID NO: 2182 - protein, 9 aa, Severe acute respiratory syndrome coronavirus 2
TYKPNTWCI

SEQ ID NO: 2183 - protein, 9 aa, Severe acute respiratory syndrome coronavirus 2
NTWCIRCLW

SEQ ID NO: 2184 - protein, 9 aa, Severe acute respiratory syndrome coronavirus 2
CIRCLWSTK

SEQ ID NO: 2185 - protein, 9 aa, Severe acute respiratory syndrome coronavirus 2
KPVETSNSF

SEQ ID NO: 2186 - protein, 9 aa, Severe acute respiratory syndrome coronavirus 2
VETSNSFDV

SEQ ID NO: 2187 - protein, 9 aa, Severe acute respiratory syndrome coronavirus 2
ETSNSFDVL

SEQ ID NO: 2188 - protein, 9 aa, Severe acute respiratory syndrome coronavirus 2
TSNSFDVLK

SEQ ID NO: 2189 - protein, 9 aa, Severe acute respiratory syndrome coronavirus 2
LKSEDAQGM

SEQ ID NO: 2190 - protein, 9 aa, Severe acute respiratory syndrome coronavirus 2
LACEDLKPV

SEQ ID NO: 2191 - protein, 9 aa, Severe acute respiratory syndrome coronavirus 2
DLKPVSEEV

SEQ ID NO: 2192 - protein, 9 aa, Severe acute respiratory syndrome coronavirus 2
SEEVVENPT

SEQ ID NO: 2193 - protein, 9 aa, Severe acute respiratory syndrome coronavirus 2
EEVVENPTI

SEQ ID NO: 2194 - protein, 9 aa, Severe acute respiratory syndrome coronavirus 2
VVENPTIQK

SEQ ID NO: 2195 - protein, 9 aa, Severe acute respiratory syndrome coronavirus 2
NPTIQKDVL

SEQ ID NO: 2196 - protein, 9 aa, Severe acute respiratory syndrome coronavirus 2
KTTEVVGDI

SEQ ID NO: 2197 - protein, 9 aa, Severe acute respiratory syndrome coronavirus 2
TEVVGDIIL

SEQ ID NO: 2198 - protein, 9 aa, Severe acute respiratory syndrome coronavirus 2
EVVGDIILK

SEQ ID NO: 2199 - protein, 9 aa, Severe acute respiratory syndrome coronavirus 2
ILKPANNSL

SEQ ID NO: 2200 - protein, 9 aa, Severe acute respiratory syndrome coronavirus 2
KPANNSLKI

SEQ ID NO: 2201 - protein, 9 aa, Severe acute respiratory syndrome coronavirus 2
NSLKITEEV

SEQ ID NO: 2202 - protein, 9 aa, Severe acute respiratory syndrome coronavirus 2
TEEVGHTDL

SEQ ID NO: 2203 - protein, 9 aa, Severe acute respiratory syndrome coronavirus 2
EEVGHTDLM

SEQ ID NO: 2204 - protein, 9 aa, Severe acute respiratory syndrome coronavirus 2
GHTDLMAAY

SEQ ID NO: 2205 - protein, 9 aa, Severe acute respiratory syndrome coronavirus 2
HTDLMAAYV

SEQ ID NO: 2206 - protein, 9 aa, Severe acute respiratory syndrome coronavirus 2
LMAAYVDNS

SEQ ID NO: 2207 - protein, 9 aa, Severe acute respiratory syndrome coronavirus 2
MAAYVDNSS

SEQ ID NO: 2208 - protein, 9 aa, Severe acute respiratory syndrome coronavirus 2
AAYVDNSSL

SEQ ID NO: 2209 - protein, 9 aa, Severe acute respiratory syndrome coronavirus 2
YVDNSSLTI

SEQ ID NO: 2210 - protein, 9 aa, Severe acute respiratory syndrome coronavirus 2
DNSSLTIKK

SEQ ID NO: 2211 - protein, 9 aa, Severe acute respiratory syndrome coronavirus 2
LTIKKPNEL

SEQ ID NO: 2212 - protein, 9 aa, Severe acute respiratory syndrome coronavirus 2
KPNELSRVL

SEQ ID NO: 2213 - protein, 9 aa, Severe acute respiratory syndrome coronavirus 2
NELSRVLGL

SEQ ID NO: 2214 - protein, 9 aa, Severe acute respiratory syndrome coronavirus 2
ELSRVLGLK

SEQ ID NO: 2215 - protein, 9 aa, Severe acute respiratory syndrome coronavirus 2
SRVLGLKTL

SEQ ID NO: 2216 - protein, 9 aa, Severe acute respiratory syndrome coronavirus 2
RVLGLKTLA

SEQ ID NO: 2217 - protein, 9 aa, Severe acute respiratory syndrome coronavirus 2
LKTLATHGL

SEQ ID NO: 2218 - protein, 9 aa, Severe acute respiratory syndrome coronavirus 2
KTLATHGLA

SEQ ID NO: 2219 - protein, 9 aa, Severe acute respiratory syndrome coronavirus 2
TLATHGLAA

SEQ ID NO: 2220 - protein, 9 aa, Severe acute respiratory syndrome coronavirus 2
LATHGLAAV

SEQ ID NO: 2221 - protein, 9 aa, Severe acute respiratory syndrome coronavirus 2
LAAVNSVPW

SEQ ID NO: 2222 - protein, 9 aa, Severe acute respiratory syndrome coronavirus 2
VPWDTIANY

SEQ ID NO: 2223 - protein, 9 aa, Severe acute respiratory syndrome coronavirus 2
TIANYAKPF

SEQ ID NO: 2224 - protein, 9 aa, Severe acute respiratory syndrome coronavirus 2
IANYAKPFL

SEQ ID NO: 2225 - protein, 9 aa, Severe acute respiratory syndrome coronavirus 2
NYAKPFLNK

SEQ ID NO: 2226 - protein, 9 aa, Severe acute respiratory syndrome coronavirus 2
YAKPFLNKV

SEQ ID NO: 2227 - protein, 9 aa, Severe acute respiratory syndrome coronavirus 2
FLNKVVSTT

SEQ ID NO: 2228 - protein, 9 aa, Severe acute respiratory syndrome coronavirus 2
KVVSTTTNI

SEQ ID NO: 2229 - protein, 9 aa, Severe acute respiratory syndrome coronavirus 2
VVSTTTNIV

SEQ ID NO: 2230 - protein, 9 aa, Severe acute respiratory syndrome coronavirus 2
STTTNIVTR

SEQ ID NO: 2231 - protein, 9 aa, Severe acute respiratory syndrome coronavirus 2
TTNIVTRCL

SEQ ID NO: 2232 - protein, 9 aa, Severe acute respiratory syndrome coronavirus 2
NIVTRCLNR

SEQ ID NO: 2233 - protein, 9 aa, Severe acute respiratory syndrome coronavirus 2
IVTRCLNRV

SEQ ID NO: 2234 - protein, 9 aa, Severe acute respiratory syndrome coronavirus 2
VTRCLNRVC

SEQ ID NO: 2235 - protein, 9 aa, Severe acute respiratory syndrome coronavirus 2
CLNRVCTNY

SEQ ID NO: 2236 - protein, 9 aa, Severe acute respiratory syndrome coronavirus 2
NRVCTNYMP

SEQ ID NO: 2237 - protein, 9 aa, Severe acute respiratory syndrome coronavirus 2
RVCTNYMPY

SEQ ID NO: 2238 - protein, 9 aa, Severe acute respiratory syndrome coronavirus 2
CTNYMPYFF

SEQ ID NO: 2239 - protein, 9 aa, Severe acute respiratory syndrome coronavirus 2
NYMPYFFTL

SEQ ID NO: 2240 - protein, 9 aa, Severe acute respiratory syndrome coronavirus 2
YMPYFFTLL

SEQ ID NO: 2241 - protein, 9 aa, Severe acute respiratory syndrome coronavirus 2
MPYFFTLLL

SEQ ID NO: 2242 - protein, 9 aa, Severe acute respiratory syndrome coronavirus 2
YFFTLLLQL

SEQ ID NO: 2243 - protein, 9 aa, Severe acute respiratory syndrome coronavirus 2
TLLLQLCTF

SEQ ID NO: 2244 - protein, 9 aa, Severe acute respiratory syndrome coronavirus 2
LLLQLCTFT

SEQ ID NO: 2245 - protein, 9 aa, Severe acute respiratory syndrome coronavirus 2
LLQLCTFTR

SEQ ID NO: 2246 - protein, 9 aa, Severe acute respiratory syndrome coronavirus 2
TFTRSTNSR

SEQ ID NO: 2247 - protein, 9 aa, Severe acute respiratory syndrome coronavirus 2
FTRSTNSRI

SEQ ID NO: 2248 - protein, 9 aa, Severe acute respiratory syndrome coronavirus 2
RSTNSRIKA

SEQ ID NO: 2249 - protein, 9 aa, Severe acute respiratory syndrome coronavirus 2
STNSRIKAS

SEQ ID NO: 2250 - protein, 9 aa, Severe acute respiratory syndrome coronavirus 2
SRIKASMPT

SEQ ID NO: 2251 - protein, 9 aa, Severe acute respiratory syndrome coronavirus 2
RIKASMPTT

SEQ ID NO: 2252 - protein, 9 aa, Severe acute respiratory syndrome coronavirus 2
IKASMPTTI

SEQ ID NO: 2253 - protein, 9 aa, Severe acute respiratory syndrome coronavirus 2
KASMPTTIA

SEQ ID NO: 2254 - protein, 9 aa, Severe acute respiratory syndrome coronavirus 2
ASMPTTIAK

SEQ ID NO: 2255 - protein, 9 aa, Severe acute respiratory syndrome coronavirus 2
MPTTIAKNT

SEQ ID NO: 2256 - protein, 9 aa, Severe acute respiratory syndrome coronavirus 2
TTIAKNTVK

SEQ ID NO: 2257 - protein, 9 aa, Severe acute respiratory syndrome coronavirus 2
IAKNTVKSV

SEQ ID NO: 2258 - protein, 9 aa, Severe acute respiratory syndrome coronavirus 2
NTVKSVGKF

SEQ ID NO: 2259 - protein, 9 aa, Severe acute respiratory syndrome coronavirus 2
SVGKFCLEA

SEQ ID NO: 2260 - protein, 9 aa, Severe acute respiratory syndrome coronavirus 2
GKFCLEASF

SEQ ID NO: 2261 - protein, 9 aa, Severe acute respiratory syndrome coronavirus 2
FCLEASFNY

SEQ ID NO: 2262 - protein, 9 aa, Severe acute respiratory syndrome coronavirus 2
CLEASFNYL

SEQ ID NO: 2263 - protein, 9 aa, Severe acute respiratory syndrome coronavirus 2
LEASFNYLK

SEQ ID NO: 2264 - protein, 9 aa, Severe acute respiratory syndrome coronavirus 2
FNYLKSPNF

SEQ ID NO: 2265 - protein, 9 aa, Severe acute respiratory syndrome coronavirus 2
YLKSPNFSK

SEQ ID NO: 2266 - protein, 9 aa, Severe acute respiratory syndrome coronavirus 2
LKSPNFSKL

SEQ ID NO: 2267 - protein, 9 aa, Severe acute respiratory syndrome coronavirus 2
KSPNFSKLI

SEQ ID NO: 2268 - protein, 9 aa, Severe acute respiratory syndrome coronavirus 2
NFSKLINII

SEQ ID NO: 2269 - protein, 9 aa, Severe acute respiratory syndrome coronavirus 2
FSKLINIII

SEQ ID NO: 2270 - protein, 9 aa, Severe acute respiratory syndrome coronavirus 2
KLINIIIWF

SEQ ID NO: 2271 - protein, 9 aa, Severe acute respiratory syndrome coronavirus 2
LINIIIWFL

SEQ ID NO: 2272 - protein, 9 aa, Severe acute respiratory syndrome coronavirus 2
NIIIWFLLL

SEQ ID NO: 2273 - protein, 9 aa, Severe acute respiratory syndrome coronavirus 2
IIWFLLLSV

SEQ ID NO: 2274 - protein, 9 aa, Severe acute respiratory syndrome coronavirus 2
FLLLSVCLG

SEQ ID NO: 2275 - protein, 9 aa, Severe acute respiratory syndrome coronavirus 2
LLLSVCLGS

SEQ ID NO: 2276 - protein, 9 aa, Severe acute respiratory syndrome coronavirus 2
LLSVCLGSL

SEQ ID NO: 2277 - protein, 9 aa, Severe acute respiratory syndrome coronavirus 2
LSVCLGSLI

SEQ ID NO: 2278 - protein, 9 aa, Severe acute respiratory syndrome coronavirus 2
SVCLGSLIY

SEQ ID NO: 2279 - protein, 9 aa, Severe acute respiratory syndrome coronavirus 2
CLGSLIYST

SEQ ID NO: 2280 - protein, 9 aa, Severe acute respiratory syndrome coronavirus 2
SLIYSTAAL

SEQ ID NO: 2281 - protein, 9 aa, Severe acute respiratory syndrome coronavirus 2
IYSTAALGV

SEQ ID NO: 2282 - protein, 9 aa, Severe acute respiratory syndrome coronavirus 2
YSTAALGVL

SEQ ID NO: 2283 - protein, 9 aa, Severe acute respiratory syndrome coronavirus 2
STAALGVLM

SEQ ID NO: 2284 - protein, 9 aa, Severe acute respiratory syndrome coronavirus 2
ALGVLMSNL

SEQ ID NO: 2285 - protein, 9 aa, Severe acute respiratory syndrome coronavirus 2
GVLMSNLGM

SEQ ID NO: 2286 - protein, 9 aa, Severe acute respiratory syndrome coronavirus 2
VLMSNLGMP

SEQ ID NO: 2287 - protein, 9 aa, Severe acute respiratory syndrome coronavirus 2
LMSNLGMPS

SEQ ID NO: 2288 - protein, 9 aa, Severe acute respiratory syndrome coronavirus 2
MSNLGMPSY

SEQ ID NO: 2289 - protein, 9 aa, Severe acute respiratory syndrome coronavirus 2
GMPSYCTGY

SEQ ID NO: 2290 - protein, 9 aa, Severe acute respiratory syndrome coronavirus 2
MPSYCTGYR

SEQ ID NO: 2291 - protein, 9 aa, Severe acute respiratory syndrome coronavirus 2
EGYLNSTNV

SEQ ID NO: 2292 - protein, 9 aa, Severe acute respiratory syndrome coronavirus 2
YLNSTNVTI

SEQ ID NO: 2293 - protein, 9 aa, Severe acute respiratory syndrome coronavirus 2
STNVTIATY

SEQ ID NO: 2294 - protein, 9 aa, Severe acute respiratory syndrome coronavirus 2
IATYCTGSI

SEQ ID NO: 2295 - protein, 9 aa, Severe acute respiratory syndrome coronavirus 2
CTGSIPCSV

SEQ ID NO: 2296 - protein, 9 aa, Severe acute respiratory syndrome coronavirus 2
GSIPCSVCL

SEQ ID NO: 2297 - protein, 9 aa, Severe acute respiratory syndrome coronavirus 2
SGLDSLDTY

SEQ ID NO: 2298 - protein, 9 aa, Severe acute respiratory syndrome coronavirus 2
DSLDTYPSL

SEQ ID NO: 2299 - protein, 9 aa, Severe acute respiratory syndrome coronavirus 2
DTYPSLETI

SEQ ID NO: 2300 - protein, 9 aa, Severe acute respiratory syndrome coronavirus 2
YPSLETIQI

SEQ ID NO: 2301 - protein, 9 aa, Severe acute respiratory syndrome coronavirus 2
SLETIQITI

SEQ ID NO: 2302 - protein, 9 aa, Severe acute respiratory syndrome coronavirus 2
ETIQITISS

SEQ ID NO: 2303 - protein, 9 aa, Severe acute respiratory syndrome coronavirus 2
TIQITISSF

SEQ ID NO: 2304 - protein, 9 aa, Severe acute respiratory syndrome coronavirus 2
IQITISSFK

SEQ ID NO: 2305 - protein, 9 aa, Severe acute respiratory syndrome coronavirus 2
QITISSFKW

SEQ ID NO: 2306 - protein, 9 aa, Severe acute respiratory syndrome coronavirus 2
TISSFKWDL

SEQ ID NO: 2307 - protein, 9 aa, Severe acute respiratory syndrome coronavirus 2
SSFKWDLTA

SEQ ID NO: 2308 - protein, 9 aa, Severe acute respiratory syndrome coronavirus 2
SFKWDLTAF

SEQ ID NO: 2309 - protein, 9 aa, Severe acute respiratory syndrome coronavirus 2
KWDLTAFGL

SEQ ID NO: 2310 - protein, 9 aa, Severe acute respiratory syndrome coronavirus 2
WDLTAFGLV

SEQ ID NO: 2311 - protein, 9 aa, Severe acute respiratory syndrome coronavirus 2
TAFGLVAEW

SEQ ID NO: 2312 - protein, 9 aa, Severe acute respiratory syndrome coronavirus 2
AFGLVAEWF

SEQ ID NO: 2313 - protein, 9 aa, Severe acute respiratory syndrome coronavirus 2
FGLVAEWFL

SEQ ID NO: 2314 - protein, 9 aa, Severe acute respiratory syndrome coronavirus 2
GLVAEWFLA

SEQ ID NO: 2315 - protein, 9 aa, Severe acute respiratory syndrome coronavirus 2
LVAEWFLAY

SEQ ID NO: 2316 - protein, 9 aa, Severe acute respiratory syndrome coronavirus 2
VAEWFLAYI

SEQ ID NO: 2317 - protein, 9 aa, Severe acute respiratory syndrome coronavirus 2
AEWFLAYIL

SEQ ID NO: 2318 - protein, 9 aa, Severe acute respiratory syndrome coronavirus 2
EWFLAYILF

SEQ ID NO: 2319 - protein, 9 aa, Severe acute respiratory syndrome coronavirus 2
FLAYILFTR

SEQ ID NO: 2320 - protein, 9 aa, Severe acute respiratory syndrome coronavirus 2
LAYILFTRF

SEQ ID NO: 2321 - protein, 9 aa, Severe acute respiratory syndrome coronavirus 2
AYILFTRFF

SEQ ID NO: 2322 - protein, 9 aa, Severe acute respiratory syndrome coronavirus 2
YILFTRFFY

SEQ ID NO: 2323 - protein, 9 aa, Severe acute respiratory syndrome coronavirus 2
ILFTRFFYV

SEQ ID NO: 2324 - protein, 9 aa, Severe acute respiratory syndrome coronavirus 2
LFTRFFYVL

SEQ ID NO: 2325 - protein, 9 aa, Severe acute respiratory syndrome coronavirus 2
FTRFFYVLG

SEQ ID NO: 2326 - protein, 9 aa, Severe acute respiratory syndrome coronavirus 2
TRFFYVLGL

SEQ ID NO: 2327 - protein, 9 aa, Severe acute respiratory syndrome coronavirus 2
RFFYVLGLA

SEQ ID NO: 2328 - protein, 9 aa, Severe acute respiratory syndrome coronavirus 2
FYVLGLAAI

SEQ ID NO: 2329 - protein, 9 aa, Severe acute respiratory syndrome coronavirus 2
YVLGLAAIM

SEQ ID NO: 2330 - protein, 9 aa, Severe acute respiratory syndrome coronavirus 2
GLAAIMQLF

SEQ ID NO: 2331 - protein, 9 aa, Severe acute respiratory syndrome coronavirus 2
LAAIMQLFF

SEQ ID NO: 2332 - protein, 9 aa, Severe acute respiratory syndrome coronavirus 2
AIMQLFFSY

SEQ ID NO: 2333 - protein, 9 aa, Severe acute respiratory syndrome coronavirus 2
IMQLFFSYF

SEQ ID NO: 2334 - protein, 9 aa, Severe acute respiratory syndrome coronavirus 2
MQLFFSYFA

SEQ ID NO: 2335 - protein, 9 aa, Severe acute respiratory syndrome coronavirus 2
QLFFSYFAV

SEQ ID NO: 2336 - protein, 9 aa, Severe acute respiratory syndrome coronavirus 2
LFFSYFAVH

SEQ ID NO: 2337 - protein, 9 aa, Severe acute respiratory syndrome coronavirus 2
FFSYFAVHF

SEQ ID NO: 2338 - protein, 9 aa, Severe acute respiratory syndrome coronavirus 2
FSYFAVHFI

SEQ ID NO: 2339 - protein, 9 aa, Severe acute respiratory syndrome coronavirus 2
FAVHFISNS

SEQ ID NO: 2340 - protein, 9 aa, Severe acute respiratory syndrome coronavirus 2
AVHFISNSW

SEQ ID NO: 2341 - protein, 9 aa, Severe acute respiratory syndrome coronavirus 2
VHFISNSWL

SEQ ID NO: 2342 - protein, 9 aa, Severe acute respiratory syndrome coronavirus 2
HFISNSWLM

SEQ ID NO: 2343 - protein, 9 aa, Severe acute respiratory syndrome coronavirus 2
FISNSWLMW

SEQ ID NO: 2344 - protein, 9 aa, Severe acute respiratory syndrome coronavirus 2
ISNSWLMWL

SEQ ID NO: 2345 - protein, 9 aa, Severe acute respiratory syndrome coronavirus 2
SNSWLMWLI

SEQ ID NO: 2346 - protein, 9 aa, Severe acute respiratory syndrome coronavirus 2
WLMWLIINL

SEQ ID NO: 2347 - protein, 9 aa, Severe acute respiratory syndrome coronavirus 2
LMWLIINLV

SEQ ID NO: 2348 - protein, 9 aa, Severe acute respiratory syndrome coronavirus 2
WLIINLVQM

SEQ ID NO: 2349 - protein, 9 aa, Severe acute respiratory syndrome coronavirus 2
LIINLVQMA

SEQ ID NO: 2350 - protein, 9 aa, Severe acute respiratory syndrome coronavirus 2
VQMAPISAM

SEQ ID NO: 2351 - protein, 9 aa, Severe acute respiratory syndrome coronavirus 2
QMAPISAMV

SEQ ID NO: 2352 - protein, 9 aa, Severe acute respiratory syndrome coronavirus 2
MAPISAMVR

SEQ ID NO: 2353 - protein, 9 aa, Severe acute respiratory syndrome coronavirus 2
APISAMVRM

SEQ ID NO: 2354 - protein, 9 aa, Severe acute respiratory syndrome coronavirus 2
ISAMVRMYI

SEQ ID NO: 2355 - protein, 9 aa, Severe acute respiratory syndrome coronavirus 2
SAMVRMYIF

SEQ ID NO: 2356 - protein, 9 aa, Severe acute respiratory syndrome coronavirus 2
AMVRMYIFF

SEQ ID NO: 2357 - protein, 9 aa, Severe acute respiratory syndrome coronavirus 2
MVRMYIFFA

SEQ ID NO: 2358 - protein, 9 aa, Severe acute respiratory syndrome coronavirus 2
VRMYIFFAS

SEQ ID NO: 2359 - protein, 9 aa, Severe acute respiratory syndrome coronavirus 2
RMYIFFASF

SEQ ID NO: 2360 - protein, 9 aa, Severe acute respiratory syndrome coronavirus 2
MYIFFASFY

SEQ ID NO: 2361 - protein, 9 aa, Severe acute respiratory syndrome coronavirus 2
YIFFASFYY

SEQ ID NO: 2362 - protein, 9 aa, Severe acute respiratory syndrome coronavirus 2
IFFASFYYV

SEQ ID NO: 2363 - protein, 9 aa, Severe acute respiratory syndrome coronavirus 2
FFASFYYVW

SEQ ID NO: 2364 - protein, 9 aa, Severe acute respiratory syndrome coronavirus 2
FASFYYVWK

SEQ ID NO: 2365 - protein, 9 aa, Severe acute respiratory syndrome coronavirus 2
SFYYVWKSY

SEQ ID NO: 2366 - protein, 9 aa, Severe acute respiratory syndrome coronavirus 2
FYYVWKSYV

SEQ ID NO: 2367 - protein, 9 aa, Severe acute respiratory syndrome coronavirus 2
YYVWKSYVH

SEQ ID NO: 2368 - protein, 9 aa, Severe acute respiratory syndrome coronavirus 2
YVWKSYVHV

SEQ ID NO: 2369 - protein, 9 aa, Severe acute respiratory syndrome coronavirus 2
VWKSYVHVV

SEQ ID NO: 2370 - protein, 9 aa, Severe acute respiratory syndrome coronavirus 2
KSYVHVVDG

SEQ ID NO: 2371 - protein, 9 aa, Severe acute respiratory syndrome coronavirus 2
NSSTCMMCY

SEQ ID NO: 2372 - protein, 9 aa, Severe acute respiratory syndrome coronavirus 2
SSTCMMCYK

SEQ ID NO: 2373 - protein, 9 aa, Severe acute respiratory syndrome coronavirus 2
STCMMCYKR

SEQ ID NO: 2374 - protein, 9 aa, Severe acute respiratory syndrome coronavirus 2
CMMCYKRNR

SEQ ID NO: 2375 - protein, 9 aa, Severe acute respiratory syndrome coronavirus 2
MMCYKRNRA

SEQ ID NO: 2376 - protein, 9 aa, Severe acute respiratory syndrome coronavirus 2
CYKRNRATR

SEQ ID NO: 2377 - protein, 9 aa, Severe acute respiratory syndrome coronavirus 2
YKRNRATRV

SEQ ID NO: 2378 - protein, 9 aa, Severe acute respiratory syndrome coronavirus 2
RNRATRVEC

SEQ ID NO: 2379 - protein, 9 aa, Severe acute respiratory syndrome coronavirus 2
ATRVECTTI

SEQ ID NO: 2380 - protein, 9 aa, Severe acute respiratory syndrome coronavirus 2
TRVECTTIV

SEQ ID NO: 2381 - protein, 9 aa, Severe acute respiratory syndrome coronavirus 2
ECTTIVNGV

SEQ ID NO: 2382 - protein, 9 aa, Severe acute respiratory syndrome coronavirus 2
CTTIVNGVR

SEQ ID NO: 2383 - protein, 9 aa, Severe acute respiratory syndrome coronavirus 2
TTIVNGVRR

SEQ ID NO: 2384 - protein, 9 aa, Severe acute respiratory syndrome coronavirus 2
IVNGVRRSF

SEQ ID NO: 2385 - protein, 9 aa, Severe acute respiratory syndrome coronavirus 2
VNGVRRSFY

SEQ ID NO: 2386 - protein, 9 aa, Severe acute respiratory syndrome coronavirus 2
NGVRRSFYV

SEQ ID NO: 2387 - protein, 9 aa, Severe acute respiratory syndrome coronavirus 2
GVRRSFYVY

SEQ ID NO: 2388 - protein, 9 aa, Severe acute respiratory syndrome coronavirus 2
VRRSFYVYA

SEQ ID NO: 2389 - protein, 9 aa, Severe acute respiratory syndrome coronavirus 2
RRSFYVYAN

SEQ ID NO: 2390 - protein, 9 aa, Severe acute respiratory syndrome coronavirus 2
RSFYVYANG

SEQ ID NO: 2391 - protein, 9 aa, Severe acute respiratory syndrome coronavirus 2
VYANGGKGF

SEQ ID NO: 2392 - protein, 9 aa, Severe acute respiratory syndrome coronavirus 2
KGFCKLHNW

SEQ ID NO: 2393 - protein, 9 aa, Severe acute respiratory syndrome coronavirus 2
DTFCAGSTF

SEQ ID NO: 2394 - protein, 9 aa, Severe acute respiratory syndrome coronavirus 2
TFCAGSTFI

SEQ ID NO: 2395 - protein, 9 aa, Severe acute respiratory syndrome coronavirus 2
GSTFISDEV

SEQ ID NO: 2396 - protein, 9 aa, Severe acute respiratory syndrome coronavirus 2
TFISDEVAR

SEQ ID NO: 2397 - protein, 9 aa, Severe acute respiratory syndrome coronavirus 2
ISDEVARDL

SEQ ID NO: 2398 - protein, 9 aa, Severe acute respiratory syndrome coronavirus 2
DEVARDLSL

SEQ ID NO: 2399 - protein, 9 aa, Severe acute respiratory syndrome coronavirus 2
VARDLSLQF

SEQ ID NO: 2400 - protein, 9 aa, Severe acute respiratory syndrome coronavirus 2
RDLSLQFKR

SEQ ID NO: 2401 - protein, 9 aa, Severe acute respiratory syndrome coronavirus 2
LSLQFKRPI

SEQ ID NO: 2402 - protein, 9 aa, Severe acute respiratory syndrome coronavirus 2
NPTDQSSYI

SEQ ID NO: 2403 - protein, 9 aa, Severe acute respiratory syndrome coronavirus 2
QSSYIVDSV

SEQ ID NO: 2404 - protein, 9 aa, Severe acute respiratory syndrome coronavirus 2
SYIVDSVTV

SEQ ID NO: 2405 - protein, 9 aa, Severe acute respiratory syndrome coronavirus 2
YIVDSVTVK

SEQ ID NO: 2406 - protein, 9 aa, Severe acute respiratory syndrome coronavirus 2
VKNGSIHLY

SEQ ID NO: 2407 - protein, 9 aa, Severe acute respiratory syndrome coronavirus 2
KNGSIHLYF

SEQ ID NO: 2408 - protein, 9 aa, Severe acute respiratory syndrome coronavirus 2
GSIHLYFDK

SEQ ID NO: 2409 - protein, 9 aa, Severe acute respiratory syndrome coronavirus 2
SIHLYFDKA

SEQ ID NO: 2410 - protein, 9 aa, Severe acute respiratory syndrome coronavirus 2
LYFDKAGQK

SEQ ID NO: 2411 - protein, 9 aa, Severe acute respiratory syndrome coronavirus 2
KAGQKTYER

SEQ ID NO: 2412 - protein, 9 aa, Severe acute respiratory syndrome coronavirus 2
KTYERHSLS

SEQ ID NO: 2413 - protein, 9 aa, Severe acute respiratory syndrome coronavirus 2
TYERHSLSH

SEQ ID NO: 2414 - protein, 9 aa, Severe acute respiratory syndrome coronavirus 2
YERHSLSHF

SEQ ID NO: 2415 - protein, 9 aa, Severe acute respiratory syndrome coronavirus 2
ERHSLSHFV

SEQ ID NO: 2416 - protein, 9 aa, Severe acute respiratory syndrome coronavirus 2
HSLSHFVNL

SEQ ID NO: 2417 - protein, 9 aa, Severe acute respiratory syndrome coronavirus 2
SHFVNLDNL

SEQ ID NO: 2418 - protein, 9 aa, Severe acute respiratory syndrome coronavirus 2
HFVNLDNLR

SEQ ID NO: 2419 - protein, 9 aa, Severe acute respiratory syndrome coronavirus 2
RANNTKGSL

SEQ ID NO: 2420 - protein, 9 aa, Severe acute respiratory syndrome coronavirus 2
GSLPINVIV

SEQ ID NO: 2421 - protein, 9 aa, Severe acute respiratory syndrome coronavirus 2
SLPINVIVF

SEQ ID NO: 2422 - protein, 9 aa, Severe acute respiratory syndrome coronavirus 2
KSKCEESSA

SEQ ID NO: 2423 - protein, 9 aa, Severe acute respiratory syndrome coronavirus 2
CEESSAKSA

SEQ ID NO: 2424 - protein, 9 aa, Severe acute respiratory syndrome coronavirus 2
ESSAKSASV

SEQ ID NO: 2425 - protein, 9 aa, Severe acute respiratory syndrome coronavirus 2
SSAKSASVY

SEQ ID NO: 2426 - protein, 9 aa, Severe acute respiratory syndrome coronavirus 2
SAKSASVYY

SEQ ID NO: 2427 - protein, 9 aa, Severe acute respiratory syndrome coronavirus 2
SASVYYSQL

SEQ ID NO: 2428 - protein, 9 aa, Severe acute respiratory syndrome coronavirus 2
ASVYYSQLM

SEQ ID NO: 2429 - protein, 9 aa, Severe acute respiratory syndrome coronavirus 2
YSQLMCQPI

SEQ ID NO: 2430 - protein, 9 aa, Severe acute respiratory syndrome coronavirus 2
SQLMCQPIL

SEQ ID NO: 2431 - protein, 9 aa, Severe acute respiratory syndrome coronavirus 2
QLMCQPILL

SEQ ID NO: 2432 - protein, 9 aa, Severe acute respiratory syndrome coronavirus 2
LMCQPILLL

SEQ ID NO: 2433 - protein, 9 aa, Severe acute respiratory syndrome coronavirus 2
QPILLLDQA

SEQ ID NO: 2434 - protein, 9 aa, Severe acute respiratory syndrome coronavirus 2
ILLLDQALV

SEQ ID NO: 2435 - protein, 9 aa, Severe acute respiratory syndrome coronavirus 2
LVSDVGDSA

SEQ ID NO: 2436 - protein, 9 aa, Severe acute respiratory syndrome coronavirus 2
VGDSAEVAV

SEQ ID NO: 2437 - protein, 9 aa, Severe acute respiratory syndrome coronavirus 2
DSAEVAVKM

SEQ ID NO: 2438 - protein, 9 aa, Severe acute respiratory syndrome coronavirus 2
SAEVAVKMF

SEQ ID NO: 2439 - protein, 9 aa, Severe acute respiratory syndrome coronavirus 2
EVAVKMFDA

SEQ ID NO: 2440 - protein, 9 aa, Severe acute respiratory syndrome coronavirus 2
VAVKMFDAY

SEQ ID NO: 2441 - protein, 9 aa, Severe acute respiratory syndrome coronavirus 2
AVKMFDAYV

SEQ ID NO: 2442 - protein, 9 aa, Severe acute respiratory syndrome coronavirus 2
KMFDAYVNT

SEQ ID NO: 2443 - protein, 9 aa, Severe acute respiratory syndrome coronavirus 2
MFDAYVNTF

SEQ ID NO: 2444 - protein, 9 aa, Severe acute respiratory syndrome coronavirus 2
AYVNTFSST

SEQ ID NO: 2445 - protein, 9 aa, Severe acute respiratory syndrome coronavirus 2
YVNTFSSTF

SEQ ID NO: 2446 - protein, 9 aa, Severe acute respiratory syndrome coronavirus 2
NTFSSTFNV

SEQ ID NO: 2447 - protein, 9 aa, Severe acute respiratory syndrome coronavirus 2
FSSTFNVPM

SEQ ID NO: 2448 - protein, 9 aa, Severe acute respiratory syndrome coronavirus 2
STFNVPMEK

SEQ ID NO: 2449 - protein, 9 aa, Severe acute respiratory syndrome coronavirus 2
TFNVPMEKL

SEQ ID NO: 2450 - protein, 9 aa, Severe acute respiratory syndrome coronavirus 2
VPMEKLKTL

SEQ ID NO: 2451 - protein, 9 aa, Severe acute respiratory syndrome coronavirus 2
MEKLKTLVA

SEQ ID NO: 2452 - protein, 9 aa, Severe acute respiratory syndrome coronavirus 2
KLKTLVATA

SEQ ID NO: 2453 - protein, 9 aa, Severe acute respiratory syndrome coronavirus 2
KTLVATAEA

SEQ ID NO: 2454 - protein, 9 aa, Severe acute respiratory syndrome coronavirus 2
LVATAEAEL

SEQ ID NO: 2455 - protein, 9 aa, Severe acute respiratory syndrome coronavirus 2
ATAEAELAK

SEQ ID NO: 2456 - protein, 9 aa, Severe acute respiratory syndrome coronavirus 2
AEAELAKNV

SEQ ID NO: 2457 - protein, 9 aa, Severe acute respiratory syndrome coronavirus 2
AELAKNVSL

SEQ ID NO: 2458 - protein, 9 aa, Severe acute respiratory syndrome coronavirus 2
SLDNVLSTF

SEQ ID NO: 2459 - protein, 9 aa, Severe acute respiratory syndrome coronavirus 2
LDNVLSTFI

SEQ ID NO: 2460 - protein, 9 aa, Severe acute respiratory syndrome coronavirus 2
NVLSTFISA

SEQ ID NO: 2461 - protein, 9 aa, Severe acute respiratory syndrome coronavirus 2
VLSTFISAA

SEQ ID NO: 2462 - protein, 9 aa, Severe acute respiratory syndrome coronavirus 2
LSTFISAAR

SEQ ID NO: 2463 - protein, 9 aa, Severe acute respiratory syndrome coronavirus 2
FISAARQGF

SEQ ID NO: 2464 - protein, 9 aa, Severe acute respiratory syndrome coronavirus 2
ISAARQGFV

SEQ ID NO: 2465 - protein, 9 aa, Severe acute respiratory syndrome coronavirus 2
AARQGFVDS

SEQ ID NO: 2466 - protein, 9 aa, Severe acute respiratory syndrome coronavirus 2
ETKDVVECL

SEQ ID NO: 2467 - protein, 9 aa, Severe acute respiratory syndrome coronavirus 2
LKLSHQSDI

SEQ ID NO: 2468 - protein, 9 aa, Severe acute respiratory syndrome coronavirus 2
LSHQSDIEV

SEQ ID NO: 2469 - protein, 9 aa, Severe acute respiratory syndrome coronavirus 2
VTGDSCNNY

SEQ ID NO: 2470 - protein, 9 aa, Severe acute respiratory syndrome coronavirus 2
TGDSCNNYM

SEQ ID NO: 2471 - protein, 9 aa, Severe acute respiratory syndrome coronavirus 2
SCNNYMLTY

SEQ ID NO: 2472 - protein, 9 aa, Severe acute respiratory syndrome coronavirus 2
NNYMLTYNK

SEQ ID NO: 2473 - protein, 9 aa, Severe acute respiratory syndrome coronavirus 2
NYMLTYNKV

SEQ ID NO: 2474 - protein, 9 aa, Severe acute respiratory syndrome coronavirus 2
LTYNKVENM

SEQ ID NO: 2475 - protein, 9 aa, Severe acute respiratory syndrome coronavirus 2
VENMTPRDL

SEQ ID NO: 2476 - protein, 9 aa, Severe acute respiratory syndrome coronavirus 2
TPRDLGACI

SEQ ID NO: 2477 - protein, 9 aa, Severe acute respiratory syndrome coronavirus 2
SARHINAQV

SEQ ID NO: 2478 - protein, 9 aa, Severe acute respiratory syndrome coronavirus 2
ARHINAQVA

SEQ ID NO: 2479 - protein, 9 aa, Severe acute respiratory syndrome coronavirus 2
AQVAKSHSI

SEQ ID NO: 2480 - protein, 9 aa, Severe acute respiratory syndrome coronavirus 2
VAKSHSIAL

SEQ ID NO: 2481 - protein, 9 aa, Severe acute respiratory syndrome coronavirus 2
AKSHSIALI

SEQ ID NO: 2482 - protein, 9 aa, Severe acute respiratory syndrome coronavirus 2
KSHSIALIW

SEQ ID NO: 2483 - protein, 9 aa, Severe acute respiratory syndrome coronavirus 2
HSIALIWNV

SEQ ID NO: 2484 - protein, 9 aa, Severe acute respiratory syndrome coronavirus 2
SIALIWNVK

SEQ ID NO: 2485 - protein, 9 aa, Severe acute respiratory syndrome coronavirus 2
ALIWNVKDF

SEQ ID NO: 2486 - protein, 9 aa, Severe acute respiratory syndrome coronavirus 2
LIWNVKDFM

SEQ ID NO: 2487 - protein, 9 aa, Severe acute respiratory syndrome coronavirus 2
WNVKDFMSL

SEQ ID NO: 2488 - protein, 9 aa, Severe acute respiratory syndrome coronavirus 2
FMSLSEQLR

SEQ ID NO: 2489 - protein, 9 aa, Severe acute respiratory syndrome coronavirus 2
MSLSEQLRK

SEQ ID NO: 2490 - protein, 9 aa, Severe acute respiratory syndrome coronavirus 2
QLRKQIRSA

SEQ ID NO: 2491 - protein, 9 aa, Severe acute respiratory syndrome coronavirus 2
RKQIRSAAK

SEQ ID NO: 2492 - protein, 9 aa, Severe acute respiratory syndrome coronavirus 2
KQIRSAAKK

SEQ ID NO: 2493 - protein, 9 aa, Severe acute respiratory syndrome coronavirus 2
RSAAKKNNL

SEQ ID NO: 2494 - protein, 9 aa, Severe acute respiratory syndrome coronavirus 2
AAKKNNLPF

SEQ ID NO: 2495 - protein, 9 aa, Severe acute respiratory syndrome coronavirus 2
AKKNNLPFK

SEQ ID NO: 2496 - protein, 9 aa, Severe acute respiratory syndrome coronavirus 2
KKNNLPFKL

SEQ ID NO: 2497 - protein, 9 aa, Severe acute respiratory syndrome coronavirus 2
NLPFKLTCA

SEQ ID NO: 2498 - protein, 9 aa, Severe acute respiratory syndrome coronavirus 2
LPFKLTCAT

SEQ ID NO: 2499 - protein, 9 aa, Severe acute respiratory syndrome coronavirus 2
ATTRQVVNV

SEQ ID NO: 2500 - protein, 9 aa, Severe acute respiratory syndrome coronavirus 2
TTRQVVNVV

SEQ ID NO: 2501 - protein, 9 aa, Severe acute respiratory syndrome coronavirus 2
RQVVNVVTT

SEQ ID NO: 2502 - protein, 9 aa, Severe acute respiratory syndrome coronavirus 2
QVVNVVTTK

SEQ ID NO: 2503 - protein, 9 aa, Severe acute respiratory syndrome coronavirus 2
VVNVVTTKI

SEQ ID NO: 2504 - protein, 9 aa, Severe acute respiratory syndrome coronavirus 2
VVTTKIALK

SEQ ID NO: 2505 - protein, 9 aa, Severe acute respiratory syndrome coronavirus 2
IALKGGKIV

SEQ ID NO: 2506 - protein, 9 aa, Severe acute respiratory syndrome coronavirus 2
KGGKIVNNW

SEQ ID NO: 2507 - protein, 9 aa, Severe acute respiratory syndrome coronavirus 2
IVNNWLKQL

SEQ ID NO: 2508 - protein, 9 aa, Severe acute respiratory syndrome coronavirus 2
LKQLIKVTL

SEQ ID NO: 2509 - protein, 9 aa, Severe acute respiratory syndrome coronavirus 2
KQLIKVTLV

SEQ ID NO: 2510 - protein, 9 aa, Severe acute respiratory syndrome coronavirus 2
QLIKVTLVF

SEQ ID NO: 2511 - protein, 9 aa, Severe acute respiratory syndrome coronavirus 2
LIKVTLVFL

SEQ ID NO: 2512 - protein, 9 aa, Severe acute respiratory syndrome coronavirus 2
IKVTLVFLF

SEQ ID NO: 2513 - protein, 9 aa, Severe acute respiratory syndrome coronavirus 2
KVTLVFLFV

SEQ ID NO: 2514 - protein, 9 aa, Severe acute respiratory syndrome coronavirus 2
VTLVFLFVA

SEQ ID NO: 2515 - protein, 9 aa, Severe acute respiratory syndrome coronavirus 2
TLVFLFVAA

SEQ ID NO: 2516 - protein, 9 aa, Severe acute respiratory syndrome coronavirus 2
LVFLFVAAI

SEQ ID NO: 2517 - protein, 9 aa, Severe acute respiratory syndrome coronavirus 2
VFLFVAAIF

SEQ ID NO: 2518 - protein, 9 aa, Severe acute respiratory syndrome coronavirus 2
FLFVAAIFY

SEQ ID NO: 2519 - protein, 9 aa, Severe acute respiratory syndrome coronavirus 2
LFVAAIFYL

SEQ ID NO: 2520 - protein, 9 aa, Severe acute respiratory syndrome coronavirus 2
FVAAIFYLI

SEQ ID NO: 2521 - protein, 9 aa, Severe acute respiratory syndrome coronavirus 2
AIFYLITPV

SEQ ID NO: 2522 - protein, 9 aa, Severe acute respiratory syndrome coronavirus 2
IFYLITPVH

SEQ ID NO: 2523 - protein, 9 aa, Severe acute respiratory syndrome coronavirus 2
FYLITPVHV

SEQ ID NO: 2524 - protein, 9 aa, Severe acute respiratory syndrome coronavirus 2
YLITPVHVM

SEQ ID NO: 2525 - protein, 9 aa, Severe acute respiratory syndrome coronavirus 2
ITPVHVMSK

SEQ ID NO: 2526 - protein, 9 aa, Severe acute respiratory syndrome coronavirus 2
HVMSKHTDF

SEQ ID NO: 2527 - protein, 9 aa, Severe acute respiratory syndrome coronavirus 2
MSKHTDFSS

SEQ ID NO: 2528 - protein, 9 aa, Severe acute respiratory syndrome coronavirus 2
KHTDFSSEI

SEQ ID NO: 2529 - protein, 9 aa, Severe acute respiratory syndrome coronavirus 2
HTDFSSEII

SEQ ID NO: 2530 - protein, 9 aa, Severe acute respiratory syndrome coronavirus 2
FSSEIIGYK

SEQ ID NO: 2531 - protein, 9 aa, Severe acute respiratory syndrome coronavirus 2
SEIIGYKAI

SEQ ID NO: 2532 - protein, 9 aa, Severe acute respiratory syndrome coronavirus 2
KAIDGGVTR

SEQ ID NO: 2533 - protein, 9 aa, Severe acute respiratory syndrome coronavirus 2
DIASTDTCF

SEQ ID NO: 2534 - protein, 9 aa, Severe acute respiratory syndrome coronavirus 2
STDTCFANK

SEQ ID NO: 2535 - protein, 9 aa, Severe acute respiratory syndrome coronavirus 2
CFANKHADF

SEQ ID NO: 2536 - protein, 9 aa, Severe acute respiratory syndrome coronavirus 2
KHADFDTWF

SEQ ID NO: 2537 - protein, 9 aa, Severe acute respiratory syndrome coronavirus 2
DFDTWFSQR

SEQ ID NO: 2538 - protein, 9 aa, Severe acute respiratory syndrome coronavirus 2
WFSQRGGSY

SEQ ID NO: 2539 - protein, 9 aa, Severe acute respiratory syndrome coronavirus 2
YTNDKACPL

SEQ ID NO: 2540 - protein, 9 aa, Severe acute respiratory syndrome coronavirus 2
DKACPLIAA

SEQ ID NO: 2541 - protein, 9 aa, Severe acute respiratory syndrome coronavirus 2
KACPLIAAV

SEQ ID NO: 2542 - protein, 9 aa, Severe acute respiratory syndrome coronavirus 2
CPLIAAVIT

SEQ ID NO: 2543 - protein, 9 aa, Severe acute respiratory syndrome coronavirus 2
IAAVITREV

SEQ ID NO: 2544 - protein, 9 aa, Severe acute respiratory syndrome coronavirus 2
AVITREVGF

SEQ ID NO: 2545 - protein, 9 aa, Severe acute respiratory syndrome coronavirus 2
VITREVGFV

SEQ ID NO: 2546 - protein, 9 aa, Severe acute respiratory syndrome coronavirus 2
ITREVGFVV

SEQ ID NO: 2547 - protein, 9 aa, Severe acute respiratory syndrome coronavirus 2
REVGFVVPG

SEQ ID NO: 2548 - protein, 9 aa, Severe acute respiratory syndrome coronavirus 2
EVGFVVPGL

SEQ ID NO: 2549 - protein, 9 aa, Severe acute respiratory syndrome coronavirus 2
FVVPGLPGT

SEQ ID NO: 2550 - protein, 9 aa, Severe acute respiratory syndrome coronavirus 2
VVPGLPGTI

SEQ ID NO: 2551 - protein, 9 aa, Severe acute respiratory syndrome coronavirus 2
VPGLPGTIL

SEQ ID NO: 2552 - protein, 9 aa, Severe acute respiratory syndrome coronavirus 2
GLPGTILRT

SEQ ID NO: 2553 - protein, 9 aa, Severe acute respiratory syndrome coronavirus 2
ILRTTNGDF

SEQ ID NO: 2554 - protein, 9 aa, Severe acute respiratory syndrome coronavirus 2
TTNGDFLHF

SEQ ID NO: 2555 - protein, 9 aa, Severe acute respiratory syndrome coronavirus 2
GDFLHFLPR

SEQ ID NO: 2556 - protein, 9 aa, Severe acute respiratory syndrome coronavirus 2
FLHFLPRVF

SEQ ID NO: 2557 - protein, 9 aa, Severe acute respiratory syndrome coronavirus 2
HFLPRVFSA

SEQ ID NO: 2558 - protein, 9 aa, Severe acute respiratory syndrome coronavirus 2
FLPRVFSAV

SEQ ID NO: 2559 - protein, 9 aa, Severe acute respiratory syndrome coronavirus 2
LPRVFSAVG

SEQ ID NO: 2560 - protein, 9 aa, Severe acute respiratory syndrome coronavirus 2
RVFSAVGNI

SEQ ID NO: 2561 - protein, 9 aa, Severe acute respiratory syndrome coronavirus 2
FSAVGNICY

SEQ ID NO: 2562 - protein, 9 aa, Severe acute respiratory syndrome coronavirus 2
GNICYTPSK

SEQ ID NO: 2563 - protein, 9 aa, Severe acute respiratory syndrome coronavirus 2
YTPSKLIEY

SEQ ID NO: 2564 - protein, 9 aa, Severe acute respiratory syndrome coronavirus 2
KLIEYTDIA

SEQ ID NO: 2565 - protein, 9 aa, Severe acute respiratory syndrome coronavirus 2
IEYTDIATS

SEQ ID NO: 2566 - protein, 9 aa, Severe acute respiratory syndrome coronavirus 2
YTDIATSAC

SEQ ID NO: 2567 - protein, 9 aa, Severe acute respiratory syndrome coronavirus 2
ATSACVLAA

SEQ ID NO: 2568 - protein, 9 aa, Severe acute respiratory syndrome coronavirus 2
CVLAAECTI

SEQ ID NO: 2569 - protein, 9 aa, Severe acute respiratory syndrome coronavirus 2
VLAAECTIF

SEQ ID NO: 2570 - protein, 9 aa, Severe acute respiratory syndrome coronavirus 2
LAAECTIFK

SEQ ID NO: 2571 - protein, 9 aa, Severe acute respiratory syndrome coronavirus 2
AECTIFKDA

SEQ ID NO: 2572 - protein, 9 aa, Severe acute respiratory syndrome coronavirus 2
TIFKDASGK

SEQ ID NO: 2573 - protein, 9 aa, Severe acute respiratory syndrome coronavirus 2
FKDASGKPV

SEQ ID NO: 2574 - protein, 9 aa, Severe acute respiratory syndrome coronavirus 2
DASGKPVPY

SEQ ID NO: 2575 - protein, 9 aa, Severe acute respiratory syndrome coronavirus 2
SGKPVPYCY

SEQ ID NO: 2576 - protein, 9 aa, Severe acute respiratory syndrome coronavirus 2
VPYCYDTNV

SEQ ID NO: 2577 - protein, 9 aa, Severe acute respiratory syndrome coronavirus 2
DTNVLEGSV

SEQ ID NO: 2578 - protein, 9 aa, Severe acute respiratory syndrome coronavirus 2
NVLEGSVAY

SEQ ID NO: 2579 - protein, 9 aa, Severe acute respiratory syndrome coronavirus 2
GSVAYESLR

SEQ ID NO: 2580 - protein, 9 aa, Severe acute respiratory syndrome coronavirus 2
SLRPDTRYV

SEQ ID NO: 2581 - protein, 9 aa, Severe acute respiratory syndrome coronavirus 2
LRPDTRYVL

SEQ ID NO: 2582 - protein, 9 aa, Severe acute respiratory syndrome coronavirus 2
RPDTRYVLM

SEQ ID NO: 2583 - protein, 9 aa, Severe acute respiratory syndrome coronavirus 2
RYVLMDGSI

SEQ ID NO: 2584 - protein, 9 aa, Severe acute respiratory syndrome coronavirus 2
YVLMDGSII

SEQ ID NO: 2585 - protein, 9 aa, Severe acute respiratory syndrome coronavirus 2
LMDGSIIQF

SEQ ID NO: 2586 - protein, 9 aa, Severe acute respiratory syndrome coronavirus 2
SIIQFPNTY

SEQ ID NO: 2587 - protein, 9 aa, Severe acute respiratory syndrome coronavirus 2
IIQFPNTYL

SEQ ID NO: 2588 - protein, 9 aa, Severe acute respiratory syndrome coronavirus 2
FPNTYLEGS

SEQ ID NO: 2589 - protein, 9 aa, Severe acute respiratory syndrome coronavirus 2
NTYLEGSVR

SEQ ID NO: 2590 - protein, 9 aa, Severe acute respiratory syndrome coronavirus 2
TYLEGSVRV

SEQ ID NO: 2591 - protein, 9 aa, Severe acute respiratory syndrome coronavirus 2
YLEGSVRVV

SEQ ID NO: 2592 - protein, 9 aa, Severe acute respiratory syndrome coronavirus 2
LEGSVRVVT

SEQ ID NO: 2593 - protein, 9 aa, Severe acute respiratory syndrome coronavirus 2
GSVRVVTTF

SEQ ID NO: 2594 - protein, 9 aa, Severe acute respiratory syndrome coronavirus 2
SVRVVTTFD

SEQ ID NO: 2595 - protein, 9 aa, Severe acute respiratory syndrome coronavirus 2
VVTTFDSEY

SEQ ID NO: 2596 - protein, 9 aa, Severe acute respiratory syndrome coronavirus 2
TTFDSEYCR

SEQ ID NO: 2597 - protein, 9 aa, Severe acute respiratory syndrome coronavirus 2
SEYCRHGTC

SEQ ID NO: 2598 - protein, 9 aa, Severe acute respiratory syndrome coronavirus 2
SEAGVCVST

SEQ ID NO: 2599 - protein, 9 aa, Severe acute respiratory syndrome coronavirus 2
GVCVSTSGR

SEQ ID NO: 2600 - protein, 9 aa, Severe acute respiratory syndrome coronavirus 2
VCVSTSGRW

SEQ ID NO: 2601 - protein, 9 aa, Severe acute respiratory syndrome coronavirus 2
VSTSGRWVL

SEQ ID NO: 2602 - protein, 9 aa, Severe acute respiratory syndrome coronavirus 2
GRWVLNNDY

SEQ ID NO: 2603 - protein, 9 aa, Severe acute respiratory syndrome coronavirus 2
RWVLNNDYY

SEQ ID NO: 2604 - protein, 9 aa, Severe acute respiratory syndrome coronavirus 2
WVLNNDYYR

SEQ ID NO: 2605 - protein, 9 aa, Severe acute respiratory syndrome coronavirus 2
YYRSLPGVF

SEQ ID NO: 2606 - protein, 9 aa, Severe acute respiratory syndrome coronavirus 2
RSLPGVFCG

SEQ ID NO: 2607 - protein, 9 aa, Severe acute respiratory syndrome coronavirus 2
SLPGVFCGV

SEQ ID NO: 2608 - protein, 9 aa, Severe acute respiratory syndrome coronavirus 2
GVFCGVDAV

SEQ ID NO: 2609 - protein, 9 aa, Severe acute respiratory syndrome coronavirus 2
DAVNLLTNM

SEQ ID NO: 2610 - protein, 9 aa, Severe acute respiratory syndrome coronavirus 2
AVNLLTNMF

SEQ ID NO: 2611 - protein, 9 aa, Severe acute respiratory syndrome coronavirus 2
LLTNMFTPL

SEQ ID NO: 2612 - protein, 9 aa, Severe acute respiratory syndrome coronavirus 2
LTNMFTPLI

SEQ ID NO: 2613 - protein, 9 aa, Severe acute respiratory syndrome coronavirus 2
MFTPLIQPI

SEQ ID NO: 2614 - protein, 9 aa, Severe acute respiratory syndrome coronavirus 2
TPLIQPIGA

SEQ ID NO: 2615 - protein, 9 aa, Severe acute respiratory syndrome coronavirus 2
GALDISASI

SEQ ID NO: 2616 - protein, 9 aa, Severe acute respiratory syndrome coronavirus 2
ALDISASIV

SEQ ID NO: 2617 - protein, 9 aa, Severe acute respiratory syndrome coronavirus 2
SASIVAGGI

SEQ ID NO: 2618 - protein, 9 aa, Severe acute respiratory syndrome coronavirus 2
IVAGGIVAI

SEQ ID NO: 2619 - protein, 9 aa, Severe acute respiratory syndrome coronavirus 2
VAGGIVAIV

SEQ ID NO: 2620 - protein, 9 aa, Severe acute respiratory syndrome coronavirus 2
IVAIVVTCL

SEQ ID NO: 2621 - protein, 9 aa, Severe acute respiratory syndrome coronavirus 2
VAIVVTCLA

SEQ ID NO: 2622 - protein, 9 aa, Severe acute respiratory syndrome coronavirus 2
AIVVTCLAY

SEQ ID NO: 2623 - protein, 9 aa, Severe acute respiratory syndrome coronavirus 2
IVVTCLAYY

SEQ ID NO: 2624 - protein, 9 aa, Severe acute respiratory syndrome coronavirus 2
VVTCLAYYF

SEQ ID NO: 2625 - protein, 9 aa, Severe acute respiratory syndrome coronavirus 2
VTCLAYYFM

SEQ ID NO: 2626 - protein, 9 aa, Severe acute respiratory syndrome coronavirus 2
TCLAYYFMR

SEQ ID NO: 2627 - protein, 9 aa, Severe acute respiratory syndrome coronavirus 2
CLAYYFMRF

SEQ ID NO: 2628 - protein, 9 aa, Severe acute respiratory syndrome coronavirus 2
LAYYFMRFR

SEQ ID NO: 2629 - protein, 9 aa, Severe acute respiratory syndrome coronavirus 2
AYYFMRFRR

SEQ ID NO: 2630 - protein, 9 aa, Severe acute respiratory syndrome coronavirus 2
YYFMRFRRA

SEQ ID NO: 2631 - protein, 9 aa, Severe acute respiratory syndrome coronavirus 2
YFMRFRRAF

SEQ ID NO: 2632 - protein, 9 aa, Severe acute respiratory syndrome coronavirus 2
FMRFRRAFG

SEQ ID NO: 2633 - protein, 9 aa, Severe acute respiratory syndrome coronavirus 2
MRFRRAFGE

SEQ ID NO: 2634 - protein, 9 aa, Severe acute respiratory syndrome coronavirus 2
RFRRAFGEY

SEQ ID NO: 2635 - protein, 9 aa, Severe acute respiratory syndrome coronavirus 2
RRAFGEYSH

SEQ ID NO: 2636 - protein, 9 aa, Severe acute respiratory syndrome coronavirus 2
RAFGEYSHV

SEQ ID NO: 2637 - protein, 9 aa, Severe acute respiratory syndrome coronavirus 2
AFGEYSHVV

SEQ ID NO: 2638 - protein, 9 aa, Severe acute respiratory syndrome coronavirus 2
GEYSHVVAF

SEQ ID NO: 2639 - protein, 9 aa, Severe acute respiratory syndrome coronavirus 2
SHVVAFNTL

SEQ ID NO: 2640 - protein, 9 aa, Severe acute respiratory syndrome coronavirus 2
HVVAFNTLL

SEQ ID NO: 2641 - protein, 9 aa, Severe acute respiratory syndrome coronavirus 2
VVAFNTLLF

SEQ ID NO: 2642 - protein, 9 aa, Severe acute respiratory syndrome coronavirus 2
VAFNTLLFL

SEQ ID NO: 2643 - protein, 9 aa, Severe acute respiratory syndrome coronavirus 2
AFNTLLFLM

SEQ ID NO: 2644 - protein, 9 aa, Severe acute respiratory syndrome coronavirus 2
NTLLFLMSF

SEQ ID NO: 2645 - protein, 9 aa, Severe acute respiratory syndrome coronavirus 2
TLLFLMSFT

SEQ ID NO: 2646 - protein, 9 aa, Severe acute respiratory syndrome coronavirus 2
LLFLMSFTV

SEQ ID NO: 2647 - protein, 9 aa, Severe acute respiratory syndrome coronavirus 2
LFLMSFTVL

SEQ ID NO: 2648 - protein, 9 aa, Severe acute respiratory syndrome coronavirus 2
FLMSFTVLC

SEQ ID NO: 2649 - protein, 9 aa, Severe acute respiratory syndrome coronavirus 2
LMSFTVLCL

SEQ ID NO: 2650 - protein, 9 aa, Severe acute respiratory syndrome coronavirus 2
MSFTVLCLT

SEQ ID NO: 2651 - protein, 9 aa, Severe acute respiratory syndrome coronavirus 2
FTVLCLTPV

SEQ ID NO: 2652 - protein, 9 aa, Severe acute respiratory syndrome coronavirus 2
TVLCLTPVY

SEQ ID NO: 2653 - protein, 9 aa, Severe acute respiratory syndrome coronavirus 2
CLTPVYSFL

SEQ ID NO: 2654 - protein, 9 aa, Severe acute respiratory syndrome coronavirus 2
TPVYSFLPG

SEQ ID NO: 2655 - protein, 9 aa, Severe acute respiratory syndrome coronavirus 2
PVYSFLPGV

SEQ ID NO: 2656 - protein, 9 aa, Severe acute respiratory syndrome coronavirus 2
VYSFLPGVY

SEQ ID NO: 2657 - protein, 9 aa, Severe acute respiratory syndrome coronavirus 2
YSFLPGVYS

SEQ ID NO: 2658 - protein, 9 aa, Severe acute respiratory syndrome coronavirus 2
SFLPGVYSV

SEQ ID NO: 2659 - protein, 9 aa, Severe acute respiratory syndrome coronavirus 2
FLPGVYSVI

SEQ ID NO: 2660 - protein, 9 aa, Severe acute respiratory syndrome coronavirus 2
LPGVYSVIY

SEQ ID NO: 2661 - protein, 9 aa, Severe acute respiratory syndrome coronavirus 2
GVYSVIYLY

SEQ ID NO: 2662 - protein, 9 aa, Severe acute respiratory syndrome coronavirus 2
VYSVIYLYL

SEQ ID NO: 2663 - protein, 9 aa, Severe acute respiratory syndrome coronavirus 2
YSVIYLYLT

SEQ ID NO: 2664 - protein, 9 aa, Severe acute respiratory syndrome coronavirus 2
SVIYLYLTF

SEQ ID NO: 2665 - protein, 9 aa, Severe acute respiratory syndrome coronavirus 2
VIYLYLTFY

SEQ ID NO: 2666 - protein, 9 aa, Severe acute respiratory syndrome coronavirus 2
IYLYLTFYL

SEQ ID NO: 2667 - protein, 9 aa, Severe acute respiratory syndrome coronavirus 2
YLYLTFYLT

SEQ ID NO: 2668 - protein, 9 aa, Severe acute respiratory syndrome coronavirus 2
LTFYLTNDV

SEQ ID NO: 2669 - protein, 9 aa, Severe acute respiratory syndrome coronavirus 2
FYLTNDVSF

SEQ ID NO: 2670 - protein, 9 aa, Severe acute respiratory syndrome coronavirus 2
YLTNDVSFL

SEQ ID NO: 2671 - protein, 9 aa, Severe acute respiratory syndrome coronavirus 2
LTNDVSFLA

SEQ ID NO: 2672 - protein, 9 aa, Severe acute respiratory syndrome coronavirus 2
NDVSFLAHI

SEQ ID NO: 2673 - protein, 9 aa, Severe acute respiratory syndrome coronavirus 2
VSFLAHIQW

SEQ ID NO: 2674 - protein, 9 aa, Severe acute respiratory syndrome coronavirus 2
SFLAHIQWM

SEQ ID NO: 2675 - protein, 9 aa, Severe acute respiratory syndrome coronavirus 2
FLAHIQWMV

SEQ ID NO: 2676 - protein, 9 aa, Severe acute respiratory syndrome coronavirus 2
LAHIQWMVM

SEQ ID NO: 2677 - protein, 9 aa, Severe acute respiratory syndrome coronavirus 2
AHIQWMVMF

SEQ ID NO: 2678 - protein, 9 aa, Severe acute respiratory syndrome coronavirus 2
QWMVMFTPL

SEQ ID NO: 2679 - protein, 9 aa, Severe acute respiratory syndrome coronavirus 2
WMVMFTPLV

SEQ ID NO: 2680 - protein, 9 aa, Severe acute respiratory syndrome coronavirus 2
VMFTPLVPF

SEQ ID NO: 2681 - protein, 9 aa, Severe acute respiratory syndrome coronavirus 2
MFTPLVPFW

SEQ ID NO: 2682 - protein, 9 aa, Severe acute respiratory syndrome coronavirus 2
FTPLVPFWI

SEQ ID NO: 2683 - protein, 9 aa, Severe acute respiratory syndrome coronavirus 2
TPLVPFWIT

SEQ ID NO: 2684 - protein, 9 aa, Severe acute respiratory syndrome coronavirus 2
PLVPFWITI

SEQ ID NO: 2685 - protein, 9 aa, Severe acute respiratory syndrome coronavirus 2
LVPFWITIA

SEQ ID NO: 2686 - protein, 9 aa, Severe acute respiratory syndrome coronavirus 2
VPFWITIAY

SEQ ID NO: 2687 - protein, 9 aa, Severe acute respiratory syndrome coronavirus 2
FWITIAYII

SEQ ID NO: 2688 - protein, 9 aa, Severe acute respiratory syndrome coronavirus 2
ITIAYIICI

SEQ ID NO: 2689 - protein, 9 aa, Severe acute respiratory syndrome coronavirus 2
AYIICISTK

SEQ ID NO: 2690 - protein, 9 aa, Severe acute respiratory syndrome coronavirus 2
IICISTKHF

SEQ ID NO: 2691 - protein, 9 aa, Severe acute respiratory syndrome coronavirus 2
ICISTKHFY

SEQ ID NO: 2692 - protein, 9 aa, Severe acute respiratory syndrome coronavirus 2
CISTKHFYW

SEQ ID NO: 2693 - protein, 9 aa, Severe acute respiratory syndrome coronavirus 2
ISTKHFYWF

SEQ ID NO: 2694 - protein, 9 aa, Severe acute respiratory syndrome coronavirus 2
STKHFYWFF

SEQ ID NO: 2695 - protein, 9 aa, Severe acute respiratory syndrome coronavirus 2
HFYWFFSNY

SEQ ID NO: 2696 - protein, 9 aa, Severe acute respiratory syndrome coronavirus 2
FYWFFSNYL

SEQ ID NO: 2697 - protein, 9 aa, Severe acute respiratory syndrome coronavirus 2
YWFFSNYLK

SEQ ID NO: 2698 - protein, 9 aa, Severe acute respiratory syndrome coronavirus 2
WFFSNYLKR

SEQ ID NO: 2699 - protein, 9 aa, Severe acute respiratory syndrome coronavirus 2
FFSNYLKRR

SEQ ID NO: 2700 - protein, 9 aa, Severe acute respiratory syndrome coronavirus 2
FSNYLKRRV

SEQ ID NO: 2701 - protein, 9 aa, Severe acute respiratory syndrome coronavirus 2
SNYLKRRVV

SEQ ID NO: 2702 - protein, 9 aa, Severe acute respiratory syndrome coronavirus 2
NYLKRRVVF

SEQ ID NO: 2703 - protein, 9 aa, Severe acute respiratory syndrome coronavirus 2
KRRVVFNGV

SEQ ID NO: 2704 - protein, 9 aa, Severe acute respiratory syndrome coronavirus 2
RVVFNGVSF

SEQ ID NO: 2705 - protein, 9 aa, Severe acute respiratory syndrome coronavirus 2
FNGVSFSTF

SEQ ID NO: 2706 - protein, 9 aa, Severe acute respiratory syndrome coronavirus 2
FSTFEEAAL

SEQ ID NO: 2707 - protein, 9 aa, Severe acute respiratory syndrome coronavirus 2
FEEAALCTF

SEQ ID NO: 2708 - protein, 9 aa, Severe acute respiratory syndrome coronavirus 2
EEAALCTFL

SEQ ID NO: 2709 - protein, 9 aa, Severe acute respiratory syndrome coronavirus 2
EAALCTFLL

SEQ ID NO: 2710 - protein, 9 aa, Severe acute respiratory syndrome coronavirus 2
ALCTFLLNK

SEQ ID NO: 2711 - protein, 9 aa, Severe acute respiratory syndrome coronavirus 2
CTFLLNKEM

SEQ ID NO: 2712 - protein, 9 aa, Severe acute respiratory syndrome coronavirus 2
TFLLNKEMY

SEQ ID NO: 2713 - protein, 9 aa, Severe acute respiratory syndrome coronavirus 2
LLNKEMYLK

SEQ ID NO: 2714 - protein, 9 aa, Severe acute respiratory syndrome coronavirus 2
KEMYLKLRS

SEQ ID NO: 2715 - protein, 9 aa, Severe acute respiratory syndrome coronavirus 2
MYLKLRSDV

SEQ ID NO: 2716 - protein, 9 aa, Severe acute respiratory syndrome coronavirus 2
YLKLRSDVL

SEQ ID NO: 2717 - protein, 9 aa, Severe acute respiratory syndrome coronavirus 2
LKLRSDVLL

SEQ ID NO: 2718 - protein, 9 aa, Severe acute respiratory syndrome coronavirus 2
KLRSDVLLP

SEQ ID NO: 2719 - protein, 9 aa, Severe acute respiratory syndrome coronavirus 2
LRSDVLLPL

SEQ ID NO: 2720 - protein, 9 aa, Severe acute respiratory syndrome coronavirus 2
DVLLPLTQY

SEQ ID NO: 2721 - protein, 9 aa, Severe acute respiratory syndrome coronavirus 2
LLPLTQYNR

SEQ ID NO: 2722 - protein, 9 aa, Severe acute respiratory syndrome coronavirus 2
LPLTQYNRY

SEQ ID NO: 2723 - protein, 9 aa, Severe acute respiratory syndrome coronavirus 2
LTQYNRYLA

SEQ ID NO: 2724 - protein, 9 aa, Severe acute respiratory syndrome coronavirus 2
TQYNRYLAL

SEQ ID NO: 2725 - protein, 9 aa, Severe acute respiratory syndrome coronavirus 2
QYNRYLALY

SEQ ID NO: 2726 - protein, 9 aa, Severe acute respiratory syndrome coronavirus 2
NRYLALYNK

SEQ ID NO: 2727 - protein, 9 aa, Severe acute respiratory syndrome coronavirus 2
RYLALYNKY

SEQ ID NO: 2728 - protein, 9 aa, Severe acute respiratory syndrome coronavirus 2
YLALYNKYK

SEQ ID NO: 2729 - protein, 9 aa, Severe acute respiratory syndrome coronavirus 2
LALYNKYKY

SEQ ID NO: 2730 - protein, 9 aa, Severe acute respiratory syndrome coronavirus 2
ALYNKYKYF

SEQ ID NO: 2731 - protein, 9 aa, Severe acute respiratory syndrome coronavirus 2
YNKYKYFSG

SEQ ID NO: 2732 - protein, 9 aa, Severe acute respiratory syndrome coronavirus 2
NKYKYFSGA

SEQ ID NO: 2733 - protein, 9 aa, Severe acute respiratory syndrome coronavirus 2
KYKYFSGAM

SEQ ID NO: 2734 - protein, 9 aa, Severe acute respiratory syndrome coronavirus 2
SGAMDTTSY

SEQ ID NO: 2735 - protein, 9 aa, Severe acute respiratory syndrome coronavirus 2
GAMDTTSYR

SEQ ID NO: 2736 - protein, 9 aa, Severe acute respiratory syndrome coronavirus 2
DTTSYREAA

SEQ ID NO: 2737 - protein, 9 aa, Severe acute respiratory syndrome coronavirus 2
SYREAACCH

SEQ ID NO: 2738 - protein, 9 aa, Severe acute respiratory syndrome coronavirus 2
YREAACCHL

SEQ ID NO: 2739 - protein, 9 aa, Severe acute respiratory syndrome coronavirus 2
REAACCHLA

SEQ ID NO: 2740 - protein, 9 aa, Severe acute respiratory syndrome coronavirus 2
EAACCHLAK

SEQ ID NO: 2741 - protein, 9 aa, Severe acute respiratory syndrome coronavirus 2
HLAKALNDF

SEQ ID NO: 2742 - protein, 9 aa, Severe acute respiratory syndrome coronavirus 2
FSNSGSDVL

SEQ ID NO: 2743 - protein, 9 aa, Severe acute respiratory syndrome coronavirus 2
SNSGSDVLY

SEQ ID NO: 2744 - protein, 9 aa, Severe acute respiratory syndrome coronavirus 2
LYQPPQTSI

SEQ ID NO: 2745 - protein, 9 aa, Severe acute respiratory syndrome coronavirus 2
QTSITSAVL

SEQ ID NO: 2746 - protein, 9 aa, Severe acute respiratory syndrome coronavirus 2
TSAVLQSGF

SEQ ID NO: 2747 - protein, 9 aa, Severe acute respiratory syndrome coronavirus 2
SAVLQSGFR

SEQ ID NO: 2748 - protein, 9 aa, Severe acute respiratory syndrome coronavirus 2
AVLQSGFRK

SEQ ID NO: 2749 - protein, 9 aa, Severe acute respiratory syndrome coronavirus 2
VLQSGFRKM

SEQ ID NO: 2750 - protein, 9 aa, Severe acute respiratory syndrome coronavirus 2
QSGFRKMAF

SEQ ID NO: 2751 - protein, 9 aa, Severe acute respiratory syndrome coronavirus 2
GFRKMAFPS

SEQ ID NO: 2752 - protein, 9 aa, Severe acute respiratory syndrome coronavirus 2
RKMAFPSGK

SEQ ID NO: 2753 - protein, 9 aa, Severe acute respiratory syndrome coronavirus 2
KMAFPSGKV

SEQ ID NO: 2754 - protein, 9 aa, Severe acute respiratory syndrome coronavirus 2
KVEGCMVQV

SEQ ID NO: 2755 - protein, 9 aa, Severe acute respiratory syndrome coronavirus 2
VEGCMVQVT

SEQ ID NO: 2756 - protein, 9 aa, Severe acute respiratory syndrome coronavirus 2
CMVQVTCGT

SEQ ID NO: 2757 - protein, 9 aa, Severe acute respiratory syndrome coronavirus 2
VQVTCGTTT

SEQ ID NO: 2758 - protein, 9 aa, Severe acute respiratory syndrome coronavirus 2
GTTTLNGLW

SEQ ID NO: 2759 - protein, 9 aa, Severe acute respiratory syndrome coronavirus 2
TTTLNGLWL

SEQ ID NO: 2760 - protein, 9 aa, Severe acute respiratory syndrome coronavirus 2
GLWLDDVVY

SEQ ID NO: 2761 - protein, 9 aa, Severe acute respiratory syndrome coronavirus 2
WLDDVVYCP

SEQ ID NO: 2762 - protein, 9 aa, Severe acute respiratory syndrome coronavirus 2
DVVYCPRHV

SEQ ID NO: 2763 - protein, 9 aa, Severe acute respiratory syndrome coronavirus 2
VVYCPRHVI

SEQ ID NO: 2764 - protein, 9 aa, Severe acute respiratory syndrome coronavirus 2
CPRHVICTS

SEQ ID NO: 2765 - protein, 9 aa, Severe acute respiratory syndrome coronavirus 2
HVICTSEDM

SEQ ID NO: 2766 - protein, 9 aa, Severe acute respiratory syndrome coronavirus 2
SEDMLNPNY

SEQ ID NO: 2767 - protein, 9 aa, Severe acute respiratory syndrome coronavirus 2
MLNPNYEDL

SEQ ID NO: 2768 - protein, 9 aa, Severe acute respiratory syndrome coronavirus 2
NPNYEDLLI

SEQ ID NO: 2769 - protein, 9 aa, Severe acute respiratory syndrome coronavirus 2
LIRKSNHNF

SEQ ID NO: 2770 - protein, 9 aa, Severe acute respiratory syndrome coronavirus 2
IRKSNHNFL

SEQ ID NO: 2771 - protein, 9 aa, Severe acute respiratory syndrome coronavirus 2
RKSNHNFLV

SEQ ID NO: 2772 - protein, 9 aa, Severe acute respiratory syndrome coronavirus 2
LVQAGNVQL

SEQ ID NO: 2773 - protein, 9 aa, Severe acute respiratory syndrome coronavirus 2
VQAGNVQLR

SEQ ID NO: 2774 - protein, 9 aa, Severe acute respiratory syndrome coronavirus 2
QLRVIGHSM

SEQ ID NO: 2775 - protein, 9 aa, Severe acute respiratory syndrome coronavirus 2
RVIGHSMQN

SEQ ID NO: 2776 - protein, 9 aa, Severe acute respiratory syndrome coronavirus 2
GHSMQNCVL

SEQ ID NO: 2777 - protein, 9 aa, Severe acute respiratory syndrome coronavirus 2
HSMQNCVLK

SEQ ID NO: 2778 - protein, 9 aa, Severe acute respiratory syndrome coronavirus 2
SMQNCVLKL

SEQ ID NO: 2779 - protein, 9 aa, Severe acute respiratory syndrome coronavirus 2
MQNCVLKLK

SEQ ID NO: 2780 - protein, 9 aa, Severe acute respiratory syndrome coronavirus 2
VLKLKVDTA

SEQ ID NO: 2781 - protein, 9 aa, Severe acute respiratory syndrome coronavirus 2
DTANPKTPK

SEQ ID NO: 2782 - protein, 9 aa, Severe acute respiratory syndrome coronavirus 2
TANPKTPKY

SEQ ID NO: 2783 - protein, 9 aa, Severe acute respiratory syndrome coronavirus 2
NPKTPKYKF

SEQ ID NO: 2784 - protein, 9 aa, Severe acute respiratory syndrome coronavirus 2
KTPKYKFVR

SEQ ID NO: 2785 - protein, 9 aa, Severe acute respiratory syndrome coronavirus 2
TPKYKFVRI

SEQ ID NO: 2786 - protein, 9 aa, Severe acute respiratory syndrome coronavirus 2
KYKFVRIQP

SEQ ID NO: 2787 - protein, 9 aa, Severe acute respiratory syndrome coronavirus 2
YKFVRIQPG

SEQ ID NO: 2788 - protein, 9 aa, Severe acute respiratory syndrome coronavirus 2
VRIQPGQTF

SEQ ID NO: 2789 - protein, 9 aa, Severe acute respiratory syndrome coronavirus 2
RIQPGQTFS

SEQ ID NO: 2790 - protein, 9 aa, Severe acute respiratory syndrome coronavirus 2
IQPGQTFSV

SEQ ID NO: 2791 - protein, 9 aa, Severe acute respiratory syndrome coronavirus 2
QPGQTFSVL

SEQ ID NO: 2792 - protein, 9 aa, Severe acute respiratory syndrome coronavirus 2
QTFSVLACY

SEQ ID NO: 2793 - protein, 9 aa, Severe acute respiratory syndrome coronavirus 2
CYNGSPSGV

SEQ ID NO: 2794 - protein, 9 aa, Severe acute respiratory syndrome coronavirus 2
YNGSPSGVY

SEQ ID NO: 2795 - protein, 9 aa, Severe acute respiratory syndrome coronavirus 2
SPSGVYQCA

SEQ ID NO: 2796 - protein, 9 aa, Severe acute respiratory syndrome coronavirus 2
SGVYQCAMR

SEQ ID NO: 2797 - protein, 9 aa, Severe acute respiratory syndrome coronavirus 2
YQCAMRPNF

SEQ ID NO: 2798 - protein, 9 aa, Severe acute respiratory syndrome coronavirus 2
CAMRPNFTI

SEQ ID NO: 2799 - protein, 9 aa, Severe acute respiratory syndrome coronavirus 2
AMRPNFTIK

SEQ ID NO: 2800 - protein, 9 aa, Severe acute respiratory syndrome coronavirus 2
NFTIKGSFL

SEQ ID NO: 2801 - protein, 9 aa, Severe acute respiratory syndrome coronavirus 2
TIKGSFLNG

SEQ ID NO: 2802 - protein, 9 aa, Severe acute respiratory syndrome coronavirus 2
FLNGSCGSV

SEQ ID NO: 2803 - protein, 9 aa, Severe acute respiratory syndrome coronavirus 2
GSVGFNIDY

SEQ ID NO: 2804 - protein, 9 aa, Severe acute respiratory syndrome coronavirus 2
NIDYDCVSF

SEQ ID NO: 2805 - protein, 9 aa, Severe acute respiratory syndrome coronavirus 2
DYDCVSFCY

SEQ ID NO: 2806 - protein, 9 aa, Severe acute respiratory syndrome coronavirus 2
CVSFCYMHH

SEQ ID NO: 2807 - protein, 9 aa, Severe acute respiratory syndrome coronavirus 2
VSFCYMHHM

SEQ ID NO: 2808 - protein, 9 aa, Severe acute respiratory syndrome coronavirus 2
FCYMHHMEL

SEQ ID NO: 2809 - protein, 9 aa, Severe acute respiratory syndrome coronavirus 2
YMHHMELPT

SEQ ID NO: 2810 - protein, 9 aa, Severe acute respiratory syndrome coronavirus 2
HHMELPTGV

SEQ ID NO: 2811 - protein, 9 aa, Severe acute respiratory syndrome coronavirus 2
MELPTGVHA

SEQ ID NO: 2812 - protein, 9 aa, Severe acute respiratory syndrome coronavirus 2
LPTGVHAGT

SEQ ID NO: 2813 - protein, 9 aa, Severe acute respiratory syndrome coronavirus 2
GTDLEGNFY

SEQ ID NO: 2814 - protein, 9 aa, Severe acute respiratory syndrome coronavirus 2
LEGNFYGPF

SEQ ID NO: 2815 - protein, 9 aa, Severe acute respiratory syndrome coronavirus 2
EGNFYGPFV

SEQ ID NO: 2816 - protein, 9 aa, Severe acute respiratory syndrome coronavirus 2
NFYGPFVDR

SEQ ID NO: 2817 - protein, 9 aa, Severe acute respiratory syndrome coronavirus 2
GPFVDRQTA

SEQ ID NO: 2818 - protein, 9 aa, Severe acute respiratory syndrome coronavirus 2
FVDRQTAQA

SEQ ID NO: 2819 - protein, 9 aa, Severe acute respiratory syndrome coronavirus 2
TTITVNVLA

SEQ ID NO: 2820 - protein, 9 aa, Severe acute respiratory syndrome coronavirus 2
TITVNVLAW

SEQ ID NO: 2821 - protein, 9 aa, Severe acute respiratory syndrome coronavirus 2
ITVNVLAWL

SEQ ID NO: 2822 - protein, 9 aa, Severe acute respiratory syndrome coronavirus 2
TVNVLAWLY

SEQ ID NO: 2823 - protein, 9 aa, Severe acute respiratory syndrome coronavirus 2
NVLAWLYAA

SEQ ID NO: 2824 - protein, 9 aa, Severe acute respiratory syndrome coronavirus 2
VLAWLYAAV

SEQ ID NO: 2825 - protein, 9 aa, Severe acute respiratory syndrome coronavirus 2
LAWLYAAVI

SEQ ID NO: 2826 - protein, 9 aa, Severe acute respiratory syndrome coronavirus 2
WLYAAVING

SEQ ID NO: 2827 - protein, 9 aa, Severe acute respiratory syndrome coronavirus 2
YAAVINGDR

SEQ ID NO: 2828 - protein, 9 aa, Severe acute respiratory syndrome coronavirus 2
AAVINGDRW

SEQ ID NO: 2829 - protein, 9 aa, Severe acute respiratory syndrome coronavirus 2
AVINGDRWF

SEQ ID NO: 2830 - protein, 9 aa, Severe acute respiratory syndrome coronavirus 2
VINGDRWFL

SEQ ID NO: 2831 - protein, 9 aa, Severe acute respiratory syndrome coronavirus 2
NGDRWFLNR

SEQ ID NO: 2832 - protein, 9 aa, Severe acute respiratory syndrome coronavirus 2
DRWFLNRFT

SEQ ID NO: 2833 - protein, 9 aa, Severe acute respiratory syndrome coronavirus 2
RWFLNRFTT

SEQ ID NO: 2834 - protein, 9 aa, Severe acute respiratory syndrome coronavirus 2
WFLNRFTTT

SEQ ID NO: 2835 - protein, 9 aa, Severe acute respiratory syndrome coronavirus 2
FLNRFTTTL

SEQ ID NO: 2836 - protein, 9 aa, Severe acute respiratory syndrome coronavirus 2
RFTTTLNDF

SEQ ID NO: 2837 - protein, 9 aa, Severe acute respiratory syndrome coronavirus 2
TTTLNDFNL

SEQ ID NO: 2838 - protein, 9 aa, Severe acute respiratory syndrome coronavirus 2
TTLNDFNLV

SEQ ID NO: 2839 - protein, 9 aa, Severe acute respiratory syndrome coronavirus 2
TLNDFNLVA

SEQ ID NO: 2840 - protein, 9 aa, Severe acute respiratory syndrome coronavirus 2
LNDFNLVAM

SEQ ID NO: 2841 - protein, 9 aa, Severe acute respiratory syndrome coronavirus 2
DFNLVAMKY

SEQ ID NO: 2842 - protein, 9 aa, Severe acute respiratory syndrome coronavirus 2
NLVAMKYNY

SEQ ID NO: 2843 - protein, 9 aa, Severe acute respiratory syndrome coronavirus 2
AMKYNYEPL

SEQ ID NO: 2844 - protein, 9 aa, Severe acute respiratory syndrome coronavirus 2
LTQDHVDIL

SEQ ID NO: 2845 - protein, 9 aa, Severe acute respiratory syndrome coronavirus 2
DHVDILGPL

SEQ ID NO: 2846 - protein, 9 aa, Severe acute respiratory syndrome coronavirus 2
ILGPLSAQT

SEQ ID NO: 2847 - protein, 9 aa, Severe acute respiratory syndrome coronavirus 2
GPLSAQTGI

SEQ ID NO: 2848 - protein, 9 aa, Severe acute respiratory syndrome coronavirus 2
LSAQTGIAV

SEQ ID NO: 2849 - protein, 9 aa, Severe acute respiratory syndrome coronavirus 2
SAQTGIAVL

SEQ ID NO: 2850 - protein, 9 aa, Severe acute respiratory syndrome coronavirus 2
AVLDMCASL

SEQ ID NO: 2851 - protein, 9 aa, Severe acute respiratory syndrome coronavirus 2
VLDMCASLK

SEQ ID NO: 2852 - protein, 9 aa, Severe acute respiratory syndrome coronavirus 2
LLQNGMNGR

SEQ ID NO: 2853 - protein, 9 aa, Severe acute respiratory syndrome coronavirus 2
GRTILGSAL

SEQ ID NO: 2854 - protein, 9 aa, Severe acute respiratory syndrome coronavirus 2
RTILGSALL

SEQ ID NO: 2855 - protein, 9 aa, Severe acute respiratory syndrome coronavirus 2
LLEDEFTPF

SEQ ID NO: 2856 - protein, 9 aa, Severe acute respiratory syndrome coronavirus 2
DEFTPFDVV

SEQ ID NO: 2857 - protein, 9 aa, Severe acute respiratory syndrome coronavirus 2
EFTPFDVVR

SEQ ID NO: 2858 - protein, 9 aa, Severe acute respiratory syndrome coronavirus 2
TPFDVVRQC

SEQ ID NO: 2859 - protein, 9 aa, Severe acute respiratory syndrome coronavirus 2
DVVRQCSGV

SEQ ID NO: 2860 - protein, 9 aa, Severe acute respiratory syndrome coronavirus 2
VRQCSGVTF

SEQ ID NO: 2861 - protein, 9 aa, Severe acute respiratory syndrome coronavirus 2
GVTFQSAVK

SEQ ID NO: 2862 - protein, 9 aa, Severe acute respiratory syndrome coronavirus 2
VTFQSAVKR

SEQ ID NO: 2863 - protein, 9 aa, Severe acute respiratory syndrome coronavirus 2
FQSAVKRTI

SEQ ID NO: 2864 - protein, 9 aa, Severe acute respiratory syndrome coronavirus 2
QSAVKRTIK

SEQ ID NO: 2865 - protein, 9 aa, Severe acute respiratory syndrome coronavirus 2
RTIKGTHHW

SEQ ID NO: 2866 - protein, 9 aa, Severe acute respiratory syndrome coronavirus 2
THHWLLLTI

SEQ ID NO: 2867 - protein, 9 aa, Severe acute respiratory syndrome coronavirus 2
HHWLLLTIL

SEQ ID NO: 2868 - protein, 9 aa, Severe acute respiratory syndrome coronavirus 2
WLLLTILTS

SEQ ID NO: 2869 - protein, 9 aa, Severe acute respiratory syndrome coronavirus 2
LLLTILTSL

SEQ ID NO: 2870 - protein, 9 aa, Severe acute respiratory syndrome coronavirus 2
LLTILTSLL

SEQ ID NO: 2871 - protein, 9 aa, Severe acute respiratory syndrome coronavirus 2
LTILTSLLV

SEQ ID NO: 2872 - protein, 9 aa, Severe acute respiratory syndrome coronavirus 2
TILTSLLVL

SEQ ID NO: 2873 - protein, 9 aa, Severe acute respiratory syndrome coronavirus 2
ILTSLLVLV

SEQ ID NO: 2874 - protein, 9 aa, Severe acute respiratory syndrome coronavirus 2
SLLVLVQST

SEQ ID NO: 2875 - protein, 9 aa, Severe acute respiratory syndrome coronavirus 2
LVLVQSTQW

SEQ ID NO: 2876 - protein, 9 aa, Severe acute respiratory syndrome coronavirus 2
LVQSTQWSL

SEQ ID NO: 2877 - protein, 9 aa, Severe acute respiratory syndrome coronavirus 2
VQSTQWSLF

SEQ ID NO: 2878 - protein, 9 aa, Severe acute respiratory syndrome coronavirus 2
QSTQWSLFF

SEQ ID NO: 2879 - protein, 9 aa, Severe acute respiratory syndrome coronavirus 2
STQWSLFFF

SEQ ID NO: 2880 - protein, 9 aa, Severe acute respiratory syndrome coronavirus 2
TQWSLFFFL

SEQ ID NO: 2881 - protein, 9 aa, Severe acute respiratory syndrome coronavirus 2
QWSLFFFLY

SEQ ID NO: 2882 - protein, 9 aa, Severe acute respiratory syndrome coronavirus 2
SLFFFLYEN

SEQ ID NO: 2883 - protein, 9 aa, Severe acute respiratory syndrome coronavirus 2
FFFLYENAF

SEQ ID NO: 2884 - protein, 9 aa, Severe acute respiratory syndrome coronavirus 2
FFLYENAFL

SEQ ID NO: 2885 - protein, 9 aa, Severe acute respiratory syndrome coronavirus 2
FLYENAFLP

SEQ ID NO: 2886 - protein, 9 aa, Severe acute respiratory syndrome coronavirus 2
LYENAFLPF

SEQ ID NO: 2887 - protein, 9 aa, Severe acute respiratory syndrome coronavirus 2
YENAFLPFA

SEQ ID NO: 2888 - protein, 9 aa, Severe acute respiratory syndrome coronavirus 2
ENAFLPFAM

SEQ ID NO: 2889 - protein, 9 aa, Severe acute respiratory syndrome coronavirus 2
AFLPFAMGI

SEQ ID NO: 2890 - protein, 9 aa, Severe acute respiratory syndrome coronavirus 2
FLPFAMGII

SEQ ID NO: 2891 - protein, 9 aa, Severe acute respiratory syndrome coronavirus 2
LPFAMGIIA

SEQ ID NO: 2892 - protein, 9 aa, Severe acute respiratory syndrome coronavirus 2
PFAMGIIAM

SEQ ID NO: 2893 - protein, 9 aa, Severe acute respiratory syndrome coronavirus 2
FAMGIIAMS

SEQ ID NO: 2894 - protein, 9 aa, Severe acute respiratory syndrome coronavirus 2
AMGIIAMSA

SEQ ID NO: 2895 - protein, 9 aa, Severe acute respiratory syndrome coronavirus 2
MGIIAMSAF

SEQ ID NO: 2896 - protein, 9 aa, Severe acute respiratory syndrome coronavirus 2
GIIAMSAFA

SEQ ID NO: 2897 - protein, 9 aa, Severe acute respiratory syndrome coronavirus 2
IIAMSAFAM

SEQ ID NO: 2898 - protein, 9 aa, Severe acute respiratory syndrome coronavirus 2
IAMSAFAMM

SEQ ID NO: 2899 - protein, 9 aa, Severe acute respiratory syndrome coronavirus 2
AMSAFAMMF

SEQ ID NO: 2900 - protein, 9 aa, Severe acute respiratory syndrome coronavirus 2
MSAFAMMFV

SEQ ID NO: 2901 - protein, 9 aa, Severe acute respiratory syndrome coronavirus 2
SAFAMMFVK

SEQ ID NO: 2902 - protein, 9 aa, Severe acute respiratory syndrome coronavirus 2
FAMMFVKHK

SEQ ID NO: 2903 - protein, 9 aa, Severe acute respiratory syndrome coronavirus 2
AMMFVKHKH

SEQ ID NO: 2904 - protein, 9 aa, Severe acute respiratory syndrome coronavirus 2
MMFVKHKHA

SEQ ID NO: 2905 - protein, 9 aa, Severe acute respiratory syndrome coronavirus 2
MFVKHKHAF

SEQ ID NO: 2906 - protein, 9 aa, Severe acute respiratory syndrome coronavirus 2
FVKHKHAFL

SEQ ID NO: 2907 - protein, 9 aa, Severe acute respiratory syndrome coronavirus 2
KHKHAFLCL

SEQ ID NO: 2908 - protein, 9 aa, Severe acute respiratory syndrome coronavirus 2
HKHAFLCLF

SEQ ID NO: 2909 - protein, 9 aa, Severe acute respiratory syndrome coronavirus 2
KHAFLCLFL

SEQ ID NO: 2910 - protein, 9 aa, Severe acute respiratory syndrome coronavirus 2
HAFLCLFLL

SEQ ID NO: 2911 - protein, 9 aa, Severe acute respiratory syndrome coronavirus 2
FLCLFLLPS

SEQ ID NO: 2912 - protein, 9 aa, Severe acute respiratory syndrome coronavirus 2
CLFLLPSLA

SEQ ID NO: 2913 - protein, 9 aa, Severe acute respiratory syndrome coronavirus 2
FLLPSLATV

SEQ ID NO: 2914 - protein, 9 aa, Severe acute respiratory syndrome coronavirus 2
LLPSLATVA

SEQ ID NO: 2915 - protein, 9 aa, Severe acute respiratory syndrome coronavirus 2
LPSLATVAY

SEQ ID NO: 2916 - protein, 9 aa, Severe acute respiratory syndrome coronavirus 2
PSLATVAYF

SEQ ID NO: 2917 - protein, 9 aa, Severe acute respiratory syndrome coronavirus 2
LATVAYFNM

SEQ ID NO: 2918 - protein, 9 aa, Severe acute respiratory syndrome coronavirus 2
ATVAYFNMV

SEQ ID NO: 2919 - protein, 9 aa, Severe acute respiratory syndrome coronavirus 2
TVAYFNMVY

SEQ ID NO: 2920 - protein, 9 aa, Severe acute respiratory syndrome coronavirus 2
VAYFNMVYM

SEQ ID NO: 2921 - protein, 9 aa, Severe acute respiratory syndrome coronavirus 2
YFNMVYMPA

SEQ ID NO: 2922 - protein, 9 aa, Severe acute respiratory syndrome coronavirus 2
NMVYMPASW

SEQ ID NO: 2923 - protein, 9 aa, Severe acute respiratory syndrome coronavirus 2
MVYMPASWV

SEQ ID NO: 2924 - protein, 9 aa, Severe acute respiratory syndrome coronavirus 2
VYMPASWVM

SEQ ID NO: 2925 - protein, 9 aa, Severe acute respiratory syndrome coronavirus 2
YMPASWVMR

SEQ ID NO: 2926 - protein, 9 aa, Severe acute respiratory syndrome coronavirus 2
MPASWVMRI

SEQ ID NO: 2927 - protein, 9 aa, Severe acute respiratory syndrome coronavirus 2
SWVMRIMTW

SEQ ID NO: 2928 - protein, 9 aa, Severe acute respiratory syndrome coronavirus 2
WVMRIMTWL

SEQ ID NO: 2929 - protein, 9 aa, Severe acute respiratory syndrome coronavirus 2
MRIMTWLDM

SEQ ID NO: 2930 - protein, 9 aa, Severe acute respiratory syndrome coronavirus 2
RIMTWLDMV

SEQ ID NO: 2931 - protein, 9 aa, Severe acute respiratory syndrome coronavirus 2
WLDMVDTSL

SEQ ID NO: 2932 - protein, 9 aa, Severe acute respiratory syndrome coronavirus 2
MVDTSLSGF

SEQ ID NO: 2933 - protein, 9 aa, Severe acute respiratory syndrome coronavirus 2
DTSLSGFKL

SEQ ID NO: 2934 - protein, 9 aa, Severe acute respiratory syndrome coronavirus 2
TSLSGFKLK

SEQ ID NO: 2935 - protein, 9 aa, Severe acute respiratory syndrome coronavirus 2
FKLKDCVMY

SEQ ID NO: 2936 - protein, 9 aa, Severe acute respiratory syndrome coronavirus 2
KLKDCVMYA

SEQ ID NO: 2937 - protein, 9 aa, Severe acute respiratory syndrome coronavirus 2
CVMYASAVV

SEQ ID NO: 2938 - protein, 9 aa, Severe acute respiratory syndrome coronavirus 2
VMYASAVVL

SEQ ID NO: 2939 - protein, 9 aa, Severe acute respiratory syndrome coronavirus 2
MYASAVVLL

SEQ ID NO: 2940 - protein, 9 aa, Severe acute respiratory syndrome coronavirus 2
YASAVVLLI

SEQ ID NO: 2941 - protein, 9 aa, Severe acute respiratory syndrome coronavirus 2
ASAVVLLIL

SEQ ID NO: 2942 - protein, 9 aa, Severe acute respiratory syndrome coronavirus 2
SAVVLLILM

SEQ ID NO: 2943 - protein, 9 aa, Severe acute respiratory syndrome coronavirus 2
VVLLILMTA

SEQ ID NO: 2944 - protein, 9 aa, Severe acute respiratory syndrome coronavirus 2
VLLILMTAR

SEQ ID NO: 2945 - protein, 9 aa, Severe acute respiratory syndrome coronavirus 2
LLILMTART

SEQ ID NO: 2946 - protein, 9 aa, Severe acute respiratory syndrome coronavirus 2
LILMTARTV

SEQ ID NO: 2947 - protein, 9 aa, Severe acute respiratory syndrome coronavirus 2
ILMTARTVY

SEQ ID NO: 2948 - protein, 9 aa, Severe acute respiratory syndrome coronavirus 2
RTVYDDGAR

SEQ ID NO: 2949 - protein, 9 aa, Severe acute respiratory syndrome coronavirus 2
TVYDDGARR

SEQ ID NO: 2950 - protein, 9 aa, Severe acute respiratory syndrome coronavirus 2
VYDDGARRV

SEQ ID NO: 2951 - protein, 9 aa, Severe acute respiratory syndrome coronavirus 2
DGARRVWTL

SEQ ID NO: 2952 - protein, 9 aa, Severe acute respiratory syndrome coronavirus 2
GARRVWTLM

SEQ ID NO: 2953 - protein, 9 aa, Severe acute respiratory syndrome coronavirus 2
RRVWTLMNV

SEQ ID NO: 2954 - protein, 9 aa, Severe acute respiratory syndrome coronavirus 2
RVWTLMNVL

SEQ ID NO: 2955 - protein, 9 aa, Severe acute respiratory syndrome coronavirus 2
WTLMNVLTL

SEQ ID NO: 2956 - protein, 9 aa, Severe acute respiratory syndrome coronavirus 2
TLMNVLTLV

SEQ ID NO: 2957 - protein, 9 aa, Severe acute respiratory syndrome coronavirus 2
LMNVLTLVY

SEQ ID NO: 2958 - protein, 9 aa, Severe acute respiratory syndrome coronavirus 2
MNVLTLVYK

SEQ ID NO: 2959 - protein, 9 aa, Severe acute respiratory syndrome coronavirus 2
NVLTLVYKV

SEQ ID NO: 2960 - protein, 9 aa, Severe acute respiratory syndrome coronavirus 2
VLTLVYKVY

SEQ ID NO: 2961 - protein, 9 aa, Severe acute respiratory syndrome coronavirus 2
LTLVYKVYY

SEQ ID NO: 2962 - protein, 9 aa, Severe acute respiratory syndrome coronavirus 2
TLVYKVYYG

SEQ ID NO: 2963 - protein, 9 aa, Severe acute respiratory syndrome coronavirus 2
YKVYYGNAL

SEQ ID NO: 2964 - protein, 9 aa, Severe acute respiratory syndrome coronavirus 2
NALDQAISM

SEQ ID NO: 2965 - protein, 9 aa, Severe acute respiratory syndrome coronavirus 2
DQAISMWAL

SEQ ID NO: 2966 - protein, 9 aa, Severe acute respiratory syndrome coronavirus 2
QAISMWALI

SEQ ID NO: 2967 - protein, 9 aa, Severe acute respiratory syndrome coronavirus 2
SMWALIISV

SEQ ID NO: 2968 - protein, 9 aa, Severe acute respiratory syndrome coronavirus 2
LIISVTSNY

SEQ ID NO: 2969 - protein, 9 aa, Severe acute respiratory syndrome coronavirus 2
SVTSNYSGV

SEQ ID NO: 2970 - protein, 9 aa, Severe acute respiratory syndrome coronavirus 2
VTSNYSGVV

SEQ ID NO: 2971 - protein, 9 aa, Severe acute respiratory syndrome coronavirus 2
NYSGVVTTV

SEQ ID NO: 2972 - protein, 9 aa, Severe acute respiratory syndrome coronavirus 2
YSGVVTTVM

SEQ ID NO: 2973 - protein, 9 aa, Severe acute respiratory syndrome coronavirus 2
SGVVTTVMF

SEQ ID NO: 2974 - protein, 9 aa, Severe acute respiratory syndrome coronavirus 2
GVVTTVMFL

SEQ ID NO: 2975 - protein, 9 aa, Severe acute respiratory syndrome coronavirus 2
VVTTVMFLA

SEQ ID NO: 2976 - protein, 9 aa, Severe acute respiratory syndrome coronavirus 2
VTTVMFLAR

SEQ ID NO: 2977 - protein, 9 aa, Severe acute respiratory syndrome coronavirus 2
TVMFLARGI

SEQ ID NO: 2978 - protein, 9 aa, Severe acute respiratory syndrome coronavirus 2
VMFLARGIV

SEQ ID NO: 2979 - protein, 9 aa, Severe acute respiratory syndrome coronavirus 2
MFLARGIVF

SEQ ID NO: 2980 - protein, 9 aa, Severe acute respiratory syndrome coronavirus 2
FLARGIVFM

SEQ ID NO: 2981 - protein, 9 aa, Severe acute respiratory syndrome coronavirus 2
ARGIVFMCV

SEQ ID NO: 2982 - protein, 9 aa, Severe acute respiratory syndrome coronavirus 2
GIVFMCVEY

SEQ ID NO: 2983 - protein, 9 aa, Severe acute respiratory syndrome coronavirus 2
FMCVEYCPI

SEQ ID NO: 2984 - protein, 9 aa, Severe acute respiratory syndrome coronavirus 2
MCVEYCPIF

SEQ ID NO: 2985 - protein, 9 aa, Severe acute respiratory syndrome coronavirus 2
VEYCPIFFI

SEQ ID NO: 2986 - protein, 9 aa, Severe acute respiratory syndrome coronavirus 2
IFFITGNTL

SEQ ID NO: 2987 - protein, 9 aa, Severe acute respiratory syndrome coronavirus 2
NTLQCIMLV

SEQ ID NO: 2988 - protein, 9 aa, Severe acute respiratory syndrome coronavirus 2
TLQCIMLVY

SEQ ID NO: 2989 - protein, 9 aa, Severe acute respiratory syndrome coronavirus 2
CIMLVYCFL

SEQ ID NO: 2990 - protein, 9 aa, Severe acute respiratory syndrome coronavirus 2
MLVYCFLGY

SEQ ID NO: 2991 - protein, 9 aa, Severe acute respiratory syndrome coronavirus 2
LVYCFLGYF

SEQ ID NO: 2992 - protein, 9 aa, Severe acute respiratory syndrome coronavirus 2
FLGYFCTCY

SEQ ID NO: 2993 - protein, 9 aa, Severe acute respiratory syndrome coronavirus 2
LGYFCTCYF

SEQ ID NO: 2994 - protein, 9 aa, Severe acute respiratory syndrome coronavirus 2
YFCTCYFGL

SEQ ID NO: 2995 - protein, 9 aa, Severe acute respiratory syndrome coronavirus 2
CYFGLFCLL

SEQ ID NO: 2996 - protein, 9 aa, Severe acute respiratory syndrome coronavirus 2
FGLFCLLNR

SEQ ID NO: 2997 - protein, 9 aa, Severe acute respiratory syndrome coronavirus 2
GLFCLLNRY

SEQ ID NO: 2998 - protein, 9 aa, Severe acute respiratory syndrome coronavirus 2
LFCLLNRYF

SEQ ID NO: 2999 - protein, 9 aa, Severe acute respiratory syndrome coronavirus 2
FCLLNRYFR

SEQ ID NO: 3000 - protein, 9 aa, Severe acute respiratory syndrome coronavirus 2
CLLNRYFRL

SEQ ID NO: 3001 - protein, 9 aa, Severe acute respiratory syndrome coronavirus 2
LLNRYFRLT

SEQ ID NO: 3002 - protein, 9 aa, Severe acute respiratory syndrome coronavirus 2
LNRYFRLTL

SEQ ID NO: 3003 - protein, 9 aa, Severe acute respiratory syndrome coronavirus 2
RYFRLTLGV

SEQ ID NO: 3004 - protein, 9 aa, Severe acute respiratory syndrome coronavirus 2
YFRLTLGVY

SEQ ID NO: 3005 - protein, 9 aa, Severe acute respiratory syndrome coronavirus 2
RLTLGVYDY

SEQ ID NO: 3006 - protein, 9 aa, Severe acute respiratory syndrome coronavirus 2
LTLGVYDYL

SEQ ID NO: 3007 - protein, 9 aa, Severe acute respiratory syndrome coronavirus 2
TLGVYDYLV

SEQ ID NO: 3008 - protein, 9 aa, Severe acute respiratory syndrome coronavirus 2
GVYDYLVST

SEQ ID NO: 3009 - protein, 9 aa, Severe acute respiratory syndrome coronavirus 2
DYLVSTQEF

SEQ ID NO: 3010 - protein, 9 aa, Severe acute respiratory syndrome coronavirus 2
YLVSTQEFR

SEQ ID NO: 3011 - protein, 9 aa, Severe acute respiratory syndrome coronavirus 2
LVSTQEFRY

SEQ ID NO: 3012 - protein, 9 aa, Severe acute respiratory syndrome coronavirus 2
VSTQEFRYM

SEQ ID NO: 3013 - protein, 9 aa, Severe acute respiratory syndrome coronavirus 2
FRYMNSQGL

SEQ ID NO: 3014 - protein, 9 aa, Severe acute respiratory syndrome coronavirus 2
RYMNSQGLL

SEQ ID NO: 3015 - protein, 9 aa, Severe acute respiratory syndrome coronavirus 2
NSQGLLPPK

SEQ ID NO: 3016 - protein, 9 aa, Severe acute respiratory syndrome coronavirus 2
GLLPPKNSI

SEQ ID NO: 3017 - protein, 9 aa, Severe acute respiratory syndrome coronavirus 2
SIDAFKLNI

SEQ ID NO: 3018 - protein, 9 aa, Severe acute respiratory syndrome coronavirus 2
AFKLNIKLL

SEQ ID NO: 3019 - protein, 9 aa, Severe acute respiratory syndrome coronavirus 2
KLNIKLLGV

SEQ ID NO: 3020 - protein, 9 aa, Severe acute respiratory syndrome coronavirus 2
KPCIKVATV

SEQ ID NO: 3021 - protein, 9 aa, Severe acute respiratory syndrome coronavirus 2
KVATVQSKM

SEQ ID NO: 3022 - protein, 9 aa, Severe acute respiratory syndrome coronavirus 2
TVQSKMSDV

SEQ ID NO: 3023 - protein, 9 aa, Severe acute respiratory syndrome coronavirus 2
MSDVKCTSV

SEQ ID NO: 3024 - protein, 9 aa, Severe acute respiratory syndrome coronavirus 2
SDVKCTSVV

SEQ ID NO: 3025 - protein, 9 aa, Severe acute respiratory syndrome coronavirus 2
VKCTSVVLL

SEQ ID NO: 3026 - protein, 9 aa, Severe acute respiratory syndrome coronavirus 2
CTSVVLLSV

SEQ ID NO: 3027 - protein, 9 aa, Severe acute respiratory syndrome coronavirus 2
TSVVLLSVL

SEQ ID NO: 3028 - protein, 9 aa, Severe acute respiratory syndrome coronavirus 2
VLLSVLQQL

SEQ ID NO: 3029 - protein, 9 aa, Severe acute respiratory syndrome coronavirus 2
LLSVLQQLR

SEQ ID NO: 3030 - protein, 9 aa, Severe acute respiratory syndrome coronavirus 2
LSVLQQLRV

SEQ ID NO: 3031 - protein, 9 aa, Severe acute respiratory syndrome coronavirus 2
QLRVESSSK

SEQ ID NO: 3032 - protein, 9 aa, Severe acute respiratory syndrome coronavirus 2
LRVESSSKL

SEQ ID NO: 3033 - protein, 9 aa, Severe acute respiratory syndrome coronavirus 2
RVESSSKLW

SEQ ID NO: 3034 - protein, 9 aa, Severe acute respiratory syndrome coronavirus 2
VESSSKLWA

SEQ ID NO: 3035 - protein, 9 aa, Severe acute respiratory syndrome coronavirus 2
SSKLWAQCV

SEQ ID NO: 3036 - protein, 9 aa, Severe acute respiratory syndrome coronavirus 2
KLWAQCVQL

SEQ ID NO: 3037 - protein, 9 aa, Severe acute respiratory syndrome coronavirus 2
VQLHNDILL

SEQ ID NO: 3038 - protein, 9 aa, Severe acute respiratory syndrome coronavirus 2
QLHNDILLA

SEQ ID NO: 3039 - protein, 9 aa, Severe acute respiratory syndrome coronavirus 2
LLAKDTTEA

SEQ ID NO: 3040 - protein, 9 aa, Severe acute respiratory syndrome coronavirus 2
LAKDTTEAF

SEQ ID NO: 3041 - protein, 9 aa, Severe acute respiratory syndrome coronavirus 2
DTTEAFEKM

SEQ ID NO: 3042 - protein, 9 aa, Severe acute respiratory syndrome coronavirus 2
EAFEKMVSL

SEQ ID NO: 3043 - protein, 9 aa, Severe acute respiratory syndrome coronavirus 2
AFEKMVSLL

SEQ ID NO: 3044 - protein, 9 aa, Severe acute respiratory syndrome coronavirus 2
FEKMVSLLS

SEQ ID NO: 3045 - protein, 9 aa, Severe acute respiratory syndrome coronavirus 2
EKMVSLLSV

SEQ ID NO: 3046 - protein, 9 aa, Severe acute respiratory syndrome coronavirus 2
KMVSLLSVL

SEQ ID NO: 3047 - protein, 9 aa, Severe acute respiratory syndrome coronavirus 2
MVSLLSVLL

SEQ ID NO: 3048 - protein, 9 aa, Severe acute respiratory syndrome coronavirus 2
SLLSVLLSM

SEQ ID NO: 3049 - protein, 9 aa, Severe acute respiratory syndrome coronavirus 2
SVLLSMQGA

SEQ ID NO: 3050 - protein, 9 aa, Severe acute respiratory syndrome coronavirus 2
VLLSMQGAV

SEQ ID NO: 3051 - protein, 9 aa, Severe acute respiratory syndrome coronavirus 2
LSMQGAVDI

SEQ ID NO: 3052 - protein, 9 aa, Severe acute respiratory syndrome coronavirus 2
MQGAVDINK

SEQ ID NO: 3053 - protein, 9 aa, Severe acute respiratory syndrome coronavirus 2
CEEMLDNRA

SEQ ID NO: 3054 - protein, 9 aa, Severe acute respiratory syndrome coronavirus 2
EEMLDNRAT

SEQ ID NO: 3055 - protein, 9 aa, Severe acute respiratory syndrome coronavirus 2
EMLDNRATL

SEQ ID NO: 3056 - protein, 9 aa, Severe acute respiratory syndrome coronavirus 2
NRATLQAIA

SEQ ID NO: 3057 - protein, 9 aa, Severe acute respiratory syndrome coronavirus 2
TLQAIASEF

SEQ ID NO: 3058 - protein, 9 aa, Severe acute respiratory syndrome coronavirus 2
AIASEFSSL

SEQ ID NO: 3059 - protein, 9 aa, Severe acute respiratory syndrome coronavirus 2
SEFSSLPSY

SEQ ID NO: 3060 - protein, 9 aa, Severe acute respiratory syndrome coronavirus 2
FSSLPSYAA

SEQ ID NO: 3061 - protein, 9 aa, Severe acute respiratory syndrome coronavirus 2
SSLPSYAAF

SEQ ID NO: 3062 - protein, 9 aa, Severe acute respiratory syndrome coronavirus 2
SLPSYAAFA

SEQ ID NO: 3063 - protein, 9 aa, Severe acute respiratory syndrome coronavirus 2
LPSYAAFAT

SEQ ID NO: 3064 - protein, 9 aa, Severe acute respiratory syndrome coronavirus 2
SYAAFATAQ

SEQ ID NO: 3065 - protein, 9 aa, Severe acute respiratory syndrome coronavirus 2
AAFATAQEA

SEQ ID NO: 3066 - protein, 9 aa, Severe acute respiratory syndrome coronavirus 2
AFATAQEAY

SEQ ID NO: 3067 - protein, 9 aa, Severe acute respiratory syndrome coronavirus 2
QEAYEQAVA

SEQ ID NO: 3068 - protein, 9 aa, Severe acute respiratory syndrome coronavirus 2
AVANGDSEV

SEQ ID NO: 3069 - protein, 9 aa, Severe acute respiratory syndrome coronavirus 2
VANGDSEVV

SEQ ID NO: 3070 - protein, 9 aa, Severe acute respiratory syndrome coronavirus 2
EVVLKKLKK

SEQ ID NO: 3071 - protein, 9 aa, Severe acute respiratory syndrome coronavirus 2
VLKKLKKSL

SEQ ID NO: 3072 - protein, 9 aa, Severe acute respiratory syndrome coronavirus 2
KLKKSLNVA

SEQ ID NO: 3073 - protein, 9 aa, Severe acute respiratory syndrome coronavirus 2
SLNVAKSEF

SEQ ID NO: 3074 - protein, 9 aa, Severe acute respiratory syndrome coronavirus 2
NVAKSEFDR

SEQ ID NO: 3075 - protein, 9 aa, Severe acute respiratory syndrome coronavirus 2
SEFDRDAAM

SEQ ID NO: 3076 - protein, 9 aa, Severe acute respiratory syndrome coronavirus 2
RDAAMQRKL

SEQ ID NO: 3077 - protein, 9 aa, Severe acute respiratory syndrome coronavirus 2
AAMQRKLEK

SEQ ID NO: 3078 - protein, 9 aa, Severe acute respiratory syndrome coronavirus 2
LEKMADQAM

SEQ ID NO: 3079 - protein, 9 aa, Severe acute respiratory syndrome coronavirus 2
MADQAMTQM

SEQ ID NO: 3080 - protein, 9 aa, Severe acute respiratory syndrome coronavirus 2
DQAMTQMYK

SEQ ID NO: 3081 - protein, 9 aa, Severe acute respiratory syndrome coronavirus 2
AMTQMYKQA

SEQ ID NO: 3082 - protein, 9 aa, Severe acute respiratory syndrome coronavirus 2
MTQMYKQAR

SEQ ID NO: 3083 - protein, 9 aa, Severe acute respiratory syndrome coronavirus 2
KRAKVTSAM

SEQ ID NO: 3084 - protein, 9 aa, Severe acute respiratory syndrome coronavirus 2
RAKVTSAMQ

SEQ ID NO: 3085 - protein, 9 aa, Severe acute respiratory syndrome coronavirus 2
KVTSAMQTM

SEQ ID NO: 3086 - protein, 9 aa, Severe acute respiratory syndrome coronavirus 2
VTSAMQTML

SEQ ID NO: 3087 - protein, 9 aa, Severe acute respiratory syndrome coronavirus 2
TSAMQTMLF

SEQ ID NO: 3088 - protein, 9 aa, Severe acute respiratory syndrome coronavirus 2
SAMQTMLFT

SEQ ID NO: 3089 - protein, 9 aa, Severe acute respiratory syndrome coronavirus 2
AMQTMLFTM

SEQ ID NO: 3090 - protein, 9 aa, Severe acute respiratory syndrome coronavirus 2
MQTMLFTML

SEQ ID NO: 3091 - protein, 9 aa, Severe acute respiratory syndrome coronavirus 2
QTMLFTMLR

SEQ ID NO: 3092 - protein, 9 aa, Severe acute respiratory syndrome coronavirus 2
TMLFTMLRK

SEQ ID NO: 3093 - protein, 9 aa, Severe acute respiratory syndrome coronavirus 2
MLFTMLRKL

SEQ ID NO: 3094 - protein, 9 aa, Severe acute respiratory syndrome coronavirus 2
LRKLDNDAL

SEQ ID NO: 3095 - protein, 9 aa, Severe acute respiratory syndrome coronavirus 2
ALNNIINNA

SEQ ID NO: 3096 - protein, 9 aa, Severe acute respiratory syndrome coronavirus 2
LNNIINNAR

SEQ ID NO: 3097 - protein, 9 aa, Severe acute respiratory syndrome coronavirus 2
NARDGCVPL

SEQ ID NO: 3098 - protein, 9 aa, Severe acute respiratory syndrome coronavirus 2
CVPLNIIPL

SEQ ID NO: 3099 - protein, 9 aa, Severe acute respiratory syndrome coronavirus 2
VPLNIIPLT

SEQ ID NO: 3100 - protein, 9 aa, Severe acute respiratory syndrome coronavirus 2
NIIPLTTAA

SEQ ID NO: 3101 - protein, 9 aa, Severe acute respiratory syndrome coronavirus 2
IIPLTTAAK

SEQ ID NO: 3102 - protein, 9 aa, Severe acute respiratory syndrome coronavirus 2
IPLTTAAKL

SEQ ID NO: 3103 - protein, 9 aa, Severe acute respiratory syndrome coronavirus 2
LTTAAKLMV

SEQ ID NO: 3104 - protein, 9 aa, Severe acute respiratory syndrome coronavirus 2
TTAAKLMVV

SEQ ID NO: 3105 - protein, 9 aa, Severe acute respiratory syndrome coronavirus 2
TAAKLMVVI

SEQ ID NO: 3106 - protein, 9 aa, Severe acute respiratory syndrome coronavirus 2
KLMVVIPDY

SEQ ID NO: 3107 - protein, 9 aa, Severe acute respiratory syndrome coronavirus 2
MVVIPDYNT

SEQ ID NO: 3108 - protein, 9 aa, Severe acute respiratory syndrome coronavirus 2
VVIPDYNTY

SEQ ID NO: 3109 - protein, 9 aa, Severe acute respiratory syndrome coronavirus 2
VIPDYNTYK

SEQ ID NO: 3110 - protein, 9 aa, Severe acute respiratory syndrome coronavirus 2
KNTCDGTTF

SEQ ID NO: 3111 - protein, 9 aa, Severe acute respiratory syndrome coronavirus 2
TCDGTTFTY

SEQ ID NO: 3112 - protein, 9 aa, Severe acute respiratory syndrome coronavirus 2
GTTFTYASA

SEQ ID NO: 3113 - protein, 9 aa, Severe acute respiratory syndrome coronavirus 2
TTFTYASAL

SEQ ID NO: 3114 - protein, 9 aa, Severe acute respiratory syndrome coronavirus 2
TFTYASALW

SEQ ID NO: 3115 - protein, 9 aa, Severe acute respiratory syndrome coronavirus 2
TYASALWEI

SEQ ID NO: 3116 - protein, 9 aa, Severe acute respiratory syndrome coronavirus 2
SALWEIQQV

SEQ ID NO: 3117 - protein, 9 aa, Severe acute respiratory syndrome coronavirus 2
ALWEIQQVV

SEQ ID NO: 3118 - protein, 9 aa, Severe acute respiratory syndrome coronavirus 2
WEIQQVVDA

SEQ ID NO: 3119 - protein, 9 aa, Severe acute respiratory syndrome coronavirus 2
VVDADSKIV

SEQ ID NO: 3120 - protein, 9 aa, Severe acute respiratory syndrome coronavirus 2
SKIVQLSEI

SEQ ID NO: 3121 - protein, 9 aa, Severe acute respiratory syndrome coronavirus 2
IVQLSEISM

SEQ ID NO: 3122 - protein, 9 aa, Severe acute respiratory syndrome coronavirus 2
SEISMDNSP

SEQ ID NO: 3123 - protein, 9 aa, Severe acute respiratory syndrome coronavirus 2
ISMDNSPNL

SEQ ID NO: 3124 - protein, 9 aa, Severe acute respiratory syndrome coronavirus 2
SMDNSPNLA

SEQ ID NO: 3125 - protein, 9 aa, Severe acute respiratory syndrome coronavirus 2
MDNSPNLAW

SEQ ID NO: 3126 - protein, 9 aa, Severe acute respiratory syndrome coronavirus 2
NSPNLAWPL

SEQ ID NO: 3127 - protein, 9 aa, Severe acute respiratory syndrome coronavirus 2
SPNLAWPLI

SEQ ID NO: 3128 - protein, 9 aa, Severe acute respiratory syndrome coronavirus 2
NLAWPLIVT

SEQ ID NO: 3129 - protein, 9 aa, Severe acute respiratory syndrome coronavirus 2
LAWPLIVTA

SEQ ID NO: 3130 - protein, 9 aa, Severe acute respiratory syndrome coronavirus 2
AWPLIVTAL

SEQ ID NO: 3131 - protein, 9 aa, Severe acute respiratory syndrome coronavirus 2
WPLIVTALR

SEQ ID NO: 3132 - protein, 9 aa, Severe acute respiratory syndrome coronavirus 2
VTALRANSA

SEQ ID NO: 3133 - protein, 9 aa, Severe acute respiratory syndrome coronavirus 2
TALRANSAV

SEQ ID NO: 3134 - protein, 9 aa, Severe acute respiratory syndrome coronavirus 2
ALRANSAVK

SEQ ID NO: 3135 - protein, 9 aa, Severe acute respiratory syndrome coronavirus 2
LRANSAVKL

SEQ ID NO: 3136 - protein, 9 aa, Severe acute respiratory syndrome coronavirus 2
LQNNELSPV

SEQ ID NO: 3137 - protein, 9 aa, Severe acute respiratory syndrome coronavirus 2
LSPVALRQM

SEQ ID NO: 3138 - protein, 9 aa, Severe acute respiratory syndrome coronavirus 2
ALRQMSCAA

SEQ ID NO: 3139 - protein, 9 aa, Severe acute respiratory syndrome coronavirus 2
RQMSCAAGT

SEQ ID NO: 3140 - protein, 9 aa, Severe acute respiratory syndrome coronavirus 2
CAAGTTQTA

SEQ ID NO: 3141 - protein, 9 aa, Severe acute respiratory syndrome coronavirus 2
CTDDNALAY

SEQ ID NO: 3142 - protein, 9 aa, Severe acute respiratory syndrome coronavirus 2
TDDNALAYY

SEQ ID NO: 3143 - protein, 9 aa, Severe acute respiratory syndrome coronavirus 2
ALAYYNTTK

SEQ ID NO: 3144 - protein, 9 aa, Severe acute respiratory syndrome coronavirus 2
YYNTTKGGR

SEQ ID NO: 3145 - protein, 9 aa, Severe acute respiratory syndrome coronavirus 2
NTTKGGRFV

SEQ ID NO: 3146 - protein, 9 aa, Severe acute respiratory syndrome coronavirus 2
TTKGGRFVL

SEQ ID NO: 3147 - protein, 9 aa, Severe acute respiratory syndrome coronavirus 2
GGRFVLALL

SEQ ID NO: 3148 - protein, 9 aa, Severe acute respiratory syndrome coronavirus 2
GRFVLALLS

SEQ ID NO: 3149 - protein, 9 aa, Severe acute respiratory syndrome coronavirus 2
FVLALLSDL

SEQ ID NO: 3150 - protein, 9 aa, Severe acute respiratory syndrome coronavirus 2
ALLSDLQDL

SEQ ID NO: 3151 - protein, 9 aa, Severe acute respiratory syndrome coronavirus 2
LLSDLQDLK

SEQ ID NO: 3152 - protein, 9 aa, Severe acute respiratory syndrome coronavirus 2
LSDLQDLKW

SEQ ID NO: 3153 - protein, 9 aa, Severe acute respiratory syndrome coronavirus 2
DLQDLKWAR

SEQ ID NO: 3154 - protein, 9 aa, Severe acute respiratory syndrome coronavirus 2
LQDLKWARF

SEQ ID NO: 3155 - protein, 9 aa, Severe acute respiratory syndrome coronavirus 2
DLKWARFPK

SEQ ID NO: 3156 - protein, 9 aa, Severe acute respiratory syndrome coronavirus 2
KSDGTGTIY

SEQ ID NO: 3157 - protein, 9 aa, Severe acute respiratory syndrome coronavirus 2
TELEPPCRF

SEQ ID NO: 3158 - protein, 9 aa, Severe acute respiratory syndrome coronavirus 2
CRFVTDTPK

SEQ ID NO: 3159 - protein, 9 aa, Severe acute respiratory syndrome coronavirus 2
VTDTPKGPK

SEQ ID NO: 3160 - protein, 9 aa, Severe acute respiratory syndrome coronavirus 2
KGPKVKYLY

SEQ ID NO: 3161 - protein, 9 aa, Severe acute respiratory syndrome coronavirus 2
GPKVKYLYF

SEQ ID NO: 3162 - protein, 9 aa, Severe acute respiratory syndrome coronavirus 2
KVKYLYFIK

SEQ ID NO: 3163 - protein, 9 aa, Severe acute respiratory syndrome coronavirus 2
KYLYFIKGL

SEQ ID NO: 3164 - protein, 9 aa, Severe acute respiratory syndrome coronavirus 2
YFIKGLNNL

SEQ ID NO: 3165 - protein, 9 aa, Severe acute respiratory syndrome coronavirus 2
GLNNLNRGM

SEQ ID NO: 3166 - protein, 9 aa, Severe acute respiratory syndrome coronavirus 2
NNLNRGMVL

SEQ ID NO: 3167 - protein, 9 aa, Severe acute respiratory syndrome coronavirus 2
NRGMVLGSL

SEQ ID NO: 3168 - protein, 9 aa, Severe acute respiratory syndrome coronavirus 2
RGMVLGSLA

SEQ ID NO: 3169 - protein, 9 aa, Severe acute respiratory syndrome coronavirus 2
GMVLGSLAA

SEQ ID NO: 3170 - protein, 9 aa, Severe acute respiratory syndrome coronavirus 2
MVLGSLAAT

SEQ ID NO: 3171 - protein, 9 aa, Severe acute respiratory syndrome coronavirus 2
VLGSLAATV

SEQ ID NO: 3172 - protein, 9 aa, Severe acute respiratory syndrome coronavirus 2
LGSLAATVR

SEQ ID NO: 3173 - protein, 9 aa, Severe acute respiratory syndrome coronavirus 2
GSLAATVRL

SEQ ID NO: 3174 - protein, 9 aa, Severe acute respiratory syndrome coronavirus 2
LAATVRLQA

SEQ ID NO: 3175 - protein, 9 aa, Severe acute respiratory syndrome coronavirus 2
TVRLQAGNA

SEQ ID NO: 3176 - protein, 9 aa, Severe acute respiratory syndrome coronavirus 2
LQAGNATEV

SEQ ID NO: 3177 - protein, 9 aa, Severe acute respiratory syndrome coronavirus 2
TEVPANSTV

SEQ ID NO: 3178 - protein, 9 aa, Severe acute respiratory syndrome coronavirus 2
EVPANSTVL

SEQ ID NO: 3179 - protein, 9 aa, Severe acute respiratory syndrome coronavirus 2
STVLSFCAF

SEQ ID NO: 3180 - protein, 9 aa, Severe acute respiratory syndrome coronavirus 2
TVLSFCAFA

SEQ ID NO: 3181 - protein, 9 aa, Severe acute respiratory syndrome coronavirus 2
VLSFCAFAV

SEQ ID NO: 3182 - protein, 9 aa, Severe acute respiratory syndrome coronavirus 2
CAFAVDAAK

SEQ ID NO: 3183 - protein, 9 aa, Severe acute respiratory syndrome coronavirus 2
FAVDAAKAY

SEQ ID NO: 3184 - protein, 9 aa, Severe acute respiratory syndrome coronavirus 2
AVDAAKAYK

SEQ ID NO: 3185 - protein, 9 aa, Severe acute respiratory syndrome coronavirus 2
AAKAYKDYL

SEQ ID NO: 3186 - protein, 9 aa, Severe acute respiratory syndrome coronavirus 2
YLASGGQPI

SEQ ID NO: 3187 - protein, 9 aa, Severe acute respiratory syndrome coronavirus 2
QPITNCVKM

SEQ ID NO: 3188 - protein, 9 aa, Severe acute respiratory syndrome coronavirus 2
KMLCTHTGT

SEQ ID NO: 3189 - protein, 9 aa, Severe acute respiratory syndrome coronavirus 2
CTHTGTGQA

SEQ ID NO: 3190 - protein, 9 aa, Severe acute respiratory syndrome coronavirus 2
THTGTGQAI

SEQ ID NO: 3191 - protein, 9 aa, Severe acute respiratory syndrome coronavirus 2
QAITVTPEA

SEQ ID NO: 3192 - protein, 9 aa, Severe acute respiratory syndrome coronavirus 2
ITVTPEANM

SEQ ID NO: 3193 - protein, 9 aa, Severe acute respiratory syndrome coronavirus 2
EANMDQESF

SEQ ID NO: 3194 - protein, 9 aa, Severe acute respiratory syndrome coronavirus 2
QESFGGASC

SEQ ID NO: 3195 - protein, 9 aa, Severe acute respiratory syndrome coronavirus 2
SFGGASCCL

SEQ ID NO: 3196 - protein, 9 aa, Severe acute respiratory syndrome coronavirus 2
FGGASCCLY

SEQ ID NO: 3197 - protein, 9 aa, Severe acute respiratory syndrome coronavirus 2
GASCCLYCR

SEQ ID NO: 3198 - protein, 9 aa, Severe acute respiratory syndrome coronavirus 2
GFCDLKGKY

SEQ ID NO: 3199 - protein, 9 aa, Severe acute respiratory syndrome coronavirus 2
DLKGKYVQI

SEQ ID NO: 3200 - protein, 9 aa, Severe acute respiratory syndrome coronavirus 2
KGKYVQIPT

SEQ ID NO: 3201 - protein, 9 aa, Severe acute respiratory syndrome coronavirus 2
KYVQIPTTC

SEQ ID NO: 3202 - protein, 9 aa, Severe acute respiratory syndrome coronavirus 2
VQIPTTCAN

SEQ ID NO: 3203 - protein, 9 aa, Severe acute respiratory syndrome coronavirus 2
ANDPVGFTL

SEQ ID NO: 3204 - protein, 9 aa, Severe acute respiratory syndrome coronavirus 2
TLKNTVCTV

SEQ ID NO: 3205 - protein, 9 aa, Severe acute respiratory syndrome coronavirus 2
NTVCTVCGM

SEQ ID NO: 3206 - protein, 9 aa, Severe acute respiratory syndrome coronavirus 2
TVCTVCGMW

SEQ ID NO: 3207 - protein, 9 aa, Severe acute respiratory syndrome coronavirus 2
TVCGMWKGY

SEQ ID NO: 3208 - protein, 9 aa, Severe acute respiratory syndrome coronavirus 2
GYGCSCDQL

SEQ ID NO: 3209 - protein, 9 aa, Severe acute respiratory syndrome coronavirus 2
YGCSCDQLR

SEQ ID NO: 3210 - protein, 9 aa, Severe acute respiratory syndrome coronavirus 2
LREPMLQSA

SEQ ID NO: 3211 - protein, 9 aa, Severe acute respiratory syndrome coronavirus 2
EPMLQSADA

SEQ ID NO: 3212 - protein, 9 aa, Severe acute respiratory syndrome coronavirus 2
LQSADAQSF

SEQ ID NO: 3213 - protein, 9 aa, Severe acute respiratory syndrome coronavirus 2
QSADAQSFL

SEQ ID NO: 3214 - protein, 10 aa, Severe acute respiratory syndrome coronavirus 2
ESLVPGFNEK

SEQ ID NO: 3215 - protein, 10 aa, Severe acute respiratory syndrome coronavirus 2
SLVPGFNEKT

SEQ ID NO: 3216 - protein, 10 aa, Severe acute respiratory syndrome coronavirus 2
NEKTHVQLSL

SEQ ID NO: 3217 - protein, 10 aa, Severe acute respiratory syndrome coronavirus 2
KTHVQLSLPV

SEQ ID NO: 3218 - protein, 10 aa, Severe acute respiratory syndrome coronavirus 2
THVQLSLPVL

SEQ ID NO: 3219 - protein, 10 aa, Severe acute respiratory syndrome coronavirus 2
VQLSLPVLQV

SEQ ID NO: 3220 - protein, 10 aa, Severe acute respiratory syndrome coronavirus 2
QLSLPVLQVR

SEQ ID NO: 3221 - protein, 10 aa, Severe acute respiratory syndrome coronavirus 2
SLPVLQVRDV

SEQ ID NO: 3222 - protein, 10 aa, Severe acute respiratory syndrome coronavirus 2
LPVLQVRDVL

SEQ ID NO: 3223 - protein, 10 aa, Severe acute respiratory syndrome coronavirus 2
VLQVRDVLVR

SEQ ID NO: 3224 - protein, 10 aa, Severe acute respiratory syndrome coronavirus 2
VLVRGFGDSV

SEQ ID NO: 3225 - protein, 10 aa, Severe acute respiratory syndrome coronavirus 2
DSVEEVLSEA

SEQ ID NO: 3226 - protein, 10 aa, Severe acute respiratory syndrome coronavirus 2
SVEEVLSEAR

SEQ ID NO: 3227 - protein, 10 aa, Severe acute respiratory syndrome coronavirus 2
VLSEARQHLK

SEQ ID NO: 3228 - protein, 10 aa, Severe acute respiratory syndrome coronavirus 2
QHLKDGTCGL

SEQ ID NO: 3229 - protein, 10 aa, Severe acute respiratory syndrome coronavirus 2
HLKDGTCGLV

SEQ ID NO: 3230 - protein, 10 aa, Severe acute respiratory syndrome coronavirus 2
GTCGLVEVEK

SEQ ID NO: 3231 - protein, 10 aa, Severe acute respiratory syndrome coronavirus 2
CGLVEVEKGV

SEQ ID NO: 3232 - protein, 10 aa, Severe acute respiratory syndrome coronavirus 2
GLVEVEKGVL

SEQ ID NO: 3233 - protein, 10 aa, Severe acute respiratory syndrome coronavirus 2
GVLPQLEQPY

SEQ ID NO: 3234 - protein, 10 aa, Severe acute respiratory syndrome coronavirus 2
VLPQLEQPYV

SEQ ID NO: 3235 - protein, 10 aa, Severe acute respiratory syndrome coronavirus 2
LPQLEQPYVF

SEQ ID NO: 3236 - protein, 10 aa, Severe acute respiratory syndrome coronavirus 2
QLEQPYVFIK

SEQ ID NO: 3237 - protein, 10 aa, Severe acute respiratory syndrome coronavirus 2
YVFIKRSDAR

SEQ ID NO: 3238 - protein, 10 aa, Severe acute respiratory syndrome coronavirus 2
ARTAPHGHVM

SEQ ID NO: 3239 - protein, 10 aa, Severe acute respiratory syndrome coronavirus 2
RTAPHGHVMV

SEQ ID NO: 3240 - protein, 10 aa, Severe acute respiratory syndrome coronavirus 2
APHGHVMVEL

SEQ ID NO: 3241 - protein, 10 aa, Severe acute respiratory syndrome coronavirus 2
HGHVMVELVA

SEQ ID NO: 3242 - protein, 10 aa, Severe acute respiratory syndrome coronavirus 2
HVMVELVAEL

SEQ ID NO: 3243 - protein, 10 aa, Severe acute respiratory syndrome coronavirus 2
VMVELVAELE

SEQ ID NO: 3244 - protein, 10 aa, Severe acute respiratory syndrome coronavirus 2
VELVAELEGI

SEQ ID NO: 3245 - protein, 10 aa, Severe acute respiratory syndrome coronavirus 2
LVAELEGIQY

SEQ ID NO: 3246 - protein, 10 aa, Severe acute respiratory syndrome coronavirus 2
AELEGIQYGR

SEQ ID NO: 3247 - protein, 10 aa, Severe acute respiratory syndrome coronavirus 2
IQYGRSGETL

SEQ ID NO: 3248 - protein, 10 aa, Severe acute respiratory syndrome coronavirus 2
GRSGETLGVL

SEQ ID NO: 3249 - protein, 10 aa, Severe acute respiratory syndrome coronavirus 2
SGETLGVLVP

SEQ ID NO: 3250 - protein, 10 aa, Severe acute respiratory syndrome coronavirus 2
ETLGVLVPHV

SEQ ID NO: 3251 - protein, 10 aa, Severe acute respiratory syndrome coronavirus 2
GVLVPHVGEI

SEQ ID NO: 3252 - protein, 10 aa, Severe acute respiratory syndrome coronavirus 2
LVPHVGEIPV

SEQ ID NO: 3253 - protein, 10 aa, Severe acute respiratory syndrome coronavirus 2
VPHVGEIPVA

SEQ ID NO: 3254 - protein, 10 aa, Severe acute respiratory syndrome coronavirus 2
HVGEIPVAYR

SEQ ID NO: 3255 - protein, 10 aa, Severe acute respiratory syndrome coronavirus 2
GEIPVAYRKV

SEQ ID NO: 3256 - protein, 10 aa, Severe acute respiratory syndrome coronavirus 2
EIPVAYRKVL

SEQ ID NO: 3257 - protein, 10 aa, Severe acute respiratory syndrome coronavirus 2
IPVAYRKVLL

SEQ ID NO: 3258 - protein, 10 aa, Severe acute respiratory syndrome coronavirus 2
PVAYRKVLLR

SEQ ID NO: 3259 - protein, 10 aa, Severe acute respiratory syndrome coronavirus 2
VAYRKVLLRK

SEQ ID NO: 3260 - protein, 10 aa, Severe acute respiratory syndrome coronavirus 2
KVLLRKNGNK

SEQ ID NO: 3261 - protein, 10 aa, Severe acute respiratory syndrome coronavirus 2
GNKGAGGHSY

SEQ ID NO: 3262 - protein, 10 aa, Severe acute respiratory syndrome coronavirus 2
HSYGADLKSF

SEQ ID NO: 3263 - protein, 10 aa, Severe acute respiratory syndrome coronavirus 2
YGADLKSFDL

SEQ ID NO: 3264 - protein, 10 aa, Severe acute respiratory syndrome coronavirus 2
LGDELGTDPY

SEQ ID NO: 3265 - protein, 10 aa, Severe acute respiratory syndrome coronavirus 2
DPYEDFQENW

SEQ ID NO: 3266 - protein, 10 aa, Severe acute respiratory syndrome coronavirus 2
NTKHSSGVTR

SEQ ID NO: 3267 - protein, 10 aa, Severe acute respiratory syndrome coronavirus 2
HSSGVTRELM

SEQ ID NO: 3268 - protein, 10 aa, Severe acute respiratory syndrome coronavirus 2
SSGVTRELMR

SEQ ID NO: 3269 - protein, 10 aa, Severe acute respiratory syndrome coronavirus 2
ELMRELNGGA

SEQ ID NO: 3270 - protein, 10 aa, Severe acute respiratory syndrome coronavirus 2
LMRELNGGAY

SEQ ID NO: 3271 - protein, 10 aa, Severe acute respiratory syndrome coronavirus 2
RELNGGAYTR

SEQ ID NO: 3272 - protein, 10 aa, Severe acute respiratory syndrome coronavirus 2
ELNGGAYTRY

SEQ ID NO: 3273 - protein, 10 aa, Severe acute respiratory syndrome coronavirus 2
AYTRYVDNNF

SEQ ID NO: 3274 - protein, 10 aa, Severe acute respiratory syndrome coronavirus 2
YPLECIKDLL

SEQ ID NO: 3275 - protein, 10 aa, Severe acute respiratory syndrome coronavirus 2
ARAGKASCTL

SEQ ID NO: 3276 - protein, 10 aa, Severe acute respiratory syndrome coronavirus 2
RAGKASCTLS

SEQ ID NO: 3277 - protein, 10 aa, Severe acute respiratory syndrome coronavirus 2
KASCTLSEQL

SEQ ID NO: 3278 - protein, 10 aa, Severe acute respiratory syndrome coronavirus 2
SCTLSEQLDF

SEQ ID NO: 3279 - protein, 10 aa, Severe acute respiratory syndrome coronavirus 2
CTLSEQLDFI

SEQ ID NO: 3280 - protein, 10 aa, Severe acute respiratory syndrome coronavirus 2
TLSEQLDFID

SEQ ID NO: 3281 - protein, 10 aa, Severe acute respiratory syndrome coronavirus 2
SEQLDFIDTK

SEQ ID NO: 3282 - protein, 10 aa, Severe acute respiratory syndrome coronavirus 2
EQLDFIDTKR

SEQ ID NO: 3283 - protein, 10 aa, Severe acute respiratory syndrome coronavirus 2
DTKRGVYCCR

SEQ ID NO: 3284 - protein, 10 aa, Severe acute respiratory syndrome coronavirus 2
CREHEHEIAW

SEQ ID NO: 3285 - protein, 10 aa, Severe acute respiratory syndrome coronavirus 2
REHEHEIAWY

SEQ ID NO: 3286 - protein, 10 aa, Severe acute respiratory syndrome coronavirus 2
EHEIAWYTER

SEQ ID NO: 3287 - protein, 10 aa, Severe acute respiratory syndrome coronavirus 2
IAWYTERSEK

SEQ ID NO: 3288 - protein, 10 aa, Severe acute respiratory syndrome coronavirus 2
WYTERSEKSY

SEQ ID NO: 3289 - protein, 10 aa, Severe acute respiratory syndrome coronavirus 2
TERSEKSYEL

SEQ ID NO: 3290 - protein, 10 aa, Severe acute respiratory syndrome coronavirus 2
SEKSYELQTP

SEQ ID NO: 3291 - protein, 10 aa, Severe acute respiratory syndrome coronavirus 2
EKSYELQTPF

SEQ ID NO: 3292 - protein, 10 aa, Severe acute respiratory syndrome coronavirus 2
KSYELQTPFE

SEQ ID NO: 3293 - protein, 10 aa, Severe acute respiratory syndrome coronavirus 2
SYELQTPFEI

SEQ ID NO: 3294 - protein, 10 aa, Severe acute respiratory syndrome coronavirus 2
QTPFEIKLAK

SEQ ID NO: 3295 - protein, 10 aa, Severe acute respiratory syndrome coronavirus 2
TPFEIKLAKK

SEQ ID NO: 3296 - protein, 10 aa, Severe acute respiratory syndrome coronavirus 2
IKLAKKFDTF

SEQ ID NO: 3297 - protein, 10 aa, Severe acute respiratory syndrome coronavirus 2
DTFNGECPNF

SEQ ID NO: 3298 - protein, 10 aa, Severe acute respiratory syndrome coronavirus 2
GECPNFVFPL

SEQ ID NO: 3299 - protein, 10 aa, Severe acute respiratory syndrome coronavirus 2
NFVFPLNSII

SEQ ID NO: 3300 - protein, 10 aa, Severe acute respiratory syndrome coronavirus 2
FVFPLNSIIK

SEQ ID NO: 3301 - protein, 10 aa, Severe acute respiratory syndrome coronavirus 2
FPLNSIIKTI

SEQ ID NO: 3302 - protein, 10 aa, Severe acute respiratory syndrome coronavirus 2
NSIIKTIQPR

SEQ ID NO: 3303 - protein, 10 aa, Severe acute respiratory syndrome coronavirus 2
SIIKTIQPRV

SEQ ID NO: 3304 - protein, 10 aa, Severe acute respiratory syndrome coronavirus 2
IKTIQPRVEK

SEQ ID NO: 3305 - protein, 10 aa, Severe acute respiratory syndrome coronavirus 2
KTIQPRVEKK

SEQ ID NO: 3306 - protein, 10 aa, Severe acute respiratory syndrome coronavirus 2
KKLDGFMGRI

SEQ ID NO: 3307 - protein, 10 aa, Severe acute respiratory syndrome coronavirus 2
KLDGFMGRIR

SEQ ID NO: 3308 - protein, 10 aa, Severe acute respiratory syndrome coronavirus 2
GFMGRIRSVY

SEQ ID NO: 3309 - protein, 10 aa, Severe acute respiratory syndrome coronavirus 2
FMGRIRSVYP

SEQ ID NO: 3310 - protein, 10 aa, Severe acute respiratory syndrome coronavirus 2
MGRIRSVYPV

SEQ ID NO: 3311 - protein, 10 aa, Severe acute respiratory syndrome coronavirus 2
GRIRSVYPVA

SEQ ID NO: 3312 - protein, 10 aa, Severe acute respiratory syndrome coronavirus 2
RIRSVYPVAS

SEQ ID NO: 3313 - protein, 10 aa, Severe acute respiratory syndrome coronavirus 2
SPNECNQMCL

SEQ ID NO: 3314 - protein, 10 aa, Severe acute respiratory syndrome coronavirus 2
CNQMCLSTLM

SEQ ID NO: 3315 - protein, 10 aa, Severe acute respiratory syndrome coronavirus 2
NQMCLSTLMK

SEQ ID NO: 3316 - protein, 10 aa, Severe acute respiratory syndrome coronavirus 2
KCDHCGETSW

SEQ ID NO: 3317 - protein, 10 aa, Severe acute respiratory syndrome coronavirus 2
ETSWQTGDFV

SEQ ID NO: 3318 - protein, 10 aa, Severe acute respiratory syndrome coronavirus 2
TSWQTGDFVK

SEQ ID NO: 3319 - protein, 10 aa, Severe acute respiratory syndrome coronavirus 2
GDFVKATCEF

SEQ ID NO: 3320 - protein, 10 aa, Severe acute respiratory syndrome coronavirus 2
TCEFCGTENL

SEQ ID NO: 3321 - protein, 10 aa, Severe acute respiratory syndrome coronavirus 2
KEGATTCGYL

SEQ ID NO: 3322 - protein, 10 aa, Severe acute respiratory syndrome coronavirus 2
YLPQNAVVKI

SEQ ID NO: 3323 - protein, 10 aa, Severe acute respiratory syndrome coronavirus 2
LPQNAVVKIY

SEQ ID NO: 3324 - protein, 10 aa, Severe acute respiratory syndrome coronavirus 2
NAVVKIYCPA

SEQ ID NO: 3325 - protein, 10 aa, Severe acute respiratory syndrome coronavirus 2
YCPACHNSEV

SEQ ID NO: 3326 - protein, 10 aa, Severe acute respiratory syndrome coronavirus 2
NSEVGPEHSL

SEQ ID NO: 3327 - protein, 10 aa, Severe acute respiratory syndrome coronavirus 2
SEVGPEHSLA

SEQ ID NO: 3328 - protein, 10 aa, Severe acute respiratory syndrome coronavirus 2
VGPEHSLAEY

SEQ ID NO: 3329 - protein, 10 aa, Severe acute respiratory syndrome coronavirus 2
YHNESGLKTI

SEQ ID NO: 3330 - protein, 10 aa, Severe acute respiratory syndrome coronavirus 2
HNESGLKTIL

SEQ ID NO: 3331 - protein, 10 aa, Severe acute respiratory syndrome coronavirus 2
ESGLKTILRK

SEQ ID NO: 3332 - protein, 10 aa, Severe acute respiratory syndrome coronavirus 2
LRKGGRTIAF

SEQ ID NO: 3333 - protein, 10 aa, Severe acute respiratory syndrome coronavirus 2
GRTIAFGGCV

SEQ ID NO: 3334 - protein, 10 aa, Severe acute respiratory syndrome coronavirus 2
RTIAFGGCVF

SEQ ID NO: 3335 - protein, 10 aa, Severe acute respiratory syndrome coronavirus 2
IAFGGCVFSY

SEQ ID NO: 3336 - protein, 10 aa, Severe acute respiratory syndrome coronavirus 2
VFSYVGCHNK

SEQ ID NO: 3337 - protein, 10 aa, Severe acute respiratory syndrome coronavirus 2
YVGCHNKCAY

SEQ ID NO: 3338 - protein, 10 aa, Severe acute respiratory syndrome coronavirus 2
VGCHNKCAYW

SEQ ID NO: 3339 - protein, 10 aa, Severe acute respiratory syndrome coronavirus 2
HNKCAYWVPR

SEQ ID NO: 3340 - protein, 10 aa, Severe acute respiratory syndrome coronavirus 2
CAYWVPRASA

SEQ ID NO: 3341 - protein, 10 aa, Severe acute respiratory syndrome coronavirus 2
YWVPRASANI

SEQ ID NO: 3342 - protein, 10 aa, Severe acute respiratory syndrome coronavirus 2
VPRASANIGC

SEQ ID NO: 3343 - protein, 10 aa, Severe acute respiratory syndrome coronavirus 2
EGLNDNLLEI

SEQ ID NO: 3344 - protein, 10 aa, Severe acute respiratory syndrome coronavirus 2
GLNDNLLEIL

SEQ ID NO: 3345 - protein, 10 aa, Severe acute respiratory syndrome coronavirus 2
KVNINIVGDF

SEQ ID NO: 3346 - protein, 10 aa, Severe acute respiratory syndrome coronavirus 2
VNINIVGDFK

SEQ ID NO: 3347 - protein, 10 aa, Severe acute respiratory syndrome coronavirus 2
FKLNEEIAII

SEQ ID NO: 3348 - protein, 10 aa, Severe acute respiratory syndrome coronavirus 2
KLNEEIAIIL

SEQ ID NO: 3349 - protein, 10 aa, Severe acute respiratory syndrome coronavirus 2
LNEEIAIILA

SEQ ID NO: 3350 - protein, 10 aa, Severe acute respiratory syndrome coronavirus 2
NEEIAIILAS

SEQ ID NO: 3351 - protein, 10 aa, Severe acute respiratory syndrome coronavirus 2
EEIAIILASF

SEQ ID NO: 3352 - protein, 10 aa, Severe acute respiratory syndrome coronavirus 2
IILASFSAST

SEQ ID NO: 3353 - protein, 10 aa, Severe acute respiratory syndrome coronavirus 2
ILASFSASTS

SEQ ID NO: 3354 - protein, 10 aa, Severe acute respiratory syndrome coronavirus 2
ASFSASTSAF

SEQ ID NO: 3355 - protein, 10 aa, Severe acute respiratory syndrome coronavirus 2
SFSASTSAFV

SEQ ID NO: 3356 - protein, 10 aa, Severe acute respiratory syndrome coronavirus 2
FSASTSAFVE

SEQ ID NO: 3357 - protein, 10 aa, Severe acute respiratory syndrome coronavirus 2
ASTSAFVETV

SEQ ID NO: 3358 - protein, 10 aa, Severe acute respiratory syndrome coronavirus 2
STSAFVETVK

SEQ ID NO: 3359 - protein, 10 aa, Severe acute respiratory syndrome coronavirus 2
FVETVKGLDY

SEQ ID NO: 3360 - protein, 10 aa, Severe acute respiratory syndrome coronavirus 2
VETVKGLDYK

SEQ ID NO: 3361 - protein, 10 aa, Severe acute respiratory syndrome coronavirus 2
ETVKGLDYKA

SEQ ID NO: 3362 - protein, 10 aa, Severe acute respiratory syndrome coronavirus 2
TVKGLDYKAF

SEQ ID NO: 3363 - protein, 10 aa, Severe acute respiratory syndrome coronavirus 2
GLDYKAFKQI

SEQ ID NO: 3364 - protein, 10 aa, Severe acute respiratory syndrome coronavirus 2
KQIVESCGNF

SEQ ID NO: 3365 - protein, 10 aa, Severe acute respiratory syndrome coronavirus 2
QIVESCGNFK

SEQ ID NO: 3366 - protein, 10 aa, Severe acute respiratory syndrome coronavirus 2
ESCGNFKVTK

SEQ ID NO: 3367 - protein, 10 aa, Severe acute respiratory syndrome coronavirus 2
KGAWNIGEQK

SEQ ID NO: 3368 - protein, 10 aa, Severe acute respiratory syndrome coronavirus 2
GEQKSILSPL

SEQ ID NO: 3369 - protein, 10 aa, Severe acute respiratory syndrome coronavirus 2
EQKSILSPLY

SEQ ID NO: 3370 - protein, 10 aa, Severe acute respiratory syndrome coronavirus 2
KSILSPLYAF

SEQ ID NO: 3371 - protein, 10 aa, Severe acute respiratory syndrome coronavirus 2
SILSPLYAFA

SEQ ID NO: 3372 - protein, 10 aa, Severe acute respiratory syndrome coronavirus 2
ILSPLYAFAS

SEQ ID NO: 3373 - protein, 10 aa, Severe acute respiratory syndrome coronavirus 2
SPLYAFASEA

SEQ ID NO: 3374 - protein, 10 aa, Severe acute respiratory syndrome coronavirus 2
LYAFASEAAR

SEQ ID NO: 3375 - protein, 10 aa, Severe acute respiratory syndrome coronavirus 2
YAFASEAARV

SEQ ID NO: 3376 - protein, 10 aa, Severe acute respiratory syndrome coronavirus 2
FASEAARVVR

SEQ ID NO: 3377 - protein, 10 aa, Severe acute respiratory syndrome coronavirus 2
SEAARVVRSI

SEQ ID NO: 3378 - protein, 10 aa, Severe acute respiratory syndrome coronavirus 2
AARVVRSIFS

SEQ ID NO: 3379 - protein, 10 aa, Severe acute respiratory syndrome coronavirus 2
ARVVRSIFSR

SEQ ID NO: 3380 - protein, 10 aa, Severe acute respiratory syndrome coronavirus 2
RVVRSIFSRT

SEQ ID NO: 3381 - protein, 10 aa, Severe acute respiratory syndrome coronavirus 2
VVRSIFSRTL

SEQ ID NO: 3382 - protein, 10 aa, Severe acute respiratory syndrome coronavirus 2
RSIFSRTLET

SEQ ID NO: 3383 - protein, 10 aa, Severe acute respiratory syndrome coronavirus 2
SIFSRTLETA

SEQ ID NO: 3384 - protein, 10 aa, Severe acute respiratory syndrome coronavirus 2
RTLETAQNSV

SEQ ID NO: 3385 - protein, 10 aa, Severe acute respiratory syndrome coronavirus 2
LETAQNSVRV

SEQ ID NO: 3386 - protein, 10 aa, Severe acute respiratory syndrome coronavirus 2
ETAQNSVRVL

SEQ ID NO: 3387 - protein, 10 aa, Severe acute respiratory syndrome coronavirus 2
AQNSVRVLQK

SEQ ID NO: 3388 - protein, 10 aa, Severe acute respiratory syndrome coronavirus 2
SVRVLQKAAI

SEQ ID NO: 3389 - protein, 10 aa, Severe acute respiratory syndrome coronavirus 2
RVLQKAAITI

SEQ ID NO: 3390 - protein, 10 aa, Severe acute respiratory syndrome coronavirus 2
VLQKAAITIL

SEQ ID NO: 3391 - protein, 10 aa, Severe acute respiratory syndrome coronavirus 2
KAAITILDGI

SEQ ID NO: 3392 - protein, 10 aa, Severe acute respiratory syndrome coronavirus 2
ITILDGISQY

SEQ ID NO: 3393 - protein, 10 aa, Severe acute respiratory syndrome coronavirus 2
ILDGISQYSL

SEQ ID NO: 3394 - protein, 10 aa, Severe acute respiratory syndrome coronavirus 2
LDGISQYSLR

SEQ ID NO: 3395 - protein, 10 aa, Severe acute respiratory syndrome coronavirus 2
SQYSLRLIDA

SEQ ID NO: 3396 - protein, 10 aa, Severe acute respiratory syndrome coronavirus 2
QYSLRLIDAM

SEQ ID NO: 3397 - protein, 10 aa, Severe acute respiratory syndrome coronavirus 2
YSLRLIDAMM

SEQ ID NO: 3398 - protein, 10 aa, Severe acute respiratory syndrome coronavirus 2
SLRLIDAMMF

SEQ ID NO: 3399 - protein, 10 aa, Severe acute respiratory syndrome coronavirus 2
LRLIDAMMFT

SEQ ID NO: 3400 - protein, 10 aa, Severe acute respiratory syndrome coronavirus 2
RLIDAMMFTS

SEQ ID NO: 3401 - protein, 10 aa, Severe acute respiratory syndrome coronavirus 2
IDAMMFTSDL

SEQ ID NO: 3402 - protein, 10 aa, Severe acute respiratory syndrome coronavirus 2
DAMMFTSDLA

SEQ ID NO: 3403 - protein, 10 aa, Severe acute respiratory syndrome coronavirus 2
AMMFTSDLAT

SEQ ID NO: 3404 - protein, 10 aa, Severe acute respiratory syndrome coronavirus 2
FTSDLATNNL

SEQ ID NO: 3405 - protein, 10 aa, Severe acute respiratory syndrome coronavirus 2
SDLATNNLVV

SEQ ID NO: 3406 - protein, 10 aa, Severe acute respiratory syndrome coronavirus 2
ATNNLVVMAY

SEQ ID NO: 3407 - protein, 10 aa, Severe acute respiratory syndrome coronavirus 2
VVMAYITGGV

SEQ ID NO: 3408 - protein, 10 aa, Severe acute respiratory syndrome coronavirus 2
VMAYITGGVV

SEQ ID NO: 3409 - protein, 10 aa, Severe acute respiratory syndrome coronavirus 2
AYITGGVVQL

SEQ ID NO: 3410 - protein, 10 aa, Severe acute respiratory syndrome coronavirus 2
GGVVQLTSQW

SEQ ID NO: 3411 - protein, 10 aa, Severe acute respiratory syndrome coronavirus 2
QLTSQWLTNI

SEQ ID NO: 3412 - protein, 10 aa, Severe acute respiratory syndrome coronavirus 2
LTSQWLTNIF

SEQ ID NO: 3413 - protein, 10 aa, Severe acute respiratory syndrome coronavirus 2
SQWLTNIFGT

SEQ ID NO: 3414 - protein, 10 aa, Severe acute respiratory syndrome coronavirus 2
QWLTNIFGTV

SEQ ID NO: 3415 - protein, 10 aa, Severe acute respiratory syndrome coronavirus 2
WLTNIFGTVY

SEQ ID NO: 3416 - protein, 10 aa, Severe acute respiratory syndrome coronavirus 2
TNIFGTVYEK

SEQ ID NO: 3417 - protein, 10 aa, Severe acute respiratory syndrome coronavirus 2
NIFGTVYEKL

SEQ ID NO: 3418 - protein, 10 aa, Severe acute respiratory syndrome coronavirus 2
IFGTVYEKLK

SEQ ID NO: 3419 - protein, 10 aa, Severe acute respiratory syndrome coronavirus 2
GTVYEKLKPV

SEQ ID NO: 3420 - protein, 10 aa, Severe acute respiratory syndrome coronavirus 2
TVYEKLKPVL

SEQ ID NO: 3421 - protein, 10 aa, Severe acute respiratory syndrome coronavirus 2
YEKLKPVLDW

SEQ ID NO: 3422 - protein, 10 aa, Severe acute respiratory syndrome coronavirus 2
EKLKPVLDWL

SEQ ID NO: 3423 - protein, 10 aa, Severe acute respiratory syndrome coronavirus 2
KLKPVLDWLE

SEQ ID NO: 3424 - protein, 10 aa, Severe acute respiratory syndrome coronavirus 2
KPVLDWLEEK

SEQ ID NO: 3425 - protein, 10 aa, Severe acute respiratory syndrome coronavirus 2
VLDWLEEKFK

SEQ ID NO: 3426 - protein, 10 aa, Severe acute respiratory syndrome coronavirus 2
WLEEKFKEGV

SEQ ID NO: 3427 - protein, 10 aa, Severe acute respiratory syndrome coronavirus 2
EEKFKEGVEF

SEQ ID NO: 3428 - protein, 10 aa, Severe acute respiratory syndrome coronavirus 2
KFKEGVEFLR

SEQ ID NO: 3429 - protein, 10 aa, Severe acute respiratory syndrome coronavirus 2
VEFLRDGWEI

SEQ ID NO: 3430 - protein, 10 aa, Severe acute respiratory syndrome coronavirus 2
EFLRDGWEIV

SEQ ID NO: 3431 - protein, 10 aa, Severe acute respiratory syndrome coronavirus 2
FLRDGWEIVK

SEQ ID NO: 3432 - protein, 10 aa, Severe acute respiratory syndrome coronavirus 2
WEIVKFISTC

SEQ ID NO: 3433 - protein, 10 aa, Severe acute respiratory syndrome coronavirus 2
EIVKFISTCA

SEQ ID NO: 3434 - protein, 10 aa, Severe acute respiratory syndrome coronavirus 2
KFISTCACEI

SEQ ID NO: 3435 - protein, 10 aa, Severe acute respiratory syndrome coronavirus 2
FISTCACEIV

SEQ ID NO: 3436 - protein, 10 aa, Severe acute respiratory syndrome coronavirus 2
ACEIVGGQIV

SEQ ID NO: 3437 - protein, 10 aa, Severe acute respiratory syndrome coronavirus 2
KEIKESVQTF

SEQ ID NO: 3438 - protein, 10 aa, Severe acute respiratory syndrome coronavirus 2
EIKESVQTFF

SEQ ID NO: 3439 - protein, 10 aa, Severe acute respiratory syndrome coronavirus 2
KESVQTFFKL

SEQ ID NO: 3440 - protein, 10 aa, Severe acute respiratory syndrome coronavirus 2
ESVQTFFKLV

SEQ ID NO: 3441 - protein, 10 aa, Severe acute respiratory syndrome coronavirus 2
VQTFFKLVNK

SEQ ID NO: 3442 - protein, 10 aa, Severe acute respiratory syndrome coronavirus 2
QTFFKLVNKF

SEQ ID NO: 3443 - protein, 10 aa, Severe acute respiratory syndrome coronavirus 2
FKLVNKFLAL

SEQ ID NO: 3444 - protein, 10 aa, Severe acute respiratory syndrome coronavirus 2
KLVNKFLALC

SEQ ID NO: 3445 - protein, 10 aa, Severe acute respiratory syndrome coronavirus 2
LVNKFLALCA

SEQ ID NO: 3446 - protein, 10 aa, Severe acute respiratory syndrome coronavirus 2
KFLALCADSI

SEQ ID NO: 3447 - protein, 10 aa, Severe acute respiratory syndrome coronavirus 2
FLALCADSII

SEQ ID NO: 3448 - protein, 10 aa, Severe acute respiratory syndrome coronavirus 2
ADSIIIGGAK

SEQ ID NO: 3449 - protein, 10 aa, Severe acute respiratory syndrome coronavirus 2
SIIIGGAKLK

SEQ ID NO: 3450 - protein, 10 aa, Severe acute respiratory syndrome coronavirus 2
LKALNLGETF

SEQ ID NO: 3451 - protein, 10 aa, Severe acute respiratory syndrome coronavirus 2
KALNLGETFV

SEQ ID NO: 3452 - protein, 10 aa, Severe acute respiratory syndrome coronavirus 2
ALNLGETFVT

SEQ ID NO: 3453 - protein, 10 aa, Severe acute respiratory syndrome coronavirus 2
ETFVTHSKGL

SEQ ID NO: 3454 - protein, 10 aa, Severe acute respiratory syndrome coronavirus 2
TFVTHSKGLY

SEQ ID NO: 3455 - protein, 10 aa, Severe acute respiratory syndrome coronavirus 2
FVTHSKGLYR

SEQ ID NO: 3456 - protein, 10 aa, Severe acute respiratory syndrome coronavirus 2
VTHSKGLYRK

SEQ ID NO: 3457 - protein, 10 aa, Severe acute respiratory syndrome coronavirus 2
GLYRKCVKSR

SEQ ID NO: 3458 - protein, 10 aa, Severe acute respiratory syndrome coronavirus 2
KSREETGLLM

SEQ ID NO: 3459 - protein, 10 aa, Severe acute respiratory syndrome coronavirus 2
REETGLLMPL

SEQ ID NO: 3460 - protein, 10 aa, Severe acute respiratory syndrome coronavirus 2
EETGLLMPLK

SEQ ID NO: 3461 - protein, 10 aa, Severe acute respiratory syndrome coronavirus 2
GLLMPLKAPK

SEQ ID NO: 3462 - protein, 10 aa, Severe acute respiratory syndrome coronavirus 2
MPLKAPKEII

SEQ ID NO: 3463 - protein, 10 aa, Severe acute respiratory syndrome coronavirus 2
EIIFLEGETL

SEQ ID NO: 3464 - protein, 10 aa, Severe acute respiratory syndrome coronavirus 2
EGETLPTEVL

SEQ ID NO: 3465 - protein, 10 aa, Severe acute respiratory syndrome coronavirus 2
LPTEVLTEEV

SEQ ID NO: 3466 - protein, 10 aa, Severe acute respiratory syndrome coronavirus 2
TEVLTEEVVL

SEQ ID NO: 3467 - protein, 10 aa, Severe acute respiratory syndrome coronavirus 2
EVLTEEVVLK

SEQ ID NO: 3468 - protein, 10 aa, Severe acute respiratory syndrome coronavirus 2
VLKTGDLQPL

SEQ ID NO: 3469 - protein, 10 aa, Severe acute respiratory syndrome coronavirus 2
EAVEAPLVGT

SEQ ID NO: 3470 - protein, 10 aa, Severe acute respiratory syndrome coronavirus 2
AVEAPLVGTP

SEQ ID NO: 3471 - protein, 10 aa, Severe acute respiratory syndrome coronavirus 2
VEAPLVGTPV

SEQ ID NO: 3472 - protein, 10 aa, Severe acute respiratory syndrome coronavirus 2
APLVGTPVCI

SEQ ID NO: 3473 - protein, 10 aa, Severe acute respiratory syndrome coronavirus 2
TPVCINGLML

SEQ ID NO: 3474 - protein, 10 aa, Severe acute respiratory syndrome coronavirus 2
MLLEIKDTEK

SEQ ID NO: 3475 - protein, 10 aa, Severe acute respiratory syndrome coronavirus 2
LLEIKDTEKY

SEQ ID NO: 3476 - protein, 10 aa, Severe acute respiratory syndrome coronavirus 2
KYCALAPNMM

SEQ ID NO: 3477 - protein, 10 aa, Severe acute respiratory syndrome coronavirus 2
YCALAPNMMV

SEQ ID NO: 3478 - protein, 10 aa, Severe acute respiratory syndrome coronavirus 2
CALAPNMMVT

SEQ ID NO: 3479 - protein, 10 aa, Severe acute respiratory syndrome coronavirus 2
MMVTNNTFTL

SEQ ID NO: 3480 - protein, 10 aa, Severe acute respiratory syndrome coronavirus 2
MVTNNTFTLK

SEQ ID NO: 3481 - protein, 10 aa, Severe acute respiratory syndrome coronavirus 2
VTNNTFTLKG

SEQ ID NO: 3482 - protein, 10 aa, Severe acute respiratory syndrome coronavirus 2
FTLKGGAPTK

SEQ ID NO: 3483 - protein, 10 aa, Severe acute respiratory syndrome coronavirus 2
TLKGGAPTKV

SEQ ID NO: 3484 - protein, 10 aa, Severe acute respiratory syndrome coronavirus 2
KVTFGDDTVI

SEQ ID NO: 3485 - protein, 10 aa, Severe acute respiratory syndrome coronavirus 2
DDTVIEVQGY

SEQ ID NO: 3486 - protein, 10 aa, Severe acute respiratory syndrome coronavirus 2
DTVIEVQGYK

SEQ ID NO: 3487 - protein, 10 aa, Severe acute respiratory syndrome coronavirus 2
TVIEVQGYKS

SEQ ID NO: 3488 - protein, 10 aa, Severe acute respiratory syndrome coronavirus 2
EVQGYKSVNI

SEQ ID NO: 3489 - protein, 10 aa, Severe acute respiratory syndrome coronavirus 2
QGYKSVNITF

SEQ ID NO: 3490 - protein, 10 aa, Severe acute respiratory syndrome coronavirus 2
GYKSVNITFE

SEQ ID NO: 3491 - protein, 10 aa, Severe acute respiratory syndrome coronavirus 2
YKSVNITFEL

SEQ ID NO: 3492 - protein, 10 aa, Severe acute respiratory syndrome coronavirus 2
NITFELDERI

SEQ ID NO: 3493 - protein, 10 aa, Severe acute respiratory syndrome coronavirus 2
FELDERIDKV

SEQ ID NO: 3494 - protein, 10 aa, Severe acute respiratory syndrome coronavirus 2
KVLNEKCSAY

SEQ ID NO: 3495 - protein, 10 aa, Severe acute respiratory syndrome coronavirus 2
VLNEKCSAYT

SEQ ID NO: 3496 - protein, 10 aa, Severe acute respiratory syndrome coronavirus 2
LNEKCSAYTV

SEQ ID NO: 3497 - protein, 10 aa, Severe acute respiratory syndrome coronavirus 2
AYTVELGTEV

SEQ ID NO: 3498 - protein, 10 aa, Severe acute respiratory syndrome coronavirus 2
VELGTEVNEF

SEQ ID NO: 3499 - protein, 10 aa, Severe acute respiratory syndrome coronavirus 2
GTEVNEFACV

SEQ ID NO: 3500 - protein, 10 aa, Severe acute respiratory syndrome coronavirus 2
TEVNEFACVV

SEQ ID NO: 3501 - protein, 10 aa, Severe acute respiratory syndrome coronavirus 2
EVNEFACVVA

SEQ ID NO: 3502 - protein, 10 aa, Severe acute respiratory syndrome coronavirus 2
NEFACVVADA

SEQ ID NO: 3503 - protein, 10 aa, Severe acute respiratory syndrome coronavirus 2
EFACVVADAV

SEQ ID NO: 3504 - protein, 10 aa, Severe acute respiratory syndrome coronavirus 2
ACVVADAVIK

SEQ ID NO: 3505 - protein, 10 aa, Severe acute respiratory syndrome coronavirus 2
VVADAVIKTL

SEQ ID NO: 3506 - protein, 10 aa, Severe acute respiratory syndrome coronavirus 2
DAVIKTLQPV

SEQ ID NO: 3507 - protein, 10 aa, Severe acute respiratory syndrome coronavirus 2
AVIKTLQPVS

SEQ ID NO: 3508 - protein, 10 aa, Severe acute respiratory syndrome coronavirus 2
IKTLQPVSEL

SEQ ID NO: 3509 - protein, 10 aa, Severe acute respiratory syndrome coronavirus 2
KTLQPVSELL

SEQ ID NO: 3510 - protein, 10 aa, Severe acute respiratory syndrome coronavirus 2
TLQPVSELLT

SEQ ID NO: 3511 - protein, 10 aa, Severe acute respiratory syndrome coronavirus 2
QPVSELLTPL

SEQ ID NO: 3512 - protein, 10 aa, Severe acute respiratory syndrome coronavirus 2
TPLGIDLDEW

SEQ ID NO: 3513 - protein, 10 aa, Severe acute respiratory syndrome coronavirus 2
IDLDEWSMAT

SEQ ID NO: 3514 - protein, 10 aa, Severe acute respiratory syndrome coronavirus 2
DLDEWSMATY

SEQ ID NO: 3515 - protein, 10 aa, Severe acute respiratory syndrome coronavirus 2
LDEWSMATYY

SEQ ID NO: 3516 - protein, 10 aa, Severe acute respiratory syndrome coronavirus 2
DEWSMATYYL

SEQ ID NO: 3517 - protein, 10 aa, Severe acute respiratory syndrome coronavirus 2
EWSMATYYLF

SEQ ID NO: 3518 - protein, 10 aa, Severe acute respiratory syndrome coronavirus 2
WSMATYYLFD

SEQ ID NO: 3519 - protein, 10 aa, Severe acute respiratory syndrome coronavirus 2
YYLFDESGEF

SEQ ID NO: 3520 - protein, 10 aa, Severe acute respiratory syndrome coronavirus 2
YLFDESGEFK

SEQ ID NO: 3521 - protein, 10 aa, Severe acute respiratory syndrome coronavirus 2
SGEFKLASHM

SEQ ID NO: 3522 - protein, 10 aa, Severe acute respiratory syndrome coronavirus 2
GEFKLASHMY

SEQ ID NO: 3523 - protein, 10 aa, Severe acute respiratory syndrome coronavirus 2
FKLASHMYCS

SEQ ID NO: 3524 - protein, 10 aa, Severe acute respiratory syndrome coronavirus 2
KLASHMYCSF

SEQ ID NO: 3525 - protein, 10 aa, Severe acute respiratory syndrome coronavirus 2
LASHMYCSFY

SEQ ID NO: 3526 - protein, 10 aa, Severe acute respiratory syndrome coronavirus 2
ASHMYCSFYP

SEQ ID NO: 3527 - protein, 10 aa, Severe acute respiratory syndrome coronavirus 2
SHMYCSFYPP

SEQ ID NO: 3528 - protein, 10 aa, Severe acute respiratory syndrome coronavirus 2
EEEFEPSTQY

SEQ ID NO: 3529 - protein, 10 aa, Severe acute respiratory syndrome coronavirus 2
EFEPSTQYEY

SEQ ID NO: 3530 - protein, 10 aa, Severe acute respiratory syndrome coronavirus 2
TEDDYQGKPL

SEQ ID NO: 3531 - protein, 10 aa, Severe acute respiratory syndrome coronavirus 2
YQGKPLEFGA

SEQ ID NO: 3532 - protein, 10 aa, Severe acute respiratory syndrome coronavirus 2
KPLEFGATSA

SEQ ID NO: 3533 - protein, 10 aa, Severe acute respiratory syndrome coronavirus 2
PLEFGATSAA

SEQ ID NO: 3534 - protein, 10 aa, Severe acute respiratory syndrome coronavirus 2
LEFGATSAAL

SEQ ID NO: 3535 - protein, 10 aa, Severe acute respiratory syndrome coronavirus 2
WLDDDSQQTV

SEQ ID NO: 3536 - protein, 10 aa, Severe acute respiratory syndrome coronavirus 2
NQTTTIQTIV

SEQ ID NO: 3537 - protein, 10 aa, Severe acute respiratory syndrome coronavirus 2
TTTIQTIVEV

SEQ ID NO: 3538 - protein, 10 aa, Severe acute respiratory syndrome coronavirus 2
TTIQTIVEVQ

SEQ ID NO: 3539 - protein, 10 aa, Severe acute respiratory syndrome coronavirus 2
PQLEMELTPV

SEQ ID NO: 3540 - protein, 10 aa, Severe acute respiratory syndrome coronavirus 2
QLEMELTPVV

SEQ ID NO: 3541 - protein, 10 aa, Severe acute respiratory syndrome coronavirus 2
MELTPVVQTI

SEQ ID NO: 3542 - protein, 10 aa, Severe acute respiratory syndrome coronavirus 2
LTPVVQTIEV

SEQ ID NO: 3543 - protein, 10 aa, Severe acute respiratory syndrome coronavirus 2
VVQTIEVNSF

SEQ ID NO: 3544 - protein, 10 aa, Severe acute respiratory syndrome coronavirus 2
TIEVNSFSGY

SEQ ID NO: 3545 - protein, 10 aa, Severe acute respiratory syndrome coronavirus 2
IEVNSFSGYL

SEQ ID NO: 3546 - protein, 10 aa, Severe acute respiratory syndrome coronavirus 2
EVNSFSGYLK

SEQ ID NO: 3547 - protein, 10 aa, Severe acute respiratory syndrome coronavirus 2
VNSFSGYLKL

SEQ ID NO: 3548 - protein, 10 aa, Severe acute respiratory syndrome coronavirus 2
SGYLKLTDNV

SEQ ID NO: 3549 - protein, 10 aa, Severe acute respiratory syndrome coronavirus 2
GYLKLTDNVY

SEQ ID NO: 3550 - protein, 10 aa, Severe acute respiratory syndrome coronavirus 2
YLKLTDNVYI

SEQ ID NO: 3551 - protein, 10 aa, Severe acute respiratory syndrome coronavirus 2
KVKPTVVVNA

SEQ ID NO: 3552 - protein, 10 aa, Severe acute respiratory syndrome coronavirus 2
VKPTVVVNAA

SEQ ID NO: 3553 - protein, 10 aa, Severe acute respiratory syndrome coronavirus 2
TVVVNAANVY

SEQ ID NO: 3554 - protein, 10 aa, Severe acute respiratory syndrome coronavirus 2
VVVNAANVYL

SEQ ID NO: 3555 - protein, 10 aa, Severe acute respiratory syndrome coronavirus 2
VVNAANVYLK

SEQ ID NO: 3556 - protein, 10 aa, Severe acute respiratory syndrome coronavirus 2
NVYLKHGGGV

SEQ ID NO: 3557 - protein, 10 aa, Severe acute respiratory syndrome coronavirus 2
ALNKATNNAM

SEQ ID NO: 3558 - protein, 10 aa, Severe acute respiratory syndrome coronavirus 2
NAMQVESDDY

SEQ ID NO: 3559 - protein, 10 aa, Severe acute respiratory syndrome coronavirus 2
AMQVESDDYI

SEQ ID NO: 3560 - protein, 10 aa, Severe acute respiratory syndrome coronavirus 2
MQVESDDYIA

SEQ ID NO: 3561 - protein, 10 aa, Severe acute respiratory syndrome coronavirus 2
DYIATNGPLK

SEQ ID NO: 3562 - protein, 10 aa, Severe acute respiratory syndrome coronavirus 2
YIATNGPLKV

SEQ ID NO: 3563 - protein, 10 aa, Severe acute respiratory syndrome coronavirus 2
GPLKVGGSCV

SEQ ID NO: 3564 - protein, 10 aa, Severe acute respiratory syndrome coronavirus 2
CVLSGHNLAK

SEQ ID NO: 3565 - protein, 10 aa, Severe acute respiratory syndrome coronavirus 2
HNLAKHCLHV

SEQ ID NO: 3566 - protein, 10 aa, Severe acute respiratory syndrome coronavirus 2
NLAKHCLHVV

SEQ ID NO: 3567 - protein, 10 aa, Severe acute respiratory syndrome coronavirus 2
HCLHVVGPNV

SEQ ID NO: 3568 - protein, 10 aa, Severe acute respiratory syndrome coronavirus 2
LHVVGPNVNK

SEQ ID NO: 3569 - protein, 10 aa, Severe acute respiratory syndrome coronavirus 2
GEDIQLLKSA

SEQ ID NO: 3570 - protein, 10 aa, Severe acute respiratory syndrome coronavirus 2
QLLKSAYENF

SEQ ID NO: 3571 - protein, 10 aa, Severe acute respiratory syndrome coronavirus 2
AYENFNQHEV

SEQ ID NO: 3572 - protein, 10 aa, Severe acute respiratory syndrome coronavirus 2
YENFNQHEVL

SEQ ID NO: 3573 - protein, 10 aa, Severe acute respiratory syndrome coronavirus 2
NQHEVLLAPL

SEQ ID NO: 3574 - protein, 10 aa, Severe acute respiratory syndrome coronavirus 2
QHEVLLAPLL

SEQ ID NO: 3575 - protein, 10 aa, Severe acute respiratory syndrome coronavirus 2
EVLLAPLLSA

SEQ ID NO: 3576 - protein, 10 aa, Severe acute respiratory syndrome coronavirus 2
LLAPLLSAGI

SEQ ID NO: 3577 - protein, 10 aa, Severe acute respiratory syndrome coronavirus 2
LAPLLSAGIF

SEQ ID NO: 3578 - protein, 10 aa, Severe acute respiratory syndrome coronavirus 2
PLLSAGIFGA

SEQ ID NO: 3579 - protein, 10 aa, Severe acute respiratory syndrome coronavirus 2
LLSAGIFGAD

SEQ ID NO: 3580 - protein, 10 aa, Severe acute respiratory syndrome coronavirus 2
IFGADPIHSL

SEQ ID NO: 3581 - protein, 10 aa, Severe acute respiratory syndrome coronavirus 2
FGADPIHSLR

SEQ ID NO: 3582 - protein, 10 aa, Severe acute respiratory syndrome coronavirus 2
GADPIHSLRV

SEQ ID NO: 3583 - protein, 10 aa, Severe acute respiratory syndrome coronavirus 2
HSLRVCVDTV

SEQ ID NO: 3584 - protein, 10 aa, Severe acute respiratory syndrome coronavirus 2
SLRVCVDTVR

SEQ ID NO: 3585 - protein, 10 aa, Severe acute respiratory syndrome coronavirus 2
CVDTVRTNVY

SEQ ID NO: 3586 - protein, 10 aa, Severe acute respiratory syndrome coronavirus 2
VDTVRTNVYL

SEQ ID NO: 3587 - protein, 10 aa, Severe acute respiratory syndrome coronavirus 2
DTVRTNVYLA

SEQ ID NO: 3588 - protein, 10 aa, Severe acute respiratory syndrome coronavirus 2
TVRTNVYLAV

SEQ ID NO: 3589 - protein, 10 aa, Severe acute respiratory syndrome coronavirus 2
VRTNVYLAVF

SEQ ID NO: 3590 - protein, 10 aa, Severe acute respiratory syndrome coronavirus 2
TNVYLAVFDK

SEQ ID NO: 3591 - protein, 10 aa, Severe acute respiratory syndrome coronavirus 2
VYLAVFDKNL

SEQ ID NO: 3592 - protein, 10 aa, Severe acute respiratory syndrome coronavirus 2
YLAVFDKNLY

SEQ ID NO: 3593 - protein, 10 aa, Severe acute respiratory syndrome coronavirus 2
AVFDKNLYDK

SEQ ID NO: 3594 - protein, 10 aa, Severe acute respiratory syndrome coronavirus 2
KNLYDKLVSS

SEQ ID NO: 3595 - protein, 10 aa, Severe acute respiratory syndrome coronavirus 2
NLYDKLVSSF

SEQ ID NO: 3596 - protein, 10 aa, Severe acute respiratory syndrome coronavirus 2
LYDKLVSSFL

SEQ ID NO: 3597 - protein, 10 aa, Severe acute respiratory syndrome coronavirus 2
KLVSSFLEMK

SEQ ID NO: 3598 - protein, 10 aa, Severe acute respiratory syndrome coronavirus 2
SSFLEMKSEK

SEQ ID NO: 3599 - protein, 10 aa, Severe acute respiratory syndrome coronavirus 2
FLEMKSEKQV

SEQ ID NO: 3600 - protein, 10 aa, Severe acute respiratory syndrome coronavirus 2
SEKQVEQKIA

SEQ ID NO: 3601 - protein, 10 aa, Severe acute respiratory syndrome coronavirus 2
KQVEQKIAEI

SEQ ID NO: 3602 - protein, 10 aa, Severe acute respiratory syndrome coronavirus 2
KIAEIPKEEV

SEQ ID NO: 3603 - protein, 10 aa, Severe acute respiratory syndrome coronavirus 2
EVKPFITESK

SEQ ID NO: 3604 - protein, 10 aa, Severe acute respiratory syndrome coronavirus 2
TESKPSVEQR

SEQ ID NO: 3605 - protein, 10 aa, Severe acute respiratory syndrome coronavirus 2
ESKPSVEQRK

SEQ ID NO: 3606 - protein, 10 aa, Severe acute respiratory syndrome coronavirus 2
KKIKACVEEV

SEQ ID NO: 3607 - protein, 10 aa, Severe acute respiratory syndrome coronavirus 2
EVTTTLEETK

SEQ ID NO: 3608 - protein, 10 aa, Severe acute respiratory syndrome coronavirus 2
VTTTLEETKF

SEQ ID NO: 3609 - protein, 10 aa, Severe acute respiratory syndrome coronavirus 2
EETKFLTENL

SEQ ID NO: 3610 - protein, 10 aa, Severe acute respiratory syndrome coronavirus 2
ETKFLTENLL

SEQ ID NO: 3611 - protein, 10 aa, Severe acute respiratory syndrome coronavirus 2
KFLTENLLLY

SEQ ID NO: 3612 - protein, 10 aa, Severe acute respiratory syndrome coronavirus 2
FLTENLLLYI

SEQ ID NO: 3613 - protein, 10 aa, Severe acute respiratory syndrome coronavirus 2
TENLLLYIDI

SEQ ID NO: 3614 - protein, 10 aa, Severe acute respiratory syndrome coronavirus 2
LLYIDINGNL

SEQ ID NO: 3615 - protein, 10 aa, Severe acute respiratory syndrome coronavirus 2
GNLHPDSATL

SEQ ID NO: 3616 - protein, 10 aa, Severe acute respiratory syndrome coronavirus 2
NLHPDSATLV

SEQ ID NO: 3617 - protein, 10 aa, Severe acute respiratory syndrome coronavirus 2
TLVSDIDITF

SEQ ID NO: 3618 - protein, 10 aa, Severe acute respiratory syndrome coronavirus 2
LVSDIDITFL

SEQ ID NO: 3619 - protein, 10 aa, Severe acute respiratory syndrome coronavirus 2
VSDIDITFLK

SEQ ID NO: 3620 - protein, 10 aa, Severe acute respiratory syndrome coronavirus 2
SDIDITFLKK

SEQ ID NO: 3621 - protein, 10 aa, Severe acute respiratory syndrome coronavirus 2
ITFLKKDAPY

SEQ ID NO: 3622 - protein, 10 aa, Severe acute respiratory syndrome coronavirus 2
TFLKKDAPYI

SEQ ID NO: 3623 - protein, 10 aa, Severe acute respiratory syndrome coronavirus 2
FLKKDAPYIV

SEQ ID NO: 3624 - protein, 10 aa, Severe acute respiratory syndrome coronavirus 2
IVGDVVQEGV

SEQ ID NO: 3625 - protein, 10 aa, Severe acute respiratory syndrome coronavirus 2
VVQEGVLTAV

SEQ ID NO: 3626 - protein, 10 aa, Severe acute respiratory syndrome coronavirus 2
VQEGVLTAVV

SEQ ID NO: 3627 - protein, 10 aa, Severe acute respiratory syndrome coronavirus 2
QEGVLTAVVI

SEQ ID NO: 3628 - protein, 10 aa, Severe acute respiratory syndrome coronavirus 2
GVLTAVVIPT

SEQ ID NO: 3629 - protein, 10 aa, Severe acute respiratory syndrome coronavirus 2
VLTAVVIPTK

SEQ ID NO: 3630 - protein, 10 aa, Severe acute respiratory syndrome coronavirus 2
LTAVVIPTKK

SEQ ID NO: 3631 - protein, 10 aa, Severe acute respiratory syndrome coronavirus 2
TKKAGGTTEM

SEQ ID NO: 3632 - protein, 10 aa, Severe acute respiratory syndrome coronavirus 2
GTTEMLAKAL

SEQ ID NO: 3633 - protein, 10 aa, Severe acute respiratory syndrome coronavirus 2
TTEMLAKALR

SEQ ID NO: 3634 - protein, 10 aa, Severe acute respiratory syndrome coronavirus 2
TEMLAKALRK

SEQ ID NO: 3635 - protein, 10 aa, Severe acute respiratory syndrome coronavirus 2
EMLAKALRKV

SEQ ID NO: 3636 - protein, 10 aa, Severe acute respiratory syndrome coronavirus 2
MLAKALRKVP

SEQ ID NO: 3637 - protein, 10 aa, Severe acute respiratory syndrome coronavirus 2
ALRKVPTDNY

SEQ ID NO: 3638 - protein, 10 aa, Severe acute respiratory syndrome coronavirus 2
VPTDNYITTY

SEQ ID NO: 3639 - protein, 10 aa, Severe acute respiratory syndrome coronavirus 2
YITTYPGQGL

SEQ ID NO: 3640 - protein, 10 aa, Severe acute respiratory syndrome coronavirus 2
TYPGQGLNGY

SEQ ID NO: 3641 - protein, 10 aa, Severe acute respiratory syndrome coronavirus 2
GLNGYTVEEA

SEQ ID NO: 3642 - protein, 10 aa, Severe acute respiratory syndrome coronavirus 2
YTVEEAKTVL

SEQ ID NO: 3643 - protein, 10 aa, Severe acute respiratory syndrome coronavirus 2
TVEEAKTVLK

SEQ ID NO: 3644 - protein, 10 aa, Severe acute respiratory syndrome coronavirus 2
KTVLKKCKSA

SEQ ID NO: 3645 - protein, 10 aa, Severe acute respiratory syndrome coronavirus 2
TVLKKCKSAF

SEQ ID NO: 3646 - protein, 10 aa, Severe acute respiratory syndrome coronavirus 2
VLKKCKSAFY

SEQ ID NO: 3647 - protein, 10 aa, Severe acute respiratory syndrome coronavirus 2
KSAFYILPSI

SEQ ID NO: 3648 - protein, 10 aa, Severe acute respiratory syndrome coronavirus 2
SAFYILPSII

SEQ ID NO: 3649 - protein, 10 aa, Severe acute respiratory syndrome coronavirus 2
ILPSIISNEK

SEQ ID NO: 3650 - protein, 10 aa, Severe acute respiratory syndrome coronavirus 2
KQEILGTVSW

SEQ ID NO: 3651 - protein, 10 aa, Severe acute respiratory syndrome coronavirus 2
QEILGTVSWN

SEQ ID NO: 3652 - protein, 10 aa, Severe acute respiratory syndrome coronavirus 2
EILGTVSWNL

SEQ ID NO: 3653 - protein, 10 aa, Severe acute respiratory syndrome coronavirus 2
ILGTVSWNLR

SEQ ID NO: 3654 - protein, 10 aa, Severe acute respiratory syndrome coronavirus 2
GTVSWNLREM

SEQ ID NO: 3655 - protein, 10 aa, Severe acute respiratory syndrome coronavirus 2
TVSWNLREML

SEQ ID NO: 3656 - protein, 10 aa, Severe acute respiratory syndrome coronavirus 2
VSWNLREMLA

SEQ ID NO: 3657 - protein, 10 aa, Severe acute respiratory syndrome coronavirus 2
WNLREMLAHA

SEQ ID NO: 3658 - protein, 10 aa, Severe acute respiratory syndrome coronavirus 2
REMLAHAEET

SEQ ID NO: 3659 - protein, 10 aa, Severe acute respiratory syndrome coronavirus 2
EMLAHAEETR

SEQ ID NO: 3660 - protein, 10 aa, Severe acute respiratory syndrome coronavirus 2
MLAHAEETRK

SEQ ID NO: 3661 - protein, 10 aa, Severe acute respiratory syndrome coronavirus 2
AEETRKLMPV

SEQ ID NO: 3662 - protein, 10 aa, Severe acute respiratory syndrome coronavirus 2
RKLMPVCVET

SEQ ID NO: 3663 - protein, 10 aa, Severe acute respiratory syndrome coronavirus 2
KLMPVCVETK

SEQ ID NO: 3664 - protein, 10 aa, Severe acute respiratory syndrome coronavirus 2
LMPVCVETKA

SEQ ID NO: 3665 - protein, 10 aa, Severe acute respiratory syndrome coronavirus 2
MPVCVETKAI

SEQ ID NO: 3666 - protein, 10 aa, Severe acute respiratory syndrome coronavirus 2
VETKAIVSTI

SEQ ID NO: 3667 - protein, 10 aa, Severe acute respiratory syndrome coronavirus 2
TKAIVSTIQR

SEQ ID NO: 3668 - protein, 10 aa, Severe acute respiratory syndrome coronavirus 2
KAIVSTIQRK

SEQ ID NO: 3669 - protein, 10 aa, Severe acute respiratory syndrome coronavirus 2
AIVSTIQRKY

SEQ ID NO: 3670 - protein, 10 aa, Severe acute respiratory syndrome coronavirus 2
IVSTIQRKYK

SEQ ID NO: 3671 - protein, 10 aa, Severe acute respiratory syndrome coronavirus 2
IKIQEGVVDY

SEQ ID NO: 3672 - protein, 10 aa, Severe acute respiratory syndrome coronavirus 2
EGVVDYGARF

SEQ ID NO: 3673 - protein, 10 aa, Severe acute respiratory syndrome coronavirus 2
GVVDYGARFY

SEQ ID NO: 3674 - protein, 10 aa, Severe acute respiratory syndrome coronavirus 2
VVDYGARFYF

SEQ ID NO: 3675 - protein, 10 aa, Severe acute respiratory syndrome coronavirus 2
VDYGARFYFY

SEQ ID NO: 3676 - protein, 10 aa, Severe acute respiratory syndrome coronavirus 2
GARFYFYTSK

SEQ ID NO: 3677 - protein, 10 aa, Severe acute respiratory syndrome coronavirus 2
ARFYFYTSKT

SEQ ID NO: 3678 - protein, 10 aa, Severe acute respiratory syndrome coronavirus 2
FYFYTSKTTV

SEQ ID NO: 3679 - protein, 10 aa, Severe acute respiratory syndrome coronavirus 2
YFYTSKTTVA

SEQ ID NO: 3680 - protein, 10 aa, Severe acute respiratory syndrome coronavirus 2
YTSKTTVASL

SEQ ID NO: 3681 - protein, 10 aa, Severe acute respiratory syndrome coronavirus 2
TTVASLINTL

SEQ ID NO: 3682 - protein, 10 aa, Severe acute respiratory syndrome coronavirus 2
ASLINTLNDL

SEQ ID NO: 3683 - protein, 10 aa, Severe acute respiratory syndrome coronavirus 2
SLINTLNDLN

SEQ ID NO: 3684 - protein, 10 aa, Severe acute respiratory syndrome coronavirus 2
NTLNDLNETL

SEQ ID NO: 3685 - protein, 10 aa, Severe acute respiratory syndrome coronavirus 2
TLNDLNETLV

SEQ ID NO: 3686 - protein, 10 aa, Severe acute respiratory syndrome coronavirus 2
NDLNETLVTM

SEQ ID NO: 3687 - protein, 10 aa, Severe acute respiratory syndrome coronavirus 2
LNETLVTMPL

SEQ ID NO: 3688 - protein, 10 aa, Severe acute respiratory syndrome coronavirus 2
ETLVTMPLGY

SEQ ID NO: 3689 - protein, 10 aa, Severe acute respiratory syndrome coronavirus 2
TLVTMPLGYV

SEQ ID NO: 3690 - protein, 10 aa, Severe acute respiratory syndrome coronavirus 2
MPLGYVTHGL

SEQ ID NO: 3691 - protein, 10 aa, Severe acute respiratory syndrome coronavirus 2
LGYVTHGLNL

SEQ ID NO: 3692 - protein, 10 aa, Severe acute respiratory syndrome coronavirus 2
HGLNLEEAAR

SEQ ID NO: 3693 - protein, 10 aa, Severe acute respiratory syndrome coronavirus 2
NLEEAARYMR

SEQ ID NO: 3694 - protein, 10 aa, Severe acute respiratory syndrome coronavirus 2
EEAARYMRSL

SEQ ID NO: 3695 - protein, 10 aa, Severe acute respiratory syndrome coronavirus 2
EAARYMRSLK

SEQ ID NO: 3696 - protein, 10 aa, Severe acute respiratory syndrome coronavirus 2
AARYMRSLKV

SEQ ID NO: 3697 - protein, 10 aa, Severe acute respiratory syndrome coronavirus 2
RYMRSLKVPA

SEQ ID NO: 3698 - protein, 10 aa, Severe acute respiratory syndrome coronavirus 2
YMRSLKVPAT

SEQ ID NO: 3699 - protein, 10 aa, Severe acute respiratory syndrome coronavirus 2
MRSLKVPATV

SEQ ID NO: 3700 - protein, 10 aa, Severe acute respiratory syndrome coronavirus 2
RSLKVPATVS

SEQ ID NO: 3701 - protein, 10 aa, Severe acute respiratory syndrome coronavirus 2
SLKVPATVSV

SEQ ID NO: 3702 - protein, 10 aa, Severe acute respiratory syndrome coronavirus 2
ATVSVSSPDA

SEQ ID NO: 3703 - protein, 10 aa, Severe acute respiratory syndrome coronavirus 2
TVSVSSPDAV

SEQ ID NO: 3704 - protein, 10 aa, Severe acute respiratory syndrome coronavirus 2
VSSPDAVTAY

SEQ ID NO: 3705 - protein, 10 aa, Severe acute respiratory syndrome coronavirus 2
SSSKTPEEHF

SEQ ID NO: 3706 - protein, 10 aa, Severe acute respiratory syndrome coronavirus 2
TPEEHFIETI

SEQ ID NO: 3707 - protein, 10 aa, Severe acute respiratory syndrome coronavirus 2
EEHFIETISL

SEQ ID NO: 3708 - protein, 10 aa, Severe acute respiratory syndrome coronavirus 2
EHFIETISLA

SEQ ID NO: 3709 - protein, 10 aa, Severe acute respiratory syndrome coronavirus 2
IETISLAGSY

SEQ ID NO: 3710 - protein, 10 aa, Severe acute respiratory syndrome coronavirus 2
ETISLAGSYK

SEQ ID NO: 3711 - protein, 10 aa, Severe acute respiratory syndrome coronavirus 2
ISLAGSYKDW

SEQ ID NO: 3712 - protein, 10 aa, Severe acute respiratory syndrome coronavirus 2
LAGSYKDWSY

SEQ ID NO: 3713 - protein, 10 aa, Severe acute respiratory syndrome coronavirus 2
WSYSGQSTQL

SEQ ID NO: 3714 - protein, 10 aa, Severe acute respiratory syndrome coronavirus 2
GQSTQLGIEF

SEQ ID NO: 3715 - protein, 10 aa, Severe acute respiratory syndrome coronavirus 2
STQLGIEFLK

SEQ ID NO: 3716 - protein, 10 aa, Severe acute respiratory syndrome coronavirus 2
TQLGIEFLKR

SEQ ID NO: 3717 - protein, 10 aa, Severe acute respiratory syndrome coronavirus 2
FLKRGDKSVY

SEQ ID NO: 3718 - protein, 10 aa, Severe acute respiratory syndrome coronavirus 2
LKRGDKSVYY

SEQ ID NO: 3719 - protein, 10 aa, Severe acute respiratory syndrome coronavirus 2
VYYTSNPTTF

SEQ ID NO: 3720 - protein, 10 aa, Severe acute respiratory syndrome coronavirus 2
YYTSNPTTFH

SEQ ID NO: 3721 - protein, 10 aa, Severe acute respiratory syndrome coronavirus 2
YTSNPTTFHL

SEQ ID NO: 3722 - protein, 10 aa, Severe acute respiratory syndrome coronavirus 2
TTFHLDGEVI

SEQ ID NO: 3723 - protein, 10 aa, Severe acute respiratory syndrome coronavirus 2
FHLDGEVITF

SEQ ID NO: 3724 - protein, 10 aa, Severe acute respiratory syndrome coronavirus 2
GEVITFDNLK

SEQ ID NO: 3725 - protein, 10 aa, Severe acute respiratory syndrome coronavirus 2
EVITFDNLKT

SEQ ID NO: 3726 - protein, 10 aa, Severe acute respiratory syndrome coronavirus 2
VITFDNLKTL

SEQ ID NO: 3727 - protein, 10 aa, Severe acute respiratory syndrome coronavirus 2
ITFDNLKTLL

SEQ ID NO: 3728 - protein, 10 aa, Severe acute respiratory syndrome coronavirus 2
DNLKTLLSLR

SEQ ID NO: 3729 - protein, 10 aa, Severe acute respiratory syndrome coronavirus 2
KTLLSLREVR

SEQ ID NO: 3730 - protein, 10 aa, Severe acute respiratory syndrome coronavirus 2
LLSLREVRTI

SEQ ID NO: 3731 - protein, 10 aa, Severe acute respiratory syndrome coronavirus 2
LSLREVRTIK

SEQ ID NO: 3732 - protein, 10 aa, Severe acute respiratory syndrome coronavirus 2
SLREVRTIKV

SEQ ID NO: 3733 - protein, 10 aa, Severe acute respiratory syndrome coronavirus 2
LREVRTIKVF

SEQ ID NO: 3734 - protein, 10 aa, Severe acute respiratory syndrome coronavirus 2
REVRTIKVFT

SEQ ID NO: 3735 - protein, 10 aa, Severe acute respiratory syndrome coronavirus 2
VRTIKVFTTV

SEQ ID NO: 3736 - protein, 10 aa, Severe acute respiratory syndrome coronavirus 2
RTIKVFTTVD

SEQ ID NO: 3737 - protein, 10 aa, Severe acute respiratory syndrome coronavirus 2
TTVDNINLHT

SEQ ID NO: 3738 - protein, 10 aa, Severe acute respiratory syndrome coronavirus 2
LHTQVVDMSM

SEQ ID NO: 3739 - protein, 10 aa, Severe acute respiratory syndrome coronavirus 2
TQVVDMSMTY

SEQ ID NO: 3740 - protein, 10 aa, Severe acute respiratory syndrome coronavirus 2
DMSMTYGQQF

SEQ ID NO: 3741 - protein, 10 aa, Severe acute respiratory syndrome coronavirus 2
MSMTYGQQFG

SEQ ID NO: 3742 - protein, 10 aa, Severe acute respiratory syndrome coronavirus 2
MTYGQQFGPT

SEQ ID NO: 3743 - protein, 10 aa, Severe acute respiratory syndrome coronavirus 2
TYGQQFGPTY

SEQ ID NO: 3744 - protein, 10 aa, Severe acute respiratory syndrome coronavirus 2
YGQQFGPTYL

SEQ ID NO: 3745 - protein, 10 aa, Severe acute respiratory syndrome coronavirus 2
YLDGADVTKI

SEQ ID NO: 3746 - protein, 10 aa, Severe acute respiratory syndrome coronavirus 2
KIKPHNSHEG

SEQ ID NO: 3747 - protein, 10 aa, Severe acute respiratory syndrome coronavirus 2
HNSHEGKTFY

SEQ ID NO: 3748 - protein, 10 aa, Severe acute respiratory syndrome coronavirus 2
NSHEGKTFYV

SEQ ID NO: 3749 - protein, 10 aa, Severe acute respiratory syndrome coronavirus 2
SHEGKTFYVL

SEQ ID NO: 3750 - protein, 10 aa, Severe acute respiratory syndrome coronavirus 2
HEGKTFYVLP

SEQ ID NO: 3751 - protein, 10 aa, Severe acute respiratory syndrome coronavirus 2
FYVLPNDDTL

SEQ ID NO: 3752 - protein, 10 aa, Severe acute respiratory syndrome coronavirus 2
YVLPNDDTLR

SEQ ID NO: 3753 - protein, 10 aa, Severe acute respiratory syndrome coronavirus 2
VLPNDDTLRV

SEQ ID NO: 3754 - protein, 10 aa, Severe acute respiratory syndrome coronavirus 2
DTLRVEAFEY

SEQ ID NO: 3755 - protein, 10 aa, Severe acute respiratory syndrome coronavirus 2
TLRVEAFEYY

SEQ ID NO: 3756 - protein, 10 aa, Severe acute respiratory syndrome coronavirus 2
VEAFEYYHTT

SEQ ID NO: 3757 - protein, 10 aa, Severe acute respiratory syndrome coronavirus 2
FEYYHTTDPS

SEQ ID NO: 3758 - protein, 10 aa, Severe acute respiratory syndrome coronavirus 2
EYYHTTDPSF

SEQ ID NO: 3759 - protein, 10 aa, Severe acute respiratory syndrome coronavirus 2
YYHTTDPSFL

SEQ ID NO: 3760 - protein, 10 aa, Severe acute respiratory syndrome coronavirus 2
HTTDPSFLGR

SEQ ID NO: 3761 - protein, 10 aa, Severe acute respiratory syndrome coronavirus 2
TTDPSFLGRY

SEQ ID NO: 3762 - protein, 10 aa, Severe acute respiratory syndrome coronavirus 2
TDPSFLGRYM

SEQ ID NO: 3763 - protein, 10 aa, Severe acute respiratory syndrome coronavirus 2
SFLGRYMSAL

SEQ ID NO: 3764 - protein, 10 aa, Severe acute respiratory syndrome coronavirus 2
FLGRYMSALN

SEQ ID NO: 3765 - protein, 10 aa, Severe acute respiratory syndrome coronavirus 2
RYMSALNHTK

SEQ ID NO: 3766 - protein, 10 aa, Severe acute respiratory syndrome coronavirus 2
YMSALNHTKK

SEQ ID NO: 3767 - protein, 10 aa, Severe acute respiratory syndrome coronavirus 2
MSALNHTKKW

SEQ ID NO: 3768 - protein, 10 aa, Severe acute respiratory syndrome coronavirus 2
HTKKWKYPQV

SEQ ID NO: 3769 - protein, 10 aa, Severe acute respiratory syndrome coronavirus 2
KWKYPQVNGL

SEQ ID NO: 3770 - protein, 10 aa, Severe acute respiratory syndrome coronavirus 2
YPQVNGLTSI

SEQ ID NO: 3771 - protein, 10 aa, Severe acute respiratory syndrome coronavirus 2
QVNGLTSIKW

SEQ ID NO: 3772 - protein, 10 aa, Severe acute respiratory syndrome coronavirus 2
SIKWADNNCY

SEQ ID NO: 3773 - protein, 10 aa, Severe acute respiratory syndrome coronavirus 2
IKWADNNCYL

SEQ ID NO: 3774 - protein, 10 aa, Severe acute respiratory syndrome coronavirus 2
CYLATALLTL

SEQ ID NO: 3775 - protein, 10 aa, Severe acute respiratory syndrome coronavirus 2
YLATALLTLQ

SEQ ID NO: 3776 - protein, 10 aa, Severe acute respiratory syndrome coronavirus 2
ALLTLQQIEL

SEQ ID NO: 3777 - protein, 10 aa, Severe acute respiratory syndrome coronavirus 2
LLTLQQIELK

SEQ ID NO: 3778 - protein, 10 aa, Severe acute respiratory syndrome coronavirus 2
LTLQQIELKF

SEQ ID NO: 3779 - protein, 10 aa, Severe acute respiratory syndrome coronavirus 2
QIELKFNPPA

SEQ ID NO: 3780 - protein, 10 aa, Severe acute respiratory syndrome coronavirus 2
IELKFNPPAL

SEQ ID NO: 3781 - protein, 10 aa, Severe acute respiratory syndrome coronavirus 2
FNPPALQDAY

SEQ ID NO: 3782 - protein, 10 aa, Severe acute respiratory syndrome coronavirus 2
NPPALQDAYY

SEQ ID NO: 3783 - protein, 10 aa, Severe acute respiratory syndrome coronavirus 2
ALQDAYYRAR

SEQ ID NO: 3784 - protein, 10 aa, Severe acute respiratory syndrome coronavirus 2
AYYRARAGEA

SEQ ID NO: 3785 - protein, 10 aa, Severe acute respiratory syndrome coronavirus 2
YYRARAGEAA

SEQ ID NO: 3786 - protein, 10 aa, Severe acute respiratory syndrome coronavirus 2
RARAGEAANF

SEQ ID NO: 3787 - protein, 10 aa, Severe acute respiratory syndrome coronavirus 2
AGEAANFCAL

SEQ ID NO: 3788 - protein, 10 aa, Severe acute respiratory syndrome coronavirus 2
GEAANFCALI

SEQ ID NO: 3789 - protein, 10 aa, Severe acute respiratory syndrome coronavirus 2
EAANFCALIL

SEQ ID NO: 3790 - protein, 10 aa, Severe acute respiratory syndrome coronavirus 2
AANFCALILA

SEQ ID NO: 3791 - protein, 10 aa, Severe acute respiratory syndrome coronavirus 2
ANFCALILAY

SEQ ID NO: 3792 - protein, 10 aa, Severe acute respiratory syndrome coronavirus 2
CALILAYCNK

SEQ ID NO: 3793 - protein, 10 aa, Severe acute respiratory syndrome coronavirus 2
LILAYCNKTV

SEQ ID NO: 3794 - protein, 10 aa, Severe acute respiratory syndrome coronavirus 2
AYCNKTVGEL

SEQ ID NO: 3795 - protein, 10 aa, Severe acute respiratory syndrome coronavirus 2
KTVGELGDVR

SEQ ID NO: 3796 - protein, 10 aa, Severe acute respiratory syndrome coronavirus 2
GELGDVRETM

SEQ ID NO: 3797 - protein, 10 aa, Severe acute respiratory syndrome coronavirus 2
LGDVRETMSY

SEQ ID NO: 3798 - protein, 10 aa, Severe acute respiratory syndrome coronavirus 2
GDVRETMSYL

SEQ ID NO: 3799 - protein, 10 aa, Severe acute respiratory syndrome coronavirus 2
DVRETMSYLF

SEQ ID NO: 3800 - protein, 10 aa, Severe acute respiratory syndrome coronavirus 2
RETMSYLFQH

SEQ ID NO: 3801 - protein, 10 aa, Severe acute respiratory syndrome coronavirus 2
ETMSYLFQHA

SEQ ID NO: 3802 - protein, 10 aa, Severe acute respiratory syndrome coronavirus 2
MSYLFQHANL

SEQ ID NO: 3803 - protein, 10 aa, Severe acute respiratory syndrome coronavirus 2
YLFQHANLDS

SEQ ID NO: 3804 - protein, 10 aa, Severe acute respiratory syndrome coronavirus 2
QTTLKGVEAV

SEQ ID NO: 3805 - protein, 10 aa, Severe acute respiratory syndrome coronavirus 2
TTLKGVEAVM

SEQ ID NO: 3806 - protein, 10 aa, Severe acute respiratory syndrome coronavirus 2
TLKGVEAVMY

SEQ ID NO: 3807 - protein, 10 aa, Severe acute respiratory syndrome coronavirus 2
LKGVEAVMYM

SEQ ID NO: 3808 - protein, 10 aa, Severe acute respiratory syndrome coronavirus 2
VEAVMYMGTL

SEQ ID NO: 3809 - protein, 10 aa, Severe acute respiratory syndrome coronavirus 2
AVMYMGTLSY

SEQ ID NO: 3810 - protein, 10 aa, Severe acute respiratory syndrome coronavirus 2
VMYMGTLSYE

SEQ ID NO: 3811 - protein, 10 aa, Severe acute respiratory syndrome coronavirus 2
YMGTLSYEQF

SEQ ID NO: 3812 - protein, 10 aa, Severe acute respiratory syndrome coronavirus 2
MGTLSYEQFK

SEQ ID NO: 3813 - protein, 10 aa, Severe acute respiratory syndrome coronavirus 2
GTLSYEQFKK

SEQ ID NO: 3814 - protein, 10 aa, Severe acute respiratory syndrome coronavirus 2
YEQFKKGVQI

SEQ ID NO: 3815 - protein, 10 aa, Severe acute respiratory syndrome coronavirus 2
GVQIPCTCGK

SEQ ID NO: 3816 - protein, 10 aa, Severe acute respiratory syndrome coronavirus 2
KYLVQQESPF

SEQ ID NO: 3817 - protein, 10 aa, Severe acute respiratory syndrome coronavirus 2
YLVQQESPFV

SEQ ID NO: 3818 - protein, 10 aa, Severe acute respiratory syndrome coronavirus 2
LVQQESPFVM

SEQ ID NO: 3819 - protein, 10 aa, Severe acute respiratory syndrome coronavirus 2
VQQESPFVMM

SEQ ID NO: 3820 - protein, 10 aa, Severe acute respiratory syndrome coronavirus 2
QESPFVMMSA

SEQ ID NO: 3821 - protein, 10 aa, Severe acute respiratory syndrome coronavirus 2
SPFVMMSAPP

SEQ ID NO: 3822 - protein, 10 aa, Severe acute respiratory syndrome coronavirus 2
PFVMMSAPPA

SEQ ID NO: 3823 - protein, 10 aa, Severe acute respiratory syndrome coronavirus 2
VMMSAPPAQY

SEQ ID NO: 3824 - protein, 10 aa, Severe acute respiratory syndrome coronavirus 2
MMSAPPAQYE

SEQ ID NO: 3825 - protein, 10 aa, Severe acute respiratory syndrome coronavirus 2
MSAPPAQYEL

SEQ ID NO: 3826 - protein, 10 aa, Severe acute respiratory syndrome coronavirus 2
SAPPAQYELK

SEQ ID NO: 3827 - protein, 10 aa, Severe acute respiratory syndrome coronavirus 2
AQYELKHGTF

SEQ ID NO: 3828 - protein, 10 aa, Severe acute respiratory syndrome coronavirus 2
YELKHGTFTC

SEQ ID NO: 3829 - protein, 10 aa, Severe acute respiratory syndrome coronavirus 2
HGTFTCASEY

SEQ ID NO: 3830 - protein, 10 aa, Severe acute respiratory syndrome coronavirus 2
TCASEYTGNY

SEQ ID NO: 3831 - protein, 10 aa, Severe acute respiratory syndrome coronavirus 2
YTGNYQCGHY

SEQ ID NO: 3832 - protein, 10 aa, Severe acute respiratory syndrome coronavirus 2
TGNYQCGHYK

SEQ ID NO: 3833 - protein, 10 aa, Severe acute respiratory syndrome coronavirus 2
NYQCGHYKHI

SEQ ID NO: 3834 - protein, 10 aa, Severe acute respiratory syndrome coronavirus 2
CGHYKHITSK

SEQ ID NO: 3835 - protein, 10 aa, Severe acute respiratory syndrome coronavirus 2
YKHITSKETL

SEQ ID NO: 3836 - protein, 10 aa, Severe acute respiratory syndrome coronavirus 2
KHITSKETLY

SEQ ID NO: 3837 - protein, 10 aa, Severe acute respiratory syndrome coronavirus 2
ITSKETLYCI

SEQ ID NO: 3838 - protein, 10 aa, Severe acute respiratory syndrome coronavirus 2
KETLYCIDGA

SEQ ID NO: 3839 - protein, 10 aa, Severe acute respiratory syndrome coronavirus 2
ETLYCIDGAL

SEQ ID NO: 3840 - protein, 10 aa, Severe acute respiratory syndrome coronavirus 2
TLYCIDGALL

SEQ ID NO: 3841 - protein, 10 aa, Severe acute respiratory syndrome coronavirus 2
YCIDGALLTK

SEQ ID NO: 3842 - protein, 10 aa, Severe acute respiratory syndrome coronavirus 2
GALLTKSSEY

SEQ ID NO: 3843 - protein, 10 aa, Severe acute respiratory syndrome coronavirus 2
ALLTKSSEYK

SEQ ID NO: 3844 - protein, 10 aa, Severe acute respiratory syndrome coronavirus 2
SEYKGPITDV

SEQ ID NO: 3845 - protein, 10 aa, Severe acute respiratory syndrome coronavirus 2
EYKGPITDVF

SEQ ID NO: 3846 - protein, 10 aa, Severe acute respiratory syndrome coronavirus 2
YKGPITDVFY

SEQ ID NO: 3847 - protein, 10 aa, Severe acute respiratory syndrome coronavirus 2
KGPITDVFYK

SEQ ID NO: 3848 - protein, 10 aa, Severe acute respiratory syndrome coronavirus 2
TDVFYKENSY

SEQ ID NO: 3849 - protein, 10 aa, Severe acute respiratory syndrome coronavirus 2
YKENSYTTTI

SEQ ID NO: 3850 - protein, 10 aa, Severe acute respiratory syndrome coronavirus 2
NSYTTTIKPV

SEQ ID NO: 3851 - protein, 10 aa, Severe acute respiratory syndrome coronavirus 2
YTTTIKPVTY

SEQ ID NO: 3852 - protein, 10 aa, Severe acute respiratory syndrome coronavirus 2
TTTIKPVTYK

SEQ ID NO: 3853 - protein, 10 aa, Severe acute respiratory syndrome coronavirus 2
TTIKPVTYKL

SEQ ID NO: 3854 - protein, 10 aa, Severe acute respiratory syndrome coronavirus 2
KLDGVVCTEI

SEQ ID NO: 3855 - protein, 10 aa, Severe acute respiratory syndrome coronavirus 2
GVVCTEIDPK

SEQ ID NO: 3856 - protein, 10 aa, Severe acute respiratory syndrome coronavirus 2
TEIDPKLDNY

SEQ ID NO: 3857 - protein, 10 aa, Severe acute respiratory syndrome coronavirus 2
EIDPKLDNYY

SEQ ID NO: 3858 - protein, 10 aa, Severe acute respiratory syndrome coronavirus 2
NYYKKDNSYF

SEQ ID NO: 3859 - protein, 10 aa, Severe acute respiratory syndrome coronavirus 2
YYKKDNSYFT

SEQ ID NO: 3860 - protein, 10 aa, Severe acute respiratory syndrome coronavirus 2
SYFTEQPIDL

SEQ ID NO: 3861 - protein, 10 aa, Severe acute respiratory syndrome coronavirus 2
FTEQPIDLVP

SEQ ID NO: 3862 - protein, 10 aa, Severe acute respiratory syndrome coronavirus 2
LVPNQPYPNA

SEQ ID NO: 3863 - protein, 10 aa, Severe acute respiratory syndrome coronavirus 2
PYPNASFDNF

SEQ ID NO: 3864 - protein, 10 aa, Severe acute respiratory syndrome coronavirus 2
YPNASFDNFK

SEQ ID NO: 3865 - protein, 10 aa, Severe acute respiratory syndrome coronavirus 2
NASFDNFKFV

SEQ ID NO: 3866 - protein, 10 aa, Severe acute respiratory syndrome coronavirus 2
NFKFVCDNIK

SEQ ID NO: 3867 - protein, 10 aa, Severe acute respiratory syndrome coronavirus 2
FKFVCDNIKF

SEQ ID NO: 3868 - protein, 10 aa, Severe acute respiratory syndrome coronavirus 2
IKFADDLNQL

SEQ ID NO: 3869 - protein, 10 aa, Severe acute respiratory syndrome coronavirus 2
DDLNQLTGYK

SEQ ID NO: 3870 - protein, 10 aa, Severe acute respiratory syndrome coronavirus 2
DLNQLTGYKK

SEQ ID NO: 3871 - protein, 10 aa, Severe acute respiratory syndrome coronavirus 2
LTGYKKPASR

SEQ ID NO: 3872 - protein, 10 aa, Severe acute respiratory syndrome coronavirus 2
ASRELKVTFF

SEQ ID NO: 3873 - protein, 10 aa, Severe acute respiratory syndrome coronavirus 2
ELKVTFFPDL

SEQ ID NO: 3874 - protein, 10 aa, Severe acute respiratory syndrome coronavirus 2
FFPDLNGDVV

SEQ ID NO: 3875 - protein, 10 aa, Severe acute respiratory syndrome coronavirus 2
FPDLNGDVVA

SEQ ID NO: 3876 - protein, 10 aa, Severe acute respiratory syndrome coronavirus 2
DVVAIDYKHY

SEQ ID NO: 3877 - protein, 10 aa, Severe acute respiratory syndrome coronavirus 2
IDYKHYTPSF

SEQ ID NO: 3878 - protein, 10 aa, Severe acute respiratory syndrome coronavirus 2
DYKHYTPSFK

SEQ ID NO: 3879 - protein, 10 aa, Severe acute respiratory syndrome coronavirus 2
YTPSFKKGAK

SEQ ID NO: 3880 - protein, 10 aa, Severe acute respiratory syndrome coronavirus 2
TPSFKKGAKL

SEQ ID NO: 3881 - protein, 10 aa, Severe acute respiratory syndrome coronavirus 2
LLHKPIVWHV

SEQ ID NO: 3882 - protein, 10 aa, Severe acute respiratory syndrome coronavirus 2
KPIVWHVNNA

SEQ ID NO: 3883 - protein, 10 aa, Severe acute respiratory syndrome coronavirus 2
VNNATNKATY

SEQ ID NO: 3884 - protein, 10 aa, Severe acute respiratory syndrome coronavirus 2
NNATNKATYK

SEQ ID NO: 3885 - protein, 10 aa, Severe acute respiratory syndrome coronavirus 2
ATYKPNTWCI

SEQ ID NO: 3886 - protein, 10 aa, Severe acute respiratory syndrome coronavirus 2
TYKPNTWCIR

SEQ ID NO: 3887 - protein, 10 aa, Severe acute respiratory syndrome coronavirus 2
KPNTWCIRCL

SEQ ID NO: 3888 - protein, 10 aa, Severe acute respiratory syndrome coronavirus 2
PNTWCIRCLW

SEQ ID NO: 3889 - protein, 10 aa, Severe acute respiratory syndrome coronavirus 2
WCIRCLWSTK

SEQ ID NO: 3890 - protein, 10 aa, Severe acute respiratory syndrome coronavirus 2
IRCLWSTKPV

SEQ ID NO: 3891 - protein, 10 aa, Severe acute respiratory syndrome coronavirus 2
CLWSTKPVET

SEQ ID NO: 3892 - protein, 10 aa, Severe acute respiratory syndrome coronavirus 2
STKPVETSNS

SEQ ID NO: 3893 - protein, 10 aa, Severe acute respiratory syndrome coronavirus 2
TKPVETSNSF

SEQ ID NO: 3894 - protein, 10 aa, Severe acute respiratory syndrome coronavirus 2
VETSNSFDVL

SEQ ID NO: 3895 - protein, 10 aa, Severe acute respiratory syndrome coronavirus 2
ETSNSFDVLK

SEQ ID NO: 3896 - protein, 10 aa, Severe acute respiratory syndrome coronavirus 2
SEDAQGMDNL

SEQ ID NO: 3897 - protein, 10 aa, Severe acute respiratory syndrome coronavirus 2
GMDNLACEDL

SEQ ID NO: 3898 - protein, 10 aa, Severe acute respiratory syndrome coronavirus 2
NLACEDLKPV

SEQ ID NO: 3899 - protein, 10 aa, Severe acute respiratory syndrome coronavirus 2
SEEVVENPTI

SEQ ID NO: 3900 - protein, 10 aa, Severe acute respiratory syndrome coronavirus 2
EVVENPTIQK

SEQ ID NO: 3901 - protein, 10 aa, Severe acute respiratory syndrome coronavirus 2
IQKDVLECNV

SEQ ID NO: 3902 - protein, 10 aa, Severe acute respiratory syndrome coronavirus 2
TTEVVGDIIL

SEQ ID NO: 3903 - protein, 10 aa, Severe acute respiratory syndrome coronavirus 2
TEVVGDIILK

SEQ ID NO: 3904 - protein, 10 aa, Severe acute respiratory syndrome coronavirus 2
EVVGDIILKP

SEQ ID NO: 3905 - protein, 10 aa, Severe acute respiratory syndrome coronavirus 2
VVGDIILKPA

SEQ ID NO: 3906 - protein, 10 aa, Severe acute respiratory syndrome coronavirus 2
IILKPANNSL

SEQ ID NO: 3907 - protein, 10 aa, Severe acute respiratory syndrome coronavirus 2
ILKPANNSLK

SEQ ID NO: 3908 - protein, 10 aa, Severe acute respiratory syndrome coronavirus 2
TEEVGHTDLM

SEQ ID NO: 3909 - protein, 10 aa, Severe acute respiratory syndrome coronavirus 2
EEVGHTDLMA

SEQ ID NO: 3910 - protein, 10 aa, Severe acute respiratory syndrome coronavirus 2
VGHTDLMAAY

SEQ ID NO: 3911 - protein, 10 aa, Severe acute respiratory syndrome coronavirus 2
LMAAYVDNSS

SEQ ID NO: 3912 - protein, 10 aa, Severe acute respiratory syndrome coronavirus 2
MAAYVDNSSL

SEQ ID NO: 3913 - protein, 10 aa, Severe acute respiratory syndrome coronavirus 2
AYVDNSSLTI

SEQ ID NO: 3914 - protein, 10 aa, Severe acute respiratory syndrome coronavirus 2
YVDNSSLTIK

SEQ ID NO: 3915 - protein, 10 aa, Severe acute respiratory syndrome coronavirus 2
TIKKPNELSR

SEQ ID NO: 3916 - protein, 10 aa, Severe acute respiratory syndrome coronavirus 2
KKPNELSRVL

SEQ ID NO: 3917 - protein, 10 aa, Severe acute respiratory syndrome coronavirus 2
KPNELSRVLG

SEQ ID NO: 3918 - protein, 10 aa, Severe acute respiratory syndrome coronavirus 2
NELSRVLGLK

SEQ ID NO: 3919 - protein, 10 aa, Severe acute respiratory syndrome coronavirus 2
LSRVLGLKTL

SEQ ID NO: 3920 - protein, 10 aa, Severe acute respiratory syndrome coronavirus 2
SRVLGLKTLA

SEQ ID NO: 3921 - protein, 10 aa, Severe acute respiratory syndrome coronavirus 2
GLKTLATHGL

SEQ ID NO: 3922 - protein, 10 aa, Severe acute respiratory syndrome coronavirus 2
KTLATHGLAA

SEQ ID NO: 3923 - protein, 10 aa, Severe acute respiratory syndrome coronavirus 2
TLATHGLAAV

SEQ ID NO: 3924 - protein, 10 aa, Severe acute respiratory syndrome coronavirus 2
GLAAVNSVPW

SEQ ID NO: 3925 - protein, 10 aa, Severe acute respiratory syndrome coronavirus 2
LAAVNSVPWD

SEQ ID NO: 3926 - protein, 10 aa, Severe acute respiratory syndrome coronavirus 2
AVNSVPWDTI

SEQ ID NO: 3927 - protein, 10 aa, Severe acute respiratory syndrome coronavirus 2
SVPWDTIANY

SEQ ID NO: 3928 - protein, 10 aa, Severe acute respiratory syndrome coronavirus 2
VPWDTIANYA

SEQ ID NO: 3929 - protein, 10 aa, Severe acute respiratory syndrome coronavirus 2
DTIANYAKPF

SEQ ID NO: 3930 - protein, 10 aa, Severe acute respiratory syndrome coronavirus 2
TIANYAKPFL

SEQ ID NO: 3931 - protein, 10 aa, Severe acute respiratory syndrome coronavirus 2
ANYAKPFLNK

SEQ ID NO: 3932 - protein, 10 aa, Severe acute respiratory syndrome coronavirus 2
NYAKPFLNKV

SEQ ID NO: 3933 - protein, 10 aa, Severe acute respiratory syndrome coronavirus 2
YAKPFLNKVV

SEQ ID NO: 3934 - protein, 10 aa, Severe acute respiratory syndrome coronavirus 2
PFLNKVVSTT

SEQ ID NO: 3935 - protein, 10 aa, Severe acute respiratory syndrome coronavirus 2
FLNKVVSTTT

SEQ ID NO: 3936 - protein, 10 aa, Severe acute respiratory syndrome coronavirus 2
NKVVSTTTNI

SEQ ID NO: 3937 - protein, 10 aa, Severe acute respiratory syndrome coronavirus 2
KVVSTTTNIV

SEQ ID NO: 3938 - protein, 10 aa, Severe acute respiratory syndrome coronavirus 2
VSTTTNIVTR

SEQ ID NO: 3939 - protein, 10 aa, Severe acute respiratory syndrome coronavirus 2
TTTNIVTRCL

SEQ ID NO: 3940 - protein, 10 aa, Severe acute respiratory syndrome coronavirus 2
TNIVTRCLNR

SEQ ID NO: 3941 - protein, 10 aa, Severe acute respiratory syndrome coronavirus 2
NIVTRCLNRV

SEQ ID NO: 3942 - protein, 10 aa, Severe acute respiratory syndrome coronavirus 2
RCLNRVCTNY

SEQ ID NO: 3943 - protein, 10 aa, Severe acute respiratory syndrome coronavirus 2
CLNRVCTNYM

SEQ ID NO: 3944 - protein, 10 aa, Severe acute respiratory syndrome coronavirus 2
NRVCTNYMPY

SEQ ID NO: 3945 - protein, 10 aa, Severe acute respiratory syndrome coronavirus 2
RVCTNYMPYF

SEQ ID NO: 3946 - protein, 10 aa, Severe acute respiratory syndrome coronavirus 2
VCTNYMPYFF

SEQ ID NO: 3947 - protein, 10 aa, Severe acute respiratory syndrome coronavirus 2
TNYMPYFFTL

SEQ ID NO: 3948 - protein, 10 aa, Severe acute respiratory syndrome coronavirus 2
NYMPYFFTLL

SEQ ID NO: 3949 - protein, 10 aa, Severe acute respiratory syndrome coronavirus 2
YMPYFFTLLL

SEQ ID NO: 3950 - protein, 10 aa, Severe acute respiratory syndrome coronavirus 2
MPYFFTLLLQ

SEQ ID NO: 3951 - protein, 10 aa, Severe acute respiratory syndrome coronavirus 2
PYFFTLLLQL

SEQ ID NO: 3952 - protein, 10 aa, Severe acute respiratory syndrome coronavirus 2
FTLLLQLCTF

SEQ ID NO: 3953 - protein, 10 aa, Severe acute respiratory syndrome coronavirus 2
TLLLQLCTFT

SEQ ID NO: 3954 - protein, 10 aa, Severe acute respiratory syndrome coronavirus 2
LLLQLCTFTR

SEQ ID NO: 3955 - protein, 10 aa, Severe acute respiratory syndrome coronavirus 2
CTFTRSTNSR

SEQ ID NO: 3956 - protein, 10 aa, Severe acute respiratory syndrome coronavirus 2
FTRSTNSRIK

SEQ ID NO: 3957 - protein, 10 aa, Severe acute respiratory syndrome coronavirus 2
RSTNSRIKAS

SEQ ID NO: 3958 - protein, 10 aa, Severe acute respiratory syndrome coronavirus 2
RIKASMPTTI

SEQ ID NO: 3959 - protein, 10 aa, Severe acute respiratory syndrome coronavirus 2
KASMPTTIAK

SEQ ID NO: 3960 - protein, 10 aa, Severe acute respiratory syndrome coronavirus 2
ASMPTTIAKN

SEQ ID NO: 3961 - protein, 10 aa, Severe acute respiratory syndrome coronavirus 2
MPTTIAKNTV

SEQ ID NO: 3962 - protein, 10 aa, Severe acute respiratory syndrome coronavirus 2
TIAKNTVKSV

SEQ ID NO: 3963 - protein, 10 aa, Severe acute respiratory syndrome coronavirus 2
KNTVKSVGKF

SEQ ID NO: 3964 - protein, 10 aa, Severe acute respiratory syndrome coronavirus 2
KSVGKFCLEA

SEQ ID NO: 3965 - protein, 10 aa, Severe acute respiratory syndrome coronavirus 2
VGKFCLEASF

SEQ ID NO: 3966 - protein, 10 aa, Severe acute respiratory syndrome coronavirus 2
KFCLEASFNY

SEQ ID NO: 3967 - protein, 10 aa, Severe acute respiratory syndrome coronavirus 2
FCLEASFNYL

SEQ ID NO: 3968 - protein, 10 aa, Severe acute respiratory syndrome coronavirus 2
CLEASFNYLK

SEQ ID NO: 3969 - protein, 10 aa, Severe acute respiratory syndrome coronavirus 2
SFNYLKSPNF

SEQ ID NO: 3970 - protein, 10 aa, Severe acute respiratory syndrome coronavirus 2
NYLKSPNFSK

SEQ ID NO: 3971 - protein, 10 aa, Severe acute respiratory syndrome coronavirus 2
YLKSPNFSKL

SEQ ID NO: 3972 - protein, 10 aa, Severe acute respiratory syndrome coronavirus 2
SPNFSKLINI

SEQ ID NO: 3973 - protein, 10 aa, Severe acute respiratory syndrome coronavirus 2
FSKLINIIIW

SEQ ID NO: 3974 - protein, 10 aa, Severe acute respiratory syndrome coronavirus 2
SKLINIIIWF

SEQ ID NO: 3975 - protein, 10 aa, Severe acute respiratory syndrome coronavirus 2
KLINIIIWFL

SEQ ID NO: 3976 - protein, 10 aa, Severe acute respiratory syndrome coronavirus 2
LINIIIWFLL

SEQ ID NO: 3977 - protein, 10 aa, Severe acute respiratory syndrome coronavirus 2
IIIWFLLLSV

SEQ ID NO: 3978 - protein, 10 aa, Severe acute respiratory syndrome coronavirus 2
FLLLSVCLGS

SEQ ID NO: 3979 - protein, 10 aa, Severe acute respiratory syndrome coronavirus 2
LLLSVCLGSL

SEQ ID NO: 3980 - protein, 10 aa, Severe acute respiratory syndrome coronavirus 2
LLSVCLGSLI

SEQ ID NO: 3981 - protein, 10 aa, Severe acute respiratory syndrome coronavirus 2
LSVCLGSLIY

SEQ ID NO: 3982 - protein, 10 aa, Severe acute respiratory syndrome coronavirus 2
CLGSLIYSTA

SEQ ID NO: 3983 - protein, 10 aa, Severe acute respiratory syndrome coronavirus 2
GSLIYSTAAL

SEQ ID NO: 3984 - protein, 10 aa, Severe acute respiratory syndrome coronavirus 2
SLIYSTAALG

SEQ ID NO: 3985 - protein, 10 aa, Severe acute respiratory syndrome coronavirus 2
LIYSTAALGV

SEQ ID NO: 3986 - protein, 10 aa, Severe acute respiratory syndrome coronavirus 2
IYSTAALGVL

SEQ ID NO: 3987 - protein, 10 aa, Severe acute respiratory syndrome coronavirus 2
YSTAALGVLM

SEQ ID NO: 3988 - protein, 10 aa, Severe acute respiratory syndrome coronavirus 2
AALGVLMSNL

SEQ ID NO: 3989 - protein, 10 aa, Severe acute respiratory syndrome coronavirus 2
VLMSNLGMPS

SEQ ID NO: 3990 - protein, 10 aa, Severe acute respiratory syndrome coronavirus 2
LMSNLGMPSY

SEQ ID NO: 3991 - protein, 10 aa, Severe acute respiratory syndrome coronavirus 2
LGMPSYCTGY

SEQ ID NO: 3992 - protein, 10 aa, Severe acute respiratory syndrome coronavirus 2
GMPSYCTGYR

SEQ ID NO: 3993 - protein, 10 aa, Severe acute respiratory syndrome coronavirus 2
SYCTGYREGY

SEQ ID NO: 3994 - protein, 10 aa, Severe acute respiratory syndrome coronavirus 2
REGYLNSTNV

SEQ ID NO: 3995 - protein, 10 aa, Severe acute respiratory syndrome coronavirus 2
GYLNSTNVTI

SEQ ID NO: 3996 - protein, 10 aa, Severe acute respiratory syndrome coronavirus 2
YLNSTNVTIA

SEQ ID NO: 3997 - protein, 10 aa, Severe acute respiratory syndrome coronavirus 2
NSTNVTIATY

SEQ ID NO: 3998 - protein, 10 aa, Severe acute respiratory syndrome coronavirus 2
TIATYCTGSI

SEQ ID NO: 3999 - protein, 10 aa, Severe acute respiratory syndrome coronavirus 2
YCTGSIPCSV

SEQ ID NO: 4000 - protein, 10 aa, Severe acute respiratory syndrome coronavirus 2
IPCSVCLSGL

SEQ ID NO: 4001 - protein, 10 aa, Severe acute respiratory syndrome coronavirus 2
SVCLSGLDSL

SEQ ID NO: 4002 - protein, 10 aa, Severe acute respiratory syndrome coronavirus 2
LSGLDSLDTY

SEQ ID NO: 4003 - protein, 10 aa, Severe acute respiratory syndrome coronavirus 2
LDSLDTYPSL

SEQ ID NO: 4004 - protein, 10 aa, Severe acute respiratory syndrome coronavirus 2
LDTYPSLETI

SEQ ID NO: 4005 - protein, 10 aa, Severe acute respiratory syndrome coronavirus 2
TYPSLETIQI

SEQ ID NO: 4006 - protein, 10 aa, Severe acute respiratory syndrome coronavirus 2
YPSLETIQIT

SEQ ID NO: 4007 - protein, 10 aa, Severe acute respiratory syndrome coronavirus 2
ETIQITISSF

SEQ ID NO: 4008 - protein, 10 aa, Severe acute respiratory syndrome coronavirus 2
TIQITISSFK

SEQ ID NO: 4009 - protein, 10 aa, Severe acute respiratory syndrome coronavirus 2
IQITISSFKW

SEQ ID NO: 4010 - protein, 10 aa, Severe acute respiratory syndrome coronavirus 2
SSFKWDLTAF

SEQ ID NO: 4011 - protein, 10 aa, Severe acute respiratory syndrome coronavirus 2
FKWDLTAFGL

SEQ ID NO: 4012 - protein, 10 aa, Severe acute respiratory syndrome coronavirus 2
KWDLTAFGLV

SEQ ID NO: 4013 - protein, 10 aa, Severe acute respiratory syndrome coronavirus 2
LTAFGLVAEW

SEQ ID NO: 4014 - protein, 10 aa, Severe acute respiratory syndrome coronavirus 2
TAFGLVAEWF

SEQ ID NO: 4015 - protein, 10 aa, Severe acute respiratory syndrome coronavirus 2
FGLVAEWFLA

SEQ ID NO: 4016 - protein, 10 aa, Severe acute respiratory syndrome coronavirus 2
GLVAEWFLAY

SEQ ID NO: 4017 - protein, 10 aa, Severe acute respiratory syndrome coronavirus 2
LVAEWFLAYI

SEQ ID NO: 4018 - protein, 10 aa, Severe acute respiratory syndrome coronavirus 2
VAEWFLAYIL

SEQ ID NO: 4019 - protein, 10 aa, Severe acute respiratory syndrome coronavirus 2
AEWFLAYILF

SEQ ID NO: 4020 - protein, 10 aa, Severe acute respiratory syndrome coronavirus 2
WFLAYILFTR

SEQ ID NO: 4021 - protein, 10 aa, Severe acute respiratory syndrome coronavirus 2
FLAYILFTRF

SEQ ID NO: 4022 - protein, 10 aa, Severe acute respiratory syndrome coronavirus 2
LAYILFTRFF

SEQ ID NO: 4023 - protein, 10 aa, Severe acute respiratory syndrome coronavirus 2
AYILFTRFFY

SEQ ID NO: 4024 - protein, 10 aa, Severe acute respiratory syndrome coronavirus 2
YILFTRFFYV

SEQ ID NO: 4025 - protein, 10 aa, Severe acute respiratory syndrome coronavirus 2
ILFTRFFYVL

SEQ ID NO: 4026 - protein, 10 aa, Severe acute respiratory syndrome coronavirus 2
FTRFFYVLGL

SEQ ID NO: 4027 - protein, 10 aa, Severe acute respiratory syndrome coronavirus 2
TRFFYVLGLA

SEQ ID NO: 4028 - protein, 10 aa, Severe acute respiratory syndrome coronavirus 2
RFFYVLGLAA

SEQ ID NO: 4029 - protein, 10 aa, Severe acute respiratory syndrome coronavirus 2
FFYVLGLAAI

SEQ ID NO: 4030 - protein, 10 aa, Severe acute respiratory syndrome coronavirus 2
FYVLGLAAIM

SEQ ID NO: 4031 - protein, 10 aa, Severe acute respiratory syndrome coronavirus 2
VLGLAAIMQL

SEQ ID NO: 4032 - protein, 10 aa, Severe acute respiratory syndrome coronavirus 2
LGLAAIMQLF

SEQ ID NO: 4033 - protein, 10 aa, Severe acute respiratory syndrome coronavirus 2
GLAAIMQLFF

SEQ ID NO: 4034 - protein, 10 aa, Severe acute respiratory syndrome coronavirus 2
AAIMQLFFSY

SEQ ID NO: 4035 - protein, 10 aa, Severe acute respiratory syndrome coronavirus 2
AIMQLFFSYF

SEQ ID NO: 4036 - protein, 10 aa, Severe acute respiratory syndrome coronavirus 2
IMQLFFSYFA

SEQ ID NO: 4037 - protein, 10 aa, Severe acute respiratory syndrome coronavirus 2
MQLFFSYFAV

SEQ ID NO: 4038 - protein, 10 aa, Severe acute respiratory syndrome coronavirus 2
QLFFSYFAVH

SEQ ID NO: 4039 - protein, 10 aa, Severe acute respiratory syndrome coronavirus 2
LFFSYFAVHF

SEQ ID NO: 4040 - protein, 10 aa, Severe acute respiratory syndrome coronavirus 2
FFSYFAVHFI

SEQ ID NO: 4041 - protein, 10 aa, Severe acute respiratory syndrome coronavirus 2
FSYFAVHFIS

SEQ ID NO: 4042 - protein, 10 aa, Severe acute respiratory syndrome coronavirus 2
FAVHFISNSW

SEQ ID NO: 4043 - protein, 10 aa, Severe acute respiratory syndrome coronavirus 2
VHFISNSWLM

SEQ ID NO: 4044 - protein, 10 aa, Severe acute respiratory syndrome coronavirus 2
HFISNSWLMW

SEQ ID NO: 4045 - protein, 10 aa, Severe acute respiratory syndrome coronavirus 2
FISNSWLMWL

SEQ ID NO: 4046 - protein, 10 aa, Severe acute respiratory syndrome coronavirus 2
ISNSWLMWLI

SEQ ID NO: 4047 - protein, 10 aa, Severe acute respiratory syndrome coronavirus 2
SWLMWLIINL

SEQ ID NO: 4048 - protein, 10 aa, Severe acute respiratory syndrome coronavirus 2
WLMWLIINLV

SEQ ID NO: 4049 - protein, 10 aa, Severe acute respiratory syndrome coronavirus 2
LMWLIINLVQ

SEQ ID NO: 4050 - protein, 10 aa, Severe acute respiratory syndrome coronavirus 2
MWLIINLVQM

SEQ ID NO: 4051 - protein, 10 aa, Severe acute respiratory syndrome coronavirus 2
WLIINLVQMA

SEQ ID NO: 4052 - protein, 10 aa, Severe acute respiratory syndrome coronavirus 2
IINLVQMAPI

SEQ ID NO: 4053 - protein, 10 aa, Severe acute respiratory syndrome coronavirus 2
NLVQMAPISA

SEQ ID NO: 4054 - protein, 10 aa, Severe acute respiratory syndrome coronavirus 2
LVQMAPISAM

SEQ ID NO: 4055 - protein, 10 aa, Severe acute respiratory syndrome coronavirus 2
VQMAPISAMV

SEQ ID NO: 4056 - protein, 10 aa, Severe acute respiratory syndrome coronavirus 2
QMAPISAMVR

SEQ ID NO: 4057 - protein, 10 aa, Severe acute respiratory syndrome coronavirus 2
MAPISAMVRM

SEQ ID NO: 4058 - protein, 10 aa, Severe acute respiratory syndrome coronavirus 2
APISAMVRMY

SEQ ID NO: 4059 - protein, 10 aa, Severe acute respiratory syndrome coronavirus 2
ISAMVRMYIF

SEQ ID NO: 4060 - protein, 10 aa, Severe acute respiratory syndrome coronavirus 2
SAMVRMYIFF

SEQ ID NO: 4061 - protein, 10 aa, Severe acute respiratory syndrome coronavirus 2
AMVRMYIFFA

SEQ ID NO: 4062 - protein, 10 aa, Severe acute respiratory syndrome coronavirus 2
MVRMYIFFAS

SEQ ID NO: 4063 - protein, 10 aa, Severe acute respiratory syndrome coronavirus 2
VRMYIFFASF

SEQ ID NO: 4064 - protein, 10 aa, Severe acute respiratory syndrome coronavirus 2
RMYIFFASFY

SEQ ID NO: 4065 - protein, 10 aa, Severe acute respiratory syndrome coronavirus 2
MYIFFASFYY

SEQ ID NO: 4066 - protein, 10 aa, Severe acute respiratory syndrome coronavirus 2
YIFFASFYYV

SEQ ID NO: 4067 - protein, 10 aa, Severe acute respiratory syndrome coronavirus 2
IFFASFYYVW

SEQ ID NO: 4068 - protein, 10 aa, Severe acute respiratory syndrome coronavirus 2
FFASFYYVWK

SEQ ID NO: 4069 - protein, 10 aa, Severe acute respiratory syndrome coronavirus 2
ASFYYVWKSY

SEQ ID NO: 4070 - protein, 10 aa, Severe acute respiratory syndrome coronavirus 2
SFYYVWKSYV

SEQ ID NO: 4071 - protein, 10 aa, Severe acute respiratory syndrome coronavirus 2
FYYVWKSYVH

SEQ ID NO: 4072 - protein, 10 aa, Severe acute respiratory syndrome coronavirus 2
YYVWKSYVHV

SEQ ID NO: 4073 - protein, 10 aa, Severe acute respiratory syndrome coronavirus 2
YVWKSYVHVV

SEQ ID NO: 4074 - protein, 10 aa, Severe acute respiratory syndrome coronavirus 2
CNSSTCMMCY

SEQ ID NO: 4075 - protein, 10 aa, Severe acute respiratory syndrome coronavirus 2
NSSTCMMCYK

SEQ ID NO: 4076 - protein, 10 aa, Severe acute respiratory syndrome coronavirus 2
SSTCMMCYKR

SEQ ID NO: 4077 - protein, 10 aa, Severe acute respiratory syndrome coronavirus 2
STCMMCYKRN

SEQ ID NO: 4078 - protein, 10 aa, Severe acute respiratory syndrome coronavirus 2
TCMMCYKRNR

SEQ ID NO: 4079 - protein, 10 aa, Severe acute respiratory syndrome coronavirus 2
MMCYKRNRAT

SEQ ID NO: 4080 - protein, 10 aa, Severe acute respiratory syndrome coronavirus 2
MCYKRNRATR

SEQ ID NO: 4081 - protein, 10 aa, Severe acute respiratory syndrome coronavirus 2
RATRVECTTI

SEQ ID NO: 4082 - protein, 10 aa, Severe acute respiratory syndrome coronavirus 2
ATRVECTTIV

SEQ ID NO: 4083 - protein, 10 aa, Severe acute respiratory syndrome coronavirus 2
ECTTIVNGVR

SEQ ID NO: 4084 - protein, 10 aa, Severe acute respiratory syndrome coronavirus 2
CTTIVNGVRR

SEQ ID NO: 4085 - protein, 10 aa, Severe acute respiratory syndrome coronavirus 2
TTIVNGVRRS

SEQ ID NO: 4086 - protein, 10 aa, Severe acute respiratory syndrome coronavirus 2
TIVNGVRRSF

SEQ ID NO: 4087 - protein, 10 aa, Severe acute respiratory syndrome coronavirus 2
IVNGVRRSFY

SEQ ID NO: 4088 - protein, 10 aa, Severe acute respiratory syndrome coronavirus 2
NGVRRSFYVY

SEQ ID NO: 4089 - protein, 10 aa, Severe acute respiratory syndrome coronavirus 2
GVRRSFYVYA

SEQ ID NO: 4090 - protein, 10 aa, Severe acute respiratory syndrome coronavirus 2
RRSFYVYANG

SEQ ID NO: 4091 - protein, 10 aa, Severe acute respiratory syndrome coronavirus 2
RSFYVYANGG

SEQ ID NO: 4092 - protein, 10 aa, Severe acute respiratory syndrome coronavirus 2
SFYVYANGGK

SEQ ID NO: 4093 - protein, 10 aa, Severe acute respiratory syndrome coronavirus 2
YVYANGGKGF

SEQ ID NO: 4094 - protein, 10 aa, Severe acute respiratory syndrome coronavirus 2
YANGGKGFCK

SEQ ID NO: 4095 - protein, 10 aa, Severe acute respiratory syndrome coronavirus 2
NWNCVNCDTF

SEQ ID NO: 4096 - protein, 10 aa, Severe acute respiratory syndrome coronavirus 2
CDTFCAGSTF

SEQ ID NO: 4097 - protein, 10 aa, Severe acute respiratory syndrome coronavirus 2
DTFCAGSTFI

SEQ ID NO: 4098 - protein, 10 aa, Severe acute respiratory syndrome coronavirus 2
STFISDEVAR

SEQ ID NO: 4099 - protein, 10 aa, Severe acute respiratory syndrome coronavirus 2
FISDEVARDL

SEQ ID NO: 4100 - protein, 10 aa, Severe acute respiratory syndrome coronavirus 2
SDEVARDLSL

SEQ ID NO: 4101 - protein, 10 aa, Severe acute respiratory syndrome coronavirus 2
EVARDLSLQF

SEQ ID NO: 4102 - protein, 10 aa, Severe acute respiratory syndrome coronavirus 2
VARDLSLQFK

SEQ ID NO: 4103 - protein, 10 aa, Severe acute respiratory syndrome coronavirus 2
ARDLSLQFKR

SEQ ID NO: 4104 - protein, 10 aa, Severe acute respiratory syndrome coronavirus 2
RPINPTDQSS

SEQ ID NO: 4105 - protein, 10 aa, Severe acute respiratory syndrome coronavirus 2
NPTDQSSYIV

SEQ ID NO: 4106 - protein, 10 aa, Severe acute respiratory syndrome coronavirus 2
DQSSYIVDSV

SEQ ID NO: 4107 - protein, 10 aa, Severe acute respiratory syndrome coronavirus 2
SSYIVDSVTV

SEQ ID NO: 4108 - protein, 10 aa, Severe acute respiratory syndrome coronavirus 2
SYIVDSVTVK

SEQ ID NO: 4109 - protein, 10 aa, Severe acute respiratory syndrome coronavirus 2
VTVKNGSIHL

SEQ ID NO: 4110 - protein, 10 aa, Severe acute respiratory syndrome coronavirus 2
TVKNGSIHLY

SEQ ID NO: 4111 - protein, 10 aa, Severe acute respiratory syndrome coronavirus 2
VKNGSIHLYF

SEQ ID NO: 4112 - protein, 10 aa, Severe acute respiratory syndrome coronavirus 2
NGSIHLYFDK

SEQ ID NO: 4113 - protein, 10 aa, Severe acute respiratory syndrome coronavirus 2
HLYFDKAGQK

SEQ ID NO: 4114 - protein, 10 aa, Severe acute respiratory syndrome coronavirus 2
YFDKAGQKTY

SEQ ID NO: 4115 - protein, 10 aa, Severe acute respiratory syndrome coronavirus 2
KTYERHSLSH

SEQ ID NO: 4116 - protein, 10 aa, Severe acute respiratory syndrome coronavirus 2
TYERHSLSHF

SEQ ID NO: 4117 - protein, 10 aa, Severe acute respiratory syndrome coronavirus 2
YERHSLSHFV

SEQ ID NO: 4118 - protein, 10 aa, Severe acute respiratory syndrome coronavirus 2
RHSLSHFVNL

SEQ ID NO: 4119 - protein, 10 aa, Severe acute respiratory syndrome coronavirus 2
LSHFVNLDNL

SEQ ID NO: 4120 - protein, 10 aa, Severe acute respiratory syndrome coronavirus 2
SHFVNLDNLR

SEQ ID NO: 4121 - protein, 10 aa, Severe acute respiratory syndrome coronavirus 2
NTKGSLPINV

SEQ ID NO: 4122 - protein, 10 aa, Severe acute respiratory syndrome coronavirus 2
KGSLPINVIV

SEQ ID NO: 4123 - protein, 10 aa, Severe acute respiratory syndrome coronavirus 2
GSLPINVIVF

SEQ ID NO: 4124 - protein, 10 aa, Severe acute respiratory syndrome coronavirus 2
NVIVFDGKSK

SEQ ID NO: 4125 - protein, 10 aa, Severe acute respiratory syndrome coronavirus 2
KSKCEESSAK

SEQ ID NO: 4126 - protein, 10 aa, Severe acute respiratory syndrome coronavirus 2
KCEESSAKSA

SEQ ID NO: 4127 - protein, 10 aa, Severe acute respiratory syndrome coronavirus 2
EESSAKSASV

SEQ ID NO: 4128 - protein, 10 aa, Severe acute respiratory syndrome coronavirus 2
ESSAKSASVY

SEQ ID NO: 4129 - protein, 10 aa, Severe acute respiratory syndrome coronavirus 2
SSAKSASVYY

SEQ ID NO: 4130 - protein, 10 aa, Severe acute respiratory syndrome coronavirus 2
SAKSASVYYS

SEQ ID NO: 4131 - protein, 10 aa, Severe acute respiratory syndrome coronavirus 2
KSASVYYSQL

SEQ ID NO: 4132 - protein, 10 aa, Severe acute respiratory syndrome coronavirus 2
SASVYYSQLM

SEQ ID NO: 4133 - protein, 10 aa, Severe acute respiratory syndrome coronavirus 2
YYSQLMCQPI

SEQ ID NO: 4134 - protein, 10 aa, Severe acute respiratory syndrome coronavirus 2
YSQLMCQPIL

SEQ ID NO: 4135 - protein, 10 aa, Severe acute respiratory syndrome coronavirus 2
SQLMCQPILL

SEQ ID NO: 4136 - protein, 10 aa, Severe acute respiratory syndrome coronavirus 2
QLMCQPILLL

SEQ ID NO: 4137 - protein, 10 aa, Severe acute respiratory syndrome coronavirus 2
CQPILLLDQA

SEQ ID NO: 4138 - protein, 10 aa, Severe acute respiratory syndrome coronavirus 2
QPILLLDQAL

SEQ ID NO: 4139 - protein, 10 aa, Severe acute respiratory syndrome coronavirus 2
PILLLDQALV

SEQ ID NO: 4140 - protein, 10 aa, Severe acute respiratory syndrome coronavirus 2
ILLLDQALVS

SEQ ID NO: 4141 - protein, 10 aa, Severe acute respiratory syndrome coronavirus 2
LLDQALVSDV

SEQ ID NO: 4142 - protein, 10 aa, Severe acute respiratory syndrome coronavirus 2
ALVSDVGDSA

SEQ ID NO: 4143 - protein, 10 aa, Severe acute respiratory syndrome coronavirus 2
VSDVGDSAEV

SEQ ID NO: 4144 - protein, 10 aa, Severe acute respiratory syndrome coronavirus 2
AEVAVKMFDA

SEQ ID NO: 4145 - protein, 10 aa, Severe acute respiratory syndrome coronavirus 2
EVAVKMFDAY

SEQ ID NO: 4146 - protein, 10 aa, Severe acute respiratory syndrome coronavirus 2
VAVKMFDAYV

SEQ ID NO: 4147 - protein, 10 aa, Severe acute respiratory syndrome coronavirus 2
VKMFDAYVNT

SEQ ID NO: 4148 - protein, 10 aa, Severe acute respiratory syndrome coronavirus 2
KMFDAYVNTF

SEQ ID NO: 4149 - protein, 10 aa, Severe acute respiratory syndrome coronavirus 2
AYVNTFSSTF

SEQ ID NO: 4150 - protein, 10 aa, Severe acute respiratory syndrome coronavirus 2
YVNTFSSTFN

SEQ ID NO: 4151 - protein, 10 aa, Severe acute respiratory syndrome coronavirus 2
VNTFSSTFNV

SEQ ID NO: 4152 - protein, 10 aa, Severe acute respiratory syndrome coronavirus 2
NTFSSTFNVP

SEQ ID NO: 4153 - protein, 10 aa, Severe acute respiratory syndrome coronavirus 2
TFSSTFNVPM

SEQ ID NO: 4154 - protein, 10 aa, Severe acute respiratory syndrome coronavirus 2
SSTFNVPMEK

SEQ ID NO: 4155 - protein, 10 aa, Severe acute respiratory syndrome coronavirus 2
STFNVPMEKL

SEQ ID NO: 4156 - protein, 10 aa, Severe acute respiratory syndrome coronavirus 2
TFNVPMEKLK

SEQ ID NO: 4157 - protein, 10 aa, Severe acute respiratory syndrome coronavirus 2
NVPMEKLKTL

SEQ ID NO: 4158 - protein, 10 aa, Severe acute respiratory syndrome coronavirus 2
VPMEKLKTLV

SEQ ID NO: 4159 - protein, 10 aa, Severe acute respiratory syndrome coronavirus 2
MEKLKTLVAT

SEQ ID NO: 4160 - protein, 10 aa, Severe acute respiratory syndrome coronavirus 2
EKLKTLVATA

SEQ ID NO: 4161 - protein, 10 aa, Severe acute respiratory syndrome coronavirus 2
TLVATAEAEL

SEQ ID NO: 4162 - protein, 10 aa, Severe acute respiratory syndrome coronavirus 2
VATAEAELAK

SEQ ID NO: 4163 - protein, 10 aa, Severe acute respiratory syndrome coronavirus 2
AEAELAKNVS

SEQ ID NO: 4164 - protein, 10 aa, Severe acute respiratory syndrome coronavirus 2
EAELAKNVSL

SEQ ID NO: 4165 - protein, 10 aa, Severe acute respiratory syndrome coronavirus 2
AELAKNVSLD

SEQ ID NO: 4166 - protein, 10 aa, Severe acute respiratory syndrome coronavirus 2
VSLDNVLSTF

SEQ ID NO: 4167 - protein, 10 aa, Severe acute respiratory syndrome coronavirus 2
SLDNVLSTFI

SEQ ID NO: 4168 - protein, 10 aa, Severe acute respiratory syndrome coronavirus 2
NVLSTFISAA

SEQ ID NO: 4169 - protein, 10 aa, Severe acute respiratory syndrome coronavirus 2
VLSTFISAAR

SEQ ID NO: 4170 - protein, 10 aa, Severe acute respiratory syndrome coronavirus 2
LSTFISAARQ

SEQ ID NO: 4171 - protein, 10 aa, Severe acute respiratory syndrome coronavirus 2
TFISAARQGF

SEQ ID NO: 4172 - protein, 10 aa, Severe acute respiratory syndrome coronavirus 2
FISAARQGFV

SEQ ID NO: 4173 - protein, 10 aa, Severe acute respiratory syndrome coronavirus 2
ARQGFVDSDV

SEQ ID NO: 4174 - protein, 10 aa, Severe acute respiratory syndrome coronavirus 2
VETKDVVECL

SEQ ID NO: 4175 - protein, 10 aa, Severe acute respiratory syndrome coronavirus 2
ETKDVVECLK

SEQ ID NO: 4176 - protein, 10 aa, Severe acute respiratory syndrome coronavirus 2
KLSHQSDIEV

SEQ ID NO: 4177 - protein, 10 aa, Severe acute respiratory syndrome coronavirus 2
EVTGDSCNNY

SEQ ID NO: 4178 - protein, 10 aa, Severe acute respiratory syndrome coronavirus 2
VTGDSCNNYM

SEQ ID NO: 4179 - protein, 10 aa, Severe acute respiratory syndrome coronavirus 2
DSCNNYMLTY

SEQ ID NO: 4180 - protein, 10 aa, Severe acute respiratory syndrome coronavirus 2
CNNYMLTYNK

SEQ ID NO: 4181 - protein, 10 aa, Severe acute respiratory syndrome coronavirus 2
MLTYNKVENM

SEQ ID NO: 4182 - protein, 10 aa, Severe acute respiratory syndrome coronavirus 2
YNKVENMTPR

SEQ ID NO: 4183 - protein, 10 aa, Severe acute respiratory syndrome coronavirus 2
MTPRDLGACI

SEQ ID NO: 4184 - protein, 10 aa, Severe acute respiratory syndrome coronavirus 2
LGACIDCSAR

SEQ ID NO: 4185 - protein, 10 aa, Severe acute respiratory syndrome coronavirus 2
CSARHINAQV

SEQ ID NO: 4186 - protein, 10 aa, Severe acute respiratory syndrome coronavirus 2
SARHINAQVA

SEQ ID NO: 4187 - protein, 10 aa, Severe acute respiratory syndrome coronavirus 2
ARHINAQVAK

SEQ ID NO: 4188 - protein, 10 aa, Severe acute respiratory syndrome coronavirus 2
QVAKSHSIAL

SEQ ID NO: 4189 - protein, 10 aa, Severe acute respiratory syndrome coronavirus 2
AKSHSIALIW

SEQ ID NO: 4190 - protein, 10 aa, Severe acute respiratory syndrome coronavirus 2
KSHSIALIWN

SEQ ID NO: 4191 - protein, 10 aa, Severe acute respiratory syndrome coronavirus 2
SHSIALIWNV

SEQ ID NO: 4192 - protein, 10 aa, Severe acute respiratory syndrome coronavirus 2
HSIALIWNVK

SEQ ID NO: 4193 - protein, 10 aa, Severe acute respiratory syndrome coronavirus 2
ALIWNVKDFM

SEQ ID NO: 4194 - protein, 10 aa, Severe acute respiratory syndrome coronavirus 2
IWNVKDFMSL

SEQ ID NO: 4195 - protein, 10 aa, Severe acute respiratory syndrome coronavirus 2
KDFMSLSEQL

SEQ ID NO: 4196 - protein, 10 aa, Severe acute respiratory syndrome coronavirus 2
DFMSLSEQLR

SEQ ID NO: 4197 - protein, 10 aa, Severe acute respiratory syndrome coronavirus 2
FMSLSEQLRK

SEQ ID NO: 4198 - protein, 10 aa, Severe acute respiratory syndrome coronavirus 2
SLSEQLRKQI

SEQ ID NO: 4199 - protein, 10 aa, Severe acute respiratory syndrome coronavirus 2
LRKQIRSAAK

SEQ ID NO: 4200 - protein, 10 aa, Severe acute respiratory syndrome coronavirus 2
RKQIRSAAKK

SEQ ID NO: 4201 - protein, 10 aa, Severe acute respiratory syndrome coronavirus 2
SAAKKNNLPF

SEQ ID NO: 4202 - protein, 10 aa, Severe acute respiratory syndrome coronavirus 2
AAKKNNLPFK

SEQ ID NO: 4203 - protein, 10 aa, Severe acute respiratory syndrome coronavirus 2
LPFKLTCATT

SEQ ID NO: 4204 - protein, 10 aa, Severe acute respiratory syndrome coronavirus 2
KLTCATTRQV

SEQ ID NO: 4205 - protein, 10 aa, Severe acute respiratory syndrome coronavirus 2
ATTRQVVNVV

SEQ ID NO: 4206 - protein, 10 aa, Severe acute respiratory syndrome coronavirus 2
RQVVNVVTTK

SEQ ID NO: 4207 - protein, 10 aa, Severe acute respiratory syndrome coronavirus 2
QVVNVVTTKI

SEQ ID NO: 4208 - protein, 10 aa, Severe acute respiratory syndrome coronavirus 2
NVVTTKIALK

SEQ ID NO: 4209 - protein, 10 aa, Severe acute respiratory syndrome coronavirus 2
TTKIALKGGK

SEQ ID NO: 4210 - protein, 10 aa, Severe acute respiratory syndrome coronavirus 2
WLKQLIKVTL

SEQ ID NO: 4211 - protein, 10 aa, Severe acute respiratory syndrome coronavirus 2
KQLIKVTLVF

SEQ ID NO: 4212 - protein, 10 aa, Severe acute respiratory syndrome coronavirus 2
QLIKVTLVFL

SEQ ID NO: 4213 - protein, 10 aa, Severe acute respiratory syndrome coronavirus 2
LIKVTLVFLF

SEQ ID NO: 4214 - protein, 10 aa, Severe acute respiratory syndrome coronavirus 2
KVTLVFLFVA

SEQ ID NO: 4215 - protein, 10 aa, Severe acute respiratory syndrome coronavirus 2
TLVFLFVAAI

SEQ ID NO: 4216 - protein, 10 aa, Severe acute respiratory syndrome coronavirus 2
LVFLFVAAIF

SEQ ID NO: 4217 - protein, 10 aa, Severe acute respiratory syndrome coronavirus 2
VFLFVAAIFY

SEQ ID NO: 4218 - protein, 10 aa, Severe acute respiratory syndrome coronavirus 2
FLFVAAIFYL

SEQ ID NO: 4219 - protein, 10 aa, Severe acute respiratory syndrome coronavirus 2
LFVAAIFYLI

SEQ ID NO: 4220 - protein, 10 aa, Severe acute respiratory syndrome coronavirus 2
FVAAIFYLIT

SEQ ID NO: 4221 - protein, 10 aa, Severe acute respiratory syndrome coronavirus 2
AAIFYLITPV

SEQ ID NO: 4222 - protein, 10 aa, Severe acute respiratory syndrome coronavirus 2
AIFYLITPVH

SEQ ID NO: 4223 - protein, 10 aa, Severe acute respiratory syndrome coronavirus 2
IFYLITPVHV

SEQ ID NO: 4224 - protein, 10 aa, Severe acute respiratory syndrome coronavirus 2
FYLITPVHVM

SEQ ID NO: 4225 - protein, 10 aa, Severe acute respiratory syndrome coronavirus 2
YLITPVHVMS

SEQ ID NO: 4226 - protein, 10 aa, Severe acute respiratory syndrome coronavirus 2
LITPVHVMSK

SEQ ID NO: 4227 - protein, 10 aa, Severe acute respiratory syndrome coronavirus 2
VHVMSKHTDF

SEQ ID NO: 4228 - protein, 10 aa, Severe acute respiratory syndrome coronavirus 2
TDFSSEIIGY

SEQ ID NO: 4229 - protein, 10 aa, Severe acute respiratory syndrome coronavirus 2
DFSSEIIGYK

SEQ ID NO: 4230 - protein, 10 aa, Severe acute respiratory syndrome coronavirus 2
FSSEIIGYKA

SEQ ID NO: 4231 - protein, 10 aa, Severe acute respiratory syndrome coronavirus 2
SSEIIGYKAI

SEQ ID NO: 4232 - protein, 10 aa, Severe acute respiratory syndrome coronavirus 2
YKAIDGGVTR

SEQ ID NO: 4233 - protein, 10 aa, Severe acute respiratory syndrome coronavirus 2
RDIASTDTCF

SEQ ID NO: 4234 - protein, 10 aa, Severe acute respiratory syndrome coronavirus 2
DIASTDTCFA

SEQ ID NO: 4235 - protein, 10 aa, Severe acute respiratory syndrome coronavirus 2
ASTDTCFANK

SEQ ID NO: 4236 - protein, 10 aa, Severe acute respiratory syndrome coronavirus 2
NKHADFDTWF

SEQ ID NO: 4237 - protein, 10 aa, Severe acute respiratory syndrome coronavirus 2
ADFDTWFSQR

SEQ ID NO: 4238 - protein, 10 aa, Severe acute respiratory syndrome coronavirus 2
TWFSQRGGSY

SEQ ID NO: 4239 - protein, 10 aa, Severe acute respiratory syndrome coronavirus 2
SYTNDKACPL

SEQ ID NO: 4240 - protein, 10 aa, Severe acute respiratory syndrome coronavirus 2
YTNDKACPLI

SEQ ID NO: 4241 - protein, 10 aa, Severe acute respiratory syndrome coronavirus 2
KACPLIAAVI

SEQ ID NO: 4242 - protein, 10 aa, Severe acute respiratory syndrome coronavirus 2
CPLIAAVITR

SEQ ID NO: 4243 - protein, 10 aa, Severe acute respiratory syndrome coronavirus 2
LIAAVITREV

SEQ ID NO: 4244 - protein, 10 aa, Severe acute respiratory syndrome coronavirus 2
AVITREVGFV

SEQ ID NO: 4245 - protein, 10 aa, Severe acute respiratory syndrome coronavirus 2
VITREVGFVV

SEQ ID NO: 4246 - protein, 10 aa, Severe acute respiratory syndrome coronavirus 2
REVGFVVPGL

SEQ ID NO: 4247 - protein, 10 aa, Severe acute respiratory syndrome coronavirus 2
FVVPGLPGTI

SEQ ID NO: 4248 - protein, 10 aa, Severe acute respiratory syndrome coronavirus 2
VVPGLPGTIL

SEQ ID NO: 4249 - protein, 10 aa, Severe acute respiratory syndrome coronavirus 2
VPGLPGTILR

SEQ ID NO: 4250 - protein, 10 aa, Severe acute respiratory syndrome coronavirus 2
GLPGTILRTT

SEQ ID NO: 4251 - protein, 10 aa, Severe acute respiratory syndrome coronavirus 2
ILRTTNGDFL

SEQ ID NO: 4252 - protein, 10 aa, Severe acute respiratory syndrome coronavirus 2
RTTNGDFLHF

SEQ ID NO: 4253 - protein, 10 aa, Severe acute respiratory syndrome coronavirus 2
TTNGDFLHFL

SEQ ID NO: 4254 - protein, 10 aa, Severe acute respiratory syndrome coronavirus 2
NGDFLHFLPR

SEQ ID NO: 4255 - protein, 10 aa, Severe acute respiratory syndrome coronavirus 2
GDFLHFLPRV

SEQ ID NO: 4256 - protein, 10 aa, Severe acute respiratory syndrome coronavirus 2
FLHFLPRVFS

SEQ ID NO: 4257 - protein, 10 aa, Severe acute respiratory syndrome coronavirus 2
LHFLPRVFSA

SEQ ID NO: 4258 - protein, 10 aa, Severe acute respiratory syndrome coronavirus 2
HFLPRVFSAV

SEQ ID NO: 4259 - protein, 10 aa, Severe acute respiratory syndrome coronavirus 2
FLPRVFSAVG

SEQ ID NO: 4260 - protein, 10 aa, Severe acute respiratory syndrome coronavirus 2
VFSAVGNICY

SEQ ID NO: 4261 - protein, 10 aa, Severe acute respiratory syndrome coronavirus 2
FSAVGNICYT

SEQ ID NO: 4262 - protein, 10 aa, Severe acute respiratory syndrome coronavirus 2
VGNICYTPSK

SEQ ID NO: 4263 - protein, 10 aa, Severe acute respiratory syndrome coronavirus 2
CYTPSKLIEY

SEQ ID NO: 4264 - protein, 10 aa, Severe acute respiratory syndrome coronavirus 2
SKLIEYTDIA

SEQ ID NO: 4265 - protein, 10 aa, Severe acute respiratory syndrome coronavirus 2
KLIEYTDIAT

SEQ ID NO: 4266 - protein, 10 aa, Severe acute respiratory syndrome coronavirus 2
IEYTDIATSA

SEQ ID NO: 4267 - protein, 10 aa, Severe acute respiratory syndrome coronavirus 2
YTDIATSACV

SEQ ID NO: 4268 - protein, 10 aa, Severe acute respiratory syndrome coronavirus 2
CVLAAECTIF

SEQ ID NO: 4269 - protein, 10 aa, Severe acute respiratory syndrome coronavirus 2
VLAAECTIFK

SEQ ID NO: 4270 - protein, 10 aa, Severe acute respiratory syndrome coronavirus 2
CTIFKDASGK

SEQ ID NO: 4271 - protein, 10 aa, Severe acute respiratory syndrome coronavirus 2
ASGKPVPYCY

SEQ ID NO: 4272 - protein, 10 aa, Severe acute respiratory syndrome coronavirus 2
VPYCYDTNVL

SEQ ID NO: 4273 - protein, 10 aa, Severe acute respiratory syndrome coronavirus 2
YDTNVLEGSV

SEQ ID NO: 4274 - protein, 10 aa, Severe acute respiratory syndrome coronavirus 2
TNVLEGSVAY

SEQ ID NO: 4275 - protein, 10 aa, Severe acute respiratory syndrome coronavirus 2
LEGSVAYESL

SEQ ID NO: 4276 - protein, 10 aa, Severe acute respiratory syndrome coronavirus 2
EGSVAYESLR

SEQ ID NO: 4277 - protein, 10 aa, Severe acute respiratory syndrome coronavirus 2
AYESLRPDTR

SEQ ID NO: 4278 - protein, 10 aa, Severe acute respiratory syndrome coronavirus 2
YESLRPDTRY

SEQ ID NO: 4279 - protein, 10 aa, Severe acute respiratory syndrome coronavirus 2
ESLRPDTRYV

SEQ ID NO: 4280 - protein, 10 aa, Severe acute respiratory syndrome coronavirus 2
SLRPDTRYVL

SEQ ID NO: 4281 - protein, 10 aa, Severe acute respiratory syndrome coronavirus 2
LRPDTRYVLM

SEQ ID NO: 4282 - protein, 10 aa, Severe acute respiratory syndrome coronavirus 2
TRYVLMDGSI

SEQ ID NO: 4283 - protein, 10 aa, Severe acute respiratory syndrome coronavirus 2
RYVLMDGSII

SEQ ID NO: 4284 - protein, 10 aa, Severe acute respiratory syndrome coronavirus 2
VLMDGSIIQF

SEQ ID NO: 4285 - protein, 10 aa, Severe acute respiratory syndrome coronavirus 2
GSIIQFPNTY

SEQ ID NO: 4286 - protein, 10 aa, Severe acute respiratory syndrome coronavirus 2
SIIQFPNTYL

SEQ ID NO: 4287 - protein, 10 aa, Severe acute respiratory syndrome coronavirus 2
IQFPNTYLEG

SEQ ID NO: 4288 - protein, 10 aa, Severe acute respiratory syndrome coronavirus 2
FPNTYLEGSV

SEQ ID NO: 4289 - protein, 10 aa, Severe acute respiratory syndrome coronavirus 2
PNTYLEGSVR

SEQ ID NO: 4290 - protein, 10 aa, Severe acute respiratory syndrome coronavirus 2
NTYLEGSVRV

SEQ ID NO: 4291 - protein, 10 aa, Severe acute respiratory syndrome coronavirus 2
TYLEGSVRVV

SEQ ID NO: 4292 - protein, 10 aa, Severe acute respiratory syndrome coronavirus 2
SVRVVTTFDS

SEQ ID NO: 4293 - protein, 10 aa, Severe acute respiratory syndrome coronavirus 2
RVVTTFDSEY

SEQ ID NO: 4294 - protein, 10 aa, Severe acute respiratory syndrome coronavirus 2
VTTFDSEYCR

SEQ ID NO: 4295 - protein, 10 aa, Severe acute respiratory syndrome coronavirus 2
TTFDSEYCRH

SEQ ID NO: 4296 - protein, 10 aa, Severe acute respiratory syndrome coronavirus 2
EYCRHGTCER

SEQ ID NO: 4297 - protein, 10 aa, Severe acute respiratory syndrome coronavirus 2
RSEAGVCVST

SEQ ID NO: 4298 - protein, 10 aa, Severe acute respiratory syndrome coronavirus 2
SEAGVCVSTS

SEQ ID NO: 4299 - protein, 10 aa, Severe acute respiratory syndrome coronavirus 2
AGVCVSTSGR

SEQ ID NO: 4300 - protein, 10 aa, Severe acute respiratory syndrome coronavirus 2
SGRWVLNNDY

SEQ ID NO: 4301 - protein, 10 aa, Severe acute respiratory syndrome coronavirus 2
GRWVLNNDYY

SEQ ID NO: 4302 - protein, 10 aa, Severe acute respiratory syndrome coronavirus 2
RWVLNNDYYR

SEQ ID NO: 4303 - protein, 10 aa, Severe acute respiratory syndrome coronavirus 2
WVLNNDYYRS

SEQ ID NO: 4304 - protein, 10 aa, Severe acute respiratory syndrome coronavirus 2
VLNNDYYRSL

SEQ ID NO: 4305 - protein, 10 aa, Severe acute respiratory syndrome coronavirus 2
DYYRSLPGVF

SEQ ID NO: 4306 - protein, 10 aa, Severe acute respiratory syndrome coronavirus 2
YYRSLPGVFC

SEQ ID NO: 4307 - protein, 10 aa, Severe acute respiratory syndrome coronavirus 2
RSLPGVFCGV

SEQ ID NO: 4308 - protein, 10 aa, Severe acute respiratory syndrome coronavirus 2
SLPGVFCGVD

SEQ ID NO: 4309 - protein, 10 aa, Severe acute respiratory syndrome coronavirus 2
LPGVFCGVDA

SEQ ID NO: 4310 - protein, 10 aa, Severe acute respiratory syndrome coronavirus 2
NLLTNMFTPL

SEQ ID NO: 4311 - protein, 10 aa, Severe acute respiratory syndrome coronavirus 2
LLTNMFTPLI

SEQ ID NO: 4312 - protein, 10 aa, Severe acute respiratory syndrome coronavirus 2
NMFTPLIQPI

SEQ ID NO: 4313 - protein, 10 aa, Severe acute respiratory syndrome coronavirus 2
FTPLIQPIGA

SEQ ID NO: 4314 - protein, 10 aa, Severe acute respiratory syndrome coronavirus 2
TPLIQPIGAL

SEQ ID NO: 4315 - protein, 10 aa, Severe acute respiratory syndrome coronavirus 2
QPIGALDISA

SEQ ID NO: 4316 - protein, 10 aa, Severe acute respiratory syndrome coronavirus 2
GALDISASIV

SEQ ID NO: 4317 - protein, 10 aa, Severe acute respiratory syndrome coronavirus 2
ALDISASIVA

SEQ ID NO: 4318 - protein, 10 aa, Severe acute respiratory syndrome coronavirus 2
ISASIVAGGI

SEQ ID NO: 4319 - protein, 10 aa, Severe acute respiratory syndrome coronavirus 2
SASIVAGGIV

SEQ ID NO: 4320 - protein, 10 aa, Severe acute respiratory syndrome coronavirus 2
SIVAGGIVAI

SEQ ID NO: 4321 - protein, 10 aa, Severe acute respiratory syndrome coronavirus 2
IVAGGIVAIV

SEQ ID NO: 4322 - protein, 10 aa, Severe acute respiratory syndrome coronavirus 2
GIVAIVVTCL

SEQ ID NO: 4323 - protein, 10 aa, Severe acute respiratory syndrome coronavirus 2
VAIVVTCLAY

SEQ ID NO: 4324 - protein, 10 aa, Severe acute respiratory syndrome coronavirus 2
AIVVTCLAYY

SEQ ID NO: 4325 - protein, 10 aa, Severe acute respiratory syndrome coronavirus 2
IVVTCLAYYF

SEQ ID NO: 4326 - protein, 10 aa, Severe acute respiratory syndrome coronavirus 2
VTCLAYYFMR

SEQ ID NO: 4327 - protein, 10 aa, Severe acute respiratory syndrome coronavirus 2
CLAYYFMRFR

SEQ ID NO: 4328 - protein, 10 aa, Severe acute respiratory syndrome coronavirus 2
LAYYFMRFRR

SEQ ID NO: 4329 - protein, 10 aa, Severe acute respiratory syndrome coronavirus 2
AYYFMRFRRA

SEQ ID NO: 4330 - protein, 10 aa, Severe acute respiratory syndrome coronavirus 2
YYFMRFRRAF

SEQ ID NO: 4331 - protein, 10 aa, Severe acute respiratory syndrome coronavirus 2
YFMRFRRAFG

SEQ ID NO: 4332 - protein, 10 aa, Severe acute respiratory syndrome coronavirus 2
MRFRRAFGEY

SEQ ID NO: 4333 - protein, 10 aa, Severe acute respiratory syndrome coronavirus 2
RFRRAFGEYS

SEQ ID NO: 4334 - protein, 10 aa, Severe acute respiratory syndrome coronavirus 2
RRAFGEYSHV

SEQ ID NO: 4335 - protein, 10 aa, Severe acute respiratory syndrome coronavirus 2
RAFGEYSHVV

SEQ ID NO: 4336 - protein, 10 aa, Severe acute respiratory syndrome coronavirus 2
FGEYSHVVAF

SEQ ID NO: 4337 - protein, 10 aa, Severe acute respiratory syndrome coronavirus 2
GEYSHVVAFN

SEQ ID NO: 4338 - protein, 10 aa, Severe acute respiratory syndrome coronavirus 2
YSHVVAFNTL

SEQ ID NO: 4339 - protein, 10 aa, Severe acute respiratory syndrome coronavirus 2
SHVVAFNTLL

SEQ ID NO: 4340 - protein, 10 aa, Severe acute respiratory syndrome coronavirus 2
HVVAFNTLLF

SEQ ID NO: 4341 - protein, 10 aa, Severe acute respiratory syndrome coronavirus 2
VVAFNTLLFL

SEQ ID NO: 4342 - protein, 10 aa, Severe acute respiratory syndrome coronavirus 2
VAFNTLLFLM

SEQ ID NO: 4343 - protein, 10 aa, Severe acute respiratory syndrome coronavirus 2
FNTLLFLMSF

SEQ ID NO: 4344 - protein, 10 aa, Severe acute respiratory syndrome coronavirus 2
TLLFLMSFTV

SEQ ID NO: 4345 - protein, 10 aa, Severe acute respiratory syndrome coronavirus 2
LLFLMSFTVL

SEQ ID NO: 4346 - protein, 10 aa, Severe acute respiratory syndrome coronavirus 2
LFLMSFTVLC

SEQ ID NO: 4347 - protein, 10 aa, Severe acute respiratory syndrome coronavirus 2
FLMSFTVLCL

SEQ ID NO: 4348 - protein, 10 aa, Severe acute respiratory syndrome coronavirus 2
LMSFTVLCLT

SEQ ID NO: 4349 - protein, 10 aa, Severe acute respiratory syndrome coronavirus 2
MSFTVLCLTP

SEQ ID NO: 4350 - protein, 10 aa, Severe acute respiratory syndrome coronavirus 2
SFTVLCLTPV

SEQ ID NO: 4351 - protein, 10 aa, Severe acute respiratory syndrome coronavirus 2
FTVLCLTPVY

SEQ ID NO: 4352 - protein, 10 aa, Severe acute respiratory syndrome coronavirus 2
VLCLTPVYSF

SEQ ID NO: 4353 - protein, 10 aa, Severe acute respiratory syndrome coronavirus 2
LCLTPVYSFL

SEQ ID NO: 4354 - protein, 10 aa, Severe acute respiratory syndrome coronavirus 2
CLTPVYSFLP

SEQ ID NO: 4355 - protein, 10 aa, Severe acute respiratory syndrome coronavirus 2
TPVYSFLPGV

SEQ ID NO: 4356 - protein, 10 aa, Severe acute respiratory syndrome coronavirus 2
PVYSFLPGVY

SEQ ID NO: 4357 - protein, 10 aa, Severe acute respiratory syndrome coronavirus 2
YSFLPGVYSV

SEQ ID NO: 4358 - protein, 10 aa, Severe acute respiratory syndrome coronavirus 2
SFLPGVYSVI

SEQ ID NO: 4359 - protein, 10 aa, Severe acute respiratory syndrome coronavirus 2
FLPGVYSVIY

SEQ ID NO: 4360 - protein, 10 aa, Severe acute respiratory syndrome coronavirus 2
LPGVYSVIYL

SEQ ID NO: 4361 - protein, 10 aa, Severe acute respiratory syndrome coronavirus 2
PGVYSVIYLY

SEQ ID NO: 4362 - protein, 10 aa, Severe acute respiratory syndrome coronavirus 2
GVYSVIYLYL

SEQ ID NO: 4363 - protein, 10 aa, Severe acute respiratory syndrome coronavirus 2
YSVIYLYLTF

SEQ ID NO: 4364 - protein, 10 aa, Severe acute respiratory syndrome coronavirus 2
SVIYLYLTFY

SEQ ID NO: 4365 - protein, 10 aa, Severe acute respiratory syndrome coronavirus 2
VIYLYLTFYL

SEQ ID NO: 4366 - protein, 10 aa, Severe acute respiratory syndrome coronavirus 2
IYLYLTFYLT

SEQ ID NO: 4367 - protein, 10 aa, Severe acute respiratory syndrome coronavirus 2
YLTFYLTNDV

SEQ ID NO: 4368 - protein, 10 aa, Severe acute respiratory syndrome coronavirus 2
TFYLTNDVSF

SEQ ID NO: 4369 - protein, 10 aa, Severe acute respiratory syndrome coronavirus 2
FYLTNDVSFL

SEQ ID NO: 4370 - protein, 10 aa, Severe acute respiratory syndrome coronavirus 2
YLTNDVSFLA

SEQ ID NO: 4371 - protein, 10 aa, Severe acute respiratory syndrome coronavirus 2
DVSFLAHIQW

SEQ ID NO: 4372 - protein, 10 aa, Severe acute respiratory syndrome coronavirus 2
VSFLAHIQWM

SEQ ID NO: 4373 - protein, 10 aa, Severe acute respiratory syndrome coronavirus 2
SFLAHIQWMV

SEQ ID NO: 4374 - protein, 10 aa, Severe acute respiratory syndrome coronavirus 2
FLAHIQWMVM

SEQ ID NO: 4375 - protein, 10 aa, Severe acute respiratory syndrome coronavirus 2
LAHIQWMVMF

SEQ ID NO: 4376 - protein, 10 aa, Severe acute respiratory syndrome coronavirus 2
IQWMVMFTPL

SEQ ID NO: 4377 - protein, 10 aa, Severe acute respiratory syndrome coronavirus 2
QWMVMFTPLV

SEQ ID NO: 4378 - protein, 10 aa, Severe acute respiratory syndrome coronavirus 2
WMVMFTPLVP

SEQ ID NO: 4379 - protein, 10 aa, Severe acute respiratory syndrome coronavirus 2
MVMFTPLVPF

SEQ ID NO: 4380 - protein, 10 aa, Severe acute respiratory syndrome coronavirus 2
VMFTPLVPFW

SEQ ID NO: 4381 - protein, 10 aa, Severe acute respiratory syndrome coronavirus 2
MFTPLVPFWI

SEQ ID NO: 4382 - protein, 10 aa, Severe acute respiratory syndrome coronavirus 2
FTPLVPFWIT

SEQ ID NO: 4383 - protein, 10 aa, Severe acute respiratory syndrome coronavirus 2
TPLVPFWITI

SEQ ID NO: 4384 - protein, 10 aa, Severe acute respiratory syndrome coronavirus 2
LVPFWITIAY

SEQ ID NO: 4385 - protein, 10 aa, Severe acute respiratory syndrome coronavirus 2
VPFWITIAYI

SEQ ID NO: 4386 - protein, 10 aa, Severe acute respiratory syndrome coronavirus 2
PFWITIAYII

SEQ ID NO: 4387 - protein, 10 aa, Severe acute respiratory syndrome coronavirus 2
WITIAYIICI

SEQ ID NO: 4388 - protein, 10 aa, Severe acute respiratory syndrome coronavirus 2
TIAYIICIST

SEQ ID NO: 4389 - protein, 10 aa, Severe acute respiratory syndrome coronavirus 2
IAYIICISTK

SEQ ID NO: 4390 - protein, 10 aa, Severe acute respiratory syndrome coronavirus 2
YIICISTKHF

SEQ ID NO: 4391 - protein, 10 aa, Severe acute respiratory syndrome coronavirus 2
IICISTKHFY

SEQ ID NO: 4392 - protein, 10 aa, Severe acute respiratory syndrome coronavirus 2
ICISTKHFYW

SEQ ID NO: 4393 - protein, 10 aa, Severe acute respiratory syndrome coronavirus 2
ISTKHFYWFF

SEQ ID NO: 4394 - protein, 10 aa, Severe acute respiratory syndrome coronavirus 2
STKHFYWFFS

SEQ ID NO: 4395 - protein, 10 aa, Severe acute respiratory syndrome coronavirus 2
KHFYWFFSNY

SEQ ID NO: 4396 - protein, 10 aa, Severe acute respiratory syndrome coronavirus 2
HFYWFFSNYL

SEQ ID NO: 4397 - protein, 10 aa, Severe acute respiratory syndrome coronavirus 2
FYWFFSNYLK

SEQ ID NO: 4398 - protein, 10 aa, Severe acute respiratory syndrome coronavirus 2
YWFFSNYLKR

SEQ ID NO: 4399 - protein, 10 aa, Severe acute respiratory syndrome coronavirus 2
WFFSNYLKRR

SEQ ID NO: 4400 - protein, 10 aa, Severe acute respiratory syndrome coronavirus 2
FSNYLKRRVV

SEQ ID NO: 4401 - protein, 10 aa, Severe acute respiratory syndrome coronavirus 2
SNYLKRRVVF

SEQ ID NO: 4402 - protein, 10 aa, Severe acute respiratory syndrome coronavirus 2
RRVVFNGVSF

SEQ ID NO: 4403 - protein, 10 aa, Severe acute respiratory syndrome coronavirus 2
RVVFNGVSFS

SEQ ID NO: 4404 - protein, 10 aa, Severe acute respiratory syndrome coronavirus 2
VVFNGVSFST

SEQ ID NO: 4405 - protein, 10 aa, Severe acute respiratory syndrome coronavirus 2
VFNGVSFSTF

SEQ ID NO: 4406 - protein, 10 aa, Severe acute respiratory syndrome coronavirus 2
SFSTFEEAAL

SEQ ID NO: 4407 - protein, 10 aa, Severe acute respiratory syndrome coronavirus 2
TFEEAALCTF

SEQ ID NO: 4408 - protein, 10 aa, Severe acute respiratory syndrome coronavirus 2
FEEAALCTFL

SEQ ID NO: 4409 - protein, 10 aa, Severe acute respiratory syndrome coronavirus 2
EEAALCTFLL

SEQ ID NO: 4410 - protein, 10 aa, Severe acute respiratory syndrome coronavirus 2
AALCTFLLNK

SEQ ID NO: 4411 - protein, 10 aa, Severe acute respiratory syndrome coronavirus 2
LCTFLLNKEM

SEQ ID NO: 4412 - protein, 10 aa, Severe acute respiratory syndrome coronavirus 2
CTFLLNKEMY

SEQ ID NO: 4413 - protein, 10 aa, Severe acute respiratory syndrome coronavirus 2
TFLLNKEMYL

SEQ ID NO: 4414 - protein, 10 aa, Severe acute respiratory syndrome coronavirus 2
FLLNKEMYLK

SEQ ID NO: 4415 - protein, 10 aa, Severe acute respiratory syndrome coronavirus 2
LLNKEMYLKL

SEQ ID NO: 4416 - protein, 10 aa, Severe acute respiratory syndrome coronavirus 2
EMYLKLRSDV

SEQ ID NO: 4417 - protein, 10 aa, Severe acute respiratory syndrome coronavirus 2
MYLKLRSDVL

SEQ ID NO: 4418 - protein, 10 aa, Severe acute respiratory syndrome coronavirus 2
YLKLRSDVLL

SEQ ID NO: 4419 - protein, 10 aa, Severe acute respiratory syndrome coronavirus 2
KLRSDVLLPL

SEQ ID NO: 4420 - protein, 10 aa, Severe acute respiratory syndrome coronavirus 2
LRSDVLLPLT

SEQ ID NO: 4421 - protein, 10 aa, Severe acute respiratory syndrome coronavirus 2
SDVLLPLTQY

SEQ ID NO: 4422 - protein, 10 aa, Severe acute respiratory syndrome coronavirus 2
VLLPLTQYNR

SEQ ID NO: 4423 - protein, 10 aa, Severe acute respiratory syndrome coronavirus 2
LLPLTQYNRY

SEQ ID NO: 4424 - protein, 10 aa, Severe acute respiratory syndrome coronavirus 2
LPLTQYNRYL

SEQ ID NO: 4425 - protein, 10 aa, Severe acute respiratory syndrome coronavirus 2
LTQYNRYLAL

SEQ ID NO: 4426 - protein, 10 aa, Severe acute respiratory syndrome coronavirus 2
TQYNRYLALY

SEQ ID NO: 4427 - protein, 10 aa, Severe acute respiratory syndrome coronavirus 2
YNRYLALYNK

SEQ ID NO: 4428 - protein, 10 aa, Severe acute respiratory syndrome coronavirus 2
NRYLALYNKY

SEQ ID NO: 4429 - protein, 10 aa, Severe acute respiratory syndrome coronavirus 2
RYLALYNKYK

SEQ ID NO: 4430 - protein, 10 aa, Severe acute respiratory syndrome coronavirus 2
YLALYNKYKY

SEQ ID NO: 4431 - protein, 10 aa, Severe acute respiratory syndrome coronavirus 2
LALYNKYKYF

SEQ ID NO: 4432 - protein, 10 aa, Severe acute respiratory syndrome coronavirus 2
ALYNKYKYFS

SEQ ID NO: 4433 - protein, 10 aa, Severe acute respiratory syndrome coronavirus 2
NKYKYFSGAM

SEQ ID NO: 4434 - protein, 10 aa, Severe acute respiratory syndrome coronavirus 2
FSGAMDTTSY

SEQ ID NO: 4435 - protein, 10 aa, Severe acute respiratory syndrome coronavirus 2
SGAMDTTSYR

SEQ ID NO: 4436 - protein, 10 aa, Severe acute respiratory syndrome coronavirus 2
AMDTTSYREA

SEQ ID NO: 4437 - protein, 10 aa, Severe acute respiratory syndrome coronavirus 2
SYREAACCHL

SEQ ID NO: 4438 - protein, 10 aa, Severe acute respiratory syndrome coronavirus 2
YREAACCHLA

SEQ ID NO: 4439 - protein, 10 aa, Severe acute respiratory syndrome coronavirus 2
REAACCHLAK

SEQ ID NO: 4440 - protein, 10 aa, Severe acute respiratory syndrome coronavirus 2
EAACCHLAKA

SEQ ID NO: 4441 - protein, 10 aa, Severe acute respiratory syndrome coronavirus 2
FSNSGSDVLY

SEQ ID NO: 4442 - protein, 10 aa, Severe acute respiratory syndrome coronavirus 2
VLYQPPQTSI

SEQ ID NO: 4443 - protein, 10 aa, Severe acute respiratory syndrome coronavirus 2
ITSAVLQSGF

SEQ ID NO: 4444 - protein, 10 aa, Severe acute respiratory syndrome coronavirus 2
TSAVLQSGFR

SEQ ID NO: 4445 - protein, 10 aa, Severe acute respiratory syndrome coronavirus 2
SAVLQSGFRK

SEQ ID NO: 4446 - protein, 10 aa, Severe acute respiratory syndrome coronavirus 2
LQSGFRKMAF

SEQ ID NO: 4447 - protein, 10 aa, Severe acute respiratory syndrome coronavirus 2
GFRKMAFPSG

SEQ ID NO: 4448 - protein, 10 aa, Severe acute respiratory syndrome coronavirus 2
FRKMAFPSGK

SEQ ID NO: 4449 - protein, 10 aa, Severe acute respiratory syndrome coronavirus 2
RKMAFPSGKV

SEQ ID NO: 4450 - protein, 10 aa, Severe acute respiratory syndrome coronavirus 2
FPSGKVEGCM

SEQ ID NO: 4451 - protein, 10 aa, Severe acute respiratory syndrome coronavirus 2
VQVTCGTTTL

SEQ ID NO: 4452 - protein, 10 aa, Severe acute respiratory syndrome coronavirus 2
CGTTTLNGLW

SEQ ID NO: 4453 - protein, 10 aa, Severe acute respiratory syndrome coronavirus 2
TLNGLWLDDV

SEQ ID NO: 4454 - protein, 10 aa, Severe acute respiratory syndrome coronavirus 2
NGLWLDDVVY

SEQ ID NO: 4455 - protein, 10 aa, Severe acute respiratory syndrome coronavirus 2
GLWLDDVVYC

SEQ ID NO: 4456 - protein, 10 aa, Severe acute respiratory syndrome coronavirus 2
WLDDVVYCPR

SEQ ID NO: 4457 - protein, 10 aa, Severe acute respiratory syndrome coronavirus 2
DVVYCPRHVI

SEQ ID NO: 4458 - protein, 10 aa, Severe acute respiratory syndrome coronavirus 2
YCPRHVICTS

SEQ ID NO: 4459 - protein, 10 aa, Severe acute respiratory syndrome coronavirus 2
RHVICTSEDM

SEQ ID NO: 4460 - protein, 10 aa, Severe acute respiratory syndrome coronavirus 2
HVICTSEDML

SEQ ID NO: 4461 - protein, 10 aa, Severe acute respiratory syndrome coronavirus 2
TSEDMLNPNY

SEQ ID NO: 4462 - protein, 10 aa, Severe acute respiratory syndrome coronavirus 2
MLNPNYEDLL

SEQ ID NO: 4463 - protein, 10 aa, Severe acute respiratory syndrome coronavirus 2
LNPNYEDLLI

SEQ ID NO: 4464 - protein, 10 aa, Severe acute respiratory syndrome coronavirus 2
LLIRKSNHNF

SEQ ID NO: 4465 - protein, 10 aa, Severe acute respiratory syndrome coronavirus 2
LIRKSNHNFL

SEQ ID NO: 4466 - protein, 10 aa, Severe acute respiratory syndrome coronavirus 2
IRKSNHNFLV

SEQ ID NO: 4467 - protein, 10 aa, Severe acute respiratory syndrome coronavirus 2
KSNHNFLVQA

SEQ ID NO: 4468 - protein, 10 aa, Severe acute respiratory syndrome coronavirus 2
HNFLVQAGNV

SEQ ID NO: 4469 - protein, 10 aa, Severe acute respiratory syndrome coronavirus 2
FLVQAGNVQL

SEQ ID NO: 4470 - protein, 10 aa, Severe acute respiratory syndrome coronavirus 2
LVQAGNVQLR

SEQ ID NO: 4471 - protein, 10 aa, Severe acute respiratory syndrome coronavirus 2
VQAGNVQLRV

SEQ ID NO: 4472 - protein, 10 aa, Severe acute respiratory syndrome coronavirus 2
VQLRVIGHSM

SEQ ID NO: 4473 - protein, 10 aa, Severe acute respiratory syndrome coronavirus 2
GHSMQNCVLK

SEQ ID NO: 4474 - protein, 10 aa, Severe acute respiratory syndrome coronavirus 2
HSMQNCVLKL

SEQ ID NO: 4475 - protein, 10 aa, Severe acute respiratory syndrome coronavirus 2
SMQNCVLKLK

SEQ ID NO: 4476 - protein, 10 aa, Severe acute respiratory syndrome coronavirus 2
MQNCVLKLKV

SEQ ID NO: 4477 - protein, 10 aa, Severe acute respiratory syndrome coronavirus 2
KLKVDTANPK

SEQ ID NO: 4478 - protein, 10 aa, Severe acute respiratory syndrome coronavirus 2
VDTANPKTPK

SEQ ID NO: 4479 - protein, 10 aa, Severe acute respiratory syndrome coronavirus 2
DTANPKTPKY

SEQ ID NO: 4480 - protein, 10 aa, Severe acute respiratory syndrome coronavirus 2
TANPKTPKYK

SEQ ID NO: 4481 - protein, 10 aa, Severe acute respiratory syndrome coronavirus 2
KTPKYKFVRI

SEQ ID NO: 4482 - protein, 10 aa, Severe acute respiratory syndrome coronavirus 2
KYKFVRIQPG

SEQ ID NO: 4483 - protein, 10 aa, Severe acute respiratory syndrome coronavirus 2
FVRIQPGQTF

SEQ ID NO: 4484 - protein, 10 aa, Severe acute respiratory syndrome coronavirus 2
RIQPGQTFSV

SEQ ID NO: 4485 - protein, 10 aa, Severe acute respiratory syndrome coronavirus 2
IQPGQTFSVL

SEQ ID NO: 4486 - protein, 10 aa, Severe acute respiratory syndrome coronavirus 2
QPGQTFSVLA

SEQ ID NO: 4487 - protein, 10 aa, Severe acute respiratory syndrome coronavirus 2
GQTFSVLACY

SEQ ID NO: 4488 - protein, 10 aa, Severe acute respiratory syndrome coronavirus 2
CYNGSPSGVY

SEQ ID NO: 4489 - protein, 10 aa, Severe acute respiratory syndrome coronavirus 2
SPSGVYQCAM

SEQ ID NO: 4490 - protein, 10 aa, Severe acute respiratory syndrome coronavirus 2
VYQCAMRPNF

SEQ ID NO: 4491 - protein, 10 aa, Severe acute respiratory syndrome coronavirus 2
QCAMRPNFTI

SEQ ID NO: 4492 - protein, 10 aa, Severe acute respiratory syndrome coronavirus 2
CAMRPNFTIK

SEQ ID NO: 4493 - protein, 10 aa, Severe acute respiratory syndrome coronavirus 2
AMRPNFTIKG

SEQ ID NO: 4494 - protein, 10 aa, Severe acute respiratory syndrome coronavirus 2
RPNFTIKGSF

SEQ ID NO: 4495 - protein, 10 aa, Severe acute respiratory syndrome coronavirus 2
SFLNGSCGSV

SEQ ID NO: 4496 - protein, 10 aa, Severe acute respiratory syndrome coronavirus 2
FLNGSCGSVG

SEQ ID NO: 4497 - protein, 10 aa, Severe acute respiratory syndrome coronavirus 2
FNIDYDCVSF

SEQ ID NO: 4498 - protein, 10 aa, Severe acute respiratory syndrome coronavirus 2
IDYDCVSFCY

SEQ ID NO: 4499 - protein, 10 aa, Severe acute respiratory syndrome coronavirus 2
CVSFCYMHHM

SEQ ID NO: 4500 - protein, 10 aa, Severe acute respiratory syndrome coronavirus 2
SFCYMHHMEL

SEQ ID NO: 4501 - protein, 10 aa, Severe acute respiratory syndrome coronavirus 2
MHHMELPTGV

SEQ ID NO: 4502 - protein, 10 aa, Severe acute respiratory syndrome coronavirus 2
HHMELPTGVH

SEQ ID NO: 4503 - protein, 10 aa, Severe acute respiratory syndrome coronavirus 2
HMELPTGVHA

SEQ ID NO: 4504 - protein, 10 aa, Severe acute respiratory syndrome coronavirus 2
MELPTGVHAG

SEQ ID NO: 4505 - protein, 10 aa, Severe acute respiratory syndrome coronavirus 2
AGTDLEGNFY

SEQ ID NO: 4506 - protein, 10 aa, Severe acute respiratory syndrome coronavirus 2
GTDLEGNFYG

SEQ ID NO: 4507 - protein, 10 aa, Severe acute respiratory syndrome coronavirus 2
DLEGNFYGPF

SEQ ID NO: 4508 - protein, 10 aa, Severe acute respiratory syndrome coronavirus 2
LEGNFYGPFV

SEQ ID NO: 4509 - protein, 10 aa, Severe acute respiratory syndrome coronavirus 2
GNFYGPFVDR

SEQ ID NO: 4510 - protein, 10 aa, Severe acute respiratory syndrome coronavirus 2
YGPFVDRQTA

SEQ ID NO: 4511 - protein, 10 aa, Severe acute respiratory syndrome coronavirus 2
AQAAGTDTTI

SEQ ID NO: 4512 - protein, 10 aa, Severe acute respiratory syndrome coronavirus 2
GTDTTITVNV

SEQ ID NO: 4513 - protein, 10 aa, Severe acute respiratory syndrome coronavirus 2
DTTITVNVLA

SEQ ID NO: 4514 - protein, 10 aa, Severe acute respiratory syndrome coronavirus 2
TTITVNVLAW

SEQ ID NO: 4515 - protein, 10 aa, Severe acute respiratory syndrome coronavirus 2
TITVNVLAWL

SEQ ID NO: 4516 - protein, 10 aa, Severe acute respiratory syndrome coronavirus 2
ITVNVLAWLY

SEQ ID NO: 4517 - protein, 10 aa, Severe acute respiratory syndrome coronavirus 2
TVNVLAWLYA

SEQ ID NO: 4518 - protein, 10 aa, Severe acute respiratory syndrome coronavirus 2
VNVLAWLYAA

SEQ ID NO: 4519 - protein, 10 aa, Severe acute respiratory syndrome coronavirus 2
NVLAWLYAAV

SEQ ID NO: 4520 - protein, 10 aa, Severe acute respiratory syndrome coronavirus 2
VLAWLYAAVI

SEQ ID NO: 4521 - protein, 10 aa, Severe acute respiratory syndrome coronavirus 2
LYAAVINGDR

SEQ ID NO: 4522 - protein, 10 aa, Severe acute respiratory syndrome coronavirus 2
YAAVINGDRW

SEQ ID NO: 4523 - protein, 10 aa, Severe acute respiratory syndrome coronavirus 2
AVINGDRWFL

SEQ ID NO: 4524 - protein, 10 aa, Severe acute respiratory syndrome coronavirus 2
INGDRWFLNR

SEQ ID NO: 4525 - protein, 10 aa, Severe acute respiratory syndrome coronavirus 2
GDRWFLNRFT

SEQ ID NO: 4526 - protein, 10 aa, Severe acute respiratory syndrome coronavirus 2
DRWFLNRFTT

SEQ ID NO: 4527 - protein, 10 aa, Severe acute respiratory syndrome coronavirus 2
WFLNRFTTTL

SEQ ID NO: 4528 - protein, 10 aa, Severe acute respiratory syndrome coronavirus 2
FLNRFTTTLN

SEQ ID NO: 4529 - protein, 10 aa, Severe acute respiratory syndrome coronavirus 2
NRFTTTLNDF

SEQ ID NO: 4530 - protein, 10 aa, Severe acute respiratory syndrome coronavirus 2
FTTTLNDFNL

SEQ ID NO: 4531 - protein, 10 aa, Severe acute respiratory syndrome coronavirus 2
TTTLNDFNLV

SEQ ID NO: 4532 - protein, 10 aa, Severe acute respiratory syndrome coronavirus 2
TTLNDFNLVA

SEQ ID NO: 4533 - protein, 10 aa, Severe acute respiratory syndrome coronavirus 2
TLNDFNLVAM

SEQ ID NO: 4534 - protein, 10 aa, Severe acute respiratory syndrome coronavirus 2
NDFNLVAMKY

SEQ ID NO: 4535 - protein, 10 aa, Severe acute respiratory syndrome coronavirus 2
FNLVAMKYNY

SEQ ID NO: 4536 - protein, 10 aa, Severe acute respiratory syndrome coronavirus 2
VAMKYNYEPL

SEQ ID NO: 4537 - protein, 10 aa, Severe acute respiratory syndrome coronavirus 2
QDHVDILGPL

SEQ ID NO: 4538 - protein, 10 aa, Severe acute respiratory syndrome coronavirus 2
LSAQTGIAVL

SEQ ID NO: 4539 - protein, 10 aa, Severe acute respiratory syndrome coronavirus 2
AQTGIAVLDM

SEQ ID NO: 4540 - protein, 10 aa, Severe acute respiratory syndrome coronavirus 2
IAVLDMCASL

SEQ ID NO: 4541 - protein, 10 aa, Severe acute respiratory syndrome coronavirus 2
AVLDMCASLK

SEQ ID NO: 4542 - protein, 10 aa, Severe acute respiratory syndrome coronavirus 2
SLKELLQNGM

SEQ ID NO: 4543 - protein, 10 aa, Severe acute respiratory syndrome coronavirus 2
ELLQNGMNGR

SEQ ID NO: 4544 - protein, 10 aa, Severe acute respiratory syndrome coronavirus 2
LQNGMNGRTI

SEQ ID NO: 4545 - protein, 10 aa, Severe acute respiratory syndrome coronavirus 2
MNGRTILGSA

SEQ ID NO: 4546 - protein, 10 aa, Severe acute respiratory syndrome coronavirus 2
NGRTILGSAL

SEQ ID NO: 4547 - protein, 10 aa, Severe acute respiratory syndrome coronavirus 2
GRTILGSALL

SEQ ID NO: 4548 - protein, 10 aa, Severe acute respiratory syndrome coronavirus 2
LGSALLEDEF

SEQ ID NO: 4549 - protein, 10 aa, Severe acute respiratory syndrome coronavirus 2
ALLEDEFTPF

SEQ ID NO: 4550 - protein, 10 aa, Severe acute respiratory syndrome coronavirus 2
DEFTPFDVVR

SEQ ID NO: 4551 - protein, 10 aa, Severe acute respiratory syndrome coronavirus 2
FTPFDVVRQC

SEQ ID NO: 4552 - protein, 10 aa, Severe acute respiratory syndrome coronavirus 2
FDVVRQCSGV

SEQ ID NO: 4553 - protein, 10 aa, Severe acute respiratory syndrome coronavirus 2
VVRQCSGVTF

SEQ ID NO: 4554 - protein, 10 aa, Severe acute respiratory syndrome coronavirus 2
CSGVTFQSAV

SEQ ID NO: 4555 - protein, 10 aa, Severe acute respiratory syndrome coronavirus 2
SGVTFQSAVK

SEQ ID NO: 4556 - protein, 10 aa, Severe acute respiratory syndrome coronavirus 2
GVTFQSAVKR

SEQ ID NO: 4557 - protein, 10 aa, Severe acute respiratory syndrome coronavirus 2
KRTIKGTHHW

SEQ ID NO: 4558 - protein, 10 aa, Severe acute respiratory syndrome coronavirus 2
RTIKGTHHWL

SEQ ID NO: 4559 - protein, 10 aa, Severe acute respiratory syndrome coronavirus 2
TIKGTHHWLL

SEQ ID NO: 4560 - protein, 10 aa, Severe acute respiratory syndrome coronavirus 2
THHWLLLTIL

SEQ ID NO: 4561 - protein, 10 aa, Severe acute respiratory syndrome coronavirus 2
WLLLTILTSL

SEQ ID NO: 4562 - protein, 10 aa, Severe acute respiratory syndrome coronavirus 2
LLLTILTSLL

SEQ ID NO: 4563 - protein, 10 aa, Severe acute respiratory syndrome coronavirus 2
LLTILTSLLV

SEQ ID NO: 4564 - protein, 10 aa, Severe acute respiratory syndrome coronavirus 2
LTILTSLLVL

SEQ ID NO: 4565 - protein, 10 aa, Severe acute respiratory syndrome coronavirus 2
TILTSLLVLV

SEQ ID NO: 4566 - protein, 10 aa, Severe acute respiratory syndrome coronavirus 2
ILTSLLVLVQ

SEQ ID NO: 4567 - protein, 10 aa, Severe acute respiratory syndrome coronavirus 2
LLVLVQSTQW

SEQ ID NO: 4568 - protein, 10 aa, Severe acute respiratory syndrome coronavirus 2
VLVQSTQWSL

SEQ ID NO: 4569 - protein, 10 aa, Severe acute respiratory syndrome coronavirus 2
LVQSTQWSLF

SEQ ID NO: 4570 - protein, 10 aa, Severe acute respiratory syndrome coronavirus 2
VQSTQWSLFF

SEQ ID NO: 4571 - protein, 10 aa, Severe acute respiratory syndrome coronavirus 2
QSTQWSLFFF

SEQ ID NO: 4572 - protein, 10 aa, Severe acute respiratory syndrome coronavirus 2
STQWSLFFFL

SEQ ID NO: 4573 - protein, 10 aa, Severe acute respiratory syndrome coronavirus 2
TQWSLFFFLY

SEQ ID NO: 4574 - protein, 10 aa, Severe acute respiratory syndrome coronavirus 2
SLFFFLYENA

SEQ ID NO: 4575 - protein, 10 aa, Severe acute respiratory syndrome coronavirus 2
LFFFLYENAF

SEQ ID NO: 4576 - protein, 10 aa, Severe acute respiratory syndrome coronavirus 2
FFFLYENAFL

SEQ ID NO: 4577 - protein, 10 aa, Severe acute respiratory syndrome coronavirus 2
FFLYENAFLP

SEQ ID NO: 4578 - protein, 10 aa, Severe acute respiratory syndrome coronavirus 2
FLYENAFLPF

SEQ ID NO: 4579 - protein, 10 aa, Severe acute respiratory syndrome coronavirus 2
LYENAFLPFA

SEQ ID NO: 4580 - protein, 10 aa, Severe acute respiratory syndrome coronavirus 2
YENAFLPFAM

SEQ ID NO: 4581 - protein, 10 aa, Severe acute respiratory syndrome coronavirus 2
NAFLPFAMGI

SEQ ID NO: 4582 - protein, 10 aa, Severe acute respiratory syndrome coronavirus 2
AFLPFAMGII

SEQ ID NO: 4583 - protein, 10 aa, Severe acute respiratory syndrome coronavirus 2
FLPFAMGIIA

SEQ ID NO: 4584 - protein, 10 aa, Severe acute respiratory syndrome coronavirus 2
LPFAMGIIAM

SEQ ID NO: 4585 - protein, 10 aa, Severe acute respiratory syndrome coronavirus 2
FAMGIIAMSA

SEQ ID NO: 4586 - protein, 10 aa, Severe acute respiratory syndrome coronavirus 2
AMGIIAMSAF

SEQ ID NO: 4587 - protein, 10 aa, Severe acute respiratory syndrome coronavirus 2
MGIIAMSAFA

SEQ ID NO: 4588 - protein, 10 aa, Severe acute respiratory syndrome coronavirus 2
GIIAMSAFAM

SEQ ID NO: 4589 - protein, 10 aa, Severe acute respiratory syndrome coronavirus 2
IIAMSAFAMM

SEQ ID NO: 4590 - protein, 10 aa, Severe acute respiratory syndrome coronavirus 2
IAMSAFAMMF

SEQ ID NO: 4591 - protein, 10 aa, Severe acute respiratory syndrome coronavirus 2
AMSAFAMMFV

SEQ ID NO: 4592 - protein, 10 aa, Severe acute respiratory syndrome coronavirus 2
MSAFAMMFVK

SEQ ID NO: 4593 - protein, 10 aa, Severe acute respiratory syndrome coronavirus 2
SAFAMMFVKH

SEQ ID NO: 4594 - protein, 10 aa, Severe acute respiratory syndrome coronavirus 2
AFAMMFVKHK

SEQ ID NO: 4595 - protein, 10 aa, Severe acute respiratory syndrome coronavirus 2
AMMFVKHKHA

SEQ ID NO: 4596 - protein, 10 aa, Severe acute respiratory syndrome coronavirus 2
MMFVKHKHAF

SEQ ID NO: 4597 - protein, 10 aa, Severe acute respiratory syndrome coronavirus 2
MFVKHKHAFL

SEQ ID NO: 4598 - protein, 10 aa, Severe acute respiratory syndrome coronavirus 2
FVKHKHAFLC

SEQ ID NO: 4599 - protein, 10 aa, Severe acute respiratory syndrome coronavirus 2
KHKHAFLCLF

SEQ ID NO: 4600 - protein, 10 aa, Severe acute respiratory syndrome coronavirus 2
HKHAFLCLFL

SEQ ID NO: 4601 - protein, 10 aa, Severe acute respiratory syndrome coronavirus 2
KHAFLCLFLL

SEQ ID NO: 4602 - protein, 10 aa, Severe acute respiratory syndrome coronavirus 2
FLCLFLLPSL

SEQ ID NO: 4603 - protein, 10 aa, Severe acute respiratory syndrome coronavirus 2
LCLFLLPSLA

SEQ ID NO: 4604 - protein, 10 aa, Severe acute respiratory syndrome coronavirus 2
CLFLLPSLAT

SEQ ID NO: 4605 - protein, 10 aa, Severe acute respiratory syndrome coronavirus 2
LFLLPSLATV

SEQ ID NO: 4606 - protein, 10 aa, Severe acute respiratory syndrome coronavirus 2
FLLPSLATVA

SEQ ID NO: 4607 - protein, 10 aa, Severe acute respiratory syndrome coronavirus 2
LLPSLATVAY

SEQ ID NO: 4608 - protein, 10 aa, Severe acute respiratory syndrome coronavirus 2
LPSLATVAYF

SEQ ID NO: 4609 - protein, 10 aa, Severe acute respiratory syndrome coronavirus 2
SLATVAYFNM

SEQ ID NO: 4610 - protein, 10 aa, Severe acute respiratory syndrome coronavirus 2
LATVAYFNMV

SEQ ID NO: 4611 - protein, 10 aa, Severe acute respiratory syndrome coronavirus 2
ATVAYFNMVY

SEQ ID NO: 4612 - protein, 10 aa, Severe acute respiratory syndrome coronavirus 2
TVAYFNMVYM

SEQ ID NO: 4613 - protein, 10 aa, Severe acute respiratory syndrome coronavirus 2
AYFNMVYMPA

SEQ ID NO: 4614 - protein, 10 aa, Severe acute respiratory syndrome coronavirus 2
FNMVYMPASW

SEQ ID NO: 4615 - protein, 10 aa, Severe acute respiratory syndrome coronavirus 2
NMVYMPASWV

SEQ ID NO: 4616 - protein, 10 aa, Severe acute respiratory syndrome coronavirus 2
MVYMPASWVM

SEQ ID NO: 4617 - protein, 10 aa, Severe acute respiratory syndrome coronavirus 2
VYMPASWVMR

SEQ ID NO: 4618 - protein, 10 aa, Severe acute respiratory syndrome coronavirus 2
YMPASWVMRI

SEQ ID NO: 4619 - protein, 10 aa, Severe acute respiratory syndrome coronavirus 2
MPASWVMRIM

SEQ ID NO: 4620 - protein, 10 aa, Severe acute respiratory syndrome coronavirus 2
ASWVMRIMTW

SEQ ID NO: 4621 - protein, 10 aa, Severe acute respiratory syndrome coronavirus 2
SWVMRIMTWL

SEQ ID NO: 4622 - protein, 10 aa, Severe acute respiratory syndrome coronavirus 2
VMRIMTWLDM

SEQ ID NO: 4623 - protein, 10 aa, Severe acute respiratory syndrome coronavirus 2
MRIMTWLDMV

SEQ ID NO: 4624 - protein, 10 aa, Severe acute respiratory syndrome coronavirus 2
RIMTWLDMVD

SEQ ID NO: 4625 - protein, 10 aa, Severe acute respiratory syndrome coronavirus 2
TWLDMVDTSL

SEQ ID NO: 4626 - protein, 10 aa, Severe acute respiratory syndrome coronavirus 2
WLDMVDTSLS

SEQ ID NO: 4627 - protein, 10 aa, Severe acute respiratory syndrome coronavirus 2
DMVDTSLSGF

SEQ ID NO: 4628 - protein, 10 aa, Severe acute respiratory syndrome coronavirus 2
MVDTSLSGFK

SEQ ID NO: 4629 - protein, 10 aa, Severe acute respiratory syndrome coronavirus 2
DTSLSGFKLK

SEQ ID NO: 4630 - protein, 10 aa, Severe acute respiratory syndrome coronavirus 2
FKLKDCVMYA

SEQ ID NO: 4631 - protein, 10 aa, Severe acute respiratory syndrome coronavirus 2
KLKDCVMYAS

SEQ ID NO: 4632 - protein, 10 aa, Severe acute respiratory syndrome coronavirus 2
DCVMYASAVV

SEQ ID NO: 4633 - protein, 10 aa, Severe acute respiratory syndrome coronavirus 2
CVMYASAVVL

SEQ ID NO: 4634 - protein, 10 aa, Severe acute respiratory syndrome coronavirus 2
VMYASAVVLL

SEQ ID NO: 4635 - protein, 10 aa, Severe acute respiratory syndrome coronavirus 2
MYASAVVLLI

SEQ ID NO: 4636 - protein, 10 aa, Severe acute respiratory syndrome coronavirus 2
YASAVVLLIL

SEQ ID NO: 4637 - protein, 10 aa, Severe acute respiratory syndrome coronavirus 2
ASAVVLLILM

SEQ ID NO: 4638 - protein, 10 aa, Severe acute respiratory syndrome coronavirus 2
AVVLLILMTA

SEQ ID NO: 4639 - protein, 10 aa, Severe acute respiratory syndrome coronavirus 2
VVLLILMTAR

SEQ ID NO: 4640 - protein, 10 aa, Severe acute respiratory syndrome coronavirus 2
LLILMTARTV

SEQ ID NO: 4641 - protein, 10 aa, Severe acute respiratory syndrome coronavirus 2
LILMTARTVY

SEQ ID NO: 4642 - protein, 10 aa, Severe acute respiratory syndrome coronavirus 2
ILMTARTVYD

SEQ ID NO: 4643 - protein, 10 aa, Severe acute respiratory syndrome coronavirus 2
ARTVYDDGAR

SEQ ID NO: 4644 - protein, 10 aa, Severe acute respiratory syndrome coronavirus 2
RTVYDDGARR

SEQ ID NO: 4645 - protein, 10 aa, Severe acute respiratory syndrome coronavirus 2
TVYDDGARRV

SEQ ID NO: 4646 - protein, 10 aa, Severe acute respiratory syndrome coronavirus 2
VYDDGARRVW

SEQ ID NO: 4647 - protein, 10 aa, Severe acute respiratory syndrome coronavirus 2
ARRVWTLMNV

SEQ ID NO: 4648 - protein, 10 aa, Severe acute respiratory syndrome coronavirus 2
RRVWTLMNVL

SEQ ID NO: 4649 - protein, 10 aa, Severe acute respiratory syndrome coronavirus 2
VWTLMNVLTL

SEQ ID NO: 4650 - protein, 10 aa, Severe acute respiratory syndrome coronavirus 2
WTLMNVLTLV

SEQ ID NO: 4651 - protein, 10 aa, Severe acute respiratory syndrome coronavirus 2
TLMNVLTLVY

SEQ ID NO: 4652 - protein, 10 aa, Severe acute respiratory syndrome coronavirus 2
LMNVLTLVYK

SEQ ID NO: 4653 - protein, 10 aa, Severe acute respiratory syndrome coronavirus 2
MNVLTLVYKV

SEQ ID NO: 4654 - protein, 10 aa, Severe acute respiratory syndrome coronavirus 2
NVLTLVYKVY

SEQ ID NO: 4655 - protein, 10 aa, Severe acute respiratory syndrome coronavirus 2
VLTLVYKVYY

SEQ ID NO: 4656 - protein, 10 aa, Severe acute respiratory syndrome coronavirus 2
VYKVYYGNAL

SEQ ID NO: 4657 - protein, 10 aa, Severe acute respiratory syndrome coronavirus 2
YYGNALDQAI

SEQ ID NO: 4658 - protein, 10 aa, Severe acute respiratory syndrome coronavirus 2
NALDQAISMW

SEQ ID NO: 4659 - protein, 10 aa, Severe acute respiratory syndrome coronavirus 2
ALDQAISMWA

SEQ ID NO: 4660 - protein, 10 aa, Severe acute respiratory syndrome coronavirus 2
LDQAISMWAL

SEQ ID NO: 4661 - protein, 10 aa, Severe acute respiratory syndrome coronavirus 2
DQAISMWALI

SEQ ID NO: 4662 - protein, 10 aa, Severe acute respiratory syndrome coronavirus 2
QAISMWALII

SEQ ID NO: 4663 - protein, 10 aa, Severe acute respiratory syndrome coronavirus 2
ISMWALIISV

SEQ ID NO: 4664 - protein, 10 aa, Severe acute respiratory syndrome coronavirus 2
SMWALIISVT

SEQ ID NO: 4665 - protein, 10 aa, Severe acute respiratory syndrome coronavirus 2
ALIISVTSNY

SEQ ID NO: 4666 - protein, 10 aa, Severe acute respiratory syndrome coronavirus 2
LIISVTSNYS

SEQ ID NO: 4667 - protein, 10 aa, Severe acute respiratory syndrome coronavirus 2
ISVTSNYSGV

SEQ ID NO: 4668 - protein, 10 aa, Severe acute respiratory syndrome coronavirus 2
SVTSNYSGVV

SEQ ID NO: 4669 - protein, 10 aa, Severe acute respiratory syndrome coronavirus 2
SNYSGVVTTV

SEQ ID NO: 4670 - protein, 10 aa, Severe acute respiratory syndrome coronavirus 2
NYSGVVTTVM

SEQ ID NO: 4671 - protein, 10 aa, Severe acute respiratory syndrome coronavirus 2
YSGVVTTVMF

SEQ ID NO: 4672 - protein, 10 aa, Severe acute respiratory syndrome coronavirus 2
SGVVTTVMFL

SEQ ID NO: 4673 - protein, 10 aa, Severe acute respiratory syndrome coronavirus 2
GVVTTVMFLA

SEQ ID NO: 4674 - protein, 10 aa, Severe acute respiratory syndrome coronavirus 2
VVTTVMFLAR

SEQ ID NO: 4675 - protein, 10 aa, Severe acute respiratory syndrome coronavirus 2
TTVMFLARGI

SEQ ID NO: 4676 - protein, 10 aa, Severe acute respiratory syndrome coronavirus 2
TVMFLARGIV

SEQ ID NO: 4677 - protein, 10 aa, Severe acute respiratory syndrome coronavirus 2
VMFLARGIVF

SEQ ID NO: 4678 - protein, 10 aa, Severe acute respiratory syndrome coronavirus 2
MFLARGIVFM

SEQ ID NO: 4679 - protein, 10 aa, Severe acute respiratory syndrome coronavirus 2
FLARGIVFMC

SEQ ID NO: 4680 - protein, 10 aa, Severe acute respiratory syndrome coronavirus 2
RGIVFMCVEY

SEQ ID NO: 4681 - protein, 10 aa, Severe acute respiratory syndrome coronavirus 2
VFMCVEYCPI

SEQ ID NO: 4682 - protein, 10 aa, Severe acute respiratory syndrome coronavirus 2
FMCVEYCPIF

SEQ ID NO: 4683 - protein, 10 aa, Severe acute respiratory syndrome coronavirus 2
CVEYCPIFFI

SEQ ID NO: 4684 - protein, 10 aa, Severe acute respiratory syndrome coronavirus 2
VEYCPIFFIT

SEQ ID NO: 4685 - protein, 10 aa, Severe acute respiratory syndrome coronavirus 2
CPIFFITGNT

SEQ ID NO: 4686 - protein, 10 aa, Severe acute respiratory syndrome coronavirus 2
FITGNTLQCI

SEQ ID NO: 4687 - protein, 10 aa, Severe acute respiratory syndrome coronavirus 2
ITGNTLQCIM

SEQ ID NO: 4688 - protein, 10 aa, Severe acute respiratory syndrome coronavirus 2
GNTLQCIMLV

SEQ ID NO: 4689 - protein, 10 aa, Severe acute respiratory syndrome coronavirus 2
NTLQCIMLVY

SEQ ID NO: 4690 - protein, 10 aa, Severe acute respiratory syndrome coronavirus 2
LQCIMLVYCF

SEQ ID NO: 4691 - protein, 10 aa, Severe acute respiratory syndrome coronavirus 2
IMLVYCFLGY

SEQ ID NO: 4692 - protein, 10 aa, Severe acute respiratory syndrome coronavirus 2
MLVYCFLGYF

SEQ ID NO: 4693 - protein, 10 aa, Severe acute respiratory syndrome coronavirus 2
CFLGYFCTCY

SEQ ID NO: 4694 - protein, 10 aa, Severe acute respiratory syndrome coronavirus 2
FLGYFCTCYF

SEQ ID NO: 4695 - protein, 10 aa, Severe acute respiratory syndrome coronavirus 2
GYFCTCYFGL

SEQ ID NO: 4696 - protein, 10 aa, Severe acute respiratory syndrome coronavirus 2
YFCTCYFGLF

SEQ ID NO: 4697 - protein, 10 aa, Severe acute respiratory syndrome coronavirus 2
TCYFGLFCLL

SEQ ID NO: 4698 - protein, 10 aa, Severe acute respiratory syndrome coronavirus 2
YFGLFCLLNR

SEQ ID NO: 4699 - protein, 10 aa, Severe acute respiratory syndrome coronavirus 2
FGLFCLLNRY

SEQ ID NO: 4700 - protein, 10 aa, Severe acute respiratory syndrome coronavirus 2
GLFCLLNRYF

SEQ ID NO: 4701 - protein, 10 aa, Severe acute respiratory syndrome coronavirus 2
LFCLLNRYFR

SEQ ID NO: 4702 - protein, 10 aa, Severe acute respiratory syndrome coronavirus 2
FCLLNRYFRL

SEQ ID NO: 4703 - protein, 10 aa, Severe acute respiratory syndrome coronavirus 2
CLLNRYFRLT

SEQ ID NO: 4704 - protein, 10 aa, Severe acute respiratory syndrome coronavirus 2
LLNRYFRLTL

SEQ ID NO: 4705 - protein, 10 aa, Severe acute respiratory syndrome coronavirus 2
NRYFRLTLGV

SEQ ID NO: 4706 - protein, 10 aa, Severe acute respiratory syndrome coronavirus 2
RYFRLTLGVY

SEQ ID NO: 4707 - protein, 10 aa, Severe acute respiratory syndrome coronavirus 2
FRLTLGVYDY

SEQ ID NO: 4708 - protein, 10 aa, Severe acute respiratory syndrome coronavirus 2
RLTLGVYDYL

SEQ ID NO: 4709 - protein, 10 aa, Severe acute respiratory syndrome coronavirus 2
LTLGVYDYLV

SEQ ID NO: 4710 - protein, 10 aa, Severe acute respiratory syndrome coronavirus 2
LGVYDYLVST

SEQ ID NO: 4711 - protein, 10 aa, Severe acute respiratory syndrome coronavirus 2
YDYLVSTQEF

SEQ ID NO: 4712 - protein, 10 aa, Severe acute respiratory syndrome coronavirus 2
DYLVSTQEFR

SEQ ID NO: 4713 - protein, 10 aa, Severe acute respiratory syndrome coronavirus 2
YLVSTQEFRY

SEQ ID NO: 4714 - protein, 10 aa, Severe acute respiratory syndrome coronavirus 2
EFRYMNSQGL

SEQ ID NO: 4715 - protein, 10 aa, Severe acute respiratory syndrome coronavirus 2
FRYMNSQGLL

SEQ ID NO: 4716 - protein, 10 aa, Severe acute respiratory syndrome coronavirus 2
YMNSQGLLPP

SEQ ID NO: 4717 - protein, 10 aa, Severe acute respiratory syndrome coronavirus 2
MNSQGLLPPK

SEQ ID NO: 4718 - protein, 10 aa, Severe acute respiratory syndrome coronavirus 2
LPPKNSIDAF

SEQ ID NO: 4719 - protein, 10 aa, Severe acute respiratory syndrome coronavirus 2
NSIDAFKLNI

SEQ ID NO: 4720 - protein, 10 aa, Severe acute respiratory syndrome coronavirus 2
SIDAFKLNIK

SEQ ID NO: 4721 - protein, 10 aa, Severe acute respiratory syndrome coronavirus 2
FKLNIKLLGV

SEQ ID NO: 4722 - protein, 10 aa, Severe acute respiratory syndrome coronavirus 2
KLNIKLLGVG

SEQ ID NO: 4723 - protein, 10 aa, Severe acute respiratory syndrome coronavirus 2
NIKLLGVGGK

SEQ ID NO: 4724 - protein, 10 aa, Severe acute respiratory syndrome coronavirus 2
CIKVATVQSK

SEQ ID NO: 4725 - protein, 10 aa, Severe acute respiratory syndrome coronavirus 2
IKVATVQSKM

SEQ ID NO: 4726 - protein, 10 aa, Severe acute respiratory syndrome coronavirus 2
ATVQSKMSDV

SEQ ID NO: 4727 - protein, 10 aa, Severe acute respiratory syndrome coronavirus 2
TVQSKMSDVK

SEQ ID NO: 4728 - protein, 10 aa, Severe acute respiratory syndrome coronavirus 2
KMSDVKCTSV

SEQ ID NO: 4729 - protein, 10 aa, Severe acute respiratory syndrome coronavirus 2
MSDVKCTSVV

SEQ ID NO: 4730 - protein, 10 aa, Severe acute respiratory syndrome coronavirus 2
KCTSVVLLSV

SEQ ID NO: 4731 - protein, 10 aa, Severe acute respiratory syndrome coronavirus 2
VVLLSVLQQL

SEQ ID NO: 4732 - protein, 10 aa, Severe acute respiratory syndrome coronavirus 2
VLLSVLQQLR

SEQ ID NO: 4733 - protein, 10 aa, Severe acute respiratory syndrome coronavirus 2
LLSVLQQLRV

SEQ ID NO: 4734 - protein, 10 aa, Severe acute respiratory syndrome coronavirus 2
QQLRVESSSK

SEQ ID NO: 4735 - protein, 10 aa, Severe acute respiratory syndrome coronavirus 2
RVESSSKLWA

SEQ ID NO: 4736 - protein, 10 aa, Severe acute respiratory syndrome coronavirus 2
SKLWAQCVQL

SEQ ID NO: 4737 - protein, 10 aa, Severe acute respiratory syndrome coronavirus 2
KLWAQCVQLH

SEQ ID NO: 4738 - protein, 10 aa, Severe acute respiratory syndrome coronavirus 2
VQLHNDILLA

SEQ ID NO: 4739 - protein, 10 aa, Severe acute respiratory syndrome coronavirus 2
QLHNDILLAK

SEQ ID NO: 4740 - protein, 10 aa, Severe acute respiratory syndrome coronavirus 2
ILLAKDTTEA

SEQ ID NO: 4741 - protein, 10 aa, Severe acute respiratory syndrome coronavirus 2
LLAKDTTEAF

SEQ ID NO: 4742 - protein, 10 aa, Severe acute respiratory syndrome coronavirus 2
KDTTEAFEKM

SEQ ID NO: 4743 - protein, 10 aa, Severe acute respiratory syndrome coronavirus 2
DTTEAFEKMV

SEQ ID NO: 4744 - protein, 10 aa, Severe acute respiratory syndrome coronavirus 2
TEAFEKMVSL

SEQ ID NO: 4745 - protein, 10 aa, Severe acute respiratory syndrome coronavirus 2
EAFEKMVSLL

SEQ ID NO: 4746 - protein, 10 aa, Severe acute respiratory syndrome coronavirus 2
FEKMVSLLSV

SEQ ID NO: 4747 - protein, 10 aa, Severe acute respiratory syndrome coronavirus 2
EKMVSLLSVL

SEQ ID NO: 4748 - protein, 10 aa, Severe acute respiratory syndrome coronavirus 2
KMVSLLSVLL

SEQ ID NO: 4749 - protein, 10 aa, Severe acute respiratory syndrome coronavirus 2
MVSLLSVLLS

SEQ ID NO: 4750 - protein, 10 aa, Severe acute respiratory syndrome coronavirus 2
VSLLSVLLSM

SEQ ID NO: 4751 - protein, 10 aa, Severe acute respiratory syndrome coronavirus 2
SLLSVLLSMQ

SEQ ID NO: 4752 - protein, 10 aa, Severe acute respiratory syndrome coronavirus 2
SVLLSMQGAV

SEQ ID NO: 4753 - protein, 10 aa, Severe acute respiratory syndrome coronavirus 2
LLSMQGAVDI

SEQ ID NO: 4754 - protein, 10 aa, Severe acute respiratory syndrome coronavirus 2
SMQGAVDINK

SEQ ID NO: 4755 - protein, 10 aa, Severe acute respiratory syndrome coronavirus 2
MQGAVDINKL

SEQ ID NO: 4756 - protein, 10 aa, Severe acute respiratory syndrome coronavirus 2
KLCEEMLDNR

SEQ ID NO: 4757 - protein, 10 aa, Severe acute respiratory syndrome coronavirus 2
EEMLDNRATL

SEQ ID NO: 4758 - protein, 10 aa, Severe acute respiratory syndrome coronavirus 2
MLDNRATLQA

SEQ ID NO: 4759 - protein, 10 aa, Severe acute respiratory syndrome coronavirus 2
ATLQAIASEF

SEQ ID NO: 4760 - protein, 10 aa, Severe acute respiratory syndrome coronavirus 2
QAIASEFSSL

SEQ ID NO: 4761 - protein, 10 aa, Severe acute respiratory syndrome coronavirus 2
ASEFSSLPSY

SEQ ID NO: 4762 - protein, 10 aa, Severe acute respiratory syndrome coronavirus 2
SEFSSLPSYA

SEQ ID NO: 4763 - protein, 10 aa, Severe acute respiratory syndrome coronavirus 2
EFSSLPSYAA

SEQ ID NO: 4764 - protein, 10 aa, Severe acute respiratory syndrome coronavirus 2
FSSLPSYAAF

SEQ ID NO: 4765 - protein, 10 aa, Severe acute respiratory syndrome coronavirus 2
SSLPSYAAFA

SEQ ID NO: 4766 - protein, 10 aa, Severe acute respiratory syndrome coronavirus 2
SLPSYAAFAT

SEQ ID NO: 4767 - protein, 10 aa, Severe acute respiratory syndrome coronavirus 2
LPSYAAFATA

SEQ ID NO: 4768 - protein, 10 aa, Severe acute respiratory syndrome coronavirus 2
YAAFATAQEA

SEQ ID NO: 4769 - protein, 10 aa, Severe acute respiratory syndrome coronavirus 2
AAFATAQEAY

SEQ ID NO: 4770 - protein, 10 aa, Severe acute respiratory syndrome coronavirus 2
AQEAYEQAVA

SEQ ID NO: 4771 - protein, 10 aa, Severe acute respiratory syndrome coronavirus 2
KKLKKSLNVA

SEQ ID NO: 4772 - protein, 10 aa, Severe acute respiratory syndrome coronavirus 2
KLKKSLNVAK

SEQ ID NO: 4773 - protein, 10 aa, Severe acute respiratory syndrome coronavirus 2
KSLNVAKSEF

SEQ ID NO: 4774 - protein, 10 aa, Severe acute respiratory syndrome coronavirus 2
LNVAKSEFDR

SEQ ID NO: 4775 - protein, 10 aa, Severe acute respiratory syndrome coronavirus 2
KSEFDRDAAM

SEQ ID NO: 4776 - protein, 10 aa, Severe acute respiratory syndrome coronavirus 2
EFDRDAAMQR

SEQ ID NO: 4777 - protein, 10 aa, Severe acute respiratory syndrome coronavirus 2
AAMQRKLEKM

SEQ ID NO: 4778 - protein, 10 aa, Severe acute respiratory syndrome coronavirus 2
KLEKMADQAM

SEQ ID NO: 4779 - protein, 10 aa, Severe acute respiratory syndrome coronavirus 2
KMADQAMTQM

SEQ ID NO: 4780 - protein, 10 aa, Severe acute respiratory syndrome coronavirus 2
MADQAMTQMY

SEQ ID NO: 4781 - protein, 10 aa, Severe acute respiratory syndrome coronavirus 2
ADQAMTQMYK

SEQ ID NO: 4782 - protein, 10 aa, Severe acute respiratory syndrome coronavirus 2
AMTQMYKQAR

SEQ ID NO: 4783 - protein, 10 aa, Severe acute respiratory syndrome coronavirus 2
MYKQARSEDK

SEQ ID NO: 4784 - protein, 10 aa, Severe acute respiratory syndrome coronavirus 2
RAKVTSAMQT

SEQ ID NO: 4785 - protein, 10 aa, Severe acute respiratory syndrome coronavirus 2
AKVTSAMQTM

SEQ ID NO: 4786 - protein, 10 aa, Severe acute respiratory syndrome coronavirus 2
KVTSAMQTML

SEQ ID NO: 4787 - protein, 10 aa, Severe acute respiratory syndrome coronavirus 2
VTSAMQTMLF

SEQ ID NO: 4788 - protein, 10 aa, Severe acute respiratory syndrome coronavirus 2
SAMQTMLFTM

SEQ ID NO: 4789 - protein, 10 aa, Severe acute respiratory syndrome coronavirus 2
AMQTMLFTML

SEQ ID NO: 4790 - protein, 10 aa, Severe acute respiratory syndrome coronavirus 2
MQTMLFTMLR

SEQ ID NO: 4791 - protein, 10 aa, Severe acute respiratory syndrome coronavirus 2
QTMLFTMLRK

SEQ ID NO: 4792 - protein, 10 aa, Severe acute respiratory syndrome coronavirus 2
TMLFTMLRKL

SEQ ID NO: 4793 - protein, 10 aa, Severe acute respiratory syndrome coronavirus 2
MLFTMLRKLD

SEQ ID NO: 4794 - protein, 10 aa, Severe acute respiratory syndrome coronavirus 2
MLRKLDNDAL

SEQ ID NO: 4795 - protein, 10 aa, Severe acute respiratory syndrome coronavirus 2
KLDNDALNNI

SEQ ID NO: 4796 - protein, 10 aa, Severe acute respiratory syndrome coronavirus 2
DALNNIINNA

SEQ ID NO: 4797 - protein, 10 aa, Severe acute respiratory syndrome coronavirus 2
ALNNIINNAR

SEQ ID NO: 4798 - protein, 10 aa, Severe acute respiratory syndrome coronavirus 2
ARDGCVPLNI

SEQ ID NO: 4799 - protein, 10 aa, Severe acute respiratory syndrome coronavirus 2
LNIIPLTTAA

SEQ ID NO: 4800 - protein, 10 aa, Severe acute respiratory syndrome coronavirus 2
NIIPLTTAAK

SEQ ID NO: 4801 - protein, 10 aa, Severe acute respiratory syndrome coronavirus 2
IIPLTTAAKL

SEQ ID NO: 4802 - protein, 10 aa, Severe acute respiratory syndrome coronavirus 2
IPLTTAAKLM

SEQ ID NO: 4803 - protein, 10 aa, Severe acute respiratory syndrome coronavirus 2
LTTAAKLMVV

SEQ ID NO: 4804 - protein, 10 aa, Severe acute respiratory syndrome coronavirus 2
TTAAKLMVVI

SEQ ID NO: 4805 - protein, 10 aa, Severe acute respiratory syndrome coronavirus 2
AKLMVVIPDY

SEQ ID NO: 4806 - protein, 10 aa, Severe acute respiratory syndrome coronavirus 2
MVVIPDYNTY

SEQ ID NO: 4807 - protein, 10 aa, Severe acute respiratory syndrome coronavirus 2
VVIPDYNTYK

SEQ ID NO: 4808 - protein, 10 aa, Severe acute respiratory syndrome coronavirus 2
YKNTCDGTTF

SEQ ID NO: 4809 - protein, 10 aa, Severe acute respiratory syndrome coronavirus 2
NTCDGTTFTY

SEQ ID NO: 4810 - protein, 10 aa, Severe acute respiratory syndrome coronavirus 2
DGTTFTYASA

SEQ ID NO: 4811 - protein, 10 aa, Severe acute respiratory syndrome coronavirus 2
TTFTYASALW

SEQ ID NO: 4812 - protein, 10 aa, Severe acute respiratory syndrome coronavirus 2
FTYASALWEI

SEQ ID NO: 4813 - protein, 10 aa, Severe acute respiratory syndrome coronavirus 2
TYASALWEIQ

SEQ ID NO: 4814 - protein, 10 aa, Severe acute respiratory syndrome coronavirus 2
SALWEIQQVV

SEQ ID NO: 4815 - protein, 10 aa, Severe acute respiratory syndrome coronavirus 2
ALWEIQQVVD

SEQ ID NO: 4816 - protein, 10 aa, Severe acute respiratory syndrome coronavirus 2
KIVQLSEISM

SEQ ID NO: 4817 - protein, 10 aa, Severe acute respiratory syndrome coronavirus 2
EISMDNSPNL

SEQ ID NO: 4818 - protein, 10 aa, Severe acute respiratory syndrome coronavirus 2
SMDNSPNLAW

SEQ ID NO: 4819 - protein, 10 aa, Severe acute respiratory syndrome coronavirus 2
NSPNLAWPLI

SEQ ID NO: 4820 - protein, 10 aa, Severe acute respiratory syndrome coronavirus 2
SPNLAWPLIV

SEQ ID NO: 4821 - protein, 10 aa, Severe acute respiratory syndrome coronavirus 2
NLAWPLIVTA

SEQ ID NO: 4822 - protein, 10 aa, Severe acute respiratory syndrome coronavirus 2
LAWPLIVTAL

SEQ ID NO: 4823 - protein, 10 aa, Severe acute respiratory syndrome coronavirus 2
AWPLIVTALR

SEQ ID NO: 4824 - protein, 10 aa, Severe acute respiratory syndrome coronavirus 2
WPLIVTALRA

SEQ ID NO: 4825 - protein, 10 aa, Severe acute respiratory syndrome coronavirus 2
VTALRANSAV

SEQ ID NO: 4826 - protein, 10 aa, Severe acute respiratory syndrome coronavirus 2
TALRANSAVK

SEQ ID NO: 4827 - protein, 10 aa, Severe acute respiratory syndrome coronavirus 2
ALRANSAVKL

SEQ ID NO: 4828 - protein, 10 aa, Severe acute respiratory syndrome coronavirus 2
KLQNNELSPV

SEQ ID NO: 4829 - protein, 10 aa, Severe acute respiratory syndrome coronavirus 2
LQNNELSPVA

SEQ ID NO: 4830 - protein, 10 aa, Severe acute respiratory syndrome coronavirus 2
NNELSPVALR

SEQ ID NO: 4831 - protein, 10 aa, Severe acute respiratory syndrome coronavirus 2
SPVALRQMSC

SEQ ID NO: 4832 - protein, 10 aa, Severe acute respiratory syndrome coronavirus 2
VALRQMSCAA

SEQ ID NO: 4833 - protein, 10 aa, Severe acute respiratory syndrome coronavirus 2
RQMSCAAGTT

SEQ ID NO: 4834 - protein, 10 aa, Severe acute respiratory syndrome coronavirus 2
ACTDDNALAY

SEQ ID NO: 4835 - protein, 10 aa, Severe acute respiratory syndrome coronavirus 2
CTDDNALAYY

SEQ ID NO: 4836 - protein, 10 aa, Severe acute respiratory syndrome coronavirus 2
NALAYYNTTK

SEQ ID NO: 4837 - protein, 10 aa, Severe acute respiratory syndrome coronavirus 2
AYYNTTKGGR

SEQ ID NO: 4838 - protein, 10 aa, Severe acute respiratory syndrome coronavirus 2
YYNTTKGGRF

SEQ ID NO: 4839 - protein, 10 aa, Severe acute respiratory syndrome coronavirus 2
TTKGGRFVLA

SEQ ID NO: 4840 - protein, 10 aa, Severe acute respiratory syndrome coronavirus 2
KGGRFVLALL

SEQ ID NO: 4841 - protein, 10 aa, Severe acute respiratory syndrome coronavirus 2
GGRFVLALLS

SEQ ID NO: 4842 - protein, 10 aa, Severe acute respiratory syndrome coronavirus 2
RFVLALLSDL

SEQ ID NO: 4843 - protein, 10 aa, Severe acute respiratory syndrome coronavirus 2
LALLSDLQDL

SEQ ID NO: 4844 - protein, 10 aa, Severe acute respiratory syndrome coronavirus 2
ALLSDLQDLK

SEQ ID NO: 4845 - protein, 10 aa, Severe acute respiratory syndrome coronavirus 2
LLSDLQDLKW

SEQ ID NO: 4846 - protein, 10 aa, Severe acute respiratory syndrome coronavirus 2
SDLQDLKWAR

SEQ ID NO: 4847 - protein, 10 aa, Severe acute respiratory syndrome coronavirus 2
QDLKWARFPK

SEQ ID NO: 4848 - protein, 10 aa, Severe acute respiratory syndrome coronavirus 2
FPKSDGTGTI

SEQ ID NO: 4849 - protein, 10 aa, Severe acute respiratory syndrome coronavirus 2
PKSDGTGTIY

SEQ ID NO: 4850 - protein, 10 aa, Severe acute respiratory syndrome coronavirus 2
IYTELEPPCR

SEQ ID NO: 4851 - protein, 10 aa, Severe acute respiratory syndrome coronavirus 2
YTELEPPCRF

SEQ ID NO: 4852 - protein, 10 aa, Severe acute respiratory syndrome coronavirus 2
FVTDTPKGPK

SEQ ID NO: 4853 - protein, 10 aa, Severe acute respiratory syndrome coronavirus 2
TPKGPKVKYL

SEQ ID NO: 4854 - protein, 10 aa, Severe acute respiratory syndrome coronavirus 2
KGPKVKYLYF

SEQ ID NO: 4855 - protein, 10 aa, Severe acute respiratory syndrome coronavirus 2
PKVKYLYFIK

SEQ ID NO: 4856 - protein, 10 aa, Severe acute respiratory syndrome coronavirus 2
KVKYLYFIKG

SEQ ID NO: 4857 - protein, 10 aa, Severe acute respiratory syndrome coronavirus 2
LYFIKGLNNL

SEQ ID NO: 4858 - protein, 10 aa, Severe acute respiratory syndrome coronavirus 2
FIKGLNNLNR

SEQ ID NO: 4859 - protein, 10 aa, Severe acute respiratory syndrome coronavirus 2
GLNNLNRGMV

SEQ ID NO: 4860 - protein, 10 aa, Severe acute respiratory syndrome coronavirus 2
NRGMVLGSLA

SEQ ID NO: 4861 - protein, 10 aa, Severe acute respiratory syndrome coronavirus 2
RGMVLGSLAA

SEQ ID NO: 4862 - protein, 10 aa, Severe acute respiratory syndrome coronavirus 2
GMVLGSLAAT

SEQ ID NO: 4863 - protein, 10 aa, Severe acute respiratory syndrome coronavirus 2
MVLGSLAATV

SEQ ID NO: 4864 - protein, 10 aa, Severe acute respiratory syndrome coronavirus 2
VLGSLAATVR

SEQ ID NO: 4865 - protein, 10 aa, Severe acute respiratory syndrome coronavirus 2
LGSLAATVRL

SEQ ID NO: 4866 - protein, 10 aa, Severe acute respiratory syndrome coronavirus 2
SLAATVRLQA

SEQ ID NO: 4867 - protein, 10 aa, Severe acute respiratory syndrome coronavirus 2
ATVRLQAGNA

SEQ ID NO: 4868 - protein, 10 aa, Severe acute respiratory syndrome coronavirus 2
RLQAGNATEV

SEQ ID NO: 4869 - protein, 10 aa, Severe acute respiratory syndrome coronavirus 2
ATEVPANSTV

SEQ ID NO: 4870 - protein, 10 aa, Severe acute respiratory syndrome coronavirus 2
TEVPANSTVL

SEQ ID NO: 4871 - protein, 10 aa, Severe acute respiratory syndrome coronavirus 2
VPANSTVLSF

SEQ ID NO: 4872 - protein, 10 aa, Severe acute respiratory syndrome coronavirus 2
NSTVLSFCAF

SEQ ID NO: 4873 - protein, 10 aa, Severe acute respiratory syndrome coronavirus 2
STVLSFCAFA

SEQ ID NO: 4874 - protein, 10 aa, Severe acute respiratory syndrome coronavirus 2
TVLSFCAFAV

SEQ ID NO: 4875 - protein, 10 aa, Severe acute respiratory syndrome coronavirus 2
VLSFCAFAVD

SEQ ID NO: 4876 - protein, 10 aa, Severe acute respiratory syndrome coronavirus 2
FCAFAVDAAK

SEQ ID NO: 4877 - protein, 10 aa, Severe acute respiratory syndrome coronavirus 2
AFAVDAAKAY

SEQ ID NO: 4878 - protein, 10 aa, Severe acute respiratory syndrome coronavirus 2
FAVDAAKAYK

SEQ ID NO: 4879 - protein, 10 aa, Severe acute respiratory syndrome coronavirus 2
DYLASGGQPI

SEQ ID NO: 4880 - protein, 10 aa, Severe acute respiratory syndrome coronavirus 2
YLASGGQPIT

SEQ ID NO: 4881 - protein, 10 aa, Severe acute respiratory syndrome coronavirus 2
QPITNCVKML

SEQ ID NO: 4882 - protein, 10 aa, Severe acute respiratory syndrome coronavirus 2
HTGTGQAITV

SEQ ID NO: 4883 - protein, 10 aa, Severe acute respiratory syndrome coronavirus 2
ESFGGASCCL

SEQ ID NO: 4884 - protein, 10 aa, Severe acute respiratory syndrome coronavirus 2
SFGGASCCLY

SEQ ID NO: 4885 - protein, 10 aa, Severe acute respiratory syndrome coronavirus 2
GGASCCLYCR

SEQ ID NO: 4886 - protein, 10 aa, Severe acute respiratory syndrome coronavirus 2
RCHIDHPNPK

SEQ ID NO: 4887 - protein, 10 aa, Severe acute respiratory syndrome coronavirus 2
HPNPKGFCDL

SEQ ID NO: 4888 - protein, 10 aa, Severe acute respiratory syndrome coronavirus 2
KGFCDLKGKY

SEQ ID NO: 4889 - protein, 10 aa, Severe acute respiratory syndrome coronavirus 2
IPTTCANDPV

SEQ ID NO: 4890 - protein, 10 aa, Severe acute respiratory syndrome coronavirus 2
TTCANDPVGF

SEQ ID NO: 4891 - protein, 10 aa, Severe acute respiratory syndrome coronavirus 2
CANDPVGFTL

SEQ ID NO: 4892 - protein, 10 aa, Severe acute respiratory syndrome coronavirus 2
FTLKNTVCTV

SEQ ID NO: 4893 - protein, 10 aa, Severe acute respiratory syndrome coronavirus 2
TLKNTVCTVC

SEQ ID NO: 4894 - protein, 10 aa, Severe acute respiratory syndrome coronavirus 2
KNTVCTVCGM

SEQ ID NO: 4895 - protein, 10 aa, Severe acute respiratory syndrome coronavirus 2
NTVCTVCGMW

SEQ ID NO: 4896 - protein, 10 aa, Severe acute respiratory syndrome coronavirus 2
TVCTVCGMWK

SEQ ID NO: 4897 - protein, 10 aa, Severe acute respiratory syndrome coronavirus 2
CTVCGMWKGY

SEQ ID NO: 4898 - protein, 10 aa, Severe acute respiratory syndrome coronavirus 2
GYGCSCDQLR

SEQ ID NO: 4899 - protein, 10 aa, Severe acute respiratory syndrome coronavirus 2
QLREPMLQSA

SEQ ID NO: 4900 - protein, 10 aa, Severe acute respiratory syndrome coronavirus 2
REPMLQSADA

SEQ ID NO: 4901 - protein, 10 aa, Severe acute respiratory syndrome coronavirus 2
MLQSADAQSF

SEQ ID NO: 4902 - protein, 10 aa, Severe acute respiratory syndrome coronavirus 2
LQSADAQSFL

SEQ ID NO: 4903 - protein, 11 aa, Severe acute respiratory syndrome coronavirus 2
KTHVQLSLPVL

SEQ ID NO: 4904 - protein, 11 aa, Severe acute respiratory syndrome coronavirus 2
VQLSLPVLQVR

SEQ ID NO: 4905 - protein, 11 aa, Severe acute respiratory syndrome coronavirus 2
LQVRDVLVRGF

SEQ ID NO: 4906 - protein, 11 aa, Severe acute respiratory syndrome coronavirus 2
DSVEEVLSEAR

SEQ ID NO: 4907 - protein, 11 aa, Severe acute respiratory syndrome coronavirus 2
EVLSEARQHLK

SEQ ID NO: 4908 - protein, 11 aa, Severe acute respiratory syndrome coronavirus 2
RQHLKDGTCGL

SEQ ID NO: 4909 - protein, 11 aa, Severe acute respiratory syndrome coronavirus 2
VEVEKGVLPQL

SEQ ID NO: 4910 - protein, 11 aa, Severe acute respiratory syndrome coronavirus 2
GVLPQLEQPYV

SEQ ID NO: 4911 - protein, 11 aa, Severe acute respiratory syndrome coronavirus 2
VLPQLEQPYVF

SEQ ID NO: 4912 - protein, 11 aa, Severe acute respiratory syndrome coronavirus 2
APHGHVMVELV

SEQ ID NO: 4913 - protein, 11 aa, Severe acute respiratory syndrome coronavirus 2
GHVMVELVAEL

SEQ ID NO: 4914 - protein, 11 aa, Severe acute respiratory syndrome coronavirus 2
MVELVAELEGI

SEQ ID NO: 4915 - protein, 11 aa, Severe acute respiratory syndrome coronavirus 2
GRSGETLGVLV

SEQ ID NO: 4916 - protein, 11 aa, Severe acute respiratory syndrome coronavirus 2
GETLGVLVPHV

SEQ ID NO: 4917 - protein, 11 aa, Severe acute respiratory syndrome coronavirus 2
LGVLVPHVGEI

SEQ ID NO: 4918 - protein, 11 aa, Severe acute respiratory syndrome coronavirus 2
VLVPHVGEIPV

SEQ ID NO: 4919 - protein, 11 aa, Severe acute respiratory syndrome coronavirus 2
VPHVGEIPVAY

SEQ ID NO: 4920 - protein, 11 aa, Severe acute respiratory syndrome coronavirus 2
PHVGEIPVAYR

SEQ ID NO: 4921 - protein, 11 aa, Severe acute respiratory syndrome coronavirus 2
HVGEIPVAYRK

SEQ ID NO: 4922 - protein, 11 aa, Severe acute respiratory syndrome coronavirus 2
GEIPVAYRKVL

SEQ ID NO: 4923 - protein, 11 aa, Severe acute respiratory syndrome coronavirus 2
IPVAYRKVLLR

SEQ ID NO: 4924 - protein, 11 aa, Severe acute respiratory syndrome coronavirus 2
RKVLLRKNGNK

SEQ ID NO: 4925 - protein, 11 aa, Severe acute respiratory syndrome coronavirus 2
GHSYGADLKSF

SEQ ID NO: 4926 - protein, 11 aa, Severe acute respiratory syndrome coronavirus 2
HSYGADLKSFD

SEQ ID NO: 4927 - protein, 11 aa, Severe acute respiratory syndrome coronavirus 2
HSSGVTRELMR

SEQ ID NO: 4928 - protein, 11 aa, Severe acute respiratory syndrome coronavirus 2
RELMRELNGGA

SEQ ID NO: 4929 - protein, 11 aa, Severe acute respiratory syndrome coronavirus 2
ELMRELNGGAY

SEQ ID NO: 4930 - protein, 11 aa, Severe acute respiratory syndrome coronavirus 2
MRELNGGAYTR

SEQ ID NO: 4931 - protein, 11 aa, Severe acute respiratory syndrome coronavirus 2
RELNGGAYTRY

SEQ ID NO: 4932 - protein, 11 aa, Severe acute respiratory syndrome coronavirus 2
ELNGGAYTRYV

SEQ ID NO: 4933 - protein, 11 aa, Severe acute respiratory syndrome coronavirus 2
YPLECIKDLLA

SEQ ID NO: 4934 - protein, 11 aa, Severe acute respiratory syndrome coronavirus 2
SCTLSEQLDFI

SEQ ID NO: 4935 - protein, 11 aa, Severe acute respiratory syndrome coronavirus 2
EIAWYTERSEK

SEQ ID NO: 4936 - protein, 11 aa, Severe acute respiratory syndrome coronavirus 2
YTERSEKSYEL

SEQ ID NO: 4937 - protein, 11 aa, Severe acute respiratory syndrome coronavirus 2
SEKSYELQTPF

SEQ ID NO: 4938 - protein, 11 aa, Severe acute respiratory syndrome coronavirus 2
KSYELQTPFEI

SEQ ID NO: 4939 - protein, 11 aa, Severe acute respiratory syndrome coronavirus 2
YELQTPFEIKL

SEQ ID NO: 4940 - protein, 11 aa, Severe acute respiratory syndrome coronavirus 2
TPFEIKLAKKF

SEQ ID NO: 4941 - protein, 11 aa, Severe acute respiratory syndrome coronavirus 2
DTFNGECPNFV

SEQ ID NO: 4942 - protein, 11 aa, Severe acute respiratory syndrome coronavirus 2
TFNGECPNFVF

SEQ ID NO: 4943 - protein, 11 aa, Severe acute respiratory syndrome coronavirus 2
VFPLNSIIKTI

SEQ ID NO: 4944 - protein, 11 aa, Severe acute respiratory syndrome coronavirus 2
IIKTIQPRVEK

SEQ ID NO: 4945 - protein, 11 aa, Severe acute respiratory syndrome coronavirus 2
KTIQPRVEKKK

SEQ ID NO: 4946 - protein, 11 aa, Severe acute respiratory syndrome coronavirus 2
FMGRIRSVYPV

SEQ ID NO: 4947 - protein, 11 aa, Severe acute respiratory syndrome coronavirus 2
MGRIRSVYPVA

SEQ ID NO: 4948 - protein, 11 aa, Severe acute respiratory syndrome coronavirus 2
RIRSVYPVASP

SEQ ID NO: 4949 - protein, 11 aa, Severe acute respiratory syndrome coronavirus 2
ETSWQTGDFVK

SEQ ID NO: 4950 - protein, 11 aa, Severe acute respiratory syndrome coronavirus 2
TGDFVKATCEF

SEQ ID NO: 4951 - protein, 11 aa, Severe acute respiratory syndrome coronavirus 2
ATCEFCGTENL

SEQ ID NO: 4952 - protein, 11 aa, Severe acute respiratory syndrome coronavirus 2
LTKEGATTCGY

SEQ ID NO: 4953 - protein, 11 aa, Severe acute respiratory syndrome coronavirus 2
TTCGYLPQNAV

SEQ ID NO: 4954 - protein, 11 aa, Severe acute respiratory syndrome coronavirus 2
GYLPQNAVVKI

SEQ ID NO: 4955 - protein, 11 aa, Severe acute respiratory syndrome coronavirus 2
YLPQNAVVKIY

SEQ ID NO: 4956 - protein, 11 aa, Severe acute respiratory syndrome coronavirus 2
HNSEVGPEHSL

SEQ ID NO: 4957 - protein, 11 aa, Severe acute respiratory syndrome coronavirus 2
SLAEYHNESGL

SEQ ID NO: 4958 - protein, 11 aa, Severe acute respiratory syndrome coronavirus 2
YHNESGLKTIL

SEQ ID NO: 4959 - protein, 11 aa, Severe acute respiratory syndrome coronavirus 2
KTILRKGGRTI

SEQ ID NO: 4960 - protein, 11 aa, Severe acute respiratory syndrome coronavirus 2
ILRKGGRTIAF

SEQ ID NO: 4961 - protein, 11 aa, Severe acute respiratory syndrome coronavirus 2
GRTIAFGGCVF

SEQ ID NO: 4962 - protein, 11 aa, Severe acute respiratory syndrome coronavirus 2
TIAFGGCVFSY

SEQ ID NO: 4963 - protein, 11 aa, Severe acute respiratory syndrome coronavirus 2
IAFGGCVFSYV

SEQ ID NO: 4964 - protein, 11 aa, Severe acute respiratory syndrome coronavirus 2
CVFSYVGCHNK

SEQ ID NO: 4965 - protein, 11 aa, Severe acute respiratory syndrome coronavirus 2
SYVGCHNKCAY

SEQ ID NO: 4966 - protein, 11 aa, Severe acute respiratory syndrome coronavirus 2
CHNKCAYWVPR

SEQ ID NO: 4967 - protein, 11 aa, Severe acute respiratory syndrome coronavirus 2
AYWVPRASANI

SEQ ID NO: 4968 - protein, 11 aa, Severe acute respiratory syndrome coronavirus 2
SEGLNDNLLEI

SEQ ID NO: 4969 - protein, 11 aa, Severe acute respiratory syndrome coronavirus 2
NLLEILQKEKV

SEQ ID NO: 4970 - protein, 11 aa, Severe acute respiratory syndrome coronavirus 2
KVNINIVGDFK

SEQ ID NO: 4971 - protein, 11 aa, Severe acute respiratory syndrome coronavirus 2
DFKLNEEIAII

SEQ ID NO: 4972 - protein, 11 aa, Severe acute respiratory syndrome coronavirus 2
KLNEEIAIILA

SEQ ID NO: 4973 - protein, 11 aa, Severe acute respiratory syndrome coronavirus 2
NEEIAIILASF

SEQ ID NO: 4974 - protein, 11 aa, Severe acute respiratory syndrome coronavirus 2
ILASFSASTSA

SEQ ID NO: 4975 - protein, 11 aa, Severe acute respiratory syndrome coronavirus 2
LASFSASTSAF

SEQ ID NO: 4976 - protein, 11 aa, Severe acute respiratory syndrome coronavirus 2
ASFSASTSAFV

SEQ ID NO: 4977 - protein, 11 aa, Severe acute respiratory syndrome coronavirus 2
SASTSAFVETV

SEQ ID NO: 4978 - protein, 11 aa, Severe acute respiratory syndrome coronavirus 2
ASTSAFVETVK

SEQ ID NO: 4979 - protein, 11 aa, Severe acute respiratory syndrome coronavirus 2
AFVETVKGLDY

SEQ ID NO: 4980 - protein, 11 aa, Severe acute respiratory syndrome coronavirus 2
FVETVKGLDYK

SEQ ID NO: 4981 - protein, 11 aa, Severe acute respiratory syndrome coronavirus 2
TVKGLDYKAFK

SEQ ID NO: 4982 - protein, 11 aa, Severe acute respiratory syndrome coronavirus 2
GLDYKAFKQIV

SEQ ID NO: 4983 - protein, 11 aa, Severe acute respiratory syndrome coronavirus 2
FKQIVESCGNF

SEQ ID NO: 4984 - protein, 11 aa, Severe acute respiratory syndrome coronavirus 2
KQIVESCGNFK

SEQ ID NO: 4985 - protein, 11 aa, Severe acute respiratory syndrome coronavirus 2
GEQKSILSPLY

SEQ ID NO: 4986 - protein, 11 aa, Severe acute respiratory syndrome coronavirus 2
QKSILSPLYAF

SEQ ID NO: 4987 - protein, 11 aa, Severe acute respiratory syndrome coronavirus 2
KSILSPLYAFA

SEQ ID NO: 4988 - protein, 11 aa, Severe acute respiratory syndrome coronavirus 2
LSPLYAFASEA

SEQ ID NO: 4989 - protein, 11 aa, Severe acute respiratory syndrome coronavirus 2
SPLYAFASEAA

SEQ ID NO: 4990 - protein, 11 aa, Severe acute respiratory syndrome coronavirus 2
PLYAFASEAAR

SEQ ID NO: 4991 - protein, 11 aa, Severe acute respiratory syndrome coronavirus 2
YAFASEAARVV

SEQ ID NO: 4992 - protein, 11 aa, Severe acute respiratory syndrome coronavirus 2
AFASEAARVVR

SEQ ID NO: 4993 - protein, 11 aa, Severe acute respiratory syndrome coronavirus 2
SEAARVVRSIF

SEQ ID NO: 4994 - protein, 11 aa, Severe acute respiratory syndrome coronavirus 2
AARVVRSIFSR

SEQ ID NO: 4995 - protein, 11 aa, Severe acute respiratory syndrome coronavirus 2
RVVRSIFSRTL

SEQ ID NO: 4996 - protein, 11 aa, Severe acute respiratory syndrome coronavirus 2
RSIFSRTLETA

SEQ ID NO: 4997 - protein, 11 aa, Severe acute respiratory syndrome coronavirus 2
RTLETAQNSVR

SEQ ID NO: 4998 - protein, 11 aa, Severe acute respiratory syndrome coronavirus 2
LETAQNSVRVL

SEQ ID NO: 4999 - protein, 11 aa, Severe acute respiratory syndrome coronavirus 2
RVLQKAAITIL

SEQ ID NO: 5000 - protein, 11 aa, Severe acute respiratory syndrome coronavirus 2
TILDGISQYSL

SEQ ID NO: 5001 - protein, 11 aa, Severe acute respiratory syndrome coronavirus 2
ILDGISQYSLR

SEQ ID NO: 5002 - protein, 11 aa, Severe acute respiratory syndrome coronavirus 2
SQYSLRLIDAM

SEQ ID NO: 5003 - protein, 11 aa, Severe acute respiratory syndrome coronavirus 2
YSLRLIDAMMF

SEQ ID NO: 5004 - protein, 11 aa, Severe acute respiratory syndrome coronavirus 2
SLRLIDAMMFT

SEQ ID NO: 5005 - protein, 11 aa, Severe acute respiratory syndrome coronavirus 2
FTSDLATNNLV

SEQ ID NO: 5006 - protein, 11 aa, Severe acute respiratory syndrome coronavirus 2
LATNNLVVMAY

SEQ ID NO: 5007 - protein, 11 aa, Severe acute respiratory syndrome coronavirus 2
LVVMAYITGGV

SEQ ID NO: 5008 - protein, 11 aa, Severe acute respiratory syndrome coronavirus 2
VVMAYITGGVV

SEQ ID NO: 5009 - protein, 11 aa, Severe acute respiratory syndrome coronavirus 2
MAYITGGVVQL

SEQ ID NO: 5010 - protein, 11 aa, Severe acute respiratory syndrome coronavirus 2
VQLTSQWLTNI

SEQ ID NO: 5011 - protein, 11 aa, Severe acute respiratory syndrome coronavirus 2
SQWLTNIFGTV

SEQ ID NO: 5012 - protein, 11 aa, Severe acute respiratory syndrome coronavirus 2
LTNIFGTVYEK

SEQ ID NO: 5013 - protein, 11 aa, Severe acute respiratory syndrome coronavirus 2
NIFGTVYEKLK

SEQ ID NO: 5014 - protein, 11 aa, Severe acute respiratory syndrome coronavirus 2
FGTVYEKLKPV

SEQ ID NO: 5015 - protein, 11 aa, Severe acute respiratory syndrome coronavirus 2
VYEKLKPVLDW

SEQ ID NO: 5016 - protein, 11 aa, Severe acute respiratory syndrome coronavirus 2
YEKLKPVLDWL

SEQ ID NO: 5017 - protein, 11 aa, Severe acute respiratory syndrome coronavirus 2
LEEKFKEGVEF

SEQ ID NO: 5018 - protein, 11 aa, Severe acute respiratory syndrome coronavirus 2
EKFKEGVEFLR

SEQ ID NO: 5019 - protein, 11 aa, Severe acute respiratory syndrome coronavirus 2
KFKEGVEFLRD

SEQ ID NO: 5020 - protein, 11 aa, Severe acute respiratory syndrome coronavirus 2
FLRDGWEIVKF

SEQ ID NO: 5021 - protein, 11 aa, Severe acute respiratory syndrome coronavirus 2
WEIVKFISTCA

SEQ ID NO: 5022 - protein, 11 aa, Severe acute respiratory syndrome coronavirus 2
IVGGQIVTCAK

SEQ ID NO: 5023 - protein, 11 aa, Severe acute respiratory syndrome coronavirus 2
EIKESVQTFFK

SEQ ID NO: 5024 - protein, 11 aa, Severe acute respiratory syndrome coronavirus 2
KESVQTFFKLV

SEQ ID NO: 5025 - protein, 11 aa, Severe acute respiratory syndrome coronavirus 2
SVQTFFKLVNK

SEQ ID NO: 5026 - protein, 11 aa, Severe acute respiratory syndrome coronavirus 2
VQTFFKLVNKF

SEQ ID NO: 5027 - protein, 11 aa, Severe acute respiratory syndrome coronavirus 2
FFKLVNKFLAL

SEQ ID NO: 5028 - protein, 11 aa, Severe acute respiratory syndrome coronavirus 2
KLVNKFLALCA

SEQ ID NO: 5029 - protein, 11 aa, Severe acute respiratory syndrome coronavirus 2
FLALCADSIII

SEQ ID NO: 5030 - protein, 11 aa, Severe acute respiratory syndrome coronavirus 2
DSIIIGGAKLK

SEQ ID NO: 5031 - protein, 11 aa, Severe acute respiratory syndrome coronavirus 2
KLKALNLGETF

SEQ ID NO: 5032 - protein, 11 aa, Severe acute respiratory syndrome coronavirus 2
LKALNLGETFV

SEQ ID NO: 5033 - protein, 11 aa, Severe acute respiratory syndrome coronavirus 2
GETFVTHSKGL

SEQ ID NO: 5034 - protein, 11 aa, Severe acute respiratory syndrome coronavirus 2
ETFVTHSKGLY

SEQ ID NO: 5035 - protein, 11 aa, Severe acute respiratory syndrome coronavirus 2
TFVTHSKGLYR

SEQ ID NO: 5036 - protein, 11 aa, Severe acute respiratory syndrome coronavirus 2
HSKGLYRKCVK

SEQ ID NO: 5037 - protein, 11 aa, Severe acute respiratory syndrome coronavirus 2
KGLYRKCVKSR

SEQ ID NO: 5038 - protein, 11 aa, Severe acute respiratory syndrome coronavirus 2
SREETGLLMPL

SEQ ID NO: 5039 - protein, 11 aa, Severe acute respiratory syndrome coronavirus 2
REETGLLMPLK

SEQ ID NO: 5040 - protein, 11 aa, Severe acute respiratory syndrome coronavirus 2
TGLLMPLKAPK

SEQ ID NO: 5041 - protein, 11 aa, Severe acute respiratory syndrome coronavirus 2
LLMPLKAPKEI

SEQ ID NO: 5042 - protein, 11 aa, Severe acute respiratory syndrome coronavirus 2
MPLKAPKEIIF

SEQ ID NO: 5043 - protein, 11 aa, Severe acute respiratory syndrome coronavirus 2
KEIIFLEGETL

SEQ ID NO: 5044 - protein, 11 aa, Severe acute respiratory syndrome coronavirus 2
FLEGETLPTEV

SEQ ID NO: 5045 - protein, 11 aa, Severe acute respiratory syndrome coronavirus 2
LEGETLPTEVL

SEQ ID NO: 5046 - protein, 11 aa, Severe acute respiratory syndrome coronavirus 2
TLPTEVLTEEV

SEQ ID NO: 5047 - protein, 11 aa, Severe acute respiratory syndrome coronavirus 2
LEQPTSEAVEA

SEQ ID NO: 5048 - protein, 11 aa, Severe acute respiratory syndrome coronavirus 2
QPTSEAVEAPL

SEQ ID NO: 5049 - protein, 11 aa, Severe acute respiratory syndrome coronavirus 2
TPVCINGLMLL

SEQ ID NO: 5050 - protein, 11 aa, Severe acute respiratory syndrome coronavirus 2
EIKDTEKYCAL

SEQ ID NO: 5051 - protein, 11 aa, Severe acute respiratory syndrome coronavirus 2
KYCALAPNMMV

SEQ ID NO: 5052 - protein, 11 aa, Severe acute respiratory syndrome coronavirus 2
YCALAPNMMVT

SEQ ID NO: 5053 - protein, 11 aa, Severe acute respiratory syndrome coronavirus 2
APNMMVTNNTF

SEQ ID NO: 5054 - protein, 11 aa, Severe acute respiratory syndrome coronavirus 2
NMMVTNNTFTL

SEQ ID NO: 5055 - protein, 11 aa, Severe acute respiratory syndrome coronavirus 2
MMVTNNTFTLK

SEQ ID NO: 5056 - protein, 11 aa, Severe acute respiratory syndrome coronavirus 2
FTLKGGAPTKV

SEQ ID NO: 5057 - protein, 11 aa, Severe acute respiratory syndrome coronavirus 2
LKGGAPTKVTF

SEQ ID NO: 5058 - protein, 11 aa, Severe acute respiratory syndrome coronavirus 2
VTFGDDTVIEV

SEQ ID NO: 5059 - protein, 11 aa, Severe acute respiratory syndrome coronavirus 2
DDTVIEVQGYK

SEQ ID NO: 5060 - protein, 11 aa, Severe acute respiratory syndrome coronavirus 2
TVIEVQGYKSV

SEQ ID NO: 5061 - protein, 11 aa, Severe acute respiratory syndrome coronavirus 2
VQGYKSVNITF

SEQ ID NO: 5062 - protein, 11 aa, Severe acute respiratory syndrome coronavirus 2
GYKSVNITFEL

SEQ ID NO: 5063 - protein, 11 aa, Severe acute respiratory syndrome coronavirus 2
SVNITFELDER

SEQ ID NO: 5064 - protein, 11 aa, Severe acute respiratory syndrome coronavirus 2
ITFELDERIDK

SEQ ID NO: 5065 - protein, 11 aa, Severe acute respiratory syndrome coronavirus 2
TFELDERIDKV

SEQ ID NO: 5066 - protein, 11 aa, Severe acute respiratory syndrome coronavirus 2
FELDERIDKVL

SEQ ID NO: 5067 - protein, 11 aa, Severe acute respiratory syndrome coronavirus 2
VLNEKCSAYTV

SEQ ID NO: 5068 - protein, 11 aa, Severe acute respiratory syndrome coronavirus 2
NEKCSAYTVEL

SEQ ID NO: 5069 - protein, 11 aa, Severe acute respiratory syndrome coronavirus 2
TEVNEFACVVA

SEQ ID NO: 5070 - protein, 11 aa, Severe acute respiratory syndrome coronavirus 2
NEFACVVADAV

SEQ ID NO: 5071 - protein, 11 aa, Severe acute respiratory syndrome coronavirus 2
ADAVIKTLQPV

SEQ ID NO: 5072 - protein, 11 aa, Severe acute respiratory syndrome coronavirus 2
IKTLQPVSELL

SEQ ID NO: 5073 - protein, 11 aa, Severe acute respiratory syndrome coronavirus 2
LQPVSELLTPL

SEQ ID NO: 5074 - protein, 11 aa, Severe acute respiratory syndrome coronavirus 2
SELLTPLGIDL

SEQ ID NO: 5075 - protein, 11 aa, Severe acute respiratory syndrome coronavirus 2
LTPLGIDLDEW

SEQ ID NO: 5076 - protein, 11 aa, Severe acute respiratory syndrome coronavirus 2
DLDEWSMATYY

SEQ ID NO: 5077 - protein, 11 aa, Severe acute respiratory syndrome coronavirus 2
LDEWSMATYYL

SEQ ID NO: 5078 - protein, 11 aa, Severe acute respiratory syndrome coronavirus 2
DEWSMATYYLF

SEQ ID NO: 5079 - protein, 11 aa, Severe acute respiratory syndrome coronavirus 2
TYYLFDESGEF

SEQ ID NO: 5080 - protein, 11 aa, Severe acute respiratory syndrome coronavirus 2
YYLFDESGEFK

SEQ ID NO: 5081 - protein, 11 aa, Severe acute respiratory syndrome coronavirus 2
YLFDESGEFKL

SEQ ID NO: 5082 - protein, 11 aa, Severe acute respiratory syndrome coronavirus 2
FKLASHMYCSF

SEQ ID NO: 5083 - protein, 11 aa, Severe acute respiratory syndrome coronavirus 2
KLASHMYCSFY

SEQ ID NO: 5084 - protein, 11 aa, Severe acute respiratory syndrome coronavirus 2
EEEEFEPSTQY

SEQ ID NO: 5085 - protein, 11 aa, Severe acute respiratory syndrome coronavirus 2
EEFEPSTQYEY

SEQ ID NO: 5086 - protein, 11 aa, Severe acute respiratory syndrome coronavirus 2
TQYEYGTEDDY

SEQ ID NO: 5087 - protein, 11 aa, Severe acute respiratory syndrome coronavirus 2
KPLEFGATSAA

SEQ ID NO: 5088 - protein, 11 aa, Severe acute respiratory syndrome coronavirus 2
QTTTIQTIVEV

SEQ ID NO: 5089 - protein, 11 aa, Severe acute respiratory syndrome coronavirus 2
VEVQPQLEMEL

SEQ ID NO: 5090 - protein, 11 aa, Severe acute respiratory syndrome coronavirus 2
PQLEMELTPVV

SEQ ID NO: 5091 - protein, 11 aa, Severe acute respiratory syndrome coronavirus 2
QLEMELTPVVQ

SEQ ID NO: 5092 - protein, 11 aa, Severe acute respiratory syndrome coronavirus 2
QTIEVNSFSGY

SEQ ID NO: 5093 - protein, 11 aa, Severe acute respiratory syndrome coronavirus 2
IEVNSFSGYLK

SEQ ID NO: 5094 - protein, 11 aa, Severe acute respiratory syndrome coronavirus 2
EVNSFSGYLKL

SEQ ID NO: 5095 - protein, 11 aa, Severe acute respiratory syndrome coronavirus 2
SGYLKLTDNVY

SEQ ID NO: 5096 - protein, 11 aa, Severe acute respiratory syndrome coronavirus 2
GYLKLTDNVYI

SEQ ID NO: 5097 - protein, 11 aa, Severe acute respiratory syndrome coronavirus 2
YLKLTDNVYIK

SEQ ID NO: 5098 - protein, 11 aa, Severe acute respiratory syndrome coronavirus 2
KLTDNVYIKNA

SEQ ID NO: 5099 - protein, 11 aa, Severe acute respiratory syndrome coronavirus 2
YIKNADIVEEA

SEQ ID NO: 5100 - protein, 11 aa, Severe acute respiratory syndrome coronavirus 2
KVKPTVVVNAA

SEQ ID NO: 5101 - protein, 11 aa, Severe acute respiratory syndrome coronavirus 2
VVVNAANVYLK

SEQ ID NO: 5102 - protein, 11 aa, Severe acute respiratory syndrome coronavirus 2
YLKHGGGVAGA

SEQ ID NO: 5103 - protein, 11 aa, Severe acute respiratory syndrome coronavirus 2
SDDYIATNGPL

SEQ ID NO: 5104 - protein, 11 aa, Severe acute respiratory syndrome coronavirus 2
GPLKVGGSCVL

SEQ ID NO: 5105 - protein, 11 aa, Severe acute respiratory syndrome coronavirus 2
SCVLSGHNLAK

SEQ ID NO: 5106 - protein, 11 aa, Severe acute respiratory syndrome coronavirus 2
GHNLAKHCLHV

SEQ ID NO: 5107 - protein, 11 aa, Severe acute respiratory syndrome coronavirus 2
CLHVVGPNVNK

SEQ ID NO: 5108 - protein, 11 aa, Severe acute respiratory syndrome coronavirus 2
IQLLKSAYENF

SEQ ID NO: 5109 - protein, 11 aa, Severe acute respiratory syndrome coronavirus 2
SAYENFNQHEV

SEQ ID NO: 5110 - protein, 11 aa, Severe acute respiratory syndrome coronavirus 2
AYENFNQHEVL

SEQ ID NO: 5111 - protein, 11 aa, Severe acute respiratory syndrome coronavirus 2
YENFNQHEVLL

SEQ ID NO: 5112 - protein, 11 aa, Severe acute respiratory syndrome coronavirus 2
HEVLLAPLLSA

SEQ ID NO: 5113 - protein, 11 aa, Severe acute respiratory syndrome coronavirus 2
VLLAPLLSAGI

SEQ ID NO: 5114 - protein, 11 aa, Severe acute respiratory syndrome coronavirus 2
LLAPLLSAGIF

SEQ ID NO: 5115 - protein, 11 aa, Severe acute respiratory syndrome coronavirus 2
APLLSAGIFGA

SEQ ID NO: 5116 - protein, 11 aa, Severe acute respiratory syndrome coronavirus 2
GIFGADPIHSL

SEQ ID NO: 5117 - protein, 11 aa, Severe acute respiratory syndrome coronavirus 2
IFGADPIHSLR

SEQ ID NO: 5118 - protein, 11 aa, Severe acute respiratory syndrome coronavirus 2
HSLRVCVDTVR

SEQ ID NO: 5119 - protein, 11 aa, Severe acute respiratory syndrome coronavirus 2
DTVRTNVYLAV

SEQ ID NO: 5120 - protein, 11 aa, Severe acute respiratory syndrome coronavirus 2
RTNVYLAVFDK

SEQ ID NO: 5121 - protein, 11 aa, Severe acute respiratory syndrome coronavirus 2
VYLAVFDKNLY

SEQ ID NO: 5122 - protein, 11 aa, Severe acute respiratory syndrome coronavirus 2
LAVFDKNLYDK

SEQ ID NO: 5123 - protein, 11 aa, Severe acute respiratory syndrome coronavirus 2
AVFDKNLYDKL

SEQ ID NO: 5124 - protein, 11 aa, Severe acute respiratory syndrome coronavirus 2
KNLYDKLVSSF

SEQ ID NO: 5125 - protein, 11 aa, Severe acute respiratory syndrome coronavirus 2
NLYDKLVSSFL

SEQ ID NO: 5126 - protein, 11 aa, Severe acute respiratory syndrome coronavirus 2
YDKLVSSFLEM

SEQ ID NO: 5127 - protein, 11 aa, Severe acute respiratory syndrome coronavirus 2
DKLVSSFLEMK

SEQ ID NO: 5128 - protein, 11 aa, Severe acute respiratory syndrome coronavirus 2
KLVSSFLEMKS

SEQ ID NO: 5129 - protein, 11 aa, Severe acute respiratory syndrome coronavirus 2
VSSFLEMKSEK

SEQ ID NO: 5130 - protein, 11 aa, Severe acute respiratory syndrome coronavirus 2
AEIPKEEVKPF

SEQ ID NO: 5131 - protein, 11 aa, Severe acute respiratory syndrome coronavirus 2
ITESKPSVEQR

SEQ ID NO: 5132 - protein, 11 aa, Severe acute respiratory syndrome coronavirus 2
TKFLTENLLLY

SEQ ID NO: 5133 - protein, 11 aa, Severe acute respiratory syndrome coronavirus 2
KFLTENLLLYI

SEQ ID NO: 5134 - protein, 11 aa, Severe acute respiratory syndrome coronavirus 2
FLTENLLLYID

SEQ ID NO: 5135 - protein, 11 aa, Severe acute respiratory syndrome coronavirus 2
LLLYIDINGNL

SEQ ID NO: 5136 - protein, 11 aa, Severe acute respiratory syndrome coronavirus 2
HPDSATLVSDI

SEQ ID NO: 5137 - protein, 11 aa, Severe acute respiratory syndrome coronavirus 2
ATLVSDIDITF

SEQ ID NO: 5138 - protein, 11 aa, Severe acute respiratory syndrome coronavirus 2
TLVSDIDITFL

SEQ ID NO: 5139 - protein, 11 aa, Severe acute respiratory syndrome coronavirus 2
LVSDIDITFLK

SEQ ID NO: 5140 - protein, 11 aa, Severe acute respiratory syndrome coronavirus 2
VSDIDITFLKK

SEQ ID NO: 5141 - protein, 11 aa, Severe acute respiratory syndrome coronavirus 2
ITFLKKDAPYI

SEQ ID NO: 5142 - protein, 11 aa, Severe acute respiratory syndrome coronavirus 2
TFLKKDAPYIV

SEQ ID NO: 5143 - protein, 11 aa, Severe acute respiratory syndrome coronavirus 2
YIVGDVVQEGV

SEQ ID NO: 5144 - protein, 11 aa, Severe acute respiratory syndrome coronavirus 2
DVVQEGVLTAV

SEQ ID NO: 5145 - protein, 11 aa, Severe acute respiratory syndrome coronavirus 2
GVLTAVVIPTK

SEQ ID NO: 5146 - protein, 11 aa, Severe acute respiratory syndrome coronavirus 2
VLTAVVIPTKK

SEQ ID NO: 5147 - protein, 11 aa, Severe acute respiratory syndrome coronavirus 2
GTTEMLAKALR

SEQ ID NO: 5148 - protein, 11 aa, Severe acute respiratory syndrome coronavirus 2
TTEMLAKALRK

SEQ ID NO: 5149 - protein, 11 aa, Severe acute respiratory syndrome coronavirus 2
TEMLAKALRKV

SEQ ID NO: 5150 - protein, 11 aa, Severe acute respiratory syndrome coronavirus 2
MLAKALRKVPT

SEQ ID NO: 5151 - protein, 11 aa, Severe acute respiratory syndrome coronavirus 2
KALRKVPTDNY

SEQ ID NO: 5152 - protein, 11 aa, Severe acute respiratory syndrome coronavirus 2
KVPTDNYITTY

SEQ ID NO: 5153 - protein, 11 aa, Severe acute respiratory syndrome coronavirus 2
TTYPGQGLNGY

SEQ ID NO: 5154 - protein, 11 aa, Severe acute respiratory syndrome coronavirus 2
GLNGYTVEEAK

SEQ ID NO: 5155 - protein, 11 aa, Severe acute respiratory syndrome coronavirus 2
YTVEEAKTVLK

SEQ ID NO: 5156 - protein, 11 aa, Severe acute respiratory syndrome coronavirus 2
TVEEAKTVLKK

SEQ ID NO: 5157 - protein, 11 aa, Severe acute respiratory syndrome coronavirus 2
KTVLKKCKSAF

SEQ ID NO: 5158 - protein, 11 aa, Severe acute respiratory syndrome coronavirus 2
TVLKKCKSAFY

SEQ ID NO: 5159 - protein, 11 aa, Severe acute respiratory syndrome coronavirus 2
VLKKCKSAFYI

SEQ ID NO: 5160 - protein, 11 aa, Severe acute respiratory syndrome coronavirus 2
KSAFYILPSII

SEQ ID NO: 5161 - protein, 11 aa, Severe acute respiratory syndrome coronavirus 2
YILPSIISNEK

SEQ ID NO: 5162 - protein, 11 aa, Severe acute respiratory syndrome coronavirus 2
EKQEILGTVSW

SEQ ID NO: 5163 - protein, 11 aa, Severe acute respiratory syndrome coronavirus 2
QEILGTVSWNL

SEQ ID NO: 5164 - protein, 11 aa, Severe acute respiratory syndrome coronavirus 2
EILGTVSWNLR

SEQ ID NO: 5165 - protein, 11 aa, Severe acute respiratory syndrome coronavirus 2
SWNLREMLAHA

SEQ ID NO: 5166 - protein, 11 aa, Severe acute respiratory syndrome coronavirus 2
MLAHAEETRKL

SEQ ID NO: 5167 - protein, 11 aa, Severe acute respiratory syndrome coronavirus 2
RKLMPVCVETK

SEQ ID NO: 5168 - protein, 11 aa, Severe acute respiratory syndrome coronavirus 2
KLMPVCVETKA

SEQ ID NO: 5169 - protein, 11 aa, Severe acute respiratory syndrome coronavirus 2
MPVCVETKAIV

SEQ ID NO: 5170 - protein, 11 aa, Severe acute respiratory syndrome coronavirus 2
ETKAIVSTIQR

SEQ ID NO: 5171 - protein, 11 aa, Severe acute respiratory syndrome coronavirus 2
KAIVSTIQRKY

SEQ ID NO: 5172 - protein, 11 aa, Severe acute respiratory syndrome coronavirus 2
AIVSTIQRKYK

SEQ ID NO: 5173 - protein, 11 aa, Severe acute respiratory syndrome coronavirus 2
STIQRKYKGIK

SEQ ID NO: 5174 - protein, 11 aa, Severe acute respiratory syndrome coronavirus 2
QEGVVDYGARF

SEQ ID NO: 5175 - protein, 11 aa, Severe acute respiratory syndrome coronavirus 2
VVDYGARFYFY

SEQ ID NO: 5176 - protein, 11 aa, Severe acute respiratory syndrome coronavirus 2
YGARFYFYTSK

SEQ ID NO: 5177 - protein, 11 aa, Severe acute respiratory syndrome coronavirus 2
FYTSKTTVASL

SEQ ID NO: 5178 - protein, 11 aa, Severe acute respiratory syndrome coronavirus 2
YTSKTTVASLI

SEQ ID NO: 5179 - protein, 11 aa, Severe acute respiratory syndrome coronavirus 2
KTTVASLINTL

SEQ ID NO: 5180 - protein, 11 aa, Severe acute respiratory syndrome coronavirus 2
INTLNDLNETL

SEQ ID NO: 5181 - protein, 11 aa, Severe acute respiratory syndrome coronavirus 2
LNDLNETLVTM

SEQ ID NO: 5182 - protein, 11 aa, Severe acute respiratory syndrome coronavirus 2
NETLVTMPLGY

SEQ ID NO: 5183 - protein, 11 aa, Severe acute respiratory syndrome coronavirus 2
ETLVTMPLGYV

SEQ ID NO: 5184 - protein, 11 aa, Severe acute respiratory syndrome coronavirus 2
TMPLGYVTHGL

SEQ ID NO: 5185 - protein, 11 aa, Severe acute respiratory syndrome coronavirus 2
LEEAARYMRSL

SEQ ID NO: 5186 - protein, 11 aa, Severe acute respiratory syndrome coronavirus 2
ARYMRSLKVPA

SEQ ID NO: 5187 - protein, 11 aa, Severe acute respiratory syndrome coronavirus 2
YMRSLKVPATV

SEQ ID NO: 5188 - protein, 11 aa, Severe acute respiratory syndrome coronavirus 2
RSLKVPATVSV

SEQ ID NO: 5189 - protein, 11 aa, Severe acute respiratory syndrome coronavirus 2
SLKVPATVSVS

SEQ ID NO: 5190 - protein, 11 aa, Severe acute respiratory syndrome coronavirus 2
ATVSVSSPDAV

SEQ ID NO: 5191 - protein, 11 aa, Severe acute respiratory syndrome coronavirus 2
SVSSPDAVTAY

SEQ ID NO: 5192 - protein, 11 aa, Severe acute respiratory syndrome coronavirus 2
SPDAVTAYNGY

SEQ ID NO: 5193 - protein, 11 aa, Severe acute respiratory syndrome coronavirus 2
AYNGYLTSSSK

SEQ ID NO: 5194 - protein, 11 aa, Severe acute respiratory syndrome coronavirus 2
EEHFIETISLA

SEQ ID NO: 5195 - protein, 11 aa, Severe acute respiratory syndrome coronavirus 2
FIETISLAGSY

SEQ ID NO: 5196 - protein, 11 aa, Severe acute respiratory syndrome coronavirus 2
IETISLAGSYK

SEQ ID NO: 5197 - protein, 11 aa, Severe acute respiratory syndrome coronavirus 2
ETISLAGSYKD

SEQ ID NO: 5198 - protein, 11 aa, Severe acute respiratory syndrome coronavirus 2
TISLAGSYKDW

SEQ ID NO: 5199 - protein, 11 aa, Severe acute respiratory syndrome coronavirus 2
ISLAGSYKDWS

SEQ ID NO: 5200 - protein, 11 aa, Severe acute respiratory syndrome coronavirus 2
SLAGSYKDWSY

SEQ ID NO: 5201 - protein, 11 aa, Severe acute respiratory syndrome coronavirus 2
SYSGQSTQLGI

SEQ ID NO: 5202 - protein, 11 aa, Severe acute respiratory syndrome coronavirus 2
QSTQLGIEFLK

SEQ ID NO: 5203 - protein, 11 aa, Severe acute respiratory syndrome coronavirus 2
STQLGIEFLKR

SEQ ID NO: 5204 - protein, 11 aa, Severe acute respiratory syndrome coronavirus 2
FLKRGDKSVYY

SEQ ID NO: 5205 - protein, 11 aa, Severe acute respiratory syndrome coronavirus 2
SVYYTSNPTTF

SEQ ID NO: 5206 - protein, 11 aa, Severe acute respiratory syndrome coronavirus 2
VYYTSNPTTFH

SEQ ID NO: 5207 - protein, 11 aa, Severe acute respiratory syndrome coronavirus 2
YYTSNPTTFHL

SEQ ID NO: 5208 - protein, 11 aa, Severe acute respiratory syndrome coronavirus 2
NPTTFHLDGEV

SEQ ID NO: 5209 - protein, 11 aa, Severe acute respiratory syndrome coronavirus 2
TFHLDGEVITF

SEQ ID NO: 5210 - protein, 11 aa, Severe acute respiratory syndrome coronavirus 2
DGEVITFDNLK

SEQ ID NO: 5211 - protein, 11 aa, Severe acute respiratory syndrome coronavirus 2
EVITFDNLKTL

SEQ ID NO: 5212 - protein, 11 aa, Severe acute respiratory syndrome coronavirus 2
NLKTLLSLREV

SEQ ID NO: 5213 - protein, 11 aa, Severe acute respiratory syndrome coronavirus 2
LKTLLSLREVR

SEQ ID NO: 5214 - protein, 11 aa, Severe acute respiratory syndrome coronavirus 2
SLREVRTIKVF

SEQ ID NO: 5215 - protein, 11 aa, Severe acute respiratory syndrome coronavirus 2
REVRTIKVFTT

SEQ ID NO: 5216 - protein, 11 aa, Severe acute respiratory syndrome coronavirus 2
EVRTIKVFTTV

SEQ ID NO: 5217 - protein, 11 aa, Severe acute respiratory syndrome coronavirus 2
HTQVVDMSMTY

SEQ ID NO: 5218 - protein, 11 aa, Severe acute respiratory syndrome coronavirus 2
VDMSMTYGQQF

SEQ ID NO: 5219 - protein, 11 aa, Severe acute respiratory syndrome coronavirus 2
MTYGQQFGPTY

SEQ ID NO: 5220 - protein, 11 aa, Severe acute respiratory syndrome coronavirus 2
TYGQQFGPTYL

SEQ ID NO: 5221 - protein, 11 aa, Severe acute respiratory syndrome coronavirus 2
TYLDGADVTKI

SEQ ID NO: 5222 - protein, 11 aa, Severe acute respiratory syndrome coronavirus 2
KIKPHNSHEGK

SEQ ID NO: 5223 - protein, 11 aa, Severe acute respiratory syndrome coronavirus 2
KPHNSHEGKTF

SEQ ID NO: 5224 - protein, 11 aa, Severe acute respiratory syndrome coronavirus 2
FYVLPNDDTLR

SEQ ID NO: 5225 - protein, 11 aa, Severe acute respiratory syndrome coronavirus 2
YVLPNDDTLRV

SEQ ID NO: 5226 - protein, 11 aa, Severe acute respiratory syndrome coronavirus 2
LPNDDTLRVEA

SEQ ID NO: 5227 - protein, 11 aa, Severe acute respiratory syndrome coronavirus 2
DTLRVEAFEYY

SEQ ID NO: 5228 - protein, 11 aa, Severe acute respiratory syndrome coronavirus 2
FEYYHTTDPSF

SEQ ID NO: 5229 - protein, 11 aa, Severe acute respiratory syndrome coronavirus 2
EYYHTTDPSFL

SEQ ID NO: 5230 - protein, 11 aa, Severe acute respiratory syndrome coronavirus 2
YHTTDPSFLGR

SEQ ID NO: 5231 - protein, 11 aa, Severe acute respiratory syndrome coronavirus 2
HTTDPSFLGRY

SEQ ID NO: 5232 - protein, 11 aa, Severe acute respiratory syndrome coronavirus 2
TTDPSFLGRYM

SEQ ID NO: 5233 - protein, 11 aa, Severe acute respiratory syndrome coronavirus 2
GRYMSALNHTK

SEQ ID NO: 5234 - protein, 11 aa, Severe acute respiratory syndrome coronavirus 2
RYMSALNHTKK

SEQ ID NO: 5235 - protein, 11 aa, Severe acute respiratory syndrome coronavirus 2
YMSALNHTKKW

SEQ ID NO: 5236 - protein, 11 aa, Severe acute respiratory syndrome coronavirus 2
MSALNHTKKWK

SEQ ID NO: 5237 - protein, 11 aa, Severe acute respiratory syndrome coronavirus 2
KYPQVNGLTSI

SEQ ID NO: 5238 - protein, 11 aa, Severe acute respiratory syndrome coronavirus 2
NCYLATALLTL

SEQ ID NO: 5239 - protein, 11 aa, Severe acute respiratory syndrome coronavirus 2
YLATALLTLQQ

SEQ ID NO: 5240 - protein, 11 aa, Severe acute respiratory syndrome coronavirus 2
ALLTLQQIELK

SEQ ID NO: 5241 - protein, 11 aa, Severe acute respiratory syndrome coronavirus 2
QQIELKFNPPA

SEQ ID NO: 5242 - protein, 11 aa, Severe acute respiratory syndrome coronavirus 2
KFNPPALQDAY

SEQ ID NO: 5243 - protein, 11 aa, Severe acute respiratory syndrome coronavirus 2
FNPPALQDAYY

SEQ ID NO: 5244 - protein, 11 aa, Severe acute respiratory syndrome coronavirus 2
YRARAGEAANF

SEQ ID NO: 5245 - protein, 11 aa, Severe acute respiratory syndrome coronavirus 2
RAGEAANFCAL

SEQ ID NO: 5246 - protein, 11 aa, Severe acute respiratory syndrome coronavirus 2
GEAANFCALIL

SEQ ID NO: 5247 - protein, 11 aa, Severe acute respiratory syndrome coronavirus 2
EAANFCALILA

SEQ ID NO: 5248 - protein, 11 aa, Severe acute respiratory syndrome coronavirus 2
AANFCALILAY

SEQ ID NO: 5249 - protein, 11 aa, Severe acute respiratory syndrome coronavirus 2
ALILAYCNKTV

SEQ ID NO: 5250 - protein, 11 aa, Severe acute respiratory syndrome coronavirus 2
VRETMSYLFQH

SEQ ID NO: 5251 - protein, 11 aa, Severe acute respiratory syndrome coronavirus 2
RETMSYLFQHA

SEQ ID NO: 5252 - protein, 11 aa, Severe acute respiratory syndrome coronavirus 2
TMSYLFQHANL

SEQ ID NO: 5253 - protein, 11 aa, Severe acute respiratory syndrome coronavirus 2
YLFQHANLDSC

SEQ ID NO: 5254 - protein, 11 aa, Severe acute respiratory syndrome coronavirus 2
NLDSCKRVLNV

SEQ ID NO: 5255 - protein, 11 aa, Severe acute respiratory syndrome coronavirus 2
KTCGQQQTTLK

SEQ ID NO: 5256 - protein, 11 aa, Severe acute respiratory syndrome coronavirus 2
TLKGVEAVMYM

SEQ ID NO: 5257 - protein, 11 aa, Severe acute respiratory syndrome coronavirus 2
EAVMYMGTLSY

SEQ ID NO: 5258 - protein, 11 aa, Severe acute respiratory syndrome coronavirus 2
AVMYMGTLSYE

SEQ ID NO: 5259 - protein, 11 aa, Severe acute respiratory syndrome coronavirus 2
VMYMGTLSYEQ

SEQ ID NO: 5260 - protein, 11 aa, Severe acute respiratory syndrome coronavirus 2
MYMGTLSYEQF

SEQ ID NO: 5261 - protein, 11 aa, Severe acute respiratory syndrome coronavirus 2
YMGTLSYEQFK

SEQ ID NO: 5262 - protein, 11 aa, Severe acute respiratory syndrome coronavirus 2
MGTLSYEQFKK

SEQ ID NO: 5263 - protein, 11 aa, Severe acute respiratory syndrome coronavirus 2
TLSYEQFKKGV

SEQ ID NO: 5264 - protein, 11 aa, Severe acute respiratory syndrome coronavirus 2
SYEQFKKGVQI

SEQ ID NO: 5265 - protein, 11 aa, Severe acute respiratory syndrome coronavirus 2
KGVQIPCTCGK

SEQ ID NO: 5266 - protein, 11 aa, Severe acute respiratory syndrome coronavirus 2
TKYLVQQESPF

SEQ ID NO: 5267 - protein, 11 aa, Severe acute respiratory syndrome coronavirus 2
KYLVQQESPFV

SEQ ID NO: 5268 - protein, 11 aa, Severe acute respiratory syndrome coronavirus 2
YLVQQESPFVM

SEQ ID NO: 5269 - protein, 11 aa, Severe acute respiratory syndrome coronavirus 2
QESPFVMMSAP

SEQ ID NO: 5270 - protein, 11 aa, Severe acute respiratory syndrome coronavirus 2
SPFVMMSAPPA

SEQ ID NO: 5271 - protein, 11 aa, Severe acute respiratory syndrome coronavirus 2
FVMMSAPPAQY

SEQ ID NO: 5272 - protein, 11 aa, Severe acute respiratory syndrome coronavirus 2
VMMSAPPAQYE

SEQ ID NO: 5273 - protein, 11 aa, Severe acute respiratory syndrome coronavirus 2
MMSAPPAQYEL

SEQ ID NO: 5274 - protein, 11 aa, Severe acute respiratory syndrome coronavirus 2
MSAPPAQYELK

SEQ ID NO: 5275 - protein, 11 aa, Severe acute respiratory syndrome coronavirus 2
PAQYELKHGTF

SEQ ID NO: 5276 - protein, 11 aa, Severe acute respiratory syndrome coronavirus 2
AQYELKHGTFT

SEQ ID NO: 5277 - protein, 11 aa, Severe acute respiratory syndrome coronavirus 2
YELKHGTFTCA

SEQ ID NO: 5278 - protein, 11 aa, Severe acute respiratory syndrome coronavirus 2
KHGTFTCASEY

SEQ ID NO: 5279 - protein, 11 aa, Severe acute respiratory syndrome coronavirus 2
FTCASEYTGNY

SEQ ID NO: 5280 - protein, 11 aa, Severe acute respiratory syndrome coronavirus 2
YTGNYQCGHYK

SEQ ID NO: 5281 - protein, 11 aa, Severe acute respiratory syndrome coronavirus 2
HYKHITSKETL

SEQ ID NO: 5282 - protein, 11 aa, Severe acute respiratory syndrome coronavirus 2
YKHITSKETLY

SEQ ID NO: 5283 - protein, 11 aa, Severe acute respiratory syndrome coronavirus 2
KETLYCIDGAL

SEQ ID NO: 5284 - protein, 11 aa, Severe acute respiratory syndrome coronavirus 2
TLYCIDGALLT

SEQ ID NO: 5285 - protein, 11 aa, Severe acute respiratory syndrome coronavirus 2
SEYKGPITDVF

SEQ ID NO: 5286 - protein, 11 aa, Severe acute respiratory syndrome coronavirus 2
ITDVFYKENSY

SEQ ID NO: 5287 - protein, 11 aa, Severe acute respiratory syndrome coronavirus 2
FYKENSYTTTI

SEQ ID NO: 5288 - protein, 11 aa, Severe acute respiratory syndrome coronavirus 2
SYTTTIKPVTY

SEQ ID NO: 5289 - protein, 11 aa, Severe acute respiratory syndrome coronavirus 2
YTTTIKPVTYK

SEQ ID NO: 5290 - protein, 11 aa, Severe acute respiratory syndrome coronavirus 2
CTEIDPKLDNY

SEQ ID NO: 5291 - protein, 11 aa, Severe acute respiratory syndrome coronavirus 2
TEIDPKLDNYY

SEQ ID NO: 5292 - protein, 11 aa, Severe acute respiratory syndrome coronavirus 2
EIDPKLDNYYK

SEQ ID NO: 5293 - protein, 11 aa, Severe acute respiratory syndrome coronavirus 2
SYFTEQPIDLV

SEQ ID NO: 5294 - protein, 11 aa, Severe acute respiratory syndrome coronavirus 2
QPIDLVPNQPY

SEQ ID NO: 5295 - protein, 11 aa, Severe acute respiratory syndrome coronavirus 2
VPNQPYPNASF

SEQ ID NO: 5296 - protein, 11 aa, Severe acute respiratory syndrome coronavirus 2
YPNASFDNFKF

SEQ ID NO: 5297 - protein, 11 aa, Severe acute respiratory syndrome coronavirus 2
FADDLNQLTGY

SEQ ID NO: 5298 - protein, 11 aa, Severe acute respiratory syndrome coronavirus 2
ADDLNQLTGYK

SEQ ID NO: 5299 - protein, 11 aa, Severe acute respiratory syndrome coronavirus 2
KPASRELKVTF

SEQ ID NO: 5300 - protein, 11 aa, Severe acute respiratory syndrome coronavirus 2
RELKVTFFPDL

SEQ ID NO: 5301 - protein, 11 aa, Severe acute respiratory syndrome coronavirus 2
FPDLNGDVVAI

SEQ ID NO: 5302 - protein, 11 aa, Severe acute respiratory syndrome coronavirus 2
AIDYKHYTPSF

SEQ ID NO: 5303 - protein, 11 aa, Severe acute respiratory syndrome coronavirus 2
YTPSFKKGAKL

SEQ ID NO: 5304 - protein, 11 aa, Severe acute respiratory syndrome coronavirus 2
TPSFKKGAKLL

SEQ ID NO: 5305 - protein, 11 aa, Severe acute respiratory syndrome coronavirus 2
KLLHKPIVWHV

SEQ ID NO: 5306 - protein, 11 aa, Severe acute respiratory syndrome coronavirus 2
LLHKPIVWHVN

SEQ ID NO: 5307 - protein, 11 aa, Severe acute respiratory syndrome coronavirus 2
IVWHVNNATNK

SEQ ID NO: 5308 - protein, 11 aa, Severe acute respiratory syndrome coronavirus 2
HVNNATNKATY

SEQ ID NO: 5309 - protein, 11 aa, Severe acute respiratory syndrome coronavirus 2
KATYKPNTWCI

SEQ ID NO: 5310 - protein, 11 aa, Severe acute respiratory syndrome coronavirus 2
ATYKPNTWCIR

SEQ ID NO: 5311 - protein, 11 aa, Severe acute respiratory syndrome coronavirus 2
KPNTWCIRCLW

SEQ ID NO: 5312 - protein, 11 aa, Severe acute respiratory syndrome coronavirus 2
TWCIRCLWSTK

SEQ ID NO: 5313 - protein, 11 aa, Severe acute respiratory syndrome coronavirus 2
STKPVETSNSF

SEQ ID NO: 5314 - protein, 11 aa, Severe acute respiratory syndrome coronavirus 2
KPVETSNSFDV

SEQ ID NO: 5315 - protein, 11 aa, Severe acute respiratory syndrome coronavirus 2
VETSNSFDVLK

SEQ ID NO: 5316 - protein, 11 aa, Severe acute respiratory syndrome coronavirus 2
SEDAQGMDNLA

SEQ ID NO: 5317 - protein, 11 aa, Severe acute respiratory syndrome coronavirus 2
GMDNLACEDLK

SEQ ID NO: 5318 - protein, 11 aa, Severe acute respiratory syndrome coronavirus 2
EEVVENPTIQK

SEQ ID NO: 5319 - protein, 11 aa, Severe acute respiratory syndrome coronavirus 2
VENPTIQKDVL

SEQ ID NO: 5320 - protein, 11 aa, Severe acute respiratory syndrome coronavirus 2
VLECNVKTTEV

SEQ ID NO: 5321 - protein, 11 aa, Severe acute respiratory syndrome coronavirus 2
KTTEVVGDIIL

SEQ ID NO: 5322 - protein, 11 aa, Severe acute respiratory syndrome coronavirus 2
TTEVVGDIILK

SEQ ID NO: 5323 - protein, 11 aa, Severe acute respiratory syndrome coronavirus 2
EVVGDIILKPA

SEQ ID NO: 5324 - protein, 11 aa, Severe acute respiratory syndrome coronavirus 2
IILKPANNSLK

SEQ ID NO: 5325 - protein, 11 aa, Severe acute respiratory syndrome coronavirus 2
EEVGHTDLMAA

SEQ ID NO: 5326 - protein, 11 aa, Severe acute respiratory syndrome coronavirus 2
EVGHTDLMAAY

SEQ ID NO: 5327 - protein, 11 aa, Severe acute respiratory syndrome coronavirus 2
LMAAYVDNSSL

SEQ ID NO: 5328 - protein, 11 aa, Severe acute respiratory syndrome coronavirus 2
AAYVDNSSLTI

SEQ ID NO: 5329 - protein, 11 aa, Severe acute respiratory syndrome coronavirus 2
YVDNSSLTIKK

SEQ ID NO: 5330 - protein, 11 aa, Severe acute respiratory syndrome coronavirus 2
LTIKKPNELSR

SEQ ID NO: 5331 - protein, 11 aa, Severe acute respiratory syndrome coronavirus 2
IKKPNELSRVL

SEQ ID NO: 5332 - protein, 11 aa, Severe acute respiratory syndrome coronavirus 2
KPNELSRVLGL

SEQ ID NO: 5333 - protein, 11 aa, Severe acute respiratory syndrome coronavirus 2
KTLATHGLAAV

SEQ ID NO: 5334 - protein, 11 aa, Severe acute respiratory syndrome coronavirus 2
TLATHGLAAVN

SEQ ID NO: 5335 - protein, 11 aa, Severe acute respiratory syndrome coronavirus 2
HGLAAVNSVPW

SEQ ID NO: 5336 - protein, 11 aa, Severe acute respiratory syndrome coronavirus 2
NSVPWDTIANY

SEQ ID NO: 5337 - protein, 11 aa, Severe acute respiratory syndrome coronavirus 2
DTIANYAKPFL

SEQ ID NO: 5338 - protein, 11 aa, Severe acute respiratory syndrome coronavirus 2
IANYAKPFLNK

SEQ ID NO: 5339 - protein, 11 aa, Severe acute respiratory syndrome coronavirus 2
VVSTTTNIVTR

SEQ ID NO: 5340 - protein, 11 aa, Severe acute respiratory syndrome coronavirus 2
TTNIVTRCLNR

SEQ ID NO: 5341 - protein, 11 aa, Severe acute respiratory syndrome coronavirus 2
NRVCTNYMPYF

SEQ ID NO: 5342 - protein, 11 aa, Severe acute respiratory syndrome coronavirus 2
RVCTNYMPYFF

SEQ ID NO: 5343 - protein, 11 aa, Severe acute respiratory syndrome coronavirus 2
CTNYMPYFFTL

SEQ ID NO: 5344 - protein, 11 aa, Severe acute respiratory syndrome coronavirus 2
TNYMPYFFTLL

SEQ ID NO: 5345 - protein, 11 aa, Severe acute respiratory syndrome coronavirus 2
NYMPYFFTLLL

SEQ ID NO: 5346 - protein, 11 aa, Severe acute respiratory syndrome coronavirus 2
YMPYFFTLLLQ

SEQ ID NO: 5347 - protein, 11 aa, Severe acute respiratory syndrome coronavirus 2
MPYFFTLLLQL

SEQ ID NO: 5348 - protein, 11 aa, Severe acute respiratory syndrome coronavirus 2
TLLLQLCTFTR

SEQ ID NO: 5349 - protein, 11 aa, Severe acute respiratory syndrome coronavirus 2
LCTFTRSTNSR

SEQ ID NO: 5350 - protein, 11 aa, Severe acute respiratory syndrome coronavirus 2
RSTNSRIKASM

SEQ ID NO: 5351 - protein, 11 aa, Severe acute respiratory syndrome coronavirus 2
SRIKASMPTTI

SEQ ID NO: 5352 - protein, 11 aa, Severe acute respiratory syndrome coronavirus 2
RIKASMPTTIA

SEQ ID NO: 5353 - protein, 11 aa, Severe acute respiratory syndrome coronavirus 2
IKASMPTTIAK

SEQ ID NO: 5354 - protein, 11 aa, Severe acute respiratory syndrome coronavirus 2
KASMPTTIAKN

SEQ ID NO: 5355 - protein, 11 aa, Severe acute respiratory syndrome coronavirus 2
SMPTTIAKNTV

SEQ ID NO: 5356 - protein, 11 aa, Severe acute respiratory syndrome coronavirus 2
MPTTIAKNTVK

SEQ ID NO: 5357 - protein, 11 aa, Severe acute respiratory syndrome coronavirus 2
TTIAKNTVKSV

SEQ ID NO: 5358 - protein, 11 aa, Severe acute respiratory syndrome coronavirus 2
AKNTVKSVGKF

SEQ ID NO: 5359 - protein, 11 aa, Severe acute respiratory syndrome coronavirus 2
SVGKFCLEASF

SEQ ID NO: 5360 - protein, 11 aa, Severe acute respiratory syndrome coronavirus 2
GKFCLEASFNY

SEQ ID NO: 5361 - protein, 11 aa, Severe acute respiratory syndrome coronavirus 2
KFCLEASFNYL

SEQ ID NO: 5362 - protein, 11 aa, Severe acute respiratory syndrome coronavirus 2
ASFNYLKSPNF

SEQ ID NO: 5363 - protein, 11 aa, Severe acute respiratory syndrome coronavirus 2
NYLKSPNFSKL

SEQ ID NO: 5364 - protein, 11 aa, Severe acute respiratory syndrome coronavirus 2
YLKSPNFSKLI

SEQ ID NO: 5365 - protein, 11 aa, Severe acute respiratory syndrome coronavirus 2
SPNFSKLINII

SEQ ID NO: 5366 - protein, 11 aa, Severe acute respiratory syndrome coronavirus 2
SKLINIIIWFL

SEQ ID NO: 5367 - protein, 11 aa, Severe acute respiratory syndrome coronavirus 2
KLINIIIWFLL

SEQ ID NO: 5368 - protein, 11 aa, Severe acute respiratory syndrome coronavirus 2
NIIIWFLLLSV

SEQ ID NO: 5369 - protein, 11 aa, Severe acute respiratory syndrome coronavirus 2
FLLLSVCLGSL

SEQ ID NO: 5370 - protein, 11 aa, Severe acute respiratory syndrome coronavirus 2
LLLSVCLGSLI

SEQ ID NO: 5371 - protein, 11 aa, Severe acute respiratory syndrome coronavirus 2
LLSVCLGSLIY

SEQ ID NO: 5372 - protein, 11 aa, Severe acute respiratory syndrome coronavirus 2
LGSLIYSTAAL

SEQ ID NO: 5373 - protein, 11 aa, Severe acute respiratory syndrome coronavirus 2
SLIYSTAALGV

SEQ ID NO: 5374 - protein, 11 aa, Severe acute respiratory syndrome coronavirus 2
IYSTAALGVLM

SEQ ID NO: 5375 - protein, 11 aa, Severe acute respiratory syndrome coronavirus 2
VLMSNLGMPSY

SEQ ID NO: 5376 - protein, 11 aa, Severe acute respiratory syndrome coronavirus 2
LMSNLGMPSYC

SEQ ID NO: 5377 - protein, 11 aa, Severe acute respiratory syndrome coronavirus 2
LGMPSYCTGYR

SEQ ID NO: 5378 - protein, 11 aa, Severe acute respiratory syndrome coronavirus 2
SYCTGYREGYL

SEQ ID NO: 5379 - protein, 11 aa, Severe acute respiratory syndrome coronavirus 2
YREGYLNSTNV

SEQ ID NO: 5380 - protein, 11 aa, Severe acute respiratory syndrome coronavirus 2
YLNSTNVTIAT

SEQ ID NO: 5381 - protein, 11 aa, Severe acute respiratory syndrome coronavirus 2
LNSTNVTIATY

SEQ ID NO: 5382 - protein, 11 aa, Severe acute respiratory syndrome coronavirus 2
VTIATYCTGSI

SEQ ID NO: 5383 - protein, 11 aa, Severe acute respiratory syndrome coronavirus 2
GLDSLDTYPSL

SEQ ID NO: 5384 - protein, 11 aa, Severe acute respiratory syndrome coronavirus 2
SLDTYPSLETI

SEQ ID NO: 5385 - protein, 11 aa, Severe acute respiratory syndrome coronavirus 2
DTYPSLETIQI

SEQ ID NO: 5386 - protein, 11 aa, Severe acute respiratory syndrome coronavirus 2
YPSLETIQITI

SEQ ID NO: 5387 - protein, 11 aa, Severe acute respiratory syndrome coronavirus 2
ETIQITISSFK

SEQ ID NO: 5388 - protein, 11 aa, Severe acute respiratory syndrome coronavirus 2
ISSFKWDLTAF

SEQ ID NO: 5389 - protein, 11 aa, Severe acute respiratory syndrome coronavirus 2
SSFKWDLTAFG

SEQ ID NO: 5390 - protein, 11 aa, Severe acute respiratory syndrome coronavirus 2
DLTAFGLVAEW

SEQ ID NO: 5391 - protein, 11 aa, Severe acute respiratory syndrome coronavirus 2
LTAFGLVAEWF

SEQ ID NO: 5392 - protein, 11 aa, Severe acute respiratory syndrome coronavirus 2
FGLVAEWFLAY

SEQ ID NO: 5393 - protein, 11 aa, Severe acute respiratory syndrome coronavirus 2
GLVAEWFLAYI

SEQ ID NO: 5394 - protein, 11 aa, Severe acute respiratory syndrome coronavirus 2
LVAEWFLAYIL

SEQ ID NO: 5395 - protein, 11 aa, Severe acute respiratory syndrome coronavirus 2
VAEWFLAYILF

SEQ ID NO: 5396 - protein, 11 aa, Severe acute respiratory syndrome coronavirus 2
EWFLAYILFTR

SEQ ID NO: 5397 - protein, 11 aa, Severe acute respiratory syndrome coronavirus 2
FLAYILFTRFF

SEQ ID NO: 5398 - protein, 11 aa, Severe acute respiratory syndrome coronavirus 2
LAYILFTRFFY

SEQ ID NO: 5399 - protein, 11 aa, Severe acute respiratory syndrome coronavirus 2
AYILFTRFFYV

SEQ ID NO: 5400 - protein, 11 aa, Severe acute respiratory syndrome coronavirus 2
YILFTRFFYVL

SEQ ID NO: 5401 - protein, 11 aa, Severe acute respiratory syndrome coronavirus 2
ILFTRFFYVLG

SEQ ID NO: 5402 - protein, 11 aa, Severe acute respiratory syndrome coronavirus 2
LFTRFFYVLGL

SEQ ID NO: 5403 - protein, 11 aa, Severe acute respiratory syndrome coronavirus 2
TRFFYVLGLAA

SEQ ID NO: 5404 - protein, 11 aa, Severe acute respiratory syndrome coronavirus 2
RFFYVLGLAAI

SEQ ID NO: 5405 - protein, 11 aa, Severe acute respiratory syndrome coronavirus 2
FFYVLGLAAIM

SEQ ID NO: 5406 - protein, 11 aa, Severe acute respiratory syndrome coronavirus 2
YVLGLAAIMQL

SEQ ID NO: 5407 - protein, 11 aa, Severe acute respiratory syndrome coronavirus 2
LAAIMQLFFSY

SEQ ID NO: 5408 - protein, 11 aa, Severe acute respiratory syndrome coronavirus 2
AIMQLFFSYFA

SEQ ID NO: 5409 - protein, 11 aa, Severe acute respiratory syndrome coronavirus 2
IMQLFFSYFAV

SEQ ID NO: 5410 - protein, 11 aa, Severe acute respiratory syndrome coronavirus 2
MQLFFSYFAVH

SEQ ID NO: 5411 - protein, 11 aa, Severe acute respiratory syndrome coronavirus 2
QLFFSYFAVHF

SEQ ID NO: 5412 - protein, 11 aa, Severe acute respiratory syndrome coronavirus 2
YFAVHFISNSW

SEQ ID NO: 5413 - protein, 11 aa, Severe acute respiratory syndrome coronavirus 2
VHFISNSWLMW

SEQ ID NO: 5414 - protein, 11 aa, Severe acute respiratory syndrome coronavirus 2
HFISNSWLMWL

SEQ ID NO: 5415 - protein, 11 aa, Severe acute respiratory syndrome coronavirus 2
FISNSWLMWLI

SEQ ID NO: 5416 - protein, 11 aa, Severe acute respiratory syndrome coronavirus 2
NSWLMWLIINL

SEQ ID NO: 5417 - protein, 11 aa, Severe acute respiratory syndrome coronavirus 2
SWLMWLIINLV

SEQ ID NO: 5418 - protein, 11 aa, Severe acute respiratory syndrome coronavirus 2
WLMWLIINLVQ

SEQ ID NO: 5419 - protein, 11 aa, Severe acute respiratory syndrome coronavirus 2
LIINLVQMAPI

SEQ ID NO: 5420 - protein, 11 aa, Severe acute respiratory syndrome coronavirus 2
NLVQMAPISAM

SEQ ID NO: 5421 - protein, 11 aa, Severe acute respiratory syndrome coronavirus 2
LVQMAPISAMV

SEQ ID NO: 5422 - protein, 11 aa, Severe acute respiratory syndrome coronavirus 2
VQMAPISAMVR

SEQ ID NO: 5423 - protein, 11 aa, Severe acute respiratory syndrome coronavirus 2
QMAPISAMVRM

SEQ ID NO: 5424 - protein, 11 aa, Severe acute respiratory syndrome coronavirus 2
MAPISAMVRMY

SEQ ID NO: 5425 - protein, 11 aa, Severe acute respiratory syndrome coronavirus 2
APISAMVRMYI

SEQ ID NO: 5426 - protein, 11 aa, Severe acute respiratory syndrome coronavirus 2
ISAMVRMYIFF

SEQ ID NO: 5427 - protein, 11 aa, Severe acute respiratory syndrome coronavirus 2
SAMVRMYIFFA

SEQ ID NO: 5428 - protein, 11 aa, Severe acute respiratory syndrome coronavirus 2
MVRMYIFFASF

SEQ ID NO: 5429 - protein, 11 aa, Severe acute respiratory syndrome coronavirus 2
VRMYIFFASFY

SEQ ID NO: 5430 - protein, 11 aa, Severe acute respiratory syndrome coronavirus 2
RMYIFFASFYY

SEQ ID NO: 5431 - protein, 11 aa, Severe acute respiratory syndrome coronavirus 2
MYIFFASFYYV

SEQ ID NO: 5432 - protein, 11 aa, Severe acute respiratory syndrome coronavirus 2
YIFFASFYYVW

SEQ ID NO: 5433 - protein, 11 aa, Severe acute respiratory syndrome coronavirus 2
IFFASFYYVWK

SEQ ID NO: 5434 - protein, 11 aa, Severe acute respiratory syndrome coronavirus 2
FASFYYVWKSY

SEQ ID NO: 5435 - protein, 11 aa, Severe acute respiratory syndrome coronavirus 2
ASFYYVWKSYV

SEQ ID NO: 5436 - protein, 11 aa, Severe acute respiratory syndrome coronavirus 2
FYYVWKSYVHV

SEQ ID NO: 5437 - protein, 11 aa, Severe acute respiratory syndrome coronavirus 2
YYVWKSYVHVV

SEQ ID NO: 5438 - protein, 11 aa, Severe acute respiratory syndrome coronavirus 2
YVWKSYVHVVD

SEQ ID NO: 5439 - protein, 11 aa, Severe acute respiratory syndrome coronavirus 2
CNSSTCMMCYK

SEQ ID NO: 5440 - protein, 11 aa, Severe acute respiratory syndrome coronavirus 2
NSSTCMMCYKR

SEQ ID NO: 5441 - protein, 11 aa, Severe acute respiratory syndrome coronavirus 2
STCMMCYKRNR

SEQ ID NO: 5442 - protein, 11 aa, Severe acute respiratory syndrome coronavirus 2
MMCYKRNRATR

SEQ ID NO: 5443 - protein, 11 aa, Severe acute respiratory syndrome coronavirus 2
ECTTIVNGVRR

SEQ ID NO: 5444 - protein, 11 aa, Severe acute respiratory syndrome coronavirus 2
TTIVNGVRRSF

SEQ ID NO: 5445 - protein, 11 aa, Severe acute respiratory syndrome coronavirus 2
TIVNGVRRSFY

SEQ ID NO: 5446 - protein, 11 aa, Severe acute respiratory syndrome coronavirus 2
IVNGVRRSFYV

SEQ ID NO: 5447 - protein, 11 aa, Severe acute respiratory syndrome coronavirus 2
RRSFYVYANGG

SEQ ID NO: 5448 - protein, 11 aa, Severe acute respiratory syndrome coronavirus 2
RSFYVYANGGK

SEQ ID NO: 5449 - protein, 11 aa, Severe acute respiratory syndrome coronavirus 2
FYVYANGGKGF

SEQ ID NO: 5450 - protein, 11 aa, Severe acute respiratory syndrome coronavirus 2
NCDTFCAGSTF

SEQ ID NO: 5451 - protein, 11 aa, Severe acute respiratory syndrome coronavirus 2
GSTFISDEVAR

SEQ ID NO: 5452 - protein, 11 aa, Severe acute respiratory syndrome coronavirus 2
ISDEVARDLSL

SEQ ID NO: 5453 - protein, 11 aa, Severe acute respiratory syndrome coronavirus 2
DEVARDLSLQF

SEQ ID NO: 5454 - protein, 11 aa, Severe acute respiratory syndrome coronavirus 2
EVARDLSLQFK

SEQ ID NO: 5455 - protein, 11 aa, Severe acute respiratory syndrome coronavirus 2
VARDLSLQFKR

SEQ ID NO: 5456 - protein, 11 aa, Severe acute respiratory syndrome coronavirus 2
RPINPTDQSSY

SEQ ID NO: 5457 - protein, 11 aa, Severe acute respiratory syndrome coronavirus 2
QSSYIVDSVTV

SEQ ID NO: 5458 - protein, 11 aa, Severe acute respiratory syndrome coronavirus 2
SSYIVDSVTVK

SEQ ID NO: 5459 - protein, 11 aa, Severe acute respiratory syndrome coronavirus 2
VTVKNGSIHLY

SEQ ID NO: 5460 - protein, 11 aa, Severe acute respiratory syndrome coronavirus 2
LYFDKAGQKTY

SEQ ID NO: 5461 - protein, 11 aa, Severe acute respiratory syndrome coronavirus 2
KTYERHSLSHF

SEQ ID NO: 5462 - protein, 11 aa, Severe acute respiratory syndrome coronavirus 2
SLSHFVNLDNL

SEQ ID NO: 5463 - protein, 11 aa, Severe acute respiratory syndrome coronavirus 2
LSHFVNLDNLR

SEQ ID NO: 5464 - protein, 11 aa, Severe acute respiratory syndrome coronavirus 2
EESSAKSASVY

SEQ ID NO: 5465 - protein, 11 aa, Severe acute respiratory syndrome coronavirus 2
ESSAKSASVYY

SEQ ID NO: 5466 - protein, 11 aa, Severe acute respiratory syndrome coronavirus 2
KSASVYYSQLM

SEQ ID NO: 5467 - protein, 11 aa, Severe acute respiratory syndrome coronavirus 2
VYYSQLMCQPI

SEQ ID NO: 5468 - protein, 11 aa, Severe acute respiratory syndrome coronavirus 2
YYSQLMCQPIL

SEQ ID NO: 5469 - protein, 11 aa, Severe acute respiratory syndrome coronavirus 2
YSQLMCQPILL

SEQ ID NO: 5470 - protein, 11 aa, Severe acute respiratory syndrome coronavirus 2
SQLMCQPILLL

SEQ ID NO: 5471 - protein, 11 aa, Severe acute respiratory syndrome coronavirus 2
QLMCQPILLLD

SEQ ID NO: 5472 - protein, 11 aa, Severe acute respiratory syndrome coronavirus 2
MCQPILLLDQA

SEQ ID NO: 5473 - protein, 11 aa, Severe acute respiratory syndrome coronavirus 2
LLLDQALVSDV

SEQ ID NO: 5474 - protein, 11 aa, Severe acute respiratory syndrome coronavirus 2
LVSDVGDSAEV

SEQ ID NO: 5475 - protein, 11 aa, Severe acute respiratory syndrome coronavirus 2
AEVAVKMFDAY

SEQ ID NO: 5476 - protein, 11 aa, Severe acute respiratory syndrome coronavirus 2
EVAVKMFDAYV

SEQ ID NO: 5477 - protein, 11 aa, Severe acute respiratory syndrome coronavirus 2
VKMFDAYVNTF

SEQ ID NO: 5478 - protein, 11 aa, Severe acute respiratory syndrome coronavirus 2
KMFDAYVNTFS

SEQ ID NO: 5479 - protein, 11 aa, Severe acute respiratory syndrome coronavirus 2
DAYVNTFSSTF

SEQ ID NO: 5480 - protein, 11 aa, Severe acute respiratory syndrome coronavirus 2
AYVNTFSSTFN

SEQ ID NO: 5481 - protein, 11 aa, Severe acute respiratory syndrome coronavirus 2
YVNTFSSTFNV

SEQ ID NO: 5482 - protein, 11 aa, Severe acute respiratory syndrome coronavirus 2
NTFSSTFNVPM

SEQ ID NO: 5483 - protein, 11 aa, Severe acute respiratory syndrome coronavirus 2
FSSTFNVPMEK

SEQ ID NO: 5484 - protein, 11 aa, Severe acute respiratory syndrome coronavirus 2
SSTFNVPMEKL

SEQ ID NO: 5485 - protein, 11 aa, Severe acute respiratory syndrome coronavirus 2
STFNVPMEKLK

SEQ ID NO: 5486 - protein, 11 aa, Severe acute respiratory syndrome coronavirus 2
FNVPMEKLKTL

SEQ ID NO: 5487 - protein, 11 aa, Severe acute respiratory syndrome coronavirus 2
VPMEKLKTLVA

SEQ ID NO: 5488 - protein, 11 aa, Severe acute respiratory syndrome coronavirus 2
MEKLKTLVATA

SEQ ID NO: 5489 - protein, 11 aa, Severe acute respiratory syndrome coronavirus 2
KLKTLVATAEA

SEQ ID NO: 5490 - protein, 11 aa, Severe acute respiratory syndrome coronavirus 2
KTLVATAEAEL

SEQ ID NO: 5491 - protein, 11 aa, Severe acute respiratory syndrome coronavirus 2
AEAELAKNVSL

SEQ ID NO: 5492 - protein, 11 aa, Severe acute respiratory syndrome coronavirus 2
VSLDNVLSTFI

SEQ ID NO: 5493 - protein, 11 aa, Severe acute respiratory syndrome coronavirus 2
NVLSTFISAAR

SEQ ID NO: 5494 - protein, 11 aa, Severe acute respiratory syndrome coronavirus 2
STFISAARQGF

SEQ ID NO: 5495 - protein, 11 aa, Severe acute respiratory syndrome coronavirus 2
YMLTYNKVENM

SEQ ID NO: 5496 - protein, 11 aa, Severe acute respiratory syndrome coronavirus 2
TYNKVENMTPR

SEQ ID NO: 5497 - protein, 11 aa, Severe acute respiratory syndrome coronavirus 2
SARHINAQVAK

SEQ ID NO: 5498 - protein, 11 aa, Severe acute respiratory syndrome coronavirus 2
AQVAKSHSIAL

SEQ ID NO: 5499 - protein, 11 aa, Severe acute respiratory syndrome coronavirus 2
VAKSHSIALIW

SEQ ID NO: 5500 - protein, 11 aa, Severe acute respiratory syndrome coronavirus 2
KSHSIALIWNV

SEQ ID NO: 5501 - protein, 11 aa, Severe acute respiratory syndrome coronavirus 2
LIWNVKDFMSL

SEQ ID NO: 5502 - protein, 11 aa, Severe acute respiratory syndrome coronavirus 2
KDFMSLSEQLR

SEQ ID NO: 5503 - protein, 11 aa, Severe acute respiratory syndrome coronavirus 2
MSLSEQLRKQI

SEQ ID NO: 5504 - protein, 11 aa, Severe acute respiratory syndrome coronavirus 2
SEQLRKQIRSA

SEQ ID NO: 5505 - protein, 11 aa, Severe acute respiratory syndrome coronavirus 2
RSAAKKNNLPF

SEQ ID NO: 5506 - protein, 11 aa, Severe acute respiratory syndrome coronavirus 2
SAAKKNNLPFK

SEQ ID NO: 5507 - protein, 11 aa, Severe acute respiratory syndrome coronavirus 2
KLTCATTRQVV

SEQ ID NO: 5508 - protein, 11 aa, Severe acute respiratory syndrome coronavirus 2
TRQVVNVVTTK

SEQ ID NO: 5509 - protein, 11 aa, Severe acute respiratory syndrome coronavirus 2
VTTKIALKGGK

SEQ ID NO: 5510 - protein, 11 aa, Severe acute respiratory syndrome coronavirus 2
IVNNWLKQLIK

SEQ ID NO: 5511 - protein, 11 aa, Severe acute respiratory syndrome coronavirus 2
WLKQLIKVTLV

SEQ ID NO: 5512 - protein, 11 aa, Severe acute respiratory syndrome coronavirus 2
LKQLIKVTLVF

SEQ ID NO: 5513 - protein, 11 aa, Severe acute respiratory syndrome coronavirus 2
KQLIKVTLVFL

SEQ ID NO: 5514 - protein, 11 aa, Severe acute respiratory syndrome coronavirus 2
LVFLFVAAIFY

SEQ ID NO: 5515 - protein, 11 aa, Severe acute respiratory syndrome coronavirus 2
VFLFVAAIFYL

SEQ ID NO: 5516 - protein, 11 aa, Severe acute respiratory syndrome coronavirus 2
FLFVAAIFYLI

SEQ ID NO: 5517 - protein, 11 aa, Severe acute respiratory syndrome coronavirus 2
VAAIFYLITPV

SEQ ID NO: 5518 - protein, 11 aa, Severe acute respiratory syndrome coronavirus 2
AIFYLITPVHV

SEQ ID NO: 5519 - protein, 11 aa, Severe acute respiratory syndrome coronavirus 2
IFYLITPVHVM

SEQ ID NO: 5520 - protein, 11 aa, Severe acute respiratory syndrome coronavirus 2
YLITPVHVMSK

SEQ ID NO: 5521 - protein, 11 aa, Severe acute respiratory syndrome coronavirus 2
HTDFSSEIIGY

SEQ ID NO: 5522 - protein, 11 aa, Severe acute respiratory syndrome coronavirus 2
TDFSSEIIGYK

SEQ ID NO: 5523 - protein, 11 aa, Severe acute respiratory syndrome coronavirus 2
FSSEIIGYKAI

SEQ ID NO: 5524 - protein, 11 aa, Severe acute respiratory syndrome coronavirus 2
GYKAIDGGVTR

SEQ ID NO: 5525 - protein, 11 aa, Severe acute respiratory syndrome coronavirus 2
IASTDTCFANK

SEQ ID NO: 5526 - protein, 11 aa, Severe acute respiratory syndrome coronavirus 2
FANKHADFDTW

SEQ ID NO: 5527 - protein, 11 aa, Severe acute respiratory syndrome coronavirus 2
HADFDTWFSQR

SEQ ID NO: 5528 - protein, 11 aa, Severe acute respiratory syndrome coronavirus 2
DTWFSQRGGSY

SEQ ID NO: 5529 - protein, 11 aa, Severe acute respiratory syndrome coronavirus 2
SQRGGSYTNDK

SEQ ID NO: 5530 - protein, 11 aa, Severe acute respiratory syndrome coronavirus 2
SYTNDKACPLI

SEQ ID NO: 5531 - protein, 11 aa, Severe acute respiratory syndrome coronavirus 2
AVITREVGFVV

SEQ ID NO: 5532 - protein, 11 aa, Severe acute respiratory syndrome coronavirus 2
TREVGFVVPGL

SEQ ID NO: 5533 - protein, 11 aa, Severe acute respiratory syndrome coronavirus 2
REVGFVVPGLP

SEQ ID NO: 5534 - protein, 11 aa, Severe acute respiratory syndrome coronavirus 2
GFVVPGLPGTI

SEQ ID NO: 5535 - protein, 11 aa, Severe acute respiratory syndrome coronavirus 2
FVVPGLPGTIL

SEQ ID NO: 5536 - protein, 11 aa, Severe acute respiratory syndrome coronavirus 2
VVPGLPGTILR

SEQ ID NO: 5537 - protein, 11 aa, Severe acute respiratory syndrome coronavirus 2
LRTTNGDFLHF

SEQ ID NO: 5538 - protein, 11 aa, Severe acute respiratory syndrome coronavirus 2
RTTNGDFLHFL

SEQ ID NO: 5539 - protein, 11 aa, Severe acute respiratory syndrome coronavirus 2
TNGDFLHFLPR

SEQ ID NO: 5540 - protein, 11 aa, Severe acute respiratory syndrome coronavirus 2
FLHFLPRVFSA

SEQ ID NO: 5541 - protein, 11 aa, Severe acute respiratory syndrome coronavirus 2
LHFLPRVFSAV

SEQ ID NO: 5542 - protein, 11 aa, Severe acute respiratory syndrome coronavirus 2
LPRVFSAVGNI

SEQ ID NO: 5543 - protein, 11 aa, Severe acute respiratory syndrome coronavirus 2
RVFSAVGNICY

SEQ ID NO: 5544 - protein, 11 aa, Severe acute respiratory syndrome coronavirus 2
AVGNICYTPSK

SEQ ID NO: 5545 - protein, 11 aa, Severe acute respiratory syndrome coronavirus 2
KLIEYTDIATS

SEQ ID NO: 5546 - protein, 11 aa, Severe acute respiratory syndrome coronavirus 2
YTDIATSACVL

SEQ ID NO: 5547 - protein, 11 aa, Severe acute respiratory syndrome coronavirus 2
CVLAAECTIFK

SEQ ID NO: 5548 - protein, 11 aa, Severe acute respiratory syndrome coronavirus 2
FKDASGKPVPY

SEQ ID NO: 5549 - protein, 11 aa, Severe acute respiratory syndrome coronavirus 2
DTNVLEGSVAY

SEQ ID NO: 5550 - protein, 11 aa, Severe acute respiratory syndrome coronavirus 2
VLEGSVAYESL

SEQ ID NO: 5551 - protein, 11 aa, Severe acute respiratory syndrome coronavirus 2
YESLRPDTRYV

SEQ ID NO: 5552 - protein, 11 aa, Severe acute respiratory syndrome coronavirus 2
YVLMDGSIIQF

SEQ ID NO: 5553 - protein, 11 aa, Severe acute respiratory syndrome coronavirus 2
FPNTYLEGSVR

SEQ ID NO: 5554 - protein, 11 aa, Severe acute respiratory syndrome coronavirus 2
LEGSVRVVTTF

SEQ ID NO: 5555 - protein, 11 aa, Severe acute respiratory syndrome coronavirus 2
VRVVTTFDSEY

SEQ ID NO: 5556 - protein, 11 aa, Severe acute respiratory syndrome coronavirus 2
VVTTFDSEYCR

SEQ ID NO: 5557 - protein, 11 aa, Severe acute respiratory syndrome coronavirus 2
EAGVCVSTSGR

SEQ ID NO: 5558 - protein, 11 aa, Severe acute respiratory syndrome coronavirus 2
SGRWVLNNDYY

SEQ ID NO: 5559 - protein, 11 aa, Severe acute respiratory syndrome coronavirus 2
GRWVLNNDYYR

SEQ ID NO: 5560 - protein, 11 aa, Severe acute respiratory syndrome coronavirus 2
RWVLNNDYYRS

SEQ ID NO: 5561 - protein, 11 aa, Severe acute respiratory syndrome coronavirus 2
WVLNNDYYRSL

SEQ ID NO: 5562 - protein, 11 aa, Severe acute respiratory syndrome coronavirus 2
YRSLPGVFCGV

SEQ ID NO: 5563 - protein, 11 aa, Severe acute respiratory syndrome coronavirus 2
SLPGVFCGVDA

SEQ ID NO: 5564 - protein, 11 aa, Severe acute respiratory syndrome coronavirus 2
LPGVFCGVDAV

SEQ ID NO: 5565 - protein, 11 aa, Severe acute respiratory syndrome coronavirus 2
VNLLTNMFTPL

SEQ ID NO: 5566 - protein, 11 aa, Severe acute respiratory syndrome coronavirus 2
NLLTNMFTPLI

SEQ ID NO: 5567 - protein, 11 aa, Severe acute respiratory syndrome coronavirus 2
MFTPLIQPIGA

SEQ ID NO: 5568 - protein, 11 aa, Severe acute respiratory syndrome coronavirus 2
FTPLIQPIGAL

SEQ ID NO: 5569 - protein, 11 aa, Severe acute respiratory syndrome coronavirus 2
ISASIVAGGIV

SEQ ID NO: 5570 - protein, 11 aa, Severe acute respiratory syndrome coronavirus 2
SIVAGGIVAIV

SEQ ID NO: 5571 - protein, 11 aa, Severe acute respiratory syndrome coronavirus 2
IVAGGIVAIVV

SEQ ID NO: 5572 - protein, 11 aa, Severe acute respiratory syndrome coronavirus 2
IVAIVVTCLAY

SEQ ID NO: 5573 - protein, 11 aa, Severe acute respiratory syndrome coronavirus 2
VVTCLAYYFMR

SEQ ID NO: 5574 - protein, 11 aa, Severe acute respiratory syndrome coronavirus 2
VTCLAYYFMRF

SEQ ID NO: 5575 - protein, 11 aa, Severe acute respiratory syndrome coronavirus 2
TCLAYYFMRFR

SEQ ID NO: 5576 - protein, 11 aa, Severe acute respiratory syndrome coronavirus 2
CLAYYFMRFRR

SEQ ID NO: 5577 - protein, 11 aa, Severe acute respiratory syndrome coronavirus 2
LAYYFMRFRRA

SEQ ID NO: 5578 - protein, 11 aa, Severe acute respiratory syndrome coronavirus 2
AYYFMRFRRAF

SEQ ID NO: 5579 - protein, 11 aa, Severe acute respiratory syndrome coronavirus 2
YYFMRFRRAFG

SEQ ID NO: 5580 - protein, 11 aa, Severe acute respiratory syndrome coronavirus 2
FMRFRRAFGEY

SEQ ID NO: 5581 - protein, 11 aa, Severe acute respiratory syndrome coronavirus 2
MRFRRAFGEYS

SEQ ID NO: 5582 - protein, 11 aa, Severe acute respiratory syndrome coronavirus 2
FRRAFGEYSHV

SEQ ID NO: 5583 - protein, 11 aa, Severe acute respiratory syndrome coronavirus 2
RRAFGEYSHVV

SEQ ID NO: 5584 - protein, 11 aa, Severe acute respiratory syndrome coronavirus 2
AFGEYSHVVAF

SEQ ID NO: 5585 - protein, 11 aa, Severe acute respiratory syndrome coronavirus 2
EYSHVVAFNTL

SEQ ID NO: 5586 - protein, 11 aa, Severe acute respiratory syndrome coronavirus 2
YSHVVAFNTLL

SEQ ID NO: 5587 - protein, 11 aa, Severe acute respiratory syndrome coronavirus 2
SHVVAFNTLLF

SEQ ID NO: 5588 - protein, 11 aa, Severe acute respiratory syndrome coronavirus 2
HVVAFNTLLFL

SEQ ID NO: 5589 - protein, 11 aa, Severe acute respiratory syndrome coronavirus 2
NTLLFLMSFTV

SEQ ID NO: 5590 - protein, 11 aa, Severe acute respiratory syndrome coronavirus 2
TLLFLMSFTVL

SEQ ID NO: 5591 - protein, 11 aa, Severe acute respiratory syndrome coronavirus 2
LFLMSFTVLCL

SEQ ID NO: 5592 - protein, 11 aa, Severe acute respiratory syndrome coronavirus 2
FLMSFTVLCLT

SEQ ID NO: 5593 - protein, 11 aa, Severe acute respiratory syndrome coronavirus 2
MSFTVLCLTPV

SEQ ID NO: 5594 - protein, 11 aa, Severe acute respiratory syndrome coronavirus 2
SFTVLCLTPVY

SEQ ID NO: 5595 - protein, 11 aa, Severe acute respiratory syndrome coronavirus 2
VLCLTPVYSFL

SEQ ID NO: 5596 - protein, 11 aa, Severe acute respiratory syndrome coronavirus 2
LTPVYSFLPGV

SEQ ID NO: 5597 - protein, 11 aa, Severe acute respiratory syndrome coronavirus 2
TPVYSFLPGVY

SEQ ID NO: 5598 - protein, 11 aa, Severe acute respiratory syndrome coronavirus 2
VYSFLPGVYSV

SEQ ID NO: 5599 - protein, 11 aa, Severe acute respiratory syndrome coronavirus 2
YSFLPGVYSVI

SEQ ID NO: 5600 - protein, 11 aa, Severe acute respiratory syndrome coronavirus 2
SFLPGVYSVIY

SEQ ID NO: 5601 - protein, 11 aa, Severe acute respiratory syndrome coronavirus 2
FLPGVYSVIYL

SEQ ID NO: 5602 - protein, 11 aa, Severe acute respiratory syndrome coronavirus 2
LPGVYSVIYLY

SEQ ID NO: 5603 - protein, 11 aa, Severe acute respiratory syndrome coronavirus 2
VYSVIYLYLTF

SEQ ID NO: 5604 - protein, 11 aa, Severe acute respiratory syndrome coronavirus 2
YSVIYLYLTFY

SEQ ID NO: 5605 - protein, 11 aa, Severe acute respiratory syndrome coronavirus 2
SVIYLYLTFYL

SEQ ID NO: 5606 - protein, 11 aa, Severe acute respiratory syndrome coronavirus 2
LYLTFYLTNDV

SEQ ID NO: 5607 - protein, 11 aa, Severe acute respiratory syndrome coronavirus 2
YLTFYLTNDVS

SEQ ID NO: 5608 - protein, 11 aa, Severe acute respiratory syndrome coronavirus 2
LTFYLTNDVSF

SEQ ID NO: 5609 - protein, 11 aa, Severe acute respiratory syndrome coronavirus 2
TFYLTNDVSFL

SEQ ID NO: 5610 - protein, 11 aa, Severe acute respiratory syndrome coronavirus 2
FYLTNDVSFLA

SEQ ID NO: 5611 - protein, 11 aa, Severe acute respiratory syndrome coronavirus 2
YLTNDVSFLAH

SEQ ID NO: 5612 - protein, 11 aa, Severe acute respiratory syndrome coronavirus 2
LTNDVSFLAHI

SEQ ID NO: 5613 - protein, 11 aa, Severe acute respiratory syndrome coronavirus 2
NDVSFLAHIQW

SEQ ID NO: 5614 - protein, 11 aa, Severe acute respiratory syndrome coronavirus 2
VSFLAHIQWMV

SEQ ID NO: 5615 - protein, 11 aa, Severe acute respiratory syndrome coronavirus 2
SFLAHIQWMVM

SEQ ID NO: 5616 - protein, 11 aa, Severe acute respiratory syndrome coronavirus 2
FLAHIQWMVMF

SEQ ID NO: 5617 - protein, 11 aa, Severe acute respiratory syndrome coronavirus 2
IQWMVMFTPLV

SEQ ID NO: 5618 - protein, 11 aa, Severe acute respiratory syndrome coronavirus 2
WMVMFTPLVPF

SEQ ID NO: 5619 - protein, 11 aa, Severe acute respiratory syndrome coronavirus 2
MVMFTPLVPFW

SEQ ID NO: 5620 - protein, 11 aa, Severe acute respiratory syndrome coronavirus 2
VMFTPLVPFWI

SEQ ID NO: 5621 - protein, 11 aa, Severe acute respiratory syndrome coronavirus 2
FTPLVPFWITI

SEQ ID NO: 5622 - protein, 11 aa, Severe acute respiratory syndrome coronavirus 2
TPLVPFWITIA

SEQ ID NO: 5623 - protein, 11 aa, Severe acute respiratory syndrome coronavirus 2
PLVPFWITIAY

SEQ ID NO: 5624 - protein, 11 aa, Severe acute respiratory syndrome coronavirus 2
LVPFWITIAYI

SEQ ID NO: 5625 - protein, 11 aa, Severe acute respiratory syndrome coronavirus 2
TIAYIICISTK

SEQ ID NO: 5626 - protein, 11 aa, Severe acute respiratory syndrome coronavirus 2
AYIICISTKHF

SEQ ID NO: 5627 - protein, 11 aa, Severe acute respiratory syndrome coronavirus 2
YIICISTKHFY

SEQ ID NO: 5628 - protein, 11 aa, Severe acute respiratory syndrome coronavirus 2
IICISTKHFYW

SEQ ID NO: 5629 - protein, 11 aa, Severe acute respiratory syndrome coronavirus 2
TKHFYWFFSNY

SEQ ID NO: 5630 - protein, 11 aa, Severe acute respiratory syndrome coronavirus 2
KHFYWFFSNYL

SEQ ID NO: 5631 - protein, 11 aa, Severe acute respiratory syndrome coronavirus 2
HFYWFFSNYLK

SEQ ID NO: 5632 - protein, 11 aa, Severe acute respiratory syndrome coronavirus 2
FYWFFSNYLKR

SEQ ID NO: 5633 - protein, 11 aa, Severe acute respiratory syndrome coronavirus 2
YWFFSNYLKRR

SEQ ID NO: 5634 - protein, 11 aa, Severe acute respiratory syndrome coronavirus 2
FSNYLKRRVVF

SEQ ID NO: 5635 - protein, 11 aa, Severe acute respiratory syndrome coronavirus 2
YLKRRVVFNGV

SEQ ID NO: 5636 - protein, 11 aa, Severe acute respiratory syndrome coronavirus 2
KRRVVFNGVSF

SEQ ID NO: 5637 - protein, 11 aa, Severe acute respiratory syndrome coronavirus 2
RRVVFNGVSFS

SEQ ID NO: 5638 - protein, 11 aa, Severe acute respiratory syndrome coronavirus 2
VVFNGVSFSTF

SEQ ID NO: 5639 - protein, 11 aa, Severe acute respiratory syndrome coronavirus 2
VFNGVSFSTFE

SEQ ID NO: 5640 - protein, 11 aa, Severe acute respiratory syndrome coronavirus 2
VSFSTFEEAAL

SEQ ID NO: 5641 - protein, 11 aa, Severe acute respiratory syndrome coronavirus 2
STFEEAALCTF

SEQ ID NO: 5642 - protein, 11 aa, Severe acute respiratory syndrome coronavirus 2
FEEAALCTFLL

SEQ ID NO: 5643 - protein, 11 aa, Severe acute respiratory syndrome coronavirus 2
EAALCTFLLNK

SEQ ID NO: 5644 - protein, 11 aa, Severe acute respiratory syndrome coronavirus 2
CTFLLNKEMYL

SEQ ID NO: 5645 - protein, 11 aa, Severe acute respiratory syndrome coronavirus 2
TFLLNKEMYLK

SEQ ID NO: 5646 - protein, 11 aa, Severe acute respiratory syndrome coronavirus 2
FLLNKEMYLKL

SEQ ID NO: 5647 - protein, 11 aa, Severe acute respiratory syndrome coronavirus 2
LLNKEMYLKLR

SEQ ID NO: 5648 - protein, 11 aa, Severe acute respiratory syndrome coronavirus 2
KEMYLKLRSDV

SEQ ID NO: 5649 - protein, 11 aa, Severe acute respiratory syndrome coronavirus 2
EMYLKLRSDVL

SEQ ID NO: 5650 - protein, 11 aa, Severe acute respiratory syndrome coronavirus 2
MYLKLRSDVLL

SEQ ID NO: 5651 - protein, 11 aa, Severe acute respiratory syndrome coronavirus 2
LKLRSDVLLPL

SEQ ID NO: 5652 - protein, 11 aa, Severe acute respiratory syndrome coronavirus 2
KLRSDVLLPLT

SEQ ID NO: 5653 - protein, 11 aa, Severe acute respiratory syndrome coronavirus 2
RSDVLLPLTQY

SEQ ID NO: 5654 - protein, 11 aa, Severe acute respiratory syndrome coronavirus 2
DVLLPLTQYNR

SEQ ID NO: 5655 - protein, 11 aa, Severe acute respiratory syndrome coronavirus 2
VLLPLTQYNRY

SEQ ID NO: 5656 - protein, 11 aa, Severe acute respiratory syndrome coronavirus 2
LLPLTQYNRYL

SEQ ID NO: 5657 - protein, 11 aa, Severe acute respiratory syndrome coronavirus 2
LPLTQYNRYLA

SEQ ID NO: 5658 - protein, 11 aa, Severe acute respiratory syndrome coronavirus 2
LTQYNRYLALY

SEQ ID NO: 5659 - protein, 11 aa, Severe acute respiratory syndrome coronavirus 2
TQYNRYLALYN

SEQ ID NO: 5660 - protein, 11 aa, Severe acute respiratory syndrome coronavirus 2
QYNRYLALYNK

SEQ ID NO: 5661 - protein, 11 aa, Severe acute respiratory syndrome coronavirus 2
YNRYLALYNKY

SEQ ID NO: 5662 - protein, 11 aa, Severe acute respiratory syndrome coronavirus 2
NRYLALYNKYK

SEQ ID NO: 5663 - protein, 11 aa, Severe acute respiratory syndrome coronavirus 2
RYLALYNKYKY

SEQ ID NO: 5664 - protein, 11 aa, Severe acute respiratory syndrome coronavirus 2
YNKYKYFSGAM

SEQ ID NO: 5665 - protein, 11 aa, Severe acute respiratory syndrome coronavirus 2
YFSGAMDTTSY

SEQ ID NO: 5666 - protein, 11 aa, Severe acute respiratory syndrome coronavirus 2
FSGAMDTTSYR

SEQ ID NO: 5667 - protein, 11 aa, Severe acute respiratory syndrome coronavirus 2
SYREAACCHLA

SEQ ID NO: 5668 - protein, 11 aa, Severe acute respiratory syndrome coronavirus 2
YREAACCHLAK

SEQ ID NO: 5669 - protein, 11 aa, Severe acute respiratory syndrome coronavirus 2
REAACCHLAKA

SEQ ID NO: 5670 - protein, 11 aa, Severe acute respiratory syndrome coronavirus 2
DFSNSGSDVLY

SEQ ID NO: 5671 - protein, 11 aa, Severe acute respiratory syndrome coronavirus 2
YQPPQTSITSA

SEQ ID NO: 5672 - protein, 11 aa, Severe acute respiratory syndrome coronavirus 2
QPPQTSITSAV

SEQ ID NO: 5673 - protein, 11 aa, Severe acute respiratory syndrome coronavirus 2
SITSAVLQSGF

SEQ ID NO: 5674 - protein, 11 aa, Severe acute respiratory syndrome coronavirus 2
ITSAVLQSGFR

SEQ ID NO: 5675 - protein, 11 aa, Severe acute respiratory syndrome coronavirus 2
TSAVLQSGFRK

SEQ ID NO: 5676 - protein, 11 aa, Severe acute respiratory syndrome coronavirus 2
VLQSGFRKMAF

SEQ ID NO: 5677 - protein, 11 aa, Severe acute respiratory syndrome coronavirus 2
LQSGFRKMAFP

SEQ ID NO: 5678 - protein, 11 aa, Severe acute respiratory syndrome coronavirus 2
GFRKMAFPSGK

SEQ ID NO: 5679 - protein, 11 aa, Severe acute respiratory syndrome coronavirus 2
FRKMAFPSGKV

SEQ ID NO: 5680 - protein, 11 aa, Severe acute respiratory syndrome coronavirus 2
TCGTTTLNGLW

SEQ ID NO: 5681 - protein, 11 aa, Severe acute respiratory syndrome coronavirus 2
TTLNGLWLDDV

SEQ ID NO: 5682 - protein, 11 aa, Severe acute respiratory syndrome coronavirus 2
TLNGLWLDDVV

SEQ ID NO: 5683 - protein, 11 aa, Severe acute respiratory syndrome coronavirus 2
LWLDDVVYCPR

SEQ ID NO: 5684 - protein, 11 aa, Severe acute respiratory syndrome coronavirus 2
CTSEDMLNPNY

SEQ ID NO: 5685 - protein, 11 aa, Severe acute respiratory syndrome coronavirus 2
DMLNPNYEDLL

SEQ ID NO: 5686 - protein, 11 aa, Severe acute respiratory syndrome coronavirus 2
MLNPNYEDLLI

SEQ ID NO: 5687 - protein, 11 aa, Severe acute respiratory syndrome coronavirus 2
LLIRKSNHNFL

SEQ ID NO: 5688 - protein, 11 aa, Severe acute respiratory syndrome coronavirus 2
LIRKSNHNFLV

SEQ ID NO: 5689 - protein, 11 aa, Severe acute respiratory syndrome coronavirus 2
NFLVQAGNVQL

SEQ ID NO: 5690 - protein, 11 aa, Severe acute respiratory syndrome coronavirus 2
FLVQAGNVQLR

SEQ ID NO: 5691 - protein, 11 aa, Severe acute respiratory syndrome coronavirus 2
RVIGHSMQNCV

SEQ ID NO: 5692 - protein, 11 aa, Severe acute respiratory syndrome coronavirus 2
IGHSMQNCVLK

SEQ ID NO: 5693 - protein, 11 aa, Severe acute respiratory syndrome coronavirus 2
HSMQNCVLKLK

SEQ ID NO: 5694 - protein, 11 aa, Severe acute respiratory syndrome coronavirus 2
SMQNCVLKLKV

SEQ ID NO: 5695 - protein, 11 aa, Severe acute respiratory syndrome coronavirus 2
KVDTANPKTPK

SEQ ID NO: 5696 - protein, 11 aa, Severe acute respiratory syndrome coronavirus 2
DTANPKTPKYK

SEQ ID NO: 5697 - protein, 11 aa, Severe acute respiratory syndrome coronavirus 2
KFVRIQPGQTF

SEQ ID NO: 5698 - protein, 11 aa, Severe acute respiratory syndrome coronavirus 2
VRIQPGQTFSV

SEQ ID NO: 5699 - protein, 11 aa, Severe acute respiratory syndrome coronavirus 2
RIQPGQTFSVL

SEQ ID NO: 5700 - protein, 11 aa, Severe acute respiratory syndrome coronavirus 2
ACYNGSPSGVY

SEQ ID NO: 5701 - protein, 11 aa, Severe acute respiratory syndrome coronavirus 2
GVYQCAMRPNF

SEQ ID NO: 5702 - protein, 11 aa, Severe acute respiratory syndrome coronavirus 2
YQCAMRPNFTI

SEQ ID NO: 5703 - protein, 11 aa, Severe acute respiratory syndrome coronavirus 2
QCAMRPNFTIK

SEQ ID NO: 5704 - protein, 11 aa, Severe acute respiratory syndrome coronavirus 2
MRPNFTIKGSF

SEQ ID NO: 5705 - protein, 11 aa, Severe acute respiratory syndrome coronavirus 2
RPNFTIKGSFL

SEQ ID NO: 5706 - protein, 11 aa, Severe acute respiratory syndrome coronavirus 2
GSFLNGSCGSV

SEQ ID NO: 5707 - protein, 11 aa, Severe acute respiratory syndrome coronavirus 2
FLNGSCGSVGF

SEQ ID NO: 5708 - protein, 11 aa, Severe acute respiratory syndrome coronavirus 2
NIDYDCVSFCY

SEQ ID NO: 5709 - protein, 11 aa, Severe acute respiratory syndrome coronavirus 2
VSFCYMHHMEL

SEQ ID NO: 5710 - protein, 11 aa, Severe acute respiratory syndrome coronavirus 2
YMHHMELPTGV

SEQ ID NO: 5711 - protein, 11 aa, Severe acute respiratory syndrome coronavirus 2
HHMELPTGVHA

SEQ ID NO: 5712 - protein, 11 aa, Severe acute respiratory syndrome coronavirus 2
LPTGVHAGTDL

SEQ ID NO: 5713 - protein, 11 aa, Severe acute respiratory syndrome coronavirus 2
HAGTDLEGNFY

SEQ ID NO: 5714 - protein, 11 aa, Severe acute respiratory syndrome coronavirus 2
EGNFYGPFVDR

SEQ ID NO: 5715 - protein, 11 aa, Severe acute respiratory syndrome coronavirus 2
FYGPFVDRQTA

SEQ ID NO: 5716 - protein, 11 aa, Severe acute respiratory syndrome coronavirus 2
DTTITVNVLAW

SEQ ID NO: 5717 - protein, 11 aa, Severe acute respiratory syndrome coronavirus 2
TTITVNVLAWL

SEQ ID NO: 5718 - protein, 11 aa, Severe acute respiratory syndrome coronavirus 2
TITVNVLAWLY

SEQ ID NO: 5719 - protein, 11 aa, Severe acute respiratory syndrome coronavirus 2
TVNVLAWLYAA

SEQ ID NO: 5720 - protein, 11 aa, Severe acute respiratory syndrome coronavirus 2
VNVLAWLYAAV

SEQ ID NO: 5721 - protein, 11 aa, Severe acute respiratory syndrome coronavirus 2
NVLAWLYAAVI

SEQ ID NO: 5722 - protein, 11 aa, Severe acute respiratory syndrome coronavirus 2
WLYAAVINGDR

SEQ ID NO: 5723 - protein, 11 aa, Severe acute respiratory syndrome coronavirus 2
LYAAVINGDRW

SEQ ID NO: 5724 - protein, 11 aa, Severe acute respiratory syndrome coronavirus 2
VINGDRWFLNR

SEQ ID NO: 5725 - protein, 11 aa, Severe acute respiratory syndrome coronavirus 2
RWFLNRFTTTL

SEQ ID NO: 5726 - protein, 11 aa, Severe acute respiratory syndrome coronavirus 2
FLNRFTTTLND

SEQ ID NO: 5727 - protein, 11 aa, Severe acute respiratory syndrome coronavirus 2
RFTTTLNDFNL

SEQ ID NO: 5728 - protein, 11 aa, Severe acute respiratory syndrome coronavirus 2
FTTTLNDFNLV

SEQ ID NO: 5729 - protein, 11 aa, Severe acute respiratory syndrome coronavirus 2
TLNDFNLVAMK

SEQ ID NO: 5730 - protein, 11 aa, Severe acute respiratory syndrome coronavirus 2
LNDFNLVAMKY

SEQ ID NO: 5731 - protein, 11 aa, Severe acute respiratory syndrome coronavirus 2
TQDHVDILGPL

SEQ ID NO: 5732 - protein, 11 aa, Severe acute respiratory syndrome coronavirus 2
ILGPLSAQTGI

SEQ ID NO: 5733 - protein, 11 aa, Severe acute respiratory syndrome coronavirus 2
GPLSAQTGIAV

SEQ ID NO: 5734 - protein, 11 aa, Severe acute respiratory syndrome coronavirus 2
GIAVLDMCASL

SEQ ID NO: 5735 - protein, 11 aa, Severe acute respiratory syndrome coronavirus 2
KELLQNGMNGR

SEQ ID NO: 5736 - protein, 11 aa, Severe acute respiratory syndrome coronavirus 2
LLQNGMNGRTI

SEQ ID NO: 5737 - protein, 11 aa, Severe acute respiratory syndrome coronavirus 2
LQNGMNGRTIL

SEQ ID NO: 5738 - protein, 11 aa, Severe acute respiratory syndrome coronavirus 2
GMNGRTILGSA

SEQ ID NO: 5739 - protein, 11 aa, Severe acute respiratory syndrome coronavirus 2
MNGRTILGSAL

SEQ ID NO: 5740 - protein, 11 aa, Severe acute respiratory syndrome coronavirus 2
LLEDEFTPFDV

SEQ ID NO: 5741 - protein, 11 aa, Severe acute respiratory syndrome coronavirus 2
EDEFTPFDVVR

SEQ ID NO: 5742 - protein, 11 aa, Severe acute respiratory syndrome coronavirus 2
SGVTFQSAVKR

SEQ ID NO: 5743 - protein, 11 aa, Severe acute respiratory syndrome coronavirus 2
VTFQSAVKRTI

SEQ ID NO: 5744 - protein, 11 aa, Severe acute respiratory syndrome coronavirus 2
VKRTIKGTHHW

SEQ ID NO: 5745 - protein, 11 aa, Severe acute respiratory syndrome coronavirus 2
KRTIKGTHHWL

SEQ ID NO: 5746 - protein, 11 aa, Severe acute respiratory syndrome coronavirus 2
RTIKGTHHWLL

SEQ ID NO: 5747 - protein, 11 aa, Severe acute respiratory syndrome coronavirus 2
HWLLLTILTSL

SEQ ID NO: 5748 - protein, 11 aa, Severe acute respiratory syndrome coronavirus 2
WLLLTILTSLL

SEQ ID NO: 5749 - protein, 11 aa, Severe acute respiratory syndrome coronavirus 2
LLLTILTSLLV

SEQ ID NO: 5750 - protein, 11 aa, Severe acute respiratory syndrome coronavirus 2
LLTILTSLLVL

SEQ ID NO: 5751 - protein, 11 aa, Severe acute respiratory syndrome coronavirus 2
LTILTSLLVLV

SEQ ID NO: 5752 - protein, 11 aa, Severe acute respiratory syndrome coronavirus 2
VLVQSTQWSLF

SEQ ID NO: 5753 - protein, 11 aa, Severe acute respiratory syndrome coronavirus 2
LVQSTQWSLFF

SEQ ID NO: 5754 - protein, 11 aa, Severe acute respiratory syndrome coronavirus 2
VQSTQWSLFFF

SEQ ID NO: 5755 - protein, 11 aa, Severe acute respiratory syndrome coronavirus 2
QSTQWSLFFFL

SEQ ID NO: 5756 - protein, 11 aa, Severe acute respiratory syndrome coronavirus 2
STQWSLFFFLY

SEQ ID NO: 5757 - protein, 11 aa, Severe acute respiratory syndrome coronavirus 2
WSLFFFLYENA

SEQ ID NO: 5758 - protein, 11 aa, Severe acute respiratory syndrome coronavirus 2
SLFFFLYENAF

SEQ ID NO: 5759 - protein, 11 aa, Severe acute respiratory syndrome coronavirus 2
FFLYENAFLPF

SEQ ID NO: 5760 - protein, 11 aa, Severe acute respiratory syndrome coronavirus 2
FLYENAFLPFA

SEQ ID NO: 5761 - protein, 11 aa, Severe acute respiratory syndrome coronavirus 2
LYENAFLPFAM

SEQ ID NO: 5762 - protein, 11 aa, Severe acute respiratory syndrome coronavirus 2
AFLPFAMGIIA

SEQ ID NO: 5763 - protein, 11 aa, Severe acute respiratory syndrome coronavirus 2
FLPFAMGIIAM

SEQ ID NO: 5764 - protein, 11 aa, Severe acute respiratory syndrome coronavirus 2
FAMGIIAMSAF

SEQ ID NO: 5765 - protein, 11 aa, Severe acute respiratory syndrome coronavirus 2
AMGIIAMSAFA

SEQ ID NO: 5766 - protein, 11 aa, Severe acute respiratory syndrome coronavirus 2
IIAMSAFAMMF

SEQ ID NO: 5767 - protein, 11 aa, Severe acute respiratory syndrome coronavirus 2
IAMSAFAMMFV

SEQ ID NO: 5768 - protein, 11 aa, Severe acute respiratory syndrome coronavirus 2
AMSAFAMMFVK

SEQ ID NO: 5769 - protein, 11 aa, Severe acute respiratory syndrome coronavirus 2
SAFAMMFVKHK

SEQ ID NO: 5770 - protein, 11 aa, Severe acute respiratory syndrome coronavirus 2
AMMFVKHKHAF

SEQ ID NO: 5771 - protein, 11 aa, Severe acute respiratory syndrome coronavirus 2
MMFVKHKHAFL

SEQ ID NO: 5772 - protein, 11 aa, Severe acute respiratory syndrome coronavirus 2
FVKHKHAFLCL

SEQ ID NO: 5773 - protein, 11 aa, Severe acute respiratory syndrome coronavirus 2
VKHKHAFLCLF

SEQ ID NO: 5774 - protein, 11 aa, Severe acute respiratory syndrome coronavirus 2
AFLCLFLLPSL

SEQ ID NO: 5775 - protein, 11 aa, Severe acute respiratory syndrome coronavirus 2
FLCLFLLPSLA

SEQ ID NO: 5776 - protein, 11 aa, Severe acute respiratory syndrome coronavirus 2
CLFLLPSLATV

SEQ ID NO: 5777 - protein, 11 aa, Severe acute respiratory syndrome coronavirus 2
LFLLPSLATVA

SEQ ID NO: 5778 - protein, 11 aa, Severe acute respiratory syndrome coronavirus 2
FLLPSLATVAY

SEQ ID NO: 5779 - protein, 11 aa, Severe acute respiratory syndrome coronavirus 2
LLPSLATVAYF

SEQ ID NO: 5780 - protein, 11 aa, Severe acute respiratory syndrome coronavirus 2
SLATVAYFNMV

SEQ ID NO: 5781 - protein, 11 aa, Severe acute respiratory syndrome coronavirus 2
LATVAYFNMVY

SEQ ID NO: 5782 - protein, 11 aa, Severe acute respiratory syndrome coronavirus 2
YFNMVYMPASW

SEQ ID NO: 5783 - protein, 11 aa, Severe acute respiratory syndrome coronavirus 2
NMVYMPASWVM

SEQ ID NO: 5784 - protein, 11 aa, Severe acute respiratory syndrome coronavirus 2
MVYMPASWVMR

SEQ ID NO: 5785 - protein, 11 aa, Severe acute respiratory syndrome coronavirus 2
VYMPASWVMRI

SEQ ID NO: 5786 - protein, 11 aa, Severe acute respiratory syndrome coronavirus 2
YMPASWVMRIM

SEQ ID NO: 5787 - protein, 11 aa, Severe acute respiratory syndrome coronavirus 2
MPASWVMRIMT

SEQ ID NO: 5788 - protein, 11 aa, Severe acute respiratory syndrome coronavirus 2
PASWVMRIMTW

SEQ ID NO: 5789 - protein, 11 aa, Severe acute respiratory syndrome coronavirus 2
VMRIMTWLDMV

SEQ ID NO: 5790 - protein, 11 aa, Severe acute respiratory syndrome coronavirus 2
MTWLDMVDTSL

SEQ ID NO: 5791 - protein, 11 aa, Severe acute respiratory syndrome coronavirus 2
DMVDTSLSGFK

SEQ ID NO: 5792 - protein, 11 aa, Severe acute respiratory syndrome coronavirus 2
SLSGFKLKDCV

SEQ ID NO: 5793 - protein, 11 aa, Severe acute respiratory syndrome coronavirus 2
GFKLKDCVMYA

SEQ ID NO: 5794 - protein, 11 aa, Severe acute respiratory syndrome coronavirus 2
FKLKDCVMYAS

SEQ ID NO: 5795 - protein, 11 aa, Severe acute respiratory syndrome coronavirus 2
KLKDCVMYASA

SEQ ID NO: 5796 - protein, 11 aa, Severe acute respiratory syndrome coronavirus 2
CVMYASAVVLL

SEQ ID NO: 5797 - protein, 11 aa, Severe acute respiratory syndrome coronavirus 2
VMYASAVVLLI

SEQ ID NO: 5798 - protein, 11 aa, Severe acute respiratory syndrome coronavirus 2
MYASAVVLLIL

SEQ ID NO: 5799 - protein, 11 aa, Severe acute respiratory syndrome coronavirus 2
AVVLLILMTAR

SEQ ID NO: 5800 - protein, 11 aa, Severe acute respiratory syndrome coronavirus 2
VLLILMTARTV

SEQ ID NO: 5801 - protein, 11 aa, Severe acute respiratory syndrome coronavirus 2
LLILMTARTVY

SEQ ID NO: 5802 - protein, 11 aa, Severe acute respiratory syndrome coronavirus 2
MTARTVYDDGA

SEQ ID NO: 5803 - protein, 11 aa, Severe acute respiratory syndrome coronavirus 2
TARTVYDDGAR

SEQ ID NO: 5804 - protein, 11 aa, Severe acute respiratory syndrome coronavirus 2
ARTVYDDGARR

SEQ ID NO: 5805 - protein, 11 aa, Severe acute respiratory syndrome coronavirus 2
TVYDDGARRVW

SEQ ID NO: 5806 - protein, 11 aa, Severe acute respiratory syndrome coronavirus 2
ARRVWTLMNVL

SEQ ID NO: 5807 - protein, 11 aa, Severe acute respiratory syndrome coronavirus 2
RRVWTLMNVLT

SEQ ID NO: 5808 - protein, 11 aa, Severe acute respiratory syndrome coronavirus 2
RVWTLMNVLTL

SEQ ID NO: 5809 - protein, 11 aa, Severe acute respiratory syndrome coronavirus 2
VWTLMNVLTLV

SEQ ID NO: 5810 - protein, 11 aa, Severe acute respiratory syndrome coronavirus 2
WTLMNVLTLVY

SEQ ID NO: 5811 - protein, 11 aa, Severe acute respiratory syndrome coronavirus 2
TLMNVLTLVYK

SEQ ID NO: 5812 - protein, 11 aa, Severe acute respiratory syndrome coronavirus 2
LMNVLTLVYKV

SEQ ID NO: 5813 - protein, 11 aa, Severe acute respiratory syndrome coronavirus 2
NVLTLVYKVYY

SEQ ID NO: 5814 - protein, 11 aa, Severe acute respiratory syndrome coronavirus 2
TLVYKVYYGNA

SEQ ID NO: 5815 - protein, 11 aa, Severe acute respiratory syndrome coronavirus 2
VYYGNALDQAI

SEQ ID NO: 5816 - protein, 11 aa, Severe acute respiratory syndrome coronavirus 2
YGNALDQAISM

SEQ ID NO: 5817 - protein, 11 aa, Severe acute respiratory syndrome coronavirus 2
ALDQAISMWAL

SEQ ID NO: 5818 - protein, 11 aa, Severe acute respiratory syndrome coronavirus 2
AISMWALIISV

SEQ ID NO: 5819 - protein, 11 aa, Severe acute respiratory syndrome coronavirus 2
ISMWALIISVT

SEQ ID NO: 5820 - protein, 11 aa, Severe acute respiratory syndrome coronavirus 2
SMWALIISVTS

SEQ ID NO: 5821 - protein, 11 aa, Severe acute respiratory syndrome coronavirus 2
WALIISVTSNY

SEQ ID NO: 5822 - protein, 11 aa, Severe acute respiratory syndrome coronavirus 2
NYSGVVTTVMF

SEQ ID NO: 5823 - protein, 11 aa, Severe acute respiratory syndrome coronavirus 2
GVVTTVMFLAR

SEQ ID NO: 5824 - protein, 11 aa, Severe acute respiratory syndrome coronavirus 2
TTVMFLARGIV

SEQ ID NO: 5825 - protein, 11 aa, Severe acute respiratory syndrome coronavirus 2
TVMFLARGIVF

SEQ ID NO: 5826 - protein, 11 aa, Severe acute respiratory syndrome coronavirus 2
VMFLARGIVFM

SEQ ID NO: 5827 - protein, 11 aa, Severe acute respiratory syndrome coronavirus 2
FLARGIVFMCV

SEQ ID NO: 5828 - protein, 11 aa, Severe acute respiratory syndrome coronavirus 2
VFMCVEYCPIF

SEQ ID NO: 5829 - protein, 11 aa, Severe acute respiratory syndrome coronavirus 2
FMCVEYCPIFF

SEQ ID NO: 5830 - protein, 11 aa, Severe acute respiratory syndrome coronavirus 2
MCVEYCPIFFI

SEQ ID NO: 5831 - protein, 11 aa, Severe acute respiratory syndrome coronavirus 2
CPIFFITGNTL

SEQ ID NO: 5832 - protein, 11 aa, Severe acute respiratory syndrome coronavirus 2
GYFCTCYFGLF

SEQ ID NO: 5833 - protein, 11 aa, Severe acute respiratory syndrome coronavirus 2
CYFGLFCLLNR

SEQ ID NO: 5834 - protein, 11 aa, Severe acute respiratory syndrome coronavirus 2
YFGLFCLLNRY

SEQ ID NO: 5835 - protein, 11 aa, Severe acute respiratory syndrome coronavirus 2
GLFCLLNRYFR

SEQ ID NO: 5836 - protein, 11 aa, Severe acute respiratory syndrome coronavirus 2
LFCLLNRYFRL

SEQ ID NO: 5837 - protein, 11 aa, Severe acute respiratory syndrome coronavirus 2
CLLNRYFRLTL

SEQ ID NO: 5838 - protein, 11 aa, Severe acute respiratory syndrome coronavirus 2
NRYFRLTLGVY

SEQ ID NO: 5839 - protein, 11 aa, Severe acute respiratory syndrome coronavirus 2
YFRLTLGVYDY

SEQ ID NO: 5840 - protein, 11 aa, Severe acute respiratory syndrome coronavirus 2
FRLTLGVYDYL

SEQ ID NO: 5841 - protein, 11 aa, Severe acute respiratory syndrome coronavirus 2
RLTLGVYDYLV

SEQ ID NO: 5842 - protein, 11 aa, Severe acute respiratory syndrome coronavirus 2
TLGVYDYLVST

SEQ ID NO: 5843 - protein, 11 aa, Severe acute respiratory syndrome coronavirus 2
VYDYLVSTQEF

SEQ ID NO: 5844 - protein, 11 aa, Severe acute respiratory syndrome coronavirus 2
YDYLVSTQEFR

SEQ ID NO: 5845 - protein, 11 aa, Severe acute respiratory syndrome coronavirus 2
DYLVSTQEFRY

SEQ ID NO: 5846 - protein, 11 aa, Severe acute respiratory syndrome coronavirus 2
YLVSTQEFRYM

SEQ ID NO: 5847 - protein, 11 aa, Severe acute respiratory syndrome coronavirus 2
QEFRYMNSQGL

SEQ ID NO: 5848 - protein, 11 aa, Severe acute respiratory syndrome coronavirus 2
YMNSQGLLPPK

SEQ ID NO: 5849 - protein, 11 aa, Severe acute respiratory syndrome coronavirus 2
LLPPKNSIDAF

SEQ ID NO: 5850 - protein, 11 aa, Severe acute respiratory syndrome coronavirus 2
NSIDAFKLNIK

SEQ ID NO: 5851 - protein, 11 aa, Severe acute respiratory syndrome coronavirus 2
AFKLNIKLLGV

SEQ ID NO: 5852 - protein, 11 aa, Severe acute respiratory syndrome coronavirus 2
KLLGVGGKPCI

SEQ ID NO: 5853 - protein, 11 aa, Severe acute respiratory syndrome coronavirus 2
ATVQSKMSDVK

SEQ ID NO: 5854 - protein, 11 aa, Severe acute respiratory syndrome coronavirus 2
SKMSDVKCTSV

SEQ ID NO: 5855 - protein, 11 aa, Severe acute respiratory syndrome coronavirus 2
KMSDVKCTSVV

SEQ ID NO: 5856 - protein, 11 aa, Severe acute respiratory syndrome coronavirus 2
MSDVKCTSVVL

SEQ ID NO: 5857 - protein, 11 aa, Severe acute respiratory syndrome coronavirus 2
SVVLLSVLQQL

SEQ ID NO: 5858 - protein, 11 aa, Severe acute respiratory syndrome coronavirus 2
VVLLSVLQQLR

SEQ ID NO: 5859 - protein, 11 aa, Severe acute respiratory syndrome coronavirus 2
VLLSVLQQLRV

SEQ ID NO: 5860 - protein, 11 aa, Severe acute respiratory syndrome coronavirus 2
SSKLWAQCVQL

SEQ ID NO: 5861 - protein, 11 aa, Severe acute respiratory syndrome coronavirus 2
VQLHNDILLAK

SEQ ID NO: 5862 - protein, 11 aa, Severe acute respiratory syndrome coronavirus 2
ILLAKDTTEAF

SEQ ID NO: 5863 - protein, 11 aa, Severe acute respiratory syndrome coronavirus 2
TEAFEKMVSLL

SEQ ID NO: 5864 - protein, 11 aa, Severe acute respiratory syndrome coronavirus 2
FEKMVSLLSVL

SEQ ID NO: 5865 - protein, 11 aa, Severe acute respiratory syndrome coronavirus 2
EKMVSLLSVLL

SEQ ID NO: 5866 - protein, 11 aa, Severe acute respiratory syndrome coronavirus 2
MVSLLSVLLSM

SEQ ID NO: 5867 - protein, 11 aa, Severe acute respiratory syndrome coronavirus 2
LLSVLLSMQGA

SEQ ID NO: 5868 - protein, 11 aa, Severe acute respiratory syndrome coronavirus 2
LSVLLSMQGAV

SEQ ID NO: 5869 - protein, 11 aa, Severe acute respiratory syndrome coronavirus 2
LSMQGAVDINK

SEQ ID NO: 5870 - protein, 11 aa, Severe acute respiratory syndrome coronavirus 2
SMQGAVDINKL

SEQ ID NO: 5871 - protein, 11 aa, Severe acute respiratory syndrome coronavirus 2
CEEMLDNRATL

SEQ ID NO: 5872 - protein, 11 aa, Severe acute respiratory syndrome coronavirus 2
MLDNRATLQAI

SEQ ID NO: 5873 - protein, 11 aa, Severe acute respiratory syndrome coronavirus 2
RATLQAIASEF

SEQ ID NO: 5874 - protein, 11 aa, Severe acute respiratory syndrome coronavirus 2
LQAIASEFSSL

SEQ ID NO: 5875 - protein, 11 aa, Severe acute respiratory syndrome coronavirus 2
IASEFSSLPSY

SEQ ID NO: 5876 - protein, 11 aa, Severe acute respiratory syndrome coronavirus 2
SEFSSLPSYAA

SEQ ID NO: 5877 - protein, 11 aa, Severe acute respiratory syndrome coronavirus 2
FSSLPSYAAFA

SEQ ID NO: 5878 - protein, 11 aa, Severe acute respiratory syndrome coronavirus 2
SLPSYAAFATA

SEQ ID NO: 5879 - protein, 11 aa, Severe acute respiratory syndrome coronavirus 2
YAAFATAQEAY

SEQ ID NO: 5880 - protein, 11 aa, Severe acute respiratory syndrome coronavirus 2
VLKKLKKSLNV

SEQ ID NO: 5881 - protein, 11 aa, Severe acute respiratory syndrome coronavirus 2
KKSLNVAKSEF

SEQ ID NO: 5882 - protein, 11 aa, Severe acute respiratory syndrome coronavirus 2
SLNVAKSEFDR

SEQ ID NO: 5883 - protein, 11 aa, Severe acute respiratory syndrome coronavirus 2
AKSEFDRDAAM

SEQ ID NO: 5884 - protein, 11 aa, Severe acute respiratory syndrome coronavirus 2
RKLEKMADQAM

SEQ ID NO: 5885 - protein, 11 aa, Severe acute respiratory syndrome coronavirus 2
KMADQAMTQMY

SEQ ID NO: 5886 - protein, 11 aa, Severe acute respiratory syndrome coronavirus 2
MADQAMTQMYK

SEQ ID NO: 5887 - protein, 11 aa, Severe acute respiratory syndrome coronavirus 2
QAMTQMYKQAR

SEQ ID NO: 5888 - protein, 11 aa, Severe acute respiratory syndrome coronavirus 2
QMYKQARSEDK

SEQ ID NO: 5889 - protein, 11 aa, Severe acute respiratory syndrome coronavirus 2
MYKQARSEDKR

SEQ ID NO: 5890 - protein, 11 aa, Severe acute respiratory syndrome coronavirus 2
RAKVTSAMQTM

SEQ ID NO: 5891 - protein, 11 aa, Severe acute respiratory syndrome coronavirus 2
KVTSAMQTMLF

SEQ ID NO: 5892 - protein, 11 aa, Severe acute respiratory syndrome coronavirus 2
TSAMQTMLFTM

SEQ ID NO: 5893 - protein, 11 aa, Severe acute respiratory syndrome coronavirus 2
AMQTMLFTMLR

SEQ ID NO: 5894 - protein, 11 aa, Severe acute respiratory syndrome coronavirus 2
MQTMLFTMLRK

SEQ ID NO: 5895 - protein, 11 aa, Severe acute respiratory syndrome coronavirus 2
QTMLFTMLRKL

SEQ ID NO: 5896 - protein, 11 aa, Severe acute respiratory syndrome coronavirus 2
DALNNIINNAR

SEQ ID NO: 5897 - protein, 11 aa, Severe acute respiratory syndrome coronavirus 2
VPLNIIPLTTA

SEQ ID NO: 5898 - protein, 11 aa, Severe acute respiratory syndrome coronavirus 2
KLMVVIPDYNT

SEQ ID NO: 5899 - protein, 11 aa, Severe acute respiratory syndrome coronavirus 2
LMVVIPDYNTY

SEQ ID NO: 5900 - protein, 11 aa, Severe acute respiratory syndrome coronavirus 2
MVVIPDYNTYK

SEQ ID NO: 5901 - protein, 11 aa, Severe acute respiratory syndrome coronavirus 2
TYKNTCDGTTF

SEQ ID NO: 5902 - protein, 11 aa, Severe acute respiratory syndrome coronavirus 2
KNTCDGTTFTY

SEQ ID NO: 5903 - protein, 11 aa, Severe acute respiratory syndrome coronavirus 2
GTTFTYASALW

SEQ ID NO: 5904 - protein, 11 aa, Severe acute respiratory syndrome coronavirus 2
TTFTYASALWE

SEQ ID NO: 5905 - protein, 11 aa, Severe acute respiratory syndrome coronavirus 2
TFTYASALWEI

SEQ ID NO: 5906 - protein, 11 aa, Severe acute respiratory syndrome coronavirus 2
FTYASALWEIQ

SEQ ID NO: 5907 - protein, 11 aa, Severe acute respiratory syndrome coronavirus 2
ASALWEIQQVV

SEQ ID NO: 5908 - protein, 11 aa, Severe acute respiratory syndrome coronavirus 2
SALWEIQQVVD

SEQ ID NO: 5909 - protein, 11 aa, Severe acute respiratory syndrome coronavirus 2
ALWEIQQVVDA

SEQ ID NO: 5910 - protein, 11 aa, Severe acute respiratory syndrome coronavirus 2
SEISMDNSPNL

SEQ ID NO: 5911 - protein, 11 aa, Severe acute respiratory syndrome coronavirus 2
ISMDNSPNLAW

SEQ ID NO: 5912 - protein, 11 aa, Severe acute respiratory syndrome coronavirus 2
NLAWPLIVTAL

SEQ ID NO: 5913 - protein, 11 aa, Severe acute respiratory syndrome coronavirus 2
LAWPLIVTALR

SEQ ID NO: 5914 - protein, 11 aa, Severe acute respiratory syndrome coronavirus 2
VTALRANSAVK

SEQ ID NO: 5915 - protein, 11 aa, Severe acute respiratory syndrome coronavirus 2
VKLQNNELSPV

SEQ ID NO: 5916 - protein, 11 aa, Severe acute respiratory syndrome coronavirus 2
KLQNNELSPVA

SEQ ID NO: 5917 - protein, 11 aa, Severe acute respiratory syndrome coronavirus 2
LQNNELSPVAL

SEQ ID NO: 5918 - protein, 11 aa, Severe acute respiratory syndrome coronavirus 2
TACTDDNALAY

SEQ ID NO: 5919 - protein, 11 aa, Severe acute respiratory syndrome coronavirus 2
ACTDDNALAYY

SEQ ID NO: 5920 - protein, 11 aa, Severe acute respiratory syndrome coronavirus 2
CTDDNALAYYN

SEQ ID NO: 5921 - protein, 11 aa, Severe acute respiratory syndrome coronavirus 2
LAYYNTTKGGR

SEQ ID NO: 5922 - protein, 11 aa, Severe acute respiratory syndrome coronavirus 2
AYYNTTKGGRF

SEQ ID NO: 5923 - protein, 11 aa, Severe acute respiratory syndrome coronavirus 2
GRFVLALLSDL

SEQ ID NO: 5924 - protein, 11 aa, Severe acute respiratory syndrome coronavirus 2
VLALLSDLQDL

SEQ ID NO: 5925 - protein, 11 aa, Severe acute respiratory syndrome coronavirus 2
ALLSDLQDLKW

SEQ ID NO: 5926 - protein, 11 aa, Severe acute respiratory syndrome coronavirus 2
LLSDLQDLKWA

SEQ ID NO: 5927 - protein, 11 aa, Severe acute respiratory syndrome coronavirus 2
LSDLQDLKWAR

SEQ ID NO: 5928 - protein, 11 aa, Severe acute respiratory syndrome coronavirus 2
LQDLKWARFPK

SEQ ID NO: 5929 - protein, 11 aa, Severe acute respiratory syndrome coronavirus 2
RFPKSDGTGTI

SEQ ID NO: 5930 - protein, 11 aa, Severe acute respiratory syndrome coronavirus 2
FPKSDGTGTIY

SEQ ID NO: 5931 - protein, 11 aa, Severe acute respiratory syndrome coronavirus 2
TIYTELEPPCR

SEQ ID NO: 5932 - protein, 11 aa, Severe acute respiratory syndrome coronavirus 2
IYTELEPPCRF

SEQ ID NO: 5933 - protein, 11 aa, Severe acute respiratory syndrome coronavirus 2
YLYFIKGLNNL

SEQ ID NO: 5934 - protein, 11 aa, Severe acute respiratory syndrome coronavirus 2
YFIKGLNNLNR

SEQ ID NO: 5935 - protein, 11 aa, Severe acute respiratory syndrome coronavirus 2
GLNNLNRGMVL

SEQ ID NO: 5936 - protein, 11 aa, Severe acute respiratory syndrome coronavirus 2
NRGMVLGSLAA

SEQ ID NO: 5937 - protein, 11 aa, Severe acute respiratory syndrome coronavirus 2
GMVLGSLAATV

SEQ ID NO: 5938 - protein, 11 aa, Severe acute respiratory syndrome coronavirus 2
MVLGSLAATVR

SEQ ID NO: 5939 - protein, 11 aa, Severe acute respiratory syndrome coronavirus 2
VLGSLAATVRL

SEQ ID NO: 5940 - protein, 11 aa, Severe acute respiratory syndrome coronavirus 2
STVLSFCAFAV

SEQ ID NO: 5941 - protein, 11 aa, Severe acute respiratory syndrome coronavirus 2
SFCAFAVDAAK

SEQ ID NO: 5942 - protein, 11 aa, Severe acute respiratory syndrome coronavirus 2
CAFAVDAAKAY

SEQ ID NO: 5943 - protein, 11 aa, Severe acute respiratory syndrome coronavirus 2
AFAVDAAKAYK

SEQ ID NO: 5944 - protein, 11 aa, Severe acute respiratory syndrome coronavirus 2
KDYLASGGQPI

SEQ ID NO: 5945 - protein, 11 aa, Severe acute respiratory syndrome coronavirus 2
QESFGGASCCL

SEQ ID NO: 5946 - protein, 11 aa, Severe acute respiratory syndrome coronavirus 2
ESFGGASCCLY

SEQ ID NO: 5947 - protein, 11 aa, Severe acute respiratory syndrome coronavirus 2
FCDLKGKYVQI

SEQ ID NO: 5948 - protein, 11 aa, Severe acute respiratory syndrome coronavirus 2
CANDPVGFTLK

SEQ ID NO: 5949 - protein, 11 aa, Severe acute respiratory syndrome coronavirus 2
GFTLKNTVCTV

SEQ ID NO: 5950 - protein, 11 aa, Severe acute respiratory syndrome coronavirus 2
FTLKNTVCTVC

SEQ ID NO: 5951 - protein, 11 aa, Severe acute respiratory syndrome coronavirus 2
LKNTVCTVCGM

SEQ ID NO: 5952 - protein, 11 aa, Severe acute respiratory syndrome coronavirus 2
NTVCTVCGMWK

SEQ ID NO: 5953 - protein, 11 aa, Severe acute respiratory syndrome coronavirus 2
KGYGCSCDQLR

SEQ ID NO: 5954 - protein, 11 aa, Severe acute respiratory syndrome coronavirus 2
PMLQSADAQSF

SEQ ID NO: 5955 - protein, 11 aa, Severe acute respiratory syndrome coronavirus 2
MLQSADAQSFL

SEQ ID NO: 5956 - protein, 8 aa, Severe acute respiratory syndrome coronavirus 2
TSTDVVYR

SEQ ID NO: 5957 - protein, 8 aa, Severe acute respiratory syndrome coronavirus 2
VYRAFDIY

SEQ ID NO: 5958 - protein, 8 aa, Severe acute respiratory syndrome coronavirus 2
NLIDSYFV

SEQ ID NO: 5959 - protein, 8 aa, Severe acute respiratory syndrome coronavirus 2
LIDSYFVV

SEQ ID NO: 5960 - protein, 8 aa, Severe acute respiratory syndrome coronavirus 2
DSYFVVKR

SEQ ID NO: 5961 - protein, 8 aa, Severe acute respiratory syndrome coronavirus 2
FVVKRHTF

SEQ ID NO: 5962 - protein, 8 aa, Severe acute respiratory syndrome coronavirus 2
YQHEETIY

SEQ ID NO: 5963 - protein, 8 aa, Severe acute respiratory syndrome coronavirus 2
HEETIYNL

SEQ ID NO: 5964 - protein, 8 aa, Severe acute respiratory syndrome coronavirus 2
ETIYNLLK

SEQ ID NO: 5965 - protein, 8 aa, Severe acute respiratory syndrome coronavirus 2
LLKDCPAV

SEQ ID NO: 5966 - protein, 8 aa, Severe acute respiratory syndrome coronavirus 2
KHDFFKFR

SEQ ID NO: 5967 - protein, 8 aa, Severe acute respiratory syndrome coronavirus 2
HDFFKFRI

SEQ ID NO: 5968 - protein, 8 aa, Severe acute respiratory syndrome coronavirus 2
DMVPHISR

SEQ ID NO: 5969 - protein, 8 aa, Severe acute respiratory syndrome coronavirus 2
ISRQRLTK

SEQ ID NO: 5970 - protein, 8 aa, Severe acute respiratory syndrome coronavirus 2
YTMADLVY

SEQ ID NO: 5971 - protein, 8 aa, Severe acute respiratory syndrome coronavirus 2
TMADLVYA

SEQ ID NO: 5972 - protein, 8 aa, Severe acute respiratory syndrome coronavirus 2
MADLVYAL

SEQ ID NO: 5973 - protein, 8 aa, Severe acute respiratory syndrome coronavirus 2
LVYALRHF

SEQ ID NO: 5974 - protein, 8 aa, Severe acute respiratory syndrome coronavirus 2
GERVRQAL

SEQ ID NO: 5975 - protein, 8 aa, Severe acute respiratory syndrome coronavirus 2
RVRQALLK

SEQ ID NO: 5976 - protein, 8 aa, Severe acute respiratory syndrome coronavirus 2
TPGSGVPV

SEQ ID NO: 5977 - protein, 8 aa, Severe acute respiratory syndrome coronavirus 2
VPVVDSYY

SEQ ID NO: 5978 - protein, 8 aa, Severe acute respiratory syndrome coronavirus 2
VVDSYYSL

SEQ ID NO: 5979 - protein, 8 aa, Severe acute respiratory syndrome coronavirus 2
YYSLLMPI

SEQ ID NO: 5980 - protein, 8 aa, Severe acute respiratory syndrome coronavirus 2
YSLLMPIL

SEQ ID NO: 5981 - protein, 8 aa, Severe acute respiratory syndrome coronavirus 2
LLMPILTL

SEQ ID NO: 5982 - protein, 8 aa, Severe acute respiratory syndrome coronavirus 2
LTKPYIKW

SEQ ID NO: 5983 - protein, 8 aa, Severe acute respiratory syndrome coronavirus 2
KPYIKWDL

SEQ ID NO: 5984 - protein, 8 aa, Severe acute respiratory syndrome coronavirus 2
RLKLFDRY

SEQ ID NO: 5985 - protein, 8 aa, Severe acute respiratory syndrome coronavirus 2
KLFDRYFK

SEQ ID NO: 5986 - protein, 8 aa, Severe acute respiratory syndrome coronavirus 2
LFDRYFKY

SEQ ID NO: 5987 - protein, 8 aa, Severe acute respiratory syndrome coronavirus 2
FKYWDQTY

SEQ ID NO: 5988 - protein, 8 aa, Severe acute respiratory syndrome coronavirus 2
HPNCVNCL

SEQ ID NO: 5989 - protein, 8 aa, Severe acute respiratory syndrome coronavirus 2
TVFPPTSF

SEQ ID NO: 5990 - protein, 8 aa, Severe acute respiratory syndrome coronavirus 2
TSFGPLVR

SEQ ID NO: 5991 - protein, 8 aa, Severe acute respiratory syndrome coronavirus 2
IFVDGVPF

SEQ ID NO: 5992 - protein, 8 aa, Severe acute respiratory syndrome coronavirus 2
FVDGVPFV

SEQ ID NO: 5993 - protein, 8 aa, Severe acute respiratory syndrome coronavirus 2
VSTGYHFR

SEQ ID NO: 5994 - protein, 8 aa, Severe acute respiratory syndrome coronavirus 2
DVNLHSSR

SEQ ID NO: 5995 - protein, 8 aa, Severe acute respiratory syndrome coronavirus 2
LHSSRLSF

SEQ ID NO: 5996 - protein, 8 aa, Severe acute respiratory syndrome coronavirus 2
SRLSFKEL

SEQ ID NO: 5997 - protein, 8 aa, Severe acute respiratory syndrome coronavirus 2
SFKELLVY

SEQ ID NO: 5998 - protein, 8 aa, Severe acute respiratory syndrome coronavirus 2
KELLVYAA

SEQ ID NO: 5999 - protein, 8 aa, Severe acute respiratory syndrome coronavirus 2
VYAADPAM

SEQ ID NO: 6000 - protein, 8 aa, Severe acute respiratory syndrome coronavirus 2
MHAASGNL

SEQ ID NO: 6001 - protein, 8 aa, Severe acute respiratory syndrome coronavirus 2
HAASGNLL

SEQ ID NO: 6002 - protein, 8 aa, Severe acute respiratory syndrome coronavirus 2
KRTTCFSV

SEQ ID NO: 6003 - protein, 8 aa, Severe acute respiratory syndrome coronavirus 2
FAVSKGFF

SEQ ID NO: 6004 - protein, 8 aa, Severe acute respiratory syndrome coronavirus 2
AVSKGFFK

SEQ ID NO: 6005 - protein, 8 aa, Severe acute respiratory syndrome coronavirus 2
FFKEGSSV

SEQ ID NO: 6006 - protein, 8 aa, Severe acute respiratory syndrome coronavirus 2
KEGSSVEL

SEQ ID NO: 6007 - protein, 8 aa, Severe acute respiratory syndrome coronavirus 2
VELKHFFF

SEQ ID NO: 6008 - protein, 8 aa, Severe acute respiratory syndrome coronavirus 2
YDYYRYNL

SEQ ID NO: 6009 - protein, 8 aa, Severe acute respiratory syndrome coronavirus 2
YYRYNLPT

SEQ ID NO: 6010 - protein, 8 aa, Severe acute respiratory syndrome coronavirus 2
YRYNLPTM

SEQ ID NO: 6011 - protein, 8 aa, Severe acute respiratory syndrome coronavirus 2
QLLFVVEV

SEQ ID NO: 6012 - protein, 8 aa, Severe acute respiratory syndrome coronavirus 2
LLFVVEVV

SEQ ID NO: 6013 - protein, 8 aa, Severe acute respiratory syndrome coronavirus 2
LYYDSMSY

SEQ ID NO: 6014 - protein, 8 aa, Severe acute respiratory syndrome coronavirus 2
ALFAYTKR

SEQ ID NO: 6015 - protein, 8 aa, Severe acute respiratory syndrome coronavirus 2
FAYTKRNV

SEQ ID NO: 6016 - protein, 8 aa, Severe acute respiratory syndrome coronavirus 2
KRNVIPTI

SEQ ID NO: 6017 - protein, 8 aa, Severe acute respiratory syndrome coronavirus 2
QMNLKYAI

SEQ ID NO: 6018 - protein, 8 aa, Severe acute respiratory syndrome coronavirus 2
RARTVAGV

SEQ ID NO: 6019 - protein, 8 aa, Severe acute respiratory syndrome coronavirus 2
RTVAGVSI

SEQ ID NO: 6020 - protein, 8 aa, Severe acute respiratory syndrome coronavirus 2
STMTNRQF

SEQ ID NO: 6021 - protein, 8 aa, Severe acute respiratory syndrome coronavirus 2
RQFHQKLL

SEQ ID NO: 6022 - protein, 8 aa, Severe acute respiratory syndrome coronavirus 2
FYGGWHNM

SEQ ID NO: 6023 - protein, 8 aa, Severe acute respiratory syndrome coronavirus 2
YPKCDRAM

SEQ ID NO: 6024 - protein, 8 aa, Severe acute respiratory syndrome coronavirus 2
RAMPNMLR

SEQ ID NO: 6025 - protein, 8 aa, Severe acute respiratory syndrome coronavirus 2
MPNMLRIM

SEQ ID NO: 6026 - protein, 8 aa, Severe acute respiratory syndrome coronavirus 2
MLRIMASL

SEQ ID NO: 6027 - protein, 8 aa, Severe acute respiratory syndrome coronavirus 2
RIMASLVL

SEQ ID NO: 6028 - protein, 8 aa, Severe acute respiratory syndrome coronavirus 2
IMASLVLA

SEQ ID NO: 6029 - protein, 8 aa, Severe acute respiratory syndrome coronavirus 2
MASLVLAR

SEQ ID NO: 6030 - protein, 8 aa, Severe acute respiratory syndrome coronavirus 2
SLSHRFYR

SEQ ID NO: 6031 - protein, 8 aa, Severe acute respiratory syndrome coronavirus 2
CAQVLSEM

SEQ ID NO: 6032 - protein, 8 aa, Severe acute respiratory syndrome coronavirus 2
MVMCGGSL

SEQ ID NO: 6033 - protein, 8 aa, Severe acute respiratory syndrome coronavirus 2
VMCGGSLY

SEQ ID NO: 6034 - protein, 8 aa, Severe acute respiratory syndrome coronavirus 2
TAYANSVF

SEQ ID NO: 6035 - protein, 8 aa, Severe acute respiratory syndrome coronavirus 2
YANSVFNI

SEQ ID NO: 6036 - protein, 8 aa, Severe acute respiratory syndrome coronavirus 2
VTANVNAL

SEQ ID NO: 6037 - protein, 8 aa, Severe acute respiratory syndrome coronavirus 2
TANVNALL

SEQ ID NO: 6038 - protein, 8 aa, Severe acute respiratory syndrome coronavirus 2
KIADKYVR

SEQ ID NO: 6039 - protein, 8 aa, Severe acute respiratory syndrome coronavirus 2
RLYECLYR

SEQ ID NO: 6040 - protein, 8 aa, Severe acute respiratory syndrome coronavirus 2
TDFVNEFY

SEQ ID NO: 6041 - protein, 8 aa, Severe acute respiratory syndrome coronavirus 2
FVNEFYAY

SEQ ID NO: 6042 - protein, 8 aa, Severe acute respiratory syndrome coronavirus 2
YAYLRKHF

SEQ ID NO: 6043 - protein, 8 aa, Severe acute respiratory syndrome coronavirus 2
YLRKHFSM

SEQ ID NO: 6044 - protein, 8 aa, Severe acute respiratory syndrome coronavirus 2
LRKHFSMM

SEQ ID NO: 6045 - protein, 8 aa, Severe acute respiratory syndrome coronavirus 2
NFKSVLYY

SEQ ID NO: 6046 - protein, 8 aa, Severe acute respiratory syndrome coronavirus 2
VLYYQNNV

SEQ ID NO: 6047 - protein, 8 aa, Severe acute respiratory syndrome coronavirus 2
LYYQNNVF

SEQ ID NO: 6048 - protein, 8 aa, Severe acute respiratory syndrome coronavirus 2
YYQNNVFM

SEQ ID NO: 6049 - protein, 8 aa, Severe acute respiratory syndrome coronavirus 2
KQGDDYVY

SEQ ID NO: 6050 - protein, 8 aa, Severe acute respiratory syndrome coronavirus 2
DDYVYLPY

SEQ ID NO: 6051 - protein, 8 aa, Severe acute respiratory syndrome coronavirus 2
YPDPSRIL

SEQ ID NO: 6052 - protein, 8 aa, Severe acute respiratory syndrome coronavirus 2
ILGAGCFV

SEQ ID NO: 6053 - protein, 8 aa, Severe acute respiratory syndrome coronavirus 2
TLMIERFV

SEQ ID NO: 6054 - protein, 8 aa, Severe acute respiratory syndrome coronavirus 2
MIERFVSL

SEQ ID NO: 6055 - protein, 8 aa, Severe acute respiratory syndrome coronavirus 2
IERFVSLA

SEQ ID NO: 6056 - protein, 8 aa, Severe acute respiratory syndrome coronavirus 2
LAIDAYPL

SEQ ID NO: 6057 - protein, 8 aa, Severe acute respiratory syndrome coronavirus 2
YADVFHLY

SEQ ID NO: 6058 - protein, 8 aa, Severe acute respiratory syndrome coronavirus 2
ADVFHLYL

SEQ ID NO: 6059 - protein, 8 aa, Severe acute respiratory syndrome coronavirus 2
VFHLYLQY

SEQ ID NO: 6060 - protein, 8 aa, Severe acute respiratory syndrome coronavirus 2
HLYLQYIR

SEQ ID NO: 6061 - protein, 8 aa, Severe acute respiratory syndrome coronavirus 2
DELTGHML

SEQ ID NO: 6062 - protein, 8 aa, Severe acute respiratory syndrome coronavirus 2
HMLDMYSV

SEQ ID NO: 6063 - protein, 8 aa, Severe acute respiratory syndrome coronavirus 2
MLDMYSVM

SEQ ID NO: 6064 - protein, 8 aa, Severe acute respiratory syndrome coronavirus 2
LDMYSVML

SEQ ID NO: 6065 - protein, 8 aa, Severe acute respiratory syndrome coronavirus 2
YEAMYTPH

SEQ ID NO: 6066 - protein, 8 aa, Severe acute respiratory syndrome coronavirus 2
AMYTPHTV

SEQ ID NO: 6067 - protein, 8 aa, Severe acute respiratory syndrome coronavirus 2
MYTPHTVL

SEQ ID NO: 6068 - protein, 8 aa, Severe acute respiratory syndrome coronavirus 2
STSHKLVL

SEQ ID NO: 6069 - protein, 8 aa, Severe acute respiratory syndrome coronavirus 2
LVLSVNPY

SEQ ID NO: 6070 - protein, 8 aa, Severe acute respiratory syndrome coronavirus 2
VLSVNPYV

SEQ ID NO: 6071 - protein, 8 aa, Severe acute respiratory syndrome coronavirus 2
VTDVTQLY

SEQ ID NO: 6072 - protein, 8 aa, Severe acute respiratory syndrome coronavirus 2
LYLGGMSY

SEQ ID NO: 6073 - protein, 8 aa, Severe acute respiratory syndrome coronavirus 2
YLGGMSYY

SEQ ID NO: 6074 - protein, 8 aa, Severe acute respiratory syndrome coronavirus 2
KPPISFPL

SEQ ID NO: 6075 - protein, 8 aa, Severe acute respiratory syndrome coronavirus 2
ERLKLFAA

SEQ ID NO: 6076 - protein, 8 aa, Severe acute respiratory syndrome coronavirus 2
KLFAAETL

SEQ ID NO: 6077 - protein, 8 aa, Severe acute respiratory syndrome coronavirus 2
EETFKLSY

SEQ ID NO: 6078 - protein, 8 aa, Severe acute respiratory syndrome coronavirus 2
LSYGIATV

SEQ ID NO: 6079 - protein, 8 aa, Severe acute respiratory syndrome coronavirus 2
IATVREVL

SEQ ID NO: 6080 - protein, 8 aa, Severe acute respiratory syndrome coronavirus 2
LSDRELHL

SEQ ID NO: 6081 - protein, 8 aa, Severe acute respiratory syndrome coronavirus 2
RNYVFTGY

SEQ ID NO: 6082 - protein, 8 aa, Severe acute respiratory syndrome coronavirus 2
NYVFTGYR

SEQ ID NO: 6083 - protein, 8 aa, Severe acute respiratory syndrome coronavirus 2
YVFTGYRV

SEQ ID NO: 6084 - protein, 8 aa, Severe acute respiratory syndrome coronavirus 2
SKVQIGEY

SEQ ID NO: 6085 - protein, 8 aa, Severe acute respiratory syndrome coronavirus 2
VQIGEYTF

SEQ ID NO: 6086 - protein, 8 aa, Severe acute respiratory syndrome coronavirus 2
YTFEKGDY

SEQ ID NO: 6087 - protein, 8 aa, Severe acute respiratory syndrome coronavirus 2
VYRGTTTY

SEQ ID NO: 6088 - protein, 8 aa, Severe acute respiratory syndrome coronavirus 2
TSHTVMPL

SEQ ID NO: 6089 - protein, 8 aa, Severe acute respiratory syndrome coronavirus 2
MPLSAPTL

SEQ ID NO: 6090 - protein, 8 aa, Severe acute respiratory syndrome coronavirus 2
HYVRITGL

SEQ ID NO: 6091 - protein, 8 aa, Severe acute respiratory syndrome coronavirus 2
YVRITGLY

SEQ ID NO: 6092 - protein, 8 aa, Severe acute respiratory syndrome coronavirus 2
DEFSSNVA

SEQ ID NO: 6093 - protein, 8 aa, Severe acute respiratory syndrome coronavirus 2
FSSNVANY

SEQ ID NO: 6094 - protein, 8 aa, Severe acute respiratory syndrome coronavirus 2
TGKSHFAI

SEQ ID NO: 6095 - protein, 8 aa, Severe acute respiratory syndrome coronavirus 2
HFAIGLAL

SEQ ID NO: 6096 - protein, 8 aa, Severe acute respiratory syndrome coronavirus 2
FAIGLALY

SEQ ID NO: 6097 - protein, 8 aa, Severe acute respiratory syndrome coronavirus 2
ALYYPSAR

SEQ ID NO: 6098 - protein, 8 aa, Severe acute respiratory syndrome coronavirus 2
LYYPSARI

SEQ ID NO: 6099 - protein, 8 aa, Severe acute respiratory syndrome coronavirus 2
YYPSARIV

SEQ ID NO: 6100 - protein, 8 aa, Severe acute respiratory syndrome coronavirus 2
YPSARIVY

SEQ ID NO: 6101 - protein, 8 aa, Severe acute respiratory syndrome coronavirus 2
SHAAVDAL

SEQ ID NO: 6102 - protein, 8 aa, Severe acute respiratory syndrome coronavirus 2
CEKALKYL

SEQ ID NO: 6103 - protein, 8 aa, Severe acute respiratory syndrome coronavirus 2
CSRIIPAR

SEQ ID NO: 6104 - protein, 8 aa, Severe acute respiratory syndrome coronavirus 2
RIIPARAR

SEQ ID NO: 6105 - protein, 8 aa, Severe acute respiratory syndrome coronavirus 2
KFKVNSTL

SEQ ID NO: 6106 - protein, 8 aa, Severe acute respiratory syndrome coronavirus 2
STLEQYVF

SEQ ID NO: 6107 - protein, 8 aa, Severe acute respiratory syndrome coronavirus 2
VFCTVNAL

SEQ ID NO: 6108 - protein, 8 aa, Severe acute respiratory syndrome coronavirus 2
RLRAKHYV

SEQ ID NO: 6109 - protein, 8 aa, Severe acute respiratory syndrome coronavirus 2
LRAKHYVY

SEQ ID NO: 6110 - protein, 8 aa, Severe acute respiratory syndrome coronavirus 2
RAKHYVYI

SEQ ID NO: 6111 - protein, 8 aa, Severe acute respiratory syndrome coronavirus 2
LPAPRTLL

SEQ ID NO: 6112 - protein, 8 aa, Severe acute respiratory syndrome coronavirus 2
TLLTKGTL

SEQ ID NO: 6113 - protein, 8 aa, Severe acute respiratory syndrome coronavirus 2
EYFNSVCR

SEQ ID NO: 6114 - protein, 8 aa, Severe acute respiratory syndrome coronavirus 2
YFNSVCRL

SEQ ID NO: 6115 - protein, 8 aa, Severe acute respiratory syndrome coronavirus 2
KTIGPDMF

SEQ ID NO: 6116 - protein, 8 aa, Severe acute respiratory syndrome coronavirus 2
DMFLGTCR

SEQ ID NO: 6117 - protein, 8 aa, Severe acute respiratory syndrome coronavirus 2
MFLGTCRR

SEQ ID NO: 6118 - protein, 8 aa, Severe acute respiratory syndrome coronavirus 2
IVDTVSAL

SEQ ID NO: 6119 - protein, 8 aa, Severe acute respiratory syndrome coronavirus 2
AQCFKMFY

SEQ ID NO: 6120 - protein, 8 aa, Severe acute respiratory syndrome coronavirus 2
QCFKMFYK

SEQ ID NO: 6121 - protein, 8 aa, Severe acute respiratory syndrome coronavirus 2
VVREFLTR

SEQ ID NO: 6122 - protein, 8 aa, Severe acute respiratory syndrome coronavirus 2
LTRNPAWR

SEQ ID NO: 6123 - protein, 8 aa, Severe acute respiratory syndrome coronavirus 2
NPAWRKAV

SEQ ID NO: 6124 - protein, 8 aa, Severe acute respiratory syndrome coronavirus 2
KAVFISPY

SEQ ID NO: 6125 - protein, 8 aa, Severe acute respiratory syndrome coronavirus 2
VASKILGL

SEQ ID NO: 6126 - protein, 8 aa, Severe acute respiratory syndrome coronavirus 2
SEYDYVIF

SEQ ID NO: 6127 - protein, 8 aa, Severe acute respiratory syndrome coronavirus 2
RFNVAITR

SEQ ID NO: 6128 - protein, 8 aa, Severe acute respiratory syndrome coronavirus 2
LQFTSLEI

SEQ ID NO: 6129 - protein, 8 aa, Severe acute respiratory syndrome coronavirus 2
FTSLEIPR

SEQ ID NO: 6130 - protein, 8 aa, Severe acute respiratory syndrome coronavirus 2
IPRRNVAT

SEQ ID NO: 6131 - protein, 8 aa, Severe acute respiratory syndrome coronavirus 2
PRRNVATL

SEQ ID NO: 6132 - protein, 8 aa, Severe acute respiratory syndrome coronavirus 2
AENVTGLF

SEQ ID NO: 6133 - protein, 8 aa, Severe acute respiratory syndrome coronavirus 2
KDMTYRRL

SEQ ID NO: 6134 - protein, 8 aa, Severe acute respiratory syndrome coronavirus 2
TYRRLISM

SEQ ID NO: 6135 - protein, 8 aa, Severe acute respiratory syndrome coronavirus 2
YRRLISMM

SEQ ID NO: 6136 - protein, 8 aa, Severe acute respiratory syndrome coronavirus 2
RLISMMGF

SEQ ID NO: 6137 - protein, 8 aa, Severe acute respiratory syndrome coronavirus 2
ISMMGFKM

SEQ ID NO: 6138 - protein, 8 aa, Severe acute respiratory syndrome coronavirus 2
MMGFKMNY

SEQ ID NO: 6139 - protein, 8 aa, Severe acute respiratory syndrome coronavirus 2
REEAIRHV

SEQ ID NO: 6140 - protein, 8 aa, Severe acute respiratory syndrome coronavirus 2
REAVGTNL

SEQ ID NO: 6141 - protein, 8 aa, Severe acute respiratory syndrome coronavirus 2
QFKHLIPL

SEQ ID NO: 6142 - protein, 8 aa, Severe acute respiratory syndrome coronavirus 2
HLIPLMYK

SEQ ID NO: 6143 - protein, 8 aa, Severe acute respiratory syndrome coronavirus 2
IPLMYKGL

SEQ ID NO: 6144 - protein, 8 aa, Severe acute respiratory syndrome coronavirus 2
LMYKGLPW

SEQ ID NO: 6145 - protein, 8 aa, Severe acute respiratory syndrome coronavirus 2
LPWNVVRL

SEQ ID NO: 6146 - protein, 8 aa, Severe acute respiratory syndrome coronavirus 2
VQMLSDTL

SEQ ID NO: 6147 - protein, 8 aa, Severe acute respiratory syndrome coronavirus 2
LSDRVVFV

SEQ ID NO: 6148 - protein, 8 aa, Severe acute respiratory syndrome coronavirus 2
SDRVVFVL

SEQ ID NO: 6149 - protein, 8 aa, Severe acute respiratory syndrome coronavirus 2
LWAHGFEL

SEQ ID NO: 6150 - protein, 8 aa, Severe acute respiratory syndrome coronavirus 2
FELTSMKY

SEQ ID NO: 6151 - protein, 8 aa, Severe acute respiratory syndrome coronavirus 2
TSMKYFVK

SEQ ID NO: 6152 - protein, 8 aa, Severe acute respiratory syndrome coronavirus 2
RTCCLCDR

SEQ ID NO: 6153 - protein, 8 aa, Severe acute respiratory syndrome coronavirus 2
FSTASDTY

SEQ ID NO: 6154 - protein, 8 aa, Severe acute respiratory syndrome coronavirus 2
YACWHHSI

SEQ ID NO: 6155 - protein, 8 aa, Severe acute respiratory syndrome coronavirus 2
FDYVYNPF

SEQ ID NO: 6156 - protein, 8 aa, Severe acute respiratory syndrome coronavirus 2
YVYNPFMI

SEQ ID NO: 6157 - protein, 8 aa, Severe acute respiratory syndrome coronavirus 2
LQSNHDLY

SEQ ID NO: 6158 - protein, 8 aa, Severe acute respiratory syndrome coronavirus 2
RVDWTIEY

SEQ ID NO: 6159 - protein, 8 aa, Severe acute respiratory syndrome coronavirus 2
YPIIGDEL

SEQ ID NO: 6160 - protein, 8 aa, Severe acute respiratory syndrome coronavirus 2
DELKINAA

SEQ ID NO: 6161 - protein, 8 aa, Severe acute respiratory syndrome coronavirus 2
KVQHMVVK

SEQ ID NO: 6162 - protein, 8 aa, Severe acute respiratory syndrome coronavirus 2
QHMVVKAA

SEQ ID NO: 6163 - protein, 8 aa, Severe acute respiratory syndrome coronavirus 2
HMVVKAAL

SEQ ID NO: 6164 - protein, 8 aa, Severe acute respiratory syndrome coronavirus 2
LLADKFPV

SEQ ID NO: 6165 - protein, 8 aa, Severe acute respiratory syndrome coronavirus 2
LADKFPVL

SEQ ID NO: 6166 - protein, 8 aa, Severe acute respiratory syndrome coronavirus 2
VEWKFYDA

SEQ ID NO: 6167 - protein, 8 aa, Severe acute respiratory syndrome coronavirus 2
KAYKIEEL

SEQ ID NO: 6168 - protein, 8 aa, Severe acute respiratory syndrome coronavirus 2
AYKIEELF

SEQ ID NO: 6169 - protein, 8 aa, Severe acute respiratory syndrome coronavirus 2
YKIEELFY

SEQ ID NO: 6170 - protein, 8 aa, Severe acute respiratory syndrome coronavirus 2
IEELFYSY

SEQ ID NO: 6171 - protein, 8 aa, Severe acute respiratory syndrome coronavirus 2
EELFYSYA

SEQ ID NO: 6172 - protein, 8 aa, Severe acute respiratory syndrome coronavirus 2
FTDGVCLF

SEQ ID NO: 6173 - protein, 8 aa, Severe acute respiratory syndrome coronavirus 2
CLFWNCNV

SEQ ID NO: 6174 - protein, 8 aa, Severe acute respiratory syndrome coronavirus 2
CRFDTRVL

SEQ ID NO: 6175 - protein, 8 aa, Severe acute respiratory syndrome coronavirus 2
LYVNKHAF

SEQ ID NO: 6176 - protein, 8 aa, Severe acute respiratory syndrome coronavirus 2
HAFHTPAF

SEQ ID NO: 6177 - protein, 8 aa, Severe acute respiratory syndrome coronavirus 2
KSAFVNLK

SEQ ID NO: 6178 - protein, 8 aa, Severe acute respiratory syndrome coronavirus 2
KQLPFFYY

SEQ ID NO: 6179 - protein, 8 aa, Severe acute respiratory syndrome coronavirus 2
SDIDYVPL

SEQ ID NO: 6180 - protein, 8 aa, Severe acute respiratory syndrome coronavirus 2
KSATCITR

SEQ ID NO: 6181 - protein, 8 aa, Severe acute respiratory syndrome coronavirus 2
HANEYRLY

SEQ ID NO: 6182 - protein, 8 aa, Severe acute respiratory syndrome coronavirus 2
YRLYLDAY

SEQ ID NO: 6183 - protein, 8 aa, Severe acute respiratory syndrome coronavirus 2
LYLDAYNM

SEQ ID NO: 6184 - protein, 8 aa, Severe acute respiratory syndrome coronavirus 2
YLDAYNMM

SEQ ID NO: 6185 - protein, 8 aa, Severe acute respiratory syndrome coronavirus 2
NMMISAGF

SEQ ID NO: 6186 - protein, 8 aa, Severe acute respiratory syndrome coronavirus 2
ISAGFSLW

SEQ ID NO: 6187 - protein, 8 aa, Severe acute respiratory syndrome coronavirus 2
GFSLWVYK

SEQ ID NO: 6188 - protein, 8 aa, Severe acute respiratory syndrome coronavirus 2
VYKQFDTY

SEQ ID NO: 6189 - protein, 8 aa, Severe acute respiratory syndrome coronavirus 2
KQFDTYNL

SEQ ID NO: 6190 - protein, 8 aa, Severe acute respiratory syndrome coronavirus 2
TYNLWNTF

SEQ ID NO: 6191 - protein, 8 aa, Severe acute respiratory syndrome coronavirus 2
NLWNTFTR

SEQ ID NO: 6192 - protein, 8 aa, Severe acute respiratory syndrome coronavirus 2
TFTRLQSL

SEQ ID NO: 6193 - protein, 8 aa, Severe acute respiratory syndrome coronavirus 2
LENVAFNV

SEQ ID NO: 6194 - protein, 8 aa, Severe acute respiratory syndrome coronavirus 2
GEVPVSII

SEQ ID NO: 6195 - protein, 8 aa, Severe acute respiratory syndrome coronavirus 2
SIINNTVY

SEQ ID NO: 6196 - protein, 8 aa, Severe acute respiratory syndrome coronavirus 2
LFENKTTL

SEQ ID NO: 6197 - protein, 8 aa, Severe acute respiratory syndrome coronavirus 2
IAANTVIW

SEQ ID NO: 6198 - protein, 8 aa, Severe acute respiratory syndrome coronavirus 2
NTVIWDYK

SEQ ID NO: 6199 - protein, 8 aa, Severe acute respiratory syndrome coronavirus 2
TVIWDYKR

SEQ ID NO: 6200 - protein, 8 aa, Severe acute respiratory syndrome coronavirus 2
APAHISTI

SEQ ID NO: 6201 - protein, 8 aa, Severe acute respiratory syndrome coronavirus 2
TETICAPL

SEQ ID NO: 6202 - protein, 8 aa, Severe acute respiratory syndrome coronavirus 2
KTQFNYYK

SEQ ID NO: 6203 - protein, 8 aa, Severe acute respiratory syndrome coronavirus 2
VQQLPETY

SEQ ID NO: 6204 - protein, 8 aa, Severe acute respiratory syndrome coronavirus 2
QQLPETYF

SEQ ID NO: 6205 - protein, 8 aa, Severe acute respiratory syndrome coronavirus 2
ETYFTQSR

SEQ ID NO: 6206 - protein, 8 aa, Severe acute respiratory syndrome coronavirus 2
YFTQSRNL

SEQ ID NO: 6207 - protein, 8 aa, Severe acute respiratory syndrome coronavirus 2
KPRSQMEI

SEQ ID NO: 6208 - protein, 8 aa, Severe acute respiratory syndrome coronavirus 2
SQMEIDFL

SEQ ID NO: 6209 - protein, 8 aa, Severe acute respiratory syndrome coronavirus 2
MEIDFLEL

SEQ ID NO: 6210 - protein, 8 aa, Severe acute respiratory syndrome coronavirus 2
YKLEGYAF

SEQ ID NO: 6211 - protein, 8 aa, Severe acute respiratory syndrome coronavirus 2
YAFEHIVY

SEQ ID NO: 6212 - protein, 8 aa, Severe acute respiratory syndrome coronavirus 2
SQLGGLHL

SEQ ID NO: 6213 - protein, 8 aa, Severe acute respiratory syndrome coronavirus 2
QLGGLHLL

SEQ ID NO: 6214 - protein, 8 aa, Severe acute respiratory syndrome coronavirus 2
KRFKESPF

SEQ ID NO: 6215 - protein, 8 aa, Severe acute respiratory syndrome coronavirus 2
LLDDFVEI

SEQ ID NO: 6216 - protein, 8 aa, Severe acute respiratory syndrome coronavirus 2
YTEISFML

SEQ ID NO: 6217 - protein, 8 aa, Severe acute respiratory syndrome coronavirus 2
TEISFMLW

SEQ ID NO: 6218 - protein, 8 aa, Severe acute respiratory syndrome coronavirus 2
ISFMLWCK

SEQ ID NO: 6219 - protein, 8 aa, Severe acute respiratory syndrome coronavirus 2
VETFYPKL

SEQ ID NO: 6220 - protein, 8 aa, Severe acute respiratory syndrome coronavirus 2
AWQPGVAM

SEQ ID NO: 6221 - protein, 8 aa, Severe acute respiratory syndrome coronavirus 2
VAMPNLYK

SEQ ID NO: 6222 - protein, 8 aa, Severe acute respiratory syndrome coronavirus 2
YKMQRMLL

SEQ ID NO: 6223 - protein, 8 aa, Severe acute respiratory syndrome coronavirus 2
MQRMLLEK

SEQ ID NO: 6224 - protein, 8 aa, Severe acute respiratory syndrome coronavirus 2
MLLEKCDL

SEQ ID NO: 6225 - protein, 8 aa, Severe acute respiratory syndrome coronavirus 2
IMMNVAKY

SEQ ID NO: 6226 - protein, 8 aa, Severe acute respiratory syndrome coronavirus 2
QYLNTLTL

SEQ ID NO: 6227 - protein, 8 aa, Severe acute respiratory syndrome coronavirus 2
YLNTLTLA

SEQ ID NO: 6228 - protein, 8 aa, Severe acute respiratory syndrome coronavirus 2
TLTLAVPY

SEQ ID NO: 6229 - protein, 8 aa, Severe acute respiratory syndrome coronavirus 2
VPYNMRVI

SEQ ID NO: 6230 - protein, 8 aa, Severe acute respiratory syndrome coronavirus 2
MRVIHFGA

SEQ ID NO: 6231 - protein, 8 aa, Severe acute respiratory syndrome coronavirus 2
VAPGTAVL

SEQ ID NO: 6232 - protein, 8 aa, Severe acute respiratory syndrome coronavirus 2
GTAVLRQW

SEQ ID NO: 6233 - protein, 8 aa, Severe acute respiratory syndrome coronavirus 2
WLPTGTLL

SEQ ID NO: 6234 - protein, 8 aa, Severe acute respiratory syndrome coronavirus 2
VSDADSTL

SEQ ID NO: 6235 - protein, 8 aa, Severe acute respiratory syndrome coronavirus 2
SKEGFFTY

SEQ ID NO: 6236 - protein, 8 aa, Severe acute respiratory syndrome coronavirus 2
KEGFFTYI

SEQ ID NO: 6237 - protein, 8 aa, Severe acute respiratory syndrome coronavirus 2
FFTYICGF

SEQ ID NO: 6238 - protein, 8 aa, Severe acute respiratory syndrome coronavirus 2
FIQQKLAL

SEQ ID NO: 6239 - protein, 8 aa, Severe acute respiratory syndrome coronavirus 2
LYKLMGHF

SEQ ID NO: 6240 - protein, 8 aa, Severe acute respiratory syndrome coronavirus 2
KLMGHFAW

SEQ ID NO: 6241 - protein, 8 aa, Severe acute respiratory syndrome coronavirus 2
HFAWWTAF

SEQ ID NO: 6242 - protein, 8 aa, Severe acute respiratory syndrome coronavirus 2
FAWWTAFV

SEQ ID NO: 6243 - protein, 8 aa, Severe acute respiratory syndrome coronavirus 2
WTAFVTNV

SEQ ID NO: 6244 - protein, 8 aa, Severe acute respiratory syndrome coronavirus 2
FLIGCNYL

SEQ ID NO: 6245 - protein, 8 aa, Severe acute respiratory syndrome coronavirus 2
REQIDGYV

SEQ ID NO: 6246 - protein, 8 aa, Severe acute respiratory syndrome coronavirus 2
YVMHANYI

SEQ ID NO: 6247 - protein, 8 aa, Severe acute respiratory syndrome coronavirus 2
VMHANYIF

SEQ ID NO: 6248 - protein, 8 aa, Severe acute respiratory syndrome coronavirus 2
HANYIFWR

SEQ ID NO: 6249 - protein, 8 aa, Severe acute respiratory syndrome coronavirus 2
FWRNTNPI

SEQ ID NO: 6250 - protein, 8 aa, Severe acute respiratory syndrome coronavirus 2
NPIQLSSY

SEQ ID NO: 6251 - protein, 8 aa, Severe acute respiratory syndrome coronavirus 2
IQLSSYSL

SEQ ID NO: 6252 - protein, 8 aa, Severe acute respiratory syndrome coronavirus 2
QLSSYSLF

SEQ ID NO: 6253 - protein, 8 aa, Severe acute respiratory syndrome coronavirus 2
FDMSKFPL

SEQ ID NO: 6254 - protein, 8 aa, Severe acute respiratory syndrome coronavirus 2
MSKFPLKL

SEQ ID NO: 6255 - protein, 8 aa, Severe acute respiratory syndrome coronavirus 2
LKLRGTAV

SEQ ID NO: 6256 - protein, 8 aa, Severe acute respiratory syndrome coronavirus 2
KLRGTAVM

SEQ ID NO: 6257 - protein, 8 aa, Severe acute respiratory syndrome coronavirus 2
GTAVMSLK

SEQ ID NO: 6258 - protein, 8 aa, Severe acute respiratory syndrome coronavirus 2
NDMILSLL

SEQ ID NO: 6259 - protein, 8 aa, Severe acute respiratory syndrome coronavirus 2
RENNRVVI

SEQ ID NO: 6260 - protein, 9 aa, Severe acute respiratory syndrome coronavirus 2
RVCGVSAAR

SEQ ID NO: 6261 - protein, 9 aa, Severe acute respiratory syndrome coronavirus 2
AARLTPCGT

SEQ ID NO: 6262 - protein, 9 aa, Severe acute respiratory syndrome coronavirus 2
TGTSTDVVY

SEQ ID NO: 6263 - protein, 9 aa, Severe acute respiratory syndrome coronavirus 2
GTSTDVVYR

SEQ ID NO: 6264 - protein, 9 aa, Severe acute respiratory syndrome coronavirus 2
TSTDVVYRA

SEQ ID NO: 6265 - protein, 9 aa, Severe acute respiratory syndrome coronavirus 2
STDVVYRAF

SEQ ID NO: 6266 - protein, 9 aa, Severe acute respiratory syndrome coronavirus 2
DVVYRAFDI

SEQ ID NO: 6267 - protein, 9 aa, Severe acute respiratory syndrome coronavirus 2
VVYRAFDIY

SEQ ID NO: 6268 - protein, 9 aa, Severe acute respiratory syndrome coronavirus 2
RAFDIYNDK

SEQ ID NO: 6269 - protein, 9 aa, Severe acute respiratory syndrome coronavirus 2
IYNDKVAGF

SEQ ID NO: 6270 - protein, 9 aa, Severe acute respiratory syndrome coronavirus 2
DKVAGFAKF

SEQ ID NO: 6271 - protein, 9 aa, Severe acute respiratory syndrome coronavirus 2
KVAGFAKFL

SEQ ID NO: 6272 - protein, 9 aa, Severe acute respiratory syndrome coronavirus 2
VAGFAKFLK

SEQ ID NO: 6273 - protein, 9 aa, Severe acute respiratory syndrome coronavirus 2
KFLKTNCCR

SEQ ID NO: 6274 - protein, 9 aa, Severe acute respiratory syndrome coronavirus 2
FLKTNCCRF

SEQ ID NO: 6275 - protein, 9 aa, Severe acute respiratory syndrome coronavirus 2
NLIDSYFVV

SEQ ID NO: 6276 - protein, 9 aa, Severe acute respiratory syndrome coronavirus 2
LIDSYFVVK

SEQ ID NO: 6277 - protein, 9 aa, Severe acute respiratory syndrome coronavirus 2
YFVVKRHTF

SEQ ID NO: 6278 - protein, 9 aa, Severe acute respiratory syndrome coronavirus 2
VVKRHTFSN

SEQ ID NO: 6279 - protein, 9 aa, Severe acute respiratory syndrome coronavirus 2
VKRHTFSNY

SEQ ID NO: 6280 - protein, 9 aa, Severe acute respiratory syndrome coronavirus 2
NYQHEETIY

SEQ ID NO: 6281 - protein, 9 aa, Severe acute respiratory syndrome coronavirus 2
QHEETIYNL

SEQ ID NO: 6282 - protein, 9 aa, Severe acute respiratory syndrome coronavirus 2
HEETIYNLL

SEQ ID NO: 6283 - protein, 9 aa, Severe acute respiratory syndrome coronavirus 2
NLLKDCPAV

SEQ ID NO: 6284 - protein, 9 aa, Severe acute respiratory syndrome coronavirus 2
LLKDCPAVA

SEQ ID NO: 6285 - protein, 9 aa, Severe acute respiratory syndrome coronavirus 2
CPAVAKHDF

SEQ ID NO: 6286 - protein, 9 aa, Severe acute respiratory syndrome coronavirus 2
AVAKHDFFK

SEQ ID NO: 6287 - protein, 9 aa, Severe acute respiratory syndrome coronavirus 2
VAKHDFFKF

SEQ ID NO: 6288 - protein, 9 aa, Severe acute respiratory syndrome coronavirus 2
AKHDFFKFR

SEQ ID NO: 6289 - protein, 9 aa, Severe acute respiratory syndrome coronavirus 2
KHDFFKFRI

SEQ ID NO: 6290 - protein, 9 aa, Severe acute respiratory syndrome coronavirus 2
FKFRIDGDM

SEQ ID NO: 6291 - protein, 9 aa, Severe acute respiratory syndrome coronavirus 2
MVPHISRQR

SEQ ID NO: 6292 - protein, 9 aa, Severe acute respiratory syndrome coronavirus 2
VPHISRQRL

SEQ ID NO: 6293 - protein, 9 aa, Severe acute respiratory syndrome coronavirus 2
HISRQRLTK

SEQ ID NO: 6294 - protein, 9 aa, Severe acute respiratory syndrome coronavirus 2
ISRQRLTKY

SEQ ID NO: 6295 - protein, 9 aa, Severe acute respiratory syndrome coronavirus 2
RQRLTKYTM

SEQ ID NO: 6296 - protein, 9 aa, Severe acute respiratory syndrome coronavirus 2
LTKYTMADL

SEQ ID NO: 6297 - protein, 9 aa, Severe acute respiratory syndrome coronavirus 2
KYTMADLVY

SEQ ID NO: 6298 - protein, 9 aa, Severe acute respiratory syndrome coronavirus 2
YTMADLVYA

SEQ ID NO: 6299 - protein, 9 aa, Severe acute respiratory syndrome coronavirus 2
TMADLVYAL

SEQ ID NO: 6300 - protein, 9 aa, Severe acute respiratory syndrome coronavirus 2
MADLVYALR

SEQ ID NO: 6301 - protein, 9 aa, Severe acute respiratory syndrome coronavirus 2
DLVYALRHF

SEQ ID NO: 6302 - protein, 9 aa, Severe acute respiratory syndrome coronavirus 2
TLKEILVTY

SEQ ID NO: 6303 - protein, 9 aa, Severe acute respiratory syndrome coronavirus 2
KEILVTYNC

SEQ ID NO: 6304 - protein, 9 aa, Severe acute respiratory syndrome coronavirus 2
FVENPDILR

SEQ ID NO: 6305 - protein, 9 aa, Severe acute respiratory syndrome coronavirus 2
VENPDILRV

SEQ ID NO: 6306 - protein, 9 aa, Severe acute respiratory syndrome coronavirus 2
NPDILRVYA

SEQ ID NO: 6307 - protein, 9 aa, Severe acute respiratory syndrome coronavirus 2
DILRVYANL

SEQ ID NO: 6308 - protein, 9 aa, Severe acute respiratory syndrome coronavirus 2
RVYANLGER

SEQ ID NO: 6309 - protein, 9 aa, Severe acute respiratory syndrome coronavirus 2
VYANLGERV

SEQ ID NO: 6310 - protein, 9 aa, Severe acute respiratory syndrome coronavirus 2
YANLGERVR

SEQ ID NO: 6311 - protein, 9 aa, Severe acute respiratory syndrome coronavirus 2
NLGERVRQA

SEQ ID NO: 6312 - protein, 9 aa, Severe acute respiratory syndrome coronavirus 2
GERVRQALL

SEQ ID NO: 6313 - protein, 9 aa, Severe acute respiratory syndrome coronavirus 2
ERVRQALLK

SEQ ID NO: 6314 - protein, 9 aa, Severe acute respiratory syndrome coronavirus 2
RVRQALLKT

SEQ ID NO: 6315 - protein, 9 aa, Severe acute respiratory syndrome coronavirus 2
VRQALLKTV

SEQ ID NO: 6316 - protein, 9 aa, Severe acute respiratory syndrome coronavirus 2
QALLKTVQF

SEQ ID NO: 6317 - protein, 9 aa, Severe acute respiratory syndrome coronavirus 2
ALLKTVQFC

SEQ ID NO: 6318 - protein, 9 aa, Severe acute respiratory syndrome coronavirus 2
KTVQFCDAM

SEQ ID NO: 6319 - protein, 9 aa, Severe acute respiratory syndrome coronavirus 2
TVQFCDAMR

SEQ ID NO: 6320 - protein, 9 aa, Severe acute respiratory syndrome coronavirus 2
AMRNAGIVG

SEQ ID NO: 6321 - protein, 9 aa, Severe acute respiratory syndrome coronavirus 2
MRNAGIVGV

SEQ ID NO: 6322 - protein, 9 aa, Severe acute respiratory syndrome coronavirus 2
RNAGIVGVL

SEQ ID NO: 6323 - protein, 9 aa, Severe acute respiratory syndrome coronavirus 2
NWYDFGDFI

SEQ ID NO: 6324 - protein, 9 aa, Severe acute respiratory syndrome coronavirus 2
IQTTPGSGV

SEQ ID NO: 6325 - protein, 9 aa, Severe acute respiratory syndrome coronavirus 2
TTPGSGVPV

SEQ ID NO: 6326 - protein, 9 aa, Severe acute respiratory syndrome coronavirus 2
TPGSGVPVV

SEQ ID NO: 6327 - protein, 9 aa, Severe acute respiratory syndrome coronavirus 2
SGVPVVDSY

SEQ ID NO: 6328 - protein, 9 aa, Severe acute respiratory syndrome coronavirus 2
GVPVVDSYY

SEQ ID NO: 6329 - protein, 9 aa, Severe acute respiratory syndrome coronavirus 2
VVDSYYSLL

SEQ ID NO: 6330 - protein, 9 aa, Severe acute respiratory syndrome coronavirus 2
SYYSLLMPI

SEQ ID NO: 6331 - protein, 9 aa, Severe acute respiratory syndrome coronavirus 2
YYSLLMPIL

SEQ ID NO: 6332 - protein, 9 aa, Severe acute respiratory syndrome coronavirus 2
SLLMPILTL

SEQ ID NO: 6333 - protein, 9 aa, Severe acute respiratory syndrome coronavirus 2
LLMPILTLT

SEQ ID NO: 6334 - protein, 9 aa, Severe acute respiratory syndrome coronavirus 2
LMPILTLTR

SEQ ID NO: 6335 - protein, 9 aa, Severe acute respiratory syndrome coronavirus 2
MPILTLTRA

SEQ ID NO: 6336 - protein, 9 aa, Severe acute respiratory syndrome coronavirus 2
LTLTRALTA

SEQ ID NO: 6337 - protein, 9 aa, Severe acute respiratory syndrome coronavirus 2
LTRALTAES

SEQ ID NO: 6338 - protein, 9 aa, Severe acute respiratory syndrome coronavirus 2
AESHVDTDL

SEQ ID NO: 6339 - protein, 9 aa, Severe acute respiratory syndrome coronavirus 2
KPYIKWDLL

SEQ ID NO: 6340 - protein, 9 aa, Severe acute respiratory syndrome coronavirus 2
YIKWDLLKY

SEQ ID NO: 6341 - protein, 9 aa, Severe acute respiratory syndrome coronavirus 2
KWDLLKYDF

SEQ ID NO: 6342 - protein, 9 aa, Severe acute respiratory syndrome coronavirus 2
KYDFTEERL

SEQ ID NO: 6343 - protein, 9 aa, Severe acute respiratory syndrome coronavirus 2
FTEERLKLF

SEQ ID NO: 6344 - protein, 9 aa, Severe acute respiratory syndrome coronavirus 2
RLKLFDRYF

SEQ ID NO: 6345 - protein, 9 aa, Severe acute respiratory syndrome coronavirus 2
LKLFDRYFK

SEQ ID NO: 6346 - protein, 9 aa, Severe acute respiratory syndrome coronavirus 2
KLFDRYFKY

SEQ ID NO: 6347 - protein, 9 aa, Severe acute respiratory syndrome coronavirus 2
LFDRYFKYW

SEQ ID NO: 6348 - protein, 9 aa, Severe acute respiratory syndrome coronavirus 2
RYFKYWDQT

SEQ ID NO: 6349 - protein, 9 aa, Severe acute respiratory syndrome coronavirus 2
YFKYWDQTY

SEQ ID NO: 6350 - protein, 9 aa, Severe acute respiratory syndrome coronavirus 2
FKYWDQTYH

SEQ ID NO: 6351 - protein, 9 aa, Severe acute respiratory syndrome coronavirus 2
YHPNCVNCL

SEQ ID NO: 6352 - protein, 9 aa, Severe acute respiratory syndrome coronavirus 2
RCILHCANF

SEQ ID NO: 6353 - protein, 9 aa, Severe acute respiratory syndrome coronavirus 2
ILHCANFNV

SEQ ID NO: 6354 - protein, 9 aa, Severe acute respiratory syndrome coronavirus 2
LHCANFNVL

SEQ ID NO: 6355 - protein, 9 aa, Severe acute respiratory syndrome coronavirus 2
HCANFNVLF

SEQ ID NO: 6356 - protein, 9 aa, Severe acute respiratory syndrome coronavirus 2
NFNVLFSTV

SEQ ID NO: 6357 - protein, 9 aa, Severe acute respiratory syndrome coronavirus 2
FNVLFSTVF

SEQ ID NO: 6358 - protein, 9 aa, Severe acute respiratory syndrome coronavirus 2
VLFSTVFPP

SEQ ID NO: 6359 - protein, 9 aa, Severe acute respiratory syndrome coronavirus 2
STVFPPTSF

SEQ ID NO: 6360 - protein, 9 aa, Severe acute respiratory syndrome coronavirus 2
TVFPPTSFG

SEQ ID NO: 6361 - protein, 9 aa, Severe acute respiratory syndrome coronavirus 2
FPPTSFGPL

SEQ ID NO: 6362 - protein, 9 aa, Severe acute respiratory syndrome coronavirus 2
TSFGPLVRK

SEQ ID NO: 6363 - protein, 9 aa, Severe acute respiratory syndrome coronavirus 2
SFGPLVRKI

SEQ ID NO: 6364 - protein, 9 aa, Severe acute respiratory syndrome coronavirus 2
GPLVRKIFV

SEQ ID NO: 6365 - protein, 9 aa, Severe acute respiratory syndrome coronavirus 2
VRKIFVDGV

SEQ ID NO: 6366 - protein, 9 aa, Severe acute respiratory syndrome coronavirus 2
KIFVDGVPF

SEQ ID NO: 6367 - protein, 9 aa, Severe acute respiratory syndrome coronavirus 2
IFVDGVPFV

SEQ ID NO: 6368 - protein, 9 aa, Severe acute respiratory syndrome coronavirus 2
FVDGVPFVV

SEQ ID NO: 6369 - protein, 9 aa, Severe acute respiratory syndrome coronavirus 2
VPFVVSTGY

SEQ ID NO: 6370 - protein, 9 aa, Severe acute respiratory syndrome coronavirus 2
FVVSTGYHF

SEQ ID NO: 6371 - protein, 9 aa, Severe acute respiratory syndrome coronavirus 2
VVSTGYHFR

SEQ ID NO: 6372 - protein, 9 aa, Severe acute respiratory syndrome coronavirus 2
STGYHFREL

SEQ ID NO: 6373 - protein, 9 aa, Severe acute respiratory syndrome coronavirus 2
YHFRELGVV

SEQ ID NO: 6374 - protein, 9 aa, Severe acute respiratory syndrome coronavirus 2
HFRELGVVH

SEQ ID NO: 6375 - protein, 9 aa, Severe acute respiratory syndrome coronavirus 2
NLHSSRLSF

SEQ ID NO: 6376 - protein, 9 aa, Severe acute respiratory syndrome coronavirus 2
LHSSRLSFK

SEQ ID NO: 6377 - protein, 9 aa, Severe acute respiratory syndrome coronavirus 2
SSRLSFKEL

SEQ ID NO: 6378 - protein, 9 aa, Severe acute respiratory syndrome coronavirus 2
SRLSFKELL

SEQ ID NO: 6379 - protein, 9 aa, Severe acute respiratory syndrome coronavirus 2
RLSFKELLV

SEQ ID NO: 6380 - protein, 9 aa, Severe acute respiratory syndrome coronavirus 2
LSFKELLVY

SEQ ID NO: 6381 - protein, 9 aa, Severe acute respiratory syndrome coronavirus 2
SFKELLVYA

SEQ ID NO: 6382 - protein, 9 aa, Severe acute respiratory syndrome coronavirus 2
FKELLVYAA

SEQ ID NO: 6383 - protein, 9 aa, Severe acute respiratory syndrome coronavirus 2
LLVYAADPA

SEQ ID NO: 6384 - protein, 9 aa, Severe acute respiratory syndrome coronavirus 2
LVYAADPAM

SEQ ID NO: 6385 - protein, 9 aa, Severe acute respiratory syndrome coronavirus 2
YAADPAMHA

SEQ ID NO: 6386 - protein, 9 aa, Severe acute respiratory syndrome coronavirus 2
AADPAMHAA

SEQ ID NO: 6387 - protein, 9 aa, Severe acute respiratory syndrome coronavirus 2
AMHAASGNL

SEQ ID NO: 6388 - protein, 9 aa, Severe acute respiratory syndrome coronavirus 2
MHAASGNLL

SEQ ID NO: 6389 - protein, 9 aa, Severe acute respiratory syndrome coronavirus 2
HAASGNLLL

SEQ ID NO: 6390 - protein, 9 aa, Severe acute respiratory syndrome coronavirus 2
ASGNLLLDK

SEQ ID NO: 6391 - protein, 9 aa, Severe acute respiratory syndrome coronavirus 2
SGNLLLDKR

SEQ ID NO: 6392 - protein, 9 aa, Severe acute respiratory syndrome coronavirus 2
LLLDKRTTC

SEQ ID NO: 6393 - protein, 9 aa, Severe acute respiratory syndrome coronavirus 2
LLDKRTTCF

SEQ ID NO: 6394 - protein, 9 aa, Severe acute respiratory syndrome coronavirus 2
KRTTCFSVA

SEQ ID NO: 6395 - protein, 9 aa, Severe acute respiratory syndrome coronavirus 2
RTTCFSVAA

SEQ ID NO: 6396 - protein, 9 aa, Severe acute respiratory syndrome coronavirus 2
TTCFSVAAL

SEQ ID NO: 6397 - protein, 9 aa, Severe acute respiratory syndrome coronavirus 2
SVAALTNNV

SEQ ID NO: 6398 - protein, 9 aa, Severe acute respiratory syndrome coronavirus 2
AALTNNVAF

SEQ ID NO: 6399 - protein, 9 aa, Severe acute respiratory syndrome coronavirus 2
NNVAFQTVK

SEQ ID NO: 6400 - protein, 9 aa, Severe acute respiratory syndrome coronavirus 2
FQTVKPGNF

SEQ ID NO: 6401 - protein, 9 aa, Severe acute respiratory syndrome coronavirus 2
TVKPGNFNK

SEQ ID NO: 6402 - protein, 9 aa, Severe acute respiratory syndrome coronavirus 2
NFNKDFYDF

SEQ ID NO: 6403 - protein, 9 aa, Severe acute respiratory syndrome coronavirus 2
NKDFYDFAV

SEQ ID NO: 6404 - protein, 9 aa, Severe acute respiratory syndrome coronavirus 2
DFYDFAVSK

SEQ ID NO: 6405 - protein, 9 aa, Severe acute respiratory syndrome coronavirus 2
YDFAVSKGF

SEQ ID NO: 6406 - protein, 9 aa, Severe acute respiratory syndrome coronavirus 2
FAVSKGFFK

SEQ ID NO: 6407 - protein, 9 aa, Severe acute respiratory syndrome coronavirus 2
GFFKEGSSV

SEQ ID NO: 6408 - protein, 9 aa, Severe acute respiratory syndrome coronavirus 2
FKEGSSVEL

SEQ ID NO: 6409 - protein, 9 aa, Severe acute respiratory syndrome coronavirus 2
GSSVELKHF

SEQ ID NO: 6410 - protein, 9 aa, Severe acute respiratory syndrome coronavirus 2
SSVELKHFF

SEQ ID NO: 6411 - protein, 9 aa, Severe acute respiratory syndrome coronavirus 2
VELKHFFFA

SEQ ID NO: 6412 - protein, 9 aa, Severe acute respiratory syndrome coronavirus 2
FFAQDGNAA

SEQ ID NO: 6413 - protein, 9 aa, Severe acute respiratory syndrome coronavirus 2
FAQDGNAAI

SEQ ID NO: 6414 - protein, 9 aa, Severe acute respiratory syndrome coronavirus 2
NAAISDYDY

SEQ ID NO: 6415 - protein, 9 aa, Severe acute respiratory syndrome coronavirus 2
AAISDYDYY

SEQ ID NO: 6416 - protein, 9 aa, Severe acute respiratory syndrome coronavirus 2
AISDYDYYR

SEQ ID NO: 6417 - protein, 9 aa, Severe acute respiratory syndrome coronavirus 2
YYRYNLPTM

SEQ ID NO: 6418 - protein, 9 aa, Severe acute respiratory syndrome coronavirus 2
YRYNLPTMC

SEQ ID NO: 6419 - protein, 9 aa, Severe acute respiratory syndrome coronavirus 2
TMCDIRQLL

SEQ ID NO: 6420 - protein, 9 aa, Severe acute respiratory syndrome coronavirus 2
MCDIRQLLF

SEQ ID NO: 6421 - protein, 9 aa, Severe acute respiratory syndrome coronavirus 2
RQLLFVVEV

SEQ ID NO: 6422 - protein, 9 aa, Severe acute respiratory syndrome coronavirus 2
QLLFVVEVV

SEQ ID NO: 6423 - protein, 9 aa, Severe acute respiratory syndrome coronavirus 2
FVVEVVDKY

SEQ ID NO: 6424 - protein, 9 aa, Severe acute respiratory syndrome coronavirus 2
VVDKYFDCY

SEQ ID NO: 6425 - protein, 9 aa, Severe acute respiratory syndrome coronavirus 2
CINANQVIV

SEQ ID NO: 6426 - protein, 9 aa, Severe acute respiratory syndrome coronavirus 2
QVIVNNLDK

SEQ ID NO: 6427 - protein, 9 aa, Severe acute respiratory syndrome coronavirus 2
LDKSAGFPF

SEQ ID NO: 6428 - protein, 9 aa, Severe acute respiratory syndrome coronavirus 2
KSAGFPFNK

SEQ ID NO: 6429 - protein, 9 aa, Severe acute respiratory syndrome coronavirus 2
SAGFPFNKW

SEQ ID NO: 6430 - protein, 9 aa, Severe acute respiratory syndrome coronavirus 2
GFPFNKWGK

SEQ ID NO: 6431 - protein, 9 aa, Severe acute respiratory syndrome coronavirus 2
FPFNKWGKA

SEQ ID NO: 6432 - protein, 9 aa, Severe acute respiratory syndrome coronavirus 2
NKWGKARLY

SEQ ID NO: 6433 - protein, 9 aa, Severe acute respiratory syndrome coronavirus 2
KWGKARLYY

SEQ ID NO: 6434 - protein, 9 aa, Severe acute respiratory syndrome coronavirus 2
KARLYYDSM

SEQ ID NO: 6435 - protein, 9 aa, Severe acute respiratory syndrome coronavirus 2
RLYYDSMSY

SEQ ID NO: 6436 - protein, 9 aa, Severe acute respiratory syndrome coronavirus 2
MSYEDQDAL

SEQ ID NO: 6437 - protein, 9 aa, Severe acute respiratory syndrome coronavirus 2
SYEDQDALF

SEQ ID NO: 6438 - protein, 9 aa, Severe acute respiratory syndrome coronavirus 2
YEDQDALFA

SEQ ID NO: 6439 - protein, 9 aa, Severe acute respiratory syndrome coronavirus 2
DALFAYTKR

SEQ ID NO: 6440 - protein, 9 aa, Severe acute respiratory syndrome coronavirus 2
LFAYTKRNV

SEQ ID NO: 6441 - protein, 9 aa, Severe acute respiratory syndrome coronavirus 2
FAYTKRNVI

SEQ ID NO: 6442 - protein, 9 aa, Severe acute respiratory syndrome coronavirus 2
YTKRNVIPT

SEQ ID NO: 6443 - protein, 9 aa, Severe acute respiratory syndrome coronavirus 2
NVIPTITQM

SEQ ID NO: 6444 - protein, 9 aa, Severe acute respiratory syndrome coronavirus 2
IPTITQMNL

SEQ ID NO: 6445 - protein, 9 aa, Severe acute respiratory syndrome coronavirus 2
PTITQMNLK

SEQ ID NO: 6446 - protein, 9 aa, Severe acute respiratory syndrome coronavirus 2
TITQMNLKY

SEQ ID NO: 6447 - protein, 9 aa, Severe acute respiratory syndrome coronavirus 2
ITQMNLKYA

SEQ ID NO: 6448 - protein, 9 aa, Severe acute respiratory syndrome coronavirus 2
TQMNLKYAI

SEQ ID NO: 6449 - protein, 9 aa, Severe acute respiratory syndrome coronavirus 2
NLKYAISAK

SEQ ID NO: 6450 - protein, 9 aa, Severe acute respiratory syndrome coronavirus 2
KYAISAKNR

SEQ ID NO: 6451 - protein, 9 aa, Severe acute respiratory syndrome coronavirus 2
YAISAKNRA

SEQ ID NO: 6452 - protein, 9 aa, Severe acute respiratory syndrome coronavirus 2
AISAKNRAR

SEQ ID NO: 6453 - protein, 9 aa, Severe acute respiratory syndrome coronavirus 2
SAKNRARTV

SEQ ID NO: 6454 - protein, 9 aa, Severe acute respiratory syndrome coronavirus 2
KNRARTVAG

SEQ ID NO: 6455 - protein, 9 aa, Severe acute respiratory syndrome coronavirus 2
NRARTVAGV

SEQ ID NO: 6456 - protein, 9 aa, Severe acute respiratory syndrome coronavirus 2
RARTVAGVS

SEQ ID NO: 6457 - protein, 9 aa, Severe acute respiratory syndrome coronavirus 2
ARTVAGVSI

SEQ ID NO: 6458 - protein, 9 aa, Severe acute respiratory syndrome coronavirus 2
AGVSICSTM

SEQ ID NO: 6459 - protein, 9 aa, Severe acute respiratory syndrome coronavirus 2
SICSTMTNR

SEQ ID NO: 6460 - protein, 9 aa, Severe acute respiratory syndrome coronavirus 2
CSTMTNRQF

SEQ ID NO: 6461 - protein, 9 aa, Severe acute respiratory syndrome coronavirus 2
STMTNRQFH

SEQ ID NO: 6462 - protein, 9 aa, Severe acute respiratory syndrome coronavirus 2
MTNRQFHQK

SEQ ID NO: 6463 - protein, 9 aa, Severe acute respiratory syndrome coronavirus 2
NRQFHQKLL

SEQ ID NO: 6464 - protein, 9 aa, Severe acute respiratory syndrome coronavirus 2
RQFHQKLLK

SEQ ID NO: 6465 - protein, 9 aa, Severe acute respiratory syndrome coronavirus 2
FHQKLLKSI

SEQ ID NO: 6466 - protein, 9 aa, Severe acute respiratory syndrome coronavirus 2
KLLKSIAAT

SEQ ID NO: 6467 - protein, 9 aa, Severe acute respiratory syndrome coronavirus 2
LLKSIAATR

SEQ ID NO: 6468 - protein, 9 aa, Severe acute respiratory syndrome coronavirus 2
KSIAATRGA

SEQ ID NO: 6469 - protein, 9 aa, Severe acute respiratory syndrome coronavirus 2
IAATRGATV

SEQ ID NO: 6470 - protein, 9 aa, Severe acute respiratory syndrome coronavirus 2
AATRGATVV

SEQ ID NO: 6471 - protein, 9 aa, Severe acute respiratory syndrome coronavirus 2
ATRGATVVI

SEQ ID NO: 6472 - protein, 9 aa, Severe acute respiratory syndrome coronavirus 2
ATVVIGTSK

SEQ ID NO: 6473 - protein, 9 aa, Severe acute respiratory syndrome coronavirus 2
TVVIGTSKF

SEQ ID NO: 6474 - protein, 9 aa, Severe acute respiratory syndrome coronavirus 2
VVIGTSKFY

SEQ ID NO: 6475 - protein, 9 aa, Severe acute respiratory syndrome coronavirus 2
GTSKFYGGW

SEQ ID NO: 6476 - protein, 9 aa, Severe acute respiratory syndrome coronavirus 2
KFYGGWHNM

SEQ ID NO: 6477 - protein, 9 aa, Severe acute respiratory syndrome coronavirus 2
FYGGWHNML

SEQ ID NO: 6478 - protein, 9 aa, Severe acute respiratory syndrome coronavirus 2
YGGWHNMLK

SEQ ID NO: 6479 - protein, 9 aa, Severe acute respiratory syndrome coronavirus 2
WHNMLKTVY

SEQ ID NO: 6480 - protein, 9 aa, Severe acute respiratory syndrome coronavirus 2
MLKTVYSDV

SEQ ID NO: 6481 - protein, 9 aa, Severe acute respiratory syndrome coronavirus 2
YSDVENPHL

SEQ ID NO: 6482 - protein, 9 aa, Severe acute respiratory syndrome coronavirus 2
VENPHLMGW

SEQ ID NO: 6483 - protein, 9 aa, Severe acute respiratory syndrome coronavirus 2
NPHLMGWDY

SEQ ID NO: 6484 - protein, 9 aa, Severe acute respiratory syndrome coronavirus 2
HLMGWDYPK

SEQ ID NO: 6485 - protein, 9 aa, Severe acute respiratory syndrome coronavirus 2
DYPKCDRAM

SEQ ID NO: 6486 - protein, 9 aa, Severe acute respiratory syndrome coronavirus 2
RAMPNMLRI

SEQ ID NO: 6487 - protein, 9 aa, Severe acute respiratory syndrome coronavirus 2
AMPNMLRIM

SEQ ID NO: 6488 - protein, 9 aa, Severe acute respiratory syndrome coronavirus 2
MPNMLRIMA

SEQ ID NO: 6489 - protein, 9 aa, Severe acute respiratory syndrome coronavirus 2
NMLRIMASL

SEQ ID NO: 6490 - protein, 9 aa, Severe acute respiratory syndrome coronavirus 2
MLRIMASLV

SEQ ID NO: 6491 - protein, 9 aa, Severe acute respiratory syndrome coronavirus 2
LRIMASLVL

SEQ ID NO: 6492 - protein, 9 aa, Severe acute respiratory syndrome coronavirus 2
RIMASLVLA

SEQ ID NO: 6493 - protein, 9 aa, Severe acute respiratory syndrome coronavirus 2
IMASLVLAR

SEQ ID NO: 6494 - protein, 9 aa, Severe acute respiratory syndrome coronavirus 2
MASLVLARK

SEQ ID NO: 6495 - protein, 9 aa, Severe acute respiratory syndrome coronavirus 2
VLARKHTTC

SEQ ID NO: 6496 - protein, 9 aa, Severe acute respiratory syndrome coronavirus 2
RKHTTCCSL

SEQ ID NO: 6497 - protein, 9 aa, Severe acute respiratory syndrome coronavirus 2
TTCCSLSHR

SEQ ID NO: 6498 - protein, 9 aa, Severe acute respiratory syndrome coronavirus 2
CSLSHRFYR

SEQ ID NO: 6499 - protein, 9 aa, Severe acute respiratory syndrome coronavirus 2
SLSHRFYRL

SEQ ID NO: 6500 - protein, 9 aa, Severe acute respiratory syndrome coronavirus 2
LSHRFYRLA

SEQ ID NO: 6501 - protein, 9 aa, Severe acute respiratory syndrome coronavirus 2
RLANECAQV

SEQ ID NO: 6502 - protein, 9 aa, Severe acute respiratory syndrome coronavirus 2
LANECAQVL

SEQ ID NO: 6503 - protein, 9 aa, Severe acute respiratory syndrome coronavirus 2
AQVLSEMVM

SEQ ID NO: 6504 - protein, 9 aa, Severe acute respiratory syndrome coronavirus 2
SEMVMCGGS

SEQ ID NO: 6505 - protein, 9 aa, Severe acute respiratory syndrome coronavirus 2
EMVMCGGSL

SEQ ID NO: 6506 - protein, 9 aa, Severe acute respiratory syndrome coronavirus 2
MVMCGGSLY

SEQ ID NO: 6507 - protein, 9 aa, Severe acute respiratory syndrome coronavirus 2
VMCGGSLYV

SEQ ID NO: 6508 - protein, 9 aa, Severe acute respiratory syndrome coronavirus 2
SLYVKPGGT

SEQ ID NO: 6509 - protein, 9 aa, Severe acute respiratory syndrome coronavirus 2
SSGDATTAY

SEQ ID NO: 6510 - protein, 9 aa, Severe acute respiratory syndrome coronavirus 2
ATTAYANSV

SEQ ID NO: 6511 - protein, 9 aa, Severe acute respiratory syndrome coronavirus 2
TTAYANSVF

SEQ ID NO: 6512 - protein, 9 aa, Severe acute respiratory syndrome coronavirus 2
AYANSVFNI

SEQ ID NO: 6513 - protein, 9 aa, Severe acute respiratory syndrome coronavirus 2
YANSVFNIC

SEQ ID NO: 6514 - protein, 9 aa, Severe acute respiratory syndrome coronavirus 2
NSVFNICQA

SEQ ID NO: 6515 - protein, 9 aa, Severe acute respiratory syndrome coronavirus 2
SVFNICQAV

SEQ ID NO: 6516 - protein, 9 aa, Severe acute respiratory syndrome coronavirus 2
AVTANVNAL

SEQ ID NO: 6517 - protein, 9 aa, Severe acute respiratory syndrome coronavirus 2
VTANVNALL

SEQ ID NO: 6518 - protein, 9 aa, Severe acute respiratory syndrome coronavirus 2
ALLSTDGNK

SEQ ID NO: 6519 - protein, 9 aa, Severe acute respiratory syndrome coronavirus 2
LLSTDGNKI

SEQ ID NO: 6520 - protein, 9 aa, Severe acute respiratory syndrome coronavirus 2
IADKYVRNL

SEQ ID NO: 6521 - protein, 9 aa, Severe acute respiratory syndrome coronavirus 2
KYVRNLQHR

SEQ ID NO: 6522 - protein, 9 aa, Severe acute respiratory syndrome coronavirus 2
YVRNLQHRL

SEQ ID NO: 6523 - protein, 9 aa, Severe acute respiratory syndrome coronavirus 2
VRNLQHRLY

SEQ ID NO: 6524 - protein, 9 aa, Severe acute respiratory syndrome coronavirus 2
NLQHRLYEC

SEQ ID NO: 6525 - protein, 9 aa, Severe acute respiratory syndrome coronavirus 2
LQHRLYECL

SEQ ID NO: 6526 - protein, 9 aa, Severe acute respiratory syndrome coronavirus 2
QHRLYECLY

SEQ ID NO: 6527 - protein, 9 aa, Severe acute respiratory syndrome coronavirus 2
HRLYECLYR

SEQ ID NO: 6528 - protein, 9 aa, Severe acute respiratory syndrome coronavirus 2
RLYECLYRN

SEQ ID NO: 6529 - protein, 9 aa, Severe acute respiratory syndrome coronavirus 2
LYECLYRNR

SEQ ID NO: 6530 - protein, 9 aa, Severe acute respiratory syndrome coronavirus 2
RNRDVDTDF

SEQ ID NO: 6531 - protein, 9 aa, Severe acute respiratory syndrome coronavirus 2
DTDFVNEFY

SEQ ID NO: 6532 - protein, 9 aa, Severe acute respiratory syndrome coronavirus 2
DFVNEFYAY

SEQ ID NO: 6533 - protein, 9 aa, Severe acute respiratory syndrome coronavirus 2
FVNEFYAYL

SEQ ID NO: 6534 - protein, 9 aa, Severe acute respiratory syndrome coronavirus 2
VNEFYAYLR

SEQ ID NO: 6535 - protein, 9 aa, Severe acute respiratory syndrome coronavirus 2
FYAYLRKHF

SEQ ID NO: 6536 - protein, 9 aa, Severe acute respiratory syndrome coronavirus 2
YAYLRKHFS

SEQ ID NO: 6537 - protein, 9 aa, Severe acute respiratory syndrome coronavirus 2
AYLRKHFSM

SEQ ID NO: 6538 - protein, 9 aa, Severe acute respiratory syndrome coronavirus 2
YLRKHFSMM

SEQ ID NO: 6539 - protein, 9 aa, Severe acute respiratory syndrome coronavirus 2
LRKHFSMMI

SEQ ID NO: 6540 - protein, 9 aa, Severe acute respiratory syndrome coronavirus 2
RKHFSMMIL

SEQ ID NO: 6541 - protein, 9 aa, Severe acute respiratory syndrome coronavirus 2
SMMILSDDA

SEQ ID NO: 6542 - protein, 9 aa, Severe acute respiratory syndrome coronavirus 2
MMILSDDAV

SEQ ID NO: 6543 - protein, 9 aa, Severe acute respiratory syndrome coronavirus 2
MILSDDAVV

SEQ ID NO: 6544 - protein, 9 aa, Severe acute respiratory syndrome coronavirus 2
LSDDAVVCF

SEQ ID NO: 6545 - protein, 9 aa, Severe acute respiratory syndrome coronavirus 2
AVVCFNSTY

SEQ ID NO: 6546 - protein, 9 aa, Severe acute respiratory syndrome coronavirus 2
NSTYASQGL

SEQ ID NO: 6547 - protein, 9 aa, Severe acute respiratory syndrome coronavirus 2
STYASQGLV

SEQ ID NO: 6548 - protein, 9 aa, Severe acute respiratory syndrome coronavirus 2
TYASQGLVA

SEQ ID NO: 6549 - protein, 9 aa, Severe acute respiratory syndrome coronavirus 2
YASQGLVAS

SEQ ID NO: 6550 - protein, 9 aa, Severe acute respiratory syndrome coronavirus 2
ASQGLVASI

SEQ ID NO: 6551 - protein, 9 aa, Severe acute respiratory syndrome coronavirus 2
SQGLVASIK

SEQ ID NO: 6552 - protein, 9 aa, Severe acute respiratory syndrome coronavirus 2
GLVASIKNF

SEQ ID NO: 6553 - protein, 9 aa, Severe acute respiratory syndrome coronavirus 2
LVASIKNFK

SEQ ID NO: 6554 - protein, 9 aa, Severe acute respiratory syndrome coronavirus 2
ASIKNFKSV

SEQ ID NO: 6555 - protein, 9 aa, Severe acute respiratory syndrome coronavirus 2
SIKNFKSVL

SEQ ID NO: 6556 - protein, 9 aa, Severe acute respiratory syndrome coronavirus 2
IKNFKSVLY

SEQ ID NO: 6557 - protein, 9 aa, Severe acute respiratory syndrome coronavirus 2
KNFKSVLYY

SEQ ID NO: 6558 - protein, 9 aa, Severe acute respiratory syndrome coronavirus 2
NFKSVLYYQ

SEQ ID NO: 6559 - protein, 9 aa, Severe acute respiratory syndrome coronavirus 2
SVLYYQNNV

SEQ ID NO: 6560 - protein, 9 aa, Severe acute respiratory syndrome coronavirus 2
VLYYQNNVF

SEQ ID NO: 6561 - protein, 9 aa, Severe acute respiratory syndrome coronavirus 2
LYYQNNVFM

SEQ ID NO: 6562 - protein, 9 aa, Severe acute respiratory syndrome coronavirus 2
YYQNNVFMS

SEQ ID NO: 6563 - protein, 9 aa, Severe acute respiratory syndrome coronavirus 2
YQNNVFMSE

SEQ ID NO: 6564 - protein, 9 aa, Severe acute respiratory syndrome coronavirus 2
NNVFMSEAK

SEQ ID NO: 6565 - protein, 9 aa, Severe acute respiratory syndrome coronavirus 2
VFMSEAKCW

SEQ ID NO: 6566 - protein, 9 aa, Severe acute respiratory syndrome coronavirus 2
FMSEAKCWT

SEQ ID NO: 6567 - protein, 9 aa, Severe acute respiratory syndrome coronavirus 2
SEAKCWTET

SEQ ID NO: 6568 - protein, 9 aa, Severe acute respiratory syndrome coronavirus 2
HEFCSQHTM

SEQ ID NO: 6569 - protein, 9 aa, Severe acute respiratory syndrome coronavirus 2
FCSQHTMLV

SEQ ID NO: 6570 - protein, 9 aa, Severe acute respiratory syndrome coronavirus 2
CSQHTMLVK

SEQ ID NO: 6571 - protein, 9 aa, Severe acute respiratory syndrome coronavirus 2
MLVKQGDDY

SEQ ID NO: 6572 - protein, 9 aa, Severe acute respiratory syndrome coronavirus 2
LVKQGDDYV

SEQ ID NO: 6573 - protein, 9 aa, Severe acute respiratory syndrome coronavirus 2
VKQGDDYVY

SEQ ID NO: 6574 - protein, 9 aa, Severe acute respiratory syndrome coronavirus 2
KQGDDYVYL

SEQ ID NO: 6575 - protein, 9 aa, Severe acute respiratory syndrome coronavirus 2
GDDYVYLPY

SEQ ID NO: 6576 - protein, 9 aa, Severe acute respiratory syndrome coronavirus 2
YLPYPDPSR

SEQ ID NO: 6577 - protein, 9 aa, Severe acute respiratory syndrome coronavirus 2
LPYPDPSRI

SEQ ID NO: 6578 - protein, 9 aa, Severe acute respiratory syndrome coronavirus 2
YPDPSRILG

SEQ ID NO: 6579 - protein, 9 aa, Severe acute respiratory syndrome coronavirus 2
SRILGAGCF

SEQ ID NO: 6580 - protein, 9 aa, Severe acute respiratory syndrome coronavirus 2
RILGAGCFV

SEQ ID NO: 6581 - protein, 9 aa, Severe acute respiratory syndrome coronavirus 2
IVKTDGTLM

SEQ ID NO: 6582 - protein, 9 aa, Severe acute respiratory syndrome coronavirus 2
GTLMIERFV

SEQ ID NO: 6583 - protein, 9 aa, Severe acute respiratory syndrome coronavirus 2
MIERFVSLA

SEQ ID NO: 6584 - protein, 9 aa, Severe acute respiratory syndrome coronavirus 2
IERFVSLAI

SEQ ID NO: 6585 - protein, 9 aa, Severe acute respiratory syndrome coronavirus 2
FVSLAIDAY

SEQ ID NO: 6586 - protein, 9 aa, Severe acute respiratory syndrome coronavirus 2
SLAIDAYPL

SEQ ID NO: 6587 - protein, 9 aa, Severe acute respiratory syndrome coronavirus 2
AIDAYPLTK

SEQ ID NO: 6588 - protein, 9 aa, Severe acute respiratory syndrome coronavirus 2
LTKHPNQEY

SEQ ID NO: 6589 - protein, 9 aa, Severe acute respiratory syndrome coronavirus 2
HPNQEYADV

SEQ ID NO: 6590 - protein, 9 aa, Severe acute respiratory syndrome coronavirus 2
QEYADVFHL

SEQ ID NO: 6591 - protein, 9 aa, Severe acute respiratory syndrome coronavirus 2
EYADVFHLY

SEQ ID NO: 6592 - protein, 9 aa, Severe acute respiratory syndrome coronavirus 2
YADVFHLYL

SEQ ID NO: 6593 - protein, 9 aa, Severe acute respiratory syndrome coronavirus 2
DVFHLYLQY

SEQ ID NO: 6594 - protein, 9 aa, Severe acute respiratory syndrome coronavirus 2
VFHLYLQYI

SEQ ID NO: 6595 - protein, 9 aa, Severe acute respiratory syndrome coronavirus 2
FHLYLQYIR

SEQ ID NO: 6596 - protein, 9 aa, Severe acute respiratory syndrome coronavirus 2
HLYLQYIRK

SEQ ID NO: 6597 - protein, 9 aa, Severe acute respiratory syndrome coronavirus 2
LYLQYIRKL

SEQ ID NO: 6598 - protein, 9 aa, Severe acute respiratory syndrome coronavirus 2
YIRKLHDEL

SEQ ID NO: 6599 - protein, 9 aa, Severe acute respiratory syndrome coronavirus 2
LHDELTGHM

SEQ ID NO: 6600 - protein, 9 aa, Severe acute respiratory syndrome coronavirus 2
ELTGHMLDM

SEQ ID NO: 6601 - protein, 9 aa, Severe acute respiratory syndrome coronavirus 2
LTGHMLDMY

SEQ ID NO: 6602 - protein, 9 aa, Severe acute respiratory syndrome coronavirus 2
GHMLDMYSV

SEQ ID NO: 6603 - protein, 9 aa, Severe acute respiratory syndrome coronavirus 2
HMLDMYSVM

SEQ ID NO: 6604 - protein, 9 aa, Severe acute respiratory syndrome coronavirus 2
MLDMYSVML

SEQ ID NO: 6605 - protein, 9 aa, Severe acute respiratory syndrome coronavirus 2
MLTNDNTSR

SEQ ID NO: 6606 - protein, 9 aa, Severe acute respiratory syndrome coronavirus 2
LTNDNTSRY

SEQ ID NO: 6607 - protein, 9 aa, Severe acute respiratory syndrome coronavirus 2
TSRYWEPEF

SEQ ID NO: 6608 - protein, 9 aa, Severe acute respiratory syndrome coronavirus 2
SRYWEPEFY

SEQ ID NO: 6609 - protein, 9 aa, Severe acute respiratory syndrome coronavirus 2
WEPEFYEAM

SEQ ID NO: 6610 - protein, 9 aa, Severe acute respiratory syndrome coronavirus 2
EPEFYEAMY

SEQ ID NO: 6611 - protein, 9 aa, Severe acute respiratory syndrome coronavirus 2
FYEAMYTPH

SEQ ID NO: 6612 - protein, 9 aa, Severe acute respiratory syndrome coronavirus 2
YEAMYTPHT

SEQ ID NO: 6613 - protein, 9 aa, Severe acute respiratory syndrome coronavirus 2
EAMYTPHTV

SEQ ID NO: 6614 - protein, 9 aa, Severe acute respiratory syndrome coronavirus 2
AMYTPHTVL

SEQ ID NO: 6615 - protein, 9 aa, Severe acute respiratory syndrome coronavirus 2
MYTPHTVLQ

SEQ ID NO: 6616 - protein, 9 aa, Severe acute respiratory syndrome coronavirus 2
YTPHTVLQA

SEQ ID NO: 6617 - protein, 9 aa, Severe acute respiratory syndrome coronavirus 2
TPHTVLQAV

SEQ ID NO: 6618 - protein, 9 aa, Severe acute respiratory syndrome coronavirus 2
HTVLQAVGA

SEQ ID NO: 6619 - protein, 9 aa, Severe acute respiratory syndrome coronavirus 2
VLQAVGACV

SEQ ID NO: 6620 - protein, 9 aa, Severe acute respiratory syndrome coronavirus 2
LQAVGACVL

SEQ ID NO: 6621 - protein, 9 aa, Severe acute respiratory syndrome coronavirus 2
VLCNSQTSL

SEQ ID NO: 6622 - protein, 9 aa, Severe acute respiratory syndrome coronavirus 2
SLRCGACIR

SEQ ID NO: 6623 - protein, 9 aa, Severe acute respiratory syndrome coronavirus 2
CGACIRRPF

SEQ ID NO: 6624 - protein, 9 aa, Severe acute respiratory syndrome coronavirus 2
IRRPFLCCK

SEQ ID NO: 6625 - protein, 9 aa, Severe acute respiratory syndrome coronavirus 2
HVISTSHKL

SEQ ID NO: 6626 - protein, 9 aa, Severe acute respiratory syndrome coronavirus 2
ISTSHKLVL

SEQ ID NO: 6627 - protein, 9 aa, Severe acute respiratory syndrome coronavirus 2
TSHKLVLSV

SEQ ID NO: 6628 - protein, 9 aa, Severe acute respiratory syndrome coronavirus 2
KLVLSVNPY

SEQ ID NO: 6629 - protein, 9 aa, Severe acute respiratory syndrome coronavirus 2
LVLSVNPYV

SEQ ID NO: 6630 - protein, 9 aa, Severe acute respiratory syndrome coronavirus 2
SVNPYVCNA

SEQ ID NO: 6631 - protein, 9 aa, Severe acute respiratory syndrome coronavirus 2
NPYVCNAPG

SEQ ID NO: 6632 - protein, 9 aa, Severe acute respiratory syndrome coronavirus 2
DVTDVTQLY

SEQ ID NO: 6633 - protein, 9 aa, Severe acute respiratory syndrome coronavirus 2
VTDVTQLYL

SEQ ID NO: 6634 - protein, 9 aa, Severe acute respiratory syndrome coronavirus 2
VTQLYLGGM

SEQ ID NO: 6635 - protein, 9 aa, Severe acute respiratory syndrome coronavirus 2
QLYLGGMSY

SEQ ID NO: 6636 - protein, 9 aa, Severe acute respiratory syndrome coronavirus 2
LYLGGMSYY

SEQ ID NO: 6637 - protein, 9 aa, Severe acute respiratory syndrome coronavirus 2
YLGGMSYYC

SEQ ID NO: 6638 - protein, 9 aa, Severe acute respiratory syndrome coronavirus 2
MSYYCKSHK

SEQ ID NO: 6639 - protein, 9 aa, Severe acute respiratory syndrome coronavirus 2
KSHKPPISF

SEQ ID NO: 6640 - protein, 9 aa, Severe acute respiratory syndrome coronavirus 2
HKPPISFPL

SEQ ID NO: 6641 - protein, 9 aa, Severe acute respiratory syndrome coronavirus 2
FPLCANGQV

SEQ ID NO: 6642 - protein, 9 aa, Severe acute respiratory syndrome coronavirus 2
CANGQVFGL

SEQ ID NO: 6643 - protein, 9 aa, Severe acute respiratory syndrome coronavirus 2
ANGQVFGLY

SEQ ID NO: 6644 - protein, 9 aa, Severe acute respiratory syndrome coronavirus 2
NGQVFGLYK

SEQ ID NO: 6645 - protein, 9 aa, Severe acute respiratory syndrome coronavirus 2
NTCVGSDNV

SEQ ID NO: 6646 - protein, 9 aa, Severe acute respiratory syndrome coronavirus 2
NVTDFNAIA

SEQ ID NO: 6647 - protein, 9 aa, Severe acute respiratory syndrome coronavirus 2
FNAIATCDW

SEQ ID NO: 6648 - protein, 9 aa, Severe acute respiratory syndrome coronavirus 2
WTNAGDYIL

SEQ ID NO: 6649 - protein, 9 aa, Severe acute respiratory syndrome coronavirus 2
ILANTCTER

SEQ ID NO: 6650 - protein, 9 aa, Severe acute respiratory syndrome coronavirus 2
LANTCTERL

SEQ ID NO: 6651 - protein, 9 aa, Severe acute respiratory syndrome coronavirus 2
TERLKLFAA

SEQ ID NO: 6652 - protein, 9 aa, Severe acute respiratory syndrome coronavirus 2
RLKLFAAET

SEQ ID NO: 6653 - protein, 9 aa, Severe acute respiratory syndrome coronavirus 2
LKLFAAETL

SEQ ID NO: 6654 - protein, 9 aa, Severe acute respiratory syndrome coronavirus 2
FAAETLKAT

SEQ ID NO: 6655 - protein, 9 aa, Severe acute respiratory syndrome coronavirus 2
TLKATEETF

SEQ ID NO: 6656 - protein, 9 aa, Severe acute respiratory syndrome coronavirus 2
KATEETFKL

SEQ ID NO: 6657 - protein, 9 aa, Severe acute respiratory syndrome coronavirus 2
TEETFKLSY

SEQ ID NO: 6658 - protein, 9 aa, Severe acute respiratory syndrome coronavirus 2
ETFKLSYGI

SEQ ID NO: 6659 - protein, 9 aa, Severe acute respiratory syndrome coronavirus 2
FKLSYGIAT

SEQ ID NO: 6660 - protein, 9 aa, Severe acute respiratory syndrome coronavirus 2
KLSYGIATV

SEQ ID NO: 6661 - protein, 9 aa, Severe acute respiratory syndrome coronavirus 2
LSYGIATVR

SEQ ID NO: 6662 - protein, 9 aa, Severe acute respiratory syndrome coronavirus 2
YGIATVREV

SEQ ID NO: 6663 - protein, 9 aa, Severe acute respiratory syndrome coronavirus 2
GIATVREVL

SEQ ID NO: 6664 - protein, 9 aa, Severe acute respiratory syndrome coronavirus 2
TVREVLSDR

SEQ ID NO: 6665 - protein, 9 aa, Severe acute respiratory syndrome coronavirus 2
REVLSDREL

SEQ ID NO: 6666 - protein, 9 aa, Severe acute respiratory syndrome coronavirus 2
VLSDRELHL

SEQ ID NO: 6667 - protein, 9 aa, Severe acute respiratory syndrome coronavirus 2
SDRELHLSW

SEQ ID NO: 6668 - protein, 9 aa, Severe acute respiratory syndrome coronavirus 2
RELHLSWEV

SEQ ID NO: 6669 - protein, 9 aa, Severe acute respiratory syndrome coronavirus 2
LSWEVGKPR

SEQ ID NO: 6670 - protein, 9 aa, Severe acute respiratory syndrome coronavirus 2
WEVGKPRPP

SEQ ID NO: 6671 - protein, 9 aa, Severe acute respiratory syndrome coronavirus 2
RPPLNRNYV

SEQ ID NO: 6672 - protein, 9 aa, Severe acute respiratory syndrome coronavirus 2
NRNYVFTGY

SEQ ID NO: 6673 - protein, 9 aa, Severe acute respiratory syndrome coronavirus 2
RNYVFTGYR

SEQ ID NO: 6674 - protein, 9 aa, Severe acute respiratory syndrome coronavirus 2
NYVFTGYRV

SEQ ID NO: 6675 - protein, 9 aa, Severe acute respiratory syndrome coronavirus 2
YVFTGYRVT

SEQ ID NO: 6676 - protein, 9 aa, Severe acute respiratory syndrome coronavirus 2
VFTGYRVTK

SEQ ID NO: 6677 - protein, 9 aa, Severe acute respiratory syndrome coronavirus 2
GYRVTKNSK

SEQ ID NO: 6678 - protein, 9 aa, Severe acute respiratory syndrome coronavirus 2
YRVTKNSKV

SEQ ID NO: 6679 - protein, 9 aa, Severe acute respiratory syndrome coronavirus 2
VTKNSKVQI

SEQ ID NO: 6680 - protein, 9 aa, Severe acute respiratory syndrome coronavirus 2
NSKVQIGEY

SEQ ID NO: 6681 - protein, 9 aa, Severe acute respiratory syndrome coronavirus 2
KVQIGEYTF

SEQ ID NO: 6682 - protein, 9 aa, Severe acute respiratory syndrome coronavirus 2
QIGEYTFEK

SEQ ID NO: 6683 - protein, 9 aa, Severe acute respiratory syndrome coronavirus 2
DYGDAVVYR

SEQ ID NO: 6684 - protein, 9 aa, Severe acute respiratory syndrome coronavirus 2
VVYRGTTTY

SEQ ID NO: 6685 - protein, 9 aa, Severe acute respiratory syndrome coronavirus 2
VYRGTTTYK

SEQ ID NO: 6686 - protein, 9 aa, Severe acute respiratory syndrome coronavirus 2
YRGTTTYKL

SEQ ID NO: 6687 - protein, 9 aa, Severe acute respiratory syndrome coronavirus 2
GTTTYKLNV

SEQ ID NO: 6688 - protein, 9 aa, Severe acute respiratory syndrome coronavirus 2
TYKLNVGDY

SEQ ID NO: 6689 - protein, 9 aa, Severe acute respiratory syndrome coronavirus 2
YKLNVGDYF

SEQ ID NO: 6690 - protein, 9 aa, Severe acute respiratory syndrome coronavirus 2
KLNVGDYFV

SEQ ID NO: 6691 - protein, 9 aa, Severe acute respiratory syndrome coronavirus 2
YFVLTSHTV

SEQ ID NO: 6692 - protein, 9 aa, Severe acute respiratory syndrome coronavirus 2
FVLTSHTVM

SEQ ID NO: 6693 - protein, 9 aa, Severe acute respiratory syndrome coronavirus 2
LTSHTVMPL

SEQ ID NO: 6694 - protein, 9 aa, Severe acute respiratory syndrome coronavirus 2
TSHTVMPLS

SEQ ID NO: 6695 - protein, 9 aa, Severe acute respiratory syndrome coronavirus 2
SHTVMPLSA

SEQ ID NO: 6696 - protein, 9 aa, Severe acute respiratory syndrome coronavirus 2
TVMPLSAPT

SEQ ID NO: 6697 - protein, 9 aa, Severe acute respiratory syndrome coronavirus 2
VMPLSAPTL

SEQ ID NO: 6698 - protein, 9 aa, Severe acute respiratory syndrome coronavirus 2
MPLSAPTLV

SEQ ID NO: 6699 - protein, 9 aa, Severe acute respiratory syndrome coronavirus 2
TLVPQEHYV

SEQ ID NO: 6700 - protein, 9 aa, Severe acute respiratory syndrome coronavirus 2
LVPQEHYVR

SEQ ID NO: 6701 - protein, 9 aa, Severe acute respiratory syndrome coronavirus 2
VPQEHYVRI

SEQ ID NO: 6702 - protein, 9 aa, Severe acute respiratory syndrome coronavirus 2
QEHYVRITG

SEQ ID NO: 6703 - protein, 9 aa, Severe acute respiratory syndrome coronavirus 2
EHYVRITGL

SEQ ID NO: 6704 - protein, 9 aa, Severe acute respiratory syndrome coronavirus 2
HYVRITGLY

SEQ ID NO: 6705 - protein, 9 aa, Severe acute respiratory syndrome coronavirus 2
VRITGLYPT

SEQ ID NO: 6706 - protein, 9 aa, Severe acute respiratory syndrome coronavirus 2
RITGLYPTL

SEQ ID NO: 6707 - protein, 9 aa, Severe acute respiratory syndrome coronavirus 2
GLYPTLNIS

SEQ ID NO: 6708 - protein, 9 aa, Severe acute respiratory syndrome coronavirus 2
ISDEFSSNV

SEQ ID NO: 6709 - protein, 9 aa, Severe acute respiratory syndrome coronavirus 2
DEFSSNVAN

SEQ ID NO: 6710 - protein, 9 aa, Severe acute respiratory syndrome coronavirus 2
EFSSNVANY

SEQ ID NO: 6711 - protein, 9 aa, Severe acute respiratory syndrome coronavirus 2
FSSNVANYQ

SEQ ID NO: 6712 - protein, 9 aa, Severe acute respiratory syndrome coronavirus 2
SSNVANYQK

SEQ ID NO: 6713 - protein, 9 aa, Severe acute respiratory syndrome coronavirus 2
VANYQKVGM

SEQ ID NO: 6714 - protein, 9 aa, Severe acute respiratory syndrome coronavirus 2
NYQKVGMQK

SEQ ID NO: 6715 - protein, 9 aa, Severe acute respiratory syndrome coronavirus 2
YQKVGMQKY

SEQ ID NO: 6716 - protein, 9 aa, Severe acute respiratory syndrome coronavirus 2
VGMQKYSTL

SEQ ID NO: 6717 - protein, 9 aa, Severe acute respiratory syndrome coronavirus 2
MQKYSTLQG

SEQ ID NO: 6718 - protein, 9 aa, Severe acute respiratory syndrome coronavirus 2
KSHFAIGLA

SEQ ID NO: 6719 - protein, 9 aa, Severe acute respiratory syndrome coronavirus 2
SHFAIGLAL

SEQ ID NO: 6720 - protein, 9 aa, Severe acute respiratory syndrome coronavirus 2
HFAIGLALY

SEQ ID NO: 6721 - protein, 9 aa, Severe acute respiratory syndrome coronavirus 2
FAIGLALYY

SEQ ID NO: 6722 - protein, 9 aa, Severe acute respiratory syndrome coronavirus 2
GLALYYPSA

SEQ ID NO: 6723 - protein, 9 aa, Severe acute respiratory syndrome coronavirus 2
LALYYPSAR

SEQ ID NO: 6724 - protein, 9 aa, Severe acute respiratory syndrome coronavirus 2
ALYYPSARI

SEQ ID NO: 6725 - protein, 9 aa, Severe acute respiratory syndrome coronavirus 2
LYYPSARIV

SEQ ID NO: 6726 - protein, 9 aa, Severe acute respiratory syndrome coronavirus 2
YYPSARIVY

SEQ ID NO: 6727 - protein, 9 aa, Severe acute respiratory syndrome coronavirus 2
YPSARIVYT

SEQ ID NO: 6728 - protein, 9 aa, Severe acute respiratory syndrome coronavirus 2
RIVYTACSH

SEQ ID NO: 6729 - protein, 9 aa, Severe acute respiratory syndrome coronavirus 2
IVYTACSHA

SEQ ID NO: 6730 - protein, 9 aa, Severe acute respiratory syndrome coronavirus 2
VYTACSHAA

SEQ ID NO: 6731 - protein, 9 aa, Severe acute respiratory syndrome coronavirus 2
YTACSHAAV

SEQ ID NO: 6732 - protein, 9 aa, Severe acute respiratory syndrome coronavirus 2
CSHAAVDAL

SEQ ID NO: 6733 - protein, 9 aa, Severe acute respiratory syndrome coronavirus 2
AAVDALCEK

SEQ ID NO: 6734 - protein, 9 aa, Severe acute respiratory syndrome coronavirus 2
DALCEKALK

SEQ ID NO: 6735 - protein, 9 aa, Severe acute respiratory syndrome coronavirus 2
ALCEKALKY

SEQ ID NO: 6736 - protein, 9 aa, Severe acute respiratory syndrome coronavirus 2
CEKALKYLP

SEQ ID NO: 6737 - protein, 9 aa, Severe acute respiratory syndrome coronavirus 2
ALKYLPIDK

SEQ ID NO: 6738 - protein, 9 aa, Severe acute respiratory syndrome coronavirus 2
LPIDKCSRI

SEQ ID NO: 6739 - protein, 9 aa, Severe acute respiratory syndrome coronavirus 2
KCSRIIPAR

SEQ ID NO: 6740 - protein, 9 aa, Severe acute respiratory syndrome coronavirus 2
CSRIIPARA

SEQ ID NO: 6741 - protein, 9 aa, Severe acute respiratory syndrome coronavirus 2
RIIPARARV

SEQ ID NO: 6742 - protein, 9 aa, Severe acute respiratory syndrome coronavirus 2
IPARARVEC

SEQ ID NO: 6743 - protein, 9 aa, Severe acute respiratory syndrome coronavirus 2
RARVECFDK

SEQ ID NO: 6744 - protein, 9 aa, Severe acute respiratory syndrome coronavirus 2
ARVECFDKF

SEQ ID NO: 6745 - protein, 9 aa, Severe acute respiratory syndrome coronavirus 2
RVECFDKFK

SEQ ID NO: 6746 - protein, 9 aa, Severe acute respiratory syndrome coronavirus 2
DKFKVNSTL

SEQ ID NO: 6747 - protein, 9 aa, Severe acute respiratory syndrome coronavirus 2
KVNSTLEQY

SEQ ID NO: 6748 - protein, 9 aa, Severe acute respiratory syndrome coronavirus 2
NSTLEQYVF

SEQ ID NO: 6749 - protein, 9 aa, Severe acute respiratory syndrome coronavirus 2
TLEQYVFCT

SEQ ID NO: 6750 - protein, 9 aa, Severe acute respiratory syndrome coronavirus 2
LEQYVFCTV

SEQ ID NO: 6751 - protein, 9 aa, Severe acute respiratory syndrome coronavirus 2
CTVNALPET

SEQ ID NO: 6752 - protein, 9 aa, Severe acute respiratory syndrome coronavirus 2
ALPETTADI

SEQ ID NO: 6753 - protein, 9 aa, Severe acute respiratory syndrome coronavirus 2
LPETTADIV

SEQ ID NO: 6754 - protein, 9 aa, Severe acute respiratory syndrome coronavirus 2
ETTADIVVF

SEQ ID NO: 6755 - protein, 9 aa, Severe acute respiratory syndrome coronavirus 2
ADIVVFDEI

SEQ ID NO: 6756 - protein, 9 aa, Severe acute respiratory syndrome coronavirus 2
IVVFDEISM

SEQ ID NO: 6757 - protein, 9 aa, Severe acute respiratory syndrome coronavirus 2
VVFDEISMA

SEQ ID NO: 6758 - protein, 9 aa, Severe acute respiratory syndrome coronavirus 2
DEISMATNY

SEQ ID NO: 6759 - protein, 9 aa, Severe acute respiratory syndrome coronavirus 2
ISMATNYDL

SEQ ID NO: 6760 - protein, 9 aa, Severe acute respiratory syndrome coronavirus 2
MATNYDLSV

SEQ ID NO: 6761 - protein, 9 aa, Severe acute respiratory syndrome coronavirus 2
ATNYDLSVV

SEQ ID NO: 6762 - protein, 9 aa, Severe acute respiratory syndrome coronavirus 2
LSVVNARLR

SEQ ID NO: 6763 - protein, 9 aa, Severe acute respiratory syndrome coronavirus 2
SVVNARLRA

SEQ ID NO: 6764 - protein, 9 aa, Severe acute respiratory syndrome coronavirus 2
VVNARLRAK

SEQ ID NO: 6765 - protein, 9 aa, Severe acute respiratory syndrome coronavirus 2
ARLRAKHYV

SEQ ID NO: 6766 - protein, 9 aa, Severe acute respiratory syndrome coronavirus 2
RLRAKHYVY

SEQ ID NO: 6767 - protein, 9 aa, Severe acute respiratory syndrome coronavirus 2
LRAKHYVYI

SEQ ID NO: 6768 - protein, 9 aa, Severe acute respiratory syndrome coronavirus 2
RAKHYVYIG

SEQ ID NO: 6769 - protein, 9 aa, Severe acute respiratory syndrome coronavirus 2
HYVYIGDPA

SEQ ID NO: 6770 - protein, 9 aa, Severe acute respiratory syndrome coronavirus 2
VYIGDPAQL

SEQ ID NO: 6771 - protein, 9 aa, Severe acute respiratory syndrome coronavirus 2
AQLPAPRTL

SEQ ID NO: 6772 - protein, 9 aa, Severe acute respiratory syndrome coronavirus 2
QLPAPRTLL

SEQ ID NO: 6773 - protein, 9 aa, Severe acute respiratory syndrome coronavirus 2
LPAPRTLLT

SEQ ID NO: 6774 - protein, 9 aa, Severe acute respiratory syndrome coronavirus 2
APRTLLTKG

SEQ ID NO: 6775 - protein, 9 aa, Severe acute respiratory syndrome coronavirus 2
RTLLTKGTL

SEQ ID NO: 6776 - protein, 9 aa, Severe acute respiratory syndrome coronavirus 2
TKGTLEPEY

SEQ ID NO: 6777 - protein, 9 aa, Severe acute respiratory syndrome coronavirus 2
LEPEYFNSV

SEQ ID NO: 6778 - protein, 9 aa, Severe acute respiratory syndrome coronavirus 2
EYFNSVCRL

SEQ ID NO: 6779 - protein, 9 aa, Severe acute respiratory syndrome coronavirus 2
YFNSVCRLM

SEQ ID NO: 6780 - protein, 9 aa, Severe acute respiratory syndrome coronavirus 2
FNSVCRLMK

SEQ ID NO: 6781 - protein, 9 aa, Severe acute respiratory syndrome coronavirus 2
LMKTIGPDM

SEQ ID NO: 6782 - protein, 9 aa, Severe acute respiratory syndrome coronavirus 2
MKTIGPDMF

SEQ ID NO: 6783 - protein, 9 aa, Severe acute respiratory syndrome coronavirus 2
KTIGPDMFL

SEQ ID NO: 6784 - protein, 9 aa, Severe acute respiratory syndrome coronavirus 2
DMFLGTCRR

SEQ ID NO: 6785 - protein, 9 aa, Severe acute respiratory syndrome coronavirus 2
CPAEIVDTV

SEQ ID NO: 6786 - protein, 9 aa, Severe acute respiratory syndrome coronavirus 2
AEIVDTVSA

SEQ ID NO: 6787 - protein, 9 aa, Severe acute respiratory syndrome coronavirus 2
EIVDTVSAL

SEQ ID NO: 6788 - protein, 9 aa, Severe acute respiratory syndrome coronavirus 2
IVDTVSALV

SEQ ID NO: 6789 - protein, 9 aa, Severe acute respiratory syndrome coronavirus 2
VSALVYDNK

SEQ ID NO: 6790 - protein, 9 aa, Severe acute respiratory syndrome coronavirus 2
SALVYDNKL

SEQ ID NO: 6791 - protein, 9 aa, Severe acute respiratory syndrome coronavirus 2
ALVYDNKLK

SEQ ID NO: 6792 - protein, 9 aa, Severe acute respiratory syndrome coronavirus 2
HKDKSAQCF

SEQ ID NO: 6793 - protein, 9 aa, Severe acute respiratory syndrome coronavirus 2
KSAQCFKMF

SEQ ID NO: 6794 - protein, 9 aa, Severe acute respiratory syndrome coronavirus 2
SAQCFKMFY

SEQ ID NO: 6795 - protein, 9 aa, Severe acute respiratory syndrome coronavirus 2
AQCFKMFYK

SEQ ID NO: 6796 - protein, 9 aa, Severe acute respiratory syndrome coronavirus 2
FKMFYKGVI

SEQ ID NO: 6797 - protein, 9 aa, Severe acute respiratory syndrome coronavirus 2
KMFYKGVIT

SEQ ID NO: 6798 - protein, 9 aa, Severe acute respiratory syndrome coronavirus 2
MFYKGVITH

SEQ ID NO: 6799 - protein, 9 aa, Severe acute respiratory syndrome coronavirus 2
ITHDVSSAI

SEQ ID NO: 6800 - protein, 9 aa, Severe acute respiratory syndrome coronavirus 2
SSAINRPQI

SEQ ID NO: 6801 - protein, 9 aa, Severe acute respiratory syndrome coronavirus 2
AINRPQIGV

SEQ ID NO: 6802 - protein, 9 aa, Severe acute respiratory syndrome coronavirus 2
PQIGVVREF

SEQ ID NO: 6803 - protein, 9 aa, Severe acute respiratory syndrome coronavirus 2
GVVREFLTR

SEQ ID NO: 6804 - protein, 9 aa, Severe acute respiratory syndrome coronavirus 2
REFLTRNPA

SEQ ID NO: 6805 - protein, 9 aa, Severe acute respiratory syndrome coronavirus 2
FLTRNPAWR

SEQ ID NO: 6806 - protein, 9 aa, Severe acute respiratory syndrome coronavirus 2
LTRNPAWRK

SEQ ID NO: 6807 - protein, 9 aa, Severe acute respiratory syndrome coronavirus 2
NPAWRKAVF

SEQ ID NO: 6808 - protein, 9 aa, Severe acute respiratory syndrome coronavirus 2
AWRKAVFIS

SEQ ID NO: 6809 - protein, 9 aa, Severe acute respiratory syndrome coronavirus 2
WRKAVFISP

SEQ ID NO: 6810 - protein, 9 aa, Severe acute respiratory syndrome coronavirus 2
RKAVFISPY

SEQ ID NO: 6811 - protein, 9 aa, Severe acute respiratory syndrome coronavirus 2
SPYNSQNAV

SEQ ID NO: 6812 - protein, 9 aa, Severe acute respiratory syndrome coronavirus 2
NSQNAVASK

SEQ ID NO: 6813 - protein, 9 aa, Severe acute respiratory syndrome coronavirus 2
SQNAVASKI

SEQ ID NO: 6814 - protein, 9 aa, Severe acute respiratory syndrome coronavirus 2
AVASKILGL

SEQ ID NO: 6815 - protein, 9 aa, Severe acute respiratory syndrome coronavirus 2
ASKILGLPT

SEQ ID NO: 6816 - protein, 9 aa, Severe acute respiratory syndrome coronavirus 2
ILGLPTQTV

SEQ ID NO: 6817 - protein, 9 aa, Severe acute respiratory syndrome coronavirus 2
SSQGSEYDY

SEQ ID NO: 6818 - protein, 9 aa, Severe acute respiratory syndrome coronavirus 2
SQGSEYDYV

SEQ ID NO: 6819 - protein, 9 aa, Severe acute respiratory syndrome coronavirus 2
SEYDYVIFT

SEQ ID NO: 6820 - protein, 9 aa, Severe acute respiratory syndrome coronavirus 2
TETAHSCNV

SEQ ID NO: 6821 - protein, 9 aa, Severe acute respiratory syndrome coronavirus 2
TAHSCNVNR

SEQ ID NO: 6822 - protein, 9 aa, Severe acute respiratory syndrome coronavirus 2
AHSCNVNRF

SEQ ID NO: 6823 - protein, 9 aa, Severe acute respiratory syndrome coronavirus 2
NVNRFNVAI

SEQ ID NO: 6824 - protein, 9 aa, Severe acute respiratory syndrome coronavirus 2
NRFNVAITR

SEQ ID NO: 6825 - protein, 9 aa, Severe acute respiratory syndrome coronavirus 2
RFNVAITRA

SEQ ID NO: 6826 - protein, 9 aa, Severe acute respiratory syndrome coronavirus 2
FNVAITRAK

SEQ ID NO: 6827 - protein, 9 aa, Severe acute respiratory syndrome coronavirus 2
NVAITRAKV

SEQ ID NO: 6828 - protein, 9 aa, Severe acute respiratory syndrome coronavirus 2
ITRAKVGIL

SEQ ID NO: 6829 - protein, 9 aa, Severe acute respiratory syndrome coronavirus 2
RAKVGILCI

SEQ ID NO: 6830 - protein, 9 aa, Severe acute respiratory syndrome coronavirus 2
AKVGILCIM

SEQ ID NO: 6831 - protein, 9 aa, Severe acute respiratory syndrome coronavirus 2
GILCIMSDR

SEQ ID NO: 6832 - protein, 9 aa, Severe acute respiratory syndrome coronavirus 2
CIMSDRDLY

SEQ ID NO: 6833 - protein, 9 aa, Severe acute respiratory syndrome coronavirus 2
MSDRDLYDK

SEQ ID NO: 6834 - protein, 9 aa, Severe acute respiratory syndrome coronavirus 2
DLYDKLQFT

SEQ ID NO: 6835 - protein, 9 aa, Severe acute respiratory syndrome coronavirus 2
YDKLQFTSL

SEQ ID NO: 6836 - protein, 9 aa, Severe acute respiratory syndrome coronavirus 2
KLQFTSLEI

SEQ ID NO: 6837 - protein, 9 aa, Severe acute respiratory syndrome coronavirus 2
QFTSLEIPR

SEQ ID NO: 6838 - protein, 9 aa, Severe acute respiratory syndrome coronavirus 2
FTSLEIPRR

SEQ ID NO: 6839 - protein, 9 aa, Severe acute respiratory syndrome coronavirus 2
LEIPRRNVA

SEQ ID NO: 6840 - protein, 9 aa, Severe acute respiratory syndrome coronavirus 2
IPRRNVATL

SEQ ID NO: 6841 - protein, 9 aa, Severe acute respiratory syndrome coronavirus 2
RRNVATLQA

SEQ ID NO: 6842 - protein, 9 aa, Severe acute respiratory syndrome coronavirus 2
LQAENVTGL

SEQ ID NO: 6843 - protein, 9 aa, Severe acute respiratory syndrome coronavirus 2
QAENVTGLF

SEQ ID NO: 6844 - protein, 9 aa, Severe acute respiratory syndrome coronavirus 2
GLFKDCSKV

SEQ ID NO: 6845 - protein, 9 aa, Severe acute respiratory syndrome coronavirus 2
LFKDCSKVI

SEQ ID NO: 6846 - protein, 9 aa, Severe acute respiratory syndrome coronavirus 2
KVITGLHPT

SEQ ID NO: 6847 - protein, 9 aa, Severe acute respiratory syndrome coronavirus 2
GLHPTQAPT

SEQ ID NO: 6848 - protein, 9 aa, Severe acute respiratory syndrome coronavirus 2
HPTQAPTHL

SEQ ID NO: 6849 - protein, 9 aa, Severe acute respiratory syndrome coronavirus 2
TQAPTHLSV

SEQ ID NO: 6850 - protein, 9 aa, Severe acute respiratory syndrome coronavirus 2
THLSVDTKF

SEQ ID NO: 6851 - protein, 9 aa, Severe acute respiratory syndrome coronavirus 2
HLSVDTKFK

SEQ ID NO: 6852 - protein, 9 aa, Severe acute respiratory syndrome coronavirus 2
KFKTEGLCV

SEQ ID NO: 6853 - protein, 9 aa, Severe acute respiratory syndrome coronavirus 2
GLCVDIPGI

SEQ ID NO: 6854 - protein, 9 aa, Severe acute respiratory syndrome coronavirus 2
CVDIPGIPK

SEQ ID NO: 6855 - protein, 9 aa, Severe acute respiratory syndrome coronavirus 2
GIPKDMTYR

SEQ ID NO: 6856 - protein, 9 aa, Severe acute respiratory syndrome coronavirus 2
IPKDMTYRR

SEQ ID NO: 6857 - protein, 9 aa, Severe acute respiratory syndrome coronavirus 2
KDMTYRRLI

SEQ ID NO: 6858 - protein, 9 aa, Severe acute respiratory syndrome coronavirus 2
MTYRRLISM

SEQ ID NO: 6859 - protein, 9 aa, Severe acute respiratory syndrome coronavirus 2
TYRRLISMM

SEQ ID NO: 6860 - protein, 9 aa, Severe acute respiratory syndrome coronavirus 2
RRLISMMGF

SEQ ID NO: 6861 - protein, 9 aa, Severe acute respiratory syndrome coronavirus 2
RLISMMGFK

SEQ ID NO: 6862 - protein, 9 aa, Severe acute respiratory syndrome coronavirus 2
LISMMGFKM

SEQ ID NO: 6863 - protein, 9 aa, Severe acute respiratory syndrome coronavirus 2
SMMGFKMNY

SEQ ID NO: 6864 - protein, 9 aa, Severe acute respiratory syndrome coronavirus 2
MGFKMNYQV

SEQ ID NO: 6865 - protein, 9 aa, Severe acute respiratory syndrome coronavirus 2
KMNYQVNGY

SEQ ID NO: 6866 - protein, 9 aa, Severe acute respiratory syndrome coronavirus 2
YQVNGYPNM

SEQ ID NO: 6867 - protein, 9 aa, Severe acute respiratory syndrome coronavirus 2
QVNGYPNMF

SEQ ID NO: 6868 - protein, 9 aa, Severe acute respiratory syndrome coronavirus 2
GYPNMFITR

SEQ ID NO: 6869 - protein, 9 aa, Severe acute respiratory syndrome coronavirus 2
NMFITREEA

SEQ ID NO: 6870 - protein, 9 aa, Severe acute respiratory syndrome coronavirus 2
MFITREEAI

SEQ ID NO: 6871 - protein, 9 aa, Severe acute respiratory syndrome coronavirus 2
FITREEAIR

SEQ ID NO: 6872 - protein, 9 aa, Severe acute respiratory syndrome coronavirus 2
TREEAIRHV

SEQ ID NO: 6873 - protein, 9 aa, Severe acute respiratory syndrome coronavirus 2
EEAIRHVRA

SEQ ID NO: 6874 - protein, 9 aa, Severe acute respiratory syndrome coronavirus 2
EAIRHVRAW

SEQ ID NO: 6875 - protein, 9 aa, Severe acute respiratory syndrome coronavirus 2
AIRHVRAWI

SEQ ID NO: 6876 - protein, 9 aa, Severe acute respiratory syndrome coronavirus 2
RHVRAWIGF

SEQ ID NO: 6877 - protein, 9 aa, Severe acute respiratory syndrome coronavirus 2
VRAWIGFDV

SEQ ID NO: 6878 - protein, 9 aa, Severe acute respiratory syndrome coronavirus 2
DVEGCHATR

SEQ ID NO: 6879 - protein, 9 aa, Severe acute respiratory syndrome coronavirus 2
ATREAVGTN

SEQ ID NO: 6880 - protein, 9 aa, Severe acute respiratory syndrome coronavirus 2
TREAVGTNL

SEQ ID NO: 6881 - protein, 9 aa, Severe acute respiratory syndrome coronavirus 2
REAVGTNLP

SEQ ID NO: 6882 - protein, 9 aa, Severe acute respiratory syndrome coronavirus 2
EAVGTNLPL

SEQ ID NO: 6883 - protein, 9 aa, Severe acute respiratory syndrome coronavirus 2
LPLQLGFST

SEQ ID NO: 6884 - protein, 9 aa, Severe acute respiratory syndrome coronavirus 2
LQLGFSTGV

SEQ ID NO: 6885 - protein, 9 aa, Severe acute respiratory syndrome coronavirus 2
LGFSTGVNL

SEQ ID NO: 6886 - protein, 9 aa, Severe acute respiratory syndrome coronavirus 2
FSTGVNLVA

SEQ ID NO: 6887 - protein, 9 aa, Severe acute respiratory syndrome coronavirus 2
STGVNLVAV

SEQ ID NO: 6888 - protein, 9 aa, Severe acute respiratory syndrome coronavirus 2
NLVAVPTGY

SEQ ID NO: 6889 - protein, 9 aa, Severe acute respiratory syndrome coronavirus 2
LVAVPTGYV

SEQ ID NO: 6890 - protein, 9 aa, Severe acute respiratory syndrome coronavirus 2
NTDFSRVSA

SEQ ID NO: 6891 - protein, 9 aa, Severe acute respiratory syndrome coronavirus 2
RVSAKPPPG

SEQ ID NO: 6892 - protein, 9 aa, Severe acute respiratory syndrome coronavirus 2
DQFKHLIPL

SEQ ID NO: 6893 - protein, 9 aa, Severe acute respiratory syndrome coronavirus 2
QFKHLIPLM

SEQ ID NO: 6894 - protein, 9 aa, Severe acute respiratory syndrome coronavirus 2
FKHLIPLMY

SEQ ID NO: 6895 - protein, 9 aa, Severe acute respiratory syndrome coronavirus 2
KHLIPLMYK

SEQ ID NO: 6896 - protein, 9 aa, Severe acute respiratory syndrome coronavirus 2
MYKGLPWNV

SEQ ID NO: 6897 - protein, 9 aa, Severe acute respiratory syndrome coronavirus 2
KGLPWNVVR

SEQ ID NO: 6898 - protein, 9 aa, Severe acute respiratory syndrome coronavirus 2
GLPWNVVRL

SEQ ID NO: 6899 - protein, 9 aa, Severe acute respiratory syndrome coronavirus 2
VVRLKIVQM

SEQ ID NO: 6900 - protein, 9 aa, Severe acute respiratory syndrome coronavirus 2
VRLKIVQML

SEQ ID NO: 6901 - protein, 9 aa, Severe acute respiratory syndrome coronavirus 2
RLKIVQMLS

SEQ ID NO: 6902 - protein, 9 aa, Severe acute respiratory syndrome coronavirus 2
IVQMLSDTL

SEQ ID NO: 6903 - protein, 9 aa, Severe acute respiratory syndrome coronavirus 2
VQMLSDTLK

SEQ ID NO: 6904 - protein, 9 aa, Severe acute respiratory syndrome coronavirus 2
MLSDTLKNL

SEQ ID NO: 6905 - protein, 9 aa, Severe acute respiratory syndrome coronavirus 2
DTLKNLSDR

SEQ ID NO: 6906 - protein, 9 aa, Severe acute respiratory syndrome coronavirus 2
TLKNLSDRV

SEQ ID NO: 6907 - protein, 9 aa, Severe acute respiratory syndrome coronavirus 2
LKNLSDRVV

SEQ ID NO: 6908 - protein, 9 aa, Severe acute respiratory syndrome coronavirus 2
KNLSDRVVF

SEQ ID NO: 6909 - protein, 9 aa, Severe acute respiratory syndrome coronavirus 2
NLSDRVVFV

SEQ ID NO: 6910 - protein, 9 aa, Severe acute respiratory syndrome coronavirus 2
LSDRVVFVL

SEQ ID NO: 6911 - protein, 9 aa, Severe acute respiratory syndrome coronavirus 2
SDRVVFVLW

SEQ ID NO: 6912 - protein, 9 aa, Severe acute respiratory syndrome coronavirus 2
DRVVFVLWA

SEQ ID NO: 6913 - protein, 9 aa, Severe acute respiratory syndrome coronavirus 2
RVVFVLWAH

SEQ ID NO: 6914 - protein, 9 aa, Severe acute respiratory syndrome coronavirus 2
VFVLWAHGF

SEQ ID NO: 6915 - protein, 9 aa, Severe acute respiratory syndrome coronavirus 2
VLWAHGFEL

SEQ ID NO: 6916 - protein, 9 aa, Severe acute respiratory syndrome coronavirus 2
HGFELTSMK

SEQ ID NO: 6917 - protein, 9 aa, Severe acute respiratory syndrome coronavirus 2
GFELTSMKY

SEQ ID NO: 6918 - protein, 9 aa, Severe acute respiratory syndrome coronavirus 2
FELTSMKYF

SEQ ID NO: 6919 - protein, 9 aa, Severe acute respiratory syndrome coronavirus 2
ELTSMKYFV

SEQ ID NO: 6920 - protein, 9 aa, Severe acute respiratory syndrome coronavirus 2
LTSMKYFVK

SEQ ID NO: 6921 - protein, 9 aa, Severe acute respiratory syndrome coronavirus 2
TSMKYFVKI

SEQ ID NO: 6922 - protein, 9 aa, Severe acute respiratory syndrome coronavirus 2
SMKYFVKIG

SEQ ID NO: 6923 - protein, 9 aa, Severe acute respiratory syndrome coronavirus 2
YFVKIGPER

SEQ ID NO: 6924 - protein, 9 aa, Severe acute respiratory syndrome coronavirus 2
IGPERTCCL

SEQ ID NO: 6925 - protein, 9 aa, Severe acute respiratory syndrome coronavirus 2
RTCCLCDRR

SEQ ID NO: 6926 - protein, 9 aa, Severe acute respiratory syndrome coronavirus 2
RRATCFSTA

SEQ ID NO: 6927 - protein, 9 aa, Severe acute respiratory syndrome coronavirus 2
CFSTASDTY

SEQ ID NO: 6928 - protein, 9 aa, Severe acute respiratory syndrome coronavirus 2
FSTASDTYA

SEQ ID NO: 6929 - protein, 9 aa, Severe acute respiratory syndrome coronavirus 2
TASDTYACW

SEQ ID NO: 6930 - protein, 9 aa, Severe acute respiratory syndrome coronavirus 2
DTYACWHHS

SEQ ID NO: 6931 - protein, 9 aa, Severe acute respiratory syndrome coronavirus 2
TYACWHHSI

SEQ ID NO: 6932 - protein, 9 aa, Severe acute respiratory syndrome coronavirus 2
WHHSIGFDY

SEQ ID NO: 6933 - protein, 9 aa, Severe acute respiratory syndrome coronavirus 2
HHSIGFDYV

SEQ ID NO: 6934 - protein, 9 aa, Severe acute respiratory syndrome coronavirus 2
HSIGFDYVY

SEQ ID NO: 6935 - protein, 9 aa, Severe acute respiratory syndrome coronavirus 2
GFDYVYNPF

SEQ ID NO: 6936 - protein, 9 aa, Severe acute respiratory syndrome coronavirus 2
FDYVYNPFM

SEQ ID NO: 6937 - protein, 9 aa, Severe acute respiratory syndrome coronavirus 2
DYVYNPFMI

SEQ ID NO: 6938 - protein, 9 aa, Severe acute respiratory syndrome coronavirus 2
VYNPFMIDV

SEQ ID NO: 6939 - protein, 9 aa, Severe acute respiratory syndrome coronavirus 2
PFMIDVQQW

SEQ ID NO: 6940 - protein, 9 aa, Severe acute respiratory syndrome coronavirus 2
FMIDVQQWG

SEQ ID NO: 6941 - protein, 9 aa, Severe acute respiratory syndrome coronavirus 2
QQWGFTGNL

SEQ ID NO: 6942 - protein, 9 aa, Severe acute respiratory syndrome coronavirus 2
NLQSNHDLY

SEQ ID NO: 6943 - protein, 9 aa, Severe acute respiratory syndrome coronavirus 2
CQVHGNAHV

SEQ ID NO: 6944 - protein, 9 aa, Severe acute respiratory syndrome coronavirus 2
AHVASCDAI

SEQ ID NO: 6945 - protein, 9 aa, Severe acute respiratory syndrome coronavirus 2
HVASCDAIM

SEQ ID NO: 6946 - protein, 9 aa, Severe acute respiratory syndrome coronavirus 2
ASCDAIMTR

SEQ ID NO: 6947 - protein, 9 aa, Severe acute respiratory syndrome coronavirus 2
AIMTRCLAV

SEQ ID NO: 6948 - protein, 9 aa, Severe acute respiratory syndrome coronavirus 2
IMTRCLAVH

SEQ ID NO: 6949 - protein, 9 aa, Severe acute respiratory syndrome coronavirus 2
MTRCLAVHE

SEQ ID NO: 6950 - protein, 9 aa, Severe acute respiratory syndrome coronavirus 2
CLAVHECFV

SEQ ID NO: 6951 - protein, 9 aa, Severe acute respiratory syndrome coronavirus 2
LAVHECFVK

SEQ ID NO: 6952 - protein, 9 aa, Severe acute respiratory syndrome coronavirus 2
AVHECFVKR

SEQ ID NO: 6953 - protein, 9 aa, Severe acute respiratory syndrome coronavirus 2
FVKRVDWTI

SEQ ID NO: 6954 - protein, 9 aa, Severe acute respiratory syndrome coronavirus 2
KRVDWTIEY

SEQ ID NO: 6955 - protein, 9 aa, Severe acute respiratory syndrome coronavirus 2
VDWTIEYPI

SEQ ID NO: 6956 - protein, 9 aa, Severe acute respiratory syndrome coronavirus 2
EYPIIGDEL

SEQ ID NO: 6957 - protein, 9 aa, Severe acute respiratory syndrome coronavirus 2
DELKINAAC

SEQ ID NO: 6958 - protein, 9 aa, Severe acute respiratory syndrome coronavirus 2
ELKINAACR

SEQ ID NO: 6959 - protein, 9 aa, Severe acute respiratory syndrome coronavirus 2
KINAACRKV

SEQ ID NO: 6960 - protein, 9 aa, Severe acute respiratory syndrome coronavirus 2
AACRKVQHM

SEQ ID NO: 6961 - protein, 9 aa, Severe acute respiratory syndrome coronavirus 2
CRKVQHMVV

SEQ ID NO: 6962 - protein, 9 aa, Severe acute respiratory syndrome coronavirus 2
KVQHMVVKA

SEQ ID NO: 6963 - protein, 9 aa, Severe acute respiratory syndrome coronavirus 2
VQHMVVKAA

SEQ ID NO: 6964 - protein, 9 aa, Severe acute respiratory syndrome coronavirus 2
QHMVVKAAL

SEQ ID NO: 6965 - protein, 9 aa, Severe acute respiratory syndrome coronavirus 2
HMVVKAALL

SEQ ID NO: 6966 - protein, 9 aa, Severe acute respiratory syndrome coronavirus 2
MVVKAALLA

SEQ ID NO: 6967 - protein, 9 aa, Severe acute respiratory syndrome coronavirus 2
KAALLADKF

SEQ ID NO: 6968 - protein, 9 aa, Severe acute respiratory syndrome coronavirus 2
ALLADKFPV

SEQ ID NO: 6969 - protein, 9 aa, Severe acute respiratory syndrome coronavirus 2
LLADKFPVL

SEQ ID NO: 6970 - protein, 9 aa, Severe acute respiratory syndrome coronavirus 2
FPVLHDIGN

SEQ ID NO: 6971 - protein, 9 aa, Severe acute respiratory syndrome coronavirus 2
VLHDIGNPK

SEQ ID NO: 6972 - protein, 9 aa, Severe acute respiratory syndrome coronavirus 2
DIGNPKAIK

SEQ ID NO: 6973 - protein, 9 aa, Severe acute respiratory syndrome coronavirus 2
KAIKCVPQA

SEQ ID NO: 6974 - protein, 9 aa, Severe acute respiratory syndrome coronavirus 2
QADVEWKFY

SEQ ID NO: 6975 - protein, 9 aa, Severe acute respiratory syndrome coronavirus 2
WKFYDAQPC

SEQ ID NO: 6976 - protein, 9 aa, Severe acute respiratory syndrome coronavirus 2
AQPCSDKAY

SEQ ID NO: 6977 - protein, 9 aa, Severe acute respiratory syndrome coronavirus 2
KAYKIEELF

SEQ ID NO: 6978 - protein, 9 aa, Severe acute respiratory syndrome coronavirus 2
AYKIEELFY

SEQ ID NO: 6979 - protein, 9 aa, Severe acute respiratory syndrome coronavirus 2
KIEELFYSY

SEQ ID NO: 6980 - protein, 9 aa, Severe acute respiratory syndrome coronavirus 2
IEELFYSYA

SEQ ID NO: 6981 - protein, 9 aa, Severe acute respiratory syndrome coronavirus 2
EELFYSYAT

SEQ ID NO: 6982 - protein, 9 aa, Severe acute respiratory syndrome coronavirus 2
YSYATHSDK

SEQ ID NO: 6983 - protein, 9 aa, Severe acute respiratory syndrome coronavirus 2
SYATHSDKF

SEQ ID NO: 6984 - protein, 9 aa, Severe acute respiratory syndrome coronavirus 2
HSDKFTDGV

SEQ ID NO: 6985 - protein, 9 aa, Severe acute respiratory syndrome coronavirus 2
KFTDGVCLF

SEQ ID NO: 6986 - protein, 9 aa, Severe acute respiratory syndrome coronavirus 2
FTDGVCLFW

SEQ ID NO: 6987 - protein, 9 aa, Severe acute respiratory syndrome coronavirus 2
LFWNCNVDR

SEQ ID NO: 6988 - protein, 9 aa, Severe acute respiratory syndrome coronavirus 2
FWNCNVDRY

SEQ ID NO: 6989 - protein, 9 aa, Severe acute respiratory syndrome coronavirus 2
VDRYPANSI

SEQ ID NO: 6990 - protein, 9 aa, Severe acute respiratory syndrome coronavirus 2
RYPANSIVC

SEQ ID NO: 6991 - protein, 9 aa, Severe acute respiratory syndrome coronavirus 2
YPANSIVCR

SEQ ID NO: 6992 - protein, 9 aa, Severe acute respiratory syndrome coronavirus 2
SIVCRFDTR

SEQ ID NO: 6993 - protein, 9 aa, Severe acute respiratory syndrome coronavirus 2
CRFDTRVLS

SEQ ID NO: 6994 - protein, 9 aa, Severe acute respiratory syndrome coronavirus 2
TRVLSNLNL

SEQ ID NO: 6995 - protein, 9 aa, Severe acute respiratory syndrome coronavirus 2
VLSNLNLPG

SEQ ID NO: 6996 - protein, 9 aa, Severe acute respiratory syndrome coronavirus 2
LPGCDGGSL

SEQ ID NO: 6997 - protein, 9 aa, Severe acute respiratory syndrome coronavirus 2
SLYVNKHAF

SEQ ID NO: 6998 - protein, 9 aa, Severe acute respiratory syndrome coronavirus 2
LYVNKHAFH

SEQ ID NO: 6999 - protein, 9 aa, Severe acute respiratory syndrome coronavirus 2
NKHAFHTPA

SEQ ID NO: 7000 - protein, 9 aa, Severe acute respiratory syndrome coronavirus 2
KHAFHTPAF

SEQ ID NO: 7001 - protein, 9 aa, Severe acute respiratory syndrome coronavirus 2
AFHTPAFDK

SEQ ID NO: 7002 - protein, 9 aa, Severe acute respiratory syndrome coronavirus 2
TPAFDKSAF

SEQ ID NO: 7003 - protein, 9 aa, Severe acute respiratory syndrome coronavirus 2
FDKSAFVNL

SEQ ID NO: 7004 - protein, 9 aa, Severe acute respiratory syndrome coronavirus 2
SAFVNLKQL

SEQ ID NO: 7005 - protein, 9 aa, Severe acute respiratory syndrome coronavirus 2
FVNLKQLPF

SEQ ID NO: 7006 - protein, 9 aa, Severe acute respiratory syndrome coronavirus 2
NLKQLPFFY

SEQ ID NO: 7007 - protein, 9 aa, Severe acute respiratory syndrome coronavirus 2
LKQLPFFYY

SEQ ID NO: 7008 - protein, 9 aa, Severe acute respiratory syndrome coronavirus 2
KQLPFFYYS

SEQ ID NO: 7009 - protein, 9 aa, Severe acute respiratory syndrome coronavirus 2
LPFFYYSDS

SEQ ID NO: 7010 - protein, 9 aa, Severe acute respiratory syndrome coronavirus 2
FFYYSDSPC

SEQ ID NO: 7011 - protein, 9 aa, Severe acute respiratory syndrome coronavirus 2
CESHGKQVV

SEQ ID NO: 7012 - protein, 9 aa, Severe acute respiratory syndrome coronavirus 2
KQVVSDIDY

SEQ ID NO: 7013 - protein, 9 aa, Severe acute respiratory syndrome coronavirus 2
QVVSDIDYV

SEQ ID NO: 7014 - protein, 9 aa, Severe acute respiratory syndrome coronavirus 2
VSDIDYVPL

SEQ ID NO: 7015 - protein, 9 aa, Severe acute respiratory syndrome coronavirus 2
YVPLKSATC

SEQ ID NO: 7016 - protein, 9 aa, Severe acute respiratory syndrome coronavirus 2
VPLKSATCI

SEQ ID NO: 7017 - protein, 9 aa, Severe acute respiratory syndrome coronavirus 2
ITRCNLGGA

SEQ ID NO: 7018 - protein, 9 aa, Severe acute respiratory syndrome coronavirus 2
TRCNLGGAV

SEQ ID NO: 7019 - protein, 9 aa, Severe acute respiratory syndrome coronavirus 2
CNLGGAVCR

SEQ ID NO: 7020 - protein, 9 aa, Severe acute respiratory syndrome coronavirus 2
CRHHANEYR

SEQ ID NO: 7021 - protein, 9 aa, Severe acute respiratory syndrome coronavirus 2
RHHANEYRL

SEQ ID NO: 7022 - protein, 9 aa, Severe acute respiratory syndrome coronavirus 2
HHANEYRLY

SEQ ID NO: 7023 - protein, 9 aa, Severe acute respiratory syndrome coronavirus 2
HANEYRLYL

SEQ ID NO: 7024 - protein, 9 aa, Severe acute respiratory syndrome coronavirus 2
NEYRLYLDA

SEQ ID NO: 7025 - protein, 9 aa, Severe acute respiratory syndrome coronavirus 2
EYRLYLDAY

SEQ ID NO: 7026 - protein, 9 aa, Severe acute respiratory syndrome coronavirus 2
RLYLDAYNM

SEQ ID NO: 7027 - protein, 9 aa, Severe acute respiratory syndrome coronavirus 2
LYLDAYNMM

SEQ ID NO: 7028 - protein, 9 aa, Severe acute respiratory syndrome coronavirus 2
YLDAYNMMI

SEQ ID NO: 7029 - protein, 9 aa, Severe acute respiratory syndrome coronavirus 2
DAYNMMISA

SEQ ID NO: 7030 - protein, 9 aa, Severe acute respiratory syndrome coronavirus 2
YNMMISAGF

SEQ ID NO: 7031 - protein, 9 aa, Severe acute respiratory syndrome coronavirus 2
MMISAGFSL

SEQ ID NO: 7032 - protein, 9 aa, Severe acute respiratory syndrome coronavirus 2
MISAGFSLW

SEQ ID NO: 7033 - protein, 9 aa, Severe acute respiratory syndrome coronavirus 2
ISAGFSLWV

SEQ ID NO: 7034 - protein, 9 aa, Severe acute respiratory syndrome coronavirus 2
SAGFSLWVY

SEQ ID NO: 7035 - protein, 9 aa, Severe acute respiratory syndrome coronavirus 2
AGFSLWVYK

SEQ ID NO: 7036 - protein, 9 aa, Severe acute respiratory syndrome coronavirus 2
FSLWVYKQF

SEQ ID NO: 7037 - protein, 9 aa, Severe acute respiratory syndrome coronavirus 2
WVYKQFDTY

SEQ ID NO: 7038 - protein, 9 aa, Severe acute respiratory syndrome coronavirus 2
YKQFDTYNL

SEQ ID NO: 7039 - protein, 9 aa, Severe acute respiratory syndrome coronavirus 2
DTYNLWNTF

SEQ ID NO: 7040 - protein, 9 aa, Severe acute respiratory syndrome coronavirus 2
YNLWNTFTR

SEQ ID NO: 7041 - protein, 9 aa, Severe acute respiratory syndrome coronavirus 2
NLWNTFTRL

SEQ ID NO: 7042 - protein, 9 aa, Severe acute respiratory syndrome coronavirus 2
NTFTRLQSL

SEQ ID NO: 7043 - protein, 9 aa, Severe acute respiratory syndrome coronavirus 2
TRLQSLENV

SEQ ID NO: 7044 - protein, 9 aa, Severe acute respiratory syndrome coronavirus 2
LQSLENVAF

SEQ ID NO: 7045 - protein, 9 aa, Severe acute respiratory syndrome coronavirus 2
SLENVAFNV

SEQ ID NO: 7046 - protein, 9 aa, Severe acute respiratory syndrome coronavirus 2
LENVAFNVV

SEQ ID NO: 7047 - protein, 9 aa, Severe acute respiratory syndrome coronavirus 2
NVAFNVVNK

SEQ ID NO: 7048 - protein, 9 aa, Severe acute respiratory syndrome coronavirus 2
QQGEVPVSI

SEQ ID NO: 7049 - protein, 9 aa, Severe acute respiratory syndrome coronavirus 2
VPVSIINNT

SEQ ID NO: 7050 - protein, 9 aa, Severe acute respiratory syndrome coronavirus 2
VSIINNTVY

SEQ ID NO: 7051 - protein, 9 aa, Severe acute respiratory syndrome coronavirus 2
SIINNTVYT

SEQ ID NO: 7052 - protein, 9 aa, Severe acute respiratory syndrome coronavirus 2
IINNTVYTK

SEQ ID NO: 7053 - protein, 9 aa, Severe acute respiratory syndrome coronavirus 2
TVYTKVDGV

SEQ ID NO: 7054 - protein, 9 aa, Severe acute respiratory syndrome coronavirus 2
KVDGVDVEL

SEQ ID NO: 7055 - protein, 9 aa, Severe acute respiratory syndrome coronavirus 2
ELFENKTTL

SEQ ID NO: 7056 - protein, 9 aa, Severe acute respiratory syndrome coronavirus 2
FENKTTLPV

SEQ ID NO: 7057 - protein, 9 aa, Severe acute respiratory syndrome coronavirus 2
KTTLPVNVA

SEQ ID NO: 7058 - protein, 9 aa, Severe acute respiratory syndrome coronavirus 2
TTLPVNVAF

SEQ ID NO: 7059 - protein, 9 aa, Severe acute respiratory syndrome coronavirus 2
LPVNVAFEL

SEQ ID NO: 7060 - protein, 9 aa, Severe acute respiratory syndrome coronavirus 2
PVNVAFELW

SEQ ID NO: 7061 - protein, 9 aa, Severe acute respiratory syndrome coronavirus 2
NVAFELWAK

SEQ ID NO: 7062 - protein, 9 aa, Severe acute respiratory syndrome coronavirus 2
VAFELWAKR

SEQ ID NO: 7063 - protein, 9 aa, Severe acute respiratory syndrome coronavirus 2
FELWAKRNI

SEQ ID NO: 7064 - protein, 9 aa, Severe acute respiratory syndrome coronavirus 2
ELWAKRNIK

SEQ ID NO: 7065 - protein, 9 aa, Severe acute respiratory syndrome coronavirus 2
WAKRNIKPV

SEQ ID NO: 7066 - protein, 9 aa, Severe acute respiratory syndrome coronavirus 2
RNIKPVPEV

SEQ ID NO: 7067 - protein, 9 aa, Severe acute respiratory syndrome coronavirus 2
NIKPVPEVK

SEQ ID NO: 7068 - protein, 9 aa, Severe acute respiratory syndrome coronavirus 2
KPVPEVKIL

SEQ ID NO: 7069 - protein, 9 aa, Severe acute respiratory syndrome coronavirus 2
ILNNLGVDI

SEQ ID NO: 7070 - protein, 9 aa, Severe acute respiratory syndrome coronavirus 2
DIAANTVIW

SEQ ID NO: 7071 - protein, 9 aa, Severe acute respiratory syndrome coronavirus 2
AANTVIWDY

SEQ ID NO: 7072 - protein, 9 aa, Severe acute respiratory syndrome coronavirus 2
ANTVIWDYK

SEQ ID NO: 7073 - protein, 9 aa, Severe acute respiratory syndrome coronavirus 2
NTVIWDYKR

SEQ ID NO: 7074 - protein, 9 aa, Severe acute respiratory syndrome coronavirus 2
WDYKRDAPA

SEQ ID NO: 7075 - protein, 9 aa, Severe acute respiratory syndrome coronavirus 2
YKRDAPAHI

SEQ ID NO: 7076 - protein, 9 aa, Severe acute respiratory syndrome coronavirus 2
DAPAHISTI

SEQ ID NO: 7077 - protein, 9 aa, Severe acute respiratory syndrome coronavirus 2
APAHISTIG

SEQ ID NO: 7078 - protein, 9 aa, Severe acute respiratory syndrome coronavirus 2
ISTIGVCSM

SEQ ID NO: 7079 - protein, 9 aa, Severe acute respiratory syndrome coronavirus 2
STIGVCSMT

SEQ ID NO: 7080 - protein, 9 aa, Severe acute respiratory syndrome coronavirus 2
CSMTDIAKK

SEQ ID NO: 7081 - protein, 9 aa, Severe acute respiratory syndrome coronavirus 2
IAKKPTETI

SEQ ID NO: 7082 - protein, 9 aa, Severe acute respiratory syndrome coronavirus 2
ETICAPLTV

SEQ ID NO: 7083 - protein, 9 aa, Severe acute respiratory syndrome coronavirus 2
TICAPLTVF

SEQ ID NO: 7084 - protein, 9 aa, Severe acute respiratory syndrome coronavirus 2
ICAPLTVFF

SEQ ID NO: 7085 - protein, 9 aa, Severe acute respiratory syndrome coronavirus 2
LTVFFDGRV

SEQ ID NO: 7086 - protein, 9 aa, Severe acute respiratory syndrome coronavirus 2
GRVDGQVDL

SEQ ID NO: 7087 - protein, 9 aa, Severe acute respiratory syndrome coronavirus 2
RVDGQVDLF

SEQ ID NO: 7088 - protein, 9 aa, Severe acute respiratory syndrome coronavirus 2
GQVDLFRNA

SEQ ID NO: 7089 - protein, 9 aa, Severe acute respiratory syndrome coronavirus 2
QVDLFRNAR

SEQ ID NO: 7090 - protein, 9 aa, Severe acute respiratory syndrome coronavirus 2
LFRNARNGV

SEQ ID NO: 7091 - protein, 9 aa, Severe acute respiratory syndrome coronavirus 2
FRNARNGVL

SEQ ID NO: 7092 - protein, 9 aa, Severe acute respiratory syndrome coronavirus 2
VLITEGSVK

SEQ ID NO: 7093 - protein, 9 aa, Severe acute respiratory syndrome coronavirus 2
SVKGLQPSV

SEQ ID NO: 7094 - protein, 9 aa, Severe acute respiratory syndrome coronavirus 2
GLQPSVGPK

SEQ ID NO: 7095 - protein, 9 aa, Severe acute respiratory syndrome coronavirus 2
SVGPKQASL

SEQ ID NO: 7096 - protein, 9 aa, Severe acute respiratory syndrome coronavirus 2
QASLNGVTL

SEQ ID NO: 7097 - protein, 9 aa, Severe acute respiratory syndrome coronavirus 2
ASLNGVTLI

SEQ ID NO: 7098 - protein, 9 aa, Severe acute respiratory syndrome coronavirus 2
GVTLIGEAV

SEQ ID NO: 7099 - protein, 9 aa, Severe acute respiratory syndrome coronavirus 2
VTLIGEAVK

SEQ ID NO: 7100 - protein, 9 aa, Severe acute respiratory syndrome coronavirus 2
EAVKTQFNY

SEQ ID NO: 7101 - protein, 9 aa, Severe acute respiratory syndrome coronavirus 2
AVKTQFNYY

SEQ ID NO: 7102 - protein, 9 aa, Severe acute respiratory syndrome coronavirus 2
KTQFNYYKK

SEQ ID NO: 7103 - protein, 9 aa, Severe acute respiratory syndrome coronavirus 2
TQFNYYKKV

SEQ ID NO: 7104 - protein, 9 aa, Severe acute respiratory syndrome coronavirus 2
NYYKKVDGV

SEQ ID NO: 7105 - protein, 9 aa, Severe acute respiratory syndrome coronavirus 2
YYKKVDGVV

SEQ ID NO: 7106 - protein, 9 aa, Severe acute respiratory syndrome coronavirus 2
KVDGVVQQL

SEQ ID NO: 7107 - protein, 9 aa, Severe acute respiratory syndrome coronavirus 2
VVQQLPETY

SEQ ID NO: 7108 - protein, 9 aa, Severe acute respiratory syndrome coronavirus 2
VQQLPETYF

SEQ ID NO: 7109 - protein, 9 aa, Severe acute respiratory syndrome coronavirus 2
QQLPETYFT

SEQ ID NO: 7110 - protein, 9 aa, Severe acute respiratory syndrome coronavirus 2
TYFTQSRNL

SEQ ID NO: 7111 - protein, 9 aa, Severe acute respiratory syndrome coronavirus 2
TQSRNLQEF

SEQ ID NO: 7112 - protein, 9 aa, Severe acute respiratory syndrome coronavirus 2
QSRNLQEFK

SEQ ID NO: 7113 - protein, 9 aa, Severe acute respiratory syndrome coronavirus 2
RNLQEFKPR

SEQ ID NO: 7114 - protein, 9 aa, Severe acute respiratory syndrome coronavirus 2
QEFKPRSQM

SEQ ID NO: 7115 - protein, 9 aa, Severe acute respiratory syndrome coronavirus 2
RSQMEIDFL

SEQ ID NO: 7116 - protein, 9 aa, Severe acute respiratory syndrome coronavirus 2
SQMEIDFLE

SEQ ID NO: 7117 - protein, 9 aa, Severe acute respiratory syndrome coronavirus 2
MEIDFLELA

SEQ ID NO: 7118 - protein, 9 aa, Severe acute respiratory syndrome coronavirus 2
EIDFLELAM

SEQ ID NO: 7119 - protein, 9 aa, Severe acute respiratory syndrome coronavirus 2
LELAMDEFI

SEQ ID NO: 7120 - protein, 9 aa, Severe acute respiratory syndrome coronavirus 2
LAMDEFIER

SEQ ID NO: 7121 - protein, 9 aa, Severe acute respiratory syndrome coronavirus 2
AMDEFIERY

SEQ ID NO: 7122 - protein, 9 aa, Severe acute respiratory syndrome coronavirus 2
DEFIERYKL

SEQ ID NO: 7123 - protein, 9 aa, Severe acute respiratory syndrome coronavirus 2
ERYKLEGYA

SEQ ID NO: 7124 - protein, 9 aa, Severe acute respiratory syndrome coronavirus 2
RYKLEGYAF

SEQ ID NO: 7125 - protein, 9 aa, Severe acute respiratory syndrome coronavirus 2
LEGYAFEHI

SEQ ID NO: 7126 - protein, 9 aa, Severe acute respiratory syndrome coronavirus 2
EGYAFEHIV

SEQ ID NO: 7127 - protein, 9 aa, Severe acute respiratory syndrome coronavirus 2
GYAFEHIVY

SEQ ID NO: 7128 - protein, 9 aa, Severe acute respiratory syndrome coronavirus 2
YAFEHIVYG

SEQ ID NO: 7129 - protein, 9 aa, Severe acute respiratory syndrome coronavirus 2
FEHIVYGDF

SEQ ID NO: 7130 - protein, 9 aa, Severe acute respiratory syndrome coronavirus 2
YGDFSHSQL

SEQ ID NO: 7131 - protein, 9 aa, Severe acute respiratory syndrome coronavirus 2
FSHSQLGGL

SEQ ID NO: 7132 - protein, 9 aa, Severe acute respiratory syndrome coronavirus 2
HSQLGGLHL

SEQ ID NO: 7133 - protein, 9 aa, Severe acute respiratory syndrome coronavirus 2
SQLGGLHLL

SEQ ID NO: 7134 - protein, 9 aa, Severe acute respiratory syndrome coronavirus 2
QLGGLHLLI

SEQ ID NO: 7135 - protein, 9 aa, Severe acute respiratory syndrome coronavirus 2
GLHLLIGLA

SEQ ID NO: 7136 - protein, 9 aa, Severe acute respiratory syndrome coronavirus 2
HLLIGLAKR

SEQ ID NO: 7137 - protein, 9 aa, Severe acute respiratory syndrome coronavirus 2
LLIGLAKRF

SEQ ID NO: 7138 - protein, 9 aa, Severe acute respiratory syndrome coronavirus 2
LIGLAKRFK

SEQ ID NO: 7139 - protein, 9 aa, Severe acute respiratory syndrome coronavirus 2
AKRFKESPF

SEQ ID NO: 7140 - protein, 9 aa, Severe acute respiratory syndrome coronavirus 2
RFKESPFEL

SEQ ID NO: 7141 - protein, 9 aa, Severe acute respiratory syndrome coronavirus 2
SPFELEDFI

SEQ ID NO: 7142 - protein, 9 aa, Severe acute respiratory syndrome coronavirus 2
FELEDFIPM

SEQ ID NO: 7143 - protein, 9 aa, Severe acute respiratory syndrome coronavirus 2
GSSKCVCSV

SEQ ID NO: 7144 - protein, 9 aa, Severe acute respiratory syndrome coronavirus 2
SSKCVCSVI

SEQ ID NO: 7145 - protein, 9 aa, Severe acute respiratory syndrome coronavirus 2
CVCSVIDLL

SEQ ID NO: 7146 - protein, 9 aa, Severe acute respiratory syndrome coronavirus 2
LLLDDFVEI

SEQ ID NO: 7147 - protein, 9 aa, Severe acute respiratory syndrome coronavirus 2
LLDDFVEII

SEQ ID NO: 7148 - protein, 9 aa, Severe acute respiratory syndrome coronavirus 2
VEIIKSQDL

SEQ ID NO: 7149 - protein, 9 aa, Severe acute respiratory syndrome coronavirus 2
IIKSQDLSV

SEQ ID NO: 7150 - protein, 9 aa, Severe acute respiratory syndrome coronavirus 2
IKSQDLSVV

SEQ ID NO: 7151 - protein, 9 aa, Severe acute respiratory syndrome coronavirus 2
SQDLSVVSK

SEQ ID NO: 7152 - protein, 9 aa, Severe acute respiratory syndrome coronavirus 2
LSVVSKVVK

SEQ ID NO: 7153 - protein, 9 aa, Severe acute respiratory syndrome coronavirus 2
SVVSKVVKV

SEQ ID NO: 7154 - protein, 9 aa, Severe acute respiratory syndrome coronavirus 2
VSKVVKVTI

SEQ ID NO: 7155 - protein, 9 aa, Severe acute respiratory syndrome coronavirus 2
KVVKVTIDY

SEQ ID NO: 7156 - protein, 9 aa, Severe acute respiratory syndrome coronavirus 2
TIDYTEISF

SEQ ID NO: 7157 - protein, 9 aa, Severe acute respiratory syndrome coronavirus 2
DYTEISFML

SEQ ID NO: 7158 - protein, 9 aa, Severe acute respiratory syndrome coronavirus 2
YTEISFMLW

SEQ ID NO: 7159 - protein, 9 aa, Severe acute respiratory syndrome coronavirus 2
EISFMLWCK

SEQ ID NO: 7160 - protein, 9 aa, Severe acute respiratory syndrome coronavirus 2
MLWCKDGHV

SEQ ID NO: 7161 - protein, 9 aa, Severe acute respiratory syndrome coronavirus 2
CKDGHVETF

SEQ ID NO: 7162 - protein, 9 aa, Severe acute respiratory syndrome coronavirus 2
FYPKLQSSQ

SEQ ID NO: 7163 - protein, 9 aa, Severe acute respiratory syndrome coronavirus 2
YPKLQSSQA

SEQ ID NO: 7164 - protein, 9 aa, Severe acute respiratory syndrome coronavirus 2
SSQAWQPGV

SEQ ID NO: 7165 - protein, 9 aa, Severe acute respiratory syndrome coronavirus 2
SQAWQPGVA

SEQ ID NO: 7166 - protein, 9 aa, Severe acute respiratory syndrome coronavirus 2
QAWQPGVAM

SEQ ID NO: 7167 - protein, 9 aa, Severe acute respiratory syndrome coronavirus 2
QPGVAMPNL

SEQ ID NO: 7168 - protein, 9 aa, Severe acute respiratory syndrome coronavirus 2
GVAMPNLYK

SEQ ID NO: 7169 - protein, 9 aa, Severe acute respiratory syndrome coronavirus 2
VAMPNLYKM

SEQ ID NO: 7170 - protein, 9 aa, Severe acute respiratory syndrome coronavirus 2
MPNLYKMQR

SEQ ID NO: 7171 - protein, 9 aa, Severe acute respiratory syndrome coronavirus 2
NLYKMQRML

SEQ ID NO: 7172 - protein, 9 aa, Severe acute respiratory syndrome coronavirus 2
LYKMQRMLL

SEQ ID NO: 7173 - protein, 9 aa, Severe acute respiratory syndrome coronavirus 2
KMQRMLLEK

SEQ ID NO: 7174 - protein, 9 aa, Severe acute respiratory syndrome coronavirus 2
LEKCDLQNY

SEQ ID NO: 7175 - protein, 9 aa, Severe acute respiratory syndrome coronavirus 2
SATLPKGIM

SEQ ID NO: 7176 - protein, 9 aa, Severe acute respiratory syndrome coronavirus 2
ATLPKGIMM

SEQ ID NO: 7177 - protein, 9 aa, Severe acute respiratory syndrome coronavirus 2
LPKGIMMNV

SEQ ID NO: 7178 - protein, 9 aa, Severe acute respiratory syndrome coronavirus 2
KGIMMNVAK

SEQ ID NO: 7179 - protein, 9 aa, Severe acute respiratory syndrome coronavirus 2
GIMMNVAKY

SEQ ID NO: 7180 - protein, 9 aa, Severe acute respiratory syndrome coronavirus 2
IMMNVAKYT

SEQ ID NO: 7181 - protein, 9 aa, Severe acute respiratory syndrome coronavirus 2
MNVAKYTQL

SEQ ID NO: 7182 - protein, 9 aa, Severe acute respiratory syndrome coronavirus 2
AKYTQLCQY

SEQ ID NO: 7183 - protein, 9 aa, Severe acute respiratory syndrome coronavirus 2
KYTQLCQYL

SEQ ID NO: 7184 - protein, 9 aa, Severe acute respiratory syndrome coronavirus 2
QLCQYLNTL

SEQ ID NO: 7185 - protein, 9 aa, Severe acute respiratory syndrome coronavirus 2
CQYLNTLTL

SEQ ID NO: 7186 - protein, 9 aa, Severe acute respiratory syndrome coronavirus 2
YLNTLTLAV

SEQ ID NO: 7187 - protein, 9 aa, Severe acute respiratory syndrome coronavirus 2
NTLTLAVPY

SEQ ID NO: 7188 - protein, 9 aa, Severe acute respiratory syndrome coronavirus 2
LTLAVPYNM

SEQ ID NO: 7189 - protein, 9 aa, Severe acute respiratory syndrome coronavirus 2
TLAVPYNMR

SEQ ID NO: 7190 - protein, 9 aa, Severe acute respiratory syndrome coronavirus 2
LAVPYNMRV

SEQ ID NO: 7191 - protein, 9 aa, Severe acute respiratory syndrome coronavirus 2
AVPYNMRVI

SEQ ID NO: 7192 - protein, 9 aa, Severe acute respiratory syndrome coronavirus 2
PYNMRVIHF

SEQ ID NO: 7193 - protein, 9 aa, Severe acute respiratory syndrome coronavirus 2
NMRVIHFGA

SEQ ID NO: 7194 - protein, 9 aa, Severe acute respiratory syndrome coronavirus 2
GVAPGTAVL

SEQ ID NO: 7195 - protein, 9 aa, Severe acute respiratory syndrome coronavirus 2
VAPGTAVLR

SEQ ID NO: 7196 - protein, 9 aa, Severe acute respiratory syndrome coronavirus 2
RQWLPTGTL

SEQ ID NO: 7197 - protein, 9 aa, Severe acute respiratory syndrome coronavirus 2
QWLPTGTLL

SEQ ID NO: 7198 - protein, 9 aa, Severe acute respiratory syndrome coronavirus 2
WLPTGTLLV

SEQ ID NO: 7199 - protein, 9 aa, Severe acute respiratory syndrome coronavirus 2
LVDSDLNDF

SEQ ID NO: 7200 - protein, 9 aa, Severe acute respiratory syndrome coronavirus 2
FVSDADSTL

SEQ ID NO: 7201 - protein, 9 aa, Severe acute respiratory syndrome coronavirus 2
VSDADSTLI

SEQ ID NO: 7202 - protein, 9 aa, Severe acute respiratory syndrome coronavirus 2
TLIGDCATV

SEQ ID NO: 7203 - protein, 9 aa, Severe acute respiratory syndrome coronavirus 2
CATVHTANK

SEQ ID NO: 7204 - protein, 9 aa, Severe acute respiratory syndrome coronavirus 2
ATVHTANKW

SEQ ID NO: 7205 - protein, 9 aa, Severe acute respiratory syndrome coronavirus 2
VHTANKWDL

SEQ ID NO: 7206 - protein, 9 aa, Severe acute respiratory syndrome coronavirus 2
HTANKWDLI

SEQ ID NO: 7207 - protein, 9 aa, Severe acute respiratory syndrome coronavirus 2
TANKWDLII

SEQ ID NO: 7208 - protein, 9 aa, Severe acute respiratory syndrome coronavirus 2
IISDMYDPK

SEQ ID NO: 7209 - protein, 9 aa, Severe acute respiratory syndrome coronavirus 2
MYDPKTKNV

SEQ ID NO: 7210 - protein, 9 aa, Severe acute respiratory syndrome coronavirus 2
KTKNVTKEN

SEQ ID NO: 7211 - protein, 9 aa, Severe acute respiratory syndrome coronavirus 2
NVTKENDSK

SEQ ID NO: 7212 - protein, 9 aa, Severe acute respiratory syndrome coronavirus 2
KENDSKEGF

SEQ ID NO: 7213 - protein, 9 aa, Severe acute respiratory syndrome coronavirus 2
DSKEGFFTY

SEQ ID NO: 7214 - protein, 9 aa, Severe acute respiratory syndrome coronavirus 2
KEGFFTYIC

SEQ ID NO: 7215 - protein, 9 aa, Severe acute respiratory syndrome coronavirus 2
GFFTYICGF

SEQ ID NO: 7216 - protein, 9 aa, Severe acute respiratory syndrome coronavirus 2
YICGFIQQK

SEQ ID NO: 7217 - protein, 9 aa, Severe acute respiratory syndrome coronavirus 2
GFIQQKLAL

SEQ ID NO: 7218 - protein, 9 aa, Severe acute respiratory syndrome coronavirus 2
KLALGGSVA

SEQ ID NO: 7219 - protein, 9 aa, Severe acute respiratory syndrome coronavirus 2
LALGGSVAI

SEQ ID NO: 7220 - protein, 9 aa, Severe acute respiratory syndrome coronavirus 2
ALGGSVAIK

SEQ ID NO: 7221 - protein, 9 aa, Severe acute respiratory syndrome coronavirus 2
AIKITEHSW

SEQ ID NO: 7222 - protein, 9 aa, Severe acute respiratory syndrome coronavirus 2
KITEHSWNA

SEQ ID NO: 7223 - protein, 9 aa, Severe acute respiratory syndrome coronavirus 2
TEHSWNADL

SEQ ID NO: 7224 - protein, 9 aa, Severe acute respiratory syndrome coronavirus 2
EHSWNADLY

SEQ ID NO: 7225 - protein, 9 aa, Severe acute respiratory syndrome coronavirus 2
HSWNADLYK

SEQ ID NO: 7226 - protein, 9 aa, Severe acute respiratory syndrome coronavirus 2
SWNADLYKL

SEQ ID NO: 7227 - protein, 9 aa, Severe acute respiratory syndrome coronavirus 2
DLYKLMGHF

SEQ ID NO: 7228 - protein, 9 aa, Severe acute respiratory syndrome coronavirus 2
LYKLMGHFA

SEQ ID NO: 7229 - protein, 9 aa, Severe acute respiratory syndrome coronavirus 2
YKLMGHFAW

SEQ ID NO: 7230 - protein, 9 aa, Severe acute respiratory syndrome coronavirus 2
KLMGHFAWW

SEQ ID NO: 7231 - protein, 9 aa, Severe acute respiratory syndrome coronavirus 2
LMGHFAWWT

SEQ ID NO: 7232 - protein, 9 aa, Severe acute respiratory syndrome coronavirus 2
MGHFAWWTA

SEQ ID NO: 7233 - protein, 9 aa, Severe acute respiratory syndrome coronavirus 2
GHFAWWTAF

SEQ ID NO: 7234 - protein, 9 aa, Severe acute respiratory syndrome coronavirus 2
HFAWWTAFV

SEQ ID NO: 7235 - protein, 9 aa, Severe acute respiratory syndrome coronavirus 2
FAWWTAFVT

SEQ ID NO: 7236 - protein, 9 aa, Severe acute respiratory syndrome coronavirus 2
TAFVTNVNA

SEQ ID NO: 7237 - protein, 9 aa, Severe acute respiratory syndrome coronavirus 2
FVTNVNASS

SEQ ID NO: 7238 - protein, 9 aa, Severe acute respiratory syndrome coronavirus 2
VNASSSEAF

SEQ ID NO: 7239 - protein, 9 aa, Severe acute respiratory syndrome coronavirus 2
NASSSEAFL

SEQ ID NO: 7240 - protein, 9 aa, Severe acute respiratory syndrome coronavirus 2
ASSSEAFLI

SEQ ID NO: 7241 - protein, 9 aa, Severe acute respiratory syndrome coronavirus 2
EAFLIGCNY

SEQ ID NO: 7242 - protein, 9 aa, Severe acute respiratory syndrome coronavirus 2
AFLIGCNYL

SEQ ID NO: 7243 - protein, 9 aa, Severe acute respiratory syndrome coronavirus 2
FLIGCNYLG

SEQ ID NO: 7244 - protein, 9 aa, Severe acute respiratory syndrome coronavirus 2
LIGCNYLGK

SEQ ID NO: 7245 - protein, 9 aa, Severe acute respiratory syndrome coronavirus 2
YLGKPREQI

SEQ ID NO: 7246 - protein, 9 aa, Severe acute respiratory syndrome coronavirus 2
KPREQIDGY

SEQ ID NO: 7247 - protein, 9 aa, Severe acute respiratory syndrome coronavirus 2
REQIDGYVM

SEQ ID NO: 7248 - protein, 9 aa, Severe acute respiratory syndrome coronavirus 2
QIDGYVMHA

SEQ ID NO: 7249 - protein, 9 aa, Severe acute respiratory syndrome coronavirus 2
GYVMHANYI

SEQ ID NO: 7250 - protein, 9 aa, Severe acute respiratory syndrome coronavirus 2
YVMHANYIF

SEQ ID NO: 7251 - protein, 9 aa, Severe acute respiratory syndrome coronavirus 2
VMHANYIFW

SEQ ID NO: 7252 - protein, 9 aa, Severe acute respiratory syndrome coronavirus 2
MHANYIFWR

SEQ ID NO: 7253 - protein, 9 aa, Severe acute respiratory syndrome coronavirus 2
IFWRNTNPI

SEQ ID NO: 7254 - protein, 9 aa, Severe acute respiratory syndrome coronavirus 2
WRNTNPIQL

SEQ ID NO: 7255 - protein, 9 aa, Severe acute respiratory syndrome coronavirus 2
IQLSSYSLF

SEQ ID NO: 7256 - protein, 9 aa, Severe acute respiratory syndrome coronavirus 2
LSSYSLFDM

SEQ ID NO: 7257 - protein, 9 aa, Severe acute respiratory syndrome coronavirus 2
SYSLFDMSK

SEQ ID NO: 7258 - protein, 9 aa, Severe acute respiratory syndrome coronavirus 2
YSLFDMSKF

SEQ ID NO: 7259 - protein, 9 aa, Severe acute respiratory syndrome coronavirus 2
LFDMSKFPL

SEQ ID NO: 7260 - protein, 9 aa, Severe acute respiratory syndrome coronavirus 2
MSKFPLKLR

SEQ ID NO: 7261 - protein, 9 aa, Severe acute respiratory syndrome coronavirus 2
FPLKLRGTA

SEQ ID NO: 7262 - protein, 9 aa, Severe acute respiratory syndrome coronavirus 2
PLKLRGTAV

SEQ ID NO: 7263 - protein, 9 aa, Severe acute respiratory syndrome coronavirus 2
LKLRGTAVM

SEQ ID NO: 7264 - protein, 9 aa, Severe acute respiratory syndrome coronavirus 2
KLRGTAVMS

SEQ ID NO: 7265 - protein, 9 aa, Severe acute respiratory syndrome coronavirus 2
LRGTAVMSL

SEQ ID NO: 7266 - protein, 9 aa, Severe acute respiratory syndrome coronavirus 2
RGTAVMSLK

SEQ ID NO: 7267 - protein, 9 aa, Severe acute respiratory syndrome coronavirus 2
KEGQINDMI

SEQ ID NO: 7268 - protein, 9 aa, Severe acute respiratory syndrome coronavirus 2
GQINDMILS

SEQ ID NO: 7269 - protein, 9 aa, Severe acute respiratory syndrome coronavirus 2
QINDMILSL

SEQ ID NO: 7270 - protein, 9 aa, Severe acute respiratory syndrome coronavirus 2
INDMILSLL

SEQ ID NO: 7271 - protein, 9 aa, Severe acute respiratory syndrome coronavirus 2
DMILSLLSK

SEQ ID NO: 7272 - protein, 9 aa, Severe acute respiratory syndrome coronavirus 2
ILSLLSKGR

SEQ ID NO: 7273 - protein, 9 aa, Severe acute respiratory syndrome coronavirus 2
LSLLSKGRL

SEQ ID NO: 7274 - protein, 9 aa, Severe acute respiratory syndrome coronavirus 2
SLLSKGRLI

SEQ ID NO: 7275 - protein, 9 aa, Severe acute respiratory syndrome coronavirus 2
LLSKGRLII

SEQ ID NO: 7276 - protein, 9 aa, Severe acute respiratory syndrome coronavirus 2
LSKGRLIIR

SEQ ID NO: 7277 - protein, 9 aa, Severe acute respiratory syndrome coronavirus 2
RLIIRENNR

SEQ ID NO: 7278 - protein, 9 aa, Severe acute respiratory syndrome coronavirus 2
LIIRENNRV

SEQ ID NO: 7279 - protein, 9 aa, Severe acute respiratory syndrome coronavirus 2
IIRENNRVV

SEQ ID NO: 7280 - protein, 9 aa, Severe acute respiratory syndrome coronavirus 2
RENNRVVIS

SEQ ID NO: 7281 - protein, 9 aa, Severe acute respiratory syndrome coronavirus 2
RVVISSDVL

SEQ ID NO: 7282 - protein, 9 aa, Severe acute respiratory syndrome coronavirus 2
VVISSDVLV

SEQ ID NO: 7283 - protein, 10 aa, Severe acute respiratory syndrome coronavirus 2
RVCGVSAARL

SEQ ID NO: 7284 - protein, 10 aa, Severe acute respiratory syndrome coronavirus 2
GTGTSTDVVY

SEQ ID NO: 7285 - protein, 10 aa, Severe acute respiratory syndrome coronavirus 2
TGTSTDVVYR

SEQ ID NO: 7286 - protein, 10 aa, Severe acute respiratory syndrome coronavirus 2
TSTDVVYRAF

SEQ ID NO: 7287 - protein, 10 aa, Severe acute respiratory syndrome coronavirus 2
DVVYRAFDIY

SEQ ID NO: 7288 - protein, 10 aa, Severe acute respiratory syndrome coronavirus 2
YRAFDIYNDK

SEQ ID NO: 7289 - protein, 10 aa, Severe acute respiratory syndrome coronavirus 2
RAFDIYNDKV

SEQ ID NO: 7290 - protein, 10 aa, Severe acute respiratory syndrome coronavirus 2
DIYNDKVAGF

SEQ ID NO: 7291 - protein, 10 aa, Severe acute respiratory syndrome coronavirus 2
NDKVAGFAKF

SEQ ID NO: 7292 - protein, 10 aa, Severe acute respiratory syndrome coronavirus 2
DKVAGFAKFL

SEQ ID NO: 7293 - protein, 10 aa, Severe acute respiratory syndrome coronavirus 2
KVAGFAKFLK

SEQ ID NO: 7294 - protein, 10 aa, Severe acute respiratory syndrome coronavirus 2
AKFLKTNCCR

SEQ ID NO: 7295 - protein, 10 aa, Severe acute respiratory syndrome coronavirus 2
KFLKTNCCRF

SEQ ID NO: 7296 - protein, 10 aa, Severe acute respiratory syndrome coronavirus 2
KTNCCRFQEK

SEQ ID NO: 7297 - protein, 10 aa, Severe acute respiratory syndrome coronavirus 2
DEDDNLIDSY

SEQ ID NO: 7298 - protein, 10 aa, Severe acute respiratory syndrome coronavirus 2
DNLIDSYFVV

SEQ ID NO: 7299 - protein, 10 aa, Severe acute respiratory syndrome coronavirus 2
NLIDSYFVVK

SEQ ID NO: 7300 - protein, 10 aa, Severe acute respiratory syndrome coronavirus 2
LIDSYFVVKR

SEQ ID NO: 7301 - protein, 10 aa, Severe acute respiratory syndrome coronavirus 2
SYFVVKRHTF

SEQ ID NO: 7302 - protein, 10 aa, Severe acute respiratory syndrome coronavirus 2
VVKRHTFSNY

SEQ ID NO: 7303 - protein, 10 aa, Severe acute respiratory syndrome coronavirus 2
KRHTFSNYQH

SEQ ID NO: 7304 - protein, 10 aa, Severe acute respiratory syndrome coronavirus 2
FSNYQHEETI

SEQ ID NO: 7305 - protein, 10 aa, Severe acute respiratory syndrome coronavirus 2
SNYQHEETIY

SEQ ID NO: 7306 - protein, 10 aa, Severe acute respiratory syndrome coronavirus 2
YQHEETIYNL

SEQ ID NO: 7307 - protein, 10 aa, Severe acute respiratory syndrome coronavirus 2
QHEETIYNLL

SEQ ID NO: 7308 - protein, 10 aa, Severe acute respiratory syndrome coronavirus 2
YNLLKDCPAV

SEQ ID NO: 7309 - protein, 10 aa, Severe acute respiratory syndrome coronavirus 2
NLLKDCPAVA

SEQ ID NO: 7310 - protein, 10 aa, Severe acute respiratory syndrome coronavirus 2
LLKDCPAVAK

SEQ ID NO: 7311 - protein, 10 aa, Severe acute respiratory syndrome coronavirus 2
CPAVAKHDFF

SEQ ID NO: 7312 - protein, 10 aa, Severe acute respiratory syndrome coronavirus 2
PAVAKHDFFK

SEQ ID NO: 7313 - protein, 10 aa, Severe acute respiratory syndrome coronavirus 2
AVAKHDFFKF

SEQ ID NO: 7314 - protein, 10 aa, Severe acute respiratory syndrome coronavirus 2
VAKHDFFKFR

SEQ ID NO: 7315 - protein, 10 aa, Severe acute respiratory syndrome coronavirus 2
RIDGDMVPHI

SEQ ID NO: 7316 - protein, 10 aa, Severe acute respiratory syndrome coronavirus 2
DGDMVPHISR

SEQ ID NO: 7317 - protein, 10 aa, Severe acute respiratory syndrome coronavirus 2
DMVPHISRQR

SEQ ID NO: 7318 - protein, 10 aa, Severe acute respiratory syndrome coronavirus 2
MVPHISRQRL

SEQ ID NO: 7319 - protein, 10 aa, Severe acute respiratory syndrome coronavirus 2
HISRQRLTKY

SEQ ID NO: 7320 - protein, 10 aa, Severe acute respiratory syndrome coronavirus 2
SRQRLTKYTM

SEQ ID NO: 7321 - protein, 10 aa, Severe acute respiratory syndrome coronavirus 2
RQRLTKYTMA

SEQ ID NO: 7322 - protein, 10 aa, Severe acute respiratory syndrome coronavirus 2
RLTKYTMADL

SEQ ID NO: 7323 - protein, 10 aa, Severe acute respiratory syndrome coronavirus 2
LTKYTMADLV

SEQ ID NO: 7324 - protein, 10 aa, Severe acute respiratory syndrome coronavirus 2
TKYTMADLVY

SEQ ID NO: 7325 - protein, 10 aa, Severe acute respiratory syndrome coronavirus 2
KYTMADLVYA

SEQ ID NO: 7326 - protein, 10 aa, Severe acute respiratory syndrome coronavirus 2
YTMADLVYAL

SEQ ID NO: 7327 - protein, 10 aa, Severe acute respiratory syndrome coronavirus 2
TMADLVYALR

SEQ ID NO: 7328 - protein, 10 aa, Severe acute respiratory syndrome coronavirus 2
MADLVYALRH

SEQ ID NO: 7329 - protein, 10 aa, Severe acute respiratory syndrome coronavirus 2
ADLVYALRHF

SEQ ID NO: 7330 - protein, 10 aa, Severe acute respiratory syndrome coronavirus 2
DTLKEILVTY

SEQ ID NO: 7331 - protein, 10 aa, Severe acute respiratory syndrome coronavirus 2
VTYNCCDDDY

SEQ ID NO: 7332 - protein, 10 aa, Severe acute respiratory syndrome coronavirus 2
TYNCCDDDYF

SEQ ID NO: 7333 - protein, 10 aa, Severe acute respiratory syndrome coronavirus 2
YFNKKDWYDF

SEQ ID NO: 7334 - protein, 10 aa, Severe acute respiratory syndrome coronavirus 2
DFVENPDILR

SEQ ID NO: 7335 - protein, 10 aa, Severe acute respiratory syndrome coronavirus 2
FVENPDILRV

SEQ ID NO: 7336 - protein, 10 aa, Severe acute respiratory syndrome coronavirus 2
VENPDILRVY

SEQ ID NO: 7337 - protein, 10 aa, Severe acute respiratory syndrome coronavirus 2
LRVYANLGER

SEQ ID NO: 7338 - protein, 10 aa, Severe acute respiratory syndrome coronavirus 2
RVYANLGERV

SEQ ID NO: 7339 - protein, 10 aa, Severe acute respiratory syndrome coronavirus 2
VYANLGERVR

SEQ ID NO: 7340 - protein, 10 aa, Severe acute respiratory syndrome coronavirus 2
NLGERVRQAL

SEQ ID NO: 7341 - protein, 10 aa, Severe acute respiratory syndrome coronavirus 2
GERVRQALLK

SEQ ID NO: 7342 - protein, 10 aa, Severe acute respiratory syndrome coronavirus 2
RVRQALLKTV

SEQ ID NO: 7343 - protein, 10 aa, Severe acute respiratory syndrome coronavirus 2
RQALLKTVQF

SEQ ID NO: 7344 - protein, 10 aa, Severe acute respiratory syndrome coronavirus 2
LLKTVQFCDA

SEQ ID NO: 7345 - protein, 10 aa, Severe acute respiratory syndrome coronavirus 2
LKTVQFCDAM

SEQ ID NO: 7346 - protein, 10 aa, Severe acute respiratory syndrome coronavirus 2
KTVQFCDAMR

SEQ ID NO: 7347 - protein, 10 aa, Severe acute respiratory syndrome coronavirus 2
VQFCDAMRNA

SEQ ID NO: 7348 - protein, 10 aa, Severe acute respiratory syndrome coronavirus 2
AMRNAGIVGV

SEQ ID NO: 7349 - protein, 10 aa, Severe acute respiratory syndrome coronavirus 2
MRNAGIVGVL

SEQ ID NO: 7350 - protein, 10 aa, Severe acute respiratory syndrome coronavirus 2
FIQTTPGSGV

SEQ ID NO: 7351 - protein, 10 aa, Severe acute respiratory syndrome coronavirus 2
QTTPGSGVPV

SEQ ID NO: 7352 - protein, 10 aa, Severe acute respiratory syndrome coronavirus 2
TTPGSGVPVV

SEQ ID NO: 7353 - protein, 10 aa, Severe acute respiratory syndrome coronavirus 2
GSGVPVVDSY

SEQ ID NO: 7354 - protein, 10 aa, Severe acute respiratory syndrome coronavirus 2
SGVPVVDSYY

SEQ ID NO: 7355 - protein, 10 aa, Severe acute respiratory syndrome coronavirus 2
VPVVDSYYSL

SEQ ID NO: 7356 - protein, 10 aa, Severe acute respiratory syndrome coronavirus 2
VVDSYYSLLM

SEQ ID NO: 7357 - protein, 10 aa, Severe acute respiratory syndrome coronavirus 2
DSYYSLLMPI

SEQ ID NO: 7358 - protein, 10 aa, Severe acute respiratory syndrome coronavirus 2
SYYSLLMPIL

SEQ ID NO: 7359 - protein, 10 aa, Severe acute respiratory syndrome coronavirus 2
YSLLMPILTL

SEQ ID NO: 7360 - protein, 10 aa, Severe acute respiratory syndrome coronavirus 2
SLLMPILTLT

SEQ ID NO: 7361 - protein, 10 aa, Severe acute respiratory syndrome coronavirus 2
LLMPILTLTR

SEQ ID NO: 7362 - protein, 10 aa, Severe acute respiratory syndrome coronavirus 2
LMPILTLTRA

SEQ ID NO: 7363 - protein, 10 aa, Severe acute respiratory syndrome coronavirus 2
MPILTLTRAL

SEQ ID NO: 7364 - protein, 10 aa, Severe acute respiratory syndrome coronavirus 2
ILTLTRALTA

SEQ ID NO: 7365 - protein, 10 aa, Severe acute respiratory syndrome coronavirus 2
ESHVDTDLTK

SEQ ID NO: 7366 - protein, 10 aa, Severe acute respiratory syndrome coronavirus 2
HVDTDLTKPY

SEQ ID NO: 7367 - protein, 10 aa, Severe acute respiratory syndrome coronavirus 2
DTDLTKPYIK

SEQ ID NO: 7368 - protein, 10 aa, Severe acute respiratory syndrome coronavirus 2
TKPYIKWDLL

SEQ ID NO: 7369 - protein, 10 aa, Severe acute respiratory syndrome coronavirus 2
KPYIKWDLLK

SEQ ID NO: 7370 - protein, 10 aa, Severe acute respiratory syndrome coronavirus 2
PYIKWDLLKY

SEQ ID NO: 7371 - protein, 10 aa, Severe acute respiratory syndrome coronavirus 2
IKWDLLKYDF

SEQ ID NO: 7372 - protein, 10 aa, Severe acute respiratory syndrome coronavirus 2
LLKYDFTEER

SEQ ID NO: 7373 - protein, 10 aa, Severe acute respiratory syndrome coronavirus 2
LKYDFTEERL

SEQ ID NO: 7374 - protein, 10 aa, Severe acute respiratory syndrome coronavirus 2
KYDFTEERLK

SEQ ID NO: 7375 - protein, 10 aa, Severe acute respiratory syndrome coronavirus 2
YDFTEERLKL

SEQ ID NO: 7376 - protein, 10 aa, Severe acute respiratory syndrome coronavirus 2
EERLKLFDRY

SEQ ID NO: 7377 - protein, 10 aa, Severe acute respiratory syndrome coronavirus 2
ERLKLFDRYF

SEQ ID NO: 7378 - protein, 10 aa, Severe acute respiratory syndrome coronavirus 2
RLKLFDRYFK

SEQ ID NO: 7379 - protein, 10 aa, Severe acute respiratory syndrome coronavirus 2
LKLFDRYFKY

SEQ ID NO: 7380 - protein, 10 aa, Severe acute respiratory syndrome coronavirus 2
KLFDRYFKYW

SEQ ID NO: 7381 - protein, 10 aa, Severe acute respiratory syndrome coronavirus 2
RYFKYWDQTY

SEQ ID NO: 7382 - protein, 10 aa, Severe acute respiratory syndrome coronavirus 2
YFKYWDQTYH

SEQ ID NO: 7383 - protein, 10 aa, Severe acute respiratory syndrome coronavirus 2
TYHPNCVNCL

SEQ ID NO: 7384 - protein, 10 aa, Severe acute respiratory syndrome coronavirus 2
CILHCANFNV

SEQ ID NO: 7385 - protein, 10 aa, Severe acute respiratory syndrome coronavirus 2
ILHCANFNVL

SEQ ID NO: 7386 - protein, 10 aa, Severe acute respiratory syndrome coronavirus 2
LHCANFNVLF

SEQ ID NO: 7387 - protein, 10 aa, Severe acute respiratory syndrome coronavirus 2
ANFNVLFSTV

SEQ ID NO: 7388 - protein, 10 aa, Severe acute respiratory syndrome coronavirus 2
NFNVLFSTVF

SEQ ID NO: 7389 - protein, 10 aa, Severe acute respiratory syndrome coronavirus 2
VLFSTVFPPT

SEQ ID NO: 7390 - protein, 10 aa, Severe acute respiratory syndrome coronavirus 2
FSTVFPPTSF

SEQ ID NO: 7391 - protein, 10 aa, Severe acute respiratory syndrome coronavirus 2
VFPPTSFGPL

SEQ ID NO: 7392 - protein, 10 aa, Severe acute respiratory syndrome coronavirus 2
FPPTSFGPLV

SEQ ID NO: 7393 - protein, 10 aa, Severe acute respiratory syndrome coronavirus 2
PTSFGPLVRK

SEQ ID NO: 7394 - protein, 10 aa, Severe acute respiratory syndrome coronavirus 2
TSFGPLVRKI

SEQ ID NO: 7395 - protein, 10 aa, Severe acute respiratory syndrome coronavirus 2
SFGPLVRKIF

SEQ ID NO: 7396 - protein, 10 aa, Severe acute respiratory syndrome coronavirus 2
FGPLVRKIFV

SEQ ID NO: 7397 - protein, 10 aa, Severe acute respiratory syndrome coronavirus 2
LVRKIFVDGV

SEQ ID NO: 7398 - protein, 10 aa, Severe acute respiratory syndrome coronavirus 2
RKIFVDGVPF

SEQ ID NO: 7399 - protein, 10 aa, Severe acute respiratory syndrome coronavirus 2
KIFVDGVPFV

SEQ ID NO: 7400 - protein, 10 aa, Severe acute respiratory syndrome coronavirus 2
IFVDGVPFVV

SEQ ID NO: 7401 - protein, 10 aa, Severe acute respiratory syndrome coronavirus 2
FVDGVPFVVS

SEQ ID NO: 7402 - protein, 10 aa, Severe acute respiratory syndrome coronavirus 2
GVPFVVSTGY

SEQ ID NO: 7403 - protein, 10 aa, Severe acute respiratory syndrome coronavirus 2
PFVVSTGYHF

SEQ ID NO: 7404 - protein, 10 aa, Severe acute respiratory syndrome coronavirus 2
FVVSTGYHFR

SEQ ID NO: 7405 - protein, 10 aa, Severe acute respiratory syndrome coronavirus 2
VVSTGYHFRE

SEQ ID NO: 7406 - protein, 10 aa, Severe acute respiratory syndrome coronavirus 2
VSTGYHFREL

SEQ ID NO: 7407 - protein, 10 aa, Severe acute respiratory syndrome coronavirus 2
YHFRELGVVH

SEQ ID NO: 7408 - protein, 10 aa, Severe acute respiratory syndrome coronavirus 2
VNLHSSRLSF

SEQ ID NO: 7409 - protein, 10 aa, Severe acute respiratory syndrome coronavirus 2
NLHSSRLSFK

SEQ ID NO: 7410 - protein, 10 aa, Severe acute respiratory syndrome coronavirus 2
HSSRLSFKEL

SEQ ID NO: 7411 - protein, 10 aa, Severe acute respiratory syndrome coronavirus 2
SSRLSFKELL

SEQ ID NO: 7412 - protein, 10 aa, Severe acute respiratory syndrome coronavirus 2
SRLSFKELLV

SEQ ID NO: 7413 - protein, 10 aa, Severe acute respiratory syndrome coronavirus 2
RLSFKELLVY

SEQ ID NO: 7414 - protein, 10 aa, Severe acute respiratory syndrome coronavirus 2
LSFKELLVYA

SEQ ID NO: 7415 - protein, 10 aa, Severe acute respiratory syndrome coronavirus 2
KELLVYAADP

SEQ ID NO: 7416 - protein, 10 aa, Severe acute respiratory syndrome coronavirus 2
LLVYAADPAM

SEQ ID NO: 7417 - protein, 10 aa, Severe acute respiratory syndrome coronavirus 2
YAADPAMHAA

SEQ ID NO: 7418 - protein, 10 aa, Severe acute respiratory syndrome coronavirus 2
AMHAASGNLL

SEQ ID NO: 7419 - protein, 10 aa, Severe acute respiratory syndrome coronavirus 2
MHAASGNLLL

SEQ ID NO: 7420 - protein, 10 aa, Severe acute respiratory syndrome coronavirus 2
AASGNLLLDK

SEQ ID NO: 7421 - protein, 10 aa, Severe acute respiratory syndrome coronavirus 2
ASGNLLLDKR

SEQ ID NO: 7422 - protein, 10 aa, Severe acute respiratory syndrome coronavirus 2
LLLDKRTTCF

SEQ ID NO: 7423 - protein, 10 aa, Severe acute respiratory syndrome coronavirus 2
KRTTCFSVAA

SEQ ID NO: 7424 - protein, 10 aa, Severe acute respiratory syndrome coronavirus 2
RTTCFSVAAL

SEQ ID NO: 7425 - protein, 10 aa, Severe acute respiratory syndrome coronavirus 2
TTCFSVAALT

SEQ ID NO: 7426 - protein, 10 aa, Severe acute respiratory syndrome coronavirus 2
FSVAALTNNV

SEQ ID NO: 7427 - protein, 10 aa, Severe acute respiratory syndrome coronavirus 2
SVAALTNNVA

SEQ ID NO: 7428 - protein, 10 aa, Severe acute respiratory syndrome coronavirus 2
VAALTNNVAF

SEQ ID NO: 7429 - protein, 10 aa, Severe acute respiratory syndrome coronavirus 2
LTNNVAFQTV

SEQ ID NO: 7430 - protein, 10 aa, Severe acute respiratory syndrome coronavirus 2
AFQTVKPGNF

SEQ ID NO: 7431 - protein, 10 aa, Severe acute respiratory syndrome coronavirus 2
QTVKPGNFNK

SEQ ID NO: 7432 - protein, 10 aa, Severe acute respiratory syndrome coronavirus 2
KDFYDFAVSK

SEQ ID NO: 7433 - protein, 10 aa, Severe acute respiratory syndrome coronavirus 2
FYDFAVSKGF

SEQ ID NO: 7434 - protein, 10 aa, Severe acute respiratory syndrome coronavirus 2
YDFAVSKGFF

SEQ ID NO: 7435 - protein, 10 aa, Severe acute respiratory syndrome coronavirus 2
DFAVSKGFFK

SEQ ID NO: 7436 - protein, 10 aa, Severe acute respiratory syndrome coronavirus 2
FAVSKGFFKE

SEQ ID NO: 7437 - protein, 10 aa, Severe acute respiratory syndrome coronavirus 2
FFKEGSSVEL

SEQ ID NO: 7438 - protein, 10 aa, Severe acute respiratory syndrome coronavirus 2
GSSVELKHFF

SEQ ID NO: 7439 - protein, 10 aa, Severe acute respiratory syndrome coronavirus 2
SSVELKHFFF

SEQ ID NO: 7440 - protein, 10 aa, Severe acute respiratory syndrome coronavirus 2
SVELKHFFFA

SEQ ID NO: 7441 - protein, 10 aa, Severe acute respiratory syndrome coronavirus 2
FFAQDGNAAI

SEQ ID NO: 7442 - protein, 10 aa, Severe acute respiratory syndrome coronavirus 2
GNAAISDYDY

SEQ ID NO: 7443 - protein, 10 aa, Severe acute respiratory syndrome coronavirus 2
NAAISDYDYY

SEQ ID NO: 7444 - protein, 10 aa, Severe acute respiratory syndrome coronavirus 2
AAISDYDYYR

SEQ ID NO: 7445 - protein, 10 aa, Severe acute respiratory syndrome coronavirus 2
AISDYDYYRY

SEQ ID NO: 7446 - protein, 10 aa, Severe acute respiratory syndrome coronavirus 2
SDYDYYRYNL

SEQ ID NO: 7447 - protein, 10 aa, Severe acute respiratory syndrome coronavirus 2
DYYRYNLPTM

SEQ ID NO: 7448 - protein, 10 aa, Severe acute respiratory syndrome coronavirus 2
YYRYNLPTMC

SEQ ID NO: 7449 - protein, 10 aa, Severe acute respiratory syndrome coronavirus 2
RYNLPTMCDI

SEQ ID NO: 7450 - protein, 10 aa, Severe acute respiratory syndrome coronavirus 2
YNLPTMCDIR

SEQ ID NO: 7451 - protein, 10 aa, Severe acute respiratory syndrome coronavirus 2
LPTMCDIRQL

SEQ ID NO: 7452 - protein, 10 aa, Severe acute respiratory syndrome coronavirus 2
TMCDIRQLLF

SEQ ID NO: 7453 - protein, 10 aa, Severe acute respiratory syndrome coronavirus 2
IRQLLFVVEV

SEQ ID NO: 7454 - protein, 10 aa, Severe acute respiratory syndrome coronavirus 2
RQLLFVVEVV

SEQ ID NO: 7455 - protein, 10 aa, Severe acute respiratory syndrome coronavirus 2
LLFVVEVVDK

SEQ ID NO: 7456 - protein, 10 aa, Severe acute respiratory syndrome coronavirus 2
LFVVEVVDKY

SEQ ID NO: 7457 - protein, 10 aa, Severe acute respiratory syndrome coronavirus 2
FVVEVVDKYF

SEQ ID NO: 7458 - protein, 10 aa, Severe acute respiratory syndrome coronavirus 2
EVVDKYFDCY

SEQ ID NO: 7459 - protein, 10 aa, Severe acute respiratory syndrome coronavirus 2
NLDKSAGFPF

SEQ ID NO: 7460 - protein, 10 aa, Severe acute respiratory syndrome coronavirus 2
DKSAGFPFNK

SEQ ID NO: 7461 - protein, 10 aa, Severe acute respiratory syndrome coronavirus 2
KSAGFPFNKW

SEQ ID NO: 7462 - protein, 10 aa, Severe acute respiratory syndrome coronavirus 2
AGFPFNKWGK

SEQ ID NO: 7463 - protein, 10 aa, Severe acute respiratory syndrome coronavirus 2
GFPFNKWGKA

SEQ ID NO: 7464 - protein, 10 aa, Severe acute respiratory syndrome coronavirus 2
FPFNKWGKAR

SEQ ID NO: 7465 - protein, 10 aa, Severe acute respiratory syndrome coronavirus 2
FNKWGKARLY

SEQ ID NO: 7466 - protein, 10 aa, Severe acute respiratory syndrome coronavirus 2
NKWGKARLYY

SEQ ID NO: 7467 - protein, 10 aa, Severe acute respiratory syndrome coronavirus 2
KARLYYDSMS

SEQ ID NO: 7468 - protein, 10 aa, Severe acute respiratory syndrome coronavirus 2
ARLYYDSMSY

SEQ ID NO: 7469 - protein, 10 aa, Severe acute respiratory syndrome coronavirus 2
RLYYDSMSYE

SEQ ID NO: 7470 - protein, 10 aa, Severe acute respiratory syndrome coronavirus 2
SMSYEDQDAL

SEQ ID NO: 7471 - protein, 10 aa, Severe acute respiratory syndrome coronavirus 2
MSYEDQDALF

SEQ ID NO: 7472 - protein, 10 aa, Severe acute respiratory syndrome coronavirus 2
YEDQDALFAY

SEQ ID NO: 7473 - protein, 10 aa, Severe acute respiratory syndrome coronavirus 2
QDALFAYTKR

SEQ ID NO: 7474 - protein, 10 aa, Severe acute respiratory syndrome coronavirus 2
ALFAYTKRNV

SEQ ID NO: 7475 - protein, 10 aa, Severe acute respiratory syndrome coronavirus 2
LFAYTKRNVI

SEQ ID NO: 7476 - protein, 10 aa, Severe acute respiratory syndrome coronavirus 2
AYTKRNVIPT

SEQ ID NO: 7477 - protein, 10 aa, Severe acute respiratory syndrome coronavirus 2
YTKRNVIPTI

SEQ ID NO: 7478 - protein, 10 aa, Severe acute respiratory syndrome coronavirus 2
RNVIPTITQM

SEQ ID NO: 7479 - protein, 10 aa, Severe acute respiratory syndrome coronavirus 2
VIPTITQMNL

SEQ ID NO: 7480 - protein, 10 aa, Severe acute respiratory syndrome coronavirus 2
IPTITQMNLK

SEQ ID NO: 7481 - protein, 10 aa, Severe acute respiratory syndrome coronavirus 2
ITQMNLKYAI

SEQ ID NO: 7482 - protein, 10 aa, Severe acute respiratory syndrome coronavirus 2
QMNLKYAISA

SEQ ID NO: 7483 - protein, 10 aa, Severe acute respiratory syndrome coronavirus 2
MNLKYAISAK

SEQ ID NO: 7484 - protein, 10 aa, Severe acute respiratory syndrome coronavirus 2
LKYAISAKNR

SEQ ID NO: 7485 - protein, 10 aa, Severe acute respiratory syndrome coronavirus 2
YAISAKNRAR

SEQ ID NO: 7486 - protein, 10 aa, Severe acute respiratory syndrome coronavirus 2
SAKNRARTVA

SEQ ID NO: 7487 - protein, 10 aa, Severe acute respiratory syndrome coronavirus 2
KNRARTVAGV

SEQ ID NO: 7488 - protein, 10 aa, Severe acute respiratory syndrome coronavirus 2
RARTVAGVSI

SEQ ID NO: 7489 - protein, 10 aa, Severe acute respiratory syndrome coronavirus 2
TVAGVSICST

SEQ ID NO: 7490 - protein, 10 aa, Severe acute respiratory syndrome coronavirus 2
VAGVSICSTM

SEQ ID NO: 7491 - protein, 10 aa, Severe acute respiratory syndrome coronavirus 2
VSICSTMTNR

SEQ ID NO: 7492 - protein, 10 aa, Severe acute respiratory syndrome coronavirus 2
ICSTMTNRQF

SEQ ID NO: 7493 - protein, 10 aa, Severe acute respiratory syndrome coronavirus 2
TMTNRQFHQK

SEQ ID NO: 7494 - protein, 10 aa, Severe acute respiratory syndrome coronavirus 2
MTNRQFHQKL

SEQ ID NO: 7495 - protein, 10 aa, Severe acute respiratory syndrome coronavirus 2
NRQFHQKLLK

SEQ ID NO: 7496 - protein, 10 aa, Severe acute respiratory syndrome coronavirus 2
FHQKLLKSIA

SEQ ID NO: 7497 - protein, 10 aa, Severe acute respiratory syndrome coronavirus 2
KLLKSIAATR

SEQ ID NO: 7498 - protein, 10 aa, Severe acute respiratory syndrome coronavirus 2
SIAATRGATV

SEQ ID NO: 7499 - protein, 10 aa, Severe acute respiratory syndrome coronavirus 2
AATRGATVVI

SEQ ID NO: 7500 - protein, 10 aa, Severe acute respiratory syndrome coronavirus 2
ATRGATVVIG

SEQ ID NO: 7501 - protein, 10 aa, Severe acute respiratory syndrome coronavirus 2
GATVVIGTSK

SEQ ID NO: 7502 - protein, 10 aa, Severe acute respiratory syndrome coronavirus 2
ATVVIGTSKF

SEQ ID NO: 7503 - protein, 10 aa, Severe acute respiratory syndrome coronavirus 2
TVVIGTSKFY

SEQ ID NO: 7504 - protein, 10 aa, Severe acute respiratory syndrome coronavirus 2
IGTSKFYGGW

SEQ ID NO: 7505 - protein, 10 aa, Severe acute respiratory syndrome coronavirus 2
SKFYGGWHNM

SEQ ID NO: 7506 - protein, 10 aa, Severe acute respiratory syndrome coronavirus 2
KFYGGWHNML

SEQ ID NO: 7507 - protein, 10 aa, Severe acute respiratory syndrome coronavirus 2
FYGGWHNMLK

SEQ ID NO: 7508 - protein, 10 aa, Severe acute respiratory syndrome coronavirus 2
GWHNMLKTVY

SEQ ID NO: 7509 - protein, 10 aa, Severe acute respiratory syndrome coronavirus 2
NMLKTVYSDV

SEQ ID NO: 7510 - protein, 10 aa, Severe acute respiratory syndrome coronavirus 2
VYSDVENPHL

SEQ ID NO: 7511 - protein, 10 aa, Severe acute respiratory syndrome coronavirus 2
YSDVENPHLM

SEQ ID NO: 7512 - protein, 10 aa, Severe acute respiratory syndrome coronavirus 2
DVENPHLMGW

SEQ ID NO: 7513 - protein, 10 aa, Severe acute respiratory syndrome coronavirus 2
PHLMGWDYPK

SEQ ID NO: 7514 - protein, 10 aa, Severe acute respiratory syndrome coronavirus 2
HLMGWDYPKC

SEQ ID NO: 7515 - protein, 10 aa, Severe acute respiratory syndrome coronavirus 2
MGWDYPKCDR

SEQ ID NO: 7516 - protein, 10 aa, Severe acute respiratory syndrome coronavirus 2
WDYPKCDRAM

SEQ ID NO: 7517 - protein, 10 aa, Severe acute respiratory syndrome coronavirus 2
CDRAMPNMLR

SEQ ID NO: 7518 - protein, 10 aa, Severe acute respiratory syndrome coronavirus 2
RAMPNMLRIM

SEQ ID NO: 7519 - protein, 10 aa, Severe acute respiratory syndrome coronavirus 2
AMPNMLRIMA

SEQ ID NO: 7520 - protein, 10 aa, Severe acute respiratory syndrome coronavirus 2
MPNMLRIMAS

SEQ ID NO: 7521 - protein, 10 aa, Severe acute respiratory syndrome coronavirus 2
NMLRIMASLV

SEQ ID NO: 7522 - protein, 10 aa, Severe acute respiratory syndrome coronavirus 2
MLRIMASLVL

SEQ ID NO: 7523 - protein, 10 aa, Severe acute respiratory syndrome coronavirus 2
LRIMASLVLA

SEQ ID NO: 7524 - protein, 10 aa, Severe acute respiratory syndrome coronavirus 2
RIMASLVLAR

SEQ ID NO: 7525 - protein, 10 aa, Severe acute respiratory syndrome coronavirus 2
IMASLVLARK

SEQ ID NO: 7526 - protein, 10 aa, Severe acute respiratory syndrome coronavirus 2
MASLVLARKH

SEQ ID NO: 7527 - protein, 10 aa, Severe acute respiratory syndrome coronavirus 2
ARKHTTCCSL

SEQ ID NO: 7528 - protein, 10 aa, Severe acute respiratory syndrome coronavirus 2
HTTCCSLSHR

SEQ ID NO: 7529 - protein, 10 aa, Severe acute respiratory syndrome coronavirus 2
TTCCSLSHRF

SEQ ID NO: 7530 - protein, 10 aa, Severe acute respiratory syndrome coronavirus 2
CCSLSHRFYR

SEQ ID NO: 7531 - protein, 10 aa, Severe acute respiratory syndrome coronavirus 2
CSLSHRFYRL

SEQ ID NO: 7532 - protein, 10 aa, Severe acute respiratory syndrome coronavirus 2
SLSHRFYRLA

SEQ ID NO: 7533 - protein, 10 aa, Severe acute respiratory syndrome coronavirus 2
RFYRLANECA

SEQ ID NO: 7534 - protein, 10 aa, Severe acute respiratory syndrome coronavirus 2
YRLANECAQV

SEQ ID NO: 7535 - protein, 10 aa, Severe acute respiratory syndrome coronavirus 2
RLANECAQVL

SEQ ID NO: 7536 - protein, 10 aa, Severe acute respiratory syndrome coronavirus 2
NECAQVLSEM

SEQ ID NO: 7537 - protein, 10 aa, Severe acute respiratory syndrome coronavirus 2
ECAQVLSEMV

SEQ ID NO: 7538 - protein, 10 aa, Severe acute respiratory syndrome coronavirus 2
CAQVLSEMVM

SEQ ID NO: 7539 - protein, 10 aa, Severe acute respiratory syndrome coronavirus 2
SEMVMCGGSL

SEQ ID NO: 7540 - protein, 10 aa, Severe acute respiratory syndrome coronavirus 2
EMVMCGGSLY

SEQ ID NO: 7541 - protein, 10 aa, Severe acute respiratory syndrome coronavirus 2
MVMCGGSLYV

SEQ ID NO: 7542 - protein, 10 aa, Severe acute respiratory syndrome coronavirus 2
VMCGGSLYVK

SEQ ID NO: 7543 - protein, 10 aa, Severe acute respiratory syndrome coronavirus 2
TSSGDATTAY

SEQ ID NO: 7544 - protein, 10 aa, Severe acute respiratory syndrome coronavirus 2
DATTAYANSV

SEQ ID NO: 7545 - protein, 10 aa, Severe acute respiratory syndrome coronavirus 2
ATTAYANSVF

SEQ ID NO: 7546 - protein, 10 aa, Severe acute respiratory syndrome coronavirus 2
TAYANSVFNI

SEQ ID NO: 7547 - protein, 10 aa, Severe acute respiratory syndrome coronavirus 2
NSVFNICQAV

SEQ ID NO: 7548 - protein, 10 aa, Severe acute respiratory syndrome coronavirus 2
SVFNICQAVT

SEQ ID NO: 7549 - protein, 10 aa, Severe acute respiratory syndrome coronavirus 2
NICQAVTANV

SEQ ID NO: 7550 - protein, 10 aa, Severe acute respiratory syndrome coronavirus 2
AVTANVNALL

SEQ ID NO: 7551 - protein, 10 aa, Severe acute respiratory syndrome coronavirus 2
NALLSTDGNK

SEQ ID NO: 7552 - protein, 10 aa, Severe acute respiratory syndrome coronavirus 2
STDGNKIADK

SEQ ID NO: 7553 - protein, 10 aa, Severe acute respiratory syndrome coronavirus 2
KIADKYVRNL

SEQ ID NO: 7554 - protein, 10 aa, Severe acute respiratory syndrome coronavirus 2
DKYVRNLQHR

SEQ ID NO: 7555 - protein, 10 aa, Severe acute respiratory syndrome coronavirus 2
KYVRNLQHRL

SEQ ID NO: 7556 - protein, 10 aa, Severe acute respiratory syndrome coronavirus 2
YVRNLQHRLY

SEQ ID NO: 7557 - protein, 10 aa, Severe acute respiratory syndrome coronavirus 2
NLQHRLYECL

SEQ ID NO: 7558 - protein, 10 aa, Severe acute respiratory syndrome coronavirus 2
LQHRLYECLY

SEQ ID NO: 7559 - protein, 10 aa, Severe acute respiratory syndrome coronavirus 2
QHRLYECLYR

SEQ ID NO: 7560 - protein, 10 aa, Severe acute respiratory syndrome coronavirus 2
RLYECLYRNR

SEQ ID NO: 7561 - protein, 10 aa, Severe acute respiratory syndrome coronavirus 2
YRNRDVDTDF

SEQ ID NO: 7562 - protein, 10 aa, Severe acute respiratory syndrome coronavirus 2
DVDTDFVNEF

SEQ ID NO: 7563 - protein, 10 aa, Severe acute respiratory syndrome coronavirus 2
VDTDFVNEFY

SEQ ID NO: 7564 - protein, 10 aa, Severe acute respiratory syndrome coronavirus 2
DTDFVNEFYA

SEQ ID NO: 7565 - protein, 10 aa, Severe acute respiratory syndrome coronavirus 2
TDFVNEFYAY

SEQ ID NO: 7566 - protein, 10 aa, Severe acute respiratory syndrome coronavirus 2
DFVNEFYAYL

SEQ ID NO: 7567 - protein, 10 aa, Severe acute respiratory syndrome coronavirus 2
FVNEFYAYLR

SEQ ID NO: 7568 - protein, 10 aa, Severe acute respiratory syndrome coronavirus 2
YAYLRKHFSM

SEQ ID NO: 7569 - protein, 10 aa, Severe acute respiratory syndrome coronavirus 2
AYLRKHFSMM

SEQ ID NO: 7570 - protein, 10 aa, Severe acute respiratory syndrome coronavirus 2
YLRKHFSMMI

SEQ ID NO: 7571 - protein, 10 aa, Severe acute respiratory syndrome coronavirus 2
LRKHFSMMIL

SEQ ID NO: 7572 - protein, 10 aa, Severe acute respiratory syndrome coronavirus 2
FSMMILSDDA

SEQ ID NO: 7573 - protein, 10 aa, Severe acute respiratory syndrome coronavirus 2
SMMILSDDAV

SEQ ID NO: 7574 - protein, 10 aa, Severe acute respiratory syndrome coronavirus 2
MMILSDDAVV

SEQ ID NO: 7575 - protein, 10 aa, Severe acute respiratory syndrome coronavirus 2
ILSDDAVVCF

SEQ ID NO: 7576 - protein, 10 aa, Severe acute respiratory syndrome coronavirus 2
DAVVCFNSTY

SEQ ID NO: 7577 - protein, 10 aa, Severe acute respiratory syndrome coronavirus 2
AVVCFNSTYA

SEQ ID NO: 7578 - protein, 10 aa, Severe acute respiratory syndrome coronavirus 2
NSTYASQGLV

SEQ ID NO: 7579 - protein, 10 aa, Severe acute respiratory syndrome coronavirus 2
STYASQGLVA

SEQ ID NO: 7580 - protein, 10 aa, Severe acute respiratory syndrome coronavirus 2
YASQGLVASI

SEQ ID NO: 7581 - protein, 10 aa, Severe acute respiratory syndrome coronavirus 2
ASQGLVASIK

SEQ ID NO: 7582 - protein, 10 aa, Severe acute respiratory syndrome coronavirus 2
GLVASIKNFK

SEQ ID NO: 7583 - protein, 10 aa, Severe acute respiratory syndrome coronavirus 2
LVASIKNFKS

SEQ ID NO: 7584 - protein, 10 aa, Severe acute respiratory syndrome coronavirus 2
ASIKNFKSVL

SEQ ID NO: 7585 - protein, 10 aa, Severe acute respiratory syndrome coronavirus 2
SIKNFKSVLY

SEQ ID NO: 7586 - protein, 10 aa, Severe acute respiratory syndrome coronavirus 2
IKNFKSVLYY

SEQ ID NO: 7587 - protein, 10 aa, Severe acute respiratory syndrome coronavirus 2
SVLYYQNNVF

SEQ ID NO: 7588 - protein, 10 aa, Severe acute respiratory syndrome coronavirus 2
VLYYQNNVFM

SEQ ID NO: 7589 - protein, 10 aa, Severe acute respiratory syndrome coronavirus 2
YQNNVFMSEA

SEQ ID NO: 7590 - protein, 10 aa, Severe acute respiratory syndrome coronavirus 2
NVFMSEAKCW

SEQ ID NO: 7591 - protein, 10 aa, Severe acute respiratory syndrome coronavirus 2
FMSEAKCWTE

SEQ ID NO: 7592 - protein, 10 aa, Severe acute respiratory syndrome coronavirus 2
PHEFCSQHTM

SEQ ID NO: 7593 - protein, 10 aa, Severe acute respiratory syndrome coronavirus 2
HEFCSQHTML

SEQ ID NO: 7594 - protein, 10 aa, Severe acute respiratory syndrome coronavirus 2
FCSQHTMLVK

SEQ ID NO: 7595 - protein, 10 aa, Severe acute respiratory syndrome coronavirus 2
MLVKQGDDYV

SEQ ID NO: 7596 - protein, 10 aa, Severe acute respiratory syndrome coronavirus 2
LVKQGDDYVY

SEQ ID NO: 7597 - protein, 10 aa, Severe acute respiratory syndrome coronavirus 2
QGDDYVYLPY

SEQ ID NO: 7598 - protein, 10 aa, Severe acute respiratory syndrome coronavirus 2
VYLPYPDPSR

SEQ ID NO: 7599 - protein, 10 aa, Severe acute respiratory syndrome coronavirus 2
YLPYPDPSRI

SEQ ID NO: 7600 - protein, 10 aa, Severe acute respiratory syndrome coronavirus 2
LPYPDPSRIL

SEQ ID NO: 7601 - protein, 10 aa, Severe acute respiratory syndrome coronavirus 2
YPDPSRILGA

SEQ ID NO: 7602 - protein, 10 aa, Severe acute respiratory syndrome coronavirus 2
SRILGAGCFV

SEQ ID NO: 7603 - protein, 10 aa, Severe acute respiratory syndrome coronavirus 2
KTDGTLMIER

SEQ ID NO: 7604 - protein, 10 aa, Severe acute respiratory syndrome coronavirus 2
TLMIERFVSL

SEQ ID NO: 7605 - protein, 10 aa, Severe acute respiratory syndrome coronavirus 2
LMIERFVSLA

SEQ ID NO: 7606 - protein, 10 aa, Severe acute respiratory syndrome coronavirus 2
MIERFVSLAI

SEQ ID NO: 7607 - protein, 10 aa, Severe acute respiratory syndrome coronavirus 2
ERFVSLAIDA

SEQ ID NO: 7608 - protein, 10 aa, Severe acute respiratory syndrome coronavirus 2
RFVSLAIDAY

SEQ ID NO: 7609 - protein, 10 aa, Severe acute respiratory syndrome coronavirus 2
VSLAIDAYPL

SEQ ID NO: 7610 - protein, 10 aa, Severe acute respiratory syndrome coronavirus 2
SLAIDAYPLT

SEQ ID NO: 7611 - protein, 10 aa, Severe acute respiratory syndrome coronavirus 2
LAIDAYPLTK

SEQ ID NO: 7612 - protein, 10 aa, Severe acute respiratory syndrome coronavirus 2
LTKHPNQEYA

SEQ ID NO: 7613 - protein, 10 aa, Severe acute respiratory syndrome coronavirus 2
HPNQEYADVF

SEQ ID NO: 7614 - protein, 10 aa, Severe acute respiratory syndrome coronavirus 2
NQEYADVFHL

SEQ ID NO: 7615 - protein, 10 aa, Severe acute respiratory syndrome coronavirus 2
QEYADVFHLY

SEQ ID NO: 7616 - protein, 10 aa, Severe acute respiratory syndrome coronavirus 2
EYADVFHLYL

SEQ ID NO: 7617 - protein, 10 aa, Severe acute respiratory syndrome coronavirus 2
YADVFHLYLQ

SEQ ID NO: 7618 - protein, 10 aa, Severe acute respiratory syndrome coronavirus 2
ADVFHLYLQY

SEQ ID NO: 7619 - protein, 10 aa, Severe acute respiratory syndrome coronavirus 2
DVFHLYLQYI

SEQ ID NO: 7620 - protein, 10 aa, Severe acute respiratory syndrome coronavirus 2
VFHLYLQYIR

SEQ ID NO: 7621 - protein, 10 aa, Severe acute respiratory syndrome coronavirus 2
FHLYLQYIRK

SEQ ID NO: 7622 - protein, 10 aa, Severe acute respiratory syndrome coronavirus 2
HLYLQYIRKL

SEQ ID NO: 7623 - protein, 10 aa, Severe acute respiratory syndrome coronavirus 2
QYIRKLHDEL

SEQ ID NO: 7624 - protein, 10 aa, Severe acute respiratory syndrome coronavirus 2
KLHDELTGHM

SEQ ID NO: 7625 - protein, 10 aa, Severe acute respiratory syndrome coronavirus 2
LHDELTGHML

SEQ ID NO: 7626 - protein, 10 aa, Severe acute respiratory syndrome coronavirus 2
DELTGHMLDM

SEQ ID NO: 7627 - protein, 10 aa, Severe acute respiratory syndrome coronavirus 2
ELTGHMLDMY

SEQ ID NO: 7628 - protein, 10 aa, Severe acute respiratory syndrome coronavirus 2
TGHMLDMYSV

SEQ ID NO: 7629 - protein, 10 aa, Severe acute respiratory syndrome coronavirus 2
GHMLDMYSVM

SEQ ID NO: 7630 - protein, 10 aa, Severe acute respiratory syndrome coronavirus 2
HMLDMYSVML

SEQ ID NO: 7631 - protein, 10 aa, Severe acute respiratory syndrome coronavirus 2
MLDMYSVMLT

SEQ ID NO: 7632 - protein, 10 aa, Severe acute respiratory syndrome coronavirus 2
VMLTNDNTSR

SEQ ID NO: 7633 - protein, 10 aa, Severe acute respiratory syndrome coronavirus 2
MLTNDNTSRY

SEQ ID NO: 7634 - protein, 10 aa, Severe acute respiratory syndrome coronavirus 2
LTNDNTSRYW

SEQ ID NO: 7635 - protein, 10 aa, Severe acute respiratory syndrome coronavirus 2
TSRYWEPEFY

SEQ ID NO: 7636 - protein, 10 aa, Severe acute respiratory syndrome coronavirus 2
RYWEPEFYEA

SEQ ID NO: 7637 - protein, 10 aa, Severe acute respiratory syndrome coronavirus 2
YWEPEFYEAM

SEQ ID NO: 7638 - protein, 10 aa, Severe acute respiratory syndrome coronavirus 2
WEPEFYEAMY

SEQ ID NO: 7639 - protein, 10 aa, Severe acute respiratory syndrome coronavirus 2
YEAMYTPHTV

SEQ ID NO: 7640 - protein, 10 aa, Severe acute respiratory syndrome coronavirus 2
EAMYTPHTVL

SEQ ID NO: 7641 - protein, 10 aa, Severe acute respiratory syndrome coronavirus 2
YTPHTVLQAV

SEQ ID NO: 7642 - protein, 10 aa, Severe acute respiratory syndrome coronavirus 2
TVLQAVGACV

SEQ ID NO: 7643 - protein, 10 aa, Severe acute respiratory syndrome coronavirus 2
VLQAVGACVL

SEQ ID NO: 7644 - protein, 10 aa, Severe acute respiratory syndrome coronavirus 2
VLCNSQTSLR

SEQ ID NO: 7645 - protein, 10 aa, Severe acute respiratory syndrome coronavirus 2
TSLRCGACIR

SEQ ID NO: 7646 - protein, 10 aa, Severe acute respiratory syndrome coronavirus 2
SLRCGACIRR

SEQ ID NO: 7647 - protein, 10 aa, Severe acute respiratory syndrome coronavirus 2
CIRRPFLCCK

SEQ ID NO: 7648 - protein, 10 aa, Severe acute respiratory syndrome coronavirus 2
RPFLCCKCCY

SEQ ID NO: 7649 - protein, 10 aa, Severe acute respiratory syndrome coronavirus 2
HVISTSHKLV

SEQ ID NO: 7650 - protein, 10 aa, Severe acute respiratory syndrome coronavirus 2
STSHKLVLSV

SEQ ID NO: 7651 - protein, 10 aa, Severe acute respiratory syndrome coronavirus 2
HKLVLSVNPY

SEQ ID NO: 7652 - protein, 10 aa, Severe acute respiratory syndrome coronavirus 2
KLVLSVNPYV

SEQ ID NO: 7653 - protein, 10 aa, Severe acute respiratory syndrome coronavirus 2
LSVNPYVCNA

SEQ ID NO: 7654 - protein, 10 aa, Severe acute respiratory syndrome coronavirus 2
CDVTDVTQLY

SEQ ID NO: 7655 - protein, 10 aa, Severe acute respiratory syndrome coronavirus 2
DVTDVTQLYL

SEQ ID NO: 7656 - protein, 10 aa, Severe acute respiratory syndrome coronavirus 2
TQLYLGGMSY

SEQ ID NO: 7657 - protein, 10 aa, Severe acute respiratory syndrome coronavirus 2
QLYLGGMSYY

SEQ ID NO: 7658 - protein, 10 aa, Severe acute respiratory syndrome coronavirus 2
YLGGMSYYCK

SEQ ID NO: 7659 - protein, 10 aa, Severe acute respiratory syndrome coronavirus 2
GMSYYCKSHK

SEQ ID NO: 7660 - protein, 10 aa, Severe acute respiratory syndrome coronavirus 2
YYCKSHKPPI

SEQ ID NO: 7661 - protein, 10 aa, Severe acute respiratory syndrome coronavirus 2
CKSHKPPISF

SEQ ID NO: 7662 - protein, 10 aa, Severe acute respiratory syndrome coronavirus 2
KSHKPPISFP

SEQ ID NO: 7663 - protein, 10 aa, Severe acute respiratory syndrome coronavirus 2
SHKPPISFPL

SEQ ID NO: 7664 - protein, 10 aa, Severe acute respiratory syndrome coronavirus 2
FPLCANGQVF

SEQ ID NO: 7665 - protein, 10 aa, Severe acute respiratory syndrome coronavirus 2
CANGQVFGLY

SEQ ID NO: 7666 - protein, 10 aa, Severe acute respiratory syndrome coronavirus 2
ANGQVFGLYK

SEQ ID NO: 7667 - protein, 10 aa, Severe acute respiratory syndrome coronavirus 2
WTNAGDYILA

SEQ ID NO: 7668 - protein, 10 aa, Severe acute respiratory syndrome coronavirus 2
YILANTCTER

SEQ ID NO: 7669 - protein, 10 aa, Severe acute respiratory syndrome coronavirus 2
ILANTCTERL

SEQ ID NO: 7670 - protein, 10 aa, Severe acute respiratory syndrome coronavirus 2
LANTCTERLK

SEQ ID NO: 7671 - protein, 10 aa, Severe acute respiratory syndrome coronavirus 2
CTERLKLFAA

SEQ ID NO: 7672 - protein, 10 aa, Severe acute respiratory syndrome coronavirus 2
RLKLFAAETL

SEQ ID NO: 7673 - protein, 10 aa, Severe acute respiratory syndrome coronavirus 2
LKLFAAETLK

SEQ ID NO: 7674 - protein, 10 aa, Severe acute respiratory syndrome coronavirus 2
KLFAAETLKA

SEQ ID NO: 7675 - protein, 10 aa, Severe acute respiratory syndrome coronavirus 2
TLKATEETFK

SEQ ID NO: 7676 - protein, 10 aa, Severe acute respiratory syndrome coronavirus 2
ATEETFKLSY

SEQ ID NO: 7677 - protein, 10 aa, Severe acute respiratory syndrome coronavirus 2
EETFKLSYGI

SEQ ID NO: 7678 - protein, 10 aa, Severe acute respiratory syndrome coronavirus 2
ETFKLSYGIA

SEQ ID NO: 7679 - protein, 10 aa, Severe acute respiratory syndrome coronavirus 2
FKLSYGIATV

SEQ ID NO: 7680 - protein, 10 aa, Severe acute respiratory syndrome coronavirus 2
KLSYGIATVR

SEQ ID NO: 7681 - protein, 10 aa, Severe acute respiratory syndrome coronavirus 2
SYGIATVREV

SEQ ID NO: 7682 - protein, 10 aa, Severe acute respiratory syndrome coronavirus 2
YGIATVREVL

SEQ ID NO: 7683 - protein, 10 aa, Severe acute respiratory syndrome coronavirus 2
ATVREVLSDR

SEQ ID NO: 7684 - protein, 10 aa, Severe acute respiratory syndrome coronavirus 2
LSDRELHLSW

SEQ ID NO: 7685 - protein, 10 aa, Severe acute respiratory syndrome coronavirus 2
DRELHLSWEV

SEQ ID NO: 7686 - protein, 10 aa, Severe acute respiratory syndrome coronavirus 2
RELHLSWEVG

SEQ ID NO: 7687 - protein, 10 aa, Severe acute respiratory syndrome coronavirus 2
ELHLSWEVGK

SEQ ID NO: 7688 - protein, 10 aa, Severe acute respiratory syndrome coronavirus 2
HLSWEVGKPR

SEQ ID NO: 7689 - protein, 10 aa, Severe acute respiratory syndrome coronavirus 2
WEVGKPRPPL

SEQ ID NO: 7690 - protein, 10 aa, Severe acute respiratory syndrome coronavirus 2
RPPLNRNYVF

SEQ ID NO: 7691 - protein, 10 aa, Severe acute respiratory syndrome coronavirus 2
LNRNYVFTGY

SEQ ID NO: 7692 - protein, 10 aa, Severe acute respiratory syndrome coronavirus 2
NRNYVFTGYR

SEQ ID NO: 7693 - protein, 10 aa, Severe acute respiratory syndrome coronavirus 2
RNYVFTGYRV

SEQ ID NO: 7694 - protein, 10 aa, Severe acute respiratory syndrome coronavirus 2
YVFTGYRVTK

SEQ ID NO: 7695 - protein, 10 aa, Severe acute respiratory syndrome coronavirus 2
TGYRVTKNSK

SEQ ID NO: 7696 - protein, 10 aa, Severe acute respiratory syndrome coronavirus 2
RVTKNSKVQI

SEQ ID NO: 7697 - protein, 10 aa, Severe acute respiratory syndrome coronavirus 2
KNSKVQIGEY

SEQ ID NO: 7698 - protein, 10 aa, Severe acute respiratory syndrome coronavirus 2
SKVQIGEYTF

SEQ ID NO: 7699 - protein, 10 aa, Severe acute respiratory syndrome coronavirus 2
VQIGEYTFEK

SEQ ID NO: 7700 - protein, 10 aa, Severe acute respiratory syndrome coronavirus 2
GEYTFEKGDY

SEQ ID NO: 7701 - protein, 10 aa, Severe acute respiratory syndrome coronavirus 2
KGDYGDAVVY

SEQ ID NO: 7702 - protein, 10 aa, Severe acute respiratory syndrome coronavirus 2
GDYGDAVVYR

SEQ ID NO: 7703 - protein, 10 aa, Severe acute respiratory syndrome coronavirus 2
AVVYRGTTTY

SEQ ID NO: 7704 - protein, 10 aa, Severe acute respiratory syndrome coronavirus 2
VVYRGTTTYK

SEQ ID NO: 7705 - protein, 10 aa, Severe acute respiratory syndrome coronavirus 2
VYRGTTTYKL

SEQ ID NO: 7706 - protein, 10 aa, Severe acute respiratory syndrome coronavirus 2
TTYKLNVGDY

SEQ ID NO: 7707 - protein, 10 aa, Severe acute respiratory syndrome coronavirus 2
TYKLNVGDYF

SEQ ID NO: 7708 - protein, 10 aa, Severe acute respiratory syndrome coronavirus 2
YKLNVGDYFV

SEQ ID NO: 7709 - protein, 10 aa, Severe acute respiratory syndrome coronavirus 2
KLNVGDYFVL

SEQ ID NO: 7710 - protein, 10 aa, Severe acute respiratory syndrome coronavirus 2
YFVLTSHTVM

SEQ ID NO: 7711 - protein, 10 aa, Severe acute respiratory syndrome coronavirus 2
VLTSHTVMPL

SEQ ID NO: 7712 - protein, 10 aa, Severe acute respiratory syndrome coronavirus 2
TSHTVMPLSA

SEQ ID NO: 7713 - protein, 10 aa, Severe acute respiratory syndrome coronavirus 2
HTVMPLSAPT

SEQ ID NO: 7714 - protein, 10 aa, Severe acute respiratory syndrome coronavirus 2
TVMPLSAPTL

SEQ ID NO: 7715 - protein, 10 aa, Severe acute respiratory syndrome coronavirus 2
VMPLSAPTLV

SEQ ID NO: 7716 - protein, 10 aa, Severe acute respiratory syndrome coronavirus 2
MPLSAPTLVP

SEQ ID NO: 7717 - protein, 10 aa, Severe acute respiratory syndrome coronavirus 2
PTLVPQEHYV

SEQ ID NO: 7718 - protein, 10 aa, Severe acute respiratory syndrome coronavirus 2
TLVPQEHYVR

SEQ ID NO: 7719 - protein, 10 aa, Severe acute respiratory syndrome coronavirus 2
QEHYVRITGL

SEQ ID NO: 7720 - protein, 10 aa, Severe acute respiratory syndrome coronavirus 2
EHYVRITGLY

SEQ ID NO: 7721 - protein, 10 aa, Severe acute respiratory syndrome coronavirus 2
HYVRITGLYP

SEQ ID NO: 7722 - protein, 10 aa, Severe acute respiratory syndrome coronavirus 2
YVRITGLYPT

SEQ ID NO: 7723 - protein, 10 aa, Severe acute respiratory syndrome coronavirus 2
VRITGLYPTL

SEQ ID NO: 7724 - protein, 10 aa, Severe acute respiratory syndrome coronavirus 2
ITGLYPTLNI

SEQ ID NO: 7725 - protein, 10 aa, Severe acute respiratory syndrome coronavirus 2
YPTLNISDEF

SEQ ID NO: 7726 - protein, 10 aa, Severe acute respiratory syndrome coronavirus 2
NISDEFSSNV

SEQ ID NO: 7727 - protein, 10 aa, Severe acute respiratory syndrome coronavirus 2
DEFSSNVANY

SEQ ID NO: 7728 - protein, 10 aa, Severe acute respiratory syndrome coronavirus 2
FSSNVANYQK

SEQ ID NO: 7729 - protein, 10 aa, Severe acute respiratory syndrome coronavirus 2
ANYQKVGMQK

SEQ ID NO: 7730 - protein, 10 aa, Severe acute respiratory syndrome coronavirus 2
NYQKVGMQKY

SEQ ID NO: 7731 - protein, 10 aa, Severe acute respiratory syndrome coronavirus 2
KVGMQKYSTL

SEQ ID NO: 7732 - protein, 10 aa, Severe acute respiratory syndrome coronavirus 2
TLQGPPGTGK

SEQ ID NO: 7733 - protein, 10 aa, Severe acute respiratory syndrome coronavirus 2
KSHFAIGLAL

SEQ ID NO: 7734 - protein, 10 aa, Severe acute respiratory syndrome coronavirus 2
SHFAIGLALY

SEQ ID NO: 7735 - protein, 10 aa, Severe acute respiratory syndrome coronavirus 2
HFAIGLALYY

SEQ ID NO: 7736 - protein, 10 aa, Severe acute respiratory syndrome coronavirus 2
FAIGLALYYP

SEQ ID NO: 7737 - protein, 10 aa, Severe acute respiratory syndrome coronavirus 2
IGLALYYPSA

SEQ ID NO: 7738 - protein, 10 aa, Severe acute respiratory syndrome coronavirus 2
GLALYYPSAR

SEQ ID NO: 7739 - protein, 10 aa, Severe acute respiratory syndrome coronavirus 2
LALYYPSARI

SEQ ID NO: 7740 - protein, 10 aa, Severe acute respiratory syndrome coronavirus 2
ALYYPSARIV

SEQ ID NO: 7741 - protein, 10 aa, Severe acute respiratory syndrome coronavirus 2
LYYPSARIVY

SEQ ID NO: 7742 - protein, 10 aa, Severe acute respiratory syndrome coronavirus 2
YYPSARIVYT

SEQ ID NO: 7743 - protein, 10 aa, Severe acute respiratory syndrome coronavirus 2
YPSARIVYTA

SEQ ID NO: 7744 - protein, 10 aa, Severe acute respiratory syndrome coronavirus 2
RIVYTACSHA

SEQ ID NO: 7745 - protein, 10 aa, Severe acute respiratory syndrome coronavirus 2
IVYTACSHAA

SEQ ID NO: 7746 - protein, 10 aa, Severe acute respiratory syndrome coronavirus 2
VYTACSHAAV

SEQ ID NO: 7747 - protein, 10 aa, Severe acute respiratory syndrome coronavirus 2
YTACSHAAVD

SEQ ID NO: 7748 - protein, 10 aa, Severe acute respiratory syndrome coronavirus 2
HAAVDALCEK

SEQ ID NO: 7749 - protein, 10 aa, Severe acute respiratory syndrome coronavirus 2
ALCEKALKYL

SEQ ID NO: 7750 - protein, 10 aa, Severe acute respiratory syndrome coronavirus 2
CEKALKYLPI

SEQ ID NO: 7751 - protein, 10 aa, Severe acute respiratory syndrome coronavirus 2
KALKYLPIDK

SEQ ID NO: 7752 - protein, 10 aa, Severe acute respiratory syndrome coronavirus 2
KYLPIDKCSR

SEQ ID NO: 7753 - protein, 10 aa, Severe acute respiratory syndrome coronavirus 2
YLPIDKCSRI

SEQ ID NO: 7754 - protein, 10 aa, Severe acute respiratory syndrome coronavirus 2
LPIDKCSRII

SEQ ID NO: 7755 - protein, 10 aa, Severe acute respiratory syndrome coronavirus 2
KCSRIIPARA

SEQ ID NO: 7756 - protein, 10 aa, Severe acute respiratory syndrome coronavirus 2
CSRIIPARAR

SEQ ID NO: 7757 - protein, 10 aa, Severe acute respiratory syndrome coronavirus 2
SRIIPARARV

SEQ ID NO: 7758 - protein, 10 aa, Severe acute respiratory syndrome coronavirus 2
IPARARVECF

SEQ ID NO: 7759 - protein, 10 aa, Severe acute respiratory syndrome coronavirus 2
ARARVECFDK

SEQ ID NO: 7760 - protein, 10 aa, Severe acute respiratory syndrome coronavirus 2
RARVECFDKF

SEQ ID NO: 7761 - protein, 10 aa, Severe acute respiratory syndrome coronavirus 2
ARVECFDKFK

SEQ ID NO: 7762 - protein, 10 aa, Severe acute respiratory syndrome coronavirus 2
FDKFKVNSTL

SEQ ID NO: 7763 - protein, 10 aa, Severe acute respiratory syndrome coronavirus 2
FKVNSTLEQY

SEQ ID NO: 7764 - protein, 10 aa, Severe acute respiratory syndrome coronavirus 2
KVNSTLEQYV

SEQ ID NO: 7765 - protein, 10 aa, Severe acute respiratory syndrome coronavirus 2
VNSTLEQYVF

SEQ ID NO: 7766 - protein, 10 aa, Severe acute respiratory syndrome coronavirus 2
TLEQYVFCTV

SEQ ID NO: 7767 - protein, 10 aa, Severe acute respiratory syndrome coronavirus 2
QYVFCTVNAL

SEQ ID NO: 7768 - protein, 10 aa, Severe acute respiratory syndrome coronavirus 2
YVFCTVNALP

SEQ ID NO: 7769 - protein, 10 aa, Severe acute respiratory syndrome coronavirus 2
FCTVNALPET

SEQ ID NO: 7770 - protein, 10 aa, Severe acute respiratory syndrome coronavirus 2
ALPETTADIV

SEQ ID NO: 7771 - protein, 10 aa, Severe acute respiratory syndrome coronavirus 2
LPETTADIVV

SEQ ID NO: 7772 - protein, 10 aa, Severe acute respiratory syndrome coronavirus 2
TTADIVVFDE

SEQ ID NO: 7773 - protein, 10 aa, Severe acute respiratory syndrome coronavirus 2
IVVFDEISMA

SEQ ID NO: 7774 - protein, 10 aa, Severe acute respiratory syndrome coronavirus 2
VVFDEISMAT

SEQ ID NO: 7775 - protein, 10 aa, Severe acute respiratory syndrome coronavirus 2
FDEISMATNY

SEQ ID NO: 7776 - protein, 10 aa, Severe acute respiratory syndrome coronavirus 2
DEISMATNYD

SEQ ID NO: 7777 - protein, 10 aa, Severe acute respiratory syndrome coronavirus 2
EISMATNYDL

SEQ ID NO: 7778 - protein, 10 aa, Severe acute respiratory syndrome coronavirus 2
SMATNYDLSV

SEQ ID NO: 7779 - protein, 10 aa, Severe acute respiratory syndrome coronavirus 2
MATNYDLSVV

SEQ ID NO: 7780 - protein, 10 aa, Severe acute respiratory syndrome coronavirus 2
NYDLSVVNAR

SEQ ID NO: 7781 - protein, 10 aa, Severe acute respiratory syndrome coronavirus 2
YDLSVVNARL

SEQ ID NO: 7782 - protein, 10 aa, Severe acute respiratory syndrome coronavirus 2
DLSVVNARLR

SEQ ID NO: 7783 - protein, 10 aa, Severe acute respiratory syndrome coronavirus 2
SVVNARLRAK

SEQ ID NO: 7784 - protein, 10 aa, Severe acute respiratory syndrome coronavirus 2
ARLRAKHYVY

SEQ ID NO: 7785 - protein, 10 aa, Severe acute respiratory syndrome coronavirus 2
RLRAKHYVYI

SEQ ID NO: 7786 - protein, 10 aa, Severe acute respiratory syndrome coronavirus 2
YVYIGDPAQL

SEQ ID NO: 7787 - protein, 10 aa, Severe acute respiratory syndrome coronavirus 2
YIGDPAQLPA

SEQ ID NO: 7788 - protein, 10 aa, Severe acute respiratory syndrome coronavirus 2
AQLPAPRTLL

SEQ ID NO: 7789 - protein, 10 aa, Severe acute respiratory syndrome coronavirus 2
LTKGTLEPEY

SEQ ID NO: 7790 - protein, 10 aa, Severe acute respiratory syndrome coronavirus 2
TLEPEYFNSV

SEQ ID NO: 7791 - protein, 10 aa, Severe acute respiratory syndrome coronavirus 2
EYFNSVCRLM

SEQ ID NO: 7792 - protein, 10 aa, Severe acute respiratory syndrome coronavirus 2
YFNSVCRLMK

SEQ ID NO: 7793 - protein, 10 aa, Severe acute respiratory syndrome coronavirus 2
RLMKTIGPDM

SEQ ID NO: 7794 - protein, 10 aa, Severe acute respiratory syndrome coronavirus 2
LMKTIGPDMF

SEQ ID NO: 7795 - protein, 10 aa, Severe acute respiratory syndrome coronavirus 2
MKTIGPDMFL

SEQ ID NO: 7796 - protein, 10 aa, Severe acute respiratory syndrome coronavirus 2
KTIGPDMFLG

SEQ ID NO: 7797 - protein, 10 aa, Severe acute respiratory syndrome coronavirus 2
PDMFLGTCRR

SEQ ID NO: 7798 - protein, 10 aa, Severe acute respiratory syndrome coronavirus 2
FLGTCRRCPA

SEQ ID NO: 7799 - protein, 10 aa, Severe acute respiratory syndrome coronavirus 2
RCPAEIVDTV

SEQ ID NO: 7800 - protein, 10 aa, Severe acute respiratory syndrome coronavirus 2
CPAEIVDTVS

SEQ ID NO: 7801 - protein, 10 aa, Severe acute respiratory syndrome coronavirus 2
PAEIVDTVSA

SEQ ID NO: 7802 - protein, 10 aa, Severe acute respiratory syndrome coronavirus 2
AEIVDTVSAL

SEQ ID NO: 7803 - protein, 10 aa, Severe acute respiratory syndrome coronavirus 2
EIVDTVSALV

SEQ ID NO: 7804 - protein, 10 aa, Severe acute respiratory syndrome coronavirus 2
IVDTVSALVY

SEQ ID NO: 7805 - protein, 10 aa, Severe acute respiratory syndrome coronavirus 2
TVSALVYDNK

SEQ ID NO: 7806 - protein, 10 aa, Severe acute respiratory syndrome coronavirus 2
SALVYDNKLK

SEQ ID NO: 7807 - protein, 10 aa, Severe acute respiratory syndrome coronavirus 2
ALVYDNKLKA

SEQ ID NO: 7808 - protein, 10 aa, Severe acute respiratory syndrome coronavirus 2
VYDNKLKAHK

SEQ ID NO: 7809 - protein, 10 aa, Severe acute respiratory syndrome coronavirus 2
KSAQCFKMFY

SEQ ID NO: 7810 - protein, 10 aa, Severe acute respiratory syndrome coronavirus 2
SAQCFKMFYK

SEQ ID NO: 7811 - protein, 10 aa, Severe acute respiratory syndrome coronavirus 2
AQCFKMFYKG

SEQ ID NO: 7812 - protein, 10 aa, Severe acute respiratory syndrome coronavirus 2
FKMFYKGVIT

SEQ ID NO: 7813 - protein, 10 aa, Severe acute respiratory syndrome coronavirus 2
KMFYKGVITH

SEQ ID NO: 7814 - protein, 10 aa, Severe acute respiratory syndrome coronavirus 2
GVITHDVSSA

SEQ ID NO: 7815 - protein, 10 aa, Severe acute respiratory syndrome coronavirus 2
VITHDVSSAI

SEQ ID NO: 7816 - protein, 10 aa, Severe acute respiratory syndrome coronavirus 2
VSSAINRPQI

SEQ ID NO: 7817 - protein, 10 aa, Severe acute respiratory syndrome coronavirus 2
SAINRPQIGV

SEQ ID NO: 7818 - protein, 10 aa, Severe acute respiratory syndrome coronavirus 2
AINRPQIGVV

SEQ ID NO: 7819 - protein, 10 aa, Severe acute respiratory syndrome coronavirus 2
RPQIGVVREF

SEQ ID NO: 7820 - protein, 10 aa, Severe acute respiratory syndrome coronavirus 2
IGVVREFLTR

SEQ ID NO: 7821 - protein, 10 aa, Severe acute respiratory syndrome coronavirus 2
VREFLTRNPA

SEQ ID NO: 7822 - protein, 10 aa, Severe acute respiratory syndrome coronavirus 2
REFLTRNPAW

SEQ ID NO: 7823 - protein, 10 aa, Severe acute respiratory syndrome coronavirus 2
EFLTRNPAWR

SEQ ID NO: 7824 - protein, 10 aa, Severe acute respiratory syndrome coronavirus 2
FLTRNPAWRK

SEQ ID NO: 7825 - protein, 10 aa, Severe acute respiratory syndrome coronavirus 2
LTRNPAWRKA

SEQ ID NO: 7826 - protein, 10 aa, Severe acute respiratory syndrome coronavirus 2
RNPAWRKAVF

SEQ ID NO: 7827 - protein, 10 aa, Severe acute respiratory syndrome coronavirus 2
NPAWRKAVFI

SEQ ID NO: 7828 - protein, 10 aa, Severe acute respiratory syndrome coronavirus 2
WRKAVFISPY

SEQ ID NO: 7829 - protein, 10 aa, Severe acute respiratory syndrome coronavirus 2
RKAVFISPYN

SEQ ID NO: 7830 - protein, 10 aa, Severe acute respiratory syndrome coronavirus 2
FISPYNSQNA

SEQ ID NO: 7831 - protein, 10 aa, Severe acute respiratory syndrome coronavirus 2
ISPYNSQNAV

SEQ ID NO: 7832 - protein, 10 aa, Severe acute respiratory syndrome coronavirus 2
SPYNSQNAVA

SEQ ID NO: 7833 - protein, 10 aa, Severe acute respiratory syndrome coronavirus 2
YNSQNAVASK

SEQ ID NO: 7834 - protein, 10 aa, Severe acute respiratory syndrome coronavirus 2
SQNAVASKIL

SEQ ID NO: 7835 - protein, 10 aa, Severe acute respiratory syndrome coronavirus 2
KILGLPTQTV

SEQ ID NO: 7836 - protein, 10 aa, Severe acute respiratory syndrome coronavirus 2
TVDSSQGSEY

SEQ ID NO: 7837 - protein, 10 aa, Severe acute respiratory syndrome coronavirus 2
SQGSEYDYVI

SEQ ID NO: 7838 - protein, 10 aa, Severe acute respiratory syndrome coronavirus 2
TTETAHSCNV

SEQ ID NO: 7839 - protein, 10 aa, Severe acute respiratory syndrome coronavirus 2
ETAHSCNVNR

SEQ ID NO: 7840 - protein, 10 aa, Severe acute respiratory syndrome coronavirus 2
HSCNVNRFNV

SEQ ID NO: 7841 - protein, 10 aa, Severe acute respiratory syndrome coronavirus 2
VNRFNVAITR

SEQ ID NO: 7842 - protein, 10 aa, Severe acute respiratory syndrome coronavirus 2
NRFNVAITRA

SEQ ID NO: 7843 - protein, 10 aa, Severe acute respiratory syndrome coronavirus 2
RFNVAITRAK

SEQ ID NO: 7844 - protein, 10 aa, Severe acute respiratory syndrome coronavirus 2
FNVAITRAKV

SEQ ID NO: 7845 - protein, 10 aa, Severe acute respiratory syndrome coronavirus 2
AITRAKVGIL

SEQ ID NO: 7846 - protein, 10 aa, Severe acute respiratory syndrome coronavirus 2
TRAKVGILCI

SEQ ID NO: 7847 - protein, 10 aa, Severe acute respiratory syndrome coronavirus 2
RAKVGILCIM

SEQ ID NO: 7848 - protein, 10 aa, Severe acute respiratory syndrome coronavirus 2
VGILCIMSDR

SEQ ID NO: 7849 - protein, 10 aa, Severe acute respiratory syndrome coronavirus 2
ILCIMSDRDL

SEQ ID NO: 7850 - protein, 10 aa, Severe acute respiratory syndrome coronavirus 2
LCIMSDRDLY

SEQ ID NO: 7851 - protein, 10 aa, Severe acute respiratory syndrome coronavirus 2
IMSDRDLYDK

SEQ ID NO: 7852 - protein, 10 aa, Severe acute respiratory syndrome coronavirus 2
RDLYDKLQFT

SEQ ID NO: 7853 - protein, 10 aa, Severe acute respiratory syndrome coronavirus 2
LYDKLQFTSL

SEQ ID NO: 7854 - protein, 10 aa, Severe acute respiratory syndrome coronavirus 2
LQFTSLEIPR

SEQ ID NO: 7855 - protein, 10 aa, Severe acute respiratory syndrome coronavirus 2
QFTSLEIPRR

SEQ ID NO: 7856 - protein, 10 aa, Severe acute respiratory syndrome coronavirus 2
SLEIPRRNVA

SEQ ID NO: 7857 - protein, 10 aa, Severe acute respiratory syndrome coronavirus 2
EIPRRNVATL

SEQ ID NO: 7858 - protein, 10 aa, Severe acute respiratory syndrome coronavirus 2
IPRRNVATLQ

SEQ ID NO: 7859 - protein, 10 aa, Severe acute respiratory syndrome coronavirus 2
NVATLQAENV

SEQ ID NO: 7860 - protein, 10 aa, Severe acute respiratory syndrome coronavirus 2
TLQAENVTGL

SEQ ID NO: 7861 - protein, 10 aa, Severe acute respiratory syndrome coronavirus 2
LQAENVTGLF

SEQ ID NO: 7862 - protein, 10 aa, Severe acute respiratory syndrome coronavirus 2
QAENVTGLFK

SEQ ID NO: 7863 - protein, 10 aa, Severe acute respiratory syndrome coronavirus 2
VTGLFKDCSK

SEQ ID NO: 7864 - protein, 10 aa, Severe acute respiratory syndrome coronavirus 2
TGLFKDCSKV

SEQ ID NO: 7865 - protein, 10 aa, Severe acute respiratory syndrome coronavirus 2
GLFKDCSKVI

SEQ ID NO: 7866 - protein, 10 aa, Severe acute respiratory syndrome coronavirus 2
SKVITGLHPT

SEQ ID NO: 7867 - protein, 10 aa, Severe acute respiratory syndrome coronavirus 2
LHPTQAPTHL

SEQ ID NO: 7868 - protein, 10 aa, Severe acute respiratory syndrome coronavirus 2
APTHLSVDTK

SEQ ID NO: 7869 - protein, 10 aa, Severe acute respiratory syndrome coronavirus 2
THLSVDTKFK

SEQ ID NO: 7870 - protein, 10 aa, Severe acute respiratory syndrome coronavirus 2
LCVDIPGIPK

SEQ ID NO: 7871 - protein, 10 aa, Severe acute respiratory syndrome coronavirus 2
IPGIPKDMTY

SEQ ID NO: 7872 - protein, 10 aa, Severe acute respiratory syndrome coronavirus 2
GIPKDMTYRR

SEQ ID NO: 7873 - protein, 10 aa, Severe acute respiratory syndrome coronavirus 2
IPKDMTYRRL

SEQ ID NO: 7874 - protein, 10 aa, Severe acute respiratory syndrome coronavirus 2
DMTYRRLISM

SEQ ID NO: 7875 - protein, 10 aa, Severe acute respiratory syndrome coronavirus 2
MTYRRLISMM

SEQ ID NO: 7876 - protein, 10 aa, Severe acute respiratory syndrome coronavirus 2
YRRLISMMGF

SEQ ID NO: 7877 - protein, 10 aa, Severe acute respiratory syndrome coronavirus 2
RRLISMMGFK

SEQ ID NO: 7878 - protein, 10 aa, Severe acute respiratory syndrome coronavirus 2
RLISMMGFKM

SEQ ID NO: 7879 - protein, 10 aa, Severe acute respiratory syndrome coronavirus 2
ISMMGFKMNY

SEQ ID NO: 7880 - protein, 10 aa, Severe acute respiratory syndrome coronavirus 2
SMMGFKMNYQ

SEQ ID NO: 7881 - protein, 10 aa, Severe acute respiratory syndrome coronavirus 2
MMGFKMNYQV

SEQ ID NO: 7882 - protein, 10 aa, Severe acute respiratory syndrome coronavirus 2
FKMNYQVNGY

SEQ ID NO: 7883 - protein, 10 aa, Severe acute respiratory syndrome coronavirus 2
KMNYQVNGYP

SEQ ID NO: 7884 - protein, 10 aa, Severe acute respiratory syndrome coronavirus 2
NYQVNGYPNM

SEQ ID NO: 7885 - protein, 10 aa, Severe acute respiratory syndrome coronavirus 2
YQVNGYPNMF

SEQ ID NO: 7886 - protein, 10 aa, Severe acute respiratory syndrome coronavirus 2
QVNGYPNMFI

SEQ ID NO: 7887 - protein, 10 aa, Severe acute respiratory syndrome coronavirus 2
NGYPNMFITR

SEQ ID NO: 7888 - protein, 10 aa, Severe acute respiratory syndrome coronavirus 2
NMFITREEAI

SEQ ID NO: 7889 - protein, 10 aa, Severe acute respiratory syndrome coronavirus 2
MFITREEAIR

SEQ ID NO: 7890 - protein, 10 aa, Severe acute respiratory syndrome coronavirus 2
REEAIRHVRA

SEQ ID NO: 7891 - protein, 10 aa, Severe acute respiratory syndrome coronavirus 2
EEAIRHVRAW

SEQ ID NO: 7892 - protein, 10 aa, Severe acute respiratory syndrome coronavirus 2
EAIRHVRAWI

SEQ ID NO: 7893 - protein, 10 aa, Severe acute respiratory syndrome coronavirus 2
IRHVRAWIGF

SEQ ID NO: 7894 - protein, 10 aa, Severe acute respiratory syndrome coronavirus 2
HVRAWIGFDV

SEQ ID NO: 7895 - protein, 10 aa, Severe acute respiratory syndrome coronavirus 2
FDVEGCHATR

SEQ ID NO: 7896 - protein, 10 aa, Severe acute respiratory syndrome coronavirus 2
VEGCHATREA

SEQ ID NO: 7897 - protein, 10 aa, Severe acute respiratory syndrome coronavirus 2
ATREAVGTNL

SEQ ID NO: 7898 - protein, 10 aa, Severe acute respiratory syndrome coronavirus 2
REAVGTNLPL

SEQ ID NO: 7899 - protein, 10 aa, Severe acute respiratory syndrome coronavirus 2
GTNLPLQLGF

SEQ ID NO: 7900 - protein, 10 aa, Severe acute respiratory syndrome coronavirus 2
PLQLGFSTGV

SEQ ID NO: 7901 - protein, 10 aa, Severe acute respiratory syndrome coronavirus 2
LQLGFSTGVN

SEQ ID NO: 7902 - protein, 10 aa, Severe acute respiratory syndrome coronavirus 2
QLGFSTGVNL

SEQ ID NO: 7903 - protein, 10 aa, Severe acute respiratory syndrome coronavirus 2
FSTGVNLVAV

SEQ ID NO: 7904 - protein, 10 aa, Severe acute respiratory syndrome coronavirus 2
VNLVAVPTGY

SEQ ID NO: 7905 - protein, 10 aa, Severe acute respiratory syndrome coronavirus 2
NLVAVPTGYV

SEQ ID NO: 7906 - protein, 10 aa, Severe acute respiratory syndrome coronavirus 2
YVDTPNNTDF

SEQ ID NO: 7907 - protein, 10 aa, Severe acute respiratory syndrome coronavirus 2
DTPNNTDFSR

SEQ ID NO: 7908 - protein, 10 aa, Severe acute respiratory syndrome coronavirus 2
TPNNTDFSRV

SEQ ID NO: 7909 - protein, 10 aa, Severe acute respiratory syndrome coronavirus 2
NTDFSRVSAK

SEQ ID NO: 7910 - protein, 10 aa, Severe acute respiratory syndrome coronavirus 2
GDQFKHLIPL

SEQ ID NO: 7911 - protein, 10 aa, Severe acute respiratory syndrome coronavirus 2
DQFKHLIPLM

SEQ ID NO: 7912 - protein, 10 aa, Severe acute respiratory syndrome coronavirus 2
QFKHLIPLMY

SEQ ID NO: 7913 - protein, 10 aa, Severe acute respiratory syndrome coronavirus 2
HLIPLMYKGL

SEQ ID NO: 7914 - protein, 10 aa, Severe acute respiratory syndrome coronavirus 2
IPLMYKGLPW

SEQ ID NO: 7915 - protein, 10 aa, Severe acute respiratory syndrome coronavirus 2
LMYKGLPWNV

SEQ ID NO: 7916 - protein, 10 aa, Severe acute respiratory syndrome coronavirus 2
MYKGLPWNVV

SEQ ID NO: 7917 - protein, 10 aa, Severe acute respiratory syndrome coronavirus 2
YKGLPWNVVR

SEQ ID NO: 7918 - protein, 10 aa, Severe acute respiratory syndrome coronavirus 2
KGLPWNVVRL

SEQ ID NO: 7919 - protein, 10 aa, Severe acute respiratory syndrome coronavirus 2
GLPWNVVRLK

SEQ ID NO: 7920 - protein, 10 aa, Severe acute respiratory syndrome coronavirus 2
LPWNVVRLKI

SEQ ID NO: 7921 - protein, 10 aa, Severe acute respiratory syndrome coronavirus 2
VVRLKIVQML

SEQ ID NO: 7922 - protein, 10 aa, Severe acute respiratory syndrome coronavirus 2
VRLKIVQMLS

SEQ ID NO: 7923 - protein, 10 aa, Severe acute respiratory syndrome coronavirus 2
KIVQMLSDTL

SEQ ID NO: 7924 - protein, 10 aa, Severe acute respiratory syndrome coronavirus 2
IVQMLSDTLK

SEQ ID NO: 7925 - protein, 10 aa, Severe acute respiratory syndrome coronavirus 2
QMLSDTLKNL

SEQ ID NO: 7926 - protein, 10 aa, Severe acute respiratory syndrome coronavirus 2
MLSDTLKNLS

SEQ ID NO: 7927 - protein, 10 aa, Severe acute respiratory syndrome coronavirus 2
SDTLKNLSDR

SEQ ID NO: 7928 - protein, 10 aa, Severe acute respiratory syndrome coronavirus 2
TLKNLSDRVV

SEQ ID NO: 7929 - protein, 10 aa, Severe acute respiratory syndrome coronavirus 2
LKNLSDRVVF

SEQ ID NO: 7930 - protein, 10 aa, Severe acute respiratory syndrome coronavirus 2
KNLSDRVVFV

SEQ ID NO: 7931 - protein, 10 aa, Severe acute respiratory syndrome coronavirus 2
NLSDRVVFVL

SEQ ID NO: 7932 - protein, 10 aa, Severe acute respiratory syndrome coronavirus 2
LSDRVVFVLW

SEQ ID NO: 7933 - protein, 10 aa, Severe acute respiratory syndrome coronavirus 2
VVFVLWAHGF

SEQ ID NO: 7934 - protein, 10 aa, Severe acute respiratory syndrome coronavirus 2
FVLWAHGFEL

SEQ ID NO: 7935 - protein, 10 aa, Severe acute respiratory syndrome coronavirus 2
VLWAHGFELT

SEQ ID NO: 7936 - protein, 10 aa, Severe acute respiratory syndrome coronavirus 2
WAHGFELTSM

SEQ ID NO: 7937 - protein, 10 aa, Severe acute respiratory syndrome coronavirus 2
HGFELTSMKY

SEQ ID NO: 7938 - protein, 10 aa, Severe acute respiratory syndrome coronavirus 2
GFELTSMKYF

SEQ ID NO: 7939 - protein, 10 aa, Severe acute respiratory syndrome coronavirus 2
FELTSMKYFV

SEQ ID NO: 7940 - protein, 10 aa, Severe acute respiratory syndrome coronavirus 2
ELTSMKYFVK

SEQ ID NO: 7941 - protein, 10 aa, Severe acute respiratory syndrome coronavirus 2
LTSMKYFVKI

SEQ ID NO: 7942 - protein, 10 aa, Severe acute respiratory syndrome coronavirus 2
KYFVKIGPER

SEQ ID NO: 7943 - protein, 10 aa, Severe acute respiratory syndrome coronavirus 2
ERTCCLCDRR

SEQ ID NO: 7944 - protein, 10 aa, Severe acute respiratory syndrome coronavirus 2
RRATCFSTAS

SEQ ID NO: 7945 - protein, 10 aa, Severe acute respiratory syndrome coronavirus 2
TCFSTASDTY

SEQ ID NO: 7946 - protein, 10 aa, Severe acute respiratory syndrome coronavirus 2
STASDTYACW

SEQ ID NO: 7947 - protein, 10 aa, Severe acute respiratory syndrome coronavirus 2
DTYACWHHSI

SEQ ID NO: 7948 - protein, 10 aa, Severe acute respiratory syndrome coronavirus 2
YACWHHSIGF

SEQ ID NO: 7949 - protein, 10 aa, Severe acute respiratory syndrome coronavirus 2
CWHHSIGFDY

SEQ ID NO: 7950 - protein, 10 aa, Severe acute respiratory syndrome coronavirus 2
WHHSIGFDYV

SEQ ID NO: 7951 - protein, 10 aa, Severe acute respiratory syndrome coronavirus 2
HHSIGFDYVY

SEQ ID NO: 7952 - protein, 10 aa, Severe acute respiratory syndrome coronavirus 2
IGFDYVYNPF

SEQ ID NO: 7953 - protein, 10 aa, Severe acute respiratory syndrome coronavirus 2
FDYVYNPFMI

SEQ ID NO: 7954 - protein, 10 aa, Severe acute respiratory syndrome coronavirus 2
YVYNPFMIDV

SEQ ID NO: 7955 - protein, 10 aa, Severe acute respiratory syndrome coronavirus 2
NPFMIDVQQW

SEQ ID NO: 7956 - protein, 10 aa, Severe acute respiratory syndrome coronavirus 2
FMIDVQQWGF

SEQ ID NO: 7957 - protein, 10 aa, Severe acute respiratory syndrome coronavirus 2
VQQWGFTGNL

SEQ ID NO: 7958 - protein, 10 aa, Severe acute respiratory syndrome coronavirus 2
GNLQSNHDLY

SEQ ID NO: 7959 - protein, 10 aa, Severe acute respiratory syndrome coronavirus 2
YCQVHGNAHV

SEQ ID NO: 7960 - protein, 10 aa, Severe acute respiratory syndrome coronavirus 2
AHVASCDAIM

SEQ ID NO: 7961 - protein, 10 aa, Severe acute respiratory syndrome coronavirus 2
VASCDAIMTR

SEQ ID NO: 7962 - protein, 10 aa, Severe acute respiratory syndrome coronavirus 2
DAIMTRCLAV

SEQ ID NO: 7963 - protein, 10 aa, Severe acute respiratory syndrome coronavirus 2
TRCLAVHECF

SEQ ID NO: 7964 - protein, 10 aa, Severe acute respiratory syndrome coronavirus 2
RCLAVHECFV

SEQ ID NO: 7965 - protein, 10 aa, Severe acute respiratory syndrome coronavirus 2
CLAVHECFVK

SEQ ID NO: 7966 - protein, 10 aa, Severe acute respiratory syndrome coronavirus 2
LAVHECFVKR

SEQ ID NO: 7967 - protein, 10 aa, Severe acute respiratory syndrome coronavirus 2
AVHECFVKRV

SEQ ID NO: 7968 - protein, 10 aa, Severe acute respiratory syndrome coronavirus 2
HECFVKRVDW

SEQ ID NO: 7969 - protein, 10 aa, Severe acute respiratory syndrome coronavirus 2
CFVKRVDWTI

SEQ ID NO: 7970 - protein, 10 aa, Severe acute respiratory syndrome coronavirus 2
VKRVDWTIEY

SEQ ID NO: 7971 - protein, 10 aa, Severe acute respiratory syndrome coronavirus 2
RVDWTIEYPI

SEQ ID NO: 7972 - protein, 10 aa, Severe acute respiratory syndrome coronavirus 2
IEYPIIGDEL

SEQ ID NO: 7973 - protein, 10 aa, Severe acute respiratory syndrome coronavirus 2
YPIIGDELKI

SEQ ID NO: 7974 - protein, 10 aa, Severe acute respiratory syndrome coronavirus 2
ELKINAACRK

SEQ ID NO: 7975 - protein, 10 aa, Severe acute respiratory syndrome coronavirus 2
CRKVQHMVVK

SEQ ID NO: 7976 - protein, 10 aa, Severe acute respiratory syndrome coronavirus 2
KVQHMVVKAA

SEQ ID NO: 7977 - protein, 10 aa, Severe acute respiratory syndrome coronavirus 2
VQHMVVKAAL

SEQ ID NO: 7978 - protein, 10 aa, Severe acute respiratory syndrome coronavirus 2
QHMVVKAALL

SEQ ID NO: 7979 - protein, 10 aa, Severe acute respiratory syndrome coronavirus 2
HMVVKAALLA

SEQ ID NO: 7980 - protein, 10 aa, Severe acute respiratory syndrome coronavirus 2
VVKAALLADK

SEQ ID NO: 7981 - protein, 10 aa, Severe acute respiratory syndrome coronavirus 2
VKAALLADKF

SEQ ID NO: 7982 - protein, 10 aa, Severe acute respiratory syndrome coronavirus 2
AALLADKFPV

SEQ ID NO: 7983 - protein, 10 aa, Severe acute respiratory syndrome coronavirus 2
ALLADKFPVL

SEQ ID NO: 7984 - protein, 10 aa, Severe acute respiratory syndrome coronavirus 2
LLADKFPVLH

SEQ ID NO: 7985 - protein, 10 aa, Severe acute respiratory syndrome coronavirus 2
VLHDIGNPKA

SEQ ID NO: 7986 - protein, 10 aa, Severe acute respiratory syndrome coronavirus 2
AIKCVPQADV

SEQ ID NO: 7987 - protein, 10 aa, Severe acute respiratory syndrome coronavirus 2
KCVPQADVEW

SEQ ID NO: 7988 - protein, 10 aa, Severe acute respiratory syndrome coronavirus 2
VPQADVEWKF

SEQ ID NO: 7989 - protein, 10 aa, Severe acute respiratory syndrome coronavirus 2
DAQPCSDKAY

SEQ ID NO: 7990 - protein, 10 aa, Severe acute respiratory syndrome coronavirus 2
AQPCSDKAYK

SEQ ID NO: 7991 - protein, 10 aa, Severe acute respiratory syndrome coronavirus 2
DKAYKIEELF

SEQ ID NO: 7992 - protein, 10 aa, Severe acute respiratory syndrome coronavirus 2
KAYKIEELFY

SEQ ID NO: 7993 - protein, 10 aa, Severe acute respiratory syndrome coronavirus 2
YKIEELFYSY

SEQ ID NO: 7994 - protein, 10 aa, Severe acute respiratory syndrome coronavirus 2
KIEELFYSYA

SEQ ID NO: 7995 - protein, 10 aa, Severe acute respiratory syndrome coronavirus 2
EELFYSYATH

SEQ ID NO: 7996 - protein, 10 aa, Severe acute respiratory syndrome coronavirus 2
FYSYATHSDK

SEQ ID NO: 7997 - protein, 10 aa, Severe acute respiratory syndrome coronavirus 2
YSYATHSDKF

SEQ ID NO: 7998 - protein, 10 aa, Severe acute respiratory syndrome coronavirus 2
KFTDGVCLFW

SEQ ID NO: 7999 - protein, 10 aa, Severe acute respiratory syndrome coronavirus 2
GVCLFWNCNV

SEQ ID NO: 8000 - protein, 10 aa, Severe acute respiratory syndrome coronavirus 2
CLFWNCNVDR

SEQ ID NO: 8001 - protein, 10 aa, Severe acute respiratory syndrome coronavirus 2
LFWNCNVDRY

SEQ ID NO: 8002 - protein, 10 aa, Severe acute respiratory syndrome coronavirus 2
RYPANSIVCR

SEQ ID NO: 8003 - protein, 10 aa, Severe acute respiratory syndrome coronavirus 2
YPANSIVCRF

SEQ ID NO: 8004 - protein, 10 aa, Severe acute respiratory syndrome coronavirus 2
NSIVCRFDTR

SEQ ID NO: 8005 - protein, 10 aa, Severe acute respiratory syndrome coronavirus 2
SIVCRFDTRV

SEQ ID NO: 8006 - protein, 10 aa, Severe acute respiratory syndrome coronavirus 2
RFDTRVLSNL

SEQ ID NO: 8007 - protein, 10 aa, Severe acute respiratory syndrome coronavirus 2
RVLSNLNLPG

SEQ ID NO: 8008 - protein, 10 aa, Severe acute respiratory syndrome coronavirus 2
LPGCDGGSLY

SEQ ID NO: 8009 - protein, 10 aa, Severe acute respiratory syndrome coronavirus 2
GSLYVNKHAF

SEQ ID NO: 8010 - protein, 10 aa, Severe acute respiratory syndrome coronavirus 2
NKHAFHTPAF

SEQ ID NO: 8011 - protein, 10 aa, Severe acute respiratory syndrome coronavirus 2
HAFHTPAFDK

SEQ ID NO: 8012 - protein, 10 aa, Severe acute respiratory syndrome coronavirus 2
FHTPAFDKSA

SEQ ID NO: 8013 - protein, 10 aa, Severe acute respiratory syndrome coronavirus 2
HTPAFDKSAF

SEQ ID NO: 8014 - protein, 10 aa, Severe acute respiratory syndrome coronavirus 2
TPAFDKSAFV

SEQ ID NO: 8015 - protein, 10 aa, Severe acute respiratory syndrome coronavirus 2
KSAFVNLKQL

SEQ ID NO: 8016 - protein, 10 aa, Severe acute respiratory syndrome coronavirus 2
AFVNLKQLPF

SEQ ID NO: 8017 - protein, 10 aa, Severe acute respiratory syndrome coronavirus 2
FVNLKQLPFF

SEQ ID NO: 8018 - protein, 10 aa, Severe acute respiratory syndrome coronavirus 2
VNLKQLPFFY

SEQ ID NO: 8019 - protein, 10 aa, Severe acute respiratory syndrome coronavirus 2
NLKQLPFFYY

SEQ ID NO: 8020 - protein, 10 aa, Severe acute respiratory syndrome coronavirus 2
LKQLPFFYYS

SEQ ID NO: 8021 - protein, 10 aa, Severe acute respiratory syndrome coronavirus 2
LPFFYYSDSP

SEQ ID NO: 8022 - protein, 10 aa, Severe acute respiratory syndrome coronavirus 2
SPCESHGKQV

SEQ ID NO: 8023 - protein, 10 aa, Severe acute respiratory syndrome coronavirus 2
GKQVVSDIDY

SEQ ID NO: 8024 - protein, 10 aa, Severe acute respiratory syndrome coronavirus 2
KQVVSDIDYV

SEQ ID NO: 8025 - protein, 10 aa, Severe acute respiratory syndrome coronavirus 2
VVSDIDYVPL

SEQ ID NO: 8026 - protein, 10 aa, Severe acute respiratory syndrome coronavirus 2
VSDIDYVPLK

SEQ ID NO: 8027 - protein, 10 aa, Severe acute respiratory syndrome coronavirus 2
YVPLKSATCI

SEQ ID NO: 8028 - protein, 10 aa, Severe acute respiratory syndrome coronavirus 2
ITRCNLGGAV

SEQ ID NO: 8029 - protein, 10 aa, Severe acute respiratory syndrome coronavirus 2
RCNLGGAVCR

SEQ ID NO: 8030 - protein, 10 aa, Severe acute respiratory syndrome coronavirus 2
AVCRHHANEY

SEQ ID NO: 8031 - protein, 10 aa, Severe acute respiratory syndrome coronavirus 2
CRHHANEYRL

SEQ ID NO: 8032 - protein, 10 aa, Severe acute respiratory syndrome coronavirus 2
RHHANEYRLY

SEQ ID NO: 8033 - protein, 10 aa, Severe acute respiratory syndrome coronavirus 2
HHANEYRLYL

SEQ ID NO: 8034 - protein, 10 aa, Severe acute respiratory syndrome coronavirus 2
ANEYRLYLDA

SEQ ID NO: 8035 - protein, 10 aa, Severe acute respiratory syndrome coronavirus 2
NEYRLYLDAY

SEQ ID NO: 8036 - protein, 10 aa, Severe acute respiratory syndrome coronavirus 2
YRLYLDAYNM

SEQ ID NO: 8037 - protein, 10 aa, Severe acute respiratory syndrome coronavirus 2
RLYLDAYNMM

SEQ ID NO: 8038 - protein, 10 aa, Severe acute respiratory syndrome coronavirus 2
LYLDAYNMMI

SEQ ID NO: 8039 - protein, 10 aa, Severe acute respiratory syndrome coronavirus 2
YLDAYNMMIS

SEQ ID NO: 8040 - protein, 10 aa, Severe acute respiratory syndrome coronavirus 2
AYNMMISAGF

SEQ ID NO: 8041 - protein, 10 aa, Severe acute respiratory syndrome coronavirus 2
NMMISAGFSL

SEQ ID NO: 8042 - protein, 10 aa, Severe acute respiratory syndrome coronavirus 2
MMISAGFSLW

SEQ ID NO: 8043 - protein, 10 aa, Severe acute respiratory syndrome coronavirus 2
MISAGFSLWV

SEQ ID NO: 8044 - protein, 10 aa, Severe acute respiratory syndrome coronavirus 2
ISAGFSLWVY

SEQ ID NO: 8045 - protein, 10 aa, Severe acute respiratory syndrome coronavirus 2
SAGFSLWVYK

SEQ ID NO: 8046 - protein, 10 aa, Severe acute respiratory syndrome coronavirus 2
GFSLWVYKQF

SEQ ID NO: 8047 - protein, 10 aa, Severe acute respiratory syndrome coronavirus 2
SLWVYKQFDT

SEQ ID NO: 8048 - protein, 10 aa, Severe acute respiratory syndrome coronavirus 2
LWVYKQFDTY

SEQ ID NO: 8049 - protein, 10 aa, Severe acute respiratory syndrome coronavirus 2
VYKQFDTYNL

SEQ ID NO: 8050 - protein, 10 aa, Severe acute respiratory syndrome coronavirus 2
YKQFDTYNLW

SEQ ID NO: 8051 - protein, 10 aa, Severe acute respiratory syndrome coronavirus 2
FDTYNLWNTF

SEQ ID NO: 8052 - protein, 10 aa, Severe acute respiratory syndrome coronavirus 2
DTYNLWNTFT

SEQ ID NO: 8053 - protein, 10 aa, Severe acute respiratory syndrome coronavirus 2
TYNLWNTFTR

SEQ ID NO: 8054 - protein, 10 aa, Severe acute respiratory syndrome coronavirus 2
YNLWNTFTRL

SEQ ID NO: 8055 - protein, 10 aa, Severe acute respiratory syndrome coronavirus 2
WNTFTRLQSL

SEQ ID NO: 8056 - protein, 10 aa, Severe acute respiratory syndrome coronavirus 2
FTRLQSLENV

SEQ ID NO: 8057 - protein, 10 aa, Severe acute respiratory syndrome coronavirus 2
RLQSLENVAF

SEQ ID NO: 8058 - protein, 10 aa, Severe acute respiratory syndrome coronavirus 2
QSLENVAFNV

SEQ ID NO: 8059 - protein, 10 aa, Severe acute respiratory syndrome coronavirus 2
SLENVAFNVV

SEQ ID NO: 8060 - protein, 10 aa, Severe acute respiratory syndrome coronavirus 2
ENVAFNVVNK

SEQ ID NO: 8061 - protein, 10 aa, Severe acute respiratory syndrome coronavirus 2
EVPVSIINNT

SEQ ID NO: 8062 - protein, 10 aa, Severe acute respiratory syndrome coronavirus 2
VPVSIINNTV

SEQ ID NO: 8063 - protein, 10 aa, Severe acute respiratory syndrome coronavirus 2
SIINNTVYTK

SEQ ID NO: 8064 - protein, 10 aa, Severe acute respiratory syndrome coronavirus 2
IINNTVYTKV

SEQ ID NO: 8065 - protein, 10 aa, Severe acute respiratory syndrome coronavirus 2
NTVYTKVDGV

SEQ ID NO: 8066 - protein, 10 aa, Severe acute respiratory syndrome coronavirus 2
KVDGVDVELF

SEQ ID NO: 8067 - protein, 10 aa, Severe acute respiratory syndrome coronavirus 2
GVDVELFENK

SEQ ID NO: 8068 - protein, 10 aa, Severe acute respiratory syndrome coronavirus 2
VELFENKTTL

SEQ ID NO: 8069 - protein, 10 aa, Severe acute respiratory syndrome coronavirus 2
LFENKTTLPV

SEQ ID NO: 8070 - protein, 10 aa, Severe acute respiratory syndrome coronavirus 2
KTTLPVNVAF

SEQ ID NO: 8071 - protein, 10 aa, Severe acute respiratory syndrome coronavirus 2
TLPVNVAFEL

SEQ ID NO: 8072 - protein, 10 aa, Severe acute respiratory syndrome coronavirus 2
LPVNVAFELW

SEQ ID NO: 8073 - protein, 10 aa, Severe acute respiratory syndrome coronavirus 2
VNVAFELWAK

SEQ ID NO: 8074 - protein, 10 aa, Severe acute respiratory syndrome coronavirus 2
NVAFELWAKR

SEQ ID NO: 8075 - protein, 10 aa, Severe acute respiratory syndrome coronavirus 2
FELWAKRNIK

SEQ ID NO: 8076 - protein, 10 aa, Severe acute respiratory syndrome coronavirus 2
KRNIKPVPEV

SEQ ID NO: 8077 - protein, 10 aa, Severe acute respiratory syndrome coronavirus 2
RNIKPVPEVK

SEQ ID NO: 8078 - protein, 10 aa, Severe acute respiratory syndrome coronavirus 2
VPEVKILNNL

SEQ ID NO: 8079 - protein, 10 aa, Severe acute respiratory syndrome coronavirus 2
EVKILNNLGV

SEQ ID NO: 8080 - protein, 10 aa, Severe acute respiratory syndrome coronavirus 2
KILNNLGVDI

SEQ ID NO: 8081 - protein, 10 aa, Severe acute respiratory syndrome coronavirus 2
ILNNLGVDIA

SEQ ID NO: 8082 - protein, 10 aa, Severe acute respiratory syndrome coronavirus 2
VDIAANTVIW

SEQ ID NO: 8083 - protein, 10 aa, Severe acute respiratory syndrome coronavirus 2
IAANTVIWDY

SEQ ID NO: 8084 - protein, 10 aa, Severe acute respiratory syndrome coronavirus 2
AANTVIWDYK

SEQ ID NO: 8085 - protein, 10 aa, Severe acute respiratory syndrome coronavirus 2
ANTVIWDYKR

SEQ ID NO: 8086 - protein, 10 aa, Severe acute respiratory syndrome coronavirus 2
NTVIWDYKRD

SEQ ID NO: 8087 - protein, 10 aa, Severe acute respiratory syndrome coronavirus 2
RDAPAHISTI

SEQ ID NO: 8088 - protein, 10 aa, Severe acute respiratory syndrome coronavirus 2
APAHISTIGV

SEQ ID NO: 8089 - protein, 10 aa, Severe acute respiratory syndrome coronavirus 2
GVCSMTDIAK

SEQ ID NO: 8090 - protein, 10 aa, Severe acute respiratory syndrome coronavirus 2
VCSMTDIAKK

SEQ ID NO: 8091 - protein, 10 aa, Severe acute respiratory syndrome coronavirus 2
KPTETICAPL

SEQ ID NO: 8092 - protein, 10 aa, Severe acute respiratory syndrome coronavirus 2
TETICAPLTV

SEQ ID NO: 8093 - protein, 10 aa, Severe acute respiratory syndrome coronavirus 2
ETICAPLTVF

SEQ ID NO: 8094 - protein, 10 aa, Severe acute respiratory syndrome coronavirus 2
TICAPLTVFF

SEQ ID NO: 8095 - protein, 10 aa, Severe acute respiratory syndrome coronavirus 2
APLTVFFDGR

SEQ ID NO: 8096 - protein, 10 aa, Severe acute respiratory syndrome coronavirus 2
GRVDGQVDLF

SEQ ID NO: 8097 - protein, 10 aa, Severe acute respiratory syndrome coronavirus 2
RVDGQVDLFR

SEQ ID NO: 8098 - protein, 10 aa, Severe acute respiratory syndrome coronavirus 2
GQVDLFRNAR

SEQ ID NO: 8099 - protein, 10 aa, Severe acute respiratory syndrome coronavirus 2
DLFRNARNGV

SEQ ID NO: 8100 - protein, 10 aa, Severe acute respiratory syndrome coronavirus 2
LFRNARNGVL

SEQ ID NO: 8101 - protein, 10 aa, Severe acute respiratory syndrome coronavirus 2
FRNARNGVLI

SEQ ID NO: 8102 - protein, 10 aa, Severe acute respiratory syndrome coronavirus 2
RNARNGVLIT

SEQ ID NO: 8103 - protein, 10 aa, Severe acute respiratory syndrome coronavirus 2
GVLITEGSVK

SEQ ID NO: 8104 - protein, 10 aa, Severe acute respiratory syndrome coronavirus 2
LITEGSVKGL

SEQ ID NO: 8105 - protein, 10 aa, Severe acute respiratory syndrome coronavirus 2
KGLQPSVGPK

SEQ ID NO: 8106 - protein, 10 aa, Severe acute respiratory syndrome coronavirus 2
GPKQASLNGV

SEQ ID NO: 8107 - protein, 10 aa, Severe acute respiratory syndrome coronavirus 2
KQASLNGVTL

SEQ ID NO: 8108 - protein, 10 aa, Severe acute respiratory syndrome coronavirus 2
NGVTLIGEAV

SEQ ID NO: 8109 - protein, 10 aa, Severe acute respiratory syndrome coronavirus 2
GVTLIGEAVK

SEQ ID NO: 8110 - protein, 10 aa, Severe acute respiratory syndrome coronavirus 2
GEAVKTQFNY

SEQ ID NO: 8111 - protein, 10 aa, Severe acute respiratory syndrome coronavirus 2
EAVKTQFNYY

SEQ ID NO: 8112 - protein, 10 aa, Severe acute respiratory syndrome coronavirus 2
AVKTQFNYYK

SEQ ID NO: 8113 - protein, 10 aa, Severe acute respiratory syndrome coronavirus 2
VKTQFNYYKK

SEQ ID NO: 8114 - protein, 10 aa, Severe acute respiratory syndrome coronavirus 2
KTQFNYYKKV

SEQ ID NO: 8115 - protein, 10 aa, Severe acute respiratory syndrome coronavirus 2
GVVQQLPETY

SEQ ID NO: 8116 - protein, 10 aa, Severe acute respiratory syndrome coronavirus 2
VVQQLPETYF

SEQ ID NO: 8117 - protein, 10 aa, Severe acute respiratory syndrome coronavirus 2
ETYFTQSRNL

SEQ ID NO: 8118 - protein, 10 aa, Severe acute respiratory syndrome coronavirus 2
FTQSRNLQEF

SEQ ID NO: 8119 - protein, 10 aa, Severe acute respiratory syndrome coronavirus 2
TQSRNLQEFK

SEQ ID NO: 8120 - protein, 10 aa, Severe acute respiratory syndrome coronavirus 2
SRNLQEFKPR

SEQ ID NO: 8121 - protein, 10 aa, Severe acute respiratory syndrome coronavirus 2
LQEFKPRSQM

SEQ ID NO: 8122 - protein, 10 aa, Severe acute respiratory syndrome coronavirus 2
KPRSQMEIDF

SEQ ID NO: 8123 - protein, 10 aa, Severe acute respiratory syndrome coronavirus 2
SQMEIDFLEL

SEQ ID NO: 8124 - protein, 10 aa, Severe acute respiratory syndrome coronavirus 2
QMEIDFLELA

SEQ ID NO: 8125 - protein, 10 aa, Severe acute respiratory syndrome coronavirus 2
MEIDFLELAM

SEQ ID NO: 8126 - protein, 10 aa, Severe acute respiratory syndrome coronavirus 2
FLELAMDEFI

SEQ ID NO: 8127 - protein, 10 aa, Severe acute respiratory syndrome coronavirus 2
ELAMDEFIER

SEQ ID NO: 8128 - protein, 10 aa, Severe acute respiratory syndrome coronavirus 2
LAMDEFIERY

SEQ ID NO: 8129 - protein, 10 aa, Severe acute respiratory syndrome coronavirus 2
AMDEFIERYK

SEQ ID NO: 8130 - protein, 10 aa, Severe acute respiratory syndrome coronavirus 2
MDEFIERYKL

SEQ ID NO: 8131 - protein, 10 aa, Severe acute respiratory syndrome coronavirus 2
FIERYKLEGY

SEQ ID NO: 8132 - protein, 10 aa, Severe acute respiratory syndrome coronavirus 2
ERYKLEGYAF

SEQ ID NO: 8133 - protein, 10 aa, Severe acute respiratory syndrome coronavirus 2
RYKLEGYAFE

SEQ ID NO: 8134 - protein, 10 aa, Severe acute respiratory syndrome coronavirus 2
KLEGYAFEHI

SEQ ID NO: 8135 - protein, 10 aa, Severe acute respiratory syndrome coronavirus 2
LEGYAFEHIV

SEQ ID NO: 8136 - protein, 10 aa, Severe acute respiratory syndrome coronavirus 2
VYGDFSHSQL

SEQ ID NO: 8137 - protein, 10 aa, Severe acute respiratory syndrome coronavirus 2
SHSQLGGLHL

SEQ ID NO: 8138 - protein, 10 aa, Severe acute respiratory syndrome coronavirus 2
HSQLGGLHLL

SEQ ID NO: 8139 - protein, 10 aa, Severe acute respiratory syndrome coronavirus 2
SQLGGLHLLI

SEQ ID NO: 8140 - protein, 10 aa, Severe acute respiratory syndrome coronavirus 2
GGLHLLIGLA

SEQ ID NO: 8141 - protein, 10 aa, Severe acute respiratory syndrome coronavirus 2
GLHLLIGLAK

SEQ ID NO: 8142 - protein, 10 aa, Severe acute respiratory syndrome coronavirus 2
LHLLIGLAKR

SEQ ID NO: 8143 - protein, 10 aa, Severe acute respiratory syndrome coronavirus 2
LLIGLAKRFK

SEQ ID NO: 8144 - protein, 10 aa, Severe acute respiratory syndrome coronavirus 2
LAKRFKESPF

SEQ ID NO: 8145 - protein, 10 aa, Severe acute respiratory syndrome coronavirus 2
KRFKESPFEL

SEQ ID NO: 8146 - protein, 10 aa, Severe acute respiratory syndrome coronavirus 2
KESPFELEDF

SEQ ID NO: 8147 - protein, 10 aa, Severe acute respiratory syndrome coronavirus 2
ESPFELEDFI

SEQ ID NO: 8148 - protein, 10 aa, Severe acute respiratory syndrome coronavirus 2
PFELEDFIPM

SEQ ID NO: 8149 - protein, 10 aa, Severe acute respiratory syndrome coronavirus 2
FELEDFIPMD

SEQ ID NO: 8150 - protein, 10 aa, Severe acute respiratory syndrome coronavirus 2
IPMDSTVKNY

SEQ ID NO: 8151 - protein, 10 aa, Severe acute respiratory syndrome coronavirus 2
MDSTVKNYFI

SEQ ID NO: 8152 - protein, 10 aa, Severe acute respiratory syndrome coronavirus 2
TVKNYFITDA

SEQ ID NO: 8153 - protein, 10 aa, Severe acute respiratory syndrome coronavirus 2
ITDAQTGSSK

SEQ ID NO: 8154 - protein, 10 aa, Severe acute respiratory syndrome coronavirus 2
SVIDLLLDDF

SEQ ID NO: 8155 - protein, 10 aa, Severe acute respiratory syndrome coronavirus 2
VIDLLLDDFV

SEQ ID NO: 8156 - protein, 10 aa, Severe acute respiratory syndrome coronavirus 2
DLLLDDFVEI

SEQ ID NO: 8157 - protein, 10 aa, Severe acute respiratory syndrome coronavirus 2
LLLDDFVEII

SEQ ID NO: 8158 - protein, 10 aa, Severe acute respiratory syndrome coronavirus 2
LLDDFVEIIK

SEQ ID NO: 8159 - protein, 10 aa, Severe acute respiratory syndrome coronavirus 2
EIIKSQDLSV

SEQ ID NO: 8160 - protein, 10 aa, Severe acute respiratory syndrome coronavirus 2
IIKSQDLSVV

SEQ ID NO: 8161 - protein, 10 aa, Severe acute respiratory syndrome coronavirus 2
KSQDLSVVSK

SEQ ID NO: 8162 - protein, 10 aa, Severe acute respiratory syndrome coronavirus 2
SQDLSVVSKV

SEQ ID NO: 8163 - protein, 10 aa, Severe acute respiratory syndrome coronavirus 2
DLSVVSKVVK

SEQ ID NO: 8164 - protein, 10 aa, Severe acute respiratory syndrome coronavirus 2
LSVVSKVVKV

SEQ ID NO: 8165 - protein, 10 aa, Severe acute respiratory syndrome coronavirus 2
SKVVKVTIDY

SEQ ID NO: 8166 - protein, 10 aa, Severe acute respiratory syndrome coronavirus 2
VTIDYTEISF

SEQ ID NO: 8167 - protein, 10 aa, Severe acute respiratory syndrome coronavirus 2
IDYTEISFML

SEQ ID NO: 8168 - protein, 10 aa, Severe acute respiratory syndrome coronavirus 2
DYTEISFMLW

SEQ ID NO: 8169 - protein, 10 aa, Severe acute respiratory syndrome coronavirus 2
TEISFMLWCK

SEQ ID NO: 8170 - protein, 10 aa, Severe acute respiratory syndrome coronavirus 2
FMLWCKDGHV

SEQ ID NO: 8171 - protein, 10 aa, Severe acute respiratory syndrome coronavirus 2
DGHVETFYPK

SEQ ID NO: 8172 - protein, 10 aa, Severe acute respiratory syndrome coronavirus 2
GHVETFYPKL

SEQ ID NO: 8173 - protein, 10 aa, Severe acute respiratory syndrome coronavirus 2
FYPKLQSSQA

SEQ ID NO: 8174 - protein, 10 aa, Severe acute respiratory syndrome coronavirus 2
YPKLQSSQAW

SEQ ID NO: 8175 - protein, 10 aa, Severe acute respiratory syndrome coronavirus 2
SQAWQPGVAM

SEQ ID NO: 8176 - protein, 10 aa, Severe acute respiratory syndrome coronavirus 2
WQPGVAMPNL

SEQ ID NO: 8177 - protein, 10 aa, Severe acute respiratory syndrome coronavirus 2
QPGVAMPNLY

SEQ ID NO: 8178 - protein, 10 aa, Severe acute respiratory syndrome coronavirus 2
PGVAMPNLYK

SEQ ID NO: 8179 - protein, 10 aa, Severe acute respiratory syndrome coronavirus 2
GVAMPNLYKM

SEQ ID NO: 8180 - protein, 10 aa, Severe acute respiratory syndrome coronavirus 2
AMPNLYKMQR

SEQ ID NO: 8181 - protein, 10 aa, Severe acute respiratory syndrome coronavirus 2
MPNLYKMQRM

SEQ ID NO: 8182 - protein, 10 aa, Severe acute respiratory syndrome coronavirus 2
NLYKMQRMLL

SEQ ID NO: 8183 - protein, 10 aa, Severe acute respiratory syndrome coronavirus 2
YKMQRMLLEK

SEQ ID NO: 8184 - protein, 10 aa, Severe acute respiratory syndrome coronavirus 2
KMQRMLLEKC

SEQ ID NO: 8185 - protein, 10 aa, Severe acute respiratory syndrome coronavirus 2
QRMLLEKCDL

SEQ ID NO: 8186 - protein, 10 aa, Severe acute respiratory syndrome coronavirus 2
LLEKCDLQNY

SEQ ID NO: 8187 - protein, 10 aa, Severe acute respiratory syndrome coronavirus 2
LQNYGDSATL

SEQ ID NO: 8188 - protein, 10 aa, Severe acute respiratory syndrome coronavirus 2
SATLPKGIMM

SEQ ID NO: 8189 - protein, 10 aa, Severe acute respiratory syndrome coronavirus 2
TLPKGIMMNV

SEQ ID NO: 8190 - protein, 10 aa, Severe acute respiratory syndrome coronavirus 2
LPKGIMMNVA

SEQ ID NO: 8191 - protein, 10 aa, Severe acute respiratory syndrome coronavirus 2
KGIMMNVAKY

SEQ ID NO: 8192 - protein, 10 aa, Severe acute respiratory syndrome coronavirus 2
MMNVAKYTQL

SEQ ID NO: 8193 - protein, 10 aa, Severe acute respiratory syndrome coronavirus 2
VAKYTQLCQY

SEQ ID NO: 8194 - protein, 10 aa, Severe acute respiratory syndrome coronavirus 2
AKYTQLCQYL

SEQ ID NO: 8195 - protein, 10 aa, Severe acute respiratory syndrome coronavirus 2
KYTQLCQYLN

SEQ ID NO: 8196 - protein, 10 aa, Severe acute respiratory syndrome coronavirus 2
TQLCQYLNTL

SEQ ID NO: 8197 - protein, 10 aa, Severe acute respiratory syndrome coronavirus 2
LCQYLNTLTL

SEQ ID NO: 8198 - protein, 10 aa, Severe acute respiratory syndrome coronavirus 2
CQYLNTLTLA

SEQ ID NO: 8199 - protein, 10 aa, Severe acute respiratory syndrome coronavirus 2
QYLNTLTLAV

SEQ ID NO: 8200 - protein, 10 aa, Severe acute respiratory syndrome coronavirus 2
YLNTLTLAVP

SEQ ID NO: 8201 - protein, 10 aa, Severe acute respiratory syndrome coronavirus 2
LNTLTLAVPY

SEQ ID NO: 8202 - protein, 10 aa, Severe acute respiratory syndrome coronavirus 2
TLTLAVPYNM

SEQ ID NO: 8203 - protein, 10 aa, Severe acute respiratory syndrome coronavirus 2
LTLAVPYNMR

SEQ ID NO: 8204 - protein, 10 aa, Severe acute respiratory syndrome coronavirus 2
TLAVPYNMRV

SEQ ID NO: 8205 - protein, 10 aa, Severe acute respiratory syndrome coronavirus 2
LAVPYNMRVI

SEQ ID NO: 8206 - protein, 10 aa, Severe acute respiratory syndrome coronavirus 2
VPYNMRVIHF

SEQ ID NO: 8207 - protein, 10 aa, Severe acute respiratory syndrome coronavirus 2
YNMRVIHFGA

SEQ ID NO: 8208 - protein, 10 aa, Severe acute respiratory syndrome coronavirus 2
VIHFGAGSDK

SEQ ID NO: 8209 - protein, 10 aa, Severe acute respiratory syndrome coronavirus 2
KGVAPGTAVL

SEQ ID NO: 8210 - protein, 10 aa, Severe acute respiratory syndrome coronavirus 2
GVAPGTAVLR

SEQ ID NO: 8211 - protein, 10 aa, Severe acute respiratory syndrome coronavirus 2
APGTAVLRQW

SEQ ID NO: 8212 - protein, 10 aa, Severe acute respiratory syndrome coronavirus 2
LRQWLPTGTL

SEQ ID NO: 8213 - protein, 10 aa, Severe acute respiratory syndrome coronavirus 2
RQWLPTGTLL

SEQ ID NO: 8214 - protein, 10 aa, Severe acute respiratory syndrome coronavirus 2
QWLPTGTLLV

SEQ ID NO: 8215 - protein, 10 aa, Severe acute respiratory syndrome coronavirus 2
LLVDSDLNDF

SEQ ID NO: 8216 - protein, 10 aa, Severe acute respiratory syndrome coronavirus 2
LVDSDLNDFV

SEQ ID NO: 8217 - protein, 10 aa, Severe acute respiratory syndrome coronavirus 2
SDLNDFVSDA

SEQ ID NO: 8218 - protein, 10 aa, Severe acute respiratory syndrome coronavirus 2
DFVSDADSTL

SEQ ID NO: 8219 - protein, 10 aa, Severe acute respiratory syndrome coronavirus 2
FVSDADSTLI

SEQ ID NO: 8220 - protein, 10 aa, Severe acute respiratory syndrome coronavirus 2
STLIGDCATV

SEQ ID NO: 8221 - protein, 10 aa, Severe acute respiratory syndrome coronavirus 2
TLIGDCATVH

SEQ ID NO: 8222 - protein, 10 aa, Severe acute respiratory syndrome coronavirus 2
DCATVHTANK

SEQ ID NO: 8223 - protein, 10 aa, Severe acute respiratory syndrome coronavirus 2
CATVHTANKW

SEQ ID NO: 8224 - protein, 10 aa, Severe acute respiratory syndrome coronavirus 2
HTANKWDLII

SEQ ID NO: 8225 - protein, 10 aa, Severe acute respiratory syndrome coronavirus 2
KWDLIISDMY

SEQ ID NO: 8226 - protein, 10 aa, Severe acute respiratory syndrome coronavirus 2
LIISDMYDPK

SEQ ID NO: 8227 - protein, 10 aa, Severe acute respiratory syndrome coronavirus 2
TKENDSKEGF

SEQ ID NO: 8228 - protein, 10 aa, Severe acute respiratory syndrome coronavirus 2
KENDSKEGFF

SEQ ID NO: 8229 - protein, 10 aa, Severe acute respiratory syndrome coronavirus 2
DSKEGFFTYI

SEQ ID NO: 8230 - protein, 10 aa, Severe acute respiratory syndrome coronavirus 2
TYICGFIQQK

SEQ ID NO: 8231 - protein, 10 aa, Severe acute respiratory syndrome coronavirus 2
YICGFIQQKL

SEQ ID NO: 8232 - protein, 10 aa, Severe acute respiratory syndrome coronavirus 2
KLALGGSVAI

SEQ ID NO: 8233 - protein, 10 aa, Severe acute respiratory syndrome coronavirus 2
LALGGSVAIK

SEQ ID NO: 8234 - protein, 10 aa, Severe acute respiratory syndrome coronavirus 2
ALGGSVAIKI

SEQ ID NO: 8235 - protein, 10 aa, Severe acute respiratory syndrome coronavirus 2
VAIKITEHSW

SEQ ID NO: 8236 - protein, 10 aa, Severe acute respiratory syndrome coronavirus 2
TEHSWNADLY

SEQ ID NO: 8237 - protein, 10 aa, Severe acute respiratory syndrome coronavirus 2
EHSWNADLYK

SEQ ID NO: 8238 - protein, 10 aa, Severe acute respiratory syndrome coronavirus 2
HSWNADLYKL

SEQ ID NO: 8239 - protein, 10 aa, Severe acute respiratory syndrome coronavirus 2
SWNADLYKLM

SEQ ID NO: 8240 - protein, 10 aa, Severe acute respiratory syndrome coronavirus 2
ADLYKLMGHF

SEQ ID NO: 8241 - protein, 10 aa, Severe acute respiratory syndrome coronavirus 2
LYKLMGHFAW

SEQ ID NO: 8242 - protein, 10 aa, Severe acute respiratory syndrome coronavirus 2
YKLMGHFAWW

SEQ ID NO: 8243 - protein, 10 aa, Severe acute respiratory syndrome coronavirus 2
KLMGHFAWWT

SEQ ID NO: 8244 - protein, 10 aa, Severe acute respiratory syndrome coronavirus 2
LMGHFAWWTA

SEQ ID NO: 8245 - protein, 10 aa, Severe acute respiratory syndrome coronavirus 2
MGHFAWWTAF

SEQ ID NO: 8246 - protein, 10 aa, Severe acute respiratory syndrome coronavirus 2
WTAFVTNVNA

SEQ ID NO: 8247 - protein, 10 aa, Severe acute respiratory syndrome coronavirus 2
NVNASSSEAF

SEQ ID NO: 8248 - protein, 10 aa, Severe acute respiratory syndrome coronavirus 2
NASSSEAFLI

SEQ ID NO: 8249 - protein, 10 aa, Severe acute respiratory syndrome coronavirus 2
SEAFLIGCNY

SEQ ID NO: 8250 - protein, 10 aa, Severe acute respiratory syndrome coronavirus 2
EAFLIGCNYL

SEQ ID NO: 8251 - protein, 10 aa, Severe acute respiratory syndrome coronavirus 2
FLIGCNYLGK

SEQ ID NO: 8252 - protein, 10 aa, Severe acute respiratory syndrome coronavirus 2
IGCNYLGKPR

SEQ ID NO: 8253 - protein, 10 aa, Severe acute respiratory syndrome coronavirus 2
NYLGKPREQI

SEQ ID NO: 8254 - protein, 10 aa, Severe acute respiratory syndrome coronavirus 2
KPREQIDGYV

SEQ ID NO: 8255 - protein, 10 aa, Severe acute respiratory syndrome coronavirus 2
REQIDGYVMH

SEQ ID NO: 8256 - protein, 10 aa, Severe acute respiratory syndrome coronavirus 2
EQIDGYVMHA

SEQ ID NO: 8257 - protein, 10 aa, Severe acute respiratory syndrome coronavirus 2
IDGYVMHANY

SEQ ID NO: 8258 - protein, 10 aa, Severe acute respiratory syndrome coronavirus 2
GYVMHANYIF

SEQ ID NO: 8259 - protein, 10 aa, Severe acute respiratory syndrome coronavirus 2
YVMHANYIFW

SEQ ID NO: 8260 - protein, 10 aa, Severe acute respiratory syndrome coronavirus 2
VMHANYIFWR

SEQ ID NO: 8261 - protein, 10 aa, Severe acute respiratory syndrome coronavirus 2
YIFWRNTNPI

SEQ ID NO: 8262 - protein, 10 aa, Severe acute respiratory syndrome coronavirus 2
FWRNTNPIQL

SEQ ID NO: 8263 - protein, 10 aa, Severe acute respiratory syndrome coronavirus 2
NTNPIQLSSY

SEQ ID NO: 8264 - protein, 10 aa, Severe acute respiratory syndrome coronavirus 2
NPIQLSSYSL

SEQ ID NO: 8265 - protein, 10 aa, Severe acute respiratory syndrome coronavirus 2
PIQLSSYSLF

SEQ ID NO: 8266 - protein, 10 aa, Severe acute respiratory syndrome coronavirus 2
IQLSSYSLFD

SEQ ID NO: 8267 - protein, 10 aa, Severe acute respiratory syndrome coronavirus 2
QLSSYSLFDM

SEQ ID NO: 8268 - protein, 10 aa, Severe acute respiratory syndrome coronavirus 2
SSYSLFDMSK

SEQ ID NO: 8269 - protein, 10 aa, Severe acute respiratory syndrome coronavirus 2
SYSLFDMSKF

SEQ ID NO: 8270 - protein, 10 aa, Severe acute respiratory syndrome coronavirus 2
SLFDMSKFPL

SEQ ID NO: 8271 - protein, 10 aa, Severe acute respiratory syndrome coronavirus 2
LFDMSKFPLK

SEQ ID NO: 8272 - protein, 10 aa, Severe acute respiratory syndrome coronavirus 2
FDMSKFPLKL

SEQ ID NO: 8273 - protein, 10 aa, Severe acute respiratory syndrome coronavirus 2
DMSKFPLKLR

SEQ ID NO: 8274 - protein, 10 aa, Severe acute respiratory syndrome coronavirus 2
MSKFPLKLRG

SEQ ID NO: 8275 - protein, 10 aa, Severe acute respiratory syndrome coronavirus 2
KFPLKLRGTA

SEQ ID NO: 8276 - protein, 10 aa, Severe acute respiratory syndrome coronavirus 2
FPLKLRGTAV

SEQ ID NO: 8277 - protein, 10 aa, Severe acute respiratory syndrome coronavirus 2
KLRGTAVMSL

SEQ ID NO: 8278 - protein, 10 aa, Severe acute respiratory syndrome coronavirus 2
LRGTAVMSLK

SEQ ID NO: 8279 - protein, 10 aa, Severe acute respiratory syndrome coronavirus 2
SLKEGQINDM

SEQ ID NO: 8280 - protein, 10 aa, Severe acute respiratory syndrome coronavirus 2
KEGQINDMIL

SEQ ID NO: 8281 - protein, 10 aa, Severe acute respiratory syndrome coronavirus 2
GQINDMILSL

SEQ ID NO: 8282 - protein, 10 aa, Severe acute respiratory syndrome coronavirus 2
QINDMILSLL

SEQ ID NO: 8283 - protein, 10 aa, Severe acute respiratory syndrome coronavirus 2
NDMILSLLSK

SEQ ID NO: 8284 - protein, 10 aa, Severe acute respiratory syndrome coronavirus 2
MILSLLSKGR

SEQ ID NO: 8285 - protein, 10 aa, Severe acute respiratory syndrome coronavirus 2
ILSLLSKGRL

SEQ ID NO: 8286 - protein, 10 aa, Severe acute respiratory syndrome coronavirus 2
LSLLSKGRLI

SEQ ID NO: 8287 - protein, 10 aa, Severe acute respiratory syndrome coronavirus 2
SLLSKGRLII

SEQ ID NO: 8288 - protein, 10 aa, Severe acute respiratory syndrome coronavirus 2
LLSKGRLIIR

SEQ ID NO: 8289 - protein, 10 aa, Severe acute respiratory syndrome coronavirus 2
GRLIIRENNR

SEQ ID NO: 8290 - protein, 10 aa, Severe acute respiratory syndrome coronavirus 2
RLIIRENNRV

SEQ ID NO: 8291 - protein, 10 aa, Severe acute respiratory syndrome coronavirus 2
RENNRVVISS

SEQ ID NO: 8292 - protein, 10 aa, Severe acute respiratory syndrome coronavirus 2
NRVVISSDVL

SEQ ID NO: 8293 - protein, 10 aa, Severe acute respiratory syndrome coronavirus 2
RVVISSDVLV

SEQ ID NO: 8294 - protein, 11 aa, Severe acute respiratory syndrome coronavirus 2
GTGTSTDVVYR

SEQ ID NO: 8295 - protein, 11 aa, Severe acute respiratory syndrome coronavirus 2
VYRAFDIYNDK

SEQ ID NO: 8296 - protein, 11 aa, Severe acute respiratory syndrome coronavirus 2
FDIYNDKVAGF

SEQ ID NO: 8297 - protein, 11 aa, Severe acute respiratory syndrome coronavirus 2
IYNDKVAGFAK

SEQ ID NO: 8298 - protein, 11 aa, Severe acute respiratory syndrome coronavirus 2
YNDKVAGFAKF

SEQ ID NO: 8299 - protein, 11 aa, Severe acute respiratory syndrome coronavirus 2
DKVAGFAKFLK

SEQ ID NO: 8300 - protein, 11 aa, Severe acute respiratory syndrome coronavirus 2
KVAGFAKFLKT

SEQ ID NO: 8301 - protein, 11 aa, Severe acute respiratory syndrome coronavirus 2
FAKFLKTNCCR

SEQ ID NO: 8302 - protein, 11 aa, Severe acute respiratory syndrome coronavirus 2
AKFLKTNCCRF

SEQ ID NO: 8303 - protein, 11 aa, Severe acute respiratory syndrome coronavirus 2
DDNLIDSYFVV

SEQ ID NO: 8304 - protein, 11 aa, Severe acute respiratory syndrome coronavirus 2
NLIDSYFVVKR

SEQ ID NO: 8305 - protein, 11 aa, Severe acute respiratory syndrome coronavirus 2
DSYFVVKRHTF

SEQ ID NO: 8306 - protein, 11 aa, Severe acute respiratory syndrome coronavirus 2
SYFVVKRHTFS

SEQ ID NO: 8307 - protein, 11 aa, Severe acute respiratory syndrome coronavirus 2
FVVKRHTFSNY

SEQ ID NO: 8308 - protein, 11 aa, Severe acute respiratory syndrome coronavirus 2
FSNYQHEETIY

SEQ ID NO: 8309 - protein, 11 aa, Severe acute respiratory syndrome coronavirus 2
NYQHEETIYNL

SEQ ID NO: 8310 - protein, 11 aa, Severe acute respiratory syndrome coronavirus 2
YQHEETIYNLL

SEQ ID NO: 8311 - protein, 11 aa, Severe acute respiratory syndrome coronavirus 2
IYNLLKDCPAV

SEQ ID NO: 8312 - protein, 11 aa, Severe acute respiratory syndrome coronavirus 2
YNLLKDCPAVA

SEQ ID NO: 8313 - protein, 11 aa, Severe acute respiratory syndrome coronavirus 2
CPAVAKHDFFK

SEQ ID NO: 8314 - protein, 11 aa, Severe acute respiratory syndrome coronavirus 2
AVAKHDFFKFR

SEQ ID NO: 8315 - protein, 11 aa, Severe acute respiratory syndrome coronavirus 2
FRIDGDMVPHI

SEQ ID NO: 8316 - protein, 11 aa, Severe acute respiratory syndrome coronavirus 2
ISRQRLTKYTM

SEQ ID NO: 8317 - protein, 11 aa, Severe acute respiratory syndrome coronavirus 2
RLTKYTMADLV

SEQ ID NO: 8318 - protein, 11 aa, Severe acute respiratory syndrome coronavirus 2
LTKYTMADLVY

SEQ ID NO: 8319 - protein, 11 aa, Severe acute respiratory syndrome coronavirus 2
TKYTMADLVYA

SEQ ID NO: 8320 - protein, 11 aa, Severe acute respiratory syndrome coronavirus 2
KYTMADLVYAL

SEQ ID NO: 8321 - protein, 11 aa, Severe acute respiratory syndrome coronavirus 2
YTMADLVYALR

SEQ ID NO: 8322 - protein, 11 aa, Severe acute respiratory syndrome coronavirus 2
TMADLVYALRH

SEQ ID NO: 8323 - protein, 11 aa, Severe acute respiratory syndrome coronavirus 2
MADLVYALRHF

SEQ ID NO: 8324 - protein, 11 aa, Severe acute respiratory syndrome coronavirus 2
RHFDEGNCDTL

SEQ ID NO: 8325 - protein, 11 aa, Severe acute respiratory syndrome coronavirus 2
VTYNCCDDDYF

SEQ ID NO: 8326 - protein, 11 aa, Severe acute respiratory syndrome coronavirus 2
DYFNKKDWYDF

SEQ ID NO: 8327 - protein, 11 aa, Severe acute respiratory syndrome coronavirus 2
FVENPDILRVY

SEQ ID NO: 8328 - protein, 11 aa, Severe acute respiratory syndrome coronavirus 2
ILRVYANLGER

SEQ ID NO: 8329 - protein, 11 aa, Severe acute respiratory syndrome coronavirus 2
RVYANLGERVR

SEQ ID NO: 8330 - protein, 11 aa, Severe acute respiratory syndrome coronavirus 2
LGERVRQALLK

SEQ ID NO: 8331 - protein, 11 aa, Severe acute respiratory syndrome coronavirus 2
RVRQALLKTVQ

SEQ ID NO: 8332 - protein, 11 aa, Severe acute respiratory syndrome coronavirus 2
VRQALLKTVQF

SEQ ID NO: 8333 - protein, 11 aa, Severe acute respiratory syndrome coronavirus 2
LKTVQFCDAMR

SEQ ID NO: 8334 - protein, 11 aa, Severe acute respiratory syndrome coronavirus 2
DAMRNAGIVGV

SEQ ID NO: 8335 - protein, 11 aa, Severe acute respiratory syndrome coronavirus 2
AMRNAGIVGVL

SEQ ID NO: 8336 - protein, 11 aa, Severe acute respiratory syndrome coronavirus 2
VDSYYSLLMPI

SEQ ID NO: 8337 - protein, 11 aa, Severe acute respiratory syndrome coronavirus 2
YYSLLMPILTL

SEQ ID NO: 8338 - protein, 11 aa, Severe acute respiratory syndrome coronavirus 2
YSLLMPILTLT

SEQ ID NO: 8339 - protein, 11 aa, Severe acute respiratory syndrome coronavirus 2
SLLMPILTLTR

SEQ ID NO: 8340 - protein, 11 aa, Severe acute respiratory syndrome coronavirus 2
LLMPILTLTRA

SEQ ID NO: 8341 - protein, 11 aa, Severe acute respiratory syndrome coronavirus 2
LMPILTLTRAL

SEQ ID NO: 8342 - protein, 11 aa, Severe acute respiratory syndrome coronavirus 2
MPILTLTRALT

SEQ ID NO: 8343 - protein, 11 aa, Severe acute respiratory syndrome coronavirus 2
SHVDTDLTKPY

SEQ ID NO: 8344 - protein, 11 aa, Severe acute respiratory syndrome coronavirus 2
TKPYIKWDLLK

SEQ ID NO: 8345 - protein, 11 aa, Severe acute respiratory syndrome coronavirus 2
DLLKYDFTEER

SEQ ID NO: 8346 - protein, 11 aa, Severe acute respiratory syndrome coronavirus 2
KYDFTEERLKL

SEQ ID NO: 8347 - protein, 11 aa, Severe acute respiratory syndrome coronavirus 2
ERLKLFDRYFK

SEQ ID NO: 8348 - protein, 11 aa, Severe acute respiratory syndrome coronavirus 2
RLKLFDRYFKY

SEQ ID NO: 8349 - protein, 11 aa, Severe acute respiratory syndrome coronavirus 2
DRYFKYWDQTY

SEQ ID NO: 8350 - protein, 11 aa, Severe acute respiratory syndrome coronavirus 2
RYFKYWDQTYH

SEQ ID NO: 8351 - protein, 11 aa, Severe acute respiratory syndrome coronavirus 2
CLDDRCILHCA

SEQ ID NO: 8352 - protein, 11 aa, Severe acute respiratory syndrome coronavirus 2
RCILHCANFNV

SEQ ID NO: 8353 - protein, 11 aa, Severe acute respiratory syndrome coronavirus 2
ANFNVLFSTVF

SEQ ID NO: 8354 - protein, 11 aa, Severe acute respiratory syndrome coronavirus 2
FNVLFSTVFPP

SEQ ID NO: 8355 - protein, 11 aa, Severe acute respiratory syndrome coronavirus 2
VLFSTVFPPTS

SEQ ID NO: 8356 - protein, 11 aa, Severe acute respiratory syndrome coronavirus 2
LFSTVFPPTSF

SEQ ID NO: 8357 - protein, 11 aa, Severe acute respiratory syndrome coronavirus 2
TVFPPTSFGPL

SEQ ID NO: 8358 - protein, 11 aa, Severe acute respiratory syndrome coronavirus 2
VFPPTSFGPLV

SEQ ID NO: 8359 - protein, 11 aa, Severe acute respiratory syndrome coronavirus 2
FPPTSFGPLVR

SEQ ID NO: 8360 - protein, 11 aa, Severe acute respiratory syndrome coronavirus 2
TSFGPLVRKIF

SEQ ID NO: 8361 - protein, 11 aa, Severe acute respiratory syndrome coronavirus 2
VRKIFVDGVPF

SEQ ID NO: 8362 - protein, 11 aa, Severe acute respiratory syndrome coronavirus 2
RKIFVDGVPFV

SEQ ID NO: 8363 - protein, 11 aa, Severe acute respiratory syndrome coronavirus 2
KIFVDGVPFVV

SEQ ID NO: 8364 - protein, 11 aa, Severe acute respiratory syndrome coronavirus 2
VPFVVSTGYHF

SEQ ID NO: 8365 - protein, 11 aa, Severe acute respiratory syndrome coronavirus 2
PFVVSTGYHFR

SEQ ID NO: 8366 - protein, 11 aa, Severe acute respiratory syndrome coronavirus 2
FVVSTGYHFRE

SEQ ID NO: 8367 - protein, 11 aa, Severe acute respiratory syndrome coronavirus 2
RELGVVHNQDV

SEQ ID NO: 8368 - protein, 11 aa, Severe acute respiratory syndrome coronavirus 2
HSSRLSFKELL

SEQ ID NO: 8369 - protein, 11 aa, Severe acute respiratory syndrome coronavirus 2
SSRLSFKELLV

SEQ ID NO: 8370 - protein, 11 aa, Severe acute respiratory syndrome coronavirus 2
SRLSFKELLVY

SEQ ID NO: 8371 - protein, 11 aa, Severe acute respiratory syndrome coronavirus 2
RLSFKELLVYA

SEQ ID NO: 8372 - protein, 11 aa, Severe acute respiratory syndrome coronavirus 2
KELLVYAADPA

SEQ ID NO: 8373 - protein, 11 aa, Severe acute respiratory syndrome coronavirus 2
AMHAASGNLLL

SEQ ID NO: 8374 - protein, 11 aa, Severe acute respiratory syndrome coronavirus 2
LLDKRTTCFSV

SEQ ID NO: 8375 - protein, 11 aa, Severe acute respiratory syndrome coronavirus 2
KRTTCFSVAAL

SEQ ID NO: 8376 - protein, 11 aa, Severe acute respiratory syndrome coronavirus 2
CFSVAALTNNV

SEQ ID NO: 8377 - protein, 11 aa, Severe acute respiratory syndrome coronavirus 2
SVAALTNNVAF

SEQ ID NO: 8378 - protein, 11 aa, Severe acute respiratory syndrome coronavirus 2
ALTNNVAFQTV

SEQ ID NO: 8379 - protein, 11 aa, Severe acute respiratory syndrome coronavirus 2
LTNNVAFQTVK

SEQ ID NO: 8380 - protein, 11 aa, Severe acute respiratory syndrome coronavirus 2
VAFQTVKPGNF

SEQ ID NO: 8381 - protein, 11 aa, Severe acute respiratory syndrome coronavirus 2
FYDFAVSKGFF

SEQ ID NO: 8382 - protein, 11 aa, Severe acute respiratory syndrome coronavirus 2
YDFAVSKGFFK

SEQ ID NO: 8383 - protein, 11 aa, Severe acute respiratory syndrome coronavirus 2
GSSVELKHFFF

SEQ ID NO: 8384 - protein, 11 aa, Severe acute respiratory syndrome coronavirus 2
SSVELKHFFFA

SEQ ID NO: 8385 - protein, 11 aa, Severe acute respiratory syndrome coronavirus 2
FFFAQDGNAAI

SEQ ID NO: 8386 - protein, 11 aa, Severe acute respiratory syndrome coronavirus 2
AQDGNAAISDY

SEQ ID NO: 8387 - protein, 11 aa, Severe acute respiratory syndrome coronavirus 2
NAAISDYDYYR

SEQ ID NO: 8388 - protein, 11 aa, Severe acute respiratory syndrome coronavirus 2
AAISDYDYYRY

SEQ ID NO: 8389 - protein, 11 aa, Severe acute respiratory syndrome coronavirus 2
ISDYDYYRYNL

SEQ ID NO: 8390 - protein, 11 aa, Severe acute respiratory syndrome coronavirus 2
YDYYRYNLPTM

SEQ ID NO: 8391 - protein, 11 aa, Severe acute respiratory syndrome coronavirus 2
YRYNLPTMCDI

SEQ ID NO: 8392 - protein, 11 aa, Severe acute respiratory syndrome coronavirus 2
RYNLPTMCDIR

SEQ ID NO: 8393 - protein, 11 aa, Severe acute respiratory syndrome coronavirus 2
NLPTMCDIRQL

SEQ ID NO: 8394 - protein, 11 aa, Severe acute respiratory syndrome coronavirus 2
LPTMCDIRQLL

SEQ ID NO: 8395 - protein, 11 aa, Severe acute respiratory syndrome coronavirus 2
TMCDIRQLLFV

SEQ ID NO: 8396 - protein, 11 aa, Severe acute respiratory syndrome coronavirus 2
IRQLLFVVEVV

SEQ ID NO: 8397 - protein, 11 aa, Severe acute respiratory syndrome coronavirus 2
KYFDCYDGGCI

SEQ ID NO: 8398 - protein, 11 aa, Severe acute respiratory syndrome coronavirus 2
LDKSAGFPFNK

SEQ ID NO: 8399 - protein, 11 aa, Severe acute respiratory syndrome coronavirus 2
DKSAGFPFNKW

SEQ ID NO: 8400 - protein, 11 aa, Severe acute respiratory syndrome coronavirus 2
KSAGFPFNKWG

SEQ ID NO: 8401 - protein, 11 aa, Severe acute respiratory syndrome coronavirus 2
SAGFPFNKWGK

SEQ ID NO: 8402 - protein, 11 aa, Severe acute respiratory syndrome coronavirus 2
GFPFNKWGKAR

SEQ ID NO: 8403 - protein, 11 aa, Severe acute respiratory syndrome coronavirus 2
FPFNKWGKARL

SEQ ID NO: 8404 - protein, 11 aa, Severe acute respiratory syndrome coronavirus 2
WGKARLYYDSM

SEQ ID NO: 8405 - protein, 11 aa, Severe acute respiratory syndrome coronavirus 2
KARLYYDSMSY

SEQ ID NO: 8406 - protein, 11 aa, Severe acute respiratory syndrome coronavirus 2
RLYYDSMSYED

SEQ ID NO: 8407 - protein, 11 aa, Severe acute respiratory syndrome coronavirus 2
SMSYEDQDALF

SEQ ID NO: 8408 - protein, 11 aa, Severe acute respiratory syndrome coronavirus 2
MSYEDQDALFA

SEQ ID NO: 8409 - protein, 11 aa, Severe acute respiratory syndrome coronavirus 2
SYEDQDALFAY

SEQ ID NO: 8410 - protein, 11 aa, Severe acute respiratory syndrome coronavirus 2
DALFAYTKRNV

SEQ ID NO: 8411 - protein, 11 aa, Severe acute respiratory syndrome coronavirus 2
ALFAYTKRNVI

SEQ ID NO: 8412 - protein, 11 aa, Severe acute respiratory syndrome coronavirus 2
AYTKRNVIPTI

SEQ ID NO: 8413 - protein, 11 aa, Severe acute respiratory syndrome coronavirus 2
KRNVIPTITQM

SEQ ID NO: 8414 - protein, 11 aa, Severe acute respiratory syndrome coronavirus 2
VIPTITQMNLK

SEQ ID NO: 8415 - protein, 11 aa, Severe acute respiratory syndrome coronavirus 2
QMNLKYAISAK

SEQ ID NO: 8416 - protein, 11 aa, Severe acute respiratory syndrome coronavirus 2
NLKYAISAKNR

SEQ ID NO: 8417 - protein, 11 aa, Severe acute respiratory syndrome coronavirus 2
KYAISAKNRAR

SEQ ID NO: 8418 - protein, 11 aa, Severe acute respiratory syndrome coronavirus 2
GVSICSTMTNR

SEQ ID NO: 8419 - protein, 11 aa, Severe acute respiratory syndrome coronavirus 2
STMTNRQFHQK

SEQ ID NO: 8420 - protein, 11 aa, Severe acute respiratory syndrome coronavirus 2
TNRQFHQKLLK

SEQ ID NO: 8421 - protein, 11 aa, Severe acute respiratory syndrome coronavirus 2
RQFHQKLLKSI

SEQ ID NO: 8422 - protein, 11 aa, Severe acute respiratory syndrome coronavirus 2
FHQKLLKSIAA

SEQ ID NO: 8423 - protein, 11 aa, Severe acute respiratory syndrome coronavirus 2
QKLLKSIAATR

SEQ ID NO: 8424 - protein, 11 aa, Severe acute respiratory syndrome coronavirus 2
LLKSIAATRGA

SEQ ID NO: 8425 - protein, 11 aa, Severe acute respiratory syndrome coronavirus 2
KSIAATRGATV

SEQ ID NO: 8426 - protein, 11 aa, Severe acute respiratory syndrome coronavirus 2
RGATVVIGTSK

SEQ ID NO: 8427 - protein, 11 aa, Severe acute respiratory syndrome coronavirus 2
ATVVIGTSKFY

SEQ ID NO: 8428 - protein, 11 aa, Severe acute respiratory syndrome coronavirus 2
VIGTSKFYGGW

SEQ ID NO: 8429 - protein, 11 aa, Severe acute respiratory syndrome coronavirus 2
SKFYGGWHNML

SEQ ID NO: 8430 - protein, 11 aa, Severe acute respiratory syndrome coronavirus 2
KFYGGWHNMLK

SEQ ID NO: 8431 - protein, 11 aa, Severe acute respiratory syndrome coronavirus 2
VYSDVENPHLM

SEQ ID NO: 8432 - protein, 11 aa, Severe acute respiratory syndrome coronavirus 2
SDVENPHLMGW

SEQ ID NO: 8433 - protein, 11 aa, Severe acute respiratory syndrome coronavirus 2
NPHLMGWDYPK

SEQ ID NO: 8434 - protein, 11 aa, Severe acute respiratory syndrome coronavirus 2
YPKCDRAMPNM

SEQ ID NO: 8435 - protein, 11 aa, Severe acute respiratory syndrome coronavirus 2
KCDRAMPNMLR

SEQ ID NO: 8436 - protein, 11 aa, Severe acute respiratory syndrome coronavirus 2
RAMPNMLRIMA

SEQ ID NO: 8437 - protein, 11 aa, Severe acute respiratory syndrome coronavirus 2
MPNMLRIMASL

SEQ ID NO: 8438 - protein, 11 aa, Severe acute respiratory syndrome coronavirus 2
NMLRIMASLVL

SEQ ID NO: 8439 - protein, 11 aa, Severe acute respiratory syndrome coronavirus 2
MLRIMASLVLA

SEQ ID NO: 8440 - protein, 11 aa, Severe acute respiratory syndrome coronavirus 2
LRIMASLVLAR

SEQ ID NO: 8441 - protein, 11 aa, Severe acute respiratory syndrome coronavirus 2
RIMASLVLARK

SEQ ID NO: 8442 - protein, 11 aa, Severe acute respiratory syndrome coronavirus 2
LARKHTTCCSL

SEQ ID NO: 8443 - protein, 11 aa, Severe acute respiratory syndrome coronavirus 2
KHTTCCSLSHR

SEQ ID NO: 8444 - protein, 11 aa, Severe acute respiratory syndrome coronavirus 2
HTTCCSLSHRF

SEQ ID NO: 8445 - protein, 11 aa, Severe acute respiratory syndrome coronavirus 2
TTCCSLSHRFY

SEQ ID NO: 8446 - protein, 11 aa, Severe acute respiratory syndrome coronavirus 2
TCCSLSHRFYR

SEQ ID NO: 8447 - protein, 11 aa, Severe acute respiratory syndrome coronavirus 2
CCSLSHRFYRL

SEQ ID NO: 8448 - protein, 11 aa, Severe acute respiratory syndrome coronavirus 2
CSLSHRFYRLA

SEQ ID NO: 8449 - protein, 11 aa, Severe acute respiratory syndrome coronavirus 2
FYRLANECAQV

SEQ ID NO: 8450 - protein, 11 aa, Severe acute respiratory syndrome coronavirus 2
YRLANECAQVL

SEQ ID NO: 8451 - protein, 11 aa, Severe acute respiratory syndrome coronavirus 2
SEMVMCGGSLY

SEQ ID NO: 8452 - protein, 11 aa, Severe acute respiratory syndrome coronavirus 2
EMVMCGGSLYV

SEQ ID NO: 8453 - protein, 11 aa, Severe acute respiratory syndrome coronavirus 2
MVMCGGSLYVK

SEQ ID NO: 8454 - protein, 11 aa, Severe acute respiratory syndrome coronavirus 2
TTAYANSVFNI

SEQ ID NO: 8455 - protein, 11 aa, Severe acute respiratory syndrome coronavirus 2
QAVTANVNALL

SEQ ID NO: 8456 - protein, 11 aa, Severe acute respiratory syndrome coronavirus 2
STDGNKIADKY

SEQ ID NO: 8457 - protein, 11 aa, Severe acute respiratory syndrome coronavirus 2
KYVRNLQHRLY

SEQ ID NO: 8458 - protein, 11 aa, Severe acute respiratory syndrome coronavirus 2
LQHRLYECLYR

SEQ ID NO: 8459 - protein, 11 aa, Severe acute respiratory syndrome coronavirus 2
HRLYECLYRNR

SEQ ID NO: 8460 - protein, 11 aa, Severe acute respiratory syndrome coronavirus 2
RLYECLYRNRD

SEQ ID NO: 8461 - protein, 11 aa, Severe acute respiratory syndrome coronavirus 2
DVDTDFVNEFY

SEQ ID NO: 8462 - protein, 11 aa, Severe acute respiratory syndrome coronavirus 2
DTDFVNEFYAY

SEQ ID NO: 8463 - protein, 11 aa, Severe acute respiratory syndrome coronavirus 2
TDFVNEFYAYL

SEQ ID NO: 8464 - protein, 11 aa, Severe acute respiratory syndrome coronavirus 2
DFVNEFYAYLR

SEQ ID NO: 8465 - protein, 11 aa, Severe acute respiratory syndrome coronavirus 2
FVNEFYAYLRK

SEQ ID NO: 8466 - protein, 11 aa, Severe acute respiratory syndrome coronavirus 2
NEFYAYLRKHF

SEQ ID NO: 8467 - protein, 11 aa, Severe acute respiratory syndrome coronavirus 2
FYAYLRKHFSM

SEQ ID NO: 8468 - protein, 11 aa, Severe acute respiratory syndrome coronavirus 2
YAYLRKHFSMM

SEQ ID NO: 8469 - protein, 11 aa, Severe acute respiratory syndrome coronavirus 2
AYLRKHFSMMI

SEQ ID NO: 8470 - protein, 11 aa, Severe acute respiratory syndrome coronavirus 2
YLRKHFSMMIL

SEQ ID NO: 8471 - protein, 11 aa, Severe acute respiratory syndrome coronavirus 2
FSMMILSDDAV

SEQ ID NO: 8472 - protein, 11 aa, Severe acute respiratory syndrome coronavirus 2
SMMILSDDAVV

SEQ ID NO: 8473 - protein, 11 aa, Severe acute respiratory syndrome coronavirus 2
MILSDDAVVCF

SEQ ID NO: 8474 - protein, 11 aa, Severe acute respiratory syndrome coronavirus 2
DDAVVCFNSTY

SEQ ID NO: 8475 - protein, 11 aa, Severe acute respiratory syndrome coronavirus 2
FNSTYASQGLV

SEQ ID NO: 8476 - protein, 11 aa, Severe acute respiratory syndrome coronavirus 2
TYASQGLVASI

SEQ ID NO: 8477 - protein, 11 aa, Severe acute respiratory syndrome coronavirus 2
SQGLVASIKNF

SEQ ID NO: 8478 - protein, 11 aa, Severe acute respiratory syndrome coronavirus 2
QGLVASIKNFK

SEQ ID NO: 8479 - protein, 11 aa, Severe acute respiratory syndrome coronavirus 2
LVASIKNFKSV

SEQ ID NO: 8480 - protein, 11 aa, Severe acute respiratory syndrome coronavirus 2
ASIKNFKSVLY

SEQ ID NO: 8481 - protein, 11 aa, Severe acute respiratory syndrome coronavirus 2
SIKNFKSVLYY

SEQ ID NO: 8482 - protein, 11 aa, Severe acute respiratory syndrome coronavirus 2
KSVLYYQNNVF

SEQ ID NO: 8483 - protein, 11 aa, Severe acute respiratory syndrome coronavirus 2
SVLYYQNNVFM

SEQ ID NO: 8484 - protein, 11 aa, Severe acute respiratory syndrome coronavirus 2
YQNNVFMSEAK

SEQ ID NO: 8485 - protein, 11 aa, Severe acute respiratory syndrome coronavirus 2
FMSEAKCWTET

SEQ ID NO: 8486 - protein, 11 aa, Severe acute respiratory syndrome coronavirus 2
SEAKCWTETDL

SEQ ID NO: 8487 - protein, 11 aa, Severe acute respiratory syndrome coronavirus 2
GPHEFCSQHTM

SEQ ID NO: 8488 - protein, 11 aa, Severe acute respiratory syndrome coronavirus 2
HEFCSQHTMLV

SEQ ID NO: 8489 - protein, 11 aa, Severe acute respiratory syndrome coronavirus 2
TMLVKQGDDYV

SEQ ID NO: 8490 - protein, 11 aa, Severe acute respiratory syndrome coronavirus 2
MLVKQGDDYVY

SEQ ID NO: 8491 - protein, 11 aa, Severe acute respiratory syndrome coronavirus 2
KQGDDYVYLPY

SEQ ID NO: 8492 - protein, 11 aa, Severe acute respiratory syndrome coronavirus 2
YVYLPYPDPSR

SEQ ID NO: 8493 - protein, 11 aa, Severe acute respiratory syndrome coronavirus 2
VYLPYPDPSRI

SEQ ID NO: 8494 - protein, 11 aa, Severe acute respiratory syndrome coronavirus 2
YLPYPDPSRIL

SEQ ID NO: 8495 - protein, 11 aa, Severe acute respiratory syndrome coronavirus 2
KTDGTLMIERF

SEQ ID NO: 8496 - protein, 11 aa, Severe acute respiratory syndrome coronavirus 2
GTLMIERFVSL

SEQ ID NO: 8497 - protein, 11 aa, Severe acute respiratory syndrome coronavirus 2
TLMIERFVSLA

SEQ ID NO: 8498 - protein, 11 aa, Severe acute respiratory syndrome coronavirus 2
LMIERFVSLAI

SEQ ID NO: 8499 - protein, 11 aa, Severe acute respiratory syndrome coronavirus 2
FVSLAIDAYPL

SEQ ID NO: 8500 - protein, 11 aa, Severe acute respiratory syndrome coronavirus 2
SLAIDAYPLTK

SEQ ID NO: 8501 - protein, 11 aa, Severe acute respiratory syndrome coronavirus 2
YPLTKHPNQEY

SEQ ID NO: 8502 - protein, 11 aa, Severe acute respiratory syndrome coronavirus 2
NQEYADVFHLY

SEQ ID NO: 8503 - protein, 11 aa, Severe acute respiratory syndrome coronavirus 2
QEYADVFHLYL

SEQ ID NO: 8504 - protein, 11 aa, Severe acute respiratory syndrome coronavirus 2
YADVFHLYLQY

SEQ ID NO: 8505 - protein, 11 aa, Severe acute respiratory syndrome coronavirus 2
DVFHLYLQYIR

SEQ ID NO: 8506 - protein, 11 aa, Severe acute respiratory syndrome coronavirus 2
VFHLYLQYIRK

SEQ ID NO: 8507 - protein, 11 aa, Severe acute respiratory syndrome coronavirus 2
FHLYLQYIRKL

SEQ ID NO: 8508 - protein, 11 aa, Severe acute respiratory syndrome coronavirus 2
KLHDELTGHML

SEQ ID NO: 8509 - protein, 11 aa, Severe acute respiratory syndrome coronavirus 2
DELTGHMLDMY

SEQ ID NO: 8510 - protein, 11 aa, Severe acute respiratory syndrome coronavirus 2
LTGHMLDMYSV

SEQ ID NO: 8511 - protein, 11 aa, Severe acute respiratory syndrome coronavirus 2
GHMLDMYSVML

SEQ ID NO: 8512 - protein, 11 aa, Severe acute respiratory syndrome coronavirus 2
HMLDMYSVMLT

SEQ ID NO: 8513 - protein, 11 aa, Severe acute respiratory syndrome coronavirus 2
SVMLTNDNTSR

SEQ ID NO: 8514 - protein, 11 aa, Severe acute respiratory syndrome coronavirus 2
VMLTNDNTSRY

SEQ ID NO: 8515 - protein, 11 aa, Severe acute respiratory syndrome coronavirus 2
MLTNDNTSRYW

SEQ ID NO: 8516 - protein, 11 aa, Severe acute respiratory syndrome coronavirus 2
NTSRYWEPEFY

SEQ ID NO: 8517 - protein, 11 aa, Severe acute respiratory syndrome coronavirus 2
SRYWEPEFYEA

SEQ ID NO: 8518 - protein, 11 aa, Severe acute respiratory syndrome coronavirus 2
RYWEPEFYEAM

SEQ ID NO: 8519 - protein, 11 aa, Severe acute respiratory syndrome coronavirus 2
YWEPEFYEAMY

SEQ ID NO: 8520 - protein, 11 aa, Severe acute respiratory syndrome coronavirus 2
FYEAMYTPHTV

SEQ ID NO: 8521 - protein, 11 aa, Severe acute respiratory syndrome coronavirus 2
YEAMYTPHTVL

SEQ ID NO: 8522 - protein, 11 aa, Severe acute respiratory syndrome coronavirus 2
AMYTPHTVLQA

SEQ ID NO: 8523 - protein, 11 aa, Severe acute respiratory syndrome coronavirus 2
MYTPHTVLQAV

SEQ ID NO: 8524 - protein, 11 aa, Severe acute respiratory syndrome coronavirus 2
TPHTVLQAVGA

SEQ ID NO: 8525 - protein, 11 aa, Severe acute respiratory syndrome coronavirus 2
HTVLQAVGACV

SEQ ID NO: 8526 - protein, 11 aa, Severe acute respiratory syndrome coronavirus 2
CVLCNSQTSLR

SEQ ID NO: 8527 - protein, 11 aa, Severe acute respiratory syndrome coronavirus 2
QTSLRCGACIR

SEQ ID NO: 8528 - protein, 11 aa, Severe acute respiratory syndrome coronavirus 2
TSLRCGACIRR

SEQ ID NO: 8529 - protein, 11 aa, Severe acute respiratory syndrome coronavirus 2
LRCGACIRRPF

SEQ ID NO: 8530 - protein, 11 aa, Severe acute respiratory syndrome coronavirus 2
RRPFLCCKCCY

SEQ ID NO: 8531 - protein, 11 aa, Severe acute respiratory syndrome coronavirus 2
FLCCKCCYDHV

SEQ ID NO: 8532 - protein, 11 aa, Severe acute respiratory syndrome coronavirus 2
SHKLVLSVNPY

SEQ ID NO: 8533 - protein, 11 aa, Severe acute respiratory syndrome coronavirus 2
HKLVLSVNPYV

SEQ ID NO: 8534 - protein, 11 aa, Severe acute respiratory syndrome coronavirus 2
KLVLSVNPYVC

SEQ ID NO: 8535 - protein, 11 aa, Severe acute respiratory syndrome coronavirus 2
VLSVNPYVCNA

SEQ ID NO: 8536 - protein, 11 aa, Severe acute respiratory syndrome coronavirus 2
VTQLYLGGMSY

SEQ ID NO: 8537 - protein, 11 aa, Severe acute respiratory syndrome coronavirus 2
TQLYLGGMSYY

SEQ ID NO: 8538 - protein, 11 aa, Severe acute respiratory syndrome coronavirus 2
LYLGGMSYYCK

SEQ ID NO: 8539 - protein, 11 aa, Severe acute respiratory syndrome coronavirus 2
YLGGMSYYCKS

SEQ ID NO: 8540 - protein, 11 aa, Severe acute respiratory syndrome coronavirus 2
SYYCKSHKPPI

SEQ ID NO: 8541 - protein, 11 aa, Severe acute respiratory syndrome coronavirus 2
YCKSHKPPISF

SEQ ID NO: 8542 - protein, 11 aa, Severe acute respiratory syndrome coronavirus 2
KSHKPPISFPL

SEQ ID NO: 8543 - protein, 11 aa, Severe acute respiratory syndrome coronavirus 2
HKPPISFPLCA

SEQ ID NO: 8544 - protein, 11 aa, Severe acute respiratory syndrome coronavirus 2
SFPLCANGQVF

SEQ ID NO: 8545 - protein, 11 aa, Severe acute respiratory syndrome coronavirus 2
LCANGQVFGLY

SEQ ID NO: 8546 - protein, 11 aa, Severe acute respiratory syndrome coronavirus 2
CANGQVFGLYK

SEQ ID NO: 8547 - protein, 11 aa, Severe acute respiratory syndrome coronavirus 2
ATCDWTNAGDY

SEQ ID NO: 8548 - protein, 11 aa, Severe acute respiratory syndrome coronavirus 2
DYILANTCTER

SEQ ID NO: 8549 - protein, 11 aa, Severe acute respiratory syndrome coronavirus 2
YILANTCTERL

SEQ ID NO: 8550 - protein, 11 aa, Severe acute respiratory syndrome coronavirus 2
ILANTCTERLK

SEQ ID NO: 8551 - protein, 11 aa, Severe acute respiratory syndrome coronavirus 2
RLKLFAAETLK

SEQ ID NO: 8552 - protein, 11 aa, Severe acute respiratory syndrome coronavirus 2
KLFAAETLKAT

SEQ ID NO: 8553 - protein, 11 aa, Severe acute respiratory syndrome coronavirus 2
ETLKATEETFK

SEQ ID NO: 8554 - protein, 11 aa, Severe acute respiratory syndrome coronavirus 2
TLKATEETFKL

SEQ ID NO: 8555 - protein, 11 aa, Severe acute respiratory syndrome coronavirus 2
KATEETFKLSY

SEQ ID NO: 8556 - protein, 11 aa, Severe acute respiratory syndrome coronavirus 2
TEETFKLSYGI

SEQ ID NO: 8557 - protein, 11 aa, Severe acute respiratory syndrome coronavirus 2
ETFKLSYGIAT

SEQ ID NO: 8558 - protein, 11 aa, Severe acute respiratory syndrome coronavirus 2
TFKLSYGIATV

SEQ ID NO: 8559 - protein, 11 aa, Severe acute respiratory syndrome coronavirus 2
FKLSYGIATVR

SEQ ID NO: 8560 - protein, 11 aa, Severe acute respiratory syndrome coronavirus 2
SYGIATVREVL

SEQ ID NO: 8561 - protein, 11 aa, Severe acute respiratory syndrome coronavirus 2
REVLSDRELHL

SEQ ID NO: 8562 - protein, 11 aa, Severe acute respiratory syndrome coronavirus 2
VLSDRELHLSW

SEQ ID NO: 8563 - protein, 11 aa, Severe acute respiratory syndrome coronavirus 2
SDRELHLSWEV

SEQ ID NO: 8564 - protein, 11 aa, Severe acute respiratory syndrome coronavirus 2
LHLSWEVGKPR

SEQ ID NO: 8565 - protein, 11 aa, Severe acute respiratory syndrome coronavirus 2
KPRPPLNRNYV

SEQ ID NO: 8566 - protein, 11 aa, Severe acute respiratory syndrome coronavirus 2
LNRNYVFTGYR

SEQ ID NO: 8567 - protein, 11 aa, Severe acute respiratory syndrome coronavirus 2
NYVFTGYRVTK

SEQ ID NO: 8568 - protein, 11 aa, Severe acute respiratory syndrome coronavirus 2
YRVTKNSKVQI

SEQ ID NO: 8569 - protein, 11 aa, Severe acute respiratory syndrome coronavirus 2
KVQIGEYTFEK

SEQ ID NO: 8570 - protein, 11 aa, Severe acute respiratory syndrome coronavirus 2
KGDYGDAVVYR

SEQ ID NO: 8571 - protein, 11 aa, Severe acute respiratory syndrome coronavirus 2
DAVVYRGTTTY

SEQ ID NO: 8572 - protein, 11 aa, Severe acute respiratory syndrome coronavirus 2
AVVYRGTTTYK

SEQ ID NO: 8573 - protein, 11 aa, Severe acute respiratory syndrome coronavirus 2
VVYRGTTTYKL

SEQ ID NO: 8574 - protein, 11 aa, Severe acute respiratory syndrome coronavirus 2
TTYKLNVGDYF

SEQ ID NO: 8575 - protein, 11 aa, Severe acute respiratory syndrome coronavirus 2
TYKLNVGDYFV

SEQ ID NO: 8576 - protein, 11 aa, Severe acute respiratory syndrome coronavirus 2
YKLNVGDYFVL

SEQ ID NO: 8577 - protein, 11 aa, Severe acute respiratory syndrome coronavirus 2
KLNVGDYFVLT

SEQ ID NO: 8578 - protein, 11 aa, Severe acute respiratory syndrome coronavirus 2
DYFVLTSHTVM

SEQ ID NO: 8579 - protein, 11 aa, Severe acute respiratory syndrome coronavirus 2
FVLTSHTVMPL

SEQ ID NO: 8580 - protein, 11 aa, Severe acute respiratory syndrome coronavirus 2
HTVMPLSAPTL

SEQ ID NO: 8581 - protein, 11 aa, Severe acute respiratory syndrome coronavirus 2
TVMPLSAPTLV

SEQ ID NO: 8582 - protein, 11 aa, Severe acute respiratory syndrome coronavirus 2
APTLVPQEHYV

SEQ ID NO: 8583 - protein, 11 aa, Severe acute respiratory syndrome coronavirus 2
TLVPQEHYVRI

SEQ ID NO: 8584 - protein, 11 aa, Severe acute respiratory syndrome coronavirus 2
QEHYVRITGLY

SEQ ID NO: 8585 - protein, 11 aa, Severe acute respiratory syndrome coronavirus 2
LYPTLNISDEF

SEQ ID NO: 8586 - protein, 11 aa, Severe acute respiratory syndrome coronavirus 2
SDEFSSNVANY

SEQ ID NO: 8587 - protein, 11 aa, Severe acute respiratory syndrome coronavirus 2
DEFSSNVANYQ

SEQ ID NO: 8588 - protein, 11 aa, Severe acute respiratory syndrome coronavirus 2
EFSSNVANYQK

SEQ ID NO: 8589 - protein, 11 aa, Severe acute respiratory syndrome coronavirus 2
FSSNVANYQKV

SEQ ID NO: 8590 - protein, 11 aa, Severe acute respiratory syndrome coronavirus 2
STLQGPPGTGK

SEQ ID NO: 8591 - protein, 11 aa, Severe acute respiratory syndrome coronavirus 2
KSHFAIGLALY

SEQ ID NO: 8592 - protein, 11 aa, Severe acute respiratory syndrome coronavirus 2
SHFAIGLALYY

SEQ ID NO: 8593 - protein, 11 aa, Severe acute respiratory syndrome coronavirus 2
HFAIGLALYYP

SEQ ID NO: 8594 - protein, 11 aa, Severe acute respiratory syndrome coronavirus 2
IGLALYYPSAR

SEQ ID NO: 8595 - protein, 11 aa, Severe acute respiratory syndrome coronavirus 2
GLALYYPSARI

SEQ ID NO: 8596 - protein, 11 aa, Severe acute respiratory syndrome coronavirus 2
ALYYPSARIVY

SEQ ID NO: 8597 - protein, 11 aa, Severe acute respiratory syndrome coronavirus 2
YYPSARIVYTA

SEQ ID NO: 8598 - protein, 11 aa, Severe acute respiratory syndrome coronavirus 2
YPSARIVYTAC

SEQ ID NO: 8599 - protein, 11 aa, Severe acute respiratory syndrome coronavirus 2
IVYTACSHAAV

SEQ ID NO: 8600 - protein, 11 aa, Severe acute respiratory syndrome coronavirus 2
YTACSHAAVDA

SEQ ID NO: 8601 - protein, 11 aa, Severe acute respiratory syndrome coronavirus 2
AVDALCEKALK

SEQ ID NO: 8602 - protein, 11 aa, Severe acute respiratory syndrome coronavirus 2
LKYLPIDKCSR

SEQ ID NO: 8603 - protein, 11 aa, Severe acute respiratory syndrome coronavirus 2
KYLPIDKCSRI

SEQ ID NO: 8604 - protein, 11 aa, Severe acute respiratory syndrome coronavirus 2
RIIPARARVEC

SEQ ID NO: 8605 - protein, 11 aa, Severe acute respiratory syndrome coronavirus 2
ARARVECFDKF

SEQ ID NO: 8606 - protein, 11 aa, Severe acute respiratory syndrome coronavirus 2
RARVECFDKFK

SEQ ID NO: 8607 - protein, 11 aa, Severe acute respiratory syndrome coronavirus 2
ARVECFDKFKV

SEQ ID NO: 8608 - protein, 11 aa, Severe acute respiratory syndrome coronavirus 2
KFKVNSTLEQY

SEQ ID NO: 8609 - protein, 11 aa, Severe acute respiratory syndrome coronavirus 2
KVNSTLEQYVF

SEQ ID NO: 8610 - protein, 11 aa, Severe acute respiratory syndrome coronavirus 2
STLEQYVFCTV

SEQ ID NO: 8611 - protein, 11 aa, Severe acute respiratory syndrome coronavirus 2
LEQYVFCTVNA

SEQ ID NO: 8612 - protein, 11 aa, Severe acute respiratory syndrome coronavirus 2
EQYVFCTVNAL

SEQ ID NO: 8613 - protein, 11 aa, Severe acute respiratory syndrome coronavirus 2
ALPETTADIVV

SEQ ID NO: 8614 - protein, 11 aa, Severe acute respiratory syndrome coronavirus 2
LPETTADIVVF

SEQ ID NO: 8615 - protein, 11 aa, Severe acute respiratory syndrome coronavirus 2
TTADIVVFDEI

SEQ ID NO: 8616 - protein, 11 aa, Severe acute respiratory syndrome coronavirus 2
VFDEISMATNY

SEQ ID NO: 8617 - protein, 11 aa, Severe acute respiratory syndrome coronavirus 2
ISMATNYDLSV

SEQ ID NO: 8618 - protein, 11 aa, Severe acute respiratory syndrome coronavirus 2
SMATNYDLSVV

SEQ ID NO: 8619 - protein, 11 aa, Severe acute respiratory syndrome coronavirus 2
TNYDLSVVNAR

SEQ ID NO: 8620 - protein, 11 aa, Severe acute respiratory syndrome coronavirus 2
NYDLSVVNARL

SEQ ID NO: 8621 - protein, 11 aa, Severe acute respiratory syndrome coronavirus 2
YDLSVVNARLR

SEQ ID NO: 8622 - protein, 11 aa, Severe acute respiratory syndrome coronavirus 2
ARLRAKHYVYI

SEQ ID NO: 8623 - protein, 11 aa, Severe acute respiratory syndrome coronavirus 2
HYVYIGDPAQL

SEQ ID NO: 8624 - protein, 11 aa, Severe acute respiratory syndrome coronavirus 2
APRTLLTKGTL

SEQ ID NO: 8625 - protein, 11 aa, Severe acute respiratory syndrome coronavirus 2
LLTKGTLEPEY

SEQ ID NO: 8626 - protein, 11 aa, Severe acute respiratory syndrome coronavirus 2
LTKGTLEPEYF

SEQ ID NO: 8627 - protein, 11 aa, Severe acute respiratory syndrome coronavirus 2
GTLEPEYFNSV

SEQ ID NO: 8628 - protein, 11 aa, Severe acute respiratory syndrome coronavirus 2
EYFNSVCRLMK

SEQ ID NO: 8629 - protein, 11 aa, Severe acute respiratory syndrome coronavirus 2
RLMKTIGPDMF

SEQ ID NO: 8630 - protein, 11 aa, Severe acute respiratory syndrome coronavirus 2
LMKTIGPDMFL

SEQ ID NO: 8631 - protein, 11 aa, Severe acute respiratory syndrome coronavirus 2
GPDMFLGTCRR

SEQ ID NO: 8632 - protein, 11 aa, Severe acute respiratory syndrome coronavirus 2
RRCPAEIVDTV

SEQ ID NO: 8633 - protein, 11 aa, Severe acute respiratory syndrome coronavirus 2
CPAEIVDTVSA

SEQ ID NO: 8634 - protein, 11 aa, Severe acute respiratory syndrome coronavirus 2
AEIVDTVSALV

SEQ ID NO: 8635 - protein, 11 aa, Severe acute respiratory syndrome coronavirus 2
EIVDTVSALVY

SEQ ID NO: 8636 - protein, 11 aa, Severe acute respiratory syndrome coronavirus 2
DTVSALVYDNK

SEQ ID NO: 8637 - protein, 11 aa, Severe acute respiratory syndrome coronavirus 2
LVYDNKLKAHK

SEQ ID NO: 8638 - protein, 11 aa, Severe acute respiratory syndrome coronavirus 2
KSAQCFKMFYK

SEQ ID NO: 8639 - protein, 11 aa, Severe acute respiratory syndrome coronavirus 2
SAQCFKMFYKG

SEQ ID NO: 8640 - protein, 11 aa, Severe acute respiratory syndrome coronavirus 2
AQCFKMFYKGV

SEQ ID NO: 8641 - protein, 11 aa, Severe acute respiratory syndrome coronavirus 2
ITHDVSSAINR

SEQ ID NO: 8642 - protein, 11 aa, Severe acute respiratory syndrome coronavirus 2
AINRPQIGVVR

SEQ ID NO: 8643 - protein, 11 aa, Severe acute respiratory syndrome coronavirus 2
NRPQIGVVREF

SEQ ID NO: 8644 - protein, 11 aa, Severe acute respiratory syndrome coronavirus 2
RPQIGVVREFL

SEQ ID NO: 8645 - protein, 11 aa, Severe acute respiratory syndrome coronavirus 2
QIGVVREFLTR

SEQ ID NO: 8646 - protein, 11 aa, Severe acute respiratory syndrome coronavirus 2
VVREFLTRNPA

SEQ ID NO: 8647 - protein, 11 aa, Severe acute respiratory syndrome coronavirus 2
REFLTRNPAWR

SEQ ID NO: 8648 - protein, 11 aa, Severe acute respiratory syndrome coronavirus 2
TRNPAWRKAVF

SEQ ID NO: 8649 - protein, 11 aa, Severe acute respiratory syndrome coronavirus 2
AWRKAVFISPY

SEQ ID NO: 8650 - protein, 11 aa, Severe acute respiratory syndrome coronavirus 2
FISPYNSQNAV

SEQ ID NO: 8651 - protein, 11 aa, Severe acute respiratory syndrome coronavirus 2
TETAHSCNVNR

SEQ ID NO: 8652 - protein, 11 aa, Severe acute respiratory syndrome coronavirus 2
ETAHSCNVNRF

SEQ ID NO: 8653 - protein, 11 aa, Severe acute respiratory syndrome coronavirus 2
NVNRFNVAITR

SEQ ID NO: 8654 - protein, 11 aa, Severe acute respiratory syndrome coronavirus 2
NRFNVAITRAK

SEQ ID NO: 8655 - protein, 11 aa, Severe acute respiratory syndrome coronavirus 2
TRAKVGILCIM

SEQ ID NO: 8656 - protein, 11 aa, Severe acute respiratory syndrome coronavirus 2
KVGILCIMSDR

SEQ ID NO: 8657 - protein, 11 aa, Severe acute respiratory syndrome coronavirus 2
IMSDRDLYDKL

SEQ ID NO: 8658 - protein, 11 aa, Severe acute respiratory syndrome coronavirus 2
DLYDKLQFTSL

SEQ ID NO: 8659 - protein, 11 aa, Severe acute respiratory syndrome coronavirus 2
YDKLQFTSLEI

SEQ ID NO: 8660 - protein, 11 aa, Severe acute respiratory syndrome coronavirus 2
KLQFTSLEIPR

SEQ ID NO: 8661 - protein, 11 aa, Severe acute respiratory syndrome coronavirus 2
LQFTSLEIPRR

SEQ ID NO: 8662 - protein, 11 aa, Severe acute respiratory syndrome coronavirus 2
LEIPRRNVATL

SEQ ID NO: 8663 - protein, 11 aa, Severe acute respiratory syndrome coronavirus 2
IPRRNVATLQA

SEQ ID NO: 8664 - protein, 11 aa, Severe acute respiratory syndrome coronavirus 2
ATLQAENVTGL

SEQ ID NO: 8665 - protein, 11 aa, Severe acute respiratory syndrome coronavirus 2
TLQAENVTGLF

SEQ ID NO: 8666 - protein, 11 aa, Severe acute respiratory syndrome coronavirus 2
LQAENVTGLFK

SEQ ID NO: 8667 - protein, 11 aa, Severe acute respiratory syndrome coronavirus 2
NVTGLFKDCSK

SEQ ID NO: 8668 - protein, 11 aa, Severe acute respiratory syndrome coronavirus 2
KVITGLHPTQA

SEQ ID NO: 8669 - protein, 11 aa, Severe acute respiratory syndrome coronavirus 2
GLHPTQAPTHL

SEQ ID NO: 8670 - protein, 11 aa, Severe acute respiratory syndrome coronavirus 2
HPTQAPTHLSV

SEQ ID NO: 8671 - protein, 11 aa, Severe acute respiratory syndrome coronavirus 2
GLCVDIPGIPK

SEQ ID NO: 8672 - protein, 11 aa, Severe acute respiratory syndrome coronavirus 2
IPKDMTYRRLI

SEQ ID NO: 8673 - protein, 11 aa, Severe acute respiratory syndrome coronavirus 2
KDMTYRRLISM

SEQ ID NO: 8674 - protein, 11 aa, Severe acute respiratory syndrome coronavirus 2
TYRRLISMMGF

SEQ ID NO: 8675 - protein, 11 aa, Severe acute respiratory syndrome coronavirus 2
YRRLISMMGFK

SEQ ID NO: 8676 - protein, 11 aa, Severe acute respiratory syndrome coronavirus 2
RRLISMMGFKM

SEQ ID NO: 8677 - protein, 11 aa, Severe acute respiratory syndrome coronavirus 2
LISMMGFKMNY

SEQ ID NO: 8678 - protein, 11 aa, Severe acute respiratory syndrome coronavirus 2
SMMGFKMNYQV

SEQ ID NO: 8679 - protein, 11 aa, Severe acute respiratory syndrome coronavirus 2
MMGFKMNYQVN

SEQ ID NO: 8680 - protein, 11 aa, Severe acute respiratory syndrome coronavirus 2
MNYQVNGYPNM

SEQ ID NO: 8681 - protein, 11 aa, Severe acute respiratory syndrome coronavirus 2
NYQVNGYPNMF

SEQ ID NO: 8682 - protein, 11 aa, Severe acute respiratory syndrome coronavirus 2
YQVNGYPNMFI

SEQ ID NO: 8683 - protein, 11 aa, Severe acute respiratory syndrome coronavirus 2
VNGYPNMFITR

SEQ ID NO: 8684 - protein, 11 aa, Severe acute respiratory syndrome coronavirus 2
YPNMFITREEA

SEQ ID NO: 8685 - protein, 11 aa, Severe acute respiratory syndrome coronavirus 2
NMFITREEAIR

SEQ ID NO: 8686 - protein, 11 aa, Severe acute respiratory syndrome coronavirus 2
FITREEAIRHV

SEQ ID NO: 8687 - protein, 11 aa, Severe acute respiratory syndrome coronavirus 2
ITREEAIRHVR

SEQ ID NO: 8688 - protein, 11 aa, Severe acute respiratory syndrome coronavirus 2
REEAIRHVRAW

SEQ ID NO: 8689 - protein, 11 aa, Severe acute respiratory syndrome coronavirus 2
RHVRAWIGFDV

SEQ ID NO: 8690 - protein, 11 aa, Severe acute respiratory syndrome coronavirus 2
TREAVGTNLPL

SEQ ID NO: 8691 - protein, 11 aa, Severe acute respiratory syndrome coronavirus 2
LPLQLGFSTGV

SEQ ID NO: 8692 - protein, 11 aa, Severe acute respiratory syndrome coronavirus 2
LQLGFSTGVNL

SEQ ID NO: 8693 - protein, 11 aa, Severe acute respiratory syndrome coronavirus 2
QLGFSTGVNLV

SEQ ID NO: 8694 - protein, 11 aa, Severe acute respiratory syndrome coronavirus 2
GYVDTPNNTDF

SEQ ID NO: 8695 - protein, 11 aa, Severe acute respiratory syndrome coronavirus 2
NNTDFSRVSAK

SEQ ID NO: 8696 - protein, 11 aa, Severe acute respiratory syndrome coronavirus 2
VSAKPPPGDQF

SEQ ID NO: 8697 - protein, 11 aa, Severe acute respiratory syndrome coronavirus 2
SAKPPPGDQFK

SEQ ID NO: 8698 - protein, 11 aa, Severe acute respiratory syndrome coronavirus 2
QFKHLIPLMYK

SEQ ID NO: 8699 - protein, 11 aa, Severe acute respiratory syndrome coronavirus 2
PLMYKGLPWNV

SEQ ID NO: 8700 - protein, 11 aa, Severe acute respiratory syndrome coronavirus 2
LMYKGLPWNVV

SEQ ID NO: 8701 - protein, 11 aa, Severe acute respiratory syndrome coronavirus 2
MYKGLPWNVVR

SEQ ID NO: 8702 - protein, 11 aa, Severe acute respiratory syndrome coronavirus 2
YKGLPWNVVRL

SEQ ID NO: 8703 - protein, 11 aa, Severe acute respiratory syndrome coronavirus 2
KGLPWNVVRLK

SEQ ID NO: 8704 - protein, 11 aa, Severe acute respiratory syndrome coronavirus 2
NVVRLKIVQML

SEQ ID NO: 8705 - protein, 11 aa, Severe acute respiratory syndrome coronavirus 2
KIVQMLSDTLK

SEQ ID NO: 8706 - protein, 11 aa, Severe acute respiratory syndrome coronavirus 2
TLKNLSDRVVF

SEQ ID NO: 8707 - protein, 11 aa, Severe acute respiratory syndrome coronavirus 2
LKNLSDRVVFV

SEQ ID NO: 8708 - protein, 11 aa, Severe acute respiratory syndrome coronavirus 2
KNLSDRVVFVL

SEQ ID NO: 8709 - protein, 11 aa, Severe acute respiratory syndrome coronavirus 2
NLSDRVVFVLW

SEQ ID NO: 8710 - protein, 11 aa, Severe acute respiratory syndrome coronavirus 2
LSDRVVFVLWA

SEQ ID NO: 8711 - protein, 11 aa, Severe acute respiratory syndrome coronavirus 2
RVVFVLWAHGF

SEQ ID NO: 8712 - protein, 11 aa, Severe acute respiratory syndrome coronavirus 2
VFVLWAHGFEL

SEQ ID NO: 8713 - protein, 11 aa, Severe acute respiratory syndrome coronavirus 2
FVLWAHGFELT

SEQ ID NO: 8714 - protein, 11 aa, Severe acute respiratory syndrome coronavirus 2
VLWAHGFELTS

SEQ ID NO: 8715 - protein, 11 aa, Severe acute respiratory syndrome coronavirus 2
WAHGFELTSMK

SEQ ID NO: 8716 - protein, 11 aa, Severe acute respiratory syndrome coronavirus 2
GFELTSMKYFV

SEQ ID NO: 8717 - protein, 11 aa, Severe acute respiratory syndrome coronavirus 2
MKYFVKIGPER

SEQ ID NO: 8718 - protein, 11 aa, Severe acute respiratory syndrome coronavirus 2
KYFVKIGPERT

SEQ ID NO: 8719 - protein, 11 aa, Severe acute respiratory syndrome coronavirus 2
ATCFSTASDTY

SEQ ID NO: 8720 - protein, 11 aa, Severe acute respiratory syndrome coronavirus 2
FSTASDTYACW

SEQ ID NO: 8721 - protein, 11 aa, Severe acute respiratory syndrome coronavirus 2
SDTYACWHHSI

SEQ ID NO: 8722 - protein, 11 aa, Severe acute respiratory syndrome coronavirus 2
TYACWHHSIGF

SEQ ID NO: 8723 - protein, 11 aa, Severe acute respiratory syndrome coronavirus 2
WHHSIGFDYVY

SEQ ID NO: 8724 - protein, 11 aa, Severe acute respiratory syndrome coronavirus 2
YNPFMIDVQQW

SEQ ID NO: 8725 - protein, 11 aa, Severe acute respiratory syndrome coronavirus 2
FMIDVQQWGFT

SEQ ID NO: 8726 - protein, 11 aa, Severe acute respiratory syndrome coronavirus 2
LQSNHDLYCQV

SEQ ID NO: 8727 - protein, 11 aa, Severe acute respiratory syndrome coronavirus 2
HVASCDAIMTR

SEQ ID NO: 8728 - protein, 11 aa, Severe acute respiratory syndrome coronavirus 2
MTRCLAVHECF

SEQ ID NO: 8729 - protein, 11 aa, Severe acute respiratory syndrome coronavirus 2
TRCLAVHECFV

SEQ ID NO: 8730 - protein, 11 aa, Severe acute respiratory syndrome coronavirus 2
CLAVHECFVKR

SEQ ID NO: 8731 - protein, 11 aa, Severe acute respiratory syndrome coronavirus 2
FVKRVDWTIEY

SEQ ID NO: 8732 - protein, 11 aa, Severe acute respiratory syndrome coronavirus 2
KRVDWTIEYPI

SEQ ID NO: 8733 - protein, 11 aa, Severe acute respiratory syndrome coronavirus 2
NAACRKVQHMV

SEQ ID NO: 8734 - protein, 11 aa, Severe acute respiratory syndrome coronavirus 2
MVVKAALLADK

SEQ ID NO: 8735 - protein, 11 aa, Severe acute respiratory syndrome coronavirus 2
VVKAALLADKF

SEQ ID NO: 8736 - protein, 11 aa, Severe acute respiratory syndrome coronavirus 2
KAALLADKFPV

SEQ ID NO: 8737 - protein, 11 aa, Severe acute respiratory syndrome coronavirus 2
AALLADKFPVL

SEQ ID NO: 8738 - protein, 11 aa, Severe acute respiratory syndrome coronavirus 2
KFYDAQPCSDK

SEQ ID NO: 8739 - protein, 11 aa, Severe acute respiratory syndrome coronavirus 2
LFYSYATHSDK

SEQ ID NO: 8740 - protein, 11 aa, Severe acute respiratory syndrome coronavirus 2
FYSYATHSDKF

SEQ ID NO: 8741 - protein, 11 aa, Severe acute respiratory syndrome coronavirus 2
YSYATHSDKFT

SEQ ID NO: 8742 - protein, 11 aa, Severe acute respiratory syndrome coronavirus 2
SDKFTDGVCLF

SEQ ID NO: 8743 - protein, 11 aa, Severe acute respiratory syndrome coronavirus 2
VCLFWNCNVDR

SEQ ID NO: 8744 - protein, 11 aa, Severe acute respiratory syndrome coronavirus 2
DRYPANSIVCR

SEQ ID NO: 8745 - protein, 11 aa, Severe acute respiratory syndrome coronavirus 2
RYPANSIVCRF

SEQ ID NO: 8746 - protein, 11 aa, Severe acute respiratory syndrome coronavirus 2
ANSIVCRFDTR

SEQ ID NO: 8747 - protein, 11 aa, Severe acute respiratory syndrome coronavirus 2
CRFDTRVLSNL

SEQ ID NO: 8748 - protein, 11 aa, Severe acute respiratory syndrome coronavirus 2
FDTRVLSNLNL

SEQ ID NO: 8749 - protein, 11 aa, Severe acute respiratory syndrome coronavirus 2
VNKHAFHTPAF

SEQ ID NO: 8750 - protein, 11 aa, Severe acute respiratory syndrome coronavirus 2
FHTPAFDKSAF

SEQ ID NO: 8751 - protein, 11 aa, Severe acute respiratory syndrome coronavirus 2
HTPAFDKSAFV

SEQ ID NO: 8752 - protein, 11 aa, Severe acute respiratory syndrome coronavirus 2
AFDKSAFVNLK

SEQ ID NO: 8753 - protein, 11 aa, Severe acute respiratory syndrome coronavirus 2
SAFVNLKQLPF

SEQ ID NO: 8754 - protein, 11 aa, Severe acute respiratory syndrome coronavirus 2
AFVNLKQLPFF

SEQ ID NO: 8755 - protein, 11 aa, Severe acute respiratory syndrome coronavirus 2
FVNLKQLPFFY

SEQ ID NO: 8756 - protein, 11 aa, Severe acute respiratory syndrome coronavirus 2
VVSDIDYVPLK

SEQ ID NO: 8757 - protein, 11 aa, Severe acute respiratory syndrome coronavirus 2
AVCRHHANEYR

SEQ ID NO: 8758 - protein, 11 aa, Severe acute respiratory syndrome coronavirus 2
ANEYRLYLDAY

SEQ ID NO: 8759 - protein, 11 aa, Severe acute respiratory syndrome coronavirus 2
YRLYLDAYNMM

SEQ ID NO: 8760 - protein, 11 aa, Severe acute respiratory syndrome coronavirus 2
RLYLDAYNMMI

SEQ ID NO: 8761 - protein, 11 aa, Severe acute respiratory syndrome coronavirus 2
YLDAYNMMISA

SEQ ID NO: 8762 - protein, 11 aa, Severe acute respiratory syndrome coronavirus 2
DAYNMMISAGF

SEQ ID NO: 8763 - protein, 11 aa, Severe acute respiratory syndrome coronavirus 2
YNMMISAGFSL

SEQ ID NO: 8764 - protein, 11 aa, Severe acute respiratory syndrome coronavirus 2
NMMISAGFSLW

SEQ ID NO: 8765 - protein, 11 aa, Severe acute respiratory syndrome coronavirus 2
MMISAGFSLWV

SEQ ID NO: 8766 - protein, 11 aa, Severe acute respiratory syndrome coronavirus 2
MISAGFSLWVY

SEQ ID NO: 8767 - protein, 11 aa, Severe acute respiratory syndrome coronavirus 2
ISAGFSLWVYK

SEQ ID NO: 8768 - protein, 11 aa, Severe acute respiratory syndrome coronavirus 2
SLWVYKQFDTY

SEQ ID NO: 8769 - protein, 11 aa, Severe acute respiratory syndrome coronavirus 2
VYKQFDTYNLW

SEQ ID NO: 8770 - protein, 11 aa, Severe acute respiratory syndrome coronavirus 2
KQFDTYNLWNT

SEQ ID NO: 8771 - protein, 11 aa, Severe acute respiratory syndrome coronavirus 2
QFDTYNLWNTF

SEQ ID NO: 8772 - protein, 11 aa, Severe acute respiratory syndrome coronavirus 2
DTYNLWNTFTR

SEQ ID NO: 8773 - protein, 11 aa, Severe acute respiratory syndrome coronavirus 2
TYNLWNTFTRL

SEQ ID NO: 8774 - protein, 11 aa, Severe acute respiratory syndrome coronavirus 2
YNLWNTFTRLQ

SEQ ID NO: 8775 - protein, 11 aa, Severe acute respiratory syndrome coronavirus 2
LWNTFTRLQSL

SEQ ID NO: 8776 - protein, 11 aa, Severe acute respiratory syndrome coronavirus 2
TRLQSLENVAF

SEQ ID NO: 8777 - protein, 11 aa, Severe acute respiratory syndrome coronavirus 2
LQSLENVAFNV

SEQ ID NO: 8778 - protein, 11 aa, Severe acute respiratory syndrome coronavirus 2
LENVAFNVVNK

SEQ ID NO: 8779 - protein, 11 aa, Severe acute respiratory syndrome coronavirus 2
VAFNVVNKGHF

SEQ ID NO: 8780 - protein, 11 aa, Severe acute respiratory syndrome coronavirus 2
EVPVSIINNTV

SEQ ID NO: 8781 - protein, 11 aa, Severe acute respiratory syndrome coronavirus 2
VPVSIINNTVY

SEQ ID NO: 8782 - protein, 11 aa, Severe acute respiratory syndrome coronavirus 2
VSIINNTVYTK

SEQ ID NO: 8783 - protein, 11 aa, Severe acute respiratory syndrome coronavirus 2
SIINNTVYTKV

SEQ ID NO: 8784 - protein, 11 aa, Severe acute respiratory syndrome coronavirus 2
YTKVDGVDVEL

SEQ ID NO: 8785 - protein, 11 aa, Severe acute respiratory syndrome coronavirus 2
ELFENKTTLPV

SEQ ID NO: 8786 - protein, 11 aa, Severe acute respiratory syndrome coronavirus 2
NKTTLPVNVAF

SEQ ID NO: 8787 - protein, 11 aa, Severe acute respiratory syndrome coronavirus 2
TTLPVNVAFEL

SEQ ID NO: 8788 - protein, 11 aa, Severe acute respiratory syndrome coronavirus 2
TLPVNVAFELW

SEQ ID NO: 8789 - protein, 11 aa, Severe acute respiratory syndrome coronavirus 2
LPVNVAFELWA

SEQ ID NO: 8790 - protein, 11 aa, Severe acute respiratory syndrome coronavirus 2
VNVAFELWAKR

SEQ ID NO: 8791 - protein, 11 aa, Severe acute respiratory syndrome coronavirus 2
AFELWAKRNIK

SEQ ID NO: 8792 - protein, 11 aa, Severe acute respiratory syndrome coronavirus 2
IAANTVIWDYK

SEQ ID NO: 8793 - protein, 11 aa, Severe acute respiratory syndrome coronavirus 2
AANTVIWDYKR

SEQ ID NO: 8794 - protein, 11 aa, Severe acute respiratory syndrome coronavirus 2
AHISTIGVCSM

SEQ ID NO: 8795 - protein, 11 aa, Severe acute respiratory syndrome coronavirus 2
STIGVCSMTDI

SEQ ID NO: 8796 - protein, 11 aa, Severe acute respiratory syndrome coronavirus 2
GVCSMTDIAKK

SEQ ID NO: 8797 - protein, 11 aa, Severe acute respiratory syndrome coronavirus 2
ETICAPLTVFF

SEQ ID NO: 8798 - protein, 11 aa, Severe acute respiratory syndrome coronavirus 2
VKGLQPSVGPK

SEQ ID NO: 8799 - protein, 11 aa, Severe acute respiratory syndrome coronavirus 2
QPSVGPKQASL

SEQ ID NO: 8800 - protein, 11 aa, Severe acute respiratory syndrome coronavirus 2
KQASLNGVTLI

SEQ ID NO: 8801 - protein, 11 aa, Severe acute respiratory syndrome coronavirus 2
SLNGVTLIGEA

SEQ ID NO: 8802 - protein, 11 aa, Severe acute respiratory syndrome coronavirus 2
EAVKTQFNYYK

SEQ ID NO: 8803 - protein, 11 aa, Severe acute respiratory syndrome coronavirus 2
AVKTQFNYYKK

SEQ ID NO: 8804 - protein, 11 aa, Severe acute respiratory syndrome coronavirus 2
YFTQSRNLQEF

SEQ ID NO: 8805 - protein, 11 aa, Severe acute respiratory syndrome coronavirus 2
FTQSRNLQEFK

SEQ ID NO: 8806 - protein, 11 aa, Severe acute respiratory syndrome coronavirus 2
QSRNLQEFKPR

SEQ ID NO: 8807 - protein, 11 aa, Severe acute respiratory syndrome coronavirus 2
QEFKPRSQMEI

SEQ ID NO: 8808 - protein, 11 aa, Severe acute respiratory syndrome coronavirus 2
KPRSQMEIDFL

SEQ ID NO: 8809 - protein, 11 aa, Severe acute respiratory syndrome coronavirus 2
RSQMEIDFLEL

SEQ ID NO: 8810 - protein, 11 aa, Severe acute respiratory syndrome coronavirus 2
SQMEIDFLELA

SEQ ID NO: 8811 - protein, 11 aa, Severe acute respiratory syndrome coronavirus 2
LAMDEFIERYK

SEQ ID NO: 8812 - protein, 11 aa, Severe acute respiratory syndrome coronavirus 2
AMDEFIERYKL

SEQ ID NO: 8813 - protein, 11 aa, Severe acute respiratory syndrome coronavirus 2
IERYKLEGYAF

SEQ ID NO: 8814 - protein, 11 aa, Severe acute respiratory syndrome coronavirus 2
KLEGYAFEHIV

SEQ ID NO: 8815 - protein, 11 aa, Severe acute respiratory syndrome coronavirus 2
YAFEHIVYGDF

SEQ ID NO: 8816 - protein, 11 aa, Severe acute respiratory syndrome coronavirus 2
FSHSQLGGLHL

SEQ ID NO: 8817 - protein, 11 aa, Severe acute respiratory syndrome coronavirus 2
SHSQLGGLHLL

SEQ ID NO: 8818 - protein, 11 aa, Severe acute respiratory syndrome coronavirus 2
QLGGLHLLIGL

SEQ ID NO: 8819 - protein, 11 aa, Severe acute respiratory syndrome coronavirus 2
HLLIGLAKRFK

SEQ ID NO: 8820 - protein, 11 aa, Severe acute respiratory syndrome coronavirus 2
GLAKRFKESPF

SEQ ID NO: 8821 - protein, 11 aa, Severe acute respiratory syndrome coronavirus 2
AKRFKESPFEL

SEQ ID NO: 8822 - protein, 11 aa, Severe acute respiratory syndrome coronavirus 2
KRFKESPFELE

SEQ ID NO: 8823 - protein, 11 aa, Severe acute respiratory syndrome coronavirus 2
SPFELEDFIPM

SEQ ID NO: 8824 - protein, 11 aa, Severe acute respiratory syndrome coronavirus 2
FIPMDSTVKNY

SEQ ID NO: 8825 - protein, 11 aa, Severe acute respiratory syndrome coronavirus 2
IPMDSTVKNYF

SEQ ID NO: 8826 - protein, 11 aa, Severe acute respiratory syndrome coronavirus 2
SVIDLLLDDFV

SEQ ID NO: 8827 - protein, 11 aa, Severe acute respiratory syndrome coronavirus 2
IDLLLDDFVEI

SEQ ID NO: 8828 - protein, 11 aa, Severe acute respiratory syndrome coronavirus 2
DLLLDDFVEII

SEQ ID NO: 8829 - protein, 11 aa, Severe acute respiratory syndrome coronavirus 2
VTIDYTEISFM

SEQ ID NO: 8830 - protein, 11 aa, Severe acute respiratory syndrome coronavirus 2
TIDYTEISFML

SEQ ID NO: 8831 - protein, 11 aa, Severe acute respiratory syndrome coronavirus 2
IDYTEISFMLW

SEQ ID NO: 8832 - protein, 11 aa, Severe acute respiratory syndrome coronavirus 2
YTEISFMLWCK

SEQ ID NO: 8833 - protein, 11 aa, Severe acute respiratory syndrome coronavirus 2
SFMLWCKDGHV

SEQ ID NO: 8834 - protein, 11 aa, Severe acute respiratory syndrome coronavirus 2
MLWCKDGHVET

SEQ ID NO: 8835 - protein, 11 aa, Severe acute respiratory syndrome coronavirus 2
LWCKDGHVETF

SEQ ID NO: 8836 - protein, 11 aa, Severe acute respiratory syndrome coronavirus 2
FYPKLQSSQAW

SEQ ID NO: 8837 - protein, 11 aa, Severe acute respiratory syndrome coronavirus 2
LQSSQAWQPGV

SEQ ID NO: 8838 - protein, 11 aa, Severe acute respiratory syndrome coronavirus 2
SSQAWQPGVAM

SEQ ID NO: 8839 - protein, 11 aa, Severe acute respiratory syndrome coronavirus 2
WQPGVAMPNLY

SEQ ID NO: 8840 - protein, 11 aa, Severe acute respiratory syndrome coronavirus 2
QPGVAMPNLYK

SEQ ID NO: 8841 - protein, 11 aa, Severe acute respiratory syndrome coronavirus 2
VAMPNLYKMQR

SEQ ID NO: 8842 - protein, 11 aa, Severe acute respiratory syndrome coronavirus 2
MPNLYKMQRML

SEQ ID NO: 8843 - protein, 11 aa, Severe acute respiratory syndrome coronavirus 2
LYKMQRMLLEK

SEQ ID NO: 8844 - protein, 11 aa, Severe acute respiratory syndrome coronavirus 2
MLLEKCDLQNY

SEQ ID NO: 8845 - protein, 11 aa, Severe acute respiratory syndrome coronavirus 2
ATLPKGIMMNV

SEQ ID NO: 8846 - protein, 11 aa, Severe acute respiratory syndrome coronavirus 2
IMMNVAKYTQL

SEQ ID NO: 8847 - protein, 11 aa, Severe acute respiratory syndrome coronavirus 2
VAKYTQLCQYL

SEQ ID NO: 8848 - protein, 11 aa, Severe acute respiratory syndrome coronavirus 2
YTQLCQYLNTL

SEQ ID NO: 8849 - protein, 11 aa, Severe acute respiratory syndrome coronavirus 2
QLCQYLNTLTL

SEQ ID NO: 8850 - protein, 11 aa, Severe acute respiratory syndrome coronavirus 2
CQYLNTLTLAV

SEQ ID NO: 8851 - protein, 11 aa, Severe acute respiratory syndrome coronavirus 2
YLNTLTLAVPY

SEQ ID NO: 8852 - protein, 11 aa, Severe acute respiratory syndrome coronavirus 2
TLTLAVPYNMR

SEQ ID NO: 8853 - protein, 11 aa, Severe acute respiratory syndrome coronavirus 2
LTLAVPYNMRV

SEQ ID NO: 8854 - protein, 11 aa, Severe acute respiratory syndrome coronavirus 2
AVPYNMRVIHF

SEQ ID NO: 8855 - protein, 11 aa, Severe acute respiratory syndrome coronavirus 2
RVIHFGAGSDK

SEQ ID NO: 8856 - protein, 11 aa, Severe acute respiratory syndrome coronavirus 2
KGVAPGTAVLR

SEQ ID NO: 8857 - protein, 11 aa, Severe acute respiratory syndrome coronavirus 2
VAPGTAVLRQW

SEQ ID NO: 8858 - protein, 11 aa, Severe acute respiratory syndrome coronavirus 2
APGTAVLRQWL

SEQ ID NO: 8859 - protein, 11 aa, Severe acute respiratory syndrome coronavirus 2
LRQWLPTGTLL

SEQ ID NO: 8860 - protein, 11 aa, Severe acute respiratory syndrome coronavirus 2
RQWLPTGTLLV

SEQ ID NO: 8861 - protein, 11 aa, Severe acute respiratory syndrome coronavirus 2
LLVDSDLNDFV

SEQ ID NO: 8862 - protein, 11 aa, Severe acute respiratory syndrome coronavirus 2
DSTLIGDCATV

SEQ ID NO: 8863 - protein, 11 aa, Severe acute respiratory syndrome coronavirus 2
MYDPKTKNVTK

SEQ ID NO: 8864 - protein, 11 aa, Severe acute respiratory syndrome coronavirus 2
ENDSKEGFFTY

SEQ ID NO: 8865 - protein, 11 aa, Severe acute respiratory syndrome coronavirus 2
KEGFFTYICGF

SEQ ID NO: 8866 - protein, 11 aa, Severe acute respiratory syndrome coronavirus 2
FTYICGFIQQK

SEQ ID NO: 8867 - protein, 11 aa, Severe acute respiratory syndrome coronavirus 2
TYICGFIQQKL

SEQ ID NO: 8868 - protein, 11 aa, Severe acute respiratory syndrome coronavirus 2
QKLALGGSVAI

SEQ ID NO: 8869 - protein, 11 aa, Severe acute respiratory syndrome coronavirus 2
KLALGGSVAIK

SEQ ID NO: 8870 - protein, 11 aa, Severe acute respiratory syndrome coronavirus 2
SVAIKITEHSW

SEQ ID NO: 8871 - protein, 11 aa, Severe acute respiratory syndrome coronavirus 2
VAIKITEHSWN

SEQ ID NO: 8872 - protein, 11 aa, Severe acute respiratory syndrome coronavirus 2
ITEHSWNADLY

SEQ ID NO: 8873 - protein, 11 aa, Severe acute respiratory syndrome coronavirus 2
TEHSWNADLYK

SEQ ID NO: 8874 - protein, 11 aa, Severe acute respiratory syndrome coronavirus 2
HSWNADLYKLM

SEQ ID NO: 8875 - protein, 11 aa, Severe acute respiratory syndrome coronavirus 2
LYKLMGHFAWW

SEQ ID NO: 8876 - protein, 11 aa, Severe acute respiratory syndrome coronavirus 2
YKLMGHFAWWT

SEQ ID NO: 8877 - protein, 11 aa, Severe acute respiratory syndrome coronavirus 2
KLMGHFAWWTA

SEQ ID NO: 8878 - protein, 11 aa, Severe acute respiratory syndrome coronavirus 2
LMGHFAWWTAF

SEQ ID NO: 8879 - protein, 11 aa, Severe acute respiratory syndrome coronavirus 2
MGHFAWWTAFV

SEQ ID NO: 8880 - protein, 11 aa, Severe acute respiratory syndrome coronavirus 2
FAWWTAFVTNV

SEQ ID NO: 8881 - protein, 11 aa, Severe acute respiratory syndrome coronavirus 2
SSEAFLIGCNY

SEQ ID NO: 8882 - protein, 11 aa, Severe acute respiratory syndrome coronavirus 2
SEAFLIGCNYL

SEQ ID NO: 8883 - protein, 11 aa, Severe acute respiratory syndrome coronavirus 2
KPREQIDGYVM

SEQ ID NO: 8884 - protein, 11 aa, Severe acute respiratory syndrome coronavirus 2
REQIDGYVMHA

SEQ ID NO: 8885 - protein, 11 aa, Severe acute respiratory syndrome coronavirus 2
IDGYVMHANYI

SEQ ID NO: 8886 - protein, 11 aa, Severe acute respiratory syndrome coronavirus 2
DGYVMHANYIF

SEQ ID NO: 8887 - protein, 11 aa, Severe acute respiratory syndrome coronavirus 2
GYVMHANYIFW

SEQ ID NO: 8888 - protein, 11 aa, Severe acute respiratory syndrome coronavirus 2
YVMHANYIFWR

SEQ ID NO: 8889 - protein, 11 aa, Severe acute respiratory syndrome coronavirus 2
VMHANYIFWRN

SEQ ID NO: 8890 - protein, 11 aa, Severe acute respiratory syndrome coronavirus 2
NYIFWRNTNPI

SEQ ID NO: 8891 - protein, 11 aa, Severe acute respiratory syndrome coronavirus 2
RNTNPIQLSSY

SEQ ID NO: 8892 - protein, 11 aa, Severe acute respiratory syndrome coronavirus 2
NPIQLSSYSLF

SEQ ID NO: 8893 - protein, 11 aa, Severe acute respiratory syndrome coronavirus 2
IQLSSYSLFDM

SEQ ID NO: 8894 - protein, 11 aa, Severe acute respiratory syndrome coronavirus 2
LSSYSLFDMSK

SEQ ID NO: 8895 - protein, 11 aa, Severe acute respiratory syndrome coronavirus 2
SSYSLFDMSKF

SEQ ID NO: 8896 - protein, 11 aa, Severe acute respiratory syndrome coronavirus 2
SYSLFDMSKFP

SEQ ID NO: 8897 - protein, 11 aa, Severe acute respiratory syndrome coronavirus 2
YSLFDMSKFPL

SEQ ID NO: 8898 - protein, 11 aa, Severe acute respiratory syndrome coronavirus 2
SLFDMSKFPLK

SEQ ID NO: 8899 - protein, 11 aa, Severe acute respiratory syndrome coronavirus 2
SKFPLKLRGTA

SEQ ID NO: 8900 - protein, 11 aa, Severe acute respiratory syndrome coronavirus 2
KFPLKLRGTAV

SEQ ID NO: 8901 - protein, 11 aa, Severe acute respiratory syndrome coronavirus 2
FPLKLRGTAVM

SEQ ID NO: 8902 - protein, 11 aa, Severe acute respiratory syndrome coronavirus 2
KLRGTAVMSLK

SEQ ID NO: 8903 - protein, 11 aa, Severe acute respiratory syndrome coronavirus 2
MSLKEGQINDM

SEQ ID NO: 8904 - protein, 11 aa, Severe acute respiratory syndrome coronavirus 2
GQINDMILSLL

SEQ ID NO: 8905 - protein, 11 aa, Severe acute respiratory syndrome coronavirus 2
INDMILSLLSK

SEQ ID NO: 8906 - protein, 11 aa, Severe acute respiratory syndrome coronavirus 2
DMILSLLSKGR

SEQ ID NO: 8907 - protein, 11 aa, Severe acute respiratory syndrome coronavirus 2
SLLSKGRLIIR

SEQ ID NO: 8908 - protein, 11 aa, Severe acute respiratory syndrome coronavirus 2
KGRLIIRENNR

SEQ ID NO: 8909 - protein, 11 aa, Severe acute respiratory syndrome coronavirus 2
GRLIIRENNRV

SEQ ID NO: 8910 - protein, 11 aa, Severe acute respiratory syndrome coronavirus 2
RLIIRENNRVV

SEQ ID NO: 8911 - protein, 8 aa, Severe acute respiratory syndrome coronavirus 2
LFMRIFTI

SEQ ID NO: 8912 - protein, 8 aa, Severe acute respiratory syndrome coronavirus 2
FTIGTVTL

SEQ ID NO: 8913 - protein, 8 aa, Severe acute respiratory syndrome coronavirus 2
PIQASLPF

SEQ ID NO: 8914 - protein, 8 aa, Severe acute respiratory syndrome coronavirus 2
QASLPFGW

SEQ ID NO: 8915 - protein, 8 aa, Severe acute respiratory syndrome coronavirus 2
SLPFGWLI

SEQ ID NO: 8916 - protein, 8 aa, Severe acute respiratory syndrome coronavirus 2
LPFGWLIV

SEQ ID NO: 8917 - protein, 8 aa, Severe acute respiratory syndrome coronavirus 2
LLAVFQSA

SEQ ID NO: 8918 - protein, 8 aa, Severe acute respiratory syndrome coronavirus 2
SASKIITL

SEQ ID NO: 8919 - protein, 8 aa, Severe acute respiratory syndrome coronavirus 2
ASKIITLK

SEQ ID NO: 8920 - protein, 8 aa, Severe acute respiratory syndrome coronavirus 2
TLKKRWQL

SEQ ID NO: 8921 - protein, 8 aa, Severe acute respiratory syndrome coronavirus 2
KRWQLALS

SEQ ID NO: 8922 - protein, 8 aa, Severe acute respiratory syndrome coronavirus 2
RWQLALSK

SEQ ID NO: 8923 - protein, 8 aa, Severe acute respiratory syndrome coronavirus 2
HFVCNLLL

SEQ ID NO: 8924 - protein, 8 aa, Severe acute respiratory syndrome coronavirus 2
LLLLFVTV

SEQ ID NO: 8925 - protein, 8 aa, Severe acute respiratory syndrome coronavirus 2
LLLFVTVY

SEQ ID NO: 8926 - protein, 8 aa, Severe acute respiratory syndrome coronavirus 2
SHLLLVAA

SEQ ID NO: 8927 - protein, 8 aa, Severe acute respiratory syndrome coronavirus 2
LEAPFLYL

SEQ ID NO: 8928 - protein, 8 aa, Severe acute respiratory syndrome coronavirus 2
EAPFLYLY

SEQ ID NO: 8929 - protein, 8 aa, Severe acute respiratory syndrome coronavirus 2
APFLYLYA

SEQ ID NO: 8930 - protein, 8 aa, Severe acute respiratory syndrome coronavirus 2
PFLYLYAL

SEQ ID NO: 8931 - protein, 8 aa, Severe acute respiratory syndrome coronavirus 2
FLYLYALV

SEQ ID NO: 8932 - protein, 8 aa, Severe acute respiratory syndrome coronavirus 2
LYLYALVY

SEQ ID NO: 8933 - protein, 8 aa, Severe acute respiratory syndrome coronavirus 2
YLYALVYF

SEQ ID NO: 8934 - protein, 8 aa, Severe acute respiratory syndrome coronavirus 2
LYALVYFL

SEQ ID NO: 8935 - protein, 8 aa, Severe acute respiratory syndrome coronavirus 2
YFLQSINF

SEQ ID NO: 8936 - protein, 8 aa, Severe acute respiratory syndrome coronavirus 2
FLQSINFV

SEQ ID NO: 8937 - protein, 8 aa, Severe acute respiratory syndrome coronavirus 2
LQSINFVR

SEQ ID NO: 8938 - protein, 8 aa, Severe acute respiratory syndrome coronavirus 2
NFVRIIMR

SEQ ID NO: 8939 - protein, 8 aa, Severe acute respiratory syndrome coronavirus 2
RIIMRLWL

SEQ ID NO: 8940 - protein, 8 aa, Severe acute respiratory syndrome coronavirus 2
MRLWLCWK

SEQ ID NO: 8941 - protein, 8 aa, Severe acute respiratory syndrome coronavirus 2
RSKNPLLY

SEQ ID NO: 8942 - protein, 8 aa, Severe acute respiratory syndrome coronavirus 2
LLYDANYF

SEQ ID NO: 8943 - protein, 8 aa, Severe acute respiratory syndrome coronavirus 2
LYDANYFL

SEQ ID NO: 8944 - protein, 8 aa, Severe acute respiratory syndrome coronavirus 2
HSYFTSDY

SEQ ID NO: 8945 - protein, 8 aa, Severe acute respiratory syndrome coronavirus 2
SYFTSDYY

SEQ ID NO: 8946 - protein, 8 aa, Severe acute respiratory syndrome coronavirus 2
FTSDYYQL

SEQ ID NO: 8947 - protein, 8 aa, Severe acute respiratory syndrome coronavirus 2
TSDYYQLY

SEQ ID NO: 8948 - protein, 8 aa, Severe acute respiratory syndrome coronavirus 2
YQLYSTQL

SEQ ID NO: 8949 - protein, 8 aa, Severe acute respiratory syndrome coronavirus 2
VEHVTFFI

SEQ ID NO: 8950 - protein, 8 aa, Severe acute respiratory syndrome coronavirus 2
EHVTFFIY

SEQ ID NO: 8951 - protein, 8 aa, Severe acute respiratory syndrome coronavirus 2
VTFFIYNK

SEQ ID NO: 8952 - protein, 9 aa, Severe acute respiratory syndrome coronavirus 2
DLFMRIFTI

SEQ ID NO: 8953 - protein, 9 aa, Severe acute respiratory syndrome coronavirus 2
FMRIFTIGT

SEQ ID NO: 8954 - protein, 9 aa, Severe acute respiratory syndrome coronavirus 2
MRIFTIGTV

SEQ ID NO: 8955 - protein, 9 aa, Severe acute respiratory syndrome coronavirus 2
IFTIGTVTL

SEQ ID NO: 8956 - protein, 9 aa, Severe acute respiratory syndrome coronavirus 2
FTIGTVTLK

SEQ ID NO: 8957 - protein, 9 aa, Severe acute respiratory syndrome coronavirus 2
VTLKQGEIK

SEQ ID NO: 8958 - protein, 9 aa, Severe acute respiratory syndrome coronavirus 2
GEIKDATPS

SEQ ID NO: 8959 - protein, 9 aa, Severe acute respiratory syndrome coronavirus 2
IKDATPSDF

SEQ ID NO: 8960 - protein, 9 aa, Severe acute respiratory syndrome coronavirus 2
DATPSDFVR

SEQ ID NO: 8961 - protein, 9 aa, Severe acute respiratory syndrome coronavirus 2
TPSDFVRAT

SEQ ID NO: 8962 - protein, 9 aa, Severe acute respiratory syndrome coronavirus 2
VRATATIPI

SEQ ID NO: 8963 - protein, 9 aa, Severe acute respiratory syndrome coronavirus 2
ATATIPIQA

SEQ ID NO: 8964 - protein, 9 aa, Severe acute respiratory syndrome coronavirus 2
ATIPIQASL

SEQ ID NO: 8965 - protein, 9 aa, Severe acute respiratory syndrome coronavirus 2
IPIQASLPF

SEQ ID NO: 8966 - protein, 9 aa, Severe acute respiratory syndrome coronavirus 2
IQASLPFGW

SEQ ID NO: 8967 - protein, 9 aa, Severe acute respiratory syndrome coronavirus 2
ASLPFGWLI

SEQ ID NO: 8968 - protein, 9 aa, Severe acute respiratory syndrome coronavirus 2
SLPFGWLIV

SEQ ID NO: 8969 - protein, 9 aa, Severe acute respiratory syndrome coronavirus 2
LPFGWLIVG

SEQ ID NO: 8970 - protein, 9 aa, Severe acute respiratory syndrome coronavirus 2
WLIVGVALL

SEQ ID NO: 8971 - protein, 9 aa, Severe acute respiratory syndrome coronavirus 2
LIVGVALLA

SEQ ID NO: 8972 - protein, 9 aa, Severe acute respiratory syndrome coronavirus 2
IVGVALLAV

SEQ ID NO: 8973 - protein, 9 aa, Severe acute respiratory syndrome coronavirus 2
VGVALLAVF

SEQ ID NO: 8974 - protein, 9 aa, Severe acute respiratory syndrome coronavirus 2
ALLAVFQSA

SEQ ID NO: 8975 - protein, 9 aa, Severe acute respiratory syndrome coronavirus 2
LLAVFQSAS

SEQ ID NO: 8976 - protein, 9 aa, Severe acute respiratory syndrome coronavirus 2
LAVFQSASK

SEQ ID NO: 8977 - protein, 9 aa, Severe acute respiratory syndrome coronavirus 2
AVFQSASKI

SEQ ID NO: 8978 - protein, 9 aa, Severe acute respiratory syndrome coronavirus 2
VFQSASKII

SEQ ID NO: 8979 - protein, 9 aa, Severe acute respiratory syndrome coronavirus 2
QSASKIITL

SEQ ID NO: 8980 - protein, 9 aa, Severe acute respiratory syndrome coronavirus 2
SASKIITLK

SEQ ID NO: 8981 - protein, 9 aa, Severe acute respiratory syndrome coronavirus 2
ASKIITLKK

SEQ ID NO: 8982 - protein, 9 aa, Severe acute respiratory syndrome coronavirus 2
KIITLKKRW

SEQ ID NO: 8983 - protein, 9 aa, Severe acute respiratory syndrome coronavirus 2
ITLKKRWQL

SEQ ID NO: 8984 - protein, 9 aa, Severe acute respiratory syndrome coronavirus 2
TLKKRWQLA

SEQ ID NO: 8985 - protein, 9 aa, Severe acute respiratory syndrome coronavirus 2
LKKRWQLAL

SEQ ID NO: 8986 - protein, 9 aa, Severe acute respiratory syndrome coronavirus 2
KRWQLALSK

SEQ ID NO: 8987 - protein, 9 aa, Severe acute respiratory syndrome coronavirus 2
WQLALSKGV

SEQ ID NO: 8988 - protein, 9 aa, Severe acute respiratory syndrome coronavirus 2
LALSKGVHF

SEQ ID NO: 8989 - protein, 9 aa, Severe acute respiratory syndrome coronavirus 2
ALSKGVHFV

SEQ ID NO: 8990 - protein, 9 aa, Severe acute respiratory syndrome coronavirus 2
GVHFVCNLL

SEQ ID NO: 8991 - protein, 9 aa, Severe acute respiratory syndrome coronavirus 2
VHFVCNLLL

SEQ ID NO: 8992 - protein, 9 aa, Severe acute respiratory syndrome coronavirus 2
HFVCNLLLL

SEQ ID NO: 8993 - protein, 9 aa, Severe acute respiratory syndrome coronavirus 2
FVCNLLLLF

SEQ ID NO: 8994 - protein, 9 aa, Severe acute respiratory syndrome coronavirus 2
NLLLLFVTV

SEQ ID NO: 8995 - protein, 9 aa, Severe acute respiratory syndrome coronavirus 2
LLLLFVTVY

SEQ ID NO: 8996 - protein, 9 aa, Severe acute respiratory syndrome coronavirus 2
LLLFVTVYS

SEQ ID NO: 8997 - protein, 9 aa, Severe acute respiratory syndrome coronavirus 2
LFVTVYSHL

SEQ ID NO: 8998 - protein, 9 aa, Severe acute respiratory syndrome coronavirus 2
FVTVYSHLL

SEQ ID NO: 8999 - protein, 9 aa, Severe acute respiratory syndrome coronavirus 2
VTVYSHLLL

SEQ ID NO: 9000 - protein, 9 aa, Severe acute respiratory syndrome coronavirus 2
TVYSHLLLV

SEQ ID NO: 9001 - protein, 9 aa, Severe acute respiratory syndrome coronavirus 2
YSHLLLVAA

SEQ ID NO: 9002 - protein, 9 aa, Severe acute respiratory syndrome coronavirus 2
HLLLVAAGL

SEQ ID NO: 9003 - protein, 9 aa, Severe acute respiratory syndrome coronavirus 2
LLVAAGLEA

SEQ ID NO: 9004 - protein, 9 aa, Severe acute respiratory syndrome coronavirus 2
VAAGLEAPF

SEQ ID NO: 9005 - protein, 9 aa, Severe acute respiratory syndrome coronavirus 2
AGLEAPFLY

SEQ ID NO: 9006 - protein, 9 aa, Severe acute respiratory syndrome coronavirus 2
GLEAPFLYL

SEQ ID NO: 9007 - protein, 9 aa, Severe acute respiratory syndrome coronavirus 2
LEAPFLYLY

SEQ ID NO: 9008 - protein, 9 aa, Severe acute respiratory syndrome coronavirus 2
EAPFLYLYA

SEQ ID NO: 9009 - protein, 9 aa, Severe acute respiratory syndrome coronavirus 2
APFLYLYAL

SEQ ID NO: 9010 - protein, 9 aa, Severe acute respiratory syndrome coronavirus 2
FLYLYALVY

SEQ ID NO: 9011 - protein, 9 aa, Severe acute respiratory syndrome coronavirus 2
LYLYALVYF

SEQ ID NO: 9012 - protein, 9 aa, Severe acute respiratory syndrome coronavirus 2
YLYALVYFL

SEQ ID NO: 9013 - protein, 9 aa, Severe acute respiratory syndrome coronavirus 2
ALVYFLQSI

SEQ ID NO: 9014 - protein, 9 aa, Severe acute respiratory syndrome coronavirus 2
VYFLQSINF

SEQ ID NO: 9015 - protein, 9 aa, Severe acute respiratory syndrome coronavirus 2
YFLQSINFV

SEQ ID NO: 9016 - protein, 9 aa, Severe acute respiratory syndrome coronavirus 2
FLQSINFVR

SEQ ID NO: 9017 - protein, 9 aa, Severe acute respiratory syndrome coronavirus 2
LQSINFVRI

SEQ ID NO: 9018 - protein, 9 aa, Severe acute respiratory syndrome coronavirus 2
QSINFVRII

SEQ ID NO: 9019 - protein, 9 aa, Severe acute respiratory syndrome coronavirus 2
SINFVRIIM

SEQ ID NO: 9020 - protein, 9 aa, Severe acute respiratory syndrome coronavirus 2
INFVRIIMR

SEQ ID NO: 9021 - protein, 9 aa, Severe acute respiratory syndrome coronavirus 2
NFVRIIMRL

SEQ ID NO: 9022 - protein, 9 aa, Severe acute respiratory syndrome coronavirus 2
FVRIIMRLW

SEQ ID NO: 9023 - protein, 9 aa, Severe acute respiratory syndrome coronavirus 2
VRIIMRLWL

SEQ ID NO: 9024 - protein, 9 aa, Severe acute respiratory syndrome coronavirus 2
RIIMRLWLC

SEQ ID NO: 9025 - protein, 9 aa, Severe acute respiratory syndrome coronavirus 2
IIMRLWLCW

SEQ ID NO: 9026 - protein, 9 aa, Severe acute respiratory syndrome coronavirus 2
IMRLWLCWK

SEQ ID NO: 9027 - protein, 9 aa, Severe acute respiratory syndrome coronavirus 2
MRLWLCWKC

SEQ ID NO: 9028 - protein, 9 aa, Severe acute respiratory syndrome coronavirus 2
RLWLCWKCR

SEQ ID NO: 9029 - protein, 9 aa, Severe acute respiratory syndrome coronavirus 2
WKCRSKNPL

SEQ ID NO: 9030 - protein, 9 aa, Severe acute respiratory syndrome coronavirus 2
KCRSKNPLL

SEQ ID NO: 9031 - protein, 9 aa, Severe acute respiratory syndrome coronavirus 2
CRSKNPLLY

SEQ ID NO: 9032 - protein, 9 aa, Severe acute respiratory syndrome coronavirus 2
RSKNPLLYD

SEQ ID NO: 9033 - protein, 9 aa, Severe acute respiratory syndrome coronavirus 2
NPLLYDANY

SEQ ID NO: 9034 - protein, 9 aa, Severe acute respiratory syndrome coronavirus 2
LLYDANYFL

SEQ ID NO: 9035 - protein, 9 aa, Severe acute respiratory syndrome coronavirus 2
YDANYFLCW

SEQ ID NO: 9036 - protein, 9 aa, Severe acute respiratory syndrome coronavirus 2
FLCWHTNCY

SEQ ID NO: 9037 - protein, 9 aa, Severe acute respiratory syndrome coronavirus 2
CWHTNCYDY

SEQ ID NO: 9038 - protein, 9 aa, Severe acute respiratory syndrome coronavirus 2
HTNCYDYCI

SEQ ID NO: 9039 - protein, 9 aa, Severe acute respiratory syndrome coronavirus 2
NCYDYCIPY

SEQ ID NO: 9040 - protein, 9 aa, Severe acute respiratory syndrome coronavirus 2
IPYNSVTSS

SEQ ID NO: 9041 - protein, 9 aa, Severe acute respiratory syndrome coronavirus 2
PYNSVTSSI

SEQ ID NO: 9042 - protein, 9 aa, Severe acute respiratory syndrome coronavirus 2
NSVTSSIVI

SEQ ID NO: 9043 - protein, 9 aa, Severe acute respiratory syndrome coronavirus 2
SGDGTTSPI

SEQ ID NO: 9044 - protein, 9 aa, Severe acute respiratory syndrome coronavirus 2
SEHDYQIGG

SEQ ID NO: 9045 - protein, 9 aa, Severe acute respiratory syndrome coronavirus 2
YQIGGYTEK

SEQ ID NO: 9046 - protein, 9 aa, Severe acute respiratory syndrome coronavirus 2
QIGGYTEKW

SEQ ID NO: 9047 - protein, 9 aa, Severe acute respiratory syndrome coronavirus 2
YTEKWESGV

SEQ ID NO: 9048 - protein, 9 aa, Severe acute respiratory syndrome coronavirus 2
WESGVKDCV

SEQ ID NO: 9049 - protein, 9 aa, Severe acute respiratory syndrome coronavirus 2
LHSYFTSDY

SEQ ID NO: 9050 - protein, 9 aa, Severe acute respiratory syndrome coronavirus 2
HSYFTSDYY

SEQ ID NO: 9051 - protein, 9 aa, Severe acute respiratory syndrome coronavirus 2
YFTSDYYQL

SEQ ID NO: 9052 - protein, 9 aa, Severe acute respiratory syndrome coronavirus 2
FTSDYYQLY

SEQ ID NO: 9053 - protein, 9 aa, Severe acute respiratory syndrome coronavirus 2
TSDYYQLYS

SEQ ID NO: 9054 - protein, 9 aa, Severe acute respiratory syndrome coronavirus 2
YYQLYSTQL

SEQ ID NO: 9055 - protein, 9 aa, Severe acute respiratory syndrome coronavirus 2
YQLYSTQLS

SEQ ID NO: 9056 - protein, 9 aa, Severe acute respiratory syndrome coronavirus 2
QLYSTQLST

SEQ ID NO: 9057 - protein, 9 aa, Severe acute respiratory syndrome coronavirus 2
TQLSTDTGV

SEQ ID NO: 9058 - protein, 9 aa, Severe acute respiratory syndrome coronavirus 2
STDTGVEHV

SEQ ID NO: 9059 - protein, 9 aa, Severe acute respiratory syndrome coronavirus 2
TGVEHVTFF

SEQ ID NO: 9060 - protein, 9 aa, Severe acute respiratory syndrome coronavirus 2
GVEHVTFFI

SEQ ID NO: 9061 - protein, 9 aa, Severe acute respiratory syndrome coronavirus 2
VEHVTFFIY

SEQ ID NO: 9062 - protein, 9 aa, Severe acute respiratory syndrome coronavirus 2
HVTFFIYNK

SEQ ID NO: 9063 - protein, 9 aa, Severe acute respiratory syndrome coronavirus 2
VTFFIYNKI

SEQ ID NO: 9064 - protein, 9 aa, Severe acute respiratory syndrome coronavirus 2
TFFIYNKIV

SEQ ID NO: 9065 - protein, 9 aa, Severe acute respiratory syndrome coronavirus 2
IVDEPEEHV

SEQ ID NO: 9066 - protein, 9 aa, Severe acute respiratory syndrome coronavirus 2
EEHVQIHTI

SEQ ID NO: 9067 - protein, 9 aa, Severe acute respiratory syndrome coronavirus 2
HTIDGSSGV

SEQ ID NO: 9068 - protein, 9 aa, Severe acute respiratory syndrome coronavirus 2
TIDGSSGVV

SEQ ID NO: 9069 - protein, 9 aa, Severe acute respiratory syndrome coronavirus 2
GSSGVVNPV

SEQ ID NO: 9070 - protein, 9 aa, Severe acute respiratory syndrome coronavirus 2
SSGVVNPVM

SEQ ID NO: 9071 - protein, 9 aa, Severe acute respiratory syndrome coronavirus 2
VVNPVMEPI

SEQ ID NO: 9072 - protein, 10 aa, Severe acute respiratory syndrome coronavirus 2
MDLFMRIFTI

SEQ ID NO: 9073 - protein, 10 aa, Severe acute respiratory syndrome coronavirus 2
FMRIFTIGTV

SEQ ID NO: 9074 - protein, 10 aa, Severe acute respiratory syndrome coronavirus 2
MRIFTIGTVT

SEQ ID NO: 9075 - protein, 10 aa, Severe acute respiratory syndrome coronavirus 2
RIFTIGTVTL

SEQ ID NO: 9076 - protein, 10 aa, Severe acute respiratory syndrome coronavirus 2
IFTIGTVTLK

SEQ ID NO: 9077 - protein, 10 aa, Severe acute respiratory syndrome coronavirus 2
FTIGTVTLKQ

SEQ ID NO: 9078 - protein, 10 aa, Severe acute respiratory syndrome coronavirus 2
TVTLKQGEIK

SEQ ID NO: 9079 - protein, 10 aa, Severe acute respiratory syndrome coronavirus 2
TPSDFVRATA

SEQ ID NO: 9080 - protein, 10 aa, Severe acute respiratory syndrome coronavirus 2
SDFVRATATI

SEQ ID NO: 9081 - protein, 10 aa, Severe acute respiratory syndrome coronavirus 2
FVRATATIPI

SEQ ID NO: 9082 - protein, 10 aa, Severe acute respiratory syndrome coronavirus 2
RATATIPIQA

SEQ ID NO: 9083 - protein, 10 aa, Severe acute respiratory syndrome coronavirus 2
TATIPIQASL

SEQ ID NO: 9084 - protein, 10 aa, Severe acute respiratory syndrome coronavirus 2
TIPIQASLPF

SEQ ID NO: 9085 - protein, 10 aa, Severe acute respiratory syndrome coronavirus 2
IPIQASLPFG

SEQ ID NO: 9086 - protein, 10 aa, Severe acute respiratory syndrome coronavirus 2
IQASLPFGWL

SEQ ID NO: 9087 - protein, 10 aa, Severe acute respiratory syndrome coronavirus 2
QASLPFGWLI

SEQ ID NO: 9088 - protein, 10 aa, Severe acute respiratory syndrome coronavirus 2
ASLPFGWLIV

SEQ ID NO: 9089 - protein, 10 aa, Severe acute respiratory syndrome coronavirus 2
LPFGWLIVGV

SEQ ID NO: 9090 - protein, 10 aa, Severe acute respiratory syndrome coronavirus 2
GWLIVGVALL

SEQ ID NO: 9091 - protein, 10 aa, Severe acute respiratory syndrome coronavirus 2
WLIVGVALLA

SEQ ID NO: 9092 - protein, 10 aa, Severe acute respiratory syndrome coronavirus 2
LIVGVALLAV

SEQ ID NO: 9093 - protein, 10 aa, Severe acute respiratory syndrome coronavirus 2
IVGVALLAVF

SEQ ID NO: 9094 - protein, 10 aa, Severe acute respiratory syndrome coronavirus 2
VALLAVFQSA

SEQ ID NO: 9095 - protein, 10 aa, Severe acute respiratory syndrome coronavirus 2
LLAVFQSASK

SEQ ID NO: 9096 - protein, 10 aa, Severe acute respiratory syndrome coronavirus 2
FQSASKIITL

SEQ ID NO: 9097 - protein, 10 aa, Severe acute respiratory syndrome coronavirus 2
QSASKIITLK

SEQ ID NO: 9098 - protein, 10 aa, Severe acute respiratory syndrome coronavirus 2
SASKIITLKK

SEQ ID NO: 9099 - protein, 10 aa, Severe acute respiratory syndrome coronavirus 2
ASKIITLKKR

SEQ ID NO: 9100 - protein, 10 aa, Severe acute respiratory syndrome coronavirus 2
IITLKKRWQL

SEQ ID NO: 9101 - protein, 10 aa, Severe acute respiratory syndrome coronavirus 2
ITLKKRWQLA

SEQ ID NO: 9102 - protein, 10 aa, Severe acute respiratory syndrome coronavirus 2
TLKKRWQLAL

SEQ ID NO: 9103 - protein, 10 aa, Severe acute respiratory syndrome coronavirus 2
KKRWQLALSK

SEQ ID NO: 9104 - protein, 10 aa, Severe acute respiratory syndrome coronavirus 2
KRWQLALSKG

SEQ ID NO: 9105 - protein, 10 aa, Severe acute respiratory syndrome coronavirus 2
RWQLALSKGV

SEQ ID NO: 9106 - protein, 10 aa, Severe acute respiratory syndrome coronavirus 2
WQLALSKGVH

SEQ ID NO: 9107 - protein, 10 aa, Severe acute respiratory syndrome coronavirus 2
QLALSKGVHF

SEQ ID NO: 9108 - protein, 10 aa, Severe acute respiratory syndrome coronavirus 2
LALSKGVHFV

SEQ ID NO: 9109 - protein, 10 aa, Severe acute respiratory syndrome coronavirus 2
ALSKGVHFVC

SEQ ID NO: 9110 - protein, 10 aa, Severe acute respiratory syndrome coronavirus 2
GVHFVCNLLL

SEQ ID NO: 9111 - protein, 10 aa, Severe acute respiratory syndrome coronavirus 2
VHFVCNLLLL

SEQ ID NO: 9112 - protein, 10 aa, Severe acute respiratory syndrome coronavirus 2
HFVCNLLLLF

SEQ ID NO: 9113 - protein, 10 aa, Severe acute respiratory syndrome coronavirus 2
FVCNLLLLFV

SEQ ID NO: 9114 - protein, 10 aa, Severe acute respiratory syndrome coronavirus 2
CNLLLLFVTV

SEQ ID NO: 9115 - protein, 10 aa, Severe acute respiratory syndrome coronavirus 2
NLLLLFVTVY

SEQ ID NO: 9116 - protein, 10 aa, Severe acute respiratory syndrome coronavirus 2
LLFVTVYSHL

SEQ ID NO: 9117 - protein, 10 aa, Severe acute respiratory syndrome coronavirus 2
LFVTVYSHLL

SEQ ID NO: 9118 - protein, 10 aa, Severe acute respiratory syndrome coronavirus 2
FVTVYSHLLL

SEQ ID NO: 9119 - protein, 10 aa, Severe acute respiratory syndrome coronavirus 2
VTVYSHLLLV

SEQ ID NO: 9120 - protein, 10 aa, Severe acute respiratory syndrome coronavirus 2
TVYSHLLLVA

SEQ ID NO: 9121 - protein, 10 aa, Severe acute respiratory syndrome coronavirus 2
SHLLLVAAGL

SEQ ID NO: 9122 - protein, 10 aa, Severe acute respiratory syndrome coronavirus 2
LLLVAAGLEA

SEQ ID NO: 9123 - protein, 10 aa, Severe acute respiratory syndrome coronavirus 2
LVAAGLEAPF

SEQ ID NO: 9124 - protein, 10 aa, Severe acute respiratory syndrome coronavirus 2
AAGLEAPFLY

SEQ ID NO: 9125 - protein, 10 aa, Severe acute respiratory syndrome coronavirus 2
AGLEAPFLYL

SEQ ID NO: 9126 - protein, 10 aa, Severe acute respiratory syndrome coronavirus 2
GLEAPFLYLY

SEQ ID NO: 9127 - protein, 10 aa, Severe acute respiratory syndrome coronavirus 2
LEAPFLYLYA

SEQ ID NO: 9128 - protein, 10 aa, Severe acute respiratory syndrome coronavirus 2
EAPFLYLYAL

SEQ ID NO: 9129 - protein, 10 aa, Severe acute respiratory syndrome coronavirus 2
APFLYLYALV

SEQ ID NO: 9130 - protein, 10 aa, Severe acute respiratory syndrome coronavirus 2
PFLYLYALVY

SEQ ID NO: 9131 - protein, 10 aa, Severe acute respiratory syndrome coronavirus 2
FLYLYALVYF

SEQ ID NO: 9132 - protein, 10 aa, Severe acute respiratory syndrome coronavirus 2
LYLYALVYFL

SEQ ID NO: 9133 - protein, 10 aa, Severe acute respiratory syndrome coronavirus 2
YLYALVYFLQ

SEQ ID NO: 9134 - protein, 10 aa, Severe acute respiratory syndrome coronavirus 2
YALVYFLQSI

SEQ ID NO: 9135 - protein, 10 aa, Severe acute respiratory syndrome coronavirus 2
ALVYFLQSIN

SEQ ID NO: 9136 - protein, 10 aa, Severe acute respiratory syndrome coronavirus 2
LVYFLQSINF

SEQ ID NO: 9137 - protein, 10 aa, Severe acute respiratory syndrome coronavirus 2
VYFLQSINFV

SEQ ID NO: 9138 - protein, 10 aa, Severe acute respiratory syndrome coronavirus 2
YFLQSINFVR

SEQ ID NO: 9139 - protein, 10 aa, Severe acute respiratory syndrome coronavirus 2
FLQSINFVRI

SEQ ID NO: 9140 - protein, 10 aa, Severe acute respiratory syndrome coronavirus 2
LQSINFVRII

SEQ ID NO: 9141 - protein, 10 aa, Severe acute respiratory syndrome coronavirus 2
QSINFVRIIM

SEQ ID NO: 9142 - protein, 10 aa, Severe acute respiratory syndrome coronavirus 2
SINFVRIIMR

SEQ ID NO: 9143 - protein, 10 aa, Severe acute respiratory syndrome coronavirus 2
FVRIIMRLWL

SEQ ID NO: 9144 - protein, 10 aa, Severe acute respiratory syndrome coronavirus 2
RIIMRLWLCW

SEQ ID NO: 9145 - protein, 10 aa, Severe acute respiratory syndrome coronavirus 2
IIMRLWLCWK

SEQ ID NO: 9146 - protein, 10 aa, Severe acute respiratory syndrome coronavirus 2
MRLWLCWKCR

SEQ ID NO: 9147 - protein, 10 aa, Severe acute respiratory syndrome coronavirus 2
RLWLCWKCRS

SEQ ID NO: 9148 - protein, 10 aa, Severe acute respiratory syndrome coronavirus 2
LWLCWKCRSK

SEQ ID NO: 9149 - protein, 10 aa, Severe acute respiratory syndrome coronavirus 2
KCRSKNPLLY

SEQ ID NO: 9150 - protein, 10 aa, Severe acute respiratory syndrome coronavirus 2
RSKNPLLYDA

SEQ ID NO: 9151 - protein, 10 aa, Severe acute respiratory syndrome coronavirus 2
NPLLYDANYF

SEQ ID NO: 9152 - protein, 10 aa, Severe acute respiratory syndrome coronavirus 2
PLLYDANYFL

SEQ ID NO: 9153 - protein, 10 aa, Severe acute respiratory syndrome coronavirus 2
LLYDANYFLC

SEQ ID NO: 9154 - protein, 10 aa, Severe acute respiratory syndrome coronavirus 2
LYDANYFLCW

SEQ ID NO: 9155 - protein, 10 aa, Severe acute respiratory syndrome coronavirus 2
YFLCWHTNCY

SEQ ID NO: 9156 - protein, 10 aa, Severe acute respiratory syndrome coronavirus 2
WHTNCYDYCI

SEQ ID NO: 9157 - protein, 10 aa, Severe acute respiratory syndrome coronavirus 2
TNCYDYCIPY

SEQ ID NO: 9158 - protein, 10 aa, Severe acute respiratory syndrome coronavirus 2
YDYCIPYNSV

SEQ ID NO: 9159 - protein, 10 aa, Severe acute respiratory syndrome coronavirus 2
IPYNSVTSSI

SEQ ID NO: 9160 - protein, 10 aa, Severe acute respiratory syndrome coronavirus 2
YNSVTSSIVI

SEQ ID NO: 9161 - protein, 10 aa, Severe acute respiratory syndrome coronavirus 2
TTSPISEHDY

SEQ ID NO: 9162 - protein, 10 aa, Severe acute respiratory syndrome coronavirus 2
SPISEHDYQI

SEQ ID NO: 9163 - protein, 10 aa, Severe acute respiratory syndrome coronavirus 2
SEHDYQIGGY

SEQ ID NO: 9164 - protein, 10 aa, Severe acute respiratory syndrome coronavirus 2
YQIGGYTEKW

SEQ ID NO: 9165 - protein, 10 aa, Severe acute respiratory syndrome coronavirus 2
YTEKWESGVK

SEQ ID NO: 9166 - protein, 10 aa, Severe acute respiratory syndrome coronavirus 2
WESGVKDCVV

SEQ ID NO: 9167 - protein, 10 aa, Severe acute respiratory syndrome coronavirus 2
VKDCVVLHSY

SEQ ID NO: 9168 - protein, 10 aa, Severe acute respiratory syndrome coronavirus 2
VLHSYFTSDY

SEQ ID NO: 9169 - protein, 10 aa, Severe acute respiratory syndrome coronavirus 2
LHSYFTSDYY

SEQ ID NO: 9170 - protein, 10 aa, Severe acute respiratory syndrome coronavirus 2
HSYFTSDYYQ

SEQ ID NO: 9171 - protein, 10 aa, Severe acute respiratory syndrome coronavirus 2
SYFTSDYYQL

SEQ ID NO: 9172 - protein, 10 aa, Severe acute respiratory syndrome coronavirus 2
YFTSDYYQLY

SEQ ID NO: 9173 - protein, 10 aa, Severe acute respiratory syndrome coronavirus 2
FTSDYYQLYS

SEQ ID NO: 9174 - protein, 10 aa, Severe acute respiratory syndrome coronavirus 2
DYYQLYSTQL

SEQ ID NO: 9175 - protein, 10 aa, Severe acute respiratory syndrome coronavirus 2
YYQLYSTQLS

SEQ ID NO: 9176 - protein, 10 aa, Severe acute respiratory syndrome coronavirus 2
YQLYSTQLST

SEQ ID NO: 9177 - protein, 10 aa, Severe acute respiratory syndrome coronavirus 2
STQLSTDTGV

SEQ ID NO: 9178 - protein, 10 aa, Severe acute respiratory syndrome coronavirus 2
DTGVEHVTFF

SEQ ID NO: 9179 - protein, 10 aa, Severe acute respiratory syndrome coronavirus 2
TGVEHVTFFI

SEQ ID NO: 9180 - protein, 10 aa, Severe acute respiratory syndrome coronavirus 2
GVEHVTFFIY

SEQ ID NO: 9181 - protein, 10 aa, Severe acute respiratory syndrome coronavirus 2
EHVTFFIYNK

SEQ ID NO: 9182 - protein, 10 aa, Severe acute respiratory syndrome coronavirus 2
HVTFFIYNKI

SEQ ID NO: 9183 - protein, 10 aa, Severe acute respiratory syndrome coronavirus 2
VTFFIYNKIV

SEQ ID NO: 9184 - protein, 10 aa, Severe acute respiratory syndrome coronavirus 2
KIVDEPEEHV

SEQ ID NO: 9185 - protein, 10 aa, Severe acute respiratory syndrome coronavirus 2
IHTIDGSSGV

SEQ ID NO: 9186 - protein, 10 aa, Severe acute respiratory syndrome coronavirus 2
HTIDGSSGVV

SEQ ID NO: 9187 - protein, 10 aa, Severe acute respiratory syndrome coronavirus 2
DGSSGVVNPV

SEQ ID NO: 9188 - protein, 10 aa, Severe acute respiratory syndrome coronavirus 2
GSSGVVNPVM

SEQ ID NO: 9189 - protein, 10 aa, Severe acute respiratory syndrome coronavirus 2
GVVNPVMEPI

SEQ ID NO: 9190 - protein, 10 aa, Severe acute respiratory syndrome coronavirus 2
VVNPVMEPIY

SEQ ID NO: 9191 - protein, 10 aa, Severe acute respiratory syndrome coronavirus 2
EPTTTTSVPL

SEQ ID NO: 9192 - protein, 11 aa, Severe acute respiratory syndrome coronavirus 2
MDLFMRIFTIG

SEQ ID NO: 9193 - protein, 11 aa, Severe acute respiratory syndrome coronavirus 2
LFMRIFTIGTV

SEQ ID NO: 9194 - protein, 11 aa, Severe acute respiratory syndrome coronavirus 2
FMRIFTIGTVT

SEQ ID NO: 9195 - protein, 11 aa, Severe acute respiratory syndrome coronavirus 2
MRIFTIGTVTL

SEQ ID NO: 9196 - protein, 11 aa, Severe acute respiratory syndrome coronavirus 2
RIFTIGTVTLK

SEQ ID NO: 9197 - protein, 11 aa, Severe acute respiratory syndrome coronavirus 2
EIKDATPSDFV

SEQ ID NO: 9198 - protein, 11 aa, Severe acute respiratory syndrome coronavirus 2
ATIPIQASLPF

SEQ ID NO: 9199 - protein, 11 aa, Severe acute respiratory syndrome coronavirus 2
IPIQASLPFGW

SEQ ID NO: 9200 - protein, 11 aa, Severe acute respiratory syndrome coronavirus 2
IQASLPFGWLI

SEQ ID NO: 9201 - protein, 11 aa, Severe acute respiratory syndrome coronavirus 2
SLPFGWLIVGV

SEQ ID NO: 9202 - protein, 11 aa, Severe acute respiratory syndrome coronavirus 2
LPFGWLIVGVA

SEQ ID NO: 9203 - protein, 11 aa, Severe acute respiratory syndrome coronavirus 2
FGWLIVGVALL

SEQ ID NO: 9204 - protein, 11 aa, Severe acute respiratory syndrome coronavirus 2
WLIVGVALLAV

SEQ ID NO: 9205 - protein, 11 aa, Severe acute respiratory syndrome coronavirus 2
ALLAVFQSASK

SEQ ID NO: 9206 - protein, 11 aa, Severe acute respiratory syndrome coronavirus 2
LLAVFQSASKI

SEQ ID NO: 9207 - protein, 11 aa, Severe acute respiratory syndrome coronavirus 2
VFQSASKIITL

SEQ ID NO: 9208 - protein, 11 aa, Severe acute respiratory syndrome coronavirus 2
FQSASKIITLK

SEQ ID NO: 9209 - protein, 11 aa, Severe acute respiratory syndrome coronavirus 2
QSASKIITLKK

SEQ ID NO: 9210 - protein, 11 aa, Severe acute respiratory syndrome coronavirus 2
SASKIITLKKR

SEQ ID NO: 9211 - protein, 11 aa, Severe acute respiratory syndrome coronavirus 2
ASKIITLKKRW

SEQ ID NO: 9212 - protein, 11 aa, Severe acute respiratory syndrome coronavirus 2
ITLKKRWQLAL

SEQ ID NO: 9213 - protein, 11 aa, Severe acute respiratory syndrome coronavirus 2
TLKKRWQLALS

SEQ ID NO: 9214 - protein, 11 aa, Severe acute respiratory syndrome coronavirus 2
LKKRWQLALSK

SEQ ID NO: 9215 - protein, 11 aa, Severe acute respiratory syndrome coronavirus 2
KKRWQLALSKG

SEQ ID NO: 9216 - protein, 11 aa, Severe acute respiratory syndrome coronavirus 2
KRWQLALSKGV

SEQ ID NO: 9217 - protein, 11 aa, Severe acute respiratory syndrome coronavirus 2
WQLALSKGVHF

SEQ ID NO: 9218 - protein, 11 aa, Severe acute respiratory syndrome coronavirus 2
QLALSKGVHFV

SEQ ID NO: 9219 - protein, 11 aa, Severe acute respiratory syndrome coronavirus 2
LLLFVTVYSHL

SEQ ID NO: 9220 - protein, 11 aa, Severe acute respiratory syndrome coronavirus 2
LLFVTVYSHLL

SEQ ID NO: 9221 - protein, 11 aa, Severe acute respiratory syndrome coronavirus 2
LFVTVYSHLLL

SEQ ID NO: 9222 - protein, 11 aa, Severe acute respiratory syndrome coronavirus 2
FVTVYSHLLLV

SEQ ID NO: 9223 - protein, 11 aa, Severe acute respiratory syndrome coronavirus 2
TVYSHLLLVAA

SEQ ID NO: 9224 - protein, 11 aa, Severe acute respiratory syndrome coronavirus 2
YSHLLLVAAGL

SEQ ID NO: 9225 - protein, 11 aa, Severe acute respiratory syndrome coronavirus 2
LLVAAGLEAPF

SEQ ID NO: 9226 - protein, 11 aa, Severe acute respiratory syndrome coronavirus 2
LVAAGLEAPFL

SEQ ID NO: 9227 - protein, 11 aa, Severe acute respiratory syndrome coronavirus 2
VAAGLEAPFLY

SEQ ID NO: 9228 - protein, 11 aa, Severe acute respiratory syndrome coronavirus 2
AGLEAPFLYLY

SEQ ID NO: 9229 - protein, 11 aa, Severe acute respiratory syndrome coronavirus 2
LEAPFLYLYAL

SEQ ID NO: 9230 - protein, 11 aa, Severe acute respiratory syndrome coronavirus 2
EAPFLYLYALV

SEQ ID NO: 9231 - protein, 11 aa, Severe acute respiratory syndrome coronavirus 2
PFLYLYALVYF

SEQ ID NO: 9232 - protein, 11 aa, Severe acute respiratory syndrome coronavirus 2
FLYLYALVYFL

SEQ ID NO: 9233 - protein, 11 aa, Severe acute respiratory syndrome coronavirus 2
LYLYALVYFLQ

SEQ ID NO: 9234 - protein, 11 aa, Severe acute respiratory syndrome coronavirus 2
YLYALVYFLQS

SEQ ID NO: 9235 - protein, 11 aa, Severe acute respiratory syndrome coronavirus 2
LYALVYFLQSI

SEQ ID NO: 9236 - protein, 11 aa, Severe acute respiratory syndrome coronavirus 2
ALVYFLQSINF

SEQ ID NO: 9237 - protein, 11 aa, Severe acute respiratory syndrome coronavirus 2
LVYFLQSINFV

SEQ ID NO: 9238 - protein, 11 aa, Severe acute respiratory syndrome coronavirus 2
VYFLQSINFVR

SEQ ID NO: 9239 - protein, 11 aa, Severe acute respiratory syndrome coronavirus 2
YFLQSINFVRI

SEQ ID NO: 9240 - protein, 11 aa, Severe acute respiratory syndrome coronavirus 2
FLQSINFVRII

SEQ ID NO: 9241 - protein, 11 aa, Severe acute respiratory syndrome coronavirus 2
LQSINFVRIIM

SEQ ID NO: 9242 - protein, 11 aa, Severe acute respiratory syndrome coronavirus 2
QSINFVRIIMR

SEQ ID NO: 9243 - protein, 11 aa, Severe acute respiratory syndrome coronavirus 2
RIIMRLWLCWK

SEQ ID NO: 9244 - protein, 11 aa, Severe acute respiratory syndrome coronavirus 2
IMRLWLCWKCR

SEQ ID NO: 9245 - protein, 11 aa, Severe acute respiratory syndrome coronavirus 2
RLWLCWKCRSK

SEQ ID NO: 9246 - protein, 11 aa, Severe acute respiratory syndrome coronavirus 2
WKCRSKNPLLY

SEQ ID NO: 9247 - protein, 11 aa, Severe acute respiratory syndrome coronavirus 2
CRSKNPLLYDA

SEQ ID NO: 9248 - protein, 11 aa, Severe acute respiratory syndrome coronavirus 2
RSKNPLLYDAN

SEQ ID NO: 9249 - protein, 11 aa, Severe acute respiratory syndrome coronavirus 2
SKNPLLYDANY

SEQ ID NO: 9250 - protein, 11 aa, Severe acute respiratory syndrome coronavirus 2
NPLLYDANYFL

SEQ ID NO: 9251 - protein, 11 aa, Severe acute respiratory syndrome coronavirus 2
LLYDANYFLCW

SEQ ID NO: 9252 - protein, 11 aa, Severe acute respiratory syndrome coronavirus 2
NYFLCWHTNCY

SEQ ID NO: 9253 - protein, 11 aa, Severe acute respiratory syndrome coronavirus 2
FLCWHTNCYDY

SEQ ID NO: 9254 - protein, 11 aa, Severe acute respiratory syndrome coronavirus 2
HTNCYDYCIPY

SEQ ID NO: 9255 - protein, 11 aa, Severe acute respiratory syndrome coronavirus 2
CIPYNSVTSSI

SEQ ID NO: 9256 - protein, 11 aa, Severe acute respiratory syndrome coronavirus 2
IPYNSVTSSIV

SEQ ID NO: 9257 - protein, 11 aa, Severe acute respiratory syndrome coronavirus 2
ISEHDYQIGGY

SEQ ID NO: 9258 - protein, 11 aa, Severe acute respiratory syndrome coronavirus 2
WESGVKDCVVL

SEQ ID NO: 9259 - protein, 11 aa, Severe acute respiratory syndrome coronavirus 2
VVLHSYFTSDY

SEQ ID NO: 9260 - protein, 11 aa, Severe acute respiratory syndrome coronavirus 2
VLHSYFTSDYY

SEQ ID NO: 9261 - protein, 11 aa, Severe acute respiratory syndrome coronavirus 2
HSYFTSDYYQL

SEQ ID NO: 9262 - protein, 11 aa, Severe acute respiratory syndrome coronavirus 2
SYFTSDYYQLY

SEQ ID NO: 9263 - protein, 11 aa, Severe acute respiratory syndrome coronavirus 2
YFTSDYYQLYS

SEQ ID NO: 9264 - protein, 11 aa, Severe acute respiratory syndrome coronavirus 2
SDYYQLYSTQL

SEQ ID NO: 9265 - protein, 11 aa, Severe acute respiratory syndrome coronavirus 2
YYQLYSTQLST

SEQ ID NO: 9266 - protein, 11 aa, Severe acute respiratory syndrome coronavirus 2
YSTQLSTDTGV

SEQ ID NO: 9267 - protein, 11 aa, Severe acute respiratory syndrome coronavirus 2
TGVEHVTFFIY

SEQ ID NO: 9268 - protein, 11 aa, Severe acute respiratory syndrome coronavirus 2
VEHVTFFIYNK

SEQ ID NO: 9269 - protein, 11 aa, Severe acute respiratory syndrome coronavirus 2
EHVTFFIYNKI

SEQ ID NO: 9270 - protein, 11 aa, Severe acute respiratory syndrome coronavirus 2
HVTFFIYNKIV

SEQ ID NO: 9271 - protein, 11 aa, Severe acute respiratory syndrome coronavirus 2
QIHTIDGSSGV

SEQ ID NO: 9272 - protein, 8 aa, Severe acute respiratory syndrome coronavirus 2
FQVTIAEI

SEQ ID NO: 9273 - protein, 8 aa, Severe acute respiratory syndrome coronavirus 2
AEILLIIM

SEQ ID NO: 9274 - protein, 8 aa, Severe acute respiratory syndrome coronavirus 2
LLIIMRTF

SEQ ID NO: 9275 - protein, 8 aa, Severe acute respiratory syndrome coronavirus 2
RTFKVSIW

SEQ ID NO: 9276 - protein, 8 aa, Severe acute respiratory syndrome coronavirus 2
NLDYIINL

SEQ ID NO: 9277 - protein, 8 aa, Severe acute respiratory syndrome coronavirus 2
TENKYSQL

SEQ ID NO: 9278 - protein, 9 aa, Severe acute respiratory syndrome coronavirus 2
MFHLVDFQV

SEQ ID NO: 9279 - protein, 9 aa, Severe acute respiratory syndrome coronavirus 2
HLVDFQVTI

SEQ ID NO: 9280 - protein, 9 aa, Severe acute respiratory syndrome coronavirus 2
FQVTIAEIL

SEQ ID NO: 9281 - protein, 9 aa, Severe acute respiratory syndrome coronavirus 2
VTIAEILLI

SEQ ID NO: 9282 - protein, 9 aa, Severe acute respiratory syndrome coronavirus 2
TIAEILLII

SEQ ID NO: 9283 - protein, 9 aa, Severe acute respiratory syndrome coronavirus 2
ILLIIMRTF

SEQ ID NO: 9284 - protein, 9 aa, Severe acute respiratory syndrome coronavirus 2
LLIIMRTFK

SEQ ID NO: 9285 - protein, 9 aa, Severe acute respiratory syndrome coronavirus 2
LIIMRTFKV

SEQ ID NO: 9286 - protein, 9 aa, Severe acute respiratory syndrome coronavirus 2
IMRTFKVSI

SEQ ID NO: 9287 - protein, 9 aa, Severe acute respiratory syndrome coronavirus 2
RTFKVSIWN

SEQ ID NO: 9288 - protein, 9 aa, Severe acute respiratory syndrome coronavirus 2
TFKVSIWNL

SEQ ID NO: 9289 - protein, 9 aa, Severe acute respiratory syndrome coronavirus 2
KVSIWNLDY

SEQ ID NO: 9290 - protein, 9 aa, Severe acute respiratory syndrome coronavirus 2
VSIWNLDYI

SEQ ID NO: 9291 - protein, 9 aa, Severe acute respiratory syndrome coronavirus 2
SIWNLDYII

SEQ ID NO: 9292 - protein, 9 aa, Severe acute respiratory syndrome coronavirus 2
NLDYIINLI

SEQ ID NO: 9293 - protein, 9 aa, Severe acute respiratory syndrome coronavirus 2
NLIIKNLSK

SEQ ID NO: 9294 - protein, 9 aa, Severe acute respiratory syndrome coronavirus 2
IIKNLSKSL

SEQ ID NO: 9295 - protein, 9 aa, Severe acute respiratory syndrome coronavirus 2
LSKSLTENK

SEQ ID NO: 9296 - protein, 9 aa, Severe acute respiratory syndrome coronavirus 2
SKSLTENKY

SEQ ID NO: 9297 - protein, 9 aa, Severe acute respiratory syndrome coronavirus 2
SQLDEEQPM

SEQ ID NO: 9298 - protein, 10 aa, Severe acute respiratory syndrome coronavirus 2
FHLVDFQVTI

SEQ ID NO: 9299 - protein, 10 aa, Severe acute respiratory syndrome coronavirus 2
HLVDFQVTIA

SEQ ID NO: 9300 - protein, 10 aa, Severe acute respiratory syndrome coronavirus 2
FQVTIAEILL

SEQ ID NO: 9301 - protein, 10 aa, Severe acute respiratory syndrome coronavirus 2
QVTIAEILLI

SEQ ID NO: 9302 - protein, 10 aa, Severe acute respiratory syndrome coronavirus 2
VTIAEILLII

SEQ ID NO: 9303 - protein, 10 aa, Severe acute respiratory syndrome coronavirus 2
IAEILLIIMR

SEQ ID NO: 9304 - protein, 10 aa, Severe acute respiratory syndrome coronavirus 2
AEILLIIMRT

SEQ ID NO: 9305 - protein, 10 aa, Severe acute respiratory syndrome coronavirus 2
ILLIIMRTFK

SEQ ID NO: 9306 - protein, 10 aa, Severe acute respiratory syndrome coronavirus 2
LLIIMRTFKV

SEQ ID NO: 9307 - protein, 10 aa, Severe acute respiratory syndrome coronavirus 2
IIMRTFKVSI

SEQ ID NO: 9308 - protein, 10 aa, Severe acute respiratory syndrome coronavirus 2
IMRTFKVSIW

SEQ ID NO: 9309 - protein, 10 aa, Severe acute respiratory syndrome coronavirus 2
RTFKVSIWNL

SEQ ID NO: 9310 - protein, 10 aa, Severe acute respiratory syndrome coronavirus 2
FKVSIWNLDY

SEQ ID NO: 9311 - protein, 10 aa, Severe acute respiratory syndrome coronavirus 2
KVSIWNLDYI

SEQ ID NO: 9312 - protein, 10 aa, Severe acute respiratory syndrome coronavirus 2
VSIWNLDYII

SEQ ID NO: 9313 - protein, 10 aa, Severe acute respiratory syndrome coronavirus 2
IWNLDYIINL

SEQ ID NO: 9314 - protein, 10 aa, Severe acute respiratory syndrome coronavirus 2
WNLDYIINLI

SEQ ID NO: 9315 - protein, 10 aa, Severe acute respiratory syndrome coronavirus 2
NLDYIINLII

SEQ ID NO: 9316 - protein, 10 aa, Severe acute respiratory syndrome coronavirus 2
YIINLIIKNL

SEQ ID NO: 9317 - protein, 10 aa, Severe acute respiratory syndrome coronavirus 2
INLIIKNLSK

SEQ ID NO: 9318 - protein, 10 aa, Severe acute respiratory syndrome coronavirus 2
LIIKNLSKSL

SEQ ID NO: 9319 - protein, 10 aa, Severe acute respiratory syndrome coronavirus 2
NLSKSLTENK

SEQ ID NO: 9320 - protein, 10 aa, Severe acute respiratory syndrome coronavirus 2
LSKSLTENKY

SEQ ID NO: 9321 - protein, 10 aa, Severe acute respiratory syndrome coronavirus 2
SLTENKYSQL

SEQ ID NO: 9322 - protein, 10 aa, Severe acute respiratory syndrome coronavirus 2
YSQLDEEQPM

SEQ ID NO: 9323 - protein, 10 aa, Severe acute respiratory syndrome coronavirus 2
QLDEEQPMEI

SEQ ID NO: 9324 - protein, 11 aa, Severe acute respiratory syndrome coronavirus 2
MFHLVDFQVTI

SEQ ID NO: 9325 - protein, 11 aa, Severe acute respiratory syndrome coronavirus 2
FHLVDFQVTIA

SEQ ID NO: 9326 - protein, 11 aa, Severe acute respiratory syndrome coronavirus 2
FQVTIAEILLI

SEQ ID NO: 9327 - protein, 11 aa, Severe acute respiratory syndrome coronavirus 2
VTIAEILLIIM

SEQ ID NO: 9328 - protein, 11 aa, Severe acute respiratory syndrome coronavirus 2
TIAEILLIIMR

SEQ ID NO: 9329 - protein, 11 aa, Severe acute respiratory syndrome coronavirus 2
AEILLIIMRTF

SEQ ID NO: 9330 - protein, 11 aa, Severe acute respiratory syndrome coronavirus 2
EILLIIMRTFK

SEQ ID NO: 9331 - protein, 11 aa, Severe acute respiratory syndrome coronavirus 2
ILLIIMRTFKV

SEQ ID NO: 9332 - protein, 11 aa, Severe acute respiratory syndrome coronavirus 2
IIMRTFKVSIW

SEQ ID NO: 9333 - protein, 11 aa, Severe acute respiratory syndrome coronavirus 2
MRTFKVSIWNL

SEQ ID NO: 9334 - protein, 11 aa, Severe acute respiratory syndrome coronavirus 2
TFKVSIWNLDY

SEQ ID NO: 9335 - protein, 11 aa, Severe acute respiratory syndrome coronavirus 2
SIWNLDYIINL

SEQ ID NO: 9336 - protein, 11 aa, Severe acute respiratory syndrome coronavirus 2
IWNLDYIINLI

SEQ ID NO: 9337 - protein, 11 aa, Severe acute respiratory syndrome coronavirus 2
IINLIIKNLSK

SEQ ID NO: 9338 - protein, 11 aa, Severe acute respiratory syndrome coronavirus 2
KNLSKSLTENK

SEQ ID NO: 9339 - protein, 8 aa, Severe acute respiratory syndrome coronavirus 2
FLALITLA

SEQ ID NO: 9340 - protein, 8 aa, Severe acute respiratory syndrome coronavirus 2
TYEGNSPF

SEQ ID NO: 9341 - protein, 8 aa, Severe acute respiratory syndrome coronavirus 2
LADNKFAL

SEQ ID NO: 9342 - protein, 8 aa, Severe acute respiratory syndrome coronavirus 2
NKFALTCF

SEQ ID NO: 9343 - protein, 8 aa, Severe acute respiratory syndrome coronavirus 2
LTCFSTQF

SEQ ID NO: 9344 - protein, 8 aa, Severe acute respiratory syndrome coronavirus 2
CFSTQFAF

SEQ ID NO: 9345 - protein, 8 aa, Severe acute respiratory syndrome coronavirus 2
HVYQLRAR

SEQ ID NO: 9346 - protein, 8 aa, Severe acute respiratory syndrome coronavirus 2
RARSVSPK

SEQ ID NO: 9347 - protein, 8 aa, Severe acute respiratory syndrome coronavirus 2
RSVSPKLF

SEQ ID NO: 9348 - protein, 8 aa, Severe acute respiratory syndrome coronavirus 2
QELYSPIF

SEQ ID NO: 9349 - protein, 8 aa, Severe acute respiratory syndrome coronavirus 2
LYSPIFLI

SEQ ID NO: 9350 - protein, 8 aa, Severe acute respiratory syndrome coronavirus 2
YSPIFLIV

SEQ ID NO: 9351 - protein, 8 aa, Severe acute respiratory syndrome coronavirus 2
SPIFLIVA

SEQ ID NO: 9352 - protein, 8 aa, Severe acute respiratory syndrome coronavirus 2
PIFLIVAA

SEQ ID NO: 9353 - protein, 8 aa, Severe acute respiratory syndrome coronavirus 2
FLIVAAIV

SEQ ID NO: 9354 - protein, 8 aa, Severe acute respiratory syndrome coronavirus 2
ITLCFTLK

SEQ ID NO: 9355 - protein, 9 aa, Severe acute respiratory syndrome coronavirus 2
MKIILFLAL

SEQ ID NO: 9356 - protein, 9 aa, Severe acute respiratory syndrome coronavirus 2
KIILFLALI

SEQ ID NO: 9357 - protein, 9 aa, Severe acute respiratory syndrome coronavirus 2
ILFLALITL

SEQ ID NO: 9358 - protein, 9 aa, Severe acute respiratory syndrome coronavirus 2
FLALITLAT

SEQ ID NO: 9359 - protein, 9 aa, Severe acute respiratory syndrome coronavirus 2
LITLATCEL

SEQ ID NO: 9360 - protein, 9 aa, Severe acute respiratory syndrome coronavirus 2
ITLATCELY

SEQ ID NO: 9361 - protein, 9 aa, Severe acute respiratory syndrome coronavirus 2
LATCELYHY

SEQ ID NO: 9362 - protein, 9 aa, Severe acute respiratory syndrome coronavirus 2
ELYHYQECV

SEQ ID NO: 9363 - protein, 9 aa, Severe acute respiratory syndrome coronavirus 2
LYHYQECVR

SEQ ID NO: 9364 - protein, 9 aa, Severe acute respiratory syndrome coronavirus 2
QECVRGTTV

SEQ ID NO: 9365 - protein, 9 aa, Severe acute respiratory syndrome coronavirus 2
CVRGTTVLL

SEQ ID NO: 9366 - protein, 9 aa, Severe acute respiratory syndrome coronavirus 2
VRGTTVLLK

SEQ ID NO: 9367 - protein, 9 aa, Severe acute respiratory syndrome coronavirus 2
KEPCSSGTY

SEQ ID NO: 9368 - protein, 9 aa, Severe acute respiratory syndrome coronavirus 2
GTYEGNSPF

SEQ ID NO: 9369 - protein, 9 aa, Severe acute respiratory syndrome coronavirus 2
YEGNSPFHP

SEQ ID NO: 9370 - protein, 9 aa, Severe acute respiratory syndrome coronavirus 2
EGNSPFHPL

SEQ ID NO: 9371 - protein, 9 aa, Severe acute respiratory syndrome coronavirus 2
HPLADNKFA

SEQ ID NO: 9372 - protein, 9 aa, Severe acute respiratory syndrome coronavirus 2
PLADNKFAL

SEQ ID NO: 9373 - protein, 9 aa, Severe acute respiratory syndrome coronavirus 2
ALTCFSTQF

SEQ ID NO: 9374 - protein, 9 aa, Severe acute respiratory syndrome coronavirus 2
LTCFSTQFA

SEQ ID NO: 9375 - protein, 9 aa, Severe acute respiratory syndrome coronavirus 2
TCFSTQFAF

SEQ ID NO: 9376 - protein, 9 aa, Severe acute respiratory syndrome coronavirus 2
FAFACPDGV

SEQ ID NO: 9377 - protein, 9 aa, Severe acute respiratory syndrome coronavirus 2
CPDGVKHVY

SEQ ID NO: 9378 - protein, 9 aa, Severe acute respiratory syndrome coronavirus 2
GVKHVYQLR

SEQ ID NO: 9379 - protein, 9 aa, Severe acute respiratory syndrome coronavirus 2
VYQLRARSV

SEQ ID NO: 9380 - protein, 9 aa, Severe acute respiratory syndrome coronavirus 2
YQLRARSVS

SEQ ID NO: 9381 - protein, 9 aa, Severe acute respiratory syndrome coronavirus 2
LRARSVSPK

SEQ ID NO: 9382 - protein, 9 aa, Severe acute respiratory syndrome coronavirus 2
RARSVSPKL

SEQ ID NO: 9383 - protein, 9 aa, Severe acute respiratory syndrome coronavirus 2
ARSVSPKLF

SEQ ID NO: 9384 - protein, 9 aa, Severe acute respiratory syndrome coronavirus 2
RSVSPKLFI

SEQ ID NO: 9385 - protein, 9 aa, Severe acute respiratory syndrome coronavirus 2
SVSPKLFIR

SEQ ID NO: 9386 - protein, 9 aa, Severe acute respiratory syndrome coronavirus 2
KLFIRQEEV

SEQ ID NO: 9387 - protein, 9 aa, Severe acute respiratory syndrome coronavirus 2
IRQEEVQEL

SEQ ID NO: 9388 - protein, 9 aa, Severe acute respiratory syndrome coronavirus 2
RQEEVQELY

SEQ ID NO: 9389 - protein, 9 aa, Severe acute respiratory syndrome coronavirus 2
EEVQELYSP

SEQ ID NO: 9390 - protein, 9 aa, Severe acute respiratory syndrome coronavirus 2
EVQELYSPI

SEQ ID NO: 9391 - protein, 9 aa, Severe acute respiratory syndrome coronavirus 2
VQELYSPIF

SEQ ID NO: 9392 - protein, 9 aa, Severe acute respiratory syndrome coronavirus 2
QELYSPIFL

SEQ ID NO: 9393 - protein, 9 aa, Severe acute respiratory syndrome coronavirus 2
ELYSPIFLI

SEQ ID NO: 9394 - protein, 9 aa, Severe acute respiratory syndrome coronavirus 2
LYSPIFLIV

SEQ ID NO: 9395 - protein, 9 aa, Severe acute respiratory syndrome coronavirus 2
SPIFLIVAA

SEQ ID NO: 9396 - protein, 9 aa, Severe acute respiratory syndrome coronavirus 2
FLIVAAIVF

SEQ ID NO: 9397 - protein, 9 aa, Severe acute respiratory syndrome coronavirus 2
LIVAAIVFI

SEQ ID NO: 9398 - protein, 9 aa, Severe acute respiratory syndrome coronavirus 2
IVAAIVFIT

SEQ ID NO: 9399 - protein, 9 aa, Severe acute respiratory syndrome coronavirus 2
VAAIVFITL

SEQ ID NO: 9400 - protein, 9 aa, Severe acute respiratory syndrome coronavirus 2
AIVFITLCF

SEQ ID NO: 9401 - protein, 9 aa, Severe acute respiratory syndrome coronavirus 2
IVFITLCFT

SEQ ID NO: 9402 - protein, 9 aa, Severe acute respiratory syndrome coronavirus 2
VFITLCFTL

SEQ ID NO: 9403 - protein, 9 aa, Severe acute respiratory syndrome coronavirus 2
FITLCFTLK

SEQ ID NO: 9404 - protein, 9 aa, Severe acute respiratory syndrome coronavirus 2
ITLCFTLKR

SEQ ID NO: 9405 - protein, 9 aa, Severe acute respiratory syndrome coronavirus 2
TLCFTLKRK

SEQ ID NO: 9406 - protein, 10 aa, Severe acute respiratory syndrome coronavirus 2
MKIILFLALI

SEQ ID NO: 9407 - protein, 10 aa, Severe acute respiratory syndrome coronavirus 2
IILFLALITL

SEQ ID NO: 9408 - protein, 10 aa, Severe acute respiratory syndrome coronavirus 2
ILFLALITLA

SEQ ID NO: 9409 - protein, 10 aa, Severe acute respiratory syndrome coronavirus 2
LFLALITLAT

SEQ ID NO: 9410 - protein, 10 aa, Severe acute respiratory syndrome coronavirus 2
FLALITLATC

SEQ ID NO: 9411 - protein, 10 aa, Severe acute respiratory syndrome coronavirus 2
ALITLATCEL

SEQ ID NO: 9412 - protein, 10 aa, Severe acute respiratory syndrome coronavirus 2
LITLATCELY

SEQ ID NO: 9413 - protein, 10 aa, Severe acute respiratory syndrome coronavirus 2
ITLATCELYH

SEQ ID NO: 9414 - protein, 10 aa, Severe acute respiratory syndrome coronavirus 2
TLATCELYHY

SEQ ID NO: 9415 - protein, 10 aa, Severe acute respiratory syndrome coronavirus 2
CELYHYQECV

SEQ ID NO: 9416 - protein, 10 aa, Severe acute respiratory syndrome coronavirus 2
ELYHYQECVR

SEQ ID NO: 9417 - protein, 10 aa, Severe acute respiratory syndrome coronavirus 2
YQECVRGTTV

SEQ ID NO: 9418 - protein, 10 aa, Severe acute respiratory syndrome coronavirus 2
QECVRGTTVL

SEQ ID NO: 9419 - protein, 10 aa, Severe acute respiratory syndrome coronavirus 2
ECVRGTTVLL

SEQ ID NO: 9420 - protein, 10 aa, Severe acute respiratory syndrome coronavirus 2
CVRGTTVLLK

SEQ ID NO: 9421 - protein, 10 aa, Severe acute respiratory syndrome coronavirus 2
LLKEPCSSGT

SEQ ID NO: 9422 - protein, 10 aa, Severe acute respiratory syndrome coronavirus 2
LKEPCSSGTY

SEQ ID NO: 9423 - protein, 10 aa, Severe acute respiratory syndrome coronavirus 2
SGTYEGNSPF

SEQ ID NO: 9424 - protein, 10 aa, Severe acute respiratory syndrome coronavirus 2
YEGNSPFHPL

SEQ ID NO: 9425 - protein, 10 aa, Severe acute respiratory syndrome coronavirus 2
FHPLADNKFA

SEQ ID NO: 9426 - protein, 10 aa, Severe acute respiratory syndrome coronavirus 2
HPLADNKFAL

SEQ ID NO: 9427 - protein, 10 aa, Severe acute respiratory syndrome coronavirus 2
FALTCFSTQF

SEQ ID NO: 9428 - protein, 10 aa, Severe acute respiratory syndrome coronavirus 2
ALTCFSTQFA

SEQ ID NO: 9429 - protein, 10 aa, Severe acute respiratory syndrome coronavirus 2
LTCFSTQFAF

SEQ ID NO: 9430 - protein, 10 aa, Severe acute respiratory syndrome coronavirus 2
QFAFACPDGV

SEQ ID NO: 9431 - protein, 10 aa, Severe acute respiratory syndrome coronavirus 2
FAFACPDGVK

SEQ ID NO: 9432 - protein, 10 aa, Severe acute respiratory syndrome coronavirus 2
ACPDGVKHVY

SEQ ID NO: 9433 - protein, 10 aa, Severe acute respiratory syndrome coronavirus 2
DGVKHVYQLR

SEQ ID NO: 9434 - protein, 10 aa, Severe acute respiratory syndrome coronavirus 2
HVYQLRARSV

SEQ ID NO: 9435 - protein, 10 aa, Severe acute respiratory syndrome coronavirus 2
QLRARSVSPK

SEQ ID NO: 9436 - protein, 10 aa, Severe acute respiratory syndrome coronavirus 2
LRARSVSPKL

SEQ ID NO: 9437 - protein, 10 aa, Severe acute respiratory syndrome coronavirus 2
RARSVSPKLF

SEQ ID NO: 9438 - protein, 10 aa, Severe acute respiratory syndrome coronavirus 2
ARSVSPKLFI

SEQ ID NO: 9439 - protein, 10 aa, Severe acute respiratory syndrome coronavirus 2
RSVSPKLFIR

SEQ ID NO: 9440 - protein, 10 aa, Severe acute respiratory syndrome coronavirus 2
SVSPKLFIRQ

SEQ ID NO: 9441 - protein, 10 aa, Severe acute respiratory syndrome coronavirus 2
PKLFIRQEEV

SEQ ID NO: 9442 - protein, 10 aa, Severe acute respiratory syndrome coronavirus 2
FIRQEEVQEL

SEQ ID NO: 9443 - protein, 10 aa, Severe acute respiratory syndrome coronavirus 2
IRQEEVQELY

SEQ ID NO: 9444 - protein, 10 aa, Severe acute respiratory syndrome coronavirus 2
EEVQELYSPI

SEQ ID NO: 9445 - protein, 10 aa, Severe acute respiratory syndrome coronavirus 2
EVQELYSPIF

SEQ ID NO: 9446 - protein, 10 aa, Severe acute respiratory syndrome coronavirus 2
VQELYSPIFL

SEQ ID NO: 9447 - protein, 10 aa, Severe acute respiratory syndrome coronavirus 2
QELYSPIFLI

SEQ ID NO: 9448 - protein, 10 aa, Severe acute respiratory syndrome coronavirus 2
ELYSPIFLIV

SEQ ID NO: 9449 - protein, 10 aa, Severe acute respiratory syndrome coronavirus 2
YSPIFLIVAA

SEQ ID NO: 9450 - protein, 10 aa, Severe acute respiratory syndrome coronavirus 2
SPIFLIVAAI

SEQ ID NO: 9451 - protein, 10 aa, Severe acute respiratory syndrome coronavirus 2
IFLIVAAIVF

SEQ ID NO: 9452 - protein, 10 aa, Severe acute respiratory syndrome coronavirus 2
FLIVAAIVFI

SEQ ID NO: 9453 - protein, 10 aa, Severe acute respiratory syndrome coronavirus 2
IVAAIVFITL

SEQ ID NO: 9454 - protein, 10 aa, Severe acute respiratory syndrome coronavirus 2
AAIVFITLCF

SEQ ID NO: 9455 - protein, 10 aa, Severe acute respiratory syndrome coronavirus 2
IVFITLCFTL

SEQ ID NO: 9456 - protein, 10 aa, Severe acute respiratory syndrome coronavirus 2
VFITLCFTLK

SEQ ID NO: 9457 - protein, 10 aa, Severe acute respiratory syndrome coronavirus 2
FITLCFTLKR

SEQ ID NO: 9458 - protein, 10 aa, Severe acute respiratory syndrome coronavirus 2
ITLCFTLKRK

SEQ ID NO: 9459 - protein, 11 aa, Severe acute respiratory syndrome coronavirus 2
KIILFLALITL

SEQ ID NO: 9460 - protein, 11 aa, Severe acute respiratory syndrome coronavirus 2
ALITLATCELY

SEQ ID NO: 9461 - protein, 11 aa, Severe acute respiratory syndrome coronavirus 2
ITLATCELYHY

SEQ ID NO: 9462 - protein, 11 aa, Severe acute respiratory syndrome coronavirus 2
TCELYHYQECV

SEQ ID NO: 9463 - protein, 11 aa, Severe acute respiratory syndrome coronavirus 2
YQECVRGTTVL

SEQ ID NO: 9464 - protein, 11 aa, Severe acute respiratory syndrome coronavirus 2
QECVRGTTVLL

SEQ ID NO: 9465 - protein, 11 aa, Severe acute respiratory syndrome coronavirus 2
LLKEPCSSGTY

SEQ ID NO: 9466 - protein, 11 aa, Severe acute respiratory syndrome coronavirus 2
SSGTYEGNSPF

SEQ ID NO: 9467 - protein, 11 aa, Severe acute respiratory syndrome coronavirus 2
TYEGNSPFHPL

SEQ ID NO: 9468 - protein, 11 aa, Severe acute respiratory syndrome coronavirus 2
YEGNSPFHPLA

SEQ ID NO: 9469 - protein, 11 aa, Severe acute respiratory syndrome coronavirus 2
FHPLADNKFAL

SEQ ID NO: 9470 - protein, 11 aa, Severe acute respiratory syndrome coronavirus 2
KFALTCFSTQF

SEQ ID NO: 9471 - protein, 11 aa, Severe acute respiratory syndrome coronavirus 2
ALTCFSTQFAF

SEQ ID NO: 9472 - protein, 11 aa, Severe acute respiratory syndrome coronavirus 2
TQFAFACPDGV

SEQ ID NO: 9473 - protein, 11 aa, Severe acute respiratory syndrome coronavirus 2
FACPDGVKHVY

SEQ ID NO: 9474 - protein, 11 aa, Severe acute respiratory syndrome coronavirus 2
CPDGVKHVYQL

SEQ ID NO: 9475 - protein, 11 aa, Severe acute respiratory syndrome coronavirus 2
GVKHVYQLRAR

SEQ ID NO: 9476 - protein, 11 aa, Severe acute respiratory syndrome coronavirus 2
YQLRARSVSPK

SEQ ID NO: 9477 - protein, 11 aa, Severe acute respiratory syndrome coronavirus 2
QLRARSVSPKL

SEQ ID NO: 9478 - protein, 11 aa, Severe acute respiratory syndrome coronavirus 2
LRARSVSPKLF

SEQ ID NO: 9479 - protein, 11 aa, Severe acute respiratory syndrome coronavirus 2
RARSVSPKLFI

SEQ ID NO: 9480 - protein, 11 aa, Severe acute respiratory syndrome coronavirus 2
ARSVSPKLFIR

SEQ ID NO: 9481 - protein, 11 aa, Severe acute respiratory syndrome coronavirus 2
RSVSPKLFIRQ

SEQ ID NO: 9482 - protein, 11 aa, Severe acute respiratory syndrome coronavirus 2
SPKLFIRQEEV

SEQ ID NO: 9483 - protein, 11 aa, Severe acute respiratory syndrome coronavirus 2
VQELYSPIFLI

SEQ ID NO: 9484 - protein, 11 aa, Severe acute respiratory syndrome coronavirus 2
QELYSPIFLIV

SEQ ID NO: 9485 - protein, 11 aa, Severe acute respiratory syndrome coronavirus 2
LYSPIFLIVAA

SEQ ID NO: 9486 - protein, 11 aa, Severe acute respiratory syndrome coronavirus 2
IFLIVAAIVFI

SEQ ID NO: 9487 - protein, 11 aa, Severe acute respiratory syndrome coronavirus 2
FLIVAAIVFIT

SEQ ID NO: 9488 - protein, 11 aa, Severe acute respiratory syndrome coronavirus 2
IVFITLCFTLK

SEQ ID NO: 9489 - protein, 11 aa, Severe acute respiratory syndrome coronavirus 2
VFITLCFTLKR

SEQ ID NO: 9490 - protein, 8 aa, Severe acute respiratory syndrome coronavirus 2
LSLIDFYL

SEQ ID NO: 9491 - protein, 8 aa, Severe acute respiratory syndrome coronavirus 2
FYLCFLAF

SEQ ID NO: 9492 - protein, 8 aa, Severe acute respiratory syndrome coronavirus 2
YLCFLAFL

SEQ ID NO: 9493 - protein, 8 aa, Severe acute respiratory syndrome coronavirus 2
FLAFLLFL

SEQ ID NO: 9494 - protein, 8 aa, Severe acute respiratory syndrome coronavirus 2
LAFLLFLV

SEQ ID NO: 9495 - protein, 8 aa, Severe acute respiratory syndrome coronavirus 2
FLLFLVLI

SEQ ID NO: 9496 - protein, 8 aa, Severe acute respiratory syndrome coronavirus 2
FLVLIMLI

SEQ ID NO: 9497 - protein, 8 aa, Severe acute respiratory syndrome coronavirus 2
IFWFSLEL

SEQ ID NO: 9498 - protein, 9 aa, Severe acute respiratory syndrome coronavirus 2
IELSLIDFY

SEQ ID NO: 9499 - protein, 9 aa, Severe acute respiratory syndrome coronavirus 2
ELSLIDFYL

SEQ ID NO: 9500 - protein, 9 aa, Severe acute respiratory syndrome coronavirus 2
SLIDFYLCF

SEQ ID NO: 9501 - protein, 9 aa, Severe acute respiratory syndrome coronavirus 2
LIDFYLCFL

SEQ ID NO: 9502 - protein, 9 aa, Severe acute respiratory syndrome coronavirus 2
DFYLCFLAF

SEQ ID NO: 9503 - protein, 9 aa, Severe acute respiratory syndrome coronavirus 2
FYLCFLAFL

SEQ ID NO: 9504 - protein, 9 aa, Severe acute respiratory syndrome coronavirus 2
YLCFLAFLL

SEQ ID NO: 9505 - protein, 9 aa, Severe acute respiratory syndrome coronavirus 2
FLAFLLFLV

SEQ ID NO: 9506 - protein, 9 aa, Severe acute respiratory syndrome coronavirus 2
LAFLLFLVL

SEQ ID NO: 9507 - protein, 9 aa, Severe acute respiratory syndrome coronavirus 2
FLLFLVLIM

SEQ ID NO: 9508 - protein, 9 aa, Severe acute respiratory syndrome coronavirus 2
LLFLVLIML

SEQ ID NO: 9509 - protein, 9 aa, Severe acute respiratory syndrome coronavirus 2
FLVLIMLII

SEQ ID NO: 9510 - protein, 9 aa, Severe acute respiratory syndrome coronavirus 2
IMLIIFWFS

SEQ ID NO: 9511 - protein, 9 aa, Severe acute respiratory syndrome coronavirus 2
MLIIFWFSL

SEQ ID NO: 9512 - protein, 9 aa, Severe acute respiratory syndrome coronavirus 2
IIFWFSLEL

SEQ ID NO: 9513 - protein, 10 aa, Severe acute respiratory syndrome coronavirus 2
MIELSLIDFY

SEQ ID NO: 9514 - protein, 10 aa, Severe acute respiratory syndrome coronavirus 2
IELSLIDFYL

SEQ ID NO: 9515 - protein, 10 aa, Severe acute respiratory syndrome coronavirus 2
ELSLIDFYLC

SEQ ID NO: 9516 - protein, 10 aa, Severe acute respiratory syndrome coronavirus 2
LSLIDFYLCF

SEQ ID NO: 9517 - protein, 10 aa, Severe acute respiratory syndrome coronavirus 2
SLIDFYLCFL

SEQ ID NO: 9518 - protein, 10 aa, Severe acute respiratory syndrome coronavirus 2
LIDFYLCFLA

SEQ ID NO: 9519 - protein, 10 aa, Severe acute respiratory syndrome coronavirus 2
FYLCFLAFLL

SEQ ID NO: 9520 - protein, 10 aa, Severe acute respiratory syndrome coronavirus 2
YLCFLAFLLF

SEQ ID NO: 9521 - protein, 10 aa, Severe acute respiratory syndrome coronavirus 2
CFLAFLLFLV

SEQ ID NO: 9522 - protein, 10 aa, Severe acute respiratory syndrome coronavirus 2
FLAFLLFLVL

SEQ ID NO: 9523 - protein, 10 aa, Severe acute respiratory syndrome coronavirus 2
FLLFLVLIML

SEQ ID NO: 9524 - protein, 10 aa, Severe acute respiratory syndrome coronavirus 2
LLFLVLIMLI

SEQ ID NO: 9525 - protein, 10 aa, Severe acute respiratory syndrome coronavirus 2
IMLIIFWFSL

SEQ ID NO: 9526 - protein, 10 aa, Severe acute respiratory syndrome coronavirus 2
LIIFWFSLEL

SEQ ID NO: 9527 - protein, 10 aa, Severe acute respiratory syndrome coronavirus 2
IIFWFSLELQ

SEQ ID NO: 9528 - protein, 11 aa, Severe acute respiratory syndrome coronavirus 2
MIELSLIDFYL

SEQ ID NO: 9529 - protein, 11 aa, Severe acute respiratory syndrome coronavirus 2
LSLIDFYLCFL

SEQ ID NO: 9530 - protein, 11 aa, Severe acute respiratory syndrome coronavirus 2
SLIDFYLCFLA

SEQ ID NO: 9531 - protein, 11 aa, Severe acute respiratory syndrome coronavirus 2
FYLCFLAFLLF

SEQ ID NO: 9532 - protein, 11 aa, Severe acute respiratory syndrome coronavirus 2
YLCFLAFLLFL

SEQ ID NO: 9533 - protein, 11 aa, Severe acute respiratory syndrome coronavirus 2
LCFLAFLLFLV

SEQ ID NO: 9534 - protein, 11 aa, Severe acute respiratory syndrome coronavirus 2
FLAFLLFLVLI

SEQ ID NO: 9535 - protein, 11 aa, Severe acute respiratory syndrome coronavirus 2
FLLFLVLIMLI

SEQ ID NO: 9536 - protein, 11 aa, Severe acute respiratory syndrome coronavirus 2
MLIIFWFSLEL

SEQ ID NO: 9537 - protein, 8 aa, Severe acute respiratory syndrome coronavirus 2
FLGIITTV

SEQ ID NO: 9538 - protein, 8 aa, Severe acute respiratory syndrome coronavirus 2
FYSKWYIR

SEQ ID NO: 9539 - protein, 8 aa, Severe acute respiratory syndrome coronavirus 2
WYIRVGAR

SEQ ID NO: 9540 - protein, 8 aa, Severe acute respiratory syndrome coronavirus 2
YTVSCLPF

SEQ ID NO: 9541 - protein, 8 aa, Severe acute respiratory syndrome coronavirus 2
KLGSLVVR

SEQ ID NO: 9542 - protein, 8 aa, Severe acute respiratory syndrome coronavirus 2
SLVVRCSF

SEQ ID NO: 9543 - protein, 8 aa, Severe acute respiratory syndrome coronavirus 2
FYEDFLEY

SEQ ID NO: 9544 - protein, 8 aa, Severe acute respiratory syndrome coronavirus 2
YHDVRVVL

SEQ ID NO: 9545 - protein, 9 aa, Severe acute respiratory syndrome coronavirus 2
MKFLVFLGI

SEQ ID NO: 9546 - protein, 9 aa, Severe acute respiratory syndrome coronavirus 2
LVFLGIITT

SEQ ID NO: 9547 - protein, 9 aa, Severe acute respiratory syndrome coronavirus 2
VFLGIITTV

SEQ ID NO: 9548 - protein, 9 aa, Severe acute respiratory syndrome coronavirus 2
FLGIITTVA

SEQ ID NO: 9549 - protein, 9 aa, Severe acute respiratory syndrome coronavirus 2
GIITTVAAF

SEQ ID NO: 9550 - protein, 9 aa, Severe acute respiratory syndrome coronavirus 2
AAFHQECSL

SEQ ID NO: 9551 - protein, 9 aa, Severe acute respiratory syndrome coronavirus 2
QSCTQHQPY

SEQ ID NO: 9552 - protein, 9 aa, Severe acute respiratory syndrome coronavirus 2
YVVDDPCPI

SEQ ID NO: 9553 - protein, 9 aa, Severe acute respiratory syndrome coronavirus 2
CPIHFYSKW

SEQ ID NO: 9554 - protein, 9 aa, Severe acute respiratory syndrome coronavirus 2
IHFYSKWYI

SEQ ID NO: 9555 - protein, 9 aa, Severe acute respiratory syndrome coronavirus 2
HFYSKWYIR

SEQ ID NO: 9556 - protein, 9 aa, Severe acute respiratory syndrome coronavirus 2
FYSKWYIRV

SEQ ID NO: 9557 - protein, 9 aa, Severe acute respiratory syndrome coronavirus 2
KWYIRVGAR

SEQ ID NO: 9558 - protein, 9 aa, Severe acute respiratory syndrome coronavirus 2
WYIRVGARK

SEQ ID NO: 9559 - protein, 9 aa, Severe acute respiratory syndrome coronavirus 2
VGARKSAPL

SEQ ID NO: 9560 - protein, 9 aa, Severe acute respiratory syndrome coronavirus 2
GARKSAPLI

SEQ ID NO: 9561 - protein, 9 aa, Severe acute respiratory syndrome coronavirus 2
RKSAPLIEL

SEQ ID NO: 9562 - protein, 9 aa, Severe acute respiratory syndrome coronavirus 2
KSAPLIELC

SEQ ID NO: 9563 - protein, 9 aa, Severe acute respiratory syndrome coronavirus 2
GSKSPIQYI

SEQ ID NO: 9564 - protein, 9 aa, Severe acute respiratory syndrome coronavirus 2
IQYIDIGNY

SEQ ID NO: 9565 - protein, 9 aa, Severe acute respiratory syndrome coronavirus 2
YIDIGNYTV

SEQ ID NO: 9566 - protein, 9 aa, Severe acute respiratory syndrome coronavirus 2
IGNYTVSCL

SEQ ID NO: 9567 - protein, 9 aa, Severe acute respiratory syndrome coronavirus 2
NYTVSCLPF

SEQ ID NO: 9568 - protein, 9 aa, Severe acute respiratory syndrome coronavirus 2
YTVSCLPFT

SEQ ID NO: 9569 - protein, 9 aa, Severe acute respiratory syndrome coronavirus 2
TVSCLPFTI

SEQ ID NO: 9570 - protein, 9 aa, Severe acute respiratory syndrome coronavirus 2
FTINCQEPK

SEQ ID NO: 9571 - protein, 9 aa, Severe acute respiratory syndrome coronavirus 2
CQEPKLGSL

SEQ ID NO: 9572 - protein, 9 aa, Severe acute respiratory syndrome coronavirus 2
EPKLGSLVV

SEQ ID NO: 9573 - protein, 9 aa, Severe acute respiratory syndrome coronavirus 2
KLGSLVVRC

SEQ ID NO: 9574 - protein, 9 aa, Severe acute respiratory syndrome coronavirus 2
GSLVVRCSF

SEQ ID NO: 9575 - protein, 9 aa, Severe acute respiratory syndrome coronavirus 2
SLVVRCSFY

SEQ ID NO: 9576 - protein, 9 aa, Severe acute respiratory syndrome coronavirus 2
SFYEDFLEY

SEQ ID NO: 9577 - protein, 9 aa, Severe acute respiratory syndrome coronavirus 2
FYEDFLEYH

SEQ ID NO: 9578 - protein, 9 aa, Severe acute respiratory syndrome coronavirus 2
DFLEYHDVR

SEQ ID NO: 9579 - protein, 9 aa, Severe acute respiratory syndrome coronavirus 2
FLEYHDVRV

SEQ ID NO: 9580 - protein, 9 aa, Severe acute respiratory syndrome coronavirus 2
LEYHDVRVV

SEQ ID NO: 9581 - protein, 9 aa, Severe acute respiratory syndrome coronavirus 2
EYHDVRVVL

SEQ ID NO: 9582 - protein, 9 aa, Severe acute respiratory syndrome coronavirus 2
DVRVVLDFI

SEQ ID NO: 9583 - protein, 10 aa, Severe acute respiratory syndrome coronavirus 2
FLVFLGIITT

SEQ ID NO: 9584 - protein, 10 aa, Severe acute respiratory syndrome coronavirus 2
LVFLGIITTV

SEQ ID NO: 9585 - protein, 10 aa, Severe acute respiratory syndrome coronavirus 2
VFLGIITTVA

SEQ ID NO: 9586 - protein, 10 aa, Severe acute respiratory syndrome coronavirus 2
FLGIITTVAA

SEQ ID NO: 9587 - protein, 10 aa, Severe acute respiratory syndrome coronavirus 2
LGIITTVAAF

SEQ ID NO: 9588 - protein, 10 aa, Severe acute respiratory syndrome coronavirus 2
VAAFHQECSL

SEQ ID NO: 9589 - protein, 10 aa, Severe acute respiratory syndrome coronavirus 2
LQSCTQHQPY

SEQ ID NO: 9590 - protein, 10 aa, Severe acute respiratory syndrome coronavirus 2
VVDDPCPIHF

SEQ ID NO: 9591 - protein, 10 aa, Severe acute respiratory syndrome coronavirus 2
VDDPCPIHFY

SEQ ID NO: 9592 - protein, 10 aa, Severe acute respiratory syndrome coronavirus 2
CPIHFYSKWY

SEQ ID NO: 9593 - protein, 10 aa, Severe acute respiratory syndrome coronavirus 2
IHFYSKWYIR

SEQ ID NO: 9594 - protein, 10 aa, Severe acute respiratory syndrome coronavirus 2
HFYSKWYIRV

SEQ ID NO: 9595 - protein, 10 aa, Severe acute respiratory syndrome coronavirus 2
YSKWYIRVGA

SEQ ID NO: 9596 - protein, 10 aa, Severe acute respiratory syndrome coronavirus 2
SKWYIRVGAR

SEQ ID NO: 9597 - protein, 10 aa, Severe acute respiratory syndrome coronavirus 2
KWYIRVGARK

SEQ ID NO: 9598 - protein, 10 aa, Severe acute respiratory syndrome coronavirus 2
RVGARKSAPL

SEQ ID NO: 9599 - protein, 10 aa, Severe acute respiratory syndrome coronavirus 2
ARKSAPLIEL

SEQ ID NO: 9600 - protein, 10 aa, Severe acute respiratory syndrome coronavirus 2
KSAPLIELCV

SEQ ID NO: 9601 - protein, 10 aa, Severe acute respiratory syndrome coronavirus 2
AGSKSPIQYI

SEQ ID NO: 9602 - protein, 10 aa, Severe acute respiratory syndrome coronavirus 2
PIQYIDIGNY

SEQ ID NO: 9603 - protein, 10 aa, Severe acute respiratory syndrome coronavirus 2
IQYIDIGNYT

SEQ ID NO: 9604 - protein, 10 aa, Severe acute respiratory syndrome coronavirus 2
QYIDIGNYTV

SEQ ID NO: 9605 - protein, 10 aa, Severe acute respiratory syndrome coronavirus 2
YIDIGNYTVS

SEQ ID NO: 9606 - protein, 10 aa, Severe acute respiratory syndrome coronavirus 2
GNYTVSCLPF

SEQ ID NO: 9607 - protein, 10 aa, Severe acute respiratory syndrome coronavirus 2
YTVSCLPFTI

SEQ ID NO: 9608 - protein, 10 aa, Severe acute respiratory syndrome coronavirus 2
LPFTINCQEP

SEQ ID NO: 9609 - protein, 10 aa, Severe acute respiratory syndrome coronavirus 2
PFTINCQEPK

SEQ ID NO: 9610 - protein, 10 aa, Severe acute respiratory syndrome coronavirus 2
FTINCQEPKL

SEQ ID NO: 9611 - protein, 10 aa, Severe acute respiratory syndrome coronavirus 2
QEPKLGSLVV

SEQ ID NO: 9612 - protein, 10 aa, Severe acute respiratory syndrome coronavirus 2
LGSLVVRCSF

SEQ ID NO: 9613 - protein, 10 aa, Severe acute respiratory syndrome coronavirus 2
GSLVVRCSFY

SEQ ID NO: 9614 - protein, 10 aa, Severe acute respiratory syndrome coronavirus 2
VVRCSFYEDF

SEQ ID NO: 9615 - protein, 10 aa, Severe acute respiratory syndrome coronavirus 2
VRCSFYEDFL

SEQ ID NO: 9616 - protein, 10 aa, Severe acute respiratory syndrome coronavirus 2
CSFYEDFLEY

SEQ ID NO: 9617 - protein, 10 aa, Severe acute respiratory syndrome coronavirus 2
SFYEDFLEYH

SEQ ID NO: 9618 - protein, 10 aa, Severe acute respiratory syndrome coronavirus 2
YEDFLEYHDV

SEQ ID NO: 9619 - protein, 10 aa, Severe acute respiratory syndrome coronavirus 2
EDFLEYHDVR

SEQ ID NO: 9620 - protein, 10 aa, Severe acute respiratory syndrome coronavirus 2
FLEYHDVRVV

SEQ ID NO: 9621 - protein, 10 aa, Severe acute respiratory syndrome coronavirus 2
LEYHDVRVVL

SEQ ID NO: 9622 - protein, 10 aa, Severe acute respiratory syndrome coronavirus 2
YHDVRVVLDF

SEQ ID NO: 9623 - protein, 11 aa, Severe acute respiratory syndrome coronavirus 2
FLVFLGIITTV

SEQ ID NO: 9624 - protein, 11 aa, Severe acute respiratory syndrome coronavirus 2
FLGIITTVAAF

SEQ ID NO: 9625 - protein, 11 aa, Severe acute respiratory syndrome coronavirus 2
SLQSCTQHQPY

SEQ ID NO: 9626 - protein, 11 aa, Severe acute respiratory syndrome coronavirus 2
YVVDDPCPIHF

SEQ ID NO: 9627 - protein, 11 aa, Severe acute respiratory syndrome coronavirus 2
VVDDPCPIHFY

SEQ ID NO: 9628 - protein, 11 aa, Severe acute respiratory syndrome coronavirus 2
PIHFYSKWYIR

SEQ ID NO: 9629 - protein, 11 aa, Severe acute respiratory syndrome coronavirus 2
IHFYSKWYIRV

SEQ ID NO: 9630 - protein, 11 aa, Severe acute respiratory syndrome coronavirus 2
YSKWYIRVGAR

SEQ ID NO: 9631 - protein, 11 aa, Severe acute respiratory syndrome coronavirus 2
SKWYIRVGARK

SEQ ID NO: 9632 - protein, 11 aa, Severe acute respiratory syndrome coronavirus 2
IRVGARKSAPL

SEQ ID NO: 9633 - protein, 11 aa, Severe acute respiratory syndrome coronavirus 2
RVGARKSAPLI

SEQ ID NO: 9634 - protein, 11 aa, Severe acute respiratory syndrome coronavirus 2
SPIQYIDIGNY

SEQ ID NO: 9635 - protein, 11 aa, Severe acute respiratory syndrome coronavirus 2
IQYIDIGNYTV

SEQ ID NO: 9636 - protein, 11 aa, Severe acute respiratory syndrome coronavirus 2
IGNYTVSCLPF

SEQ ID NO: 9637 - protein, 11 aa, Severe acute respiratory syndrome coronavirus 2
NYTVSCLPFTI

SEQ ID NO: 9638 - protein, 11 aa, Severe acute respiratory syndrome coronavirus 2
LPFTINCQEPK

SEQ ID NO: 9639 - protein, 11 aa, Severe acute respiratory syndrome coronavirus 2
KLGSLVVRCSF

SEQ ID NO: 9640 - protein, 11 aa, Severe acute respiratory syndrome coronavirus 2
RCSFYEDFLEY

SEQ ID NO: 9641 - protein, 11 aa, Severe acute respiratory syndrome coronavirus 2
DFLEYHDVRVV

SEQ ID NO: 9642 - protein, 11 aa, Severe acute respiratory syndrome coronavirus 2
FLEYHDVRVVL

SEQ ID NO: 9643 - protein, 8 aa, Severe acute respiratory syndrome coronavirus 2
ISEMHPAL

SEQ ID NO: 9644 - protein, 8 aa, Severe acute respiratory syndrome coronavirus 2
LVDPQIQL

SEQ ID NO: 9645 - protein, 8 aa, Severe acute respiratory syndrome coronavirus 2
IQLAVTRM

SEQ ID NO: 9646 - protein, 8 aa, Severe acute respiratory syndrome coronavirus 2
RMENAVGR

SEQ ID NO: 9647 - protein, 8 aa, Severe acute respiratory syndrome coronavirus 2
KVYPIILR

SEQ ID NO: 9648 - protein, 8 aa, Severe acute respiratory syndrome coronavirus 2
VYPIILRL

SEQ ID NO: 9649 - protein, 8 aa, Severe acute respiratory syndrome coronavirus 2
ILRLGSPL

SEQ ID NO: 9650 - protein, 8 aa, Severe acute respiratory syndrome coronavirus 2
LNMARKTL

SEQ ID NO: 9651 - protein, 8 aa, Severe acute respiratory syndrome coronavirus 2
LEDKAFQL

SEQ ID NO: 9652 - protein, 8 aa, Severe acute respiratory syndrome coronavirus 2
FQLTPIAV

SEQ ID NO: 9653 - protein, 8 aa, Severe acute respiratory syndrome coronavirus 2
DEFVVVTV

SEQ ID NO: 9654 - protein, 9 aa, Severe acute respiratory syndrome coronavirus 2
KISEMHPAL

SEQ ID NO: 9655 - protein, 9 aa, Severe acute respiratory syndrome coronavirus 2
ISEMHPALR

SEQ ID NO: 9656 - protein, 9 aa, Severe acute respiratory syndrome coronavirus 2
SEMHPALRL

SEQ ID NO: 9657 - protein, 9 aa, Severe acute respiratory syndrome coronavirus 2
EMHPALRLV

SEQ ID NO: 9658 - protein, 9 aa, Severe acute respiratory syndrome coronavirus 2
ALRLVDPQI

SEQ ID NO: 9659 - protein, 9 aa, Severe acute respiratory syndrome coronavirus 2
RLVDPQIQL

SEQ ID NO: 9660 - protein, 9 aa, Severe acute respiratory syndrome coronavirus 2
VTRMENAVG

SEQ ID NO: 9661 - protein, 9 aa, Severe acute respiratory syndrome coronavirus 2
TRMENAVGR

SEQ ID NO: 9662 - protein, 9 aa, Severe acute respiratory syndrome coronavirus 2
NVGPKVYPI

SEQ ID NO: 9663 - protein, 9 aa, Severe acute respiratory syndrome coronavirus 2
GPKVYPIIL

SEQ ID NO: 9664 - protein, 9 aa, Severe acute respiratory syndrome coronavirus 2
KVYPIILRL

SEQ ID NO: 9665 - protein, 9 aa, Severe acute respiratory syndrome coronavirus 2
YPIILRLGS

SEQ ID NO: 9666 - protein, 9 aa, Severe acute respiratory syndrome coronavirus 2
IILRLGSPL

SEQ ID NO: 9667 - protein, 9 aa, Severe acute respiratory syndrome coronavirus 2
ILRLGSPLS

SEQ ID NO: 9668 - protein, 9 aa, Severe acute respiratory syndrome coronavirus 2
LRLGSPLSL

SEQ ID NO: 9669 - protein, 9 aa, Severe acute respiratory syndrome coronavirus 2
LGSPLSLNM

SEQ ID NO: 9670 - protein, 9 aa, Severe acute respiratory syndrome coronavirus 2
SPLSLNMAR

SEQ ID NO: 9671 - protein, 9 aa, Severe acute respiratory syndrome coronavirus 2
SLNMARKTL

SEQ ID NO: 9672 - protein, 9 aa, Severe acute respiratory syndrome coronavirus 2
MARKTLNSL

SEQ ID NO: 9673 - protein, 9 aa, Severe acute respiratory syndrome coronavirus 2
KTLNSLEDK

SEQ ID NO: 9674 - protein, 9 aa, Severe acute respiratory syndrome coronavirus 2
SLEDKAFQL

SEQ ID NO: 9675 - protein, 9 aa, Severe acute respiratory syndrome coronavirus 2
LEDKAFQLT

SEQ ID NO: 9676 - protein, 9 aa, Severe acute respiratory syndrome coronavirus 2
KAFQLTPIA

SEQ ID NO: 9677 - protein, 9 aa, Severe acute respiratory syndrome coronavirus 2
AFQLTPIAV

SEQ ID NO: 9678 - protein, 9 aa, Severe acute respiratory syndrome coronavirus 2
QLTPIAVQM

SEQ ID NO: 9679 - protein, 9 aa, Severe acute respiratory syndrome coronavirus 2
TPIAVQMTK

SEQ ID NO: 9680 - protein, 9 aa, Severe acute respiratory syndrome coronavirus 2
VQMTKLATT

SEQ ID NO: 9681 - protein, 9 aa, Severe acute respiratory syndrome coronavirus 2
TKLATTEEL

SEQ ID NO: 9682 - protein, 9 aa, Severe acute respiratory syndrome coronavirus 2
EELPDEFVV

SEQ ID NO: 9683 - protein, 9 aa, Severe acute respiratory syndrome coronavirus 2
ELPDEFVVV

SEQ ID NO: 9684 - protein, 9 aa, Severe acute respiratory syndrome coronavirus 2
LPDEFVVVT

SEQ ID NO: 9685 - protein, 9 aa, Severe acute respiratory syndrome coronavirus 2
DEFVVVTVK

SEQ ID NO: 9686 - protein, 10 aa, Severe acute respiratory syndrome coronavirus 2
KISEMHPALR

SEQ ID NO: 9687 - protein, 10 aa, Severe acute respiratory syndrome coronavirus 2
ISEMHPALRL

SEQ ID NO: 9688 - protein, 10 aa, Severe acute respiratory syndrome coronavirus 2
SEMHPALRLV

SEQ ID NO: 9689 - protein, 10 aa, Severe acute respiratory syndrome coronavirus 2
LRLVDPQIQL

SEQ ID NO: 9690 - protein, 10 aa, Severe acute respiratory syndrome coronavirus 2
RLVDPQIQLA

SEQ ID NO: 9691 - protein, 10 aa, Severe acute respiratory syndrome coronavirus 2
LVDPQIQLAV

SEQ ID NO: 9692 - protein, 10 aa, Severe acute respiratory syndrome coronavirus 2
QLAVTRMENA

SEQ ID NO: 9693 - protein, 10 aa, Severe acute respiratory syndrome coronavirus 2
VTRMENAVGR

SEQ ID NO: 9694 - protein, 10 aa, Severe acute respiratory syndrome coronavirus 2
DQNNVGPKVY

SEQ ID NO: 9695 - protein, 10 aa, Severe acute respiratory syndrome coronavirus 2
NNVGPKVYPI

SEQ ID NO: 9696 - protein, 10 aa, Severe acute respiratory syndrome coronavirus 2
VGPKVYPIIL

SEQ ID NO: 9697 - protein, 10 aa, Severe acute respiratory syndrome coronavirus 2
KVYPIILRLG

SEQ ID NO: 9698 - protein, 10 aa, Severe acute respiratory syndrome coronavirus 2
YPIILRLGSP

SEQ ID NO: 9699 - protein, 10 aa, Severe acute respiratory syndrome coronavirus 2
ILRLGSPLSL

SEQ ID NO: 9700 - protein, 10 aa, Severe acute respiratory syndrome coronavirus 2
LRLGSPLSLN

SEQ ID NO: 9701 - protein, 10 aa, Severe acute respiratory syndrome coronavirus 2
RLGSPLSLNM

SEQ ID NO: 9702 - protein, 10 aa, Severe acute respiratory syndrome coronavirus 2
GSPLSLNMAR

SEQ ID NO: 9703 - protein, 10 aa, Severe acute respiratory syndrome coronavirus 2
SPLSLNMARK

SEQ ID NO: 9704 - protein, 10 aa, Severe acute respiratory syndrome coronavirus 2
LSLNMARKTL

SEQ ID NO: 9705 - protein, 10 aa, Severe acute respiratory syndrome coronavirus 2
NMARKTLNSL

SEQ ID NO: 9706 - protein, 10 aa, Severe acute respiratory syndrome coronavirus 2
RKTLNSLEDK

SEQ ID NO: 9707 - protein, 10 aa, Severe acute respiratory syndrome coronavirus 2
TLNSLEDKAF

SEQ ID NO: 9708 - protein, 10 aa, Severe acute respiratory syndrome coronavirus 2
LEDKAFQLTP

SEQ ID NO: 9709 - protein, 10 aa, Severe acute respiratory syndrome coronavirus 2
KAFQLTPIAV

SEQ ID NO: 9710 - protein, 10 aa, Severe acute respiratory syndrome coronavirus 2
FQLTPIAVQM

SEQ ID NO: 9711 - protein, 10 aa, Severe acute respiratory syndrome coronavirus 2
LTPIAVQMTK

SEQ ID NO: 9712 - protein, 10 aa, Severe acute respiratory syndrome coronavirus 2
TPIAVQMTKL

SEQ ID NO: 9713 - protein, 10 aa, Severe acute respiratory syndrome coronavirus 2
AVQMTKLATT

SEQ ID NO: 9714 - protein, 10 aa, Severe acute respiratory syndrome coronavirus 2
MTKLATTEEL

SEQ ID NO: 9715 - protein, 10 aa, Severe acute respiratory syndrome coronavirus 2
LPDEFVVVTV

SEQ ID NO: 9716 - protein, 11 aa, Severe acute respiratory syndrome coronavirus 2
PKISEMHPALR

SEQ ID NO: 9717 - protein, 11 aa, Severe acute respiratory syndrome coronavirus 2
KISEMHPALRL

SEQ ID NO: 9718 - protein, 11 aa, Severe acute respiratory syndrome coronavirus 2
ISEMHPALRLV

SEQ ID NO: 9719 - protein, 11 aa, Severe acute respiratory syndrome coronavirus 2
HPALRLVDPQI

SEQ ID NO: 9720 - protein, 11 aa, Severe acute respiratory syndrome coronavirus 2
ALRLVDPQIQL

SEQ ID NO: 9721 - protein, 11 aa, Severe acute respiratory syndrome coronavirus 2
RLVDPQIQLAV

SEQ ID NO: 9722 - protein, 11 aa, Severe acute respiratory syndrome coronavirus 2
AVTRMENAVGR

SEQ ID NO: 9723 - protein, 11 aa, Severe acute respiratory syndrome coronavirus 2
YPIILRLGSPL

SEQ ID NO: 9724 - protein, 11 aa, Severe acute respiratory syndrome coronavirus 2
IILRLGSPLSL

SEQ ID NO: 9725 - protein, 11 aa, Severe acute respiratory syndrome coronavirus 2
LRLGSPLSLNM

SEQ ID NO: 9726 - protein, 11 aa, Severe acute respiratory syndrome coronavirus 2
LGSPLSLNMAR

SEQ ID NO: 9727 - protein, 11 aa, Severe acute respiratory syndrome coronavirus 2
LNMARKTLNSL

SEQ ID NO: 9728 - protein, 11 aa, Severe acute respiratory syndrome coronavirus 2
ARKTLNSLEDK

SEQ ID NO: 9729 - protein, 11 aa, Severe acute respiratory syndrome coronavirus 2
KTLNSLEDKAF

SEQ ID NO: 9730 - protein, 11 aa, Severe acute respiratory syndrome coronavirus 2
QLTPIAVQMTK

SEQ ID NO: 9731 - protein, 11 aa, Severe acute respiratory syndrome coronavirus 2
TPIAVQMTKLA

SEQ ID NO: 9732 - protein, 11 aa, Severe acute respiratory syndrome coronavirus 2
TEELPDEFVVV

SEQ ID NO: 9733 - protein, 11 aa, Severe acute respiratory syndrome coronavirus 2
ELPDEFVVVTV

SEQ ID NO: 9734 - protein, 8 aa, Severe acute respiratory syndrome coronavirus 2
FLVLLPLV

SEQ ID NO: 9735 - protein, 8 aa, Severe acute respiratory syndrome coronavirus 2
RTQLPPAY

SEQ ID NO: 9736 - protein, 8 aa, Severe acute respiratory syndrome coronavirus 2
AYTNSFTR

SEQ ID NO: 9737 - protein, 8 aa, Severe acute respiratory syndrome coronavirus 2
NSFTRGVY

SEQ ID NO: 9738 - protein, 8 aa, Severe acute respiratory syndrome coronavirus 2
SFTRGVYY

SEQ ID NO: 9739 - protein, 8 aa, Severe acute respiratory syndrome coronavirus 2
VYYPDKVF

SEQ ID NO: 9740 - protein, 8 aa, Severe acute respiratory syndrome coronavirus 2
TQDLFLPF

SEQ ID NO: 9741 - protein, 8 aa, Severe acute respiratory syndrome coronavirus 2
FLPFFSNV

SEQ ID NO: 9742 - protein, 8 aa, Severe acute respiratory syndrome coronavirus 2
PFFSNVTW

SEQ ID NO: 9743 - protein, 8 aa, Severe acute respiratory syndrome coronavirus 2
FFSNVTWF

SEQ ID NO: 9744 - protein, 8 aa, Severe acute respiratory syndrome coronavirus 2
KRFDNPVL

SEQ ID NO: 9745 - protein, 8 aa, Severe acute respiratory syndrome coronavirus 2
LPFNDGVY

SEQ ID NO: 9746 - protein, 8 aa, Severe acute respiratory syndrome coronavirus 2
KSNIIRGW

SEQ ID NO: 9747 - protein, 8 aa, Severe acute respiratory syndrome coronavirus 2
FQFCNDPF

SEQ ID NO: 9748 - protein, 8 aa, Severe acute respiratory syndrome coronavirus 2
KSWMESEF

SEQ ID NO: 9749 - protein, 8 aa, Severe acute respiratory syndrome coronavirus 2
WMESEFRV

SEQ ID NO: 9750 - protein, 8 aa, Severe acute respiratory syndrome coronavirus 2
MESEFRVY

SEQ ID NO: 9751 - protein, 8 aa, Severe acute respiratory syndrome coronavirus 2
SEFRVYSS

SEQ ID NO: 9752 - protein, 8 aa, Severe acute respiratory syndrome coronavirus 2
SSANNCTF

SEQ ID NO: 9753 - protein, 8 aa, Severe acute respiratory syndrome coronavirus 2
FEYVSQPF

SEQ ID NO: 9754 - protein, 8 aa, Severe acute respiratory syndrome coronavirus 2
YVSQPFLM

SEQ ID NO: 9755 - protein, 8 aa, Severe acute respiratory syndrome coronavirus 2
NFKNLREF

SEQ ID NO: 9756 - protein, 8 aa, Severe acute respiratory syndrome coronavirus 2
REFVFKNI

SEQ ID NO: 9757 - protein, 8 aa, Severe acute respiratory syndrome coronavirus 2
FKNIDGYF

SEQ ID NO: 9758 - protein, 8 aa, Severe acute respiratory syndrome coronavirus 2
GYFKIYSK

SEQ ID NO: 9759 - protein, 8 aa, Severe acute respiratory syndrome coronavirus 2
IYSKHTPI

SEQ ID NO: 9760 - protein, 8 aa, Severe acute respiratory syndrome coronavirus 2
HTPINLVR

SEQ ID NO: 9761 - protein, 8 aa, Severe acute respiratory syndrome coronavirus 2
LPQGFSAL

SEQ ID NO: 9762 - protein, 8 aa, Severe acute respiratory syndrome coronavirus 2
NITRFQTL

SEQ ID NO: 9763 - protein, 8 aa, Severe acute respiratory syndrome coronavirus 2
RFQTLLAL

SEQ ID NO: 9764 - protein, 8 aa, Severe acute respiratory syndrome coronavirus 2
LLALHRSY

SEQ ID NO: 9765 - protein, 8 aa, Severe acute respiratory syndrome coronavirus 2
LALHRSYL

SEQ ID NO: 9766 - protein, 8 aa, Severe acute respiratory syndrome coronavirus 2
WTAGAAAY

SEQ ID NO: 9767 - protein, 8 aa, Severe acute respiratory syndrome coronavirus 2
GYLQPRTF

SEQ ID NO: 9768 - protein, 8 aa, Severe acute respiratory syndrome coronavirus 2
YLQPRTFL

SEQ ID NO: 9769 - protein, 8 aa, Severe acute respiratory syndrome coronavirus 2
KYNENGTI

SEQ ID NO: 9770 - protein, 8 aa, Severe acute respiratory syndrome coronavirus 2
FTVEKGIY

SEQ ID NO: 9771 - protein, 8 aa, Severe acute respiratory syndrome coronavirus 2
IYQTSNFR

SEQ ID NO: 9772 - protein, 8 aa, Severe acute respiratory syndrome coronavirus 2
RFPNITNL

SEQ ID NO: 9773 - protein, 8 aa, Severe acute respiratory syndrome coronavirus 2
ATRFASVY

SEQ ID NO: 9774 - protein, 8 aa, Severe acute respiratory syndrome coronavirus 2
TRFASVYA

SEQ ID NO: 9775 - protein, 8 aa, Severe acute respiratory syndrome coronavirus 2
RFASVYAW

SEQ ID NO: 9776 - protein, 8 aa, Severe acute respiratory syndrome coronavirus 2
ASVYAWNR

SEQ ID NO: 9777 - protein, 8 aa, Severe acute respiratory syndrome coronavirus 2
SVYAWNRK

SEQ ID NO: 9778 - protein, 8 aa, Severe acute respiratory syndrome coronavirus 2
VADYSVLY

SEQ ID NO: 9779 - protein, 8 aa, Severe acute respiratory syndrome coronavirus 2
VLYNSASF

SEQ ID NO: 9780 - protein, 8 aa, Severe acute respiratory syndrome coronavirus 2
NSASFSTF

SEQ ID NO: 9781 - protein, 8 aa, Severe acute respiratory syndrome coronavirus 2
SASFSTFK

SEQ ID NO: 9782 - protein, 8 aa, Severe acute respiratory syndrome coronavirus 2
SFSTFKCY

SEQ ID NO: 9783 - protein, 8 aa, Severe acute respiratory syndrome coronavirus 2
SPTKLNDL

SEQ ID NO: 9784 - protein, 8 aa, Severe acute respiratory syndrome coronavirus 2
VYADSFVI

SEQ ID NO: 9785 - protein, 8 aa, Severe acute respiratory syndrome coronavirus 2
RQIAPGQT

SEQ ID NO: 9786 - protein, 8 aa, Severe acute respiratory syndrome coronavirus 2
KIADYNYK

SEQ ID NO: 9787 - protein, 8 aa, Severe acute respiratory syndrome coronavirus 2
IADYNYKL

SEQ ID NO: 9788 - protein, 8 aa, Severe acute respiratory syndrome coronavirus 2
FTGCVIAW

SEQ ID NO: 9789 - protein, 8 aa, Severe acute respiratory syndrome coronavirus 2
IAWNSNNL

SEQ ID NO: 9790 - protein, 8 aa, Severe acute respiratory syndrome coronavirus 2
KVGGNYNY

SEQ ID NO: 9791 - protein, 8 aa, Severe acute respiratory syndrome coronavirus 2
GNYNYLYR

SEQ ID NO: 9792 - protein, 8 aa, Severe acute respiratory syndrome coronavirus 2
NYLYRLFR

SEQ ID NO: 9793 - protein, 8 aa, Severe acute respiratory syndrome coronavirus 2
YLYRLFRK

SEQ ID NO: 9794 - protein, 8 aa, Severe acute respiratory syndrome coronavirus 2
RLFRKSNL

SEQ ID NO: 9795 - protein, 8 aa, Severe acute respiratory syndrome coronavirus 2
RKSNLKPF

SEQ ID NO: 9796 - protein, 8 aa, Severe acute respiratory syndrome coronavirus 2
CYFPLQSY

SEQ ID NO: 9797 - protein, 8 aa, Severe acute respiratory syndrome coronavirus 2
FPLQSYGF

SEQ ID NO: 9798 - protein, 8 aa, Severe acute respiratory syndrome coronavirus 2
QPYRVVVL

SEQ ID NO: 9799 - protein, 8 aa, Severe acute respiratory syndrome coronavirus 2
YRVVVLSF

SEQ ID NO: 9800 - protein, 8 aa, Severe acute respiratory syndrome coronavirus 2
FELLHAPA

SEQ ID NO: 9801 - protein, 8 aa, Severe acute respiratory syndrome coronavirus 2
LLHAPATV

SEQ ID NO: 9802 - protein, 8 aa, Severe acute respiratory syndrome coronavirus 2
GPKKSTNL

SEQ ID NO: 9803 - protein, 8 aa, Severe acute respiratory syndrome coronavirus 2
KFLPFQQF

SEQ ID NO: 9804 - protein, 8 aa, Severe acute respiratory syndrome coronavirus 2
IADTTDAV

SEQ ID NO: 9805 - protein, 8 aa, Severe acute respiratory syndrome coronavirus 2
TSNQVAVL

SEQ ID NO: 9806 - protein, 8 aa, Severe acute respiratory syndrome coronavirus 2
QLTPTWRV

SEQ ID NO: 9807 - protein, 8 aa, Severe acute respiratory syndrome coronavirus 2
YSTGSNVF

SEQ ID NO: 9808 - protein, 8 aa, Severe acute respiratory syndrome coronavirus 2
SPRRARSV

SEQ ID NO: 9809 - protein, 8 aa, Severe acute respiratory syndrome coronavirus 2
RSVASQSI

SEQ ID NO: 9810 - protein, 8 aa, Severe acute respiratory syndrome coronavirus 2
VAYSNNSI

SEQ ID NO: 9811 - protein, 8 aa, Severe acute respiratory syndrome coronavirus 2
YSNNSIAI

SEQ ID NO: 9812 - protein, 8 aa, Severe acute respiratory syndrome coronavirus 2
TEILPVSM

SEQ ID NO: 9813 - protein, 8 aa, Severe acute respiratory syndrome coronavirus 2
VSMTKTSV

SEQ ID NO: 9814 - protein, 8 aa, Severe acute respiratory syndrome coronavirus 2
SVDCTMYI

SEQ ID NO: 9815 - protein, 8 aa, Severe acute respiratory syndrome coronavirus 2
TECSNLLL

SEQ ID NO: 9816 - protein, 8 aa, Severe acute respiratory syndrome coronavirus 2
LLLQYGSF

SEQ ID NO: 9817 - protein, 8 aa, Severe acute respiratory syndrome coronavirus 2
LQYGSFCT

SEQ ID NO: 9818 - protein, 8 aa, Severe acute respiratory syndrome coronavirus 2
SFCTQLNR

SEQ ID NO: 9819 - protein, 8 aa, Severe acute respiratory syndrome coronavirus 2
FAQVKQIY

SEQ ID NO: 9820 - protein, 8 aa, Severe acute respiratory syndrome coronavirus 2
KPSKRSFI

SEQ ID NO: 9821 - protein, 8 aa, Severe acute respiratory syndrome coronavirus 2
SFIEDLLF

SEQ ID NO: 9822 - protein, 8 aa, Severe acute respiratory syndrome coronavirus 2
LLFNKVTL

SEQ ID NO: 9823 - protein, 8 aa, Severe acute respiratory syndrome coronavirus 2
VTLADAGF

SEQ ID NO: 9824 - protein, 8 aa, Severe acute respiratory syndrome coronavirus 2
KFNGLTVL

SEQ ID NO: 9825 - protein, 8 aa, Severe acute respiratory syndrome coronavirus 2
GLTVLPPL

SEQ ID NO: 9826 - protein, 8 aa, Severe acute respiratory syndrome coronavirus 2
TDEMIAQY

SEQ ID NO: 9827 - protein, 8 aa, Severe acute respiratory syndrome coronavirus 2
DEMIAQYT

SEQ ID NO: 9828 - protein, 8 aa, Severe acute respiratory syndrome coronavirus 2
IAQYTSAL

SEQ ID NO: 9829 - protein, 8 aa, Severe acute respiratory syndrome coronavirus 2
AQYTSALL

SEQ ID NO: 9830 - protein, 8 aa, Severe acute respiratory syndrome coronavirus 2
TFGAGAAL

SEQ ID NO: 9831 - protein, 8 aa, Severe acute respiratory syndrome coronavirus 2
IPFAMQMA

SEQ ID NO: 9832 - protein, 8 aa, Severe acute respiratory syndrome coronavirus 2
PFAMQMAY

SEQ ID NO: 9833 - protein, 8 aa, Severe acute respiratory syndrome coronavirus 2
FAMQMAYR

SEQ ID NO: 9834 - protein, 8 aa, Severe acute respiratory syndrome coronavirus 2
MAYRFNGI

SEQ ID NO: 9835 - protein, 8 aa, Severe acute respiratory syndrome coronavirus 2
YRFNGIGV

SEQ ID NO: 9836 - protein, 8 aa, Severe acute respiratory syndrome coronavirus 2
YENQKLIA

SEQ ID NO: 9837 - protein, 8 aa, Severe acute respiratory syndrome coronavirus 2
LSSTASAL

SEQ ID NO: 9838 - protein, 8 aa, Severe acute respiratory syndrome coronavirus 2
STASALGK

SEQ ID NO: 9839 - protein, 8 aa, Severe acute respiratory syndrome coronavirus 2
FGAISSVL

SEQ ID NO: 9840 - protein, 8 aa, Severe acute respiratory syndrome coronavirus 2
VLNDILSR

SEQ ID NO: 9841 - protein, 8 aa, Severe acute respiratory syndrome coronavirus 2
AEVQIDRL

SEQ ID NO: 9842 - protein, 8 aa, Severe acute respiratory syndrome coronavirus 2
RLQSLQTY

SEQ ID NO: 9843 - protein, 8 aa, Severe acute respiratory syndrome coronavirus 2
KGYHLMSF

SEQ ID NO: 9844 - protein, 8 aa, Severe acute respiratory syndrome coronavirus 2
SAPHGVVF

SEQ ID NO: 9845 - protein, 8 aa, Severe acute respiratory syndrome coronavirus 2
APHGVVFL

SEQ ID NO: 9846 - protein, 8 aa, Severe acute respiratory syndrome coronavirus 2
VVFLHVTY

SEQ ID NO: 9847 - protein, 8 aa, Severe acute respiratory syndrome coronavirus 2
LHVTYVPA

SEQ ID NO: 9848 - protein, 8 aa, Severe acute respiratory syndrome coronavirus 2
QEKNFTTA

SEQ ID NO: 9849 - protein, 8 aa, Severe acute respiratory syndrome coronavirus 2
HFPREGVF

SEQ ID NO: 9850 - protein, 8 aa, Severe acute respiratory syndrome coronavirus 2
FPREGVFV

SEQ ID NO: 9851 - protein, 8 aa, Severe acute respiratory syndrome coronavirus 2
WFVTQRNF

SEQ ID NO: 9852 - protein, 8 aa, Severe acute respiratory syndrome coronavirus 2
SLIDLQEL

SEQ ID NO: 9853 - protein, 8 aa, Severe acute respiratory syndrome coronavirus 2
KYEQYIKW

SEQ ID NO: 9854 - protein, 8 aa, Severe acute respiratory syndrome coronavirus 2
YIKWPWYI

SEQ ID NO: 9855 - protein, 8 aa, Severe acute respiratory syndrome coronavirus 2
KWPWYIWL

SEQ ID NO: 9856 - protein, 8 aa, Severe acute respiratory syndrome coronavirus 2
WLGFIAGL

SEQ ID NO: 9857 - protein, 8 aa, Severe acute respiratory syndrome coronavirus 2
FIAGLIAI

SEQ ID NO: 9858 - protein, 8 aa, Severe acute respiratory syndrome coronavirus 2
GLIAIVMV

SEQ ID NO: 9859 - protein, 9 aa, Severe acute respiratory syndrome coronavirus 2
FVFLVLLPL

SEQ ID NO: 9860 - protein, 9 aa, Severe acute respiratory syndrome coronavirus 2
LPLVSSQCV

SEQ ID NO: 9861 - protein, 9 aa, Severe acute respiratory syndrome coronavirus 2
LVSSQCVNL

SEQ ID NO: 9862 - protein, 9 aa, Severe acute respiratory syndrome coronavirus 2
SQCVNLTTR

SEQ ID NO: 9863 - protein, 9 aa, Severe acute respiratory syndrome coronavirus 2
TTRTQLPPA

SEQ ID NO: 9864 - protein, 9 aa, Severe acute respiratory syndrome coronavirus 2
TRTQLPPAY

SEQ ID NO: 9865 - protein, 9 aa, Severe acute respiratory syndrome coronavirus 2
RTQLPPAYT

SEQ ID NO: 9866 - protein, 9 aa, Severe acute respiratory syndrome coronavirus 2
LPPAYTNSF

SEQ ID NO: 9867 - protein, 9 aa, Severe acute respiratory syndrome coronavirus 2
PAYTNSFTR

SEQ ID NO: 9868 - protein, 9 aa, Severe acute respiratory syndrome coronavirus 2
YTNSFTRGV

SEQ ID NO: 9869 - protein, 9 aa, Severe acute respiratory syndrome coronavirus 2
TNSFTRGVY

SEQ ID NO: 9870 - protein, 9 aa, Severe acute respiratory syndrome coronavirus 2
NSFTRGVYY

SEQ ID NO: 9871 - protein, 9 aa, Severe acute respiratory syndrome coronavirus 2
GVYYPDKVF

SEQ ID NO: 9872 - protein, 9 aa, Severe acute respiratory syndrome coronavirus 2
VYYPDKVFR

SEQ ID NO: 9873 - protein, 9 aa, Severe acute respiratory syndrome coronavirus 2
YPDKVFRSS

SEQ ID NO: 9874 - protein, 9 aa, Severe acute respiratory syndrome coronavirus 2
DKVFRSSVL

SEQ ID NO: 9875 - protein, 9 aa, Severe acute respiratory syndrome coronavirus 2
KVFRSSVLH

SEQ ID NO: 9876 - protein, 9 aa, Severe acute respiratory syndrome coronavirus 2
VFRSSVLHS

SEQ ID NO: 9877 - protein, 9 aa, Severe acute respiratory syndrome coronavirus 2
FRSSVLHST

SEQ ID NO: 9878 - protein, 9 aa, Severe acute respiratory syndrome coronavirus 2
VLHSTQDLF

SEQ ID NO: 9879 - protein, 9 aa, Severe acute respiratory syndrome coronavirus 2
LHSTQDLFL

SEQ ID NO: 9880 - protein, 9 aa, Severe acute respiratory syndrome coronavirus 2
STQDLFLPF

SEQ ID NO: 9881 - protein, 9 aa, Severe acute respiratory syndrome coronavirus 2
TQDLFLPFF

SEQ ID NO: 9882 - protein, 9 aa, Severe acute respiratory syndrome coronavirus 2
LFLPFFSNV

SEQ ID NO: 9883 - protein, 9 aa, Severe acute respiratory syndrome coronavirus 2
FLPFFSNVT

SEQ ID NO: 9884 - protein, 9 aa, Severe acute respiratory syndrome coronavirus 2
LPFFSNVTW

SEQ ID NO: 9885 - protein, 9 aa, Severe acute respiratory syndrome coronavirus 2
PFFSNVTWF

SEQ ID NO: 9886 - protein, 9 aa, Severe acute respiratory syndrome coronavirus 2
FFSNVTWFH

SEQ ID NO: 9887 - protein, 9 aa, Severe acute respiratory syndrome coronavirus 2
FSNVTWFHA

SEQ ID NO: 9888 - protein, 9 aa, Severe acute respiratory syndrome coronavirus 2
SNVTWFHAI

SEQ ID NO: 9889 - protein, 9 aa, Severe acute respiratory syndrome coronavirus 2
VTWFHAIHV

SEQ ID NO: 9890 - protein, 9 aa, Severe acute respiratory syndrome coronavirus 2
HVSGTNGTK

SEQ ID NO: 9891 - protein, 9 aa, Severe acute respiratory syndrome coronavirus 2
GTKRFDNPV

SEQ ID NO: 9892 - protein, 9 aa, Severe acute respiratory syndrome coronavirus 2
TKRFDNPVL

SEQ ID NO: 9893 - protein, 9 aa, Severe acute respiratory syndrome coronavirus 2
RFDNPVLPF

SEQ ID NO: 9894 - protein, 9 aa, Severe acute respiratory syndrome coronavirus 2
VLPFNDGVY

SEQ ID NO: 9895 - protein, 9 aa, Severe acute respiratory syndrome coronavirus 2
LPFNDGVYF

SEQ ID NO: 9896 - protein, 9 aa, Severe acute respiratory syndrome coronavirus 2
GVYFASTEK

SEQ ID NO: 9897 - protein, 9 aa, Severe acute respiratory syndrome coronavirus 2
FASTEKSNI

SEQ ID NO: 9898 - protein, 9 aa, Severe acute respiratory syndrome coronavirus 2
STEKSNIIR

SEQ ID NO: 9899 - protein, 9 aa, Severe acute respiratory syndrome coronavirus 2
KSNIIRGWI

SEQ ID NO: 9900 - protein, 9 aa, Severe acute respiratory syndrome coronavirus 2
SNIIRGWIF

SEQ ID NO: 9901 - protein, 9 aa, Severe acute respiratory syndrome coronavirus 2
IIRGWIFGT

SEQ ID NO: 9902 - protein, 9 aa, Severe acute respiratory syndrome coronavirus 2
RGWIFGTTL

SEQ ID NO: 9903 - protein, 9 aa, Severe acute respiratory syndrome coronavirus 2
TLDSKTQSL

SEQ ID NO: 9904 - protein, 9 aa, Severe acute respiratory syndrome coronavirus 2
SLLIVNNAT

SEQ ID NO: 9905 - protein, 9 aa, Severe acute respiratory syndrome coronavirus 2
LIVNNATNV

SEQ ID NO: 9906 - protein, 9 aa, Severe acute respiratory syndrome coronavirus 2
IVNNATNVV

SEQ ID NO: 9907 - protein, 9 aa, Severe acute respiratory syndrome coronavirus 2
NNATNVVIK

SEQ ID NO: 9908 - protein, 9 aa, Severe acute respiratory syndrome coronavirus 2
NATNVVIKV

SEQ ID NO: 9909 - protein, 9 aa, Severe acute respiratory syndrome coronavirus 2
NVVIKVCEF

SEQ ID NO: 9910 - protein, 9 aa, Severe acute respiratory syndrome coronavirus 2
CEFQFCNDP

SEQ ID NO: 9911 - protein, 9 aa, Severe acute respiratory syndrome coronavirus 2
EFQFCNDPF

SEQ ID NO: 9912 - protein, 9 aa, Severe acute respiratory syndrome coronavirus 2
FQFCNDPFL

SEQ ID NO: 9913 - protein, 9 aa, Severe acute respiratory syndrome coronavirus 2
FCNDPFLGV

SEQ ID NO: 9914 - protein, 9 aa, Severe acute respiratory syndrome coronavirus 2
CNDPFLGVY

SEQ ID NO: 9915 - protein, 9 aa, Severe acute respiratory syndrome coronavirus 2
DPFLGVYYH

SEQ ID NO: 9916 - protein, 9 aa, Severe acute respiratory syndrome coronavirus 2
PFLGVYYHK

SEQ ID NO: 9917 - protein, 9 aa, Severe acute respiratory syndrome coronavirus 2
GVYYHKNNK

SEQ ID NO: 9918 - protein, 9 aa, Severe acute respiratory syndrome coronavirus 2
YYHKNNKSW

SEQ ID NO: 9919 - protein, 9 aa, Severe acute respiratory syndrome coronavirus 2
YHKNNKSWM

SEQ ID NO: 9920 - protein, 9 aa, Severe acute respiratory syndrome coronavirus 2
NKSWMESEF

SEQ ID NO: 9921 - protein, 9 aa, Severe acute respiratory syndrome coronavirus 2
KSWMESEFR

SEQ ID NO: 9922 - protein, 9 aa, Severe acute respiratory syndrome coronavirus 2
SWMESEFRV

SEQ ID NO: 9923 - protein, 9 aa, Severe acute respiratory syndrome coronavirus 2
WMESEFRVY

SEQ ID NO: 9924 - protein, 9 aa, Severe acute respiratory syndrome coronavirus 2
MESEFRVYS

SEQ ID NO: 9925 - protein, 9 aa, Severe acute respiratory syndrome coronavirus 2
SEFRVYSSA

SEQ ID NO: 9926 - protein, 9 aa, Severe acute respiratory syndrome coronavirus 2
RVYSSANNC

SEQ ID NO: 9927 - protein, 9 aa, Severe acute respiratory syndrome coronavirus 2
YSSANNCTF

SEQ ID NO: 9928 - protein, 9 aa, Severe acute respiratory syndrome coronavirus 2
SANNCTFEY

SEQ ID NO: 9929 - protein, 9 aa, Severe acute respiratory syndrome coronavirus 2
TFEYVSQPF

SEQ ID NO: 9930 - protein, 9 aa, Severe acute respiratory syndrome coronavirus 2
FEYVSQPFL

SEQ ID NO: 9931 - protein, 9 aa, Severe acute respiratory syndrome coronavirus 2
EYVSQPFLM

SEQ ID NO: 9932 - protein, 9 aa, Severe acute respiratory syndrome coronavirus 2
VSQPFLMDL

SEQ ID NO: 9933 - protein, 9 aa, Severe acute respiratory syndrome coronavirus 2
KQGNFKNLR

SEQ ID NO: 9934 - protein, 9 aa, Severe acute respiratory syndrome coronavirus 2
GNFKNLREF

SEQ ID NO: 9935 - protein, 9 aa, Severe acute respiratory syndrome coronavirus 2
FKNLREFVF

SEQ ID NO: 9936 - protein, 9 aa, Severe acute respiratory syndrome coronavirus 2
KNLREFVFK

SEQ ID NO: 9937 - protein, 9 aa, Severe acute respiratory syndrome coronavirus 2
VFKNIDGYF

SEQ ID NO: 9938 - protein, 9 aa, Severe acute respiratory syndrome coronavirus 2
DGYFKIYSK

SEQ ID NO: 9939 - protein, 9 aa, Severe acute respiratory syndrome coronavirus 2
KIYSKHTPI

SEQ ID NO: 9940 - protein, 9 aa, Severe acute respiratory syndrome coronavirus 2
YSKHTPINL

SEQ ID NO: 9941 - protein, 9 aa, Severe acute respiratory syndrome coronavirus 2
TPINLVRDL

SEQ ID NO: 9942 - protein, 9 aa, Severe acute respiratory syndrome coronavirus 2
LVRDLPQGF

SEQ ID NO: 9943 - protein, 9 aa, Severe acute respiratory syndrome coronavirus 2
DLPQGFSAL

SEQ ID NO: 9944 - protein, 9 aa, Severe acute respiratory syndrome coronavirus 2
SALEPLVDL

SEQ ID NO: 9945 - protein, 9 aa, Severe acute respiratory syndrome coronavirus 2
LEPLVDLPI

SEQ ID NO: 9946 - protein, 9 aa, Severe acute respiratory syndrome coronavirus 2
PLVDLPIGI

SEQ ID NO: 9947 - protein, 9 aa, Severe acute respiratory syndrome coronavirus 2
LPIGINITR

SEQ ID NO: 9948 - protein, 9 aa, Severe acute respiratory syndrome coronavirus 2
INITRFQTL

SEQ ID NO: 9949 - protein, 9 aa, Severe acute respiratory syndrome coronavirus 2
NITRFQTLL

SEQ ID NO: 9950 - protein, 9 aa, Severe acute respiratory syndrome coronavirus 2
ITRFQTLLA

SEQ ID NO: 9951 - protein, 9 aa, Severe acute respiratory syndrome coronavirus 2
TRFQTLLAL

SEQ ID NO: 9952 - protein, 9 aa, Severe acute respiratory syndrome coronavirus 2
RFQTLLALH

SEQ ID NO: 9953 - protein, 9 aa, Severe acute respiratory syndrome coronavirus 2
FQTLLALHR

SEQ ID NO: 9954 - protein, 9 aa, Severe acute respiratory syndrome coronavirus 2
TLLALHRSY

SEQ ID NO: 9955 - protein, 9 aa, Severe acute respiratory syndrome coronavirus 2
LLALHRSYL

SEQ ID NO: 9956 - protein, 9 aa, Severe acute respiratory syndrome coronavirus 2
TPGDSSSGW

SEQ ID NO: 9957 - protein, 9 aa, Severe acute respiratory syndrome coronavirus 2
SSSGWTAGA

SEQ ID NO: 9958 - protein, 9 aa, Severe acute respiratory syndrome coronavirus 2
GWTAGAAAY

SEQ ID NO: 9959 - protein, 9 aa, Severe acute respiratory syndrome coronavirus 2
WTAGAAAYY

SEQ ID NO: 9960 - protein, 9 aa, Severe acute respiratory syndrome coronavirus 2
TAGAAAYYV

SEQ ID NO: 9961 - protein, 9 aa, Severe acute respiratory syndrome coronavirus 2
GAAAYYVGY

SEQ ID NO: 9962 - protein, 9 aa, Severe acute respiratory syndrome coronavirus 2
AAAYYVGYL

SEQ ID NO: 9963 - protein, 9 aa, Severe acute respiratory syndrome coronavirus 2
YYVGYLQPR

SEQ ID NO: 9964 - protein, 9 aa, Severe acute respiratory syndrome coronavirus 2
VGYLQPRTF

SEQ ID NO: 9965 - protein, 9 aa, Severe acute respiratory syndrome coronavirus 2
GYLQPRTFL

SEQ ID NO: 9966 - protein, 9 aa, Severe acute respiratory syndrome coronavirus 2
YLQPRTFLL

SEQ ID NO: 9967 - protein, 9 aa, Severe acute respiratory syndrome coronavirus 2
LQPRTFLLK

SEQ ID NO: 9968 - protein, 9 aa, Severe acute respiratory syndrome coronavirus 2
QPRTFLLKY

SEQ ID NO: 9969 - protein, 9 aa, Severe acute respiratory syndrome coronavirus 2
FLLKYNENG

SEQ ID NO: 9970 - protein, 9 aa, Severe acute respiratory syndrome coronavirus 2
LKYNENGTI

SEQ ID NO: 9971 - protein, 9 aa, Severe acute respiratory syndrome coronavirus 2
NENGTITDA

SEQ ID NO: 9972 - protein, 9 aa, Severe acute respiratory syndrome coronavirus 2
ITDAVDCAL

SEQ ID NO: 9973 - protein, 9 aa, Severe acute respiratory syndrome coronavirus 2
AVDCALDPL

SEQ ID NO: 9974 - protein, 9 aa, Severe acute respiratory syndrome coronavirus 2
ALDPLSETK

SEQ ID NO: 9975 - protein, 9 aa, Severe acute respiratory syndrome coronavirus 2
ETKCTLKSF

SEQ ID NO: 9976 - protein, 9 aa, Severe acute respiratory syndrome coronavirus 2
TLKSFTVEK

SEQ ID NO: 9977 - protein, 9 aa, Severe acute respiratory syndrome coronavirus 2
KSFTVEKGI

SEQ ID NO: 9978 - protein, 9 aa, Severe acute respiratory syndrome coronavirus 2
SFTVEKGIY

SEQ ID NO: 9979 - protein, 9 aa, Severe acute respiratory syndrome coronavirus 2
KGIYQTSNF

SEQ ID NO: 9980 - protein, 9 aa, Severe acute respiratory syndrome coronavirus 2
GIYQTSNFR

SEQ ID NO: 9981 - protein, 9 aa, Severe acute respiratory syndrome coronavirus 2
IYQTSNFRV

SEQ ID NO: 9982 - protein, 9 aa, Severe acute respiratory syndrome coronavirus 2
YQTSNFRVQ

SEQ ID NO: 9983 - protein, 9 aa, Severe acute respiratory syndrome coronavirus 2
FRVQPTESI

SEQ ID NO: 9984 - protein, 9 aa, Severe acute respiratory syndrome coronavirus 2
QPTESIVRF

SEQ ID NO: 9985 - protein, 9 aa, Severe acute respiratory syndrome coronavirus 2
ESIVRFPNI

SEQ ID NO: 9986 - protein, 9 aa, Severe acute respiratory syndrome coronavirus 2
IVRFPNITN

SEQ ID NO: 9987 - protein, 9 aa, Severe acute respiratory syndrome coronavirus 2
VRFPNITNL

SEQ ID NO: 9988 - protein, 9 aa, Severe acute respiratory syndrome coronavirus 2
RFPNITNLC

SEQ ID NO: 9989 - protein, 9 aa, Severe acute respiratory syndrome coronavirus 2
FPNITNLCP

SEQ ID NO: 9990 - protein, 9 aa, Severe acute respiratory syndrome coronavirus 2
NLCPFGEVF

SEQ ID NO: 9991 - protein, 9 aa, Severe acute respiratory syndrome coronavirus 2
CPFGEVFNA

SEQ ID NO: 9992 - protein, 9 aa, Severe acute respiratory syndrome coronavirus 2
FGEVFNATR

SEQ ID NO: 9993 - protein, 9 aa, Severe acute respiratory syndrome coronavirus 2
GEVFNATRF

SEQ ID NO: 9994 - protein, 9 aa, Severe acute respiratory syndrome coronavirus 2
EVFNATRFA

SEQ ID NO: 9995 - protein, 9 aa, Severe acute respiratory syndrome coronavirus 2
FNATRFASV

SEQ ID NO: 9996 - protein, 9 aa, Severe acute respiratory syndrome coronavirus 2
NATRFASVY

SEQ ID NO: 9997 - protein, 9 aa, Severe acute respiratory syndrome coronavirus 2
ATRFASVYA

SEQ ID NO: 9998 - protein, 9 aa, Severe acute respiratory syndrome coronavirus 2
TRFASVYAW

SEQ ID NO: 9999 - protein, 9 aa, Severe acute respiratory syndrome coronavirus 2
FASVYAWNR

SEQ ID NO: 10000 - protein, 9 aa, Severe acute respiratory syndrome coronavirus 2
ASVYAWNRK

SEQ ID NO: 10001 - protein, 9 aa, Severe acute respiratory syndrome coronavirus 2
SVYAWNRKR

SEQ ID NO: 10002 - protein, 9 aa, Severe acute respiratory syndrome coronavirus 2
VYAWNRKRI

SEQ ID NO: 10003 - protein, 9 aa, Severe acute respiratory syndrome coronavirus 2
WNRKRISNC

SEQ ID NO: 10004 - protein, 9 aa, Severe acute respiratory syndrome coronavirus 2
RKRISNCVA

SEQ ID NO: 10005 - protein, 9 aa, Severe acute respiratory syndrome coronavirus 2
RISNCVADY

SEQ ID NO: 10006 - protein, 9 aa, Severe acute respiratory syndrome coronavirus 2
CVADYSVLY

SEQ ID NO: 10007 - protein, 9 aa, Severe acute respiratory syndrome coronavirus 2
SVLYNSASF

SEQ ID NO: 10008 - protein, 9 aa, Severe acute respiratory syndrome coronavirus 2
VLYNSASFS

SEQ ID NO: 10009 - protein, 9 aa, Severe acute respiratory syndrome coronavirus 2
YNSASFSTF

SEQ ID NO: 10010 - protein, 9 aa, Severe acute respiratory syndrome coronavirus 2
NSASFSTFK

SEQ ID NO: 10011 - protein, 9 aa, Severe acute respiratory syndrome coronavirus 2
ASFSTFKCY

SEQ ID NO: 10012 - protein, 9 aa, Severe acute respiratory syndrome coronavirus 2
FSTFKCYGV

SEQ ID NO: 10013 - protein, 9 aa, Severe acute respiratory syndrome coronavirus 2
STFKCYGVS

SEQ ID NO: 10014 - protein, 9 aa, Severe acute respiratory syndrome coronavirus 2
KCYGVSPTK

SEQ ID NO: 10015 - protein, 9 aa, Severe acute respiratory syndrome coronavirus 2
CYGVSPTKL

SEQ ID NO: 10016 - protein, 9 aa, Severe acute respiratory syndrome coronavirus 2
VSPTKLNDL

SEQ ID NO: 10017 - protein, 9 aa, Severe acute respiratory syndrome coronavirus 2
NDLCFTNVY

SEQ ID NO: 10018 - protein, 9 aa, Severe acute respiratory syndrome coronavirus 2
FTNVYADSF

SEQ ID NO: 10019 - protein, 9 aa, Severe acute respiratory syndrome coronavirus 2
TNVYADSFV

SEQ ID NO: 10020 - protein, 9 aa, Severe acute respiratory syndrome coronavirus 2
NVYADSFVI

SEQ ID NO: 10021 - protein, 9 aa, Severe acute respiratory syndrome coronavirus 2
VYADSFVIR

SEQ ID NO: 10022 - protein, 9 aa, Severe acute respiratory syndrome coronavirus 2
SFVIRGDEV

SEQ ID NO: 10023 - protein, 9 aa, Severe acute respiratory syndrome coronavirus 2
FVIRGDEVR

SEQ ID NO: 10024 - protein, 9 aa, Severe acute respiratory syndrome coronavirus 2
IRGDEVRQI

SEQ ID NO: 10025 - protein, 9 aa, Severe acute respiratory syndrome coronavirus 2
RQIAPGQTG

SEQ ID NO: 10026 - protein, 9 aa, Severe acute respiratory syndrome coronavirus 2
QIAPGQTGK

SEQ ID NO: 10027 - protein, 9 aa, Severe acute respiratory syndrome coronavirus 2
APGQTGKIA

SEQ ID NO: 10028 - protein, 9 aa, Severe acute respiratory syndrome coronavirus 2
GQTGKIADY

SEQ ID NO: 10029 - protein, 9 aa, Severe acute respiratory syndrome coronavirus 2
TGKIADYNY

SEQ ID NO: 10030 - protein, 9 aa, Severe acute respiratory syndrome coronavirus 2
KIADYNYKL

SEQ ID NO: 10031 - protein, 9 aa, Severe acute respiratory syndrome coronavirus 2
YNYKLPDDF

SEQ ID NO: 10032 - protein, 9 aa, Severe acute respiratory syndrome coronavirus 2
KLPDDFTGC

SEQ ID NO: 10033 - protein, 9 aa, Severe acute respiratory syndrome coronavirus 2
LPDDFTGCV

SEQ ID NO: 10034 - protein, 9 aa, Severe acute respiratory syndrome coronavirus 2
VIAWNSNNL

SEQ ID NO: 10035 - protein, 9 aa, Severe acute respiratory syndrome coronavirus 2
SKVGGNYNY

SEQ ID NO: 10036 - protein, 9 aa, Severe acute respiratory syndrome coronavirus 2
KVGGNYNYL

SEQ ID NO: 10037 - protein, 9 aa, Severe acute respiratory syndrome coronavirus 2
VGGNYNYLY

SEQ ID NO: 10038 - protein, 9 aa, Severe acute respiratory syndrome coronavirus 2
GGNYNYLYR

SEQ ID NO: 10039 - protein, 9 aa, Severe acute respiratory syndrome coronavirus 2
NYNYLYRLF

SEQ ID NO: 10040 - protein, 9 aa, Severe acute respiratory syndrome coronavirus 2
YNYLYRLFR

SEQ ID NO: 10041 - protein, 9 aa, Severe acute respiratory syndrome coronavirus 2
NYLYRLFRK

SEQ ID NO: 10042 - protein, 9 aa, Severe acute respiratory syndrome coronavirus 2
YLYRLFRKS

SEQ ID NO: 10043 - protein, 9 aa, Severe acute respiratory syndrome coronavirus 2
YRLFRKSNL

SEQ ID NO: 10044 - protein, 9 aa, Severe acute respiratory syndrome coronavirus 2
RLFRKSNLK

SEQ ID NO: 10045 - protein, 9 aa, Severe acute respiratory syndrome coronavirus 2
FRKSNLKPF

SEQ ID NO: 10046 - protein, 9 aa, Severe acute respiratory syndrome coronavirus 2
KSNLKPFER

SEQ ID NO: 10047 - protein, 9 aa, Severe acute respiratory syndrome coronavirus 2
KPFERDIST

SEQ ID NO: 10048 - protein, 9 aa, Severe acute respiratory syndrome coronavirus 2
FERDISTEI

SEQ ID NO: 10049 - protein, 9 aa, Severe acute respiratory syndrome coronavirus 2
IYQAGSTPC

SEQ ID NO: 10050 - protein, 9 aa, Severe acute respiratory syndrome coronavirus 2
TPCNGVEGF

SEQ ID NO: 10051 - protein, 9 aa, Severe acute respiratory syndrome coronavirus 2
NGVEGFNCY

SEQ ID NO: 10052 - protein, 9 aa, Severe acute respiratory syndrome coronavirus 2
EGFNCYFPL

SEQ ID NO: 10053 - protein, 9 aa, Severe acute respiratory syndrome coronavirus 2
NCYFPLQSY

SEQ ID NO: 10054 - protein, 9 aa, Severe acute respiratory syndrome coronavirus 2
YFPLQSYGF

SEQ ID NO: 10055 - protein, 9 aa, Severe acute respiratory syndrome coronavirus 2
LQSYGFQPT

SEQ ID NO: 10056 - protein, 9 aa, Severe acute respiratory syndrome coronavirus 2
YGFQPTNGV

SEQ ID NO: 10057 - protein, 9 aa, Severe acute respiratory syndrome coronavirus 2
FQPTNGVGY

SEQ ID NO: 10058 - protein, 9 aa, Severe acute respiratory syndrome coronavirus 2
NGVGYQPYR

SEQ ID NO: 10059 - protein, 9 aa, Severe acute respiratory syndrome coronavirus 2
GVGYQPYRV

SEQ ID NO: 10060 - protein, 9 aa, Severe acute respiratory syndrome coronavirus 2
VGYQPYRVV

SEQ ID NO: 10061 - protein, 9 aa, Severe acute respiratory syndrome coronavirus 2
GYQPYRVVV

SEQ ID NO: 10062 - protein, 9 aa, Severe acute respiratory syndrome coronavirus 2
YQPYRVVVL

SEQ ID NO: 10063 - protein, 9 aa, Severe acute respiratory syndrome coronavirus 2
QPYRVVVLS

SEQ ID NO: 10064 - protein, 9 aa, Severe acute respiratory syndrome coronavirus 2
PYRVVVLSF

SEQ ID NO: 10065 - protein, 9 aa, Severe acute respiratory syndrome coronavirus 2
RVVVLSFEL

SEQ ID NO: 10066 - protein, 9 aa, Severe acute respiratory syndrome coronavirus 2
VVVLSFELL

SEQ ID NO: 10067 - protein, 9 aa, Severe acute respiratory syndrome coronavirus 2
VVLSFELLH

SEQ ID NO: 10068 - protein, 9 aa, Severe acute respiratory syndrome coronavirus 2
VLSFELLHA

SEQ ID NO: 10069 - protein, 9 aa, Severe acute respiratory syndrome coronavirus 2
FELLHAPAT

SEQ ID NO: 10070 - protein, 9 aa, Severe acute respiratory syndrome coronavirus 2
ELLHAPATV

SEQ ID NO: 10071 - protein, 9 aa, Severe acute respiratory syndrome coronavirus 2
CGPKKSTNL

SEQ ID NO: 10072 - protein, 9 aa, Severe acute respiratory syndrome coronavirus 2
GPKKSTNLV

SEQ ID NO: 10073 - protein, 9 aa, Severe acute respiratory syndrome coronavirus 2
KSTNLVKNK

SEQ ID NO: 10074 - protein, 9 aa, Severe acute respiratory syndrome coronavirus 2
LVKNKCVNF

SEQ ID NO: 10075 - protein, 9 aa, Severe acute respiratory syndrome coronavirus 2
KNKCVNFNF

SEQ ID NO: 10076 - protein, 9 aa, Severe acute respiratory syndrome coronavirus 2
CVNFNFNGL

SEQ ID NO: 10077 - protein, 9 aa, Severe acute respiratory syndrome coronavirus 2
GVLTESNKK

SEQ ID NO: 10078 - protein, 9 aa, Severe acute respiratory syndrome coronavirus 2
ESNKKFLPF

SEQ ID NO: 10079 - protein, 9 aa, Severe acute respiratory syndrome coronavirus 2
KKFLPFQQF

SEQ ID NO: 10080 - protein, 9 aa, Severe acute respiratory syndrome coronavirus 2
FLPFQQFGR

SEQ ID NO: 10081 - protein, 9 aa, Severe acute respiratory syndrome coronavirus 2
FQQFGRDIA

SEQ ID NO: 10082 - protein, 9 aa, Severe acute respiratory syndrome coronavirus 2
DIADTTDAV

SEQ ID NO: 10083 - protein, 9 aa, Severe acute respiratory syndrome coronavirus 2
VRDPQTLEI

SEQ ID NO: 10084 - protein, 9 aa, Severe acute respiratory syndrome coronavirus 2
LEILDITPC

SEQ ID NO: 10085 - protein, 9 aa, Severe acute respiratory syndrome coronavirus 2
ILDITPCSF

SEQ ID NO: 10086 - protein, 9 aa, Severe acute respiratory syndrome coronavirus 2
ITPCSFGGV

SEQ ID NO: 10087 - protein, 9 aa, Severe acute respiratory syndrome coronavirus 2
CSFGGVSVI

SEQ ID NO: 10088 - protein, 9 aa, Severe acute respiratory syndrome coronavirus 2
NTSNQVAVL

SEQ ID NO: 10089 - protein, 9 aa, Severe acute respiratory syndrome coronavirus 2
TSNQVAVLY

SEQ ID NO: 10090 - protein, 9 aa, Severe acute respiratory syndrome coronavirus 2
QVAVLYQDV

SEQ ID NO: 10091 - protein, 9 aa, Severe acute respiratory syndrome coronavirus 2
VLYQDVNCT

SEQ ID NO: 10092 - protein, 9 aa, Severe acute respiratory syndrome coronavirus 2
YQDVNCTEV

SEQ ID NO: 10093 - protein, 9 aa, Severe acute respiratory syndrome coronavirus 2
DVNCTEVPV

SEQ ID NO: 10094 - protein, 9 aa, Severe acute respiratory syndrome coronavirus 2
TEVPVAIHA

SEQ ID NO: 10095 - protein, 9 aa, Severe acute respiratory syndrome coronavirus 2
HADQLTPTW

SEQ ID NO: 10096 - protein, 9 aa, Severe acute respiratory syndrome coronavirus 2
QLTPTWRVY

SEQ ID NO: 10097 - protein, 9 aa, Severe acute respiratory syndrome coronavirus 2
TPTWRVYST

SEQ ID NO: 10098 - protein, 9 aa, Severe acute respiratory syndrome coronavirus 2
RVYSTGSNV

SEQ ID NO: 10099 - protein, 9 aa, Severe acute respiratory syndrome coronavirus 2
VYSTGSNVF

SEQ ID NO: 10100 - protein, 9 aa, Severe acute respiratory syndrome coronavirus 2
TGSNVFQTR

SEQ ID NO: 10101 - protein, 9 aa, Severe acute respiratory syndrome coronavirus 2
VFQTRAGCL

SEQ ID NO: 10102 - protein, 9 aa, Severe acute respiratory syndrome coronavirus 2
FQTRAGCLI

SEQ ID NO: 10103 - protein, 9 aa, Severe acute respiratory syndrome coronavirus 2
QTRAGCLIG

SEQ ID NO: 10104 - protein, 9 aa, Severe acute respiratory syndrome coronavirus 2
TRAGCLIGA

SEQ ID NO: 10105 - protein, 9 aa, Severe acute respiratory syndrome coronavirus 2
NSYECDIPI

SEQ ID NO: 10106 - protein, 9 aa, Severe acute respiratory syndrome coronavirus 2
YECDIPIGA

SEQ ID NO: 10107 - protein, 9 aa, Severe acute respiratory syndrome coronavirus 2
IPIGAGICA

SEQ ID NO: 10108 - protein, 9 aa, Severe acute respiratory syndrome coronavirus 2
IGAGICASY

SEQ ID NO: 10109 - protein, 9 aa, Severe acute respiratory syndrome coronavirus 2
YQTQTNSPR

SEQ ID NO: 10110 - protein, 9 aa, Severe acute respiratory syndrome coronavirus 2
QTQTNSPRR

SEQ ID NO: 10111 - protein, 9 aa, Severe acute respiratory syndrome coronavirus 2
QTNSPRRAR

SEQ ID NO: 10112 - protein, 9 aa, Severe acute respiratory syndrome coronavirus 2
SPRRARSVA

SEQ ID NO: 10113 - protein, 9 aa, Severe acute respiratory syndrome coronavirus 2
RRARSVASQ

SEQ ID NO: 10114 - protein, 9 aa, Severe acute respiratory syndrome coronavirus 2
RARSVASQS

SEQ ID NO: 10115 - protein, 9 aa, Severe acute respiratory syndrome coronavirus 2
ARSVASQSI

SEQ ID NO: 10116 - protein, 9 aa, Severe acute respiratory syndrome coronavirus 2
RSVASQSII

SEQ ID NO: 10117 - protein, 9 aa, Severe acute respiratory syndrome coronavirus 2
VASQSIIAY

SEQ ID NO: 10118 - protein, 9 aa, Severe acute respiratory syndrome coronavirus 2
SQSIIAYTM

SEQ ID NO: 10119 - protein, 9 aa, Severe acute respiratory syndrome coronavirus 2
SIIAYTMSL

SEQ ID NO: 10120 - protein, 9 aa, Severe acute respiratory syndrome coronavirus 2
IAYTMSLGA

SEQ ID NO: 10121 - protein, 9 aa, Severe acute respiratory syndrome coronavirus 2
MSLGAENSV

SEQ ID NO: 10122 - protein, 9 aa, Severe acute respiratory syndrome coronavirus 2
LGAENSVAY

SEQ ID NO: 10123 - protein, 9 aa, Severe acute respiratory syndrome coronavirus 2
AENSVAYSN

SEQ ID NO: 10124 - protein, 9 aa, Severe acute respiratory syndrome coronavirus 2
SVAYSNNSI

SEQ ID NO: 10125 - protein, 9 aa, Severe acute respiratory syndrome coronavirus 2
VAYSNNSIA

SEQ ID NO: 10126 - protein, 9 aa, Severe acute respiratory syndrome coronavirus 2
AYSNNSIAI

SEQ ID NO: 10127 - protein, 9 aa, Severe acute respiratory syndrome coronavirus 2
NSIAIPTNF

SEQ ID NO: 10128 - protein, 9 aa, Severe acute respiratory syndrome coronavirus 2
IAIPTNFTI

SEQ ID NO: 10129 - protein, 9 aa, Severe acute respiratory syndrome coronavirus 2
IPTNFTISV

SEQ ID NO: 10130 - protein, 9 aa, Severe acute respiratory syndrome coronavirus 2
FTISVTTEI

SEQ ID NO: 10131 - protein, 9 aa, Severe acute respiratory syndrome coronavirus 2
SVTTEILPV

SEQ ID NO: 10132 - protein, 9 aa, Severe acute respiratory syndrome coronavirus 2
TTEILPVSM

SEQ ID NO: 10133 - protein, 9 aa, Severe acute respiratory syndrome coronavirus 2
TEILPVSMT

SEQ ID NO: 10134 - protein, 9 aa, Severe acute respiratory syndrome coronavirus 2
EILPVSMTK

SEQ ID NO: 10135 - protein, 9 aa, Severe acute respiratory syndrome coronavirus 2
LPVSMTKTS

SEQ ID NO: 10136 - protein, 9 aa, Severe acute respiratory syndrome coronavirus 2
TKTSVDCTM

SEQ ID NO: 10137 - protein, 9 aa, Severe acute respiratory syndrome coronavirus 2
KTSVDCTMY

SEQ ID NO: 10138 - protein, 9 aa, Severe acute respiratory syndrome coronavirus 2
TSVDCTMYI

SEQ ID NO: 10139 - protein, 9 aa, Severe acute respiratory syndrome coronavirus 2
STECSNLLL

SEQ ID NO: 10140 - protein, 9 aa, Severe acute respiratory syndrome coronavirus 2
ECSNLLLQY

SEQ ID NO: 10141 - protein, 9 aa, Severe acute respiratory syndrome coronavirus 2
NLLLQYGSF

SEQ ID NO: 10142 - protein, 9 aa, Severe acute respiratory syndrome coronavirus 2
LLLQYGSFC

SEQ ID NO: 10143 - protein, 9 aa, Severe acute respiratory syndrome coronavirus 2
LLQYGSFCT

SEQ ID NO: 10144 - protein, 9 aa, Severe acute respiratory syndrome coronavirus 2
LQYGSFCTQ

SEQ ID NO: 10145 - protein, 9 aa, Severe acute respiratory syndrome coronavirus 2
QYGSFCTQL

SEQ ID NO: 10146 - protein, 9 aa, Severe acute respiratory syndrome coronavirus 2
GSFCTQLNR

SEQ ID NO: 10147 - protein, 9 aa, Severe acute respiratory syndrome coronavirus 2
FCTQLNRAL

SEQ ID NO: 10148 - protein, 9 aa, Severe acute respiratory syndrome coronavirus 2
TQLNRALTG

SEQ ID NO: 10149 - protein, 9 aa, Severe acute respiratory syndrome coronavirus 2
QLNRALTGI

SEQ ID NO: 10150 - protein, 9 aa, Severe acute respiratory syndrome coronavirus 2
NRALTGIAV

SEQ ID NO: 10151 - protein, 9 aa, Severe acute respiratory syndrome coronavirus 2
NTQEVFAQV

SEQ ID NO: 10152 - protein, 9 aa, Severe acute respiratory syndrome coronavirus 2
EVFAQVKQI

SEQ ID NO: 10153 - protein, 9 aa, Severe acute respiratory syndrome coronavirus 2
VFAQVKQIY

SEQ ID NO: 10154 - protein, 9 aa, Severe acute respiratory syndrome coronavirus 2
FAQVKQIYK

SEQ ID NO: 10155 - protein, 9 aa, Severe acute respiratory syndrome coronavirus 2
AQVKQIYKT

SEQ ID NO: 10156 - protein, 9 aa, Severe acute respiratory syndrome coronavirus 2
KQIYKTPPI

SEQ ID NO: 10157 - protein, 9 aa, Severe acute respiratory syndrome coronavirus 2
QIYKTPPIK

SEQ ID NO: 10158 - protein, 9 aa, Severe acute respiratory syndrome coronavirus 2
YKTPPIKDF

SEQ ID NO: 10159 - protein, 9 aa, Severe acute respiratory syndrome coronavirus 2
IKDFGGFNF

SEQ ID NO: 10160 - protein, 9 aa, Severe acute respiratory syndrome coronavirus 2
SQILPDPSK

SEQ ID NO: 10161 - protein, 9 aa, Severe acute respiratory syndrome coronavirus 2
SKRSFIEDL

SEQ ID NO: 10162 - protein, 9 aa, Severe acute respiratory syndrome coronavirus 2
KRSFIEDLL

SEQ ID NO: 10163 - protein, 9 aa, Severe acute respiratory syndrome coronavirus 2
RSFIEDLLF

SEQ ID NO: 10164 - protein, 9 aa, Severe acute respiratory syndrome coronavirus 2
FIEDLLFNK

SEQ ID NO: 10165 - protein, 9 aa, Severe acute respiratory syndrome coronavirus 2
IEDLLFNKV

SEQ ID NO: 10166 - protein, 9 aa, Severe acute respiratory syndrome coronavirus 2
LLFNKVTLA

SEQ ID NO: 10167 - protein, 9 aa, Severe acute respiratory syndrome coronavirus 2
KVTLADAGF

SEQ ID NO: 10168 - protein, 9 aa, Severe acute respiratory syndrome coronavirus 2
VTLADAGFI

SEQ ID NO: 10169 - protein, 9 aa, Severe acute respiratory syndrome coronavirus 2
TLADAGFIK

SEQ ID NO: 10170 - protein, 9 aa, Severe acute respiratory syndrome coronavirus 2
FIKQYGDCL

SEQ ID NO: 10171 - protein, 9 aa, Severe acute respiratory syndrome coronavirus 2
LGDIAARDL

SEQ ID NO: 10172 - protein, 9 aa, Severe acute respiratory syndrome coronavirus 2
AQKFNGLTV

SEQ ID NO: 10173 - protein, 9 aa, Severe acute respiratory syndrome coronavirus 2
QKFNGLTVL

SEQ ID NO: 10174 - protein, 9 aa, Severe acute respiratory syndrome coronavirus 2
GLTVLPPLL

SEQ ID NO: 10175 - protein, 9 aa, Severe acute respiratory syndrome coronavirus 2
LPPLLTDEM

SEQ ID NO: 10176 - protein, 9 aa, Severe acute respiratory syndrome coronavirus 2
LTDEMIAQY

SEQ ID NO: 10177 - protein, 9 aa, Severe acute respiratory syndrome coronavirus 2
DEMIAQYTS

SEQ ID NO: 10178 - protein, 9 aa, Severe acute respiratory syndrome coronavirus 2
EMIAQYTSA

SEQ ID NO: 10179 - protein, 9 aa, Severe acute respiratory syndrome coronavirus 2
MIAQYTSAL

SEQ ID NO: 10180 - protein, 9 aa, Severe acute respiratory syndrome coronavirus 2
IAQYTSALL

SEQ ID NO: 10181 - protein, 9 aa, Severe acute respiratory syndrome coronavirus 2
AQYTSALLA

SEQ ID NO: 10182 - protein, 9 aa, Severe acute respiratory syndrome coronavirus 2
YTSALLAGT

SEQ ID NO: 10183 - protein, 9 aa, Severe acute respiratory syndrome coronavirus 2
TSALLAGTI

SEQ ID NO: 10184 - protein, 9 aa, Severe acute respiratory syndrome coronavirus 2
ALLAGTITS

SEQ ID NO: 10185 - protein, 9 aa, Severe acute respiratory syndrome coronavirus 2
LLAGTITSG

SEQ ID NO: 10186 - protein, 9 aa, Severe acute respiratory syndrome coronavirus 2
LAGTITSGW

SEQ ID NO: 10187 - protein, 9 aa, Severe acute respiratory syndrome coronavirus 2
GTITSGWTF

SEQ ID NO: 10188 - protein, 9 aa, Severe acute respiratory syndrome coronavirus 2
ITSGWTFGA

SEQ ID NO: 10189 - protein, 9 aa, Severe acute respiratory syndrome coronavirus 2
WTFGAGAAL

SEQ ID NO: 10190 - protein, 9 aa, Severe acute respiratory syndrome coronavirus 2
FGAGAALQI

SEQ ID NO: 10191 - protein, 9 aa, Severe acute respiratory syndrome coronavirus 2
AGAALQIPF

SEQ ID NO: 10192 - protein, 9 aa, Severe acute respiratory syndrome coronavirus 2
AALQIPFAM

SEQ ID NO: 10193 - protein, 9 aa, Severe acute respiratory syndrome coronavirus 2
LQIPFAMQM

SEQ ID NO: 10194 - protein, 9 aa, Severe acute respiratory syndrome coronavirus 2
PFAMQMAYR

SEQ ID NO: 10195 - protein, 9 aa, Severe acute respiratory syndrome coronavirus 2
FAMQMAYRF

SEQ ID NO: 10196 - protein, 9 aa, Severe acute respiratory syndrome coronavirus 2
MQMAYRFNG

SEQ ID NO: 10197 - protein, 9 aa, Severe acute respiratory syndrome coronavirus 2
QMAYRFNGI

SEQ ID NO: 10198 - protein, 9 aa, Severe acute respiratory syndrome coronavirus 2
AYRFNGIGV

SEQ ID NO: 10199 - protein, 9 aa, Severe acute respiratory syndrome coronavirus 2
YRFNGIGVT

SEQ ID NO: 10200 - protein, 9 aa, Severe acute respiratory syndrome coronavirus 2
NGIGVTQNV

SEQ ID NO: 10201 - protein, 9 aa, Severe acute respiratory syndrome coronavirus 2
IGVTQNVLY

SEQ ID NO: 10202 - protein, 9 aa, Severe acute respiratory syndrome coronavirus 2
VLYENQKLI

SEQ ID NO: 10203 - protein, 9 aa, Severe acute respiratory syndrome coronavirus 2
NQKLIANQF

SEQ ID NO: 10204 - protein, 9 aa, Severe acute respiratory syndrome coronavirus 2
KLIANQFNS

SEQ ID NO: 10205 - protein, 9 aa, Severe acute respiratory syndrome coronavirus 2
LIANQFNSA

SEQ ID NO: 10206 - protein, 9 aa, Severe acute respiratory syndrome coronavirus 2
IANQFNSAI

SEQ ID NO: 10207 - protein, 9 aa, Severe acute respiratory syndrome coronavirus 2
NQFNSAIGK

SEQ ID NO: 10208 - protein, 9 aa, Severe acute respiratory syndrome coronavirus 2
DSLSSTASA

SEQ ID NO: 10209 - protein, 9 aa, Severe acute respiratory syndrome coronavirus 2
SLSSTASAL

SEQ ID NO: 10210 - protein, 9 aa, Severe acute respiratory syndrome coronavirus 2
LSSTASALG

SEQ ID NO: 10211 - protein, 9 aa, Severe acute respiratory syndrome coronavirus 2
SSTASALGK

SEQ ID NO: 10212 - protein, 9 aa, Severe acute respiratory syndrome coronavirus 2
STASALGKL

SEQ ID NO: 10213 - protein, 9 aa, Severe acute respiratory syndrome coronavirus 2
SALGKLQDV

SEQ ID NO: 10214 - protein, 9 aa, Severe acute respiratory syndrome coronavirus 2
ALGKLQDVV

SEQ ID NO: 10215 - protein, 9 aa, Severe acute respiratory syndrome coronavirus 2
VVNQNAQAL

SEQ ID NO: 10216 - protein, 9 aa, Severe acute respiratory syndrome coronavirus 2
NAQALNTLV

SEQ ID NO: 10217 - protein, 9 aa, Severe acute respiratory syndrome coronavirus 2
AQALNTLVK

SEQ ID NO: 10218 - protein, 9 aa, Severe acute respiratory syndrome coronavirus 2
ALNTLVKQL

SEQ ID NO: 10219 - protein, 9 aa, Severe acute respiratory syndrome coronavirus 2
LVKQLSSNF

SEQ ID NO: 10220 - protein, 9 aa, Severe acute respiratory syndrome coronavirus 2
KQLSSNFGA

SEQ ID NO: 10221 - protein, 9 aa, Severe acute respiratory syndrome coronavirus 2
QLSSNFGAI

SEQ ID NO: 10222 - protein, 9 aa, Severe acute respiratory syndrome coronavirus 2
SNFGAISSV

SEQ ID NO: 10223 - protein, 9 aa, Severe acute respiratory syndrome coronavirus 2
NFGAISSVL

SEQ ID NO: 10224 - protein, 9 aa, Severe acute respiratory syndrome coronavirus 2
AISSVLNDI

SEQ ID NO: 10225 - protein, 9 aa, Severe acute respiratory syndrome coronavirus 2
ISSVLNDIL

SEQ ID NO: 10226 - protein, 9 aa, Severe acute respiratory syndrome coronavirus 2
SVLNDILSR

SEQ ID NO: 10227 - protein, 9 aa, Severe acute respiratory syndrome coronavirus 2
VLNDILSRL

SEQ ID NO: 10228 - protein, 9 aa, Severe acute respiratory syndrome coronavirus 2
LSRLDKVEA

SEQ ID NO: 10229 - protein, 9 aa, Severe acute respiratory syndrome coronavirus 2
RLDKVEAEV

SEQ ID NO: 10230 - protein, 9 aa, Severe acute respiratory syndrome coronavirus 2
AEVQIDRLI

SEQ ID NO: 10231 - protein, 9 aa, Severe acute respiratory syndrome coronavirus 2
VQIDRLITG

SEQ ID NO: 10232 - protein, 9 aa, Severe acute respiratory syndrome coronavirus 2
QIDRLITGR

SEQ ID NO: 10233 - protein, 9 aa, Severe acute respiratory syndrome coronavirus 2
LITGRLQSL

SEQ ID NO: 10234 - protein, 9 aa, Severe acute respiratory syndrome coronavirus 2
GRLQSLQTY

SEQ ID NO: 10235 - protein, 9 aa, Severe acute respiratory syndrome coronavirus 2
RLQSLQTYV

SEQ ID NO: 10236 - protein, 9 aa, Severe acute respiratory syndrome coronavirus 2
LQTYVTQQL

SEQ ID NO: 10237 - protein, 9 aa, Severe acute respiratory syndrome coronavirus 2
QTYVTQQLI

SEQ ID NO: 10238 - protein, 9 aa, Severe acute respiratory syndrome coronavirus 2
TYVTQQLIR

SEQ ID NO: 10239 - protein, 9 aa, Severe acute respiratory syndrome coronavirus 2
YVTQQLIRA

SEQ ID NO: 10240 - protein, 9 aa, Severe acute respiratory syndrome coronavirus 2
QQLIRAAEI

SEQ ID NO: 10241 - protein, 9 aa, Severe acute respiratory syndrome coronavirus 2
QLIRAAEIR

SEQ ID NO: 10242 - protein, 9 aa, Severe acute respiratory syndrome coronavirus 2
LIRAAEIRA

SEQ ID NO: 10243 - protein, 9 aa, Severe acute respiratory syndrome coronavirus 2
RAAEIRASA

SEQ ID NO: 10244 - protein, 9 aa, Severe acute respiratory syndrome coronavirus 2
AEIRASANL

SEQ ID NO: 10245 - protein, 9 aa, Severe acute respiratory syndrome coronavirus 2
IRASANLAA

SEQ ID NO: 10246 - protein, 9 aa, Severe acute respiratory syndrome coronavirus 2
ASANLAATK

SEQ ID NO: 10247 - protein, 9 aa, Severe acute respiratory syndrome coronavirus 2
SANLAATKM

SEQ ID NO: 10248 - protein, 9 aa, Severe acute respiratory syndrome coronavirus 2
ATKMSECVL

SEQ ID NO: 10249 - protein, 9 aa, Severe acute respiratory syndrome coronavirus 2
ECVLGQSKR

SEQ ID NO: 10250 - protein, 9 aa, Severe acute respiratory syndrome coronavirus 2
RVDFCGKGY

SEQ ID NO: 10251 - protein, 9 aa, Severe acute respiratory syndrome coronavirus 2
GKGYHLMSF

SEQ ID NO: 10252 - protein, 9 aa, Severe acute respiratory syndrome coronavirus 2
HLMSFPQSA

SEQ ID NO: 10253 - protein, 9 aa, Severe acute respiratory syndrome coronavirus 2
MSFPQSAPH

SEQ ID NO: 10254 - protein, 9 aa, Severe acute respiratory syndrome coronavirus 2
FPQSAPHGV

SEQ ID NO: 10255 - protein, 9 aa, Severe acute respiratory syndrome coronavirus 2
QSAPHGVVF

SEQ ID NO: 10256 - protein, 9 aa, Severe acute respiratory syndrome coronavirus 2
SAPHGVVFL

SEQ ID NO: 10257 - protein, 9 aa, Severe acute respiratory syndrome coronavirus 2
GVVFLHVTY

SEQ ID NO: 10258 - protein, 9 aa, Severe acute respiratory syndrome coronavirus 2
VVFLHVTYV

SEQ ID NO: 10259 - protein, 9 aa, Severe acute respiratory syndrome coronavirus 2
FLHVTYVPA

SEQ ID NO: 10260 - protein, 9 aa, Severe acute respiratory syndrome coronavirus 2
VTYVPAQEK

SEQ ID NO: 10261 - protein, 9 aa, Severe acute respiratory syndrome coronavirus 2
QEKNFTTAP

SEQ ID NO: 10262 - protein, 9 aa, Severe acute respiratory syndrome coronavirus 2
EKNFTTAPA

SEQ ID NO: 10263 - protein, 9 aa, Severe acute respiratory syndrome coronavirus 2
KNFTTAPAI

SEQ ID NO: 10264 - protein, 9 aa, Severe acute respiratory syndrome coronavirus 2
KAHFPREGV

SEQ ID NO: 10265 - protein, 9 aa, Severe acute respiratory syndrome coronavirus 2
AHFPREGVF

SEQ ID NO: 10266 - protein, 9 aa, Severe acute respiratory syndrome coronavirus 2
HFPREGVFV

SEQ ID NO: 10267 - protein, 9 aa, Severe acute respiratory syndrome coronavirus 2
FPREGVFVS

SEQ ID NO: 10268 - protein, 9 aa, Severe acute respiratory syndrome coronavirus 2
VFVSNGTHW

SEQ ID NO: 10269 - protein, 9 aa, Severe acute respiratory syndrome coronavirus 2
FVSNGTHWF

SEQ ID NO: 10270 - protein, 9 aa, Severe acute respiratory syndrome coronavirus 2
VSNGTHWFV

SEQ ID NO: 10271 - protein, 9 aa, Severe acute respiratory syndrome coronavirus 2
GTHWFVTQR

SEQ ID NO: 10272 - protein, 9 aa, Severe acute respiratory syndrome coronavirus 2
HWFVTQRNF

SEQ ID NO: 10273 - protein, 9 aa, Severe acute respiratory syndrome coronavirus 2
WFVTQRNFY

SEQ ID NO: 10274 - protein, 9 aa, Severe acute respiratory syndrome coronavirus 2
QRNFYEPQI

SEQ ID NO: 10275 - protein, 9 aa, Severe acute respiratory syndrome coronavirus 2
QIITTDNTF

SEQ ID NO: 10276 - protein, 9 aa, Severe acute respiratory syndrome coronavirus 2
IITTDNTFV

SEQ ID NO: 10277 - protein, 9 aa, Severe acute respiratory syndrome coronavirus 2
FVSGNCDVV

SEQ ID NO: 10278 - protein, 9 aa, Severe acute respiratory syndrome coronavirus 2
VVIGIVNNT

SEQ ID NO: 10279 - protein, 9 aa, Severe acute respiratory syndrome coronavirus 2
VIGIVNNTV

SEQ ID NO: 10280 - protein, 9 aa, Severe acute respiratory syndrome coronavirus 2
IGIVNNTVY

SEQ ID NO: 10281 - protein, 9 aa, Severe acute respiratory syndrome coronavirus 2
VYDPLQPEL

SEQ ID NO: 10282 - protein, 9 aa, Severe acute respiratory syndrome coronavirus 2
SFKEELDKY

SEQ ID NO: 10283 - protein, 9 aa, Severe acute respiratory syndrome coronavirus 2
NHTSPDVDL

SEQ ID NO: 10284 - protein, 9 aa, Severe acute respiratory syndrome coronavirus 2
DISGINASV

SEQ ID NO: 10285 - protein, 9 aa, Severe acute respiratory syndrome coronavirus 2
ISGINASVV

SEQ ID NO: 10286 - protein, 9 aa, Severe acute respiratory syndrome coronavirus 2
GINASVVNI

SEQ ID NO: 10287 - protein, 9 aa, Severe acute respiratory syndrome coronavirus 2
NASVVNIQK

SEQ ID NO: 10288 - protein, 9 aa, Severe acute respiratory syndrome coronavirus 2
KEIDRLNEV

SEQ ID NO: 10289 - protein, 9 aa, Severe acute respiratory syndrome coronavirus 2
RLNEVAKNL

SEQ ID NO: 10290 - protein, 9 aa, Severe acute respiratory syndrome coronavirus 2
VAKNLNESL

SEQ ID NO: 10291 - protein, 9 aa, Severe acute respiratory syndrome coronavirus 2
NLNESLIDL

SEQ ID NO: 10292 - protein, 9 aa, Severe acute respiratory syndrome coronavirus 2
SLIDLQELG

SEQ ID NO: 10293 - protein, 9 aa, Severe acute respiratory syndrome coronavirus 2
QELGKYEQY

SEQ ID NO: 10294 - protein, 9 aa, Severe acute respiratory syndrome coronavirus 2
ELGKYEQYI

SEQ ID NO: 10295 - protein, 9 aa, Severe acute respiratory syndrome coronavirus 2
YEQYIKWPW

SEQ ID NO: 10296 - protein, 9 aa, Severe acute respiratory syndrome coronavirus 2
EQYIKWPWY

SEQ ID NO: 10297 - protein, 9 aa, Severe acute respiratory syndrome coronavirus 2
QYIKWPWYI

SEQ ID NO: 10298 - protein, 9 aa, Severe acute respiratory syndrome coronavirus 2
YIKWPWYIW

SEQ ID NO: 10299 - protein, 9 aa, Severe acute respiratory syndrome coronavirus 2
KWPWYIWLG

SEQ ID NO: 10300 - protein, 9 aa, Severe acute respiratory syndrome coronavirus 2
WPWYIWLGF

SEQ ID NO: 10301 - protein, 9 aa, Severe acute respiratory syndrome coronavirus 2
PWYIWLGFI

SEQ ID NO: 10302 - protein, 9 aa, Severe acute respiratory syndrome coronavirus 2
IWLGFIAGL

SEQ ID NO: 10303 - protein, 9 aa, Severe acute respiratory syndrome coronavirus 2
WLGFIAGLI

SEQ ID NO: 10304 - protein, 9 aa, Severe acute respiratory syndrome coronavirus 2
FIAGLIAIV

SEQ ID NO: 10305 - protein, 9 aa, Severe acute respiratory syndrome coronavirus 2
IAGLIAIVM

SEQ ID NO: 10306 - protein, 9 aa, Severe acute respiratory syndrome coronavirus 2
GLIAIVMVT

SEQ ID NO: 10307 - protein, 9 aa, Severe acute respiratory syndrome coronavirus 2
LIAIVMVTI

SEQ ID NO: 10308 - protein, 9 aa, Severe acute respiratory syndrome coronavirus 2
IAIVMVTIM

SEQ ID NO: 10309 - protein, 9 aa, Severe acute respiratory syndrome coronavirus 2
MVTIMLCCM

SEQ ID NO: 10310 - protein, 9 aa, Severe acute respiratory syndrome coronavirus 2
IMLCCMTSC

SEQ ID NO: 10311 - protein, 9 aa, Severe acute respiratory syndrome coronavirus 2
CMTSCCSCL

SEQ ID NO: 10312 - protein, 9 aa, Severe acute respiratory syndrome coronavirus 2
MTSCCSCLK

SEQ ID NO: 10313 - protein, 9 aa, Severe acute respiratory syndrome coronavirus 2
CSCGSCCKF

SEQ ID NO: 10314 - protein, 9 aa, Severe acute respiratory syndrome coronavirus 2
EPVLKGVKL

SEQ ID NO: 10315 - protein, 9 aa, Severe acute respiratory syndrome coronavirus 2
VLKGVKLHY

SEQ ID NO: 10316 - protein, 10 aa, Severe acute respiratory syndrome coronavirus 2
MFVFLVLLPL

SEQ ID NO: 10317 - protein, 10 aa, Severe acute respiratory syndrome coronavirus 2
FVFLVLLPLV

SEQ ID NO: 10318 - protein, 10 aa, Severe acute respiratory syndrome coronavirus 2
FLVLLPLVSS

SEQ ID NO: 10319 - protein, 10 aa, Severe acute respiratory syndrome coronavirus 2
LLPLVSSQCV

SEQ ID NO: 10320 - protein, 10 aa, Severe acute respiratory syndrome coronavirus 2
SSQCVNLTTR

SEQ ID NO: 10321 - protein, 10 aa, Severe acute respiratory syndrome coronavirus 2
LTTRTQLPPA

SEQ ID NO: 10322 - protein, 10 aa, Severe acute respiratory syndrome coronavirus 2
TTRTQLPPAY

SEQ ID NO: 10323 - protein, 10 aa, Severe acute respiratory syndrome coronavirus 2
QLPPAYTNSF

SEQ ID NO: 10324 - protein, 10 aa, Severe acute respiratory syndrome coronavirus 2
AYTNSFTRGV

SEQ ID NO: 10325 - protein, 10 aa, Severe acute respiratory syndrome coronavirus 2
YTNSFTRGVY

SEQ ID NO: 10326 - protein, 10 aa, Severe acute respiratory syndrome coronavirus 2
TNSFTRGVYY

SEQ ID NO: 10327 - protein, 10 aa, Severe acute respiratory syndrome coronavirus 2
FTRGVYYPDK

SEQ ID NO: 10328 - protein, 10 aa, Severe acute respiratory syndrome coronavirus 2
RGVYYPDKVF

SEQ ID NO: 10329 - protein, 10 aa, Severe acute respiratory syndrome coronavirus 2
GVYYPDKVFR

SEQ ID NO: 10330 - protein, 10 aa, Severe acute respiratory syndrome coronavirus 2
VYYPDKVFRS

SEQ ID NO: 10331 - protein, 10 aa, Severe acute respiratory syndrome coronavirus 2
YPDKVFRSSV

SEQ ID NO: 10332 - protein, 10 aa, Severe acute respiratory syndrome coronavirus 2
KVFRSSVLHS

SEQ ID NO: 10333 - protein, 10 aa, Severe acute respiratory syndrome coronavirus 2
SSVLHSTQDL

SEQ ID NO: 10334 - protein, 10 aa, Severe acute respiratory syndrome coronavirus 2
SVLHSTQDLF

SEQ ID NO: 10335 - protein, 10 aa, Severe acute respiratory syndrome coronavirus 2
VLHSTQDLFL

SEQ ID NO: 10336 - protein, 10 aa, Severe acute respiratory syndrome coronavirus 2
HSTQDLFLPF

SEQ ID NO: 10337 - protein, 10 aa, Severe acute respiratory syndrome coronavirus 2
STQDLFLPFF

SEQ ID NO: 10338 - protein, 10 aa, Severe acute respiratory syndrome coronavirus 2
DLFLPFFSNV

SEQ ID NO: 10339 - protein, 10 aa, Severe acute respiratory syndrome coronavirus 2
FLPFFSNVTW

SEQ ID NO: 10340 - protein, 10 aa, Severe acute respiratory syndrome coronavirus 2
LPFFSNVTWF

SEQ ID NO: 10341 - protein, 10 aa, Severe acute respiratory syndrome coronavirus 2
FFSNVTWFHA

SEQ ID NO: 10342 - protein, 10 aa, Severe acute respiratory syndrome coronavirus 2
FSNVTWFHAI

SEQ ID NO: 10343 - protein, 10 aa, Severe acute respiratory syndrome coronavirus 2
NVTWFHAIHV

SEQ ID NO: 10344 - protein, 10 aa, Severe acute respiratory syndrome coronavirus 2
HVSGTNGTKR

SEQ ID NO: 10345 - protein, 10 aa, Severe acute respiratory syndrome coronavirus 2
VSGTNGTKRF

SEQ ID NO: 10346 - protein, 10 aa, Severe acute respiratory syndrome coronavirus 2
NGTKRFDNPV

SEQ ID NO: 10347 - protein, 10 aa, Severe acute respiratory syndrome coronavirus 2
GTKRFDNPVL

SEQ ID NO: 10348 - protein, 10 aa, Severe acute respiratory syndrome coronavirus 2
KRFDNPVLPF

SEQ ID NO: 10349 - protein, 10 aa, Severe acute respiratory syndrome coronavirus 2
NPVLPFNDGV

SEQ ID NO: 10350 - protein, 10 aa, Severe acute respiratory syndrome coronavirus 2
PVLPFNDGVY

SEQ ID NO: 10351 - protein, 10 aa, Severe acute respiratory syndrome coronavirus 2
VLPFNDGVYF

SEQ ID NO: 10352 - protein, 10 aa, Severe acute respiratory syndrome coronavirus 2
LPFNDGVYFA

SEQ ID NO: 10353 - protein, 10 aa, Severe acute respiratory syndrome coronavirus 2
DGVYFASTEK

SEQ ID NO: 10354 - protein, 10 aa, Severe acute respiratory syndrome coronavirus 2
TEKSNIIRGW

SEQ ID NO: 10355 - protein, 10 aa, Severe acute respiratory syndrome coronavirus 2
KSNIIRGWIF

SEQ ID NO: 10356 - protein, 10 aa, Severe acute respiratory syndrome coronavirus 2
NIIRGWIFGT

SEQ ID NO: 10357 - protein, 10 aa, Severe acute respiratory syndrome coronavirus 2
IRGWIFGTTL

SEQ ID NO: 10358 - protein, 10 aa, Severe acute respiratory syndrome coronavirus 2
WIFGTTLDSK

SEQ ID NO: 10359 - protein, 10 aa, Severe acute respiratory syndrome coronavirus 2
TLDSKTQSLL

SEQ ID NO: 10360 - protein, 10 aa, Severe acute respiratory syndrome coronavirus 2
LLIVNNATNV

SEQ ID NO: 10361 - protein, 10 aa, Severe acute respiratory syndrome coronavirus 2
LIVNNATNVV

SEQ ID NO: 10362 - protein, 10 aa, Severe acute respiratory syndrome coronavirus 2
NNATNVVIKV

SEQ ID NO: 10363 - protein, 10 aa, Severe acute respiratory syndrome coronavirus 2
CEFQFCNDPF

SEQ ID NO: 10364 - protein, 10 aa, Severe acute respiratory syndrome coronavirus 2
EFQFCNDPFL

SEQ ID NO: 10365 - protein, 10 aa, Severe acute respiratory syndrome coronavirus 2
FQFCNDPFLG

SEQ ID NO: 10366 - protein, 10 aa, Severe acute respiratory syndrome coronavirus 2
FCNDPFLGVY

SEQ ID NO: 10367 - protein, 10 aa, Severe acute respiratory syndrome coronavirus 2
CNDPFLGVYY

SEQ ID NO: 10368 - protein, 10 aa, Severe acute respiratory syndrome coronavirus 2
DPFLGVYYHK

SEQ ID NO: 10369 - protein, 10 aa, Severe acute respiratory syndrome coronavirus 2
LGVYYHKNNK

SEQ ID NO: 10370 - protein, 10 aa, Severe acute respiratory syndrome coronavirus 2
VYYHKNNKSW

SEQ ID NO: 10371 - protein, 10 aa, Severe acute respiratory syndrome coronavirus 2
YYHKNNKSWM

SEQ ID NO: 10372 - protein, 10 aa, Severe acute respiratory syndrome coronavirus 2
NKSWMESEFR

SEQ ID NO: 10373 - protein, 10 aa, Severe acute respiratory syndrome coronavirus 2
KSWMESEFRV

SEQ ID NO: 10374 - protein, 10 aa, Severe acute respiratory syndrome coronavirus 2
SWMESEFRVY

SEQ ID NO: 10375 - protein, 10 aa, Severe acute respiratory syndrome coronavirus 2
WMESEFRVYS

SEQ ID NO: 10376 - protein, 10 aa, Severe acute respiratory syndrome coronavirus 2
MESEFRVYSS

SEQ ID NO: 10377 - protein, 10 aa, Severe acute respiratory syndrome coronavirus 2
ESEFRVYSSA

SEQ ID NO: 10378 - protein, 10 aa, Severe acute respiratory syndrome coronavirus 2
SEFRVYSSAN

SEQ ID NO: 10379 - protein, 10 aa, Severe acute respiratory syndrome coronavirus 2
VYSSANNCTF

SEQ ID NO: 10380 - protein, 10 aa, Severe acute respiratory syndrome coronavirus 2
SSANNCTFEY

SEQ ID NO: 10381 - protein, 10 aa, Severe acute respiratory syndrome coronavirus 2
SANNCTFEYV

SEQ ID NO: 10382 - protein, 10 aa, Severe acute respiratory syndrome coronavirus 2
CTFEYVSQPF

SEQ ID NO: 10383 - protein, 10 aa, Severe acute respiratory syndrome coronavirus 2
TFEYVSQPFL

SEQ ID NO: 10384 - protein, 10 aa, Severe acute respiratory syndrome coronavirus 2
FEYVSQPFLM

SEQ ID NO: 10385 - protein, 10 aa, Severe acute respiratory syndrome coronavirus 2
YVSQPFLMDL

SEQ ID NO: 10386 - protein, 10 aa, Severe acute respiratory syndrome coronavirus 2
GKQGNFKNLR

SEQ ID NO: 10387 - protein, 10 aa, Severe acute respiratory syndrome coronavirus 2
NFKNLREFVF

SEQ ID NO: 10388 - protein, 10 aa, Severe acute respiratory syndrome coronavirus 2
NLREFVFKNI

SEQ ID NO: 10389 - protein, 10 aa, Severe acute respiratory syndrome coronavirus 2
EFVFKNIDGY

SEQ ID NO: 10390 - protein, 10 aa, Severe acute respiratory syndrome coronavirus 2
FVFKNIDGYF

SEQ ID NO: 10391 - protein, 10 aa, Severe acute respiratory syndrome coronavirus 2
VFKNIDGYFK

SEQ ID NO: 10392 - protein, 10 aa, Severe acute respiratory syndrome coronavirus 2
KNIDGYFKIY

SEQ ID NO: 10393 - protein, 10 aa, Severe acute respiratory syndrome coronavirus 2
IDGYFKIYSK

SEQ ID NO: 10394 - protein, 10 aa, Severe acute respiratory syndrome coronavirus 2
FKIYSKHTPI

SEQ ID NO: 10395 - protein, 10 aa, Severe acute respiratory syndrome coronavirus 2
IYSKHTPINL

SEQ ID NO: 10396 - protein, 10 aa, Severe acute respiratory syndrome coronavirus 2
YSKHTPINLV

SEQ ID NO: 10397 - protein, 10 aa, Severe acute respiratory syndrome coronavirus 2
HTPINLVRDL

SEQ ID NO: 10398 - protein, 10 aa, Severe acute respiratory syndrome coronavirus 2
RDLPQGFSAL

SEQ ID NO: 10399 - protein, 10 aa, Severe acute respiratory syndrome coronavirus 2
FSALEPLVDL

SEQ ID NO: 10400 - protein, 10 aa, Severe acute respiratory syndrome coronavirus 2
ALEPLVDLPI

SEQ ID NO: 10401 - protein, 10 aa, Severe acute respiratory syndrome coronavirus 2
EPLVDLPIGI

SEQ ID NO: 10402 - protein, 10 aa, Severe acute respiratory syndrome coronavirus 2
DLPIGINITR

SEQ ID NO: 10403 - protein, 10 aa, Severe acute respiratory syndrome coronavirus 2
LPIGINITRF

SEQ ID NO: 10404 - protein, 10 aa, Severe acute respiratory syndrome coronavirus 2
NITRFQTLLA

SEQ ID NO: 10405 - protein, 10 aa, Severe acute respiratory syndrome coronavirus 2
ITRFQTLLAL

SEQ ID NO: 10406 - protein, 10 aa, Severe acute respiratory syndrome coronavirus 2
TRFQTLLALH

SEQ ID NO: 10407 - protein, 10 aa, Severe acute respiratory syndrome coronavirus 2
RFQTLLALHR

SEQ ID NO: 10408 - protein, 10 aa, Severe acute respiratory syndrome coronavirus 2
QTLLALHRSY

SEQ ID NO: 10409 - protein, 10 aa, Severe acute respiratory syndrome coronavirus 2
TLLALHRSYL

SEQ ID NO: 10410 - protein, 10 aa, Severe acute respiratory syndrome coronavirus 2
LLALHRSYLT

SEQ ID NO: 10411 - protein, 10 aa, Severe acute respiratory syndrome coronavirus 2
LTPGDSSSGW

SEQ ID NO: 10412 - protein, 10 aa, Severe acute respiratory syndrome coronavirus 2
DSSSGWTAGA

SEQ ID NO: 10413 - protein, 10 aa, Severe acute respiratory syndrome coronavirus 2
SGWTAGAAAY

SEQ ID NO: 10414 - protein, 10 aa, Severe acute respiratory syndrome coronavirus 2
GWTAGAAAYY

SEQ ID NO: 10415 - protein, 10 aa, Severe acute respiratory syndrome coronavirus 2
WTAGAAAYYV

SEQ ID NO: 10416 - protein, 10 aa, Severe acute respiratory syndrome coronavirus 2
AGAAAYYVGY

SEQ ID NO: 10417 - protein, 10 aa, Severe acute respiratory syndrome coronavirus 2
GAAAYYVGYL

SEQ ID NO: 10418 - protein, 10 aa, Severe acute respiratory syndrome coronavirus 2
AYYVGYLQPR

SEQ ID NO: 10419 - protein, 10 aa, Severe acute respiratory syndrome coronavirus 2
YVGYLQPRTF

SEQ ID NO: 10420 - protein, 10 aa, Severe acute respiratory syndrome coronavirus 2
VGYLQPRTFL

SEQ ID NO: 10421 - protein, 10 aa, Severe acute respiratory syndrome coronavirus 2
GYLQPRTFLL

SEQ ID NO: 10422 - protein, 10 aa, Severe acute respiratory syndrome coronavirus 2
YLQPRTFLLK

SEQ ID NO: 10423 - protein, 10 aa, Severe acute respiratory syndrome coronavirus 2
LQPRTFLLKY

SEQ ID NO: 10424 - protein, 10 aa, Severe acute respiratory syndrome coronavirus 2
FLLKYNENGT

SEQ ID NO: 10425 - protein, 10 aa, Severe acute respiratory syndrome coronavirus 2
LLKYNENGTI

SEQ ID NO: 10426 - protein, 10 aa, Severe acute respiratory syndrome coronavirus 2
YNENGTITDA

SEQ ID NO: 10427 - protein, 10 aa, Severe acute respiratory syndrome coronavirus 2
NENGTITDAV

SEQ ID NO: 10428 - protein, 10 aa, Severe acute respiratory syndrome coronavirus 2
TITDAVDCAL

SEQ ID NO: 10429 - protein, 10 aa, Severe acute respiratory syndrome coronavirus 2
CALDPLSETK

SEQ ID NO: 10430 - protein, 10 aa, Severe acute respiratory syndrome coronavirus 2
CTLKSFTVEK

SEQ ID NO: 10431 - protein, 10 aa, Severe acute respiratory syndrome coronavirus 2
KSFTVEKGIY

SEQ ID NO: 10432 - protein, 10 aa, Severe acute respiratory syndrome coronavirus 2
FTVEKGIYQT

SEQ ID NO: 10433 - protein, 10 aa, Severe acute respiratory syndrome coronavirus 2
KGIYQTSNFR

SEQ ID NO: 10434 - protein, 10 aa, Severe acute respiratory syndrome coronavirus 2
GIYQTSNFRV

SEQ ID NO: 10435 - protein, 10 aa, Severe acute respiratory syndrome coronavirus 2
FRVQPTESIV

SEQ ID NO: 10436 - protein, 10 aa, Severe acute respiratory syndrome coronavirus 2
RVQPTESIVR

SEQ ID NO: 10437 - protein, 10 aa, Severe acute respiratory syndrome coronavirus 2
VQPTESIVRF

SEQ ID NO: 10438 - protein, 10 aa, Severe acute respiratory syndrome coronavirus 2
TESIVRFPNI

SEQ ID NO: 10439 - protein, 10 aa, Severe acute respiratory syndrome coronavirus 2
IVRFPNITNL

SEQ ID NO: 10440 - protein, 10 aa, Severe acute respiratory syndrome coronavirus 2
VRFPNITNLC

SEQ ID NO: 10441 - protein, 10 aa, Severe acute respiratory syndrome coronavirus 2
FPNITNLCPF

SEQ ID NO: 10442 - protein, 10 aa, Severe acute respiratory syndrome coronavirus 2
ITNLCPFGEV

SEQ ID NO: 10443 - protein, 10 aa, Severe acute respiratory syndrome coronavirus 2
TNLCPFGEVF

SEQ ID NO: 10444 - protein, 10 aa, Severe acute respiratory syndrome coronavirus 2
LCPFGEVFNA

SEQ ID NO: 10445 - protein, 10 aa, Severe acute respiratory syndrome coronavirus 2
CPFGEVFNAT

SEQ ID NO: 10446 - protein, 10 aa, Severe acute respiratory syndrome coronavirus 2
GEVFNATRFA

SEQ ID NO: 10447 - protein, 10 aa, Severe acute respiratory syndrome coronavirus 2
EVFNATRFAS

SEQ ID NO: 10448 - protein, 10 aa, Severe acute respiratory syndrome coronavirus 2
FNATRFASVY

SEQ ID NO: 10449 - protein, 10 aa, Severe acute respiratory syndrome coronavirus 2
NATRFASVYA

SEQ ID NO: 10450 - protein, 10 aa, Severe acute respiratory syndrome coronavirus 2
ATRFASVYAW

SEQ ID NO: 10451 - protein, 10 aa, Severe acute respiratory syndrome coronavirus 2
RFASVYAWNR

SEQ ID NO: 10452 - protein, 10 aa, Severe acute respiratory syndrome coronavirus 2
FASVYAWNRK

SEQ ID NO: 10453 - protein, 10 aa, Severe acute respiratory syndrome coronavirus 2
ASVYAWNRKR

SEQ ID NO: 10454 - protein, 10 aa, Severe acute respiratory syndrome coronavirus 2
WNRKRISNCV

SEQ ID NO: 10455 - protein, 10 aa, Severe acute respiratory syndrome coronavirus 2
KRISNCVADY

SEQ ID NO: 10456 - protein, 10 aa, Severe acute respiratory syndrome coronavirus 2
ISNCVADYSV

SEQ ID NO: 10457 - protein, 10 aa, Severe acute respiratory syndrome coronavirus 2
NCVADYSVLY

SEQ ID NO: 10458 - protein, 10 aa, Severe acute respiratory syndrome coronavirus 2
YSVLYNSASF

SEQ ID NO: 10459 - protein, 10 aa, Severe acute respiratory syndrome coronavirus 2
VLYNSASFST

SEQ ID NO: 10460 - protein, 10 aa, Severe acute respiratory syndrome coronavirus 2
LYNSASFSTF

SEQ ID NO: 10461 - protein, 10 aa, Severe acute respiratory syndrome coronavirus 2
YNSASFSTFK

SEQ ID NO: 10462 - protein, 10 aa, Severe acute respiratory syndrome coronavirus 2
NSASFSTFKC

SEQ ID NO: 10463 - protein, 10 aa, Severe acute respiratory syndrome coronavirus 2
SASFSTFKCY

SEQ ID NO: 10464 - protein, 10 aa, Severe acute respiratory syndrome coronavirus 2
KCYGVSPTKL

SEQ ID NO: 10465 - protein, 10 aa, Severe acute respiratory syndrome coronavirus 2
SPTKLNDLCF

SEQ ID NO: 10466 - protein, 10 aa, Severe acute respiratory syndrome coronavirus 2
KLNDLCFTNV

SEQ ID NO: 10467 - protein, 10 aa, Severe acute respiratory syndrome coronavirus 2
LNDLCFTNVY

SEQ ID NO: 10468 - protein, 10 aa, Severe acute respiratory syndrome coronavirus 2
NDLCFTNVYA

SEQ ID NO: 10469 - protein, 10 aa, Severe acute respiratory syndrome coronavirus 2
CFTNVYADSF

SEQ ID NO: 10470 - protein, 10 aa, Severe acute respiratory syndrome coronavirus 2
FTNVYADSFV

SEQ ID NO: 10471 - protein, 10 aa, Severe acute respiratory syndrome coronavirus 2
TNVYADSFVI

SEQ ID NO: 10472 - protein, 10 aa, Severe acute respiratory syndrome coronavirus 2
NVYADSFVIR

SEQ ID NO: 10473 - protein, 10 aa, Severe acute respiratory syndrome coronavirus 2
DSFVIRGDEV

SEQ ID NO: 10474 - protein, 10 aa, Severe acute respiratory syndrome coronavirus 2
SFVIRGDEVR

SEQ ID NO: 10475 - protein, 10 aa, Severe acute respiratory syndrome coronavirus 2
RQIAPGQTGK

SEQ ID NO: 10476 - protein, 10 aa, Severe acute respiratory syndrome coronavirus 2
QTGKIADYNY

SEQ ID NO: 10477 - protein, 10 aa, Severe acute respiratory syndrome coronavirus 2
TGKIADYNYK

SEQ ID NO: 10478 - protein, 10 aa, Severe acute respiratory syndrome coronavirus 2
GKIADYNYKL

SEQ ID NO: 10479 - protein, 10 aa, Severe acute respiratory syndrome coronavirus 2
KLPDDFTGCV

SEQ ID NO: 10480 - protein, 10 aa, Severe acute respiratory syndrome coronavirus 2
LPDDFTGCVI

SEQ ID NO: 10481 - protein, 10 aa, Severe acute respiratory syndrome coronavirus 2
NLDSKVGGNY

SEQ ID NO: 10482 - protein, 10 aa, Severe acute respiratory syndrome coronavirus 2
KVGGNYNYLY

SEQ ID NO: 10483 - protein, 10 aa, Severe acute respiratory syndrome coronavirus 2
VGGNYNYLYR

SEQ ID NO: 10484 - protein, 10 aa, Severe acute respiratory syndrome coronavirus 2
GNYNYLYRLF

SEQ ID NO: 10485 - protein, 10 aa, Severe acute respiratory syndrome coronavirus 2
NYNYLYRLFR

SEQ ID NO: 10486 - protein, 10 aa, Severe acute respiratory syndrome coronavirus 2
YNYLYRLFRK

SEQ ID NO: 10487 - protein, 10 aa, Severe acute respiratory syndrome coronavirus 2
LYRLFRKSNL

SEQ ID NO: 10488 - protein, 10 aa, Severe acute respiratory syndrome coronavirus 2
YRLFRKSNLK

SEQ ID NO: 10489 - protein, 10 aa, Severe acute respiratory syndrome coronavirus 2
RLFRKSNLKP

SEQ ID NO: 10490 - protein, 10 aa, Severe acute respiratory syndrome coronavirus 2
LFRKSNLKPF

SEQ ID NO: 10491 - protein, 10 aa, Severe acute respiratory syndrome coronavirus 2
RKSNLKPFER

SEQ ID NO: 10492 - protein, 10 aa, Severe acute respiratory syndrome coronavirus 2
LKPFERDIST

SEQ ID NO: 10493 - protein, 10 aa, Severe acute respiratory syndrome coronavirus 2
FERDISTEIY

SEQ ID NO: 10494 - protein, 10 aa, Severe acute respiratory syndrome coronavirus 2
TEIYQAGSTP

SEQ ID NO: 10495 - protein, 10 aa, Severe acute respiratory syndrome coronavirus 2
VEGFNCYFPL

SEQ ID NO: 10496 - protein, 10 aa, Severe acute respiratory syndrome coronavirus 2
FNCYFPLQSY

SEQ ID NO: 10497 - protein, 10 aa, Severe acute respiratory syndrome coronavirus 2
CYFPLQSYGF

SEQ ID NO: 10498 - protein, 10 aa, Severe acute respiratory syndrome coronavirus 2
FPLQSYGFQP

SEQ ID NO: 10499 - protein, 10 aa, Severe acute respiratory syndrome coronavirus 2
SYGFQPTNGV

SEQ ID NO: 10500 - protein, 10 aa, Severe acute respiratory syndrome coronavirus 2
GFQPTNGVGY

SEQ ID NO: 10501 - protein, 10 aa, Severe acute respiratory syndrome coronavirus 2
PTNGVGYQPY

SEQ ID NO: 10502 - protein, 10 aa, Severe acute respiratory syndrome coronavirus 2
TNGVGYQPYR

SEQ ID NO: 10503 - protein, 10 aa, Severe acute respiratory syndrome coronavirus 2
VGYQPYRVVV

SEQ ID NO: 10504 - protein, 10 aa, Severe acute respiratory syndrome coronavirus 2
GYQPYRVVVL

SEQ ID NO: 10505 - protein, 10 aa, Severe acute respiratory syndrome coronavirus 2
YQPYRVVVLS

SEQ ID NO: 10506 - protein, 10 aa, Severe acute respiratory syndrome coronavirus 2
QPYRVVVLSF

SEQ ID NO: 10507 - protein, 10 aa, Severe acute respiratory syndrome coronavirus 2
YRVVVLSFEL

SEQ ID NO: 10508 - protein, 10 aa, Severe acute respiratory syndrome coronavirus 2
RVVVLSFELL

SEQ ID NO: 10509 - protein, 10 aa, Severe acute respiratory syndrome coronavirus 2
VVLSFELLHA

SEQ ID NO: 10510 - protein, 10 aa, Severe acute respiratory syndrome coronavirus 2
LSFELLHAPA

SEQ ID NO: 10511 - protein, 10 aa, Severe acute respiratory syndrome coronavirus 2
SFELLHAPAT

SEQ ID NO: 10512 - protein, 10 aa, Severe acute respiratory syndrome coronavirus 2
FELLHAPATV

SEQ ID NO: 10513 - protein, 10 aa, Severe acute respiratory syndrome coronavirus 2
HAPATVCGPK

SEQ ID NO: 10514 - protein, 10 aa, Severe acute respiratory syndrome coronavirus 2
VKNKCVNFNF

SEQ ID NO: 10515 - protein, 10 aa, Severe acute respiratory syndrome coronavirus 2
GTGVLTESNK

SEQ ID NO: 10516 - protein, 10 aa, Severe acute respiratory syndrome coronavirus 2
TGVLTESNKK

SEQ ID NO: 10517 - protein, 10 aa, Severe acute respiratory syndrome coronavirus 2
VLTESNKKFL

SEQ ID NO: 10518 - protein, 10 aa, Severe acute respiratory syndrome coronavirus 2
TESNKKFLPF

SEQ ID NO: 10519 - protein, 10 aa, Severe acute respiratory syndrome coronavirus 2
NKKFLPFQQF

SEQ ID NO: 10520 - protein, 10 aa, Severe acute respiratory syndrome coronavirus 2
KFLPFQQFGR

SEQ ID NO: 10521 - protein, 10 aa, Severe acute respiratory syndrome coronavirus 2
LPFQQFGRDI

SEQ ID NO: 10522 - protein, 10 aa, Severe acute respiratory syndrome coronavirus 2
RDIADTTDAV

SEQ ID NO: 10523 - protein, 10 aa, Severe acute respiratory syndrome coronavirus 2
DIADTTDAVR

SEQ ID NO: 10524 - protein, 10 aa, Severe acute respiratory syndrome coronavirus 2
AVRDPQTLEI

SEQ ID NO: 10525 - protein, 10 aa, Severe acute respiratory syndrome coronavirus 2
EILDITPCSF

SEQ ID NO: 10526 - protein, 10 aa, Severe acute respiratory syndrome coronavirus 2
DITPCSFGGV

SEQ ID NO: 10527 - protein, 10 aa, Severe acute respiratory syndrome coronavirus 2
TPCSFGGVSV

SEQ ID NO: 10528 - protein, 10 aa, Severe acute respiratory syndrome coronavirus 2
NTSNQVAVLY

SEQ ID NO: 10529 - protein, 10 aa, Severe acute respiratory syndrome coronavirus 2
NQVAVLYQDV

SEQ ID NO: 10530 - protein, 10 aa, Severe acute respiratory syndrome coronavirus 2
LYQDVNCTEV

SEQ ID NO: 10531 - protein, 10 aa, Severe acute respiratory syndrome coronavirus 2
QDVNCTEVPV

SEQ ID NO: 10532 - protein, 10 aa, Severe acute respiratory syndrome coronavirus 2
CTEVPVAIHA

SEQ ID NO: 10533 - protein, 10 aa, Severe acute respiratory syndrome coronavirus 2
VPVAIHADQL

SEQ ID NO: 10534 - protein, 10 aa, Severe acute respiratory syndrome coronavirus 2
IHADQLTPTW

SEQ ID NO: 10535 - protein, 10 aa, Severe acute respiratory syndrome coronavirus 2
HADQLTPTWR

SEQ ID NO: 10536 - protein, 10 aa, Severe acute respiratory syndrome coronavirus 2
ADQLTPTWRV

SEQ ID NO: 10537 - protein, 10 aa, Severe acute respiratory syndrome coronavirus 2
DQLTPTWRVY

SEQ ID NO: 10538 - protein, 10 aa, Severe acute respiratory syndrome coronavirus 2
WRVYSTGSNV

SEQ ID NO: 10539 - protein, 10 aa, Severe acute respiratory syndrome coronavirus 2
RVYSTGSNVF

SEQ ID NO: 10540 - protein, 10 aa, Severe acute respiratory syndrome coronavirus 2
STGSNVFQTR

SEQ ID NO: 10541 - protein, 10 aa, Severe acute respiratory syndrome coronavirus 2
NVFQTRAGCL

SEQ ID NO: 10542 - protein, 10 aa, Severe acute respiratory syndrome coronavirus 2
QTRAGCLIGA

SEQ ID NO: 10543 - protein, 10 aa, Severe acute respiratory syndrome coronavirus 2
IGAEHVNNSY

SEQ ID NO: 10544 - protein, 10 aa, Severe acute respiratory syndrome coronavirus 2
NNSYECDIPI

SEQ ID NO: 10545 - protein, 10 aa, Severe acute respiratory syndrome coronavirus 2
SYECDIPIGA

SEQ ID NO: 10546 - protein, 10 aa, Severe acute respiratory syndrome coronavirus 2
PIGAGICASY

SEQ ID NO: 10547 - protein, 10 aa, Severe acute respiratory syndrome coronavirus 2
SYQTQTNSPR

SEQ ID NO: 10548 - protein, 10 aa, Severe acute respiratory syndrome coronavirus 2
YQTQTNSPRR

SEQ ID NO: 10549 - protein, 10 aa, Severe acute respiratory syndrome coronavirus 2
TQTNSPRRAR

SEQ ID NO: 10550 - protein, 10 aa, Severe acute respiratory syndrome coronavirus 2
NSPRRARSVA

SEQ ID NO: 10551 - protein, 10 aa, Severe acute respiratory syndrome coronavirus 2
SPRRARSVAS

SEQ ID NO: 10552 - protein, 10 aa, Severe acute respiratory syndrome coronavirus 2
RRARSVASQS

SEQ ID NO: 10553 - protein, 10 aa, Severe acute respiratory syndrome coronavirus 2
RARSVASQSI

SEQ ID NO: 10554 - protein, 10 aa, Severe acute respiratory syndrome coronavirus 2
RSVASQSIIA

SEQ ID NO: 10555 - protein, 10 aa, Severe acute respiratory syndrome coronavirus 2
SVASQSIIAY

SEQ ID NO: 10556 - protein, 10 aa, Severe acute respiratory syndrome coronavirus 2
ASQSIIAYTM

SEQ ID NO: 10557 - protein, 10 aa, Severe acute respiratory syndrome coronavirus 2
QSIIAYTMSL

SEQ ID NO: 10558 - protein, 10 aa, Severe acute respiratory syndrome coronavirus 2
SIIAYTMSLG

SEQ ID NO: 10559 - protein, 10 aa, Severe acute respiratory syndrome coronavirus 2
IIAYTMSLGA

SEQ ID NO: 10560 - protein, 10 aa, Severe acute respiratory syndrome coronavirus 2
TMSLGAENSV

SEQ ID NO: 10561 - protein, 10 aa, Severe acute respiratory syndrome coronavirus 2
SLGAENSVAY

SEQ ID NO: 10562 - protein, 10 aa, Severe acute respiratory syndrome coronavirus 2
NSVAYSNNSI

SEQ ID NO: 10563 - protein, 10 aa, Severe acute respiratory syndrome coronavirus 2
VAYSNNSIAI

SEQ ID NO: 10564 - protein, 10 aa, Severe acute respiratory syndrome coronavirus 2
NSIAIPTNFT

SEQ ID NO: 10565 - protein, 10 aa, Severe acute respiratory syndrome coronavirus 2
SIAIPTNFTI

SEQ ID NO: 10566 - protein, 10 aa, Severe acute respiratory syndrome coronavirus 2
AIPTNFTISV

SEQ ID NO: 10567 - protein, 10 aa, Severe acute respiratory syndrome coronavirus 2
IPTNFTISVT

SEQ ID NO: 10568 - protein, 10 aa, Severe acute respiratory syndrome coronavirus 2
NFTISVTTEI

SEQ ID NO: 10569 - protein, 10 aa, Severe acute respiratory syndrome coronavirus 2
FTISVTTEIL

SEQ ID NO: 10570 - protein, 10 aa, Severe acute respiratory syndrome coronavirus 2
ISVTTEILPV

SEQ ID NO: 10571 - protein, 10 aa, Severe acute respiratory syndrome coronavirus 2
VTTEILPVSM

SEQ ID NO: 10572 - protein, 10 aa, Severe acute respiratory syndrome coronavirus 2
TEILPVSMTK

SEQ ID NO: 10573 - protein, 10 aa, Severe acute respiratory syndrome coronavirus 2
EILPVSMTKT

SEQ ID NO: 10574 - protein, 10 aa, Severe acute respiratory syndrome coronavirus 2
LPVSMTKTSV

SEQ ID NO: 10575 - protein, 10 aa, Severe acute respiratory syndrome coronavirus 2
MTKTSVDCTM

SEQ ID NO: 10576 - protein, 10 aa, Severe acute respiratory syndrome coronavirus 2
TKTSVDCTMY

SEQ ID NO: 10577 - protein, 10 aa, Severe acute respiratory syndrome coronavirus 2
KTSVDCTMYI

SEQ ID NO: 10578 - protein, 10 aa, Severe acute respiratory syndrome coronavirus 2
TECSNLLLQY

SEQ ID NO: 10579 - protein, 10 aa, Severe acute respiratory syndrome coronavirus 2
SNLLLQYGSF

SEQ ID NO: 10580 - protein, 10 aa, Severe acute respiratory syndrome coronavirus 2
LLLQYGSFCT

SEQ ID NO: 10581 - protein, 10 aa, Severe acute respiratory syndrome coronavirus 2
LQYGSFCTQL

SEQ ID NO: 10582 - protein, 10 aa, Severe acute respiratory syndrome coronavirus 2
YGSFCTQLNR

SEQ ID NO: 10583 - protein, 10 aa, Severe acute respiratory syndrome coronavirus 2
SFCTQLNRAL

SEQ ID NO: 10584 - protein, 10 aa, Severe acute respiratory syndrome coronavirus 2
TQLNRALTGI

SEQ ID NO: 10585 - protein, 10 aa, Severe acute respiratory syndrome coronavirus 2
QLNRALTGIA

SEQ ID NO: 10586 - protein, 10 aa, Severe acute respiratory syndrome coronavirus 2
LTGIAVEQDK

SEQ ID NO: 10587 - protein, 10 aa, Severe acute respiratory syndrome coronavirus 2
KNTQEVFAQV

SEQ ID NO: 10588 - protein, 10 aa, Severe acute respiratory syndrome coronavirus 2
NTQEVFAQVK

SEQ ID NO: 10589 - protein, 10 aa, Severe acute respiratory syndrome coronavirus 2
QEVFAQVKQI

SEQ ID NO: 10590 - protein, 10 aa, Severe acute respiratory syndrome coronavirus 2
EVFAQVKQIY

SEQ ID NO: 10591 - protein, 10 aa, Severe acute respiratory syndrome coronavirus 2
VFAQVKQIYK

SEQ ID NO: 10592 - protein, 10 aa, Severe acute respiratory syndrome coronavirus 2
VKQIYKTPPI

SEQ ID NO: 10593 - protein, 10 aa, Severe acute respiratory syndrome coronavirus 2
KQIYKTPPIK

SEQ ID NO: 10594 - protein, 10 aa, Severe acute respiratory syndrome coronavirus 2
IYKTPPIKDF

SEQ ID NO: 10595 - protein, 10 aa, Severe acute respiratory syndrome coronavirus 2
FSQILPDPSK

SEQ ID NO: 10596 - protein, 10 aa, Severe acute respiratory syndrome coronavirus 2
ILPDPSKPSK

SEQ ID NO: 10597 - protein, 10 aa, Severe acute respiratory syndrome coronavirus 2
SKRSFIEDLL

SEQ ID NO: 10598 - protein, 10 aa, Severe acute respiratory syndrome coronavirus 2
KRSFIEDLLF

SEQ ID NO: 10599 - protein, 10 aa, Severe acute respiratory syndrome coronavirus 2
RSFIEDLLFN

SEQ ID NO: 10600 - protein, 10 aa, Severe acute respiratory syndrome coronavirus 2
SFIEDLLFNK

SEQ ID NO: 10601 - protein, 10 aa, Severe acute respiratory syndrome coronavirus 2
FIEDLLFNKV

SEQ ID NO: 10602 - protein, 10 aa, Severe acute respiratory syndrome coronavirus 2
DLLFNKVTLA

SEQ ID NO: 10603 - protein, 10 aa, Severe acute respiratory syndrome coronavirus 2
LLFNKVTLAD

SEQ ID NO: 10604 - protein, 10 aa, Severe acute respiratory syndrome coronavirus 2
NKVTLADAGF

SEQ ID NO: 10605 - protein, 10 aa, Severe acute respiratory syndrome coronavirus 2
VTLADAGFIK

SEQ ID NO: 10606 - protein, 10 aa, Severe acute respiratory syndrome coronavirus 2
LADAGFIKQY

SEQ ID NO: 10607 - protein, 10 aa, Severe acute respiratory syndrome coronavirus 2
KQYGDCLGDI

SEQ ID NO: 10608 - protein, 10 aa, Severe acute respiratory syndrome coronavirus 2
CLGDIAARDL

SEQ ID NO: 10609 - protein, 10 aa, Severe acute respiratory syndrome coronavirus 2
AARDLICAQK

SEQ ID NO: 10610 - protein, 10 aa, Severe acute respiratory syndrome coronavirus 2
ARDLICAQKF

SEQ ID NO: 10611 - protein, 10 aa, Severe acute respiratory syndrome coronavirus 2
AQKFNGLTVL

SEQ ID NO: 10612 - protein, 10 aa, Severe acute respiratory syndrome coronavirus 2
FNGLTVLPPL

SEQ ID NO: 10613 - protein, 10 aa, Severe acute respiratory syndrome coronavirus 2
NGLTVLPPLL

SEQ ID NO: 10614 - protein, 10 aa, Severe acute respiratory syndrome coronavirus 2
VLPPLLTDEM

SEQ ID NO: 10615 - protein, 10 aa, Severe acute respiratory syndrome coronavirus 2
LLTDEMIAQY

SEQ ID NO: 10616 - protein, 10 aa, Severe acute respiratory syndrome coronavirus 2
LTDEMIAQYT

SEQ ID NO: 10617 - protein, 10 aa, Severe acute respiratory syndrome coronavirus 2
DEMIAQYTSA

SEQ ID NO: 10618 - protein, 10 aa, Severe acute respiratory syndrome coronavirus 2
EMIAQYTSAL

SEQ ID NO: 10619 - protein, 10 aa, Severe acute respiratory syndrome coronavirus 2
MIAQYTSALL

SEQ ID NO: 10620 - protein, 10 aa, Severe acute respiratory syndrome coronavirus 2
AQYTSALLAG

SEQ ID NO: 10621 - protein, 10 aa, Severe acute respiratory syndrome coronavirus 2
YTSALLAGTI

SEQ ID NO: 10622 - protein, 10 aa, Severe acute respiratory syndrome coronavirus 2
LLAGTITSGW

SEQ ID NO: 10623 - protein, 10 aa, Severe acute respiratory syndrome coronavirus 2
AGTITSGWTF

SEQ ID NO: 10624 - protein, 10 aa, Severe acute respiratory syndrome coronavirus 2
TITSGWTFGA

SEQ ID NO: 10625 - protein, 10 aa, Severe acute respiratory syndrome coronavirus 2
GWTFGAGAAL

SEQ ID NO: 10626 - protein, 10 aa, Severe acute respiratory syndrome coronavirus 2
ALQIPFAMQM

SEQ ID NO: 10627 - protein, 10 aa, Severe acute respiratory syndrome coronavirus 2
LQIPFAMQMA

SEQ ID NO: 10628 - protein, 10 aa, Severe acute respiratory syndrome coronavirus 2
QIPFAMQMAY

SEQ ID NO: 10629 - protein, 10 aa, Severe acute respiratory syndrome coronavirus 2
IPFAMQMAYR

SEQ ID NO: 10630 - protein, 10 aa, Severe acute respiratory syndrome coronavirus 2
PFAMQMAYRF

SEQ ID NO: 10631 - protein, 10 aa, Severe acute respiratory syndrome coronavirus 2
MQMAYRFNGI

SEQ ID NO: 10632 - protein, 10 aa, Severe acute respiratory syndrome coronavirus 2
MAYRFNGIGV

SEQ ID NO: 10633 - protein, 10 aa, Severe acute respiratory syndrome coronavirus 2
YRFNGIGVTQ

SEQ ID NO: 10634 - protein, 10 aa, Severe acute respiratory syndrome coronavirus 2
FNGIGVTQNV

SEQ ID NO: 10635 - protein, 10 aa, Severe acute respiratory syndrome coronavirus 2
GIGVTQNVLY

SEQ ID NO: 10636 - protein, 10 aa, Severe acute respiratory syndrome coronavirus 2
VLYENQKLIA

SEQ ID NO: 10637 - protein, 10 aa, Severe acute respiratory syndrome coronavirus 2
KLIANQFNSA

SEQ ID NO: 10638 - protein, 10 aa, Severe acute respiratory syndrome coronavirus 2
LIANQFNSAI

SEQ ID NO: 10639 - protein, 10 aa, Severe acute respiratory syndrome coronavirus 2
ANQFNSAIGK

SEQ ID NO: 10640 - protein, 10 aa, Severe acute respiratory syndrome coronavirus 2
SAIGKIQDSL

SEQ ID NO: 10641 - protein, 10 aa, Severe acute respiratory syndrome coronavirus 2
KIQDSLSSTA

SEQ ID NO: 10642 - protein, 10 aa, Severe acute respiratory syndrome coronavirus 2
DSLSSTASAL

SEQ ID NO: 10643 - protein, 10 aa, Severe acute respiratory syndrome coronavirus 2
SLSSTASALG

SEQ ID NO: 10644 - protein, 10 aa, Severe acute respiratory syndrome coronavirus 2
LSSTASALGK

SEQ ID NO: 10645 - protein, 10 aa, Severe acute respiratory syndrome coronavirus 2
SSTASALGKL

SEQ ID NO: 10646 - protein, 10 aa, Severe acute respiratory syndrome coronavirus 2
KLQDVVNQNA

SEQ ID NO: 10647 - protein, 10 aa, Severe acute respiratory syndrome coronavirus 2
NQNAQALNTL

SEQ ID NO: 10648 - protein, 10 aa, Severe acute respiratory syndrome coronavirus 2
NAQALNTLVK

SEQ ID NO: 10649 - protein, 10 aa, Severe acute respiratory syndrome coronavirus 2
TLVKQLSSNF

SEQ ID NO: 10650 - protein, 10 aa, Severe acute respiratory syndrome coronavirus 2
KQLSSNFGAI

SEQ ID NO: 10651 - protein, 10 aa, Severe acute respiratory syndrome coronavirus 2
SSNFGAISSV

SEQ ID NO: 10652 - protein, 10 aa, Severe acute respiratory syndrome coronavirus 2
AISSVLNDIL

SEQ ID NO: 10653 - protein, 10 aa, Severe acute respiratory syndrome coronavirus 2
SSVLNDILSR

SEQ ID NO: 10654 - protein, 10 aa, Severe acute respiratory syndrome coronavirus 2
SVLNDILSRL

SEQ ID NO: 10655 - protein, 10 aa, Severe acute respiratory syndrome coronavirus 2
VLNDILSRLD

SEQ ID NO: 10656 - protein, 10 aa, Severe acute respiratory syndrome coronavirus 2
ILSRLDKVEA

SEQ ID NO: 10657 - protein, 10 aa, Severe acute respiratory syndrome coronavirus 2
SRLDKVEAEV

SEQ ID NO: 10658 - protein, 10 aa, Severe acute respiratory syndrome coronavirus 2
KVEAEVQIDR

SEQ ID NO: 10659 - protein, 10 aa, Severe acute respiratory syndrome coronavirus 2
VEAEVQIDRL

SEQ ID NO: 10660 - protein, 10 aa, Severe acute respiratory syndrome coronavirus 2
AEVQIDRLIT

SEQ ID NO: 10661 - protein, 10 aa, Severe acute respiratory syndrome coronavirus 2
VQIDRLITGR

SEQ ID NO: 10662 - protein, 10 aa, Severe acute respiratory syndrome coronavirus 2
RLITGRLQSL

SEQ ID NO: 10663 - protein, 10 aa, Severe acute respiratory syndrome coronavirus 2
TGRLQSLQTY

SEQ ID NO: 10664 - protein, 10 aa, Severe acute respiratory syndrome coronavirus 2
GRLQSLQTYV

SEQ ID NO: 10665 - protein, 10 aa, Severe acute respiratory syndrome coronavirus 2
RLQSLQTYVT

SEQ ID NO: 10666 - protein, 10 aa, Severe acute respiratory syndrome coronavirus 2
SLQTYVTQQL

SEQ ID NO: 10667 - protein, 10 aa, Severe acute respiratory syndrome coronavirus 2
LQTYVTQQLI

SEQ ID NO: 10668 - protein, 10 aa, Severe acute respiratory syndrome coronavirus 2
QTYVTQQLIR

SEQ ID NO: 10669 - protein, 10 aa, Severe acute respiratory syndrome coronavirus 2
QQLIRAAEIR

SEQ ID NO: 10670 - protein, 10 aa, Severe acute respiratory syndrome coronavirus 2
AAEIRASANL

SEQ ID NO: 10671 - protein, 10 aa, Severe acute respiratory syndrome coronavirus 2
AEIRASANLA

SEQ ID NO: 10672 - protein, 10 aa, Severe acute respiratory syndrome coronavirus 2
EIRASANLAA

SEQ ID NO: 10673 - protein, 10 aa, Severe acute respiratory syndrome coronavirus 2
RASANLAATK

SEQ ID NO: 10674 - protein, 10 aa, Severe acute respiratory syndrome coronavirus 2
ASANLAATKM

SEQ ID NO: 10675 - protein, 10 aa, Severe acute respiratory syndrome coronavirus 2
MSECVLGQSK

SEQ ID NO: 10676 - protein, 10 aa, Severe acute respiratory syndrome coronavirus 2
QSKRVDFCGK

SEQ ID NO: 10677 - protein, 10 aa, Severe acute respiratory syndrome coronavirus 2
KRVDFCGKGY

SEQ ID NO: 10678 - protein, 10 aa, Severe acute respiratory syndrome coronavirus 2
RVDFCGKGYH

SEQ ID NO: 10679 - protein, 10 aa, Severe acute respiratory syndrome coronavirus 2
VDFCGKGYHL

SEQ ID NO: 10680 - protein, 10 aa, Severe acute respiratory syndrome coronavirus 2
CGKGYHLMSF

SEQ ID NO: 10681 - protein, 10 aa, Severe acute respiratory syndrome coronavirus 2
YHLMSFPQSA

SEQ ID NO: 10682 - protein, 10 aa, Severe acute respiratory syndrome coronavirus 2
HLMSFPQSAP

SEQ ID NO: 10683 - protein, 10 aa, Severe acute respiratory syndrome coronavirus 2
LMSFPQSAPH

SEQ ID NO: 10684 - protein, 10 aa, Severe acute respiratory syndrome coronavirus 2
MSFPQSAPHG

SEQ ID NO: 10685 - protein, 10 aa, Severe acute respiratory syndrome coronavirus 2
FPQSAPHGVV

SEQ ID NO: 10686 - protein, 10 aa, Severe acute respiratory syndrome coronavirus 2
PQSAPHGVVF

SEQ ID NO: 10687 - protein, 10 aa, Severe acute respiratory syndrome coronavirus 2
QSAPHGVVFL

SEQ ID NO: 10688 - protein, 10 aa, Severe acute respiratory syndrome coronavirus 2
APHGVVFLHV

SEQ ID NO: 10689 - protein, 10 aa, Severe acute respiratory syndrome coronavirus 2
HGVVFLHVTY

SEQ ID NO: 10690 - protein, 10 aa, Severe acute respiratory syndrome coronavirus 2
GVVFLHVTYV

SEQ ID NO: 10691 - protein, 10 aa, Severe acute respiratory syndrome coronavirus 2
VVFLHVTYVP

SEQ ID NO: 10692 - protein, 10 aa, Severe acute respiratory syndrome coronavirus 2
VFLHVTYVPA

SEQ ID NO: 10693 - protein, 10 aa, Severe acute respiratory syndrome coronavirus 2
FLHVTYVPAQ

SEQ ID NO: 10694 - protein, 10 aa, Severe acute respiratory syndrome coronavirus 2
HVTYVPAQEK

SEQ ID NO: 10695 - protein, 10 aa, Severe acute respiratory syndrome coronavirus 2
TYVPAQEKNF

SEQ ID NO: 10696 - protein, 10 aa, Severe acute respiratory syndrome coronavirus 2
AQEKNFTTAP

SEQ ID NO: 10697 - protein, 10 aa, Severe acute respiratory syndrome coronavirus 2
QEKNFTTAPA

SEQ ID NO: 10698 - protein, 10 aa, Severe acute respiratory syndrome coronavirus 2
TAPAICHDGK

SEQ ID NO: 10699 - protein, 10 aa, Severe acute respiratory syndrome coronavirus 2
CHDGKAHFPR

SEQ ID NO: 10700 - protein, 10 aa, Severe acute respiratory syndrome coronavirus 2
KAHFPREGVF

SEQ ID NO: 10701 - protein, 10 aa, Severe acute respiratory syndrome coronavirus 2
FPREGVFVSN

SEQ ID NO: 10702 - protein, 10 aa, Severe acute respiratory syndrome coronavirus 2
GVFVSNGTHW

SEQ ID NO: 10703 - protein, 10 aa, Severe acute respiratory syndrome coronavirus 2
VFVSNGTHWF

SEQ ID NO: 10704 - protein, 10 aa, Severe acute respiratory syndrome coronavirus 2
FVSNGTHWFV

SEQ ID NO: 10705 - protein, 10 aa, Severe acute respiratory syndrome coronavirus 2
NGTHWFVTQR

SEQ ID NO: 10706 - protein, 10 aa, Severe acute respiratory syndrome coronavirus 2
GTHWFVTQRN

SEQ ID NO: 10707 - protein, 10 aa, Severe acute respiratory syndrome coronavirus 2
THWFVTQRNF

SEQ ID NO: 10708 - protein, 10 aa, Severe acute respiratory syndrome coronavirus 2
HWFVTQRNFY

SEQ ID NO: 10709 - protein, 10 aa, Severe acute respiratory syndrome coronavirus 2
QRNFYEPQII

SEQ ID NO: 10710 - protein, 10 aa, Severe acute respiratory syndrome coronavirus 2
QIITTDNTFV

SEQ ID NO: 10711 - protein, 10 aa, Severe acute respiratory syndrome coronavirus 2
NTFVSGNCDV

SEQ ID NO: 10712 - protein, 10 aa, Severe acute respiratory syndrome coronavirus 2
FVSGNCDVVI

SEQ ID NO: 10713 - protein, 10 aa, Severe acute respiratory syndrome coronavirus 2
VVIGIVNNTV

SEQ ID NO: 10714 - protein, 10 aa, Severe acute respiratory syndrome coronavirus 2
VIGIVNNTVY

SEQ ID NO: 10715 - protein, 10 aa, Severe acute respiratory syndrome coronavirus 2
IVNNTVYDPL

SEQ ID NO: 10716 - protein, 10 aa, Severe acute respiratory syndrome coronavirus 2
TVYDPLQPEL

SEQ ID NO: 10717 - protein, 10 aa, Severe acute respiratory syndrome coronavirus 2
SFKEELDKYF

SEQ ID NO: 10718 - protein, 10 aa, Severe acute respiratory syndrome coronavirus 2
YFKNHTSPDV

SEQ ID NO: 10719 - protein, 10 aa, Severe acute respiratory syndrome coronavirus 2
GDISGINASV

SEQ ID NO: 10720 - protein, 10 aa, Severe acute respiratory syndrome coronavirus 2
DISGINASVV

SEQ ID NO: 10721 - protein, 10 aa, Severe acute respiratory syndrome coronavirus 2
SGINASVVNI

SEQ ID NO: 10722 - protein, 10 aa, Severe acute respiratory syndrome coronavirus 2
INASVVNIQK

SEQ ID NO: 10723 - protein, 10 aa, Severe acute respiratory syndrome coronavirus 2
KEIDRLNEVA

SEQ ID NO: 10724 - protein, 10 aa, Severe acute respiratory syndrome coronavirus 2
EVAKNLNESL

SEQ ID NO: 10725 - protein, 10 aa, Severe acute respiratory syndrome coronavirus 2
KNLNESLIDL

SEQ ID NO: 10726 - protein, 10 aa, Severe acute respiratory syndrome coronavirus 2
NESLIDLQEL

SEQ ID NO: 10727 - protein, 10 aa, Severe acute respiratory syndrome coronavirus 2
SLIDLQELGK

SEQ ID NO: 10728 - protein, 10 aa, Severe acute respiratory syndrome coronavirus 2
LIDLQELGKY

SEQ ID NO: 10729 - protein, 10 aa, Severe acute respiratory syndrome coronavirus 2
LQELGKYEQY

SEQ ID NO: 10730 - protein, 10 aa, Severe acute respiratory syndrome coronavirus 2
QELGKYEQYI

SEQ ID NO: 10731 - protein, 10 aa, Severe acute respiratory syndrome coronavirus 2
LGKYEQYIKW

SEQ ID NO: 10732 - protein, 10 aa, Severe acute respiratory syndrome coronavirus 2
KYEQYIKWPW

SEQ ID NO: 10733 - protein, 10 aa, Severe acute respiratory syndrome coronavirus 2
YEQYIKWPWY

SEQ ID NO: 10734 - protein, 10 aa, Severe acute respiratory syndrome coronavirus 2
EQYIKWPWYI

SEQ ID NO: 10735 - protein, 10 aa, Severe acute respiratory syndrome coronavirus 2
QYIKWPWYIW

SEQ ID NO: 10736 - protein, 10 aa, Severe acute respiratory syndrome coronavirus 2
YIKWPWYIWL

SEQ ID NO: 10737 - protein, 10 aa, Severe acute respiratory syndrome coronavirus 2
KWPWYIWLGF

SEQ ID NO: 10738 - protein, 10 aa, Severe acute respiratory syndrome coronavirus 2
WPWYIWLGFI

SEQ ID NO: 10739 - protein, 10 aa, Severe acute respiratory syndrome coronavirus 2
YIWLGFIAGL

SEQ ID NO: 10740 - protein, 10 aa, Severe acute respiratory syndrome coronavirus 2
IWLGFIAGLI

SEQ ID NO: 10741 - protein, 10 aa, Severe acute respiratory syndrome coronavirus 2
GFIAGLIAIV

SEQ ID NO: 10742 - protein, 10 aa, Severe acute respiratory syndrome coronavirus 2
FIAGLIAIVM

SEQ ID NO: 10743 - protein, 10 aa, Severe acute respiratory syndrome coronavirus 2
AGLIAIVMVT

SEQ ID NO: 10744 - protein, 10 aa, Severe acute respiratory syndrome coronavirus 2
GLIAIVMVTI

SEQ ID NO: 10745 - protein, 10 aa, Severe acute respiratory syndrome coronavirus 2
VMVTIMLCCM

SEQ ID NO: 10746 - protein, 10 aa, Severe acute respiratory syndrome coronavirus 2
CMTSCCSCLK

SEQ ID NO: 10747 - protein, 10 aa, Severe acute respiratory syndrome coronavirus 2
FDEDDSEPVL

SEQ ID NO: 10748 - protein, 10 aa, Severe acute respiratory syndrome coronavirus 2
SEPVLKGVKL

SEQ ID NO: 10749 - protein, 10 aa, Severe acute respiratory syndrome coronavirus 2
VLKGVKLHYT

SEQ ID NO: 10750 - protein, 11 aa, Severe acute respiratory syndrome coronavirus 2
VLLPLVSSQCV

SEQ ID NO: 10751 - protein, 11 aa, Severe acute respiratory syndrome coronavirus 2
LPLVSSQCVNL

SEQ ID NO: 10752 - protein, 11 aa, Severe acute respiratory syndrome coronavirus 2
VSSQCVNLTTR

SEQ ID NO: 10753 - protein, 11 aa, Severe acute respiratory syndrome coronavirus 2
LTTRTQLPPAY

SEQ ID NO: 10754 - protein, 11 aa, Severe acute respiratory syndrome coronavirus 2
TQLPPAYTNSF

SEQ ID NO: 10755 - protein, 11 aa, Severe acute respiratory syndrome coronavirus 2
LPPAYTNSFTR

SEQ ID NO: 10756 - protein, 11 aa, Severe acute respiratory syndrome coronavirus 2
AYTNSFTRGVY

SEQ ID NO: 10757 - protein, 11 aa, Severe acute respiratory syndrome coronavirus 2
YTNSFTRGVYY

SEQ ID NO: 10758 - protein, 11 aa, Severe acute respiratory syndrome coronavirus 2
SFTRGVYYPDK

SEQ ID NO: 10759 - protein, 11 aa, Severe acute respiratory syndrome coronavirus 2
FTRGVYYPDKV

SEQ ID NO: 10760 - protein, 11 aa, Severe acute respiratory syndrome coronavirus 2
RGVYYPDKVFR

SEQ ID NO: 10761 - protein, 11 aa, Severe acute respiratory syndrome coronavirus 2
YYPDKVFRSSV

SEQ ID NO: 10762 - protein, 11 aa, Severe acute respiratory syndrome coronavirus 2
YPDKVFRSSVL

SEQ ID NO: 10763 - protein, 11 aa, Severe acute respiratory syndrome coronavirus 2
RSSVLHSTQDL

SEQ ID NO: 10764 - protein, 11 aa, Severe acute respiratory syndrome coronavirus 2
SSVLHSTQDLF

SEQ ID NO: 10765 - protein, 11 aa, Severe acute respiratory syndrome coronavirus 2
LHSTQDLFLPF

SEQ ID NO: 10766 - protein, 11 aa, Severe acute respiratory syndrome coronavirus 2
HSTQDLFLPFF

SEQ ID NO: 10767 - protein, 11 aa, Severe acute respiratory syndrome coronavirus 2
LFLPFFSNVTW

SEQ ID NO: 10768 - protein, 11 aa, Severe acute respiratory syndrome coronavirus 2
FLPFFSNVTWF

SEQ ID NO: 10769 - protein, 11 aa, Severe acute respiratory syndrome coronavirus 2
SNVTWFHAIHV

SEQ ID NO: 10770 - protein, 11 aa, Severe acute respiratory syndrome coronavirus 2
TKRFDNPVLPF

SEQ ID NO: 10771 - protein, 11 aa, Severe acute respiratory syndrome coronavirus 2
KRFDNPVLPFN

SEQ ID NO: 10772 - protein, 11 aa, Severe acute respiratory syndrome coronavirus 2
NPVLPFNDGVY

SEQ ID NO: 10773 - protein, 11 aa, Severe acute respiratory syndrome coronavirus 2
VLPFNDGVYFA

SEQ ID NO: 10774 - protein, 11 aa, Severe acute respiratory syndrome coronavirus 2
LPFNDGVYFAS

SEQ ID NO: 10775 - protein, 11 aa, Severe acute respiratory syndrome coronavirus 2
NDGVYFASTEK

SEQ ID NO: 10776 - protein, 11 aa, Severe acute respiratory syndrome coronavirus 2
VYFASTEKSNI

SEQ ID NO: 10777 - protein, 11 aa, Severe acute respiratory syndrome coronavirus 2
FASTEKSNIIR

SEQ ID NO: 10778 - protein, 11 aa, Severe acute respiratory syndrome coronavirus 2
STEKSNIIRGW

SEQ ID NO: 10779 - protein, 11 aa, Severe acute respiratory syndrome coronavirus 2
SLLIVNNATNV

SEQ ID NO: 10780 - protein, 11 aa, Severe acute respiratory syndrome coronavirus 2
LLIVNNATNVV

SEQ ID NO: 10781 - protein, 11 aa, Severe acute respiratory syndrome coronavirus 2
IVNNATNVVIK

SEQ ID NO: 10782 - protein, 11 aa, Severe acute respiratory syndrome coronavirus 2
FQFCNDPFLGV

SEQ ID NO: 10783 - protein, 11 aa, Severe acute respiratory syndrome coronavirus 2
QFCNDPFLGVY

SEQ ID NO: 10784 - protein, 11 aa, Severe acute respiratory syndrome coronavirus 2
NDPFLGVYYHK

SEQ ID NO: 10785 - protein, 11 aa, Severe acute respiratory syndrome coronavirus 2
FLGVYYHKNNK

SEQ ID NO: 10786 - protein, 11 aa, Severe acute respiratory syndrome coronavirus 2
VYYHKNNKSWM

SEQ ID NO: 10787 - protein, 11 aa, Severe acute respiratory syndrome coronavirus 2
NNKSWMESEFR

SEQ ID NO: 10788 - protein, 11 aa, Severe acute respiratory syndrome coronavirus 2
KSWMESEFRVY

SEQ ID NO: 10789 - protein, 11 aa, Severe acute respiratory syndrome coronavirus 2
MESEFRVYSSA

SEQ ID NO: 10790 - protein, 11 aa, Severe acute respiratory syndrome coronavirus 2
RVYSSANNCTF

SEQ ID NO: 10791 - protein, 11 aa, Severe acute respiratory syndrome coronavirus 2
VYSSANNCTFE

SEQ ID NO: 10792 - protein, 11 aa, Severe acute respiratory syndrome coronavirus 2
YSSANNCTFEY

SEQ ID NO: 10793 - protein, 11 aa, Severe acute respiratory syndrome coronavirus 2
SSANNCTFEYV

SEQ ID NO: 10794 - protein, 11 aa, Severe acute respiratory syndrome coronavirus 2
CTFEYVSQPFL

SEQ ID NO: 10795 - protein, 11 aa, Severe acute respiratory syndrome coronavirus 2
TFEYVSQPFLM

SEQ ID NO: 10796 - protein, 11 aa, Severe acute respiratory syndrome coronavirus 2
KQGNFKNLREF

SEQ ID NO: 10797 - protein, 11 aa, Severe acute respiratory syndrome coronavirus 2
NFKNLREFVFK

SEQ ID NO: 10798 - protein, 11 aa, Severe acute respiratory syndrome coronavirus 2
REFVFKNIDGY

SEQ ID NO: 10799 - protein, 11 aa, Severe acute respiratory syndrome coronavirus 2
FVFKNIDGYFK

SEQ ID NO: 10800 - protein, 11 aa, Severe acute respiratory syndrome coronavirus 2
VFKNIDGYFKI

SEQ ID NO: 10801 - protein, 11 aa, Severe acute respiratory syndrome coronavirus 2
FKNIDGYFKIY

SEQ ID NO: 10802 - protein, 11 aa, Severe acute respiratory syndrome coronavirus 2
NIDGYFKIYSK

SEQ ID NO: 10803 - protein, 11 aa, Severe acute respiratory syndrome coronavirus 2
YFKIYSKHTPI

SEQ ID NO: 10804 - protein, 11 aa, Severe acute respiratory syndrome coronavirus 2
IYSKHTPINLV

SEQ ID NO: 10805 - protein, 11 aa, Severe acute respiratory syndrome coronavirus 2
YSKHTPINLVR

SEQ ID NO: 10806 - protein, 11 aa, Severe acute respiratory syndrome coronavirus 2
VRDLPQGFSAL

SEQ ID NO: 10807 - protein, 11 aa, Severe acute respiratory syndrome coronavirus 2
LPQGFSALEPL

SEQ ID NO: 10808 - protein, 11 aa, Severe acute respiratory syndrome coronavirus 2
LEPLVDLPIGI

SEQ ID NO: 10809 - protein, 11 aa, Severe acute respiratory syndrome coronavirus 2
INITRFQTLLA

SEQ ID NO: 10810 - protein, 11 aa, Severe acute respiratory syndrome coronavirus 2
NITRFQTLLAL

SEQ ID NO: 10811 - protein, 11 aa, Severe acute respiratory syndrome coronavirus 2
TRFQTLLALHR

SEQ ID NO: 10812 - protein, 11 aa, Severe acute respiratory syndrome coronavirus 2
RFQTLLALHRS

SEQ ID NO: 10813 - protein, 11 aa, Severe acute respiratory syndrome coronavirus 2
FQTLLALHRSY

SEQ ID NO: 10814 - protein, 11 aa, Severe acute respiratory syndrome coronavirus 2
YLTPGDSSSGW

SEQ ID NO: 10815 - protein, 11 aa, Severe acute respiratory syndrome coronavirus 2
SSGWTAGAAAY

SEQ ID NO: 10816 - protein, 11 aa, Severe acute respiratory syndrome coronavirus 2
SGWTAGAAAYY

SEQ ID NO: 10817 - protein, 11 aa, Severe acute respiratory syndrome coronavirus 2
GWTAGAAAYYV

SEQ ID NO: 10818 - protein, 11 aa, Severe acute respiratory syndrome coronavirus 2
AAYYVGYLQPR

SEQ ID NO: 10819 - protein, 11 aa, Severe acute respiratory syndrome coronavirus 2
YYVGYLQPRTF

SEQ ID NO: 10820 - protein, 11 aa, Severe acute respiratory syndrome coronavirus 2
YVGYLQPRTFL

SEQ ID NO: 10821 - protein, 11 aa, Severe acute respiratory syndrome coronavirus 2
VGYLQPRTFLL

SEQ ID NO: 10822 - protein, 11 aa, Severe acute respiratory syndrome coronavirus 2
GYLQPRTFLLK

SEQ ID NO: 10823 - protein, 11 aa, Severe acute respiratory syndrome coronavirus 2
YLQPRTFLLKY

SEQ ID NO: 10824 - protein, 11 aa, Severe acute respiratory syndrome coronavirus 2
FLLKYNENGTI

SEQ ID NO: 10825 - protein, 11 aa, Severe acute respiratory syndrome coronavirus 2
ETKCTLKSFTV

SEQ ID NO: 10826 - protein, 11 aa, Severe acute respiratory syndrome coronavirus 2
KCTLKSFTVEK

SEQ ID NO: 10827 - protein, 11 aa, Severe acute respiratory syndrome coronavirus 2
TLKSFTVEKGI

SEQ ID NO: 10828 - protein, 11 aa, Severe acute respiratory syndrome coronavirus 2
LKSFTVEKGIY

SEQ ID NO: 10829 - protein, 11 aa, Severe acute respiratory syndrome coronavirus 2
EKGIYQTSNFR

SEQ ID NO: 10830 - protein, 11 aa, Severe acute respiratory syndrome coronavirus 2
KGIYQTSNFRV

SEQ ID NO: 10831 - protein, 11 aa, Severe acute respiratory syndrome coronavirus 2
FRVQPTESIVR

SEQ ID NO: 10832 - protein, 11 aa, Severe acute respiratory syndrome coronavirus 2
RVQPTESIVRF

SEQ ID NO: 10833 - protein, 11 aa, Severe acute respiratory syndrome coronavirus 2
SIVRFPNITNL

SEQ ID NO: 10834 - protein, 11 aa, Severe acute respiratory syndrome coronavirus 2
RFPNITNLCPF

SEQ ID NO: 10835 - protein, 11 aa, Severe acute respiratory syndrome coronavirus 2
FPNITNLCPFG

SEQ ID NO: 10836 - protein, 11 aa, Severe acute respiratory syndrome coronavirus 2
ITNLCPFGEVF

SEQ ID NO: 10837 - protein, 11 aa, Severe acute respiratory syndrome coronavirus 2
NLCPFGEVFNA

SEQ ID NO: 10838 - protein, 11 aa, Severe acute respiratory syndrome coronavirus 2
CPFGEVFNATR

SEQ ID NO: 10839 - protein, 11 aa, Severe acute respiratory syndrome coronavirus 2
EVFNATRFASV

SEQ ID NO: 10840 - protein, 11 aa, Severe acute respiratory syndrome coronavirus 2
VFNATRFASVY

SEQ ID NO: 10841 - protein, 11 aa, Severe acute respiratory syndrome coronavirus 2
FNATRFASVYA

SEQ ID NO: 10842 - protein, 11 aa, Severe acute respiratory syndrome coronavirus 2
NATRFASVYAW

SEQ ID NO: 10843 - protein, 11 aa, Severe acute respiratory syndrome coronavirus 2
TRFASVYAWNR

SEQ ID NO: 10844 - protein, 11 aa, Severe acute respiratory syndrome coronavirus 2
RFASVYAWNRK

SEQ ID NO: 10845 - protein, 11 aa, Severe acute respiratory syndrome coronavirus 2
FASVYAWNRKR

SEQ ID NO: 10846 - protein, 11 aa, Severe acute respiratory syndrome coronavirus 2
RKRISNCVADY

SEQ ID NO: 10847 - protein, 11 aa, Severe acute respiratory syndrome coronavirus 2
RISNCVADYSV

SEQ ID NO: 10848 - protein, 11 aa, Severe acute respiratory syndrome coronavirus 2
ISNCVADYSVL

SEQ ID NO: 10849 - protein, 11 aa, Severe acute respiratory syndrome coronavirus 2
SNCVADYSVLY

SEQ ID NO: 10850 - protein, 11 aa, Severe acute respiratory syndrome coronavirus 2
VLYNSASFSTF

SEQ ID NO: 10851 - protein, 11 aa, Severe acute respiratory syndrome coronavirus 2
LYNSASFSTFK

SEQ ID NO: 10852 - protein, 11 aa, Severe acute respiratory syndrome coronavirus 2
NSASFSTFKCY

SEQ ID NO: 10853 - protein, 11 aa, Severe acute respiratory syndrome coronavirus 2
ASFSTFKCYGV

SEQ ID NO: 10854 - protein, 11 aa, Severe acute respiratory syndrome coronavirus 2
TFKCYGVSPTK

SEQ ID NO: 10855 - protein, 11 aa, Severe acute respiratory syndrome coronavirus 2
TKLNDLCFTNV

SEQ ID NO: 10856 - protein, 11 aa, Severe acute respiratory syndrome coronavirus 2
KLNDLCFTNVY

SEQ ID NO: 10857 - protein, 11 aa, Severe acute respiratory syndrome coronavirus 2
FTNVYADSFVI

SEQ ID NO: 10858 - protein, 11 aa, Severe acute respiratory syndrome coronavirus 2
TNVYADSFVIR

SEQ ID NO: 10859 - protein, 11 aa, Severe acute respiratory syndrome coronavirus 2
DSFVIRGDEVR

SEQ ID NO: 10860 - protein, 11 aa, Severe acute respiratory syndrome coronavirus 2
RQIAPGQTGKI

SEQ ID NO: 10861 - protein, 11 aa, Severe acute respiratory syndrome coronavirus 2
QTGKIADYNYK

SEQ ID NO: 10862 - protein, 11 aa, Severe acute respiratory syndrome coronavirus 2
KLPDDFTGCVI

SEQ ID NO: 10863 - protein, 11 aa, Severe acute respiratory syndrome coronavirus 2
LPDDFTGCVIA

SEQ ID NO: 10864 - protein, 11 aa, Severe acute respiratory syndrome coronavirus 2
SKVGGNYNYLY

SEQ ID NO: 10865 - protein, 11 aa, Severe acute respiratory syndrome coronavirus 2
KVGGNYNYLYR

SEQ ID NO: 10866 - protein, 11 aa, Severe acute respiratory syndrome coronavirus 2
GGNYNYLYRLF

SEQ ID NO: 10867 - protein, 11 aa, Severe acute respiratory syndrome coronavirus 2
GNYNYLYRLFR

SEQ ID NO: 10868 - protein, 11 aa, Severe acute respiratory syndrome coronavirus 2
NYNYLYRLFRK

SEQ ID NO: 10869 - protein, 11 aa, Severe acute respiratory syndrome coronavirus 2
YLYRLFRKSNL

SEQ ID NO: 10870 - protein, 11 aa, Severe acute respiratory syndrome coronavirus 2
LYRLFRKSNLK

SEQ ID NO: 10871 - protein, 11 aa, Severe acute respiratory syndrome coronavirus 2
RLFRKSNLKPF

SEQ ID NO: 10872 - protein, 11 aa, Severe acute respiratory syndrome coronavirus 2
FRKSNLKPFER

SEQ ID NO: 10873 - protein, 11 aa, Severe acute respiratory syndrome coronavirus 2
KPFERDISTEI

SEQ ID NO: 10874 - protein, 11 aa, Severe acute respiratory syndrome coronavirus 2
YQAGSTPCNGV

SEQ ID NO: 10875 - protein, 11 aa, Severe acute respiratory syndrome coronavirus 2
GVEGFNCYFPL

SEQ ID NO: 10876 - protein, 11 aa, Severe acute respiratory syndrome coronavirus 2
GFNCYFPLQSY

SEQ ID NO: 10877 - protein, 11 aa, Severe acute respiratory syndrome coronavirus 2
NCYFPLQSYGF

SEQ ID NO: 10878 - protein, 11 aa, Severe acute respiratory syndrome coronavirus 2
CYFPLQSYGFQ

SEQ ID NO: 10879 - protein, 11 aa, Severe acute respiratory syndrome coronavirus 2
FPLQSYGFQPT

SEQ ID NO: 10880 - protein, 11 aa, Severe acute respiratory syndrome coronavirus 2
QSYGFQPTNGV

SEQ ID NO: 10881 - protein, 11 aa, Severe acute respiratory syndrome coronavirus 2
YGFQPTNGVGY

SEQ ID NO: 10882 - protein, 11 aa, Severe acute respiratory syndrome coronavirus 2
YQPYRVVVLSF

SEQ ID NO: 10883 - protein, 11 aa, Severe acute respiratory syndrome coronavirus 2
YRVVVLSFELL

SEQ ID NO: 10884 - protein, 11 aa, Severe acute respiratory syndrome coronavirus 2
VLSFELLHAPA

SEQ ID NO: 10885 - protein, 11 aa, Severe acute respiratory syndrome coronavirus 2
SFELLHAPATV

SEQ ID NO: 10886 - protein, 11 aa, Severe acute respiratory syndrome coronavirus 2
FELLHAPATVC

SEQ ID NO: 10887 - protein, 11 aa, Severe acute respiratory syndrome coronavirus 2
GTGVLTESNKK

SEQ ID NO: 10888 - protein, 11 aa, Severe acute respiratory syndrome coronavirus 2
LTESNKKFLPF

SEQ ID NO: 10889 - protein, 11 aa, Severe acute respiratory syndrome coronavirus 2
SNKKFLPFQQF

SEQ ID NO: 10890 - protein, 11 aa, Severe acute respiratory syndrome coronavirus 2
KKFLPFQQFGR

SEQ ID NO: 10891 - protein, 11 aa, Severe acute respiratory syndrome coronavirus 2
KFLPFQQFGRD

SEQ ID NO: 10892 - protein, 11 aa, Severe acute respiratory syndrome coronavirus 2
FLPFQQFGRDI

SEQ ID NO: 10893 - protein, 11 aa, Severe acute respiratory syndrome coronavirus 2
LPFQQFGRDIA

SEQ ID NO: 10894 - protein, 11 aa, Severe acute respiratory syndrome coronavirus 2
LEILDITPCSF

SEQ ID NO: 10895 - protein, 11 aa, Severe acute respiratory syndrome coronavirus 2
TPCSFGGVSVI

SEQ ID NO: 10896 - protein, 11 aa, Severe acute respiratory syndrome coronavirus 2
VLYQDVNCTEV

SEQ ID NO: 10897 - protein, 11 aa, Severe acute respiratory syndrome coronavirus 2
YQDVNCTEVPV

SEQ ID NO: 10898 - protein, 11 aa, Severe acute respiratory syndrome coronavirus 2
AIHADQLTPTW

SEQ ID NO: 10899 - protein, 11 aa, Severe acute respiratory syndrome coronavirus 2
HADQLTPTWRV

SEQ ID NO: 10900 - protein, 11 aa, Severe acute respiratory syndrome coronavirus 2
WRVYSTGSNVF

SEQ ID NO: 10901 - protein, 11 aa, Severe acute respiratory syndrome coronavirus 2
RVYSTGSNVFQ

SEQ ID NO: 10902 - protein, 11 aa, Severe acute respiratory syndrome coronavirus 2
YSTGSNVFQTR

SEQ ID NO: 10903 - protein, 11 aa, Severe acute respiratory syndrome coronavirus 2
FQTRAGCLIGA

SEQ ID NO: 10904 - protein, 11 aa, Severe acute respiratory syndrome coronavirus 2
YECDIPIGAGI

SEQ ID NO: 10905 - protein, 11 aa, Severe acute respiratory syndrome coronavirus 2
IPIGAGICASY

SEQ ID NO: 10906 - protein, 11 aa, Severe acute respiratory syndrome coronavirus 2
ASYQTQTNSPR

SEQ ID NO: 10907 - protein, 11 aa, Severe acute respiratory syndrome coronavirus 2
SYQTQTNSPRR

SEQ ID NO: 10908 - protein, 11 aa, Severe acute respiratory syndrome coronavirus 2
QTQTNSPRRAR

SEQ ID NO: 10909 - protein, 11 aa, Severe acute respiratory syndrome coronavirus 2
TNSPRRARSVA

SEQ ID NO: 10910 - protein, 11 aa, Severe acute respiratory syndrome coronavirus 2
RRARSVASQSI

SEQ ID NO: 10911 - protein, 11 aa, Severe acute respiratory syndrome coronavirus 2
RARSVASQSII

SEQ ID NO: 10912 - protein, 11 aa, Severe acute respiratory syndrome coronavirus 2
RSVASQSIIAY

SEQ ID NO: 10913 - protein, 11 aa, Severe acute respiratory syndrome coronavirus 2
SQSIIAYTMSL

SEQ ID NO: 10914 - protein, 11 aa, Severe acute respiratory syndrome coronavirus 2
SIIAYTMSLGA

SEQ ID NO: 10915 - protein, 11 aa, Severe acute respiratory syndrome coronavirus 2
YTMSLGAENSV

SEQ ID NO: 10916 - protein, 11 aa, Severe acute respiratory syndrome coronavirus 2
MSLGAENSVAY

SEQ ID NO: 10917 - protein, 11 aa, Severe acute respiratory syndrome coronavirus 2
ENSVAYSNNSI

SEQ ID NO: 10918 - protein, 11 aa, Severe acute respiratory syndrome coronavirus 2
SVAYSNNSIAI

SEQ ID NO: 10919 - protein, 11 aa, Severe acute respiratory syndrome coronavirus 2
SNNSIAIPTNF

SEQ ID NO: 10920 - protein, 11 aa, Severe acute respiratory syndrome coronavirus 2
IAIPTNFTISV

SEQ ID NO: 10921 - protein, 11 aa, Severe acute respiratory syndrome coronavirus 2
TNFTISVTTEI

SEQ ID NO: 10922 - protein, 11 aa, Severe acute respiratory syndrome coronavirus 2
TTEILPVSMTK

SEQ ID NO: 10923 - protein, 11 aa, Severe acute respiratory syndrome coronavirus 2
ILPVSMTKTSV

SEQ ID NO: 10924 - protein, 11 aa, Severe acute respiratory syndrome coronavirus 2
SMTKTSVDCTM

SEQ ID NO: 10925 - protein, 11 aa, Severe acute respiratory syndrome coronavirus 2
MTKTSVDCTMY

SEQ ID NO: 10926 - protein, 11 aa, Severe acute respiratory syndrome coronavirus 2
STECSNLLLQY

SEQ ID NO: 10927 - protein, 11 aa, Severe acute respiratory syndrome coronavirus 2
LLQYGSFCTQL

SEQ ID NO: 10928 - protein, 11 aa, Severe acute respiratory syndrome coronavirus 2
QYGSFCTQLNR

SEQ ID NO: 10929 - protein, 11 aa, Severe acute respiratory syndrome coronavirus 2
QLNRALTGIAV

SEQ ID NO: 10930 - protein, 11 aa, Severe acute respiratory syndrome coronavirus 2
ALTGIAVEQDK

SEQ ID NO: 10931 - protein, 11 aa, Severe acute respiratory syndrome coronavirus 2
DKNTQEVFAQV

SEQ ID NO: 10932 - protein, 11 aa, Severe acute respiratory syndrome coronavirus 2
QEVFAQVKQIY

SEQ ID NO: 10933 - protein, 11 aa, Severe acute respiratory syndrome coronavirus 2
EVFAQVKQIYK

SEQ ID NO: 10934 - protein, 11 aa, Severe acute respiratory syndrome coronavirus 2
VKQIYKTPPIK

SEQ ID NO: 10935 - protein, 11 aa, Severe acute respiratory syndrome coronavirus 2
KTPPIKDFGGF

SEQ ID NO: 10936 - protein, 11 aa, Severe acute respiratory syndrome coronavirus 2
KPSKRSFIEDL

SEQ ID NO: 10937 - protein, 11 aa, Severe acute respiratory syndrome coronavirus 2
SKRSFIEDLLF

SEQ ID NO: 10938 - protein, 11 aa, Severe acute respiratory syndrome coronavirus 2
RSFIEDLLFNK

SEQ ID NO: 10939 - protein, 11 aa, Severe acute respiratory syndrome coronavirus 2
IEDLLFNKVTL

SEQ ID NO: 10940 - protein, 11 aa, Severe acute respiratory syndrome coronavirus 2
EDLLFNKVTLA

SEQ ID NO: 10941 - protein, 11 aa, Severe acute respiratory syndrome coronavirus 2
LLFNKVTLADA

SEQ ID NO: 10942 - protein, 11 aa, Severe acute respiratory syndrome coronavirus 2
KVTLADAGFIK

SEQ ID NO: 10943 - protein, 11 aa, Severe acute respiratory syndrome coronavirus 2
TLADAGFIKQY

SEQ ID NO: 10944 - protein, 11 aa, Severe acute respiratory syndrome coronavirus 2
CAQKFNGLTVL

SEQ ID NO: 10945 - protein, 11 aa, Severe acute respiratory syndrome coronavirus 2
KFNGLTVLPPL

SEQ ID NO: 10946 - protein, 11 aa, Severe acute respiratory syndrome coronavirus 2
FNGLTVLPPLL

SEQ ID NO: 10947 - protein, 11 aa, Severe acute respiratory syndrome coronavirus 2
PLLTDEMIAQY

SEQ ID NO: 10948 - protein, 11 aa, Severe acute respiratory syndrome coronavirus 2
DEMIAQYTSAL

SEQ ID NO: 10949 - protein, 11 aa, Severe acute respiratory syndrome coronavirus 2
MIAQYTSALLA

SEQ ID NO: 10950 - protein, 11 aa, Severe acute respiratory syndrome coronavirus 2
QYTSALLAGTI

SEQ ID NO: 10951 - protein, 11 aa, Severe acute respiratory syndrome coronavirus 2
LLAGTITSGWT

SEQ ID NO: 10952 - protein, 11 aa, Severe acute respiratory syndrome coronavirus 2
LAGTITSGWTF

SEQ ID NO: 10953 - protein, 11 aa, Severe acute respiratory syndrome coronavirus 2
SGWTFGAGAAL

SEQ ID NO: 10954 - protein, 11 aa, Severe acute respiratory syndrome coronavirus 2
WTFGAGAALQI

SEQ ID NO: 10955 - protein, 11 aa, Severe acute respiratory syndrome coronavirus 2
AALQIPFAMQM

SEQ ID NO: 10956 - protein, 11 aa, Severe acute respiratory syndrome coronavirus 2
LQIPFAMQMAY

SEQ ID NO: 10957 - protein, 11 aa, Severe acute respiratory syndrome coronavirus 2
QIPFAMQMAYR

SEQ ID NO: 10958 - protein, 11 aa, Severe acute respiratory syndrome coronavirus 2
IPFAMQMAYRF

SEQ ID NO: 10959 - protein, 11 aa, Severe acute respiratory syndrome coronavirus 2
AMQMAYRFNGI

SEQ ID NO: 10960 - protein, 11 aa, Severe acute respiratory syndrome coronavirus 2
QMAYRFNGIGV

SEQ ID NO: 10961 - protein, 11 aa, Severe acute respiratory syndrome coronavirus 2
VTQNVLYENQK

SEQ ID NO: 10962 - protein, 11 aa, Severe acute respiratory syndrome coronavirus 2
YENQKLIANQF

SEQ ID NO: 10963 - protein, 11 aa, Severe acute respiratory syndrome coronavirus 2
KLIANQFNSAI

SEQ ID NO: 10964 - protein, 11 aa, Severe acute respiratory syndrome coronavirus 2
IANQFNSAIGK

SEQ ID NO: 10965 - protein, 11 aa, Severe acute respiratory syndrome coronavirus 2
SLSSTASALGK

SEQ ID NO: 10966 - protein, 11 aa, Severe acute respiratory syndrome coronavirus 2
LSSTASALGKL

SEQ ID NO: 10967 - protein, 11 aa, Severe acute respiratory syndrome coronavirus 2
ISSVLNDILSR

SEQ ID NO: 10968 - protein, 11 aa, Severe acute respiratory syndrome coronavirus 2
SSVLNDILSRL

SEQ ID NO: 10969 - protein, 11 aa, Severe acute respiratory syndrome coronavirus 2
VLNDILSRLDK

SEQ ID NO: 10970 - protein, 11 aa, Severe acute respiratory syndrome coronavirus 2
LSRLDKVEAEV

SEQ ID NO: 10971 - protein, 11 aa, Severe acute respiratory syndrome coronavirus 2
RLDKVEAEVQI

SEQ ID NO: 10972 - protein, 11 aa, Severe acute respiratory syndrome coronavirus 2
EVQIDRLITGR

SEQ ID NO: 10973 - protein, 11 aa, Severe acute respiratory syndrome coronavirus 2
VQIDRLITGRL

SEQ ID NO: 10974 - protein, 11 aa, Severe acute respiratory syndrome coronavirus 2
ITGRLQSLQTY

SEQ ID NO: 10975 - protein, 11 aa, Severe acute respiratory syndrome coronavirus 2
TGRLQSLQTYV

SEQ ID NO: 10976 - protein, 11 aa, Severe acute respiratory syndrome coronavirus 2
SLQTYVTQQLI

SEQ ID NO: 10977 - protein, 11 aa, Severe acute respiratory syndrome coronavirus 2
RAAEIRASANL

SEQ ID NO: 10978 - protein, 11 aa, Severe acute respiratory syndrome coronavirus 2
AAEIRASANLA

SEQ ID NO: 10979 - protein, 11 aa, Severe acute respiratory syndrome coronavirus 2
AEIRASANLAA

SEQ ID NO: 10980 - protein, 11 aa, Severe acute respiratory syndrome coronavirus 2
IRASANLAATK

SEQ ID NO: 10981 - protein, 11 aa, Severe acute respiratory syndrome coronavirus 2
NLAATKMSECV

SEQ ID NO: 10982 - protein, 11 aa, Severe acute respiratory syndrome coronavirus 2
KMSECVLGQSK

SEQ ID NO: 10983 - protein, 11 aa, Severe acute respiratory syndrome coronavirus 2
MSECVLGQSKR

SEQ ID NO: 10984 - protein, 11 aa, Severe acute respiratory syndrome coronavirus 2
FCGKGYHLMSF

SEQ ID NO: 10985 - protein, 11 aa, Severe acute respiratory syndrome coronavirus 2
GYHLMSFPQSA

SEQ ID NO: 10986 - protein, 11 aa, Severe acute respiratory syndrome coronavirus 2
YHLMSFPQSAP

SEQ ID NO: 10987 - protein, 11 aa, Severe acute respiratory syndrome coronavirus 2
MSFPQSAPHGV

SEQ ID NO: 10988 - protein, 11 aa, Severe acute respiratory syndrome coronavirus 2
FPQSAPHGVVF

SEQ ID NO: 10989 - protein, 11 aa, Severe acute respiratory syndrome coronavirus 2
HGVVFLHVTYV

SEQ ID NO: 10990 - protein, 11 aa, Severe acute respiratory syndrome coronavirus 2
LHVTYVPAQEK

SEQ ID NO: 10991 - protein, 11 aa, Severe acute respiratory syndrome coronavirus 2
VTYVPAQEKNF

SEQ ID NO: 10992 - protein, 11 aa, Severe acute respiratory syndrome coronavirus 2
QEKNFTTAPAI

SEQ ID NO: 10993 - protein, 11 aa, Severe acute respiratory syndrome coronavirus 2
TTAPAICHDGK

SEQ ID NO: 10994 - protein, 11 aa, Severe acute respiratory syndrome coronavirus 2
GKAHFPREGVF

SEQ ID NO: 10995 - protein, 11 aa, Severe acute respiratory syndrome coronavirus 2
KAHFPREGVFV

SEQ ID NO: 10996 - protein, 11 aa, Severe acute respiratory syndrome coronavirus 2
VFVSNGTHWFV

SEQ ID NO: 10997 - protein, 11 aa, Severe acute respiratory syndrome coronavirus 2
FVSNGTHWFVT

SEQ ID NO: 10998 - protein, 11 aa, Severe acute respiratory syndrome coronavirus 2
SNGTHWFVTQR

SEQ ID NO: 10999 - protein, 11 aa, Severe acute respiratory syndrome coronavirus 2
GTHWFVTQRNF

SEQ ID NO: 11000 - protein, 11 aa, Severe acute respiratory syndrome coronavirus 2
THWFVTQRNFY

SEQ ID NO: 11001 - protein, 11 aa, Severe acute respiratory syndrome coronavirus 2
NTFVSGNCDVV

SEQ ID NO: 11002 - protein, 11 aa, Severe acute respiratory syndrome coronavirus 2
VVIGIVNNTVY

SEQ ID NO: 11003 - protein, 11 aa, Severe acute respiratory syndrome coronavirus 2
SFKEELDKYFK

SEQ ID NO: 11004 - protein, 11 aa, Severe acute respiratory syndrome coronavirus 2
KYFKNHTSPDV

SEQ ID NO: 11005 - protein, 11 aa, Severe acute respiratory syndrome coronavirus 2
LGDISGINASV

SEQ ID NO: 11006 - protein, 11 aa, Severe acute respiratory syndrome coronavirus 2
GINASVVNIQK

SEQ ID NO: 11007 - protein, 11 aa, Severe acute respiratory syndrome coronavirus 2
SVVNIQKEIDR

SEQ ID NO: 11008 - protein, 11 aa, Severe acute respiratory syndrome coronavirus 2
IQKEIDRLNEV

SEQ ID NO: 11009 - protein, 11 aa, Severe acute respiratory syndrome coronavirus 2
AKNLNESLIDL

SEQ ID NO: 11010 - protein, 11 aa, Severe acute respiratory syndrome coronavirus 2
SLIDLQELGKY

SEQ ID NO: 11011 - protein, 11 aa, Severe acute respiratory syndrome coronavirus 2
GKYEQYIKWPW

SEQ ID NO: 11012 - protein, 11 aa, Severe acute respiratory syndrome coronavirus 2
KYEQYIKWPWY

SEQ ID NO: 11013 - protein, 11 aa, Severe acute respiratory syndrome coronavirus 2
YEQYIKWPWYI

SEQ ID NO: 11014 - protein, 11 aa, Severe acute respiratory syndrome coronavirus 2
EQYIKWPWYIW

SEQ ID NO: 11015 - protein, 11 aa, Severe acute respiratory syndrome coronavirus 2
QYIKWPWYIWL

SEQ ID NO: 11016 - protein, 11 aa, Severe acute respiratory syndrome coronavirus 2
IKWPWYIWLGF

SEQ ID NO: 11017 - protein, 11 aa, Severe acute respiratory syndrome coronavirus 2
KWPWYIWLGFI

SEQ ID NO: 11018 - protein, 11 aa, Severe acute respiratory syndrome coronavirus 2
WPWYIWLGFIA

SEQ ID NO: 11019 - protein, 11 aa, Severe acute respiratory syndrome coronavirus 2
WYIWLGFIAGL

SEQ ID NO: 11020 - protein, 11 aa, Severe acute respiratory syndrome coronavirus 2
YIWLGFIAGLI

SEQ ID NO: 11021 - protein, 11 aa, Severe acute respiratory syndrome coronavirus 2
WLGFIAGLIAI

SEQ ID NO: 11022 - protein, 11 aa, Severe acute respiratory syndrome coronavirus 2
LGFIAGLIAIV

SEQ ID NO: 11023 - protein, 11 aa, Severe acute respiratory syndrome coronavirus 2
FIAGLIAIVMV

SEQ ID NO: 11024 - protein, 9 aa, synthetic construct
  source 1..9: note = Seed: AGAALQIPF
AAAALQIPF

SEQ ID NO: 11025 - protein, 9 aa, synthetic construct
  source 1..9: note = Seed: AGAALQIPF
AAAALQIPY

SEQ ID NO: 11026 - protein, 10 aa, synthetic construct
  source 1..10: note = Seed: AMACLVGLMW
AAACLVGLMW

SEQ ID NO: 11027 - protein, 10 aa, synthetic construct
  source 1..10: note = Seed: AFAMMFVKHK
AAAMMFVKHK

SEQ ID NO: 11028 - protein, 9 aa, synthetic construct
  source 1..9: note = Seed: AIASEFSSL
AAASEFSSF

SEQ ID NO: 11029 - protein, 9 aa, synthetic construct
  source 1..9: note = Seed: AIASEFSSL
AAASEFSSL

SEQ ID NO: 11030 - protein, 9 aa, synthetic construct
  source 1..9: note = Seed: AIASEFSSL
AAASEFSSM

SEQ ID NO: 11031 - protein, 9 aa, synthetic construct
  source 1..9: note = Seed: AIASEFSSL
AAASEFSSV

SEQ ID NO: 11032 - protein, 9 aa, synthetic construct
  source 1..9: note = Seed: AIASEFSSL
AAASEFSSY

SEQ ID NO: 11033 - protein, 10 aa, synthetic construct
  source 1..10: note = Seed: ASAVVLLILM
AAAVVLLILW

SEQ ID NO: 11034 - protein, 9 aa, synthetic construct
  source 1..9: note = Seed: ASAVVLLIL
AAAVVLLIW

SEQ ID NO: 11035 - protein, 9 aa, synthetic construct
  source 1..9: note = Seed: ALCTFLLNK
AACTFLLNK

SEQ ID NO: 11036 - protein, 9 aa, synthetic construct
  source 1..9: note = Seed: ALCTFLLNK
AACTFLLNR

SEQ ID NO: 11037 - protein, 9 aa, synthetic construct
  source 1..9: note = Seed: ALDISASIV
AADISASIF

SEQ ID NO: 11038 - protein, 9 aa, synthetic construct
  source 1..9: note = Seed: ALDISASIV
AADISASIL

SEQ ID NO: 11039 - protein, 9 aa, synthetic construct
  source 1..9: note = Seed: ALDISASIV
AADISASIM

SEQ ID NO: 11040 - protein, 9 aa, synthetic construct
  source 1..9: note = Seed: AGDSGFAAY
AADSGFAAF

SEQ ID NO: 11041 - protein, 9 aa, synthetic construct
  source 1..9: note = Seed: AGDSGFAAY
AADSGFAAY

SEQ ID NO: 11042 - protein, 10 aa, synthetic construct
  source 1..10: note = Seed: AGEAANFCAL
AAEAANFCAA

SEQ ID NO: 11043 - protein, 10 aa, synthetic construct
  source 1..10: note = Seed: AGEAANFCAL
AAEAANFCAF

SEQ ID NO: 11044 - protein, 10 aa, synthetic construct
  source 1..10: note = Seed: AGEAANFCAL
AAEAANFCAL

SEQ ID NO: 11045 - protein, 10 aa, synthetic construct
  source 1..10: note = Seed: AGEAANFCAL
AAEAANFCAW

SEQ ID NO: 11046 - protein, 10 aa, synthetic construct
  source 1..10: note = Seed: AQFAPSASAF
AAFAPSASAF

SEQ ID NO: 11047 - protein, 11 aa, synthetic construct
  source 1..11: note = Seed: AQFAPSASAFF
AAFAPSASAFY

SEQ ID NO: 11048 - protein, 10 aa, synthetic construct
  source 1..10: note = Seed: AQFAPSASAF
AAFAPSASAM

SEQ ID NO: 11049 - protein, 10 aa, synthetic construct
  source 1..10: note = Seed: AQFAPSASAF
AAFAPSASAY

SEQ ID NO: 11050 - protein, 9 aa, synthetic construct
  source 1..9: note = Seed: AQFAPSASA
AAFAPSASF

SEQ ID NO: 11051 - protein, 9 aa, synthetic construct
  source 1..9: note = Seed: AQFAPSASA
AAFAPSASL

SEQ ID NO: 11052 - protein, 9 aa, synthetic construct
  source 1..9: note = Seed: AQFAPSASA
AAFAPSASM

SEQ ID NO: 11053 - protein, 9 aa, synthetic construct
  source 1..9: note = Seed: AQFAPSASA
AAFAPSASY

SEQ ID NO: 11054 - protein, 9 aa, synthetic construct
  source 1..9: note = Seed: ASFDNFKFV
AAFDNFKFF

SEQ ID NO: 11055 - protein, 9 aa, synthetic construct
  source 1..9: note = Seed: ASFDNFKFV
AAFDNFKFI

SEQ ID NO: 11056 - protein, 9 aa, synthetic construct
  source 1..9: note = Seed: ASFDNFKFV
AAFDNFKFK

SEQ ID NO: 11057 - protein, 9 aa, synthetic construct
  source 1..9: note = Seed: ASFDNFKFV
AAFDNFKFL

SEQ ID NO: 11058 - protein, 9 aa, synthetic construct
  source 1..9: note = Seed: ASFDNFKFV
AAFDNFKFM

SEQ ID NO: 11059 - protein, 9 aa, synthetic construct
  source 1..9: note = Seed: ASFDNFKFV
AAFDNFKFV

SEQ ID NO: 11060 - protein, 9 aa, synthetic construct
  source 1..9: note = Seed: ASFDNFKFV
AAFDNFKFW

SEQ ID NO: 11061 - protein, 9 aa, synthetic construct
  source 1..9: note = Seed: ASFDNFKFV
AAFDNFKFY

SEQ ID NO: 11062 - protein, 10 aa, synthetic construct
  source 1..10: note = Seed: AYFNMVYMPA
AAFNMVYMPK

SEQ ID NO: 11063 - protein, 10 aa, synthetic construct
  source 1..10: note = Seed: ANFNVLFSTV
AAFNVLFSTV

SEQ ID NO: 11064 - protein, 11 aa, synthetic construct
  source 1..11: note = Seed: ANFNVLFSTVF
AAFNVLFSTVF

SEQ ID NO: 11065 - protein, 11 aa, synthetic construct
  source 1..11: note = Seed: ANFNVLFSTVF
AAFNVLFSTVY

SEQ ID NO: 11066 - protein, 10 aa, synthetic construct
  source 1..10: note = Seed: AGFPFNKWGK
AAFPFNKWGK

SEQ ID NO: 11067 - protein, 10 aa, synthetic construct
  source 1..10: note = Seed: AGFPFNKWGK
AAFPFNKWGR

SEQ ID NO: 11068 - protein, 10 aa, synthetic construct
  source 1..10: note = Seed: ASFRLFARTR
AAFRLFARTK

SEQ ID NO: 11069 - protein, 10 aa, synthetic construct
  source 1..10: note = Seed: ASFRLFARTR
AAFRLFARTR

SEQ ID NO: 11070 - protein, 9 aa, synthetic construct
  source 1..9: note = Seed: AGFSLWVYK
AAFSLWVYK

SEQ ID NO: 11071 - protein, 9 aa, synthetic construct
  source 1..9: note = Seed: AGFSLWVYK
AAFSLWVYR

SEQ ID NO: 11072 - protein, 9 aa, synthetic construct
  source 1..9: note = Seed: ASFSTFKCY
AAFSTFKCF

SEQ ID NO: 11073 - protein, 9 aa, synthetic construct
  source 1..9: note = Seed: ASFSTFKCY
AAFSTFKCL

SEQ ID NO: 11074 - protein, 9 aa, synthetic construct
  source 1..9: note = Seed: ASFSTFKCY
AAFSTFKCM

SEQ ID NO: 11075 - protein, 9 aa, synthetic construct
  source 1..9: note = Seed: ASFSTFKCY
AAFSTFKCV

SEQ ID NO: 11076 - protein, 9 aa, synthetic construct
  source 1..9: note = Seed: ASFSTFKCY
AAFSTFKCW

SEQ ID NO: 11077 - protein, 9 aa, synthetic construct
  source 1..9: note = Seed: ASFSTFKCY
AAFSTFKCY

SEQ ID NO: 11078 - protein, 9 aa, synthetic construct
  source 1..9: note = Seed: AIFYLITPV
AAFYLITPV

SEQ ID NO: 11079 - protein, 9 aa, synthetic construct
  source 1..9: note = Seed: AIFYLITPV
AAFYLITPW

SEQ ID NO: 11080 - protein, 10 aa, synthetic construct
  source 1..10: note = Seed: ASFYYVWKSY
AAFYYVWKSK

SEQ ID NO: 11081 - protein, 10 aa, synthetic construct
  source 1..10: note = Seed: ASFYYVWKSY
AAFYYVWKSW

SEQ ID NO: 11082 - protein, 9 aa, synthetic construct
  source 1..9: note = Seed: ANGQVFGLY
AAGQVFGLY

SEQ ID NO: 11083 - protein, 10 aa, synthetic construct
  source 1..10: note = Seed: ANGQVFGLYK
AAGQVFGLYK

SEQ ID NO: 11084 - protein, 10 aa, synthetic construct
  source 1..10: note = Seed: ANGQVFGLYK
AAGQVFGLYR

SEQ ID NO: 11085 - protein, 10 aa, synthetic construct
  source 1..10: note = Seed: APGTAVLRQW
AAGTAVLRQW

SEQ ID NO: 11086 - protein, 9 aa, synthetic construct
  source 1..9: note = Seed: AVHFISNSW
AAHFISNSF

SEQ ID NO: 11087 - protein, 9 aa, synthetic construct
  source 1..9: note = Seed: AVHFISNSW
AAHFISNSW

SEQ ID NO: 11088 - protein, 9 aa, synthetic construct
  source 1..9: note = Seed: AVHFISNSW
AAHFISNSY

SEQ ID NO: 11089 - protein, 10 aa, synthetic construct
  source 1..10: note = Seed: ALIISVTSNY
AAIISVTSNK

SEQ ID NO: 11090 - protein, 10 aa, synthetic construct
  source 1..10: note = Seed: ALIISVTSNY
AAIISVTSNY

SEQ ID NO: 11091 - protein, 9 aa, synthetic construct
  source 1..9: note = Seed: ASIKNFKSV
AAIKNFKSF

SEQ ID NO: 11092 - protein, 9 aa, synthetic construct
  source 1..9: note = Seed: ASIKNFKSV
AAIKNFKSL

SEQ ID NO: 11093 - protein, 9 aa, synthetic construct
  source 1..9: note = Seed: ASIKNFKSV
AAIKNFKSM

SEQ ID NO: 11094 - protein, 9 aa, synthetic construct
  source 1..9: note = Seed: ASIKNFKSV
AAIKNFKSV

SEQ ID NO: 11095 - protein, 10 aa, synthetic construct
  source 1..10: note = Seed: ASIKNFKSVL
AAIKNFKSVW

SEQ ID NO: 11096 - protein, 9 aa, synthetic construct
  source 1..9: note = Seed: ASIKNFKSV
AAIKNFKSW

SEQ ID NO: 11097 - protein, 9 aa, synthetic construct
  source 1..9: note = Seed: ASIKNFKSV
AAIKNFKSY

SEQ ID NO: 11098 - protein, 10 aa, synthetic construct
  source 1..10: note = Seed: AYILFTRFFY
AAILFTRFFK

SEQ ID NO: 11099 - protein, 10 aa, synthetic construct
  source 1..10: note = Seed: AYILFTRFFY
AAILFTRFFR

SEQ ID NO: 11100 - protein, 10 aa, synthetic construct
  source 1..10: note = Seed: AYILFTRFFY
AAILFTRFFY

SEQ ID NO: 11101 - protein, 11 aa, synthetic construct
  source 1..11: note = Seed: AYILFTRFFYV
AAILFTRFFYA

SEQ ID NO: 11102 - protein, 11 aa, synthetic construct
  source 1..11: note = Seed: AYILFTRFFYV
AAILFTRFFYI

SEQ ID NO: 11103 - protein, 11 aa, synthetic construct
  source 1..11: note = Seed: AYILFTRFFYV
AAILFTRFFYL

SEQ ID NO: 11104 - protein, 11 aa, synthetic construct
  source 1..11: note = Seed: AYILFTRFFYV
AAILFTRFFYV

SEQ ID NO: 11105 - protein, 9 aa, synthetic construct
  source 1..9: note = Seed: AAKKNNLPF
AAKKNNLPM

SEQ ID NO: 11106 - protein, 9 aa, synthetic construct
  source 1..9: note = Seed: AAKKNNLPF
AAKKNNLPW

SEQ ID NO: 11107 - protein, 9 aa, synthetic construct
  source 1..9: note = Seed: AAKKNNLPF
AAKKNNLPY

SEQ ID NO: 11108 - protein, 9 aa, synthetic construct
  source 1..9: note = Seed: AKKNNLPFK
AAKNNLPFA

SEQ ID NO: 11109 - protein, 9 aa, synthetic construct
  source 1..9: note = Seed: AKKNNLPFK
AAKNNLPFI

SEQ ID NO: 11110 - protein, 9 aa, synthetic construct
  source 1..9: note = Seed: AKKNNLPFK
AAKNNLPFK

SEQ ID NO: 11111 - protein, 9 aa, synthetic construct
  source 1..9: note = Seed: AKKNNLPFK
AAKNNLPFV

SEQ ID NO: 11112 - protein, 10 aa, synthetic construct
  source 1..10: note = Seed: AALALLLLDR
AALALLLLDK

SEQ ID NO: 11113 - protein, 10 aa, synthetic construct
  source 1..10: note = Seed: AALCTFLLNK
AALCTFLLNR

SEQ ID NO: 11114 - protein, 10 aa, synthetic construct
  source 1..10: note = Seed: ASLINTLNDL
AALINTLNDI

SEQ ID NO: 11115 - protein, 10 aa, synthetic construct
  source 1..10: note = Seed: ASLINTLNDL
AALINTLNDV

SEQ ID NO: 11116 - protein, 9 aa, synthetic construct
  source 1..9: note = Seed: ASLNGVTLI
AALNGVTLF

SEQ ID NO: 11117 - protein, 9 aa, synthetic construct
  source 1..9: note = Seed: ASLNGVTLI
AALNGVTLM

SEQ ID NO: 11118 - protein, 9 aa, synthetic construct
  source 1..9: note = Seed: ASLNGVTLI
AALNGVTLW

SEQ ID NO: 11119 - protein, 9 aa, synthetic construct
  source 1..9: note = Seed: ASLNGVTLI
AALNGVTLY

SEQ ID NO: 11120 - protein, 9 aa, synthetic construct
  source 1..9: note = Seed: AQLPAPRTL
AALPAPRTF

SEQ ID NO: 11121 - protein, 9 aa, synthetic construct
  source 1..9: note = Seed: AQLPAPRTL
AALPAPRTY

SEQ ID NO: 11122 - protein, 10 aa, synthetic construct
  source 1..10: note = Seed: ATLQAIASEF
AALQAIASEW

SEQ ID NO: 11123 - protein, 10 aa, synthetic construct
  source 1..10: note = Seed: ATLQAIASEF
AALQAIASEY

SEQ ID NO: 11124 - protein, 9 aa, synthetic construct
  source 1..9: note = Seed: AALQIPFAM
AALQIPFAF

SEQ ID NO: 11125 - protein, 9 aa, synthetic construct
  source 1..9: note = Seed: AALQIPFAM
AALQIPFAL

SEQ ID NO: 11126 - protein, 11 aa, synthetic construct
  source 1..11: note = Seed: AALQIPFAMQM
AALQIPFAMQY

SEQ ID NO: 11127 - protein, 9 aa, synthetic construct
  source 1..9: note = Seed: AALQIPFAM
AALQIPFAW

SEQ ID NO: 11128 - protein, 9 aa, synthetic construct
  source 1..9: note = Seed: AALQIPFAM
AALQIPFAY

SEQ ID NO: 11129 - protein, 9 aa, synthetic construct
  source 1..9: note = Seed: AVLQSGFRK
AALQSGFRK

SEQ ID NO: 11130 - protein, 9 aa, synthetic construct
  source 1..9: note = Seed: AVLQSGFRK
AALQSGFRR

SEQ ID NO: 11131 - protein, 11 aa, synthetic construct
  source 1..11: note = Seed: ALLSDLQDLKW
AALSDLQDLKW

SEQ ID NO: 11132 - protein, 9 aa, synthetic construct
  source 1..9: note = Seed: AMMFVKHKH
AAMFVKHKR

SEQ ID NO: 11133 - protein, 10 aa, synthetic construct
  source 1..10: note = Seed: AQNSVRVLQK
AANSVRVLQK

SEQ ID NO: 11134 - protein, 10 aa, synthetic construct
  source 1..10: note = Seed: AQNSVRVLQK
AANSVRVLQR

SEQ ID NO: 11135 - protein, 10 aa, synthetic construct
  source 1..10: note = Seed: AIPTNFTISV
AAPTNFTISL

SEQ ID NO: 11136 - protein, 10 aa, synthetic construct
  source 1..10: note = Seed: AIPTNFTISV
AAPTNFTISM

SEQ ID NO: 11137 - protein, 10 aa, synthetic construct
  source 1..10: note = Seed: ADQAMTQMYK
AAQAMTQMYK

SEQ ID NO: 11138 - protein, 10 aa, synthetic construct
  source 1..10: note = Seed: ADQAMTQMYK
AAQAMTQMYR

SEQ ID NO: 11139 - protein, 10 aa, synthetic construct
  source 1..10: note = Seed: ALQIPFAMQM
AAQIPFAMQF

SEQ ID NO: 11140 - protein, 10 aa, synthetic construct
  source 1..10: note = Seed: ALQIPFAMQM
AAQIPFAMQM

SEQ ID NO: 11141 - protein, 10 aa, synthetic construct
  source 1..10: note = Seed: ALQIPFAMQM
AAQIPFAMQV

SEQ ID NO: 11142 - protein, 10 aa, synthetic construct
  source 1..10: note = Seed: ALQIPFAMQM
AAQIPFAMQY

SEQ ID NO: 11143 - protein, 9 aa, synthetic construct
  source 1..9: note = Seed: AMQTMLFTM
AAQTMLFTV

SEQ ID NO: 11144 - protein, 9 aa, synthetic construct
  source 1..9: note = Seed: ALRANSAVK
AARANSAVA

SEQ ID NO: 11145 - protein, 9 aa, synthetic construct
  source 1..9: note = Seed: ALRANSAVK
AARANSAVK

SEQ ID NO: 11146 - protein, 9 aa, synthetic construct
  source 1..9: note = Seed: ATREAVGTN
AAREAVGTK

SEQ ID NO: 11147 - protein, 10 aa, synthetic construct
  source 1..10: note = Seed: ATREAVGTNL
AAREAVGTNK

SEQ ID NO: 11148 - protein, 9 aa, synthetic construct
  source 1..9: note = Seed: ATRFASVYA
AARFASVYA

SEQ ID NO: 11149 - protein, 9 aa, synthetic construct
  source 1..9: note = Seed: ATRFASVYA
AARFASVYG

SEQ ID NO: 11150 - protein, 9 aa, synthetic construct
  source 1..9: note = Seed: ATRFASVYA
AARFASVYI

SEQ ID NO: 11151 - protein, 9 aa, synthetic construct
  source 1..9: note = Seed: ATRFASVYA
AARFASVYK

SEQ ID NO: 11152 - protein, 9 aa, synthetic construct
  source 1..9: note = Seed: ATRFASVYA
AARFASVYL

SEQ ID NO: 11153 - protein, 9 aa, synthetic construct
  source 1..9: note = Seed: ATRFASVYA
AARFASVYM

SEQ ID NO: 11154 - protein, 9 aa, synthetic construct
  source 1..9: note = Seed: ATRFASVYA
AARFASVYR

SEQ ID NO: 11155 - protein, 9 aa, synthetic construct
  source 1..9: note = Seed: ATRFASVYA
AARFASVYS

SEQ ID NO: 11156 - protein, 9 aa, synthetic construct
  source 1..9: note = Seed: ATRFASVYA
AARFASVYT

SEQ ID NO: 11157 - protein, 9 aa, synthetic construct
  source 1..9: note = Seed: ATRFASVYA
AARFASVYV

SEQ ID NO: 11158 - protein, 9 aa, synthetic construct
  source 1..9: note = Seed: ATRFASVYA
AARFASVYY

SEQ ID NO: 11159 - protein, 9 aa, synthetic construct
  source 1..9: note = Seed: AYRFNGIGV
AARFNGIGA

SEQ ID NO: 11160 - protein, 9 aa, synthetic construct
  source 1..9: note = Seed: AYRFNGIGV
AARFNGIGK

SEQ ID NO: 11161 - protein, 9 aa, synthetic construct
  source 1..9: note = Seed: AWRKAVFIS
AARKAVFIA

SEQ ID NO: 11162 - protein, 9 aa, synthetic construct
  source 1..9: note = Seed: AWRKAVFIS
AARKAVFII

SEQ ID NO: 11163 - protein, 9 aa, synthetic construct
  source 1..9: note = Seed: AWRKAVFIS
AARKAVFIK

SEQ ID NO: 11164 - protein, 9 aa, synthetic construct
  source 1..9: note = Seed: AWRKAVFIS
AARKAVFIV

SEQ ID NO: 11165 - protein, 9 aa, synthetic construct
  source 1..9: note = Seed: AMRNAGIVG
AARNAGIVA

SEQ ID NO: 11166 - protein, 9 aa, synthetic construct
  source 1..9: note = Seed: AMRNAGIVG
AARNAGIVF

SEQ ID NO: 11167 - protein, 10 aa, synthetic construct
  source 1..10: note = Seed: AMRNAGIVGV
AARNAGIVGK

SEQ ID NO: 11168 - protein, 9 aa, synthetic construct
  source 1..9: note = Seed: AMRNAGIVG
AARNAGIVK

SEQ ID NO: 11169 - protein, 9 aa, synthetic construct
  source 1..9: note = Seed: AMRNAGIVG
AARNAGIVM

SEQ ID NO: 11170 - protein, 9 aa, synthetic construct
  source 1..9: note = Seed: AMRNAGIVG
AARNAGIVV

SEQ ID NO: 11171 - protein, 9 aa, synthetic construct
  source 1..9: note = Seed: AMRNAGIVG
AARNAGIVY

SEQ ID NO: 11172 - protein, 9 aa, synthetic construct
  source 1..9: note = Seed: AARQGFVDS
AARQGFVDK

SEQ ID NO: 11173 - protein, 9 aa, synthetic construct
  source 1..9: note = Seed: ATSACVLAA
AASACVLAV

SEQ ID NO: 11174 - protein, 9 aa, synthetic construct
  source 1..9: note = Seed: AMSAFAMMF
AASAFAMMF

SEQ ID NO: 11175 - protein, 10 aa, synthetic construct
  source 1..10: note = Seed: AMSAFAMMFV
AASAFAMMFV

SEQ ID NO: 11176 - protein, 11 aa, synthetic construct
  source 1..11: note = Seed: AMSAFAMMFVK
AASAFAMMFVK

SEQ ID NO: 11177 - protein, 9 aa, synthetic construct
  source 1..9: note = Seed: AMSAFAMMF
AASAFAMMM

SEQ ID NO: 11178 - protein, 9 aa, synthetic construct
  source 1..9: note = Seed: AMSAFAMMF
AASAFAMMW

SEQ ID NO: 11179 - protein, 9 aa, synthetic construct
  source 1..9: note = Seed: AMSAFAMMF
AASAFAMMY

SEQ ID NO: 11180 - protein, 10 aa, synthetic construct
  source 1..10: note = Seed: APSASAFFGM
AASASAFFGF

SEQ ID NO: 11181 - protein, 10 aa, synthetic construct
  source 1..10: note = Seed: APSASAFFGM
AASASAFFGW

SEQ ID NO: 11182 - protein, 11 aa, synthetic construct
  source 1..11: note = Seed: AYSRYRIGNYK
AASRYRIGNYR

SEQ ID NO: 11183 - protein, 9 aa, synthetic construct
  source 1..9: note = Seed: ASSSEAFLI
AASSEAFLF

SEQ ID NO: 11184 - protein, 9 aa, synthetic construct
  source 1..9: note = Seed: ASSSEAFLI
AASSEAFLW

SEQ ID NO: 11185 - protein, 9 aa, synthetic construct
  source 1..9: note = Seed: ASSSEAFLI
AASSEAFLY

SEQ ID NO: 11186 - protein, 9 aa, synthetic construct
  source 1..9: note = Seed: AVTANVNAL
AATANVNAF

SEQ ID NO: 11187 - protein, 9 aa, synthetic construct
  source 1..9: note = Seed: AVTANVNAL
AATANVNAL

SEQ ID NO: 11188 - protein, 10 aa, synthetic construct
  source 1..10: note = Seed: AVTANVNALL
AATANVNALV

SEQ ID NO: 11189 - protein, 9 aa, synthetic construct
  source 1..9: note = Seed: AVTANVNAL
AATANVNAM

SEQ ID NO: 11190 - protein, 9 aa, synthetic construct
  source 1..9: note = Seed: AVTANVNAL
AATANVNAY

SEQ ID NO: 11191 - protein, 9 aa, synthetic construct
  source 1..9: note = Seed: ATTAYANSV
AATAYANSF

SEQ ID NO: 11192 - protein, 9 aa, synthetic construct
  source 1..9: note = Seed: ATTAYANSV
AATAYANSL

SEQ ID NO: 11193 - protein, 9 aa, synthetic construct
  source 1..9: note = Seed: ATTAYANSV
AATAYANSM

SEQ ID NO: 11194 - protein, 9 aa, synthetic construct
  source 1..9: note = Seed: ATTAYANSV
AATAYANSV

SEQ ID NO: 11195 - protein, 10 aa, synthetic construct
  source 1..10: note = Seed: ATTAYANSVF
AATAYANSVF

SEQ ID NO: 11196 - protein, 10 aa, synthetic construct
  source 1..10: note = Seed: ATTAYANSVF
AATAYANSVW

SEQ ID NO: 11197 - protein, 9 aa, synthetic construct
  source 1..9: note = Seed: ATTAYANSV
AATAYANSY

SEQ ID NO: 11198 - protein, 9 aa, synthetic construct
  source 1..9: note = Seed: ALTCFSTQF
AATCFSTQF

SEQ ID NO: 11199 - protein, 9 aa, synthetic construct
  source 1..9: note = Seed: ALTCFSTQF
AATCFSTQY

SEQ ID NO: 11200 - protein, 10 aa, synthetic construct
  source 1..10: note = Seed: AGTDLEGNFY
AATDLEGNFY

SEQ ID NO: 11201 - protein, 10 aa, synthetic construct
  source 1..10: note = Seed: ATTRQVVNVV
AATRQVVNVK

SEQ ID NO: 11202 - protein, 9 aa, synthetic construct
  source 1..9: note = Seed: ATVAYFNMV
AAVAYFNMV

SEQ ID NO: 11203 - protein, 10 aa, synthetic construct
  source 1..10: note = Seed: ATVAYFNMVY
AAVAYFNMVF

SEQ ID NO: 11204 - protein, 10 aa, synthetic construct
  source 1..10: note = Seed: ATVAYFNMVY
AAVAYFNMVK

SEQ ID NO: 11205 - protein, 10 aa, synthetic construct
  source 1..10: note = Seed: ATVAYFNMVY
AAVAYFNMVR

SEQ ID NO: 11206 - protein, 10 aa, synthetic construct
  source 1..10: note = Seed: ATVAYFNMVY
AAVAYFNMVW

SEQ ID NO: 11207 - protein, 10 aa, synthetic construct
  source 1..10: note = Seed: ATVAYFNMVY
AAVAYFNMVY

SEQ ID NO: 11208 - protein, 9 aa, synthetic construct
  source 1..9: note = Seed: AVVCFNSTY
AAVCFNSTF

SEQ ID NO: 11209 - protein, 9 aa, synthetic construct
  source 1..9: note = Seed: AVVCFNSTY
AAVCFNSTK

SEQ ID NO: 11210 - protein, 9 aa, synthetic construct
  source 1..9: note = Seed: AVVCFNSTY
AAVCFNSTM

SEQ ID NO: 11211 - protein, 9 aa, synthetic construct
  source 1..9: note = Seed: AVVCFNSTY
AAVCFNSTW

SEQ ID NO: 11212 - protein, 9 aa, synthetic construct
  source 1..9: note = Seed: AVVCFNSTY
AAVCFNSTY

SEQ ID NO: 11213 - protein, 10 aa, synthetic construct
  source 1..10: note = Seed: AMVRMYIFFA
AAVRMYIFFK

SEQ ID NO: 11214 - protein, 9 aa, synthetic construct
  source 1..9: note = Seed: AGVSICSTM
AAVSICSTF

SEQ ID NO: 11215 - protein, 9 aa, synthetic construct
  source 1..9: note = Seed: AGVSICSTM
AAVSICSTY

SEQ ID NO: 11216 - protein, 9 aa, synthetic construct
  source 1..9: note = Seed: ASVYYSQLM
AAVYYSQLF

SEQ ID NO: 11217 - protein, 9 aa, synthetic construct
  source 1..9: note = Seed: ASVYYSQLM
AAVYYSQLL

SEQ ID NO: 11218 - protein, 9 aa, synthetic construct
  source 1..9: note = Seed: ASVYYSQLM
AAVYYSQLM

SEQ ID NO: 11219 - protein, 9 aa, synthetic construct
  source 1..9: note = Seed: ASVYYSQLM
AAVYYSQLW

SEQ ID NO: 11220 - protein, 9 aa, synthetic construct
  source 1..9: note = Seed: ASVYYSQLM
AAVYYSQLY

SEQ ID NO: 11221 - protein, 9 aa, synthetic construct
  source 1..9: note = Seed: AYYFMRFRR
AAYFMRFRK

SEQ ID NO: 11222 - protein, 9 aa, synthetic construct
  source 1..9: note = Seed: AYYFMRFRR
AAYFMRFRR

SEQ ID NO: 11223 - protein, 10 aa, synthetic construct
  source 1..10: note = Seed: AYYRARAGEA
AAYRARAGEK

SEQ ID NO: 11224 - protein, 9 aa, synthetic construct
  source 1..9: note = Seed: AMYTPHTVL
AAYTPHTVF

SEQ ID NO: 11225 - protein, 9 aa, synthetic construct
  source 1..9: note = Seed: AMYTPHTVL
AAYTPHTVI

SEQ ID NO: 11226 - protein, 9 aa, synthetic construct
  source 1..9: note = Seed: AMYTPHTVL
AAYTPHTVL

SEQ ID NO: 11227 - protein, 9 aa, synthetic construct
  source 1..9: note = Seed: AMYTPHTVL
AAYTPHTVM

SEQ ID NO: 11228 - protein, 9 aa, synthetic construct
  source 1..9: note = Seed: AMYTPHTVL
AAYTPHTVV

SEQ ID NO: 11229 - protein, 9 aa, synthetic construct
  source 1..9: note = Seed: AMYTPHTVL
AAYTPHTVY

SEQ ID NO: 11230 - protein, 9 aa, synthetic construct
  source 1..9: note = Seed: AKYTQLCQY
AAYTQLCQF

SEQ ID NO: 11231 - protein, 9 aa, synthetic construct
  source 1..9: note = Seed: AKYTQLCQY
AAYTQLCQY

SEQ ID NO: 11232 - protein, 10 aa, synthetic construct
  source 1..10: note = Seed: AKYTQLCQYL
AAYTQLCQYF

SEQ ID NO: 11233 - protein, 10 aa, synthetic construct
  source 1..10: note = Seed: AYYVGYLQPR
AAYVGYLQPR

SEQ ID NO: 11234 - protein, 10 aa, synthetic construct
  source 1..10: note = Seed: AGEAANFCAL
ACEAANFCAA

SEQ ID NO: 11235 - protein, 10 aa, synthetic construct
  source 1..10: note = Seed: AGEAANFCAL
ACEAANFCAF

SEQ ID NO: 11236 - protein, 10 aa, synthetic construct
  source 1..10: note = Seed: AGEAANFCAL
ACEAANFCAL

SEQ ID NO: 11237 - protein, 10 aa, synthetic construct
  source 1..10: note = Seed: AGEAANFCAL
ACEAANFCAW

SEQ ID NO: 11238 - protein, 9 aa, synthetic construct
  source 1..9: note = Seed: AQFAPSASA
ACFAPSASF

SEQ ID NO: 11239 - protein, 9 aa, synthetic construct
  source 1..9: note = Seed: AQFAPSASA
ACFAPSASY

SEQ ID NO: 11240 - protein, 9 aa, synthetic construct
  source 1..9: note = Seed: AGFSLWVYK
ACFSLWVYR

SEQ ID NO: 11241 - protein, 10 aa, synthetic construct
  source 1..10: note = Seed: ALIISVTSNY
ACIISVTSNK

SEQ ID NO: 11242 - protein, 10 aa, synthetic construct
  source 1..10: note = Seed: AYILFTRFFY
ACILFTRFFK

SEQ ID NO: 11243 - protein, 10 aa, synthetic construct
  source 1..10: note = Seed: AYILFTRFFY
ACILFTRFFR

SEQ ID NO: 11244 - protein, 10 aa, synthetic construct
  source 1..10: note = Seed: AYILFTRFFY
ACILFTRFFY

SEQ ID NO: 11245 - protein, 11 aa, synthetic construct
  source 1..11: note = Seed: AYILFTRFFYV
ACILFTRFFYA

SEQ ID NO: 11246 - protein, 11 aa, synthetic construct
  source 1..11: note = Seed: AYILFTRFFYV
ACILFTRFFYI

SEQ ID NO: 11247 - protein, 11 aa, synthetic construct
  source 1..11: note = Seed: AYILFTRFFYV
ACILFTRFFYL

SEQ ID NO: 11248 - protein, 11 aa, synthetic construct
  source 1..11: note = Seed: AYILFTRFFYV
ACILFTRFFYV

SEQ ID NO: 11249 - protein, 9 aa, synthetic construct
  source 1..9: note = Seed: AKKNNLPFK
ACKNNLPFK

SEQ ID NO: 11250 - protein, 10 aa, synthetic construct
  source 1..10: note = Seed: AALCTFLLNK
ACLCTFLLNK

SEQ ID NO: 11251 - protein, 10 aa, synthetic construct
  source 1..10: note = Seed: ASLINTLNDL
ACLINTLNDI

SEQ ID NO: 11252 - protein, 10 aa, synthetic construct
  source 1..10: note = Seed: ASLINTLNDL
ACLINTLNDV

SEQ ID NO: 11253 - protein, 11 aa, synthetic construct
  source 1..11: note = Seed: AALQIPFAMQM
ACLQIPFAMQY

SEQ ID NO: 11254 - protein, 10 aa, synthetic construct
  source 1..10: note = Seed: AIPTNFTISV
ACPTNFTISL

SEQ ID NO: 11255 - protein, 10 aa, synthetic construct
  source 1..10: note = Seed: AIPTNFTISV
ACPTNFTISM

SEQ ID NO: 11256 - protein, 10 aa, synthetic construct
  source 1..10: note = Seed: ADQAMTQMYK
ACQAMTQMYK

SEQ ID NO: 11257 - protein, 10 aa, synthetic construct
  source 1..10: note = Seed: ADQAMTQMYK
ACQAMTQMYR

SEQ ID NO: 11258 - protein, 10 aa, synthetic construct
  source 1..10: note = Seed: ALQIPFAMQM
ACQIPFAMQF

SEQ ID NO: 11259 - protein, 10 aa, synthetic construct
  source 1..10: note = Seed: ALQIPFAMQM
ACQIPFAMQM

SEQ ID NO: 11260 - protein, 10 aa, synthetic construct
  source 1..10: note = Seed: ALQIPFAMQM
ACQIPFAMQV

SEQ ID NO: 11261 - protein, 10 aa, synthetic construct
  source 1..10: note = Seed: ALQIPFAMQM
ACQIPFAMQY

SEQ ID NO: 11262 - protein, 9 aa, synthetic construct
  source 1..9: note = Seed: ATRFASVYA
ACRFASVYK

SEQ ID NO: 11263 - protein, 10 aa, synthetic construct
  source 1..10: note = Seed: APSASAFFGM
ACSASAFFGW

SEQ ID NO: 11264 - protein, 9 aa, synthetic construct
  source 1..9: note = Seed: ASSSEAFLI
ACSSEAFLW

SEQ ID NO: 11265 - protein, 10 aa, synthetic construct
  source 1..10: note = Seed: AVTANVNALL
ACTANVNALV

SEQ ID NO: 11266 - protein, 10 aa, synthetic construct
  source 1..10: note = Seed: ATTAYANSVF
ACTAYANSVF

SEQ ID NO: 11267 - protein, 10 aa, synthetic construct
  source 1..10: note = Seed: ATTAYANSVF
ACTAYANSVW

SEQ ID NO: 11268 - protein, 10 aa, synthetic construct
  source 1..10: note = Seed: AGTDLEGNFY
ACTDLEGNFY

SEQ ID NO: 11269 - protein, 10 aa, synthetic construct
  source 1..10: note = Seed: ATTRQVVNVV
ACTRQVVNVK

SEQ ID NO: 11270 - protein, 10 aa, synthetic construct
  source 1..10: note = Seed: ATVAYFNMVY
ACVAYFNMVK

SEQ ID NO: 11271 - protein, 10 aa, synthetic construct
  source 1..10: note = Seed: ATVAYFNMVY
ACVAYFNMVR

SEQ ID NO: 11272 - protein, 10 aa, synthetic construct
  source 1..10: note = Seed: ATVAYFNMVY
ACVAYFNMVY

SEQ ID NO: 11273 - protein, 9 aa, synthetic construct
  source 1..9: note = Seed: AYYFMRFRR
ACYFMRFRR

SEQ ID NO: 11274 - protein, 9 aa, synthetic construct
  source 1..9: note = Seed: AMYTPHTVL
ACYTPHTVF

SEQ ID NO: 11275 - protein, 9 aa, synthetic construct
  source 1..9: note = Seed: AMYTPHTVL
ACYTPHTVY

SEQ ID NO: 11276 - protein, 10 aa, synthetic construct
  source 1..10: note = Seed: AKYTQLCQYL
ACYTQLCQYF

SEQ ID NO: 11277 - protein, 10 aa, synthetic construct
  source 1..10: note = Seed: AGEAANFCAL
ADEAANFCAA

SEQ ID NO: 11278 - protein, 10 aa, synthetic construct
  source 1..10: note = Seed: AGEAANFCAL
ADEAANFCAF

SEQ ID NO: 11279 - protein, 10 aa, synthetic construct
  source 1..10: note = Seed: AGEAANFCAL
ADEAANFCAL

SEQ ID NO: 11280 - protein, 10 aa, synthetic construct
  source 1..10: note = Seed: AGEAANFCAL
ADEAANFCAW

SEQ ID NO: 11281 - protein, 10 aa, synthetic construct
  source 1..10: note = Seed: ALIISVTSNY
ADIISVTSNK

SEQ ID NO: 11282 - protein, 10 aa, synthetic construct
  source 1..10: note = Seed: AYILFTRFFY
ADILFTRFFK

SEQ ID NO: 11283 - protein, 10 aa, synthetic construct
  source 1..10: note = Seed: AYILFTRFFY
ADILFTRFFR

SEQ ID NO: 11284 - protein, 10 aa, synthetic construct
  source 1..10: note = Seed: AYILFTRFFY
ADILFTRFFY

SEQ ID NO: 11285 - protein, 11 aa, synthetic construct
  source 1..11: note = Seed: AYILFTRFFYV
ADILFTRFFYA

SEQ ID NO: 11286 - protein, 11 aa, synthetic construct
  source 1..11: note = Seed: AYILFTRFFYV
ADILFTRFFYI

SEQ ID NO: 11287 - protein, 11 aa, synthetic construct
  source 1..11: note = Seed: AYILFTRFFYV
ADILFTRFFYL

SEQ ID NO: 11288 - protein, 11 aa, synthetic construct
  source 1..11: note = Seed: AYILFTRFFYV
ADILFTRFFYV

SEQ ID NO: 11289 - protein, 10 aa, synthetic construct
  source 1..10: note = Seed: AALCTFLLNK
ADLCTFLLNK

SEQ ID NO: 11290 - protein, 10 aa, synthetic construct
  source 1..10: note = Seed: ASLINTLNDL
ADLINTLNDI

SEQ ID NO: 11291 - protein, 10 aa, synthetic construct
  source 1..10: note = Seed: ASLINTLNDL
ADLINTLNDV

SEQ ID NO: 11292 - protein, 11 aa, synthetic construct
  source 1..11: note = Seed: AALQIPFAMQM
ADLQIPFAMQY

SEQ ID NO: 11293 - protein, 10 aa, synthetic construct
  source 1..10: note = Seed: AIPTNFTISV
ADPTNFTISL

SEQ ID NO: 11294 - protein, 10 aa, synthetic construct
  source 1..10: note = Seed: AIPTNFTISV
ADPTNFTISM

SEQ ID NO: 11295 - protein, 10 aa, synthetic construct
  source 1..10: note = Seed: ALQIPFAMQM
ADQIPFAMQF

SEQ ID NO: 11296 - protein, 10 aa, synthetic construct
  source 1..10: note = Seed: ALQIPFAMQM
ADQIPFAMQM

SEQ ID NO: 11297 - protein, 10 aa, synthetic construct
  source 1..10: note = Seed: ALQIPFAMQM
ADQIPFAMQV

SEQ ID NO: 11298 - protein, 10 aa, synthetic construct
  source 1..10: note = Seed: ALQIPFAMQM
ADQIPFAMQY

SEQ ID NO: 11299 - protein, 10 aa, synthetic construct
  source 1..10: note = Seed: AVTANVNALL
ADTANVNALV

SEQ ID NO: 11300 - protein, 10 aa, synthetic construct
  source 1..10: note = Seed: ATTAYANSVF
ADTAYANSVF

SEQ ID NO: 11301 - protein, 10 aa, synthetic construct
  source 1..10: note = Seed: ATTAYANSVF
ADTAYANSVW

SEQ ID NO: 11302 - protein, 10 aa, synthetic construct
  source 1..10: note = Seed: AGTDLEGNFY
ADTDLEGNFY

SEQ ID NO: 11303 - protein, 10 aa, synthetic construct
  source 1..10: note = Seed: ATTRQVVNVV
ADTRQVVNVK

SEQ ID NO: 11304 - protein, 10 aa, synthetic construct
  source 1..10: note = Seed: ATVAYFNMVY
ADVAYFNMVK

SEQ ID NO: 11305 - protein, 10 aa, synthetic construct
  source 1..10: note = Seed: ATVAYFNMVY
ADVAYFNMVR

SEQ ID NO: 11306 - protein, 10 aa, synthetic construct
  source 1..10: note = Seed: ATVAYFNMVY
ADVAYFNMVY

SEQ ID NO: 11307 - protein, 9 aa, synthetic construct
  source 1..9: note = Seed: AEWFLAYIL
ADWFLAYIL

SEQ ID NO: 11308 - protein, 10 aa, synthetic construct
  source 1..10: note = Seed: AKYTQLCQYL
ADYTQLCQYF

SEQ ID NO: 11309 - protein, 9 aa, synthetic construct
  source 1..9: note = Seed: AGAALQIPF
AEAALQIPF

SEQ ID NO: 11310 - protein, 9 aa, synthetic construct
  source 1..9: note = Seed: AGAALQIPF
AEAALQIPY

SEQ ID NO: 11311 - protein, 9 aa, synthetic construct
  source 1..9: note = Seed: AIASEFSSL
AEASEFSSF

SEQ ID NO: 11312 - protein, 9 aa, synthetic construct
  source 1..9: note = Seed: AIASEFSSL
AEASEFSSM

SEQ ID NO: 11313 - protein, 9 aa, synthetic construct
  source 1..9: note = Seed: AIASEFSSL
AEASEFSSY

SEQ ID NO: 11314 - protein, 10 aa, synthetic construct
  source 1..10: note = Seed: AGEAANFCAL
AEEAANFCAA

SEQ ID NO: 11315 - protein, 10 aa, synthetic construct
  source 1..10: note = Seed: AGEAANFCAL
AEEAANFCAF

SEQ ID NO: 11316 - protein, 10 aa, synthetic construct
  source 1..10: note = Seed: AGEAANFCAL
AEEAANFCAI

SEQ ID NO: 11317 - protein, 10 aa, synthetic construct
  source 1..10: note = Seed: AGEAANFCAL
AEEAANFCAL

SEQ ID NO: 11318 - protein, 10 aa, synthetic construct
  source 1..10: note = Seed: AGEAANFCAL
AEEAANFCAM

SEQ ID NO: 11319 - protein, 10 aa, synthetic construct
  source 1..10: note = Seed: AGEAANFCAL
AEEAANFCAV

SEQ ID NO: 11320 - protein, 10 aa, synthetic construct
  source 1..10: note = Seed: AGEAANFCAL
AEEAANFCAW

SEQ ID NO: 11321 - protein, 9 aa, synthetic construct
  source 1..9: note = Seed: AQFAPSASA
AEFAPSASA

SEQ ID NO: 11322 - protein, 10 aa, synthetic construct
  source 1..10: note = Seed: AQFAPSASAF
AEFAPSASAF

SEQ ID NO: 11323 - protein, 10 aa, synthetic construct
  source 1..10: note = Seed: AQFAPSASAF
AEFAPSASAI

SEQ ID NO: 11324 - protein, 10 aa, synthetic construct
  source 1..10: note = Seed: AQFAPSASAF
AEFAPSASAL

SEQ ID NO: 11325 - protein, 10 aa, synthetic construct
  source 1..10: note = Seed: AQFAPSASAF
AEFAPSASAM

SEQ ID NO: 11326 - protein, 10 aa, synthetic construct
  source 1..10: note = Seed: AQFAPSASAF
AEFAPSASAY

SEQ ID NO: 11327 - protein, 9 aa, synthetic construct
  source 1..9: note = Seed: AQFAPSASA
AEFAPSASC

SEQ ID NO: 11328 - protein, 9 aa, synthetic construct
  source 1..9: note = Seed: AQFAPSASA
AEFAPSASF

SEQ ID NO: 11329 - protein, 9 aa, synthetic construct
  source 1..9: note = Seed: AQFAPSASA
AEFAPSASI

SEQ ID NO: 11330 - protein, 9 aa, synthetic construct
  source 1..9: note = Seed: AQFAPSASA
AEFAPSASL

SEQ ID NO: 11331 - protein, 9 aa, synthetic construct
  source 1..9: note = Seed: AQFAPSASA
AEFAPSASM

SEQ ID NO: 11332 - protein, 9 aa, synthetic construct
  source 1..9: note = Seed: AQFAPSASA
AEFAPSASP

SEQ ID NO: 11333 - protein, 9 aa, synthetic construct
  source 1..9: note = Seed: AQFAPSASA
AEFAPSAST

SEQ ID NO: 11334 - protein, 9 aa, synthetic construct
  source 1..9: note = Seed: AQFAPSASA
AEFAPSASV

SEQ ID NO: 11335 - protein, 9 aa, synthetic construct
  source 1..9: note = Seed: AQFAPSASA
AEFAPSASY

SEQ ID NO: 11336 - protein, 9 aa, synthetic construct
  source 1..9: note = Seed: ASFSTFKCY
AEFSTFKCF

SEQ ID NO: 11337 - protein, 9 aa, synthetic construct
  source 1..9: note = Seed: ASFSTFKCY
AEFSTFKCY

SEQ ID NO: 11338 - protein, 10 aa, synthetic construct
  source 1..10: note = Seed: ALIISVTSNY
AEIISVTSNK

SEQ ID NO: 11339 - protein, 10 aa, synthetic construct
  source 1..10: note = Seed: AYILFTRFFY
AEILFTRFFK

SEQ ID NO: 11340 - protein, 10 aa, synthetic construct
  source 1..10: note = Seed: AYILFTRFFY
AEILFTRFFR

SEQ ID NO: 11341 - protein, 10 aa, synthetic construct
  source 1..10: note = Seed: AYILFTRFFY
AEILFTRFFY

SEQ ID NO: 11342 - protein, 11 aa, synthetic construct
  source 1..11: note = Seed: AYILFTRFFYV
AEILFTRFFYA

SEQ ID NO: 11343 - protein, 11 aa, synthetic construct
  source 1..11: note = Seed: AYILFTRFFYV
AEILFTRFFYI

SEQ ID NO: 11344 - protein, 11 aa, synthetic construct
  source 1..11: note = Seed: AYILFTRFFYV
AEILFTRFFYL

SEQ ID NO: 11345 - protein, 11 aa, synthetic construct
  source 1..11: note = Seed: AYILFTRFFYV
AEILFTRFFYV

SEQ ID NO: 11346 - protein, 8 aa, synthetic construct
  source 1..8: note = Seed: AEILLIIM
AEILLIIL

SEQ ID NO: 11347 - protein, 9 aa, synthetic construct
  source 1..9: note = Seed: AAKKNNLPF
AEKKNNLPF

SEQ ID NO: 11348 - protein, 9 aa, synthetic construct
  source 1..9: note = Seed: AAKKNNLPF
AEKKNNLPY

SEQ ID NO: 11349 - protein, 10 aa, synthetic construct
  source 1..10: note = Seed: AALCTFLLNK
AELCTFLLNK

SEQ ID NO: 11350 - protein, 9 aa, synthetic construct
  source 1..9: note = Seed: AELEGIQYG
AELEGIQYA

SEQ ID NO: 11351 - protein, 9 aa, synthetic construct
  source 1..9: note = Seed: AELEGIQYG
AELEGIQYF

SEQ ID NO: 11352 - protein, 9 aa, synthetic construct
  source 1..9: note = Seed: AELEGIQYG
AELEGIQYI

SEQ ID NO: 11353 - protein, 9 aa, synthetic construct
  source 1..9: note = Seed: AELEGIQYG
AELEGIQYV

SEQ ID NO: 11354 - protein, 9 aa, synthetic construct
  source 1..9: note = Seed: AELEGIQYG
AELEGIQYW

SEQ ID NO: 11355 - protein, 9 aa, synthetic construct
  source 1..9: note = Seed: AELEGIQYG
AELEGIQYY

SEQ ID NO: 11356 - protein, 10 aa, synthetic construct
  source 1..10: note = Seed: ASLINTLNDL
AELINTLNDI

SEQ ID NO: 11357 - protein, 10 aa, synthetic construct
  source 1..10: note = Seed: ASLINTLNDL
AELINTLNDV

SEQ ID NO: 11358 - protein, 11 aa, synthetic construct
  source 1..11: note = Seed: AALQIPFAMQM
AELQIPFAMQY

SEQ ID NO: 11359 - protein, 8 aa, synthetic construct
  source 1..8: note = Seed: AENVTGLF
AENVTGLW

SEQ ID NO: 11360 - protein, 10 aa, synthetic construct
  source 1..10: note = Seed: AIPTNFTISV
AEPTNFTISL

SEQ ID NO: 11361 - protein, 10 aa, synthetic construct
  source 1..10: note = Seed: AIPTNFTISV
AEPTNFTISM

SEQ ID NO: 11362 - protein, 10 aa, synthetic construct
  source 1..10: note = Seed: ADQAMTQMYK
AEQAMTQMYK

SEQ ID NO: 11363 - protein, 10 aa, synthetic construct
  source 1..10: note = Seed: ALQIPFAMQM
AEQIPFAMQF

SEQ ID NO: 11364 - protein, 10 aa, synthetic construct
  source 1..10: note = Seed: ALQIPFAMQM
AEQIPFAMQM

SEQ ID NO: 11365 - protein, 10 aa, synthetic construct
  source 1..10: note = Seed: ALQIPFAMQM
AEQIPFAMQV

SEQ ID NO: 11366 - protein, 10 aa, synthetic construct
  source 1..10: note = Seed: ALQIPFAMQM
AEQIPFAMQY

SEQ ID NO: 11367 - protein, 9 aa, synthetic construct
  source 1..9: note = Seed: AMRNAGIVG
AERNAGIVF

SEQ ID NO: 11368 - protein, 9 aa, synthetic construct
  source 1..9: note = Seed: AMRNAGIVG
AERNAGIVM

SEQ ID NO: 11369 - protein, 9 aa, synthetic construct
  source 1..9: note = Seed: AMRNAGIVG
AERNAGIVY

SEQ ID NO: 11370 - protein, 9 aa, synthetic construct
  source 1..9: note = Seed: AMSAFAMMF
AESAFAMMF

SEQ ID NO: 11371 - protein, 10 aa, synthetic construct
  source 1..10: note = Seed: AMSAFAMMFV
AESAFAMMFV

SEQ ID NO: 11372 - protein, 9 aa, synthetic construct
  source 1..9: note = Seed: AMSAFAMMF
AESAFAMMY

SEQ ID NO: 11373 - protein, 10 aa, synthetic construct
  source 1..10: note = Seed: AVTANVNALL
AETANVNALI

SEQ ID NO: 11374 - protein, 10 aa, synthetic construct
  source 1..10: note = Seed: AVTANVNALL
AETANVNALL

SEQ ID NO: 11375 - protein, 10 aa, synthetic construct
  source 1..10: note = Seed: AVTANVNALL
AETANVNALV

SEQ ID NO: 11376 - protein, 10 aa, synthetic construct
  source 1..10: note = Seed: ATTAYANSVF
AETAYANSVF

SEQ ID NO: 11377 - protein, 10 aa, synthetic construct
  source 1..10: note = Seed: ATTAYANSVF
AETAYANSVW

SEQ ID NO: 11378 - protein, 10 aa, synthetic construct
  source 1..10: note = Seed: AGTDLEGNFY
AETDLEGNFY

SEQ ID NO: 11379 - protein, 10 aa, synthetic construct
  source 1..10: note = Seed: ATTRQVVNVV
AETRQVVNVK

SEQ ID NO: 11380 - protein, 10 aa, synthetic construct
  source 1..10: note = Seed: ASTSAFVETV
AETSAFVETV

SEQ ID NO: 11381 - protein, 10 aa, synthetic construct
  source 1..10: note = Seed: ATVAYFNMVY
AEVAYFNMVF

SEQ ID NO: 11382 - protein, 10 aa, synthetic construct
  source 1..10: note = Seed: ATVAYFNMVY
AEVAYFNMVK

SEQ ID NO: 11383 - protein, 10 aa, synthetic construct
  source 1..10: note = Seed: ATVAYFNMVY
AEVAYFNMVR

SEQ ID NO: 11384 - protein, 10 aa, synthetic construct
  source 1..10: note = Seed: ATVAYFNMVY
AEVAYFNMVY

SEQ ID NO: 11385 - protein, 9 aa, synthetic construct
  source 1..9: note = Seed: AVVCFNSTY
AEVCFNSTF

SEQ ID NO: 11386 - protein, 9 aa, synthetic construct
  source 1..9: note = Seed: AVVCFNSTY
AEVCFNSTM

SEQ ID NO: 11387 - protein, 9 aa, synthetic construct
  source 1..9: note = Seed: AVVCFNSTY
AEVCFNSTY

SEQ ID NO: 11388 - protein, 9 aa, synthetic construct
  source 1..9: note = Seed: AEVQIDRLI
AEVQIDRLA

SEQ ID NO: 11389 - protein, 9 aa, synthetic construct
  source 1..9: note = Seed: AEVQIDRLI
AEVQIDRLF

SEQ ID NO: 11390 - protein, 10 aa, synthetic construct
  source 1..10: note = Seed: AEVQIDRLIT
AEVQIDRLIA

SEQ ID NO: 11391 - protein, 9 aa, synthetic construct
  source 1..9: note = Seed: AEVQIDRLI
AEVQIDRLL

SEQ ID NO: 11392 - protein, 9 aa, synthetic construct
  source 1..9: note = Seed: AEVQIDRLI
AEVQIDRLM

SEQ ID NO: 11393 - protein, 9 aa, synthetic construct
  source 1..9: note = Seed: AEVQIDRLI
AEVQIDRLW

SEQ ID NO: 11394 - protein, 9 aa, synthetic construct
  source 1..9: note = Seed: AEVQIDRLI
AEVQIDRLY

SEQ ID NO: 11395 - protein, 9 aa, synthetic construct
  source 1..9: note = Seed: AGVSICSTM
AEVSICSTF

SEQ ID NO: 11396 - protein, 9 aa, synthetic construct
  source 1..9: note = Seed: AGVSICSTM
AEVSICSTY

SEQ ID NO: 11397 - protein, 9 aa, synthetic construct
  source 1..9: note = Seed: ASVYYSQLM
AEVYYSQLF

SEQ ID NO: 11398 - protein, 9 aa, synthetic construct
  source 1..9: note = Seed: ASVYYSQLM
AEVYYSQLY

SEQ ID NO: 11399 - protein, 9 aa, synthetic construct
  source 1..9: note = Seed: AEWFLAYIL
AEWFLAYIA

SEQ ID NO: 11400 - protein, 9 aa, synthetic construct
  source 1..9: note = Seed: AEWFLAYIL
AEWFLAYIF

SEQ ID NO: 11401 - protein, 9 aa, synthetic construct
  source 1..9: note = Seed: AEWFLAYIL
AEWFLAYII

SEQ ID NO: 11402 - protein, 10 aa, synthetic construct
  source 1..10: note = Seed: AEWFLAYILF
AEWFLAYILA

SEQ ID NO: 11403 - protein, 10 aa, synthetic construct
  source 1..10: note = Seed: AEWFLAYILF
AEWFLAYILI

SEQ ID NO: 11404 - protein, 10 aa, synthetic construct
  source 1..10: note = Seed: AEWFLAYILF
AEWFLAYILL

SEQ ID NO: 11405 - protein, 10 aa, synthetic construct
  source 1..10: note = Seed: AEWFLAYILF
AEWFLAYILM

SEQ ID NO: 11406 - protein, 10 aa, synthetic construct
  source 1..10: note = Seed: AEWFLAYILF
AEWFLAYILP

SEQ ID NO: 11407 - protein, 10 aa, synthetic construct
  source 1..10: note = Seed: AEWFLAYILF
AEWFLAYILV

SEQ ID NO: 11408 - protein, 10 aa, synthetic construct
  source 1..10: note = Seed: AEWFLAYILF
AEWFLAYILW

SEQ ID NO: 11409 - protein, 10 aa, synthetic construct
  source 1..10: note = Seed: AEWFLAYILF
AEWFLAYILY

SEQ ID NO: 11410 - protein, 9 aa, synthetic construct
  source 1..9: note = Seed: AEWFLAYIL
AEWFLAYIM

SEQ ID NO: 11411 - protein, 9 aa, synthetic construct
  source 1..9: note = Seed: AEWFLAYIL
AEWFLAYIP

SEQ ID NO: 11412 - protein, 9 aa, synthetic construct
  source 1..9: note = Seed: AEWFLAYIL
AEWFLAYIS

SEQ ID NO: 11413 - protein, 9 aa, synthetic construct
  source 1..9: note = Seed: AEWFLAYIL
AEWFLAYIT

SEQ ID NO: 11414 - protein, 9 aa, synthetic construct
  source 1..9: note = Seed: AEWFLAYIL
AEWFLAYIV

SEQ ID NO: 11415 - protein, 9 aa, synthetic construct
  source 1..9: note = Seed: AEWFLAYIL
AEWFLAYIW

SEQ ID NO: 11416 - protein, 9 aa, synthetic construct
  source 1..9: note = Seed: AEWFLAYIL
AEWFLAYIY

SEQ ID NO: 11417 - protein, 8 aa, synthetic construct
  source 1..8: note = Seed: AEWFLAYI
AEWFLAYL

SEQ ID NO: 11418 - protein, 9 aa, synthetic construct
  source 1..9: note = Seed: AMYTPHTVL
AEYTPHTVF

SEQ ID NO: 11419 - protein, 9 aa, synthetic construct
  source 1..9: note = Seed: AMYTPHTVL
AEYTPHTVM

SEQ ID NO: 11420 - protein, 9 aa, synthetic construct
  source 1..9: note = Seed: AMYTPHTVL
AEYTPHTVY

SEQ ID NO: 11421 - protein, 9 aa, synthetic construct
  source 1..9: note = Seed: AKYTQLCQY
AEYTQLCQF

SEQ ID NO: 11422 - protein, 10 aa, synthetic construct
  source 1..10: note = Seed: AKYTQLCQYL
AEYTQLCQYF

SEQ ID NO: 11423 - protein, 10 aa, synthetic construct
  source 1..10: note = Seed: AFAMMFVKHK
AFAMMFVKHR

SEQ ID NO: 11424 - protein, 9 aa, synthetic construct
  source 1..9: note = Seed: AYANSVFNI
AFANSVFNF

SEQ ID NO: 11425 - protein, 9 aa, synthetic construct
  source 1..9: note = Seed: AYANSVFNI
AFANSVFNI

SEQ ID NO: 11426 - protein, 9 aa, synthetic construct
  source 1..9: note = Seed: AYANSVFNI
AFANSVFNL

SEQ ID NO: 11427 - protein, 9 aa, synthetic construct
  source 1..9: note = Seed: AYANSVFNI
AFANSVFNM

SEQ ID NO: 11428 - protein, 9 aa, synthetic construct
  source 1..9: note = Seed: AYANSVFNI
AFANSVFNW

SEQ ID NO: 11429 - protein, 11 aa, synthetic construct
  source 1..11: note = Seed: AFAVDAAKAYK
AFAVDAAKAYR

SEQ ID NO: 11430 - protein, 9 aa, synthetic construct
  source 1..9: note = Seed: AYCCNIVNV
AFCCNIVNF

SEQ ID NO: 11431 - protein, 9 aa, synthetic construct
  source 1..9: note = Seed: ALCTFLLNK
AFCTFLLNR

SEQ ID NO: 11432 - protein, 9 aa, synthetic construct
  source 1..9: note = Seed: AVDAAKAYK
AFDAAKAYR

SEQ ID NO: 11433 - protein, 10 aa, synthetic construct
  source 1..10: note = Seed: AGEAANFCAL
AFEAANFCAA

SEQ ID NO: 11434 - protein, 10 aa, synthetic construct
  source 1..10: note = Seed: AGEAANFCAL
AFEAANFCAF

SEQ ID NO: 11435 - protein, 10 aa, synthetic construct
  source 1..10: note = Seed: AGEAANFCAL
AFEAANFCAL

SEQ ID NO: 11436 - protein, 10 aa, synthetic construct
  source 1..10: note = Seed: AGEAANFCAL
AFEAANFCAW

SEQ ID NO: 11437 - protein, 9 aa, synthetic construct
  source 1..9: note = Seed: AFEKMVSLL
AFEKMVSLF

SEQ ID NO: 11438 - protein, 10 aa, synthetic construct
  source 1..10: note = Seed: AQFAPSASAF
AFFAPSASAF

SEQ ID NO: 11439 - protein, 10 aa, synthetic construct
  source 1..10: note = Seed: AQFAPSASAF
AFFAPSASAL

SEQ ID NO: 11440 - protein, 10 aa, synthetic construct
  source 1..10: note = Seed: AQFAPSASAF
AFFAPSASAM

SEQ ID NO: 11441 - protein, 10 aa, synthetic construct
  source 1..10: note = Seed: AQFAPSASAF
AFFAPSASAY

SEQ ID NO: 11442 - protein, 9 aa, synthetic construct
  source 1..9: note = Seed: AQFAPSASA
AFFAPSASF

SEQ ID NO: 11443 - protein, 9 aa, synthetic construct
  source 1..9: note = Seed: AQFAPSASA
AFFAPSASM

SEQ ID NO: 11444 - protein, 9 aa, synthetic construct
  source 1..9: note = Seed: AQFAPSASA
AFFAPSASY

SEQ ID NO: 11445 - protein, 10 aa, synthetic construct
  source 1..10: note = Seed: AGFPFNKWGK
AFFPFNKWGK

SEQ ID NO: 11446 - protein, 10 aa, synthetic construct
  source 1..10: note = Seed: AGFPFNKWGK
AFFPFNKWGR

SEQ ID NO: 11447 - protein, 8 aa, synthetic construct
  source 1..8: note = Seed: ASFRLFAR
AFFRLFAR

SEQ ID NO: 11448 - protein, 10 aa, synthetic construct
  source 1..10: note = Seed: ASFRLFARTR
AFFRLFARTR

SEQ ID NO: 11449 - protein, 9 aa, synthetic construct
  source 1..9: note = Seed: AGFSLWVYK
AFFSLWVYK

SEQ ID NO: 11450 - protein, 9 aa, synthetic construct
  source 1..9: note = Seed: AGFSLWVYK
AFFSLWVYR

SEQ ID NO: 11451 - protein, 9 aa, synthetic construct
  source 1..9: note = Seed: ASFSTFKCY
AFFSTFKCY

SEQ ID NO: 11452 - protein, 10 aa, synthetic construct
  source 1..10: note = Seed: ASFYYVWKSY
AFFYYVWKSY

SEQ ID NO: 11453 - protein, 9 aa, synthetic construct
  source 1..9: note = Seed: ANGQVFGLY
AFGQVFGLY

SEQ ID NO: 11454 - protein, 10 aa, synthetic construct
  source 1..10: note = Seed: ANGQVFGLYK
AFGQVFGLYR

SEQ ID NO: 11455 - protein, 10 aa, synthetic construct
  source 1..10: note = Seed: ALIISVTSNY
AFIISVTSNK

SEQ ID NO: 11456 - protein, 10 aa, synthetic construct
  source 1..10: note = Seed: AYILFTRFFY
AFILFTRFFF

SEQ ID NO: 11457 - protein, 10 aa, synthetic construct
  source 1..10: note = Seed: AYILFTRFFY
AFILFTRFFK

SEQ ID NO: 11458 - protein, 10 aa, synthetic construct
  source 1..10: note = Seed: AYILFTRFFY
AFILFTRFFR

SEQ ID NO: 11459 - protein, 10 aa, synthetic construct
  source 1..10: note = Seed: AYILFTRFFY
AFILFTRFFY

SEQ ID NO: 11460 - protein, 11 aa, synthetic construct
  source 1..11: note = Seed: AYILFTRFFYV
AFILFTRFFYA

SEQ ID NO: 11461 - protein, 11 aa, synthetic construct
  source 1..11: note = Seed: AYILFTRFFYV
AFILFTRFFYI

SEQ ID NO: 11462 - protein, 11 aa, synthetic construct
  source 1..11: note = Seed: AYILFTRFFYV
AFILFTRFFYL

SEQ ID NO: 11463 - protein, 11 aa, synthetic construct
  source 1..11: note = Seed: AYILFTRFFYV
AFILFTRFFYV

SEQ ID NO: 11464 - protein, 9 aa, synthetic construct
  source 1..9: note = Seed: AYILFTRFF
AFILFTRFM

SEQ ID NO: 11465 - protein, 10 aa, synthetic construct
  source 1..10: note = Seed: AAKKNNLPFK
AFKKNNLPFK

SEQ ID NO: 11466 - protein, 9 aa, synthetic construct
  source 1..9: note = Seed: AKKNNLPFK
AFKNNLPFA

SEQ ID NO: 11467 - protein, 9 aa, synthetic construct
  source 1..9: note = Seed: AKKNNLPFK
AFKNNLPFK

SEQ ID NO: 11468 - protein, 10 aa, synthetic construct
  source 1..10: note = Seed: AALALLLLDR
AFLALLLLDR

SEQ ID NO: 11469 - protein, 10 aa, synthetic construct
  source 1..10: note = Seed: AALCTFLLNK
AFLCTFLLNK

SEQ ID NO: 11470 - protein, 10 aa, synthetic construct
  source 1..10: note = Seed: AALCTFLLNK
AFLCTFLLNR

SEQ ID NO: 11471 - protein, 9 aa, synthetic construct
  source 1..9: note = Seed: AFLIGCNYL
AFLIGCNYF

SEQ ID NO: 11472 - protein, 10 aa, synthetic construct
  source 1..10: note = Seed: ASLINTLNDL
AFLINTLNDA

SEQ ID NO: 11473 - protein, 10 aa, synthetic construct
  source 1..10: note = Seed: ASLINTLNDL
AFLINTLNDI

SEQ ID NO: 11474 - protein, 10 aa, synthetic construct
  source 1..10: note = Seed: ASLINTLNDL
AFLINTLNDL

SEQ ID NO: 11475 - protein, 10 aa, synthetic construct
  source 1..10: note = Seed: ASLINTLNDL
AFLINTLNDV

SEQ ID NO: 11476 - protein, 11 aa, synthetic construct
  source 1..11: note = Seed: AALQIPFAMQM
AFLQIPFAMQF

SEQ ID NO: 11477 - protein, 11 aa, synthetic construct
  source 1..11: note = Seed: AALQIPFAMQM
AFLQIPFAMQY

SEQ ID NO: 11478 - protein, 9 aa, synthetic construct
  source 1..9: note = Seed: AVLQSGFRK
AFLQSGFRR

SEQ ID NO: 11479 - protein, 10 aa, synthetic construct
  source 1..10: note = Seed: APLVGTPVCI
AFLVGTPVCV

SEQ ID NO: 11480 - protein, 9 aa, synthetic construct
  source 1..9: note = Seed: AMMFVKHKH
AFMFVKHKK

SEQ ID NO: 11481 - protein, 9 aa, synthetic construct
  source 1..9: note = Seed: AMMFVKHKH
AFMFVKHKR

SEQ ID NO: 11482 - protein, 11 aa, synthetic construct
  source 1..11: note = Seed: AKNLNESLIDL
AFNLNESLIDV

SEQ ID NO: 11483 - protein, 10 aa, synthetic construct
  source 1..10: note = Seed: ALNNIINNAR
AFNNIINNAR

SEQ ID NO: 11484 - protein, 10 aa, synthetic construct
  source 1..10: note = Seed: AQNSVRVLQK
AFNSVRVLQR

SEQ ID NO: 11485 - protein, 10 aa, synthetic construct
  source 1..10: note = Seed: AIPTNFTISV
AFPTNFTISL

SEQ ID NO: 11486 - protein, 10 aa, synthetic construct
  source 1..10: note = Seed: AIPTNFTISV
AFPTNFTISM

SEQ ID NO: 11487 - protein, 10 aa, synthetic construct
  source 1..10: note = Seed: ADQAMTQMYK
AFQAMTQMYK

SEQ ID NO: 11488 - protein, 10 aa, synthetic construct
  source 1..10: note = Seed: ADQAMTQMYK
AFQAMTQMYR

SEQ ID NO: 11489 - protein, 10 aa, synthetic construct
  source 1..10: note = Seed: ALQDAYYRAR
AFQDAYYRAR

SEQ ID NO: 11490 - protein, 10 aa, synthetic construct
  source 1..10: note = Seed: ALQIPFAMQM
AFQIPFAMQF

SEQ ID NO: 11491 - protein, 10 aa, synthetic construct
  source 1..10: note = Seed: ALQIPFAMQM
AFQIPFAMQI

SEQ ID NO: 11492 - protein, 10 aa, synthetic construct
  source 1..10: note = Seed: ALQIPFAMQM
AFQIPFAMQM

SEQ ID NO: 11493 - protein, 10 aa, synthetic construct
  source 1..10: note = Seed: ALQIPFAMQM
AFQIPFAMQV

SEQ ID NO: 11494 - protein, 10 aa, synthetic construct
  source 1..10: note = Seed: ALQIPFAMQM
AFQIPFAMQY

SEQ ID NO: 11495 - protein, 9 aa, synthetic construct
  source 1..9: note = Seed: AFQLTPIAV
AFQLTPIAF

SEQ ID NO: 11496 - protein, 9 aa, synthetic construct
  source 1..9: note = Seed: AFQLTPIAV
AFQLTPIAL

SEQ ID NO: 11497 - protein, 9 aa, synthetic construct
  source 1..9: note = Seed: AFQLTPIAV
AFQLTPIAM

SEQ ID NO: 11498 - protein, 9 aa, synthetic construct
  source 1..9: note = Seed: AFQLTPIAV
AFQLTPIAY

SEQ ID NO: 11499 - protein, 8 aa, synthetic construct
  source 1..8: note = Seed: AWQPGVAM
AFQPGVAM

SEQ ID NO: 11500 - protein, 9 aa, synthetic construct
  source 1..9: note = Seed: ALRANSAVK
AFRANSAVK

SEQ ID NO: 11501 - protein, 9 aa, synthetic construct
  source 1..9: note = Seed: ATREAVGTN
AFREAVGTK

SEQ ID NO: 11502 - protein, 9 aa, synthetic construct
  source 1..9: note = Seed: ATRFASVYA
AFRFASVYA

SEQ ID NO: 11503 - protein, 9 aa, synthetic construct
  source 1..9: note = Seed: ATRFASVYA
AFRFASVYG

SEQ ID NO: 11504 - protein, 9 aa, synthetic construct
  source 1..9: note = Seed: ATRFASVYA
AFRFASVYI

SEQ ID NO: 11505 - protein, 9 aa, synthetic construct
  source 1..9: note = Seed: ATRFASVYA
AFRFASVYK

SEQ ID NO: 11506 - protein, 9 aa, synthetic construct
  source 1..9: note = Seed: ATRFASVYA
AFRFASVYL

SEQ ID NO: 11507 - protein, 9 aa, synthetic construct
  source 1..9: note = Seed: ATRFASVYA
AFRFASVYM

SEQ ID NO: 11508 - protein, 9 aa, synthetic construct
  source 1..9: note = Seed: ATRFASVYA
AFRFASVYV

SEQ ID NO: 11509 - protein, 9 aa, synthetic construct
  source 1..9: note = Seed: AYRFNGIGV
AFRFNGIGF

SEQ ID NO: 11510 - protein, 9 aa, synthetic construct
  source 1..9: note = Seed: AYRFNGIGV
AFRFNGIGK

SEQ ID NO: 11511 - protein, 9 aa, synthetic construct
  source 1..9: note = Seed: AYRFNGIGV
AFRFNGIGL

SEQ ID NO: 11512 - protein, 9 aa, synthetic construct
  source 1..9: note = Seed: AYRFNGIGV
AFRFNGIGM

SEQ ID NO: 11513 - protein, 9 aa, synthetic construct
  source 1..9: note = Seed: AWRKAVFIS
AFRKAVFIA

SEQ ID NO: 11514 - protein, 9 aa, synthetic construct
  source 1..9: note = Seed: AWRKAVFIS
AFRKAVFIK

SEQ ID NO: 11515 - protein, 10 aa, synthetic construct
  source 1..10: note = Seed: AMRNAGIVGV
AFRNAGIVGK

SEQ ID NO: 11516 - protein, 9 aa, synthetic construct
  source 1..9: note = Seed: AMRNAGIVG
AFRNAGIVK

SEQ ID NO: 11517 - protein, 9 aa, synthetic construct
  source 1..9: note = Seed: AARQGFVDS
AFRQGFVDK

SEQ ID NO: 11518 - protein, 9 aa, synthetic construct
  source 1..9: note = Seed: AMSAFAMMF
AFSAFAMMF

SEQ ID NO: 11519 - protein, 10 aa, synthetic construct
  source 1..10: note = Seed: AMSAFAMMFV
AFSAFAMMFV

SEQ ID NO: 11520 - protein, 11 aa, synthetic construct
  source 1..11: note = Seed: AMSAFAMMFVK
AFSAFAMMFVR

SEQ ID NO: 11521 - protein, 9 aa, synthetic construct
  source 1..9: note = Seed: AMSAFAMMF
AFSAFAMMY

SEQ ID NO: 11522 - protein, 10 aa, synthetic construct
  source 1..10: note = Seed: APSASAFFGM
AFSASAFFGW

SEQ ID NO: 11523 - protein, 11 aa, synthetic construct
  source 1..11: note = Seed: AYSRYRIGNYK
AFSRYRIGNYR

SEQ ID NO: 11524 - protein, 10 aa, synthetic construct
  source 1..10: note = Seed: AVTANVNALL
AFTANVNALI

SEQ ID NO: 11525 - protein, 10 aa, synthetic construct
  source 1..10: note = Seed: AVTANVNALL
AFTANVNALL

SEQ ID NO: 11526 - protein, 10 aa, synthetic construct
  source 1..10: note = Seed: AVTANVNALL
AFTANVNALV

SEQ ID NO: 11527 - protein, 10 aa, synthetic construct
  source 1..10: note = Seed: ATTAYANSVF
AFTAYANSVF

SEQ ID NO: 11528 - protein, 10 aa, synthetic construct
  source 1..10: note = Seed: ATTAYANSVF
AFTAYANSVW

SEQ ID NO: 11529 - protein, 10 aa, synthetic construct
  source 1..10: note = Seed: AGTDLEGNFY
AFTDLEGNFY

SEQ ID NO: 11530 - protein, 10 aa, synthetic construct
  source 1..10: note = Seed: ATTRQVVNVV
AFTRQVVNVK

SEQ ID NO: 11531 - protein, 10 aa, synthetic construct
  source 1..10: note = Seed: ASTSAFVETV
AFTSAFVETV

SEQ ID NO: 11532 - protein, 10 aa, synthetic construct
  source 1..10: note = Seed: ATVAYFNMVY
AFVAYFNMVK

SEQ ID NO: 11533 - protein, 10 aa, synthetic construct
  source 1..10: note = Seed: ATVAYFNMVY
AFVAYFNMVR

SEQ ID NO: 11534 - protein, 10 aa, synthetic construct
  source 1..10: note = Seed: ATVAYFNMVY
AFVAYFNMVY

SEQ ID NO: 11535 - protein, 9 aa, synthetic construct
  source 1..9: note = Seed: AVVCFNSTY
AFVCFNSTY

SEQ ID NO: 11536 - protein, 9 aa, synthetic construct
  source 1..9: note = Seed: AFVETVKGL
AFVETVKGM

SEQ ID NO: 11537 - protein, 10 aa, synthetic construct
  source 1..10: note = Seed: AMVRMYIFFA
AFVRMYIFFK

SEQ ID NO: 11538 - protein, 8 aa, synthetic construct
  source 1..8: note = Seed: AYYFMRFR
AFYFMRFR

SEQ ID NO: 11539 - protein, 9 aa, synthetic construct
  source 1..9: note = Seed: AYYFMRFRR
AFYFMRFRK

SEQ ID NO: 11540 - protein, 9 aa, synthetic construct
  source 1..9: note = Seed: AYYFMRFRR
AFYFMRFRR

SEQ ID NO: 11541 - protein, 9 aa, synthetic construct
  source 1..9: note = Seed: AWYTERSEK
AFYTERSER

SEQ ID NO: 11542 - protein, 9 aa, synthetic construct
  source 1..9: note = Seed: AMYTPHTVL
AFYTPHTVF

SEQ ID NO: 11543 - protein, 9 aa, synthetic construct
  source 1..9: note = Seed: AMYTPHTVL
AFYTPHTVI

SEQ ID NO: 11544 - protein, 9 aa, synthetic construct
  source 1..9: note = Seed: AMYTPHTVL
AFYTPHTVL

SEQ ID NO: 11545 - protein, 9 aa, synthetic construct
  source 1..9: note = Seed: AMYTPHTVL
AFYTPHTVM

SEQ ID NO: 11546 - protein, 9 aa, synthetic construct
  source 1..9: note = Seed: AMYTPHTVL
AFYTPHTVV

SEQ ID NO: 11547 - protein, 9 aa, synthetic construct
  source 1..9: note = Seed: AMYTPHTVL
AFYTPHTVY

SEQ ID NO: 11548 - protein, 10 aa, synthetic construct
  source 1..10: note = Seed: AKYTQLCQYL
AFYTQLCQYF

SEQ ID NO: 11549 - protein, 10 aa, synthetic construct
  source 1..10: note = Seed: AYYVGYLQPR
AFYVGYLQPR

SEQ ID NO: 11550 - protein, 9 aa, synthetic construct
  source 1..9: note = Seed: AIASEFSSL
AGASEFSSF

SEQ ID NO: 11551 - protein, 9 aa, synthetic construct
  source 1..9: note = Seed: AIASEFSSL
AGASEFSSY

SEQ ID NO: 11552 - protein, 9 aa, synthetic construct
  source 1..9: note = Seed: ALCTFLLNK
AGCTFLLNR

SEQ ID NO: 11553 - protein, 10 aa, synthetic construct
  source 1..10: note = Seed: AGEAANFCAL
AGEAANFCAA

SEQ ID NO: 11554 - protein, 10 aa, synthetic construct
  source 1..10: note = Seed: AGEAANFCAL
AGEAANFCAF

SEQ ID NO: 11555 - protein, 10 aa, synthetic construct
  source 1..10: note = Seed: AGEAANFCAL
AGEAANFCAW

SEQ ID NO: 11556 - protein, 10 aa, synthetic construct
  source 1..10: note = Seed: AQFAPSASAF
AGFAPSASAF

SEQ ID NO: 11557 - protein, 10 aa, synthetic construct
  source 1..10: note = Seed: AQFAPSASAF
AGFAPSASAY

SEQ ID NO: 11558 - protein, 9 aa, synthetic construct
  source 1..9: note = Seed: AQFAPSASA
AGFAPSASF

SEQ ID NO: 11559 - protein, 9 aa, synthetic construct
  source 1..9: note = Seed: AQFAPSASA
AGFAPSASM

SEQ ID NO: 11560 - protein, 9 aa, synthetic construct
  source 1..9: note = Seed: AQFAPSASA
AGFAPSASY

SEQ ID NO: 11561 - protein, 10 aa, synthetic construct
  source 1..10: note = Seed: AGFPFNKWGK
AGFPFNKWGR

SEQ ID NO: 11562 - protein, 10 aa, synthetic construct
  source 1..10: note = Seed: ASFRLFARTR
AGFRLFARTR

SEQ ID NO: 11563 - protein, 9 aa, synthetic construct
  source 1..9: note = Seed: AGFSLWVYK
AGFSLWVYR

SEQ ID NO: 11564 - protein, 9 aa, synthetic construct
  source 1..9: note = Seed: ANGQVFGLY
AGGQVFGLY

SEQ ID NO: 11565 - protein, 10 aa, synthetic construct
  source 1..10: note = Seed: ALIISVTSNY
AGIISVTSNK

SEQ ID NO: 11566 - protein, 10 aa, synthetic construct
  source 1..10: note = Seed: AYILFTRFFY
AGILFTRFFK

SEQ ID NO: 11567 - protein, 10 aa, synthetic construct
  source 1..10: note = Seed: AYILFTRFFY
AGILFTRFFR

SEQ ID NO: 11568 - protein, 10 aa, synthetic construct
  source 1..10: note = Seed: AYILFTRFFY
AGILFTRFFY

SEQ ID NO: 11569 - protein, 11 aa, synthetic construct
  source 1..11: note = Seed: AYILFTRFFYV
AGILFTRFFYA

SEQ ID NO: 11570 - protein, 11 aa, synthetic construct
  source 1..11: note = Seed: AYILFTRFFYV
AGILFTRFFYI

SEQ ID NO: 11571 - protein, 11 aa, synthetic construct
  source 1..11: note = Seed: AYILFTRFFYV
AGILFTRFFYL

SEQ ID NO: 11572 - protein, 11 aa, synthetic construct
  source 1..11: note = Seed: AYILFTRFFYV
AGILFTRFFYV

SEQ ID NO: 11573 - protein, 9 aa, synthetic construct
  source 1..9: note = Seed: AKKNNLPFK
AGKNNLPFK

SEQ ID NO: 11574 - protein, 10 aa, synthetic construct
  source 1..10: note = Seed: AALCTFLLNK
AGLCTFLLNK

SEQ ID NO: 11575 - protein, 10 aa, synthetic construct
  source 1..10: note = Seed: AALCTFLLNK
AGLCTFLLNR

SEQ ID NO: 11576 - protein, 10 aa, synthetic construct
  source 1..10: note = Seed: ASLINTLNDL
AGLINTLNDI

SEQ ID NO: 11577 - protein, 10 aa, synthetic construct
  source 1..10: note = Seed: ASLINTLNDL
AGLINTLNDV

SEQ ID NO: 11578 - protein, 9 aa, synthetic construct
  source 1..9: note = Seed: ASLNGVTLI
AGLNGVTLW

SEQ ID NO: 11579 - protein, 11 aa, synthetic construct
  source 1..11: note = Seed: AALQIPFAMQM
AGLQIPFAMQY

SEQ ID NO: 11580 - protein, 9 aa, synthetic construct
  source 1..9: note = Seed: AALQIPFAM
AGLQIPFAW

SEQ ID NO: 11581 - protein, 9 aa, synthetic construct
  source 1..9: note = Seed: AMMFVKHKH
AGMFVKHKR

SEQ ID NO: 11582 - protein, 10 aa, synthetic construct
  source 1..10: note = Seed: AIPTNFTISV
AGPTNFTISL

SEQ ID NO: 11583 - protein, 10 aa, synthetic construct
  source 1..10: note = Seed: AIPTNFTISV
AGPTNFTISM

SEQ ID NO: 11584 - protein, 10 aa, synthetic construct
  source 1..10: note = Seed: ADQAMTQMYK
AGQAMTQMYK

SEQ ID NO: 11585 - protein, 10 aa, synthetic construct
  source 1..10: note = Seed: ADQAMTQMYK
AGQAMTQMYR

SEQ ID NO: 11586 - protein, 10 aa, synthetic construct
  source 1..10: note = Seed: ALQIPFAMQM
AGQIPFAMQF

SEQ ID NO: 11587 - protein, 10 aa, synthetic construct
  source 1..10: note = Seed: ALQIPFAMQM
AGQIPFAMQM

SEQ ID NO: 11588 - protein, 10 aa, synthetic construct
  source 1..10: note = Seed: ALQIPFAMQM
AGQIPFAMQV

SEQ ID NO: 11589 - protein, 10 aa, synthetic construct
  source 1..10: note = Seed: ALQIPFAMQM
AGQIPFAMQY

SEQ ID NO: 11590 - protein, 9 aa, synthetic construct
  source 1..9: note = Seed: ALRANSAVK
AGRANSAVK

SEQ ID NO: 11591 - protein, 9 aa, synthetic construct
  source 1..9: note = Seed: ATREAVGTN
AGREAVGTK

SEQ ID NO: 11592 - protein, 9 aa, synthetic construct
  source 1..9: note = Seed: ATRFASVYA
AGRFASVYA

SEQ ID NO: 11593 - protein, 9 aa, synthetic construct
  source 1..9: note = Seed: ATRFASVYA
AGRFASVYI

SEQ ID NO: 11594 - protein, 9 aa, synthetic construct
  source 1..9: note = Seed: ATRFASVYA
AGRFASVYK

SEQ ID NO: 11595 - protein, 9 aa, synthetic construct
  source 1..9: note = Seed: ATRFASVYA
AGRFASVYL

SEQ ID NO: 11596 - protein, 9 aa, synthetic construct
  source 1..9: note = Seed: ATRFASVYA
AGRFASVYM

SEQ ID NO: 11597 - protein, 9 aa, synthetic construct
  source 1..9: note = Seed: ATRFASVYA
AGRFASVYV

SEQ ID NO: 11598 - protein, 9 aa, synthetic construct
  source 1..9: note = Seed: AYRFNGIGV
AGRFNGIGK

SEQ ID NO: 11599 - protein, 9 aa, synthetic construct
  source 1..9: note = Seed: AWRKAVFIS
AGRKAVFIA

SEQ ID NO: 11600 - protein, 9 aa, synthetic construct
  source 1..9: note = Seed: AWRKAVFIS
AGRKAVFIK

SEQ ID NO: 11601 - protein, 9 aa, synthetic construct
  source 1..9: note = Seed: AMRNAGIVG
AGRNAGIVK

SEQ ID NO: 11602 - protein, 9 aa, synthetic construct
  source 1..9: note = Seed: AARQGFVDS
AGRQGFVDK

SEQ ID NO: 11603 - protein, 9 aa, synthetic construct
  source 1..9: note = Seed: ASSSEAFLI
AGSSEAFLW

SEQ ID NO: 11604 - protein, 10 aa, synthetic construct
  source 1..10: note = Seed: AVTANVNALL
AGTANVNALV

SEQ ID NO: 11605 - protein, 10 aa, synthetic construct
  source 1..10: note = Seed: ATTAYANSVF
AGTAYANSVF

SEQ ID NO: 11606 - protein, 10 aa, synthetic construct
  source 1..10: note = Seed: ATTAYANSVF
AGTAYANSVW

SEQ ID NO: 11607 - protein, 10 aa, synthetic construct
  source 1..10: note = Seed: ATTRQVVNVV
AGTRQVVNVK

SEQ ID NO: 11608 - protein, 10 aa, synthetic construct
  source 1..10: note = Seed: ATVAYFNMVY
AGVAYFNMVK

SEQ ID NO: 11609 - protein, 10 aa, synthetic construct
  source 1..10: note = Seed: ATVAYFNMVY
AGVAYFNMVR

SEQ ID NO: 11610 - protein, 10 aa, synthetic construct
  source 1..10: note = Seed: ATVAYFNMVY
AGVAYFNMVY

SEQ ID NO: 11611 - protein, 9 aa, synthetic construct
  source 1..9: note = Seed: AVVCFNSTY
AGVCFNSTY

SEQ ID NO: 11612 - protein, 10 aa, synthetic construct
  source 1..10: note = Seed: AMVRMYIFFA
AGVRMYIFFK

SEQ ID NO: 11613 - protein, 9 aa, synthetic construct
  source 1..9: note = Seed: ASVYYSQLM
AGVYYSQLW

SEQ ID NO: 11614 - protein, 9 aa, synthetic construct
  source 1..9: note = Seed: AYYFMRFRR
AGYFMRFRK

SEQ ID NO: 11615 - protein, 9 aa, synthetic construct
  source 1..9: note = Seed: AYYFMRFRR
AGYFMRFRR

SEQ ID NO: 11616 - protein, 9 aa, synthetic construct
  source 1..9: note = Seed: AMYTPHTVL
AGYTPHTVF

SEQ ID NO: 11617 - protein, 9 aa, synthetic construct
  source 1..9: note = Seed: AMYTPHTVL
AGYTPHTVY

SEQ ID NO: 11618 - protein, 10 aa, synthetic construct
  source 1..10: note = Seed: AKYTQLCQYL
AGYTQLCQYF

SEQ ID NO: 11619 - protein, 10 aa, synthetic construct
  source 1..10: note = Seed: AYYVGYLQPR
AGYVGYLQPR

SEQ ID NO: 11620 - protein, 9 aa, synthetic construct
  source 1..9: note = Seed: AGAALQIPF
AHAALQIPF

SEQ ID NO: 11621 - protein, 9 aa, synthetic construct
  source 1..9: note = Seed: AGAALQIPF
AHAALQIPY

SEQ ID NO: 11622 - protein, 9 aa, synthetic construct
  source 1..9: note = Seed: AIASEFSSL
AHASEFSSF

SEQ ID NO: 11623 - protein, 9 aa, synthetic construct
  source 1..9: note = Seed: AIASEFSSL
AHASEFSSM

SEQ ID NO: 11624 - protein, 9 aa, synthetic construct
  source 1..9: note = Seed: AIASEFSSL
AHASEFSSY

SEQ ID NO: 11625 - protein, 10 aa, synthetic construct
  source 1..10: note = Seed: AGEAANFCAL
AHEAANFCAA

SEQ ID NO: 11626 - protein, 10 aa, synthetic construct
  source 1..10: note = Seed: AGEAANFCAL
AHEAANFCAF

SEQ ID NO: 11627 - protein, 10 aa, synthetic construct
  source 1..10: note = Seed: AGEAANFCAL
AHEAANFCAL

SEQ ID NO: 11628 - protein, 10 aa, synthetic construct
  source 1..10: note = Seed: AGEAANFCAL
AHEAANFCAW

SEQ ID NO: 11629 - protein, 10 aa, synthetic construct
  source 1..10: note = Seed: AQFAPSASAF
AHFAPSASAF

SEQ ID NO: 11630 - protein, 11 aa, synthetic construct
  source 1..11: note = Seed: AQFAPSASAFF
AHFAPSASAFY

SEQ ID NO: 11631 - protein, 10 aa, synthetic construct
  source 1..10: note = Seed: AQFAPSASAF
AHFAPSASAM

SEQ ID NO: 11632 - protein, 10 aa, synthetic construct
  source 1..10: note = Seed: AQFAPSASAF
AHFAPSASAY

SEQ ID NO: 11633 - protein, 9 aa, synthetic construct
  source 1..9: note = Seed: AQFAPSASA
AHFAPSASF

SEQ ID NO: 11634 - protein, 9 aa, synthetic construct
  source 1..9: note = Seed: AQFAPSASA
AHFAPSASL

SEQ ID NO: 11635 - protein, 9 aa, synthetic construct
  source 1..9: note = Seed: AQFAPSASA
AHFAPSASM

SEQ ID NO: 11636 - protein, 9 aa, synthetic construct
  source 1..9: note = Seed: AQFAPSASA
AHFAPSASY

SEQ ID NO: 11637 - protein, 11 aa, synthetic construct
  source 1..11: note = Seed: ANFNVLFSTVF
AHFNVLFSTVF

SEQ ID NO: 11638 - protein, 11 aa, synthetic construct
  source 1..11: note = Seed: ANFNVLFSTVF
AHFNVLFSTVY

SEQ ID NO: 11639 - protein, 9 aa, synthetic construct
  source 1..9: note = Seed: AGFSLWVYK
AHFSLWVYR

SEQ ID NO: 11640 - protein, 9 aa, synthetic construct
  source 1..9: note = Seed: ASFSTFKCY
AHFSTFKCF

SEQ ID NO: 11641 - protein, 9 aa, synthetic construct
  source 1..9: note = Seed: ASFSTFKCY
AHFSTFKCM

SEQ ID NO: 11642 - protein, 9 aa, synthetic construct
  source 1..9: note = Seed: ASFSTFKCY
AHFSTFKCY

SEQ ID NO: 11643 - protein, 10 aa, synthetic construct
  source 1..10: note = Seed: ASFYYVWKSY
AHFYYVWKSY

SEQ ID NO: 11644 - protein, 10 aa, synthetic construct
  source 1..10: note = Seed: ALIISVTSNY
AHIISVTSNK

SEQ ID NO: 11645 - protein, 10 aa, synthetic construct
  source 1..10: note = Seed: AYILFTRFFY
AHILFTRFFK

SEQ ID NO: 11646 - protein, 10 aa, synthetic construct
  source 1..10: note = Seed: AYILFTRFFY
AHILFTRFFR

SEQ ID NO: 11647 - protein, 10 aa, synthetic construct
  source 1..10: note = Seed: AYILFTRFFY
AHILFTRFFY

SEQ ID NO: 11648 - protein, 11 aa, synthetic construct
  source 1..11: note = Seed: AYILFTRFFYV
AHILFTRFFYA

SEQ ID NO: 11649 - protein, 11 aa, synthetic construct
  source 1..11: note = Seed: AYILFTRFFYV
AHILFTRFFYI

SEQ ID NO: 11650 - protein, 11 aa, synthetic construct
  source 1..11: note = Seed: AYILFTRFFYV
AHILFTRFFYL

SEQ ID NO: 11651 - protein, 11 aa, synthetic construct
  source 1..11: note = Seed: AYILFTRFFYV
AHILFTRFFYV

SEQ ID NO: 11652 - protein, 9 aa, synthetic construct
  source 1..9: note = Seed: AAKKNNLPF
AHKKNNLPF

SEQ ID NO: 11653 - protein, 9 aa, synthetic construct
  source 1..9: note = Seed: AAKKNNLPF
AHKKNNLPY

SEQ ID NO: 11654 - protein, 10 aa, synthetic construct
  source 1..10: note = Seed: AALCTFLLNK
AHLCTFLLNK

SEQ ID NO: 11655 - protein, 10 aa, synthetic construct
  source 1..10: note = Seed: AALCTFLLNK
AHLCTFLLNR

SEQ ID NO: 11656 - protein, 10 aa, synthetic construct
  source 1..10: note = Seed: ASLINTLNDL
AHLINTLNDI

SEQ ID NO: 11657 - protein, 10 aa, synthetic construct
  source 1..10: note = Seed: ASLINTLNDL
AHLINTLNDV

SEQ ID NO: 11658 - protein, 9 aa, synthetic construct
  source 1..9: note = Seed: AQLPAPRTL
AHLPAPRTF

SEQ ID NO: 11659 - protein, 9 aa, synthetic construct
  source 1..9: note = Seed: AQLPAPRTL
AHLPAPRTY

SEQ ID NO: 11660 - protein, 9 aa, synthetic construct
  source 1..9: note = Seed: AALQIPFAM
AHLQIPFAF

SEQ ID NO: 11661 - protein, 11 aa, synthetic construct
  source 1..11: note = Seed: AALQIPFAMQM
AHLQIPFAMQF

SEQ ID NO: 11662 - protein, 11 aa, synthetic construct
  source 1..11: note = Seed: AALQIPFAMQM
AHLQIPFAMQY

SEQ ID NO: 11663 - protein, 9 aa, synthetic construct
  source 1..9: note = Seed: AALQIPFAM
AHLQIPFAY

SEQ ID NO: 11664 - protein, 10 aa, synthetic construct
  source 1..10: note = Seed: AIPTNFTISV
AHPTNFTISL

SEQ ID NO: 11665 - protein, 10 aa, synthetic construct
  source 1..10: note = Seed: AIPTNFTISV
AHPTNFTISM

SEQ ID NO: 11666 - protein, 10 aa, synthetic construct
  source 1..10: note = Seed: ADQAMTQMYK
AHQAMTQMYK

SEQ ID NO: 11667 - protein, 10 aa, synthetic construct
  source 1..10: note = Seed: ADQAMTQMYK
AHQAMTQMYR

SEQ ID NO: 11668 - protein, 10 aa, synthetic construct
  source 1..10: note = Seed: ALQIPFAMQM
AHQIPFAMQF

SEQ ID NO: 11669 - protein, 10 aa, synthetic construct
  source 1..10: note = Seed: ALQIPFAMQM
AHQIPFAMQM

SEQ ID NO: 11670 - protein, 10 aa, synthetic construct
  source 1..10: note = Seed: ALQIPFAMQM
AHQIPFAMQV

SEQ ID NO: 11671 - protein, 10 aa, synthetic construct
  source 1..10: note = Seed: ALQIPFAMQM
AHQIPFAMQY

SEQ ID NO: 11672 - protein, 9 aa, synthetic construct
  source 1..9: note = Seed: ATRFASVYA
AHRFASVYK

SEQ ID NO: 11673 - protein, 9 aa, synthetic construct
  source 1..9: note = Seed: AMRNAGIVG
AHRNAGIVF

SEQ ID NO: 11674 - protein, 9 aa, synthetic construct
  source 1..9: note = Seed: AMRNAGIVG
AHRNAGIVM

SEQ ID NO: 11675 - protein, 9 aa, synthetic construct
  source 1..9: note = Seed: AMRNAGIVG
AHRNAGIVY

SEQ ID NO: 11676 - protein, 9 aa, synthetic construct
  source 1..9: note = Seed: AMSAFAMMF
AHSAFAMMF

SEQ ID NO: 11677 - protein, 10 aa, synthetic construct
  source 1..10: note = Seed: AMSAFAMMFV
AHSAFAMMFV

SEQ ID NO: 11678 - protein, 9 aa, synthetic construct
  source 1..9: note = Seed: AMSAFAMMF
AHSAFAMMY

SEQ ID NO: 11679 - protein, 10 aa, synthetic construct
  source 1..10: note = Seed: APSASAFFGM
AHSASAFFGW

SEQ ID NO: 11680 - protein, 10 aa, synthetic construct
  source 1..10: note = Seed: AVTANVNALL
AHTANVNALV

SEQ ID NO: 11681 - protein, 10 aa, synthetic construct
  source 1..10: note = Seed: ATTAYANSVF
AHTAYANSVF

SEQ ID NO: 11682 - protein, 10 aa, synthetic construct
  source 1..10: note = Seed: ATTAYANSVF
AHTAYANSVW

SEQ ID NO: 11683 - protein, 10 aa, synthetic construct
  source 1..10: note = Seed: ATTAYANSVF
AHTAYANSVY

SEQ ID NO: 11684 - protein, 9 aa, synthetic construct
  source 1..9: note = Seed: ALTCFSTQF
AHTCFSTQF

SEQ ID NO: 11685 - protein, 9 aa, synthetic construct
  source 1..9: note = Seed: ALTCFSTQF
AHTCFSTQY

SEQ ID NO: 11686 - protein, 10 aa, synthetic construct
  source 1..10: note = Seed: AGTDLEGNFY
AHTDLEGNFY

SEQ ID NO: 11687 - protein, 10 aa, synthetic construct
  source 1..10: note = Seed: ATTRQVVNVV
AHTRQVVNVK

SEQ ID NO: 11688 - protein, 10 aa, synthetic construct
  source 1..10: note = Seed: ATVAYFNMVY
AHVAYFNMVF

SEQ ID NO: 11689 - protein, 10 aa, synthetic construct
  source 1..10: note = Seed: ATVAYFNMVY
AHVAYFNMVK

SEQ ID NO: 11690 - protein, 10 aa, synthetic construct
  source 1..10: note = Seed: ATVAYFNMVY
AHVAYFNMVR

SEQ ID NO: 11691 - protein, 10 aa, synthetic construct
  source 1..10: note = Seed: ATVAYFNMVY
AHVAYFNMVY

SEQ ID NO: 11692 - protein, 9 aa, synthetic construct
  source 1..9: note = Seed: AVVCFNSTY
AHVCFNSTF

SEQ ID NO: 11693 - protein, 9 aa, synthetic construct
  source 1..9: note = Seed: AVVCFNSTY
AHVCFNSTM

SEQ ID NO: 11694 - protein, 9 aa, synthetic construct
  source 1..9: note = Seed: AVVCFNSTY
AHVCFNSTY

SEQ ID NO: 11695 - protein, 10 aa, synthetic construct
  source 1..10: note = Seed: AMVRMYIFFA
AHVRMYIFFK

SEQ ID NO: 11696 - protein, 9 aa, synthetic construct
  source 1..9: note = Seed: AGVSICSTM
AHVSICSTF

SEQ ID NO: 11697 - protein, 9 aa, synthetic construct
  source 1..9: note = Seed: AGVSICSTM
AHVSICSTM

SEQ ID NO: 11698 - protein, 9 aa, synthetic construct
  source 1..9: note = Seed: AGVSICSTM
AHVSICSTY

SEQ ID NO: 11699 - protein, 10 aa, synthetic construct
  source 1..10: note = Seed: AKVTSAMQTM
AHVTSAMQTY

SEQ ID NO: 11700 - protein, 9 aa, synthetic construct
  source 1..9: note = Seed: ASVYYSQLM
AHVYYSQLF

SEQ ID NO: 11701 - protein, 9 aa, synthetic construct
  source 1..9: note = Seed: ASVYYSQLM
AHVYYSQLM

SEQ ID NO: 11702 - protein, 9 aa, synthetic construct
  source 1..9: note = Seed: ASVYYSQLM
AHVYYSQLY

SEQ ID NO: 11703 - protein, 9 aa, synthetic construct
  source 1..9: note = Seed: AYYFMRFRR
AHYFMRFRR

SEQ ID NO: 11704 - protein, 9 aa, synthetic construct
  source 1..9: note = Seed: AMYTPHTVL
AHYTPHTVF

SEQ ID NO: 11705 - protein, 9 aa, synthetic construct
  source 1..9: note = Seed: AMYTPHTVL
AHYTPHTVM

SEQ ID NO: 11706 - protein, 9 aa, synthetic construct
  source 1..9: note = Seed: AMYTPHTVL
AHYTPHTVY

SEQ ID NO: 11707 - protein, 9 aa, synthetic construct
  source 1..9: note = Seed: AKYTQLCQY
AHYTQLCQF

SEQ ID NO: 11708 - protein, 9 aa, synthetic construct
  source 1..9: note = Seed: AKYTQLCQY
AHYTQLCQY

SEQ ID NO: 11709 - protein, 10 aa, synthetic construct
  source 1..10: note = Seed: AKYTQLCQYL
AHYTQLCQYF

SEQ ID NO: 11710 - protein, 9 aa, synthetic construct
  source 1..9: note = Seed: AGAALQIPF
AIAALQIPF

SEQ ID NO: 11711 - protein, 9 aa, synthetic construct
  source 1..9: note = Seed: AGAALQIPF
AIAALQIPY

SEQ ID NO: 11712 - protein, 9 aa, synthetic construct
  source 1..9: note = Seed: AMACLVGLM
AIACLVGLI

SEQ ID NO: 11713 - protein, 9 aa, synthetic construct
  source 1..9: note = Seed: AMACLVGLM
AIACLVGLV

SEQ ID NO: 11714 - protein, 10 aa, synthetic construct
  source 1..10: note = Seed: AFAMMFVKHK
AIAMMFVKHK

SEQ ID NO: 11715 - protein, 9 aa, synthetic construct
  source 1..9: note = Seed: AIASEFSSL
AIASEFSSA

SEQ ID NO: 11716 - protein, 9 aa, synthetic construct
  source 1..9: note = Seed: AIASEFSSL
AIASEFSSF

SEQ ID NO: 11717 - protein, 9 aa, synthetic construct
  source 1..9: note = Seed: AIASEFSSL
AIASEFSSI

SEQ ID NO: 11718 - protein, 9 aa, synthetic construct
  source 1..9: note = Seed: AIASEFSSL
AIASEFSSM

SEQ ID NO: 11719 - protein, 9 aa, synthetic construct
  source 1..9: note = Seed: AIASEFSSL
AIASEFSSV

SEQ ID NO: 11720 - protein, 9 aa, synthetic construct
  source 1..9: note = Seed: AIASEFSSL
AIASEFSSY

SEQ ID NO: 11721 - protein, 9 aa, synthetic construct
  source 1..9: note = Seed: ALCTFLLNK
AICTFLLNK

SEQ ID NO: 11722 - protein, 9 aa, synthetic construct
  source 1..9: note = Seed: ALCTFLLNK
AICTFLLNR

SEQ ID NO: 11723 - protein, 9 aa, synthetic construct
  source 1..9: note = Seed: AVDAAKAYK
AIDAAKAYK

SEQ ID NO: 11724 - protein, 9 aa, synthetic construct
  source 1..9: note = Seed: AVDAAKAYK
AIDAAKAYR

SEQ ID NO: 11725 - protein, 9 aa, synthetic construct
  source 1..9: note = Seed: AVDCALDPL
AIDCALDPV

SEQ ID NO: 11726 - protein, 10 aa, synthetic construct
  source 1..10: note = Seed: AGEAANFCAL
AIEAANFCAA

SEQ ID NO: 11727 - protein, 10 aa, synthetic construct
  source 1..10: note = Seed: AGEAANFCAL
AIEAANFCAF

SEQ ID NO: 11728 - protein, 10 aa, synthetic construct
  source 1..10: note = Seed: AGEAANFCAL
AIEAANFCAL

SEQ ID NO: 11729 - protein, 10 aa, synthetic construct
  source 1..10: note = Seed: AGEAANFCAL
AIEAANFCAW

SEQ ID NO: 11730 - protein, 10 aa, synthetic construct
  source 1..10: note = Seed: AQFAPSASAF
AIFAPSASAF

SEQ ID NO: 11731 - protein, 11 aa, synthetic construct
  source 1..11: note = Seed: AQFAPSASAFF
AIFAPSASAFY

SEQ ID NO: 11732 - protein, 10 aa, synthetic construct
  source 1..10: note = Seed: AQFAPSASAF
AIFAPSASAM

SEQ ID NO: 11733 - protein, 10 aa, synthetic construct
  source 1..10: note = Seed: AQFAPSASAF
AIFAPSASAY

SEQ ID NO: 11734 - protein, 9 aa, synthetic construct
  source 1..9: note = Seed: AQFAPSASA
AIFAPSASF

SEQ ID NO: 11735 - protein, 9 aa, synthetic construct
  source 1..9: note = Seed: AQFAPSASA
AIFAPSASI

SEQ ID NO: 11736 - protein, 9 aa, synthetic construct
  source 1..9: note = Seed: AQFAPSASA
AIFAPSASL

SEQ ID NO: 11737 - protein, 9 aa, synthetic construct
  source 1..9: note = Seed: AQFAPSASA
AIFAPSASM

SEQ ID NO: 11738 - protein, 9 aa, synthetic construct
  source 1..9: note = Seed: AQFAPSASA
AIFAPSASV

SEQ ID NO: 11739 - protein, 9 aa, synthetic construct
  source 1..9: note = Seed: AQFAPSASA
AIFAPSASY

SEQ ID NO: 11740 - protein, 9 aa, synthetic construct
  source 1..9: note = Seed: ASFDNFKFV
AIFDNFKFA

SEQ ID NO: 11741 - protein, 9 aa, synthetic construct
  source 1..9: note = Seed: ASFDNFKFV
AIFDNFKFI

SEQ ID NO: 11742 - protein, 9 aa, synthetic construct
  source 1..9: note = Seed: ASFDNFKFV
AIFDNFKFL

SEQ ID NO: 11743 - protein, 9 aa, synthetic construct
  source 1..9: note = Seed: ASFDNFKFV
AIFDNFKFV

SEQ ID NO: 11744 - protein, 10 aa, synthetic construct
  source 1..10: note = Seed: ANFNVLFSTV
AIFNVLFSTA

SEQ ID NO: 11745 - protein, 10 aa, synthetic construct
  source 1..10: note = Seed: ANFNVLFSTV
AIFNVLFSTI

SEQ ID NO: 11746 - protein, 10 aa, synthetic construct
  source 1..10: note = Seed: ANFNVLFSTV
AIFNVLFSTV

SEQ ID NO: 11747 - protein, 10 aa, synthetic construct
  source 1..10: note = Seed: AGFPFNKWGK
AIFPFNKWGK

SEQ ID NO: 11748 - protein, 10 aa, synthetic construct
  source 1..10: note = Seed: AGFPFNKWGK
AIFPFNKWGR

SEQ ID NO: 11749 - protein, 10 aa, synthetic construct
  source 1..10: note = Seed: ASFRLFARTR
AIFRLFARTK

SEQ ID NO: 11750 - protein, 10 aa, synthetic construct
  source 1..10: note = Seed: ASFRLFARTR
AIFRLFARTR

SEQ ID NO: 11751 - protein, 9 aa, synthetic construct
  source 1..9: note = Seed: AGFSLWVYK
AIFSLWVYK

SEQ ID NO: 11752 - protein, 9 aa, synthetic construct
  source 1..9: note = Seed: AGFSLWVYK
AIFSLWVYR

SEQ ID NO: 11753 - protein, 9 aa, synthetic construct
  source 1..9: note = Seed: AGFSLWVYK
AIFSLWVYY

SEQ ID NO: 11754 - protein, 9 aa, synthetic construct
  source 1..9: note = Seed: ASFSTFKCY
AIFSTFKCF

SEQ ID NO: 11755 - protein, 9 aa, synthetic construct
  source 1..9: note = Seed: ASFSTFKCY
AIFSTFKCK

SEQ ID NO: 11756 - protein, 9 aa, synthetic construct
  source 1..9: note = Seed: ASFSTFKCY
AIFSTFKCY

SEQ ID NO: 11757 - protein, 9 aa, synthetic construct
  source 1..9: note = Seed: AIFYLITPV
AIFYLITPA

SEQ ID NO: 11758 - protein, 9 aa, synthetic construct
  source 1..9: note = Seed: AIFYLITPV
AIFYLITPF

SEQ ID NO: 11759 - protein, 9 aa, synthetic construct
  source 1..9: note = Seed: AIFYLITPV
AIFYLITPI

SEQ ID NO: 11760 - protein, 9 aa, synthetic construct
  source 1..9: note = Seed: AIFYLITPV
AIFYLITPL

SEQ ID NO: 11761 - protein, 9 aa, synthetic construct
  source 1..9: note = Seed: AIFYLITPV
AIFYLITPM

SEQ ID NO: 11762 - protein, 10 aa, synthetic construct
  source 1..10: note = Seed: AIFYLITPVH
AIFYLITPVV

SEQ ID NO: 11763 - protein, 9 aa, synthetic construct
  source 1..9: note = Seed: AIFYLITPV
AIFYLITPW

SEQ ID NO: 11764 - protein, 10 aa, synthetic construct
  source 1..10: note = Seed: ASFYYVWKSY
AIFYYVWKSK

SEQ ID NO: 11765 - protein, 11 aa, synthetic construct
  source 1..11: note = Seed: ASFYYVWKSYV
AIFYYVWKSYV

SEQ ID NO: 11766 - protein, 9 aa, synthetic construct
  source 1..9: note = Seed: AFGGCVFSY
AIGGCVFSY

SEQ ID NO: 11767 - protein, 9 aa, synthetic construct
  source 1..9: note = Seed: ANGQVFGLY
AIGQVFGLY

SEQ ID NO: 11768 - protein, 10 aa, synthetic construct
  source 1..10: note = Seed: ANGQVFGLYK
AIGQVFGLYK

SEQ ID NO: 11769 - protein, 10 aa, synthetic construct
  source 1..10: note = Seed: ANGQVFGLYK
AIGQVFGLYR

SEQ ID NO: 11770 - protein, 9 aa, synthetic construct
  source 1..9: note = Seed: AVHFISNSW
AIHFISNSW

SEQ ID NO: 11771 - protein, 10 aa, synthetic construct
  source 1..10: note = Seed: ALIISVTSNY
AIIISVTSNK

SEQ ID NO: 11772 - protein, 10 aa, synthetic construct
  source 1..10: note = Seed: ALIISVTSNY
AIIISVTSNY

SEQ ID NO: 11773 - protein, 9 aa, synthetic construct
  source 1..9: note = Seed: ASIKNFKSV
AIIKNFKSV

SEQ ID NO: 11774 - protein, 10 aa, synthetic construct
  source 1..10: note = Seed: AYILFTRFFY
AIILFTRFFK

SEQ ID NO: 11775 - protein, 10 aa, synthetic construct
  source 1..10: note = Seed: AYILFTRFFY
AIILFTRFFR

SEQ ID NO: 11776 - protein, 10 aa, synthetic construct
  source 1..10: note = Seed: AYILFTRFFY
AIILFTRFFY

SEQ ID NO: 11777 - protein, 11 aa, synthetic construct
  source 1..11: note = Seed: AYILFTRFFYV
AIILFTRFFYA

SEQ ID NO: 11778 - protein, 11 aa, synthetic construct
  source 1..11: note = Seed: AYILFTRFFYV
AIILFTRFFYI

SEQ ID NO: 11779 - protein, 11 aa, synthetic construct
  source 1..11: note = Seed: AYILFTRFFYV
AIILFTRFFYL

SEQ ID NO: 11780 - protein, 11 aa, synthetic construct
  source 1..11: note = Seed: AYILFTRFFYV
AIILFTRFFYV

SEQ ID NO: 11781 - protein, 9 aa, synthetic construct
  source 1..9: note = Seed: AAKKNNLPF
AIKKNNLPF

SEQ ID NO: 11782 - protein, 10 aa, synthetic construct
  source 1..10: note = Seed: AAKKNNLPFK
AIKKNNLPFK

SEQ ID NO: 11783 - protein, 9 aa, synthetic construct
  source 1..9: note = Seed: AAKKNNLPF
AIKKNNLPY

SEQ ID NO: 11784 - protein, 9 aa, synthetic construct
  source 1..9: note = Seed: AKKNNLPFK
AIKNNLPFA

SEQ ID NO: 11785 - protein, 9 aa, synthetic construct
  source 1..9: note = Seed: AKKNNLPFK
AIKNNLPFI

SEQ ID NO: 11786 - protein, 9 aa, synthetic construct
  source 1..9: note = Seed: AKKNNLPFK
AIKNNLPFK

SEQ ID NO: 11787 - protein, 9 aa, synthetic construct
  source 1..9: note = Seed: AKKNNLPFK
AIKNNLPFL

SEQ ID NO: 11788 - protein, 9 aa, synthetic construct
  source 1..9: note = Seed: AKKNNLPFK
AIKNNLPFM

SEQ ID NO: 11789 - protein, 9 aa, synthetic construct
  source 1..9: note = Seed: AKKNNLPFK
AIKNNLPFV

SEQ ID NO: 11790 - protein, 10 aa, synthetic construct
  source 1..10: note = Seed: AALALLLLDR
AILALLLLDK

SEQ ID NO: 11791 - protein, 10 aa, synthetic construct
  source 1..10: note = Seed: AALCTFLLNK
AILCTFLLNK

SEQ ID NO: 11792 - protein, 10 aa, synthetic construct
  source 1..10: note = Seed: AALCTFLLNK
AILCTFLLNR

SEQ ID NO: 11793 - protein, 10 aa, synthetic construct
  source 1..10: note = Seed: ASLINTLNDL
AILINTLNDI

SEQ ID NO: 11794 - protein, 10 aa, synthetic construct
  source 1..10: note = Seed: ASLINTLNDL
AILINTLNDV

SEQ ID NO: 11795 - protein, 9 aa, synthetic construct
  source 1..9: note = Seed: ASLNGVTLI
AILNGVTLV

SEQ ID NO: 11796 - protein, 9 aa, synthetic construct
  source 1..9: note = Seed: AQLPAPRTL
AILPAPRTY

SEQ ID NO: 11797 - protein, 10 aa, synthetic construct
  source 1..10: note = Seed: ATLQAIASEF
AILQAIASEY

SEQ ID NO: 11798 - protein, 11 aa, synthetic construct
  source 1..11: note = Seed: AALQIPFAMQM
AILQIPFAMQY

SEQ ID NO: 11799 - protein, 9 aa, synthetic construct
  source 1..9: note = Seed: AALQIPFAM
AILQIPFAY

SEQ ID NO: 11800 - protein, 9 aa, synthetic construct
  source 1..9: note = Seed: AVLQSGFRK
AILQSGFRK

SEQ ID NO: 11801 - protein, 9 aa, synthetic construct
  source 1..9: note = Seed: AVLQSGFRK
AILQSGFRR

SEQ ID NO: 11802 - protein, 9 aa, synthetic construct
  source 1..9: note = Seed: ALLSDLQDL
AILSDLQDV

SEQ ID NO: 11803 - protein, 9 aa, synthetic construct
  source 1..9: note = Seed: AMMFVKHKH
AIMFVKHKR

SEQ ID NO: 11804 - protein, 9 aa, synthetic construct
  source 1..9: note = Seed: ALNKATNNA
AINKATNNV

SEQ ID NO: 11805 - protein, 10 aa, synthetic construct
  source 1..10: note = Seed: ALNNIINNAR
AINNIINNAR

SEQ ID NO: 11806 - protein, 9 aa, synthetic construct
  source 1..9: note = Seed: ALNNIINNA
AINNIINNI

SEQ ID NO: 11807 - protein, 9 aa, synthetic construct
  source 1..9: note = Seed: ALNNIINNA
AINNIINNL

SEQ ID NO: 11808 - protein, 9 aa, synthetic construct
  source 1..9: note = Seed: ALNNIINNA
AINNIINNV

SEQ ID NO: 11809 - protein, 10 aa, synthetic construct
  source 1..10: note = Seed: AQNSVRVLQK
AINSVRVLQK

SEQ ID NO: 11810 - protein, 10 aa, synthetic construct
  source 1..10: note = Seed: AQNSVRVLQK
AINSVRVLQR

SEQ ID NO: 11811 - protein, 10 aa, synthetic construct
  source 1..10: note = Seed: AIPTNFTISV
AIPTNFTISL

SEQ ID NO: 11812 - protein, 10 aa, synthetic construct
  source 1..10: note = Seed: AIPTNFTISV
AIPTNFTISM

SEQ ID NO: 11813 - protein, 10 aa, synthetic construct
  source 1..10: note = Seed: ADQAMTQMYK
AIQAMTQMYK

SEQ ID NO: 11814 - protein, 10 aa, synthetic construct
  source 1..10: note = Seed: ADQAMTQMYK
AIQAMTQMYR

SEQ ID NO: 11815 - protein, 10 aa, synthetic construct
  source 1..10: note = Seed: ALQDAYYRAR
AIQDAYYRAR

SEQ ID NO: 11816 - protein, 9 aa, synthetic construct
  source 1..9: note = Seed: ALQDAYYRA
AIQDAYYRI

SEQ ID NO: 11817 - protein, 9 aa, synthetic construct
  source 1..9: note = Seed: ALQDAYYRA
AIQDAYYRL

SEQ ID NO: 11818 - protein, 9 aa, synthetic construct
  source 1..9: note = Seed: ALQDAYYRA
AIQDAYYRV

SEQ ID NO: 11819 - protein, 10 aa, synthetic construct
  source 1..10: note = Seed: ALQIPFAMQM
AIQIPFAMQF

SEQ ID NO: 11820 - protein, 10 aa, synthetic construct
  source 1..10: note = Seed: ALQIPFAMQM
AIQIPFAMQM

SEQ ID NO: 11821 - protein, 10 aa, synthetic construct
  source 1..10: note = Seed: ALQIPFAMQM
AIQIPFAMQV

SEQ ID NO: 11822 - protein, 10 aa, synthetic construct
  source 1..10: note = Seed: ALQIPFAMQM
AIQIPFAMQY

SEQ ID NO: 11823 - protein, 9 aa, synthetic construct
  source 1..9: note = Seed: AMQTMLFTM
AIQTMLFTA

SEQ ID NO: 11824 - protein, 9 aa, synthetic construct
  source 1..9: note = Seed: AMQTMLFTM
AIQTMLFTI

SEQ ID NO: 11825 - protein, 9 aa, synthetic construct
  source 1..9: note = Seed: AMQTMLFTM
AIQTMLFTL

SEQ ID NO: 11826 - protein, 9 aa, synthetic construct
  source 1..9: note = Seed: AMQTMLFTM
AIQTMLFTV

SEQ ID NO: 11827 - protein, 9 aa, synthetic construct
  source 1..9: note = Seed: AMQTMLFTM
AIQTMLFTW

SEQ ID NO: 11828 - protein, 9 aa, synthetic construct
  source 1..9: note = Seed: ALRANSAVK
AIRANSAVA

SEQ ID NO: 11829 - protein, 9 aa, synthetic construct
  source 1..9: note = Seed: ALRANSAVK
AIRANSAVK

SEQ ID NO: 11830 - protein, 9 aa, synthetic construct
  source 1..9: note = Seed: ATREAVGTN
AIREAVGTK

SEQ ID NO: 11831 - protein, 9 aa, synthetic construct
  source 1..9: note = Seed: ATRFASVYA
AIRFASVYA

SEQ ID NO: 11832 - protein, 9 aa, synthetic construct
  source 1..9: note = Seed: ATRFASVYA
AIRFASVYG

SEQ ID NO: 11833 - protein, 9 aa, synthetic construct
  source 1..9: note = Seed: ATRFASVYA
AIRFASVYI

SEQ ID NO: 11834 - protein, 9 aa, synthetic construct
  source 1..9: note = Seed: ATRFASVYA
AIRFASVYK

SEQ ID NO: 11835 - protein, 9 aa, synthetic construct
  source 1..9: note = Seed: ATRFASVYA
AIRFASVYL

SEQ ID NO: 11836 - protein, 9 aa, synthetic construct
  source 1..9: note = Seed: ATRFASVYA
AIRFASVYM

SEQ ID NO: 11837 - protein, 9 aa, synthetic construct
  source 1..9: note = Seed: ATRFASVYA
AIRFASVYS

SEQ ID NO: 11838 - protein, 9 aa, synthetic construct
  source 1..9: note = Seed: ATRFASVYA
AIRFASVYT

SEQ ID NO: 11839 - protein, 9 aa, synthetic construct
  source 1..9: note = Seed: ATRFASVYA
AIRFASVYV

SEQ ID NO: 11840 - protein, 9 aa, synthetic construct
  source 1..9: note = Seed: ATRFASVYA
AIRFASVYY

SEQ ID NO: 11841 - protein, 9 aa, synthetic construct
  source 1..9: note = Seed: AYRFNGIGV
AIRFNGIGK

SEQ ID NO: 11842 - protein, 9 aa, synthetic construct
  source 1..9: note = Seed: AWRKAVFIS
AIRKAVFIA

SEQ ID NO: 11843 - protein, 9 aa, synthetic construct
  source 1..9: note = Seed: AWRKAVFIS
AIRKAVFII

SEQ ID NO: 11844 - protein, 9 aa, synthetic construct
  source 1..9: note = Seed: AWRKAVFIS
AIRKAVFIK

SEQ ID NO: 11845 - protein, 9 aa, synthetic construct
  source 1..9: note = Seed: AWRKAVFIS
AIRKAVFIV

SEQ ID NO: 11846 - protein, 9 aa, synthetic construct
  source 1..9: note = Seed: AMRNAGIVG
AIRNAGIVA

SEQ ID NO: 11847 - protein, 9 aa, synthetic construct
  source 1..9: note = Seed: AMRNAGIVG
AIRNAGIVF

SEQ ID NO: 11848 - protein, 10 aa, synthetic construct
  source 1..10: note = Seed: AMRNAGIVGV
AIRNAGIVGK

SEQ ID NO: 11849 - protein, 10 aa, synthetic construct
  source 1..10: note = Seed: AMRNAGIVGV
AIRNAGIVGV

SEQ ID NO: 11850 - protein, 9 aa, synthetic construct
  source 1..9: note = Seed: AMRNAGIVG
AIRNAGIVI

SEQ ID NO: 11851 - protein, 9 aa, synthetic construct
  source 1..9: note = Seed: AMRNAGIVG
AIRNAGIVK

SEQ ID NO: 11852 - protein, 9 aa, synthetic construct
  source 1..9: note = Seed: AMRNAGIVG
AIRNAGIVM

SEQ ID NO: 11853 - protein, 9 aa, synthetic construct
  source 1..9: note = Seed: AMRNAGIVG
AIRNAGIVV

SEQ ID NO: 11854 - protein, 9 aa, synthetic construct
  source 1..9: note = Seed: AMRNAGIVG
AIRNAGIVY

SEQ ID NO: 11855 - protein, 9 aa, synthetic construct
  source 1..9: note = Seed: AARQGFVDS
AIRQGFVDK

SEQ ID NO: 11856 - protein, 9 aa, synthetic construct
  source 1..9: note = Seed: ATSACVLAA
AISACVLAV

SEQ ID NO: 11857 - protein, 10 aa, synthetic construct
  source 1..10: note = Seed: AMSAFAMMFV
AISAFAMMFI

SEQ ID NO: 11858 - protein, 10 aa, synthetic construct
  source 1..10: note = Seed: AMSAFAMMFV
AISAFAMMFL

SEQ ID NO: 11859 - protein, 10 aa, synthetic construct
  source 1..10: note = Seed: AMSAFAMMFV
AISAFAMMFV

SEQ ID NO: 11860 - protein, 11 aa, synthetic construct
  source 1..11: note = Seed: AMSAFAMMFVK
AISAFAMMFVK

SEQ ID NO: 11861 - protein, 9 aa, synthetic construct
  source 1..9: note = Seed: AMSAFAMMF
AISAFAMMI

SEQ ID NO: 11862 - protein, 9 aa, synthetic construct
  source 1..9: note = Seed: AMSAFAMMF
AISAFAMML

SEQ ID NO: 11863 - protein, 9 aa, synthetic construct
  source 1..9: note = Seed: AMSAFAMMF
AISAFAMMV

SEQ ID NO: 11864 - protein, 9 aa, synthetic construct
  source 1..9: note = Seed: AMSAFAMMF
AISAFAMMY

SEQ ID NO: 11865 - protein, 10 aa, synthetic construct
  source 1..10: note = Seed: APSASAFFGM
AISASAFFGW

SEQ ID NO: 11866 - protein, 11 aa, synthetic construct
  source 1..11: note = Seed: AYSRYRIGNYK
AISRYRIGNYR

SEQ ID NO: 11867 - protein, 9 aa, synthetic construct
  source 1..9: note = Seed: ASSSEAFLI
AISSEAFLW

SEQ ID NO: 11868 - protein, 9 aa, synthetic construct
  source 1..9: note = Seed: AISSVLNDI
AISSVLNDV

SEQ ID NO: 11869 - protein, 10 aa, synthetic construct
  source 1..10: note = Seed: AVTANVNALL
AITANVNALL

SEQ ID NO: 11870 - protein, 10 aa, synthetic construct
  source 1..10: note = Seed: AVTANVNALL
AITANVNALV

SEQ ID NO: 11871 - protein, 9 aa, synthetic construct
  source 1..9: note = Seed: ATTAYANSV
AITAYANSV

SEQ ID NO: 11872 - protein, 10 aa, synthetic construct
  source 1..10: note = Seed: ATTAYANSVF
AITAYANSVF

SEQ ID NO: 11873 - protein, 10 aa, synthetic construct
  source 1..10: note = Seed: ATTAYANSVF
AITAYANSVW

SEQ ID NO: 11874 - protein, 10 aa, synthetic construct
  source 1..10: note = Seed: ATTAYANSVF
AITAYANSVY

SEQ ID NO: 11875 - protein, 10 aa, synthetic construct
  source 1..10: note = Seed: AGTDLEGNFY
AITDLEGNFY

SEQ ID NO: 11876 - protein, 10 aa, synthetic construct
  source 1..10: note = Seed: ATTRQVVNVV
AITRQVVNVK

SEQ ID NO: 11877 - protein, 10 aa, synthetic construct
  source 1..10: note = Seed: ASTSAFVETV
AITSAFVETV

SEQ ID NO: 11878 - protein, 9 aa, synthetic construct
  source 1..9: note = Seed: ATVAYFNMV
AIVAYFNMA

SEQ ID NO: 11879 - protein, 9 aa, synthetic construct
  source 1..9: note = Seed: ATVAYFNMV
AIVAYFNMI

SEQ ID NO: 11880 - protein, 9 aa, synthetic construct
  source 1..9: note = Seed: ATVAYFNMV
AIVAYFNML

SEQ ID NO: 11881 - protein, 9 aa, synthetic construct
  source 1..9: note = Seed: ATVAYFNMV
AIVAYFNMV

SEQ ID NO: 11882 - protein, 10 aa, synthetic construct
  source 1..10: note = Seed: ATVAYFNMVY
AIVAYFNMVK

SEQ ID NO: 11883 - protein, 10 aa, synthetic construct
  source 1..10: note = Seed: ATVAYFNMVY
AIVAYFNMVR

SEQ ID NO: 11884 - protein, 10 aa, synthetic construct
  source 1..10: note = Seed: ATVAYFNMVY
AIVAYFNMVY

SEQ ID NO: 11885 - protein, 9 aa, synthetic construct
  source 1..9: note = Seed: AVVCFNSTY
AIVCFNSTF

SEQ ID NO: 11886 - protein, 9 aa, synthetic construct
  source 1..9: note = Seed: AVVCFNSTY
AIVCFNSTK

SEQ ID NO: 11887 - protein, 9 aa, synthetic construct
  source 1..9: note = Seed: AVVCFNSTY
AIVCFNSTY

SEQ ID NO: 11888 - protein, 10 aa, synthetic construct
  source 1..10: note = Seed: AVVCFNSTYA
AIVCFNSTYV

SEQ ID NO: 11889 - protein, 9 aa, synthetic construct
  source 1..9: note = Seed: AAVDALCEK
AIVDALCEK

SEQ ID NO: 11890 - protein, 10 aa, synthetic construct
  source 1..10: note = Seed: AMVRMYIFFA
AIVRMYIFFV

SEQ ID NO: 11891 - protein, 9 aa, synthetic construct
  source 1..9: note = Seed: ASVYYSQLM
AIVYYSQLF

SEQ ID NO: 11892 - protein, 9 aa, synthetic construct
  source 1..9: note = Seed: ASVYYSQLM
AIVYYSQLY

SEQ ID NO: 11893 - protein, 8 aa, synthetic construct
  source 1..8: note = Seed: AYYFMRFR
AIYFMRFR

SEQ ID NO: 11894 - protein, 9 aa, synthetic construct
  source 1..9: note = Seed: AYYFMRFRR
AIYFMRFRK

SEQ ID NO: 11895 - protein, 9 aa, synthetic construct
  source 1..9: note = Seed: AYYFMRFRR
AIYFMRFRR

SEQ ID NO: 11896 - protein, 9 aa, synthetic construct
  source 1..9: note = Seed: AWYTERSEK
AIYTERSER

SEQ ID NO: 11897 - protein, 9 aa, synthetic construct
  source 1..9: note = Seed: AMYTPHTVL
AIYTPHTVF

SEQ ID NO: 11898 - protein, 9 aa, synthetic construct
  source 1..9: note = Seed: AMYTPHTVL
AIYTPHTVL

SEQ ID NO: 11899 - protein, 9 aa, synthetic construct
  source 1..9: note = Seed: AMYTPHTVL
AIYTPHTVM

SEQ ID NO: 11900 - protein, 9 aa, synthetic construct
  source 1..9: note = Seed: AMYTPHTVL
AIYTPHTVY

SEQ ID NO: 11901 - protein, 10 aa, synthetic construct
  source 1..10: note = Seed: AKYTQLCQYL
AIYTQLCQYF

SEQ ID NO: 11902 - protein, 10 aa, synthetic construct
  source 1..10: note = Seed: AYYVGYLQPR
AIYVGYLQPR

SEQ ID NO: 11903 - protein, 9 aa, synthetic construct
  source 1..9: note = Seed: AGAALQIPF
AKAALQIPF

SEQ ID NO: 11904 - protein, 9 aa, synthetic construct
  source 1..9: note = Seed: AGAALQIPF
AKAALQIPL

SEQ ID NO: 11905 - protein, 9 aa, synthetic construct
  source 1..9: note = Seed: AGAALQIPF
AKAALQIPM

SEQ ID NO: 11906 - protein, 9 aa, synthetic construct
  source 1..9: note = Seed: AGAALQIPF
AKAALQIPY

SEQ ID NO: 11907 - protein, 9 aa, synthetic construct
  source 1..9: note = Seed: AMACLVGLM
AKACLVGLF

SEQ ID NO: 11908 - protein, 9 aa, synthetic construct
  source 1..9: note = Seed: AMACLVGLM
AKACLVGLY

SEQ ID NO: 11909 - protein, 9 aa, synthetic construct
  source 1..9: note = Seed: ARAGEAANF
AKAGEAANF

SEQ ID NO: 11910 - protein, 9 aa, synthetic construct
  source 1..9: note = Seed: ARAGEAANF
AKAGEAANY

SEQ ID NO: 11911 - protein, 9 aa, synthetic construct
  source 1..9: note = Seed: AIASEFSSL
AKASEFSSF

SEQ ID NO: 11912 - protein, 9 aa, synthetic construct
  source 1..9: note = Seed: AIASEFSSL
AKASEFSSI

SEQ ID NO: 11913 - protein, 9 aa, synthetic construct
  source 1..9: note = Seed: AIASEFSSL
AKASEFSSL

SEQ ID NO: 11914 - protein, 9 aa, synthetic construct
  source 1..9: note = Seed: AIASEFSSL
AKASEFSSM

SEQ ID NO: 11915 - protein, 9 aa, synthetic construct
  source 1..9: note = Seed: AIASEFSSL
AKASEFSSY

SEQ ID NO: 11916 - protein, 10 aa, synthetic construct
  source 1..10: note = Seed: AFAVDAAKAY
AKAVDAAKAF

SEQ ID NO: 11917 - protein, 10 aa, synthetic construct
  source 1..10: note = Seed: AFAVDAAKAY
AKAVDAAKAY

SEQ ID NO: 11918 - protein, 9 aa, synthetic construct
  source 1..9: note = Seed: AGDSGFAAY
AKDSGFAAF

SEQ ID NO: 11919 - protein, 9 aa, synthetic construct
  source 1..9: note = Seed: AGDSGFAAY
AKDSGFAAM

SEQ ID NO: 11920 - protein, 9 aa, synthetic construct
  source 1..9: note = Seed: AGDSGFAAY
AKDSGFAAY

SEQ ID NO: 11921 - protein, 10 aa, synthetic construct
  source 1..10: note = Seed: AGEAANFCAL
AKEAANFCAA

SEQ ID NO: 11922 - protein, 10 aa, synthetic construct
  source 1..10: note = Seed: AGEAANFCAL
AKEAANFCAF

SEQ ID NO: 11923 - protein, 10 aa, synthetic construct
  source 1..10: note = Seed: AGEAANFCAL
AKEAANFCAL

SEQ ID NO: 11924 - protein, 10 aa, synthetic construct
  source 1..10: note = Seed: AGEAANFCAL
AKEAANFCAW

SEQ ID NO: 11925 - protein, 10 aa, synthetic construct
  source 1..10: note = Seed: AQFAPSASAF
AKFAPSASAF

SEQ ID NO: 11926 - protein, 11 aa, synthetic construct
  source 1..11: note = Seed: AQFAPSASAFF
AKFAPSASAFF

SEQ ID NO: 11927 - protein, 11 aa, synthetic construct
  source 1..11: note = Seed: AQFAPSASAFF
AKFAPSASAFM

SEQ ID NO: 11928 - protein, 11 aa, synthetic construct
  source 1..11: note = Seed: AQFAPSASAFF
AKFAPSASAFY

SEQ ID NO: 11929 - protein, 10 aa, synthetic construct
  source 1..10: note = Seed: AQFAPSASAF
AKFAPSASAL

SEQ ID NO: 11930 - protein, 10 aa, synthetic construct
  source 1..10: note = Seed: AQFAPSASAF
AKFAPSASAM

SEQ ID NO: 11931 - protein, 10 aa, synthetic construct
  source 1..10: note = Seed: AQFAPSASAF
AKFAPSASAY

SEQ ID NO: 11932 - protein, 9 aa, synthetic construct
  source 1..9: note = Seed: AQFAPSASA
AKFAPSASF

SEQ ID NO: 11933 - protein, 9 aa, synthetic construct
  source 1..9: note = Seed: AQFAPSASA
AKFAPSASH

SEQ ID NO: 11934 - protein, 9 aa, synthetic construct
  source 1..9: note = Seed: AQFAPSASA
AKFAPSASI

SEQ ID NO: 11935 - protein, 9 aa, synthetic construct
  source 1..9: note = Seed: AQFAPSASA
AKFAPSASL

SEQ ID NO: 11936 - protein, 9 aa, synthetic construct
  source 1..9: note = Seed: AQFAPSASA
AKFAPSASM

SEQ ID NO: 11937 - protein, 9 aa, synthetic construct
  source 1..9: note = Seed: AQFAPSASA
AKFAPSASV

SEQ ID NO: 11938 - protein, 9 aa, synthetic construct
  source 1..9: note = Seed: AQFAPSASA
AKFAPSASW

SEQ ID NO: 11939 - protein, 9 aa, synthetic construct
  source 1..9: note = Seed: AQFAPSASA
AKFAPSASY

SEQ ID NO: 11940 - protein, 11 aa, synthetic construct
  source 1..11: note = Seed: ANFNVLFSTVF
AKFNVLFSTVF

SEQ ID NO: 11941 - protein, 11 aa, synthetic construct
  source 1..11: note = Seed: ANFNVLFSTVF
AKFNVLFSTVM

SEQ ID NO: 11942 - protein, 11 aa, synthetic construct
  source 1..11: note = Seed: ANFNVLFSTVF
AKFNVLFSTVY

SEQ ID NO: 11943 - protein, 9 aa, synthetic construct
  source 1..9: note = Seed: AGFSLWVYK
AKFSLWVYR

SEQ ID NO: 11944 - protein, 9 aa, synthetic construct
  source 1..9: note = Seed: ASFSTFKCY
AKFSTFKCF

SEQ ID NO: 11945 - protein, 9 aa, synthetic construct
  source 1..9: note = Seed: ASFSTFKCY
AKFSTFKCL

SEQ ID NO: 11946 - protein, 9 aa, synthetic construct
  source 1..9: note = Seed: ASFSTFKCY
AKFSTFKCM

SEQ ID NO: 11947 - protein, 9 aa, synthetic construct
  source 1..9: note = Seed: ASFSTFKCY
AKFSTFKCY

SEQ ID NO: 11948 - protein, 10 aa, synthetic construct
  source 1..10: note = Seed: ASFYYVWKSY
AKFYYVWKSF

SEQ ID NO: 11949 - protein, 10 aa, synthetic construct
  source 1..10: note = Seed: ASFYYVWKSY
AKFYYVWKSY

SEQ ID NO: 11950 - protein, 10 aa, synthetic construct
  source 1..10: note = Seed: ALIISVTSNY
AKIISVTSNF

SEQ ID NO: 11951 - protein, 10 aa, synthetic construct
  source 1..10: note = Seed: ALIISVTSNY
AKIISVTSNK

SEQ ID NO: 11952 - protein, 10 aa, synthetic construct
  source 1..10: note = Seed: ALIISVTSNY
AKIISVTSNY

SEQ ID NO: 11953 - protein, 10 aa, synthetic construct
  source 1..10: note = Seed: AYILFTRFFY
AKILFTRFFK

SEQ ID NO: 11954 - protein, 10 aa, synthetic construct
  source 1..10: note = Seed: AYILFTRFFY
AKILFTRFFR

SEQ ID NO: 11955 - protein, 10 aa, synthetic construct
  source 1..10: note = Seed: AYILFTRFFY
AKILFTRFFY

SEQ ID NO: 11956 - protein, 11 aa, synthetic construct
  source 1..11: note = Seed: AYILFTRFFYV
AKILFTRFFYA

SEQ ID NO: 11957 - protein, 11 aa, synthetic construct
  source 1..11: note = Seed: AYILFTRFFYV
AKILFTRFFYI

SEQ ID NO: 11958 - protein, 11 aa, synthetic construct
  source 1..11: note = Seed: AYILFTRFFYV
AKILFTRFFYL

SEQ ID NO: 11959 - protein, 11 aa, synthetic construct
  source 1..11: note = Seed: AYILFTRFFYV
AKILFTRFFYV

SEQ ID NO: 11960 - protein, 11 aa, synthetic construct
  source 1..11: note = Seed: AHISTIGVCSM
AKISTIGVCSF

SEQ ID NO: 11961 - protein, 11 aa, synthetic construct
  source 1..11: note = Seed: AHISTIGVCSM
AKISTIGVCSY

SEQ ID NO: 11962 - protein, 9 aa, synthetic construct
  source 1..9: note = Seed: AAKKNNLPF
AKKKNNLPF

SEQ ID NO: 11963 - protein, 9 aa, synthetic construct
  source 1..9: note = Seed: AAKKNNLPF
AKKKNNLPM

SEQ ID NO: 11964 - protein, 9 aa, synthetic construct
  source 1..9: note = Seed: AAKKNNLPF
AKKKNNLPY

SEQ ID NO: 11965 - protein, 10 aa, synthetic construct
  source 1..10: note = Seed: AALCTFLLNK
AKLCTFLLNK

SEQ ID NO: 11966 - protein, 10 aa, synthetic construct
  source 1..10: note = Seed: AALCTFLLNK
AKLCTFLLNR

SEQ ID NO: 11967 - protein, 10 aa, synthetic construct
  source 1..10: note = Seed: ASLINTLNDL
AKLINTLNDI

SEQ ID NO: 11968 - protein, 10 aa, synthetic construct
  source 1..10: note = Seed: ASLINTLNDL
AKLINTLNDV

SEQ ID NO: 11969 - protein, 9 aa, synthetic construct
  source 1..9: note = Seed: AQLPAPRTL
AKLPAPRTF

SEQ ID NO: 11970 - protein, 10 aa, synthetic construct
  source 1..10: note = Seed: AQLPAPRTLL
AKLPAPRTLF

SEQ ID NO: 11971 - protein, 10 aa, synthetic construct
  source 1..10: note = Seed: AQLPAPRTLL
AKLPAPRTLY

SEQ ID NO: 11972 - protein, 9 aa, synthetic construct
  source 1..9: note = Seed: AQLPAPRTL
AKLPAPRTM

SEQ ID NO: 11973 - protein, 9 aa, synthetic construct
  source 1..9: note = Seed: AQLPAPRTL
AKLPAPRTY

SEQ ID NO: 11974 - protein, 10 aa, synthetic construct
  source 1..10: note = Seed: ATLQAIASEF
AKLQAIASEF

SEQ ID NO: 11975 - protein, 10 aa, synthetic construct
  source 1..10: note = Seed: ATLQAIASEF
AKLQAIASEY

SEQ ID NO: 11976 - protein, 9 aa, synthetic construct
  source 1..9: note = Seed: AALQIPFAM
AKLQIPFAF

SEQ ID NO: 11977 - protein, 9 aa, synthetic construct
  source 1..9: note = Seed: AALQIPFAM
AKLQIPFAM

SEQ ID NO: 11978 - protein, 11 aa, synthetic construct
  source 1..11: note = Seed: AALQIPFAMQM
AKLQIPFAMQF

SEQ ID NO: 11979 - protein, 11 aa, synthetic construct
  source 1..11: note = Seed: AALQIPFAMQM
AKLQIPFAMQY

SEQ ID NO: 11980 - protein, 9 aa, synthetic construct
  source 1..9: note = Seed: AALQIPFAM
AKLQIPFAY

SEQ ID NO: 11981 - protein, 10 aa, synthetic construct
  source 1..10: note = Seed: AIPTNFTISV
AKPTNFTISL

SEQ ID NO: 11982 - protein, 10 aa, synthetic construct
  source 1..10: note = Seed: AIPTNFTISV
AKPTNFTISM

SEQ ID NO: 11983 - protein, 10 aa, synthetic construct
  source 1..10: note = Seed: ADQAMTQMYK
AKQAMTQMYK

SEQ ID NO: 11984 - protein, 10 aa, synthetic construct
  source 1..10: note = Seed: ADQAMTQMYK
AKQAMTQMYR

SEQ ID NO: 11985 - protein, 10 aa, synthetic construct
  source 1..10: note = Seed: ALQIPFAMQM
AKQIPFAMQF

SEQ ID NO: 11986 - protein, 10 aa, synthetic construct
  source 1..10: note = Seed: ALQIPFAMQM
AKQIPFAMQM

SEQ ID NO: 11987 - protein, 10 aa, synthetic construct
  source 1..10: note = Seed: ALQIPFAMQM
AKQIPFAMQV

SEQ ID NO: 11988 - protein, 10 aa, synthetic construct
  source 1..10: note = Seed: ALQIPFAMQM
AKQIPFAMQY

SEQ ID NO: 11989 - protein, 9 aa, synthetic construct
  source 1..9: note = Seed: AMQTMLFTM
AKQTMLFTF

SEQ ID NO: 11990 - protein, 9 aa, synthetic construct
  source 1..9: note = Seed: AMQTMLFTM
AKQTMLFTM

SEQ ID NO: 11991 - protein, 9 aa, synthetic construct
  source 1..9: note = Seed: AMQTMLFTM
AKQTMLFTY

SEQ ID NO: 11992 - protein, 9 aa, synthetic construct
  source 1..9: note = Seed: ATRFASVYA
AKRFASVYK

SEQ ID NO: 11993 - protein, 9 aa, synthetic construct
  source 1..9: note = Seed: AMRNAGIVG
AKRNAGIVF

SEQ ID NO: 11994 - protein, 9 aa, synthetic construct
  source 1..9: note = Seed: AMRNAGIVG
AKRNAGIVL

SEQ ID NO: 11995 - protein, 9 aa, synthetic construct
  source 1..9: note = Seed: AMRNAGIVG
AKRNAGIVM

SEQ ID NO: 11996 - protein, 9 aa, synthetic construct
  source 1..9: note = Seed: AMRNAGIVG
AKRNAGIVY

SEQ ID NO: 11997 - protein, 9 aa, synthetic construct
  source 1..9: note = Seed: AMSAFAMMF
AKSAFAMMF

SEQ ID NO: 11998 - protein, 9 aa, synthetic construct
  source 1..9: note = Seed: AMSAFAMMF
AKSAFAMML

SEQ ID NO: 11999 - protein, 9 aa, synthetic construct
  source 1..9: note = Seed: AMSAFAMMF
AKSAFAMMM

SEQ ID NO: 12000 - protein, 9 aa, synthetic construct
  source 1..9: note = Seed: AMSAFAMMF
AKSAFAMMY

SEQ ID NO: 12001 - protein, 10 aa, synthetic construct
  source 1..10: note = Seed: APSASAFFGM
AKSASAFFGW

SEQ ID NO: 12002 - protein, 9 aa, synthetic construct
  source 1..9: note = Seed: AHSCNVNRF
AKSCNVNRF

SEQ ID NO: 12003 - protein, 10 aa, synthetic construct
  source 1..10: note = Seed: AVTANVNALL
AKTANVNALV

SEQ ID NO: 12004 - protein, 10 aa, synthetic construct
  source 1..10: note = Seed: ATTAYANSVF
AKTAYANSVF

SEQ ID NO: 12005 - protein, 10 aa, synthetic construct
  source 1..10: note = Seed: ATTAYANSVF
AKTAYANSVM

SEQ ID NO: 12006 - protein, 10 aa, synthetic construct
  source 1..10: note = Seed: ATTAYANSVF
AKTAYANSVW

SEQ ID NO: 12007 - protein, 10 aa, synthetic construct
  source 1..10: note = Seed: ATTAYANSVF
AKTAYANSVY

SEQ ID NO: 12008 - protein, 9 aa, synthetic construct
  source 1..9: note = Seed: ALTCFSTQF
AKTCFSTQF

SEQ ID NO: 12009 - protein, 9 aa, synthetic construct
  source 1..9: note = Seed: ALTCFSTQF
AKTCFSTQM

SEQ ID NO: 12010 - protein, 9 aa, synthetic construct
  source 1..9: note = Seed: ALTCFSTQF
AKTCFSTQY

SEQ ID NO: 12011 - protein, 10 aa, synthetic construct
  source 1..10: note = Seed: AGTDLEGNFY
AKTDLEGNFY

SEQ ID NO: 12012 - protein, 10 aa, synthetic construct
  source 1..10: note = Seed: ATTRQVVNVV
AKTRQVVNVK

SEQ ID NO: 12013 - protein, 10 aa, synthetic construct
  source 1..10: note = Seed: ATVAYFNMVY
AKVAYFNMVF

SEQ ID NO: 12014 - protein, 10 aa, synthetic construct
  source 1..10: note = Seed: ATVAYFNMVY
AKVAYFNMVK

SEQ ID NO: 12015 - protein, 10 aa, synthetic construct
  source 1..10: note = Seed: ATVAYFNMVY
AKVAYFNMVM

SEQ ID NO: 12016 - protein, 10 aa, synthetic construct
  source 1..10: note = Seed: ATVAYFNMVY
AKVAYFNMVR

SEQ ID NO: 12017 - protein, 10 aa, synthetic construct
  source 1..10: note = Seed: ATVAYFNMVY
AKVAYFNMVY

SEQ ID NO: 12018 - protein, 9 aa, synthetic construct
  source 1..9: note = Seed: AVVCFNSTY
AKVCFNSTF

SEQ ID NO: 12019 - protein, 9 aa, synthetic construct
  source 1..9: note = Seed: AVVCFNSTY
AKVCFNSTL

SEQ ID NO: 12020 - protein, 9 aa, synthetic construct
  source 1..9: note = Seed: AVVCFNSTY
AKVCFNSTM

SEQ ID NO: 12021 - protein, 9 aa, synthetic construct
  source 1..9: note = Seed: AVVCFNSTY
AKVCFNSTY

SEQ ID NO: 12022 - protein, 9 aa, synthetic construct
  source 1..9: note = Seed: ARVECFDKF
AKVECFDKF

SEQ ID NO: 12023 - protein, 9 aa, synthetic construct
  source 1..9: note = Seed: ARVECFDKF
AKVECFDKY

SEQ ID NO: 12024 - protein, 9 aa, synthetic construct
  source 1..9: note = Seed: AMVRMYIFF
AKVRMYIFF

SEQ ID NO: 12025 - protein, 10 aa, synthetic construct
  source 1..10: note = Seed: AMVRMYIFFA
AKVRMYIFFK

SEQ ID NO: 12026 - protein, 9 aa, synthetic construct
  source 1..9: note = Seed: AMVRMYIFF
AKVRMYIFY

SEQ ID NO: 12027 - protein, 9 aa, synthetic construct
  source 1..9: note = Seed: AGVSICSTM
AKVSICSTF

SEQ ID NO: 12028 - protein, 9 aa, synthetic construct
  source 1..9: note = Seed: AGVSICSTM
AKVSICSTL

SEQ ID NO: 12029 - protein, 9 aa, synthetic construct
  source 1..9: note = Seed: AGVSICSTM
AKVSICSTM

SEQ ID NO: 12030 - protein, 9 aa, synthetic construct
  source 1..9: note = Seed: AGVSICSTM
AKVSICSTY

SEQ ID NO: 12031 - protein, 10 aa, synthetic construct
  source 1..10: note = Seed: AKVTSAMQTM
AKVTSAMQTF

SEQ ID NO: 12032 - protein, 10 aa, synthetic construct
  source 1..10: note = Seed: AKVTSAMQTM
AKVTSAMQTY

SEQ ID NO: 12033 - protein, 9 aa, synthetic construct
  source 1..9: note = Seed: ASVYYSQLM
AKVYYSQLF

SEQ ID NO: 12034 - protein, 9 aa, synthetic construct
  source 1..9: note = Seed: ASVYYSQLM
AKVYYSQLL

SEQ ID NO: 12035 - protein, 9 aa, synthetic construct
  source 1..9: note = Seed: ASVYYSQLM
AKVYYSQLM

SEQ ID NO: 12036 - protein, 9 aa, synthetic construct
  source 1..9: note = Seed: ASVYYSQLM
AKVYYSQLY

SEQ ID NO: 12037 - protein, 9 aa, synthetic construct
  source 1..9: note = Seed: AEWFLAYIL
AKWFLAYIF

SEQ ID NO: 12038 - protein, 9 aa, synthetic construct
  source 1..9: note = Seed: AEWFLAYIL
AKWFLAYIM

SEQ ID NO: 12039 - protein, 9 aa, synthetic construct
  source 1..9: note = Seed: AEWFLAYIL
AKWFLAYIY

SEQ ID NO: 12040 - protein, 9 aa, synthetic construct
  source 1..9: note = Seed: AMYTPHTVL
AKYTPHTVF

SEQ ID NO: 12041 - protein, 9 aa, synthetic construct
  source 1..9: note = Seed: AMYTPHTVL
AKYTPHTVI

SEQ ID NO: 12042 - protein, 9 aa, synthetic construct
  source 1..9: note = Seed: AMYTPHTVL
AKYTPHTVL

SEQ ID NO: 12043 - protein, 9 aa, synthetic construct
  source 1..9: note = Seed: AMYTPHTVL
AKYTPHTVM

SEQ ID NO: 12044 - protein, 9 aa, synthetic construct
  source 1..9: note = Seed: AMYTPHTVL
AKYTPHTVY

SEQ ID NO: 12045 - protein, 9 aa, synthetic construct
  source 1..9: note = Seed: AKYTQLCQY
AKYTQLCQF

SEQ ID NO: 12046 - protein, 9 aa, synthetic construct
  source 1..9: note = Seed: AKYTQLCQY
AKYTQLCQM

SEQ ID NO: 12047 - protein, 10 aa, synthetic construct
  source 1..10: note = Seed: AKYTQLCQYL
AKYTQLCQYF

SEQ ID NO: 12048 - protein, 10 aa, synthetic construct
  source 1..10: note = Seed: AKYTQLCQYL
AKYTQLCQYY

SEQ ID NO: 12049 - protein, 8 aa, synthetic construct
  source 1..8: note = Seed: AQYTSALL
AKYTSALF

SEQ ID NO: 12050 - protein, 8 aa, synthetic construct
  source 1..8: note = Seed: AQYTSALL
AKYTSALY

SEQ ID NO: 12051 - protein, 9 aa, synthetic construct
  source 1..9: note = Seed: AGAALQIPF
ALAALQIPF

SEQ ID NO: 12052 - protein, 9 aa, synthetic construct
  source 1..9: note = Seed: AGAALQIPF
ALAALQIPM

SEQ ID NO: 12053 - protein, 9 aa, synthetic construct
  source 1..9: note = Seed: AGAALQIPF
ALAALQIPY

SEQ ID NO: 12054 - protein, 9 aa, synthetic construct
  source 1..9: note = Seed: AMACLVGLM
ALACLVGLA

SEQ ID NO: 12055 - protein, 9 aa, synthetic construct
  source 1..9: note = Seed: AMACLVGLM
ALACLVGLI

SEQ ID NO: 12056 - protein, 9 aa, synthetic construct
  source 1..9: note = Seed: AMACLVGLM
ALACLVGLL

SEQ ID NO: 12057 - protein, 9 aa, synthetic construct
  source 1..9: note = Seed: AMACLVGLM
ALACLVGLM

SEQ ID NO: 12058 - protein, 11 aa, synthetic construct
  source 1..11: note = Seed: AMACLVGLMWL
ALACLVGLMWV

SEQ ID NO: 12059 - protein, 9 aa, synthetic construct
  source 1..9: note = Seed: AMACLVGLM
ALACLVGLV

SEQ ID NO: 12060 - protein, 9 aa, synthetic construct
  source 1..9: note = Seed: AMACLVGLM
ALACLVGLY

SEQ ID NO: 12061 - protein, 10 aa, synthetic construct
  source 1..10: note = Seed: ALALLLLDRL
ALALLLLDRV

SEQ ID NO: 12062 - protein, 9 aa, synthetic construct
  source 1..9: note = Seed: AVANGDSEV
ALANGDSEI

SEQ ID NO: 12063 - protein, 9 aa, synthetic construct
  source 1..9: note = Seed: AVANGDSEV
ALANGDSEL

SEQ ID NO: 12064 - protein, 9 aa, synthetic construct
  source 1..9: note = Seed: AVANGDSEV
ALANGDSEV

SEQ ID NO: 12065 - protein, 9 aa, synthetic construct
  source 1..9: note = Seed: AIASEFSSL
ALASEFSSA

SEQ ID NO: 12066 - protein, 9 aa, synthetic construct
  source 1..9: note = Seed: AIASEFSSL
ALASEFSSF

SEQ ID NO: 12067 - protein, 9 aa, synthetic construct
  source 1..9: note = Seed: AIASEFSSL
ALASEFSSI

SEQ ID NO: 12068 - protein, 9 aa, synthetic construct
  source 1..9: note = Seed: AIASEFSSL
ALASEFSSL

SEQ ID NO: 12069 - protein, 9 aa, synthetic construct
  source 1..9: note = Seed: AIASEFSSL
ALASEFSSM

SEQ ID NO: 12070 - protein, 9 aa, synthetic construct
  source 1..9: note = Seed: AIASEFSSL
ALASEFSST

SEQ ID NO: 12071 - protein, 9 aa, synthetic construct
  source 1..9: note = Seed: AIASEFSSL
ALASEFSSV

SEQ ID NO: 12072 - protein, 9 aa, synthetic construct
  source 1..9: note = Seed: AIASEFSSL
ALASEFSSY

SEQ ID NO: 12073 - protein, 10 aa, synthetic construct
  source 1..10: note = Seed: AFAVDAAKAY
ALAVDAAKAY

SEQ ID NO: 12074 - protein, 9 aa, synthetic construct
  source 1..9: note = Seed: ALCADSIII
ALCADSIIV

SEQ ID NO: 12075 - protein, 10 aa, synthetic construct
  source 1..10: note = Seed: ALCEKALKYL
ALCEKALKYI

SEQ ID NO: 12076 - protein, 10 aa, synthetic construct
  source 1..10: note = Seed: ALCEKALKYL
ALCEKALKYV

SEQ ID NO: 12077 - protein, 9 aa, synthetic construct
  source 1..9: note = Seed: ALCTFLLNK
ALCTFLLNR

SEQ ID NO: 12078 - protein, 9 aa, synthetic construct
  source 1..9: note = Seed: AVDAAKAYK
ALDAAKAYK

SEQ ID NO: 12079 - protein, 9 aa, synthetic construct
  source 1..9: note = Seed: AVDAAKAYK
ALDAAKAYR

SEQ ID NO: 12080 - protein, 9 aa, synthetic construct
  source 1..9: note = Seed: AVDCALDPL
ALDCALDPI

SEQ ID NO: 12081 - protein, 9 aa, synthetic construct
  source 1..9: note = Seed: AVDCALDPL
ALDCALDPL

SEQ ID NO: 12082 - protein, 9 aa, synthetic construct
  source 1..9: note = Seed: AVDCALDPL
ALDCALDPM

SEQ ID NO: 12083 - protein, 9 aa, synthetic construct
  source 1..9: note = Seed: AVDCALDPL
ALDCALDPV

SEQ ID NO: 12084 - protein, 10 aa, synthetic construct
  source 1..10: note = Seed: ALDISASIVA
ALDISASIVV

SEQ ID NO: 12085 - protein, 9 aa, synthetic construct
  source 1..9: note = Seed: AGDSGFAAY
ALDSGFAAF

SEQ ID NO: 12086 - protein, 9 aa, synthetic construct
  source 1..9: note = Seed: AGDSGFAAY
ALDSGFAAY

SEQ ID NO: 12087 - protein, 10 aa, synthetic construct
  source 1..10: note = Seed: AGEAANFCAL
ALEAANFCAA

SEQ ID NO: 12088 - protein, 10 aa, synthetic construct
  source 1..10: note = Seed: AGEAANFCAL
ALEAANFCAF

SEQ ID NO: 12089 - protein, 10 aa, synthetic construct
  source 1..10: note = Seed: AGEAANFCAL
ALEAANFCAL

SEQ ID NO: 12090 - protein, 10 aa, synthetic construct
  source 1..10: note = Seed: AGEAANFCAL
ALEAANFCAW

SEQ ID NO: 12091 - protein, 10 aa, synthetic construct
  source 1..10: note = Seed: ALEPLVDLPI
ALEPLVDLPV

SEQ ID NO: 12092 - protein, 9 aa, synthetic construct
  source 1..9: note = Seed: AQFAPSASA
ALFAPSASA

SEQ ID NO: 12093 - protein, 10 aa, synthetic construct
  source 1..10: note = Seed: AQFAPSASAF
ALFAPSASAF

SEQ ID NO: 12094 - protein, 11 aa, synthetic construct
  source 1..11: note = Seed: AQFAPSASAFF
ALFAPSASAFF

SEQ ID NO: 12095 - protein, 11 aa, synthetic construct
  source 1..11: note = Seed: AQFAPSASAFF
ALFAPSASAFY

SEQ ID NO: 12096 - protein, 10 aa, synthetic construct
  source 1..10: note = Seed: AQFAPSASAF
ALFAPSASAM

SEQ ID NO: 12097 - protein, 10 aa, synthetic construct
  source 1..10: note = Seed: AQFAPSASAF
ALFAPSASAY

SEQ ID NO: 12098 - protein, 9 aa, synthetic construct
  source 1..9: note = Seed: AQFAPSASA
ALFAPSASC

SEQ ID NO: 12099 - protein, 9 aa, synthetic construct
  source 1..9: note = Seed: AQFAPSASA
ALFAPSASF

SEQ ID NO: 12100 - protein, 9 aa, synthetic construct
  source 1..9: note = Seed: AQFAPSASA
ALFAPSASI

SEQ ID NO: 12101 - protein, 9 aa, synthetic construct
  source 1..9: note = Seed: AQFAPSASA
ALFAPSASL

SEQ ID NO: 12102 - protein, 9 aa, synthetic construct
  source 1..9: note = Seed: AQFAPSASA
ALFAPSASM

SEQ ID NO: 12103 - protein, 9 aa, synthetic construct
  source 1..9: note = Seed: AQFAPSASA
ALFAPSAST

SEQ ID NO: 12104 - protein, 9 aa, synthetic construct
  source 1..9: note = Seed: AQFAPSASA
ALFAPSASV

SEQ ID NO: 12105 - protein, 9 aa, synthetic construct
  source 1..9: note = Seed: AQFAPSASA
ALFAPSASY

SEQ ID NO: 12106 - protein, 9 aa, synthetic construct
  source 1..9: note = Seed: ASFDNFKFV
ALFDNFKFA

SEQ ID NO: 12107 - protein, 9 aa, synthetic construct
  source 1..9: note = Seed: ASFDNFKFV
ALFDNFKFC

SEQ ID NO: 12108 - protein, 9 aa, synthetic construct
  source 1..9: note = Seed: ASFDNFKFV
ALFDNFKFI

SEQ ID NO: 12109 - protein, 9 aa, synthetic construct
  source 1..9: note = Seed: ASFDNFKFV
ALFDNFKFL

SEQ ID NO: 12110 - protein, 9 aa, synthetic construct
  source 1..9: note = Seed: ASFDNFKFV
ALFDNFKFM

SEQ ID NO: 12111 - protein, 9 aa, synthetic construct
  source 1..9: note = Seed: ASFDNFKFV
ALFDNFKFT

SEQ ID NO: 12112 - protein, 9 aa, synthetic construct
  source 1..9: note = Seed: ASFDNFKFV
ALFDNFKFV

SEQ ID NO: 12113 - protein, 10 aa, synthetic construct
  source 1..10: note = Seed: ANFNVLFSTV
ALFNVLFSTA

SEQ ID NO: 12114 - protein, 10 aa, synthetic construct
  source 1..10: note = Seed: ANFNVLFSTV
ALFNVLFSTI

SEQ ID NO: 12115 - protein, 10 aa, synthetic construct
  source 1..10: note = Seed: ANFNVLFSTV
ALFNVLFSTL

SEQ ID NO: 12116 - protein, 10 aa, synthetic construct
  source 1..10: note = Seed: ANFNVLFSTV
ALFNVLFSTV

SEQ ID NO: 12117 - protein, 10 aa, synthetic construct
  source 1..10: note = Seed: AGFPFNKWGK
ALFPFNKWGK

SEQ ID NO: 12118 - protein, 10 aa, synthetic construct
  source 1..10: note = Seed: AGFPFNKWGK
ALFPFNKWGR

SEQ ID NO: 12119 - protein, 8 aa, synthetic construct
  source 1..8: note = Seed: ASFRLFAR
ALFRLFAR

SEQ ID NO: 12120 - protein, 10 aa, synthetic construct
  source 1..10: note = Seed: ASFRLFARTR
ALFRLFARTR

SEQ ID NO: 12121 - protein, 9 aa, synthetic construct
  source 1..9: note = Seed: AGFSLWVYK
ALFSLWVYK

SEQ ID NO: 12122 - protein, 9 aa, synthetic construct
  source 1..9: note = Seed: AGFSLWVYK
ALFSLWVYR

SEQ ID NO: 12123 - protein, 9 aa, synthetic construct
  source 1..9: note = Seed: ASFSTFKCY
ALFSTFKCF

SEQ ID NO: 12124 - protein, 9 aa, synthetic construct
  source 1..9: note = Seed: ASFSTFKCY
ALFSTFKCK

SEQ ID NO: 12125 - protein, 9 aa, synthetic construct
  source 1..9: note = Seed: ASFSTFKCY
ALFSTFKCM

SEQ ID NO: 12126 - protein, 9 aa, synthetic construct
  source 1..9: note = Seed: ASFSTFKCY
ALFSTFKCY

SEQ ID NO: 12127 - protein, 9 aa, synthetic construct
  source 1..9: note = Seed: AIFYLITPV
ALFYLITPA

SEQ ID NO: 12128 - protein, 9 aa, synthetic construct
  source 1..9: note = Seed: AIFYLITPV
ALFYLITPC

SEQ ID NO: 12129 - protein, 9 aa, synthetic construct
  source 1..9: note = Seed: AIFYLITPV
ALFYLITPF

SEQ ID NO: 12130 - protein, 9 aa, synthetic construct
  source 1..9: note = Seed: AIFYLITPV
ALFYLITPI

SEQ ID NO: 12131 - protein, 9 aa, synthetic construct
  source 1..9: note = Seed: AIFYLITPV
ALFYLITPL

SEQ ID NO: 12132 - protein, 9 aa, synthetic construct
  source 1..9: note = Seed: AIFYLITPV
ALFYLITPM

SEQ ID NO: 12133 - protein, 9 aa, synthetic construct
  source 1..9: note = Seed: AIFYLITPV
ALFYLITPS

SEQ ID NO: 12134 - protein, 9 aa, synthetic construct
  source 1..9: note = Seed: AIFYLITPV
ALFYLITPT

SEQ ID NO: 12135 - protein, 9 aa, synthetic construct
  source 1..9: note = Seed: AIFYLITPV
ALFYLITPV

SEQ ID NO: 12136 - protein, 10 aa, synthetic construct
  source 1..10: note = Seed: AIFYLITPVH
ALFYLITPVA

SEQ ID NO: 12137 - protein, 10 aa, synthetic construct
  source 1..10: note = Seed: AIFYLITPVH
ALFYLITPVC

SEQ ID NO: 12138 - protein, 10 aa, synthetic construct
  source 1..10: note = Seed: AIFYLITPVH
ALFYLITPVD

SEQ ID NO: 12139 - protein, 10 aa, synthetic construct
  source 1..10: note = Seed: AIFYLITPVH
ALFYLITPVE

SEQ ID NO: 12140 - protein, 10 aa, synthetic construct
  source 1..10: note = Seed: AIFYLITPVH
ALFYLITPVF

SEQ ID NO: 12141 - protein, 10 aa, synthetic construct
  source 1..10: note = Seed: AIFYLITPVH
ALFYLITPVG

SEQ ID NO: 12142 - protein, 10 aa, synthetic construct
  source 1..10: note = Seed: AIFYLITPVH
ALFYLITPVH

SEQ ID NO: 12143 - protein, 11 aa, synthetic construct
  source 1..11: note = Seed: AIFYLITPVHV
ALFYLITPVHI

SEQ ID NO: 12144 - protein, 11 aa, synthetic construct
  source 1..11: note = Seed: AIFYLITPVHV
ALFYLITPVHL

SEQ ID NO: 12145 - protein, 11 aa, synthetic construct
  source 1..11: note = Seed: AIFYLITPVHV
ALFYLITPVHV

SEQ ID NO: 12146 - protein, 10 aa, synthetic construct
  source 1..10: note = Seed: AIFYLITPVH
ALFYLITPVI

SEQ ID NO: 12147 - protein, 10 aa, synthetic construct
  source 1..10: note = Seed: AIFYLITPVH
ALFYLITPVK

SEQ ID NO: 12148 - protein, 10 aa, synthetic construct
  source 1..10: note = Seed: AIFYLITPVH
ALFYLITPVL

SEQ ID NO: 12149 - protein, 10 aa, synthetic construct
  source 1..10: note = Seed: AIFYLITPVH
ALFYLITPVM

SEQ ID NO: 12150 - protein, 10 aa, synthetic construct
  source 1..10: note = Seed: AIFYLITPVH
ALFYLITPVN

SEQ ID NO: 12151 - protein, 10 aa, synthetic construct
  source 1..10: note = Seed: AIFYLITPVH
ALFYLITPVP

SEQ ID NO: 12152 - protein, 10 aa, synthetic construct
  source 1..10: note = Seed: AIFYLITPVH
ALFYLITPVQ

SEQ ID NO: 12153 - protein, 10 aa, synthetic construct
  source 1..10: note = Seed: AIFYLITPVH
ALFYLITPVR

SEQ ID NO: 12154 - protein, 10 aa, synthetic construct
  source 1..10: note = Seed: AIFYLITPVH
ALFYLITPVS

SEQ ID NO: 12155 - protein, 10 aa, synthetic construct
  source 1..10: note = Seed: AIFYLITPVH
ALFYLITPVT

SEQ ID NO: 12156 - protein, 10 aa, synthetic construct
  source 1..10: note = Seed: AIFYLITPVH
ALFYLITPVV

SEQ ID NO: 12157 - protein, 10 aa, synthetic construct
  source 1..10: note = Seed: AIFYLITPVH
ALFYLITPVW

SEQ ID NO: 12158 - protein, 10 aa, synthetic construct
  source 1..10: note = Seed: AIFYLITPVH
ALFYLITPVY

SEQ ID NO: 12159 - protein, 9 aa, synthetic construct
  source 1..9: note = Seed: AIFYLITPV
ALFYLITPW

SEQ ID NO: 12160 - protein, 11 aa, synthetic construct
  source 1..11: note = Seed: ASFYYVWKSYV
ALFYYVWKSYA

SEQ ID NO: 12161 - protein, 11 aa, synthetic construct
  source 1..11: note = Seed: ASFYYVWKSYV
ALFYYVWKSYI

SEQ ID NO: 12162 - protein, 11 aa, synthetic construct
  source 1..11: note = Seed: ASFYYVWKSYV
ALFYYVWKSYL

SEQ ID NO: 12163 - protein, 11 aa, synthetic construct
  source 1..11: note = Seed: ASFYYVWKSYV
ALFYYVWKSYM

SEQ ID NO: 12164 - protein, 11 aa, synthetic construct
  source 1..11: note = Seed: ASFYYVWKSYV
ALFYYVWKSYV

SEQ ID NO: 12165 - protein, 9 aa, synthetic construct
  source 1..9: note = Seed: AFGGCVFSY
ALGGCVFSY

SEQ ID NO: 12166 - protein, 9 aa, synthetic construct
  source 1..9: note = Seed: ANGQVFGLY
ALGQVFGLY

SEQ ID NO: 12167 - protein, 10 aa, synthetic construct
  source 1..10: note = Seed: ANGQVFGLYK
ALGQVFGLYK

SEQ ID NO: 12168 - protein, 10 aa, synthetic construct
  source 1..10: note = Seed: ANGQVFGLYK
ALGQVFGLYR

SEQ ID NO: 12169 - protein, 9 aa, synthetic construct
  source 1..9: note = Seed: AVHFISNSW
ALHFISNSF

SEQ ID NO: 12170 - protein, 9 aa, synthetic construct
  source 1..9: note = Seed: AVHFISNSW
ALHFISNSW

SEQ ID NO: 12171 - protein, 10 aa, synthetic construct
  source 1..10: note = Seed: ALIISVTSNY
ALIISVTSNF

SEQ ID NO: 12172 - protein, 10 aa, synthetic construct
  source 1..10: note = Seed: ALIISVTSNY
ALIISVTSNK

SEQ ID NO: 12173 - protein, 9 aa, synthetic construct
  source 1..9: note = Seed: ASIKNFKSV
ALIKNFKSA

SEQ ID NO: 12174 - protein, 9 aa, synthetic construct
  source 1..9: note = Seed: ASIKNFKSV
ALIKNFKSI

SEQ ID NO: 12175 - protein, 9 aa, synthetic construct
  source 1..9: note = Seed: ASIKNFKSV
ALIKNFKSL

SEQ ID NO: 12176 - protein, 9 aa, synthetic construct
  source 1..9: note = Seed: ASIKNFKSV
ALIKNFKSV

SEQ ID NO: 12177 - protein, 10 aa, synthetic construct
  source 1..10: note = Seed: AYILFTRFFY
ALILFTRFFK

SEQ ID NO: 12178 - protein, 10 aa, synthetic construct
  source 1..10: note = Seed: AYILFTRFFY
ALILFTRFFR

SEQ ID NO: 12179 - protein, 10 aa, synthetic construct
  source 1..10: note = Seed: AYILFTRFFY
ALILFTRFFY

SEQ ID NO: 12180 - protein, 11 aa, synthetic construct
  source 1..11: note = Seed: AYILFTRFFYV
ALILFTRFFYA

SEQ ID NO: 12181 - protein, 11 aa, synthetic construct
  source 1..11: note = Seed: AYILFTRFFYV
ALILFTRFFYI

SEQ ID NO: 12182 - protein, 11 aa, synthetic construct
  source 1..11: note = Seed: AYILFTRFFYV
ALILFTRFFYL

SEQ ID NO: 12183 - protein, 11 aa, synthetic construct
  source 1..11: note = Seed: AYILFTRFFYV
ALILFTRFFYV

SEQ ID NO: 12184 - protein, 10 aa, synthetic construct
  source 1..10: note = Seed: AIKCVPQADV
ALKCVPQADV

SEQ ID NO: 12185 - protein, 9 aa, synthetic construct
  source 1..9: note = Seed: AAKKNNLPF
ALKKNNLPF

SEQ ID NO: 12186 - protein, 9 aa, synthetic construct
  source 1..9: note = Seed: AAKKNNLPF
ALKKNNLPM

SEQ ID NO: 12187 - protein, 9 aa, synthetic construct
  source 1..9: note = Seed: AAKKNNLPF
ALKKNNLPY

SEQ ID NO: 12188 - protein, 9 aa, synthetic construct
  source 1..9: note = Seed: AKKNNLPFK
ALKNNLPFK

SEQ ID NO: 12189 - protein, 10 aa, synthetic construct
  source 1..10: note = Seed: AALCTFLLNK
ALLCTFLLNK

SEQ ID NO: 12190 - protein, 10 aa, synthetic construct
  source 1..10: note = Seed: AALCTFLLNK
ALLCTFLLNR

SEQ ID NO: 12191 - protein, 10 aa, synthetic construct
  source 1..10: note = Seed: ASLINTLNDL
ALLINTLNDI

SEQ ID NO: 12192 - protein, 10 aa, synthetic construct
  source 1..10: note = Seed: ASLINTLNDL
ALLINTLNDV

SEQ ID NO: 12193 - protein, 9 aa, synthetic construct
  source 1..9: note = Seed: ASLNGVTLI
ALLNGVTLI

SEQ ID NO: 12194 - protein, 9 aa, synthetic construct
  source 1..9: note = Seed: ASLNGVTLI
ALLNGVTLL

SEQ ID NO: 12195 - protein, 9 aa, synthetic construct
  source 1..9: note = Seed: ASLNGVTLI
ALLNGVTLV

SEQ ID NO: 12196 - protein, 9 aa, synthetic construct
  source 1..9: note = Seed: AQLPAPRTL
ALLPAPRTF

SEQ ID NO: 12197 - protein, 9 aa, synthetic construct
  source 1..9: note = Seed: AQLPAPRTL
ALLPAPRTY

SEQ ID NO: 12198 - protein, 10 aa, synthetic construct
  source 1..10: note = Seed: ATLQAIASEF
ALLQAIASEF

SEQ ID NO: 12199 - protein, 10 aa, synthetic construct
  source 1..10: note = Seed: ATLQAIASEF
ALLQAIASEY

SEQ ID NO: 12200 - protein, 9 aa, synthetic construct
  source 1..9: note = Seed: AALQIPFAM
ALLQIPFAF

SEQ ID NO: 12201 - protein, 11 aa, synthetic construct
  source 1..11: note = Seed: AALQIPFAMQM
ALLQIPFAMQY

SEQ ID NO: 12202 - protein, 9 aa, synthetic construct
  source 1..9: note = Seed: AALQIPFAM
ALLQIPFAY

SEQ ID NO: 12203 - protein, 9 aa, synthetic construct
  source 1..9: note = Seed: AVLQSGFRK
ALLQSGFRK

SEQ ID NO: 12204 - protein, 9 aa, synthetic construct
  source 1..9: note = Seed: AVLQSGFRK
ALLQSGFRR

SEQ ID NO: 12205 - protein, 9 aa, synthetic construct
  source 1..9: note = Seed: ALLSDLQDL
ALLSDLQDI

SEQ ID NO: 12206 - protein, 9 aa, synthetic construct
  source 1..9: note = Seed: ALLSDLQDL
ALLSDLQDV

SEQ ID NO: 12207 - protein, 10 aa, synthetic construct
  source 1..10: note = Seed: APLVGTPVCI
ALLVGTPVCV

SEQ ID NO: 12208 - protein, 10 aa, synthetic construct
  source 1..10: note = Seed: AMMFVKHKHA
ALMFVKHKHI

SEQ ID NO: 12209 - protein, 10 aa, synthetic construct
  source 1..10: note = Seed: AMMFVKHKHA
ALMFVKHKHL

SEQ ID NO: 12210 - protein, 10 aa, synthetic construct
  source 1..10: note = Seed: AMMFVKHKHA
ALMFVKHKHV

SEQ ID NO: 12211 - protein, 9 aa, synthetic construct
  source 1..9: note = Seed: AMMFVKHKH
ALMFVKHKR

SEQ ID NO: 12212 - protein, 10 aa, synthetic construct
  source 1..10: note = Seed: ALNKATNNAM
ALNKATNNAF

SEQ ID NO: 12213 - protein, 10 aa, synthetic construct
  source 1..10: note = Seed: ALNKATNNAM
ALNKATNNAV

SEQ ID NO: 12214 - protein, 10 aa, synthetic construct
  source 1..10: note = Seed: ALNKATNNAM
ALNKATNNAY

SEQ ID NO: 12215 - protein, 9 aa, synthetic construct
  source 1..9: note = Seed: ALNKATNNA
ALNKATNNI

SEQ ID NO: 12216 - protein, 9 aa, synthetic construct
  source 1..9: note = Seed: ALNKATNNA
ALNKATNNL

SEQ ID NO: 12217 - protein, 9 aa, synthetic construct
  source 1..9: note = Seed: ALNKATNNA
ALNKATNNV

SEQ ID NO: 12218 - protein, 10 aa, synthetic construct
  source 1..10: note = Seed: ALNNIINNAR
ALNNIINNAK

SEQ ID NO: 12219 - protein, 9 aa, synthetic construct
  source 1..9: note = Seed: ALNNIINNA
ALNNIINNC

SEQ ID NO: 12220 - protein, 9 aa, synthetic construct
  source 1..9: note = Seed: ALNNIINNA
ALNNIINNI

SEQ ID NO: 12221 - protein, 9 aa, synthetic construct
  source 1..9: note = Seed: ALNNIINNA
ALNNIINNL

SEQ ID NO: 12222 - protein, 9 aa, synthetic construct
  source 1..9: note = Seed: ALNNIINNA
ALNNIINNM

SEQ ID NO: 12223 - protein, 9 aa, synthetic construct
  source 1..9: note = Seed: ALNNIINNA
ALNNIINNV

SEQ ID NO: 12224 - protein, 9 aa, synthetic construct
  source 1..9: note = Seed: AINRPQIGV
ALNRPQIGI

SEQ ID NO: 12225 - protein, 9 aa, synthetic construct
  source 1..9: note = Seed: AINRPQIGV
ALNRPQIGL

SEQ ID NO: 12226 - protein, 9 aa, synthetic construct
  source 1..9: note = Seed: AINRPQIGV
ALNRPQIGV

SEQ ID NO: 12227 - protein, 10 aa, synthetic construct
  source 1..10: note = Seed: AINRPQIGVV
ALNRPQIGVV

SEQ ID NO: 12228 - protein, 10 aa, synthetic construct
  source 1..10: note = Seed: AQNSVRVLQK
ALNSVRVLQK

SEQ ID NO: 12229 - protein, 10 aa, synthetic construct
  source 1..10: note = Seed: AQNSVRVLQK
ALNSVRVLQR

SEQ ID NO: 12230 - protein, 10 aa, synthetic construct
  source 1..10: note = Seed: AIPTNFTISV
ALPTNFTISI

SEQ ID NO: 12231 - protein, 10 aa, synthetic construct
  source 1..10: note = Seed: AIPTNFTISV
ALPTNFTISL

SEQ ID NO: 12232 - protein, 10 aa, synthetic construct
  source 1..10: note = Seed: AIPTNFTISV
ALPTNFTISM

SEQ ID NO: 12233 - protein, 10 aa, synthetic construct
  source 1..10: note = Seed: AIPTNFTISV
ALPTNFTISV

SEQ ID NO: 12234 - protein, 10 aa, synthetic construct
  source 1..10: note = Seed: ADQAMTQMYK
ALQAMTQMYK

SEQ ID NO: 12235 - protein, 10 aa, synthetic construct
  source 1..10: note = Seed: ADQAMTQMYK
ALQAMTQMYR

SEQ ID NO: 12236 - protein, 9 aa, synthetic construct
  source 1..9: note = Seed: ALQDAYYRA
ALQDAYYRC

SEQ ID NO: 12237 - protein, 9 aa, synthetic construct
  source 1..9: note = Seed: ALQDAYYRA
ALQDAYYRI

SEQ ID NO: 12238 - protein, 9 aa, synthetic construct
  source 1..9: note = Seed: ALQDAYYRA
ALQDAYYRL

SEQ ID NO: 12239 - protein, 9 aa, synthetic construct
  source 1..9: note = Seed: ALQDAYYRA
ALQDAYYRM

SEQ ID NO: 12240 - protein, 9 aa, synthetic construct
  source 1..9: note = Seed: ALQDAYYRA
ALQDAYYRT

SEQ ID NO: 12241 - protein, 9 aa, synthetic construct
  source 1..9: note = Seed: ALQDAYYRA
ALQDAYYRV

SEQ ID NO: 12242 - protein, 10 aa, synthetic construct
  source 1..10: note = Seed: ALQIPFAMQM
ALQIPFAMQA

SEQ ID NO: 12243 - protein, 10 aa, synthetic construct
  source 1..10: note = Seed: ALQIPFAMQM
ALQIPFAMQF

SEQ ID NO: 12244 - protein, 10 aa, synthetic construct
  source 1..10: note = Seed: ALQIPFAMQM
ALQIPFAMQI

SEQ ID NO: 12245 - protein, 10 aa, synthetic construct
  source 1..10: note = Seed: ALQIPFAMQM
ALQIPFAMQL

SEQ ID NO: 12246 - protein, 10 aa, synthetic construct
  source 1..10: note = Seed: ALQIPFAMQM
ALQIPFAMQV

SEQ ID NO: 12247 - protein, 10 aa, synthetic construct
  source 1..10: note = Seed: ALQIPFAMQM
ALQIPFAMQY

SEQ ID NO: 12248 - protein, 9 aa, synthetic construct
  source 1..9: note = Seed: AMQTMLFTM
ALQTMLFTA

SEQ ID NO: 12249 - protein, 9 aa, synthetic construct
  source 1..9: note = Seed: AMQTMLFTM
ALQTMLFTI

SEQ ID NO: 12250 - protein, 9 aa, synthetic construct
  source 1..9: note = Seed: AMQTMLFTM
ALQTMLFTL

SEQ ID NO: 12251 - protein, 9 aa, synthetic construct
  source 1..9: note = Seed: AMQTMLFTM
ALQTMLFTM

SEQ ID NO: 12252 - protein, 9 aa, synthetic construct
  source 1..9: note = Seed: AMQTMLFTM
ALQTMLFTT

SEQ ID NO: 12253 - protein, 9 aa, synthetic construct
  source 1..9: note = Seed: AMQTMLFTM
ALQTMLFTV

SEQ ID NO: 12254 - protein, 9 aa, synthetic construct
  source 1..9: note = Seed: AMQTMLFTM
ALQTMLFTW

SEQ ID NO: 12255 - protein, 9 aa, synthetic construct
  source 1..9: note = Seed: AMQTMLFTM
ALQTMLFTY

SEQ ID NO: 12256 - protein, 10 aa, synthetic construct
  source 1..10: note = Seed: ALRANSAVKL
ALRANSAVKV

SEQ ID NO: 12257 - protein, 9 aa, synthetic construct
  source 1..9: note = Seed: ATREAVGTN
ALREAVGTK

SEQ ID NO: 12258 - protein, 9 aa, synthetic construct
  source 1..9: note = Seed: ATRFASVYA
ALRFASVYA

SEQ ID NO: 12259 - protein, 9 aa, synthetic construct
  source 1..9: note = Seed: ATRFASVYA
ALRFASVYG

SEQ ID NO: 12260 - protein, 9 aa, synthetic construct
  source 1..9: note = Seed: ATRFASVYA
ALRFASVYI

SEQ ID NO: 12261 - protein, 9 aa, synthetic construct
  source 1..9: note = Seed: ATRFASVYA
ALRFASVYK

SEQ ID NO: 12262 - protein, 9 aa, synthetic construct
  source 1..9: note = Seed: ATRFASVYA
ALRFASVYL

SEQ ID NO: 12263 - protein, 9 aa, synthetic construct
  source 1..9: note = Seed: ATRFASVYA
ALRFASVYM

SEQ ID NO: 12264 - protein, 9 aa, synthetic construct
  source 1..9: note = Seed: ATRFASVYA
ALRFASVYV

SEQ ID NO: 12265 - protein, 9 aa, synthetic construct
  source 1..9: note = Seed: AYRFNGIGV
ALRFNGIGK

SEQ ID NO: 12266 - protein, 9 aa, synthetic construct
  source 1..9: note = Seed: AWRKAVFIS
ALRKAVFIA

SEQ ID NO: 12267 - protein, 9 aa, synthetic construct
  source 1..9: note = Seed: AWRKAVFIS
ALRKAVFIK

SEQ ID NO: 12268 - protein, 9 aa, synthetic construct
  source 1..9: note = Seed: AMRNAGIVG
ALRNAGIVF

SEQ ID NO: 12269 - protein, 10 aa, synthetic construct
  source 1..10: note = Seed: AMRNAGIVGV
ALRNAGIVGA

SEQ ID NO: 12270 - protein, 10 aa, synthetic construct
  source 1..10: note = Seed: AMRNAGIVGV
ALRNAGIVGI

SEQ ID NO: 12271 - protein, 10 aa, synthetic construct
  source 1..10: note = Seed: AMRNAGIVGV
ALRNAGIVGL

SEQ ID NO: 12272 - protein, 10 aa, synthetic construct
  source 1..10: note = Seed: AMRNAGIVGV
ALRNAGIVGV

SEQ ID NO: 12273 - protein, 11 aa, synthetic construct
  source 1..11: note = Seed: AMRNAGIVGVL
ALRNAGIVGVY

SEQ ID NO: 12274 - protein, 9 aa, synthetic construct
  source 1..9: note = Seed: AMRNAGIVG
ALRNAGIVK

SEQ ID NO: 12275 - protein, 9 aa, synthetic construct
  source 1..9: note = Seed: AMRNAGIVG
ALRNAGIVM

SEQ ID NO: 12276 - protein, 9 aa, synthetic construct
  source 1..9: note = Seed: AMRNAGIVG
ALRNAGIVY

SEQ ID NO: 12277 - protein, 9 aa, synthetic construct
  source 1..9: note = Seed: AARQGFVDS
ALRQGFVDK

SEQ ID NO: 12278 - protein, 9 aa, synthetic construct
  source 1..9: note = Seed: ATSACVLAA
ALSACVLAV

SEQ ID NO: 12279 - protein, 9 aa, synthetic construct
  source 1..9: note = Seed: AMSAFAMMF
ALSAFAMMA

SEQ ID NO: 12280 - protein, 9 aa, synthetic construct
  source 1..9: note = Seed: AMSAFAMMF
ALSAFAMMF

SEQ ID NO: 12281 - protein, 10 aa, synthetic construct
  source 1..10: note = Seed: AMSAFAMMFV
ALSAFAMMFA

SEQ ID NO: 12282 - protein, 10 aa, synthetic construct
  source 1..10: note = Seed: AMSAFAMMFV
ALSAFAMMFI

SEQ ID NO: 12283 - protein, 10 aa, synthetic construct
  source 1..10: note = Seed: AMSAFAMMFV
ALSAFAMMFL

SEQ ID NO: 12284 - protein, 10 aa, synthetic construct
  source 1..10: note = Seed: AMSAFAMMFV
ALSAFAMMFM

SEQ ID NO: 12285 - protein, 10 aa, synthetic construct
  source 1..10: note = Seed: AMSAFAMMFV
ALSAFAMMFV

SEQ ID NO: 12286 - protein, 11 aa, synthetic construct
  source 1..11: note = Seed: AMSAFAMMFVK
ALSAFAMMFVK

SEQ ID NO: 12287 - protein, 11 aa, synthetic construct
  source 1..11: note = Seed: AMSAFAMMFVK
ALSAFAMMFVV

SEQ ID NO: 12288 - protein, 9 aa, synthetic construct
  source 1..9: note = Seed: AMSAFAMMF
ALSAFAMMI

SEQ ID NO: 12289 - protein, 9 aa, synthetic construct
  source 1..9: note = Seed: AMSAFAMMF
ALSAFAMML

SEQ ID NO: 12290 - protein, 9 aa, synthetic construct
  source 1..9: note = Seed: AMSAFAMMF
ALSAFAMMM

SEQ ID NO: 12291 - protein, 9 aa, synthetic construct
  source 1..9: note = Seed: AMSAFAMMF
ALSAFAMMV

SEQ ID NO: 12292 - protein, 9 aa, synthetic construct
  source 1..9: note = Seed: AMSAFAMMF
ALSAFAMMY

SEQ ID NO: 12293 - protein, 10 aa, synthetic construct
  source 1..10: note = Seed: APSASAFFGM
ALSASAFFGW

SEQ ID NO: 12294 - protein, 11 aa, synthetic construct
  source 1..11: note = Seed: AYSRYRIGNYK
ALSRYRIGNYR

SEQ ID NO: 12295 - protein, 9 aa, synthetic construct
  source 1..9: note = Seed: ASSSEAFLI
ALSSEAFLW

SEQ ID NO: 12296 - protein, 9 aa, synthetic construct
  source 1..9: note = Seed: AISSVLNDI
ALSSVLNDA

SEQ ID NO: 12297 - protein, 9 aa, synthetic construct
  source 1..9: note = Seed: AISSVLNDI
ALSSVLNDI

SEQ ID NO: 12298 - protein, 10 aa, synthetic construct
  source 1..10: note = Seed: AISSVLNDIL
ALSSVLNDII

SEQ ID NO: 12299 - protein, 10 aa, synthetic construct
  source 1..10: note = Seed: AISSVLNDIL
ALSSVLNDIL

SEQ ID NO: 12300 - protein, 10 aa, synthetic construct
  source 1..10: note = Seed: AISSVLNDIL
ALSSVLNDIV

SEQ ID NO: 12301 - protein, 9 aa, synthetic construct
  source 1..9: note = Seed: AISSVLNDI
ALSSVLNDL

SEQ ID NO: 12302 - protein, 9 aa, synthetic construct
  source 1..9: note = Seed: AISSVLNDI
ALSSVLNDM

SEQ ID NO: 12303 - protein, 9 aa, synthetic construct
  source 1..9: note = Seed: AISSVLNDI
ALSSVLNDV

SEQ ID NO: 12304 - protein, 10 aa, synthetic construct
  source 1..10: note = Seed: AVTANVNALL
ALTANVNALA

SEQ ID NO: 12305 - protein, 10 aa, synthetic construct
  source 1..10: note = Seed: AVTANVNALL
ALTANVNALI

SEQ ID NO: 12306 - protein, 10 aa, synthetic construct
  source 1..10: note = Seed: AVTANVNALL
ALTANVNALL

SEQ ID NO: 12307 - protein, 10 aa, synthetic construct
  source 1..10: note = Seed: AVTANVNALL
ALTANVNALM

SEQ ID NO: 12308 - protein, 10 aa, synthetic construct
  source 1..10: note = Seed: AVTANVNALL
ALTANVNALV

SEQ ID NO: 12309 - protein, 9 aa, synthetic construct
  source 1..9: note = Seed: ATTAYANSV
ALTAYANSI

SEQ ID NO: 12310 - protein, 9 aa, synthetic construct
  source 1..9: note = Seed: ATTAYANSV
ALTAYANSL

SEQ ID NO: 12311 - protein, 9 aa, synthetic construct
  source 1..9: note = Seed: ATTAYANSV
ALTAYANSV

SEQ ID NO: 12312 - protein, 10 aa, synthetic construct
  source 1..10: note = Seed: ATTAYANSVF
ALTAYANSVF

SEQ ID NO: 12313 - protein, 10 aa, synthetic construct
  source 1..10: note = Seed: ATTAYANSVF
ALTAYANSVW

SEQ ID NO: 12314 - protein, 10 aa, synthetic construct
  source 1..10: note = Seed: ATTAYANSVF
ALTAYANSVY

SEQ ID NO: 12315 - protein, 10 aa, synthetic construct
  source 1..10: note = Seed: ALTCFSTQFA
ALTCFSTQFI

SEQ ID NO: 12316 - protein, 10 aa, synthetic construct
  source 1..10: note = Seed: ALTCFSTQFA
ALTCFSTQFL

SEQ ID NO: 12317 - protein, 10 aa, synthetic construct
  source 1..10: note = Seed: ALTCFSTQFA
ALTCFSTQFV

SEQ ID NO: 12318 - protein, 9 aa, synthetic construct
  source 1..9: note = Seed: ALTCFSTQF
ALTCFSTQY

SEQ ID NO: 12319 - protein, 10 aa, synthetic construct
  source 1..10: note = Seed: AGTDLEGNFY
ALTDLEGNFY

SEQ ID NO: 12320 - protein, 10 aa, synthetic construct
  source 1..10: note = Seed: ATTRQVVNVV
ALTRQVVNVK

SEQ ID NO: 12321 - protein, 10 aa, synthetic construct
  source 1..10: note = Seed: ASTSAFVETV
ALTSAFVETI

SEQ ID NO: 12322 - protein, 10 aa, synthetic construct
  source 1..10: note = Seed: ASTSAFVETV
ALTSAFVETL

SEQ ID NO: 12323 - protein, 10 aa, synthetic construct
  source 1..10: note = Seed: ASTSAFVETV
ALTSAFVETM

SEQ ID NO: 12324 - protein, 10 aa, synthetic construct
  source 1..10: note = Seed: ASTSAFVETV
ALTSAFVETV

SEQ ID NO: 12325 - protein, 9 aa, synthetic construct
  source 1..9: note = Seed: ATVAYFNMV
ALVAYFNMA

SEQ ID NO: 12326 - protein, 9 aa, synthetic construct
  source 1..9: note = Seed: ATVAYFNMV
ALVAYFNMI

SEQ ID NO: 12327 - protein, 9 aa, synthetic construct
  source 1..9: note = Seed: ATVAYFNMV
ALVAYFNML

SEQ ID NO: 12328 - protein, 9 aa, synthetic construct
  source 1..9: note = Seed: ATVAYFNMV
ALVAYFNMM

SEQ ID NO: 12329 - protein, 9 aa, synthetic construct
  source 1..9: note = Seed: ATVAYFNMV
ALVAYFNMV

SEQ ID NO: 12330 - protein, 10 aa, synthetic construct
  source 1..10: note = Seed: ATVAYFNMVY
ALVAYFNMVF

SEQ ID NO: 12331 - protein, 10 aa, synthetic construct
  source 1..10: note = Seed: ATVAYFNMVY
ALVAYFNMVK

SEQ ID NO: 12332 - protein, 10 aa, synthetic construct
  source 1..10: note = Seed: ATVAYFNMVY
ALVAYFNMVR

SEQ ID NO: 12333 - protein, 10 aa, synthetic construct
  source 1..10: note = Seed: ATVAYFNMVY
ALVAYFNMVY

SEQ ID NO: 12334 - protein, 9 aa, synthetic construct
  source 1..9: note = Seed: AVVCFNSTY
ALVCFNSTF

SEQ ID NO: 12335 - protein, 9 aa, synthetic construct
  source 1..9: note = Seed: AVVCFNSTY
ALVCFNSTM

SEQ ID NO: 12336 - protein, 9 aa, synthetic construct
  source 1..9: note = Seed: AVVCFNSTY
ALVCFNSTY

SEQ ID NO: 12337 - protein, 10 aa, synthetic construct
  source 1..10: note = Seed: AVVCFNSTYA
ALVCFNSTYA

SEQ ID NO: 12338 - protein, 10 aa, synthetic construct
  source 1..10: note = Seed: AVVCFNSTYA
ALVCFNSTYI

SEQ ID NO: 12339 - protein, 10 aa, synthetic construct
  source 1..10: note = Seed: AVVCFNSTYA
ALVCFNSTYL

SEQ ID NO: 12340 - protein, 10 aa, synthetic construct
  source 1..10: note = Seed: AVVCFNSTYA
ALVCFNSTYV

SEQ ID NO: 12341 - protein, 10 aa, synthetic construct
  source 1..10: note = Seed: AFVNLKQLPF
ALVNLKQLPF

SEQ ID NO: 12342 - protein, 10 aa, synthetic construct
  source 1..10: note = Seed: AFVNLKQLPF
ALVNLKQLPY

SEQ ID NO: 12343 - protein, 10 aa, synthetic construct
  source 1..10: note = Seed: AMVRMYIFFA
ALVRMYIFFA

SEQ ID NO: 12344 - protein, 10 aa, synthetic construct
  source 1..10: note = Seed: AMVRMYIFFA
ALVRMYIFFI

SEQ ID NO: 12345 - protein, 10 aa, synthetic construct
  source 1..10: note = Seed: AMVRMYIFFA
ALVRMYIFFL

SEQ ID NO: 12346 - protein, 10 aa, synthetic construct
  source 1..10: note = Seed: AMVRMYIFFA
ALVRMYIFFV

SEQ ID NO: 12347 - protein, 9 aa, synthetic construct
  source 1..9: note = Seed: AGVSICSTM
ALVSICSTF

SEQ ID NO: 12348 - protein, 9 aa, synthetic construct
  source 1..9: note = Seed: AGVSICSTM
ALVSICSTY

SEQ ID NO: 12349 - protein, 9 aa, synthetic construct
  source 1..9: note = Seed: ASVYYSQLM
ALVYYSQLF

SEQ ID NO: 12350 - protein, 9 aa, synthetic construct
  source 1..9: note = Seed: ASVYYSQLM
ALVYYSQLY

SEQ ID NO: 12351 - protein, 8 aa, synthetic construct
  source 1..8: note = Seed: AYYFMRFR
ALYFMRFR

SEQ ID NO: 12352 - protein, 9 aa, synthetic construct
  source 1..9: note = Seed: AYYFMRFRR
ALYFMRFRK

SEQ ID NO: 12353 - protein, 9 aa, synthetic construct
  source 1..9: note = Seed: AYYFMRFRR
ALYFMRFRR

SEQ ID NO: 12354 - protein, 9 aa, synthetic construct
  source 1..9: note = Seed: AWYTERSEK
ALYTERSER

SEQ ID NO: 12355 - protein, 9 aa, synthetic construct
  source 1..9: note = Seed: AMYTPHTVL
ALYTPHTVF

SEQ ID NO: 12356 - protein, 9 aa, synthetic construct
  source 1..9: note = Seed: AMYTPHTVL
ALYTPHTVI

SEQ ID NO: 12357 - protein, 9 aa, synthetic construct
  source 1..9: note = Seed: AMYTPHTVL
ALYTPHTVL

SEQ ID NO: 12358 - protein, 11 aa, synthetic construct
  source 1..11: note = Seed: AMYTPHTVLQA
ALYTPHTVLQV

SEQ ID NO: 12359 - protein, 9 aa, synthetic construct
  source 1..9: note = Seed: AMYTPHTVL
ALYTPHTVM

SEQ ID NO: 12360 - protein, 9 aa, synthetic construct
  source 1..9: note = Seed: AMYTPHTVL
ALYTPHTVV

SEQ ID NO: 12361 - protein, 9 aa, synthetic construct
  source 1..9: note = Seed: AMYTPHTVL
ALYTPHTVY

SEQ ID NO: 12362 - protein, 9 aa, synthetic construct
  source 1..9: note = Seed: AKYTQLCQY
ALYTQLCQF

SEQ ID NO: 12363 - protein, 9 aa, synthetic construct
  source 1..9: note = Seed: AKYTQLCQY
ALYTQLCQY

SEQ ID NO: 12364 - protein, 10 aa, synthetic construct
  source 1..10: note = Seed: AKYTQLCQYL
ALYTQLCQYF

SEQ ID NO: 12365 - protein, 10 aa, synthetic construct
  source 1..10: note = Seed: AYYVGYLQPR
ALYVGYLQPR

SEQ ID NO: 12366 - protein, 9 aa, synthetic construct
  source 1..9: note = Seed: AGAALQIPF
AMAALQIPF

SEQ ID NO: 12367 - protein, 9 aa, synthetic construct
  source 1..9: note = Seed: AGAALQIPF
AMAALQIPL

SEQ ID NO: 12368 - protein, 9 aa, synthetic construct
  source 1..9: note = Seed: AGAALQIPF
AMAALQIPM

SEQ ID NO: 12369 - protein, 9 aa, synthetic construct
  source 1..9: note = Seed: AGAALQIPF
AMAALQIPY

SEQ ID NO: 12370 - protein, 9 aa, synthetic construct
  source 1..9: note = Seed: AMACLVGLM
AMACLVGLA

SEQ ID NO: 12371 - protein, 9 aa, synthetic construct
  source 1..9: note = Seed: AMACLVGLM
AMACLVGLF

SEQ ID NO: 12372 - protein, 9 aa, synthetic construct
  source 1..9: note = Seed: AMACLVGLM
AMACLVGLI

SEQ ID NO: 12373 - protein, 9 aa, synthetic construct
  source 1..9: note = Seed: AMACLVGLM
AMACLVGLL

SEQ ID NO: 12374 - protein, 11 aa, synthetic construct
  source 1..11: note = Seed: AMACLVGLMWL
AMACLVGLMWV

SEQ ID NO: 12375 - protein, 9 aa, synthetic construct
  source 1..9: note = Seed: AMACLVGLM
AMACLVGLV

SEQ ID NO: 12376 - protein, 9 aa, synthetic construct
  source 1..9: note = Seed: AMACLVGLM
AMACLVGLY

SEQ ID NO: 12377 - protein, 9 aa, synthetic construct
  source 1..9: note = Seed: ARAGEAANF
AMAGEAANF

SEQ ID NO: 12378 - protein, 9 aa, synthetic construct
  source 1..9: note = Seed: ARAGEAANF
AMAGEAANY

SEQ ID NO: 12379 - protein, 10 aa, synthetic construct
  source 1..10: note = Seed: ALALLLLDRL
AMALLLLDRL

SEQ ID NO: 12380 - protein, 10 aa, synthetic construct
  source 1..10: note = Seed: ALALLLLDRL
AMALLLLDRV

SEQ ID NO: 12381 - protein, 10 aa, synthetic construct
  source 1..10: note = Seed: AFAMMFVKHK
AMAMMFVKHK

SEQ ID NO: 12382 - protein, 10 aa, synthetic construct
  source 1..10: note = Seed: AFAMMFVKHK
AMAMMFVKHR

SEQ ID NO: 12383 - protein, 9 aa, synthetic construct
  source 1..9: note = Seed: AVANGDSEV
AMANGDSEI

SEQ ID NO: 12384 - protein, 9 aa, synthetic construct
  source 1..9: note = Seed: AVANGDSEV
AMANGDSEL

SEQ ID NO: 12385 - protein, 9 aa, synthetic construct
  source 1..9: note = Seed: AVANGDSEV
AMANGDSEV

SEQ ID NO: 12386 - protein, 9 aa, synthetic construct
  source 1..9: note = Seed: AYANSVFNI
AMANSVFNF

SEQ ID NO: 12387 - protein, 9 aa, synthetic construct
  source 1..9: note = Seed: AYANSVFNI
AMANSVFNY

SEQ ID NO: 12388 - protein, 9 aa, synthetic construct
  source 1..9: note = Seed: AIASEFSSL
AMASEFSSA

SEQ ID NO: 12389 - protein, 9 aa, synthetic construct
  source 1..9: note = Seed: AIASEFSSL
AMASEFSSF

SEQ ID NO: 12390 - protein, 9 aa, synthetic construct
  source 1..9: note = Seed: AIASEFSSL
AMASEFSSI

SEQ ID NO: 12391 - protein, 9 aa, synthetic construct
  source 1..9: note = Seed: AIASEFSSL
AMASEFSSL

SEQ ID NO: 12392 - protein, 9 aa, synthetic construct
  source 1..9: note = Seed: AIASEFSSL
AMASEFSSM

SEQ ID NO: 12393 - protein, 9 aa, synthetic construct
  source 1..9: note = Seed: AIASEFSSL
AMASEFSST

SEQ ID NO: 12394 - protein, 9 aa, synthetic construct
  source 1..9: note = Seed: AIASEFSSL
AMASEFSSV

SEQ ID NO: 12395 - protein, 9 aa, synthetic construct
  source 1..9: note = Seed: AIASEFSSL
AMASEFSSW

SEQ ID NO: 12396 - protein, 9 aa, synthetic construct
  source 1..9: note = Seed: AIASEFSSL
AMASEFSSY

SEQ ID NO: 12397 - protein, 10 aa, synthetic construct
  source 1..10: note = Seed: AFAVDAAKAY
AMAVDAAKAF

SEQ ID NO: 12398 - protein, 10 aa, synthetic construct
  source 1..10: note = Seed: AFAVDAAKAY
AMAVDAAKAY

SEQ ID NO: 12399 - protein, 11 aa, synthetic construct
  source 1..11: note = Seed: AFAVDAAKAYK
AMAVDAAKAYR

SEQ ID NO: 12400 - protein, 9 aa, synthetic construct
  source 1..9: note = Seed: ALCADSIII
AMCADSIIV

SEQ ID NO: 12401 - protein, 9 aa, synthetic construct
  source 1..9: note = Seed: ALCEKALKY
AMCEKALKY

SEQ ID NO: 12402 - protein, 10 aa, synthetic construct
  source 1..10: note = Seed: ALCEKALKYL
AMCEKALKYI

SEQ ID NO: 12403 - protein, 10 aa, synthetic construct
  source 1..10: note = Seed: ALCEKALKYL
AMCEKALKYL

SEQ ID NO: 12404 - protein, 10 aa, synthetic construct
  source 1..10: note = Seed: ALCEKALKYL
AMCEKALKYV

SEQ ID NO: 12405 - protein, 9 aa, synthetic construct
  source 1..9: note = Seed: ALCTFLLNK
AMCTFLLNK

SEQ ID NO: 12406 - protein, 9 aa, synthetic construct
  source 1..9: note = Seed: ALCTFLLNK
AMCTFLLNR

SEQ ID NO: 12407 - protein, 9 aa, synthetic construct
  source 1..9: note = Seed: AVDAAKAYK
AMDAAKAYK

SEQ ID NO: 12408 - protein, 9 aa, synthetic construct
  source 1..9: note = Seed: AVDAAKAYK
AMDAAKAYR

SEQ ID NO: 12409 - protein, 9 aa, synthetic construct
  source 1..9: note = Seed: AVDCALDPL
AMDCALDPI

SEQ ID NO: 12410 - protein, 9 aa, synthetic construct
  source 1..9: note = Seed: AVDCALDPL
AMDCALDPL

SEQ ID NO: 12411 - protein, 9 aa, synthetic construct
  source 1..9: note = Seed: AVDCALDPL
AMDCALDPM

SEQ ID NO: 12412 - protein, 9 aa, synthetic construct
  source 1..9: note = Seed: AVDCALDPL
AMDCALDPV

SEQ ID NO: 12413 - protein, 9 aa, synthetic construct
  source 1..9: note = Seed: ALDISASIV
AMDISASIV

SEQ ID NO: 12414 - protein, 10 aa, synthetic construct
  source 1..10: note = Seed: ALDISASIVA
AMDISASIVV

SEQ ID NO: 12415 - protein, 9 aa, synthetic construct
  source 1..9: note = Seed: AGDSGFAAY
AMDSGFAAF

SEQ ID NO: 12416 - protein, 9 aa, synthetic construct
  source 1..9: note = Seed: AGDSGFAAY
AMDSGFAAM

SEQ ID NO: 12417 - protein, 9 aa, synthetic construct
  source 1..9: note = Seed: AGDSGFAAY
AMDSGFAAY

SEQ ID NO: 12418 - protein, 10 aa, synthetic construct
  source 1..10: note = Seed: AGEAANFCAL
AMEAANFCAA

SEQ ID NO: 12419 - protein, 10 aa, synthetic construct
  source 1..10: note = Seed: AGEAANFCAL
AMEAANFCAF

SEQ ID NO: 12420 - protein, 10 aa, synthetic construct
  source 1..10: note = Seed: AGEAANFCAL
AMEAANFCAL

SEQ ID NO: 12421 - protein, 10 aa, synthetic construct
  source 1..10: note = Seed: AGEAANFCAL
AMEAANFCAW

SEQ ID NO: 12422 - protein, 10 aa, synthetic construct
  source 1..10: note = Seed: ALEPLVDLPI
AMEPLVDLPV

SEQ ID NO: 12423 - protein, 9 aa, synthetic construct
  source 1..9: note = Seed: AQFAPSASA
AMFAPSASA

SEQ ID NO: 12424 - protein, 10 aa, synthetic construct
  source 1..10: note = Seed: AQFAPSASAF
AMFAPSASAF

SEQ ID NO: 12425 - protein, 11 aa, synthetic construct
  source 1..11: note = Seed: AQFAPSASAFF
AMFAPSASAFF

SEQ ID NO: 12426 - protein, 11 aa, synthetic construct
  source 1..11: note = Seed: AQFAPSASAFF
AMFAPSASAFH

SEQ ID NO: 12427 - protein, 11 aa, synthetic construct
  source 1..11: note = Seed: AQFAPSASAFF
AMFAPSASAFL

SEQ ID NO: 12428 - protein, 11 aa, synthetic construct
  source 1..11: note = Seed: AQFAPSASAFF
AMFAPSASAFM

SEQ ID NO: 12429 - protein, 11 aa, synthetic construct
  source 1..11: note = Seed: AQFAPSASAFF
AMFAPSASAFW

SEQ ID NO: 12430 - protein, 11 aa, synthetic construct
  source 1..11: note = Seed: AQFAPSASAFF
AMFAPSASAFY

SEQ ID NO: 12431 - protein, 10 aa, synthetic construct
  source 1..10: note = Seed: AQFAPSASAF
AMFAPSASAL

SEQ ID NO: 12432 - protein, 10 aa, synthetic construct
  source 1..10: note = Seed: AQFAPSASAF
AMFAPSASAM

SEQ ID NO: 12433 - protein, 10 aa, synthetic construct
  source 1..10: note = Seed: AQFAPSASAF
AMFAPSASAW

SEQ ID NO: 12434 - protein, 10 aa, synthetic construct
  source 1..10: note = Seed: AQFAPSASAF
AMFAPSASAY

SEQ ID NO: 12435 - protein, 9 aa, synthetic construct
  source 1..9: note = Seed: AQFAPSASA
AMFAPSASC

SEQ ID NO: 12436 - protein, 9 aa, synthetic construct
  source 1..9: note = Seed: AQFAPSASA
AMFAPSASF

SEQ ID NO: 12437 - protein, 9 aa, synthetic construct
  source 1..9: note = Seed: AQFAPSASA
AMFAPSASH

SEQ ID NO: 12438 - protein, 9 aa, synthetic construct
  source 1..9: note = Seed: AQFAPSASA
AMFAPSASI

SEQ ID NO: 12439 - protein, 9 aa, synthetic construct
  source 1..9: note = Seed: AQFAPSASA
AMFAPSASL

SEQ ID NO: 12440 - protein, 9 aa, synthetic construct
  source 1..9: note = Seed: AQFAPSASA
AMFAPSASM

SEQ ID NO: 12441 - protein, 9 aa, synthetic construct
  source 1..9: note = Seed: AQFAPSASA
AMFAPSAST

SEQ ID NO: 12442 - protein, 9 aa, synthetic construct
  source 1..9: note = Seed: AQFAPSASA
AMFAPSASV

SEQ ID NO: 12443 - protein, 9 aa, synthetic construct
  source 1..9: note = Seed: AQFAPSASA
AMFAPSASW

SEQ ID NO: 12444 - protein, 9 aa, synthetic construct
  source 1..9: note = Seed: AQFAPSASA
AMFAPSASY

SEQ ID NO: 12445 - protein, 9 aa, synthetic construct
  source 1..9: note = Seed: ASFDNFKFV
AMFDNFKFA

SEQ ID NO: 12446 - protein, 9 aa, synthetic construct
  source 1..9: note = Seed: ASFDNFKFV
AMFDNFKFC

SEQ ID NO: 12447 - protein, 9 aa, synthetic construct
  source 1..9: note = Seed: ASFDNFKFV
AMFDNFKFI

SEQ ID NO: 12448 - protein, 9 aa, synthetic construct
  source 1..9: note = Seed: ASFDNFKFV
AMFDNFKFK

SEQ ID NO: 12449 - protein, 9 aa, synthetic construct
  source 1..9: note = Seed: ASFDNFKFV
AMFDNFKFL

SEQ ID NO: 12450 - protein, 9 aa, synthetic construct
  source 1..9: note = Seed: ASFDNFKFV
AMFDNFKFM

SEQ ID NO: 12451 - protein, 9 aa, synthetic construct
  source 1..9: note = Seed: ASFDNFKFV
AMFDNFKFT

SEQ ID NO: 12452 - protein, 9 aa, synthetic construct
  source 1..9: note = Seed: ASFDNFKFV
AMFDNFKFV

SEQ ID NO: 12453 - protein, 10 aa, synthetic construct
  source 1..10: note = Seed: AYFNMVYMPA
AMFNMVYMPK

SEQ ID NO: 12454 - protein, 10 aa, synthetic construct
  source 1..10: note = Seed: ANFNVLFSTV
AMFNVLFSTA

SEQ ID NO: 12455 - protein, 10 aa, synthetic construct
  source 1..10: note = Seed: ANFNVLFSTV
AMFNVLFSTI

SEQ ID NO: 12456 - protein, 10 aa, synthetic construct
  source 1..10: note = Seed: ANFNVLFSTV
AMFNVLFSTL

SEQ ID NO: 12457 - protein, 10 aa, synthetic construct
  source 1..10: note = Seed: ANFNVLFSTV
AMFNVLFSTV

SEQ ID NO: 12458 - protein, 11 aa, synthetic construct
  source 1..11: note = Seed: ANFNVLFSTVF
AMFNVLFSTVF

SEQ ID NO: 12459 - protein, 11 aa, synthetic construct
  source 1..11: note = Seed: ANFNVLFSTVF
AMFNVLFSTVM

SEQ ID NO: 12460 - protein, 11 aa, synthetic construct
  source 1..11: note = Seed: ANFNVLFSTVF
AMFNVLFSTVY

SEQ ID NO: 12461 - protein, 10 aa, synthetic construct
  source 1..10: note = Seed: AGFPFNKWGK
AMFPFNKWGK

SEQ ID NO: 12462 - protein, 10 aa, synthetic construct
  source 1..10: note = Seed: AGFPFNKWGK
AMFPFNKWGR

SEQ ID NO: 12463 - protein, 8 aa, synthetic construct
  source 1..8: note = Seed: ASFRLFAR
AMFRLFAR

SEQ ID NO: 12464 - protein, 10 aa, synthetic construct
  source 1..10: note = Seed: ASFRLFARTR
AMFRLFARTK

SEQ ID NO: 12465 - protein, 10 aa, synthetic construct
  source 1..10: note = Seed: ASFRLFARTR
AMFRLFARTR

SEQ ID NO: 12466 - protein, 9 aa, synthetic construct
  source 1..9: note = Seed: AGFSLWVYK
AMFSLWVYH

SEQ ID NO: 12467 - protein, 9 aa, synthetic construct
  source 1..9: note = Seed: AGFSLWVYK
AMFSLWVYK

SEQ ID NO: 12468 - protein, 9 aa, synthetic construct
  source 1..9: note = Seed: AGFSLWVYK
AMFSLWVYR

SEQ ID NO: 12469 - protein, 9 aa, synthetic construct
  source 1..9: note = Seed: ASFSTFKCY
AMFSTFKCF

SEQ ID NO: 12470 - protein, 9 aa, synthetic construct
  source 1..9: note = Seed: ASFSTFKCY
AMFSTFKCK

SEQ ID NO: 12471 - protein, 9 aa, synthetic construct
  source 1..9: note = Seed: ASFSTFKCY
AMFSTFKCL

SEQ ID NO: 12472 - protein, 9 aa, synthetic construct
  source 1..9: note = Seed: ASFSTFKCY
AMFSTFKCM

SEQ ID NO: 12473 - protein, 9 aa, synthetic construct
  source 1..9: note = Seed: ASFSTFKCY
AMFSTFKCY

SEQ ID NO: 12474 - protein, 9 aa, synthetic construct
  source 1..9: note = Seed: AIFYLITPV
AMFYLITPA

SEQ ID NO: 12475 - protein, 9 aa, synthetic construct
  source 1..9: note = Seed: AIFYLITPV
AMFYLITPC

SEQ ID NO: 12476 - protein, 9 aa, synthetic construct
  source 1..9: note = Seed: AIFYLITPV
AMFYLITPF

SEQ ID NO: 12477 - protein, 9 aa, synthetic construct
  source 1..9: note = Seed: AIFYLITPV
AMFYLITPI

SEQ ID NO: 12478 - protein, 9 aa, synthetic construct
  source 1..9: note = Seed: AIFYLITPV
AMFYLITPL

SEQ ID NO: 12479 - protein, 9 aa, synthetic construct
  source 1..9: note = Seed: AIFYLITPV
AMFYLITPM

SEQ ID NO: 12480 - protein, 9 aa, synthetic construct
  source 1..9: note = Seed: AIFYLITPV
AMFYLITPS

SEQ ID NO: 12481 - protein, 9 aa, synthetic construct
  source 1..9: note = Seed: AIFYLITPV
AMFYLITPT

SEQ ID NO: 12482 - protein, 9 aa, synthetic construct
  source 1..9: note = Seed: AIFYLITPV
AMFYLITPV

SEQ ID NO: 12483 - protein, 10 aa, synthetic construct
  source 1..10: note = Seed: AIFYLITPVH
AMFYLITPVA

SEQ ID NO: 12484 - protein, 10 aa, synthetic construct
  source 1..10: note = Seed: AIFYLITPVH
AMFYLITPVC

SEQ ID NO: 12485 - protein, 10 aa, synthetic construct
  source 1..10: note = Seed: AIFYLITPVH
AMFYLITPVD

SEQ ID NO: 12486 - protein, 10 aa, synthetic construct
  source 1..10: note = Seed: AIFYLITPVH
AMFYLITPVE

SEQ ID NO: 12487 - protein, 10 aa, synthetic construct
  source 1..10: note = Seed: AIFYLITPVH
AMFYLITPVF

SEQ ID NO: 12488 - protein, 10 aa, synthetic construct
  source 1..10: note = Seed: AIFYLITPVH
AMFYLITPVG

SEQ ID NO: 12489 - protein, 10 aa, synthetic construct
  source 1..10: note = Seed: AIFYLITPVH
AMFYLITPVH

SEQ ID NO: 12490 - protein, 11 aa, synthetic construct
  source 1..11: note = Seed: AIFYLITPVHV
AMFYLITPVHI

SEQ ID NO: 12491 - protein, 11 aa, synthetic construct
  source 1..11: note = Seed: AIFYLITPVHV
AMFYLITPVHL

SEQ ID NO: 12492 - protein, 11 aa, synthetic construct
  source 1..11: note = Seed: AIFYLITPVHV
AMFYLITPVHV

SEQ ID NO: 12493 - protein, 10 aa, synthetic construct
  source 1..10: note = Seed: AIFYLITPVH
AMFYLITPVI

SEQ ID NO: 12494 - protein, 10 aa, synthetic construct
  source 1..10: note = Seed: AIFYLITPVH
AMFYLITPVK

SEQ ID NO: 12495 - protein, 10 aa, synthetic construct
  source 1..10: note = Seed: AIFYLITPVH
AMFYLITPVL

SEQ ID NO: 12496 - protein, 10 aa, synthetic construct
  source 1..10: note = Seed: AIFYLITPVH
AMFYLITPVM

SEQ ID NO: 12497 - protein, 10 aa, synthetic construct
  source 1..10: note = Seed: AIFYLITPVH
AMFYLITPVN

SEQ ID NO: 12498 - protein, 10 aa, synthetic construct
  source 1..10: note = Seed: AIFYLITPVH
AMFYLITPVP

SEQ ID NO: 12499 - protein, 10 aa, synthetic construct
  source 1..10: note = Seed: AIFYLITPVH
AMFYLITPVQ

SEQ ID NO: 12500 - protein, 10 aa, synthetic construct
  source 1..10: note = Seed: AIFYLITPVH
AMFYLITPVR

SEQ ID NO: 12501 - protein, 10 aa, synthetic construct
  source 1..10: note = Seed: AIFYLITPVH
AMFYLITPVS

SEQ ID NO: 12502 - protein, 10 aa, synthetic construct
  source 1..10: note = Seed: AIFYLITPVH
AMFYLITPVT

SEQ ID NO: 12503 - protein, 10 aa, synthetic construct
  source 1..10: note = Seed: AIFYLITPVH
AMFYLITPVV

SEQ ID NO: 12504 - protein, 10 aa, synthetic construct
  source 1..10: note = Seed: AIFYLITPVH
AMFYLITPVW

SEQ ID NO: 12505 - protein, 10 aa, synthetic construct
  source 1..10: note = Seed: AIFYLITPVH
AMFYLITPVY

SEQ ID NO: 12506 - protein, 9 aa, synthetic construct
  source 1..9: note = Seed: AIFYLITPV
AMFYLITPW

SEQ ID NO: 12507 - protein, 9 aa, synthetic construct
  source 1..9: note = Seed: AIFYLITPV
AMFYLITPY

SEQ ID NO: 12508 - protein, 10 aa, synthetic construct
  source 1..10: note = Seed: ASFYYVWKSY
AMFYYVWKSF

SEQ ID NO: 12509 - protein, 10 aa, synthetic construct
  source 1..10: note = Seed: ASFYYVWKSY
AMFYYVWKSK

SEQ ID NO: 12510 - protein, 10 aa, synthetic construct
  source 1..10: note = Seed: ASFYYVWKSY
AMFYYVWKSM

SEQ ID NO: 12511 - protein, 10 aa, synthetic construct
  source 1..10: note = Seed: ASFYYVWKSY
AMFYYVWKSY

SEQ ID NO: 12512 - protein, 11 aa, synthetic construct
  source 1..11: note = Seed: ASFYYVWKSYV
AMFYYVWKSYA

SEQ ID NO: 12513 - protein, 11 aa, synthetic construct
  source 1..11: note = Seed: ASFYYVWKSYV
AMFYYVWKSYI

SEQ ID NO: 12514 - protein, 11 aa, synthetic construct
  source 1..11: note = Seed: ASFYYVWKSYV
AMFYYVWKSYL

SEQ ID NO: 12515 - protein, 11 aa, synthetic construct
  source 1..11: note = Seed: ASFYYVWKSYV
AMFYYVWKSYM

SEQ ID NO: 12516 - protein, 11 aa, synthetic construct
  source 1..11: note = Seed: ASFYYVWKSYV
AMFYYVWKSYV

SEQ ID NO: 12517 - protein, 8 aa, synthetic construct
  source 1..8: note = Seed: ASFYYVWK
AMFYYVWR

SEQ ID NO: 12518 - protein, 9 aa, synthetic construct
  source 1..9: note = Seed: AFGGCVFSY
AMGGCVFSY

SEQ ID NO: 12519 - protein, 9 aa, synthetic construct
  source 1..9: note = Seed: ANGQVFGLY
AMGQVFGLY

SEQ ID NO: 12520 - protein, 10 aa, synthetic construct
  source 1..10: note = Seed: ANGQVFGLYK
AMGQVFGLYK

SEQ ID NO: 12521 - protein, 10 aa, synthetic construct
  source 1..10: note = Seed: ANGQVFGLYK
AMGQVFGLYR

SEQ ID NO: 12522 - protein, 9 aa, synthetic construct
  source 1..9: note = Seed: AVHFISNSW
AMHFISNSF

SEQ ID NO: 12523 - protein, 9 aa, synthetic construct
  source 1..9: note = Seed: AVHFISNSW
AMHFISNSI

SEQ ID NO: 12524 - protein, 9 aa, synthetic construct
  source 1..9: note = Seed: AVHFISNSW
AMHFISNSW

SEQ ID NO: 12525 - protein, 10 aa, synthetic construct
  source 1..10: note = Seed: ALIISVTSNY
AMIISVTSNF

SEQ ID NO: 12526 - protein, 10 aa, synthetic construct
  source 1..10: note = Seed: ALIISVTSNY
AMIISVTSNK

SEQ ID NO: 12527 - protein, 10 aa, synthetic construct
  source 1..10: note = Seed: ALIISVTSNY
AMIISVTSNM

SEQ ID NO: 12528 - protein, 10 aa, synthetic construct
  source 1..10: note = Seed: ALIISVTSNY
AMIISVTSNY

SEQ ID NO: 12529 - protein, 9 aa, synthetic construct
  source 1..9: note = Seed: ASIKNFKSV
AMIKNFKSA

SEQ ID NO: 12530 - protein, 9 aa, synthetic construct
  source 1..9: note = Seed: ASIKNFKSV
AMIKNFKSI

SEQ ID NO: 12531 - protein, 9 aa, synthetic construct
  source 1..9: note = Seed: ASIKNFKSV
AMIKNFKSL

SEQ ID NO: 12532 - protein, 9 aa, synthetic construct
  source 1..9: note = Seed: ASIKNFKSV
AMIKNFKSV

SEQ ID NO: 12533 - protein, 10 aa, synthetic construct
  source 1..10: note = Seed: AYILFTRFFY
AMILFTRFFK

SEQ ID NO: 12534 - protein, 10 aa, synthetic construct
  source 1..10: note = Seed: AYILFTRFFY
AMILFTRFFR

SEQ ID NO: 12535 - protein, 10 aa, synthetic construct
  source 1..10: note = Seed: AYILFTRFFY
AMILFTRFFY

SEQ ID NO: 12536 - protein, 11 aa, synthetic construct
  source 1..11: note = Seed: AYILFTRFFYV
AMILFTRFFYA

SEQ ID NO: 12537 - protein, 11 aa, synthetic construct
  source 1..11: note = Seed: AYILFTRFFYV
AMILFTRFFYI

SEQ ID NO: 12538 - protein, 11 aa, synthetic construct
  source 1..11: note = Seed: AYILFTRFFYV
AMILFTRFFYL

SEQ ID NO: 12539 - protein, 11 aa, synthetic construct
  source 1..11: note = Seed: AYILFTRFFYV
AMILFTRFFYV

SEQ ID NO: 12540 - protein, 9 aa, synthetic construct
  source 1..9: note = Seed: AVINGDRWF
AMINGDRWF

SEQ ID NO: 12541 - protein, 9 aa, synthetic construct
  source 1..9: note = Seed: AVINGDRWF
AMINGDRWY

SEQ ID NO: 12542 - protein, 11 aa, synthetic construct
  source 1..11: note = Seed: AHISTIGVCSM
AMISTIGVCSF

SEQ ID NO: 12543 - protein, 11 aa, synthetic construct
  source 1..11: note = Seed: AHISTIGVCSM
AMISTIGVCSY

SEQ ID NO: 12544 - protein, 10 aa, synthetic construct
  source 1..10: note = Seed: AIKCVPQADV
AMKCVPQADV

SEQ ID NO: 12545 - protein, 9 aa, synthetic construct
  source 1..9: note = Seed: AAKKNNLPF
AMKKNNLPF

SEQ ID NO: 12546 - protein, 10 aa, synthetic construct
  source 1..10: note = Seed: AAKKNNLPFK
AMKKNNLPFK

SEQ ID NO: 12547 - protein, 9 aa, synthetic construct
  source 1..9: note = Seed: AAKKNNLPF
AMKKNNLPL

SEQ ID NO: 12548 - protein, 9 aa, synthetic construct
  source 1..9: note = Seed: AAKKNNLPF
AMKKNNLPM

SEQ ID NO: 12549 - protein, 9 aa, synthetic construct
  source 1..9: note = Seed: AAKKNNLPF
AMKKNNLPY

SEQ ID NO: 12550 - protein, 9 aa, synthetic construct
  source 1..9: note = Seed: ASKKPRQKR
AMKKPRQKR

SEQ ID NO: 12551 - protein, 9 aa, synthetic construct
  source 1..9: note = Seed: AKKNNLPFK
AMKNNLPFA

SEQ ID NO: 12552 - protein, 9 aa, synthetic construct
  source 1..9: note = Seed: AKKNNLPFK
AMKNNLPFI

SEQ ID NO: 12553 - protein, 9 aa, synthetic construct
  source 1..9: note = Seed: AKKNNLPFK
AMKNNLPFK

SEQ ID NO: 12554 - protein, 9 aa, synthetic construct
  source 1..9: note = Seed: AKKNNLPFK
AMKNNLPFM

SEQ ID NO: 12555 - protein, 9 aa, synthetic construct
  source 1..9: note = Seed: AKKNNLPFK
AMKNNLPFV

SEQ ID NO: 12556 - protein, 10 aa, synthetic construct
  source 1..10: note = Seed: AALALLLLDR
AMLALLLLDK

SEQ ID NO: 12557 - protein, 10 aa, synthetic construct
  source 1..10: note = Seed: AALALLLLDR
AMLALLLLDR

SEQ ID NO: 12558 - protein, 10 aa, synthetic construct
  source 1..10: note = Seed: AALCTFLLNK
AMLCTFLLNK

SEQ ID NO: 12559 - protein, 10 aa, synthetic construct
  source 1..10: note = Seed: AALCTFLLNK
AMLCTFLLNR

SEQ ID NO: 12560 - protein, 10 aa, synthetic construct
  source 1..10: note = Seed: ASLINTLNDL
AMLINTLNDA

SEQ ID NO: 12561 - protein, 10 aa, synthetic construct
  source 1..10: note = Seed: ASLINTLNDL
AMLINTLNDI

SEQ ID NO: 12562 - protein, 10 aa, synthetic construct
  source 1..10: note = Seed: ASLINTLNDL
AMLINTLNDV

SEQ ID NO: 12563 - protein, 9 aa, synthetic construct
  source 1..9: note = Seed: ASLNGVTLI
AMLNGVTLA

SEQ ID NO: 12564 - protein, 9 aa, synthetic construct
  source 1..9: note = Seed: ASLNGVTLI
AMLNGVTLI

SEQ ID NO: 12565 - protein, 9 aa, synthetic construct
  source 1..9: note = Seed: ASLNGVTLI
AMLNGVTLL

SEQ ID NO: 12566 - protein, 9 aa, synthetic construct
  source 1..9: note = Seed: ASLNGVTLI
AMLNGVTLV

SEQ ID NO: 12567 - protein, 9 aa, synthetic construct
  source 1..9: note = Seed: ASLNGVTLI
AMLNGVTLW

SEQ ID NO: 12568 - protein, 9 aa, synthetic construct
  source 1..9: note = Seed: AQLPAPRTL
AMLPAPRTF

SEQ ID NO: 12569 - protein, 9 aa, synthetic construct
  source 1..9: note = Seed: AQLPAPRTL
AMLPAPRTL

SEQ ID NO: 12570 - protein, 10 aa, synthetic construct
  source 1..10: note = Seed: AQLPAPRTLL
AMLPAPRTLF

SEQ ID NO: 12571 - protein, 10 aa, synthetic construct
  source 1..10: note = Seed: AQLPAPRTLL
AMLPAPRTLY

SEQ ID NO: 12572 - protein, 9 aa, synthetic construct
  source 1..9: note = Seed: AQLPAPRTL
AMLPAPRTM

SEQ ID NO: 12573 - protein, 9 aa, synthetic construct
  source 1..9: note = Seed: AQLPAPRTL
AMLPAPRTY

SEQ ID NO: 12574 - protein, 10 aa, synthetic construct
  source 1..10: note = Seed: ATLQAIASEF
AMLQAIASEF

SEQ ID NO: 12575 - protein, 10 aa, synthetic construct
  source 1..10: note = Seed: ATLQAIASEF
AMLQAIASEM

SEQ ID NO: 12576 - protein, 10 aa, synthetic construct
  source 1..10: note = Seed: ATLQAIASEF
AMLQAIASEY

SEQ ID NO: 12577 - protein, 9 aa, synthetic construct
  source 1..9: note = Seed: AALQIPFAM
AMLQIPFAF

SEQ ID NO: 12578 - protein, 9 aa, synthetic construct
  source 1..9: note = Seed: AALQIPFAM
AMLQIPFAM

SEQ ID NO: 12579 - protein, 11 aa, synthetic construct
  source 1..11: note = Seed: AALQIPFAMQM
AMLQIPFAMQF

SEQ ID NO: 12580 - protein, 11 aa, synthetic construct
  source 1..11: note = Seed: AALQIPFAMQM
AMLQIPFAMQY

SEQ ID NO: 12581 - protein, 9 aa, synthetic construct
  source 1..9: note = Seed: AALQIPFAM
AMLQIPFAW

SEQ ID NO: 12582 - protein, 9 aa, synthetic construct
  source 1..9: note = Seed: AALQIPFAM
AMLQIPFAY

SEQ ID NO: 12583 - protein, 9 aa, synthetic construct
  source 1..9: note = Seed: AVLQSGFRK
AMLQSGFRK

SEQ ID NO: 12584 - protein, 9 aa, synthetic construct
  source 1..9: note = Seed: AVLQSGFRK
AMLQSGFRR

SEQ ID NO: 12585 - protein, 9 aa, synthetic construct
  source 1..9: note = Seed: ALLSDLQDL
AMLSDLQDI

SEQ ID NO: 12586 - protein, 9 aa, synthetic construct
  source 1..9: note = Seed: ALLSDLQDL
AMLSDLQDL

SEQ ID NO: 12587 - protein, 10 aa, synthetic construct
  source 1..10: note = Seed: ALLSDLQDLK
AMLSDLQDLK

SEQ ID NO: 12588 - protein, 9 aa, synthetic construct
  source 1..9: note = Seed: ALLSDLQDL
AMLSDLQDV

SEQ ID NO: 12589 - protein, 11 aa, synthetic construct
  source 1..11: note = Seed: AILTALRLCAY
AMLTALRLCAY

SEQ ID NO: 12590 - protein, 10 aa, synthetic construct
  source 1..10: note = Seed: APLVGTPVCI
AMLVGTPVCV

SEQ ID NO: 12591 - protein, 10 aa, synthetic construct
  source 1..10: note = Seed: ADLVYALRHF
AMLVYALRHF

SEQ ID NO: 12592 - protein, 10 aa, synthetic construct
  source 1..10: note = Seed: ADLVYALRHF
AMLVYALRHY

SEQ ID NO: 12593 - protein, 10 aa, synthetic construct
  source 1..10: note = Seed: AMMFVKHKHA
AMMFVKHKHI

SEQ ID NO: 12594 - protein, 10 aa, synthetic construct
  source 1..10: note = Seed: AMMFVKHKHA
AMMFVKHKHL

SEQ ID NO: 12595 - protein, 10 aa, synthetic construct
  source 1..10: note = Seed: AMMFVKHKHA
AMMFVKHKHV

SEQ ID NO: 12596 - protein, 9 aa, synthetic construct
  source 1..9: note = Seed: AMMFVKHKH
AMMFVKHKK

SEQ ID NO: 12597 - protein, 9 aa, synthetic construct
  source 1..9: note = Seed: AMMFVKHKH
AMMFVKHKR

SEQ ID NO: 12598 - protein, 9 aa, synthetic construct
  source 1..9: note = Seed: ALNKATNNA
AMNKATNNA

SEQ ID NO: 12599 - protein, 10 aa, synthetic construct
  source 1..10: note = Seed: ALNKATNNAM
AMNKATNNAF

SEQ ID NO: 12600 - protein, 10 aa, synthetic construct
  source 1..10: note = Seed: ALNKATNNAM
AMNKATNNAM

SEQ ID NO: 12601 - protein, 10 aa, synthetic construct
  source 1..10: note = Seed: ALNKATNNAM
AMNKATNNAV

SEQ ID NO: 12602 - protein, 10 aa, synthetic construct
  source 1..10: note = Seed: ALNKATNNAM
AMNKATNNAY

SEQ ID NO: 12603 - protein, 9 aa, synthetic construct
  source 1..9: note = Seed: ALNKATNNA
AMNKATNNI

SEQ ID NO: 12604 - protein, 9 aa, synthetic construct
  source 1..9: note = Seed: ALNKATNNA
AMNKATNNL

SEQ ID NO: 12605 - protein, 9 aa, synthetic construct
  source 1..9: note = Seed: ALNKATNNA
AMNKATNNV

SEQ ID NO: 12606 - protein, 11 aa, synthetic construct
  source 1..11: note = Seed: AKNLNESLIDL
AMNLNESLIDV

SEQ ID NO: 12607 - protein, 9 aa, synthetic construct
  source 1..9: note = Seed: ALNNIINNA
AMNNIINNA

SEQ ID NO: 12608 - protein, 10 aa, synthetic construct
  source 1..10: note = Seed: ALNNIINNAR
AMNNIINNAK

SEQ ID NO: 12609 - protein, 10 aa, synthetic construct
  source 1..10: note = Seed: ALNNIINNAR
AMNNIINNAR

SEQ ID NO: 12610 - protein, 9 aa, synthetic construct
  source 1..9: note = Seed: ALNNIINNA
AMNNIINNC

SEQ ID NO: 12611 - protein, 9 aa, synthetic construct
  source 1..9: note = Seed: ALNNIINNA
AMNNIINNI

SEQ ID NO: 12612 - protein, 9 aa, synthetic construct
  source 1..9: note = Seed: ALNNIINNA
AMNNIINNL

SEQ ID NO: 12613 - protein, 9 aa, synthetic construct
  source 1..9: note = Seed: ALNNIINNA
AMNNIINNM

SEQ ID NO: 12614 - protein, 9 aa, synthetic construct
  source 1..9: note = Seed: ALNNIINNA
AMNNIINNV

SEQ ID NO: 12615 - protein, 9 aa, synthetic construct
  source 1..9: note = Seed: AINRPQIGV
AMNRPQIGI

SEQ ID NO: 12616 - protein, 9 aa, synthetic construct
  source 1..9: note = Seed: AINRPQIGV
AMNRPQIGL

SEQ ID NO: 12617 - protein, 9 aa, synthetic construct
  source 1..9: note = Seed: AINRPQIGV
AMNRPQIGV

SEQ ID NO: 12618 - protein, 10 aa, synthetic construct
  source 1..10: note = Seed: AINRPQIGVV
AMNRPQIGVV

SEQ ID NO: 12619 - protein, 10 aa, synthetic construct
  source 1..10: note = Seed: AQNSVRVLQK
AMNSVRVLQK

SEQ ID NO: 12620 - protein, 10 aa, synthetic construct
  source 1..10: note = Seed: AQNSVRVLQK
AMNSVRVLQR

SEQ ID NO: 12621 - protein, 10 aa, synthetic construct
  source 1..10: note = Seed: AIPTNFTISV
AMPTNFTISA

SEQ ID NO: 12622 - protein, 10 aa, synthetic construct
  source 1..10: note = Seed: AIPTNFTISV
AMPTNFTISI

SEQ ID NO: 12623 - protein, 10 aa, synthetic construct
  source 1..10: note = Seed: AIPTNFTISV
AMPTNFTISL

SEQ ID NO: 12624 - protein, 10 aa, synthetic construct
  source 1..10: note = Seed: AIPTNFTISV
AMPTNFTISM

SEQ ID NO: 12625 - protein, 10 aa, synthetic construct
  source 1..10: note = Seed: AIPTNFTISV
AMPTNFTISV

SEQ ID NO: 12626 - protein, 10 aa, synthetic construct
  source 1..10: note = Seed: ADQAMTQMYK
AMQAMTQMYK

SEQ ID NO: 12627 - protein, 10 aa, synthetic construct
  source 1..10: note = Seed: ADQAMTQMYK
AMQAMTQMYR

SEQ ID NO: 12628 - protein, 10 aa, synthetic construct
  source 1..10: note = Seed: ADQAMTQMYK
AMQAMTQMYY

SEQ ID NO: 12629 - protein, 9 aa, synthetic construct
  source 1..9: note = Seed: ALQDAYYRA
AMQDAYYRA

SEQ ID NO: 12630 - protein, 10 aa, synthetic construct
  source 1..10: note = Seed: ALQDAYYRAR
AMQDAYYRAR

SEQ ID NO: 12631 - protein, 9 aa, synthetic construct
  source 1..9: note = Seed: ALQDAYYRA
AMQDAYYRI

SEQ ID NO: 12632 - protein, 9 aa, synthetic construct
  source 1..9: note = Seed: ALQDAYYRA
AMQDAYYRL

SEQ ID NO: 12633 - protein, 9 aa, synthetic construct
  source 1..9: note = Seed: ALQDAYYRA
AMQDAYYRM

SEQ ID NO: 12634 - protein, 9 aa, synthetic construct
  source 1..9: note = Seed: ALQDAYYRA
AMQDAYYRT

SEQ ID NO: 12635 - protein, 9 aa, synthetic construct
  source 1..9: note = Seed: ALQDAYYRA
AMQDAYYRV

SEQ ID NO: 12636 - protein, 10 aa, synthetic construct
  source 1..10: note = Seed: ALQIPFAMQM
AMQIPFAMQA

SEQ ID NO: 12637 - protein, 10 aa, synthetic construct
  source 1..10: note = Seed: ALQIPFAMQM
AMQIPFAMQF

SEQ ID NO: 12638 - protein, 10 aa, synthetic construct
  source 1..10: note = Seed: ALQIPFAMQM
AMQIPFAMQI

SEQ ID NO: 12639 - protein, 10 aa, synthetic construct
  source 1..10: note = Seed: ALQIPFAMQM
AMQIPFAMQL

SEQ ID NO: 12640 - protein, 10 aa, synthetic construct
  source 1..10: note = Seed: ALQIPFAMQM
AMQIPFAMQM

SEQ ID NO: 12641 - protein, 10 aa, synthetic construct
  source 1..10: note = Seed: ALQIPFAMQM
AMQIPFAMQV

SEQ ID NO: 12642 - protein, 10 aa, synthetic construct
  source 1..10: note = Seed: ALQIPFAMQM
AMQIPFAMQY

SEQ ID NO: 12643 - protein, 9 aa, synthetic construct
  source 1..9: note = Seed: AMQTMLFTM
AMQTMLFTA

SEQ ID NO: 12644 - protein, 9 aa, synthetic construct
  source 1..9: note = Seed: AMQTMLFTM
AMQTMLFTF

SEQ ID NO: 12645 - protein, 9 aa, synthetic construct
  source 1..9: note = Seed: AMQTMLFTM
AMQTMLFTI

SEQ ID NO: 12646 - protein, 9 aa, synthetic construct
  source 1..9: note = Seed: AMQTMLFTM
AMQTMLFTL

SEQ ID NO: 12647 - protein, 9 aa, synthetic construct
  source 1..9: note = Seed: AMQTMLFTM
AMQTMLFTT

SEQ ID NO: 12648 - protein, 9 aa, synthetic construct
  source 1..9: note = Seed: AMQTMLFTM
AMQTMLFTV

SEQ ID NO: 12649 - protein, 9 aa, synthetic construct
  source 1..9: note = Seed: AMQTMLFTM
AMQTMLFTW

SEQ ID NO: 12650 - protein, 9 aa, synthetic construct
  source 1..9: note = Seed: AMQTMLFTM
AMQTMLFTY

SEQ ID NO: 12651 - protein, 9 aa, synthetic construct
  source 1..9: note = Seed: ALRANSAVK
AMRANSAVK

SEQ ID NO: 12652 - protein, 10 aa, synthetic construct
  source 1..10: note = Seed: ALRANSAVKL
AMRANSAVKV

SEQ ID NO: 12653 - protein, 9 aa, synthetic construct
  source 1..9: note = Seed: ALRANSAVK
AMRANSAVR

SEQ ID NO: 12654 - protein, 9 aa, synthetic construct
  source 1..9: note = Seed: ATREAVGTN
AMREAVGTK

SEQ ID NO: 12655 - protein, 10 aa, synthetic construct
  source 1..10: note = Seed: ATREAVGTNL
AMREAVGTNK

SEQ ID NO: 12656 - protein, 8 aa, synthetic construct
  source 1..8: note = Seed: ATRFASVY
AMRFASVF

SEQ ID NO: 12657 - protein, 8 aa, synthetic construct
  source 1..8: note = Seed: ATRFASVY
AMRFASVY

SEQ ID NO: 12658 - protein, 9 aa, synthetic construct
  source 1..9: note = Seed: ATRFASVYA
AMRFASVYA

SEQ ID NO: 12659 - protein, 9 aa, synthetic construct
  source 1..9: note = Seed: ATRFASVYA
AMRFASVYG

SEQ ID NO: 12660 - protein, 9 aa, synthetic construct
  source 1..9: note = Seed: ATRFASVYA
AMRFASVYI

SEQ ID NO: 12661 - protein, 9 aa, synthetic construct
  source 1..9: note = Seed: ATRFASVYA
AMRFASVYK

SEQ ID NO: 12662 - protein, 9 aa, synthetic construct
  source 1..9: note = Seed: ATRFASVYA
AMRFASVYL

SEQ ID NO: 12663 - protein, 9 aa, synthetic construct
  source 1..9: note = Seed: ATRFASVYA
AMRFASVYM

SEQ ID NO: 12664 - protein, 9 aa, synthetic construct
  source 1..9: note = Seed: ATRFASVYA
AMRFASVYP

SEQ ID NO: 12665 - protein, 9 aa, synthetic construct
  source 1..9: note = Seed: ATRFASVYA
AMRFASVYR

SEQ ID NO: 12666 - protein, 9 aa, synthetic construct
  source 1..9: note = Seed: ATRFASVYA
AMRFASVYS

SEQ ID NO: 12667 - protein, 9 aa, synthetic construct
  source 1..9: note = Seed: ATRFASVYA
AMRFASVYT

SEQ ID NO: 12668 - protein, 9 aa, synthetic construct
  source 1..9: note = Seed: ATRFASVYA
AMRFASVYV

SEQ ID NO: 12669 - protein, 9 aa, synthetic construct
  source 1..9: note = Seed: ATRFASVYA
AMRFASVYY

SEQ ID NO: 12670 - protein, 9 aa, synthetic construct
  source 1..9: note = Seed: AYRFNGIGV
AMRFNGIGK

SEQ ID NO: 12671 - protein, 9 aa, synthetic construct
  source 1..9: note = Seed: AWRKAVFIS
AMRKAVFIA

SEQ ID NO: 12672 - protein, 9 aa, synthetic construct
  source 1..9: note = Seed: AWRKAVFIS
AMRKAVFII

SEQ ID NO: 12673 - protein, 9 aa, synthetic construct
  source 1..9: note = Seed: AWRKAVFIS
AMRKAVFIK

SEQ ID NO: 12674 - protein, 9 aa, synthetic construct
  source 1..9: note = Seed: AWRKAVFIS
AMRKAVFIM

SEQ ID NO: 12675 - protein, 9 aa, synthetic construct
  source 1..9: note = Seed: AWRKAVFIS
AMRKAVFIS

SEQ ID NO: 12676 - protein, 11 aa, synthetic construct
  source 1..11: note = Seed: AWRKAVFISPY
AMRKAVFISPF

SEQ ID NO: 12677 - protein, 11 aa, synthetic construct
  source 1..11: note = Seed: AWRKAVFISPY
AMRKAVFISPY

SEQ ID NO: 12678 - protein, 9 aa, synthetic construct
  source 1..9: note = Seed: AWRKAVFIS
AMRKAVFIV

SEQ ID NO: 12679 - protein, 9 aa, synthetic construct
  source 1..9: note = Seed: AMRNAGIVG
AMRNAGIVA

SEQ ID NO: 12680 - protein, 9 aa, synthetic construct
  source 1..9: note = Seed: AMRNAGIVG
AMRNAGIVF

SEQ ID NO: 12681 - protein, 10 aa, synthetic construct
  source 1..10: note = Seed: AMRNAGIVGV
AMRNAGIVGA

SEQ ID NO: 12682 - protein, 10 aa, synthetic construct
  source 1..10: note = Seed: AMRNAGIVGV
AMRNAGIVGI

SEQ ID NO: 12683 - protein, 10 aa, synthetic construct
  source 1..10: note = Seed: AMRNAGIVGV
AMRNAGIVGK

SEQ ID NO: 12684 - protein, 10 aa, synthetic construct
  source 1..10: note = Seed: AMRNAGIVGV
AMRNAGIVGL

SEQ ID NO: 12685 - protein, 11 aa, synthetic construct
  source 1..11: note = Seed: AMRNAGIVGVL
AMRNAGIVGVF

SEQ ID NO: 12686 - protein, 11 aa, synthetic construct
  source 1..11: note = Seed: AMRNAGIVGVL
AMRNAGIVGVV

SEQ ID NO: 12687 - protein, 11 aa, synthetic construct
  source 1..11: note = Seed: AMRNAGIVGVL
AMRNAGIVGVY

SEQ ID NO: 12688 - protein, 9 aa, synthetic construct
  source 1..9: note = Seed: AMRNAGIVG
AMRNAGIVI

SEQ ID NO: 12689 - protein, 9 aa, synthetic construct
  source 1..9: note = Seed: AMRNAGIVG
AMRNAGIVK

SEQ ID NO: 12690 - protein, 9 aa, synthetic construct
  source 1..9: note = Seed: AMRNAGIVG
AMRNAGIVL

SEQ ID NO: 12691 - protein, 9 aa, synthetic construct
  source 1..9: note = Seed: AMRNAGIVG
AMRNAGIVM

SEQ ID NO: 12692 - protein, 9 aa, synthetic construct
  source 1..9: note = Seed: AMRNAGIVG
AMRNAGIVV

SEQ ID NO: 12693 - protein, 9 aa, synthetic construct
  source 1..9: note = Seed: AMRNAGIVG
AMRNAGIVW

SEQ ID NO: 12694 - protein, 9 aa, synthetic construct
  source 1..9: note = Seed: AMRNAGIVG
AMRNAGIVY

SEQ ID NO: 12695 - protein, 9 aa, synthetic construct
  source 1..9: note = Seed: AARQGFVDS
AMRQGFVDK

SEQ ID NO: 12696 - protein, 9 aa, synthetic construct
  source 1..9: note = Seed: ATRVECTTI
AMRVECTTK

SEQ ID NO: 12697 - protein, 9 aa, synthetic construct
  source 1..9: note = Seed: ATSACVLAA
AMSACVLAI

SEQ ID NO: 12698 - protein, 9 aa, synthetic construct
  source 1..9: note = Seed: ATSACVLAA
AMSACVLAL

SEQ ID NO: 12699 - protein, 9 aa, synthetic construct
  source 1..9: note = Seed: ATSACVLAA
AMSACVLAV

SEQ ID NO: 12700 - protein, 9 aa, synthetic construct
  source 1..9: note = Seed: AMSAFAMMF
AMSAFAMMA

SEQ ID NO: 12701 - protein, 10 aa, synthetic construct
  source 1..10: note = Seed: AMSAFAMMFV
AMSAFAMMFA

SEQ ID NO: 12702 - protein, 10 aa, synthetic construct
  source 1..10: note = Seed: AMSAFAMMFV
AMSAFAMMFI

SEQ ID NO: 12703 - protein, 10 aa, synthetic construct
  source 1..10: note = Seed: AMSAFAMMFV
AMSAFAMMFL

SEQ ID NO: 12704 - protein, 10 aa, synthetic construct
  source 1..10: note = Seed: AMSAFAMMFV
AMSAFAMMFM

SEQ ID NO: 12705 - protein, 11 aa, synthetic construct
  source 1..11: note = Seed: AMSAFAMMFVK
AMSAFAMMFVR

SEQ ID NO: 12706 - protein, 11 aa, synthetic construct
  source 1..11: note = Seed: AMSAFAMMFVK
AMSAFAMMFVV

SEQ ID NO: 12707 - protein, 9 aa, synthetic construct
  source 1..9: note = Seed: AMSAFAMMF
AMSAFAMMI

SEQ ID NO: 12708 - protein, 9 aa, synthetic construct
  source 1..9: note = Seed: AMSAFAMMF
AMSAFAMML

SEQ ID NO: 12709 - protein, 9 aa, synthetic construct
  source 1..9: note = Seed: AMSAFAMMF
AMSAFAMMM

SEQ ID NO: 12710 - protein, 9 aa, synthetic construct
  source 1..9: note = Seed: AMSAFAMMF
AMSAFAMMT

SEQ ID NO: 12711 - protein, 9 aa, synthetic construct
  source 1..9: note = Seed: AMSAFAMMF
AMSAFAMMV

SEQ ID NO: 12712 - protein, 9 aa, synthetic construct
  source 1..9: note = Seed: AMSAFAMMF
AMSAFAMMW

SEQ ID NO: 12713 - protein, 9 aa, synthetic construct
  source 1..9: note = Seed: AMSAFAMMF
AMSAFAMMY

SEQ ID NO: 12714 - protein, 9 aa, synthetic construct
  source 1..9: note = Seed: AISAKNRAR
AMSAKNRAR

SEQ ID NO: 12715 - protein, 10 aa, synthetic construct
  source 1..10: note = Seed: APSASAFFGM
AMSASAFFGF

SEQ ID NO: 12716 - protein, 10 aa, synthetic construct
  source 1..10: note = Seed: APSASAFFGM
AMSASAFFGW

SEQ ID NO: 12717 - protein, 9 aa, synthetic construct
  source 1..9: note = Seed: AHSCNVNRF
AMSCNVNRF

SEQ ID NO: 12718 - protein, 9 aa, synthetic construct
  source 1..9: note = Seed: AHSCNVNRF
AMSCNVNRY

SEQ ID NO: 12719 - protein, 10 aa, synthetic construct
  source 1..10: note = Seed: AYSRYRIGNY
AMSRYRIGNY

SEQ ID NO: 12720 - protein, 11 aa, synthetic construct
  source 1..11: note = Seed: AYSRYRIGNYK
AMSRYRIGNYR

SEQ ID NO: 12721 - protein, 9 aa, synthetic construct
  source 1..9: note = Seed: ASSSEAFLI
AMSSEAFLW

SEQ ID NO: 12722 - protein, 9 aa, synthetic construct
  source 1..9: note = Seed: AISSVLNDI
AMSSVLNDA

SEQ ID NO: 12723 - protein, 9 aa, synthetic construct
  source 1..9: note = Seed: AISSVLNDI
AMSSVLNDI

SEQ ID NO: 12724 - protein, 10 aa, synthetic construct
  source 1..10: note = Seed: AISSVLNDIL
AMSSVLNDIA

SEQ ID NO: 12725 - protein, 10 aa, synthetic construct
  source 1..10: note = Seed: AISSVLNDIL
AMSSVLNDII

SEQ ID NO: 12726 - protein, 10 aa, synthetic construct
  source 1..10: note = Seed: AISSVLNDIL
AMSSVLNDIL

SEQ ID NO: 12727 - protein, 10 aa, synthetic construct
  source 1..10: note = Seed: AISSVLNDIL
AMSSVLNDIV

SEQ ID NO: 12728 - protein, 9 aa, synthetic construct
  source 1..9: note = Seed: AISSVLNDI
AMSSVLNDL

SEQ ID NO: 12729 - protein, 9 aa, synthetic construct
  source 1..9: note = Seed: AISSVLNDI
AMSSVLNDM

SEQ ID NO: 12730 - protein, 9 aa, synthetic construct
  source 1..9: note = Seed: AISSVLNDI
AMSSVLNDV

SEQ ID NO: 12731 - protein, 10 aa, synthetic construct
  source 1..10: note = Seed: AVTANVNALL
AMTANVNALA

SEQ ID NO: 12732 - protein, 10 aa, synthetic construct
  source 1..10: note = Seed: AVTANVNALL
AMTANVNALI

SEQ ID NO: 12733 - protein, 10 aa, synthetic construct
  source 1..10: note = Seed: AVTANVNALL
AMTANVNALL

SEQ ID NO: 12734 - protein, 10 aa, synthetic construct
  source 1..10: note = Seed: AVTANVNALL
AMTANVNALM

SEQ ID NO: 12735 - protein, 10 aa, synthetic construct
  source 1..10: note = Seed: AVTANVNALL
AMTANVNALV

SEQ ID NO: 12736 - protein, 9 aa, synthetic construct
  source 1..9: note = Seed: AVTANVNAL
AMTANVNAV

SEQ ID NO: 12737 - protein, 9 aa, synthetic construct
  source 1..9: note = Seed: ATTAYANSV
AMTAYANSA

SEQ ID NO: 12738 - protein, 9 aa, synthetic construct
  source 1..9: note = Seed: ATTAYANSV
AMTAYANSI

SEQ ID NO: 12739 - protein, 9 aa, synthetic construct
  source 1..9: note = Seed: ATTAYANSV
AMTAYANSL

SEQ ID NO: 12740 - protein, 9 aa, synthetic construct
  source 1..9: note = Seed: ATTAYANSV
AMTAYANSV

SEQ ID NO: 12741 - protein, 10 aa, synthetic construct
  source 1..10: note = Seed: ATTAYANSVF
AMTAYANSVF

SEQ ID NO: 12742 - protein, 10 aa, synthetic construct
  source 1..10: note = Seed: ATTAYANSVF
AMTAYANSVM

SEQ ID NO: 12743 - protein, 10 aa, synthetic construct
  source 1..10: note = Seed: ATTAYANSVF
AMTAYANSVW

SEQ ID NO: 12744 - protein, 10 aa, synthetic construct
  source 1..10: note = Seed: ATTAYANSVF
AMTAYANSVY

SEQ ID NO: 12745 - protein, 9 aa, synthetic construct
  source 1..9: note = Seed: ALTCFSTQF
AMTCFSTQF

SEQ ID NO: 12746 - protein, 10 aa, synthetic construct
  source 1..10: note = Seed: ALTCFSTQFA
AMTCFSTQFI

SEQ ID NO: 12747 - protein, 10 aa, synthetic construct
  source 1..10: note = Seed: ALTCFSTQFA
AMTCFSTQFL

SEQ ID NO: 12748 - protein, 10 aa, synthetic construct
  source 1..10: note = Seed: ALTCFSTQFA
AMTCFSTQFV

SEQ ID NO: 12749 - protein, 9 aa, synthetic construct
  source 1..9: note = Seed: ALTCFSTQF
AMTCFSTQM

SEQ ID NO: 12750 - protein, 9 aa, synthetic construct
  source 1..9: note = Seed: ALTCFSTQF
AMTCFSTQY

SEQ ID NO: 12751 - protein, 10 aa, synthetic construct
  source 1..10: note = Seed: AGTDLEGNFY
AMTDLEGNFY

SEQ ID NO: 12752 - protein, 10 aa, synthetic construct
  source 1..10: note = Seed: ATTRQVVNVV
AMTRQVVNVK

SEQ ID NO: 12753 - protein, 10 aa, synthetic construct
  source 1..10: note = Seed: ASTSAFVETV
AMTSAFVETA

SEQ ID NO: 12754 - protein, 10 aa, synthetic construct
  source 1..10: note = Seed: ASTSAFVETV
AMTSAFVETI

SEQ ID NO: 12755 - protein, 10 aa, synthetic construct
  source 1..10: note = Seed: ASTSAFVETV
AMTSAFVETL

SEQ ID NO: 12756 - protein, 10 aa, synthetic construct
  source 1..10: note = Seed: ASTSAFVETV
AMTSAFVETM

SEQ ID NO: 12757 - protein, 10 aa, synthetic construct
  source 1..10: note = Seed: ASTSAFVETV
AMTSAFVETV

SEQ ID NO: 12758 - protein, 9 aa, synthetic construct
  source 1..9: note = Seed: ATVAYFNMV
AMVAYFNMA

SEQ ID NO: 12759 - protein, 9 aa, synthetic construct
  source 1..9: note = Seed: ATVAYFNMV
AMVAYFNMI

SEQ ID NO: 12760 - protein, 9 aa, synthetic construct
  source 1..9: note = Seed: ATVAYFNMV
AMVAYFNML

SEQ ID NO: 12761 - protein, 9 aa, synthetic construct
  source 1..9: note = Seed: ATVAYFNMV
AMVAYFNMM

SEQ ID NO: 12762 - protein, 9 aa, synthetic construct
  source 1..9: note = Seed: ATVAYFNMV
AMVAYFNMV

SEQ ID NO: 12763 - protein, 10 aa, synthetic construct
  source 1..10: note = Seed: ATVAYFNMVY
AMVAYFNMVF

SEQ ID NO: 12764 - protein, 10 aa, synthetic construct
  source 1..10: note = Seed: ATVAYFNMVY
AMVAYFNMVK

SEQ ID NO: 12765 - protein, 10 aa, synthetic construct
  source 1..10: note = Seed: ATVAYFNMVY
AMVAYFNMVM

SEQ ID NO: 12766 - protein, 10 aa, synthetic construct
  source 1..10: note = Seed: ATVAYFNMVY
AMVAYFNMVR

SEQ ID NO: 12767 - protein, 10 aa, synthetic construct
  source 1..10: note = Seed: ATVAYFNMVY
AMVAYFNMVY

SEQ ID NO: 12768 - protein, 9 aa, synthetic construct
  source 1..9: note = Seed: AVVCFNSTY
AMVCFNSTF

SEQ ID NO: 12769 - protein, 9 aa, synthetic construct
  source 1..9: note = Seed: AVVCFNSTY
AMVCFNSTK

SEQ ID NO: 12770 - protein, 9 aa, synthetic construct
  source 1..9: note = Seed: AVVCFNSTY
AMVCFNSTL

SEQ ID NO: 12771 - protein, 9 aa, synthetic construct
  source 1..9: note = Seed: AVVCFNSTY
AMVCFNSTM

SEQ ID NO: 12772 - protein, 9 aa, synthetic construct
  source 1..9: note = Seed: AVVCFNSTY
AMVCFNSTY

SEQ ID NO: 12773 - protein, 10 aa, synthetic construct
  source 1..10: note = Seed: AVVCFNSTYA
AMVCFNSTYA

SEQ ID NO: 12774 - protein, 10 aa, synthetic construct
  source 1..10: note = Seed: AVVCFNSTYA
AMVCFNSTYI

SEQ ID NO: 12775 - protein, 10 aa, synthetic construct
  source 1..10: note = Seed: AVVCFNSTYA
AMVCFNSTYL

SEQ ID NO: 12776 - protein, 10 aa, synthetic construct
  source 1..10: note = Seed: AVVCFNSTYA
AMVCFNSTYV

SEQ ID NO: 12777 - protein, 9 aa, synthetic construct
  source 1..9: note = Seed: AAVDALCEK
AMVDALCEK

SEQ ID NO: 12778 - protein, 9 aa, synthetic construct
  source 1..9: note = Seed: ARVECFDKF
AMVECFDKF

SEQ ID NO: 12779 - protein, 9 aa, synthetic construct
  source 1..9: note = Seed: ARVECFDKF
AMVECFDKY

SEQ ID NO: 12780 - protein, 10 aa, synthetic construct
  source 1..10: note = Seed: AFVNLKQLPF
AMVNLKQLPF

SEQ ID NO: 12781 - protein, 10 aa, synthetic construct
  source 1..10: note = Seed: AFVNLKQLPF
AMVNLKQLPM

SEQ ID NO: 12782 - protein, 10 aa, synthetic construct
  source 1..10: note = Seed: AFVNLKQLPF
AMVNLKQLPY

SEQ ID NO: 12783 - protein, 10 aa, synthetic construct
  source 1..10: note = Seed: AMVRMYIFFA
AMVRMYIFFI

SEQ ID NO: 12784 - protein, 10 aa, synthetic construct
  source 1..10: note = Seed: AMVRMYIFFA
AMVRMYIFFK

SEQ ID NO: 12785 - protein, 10 aa, synthetic construct
  source 1..10: note = Seed: AMVRMYIFFA
AMVRMYIFFL

SEQ ID NO: 12786 - protein, 10 aa, synthetic construct
  source 1..10: note = Seed: AMVRMYIFFA
AMVRMYIFFV

SEQ ID NO: 12787 - protein, 9 aa, synthetic construct
  source 1..9: note = Seed: AMVRMYIFF
AMVRMYIFY

SEQ ID NO: 12788 - protein, 9 aa, synthetic construct
  source 1..9: note = Seed: AGVSICSTM
AMVSICSTF

SEQ ID NO: 12789 - protein, 9 aa, synthetic construct
  source 1..9: note = Seed: AGVSICSTM
AMVSICSTL

SEQ ID NO: 12790 - protein, 9 aa, synthetic construct
  source 1..9: note = Seed: AGVSICSTM
AMVSICSTM

SEQ ID NO: 12791 - protein, 9 aa, synthetic construct
  source 1..9: note = Seed: AGVSICSTM
AMVSICSTY

SEQ ID NO: 12792 - protein, 10 aa, synthetic construct
  source 1..10: note = Seed: AKVTSAMQTM
AMVTSAMQTF

SEQ ID NO: 12793 - protein, 10 aa, synthetic construct
  source 1..10: note = Seed: AKVTSAMQTM
AMVTSAMQTY

SEQ ID NO: 12794 - protein, 9 aa, synthetic construct
  source 1..9: note = Seed: ASVYYSQLM
AMVYYSQLF

SEQ ID NO: 12795 - protein, 9 aa, synthetic construct
  source 1..9: note = Seed: ASVYYSQLM
AMVYYSQLL

SEQ ID NO: 12796 - protein, 9 aa, synthetic construct
  source 1..9: note = Seed: ASVYYSQLM
AMVYYSQLM

SEQ ID NO: 12797 - protein, 9 aa, synthetic construct
  source 1..9: note = Seed: ASVYYSQLM
AMVYYSQLW

SEQ ID NO: 12798 - protein, 9 aa, synthetic construct
  source 1..9: note = Seed: ASVYYSQLM
AMVYYSQLY

SEQ ID NO: 12799 - protein, 9 aa, synthetic construct
  source 1..9: note = Seed: AEWFLAYIL
AMWFLAYIF

SEQ ID NO: 12800 - protein, 9 aa, synthetic construct
  source 1..9: note = Seed: AEWFLAYIL
AMWFLAYIY

SEQ ID NO: 12801 - protein, 8 aa, synthetic construct
  source 1..8: note = Seed: AYYFMRFR
AMYFMRFR

SEQ ID NO: 12802 - protein, 9 aa, synthetic construct
  source 1..9: note = Seed: AYYFMRFRR
AMYFMRFRK

SEQ ID NO: 12803 - protein, 9 aa, synthetic construct
  source 1..9: note = Seed: AYYFMRFRR
AMYFMRFRR

SEQ ID NO: 12804 - protein, 9 aa, synthetic construct
  source 1..9: note = Seed: AWYTERSEK
AMYTERSER

SEQ ID NO: 12805 - protein, 9 aa, synthetic construct
  source 1..9: note = Seed: AMYTPHTVL
AMYTPHTVF

SEQ ID NO: 12806 - protein, 9 aa, synthetic construct
  source 1..9: note = Seed: AMYTPHTVL
AMYTPHTVH

SEQ ID NO: 12807 - protein, 9 aa, synthetic construct
  source 1..9: note = Seed: AMYTPHTVL
AMYTPHTVI

SEQ ID NO: 12808 - protein, 11 aa, synthetic construct
  source 1..11: note = Seed: AMYTPHTVLQA
AMYTPHTVLQV

SEQ ID NO: 12809 - protein, 9 aa, synthetic construct
  source 1..9: note = Seed: AMYTPHTVL
AMYTPHTVM

SEQ ID NO: 12810 - protein, 9 aa, synthetic construct
  source 1..9: note = Seed: AMYTPHTVL
AMYTPHTVV

SEQ ID NO: 12811 - protein, 9 aa, synthetic construct
  source 1..9: note = Seed: AMYTPHTVL
AMYTPHTVW

SEQ ID NO: 12812 - protein, 9 aa, synthetic construct
  source 1..9: note = Seed: AMYTPHTVL
AMYTPHTVY

SEQ ID NO: 12813 - protein, 9 aa, synthetic construct
  source 1..9: note = Seed: AKYTQLCQY
AMYTQLCQF

SEQ ID NO: 12814 - protein, 9 aa, synthetic construct
  source 1..9: note = Seed: AKYTQLCQY
AMYTQLCQM

SEQ ID NO: 12815 - protein, 9 aa, synthetic construct
  source 1..9: note = Seed: AKYTQLCQY
AMYTQLCQY

SEQ ID NO: 12816 - protein, 10 aa, synthetic construct
  source 1..10: note = Seed: AKYTQLCQYL
AMYTQLCQYF

SEQ ID NO: 12817 - protein, 10 aa, synthetic construct
  source 1..10: note = Seed: AKYTQLCQYL
AMYTQLCQYY

SEQ ID NO: 12818 - protein, 8 aa, synthetic construct
  source 1..8: note = Seed: AQYTSALL
AMYTSALF

SEQ ID NO: 12819 - protein, 8 aa, synthetic construct
  source 1..8: note = Seed: AQYTSALL
AMYTSALY

SEQ ID NO: 12820 - protein, 10 aa, synthetic construct
  source 1..10: note = Seed: AYYVGYLQPR
AMYVGYLQPK

SEQ ID NO: 12821 - protein, 10 aa, synthetic construct
  source 1..10: note = Seed: AYYVGYLQPR
AMYVGYLQPR

SEQ ID NO: 12822 - protein, 9 aa, synthetic construct
  source 1..9: note = Seed: AIASEFSSL
ANASEFSSF

SEQ ID NO: 12823 - protein, 9 aa, synthetic construct
  source 1..9: note = Seed: AIASEFSSL
ANASEFSSY

SEQ ID NO: 12824 - protein, 10 aa, synthetic construct
  source 1..10: note = Seed: AGEAANFCAL
ANEAANFCAA

SEQ ID NO: 12825 - protein, 10 aa, synthetic construct
  source 1..10: note = Seed: AGEAANFCAL
ANEAANFCAF

SEQ ID NO: 12826 - protein, 10 aa, synthetic construct
  source 1..10: note = Seed: AGEAANFCAL
ANEAANFCAL

SEQ ID NO: 12827 - protein, 10 aa, synthetic construct
  source 1..10: note = Seed: AGEAANFCAL
ANEAANFCAW

SEQ ID NO: 12828 - protein, 10 aa, synthetic construct
  source 1..10: note = Seed: AQFAPSASAF
ANFAPSASAF

SEQ ID NO: 12829 - protein, 10 aa, synthetic construct
  source 1..10: note = Seed: AQFAPSASAF
ANFAPSASAY

SEQ ID NO: 12830 - protein, 9 aa, synthetic construct
  source 1..9: note = Seed: AQFAPSASA
ANFAPSASF

SEQ ID NO: 12831 - protein, 9 aa, synthetic construct
  source 1..9: note = Seed: AQFAPSASA
ANFAPSASM

SEQ ID NO: 12832 - protein, 9 aa, synthetic construct
  source 1..9: note = Seed: AQFAPSASA
ANFAPSASY

SEQ ID NO: 12833 - protein, 10 aa, synthetic construct
  source 1..10: note = Seed: AGFPFNKWGK
ANFPFNKWGR

SEQ ID NO: 12834 - protein, 9 aa, synthetic construct
  source 1..9: note = Seed: AGFSLWVYK
ANFSLWVYK

SEQ ID NO: 12835 - protein, 9 aa, synthetic construct
  source 1..9: note = Seed: AGFSLWVYK
ANFSLWVYR

SEQ ID NO: 12836 - protein, 10 aa, synthetic construct
  source 1..10: note = Seed: ALIISVTSNY
ANIISVTSNK

SEQ ID NO: 12837 - protein, 10 aa, synthetic construct
  source 1..10: note = Seed: AYILFTRFFY
ANILFTRFFK

SEQ ID NO: 12838 - protein, 10 aa, synthetic construct
  source 1..10: note = Seed: AYILFTRFFY
ANILFTRFFR

SEQ ID NO: 12839 - protein, 10 aa, synthetic construct
  source 1..10: note = Seed: AYILFTRFFY
ANILFTRFFY

SEQ ID NO: 12840 - protein, 11 aa, synthetic construct
  source 1..11: note = Seed: AYILFTRFFYV
ANILFTRFFYA

SEQ ID NO: 12841 - protein, 11 aa, synthetic construct
  source 1..11: note = Seed: AYILFTRFFYV
ANILFTRFFYI

SEQ ID NO: 12842 - protein, 11 aa, synthetic construct
  source 1..11: note = Seed: AYILFTRFFYV
ANILFTRFFYL

SEQ ID NO: 12843 - protein, 11 aa, synthetic construct
  source 1..11: note = Seed: AYILFTRFFYV
ANILFTRFFYV

SEQ ID NO: 12844 - protein, 9 aa, synthetic construct
  source 1..9: note = Seed: AKKNNLPFK
ANKNNLPFK

SEQ ID NO: 12845 - protein, 10 aa, synthetic construct
  source 1..10: note = Seed: AALCTFLLNK
ANLCTFLLNK

SEQ ID NO: 12846 - protein, 10 aa, synthetic construct
  source 1..10: note = Seed: AALCTFLLNK
ANLCTFLLNR

SEQ ID NO: 12847 - protein, 10 aa, synthetic construct
  source 1..10: note = Seed: ASLINTLNDL
ANLINTLNDI

SEQ ID NO: 12848 - protein, 10 aa, synthetic construct
  source 1..10: note = Seed: ASLINTLNDL
ANLINTLNDV

SEQ ID NO: 12849 - protein, 11 aa, synthetic construct
  source 1..11: note = Seed: AALQIPFAMQM
ANLQIPFAMQY

SEQ ID NO: 12850 - protein, 9 aa, synthetic construct
  source 1..9: note = Seed: AMMFVKHKH
ANMFVKHKR

SEQ ID NO: 12851 - protein, 10 aa, synthetic construct
  source 1..10: note = Seed: AIPTNFTISV
ANPTNFTISL

SEQ ID NO: 12852 - protein, 10 aa, synthetic construct
  source 1..10: note = Seed: AIPTNFTISV
ANPTNFTISM

SEQ ID NO: 12853 - protein, 10 aa, synthetic construct
  source 1..10: note = Seed: ADQAMTQMYK
ANQAMTQMYK

SEQ ID NO: 12854 - protein, 10 aa, synthetic construct
  source 1..10: note = Seed: ADQAMTQMYK
ANQAMTQMYR

SEQ ID NO: 12855 - protein, 10 aa, synthetic construct
  source 1..10: note = Seed: ALQIPFAMQM
ANQIPFAMQF

SEQ ID NO: 12856 - protein, 10 aa, synthetic construct
  source 1..10: note = Seed: ALQIPFAMQM
ANQIPFAMQM

SEQ ID NO: 12857 - protein, 10 aa, synthetic construct
  source 1..10: note = Seed: ALQIPFAMQM
ANQIPFAMQV

SEQ ID NO: 12858 - protein, 10 aa, synthetic construct
  source 1..10: note = Seed: ALQIPFAMQM
ANQIPFAMQY

SEQ ID NO: 12859 - protein, 9 aa, synthetic construct
  source 1..9: note = Seed: ALRANSAVK
ANRANSAVK

SEQ ID NO: 12860 - protein, 9 aa, synthetic construct
  source 1..9: note = Seed: ATRFASVYA
ANRFASVYA

SEQ ID NO: 12861 - protein, 9 aa, synthetic construct
  source 1..9: note = Seed: ATRFASVYA
ANRFASVYI

SEQ ID NO: 12862 - protein, 9 aa, synthetic construct
  source 1..9: note = Seed: ATRFASVYA
ANRFASVYK

SEQ ID NO: 12863 - protein, 9 aa, synthetic construct
  source 1..9: note = Seed: ATRFASVYA
ANRFASVYV

SEQ ID NO: 12864 - protein, 9 aa, synthetic construct
  source 1..9: note = Seed: AWRKAVFIS
ANRKAVFIK

SEQ ID NO: 12865 - protein, 9 aa, synthetic construct
  source 1..9: note = Seed: AMRNAGIVG
ANRNAGIVF

SEQ ID NO: 12866 - protein, 9 aa, synthetic construct
  source 1..9: note = Seed: AMRNAGIVG
ANRNAGIVK

SEQ ID NO: 12867 - protein, 9 aa, synthetic construct
  source 1..9: note = Seed: AMRNAGIVG
ANRNAGIVY

SEQ ID NO: 12868 - protein, 10 aa, synthetic construct
  source 1..10: note = Seed: AMSAFAMMFV
ANSAFAMMFV

SEQ ID NO: 12869 - protein, 9 aa, synthetic construct
  source 1..9: note = Seed: AMSAFAMMF
ANSAFAMMY

SEQ ID NO: 12870 - protein, 10 aa, synthetic construct
  source 1..10: note = Seed: AVTANVNALL
ANTANVNALV

SEQ ID NO: 12871 - protein, 10 aa, synthetic construct
  source 1..10: note = Seed: ATTAYANSVF
ANTAYANSVF

SEQ ID NO: 12872 - protein, 10 aa, synthetic construct
  source 1..10: note = Seed: ATTAYANSVF
ANTAYANSVW

SEQ ID NO: 12873 - protein, 10 aa, synthetic construct
  source 1..10: note = Seed: AGTDLEGNFY
ANTDLEGNFY

SEQ ID NO: 12874 - protein, 10 aa, synthetic construct
  source 1..10: note = Seed: ATTRQVVNVV
ANTRQVVNVK

SEQ ID NO: 12875 - protein, 10 aa, synthetic construct
  source 1..10: note = Seed: ATVAYFNMVY
ANVAYFNMVK

SEQ ID NO: 12876 - protein, 10 aa, synthetic construct
  source 1..10: note = Seed: ATVAYFNMVY
ANVAYFNMVR

SEQ ID NO: 12877 - protein, 10 aa, synthetic construct
  source 1..10: note = Seed: ATVAYFNMVY
ANVAYFNMVY

SEQ ID NO: 12878 - protein, 9 aa, synthetic construct
  source 1..9: note = Seed: AVVCFNSTY
ANVCFNSTF

SEQ ID NO: 12879 - protein, 9 aa, synthetic construct
  source 1..9: note = Seed: AVVCFNSTY
ANVCFNSTY

SEQ ID NO: 12880 - protein, 10 aa, synthetic construct
  source 1..10: note = Seed: AMVRMYIFFA
ANVRMYIFFK

SEQ ID NO: 12881 - protein, 9 aa, synthetic construct
  source 1..9: note = Seed: AYYFMRFRR
ANYFMRFRK

SEQ ID NO: 12882 - protein, 9 aa, synthetic construct
  source 1..9: note = Seed: AYYFMRFRR
ANYFMRFRR

SEQ ID NO: 12883 - protein, 9 aa, synthetic construct
  source 1..9: note = Seed: AMYTPHTVL
ANYTPHTVF

SEQ ID NO: 12884 - protein, 9 aa, synthetic construct
  source 1..9: note = Seed: AMYTPHTVL
ANYTPHTVM

SEQ ID NO: 12885 - protein, 9 aa, synthetic construct
  source 1..9: note = Seed: AMYTPHTVL
ANYTPHTVY

SEQ ID NO: 12886 - protein, 10 aa, synthetic construct
  source 1..10: note = Seed: AKYTQLCQYL
ANYTQLCQYF

SEQ ID NO: 12887 - protein, 10 aa, synthetic construct
  source 1..10: note = Seed: AYYVGYLQPR
ANYVGYLQPR

SEQ ID NO: 12888 - protein, 9 aa, synthetic construct
  source 1..9: note = Seed: APAHISTIG
APAHISTIA

SEQ ID NO: 12889 - protein, 9 aa, synthetic construct
  source 1..9: note = Seed: APAHISTIG
APAHISTIF

SEQ ID NO: 12890 - protein, 10 aa, synthetic construct
  source 1..10: note = Seed: APAHISTIGV
APAHISTIGL

SEQ ID NO: 12891 - protein, 10 aa, synthetic construct
  source 1..10: note = Seed: APAHISTIGV
APAHISTIGM

SEQ ID NO: 12892 - protein, 9 aa, synthetic construct
  source 1..9: note = Seed: APAHISTIG
APAHISTII

SEQ ID NO: 12893 - protein, 9 aa, synthetic construct
  source 1..9: note = Seed: APAHISTIG
APAHISTIL

SEQ ID NO: 12894 - protein, 9 aa, synthetic construct
  source 1..9: note = Seed: APAHISTIG
APAHISTIM

SEQ ID NO: 12895 - protein, 9 aa, synthetic construct
  source 1..9: note = Seed: APAHISTIG
APAHISTIV

SEQ ID NO: 12896 - protein, 8 aa, synthetic construct
  source 1..8: note = Seed: APAHISTI
APAHISTL

SEQ ID NO: 12897 - protein, 8 aa, synthetic construct
  source 1..8: note = Seed: APAHISTI
APAHISTM

SEQ ID NO: 12898 - protein, 9 aa, synthetic construct
  source 1..9: note = Seed: AIASEFSSL
APASEFSSA

SEQ ID NO: 12899 - protein, 9 aa, synthetic construct
  source 1..9: note = Seed: AIASEFSSL
APASEFSSF

SEQ ID NO: 12900 - protein, 9 aa, synthetic construct
  source 1..9: note = Seed: AIASEFSSL
APASEFSSI

SEQ ID NO: 12901 - protein, 9 aa, synthetic construct
  source 1..9: note = Seed: AIASEFSSL
APASEFSSL

SEQ ID NO: 12902 - protein, 9 aa, synthetic construct
  source 1..9: note = Seed: AIASEFSSL
APASEFSSM

SEQ ID NO: 12903 - protein, 9 aa, synthetic construct
  source 1..9: note = Seed: AIASEFSSL
APASEFSSV

SEQ ID NO: 12904 - protein, 10 aa, synthetic construct
  source 1..10: note = Seed: AGEAANFCAL
APEAANFCAA

SEQ ID NO: 12905 - protein, 10 aa, synthetic construct
  source 1..10: note = Seed: AGEAANFCAL
APEAANFCAF

SEQ ID NO: 12906 - protein, 10 aa, synthetic construct
  source 1..10: note = Seed: AGEAANFCAL
APEAANFCAL

SEQ ID NO: 12907 - protein, 10 aa, synthetic construct
  source 1..10: note = Seed: AGEAANFCAL
APEAANFCAW

SEQ ID NO: 12908 - protein, 10 aa, synthetic construct
  source 1..10: note = Seed: ALIISVTSNY
APIISVTSNK

SEQ ID NO: 12909 - protein, 10 aa, synthetic construct
  source 1..10: note = Seed: AYILFTRFFY
APILFTRFFK

SEQ ID NO: 12910 - protein, 10 aa, synthetic construct
  source 1..10: note = Seed: AYILFTRFFY
APILFTRFFR

SEQ ID NO: 12911 - protein, 10 aa, synthetic construct
  source 1..10: note = Seed: AYILFTRFFY
APILFTRFFY

SEQ ID NO: 12912 - protein, 11 aa, synthetic construct
  source 1..11: note = Seed: AYILFTRFFYV
APILFTRFFYA

SEQ ID NO: 12913 - protein, 11 aa, synthetic construct
  source 1..11: note = Seed: AYILFTRFFYV
APILFTRFFYI

SEQ ID NO: 12914 - protein, 11 aa, synthetic construct
  source 1..11: note = Seed: AYILFTRFFYV
APILFTRFFYL

SEQ ID NO: 12915 - protein, 11 aa, synthetic construct
  source 1..11: note = Seed: AYILFTRFFYV
APILFTRFFYV

SEQ ID NO: 12916 - protein, 10 aa, synthetic construct
  source 1..10: note = Seed: AALCTFLLNK
APLCTFLLNK

SEQ ID NO: 12917 - protein, 10 aa, synthetic construct
  source 1..10: note = Seed: ASLINTLNDL
APLINTLNDI

SEQ ID NO: 12918 - protein, 10 aa, synthetic construct
  source 1..10: note = Seed: ASLINTLNDL
APLINTLNDV

SEQ ID NO: 12919 - protein, 9 aa, synthetic construct
  source 1..9: note = Seed: AALQIPFAM
APLQIPFAF

SEQ ID NO: 12920 - protein, 9 aa, synthetic construct
  source 1..9: note = Seed: AALQIPFAM
APLQIPFAI

SEQ ID NO: 12921 - protein, 9 aa, synthetic construct
  source 1..9: note = Seed: AALQIPFAM
APLQIPFAL

SEQ ID NO: 12922 - protein, 9 aa, synthetic construct
  source 1..9: note = Seed: AALQIPFAM
APLQIPFAM

SEQ ID NO: 12923 - protein, 11 aa, synthetic construct
  source 1..11: note = Seed: AALQIPFAMQM
APLQIPFAMQY

SEQ ID NO: 12924 - protein, 9 aa, synthetic construct
  source 1..9: note = Seed: AALQIPFAM
APLQIPFAY

SEQ ID NO: 12925 - protein, 8 aa, synthetic construct
  source 1..8: note = Seed: APLVGTPV
APLVGTPL

SEQ ID NO: 12926 - protein, 8 aa, synthetic construct
  source 1..8: note = Seed: APLVGTPV
APLVGTPM

SEQ ID NO: 12927 - protein, 9 aa, synthetic construct
  source 1..9: note = Seed: APLVGTPVC
APLVGTPVF

SEQ ID NO: 12928 - protein, 9 aa, synthetic construct
  source 1..9: note = Seed: APLVGTPVC
APLVGTPVI

SEQ ID NO: 12929 - protein, 9 aa, synthetic construct
  source 1..9: note = Seed: APLVGTPVC
APLVGTPVL

SEQ ID NO: 12930 - protein, 9 aa, synthetic construct
  source 1..9: note = Seed: APLVGTPVC
APLVGTPVM

SEQ ID NO: 12931 - protein, 9 aa, synthetic construct
  source 1..9: note = Seed: APLVGTPVC
APLVGTPVV

SEQ ID NO: 12932 - protein, 10 aa, synthetic construct
  source 1..10: note = Seed: AIPTNFTISV
APPTNFTISL

SEQ ID NO: 12933 - protein, 10 aa, synthetic construct
  source 1..10: note = Seed: AIPTNFTISV
APPTNFTISM

SEQ ID NO: 12934 - protein, 10 aa, synthetic construct
  source 1..10: note = Seed: ADQAMTQMYK
APQAMTQMYK

SEQ ID NO: 12935 - protein, 10 aa, synthetic construct
  source 1..10: note = Seed: ALQIPFAMQM
APQIPFAMQF

SEQ ID NO: 12936 - protein, 10 aa, synthetic construct
  source 1..10: note = Seed: ALQIPFAMQM
APQIPFAMQM

SEQ ID NO: 12937 - protein, 10 aa, synthetic construct
  source 1..10: note = Seed: ALQIPFAMQM
APQIPFAMQV

SEQ ID NO: 12938 - protein, 10 aa, synthetic construct
  source 1..10: note = Seed: ALQIPFAMQM
APQIPFAMQY

SEQ ID NO: 12939 - protein, 10 aa, synthetic construct
  source 1..10: note = Seed: AVTANVNALL
APTANVNALV

SEQ ID NO: 12940 - protein, 10 aa, synthetic construct
  source 1..10: note = Seed: ATTAYANSVF
APTAYANSVF

SEQ ID NO: 12941 - protein, 10 aa, synthetic construct
  source 1..10: note = Seed: ATTAYANSVF
APTAYANSVW

SEQ ID NO: 12942 - protein, 10 aa, synthetic construct
  source 1..10: note = Seed: AGTDLEGNFY
APTDLEGNFY

SEQ ID NO: 12943 - protein, 10 aa, synthetic construct
  source 1..10: note = Seed: ATTRQVVNVV
APTRQVVNVK

SEQ ID NO: 12944 - protein, 10 aa, synthetic construct
  source 1..10: note = Seed: ATVAYFNMVY
APVAYFNMVK

SEQ ID NO: 12945 - protein, 10 aa, synthetic construct
  source 1..10: note = Seed: ATVAYFNMVY
APVAYFNMVR

SEQ ID NO: 12946 - protein, 10 aa, synthetic construct
  source 1..10: note = Seed: ATVAYFNMVY
APVAYFNMVY

SEQ ID NO: 12947 - protein, 9 aa, synthetic construct
  source 1..9: note = Seed: AVVCFNSTY
APVCFNSTF

SEQ ID NO: 12948 - protein, 9 aa, synthetic construct
  source 1..9: note = Seed: AVVCFNSTY
APVCFNSTM

SEQ ID NO: 12949 - protein, 9 aa, synthetic construct
  source 1..9: note = Seed: AVVCFNSTY
APVCFNSTY

SEQ ID NO: 12950 - protein, 9 aa, synthetic construct
  source 1..9: note = Seed: AMYTPHTVL
APYTPHTVA

SEQ ID NO: 12951 - protein, 9 aa, synthetic construct
  source 1..9: note = Seed: AMYTPHTVL
APYTPHTVC

SEQ ID NO: 12952 - protein, 9 aa, synthetic construct
  source 1..9: note = Seed: AMYTPHTVL
APYTPHTVF

SEQ ID NO: 12953 - protein, 9 aa, synthetic construct
  source 1..9: note = Seed: AMYTPHTVL
APYTPHTVI

SEQ ID NO: 12954 - protein, 9 aa, synthetic construct
  source 1..9: note = Seed: AMYTPHTVL
APYTPHTVL

SEQ ID NO: 12955 - protein, 9 aa, synthetic construct
  source 1..9: note = Seed: AMYTPHTVL
APYTPHTVM

SEQ ID NO: 12956 - protein, 9 aa, synthetic construct
  source 1..9: note = Seed: AMYTPHTVL
APYTPHTVV

SEQ ID NO: 12957 - protein, 10 aa, synthetic construct
  source 1..10: note = Seed: AKYTQLCQYL
APYTQLCQYF

SEQ ID NO: 12958 - protein, 9 aa, synthetic construct
  source 1..9: note = Seed: AGAALQIPF
AQAALQIPF

SEQ ID NO: 12959 - protein, 9 aa, synthetic construct
  source 1..9: note = Seed: AGAALQIPF
AQAALQIPI

SEQ ID NO: 12960 - protein, 9 aa, synthetic construct
  source 1..9: note = Seed: AGAALQIPF
AQAALQIPL

SEQ ID NO: 12961 - protein, 9 aa, synthetic construct
  source 1..9: note = Seed: AGAALQIPF
AQAALQIPM

SEQ ID NO: 12962 - protein, 9 aa, synthetic construct
  source 1..9: note = Seed: AGAALQIPF
AQAALQIPW

SEQ ID NO: 12963 - protein, 9 aa, synthetic construct
  source 1..9: note = Seed: AGAALQIPF
AQAALQIPY

SEQ ID NO: 12964 - protein, 9 aa, synthetic construct
  source 1..9: note = Seed: AMACLVGLM
AQACLVGLF

SEQ ID NO: 12965 - protein, 9 aa, synthetic construct
  source 1..9: note = Seed: AMACLVGLM
AQACLVGLI

SEQ ID NO: 12966 - protein, 9 aa, synthetic construct
  source 1..9: note = Seed: AMACLVGLM
AQACLVGLL

SEQ ID NO: 12967 - protein, 9 aa, synthetic construct
  source 1..9: note = Seed: AMACLVGLM
AQACLVGLM

SEQ ID NO: 12968 - protein, 9 aa, synthetic construct
  source 1..9: note = Seed: AMACLVGLM
AQACLVGLV

SEQ ID NO: 12969 - protein, 9 aa, synthetic construct
  source 1..9: note = Seed: AMACLVGLM
AQACLVGLY

SEQ ID NO: 12970 - protein, 9 aa, synthetic construct
  source 1..9: note = Seed: ARAGEAANF
AQAGEAANF

SEQ ID NO: 12971 - protein, 9 aa, synthetic construct
  source 1..9: note = Seed: ARAGEAANF
AQAGEAANM

SEQ ID NO: 12972 - protein, 9 aa, synthetic construct
  source 1..9: note = Seed: ARAGEAANF
AQAGEAANY

SEQ ID NO: 12973 - protein, 9 aa, synthetic construct
  source 1..9: note = Seed: AYANSVFNI
AQANSVFNY

SEQ ID NO: 12974 - protein, 9 aa, synthetic construct
  source 1..9: note = Seed: AIASEFSSL
AQASEFSSA

SEQ ID NO: 12975 - protein, 9 aa, synthetic construct
  source 1..9: note = Seed: AIASEFSSL
AQASEFSSF

SEQ ID NO: 12976 - protein, 9 aa, synthetic construct
  source 1..9: note = Seed: AIASEFSSL
AQASEFSSH

SEQ ID NO: 12977 - protein, 9 aa, synthetic construct
  source 1..9: note = Seed: AIASEFSSL
AQASEFSSI

SEQ ID NO: 12978 - protein, 9 aa, synthetic construct
  source 1..9: note = Seed: AIASEFSSL
AQASEFSSL

SEQ ID NO: 12979 - protein, 9 aa, synthetic construct
  source 1..9: note = Seed: AIASEFSSL
AQASEFSSM

SEQ ID NO: 12980 - protein, 9 aa, synthetic construct
  source 1..9: note = Seed: AIASEFSSL
AQASEFSSV

SEQ ID NO: 12981 - protein, 9 aa, synthetic construct
  source 1..9: note = Seed: AIASEFSSL
AQASEFSSW

SEQ ID NO: 12982 - protein, 9 aa, synthetic construct
  source 1..9: note = Seed: AIASEFSSL
AQASEFSSY

SEQ ID NO: 12983 - protein, 10 aa, synthetic construct
  source 1..10: note = Seed: AFAVDAAKAY
AQAVDAAKAF

SEQ ID NO: 12984 - protein, 10 aa, synthetic construct
  source 1..10: note = Seed: AFAVDAAKAY
AQAVDAAKAM

SEQ ID NO: 12985 - protein, 10 aa, synthetic construct
  source 1..10: note = Seed: AFAVDAAKAY
AQAVDAAKAY

SEQ ID NO: 12986 - protein, 9 aa, synthetic construct
  source 1..9: note = Seed: ALCTFLLNK
AQCTFLLNK

SEQ ID NO: 12987 - protein, 9 aa, synthetic construct
  source 1..9: note = Seed: ALCTFLLNK
AQCTFLLNR

SEQ ID NO: 12988 - protein, 9 aa, synthetic construct
  source 1..9: note = Seed: AVDCALDPL
AQDCALDPV

SEQ ID NO: 12989 - protein, 9 aa, synthetic construct
  source 1..9: note = Seed: AGDSGFAAY
AQDSGFAAF

SEQ ID NO: 12990 - protein, 9 aa, synthetic construct
  source 1..9: note = Seed: AGDSGFAAY
AQDSGFAAL

SEQ ID NO: 12991 - protein, 9 aa, synthetic construct
  source 1..9: note = Seed: AGDSGFAAY
AQDSGFAAM

SEQ ID NO: 12992 - protein, 9 aa, synthetic construct
  source 1..9: note = Seed: AGDSGFAAY
AQDSGFAAY

SEQ ID NO: 12993 - protein, 10 aa, synthetic construct
  source 1..10: note = Seed: AGEAANFCAL
AQEAANFCAA

SEQ ID NO: 12994 - protein, 10 aa, synthetic construct
  source 1..10: note = Seed: AGEAANFCAL
AQEAANFCAF

SEQ ID NO: 12995 - protein, 10 aa, synthetic construct
  source 1..10: note = Seed: AGEAANFCAL
AQEAANFCAL

SEQ ID NO: 12996 - protein, 10 aa, synthetic construct
  source 1..10: note = Seed: AGEAANFCAL
AQEAANFCAW

SEQ ID NO: 12997 - protein, 11 aa, synthetic construct
  source 1..11: note = Seed: AQFAPSASAFF
AQFAPSASAFA

SEQ ID NO: 12998 - protein, 11 aa, synthetic construct
  source 1..11: note = Seed: AQFAPSASAFF
AQFAPSASAFC

SEQ ID NO: 12999 - protein, 11 aa, synthetic construct
  source 1..11: note = Seed: AQFAPSASAFF
AQFAPSASAFD

SEQ ID NO: 13000 - protein, 11 aa, synthetic construct
  source 1..11: note = Seed: AQFAPSASAFF
AQFAPSASAFE

SEQ ID NO: 13001 - protein, 11 aa, synthetic construct
  source 1..11: note = Seed: AQFAPSASAFF
AQFAPSASAFG

SEQ ID NO: 13002 - protein, 11 aa, synthetic construct
  source 1..11: note = Seed: AQFAPSASAFF
AQFAPSASAFH

SEQ ID NO: 13003 - protein, 11 aa, synthetic construct
  source 1..11: note = Seed: AQFAPSASAFF
AQFAPSASAFI

SEQ ID NO: 13004 - protein, 11 aa, synthetic construct
  source 1..11: note = Seed: AQFAPSASAFF
AQFAPSASAFK

SEQ ID NO: 13005 - protein, 11 aa, synthetic construct
  source 1..11: note = Seed: AQFAPSASAFF
AQFAPSASAFL

SEQ ID NO: 13006 - protein, 11 aa, synthetic construct
  source 1..11: note = Seed: AQFAPSASAFF
AQFAPSASAFM

SEQ ID NO: 13007 - protein, 11 aa, synthetic construct
  source 1..11: note = Seed: AQFAPSASAFF
AQFAPSASAFN

SEQ ID NO: 13008 - protein, 11 aa, synthetic construct
  source 1..11: note = Seed: AQFAPSASAFF
AQFAPSASAFP

SEQ ID NO: 13009 - protein, 11 aa, synthetic construct
  source 1..11: note = Seed: AQFAPSASAFF
AQFAPSASAFQ

SEQ ID NO: 13010 - protein, 11 aa, synthetic construct
  source 1..11: note = Seed: AQFAPSASAFF
AQFAPSASAFR

SEQ ID NO: 13011 - protein, 11 aa, synthetic construct
  source 1..11: note = Seed: AQFAPSASAFF
AQFAPSASAFS

SEQ ID NO: 13012 - protein, 11 aa, synthetic construct
  source 1..11: note = Seed: AQFAPSASAFF
AQFAPSASAFT

SEQ ID NO: 13013 - protein, 11 aa, synthetic construct
  source 1..11: note = Seed: AQFAPSASAFF
AQFAPSASAFV

SEQ ID NO: 13014 - protein, 11 aa, synthetic construct
  source 1..11: note = Seed: AQFAPSASAFF
AQFAPSASAFW

SEQ ID NO: 13015 - protein, 11 aa, synthetic construct
  source 1..11: note = Seed: AQFAPSASAFF
AQFAPSASAFY

SEQ ID NO: 13016 - protein, 10 aa, synthetic construct
  source 1..10: note = Seed: AQFAPSASAF
AQFAPSASAH

SEQ ID NO: 13017 - protein, 10 aa, synthetic construct
  source 1..10: note = Seed: AQFAPSASAF
AQFAPSASAI

SEQ ID NO: 13018 - protein, 10 aa, synthetic construct
  source 1..10: note = Seed: AQFAPSASAF
AQFAPSASAL

SEQ ID NO: 13019 - protein, 10 aa, synthetic construct
  source 1..10: note = Seed: AQFAPSASAF
AQFAPSASAM

SEQ ID NO: 13020 - protein, 10 aa, synthetic construct
  source 1..10: note = Seed: AQFAPSASAF
AQFAPSASAV

SEQ ID NO: 13021 - protein, 10 aa, synthetic construct
  source 1..10: note = Seed: AQFAPSASAF
AQFAPSASAW

SEQ ID NO: 13022 - protein, 10 aa, synthetic construct
  source 1..10: note = Seed: AQFAPSASAF
AQFAPSASAY

SEQ ID NO: 13023 - protein, 9 aa, synthetic construct
  source 1..9: note = Seed: AQFAPSASA
AQFAPSASF

SEQ ID NO: 13024 - protein, 9 aa, synthetic construct
  source 1..9: note = Seed: AQFAPSASA
AQFAPSASG

SEQ ID NO: 13025 - protein, 9 aa, synthetic construct
  source 1..9: note = Seed: AQFAPSASA
AQFAPSASH

SEQ ID NO: 13026 - protein, 9 aa, synthetic construct
  source 1..9: note = Seed: AQFAPSASA
AQFAPSASI

SEQ ID NO: 13027 - protein, 9 aa, synthetic construct
  source 1..9: note = Seed: AQFAPSASA
AQFAPSASL

SEQ ID NO: 13028 - protein, 9 aa, synthetic construct
  source 1..9: note = Seed: AQFAPSASA
AQFAPSASM

SEQ ID NO: 13029 - protein, 9 aa, synthetic construct
  source 1..9: note = Seed: AQFAPSASA
AQFAPSASV

SEQ ID NO: 13030 - protein, 9 aa, synthetic construct
  source 1..9: note = Seed: AQFAPSASA
AQFAPSASW

SEQ ID NO: 13031 - protein, 9 aa, synthetic construct
  source 1..9: note = Seed: AQFAPSASA
AQFAPSASY

SEQ ID NO: 13032 - protein, 9 aa, synthetic construct
  source 1..9: note = Seed: ASFDNFKFV
AQFDNFKFA

SEQ ID NO: 13033 - protein, 9 aa, synthetic construct
  source 1..9: note = Seed: ASFDNFKFV
AQFDNFKFI

SEQ ID NO: 13034 - protein, 9 aa, synthetic construct
  source 1..9: note = Seed: ASFDNFKFV
AQFDNFKFL

SEQ ID NO: 13035 - protein, 9 aa, synthetic construct
  source 1..9: note = Seed: ASFDNFKFV
AQFDNFKFM

SEQ ID NO: 13036 - protein, 9 aa, synthetic construct
  source 1..9: note = Seed: ASFDNFKFV
AQFDNFKFV

SEQ ID NO: 13037 - protein, 10 aa, synthetic construct
  source 1..10: note = Seed: ANFNVLFSTV
AQFNVLFSTA

SEQ ID NO: 13038 - protein, 10 aa, synthetic construct
  source 1..10: note = Seed: ANFNVLFSTV
AQFNVLFSTI

SEQ ID NO: 13039 - protein, 10 aa, synthetic construct
  source 1..10: note = Seed: ANFNVLFSTV
AQFNVLFSTL

SEQ ID NO: 13040 - protein, 10 aa, synthetic construct
  source 1..10: note = Seed: ANFNVLFSTV
AQFNVLFSTM

SEQ ID NO: 13041 - protein, 10 aa, synthetic construct
  source 1..10: note = Seed: ANFNVLFSTV
AQFNVLFSTV

SEQ ID NO: 13042 - protein, 11 aa, synthetic construct
  source 1..11: note = Seed: ANFNVLFSTVF
AQFNVLFSTVF

SEQ ID NO: 13043 - protein, 11 aa, synthetic construct
  source 1..11: note = Seed: ANFNVLFSTVF
AQFNVLFSTVL

SEQ ID NO: 13044 - protein, 11 aa, synthetic construct
  source 1..11: note = Seed: ANFNVLFSTVF
AQFNVLFSTVM

SEQ ID NO: 13045 - protein, 11 aa, synthetic construct
  source 1..11: note = Seed: ANFNVLFSTVF
AQFNVLFSTVY

SEQ ID NO: 13046 - protein, 10 aa, synthetic construct
  source 1..10: note = Seed: AGFPFNKWGK
AQFPFNKWGK

SEQ ID NO: 13047 - protein, 10 aa, synthetic construct
  source 1..10: note = Seed: AGFPFNKWGK
AQFPFNKWGR

SEQ ID NO: 13048 - protein, 10 aa, synthetic construct
  source 1..10: note = Seed: ASFRLFARTR
AQFRLFARTK

SEQ ID NO: 13049 - protein, 10 aa, synthetic construct
  source 1..10: note = Seed: ASFRLFARTR
AQFRLFARTR

SEQ ID NO: 13050 - protein, 9 aa, synthetic construct
  source 1..9: note = Seed: AGFSLWVYK
AQFSLWVYK

SEQ ID NO: 13051 - protein, 9 aa, synthetic construct
  source 1..9: note = Seed: AGFSLWVYK
AQFSLWVYR

SEQ ID NO: 13052 - protein, 9 aa, synthetic construct
  source 1..9: note = Seed: ASFSTFKCY
AQFSTFKCF

SEQ ID NO: 13053 - protein, 9 aa, synthetic construct
  source 1..9: note = Seed: ASFSTFKCY
AQFSTFKCI

SEQ ID NO: 13054 - protein, 9 aa, synthetic construct
  source 1..9: note = Seed: ASFSTFKCY
AQFSTFKCL

SEQ ID NO: 13055 - protein, 9 aa, synthetic construct
  source 1..9: note = Seed: ASFSTFKCY
AQFSTFKCM

SEQ ID NO: 13056 - protein, 9 aa, synthetic construct
  source 1..9: note = Seed: ASFSTFKCY
AQFSTFKCW

SEQ ID NO: 13057 - protein, 9 aa, synthetic construct
  source 1..9: note = Seed: ASFSTFKCY
AQFSTFKCY

SEQ ID NO: 13058 - protein, 11 aa, synthetic construct
  source 1..11: note = Seed: ASFSTFKCYGV
AQFSTFKCYGV

SEQ ID NO: 13059 - protein, 9 aa, synthetic construct
  source 1..9: note = Seed: AIFYLITPV
AQFYLITPA

SEQ ID NO: 13060 - protein, 9 aa, synthetic construct
  source 1..9: note = Seed: AIFYLITPV
AQFYLITPF

SEQ ID NO: 13061 - protein, 9 aa, synthetic construct
  source 1..9: note = Seed: AIFYLITPV
AQFYLITPI

SEQ ID NO: 13062 - protein, 9 aa, synthetic construct
  source 1..9: note = Seed: AIFYLITPV
AQFYLITPL

SEQ ID NO: 13063 - protein, 9 aa, synthetic construct
  source 1..9: note = Seed: AIFYLITPV
AQFYLITPM

SEQ ID NO: 13064 - protein, 9 aa, synthetic construct
  source 1..9: note = Seed: AIFYLITPV
AQFYLITPT

SEQ ID NO: 13065 - protein, 9 aa, synthetic construct
  source 1..9: note = Seed: AIFYLITPV
AQFYLITPV

SEQ ID NO: 13066 - protein, 10 aa, synthetic construct
  source 1..10: note = Seed: AIFYLITPVH
AQFYLITPVI

SEQ ID NO: 13067 - protein, 10 aa, synthetic construct
  source 1..10: note = Seed: AIFYLITPVH
AQFYLITPVV

SEQ ID NO: 13068 - protein, 9 aa, synthetic construct
  source 1..9: note = Seed: AIFYLITPV
AQFYLITPW

SEQ ID NO: 13069 - protein, 10 aa, synthetic construct
  source 1..10: note = Seed: ASFYYVWKSY
AQFYYVWKSF

SEQ ID NO: 13070 - protein, 10 aa, synthetic construct
  source 1..10: note = Seed: ASFYYVWKSY
AQFYYVWKSK

SEQ ID NO: 13071 - protein, 10 aa, synthetic construct
  source 1..10: note = Seed: ASFYYVWKSY
AQFYYVWKSL

SEQ ID NO: 13072 - protein, 10 aa, synthetic construct
  source 1..10: note = Seed: ASFYYVWKSY
AQFYYVWKSM

SEQ ID NO: 13073 - protein, 10 aa, synthetic construct
  source 1..10: note = Seed: ASFYYVWKSY
AQFYYVWKSY

SEQ ID NO: 13074 - protein, 11 aa, synthetic construct
  source 1..11: note = Seed: ASFYYVWKSYV
AQFYYVWKSYI

SEQ ID NO: 13075 - protein, 11 aa, synthetic construct
  source 1..11: note = Seed: ASFYYVWKSYV
AQFYYVWKSYV

SEQ ID NO: 13076 - protein, 9 aa, synthetic construct
  source 1..9: note = Seed: AFGGCVFSY
AQGGCVFSY

SEQ ID NO: 13077 - protein, 9 aa, synthetic construct
  source 1..9: note = Seed: ANGQVFGLY
AQGQVFGLY

SEQ ID NO: 13078 - protein, 10 aa, synthetic construct
  source 1..10: note = Seed: ANGQVFGLYK
AQGQVFGLYK

SEQ ID NO: 13079 - protein, 10 aa, synthetic construct
  source 1..10: note = Seed: ANGQVFGLYK
AQGQVFGLYR

SEQ ID NO: 13080 - protein, 10 aa, synthetic construct
  source 1..10: note = Seed: ALIISVTSNY
AQIISVTSNF

SEQ ID NO: 13081 - protein, 10 aa, synthetic construct
  source 1..10: note = Seed: ALIISVTSNY
AQIISVTSNK

SEQ ID NO: 13082 - protein, 10 aa, synthetic construct
  source 1..10: note = Seed: ALIISVTSNY
AQIISVTSNM

SEQ ID NO: 13083 - protein, 10 aa, synthetic construct
  source 1..10: note = Seed: ALIISVTSNY
AQIISVTSNY

SEQ ID NO: 13084 - protein, 9 aa, synthetic construct
  source 1..9: note = Seed: ASIKNFKSV
AQIKNFKSI

SEQ ID NO: 13085 - protein, 9 aa, synthetic construct
  source 1..9: note = Seed: ASIKNFKSV
AQIKNFKSV

SEQ ID NO: 13086 - protein, 10 aa, synthetic construct
  source 1..10: note = Seed: AYILFTRFFY
AQILFTRFFK

SEQ ID NO: 13087 - protein, 10 aa, synthetic construct
  source 1..10: note = Seed: AYILFTRFFY
AQILFTRFFR

SEQ ID NO: 13088 - protein, 10 aa, synthetic construct
  source 1..10: note = Seed: AYILFTRFFY
AQILFTRFFY

SEQ ID NO: 13089 - protein, 11 aa, synthetic construct
  source 1..11: note = Seed: AYILFTRFFYV
AQILFTRFFYA

SEQ ID NO: 13090 - protein, 11 aa, synthetic construct
  source 1..11: note = Seed: AYILFTRFFYV
AQILFTRFFYI

SEQ ID NO: 13091 - protein, 11 aa, synthetic construct
  source 1..11: note = Seed: AYILFTRFFYV
AQILFTRFFYL

SEQ ID NO: 13092 - protein, 11 aa, synthetic construct
  source 1..11: note = Seed: AYILFTRFFYV
AQILFTRFFYV

SEQ ID NO: 13093 - protein, 9 aa, synthetic construct
  source 1..9: note = Seed: AVINGDRWF
AQINGDRWY

SEQ ID NO: 13094 - protein, 11 aa, synthetic construct
  source 1..11: note = Seed: AHISTIGVCSM
AQISTIGVCSF

SEQ ID NO: 13095 - protein, 11 aa, synthetic construct
  source 1..11: note = Seed: AHISTIGVCSM
AQISTIGVCSM

SEQ ID NO: 13096 - protein, 11 aa, synthetic construct
  source 1..11: note = Seed: AHISTIGVCSM
AQISTIGVCSY

SEQ ID NO: 13097 - protein, 9 aa, synthetic construct
  source 1..9: note = Seed: AAKKNNLPF
AQKKNNLPF

SEQ ID NO: 13098 - protein, 10 aa, synthetic construct
  source 1..10: note = Seed: AAKKNNLPFK
AQKKNNLPFK

SEQ ID NO: 13099 - protein, 9 aa, synthetic construct
  source 1..9: note = Seed: AAKKNNLPF
AQKKNNLPL

SEQ ID NO: 13100 - protein, 9 aa, synthetic construct
  source 1..9: note = Seed: AAKKNNLPF
AQKKNNLPM

SEQ ID NO: 13101 - protein, 9 aa, synthetic construct
  source 1..9: note = Seed: AAKKNNLPF
AQKKNNLPW

SEQ ID NO: 13102 - protein, 9 aa, synthetic construct
  source 1..9: note = Seed: AAKKNNLPF
AQKKNNLPY

SEQ ID NO: 13103 - protein, 8 aa, synthetic construct
  source 1..8: note = Seed: AKKNNLPF
AQKNNLPF

SEQ ID NO: 13104 - protein, 9 aa, synthetic construct
  source 1..9: note = Seed: AKKNNLPFK
AQKNNLPFK

SEQ ID NO: 13105 - protein, 8 aa, synthetic construct
  source 1..8: note = Seed: AKKNNLPF
AQKNNLPM

SEQ ID NO: 13106 - protein, 8 aa, synthetic construct
  source 1..8: note = Seed: AKKNNLPF
AQKNNLPY

SEQ ID NO: 13107 - protein, 10 aa, synthetic construct
  source 1..10: note = Seed: AALALLLLDR
AQLALLLLDK

SEQ ID NO: 13108 - protein, 10 aa, synthetic construct
  source 1..10: note = Seed: AALCTFLLNK
AQLCTFLLNK

SEQ ID NO: 13109 - protein, 10 aa, synthetic construct
  source 1..10: note = Seed: AALCTFLLNK
AQLCTFLLNR

SEQ ID NO: 13110 - protein, 10 aa, synthetic construct
  source 1..10: note = Seed: ASLINTLNDL
AQLINTLNDI

SEQ ID NO: 13111 - protein, 10 aa, synthetic construct
  source 1..10: note = Seed: ASLINTLNDL
AQLINTLNDV

SEQ ID NO: 13112 - protein, 9 aa, synthetic construct
  source 1..9: note = Seed: ASLNGVTLI
AQLNGVTLA

SEQ ID NO: 13113 - protein, 9 aa, synthetic construct
  source 1..9: note = Seed: ASLNGVTLI
AQLNGVTLI

SEQ ID NO: 13114 - protein, 9 aa, synthetic construct
  source 1..9: note = Seed: ASLNGVTLI
AQLNGVTLL

SEQ ID NO: 13115 - protein, 9 aa, synthetic construct
  source 1..9: note = Seed: ASLNGVTLI
AQLNGVTLM

SEQ ID NO: 13116 - protein, 9 aa, synthetic construct
  source 1..9: note = Seed: ASLNGVTLI
AQLNGVTLV

SEQ ID NO: 13117 - protein, 9 aa, synthetic construct
  source 1..9: note = Seed: AQLPAPRTL
AQLPAPRTF

SEQ ID NO: 13118 - protein, 10 aa, synthetic construct
  source 1..10: note = Seed: AQLPAPRTLL
AQLPAPRTLF

SEQ ID NO: 13119 - protein, 10 aa, synthetic construct
  source 1..10: note = Seed: AQLPAPRTLL
AQLPAPRTLM

SEQ ID NO: 13120 - protein, 10 aa, synthetic construct
  source 1..10: note = Seed: AQLPAPRTLL
AQLPAPRTLY

SEQ ID NO: 13121 - protein, 9 aa, synthetic construct
  source 1..9: note = Seed: AQLPAPRTL
AQLPAPRTM

SEQ ID NO: 13122 - protein, 9 aa, synthetic construct
  source 1..9: note = Seed: AQLPAPRTL
AQLPAPRTY

SEQ ID NO: 13123 - protein, 10 aa, synthetic construct
  source 1..10: note = Seed: ATLQAIASEF
AQLQAIASEF

SEQ ID NO: 13124 - protein, 10 aa, synthetic construct
  source 1..10: note = Seed: ATLQAIASEF
AQLQAIASEM

SEQ ID NO: 13125 - protein, 10 aa, synthetic construct
  source 1..10: note = Seed: ATLQAIASEF
AQLQAIASEY

SEQ ID NO: 13126 - protein, 9 aa, synthetic construct
  source 1..9: note = Seed: AALQIPFAM
AQLQIPFAF

SEQ ID NO: 13127 - protein, 9 aa, synthetic construct
  source 1..9: note = Seed: AALQIPFAM
AQLQIPFAL

SEQ ID NO: 13128 - protein, 9 aa, synthetic construct
  source 1..9: note = Seed: AALQIPFAM
AQLQIPFAM

SEQ ID NO: 13129 - protein, 11 aa, synthetic construct
  source 1..11: note = Seed: AALQIPFAMQM
AQLQIPFAMQF

SEQ ID NO: 13130 - protein, 11 aa, synthetic construct
  source 1..11: note = Seed: AALQIPFAMQM
AQLQIPFAMQY

SEQ ID NO: 13131 - protein, 9 aa, synthetic construct
  source 1..9: note = Seed: AALQIPFAM
AQLQIPFAY

SEQ ID NO: 13132 - protein, 9 aa, synthetic construct
  source 1..9: note = Seed: AVLQSGFRK
AQLQSGFRR

SEQ ID NO: 13133 - protein, 9 aa, synthetic construct
  source 1..9: note = Seed: ALLSDLQDL
AQLSDLQDV

SEQ ID NO: 13134 - protein, 11 aa, synthetic construct
  source 1..11: note = Seed: AILTALRLCAY
AQLTALRLCAY

SEQ ID NO: 13135 - protein, 10 aa, synthetic construct
  source 1..10: note = Seed: ADLVYALRHF
AQLVYALRHF

SEQ ID NO: 13136 - protein, 10 aa, synthetic construct
  source 1..10: note = Seed: ADLVYALRHF
AQLVYALRHY

SEQ ID NO: 13137 - protein, 11 aa, synthetic construct
  source 1..11: note = Seed: AMMFVKHKHAF
AQMFVKHKHAF

SEQ ID NO: 13138 - protein, 11 aa, synthetic construct
  source 1..11: note = Seed: AMMFVKHKHAF
AQMFVKHKHAY

SEQ ID NO: 13139 - protein, 9 aa, synthetic construct
  source 1..9: note = Seed: AMMFVKHKH
AQMFVKHKR

SEQ ID NO: 13140 - protein, 10 aa, synthetic construct
  source 1..10: note = Seed: ALNKATNNAM
AQNKATNNAF

SEQ ID NO: 13141 - protein, 10 aa, synthetic construct
  source 1..10: note = Seed: ALNKATNNAM
AQNKATNNAM

SEQ ID NO: 13142 - protein, 10 aa, synthetic construct
  source 1..10: note = Seed: ALNKATNNAM
AQNKATNNAY

SEQ ID NO: 13143 - protein, 9 aa, synthetic construct
  source 1..9: note = Seed: ALNNIINNA
AQNNIINNI

SEQ ID NO: 13144 - protein, 9 aa, synthetic construct
  source 1..9: note = Seed: ALNNIINNA
AQNNIINNL

SEQ ID NO: 13145 - protein, 9 aa, synthetic construct
  source 1..9: note = Seed: ALNNIINNA
AQNNIINNV

SEQ ID NO: 13146 - protein, 8 aa, synthetic construct
  source 1..8: note = Seed: AQNSVRVL
AQNSVRVF

SEQ ID NO: 13147 - protein, 10 aa, synthetic construct
  source 1..10: note = Seed: AQNSVRVLQK
AQNSVRVLQR

SEQ ID NO: 13148 - protein, 8 aa, synthetic construct
  source 1..8: note = Seed: AQNSVRVL
AQNSVRVM

SEQ ID NO: 13149 - protein, 8 aa, synthetic construct
  source 1..8: note = Seed: AQNSVRVL
AQNSVRVY

SEQ ID NO: 13150 - protein, 10 aa, synthetic construct
  source 1..10: note = Seed: AIPTNFTISV
AQPTNFTISL

SEQ ID NO: 13151 - protein, 10 aa, synthetic construct
  source 1..10: note = Seed: AIPTNFTISV
AQPTNFTISM

SEQ ID NO: 13152 - protein, 10 aa, synthetic construct
  source 1..10: note = Seed: AIPTNFTISV
AQPTNFTISV

SEQ ID NO: 13153 - protein, 10 aa, synthetic construct
  source 1..10: note = Seed: ADQAMTQMYK
AQQAMTQMYK

SEQ ID NO: 13154 - protein, 10 aa, synthetic construct
  source 1..10: note = Seed: ADQAMTQMYK
AQQAMTQMYR

SEQ ID NO: 13155 - protein, 9 aa, synthetic construct
  source 1..9: note = Seed: ALQDAYYRA
AQQDAYYRI

SEQ ID NO: 13156 - protein, 9 aa, synthetic construct
  source 1..9: note = Seed: ALQDAYYRA
AQQDAYYRV

SEQ ID NO: 13157 - protein, 10 aa, synthetic construct
  source 1..10: note = Seed: ALQIPFAMQM
AQQIPFAMQF

SEQ ID NO: 13158 - protein, 10 aa, synthetic construct
  source 1..10: note = Seed: ALQIPFAMQM
AQQIPFAMQM

SEQ ID NO: 13159 - protein, 10 aa, synthetic construct
  source 1..10: note = Seed: ALQIPFAMQM
AQQIPFAMQV

SEQ ID NO: 13160 - protein, 10 aa, synthetic construct
  source 1..10: note = Seed: ALQIPFAMQM
AQQIPFAMQY

SEQ ID NO: 13161 - protein, 9 aa, synthetic construct
  source 1..9: note = Seed: AMQTMLFTM
AQQTMLFTA

SEQ ID NO: 13162 - protein, 9 aa, synthetic construct
  source 1..9: note = Seed: AMQTMLFTM
AQQTMLFTF

SEQ ID NO: 13163 - protein, 9 aa, synthetic construct
  source 1..9: note = Seed: AMQTMLFTM
AQQTMLFTI

SEQ ID NO: 13164 - protein, 9 aa, synthetic construct
  source 1..9: note = Seed: AMQTMLFTM
AQQTMLFTL

SEQ ID NO: 13165 - protein, 9 aa, synthetic construct
  source 1..9: note = Seed: AMQTMLFTM
AQQTMLFTM

SEQ ID NO: 13166 - protein, 9 aa, synthetic construct
  source 1..9: note = Seed: AMQTMLFTM
AQQTMLFTV

SEQ ID NO: 13167 - protein, 9 aa, synthetic construct
  source 1..9: note = Seed: AMQTMLFTM
AQQTMLFTY

SEQ ID NO: 13168 - protein, 9 aa, synthetic construct
  source 1..9: note = Seed: ALRANSAVK
AQRANSAVK

SEQ ID NO: 13169 - protein, 9 aa, synthetic construct
  source 1..9: note = Seed: ATREAVGTN
AQREAVGTK

SEQ ID NO: 13170 - protein, 8 aa, synthetic construct
  source 1..8: note = Seed: ATRFASVY
AQRFASVY

SEQ ID NO: 13171 - protein, 9 aa, synthetic construct
  source 1..9: note = Seed: ATRFASVYA
AQRFASVYA

SEQ ID NO: 13172 - protein, 9 aa, synthetic construct
  source 1..9: note = Seed: ATRFASVYA
AQRFASVYG

SEQ ID NO: 13173 - protein, 9 aa, synthetic construct
  source 1..9: note = Seed: ATRFASVYA
AQRFASVYI

SEQ ID NO: 13174 - protein, 9 aa, synthetic construct
  source 1..9: note = Seed: ATRFASVYA
AQRFASVYK

SEQ ID NO: 13175 - protein, 9 aa, synthetic construct
  source 1..9: note = Seed: ATRFASVYA
AQRFASVYL

SEQ ID NO: 13176 - protein, 9 aa, synthetic construct
  source 1..9: note = Seed: ATRFASVYA
AQRFASVYM

SEQ ID NO: 13177 - protein, 9 aa, synthetic construct
  source 1..9: note = Seed: ATRFASVYA
AQRFASVYR

SEQ ID NO: 13178 - protein, 9 aa, synthetic construct
  source 1..9: note = Seed: ATRFASVYA
AQRFASVYS

SEQ ID NO: 13179 - protein, 9 aa, synthetic construct
  source 1..9: note = Seed: ATRFASVYA
AQRFASVYV

SEQ ID NO: 13180 - protein, 9 aa, synthetic construct
  source 1..9: note = Seed: ATRFASVYA
AQRFASVYY

SEQ ID NO: 13181 - protein, 9 aa, synthetic construct
  source 1..9: note = Seed: AYRFNGIGV
AQRFNGIGK

SEQ ID NO: 13182 - protein, 9 aa, synthetic construct
  source 1..9: note = Seed: AWRKAVFIS
AQRKAVFIA

SEQ ID NO: 13183 - protein, 9 aa, synthetic construct
  source 1..9: note = Seed: AWRKAVFIS
AQRKAVFIK

SEQ ID NO: 13184 - protein, 11 aa, synthetic construct
  source 1..11: note = Seed: AWRKAVFISPY
AQRKAVFISPF

SEQ ID NO: 13185 - protein, 11 aa, synthetic construct
  source 1..11: note = Seed: AWRKAVFISPY
AQRKAVFISPM

SEQ ID NO: 13186 - protein, 11 aa, synthetic construct
  source 1..11: note = Seed: AWRKAVFISPY
AQRKAVFISPY

SEQ ID NO: 13187 - protein, 9 aa, synthetic construct
  source 1..9: note = Seed: AMRNAGIVG
AQRNAGIVF

SEQ ID NO: 13188 - protein, 10 aa, synthetic construct
  source 1..10: note = Seed: AMRNAGIVGV
AQRNAGIVGK

SEQ ID NO: 13189 - protein, 10 aa, synthetic construct
  source 1..10: note = Seed: AMRNAGIVGV
AQRNAGIVGV

SEQ ID NO: 13190 - protein, 11 aa, synthetic construct
  source 1..11: note = Seed: AMRNAGIVGVL
AQRNAGIVGVF

SEQ ID NO: 13191 - protein, 11 aa, synthetic construct
  source 1..11: note = Seed: AMRNAGIVGVL
AQRNAGIVGVY

SEQ ID NO: 13192 - protein, 9 aa, synthetic construct
  source 1..9: note = Seed: AMRNAGIVG
AQRNAGIVH

SEQ ID NO: 13193 - protein, 9 aa, synthetic construct
  source 1..9: note = Seed: AMRNAGIVG
AQRNAGIVI

SEQ ID NO: 13194 - protein, 9 aa, synthetic construct
  source 1..9: note = Seed: AMRNAGIVG
AQRNAGIVK

SEQ ID NO: 13195 - protein, 9 aa, synthetic construct
  source 1..9: note = Seed: AMRNAGIVG
AQRNAGIVL

SEQ ID NO: 13196 - protein, 9 aa, synthetic construct
  source 1..9: note = Seed: AMRNAGIVG
AQRNAGIVM

SEQ ID NO: 13197 - protein, 9 aa, synthetic construct
  source 1..9: note = Seed: AMRNAGIVG
AQRNAGIVV

SEQ ID NO: 13198 - protein, 9 aa, synthetic construct
  source 1..9: note = Seed: AMRNAGIVG
AQRNAGIVW

SEQ ID NO: 13199 - protein, 9 aa, synthetic construct
  source 1..9: note = Seed: AMRNAGIVG
AQRNAGIVY

SEQ ID NO: 13200 - protein, 9 aa, synthetic construct
  source 1..9: note = Seed: AARQGFVDS
AQRQGFVDK

SEQ ID NO: 13201 - protein, 9 aa, synthetic construct
  source 1..9: note = Seed: ATSACVLAA
AQSACVLAI

SEQ ID NO: 13202 - protein, 9 aa, synthetic construct
  source 1..9: note = Seed: ATSACVLAA
AQSACVLAL

SEQ ID NO: 13203 - protein, 9 aa, synthetic construct
  source 1..9: note = Seed: ATSACVLAA
AQSACVLAV

SEQ ID NO: 13204 - protein, 8 aa, synthetic construct
  source 1..8: note = Seed: AMSAFAMM
AQSAFAMF

SEQ ID NO: 13205 - protein, 9 aa, synthetic construct
  source 1..9: note = Seed: AMSAFAMMF
AQSAFAMMF

SEQ ID NO: 13206 - protein, 10 aa, synthetic construct
  source 1..10: note = Seed: AMSAFAMMFV
AQSAFAMMFI

SEQ ID NO: 13207 - protein, 10 aa, synthetic construct
  source 1..10: note = Seed: AMSAFAMMFV
AQSAFAMMFL

SEQ ID NO: 13208 - protein, 10 aa, synthetic construct
  source 1..10: note = Seed: AMSAFAMMFV
AQSAFAMMFV

SEQ ID NO: 13209 - protein, 11 aa, synthetic construct
  source 1..11: note = Seed: AMSAFAMMFVK
AQSAFAMMFVR

SEQ ID NO: 13210 - protein, 9 aa, synthetic construct
  source 1..9: note = Seed: AMSAFAMMF
AQSAFAMMI

SEQ ID NO: 13211 - protein, 9 aa, synthetic construct
  source 1..9: note = Seed: AMSAFAMMF
AQSAFAMML

SEQ ID NO: 13212 - protein, 9 aa, synthetic construct
  source 1..9: note = Seed: AMSAFAMMF
AQSAFAMMM

SEQ ID NO: 13213 - protein, 9 aa, synthetic construct
  source 1..9: note = Seed: AMSAFAMMF
AQSAFAMMV

SEQ ID NO: 13214 - protein, 9 aa, synthetic construct
  source 1..9: note = Seed: AMSAFAMMF
AQSAFAMMW

SEQ ID NO: 13215 - protein, 9 aa, synthetic construct
  source 1..9: note = Seed: AMSAFAMMF
AQSAFAMMY

SEQ ID NO: 13216 - protein, 8 aa, synthetic construct
  source 1..8: note = Seed: AMSAFAMM
AQSAFAMY

SEQ ID NO: 13217 - protein, 9 aa, synthetic construct
  source 1..9: note = Seed: AHSCNVNRF
AQSCNVNRF

SEQ ID NO: 13218 - protein, 9 aa, synthetic construct
  source 1..9: note = Seed: AHSCNVNRF
AQSCNVNRM

SEQ ID NO: 13219 - protein, 9 aa, synthetic construct
  source 1..9: note = Seed: AHSCNVNRF
AQSCNVNRY

SEQ ID NO: 13220 - protein, 11 aa, synthetic construct
  source 1..11: note = Seed: AYSRYRIGNYK
AQSRYRIGNYR

SEQ ID NO: 13221 - protein, 9 aa, synthetic construct
  source 1..9: note = Seed: AISSVLNDI
AQSSVLNDV

SEQ ID NO: 13222 - protein, 10 aa, synthetic construct
  source 1..10: note = Seed: AVTANVNALL
AQTANVNALV

SEQ ID NO: 13223 - protein, 9 aa, synthetic construct
  source 1..9: note = Seed: AVTANVNAL
AQTANVNAV

SEQ ID NO: 13224 - protein, 9 aa, synthetic construct
  source 1..9: note = Seed: ATTAYANSV
AQTAYANSV

SEQ ID NO: 13225 - protein, 10 aa, synthetic construct
  source 1..10: note = Seed: ATTAYANSVF
AQTAYANSVF

SEQ ID NO: 13226 - protein, 10 aa, synthetic construct
  source 1..10: note = Seed: ATTAYANSVF
AQTAYANSVM

SEQ ID NO: 13227 - protein, 10 aa, synthetic construct
  source 1..10: note = Seed: ATTAYANSVF
AQTAYANSVW

SEQ ID NO: 13228 - protein, 10 aa, synthetic construct
  source 1..10: note = Seed: ATTAYANSVF
AQTAYANSVY

SEQ ID NO: 13229 - protein, 9 aa, synthetic construct
  source 1..9: note = Seed: ALTCFSTQF
AQTCFSTQF

SEQ ID NO: 13230 - protein, 9 aa, synthetic construct
  source 1..9: note = Seed: ALTCFSTQF
AQTCFSTQL

SEQ ID NO: 13231 - protein, 9 aa, synthetic construct
  source 1..9: note = Seed: ALTCFSTQF
AQTCFSTQM

SEQ ID NO: 13232 - protein, 9 aa, synthetic construct
  source 1..9: note = Seed: ALTCFSTQF
AQTCFSTQY

SEQ ID NO: 13233 - protein, 10 aa, synthetic construct
  source 1..10: note = Seed: AGTDLEGNFY
AQTDLEGNFY

SEQ ID NO: 13234 - protein, 10 aa, synthetic construct
  source 1..10: note = Seed: ATTRQVVNVV
AQTRQVVNVK

SEQ ID NO: 13235 - protein, 10 aa, synthetic construct
  source 1..10: note = Seed: ASTSAFVETV
AQTSAFVETV

SEQ ID NO: 13236 - protein, 9 aa, synthetic construct
  source 1..9: note = Seed: ATVAYFNMV
AQVAYFNMA

SEQ ID NO: 13237 - protein, 9 aa, synthetic construct
  source 1..9: note = Seed: ATVAYFNMV
AQVAYFNMI

SEQ ID NO: 13238 - protein, 9 aa, synthetic construct
  source 1..9: note = Seed: ATVAYFNMV
AQVAYFNML

SEQ ID NO: 13239 - protein, 9 aa, synthetic construct
  source 1..9: note = Seed: ATVAYFNMV
AQVAYFNMM

SEQ ID NO: 13240 - protein, 9 aa, synthetic construct
  source 1..9: note = Seed: ATVAYFNMV
AQVAYFNMV

SEQ ID NO: 13241 - protein, 10 aa, synthetic construct
  source 1..10: note = Seed: ATVAYFNMVY
AQVAYFNMVF

SEQ ID NO: 13242 - protein, 10 aa, synthetic construct
  source 1..10: note = Seed: ATVAYFNMVY
AQVAYFNMVK

SEQ ID NO: 13243 - protein, 10 aa, synthetic construct
  source 1..10: note = Seed: ATVAYFNMVY
AQVAYFNMVL

SEQ ID NO: 13244 - protein, 10 aa, synthetic construct
  source 1..10: note = Seed: ATVAYFNMVY
AQVAYFNMVM

SEQ ID NO: 13245 - protein, 10 aa, synthetic construct
  source 1..10: note = Seed: ATVAYFNMVY
AQVAYFNMVR

SEQ ID NO: 13246 - protein, 10 aa, synthetic construct
  source 1..10: note = Seed: ATVAYFNMVY
AQVAYFNMVY

SEQ ID NO: 13247 - protein, 9 aa, synthetic construct
  source 1..9: note = Seed: AVVCFNSTY
AQVCFNSTF

SEQ ID NO: 13248 - protein, 9 aa, synthetic construct
  source 1..9: note = Seed: AVVCFNSTY
AQVCFNSTH

SEQ ID NO: 13249 - protein, 9 aa, synthetic construct
  source 1..9: note = Seed: AVVCFNSTY
AQVCFNSTI

SEQ ID NO: 13250 - protein, 9 aa, synthetic construct
  source 1..9: note = Seed: AVVCFNSTY
AQVCFNSTL

SEQ ID NO: 13251 - protein, 9 aa, synthetic construct
  source 1..9: note = Seed: AVVCFNSTY
AQVCFNSTM

SEQ ID NO: 13252 - protein, 9 aa, synthetic construct
  source 1..9: note = Seed: AVVCFNSTY
AQVCFNSTV

SEQ ID NO: 13253 - protein, 9 aa, synthetic construct
  source 1..9: note = Seed: AVVCFNSTY
AQVCFNSTW

SEQ ID NO: 13254 - protein, 9 aa, synthetic construct
  source 1..9: note = Seed: AVVCFNSTY
AQVCFNSTY

SEQ ID NO: 13255 - protein, 10 aa, synthetic construct
  source 1..10: note = Seed: AVVCFNSTYA
AQVCFNSTYL

SEQ ID NO: 13256 - protein, 10 aa, synthetic construct
  source 1..10: note = Seed: AVVCFNSTYA
AQVCFNSTYV

SEQ ID NO: 13257 - protein, 9 aa, synthetic construct
  source 1..9: note = Seed: ARVECFDKF
AQVECFDKF

SEQ ID NO: 13258 - protein, 9 aa, synthetic construct
  source 1..9: note = Seed: ARVECFDKF
AQVECFDKM

SEQ ID NO: 13259 - protein, 9 aa, synthetic construct
  source 1..9: note = Seed: ARVECFDKF
AQVECFDKY

SEQ ID NO: 13260 - protein, 10 aa, synthetic construct
  source 1..10: note = Seed: AFVNLKQLPF
AQVNLKQLPF

SEQ ID NO: 13261 - protein, 10 aa, synthetic construct
  source 1..10: note = Seed: AFVNLKQLPF
AQVNLKQLPM

SEQ ID NO: 13262 - protein, 10 aa, synthetic construct
  source 1..10: note = Seed: AFVNLKQLPF
AQVNLKQLPY

SEQ ID NO: 13263 - protein, 9 aa, synthetic construct
  source 1..9: note = Seed: AMVRMYIFF
AQVRMYIFF

SEQ ID NO: 13264 - protein, 10 aa, synthetic construct
  source 1..10: note = Seed: AMVRMYIFFA
AQVRMYIFFA

SEQ ID NO: 13265 - protein, 10 aa, synthetic construct
  source 1..10: note = Seed: AMVRMYIFFA
AQVRMYIFFI

SEQ ID NO: 13266 - protein, 10 aa, synthetic construct
  source 1..10: note = Seed: AMVRMYIFFA
AQVRMYIFFK

SEQ ID NO: 13267 - protein, 10 aa, synthetic construct
  source 1..10: note = Seed: AMVRMYIFFA
AQVRMYIFFL

SEQ ID NO: 13268 - protein, 10 aa, synthetic construct
  source 1..10: note = Seed: AMVRMYIFFA
AQVRMYIFFV

SEQ ID NO: 13269 - protein, 9 aa, synthetic construct
  source 1..9: note = Seed: AMVRMYIFF
AQVRMYIFM

SEQ ID NO: 13270 - protein, 9 aa, synthetic construct
  source 1..9: note = Seed: AMVRMYIFF
AQVRMYIFY

SEQ ID NO: 13271 - protein, 9 aa, synthetic construct
  source 1..9: note = Seed: AGVSICSTM
AQVSICSTF

SEQ ID NO: 13272 - protein, 9 aa, synthetic construct
  source 1..9: note = Seed: AGVSICSTM
AQVSICSTI

SEQ ID NO: 13273 - protein, 9 aa, synthetic construct
  source 1..9: note = Seed: AGVSICSTM
AQVSICSTL

SEQ ID NO: 13274 - protein, 9 aa, synthetic construct
  source 1..9: note = Seed: AGVSICSTM
AQVSICSTM

SEQ ID NO: 13275 - protein, 9 aa, synthetic construct
  source 1..9: note = Seed: AGVSICSTM
AQVSICSTW

SEQ ID NO: 13276 - protein, 9 aa, synthetic construct
  source 1..9: note = Seed: AGVSICSTM
AQVSICSTY

SEQ ID NO: 13277 - protein, 10 aa, synthetic construct
  source 1..10: note = Seed: AKVTSAMQTM
AQVTSAMQTF

SEQ ID NO: 13278 - protein, 10 aa, synthetic construct
  source 1..10: note = Seed: AKVTSAMQTM
AQVTSAMQTM

SEQ ID NO: 13279 - protein, 10 aa, synthetic construct
  source 1..10: note = Seed: AKVTSAMQTM
AQVTSAMQTY

SEQ ID NO: 13280 - protein, 9 aa, synthetic construct
  source 1..9: note = Seed: ASVYYSQLM
AQVYYSQLF

SEQ ID NO: 13281 - protein, 9 aa, synthetic construct
  source 1..9: note = Seed: ASVYYSQLM
AQVYYSQLI

SEQ ID NO: 13282 - protein, 9 aa, synthetic construct
  source 1..9: note = Seed: ASVYYSQLM
AQVYYSQLL

SEQ ID NO: 13283 - protein, 9 aa, synthetic construct
  source 1..9: note = Seed: ASVYYSQLM
AQVYYSQLM

SEQ ID NO: 13284 - protein, 9 aa, synthetic construct
  source 1..9: note = Seed: ASVYYSQLM
AQVYYSQLW

SEQ ID NO: 13285 - protein, 9 aa, synthetic construct
  source 1..9: note = Seed: ASVYYSQLM
AQVYYSQLY

SEQ ID NO: 13286 - protein, 9 aa, synthetic construct
  source 1..9: note = Seed: AEWFLAYIL
AQWFLAYIF

SEQ ID NO: 13287 - protein, 9 aa, synthetic construct
  source 1..9: note = Seed: AEWFLAYIL
AQWFLAYII

SEQ ID NO: 13288 - protein, 9 aa, synthetic construct
  source 1..9: note = Seed: AEWFLAYIL
AQWFLAYIL

SEQ ID NO: 13289 - protein, 9 aa, synthetic construct
  source 1..9: note = Seed: AEWFLAYIL
AQWFLAYIM

SEQ ID NO: 13290 - protein, 9 aa, synthetic construct
  source 1..9: note = Seed: AEWFLAYIL
AQWFLAYIY

SEQ ID NO: 13291 - protein, 8 aa, synthetic construct
  source 1..8: note = Seed: AYYFMRFR
AQYFMRFR

SEQ ID NO: 13292 - protein, 9 aa, synthetic construct
  source 1..9: note = Seed: AYYFMRFRR
AQYFMRFRK

SEQ ID NO: 13293 - protein, 9 aa, synthetic construct
  source 1..9: note = Seed: AYYFMRFRR
AQYFMRFRR

SEQ ID NO: 13294 - protein, 9 aa, synthetic construct
  source 1..9: note = Seed: AMYTPHTVL
AQYTPHTVA

SEQ ID NO: 13295 - protein, 9 aa, synthetic construct
  source 1..9: note = Seed: AMYTPHTVL
AQYTPHTVF

SEQ ID NO: 13296 - protein, 9 aa, synthetic construct
  source 1..9: note = Seed: AMYTPHTVL
AQYTPHTVG

SEQ ID NO: 13297 - protein, 9 aa, synthetic construct
  source 1..9: note = Seed: AMYTPHTVL
AQYTPHTVH

SEQ ID NO: 13298 - protein, 9 aa, synthetic construct
  source 1..9: note = Seed: AMYTPHTVL
AQYTPHTVI

SEQ ID NO: 13299 - protein, 9 aa, synthetic construct
  source 1..9: note = Seed: AMYTPHTVL
AQYTPHTVL

SEQ ID NO: 13300 - protein, 9 aa, synthetic construct
  source 1..9: note = Seed: AMYTPHTVL
AQYTPHTVM

SEQ ID NO: 13301 - protein, 9 aa, synthetic construct
  source 1..9: note = Seed: AMYTPHTVL
AQYTPHTVV

SEQ ID NO: 13302 - protein, 9 aa, synthetic construct
  source 1..9: note = Seed: AMYTPHTVL
AQYTPHTVW

SEQ ID NO: 13303 - protein, 9 aa, synthetic construct
  source 1..9: note = Seed: AMYTPHTVL
AQYTPHTVY

SEQ ID NO: 13304 - protein, 9 aa, synthetic construct
  source 1..9: note = Seed: AKYTQLCQY
AQYTQLCQF

SEQ ID NO: 13305 - protein, 9 aa, synthetic construct
  source 1..9: note = Seed: AKYTQLCQY
AQYTQLCQI

SEQ ID NO: 13306 - protein, 9 aa, synthetic construct
  source 1..9: note = Seed: AKYTQLCQY
AQYTQLCQL

SEQ ID NO: 13307 - protein, 9 aa, synthetic construct
  source 1..9: note = Seed: AKYTQLCQY
AQYTQLCQM

SEQ ID NO: 13308 - protein, 9 aa, synthetic construct
  source 1..9: note = Seed: AKYTQLCQY
AQYTQLCQY

SEQ ID NO: 13309 - protein, 10 aa, synthetic construct
  source 1..10: note = Seed: AKYTQLCQYL
AQYTQLCQYF

SEQ ID NO: 13310 - protein, 10 aa, synthetic construct
  source 1..10: note = Seed: AKYTQLCQYL
AQYTQLCQYM

SEQ ID NO: 13311 - protein, 10 aa, synthetic construct
  source 1..10: note = Seed: AKYTQLCQYL
AQYTQLCQYY

SEQ ID NO: 13312 - protein, 8 aa, synthetic construct
  source 1..8: note = Seed: AQYTSALL
AQYTSALF

SEQ ID NO: 13313 - protein, 8 aa, synthetic construct
  source 1..8: note = Seed: AQYTSALL
AQYTSALM

SEQ ID NO: 13314 - protein, 8 aa, synthetic construct
  source 1..8: note = Seed: AQYTSALL
AQYTSALY

SEQ ID NO: 13315 - protein, 10 aa, synthetic construct
  source 1..10: note = Seed: AYYVGYLQPR
AQYVGYLQPR

SEQ ID NO: 13316 - protein, 9 aa, synthetic construct
  source 1..9: note = Seed: AGAALQIPF
ARAALQIPF

SEQ ID NO: 13317 - protein, 9 aa, synthetic construct
  source 1..9: note = Seed: AGAALQIPF
ARAALQIPY

SEQ ID NO: 13318 - protein, 9 aa, synthetic construct
  source 1..9: note = Seed: AIASEFSSL
ARASEFSSF

SEQ ID NO: 13319 - protein, 9 aa, synthetic construct
  source 1..9: note = Seed: AIASEFSSL
ARASEFSSM

SEQ ID NO: 13320 - protein, 9 aa, synthetic construct
  source 1..9: note = Seed: AIASEFSSL
ARASEFSSY

SEQ ID NO: 13321 - protein, 10 aa, synthetic construct
  source 1..10: note = Seed: ARDLSLQFKR
ARDLSLQFKF

SEQ ID NO: 13322 - protein, 10 aa, synthetic construct
  source 1..10: note = Seed: ARDLSLQFKR
ARDLSLQFKI

SEQ ID NO: 13323 - protein, 10 aa, synthetic construct
  source 1..10: note = Seed: ARDLSLQFKR
ARDLSLQFKL

SEQ ID NO: 13324 - protein, 10 aa, synthetic construct
  source 1..10: note = Seed: ARDLSLQFKR
ARDLSLQFKM

SEQ ID NO: 13325 - protein, 9 aa, synthetic construct
  source 1..9: note = Seed: AGDSGFAAY
ARDSGFAAF

SEQ ID NO: 13326 - protein, 10 aa, synthetic construct
  source 1..10: note = Seed: AGEAANFCAL
AREAANFCAA

SEQ ID NO: 13327 - protein, 10 aa, synthetic construct
  source 1..10: note = Seed: AGEAANFCAL
AREAANFCAF

SEQ ID NO: 13328 - protein, 10 aa, synthetic construct
  source 1..10: note = Seed: AGEAANFCAL
AREAANFCAL

SEQ ID NO: 13329 - protein, 10 aa, synthetic construct
  source 1..10: note = Seed: AGEAANFCAL
AREAANFCAW

SEQ ID NO: 13330 - protein, 10 aa, synthetic construct
  source 1..10: note = Seed: AQFAPSASAF
ARFAPSASAF

SEQ ID NO: 13331 - protein, 10 aa, synthetic construct
  source 1..10: note = Seed: AQFAPSASAF
ARFAPSASAI

SEQ ID NO: 13332 - protein, 10 aa, synthetic construct
  source 1..10: note = Seed: AQFAPSASAF
ARFAPSASAL

SEQ ID NO: 13333 - protein, 10 aa, synthetic construct
  source 1..10: note = Seed: AQFAPSASAF
ARFAPSASAM

SEQ ID NO: 13334 - protein, 10 aa, synthetic construct
  source 1..10: note = Seed: AQFAPSASAF
ARFAPSASAY

SEQ ID NO: 13335 - protein, 9 aa, synthetic construct
  source 1..9: note = Seed: AQFAPSASA
ARFAPSASF

SEQ ID NO: 13336 - protein, 9 aa, synthetic construct
  source 1..9: note = Seed: AQFAPSASA
ARFAPSASL

SEQ ID NO: 13337 - protein, 9 aa, synthetic construct
  source 1..9: note = Seed: AQFAPSASA
ARFAPSASM

SEQ ID NO: 13338 - protein, 9 aa, synthetic construct
  source 1..9: note = Seed: AQFAPSASA
ARFAPSASY

SEQ ID NO: 13339 - protein, 9 aa, synthetic construct
  source 1..9: note = Seed: ASFDNFKFV
ARFDNFKFI

SEQ ID NO: 13340 - protein, 9 aa, synthetic construct
  source 1..9: note = Seed: ASFDNFKFV
ARFDNFKFL

SEQ ID NO: 13341 - protein, 9 aa, synthetic construct
  source 1..9: note = Seed: ASFDNFKFV
ARFDNFKFM

SEQ ID NO: 13342 - protein, 9 aa, synthetic construct
  source 1..9: note = Seed: ASFDNFKFV
ARFDNFKFV

SEQ ID NO: 13343 - protein, 11 aa, synthetic construct
  source 1..11: note = Seed: ANFNVLFSTVF
ARFNVLFSTVY

SEQ ID NO: 13344 - protein, 10 aa, synthetic construct
  source 1..10: note = Seed: ASFRLFARTR
ARFRLFARTK

SEQ ID NO: 13345 - protein, 9 aa, synthetic construct
  source 1..9: note = Seed: AGFSLWVYK
ARFSLWVYR

SEQ ID NO: 13346 - protein, 9 aa, synthetic construct
  source 1..9: note = Seed: ASFSTFKCY
ARFSTFKCF

SEQ ID NO: 13347 - protein, 9 aa, synthetic construct
  source 1..9: note = Seed: ASFSTFKCY
ARFSTFKCY

SEQ ID NO: 13348 - protein, 10 aa, synthetic construct
  source 1..10: note = Seed: ALIISVTSNY
ARIISVTSNK

SEQ ID NO: 13349 - protein, 10 aa, synthetic construct
  source 1..10: note = Seed: ALIISVTSNY
ARIISVTSNY

SEQ ID NO: 13350 - protein, 10 aa, synthetic construct
  source 1..10: note = Seed: AYILFTRFFY
ARILFTRFFK

SEQ ID NO: 13351 - protein, 10 aa, synthetic construct
  source 1..10: note = Seed: AYILFTRFFY
ARILFTRFFR

SEQ ID NO: 13352 - protein, 10 aa, synthetic construct
  source 1..10: note = Seed: AYILFTRFFY
ARILFTRFFY

SEQ ID NO: 13353 - protein, 11 aa, synthetic construct
  source 1..11: note = Seed: AYILFTRFFYV
ARILFTRFFYA

SEQ ID NO: 13354 - protein, 11 aa, synthetic construct
  source 1..11: note = Seed: AYILFTRFFYV
ARILFTRFFYI

SEQ ID NO: 13355 - protein, 11 aa, synthetic construct
  source 1..11: note = Seed: AYILFTRFFYV
ARILFTRFFYL

SEQ ID NO: 13356 - protein, 11 aa, synthetic construct
  source 1..11: note = Seed: AYILFTRFFYV
ARILFTRFFYV

SEQ ID NO: 13357 - protein, 9 aa, synthetic construct
  source 1..9: note = Seed: AAKKNNLPF
ARKKNNLPF

SEQ ID NO: 13358 - protein, 9 aa, synthetic construct
  source 1..9: note = Seed: AAKKNNLPF
ARKKNNLPY

SEQ ID NO: 13359 - protein, 10 aa, synthetic construct
  source 1..10: note = Seed: AALCTFLLNK
ARLCTFLLNK

SEQ ID NO: 13360 - protein, 10 aa, synthetic construct
  source 1..10: note = Seed: AALCTFLLNK
ARLCTFLLNR

SEQ ID NO: 13361 - protein, 10 aa, synthetic construct
  source 1..10: note = Seed: ASLINTLNDL
ARLINTLNDI

SEQ ID NO: 13362 - protein, 10 aa, synthetic construct
  source 1..10: note = Seed: ASLINTLNDL
ARLINTLNDV

SEQ ID NO: 13363 - protein, 9 aa, synthetic construct
  source 1..9: note = Seed: AQLPAPRTL
ARLPAPRTL

SEQ ID NO: 13364 - protein, 11 aa, synthetic construct
  source 1..11: note = Seed: AALQIPFAMQM
ARLQIPFAMQF

SEQ ID NO: 13365 - protein, 11 aa, synthetic construct
  source 1..11: note = Seed: AALQIPFAMQM
ARLQIPFAMQY

SEQ ID NO: 13366 - protein, 10 aa, synthetic construct
  source 1..10: note = Seed: AIPTNFTISV
ARPTNFTISL

SEQ ID NO: 13367 - protein, 10 aa, synthetic construct
  source 1..10: note = Seed: AIPTNFTISV
ARPTNFTISM

SEQ ID NO: 13368 - protein, 10 aa, synthetic construct
  source 1..10: note = Seed: ADQAMTQMYK
ARQAMTQMYK

SEQ ID NO: 13369 - protein, 10 aa, synthetic construct
  source 1..10: note = Seed: ADQAMTQMYK
ARQAMTQMYR

SEQ ID NO: 13370 - protein, 10 aa, synthetic construct
  source 1..10: note = Seed: ALQIPFAMQM
ARQIPFAMQF

SEQ ID NO: 13371 - protein, 10 aa, synthetic construct
  source 1..10: note = Seed: ALQIPFAMQM
ARQIPFAMQM

SEQ ID NO: 13372 - protein, 10 aa, synthetic construct
  source 1..10: note = Seed: ALQIPFAMQM
ARQIPFAMQV

SEQ ID NO: 13373 - protein, 10 aa, synthetic construct
  source 1..10: note = Seed: ALQIPFAMQM
ARQIPFAMQY

SEQ ID NO: 13374 - protein, 9 aa, synthetic construct
  source 1..9: note = Seed: ATRFASVYA
ARRFASVYK

SEQ ID NO: 13375 - protein, 9 aa, synthetic construct
  source 1..9: note = Seed: AMRNAGIVG
ARRNAGIVF

SEQ ID NO: 13376 - protein, 10 aa, synthetic construct
  source 1..10: note = Seed: AMRNAGIVGV
ARRNAGIVGL

SEQ ID NO: 13377 - protein, 9 aa, synthetic construct
  source 1..9: note = Seed: AMRNAGIVG
ARRNAGIVY

SEQ ID NO: 13378 - protein, 9 aa, synthetic construct
  source 1..9: note = Seed: AMSAFAMMF
ARSAFAMMF

SEQ ID NO: 13379 - protein, 11 aa, synthetic construct
  source 1..11: note = Seed: AMSAFAMMFVK
ARSAFAMMFVR

SEQ ID NO: 13380 - protein, 9 aa, synthetic construct
  source 1..9: note = Seed: AMSAFAMMF
ARSAFAMMY

SEQ ID NO: 13381 - protein, 10 aa, synthetic construct
  source 1..10: note = Seed: APSASAFFGM
ARSASAFFGW

SEQ ID NO: 13382 - protein, 10 aa, synthetic construct
  source 1..10: note = Seed: AVTANVNALL
ARTANVNALV

SEQ ID NO: 13383 - protein, 10 aa, synthetic construct
  source 1..10: note = Seed: ATTAYANSVF
ARTAYANSVF

SEQ ID NO: 13384 - protein, 10 aa, synthetic construct
  source 1..10: note = Seed: ATTAYANSVF
ARTAYANSVW

SEQ ID NO: 13385 - protein, 10 aa, synthetic construct
  source 1..10: note = Seed: AGTDLEGNFY
ARTDLEGNFY

SEQ ID NO: 13386 - protein, 10 aa, synthetic construct
  source 1..10: note = Seed: ATTRQVVNVV
ARTRQVVNVA

SEQ ID NO: 13387 - protein, 10 aa, synthetic construct
  source 1..10: note = Seed: ATTRQVVNVV
ARTRQVVNVK

SEQ ID NO: 13388 - protein, 9 aa, synthetic construct
  source 1..9: note = Seed: ARTVAGVSI
ARTVAGVSL

SEQ ID NO: 13389 - protein, 10 aa, synthetic construct
  source 1..10: note = Seed: ATVAYFNMVY
ARVAYFNMVF

SEQ ID NO: 13390 - protein, 10 aa, synthetic construct
  source 1..10: note = Seed: ATVAYFNMVY
ARVAYFNMVK

SEQ ID NO: 13391 - protein, 10 aa, synthetic construct
  source 1..10: note = Seed: ATVAYFNMVY
ARVAYFNMVR

SEQ ID NO: 13392 - protein, 10 aa, synthetic construct
  source 1..10: note = Seed: ATVAYFNMVY
ARVAYFNMVY

SEQ ID NO: 13393 - protein, 9 aa, synthetic construct
  source 1..9: note = Seed: AVVCFNSTY
ARVCFNSTF

SEQ ID NO: 13394 - protein, 9 aa, synthetic construct
  source 1..9: note = Seed: AVVCFNSTY
ARVCFNSTM

SEQ ID NO: 13395 - protein, 9 aa, synthetic construct
  source 1..9: note = Seed: AVVCFNSTY
ARVCFNSTY

SEQ ID NO: 13396 - protein, 9 aa, synthetic construct
  source 1..9: note = Seed: ARVECFDKF
ARVECFDKL

SEQ ID NO: 13397 - protein, 10 aa, synthetic construct
  source 1..10: note = Seed: AMVRMYIFFA
ARVRMYIFFA

SEQ ID NO: 13398 - protein, 10 aa, synthetic construct
  source 1..10: note = Seed: AMVRMYIFFA
ARVRMYIFFK

SEQ ID NO: 13399 - protein, 9 aa, synthetic construct
  source 1..9: note = Seed: AGVSICSTM
ARVSICSTF

SEQ ID NO: 13400 - protein, 9 aa, synthetic construct
  source 1..9: note = Seed: AGVSICSTM
ARVSICSTY

SEQ ID NO: 13401 - protein, 9 aa, synthetic construct
  source 1..9: note = Seed: ASVYYSQLM
ARVYYSQLF

SEQ ID NO: 13402 - protein, 9 aa, synthetic construct
  source 1..9: note = Seed: ASVYYSQLM
ARVYYSQLY

SEQ ID NO: 13403 - protein, 10 aa, synthetic construct
  source 1..10: note = Seed: AEWFLAYILF
ARWFLAYILF

SEQ ID NO: 13404 - protein, 9 aa, synthetic construct
  source 1..9: note = Seed: AMYTPHTVL
ARYTPHTVF

SEQ ID NO: 13405 - protein, 9 aa, synthetic construct
  source 1..9: note = Seed: AMYTPHTVL
ARYTPHTVM

SEQ ID NO: 13406 - protein, 9 aa, synthetic construct
  source 1..9: note = Seed: AMYTPHTVL
ARYTPHTVY

SEQ ID NO: 13407 - protein, 10 aa, synthetic construct
  source 1..10: note = Seed: AKYTQLCQYL
ARYTQLCQYF

SEQ ID NO: 13408 - protein, 9 aa, synthetic construct
  source 1..9: note = Seed: AGAALQIPF
ASAALQIPF

SEQ ID NO: 13409 - protein, 9 aa, synthetic construct
  source 1..9: note = Seed: AGAALQIPF
ASAALQIPY

SEQ ID NO: 13410 - protein, 10 aa, synthetic construct
  source 1..10: note = Seed: AMACLVGLMW
ASACLVGLMW

SEQ ID NO: 13411 - protein, 10 aa, synthetic construct
  source 1..10: note = Seed: AFAMMFVKHK
ASAMMFVKHK

SEQ ID NO: 13412 - protein, 10 aa, synthetic construct
  source 1..10: note = Seed: AFAMMFVKHK
ASAMMFVKHR

SEQ ID NO: 13413 - protein, 9 aa, synthetic construct
  source 1..9: note = Seed: AYANSVFNI
ASANSVFNY

SEQ ID NO: 13414 - protein, 9 aa, synthetic construct
  source 1..9: note = Seed: AIASEFSSL
ASASEFSSF

SEQ ID NO: 13415 - protein, 9 aa, synthetic construct
  source 1..9: note = Seed: AIASEFSSL
ASASEFSSL

SEQ ID NO: 13416 - protein, 9 aa, synthetic construct
  source 1..9: note = Seed: AIASEFSSL
ASASEFSSM

SEQ ID NO: 13417 - protein, 9 aa, synthetic construct
  source 1..9: note = Seed: AIASEFSSL
ASASEFSSV

SEQ ID NO: 13418 - protein, 9 aa, synthetic construct
  source 1..9: note = Seed: AIASEFSSL
ASASEFSSY

SEQ ID NO: 13419 - protein, 9 aa, synthetic construct
  source 1..9: note = Seed: ASAVVLLIL
ASAVVLLIF

SEQ ID NO: 13420 - protein, 10 aa, synthetic construct
  source 1..10: note = Seed: ASAVVLLILM
ASAVVLLILW

SEQ ID NO: 13421 - protein, 9 aa, synthetic construct
  source 1..9: note = Seed: ASAVVLLIL
ASAVVLLIM

SEQ ID NO: 13422 - protein, 9 aa, synthetic construct
  source 1..9: note = Seed: ASAVVLLIL
ASAVVLLIW

SEQ ID NO: 13423 - protein, 9 aa, synthetic construct
  source 1..9: note = Seed: ASAVVLLIL
ASAVVLLIY

SEQ ID NO: 13424 - protein, 9 aa, synthetic construct
  source 1..9: note = Seed: ALCTFLLNK
ASCTFLLNK

SEQ ID NO: 13425 - protein, 9 aa, synthetic construct
  source 1..9: note = Seed: ALCTFLLNK
ASCTFLLNR

SEQ ID NO: 13426 - protein, 9 aa, synthetic construct
  source 1..9: note = Seed: AVDAAKAYK
ASDAAKAYK

SEQ ID NO: 13427 - protein, 9 aa, synthetic construct
  source 1..9: note = Seed: ALDISASIV
ASDISASIF

SEQ ID NO: 13428 - protein, 9 aa, synthetic construct
  source 1..9: note = Seed: ALDISASIV
ASDISASIL

SEQ ID NO: 13429 - protein, 9 aa, synthetic construct
  source 1..9: note = Seed: ALDISASIV
ASDISASIM

SEQ ID NO: 13430 - protein, 9 aa, synthetic construct
  source 1..9: note = Seed: AGDSGFAAY
ASDSGFAAY

SEQ ID NO: 13431 - protein, 10 aa, synthetic construct
  source 1..10: note = Seed: AGEAANFCAL
ASEAANFCAA

SEQ ID NO: 13432 - protein, 10 aa, synthetic construct
  source 1..10: note = Seed: AGEAANFCAL
ASEAANFCAF

SEQ ID NO: 13433 - protein, 10 aa, synthetic construct
  source 1..10: note = Seed: AGEAANFCAL
ASEAANFCAL

SEQ ID NO: 13434 - protein, 10 aa, synthetic construct
  source 1..10: note = Seed: AGEAANFCAL
ASEAANFCAW

SEQ ID NO: 13435 - protein, 10 aa, synthetic construct
  source 1..10: note = Seed: AQFAPSASAF
ASFAPSASAF

SEQ ID NO: 13436 - protein, 11 aa, synthetic construct
  source 1..11: note = Seed: AQFAPSASAFF
ASFAPSASAFY

SEQ ID NO: 13437 - protein, 10 aa, synthetic construct
  source 1..10: note = Seed: AQFAPSASAF
ASFAPSASAY

SEQ ID NO: 13438 - protein, 9 aa, synthetic construct
  source 1..9: note = Seed: AQFAPSASA
ASFAPSASF

SEQ ID NO: 13439 - protein, 9 aa, synthetic construct
  source 1..9: note = Seed: AQFAPSASA
ASFAPSASL

SEQ ID NO: 13440 - protein, 9 aa, synthetic construct
  source 1..9: note = Seed: AQFAPSASA
ASFAPSASM

SEQ ID NO: 13441 - protein, 9 aa, synthetic construct
  source 1..9: note = Seed: AQFAPSASA
ASFAPSASY

SEQ ID NO: 13442 - protein, 9 aa, synthetic construct
  source 1..9: note = Seed: ASFDNFKFV
ASFDNFKFF

SEQ ID NO: 13443 - protein, 9 aa, synthetic construct
  source 1..9: note = Seed: ASFDNFKFV
ASFDNFKFK

SEQ ID NO: 13444 - protein, 9 aa, synthetic construct
  source 1..9: note = Seed: ASFDNFKFV
ASFDNFKFL

SEQ ID NO: 13445 - protein, 9 aa, synthetic construct
  source 1..9: note = Seed: ASFDNFKFV
ASFDNFKFM

SEQ ID NO: 13446 - protein, 9 aa, synthetic construct
  source 1..9: note = Seed: ASFDNFKFV
ASFDNFKFW

SEQ ID NO: 13447 - protein, 9 aa, synthetic construct
  source 1..9: note = Seed: ASFDNFKFV
ASFDNFKFY

SEQ ID NO: 13448 - protein, 10 aa, synthetic construct
  source 1..10: note = Seed: AYFNMVYMPA
ASFNMVYMPK

SEQ ID NO: 13449 - protein, 10 aa, synthetic construct
  source 1..10: note = Seed: ANFNVLFSTV
ASFNVLFSTV

SEQ ID NO: 13450 - protein, 11 aa, synthetic construct
  source 1..11: note = Seed: ASFNYLKSPNF
ASFNYLKSPNW

SEQ ID NO: 13451 - protein, 11 aa, synthetic construct
  source 1..11: note = Seed: ASFNYLKSPNF
ASFNYLKSPNY

SEQ ID NO: 13452 - protein, 10 aa, synthetic construct
  source 1..10: note = Seed: AGFPFNKWGK
ASFPFNKWGK

SEQ ID NO: 13453 - protein, 10 aa, synthetic construct
  source 1..10: note = Seed: AGFPFNKWGK
ASFPFNKWGR

SEQ ID NO: 13454 - protein, 10 aa, synthetic construct
  source 1..10: note = Seed: ASFRLFARTR
ASFRLFARTK

SEQ ID NO: 13455 - protein, 9 aa, synthetic construct
  source 1..9: note = Seed: AGFSLWVYK
ASFSLWVYK

SEQ ID NO: 13456 - protein, 9 aa, synthetic construct
  source 1..9: note = Seed: AGFSLWVYK
ASFSLWVYR

SEQ ID NO: 13457 - protein, 9 aa, synthetic construct
  source 1..9: note = Seed: AGFSLWVYK
ASFSLWVYY

SEQ ID NO: 13458 - protein, 9 aa, synthetic construct
  source 1..9: note = Seed: ASFSTFKCY
ASFSTFKCF

SEQ ID NO: 13459 - protein, 9 aa, synthetic construct
  source 1..9: note = Seed: ASFSTFKCY
ASFSTFKCK

SEQ ID NO: 13460 - protein, 9 aa, synthetic construct
  source 1..9: note = Seed: ASFSTFKCY
ASFSTFKCM

SEQ ID NO: 13461 - protein, 9 aa, synthetic construct
  source 1..9: note = Seed: ASFSTFKCY
ASFSTFKCW

SEQ ID NO: 13462 - protein, 9 aa, synthetic construct
  source 1..9: note = Seed: AIFYLITPV
ASFYLITPF

SEQ ID NO: 13463 - protein, 9 aa, synthetic construct
  source 1..9: note = Seed: AIFYLITPV
ASFYLITPI

SEQ ID NO: 13464 - protein, 9 aa, synthetic construct
  source 1..9: note = Seed: AIFYLITPV
ASFYLITPV

SEQ ID NO: 13465 - protein, 9 aa, synthetic construct
  source 1..9: note = Seed: AIFYLITPV
ASFYLITPW

SEQ ID NO: 13466 - protein, 10 aa, synthetic construct
  source 1..10: note = Seed: ASFYYVWKSY
ASFYYVWKSF

SEQ ID NO: 13467 - protein, 10 aa, synthetic construct
  source 1..10: note = Seed: ASFYYVWKSY
ASFYYVWKSK

SEQ ID NO: 13468 - protein, 10 aa, synthetic construct
  source 1..10: note = Seed: ASFYYVWKSY
ASFYYVWKSW

SEQ ID NO: 13469 - protein, 9 aa, synthetic construct
  source 1..9: note = Seed: ANGQVFGLY
ASGQVFGLY

SEQ ID NO: 13470 - protein, 10 aa, synthetic construct
  source 1..10: note = Seed: ANGQVFGLYK
ASGQVFGLYK

SEQ ID NO: 13471 - protein, 10 aa, synthetic construct
  source 1..10: note = Seed: ANGQVFGLYK
ASGQVFGLYR

SEQ ID NO: 13472 - protein, 10 aa, synthetic construct
  source 1..10: note = Seed: APGTAVLRQW
ASGTAVLRQW

SEQ ID NO: 13473 - protein, 9 aa, synthetic construct
  source 1..9: note = Seed: AVHFISNSW
ASHFISNSF

SEQ ID NO: 13474 - protein, 9 aa, synthetic construct
  source 1..9: note = Seed: AVHFISNSW
ASHFISNSM

SEQ ID NO: 13475 - protein, 9 aa, synthetic construct
  source 1..9: note = Seed: AVHFISNSW
ASHFISNSW

SEQ ID NO: 13476 - protein, 9 aa, synthetic construct
  source 1..9: note = Seed: AVHFISNSW
ASHFISNSY

SEQ ID NO: 13477 - protein, 10 aa, synthetic construct
  source 1..10: note = Seed: ALIISVTSNY
ASIISVTSNF

SEQ ID NO: 13478 - protein, 10 aa, synthetic construct
  source 1..10: note = Seed: ALIISVTSNY
ASIISVTSNK

SEQ ID NO: 13479 - protein, 10 aa, synthetic construct
  source 1..10: note = Seed: ALIISVTSNY
ASIISVTSNY

SEQ ID NO: 13480 - protein, 9 aa, synthetic construct
  source 1..9: note = Seed: ASIKNFKSV
ASIKNFKSF

SEQ ID NO: 13481 - protein, 9 aa, synthetic construct
  source 1..9: note = Seed: ASIKNFKSV
ASIKNFKSK

SEQ ID NO: 13482 - protein, 9 aa, synthetic construct
  source 1..9: note = Seed: ASIKNFKSV
ASIKNFKSM

SEQ ID NO: 13483 - protein, 10 aa, synthetic construct
  source 1..10: note = Seed: ASIKNFKSVL
ASIKNFKSVF

SEQ ID NO: 13484 - protein, 10 aa, synthetic construct
  source 1..10: note = Seed: ASIKNFKSVL
ASIKNFKSVW

SEQ ID NO: 13485 - protein, 10 aa, synthetic construct
  source 1..10: note = Seed: ASIKNFKSVL
ASIKNFKSVY

SEQ ID NO: 13486 - protein, 9 aa, synthetic construct
  source 1..9: note = Seed: ASIKNFKSV
ASIKNFKSW

SEQ ID NO: 13487 - protein, 9 aa, synthetic construct
  source 1..9: note = Seed: ASIKNFKSV
ASIKNFKSY

SEQ ID NO: 13488 - protein, 10 aa, synthetic construct
  source 1..10: note = Seed: AYILFTRFFY
ASILFTRFFK

SEQ ID NO: 13489 - protein, 10 aa, synthetic construct
  source 1..10: note = Seed: AYILFTRFFY
ASILFTRFFR

SEQ ID NO: 13490 - protein, 10 aa, synthetic construct
  source 1..10: note = Seed: AYILFTRFFY
ASILFTRFFY

SEQ ID NO: 13491 - protein, 11 aa, synthetic construct
  source 1..11: note = Seed: AYILFTRFFYV
ASILFTRFFYA

SEQ ID NO: 13492 - protein, 11 aa, synthetic construct
  source 1..11: note = Seed: AYILFTRFFYV
ASILFTRFFYI

SEQ ID NO: 13493 - protein, 11 aa, synthetic construct
  source 1..11: note = Seed: AYILFTRFFYV
ASILFTRFFYL

SEQ ID NO: 13494 - protein, 11 aa, synthetic construct
  source 1..11: note = Seed: AYILFTRFFYV
ASILFTRFFYV

SEQ ID NO: 13495 - protein, 9 aa, synthetic construct
  source 1..9: note = Seed: AVINGDRWF
ASINGDRWF

SEQ ID NO: 13496 - protein, 9 aa, synthetic construct
  source 1..9: note = Seed: AIKITEHSW
ASKITEHSW

SEQ ID NO: 13497 - protein, 9 aa, synthetic construct
  source 1..9: note = Seed: AAKKNNLPF
ASKKNNLPF

SEQ ID NO: 13498 - protein, 10 aa, synthetic construct
  source 1..10: note = Seed: AAKKNNLPFK
ASKKNNLPFA

SEQ ID NO: 13499 - protein, 10 aa, synthetic construct
  source 1..10: note = Seed: AAKKNNLPFK
ASKKNNLPFK

SEQ ID NO: 13500 - protein, 9 aa, synthetic construct
  source 1..9: note = Seed: AAKKNNLPF
ASKKNNLPW

SEQ ID NO: 13501 - protein, 9 aa, synthetic construct
  source 1..9: note = Seed: AAKKNNLPF
ASKKNNLPY

SEQ ID NO: 13502 - protein, 9 aa, synthetic construct
  source 1..9: note = Seed: AKKNNLPFK
ASKNNLPFA

SEQ ID NO: 13503 - protein, 9 aa, synthetic construct
  source 1..9: note = Seed: AKKNNLPFK
ASKNNLPFI

SEQ ID NO: 13504 - protein, 9 aa, synthetic construct
  source 1..9: note = Seed: AKKNNLPFK
ASKNNLPFK

SEQ ID NO: 13505 - protein, 9 aa, synthetic construct
  source 1..9: note = Seed: AKKNNLPFK
ASKNNLPFL

SEQ ID NO: 13506 - protein, 9 aa, synthetic construct
  source 1..9: note = Seed: AKKNNLPFK
ASKNNLPFM

SEQ ID NO: 13507 - protein, 9 aa, synthetic construct
  source 1..9: note = Seed: AKKNNLPFK
ASKNNLPFR

SEQ ID NO: 13508 - protein, 9 aa, synthetic construct
  source 1..9: note = Seed: AKKNNLPFK
ASKNNLPFS

SEQ ID NO: 13509 - protein, 9 aa, synthetic construct
  source 1..9: note = Seed: AKKNNLPFK
ASKNNLPFT

SEQ ID NO: 13510 - protein, 9 aa, synthetic construct
  source 1..9: note = Seed: AKKNNLPFK
ASKNNLPFV

SEQ ID NO: 13511 - protein, 9 aa, synthetic construct
  source 1..9: note = Seed: AKKNNLPFK
ASKNNLPFY

SEQ ID NO: 13512 - protein, 9 aa, synthetic construct
  source 1..9: note = Seed: ALKYLPIDK
ASKYLPIDK

SEQ ID NO: 13513 - protein, 10 aa, synthetic construct
  source 1..10: note = Seed: AALALLLLDR
ASLALLLLDK

SEQ ID NO: 13514 - protein, 10 aa, synthetic construct
  source 1..10: note = Seed: AALALLLLDR
ASLALLLLDR

SEQ ID NO: 13515 - protein, 10 aa, synthetic construct
  source 1..10: note = Seed: AALCTFLLNK
ASLCTFLLNK

SEQ ID NO: 13516 - protein, 10 aa, synthetic construct
  source 1..10: note = Seed: AALCTFLLNK
ASLCTFLLNR

SEQ ID NO: 13517 - protein, 10 aa, synthetic construct
  source 1..10: note = Seed: ASLINTLNDL
ASLINTLNDI

SEQ ID NO: 13518 - protein, 10 aa, synthetic construct
  source 1..10: note = Seed: ASLINTLNDL
ASLINTLNDV

SEQ ID NO: 13519 - protein, 9 aa, synthetic construct
  source 1..9: note = Seed: ASLNGVTLI
ASLNGVTLF

SEQ ID NO: 13520 - protein, 9 aa, synthetic construct
  source 1..9: note = Seed: ASLNGVTLI
ASLNGVTLL

SEQ ID NO: 13521 - protein, 9 aa, synthetic construct
  source 1..9: note = Seed: ASLNGVTLI
ASLNGVTLM

SEQ ID NO: 13522 - protein, 9 aa, synthetic construct
  source 1..9: note = Seed: ASLNGVTLI
ASLNGVTLW

SEQ ID NO: 13523 - protein, 9 aa, synthetic construct
  source 1..9: note = Seed: ASLNGVTLI
ASLNGVTLY

SEQ ID NO: 13524 - protein, 9 aa, synthetic construct
  source 1..9: note = Seed: AQLPAPRTL
ASLPAPRTF

SEQ ID NO: 13525 - protein, 9 aa, synthetic construct
  source 1..9: note = Seed: AQLPAPRTL
ASLPAPRTY

SEQ ID NO: 13526 - protein, 10 aa, synthetic construct
  source 1..10: note = Seed: ATLQAIASEF
ASLQAIASEF

SEQ ID NO: 13527 - protein, 10 aa, synthetic construct
  source 1..10: note = Seed: ATLQAIASEF
ASLQAIASEW

SEQ ID NO: 13528 - protein, 10 aa, synthetic construct
  source 1..10: note = Seed: ATLQAIASEF
ASLQAIASEY

SEQ ID NO: 13529 - protein, 9 aa, synthetic construct
  source 1..9: note = Seed: AALQIPFAM
ASLQIPFAF

SEQ ID NO: 13530 - protein, 9 aa, synthetic construct
  source 1..9: note = Seed: AALQIPFAM
ASLQIPFAL

SEQ ID NO: 13531 - protein, 9 aa, synthetic construct
  source 1..9: note = Seed: AALQIPFAM
ASLQIPFAM

SEQ ID NO: 13532 - protein, 11 aa, synthetic construct
  source 1..11: note = Seed: AALQIPFAMQM
ASLQIPFAMQY

SEQ ID NO: 13533 - protein, 9 aa, synthetic construct
  source 1..9: note = Seed: AALQIPFAM
ASLQIPFAW

SEQ ID NO: 13534 - protein, 9 aa, synthetic construct
  source 1..9: note = Seed: AALQIPFAM
ASLQIPFAY

SEQ ID NO: 13535 - protein, 9 aa, synthetic construct
  source 1..9: note = Seed: AVLQSGFRK
ASLQSGFRK

SEQ ID NO: 13536 - protein, 9 aa, synthetic construct
  source 1..9: note = Seed: AVLQSGFRK
ASLQSGFRR

SEQ ID NO: 13537 - protein, 10 aa, synthetic construct
  source 1..10: note = Seed: ALLSDLQDLK
ASLSDLQDLK

SEQ ID NO: 13538 - protein, 11 aa, synthetic construct
  source 1..11: note = Seed: ALLSDLQDLKW
ASLSDLQDLKW

SEQ ID NO: 13539 - protein, 9 aa, synthetic construct
  source 1..9: note = Seed: AMMFVKHKH
ASMFVKHKK

SEQ ID NO: 13540 - protein, 9 aa, synthetic construct
  source 1..9: note = Seed: AMMFVKHKH
ASMFVKHKR

SEQ ID NO: 13541 - protein, 10 aa, synthetic construct
  source 1..10: note = Seed: ALNNIINNAR
ASNNIINNAR

SEQ ID NO: 13542 - protein, 10 aa, synthetic construct
  source 1..10: note = Seed: AQNSVRVLQK
ASNSVRVLQK

SEQ ID NO: 13543 - protein, 10 aa, synthetic construct
  source 1..10: note = Seed: AQNSVRVLQK
ASNSVRVLQR

SEQ ID NO: 13544 - protein, 10 aa, synthetic construct
  source 1..10: note = Seed: AIPTNFTISV
ASPTNFTISL

SEQ ID NO: 13545 - protein, 10 aa, synthetic construct
  source 1..10: note = Seed: AIPTNFTISV
ASPTNFTISM

SEQ ID NO: 13546 - protein, 10 aa, synthetic construct
  source 1..10: note = Seed: ADQAMTQMYK
ASQAMTQMYK

SEQ ID NO: 13547 - protein, 10 aa, synthetic construct
  source 1..10: note = Seed: ADQAMTQMYK
ASQAMTQMYR

SEQ ID NO: 13548 - protein, 10 aa, synthetic construct
  source 1..10: note = Seed: ALQDAYYRAR
ASQDAYYRAR

SEQ ID NO: 13549 - protein, 10 aa, synthetic construct
  source 1..10: note = Seed: ALQIPFAMQM
ASQIPFAMQF

SEQ ID NO: 13550 - protein, 10 aa, synthetic construct
  source 1..10: note = Seed: ALQIPFAMQM
ASQIPFAMQM

SEQ ID NO: 13551 - protein, 10 aa, synthetic construct
  source 1..10: note = Seed: ALQIPFAMQM
ASQIPFAMQV

SEQ ID NO: 13552 - protein, 10 aa, synthetic construct
  source 1..10: note = Seed: ALQIPFAMQM
ASQIPFAMQY

SEQ ID NO: 13553 - protein, 9 aa, synthetic construct
  source 1..9: note = Seed: AMQTMLFTM
ASQTMLFTV

SEQ ID NO: 13554 - protein, 9 aa, synthetic construct
  source 1..9: note = Seed: ALRANSAVK
ASRANSAVA

SEQ ID NO: 13555 - protein, 9 aa, synthetic construct
  source 1..9: note = Seed: ALRANSAVK
ASRANSAVI

SEQ ID NO: 13556 - protein, 9 aa, synthetic construct
  source 1..9: note = Seed: ALRANSAVK
ASRANSAVK

SEQ ID NO: 13557 - protein, 9 aa, synthetic construct
  source 1..9: note = Seed: ALRANSAVK
ASRANSAVL

SEQ ID NO: 13558 - protein, 9 aa, synthetic construct
  source 1..9: note = Seed: ALRANSAVK
ASRANSAVM

SEQ ID NO: 13559 - protein, 9 aa, synthetic construct
  source 1..9: note = Seed: ALRANSAVK
ASRANSAVR

SEQ ID NO: 13560 - protein, 9 aa, synthetic construct
  source 1..9: note = Seed: ALRANSAVK
ASRANSAVS

SEQ ID NO: 13561 - protein, 9 aa, synthetic construct
  source 1..9: note = Seed: ALRANSAVK
ASRANSAVV

SEQ ID NO: 13562 - protein, 9 aa, synthetic construct
  source 1..9: note = Seed: ALRANSAVK
ASRANSAVY

SEQ ID NO: 13563 - protein, 9 aa, synthetic construct
  source 1..9: note = Seed: ATREAVGTN
ASREAVGTA

SEQ ID NO: 13564 - protein, 9 aa, synthetic construct
  source 1..9: note = Seed: ATREAVGTN
ASREAVGTK

SEQ ID NO: 13565 - protein, 10 aa, synthetic construct
  source 1..10: note = Seed: ATREAVGTNL
ASREAVGTNA

SEQ ID NO: 13566 - protein, 10 aa, synthetic construct
  source 1..10: note = Seed: ATREAVGTNL
ASREAVGTNK

SEQ ID NO: 13567 - protein, 9 aa, synthetic construct
  source 1..9: note = Seed: ATREAVGTN
ASREAVGTV

SEQ ID NO: 13568 - protein, 9 aa, synthetic construct
  source 1..9: note = Seed: ATRFASVYA
ASRFASVYA

SEQ ID NO: 13569 - protein, 9 aa, synthetic construct
  source 1..9: note = Seed: ATRFASVYA
ASRFASVYC

SEQ ID NO: 13570 - protein, 9 aa, synthetic construct
  source 1..9: note = Seed: ATRFASVYA
ASRFASVYF

SEQ ID NO: 13571 - protein, 9 aa, synthetic construct
  source 1..9: note = Seed: ATRFASVYA
ASRFASVYG

SEQ ID NO: 13572 - protein, 9 aa, synthetic construct
  source 1..9: note = Seed: ATRFASVYA
ASRFASVYH

SEQ ID NO: 13573 - protein, 9 aa, synthetic construct
  source 1..9: note = Seed: ATRFASVYA
ASRFASVYI

SEQ ID NO: 13574 - protein, 9 aa, synthetic construct
  source 1..9: note = Seed: ATRFASVYA
ASRFASVYK

SEQ ID NO: 13575 - protein, 9 aa, synthetic construct
  source 1..9: note = Seed: ATRFASVYA
ASRFASVYL

SEQ ID NO: 13576 - protein, 9 aa, synthetic construct
  source 1..9: note = Seed: ATRFASVYA
ASRFASVYM

SEQ ID NO: 13577 - protein, 9 aa, synthetic construct
  source 1..9: note = Seed: ATRFASVYA
ASRFASVYN

SEQ ID NO: 13578 - protein, 9 aa, synthetic construct
  source 1..9: note = Seed: ATRFASVYA
ASRFASVYP

SEQ ID NO: 13579 - protein, 9 aa, synthetic construct
  source 1..9: note = Seed: ATRFASVYA
ASRFASVYQ

SEQ ID NO: 13580 - protein, 9 aa, synthetic construct
  source 1..9: note = Seed: ATRFASVYA
ASRFASVYR

SEQ ID NO: 13581 - protein, 9 aa, synthetic construct
  source 1..9: note = Seed: ATRFASVYA
ASRFASVYS

SEQ ID NO: 13582 - protein, 9 aa, synthetic construct
  source 1..9: note = Seed: ATRFASVYA
ASRFASVYT

SEQ ID NO: 13583 - protein, 9 aa, synthetic construct
  source 1..9: note = Seed: ATRFASVYA
ASRFASVYV

SEQ ID NO: 13584 - protein, 9 aa, synthetic construct
  source 1..9: note = Seed: ATRFASVYA
ASRFASVYY

SEQ ID NO: 13585 - protein, 9 aa, synthetic construct
  source 1..9: note = Seed: AYRFNGIGV
ASRFNGIGA

SEQ ID NO: 13586 - protein, 9 aa, synthetic construct
  source 1..9: note = Seed: AYRFNGIGV
ASRFNGIGI

SEQ ID NO: 13587 - protein, 9 aa, synthetic construct
  source 1..9: note = Seed: AYRFNGIGV
ASRFNGIGK

SEQ ID NO: 13588 - protein, 9 aa, synthetic construct
  source 1..9: note = Seed: AYRFNGIGV
ASRFNGIGL

SEQ ID NO: 13589 - protein, 9 aa, synthetic construct
  source 1..9: note = Seed: AYRFNGIGV
ASRFNGIGM

SEQ ID NO: 13590 - protein, 9 aa, synthetic construct
  source 1..9: note = Seed: AYRFNGIGV
ASRFNGIGV

SEQ ID NO: 13591 - protein, 9 aa, synthetic construct
  source 1..9: note = Seed: AWRKAVFIS
ASRKAVFIA

SEQ ID NO: 13592 - protein, 9 aa, synthetic construct
  source 1..9: note = Seed: AWRKAVFIS
ASRKAVFIG

SEQ ID NO: 13593 - protein, 9 aa, synthetic construct
  source 1..9: note = Seed: AWRKAVFIS
ASRKAVFII

SEQ ID NO: 13594 - protein, 9 aa, synthetic construct
  source 1..9: note = Seed: AWRKAVFIS
ASRKAVFIK

SEQ ID NO: 13595 - protein, 9 aa, synthetic construct
  source 1..9: note = Seed: AWRKAVFIS
ASRKAVFIL

SEQ ID NO: 13596 - protein, 9 aa, synthetic construct
  source 1..9: note = Seed: AWRKAVFIS
ASRKAVFIM

SEQ ID NO: 13597 - protein, 9 aa, synthetic construct
  source 1..9: note = Seed: AWRKAVFIS
ASRKAVFIS

SEQ ID NO: 13598 - protein, 9 aa, synthetic construct
  source 1..9: note = Seed: AWRKAVFIS
ASRKAVFIT

SEQ ID NO: 13599 - protein, 9 aa, synthetic construct
  source 1..9: note = Seed: AWRKAVFIS
ASRKAVFIV

SEQ ID NO: 13600 - protein, 9 aa, synthetic construct
  source 1..9: note = Seed: AWRKAVFIS
ASRKAVFIY

SEQ ID NO: 13601 - protein, 9 aa, synthetic construct
  source 1..9: note = Seed: AMRNAGIVG
ASRNAGIVA

SEQ ID NO: 13602 - protein, 9 aa, synthetic construct
  source 1..9: note = Seed: AMRNAGIVG
ASRNAGIVF

SEQ ID NO: 13603 - protein, 10 aa, synthetic construct
  source 1..10: note = Seed: AMRNAGIVGV
ASRNAGIVGA

SEQ ID NO: 13604 - protein, 10 aa, synthetic construct
  source 1..10: note = Seed: AMRNAGIVGV
ASRNAGIVGK

SEQ ID NO: 13605 - protein, 10 aa, synthetic construct
  source 1..10: note = Seed: AMRNAGIVGV
ASRNAGIVGV

SEQ ID NO: 13606 - protein, 9 aa, synthetic construct
  source 1..9: note = Seed: AMRNAGIVG
ASRNAGIVI

SEQ ID NO: 13607 - protein, 9 aa, synthetic construct
  source 1..9: note = Seed: AMRNAGIVG
ASRNAGIVK

SEQ ID NO: 13608 - protein, 9 aa, synthetic construct
  source 1..9: note = Seed: AMRNAGIVG
ASRNAGIVL

SEQ ID NO: 13609 - protein, 9 aa, synthetic construct
  source 1..9: note = Seed: AMRNAGIVG
ASRNAGIVM

SEQ ID NO: 13610 - protein, 9 aa, synthetic construct
  source 1..9: note = Seed: AMRNAGIVG
ASRNAGIVS

SEQ ID NO: 13611 - protein, 9 aa, synthetic construct
  source 1..9: note = Seed: AMRNAGIVG
ASRNAGIVV

SEQ ID NO: 13612 - protein, 9 aa, synthetic construct
  source 1..9: note = Seed: AMRNAGIVG
ASRNAGIVY

SEQ ID NO: 13613 - protein, 9 aa, synthetic construct
  source 1..9: note = Seed: AARQGFVDS
ASRQGFVDA

SEQ ID NO: 13614 - protein, 9 aa, synthetic construct
  source 1..9: note = Seed: AARQGFVDS
ASRQGFVDK

SEQ ID NO: 13615 - protein, 9 aa, synthetic construct
  source 1..9: note = Seed: AARQGFVDS
ASRQGFVDV

SEQ ID NO: 13616 - protein, 9 aa, synthetic construct
  source 1..9: note = Seed: ATRVECTTI
ASRVECTTF

SEQ ID NO: 13617 - protein, 10 aa, synthetic construct
  source 1..10: note = Seed: ATRVECTTIV
ASRVECTTIK

SEQ ID NO: 13618 - protein, 9 aa, synthetic construct
  source 1..9: note = Seed: ATRVECTTI
ASRVECTTK

SEQ ID NO: 13619 - protein, 9 aa, synthetic construct
  source 1..9: note = Seed: ATRVECTTI
ASRVECTTW

SEQ ID NO: 13620 - protein, 9 aa, synthetic construct
  source 1..9: note = Seed: ATRVECTTI
ASRVECTTY

SEQ ID NO: 13621 - protein, 9 aa, synthetic construct
  source 1..9: note = Seed: AMSAFAMMF
ASSAFAMMF

SEQ ID NO: 13622 - protein, 10 aa, synthetic construct
  source 1..10: note = Seed: AMSAFAMMFV
ASSAFAMMFV

SEQ ID NO: 13623 - protein, 11 aa, synthetic construct
  source 1..11: note = Seed: AMSAFAMMFVK
ASSAFAMMFVK

SEQ ID NO: 13624 - protein, 11 aa, synthetic construct
  source 1..11: note = Seed: AMSAFAMMFVK
ASSAFAMMFVR

SEQ ID NO: 13625 - protein, 9 aa, synthetic construct
  source 1..9: note = Seed: AMSAFAMMF
ASSAFAMMI

SEQ ID NO: 13626 - protein, 9 aa, synthetic construct
  source 1..9: note = Seed: AMSAFAMMF
ASSAFAMML

SEQ ID NO: 13627 - protein, 9 aa, synthetic construct
  source 1..9: note = Seed: AMSAFAMMF
ASSAFAMMM

SEQ ID NO: 13628 - protein, 9 aa, synthetic construct
  source 1..9: note = Seed: AMSAFAMMF
ASSAFAMMW

SEQ ID NO: 13629 - protein, 9 aa, synthetic construct
  source 1..9: note = Seed: AMSAFAMMF
ASSAFAMMY

SEQ ID NO: 13630 - protein, 10 aa, synthetic construct
  source 1..10: note = Seed: APSASAFFGM
ASSASAFFGF

SEQ ID NO: 13631 - protein, 10 aa, synthetic construct
  source 1..10: note = Seed: APSASAFFGM
ASSASAFFGW

SEQ ID NO: 13632 - protein, 10 aa, synthetic construct
  source 1..10: note = Seed: APSASAFFGM
ASSASAFFGY

SEQ ID NO: 13633 - protein, 10 aa, synthetic construct
  source 1..10: note = Seed: ADSIIIGGAK
ASSIIIGGAK

SEQ ID NO: 13634 - protein, 11 aa, synthetic construct
  source 1..11: note = Seed: AYSRYRIGNYK
ASSRYRIGNYR

SEQ ID NO: 13635 - protein, 9 aa, synthetic construct
  source 1..9: note = Seed: ASSSEAFLI
ASSSEAFLF

SEQ ID NO: 13636 - protein, 9 aa, synthetic construct
  source 1..9: note = Seed: ASSSEAFLI
ASSSEAFLM

SEQ ID NO: 13637 - protein, 9 aa, synthetic construct
  source 1..9: note = Seed: ASSSEAFLI
ASSSEAFLW

SEQ ID NO: 13638 - protein, 9 aa, synthetic construct
  source 1..9: note = Seed: ASSSEAFLI
ASSSEAFLY

SEQ ID NO: 13639 - protein, 9 aa, synthetic construct
  source 1..9: note = Seed: AVTANVNAL
ASTANVNAF

SEQ ID NO: 13640 - protein, 9 aa, synthetic construct
  source 1..9: note = Seed: AVTANVNAL
ASTANVNAL

SEQ ID NO: 13641 - protein, 10 aa, synthetic construct
  source 1..10: note = Seed: AVTANVNALL
ASTANVNALV

SEQ ID NO: 13642 - protein, 9 aa, synthetic construct
  source 1..9: note = Seed: AVTANVNAL
ASTANVNAM

SEQ ID NO: 13643 - protein, 9 aa, synthetic construct
  source 1..9: note = Seed: AVTANVNAL
ASTANVNAY

SEQ ID NO: 13644 - protein, 9 aa, synthetic construct
  source 1..9: note = Seed: ATTAYANSV
ASTAYANSF

SEQ ID NO: 13645 - protein, 9 aa, synthetic construct
  source 1..9: note = Seed: ATTAYANSV
ASTAYANSL

SEQ ID NO: 13646 - protein, 9 aa, synthetic construct
  source 1..9: note = Seed: ATTAYANSV
ASTAYANSM

SEQ ID NO: 13647 - protein, 10 aa, synthetic construct
  source 1..10: note = Seed: ATTAYANSVF
ASTAYANSVF

SEQ ID NO: 13648 - protein, 10 aa, synthetic construct
  source 1..10: note = Seed: ATTAYANSVF
ASTAYANSVW

SEQ ID NO: 13649 - protein, 10 aa, synthetic construct
  source 1..10: note = Seed: ATTAYANSVF
ASTAYANSVY

SEQ ID NO: 13650 - protein, 9 aa, synthetic construct
  source 1..9: note = Seed: ATTAYANSV
ASTAYANSY

SEQ ID NO: 13651 - protein, 9 aa, synthetic construct
  source 1..9: note = Seed: ALTCFSTQF
ASTCFSTQF

SEQ ID NO: 13652 - protein, 9 aa, synthetic construct
  source 1..9: note = Seed: ALTCFSTQF
ASTCFSTQY

SEQ ID NO: 13653 - protein, 10 aa, synthetic construct
  source 1..10: note = Seed: AGTDLEGNFY
ASTDLEGNFY

SEQ ID NO: 13654 - protein, 10 aa, synthetic construct
  source 1..10: note = Seed: ATTRQVVNVV
ASTRQVVNVK

SEQ ID NO: 13655 - protein, 9 aa, synthetic construct
  source 1..9: note = Seed: ATVAYFNMV
ASVAYFNMV

SEQ ID NO: 13656 - protein, 10 aa, synthetic construct
  source 1..10: note = Seed: ATVAYFNMVY
ASVAYFNMVF

SEQ ID NO: 13657 - protein, 10 aa, synthetic construct
  source 1..10: note = Seed: ATVAYFNMVY
ASVAYFNMVK

SEQ ID NO: 13658 - protein, 10 aa, synthetic construct
  source 1..10: note = Seed: ATVAYFNMVY
ASVAYFNMVM

SEQ ID NO: 13659 - protein, 10 aa, synthetic construct
  source 1..10: note = Seed: ATVAYFNMVY
ASVAYFNMVR

SEQ ID NO: 13660 - protein, 10 aa, synthetic construct
  source 1..10: note = Seed: ATVAYFNMVY
ASVAYFNMVW

SEQ ID NO: 13661 - protein, 10 aa, synthetic construct
  source 1..10: note = Seed: ATVAYFNMVY
ASVAYFNMVY

SEQ ID NO: 13662 - protein, 9 aa, synthetic construct
  source 1..9: note = Seed: AVVCFNSTY
ASVCFNSTF

SEQ ID NO: 13663 - protein, 9 aa, synthetic construct
  source 1..9: note = Seed: AVVCFNSTY
ASVCFNSTK

SEQ ID NO: 13664 - protein, 9 aa, synthetic construct
  source 1..9: note = Seed: AVVCFNSTY
ASVCFNSTL

SEQ ID NO: 13665 - protein, 9 aa, synthetic construct
  source 1..9: note = Seed: AVVCFNSTY
ASVCFNSTM

SEQ ID NO: 13666 - protein, 9 aa, synthetic construct
  source 1..9: note = Seed: AVVCFNSTY
ASVCFNSTW

SEQ ID NO: 13667 - protein, 9 aa, synthetic construct
  source 1..9: note = Seed: AVVCFNSTY
ASVCFNSTY

SEQ ID NO: 13668 - protein, 9 aa, synthetic construct
  source 1..9: note = Seed: AAVDALCEK
ASVDALCEK

SEQ ID NO: 13669 - protein, 9 aa, synthetic construct
  source 1..9: note = Seed: AAVINGDRW
ASVINGDRW

SEQ ID NO: 13670 - protein, 10 aa, synthetic construct
  source 1..10: note = Seed: AMVRMYIFFA
ASVRMYIFFA

SEQ ID NO: 13671 - protein, 10 aa, synthetic construct
  source 1..10: note = Seed: AMVRMYIFFA
ASVRMYIFFK

SEQ ID NO: 13672 - protein, 9 aa, synthetic construct
  source 1..9: note = Seed: AGVSICSTM
ASVSICSTF

SEQ ID NO: 13673 - protein, 9 aa, synthetic construct
  source 1..9: note = Seed: AGVSICSTM
ASVSICSTY

SEQ ID NO: 13674 - protein, 9 aa, synthetic construct
  source 1..9: note = Seed: ASVYYSQLM
ASVYYSQLF

SEQ ID NO: 13675 - protein, 9 aa, synthetic construct
  source 1..9: note = Seed: ASVYYSQLM
ASVYYSQLI

SEQ ID NO: 13676 - protein, 9 aa, synthetic construct
  source 1..9: note = Seed: ASVYYSQLM
ASVYYSQLL

SEQ ID NO: 13677 - protein, 9 aa, synthetic construct
  source 1..9: note = Seed: ASVYYSQLM
ASVYYSQLW

SEQ ID NO: 13678 - protein, 9 aa, synthetic construct
  source 1..9: note = Seed: ASVYYSQLM
ASVYYSQLY

SEQ ID NO: 13679 - protein, 8 aa, synthetic construct
  source 1..8: note = Seed: AYYFMRFR
ASYFMRFR

SEQ ID NO: 13680 - protein, 9 aa, synthetic construct
  source 1..9: note = Seed: AYYFMRFRR
ASYFMRFRA

SEQ ID NO: 13681 - protein, 9 aa, synthetic construct
  source 1..9: note = Seed: AYYFMRFRR
ASYFMRFRK

SEQ ID NO: 13682 - protein, 9 aa, synthetic construct
  source 1..9: note = Seed: AYYFMRFRR
ASYFMRFRR

SEQ ID NO: 13683 - protein, 10 aa, synthetic construct
  source 1..10: note = Seed: AYYRARAGEA
ASYRARAGEK

SEQ ID NO: 13684 - protein, 9 aa, synthetic construct
  source 1..9: note = Seed: AWYTERSEK
ASYTERSER

SEQ ID NO: 13685 - protein, 9 aa, synthetic construct
  source 1..9: note = Seed: AMYTPHTVL
ASYTPHTVF

SEQ ID NO: 13686 - protein, 9 aa, synthetic construct
  source 1..9: note = Seed: AMYTPHTVL
ASYTPHTVL

SEQ ID NO: 13687 - protein, 9 aa, synthetic construct
  source 1..9: note = Seed: AMYTPHTVL
ASYTPHTVM

SEQ ID NO: 13688 - protein, 9 aa, synthetic construct
  source 1..9: note = Seed: AMYTPHTVL
ASYTPHTVV

SEQ ID NO: 13689 - protein, 9 aa, synthetic construct
  source 1..9: note = Seed: AMYTPHTVL
ASYTPHTVY

SEQ ID NO: 13690 - protein, 9 aa, synthetic construct
  source 1..9: note = Seed: AKYTQLCQY
ASYTQLCQF

SEQ ID NO: 13691 - protein, 9 aa, synthetic construct
  source 1..9: note = Seed: AKYTQLCQY
ASYTQLCQY

SEQ ID NO: 13692 - protein, 10 aa, synthetic construct
  source 1..10: note = Seed: AKYTQLCQYL
ASYTQLCQYF

SEQ ID NO: 13693 - protein, 10 aa, synthetic construct
  source 1..10: note = Seed: AYYVGYLQPR
ASYVGYLQPR

SEQ ID NO: 13694 - protein, 9 aa, synthetic construct
  source 1..9: note = Seed: AGAALQIPF
ATAALQIPF

SEQ ID NO: 13695 - protein, 9 aa, synthetic construct
  source 1..9: note = Seed: AGAALQIPF
ATAALQIPY

SEQ ID NO: 13696 - protein, 10 aa, synthetic construct
  source 1..10: note = Seed: AMACLVGLMW
ATACLVGLMW

SEQ ID NO: 13697 - protein, 10 aa, synthetic construct
  source 1..10: note = Seed: AFAMMFVKHK
ATAMMFVKHK

SEQ ID NO: 13698 - protein, 10 aa, synthetic construct
  source 1..10: note = Seed: AFAMMFVKHK
ATAMMFVKHR

SEQ ID NO: 13699 - protein, 9 aa, synthetic construct
  source 1..9: note = Seed: AYANSVFNI
ATANSVFNY

SEQ ID NO: 13700 - protein, 9 aa, synthetic construct
  source 1..9: note = Seed: AIASEFSSL
ATASEFSSF

SEQ ID NO: 13701 - protein, 9 aa, synthetic construct
  source 1..9: note = Seed: AIASEFSSL
ATASEFSSI

SEQ ID NO: 13702 - protein, 9 aa, synthetic construct
  source 1..9: note = Seed: AIASEFSSL
ATASEFSSL

SEQ ID NO: 13703 - protein, 9 aa, synthetic construct
  source 1..9: note = Seed: AIASEFSSL
ATASEFSSV

SEQ ID NO: 13704 - protein, 9 aa, synthetic construct
  source 1..9: note = Seed: AIASEFSSL
ATASEFSSY

SEQ ID NO: 13705 - protein, 11 aa, synthetic construct
  source 1..11: note = Seed: AFAVDAAKAYK
ATAVDAAKAYK

SEQ ID NO: 13706 - protein, 9 aa, synthetic construct
  source 1..9: note = Seed: ASAVVLLIL
ATAVVLLIF

SEQ ID NO: 13707 - protein, 10 aa, synthetic construct
  source 1..10: note = Seed: ASAVVLLILM
ATAVVLLILW

SEQ ID NO: 13708 - protein, 9 aa, synthetic construct
  source 1..9: note = Seed: ASAVVLLIL
ATAVVLLIW

SEQ ID NO: 13709 - protein, 9 aa, synthetic construct
  source 1..9: note = Seed: ASAVVLLIL
ATAVVLLIY

SEQ ID NO: 13710 - protein, 9 aa, synthetic construct
  source 1..9: note = Seed: ALCTFLLNK
ATCTFLLNK

SEQ ID NO: 13711 - protein, 9 aa, synthetic construct
  source 1..9: note = Seed: ALCTFLLNK
ATCTFLLNR

SEQ ID NO: 13712 - protein, 9 aa, synthetic construct
  source 1..9: note = Seed: ALCTFLLNK
ATCTFLLNY

SEQ ID NO: 13713 - protein, 9 aa, synthetic construct
  source 1..9: note = Seed: AVDAAKAYK
ATDAAKAYK

SEQ ID NO: 13714 - protein, 9 aa, synthetic construct
  source 1..9: note = Seed: AVDAAKAYK
ATDAAKAYR

SEQ ID NO: 13715 - protein, 9 aa, synthetic construct
  source 1..9: note = Seed: ALDISASIV
ATDISASIF

SEQ ID NO: 13716 - protein, 9 aa, synthetic construct
  source 1..9: note = Seed: ALDISASIV
ATDISASIL

SEQ ID NO: 13717 - protein, 9 aa, synthetic construct
  source 1..9: note = Seed: ALDISASIV
ATDISASIM

SEQ ID NO: 13718 - protein, 9 aa, synthetic construct
  source 1..9: note = Seed: AGDSGFAAY
ATDSGFAAY

SEQ ID NO: 13719 - protein, 10 aa, synthetic construct
  source 1..10: note = Seed: AGEAANFCAL
ATEAANFCAA

SEQ ID NO: 13720 - protein, 10 aa, synthetic construct
  source 1..10: note = Seed: AGEAANFCAL
ATEAANFCAF

SEQ ID NO: 13721 - protein, 10 aa, synthetic construct
  source 1..10: note = Seed: AGEAANFCAL
ATEAANFCAL

SEQ ID NO: 13722 - protein, 10 aa, synthetic construct
  source 1..10: note = Seed: AGEAANFCAL
ATEAANFCAW

SEQ ID NO: 13723 - protein, 10 aa, synthetic construct
  source 1..10: note = Seed: AQFAPSASAF
ATFAPSASAF

SEQ ID NO: 13724 - protein, 10 aa, synthetic construct
  source 1..10: note = Seed: AQFAPSASAF
ATFAPSASAY

SEQ ID NO: 13725 - protein, 9 aa, synthetic construct
  source 1..9: note = Seed: AQFAPSASA
ATFAPSASF

SEQ ID NO: 13726 - protein, 9 aa, synthetic construct
  source 1..9: note = Seed: AQFAPSASA
ATFAPSASM

SEQ ID NO: 13727 - protein, 9 aa, synthetic construct
  source 1..9: note = Seed: AQFAPSASA
ATFAPSASV

SEQ ID NO: 13728 - protein, 9 aa, synthetic construct
  source 1..9: note = Seed: AQFAPSASA
ATFAPSASY

SEQ ID NO: 13729 - protein, 9 aa, synthetic construct
  source 1..9: note = Seed: ASFDNFKFV
ATFDNFKFA

SEQ ID NO: 13730 - protein, 9 aa, synthetic construct
  source 1..9: note = Seed: ASFDNFKFV
ATFDNFKFF

SEQ ID NO: 13731 - protein, 9 aa, synthetic construct
  source 1..9: note = Seed: ASFDNFKFV
ATFDNFKFI

SEQ ID NO: 13732 - protein, 9 aa, synthetic construct
  source 1..9: note = Seed: ASFDNFKFV
ATFDNFKFK

SEQ ID NO: 13733 - protein, 9 aa, synthetic construct
  source 1..9: note = Seed: ASFDNFKFV
ATFDNFKFM

SEQ ID NO: 13734 - protein, 9 aa, synthetic construct
  source 1..9: note = Seed: ASFDNFKFV
ATFDNFKFV

SEQ ID NO: 13735 - protein, 9 aa, synthetic construct
  source 1..9: note = Seed: ASFDNFKFV
ATFDNFKFW

SEQ ID NO: 13736 - protein, 9 aa, synthetic construct
  source 1..9: note = Seed: ASFDNFKFV
ATFDNFKFY

SEQ ID NO: 13737 - protein, 10 aa, synthetic construct
  source 1..10: note = Seed: AYFNMVYMPA
ATFNMVYMPK

SEQ ID NO: 13738 - protein, 10 aa, synthetic construct
  source 1..10: note = Seed: ANFNVLFSTV
ATFNVLFSTA

SEQ ID NO: 13739 - protein, 10 aa, synthetic construct
  source 1..10: note = Seed: ANFNVLFSTV
ATFNVLFSTI

SEQ ID NO: 13740 - protein, 10 aa, synthetic construct
  source 1..10: note = Seed: ANFNVLFSTV
ATFNVLFSTL

SEQ ID NO: 13741 - protein, 10 aa, synthetic construct
  source 1..10: note = Seed: ANFNVLFSTV
ATFNVLFSTV

SEQ ID NO: 13742 - protein, 11 aa, synthetic construct
  source 1..11: note = Seed: ASFNYLKSPNF
ATFNYLKSPNF

SEQ ID NO: 13743 - protein, 11 aa, synthetic construct
  source 1..11: note = Seed: ASFNYLKSPNF
ATFNYLKSPNW

SEQ ID NO: 13744 - protein, 11 aa, synthetic construct
  source 1..11: note = Seed: ASFNYLKSPNF
ATFNYLKSPNY

SEQ ID NO: 13745 - protein, 10 aa, synthetic construct
  source 1..10: note = Seed: AGFPFNKWGK
ATFPFNKWGK

SEQ ID NO: 13746 - protein, 10 aa, synthetic construct
  source 1..10: note = Seed: AGFPFNKWGK
ATFPFNKWGR

SEQ ID NO: 13747 - protein, 8 aa, synthetic construct
  source 1..8: note = Seed: ASFRLFAR
ATFRLFAR

SEQ ID NO: 13748 - protein, 10 aa, synthetic construct
  source 1..10: note = Seed: ASFRLFARTR
ATFRLFARTA

SEQ ID NO: 13749 - protein, 10 aa, synthetic construct
  source 1..10: note = Seed: ASFRLFARTR
ATFRLFARTK

SEQ ID NO: 13750 - protein, 10 aa, synthetic construct
  source 1..10: note = Seed: ASFRLFARTR
ATFRLFARTR

SEQ ID NO: 13751 - protein, 9 aa, synthetic construct
  source 1..9: note = Seed: AGFSLWVYK
ATFSLWVYH

SEQ ID NO: 13752 - protein, 9 aa, synthetic construct
  source 1..9: note = Seed: AGFSLWVYK
ATFSLWVYK

SEQ ID NO: 13753 - protein, 9 aa, synthetic construct
  source 1..9: note = Seed: AGFSLWVYK
ATFSLWVYR

SEQ ID NO: 13754 - protein, 9 aa, synthetic construct
  source 1..9: note = Seed: AGFSLWVYK
ATFSLWVYY

SEQ ID NO: 13755 - protein, 9 aa, synthetic construct
  source 1..9: note = Seed: ASFSTFKCY
ATFSTFKCF

SEQ ID NO: 13756 - protein, 9 aa, synthetic construct
  source 1..9: note = Seed: ASFSTFKCY
ATFSTFKCK

SEQ ID NO: 13757 - protein, 9 aa, synthetic construct
  source 1..9: note = Seed: ASFSTFKCY
ATFSTFKCM

SEQ ID NO: 13758 - protein, 9 aa, synthetic construct
  source 1..9: note = Seed: ASFSTFKCY
ATFSTFKCW

SEQ ID NO: 13759 - protein, 9 aa, synthetic construct
  source 1..9: note = Seed: ASFSTFKCY
ATFSTFKCY

SEQ ID NO: 13760 - protein, 9 aa, synthetic construct
  source 1..9: note = Seed: AIFYLITPV
ATFYLITPA

SEQ ID NO: 13761 - protein, 9 aa, synthetic construct
  source 1..9: note = Seed: AIFYLITPV
ATFYLITPF

SEQ ID NO: 13762 - protein, 9 aa, synthetic construct
  source 1..9: note = Seed: AIFYLITPV
ATFYLITPI

SEQ ID NO: 13763 - protein, 9 aa, synthetic construct
  source 1..9: note = Seed: AIFYLITPV
ATFYLITPL

SEQ ID NO: 13764 - protein, 9 aa, synthetic construct
  source 1..9: note = Seed: AIFYLITPV
ATFYLITPV

SEQ ID NO: 13765 - protein, 10 aa, synthetic construct
  source 1..10: note = Seed: AIFYLITPVH
ATFYLITPVV

SEQ ID NO: 13766 - protein, 9 aa, synthetic construct
  source 1..9: note = Seed: AIFYLITPV
ATFYLITPW

SEQ ID NO: 13767 - protein, 10 aa, synthetic construct
  source 1..10: note = Seed: ASFYYVWKSY
ATFYYVWKSF

SEQ ID NO: 13768 - protein, 10 aa, synthetic construct
  source 1..10: note = Seed: ASFYYVWKSY
ATFYYVWKSK

SEQ ID NO: 13769 - protein, 10 aa, synthetic construct
  source 1..10: note = Seed: ASFYYVWKSY
ATFYYVWKSR

SEQ ID NO: 13770 - protein, 10 aa, synthetic construct
  source 1..10: note = Seed: ASFYYVWKSY
ATFYYVWKSW

SEQ ID NO: 13771 - protein, 10 aa, synthetic construct
  source 1..10: note = Seed: ASFYYVWKSY
ATFYYVWKSY

SEQ ID NO: 13772 - protein, 11 aa, synthetic construct
  source 1..11: note = Seed: ASFYYVWKSYV
ATFYYVWKSYV

SEQ ID NO: 13773 - protein, 9 aa, synthetic construct
  source 1..9: note = Seed: AFGGCVFSY
ATGGCVFSY

SEQ ID NO: 13774 - protein, 9 aa, synthetic construct
  source 1..9: note = Seed: ANGQVFGLY
ATGQVFGLY

SEQ ID NO: 13775 - protein, 10 aa, synthetic construct
  source 1..10: note = Seed: ANGQVFGLYK
ATGQVFGLYK

SEQ ID NO: 13776 - protein, 10 aa, synthetic construct
  source 1..10: note = Seed: ANGQVFGLYK
ATGQVFGLYR

SEQ ID NO: 13777 - protein, 10 aa, synthetic construct
  source 1..10: note = Seed: APGTAVLRQW
ATGTAVLRQW

SEQ ID NO: 13778 - protein, 9 aa, synthetic construct
  source 1..9: note = Seed: AVHFISNSW
ATHFISNSF

SEQ ID NO: 13779 - protein, 9 aa, synthetic construct
  source 1..9: note = Seed: AVHFISNSW
ATHFISNSM

SEQ ID NO: 13780 - protein, 9 aa, synthetic construct
  source 1..9: note = Seed: AVHFISNSW
ATHFISNSW

SEQ ID NO: 13781 - protein, 9 aa, synthetic construct
  source 1..9: note = Seed: AVHFISNSW
ATHFISNSY

SEQ ID NO: 13782 - protein, 10 aa, synthetic construct
  source 1..10: note = Seed: ALIISVTSNY
ATIISVTSNK

SEQ ID NO: 13783 - protein, 10 aa, synthetic construct
  source 1..10: note = Seed: ALIISVTSNY
ATIISVTSNY

SEQ ID NO: 13784 - protein, 9 aa, synthetic construct
  source 1..9: note = Seed: ASIKNFKSV
ATIKNFKSF

SEQ ID NO: 13785 - protein, 9 aa, synthetic construct
  source 1..9: note = Seed: ASIKNFKSV
ATIKNFKSK

SEQ ID NO: 13786 - protein, 9 aa, synthetic construct
  source 1..9: note = Seed: ASIKNFKSV
ATIKNFKSL

SEQ ID NO: 13787 - protein, 9 aa, synthetic construct
  source 1..9: note = Seed: ASIKNFKSV
ATIKNFKSM

SEQ ID NO: 13788 - protein, 10 aa, synthetic construct
  source 1..10: note = Seed: ASIKNFKSVL
ATIKNFKSVF

SEQ ID NO: 13789 - protein, 10 aa, synthetic construct
  source 1..10: note = Seed: ASIKNFKSVL
ATIKNFKSVW

SEQ ID NO: 13790 - protein, 10 aa, synthetic construct
  source 1..10: note = Seed: ASIKNFKSVL
ATIKNFKSVY

SEQ ID NO: 13791 - protein, 9 aa, synthetic construct
  source 1..9: note = Seed: ASIKNFKSV
ATIKNFKSW

SEQ ID NO: 13792 - protein, 9 aa, synthetic construct
  source 1..9: note = Seed: ASIKNFKSV
ATIKNFKSY

SEQ ID NO: 13793 - protein, 10 aa, synthetic construct
  source 1..10: note = Seed: AYILFTRFFY
ATILFTRFFK

SEQ ID NO: 13794 - protein, 10 aa, synthetic construct
  source 1..10: note = Seed: AYILFTRFFY
ATILFTRFFR

SEQ ID NO: 13795 - protein, 10 aa, synthetic construct
  source 1..10: note = Seed: AYILFTRFFY
ATILFTRFFY

SEQ ID NO: 13796 - protein, 11 aa, synthetic construct
  source 1..11: note = Seed: AYILFTRFFYV
ATILFTRFFYA

SEQ ID NO: 13797 - protein, 11 aa, synthetic construct
  source 1..11: note = Seed: AYILFTRFFYV
ATILFTRFFYI

SEQ ID NO: 13798 - protein, 11 aa, synthetic construct
  source 1..11: note = Seed: AYILFTRFFYV
ATILFTRFFYL

SEQ ID NO: 13799 - protein, 11 aa, synthetic construct
  source 1..11: note = Seed: AYILFTRFFYV
ATILFTRFFYV

SEQ ID NO: 13800 - protein, 9 aa, synthetic construct
  source 1..9: note = Seed: AVINGDRWF
ATINGDRWF

SEQ ID NO: 13801 - protein, 9 aa, synthetic construct
  source 1..9: note = Seed: AVINGDRWF
ATINGDRWW

SEQ ID NO: 13802 - protein, 9 aa, synthetic construct
  source 1..9: note = Seed: AIKITEHSW
ATKITEHSW

SEQ ID NO: 13803 - protein, 9 aa, synthetic construct
  source 1..9: note = Seed: AAKKNNLPF
ATKKNNLPF

SEQ ID NO: 13804 - protein, 10 aa, synthetic construct
  source 1..10: note = Seed: AAKKNNLPFK
ATKKNNLPFA

SEQ ID NO: 13805 - protein, 10 aa, synthetic construct
  source 1..10: note = Seed: AAKKNNLPFK
ATKKNNLPFK

SEQ ID NO: 13806 - protein, 10 aa, synthetic construct
  source 1..10: note = Seed: AAKKNNLPFK
ATKKNNLPFV

SEQ ID NO: 13807 - protein, 9 aa, synthetic construct
  source 1..9: note = Seed: AAKKNNLPF
ATKKNNLPW

SEQ ID NO: 13808 - protein, 9 aa, synthetic construct
  source 1..9: note = Seed: AAKKNNLPF
ATKKNNLPY

SEQ ID NO: 13809 - protein, 9 aa, synthetic construct
  source 1..9: note = Seed: ASKKPRQKR
ATKKPRQKR

SEQ ID NO: 13810 - protein, 9 aa, synthetic construct
  source 1..9: note = Seed: AKKNNLPFK
ATKNNLPFA

SEQ ID NO: 13811 - protein, 9 aa, synthetic construct
  source 1..9: note = Seed: AKKNNLPFK
ATKNNLPFF

SEQ ID NO: 13812 - protein, 9 aa, synthetic construct
  source 1..9: note = Seed: AKKNNLPFK
ATKNNLPFG

SEQ ID NO: 13813 - protein, 9 aa, synthetic construct
  source 1..9: note = Seed: AKKNNLPFK
ATKNNLPFI

SEQ ID NO: 13814 - protein, 9 aa, synthetic construct
  source 1..9: note = Seed: AKKNNLPFK
ATKNNLPFK

SEQ ID NO: 13815 - protein, 9 aa, synthetic construct
  source 1..9: note = Seed: AKKNNLPFK
ATKNNLPFL

SEQ ID NO: 13816 - protein, 9 aa, synthetic construct
  source 1..9: note = Seed: AKKNNLPFK
ATKNNLPFM

SEQ ID NO: 13817 - protein, 9 aa, synthetic construct
  source 1..9: note = Seed: AKKNNLPFK
ATKNNLPFR

SEQ ID NO: 13818 - protein, 9 aa, synthetic construct
  source 1..9: note = Seed: AKKNNLPFK
ATKNNLPFS

SEQ ID NO: 13819 - protein, 9 aa, synthetic construct
  source 1..9: note = Seed: AKKNNLPFK
ATKNNLPFT

SEQ ID NO: 13820 - protein, 9 aa, synthetic construct
  source 1..9: note = Seed: AKKNNLPFK
ATKNNLPFV

SEQ ID NO: 13821 - protein, 9 aa, synthetic construct
  source 1..9: note = Seed: AKKNNLPFK
ATKNNLPFY

SEQ ID NO: 13822 - protein, 9 aa, synthetic construct
  source 1..9: note = Seed: ALKYLPIDK
ATKYLPIDK

SEQ ID NO: 13823 - protein, 10 aa, synthetic construct
  source 1..10: note = Seed: AALALLLLDR
ATLALLLLDK

SEQ ID NO: 13824 - protein, 10 aa, synthetic construct
  source 1..10: note = Seed: AALALLLLDR
ATLALLLLDR

SEQ ID NO: 13825 - protein, 10 aa, synthetic construct
  source 1..10: note = Seed: AALCTFLLNK
ATLCTFLLNK

SEQ ID NO: 13826 - protein, 10 aa, synthetic construct
  source 1..10: note = Seed: AALCTFLLNK
ATLCTFLLNR

SEQ ID NO: 13827 - protein, 10 aa, synthetic construct
  source 1..10: note = Seed: AALCTFLLNK
ATLCTFLLNY

SEQ ID NO: 13828 - protein, 10 aa, synthetic construct
  source 1..10: note = Seed: ASLINTLNDL
ATLINTLNDI

SEQ ID NO: 13829 - protein, 10 aa, synthetic construct
  source 1..10: note = Seed: ASLINTLNDL
ATLINTLNDV

SEQ ID NO: 13830 - protein, 9 aa, synthetic construct
  source 1..9: note = Seed: ASLNGVTLI
ATLNGVTLF

SEQ ID NO: 13831 - protein, 9 aa, synthetic construct
  source 1..9: note = Seed: ASLNGVTLI
ATLNGVTLL

SEQ ID NO: 13832 - protein, 9 aa, synthetic construct
  source 1..9: note = Seed: ASLNGVTLI
ATLNGVTLM

SEQ ID NO: 13833 - protein, 9 aa, synthetic construct
  source 1..9: note = Seed: ASLNGVTLI
ATLNGVTLV

SEQ ID NO: 13834 - protein, 9 aa, synthetic construct
  source 1..9: note = Seed: ASLNGVTLI
ATLNGVTLW

SEQ ID NO: 13835 - protein, 9 aa, synthetic construct
  source 1..9: note = Seed: ASLNGVTLI
ATLNGVTLY

SEQ ID NO: 13836 - protein, 10 aa, synthetic construct
  source 1..10: note = Seed: ATLQAIASEF
ATLQAIASEW

SEQ ID NO: 13837 - protein, 10 aa, synthetic construct
  source 1..10: note = Seed: ATLQAIASEF
ATLQAIASEY

SEQ ID NO: 13838 - protein, 9 aa, synthetic construct
  source 1..9: note = Seed: AALQIPFAM
ATLQIPFAF

SEQ ID NO: 13839 - protein, 9 aa, synthetic construct
  source 1..9: note = Seed: AALQIPFAM
ATLQIPFAM

SEQ ID NO: 13840 - protein, 11 aa, synthetic construct
  source 1..11: note = Seed: AALQIPFAMQM
ATLQIPFAMQY

SEQ ID NO: 13841 - protein, 9 aa, synthetic construct
  source 1..9: note = Seed: AALQIPFAM
ATLQIPFAW

SEQ ID NO: 13842 - protein, 9 aa, synthetic construct
  source 1..9: note = Seed: AALQIPFAM
ATLQIPFAY

SEQ ID NO: 13843 - protein, 9 aa, synthetic construct
  source 1..9: note = Seed: AVLQSGFRK
ATLQSGFRK

SEQ ID NO: 13844 - protein, 9 aa, synthetic construct
  source 1..9: note = Seed: AVLQSGFRK
ATLQSGFRR

SEQ ID NO: 13845 - protein, 10 aa, synthetic construct
  source 1..10: note = Seed: ALLSDLQDLK
ATLSDLQDLK

SEQ ID NO: 13846 - protein, 11 aa, synthetic construct
  source 1..11: note = Seed: ALLSDLQDLKW
ATLSDLQDLKW

SEQ ID NO: 13847 - protein, 9 aa, synthetic construct
  source 1..9: note = Seed: AMMFVKHKH
ATMFVKHKK

SEQ ID NO: 13848 - protein, 9 aa, synthetic construct
  source 1..9: note = Seed: AMMFVKHKH
ATMFVKHKR

SEQ ID NO: 13849 - protein, 10 aa, synthetic construct
  source 1..10: note = Seed: ALNNIINNAR
ATNNIINNAR

SEQ ID NO: 13850 - protein, 9 aa, synthetic construct
  source 1..9: note = Seed: ALNNIINNA
ATNNIINNV

SEQ ID NO: 13851 - protein, 10 aa, synthetic construct
  source 1..10: note = Seed: AQNSVRVLQK
ATNSVRVLQK

SEQ ID NO: 13852 - protein, 10 aa, synthetic construct
  source 1..10: note = Seed: AQNSVRVLQK
ATNSVRVLQR

SEQ ID NO: 13853 - protein, 10 aa, synthetic construct
  source 1..10: note = Seed: AIPTNFTISV
ATPTNFTISL

SEQ ID NO: 13854 - protein, 10 aa, synthetic construct
  source 1..10: note = Seed: AIPTNFTISV
ATPTNFTISM

SEQ ID NO: 13855 - protein, 10 aa, synthetic construct
  source 1..10: note = Seed: ADQAMTQMYK
ATQAMTQMYK

SEQ ID NO: 13856 - protein, 10 aa, synthetic construct
  source 1..10: note = Seed: ADQAMTQMYK
ATQAMTQMYR

SEQ ID NO: 13857 - protein, 10 aa, synthetic construct
  source 1..10: note = Seed: ADQAMTQMYK
ATQAMTQMYY

SEQ ID NO: 13858 - protein, 10 aa, synthetic construct
  source 1..10: note = Seed: ALQDAYYRAR
ATQDAYYRAR

SEQ ID NO: 13859 - protein, 9 aa, synthetic construct
  source 1..9: note = Seed: ALQDAYYRA
ATQDAYYRV

SEQ ID NO: 13860 - protein, 10 aa, synthetic construct
  source 1..10: note = Seed: ALQIPFAMQM
ATQIPFAMQF

SEQ ID NO: 13861 - protein, 10 aa, synthetic construct
  source 1..10: note = Seed: ALQIPFAMQM
ATQIPFAMQM

SEQ ID NO: 13862 - protein, 10 aa, synthetic construct
  source 1..10: note = Seed: ALQIPFAMQM
ATQIPFAMQV

SEQ ID NO: 13863 - protein, 10 aa, synthetic construct
  source 1..10: note = Seed: ALQIPFAMQM
ATQIPFAMQY

SEQ ID NO: 13864 - protein, 9 aa, synthetic construct
  source 1..9: note = Seed: AMQTMLFTM
ATQTMLFTF

SEQ ID NO: 13865 - protein, 9 aa, synthetic construct
  source 1..9: note = Seed: AMQTMLFTM
ATQTMLFTI

SEQ ID NO: 13866 - protein, 9 aa, synthetic construct
  source 1..9: note = Seed: AMQTMLFTM
ATQTMLFTV

SEQ ID NO: 13867 - protein, 9 aa, synthetic construct
  source 1..9: note = Seed: AMQTMLFTM
ATQTMLFTW

SEQ ID NO: 13868 - protein, 9 aa, synthetic construct
  source 1..9: note = Seed: ALRANSAVK
ATRANSAVA

SEQ ID NO: 13869 - protein, 9 aa, synthetic construct
  source 1..9: note = Seed: ALRANSAVK
ATRANSAVF

SEQ ID NO: 13870 - protein, 9 aa, synthetic construct
  source 1..9: note = Seed: ALRANSAVK
ATRANSAVG

SEQ ID NO: 13871 - protein, 9 aa, synthetic construct
  source 1..9: note = Seed: ALRANSAVK
ATRANSAVI

SEQ ID NO: 13872 - protein, 9 aa, synthetic construct
  source 1..9: note = Seed: ALRANSAVK
ATRANSAVK

SEQ ID NO: 13873 - protein, 9 aa, synthetic construct
  source 1..9: note = Seed: ALRANSAVK
ATRANSAVL

SEQ ID NO: 13874 - protein, 9 aa, synthetic construct
  source 1..9: note = Seed: ALRANSAVK
ATRANSAVM

SEQ ID NO: 13875 - protein, 9 aa, synthetic construct
  source 1..9: note = Seed: ALRANSAVK
ATRANSAVR

SEQ ID NO: 13876 - protein, 9 aa, synthetic construct
  source 1..9: note = Seed: ALRANSAVK
ATRANSAVS

SEQ ID NO: 13877 - protein, 9 aa, synthetic construct
  source 1..9: note = Seed: ALRANSAVK
ATRANSAVT

SEQ ID NO: 13878 - protein, 9 aa, synthetic construct
  source 1..9: note = Seed: ALRANSAVK
ATRANSAVV

SEQ ID NO: 13879 - protein, 9 aa, synthetic construct
  source 1..9: note = Seed: ALRANSAVK
ATRANSAVY

SEQ ID NO: 13880 - protein, 9 aa, synthetic construct
  source 1..9: note = Seed: ATREAVGTN
ATREAVGTA

SEQ ID NO: 13881 - protein, 9 aa, synthetic construct
  source 1..9: note = Seed: ATREAVGTN
ATREAVGTI

SEQ ID NO: 13882 - protein, 9 aa, synthetic construct
  source 1..9: note = Seed: ATREAVGTN
ATREAVGTK

SEQ ID NO: 13883 - protein, 9 aa, synthetic construct
  source 1..9: note = Seed: ATREAVGTN
ATREAVGTL

SEQ ID NO: 13884 - protein, 9 aa, synthetic construct
  source 1..9: note = Seed: ATREAVGTN
ATREAVGTM

SEQ ID NO: 13885 - protein, 10 aa, synthetic construct
  source 1..10: note = Seed: ATREAVGTNL
ATREAVGTNA

SEQ ID NO: 13886 - protein, 10 aa, synthetic construct
  source 1..10: note = Seed: ATREAVGTNL
ATREAVGTNK

SEQ ID NO: 13887 - protein, 10 aa, synthetic construct
  source 1..10: note = Seed: ATREAVGTNL
ATREAVGTNV

SEQ ID NO: 13888 - protein, 9 aa, synthetic construct
  source 1..9: note = Seed: ATREAVGTN
ATREAVGTR

SEQ ID NO: 13889 - protein, 9 aa, synthetic construct
  source 1..9: note = Seed: ATREAVGTN
ATREAVGTV

SEQ ID NO: 13890 - protein, 9 aa, synthetic construct
  source 1..9: note = Seed: ATRFASVYA
ATRFASVYC

SEQ ID NO: 13891 - protein, 9 aa, synthetic construct
  source 1..9: note = Seed: ATRFASVYA
ATRFASVYE

SEQ ID NO: 13892 - protein, 9 aa, synthetic construct
  source 1..9: note = Seed: ATRFASVYA
ATRFASVYF

SEQ ID NO: 13893 - protein, 9 aa, synthetic construct
  source 1..9: note = Seed: ATRFASVYA
ATRFASVYG

SEQ ID NO: 13894 - protein, 9 aa, synthetic construct
  source 1..9: note = Seed: ATRFASVYA
ATRFASVYH

SEQ ID NO: 13895 - protein, 9 aa, synthetic construct
  source 1..9: note = Seed: ATRFASVYA
ATRFASVYI

SEQ ID NO: 13896 - protein, 9 aa, synthetic construct
  source 1..9: note = Seed: ATRFASVYA
ATRFASVYK

SEQ ID NO: 13897 - protein, 9 aa, synthetic construct
  source 1..9: note = Seed: ATRFASVYA
ATRFASVYL

SEQ ID NO: 13898 - protein, 9 aa, synthetic construct
  source 1..9: note = Seed: ATRFASVYA
ATRFASVYM

SEQ ID NO: 13899 - protein, 9 aa, synthetic construct
  source 1..9: note = Seed: ATRFASVYA
ATRFASVYN

SEQ ID NO: 13900 - protein, 9 aa, synthetic construct
  source 1..9: note = Seed: ATRFASVYA
ATRFASVYP

SEQ ID NO: 13901 - protein, 9 aa, synthetic construct
  source 1..9: note = Seed: ATRFASVYA
ATRFASVYQ

SEQ ID NO: 13902 - protein, 9 aa, synthetic construct
  source 1..9: note = Seed: ATRFASVYA
ATRFASVYR

SEQ ID NO: 13903 - protein, 9 aa, synthetic construct
  source 1..9: note = Seed: ATRFASVYA
ATRFASVYS

SEQ ID NO: 13904 - protein, 9 aa, synthetic construct
  source 1..9: note = Seed: ATRFASVYA
ATRFASVYT

SEQ ID NO: 13905 - protein, 9 aa, synthetic construct
  source 1..9: note = Seed: ATRFASVYA
ATRFASVYV

SEQ ID NO: 13906 - protein, 9 aa, synthetic construct
  source 1..9: note = Seed: ATRFASVYA
ATRFASVYY

SEQ ID NO: 13907 - protein, 9 aa, synthetic construct
  source 1..9: note = Seed: AYRFNGIGV
ATRFNGIGA

SEQ ID NO: 13908 - protein, 9 aa, synthetic construct
  source 1..9: note = Seed: AYRFNGIGV
ATRFNGIGG

SEQ ID NO: 13909 - protein, 9 aa, synthetic construct
  source 1..9: note = Seed: AYRFNGIGV
ATRFNGIGI

SEQ ID NO: 13910 - protein, 9 aa, synthetic construct
  source 1..9: note = Seed: AYRFNGIGV
ATRFNGIGK

SEQ ID NO: 13911 - protein, 9 aa, synthetic construct
  source 1..9: note = Seed: AYRFNGIGV
ATRFNGIGL

SEQ ID NO: 13912 - protein, 9 aa, synthetic construct
  source 1..9: note = Seed: AYRFNGIGV
ATRFNGIGM

SEQ ID NO: 13913 - protein, 9 aa, synthetic construct
  source 1..9: note = Seed: AYRFNGIGV
ATRFNGIGS

SEQ ID NO: 13914 - protein, 9 aa, synthetic construct
  source 1..9: note = Seed: AYRFNGIGV
ATRFNGIGV

SEQ ID NO: 13915 - protein, 9 aa, synthetic construct
  source 1..9: note = Seed: AYRFNGIGV
ATRFNGIGY

SEQ ID NO: 13916 - protein, 9 aa, synthetic construct
  source 1..9: note = Seed: AWRKAVFIS
ATRKAVFIA

SEQ ID NO: 13917 - protein, 9 aa, synthetic construct
  source 1..9: note = Seed: AWRKAVFIS
ATRKAVFIG

SEQ ID NO: 13918 - protein, 9 aa, synthetic construct
  source 1..9: note = Seed: AWRKAVFIS
ATRKAVFII

SEQ ID NO: 13919 - protein, 9 aa, synthetic construct
  source 1..9: note = Seed: AWRKAVFIS
ATRKAVFIK

SEQ ID NO: 13920 - protein, 9 aa, synthetic construct
  source 1..9: note = Seed: AWRKAVFIS
ATRKAVFIL

SEQ ID NO: 13921 - protein, 9 aa, synthetic construct
  source 1..9: note = Seed: AWRKAVFIS
ATRKAVFIM

SEQ ID NO: 13922 - protein, 9 aa, synthetic construct
  source 1..9: note = Seed: AWRKAVFIS
ATRKAVFIS

SEQ ID NO: 13923 - protein, 9 aa, synthetic construct
  source 1..9: note = Seed: AWRKAVFIS
ATRKAVFIT

SEQ ID NO: 13924 - protein, 9 aa, synthetic construct
  source 1..9: note = Seed: AWRKAVFIS
ATRKAVFIV

SEQ ID NO: 13925 - protein, 9 aa, synthetic construct
  source 1..9: note = Seed: AWRKAVFIS
ATRKAVFIY

SEQ ID NO: 13926 - protein, 9 aa, synthetic construct
  source 1..9: note = Seed: AMRNAGIVG
ATRNAGIVA

SEQ ID NO: 13927 - protein, 9 aa, synthetic construct
  source 1..9: note = Seed: AMRNAGIVG
ATRNAGIVF

SEQ ID NO: 13928 - protein, 9 aa, synthetic construct
  source 1..9: note = Seed: AMRNAGIVG
ATRNAGIVG

SEQ ID NO: 13929 - protein, 10 aa, synthetic construct
  source 1..10: note = Seed: AMRNAGIVGV
ATRNAGIVGA

SEQ ID NO: 13930 - protein, 10 aa, synthetic construct
  source 1..10: note = Seed: AMRNAGIVGV
ATRNAGIVGI

SEQ ID NO: 13931 - protein, 10 aa, synthetic construct
  source 1..10: note = Seed: AMRNAGIVGV
ATRNAGIVGK

SEQ ID NO: 13932 - protein, 10 aa, synthetic construct
  source 1..10: note = Seed: AMRNAGIVGV
ATRNAGIVGV

SEQ ID NO: 13933 - protein, 9 aa, synthetic construct
  source 1..9: note = Seed: AMRNAGIVG
ATRNAGIVI

SEQ ID NO: 13934 - protein, 9 aa, synthetic construct
  source 1..9: note = Seed: AMRNAGIVG
ATRNAGIVK

SEQ ID NO: 13935 - protein, 9 aa, synthetic construct
  source 1..9: note = Seed: AMRNAGIVG
ATRNAGIVL

SEQ ID NO: 13936 - protein, 9 aa, synthetic construct
  source 1..9: note = Seed: AMRNAGIVG
ATRNAGIVM

SEQ ID NO: 13937 - protein, 9 aa, synthetic construct
  source 1..9: note = Seed: AMRNAGIVG
ATRNAGIVR

SEQ ID NO: 13938 - protein, 9 aa, synthetic construct
  source 1..9: note = Seed: AMRNAGIVG
ATRNAGIVS

SEQ ID NO: 13939 - protein, 9 aa, synthetic construct
  source 1..9: note = Seed: AMRNAGIVG
ATRNAGIVT

SEQ ID NO: 13940 - protein, 9 aa, synthetic construct
  source 1..9: note = Seed: AMRNAGIVG
ATRNAGIVV

SEQ ID NO: 13941 - protein, 9 aa, synthetic construct
  source 1..9: note = Seed: AMRNAGIVG
ATRNAGIVY

SEQ ID NO: 13942 - protein, 9 aa, synthetic construct
  source 1..9: note = Seed: AARQGFVDS
ATRQGFVDA

SEQ ID NO: 13943 - protein, 9 aa, synthetic construct
  source 1..9: note = Seed: AARQGFVDS
ATRQGFVDI

SEQ ID NO: 13944 - protein, 9 aa, synthetic construct
  source 1..9: note = Seed: AARQGFVDS
ATRQGFVDK

SEQ ID NO: 13945 - protein, 9 aa, synthetic construct
  source 1..9: note = Seed: AARQGFVDS
ATRQGFVDV

SEQ ID NO: 13946 - protein, 9 aa, synthetic construct
  source 1..9: note = Seed: ATRVECTTI
ATRVECTTA

SEQ ID NO: 13947 - protein, 9 aa, synthetic construct
  source 1..9: note = Seed: ATRVECTTI
ATRVECTTF

SEQ ID NO: 13948 - protein, 10 aa, synthetic construct
  source 1..10: note = Seed: ATRVECTTIV
ATRVECTTIK

SEQ ID NO: 13949 - protein, 9 aa, synthetic construct
  source 1..9: note = Seed: ATRVECTTI
ATRVECTTK

SEQ ID NO: 13950 - protein, 9 aa, synthetic construct
  source 1..9: note = Seed: ATRVECTTI
ATRVECTTV

SEQ ID NO: 13951 - protein, 9 aa, synthetic construct
  source 1..9: note = Seed: ATRVECTTI
ATRVECTTW

SEQ ID NO: 13952 - protein, 9 aa, synthetic construct
  source 1..9: note = Seed: ATRVECTTI
ATRVECTTY

SEQ ID NO: 13953 - protein, 9 aa, synthetic construct
  source 1..9: note = Seed: ATSACVLAA
ATSACVLAV

SEQ ID NO: 13954 - protein, 9 aa, synthetic construct
  source 1..9: note = Seed: AMSAFAMMF
ATSAFAMMF

SEQ ID NO: 13955 - protein, 10 aa, synthetic construct
  source 1..10: note = Seed: AMSAFAMMFV
ATSAFAMMFI

SEQ ID NO: 13956 - protein, 10 aa, synthetic construct
  source 1..10: note = Seed: AMSAFAMMFV
ATSAFAMMFV

SEQ ID NO: 13957 - protein, 11 aa, synthetic construct
  source 1..11: note = Seed: AMSAFAMMFVK
ATSAFAMMFVK

SEQ ID NO: 13958 - protein, 11 aa, synthetic construct
  source 1..11: note = Seed: AMSAFAMMFVK
ATSAFAMMFVR

SEQ ID NO: 13959 - protein, 9 aa, synthetic construct
  source 1..9: note = Seed: AMSAFAMMF
ATSAFAMMI

SEQ ID NO: 13960 - protein, 9 aa, synthetic construct
  source 1..9: note = Seed: AMSAFAMMF
ATSAFAMML

SEQ ID NO: 13961 - protein, 9 aa, synthetic construct
  source 1..9: note = Seed: AMSAFAMMF
ATSAFAMMM

SEQ ID NO: 13962 - protein, 9 aa, synthetic construct
  source 1..9: note = Seed: AMSAFAMMF
ATSAFAMMV

SEQ ID NO: 13963 - protein, 9 aa, synthetic construct
  source 1..9: note = Seed: AMSAFAMMF
ATSAFAMMW

SEQ ID NO: 13964 - protein, 9 aa, synthetic construct
  source 1..9: note = Seed: AMSAFAMMF
ATSAFAMMY

SEQ ID NO: 13965 - protein, 9 aa, synthetic construct
  source 1..9: note = Seed: AISAKNRAR
ATSAKNRAR

SEQ ID NO: 13966 - protein, 10 aa, synthetic construct
  source 1..10: note = Seed: APSASAFFGM
ATSASAFFGF

SEQ ID NO: 13967 - protein, 10 aa, synthetic construct
  source 1..10: note = Seed: APSASAFFGM
ATSASAFFGW

SEQ ID NO: 13968 - protein, 10 aa, synthetic construct
  source 1..10: note = Seed: APSASAFFGM
ATSASAFFGY

SEQ ID NO: 13969 - protein, 10 aa, synthetic construct
  source 1..10: note = Seed: ADSIIIGGAK
ATSIIIGGAK

SEQ ID NO: 13970 - protein, 11 aa, synthetic construct
  source 1..11: note = Seed: AYSRYRIGNYK
ATSRYRIGNYR

SEQ ID NO: 13971 - protein, 9 aa, synthetic construct
  source 1..9: note = Seed: ASSSEAFLI
ATSSEAFLF

SEQ ID NO: 13972 - protein, 9 aa, synthetic construct
  source 1..9: note = Seed: ASSSEAFLI
ATSSEAFLM

SEQ ID NO: 13973 - protein, 9 aa, synthetic construct
  source 1..9: note = Seed: ASSSEAFLI
ATSSEAFLW

SEQ ID NO: 13974 - protein, 9 aa, synthetic construct
  source 1..9: note = Seed: ASSSEAFLI
ATSSEAFLY

SEQ ID NO: 13975 - protein, 10 aa, synthetic construct
  source 1..10: note = Seed: AVTANVNALL
ATTANVNALV

SEQ ID NO: 13976 - protein, 10 aa, synthetic construct
  source 1..10: note = Seed: ATTAYANSVF
ATTAYANSVW

SEQ ID NO: 13977 - protein, 10 aa, synthetic construct
  source 1..10: note = Seed: ATTAYANSVF
ATTAYANSVY

SEQ ID NO: 13978 - protein, 10 aa, synthetic construct
  source 1..10: note = Seed: AGTDLEGNFY
ATTDLEGNFY

SEQ ID NO: 13979 - protein, 10 aa, synthetic construct
  source 1..10: note = Seed: ATTRQVVNVV
ATTRQVVNVK

SEQ ID NO: 13980 - protein, 9 aa, synthetic construct
  source 1..9: note = Seed: ATVAYFNMV
ATVAYFNMA

SEQ ID NO: 13981 - protein, 9 aa, synthetic construct
  source 1..9: note = Seed: ATVAYFNMV
ATVAYFNMI

SEQ ID NO: 13982 - protein, 9 aa, synthetic construct
  source 1..9: note = Seed: ATVAYFNMV
ATVAYFNML

SEQ ID NO: 13983 - protein, 10 aa, synthetic construct
  source 1..10: note = Seed: ATVAYFNMVY
ATVAYFNMVF

SEQ ID NO: 13984 - protein, 10 aa, synthetic construct
  source 1..10: note = Seed: ATVAYFNMVY
ATVAYFNMVK

SEQ ID NO: 13985 - protein, 10 aa, synthetic construct
  source 1..10: note = Seed: ATVAYFNMVY
ATVAYFNMVR

SEQ ID NO: 13986 - protein, 10 aa, synthetic construct
  source 1..10: note = Seed: ATVAYFNMVY
ATVAYFNMVW

SEQ ID NO: 13987 - protein, 9 aa, synthetic construct
  source 1..9: note = Seed: AVVCFNSTY
ATVCFNSTF

SEQ ID NO: 13988 - protein, 9 aa, synthetic construct
  source 1..9: note = Seed: AVVCFNSTY
ATVCFNSTK

SEQ ID NO: 13989 - protein, 9 aa, synthetic construct
  source 1..9: note = Seed: AVVCFNSTY
ATVCFNSTL

SEQ ID NO: 13990 - protein, 9 aa, synthetic construct
  source 1..9: note = Seed: AVVCFNSTY
ATVCFNSTM

SEQ ID NO: 13991 - protein, 9 aa, synthetic construct
  source 1..9: note = Seed: AVVCFNSTY
ATVCFNSTR

SEQ ID NO: 13992 - protein, 9 aa, synthetic construct
  source 1..9: note = Seed: AVVCFNSTY
ATVCFNSTW

SEQ ID NO: 13993 - protein, 9 aa, synthetic construct
  source 1..9: note = Seed: AVVCFNSTY
ATVCFNSTY

SEQ ID NO: 13994 - protein, 9 aa, synthetic construct
  source 1..9: note = Seed: AAVDALCEK
ATVDALCEK

SEQ ID NO: 13995 - protein, 9 aa, synthetic construct
  source 1..9: note = Seed: AAVDALCEK
ATVDALCER

SEQ ID NO: 13996 - protein, 9 aa, synthetic construct
  source 1..9: note = Seed: AAVINGDRW
ATVINGDRW

SEQ ID NO: 13997 - protein, 10 aa, synthetic construct
  source 1..10: note = Seed: ATVREVLSDR
ATVREVLSDK

SEQ ID NO: 13998 - protein, 10 aa, synthetic construct
  source 1..10: note = Seed: AMVRMYIFFA
ATVRMYIFFA

SEQ ID NO: 13999 - protein, 10 aa, synthetic construct
  source 1..10: note = Seed: AMVRMYIFFA
ATVRMYIFFK

SEQ ID NO: 14000 - protein, 9 aa, synthetic construct
  source 1..9: note = Seed: AGVSICSTM
ATVSICSTF

SEQ ID NO: 14001 - protein, 9 aa, synthetic construct
  source 1..9: note = Seed: ASVYYSQLM
ATVYYSQLF

SEQ ID NO: 14002 - protein, 9 aa, synthetic construct
  source 1..9: note = Seed: ASVYYSQLM
ATVYYSQLI

SEQ ID NO: 14003 - protein, 9 aa, synthetic construct
  source 1..9: note = Seed: ASVYYSQLM
ATVYYSQLL

SEQ ID NO: 14004 - protein, 9 aa, synthetic construct
  source 1..9: note = Seed: ASVYYSQLM
ATVYYSQLM

SEQ ID NO: 14005 - protein, 9 aa, synthetic construct
  source 1..9: note = Seed: ASVYYSQLM
ATVYYSQLW

SEQ ID NO: 14006 - protein, 9 aa, synthetic construct
  source 1..9: note = Seed: ASVYYSQLM
ATVYYSQLY

SEQ ID NO: 14007 - protein, 8 aa, synthetic construct
  source 1..8: note = Seed: AYYFMRFR
ATYFMRFR

SEQ ID NO: 14008 - protein, 9 aa, synthetic construct
  source 1..9: note = Seed: AYYFMRFRR
ATYFMRFRA

SEQ ID NO: 14009 - protein, 9 aa, synthetic construct
  source 1..9: note = Seed: AYYFMRFRR
ATYFMRFRK

SEQ ID NO: 14010 - protein, 9 aa, synthetic construct
  source 1..9: note = Seed: AYYFMRFRR
ATYFMRFRR

SEQ ID NO: 14011 - protein, 10 aa, synthetic construct
  source 1..10: note = Seed: AYYRARAGEA
ATYRARAGEK

SEQ ID NO: 14012 - protein, 9 aa, synthetic construct
  source 1..9: note = Seed: AWYTERSEK
ATYTERSER

SEQ ID NO: 14013 - protein, 9 aa, synthetic construct
  source 1..9: note = Seed: AMYTPHTVL
ATYTPHTVF

SEQ ID NO: 14014 - protein, 9 aa, synthetic construct
  source 1..9: note = Seed: AMYTPHTVL
ATYTPHTVL

SEQ ID NO: 14015 - protein, 9 aa, synthetic construct
  source 1..9: note = Seed: AMYTPHTVL
ATYTPHTVM

SEQ ID NO: 14016 - protein, 9 aa, synthetic construct
  source 1..9: note = Seed: AMYTPHTVL
ATYTPHTVY

SEQ ID NO: 14017 - protein, 10 aa, synthetic construct
  source 1..10: note = Seed: AKYTQLCQYL
ATYTQLCQYF

SEQ ID NO: 14018 - protein, 10 aa, synthetic construct
  source 1..10: note = Seed: AYYVGYLQPR
ATYVGYLQPR

SEQ ID NO: 14019 - protein, 9 aa, synthetic construct
  source 1..9: note = Seed: AGAALQIPF
AVAALQIPF

SEQ ID NO: 14020 - protein, 9 aa, synthetic construct
  source 1..9: note = Seed: AGAALQIPF
AVAALQIPY

SEQ ID NO: 14021 - protein, 9 aa, synthetic construct
  source 1..9: note = Seed: AMACLVGLM
AVACLVGLV

SEQ ID NO: 14022 - protein, 10 aa, synthetic construct
  source 1..10: note = Seed: AFAMMFVKHK
AVAMMFVKHK

SEQ ID NO: 14023 - protein, 10 aa, synthetic construct
  source 1..10: note = Seed: AFAMMFVKHK
AVAMMFVKHR

SEQ ID NO: 14024 - protein, 9 aa, synthetic construct
  source 1..9: note = Seed: AIASEFSSL
AVASEFSSA

SEQ ID NO: 14025 - protein, 9 aa, synthetic construct
  source 1..9: note = Seed: AIASEFSSL
AVASEFSSF

SEQ ID NO: 14026 - protein, 9 aa, synthetic construct
  source 1..9: note = Seed: AIASEFSSL
AVASEFSSI

SEQ ID NO: 14027 - protein, 9 aa, synthetic construct
  source 1..9: note = Seed: AIASEFSSL
AVASEFSSL

SEQ ID NO: 14028 - protein, 9 aa, synthetic construct
  source 1..9: note = Seed: AIASEFSSL
AVASEFSSM

SEQ ID NO: 14029 - protein, 9 aa, synthetic construct
  source 1..9: note = Seed: AIASEFSSL
AVASEFSSV

SEQ ID NO: 14030 - protein, 9 aa, synthetic construct
  source 1..9: note = Seed: AIASEFSSL
AVASEFSSY

SEQ ID NO: 14031 - protein, 9 aa, synthetic construct
  source 1..9: note = Seed: ALCTFLLNK
AVCTFLLNK

SEQ ID NO: 14032 - protein, 9 aa, synthetic construct
  source 1..9: note = Seed: ALCTFLLNK
AVCTFLLNR

SEQ ID NO: 14033 - protein, 9 aa, synthetic construct
  source 1..9: note = Seed: ALCTFLLNK
AVCTFLLNY

SEQ ID NO: 14034 - protein, 9 aa, synthetic construct
  source 1..9: note = Seed: AVDAAKAYK
AVDAAKAYR

SEQ ID NO: 14035 - protein, 9 aa, synthetic construct
  source 1..9: note = Seed: AVDCALDPL
AVDCALDPV

SEQ ID NO: 14036 - protein, 10 aa, synthetic construct
  source 1..10: note = Seed: AGEAANFCAL
AVEAANFCAA

SEQ ID NO: 14037 - protein, 10 aa, synthetic construct
  source 1..10: note = Seed: AGEAANFCAL
AVEAANFCAF

SEQ ID NO: 14038 - protein, 10 aa, synthetic construct
  source 1..10: note = Seed: AGEAANFCAL
AVEAANFCAL

SEQ ID NO: 14039 - protein, 10 aa, synthetic construct
  source 1..10: note = Seed: AGEAANFCAL
AVEAANFCAW

SEQ ID NO: 14040 - protein, 10 aa, synthetic construct
  source 1..10: note = Seed: AQFAPSASAF
AVFAPSASAF

SEQ ID NO: 14041 - protein, 11 aa, synthetic construct
  source 1..11: note = Seed: AQFAPSASAFF
AVFAPSASAFY

SEQ ID NO: 14042 - protein, 10 aa, synthetic construct
  source 1..10: note = Seed: AQFAPSASAF
AVFAPSASAM

SEQ ID NO: 14043 - protein, 10 aa, synthetic construct
  source 1..10: note = Seed: AQFAPSASAF
AVFAPSASAY

SEQ ID NO: 14044 - protein, 9 aa, synthetic construct
  source 1..9: note = Seed: AQFAPSASA
AVFAPSASF

SEQ ID NO: 14045 - protein, 9 aa, synthetic construct
  source 1..9: note = Seed: AQFAPSASA
AVFAPSASI

SEQ ID NO: 14046 - protein, 9 aa, synthetic construct
  source 1..9: note = Seed: AQFAPSASA
AVFAPSASL

SEQ ID NO: 14047 - protein, 9 aa, synthetic construct
  source 1..9: note = Seed: AQFAPSASA
AVFAPSASM

SEQ ID NO: 14048 - protein, 9 aa, synthetic construct
  source 1..9: note = Seed: AQFAPSASA
AVFAPSASV

SEQ ID NO: 14049 - protein, 9 aa, synthetic construct
  source 1..9: note = Seed: AQFAPSASA
AVFAPSASY

SEQ ID NO: 14050 - protein, 9 aa, synthetic construct
  source 1..9: note = Seed: ASFDNFKFV
AVFDNFKFA

SEQ ID NO: 14051 - protein, 9 aa, synthetic construct
  source 1..9: note = Seed: ASFDNFKFV
AVFDNFKFI

SEQ ID NO: 14052 - protein, 9 aa, synthetic construct
  source 1..9: note = Seed: ASFDNFKFV
AVFDNFKFK

SEQ ID NO: 14053 - protein, 9 aa, synthetic construct
  source 1..9: note = Seed: ASFDNFKFV
AVFDNFKFL

SEQ ID NO: 14054 - protein, 9 aa, synthetic construct
  source 1..9: note = Seed: ASFDNFKFV
AVFDNFKFV

SEQ ID NO: 14055 - protein, 9 aa, synthetic construct
  source 1..9: note = Seed: ASFDNFKFV
AVFDNFKFW

SEQ ID NO: 14056 - protein, 9 aa, synthetic construct
  source 1..9: note = Seed: ASFDNFKFV
AVFDNFKFY

SEQ ID NO: 14057 - protein, 10 aa, synthetic construct
  source 1..10: note = Seed: AYFNMVYMPA
AVFNMVYMPK

SEQ ID NO: 14058 - protein, 10 aa, synthetic construct
  source 1..10: note = Seed: ANFNVLFSTV
AVFNVLFSTA

SEQ ID NO: 14059 - protein, 10 aa, synthetic construct
  source 1..10: note = Seed: ANFNVLFSTV
AVFNVLFSTI

SEQ ID NO: 14060 - protein, 10 aa, synthetic construct
  source 1..10: note = Seed: ANFNVLFSTV
AVFNVLFSTL

SEQ ID NO: 14061 - protein, 10 aa, synthetic construct
  source 1..10: note = Seed: ANFNVLFSTV
AVFNVLFSTV

SEQ ID NO: 14062 - protein, 10 aa, synthetic construct
  source 1..10: note = Seed: AGFPFNKWGK
AVFPFNKWGK

SEQ ID NO: 14063 - protein, 10 aa, synthetic construct
  source 1..10: note = Seed: AGFPFNKWGK
AVFPFNKWGR

SEQ ID NO: 14064 - protein, 8 aa, synthetic construct
  source 1..8: note = Seed: ASFRLFAR
AVFRLFAR

SEQ ID NO: 14065 - protein, 10 aa, synthetic construct
  source 1..10: note = Seed: ASFRLFARTR
AVFRLFARTK

SEQ ID NO: 14066 - protein, 10 aa, synthetic construct
  source 1..10: note = Seed: ASFRLFARTR
AVFRLFARTR

SEQ ID NO: 14067 - protein, 9 aa, synthetic construct
  source 1..9: note = Seed: AGFSLWVYK
AVFSLWVYK

SEQ ID NO: 14068 - protein, 9 aa, synthetic construct
  source 1..9: note = Seed: AGFSLWVYK
AVFSLWVYR

SEQ ID NO: 14069 - protein, 9 aa, synthetic construct
  source 1..9: note = Seed: AGFSLWVYK
AVFSLWVYY

SEQ ID NO: 14070 - protein, 9 aa, synthetic construct
  source 1..9: note = Seed: ASFSTFKCY
AVFSTFKCF

SEQ ID NO: 14071 - protein, 9 aa, synthetic construct
  source 1..9: note = Seed: ASFSTFKCY
AVFSTFKCK

SEQ ID NO: 14072 - protein, 9 aa, synthetic construct
  source 1..9: note = Seed: ASFSTFKCY
AVFSTFKCW

SEQ ID NO: 14073 - protein, 9 aa, synthetic construct
  source 1..9: note = Seed: ASFSTFKCY
AVFSTFKCY

SEQ ID NO: 14074 - protein, 9 aa, synthetic construct
  source 1..9: note = Seed: AIFYLITPV
AVFYLITPA

SEQ ID NO: 14075 - protein, 9 aa, synthetic construct
  source 1..9: note = Seed: AIFYLITPV
AVFYLITPF

SEQ ID NO: 14076 - protein, 9 aa, synthetic construct
  source 1..9: note = Seed: AIFYLITPV
AVFYLITPI

SEQ ID NO: 14077 - protein, 9 aa, synthetic construct
  source 1..9: note = Seed: AIFYLITPV
AVFYLITPL

SEQ ID NO: 14078 - protein, 9 aa, synthetic construct
  source 1..9: note = Seed: AIFYLITPV
AVFYLITPV

SEQ ID NO: 14079 - protein, 10 aa, synthetic construct
  source 1..10: note = Seed: AIFYLITPVH
AVFYLITPVV

SEQ ID NO: 14080 - protein, 9 aa, synthetic construct
  source 1..9: note = Seed: AIFYLITPV
AVFYLITPW

SEQ ID NO: 14081 - protein, 10 aa, synthetic construct
  source 1..10: note = Seed: ASFYYVWKSY
AVFYYVWKSK

SEQ ID NO: 14082 - protein, 10 aa, synthetic construct
  source 1..10: note = Seed: ASFYYVWKSY
AVFYYVWKSY

SEQ ID NO: 14083 - protein, 11 aa, synthetic construct
  source 1..11: note = Seed: ASFYYVWKSYV
AVFYYVWKSYV

SEQ ID NO: 14084 - protein, 9 aa, synthetic construct
  source 1..9: note = Seed: AFGGCVFSY
AVGGCVFSY

SEQ ID NO: 14085 - protein, 9 aa, synthetic construct
  source 1..9: note = Seed: ANGQVFGLY
AVGQVFGLY

SEQ ID NO: 14086 - protein, 10 aa, synthetic construct
  source 1..10: note = Seed: ANGQVFGLYK
AVGQVFGLYK

SEQ ID NO: 14087 - protein, 10 aa, synthetic construct
  source 1..10: note = Seed: ANGQVFGLYK
AVGQVFGLYR

SEQ ID NO: 14088 - protein, 10 aa, synthetic construct
  source 1..10: note = Seed: ALIISVTSNY
AVIISVTSNF

SEQ ID NO: 14089 - protein, 10 aa, synthetic construct
  source 1..10: note = Seed: ALIISVTSNY
AVIISVTSNK

SEQ ID NO: 14090 - protein, 10 aa, synthetic construct
  source 1..10: note = Seed: ALIISVTSNY
AVIISVTSNY

SEQ ID NO: 14091 - protein, 9 aa, synthetic construct
  source 1..9: note = Seed: ASIKNFKSV
AVIKNFKSV

SEQ ID NO: 14092 - protein, 9 aa, synthetic construct
  source 1..9: note = Seed: ASIKNFKSV
AVIKNFKSW

SEQ ID NO: 14093 - protein, 10 aa, synthetic construct
  source 1..10: note = Seed: AYILFTRFFY
AVILFTRFFK

SEQ ID NO: 14094 - protein, 10 aa, synthetic construct
  source 1..10: note = Seed: AYILFTRFFY
AVILFTRFFR

SEQ ID NO: 14095 - protein, 10 aa, synthetic construct
  source 1..10: note = Seed: AYILFTRFFY
AVILFTRFFY

SEQ ID NO: 14096 - protein, 11 aa, synthetic construct
  source 1..11: note = Seed: AYILFTRFFYV
AVILFTRFFYA

SEQ ID NO: 14097 - protein, 11 aa, synthetic construct
  source 1..11: note = Seed: AYILFTRFFYV
AVILFTRFFYI

SEQ ID NO: 14098 - protein, 11 aa, synthetic construct
  source 1..11: note = Seed: AYILFTRFFYV
AVILFTRFFYL

SEQ ID NO: 14099 - protein, 11 aa, synthetic construct
  source 1..11: note = Seed: AYILFTRFFYV
AVILFTRFFYV

SEQ ID NO: 14100 - protein, 9 aa, synthetic construct
  source 1..9: note = Seed: AAKKNNLPF
AVKKNNLPF

SEQ ID NO: 14101 - protein, 10 aa, synthetic construct
  source 1..10: note = Seed: AAKKNNLPFK
AVKKNNLPFK

SEQ ID NO: 14102 - protein, 9 aa, synthetic construct
  source 1..9: note = Seed: AAKKNNLPF
AVKKNNLPY

SEQ ID NO: 14103 - protein, 9 aa, synthetic construct
  source 1..9: note = Seed: AKKNNLPFK
AVKNNLPFA

SEQ ID NO: 14104 - protein, 9 aa, synthetic construct
  source 1..9: note = Seed: AKKNNLPFK
AVKNNLPFG

SEQ ID NO: 14105 - protein, 9 aa, synthetic construct
  source 1..9: note = Seed: AKKNNLPFK
AVKNNLPFI

SEQ ID NO: 14106 - protein, 9 aa, synthetic construct
  source 1..9: note = Seed: AKKNNLPFK
AVKNNLPFK

SEQ ID NO: 14107 - protein, 9 aa, synthetic construct
  source 1..9: note = Seed: AKKNNLPFK
AVKNNLPFL

SEQ ID NO: 14108 - protein, 9 aa, synthetic construct
  source 1..9: note = Seed: AKKNNLPFK
AVKNNLPFM

SEQ ID NO: 14109 - protein, 9 aa, synthetic construct
  source 1..9: note = Seed: AKKNNLPFK
AVKNNLPFS

SEQ ID NO: 14110 - protein, 9 aa, synthetic construct
  source 1..9: note = Seed: AKKNNLPFK
AVKNNLPFV

SEQ ID NO: 14111 - protein, 9 aa, synthetic construct
  source 1..9: note = Seed: AKKNNLPFK
AVKNNLPFY

SEQ ID NO: 14112 - protein, 10 aa, synthetic construct
  source 1..10: note = Seed: AALALLLLDR
AVLALLLLDK

SEQ ID NO: 14113 - protein, 10 aa, synthetic construct
  source 1..10: note = Seed: AALALLLLDR
AVLALLLLDR

SEQ ID NO: 14114 - protein, 10 aa, synthetic construct
  source 1..10: note = Seed: AALCTFLLNK
AVLCTFLLNK

SEQ ID NO: 14115 - protein, 10 aa, synthetic construct
  source 1..10: note = Seed: AALCTFLLNK
AVLCTFLLNR

SEQ ID NO: 14116 - protein, 10 aa, synthetic construct
  source 1..10: note = Seed: ASLINTLNDL
AVLINTLNDI

SEQ ID NO: 14117 - protein, 10 aa, synthetic construct
  source 1..10: note = Seed: ASLINTLNDL
AVLINTLNDV

SEQ ID NO: 14118 - protein, 9 aa, synthetic construct
  source 1..9: note = Seed: ASLNGVTLI
AVLNGVTLF

SEQ ID NO: 14119 - protein, 9 aa, synthetic construct
  source 1..9: note = Seed: ASLNGVTLI
AVLNGVTLV

SEQ ID NO: 14120 - protein, 9 aa, synthetic construct
  source 1..9: note = Seed: ASLNGVTLI
AVLNGVTLW

SEQ ID NO: 14121 - protein, 9 aa, synthetic construct
  source 1..9: note = Seed: AQLPAPRTL
AVLPAPRTY

SEQ ID NO: 14122 - protein, 10 aa, synthetic construct
  source 1..10: note = Seed: ATLQAIASEF
AVLQAIASEY

SEQ ID NO: 14123 - protein, 11 aa, synthetic construct
  source 1..11: note = Seed: AALQIPFAMQM
AVLQIPFAMQY

SEQ ID NO: 14124 - protein, 9 aa, synthetic construct
  source 1..9: note = Seed: AALQIPFAM
AVLQIPFAW

SEQ ID NO: 14125 - protein, 9 aa, synthetic construct
  source 1..9: note = Seed: AALQIPFAM
AVLQIPFAY

SEQ ID NO: 14126 - protein, 9 aa, synthetic construct
  source 1..9: note = Seed: AVLQSGFRK
AVLQSGFRR

SEQ ID NO: 14127 - protein, 10 aa, synthetic construct
  source 1..10: note = Seed: ALLSDLQDLK
AVLSDLQDLK

SEQ ID NO: 14128 - protein, 9 aa, synthetic construct
  source 1..9: note = Seed: ALLSDLQDL
AVLSDLQDV

SEQ ID NO: 14129 - protein, 9 aa, synthetic construct
  source 1..9: note = Seed: AMMFVKHKH
AVMFVKHKK

SEQ ID NO: 14130 - protein, 9 aa, synthetic construct
  source 1..9: note = Seed: AMMFVKHKH
AVMFVKHKR

SEQ ID NO: 14131 - protein, 10 aa, synthetic construct
  source 1..10: note = Seed: ALNNIINNAR
AVNNIINNAR

SEQ ID NO: 14132 - protein, 9 aa, synthetic construct
  source 1..9: note = Seed: ALNNIINNA
AVNNIINNV

SEQ ID NO: 14133 - protein, 10 aa, synthetic construct
  source 1..10: note = Seed: AQNSVRVLQK
AVNSVRVLQK

SEQ ID NO: 14134 - protein, 10 aa, synthetic construct
  source 1..10: note = Seed: AQNSVRVLQK
AVNSVRVLQR

SEQ ID NO: 14135 - protein, 10 aa, synthetic construct
  source 1..10: note = Seed: AIPTNFTISV
AVPTNFTISL

SEQ ID NO: 14136 - protein, 10 aa, synthetic construct
  source 1..10: note = Seed: AIPTNFTISV
AVPTNFTISM

SEQ ID NO: 14137 - protein, 10 aa, synthetic construct
  source 1..10: note = Seed: ADQAMTQMYK
AVQAMTQMYK

SEQ ID NO: 14138 - protein, 10 aa, synthetic construct
  source 1..10: note = Seed: ADQAMTQMYK
AVQAMTQMYR

SEQ ID NO: 14139 - protein, 10 aa, synthetic construct
  source 1..10: note = Seed: ADQAMTQMYK
AVQAMTQMYY

SEQ ID NO: 14140 - protein, 10 aa, synthetic construct
  source 1..10: note = Seed: ALQDAYYRAR
AVQDAYYRAR

SEQ ID NO: 14141 - protein, 9 aa, synthetic construct
  source 1..9: note = Seed: ALQDAYYRA
AVQDAYYRV

SEQ ID NO: 14142 - protein, 10 aa, synthetic construct
  source 1..10: note = Seed: ALQIPFAMQM
AVQIPFAMQF

SEQ ID NO: 14143 - protein, 10 aa, synthetic construct
  source 1..10: note = Seed: ALQIPFAMQM
AVQIPFAMQM

SEQ ID NO: 14144 - protein, 10 aa, synthetic construct
  source 1..10: note = Seed: ALQIPFAMQM
AVQIPFAMQV

SEQ ID NO: 14145 - protein, 10 aa, synthetic construct
  source 1..10: note = Seed: ALQIPFAMQM
AVQIPFAMQY

SEQ ID NO: 14146 - protein, 9 aa, synthetic construct
  source 1..9: note = Seed: AMQTMLFTM
AVQTMLFTA

SEQ ID NO: 14147 - protein, 9 aa, synthetic construct
  source 1..9: note = Seed: AMQTMLFTM
AVQTMLFTI

SEQ ID NO: 14148 - protein, 9 aa, synthetic construct
  source 1..9: note = Seed: AMQTMLFTM
AVQTMLFTL

SEQ ID NO: 14149 - protein, 9 aa, synthetic construct
  source 1..9: note = Seed: AMQTMLFTM
AVQTMLFTV

SEQ ID NO: 14150 - protein, 9 aa, synthetic construct
  source 1..9: note = Seed: AMQTMLFTM
AVQTMLFTW

SEQ ID NO: 14151 - protein, 9 aa, synthetic construct
  source 1..9: note = Seed: ALRANSAVK
AVRANSAVA

SEQ ID NO: 14152 - protein, 9 aa, synthetic construct
  source 1..9: note = Seed: ALRANSAVK
AVRANSAVI

SEQ ID NO: 14153 - protein, 9 aa, synthetic construct
  source 1..9: note = Seed: ALRANSAVK
AVRANSAVK

SEQ ID NO: 14154 - protein, 9 aa, synthetic construct
  source 1..9: note = Seed: ALRANSAVK
AVRANSAVL

SEQ ID NO: 14155 - protein, 9 aa, synthetic construct
  source 1..9: note = Seed: ALRANSAVK
AVRANSAVV

SEQ ID NO: 14156 - protein, 9 aa, synthetic construct
  source 1..9: note = Seed: ALRANSAVK
AVRANSAVY

SEQ ID NO: 14157 - protein, 9 aa, synthetic construct
  source 1..9: note = Seed: ATREAVGTN
AVREAVGTA

SEQ ID NO: 14158 - protein, 9 aa, synthetic construct
  source 1..9: note = Seed: ATREAVGTN
AVREAVGTK

SEQ ID NO: 14159 - protein, 10 aa, synthetic construct
  source 1..10: note = Seed: ATREAVGTNL
AVREAVGTNK

SEQ ID NO: 14160 - protein, 9 aa, synthetic construct
  source 1..9: note = Seed: ATRFASVYA
AVRFASVYA

SEQ ID NO: 14161 - protein, 9 aa, synthetic construct
  source 1..9: note = Seed: ATRFASVYA
AVRFASVYF

SEQ ID NO: 14162 - protein, 9 aa, synthetic construct
  source 1..9: note = Seed: ATRFASVYA
AVRFASVYG

SEQ ID NO: 14163 - protein, 9 aa, synthetic construct
  source 1..9: note = Seed: ATRFASVYA
AVRFASVYI

SEQ ID NO: 14164 - protein, 9 aa, synthetic construct
  source 1..9: note = Seed: ATRFASVYA
AVRFASVYK

SEQ ID NO: 14165 - protein, 9 aa, synthetic construct
  source 1..9: note = Seed: ATRFASVYA
AVRFASVYL

SEQ ID NO: 14166 - protein, 9 aa, synthetic construct
  source 1..9: note = Seed: ATRFASVYA
AVRFASVYM

SEQ ID NO: 14167 - protein, 9 aa, synthetic construct
  source 1..9: note = Seed: ATRFASVYA
AVRFASVYN

SEQ ID NO: 14168 - protein, 9 aa, synthetic construct
  source 1..9: note = Seed: ATRFASVYA
AVRFASVYP

SEQ ID NO: 14169 - protein, 9 aa, synthetic construct
  source 1..9: note = Seed: ATRFASVYA
AVRFASVYR

SEQ ID NO: 14170 - protein, 9 aa, synthetic construct
  source 1..9: note = Seed: ATRFASVYA
AVRFASVYS

SEQ ID NO: 14171 - protein, 9 aa, synthetic construct
  source 1..9: note = Seed: ATRFASVYA
AVRFASVYT

SEQ ID NO: 14172 - protein, 9 aa, synthetic construct
  source 1..9: note = Seed: ATRFASVYA
AVRFASVYV

SEQ ID NO: 14173 - protein, 9 aa, synthetic construct
  source 1..9: note = Seed: ATRFASVYA
AVRFASVYY

SEQ ID NO: 14174 - protein, 9 aa, synthetic construct
  source 1..9: note = Seed: AYRFNGIGV
AVRFNGIGA

SEQ ID NO: 14175 - protein, 9 aa, synthetic construct
  source 1..9: note = Seed: AYRFNGIGV
AVRFNGIGI

SEQ ID NO: 14176 - protein, 9 aa, synthetic construct
  source 1..9: note = Seed: AYRFNGIGV
AVRFNGIGK

SEQ ID NO: 14177 - protein, 9 aa, synthetic construct
  source 1..9: note = Seed: AYRFNGIGV
AVRFNGIGV

SEQ ID NO: 14178 - protein, 9 aa, synthetic construct
  source 1..9: note = Seed: AWRKAVFIS
AVRKAVFIA

SEQ ID NO: 14179 - protein, 9 aa, synthetic construct
  source 1..9: note = Seed: AWRKAVFIS
AVRKAVFIG

SEQ ID NO: 14180 - protein, 9 aa, synthetic construct
  source 1..9: note = Seed: AWRKAVFIS
AVRKAVFII

SEQ ID NO: 14181 - protein, 9 aa, synthetic construct
  source 1..9: note = Seed: AWRKAVFIS
AVRKAVFIK

SEQ ID NO: 14182 - protein, 9 aa, synthetic construct
  source 1..9: note = Seed: AWRKAVFIS
AVRKAVFIL

SEQ ID NO: 14183 - protein, 9 aa, synthetic construct
  source 1..9: note = Seed: AWRKAVFIS
AVRKAVFIM

SEQ ID NO: 14184 - protein, 9 aa, synthetic construct
  source 1..9: note = Seed: AWRKAVFIS
AVRKAVFIS

SEQ ID NO: 14185 - protein, 9 aa, synthetic construct
  source 1..9: note = Seed: AWRKAVFIS
AVRKAVFIT

SEQ ID NO: 14186 - protein, 9 aa, synthetic construct
  source 1..9: note = Seed: AWRKAVFIS
AVRKAVFIV

SEQ ID NO: 14187 - protein, 9 aa, synthetic construct
  source 1..9: note = Seed: AMRNAGIVG
AVRNAGIVA

SEQ ID NO: 14188 - protein, 9 aa, synthetic construct
  source 1..9: note = Seed: AMRNAGIVG
AVRNAGIVF

SEQ ID NO: 14189 - protein, 10 aa, synthetic construct
  source 1..10: note = Seed: AMRNAGIVGV
AVRNAGIVGK

SEQ ID NO: 14190 - protein, 9 aa, synthetic construct
  source 1..9: note = Seed: AMRNAGIVG
AVRNAGIVI

SEQ ID NO: 14191 - protein, 9 aa, synthetic construct
  source 1..9: note = Seed: AMRNAGIVG
AVRNAGIVK

SEQ ID NO: 14192 - protein, 9 aa, synthetic construct
  source 1..9: note = Seed: AMRNAGIVG
AVRNAGIVL

SEQ ID NO: 14193 - protein, 9 aa, synthetic construct
  source 1..9: note = Seed: AMRNAGIVG
AVRNAGIVM

SEQ ID NO: 14194 - protein, 9 aa, synthetic construct
  source 1..9: note = Seed: AMRNAGIVG
AVRNAGIVV

SEQ ID NO: 14195 - protein, 9 aa, synthetic construct
  source 1..9: note = Seed: AMRNAGIVG
AVRNAGIVY

SEQ ID NO: 14196 - protein, 9 aa, synthetic construct
  source 1..9: note = Seed: AARQGFVDS
AVRQGFVDA

SEQ ID NO: 14197 - protein, 9 aa, synthetic construct
  source 1..9: note = Seed: AARQGFVDS
AVRQGFVDK

SEQ ID NO: 14198 - protein, 9 aa, synthetic construct
  source 1..9: note = Seed: ATRVECTTI
AVRVECTTK

SEQ ID NO: 14199 - protein, 9 aa, synthetic construct
  source 1..9: note = Seed: ATSACVLAA
AVSACVLAV

SEQ ID NO: 14200 - protein, 10 aa, synthetic construct
  source 1..10: note = Seed: AMSAFAMMFV
AVSAFAMMFV

SEQ ID NO: 14201 - protein, 11 aa, synthetic construct
  source 1..11: note = Seed: AMSAFAMMFVK
AVSAFAMMFVK

SEQ ID NO: 14202 - protein, 11 aa, synthetic construct
  source 1..11: note = Seed: AMSAFAMMFVK
AVSAFAMMFVR

SEQ ID NO: 14203 - protein, 9 aa, synthetic construct
  source 1..9: note = Seed: AMSAFAMMF
AVSAFAMMI

SEQ ID NO: 14204 - protein, 9 aa, synthetic construct
  source 1..9: note = Seed: AMSAFAMMF
AVSAFAMML

SEQ ID NO: 14205 - protein, 9 aa, synthetic construct
  source 1..9: note = Seed: AMSAFAMMF
AVSAFAMMV

SEQ ID NO: 14206 - protein, 9 aa, synthetic construct
  source 1..9: note = Seed: AMSAFAMMF
AVSAFAMMW

SEQ ID NO: 14207 - protein, 9 aa, synthetic construct
  source 1..9: note = Seed: AMSAFAMMF
AVSAFAMMY

SEQ ID NO: 14208 - protein, 10 aa, synthetic construct
  source 1..10: note = Seed: APSASAFFGM
AVSASAFFGW

SEQ ID NO: 14209 - protein, 11 aa, synthetic construct
  source 1..11: note = Seed: AYSRYRIGNYK
AVSRYRIGNYR

SEQ ID NO: 14210 - protein, 9 aa, synthetic construct
  source 1..9: note = Seed: ASSSEAFLI
AVSSEAFLW

SEQ ID NO: 14211 - protein, 9 aa, synthetic construct
  source 1..9: note = Seed: AISSVLNDI
AVSSVLNDV

SEQ ID NO: 14212 - protein, 10 aa, synthetic construct
  source 1..10: note = Seed: AVTANVNALL
AVTANVNALV

SEQ ID NO: 14213 - protein, 10 aa, synthetic construct
  source 1..10: note = Seed: ATTAYANSVF
AVTAYANSVF

SEQ ID NO: 14214 - protein, 10 aa, synthetic construct
  source 1..10: note = Seed: ATTAYANSVF
AVTAYANSVW

SEQ ID NO: 14215 - protein, 10 aa, synthetic construct
  source 1..10: note = Seed: ATTAYANSVF
AVTAYANSVY

SEQ ID NO: 14216 - protein, 10 aa, synthetic construct
  source 1..10: note = Seed: AGTDLEGNFY
AVTDLEGNFY

SEQ ID NO: 14217 - protein, 10 aa, synthetic construct
  source 1..10: note = Seed: ATTRQVVNVV
AVTRQVVNVK

SEQ ID NO: 14218 - protein, 9 aa, synthetic construct
  source 1..9: note = Seed: ATVAYFNMV
AVVAYFNMA

SEQ ID NO: 14219 - protein, 9 aa, synthetic construct
  source 1..9: note = Seed: ATVAYFNMV
AVVAYFNMI

SEQ ID NO: 14220 - protein, 9 aa, synthetic construct
  source 1..9: note = Seed: ATVAYFNMV
AVVAYFNML

SEQ ID NO: 14221 - protein, 9 aa, synthetic construct
  source 1..9: note = Seed: ATVAYFNMV
AVVAYFNMV

SEQ ID NO: 14222 - protein, 10 aa, synthetic construct
  source 1..10: note = Seed: ATVAYFNMVY
AVVAYFNMVK

SEQ ID NO: 14223 - protein, 10 aa, synthetic construct
  source 1..10: note = Seed: ATVAYFNMVY
AVVAYFNMVR

SEQ ID NO: 14224 - protein, 10 aa, synthetic construct
  source 1..10: note = Seed: ATVAYFNMVY
AVVAYFNMVY

SEQ ID NO: 14225 - protein, 9 aa, synthetic construct
  source 1..9: note = Seed: AVVCFNSTY
AVVCFNSTF

SEQ ID NO: 14226 - protein, 9 aa, synthetic construct
  source 1..9: note = Seed: AVVCFNSTY
AVVCFNSTK

SEQ ID NO: 14227 - protein, 9 aa, synthetic construct
  source 1..9: note = Seed: AVVCFNSTY
AVVCFNSTW

SEQ ID NO: 14228 - protein, 10 aa, synthetic construct
  source 1..10: note = Seed: AVVCFNSTYA
AVVCFNSTYV

SEQ ID NO: 14229 - protein, 9 aa, synthetic construct
  source 1..9: note = Seed: AAVDALCEK
AVVDALCEK

SEQ ID NO: 14230 - protein, 9 aa, synthetic construct
  source 1..9: note = Seed: AAVDALCEK
AVVDALCER

SEQ ID NO: 14231 - protein, 10 aa, synthetic construct
  source 1..10: note = Seed: AFVNLKQLPF
AVVNLKQLPY

SEQ ID NO: 14232 - protein, 10 aa, synthetic construct
  source 1..10: note = Seed: AMVRMYIFFA
AVVRMYIFFK

SEQ ID NO: 14233 - protein, 10 aa, synthetic construct
  source 1..10: note = Seed: AMVRMYIFFA
AVVRMYIFFV

SEQ ID NO: 14234 - protein, 9 aa, synthetic construct
  source 1..9: note = Seed: AGVSICSTM
AVVSICSTF

SEQ ID NO: 14235 - protein, 9 aa, synthetic construct
  source 1..9: note = Seed: AGVSICSTM
AVVSICSTY

SEQ ID NO: 14236 - protein, 9 aa, synthetic construct
  source 1..9: note = Seed: ASVYYSQLM
AVVYYSQLF

SEQ ID NO: 14237 - protein, 9 aa, synthetic construct
  source 1..9: note = Seed: ASVYYSQLM
AVVYYSQLW

SEQ ID NO: 14238 - protein, 9 aa, synthetic construct
  source 1..9: note = Seed: ASVYYSQLM
AVVYYSQLY

SEQ ID NO: 14239 - protein, 8 aa, synthetic construct
  source 1..8: note = Seed: AYYFMRFR
AVYFMRFR

SEQ ID NO: 14240 - protein, 9 aa, synthetic construct
  source 1..9: note = Seed: AYYFMRFRR
AVYFMRFRK

SEQ ID NO: 14241 - protein, 9 aa, synthetic construct
  source 1..9: note = Seed: AYYFMRFRR
AVYFMRFRR

SEQ ID NO: 14242 - protein, 10 aa, synthetic construct
  source 1..10: note = Seed: AYYRARAGEA
AVYRARAGEK

SEQ ID NO: 14243 - protein, 9 aa, synthetic construct
  source 1..9: note = Seed: AWYTERSEK
AVYTERSER

SEQ ID NO: 14244 - protein, 9 aa, synthetic construct
  source 1..9: note = Seed: AMYTPHTVL
AVYTPHTVF

SEQ ID NO: 14245 - protein, 9 aa, synthetic construct
  source 1..9: note = Seed: AMYTPHTVL
AVYTPHTVL

SEQ ID NO: 14246 - protein, 9 aa, synthetic construct
  source 1..9: note = Seed: AMYTPHTVL
AVYTPHTVM

SEQ ID NO: 14247 - protein, 9 aa, synthetic construct
  source 1..9: note = Seed: AMYTPHTVL
AVYTPHTVY

SEQ ID NO: 14248 - protein, 9 aa, synthetic construct
  source 1..9: note = Seed: AKYTQLCQY
AVYTQLCQF

SEQ ID NO: 14249 - protein, 10 aa, synthetic construct
  source 1..10: note = Seed: AKYTQLCQYL
AVYTQLCQYF

SEQ ID NO: 14250 - protein, 10 aa, synthetic construct
  source 1..10: note = Seed: AYYVGYLQPR
AVYVGYLQPR

SEQ ID NO: 14251 - protein, 9 aa, synthetic construct
  source 1..9: note = Seed: AYANSVFNI
AWANSVFNF

SEQ ID NO: 14252 - protein, 9 aa, synthetic construct
  source 1..9: note = Seed: AYANSVFNI
AWANSVFNI

SEQ ID NO: 14253 - protein, 9 aa, synthetic construct
  source 1..9: note = Seed: AYANSVFNI
AWANSVFNL

SEQ ID NO: 14254 - protein, 9 aa, synthetic construct
  source 1..9: note = Seed: AYANSVFNI
AWANSVFNM

SEQ ID NO: 14255 - protein, 9 aa, synthetic construct
  source 1..9: note = Seed: AYANSVFNI
AWANSVFNW

SEQ ID NO: 14256 - protein, 9 aa, synthetic construct
  source 1..9: note = Seed: AYCCNIVNV
AWCCNIVNF

SEQ ID NO: 14257 - protein, 9 aa, synthetic construct
  source 1..9: note = Seed: AYCCNIVNV
AWCCNIVNW

SEQ ID NO: 14258 - protein, 9 aa, synthetic construct
  source 1..9: note = Seed: ALCTFLLNK
AWCTFLLNR

SEQ ID NO: 14259 - protein, 10 aa, synthetic construct
  source 1..10: note = Seed: AGEAANFCAL
AWEAANFCAA

SEQ ID NO: 14260 - protein, 10 aa, synthetic construct
  source 1..10: note = Seed: AGEAANFCAL
AWEAANFCAF

SEQ ID NO: 14261 - protein, 10 aa, synthetic construct
  source 1..10: note = Seed: AGEAANFCAL
AWEAANFCAL

SEQ ID NO: 14262 - protein, 10 aa, synthetic construct
  source 1..10: note = Seed: AGEAANFCAL
AWEAANFCAW

SEQ ID NO: 14263 - protein, 9 aa, synthetic construct
  source 1..9: note = Seed: AFEKMVSLL
AWEKMVSLF

SEQ ID NO: 14264 - protein, 9 aa, synthetic construct
  source 1..9: note = Seed: AFEKMVSLL
AWEKMVSLW

SEQ ID NO: 14265 - protein, 10 aa, synthetic construct
  source 1..10: note = Seed: AQFAPSASAF
AWFAPSASAF

SEQ ID NO: 14266 - protein, 10 aa, synthetic construct
  source 1..10: note = Seed: AQFAPSASAF
AWFAPSASAL

SEQ ID NO: 14267 - protein, 10 aa, synthetic construct
  source 1..10: note = Seed: AQFAPSASAF
AWFAPSASAM

SEQ ID NO: 14268 - protein, 10 aa, synthetic construct
  source 1..10: note = Seed: AQFAPSASAF
AWFAPSASAW

SEQ ID NO: 14269 - protein, 10 aa, synthetic construct
  source 1..10: note = Seed: AQFAPSASAF
AWFAPSASAY

SEQ ID NO: 14270 - protein, 9 aa, synthetic construct
  source 1..9: note = Seed: AQFAPSASA
AWFAPSASF

SEQ ID NO: 14271 - protein, 10 aa, synthetic construct
  source 1..10: note = Seed: AGFPFNKWGK
AWFPFNKWGK

SEQ ID NO: 14272 - protein, 10 aa, synthetic construct
  source 1..10: note = Seed: AGFPFNKWGK
AWFPFNKWGR

SEQ ID NO: 14273 - protein, 10 aa, synthetic construct
  source 1..10: note = Seed: ASFRLFARTR
AWFRLFARTR

SEQ ID NO: 14274 - protein, 9 aa, synthetic construct
  source 1..9: note = Seed: AGFSLWVYK
AWFSLWVYK

SEQ ID NO: 14275 - protein, 9 aa, synthetic construct
  source 1..9: note = Seed: AGFSLWVYK
AWFSLWVYR

SEQ ID NO: 14276 - protein, 10 aa, synthetic construct
  source 1..10: note = Seed: ASFYYVWKSY
AWFYYVWKSY

SEQ ID NO: 14277 - protein, 9 aa, synthetic construct
  source 1..9: note = Seed: ANGQVFGLY
AWGQVFGLY

SEQ ID NO: 14278 - protein, 10 aa, synthetic construct
  source 1..10: note = Seed: ANGQVFGLYK
AWGQVFGLYR

SEQ ID NO: 14279 - protein, 10 aa, synthetic construct
  source 1..10: note = Seed: ALIISVTSNY
AWIISVTSNK

SEQ ID NO: 14280 - protein, 9 aa, synthetic construct
  source 1..9: note = Seed: AYILFTRFF
AWILFTRFF

SEQ ID NO: 14281 - protein, 10 aa, synthetic construct
  source 1..10: note = Seed: AYILFTRFFY
AWILFTRFFF

SEQ ID NO: 14282 - protein, 10 aa, synthetic construct
  source 1..10: note = Seed: AYILFTRFFY
AWILFTRFFK

SEQ ID NO: 14283 - protein, 10 aa, synthetic construct
  source 1..10: note = Seed: AYILFTRFFY
AWILFTRFFR

SEQ ID NO: 14284 - protein, 10 aa, synthetic construct
  source 1..10: note = Seed: AYILFTRFFY
AWILFTRFFW

SEQ ID NO: 14285 - protein, 10 aa, synthetic construct
  source 1..10: note = Seed: AYILFTRFFY
AWILFTRFFY

SEQ ID NO: 14286 - protein, 11 aa, synthetic construct
  source 1..11: note = Seed: AYILFTRFFYV
AWILFTRFFYA

SEQ ID NO: 14287 - protein, 11 aa, synthetic construct
  source 1..11: note = Seed: AYILFTRFFYV
AWILFTRFFYI

SEQ ID NO: 14288 - protein, 11 aa, synthetic construct
  source 1..11: note = Seed: AYILFTRFFYV
AWILFTRFFYL

SEQ ID NO: 14289 - protein, 11 aa, synthetic construct
  source 1..11: note = Seed: AYILFTRFFYV
AWILFTRFFYV

SEQ ID NO: 14290 - protein, 9 aa, synthetic construct
  source 1..9: note = Seed: AKKNNLPFK
AWKNNLPFK

SEQ ID NO: 14291 - protein, 10 aa, synthetic construct
  source 1..10: note = Seed: AALCTFLLNK
AWLCTFLLNK

SEQ ID NO: 14292 - protein, 10 aa, synthetic construct
  source 1..10: note = Seed: AALCTFLLNK
AWLCTFLLNR

SEQ ID NO: 14293 - protein, 9 aa, synthetic construct
  source 1..9: note = Seed: AFLIGCNYL
AWLIGCNYF

SEQ ID NO: 14294 - protein, 9 aa, synthetic construct
  source 1..9: note = Seed: AFLIGCNYL
AWLIGCNYW

SEQ ID NO: 14295 - protein, 10 aa, synthetic construct
  source 1..10: note = Seed: ASLINTLNDL
AWLINTLNDI

SEQ ID NO: 14296 - protein, 10 aa, synthetic construct
  source 1..10: note = Seed: ASLINTLNDL
AWLINTLNDV

SEQ ID NO: 14297 - protein, 11 aa, synthetic construct
  source 1..11: note = Seed: AALQIPFAMQM
AWLQIPFAMQY

SEQ ID NO: 14298 - protein, 9 aa, synthetic construct
  source 1..9: note = Seed: AMMFVKHKH
AWMFVKHKR

SEQ ID NO: 14299 - protein, 10 aa, synthetic construct
  source 1..10: note = Seed: AQNSVRVLQK
AWNSVRVLQR

SEQ ID NO: 14300 - protein, 10 aa, synthetic construct
  source 1..10: note = Seed: AIPTNFTISV
AWPTNFTISL

SEQ ID NO: 14301 - protein, 10 aa, synthetic construct
  source 1..10: note = Seed: AIPTNFTISV
AWPTNFTISM

SEQ ID NO: 14302 - protein, 10 aa, synthetic construct
  source 1..10: note = Seed: ADQAMTQMYK
AWQAMTQMYK

SEQ ID NO: 14303 - protein, 10 aa, synthetic construct
  source 1..10: note = Seed: ADQAMTQMYK
AWQAMTQMYR

SEQ ID NO: 14304 - protein, 10 aa, synthetic construct
  source 1..10: note = Seed: ALQIPFAMQM
AWQIPFAMQF

SEQ ID NO: 14305 - protein, 10 aa, synthetic construct
  source 1..10: note = Seed: ALQIPFAMQM
AWQIPFAMQM

SEQ ID NO: 14306 - protein, 10 aa, synthetic construct
  source 1..10: note = Seed: ALQIPFAMQM
AWQIPFAMQV

SEQ ID NO: 14307 - protein, 10 aa, synthetic construct
  source 1..10: note = Seed: ALQIPFAMQM
AWQIPFAMQY

SEQ ID NO: 14308 - protein, 9 aa, synthetic construct
  source 1..9: note = Seed: AFQLTPIAV
AWQLTPIAM

SEQ ID NO: 14309 - protein, 9 aa, synthetic construct
  source 1..9: note = Seed: ALRANSAVK
AWRANSAVK

SEQ ID NO: 14310 - protein, 9 aa, synthetic construct
  source 1..9: note = Seed: ATRFASVYA
AWRFASVYA

SEQ ID NO: 14311 - protein, 9 aa, synthetic construct
  source 1..9: note = Seed: ATRFASVYA
AWRFASVYI

SEQ ID NO: 14312 - protein, 9 aa, synthetic construct
  source 1..9: note = Seed: ATRFASVYA
AWRFASVYK

SEQ ID NO: 14313 - protein, 9 aa, synthetic construct
  source 1..9: note = Seed: ATRFASVYA
AWRFASVYV

SEQ ID NO: 14314 - protein, 9 aa, synthetic construct
  source 1..9: note = Seed: AWRKAVFIS
AWRKAVFIK

SEQ ID NO: 14315 - protein, 9 aa, synthetic construct
  source 1..9: note = Seed: AMRNAGIVG
AWRNAGIVK

SEQ ID NO: 14316 - protein, 9 aa, synthetic construct
  source 1..9: note = Seed: AMSAFAMMF
AWSAFAMMF

SEQ ID NO: 14317 - protein, 9 aa, synthetic construct
  source 1..9: note = Seed: AMSAFAMMF
AWSAFAMMI

SEQ ID NO: 14318 - protein, 9 aa, synthetic construct
  source 1..9: note = Seed: AMSAFAMMF
AWSAFAMMW

SEQ ID NO: 14319 - protein, 9 aa, synthetic construct
  source 1..9: note = Seed: AMSAFAMMF
AWSAFAMMY

SEQ ID NO: 14320 - protein, 10 aa, synthetic construct
  source 1..10: note = Seed: APSASAFFGM
AWSASAFFGW

SEQ ID NO: 14321 - protein, 10 aa, synthetic construct
  source 1..10: note = Seed: AVTANVNALL
AWTANVNALV

SEQ ID NO: 14322 - protein, 10 aa, synthetic construct
  source 1..10: note = Seed: ATTAYANSVF
AWTAYANSVF

SEQ ID NO: 14323 - protein, 10 aa, synthetic construct
  source 1..10: note = Seed: ATTAYANSVF
AWTAYANSVW

SEQ ID NO: 14324 - protein, 10 aa, synthetic construct
  source 1..10: note = Seed: AGTDLEGNFY
AWTDLEGNFY

SEQ ID NO: 14325 - protein, 10 aa, synthetic construct
  source 1..10: note = Seed: ATTRQVVNVV
AWTRQVVNVK

SEQ ID NO: 14326 - protein, 10 aa, synthetic construct
  source 1..10: note = Seed: ATVAYFNMVY
AWVAYFNMVK

SEQ ID NO: 14327 - protein, 10 aa, synthetic construct
  source 1..10: note = Seed: ATVAYFNMVY
AWVAYFNMVR

SEQ ID NO: 14328 - protein, 10 aa, synthetic construct
  source 1..10: note = Seed: ATVAYFNMVY
AWVAYFNMVY

SEQ ID NO: 14329 - protein, 10 aa, synthetic construct
  source 1..10: note = Seed: AFVNLKQLPF
AWVNLKQLPF

SEQ ID NO: 14330 - protein, 9 aa, synthetic construct
  source 1..9: note = Seed: AMVRMYIFF
AWVRMYIFF

SEQ ID NO: 14331 - protein, 10 aa, synthetic construct
  source 1..10: note = Seed: AMVRMYIFFA
AWVRMYIFFK

SEQ ID NO: 14332 - protein, 9 aa, synthetic construct
  source 1..9: note = Seed: AMVRMYIFF
AWVRMYIFW

SEQ ID NO: 14333 - protein, 10 aa, synthetic construct
  source 1..10: note = Seed: AEWFLAYILF
AWWFLAYILF

SEQ ID NO: 14334 - protein, 9 aa, synthetic construct
  source 1..9: note = Seed: AYYFMRFRR
AWYFMRFRK

SEQ ID NO: 14335 - protein, 9 aa, synthetic construct
  source 1..9: note = Seed: AYYFMRFRR
AWYFMRFRR

SEQ ID NO: 14336 - protein, 9 aa, synthetic construct
  source 1..9: note = Seed: AMYTPHTVL
AWYTPHTVF

SEQ ID NO: 14337 - protein, 9 aa, synthetic construct
  source 1..9: note = Seed: AMYTPHTVL
AWYTPHTVL

SEQ ID NO: 14338 - protein, 9 aa, synthetic construct
  source 1..9: note = Seed: AMYTPHTVL
AWYTPHTVM

SEQ ID NO: 14339 - protein, 9 aa, synthetic construct
  source 1..9: note = Seed: AMYTPHTVL
AWYTPHTVY

SEQ ID NO: 14340 - protein, 10 aa, synthetic construct
  source 1..10: note = Seed: AKYTQLCQYL
AWYTQLCQYF

SEQ ID NO: 14341 - protein, 10 aa, synthetic construct
  source 1..10: note = Seed: AKYTQLCQYL
AWYTQLCQYW

SEQ ID NO: 14342 - protein, 10 aa, synthetic construct
  source 1..10: note = Seed: AYYVGYLQPR
AWYVGYLQPR

SEQ ID NO: 14343 - protein, 10 aa, synthetic construct
  source 1..10: note = Seed: AFAMMFVKHK
AYAMMFVKHR

SEQ ID NO: 14344 - protein, 9 aa, synthetic construct
  source 1..9: note = Seed: AYANSVFNI
AYANSVFNF

SEQ ID NO: 14345 - protein, 9 aa, synthetic construct
  source 1..9: note = Seed: AYANSVFNI
AYANSVFNL

SEQ ID NO: 14346 - protein, 9 aa, synthetic construct
  source 1..9: note = Seed: AYANSVFNI
AYANSVFNM

SEQ ID NO: 14347 - protein, 9 aa, synthetic construct
  source 1..9: note = Seed: AYANSVFNI
AYANSVFNV

SEQ ID NO: 14348 - protein, 9 aa, synthetic construct
  source 1..9: note = Seed: AYANSVFNI
AYANSVFNW

SEQ ID NO: 14349 - protein, 9 aa, synthetic construct
  source 1..9: note = Seed: AYANSVFNI
AYANSVFNY

SEQ ID NO: 14350 - protein, 10 aa, synthetic construct
  source 1..10: note = Seed: AFAVDAAKAY
AYAVDAAKAM

SEQ ID NO: 14351 - protein, 9 aa, synthetic construct
  source 1..9: note = Seed: AYCCNIVNV
AYCCNIVNF

SEQ ID NO: 14352 - protein, 9 aa, synthetic construct
  source 1..9: note = Seed: AYCCNIVNV
AYCCNIVNI

SEQ ID NO: 14353 - protein, 9 aa, synthetic construct
  source 1..9: note = Seed: AYCCNIVNV
AYCCNIVNL

SEQ ID NO: 14354 - protein, 9 aa, synthetic construct
  source 1..9: note = Seed: AYCCNIVNV
AYCCNIVNM

SEQ ID NO: 14355 - protein, 11 aa, synthetic construct
  source 1..11: note = Seed: AYCCNIVNVSL
AYCCNIVNVSF

SEQ ID NO: 14356 - protein, 9 aa, synthetic construct
  source 1..9: note = Seed: AYCCNIVNV
AYCCNIVNW

SEQ ID NO: 14357 - protein, 9 aa, synthetic construct
  source 1..9: note = Seed: ALCTFLLNK
AYCTFLLNR

SEQ ID NO: 14358 - protein, 9 aa, synthetic construct
  source 1..9: note = Seed: AVDAAKAYK
AYDAAKAYR

SEQ ID NO: 14359 - protein, 10 aa, synthetic construct
  source 1..10: note = Seed: AGEAANFCAL
AYEAANFCAA

SEQ ID NO: 14360 - protein, 10 aa, synthetic construct
  source 1..10: note = Seed: AGEAANFCAL
AYEAANFCAF

SEQ ID NO: 14361 - protein, 10 aa, synthetic construct
  source 1..10: note = Seed: AGEAANFCAL
AYEAANFCAL

SEQ ID NO: 14362 - protein, 10 aa, synthetic construct
  source 1..10: note = Seed: AGEAANFCAL
AYEAANFCAW

SEQ ID NO: 14363 - protein, 9 aa, synthetic construct
  source 1..9: note = Seed: AFEKMVSLL
AYEKMVSLF

SEQ ID NO: 14364 - protein, 9 aa, synthetic construct
  source 1..9: note = Seed: AFEKMVSLL
AYEKMVSLI

SEQ ID NO: 14365 - protein, 9 aa, synthetic construct
  source 1..9: note = Seed: AFEKMVSLL
AYEKMVSLL

SEQ ID NO: 14366 - protein, 9 aa, synthetic construct
  source 1..9: note = Seed: AFEKMVSLL
AYEKMVSLM

SEQ ID NO: 14367 - protein, 9 aa, synthetic construct
  source 1..9: note = Seed: AFEKMVSLL
AYEKMVSLW

SEQ ID NO: 14368 - protein, 10 aa, synthetic construct
  source 1..10: note = Seed: AQFAPSASAF
AYFAPSASAF

SEQ ID NO: 14369 - protein, 10 aa, synthetic construct
  source 1..10: note = Seed: AQFAPSASAF
AYFAPSASAI

SEQ ID NO: 14370 - protein, 10 aa, synthetic construct
  source 1..10: note = Seed: AQFAPSASAF
AYFAPSASAL

SEQ ID NO: 14371 - protein, 10 aa, synthetic construct
  source 1..10: note = Seed: AQFAPSASAF
AYFAPSASAM

SEQ ID NO: 14372 - protein, 10 aa, synthetic construct
  source 1..10: note = Seed: AQFAPSASAF
AYFAPSASAW

SEQ ID NO: 14373 - protein, 10 aa, synthetic construct
  source 1..10: note = Seed: AQFAPSASAF
AYFAPSASAY

SEQ ID NO: 14374 - protein, 9 aa, synthetic construct
  source 1..9: note = Seed: AQFAPSASA
AYFAPSASF

SEQ ID NO: 14375 - protein, 9 aa, synthetic construct
  source 1..9: note = Seed: AQFAPSASA
AYFAPSASM

SEQ ID NO: 14376 - protein, 9 aa, synthetic construct
  source 1..9: note = Seed: AQFAPSASA
AYFAPSASY

SEQ ID NO: 14377 - protein, 8 aa, synthetic construct
  source 1..8: note = Seed: AYFNMVYM
AYFNMVYF

SEQ ID NO: 14378 - protein, 10 aa, synthetic construct
  source 1..10: note = Seed: AYFNMVYMPA
AYFNMVYMPK

SEQ ID NO: 14379 - protein, 10 aa, synthetic construct
  source 1..10: note = Seed: AGFPFNKWGK
AYFPFNKWGK

SEQ ID NO: 14380 - protein, 10 aa, synthetic construct
  source 1..10: note = Seed: AGFPFNKWGK
AYFPFNKWGR

SEQ ID NO: 14381 - protein, 8 aa, synthetic construct
  source 1..8: note = Seed: ASFRLFAR
AYFRLFAR

SEQ ID NO: 14382 - protein, 10 aa, synthetic construct
  source 1..10: note = Seed: ASFRLFARTR
AYFRLFARTK

SEQ ID NO: 14383 - protein, 10 aa, synthetic construct
  source 1..10: note = Seed: ASFRLFARTR
AYFRLFARTR

SEQ ID NO: 14384 - protein, 9 aa, synthetic construct
  source 1..9: note = Seed: AGFSLWVYK
AYFSLWVYK

SEQ ID NO: 14385 - protein, 9 aa, synthetic construct
  source 1..9: note = Seed: AGFSLWVYK
AYFSLWVYR

SEQ ID NO: 14386 - protein, 10 aa, synthetic construct
  source 1..10: note = Seed: ASFYYVWKSY
AYFYYVWKSY

SEQ ID NO: 14387 - protein, 9 aa, synthetic construct
  source 1..9: note = Seed: AFGGCVFSY
AYGGCVFSM

SEQ ID NO: 14388 - protein, 9 aa, synthetic construct
  source 1..9: note = Seed: AFGGCVFSY
AYGGCVFSY

SEQ ID NO: 14389 - protein, 9 aa, synthetic construct
  source 1..9: note = Seed: ANGQVFGLY
AYGQVFGLY

SEQ ID NO: 14390 - protein, 10 aa, synthetic construct
  source 1..10: note = Seed: ANGQVFGLYK
AYGQVFGLYR

SEQ ID NO: 14391 - protein, 10 aa, synthetic construct
  source 1..10: note = Seed: ALIISVTSNY
AYIISVTSNK

SEQ ID NO: 14392 - protein, 10 aa, synthetic construct
  source 1..10: note = Seed: AYILFTRFFY
AYILFTRFFF

SEQ ID NO: 14393 - protein, 10 aa, synthetic construct
  source 1..10: note = Seed: AYILFTRFFY
AYILFTRFFI

SEQ ID NO: 14394 - protein, 10 aa, synthetic construct
  source 1..10: note = Seed: AYILFTRFFY
AYILFTRFFK

SEQ ID NO: 14395 - protein, 10 aa, synthetic construct
  source 1..10: note = Seed: AYILFTRFFY
AYILFTRFFL

SEQ ID NO: 14396 - protein, 10 aa, synthetic construct
  source 1..10: note = Seed: AYILFTRFFY
AYILFTRFFM

SEQ ID NO: 14397 - protein, 10 aa, synthetic construct
  source 1..10: note = Seed: AYILFTRFFY
AYILFTRFFR

SEQ ID NO: 14398 - protein, 10 aa, synthetic construct
  source 1..10: note = Seed: AYILFTRFFY
AYILFTRFFW

SEQ ID NO: 14399 - protein, 11 aa, synthetic construct
  source 1..11: note = Seed: AYILFTRFFYV
AYILFTRFFYA

SEQ ID NO: 14400 - protein, 11 aa, synthetic construct
  source 1..11: note = Seed: AYILFTRFFYV
AYILFTRFFYF

SEQ ID NO: 14401 - protein, 11 aa, synthetic construct
  source 1..11: note = Seed: AYILFTRFFYV
AYILFTRFFYI

SEQ ID NO: 14402 - protein, 11 aa, synthetic construct
  source 1..11: note = Seed: AYILFTRFFYV
AYILFTRFFYL

SEQ ID NO: 14403 - protein, 11 aa, synthetic construct
  source 1..11: note = Seed: AYILFTRFFYV
AYILFTRFFYW

SEQ ID NO: 14404 - protein, 9 aa, synthetic construct
  source 1..9: note = Seed: AYILFTRFF
AYILFTRFI

SEQ ID NO: 14405 - protein, 9 aa, synthetic construct
  source 1..9: note = Seed: AYILFTRFF
AYILFTRFL

SEQ ID NO: 14406 - protein, 9 aa, synthetic construct
  source 1..9: note = Seed: AYILFTRFF
AYILFTRFM

SEQ ID NO: 14407 - protein, 9 aa, synthetic construct
  source 1..9: note = Seed: AYILFTRFF
AYILFTRFW

SEQ ID NO: 14408 - protein, 9 aa, synthetic construct
  source 1..9: note = Seed: AYILFTRFF
AYILFTRFY

SEQ ID NO: 14409 - protein, 10 aa, synthetic construct
  source 1..10: note = Seed: AAKKNNLPFK
AYKKNNLPFK

SEQ ID NO: 14410 - protein, 9 aa, synthetic construct
  source 1..9: note = Seed: AKKNNLPFK
AYKNNLPFA

SEQ ID NO: 14411 - protein, 9 aa, synthetic construct
  source 1..9: note = Seed: AKKNNLPFK
AYKNNLPFK

SEQ ID NO: 14412 - protein, 10 aa, synthetic construct
  source 1..10: note = Seed: AALALLLLDR
AYLALLLLDR

SEQ ID NO: 14413 - protein, 10 aa, synthetic construct
  source 1..10: note = Seed: AALCTFLLNK
AYLCTFLLNK

SEQ ID NO: 14414 - protein, 10 aa, synthetic construct
  source 1..10: note = Seed: AALCTFLLNK
AYLCTFLLNR

SEQ ID NO: 14415 - protein, 9 aa, synthetic construct
  source 1..9: note = Seed: AFLIGCNYL
AYLIGCNYF

SEQ ID NO: 14416 - protein, 9 aa, synthetic construct
  source 1..9: note = Seed: AFLIGCNYL
AYLIGCNYI

SEQ ID NO: 14417 - protein, 9 aa, synthetic construct
  source 1..9: note = Seed: AFLIGCNYL
AYLIGCNYL

SEQ ID NO: 14418 - protein, 9 aa, synthetic construct
  source 1..9: note = Seed: AFLIGCNYL
AYLIGCNYM

SEQ ID NO: 14419 - protein, 9 aa, synthetic construct
  source 1..9: note = Seed: AFLIGCNYL
AYLIGCNYW

SEQ ID NO: 14420 - protein, 10 aa, synthetic construct
  source 1..10: note = Seed: ASLINTLNDL
AYLINTLNDI

SEQ ID NO: 14421 - protein, 10 aa, synthetic construct
  source 1..10: note = Seed: ASLINTLNDL
AYLINTLNDL

SEQ ID NO: 14422 - protein, 10 aa, synthetic construct
  source 1..10: note = Seed: ASLINTLNDL
AYLINTLNDV

SEQ ID NO: 14423 - protein, 11 aa, synthetic construct
  source 1..11: note = Seed: AALQIPFAMQM
AYLQIPFAMQF

SEQ ID NO: 14424 - protein, 11 aa, synthetic construct
  source 1..11: note = Seed: AALQIPFAMQM
AYLQIPFAMQY

SEQ ID NO: 14425 - protein, 9 aa, synthetic construct
  source 1..9: note = Seed: AVLQSGFRK
AYLQSGFRR

SEQ ID NO: 14426 - protein, 10 aa, synthetic construct
  source 1..10: note = Seed: APLVGTPVCI
AYLVGTPVCV

SEQ ID NO: 14427 - protein, 9 aa, synthetic construct
  source 1..9: note = Seed: AMMFVKHKH
AYMFVKHKK

SEQ ID NO: 14428 - protein, 9 aa, synthetic construct
  source 1..9: note = Seed: AMMFVKHKH
AYMFVKHKR

SEQ ID NO: 14429 - protein, 11 aa, synthetic construct
  source 1..11: note = Seed: AKNLNESLIDL
AYNLNESLIDV

SEQ ID NO: 14430 - protein, 10 aa, synthetic construct
  source 1..10: note = Seed: ALNNIINNAR
AYNNIINNAR

SEQ ID NO: 14431 - protein, 10 aa, synthetic construct
  source 1..10: note = Seed: AQNSVRVLQK
AYNSVRVLQR

SEQ ID NO: 14432 - protein, 10 aa, synthetic construct
  source 1..10: note = Seed: AIPTNFTISV
AYPTNFTISL

SEQ ID NO: 14433 - protein, 10 aa, synthetic construct
  source 1..10: note = Seed: AIPTNFTISV
AYPTNFTISM

SEQ ID NO: 14434 - protein, 10 aa, synthetic construct
  source 1..10: note = Seed: ADQAMTQMYK
AYQAMTQMYK

SEQ ID NO: 14435 - protein, 10 aa, synthetic construct
  source 1..10: note = Seed: ADQAMTQMYK
AYQAMTQMYR

SEQ ID NO: 14436 - protein, 10 aa, synthetic construct
  source 1..10: note = Seed: ALQDAYYRAR
AYQDAYYRAR

SEQ ID NO: 14437 - protein, 10 aa, synthetic construct
  source 1..10: note = Seed: ALQIPFAMQM
AYQIPFAMQF

SEQ ID NO: 14438 - protein, 10 aa, synthetic construct
  source 1..10: note = Seed: ALQIPFAMQM
AYQIPFAMQI

SEQ ID NO: 14439 - protein, 10 aa, synthetic construct
  source 1..10: note = Seed: ALQIPFAMQM
AYQIPFAMQM

SEQ ID NO: 14440 - protein, 10 aa, synthetic construct
  source 1..10: note = Seed: ALQIPFAMQM
AYQIPFAMQV

SEQ ID NO: 14441 - protein, 10 aa, synthetic construct
  source 1..10: note = Seed: ALQIPFAMQM
AYQIPFAMQY

SEQ ID NO: 14442 - protein, 9 aa, synthetic construct
  source 1..9: note = Seed: AFQLTPIAV
AYQLTPIAF

SEQ ID NO: 14443 - protein, 9 aa, synthetic construct
  source 1..9: note = Seed: AFQLTPIAV
AYQLTPIAI

SEQ ID NO: 14444 - protein, 9 aa, synthetic construct
  source 1..9: note = Seed: AFQLTPIAV
AYQLTPIAL

SEQ ID NO: 14445 - protein, 9 aa, synthetic construct
  source 1..9: note = Seed: AFQLTPIAV
AYQLTPIAM

SEQ ID NO: 14446 - protein, 9 aa, synthetic construct
  source 1..9: note = Seed: AFQLTPIAV
AYQLTPIAV

SEQ ID NO: 14447 - protein, 9 aa, synthetic construct
  source 1..9: note = Seed: AFQLTPIAV
AYQLTPIAY

SEQ ID NO: 14448 - protein, 8 aa, synthetic construct
  source 1..8: note = Seed: AWQPGVAM
AYQPGVAF

SEQ ID NO: 14449 - protein, 8 aa, synthetic construct
  source 1..8: note = Seed: AWQPGVAM
AYQPGVAL

SEQ ID NO: 14450 - protein, 8 aa, synthetic construct
  source 1..8: note = Seed: AWQPGVAM
AYQPGVAM

SEQ ID NO: 14451 - protein, 8 aa, synthetic construct
  source 1..8: note = Seed: AWQPGVAM
AYQPGVAY

SEQ ID NO: 14452 - protein, 10 aa, synthetic construct
  source 1..10: note = Seed: AFQTVKPGNF
AYQTVKPGNF

SEQ ID NO: 14453 - protein, 9 aa, synthetic construct
  source 1..9: note = Seed: ALRANSAVK
AYRANSAVK

SEQ ID NO: 14454 - protein, 9 aa, synthetic construct
  source 1..9: note = Seed: ATREAVGTN
AYREAVGTK

SEQ ID NO: 14455 - protein, 10 aa, synthetic construct
  source 1..10: note = Seed: ATREAVGTNL
AYREAVGTNK

SEQ ID NO: 14456 - protein, 9 aa, synthetic construct
  source 1..9: note = Seed: ATRFASVYA
AYRFASVYA

SEQ ID NO: 14457 - protein, 9 aa, synthetic construct
  source 1..9: note = Seed: ATRFASVYA
AYRFASVYG

SEQ ID NO: 14458 - protein, 9 aa, synthetic construct
  source 1..9: note = Seed: ATRFASVYA
AYRFASVYI

SEQ ID NO: 14459 - protein, 9 aa, synthetic construct
  source 1..9: note = Seed: ATRFASVYA
AYRFASVYK

SEQ ID NO: 14460 - protein, 9 aa, synthetic construct
  source 1..9: note = Seed: ATRFASVYA
AYRFASVYL

SEQ ID NO: 14461 - protein, 9 aa, synthetic construct
  source 1..9: note = Seed: ATRFASVYA
AYRFASVYM

SEQ ID NO: 14462 - protein, 9 aa, synthetic construct
  source 1..9: note = Seed: ATRFASVYA
AYRFASVYR

SEQ ID NO: 14463 - protein, 9 aa, synthetic construct
  source 1..9: note = Seed: ATRFASVYA
AYRFASVYS

SEQ ID NO: 14464 - protein, 9 aa, synthetic construct
  source 1..9: note = Seed: ATRFASVYA
AYRFASVYV

SEQ ID NO: 14465 - protein, 9 aa, synthetic construct
  source 1..9: note = Seed: AYRFNGIGV
AYRFNGIGF

SEQ ID NO: 14466 - protein, 9 aa, synthetic construct
  source 1..9: note = Seed: AYRFNGIGV
AYRFNGIGK

SEQ ID NO: 14467 - protein, 9 aa, synthetic construct
  source 1..9: note = Seed: AYRFNGIGV
AYRFNGIGL

SEQ ID NO: 14468 - protein, 9 aa, synthetic construct
  source 1..9: note = Seed: AYRFNGIGV
AYRFNGIGM

SEQ ID NO: 14469 - protein, 9 aa, synthetic construct
  source 1..9: note = Seed: AYRFNGIGV
AYRFNGIGY

SEQ ID NO: 14470 - protein, 9 aa, synthetic construct
  source 1..9: note = Seed: AWRKAVFIS
AYRKAVFIA

SEQ ID NO: 14471 - protein, 9 aa, synthetic construct
  source 1..9: note = Seed: AWRKAVFIS
AYRKAVFIK

SEQ ID NO: 14472 - protein, 10 aa, synthetic construct
  source 1..10: note = Seed: AMRNAGIVGV
AYRNAGIVGK

SEQ ID NO: 14473 - protein, 9 aa, synthetic construct
  source 1..9: note = Seed: AMRNAGIVG
AYRNAGIVK

SEQ ID NO: 14474 - protein, 9 aa, synthetic construct
  source 1..9: note = Seed: AARQGFVDS
AYRQGFVDK

SEQ ID NO: 14475 - protein, 9 aa, synthetic construct
  source 1..9: note = Seed: AMSAFAMMF
AYSAFAMMF

SEQ ID NO: 14476 - protein, 10 aa, synthetic construct
  source 1..10: note = Seed: AMSAFAMMFV
AYSAFAMMFV

SEQ ID NO: 14477 - protein, 11 aa, synthetic construct
  source 1..11: note = Seed: AMSAFAMMFVK
AYSAFAMMFVR

SEQ ID NO: 14478 - protein, 9 aa, synthetic construct
  source 1..9: note = Seed: AMSAFAMMF
AYSAFAMMI

SEQ ID NO: 14479 - protein, 9 aa, synthetic construct
  source 1..9: note = Seed: AMSAFAMMF
AYSAFAMML

SEQ ID NO: 14480 - protein, 9 aa, synthetic construct
  source 1..9: note = Seed: AMSAFAMMF
AYSAFAMMM

SEQ ID NO: 14481 - protein, 9 aa, synthetic construct
  source 1..9: note = Seed: AMSAFAMMF
AYSAFAMMW

SEQ ID NO: 14482 - protein, 9 aa, synthetic construct
  source 1..9: note = Seed: AMSAFAMMF
AYSAFAMMY

SEQ ID NO: 14483 - protein, 10 aa, synthetic construct
  source 1..10: note = Seed: APSASAFFGM
AYSASAFFGW

SEQ ID NO: 14484 - protein, 11 aa, synthetic construct
  source 1..11: note = Seed: AYSRYRIGNYK
AYSRYRIGNYR

SEQ ID NO: 14485 - protein, 10 aa, synthetic construct
  source 1..10: note = Seed: AVTANVNALL
AYTANVNALI

SEQ ID NO: 14486 - protein, 10 aa, synthetic construct
  source 1..10: note = Seed: AVTANVNALL
AYTANVNALL

SEQ ID NO: 14487 - protein, 10 aa, synthetic construct
  source 1..10: note = Seed: AVTANVNALL
AYTANVNALV

SEQ ID NO: 14488 - protein, 10 aa, synthetic construct
  source 1..10: note = Seed: ATTAYANSVF
AYTAYANSVF

SEQ ID NO: 14489 - protein, 10 aa, synthetic construct
  source 1..10: note = Seed: ATTAYANSVF
AYTAYANSVW

SEQ ID NO: 14490 - protein, 10 aa, synthetic construct
  source 1..10: note = Seed: AGTDLEGNFY
AYTDLEGNFY

SEQ ID NO: 14491 - protein, 10 aa, synthetic construct
  source 1..10: note = Seed: ATTRQVVNVV
AYTRQVVNVK

SEQ ID NO: 14492 - protein, 10 aa, synthetic construct
  source 1..10: note = Seed: ASTSAFVETV
AYTSAFVETV

SEQ ID NO: 14493 - protein, 10 aa, synthetic construct
  source 1..10: note = Seed: ATVAYFNMVY
AYVAYFNMVK

SEQ ID NO: 14494 - protein, 10 aa, synthetic construct
  source 1..10: note = Seed: ATVAYFNMVY
AYVAYFNMVR

SEQ ID NO: 14495 - protein, 10 aa, synthetic construct
  source 1..10: note = Seed: ATVAYFNMVY
AYVAYFNMVY

SEQ ID NO: 14496 - protein, 9 aa, synthetic construct
  source 1..9: note = Seed: AFVETVKGL
AYVETVKGF

SEQ ID NO: 14497 - protein, 9 aa, synthetic construct
  source 1..9: note = Seed: AFVETVKGL
AYVETVKGL

SEQ ID NO: 14498 - protein, 9 aa, synthetic construct
  source 1..9: note = Seed: AFVETVKGL
AYVETVKGM

SEQ ID NO: 14499 - protein, 9 aa, synthetic construct
  source 1..9: note = Seed: AFVETVKGL
AYVETVKGY

SEQ ID NO: 14500 - protein, 10 aa, synthetic construct
  source 1..10: note = Seed: AFVNLKQLPF
AYVNLKQLPF

SEQ ID NO: 14501 - protein, 11 aa, synthetic construct
  source 1..11: note = Seed: AFVNLKQLPFF
AYVNLKQLPFF

SEQ ID NO: 14502 - protein, 10 aa, synthetic construct
  source 1..10: note = Seed: AFVNLKQLPF
AYVNLKQLPW

SEQ ID NO: 14503 - protein, 9 aa, synthetic construct
  source 1..9: note = Seed: AMVRMYIFF
AYVRMYIFF

SEQ ID NO: 14504 - protein, 10 aa, synthetic construct
  source 1..10: note = Seed: AMVRMYIFFA
AYVRMYIFFK

SEQ ID NO: 14505 - protein, 9 aa, synthetic construct
  source 1..9: note = Seed: AMVRMYIFF
AYVRMYIFI

SEQ ID NO: 14506 - protein, 9 aa, synthetic construct
  source 1..9: note = Seed: AMVRMYIFF
AYVRMYIFL

SEQ ID NO: 14507 - protein, 9 aa, synthetic construct
  source 1..9: note = Seed: AMVRMYIFF
AYVRMYIFM

SEQ ID NO: 14508 - protein, 9 aa, synthetic construct
  source 1..9: note = Seed: AMVRMYIFF
AYVRMYIFW

SEQ ID NO: 14509 - protein, 10 aa, synthetic construct
  source 1..10: note = Seed: AEWFLAYILF
AYWFLAYILF

SEQ ID NO: 14510 - protein, 10 aa, synthetic construct
  source 1..10: note = Seed: AEWFLAYILF
AYWFLAYILL

SEQ ID NO: 14511 - protein, 10 aa, synthetic construct
  source 1..10: note = Seed: AEWFLAYILF
AYWFLAYILW

SEQ ID NO: 14512 - protein, 9 aa, synthetic construct
  source 1..9: note = Seed: AYYFMRFRR
AYYFMRFRK

SEQ ID NO: 14513 - protein, 9 aa, synthetic construct
  source 1..9: note = Seed: AWYTERSEK
AYYTERSER

SEQ ID NO: 14514 - protein, 9 aa, synthetic construct
  source 1..9: note = Seed: AMYTPHTVL
AYYTPHTVF

SEQ ID NO: 14515 - protein, 9 aa, synthetic construct
  source 1..9: note = Seed: AMYTPHTVL
AYYTPHTVI

SEQ ID NO: 14516 - protein, 9 aa, synthetic construct
  source 1..9: note = Seed: AMYTPHTVL
AYYTPHTVL

SEQ ID NO: 14517 - protein, 9 aa, synthetic construct
  source 1..9: note = Seed: AMYTPHTVL
AYYTPHTVM

SEQ ID NO: 14518 - protein, 9 aa, synthetic construct
  source 1..9: note = Seed: AMYTPHTVL
AYYTPHTVV

SEQ ID NO: 14519 - protein, 9 aa, synthetic construct
  source 1..9: note = Seed: AMYTPHTVL
AYYTPHTVW

SEQ ID NO: 14520 - protein, 9 aa, synthetic construct
  source 1..9: note = Seed: AMYTPHTVL
AYYTPHTVY

SEQ ID NO: 14521 - protein, 10 aa, synthetic construct
  source 1..10: note = Seed: AKYTQLCQYL
AYYTQLCQYF

SEQ ID NO: 14522 - protein, 10 aa, synthetic construct
  source 1..10: note = Seed: AKYTQLCQYL
AYYTQLCQYI

SEQ ID NO: 14523 - protein, 10 aa, synthetic construct
  source 1..10: note = Seed: AKYTQLCQYL
AYYTQLCQYL

SEQ ID NO: 14524 - protein, 10 aa, synthetic construct
  source 1..10: note = Seed: AKYTQLCQYL
AYYTQLCQYM

SEQ ID NO: 14525 - protein, 10 aa, synthetic construct
  source 1..10: note = Seed: AKYTQLCQYL
AYYTQLCQYW

SEQ ID NO: 14526 - protein, 9 aa, synthetic construct
  source 1..9: note = Seed: CPAEIVDTV
CAAEIVDTF

SEQ ID NO: 14527 - protein, 9 aa, synthetic construct
  source 1..9: note = Seed: CPAEIVDTV
CAAEIVDTI

SEQ ID NO: 14528 - protein, 9 aa, synthetic construct
  source 1..9: note = Seed: CPAEIVDTV
CAAEIVDTM

SEQ ID NO: 14529 - protein, 9 aa, synthetic construct
  source 1..9: note = Seed: CPAEIVDTV
CAAEIVDTV

SEQ ID NO: 14530 - protein, 9 aa, synthetic construct
  source 1..9: note = Seed: CPAEIVDTV
CAAEIVDTW

SEQ ID NO: 14531 - protein, 9 aa, synthetic construct
  source 1..9: note = Seed: CPAEIVDTV
CAAEIVDTY

SEQ ID NO: 14532 - protein, 10 aa, synthetic construct
  source 1..10: note = Seed: CLAYYFMRFR
CAAYYFMRFK

SEQ ID NO: 14533 - protein, 10 aa, synthetic construct
  source 1..10: note = Seed: CLAYYFMRFR
CAAYYFMRFR

SEQ ID NO: 14534 - protein, 9 aa, synthetic construct
  source 1..9: note = Seed: CLAYYFMRF
CAAYYFMRY

SEQ ID NO: 14535 - protein, 9 aa, synthetic construct
  source 1..9: note = Seed: CAFAVDAAK
CAFAVDAAR

SEQ ID NO: 14536 - protein, 10 aa, synthetic construct
  source 1..10: note = Seed: CTFEYVSQPF
CAFEYVSQPF

SEQ ID NO: 14537 - protein, 10 aa, synthetic construct
  source 1..10: note = Seed: CTFEYVSQPF
CAFEYVSQPM

SEQ ID NO: 14538 - protein, 10 aa, synthetic construct
  source 1..10: note = Seed: CTFEYVSQPF
CAFEYVSQPW

SEQ ID NO: 14539 - protein, 10 aa, synthetic construct
  source 1..10: note = Seed: CTFEYVSQPF
CAFEYVSQPY

SEQ ID NO: 14540 - protein, 9 aa, synthetic construct
  source 1..9: note = Seed: CSFGGVSVI
CAFGGVSVF

SEQ ID NO: 14541 - protein, 9 aa, synthetic construct
  source 1..9: note = Seed: CSFGGVSVI
CAFGGVSVI

SEQ ID NO: 14542 - protein, 9 aa, synthetic construct
  source 1..9: note = Seed: CSFGGVSVI
CAFGGVSVL

SEQ ID NO: 14543 - protein, 9 aa, synthetic construct
  source 1..9: note = Seed: CSFGGVSVI
CAFGGVSVM

SEQ ID NO: 14544 - protein, 9 aa, synthetic construct
  source 1..9: note = Seed: CSFGGVSVI
CAFGGVSVV

SEQ ID NO: 14545 - protein, 9 aa, synthetic construct
  source 1..9: note = Seed: CSFGGVSVI
CAFGGVSVW

SEQ ID NO: 14546 - protein, 9 aa, synthetic construct
  source 1..9: note = Seed: CSFGGVSVI
CAFGGVSVY

SEQ ID NO: 14547 - protein, 9 aa, synthetic construct
  source 1..9: note = Seed: CTFLLNKEM
CAFLLNKEF

SEQ ID NO: 14548 - protein, 11 aa, synthetic construct
  source 1..11: note = Seed: CTFLLNKEMYL
CAFLLNKEMYV

SEQ ID NO: 14549 - protein, 9 aa, synthetic construct
  source 1..9: note = Seed: CTFLLNKEM
CAFLLNKEY

SEQ ID NO: 14550 - protein, 10 aa, synthetic construct
  source 1..10: note = Seed: CLFWNCNVDR
CAFWNCNVDR

SEQ ID NO: 14551 - protein, 10 aa, synthetic construct
  source 1..10: note = Seed: CSFYEDFLEY
CAFYEDFLEW

SEQ ID NO: 14552 - protein, 10 aa, synthetic construct
  source 1..10: note = Seed: CSFYEDFLEY
CAFYEDFLEY

SEQ ID NO: 14553 - protein, 10 aa, synthetic construct
  source 1..10: note = Seed: CTIFKDASGK
CAIFKDASGR

SEQ ID NO: 14554 - protein, 10 aa, synthetic construct
  source 1..10: note = Seed: CPLIAAVITR
CALIAAVITR

SEQ ID NO: 14555 - protein, 9 aa, synthetic construct
  source 1..9: note = Seed: CMMCYKRNR
CAMCYKRNR

SEQ ID NO: 14556 - protein, 9 aa, synthetic construct
  source 1..9: note = Seed: CVMYASAVV
CAMYASAVF

SEQ ID NO: 14557 - protein, 9 aa, synthetic construct
  source 1..9: note = Seed: CVMYASAVV
CAMYASAVI

SEQ ID NO: 14558 - protein, 9 aa, synthetic construct
  source 1..9: note = Seed: CVMYASAVV
CAMYASAVL

SEQ ID NO: 14559 - protein, 9 aa, synthetic construct
  source 1..9: note = Seed: CVMYASAVV
CAMYASAVM

SEQ ID NO: 14560 - protein, 9 aa, synthetic construct
  source 1..9: note = Seed: CVMYASAVV
CAMYASAVV

SEQ ID NO: 14561 - protein, 10 aa, synthetic construct
  source 1..10: note = Seed: CVMYASAVVL
CAMYASAVVF

SEQ ID NO: 14562 - protein, 11 aa, synthetic construct
  source 1..11: note = Seed: CVMYASAVVLL
CAMYASAVVLF

SEQ ID NO: 14563 - protein, 10 aa, synthetic construct
  source 1..10: note = Seed: CVMYASAVVL
CAMYASAVVM

SEQ ID NO: 14564 - protein, 10 aa, synthetic construct
  source 1..10: note = Seed: CVMYASAVVL
CAMYASAVVV

SEQ ID NO: 14565 - protein, 10 aa, synthetic construct
  source 1..10: note = Seed: CVMYASAVVL
CAMYASAVVY

SEQ ID NO: 14566 - protein, 9 aa, synthetic construct
  source 1..9: note = Seed: CVMYASAVV
CAMYASAVY

SEQ ID NO: 14567 - protein, 9 aa, synthetic construct
  source 1..9: note = Seed: CVNFNFNGL
CANFNFNGV

SEQ ID NO: 14568 - protein, 9 aa, synthetic construct
  source 1..9: note = Seed: CANGQVFGL
CANGQVFGV

SEQ ID NO: 14569 - protein, 9 aa, synthetic construct
  source 1..9: note = Seed: CSTMTNRQF
CATMTNRQF

SEQ ID NO: 14570 - protein, 9 aa, synthetic construct
  source 1..9: note = Seed: CSTMTNRQF
CATMTNRQL

SEQ ID NO: 14571 - protein, 9 aa, synthetic construct
  source 1..9: note = Seed: CSTMTNRQF
CATMTNRQM

SEQ ID NO: 14572 - protein, 9 aa, synthetic construct
  source 1..9: note = Seed: CSTMTNRQF
CATMTNRQW

SEQ ID NO: 14573 - protein, 9 aa, synthetic construct
  source 1..9: note = Seed: CSTMTNRQF
CATMTNRQY

SEQ ID NO: 14574 - protein, 9 aa, synthetic construct
  source 1..9: note = Seed: CLTPVYSFL
CATPVYSFI

SEQ ID NO: 14575 - protein, 9 aa, synthetic construct
  source 1..9: note = Seed: CLTPVYSFL
CATPVYSFV

SEQ ID NO: 14576 - protein, 10 aa, synthetic construct
  source 1..10: note = Seed: CGTTTLNGLW
CATTTLNGLW

SEQ ID NO: 14577 - protein, 10 aa, synthetic construct
  source 1..10: note = Seed: CLAYYFMRFR
CCAYYFMRFR

SEQ ID NO: 14578 - protein, 11 aa, synthetic construct
  source 1..11: note = Seed: CTFLLNKEMYL
CCFLLNKEMYV

SEQ ID NO: 14579 - protein, 10 aa, synthetic construct
  source 1..10: note = Seed: CSFYEDFLEY
CCFYEDFLEY

SEQ ID NO: 14580 - protein, 10 aa, synthetic construct
  source 1..10: note = Seed: CVMYASAVVL
CCMYASAVVF

SEQ ID NO: 14581 - protein, 11 aa, synthetic construct
  source 1..11: note = Seed: CVMYASAVVLL
CCMYASAVVLF

SEQ ID NO: 14582 - protein, 10 aa, synthetic construct
  source 1..10: note = Seed: CVMYASAVVL
CCMYASAVVM

SEQ ID NO: 14583 - protein, 10 aa, synthetic construct
  source 1..10: note = Seed: CVMYASAVVL
CCMYASAVVY

SEQ ID NO: 14584 - protein, 9 aa, synthetic construct
  source 1..9: note = Seed: CVMYASAVV
CCMYASAVY

SEQ ID NO: 14585 - protein, 10 aa, synthetic construct
  source 1..10: note = Seed: CGTTTLNGLW
CCTTTLNGLW

SEQ ID NO: 14586 - protein, 10 aa, synthetic construct
  source 1..10: note = Seed: CLAYYFMRFR
CDAYYFMRFR

SEQ ID NO: 14587 - protein, 11 aa, synthetic construct
  source 1..11: note = Seed: CTFLLNKEMYL
CDFLLNKEMYV

SEQ ID NO: 14588 - protein, 10 aa, synthetic construct
  source 1..10: note = Seed: CSFYEDFLEY
CDFYEDFLEY

SEQ ID NO: 14589 - protein, 10 aa, synthetic construct
  source 1..10: note = Seed: CVMYASAVVL
CDMYASAVVF

SEQ ID NO: 14590 - protein, 11 aa, synthetic construct
  source 1..11: note = Seed: CVMYASAVVLL
CDMYASAVVLF

SEQ ID NO: 14591 - protein, 10 aa, synthetic construct
  source 1..10: note = Seed: CVMYASAVVL
CDMYASAVVM

SEQ ID NO: 14592 - protein, 10 aa, synthetic construct
  source 1..10: note = Seed: CVMYASAVVL
CDMYASAVVY

SEQ ID NO: 14593 - protein, 10 aa, synthetic construct
  source 1..10: note = Seed: CGTTTLNGLW
CDTTTLNGLW

SEQ ID NO: 14594 - protein, 10 aa, synthetic construct
  source 1..10: note = Seed: CLAYYFMRFR
CEAYYFMRFR

SEQ ID NO: 14595 - protein, 10 aa, synthetic construct
  source 1..10: note = Seed: CTFEYVSQPF
CEFEYVSQPF

SEQ ID NO: 14596 - protein, 10 aa, synthetic construct
  source 1..10: note = Seed: CTFEYVSQPF
CEFEYVSQPY

SEQ ID NO: 14597 - protein, 9 aa, synthetic construct
  source 1..9: note = Seed: CSFGGVSVI
CEFGGVSVF

SEQ ID NO: 14598 - protein, 9 aa, synthetic construct
  source 1..9: note = Seed: CSFGGVSVI
CEFGGVSVM

SEQ ID NO: 14599 - protein, 9 aa, synthetic construct
  source 1..9: note = Seed: CSFGGVSVI
CEFGGVSVY

SEQ ID NO: 14600 - protein, 11 aa, synthetic construct
  source 1..11: note = Seed: CTFLLNKEMYL
CEFLLNKEMYV

SEQ ID NO: 14601 - protein, 10 aa, synthetic construct
  source 1..10: note = Seed: CSFYEDFLEY
CEFYEDFLEY

SEQ ID NO: 14602 - protein, 10 aa, synthetic construct
  source 1..10: note = Seed: CVMYASAVVL
CEMYASAVVF

SEQ ID NO: 14603 - protein, 11 aa, synthetic construct
  source 1..11: note = Seed: CVMYASAVVLL
CEMYASAVVLF

SEQ ID NO: 14604 - protein, 10 aa, synthetic construct
  source 1..10: note = Seed: CVMYASAVVL
CEMYASAVVM

SEQ ID NO: 14605 - protein, 10 aa, synthetic construct
  source 1..10: note = Seed: CVMYASAVVL
CEMYASAVVY

SEQ ID NO: 14606 - protein, 9 aa, synthetic construct
  source 1..9: note = Seed: CVMYASAVV
CEMYASAVY

SEQ ID NO: 14607 - protein, 10 aa, synthetic construct
  source 1..10: note = Seed: CGTTTLNGLW
CETTTLNGLW

SEQ ID NO: 14608 - protein, 10 aa, synthetic construct
  source 1..10: note = Seed: CLAYYFMRFR
CFAYYFMRFK

SEQ ID NO: 14609 - protein, 10 aa, synthetic construct
  source 1..10: note = Seed: CLAYYFMRFR
CFAYYFMRFR

SEQ ID NO: 14610 - protein, 9 aa, synthetic construct
  source 1..9: note = Seed: CLAYYFMRF
CFAYYFMRY

SEQ ID NO: 14611 - protein, 9 aa, synthetic construct
  source 1..9: note = Seed: CAFAVDAAK
CFFAVDAAK

SEQ ID NO: 14612 - protein, 9 aa, synthetic construct
  source 1..9: note = Seed: CAFAVDAAK
CFFAVDAAR

SEQ ID NO: 14613 - protein, 9 aa, synthetic construct
  source 1..9: note = Seed: CSFGGVSVI
CFFGGVSVF

SEQ ID NO: 14614 - protein, 11 aa, synthetic construct
  source 1..11: note = Seed: CTFLLNKEMYL
CFFLLNKEMYV

SEQ ID NO: 14615 - protein, 10 aa, synthetic construct
  source 1..10: note = Seed: CLFWNCNVDR
CFFWNCNVDR

SEQ ID NO: 14616 - protein, 10 aa, synthetic construct
  source 1..10: note = Seed: CSFYEDFLEY
CFFYEDFLEY

SEQ ID NO: 14617 - protein, 9 aa, synthetic construct
  source 1..9: note = Seed: CYKRNRATR
CFKRNRATR

SEQ ID NO: 14618 - protein, 11 aa, synthetic construct
  source 1..11: note = Seed: CVLAAECTIFK
CFLAAECTIFR

SEQ ID NO: 14619 - protein, 10 aa, synthetic construct
  source 1..10: note = Seed: CILHCANFNV
CFLHCANFNL

SEQ ID NO: 14620 - protein, 10 aa, synthetic construct
  source 1..10: note = Seed: CILHCANFNV
CFLHCANFNV

SEQ ID NO: 14621 - protein, 10 aa, synthetic construct
  source 1..10: note = Seed: CPLIAAVITR
CFLIAAVITR

SEQ ID NO: 14622 - protein, 10 aa, synthetic construct
  source 1..10: note = Seed: CVLSGHNLAK
CFLSGHNLAR

SEQ ID NO: 14623 - protein, 9 aa, synthetic construct
  source 1..9: note = Seed: CMMCYKRNR
CFMCYKRNR

SEQ ID NO: 14624 - protein, 8 aa, synthetic construct
  source 1..8: note = Seed: CYMHHMEL
CFMHHMEF

SEQ ID NO: 14625 - protein, 8 aa, synthetic construct
  source 1..8: note = Seed: CYMHHMEL
CFMHHMEL

SEQ ID NO: 14626 - protein, 8 aa, synthetic construct
  source 1..8: note = Seed: CYMHHMEL
CFMHHMEM

SEQ ID NO: 14627 - protein, 10 aa, synthetic construct
  source 1..10: note = Seed: CVMYASAVVL
CFMYASAVVA

SEQ ID NO: 14628 - protein, 10 aa, synthetic construct
  source 1..10: note = Seed: CVMYASAVVL
CFMYASAVVF

SEQ ID NO: 14629 - protein, 10 aa, synthetic construct
  source 1..10: note = Seed: CVMYASAVVL
CFMYASAVVL

SEQ ID NO: 14630 - protein, 11 aa, synthetic construct
  source 1..11: note = Seed: CVMYASAVVLL
CFMYASAVVLF

SEQ ID NO: 14631 - protein, 11 aa, synthetic construct
  source 1..11: note = Seed: CVMYASAVVLL
CFMYASAVVLL

SEQ ID NO: 14632 - protein, 11 aa, synthetic construct
  source 1..11: note = Seed: CVMYASAVVLL
CFMYASAVVLV

SEQ ID NO: 14633 - protein, 10 aa, synthetic construct
  source 1..10: note = Seed: CVMYASAVVL
CFMYASAVVM

SEQ ID NO: 14634 - protein, 10 aa, synthetic construct
  source 1..10: note = Seed: CVMYASAVVL
CFMYASAVVV

SEQ ID NO: 14635 - protein, 10 aa, synthetic construct
  source 1..10: note = Seed: CVMYASAVVL
CFMYASAVVY

SEQ ID NO: 14636 - protein, 9 aa, synthetic construct
  source 1..9: note = Seed: CVMYASAVV
CFMYASAVY

SEQ ID NO: 14637 - protein, 10 aa, synthetic construct
  source 1..10: note = Seed: CANGQVFGLY
CFNGQVFGLY

SEQ ID NO: 14638 - protein, 11 aa, synthetic construct
  source 1..11: note = Seed: CANGQVFGLYK
CFNGQVFGLYR

SEQ ID NO: 14639 - protein, 10 aa, synthetic construct
  source 1..10: note = Seed: CIRRPFLCCK
CFRRPFLCCR

SEQ ID NO: 14640 - protein, 10 aa, synthetic construct
  source 1..10: note = Seed: CGTTTLNGLW
CFTTTLNGLW

SEQ ID NO: 14641 - protein, 10 aa, synthetic construct
  source 1..10: note = Seed: CLAYYFMRFR
CGAYYFMRFR

SEQ ID NO: 14642 - protein, 9 aa, synthetic construct
  source 1..9: note = Seed: CSFGGVSVI
CGFGGVSVF

SEQ ID NO: 14643 - protein, 9 aa, synthetic construct
  source 1..9: note = Seed: CSFGGVSVI
CGFGGVSVW

SEQ ID NO: 14644 - protein, 9 aa, synthetic construct
  source 1..9: note = Seed: CSFGGVSVI
CGFGGVSVY

SEQ ID NO: 14645 - protein, 11 aa, synthetic construct
  source 1..11: note = Seed: CTFLLNKEMYL
CGFLLNKEMYV

SEQ ID NO: 14646 - protein, 10 aa, synthetic construct
  source 1..10: note = Seed: CSFYEDFLEY
CGFYEDFLEW

SEQ ID NO: 14647 - protein, 10 aa, synthetic construct
  source 1..10: note = Seed: CSFYEDFLEY
CGFYEDFLEY

SEQ ID NO: 14648 - protein, 9 aa, synthetic construct
  source 1..9: note = Seed: CVMYASAVV
CGMYASAVF

SEQ ID NO: 14649 - protein, 10 aa, synthetic construct
  source 1..10: note = Seed: CVMYASAVVL
CGMYASAVVF

SEQ ID NO: 14650 - protein, 11 aa, synthetic construct
  source 1..11: note = Seed: CVMYASAVVLL
CGMYASAVVLF

SEQ ID NO: 14651 - protein, 10 aa, synthetic construct
  source 1..10: note = Seed: CVMYASAVVL
CGMYASAVVM

SEQ ID NO: 14652 - protein, 10 aa, synthetic construct
  source 1..10: note = Seed: CVMYASAVVL
CGMYASAVVY

SEQ ID NO: 14653 - protein, 9 aa, synthetic construct
  source 1..9: note = Seed: CVMYASAVV
CGMYASAVY

SEQ ID NO: 14654 - protein, 10 aa, synthetic construct
  source 1..10: note = Seed: CLAYYFMRFR
CHAYYFMRFR

SEQ ID NO: 14655 - protein, 9 aa, synthetic construct
  source 1..9: note = Seed: CLAYYFMRF
CHAYYFMRY

SEQ ID NO: 14656 - protein, 10 aa, synthetic construct
  source 1..10: note = Seed: CTFEYVSQPF
CHFEYVSQPF

SEQ ID NO: 14657 - protein, 10 aa, synthetic construct
  source 1..10: note = Seed: CTFEYVSQPF
CHFEYVSQPY

SEQ ID NO: 14658 - protein, 9 aa, synthetic construct
  source 1..9: note = Seed: CSFGGVSVI
CHFGGVSVF

SEQ ID NO: 14659 - protein, 9 aa, synthetic construct
  source 1..9: note = Seed: CSFGGVSVI
CHFGGVSVM

SEQ ID NO: 14660 - protein, 9 aa, synthetic construct
  source 1..9: note = Seed: CSFGGVSVI
CHFGGVSVY

SEQ ID NO: 14661 - protein, 11 aa, synthetic construct
  source 1..11: note = Seed: CTFLLNKEMYL
CHFLLNKEMYV

SEQ ID NO: 14662 - protein, 10 aa, synthetic construct
  source 1..10: note = Seed: CSFYEDFLEY
CHFYEDFLEY

SEQ ID NO: 14663 - protein, 10 aa, synthetic construct
  source 1..10: note = Seed: CVMYASAVVL
CHMYASAVVF

SEQ ID NO: 14664 - protein, 11 aa, synthetic construct
  source 1..11: note = Seed: CVMYASAVVLL
CHMYASAVVLF

SEQ ID NO: 14665 - protein, 10 aa, synthetic construct
  source 1..10: note = Seed: CVMYASAVVL
CHMYASAVVM

SEQ ID NO: 14666 - protein, 10 aa, synthetic construct
  source 1..10: note = Seed: CVMYASAVVL
CHMYASAVVY

SEQ ID NO: 14667 - protein, 10 aa, synthetic construct
  source 1..10: note = Seed: CGTTTLNGLW
CHTTTLNGLW

SEQ ID NO: 14668 - protein, 9 aa, synthetic construct
  source 1..9: note = Seed: CPAEIVDTV
CIAEIVDTI

SEQ ID NO: 14669 - protein, 9 aa, synthetic construct
  source 1..9: note = Seed: CPAEIVDTV
CIAEIVDTV

SEQ ID NO: 14670 - protein, 9 aa, synthetic construct
  source 1..9: note = Seed: CPAEIVDTV
CIAEIVDTY

SEQ ID NO: 14671 - protein, 10 aa, synthetic construct
  source 1..10: note = Seed: CLAYYFMRFR
CIAYYFMRFK

SEQ ID NO: 14672 - protein, 10 aa, synthetic construct
  source 1..10: note = Seed: CLAYYFMRFR
CIAYYFMRFR

SEQ ID NO: 14673 - protein, 9 aa, synthetic construct
  source 1..9: note = Seed: CLAYYFMRF
CIAYYFMRY

SEQ ID NO: 14674 - protein, 9 aa, synthetic construct
  source 1..9: note = Seed: CAFAVDAAK
CIFAVDAAK

SEQ ID NO: 14675 - protein, 9 aa, synthetic construct
  source 1..9: note = Seed: CAFAVDAAK
CIFAVDAAR

SEQ ID NO: 14676 - protein, 10 aa, synthetic construct
  source 1..10: note = Seed: CTFEYVSQPF
CIFEYVSQPF

SEQ ID NO: 14677 - protein, 10 aa, synthetic construct
  source 1..10: note = Seed: CTFEYVSQPF
CIFEYVSQPY

SEQ ID NO: 14678 - protein, 9 aa, synthetic construct
  source 1..9: note = Seed: CSFGGVSVI
CIFGGVSVA

SEQ ID NO: 14679 - protein, 9 aa, synthetic construct
  source 1..9: note = Seed: CSFGGVSVI
CIFGGVSVF

SEQ ID NO: 14680 - protein, 9 aa, synthetic construct
  source 1..9: note = Seed: CSFGGVSVI
CIFGGVSVI

SEQ ID NO: 14681 - protein, 9 aa, synthetic construct
  source 1..9: note = Seed: CSFGGVSVI
CIFGGVSVL

SEQ ID NO: 14682 - protein, 9 aa, synthetic construct
  source 1..9: note = Seed: CSFGGVSVI
CIFGGVSVM

SEQ ID NO: 14683 - protein, 9 aa, synthetic construct
  source 1..9: note = Seed: CSFGGVSVI
CIFGGVSVV

SEQ ID NO: 14684 - protein, 9 aa, synthetic construct
  source 1..9: note = Seed: CSFGGVSVI
CIFGGVSVW

SEQ ID NO: 14685 - protein, 9 aa, synthetic construct
  source 1..9: note = Seed: CSFGGVSVI
CIFGGVSVY

SEQ ID NO: 14686 - protein, 11 aa, synthetic construct
  source 1..11: note = Seed: CTFLLNKEMYL
CIFLLNKEMYV

SEQ ID NO: 14687 - protein, 10 aa, synthetic construct
  source 1..10: note = Seed: CLFWNCNVDR
CIFWNCNVDR

SEQ ID NO: 14688 - protein, 10 aa, synthetic construct
  source 1..10: note = Seed: CSFYEDFLEY
CIFYEDFLEY

SEQ ID NO: 14689 - protein, 9 aa, synthetic construct
  source 1..9: note = Seed: CYKRNRATR
CIKRNRATR

SEQ ID NO: 14690 - protein, 10 aa, synthetic construct
  source 1..10: note = Seed: CVLSGHNLAK
CILSGHNLAR

SEQ ID NO: 14691 - protein, 9 aa, synthetic construct
  source 1..9: note = Seed: CMMCYKRNR
CIMCYKRNR

SEQ ID NO: 14692 - protein, 9 aa, synthetic construct
  source 1..9: note = Seed: CIMLVYCFL
CIMLVYCFV

SEQ ID NO: 14693 - protein, 9 aa, synthetic construct
  source 1..9: note = Seed: CVMYASAVV
CIMYASAVF

SEQ ID NO: 14694 - protein, 9 aa, synthetic construct
  source 1..9: note = Seed: CVMYASAVV
CIMYASAVM

SEQ ID NO: 14695 - protein, 9 aa, synthetic construct
  source 1..9: note = Seed: CVMYASAVV
CIMYASAVV

SEQ ID NO: 14696 - protein, 10 aa, synthetic construct
  source 1..10: note = Seed: CVMYASAVVL
CIMYASAVVF

SEQ ID NO: 14697 - protein, 11 aa, synthetic construct
  source 1..11: note = Seed: CVMYASAVVLL
CIMYASAVVLF

SEQ ID NO: 14698 - protein, 10 aa, synthetic construct
  source 1..10: note = Seed: CVMYASAVVL
CIMYASAVVM

SEQ ID NO: 14699 - protein, 10 aa, synthetic construct
  source 1..10: note = Seed: CVMYASAVVL
CIMYASAVVV

SEQ ID NO: 14700 - protein, 10 aa, synthetic construct
  source 1..10: note = Seed: CVMYASAVVL
CIMYASAVVY

SEQ ID NO: 14701 - protein, 9 aa, synthetic construct
  source 1..9: note = Seed: CVMYASAVV
CIMYASAVY

SEQ ID NO: 14702 - protein, 9 aa, synthetic construct
  source 1..9: note = Seed: CVNFNFNGL
CINFNFNGV

SEQ ID NO: 14703 - protein, 11 aa, synthetic construct
  source 1..11: note = Seed: CANGQVFGLYK
CINGQVFGLYR

SEQ ID NO: 14704 - protein, 9 aa, synthetic construct
  source 1..9: note = Seed: CVPLNIIPL
CIPLNIIPV

SEQ ID NO: 14705 - protein, 9 aa, synthetic construct
  source 1..9: note = Seed: CTSVVLLSV
CISVVLLSV

SEQ ID NO: 14706 - protein, 9 aa, synthetic construct
  source 1..9: note = Seed: CLTPVYSFL
CITPVYSFI

SEQ ID NO: 14707 - protein, 9 aa, synthetic construct
  source 1..9: note = Seed: CLTPVYSFL
CITPVYSFV

SEQ ID NO: 14708 - protein, 10 aa, synthetic construct
  source 1..10: note = Seed: CGTTTLNGLW
CITTTLNGLW

SEQ ID NO: 14709 - protein, 9 aa, synthetic construct
  source 1..9: note = Seed: CLVGLMWLS
CIVGLMWLV

SEQ ID NO: 14710 - protein, 9 aa, synthetic construct
  source 1..9: note = Seed: CQVHGNAHV
CIVHGNAHV

SEQ ID NO: 14711 - protein, 9 aa, synthetic construct
  source 1..9: note = Seed: CMVQVTCGT
CIVQVTCGV

SEQ ID NO: 14712 - protein, 9 aa, synthetic construct
  source 1..9: note = Seed: CLAYYFMRF
CKAYYFMRF

SEQ ID NO: 14713 - protein, 10 aa, synthetic construct
  source 1..10: note = Seed: CLAYYFMRFR
CKAYYFMRFR

SEQ ID NO: 14714 - protein, 9 aa, synthetic construct
  source 1..9: note = Seed: CLAYYFMRF
CKAYYFMRY

SEQ ID NO: 14715 - protein, 10 aa, synthetic construct
  source 1..10: note = Seed: CTFEYVSQPF
CKFEYVSQPF

SEQ ID NO: 14716 - protein, 10 aa, synthetic construct
  source 1..10: note = Seed: CTFEYVSQPF
CKFEYVSQPM

SEQ ID NO: 14717 - protein, 10 aa, synthetic construct
  source 1..10: note = Seed: CTFEYVSQPF
CKFEYVSQPY

SEQ ID NO: 14718 - protein, 9 aa, synthetic construct
  source 1..9: note = Seed: CSFGGVSVI
CKFGGVSVF

SEQ ID NO: 14719 - protein, 9 aa, synthetic construct
  source 1..9: note = Seed: CSFGGVSVI
CKFGGVSVI

SEQ ID NO: 14720 - protein, 9 aa, synthetic construct
  source 1..9: note = Seed: CSFGGVSVI
CKFGGVSVL

SEQ ID NO: 14721 - protein, 9 aa, synthetic construct
  source 1..9: note = Seed: CSFGGVSVI
CKFGGVSVM

SEQ ID NO: 14722 - protein, 9 aa, synthetic construct
  source 1..9: note = Seed: CSFGGVSVI
CKFGGVSVW

SEQ ID NO: 14723 - protein, 9 aa, synthetic construct
  source 1..9: note = Seed: CSFGGVSVI
CKFGGVSVY

SEQ ID NO: 14724 - protein, 11 aa, synthetic construct
  source 1..11: note = Seed: CTFLLNKEMYL
CKFLLNKEMYV

SEQ ID NO: 14725 - protein, 10 aa, synthetic construct
  source 1..10: note = Seed: CSFYEDFLEY
CKFYEDFLEF

SEQ ID NO: 14726 - protein, 10 aa, synthetic construct
  source 1..10: note = Seed: CSFYEDFLEY
CKFYEDFLEY

SEQ ID NO: 14727 - protein, 10 aa, synthetic construct
  source 1..10: note = Seed: CVMYASAVVL
CKMYASAVVF

SEQ ID NO: 14728 - protein, 10 aa, synthetic construct
  source 1..10: note = Seed: CVMYASAVVL
CKMYASAVVL

SEQ ID NO: 14729 - protein, 11 aa, synthetic construct
  source 1..11: note = Seed: CVMYASAVVLL
CKMYASAVVLF

SEQ ID NO: 14730 - protein, 10 aa, synthetic construct
  source 1..10: note = Seed: CVMYASAVVL
CKMYASAVVM

SEQ ID NO: 14731 - protein, 10 aa, synthetic construct
  source 1..10: note = Seed: CVMYASAVVL
CKMYASAVVY

SEQ ID NO: 14732 - protein, 9 aa, synthetic construct
  source 1..9: note = Seed: CVMYASAVV
CKMYASAVY

SEQ ID NO: 14733 - protein, 9 aa, synthetic construct
  source 1..9: note = Seed: CSTMTNRQF
CKTMTNRQF

SEQ ID NO: 14734 - protein, 10 aa, synthetic construct
  source 1..10: note = Seed: CGTTTLNGLW
CKTTTLNGLW

SEQ ID NO: 14735 - protein, 9 aa, synthetic construct
  source 1..9: note = Seed: CQVHGNAHV
CKVHGNAHF

SEQ ID NO: 14736 - protein, 9 aa, synthetic construct
  source 1..9: note = Seed: CQVHGNAHV
CKVHGNAHM

SEQ ID NO: 14737 - protein, 9 aa, synthetic construct
  source 1..9: note = Seed: CQVHGNAHV
CKVHGNAHY

SEQ ID NO: 14738 - protein, 10 aa, synthetic construct
  source 1..10: note = Seed: CLAYYFMRFR
CLAYYFMRFK

SEQ ID NO: 14739 - protein, 9 aa, synthetic construct
  source 1..9: note = Seed: CLAYYFMRF
CLAYYFMRY

SEQ ID NO: 14740 - protein, 9 aa, synthetic construct
  source 1..9: note = Seed: CVCSVIDLL
CLCSVIDLL

SEQ ID NO: 14741 - protein, 9 aa, synthetic construct
  source 1..9: note = Seed: CVCSVIDLL
CLCSVIDLV

SEQ ID NO: 14742 - protein, 9 aa, synthetic construct
  source 1..9: note = Seed: CAFAVDAAK
CLFAVDAAR

SEQ ID NO: 14743 - protein, 10 aa, synthetic construct
  source 1..10: note = Seed: CTFEYVSQPF
CLFEYVSQPF

SEQ ID NO: 14744 - protein, 10 aa, synthetic construct
  source 1..10: note = Seed: CTFEYVSQPF
CLFEYVSQPY

SEQ ID NO: 14745 - protein, 9 aa, synthetic construct
  source 1..9: note = Seed: CSFGGVSVI
CLFGGVSVA

SEQ ID NO: 14746 - protein, 9 aa, synthetic construct
  source 1..9: note = Seed: CSFGGVSVI
CLFGGVSVF

SEQ ID NO: 14747 - protein, 9 aa, synthetic construct
  source 1..9: note = Seed: CSFGGVSVI
CLFGGVSVI

SEQ ID NO: 14748 - protein, 9 aa, synthetic construct
  source 1..9: note = Seed: CSFGGVSVI
CLFGGVSVL

SEQ ID NO: 14749 - protein, 9 aa, synthetic construct
  source 1..9: note = Seed: CSFGGVSVI
CLFGGVSVM

SEQ ID NO: 14750 - protein, 9 aa, synthetic construct
  source 1..9: note = Seed: CSFGGVSVI
CLFGGVSVT

SEQ ID NO: 14751 - protein, 9 aa, synthetic construct
  source 1..9: note = Seed: CSFGGVSVI
CLFGGVSVV

SEQ ID NO: 14752 - protein, 9 aa, synthetic construct
  source 1..9: note = Seed: CSFGGVSVI
CLFGGVSVY

SEQ ID NO: 14753 - protein, 11 aa, synthetic construct
  source 1..11: note = Seed: CTFLLNKEMYL
CLFLLNKEMYI

SEQ ID NO: 14754 - protein, 11 aa, synthetic construct
  source 1..11: note = Seed: CTFLLNKEMYL
CLFLLNKEMYL

SEQ ID NO: 14755 - protein, 11 aa, synthetic construct
  source 1..11: note = Seed: CTFLLNKEMYL
CLFLLNKEMYV

SEQ ID NO: 14756 - protein, 10 aa, synthetic construct
  source 1..10: note = Seed: CSFYEDFLEY
CLFYEDFLEF

SEQ ID NO: 14757 - protein, 10 aa, synthetic construct
  source 1..10: note = Seed: CSFYEDFLEY
CLFYEDFLEY

SEQ ID NO: 14758 - protein, 9 aa, synthetic construct
  source 1..9: note = Seed: CYKRNRATR
CLKRNRATR

SEQ ID NO: 14759 - protein, 9 aa, synthetic construct
  source 1..9: note = Seed: CVLAAECTI
CLLAAECTI

SEQ ID NO: 14760 - protein, 9 aa, synthetic construct
  source 1..9: note = Seed: CVLAAECTI
CLLAAECTL

SEQ ID NO: 14761 - protein, 9 aa, synthetic construct
  source 1..9: note = Seed: CVLAAECTI
CLLAAECTV

SEQ ID NO: 14762 - protein, 10 aa, synthetic construct
  source 1..10: note = Seed: CILHCANFNV
CLLHCANFNI

SEQ ID NO: 14763 - protein, 10 aa, synthetic construct
  source 1..10: note = Seed: CILHCANFNV
CLLHCANFNL

SEQ ID NO: 14764 - protein, 10 aa, synthetic construct
  source 1..10: note = Seed: CILHCANFNV
CLLHCANFNV

SEQ ID NO: 14765 - protein, 10 aa, synthetic construct
  source 1..10: note = Seed: CVLSGHNLAK
CLLSGHNLAK

SEQ ID NO: 14766 - protein, 10 aa, synthetic construct
  source 1..10: note = Seed: CVLSGHNLAK
CLLSGHNLAR

SEQ ID NO: 14767 - protein, 9 aa, synthetic construct
  source 1..9: note = Seed: CMMCYKRNR
CLMCYKRNR

SEQ ID NO: 14768 - protein, 9 aa, synthetic construct
  source 1..9: note = Seed: CIMLVYCFL
CLMLVYCFA

SEQ ID NO: 14769 - protein, 9 aa, synthetic construct
  source 1..9: note = Seed: CIMLVYCFL
CLMLVYCFI

SEQ ID NO: 14770 - protein, 9 aa, synthetic construct
  source 1..9: note = Seed: CIMLVYCFL
CLMLVYCFL

SEQ ID NO: 14771 - protein, 9 aa, synthetic construct
  source 1..9: note = Seed: CIMLVYCFL
CLMLVYCFV

SEQ ID NO: 14772 - protein, 9 aa, synthetic construct
  source 1..9: note = Seed: CVMYASAVV
CLMYASAVA

SEQ ID NO: 14773 - protein, 9 aa, synthetic construct
  source 1..9: note = Seed: CVMYASAVV
CLMYASAVF

SEQ ID NO: 14774 - protein, 9 aa, synthetic construct
  source 1..9: note = Seed: CVMYASAVV
CLMYASAVI

SEQ ID NO: 14775 - protein, 9 aa, synthetic construct
  source 1..9: note = Seed: CVMYASAVV
CLMYASAVL

SEQ ID NO: 14776 - protein, 9 aa, synthetic construct
  source 1..9: note = Seed: CVMYASAVV
CLMYASAVM

SEQ ID NO: 14777 - protein, 9 aa, synthetic construct
  source 1..9: note = Seed: CVMYASAVV
CLMYASAVV

SEQ ID NO: 14778 - protein, 10 aa, synthetic construct
  source 1..10: note = Seed: CVMYASAVVL
CLMYASAVVA

SEQ ID NO: 14779 - protein, 10 aa, synthetic construct
  source 1..10: note = Seed: CVMYASAVVL
CLMYASAVVF

SEQ ID NO: 14780 - protein, 10 aa, synthetic construct
  source 1..10: note = Seed: CVMYASAVVL
CLMYASAVVL

SEQ ID NO: 14781 - protein, 11 aa, synthetic construct
  source 1..11: note = Seed: CVMYASAVVLL
CLMYASAVVLF

SEQ ID NO: 14782 - protein, 11 aa, synthetic construct
  source 1..11: note = Seed: CVMYASAVVLL
CLMYASAVVLV

SEQ ID NO: 14783 - protein, 10 aa, synthetic construct
  source 1..10: note = Seed: CVMYASAVVL
CLMYASAVVM

SEQ ID NO: 14784 - protein, 10 aa, synthetic construct
  source 1..10: note = Seed: CVMYASAVVL
CLMYASAVVV

SEQ ID NO: 14785 - protein, 10 aa, synthetic construct
  source 1..10: note = Seed: CVMYASAVVL
CLMYASAVVY

SEQ ID NO: 14786 - protein, 9 aa, synthetic construct
  source 1..9: note = Seed: CVMYASAVV
CLMYASAVY

SEQ ID NO: 14787 - protein, 9 aa, synthetic construct
  source 1..9: note = Seed: CVNFNFNGL
CLNFNFNGA

SEQ ID NO: 14788 - protein, 9 aa, synthetic construct
  source 1..9: note = Seed: CVNFNFNGL
CLNFNFNGI

SEQ ID NO: 14789 - protein, 9 aa, synthetic construct
  source 1..9: note = Seed: CVNFNFNGL
CLNFNFNGL

SEQ ID NO: 14790 - protein, 9 aa, synthetic construct
  source 1..9: note = Seed: CVNFNFNGL
CLNFNFNGV

SEQ ID NO: 14791 - protein, 10 aa, synthetic construct
  source 1..10: note = Seed: CANGQVFGLY
CLNGQVFGLY

SEQ ID NO: 14792 - protein, 11 aa, synthetic construct
  source 1..11: note = Seed: CANGQVFGLYK
CLNGQVFGLYR

SEQ ID NO: 14793 - protein, 9 aa, synthetic construct
  source 1..9: note = Seed: CVPLNIIPL
CLPLNIIPA

SEQ ID NO: 14794 - protein, 9 aa, synthetic construct
  source 1..9: note = Seed: CVPLNIIPL
CLPLNIIPI

SEQ ID NO: 14795 - protein, 9 aa, synthetic construct
  source 1..9: note = Seed: CVPLNIIPL
CLPLNIIPL

SEQ ID NO: 14796 - protein, 9 aa, synthetic construct
  source 1..9: note = Seed: CVPLNIIPL
CLPLNIIPV

SEQ ID NO: 14797 - protein, 9 aa, synthetic construct
  source 1..9: note = Seed: CTSVVLLSV
CLSVVLLSI

SEQ ID NO: 14798 - protein, 9 aa, synthetic construct
  source 1..9: note = Seed: CTSVVLLSV
CLSVVLLSL

SEQ ID NO: 14799 - protein, 9 aa, synthetic construct
  source 1..9: note = Seed: CTSVVLLSV
CLSVVLLSV

SEQ ID NO: 14800 - protein, 9 aa, synthetic construct
  source 1..9: note = Seed: CLTPVYSFL
CLTPVYSFA

SEQ ID NO: 14801 - protein, 9 aa, synthetic construct
  source 1..9: note = Seed: CLTPVYSFL
CLTPVYSFI

SEQ ID NO: 14802 - protein, 10 aa, synthetic construct
  source 1..10: note = Seed: CLTPVYSFLP
CLTPVYSFLL

SEQ ID NO: 14803 - protein, 10 aa, synthetic construct
  source 1..10: note = Seed: CLTPVYSFLP
CLTPVYSFLV

SEQ ID NO: 14804 - protein, 9 aa, synthetic construct
  source 1..9: note = Seed: CLTPVYSFL
CLTPVYSFM

SEQ ID NO: 14805 - protein, 9 aa, synthetic construct
  source 1..9: note = Seed: CLTPVYSFL
CLTPVYSFV

SEQ ID NO: 14806 - protein, 10 aa, synthetic construct
  source 1..10: note = Seed: CGTTTLNGLW
CLTTTLNGLW

SEQ ID NO: 14807 - protein, 9 aa, synthetic construct
  source 1..9: note = Seed: CLVGLMWLS
CLVGLMWLA

SEQ ID NO: 14808 - protein, 9 aa, synthetic construct
  source 1..9: note = Seed: CLVGLMWLS
CLVGLMWLI

SEQ ID NO: 14809 - protein, 9 aa, synthetic construct
  source 1..9: note = Seed: CLVGLMWLS
CLVGLMWLL

SEQ ID NO: 14810 - protein, 9 aa, synthetic construct
  source 1..9: note = Seed: CLVGLMWLS
CLVGLMWLV

SEQ ID NO: 14811 - protein, 9 aa, synthetic construct
  source 1..9: note = Seed: CQVHGNAHV
CLVHGNAHA

SEQ ID NO: 14812 - protein, 9 aa, synthetic construct
  source 1..9: note = Seed: CQVHGNAHV
CLVHGNAHI

SEQ ID NO: 14813 - protein, 9 aa, synthetic construct
  source 1..9: note = Seed: CQVHGNAHV
CLVHGNAHL

SEQ ID NO: 14814 - protein, 9 aa, synthetic construct
  source 1..9: note = Seed: CQVHGNAHV
CLVHGNAHV

SEQ ID NO: 14815 - protein, 9 aa, synthetic construct
  source 1..9: note = Seed: CMVQVTCGT
CLVQVTCGA

SEQ ID NO: 14816 - protein, 9 aa, synthetic construct
  source 1..9: note = Seed: CMVQVTCGT
CLVQVTCGI

SEQ ID NO: 14817 - protein, 9 aa, synthetic construct
  source 1..9: note = Seed: CMVQVTCGT
CLVQVTCGL

SEQ ID NO: 14818 - protein, 9 aa, synthetic construct
  source 1..9: note = Seed: CMVQVTCGT
CLVQVTCGV

SEQ ID NO: 14819 - protein, 9 aa, synthetic construct
  source 1..9: note = Seed: CPAEIVDTV
CMAEIVDTY

SEQ ID NO: 14820 - protein, 9 aa, synthetic construct
  source 1..9: note = Seed: CLAYYFMRF
CMAYYFMRF

SEQ ID NO: 14821 - protein, 10 aa, synthetic construct
  source 1..10: note = Seed: CLAYYFMRFR
CMAYYFMRFK

SEQ ID NO: 14822 - protein, 10 aa, synthetic construct
  source 1..10: note = Seed: CLAYYFMRFR
CMAYYFMRFR

SEQ ID NO: 14823 - protein, 9 aa, synthetic construct
  source 1..9: note = Seed: CLAYYFMRF
CMAYYFMRM

SEQ ID NO: 14824 - protein, 9 aa, synthetic construct
  source 1..9: note = Seed: CLAYYFMRF
CMAYYFMRY

SEQ ID NO: 14825 - protein, 9 aa, synthetic construct
  source 1..9: note = Seed: CVCSVIDLL
CMCSVIDLL

SEQ ID NO: 14826 - protein, 9 aa, synthetic construct
  source 1..9: note = Seed: CVCSVIDLL
CMCSVIDLV

SEQ ID NO: 14827 - protein, 9 aa, synthetic construct
  source 1..9: note = Seed: CAFAVDAAK
CMFAVDAAK

SEQ ID NO: 14828 - protein, 11 aa, synthetic construct
  source 1..11: note = Seed: CAFAVDAAKAY
CMFAVDAAKAF

SEQ ID NO: 14829 - protein, 11 aa, synthetic construct
  source 1..11: note = Seed: CAFAVDAAKAY
CMFAVDAAKAY

SEQ ID NO: 14830 - protein, 9 aa, synthetic construct
  source 1..9: note = Seed: CAFAVDAAK
CMFAVDAAR

SEQ ID NO: 14831 - protein, 10 aa, synthetic construct
  source 1..10: note = Seed: CTFEYVSQPF
CMFEYVSQPF

SEQ ID NO: 14832 - protein, 10 aa, synthetic construct
  source 1..10: note = Seed: CTFEYVSQPF
CMFEYVSQPL

SEQ ID NO: 14833 - protein, 10 aa, synthetic construct
  source 1..10: note = Seed: CTFEYVSQPF
CMFEYVSQPM

SEQ ID NO: 14834 - protein, 10 aa, synthetic construct
  source 1..10: note = Seed: CTFEYVSQPF
CMFEYVSQPY

SEQ ID NO: 14835 - protein, 9 aa, synthetic construct
  source 1..9: note = Seed: CSFGGVSVI
CMFGGVSVA

SEQ ID NO: 14836 - protein, 9 aa, synthetic construct
  source 1..9: note = Seed: CSFGGVSVI
CMFGGVSVF

SEQ ID NO: 14837 - protein, 9 aa, synthetic construct
  source 1..9: note = Seed: CSFGGVSVI
CMFGGVSVH

SEQ ID NO: 14838 - protein, 9 aa, synthetic construct
  source 1..9: note = Seed: CSFGGVSVI
CMFGGVSVI

SEQ ID NO: 14839 - protein, 9 aa, synthetic construct
  source 1..9: note = Seed: CSFGGVSVI
CMFGGVSVL

SEQ ID NO: 14840 - protein, 9 aa, synthetic construct
  source 1..9: note = Seed: CSFGGVSVI
CMFGGVSVM

SEQ ID NO: 14841 - protein, 9 aa, synthetic construct
  source 1..9: note = Seed: CSFGGVSVI
CMFGGVSVT

SEQ ID NO: 14842 - protein, 9 aa, synthetic construct
  source 1..9: note = Seed: CSFGGVSVI
CMFGGVSVV

SEQ ID NO: 14843 - protein, 9 aa, synthetic construct
  source 1..9: note = Seed: CSFGGVSVI
CMFGGVSVW

SEQ ID NO: 14844 - protein, 9 aa, synthetic construct
  source 1..9: note = Seed: CSFGGVSVI
CMFGGVSVY

SEQ ID NO: 14845 - protein, 11 aa, synthetic construct
  source 1..11: note = Seed: CTFLLNKEMYL
CMFLLNKEMYI

SEQ ID NO: 14846 - protein, 11 aa, synthetic construct
  source 1..11: note = Seed: CTFLLNKEMYL
CMFLLNKEMYL

SEQ ID NO: 14847 - protein, 11 aa, synthetic construct
  source 1..11: note = Seed: CTFLLNKEMYL
CMFLLNKEMYV

SEQ ID NO: 14848 - protein, 10 aa, synthetic construct
  source 1..10: note = Seed: CLFWNCNVDR
CMFWNCNVDR

SEQ ID NO: 14849 - protein, 10 aa, synthetic construct
  source 1..10: note = Seed: CSFYEDFLEY
CMFYEDFLEF

SEQ ID NO: 14850 - protein, 10 aa, synthetic construct
  source 1..10: note = Seed: CSFYEDFLEY
CMFYEDFLEM

SEQ ID NO: 14851 - protein, 10 aa, synthetic construct
  source 1..10: note = Seed: CSFYEDFLEY
CMFYEDFLEW

SEQ ID NO: 14852 - protein, 10 aa, synthetic construct
  source 1..10: note = Seed: CSFYEDFLEY
CMFYEDFLEY

SEQ ID NO: 14853 - protein, 9 aa, synthetic construct
  source 1..9: note = Seed: CLHVVGPNV
CMHVVGPNV

SEQ ID NO: 14854 - protein, 10 aa, synthetic construct
  source 1..10: note = Seed: CGKGYHLMSF
CMKGYHLMSF

SEQ ID NO: 14855 - protein, 10 aa, synthetic construct
  source 1..10: note = Seed: CGKGYHLMSF
CMKGYHLMSY

SEQ ID NO: 14856 - protein, 9 aa, synthetic construct
  source 1..9: note = Seed: CYKRNRATR
CMKRNRATR

SEQ ID NO: 14857 - protein, 9 aa, synthetic construct
  source 1..9: note = Seed: CVLAAECTI
CMLAAECTI

SEQ ID NO: 14858 - protein, 10 aa, synthetic construct
  source 1..10: note = Seed: CVLAAECTIF
CMLAAECTIF

SEQ ID NO: 14859 - protein, 11 aa, synthetic construct
  source 1..11: note = Seed: CVLAAECTIFK
CMLAAECTIFR

SEQ ID NO: 14860 - protein, 10 aa, synthetic construct
  source 1..10: note = Seed: CVLAAECTIF
CMLAAECTIY

SEQ ID NO: 14861 - protein, 9 aa, synthetic construct
  source 1..9: note = Seed: CVLAAECTI
CMLAAECTL

SEQ ID NO: 14862 - protein, 9 aa, synthetic construct
  source 1..9: note = Seed: CVLAAECTI
CMLAAECTV

SEQ ID NO: 14863 - protein, 10 aa, synthetic construct
  source 1..10: note = Seed: CILHCANFNV
CMLHCANFNI

SEQ ID NO: 14864 - protein, 10 aa, synthetic construct
  source 1..10: note = Seed: CILHCANFNV
CMLHCANFNL

SEQ ID NO: 14865 - protein, 10 aa, synthetic construct
  source 1..10: note = Seed: CILHCANFNV
CMLHCANFNV

SEQ ID NO: 14866 - protein, 10 aa, synthetic construct
  source 1..10: note = Seed: CVLSGHNLAK
CMLSGHNLAK

SEQ ID NO: 14867 - protein, 10 aa, synthetic construct
  source 1..10: note = Seed: CVLSGHNLAK
CMLSGHNLAR

SEQ ID NO: 14868 - protein, 9 aa, synthetic construct
  source 1..9: note = Seed: CMMCYKRNR
CMMCYKRNK

SEQ ID NO: 14869 - protein, 9 aa, synthetic construct
  source 1..9: note = Seed: CIMLVYCFL
CMMLVYCFA

SEQ ID NO: 14870 - protein, 9 aa, synthetic construct
  source 1..9: note = Seed: CIMLVYCFL
CMMLVYCFI

SEQ ID NO: 14871 - protein, 9 aa, synthetic construct
  source 1..9: note = Seed: CIMLVYCFL
CMMLVYCFL

SEQ ID NO: 14872 - protein, 9 aa, synthetic construct
  source 1..9: note = Seed: CIMLVYCFL
CMMLVYCFV

SEQ ID NO: 14873 - protein, 9 aa, synthetic construct
  source 1..9: note = Seed: CVMYASAVV
CMMYASAVA

SEQ ID NO: 14874 - protein, 9 aa, synthetic construct
  source 1..9: note = Seed: CVMYASAVV
CMMYASAVF

SEQ ID NO: 14875 - protein, 9 aa, synthetic construct
  source 1..9: note = Seed: CVMYASAVV
CMMYASAVH

SEQ ID NO: 14876 - protein, 9 aa, synthetic construct
  source 1..9: note = Seed: CVMYASAVV
CMMYASAVI

SEQ ID NO: 14877 - protein, 9 aa, synthetic construct
  source 1..9: note = Seed: CVMYASAVV
CMMYASAVL

SEQ ID NO: 14878 - protein, 9 aa, synthetic construct
  source 1..9: note = Seed: CVMYASAVV
CMMYASAVM

SEQ ID NO: 14879 - protein, 9 aa, synthetic construct
  source 1..9: note = Seed: CVMYASAVV
CMMYASAVV

SEQ ID NO: 14880 - protein, 10 aa, synthetic construct
  source 1..10: note = Seed: CVMYASAVVL
CMMYASAVVA

SEQ ID NO: 14881 - protein, 10 aa, synthetic construct
  source 1..10: note = Seed: CVMYASAVVL
CMMYASAVVF

SEQ ID NO: 14882 - protein, 10 aa, synthetic construct
  source 1..10: note = Seed: CVMYASAVVL
CMMYASAVVI

SEQ ID NO: 14883 - protein, 10 aa, synthetic construct
  source 1..10: note = Seed: CVMYASAVVL
CMMYASAVVL

SEQ ID NO: 14884 - protein, 11 aa, synthetic construct
  source 1..11: note = Seed: CVMYASAVVLL
CMMYASAVVLF

SEQ ID NO: 14885 - protein, 11 aa, synthetic construct
  source 1..11: note = Seed: CVMYASAVVLL
CMMYASAVVLL

SEQ ID NO: 14886 - protein, 11 aa, synthetic construct
  source 1..11: note = Seed: CVMYASAVVLL
CMMYASAVVLV

SEQ ID NO: 14887 - protein, 10 aa, synthetic construct
  source 1..10: note = Seed: CVMYASAVVL
CMMYASAVVM

SEQ ID NO: 14888 - protein, 10 aa, synthetic construct
  source 1..10: note = Seed: CVMYASAVVL
CMMYASAVVV

SEQ ID NO: 14889 - protein, 10 aa, synthetic construct
  source 1..10: note = Seed: CVMYASAVVL
CMMYASAVVY

SEQ ID NO: 14890 - protein, 9 aa, synthetic construct
  source 1..9: note = Seed: CVMYASAVV
CMMYASAVW

SEQ ID NO: 14891 - protein, 9 aa, synthetic construct
  source 1..9: note = Seed: CVMYASAVV
CMMYASAVY

SEQ ID NO: 14892 - protein, 9 aa, synthetic construct
  source 1..9: note = Seed: CVNFNFNGL
CMNFNFNGA

SEQ ID NO: 14893 - protein, 9 aa, synthetic construct
  source 1..9: note = Seed: CVNFNFNGL
CMNFNFNGI

SEQ ID NO: 14894 - protein, 9 aa, synthetic construct
  source 1..9: note = Seed: CVNFNFNGL
CMNFNFNGL

SEQ ID NO: 14895 - protein, 9 aa, synthetic construct
  source 1..9: note = Seed: CVNFNFNGL
CMNFNFNGV

SEQ ID NO: 14896 - protein, 10 aa, synthetic construct
  source 1..10: note = Seed: CANGQVFGLY
CMNGQVFGLY

SEQ ID NO: 14897 - protein, 11 aa, synthetic construct
  source 1..11: note = Seed: CANGQVFGLYK
CMNGQVFGLYR

SEQ ID NO: 14898 - protein, 9 aa, synthetic construct
  source 1..9: note = Seed: CVPLNIIPL
CMPLNIIPA

SEQ ID NO: 14899 - protein, 9 aa, synthetic construct
  source 1..9: note = Seed: CVPLNIIPL
CMPLNIIPI

SEQ ID NO: 14900 - protein, 9 aa, synthetic construct
  source 1..9: note = Seed: CVPLNIIPL
CMPLNIIPL

SEQ ID NO: 14901 - protein, 9 aa, synthetic construct
  source 1..9: note = Seed: CVPLNIIPL
CMPLNIIPV

SEQ ID NO: 14902 - protein, 10 aa, synthetic construct
  source 1..10: note = Seed: CIRRPFLCCK
CMRRPFLCCR

SEQ ID NO: 14903 - protein, 9 aa, synthetic construct
  source 1..9: note = Seed: CTSVVLLSV
CMSVVLLSA

SEQ ID NO: 14904 - protein, 9 aa, synthetic construct
  source 1..9: note = Seed: CTSVVLLSV
CMSVVLLSI

SEQ ID NO: 14905 - protein, 9 aa, synthetic construct
  source 1..9: note = Seed: CTSVVLLSV
CMSVVLLSL

SEQ ID NO: 14906 - protein, 9 aa, synthetic construct
  source 1..9: note = Seed: CTSVVLLSV
CMSVVLLSV

SEQ ID NO: 14907 - protein, 9 aa, synthetic construct
  source 1..9: note = Seed: CSTMTNRQF
CMTMTNRQF

SEQ ID NO: 14908 - protein, 9 aa, synthetic construct
  source 1..9: note = Seed: CSTMTNRQF
CMTMTNRQY

SEQ ID NO: 14909 - protein, 9 aa, synthetic construct
  source 1..9: note = Seed: CLTPVYSFL
CMTPVYSFA

SEQ ID NO: 14910 - protein, 9 aa, synthetic construct
  source 1..9: note = Seed: CLTPVYSFL
CMTPVYSFI

SEQ ID NO: 14911 - protein, 9 aa, synthetic construct
  source 1..9: note = Seed: CLTPVYSFL
CMTPVYSFL

SEQ ID NO: 14912 - protein, 10 aa, synthetic construct
  source 1..10: note = Seed: CLTPVYSFLP
CMTPVYSFLI

SEQ ID NO: 14913 - protein, 10 aa, synthetic construct
  source 1..10: note = Seed: CLTPVYSFLP
CMTPVYSFLL

SEQ ID NO: 14914 - protein, 10 aa, synthetic construct
  source 1..10: note = Seed: CLTPVYSFLP
CMTPVYSFLV

SEQ ID NO: 14915 - protein, 9 aa, synthetic construct
  source 1..9: note = Seed: CLTPVYSFL
CMTPVYSFM

SEQ ID NO: 14916 - protein, 9 aa, synthetic construct
  source 1..9: note = Seed: CLTPVYSFL
CMTPVYSFV

SEQ ID NO: 14917 - protein, 10 aa, synthetic construct
  source 1..10: note = Seed: CGTTTLNGLW
CMTTTLNGLW

SEQ ID NO: 14918 - protein, 9 aa, synthetic construct
  source 1..9: note = Seed: CLVGLMWLS
CMVGLMWLA

SEQ ID NO: 14919 - protein, 9 aa, synthetic construct
  source 1..9: note = Seed: CLVGLMWLS
CMVGLMWLI

SEQ ID NO: 14920 - protein, 9 aa, synthetic construct
  source 1..9: note = Seed: CLVGLMWLS
CMVGLMWLL

SEQ ID NO: 14921 - protein, 10 aa, synthetic construct
  source 1..10: note = Seed: CLVGLMWLSY
CMVGLMWLSY

SEQ ID NO: 14922 - protein, 9 aa, synthetic construct
  source 1..9: note = Seed: CLVGLMWLS
CMVGLMWLT

SEQ ID NO: 14923 - protein, 9 aa, synthetic construct
  source 1..9: note = Seed: CLVGLMWLS
CMVGLMWLV

SEQ ID NO: 14924 - protein, 9 aa, synthetic construct
  source 1..9: note = Seed: CQVHGNAHV
CMVHGNAHA

SEQ ID NO: 14925 - protein, 9 aa, synthetic construct
  source 1..9: note = Seed: CQVHGNAHV
CMVHGNAHF

SEQ ID NO: 14926 - protein, 9 aa, synthetic construct
  source 1..9: note = Seed: CQVHGNAHV
CMVHGNAHI

SEQ ID NO: 14927 - protein, 9 aa, synthetic construct
  source 1..9: note = Seed: CQVHGNAHV
CMVHGNAHL

SEQ ID NO: 14928 - protein, 9 aa, synthetic construct
  source 1..9: note = Seed: CQVHGNAHV
CMVHGNAHM

SEQ ID NO: 14929 - protein, 9 aa, synthetic construct
  source 1..9: note = Seed: CQVHGNAHV
CMVHGNAHV

SEQ ID NO: 14930 - protein, 9 aa, synthetic construct
  source 1..9: note = Seed: CQVHGNAHV
CMVHGNAHY

SEQ ID NO: 14931 - protein, 9 aa, synthetic construct
  source 1..9: note = Seed: CMVQVTCGT
CMVQVTCGA

SEQ ID NO: 14932 - protein, 9 aa, synthetic construct
  source 1..9: note = Seed: CMVQVTCGT
CMVQVTCGI

SEQ ID NO: 14933 - protein, 9 aa, synthetic construct
  source 1..9: note = Seed: CMVQVTCGT
CMVQVTCGL

SEQ ID NO: 14934 - protein, 9 aa, synthetic construct
  source 1..9: note = Seed: CMVQVTCGT
CMVQVTCGV

SEQ ID NO: 14935 - protein, 10 aa, synthetic construct
  source 1..10: note = Seed: CLAYYFMRFR
CNAYYFMRFR

SEQ ID NO: 14936 - protein, 9 aa, synthetic construct
  source 1..9: note = Seed: CAFAVDAAK
CNFAVDAAR

SEQ ID NO: 14937 - protein, 9 aa, synthetic construct
  source 1..9: note = Seed: CSFGGVSVI
CNFGGVSVF

SEQ ID NO: 14938 - protein, 9 aa, synthetic construct
  source 1..9: note = Seed: CSFGGVSVI
CNFGGVSVM

SEQ ID NO: 14939 - protein, 9 aa, synthetic construct
  source 1..9: note = Seed: CSFGGVSVI
CNFGGVSVY

SEQ ID NO: 14940 - protein, 11 aa, synthetic construct
  source 1..11: note = Seed: CTFLLNKEMYL
CNFLLNKEMYV

SEQ ID NO: 14941 - protein, 10 aa, synthetic construct
  source 1..10: note = Seed: CSFYEDFLEY
CNFYEDFLEY

SEQ ID NO: 14942 - protein, 10 aa, synthetic construct
  source 1..10: note = Seed: CVMYASAVVL
CNMYASAVVF

SEQ ID NO: 14943 - protein, 11 aa, synthetic construct
  source 1..11: note = Seed: CVMYASAVVLL
CNMYASAVVLF

SEQ ID NO: 14944 - protein, 10 aa, synthetic construct
  source 1..10: note = Seed: CVMYASAVVL
CNMYASAVVM

SEQ ID NO: 14945 - protein, 10 aa, synthetic construct
  source 1..10: note = Seed: CVMYASAVVL
CNMYASAVVY

SEQ ID NO: 14946 - protein, 10 aa, synthetic construct
  source 1..10: note = Seed: CGTTTLNGLW
CNTTTLNGLW

SEQ ID NO: 14947 - protein, 9 aa, synthetic construct
  source 1..9: note = Seed: CPAEIVDTV
CPAEIVDTA

SEQ ID NO: 14948 - protein, 9 aa, synthetic construct
  source 1..9: note = Seed: CPAEIVDTV
CPAEIVDTF

SEQ ID NO: 14949 - protein, 9 aa, synthetic construct
  source 1..9: note = Seed: CPAEIVDTV
CPAEIVDTH

SEQ ID NO: 14950 - protein, 9 aa, synthetic construct
  source 1..9: note = Seed: CPAEIVDTV
CPAEIVDTI

SEQ ID NO: 14951 - protein, 9 aa, synthetic construct
  source 1..9: note = Seed: CPAEIVDTV
CPAEIVDTL

SEQ ID NO: 14952 - protein, 9 aa, synthetic construct
  source 1..9: note = Seed: CPAEIVDTV
CPAEIVDTM

SEQ ID NO: 14953 - protein, 10 aa, synthetic construct
  source 1..10: note = Seed: CPAEIVDTVS
CPAEIVDTVA

SEQ ID NO: 14954 - protein, 9 aa, synthetic construct
  source 1..9: note = Seed: CPAEIVDTV
CPAEIVDTW

SEQ ID NO: 14955 - protein, 9 aa, synthetic construct
  source 1..9: note = Seed: CPAEIVDTV
CPAEIVDTY

SEQ ID NO: 14956 - protein, 10 aa, synthetic construct
  source 1..10: note = Seed: CLAYYFMRFR
CPAYYFMRFR

SEQ ID NO: 14957 - protein, 11 aa, synthetic construct
  source 1..11: note = Seed: CAFAVDAAKAY
CPFAVDAAKAF

SEQ ID NO: 14958 - protein, 11 aa, synthetic construct
  source 1..11: note = Seed: CAFAVDAAKAY
CPFAVDAAKAM

SEQ ID NO: 14959 - protein, 11 aa, synthetic construct
  source 1..11: note = Seed: CAFAVDAAKAY
CPFAVDAAKAY

SEQ ID NO: 14960 - protein, 10 aa, synthetic construct
  source 1..10: note = Seed: CTFEYVSQPF
CPFEYVSQPF

SEQ ID NO: 14961 - protein, 10 aa, synthetic construct
  source 1..10: note = Seed: CTFEYVSQPF
CPFEYVSQPL

SEQ ID NO: 14962 - protein, 10 aa, synthetic construct
  source 1..10: note = Seed: CTFEYVSQPF
CPFEYVSQPM

SEQ ID NO: 14963 - protein, 10 aa, synthetic construct
  source 1..10: note = Seed: CTFEYVSQPF
CPFEYVSQPY

SEQ ID NO: 14964 - protein, 11 aa, synthetic construct
  source 1..11: note = Seed: CTFLLNKEMYL
CPFLLNKEMYV

SEQ ID NO: 14965 - protein, 10 aa, synthetic construct
  source 1..10: note = Seed: CSFYEDFLEY
CPFYEDFLEF

SEQ ID NO: 14966 - protein, 10 aa, synthetic construct
  source 1..10: note = Seed: CSFYEDFLEY
CPFYEDFLEM

SEQ ID NO: 14967 - protein, 10 aa, synthetic construct
  source 1..10: note = Seed: CSFYEDFLEY
CPFYEDFLEY

SEQ ID NO: 14968 - protein, 10 aa, synthetic construct
  source 1..10: note = Seed: CPIFFITGNT
CPIFFITGNA

SEQ ID NO: 14969 - protein, 9 aa, synthetic construct
  source 1..9: note = Seed: CPLIAAVIT
CPLIAAVIA

SEQ ID NO: 14970 - protein, 10 aa, synthetic construct
  source 1..10: note = Seed: CVMYASAVVL
CPMYASAVVF

SEQ ID NO: 14971 - protein, 11 aa, synthetic construct
  source 1..11: note = Seed: CVMYASAVVLL
CPMYASAVVLF

SEQ ID NO: 14972 - protein, 10 aa, synthetic construct
  source 1..10: note = Seed: CVMYASAVVL
CPMYASAVVM

SEQ ID NO: 14973 - protein, 10 aa, synthetic construct
  source 1..10: note = Seed: CVMYASAVVL
CPMYASAVVY

SEQ ID NO: 14974 - protein, 10 aa, synthetic construct
  source 1..10: note = Seed: CGTTTLNGLW
CPTTTLNGLW

SEQ ID NO: 14975 - protein, 9 aa, synthetic construct
  source 1..9: note = Seed: CLAYYFMRF
CQAYYFMRF

SEQ ID NO: 14976 - protein, 10 aa, synthetic construct
  source 1..10: note = Seed: CLAYYFMRFR
CQAYYFMRFK

SEQ ID NO: 14977 - protein, 10 aa, synthetic construct
  source 1..10: note = Seed: CLAYYFMRFR
CQAYYFMRFR

SEQ ID NO: 14978 - protein, 9 aa, synthetic construct
  source 1..9: note = Seed: CLAYYFMRF
CQAYYFMRL

SEQ ID NO: 14979 - protein, 9 aa, synthetic construct
  source 1..9: note = Seed: CLAYYFMRF
CQAYYFMRM

SEQ ID NO: 14980 - protein, 9 aa, synthetic construct
  source 1..9: note = Seed: CLAYYFMRF
CQAYYFMRY

SEQ ID NO: 14981 - protein, 9 aa, synthetic construct
  source 1..9: note = Seed: CKDGHVETF
CQDGHVETF

SEQ ID NO: 14982 - protein, 9 aa, synthetic construct
  source 1..9: note = Seed: CKDGHVETF
CQDGHVETY

SEQ ID NO: 14983 - protein, 11 aa, synthetic construct
  source 1..11: note = Seed: CAFAVDAAKAY
CQFAVDAAKAF

SEQ ID NO: 14984 - protein, 11 aa, synthetic construct
  source 1..11: note = Seed: CAFAVDAAKAY
CQFAVDAAKAM

SEQ ID NO: 14985 - protein, 11 aa, synthetic construct
  source 1..11: note = Seed: CAFAVDAAKAY
CQFAVDAAKAY

SEQ ID NO: 14986 - protein, 10 aa, synthetic construct
  source 1..10: note = Seed: CTFEYVSQPF
CQFEYVSQPF

SEQ ID NO: 14987 - protein, 10 aa, synthetic construct
  source 1..10: note = Seed: CTFEYVSQPF
CQFEYVSQPL

SEQ ID NO: 14988 - protein, 10 aa, synthetic construct
  source 1..10: note = Seed: CTFEYVSQPF
CQFEYVSQPM

SEQ ID NO: 14989 - protein, 10 aa, synthetic construct
  source 1..10: note = Seed: CTFEYVSQPF
CQFEYVSQPW

SEQ ID NO: 14990 - protein, 10 aa, synthetic construct
  source 1..10: note = Seed: CTFEYVSQPF
CQFEYVSQPY

SEQ ID NO: 14991 - protein, 9 aa, synthetic construct
  source 1..9: note = Seed: CSFGGVSVI
CQFGGVSVA

SEQ ID NO: 14992 - protein, 9 aa, synthetic construct
  source 1..9: note = Seed: CSFGGVSVI
CQFGGVSVF

SEQ ID NO: 14993 - protein, 9 aa, synthetic construct
  source 1..9: note = Seed: CSFGGVSVI
CQFGGVSVH

SEQ ID NO: 14994 - protein, 9 aa, synthetic construct
  source 1..9: note = Seed: CSFGGVSVI
CQFGGVSVI

SEQ ID NO: 14995 - protein, 9 aa, synthetic construct
  source 1..9: note = Seed: CSFGGVSVI
CQFGGVSVL

SEQ ID NO: 14996 - protein, 9 aa, synthetic construct
  source 1..9: note = Seed: CSFGGVSVI
CQFGGVSVM

SEQ ID NO: 14997 - protein, 9 aa, synthetic construct
  source 1..9: note = Seed: CSFGGVSVI
CQFGGVSVV

SEQ ID NO: 14998 - protein, 9 aa, synthetic construct
  source 1..9: note = Seed: CSFGGVSVI
CQFGGVSVW

SEQ ID NO: 14999 - protein, 9 aa, synthetic construct
  source 1..9: note = Seed: CSFGGVSVI
CQFGGVSVY

SEQ ID NO: 15000 - protein, 11 aa, synthetic construct
  source 1..11: note = Seed: CTFLLNKEMYL
CQFLLNKEMYV

SEQ ID NO: 15001 - protein, 10 aa, synthetic construct
  source 1..10: note = Seed: CLFWNCNVDR
CQFWNCNVDR

SEQ ID NO: 15002 - protein, 10 aa, synthetic construct
  source 1..10: note = Seed: CSFYEDFLEY
CQFYEDFLEF

SEQ ID NO: 15003 - protein, 10 aa, synthetic construct
  source 1..10: note = Seed: CSFYEDFLEY
CQFYEDFLEM

SEQ ID NO: 15004 - protein, 10 aa, synthetic construct
  source 1..10: note = Seed: CSFYEDFLEY
CQFYEDFLEY

SEQ ID NO: 15005 - protein, 10 aa, synthetic construct
  source 1..10: note = Seed: CGKGYHLMSF
CQKGYHLMSF

SEQ ID NO: 15006 - protein, 10 aa, synthetic construct
  source 1..10: note = Seed: CGKGYHLMSF
CQKGYHLMSM

SEQ ID NO: 15007 - protein, 10 aa, synthetic construct
  source 1..10: note = Seed: CGKGYHLMSF
CQKGYHLMSY

SEQ ID NO: 15008 - protein, 10 aa, synthetic construct
  source 1..10: note = Seed: CVLAAECTIF
CQLAAECTIF

SEQ ID NO: 15009 - protein, 10 aa, synthetic construct
  source 1..10: note = Seed: CVLAAECTIF
CQLAAECTIY

SEQ ID NO: 15010 - protein, 9 aa, synthetic construct
  source 1..9: note = Seed: CMMCYKRNR
CQMCYKRNR

SEQ ID NO: 15011 - protein, 9 aa, synthetic construct
  source 1..9: note = Seed: CIMLVYCFL
CQMLVYCFV

SEQ ID NO: 15012 - protein, 9 aa, synthetic construct
  source 1..9: note = Seed: CVMYASAVV
CQMYASAVF

SEQ ID NO: 15013 - protein, 9 aa, synthetic construct
  source 1..9: note = Seed: CVMYASAVV
CQMYASAVH

SEQ ID NO: 15014 - protein, 9 aa, synthetic construct
  source 1..9: note = Seed: CVMYASAVV
CQMYASAVI

SEQ ID NO: 15015 - protein, 9 aa, synthetic construct
  source 1..9: note = Seed: CVMYASAVV
CQMYASAVL

SEQ ID NO: 15016 - protein, 9 aa, synthetic construct
  source 1..9: note = Seed: CVMYASAVV
CQMYASAVM

SEQ ID NO: 15017 - protein, 9 aa, synthetic construct
  source 1..9: note = Seed: CVMYASAVV
CQMYASAVV

SEQ ID NO: 15018 - protein, 10 aa, synthetic construct
  source 1..10: note = Seed: CVMYASAVVL
CQMYASAVVF

SEQ ID NO: 15019 - protein, 10 aa, synthetic construct
  source 1..10: note = Seed: CVMYASAVVL
CQMYASAVVL

SEQ ID NO: 15020 - protein, 11 aa, synthetic construct
  source 1..11: note = Seed: CVMYASAVVLL
CQMYASAVVLF

SEQ ID NO: 15021 - protein, 10 aa, synthetic construct
  source 1..10: note = Seed: CVMYASAVVL
CQMYASAVVM

SEQ ID NO: 15022 - protein, 10 aa, synthetic construct
  source 1..10: note = Seed: CVMYASAVVL
CQMYASAVVY

SEQ ID NO: 15023 - protein, 9 aa, synthetic construct
  source 1..9: note = Seed: CVMYASAVV
CQMYASAVW

SEQ ID NO: 15024 - protein, 9 aa, synthetic construct
  source 1..9: note = Seed: CVMYASAVV
CQMYASAVY

SEQ ID NO: 15025 - protein, 9 aa, synthetic construct
  source 1..9: note = Seed: CVNFNFNGL
CQNFNFNGV

SEQ ID NO: 15026 - protein, 10 aa, synthetic construct
  source 1..10: note = Seed: CANGQVFGLY
CQNGQVFGLY

SEQ ID NO: 15027 - protein, 11 aa, synthetic construct
  source 1..11: note = Seed: CANGQVFGLYK
CQNGQVFGLYR

SEQ ID NO: 15028 - protein, 9 aa, synthetic construct
  source 1..9: note = Seed: CVPLNIIPL
CQPLNIIPV

SEQ ID NO: 15029 - protein, 9 aa, synthetic construct
  source 1..9: note = Seed: CTSVVLLSV
CQSVVLLSV

SEQ ID NO: 15030 - protein, 9 aa, synthetic construct
  source 1..9: note = Seed: CSTMTNRQF
CQTMTNRQF

SEQ ID NO: 15031 - protein, 9 aa, synthetic construct
  source 1..9: note = Seed: CSTMTNRQF
CQTMTNRQM

SEQ ID NO: 15032 - protein, 9 aa, synthetic construct
  source 1..9: note = Seed: CSTMTNRQF
CQTMTNRQY

SEQ ID NO: 15033 - protein, 9 aa, synthetic construct
  source 1..9: note = Seed: CLTPVYSFL
CQTPVYSFL

SEQ ID NO: 15034 - protein, 9 aa, synthetic construct
  source 1..9: note = Seed: CLTPVYSFL
CQTPVYSFV

SEQ ID NO: 15035 - protein, 10 aa, synthetic construct
  source 1..10: note = Seed: CGTTTLNGLW
CQTTTLNGLW

SEQ ID NO: 15036 - protein, 9 aa, synthetic construct
  source 1..9: note = Seed: CLVGLMWLS
CQVGLMWLI

SEQ ID NO: 15037 - protein, 9 aa, synthetic construct
  source 1..9: note = Seed: CLVGLMWLS
CQVGLMWLL

SEQ ID NO: 15038 - protein, 10 aa, synthetic construct
  source 1..10: note = Seed: CLVGLMWLSY
CQVGLMWLSF

SEQ ID NO: 15039 - protein, 10 aa, synthetic construct
  source 1..10: note = Seed: CLVGLMWLSY
CQVGLMWLSY

SEQ ID NO: 15040 - protein, 9 aa, synthetic construct
  source 1..9: note = Seed: CLVGLMWLS
CQVGLMWLV

SEQ ID NO: 15041 - protein, 9 aa, synthetic construct
  source 1..9: note = Seed: CQVHGNAHV
CQVHGNAHF

SEQ ID NO: 15042 - protein, 9 aa, synthetic construct
  source 1..9: note = Seed: CQVHGNAHV
CQVHGNAHL

SEQ ID NO: 15043 - protein, 9 aa, synthetic construct
  source 1..9: note = Seed: CQVHGNAHV
CQVHGNAHM

SEQ ID NO: 15044 - protein, 9 aa, synthetic construct
  source 1..9: note = Seed: CQVHGNAHV
CQVHGNAHY

SEQ ID NO: 15045 - protein, 10 aa, synthetic construct
  source 1..10: note = Seed: CLAYYFMRFR
CRAYYFMRFR

SEQ ID NO: 15046 - protein, 9 aa, synthetic construct
  source 1..9: note = Seed: CRFDTRVLS
CRFDTRVLF

SEQ ID NO: 15047 - protein, 9 aa, synthetic construct
  source 1..9: note = Seed: CRFDTRVLS
CRFDTRVLI

SEQ ID NO: 15048 - protein, 9 aa, synthetic construct
  source 1..9: note = Seed: CRFDTRVLS
CRFDTRVLK

SEQ ID NO: 15049 - protein, 9 aa, synthetic construct
  source 1..9: note = Seed: CRFDTRVLS
CRFDTRVLL

SEQ ID NO: 15050 - protein, 9 aa, synthetic construct
  source 1..9: note = Seed: CRFDTRVLS
CRFDTRVLM

SEQ ID NO: 15051 - protein, 9 aa, synthetic construct
  source 1..9: note = Seed: CRFDTRVLS
CRFDTRVLR

SEQ ID NO: 15052 - protein, 9 aa, synthetic construct
  source 1..9: note = Seed: CRFDTRVLS
CRFDTRVLY

SEQ ID NO: 15053 - protein, 10 aa, synthetic construct
  source 1..10: note = Seed: CTFEYVSQPF
CRFEYVSQPF

SEQ ID NO: 15054 - protein, 10 aa, synthetic construct
  source 1..10: note = Seed: CTFEYVSQPF
CRFEYVSQPY

SEQ ID NO: 15055 - protein, 9 aa, synthetic construct
  source 1..9: note = Seed: CSFGGVSVI
CRFGGVSVF

SEQ ID NO: 15056 - protein, 9 aa, synthetic construct
  source 1..9: note = Seed: CSFGGVSVI
CRFGGVSVM

SEQ ID NO: 15057 - protein, 9 aa, synthetic construct
  source 1..9: note = Seed: CSFGGVSVI
CRFGGVSVY

SEQ ID NO: 15058 - protein, 11 aa, synthetic construct
  source 1..11: note = Seed: CTFLLNKEMYL
CRFLLNKEMYV

SEQ ID NO: 15059 - protein, 10 aa, synthetic construct
  source 1..10: note = Seed: CSFYEDFLEY
CRFYEDFLEY

SEQ ID NO: 15060 - protein, 10 aa, synthetic construct
  source 1..10: note = Seed: CVMYASAVVL
CRMYASAVVF

SEQ ID NO: 15061 - protein, 11 aa, synthetic construct
  source 1..11: note = Seed: CVMYASAVVLL
CRMYASAVVLF

SEQ ID NO: 15062 - protein, 10 aa, synthetic construct
  source 1..10: note = Seed: CVMYASAVVL
CRMYASAVVM

SEQ ID NO: 15063 - protein, 10 aa, synthetic construct
  source 1..10: note = Seed: CVMYASAVVL
CRMYASAVVY

SEQ ID NO: 15064 - protein, 10 aa, synthetic construct
  source 1..10: note = Seed: CGTTTLNGLW
CRTTTLNGLW

SEQ ID NO: 15065 - protein, 9 aa, synthetic construct
  source 1..9: note = Seed: CPAEIVDTV
CSAEIVDTI

SEQ ID NO: 15066 - protein, 9 aa, synthetic construct
  source 1..9: note = Seed: CPAEIVDTV
CSAEIVDTV

SEQ ID NO: 15067 - protein, 9 aa, synthetic construct
  source 1..9: note = Seed: CPAEIVDTV
CSAEIVDTY

SEQ ID NO: 15068 - protein, 10 aa, synthetic construct
  source 1..10: note = Seed: CLAYYFMRFR
CSAYYFMRFK

SEQ ID NO: 15069 - protein, 10 aa, synthetic construct
  source 1..10: note = Seed: CLAYYFMRFR
CSAYYFMRFR

SEQ ID NO: 15070 - protein, 9 aa, synthetic construct
  source 1..9: note = Seed: CLAYYFMRF
CSAYYFMRY

SEQ ID NO: 15071 - protein, 9 aa, synthetic construct
  source 1..9: note = Seed: CAFAVDAAK
CSFAVDAAK

SEQ ID NO: 15072 - protein, 9 aa, synthetic construct
  source 1..9: note = Seed: CAFAVDAAK
CSFAVDAAR

SEQ ID NO: 15073 - protein, 10 aa, synthetic construct
  source 1..10: note = Seed: CTFEYVSQPF
CSFEYVSQPF

SEQ ID NO: 15074 - protein, 10 aa, synthetic construct
  source 1..10: note = Seed: CTFEYVSQPF
CSFEYVSQPW

SEQ ID NO: 15075 - protein, 10 aa, synthetic construct
  source 1..10: note = Seed: CTFEYVSQPF
CSFEYVSQPY

SEQ ID NO: 15076 - protein, 9 aa, synthetic construct
  source 1..9: note = Seed: CSFGGVSVI
CSFGGVSVF

SEQ ID NO: 15077 - protein, 9 aa, synthetic construct
  source 1..9: note = Seed: CSFGGVSVI
CSFGGVSVL

SEQ ID NO: 15078 - protein, 9 aa, synthetic construct
  source 1..9: note = Seed: CSFGGVSVI
CSFGGVSVM

SEQ ID NO: 15079 - protein, 9 aa, synthetic construct
  source 1..9: note = Seed: CSFGGVSVI
CSFGGVSVV

SEQ ID NO: 15080 - protein, 9 aa, synthetic construct
  source 1..9: note = Seed: CSFGGVSVI
CSFGGVSVW

SEQ ID NO: 15081 - protein, 9 aa, synthetic construct
  source 1..9: note = Seed: CSFGGVSVI
CSFGGVSVY

SEQ ID NO: 15082 - protein, 9 aa, synthetic construct
  source 1..9: note = Seed: CTFLLNKEM
CSFLLNKEF

SEQ ID NO: 15083 - protein, 11 aa, synthetic construct
  source 1..11: note = Seed: CTFLLNKEMYL
CSFLLNKEMYV

SEQ ID NO: 15084 - protein, 9 aa, synthetic construct
  source 1..9: note = Seed: CTFLLNKEM
CSFLLNKEW

SEQ ID NO: 15085 - protein, 9 aa, synthetic construct
  source 1..9: note = Seed: CTFLLNKEM
CSFLLNKEY

SEQ ID NO: 15086 - protein, 10 aa, synthetic construct
  source 1..10: note = Seed: CLFWNCNVDR
CSFWNCNVDR

SEQ ID NO: 15087 - protein, 10 aa, synthetic construct
  source 1..10: note = Seed: CSFYEDFLEY
CSFYEDFLEF

SEQ ID NO: 15088 - protein, 10 aa, synthetic construct
  source 1..10: note = Seed: CSFYEDFLEY
CSFYEDFLEK

SEQ ID NO: 15089 - protein, 10 aa, synthetic construct
  source 1..10: note = Seed: CSFYEDFLEY
CSFYEDFLEW

SEQ ID NO: 15090 - protein, 10 aa, synthetic construct
  source 1..10: note = Seed: CTIFKDASGK
CSIFKDASGR

SEQ ID NO: 15091 - protein, 9 aa, synthetic construct
  source 1..9: note = Seed: CYKRNRATR
CSKRNRATR

SEQ ID NO: 15092 - protein, 10 aa, synthetic construct
  source 1..10: note = Seed: CPLIAAVITR
CSLIAAVITR

SEQ ID NO: 15093 - protein, 10 aa, synthetic construct
  source 1..10: note = Seed: CVLSGHNLAK
CSLSGHNLAK

SEQ ID NO: 15094 - protein, 10 aa, synthetic construct
  source 1..10: note = Seed: CVLSGHNLAK
CSLSGHNLAR

SEQ ID NO: 15095 - protein, 9 aa, synthetic construct
  source 1..9: note = Seed: CMMCYKRNR
CSMCYKRNR

SEQ ID NO: 15096 - protein, 9 aa, synthetic construct
  source 1..9: note = Seed: CVMYASAVV
CSMYASAVF

SEQ ID NO: 15097 - protein, 9 aa, synthetic construct
  source 1..9: note = Seed: CVMYASAVV
CSMYASAVL

SEQ ID NO: 15098 - protein, 9 aa, synthetic construct
  source 1..9: note = Seed: CVMYASAVV
CSMYASAVM

SEQ ID NO: 15099 - protein, 9 aa, synthetic construct
  source 1..9: note = Seed: CVMYASAVV
CSMYASAVV

SEQ ID NO: 15100 - protein, 10 aa, synthetic construct
  source 1..10: note = Seed: CVMYASAVVL
CSMYASAVVF

SEQ ID NO: 15101 - protein, 11 aa, synthetic construct
  source 1..11: note = Seed: CVMYASAVVLL
CSMYASAVVLF

SEQ ID NO: 15102 - protein, 10 aa, synthetic construct
  source 1..10: note = Seed: CVMYASAVVL
CSMYASAVVM

SEQ ID NO: 15103 - protein, 10 aa, synthetic construct
  source 1..10: note = Seed: CVMYASAVVL
CSMYASAVVV

SEQ ID NO: 15104 - protein, 10 aa, synthetic construct
  source 1..10: note = Seed: CVMYASAVVL
CSMYASAVVY

SEQ ID NO: 15105 - protein, 9 aa, synthetic construct
  source 1..9: note = Seed: CVMYASAVV
CSMYASAVY

SEQ ID NO: 15106 - protein, 9 aa, synthetic construct
  source 1..9: note = Seed: CVNFNFNGL
CSNFNFNGV

SEQ ID NO: 15107 - protein, 10 aa, synthetic construct
  source 1..10: note = Seed: CANGQVFGLY
CSNGQVFGLY

SEQ ID NO: 15108 - protein, 11 aa, synthetic construct
  source 1..11: note = Seed: CANGQVFGLYK
CSNGQVFGLYR

SEQ ID NO: 15109 - protein, 9 aa, synthetic construct
  source 1..9: note = Seed: CANGQVFGL
CSNGQVFGV

SEQ ID NO: 15110 - protein, 9 aa, synthetic construct
  source 1..9: note = Seed: CSRIIPARA
CSRIIPARK

SEQ ID NO: 15111 - protein, 9 aa, synthetic construct
  source 1..9: note = Seed: CSTMTNRQF
CSTMTNRQW

SEQ ID NO: 15112 - protein, 9 aa, synthetic construct
  source 1..9: note = Seed: CSTMTNRQF
CSTMTNRQY

SEQ ID NO: 15113 - protein, 9 aa, synthetic construct
  source 1..9: note = Seed: CLTPVYSFL
CSTPVYSFV

SEQ ID NO: 15114 - protein, 10 aa, synthetic construct
  source 1..10: note = Seed: CGTTTLNGLW
CSTTTLNGLW

SEQ ID NO: 15115 - protein, 9 aa, synthetic construct
  source 1..9: note = Seed: CPAEIVDTV
CTAEIVDTA

SEQ ID NO: 15116 - protein, 9 aa, synthetic construct
  source 1..9: note = Seed: CPAEIVDTV
CTAEIVDTI

SEQ ID NO: 15117 - protein, 9 aa, synthetic construct
  source 1..9: note = Seed: CPAEIVDTV
CTAEIVDTL

SEQ ID NO: 15118 - protein, 9 aa, synthetic construct
  source 1..9: note = Seed: CPAEIVDTV
CTAEIVDTM

SEQ ID NO: 15119 - protein, 9 aa, synthetic construct
  source 1..9: note = Seed: CPAEIVDTV
CTAEIVDTT

SEQ ID NO: 15120 - protein, 9 aa, synthetic construct
  source 1..9: note = Seed: CPAEIVDTV
CTAEIVDTV

SEQ ID NO: 15121 - protein, 9 aa, synthetic construct
  source 1..9: note = Seed: CPAEIVDTV
CTAEIVDTY

SEQ ID NO: 15122 - protein, 10 aa, synthetic construct
  source 1..10: note = Seed: CLAYYFMRFR
CTAYYFMRFK

SEQ ID NO: 15123 - protein, 10 aa, synthetic construct
  source 1..10: note = Seed: CLAYYFMRFR
CTAYYFMRFR

SEQ ID NO: 15124 - protein, 9 aa, synthetic construct
  source 1..9: note = Seed: CLAYYFMRF
CTAYYFMRY

SEQ ID NO: 15125 - protein, 9 aa, synthetic construct
  source 1..9: note = Seed: CAFAVDAAK
CTFAVDAAK

SEQ ID NO: 15126 - protein, 9 aa, synthetic construct
  source 1..9: note = Seed: CAFAVDAAK
CTFAVDAAR

SEQ ID NO: 15127 - protein, 9 aa, synthetic construct
  source 1..9: note = Seed: CAFAVDAAK
CTFAVDAAY

SEQ ID NO: 15128 - protein, 10 aa, synthetic construct
  source 1..10: note = Seed: CTFEYVSQPF
CTFEYVSQPW

SEQ ID NO: 15129 - protein, 10 aa, synthetic construct
  source 1..10: note = Seed: CTFEYVSQPF
CTFEYVSQPY

SEQ ID NO: 15130 - protein, 9 aa, synthetic construct
  source 1..9: note = Seed: CSFGGVSVI
CTFGGVSVA

SEQ ID NO: 15131 - protein, 9 aa, synthetic construct
  source 1..9: note = Seed: CSFGGVSVI
CTFGGVSVF

SEQ ID NO: 15132 - protein, 9 aa, synthetic construct
  source 1..9: note = Seed: CSFGGVSVI
CTFGGVSVI

SEQ ID NO: 15133 - protein, 9 aa, synthetic construct
  source 1..9: note = Seed: CSFGGVSVI
CTFGGVSVL

SEQ ID NO: 15134 - protein, 9 aa, synthetic construct
  source 1..9: note = Seed: CSFGGVSVI
CTFGGVSVM

SEQ ID NO: 15135 - protein, 9 aa, synthetic construct
  source 1..9: note = Seed: CSFGGVSVI
CTFGGVSVV

SEQ ID NO: 15136 - protein, 9 aa, synthetic construct
  source 1..9: note = Seed: CSFGGVSVI
CTFGGVSVW

SEQ ID NO: 15137 - protein, 9 aa, synthetic construct
  source 1..9: note = Seed: CSFGGVSVI
CTFGGVSVY

SEQ ID NO: 15138 - protein, 9 aa, synthetic construct
  source 1..9: note = Seed: CTFLLNKEM
CTFLLNKEF

SEQ ID NO: 15139 - protein, 11 aa, synthetic construct
  source 1..11: note = Seed: CTFLLNKEMYL
CTFLLNKEMYV

SEQ ID NO: 15140 - protein, 9 aa, synthetic construct
  source 1..9: note = Seed: CTFLLNKEM
CTFLLNKEW

SEQ ID NO: 15141 - protein, 9 aa, synthetic construct
  source 1..9: note = Seed: CTFLLNKEM
CTFLLNKEY

SEQ ID NO: 15142 - protein, 10 aa, synthetic construct
  source 1..10: note = Seed: CLFWNCNVDR
CTFWNCNVDR

SEQ ID NO: 15143 - protein, 10 aa, synthetic construct
  source 1..10: note = Seed: CSFYEDFLEY
CTFYEDFLEF

SEQ ID NO: 15144 - protein, 10 aa, synthetic construct
  source 1..10: note = Seed: CSFYEDFLEY
CTFYEDFLEK

SEQ ID NO: 15145 - protein, 10 aa, synthetic construct
  source 1..10: note = Seed: CSFYEDFLEY
CTFYEDFLEW

SEQ ID NO: 15146 - protein, 10 aa, synthetic construct
  source 1..10: note = Seed: CSFYEDFLEY
CTFYEDFLEY

SEQ ID NO: 15147 - protein, 10 aa, synthetic construct
  source 1..10: note = Seed: CTIFKDASGK
CTIFKDASGR

SEQ ID NO: 15148 - protein, 9 aa, synthetic construct
  source 1..9: note = Seed: CYKRNRATR
CTKRNRATR

SEQ ID NO: 15149 - protein, 10 aa, synthetic construct
  source 1..10: note = Seed: CALDPLSETK
CTLDPLSETK

SEQ ID NO: 15150 - protein, 10 aa, synthetic construct
  source 1..10: note = Seed: CALDPLSETK
CTLDPLSETR

SEQ ID NO: 15151 - protein, 10 aa, synthetic construct
  source 1..10: note = Seed: CPLIAAVITR
CTLIAAVITR

SEQ ID NO: 15152 - protein, 10 aa, synthetic construct
  source 1..10: note = Seed: CVLSGHNLAK
CTLSGHNLAK

SEQ ID NO: 15153 - protein, 10 aa, synthetic construct
  source 1..10: note = Seed: CVLSGHNLAK
CTLSGHNLAR

SEQ ID NO: 15154 - protein, 9 aa, synthetic construct
  source 1..9: note = Seed: CMMCYKRNR
CTMCYKRNR

SEQ ID NO: 15155 - protein, 9 aa, synthetic construct
  source 1..9: note = Seed: CVMYASAVV
CTMYASAVA

SEQ ID NO: 15156 - protein, 9 aa, synthetic construct
  source 1..9: note = Seed: CVMYASAVV
CTMYASAVF

SEQ ID NO: 15157 - protein, 9 aa, synthetic construct
  source 1..9: note = Seed: CVMYASAVV
CTMYASAVI

SEQ ID NO: 15158 - protein, 9 aa, synthetic construct
  source 1..9: note = Seed: CVMYASAVV
CTMYASAVL

SEQ ID NO: 15159 - protein, 9 aa, synthetic construct
  source 1..9: note = Seed: CVMYASAVV
CTMYASAVM

SEQ ID NO: 15160 - protein, 9 aa, synthetic construct
  source 1..9: note = Seed: CVMYASAVV
CTMYASAVV

SEQ ID NO: 15161 - protein, 10 aa, synthetic construct
  source 1..10: note = Seed: CVMYASAVVL
CTMYASAVVF

SEQ ID NO: 15162 - protein, 11 aa, synthetic construct
  source 1..11: note = Seed: CVMYASAVVLL
CTMYASAVVLF

SEQ ID NO: 15163 - protein, 10 aa, synthetic construct
  source 1..10: note = Seed: CVMYASAVVL
CTMYASAVVM

SEQ ID NO: 15164 - protein, 10 aa, synthetic construct
  source 1..10: note = Seed: CVMYASAVVL
CTMYASAVVV

SEQ ID NO: 15165 - protein, 10 aa, synthetic construct
  source 1..10: note = Seed: CVMYASAVVL
CTMYASAVVY

SEQ ID NO: 15166 - protein, 9 aa, synthetic construct
  source 1..9: note = Seed: CVMYASAVV
CTMYASAVY

SEQ ID NO: 15167 - protein, 9 aa, synthetic construct
  source 1..9: note = Seed: CVNFNFNGL
CTNFNFNGA

SEQ ID NO: 15168 - protein, 9 aa, synthetic construct
  source 1..9: note = Seed: CVNFNFNGL
CTNFNFNGI

SEQ ID NO: 15169 - protein, 9 aa, synthetic construct
  source 1..9: note = Seed: CVNFNFNGL
CTNFNFNGL

SEQ ID NO: 15170 - protein, 9 aa, synthetic construct
  source 1..9: note = Seed: CVNFNFNGL
CTNFNFNGV

SEQ ID NO: 15171 - protein, 9 aa, synthetic construct
  source 1..9: note = Seed: CANGQVFGL
CTNGQVFGI

SEQ ID NO: 15172 - protein, 10 aa, synthetic construct
  source 1..10: note = Seed: CANGQVFGLY
CTNGQVFGLY

SEQ ID NO: 15173 - protein, 11 aa, synthetic construct
  source 1..11: note = Seed: CANGQVFGLYK
CTNGQVFGLYK

SEQ ID NO: 15174 - protein, 11 aa, synthetic construct
  source 1..11: note = Seed: CANGQVFGLYK
CTNGQVFGLYR

SEQ ID NO: 15175 - protein, 9 aa, synthetic construct
  source 1..9: note = Seed: CANGQVFGL
CTNGQVFGV

SEQ ID NO: 15176 - protein, 9 aa, synthetic construct
  source 1..9: note = Seed: CVPLNIIPL
CTPLNIIPV

SEQ ID NO: 15177 - protein, 9 aa, synthetic construct
  source 1..9: note = Seed: CSRIIPARA
CTRIIPARK

SEQ ID NO: 15178 - protein, 10 aa, synthetic construct
  source 1..10: note = Seed: CIRRPFLCCK
CTRRPFLCCR

SEQ ID NO: 15179 - protein, 9 aa, synthetic construct
  source 1..9: note = Seed: CSTMTNRQF
CTTMTNRQF

SEQ ID NO: 15180 - protein, 9 aa, synthetic construct
  source 1..9: note = Seed: CSTMTNRQF
CTTMTNRQW

SEQ ID NO: 15181 - protein, 9 aa, synthetic construct
  source 1..9: note = Seed: CLTPVYSFL
CTTPVYSFA

SEQ ID NO: 15182 - protein, 9 aa, synthetic construct
  source 1..9: note = Seed: CLTPVYSFL
CTTPVYSFI

SEQ ID NO: 15183 - protein, 9 aa, synthetic construct
  source 1..9: note = Seed: CLTPVYSFL
CTTPVYSFL

SEQ ID NO: 15184 - protein, 9 aa, synthetic construct
  source 1..9: note = Seed: CLTPVYSFL
CTTPVYSFV

SEQ ID NO: 15185 - protein, 10 aa, synthetic construct
  source 1..10: note = Seed: CGTTTLNGLW
CTTTTLNGLW

SEQ ID NO: 15186 - protein, 9 aa, synthetic construct
  source 1..9: note = Seed: CLVGLMWLS
CTVGLMWLV

SEQ ID NO: 15187 - protein, 9 aa, synthetic construct
  source 1..9: note = Seed: CPAEIVDTV
CVAEIVDTA

SEQ ID NO: 15188 - protein, 9 aa, synthetic construct
  source 1..9: note = Seed: CPAEIVDTV
CVAEIVDTF

SEQ ID NO: 15189 - protein, 9 aa, synthetic construct
  source 1..9: note = Seed: CPAEIVDTV
CVAEIVDTI

SEQ ID NO: 15190 - protein, 9 aa, synthetic construct
  source 1..9: note = Seed: CPAEIVDTV
CVAEIVDTL

SEQ ID NO: 15191 - protein, 9 aa, synthetic construct
  source 1..9: note = Seed: CPAEIVDTV
CVAEIVDTM

SEQ ID NO: 15192 - protein, 9 aa, synthetic construct
  source 1..9: note = Seed: CPAEIVDTV
CVAEIVDTV

SEQ ID NO: 15193 - protein, 9 aa, synthetic construct
  source 1..9: note = Seed: CPAEIVDTV
CVAEIVDTW

SEQ ID NO: 15194 - protein, 9 aa, synthetic construct
  source 1..9: note = Seed: CPAEIVDTV
CVAEIVDTY

SEQ ID NO: 15195 - protein, 10 aa, synthetic construct
  source 1..10: note = Seed: CLAYYFMRFR
CVAYYFMRFK

SEQ ID NO: 15196 - protein, 10 aa, synthetic construct
  source 1..10: note = Seed: CLAYYFMRFR
CVAYYFMRFR

SEQ ID NO: 15197 - protein, 9 aa, synthetic construct
  source 1..9: note = Seed: CLAYYFMRF
CVAYYFMRY

SEQ ID NO: 15198 - protein, 9 aa, synthetic construct
  source 1..9: note = Seed: CAFAVDAAK
CVFAVDAAK

SEQ ID NO: 15199 - protein, 9 aa, synthetic construct
  source 1..9: note = Seed: CAFAVDAAK
CVFAVDAAR

SEQ ID NO: 15200 - protein, 10 aa, synthetic construct
  source 1..10: note = Seed: CTFEYVSQPF
CVFEYVSQPF

SEQ ID NO: 15201 - protein, 10 aa, synthetic construct
  source 1..10: note = Seed: CTFEYVSQPF
CVFEYVSQPY

SEQ ID NO: 15202 - protein, 9 aa, synthetic construct
  source 1..9: note = Seed: CSFGGVSVI
CVFGGVSVA

SEQ ID NO: 15203 - protein, 9 aa, synthetic construct
  source 1..9: note = Seed: CSFGGVSVI
CVFGGVSVF

SEQ ID NO: 15204 - protein, 9 aa, synthetic construct
  source 1..9: note = Seed: CSFGGVSVI
CVFGGVSVL

SEQ ID NO: 15205 - protein, 9 aa, synthetic construct
  source 1..9: note = Seed: CSFGGVSVI
CVFGGVSVM

SEQ ID NO: 15206 - protein, 9 aa, synthetic construct
  source 1..9: note = Seed: CSFGGVSVI
CVFGGVSVV

SEQ ID NO: 15207 - protein, 9 aa, synthetic construct
  source 1..9: note = Seed: CSFGGVSVI
CVFGGVSVW

SEQ ID NO: 15208 - protein, 9 aa, synthetic construct
  source 1..9: note = Seed: CSFGGVSVI
CVFGGVSVY

SEQ ID NO: 15209 - protein, 11 aa, synthetic construct
  source 1..11: note = Seed: CTFLLNKEMYL
CVFLLNKEMYV

SEQ ID NO: 15210 - protein, 10 aa, synthetic construct
  source 1..10: note = Seed: CLFWNCNVDR
CVFWNCNVDR

SEQ ID NO: 15211 - protein, 10 aa, synthetic construct
  source 1..10: note = Seed: CSFYEDFLEY
CVFYEDFLEK

SEQ ID NO: 15212 - protein, 10 aa, synthetic construct
  source 1..10: note = Seed: CSFYEDFLEY
CVFYEDFLEW

SEQ ID NO: 15213 - protein, 10 aa, synthetic construct
  source 1..10: note = Seed: CSFYEDFLEY
CVFYEDFLEY

SEQ ID NO: 15214 - protein, 10 aa, synthetic construct
  source 1..10: note = Seed: CTIFKDASGK
CVIFKDASGR

SEQ ID NO: 15215 - protein, 9 aa, synthetic construct
  source 1..9: note = Seed: CYKRNRATR
CVKRNRATR

SEQ ID NO: 15216 - protein, 10 aa, synthetic construct
  source 1..10: note = Seed: CALDPLSETK
CVLDPLSETK

SEQ ID NO: 15217 - protein, 10 aa, synthetic construct
  source 1..10: note = Seed: CALDPLSETK
CVLDPLSETR

SEQ ID NO: 15218 - protein, 10 aa, synthetic construct
  source 1..10: note = Seed: CPLIAAVITR
CVLIAAVITR

SEQ ID NO: 15219 - protein, 10 aa, synthetic construct
  source 1..10: note = Seed: CVLSGHNLAK
CVLSGHNLAR

SEQ ID NO: 15220 - protein, 9 aa, synthetic construct
  source 1..9: note = Seed: CMMCYKRNR
CVMCYKRNR

SEQ ID NO: 15221 - protein, 9 aa, synthetic construct
  source 1..9: note = Seed: CVMYASAVV
CVMYASAVF

SEQ ID NO: 15222 - protein, 9 aa, synthetic construct
  source 1..9: note = Seed: CVMYASAVV
CVMYASAVI

SEQ ID NO: 15223 - protein, 9 aa, synthetic construct
  source 1..9: note = Seed: CVMYASAVV
CVMYASAVM

SEQ ID NO: 15224 - protein, 10 aa, synthetic construct
  source 1..10: note = Seed: CVMYASAVVL
CVMYASAVVF

SEQ ID NO: 15225 - protein, 11 aa, synthetic construct
  source 1..11: note = Seed: CVMYASAVVLL
CVMYASAVVLF

SEQ ID NO: 15226 - protein, 10 aa, synthetic construct
  source 1..10: note = Seed: CVMYASAVVL
CVMYASAVVM

SEQ ID NO: 15227 - protein, 10 aa, synthetic construct
  source 1..10: note = Seed: CVMYASAVVL
CVMYASAVVY

SEQ ID NO: 15228 - protein, 9 aa, synthetic construct
  source 1..9: note = Seed: CVMYASAVV
CVMYASAVY

SEQ ID NO: 15229 - protein, 9 aa, synthetic construct
  source 1..9: note = Seed: CVNFNFNGL
CVNFNFNGI

SEQ ID NO: 15230 - protein, 9 aa, synthetic construct
  source 1..9: note = Seed: CVNFNFNGL
CVNFNFNGV

SEQ ID NO: 15231 - protein, 10 aa, synthetic construct
  source 1..10: note = Seed: CANGQVFGLY
CVNGQVFGLY

SEQ ID NO: 15232 - protein, 11 aa, synthetic construct
  source 1..11: note = Seed: CANGQVFGLYK
CVNGQVFGLYR

SEQ ID NO: 15233 - protein, 9 aa, synthetic construct
  source 1..9: note = Seed: CANGQVFGL
CVNGQVFGV

SEQ ID NO: 15234 - protein, 9 aa, synthetic construct
  source 1..9: note = Seed: CVPLNIIPL
CVPLNIIPV

SEQ ID NO: 15235 - protein, 9 aa, synthetic construct
  source 1..9: note = Seed: CSRIIPARA
CVRIIPARK

SEQ ID NO: 15236 - protein, 9 aa, synthetic construct
  source 1..9: note = Seed: CTTIVNGVR
CVTIVNGVR

SEQ ID NO: 15237 - protein, 9 aa, synthetic construct
  source 1..9: note = Seed: CLTPVYSFL
CVTPVYSFA

SEQ ID NO: 15238 - protein, 9 aa, synthetic construct
  source 1..9: note = Seed: CLTPVYSFL
CVTPVYSFI

SEQ ID NO: 15239 - protein, 9 aa, synthetic construct
  source 1..9: note = Seed: CLTPVYSFL
CVTPVYSFL

SEQ ID NO: 15240 - protein, 9 aa, synthetic construct
  source 1..9: note = Seed: CLTPVYSFL
CVTPVYSFV

SEQ ID NO: 15241 - protein, 10 aa, synthetic construct
  source 1..10: note = Seed: CGTTTLNGLW
CVTTTLNGLW

SEQ ID NO: 15242 - protein, 9 aa, synthetic construct
  source 1..9: note = Seed: CLVGLMWLS
CVVGLMWLV

SEQ ID NO: 15243 - protein, 10 aa, synthetic construct
  source 1..10: note = Seed: CLAYYFMRFR
CWAYYFMRFR

SEQ ID NO: 15244 - protein, 9 aa, synthetic construct
  source 1..9: note = Seed: CLAYYFMRF
CWAYYFMRY

SEQ ID NO: 15245 - protein, 9 aa, synthetic construct
  source 1..9: note = Seed: CAFAVDAAK
CWFAVDAAR

SEQ ID NO: 15246 - protein, 11 aa, synthetic construct
  source 1..11: note = Seed: CTFLLNKEMYL
CWFLLNKEMYV

SEQ ID NO: 15247 - protein, 10 aa, synthetic construct
  source 1..10: note = Seed: CSFYEDFLEY
CWFYEDFLEY

SEQ ID NO: 15248 - protein, 10 aa, synthetic construct
  source 1..10: note = Seed: CVMYASAVVL
CWMYASAVVF

SEQ ID NO: 15249 - protein, 11 aa, synthetic construct
  source 1..11: note = Seed: CVMYASAVVLL
CWMYASAVVLF

SEQ ID NO: 15250 - protein, 10 aa, synthetic construct
  source 1..10: note = Seed: CVMYASAVVL
CWMYASAVVM

SEQ ID NO: 15251 - protein, 10 aa, synthetic construct
  source 1..10: note = Seed: CVMYASAVVL
CWMYASAVVY

SEQ ID NO: 15252 - protein, 10 aa, synthetic construct
  source 1..10: note = Seed: CFTNVYADSF
CWTNVYADSF

SEQ ID NO: 15253 - protein, 10 aa, synthetic construct
  source 1..10: note = Seed: CGTTTLNGLW
CWTTTLNGLW

SEQ ID NO: 15254 - protein, 10 aa, synthetic construct
  source 1..10: note = Seed: CLAYYFMRFR
CYAYYFMRFK

SEQ ID NO: 15255 - protein, 10 aa, synthetic construct
  source 1..10: note = Seed: CLAYYFMRFR
CYAYYFMRFR

SEQ ID NO: 15256 - protein, 9 aa, synthetic construct
  source 1..9: note = Seed: CLAYYFMRF
CYAYYFMRY

SEQ ID NO: 15257 - protein, 9 aa, synthetic construct
  source 1..9: note = Seed: CAFAVDAAK
CYFAVDAAK

SEQ ID NO: 15258 - protein, 9 aa, synthetic construct
  source 1..9: note = Seed: CAFAVDAAK
CYFAVDAAR

SEQ ID NO: 15259 - protein, 9 aa, synthetic construct
  source 1..9: note = Seed: CSFGGVSVI
CYFGGVSVF

SEQ ID NO: 15260 - protein, 11 aa, synthetic construct
  source 1..11: note = Seed: CTFLLNKEMYL
CYFLLNKEMYV

SEQ ID NO: 15261 - protein, 10 aa, synthetic construct
  source 1..10: note = Seed: CLFWNCNVDR
CYFWNCNVDR

SEQ ID NO: 15262 - protein, 10 aa, synthetic construct
  source 1..10: note = Seed: CSFYEDFLEY
CYFYEDFLEY

SEQ ID NO: 15263 - protein, 10 aa, synthetic construct
  source 1..10: note = Seed: CILHCANFNV
CYLHCANFNL

SEQ ID NO: 15264 - protein, 10 aa, synthetic construct
  source 1..10: note = Seed: CILHCANFNV
CYLHCANFNV

SEQ ID NO: 15265 - protein, 10 aa, synthetic construct
  source 1..10: note = Seed: CPLIAAVITR
CYLIAAVITR

SEQ ID NO: 15266 - protein, 10 aa, synthetic construct
  source 1..10: note = Seed: CVLSGHNLAK
CYLSGHNLAR

SEQ ID NO: 15267 - protein, 9 aa, synthetic construct
  source 1..9: note = Seed: CMMCYKRNR
CYMCYKRNR

SEQ ID NO: 15268 - protein, 8 aa, synthetic construct
  source 1..8: note = Seed: CYMHHMEL
CYMHHMEF

SEQ ID NO: 15269 - protein, 8 aa, synthetic construct
  source 1..8: note = Seed: CYMHHMEL
CYMHHMEM

SEQ ID NO: 15270 - protein, 8 aa, synthetic construct
  source 1..8: note = Seed: CYMHHMEL
CYMHHMEY

SEQ ID NO: 15271 - protein, 10 aa, synthetic construct
  source 1..10: note = Seed: CVMYASAVVL
CYMYASAVVF

SEQ ID NO: 15272 - protein, 10 aa, synthetic construct
  source 1..10: note = Seed: CVMYASAVVL
CYMYASAVVL

SEQ ID NO: 15273 - protein, 11 aa, synthetic construct
  source 1..11: note = Seed: CVMYASAVVLL
CYMYASAVVLF

SEQ ID NO: 15274 - protein, 11 aa, synthetic construct
  source 1..11: note = Seed: CVMYASAVVLL
CYMYASAVVLI

SEQ ID NO: 15275 - protein, 11 aa, synthetic construct
  source 1..11: note = Seed: CVMYASAVVLL
CYMYASAVVLL

SEQ ID NO: 15276 - protein, 11 aa, synthetic construct
  source 1..11: note = Seed: CVMYASAVVLL
CYMYASAVVLV

SEQ ID NO: 15277 - protein, 11 aa, synthetic construct
  source 1..11: note = Seed: CVMYASAVVLL
CYMYASAVVLW

SEQ ID NO: 15278 - protein, 10 aa, synthetic construct
  source 1..10: note = Seed: CVMYASAVVL
CYMYASAVVM

SEQ ID NO: 15279 - protein, 10 aa, synthetic construct
  source 1..10: note = Seed: CVMYASAVVL
CYMYASAVVV

SEQ ID NO: 15280 - protein, 10 aa, synthetic construct
  source 1..10: note = Seed: CVMYASAVVL
CYMYASAVVY

SEQ ID NO: 15281 - protein, 11 aa, synthetic construct
  source 1..11: note = Seed: CANGQVFGLYK
CYNGQVFGLYR

SEQ ID NO: 15282 - protein, 10 aa, synthetic construct
  source 1..10: note = Seed: CIRRPFLCCK
CYRRPFLCCR

SEQ ID NO: 15283 - protein, 10 aa, synthetic construct
  source 1..10: note = Seed: CFTNVYADSF
CYTNVYADSF

SEQ ID NO: 15284 - protein, 10 aa, synthetic construct
  source 1..10: note = Seed: CFTNVYADSF
CYTNVYADSW

SEQ ID NO: 15285 - protein, 10 aa, synthetic construct
  source 1..10: note = Seed: CGTTTLNGLW
CYTTTLNGLW

SEQ ID NO: 15286 - protein, 9 aa, synthetic construct
  source 1..9: note = Seed: DQAMTQMYK
DAAMTQMYK

SEQ ID NO: 15287 - protein, 9 aa, synthetic construct
  source 1..9: note = Seed: DQAMTQMYK
DAAMTQMYR

SEQ ID NO: 15288 - protein, 9 aa, synthetic construct
  source 1..9: note = Seed: DVFHLYLQY
DAFHLYLQF

SEQ ID NO: 15289 - protein, 9 aa, synthetic construct
  source 1..9: note = Seed: DVFHLYLQY
DAFHLYLQK

SEQ ID NO: 15290 - protein, 9 aa, synthetic construct
  source 1..9: note = Seed: DVFHLYLQY
DAFHLYLQR

SEQ ID NO: 15291 - protein, 9 aa, synthetic construct
  source 1..9: note = Seed: DVFHLYLQY
DAFHLYLQY

SEQ ID NO: 15292 - protein, 10 aa, synthetic construct
  source 1..10: note = Seed: DVFHLYLQYI
DAFHLYLQYV

SEQ ID NO: 15293 - protein, 10 aa, synthetic construct
  source 1..10: note = Seed: DEFTPFDVVR
DAFTPFDVVR

SEQ ID NO: 15294 - protein, 9 aa, synthetic construct
  source 1..9: note = Seed: DVFYKENSY
DAFYKENSK

SEQ ID NO: 15295 - protein, 9 aa, synthetic construct
  source 1..9: note = Seed: DVFYKENSY
DAFYKENSR

SEQ ID NO: 15296 - protein, 9 aa, synthetic construct
  source 1..9: note = Seed: DVFYKENSY
DAFYKENSY

SEQ ID NO: 15297 - protein, 9 aa, synthetic construct
  source 1..9: note = Seed: DSGFAAYSR
DAGFAAYSR

SEQ ID NO: 15298 - protein, 9 aa, synthetic construct
  source 1..9: note = Seed: DSIIIGGAK
DAIIIGGAK

SEQ ID NO: 15299 - protein, 9 aa, synthetic construct
  source 1..9: note = Seed: DSIIIGGAK
DAIIIGGAR

SEQ ID NO: 15300 - protein, 9 aa, synthetic construct
  source 1..9: note = Seed: DMILSLLSK
DAILSLLSR

SEQ ID NO: 15301 - protein, 10 aa, synthetic construct
  source 1..10: note = Seed: DYLVSTQEFR
DALVSTQEFR

SEQ ID NO: 15302 - protein, 9 aa, synthetic construct
  source 1..9: note = Seed: DLNQLTGYK
DANQLTGYK

SEQ ID NO: 15303 - protein, 9 aa, synthetic construct
  source 1..9: note = Seed: DLNQLTGYK
DANQLTGYR

SEQ ID NO: 15304 - protein, 10 aa, synthetic construct
  source 1..10: note = Seed: DLPIGINITR
DAPIGINITK

SEQ ID NO: 15305 - protein, 10 aa, synthetic construct
  source 1..10: note = Seed: DLPIGINITR
DAPIGINITR

SEQ ID NO: 15306 - protein, 10 aa, synthetic construct
  source 1..10: note = Seed: DKSAGFPFNK
DASAGFPFNK

SEQ ID NO: 15307 - protein, 10 aa, synthetic construct
  source 1..10: note = Seed: DKSAGFPFNK
DASAGFPFNR

SEQ ID NO: 15308 - protein, 10 aa, synthetic construct
  source 1..10: note = Seed: DMSKFPLKLR
DASKFPLKLR

SEQ ID NO: 15309 - protein, 10 aa, synthetic construct
  source 1..10: note = Seed: DTSLSGFKLK
DASLSGFKLR

SEQ ID NO: 15310 - protein, 10 aa, synthetic construct
  source 1..10: note = Seed: DQSSYIVDSV
DASSYIVDSV

SEQ ID NO: 15311 - protein, 10 aa, synthetic construct
  source 1..10: note = Seed: DCVMYASAVV
DAVMYASAVV

SEQ ID NO: 15312 - protein, 9 aa, synthetic construct
  source 1..9: note = Seed: DTYACWHHS
DAYACWHHI

SEQ ID NO: 15313 - protein, 10 aa, synthetic construct
  source 1..10: note = Seed: DTYACWHHSI
DAYACWHHSF

SEQ ID NO: 15314 - protein, 10 aa, synthetic construct
  source 1..10: note = Seed: DTYACWHHSI
DAYACWHHSV

SEQ ID NO: 15315 - protein, 9 aa, synthetic construct
  source 1..9: note = Seed: DTYACWHHS
DAYACWHHV

SEQ ID NO: 15316 - protein, 9 aa, synthetic construct
  source 1..9: note = Seed: DGYFKIYSK
DAYFKIYSK

SEQ ID NO: 15317 - protein, 9 aa, synthetic construct
  source 1..9: note = Seed: DGYFKIYSK
DAYFKIYSR

SEQ ID NO: 15318 - protein, 9 aa, synthetic construct
  source 1..9: note = Seed: DTYNLWNTF
DAYNLWNTF

SEQ ID NO: 15319 - protein, 9 aa, synthetic construct
  source 1..9: note = Seed: DTYNLWNTF
DAYNLWNTM

SEQ ID NO: 15320 - protein, 9 aa, synthetic construct
  source 1..9: note = Seed: DTYNLWNTF
DAYNLWNTY

SEQ ID NO: 15321 - protein, 10 aa, synthetic construct
  source 1..10: note = Seed: DSYYSLLMPI
DAYYSLLMPF

SEQ ID NO: 15322 - protein, 10 aa, synthetic construct
  source 1..10: note = Seed: DSYYSLLMPI
DAYYSLLMPV

SEQ ID NO: 15323 - protein, 10 aa, synthetic construct
  source 1..10: note = Seed: DKSAGFPFNK
DCSAGFPFNK

SEQ ID NO: 15324 - protein, 10 aa, synthetic construct
  source 1..10: note = Seed: DKSAGFPFNK
DCSAGFPFNR

SEQ ID NO: 15325 - protein, 9 aa, synthetic construct
  source 1..9: note = Seed: DGYFKIYSK
DCYFKIYSR

SEQ ID NO: 15326 - protein, 10 aa, synthetic construct
  source 1..10: note = Seed: DKSAGFPFNK
DDSAGFPFNK

SEQ ID NO: 15327 - protein, 10 aa, synthetic construct
  source 1..10: note = Seed: DKSAGFPFNK
DDSAGFPFNR

SEQ ID NO: 15328 - protein, 10 aa, synthetic construct
  source 1..10: note = Seed: DCVMYASAVV
DDVMYASAVV

SEQ ID NO: 15329 - protein, 8 aa, synthetic construct
  source 1..8: note = Seed: DEFTPFDV
DEFTPFDF

SEQ ID NO: 15330 - protein, 8 aa, synthetic construct
  source 1..8: note = Seed: DEFTPFDV
DEFTPFDM

SEQ ID NO: 15331 - protein, 9 aa, synthetic construct
  source 1..9: note = Seed: DEFTPFDVV
DEFTPFDVF

SEQ ID NO: 15332 - protein, 9 aa, synthetic construct
  source 1..9: note = Seed: DEFTPFDVV
DEFTPFDVL

SEQ ID NO: 15333 - protein, 9 aa, synthetic construct
  source 1..9: note = Seed: DEFTPFDVV
DEFTPFDVM

SEQ ID NO: 15334 - protein, 9 aa, synthetic construct
  source 1..9: note = Seed: DEFTPFDVV
DEFTPFDVY

SEQ ID NO: 15335 - protein, 8 aa, synthetic construct
  source 1..8: note = Seed: DEFTPFDV
DEFTPFDY

SEQ ID NO: 15336 - protein, 10 aa, synthetic construct
  source 1..10: note = Seed: DKSAGFPFNK
DESAGFPFNK

SEQ ID NO: 15337 - protein, 10 aa, synthetic construct
  source 1..10: note = Seed: DKSAGFPFNK
DESAGFPFNR

SEQ ID NO: 15338 - protein, 10 aa, synthetic construct
  source 1..10: note = Seed: DQSSYIVDSV
DESSYIVDSV

SEQ ID NO: 15339 - protein, 9 aa, synthetic construct
  source 1..9: note = Seed: DEVARDLSL
DEVARDLSF

SEQ ID NO: 15340 - protein, 9 aa, synthetic construct
  source 1..9: note = Seed: DEVARDLSL
DEVARDLSY

SEQ ID NO: 15341 - protein, 10 aa, synthetic construct
  source 1..10: note = Seed: DCVMYASAVV
DEVMYASAVV

SEQ ID NO: 15342 - protein, 9 aa, synthetic construct
  source 1..9: note = Seed: DVFHLYLQY
DFFHLYLQY

SEQ ID NO: 15343 - protein, 11 aa, synthetic construct
  source 1..11: note = Seed: DVFHLYLQYIR
DFFHLYLQYIR

SEQ ID NO: 15344 - protein, 10 aa, synthetic construct
  source 1..10: note = Seed: DEFTPFDVVR
DFFTPFDVVR

SEQ ID NO: 15345 - protein, 9 aa, synthetic construct
  source 1..9: note = Seed: DSGFAAYSR
DFGFAAYSR

SEQ ID NO: 15346 - protein, 10 aa, synthetic construct
  source 1..10: note = Seed: DNLKTLLSLR
DFLKTLLSLR

SEQ ID NO: 15347 - protein, 10 aa, synthetic construct
  source 1..10: note = Seed: DYLVSTQEFR
DFLVSTQEFR

SEQ ID NO: 15348 - protein, 11 aa, synthetic construct
  source 1..11: note = Seed: DAMRNAGIVGV
DFMRNAGIVGV

SEQ ID NO: 15349 - protein, 10 aa, synthetic construct
  source 1..10: note = Seed: DLPIGINITR
DFPIGINITR

SEQ ID NO: 15350 - protein, 10 aa, synthetic construct
  source 1..10: note = Seed: DKSAGFPFNK
DFSAGFPFNK

SEQ ID NO: 15351 - protein, 10 aa, synthetic construct
  source 1..10: note = Seed: DKSAGFPFNK
DFSAGFPFNR

SEQ ID NO: 15352 - protein, 10 aa, synthetic construct
  source 1..10: note = Seed: DMSKFPLKLR
DFSKFPLKLR

SEQ ID NO: 15353 - protein, 10 aa, synthetic construct
  source 1..10: note = Seed: DQSSYIVDSV
DFSSYIVDSV

SEQ ID NO: 15354 - protein, 10 aa, synthetic construct
  source 1..10: note = Seed: DCVMYASAVV
DFVMYASAVV

SEQ ID NO: 15355 - protein, 10 aa, synthetic construct
  source 1..10: note = Seed: DTYACWHHSI
DFYACWHHSF

SEQ ID NO: 15356 - protein, 9 aa, synthetic construct
  source 1..9: note = Seed: DGYFKIYSK
DFYFKIYSK

SEQ ID NO: 15357 - protein, 9 aa, synthetic construct
  source 1..9: note = Seed: DGYFKIYSK
DFYFKIYSR

SEQ ID NO: 15358 - protein, 10 aa, synthetic construct
  source 1..10: note = Seed: DKYVRNLQHR
DFYVRNLQHR

SEQ ID NO: 15359 - protein, 10 aa, synthetic construct
  source 1..10: note = Seed: DSYYSLLMPI
DFYYSLLMPF

SEQ ID NO: 15360 - protein, 9 aa, synthetic construct
  source 1..9: note = Seed: DQAMTQMYK
DGAMTQMYR

SEQ ID NO: 15361 - protein, 10 aa, synthetic construct
  source 1..10: note = Seed: DKSAGFPFNK
DGSAGFPFNK

SEQ ID NO: 15362 - protein, 10 aa, synthetic construct
  source 1..10: note = Seed: DKSAGFPFNK
DGSAGFPFNR

SEQ ID NO: 15363 - protein, 10 aa, synthetic construct
  source 1..10: note = Seed: DCVMYASAVV
DGVMYASAVV

SEQ ID NO: 15364 - protein, 9 aa, synthetic construct
  source 1..9: note = Seed: DGYFKIYSK
DGYFKIYSR

SEQ ID NO: 15365 - protein, 10 aa, synthetic construct
  source 1..10: note = Seed: DKSAGFPFNK
DHSAGFPFNK

SEQ ID NO: 15366 - protein, 10 aa, synthetic construct
  source 1..10: note = Seed: DKSAGFPFNK
DHSAGFPFNR

SEQ ID NO: 15367 - protein, 10 aa, synthetic construct
  source 1..10: note = Seed: DVSFLAHIQW
DHSFLAHIQW

SEQ ID NO: 15368 - protein, 10 aa, synthetic construct
  source 1..10: note = Seed: DCVMYASAVV
DHVMYASAVV

SEQ ID NO: 15369 - protein, 10 aa, synthetic construct
  source 1..10: note = Seed: DTYACWHHSI
DHYACWHHSF

SEQ ID NO: 15370 - protein, 9 aa, synthetic construct
  source 1..9: note = Seed: DGYFKIYSK
DHYFKIYSR

SEQ ID NO: 15371 - protein, 10 aa, synthetic construct
  source 1..10: note = Seed: DSYYSLLMPI
DHYYSLLMPF

SEQ ID NO: 15372 - protein, 9 aa, synthetic construct
  source 1..9: note = Seed: DQAMTQMYK
DIAMTQMYK

SEQ ID NO: 15373 - protein, 9 aa, synthetic construct
  source 1..9: note = Seed: DQAMTQMYK
DIAMTQMYR

SEQ ID NO: 15374 - protein, 9 aa, synthetic construct
  source 1..9: note = Seed: DVFHLYLQY
DIFHLYLQK

SEQ ID NO: 15375 - protein, 9 aa, synthetic construct
  source 1..9: note = Seed: DVFHLYLQY
DIFHLYLQR

SEQ ID NO: 15376 - protein, 9 aa, synthetic construct
  source 1..9: note = Seed: DVFHLYLQY
DIFHLYLQY

SEQ ID NO: 15377 - protein, 10 aa, synthetic construct
  source 1..10: note = Seed: DVFHLYLQYI
DIFHLYLQYV

SEQ ID NO: 15378 - protein, 10 aa, synthetic construct
  source 1..10: note = Seed: DEFTPFDVVR
DIFTPFDVVR

SEQ ID NO: 15379 - protein, 9 aa, synthetic construct
  source 1..9: note = Seed: DVFYKENSY
DIFYKENSK

SEQ ID NO: 15380 - protein, 9 aa, synthetic construct
  source 1..9: note = Seed: DVFYKENSY
DIFYKENSR

SEQ ID NO: 15381 - protein, 9 aa, synthetic construct
  source 1..9: note = Seed: DSGFAAYSR
DIGFAAYSR

SEQ ID NO: 15382 - protein, 9 aa, synthetic construct
  source 1..9: note = Seed: DSIIIGGAK
DIIIIGGAR

SEQ ID NO: 15383 - protein, 9 aa, synthetic construct
  source 1..9: note = Seed: DMILSLLSK
DIILSLLSR

SEQ ID NO: 15384 - protein, 10 aa, synthetic construct
  source 1..10: note = Seed: DNLKTLLSLR
DILKTLLSLR

SEQ ID NO: 15385 - protein, 10 aa, synthetic construct
  source 1..10: note = Seed: DYLVSTQEFR
DILVSTQEFK

SEQ ID NO: 15386 - protein, 10 aa, synthetic construct
  source 1..10: note = Seed: DYLVSTQEFR
DILVSTQEFR

SEQ ID NO: 15387 - protein, 9 aa, synthetic construct
  source 1..9: note = Seed: DLNQLTGYK
DINQLTGYK

SEQ ID NO: 15388 - protein, 9 aa, synthetic construct
  source 1..9: note = Seed: DLNQLTGYK
DINQLTGYR

SEQ ID NO: 15389 - protein, 10 aa, synthetic construct
  source 1..10: note = Seed: DLPIGINITR
DIPIGINITK

SEQ ID NO: 15390 - protein, 10 aa, synthetic construct
  source 1..10: note = Seed: DLPIGINITR
DIPIGINITR

SEQ ID NO: 15391 - protein, 10 aa, synthetic construct
  source 1..10: note = Seed: DKSAGFPFNK
DISAGFPFNK

SEQ ID NO: 15392 - protein, 10 aa, synthetic construct
  source 1..10: note = Seed: DKSAGFPFNK
DISAGFPFNR

SEQ ID NO: 15393 - protein, 10 aa, synthetic construct
  source 1..10: note = Seed: DMSKFPLKLR
DISKFPLKLR

SEQ ID NO: 15394 - protein, 10 aa, synthetic construct
  source 1..10: note = Seed: DTSLSGFKLK
DISLSGFKLR

SEQ ID NO: 15395 - protein, 10 aa, synthetic construct
  source 1..10: note = Seed: DQSSYIVDSV
DISSYIVDSV

SEQ ID NO: 15396 - protein, 10 aa, synthetic construct
  source 1..10: note = Seed: DCVMYASAVV
DIVMYASAVV

SEQ ID NO: 15397 - protein, 9 aa, synthetic construct
  source 1..9: note = Seed: DLVYALRHF
DIVYALRHY

SEQ ID NO: 15398 - protein, 9 aa, synthetic construct
  source 1..9: note = Seed: DTYACWHHS
DIYACWHHI

SEQ ID NO: 15399 - protein, 10 aa, synthetic construct
  source 1..10: note = Seed: DTYACWHHSI
DIYACWHHSF

SEQ ID NO: 15400 - protein, 9 aa, synthetic construct
  source 1..9: note = Seed: DTYACWHHS
DIYACWHHV

SEQ ID NO: 15401 - protein, 9 aa, synthetic construct
  source 1..9: note = Seed: DGYFKIYSK
DIYFKIYSK

SEQ ID NO: 15402 - protein, 9 aa, synthetic construct
  source 1..9: note = Seed: DGYFKIYSK
DIYFKIYSR

SEQ ID NO: 15403 - protein, 10 aa, synthetic construct
  source 1..10: note = Seed: DSYYSLLMPI
DIYYSLLMPF

SEQ ID NO: 15404 - protein, 10 aa, synthetic construct
  source 1..10: note = Seed: DSYYSLLMPI
DIYYSLLMPV

SEQ ID NO: 15405 - protein, 10 aa, synthetic construct
  source 1..10: note = Seed: DKSAGFPFNK
DKSAGFPFNR

SEQ ID NO: 15406 - protein, 10 aa, synthetic construct
  source 1..10: note = Seed: DVSFLAHIQW
DKSFLAHIQW

SEQ ID NO: 15407 - protein, 10 aa, synthetic construct
  source 1..10: note = Seed: DCVMYASAVV
DKVMYASAVV

SEQ ID NO: 15408 - protein, 10 aa, synthetic construct
  source 1..10: note = Seed: DTYACWHHSI
DKYACWHHSF

SEQ ID NO: 15409 - protein, 10 aa, synthetic construct
  source 1..10: note = Seed: DSYYSLLMPI
DKYYSLLMPF

SEQ ID NO: 15410 - protein, 10 aa, synthetic construct
  source 1..10: note = Seed: DSYYSLLMPI
DKYYSLLMPW

SEQ ID NO: 15411 - protein, 9 aa, synthetic construct
  source 1..9: note = Seed: DQAMTQMYK
DLAMTQMYK

SEQ ID NO: 15412 - protein, 9 aa, synthetic construct
  source 1..9: note = Seed: DQAMTQMYK
DLAMTQMYR

SEQ ID NO: 15413 - protein, 9 aa, synthetic construct
  source 1..9: note = Seed: DVFHLYLQY
DLFHLYLQK

SEQ ID NO: 15414 - protein, 9 aa, synthetic construct
  source 1..9: note = Seed: DVFHLYLQY
DLFHLYLQR

SEQ ID NO: 15415 - protein, 9 aa, synthetic construct
  source 1..9: note = Seed: DVFHLYLQY
DLFHLYLQY

SEQ ID NO: 15416 - protein, 10 aa, synthetic construct
  source 1..10: note = Seed: DEFTPFDVVR
DLFTPFDVVR

SEQ ID NO: 15417 - protein, 9 aa, synthetic construct
  source 1..9: note = Seed: DVFYKENSY
DLFYKENSR

SEQ ID NO: 15418 - protein, 9 aa, synthetic construct
  source 1..9: note = Seed: DLNQLTGYK
DLNQLTGYR

SEQ ID NO: 15419 - protein, 10 aa, synthetic construct
  source 1..10: note = Seed: DKSAGFPFNK
DLSAGFPFNK

SEQ ID NO: 15420 - protein, 10 aa, synthetic construct
  source 1..10: note = Seed: DKSAGFPFNK
DLSAGFPFNR

SEQ ID NO: 15421 - protein, 10 aa, synthetic construct
  source 1..10: note = Seed: DCVMYASAVV
DLVMYASAVV

SEQ ID NO: 15422 - protein, 10 aa, synthetic construct
  source 1..10: note = Seed: DTYACWHHSI
DLYACWHHSF

SEQ ID NO: 15423 - protein, 9 aa, synthetic construct
  source 1..9: note = Seed: DGYFKIYSK
DLYFKIYSK

SEQ ID NO: 15424 - protein, 9 aa, synthetic construct
  source 1..9: note = Seed: DGYFKIYSK
DLYFKIYSR

SEQ ID NO: 15425 - protein, 9 aa, synthetic construct
  source 1..9: note = Seed: DQAMTQMYK
DMAMTQMYK

SEQ ID NO: 15426 - protein, 9 aa, synthetic construct
  source 1..9: note = Seed: DQAMTQMYK
DMAMTQMYR

SEQ ID NO: 15427 - protein, 9 aa, synthetic construct
  source 1..9: note = Seed: DVFHLYLQY
DMFHLYLQK

SEQ ID NO: 15428 - protein, 9 aa, synthetic construct
  source 1..9: note = Seed: DVFHLYLQY
DMFHLYLQR

SEQ ID NO: 15429 - protein, 9 aa, synthetic construct
  source 1..9: note = Seed: DVFHLYLQY
DMFHLYLQY

SEQ ID NO: 15430 - protein, 11 aa, synthetic construct
  source 1..11: note = Seed: DVFHLYLQYIR
DMFHLYLQYIR

SEQ ID NO: 15431 - protein, 10 aa, synthetic construct
  source 1..10: note = Seed: DEFTPFDVVR
DMFTPFDVVR

SEQ ID NO: 15432 - protein, 9 aa, synthetic construct
  source 1..9: note = Seed: DVFYKENSY
DMFYKENSR

SEQ ID NO: 15433 - protein, 9 aa, synthetic construct
  source 1..9: note = Seed: DSGFAAYSR
DMGFAAYSR

SEQ ID NO: 15434 - protein, 10 aa, synthetic construct
  source 1..10: note = Seed: DNLKTLLSLR
DMLKTLLSLR

SEQ ID NO: 15435 - protein, 10 aa, synthetic construct
  source 1..10: note = Seed: DYLVSTQEFR
DMLVSTQEFR

SEQ ID NO: 15436 - protein, 9 aa, synthetic construct
  source 1..9: note = Seed: DLNQLTGYK
DMNQLTGYR

SEQ ID NO: 15437 - protein, 10 aa, synthetic construct
  source 1..10: note = Seed: DLPIGINITR
DMPIGINITR

SEQ ID NO: 15438 - protein, 10 aa, synthetic construct
  source 1..10: note = Seed: DKSAGFPFNK
DMSAGFPFNK

SEQ ID NO: 15439 - protein, 11 aa, synthetic construct
  source 1..11: note = Seed: DKSAGFPFNKW
DMSAGFPFNKW

SEQ ID NO: 15440 - protein, 10 aa, synthetic construct
  source 1..10: note = Seed: DKSAGFPFNK
DMSAGFPFNR

SEQ ID NO: 15441 - protein, 10 aa, synthetic construct
  source 1..10: note = Seed: DVSFLAHIQW
DMSFLAHIQW

SEQ ID NO: 15442 - protein, 10 aa, synthetic construct
  source 1..10: note = Seed: DQSSYIVDSV
DMSSYIVDSV

SEQ ID NO: 15443 - protein, 10 aa, synthetic construct
  source 1..10: note = Seed: DCVMYASAVV
DMVMYASAVV

SEQ ID NO: 15444 - protein, 10 aa, synthetic construct
  source 1..10: note = Seed: DTYACWHHSI
DMYACWHHSF

SEQ ID NO: 15445 - protein, 9 aa, synthetic construct
  source 1..9: note = Seed: DGYFKIYSK
DMYFKIYSK

SEQ ID NO: 15446 - protein, 9 aa, synthetic construct
  source 1..9: note = Seed: DGYFKIYSK
DMYFKIYSR

SEQ ID NO: 15447 - protein, 10 aa, synthetic construct
  source 1..10: note = Seed: DKYVRNLQHR
DMYVRNLQHR

SEQ ID NO: 15448 - protein, 10 aa, synthetic construct
  source 1..10: note = Seed: DSYYSLLMPI
DMYYSLLMPF

SEQ ID NO: 15449 - protein, 9 aa, synthetic construct
  source 1..9: note = Seed: DQAMTQMYK
DNAMTQMYR

SEQ ID NO: 15450 - protein, 10 aa, synthetic construct
  source 1..10: note = Seed: DKSAGFPFNK
DNSAGFPFNK

SEQ ID NO: 15451 - protein, 10 aa, synthetic construct
  source 1..10: note = Seed: DKSAGFPFNK
DNSAGFPFNR

SEQ ID NO: 15452 - protein, 10 aa, synthetic construct
  source 1..10: note = Seed: DCVMYASAVV
DNVMYASAVV

SEQ ID NO: 15453 - protein, 9 aa, synthetic construct
  source 1..9: note = Seed: DGYFKIYSK
DNYFKIYSR

SEQ ID NO: 15454 - protein, 9 aa, synthetic construct
  source 1..9: note = Seed: DVFHLYLQY
DPFHLYLQY

SEQ ID NO: 15455 - protein, 10 aa, synthetic construct
  source 1..10: note = Seed: DKSAGFPFNK
DPSAGFPFNK

SEQ ID NO: 15456 - protein, 10 aa, synthetic construct
  source 1..10: note = Seed: DKSAGFPFNK
DPSAGFPFNR

SEQ ID NO: 15457 - protein, 10 aa, synthetic construct
  source 1..10: note = Seed: DCVMYASAVV
DPVMYASAVV

SEQ ID NO: 15458 - protein, 9 aa, synthetic construct
  source 1..9: note = Seed: DTYNLWNTF
DPYNLWNTF

SEQ ID NO: 15459 - protein, 9 aa, synthetic construct
  source 1..9: note = Seed: DTYNLWNTF
DPYNLWNTY

SEQ ID NO: 15460 - protein, 9 aa, synthetic construct
  source 1..9: note = Seed: DQAMTQMYK
DQAMTQMYR

SEQ ID NO: 15461 - protein, 10 aa, synthetic construct
  source 1..10: note = Seed: DKSAGFPFNK
DQSAGFPFNK

SEQ ID NO: 15462 - protein, 10 aa, synthetic construct
  source 1..10: note = Seed: DKSAGFPFNK
DQSAGFPFNR

SEQ ID NO: 15463 - protein, 10 aa, synthetic construct
  source 1..10: note = Seed: DCVMYASAVV
DQVMYASAVV

SEQ ID NO: 15464 - protein, 10 aa, synthetic construct
  source 1..10: note = Seed: DTYACWHHSI
DQYACWHHSF

SEQ ID NO: 15465 - protein, 9 aa, synthetic construct
  source 1..9: note = Seed: DGYFKIYSK
DQYFKIYSR

SEQ ID NO: 15466 - protein, 10 aa, synthetic construct
  source 1..10: note = Seed: DSYYSLLMPI
DQYYSLLMPF

SEQ ID NO: 15467 - protein, 10 aa, synthetic construct
  source 1..10: note = Seed: DKSAGFPFNK
DRSAGFPFNK

SEQ ID NO: 15468 - protein, 11 aa, synthetic construct
  source 1..11: note = Seed: DKSAGFPFNKW
DRSAGFPFNKW

SEQ ID NO: 15469 - protein, 10 aa, synthetic construct
  source 1..10: note = Seed: DKSAGFPFNK
DRSAGFPFNR

SEQ ID NO: 15470 - protein, 10 aa, synthetic construct
  source 1..10: note = Seed: DVSFLAHIQW
DRSFLAHIQW

SEQ ID NO: 15471 - protein, 10 aa, synthetic construct
  source 1..10: note = Seed: DCVMYASAVV
DRVMYASAVV

SEQ ID NO: 15472 - protein, 10 aa, synthetic construct
  source 1..10: note = Seed: DTYACWHHSI
DRYACWHHSF

SEQ ID NO: 15473 - protein, 10 aa, synthetic construct
  source 1..10: note = Seed: DTYACWHHSI
DRYACWHHSW

SEQ ID NO: 15474 - protein, 10 aa, synthetic construct
  source 1..10: note = Seed: DYYRYNLPTM
DRYRYNLPTF

SEQ ID NO: 15475 - protein, 10 aa, synthetic construct
  source 1..10: note = Seed: DSYYSLLMPI
DRYYSLLMPF

SEQ ID NO: 15476 - protein, 10 aa, synthetic construct
  source 1..10: note = Seed: DSYYSLLMPI
DRYYSLLMPW

SEQ ID NO: 15477 - protein, 9 aa, synthetic construct
  source 1..9: note = Seed: DQAMTQMYK
DSAMTQMYK

SEQ ID NO: 15478 - protein, 9 aa, synthetic construct
  source 1..9: note = Seed: DQAMTQMYK
DSAMTQMYR

SEQ ID NO: 15479 - protein, 9 aa, synthetic construct
  source 1..9: note = Seed: DVFHLYLQY
DSFHLYLQK

SEQ ID NO: 15480 - protein, 9 aa, synthetic construct
  source 1..9: note = Seed: DVFHLYLQY
DSFHLYLQR

SEQ ID NO: 15481 - protein, 9 aa, synthetic construct
  source 1..9: note = Seed: DVFHLYLQY
DSFHLYLQY

SEQ ID NO: 15482 - protein, 10 aa, synthetic construct
  source 1..10: note = Seed: DVFHLYLQYI
DSFHLYLQYV

SEQ ID NO: 15483 - protein, 10 aa, synthetic construct
  source 1..10: note = Seed: DEFTPFDVVR
DSFTPFDVVR

SEQ ID NO: 15484 - protein, 9 aa, synthetic construct
  source 1..9: note = Seed: DVFYKENSY
DSFYKENSK

SEQ ID NO: 15485 - protein, 9 aa, synthetic construct
  source 1..9: note = Seed: DVFYKENSY
DSFYKENSR

SEQ ID NO: 15486 - protein, 9 aa, synthetic construct
  source 1..9: note = Seed: DSIIIGGAK
DSIIIGGAR

SEQ ID NO: 15487 - protein, 9 aa, synthetic construct
  source 1..9: note = Seed: DMILSLLSK
DSILSLLSK

SEQ ID NO: 15488 - protein, 9 aa, synthetic construct
  source 1..9: note = Seed: DMILSLLSK
DSILSLLSR

SEQ ID NO: 15489 - protein, 10 aa, synthetic construct
  source 1..10: note = Seed: DYLVSTQEFR
DSLVSTQEFR

SEQ ID NO: 15490 - protein, 9 aa, synthetic construct
  source 1..9: note = Seed: DLNQLTGYK
DSNQLTGYK

SEQ ID NO: 15491 - protein, 9 aa, synthetic construct
  source 1..9: note = Seed: DLNQLTGYK
DSNQLTGYR

SEQ ID NO: 15492 - protein, 10 aa, synthetic construct
  source 1..10: note = Seed: DLPIGINITR
DSPIGINITK

SEQ ID NO: 15493 - protein, 10 aa, synthetic construct
  source 1..10: note = Seed: DLPIGINITR
DSPIGINITR

SEQ ID NO: 15494 - protein, 10 aa, synthetic construct
  source 1..10: note = Seed: DKSAGFPFNK
DSSAGFPFNK

SEQ ID NO: 15495 - protein, 10 aa, synthetic construct
  source 1..10: note = Seed: DKSAGFPFNK
DSSAGFPFNR

SEQ ID NO: 15496 - protein, 10 aa, synthetic construct
  source 1..10: note = Seed: DMSKFPLKLR
DSSKFPLKLR

SEQ ID NO: 15497 - protein, 10 aa, synthetic construct
  source 1..10: note = Seed: DTSLSGFKLK
DSSLSGFKLR

SEQ ID NO: 15498 - protein, 10 aa, synthetic construct
  source 1..10: note = Seed: DQSSYIVDSV
DSSSYIVDSV

SEQ ID NO: 15499 - protein, 10 aa, synthetic construct
  source 1..10: note = Seed: DCVMYASAVV
DSVMYASAVV

SEQ ID NO: 15500 - protein, 10 aa, synthetic construct
  source 1..10: note = Seed: DTYACWHHSI
DSYACWHHSF

SEQ ID NO: 15501 - protein, 10 aa, synthetic construct
  source 1..10: note = Seed: DTYACWHHSI
DSYACWHHSV

SEQ ID NO: 15502 - protein, 9 aa, synthetic construct
  source 1..9: note = Seed: DTYACWHHS
DSYACWHHV

SEQ ID NO: 15503 - protein, 9 aa, synthetic construct
  source 1..9: note = Seed: DGYFKIYSK
DSYFKIYSK

SEQ ID NO: 15504 - protein, 9 aa, synthetic construct
  source 1..9: note = Seed: DGYFKIYSK
DSYFKIYSR

SEQ ID NO: 15505 - protein, 10 aa, synthetic construct
  source 1..10: note = Seed: DSYYSLLMPI
DSYYSLLMPF

SEQ ID NO: 15506 - protein, 10 aa, synthetic construct
  source 1..10: note = Seed: DSYYSLLMPI
DSYYSLLMPV

SEQ ID NO: 15507 - protein, 10 aa, synthetic construct
  source 1..10: note = Seed: DSYYSLLMPI
DSYYSLLMPW

SEQ ID NO: 15508 - protein, 9 aa, synthetic construct
  source 1..9: note = Seed: DQAMTQMYK
DTAMTQMYK

SEQ ID NO: 15509 - protein, 9 aa, synthetic construct
  source 1..9: note = Seed: DQAMTQMYK
DTAMTQMYR

SEQ ID NO: 15510 - protein, 9 aa, synthetic construct
  source 1..9: note = Seed: DSATLVSDI
DTATLVSDV

SEQ ID NO: 15511 - protein, 9 aa, synthetic construct
  source 1..9: note = Seed: DVFHLYLQY
DTFHLYLQK

SEQ ID NO: 15512 - protein, 9 aa, synthetic construct
  source 1..9: note = Seed: DVFHLYLQY
DTFHLYLQR

SEQ ID NO: 15513 - protein, 9 aa, synthetic construct
  source 1..9: note = Seed: DVFHLYLQY
DTFHLYLQY

SEQ ID NO: 15514 - protein, 10 aa, synthetic construct
  source 1..10: note = Seed: DVFHLYLQYI
DTFHLYLQYA

SEQ ID NO: 15515 - protein, 10 aa, synthetic construct
  source 1..10: note = Seed: DVFHLYLQYI
DTFHLYLQYI

SEQ ID NO: 15516 - protein, 11 aa, synthetic construct
  source 1..11: note = Seed: DVFHLYLQYIR
DTFHLYLQYIR

SEQ ID NO: 15517 - protein, 10 aa, synthetic construct
  source 1..10: note = Seed: DVFHLYLQYI
DTFHLYLQYL

SEQ ID NO: 15518 - protein, 10 aa, synthetic construct
  source 1..10: note = Seed: DVFHLYLQYI
DTFHLYLQYV

SEQ ID NO: 15519 - protein, 10 aa, synthetic construct
  source 1..10: note = Seed: DEFTPFDVVR
DTFTPFDVVR

SEQ ID NO: 15520 - protein, 10 aa, synthetic construct
  source 1..10: note = Seed: DSFVIRGDEV
DTFVIRGDEV

SEQ ID NO: 15521 - protein, 9 aa, synthetic construct
  source 1..9: note = Seed: DVFYKENSY
DTFYKENSK

SEQ ID NO: 15522 - protein, 9 aa, synthetic construct
  source 1..9: note = Seed: DVFYKENSY
DTFYKENSR

SEQ ID NO: 15523 - protein, 9 aa, synthetic construct
  source 1..9: note = Seed: DSGFAAYSR
DTGFAAYSK

SEQ ID NO: 15524 - protein, 9 aa, synthetic construct
  source 1..9: note = Seed: DSGFAAYSR
DTGFAAYSR

SEQ ID NO: 15525 - protein, 9 aa, synthetic construct
  source 1..9: note = Seed: DSIIIGGAK
DTIIIGGAK

SEQ ID NO: 15526 - protein, 9 aa, synthetic construct
  source 1..9: note = Seed: DSIIIGGAK
DTIIIGGAR

SEQ ID NO: 15527 - protein, 9 aa, synthetic construct
  source 1..9: note = Seed: DMILSLLSK
DTILSLLSK

SEQ ID NO: 15528 - protein, 9 aa, synthetic construct
  source 1..9: note = Seed: DMILSLLSK
DTILSLLSR

SEQ ID NO: 15529 - protein, 9 aa, synthetic construct
  source 1..9: note = Seed: DALCEKALK
DTLCEKALR

SEQ ID NO: 15530 - protein, 10 aa, synthetic construct
  source 1..10: note = Seed: DNLKTLLSLR
DTLKTLLSLR

SEQ ID NO: 15531 - protein, 10 aa, synthetic construct
  source 1..10: note = Seed: DYLVSTQEFR
DTLVSTQEFK

SEQ ID NO: 15532 - protein, 10 aa, synthetic construct
  source 1..10: note = Seed: DYLVSTQEFR
DTLVSTQEFR

SEQ ID NO: 15533 - protein, 11 aa, synthetic construct
  source 1..11: note = Seed: DAMRNAGIVGV
DTMRNAGIVGV

SEQ ID NO: 15534 - protein, 9 aa, synthetic construct
  source 1..9: note = Seed: DLNQLTGYK
DTNQLTGYK

SEQ ID NO: 15535 - protein, 9 aa, synthetic construct
  source 1..9: note = Seed: DLNQLTGYK
DTNQLTGYR

SEQ ID NO: 15536 - protein, 10 aa, synthetic construct
  source 1..10: note = Seed: DLPIGINITR
DTPIGINITK

SEQ ID NO: 15537 - protein, 10 aa, synthetic construct
  source 1..10: note = Seed: DLPIGINITR
DTPIGINITR

SEQ ID NO: 15538 - protein, 10 aa, synthetic construct
  source 1..10: note = Seed: DKSAGFPFNK
DTSAGFPFNK

SEQ ID NO: 15539 - protein, 10 aa, synthetic construct
  source 1..10: note = Seed: DKSAGFPFNK
DTSAGFPFNR

SEQ ID NO: 15540 - protein, 10 aa, synthetic construct
  source 1..10: note = Seed: DMSKFPLKLR
DTSKFPLKLR

SEQ ID NO: 15541 - protein, 10 aa, synthetic construct
  source 1..10: note = Seed: DTSLSGFKLK
DTSLSGFKLR

SEQ ID NO: 15542 - protein, 10 aa, synthetic construct
  source 1..10: note = Seed: DQSSYIVDSV
DTSSYIVDSI

SEQ ID NO: 15543 - protein, 10 aa, synthetic construct
  source 1..10: note = Seed: DQSSYIVDSV
DTSSYIVDSV

SEQ ID NO: 15544 - protein, 9 aa, synthetic construct
  source 1..9: note = Seed: DTTEAFEKM
DTTEAFEKV

SEQ ID NO: 15545 - protein, 9 aa, synthetic construct
  source 1..9: note = Seed: DTTEAFEKM
DTTEAFEKY

SEQ ID NO: 15546 - protein, 10 aa, synthetic construct
  source 1..10: note = Seed: DITPCSFGGV
DTTPCSFGGV

SEQ ID NO: 15547 - protein, 9 aa, synthetic construct
  source 1..9: note = Seed: DTTSYREAA
DTTSYREAV

SEQ ID NO: 15548 - protein, 10 aa, synthetic construct
  source 1..10: note = Seed: DCVMYASAVV
DTVMYASAVV

SEQ ID NO: 15549 - protein, 9 aa, synthetic construct
  source 1..9: note = Seed: DVVRQCSGV
DTVRQCSGV

SEQ ID NO: 15550 - protein, 10 aa, synthetic construct
  source 1..10: note = Seed: DAVVCFNSTY
DTVVCFNSTY

SEQ ID NO: 15551 - protein, 9 aa, synthetic construct
  source 1..9: note = Seed: DLVYALRHF
DTVYALRHF

SEQ ID NO: 15552 - protein, 9 aa, synthetic construct
  source 1..9: note = Seed: DLVYALRHF
DTVYALRHM

SEQ ID NO: 15553 - protein, 9 aa, synthetic construct
  source 1..9: note = Seed: DLVYALRHF
DTVYALRHY

SEQ ID NO: 15554 - protein, 9 aa, synthetic construct
  source 1..9: note = Seed: DTYACWHHS
DTYACWHHA

SEQ ID NO: 15555 - protein, 9 aa, synthetic construct
  source 1..9: note = Seed: DTYACWHHS
DTYACWHHI

SEQ ID NO: 15556 - protein, 9 aa, synthetic construct
  source 1..9: note = Seed: DTYACWHHS
DTYACWHHL

SEQ ID NO: 15557 - protein, 10 aa, synthetic construct
  source 1..10: note = Seed: DTYACWHHSI
DTYACWHHSF

SEQ ID NO: 15558 - protein, 10 aa, synthetic construct
  source 1..10: note = Seed: DTYACWHHSI
DTYACWHHSL

SEQ ID NO: 15559 - protein, 10 aa, synthetic construct
  source 1..10: note = Seed: DTYACWHHSI
DTYACWHHSV

SEQ ID NO: 15560 - protein, 9 aa, synthetic construct
  source 1..9: note = Seed: DTYACWHHS
DTYACWHHV

SEQ ID NO: 15561 - protein, 9 aa, synthetic construct
  source 1..9: note = Seed: DGYFKIYSK
DTYFKIYSK

SEQ ID NO: 15562 - protein, 9 aa, synthetic construct
  source 1..9: note = Seed: DGYFKIYSK
DTYFKIYSR

SEQ ID NO: 15563 - protein, 9 aa, synthetic construct
  source 1..9: note = Seed: DTYNLWNTF
DTYNLWNTY

SEQ ID NO: 15564 - protein, 10 aa, synthetic construct
  source 1..10: note = Seed: DKYVRNLQHR
DTYVRNLQHR

SEQ ID NO: 15565 - protein, 10 aa, synthetic construct
  source 1..10: note = Seed: DSYYSLLMPI
DTYYSLLMPA

SEQ ID NO: 15566 - protein, 10 aa, synthetic construct
  source 1..10: note = Seed: DSYYSLLMPI
DTYYSLLMPF

SEQ ID NO: 15567 - protein, 10 aa, synthetic construct
  source 1..10: note = Seed: DSYYSLLMPI
DTYYSLLMPI

SEQ ID NO: 15568 - protein, 10 aa, synthetic construct
  source 1..10: note = Seed: DSYYSLLMPI
DTYYSLLMPL

SEQ ID NO: 15569 - protein, 10 aa, synthetic construct
  source 1..10: note = Seed: DSYYSLLMPI
DTYYSLLMPV

SEQ ID NO: 15570 - protein, 9 aa, synthetic construct
  source 1..9: note = Seed: DQAMTQMYK
DVAMTQMYK

SEQ ID NO: 15571 - protein, 9 aa, synthetic construct
  source 1..9: note = Seed: DQAMTQMYK
DVAMTQMYR

SEQ ID NO: 15572 - protein, 9 aa, synthetic construct
  source 1..9: note = Seed: DSATLVSDI
DVATLVSDV

SEQ ID NO: 15573 - protein, 9 aa, synthetic construct
  source 1..9: note = Seed: DVFHLYLQY
DVFHLYLQK

SEQ ID NO: 15574 - protein, 9 aa, synthetic construct
  source 1..9: note = Seed: DVFHLYLQY
DVFHLYLQR

SEQ ID NO: 15575 - protein, 10 aa, synthetic construct
  source 1..10: note = Seed: DVFHLYLQYI
DVFHLYLQYV

SEQ ID NO: 15576 - protein, 10 aa, synthetic construct
  source 1..10: note = Seed: DEFTPFDVVR
DVFTPFDVVR

SEQ ID NO: 15577 - protein, 9 aa, synthetic construct
  source 1..9: note = Seed: DVFYKENSY
DVFYKENSK

SEQ ID NO: 15578 - protein, 9 aa, synthetic construct
  source 1..9: note = Seed: DVFYKENSY
DVFYKENSR

SEQ ID NO: 15579 - protein, 9 aa, synthetic construct
  source 1..9: note = Seed: DSGFAAYSR
DVGFAAYSK

SEQ ID NO: 15580 - protein, 9 aa, synthetic construct
  source 1..9: note = Seed: DSGFAAYSR
DVGFAAYSR

SEQ ID NO: 15581 - protein, 9 aa, synthetic construct
  source 1..9: note = Seed: DSIIIGGAK
DVIIIGGAK

SEQ ID NO: 15582 - protein, 9 aa, synthetic construct
  source 1..9: note = Seed: DSIIIGGAK
DVIIIGGAR

SEQ ID NO: 15583 - protein, 9 aa, synthetic construct
  source 1..9: note = Seed: DMILSLLSK
DVILSLLSK

SEQ ID NO: 15584 - protein, 9 aa, synthetic construct
  source 1..9: note = Seed: DMILSLLSK
DVILSLLSR

SEQ ID NO: 15585 - protein, 9 aa, synthetic construct
  source 1..9: note = Seed: DALCEKALK
DVLCEKALR

SEQ ID NO: 15586 - protein, 10 aa, synthetic construct
  source 1..10: note = Seed: DNLKTLLSLR
DVLKTLLSLR

SEQ ID NO: 15587 - protein, 10 aa, synthetic construct
  source 1..10: note = Seed: DYLVSTQEFR
DVLVSTQEFK

SEQ ID NO: 15588 - protein, 10 aa, synthetic construct
  source 1..10: note = Seed: DYLVSTQEFR
DVLVSTQEFR

SEQ ID NO: 15589 - protein, 9 aa, synthetic construct
  source 1..9: note = Seed: DLNQLTGYK
DVNQLTGYK

SEQ ID NO: 15590 - protein, 9 aa, synthetic construct
  source 1..9: note = Seed: DLNQLTGYK
DVNQLTGYR

SEQ ID NO: 15591 - protein, 10 aa, synthetic construct
  source 1..10: note = Seed: DLPIGINITR
DVPIGINITK

SEQ ID NO: 15592 - protein, 10 aa, synthetic construct
  source 1..10: note = Seed: DLPIGINITR
DVPIGINITR

SEQ ID NO: 15593 - protein, 10 aa, synthetic construct
  source 1..10: note = Seed: DTPNNTDFSR
DVPNNTDFSR

SEQ ID NO: 15594 - protein, 10 aa, synthetic construct
  source 1..10: note = Seed: DKSAGFPFNK
DVSAGFPFNK

SEQ ID NO: 15595 - protein, 10 aa, synthetic construct
  source 1..10: note = Seed: DKSAGFPFNK
DVSAGFPFNR

SEQ ID NO: 15596 - protein, 10 aa, synthetic construct
  source 1..10: note = Seed: DMSKFPLKLR
DVSKFPLKLK

SEQ ID NO: 15597 - protein, 10 aa, synthetic construct
  source 1..10: note = Seed: DMSKFPLKLR
DVSKFPLKLR

SEQ ID NO: 15598 - protein, 10 aa, synthetic construct
  source 1..10: note = Seed: DTSLSGFKLK
DVSLSGFKLK

SEQ ID NO: 15599 - protein, 10 aa, synthetic construct
  source 1..10: note = Seed: DTSLSGFKLK
DVSLSGFKLR

SEQ ID NO: 15600 - protein, 10 aa, synthetic construct
  source 1..10: note = Seed: DQSSYIVDSV
DVSSYIVDSV

SEQ ID NO: 15601 - protein, 9 aa, synthetic construct
  source 1..9: note = Seed: DTTEAFEKM
DVTEAFEKV

SEQ ID NO: 15602 - protein, 9 aa, synthetic construct
  source 1..9: note = Seed: DTTEAFEKM
DVTEAFEKY

SEQ ID NO: 15603 - protein, 10 aa, synthetic construct
  source 1..10: note = Seed: DITPCSFGGV
DVTPCSFGGV

SEQ ID NO: 15604 - protein, 9 aa, synthetic construct
  source 1..9: note = Seed: DTVIEVQGY
DVVIEVQGY

SEQ ID NO: 15605 - protein, 10 aa, synthetic construct
  source 1..10: note = Seed: DCVMYASAVV
DVVMYASAVV

SEQ ID NO: 15606 - protein, 9 aa, synthetic construct
  source 1..9: note = Seed: DLVYALRHF
DVVYALRHF

SEQ ID NO: 15607 - protein, 9 aa, synthetic construct
  source 1..9: note = Seed: DLVYALRHF
DVVYALRHM

SEQ ID NO: 15608 - protein, 9 aa, synthetic construct
  source 1..9: note = Seed: DLVYALRHF
DVVYALRHY

SEQ ID NO: 15609 - protein, 9 aa, synthetic construct
  source 1..9: note = Seed: DTYACWHHS
DVYACWHHA

SEQ ID NO: 15610 - protein, 9 aa, synthetic construct
  source 1..9: note = Seed: DTYACWHHS
DVYACWHHI

SEQ ID NO: 15611 - protein, 9 aa, synthetic construct
  source 1..9: note = Seed: DTYACWHHS
DVYACWHHL

SEQ ID NO: 15612 - protein, 10 aa, synthetic construct
  source 1..10: note = Seed: DTYACWHHSI
DVYACWHHSF

SEQ ID NO: 15613 - protein, 10 aa, synthetic construct
  source 1..10: note = Seed: DTYACWHHSI
DVYACWHHSV

SEQ ID NO: 15614 - protein, 9 aa, synthetic construct
  source 1..9: note = Seed: DTYACWHHS
DVYACWHHV

SEQ ID NO: 15615 - protein, 9 aa, synthetic construct
  source 1..9: note = Seed: DGYFKIYSK
DVYFKIYSK

SEQ ID NO: 15616 - protein, 9 aa, synthetic construct
  source 1..9: note = Seed: DGYFKIYSK
DVYFKIYSR

SEQ ID NO: 15617 - protein, 9 aa, synthetic construct
  source 1..9: note = Seed: DTYNLWNTF
DVYNLWNTY

SEQ ID NO: 15618 - protein, 10 aa, synthetic construct
  source 1..10: note = Seed: DKYVRNLQHR
DVYVRNLQHR

SEQ ID NO: 15619 - protein, 10 aa, synthetic construct
  source 1..10: note = Seed: DSYYSLLMPI
DVYYSLLMPF

SEQ ID NO: 15620 - protein, 10 aa, synthetic construct
  source 1..10: note = Seed: DSYYSLLMPI
DVYYSLLMPI

SEQ ID NO: 15621 - protein, 10 aa, synthetic construct
  source 1..10: note = Seed: DSYYSLLMPI
DVYYSLLMPV

SEQ ID NO: 15622 - protein, 9 aa, synthetic construct
  source 1..9: note = Seed: DVFHLYLQY
DWFHLYLQY

SEQ ID NO: 15623 - protein, 10 aa, synthetic construct
  source 1..10: note = Seed: DEFTPFDVVR
DWFTPFDVVR

SEQ ID NO: 15624 - protein, 10 aa, synthetic construct
  source 1..10: note = Seed: DKSAGFPFNK
DWSAGFPFNK

SEQ ID NO: 15625 - protein, 10 aa, synthetic construct
  source 1..10: note = Seed: DKSAGFPFNK
DWSAGFPFNR

SEQ ID NO: 15626 - protein, 10 aa, synthetic construct
  source 1..10: note = Seed: DCVMYASAVV
DWVMYASAVV

SEQ ID NO: 15627 - protein, 10 aa, synthetic construct
  source 1..10: note = Seed: DTYACWHHSI
DWYACWHHSF

SEQ ID NO: 15628 - protein, 9 aa, synthetic construct
  source 1..9: note = Seed: DGYFKIYSK
DWYFKIYSR

SEQ ID NO: 15629 - protein, 10 aa, synthetic construct
  source 1..10: note = Seed: DSYYSLLMPI
DWYYSLLMPF

SEQ ID NO: 15630 - protein, 9 aa, synthetic construct
  source 1..9: note = Seed: DVFHLYLQY
DYFHLYLQY

SEQ ID NO: 15631 - protein, 11 aa, synthetic construct
  source 1..11: note = Seed: DVFHLYLQYIR
DYFHLYLQYIR

SEQ ID NO: 15632 - protein, 10 aa, synthetic construct
  source 1..10: note = Seed: DEFTPFDVVR
DYFTPFDVVR

SEQ ID NO: 15633 - protein, 9 aa, synthetic construct
  source 1..9: note = Seed: DSGFAAYSR
DYGFAAYSR

SEQ ID NO: 15634 - protein, 10 aa, synthetic construct
  source 1..10: note = Seed: DNLKTLLSLR
DYLKTLLSLR

SEQ ID NO: 15635 - protein, 11 aa, synthetic construct
  source 1..11: note = Seed: DAMRNAGIVGV
DYMRNAGIVGV

SEQ ID NO: 15636 - protein, 10 aa, synthetic construct
  source 1..10: note = Seed: DLPIGINITR
DYPIGINITR

SEQ ID NO: 15637 - protein, 10 aa, synthetic construct
  source 1..10: note = Seed: DKSAGFPFNK
DYSAGFPFNK

SEQ ID NO: 15638 - protein, 10 aa, synthetic construct
  source 1..10: note = Seed: DKSAGFPFNK
DYSAGFPFNR

SEQ ID NO: 15639 - protein, 10 aa, synthetic construct
  source 1..10: note = Seed: DMSKFPLKLR
DYSKFPLKLR

SEQ ID NO: 15640 - protein, 10 aa, synthetic construct
  source 1..10: note = Seed: DQSSYIVDSV
DYSSYIVDSV

SEQ ID NO: 15641 - protein, 9 aa, synthetic construct
  source 1..9: note = Seed: DYTEISFML
DYTEISFMF

SEQ ID NO: 15642 - protein, 10 aa, synthetic construct
  source 1..10: note = Seed: DCVMYASAVV
DYVMYASAVV

SEQ ID NO: 15643 - protein, 9 aa, synthetic construct
  source 1..9: note = Seed: DYVYNPFMI
DYVYNPFMF

SEQ ID NO: 15644 - protein, 10 aa, synthetic construct
  source 1..10: note = Seed: DTYACWHHSI
DYYACWHHSF

SEQ ID NO: 15645 - protein, 10 aa, synthetic construct
  source 1..10: note = Seed: DTYACWHHSI
DYYACWHHSI

SEQ ID NO: 15646 - protein, 10 aa, synthetic construct
  source 1..10: note = Seed: DTYACWHHSI
DYYACWHHSL

SEQ ID NO: 15647 - protein, 10 aa, synthetic construct
  source 1..10: note = Seed: DTYACWHHSI
DYYACWHHSW

SEQ ID NO: 15648 - protein, 9 aa, synthetic construct
  source 1..9: note = Seed: DGYFKIYSK
DYYFKIYSK

SEQ ID NO: 15649 - protein, 9 aa, synthetic construct
  source 1..9: note = Seed: DGYFKIYSK
DYYFKIYSR

SEQ ID NO: 15650 - protein, 11 aa, synthetic construct
  source 1..11: note = Seed: DSYFVVKRHTF
DYYFVVKRHTF

SEQ ID NO: 15651 - protein, 10 aa, synthetic construct
  source 1..10: note = Seed: DYYRYNLPTM
DYYRYNLPTF

SEQ ID NO: 15652 - protein, 10 aa, synthetic construct
  source 1..10: note = Seed: DYYRYNLPTM
DYYRYNLPTW

SEQ ID NO: 15653 - protein, 10 aa, synthetic construct
  source 1..10: note = Seed: DKYVRNLQHR
DYYVRNLQHR

SEQ ID NO: 15654 - protein, 10 aa, synthetic construct
  source 1..10: note = Seed: DSYYSLLMPI
DYYYSLLMPF

SEQ ID NO: 15655 - protein, 10 aa, synthetic construct
  source 1..10: note = Seed: DSYYSLLMPI
DYYYSLLMPW

SEQ ID NO: 15656 - protein, 10 aa, synthetic construct
  source 1..10: note = Seed: EEAALCTFLL
EAAALCTFLA

SEQ ID NO: 15657 - protein, 10 aa, synthetic construct
  source 1..10: note = Seed: EEAALCTFLL
EAAALCTFLI

SEQ ID NO: 15658 - protein, 10 aa, synthetic construct
  source 1..10: note = Seed: EEAALCTFLL
EAAALCTFLL

SEQ ID NO: 15659 - protein, 10 aa, synthetic construct
  source 1..10: note = Seed: EEAALCTFLL
EAAALCTFLM

SEQ ID NO: 15660 - protein, 10 aa, synthetic construct
  source 1..10: note = Seed: EEAALCTFLL
EAAALCTFLV

SEQ ID NO: 15661 - protein, 10 aa, synthetic construct
  source 1..10: note = Seed: ETAHSCNVNR
EAAHSCNVNK

SEQ ID NO: 15662 - protein, 10 aa, synthetic construct
  source 1..10: note = Seed: ETAHSCNVNR
EAAHSCNVNR

SEQ ID NO: 15663 - protein, 9 aa, synthetic construct
  source 1..9: note = Seed: EIAIILASF
EAAIILASF

SEQ ID NO: 15664 - protein, 9 aa, synthetic construct
  source 1..9: note = Seed: EIAIILASF
EAAIILASY

SEQ ID NO: 15665 - protein, 10 aa, synthetic construct
  source 1..10: note = Seed: EVAKNLNESL
EAAKNLNESV

SEQ ID NO: 15666 - protein, 9 aa, synthetic construct
  source 1..9: note = Seed: EAALCTFLL
EAALCTFLA

SEQ ID NO: 15667 - protein, 9 aa, synthetic construct
  source 1..9: note = Seed: EAALCTFLL
EAALCTFLI

SEQ ID NO: 15668 - protein, 11 aa, synthetic construct
  source 1..11: note = Seed: EAALCTFLLNK
EAALCTFLLNR

SEQ ID NO: 15669 - protein, 9 aa, synthetic construct
  source 1..9: note = Seed: EAALCTFLL
EAALCTFLM

SEQ ID NO: 15670 - protein, 9 aa, synthetic construct
  source 1..9: note = Seed: EAALCTFLL
EAALCTFLV

SEQ ID NO: 15671 - protein, 9 aa, synthetic construct
  source 1..9: note = Seed: ETAQNSVRV
EAAQNSVRV

SEQ ID NO: 15672 - protein, 11 aa, synthetic construct
  source 1..11: note = Seed: EVARDLSLQFK
EAARDLSLQFR

SEQ ID NO: 15673 - protein, 9 aa, synthetic construct
  source 1..9: note = Seed: EIAWYTERS
EAAWYTERA

SEQ ID NO: 15674 - protein, 9 aa, synthetic construct
  source 1..9: note = Seed: EIAWYTERS
EAAWYTERI

SEQ ID NO: 15675 - protein, 9 aa, synthetic construct
  source 1..9: note = Seed: EIAWYTERS
EAAWYTERL

SEQ ID NO: 15676 - protein, 11 aa, synthetic construct
  source 1..11: note = Seed: EIAWYTERSEK
EAAWYTERSEK

SEQ ID NO: 15677 - protein, 11 aa, synthetic construct
  source 1..11: note = Seed: EIAWYTERSEK
EAAWYTERSER

SEQ ID NO: 15678 - protein, 9 aa, synthetic construct
  source 1..9: note = Seed: EIAWYTERS
EAAWYTERV

SEQ ID NO: 15679 - protein, 11 aa, synthetic construct
  source 1..11: note = Seed: EVFAQVKQIYK
EAFAQVKQIYK

SEQ ID NO: 15680 - protein, 11 aa, synthetic construct
  source 1..11: note = Seed: EVFAQVKQIYK
EAFAQVKQIYR

SEQ ID NO: 15681 - protein, 9 aa, synthetic construct
  source 1..9: note = Seed: EAFEKMVSL
EAFEKMVSA

SEQ ID NO: 15682 - protein, 9 aa, synthetic construct
  source 1..9: note = Seed: EAFEKMVSL
EAFEKMVSF

SEQ ID NO: 15683 - protein, 9 aa, synthetic construct
  source 1..9: note = Seed: EAFEKMVSL
EAFEKMVSI

SEQ ID NO: 15684 - protein, 10 aa, synthetic construct
  source 1..10: note = Seed: EAFEKMVSLL
EAFEKMVSLV

SEQ ID NO: 15685 - protein, 9 aa, synthetic construct
  source 1..9: note = Seed: EAFEKMVSL
EAFEKMVSM

SEQ ID NO: 15686 - protein, 9 aa, synthetic construct
  source 1..9: note = Seed: EAFEKMVSL
EAFEKMVSV

SEQ ID NO: 15687 - protein, 9 aa, synthetic construct
  source 1..9: note = Seed: EAFEKMVSL
EAFEKMVSY

SEQ ID NO: 15688 - protein, 10 aa, synthetic construct
  source 1..10: note = Seed: ESFGGASCCL
EAFGGASCCV

SEQ ID NO: 15689 - protein, 9 aa, synthetic construct
  source 1..9: note = Seed: ETFKLSYGI
EAFKLSYGA

SEQ ID NO: 15690 - protein, 9 aa, synthetic construct
  source 1..9: note = Seed: ETFKLSYGI
EAFKLSYGI

SEQ ID NO: 15691 - protein, 10 aa, synthetic construct
  source 1..10: note = Seed: ETFKLSYGIA
EAFKLSYGII

SEQ ID NO: 15692 - protein, 10 aa, synthetic construct
  source 1..10: note = Seed: ETFKLSYGIA
EAFKLSYGIV

SEQ ID NO: 15693 - protein, 9 aa, synthetic construct
  source 1..9: note = Seed: ETFKLSYGI
EAFKLSYGL

SEQ ID NO: 15694 - protein, 9 aa, synthetic construct
  source 1..9: note = Seed: ETFKLSYGI
EAFKLSYGM

SEQ ID NO: 15695 - protein, 9 aa, synthetic construct
  source 1..9: note = Seed: ETFKLSYGI
EAFKLSYGV

SEQ ID NO: 15696 - protein, 9 aa, synthetic construct
  source 1..9: note = Seed: ETFKLSYGI
EAFKLSYGY

SEQ ID NO: 15697 - protein, 11 aa, synthetic construct
  source 1..11: note = Seed: EWFLAYILFTR
EAFLAYILFTK

SEQ ID NO: 15698 - protein, 11 aa, synthetic construct
  source 1..11: note = Seed: EWFLAYILFTR
EAFLAYILFTR

SEQ ID NO: 15699 - protein, 9 aa, synthetic construct
  source 1..9: note = Seed: EAFLIGCNY
EAFLIGCNK

SEQ ID NO: 15700 - protein, 9 aa, synthetic construct
  source 1..9: note = Seed: EAFLIGCNY
EAFLIGCNR

SEQ ID NO: 15701 - protein, 10 aa, synthetic construct
  source 1..10: note = Seed: EAFLIGCNYL
EAFLIGCNYI

SEQ ID NO: 15702 - protein, 10 aa, synthetic construct
  source 1..10: note = Seed: EAFLIGCNYL
EAFLIGCNYV

SEQ ID NO: 15703 - protein, 9 aa, synthetic construct
  source 1..9: note = Seed: EVFNATRFA
EAFNATRFA

SEQ ID NO: 15704 - protein, 10 aa, synthetic construct
  source 1..10: note = Seed: EVFNATRFAS
EAFNATRFAA

SEQ ID NO: 15705 - protein, 10 aa, synthetic construct
  source 1..10: note = Seed: EVFNATRFAS
EAFNATRFAI

SEQ ID NO: 15706 - protein, 10 aa, synthetic construct
  source 1..10: note = Seed: EVFNATRFAS
EAFNATRFAL

SEQ ID NO: 15707 - protein, 11 aa, synthetic construct
  source 1..11: note = Seed: EVFNATRFASV
EAFNATRFASV

SEQ ID NO: 15708 - protein, 10 aa, synthetic construct
  source 1..10: note = Seed: EVFNATRFAS
EAFNATRFAV

SEQ ID NO: 15709 - protein, 9 aa, synthetic construct
  source 1..9: note = Seed: EVFNATRFA
EAFNATRFI

SEQ ID NO: 15710 - protein, 9 aa, synthetic construct
  source 1..9: note = Seed: EVFNATRFA
EAFNATRFV

SEQ ID NO: 15711 - protein, 10 aa, synthetic construct
  source 1..10: note = Seed: EEIAIILASF
EAIAIILASY

SEQ ID NO: 15712 - protein, 9 aa, synthetic construct
  source 1..9: note = Seed: ETIQITISS
EAIQITISA

SEQ ID NO: 15713 - protein, 9 aa, synthetic construct
  source 1..9: note = Seed: ETIQITISS
EAIQITISI

SEQ ID NO: 15714 - protein, 9 aa, synthetic construct
  source 1..9: note = Seed: ETIQITISS
EAIQITISL

SEQ ID NO: 15715 - protein, 11 aa, synthetic construct
  source 1..11: note = Seed: ETIQITISSFK
EAIQITISSFK

SEQ ID NO: 15716 - protein, 11 aa, synthetic construct
  source 1..11: note = Seed: ETIQITISSFK
EAIQITISSFR

SEQ ID NO: 15717 - protein, 10 aa, synthetic construct
  source 1..10: note = Seed: ETIQITISSF
EAIQITISSY

SEQ ID NO: 15718 - protein, 9 aa, synthetic construct
  source 1..9: note = Seed: ETIQITISS
EAIQITISV

SEQ ID NO: 15719 - protein, 9 aa, synthetic construct
  source 1..9: note = Seed: ETISLAGSY
EAISLAGSF

SEQ ID NO: 15720 - protein, 9 aa, synthetic construct
  source 1..9: note = Seed: ETISLAGSY
EAISLAGSK

SEQ ID NO: 15721 - protein, 9 aa, synthetic construct
  source 1..9: note = Seed: ETISLAGSY
EAISLAGSM

SEQ ID NO: 15722 - protein, 9 aa, synthetic construct
  source 1..9: note = Seed: ETISLAGSY
EAISLAGSR

SEQ ID NO: 15723 - protein, 9 aa, synthetic construct
  source 1..9: note = Seed: ETISLAGSY
EAISLAGSY

SEQ ID NO: 15724 - protein, 10 aa, synthetic construct
  source 1..10: note = Seed: ETISLAGSYK
EAISLAGSYK

SEQ ID NO: 15725 - protein, 11 aa, synthetic construct
  source 1..11: note = Seed: ETISLAGSYKD
EAISLAGSYKR

SEQ ID NO: 15726 - protein, 10 aa, synthetic construct
  source 1..10: note = Seed: ETISLAGSYK
EAISLAGSYR

SEQ ID NO: 15727 - protein, 10 aa, synthetic construct
  source 1..10: note = Seed: ETISLAGSYK
EAISLAGSYY

SEQ ID NO: 15728 - protein, 10 aa, synthetic construct
  source 1..10: note = Seed: ETKDVVECLK
EAKDVVECLK

SEQ ID NO: 15729 - protein, 10 aa, synthetic construct
  source 1..10: note = Seed: ETKDVVECLK
EAKDVVECLR

SEQ ID NO: 15730 - protein, 10 aa, synthetic construct
  source 1..10: note = Seed: EMLAHAEETR
EALAHAEETR

SEQ ID NO: 15731 - protein, 10 aa, synthetic construct
  source 1..10: note = Seed: EPLVDLPIGI
EALVDLPIGV

SEQ ID NO: 15732 - protein, 9 aa, synthetic construct
  source 1..9: note = Seed: ETLYCIDGA
EALYCIDGV

SEQ ID NO: 15733 - protein, 9 aa, synthetic construct
  source 1..9: note = Seed: EVNEFACVV
EANEFACVV

SEQ ID NO: 15734 - protein, 10 aa, synthetic construct
  source 1..10: note = Seed: ETNILLNVPL
EANILLNVPV

SEQ ID NO: 15735 - protein, 9 aa, synthetic construct
  source 1..9: note = Seed: EVNSFSGYL
EANSFSGYI

SEQ ID NO: 15736 - protein, 9 aa, synthetic construct
  source 1..9: note = Seed: EVNSFSGYL
EANSFSGYL

SEQ ID NO: 15737 - protein, 10 aa, synthetic construct
  source 1..10: note = Seed: EVNSFSGYLK
EANSFSGYLK

SEQ ID NO: 15738 - protein, 10 aa, synthetic construct
  source 1..10: note = Seed: EVNSFSGYLK
EANSFSGYLR

SEQ ID NO: 15739 - protein, 9 aa, synthetic construct
  source 1..9: note = Seed: EVNSFSGYL
EANSFSGYV

SEQ ID NO: 15740 - protein, 9 aa, synthetic construct
  source 1..9: note = Seed: EVNSFSGYL
EANSFSGYY

SEQ ID NO: 15741 - protein, 9 aa, synthetic construct
  source 1..9: note = Seed: EGNSPFHPL
EANSPFHPA

SEQ ID NO: 15742 - protein, 9 aa, synthetic construct
  source 1..9: note = Seed: EGNSPFHPL
EANSPFHPI

SEQ ID NO: 15743 - protein, 9 aa, synthetic construct
  source 1..9: note = Seed: EGNSPFHPL
EANSPFHPL

SEQ ID NO: 15744 - protein, 9 aa, synthetic construct
  source 1..9: note = Seed: EGNSPFHPL
EANSPFHPV

SEQ ID NO: 15745 - protein, 9 aa, synthetic construct
  source 1..9: note = Seed: ESPFVMMSA
EAPFVMMSA

SEQ ID NO: 15746 - protein, 9 aa, synthetic construct
  source 1..9: note = Seed: ESPFVMMSA
EAPFVMMSI

SEQ ID NO: 15747 - protein, 9 aa, synthetic construct
  source 1..9: note = Seed: ESPFVMMSA
EAPFVMMSV

SEQ ID NO: 15748 - protein, 9 aa, synthetic construct
  source 1..9: note = Seed: EQPYVFIKR
EAPYVFIKK

SEQ ID NO: 15749 - protein, 9 aa, synthetic construct
  source 1..9: note = Seed: EQPYVFIKR
EAPYVFIKR

SEQ ID NO: 15750 - protein, 9 aa, synthetic construct
  source 1..9: note = Seed: ELQTPFEIK
EAQTPFEIR

SEQ ID NO: 15751 - protein, 9 aa, synthetic construct
  source 1..9: note = Seed: ECSNLLLQY
EASNLLLQF

SEQ ID NO: 15752 - protein, 9 aa, synthetic construct
  source 1..9: note = Seed: ECSNLLLQY
EASNLLLQY

SEQ ID NO: 15753 - protein, 10 aa, synthetic construct
  source 1..10: note = Seed: EGSVAYESLR
EASVAYESLK

SEQ ID NO: 15754 - protein, 10 aa, synthetic construct
  source 1..10: note = Seed: EGSVAYESLR
EASVAYESLR

SEQ ID NO: 15755 - protein, 9 aa, synthetic construct
  source 1..9: note = Seed: ENSYTTTIK
EASYTTTIK

SEQ ID NO: 15756 - protein, 9 aa, synthetic construct
  source 1..9: note = Seed: ENSYTTTIK
EASYTTTIR

SEQ ID NO: 15757 - protein, 10 aa, synthetic construct
  source 1..10: note = Seed: EETFKLSYGI
EATFKLSYGA

SEQ ID NO: 15758 - protein, 10 aa, synthetic construct
  source 1..10: note = Seed: EETFKLSYGI
EATFKLSYGI

SEQ ID NO: 15759 - protein, 10 aa, synthetic construct
  source 1..10: note = Seed: EETFKLSYGI
EATFKLSYGL

SEQ ID NO: 15760 - protein, 10 aa, synthetic construct
  source 1..10: note = Seed: EETFKLSYGI
EATFKLSYGV

SEQ ID NO: 15761 - protein, 9 aa, synthetic construct
  source 1..9: note = Seed: EFTPFDVVR
EATPFDVVK

SEQ ID NO: 15762 - protein, 9 aa, synthetic construct
  source 1..9: note = Seed: EFTPFDVVR
EATPFDVVR

SEQ ID NO: 15763 - protein, 9 aa, synthetic construct
  source 1..9: note = Seed: ELTSMKYFV
EATSMKYFI

SEQ ID NO: 15764 - protein, 9 aa, synthetic construct
  source 1..9: note = Seed: ELTSMKYFV
EATSMKYFV

SEQ ID NO: 15765 - protein, 10 aa, synthetic construct
  source 1..10: note = Seed: ELTSMKYFVK
EATSMKYFVK

SEQ ID NO: 15766 - protein, 10 aa, synthetic construct
  source 1..10: note = Seed: ELTSMKYFVK
EATSMKYFVR

SEQ ID NO: 15767 - protein, 9 aa, synthetic construct
  source 1..9: note = Seed: ECTTIVNGV
EATTIVNGA

SEQ ID NO: 15768 - protein, 9 aa, synthetic construct
  source 1..9: note = Seed: ECTTIVNGV
EATTIVNGI

SEQ ID NO: 15769 - protein, 9 aa, synthetic construct
  source 1..9: note = Seed: ECTTIVNGV
EATTIVNGL

SEQ ID NO: 15770 - protein, 9 aa, synthetic construct
  source 1..9: note = Seed: ECTTIVNGV
EATTIVNGV

SEQ ID NO: 15771 - protein, 10 aa, synthetic construct
  source 1..10: note = Seed: ECTTIVNGVR
EATTIVNGVK

SEQ ID NO: 15772 - protein, 10 aa, synthetic construct
  source 1..10: note = Seed: ECTTIVNGVR
EATTIVNGVR

SEQ ID NO: 15773 - protein, 9 aa, synthetic construct
  source 1..9: note = Seed: ELVAELEGI
EAVAELEGV

SEQ ID NO: 15774 - protein, 9 aa, synthetic construct
  source 1..9: note = Seed: EVVGDIILK
EAVGDIILK

SEQ ID NO: 15775 - protein, 9 aa, synthetic construct
  source 1..9: note = Seed: EVVGDIILK
EAVGDIILR

SEQ ID NO: 15776 - protein, 9 aa, synthetic construct
  source 1..9: note = Seed: EAVGTNLPL
EAVGTNLPF

SEQ ID NO: 15777 - protein, 9 aa, synthetic construct
  source 1..9: note = Seed: EAVGTNLPL
EAVGTNLPI

SEQ ID NO: 15778 - protein, 9 aa, synthetic construct
  source 1..9: note = Seed: EAVGTNLPL
EAVGTNLPM

SEQ ID NO: 15779 - protein, 9 aa, synthetic construct
  source 1..9: note = Seed: EAVGTNLPL
EAVGTNLPV

SEQ ID NO: 15780 - protein, 9 aa, synthetic construct
  source 1..9: note = Seed: EAVGTNLPL
EAVGTNLPY

SEQ ID NO: 15781 - protein, 10 aa, synthetic construct
  source 1..10: note = Seed: ELVIGAVILR
EAVIGAVILK

SEQ ID NO: 15782 - protein, 10 aa, synthetic construct
  source 1..10: note = Seed: ELVIGAVILR
EAVIGAVILR

SEQ ID NO: 15783 - protein, 9 aa, synthetic construct
  source 1..9: note = Seed: ETVKGLDYK
EAVKGLDYK

SEQ ID NO: 15784 - protein, 9 aa, synthetic construct
  source 1..9: note = Seed: ETVKGLDYK
EAVKGLDYR

SEQ ID NO: 15785 - protein, 9 aa, synthetic construct
  source 1..9: note = Seed: ECVLGQSKR
EAVLGQSKK

SEQ ID NO: 15786 - protein, 9 aa, synthetic construct
  source 1..9: note = Seed: ECVLGQSKR
EAVLGQSKR

SEQ ID NO: 15787 - protein, 10 aa, synthetic construct
  source 1..10: note = Seed: EHVTFFIYNK
EAVTFFIYNK

SEQ ID NO: 15788 - protein, 10 aa, synthetic construct
  source 1..10: note = Seed: EHVTFFIYNK
EAVTFFIYNR

SEQ ID NO: 15789 - protein, 9 aa, synthetic construct
  source 1..9: note = Seed: ELWAKRNIK
EAWAKRNIR

SEQ ID NO: 15790 - protein, 10 aa, synthetic construct
  source 1..10: note = Seed: EEAALCTFLL
ECAALCTFLV

SEQ ID NO: 15791 - protein, 10 aa, synthetic construct
  source 1..10: note = Seed: ETAHSCNVNR
ECAHSCNVNR

SEQ ID NO: 15792 - protein, 9 aa, synthetic construct
  source 1..9: note = Seed: ETFKLSYGI
ECFKLSYGV

SEQ ID NO: 15793 - protein, 10 aa, synthetic construct
  source 1..10: note = Seed: ETISLAGSYK
ECISLAGSYK

SEQ ID NO: 15794 - protein, 10 aa, synthetic construct
  source 1..10: note = Seed: ETISLAGSYK
ECISLAGSYR

SEQ ID NO: 15795 - protein, 10 aa, synthetic construct
  source 1..10: note = Seed: EGSVAYESLR
ECSVAYESLK

SEQ ID NO: 15796 - protein, 10 aa, synthetic construct
  source 1..10: note = Seed: EGSVAYESLR
ECSVAYESLR

SEQ ID NO: 15797 - protein, 10 aa, synthetic construct
  source 1..10: note = Seed: EETFKLSYGI
ECTFKLSYGA

SEQ ID NO: 15798 - protein, 10 aa, synthetic construct
  source 1..10: note = Seed: EETFKLSYGI
ECTFKLSYGI

SEQ ID NO: 15799 - protein, 10 aa, synthetic construct
  source 1..10: note = Seed: EETFKLSYGI
ECTFKLSYGL

SEQ ID NO: 15800 - protein, 10 aa, synthetic construct
  source 1..10: note = Seed: EETFKLSYGI
ECTFKLSYGV

SEQ ID NO: 15801 - protein, 9 aa, synthetic construct
  source 1..9: note = Seed: EAVGTNLPL
ECVGTNLPY

SEQ ID NO: 15802 - protein, 10 aa, synthetic construct
  source 1..10: note = Seed: ELVIGAVILR
ECVIGAVILK

SEQ ID NO: 15803 - protein, 10 aa, synthetic construct
  source 1..10: note = Seed: ELVIGAVILR
ECVIGAVILR

SEQ ID NO: 15804 - protein, 10 aa, synthetic construct
  source 1..10: note = Seed: EHVTFFIYNK
ECVTFFIYNK

SEQ ID NO: 15805 - protein, 10 aa, synthetic construct
  source 1..10: note = Seed: EHVTFFIYNK
ECVTFFIYNR

SEQ ID NO: 15806 - protein, 10 aa, synthetic construct
  source 1..10: note = Seed: EEAALCTFLL
EDAALCTFLV

SEQ ID NO: 15807 - protein, 10 aa, synthetic construct
  source 1..10: note = Seed: ETAHSCNVNR
EDAHSCNVNR

SEQ ID NO: 15808 - protein, 10 aa, synthetic construct
  source 1..10: note = Seed: ETISLAGSYK
EDISLAGSYK

SEQ ID NO: 15809 - protein, 10 aa, synthetic construct
  source 1..10: note = Seed: ETISLAGSYK
EDISLAGSYR

SEQ ID NO: 15810 - protein, 10 aa, synthetic construct
  source 1..10: note = Seed: EGSVAYESLR
EDSVAYESLK

SEQ ID NO: 15811 - protein, 10 aa, synthetic construct
  source 1..10: note = Seed: EGSVAYESLR
EDSVAYESLR

SEQ ID NO: 15812 - protein, 10 aa, synthetic construct
  source 1..10: note = Seed: EETFKLSYGI
EDTFKLSYGA

SEQ ID NO: 15813 - protein, 10 aa, synthetic construct
  source 1..10: note = Seed: EETFKLSYGI
EDTFKLSYGI

SEQ ID NO: 15814 - protein, 10 aa, synthetic construct
  source 1..10: note = Seed: EETFKLSYGI
EDTFKLSYGL

SEQ ID NO: 15815 - protein, 10 aa, synthetic construct
  source 1..10: note = Seed: EETFKLSYGI
EDTFKLSYGV

SEQ ID NO: 15816 - protein, 10 aa, synthetic construct
  source 1..10: note = Seed: ECTTIVNGVR
EDTTIVNGVR

SEQ ID NO: 15817 - protein, 10 aa, synthetic construct
  source 1..10: note = Seed: ELVIGAVILR
EDVIGAVILK

SEQ ID NO: 15818 - protein, 10 aa, synthetic construct
  source 1..10: note = Seed: ELVIGAVILR
EDVIGAVILR

SEQ ID NO: 15819 - protein, 10 aa, synthetic construct
  source 1..10: note = Seed: EHVTFFIYNK
EDVTFFIYNK

SEQ ID NO: 15820 - protein, 10 aa, synthetic construct
  source 1..10: note = Seed: EHVTFFIYNK
EDVTFFIYNR

SEQ ID NO: 15821 - protein, 9 aa, synthetic construct
  source 1..9: note = Seed: EEAALCTFL
EEAALCTFA

SEQ ID NO: 15822 - protein, 9 aa, synthetic construct
  source 1..9: note = Seed: EEAALCTFL
EEAALCTFF

SEQ ID NO: 15823 - protein, 10 aa, synthetic construct
  source 1..10: note = Seed: EEAALCTFLL
EEAALCTFLA

SEQ ID NO: 15824 - protein, 10 aa, synthetic construct
  source 1..10: note = Seed: EEAALCTFLL
EEAALCTFLF

SEQ ID NO: 15825 - protein, 10 aa, synthetic construct
  source 1..10: note = Seed: EEAALCTFLL
EEAALCTFLV

SEQ ID NO: 15826 - protein, 10 aa, synthetic construct
  source 1..10: note = Seed: EEAALCTFLL
EEAALCTFLW

SEQ ID NO: 15827 - protein, 10 aa, synthetic construct
  source 1..10: note = Seed: EEAALCTFLL
EEAALCTFLY

SEQ ID NO: 15828 - protein, 9 aa, synthetic construct
  source 1..9: note = Seed: EEAALCTFL
EEAALCTFW

SEQ ID NO: 15829 - protein, 9 aa, synthetic construct
  source 1..9: note = Seed: EEAALCTFL
EEAALCTFY

SEQ ID NO: 15830 - protein, 8 aa, synthetic construct
  source 1..8: note = Seed: EEAALCTF
EEAALCTY

SEQ ID NO: 15831 - protein, 10 aa, synthetic construct
  source 1..10: note = Seed: ETAHSCNVNR
EEAHSCNVNR

SEQ ID NO: 15832 - protein, 9 aa, synthetic construct
  source 1..9: note = Seed: EEHVQIHTI
EEHVQIHTA

SEQ ID NO: 15833 - protein, 9 aa, synthetic construct
  source 1..9: note = Seed: EEHVQIHTI
EEHVQIHTF

SEQ ID NO: 15834 - protein, 9 aa, synthetic construct
  source 1..9: note = Seed: EEHVQIHTI
EEHVQIHTM

SEQ ID NO: 15835 - protein, 9 aa, synthetic construct
  source 1..9: note = Seed: EEHVQIHTI
EEHVQIHTW

SEQ ID NO: 15836 - protein, 9 aa, synthetic construct
  source 1..9: note = Seed: EEHVQIHTI
EEHVQIHTY

SEQ ID NO: 15837 - protein, 9 aa, synthetic construct
  source 1..9: note = Seed: EEIAIILAS
EEIAIILAA

SEQ ID NO: 15838 - protein, 9 aa, synthetic construct
  source 1..9: note = Seed: EEIAIILAS
EEIAIILAF

SEQ ID NO: 15839 - protein, 9 aa, synthetic construct
  source 1..9: note = Seed: EEIAIILAS
EEIAIILAI

SEQ ID NO: 15840 - protein, 9 aa, synthetic construct
  source 1..9: note = Seed: EEIAIILAS
EEIAIILAL

SEQ ID NO: 15841 - protein, 9 aa, synthetic construct
  source 1..9: note = Seed: EEIAIILAS
EEIAIILAM

SEQ ID NO: 15842 - protein, 10 aa, synthetic construct
  source 1..10: note = Seed: EEIAIILASF
EEIAIILASW

SEQ ID NO: 15843 - protein, 10 aa, synthetic construct
  source 1..10: note = Seed: EEIAIILASF
EEIAIILASY

SEQ ID NO: 15844 - protein, 9 aa, synthetic construct
  source 1..9: note = Seed: EEIAIILAS
EEIAIILAV

SEQ ID NO: 15845 - protein, 9 aa, synthetic construct
  source 1..9: note = Seed: EEIAIILAS
EEIAIILAY

SEQ ID NO: 15846 - protein, 10 aa, synthetic construct
  source 1..10: note = Seed: ETISLAGSYK
EEISLAGSYK

SEQ ID NO: 15847 - protein, 10 aa, synthetic construct
  source 1..10: note = Seed: ETISLAGSYK
EEISLAGSYR

SEQ ID NO: 15848 - protein, 10 aa, synthetic construct
  source 1..10: note = Seed: EEKFKEGVEF
EEKFKEGVEW

SEQ ID NO: 15849 - protein, 9 aa, synthetic construct
  source 1..9: note = Seed: EEMLDNRAT
EEMLDNRAA

SEQ ID NO: 15850 - protein, 10 aa, synthetic construct
  source 1..10: note = Seed: EEMLDNRATL
EEMLDNRATF

SEQ ID NO: 15851 - protein, 10 aa, synthetic construct
  source 1..10: note = Seed: EEMLDNRATL
EEMLDNRATW

SEQ ID NO: 15852 - protein, 10 aa, synthetic construct
  source 1..10: note = Seed: EEMLDNRATL
EEMLDNRATY

SEQ ID NO: 15853 - protein, 11 aa, synthetic construct
  source 1..11: note = Seed: EKQEILGTVSW
EEQEILGTVSW

SEQ ID NO: 15854 - protein, 10 aa, synthetic construct
  source 1..10: note = Seed: EGSVAYESLR
EESVAYESLK

SEQ ID NO: 15855 - protein, 10 aa, synthetic construct
  source 1..10: note = Seed: EGSVAYESLR
EESVAYESLR

SEQ ID NO: 15856 - protein, 10 aa, synthetic construct
  source 1..10: note = Seed: EETFKLSYGI
EETFKLSYGA

SEQ ID NO: 15857 - protein, 10 aa, synthetic construct
  source 1..10: note = Seed: EETFKLSYGI
EETFKLSYGF

SEQ ID NO: 15858 - protein, 10 aa, synthetic construct
  source 1..10: note = Seed: EETFKLSYGI
EETFKLSYGL

SEQ ID NO: 15859 - protein, 10 aa, synthetic construct
  source 1..10: note = Seed: EETFKLSYGI
EETFKLSYGV

SEQ ID NO: 15860 - protein, 10 aa, synthetic construct
  source 1..10: note = Seed: EETFKLSYGI
EETFKLSYGW

SEQ ID NO: 15861 - protein, 10 aa, synthetic construct
  source 1..10: note = Seed: EETFKLSYGI
EETFKLSYGY

SEQ ID NO: 15862 - protein, 10 aa, synthetic construct
  source 1..10: note = Seed: ECTTIVNGVR
EETTIVNGVR

SEQ ID NO: 15863 - protein, 10 aa, synthetic construct
  source 1..10: note = Seed: ELVIGAVILR
EEVIGAVILK

SEQ ID NO: 15864 - protein, 10 aa, synthetic construct
  source 1..10: note = Seed: ELVIGAVILR
EEVIGAVILR

SEQ ID NO: 15865 - protein, 8 aa, synthetic construct
  source 1..8: note = Seed: EHVTFFIY
EEVTFFIF

SEQ ID NO: 15866 - protein, 8 aa, synthetic construct
  source 1..8: note = Seed: EHVTFFIY
EEVTFFIM

SEQ ID NO: 15867 - protein, 8 aa, synthetic construct
  source 1..8: note = Seed: EHVTFFIY
EEVTFFIY

SEQ ID NO: 15868 - protein, 10 aa, synthetic construct
  source 1..10: note = Seed: EHVTFFIYNK
EEVTFFIYNK

SEQ ID NO: 15869 - protein, 10 aa, synthetic construct
  source 1..10: note = Seed: EHVTFFIYNK
EEVTFFIYNR

SEQ ID NO: 15870 - protein, 9 aa, synthetic construct
  source 1..9: note = Seed: EQWNLVIGF
EEWNLVIGF

SEQ ID NO: 15871 - protein, 9 aa, synthetic construct
  source 1..9: note = Seed: EQWNLVIGF
EEWNLVIGM

SEQ ID NO: 15872 - protein, 9 aa, synthetic construct
  source 1..9: note = Seed: EQWNLVIGF
EEWNLVIGY

SEQ ID NO: 15873 - protein, 10 aa, synthetic construct
  source 1..10: note = Seed: EEAALCTFLL
EFAALCTFLV

SEQ ID NO: 15874 - protein, 10 aa, synthetic construct
  source 1..10: note = Seed: ETAHSCNVNR
EFAHSCNVNR

SEQ ID NO: 15875 - protein, 10 aa, synthetic construct
  source 1..10: note = Seed: EHEIAWYTER
EFEIAWYTER

SEQ ID NO: 15876 - protein, 11 aa, synthetic construct
  source 1..11: note = Seed: EWFLAYILFTR
EFFLAYILFTR

SEQ ID NO: 15877 - protein, 10 aa, synthetic construct
  source 1..10: note = Seed: ETISLAGSYK
EFISLAGSYK

SEQ ID NO: 15878 - protein, 10 aa, synthetic construct
  source 1..10: note = Seed: ETISLAGSYK
EFISLAGSYR

SEQ ID NO: 15879 - protein, 10 aa, synthetic construct
  source 1..10: note = Seed: ESLRPDTRYV
EFLRPDTRYV

SEQ ID NO: 15880 - protein, 10 aa, synthetic construct
  source 1..10: note = Seed: EVNSFSGYLK
EFNSFSGYLR

SEQ ID NO: 15881 - protein, 9 aa, synthetic construct
  source 1..9: note = Seed: EQPYVFIKR
EFPYVFIKR

SEQ ID NO: 15882 - protein, 10 aa, synthetic construct
  source 1..10: note = Seed: EGSVAYESLR
EFSVAYESLK

SEQ ID NO: 15883 - protein, 10 aa, synthetic construct
  source 1..10: note = Seed: EGSVAYESLR
EFSVAYESLR

SEQ ID NO: 15884 - protein, 10 aa, synthetic construct
  source 1..10: note = Seed: EKSYELQTPF
EFSYELQTPW

SEQ ID NO: 15885 - protein, 10 aa, synthetic construct
  source 1..10: note = Seed: EETFKLSYGI
EFTFKLSYGA

SEQ ID NO: 15886 - protein, 10 aa, synthetic construct
  source 1..10: note = Seed: EETFKLSYGI
EFTFKLSYGI

SEQ ID NO: 15887 - protein, 10 aa, synthetic construct
  source 1..10: note = Seed: EETFKLSYGI
EFTFKLSYGL

SEQ ID NO: 15888 - protein, 10 aa, synthetic construct
  source 1..10: note = Seed: EETFKLSYGI
EFTFKLSYGV

SEQ ID NO: 15889 - protein, 10 aa, synthetic construct
  source 1..10: note = Seed: ELTSMKYFVK
EFTSMKYFVR

SEQ ID NO: 15890 - protein, 10 aa, synthetic construct
  source 1..10: note = Seed: ECTTIVNGVR
EFTTIVNGVR

SEQ ID NO: 15891 - protein, 10 aa, synthetic construct
  source 1..10: note = Seed: ELVIGAVILR
EFVIGAVILK

SEQ ID NO: 15892 - protein, 10 aa, synthetic construct
  source 1..10: note = Seed: ELVIGAVILR
EFVIGAVILR

SEQ ID NO: 15893 - protein, 10 aa, synthetic construct
  source 1..10: note = Seed: EHVTFFIYNK
EFVTFFIYNK

SEQ ID NO: 15894 - protein, 10 aa, synthetic construct
  source 1..10: note = Seed: EHVTFFIYNK
EFVTFFIYNR

SEQ ID NO: 15895 - protein, 9 aa, synthetic construct
  source 1..9: note = Seed: ELWAKRNIK
EFWAKRNIR

SEQ ID NO: 15896 - protein, 10 aa, synthetic construct
  source 1..10: note = Seed: EEAALCTFLL
EGAALCTFLV

SEQ ID NO: 15897 - protein, 10 aa, synthetic construct
  source 1..10: note = Seed: ETAHSCNVNR
EGAHSCNVNR

SEQ ID NO: 15898 - protein, 9 aa, synthetic construct
  source 1..9: note = Seed: EAALCTFLL
EGALCTFLV

SEQ ID NO: 15899 - protein, 9 aa, synthetic construct
  source 1..9: note = Seed: EAFEKMVSL
EGFEKMVSV

SEQ ID NO: 15900 - protein, 9 aa, synthetic construct
  source 1..9: note = Seed: ETFKLSYGI
EGFKLSYGV

SEQ ID NO: 15901 - protein, 9 aa, synthetic construct
  source 1..9: note = Seed: EAFLIGCNY
EGFLIGCNR

SEQ ID NO: 15902 - protein, 9 aa, synthetic construct
  source 1..9: note = Seed: ETIQITISS
EGIQITISV

SEQ ID NO: 15903 - protein, 10 aa, synthetic construct
  source 1..10: note = Seed: ETISLAGSYK
EGISLAGSYK

SEQ ID NO: 15904 - protein, 10 aa, synthetic construct
  source 1..10: note = Seed: ETISLAGSYK
EGISLAGSYR

SEQ ID NO: 15905 - protein, 10 aa, synthetic construct
  source 1..10: note = Seed: EVNSFSGYLK
EGNSFSGYLR

SEQ ID NO: 15906 - protein, 9 aa, synthetic construct
  source 1..9: note = Seed: EGNSPFHPL
EGNSPFHPV

SEQ ID NO: 15907 - protein, 10 aa, synthetic construct
  source 1..10: note = Seed: EGSVAYESLR
EGSVAYESLK

SEQ ID NO: 15908 - protein, 9 aa, synthetic construct
  source 1..9: note = Seed: ENSYTTTIK
EGSYTTTIR

SEQ ID NO: 15909 - protein, 10 aa, synthetic construct
  source 1..10: note = Seed: EETFKLSYGI
EGTFKLSYGA

SEQ ID NO: 15910 - protein, 10 aa, synthetic construct
  source 1..10: note = Seed: EETFKLSYGI
EGTFKLSYGI

SEQ ID NO: 15911 - protein, 10 aa, synthetic construct
  source 1..10: note = Seed: EETFKLSYGI
EGTFKLSYGL

SEQ ID NO: 15912 - protein, 10 aa, synthetic construct
  source 1..10: note = Seed: EETFKLSYGI
EGTFKLSYGV

SEQ ID NO: 15913 - protein, 10 aa, synthetic construct
  source 1..10: note = Seed: ECTTIVNGVR
EGTTIVNGVR

SEQ ID NO: 15914 - protein, 9 aa, synthetic construct
  source 1..9: note = Seed: EVVGDIILK
EGVGDIILR

SEQ ID NO: 15915 - protein, 9 aa, synthetic construct
  source 1..9: note = Seed: EAVGTNLPL
EGVGTNLPY

SEQ ID NO: 15916 - protein, 10 aa, synthetic construct
  source 1..10: note = Seed: ELVIGAVILR
EGVIGAVILK

SEQ ID NO: 15917 - protein, 10 aa, synthetic construct
  source 1..10: note = Seed: ELVIGAVILR
EGVIGAVILR

SEQ ID NO: 15918 - protein, 10 aa, synthetic construct
  source 1..10: note = Seed: EHVTFFIYNK
EGVTFFIYNK

SEQ ID NO: 15919 - protein, 10 aa, synthetic construct
  source 1..10: note = Seed: EHVTFFIYNK
EGVTFFIYNR

SEQ ID NO: 15920 - protein, 10 aa, synthetic construct
  source 1..10: note = Seed: EEAALCTFLL
EHAALCTFLV

SEQ ID NO: 15921 - protein, 10 aa, synthetic construct
  source 1..10: note = Seed: ETAHSCNVNR
EHAHSCNVNR

SEQ ID NO: 15922 - protein, 10 aa, synthetic construct
  source 1..10: note = Seed: ETISLAGSYK
EHISLAGSYK

SEQ ID NO: 15923 - protein, 10 aa, synthetic construct
  source 1..10: note = Seed: ETISLAGSYK
EHISLAGSYR

SEQ ID NO: 15924 - protein, 9 aa, synthetic construct
  source 1..9: note = Seed: ERSEKSYEL
EHSEKSYEL

SEQ ID NO: 15925 - protein, 10 aa, synthetic construct
  source 1..10: note = Seed: EGSVAYESLR
EHSVAYESLK

SEQ ID NO: 15926 - protein, 10 aa, synthetic construct
  source 1..10: note = Seed: EGSVAYESLR
EHSVAYESLR

SEQ ID NO: 15927 - protein, 10 aa, synthetic construct
  source 1..10: note = Seed: EETFKLSYGI
EHTFKLSYGA

SEQ ID NO: 15928 - protein, 10 aa, synthetic construct
  source 1..10: note = Seed: EETFKLSYGI
EHTFKLSYGI

SEQ ID NO: 15929 - protein, 10 aa, synthetic construct
  source 1..10: note = Seed: EETFKLSYGI
EHTFKLSYGL

SEQ ID NO: 15930 - protein, 10 aa, synthetic construct
  source 1..10: note = Seed: EETFKLSYGI
EHTFKLSYGV

SEQ ID NO: 15931 - protein, 10 aa, synthetic construct
  source 1..10: note = Seed: ECTTIVNGVR
EHTTIVNGVR

SEQ ID NO: 15932 - protein, 10 aa, synthetic construct
  source 1..10: note = Seed: ELVIGAVILR
EHVIGAVILK

SEQ ID NO: 15933 - protein, 10 aa, synthetic construct
  source 1..10: note = Seed: ELVIGAVILR
EHVIGAVILR

SEQ ID NO: 15934 - protein, 10 aa, synthetic construct
  source 1..10: note = Seed: EHVTFFIYNK
EHVTFFIYNR

SEQ ID NO: 15935 - protein, 10 aa, synthetic construct
  source 1..10: note = Seed: EEAALCTFLL
EIAALCTFLA

SEQ ID NO: 15936 - protein, 10 aa, synthetic construct
  source 1..10: note = Seed: EEAALCTFLL
EIAALCTFLI

SEQ ID NO: 15937 - protein, 10 aa, synthetic construct
  source 1..10: note = Seed: EEAALCTFLL
EIAALCTFLL

SEQ ID NO: 15938 - protein, 10 aa, synthetic construct
  source 1..10: note = Seed: EEAALCTFLL
EIAALCTFLV

SEQ ID NO: 15939 - protein, 10 aa, synthetic construct
  source 1..10: note = Seed: ETAHSCNVNR
EIAHSCNVNK

SEQ ID NO: 15940 - protein, 10 aa, synthetic construct
  source 1..10: note = Seed: ETAHSCNVNR
EIAHSCNVNR

SEQ ID NO: 15941 - protein, 9 aa, synthetic construct
  source 1..9: note = Seed: EIAIILASF
EIAIILASM

SEQ ID NO: 15942 - protein, 9 aa, synthetic construct
  source 1..9: note = Seed: EIAIILASF
EIAIILASY

SEQ ID NO: 15943 - protein, 10 aa, synthetic construct
  source 1..10: note = Seed: EVAKNLNESL
EIAKNLNESV

SEQ ID NO: 15944 - protein, 9 aa, synthetic construct
  source 1..9: note = Seed: EAALCTFLL
EIALCTFLA

SEQ ID NO: 15945 - protein, 9 aa, synthetic construct
  source 1..9: note = Seed: EAALCTFLL
EIALCTFLI

SEQ ID NO: 15946 - protein, 9 aa, synthetic construct
  source 1..9: note = Seed: EAALCTFLL
EIALCTFLL

SEQ ID NO: 15947 - protein, 9 aa, synthetic construct
  source 1..9: note = Seed: EAALCTFLL
EIALCTFLV

SEQ ID NO: 15948 - protein, 9 aa, synthetic construct
  source 1..9: note = Seed: ETAQNSVRV
EIAQNSVRV

SEQ ID NO: 15949 - protein, 11 aa, synthetic construct
  source 1..11: note = Seed: EVARDLSLQFK
EIARDLSLQFR

SEQ ID NO: 15950 - protein, 10 aa, synthetic construct
  source 1..10: note = Seed: EVARDLSLQF
EIARDLSLQY

SEQ ID NO: 15951 - protein, 9 aa, synthetic construct
  source 1..9: note = Seed: EIAWYTERS
EIAWYTERA

SEQ ID NO: 15952 - protein, 9 aa, synthetic construct
  source 1..9: note = Seed: EIAWYTERS
EIAWYTERI

SEQ ID NO: 15953 - protein, 9 aa, synthetic construct
  source 1..9: note = Seed: EIAWYTERS
EIAWYTERL

SEQ ID NO: 15954 - protein, 11 aa, synthetic construct
  source 1..11: note = Seed: EIAWYTERSEK
EIAWYTERSER

SEQ ID NO: 15955 - protein, 9 aa, synthetic construct
  source 1..9: note = Seed: EIAWYTERS
EIAWYTERV

SEQ ID NO: 15956 - protein, 11 aa, synthetic construct
  source 1..11: note = Seed: EVFAQVKQIYK
EIFAQVKQIYK

SEQ ID NO: 15957 - protein, 11 aa, synthetic construct
  source 1..11: note = Seed: EVFAQVKQIYK
EIFAQVKQIYR

SEQ ID NO: 15958 - protein, 9 aa, synthetic construct
  source 1..9: note = Seed: EVFAQVKQI
EIFAQVKQV

SEQ ID NO: 15959 - protein, 9 aa, synthetic construct
  source 1..9: note = Seed: EAFEKMVSL
EIFEKMVSA

SEQ ID NO: 15960 - protein, 9 aa, synthetic construct
  source 1..9: note = Seed: EAFEKMVSL
EIFEKMVSF

SEQ ID NO: 15961 - protein, 9 aa, synthetic construct
  source 1..9: note = Seed: EAFEKMVSL
EIFEKMVSI

SEQ ID NO: 15962 - protein, 9 aa, synthetic construct
  source 1..9: note = Seed: EAFEKMVSL
EIFEKMVSL

SEQ ID NO: 15963 - protein, 10 aa, synthetic construct
  source 1..10: note = Seed: EAFEKMVSLL
EIFEKMVSLV

SEQ ID NO: 15964 - protein, 9 aa, synthetic construct
  source 1..9: note = Seed: EAFEKMVSL
EIFEKMVSM

SEQ ID NO: 15965 - protein, 9 aa, synthetic construct
  source 1..9: note = Seed: EAFEKMVSL
EIFEKMVSV

SEQ ID NO: 15966 - protein, 9 aa, synthetic construct
  source 1..9: note = Seed: EAFEKMVSL
EIFEKMVSY

SEQ ID NO: 15967 - protein, 11 aa, synthetic construct
  source 1..11: note = Seed: ELFENKTTLPV
EIFENKTTLPV

SEQ ID NO: 15968 - protein, 10 aa, synthetic construct
  source 1..10: note = Seed: ESFGGASCCL
EIFGGASCCV

SEQ ID NO: 15969 - protein, 9 aa, synthetic construct
  source 1..9: note = Seed: ETFKLSYGI
EIFKLSYGA

SEQ ID NO: 15970 - protein, 9 aa, synthetic construct
  source 1..9: note = Seed: ETFKLSYGI
EIFKLSYGI

SEQ ID NO: 15971 - protein, 10 aa, synthetic construct
  source 1..10: note = Seed: ETFKLSYGIA
EIFKLSYGII

SEQ ID NO: 15972 - protein, 10 aa, synthetic construct
  source 1..10: note = Seed: ETFKLSYGIA
EIFKLSYGIV

SEQ ID NO: 15973 - protein, 9 aa, synthetic construct
  source 1..9: note = Seed: ETFKLSYGI
EIFKLSYGL

SEQ ID NO: 15974 - protein, 9 aa, synthetic construct
  source 1..9: note = Seed: ETFKLSYGI
EIFKLSYGM

SEQ ID NO: 15975 - protein, 9 aa, synthetic construct
  source 1..9: note = Seed: ETFKLSYGI
EIFKLSYGV

SEQ ID NO: 15976 - protein, 9 aa, synthetic construct
  source 1..9: note = Seed: ETFKLSYGI
EIFKLSYGY

SEQ ID NO: 15977 - protein, 11 aa, synthetic construct
  source 1..11: note = Seed: EWFLAYILFTR
EIFLAYILFTK

SEQ ID NO: 15978 - protein, 11 aa, synthetic construct
  source 1..11: note = Seed: EWFLAYILFTR
EIFLAYILFTR

SEQ ID NO: 15979 - protein, 9 aa, synthetic construct
  source 1..9: note = Seed: EAFLIGCNY
EIFLIGCNK

SEQ ID NO: 15980 - protein, 9 aa, synthetic construct
  source 1..9: note = Seed: EAFLIGCNY
EIFLIGCNR

SEQ ID NO: 15981 - protein, 10 aa, synthetic construct
  source 1..10: note = Seed: EAFLIGCNYL
EIFLIGCNYV

SEQ ID NO: 15982 - protein, 9 aa, synthetic construct
  source 1..9: note = Seed: EVFNATRFA
EIFNATRFA

SEQ ID NO: 15983 - protein, 10 aa, synthetic construct
  source 1..10: note = Seed: EVFNATRFAS
EIFNATRFAA

SEQ ID NO: 15984 - protein, 10 aa, synthetic construct
  source 1..10: note = Seed: EVFNATRFAS
EIFNATRFAI

SEQ ID NO: 15985 - protein, 10 aa, synthetic construct
  source 1..10: note = Seed: EVFNATRFAS
EIFNATRFAL

SEQ ID NO: 15986 - protein, 11 aa, synthetic construct
  source 1..11: note = Seed: EVFNATRFASV
EIFNATRFASV

SEQ ID NO: 15987 - protein, 10 aa, synthetic construct
  source 1..10: note = Seed: EVFNATRFAS
EIFNATRFAV

SEQ ID NO: 15988 - protein, 9 aa, synthetic construct
  source 1..9: note = Seed: EVFNATRFA
EIFNATRFI

SEQ ID NO: 15989 - protein, 9 aa, synthetic construct
  source 1..9: note = Seed: EVFNATRFA
EIFNATRFL

SEQ ID NO: 15990 - protein, 9 aa, synthetic construct
  source 1..9: note = Seed: EVFNATRFA
EIFNATRFV

SEQ ID NO: 15991 - protein, 10 aa, synthetic construct
  source 1..10: note = Seed: EEIAIILASF
EIIAIILASY

SEQ ID NO: 15992 - protein, 9 aa, synthetic construct
  source 1..9: note = Seed: ETIQITISS
EIIQITISA

SEQ ID NO: 15993 - protein, 9 aa, synthetic construct
  source 1..9: note = Seed: ETIQITISS
EIIQITISI

SEQ ID NO: 15994 - protein, 9 aa, synthetic construct
  source 1..9: note = Seed: ETIQITISS
EIIQITISL

SEQ ID NO: 15995 - protein, 10 aa, synthetic construct
  source 1..10: note = Seed: ETIQITISSF
EIIQITISSF

SEQ ID NO: 15996 - protein, 11 aa, synthetic construct
  source 1..11: note = Seed: ETIQITISSFK
EIIQITISSFK

SEQ ID NO: 15997 - protein, 11 aa, synthetic construct
  source 1..11: note = Seed: ETIQITISSFK
EIIQITISSFR

SEQ ID NO: 15998 - protein, 10 aa, synthetic construct
  source 1..10: note = Seed: ETIQITISSF
EIIQITISSM

SEQ ID NO: 15999 - protein, 10 aa, synthetic construct
  source 1..10: note = Seed: ETIQITISSF
EIIQITISSY

SEQ ID NO: 16000 - protein, 9 aa, synthetic construct
  source 1..9: note = Seed: ETIQITISS
EIIQITISV

SEQ ID NO: 16001 - protein, 9 aa, synthetic construct
  source 1..9: note = Seed: ETISLAGSY
EIISLAGSF

SEQ ID NO: 16002 - protein, 9 aa, synthetic construct
  source 1..9: note = Seed: ETISLAGSY
EIISLAGSK

SEQ ID NO: 16003 - protein, 9 aa, synthetic construct
  source 1..9: note = Seed: ETISLAGSY
EIISLAGSM

SEQ ID NO: 16004 - protein, 9 aa, synthetic construct
  source 1..9: note = Seed: ETISLAGSY
EIISLAGSR

SEQ ID NO: 16005 - protein, 9 aa, synthetic construct
  source 1..9: note = Seed: ETISLAGSY
EIISLAGSW

SEQ ID NO: 16006 - protein, 9 aa, synthetic construct
  source 1..9: note = Seed: ETISLAGSY
EIISLAGSY

SEQ ID NO: 16007 - protein, 10 aa, synthetic construct
  source 1..10: note = Seed: ETISLAGSYK
EIISLAGSYK

SEQ ID NO: 16008 - protein, 11 aa, synthetic construct
  source 1..11: note = Seed: ETISLAGSYKD
EIISLAGSYKR

SEQ ID NO: 16009 - protein, 10 aa, synthetic construct
  source 1..10: note = Seed: ETISLAGSYK
EIISLAGSYR

SEQ ID NO: 16010 - protein, 10 aa, synthetic construct
  source 1..10: note = Seed: ETISLAGSYK
EIISLAGSYY

SEQ ID NO: 16011 - protein, 10 aa, synthetic construct
  source 1..10: note = Seed: ETKDVVECLK
EIKDVVECLK

SEQ ID NO: 16012 - protein, 10 aa, synthetic construct
  source 1..10: note = Seed: ETKDVVECLK
EIKDVVECLR

SEQ ID NO: 16013 - protein, 9 aa, synthetic construct
  source 1..9: note = Seed: ETKDVVECL
EIKDVVECV

SEQ ID NO: 16014 - protein, 10 aa, synthetic construct
  source 1..10: note = Seed: EMLAHAEETR
EILAHAEETR

SEQ ID NO: 16015 - protein, 10 aa, synthetic construct
  source 1..10: note = Seed: EPLVDLPIGI
EILVDLPIGV

SEQ ID NO: 16016 - protein, 9 aa, synthetic construct
  source 1..9: note = Seed: ETLYCIDGA
EILYCIDGV

SEQ ID NO: 16017 - protein, 9 aa, synthetic construct
  source 1..9: note = Seed: EVNEFACVV
EINEFACVV

SEQ ID NO: 16018 - protein, 10 aa, synthetic construct
  source 1..10: note = Seed: ETNILLNVPL
EINILLNVPV

SEQ ID NO: 16019 - protein, 9 aa, synthetic construct
  source 1..9: note = Seed: EVNSFSGYL
EINSFSGYF

SEQ ID NO: 16020 - protein, 9 aa, synthetic construct
  source 1..9: note = Seed: EVNSFSGYL
EINSFSGYI

SEQ ID NO: 16021 - protein, 9 aa, synthetic construct
  source 1..9: note = Seed: EVNSFSGYL
EINSFSGYL

SEQ ID NO: 16022 - protein, 10 aa, synthetic construct
  source 1..10: note = Seed: EVNSFSGYLK
EINSFSGYLK

SEQ ID NO: 16023 - protein, 10 aa, synthetic construct
  source 1..10: note = Seed: EVNSFSGYLK
EINSFSGYLR

SEQ ID NO: 16024 - protein, 9 aa, synthetic construct
  source 1..9: note = Seed: EVNSFSGYL
EINSFSGYM

SEQ ID NO: 16025 - protein, 9 aa, synthetic construct
  source 1..9: note = Seed: EVNSFSGYL
EINSFSGYR

SEQ ID NO: 16026 - protein, 9 aa, synthetic construct
  source 1..9: note = Seed: EVNSFSGYL
EINSFSGYV

SEQ ID NO: 16027 - protein, 9 aa, synthetic construct
  source 1..9: note = Seed: EVNSFSGYL
EINSFSGYY

SEQ ID NO: 16028 - protein, 9 aa, synthetic construct
  source 1..9: note = Seed: EGNSPFHPL
EINSPFHPA

SEQ ID NO: 16029 - protein, 9 aa, synthetic construct
  source 1..9: note = Seed: EGNSPFHPL
EINSPFHPI

SEQ ID NO: 16030 - protein, 9 aa, synthetic construct
  source 1..9: note = Seed: EGNSPFHPL
EINSPFHPL

SEQ ID NO: 16031 - protein, 9 aa, synthetic construct
  source 1..9: note = Seed: EGNSPFHPL
EINSPFHPM

SEQ ID NO: 16032 - protein, 9 aa, synthetic construct
  source 1..9: note = Seed: EGNSPFHPL
EINSPFHPV

SEQ ID NO: 16033 - protein, 9 aa, synthetic construct
  source 1..9: note = Seed: ESPFVMMSA
EIPFVMMSA

SEQ ID NO: 16034 - protein, 9 aa, synthetic construct
  source 1..9: note = Seed: ESPFVMMSA
EIPFVMMSI

SEQ ID NO: 16035 - protein, 9 aa, synthetic construct
  source 1..9: note = Seed: ESPFVMMSA
EIPFVMMSL

SEQ ID NO: 16036 - protein, 9 aa, synthetic construct
  source 1..9: note = Seed: ESPFVMMSA
EIPFVMMSV

SEQ ID NO: 16037 - protein, 9 aa, synthetic construct
  source 1..9: note = Seed: EQPYVFIKR
EIPYVFIKK

SEQ ID NO: 16038 - protein, 9 aa, synthetic construct
  source 1..9: note = Seed: EQPYVFIKR
EIPYVFIKR

SEQ ID NO: 16039 - protein, 9 aa, synthetic construct
  source 1..9: note = Seed: ELQTPFEIK
EIQTPFEIR

SEQ ID NO: 16040 - protein, 10 aa, synthetic construct
  source 1..10: note = Seed: EGSVAYESLR
EISVAYESLK

SEQ ID NO: 16041 - protein, 10 aa, synthetic construct
  source 1..10: note = Seed: EGSVAYESLR
EISVAYESLR

SEQ ID NO: 16042 - protein, 10 aa, synthetic construct
  source 1..10: note = Seed: EKSYELQTPF
EISYELQTPW

SEQ ID NO: 16043 - protein, 9 aa, synthetic construct
  source 1..9: note = Seed: ENSYTTTIK
EISYTTTIK

SEQ ID NO: 16044 - protein, 9 aa, synthetic construct
  source 1..9: note = Seed: ENSYTTTIK
EISYTTTIR

SEQ ID NO: 16045 - protein, 10 aa, synthetic construct
  source 1..10: note = Seed: EETFKLSYGI
EITFKLSYGA

SEQ ID NO: 16046 - protein, 10 aa, synthetic construct
  source 1..10: note = Seed: EETFKLSYGI
EITFKLSYGI

SEQ ID NO: 16047 - protein, 10 aa, synthetic construct
  source 1..10: note = Seed: EETFKLSYGI
EITFKLSYGL

SEQ ID NO: 16048 - protein, 10 aa, synthetic construct
  source 1..10: note = Seed: EETFKLSYGI
EITFKLSYGV

SEQ ID NO: 16049 - protein, 9 aa, synthetic construct
  source 1..9: note = Seed: ELTGHMLDM
EITGHMLDY

SEQ ID NO: 16050 - protein, 9 aa, synthetic construct
  source 1..9: note = Seed: EFTPFDVVR
EITPFDVVK

SEQ ID NO: 16051 - protein, 9 aa, synthetic construct
  source 1..9: note = Seed: EFTPFDVVR
EITPFDVVR

SEQ ID NO: 16052 - protein, 9 aa, synthetic construct
  source 1..9: note = Seed: ELTSMKYFV
EITSMKYFI

SEQ ID NO: 16053 - protein, 9 aa, synthetic construct
  source 1..9: note = Seed: ELTSMKYFV
EITSMKYFL

SEQ ID NO: 16054 - protein, 9 aa, synthetic construct
  source 1..9: note = Seed: ELTSMKYFV
EITSMKYFV

SEQ ID NO: 16055 - protein, 10 aa, synthetic construct
  source 1..10: note = Seed: ELTSMKYFVK
EITSMKYFVK

SEQ ID NO: 16056 - protein, 10 aa, synthetic construct
  source 1..10: note = Seed: ELTSMKYFVK
EITSMKYFVR

SEQ ID NO: 16057 - protein, 9 aa, synthetic construct
  source 1..9: note = Seed: ECTTIVNGV
EITTIVNGA

SEQ ID NO: 16058 - protein, 9 aa, synthetic construct
  source 1..9: note = Seed: ECTTIVNGV
EITTIVNGI

SEQ ID NO: 16059 - protein, 9 aa, synthetic construct
  source 1..9: note = Seed: ECTTIVNGV
EITTIVNGL

SEQ ID NO: 16060 - protein, 9 aa, synthetic construct
  source 1..9: note = Seed: ECTTIVNGV
EITTIVNGV

SEQ ID NO: 16061 - protein, 10 aa, synthetic construct
  source 1..10: note = Seed: ECTTIVNGVR
EITTIVNGVK

SEQ ID NO: 16062 - protein, 10 aa, synthetic construct
  source 1..10: note = Seed: ECTTIVNGVR
EITTIVNGVR

SEQ ID NO: 16063 - protein, 9 aa, synthetic construct
  source 1..9: note = Seed: ELVAELEGI
EIVAELEGI

SEQ ID NO: 16064 - protein, 9 aa, synthetic construct
  source 1..9: note = Seed: ELVAELEGI
EIVAELEGV

SEQ ID NO: 16065 - protein, 9 aa, synthetic construct
  source 1..9: note = Seed: EVVGDIILK
EIVGDIILK

SEQ ID NO: 16066 - protein, 9 aa, synthetic construct
  source 1..9: note = Seed: EVVGDIILK
EIVGDIILM

SEQ ID NO: 16067 - protein, 9 aa, synthetic construct
  source 1..9: note = Seed: EVVGDIILK
EIVGDIILR

SEQ ID NO: 16068 - protein, 9 aa, synthetic construct
  source 1..9: note = Seed: EAVGTNLPL
EIVGTNLPF

SEQ ID NO: 16069 - protein, 9 aa, synthetic construct
  source 1..9: note = Seed: EAVGTNLPL
EIVGTNLPI

SEQ ID NO: 16070 - protein, 9 aa, synthetic construct
  source 1..9: note = Seed: EAVGTNLPL
EIVGTNLPL

SEQ ID NO: 16071 - protein, 9 aa, synthetic construct
  source 1..9: note = Seed: EAVGTNLPL
EIVGTNLPM

SEQ ID NO: 16072 - protein, 9 aa, synthetic construct
  source 1..9: note = Seed: EAVGTNLPL
EIVGTNLPV

SEQ ID NO: 16073 - protein, 9 aa, synthetic construct
  source 1..9: note = Seed: EAVGTNLPL
EIVGTNLPY

SEQ ID NO: 16074 - protein, 10 aa, synthetic construct
  source 1..10: note = Seed: ELVIGAVILR
EIVIGAVILK

SEQ ID NO: 16075 - protein, 10 aa, synthetic construct
  source 1..10: note = Seed: ELVIGAVILR
EIVIGAVILR

SEQ ID NO: 16076 - protein, 9 aa, synthetic construct
  source 1..9: note = Seed: ETVKGLDYK
EIVKGLDYK

SEQ ID NO: 16077 - protein, 9 aa, synthetic construct
  source 1..9: note = Seed: ETVKGLDYK
EIVKGLDYR

SEQ ID NO: 16078 - protein, 9 aa, synthetic construct
  source 1..9: note = Seed: ECVLGQSKR
EIVLGQSKR

SEQ ID NO: 16079 - protein, 10 aa, synthetic construct
  source 1..10: note = Seed: EHVTFFIYNK
EIVTFFIYNK

SEQ ID NO: 16080 - protein, 10 aa, synthetic construct
  source 1..10: note = Seed: EHVTFFIYNK
EIVTFFIYNR

SEQ ID NO: 16081 - protein, 9 aa, synthetic construct
  source 1..9: note = Seed: ELWAKRNIK
EIWAKRNIR

SEQ ID NO: 16082 - protein, 10 aa, synthetic construct
  source 1..10: note = Seed: EEAALCTFLL
EKAALCTFLV

SEQ ID NO: 16083 - protein, 10 aa, synthetic construct
  source 1..10: note = Seed: ETAHSCNVNR
EKAHSCNVNR

SEQ ID NO: 16084 - protein, 10 aa, synthetic construct
  source 1..10: note = Seed: ETISLAGSYK
EKISLAGSYK

SEQ ID NO: 16085 - protein, 10 aa, synthetic construct
  source 1..10: note = Seed: ETISLAGSYK
EKISLAGSYR

SEQ ID NO: 16086 - protein, 10 aa, synthetic construct
  source 1..10: note = Seed: EGSVAYESLR
EKSVAYESLK

SEQ ID NO: 16087 - protein, 10 aa, synthetic construct
  source 1..10: note = Seed: EGSVAYESLR
EKSVAYESLR

SEQ ID NO: 16088 - protein, 10 aa, synthetic construct
  source 1..10: note = Seed: EKSYELQTPF
EKSYELQTPW

SEQ ID NO: 16089 - protein, 10 aa, synthetic construct
  source 1..10: note = Seed: EETFKLSYGI
EKTFKLSYGA

SEQ ID NO: 16090 - protein, 10 aa, synthetic construct
  source 1..10: note = Seed: EETFKLSYGI
EKTFKLSYGI

SEQ ID NO: 16091 - protein, 10 aa, synthetic construct
  source 1..10: note = Seed: EETFKLSYGI
EKTFKLSYGL

SEQ ID NO: 16092 - protein, 10 aa, synthetic construct
  source 1..10: note = Seed: EETFKLSYGI
EKTFKLSYGV

SEQ ID NO: 16093 - protein, 10 aa, synthetic construct
  source 1..10: note = Seed: ECTTIVNGVR
EKTTIVNGVR

SEQ ID NO: 16094 - protein, 10 aa, synthetic construct
  source 1..10: note = Seed: ELVIGAVILR
EKVIGAVILK

SEQ ID NO: 16095 - protein, 10 aa, synthetic construct
  source 1..10: note = Seed: ELVIGAVILR
EKVIGAVILR

SEQ ID NO: 16096 - protein, 10 aa, synthetic construct
  source 1..10: note = Seed: EHVTFFIYNK
EKVTFFIYNK

SEQ ID NO: 16097 - protein, 10 aa, synthetic construct
  source 1..10: note = Seed: EHVTFFIYNK
EKVTFFIYNR

SEQ ID NO: 16098 - protein, 10 aa, synthetic construct
  source 1..10: note = Seed: EEAALCTFLL
ELAALCTFLI

SEQ ID NO: 16099 - protein, 10 aa, synthetic construct
  source 1..10: note = Seed: EEAALCTFLL
ELAALCTFLL

SEQ ID NO: 16100 - protein, 10 aa, synthetic construct
  source 1..10: note = Seed: EEAALCTFLL
ELAALCTFLV

SEQ ID NO: 16101 - protein, 10 aa, synthetic construct
  source 1..10: note = Seed: ETAHSCNVNR
ELAHSCNVNR

SEQ ID NO: 16102 - protein, 9 aa, synthetic construct
  source 1..9: note = Seed: EIAIILASF
ELAIILASY

SEQ ID NO: 16103 - protein, 9 aa, synthetic construct
  source 1..9: note = Seed: EAALCTFLL
ELALCTFLI

SEQ ID NO: 16104 - protein, 9 aa, synthetic construct
  source 1..9: note = Seed: EAALCTFLL
ELALCTFLV

SEQ ID NO: 16105 - protein, 9 aa, synthetic construct
  source 1..9: note = Seed: EIAWYTERS
ELAWYTERI

SEQ ID NO: 16106 - protein, 9 aa, synthetic construct
  source 1..9: note = Seed: EIAWYTERS
ELAWYTERV

SEQ ID NO: 16107 - protein, 11 aa, synthetic construct
  source 1..11: note = Seed: EVFAQVKQIYK
ELFAQVKQIYR

SEQ ID NO: 16108 - protein, 9 aa, synthetic construct
  source 1..9: note = Seed: EAFEKMVSL
ELFEKMVSF

SEQ ID NO: 16109 - protein, 9 aa, synthetic construct
  source 1..9: note = Seed: EAFEKMVSL
ELFEKMVSI

SEQ ID NO: 16110 - protein, 9 aa, synthetic construct
  source 1..9: note = Seed: EAFEKMVSL
ELFEKMVSM

SEQ ID NO: 16111 - protein, 9 aa, synthetic construct
  source 1..9: note = Seed: EAFEKMVSL
ELFEKMVSV

SEQ ID NO: 16112 - protein, 9 aa, synthetic construct
  source 1..9: note = Seed: EAFEKMVSL
ELFEKMVSY

SEQ ID NO: 16113 - protein, 9 aa, synthetic construct
  source 1..9: note = Seed: ELFENKTTL
ELFENKTTV

SEQ ID NO: 16114 - protein, 9 aa, synthetic construct
  source 1..9: note = Seed: ETFKLSYGI
ELFKLSYGI

SEQ ID NO: 16115 - protein, 9 aa, synthetic construct
  source 1..9: note = Seed: ETFKLSYGI
ELFKLSYGL

SEQ ID NO: 16116 - protein, 9 aa, synthetic construct
  source 1..9: note = Seed: ETFKLSYGI
ELFKLSYGV

SEQ ID NO: 16117 - protein, 9 aa, synthetic construct
  source 1..9: note = Seed: EAFLIGCNY
ELFLIGCNK

SEQ ID NO: 16118 - protein, 9 aa, synthetic construct
  source 1..9: note = Seed: EAFLIGCNY
ELFLIGCNR

SEQ ID NO: 16119 - protein, 10 aa, synthetic construct
  source 1..10: note = Seed: EVFNATRFAS
ELFNATRFAI

SEQ ID NO: 16120 - protein, 10 aa, synthetic construct
  source 1..10: note = Seed: EVFNATRFAS
ELFNATRFAV

SEQ ID NO: 16121 - protein, 9 aa, synthetic construct
  source 1..9: note = Seed: EVFNATRFA
ELFNATRFI

SEQ ID NO: 16122 - protein, 9 aa, synthetic construct
  source 1..9: note = Seed: EVFNATRFA
ELFNATRFV

SEQ ID NO: 16123 - protein, 9 aa, synthetic construct
  source 1..9: note = Seed: ETIQITISS
ELIQITISI

SEQ ID NO: 16124 - protein, 11 aa, synthetic construct
  source 1..11: note = Seed: ETIQITISSFK
ELIQITISSFR

SEQ ID NO: 16125 - protein, 10 aa, synthetic construct
  source 1..10: note = Seed: ETIQITISSF
ELIQITISSY

SEQ ID NO: 16126 - protein, 9 aa, synthetic construct
  source 1..9: note = Seed: ETIQITISS
ELIQITISV

SEQ ID NO: 16127 - protein, 9 aa, synthetic construct
  source 1..9: note = Seed: ETISLAGSY
ELISLAGSR

SEQ ID NO: 16128 - protein, 9 aa, synthetic construct
  source 1..9: note = Seed: ETISLAGSY
ELISLAGSY

SEQ ID NO: 16129 - protein, 10 aa, synthetic construct
  source 1..10: note = Seed: ETISLAGSYK
ELISLAGSYK

SEQ ID NO: 16130 - protein, 10 aa, synthetic construct
  source 1..10: note = Seed: ETISLAGSYK
ELISLAGSYR

SEQ ID NO: 16131 - protein, 9 aa, synthetic construct
  source 1..9: note = Seed: EVNSFSGYL
ELNSFSGYI

SEQ ID NO: 16132 - protein, 10 aa, synthetic construct
  source 1..10: note = Seed: EVNSFSGYLK
ELNSFSGYLK

SEQ ID NO: 16133 - protein, 10 aa, synthetic construct
  source 1..10: note = Seed: EVNSFSGYLK
ELNSFSGYLR

SEQ ID NO: 16134 - protein, 9 aa, synthetic construct
  source 1..9: note = Seed: EVNSFSGYL
ELNSFSGYV

SEQ ID NO: 16135 - protein, 9 aa, synthetic construct
  source 1..9: note = Seed: EVNSFSGYL
ELNSFSGYY

SEQ ID NO: 16136 - protein, 9 aa, synthetic construct
  source 1..9: note = Seed: EGNSPFHPL
ELNSPFHPI

SEQ ID NO: 16137 - protein, 9 aa, synthetic construct
  source 1..9: note = Seed: EGNSPFHPL
ELNSPFHPL

SEQ ID NO: 16138 - protein, 9 aa, synthetic construct
  source 1..9: note = Seed: EGNSPFHPL
ELNSPFHPV

SEQ ID NO: 16139 - protein, 9 aa, synthetic construct
  source 1..9: note = Seed: ESPFVMMSA
ELPFVMMSI

SEQ ID NO: 16140 - protein, 9 aa, synthetic construct
  source 1..9: note = Seed: ESPFVMMSA
ELPFVMMSV

SEQ ID NO: 16141 - protein, 9 aa, synthetic construct
  source 1..9: note = Seed: EQPYVFIKR
ELPYVFIKK

SEQ ID NO: 16142 - protein, 9 aa, synthetic construct
  source 1..9: note = Seed: EQPYVFIKR
ELPYVFIKR

SEQ ID NO: 16143 - protein, 10 aa, synthetic construct
  source 1..10: note = Seed: EGSVAYESLR
ELSVAYESLK

SEQ ID NO: 16144 - protein, 10 aa, synthetic construct
  source 1..10: note = Seed: EGSVAYESLR
ELSVAYESLR

SEQ ID NO: 16145 - protein, 10 aa, synthetic construct
  source 1..10: note = Seed: EKSYELQTPF
ELSYELQTPW

SEQ ID NO: 16146 - protein, 9 aa, synthetic construct
  source 1..9: note = Seed: ENSYTTTIK
ELSYTTTIK

SEQ ID NO: 16147 - protein, 9 aa, synthetic construct
  source 1..9: note = Seed: ENSYTTTIK
ELSYTTTIR

SEQ ID NO: 16148 - protein, 10 aa, synthetic construct
  source 1..10: note = Seed: EETFKLSYGI
ELTFKLSYGA

SEQ ID NO: 16149 - protein, 10 aa, synthetic construct
  source 1..10: note = Seed: EETFKLSYGI
ELTFKLSYGI

SEQ ID NO: 16150 - protein, 10 aa, synthetic construct
  source 1..10: note = Seed: EETFKLSYGI
ELTFKLSYGL

SEQ ID NO: 16151 - protein, 10 aa, synthetic construct
  source 1..10: note = Seed: EETFKLSYGI
ELTFKLSYGV

SEQ ID NO: 16152 - protein, 9 aa, synthetic construct
  source 1..9: note = Seed: EFTPFDVVR
ELTPFDVVK

SEQ ID NO: 16153 - protein, 9 aa, synthetic construct
  source 1..9: note = Seed: EFTPFDVVR
ELTPFDVVR

SEQ ID NO: 16154 - protein, 10 aa, synthetic construct
  source 1..10: note = Seed: ELTSMKYFVK
ELTSMKYFVR

SEQ ID NO: 16155 - protein, 9 aa, synthetic construct
  source 1..9: note = Seed: ECTTIVNGV
ELTTIVNGI

SEQ ID NO: 16156 - protein, 9 aa, synthetic construct
  source 1..9: note = Seed: ECTTIVNGV
ELTTIVNGV

SEQ ID NO: 16157 - protein, 10 aa, synthetic construct
  source 1..10: note = Seed: ECTTIVNGVR
ELTTIVNGVK

SEQ ID NO: 16158 - protein, 10 aa, synthetic construct
  source 1..10: note = Seed: ECTTIVNGVR
ELTTIVNGVR

SEQ ID NO: 16159 - protein, 9 aa, synthetic construct
  source 1..9: note = Seed: EVVGDIILK
ELVGDIILK

SEQ ID NO: 16160 - protein, 9 aa, synthetic construct
  source 1..9: note = Seed: EVVGDIILK
ELVGDIILR

SEQ ID NO: 16161 - protein, 9 aa, synthetic construct
  source 1..9: note = Seed: EAVGTNLPL
ELVGTNLPV

SEQ ID NO: 16162 - protein, 9 aa, synthetic construct
  source 1..9: note = Seed: EAVGTNLPL
ELVGTNLPY

SEQ ID NO: 16163 - protein, 10 aa, synthetic construct
  source 1..10: note = Seed: ELVIGAVILR
ELVIGAVILK

SEQ ID NO: 16164 - protein, 9 aa, synthetic construct
  source 1..9: note = Seed: ETVKGLDYK
ELVKGLDYK

SEQ ID NO: 16165 - protein, 9 aa, synthetic construct
  source 1..9: note = Seed: ETVKGLDYK
ELVKGLDYR

SEQ ID NO: 16166 - protein, 10 aa, synthetic construct
  source 1..10: note = Seed: EHVTFFIYNK
ELVTFFIYNK

SEQ ID NO: 16167 - protein, 10 aa, synthetic construct
  source 1..10: note = Seed: EHVTFFIYNK
ELVTFFIYNR

SEQ ID NO: 16168 - protein, 9 aa, synthetic construct
  source 1..9: note = Seed: ELWAKRNIK
ELWAKRNIR

SEQ ID NO: 16169 - protein, 10 aa, synthetic construct
  source 1..10: note = Seed: EEAALCTFLL
EMAALCTFLI

SEQ ID NO: 16170 - protein, 10 aa, synthetic construct
  source 1..10: note = Seed: EEAALCTFLL
EMAALCTFLL

SEQ ID NO: 16171 - protein, 10 aa, synthetic construct
  source 1..10: note = Seed: EEAALCTFLL
EMAALCTFLV

SEQ ID NO: 16172 - protein, 10 aa, synthetic construct
  source 1..10: note = Seed: ETAHSCNVNR
EMAHSCNVNK

SEQ ID NO: 16173 - protein, 10 aa, synthetic construct
  source 1..10: note = Seed: ETAHSCNVNR
EMAHSCNVNR

SEQ ID NO: 16174 - protein, 9 aa, synthetic construct
  source 1..9: note = Seed: EIAIILASF
EMAIILASY

SEQ ID NO: 16175 - protein, 9 aa, synthetic construct
  source 1..9: note = Seed: EAALCTFLL
EMALCTFLI

SEQ ID NO: 16176 - protein, 9 aa, synthetic construct
  source 1..9: note = Seed: EAALCTFLL
EMALCTFLV

SEQ ID NO: 16177 - protein, 9 aa, synthetic construct
  source 1..9: note = Seed: EIAWYTERS
EMAWYTERI

SEQ ID NO: 16178 - protein, 9 aa, synthetic construct
  source 1..9: note = Seed: EIAWYTERS
EMAWYTERV

SEQ ID NO: 16179 - protein, 10 aa, synthetic construct
  source 1..10: note = Seed: EHEIAWYTER
EMEIAWYTER

SEQ ID NO: 16180 - protein, 11 aa, synthetic construct
  source 1..11: note = Seed: EVFAQVKQIYK
EMFAQVKQIYR

SEQ ID NO: 16181 - protein, 9 aa, synthetic construct
  source 1..9: note = Seed: EAFEKMVSL
EMFEKMVSV

SEQ ID NO: 16182 - protein, 9 aa, synthetic construct
  source 1..9: note = Seed: EAFEKMVSL
EMFEKMVSY

SEQ ID NO: 16183 - protein, 9 aa, synthetic construct
  source 1..9: note = Seed: ELFENKTTL
EMFENKTTV

SEQ ID NO: 16184 - protein, 9 aa, synthetic construct
  source 1..9: note = Seed: EKFKEGVEF
EMFKEGVEF

SEQ ID NO: 16185 - protein, 9 aa, synthetic construct
  source 1..9: note = Seed: EKFKEGVEF
EMFKEGVEY

SEQ ID NO: 16186 - protein, 9 aa, synthetic construct
  source 1..9: note = Seed: ETFKLSYGI
EMFKLSYGI

SEQ ID NO: 16187 - protein, 9 aa, synthetic construct
  source 1..9: note = Seed: ETFKLSYGI
EMFKLSYGL

SEQ ID NO: 16188 - protein, 9 aa, synthetic construct
  source 1..9: note = Seed: ETFKLSYGI
EMFKLSYGV

SEQ ID NO: 16189 - protein, 11 aa, synthetic construct
  source 1..11: note = Seed: EWFLAYILFTR
EMFLAYILFTR

SEQ ID NO: 16190 - protein, 9 aa, synthetic construct
  source 1..9: note = Seed: EAFLIGCNY
EMFLIGCNK

SEQ ID NO: 16191 - protein, 9 aa, synthetic construct
  source 1..9: note = Seed: EAFLIGCNY
EMFLIGCNR

SEQ ID NO: 16192 - protein, 10 aa, synthetic construct
  source 1..10: note = Seed: EVFNATRFAS
EMFNATRFAI

SEQ ID NO: 16193 - protein, 10 aa, synthetic construct
  source 1..10: note = Seed: EVFNATRFAS
EMFNATRFAV

SEQ ID NO: 16194 - protein, 9 aa, synthetic construct
  source 1..9: note = Seed: EVFNATRFA
EMFNATRFV

SEQ ID NO: 16195 - protein, 9 aa, synthetic construct
  source 1..9: note = Seed: ETIQITISS
EMIQITISI

SEQ ID NO: 16196 - protein, 11 aa, synthetic construct
  source 1..11: note = Seed: ETIQITISSFK
EMIQITISSFR

SEQ ID NO: 16197 - protein, 10 aa, synthetic construct
  source 1..10: note = Seed: ETIQITISSF
EMIQITISSY

SEQ ID NO: 16198 - protein, 9 aa, synthetic construct
  source 1..9: note = Seed: ETIQITISS
EMIQITISV

SEQ ID NO: 16199 - protein, 9 aa, synthetic construct
  source 1..9: note = Seed: ETISLAGSY
EMISLAGSF

SEQ ID NO: 16200 - protein, 9 aa, synthetic construct
  source 1..9: note = Seed: ETISLAGSY
EMISLAGSR

SEQ ID NO: 16201 - protein, 9 aa, synthetic construct
  source 1..9: note = Seed: ETISLAGSY
EMISLAGSY

SEQ ID NO: 16202 - protein, 10 aa, synthetic construct
  source 1..10: note = Seed: ETISLAGSYK
EMISLAGSYK

SEQ ID NO: 16203 - protein, 10 aa, synthetic construct
  source 1..10: note = Seed: ETISLAGSYK
EMISLAGSYR

SEQ ID NO: 16204 - protein, 10 aa, synthetic construct
  source 1..10: note = Seed: ETKDVVECLK
EMKDVVECLR

SEQ ID NO: 16205 - protein, 10 aa, synthetic construct
  source 1..10: note = Seed: EVNSFSGYLK
EMNSFSGYLK

SEQ ID NO: 16206 - protein, 10 aa, synthetic construct
  source 1..10: note = Seed: EVNSFSGYLK
EMNSFSGYLR

SEQ ID NO: 16207 - protein, 9 aa, synthetic construct
  source 1..9: note = Seed: EVNSFSGYL
EMNSFSGYV

SEQ ID NO: 16208 - protein, 9 aa, synthetic construct
  source 1..9: note = Seed: EGNSPFHPL
EMNSPFHPI

SEQ ID NO: 16209 - protein, 9 aa, synthetic construct
  source 1..9: note = Seed: EGNSPFHPL
EMNSPFHPL

SEQ ID NO: 16210 - protein, 9 aa, synthetic construct
  source 1..9: note = Seed: EGNSPFHPL
EMNSPFHPV

SEQ ID NO: 16211 - protein, 9 aa, synthetic construct
  source 1..9: note = Seed: ESPFVMMSA
EMPFVMMSA

SEQ ID NO: 16212 - protein, 9 aa, synthetic construct
  source 1..9: note = Seed: ESPFVMMSA
EMPFVMMSI

SEQ ID NO: 16213 - protein, 9 aa, synthetic construct
  source 1..9: note = Seed: ESPFVMMSA
EMPFVMMSV

SEQ ID NO: 16214 - protein, 9 aa, synthetic construct
  source 1..9: note = Seed: EQPYVFIKR
EMPYVFIKK

SEQ ID NO: 16215 - protein, 9 aa, synthetic construct
  source 1..9: note = Seed: EQPYVFIKR
EMPYVFIKR

SEQ ID NO: 16216 - protein, 10 aa, synthetic construct
  source 1..10: note = Seed: EGSVAYESLR
EMSVAYESLK

SEQ ID NO: 16217 - protein, 10 aa, synthetic construct
  source 1..10: note = Seed: EGSVAYESLR
EMSVAYESLR

SEQ ID NO: 16218 - protein, 10 aa, synthetic construct
  source 1..10: note = Seed: EKSYELQTPF
EMSYELQTPF

SEQ ID NO: 16219 - protein, 10 aa, synthetic construct
  source 1..10: note = Seed: EKSYELQTPF
EMSYELQTPW

SEQ ID NO: 16220 - protein, 10 aa, synthetic construct
  source 1..10: note = Seed: EKSYELQTPF
EMSYELQTPY

SEQ ID NO: 16221 - protein, 9 aa, synthetic construct
  source 1..9: note = Seed: ENSYTTTIK
EMSYTTTIK

SEQ ID NO: 16222 - protein, 9 aa, synthetic construct
  source 1..9: note = Seed: ENSYTTTIK
EMSYTTTIR

SEQ ID NO: 16223 - protein, 10 aa, synthetic construct
  source 1..10: note = Seed: EETFKLSYGI
EMTFKLSYGA

SEQ ID NO: 16224 - protein, 10 aa, synthetic construct
  source 1..10: note = Seed: EETFKLSYGI
EMTFKLSYGI

SEQ ID NO: 16225 - protein, 10 aa, synthetic construct
  source 1..10: note = Seed: EETFKLSYGI
EMTFKLSYGL

SEQ ID NO: 16226 - protein, 10 aa, synthetic construct
  source 1..10: note = Seed: EETFKLSYGI
EMTFKLSYGV

SEQ ID NO: 16227 - protein, 9 aa, synthetic construct
  source 1..9: note = Seed: EFTPFDVVR
EMTPFDVVK

SEQ ID NO: 16228 - protein, 9 aa, synthetic construct
  source 1..9: note = Seed: EFTPFDVVR
EMTPFDVVR

SEQ ID NO: 16229 - protein, 9 aa, synthetic construct
  source 1..9: note = Seed: ELTSMKYFV
EMTSMKYFV

SEQ ID NO: 16230 - protein, 10 aa, synthetic construct
  source 1..10: note = Seed: ELTSMKYFVK
EMTSMKYFVK

SEQ ID NO: 16231 - protein, 10 aa, synthetic construct
  source 1..10: note = Seed: ELTSMKYFVK
EMTSMKYFVR

SEQ ID NO: 16232 - protein, 9 aa, synthetic construct
  source 1..9: note = Seed: ECTTIVNGV
EMTTIVNGI

SEQ ID NO: 16233 - protein, 9 aa, synthetic construct
  source 1..9: note = Seed: ECTTIVNGV
EMTTIVNGV

SEQ ID NO: 16234 - protein, 10 aa, synthetic construct
  source 1..10: note = Seed: ECTTIVNGVR
EMTTIVNGVK

SEQ ID NO: 16235 - protein, 10 aa, synthetic construct
  source 1..10: note = Seed: ECTTIVNGVR
EMTTIVNGVR

SEQ ID NO: 16236 - protein, 9 aa, synthetic construct
  source 1..9: note = Seed: ELVAELEGI
EMVAELEGV

SEQ ID NO: 16237 - protein, 9 aa, synthetic construct
  source 1..9: note = Seed: EVVGDIILK
EMVGDIILK

SEQ ID NO: 16238 - protein, 9 aa, synthetic construct
  source 1..9: note = Seed: EVVGDIILK
EMVGDIILR

SEQ ID NO: 16239 - protein, 9 aa, synthetic construct
  source 1..9: note = Seed: EAVGTNLPL
EMVGTNLPF

SEQ ID NO: 16240 - protein, 9 aa, synthetic construct
  source 1..9: note = Seed: EAVGTNLPL
EMVGTNLPM

SEQ ID NO: 16241 - protein, 9 aa, synthetic construct
  source 1..9: note = Seed: EAVGTNLPL
EMVGTNLPV

SEQ ID NO: 16242 - protein, 9 aa, synthetic construct
  source 1..9: note = Seed: EAVGTNLPL
EMVGTNLPY

SEQ ID NO: 16243 - protein, 10 aa, synthetic construct
  source 1..10: note = Seed: ELVIGAVILR
EMVIGAVILK

SEQ ID NO: 16244 - protein, 10 aa, synthetic construct
  source 1..10: note = Seed: ELVIGAVILR
EMVIGAVILR

SEQ ID NO: 16245 - protein, 9 aa, synthetic construct
  source 1..9: note = Seed: ETVKGLDYK
EMVKGLDYK

SEQ ID NO: 16246 - protein, 9 aa, synthetic construct
  source 1..9: note = Seed: ETVKGLDYK
EMVKGLDYR

SEQ ID NO: 16247 - protein, 9 aa, synthetic construct
  source 1..9: note = Seed: ECVLGQSKR
EMVLGQSKR

SEQ ID NO: 16248 - protein, 10 aa, synthetic construct
  source 1..10: note = Seed: EHVTFFIYNK
EMVTFFIYNK

SEQ ID NO: 16249 - protein, 10 aa, synthetic construct
  source 1..10: note = Seed: EHVTFFIYNK
EMVTFFIYNR

SEQ ID NO: 16250 - protein, 9 aa, synthetic construct
  source 1..9: note = Seed: ELWAKRNIK
EMWAKRNIR

SEQ ID NO: 16251 - protein, 10 aa, synthetic construct
  source 1..10: note = Seed: EEAALCTFLL
ENAALCTFLV

SEQ ID NO: 16252 - protein, 10 aa, synthetic construct
  source 1..10: note = Seed: ETAHSCNVNR
ENAHSCNVNR

SEQ ID NO: 16253 - protein, 9 aa, synthetic construct
  source 1..9: note = Seed: EAALCTFLL
ENALCTFLV

SEQ ID NO: 16254 - protein, 9 aa, synthetic construct
  source 1..9: note = Seed: EAFEKMVSL
ENFEKMVSV

SEQ ID NO: 16255 - protein, 9 aa, synthetic construct
  source 1..9: note = Seed: ETFKLSYGI
ENFKLSYGV

SEQ ID NO: 16256 - protein, 9 aa, synthetic construct
  source 1..9: note = Seed: ETIQITISS
ENIQITISV

SEQ ID NO: 16257 - protein, 10 aa, synthetic construct
  source 1..10: note = Seed: ETISLAGSYK
ENISLAGSYK

SEQ ID NO: 16258 - protein, 10 aa, synthetic construct
  source 1..10: note = Seed: ETISLAGSYK
ENISLAGSYR

SEQ ID NO: 16259 - protein, 9 aa, synthetic construct
  source 1..9: note = Seed: EGNSPFHPL
ENNSPFHPV

SEQ ID NO: 16260 - protein, 10 aa, synthetic construct
  source 1..10: note = Seed: EGSVAYESLR
ENSVAYESLK

SEQ ID NO: 16261 - protein, 10 aa, synthetic construct
  source 1..10: note = Seed: EGSVAYESLR
ENSVAYESLR

SEQ ID NO: 16262 - protein, 10 aa, synthetic construct
  source 1..10: note = Seed: EETFKLSYGI
ENTFKLSYGA

SEQ ID NO: 16263 - protein, 10 aa, synthetic construct
  source 1..10: note = Seed: EETFKLSYGI
ENTFKLSYGI

SEQ ID NO: 16264 - protein, 10 aa, synthetic construct
  source 1..10: note = Seed: EETFKLSYGI
ENTFKLSYGL

SEQ ID NO: 16265 - protein, 10 aa, synthetic construct
  source 1..10: note = Seed: EETFKLSYGI
ENTFKLSYGV

SEQ ID NO: 16266 - protein, 10 aa, synthetic construct
  source 1..10: note = Seed: ECTTIVNGVR
ENTTIVNGVR

SEQ ID NO: 16267 - protein, 10 aa, synthetic construct
  source 1..10: note = Seed: ELVIGAVILR
ENVIGAVILK

SEQ ID NO: 16268 - protein, 10 aa, synthetic construct
  source 1..10: note = Seed: ELVIGAVILR
ENVIGAVILR

SEQ ID NO: 16269 - protein, 10 aa, synthetic construct
  source 1..10: note = Seed: EHVTFFIYNK
ENVTFFIYNK

SEQ ID NO: 16270 - protein, 10 aa, synthetic construct
  source 1..10: note = Seed: EHVTFFIYNK
ENVTFFIYNR

SEQ ID NO: 16271 - protein, 10 aa, synthetic construct
  source 1..10: note = Seed: EEAALCTFLL
EPAALCTFLV

SEQ ID NO: 16272 - protein, 10 aa, synthetic construct
  source 1..10: note = Seed: ETAHSCNVNR
EPAHSCNVNR

SEQ ID NO: 16273 - protein, 9 aa, synthetic construct
  source 1..9: note = Seed: EAFEKMVSL
EPFEKMVSF

SEQ ID NO: 16274 - protein, 9 aa, synthetic construct
  source 1..9: note = Seed: EAFEKMVSL
EPFEKMVSL

SEQ ID NO: 16275 - protein, 9 aa, synthetic construct
  source 1..9: note = Seed: EAFEKMVSL
EPFEKMVSM

SEQ ID NO: 16276 - protein, 9 aa, synthetic construct
  source 1..9: note = Seed: EAFEKMVSL
EPFEKMVSY

SEQ ID NO: 16277 - protein, 9 aa, synthetic construct
  source 1..9: note = Seed: ETISLAGSY
EPISLAGSF

SEQ ID NO: 16278 - protein, 9 aa, synthetic construct
  source 1..9: note = Seed: ETISLAGSY
EPISLAGSY

SEQ ID NO: 16279 - protein, 10 aa, synthetic construct
  source 1..10: note = Seed: ETISLAGSYK
EPISLAGSYK

SEQ ID NO: 16280 - protein, 10 aa, synthetic construct
  source 1..10: note = Seed: ETISLAGSYK
EPISLAGSYR

SEQ ID NO: 16281 - protein, 9 aa, synthetic construct
  source 1..9: note = Seed: ECSNLLLQY
EPSNLLLQF

SEQ ID NO: 16282 - protein, 9 aa, synthetic construct
  source 1..9: note = Seed: ECSNLLLQY
EPSNLLLQM

SEQ ID NO: 16283 - protein, 9 aa, synthetic construct
  source 1..9: note = Seed: ECSNLLLQY
EPSNLLLQY

SEQ ID NO: 16284 - protein, 10 aa, synthetic construct
  source 1..10: note = Seed: EGSVAYESLR
EPSVAYESLK

SEQ ID NO: 16285 - protein, 10 aa, synthetic construct
  source 1..10: note = Seed: EGSVAYESLR
EPSVAYESLR

SEQ ID NO: 16286 - protein, 10 aa, synthetic construct
  source 1..10: note = Seed: EETFKLSYGI
EPTFKLSYGA

SEQ ID NO: 16287 - protein, 10 aa, synthetic construct
  source 1..10: note = Seed: EETFKLSYGI
EPTFKLSYGI

SEQ ID NO: 16288 - protein, 10 aa, synthetic construct
  source 1..10: note = Seed: EETFKLSYGI
EPTFKLSYGL

SEQ ID NO: 16289 - protein, 10 aa, synthetic construct
  source 1..10: note = Seed: EETFKLSYGI
EPTFKLSYGV

SEQ ID NO: 16290 - protein, 10 aa, synthetic construct
  source 1..10: note = Seed: ECTTIVNGVR
EPTTIVNGVR

SEQ ID NO: 16291 - protein, 9 aa, synthetic construct
  source 1..9: note = Seed: EAVGTNLPL
EPVGTNLPF

SEQ ID NO: 16292 - protein, 9 aa, synthetic construct
  source 1..9: note = Seed: EAVGTNLPL
EPVGTNLPI

SEQ ID NO: 16293 - protein, 9 aa, synthetic construct
  source 1..9: note = Seed: EAVGTNLPL
EPVGTNLPL

SEQ ID NO: 16294 - protein, 9 aa, synthetic construct
  source 1..9: note = Seed: EAVGTNLPL
EPVGTNLPM

SEQ ID NO: 16295 - protein, 9 aa, synthetic construct
  source 1..9: note = Seed: EAVGTNLPL
EPVGTNLPV

SEQ ID NO: 16296 - protein, 9 aa, synthetic construct
  source 1..9: note = Seed: EAVGTNLPL
EPVGTNLPY

SEQ ID NO: 16297 - protein, 10 aa, synthetic construct
  source 1..10: note = Seed: ELVIGAVILR
EPVIGAVILK

SEQ ID NO: 16298 - protein, 10 aa, synthetic construct
  source 1..10: note = Seed: ELVIGAVILR
EPVIGAVILR

SEQ ID NO: 16299 - protein, 10 aa, synthetic construct
  source 1..10: note = Seed: EHVTFFIYNK
EPVTFFIYNK

SEQ ID NO: 16300 - protein, 10 aa, synthetic construct
  source 1..10: note = Seed: EHVTFFIYNK
EPVTFFIYNR

SEQ ID NO: 16301 - protein, 10 aa, synthetic construct
  source 1..10: note = Seed: EEAALCTFLL
EQAALCTFLV

SEQ ID NO: 16302 - protein, 10 aa, synthetic construct
  source 1..10: note = Seed: ETAHSCNVNR
EQAHSCNVNR

SEQ ID NO: 16303 - protein, 9 aa, synthetic construct
  source 1..9: note = Seed: EIAIILASF
EQAIILASY

SEQ ID NO: 16304 - protein, 9 aa, synthetic construct
  source 1..9: note = Seed: EKFKEGVEF
EQFKEGVEF

SEQ ID NO: 16305 - protein, 9 aa, synthetic construct
  source 1..9: note = Seed: EKFKEGVEF
EQFKEGVEY

SEQ ID NO: 16306 - protein, 9 aa, synthetic construct
  source 1..9: note = Seed: ETISLAGSY
EQISLAGSF

SEQ ID NO: 16307 - protein, 9 aa, synthetic construct
  source 1..9: note = Seed: ETISLAGSY
EQISLAGSY

SEQ ID NO: 16308 - protein, 10 aa, synthetic construct
  source 1..10: note = Seed: ETISLAGSYK
EQISLAGSYK

SEQ ID NO: 16309 - protein, 10 aa, synthetic construct
  source 1..10: note = Seed: ETISLAGSYK
EQISLAGSYR

SEQ ID NO: 16310 - protein, 10 aa, synthetic construct
  source 1..10: note = Seed: EVNSFSGYLK
EQNSFSGYLR

SEQ ID NO: 16311 - protein, 10 aa, synthetic construct
  source 1..10: note = Seed: EGSVAYESLR
EQSVAYESLK

SEQ ID NO: 16312 - protein, 10 aa, synthetic construct
  source 1..10: note = Seed: EGSVAYESLR
EQSVAYESLR

SEQ ID NO: 16313 - protein, 10 aa, synthetic construct
  source 1..10: note = Seed: EETFKLSYGI
EQTFKLSYGA

SEQ ID NO: 16314 - protein, 10 aa, synthetic construct
  source 1..10: note = Seed: EETFKLSYGI
EQTFKLSYGI

SEQ ID NO: 16315 - protein, 10 aa, synthetic construct
  source 1..10: note = Seed: EETFKLSYGI
EQTFKLSYGL

SEQ ID NO: 16316 - protein, 10 aa, synthetic construct
  source 1..10: note = Seed: EETFKLSYGI
EQTFKLSYGV

SEQ ID NO: 16317 - protein, 10 aa, synthetic construct
  source 1..10: note = Seed: ELTSMKYFVK
EQTSMKYFVR

SEQ ID NO: 16318 - protein, 10 aa, synthetic construct
  source 1..10: note = Seed: ECTTIVNGVR
EQTTIVNGVR

SEQ ID NO: 16319 - protein, 10 aa, synthetic construct
  source 1..10: note = Seed: ELVIGAVILR
EQVIGAVILK

SEQ ID NO: 16320 - protein, 10 aa, synthetic construct
  source 1..10: note = Seed: ELVIGAVILR
EQVIGAVILR

SEQ ID NO: 16321 - protein, 10 aa, synthetic construct
  source 1..10: note = Seed: EHVTFFIYNK
EQVTFFIYNK

SEQ ID NO: 16322 - protein, 10 aa, synthetic construct
  source 1..10: note = Seed: EHVTFFIYNK
EQVTFFIYNR

SEQ ID NO: 16323 - protein, 10 aa, synthetic construct
  source 1..10: note = Seed: EEAALCTFLL
ERAALCTFLV

SEQ ID NO: 16324 - protein, 10 aa, synthetic construct
  source 1..10: note = Seed: ETAHSCNVNR
ERAHSCNVNR

SEQ ID NO: 16325 - protein, 9 aa, synthetic construct
  source 1..9: note = Seed: EAFEKMVSL
ERFEKMVSL

SEQ ID NO: 16326 - protein, 9 aa, synthetic construct
  source 1..9: note = Seed: EHFIETISL
ERFIETISA

SEQ ID NO: 16327 - protein, 11 aa, synthetic construct
  source 1..11: note = Seed: EWFLAYILFTR
ERFLAYILFTR

SEQ ID NO: 16328 - protein, 10 aa, synthetic construct
  source 1..10: note = Seed: ETISLAGSYK
ERISLAGSYK

SEQ ID NO: 16329 - protein, 10 aa, synthetic construct
  source 1..10: note = Seed: ETISLAGSYK
ERISLAGSYR

SEQ ID NO: 16330 - protein, 10 aa, synthetic construct
  source 1..10: note = Seed: EGSVAYESLR
ERSVAYESLK

SEQ ID NO: 16331 - protein, 10 aa, synthetic construct
  source 1..10: note = Seed: EGSVAYESLR
ERSVAYESLR

SEQ ID NO: 16332 - protein, 10 aa, synthetic construct
  source 1..10: note = Seed: EKSYELQTPF
ERSYELQTPF

SEQ ID NO: 16333 - protein, 10 aa, synthetic construct
  source 1..10: note = Seed: EKSYELQTPF
ERSYELQTPW

SEQ ID NO: 16334 - protein, 10 aa, synthetic construct
  source 1..10: note = Seed: EETFKLSYGI
ERTFKLSYGA

SEQ ID NO: 16335 - protein, 10 aa, synthetic construct
  source 1..10: note = Seed: EETFKLSYGI
ERTFKLSYGI

SEQ ID NO: 16336 - protein, 10 aa, synthetic construct
  source 1..10: note = Seed: EETFKLSYGI
ERTFKLSYGL

SEQ ID NO: 16337 - protein, 10 aa, synthetic construct
  source 1..10: note = Seed: EETFKLSYGI
ERTFKLSYGV

SEQ ID NO: 16338 - protein, 10 aa, synthetic construct
  source 1..10: note = Seed: ECTTIVNGVR
ERTTIVNGVR

SEQ ID NO: 16339 - protein, 10 aa, synthetic construct
  source 1..10: note = Seed: ELVIGAVILR
ERVIGAVILK

SEQ ID NO: 16340 - protein, 10 aa, synthetic construct
  source 1..10: note = Seed: ELVIGAVILR
ERVIGAVILR

SEQ ID NO: 16341 - protein, 10 aa, synthetic construct
  source 1..10: note = Seed: EHVTFFIYNK
ERVTFFIYNK

SEQ ID NO: 16342 - protein, 10 aa, synthetic construct
  source 1..10: note = Seed: EHVTFFIYNK
ERVTFFIYNR

SEQ ID NO: 16343 - protein, 10 aa, synthetic construct
  source 1..10: note = Seed: EEAALCTFLL
ESAALCTFLA

SEQ ID NO: 16344 - protein, 10 aa, synthetic construct
  source 1..10: note = Seed: EEAALCTFLL
ESAALCTFLI

SEQ ID NO: 16345 - protein, 10 aa, synthetic construct
  source 1..10: note = Seed: EEAALCTFLL
ESAALCTFLL

SEQ ID NO: 16346 - protein, 10 aa, synthetic construct
  source 1..10: note = Seed: EEAALCTFLL
ESAALCTFLV

SEQ ID NO: 16347 - protein, 10 aa, synthetic construct
  source 1..10: note = Seed: ETAHSCNVNR
ESAHSCNVNK

SEQ ID NO: 16348 - protein, 10 aa, synthetic construct
  source 1..10: note = Seed: ETAHSCNVNR
ESAHSCNVNR

SEQ ID NO: 16349 - protein, 9 aa, synthetic construct
  source 1..9: note = Seed: EIAIILASF
ESAIILASF

SEQ ID NO: 16350 - protein, 9 aa, synthetic construct
  source 1..9: note = Seed: EIAIILASF
ESAIILASM

SEQ ID NO: 16351 - protein, 9 aa, synthetic construct
  source 1..9: note = Seed: EIAIILASF
ESAIILASY

SEQ ID NO: 16352 - protein, 10 aa, synthetic construct
  source 1..10: note = Seed: EVAKNLNESL
ESAKNLNESV

SEQ ID NO: 16353 - protein, 9 aa, synthetic construct
  source 1..9: note = Seed: EAALCTFLL
ESALCTFLA

SEQ ID NO: 16354 - protein, 9 aa, synthetic construct
  source 1..9: note = Seed: EAALCTFLL
ESALCTFLI

SEQ ID NO: 16355 - protein, 9 aa, synthetic construct
  source 1..9: note = Seed: EAALCTFLL
ESALCTFLL

SEQ ID NO: 16356 - protein, 11 aa, synthetic construct
  source 1..11: note = Seed: EAALCTFLLNK
ESALCTFLLNR

SEQ ID NO: 16357 - protein, 9 aa, synthetic construct
  source 1..9: note = Seed: EAALCTFLL
ESALCTFLV

SEQ ID NO: 16358 - protein, 9 aa, synthetic construct
  source 1..9: note = Seed: ETAQNSVRV
ESAQNSVRV

SEQ ID NO: 16359 - protein, 9 aa, synthetic construct
  source 1..9: note = Seed: EIAWYTERS
ESAWYTERA

SEQ ID NO: 16360 - protein, 9 aa, synthetic construct
  source 1..9: note = Seed: EIAWYTERS
ESAWYTERI

SEQ ID NO: 16361 - protein, 9 aa, synthetic construct
  source 1..9: note = Seed: EIAWYTERS
ESAWYTERL

SEQ ID NO: 16362 - protein, 11 aa, synthetic construct
  source 1..11: note = Seed: EIAWYTERSEK
ESAWYTERSER

SEQ ID NO: 16363 - protein, 9 aa, synthetic construct
  source 1..9: note = Seed: EIAWYTERS
ESAWYTERV

SEQ ID NO: 16364 - protein, 9 aa, synthetic construct
  source 1..9: note = Seed: EIDPKLDNY
ESDPKLDNY

SEQ ID NO: 16365 - protein, 10 aa, synthetic construct
  source 1..10: note = Seed: EIDPKLDNYY
ESDPKLDNYY

SEQ ID NO: 16366 - protein, 11 aa, synthetic construct
  source 1..11: note = Seed: EVFAQVKQIYK
ESFAQVKQIYK

SEQ ID NO: 16367 - protein, 11 aa, synthetic construct
  source 1..11: note = Seed: EVFAQVKQIYK
ESFAQVKQIYR

SEQ ID NO: 16368 - protein, 9 aa, synthetic construct
  source 1..9: note = Seed: EVFAQVKQI
ESFAQVKQV

SEQ ID NO: 16369 - protein, 9 aa, synthetic construct
  source 1..9: note = Seed: EAFEKMVSL
ESFEKMVSA

SEQ ID NO: 16370 - protein, 9 aa, synthetic construct
  source 1..9: note = Seed: EAFEKMVSL
ESFEKMVSF

SEQ ID NO: 16371 - protein, 9 aa, synthetic construct
  source 1..9: note = Seed: EAFEKMVSL
ESFEKMVSI

SEQ ID NO: 16372 - protein, 9 aa, synthetic construct
  source 1..9: note = Seed: EAFEKMVSL
ESFEKMVSL

SEQ ID NO: 16373 - protein, 10 aa, synthetic construct
  source 1..10: note = Seed: EAFEKMVSLL
ESFEKMVSLI

SEQ ID NO: 16374 - protein, 10 aa, synthetic construct
  source 1..10: note = Seed: EAFEKMVSLL
ESFEKMVSLV

SEQ ID NO: 16375 - protein, 9 aa, synthetic construct
  source 1..9: note = Seed: EAFEKMVSL
ESFEKMVSM

SEQ ID NO: 16376 - protein, 9 aa, synthetic construct
  source 1..9: note = Seed: EAFEKMVSL
ESFEKMVSV

SEQ ID NO: 16377 - protein, 9 aa, synthetic construct
  source 1..9: note = Seed: EAFEKMVSL
ESFEKMVSY

SEQ ID NO: 16378 - protein, 11 aa, synthetic construct
  source 1..11: note = Seed: ELFENKTTLPV
ESFENKTTLPV

SEQ ID NO: 16379 - protein, 10 aa, synthetic construct
  source 1..10: note = Seed: ESFGGASCCL
ESFGGASCCV

SEQ ID NO: 16380 - protein, 9 aa, synthetic construct
  source 1..9: note = Seed: ETFKLSYGI
ESFKLSYGA

SEQ ID NO: 16381 - protein, 9 aa, synthetic construct
  source 1..9: note = Seed: ETFKLSYGI
ESFKLSYGI

SEQ ID NO: 16382 - protein, 10 aa, synthetic construct
  source 1..10: note = Seed: ETFKLSYGIA
ESFKLSYGII

SEQ ID NO: 16383 - protein, 10 aa, synthetic construct
  source 1..10: note = Seed: ETFKLSYGIA
ESFKLSYGIV

SEQ ID NO: 16384 - protein, 9 aa, synthetic construct
  source 1..9: note = Seed: ETFKLSYGI
ESFKLSYGL

SEQ ID NO: 16385 - protein, 9 aa, synthetic construct
  source 1..9: note = Seed: ETFKLSYGI
ESFKLSYGM

SEQ ID NO: 16386 - protein, 9 aa, synthetic construct
  source 1..9: note = Seed: ETFKLSYGI
ESFKLSYGT

SEQ ID NO: 16387 - protein, 9 aa, synthetic construct
  source 1..9: note = Seed: ETFKLSYGI
ESFKLSYGV

SEQ ID NO: 16388 - protein, 9 aa, synthetic construct
  source 1..9: note = Seed: ETFKLSYGI
ESFKLSYGY

SEQ ID NO: 16389 - protein, 11 aa, synthetic construct
  source 1..11: note = Seed: EWFLAYILFTR
ESFLAYILFTK

SEQ ID NO: 16390 - protein, 11 aa, synthetic construct
  source 1..11: note = Seed: EWFLAYILFTR
ESFLAYILFTR

SEQ ID NO: 16391 - protein, 9 aa, synthetic construct
  source 1..9: note = Seed: EAFLIGCNY
ESFLIGCNK

SEQ ID NO: 16392 - protein, 9 aa, synthetic construct
  source 1..9: note = Seed: EAFLIGCNY
ESFLIGCNR

SEQ ID NO: 16393 - protein, 10 aa, synthetic construct
  source 1..10: note = Seed: EAFLIGCNYL
ESFLIGCNYA

SEQ ID NO: 16394 - protein, 10 aa, synthetic construct
  source 1..10: note = Seed: EAFLIGCNYL
ESFLIGCNYI

SEQ ID NO: 16395 - protein, 10 aa, synthetic construct
  source 1..10: note = Seed: EAFLIGCNYL
ESFLIGCNYL

SEQ ID NO: 16396 - protein, 10 aa, synthetic construct
  source 1..10: note = Seed: EAFLIGCNYL
ESFLIGCNYV

SEQ ID NO: 16397 - protein, 9 aa, synthetic construct
  source 1..9: note = Seed: EVFNATRFA
ESFNATRFA

SEQ ID NO: 16398 - protein, 10 aa, synthetic construct
  source 1..10: note = Seed: EVFNATRFAS
ESFNATRFAA

SEQ ID NO: 16399 - protein, 10 aa, synthetic construct
  source 1..10: note = Seed: EVFNATRFAS
ESFNATRFAI

SEQ ID NO: 16400 - protein, 10 aa, synthetic construct
  source 1..10: note = Seed: EVFNATRFAS
ESFNATRFAL

SEQ ID NO: 16401 - protein, 11 aa, synthetic construct
  source 1..11: note = Seed: EVFNATRFASV
ESFNATRFASV

SEQ ID NO: 16402 - protein, 10 aa, synthetic construct
  source 1..10: note = Seed: EVFNATRFAS
ESFNATRFAV

SEQ ID NO: 16403 - protein, 9 aa, synthetic construct
  source 1..9: note = Seed: EVFNATRFA
ESFNATRFI

SEQ ID NO: 16404 - protein, 9 aa, synthetic construct
  source 1..9: note = Seed: EVFNATRFA
ESFNATRFV

SEQ ID NO: 16405 - protein, 10 aa, synthetic construct
  source 1..10: note = Seed: EEIAIILASF
ESIAIILASY

SEQ ID NO: 16406 - protein, 9 aa, synthetic construct
  source 1..9: note = Seed: ETIQITISS
ESIQITISA

SEQ ID NO: 16407 - protein, 9 aa, synthetic construct
  source 1..9: note = Seed: ETIQITISS
ESIQITISI

SEQ ID NO: 16408 - protein, 9 aa, synthetic construct
  source 1..9: note = Seed: ETIQITISS
ESIQITISL

SEQ ID NO: 16409 - protein, 11 aa, synthetic construct
  source 1..11: note = Seed: ETIQITISSFK
ESIQITISSFK

SEQ ID NO: 16410 - protein, 11 aa, synthetic construct
  source 1..11: note = Seed: ETIQITISSFK
ESIQITISSFR

SEQ ID NO: 16411 - protein, 10 aa, synthetic construct
  source 1..10: note = Seed: ETIQITISSF
ESIQITISSY

SEQ ID NO: 16412 - protein, 9 aa, synthetic construct
  source 1..9: note = Seed: ETIQITISS
ESIQITIST

SEQ ID NO: 16413 - protein, 9 aa, synthetic construct
  source 1..9: note = Seed: ETIQITISS
ESIQITISV

SEQ ID NO: 16414 - protein, 9 aa, synthetic construct
  source 1..9: note = Seed: ETISLAGSY
ESISLAGSF

SEQ ID NO: 16415 - protein, 9 aa, synthetic construct
  source 1..9: note = Seed: ETISLAGSY
ESISLAGSK

SEQ ID NO: 16416 - protein, 9 aa, synthetic construct
  source 1..9: note = Seed: ETISLAGSY
ESISLAGSM

SEQ ID NO: 16417 - protein, 9 aa, synthetic construct
  source 1..9: note = Seed: ETISLAGSY
ESISLAGSR

SEQ ID NO: 16418 - protein, 9 aa, synthetic construct
  source 1..9: note = Seed: ETISLAGSY
ESISLAGSY

SEQ ID NO: 16419 - protein, 10 aa, synthetic construct
  source 1..10: note = Seed: ETISLAGSYK
ESISLAGSYK

SEQ ID NO: 16420 - protein, 11 aa, synthetic construct
  source 1..11: note = Seed: ETISLAGSYKD
ESISLAGSYKR

SEQ ID NO: 16421 - protein, 10 aa, synthetic construct
  source 1..10: note = Seed: ETISLAGSYK
ESISLAGSYR

SEQ ID NO: 16422 - protein, 10 aa, synthetic construct
  source 1..10: note = Seed: ETISLAGSYK
ESISLAGSYY

SEQ ID NO: 16423 - protein, 10 aa, synthetic construct
  source 1..10: note = Seed: ETKDVVECLK
ESKDVVECLK

SEQ ID NO: 16424 - protein, 10 aa, synthetic construct
  source 1..10: note = Seed: ETKDVVECLK
ESKDVVECLR

SEQ ID NO: 16425 - protein, 10 aa, synthetic construct
  source 1..10: note = Seed: EMLAHAEETR
ESLAHAEETR

SEQ ID NO: 16426 - protein, 10 aa, synthetic construct
  source 1..10: note = Seed: EPLVDLPIGI
ESLVDLPIGV

SEQ ID NO: 16427 - protein, 10 aa, synthetic construct
  source 1..10: note = Seed: ETLYCIDGAL
ESLYCIDGAV

SEQ ID NO: 16428 - protein, 9 aa, synthetic construct
  source 1..9: note = Seed: ETLYCIDGA
ESLYCIDGV

SEQ ID NO: 16429 - protein, 9 aa, synthetic construct
  source 1..9: note = Seed: EVNEFACVV
ESNEFACVV

SEQ ID NO: 16430 - protein, 10 aa, synthetic construct
  source 1..10: note = Seed: ETNILLNVPL
ESNILLNVPV

SEQ ID NO: 16431 - protein, 9 aa, synthetic construct
  source 1..9: note = Seed: EVNSFSGYL
ESNSFSGYA

SEQ ID NO: 16432 - protein, 9 aa, synthetic construct
  source 1..9: note = Seed: EVNSFSGYL
ESNSFSGYI

SEQ ID NO: 16433 - protein, 9 aa, synthetic construct
  source 1..9: note = Seed: EVNSFSGYL
ESNSFSGYL

SEQ ID NO: 16434 - protein, 10 aa, synthetic construct
  source 1..10: note = Seed: EVNSFSGYLK
ESNSFSGYLK

SEQ ID NO: 16435 - protein, 10 aa, synthetic construct
  source 1..10: note = Seed: EVNSFSGYLK
ESNSFSGYLR

SEQ ID NO: 16436 - protein, 9 aa, synthetic construct
  source 1..9: note = Seed: EVNSFSGYL
ESNSFSGYV

SEQ ID NO: 16437 - protein, 9 aa, synthetic construct
  source 1..9: note = Seed: EVNSFSGYL
ESNSFSGYY

SEQ ID NO: 16438 - protein, 9 aa, synthetic construct
  source 1..9: note = Seed: EGNSPFHPL
ESNSPFHPA

SEQ ID NO: 16439 - protein, 9 aa, synthetic construct
  source 1..9: note = Seed: EGNSPFHPL
ESNSPFHPI

SEQ ID NO: 16440 - protein, 9 aa, synthetic construct
  source 1..9: note = Seed: EGNSPFHPL
ESNSPFHPL

SEQ ID NO: 16441 - protein, 9 aa, synthetic construct
  source 1..9: note = Seed: EGNSPFHPL
ESNSPFHPM

SEQ ID NO: 16442 - protein, 9 aa, synthetic construct
  source 1..9: note = Seed: EGNSPFHPL
ESNSPFHPV

SEQ ID NO: 16443 - protein, 9 aa, synthetic construct
  source 1..9: note = Seed: ESPFVMMSA
ESPFVMMSI

SEQ ID NO: 16444 - protein, 9 aa, synthetic construct
  source 1..9: note = Seed: ESPFVMMSA
ESPFVMMSV

SEQ ID NO: 16445 - protein, 9 aa, synthetic construct
  source 1..9: note = Seed: EQPYVFIKR
ESPYVFIKK

SEQ ID NO: 16446 - protein, 9 aa, synthetic construct
  source 1..9: note = Seed: EQPYVFIKR
ESPYVFIKR

SEQ ID NO: 16447 - protein, 9 aa, synthetic construct
  source 1..9: note = Seed: ELQTPFEIK
ESQTPFEIR

SEQ ID NO: 16448 - protein, 10 aa, synthetic construct
  source 1..10: note = Seed: EGSVAYESLR
ESSVAYESLK

SEQ ID NO: 16449 - protein, 10 aa, synthetic construct
  source 1..10: note = Seed: EGSVAYESLR
ESSVAYESLR

SEQ ID NO: 16450 - protein, 10 aa, synthetic construct
  source 1..10: note = Seed: EKSYELQTPF
ESSYELQTPW

SEQ ID NO: 16451 - protein, 9 aa, synthetic construct
  source 1..9: note = Seed: ENSYTTTIK
ESSYTTTIK

SEQ ID NO: 16452 - protein, 9 aa, synthetic construct
  source 1..9: note = Seed: ENSYTTTIK
ESSYTTTIR

SEQ ID NO: 16453 - protein, 10 aa, synthetic construct
  source 1..10: note = Seed: EETFKLSYGI
ESTFKLSYGA

SEQ ID NO: 16454 - protein, 10 aa, synthetic construct
  source 1..10: note = Seed: EETFKLSYGI
ESTFKLSYGI

SEQ ID NO: 16455 - protein, 10 aa, synthetic construct
  source 1..10: note = Seed: EETFKLSYGI
ESTFKLSYGL

SEQ ID NO: 16456 - protein, 10 aa, synthetic construct
  source 1..10: note = Seed: EETFKLSYGI
ESTFKLSYGV

SEQ ID NO: 16457 - protein, 9 aa, synthetic construct
  source 1..9: note = Seed: EFTPFDVVR
ESTPFDVVK

SEQ ID NO: 16458 - protein, 9 aa, synthetic construct
  source 1..9: note = Seed: EFTPFDVVR
ESTPFDVVR

SEQ ID NO: 16459 - protein, 9 aa, synthetic construct
  source 1..9: note = Seed: ELTSMKYFV
ESTSMKYFI

SEQ ID NO: 16460 - protein, 9 aa, synthetic construct
  source 1..9: note = Seed: ELTSMKYFV
ESTSMKYFV

SEQ ID NO: 16461 - protein, 10 aa, synthetic construct
  source 1..10: note = Seed: ELTSMKYFVK
ESTSMKYFVK

SEQ ID NO: 16462 - protein, 10 aa, synthetic construct
  source 1..10: note = Seed: ELTSMKYFVK
ESTSMKYFVR

SEQ ID NO: 16463 - protein, 9 aa, synthetic construct
  source 1..9: note = Seed: ECTTIVNGV
ESTTIVNGA

SEQ ID NO: 16464 - protein, 9 aa, synthetic construct
  source 1..9: note = Seed: ECTTIVNGV
ESTTIVNGI

SEQ ID NO: 16465 - protein, 9 aa, synthetic construct
  source 1..9: note = Seed: ECTTIVNGV
ESTTIVNGL

SEQ ID NO: 16466 - protein, 9 aa, synthetic construct
  source 1..9: note = Seed: ECTTIVNGV
ESTTIVNGV

SEQ ID NO: 16467 - protein, 10 aa, synthetic construct
  source 1..10: note = Seed: ECTTIVNGVR
ESTTIVNGVK

SEQ ID NO: 16468 - protein, 10 aa, synthetic construct
  source 1..10: note = Seed: ECTTIVNGVR
ESTTIVNGVR

SEQ ID NO: 16469 - protein, 9 aa, synthetic construct
  source 1..9: note = Seed: ELVAELEGI
ESVAELEGI

SEQ ID NO: 16470 - protein, 9 aa, synthetic construct
  source 1..9: note = Seed: ELVAELEGI
ESVAELEGV

SEQ ID NO: 16471 - protein, 9 aa, synthetic construct
  source 1..9: note = Seed: EVVGDIILK
ESVGDIILK

SEQ ID NO: 16472 - protein, 9 aa, synthetic construct
  source 1..9: note = Seed: EVVGDIILK
ESVGDIILR

SEQ ID NO: 16473 - protein, 9 aa, synthetic construct
  source 1..9: note = Seed: EAVGTNLPL
ESVGTNLPA

SEQ ID NO: 16474 - protein, 9 aa, synthetic construct
  source 1..9: note = Seed: EAVGTNLPL
ESVGTNLPF

SEQ ID NO: 16475 - protein, 9 aa, synthetic construct
  source 1..9: note = Seed: EAVGTNLPL
ESVGTNLPI

SEQ ID NO: 16476 - protein, 9 aa, synthetic construct
  source 1..9: note = Seed: EAVGTNLPL
ESVGTNLPL

SEQ ID NO: 16477 - protein, 9 aa, synthetic construct
  source 1..9: note = Seed: EAVGTNLPL
ESVGTNLPM

SEQ ID NO: 16478 - protein, 9 aa, synthetic construct
  source 1..9: note = Seed: EAVGTNLPL
ESVGTNLPV

SEQ ID NO: 16479 - protein, 9 aa, synthetic construct
  source 1..9: note = Seed: EAVGTNLPL
ESVGTNLPY

SEQ ID NO: 16480 - protein, 10 aa, synthetic construct
  source 1..10: note = Seed: ELVIGAVILR
ESVIGAVILK

SEQ ID NO: 16481 - protein, 10 aa, synthetic construct
  source 1..10: note = Seed: ELVIGAVILR
ESVIGAVILR

SEQ ID NO: 16482 - protein, 9 aa, synthetic construct
  source 1..9: note = Seed: ETVKGLDYK
ESVKGLDYK

SEQ ID NO: 16483 - protein, 9 aa, synthetic construct
  source 1..9: note = Seed: ETVKGLDYK
ESVKGLDYR

SEQ ID NO: 16484 - protein, 9 aa, synthetic construct
  source 1..9: note = Seed: ECVLGQSKR
ESVLGQSKK

SEQ ID NO: 16485 - protein, 9 aa, synthetic construct
  source 1..9: note = Seed: ECVLGQSKR
ESVLGQSKR

SEQ ID NO: 16486 - protein, 10 aa, synthetic construct
  source 1..10: note = Seed: EHVTFFIYNK
ESVTFFIYNK

SEQ ID NO: 16487 - protein, 10 aa, synthetic construct
  source 1..10: note = Seed: EHVTFFIYNK
ESVTFFIYNR

SEQ ID NO: 16488 - protein, 9 aa, synthetic construct
  source 1..9: note = Seed: ELWAKRNIK
ESWAKRNIR

SEQ ID NO: 16489 - protein, 10 aa, synthetic construct
  source 1..10: note = Seed: EEAALCTFLL
ETAALCTFLA

SEQ ID NO: 16490 - protein, 10 aa, synthetic construct
  source 1..10: note = Seed: EEAALCTFLL
ETAALCTFLI

SEQ ID NO: 16491 - protein, 10 aa, synthetic construct
  source 1..10: note = Seed: EEAALCTFLL
ETAALCTFLL

SEQ ID NO: 16492 - protein, 10 aa, synthetic construct
  source 1..10: note = Seed: EEAALCTFLL
ETAALCTFLM

SEQ ID NO: 16493 - protein, 10 aa, synthetic construct
  source 1..10: note = Seed: EEAALCTFLL
ETAALCTFLT

SEQ ID NO: 16494 - protein, 10 aa, synthetic construct
  source 1..10: note = Seed: EEAALCTFLL
ETAALCTFLV

SEQ ID NO: 16495 - protein, 10 aa, synthetic construct
  source 1..10: note = Seed: ETAHSCNVNR
ETAHSCNVNK

SEQ ID NO: 16496 - protein, 11 aa, synthetic construct
  source 1..11: note = Seed: ETAHSCNVNRF
ETAHSCNVNRR

SEQ ID NO: 16497 - protein, 9 aa, synthetic construct
  source 1..9: note = Seed: EIAIILASF
ETAIILASF

SEQ ID NO: 16498 - protein, 9 aa, synthetic construct
  source 1..9: note = Seed: EIAIILASF
ETAIILASK

SEQ ID NO: 16499 - protein, 9 aa, synthetic construct
  source 1..9: note = Seed: EIAIILASF
ETAIILASL

SEQ ID NO: 16500 - protein, 9 aa, synthetic construct
  source 1..9: note = Seed: EIAIILASF
ETAIILASM

SEQ ID NO: 16501 - protein, 9 aa, synthetic construct
  source 1..9: note = Seed: EIAIILASF
ETAIILASR

SEQ ID NO: 16502 - protein, 9 aa, synthetic construct
  source 1..9: note = Seed: EIAIILASF
ETAIILASY

SEQ ID NO: 16503 - protein, 10 aa, synthetic construct
  source 1..10: note = Seed: EVAKNLNESL
ETAKNLNESI

SEQ ID NO: 16504 - protein, 10 aa, synthetic construct
  source 1..10: note = Seed: EVAKNLNESL
ETAKNLNESL

SEQ ID NO: 16505 - protein, 10 aa, synthetic construct
  source 1..10: note = Seed: EVAKNLNESL
ETAKNLNESV

SEQ ID NO: 16506 - protein, 9 aa, synthetic construct
  source 1..9: note = Seed: EAALCTFLL
ETALCTFLA

SEQ ID NO: 16507 - protein, 9 aa, synthetic construct
  source 1..9: note = Seed: EAALCTFLL
ETALCTFLI

SEQ ID NO: 16508 - protein, 9 aa, synthetic construct
  source 1..9: note = Seed: EAALCTFLL
ETALCTFLL

SEQ ID NO: 16509 - protein, 11 aa, synthetic construct
  source 1..11: note = Seed: EAALCTFLLNK
ETALCTFLLNR

SEQ ID NO: 16510 - protein, 9 aa, synthetic construct
  source 1..9: note = Seed: EAALCTFLL
ETALCTFLM

SEQ ID NO: 16511 - protein, 9 aa, synthetic construct
  source 1..9: note = Seed: EAALCTFLL
ETALCTFLT

SEQ ID NO: 16512 - protein, 9 aa, synthetic construct
  source 1..9: note = Seed: EAALCTFLL
ETALCTFLV

SEQ ID NO: 16513 - protein, 9 aa, synthetic construct
  source 1..9: note = Seed: ETAQNSVRV
ETAQNSVRA

SEQ ID NO: 16514 - protein, 9 aa, synthetic construct
  source 1..9: note = Seed: ETAQNSVRV
ETAQNSVRI

SEQ ID NO: 16515 - protein, 9 aa, synthetic construct
  source 1..9: note = Seed: ETAQNSVRV
ETAQNSVRL

SEQ ID NO: 16516 - protein, 10 aa, synthetic construct
  source 1..10: note = Seed: ETAQNSVRVL
ETAQNSVRVV

SEQ ID NO: 16517 - protein, 11 aa, synthetic construct
  source 1..11: note = Seed: EVARDLSLQFK
ETARDLSLQFK

SEQ ID NO: 16518 - protein, 11 aa, synthetic construct
  source 1..11: note = Seed: EVARDLSLQFK
ETARDLSLQFR

SEQ ID NO: 16519 - protein, 10 aa, synthetic construct
  source 1..10: note = Seed: EVARDLSLQF
ETARDLSLQY

SEQ ID NO: 16520 - protein, 9 aa, synthetic construct
  source 1..9: note = Seed: EIAWYTERS
ETAWYTERA

SEQ ID NO: 16521 - protein, 9 aa, synthetic construct
  source 1..9: note = Seed: EIAWYTERS
ETAWYTERI

SEQ ID NO: 16522 - protein, 9 aa, synthetic construct
  source 1..9: note = Seed: EIAWYTERS
ETAWYTERL

SEQ ID NO: 16523 - protein, 9 aa, synthetic construct
  source 1..9: note = Seed: EIAWYTERS
ETAWYTERM

SEQ ID NO: 16524 - protein, 11 aa, synthetic construct
  source 1..11: note = Seed: EIAWYTERSEK
ETAWYTERSEK

SEQ ID NO: 16525 - protein, 11 aa, synthetic construct
  source 1..11: note = Seed: EIAWYTERSEK
ETAWYTERSER

SEQ ID NO: 16526 - protein, 9 aa, synthetic construct
  source 1..9: note = Seed: EIAWYTERS
ETAWYTERT

SEQ ID NO: 16527 - protein, 9 aa, synthetic construct
  source 1..9: note = Seed: EIAWYTERS
ETAWYTERV

SEQ ID NO: 16528 - protein, 9 aa, synthetic construct
  source 1..9: note = Seed: EIDPKLDNY
ETDPKLDNY

SEQ ID NO: 16529 - protein, 10 aa, synthetic construct
  source 1..10: note = Seed: EIDPKLDNYY
ETDPKLDNYY

SEQ ID NO: 16530 - protein, 9 aa, synthetic construct
  source 1..9: note = Seed: ESELVIGAV
ETELVIGAV

SEQ ID NO: 16531 - protein, 9 aa, synthetic construct
  source 1..9: note = Seed: EVFAQVKQI
ETFAQVKQI

SEQ ID NO: 16532 - protein, 11 aa, synthetic construct
  source 1..11: note = Seed: EVFAQVKQIYK
ETFAQVKQIYK

SEQ ID NO: 16533 - protein, 11 aa, synthetic construct
  source 1..11: note = Seed: EVFAQVKQIYK
ETFAQVKQIYR

SEQ ID NO: 16534 - protein, 9 aa, synthetic construct
  source 1..9: note = Seed: EVFAQVKQI
ETFAQVKQV

SEQ ID NO: 16535 - protein, 9 aa, synthetic construct
  source 1..9: note = Seed: EAFEKMVSL
ETFEKMVSA

SEQ ID NO: 16536 - protein, 9 aa, synthetic construct
  source 1..9: note = Seed: EAFEKMVSL
ETFEKMVSC

SEQ ID NO: 16537 - protein, 9 aa, synthetic construct
  source 1..9: note = Seed: EAFEKMVSL
ETFEKMVSF

SEQ ID NO: 16538 - protein, 9 aa, synthetic construct
  source 1..9: note = Seed: EAFEKMVSL
ETFEKMVSI

SEQ ID NO: 16539 - protein, 9 aa, synthetic construct
  source 1..9: note = Seed: EAFEKMVSL
ETFEKMVSK

SEQ ID NO: 16540 - protein, 9 aa, synthetic construct
  source 1..9: note = Seed: EAFEKMVSL
ETFEKMVSL

SEQ ID NO: 16541 - protein, 10 aa, synthetic construct
  source 1..10: note = Seed: EAFEKMVSLL
ETFEKMVSLA

SEQ ID NO: 16542 - protein, 10 aa, synthetic construct
  source 1..10: note = Seed: EAFEKMVSLL
ETFEKMVSLI

SEQ ID NO: 16543 - protein, 10 aa, synthetic construct
  source 1..10: note = Seed: EAFEKMVSLL
ETFEKMVSLL

SEQ ID NO: 16544 - protein, 10 aa, synthetic construct
  source 1..10: note = Seed: EAFEKMVSLL
ETFEKMVSLT

SEQ ID NO: 16545 - protein, 10 aa, synthetic construct
  source 1..10: note = Seed: EAFEKMVSLL
ETFEKMVSLV

SEQ ID NO: 16546 - protein, 9 aa, synthetic construct
  source 1..9: note = Seed: EAFEKMVSL
ETFEKMVSM

SEQ ID NO: 16547 - protein, 9 aa, synthetic construct
  source 1..9: note = Seed: EAFEKMVSL
ETFEKMVSR

SEQ ID NO: 16548 - protein, 9 aa, synthetic construct
  source 1..9: note = Seed: EAFEKMVSL
ETFEKMVSS

SEQ ID NO: 16549 - protein, 9 aa, synthetic construct
  source 1..9: note = Seed: EAFEKMVSL
ETFEKMVST

SEQ ID NO: 16550 - protein, 9 aa, synthetic construct
  source 1..9: note = Seed: EAFEKMVSL
ETFEKMVSV

SEQ ID NO: 16551 - protein, 9 aa, synthetic construct
  source 1..9: note = Seed: EAFEKMVSL
ETFEKMVSW

SEQ ID NO: 16552 - protein, 9 aa, synthetic construct
  source 1..9: note = Seed: EAFEKMVSL
ETFEKMVSY

SEQ ID NO: 16553 - protein, 11 aa, synthetic construct
  source 1..11: note = Seed: ELFENKTTLPV
ETFENKTTLPI

SEQ ID NO: 16554 - protein, 11 aa, synthetic construct
  source 1..11: note = Seed: ELFENKTTLPV
ETFENKTTLPV

SEQ ID NO: 16555 - protein, 10 aa, synthetic construct
  source 1..10: note = Seed: ESFGGASCCL
ETFGGASCCI

SEQ ID NO: 16556 - protein, 10 aa, synthetic construct
  source 1..10: note = Seed: ESFGGASCCL
ETFGGASCCL

SEQ ID NO: 16557 - protein, 11 aa, synthetic construct
  source 1..11: note = Seed: ESFGGASCCLY
ETFGGASCCLY

SEQ ID NO: 16558 - protein, 10 aa, synthetic construct
  source 1..10: note = Seed: ESFGGASCCL
ETFGGASCCV

SEQ ID NO: 16559 - protein, 9 aa, synthetic construct
  source 1..9: note = Seed: ETFKLSYGI
ETFKLSYGA

SEQ ID NO: 16560 - protein, 9 aa, synthetic construct
  source 1..9: note = Seed: ETFKLSYGI
ETFKLSYGF

SEQ ID NO: 16561 - protein, 10 aa, synthetic construct
  source 1..10: note = Seed: ETFKLSYGIA
ETFKLSYGII

SEQ ID NO: 16562 - protein, 10 aa, synthetic construct
  source 1..10: note = Seed: ETFKLSYGIA
ETFKLSYGIL

SEQ ID NO: 16563 - protein, 10 aa, synthetic construct
  source 1..10: note = Seed: ETFKLSYGIA
ETFKLSYGIM

SEQ ID NO: 16564 - protein, 10 aa, synthetic construct
  source 1..10: note = Seed: ETFKLSYGIA
ETFKLSYGIV

SEQ ID NO: 16565 - protein, 9 aa, synthetic construct
  source 1..9: note = Seed: ETFKLSYGI
ETFKLSYGL

SEQ ID NO: 16566 - protein, 9 aa, synthetic construct
  source 1..9: note = Seed: ETFKLSYGI
ETFKLSYGM

SEQ ID NO: 16567 - protein, 9 aa, synthetic construct
  source 1..9: note = Seed: ETFKLSYGI
ETFKLSYGS

SEQ ID NO: 16568 - protein, 9 aa, synthetic construct
  source 1..9: note = Seed: ETFKLSYGI
ETFKLSYGT

SEQ ID NO: 16569 - protein, 9 aa, synthetic construct
  source 1..9: note = Seed: ETFKLSYGI
ETFKLSYGV

SEQ ID NO: 16570 - protein, 9 aa, synthetic construct
  source 1..9: note = Seed: ETFKLSYGI
ETFKLSYGY

SEQ ID NO: 16571 - protein, 11 aa, synthetic construct
  source 1..11: note = Seed: EWFLAYILFTR
ETFLAYILFTK

SEQ ID NO: 16572 - protein, 11 aa, synthetic construct
  source 1..11: note = Seed: EWFLAYILFTR
ETFLAYILFTR

SEQ ID NO: 16573 - protein, 9 aa, synthetic construct
  source 1..9: note = Seed: EAFLIGCNY
ETFLIGCNK

SEQ ID NO: 16574 - protein, 9 aa, synthetic construct
  source 1..9: note = Seed: EAFLIGCNY
ETFLIGCNR

SEQ ID NO: 16575 - protein, 9 aa, synthetic construct
  source 1..9: note = Seed: EAFLIGCNY
ETFLIGCNY

SEQ ID NO: 16576 - protein, 10 aa, synthetic construct
  source 1..10: note = Seed: EAFLIGCNYL
ETFLIGCNYA

SEQ ID NO: 16577 - protein, 10 aa, synthetic construct
  source 1..10: note = Seed: EAFLIGCNYL
ETFLIGCNYI

SEQ ID NO: 16578 - protein, 10 aa, synthetic construct
  source 1..10: note = Seed: EAFLIGCNYL
ETFLIGCNYL

SEQ ID NO: 16579 - protein, 10 aa, synthetic construct
  source 1..10: note = Seed: EAFLIGCNYL
ETFLIGCNYT

SEQ ID NO: 16580 - protein, 10 aa, synthetic construct
  source 1..10: note = Seed: EAFLIGCNYL
ETFLIGCNYV

SEQ ID NO: 16581 - protein, 9 aa, synthetic construct
  source 1..9: note = Seed: EVFNATRFA
ETFNATRFA

SEQ ID NO: 16582 - protein, 10 aa, synthetic construct
  source 1..10: note = Seed: EVFNATRFAS
ETFNATRFAA

SEQ ID NO: 16583 - protein, 10 aa, synthetic construct
  source 1..10: note = Seed: EVFNATRFAS
ETFNATRFAI

SEQ ID NO: 16584 - protein, 10 aa, synthetic construct
  source 1..10: note = Seed: EVFNATRFAS
ETFNATRFAL

SEQ ID NO: 16585 - protein, 10 aa, synthetic construct
  source 1..10: note = Seed: EVFNATRFAS
ETFNATRFAM

SEQ ID NO: 16586 - protein, 11 aa, synthetic construct
  source 1..11: note = Seed: EVFNATRFASV
ETFNATRFASA

SEQ ID NO: 16587 - protein, 11 aa, synthetic construct
  source 1..11: note = Seed: EVFNATRFASV
ETFNATRFASI

SEQ ID NO: 16588 - protein, 11 aa, synthetic construct
  source 1..11: note = Seed: EVFNATRFASV
ETFNATRFASL

SEQ ID NO: 16589 - protein, 11 aa, synthetic construct
  source 1..11: note = Seed: EVFNATRFASV
ETFNATRFASV

SEQ ID NO: 16590 - protein, 10 aa, synthetic construct
  source 1..10: note = Seed: EVFNATRFAS
ETFNATRFAT

SEQ ID NO: 16591 - protein, 10 aa, synthetic construct
  source 1..10: note = Seed: EVFNATRFAS
ETFNATRFAV

SEQ ID NO: 16592 - protein, 9 aa, synthetic construct
  source 1..9: note = Seed: EVFNATRFA
ETFNATRFI

SEQ ID NO: 16593 - protein, 9 aa, synthetic construct
  source 1..9: note = Seed: EVFNATRFA
ETFNATRFK

SEQ ID NO: 16594 - protein, 9 aa, synthetic construct
  source 1..9: note = Seed: EVFNATRFA
ETFNATRFL

SEQ ID NO: 16595 - protein, 9 aa, synthetic construct
  source 1..9: note = Seed: EVFNATRFA
ETFNATRFM

SEQ ID NO: 16596 - protein, 9 aa, synthetic construct
  source 1..9: note = Seed: EVFNATRFA
ETFNATRFR

SEQ ID NO: 16597 - protein, 9 aa, synthetic construct
  source 1..9: note = Seed: EVFNATRFA
ETFNATRFT

SEQ ID NO: 16598 - protein, 9 aa, synthetic construct
  source 1..9: note = Seed: EVFNATRFA
ETFNATRFV

SEQ ID NO: 16599 - protein, 9 aa, synthetic construct
  source 1..9: note = Seed: EVFNATRFA
ETFNATRFY

SEQ ID NO: 16600 - protein, 10 aa, synthetic construct
  source 1..10: note = Seed: EEIAIILASF
ETIAIILASF

SEQ ID NO: 16601 - protein, 10 aa, synthetic construct
  source 1..10: note = Seed: EEIAIILASF
ETIAIILASM

SEQ ID NO: 16602 - protein, 10 aa, synthetic construct
  source 1..10: note = Seed: EEIAIILASF
ETIAIILASY

SEQ ID NO: 16603 - protein, 10 aa, synthetic construct
  source 1..10: note = Seed: EIIKSQDLSV
ETIKSQDLSV

SEQ ID NO: 16604 - protein, 9 aa, synthetic construct
  source 1..9: note = Seed: ETIQITISS
ETIQITISA

SEQ ID NO: 16605 - protein, 9 aa, synthetic construct
  source 1..9: note = Seed: ETIQITISS
ETIQITISI

SEQ ID NO: 16606 - protein, 9 aa, synthetic construct
  source 1..9: note = Seed: ETIQITISS
ETIQITISK

SEQ ID NO: 16607 - protein, 9 aa, synthetic construct
  source 1..9: note = Seed: ETIQITISS
ETIQITISL

SEQ ID NO: 16608 - protein, 9 aa, synthetic construct
  source 1..9: note = Seed: ETIQITISS
ETIQITISM

SEQ ID NO: 16609 - protein, 9 aa, synthetic construct
  source 1..9: note = Seed: ETIQITISS
ETIQITISR

SEQ ID NO: 16610 - protein, 11 aa, synthetic construct
  source 1..11: note = Seed: ETIQITISSFK
ETIQITISSFR

SEQ ID NO: 16611 - protein, 10 aa, synthetic construct
  source 1..10: note = Seed: ETIQITISSF
ETIQITISSK

SEQ ID NO: 16612 - protein, 10 aa, synthetic construct
  source 1..10: note = Seed: ETIQITISSF
ETIQITISSM

SEQ ID NO: 16613 - protein, 10 aa, synthetic construct
  source 1..10: note = Seed: ETIQITISSF
ETIQITISSR

SEQ ID NO: 16614 - protein, 10 aa, synthetic construct
  source 1..10: note = Seed: ETIQITISSF
ETIQITISSW

SEQ ID NO: 16615 - protein, 10 aa, synthetic construct
  source 1..10: note = Seed: ETIQITISSF
ETIQITISSY

SEQ ID NO: 16616 - protein, 9 aa, synthetic construct
  source 1..9: note = Seed: ETIQITISS
ETIQITIST

SEQ ID NO: 16617 - protein, 9 aa, synthetic construct
  source 1..9: note = Seed: ETIQITISS
ETIQITISV

SEQ ID NO: 16618 - protein, 9 aa, synthetic construct
  source 1..9: note = Seed: ETIQITISS
ETIQITISY

SEQ ID NO: 16619 - protein, 9 aa, synthetic construct
  source 1..9: note = Seed: ETISLAGSY
ETISLAGSF

SEQ ID NO: 16620 - protein, 9 aa, synthetic construct
  source 1..9: note = Seed: ETISLAGSY
ETISLAGSK

SEQ ID NO: 16621 - protein, 9 aa, synthetic construct
  source 1..9: note = Seed: ETISLAGSY
ETISLAGSL

SEQ ID NO: 16622 - protein, 9 aa, synthetic construct
  source 1..9: note = Seed: ETISLAGSY
ETISLAGSM

SEQ ID NO: 16623 - protein, 9 aa, synthetic construct
  source 1..9: note = Seed: ETISLAGSY
ETISLAGSR

SEQ ID NO: 16624 - protein, 9 aa, synthetic construct
  source 1..9: note = Seed: ETISLAGSY
ETISLAGSW

SEQ ID NO: 16625 - protein, 10 aa, synthetic construct
  source 1..10: note = Seed: ETISLAGSYK
ETISLAGSYF

SEQ ID NO: 16626 - protein, 11 aa, synthetic construct
  source 1..11: note = Seed: ETISLAGSYKD
ETISLAGSYKK

SEQ ID NO: 16627 - protein, 11 aa, synthetic construct
  source 1..11: note = Seed: ETISLAGSYKD
ETISLAGSYKR

SEQ ID NO: 16628 - protein, 10 aa, synthetic construct
  source 1..10: note = Seed: ETISLAGSYK
ETISLAGSYM

SEQ ID NO: 16629 - protein, 10 aa, synthetic construct
  source 1..10: note = Seed: ETISLAGSYK
ETISLAGSYR

SEQ ID NO: 16630 - protein, 10 aa, synthetic construct
  source 1..10: note = Seed: ETISLAGSYK
ETISLAGSYY

SEQ ID NO: 16631 - protein, 9 aa, synthetic construct
  source 1..9: note = Seed: ETKCTLKSF
ETKCTLKSY

SEQ ID NO: 16632 - protein, 9 aa, synthetic construct
  source 1..9: note = Seed: ETKDVVECL
ETKDVVECI

SEQ ID NO: 16633 - protein, 10 aa, synthetic construct
  source 1..10: note = Seed: ETKDVVECLK
ETKDVVECLR

SEQ ID NO: 16634 - protein, 9 aa, synthetic construct
  source 1..9: note = Seed: ETKDVVECL
ETKDVVECV

SEQ ID NO: 16635 - protein, 10 aa, synthetic construct
  source 1..10: note = Seed: EMLAHAEETR
ETLAHAEETK

SEQ ID NO: 16636 - protein, 10 aa, synthetic construct
  source 1..10: note = Seed: EMLAHAEETR
ETLAHAEETR

SEQ ID NO: 16637 - protein, 10 aa, synthetic construct
  source 1..10: note = Seed: ESLRPDTRYV
ETLRPDTRYV

SEQ ID NO: 16638 - protein, 10 aa, synthetic construct
  source 1..10: note = Seed: EPLVDLPIGI
ETLVDLPIGA

SEQ ID NO: 16639 - protein, 10 aa, synthetic construct
  source 1..10: note = Seed: EPLVDLPIGI
ETLVDLPIGI

SEQ ID NO: 16640 - protein, 10 aa, synthetic construct
  source 1..10: note = Seed: EPLVDLPIGI
ETLVDLPIGL

SEQ ID NO: 16641 - protein, 10 aa, synthetic construct
  source 1..10: note = Seed: EPLVDLPIGI
ETLVDLPIGV

SEQ ID NO: 16642 - protein, 10 aa, synthetic construct
  source 1..10: note = Seed: ETLYCIDGAL
ETLYCIDGAI

SEQ ID NO: 16643 - protein, 10 aa, synthetic construct
  source 1..10: note = Seed: ETLYCIDGAL
ETLYCIDGAV

SEQ ID NO: 16644 - protein, 9 aa, synthetic construct
  source 1..9: note = Seed: ETLYCIDGA
ETLYCIDGI

SEQ ID NO: 16645 - protein, 9 aa, synthetic construct
  source 1..9: note = Seed: ETLYCIDGA
ETLYCIDGL

SEQ ID NO: 16646 - protein, 9 aa, synthetic construct
  source 1..9: note = Seed: ETLYCIDGA
ETLYCIDGV

SEQ ID NO: 16647 - protein, 9 aa, synthetic construct
  source 1..9: note = Seed: EVNEFACVV
ETNEFACVA

SEQ ID NO: 16648 - protein, 9 aa, synthetic construct
  source 1..9: note = Seed: EVNEFACVV
ETNEFACVF

SEQ ID NO: 16649 - protein, 9 aa, synthetic construct
  source 1..9: note = Seed: EVNEFACVV
ETNEFACVI

SEQ ID NO: 16650 - protein, 9 aa, synthetic construct
  source 1..9: note = Seed: EVNEFACVV
ETNEFACVL

SEQ ID NO: 16651 - protein, 9 aa, synthetic construct
  source 1..9: note = Seed: EVNEFACVV
ETNEFACVV

SEQ ID NO: 16652 - protein, 9 aa, synthetic construct
  source 1..9: note = Seed: EVNEFACVV
ETNEFACVY

SEQ ID NO: 16653 - protein, 10 aa, synthetic construct
  source 1..10: note = Seed: ETNILLNVPL
ETNILLNVPA

SEQ ID NO: 16654 - protein, 10 aa, synthetic construct
  source 1..10: note = Seed: ETNILLNVPL
ETNILLNVPI

SEQ ID NO: 16655 - protein, 10 aa, synthetic construct
  source 1..10: note = Seed: ETNILLNVPL
ETNILLNVPV

SEQ ID NO: 16656 - protein, 9 aa, synthetic construct
  source 1..9: note = Seed: EVNSFSGYL
ETNSFSGYA

SEQ ID NO: 16657 - protein, 9 aa, synthetic construct
  source 1..9: note = Seed: EVNSFSGYL
ETNSFSGYF

SEQ ID NO: 16658 - protein, 9 aa, synthetic construct
  source 1..9: note = Seed: EVNSFSGYL
ETNSFSGYI

SEQ ID NO: 16659 - protein, 9 aa, synthetic construct
  source 1..9: note = Seed: EVNSFSGYL
ETNSFSGYK

SEQ ID NO: 16660 - protein, 9 aa, synthetic construct
  source 1..9: note = Seed: EVNSFSGYL
ETNSFSGYL

SEQ ID NO: 16661 - protein, 10 aa, synthetic construct
  source 1..10: note = Seed: EVNSFSGYLK
ETNSFSGYLK

SEQ ID NO: 16662 - protein, 11 aa, synthetic construct
  source 1..11: note = Seed: EVNSFSGYLKL
ETNSFSGYLKV

SEQ ID NO: 16663 - protein, 10 aa, synthetic construct
  source 1..10: note = Seed: EVNSFSGYLK
ETNSFSGYLR

SEQ ID NO: 16664 - protein, 10 aa, synthetic construct
  source 1..10: note = Seed: EVNSFSGYLK
ETNSFSGYLY

SEQ ID NO: 16665 - protein, 9 aa, synthetic construct
  source 1..9: note = Seed: EVNSFSGYL
ETNSFSGYM

SEQ ID NO: 16666 - protein, 9 aa, synthetic construct
  source 1..9: note = Seed: EVNSFSGYL
ETNSFSGYR

SEQ ID NO: 16667 - protein, 9 aa, synthetic construct
  source 1..9: note = Seed: EVNSFSGYL
ETNSFSGYT

SEQ ID NO: 16668 - protein, 9 aa, synthetic construct
  source 1..9: note = Seed: EVNSFSGYL
ETNSFSGYV

SEQ ID NO: 16669 - protein, 9 aa, synthetic construct
  source 1..9: note = Seed: EVNSFSGYL
ETNSFSGYY

SEQ ID NO: 16670 - protein, 9 aa, synthetic construct
  source 1..9: note = Seed: EGNSPFHPL
ETNSPFHPA

SEQ ID NO: 16671 - protein, 9 aa, synthetic construct
  source 1..9: note = Seed: EGNSPFHPL
ETNSPFHPI

SEQ ID NO: 16672 - protein, 9 aa, synthetic construct
  source 1..9: note = Seed: EGNSPFHPL
ETNSPFHPL

SEQ ID NO: 16673 - protein, 9 aa, synthetic construct
  source 1..9: note = Seed: EGNSPFHPL
ETNSPFHPM

SEQ ID NO: 16674 - protein, 9 aa, synthetic construct
  source 1..9: note = Seed: EGNSPFHPL
ETNSPFHPT

SEQ ID NO: 16675 - protein, 9 aa, synthetic construct
  source 1..9: note = Seed: EGNSPFHPL
ETNSPFHPV

SEQ ID NO: 16676 - protein, 9 aa, synthetic construct
  source 1..9: note = Seed: ESPFVMMSA
ETPFVMMSA

SEQ ID NO: 16677 - protein, 9 aa, synthetic construct
  source 1..9: note = Seed: ESPFVMMSA
ETPFVMMSI

SEQ ID NO: 16678 - protein, 9 aa, synthetic construct
  source 1..9: note = Seed: ESPFVMMSA
ETPFVMMSL

SEQ ID NO: 16679 - protein, 9 aa, synthetic construct
  source 1..9: note = Seed: ESPFVMMSA
ETPFVMMSM

SEQ ID NO: 16680 - protein, 9 aa, synthetic construct
  source 1..9: note = Seed: ESPFVMMSA
ETPFVMMST

SEQ ID NO: 16681 - protein, 9 aa, synthetic construct
  source 1..9: note = Seed: ESPFVMMSA
ETPFVMMSV

SEQ ID NO: 16682 - protein, 9 aa, synthetic construct
  source 1..9: note = Seed: EQPYVFIKR
ETPYVFIKK

SEQ ID NO: 16683 - protein, 9 aa, synthetic construct
  source 1..9: note = Seed: EQPYVFIKR
ETPYVFIKR

SEQ ID NO: 16684 - protein, 9 aa, synthetic construct
  source 1..9: note = Seed: ELQTPFEIK
ETQTPFEIK

SEQ ID NO: 16685 - protein, 9 aa, synthetic construct
  source 1..9: note = Seed: ELQTPFEIK
ETQTPFEIR

SEQ ID NO: 16686 - protein, 8 aa, synthetic construct
  source 1..8: note = Seed: EASFNYLK
ETSFNYLR

SEQ ID NO: 16687 - protein, 8 aa, synthetic construct
  source 1..8: note = Seed: ELSPVALR
ETSPVALR

SEQ ID NO: 16688 - protein, 10 aa, synthetic construct
  source 1..10: note = Seed: EGSVAYESLR
ETSVAYESLK

SEQ ID NO: 16689 - protein, 10 aa, synthetic construct
  source 1..10: note = Seed: EGSVAYESLR
ETSVAYESLR

SEQ ID NO: 16690 - protein, 9 aa, synthetic construct
  source 1..9: note = Seed: ENSYTTTIK
ETSYTTTIK

SEQ ID NO: 16691 - protein, 9 aa, synthetic construct
  source 1..9: note = Seed: ENSYTTTIK
ETSYTTTIR

SEQ ID NO: 16692 - protein, 10 aa, synthetic construct
  source 1..10: note = Seed: EETFKLSYGI
ETTFKLSYGA

SEQ ID NO: 16693 - protein, 10 aa, synthetic construct
  source 1..10: note = Seed: EETFKLSYGI
ETTFKLSYGI

SEQ ID NO: 16694 - protein, 10 aa, synthetic construct
  source 1..10: note = Seed: EETFKLSYGI
ETTFKLSYGL

SEQ ID NO: 16695 - protein, 10 aa, synthetic construct
  source 1..10: note = Seed: EETFKLSYGI
ETTFKLSYGM

SEQ ID NO: 16696 - protein, 10 aa, synthetic construct
  source 1..10: note = Seed: EETFKLSYGI
ETTFKLSYGV

SEQ ID NO: 16697 - protein, 9 aa, synthetic construct
  source 1..9: note = Seed: ELTGHMLDM
ETTGHMLDF

SEQ ID NO: 16698 - protein, 9 aa, synthetic construct
  source 1..9: note = Seed: ELTGHMLDM
ETTGHMLDM

SEQ ID NO: 16699 - protein, 10 aa, synthetic construct
  source 1..10: note = Seed: ELTGHMLDMY
ETTGHMLDMY

SEQ ID NO: 16700 - protein, 9 aa, synthetic construct
  source 1..9: note = Seed: ELTGHMLDM
ETTGHMLDY

SEQ ID NO: 16701 - protein, 9 aa, synthetic construct
  source 1..9: note = Seed: EFTPFDVVR
ETTPFDVVK

SEQ ID NO: 16702 - protein, 9 aa, synthetic construct
  source 1..9: note = Seed: EFTPFDVVR
ETTPFDVVR

SEQ ID NO: 16703 - protein, 9 aa, synthetic construct
  source 1..9: note = Seed: ELTSMKYFV
ETTSMKYFA

SEQ ID NO: 16704 - protein, 9 aa, synthetic construct
  source 1..9: note = Seed: ELTSMKYFV
ETTSMKYFI

SEQ ID NO: 16705 - protein, 9 aa, synthetic construct
  source 1..9: note = Seed: ELTSMKYFV
ETTSMKYFL

SEQ ID NO: 16706 - protein, 9 aa, synthetic construct
  source 1..9: note = Seed: ELTSMKYFV
ETTSMKYFV

SEQ ID NO: 16707 - protein, 10 aa, synthetic construct
  source 1..10: note = Seed: ELTSMKYFVK
ETTSMKYFVK

SEQ ID NO: 16708 - protein, 10 aa, synthetic construct
  source 1..10: note = Seed: ELTSMKYFVK
ETTSMKYFVR

SEQ ID NO: 16709 - protein, 9 aa, synthetic construct
  source 1..9: note = Seed: ECTTIVNGV
ETTTIVNGA

SEQ ID NO: 16710 - protein, 9 aa, synthetic construct
  source 1..9: note = Seed: ECTTIVNGV
ETTTIVNGI

SEQ ID NO: 16711 - protein, 9 aa, synthetic construct
  source 1..9: note = Seed: ECTTIVNGV
ETTTIVNGL

SEQ ID NO: 16712 - protein, 9 aa, synthetic construct
  source 1..9: note = Seed: ECTTIVNGV
ETTTIVNGM

SEQ ID NO: 16713 - protein, 9 aa, synthetic construct
  source 1..9: note = Seed: ECTTIVNGV
ETTTIVNGT

SEQ ID NO: 16714 - protein, 9 aa, synthetic construct
  source 1..9: note = Seed: ECTTIVNGV
ETTTIVNGV

SEQ ID NO: 16715 - protein, 10 aa, synthetic construct
  source 1..10: note = Seed: ECTTIVNGVR
ETTTIVNGVK

SEQ ID NO: 16716 - protein, 10 aa, synthetic construct
  source 1..10: note = Seed: ECTTIVNGVR
ETTTIVNGVR

SEQ ID NO: 16717 - protein, 9 aa, synthetic construct
  source 1..9: note = Seed: ELVAELEGI
ETVAELEGA

SEQ ID NO: 16718 - protein, 9 aa, synthetic construct
  source 1..9: note = Seed: ELVAELEGI
ETVAELEGI

SEQ ID NO: 16719 - protein, 9 aa, synthetic construct
  source 1..9: note = Seed: ELVAELEGI
ETVAELEGL

SEQ ID NO: 16720 - protein, 9 aa, synthetic construct
  source 1..9: note = Seed: ELVAELEGI
ETVAELEGV

SEQ ID NO: 16721 - protein, 10 aa, synthetic construct
  source 1..10: note = Seed: EVVDKYFDCY
ETVDKYFDCY

SEQ ID NO: 16722 - protein, 10 aa, synthetic construct
  source 1..10: note = Seed: EFVFKNIDGY
ETVFKNIDGY

SEQ ID NO: 16723 - protein, 9 aa, synthetic construct
  source 1..9: note = Seed: EVVGDIILK
ETVGDIILK

SEQ ID NO: 16724 - protein, 9 aa, synthetic construct
  source 1..9: note = Seed: EVVGDIILK
ETVGDIILM

SEQ ID NO: 16725 - protein, 9 aa, synthetic construct
  source 1..9: note = Seed: EVVGDIILK
ETVGDIILR

SEQ ID NO: 16726 - protein, 9 aa, synthetic construct
  source 1..9: note = Seed: EVVGDIILK
ETVGDIILY

SEQ ID NO: 16727 - protein, 9 aa, synthetic construct
  source 1..9: note = Seed: EAVGTNLPL
ETVGTNLPA

SEQ ID NO: 16728 - protein, 9 aa, synthetic construct
  source 1..9: note = Seed: EAVGTNLPL
ETVGTNLPF

SEQ ID NO: 16729 - protein, 9 aa, synthetic construct
  source 1..9: note = Seed: EAVGTNLPL
ETVGTNLPI

SEQ ID NO: 16730 - protein, 9 aa, synthetic construct
  source 1..9: note = Seed: EAVGTNLPL
ETVGTNLPL

SEQ ID NO: 16731 - protein, 9 aa, synthetic construct
  source 1..9: note = Seed: EAVGTNLPL
ETVGTNLPM

SEQ ID NO: 16732 - protein, 9 aa, synthetic construct
  source 1..9: note = Seed: EAVGTNLPL
ETVGTNLPR

SEQ ID NO: 16733 - protein, 9 aa, synthetic construct
  source 1..9: note = Seed: EAVGTNLPL
ETVGTNLPT

SEQ ID NO: 16734 - protein, 9 aa, synthetic construct
  source 1..9: note = Seed: EAVGTNLPL
ETVGTNLPV

SEQ ID NO: 16735 - protein, 9 aa, synthetic construct
  source 1..9: note = Seed: EAVGTNLPL
ETVGTNLPY

SEQ ID NO: 16736 - protein, 10 aa, synthetic construct
  source 1..10: note = Seed: ELVIGAVILR
ETVIGAVILK

SEQ ID NO: 16737 - protein, 10 aa, synthetic construct
  source 1..10: note = Seed: ELVIGAVILR
ETVIGAVILR

SEQ ID NO: 16738 - protein, 11 aa, synthetic construct
  source 1..11: note = Seed: ELVIGAVILRG
ETVIGAVILRR

SEQ ID NO: 16739 - protein, 9 aa, synthetic construct
  source 1..9: note = Seed: ETVKGLDYK
ETVKGLDYM

SEQ ID NO: 16740 - protein, 9 aa, synthetic construct
  source 1..9: note = Seed: ETVKGLDYK
ETVKGLDYR

SEQ ID NO: 16741 - protein, 9 aa, synthetic construct
  source 1..9: note = Seed: ETVKGLDYK
ETVKGLDYY

SEQ ID NO: 16742 - protein, 9 aa, synthetic construct
  source 1..9: note = Seed: ECVLGQSKR
ETVLGQSKK

SEQ ID NO: 16743 - protein, 9 aa, synthetic construct
  source 1..9: note = Seed: ECVLGQSKR
ETVLGQSKR

SEQ ID NO: 16744 - protein, 9 aa, synthetic construct
  source 1..9: note = Seed: EVVLKKLKK
ETVLKKLKR

SEQ ID NO: 16745 - protein, 10 aa, synthetic construct
  source 1..10: note = Seed: EHVTFFIYNK
ETVTFFIYNK

SEQ ID NO: 16746 - protein, 11 aa, synthetic construct
  source 1..11: note = Seed: EHVTFFIYNKI
ETVTFFIYNKV

SEQ ID NO: 16747 - protein, 10 aa, synthetic construct
  source 1..10: note = Seed: EHVTFFIYNK
ETVTFFIYNR

SEQ ID NO: 16748 - protein, 9 aa, synthetic construct
  source 1..9: note = Seed: ELWAKRNIK
ETWAKRNIK

SEQ ID NO: 16749 - protein, 9 aa, synthetic construct
  source 1..9: note = Seed: ELWAKRNIK
ETWAKRNIR

SEQ ID NO: 16750 - protein, 10 aa, synthetic construct
  source 1..10: note = Seed: ETYFTQSRNL
ETYFTQSRNV

SEQ ID NO: 16751 - protein, 11 aa, synthetic construct
  source 1..11: note = Seed: EQYVFCTVNAL
ETYVFCTVNAV

SEQ ID NO: 16752 - protein, 10 aa, synthetic construct
  source 1..10: note = Seed: EEAALCTFLL
EVAALCTFLA

SEQ ID NO: 16753 - protein, 10 aa, synthetic construct
  source 1..10: note = Seed: EEAALCTFLL
EVAALCTFLI

SEQ ID NO: 16754 - protein, 10 aa, synthetic construct
  source 1..10: note = Seed: EEAALCTFLL
EVAALCTFLL

SEQ ID NO: 16755 - protein, 10 aa, synthetic construct
  source 1..10: note = Seed: EEAALCTFLL
EVAALCTFLM

SEQ ID NO: 16756 - protein, 10 aa, synthetic construct
  source 1..10: note = Seed: EEAALCTFLL
EVAALCTFLV

SEQ ID NO: 16757 - protein, 10 aa, synthetic construct
  source 1..10: note = Seed: ETAHSCNVNR
EVAHSCNVNK

SEQ ID NO: 16758 - protein, 10 aa, synthetic construct
  source 1..10: note = Seed: ETAHSCNVNR
EVAHSCNVNR

SEQ ID NO: 16759 - protein, 11 aa, synthetic construct
  source 1..11: note = Seed: ETAHSCNVNRF
EVAHSCNVNRR

SEQ ID NO: 16760 - protein, 9 aa, synthetic construct
  source 1..9: note = Seed: EIAIILASF
EVAIILASF

SEQ ID NO: 16761 - protein, 9 aa, synthetic construct
  source 1..9: note = Seed: EIAIILASF
EVAIILASK

SEQ ID NO: 16762 - protein, 9 aa, synthetic construct
  source 1..9: note = Seed: EIAIILASF
EVAIILASM

SEQ ID NO: 16763 - protein, 9 aa, synthetic construct
  source 1..9: note = Seed: EIAIILASF
EVAIILASR

SEQ ID NO: 16764 - protein, 9 aa, synthetic construct
  source 1..9: note = Seed: EIAIILASF
EVAIILASY

SEQ ID NO: 16765 - protein, 10 aa, synthetic construct
  source 1..10: note = Seed: EVAKNLNESL
EVAKNLNESI

SEQ ID NO: 16766 - protein, 10 aa, synthetic construct
  source 1..10: note = Seed: EVAKNLNESL
EVAKNLNESV

SEQ ID NO: 16767 - protein, 9 aa, synthetic construct
  source 1..9: note = Seed: EAALCTFLL
EVALCTFLA

SEQ ID NO: 16768 - protein, 9 aa, synthetic construct
  source 1..9: note = Seed: EAALCTFLL
EVALCTFLI

SEQ ID NO: 16769 - protein, 9 aa, synthetic construct
  source 1..9: note = Seed: EAALCTFLL
EVALCTFLL

SEQ ID NO: 16770 - protein, 11 aa, synthetic construct
  source 1..11: note = Seed: EAALCTFLLNK
EVALCTFLLNR

SEQ ID NO: 16771 - protein, 9 aa, synthetic construct
  source 1..9: note = Seed: EAALCTFLL
EVALCTFLM

SEQ ID NO: 16772 - protein, 9 aa, synthetic construct
  source 1..9: note = Seed: EAALCTFLL
EVALCTFLT

SEQ ID NO: 16773 - protein, 9 aa, synthetic construct
  source 1..9: note = Seed: EAALCTFLL
EVALCTFLV

SEQ ID NO: 16774 - protein, 9 aa, synthetic construct
  source 1..9: note = Seed: ETAQNSVRV
EVAQNSVRI

SEQ ID NO: 16775 - protein, 9 aa, synthetic construct
  source 1..9: note = Seed: ETAQNSVRV
EVAQNSVRL

SEQ ID NO: 16776 - protein, 9 aa, synthetic construct
  source 1..9: note = Seed: ETAQNSVRV
EVAQNSVRV

SEQ ID NO: 16777 - protein, 11 aa, synthetic construct
  source 1..11: note = Seed: EVARDLSLQFK
EVARDLSLQFR

SEQ ID NO: 16778 - protein, 10 aa, synthetic construct
  source 1..10: note = Seed: EVARDLSLQF
EVARDLSLQY

SEQ ID NO: 16779 - protein, 9 aa, synthetic construct
  source 1..9: note = Seed: EIAWYTERS
EVAWYTERA

SEQ ID NO: 16780 - protein, 9 aa, synthetic construct
  source 1..9: note = Seed: EIAWYTERS
EVAWYTERI

SEQ ID NO: 16781 - protein, 9 aa, synthetic construct
  source 1..9: note = Seed: EIAWYTERS
EVAWYTERL

SEQ ID NO: 16782 - protein, 9 aa, synthetic construct
  source 1..9: note = Seed: EIAWYTERS
EVAWYTERM

SEQ ID NO: 16783 - protein, 11 aa, synthetic construct
  source 1..11: note = Seed: EIAWYTERSEK
EVAWYTERSEK

SEQ ID NO: 16784 - protein, 11 aa, synthetic construct
  source 1..11: note = Seed: EIAWYTERSEK
EVAWYTERSER

SEQ ID NO: 16785 - protein, 9 aa, synthetic construct
  source 1..9: note = Seed: EIAWYTERS
EVAWYTERT

SEQ ID NO: 16786 - protein, 9 aa, synthetic construct
  source 1..9: note = Seed: EIAWYTERS
EVAWYTERV

SEQ ID NO: 16787 - protein, 11 aa, synthetic construct
  source 1..11: note = Seed: EVFAQVKQIYK
EVFAQVKQIYR

SEQ ID NO: 16788 - protein, 9 aa, synthetic construct
  source 1..9: note = Seed: EVFAQVKQI
EVFAQVKQV

SEQ ID NO: 16789 - protein, 9 aa, synthetic construct
  source 1..9: note = Seed: EAFEKMVSL
EVFEKMVSA

SEQ ID NO: 16790 - protein, 9 aa, synthetic construct
  source 1..9: note = Seed: EAFEKMVSL
EVFEKMVSF

SEQ ID NO: 16791 - protein, 9 aa, synthetic construct
  source 1..9: note = Seed: EAFEKMVSL
EVFEKMVSI

SEQ ID NO: 16792 - protein, 9 aa, synthetic construct
  source 1..9: note = Seed: EAFEKMVSL
EVFEKMVSK

SEQ ID NO: 16793 - protein, 9 aa, synthetic construct
  source 1..9: note = Seed: EAFEKMVSL
EVFEKMVSL

SEQ ID NO: 16794 - protein, 10 aa, synthetic construct
  source 1..10: note = Seed: EAFEKMVSLL
EVFEKMVSLA

SEQ ID NO: 16795 - protein, 10 aa, synthetic construct
  source 1..10: note = Seed: EAFEKMVSLL
EVFEKMVSLI

SEQ ID NO: 16796 - protein, 10 aa, synthetic construct
  source 1..10: note = Seed: EAFEKMVSLL
EVFEKMVSLL

SEQ ID NO: 16797 - protein, 10 aa, synthetic construct
  source 1..10: note = Seed: EAFEKMVSLL
EVFEKMVSLV

SEQ ID NO: 16798 - protein, 9 aa, synthetic construct
  source 1..9: note = Seed: EAFEKMVSL
EVFEKMVSM

SEQ ID NO: 16799 - protein, 9 aa, synthetic construct
  source 1..9: note = Seed: EAFEKMVSL
EVFEKMVSR

SEQ ID NO: 16800 - protein, 9 aa, synthetic construct
  source 1..9: note = Seed: EAFEKMVSL
EVFEKMVST

SEQ ID NO: 16801 - protein, 9 aa, synthetic construct
  source 1..9: note = Seed: EAFEKMVSL
EVFEKMVSV

SEQ ID NO: 16802 - protein, 9 aa, synthetic construct
  source 1..9: note = Seed: EAFEKMVSL
EVFEKMVSW

SEQ ID NO: 16803 - protein, 9 aa, synthetic construct
  source 1..9: note = Seed: EAFEKMVSL
EVFEKMVSY

SEQ ID NO: 16804 - protein, 11 aa, synthetic construct
  source 1..11: note = Seed: ELFENKTTLPV
EVFENKTTLPV

SEQ ID NO: 16805 - protein, 10 aa, synthetic construct
  source 1..10: note = Seed: ESFGGASCCL
EVFGGASCCI

SEQ ID NO: 16806 - protein, 11 aa, synthetic construct
  source 1..11: note = Seed: ESFGGASCCLY
EVFGGASCCLY

SEQ ID NO: 16807 - protein, 10 aa, synthetic construct
  source 1..10: note = Seed: ESFGGASCCL
EVFGGASCCV

SEQ ID NO: 16808 - protein, 9 aa, synthetic construct
  source 1..9: note = Seed: ETFKLSYGI
EVFKLSYGA

SEQ ID NO: 16809 - protein, 9 aa, synthetic construct
  source 1..9: note = Seed: ETFKLSYGI
EVFKLSYGF

SEQ ID NO: 16810 - protein, 9 aa, synthetic construct
  source 1..9: note = Seed: ETFKLSYGI
EVFKLSYGI

SEQ ID NO: 16811 - protein, 10 aa, synthetic construct
  source 1..10: note = Seed: ETFKLSYGIA
EVFKLSYGII

SEQ ID NO: 16812 - protein, 10 aa, synthetic construct
  source 1..10: note = Seed: ETFKLSYGIA
EVFKLSYGIL

SEQ ID NO: 16813 - protein, 10 aa, synthetic construct
  source 1..10: note = Seed: ETFKLSYGIA
EVFKLSYGIV

SEQ ID NO: 16814 - protein, 9 aa, synthetic construct
  source 1..9: note = Seed: ETFKLSYGI
EVFKLSYGL

SEQ ID NO: 16815 - protein, 9 aa, synthetic construct
  source 1..9: note = Seed: ETFKLSYGI
EVFKLSYGM

SEQ ID NO: 16816 - protein, 9 aa, synthetic construct
  source 1..9: note = Seed: ETFKLSYGI
EVFKLSYGT

SEQ ID NO: 16817 - protein, 9 aa, synthetic construct
  source 1..9: note = Seed: ETFKLSYGI
EVFKLSYGV

SEQ ID NO: 16818 - protein, 9 aa, synthetic construct
  source 1..9: note = Seed: ETFKLSYGI
EVFKLSYGY

SEQ ID NO: 16819 - protein, 11 aa, synthetic construct
  source 1..11: note = Seed: EWFLAYILFTR
EVFLAYILFTK

SEQ ID NO: 16820 - protein, 11 aa, synthetic construct
  source 1..11: note = Seed: EWFLAYILFTR
EVFLAYILFTR

SEQ ID NO: 16821 - protein, 9 aa, synthetic construct
  source 1..9: note = Seed: EAFLIGCNY
EVFLIGCNK

SEQ ID NO: 16822 - protein, 9 aa, synthetic construct
  source 1..9: note = Seed: EAFLIGCNY
EVFLIGCNR

SEQ ID NO: 16823 - protein, 10 aa, synthetic construct
  source 1..10: note = Seed: EAFLIGCNYL
EVFLIGCNYA

SEQ ID NO: 16824 - protein, 10 aa, synthetic construct
  source 1..10: note = Seed: EAFLIGCNYL
EVFLIGCNYI

SEQ ID NO: 16825 - protein, 10 aa, synthetic construct
  source 1..10: note = Seed: EAFLIGCNYL
EVFLIGCNYL

SEQ ID NO: 16826 - protein, 10 aa, synthetic construct
  source 1..10: note = Seed: EAFLIGCNYL
EVFLIGCNYV

SEQ ID NO: 16827 - protein, 10 aa, synthetic construct
  source 1..10: note = Seed: EVFNATRFAS
EVFNATRFAA

SEQ ID NO: 16828 - protein, 10 aa, synthetic construct
  source 1..10: note = Seed: EVFNATRFAS
EVFNATRFAI

SEQ ID NO: 16829 - protein, 10 aa, synthetic construct
  source 1..10: note = Seed: EVFNATRFAS
EVFNATRFAL

SEQ ID NO: 16830 - protein, 10 aa, synthetic construct
  source 1..10: note = Seed: EVFNATRFAS
EVFNATRFAM

SEQ ID NO: 16831 - protein, 11 aa, synthetic construct
  source 1..11: note = Seed: EVFNATRFASV
EVFNATRFASI

SEQ ID NO: 16832 - protein, 10 aa, synthetic construct
  source 1..10: note = Seed: EVFNATRFAS
EVFNATRFAV

SEQ ID NO: 16833 - protein, 9 aa, synthetic construct
  source 1..9: note = Seed: EVFNATRFA
EVFNATRFI

SEQ ID NO: 16834 - protein, 9 aa, synthetic construct
  source 1..9: note = Seed: EVFNATRFA
EVFNATRFK

SEQ ID NO: 16835 - protein, 9 aa, synthetic construct
  source 1..9: note = Seed: EVFNATRFA
EVFNATRFL

SEQ ID NO: 16836 - protein, 9 aa, synthetic construct
  source 1..9: note = Seed: EVFNATRFA
EVFNATRFR

SEQ ID NO: 16837 - protein, 9 aa, synthetic construct
  source 1..9: note = Seed: EVFNATRFA
EVFNATRFV

SEQ ID NO: 16838 - protein, 9 aa, synthetic construct
  source 1..9: note = Seed: EVFNATRFA
EVFNATRFY

SEQ ID NO: 16839 - protein, 10 aa, synthetic construct
  source 1..10: note = Seed: EEIAIILASF
EVIAIILASF

SEQ ID NO: 16840 - protein, 10 aa, synthetic construct
  source 1..10: note = Seed: EEIAIILASF
EVIAIILASM

SEQ ID NO: 16841 - protein, 10 aa, synthetic construct
  source 1..10: note = Seed: EEIAIILASF
EVIAIILASY

SEQ ID NO: 16842 - protein, 9 aa, synthetic construct
  source 1..9: note = Seed: ETIQITISS
EVIQITISA

SEQ ID NO: 16843 - protein, 9 aa, synthetic construct
  source 1..9: note = Seed: ETIQITISS
EVIQITISI

SEQ ID NO: 16844 - protein, 9 aa, synthetic construct
  source 1..9: note = Seed: ETIQITISS
EVIQITISK

SEQ ID NO: 16845 - protein, 9 aa, synthetic construct
  source 1..9: note = Seed: ETIQITISS
EVIQITISL

SEQ ID NO: 16846 - protein, 9 aa, synthetic construct
  source 1..9: note = Seed: ETIQITISS
EVIQITISM

SEQ ID NO: 16847 - protein, 9 aa, synthetic construct
  source 1..9: note = Seed: ETIQITISS
EVIQITISR

SEQ ID NO: 16848 - protein, 10 aa, synthetic construct
  source 1..10: note = Seed: ETIQITISSF
EVIQITISSF

SEQ ID NO: 16849 - protein, 11 aa, synthetic construct
  source 1..11: note = Seed: ETIQITISSFK
EVIQITISSFK

SEQ ID NO: 16850 - protein, 11 aa, synthetic construct
  source 1..11: note = Seed: ETIQITISSFK
EVIQITISSFR

SEQ ID NO: 16851 - protein, 10 aa, synthetic construct
  source 1..10: note = Seed: ETIQITISSF
EVIQITISSM

SEQ ID NO: 16852 - protein, 10 aa, synthetic construct
  source 1..10: note = Seed: ETIQITISSF
EVIQITISSW

SEQ ID NO: 16853 - protein, 10 aa, synthetic construct
  source 1..10: note = Seed: ETIQITISSF
EVIQITISSY

SEQ ID NO: 16854 - protein, 9 aa, synthetic construct
  source 1..9: note = Seed: ETIQITISS
EVIQITIST

SEQ ID NO: 16855 - protein, 9 aa, synthetic construct
  source 1..9: note = Seed: ETIQITISS
EVIQITISV

SEQ ID NO: 16856 - protein, 9 aa, synthetic construct
  source 1..9: note = Seed: ETISLAGSY
EVISLAGSF

SEQ ID NO: 16857 - protein, 9 aa, synthetic construct
  source 1..9: note = Seed: ETISLAGSY
EVISLAGSK

SEQ ID NO: 16858 - protein, 9 aa, synthetic construct
  source 1..9: note = Seed: ETISLAGSY
EVISLAGSM

SEQ ID NO: 16859 - protein, 9 aa, synthetic construct
  source 1..9: note = Seed: ETISLAGSY
EVISLAGSR

SEQ ID NO: 16860 - protein, 9 aa, synthetic construct
  source 1..9: note = Seed: ETISLAGSY
EVISLAGSW

SEQ ID NO: 16861 - protein, 9 aa, synthetic construct
  source 1..9: note = Seed: ETISLAGSY
EVISLAGSY

SEQ ID NO: 16862 - protein, 10 aa, synthetic construct
  source 1..10: note = Seed: ETISLAGSYK
EVISLAGSYF

SEQ ID NO: 16863 - protein, 10 aa, synthetic construct
  source 1..10: note = Seed: ETISLAGSYK
EVISLAGSYK

SEQ ID NO: 16864 - protein, 11 aa, synthetic construct
  source 1..11: note = Seed: ETISLAGSYKD
EVISLAGSYKK

SEQ ID NO: 16865 - protein, 11 aa, synthetic construct
  source 1..11: note = Seed: ETISLAGSYKD
EVISLAGSYKR

SEQ ID NO: 16866 - protein, 10 aa, synthetic construct
  source 1..10: note = Seed: ETISLAGSYK
EVISLAGSYM

SEQ ID NO: 16867 - protein, 10 aa, synthetic construct
  source 1..10: note = Seed: ETISLAGSYK
EVISLAGSYR

SEQ ID NO: 16868 - protein, 10 aa, synthetic construct
  source 1..10: note = Seed: ETISLAGSYK
EVISLAGSYY

SEQ ID NO: 16869 - protein, 9 aa, synthetic construct
  source 1..9: note = Seed: ETKCTLKSF
EVKCTLKSY

SEQ ID NO: 16870 - protein, 10 aa, synthetic construct
  source 1..10: note = Seed: ETKDVVECLK
EVKDVVECLK

SEQ ID NO: 16871 - protein, 10 aa, synthetic construct
  source 1..10: note = Seed: ETKDVVECLK
EVKDVVECLR

SEQ ID NO: 16872 - protein, 9 aa, synthetic construct
  source 1..9: note = Seed: ETKDVVECL
EVKDVVECV

SEQ ID NO: 16873 - protein, 10 aa, synthetic construct
  source 1..10: note = Seed: EMLAHAEETR
EVLAHAEETK

SEQ ID NO: 16874 - protein, 10 aa, synthetic construct
  source 1..10: note = Seed: EMLAHAEETR
EVLAHAEETR

SEQ ID NO: 16875 - protein, 10 aa, synthetic construct
  source 1..10: note = Seed: EPLVDLPIGI
EVLVDLPIGI

SEQ ID NO: 16876 - protein, 10 aa, synthetic construct
  source 1..10: note = Seed: EPLVDLPIGI
EVLVDLPIGV

SEQ ID NO: 16877 - protein, 10 aa, synthetic construct
  source 1..10: note = Seed: ETLYCIDGAL
EVLYCIDGAV

SEQ ID NO: 16878 - protein, 9 aa, synthetic construct
  source 1..9: note = Seed: ETLYCIDGA
EVLYCIDGI

SEQ ID NO: 16879 - protein, 9 aa, synthetic construct
  source 1..9: note = Seed: ETLYCIDGA
EVLYCIDGL

SEQ ID NO: 16880 - protein, 9 aa, synthetic construct
  source 1..9: note = Seed: ETLYCIDGA
EVLYCIDGV

SEQ ID NO: 16881 - protein, 9 aa, synthetic construct
  source 1..9: note = Seed: EVNEFACVV
EVNEFACVY

SEQ ID NO: 16882 - protein, 10 aa, synthetic construct
  source 1..10: note = Seed: ETNILLNVPL
EVNILLNVPI

SEQ ID NO: 16883 - protein, 10 aa, synthetic construct
  source 1..10: note = Seed: ETNILLNVPL
EVNILLNVPV

SEQ ID NO: 16884 - protein, 9 aa, synthetic construct
  source 1..9: note = Seed: EVNSFSGYL
EVNSFSGYA

SEQ ID NO: 16885 - protein, 9 aa, synthetic construct
  source 1..9: note = Seed: EVNSFSGYL
EVNSFSGYF

SEQ ID NO: 16886 - protein, 9 aa, synthetic construct
  source 1..9: note = Seed: EVNSFSGYL
EVNSFSGYI

SEQ ID NO: 16887 - protein, 9 aa, synthetic construct
  source 1..9: note = Seed: EVNSFSGYL
EVNSFSGYK

SEQ ID NO: 16888 - protein, 10 aa, synthetic construct
  source 1..10: note = Seed: EVNSFSGYLK
EVNSFSGYLR

SEQ ID NO: 16889 - protein, 9 aa, synthetic construct
  source 1..9: note = Seed: EVNSFSGYL
EVNSFSGYM

SEQ ID NO: 16890 - protein, 9 aa, synthetic construct
  source 1..9: note = Seed: EVNSFSGYL
EVNSFSGYR

SEQ ID NO: 16891 - protein, 9 aa, synthetic construct
  source 1..9: note = Seed: EVNSFSGYL
EVNSFSGYV

SEQ ID NO: 16892 - protein, 9 aa, synthetic construct
  source 1..9: note = Seed: EVNSFSGYL
EVNSFSGYY

SEQ ID NO: 16893 - protein, 9 aa, synthetic construct
  source 1..9: note = Seed: EGNSPFHPL
EVNSPFHPA

SEQ ID NO: 16894 - protein, 9 aa, synthetic construct
  source 1..9: note = Seed: EGNSPFHPL
EVNSPFHPI

SEQ ID NO: 16895 - protein, 9 aa, synthetic construct
  source 1..9: note = Seed: EGNSPFHPL
EVNSPFHPL

SEQ ID NO: 16896 - protein, 9 aa, synthetic construct
  source 1..9: note = Seed: EGNSPFHPL
EVNSPFHPM

SEQ ID NO: 16897 - protein, 9 aa, synthetic construct
  source 1..9: note = Seed: EGNSPFHPL
EVNSPFHPT

SEQ ID NO: 16898 - protein, 9 aa, synthetic construct
  source 1..9: note = Seed: EGNSPFHPL
EVNSPFHPV

SEQ ID NO: 16899 - protein, 9 aa, synthetic construct
  source 1..9: note = Seed: ESPFVMMSA
EVPFVMMSA

SEQ ID NO: 16900 - protein, 9 aa, synthetic construct
  source 1..9: note = Seed: ESPFVMMSA
EVPFVMMSI

SEQ ID NO: 16901 - protein, 9 aa, synthetic construct
  source 1..9: note = Seed: ESPFVMMSA
EVPFVMMSL

SEQ ID NO: 16902 - protein, 9 aa, synthetic construct
  source 1..9: note = Seed: ESPFVMMSA
EVPFVMMSV

SEQ ID NO: 16903 - protein, 9 aa, synthetic construct
  source 1..9: note = Seed: EQPYVFIKR
EVPYVFIKK

SEQ ID NO: 16904 - protein, 9 aa, synthetic construct
  source 1..9: note = Seed: EQPYVFIKR
EVPYVFIKR

SEQ ID NO: 16905 - protein, 9 aa, synthetic construct
  source 1..9: note = Seed: ELQTPFEIK
EVQTPFEIK

SEQ ID NO: 16906 - protein, 9 aa, synthetic construct
  source 1..9: note = Seed: ELQTPFEIK
EVQTPFEIR

SEQ ID NO: 16907 - protein, 8 aa, synthetic construct
  source 1..8: note = Seed: EASFNYLK
EVSFNYLR

SEQ ID NO: 16908 - protein, 8 aa, synthetic construct
  source 1..8: note = Seed: ELSPVALR
EVSPVALR

SEQ ID NO: 16909 - protein, 10 aa, synthetic construct
  source 1..10: note = Seed: EGSVAYESLR
EVSVAYESLK

SEQ ID NO: 16910 - protein, 10 aa, synthetic construct
  source 1..10: note = Seed: EGSVAYESLR
EVSVAYESLR

SEQ ID NO: 16911 - protein, 10 aa, synthetic construct
  source 1..10: note = Seed: EKSYELQTPF
EVSYELQTPW

SEQ ID NO: 16912 - protein, 9 aa, synthetic construct
  source 1..9: note = Seed: ENSYTTTIK
EVSYTTTIK

SEQ ID NO: 16913 - protein, 9 aa, synthetic construct
  source 1..9: note = Seed: ENSYTTTIK
EVSYTTTIR

SEQ ID NO: 16914 - protein, 10 aa, synthetic construct
  source 1..10: note = Seed: EETFKLSYGI
EVTFKLSYGA

SEQ ID NO: 16915 - protein, 10 aa, synthetic construct
  source 1..10: note = Seed: EETFKLSYGI
EVTFKLSYGI

SEQ ID NO: 16916 - protein, 10 aa, synthetic construct
  source 1..10: note = Seed: EETFKLSYGI
EVTFKLSYGL

SEQ ID NO: 16917 - protein, 10 aa, synthetic construct
  source 1..10: note = Seed: EETFKLSYGI
EVTFKLSYGV

SEQ ID NO: 16918 - protein, 9 aa, synthetic construct
  source 1..9: note = Seed: ELTGHMLDM
EVTGHMLDF

SEQ ID NO: 16919 - protein, 9 aa, synthetic construct
  source 1..9: note = Seed: ELTGHMLDM
EVTGHMLDM

SEQ ID NO: 16920 - protein, 10 aa, synthetic construct
  source 1..10: note = Seed: ELTGHMLDMY
EVTGHMLDMY

SEQ ID NO: 16921 - protein, 9 aa, synthetic construct
  source 1..9: note = Seed: ELTGHMLDM
EVTGHMLDY

SEQ ID NO: 16922 - protein, 9 aa, synthetic construct
  source 1..9: note = Seed: EFTPFDVVR
EVTPFDVVK

SEQ ID NO: 16923 - protein, 9 aa, synthetic construct
  source 1..9: note = Seed: EFTPFDVVR
EVTPFDVVR

SEQ ID NO: 16924 - protein, 9 aa, synthetic construct
  source 1..9: note = Seed: ELTSMKYFV
EVTSMKYFA

SEQ ID NO: 16925 - protein, 9 aa, synthetic construct
  source 1..9: note = Seed: ELTSMKYFV
EVTSMKYFI

SEQ ID NO: 16926 - protein, 9 aa, synthetic construct
  source 1..9: note = Seed: ELTSMKYFV
EVTSMKYFL

SEQ ID NO: 16927 - protein, 9 aa, synthetic construct
  source 1..9: note = Seed: ELTSMKYFV
EVTSMKYFV

SEQ ID NO: 16928 - protein, 10 aa, synthetic construct
  source 1..10: note = Seed: ELTSMKYFVK
EVTSMKYFVK

SEQ ID NO: 16929 - protein, 10 aa, synthetic construct
  source 1..10: note = Seed: ELTSMKYFVK
EVTSMKYFVR

SEQ ID NO: 16930 - protein, 9 aa, synthetic construct
  source 1..9: note = Seed: ECTTIVNGV
EVTTIVNGA

SEQ ID NO: 16931 - protein, 9 aa, synthetic construct
  source 1..9: note = Seed: ECTTIVNGV
EVTTIVNGI

SEQ ID NO: 16932 - protein, 9 aa, synthetic construct
  source 1..9: note = Seed: ECTTIVNGV
EVTTIVNGL

SEQ ID NO: 16933 - protein, 9 aa, synthetic construct
  source 1..9: note = Seed: ECTTIVNGV
EVTTIVNGM

SEQ ID NO: 16934 - protein, 9 aa, synthetic construct
  source 1..9: note = Seed: ECTTIVNGV
EVTTIVNGV

SEQ ID NO: 16935 - protein, 10 aa, synthetic construct
  source 1..10: note = Seed: ECTTIVNGVR
EVTTIVNGVK

SEQ ID NO: 16936 - protein, 10 aa, synthetic construct
  source 1..10: note = Seed: ECTTIVNGVR
EVTTIVNGVR

SEQ ID NO: 16937 - protein, 9 aa, synthetic construct
  source 1..9: note = Seed: ELVAELEGI
EVVAELEGI

SEQ ID NO: 16938 - protein, 9 aa, synthetic construct
  source 1..9: note = Seed: ELVAELEGI
EVVAELEGL

SEQ ID NO: 16939 - protein, 9 aa, synthetic construct
  source 1..9: note = Seed: ELVAELEGI
EVVAELEGV

SEQ ID NO: 16940 - protein, 10 aa, synthetic construct
  source 1..10: note = Seed: EFVFKNIDGY
EVVFKNIDGY

SEQ ID NO: 16941 - protein, 9 aa, synthetic construct
  source 1..9: note = Seed: EVVGDIILK
EVVGDIILM

SEQ ID NO: 16942 - protein, 9 aa, synthetic construct
  source 1..9: note = Seed: EVVGDIILK
EVVGDIILR

SEQ ID NO: 16943 - protein, 9 aa, synthetic construct
  source 1..9: note = Seed: EVVGDIILK
EVVGDIILY

SEQ ID NO: 16944 - protein, 9 aa, synthetic construct
  source 1..9: note = Seed: EAVGTNLPL
EVVGTNLPA

SEQ ID NO: 16945 - protein, 9 aa, synthetic construct
  source 1..9: note = Seed: EAVGTNLPL
EVVGTNLPF

SEQ ID NO: 16946 - protein, 9 aa, synthetic construct
  source 1..9: note = Seed: EAVGTNLPL
EVVGTNLPI

SEQ ID NO: 16947 - protein, 9 aa, synthetic construct
  source 1..9: note = Seed: EAVGTNLPL
EVVGTNLPL

SEQ ID NO: 16948 - protein, 9 aa, synthetic construct
  source 1..9: note = Seed: EAVGTNLPL
EVVGTNLPM

SEQ ID NO: 16949 - protein, 9 aa, synthetic construct
  source 1..9: note = Seed: EAVGTNLPL
EVVGTNLPR

SEQ ID NO: 16950 - protein, 9 aa, synthetic construct
  source 1..9: note = Seed: EAVGTNLPL
EVVGTNLPV

SEQ ID NO: 16951 - protein, 9 aa, synthetic construct
  source 1..9: note = Seed: EAVGTNLPL
EVVGTNLPY

SEQ ID NO: 16952 - protein, 10 aa, synthetic construct
  source 1..10: note = Seed: ELVIGAVILR
EVVIGAVILK

SEQ ID NO: 16953 - protein, 10 aa, synthetic construct
  source 1..10: note = Seed: ELVIGAVILR
EVVIGAVILR

SEQ ID NO: 16954 - protein, 9 aa, synthetic construct
  source 1..9: note = Seed: ETVKGLDYK
EVVKGLDYK

SEQ ID NO: 16955 - protein, 9 aa, synthetic construct
  source 1..9: note = Seed: ETVKGLDYK
EVVKGLDYM

SEQ ID NO: 16956 - protein, 9 aa, synthetic construct
  source 1..9: note = Seed: ETVKGLDYK
EVVKGLDYR

SEQ ID NO: 16957 - protein, 9 aa, synthetic construct
  source 1..9: note = Seed: ETVKGLDYK
EVVKGLDYY

SEQ ID NO: 16958 - protein, 9 aa, synthetic construct
  source 1..9: note = Seed: ECVLGQSKR
EVVLGQSKK

SEQ ID NO: 16959 - protein, 9 aa, synthetic construct
  source 1..9: note = Seed: ECVLGQSKR
EVVLGQSKR

SEQ ID NO: 16960 - protein, 10 aa, synthetic construct
  source 1..10: note = Seed: EHVTFFIYNK
EVVTFFIYNK

SEQ ID NO: 16961 - protein, 11 aa, synthetic construct
  source 1..11: note = Seed: EHVTFFIYNKI
EVVTFFIYNKV

SEQ ID NO: 16962 - protein, 10 aa, synthetic construct
  source 1..10: note = Seed: EHVTFFIYNK
EVVTFFIYNR

SEQ ID NO: 16963 - protein, 9 aa, synthetic construct
  source 1..9: note = Seed: ELWAKRNIK
EVWAKRNIK

SEQ ID NO: 16964 - protein, 9 aa, synthetic construct
  source 1..9: note = Seed: ELWAKRNIK
EVWAKRNIR

SEQ ID NO: 16965 - protein, 10 aa, synthetic construct
  source 1..10: note = Seed: ETYFTQSRNL
EVYFTQSRNV

SEQ ID NO: 16966 - protein, 10 aa, synthetic construct
  source 1..10: note = Seed: EEAALCTFLL
EWAALCTFLV

SEQ ID NO: 16967 - protein, 10 aa, synthetic construct
  source 1..10: note = Seed: ETAHSCNVNR
EWAHSCNVNR

SEQ ID NO: 16968 - protein, 10 aa, synthetic construct
  source 1..10: note = Seed: ETISLAGSYK
EWISLAGSYK

SEQ ID NO: 16969 - protein, 10 aa, synthetic construct
  source 1..10: note = Seed: ETISLAGSYK
EWISLAGSYR

SEQ ID NO: 16970 - protein, 9 aa, synthetic construct
  source 1..9: note = Seed: EFLRDGWEI
EWLRDGWEF

SEQ ID NO: 16971 - protein, 10 aa, synthetic construct
  source 1..10: note = Seed: EVNSFSGYLK
EWNSFSGYLR

SEQ ID NO: 16972 - protein, 10 aa, synthetic construct
  source 1..10: note = Seed: EGSVAYESLR
EWSVAYESLK

SEQ ID NO: 16973 - protein, 10 aa, synthetic construct
  source 1..10: note = Seed: EGSVAYESLR
EWSVAYESLR

SEQ ID NO: 16974 - protein, 10 aa, synthetic construct
  source 1..10: note = Seed: EETFKLSYGI
EWTFKLSYGA

SEQ ID NO: 16975 - protein, 10 aa, synthetic construct
  source 1..10: note = Seed: EETFKLSYGI
EWTFKLSYGI

SEQ ID NO: 16976 - protein, 10 aa, synthetic construct
  source 1..10: note = Seed: EETFKLSYGI
EWTFKLSYGL

SEQ ID NO: 16977 - protein, 10 aa, synthetic construct
  source 1..10: note = Seed: EETFKLSYGI
EWTFKLSYGV

SEQ ID NO: 16978 - protein, 10 aa, synthetic construct
  source 1..10: note = Seed: ECTTIVNGVR
EWTTIVNGVR

SEQ ID NO: 16979 - protein, 10 aa, synthetic construct
  source 1..10: note = Seed: ELVIGAVILR
EWVIGAVILK

SEQ ID NO: 16980 - protein, 10 aa, synthetic construct
  source 1..10: note = Seed: ELVIGAVILR
EWVIGAVILR

SEQ ID NO: 16981 - protein, 10 aa, synthetic construct
  source 1..10: note = Seed: EHVTFFIYNK
EWVTFFIYNK

SEQ ID NO: 16982 - protein, 10 aa, synthetic construct
  source 1..10: note = Seed: EHVTFFIYNK
EWVTFFIYNR

SEQ ID NO: 16983 - protein, 10 aa, synthetic construct
  source 1..10: note = Seed: EEAALCTFLL
EYAALCTFLV

SEQ ID NO: 16984 - protein, 10 aa, synthetic construct
  source 1..10: note = Seed: ETAHSCNVNR
EYAHSCNVNR

SEQ ID NO: 16985 - protein, 10 aa, synthetic construct
  source 1..10: note = Seed: EHEIAWYTER
EYEIAWYTER

SEQ ID NO: 16986 - protein, 9 aa, synthetic construct
  source 1..9: note = Seed: EWFLAYILF
EYFLAYILF

SEQ ID NO: 16987 - protein, 11 aa, synthetic construct
  source 1..11: note = Seed: EWFLAYILFTR
EYFLAYILFTR

SEQ ID NO: 16988 - protein, 10 aa, synthetic construct
  source 1..10: note = Seed: ETISLAGSYK
EYISLAGSYK

SEQ ID NO: 16989 - protein, 10 aa, synthetic construct
  source 1..10: note = Seed: ETISLAGSYK
EYISLAGSYR

SEQ ID NO: 16990 - protein, 9 aa, synthetic construct
  source 1..9: note = Seed: EFLRDGWEI
EYLRDGWEF

SEQ ID NO: 16991 - protein, 9 aa, synthetic construct
  source 1..9: note = Seed: EFLRDGWEI
EYLRDGWEI

SEQ ID NO: 16992 - protein, 9 aa, synthetic construct
  source 1..9: note = Seed: EFLRDGWEI
EYLRDGWEL

SEQ ID NO: 16993 - protein, 10 aa, synthetic construct
  source 1..10: note = Seed: ESLRPDTRYV
EYLRPDTRYV

SEQ ID NO: 16994 - protein, 10 aa, synthetic construct
  source 1..10: note = Seed: EVNSFSGYLK
EYNSFSGYLR

SEQ ID NO: 16995 - protein, 9 aa, synthetic construct
  source 1..9: note = Seed: EQPYVFIKR
EYPYVFIKR

SEQ ID NO: 16996 - protein, 10 aa, synthetic construct
  source 1..10: note = Seed: EGSVAYESLR
EYSVAYESLK

SEQ ID NO: 16997 - protein, 10 aa, synthetic construct
  source 1..10: note = Seed: EGSVAYESLR
EYSVAYESLR

SEQ ID NO: 16998 - protein, 10 aa, synthetic construct
  source 1..10: note = Seed: EKSYELQTPF
EYSYELQTPW

SEQ ID NO: 16999 - protein, 10 aa, synthetic construct
  source 1..10: note = Seed: EETFKLSYGI
EYTFKLSYGA

SEQ ID NO: 17000 - protein, 10 aa, synthetic construct
  source 1..10: note = Seed: EETFKLSYGI
EYTFKLSYGI

SEQ ID NO: 17001 - protein, 10 aa, synthetic construct
  source 1..10: note = Seed: EETFKLSYGI
EYTFKLSYGL

SEQ ID NO: 17002 - protein, 10 aa, synthetic construct
  source 1..10: note = Seed: EETFKLSYGI
EYTFKLSYGV

SEQ ID NO: 17003 - protein, 9 aa, synthetic construct
  source 1..9: note = Seed: EFTPFDVVR
EYTPFDVVR

SEQ ID NO: 17004 - protein, 10 aa, synthetic construct
  source 1..10: note = Seed: ELTSMKYFVK
EYTSMKYFVR

SEQ ID NO: 17005 - protein, 10 aa, synthetic construct
  source 1..10: note = Seed: ECTTIVNGVR
EYTTIVNGVR

SEQ ID NO: 17006 - protein, 10 aa, synthetic construct
  source 1..10: note = Seed: ELVIGAVILR
EYVIGAVILK

SEQ ID NO: 17007 - protein, 10 aa, synthetic construct
  source 1..10: note = Seed: ELVIGAVILR
EYVIGAVILR

SEQ ID NO: 17008 - protein, 10 aa, synthetic construct
  source 1..10: note = Seed: EHVTFFIYNK
EYVTFFIYNK

SEQ ID NO: 17009 - protein, 10 aa, synthetic construct
  source 1..10: note = Seed: EHVTFFIYNK
EYVTFFIYNR

SEQ ID NO: 17010 - protein, 9 aa, synthetic construct
  source 1..9: note = Seed: ELWAKRNIK
EYWAKRNIR

SEQ ID NO: 17011 - protein, 10 aa, synthetic construct
  source 1..10: note = Seed: ERYKLEGYAF
EYYKLEGYAF

SEQ ID NO: 17012 - protein, 9 aa, synthetic construct
  source 1..9: note = Seed: FVAAIFYLI
FAAAIFYLA

SEQ ID NO: 17013 - protein, 9 aa, synthetic construct
  source 1..9: note = Seed: FVAAIFYLI
FAAAIFYLF

SEQ ID NO: 17014 - protein, 9 aa, synthetic construct
  source 1..9: note = Seed: FVAAIFYLI
FAAAIFYLH

SEQ ID NO: 17015 - protein, 9 aa, synthetic construct
  source 1..9: note = Seed: FVAAIFYLI
FAAAIFYLI

SEQ ID NO: 17016 - protein, 9 aa, synthetic construct
  source 1..9: note = Seed: FVAAIFYLI
FAAAIFYLK

SEQ ID NO: 17017 - protein, 9 aa, synthetic construct
  source 1..9: note = Seed: FVAAIFYLI
FAAAIFYLL

SEQ ID NO: 17018 - protein, 9 aa, synthetic construct
  source 1..9: note = Seed: FVAAIFYLI
FAAAIFYLM

SEQ ID NO: 17019 - protein, 9 aa, synthetic construct
  source 1..9: note = Seed: FVAAIFYLI
FAAAIFYLR

SEQ ID NO: 17020 - protein, 9 aa, synthetic construct
  source 1..9: note = Seed: FVAAIFYLI
FAAAIFYLS

SEQ ID NO: 17021 - protein, 9 aa, synthetic construct
  source 1..9: note = Seed: FVAAIFYLI
FAAAIFYLT

SEQ ID NO: 17022 - protein, 9 aa, synthetic construct
  source 1..9: note = Seed: FVAAIFYLI
FAAAIFYLV

SEQ ID NO: 17023 - protein, 9 aa, synthetic construct
  source 1..9: note = Seed: FVAAIFYLI
FAAAIFYLY

SEQ ID NO: 17024 - protein, 8 aa, synthetic construct
  source 1..8: note = Seed: FVAAIFYL
FAAAIFYV

SEQ ID NO: 17025 - protein, 10 aa, synthetic construct
  source 1..10: note = Seed: FCAFAVDAAK
FAAFAVDAAK

SEQ ID NO: 17026 - protein, 10 aa, synthetic construct
  source 1..10: note = Seed: FCAFAVDAAK
FAAFAVDAAR

SEQ ID NO: 17027 - protein, 9 aa, synthetic construct
  source 1..9: note = Seed: FLAFVVFLL
FAAFVVFLA

SEQ ID NO: 17028 - protein, 9 aa, synthetic construct
  source 1..9: note = Seed: FLAFVVFLL
FAAFVVFLI

SEQ ID NO: 17029 - protein, 9 aa, synthetic construct
  source 1..9: note = Seed: FLAFVVFLL
FAAFVVFLL

SEQ ID NO: 17030 - protein, 10 aa, synthetic construct
  source 1..10: note = Seed: FLAFVVFLLV
FAAFVVFLLA

SEQ ID NO: 17031 - protein, 10 aa, synthetic construct
  source 1..10: note = Seed: FLAFVVFLLV
FAAFVVFLLI

SEQ ID NO: 17032 - protein, 10 aa, synthetic construct
  source 1..10: note = Seed: FLAFVVFLLV
FAAFVVFLLV

SEQ ID NO: 17033 - protein, 9 aa, synthetic construct
  source 1..9: note = Seed: FLAFVVFLL
FAAFVVFLM

SEQ ID NO: 17034 - protein, 9 aa, synthetic construct
  source 1..9: note = Seed: FLAFVVFLL
FAAFVVFLS

SEQ ID NO: 17035 - protein, 9 aa, synthetic construct
  source 1..9: note = Seed: FLAFVVFLL
FAAFVVFLT

SEQ ID NO: 17036 - protein, 9 aa, synthetic construct
  source 1..9: note = Seed: FLAFVVFLL
FAAFVVFLV

SEQ ID NO: 17037 - protein, 9 aa, synthetic construct
  source 1..9: note = Seed: FGAGAALQI
FAAGAALQA

SEQ ID NO: 17038 - protein, 9 aa, synthetic construct
  source 1..9: note = Seed: FGAGAALQI
FAAGAALQF

SEQ ID NO: 17039 - protein, 9 aa, synthetic construct
  source 1..9: note = Seed: FGAGAALQI
FAAGAALQI

SEQ ID NO: 17040 - protein, 9 aa, synthetic construct
  source 1..9: note = Seed: FGAGAALQI
FAAGAALQL

SEQ ID NO: 17041 - protein, 9 aa, synthetic construct
  source 1..9: note = Seed: FGAGAALQI
FAAGAALQM

SEQ ID NO: 17042 - protein, 9 aa, synthetic construct
  source 1..9: note = Seed: FGAGAALQI
FAAGAALQV

SEQ ID NO: 17043 - protein, 9 aa, synthetic construct
  source 1..9: note = Seed: FGAGAALQI
FAAGAALQY

SEQ ID NO: 17044 - protein, 9 aa, synthetic construct
  source 1..9: note = Seed: FIAGLIAIV
FAAGLIAIA

SEQ ID NO: 17045 - protein, 9 aa, synthetic construct
  source 1..9: note = Seed: FIAGLIAIV
FAAGLIAIF

SEQ ID NO: 17046 - protein, 9 aa, synthetic construct
  source 1..9: note = Seed: FIAGLIAIV
FAAGLIAII

SEQ ID NO: 17047 - protein, 9 aa, synthetic construct
  source 1..9: note = Seed: FIAGLIAIV
FAAGLIAIL

SEQ ID NO: 17048 - protein, 9 aa, synthetic construct
  source 1..9: note = Seed: FIAGLIAIV
FAAGLIAIM

SEQ ID NO: 17049 - protein, 9 aa, synthetic construct
  source 1..9: note = Seed: FIAGLIAIV
FAAGLIAIV

SEQ ID NO: 17050 - protein, 9 aa, synthetic construct
  source 1..9: note = Seed: FIAGLIAIV
FAAGLIAIY

SEQ ID NO: 17051 - protein, 9 aa, synthetic construct
  source 1..9: note = Seed: FLAHIQWMV
FAAHIQWMA

SEQ ID NO: 17052 - protein, 9 aa, synthetic construct
  source 1..9: note = Seed: FLAHIQWMV
FAAHIQWMI

SEQ ID NO: 17053 - protein, 9 aa, synthetic construct
  source 1..9: note = Seed: FLAHIQWMV
FAAHIQWML

SEQ ID NO: 17054 - protein, 9 aa, synthetic construct
  source 1..9: note = Seed: FLAHIQWMV
FAAHIQWMM

SEQ ID NO: 17055 - protein, 9 aa, synthetic construct
  source 1..9: note = Seed: FLAHIQWMV
FAAHIQWMT

SEQ ID NO: 17056 - protein, 9 aa, synthetic construct
  source 1..9: note = Seed: FLAHIQWMV
FAAHIQWMV

SEQ ID NO: 17057 - protein, 9 aa, synthetic construct
  source 1..9: note = Seed: FNAIATCDW
FAAIATCDW

SEQ ID NO: 17058 - protein, 8 aa, synthetic construct
  source 1..8: note = Seed: FGAISSVL
FAAISSVF

SEQ ID NO: 17059 - protein, 8 aa, synthetic construct
  source 1..8: note = Seed: FGAISSVL
FAAISSVL

SEQ ID NO: 17060 - protein, 8 aa, synthetic construct
  source 1..8: note = Seed: FGAISSVL
FAAISSVM

SEQ ID NO: 17061 - protein, 8 aa, synthetic construct
  source 1..8: note = Seed: FGAISSVL
FAAISSVY

SEQ ID NO: 17062 - protein, 9 aa, synthetic construct
  source 1..9: note = Seed: FLALCADSI
FAALCADSV

SEQ ID NO: 17063 - protein, 10 aa, synthetic construct
  source 1..10: note = Seed: FSALEPLVDL
FAALEPLVDF

SEQ ID NO: 17064 - protein, 10 aa, synthetic construct
  source 1..10: note = Seed: FSALEPLVDL
FAALEPLVDL

SEQ ID NO: 17065 - protein, 10 aa, synthetic construct
  source 1..10: note = Seed: FSALEPLVDL
FAALEPLVDM

SEQ ID NO: 17066 - protein, 10 aa, synthetic construct
  source 1..10: note = Seed: FSALEPLVDL
FAALEPLVDY

SEQ ID NO: 17067 - protein, 9 aa, synthetic construct
  source 1..9: note = Seed: FTALTQHGK
FAALTQHGK

SEQ ID NO: 17068 - protein, 10 aa, synthetic construct
  source 1..10: note = Seed: FTALTQHGKE
FAALTQHGKR

SEQ ID NO: 17069 - protein, 9 aa, synthetic construct
  source 1..9: note = Seed: FTALTQHGK
FAALTQHGR

SEQ ID NO: 17070 - protein, 8 aa, synthetic construct
  source 1..8: note = Seed: FIASFRLF
FAASFRLF

SEQ ID NO: 17071 - protein, 9 aa, synthetic construct
  source 1..9: note = Seed: FIASFRLFA
FAASFRLFA

SEQ ID NO: 17072 - protein, 10 aa, synthetic construct
  source 1..10: note = Seed: FIASFRLFAR
FAASFRLFAK

SEQ ID NO: 17073 - protein, 10 aa, synthetic construct
  source 1..10: note = Seed: FIASFRLFAR
FAASFRLFAR

SEQ ID NO: 17074 - protein, 9 aa, synthetic construct
  source 1..9: note = Seed: FIASFRLFA
FAASFRLFI

SEQ ID NO: 17075 - protein, 9 aa, synthetic construct
  source 1..9: note = Seed: FIASFRLFA
FAASFRLFL

SEQ ID NO: 17076 - protein, 9 aa, synthetic construct
  source 1..9: note = Seed: FIASFRLFA
FAASFRLFR

SEQ ID NO: 17077 - protein, 9 aa, synthetic construct
  source 1..9: note = Seed: FIASFRLFA
FAASFRLFV

SEQ ID NO: 17078 - protein, 8 aa, synthetic construct
  source 1..8: note = Seed: FIASFRLF
FAASFRLM

SEQ ID NO: 17079 - protein, 8 aa, synthetic construct
  source 1..8: note = Seed: FIASFRLF
FAASFRLY

SEQ ID NO: 17080 - protein, 10 aa, synthetic construct
  source 1..10: note = Seed: FFASFYYVWK
FAASFYYVWK

SEQ ID NO: 17081 - protein, 10 aa, synthetic construct
  source 1..10: note = Seed: FFASFYYVWK
FAASFYYVWR

SEQ ID NO: 17082 - protein, 9 aa, synthetic construct
  source 1..9: note = Seed: FFASFYYVW
FAASFYYVY

SEQ ID NO: 17083 - protein, 9 aa, synthetic construct
  source 1..9: note = Seed: FNATRFASV
FAATRFASA

SEQ ID NO: 17084 - protein, 9 aa, synthetic construct
  source 1..9: note = Seed: FNATRFASV
FAATRFASF

SEQ ID NO: 17085 - protein, 9 aa, synthetic construct
  source 1..9: note = Seed: FNATRFASV
FAATRFASH

SEQ ID NO: 17086 - protein, 9 aa, synthetic construct
  source 1..9: note = Seed: FNATRFASV
FAATRFASI

SEQ ID NO: 17087 - protein, 9 aa, synthetic construct
  source 1..9: note = Seed: FNATRFASV
FAATRFASL

SEQ ID NO: 17088 - protein, 9 aa, synthetic construct
  source 1..9: note = Seed: FNATRFASV
FAATRFASM

SEQ ID NO: 17089 - protein, 9 aa, synthetic construct
  source 1..9: note = Seed: FNATRFASV
FAATRFASV

SEQ ID NO: 17090 - protein, 10 aa, synthetic construct
  source 1..10: note = Seed: FNATRFASVY
FAATRFASVF

SEQ ID NO: 17091 - protein, 10 aa, synthetic construct
  source 1..10: note = Seed: FNATRFASVY
FAATRFASVI

SEQ ID NO: 17092 - protein, 10 aa, synthetic construct
  source 1..10: note = Seed: FNATRFASVY
FAATRFASVL

SEQ ID NO: 17093 - protein, 10 aa, synthetic construct
  source 1..10: note = Seed: FNATRFASVY
FAATRFASVM

SEQ ID NO: 17094 - protein, 10 aa, synthetic construct
  source 1..10: note = Seed: FNATRFASVY
FAATRFASVV

SEQ ID NO: 17095 - protein, 10 aa, synthetic construct
  source 1..10: note = Seed: FNATRFASVY
FAATRFASVW

SEQ ID NO: 17096 - protein, 10 aa, synthetic construct
  source 1..10: note = Seed: FNATRFASVY
FAATRFASVY

SEQ ID NO: 17097 - protein, 9 aa, synthetic construct
  source 1..9: note = Seed: FNATRFASV
FAATRFASW

SEQ ID NO: 17098 - protein, 9 aa, synthetic construct
  source 1..9: note = Seed: FNATRFASV
FAATRFASY

SEQ ID NO: 17099 - protein, 9 aa, synthetic construct
  source 1..9: note = Seed: FSAVGNICY
FAAVGNICF

SEQ ID NO: 17100 - protein, 9 aa, synthetic construct
  source 1..9: note = Seed: FSAVGNICY
FAAVGNICL

SEQ ID NO: 17101 - protein, 9 aa, synthetic construct
  source 1..9: note = Seed: FSAVGNICY
FAAVGNICM

SEQ ID NO: 17102 - protein, 9 aa, synthetic construct
  source 1..9: note = Seed: FSAVGNICY
FAAVGNICW

SEQ ID NO: 17103 - protein, 9 aa, synthetic construct
  source 1..9: note = Seed: FSAVGNICY
FAAVGNICY

SEQ ID NO: 17104 - protein, 10 aa, synthetic construct
  source 1..10: note = Seed: FSAVGNICYT
FAAVGNICYI

SEQ ID NO: 17105 - protein, 10 aa, synthetic construct
  source 1..10: note = Seed: FSAVGNICYT
FAAVGNICYV

SEQ ID NO: 17106 - protein, 9 aa, synthetic construct
  source 1..9: note = Seed: FLAYILFTR
FAAYILFTA

SEQ ID NO: 17107 - protein, 9 aa, synthetic construct
  source 1..9: note = Seed: FLAYILFTR
FAAYILFTI

SEQ ID NO: 17108 - protein, 9 aa, synthetic construct
  source 1..9: note = Seed: FLAYILFTR
FAAYILFTK

SEQ ID NO: 17109 - protein, 9 aa, synthetic construct
  source 1..9: note = Seed: FLAYILFTR
FAAYILFTL

SEQ ID NO: 17110 - protein, 9 aa, synthetic construct
  source 1..9: note = Seed: FLAYILFTR
FAAYILFTM

SEQ ID NO: 17111 - protein, 9 aa, synthetic construct
  source 1..9: note = Seed: FLAYILFTR
FAAYILFTR

SEQ ID NO: 17112 - protein, 10 aa, synthetic construct
  source 1..10: note = Seed: FLAYILFTRF
FAAYILFTRA

SEQ ID NO: 17113 - protein, 10 aa, synthetic construct
  source 1..10: note = Seed: FLAYILFTRF
FAAYILFTRC

SEQ ID NO: 17114 - protein, 10 aa, synthetic construct
  source 1..10: note = Seed: FLAYILFTRF
FAAYILFTRD

SEQ ID NO: 17115 - protein, 10 aa, synthetic construct
  source 1..10: note = Seed: FLAYILFTRF
FAAYILFTRE

SEQ ID NO: 17116 - protein, 10 aa, synthetic construct
  source 1..10: note = Seed: FLAYILFTRF
FAAYILFTRF

SEQ ID NO: 17117 - protein, 10 aa, synthetic construct
  source 1..10: note = Seed: FLAYILFTRF
FAAYILFTRG

SEQ ID NO: 17118 - protein, 10 aa, synthetic construct
  source 1..10: note = Seed: FLAYILFTRF
FAAYILFTRH

SEQ ID NO: 17119 - protein, 10 aa, synthetic construct
  source 1..10: note = Seed: FLAYILFTRF
FAAYILFTRI

SEQ ID NO: 17120 - protein, 10 aa, synthetic construct
  source 1..10: note = Seed: FLAYILFTRF
FAAYILFTRK

SEQ ID NO: 17121 - protein, 10 aa, synthetic construct
  source 1..10: note = Seed: FLAYILFTRF
FAAYILFTRL

SEQ ID NO: 17122 - protein, 10 aa, synthetic construct
  source 1..10: note = Seed: FLAYILFTRF
FAAYILFTRM

SEQ ID NO: 17123 - protein, 10 aa, synthetic construct
  source 1..10: note = Seed: FLAYILFTRF
FAAYILFTRN

SEQ ID NO: 17124 - protein, 10 aa, synthetic construct
  source 1..10: note = Seed: FLAYILFTRF
FAAYILFTRP

SEQ ID NO: 17125 - protein, 10 aa, synthetic construct
  source 1..10: note = Seed: FLAYILFTRF
FAAYILFTRQ

SEQ ID NO: 17126 - protein, 10 aa, synthetic construct
  source 1..10: note = Seed: FLAYILFTRF
FAAYILFTRR

SEQ ID NO: 17127 - protein, 10 aa, synthetic construct
  source 1..10: note = Seed: FLAYILFTRF
FAAYILFTRS

SEQ ID NO: 17128 - protein, 10 aa, synthetic construct
  source 1..10: note = Seed: FLAYILFTRF
FAAYILFTRT

SEQ ID NO: 17129 - protein, 10 aa, synthetic construct
  source 1..10: note = Seed: FLAYILFTRF
FAAYILFTRV

SEQ ID NO: 17130 - protein, 10 aa, synthetic construct
  source 1..10: note = Seed: FLAYILFTRF
FAAYILFTRW

SEQ ID NO: 17131 - protein, 10 aa, synthetic construct
  source 1..10: note = Seed: FLAYILFTRF
FAAYILFTRY

SEQ ID NO: 17132 - protein, 9 aa, synthetic construct
  source 1..9: note = Seed: FLAYILFTR
FAAYILFTV

SEQ ID NO: 17133 - protein, 9 aa, synthetic construct
  source 1..9: note = Seed: FLAYILFTR
FAAYILFTY

SEQ ID NO: 17134 - protein, 9 aa, synthetic construct
  source 1..9: note = Seed: FLCLFLLPS
FACLFLLPV

SEQ ID NO: 17135 - protein, 9 aa, synthetic construct
  source 1..9: note = Seed: FLCWHTNCY
FACWHTNCF

SEQ ID NO: 17136 - protein, 9 aa, synthetic construct
  source 1..9: note = Seed: FLCWHTNCY
FACWHTNCL

SEQ ID NO: 17137 - protein, 9 aa, synthetic construct
  source 1..9: note = Seed: FLCWHTNCY
FACWHTNCM

SEQ ID NO: 17138 - protein, 9 aa, synthetic construct
  source 1..9: note = Seed: FLCWHTNCY
FACWHTNCY

SEQ ID NO: 17139 - protein, 9 aa, synthetic construct
  source 1..9: note = Seed: FGDDTVIEV
FADDTVIEF

SEQ ID NO: 17140 - protein, 9 aa, synthetic construct
  source 1..9: note = Seed: FGDDTVIEV
FADDTVIEI

SEQ ID NO: 17141 - protein, 9 aa, synthetic construct
  source 1..9: note = Seed: FGDDTVIEV
FADDTVIEL

SEQ ID NO: 17142 - protein, 9 aa, synthetic construct
  source 1..9: note = Seed: FGDDTVIEV
FADDTVIEM

SEQ ID NO: 17143 - protein, 9 aa, synthetic construct
  source 1..9: note = Seed: FGDDTVIEV
FADDTVIEV

SEQ ID NO: 17144 - protein, 8 aa, synthetic construct
  source 1..8: note = Seed: FVDGVPFV
FADGVPFF

SEQ ID NO: 17145 - protein, 8 aa, synthetic construct
  source 1..8: note = Seed: FVDGVPFV
FADGVPFL

SEQ ID NO: 17146 - protein, 8 aa, synthetic construct
  source 1..8: note = Seed: FVDGVPFV
FADGVPFM

SEQ ID NO: 17147 - protein, 9 aa, synthetic construct
  source 1..9: note = Seed: FVDGVPFVV
FADGVPFVF

SEQ ID NO: 17148 - protein, 9 aa, synthetic construct
  source 1..9: note = Seed: FVDGVPFVV
FADGVPFVI

SEQ ID NO: 17149 - protein, 9 aa, synthetic construct
  source 1..9: note = Seed: FVDGVPFVV
FADGVPFVL

SEQ ID NO: 17150 - protein, 9 aa, synthetic construct
  source 1..9: note = Seed: FVDGVPFVV
FADGVPFVM

SEQ ID NO: 17151 - protein, 9 aa, synthetic construct
  source 1..9: note = Seed: FVDGVPFVV
FADGVPFVV

SEQ ID NO: 17152 - protein, 9 aa, synthetic construct
  source 1..9: note = Seed: FVDGVPFVV
FADGVPFVY

SEQ ID NO: 17153 - protein, 9 aa, synthetic construct
  source 1..9: note = Seed: FPDLNGDVV
FADLNGDVF

SEQ ID NO: 17154 - protein, 9 aa, synthetic construct
  source 1..9: note = Seed: FPDLNGDVV
FADLNGDVI

SEQ ID NO: 17155 - protein, 9 aa, synthetic construct
  source 1..9: note = Seed: FPDLNGDVV
FADLNGDVL

SEQ ID NO: 17156 - protein, 9 aa, synthetic construct
  source 1..9: note = Seed: FPDLNGDVV
FADLNGDVM

SEQ ID NO: 17157 - protein, 9 aa, synthetic construct
  source 1..9: note = Seed: FPDLNGDVV
FADLNGDVV

SEQ ID NO: 17158 - protein, 11 aa, synthetic construct
  source 1..11: note = Seed: FPDLNGDVVAI
FADLNGDVVAI

SEQ ID NO: 17159 - protein, 11 aa, synthetic construct
  source 1..11: note = Seed: FPDLNGDVVAI
FADLNGDVVAL

SEQ ID NO: 17160 - protein, 11 aa, synthetic construct
  source 1..11: note = Seed: FPDLNGDVVAI
FADLNGDVVAV

SEQ ID NO: 17161 - protein, 10 aa, synthetic construct
  source 1..10: note = Seed: FPDLNGDVVA
FADLNGDVVF

SEQ ID NO: 17162 - protein, 10 aa, synthetic construct
  source 1..10: note = Seed: FPDLNGDVVA
FADLNGDVVY

SEQ ID NO: 17163 - protein, 9 aa, synthetic construct
  source 1..9: note = Seed: FPDLNGDVV
FADLNGDVY

SEQ ID NO: 17164 - protein, 9 aa, synthetic construct
  source 1..9: note = Seed: FEEAALCTF
FAEAALCTF

SEQ ID NO: 17165 - protein, 9 aa, synthetic construct
  source 1..9: note = Seed: FEEAALCTF
FAEAALCTY

SEQ ID NO: 17166 - protein, 9 aa, synthetic construct
  source 1..9: note = Seed: FVFKNIDGY
FAFKNIDGF

SEQ ID NO: 17167 - protein, 9 aa, synthetic construct
  source 1..9: note = Seed: FVFKNIDGY
FAFKNIDGI

SEQ ID NO: 17168 - protein, 9 aa, synthetic construct
  source 1..9: note = Seed: FVFKNIDGY
FAFKNIDGK

SEQ ID NO: 17169 - protein, 9 aa, synthetic construct
  source 1..9: note = Seed: FVFKNIDGY
FAFKNIDGL

SEQ ID NO: 17170 - protein, 9 aa, synthetic construct
  source 1..9: note = Seed: FVFKNIDGY
FAFKNIDGM

SEQ ID NO: 17171 - protein, 9 aa, synthetic construct
  source 1..9: note = Seed: FVFKNIDGY
FAFKNIDGR

SEQ ID NO: 17172 - protein, 9 aa, synthetic construct
  source 1..9: note = Seed: FVFKNIDGY
FAFKNIDGV

SEQ ID NO: 17173 - protein, 9 aa, synthetic construct
  source 1..9: note = Seed: FVFKNIDGY
FAFKNIDGW

SEQ ID NO: 17174 - protein, 9 aa, synthetic construct
  source 1..9: note = Seed: FVFKNIDGY
FAFKNIDGY

SEQ ID NO: 17175 - protein, 10 aa, synthetic construct
  source 1..10: note = Seed: FVFKNIDGYF
FAFKNIDGYF

SEQ ID NO: 17176 - protein, 11 aa, synthetic construct
  source 1..11: note = Seed: FVFKNIDGYFK
FAFKNIDGYFK

SEQ ID NO: 17177 - protein, 11 aa, synthetic construct
  source 1..11: note = Seed: FVFKNIDGYFK
FAFKNIDGYFR

SEQ ID NO: 17178 - protein, 10 aa, synthetic construct
  source 1..10: note = Seed: FVFKNIDGYF
FAFKNIDGYM

SEQ ID NO: 17179 - protein, 10 aa, synthetic construct
  source 1..10: note = Seed: FVFKNIDGYF
FAFKNIDGYV

SEQ ID NO: 17180 - protein, 10 aa, synthetic construct
  source 1..10: note = Seed: FVFKNIDGYF
FAFKNIDGYW

SEQ ID NO: 17181 - protein, 10 aa, synthetic construct
  source 1..10: note = Seed: FVFKNIDGYF
FAFKNIDGYY

SEQ ID NO: 17182 - protein, 10 aa, synthetic construct
  source 1..10: note = Seed: FLFLTWICLL
FAFLTWICLV

SEQ ID NO: 17183 - protein, 10 aa, synthetic construct
  source 1..10: note = Seed: FPFNKWGKAR
FAFNKWGKAR

SEQ ID NO: 17184 - protein, 9 aa, synthetic construct
  source 1..9: note = Seed: FPFNKWGKA
FAFNKWGKY

SEQ ID NO: 17185 - protein, 9 aa, synthetic construct
  source 1..9: note = Seed: FKFRIDGDM
FAFRIDGDF

SEQ ID NO: 17186 - protein, 9 aa, synthetic construct
  source 1..9: note = Seed: FKFRIDGDM
FAFRIDGDY

SEQ ID NO: 17187 - protein, 9 aa, synthetic construct
  source 1..9: note = Seed: FLFVAAIFY
FAFVAAIFF

SEQ ID NO: 17188 - protein, 9 aa, synthetic construct
  source 1..9: note = Seed: FLFVAAIFY
FAFVAAIFL

SEQ ID NO: 17189 - protein, 9 aa, synthetic construct
  source 1..9: note = Seed: FLFVAAIFY
FAFVAAIFM

SEQ ID NO: 17190 - protein, 9 aa, synthetic construct
  source 1..9: note = Seed: FLFVAAIFY
FAFVAAIFY

SEQ ID NO: 17191 - protein, 10 aa, synthetic construct
  source 1..10: note = Seed: FLFVAAIFYL
FAFVAAIFYA

SEQ ID NO: 17192 - protein, 10 aa, synthetic construct
  source 1..10: note = Seed: FLFVAAIFYL
FAFVAAIFYI

SEQ ID NO: 17193 - protein, 10 aa, synthetic construct
  source 1..10: note = Seed: FLFVAAIFYL
FAFVAAIFYL

SEQ ID NO: 17194 - protein, 10 aa, synthetic construct
  source 1..10: note = Seed: FLFVAAIFYL
FAFVAAIFYV

SEQ ID NO: 17195 - protein, 10 aa, synthetic construct
  source 1..10: note = Seed: FLFVAAIFYL
FAFVAAIFYY

SEQ ID NO: 17196 - protein, 9 aa, synthetic construct
  source 1..9: note = Seed: FGGASCCLY
FAGASCCLY

SEQ ID NO: 17197 - protein, 9 aa, synthetic construct
  source 1..9: note = Seed: FGGCVFSYV
FAGCVFSYA

SEQ ID NO: 17198 - protein, 9 aa, synthetic construct
  source 1..9: note = Seed: FGGCVFSYV
FAGCVFSYI

SEQ ID NO: 17199 - protein, 9 aa, synthetic construct
  source 1..9: note = Seed: FGGCVFSYV
FAGCVFSYL

SEQ ID NO: 17200 - protein, 9 aa, synthetic construct
  source 1..9: note = Seed: FGGCVFSYV
FAGCVFSYV

SEQ ID NO: 17201 - protein, 10 aa, synthetic construct
  source 1..10: note = Seed: FNGIGVTQNV
FAGIGVTQNV

SEQ ID NO: 17202 - protein, 9 aa, synthetic construct
  source 1..9: note = Seed: FLGRYMSAL
FAGRYMSAF

SEQ ID NO: 17203 - protein, 9 aa, synthetic construct
  source 1..9: note = Seed: FLGRYMSAL
FAGRYMSAI

SEQ ID NO: 17204 - protein, 9 aa, synthetic construct
  source 1..9: note = Seed: FLGRYMSAL
FAGRYMSAL

SEQ ID NO: 17205 - protein, 9 aa, synthetic construct
  source 1..9: note = Seed: FLGRYMSAL
FAGRYMSAM

SEQ ID NO: 17206 - protein, 9 aa, synthetic construct
  source 1..9: note = Seed: FLGRYMSAL
FAGRYMSAV

SEQ ID NO: 17207 - protein, 9 aa, synthetic construct
  source 1..9: note = Seed: FLGRYMSAL
FAGRYMSAY

SEQ ID NO: 17208 - protein, 9 aa, synthetic construct
  source 1..9: note = Seed: FNGVSFSTF
FAGVSFSTF

SEQ ID NO: 17209 - protein, 9 aa, synthetic construct
  source 1..9: note = Seed: FNGVSFSTF
FAGVSFSTY

SEQ ID NO: 17210 - protein, 10 aa, synthetic construct
  source 1..10: note = Seed: FLGYFCTCYF
FAGYFCTCYV

SEQ ID NO: 17211 - protein, 10 aa, synthetic construct
  source 1..10: note = Seed: FLGYFCTCYF
FAGYFCTCYY

SEQ ID NO: 17212 - protein, 9 aa, synthetic construct
  source 1..9: note = Seed: FQHANLDSC
FAHANLDSI

SEQ ID NO: 17213 - protein, 9 aa, synthetic construct
  source 1..9: note = Seed: FQHANLDSC
FAHANLDSL

SEQ ID NO: 17214 - protein, 9 aa, synthetic construct
  source 1..9: note = Seed: FQHANLDSC
FAHANLDSV

SEQ ID NO: 17215 - protein, 9 aa, synthetic construct
  source 1..9: note = Seed: FLHFLPRVF
FAHFLPRVA

SEQ ID NO: 17216 - protein, 9 aa, synthetic construct
  source 1..9: note = Seed: FLHFLPRVF
FAHFLPRVF

SEQ ID NO: 17217 - protein, 9 aa, synthetic construct
  source 1..9: note = Seed: FLHFLPRVF
FAHFLPRVI

SEQ ID NO: 17218 - protein, 9 aa, synthetic construct
  source 1..9: note = Seed: FLHFLPRVF
FAHFLPRVL

SEQ ID NO: 17219 - protein, 9 aa, synthetic construct
  source 1..9: note = Seed: FLHFLPRVF
FAHFLPRVM

SEQ ID NO: 17220 - protein, 9 aa, synthetic construct
  source 1..9: note = Seed: FLHFLPRVF
FAHFLPRVV

SEQ ID NO: 17221 - protein, 9 aa, synthetic construct
  source 1..9: note = Seed: FLHFLPRVF
FAHFLPRVW

SEQ ID NO: 17222 - protein, 9 aa, synthetic construct
  source 1..9: note = Seed: FLHFLPRVF
FAHFLPRVY

SEQ ID NO: 17223 - protein, 9 aa, synthetic construct
  source 1..9: note = Seed: FSHSQLGGL
FAHSQLGGF

SEQ ID NO: 17224 - protein, 9 aa, synthetic construct
  source 1..9: note = Seed: FSHSQLGGL
FAHSQLGGI

SEQ ID NO: 17225 - protein, 9 aa, synthetic construct
  source 1..9: note = Seed: FSHSQLGGL
FAHSQLGGL

SEQ ID NO: 17226 - protein, 9 aa, synthetic construct
  source 1..9: note = Seed: FSHSQLGGL
FAHSQLGGM

SEQ ID NO: 17227 - protein, 9 aa, synthetic construct
  source 1..9: note = Seed: FSHSQLGGL
FAHSQLGGV

SEQ ID NO: 17228 - protein, 9 aa, synthetic construct
  source 1..9: note = Seed: FSHSQLGGL
FAHSQLGGW

SEQ ID NO: 17229 - protein, 9 aa, synthetic construct
  source 1..9: note = Seed: FSHSQLGGL
FAHSQLGGY

SEQ ID NO: 17230 - protein, 9 aa, synthetic construct
  source 1..9: note = Seed: FLHVTYVPA
FAHVTYVPA

SEQ ID NO: 17231 - protein, 9 aa, synthetic construct
  source 1..9: note = Seed: FLHVTYVPA
FAHVTYVPV

SEQ ID NO: 17232 - protein, 8 aa, synthetic construct
  source 1..8: note = Seed: FTIKGSFL
FAIKGSFF

SEQ ID NO: 17233 - protein, 8 aa, synthetic construct
  source 1..8: note = Seed: FTIKGSFL
FAIKGSFL

SEQ ID NO: 17234 - protein, 8 aa, synthetic construct
  source 1..8: note = Seed: FTIKGSFL
FAIKGSFM

SEQ ID NO: 17235 - protein, 8 aa, synthetic construct
  source 1..8: note = Seed: FTIKGSFL
FAIKGSFY

SEQ ID NO: 17236 - protein, 9 aa, synthetic construct
  source 1..9: note = Seed: FTINCQEPK
FAINCQEPK

SEQ ID NO: 17237 - protein, 9 aa, synthetic construct
  source 1..9: note = Seed: FTINCQEPK
FAINCQEPR

SEQ ID NO: 17238 - protein, 10 aa, synthetic construct
  source 1..10: note = Seed: FKIYSKHTPI
FAIYSKHTPA

SEQ ID NO: 17239 - protein, 10 aa, synthetic construct
  source 1..10: note = Seed: FKIYSKHTPI
FAIYSKHTPF

SEQ ID NO: 17240 - protein, 10 aa, synthetic construct
  source 1..10: note = Seed: FKIYSKHTPI
FAIYSKHTPI

SEQ ID NO: 17241 - protein, 10 aa, synthetic construct
  source 1..10: note = Seed: FKIYSKHTPI
FAIYSKHTPL

SEQ ID NO: 17242 - protein, 10 aa, synthetic construct
  source 1..10: note = Seed: FKIYSKHTPI
FAIYSKHTPM

SEQ ID NO: 17243 - protein, 10 aa, synthetic construct
  source 1..10: note = Seed: FKIYSKHTPI
FAIYSKHTPV

SEQ ID NO: 17244 - protein, 10 aa, synthetic construct
  source 1..10: note = Seed: FKIYSKHTPI
FAIYSKHTPY

SEQ ID NO: 17245 - protein, 9 aa, synthetic construct
  source 1..9: note = Seed: FYKENSYTT
FAKENSYTM

SEQ ID NO: 17246 - protein, 9 aa, synthetic construct
  source 1..9: note = Seed: FVKHKHAFL
FAKHKHAFF

SEQ ID NO: 17247 - protein, 9 aa, synthetic construct
  source 1..9: note = Seed: FVKHKHAFL
FAKHKHAFI

SEQ ID NO: 17248 - protein, 9 aa, synthetic construct
  source 1..9: note = Seed: FVKHKHAFL
FAKHKHAFL

SEQ ID NO: 17249 - protein, 10 aa, synthetic construct
  source 1..10: note = Seed: FVKHKHAFLC
FAKHKHAFLL

SEQ ID NO: 17250 - protein, 9 aa, synthetic construct
  source 1..9: note = Seed: FVKHKHAFL
FAKHKHAFM

SEQ ID NO: 17251 - protein, 9 aa, synthetic construct
  source 1..9: note = Seed: FVKHKHAFL
FAKHKHAFV

SEQ ID NO: 17252 - protein, 9 aa, synthetic construct
  source 1..9: note = Seed: FVKHKHAFL
FAKHKHAFY

SEQ ID NO: 17253 - protein, 8 aa, synthetic construct
  source 1..8: note = Seed: FVKHKHAF
FAKHKHAI

SEQ ID NO: 17254 - protein, 8 aa, synthetic construct
  source 1..8: note = Seed: FVKHKHAF
FAKHKHAL

SEQ ID NO: 17255 - protein, 8 aa, synthetic construct
  source 1..8: note = Seed: FVKHKHAF
FAKHKHAM

SEQ ID NO: 17256 - protein, 8 aa, synthetic construct
  source 1..8: note = Seed: FVKHKHAF
FAKHKHAV

SEQ ID NO: 17257 - protein, 9 aa, synthetic construct
  source 1..9: note = Seed: FRKSNLKPF
FAKSNLKPF

SEQ ID NO: 17258 - protein, 9 aa, synthetic construct
  source 1..9: note = Seed: FRKSNLKPF
FAKSNLKPY

SEQ ID NO: 17259 - protein, 9 aa, synthetic construct
  source 1..9: note = Seed: FLKTNCCRF
FAKTNCCRF

SEQ ID NO: 17260 - protein, 9 aa, synthetic construct
  source 1..9: note = Seed: FLKTNCCRF
FAKTNCCRM

SEQ ID NO: 17261 - protein, 9 aa, synthetic construct
  source 1..9: note = Seed: FLKTNCCRF
FAKTNCCRY

SEQ ID NO: 17262 - protein, 9 aa, synthetic construct
  source 1..9: note = Seed: FVLALLSDL
FALALLSDF

SEQ ID NO: 17263 - protein, 9 aa, synthetic construct
  source 1..9: note = Seed: FVLALLSDL
FALALLSDI

SEQ ID NO: 17264 - protein, 9 aa, synthetic construct
  source 1..9: note = Seed: FVLALLSDL
FALALLSDL

SEQ ID NO: 17265 - protein, 9 aa, synthetic construct
  source 1..9: note = Seed: FVLALLSDL
FALALLSDM

SEQ ID NO: 17266 - protein, 9 aa, synthetic construct
  source 1..9: note = Seed: FVLALLSDL
FALALLSDV

SEQ ID NO: 17267 - protein, 9 aa, synthetic construct
  source 1..9: note = Seed: FVLALLSDL
FALALLSDY

SEQ ID NO: 17268 - protein, 9 aa, synthetic construct
  source 1..9: note = Seed: FPLCANGQV
FALCANGQF

SEQ ID NO: 17269 - protein, 9 aa, synthetic construct
  source 1..9: note = Seed: FPLCANGQV
FALCANGQM

SEQ ID NO: 17270 - protein, 10 aa, synthetic construct
  source 1..10: note = Seed: FPLCANGQVF
FALCANGQVF

SEQ ID NO: 17271 - protein, 10 aa, synthetic construct
  source 1..10: note = Seed: FPLCANGQVF
FALCANGQVL

SEQ ID NO: 17272 - protein, 10 aa, synthetic construct
  source 1..10: note = Seed: FPLCANGQVF
FALCANGQVM

SEQ ID NO: 17273 - protein, 10 aa, synthetic construct
  source 1..10: note = Seed: FPLCANGQVF
FALCANGQVW

SEQ ID NO: 17274 - protein, 10 aa, synthetic construct
  source 1..10: note = Seed: FPLCANGQVF
FALCANGQVY

SEQ ID NO: 17275 - protein, 9 aa, synthetic construct
  source 1..9: note = Seed: FPLCANGQV
FALCANGQY

SEQ ID NO: 17276 - protein, 10 aa, synthetic construct
  source 1..10: note = Seed: FKLKDCVMYA
FALKDCVMYA

SEQ ID NO: 17277 - protein, 10 aa, synthetic construct
  source 1..10: note = Seed: FKLKDCVMYA
FALKDCVMYI

SEQ ID NO: 17278 - protein, 10 aa, synthetic construct
  source 1..10: note = Seed: FKLKDCVMYA
FALKDCVMYL

SEQ ID NO: 17279 - protein, 10 aa, synthetic construct
  source 1..10: note = Seed: FKLKDCVMYA
FALKDCVMYM

SEQ ID NO: 17280 - protein, 10 aa, synthetic construct
  source 1..10: note = Seed: FKLKDCVMYA
FALKDCVMYS

SEQ ID NO: 17281 - protein, 10 aa, synthetic construct
  source 1..10: note = Seed: FKLKDCVMYA
FALKDCVMYT

SEQ ID NO: 17282 - protein, 10 aa, synthetic construct
  source 1..10: note = Seed: FKLKDCVMYA
FALKDCVMYV

SEQ ID NO: 17283 - protein, 10 aa, synthetic construct
  source 1..10: note = Seed: FPLKLRGTAV
FALKLRGTAA

SEQ ID NO: 17284 - protein, 10 aa, synthetic construct
  source 1..10: note = Seed: FPLKLRGTAV
FALKLRGTAF

SEQ ID NO: 17285 - protein, 10 aa, synthetic construct
  source 1..10: note = Seed: FPLKLRGTAV
FALKLRGTAI

SEQ ID NO: 17286 - protein, 10 aa, synthetic construct
  source 1..10: note = Seed: FPLKLRGTAV
FALKLRGTAL

SEQ ID NO: 17287 - protein, 10 aa, synthetic construct
  source 1..10: note = Seed: FPLKLRGTAV
FALKLRGTAM

SEQ ID NO: 17288 - protein, 10 aa, synthetic construct
  source 1..10: note = Seed: FPLKLRGTAV
FALKLRGTAV

SEQ ID NO: 17289 - protein, 11 aa, synthetic construct
  source 1..11: note = Seed: FPLKLRGTAVM
FALKLRGTAVF

SEQ ID NO: 17290 - protein, 11 aa, synthetic construct
  source 1..11: note = Seed: FPLKLRGTAVM
FALKLRGTAVY

SEQ ID NO: 17291 - protein, 10 aa, synthetic construct
  source 1..10: note = Seed: FPLKLRGTAV
FALKLRGTAY

SEQ ID NO: 17292 - protein, 9 aa, synthetic construct
  source 1..9: note = Seed: FPLKLRGTA
FALKLRGTY

SEQ ID NO: 17293 - protein, 10 aa, synthetic construct
  source 1..10: note = Seed: FTLLLQLCTF
FALLLQLCTW

SEQ ID NO: 17294 - protein, 9 aa, synthetic construct
  source 1..9: note = Seed: FKLNEEIAI
FALNEEIAF

SEQ ID NO: 17295 - protein, 9 aa, synthetic construct
  source 1..9: note = Seed: FKLNEEIAI
FALNEEIAY

SEQ ID NO: 17296 - protein, 9 aa, synthetic construct
  source 1..9: note = Seed: FLLNKEMYL
FALNKEMYF

SEQ ID NO: 17297 - protein, 9 aa, synthetic construct
  source 1..9: note = Seed: FLLNKEMYL
FALNKEMYI

SEQ ID NO: 17298 - protein, 9 aa, synthetic construct
  source 1..9: note = Seed: FLLNKEMYL
FALNKEMYL

SEQ ID NO: 17299 - protein, 10 aa, synthetic construct
  source 1..10: note = Seed: FLLNKEMYLK
FALNKEMYLA

SEQ ID NO: 17300 - protein, 10 aa, synthetic construct
  source 1..10: note = Seed: FLLNKEMYLK
FALNKEMYLI

SEQ ID NO: 17301 - protein, 10 aa, synthetic construct
  source 1..10: note = Seed: FLLNKEMYLK
FALNKEMYLK

SEQ ID NO: 17302 - protein, 10 aa, synthetic construct
  source 1..10: note = Seed: FLLNKEMYLK
FALNKEMYLL

SEQ ID NO: 17303 - protein, 10 aa, synthetic construct
  source 1..10: note = Seed: FLLNKEMYLK
FALNKEMYLM

SEQ ID NO: 17304 - protein, 10 aa, synthetic construct
  source 1..10: note = Seed: FLLNKEMYLK
FALNKEMYLR

SEQ ID NO: 17305 - protein, 10 aa, synthetic construct
  source 1..10: note = Seed: FLLNKEMYLK
FALNKEMYLV

SEQ ID NO: 17306 - protein, 9 aa, synthetic construct
  source 1..9: note = Seed: FLLNKEMYL
FALNKEMYM

SEQ ID NO: 17307 - protein, 9 aa, synthetic construct
  source 1..9: note = Seed: FLLNKEMYL
FALNKEMYV

SEQ ID NO: 17308 - protein, 9 aa, synthetic construct
  source 1..9: note = Seed: FLLNKEMYL
FALNKEMYY

SEQ ID NO: 17309 - protein, 9 aa, synthetic construct
  source 1..9: note = Seed: FYLTNDVSF
FALTNDVSF

SEQ ID NO: 17310 - protein, 10 aa, synthetic construct
  source 1..10: note = Seed: FYLTNDVSFL
FALTNDVSFA

SEQ ID NO: 17311 - protein, 10 aa, synthetic construct
  source 1..10: note = Seed: FYLTNDVSFL
FALTNDVSFI

SEQ ID NO: 17312 - protein, 10 aa, synthetic construct
  source 1..10: note = Seed: FYLTNDVSFL
FALTNDVSFL

SEQ ID NO: 17313 - protein, 11 aa, synthetic construct
  source 1..11: note = Seed: FYLTNDVSFLA
FALTNDVSFLL

SEQ ID NO: 17314 - protein, 11 aa, synthetic construct
  source 1..11: note = Seed: FYLTNDVSFLA
FALTNDVSFLV

SEQ ID NO: 17315 - protein, 10 aa, synthetic construct
  source 1..10: note = Seed: FYLTNDVSFL
FALTNDVSFM

SEQ ID NO: 17316 - protein, 10 aa, synthetic construct
  source 1..10: note = Seed: FYLTNDVSFL
FALTNDVSFV

SEQ ID NO: 17317 - protein, 9 aa, synthetic construct
  source 1..9: note = Seed: FYLTNDVSF
FALTNDVSI

SEQ ID NO: 17318 - protein, 9 aa, synthetic construct
  source 1..9: note = Seed: FYLTNDVSF
FALTNDVSL

SEQ ID NO: 17319 - protein, 9 aa, synthetic construct
  source 1..9: note = Seed: FYLTNDVSF
FALTNDVSM

SEQ ID NO: 17320 - protein, 9 aa, synthetic construct
  source 1..9: note = Seed: FYLTNDVSF
FALTNDVSV

SEQ ID NO: 17321 - protein, 9 aa, synthetic construct
  source 1..9: note = Seed: FYLTNDVSF
FALTNDVSY

SEQ ID NO: 17322 - protein, 10 aa, synthetic construct
  source 1..10: note = Seed: FQLTPIAVQM
FALTPIAVQA

SEQ ID NO: 17323 - protein, 10 aa, synthetic construct
  source 1..10: note = Seed: FQLTPIAVQM
FALTPIAVQF

SEQ ID NO: 17324 - protein, 10 aa, synthetic construct
  source 1..10: note = Seed: FQLTPIAVQM
FALTPIAVQI

SEQ ID NO: 17325 - protein, 10 aa, synthetic construct
  source 1..10: note = Seed: FQLTPIAVQM
FALTPIAVQL

SEQ ID NO: 17326 - protein, 10 aa, synthetic construct
  source 1..10: note = Seed: FQLTPIAVQM
FALTPIAVQM

SEQ ID NO: 17327 - protein, 10 aa, synthetic construct
  source 1..10: note = Seed: FQLTPIAVQM
FALTPIAVQV

SEQ ID NO: 17328 - protein, 10 aa, synthetic construct
  source 1..10: note = Seed: FQLTPIAVQM
FALTPIAVQY

SEQ ID NO: 17329 - protein, 9 aa, synthetic construct
  source 1..9: note = Seed: FELTSMKYF
FALTSMKYF

SEQ ID NO: 17330 - protein, 10 aa, synthetic construct
  source 1..10: note = Seed: FELTSMKYFV
FALTSMKYFA

SEQ ID NO: 17331 - protein, 10 aa, synthetic construct
  source 1..10: note = Seed: FELTSMKYFV
FALTSMKYFI

SEQ ID NO: 17332 - protein, 10 aa, synthetic construct
  source 1..10: note = Seed: FELTSMKYFV
FALTSMKYFL

SEQ ID NO: 17333 - protein, 10 aa, synthetic construct
  source 1..10: note = Seed: FELTSMKYFV
FALTSMKYFM

SEQ ID NO: 17334 - protein, 10 aa, synthetic construct
  source 1..10: note = Seed: FELTSMKYFV
FALTSMKYFV

SEQ ID NO: 17335 - protein, 9 aa, synthetic construct
  source 1..9: note = Seed: FELTSMKYF
FALTSMKYY

SEQ ID NO: 17336 - protein, 9 aa, synthetic construct
  source 1..9: note = Seed: FGLVAEWFL
FALVAEWFI

SEQ ID NO: 17337 - protein, 9 aa, synthetic construct
  source 1..9: note = Seed: FGLVAEWFL
FALVAEWFL

SEQ ID NO: 17338 - protein, 10 aa, synthetic construct
  source 1..10: note = Seed: FGLVAEWFLA
FALVAEWFLA

SEQ ID NO: 17339 - protein, 11 aa, synthetic construct
  source 1..11: note = Seed: FGLVAEWFLAY
FALVAEWFLAY

SEQ ID NO: 17340 - protein, 10 aa, synthetic construct
  source 1..10: note = Seed: FGLVAEWFLA
FALVAEWFLI

SEQ ID NO: 17341 - protein, 10 aa, synthetic construct
  source 1..10: note = Seed: FGLVAEWFLA
FALVAEWFLL

SEQ ID NO: 17342 - protein, 10 aa, synthetic construct
  source 1..10: note = Seed: FGLVAEWFLA
FALVAEWFLM

SEQ ID NO: 17343 - protein, 10 aa, synthetic construct
  source 1..10: note = Seed: FGLVAEWFLA
FALVAEWFLV

SEQ ID NO: 17344 - protein, 9 aa, synthetic construct
  source 1..9: note = Seed: FGLVAEWFL
FALVAEWFV

SEQ ID NO: 17345 - protein, 10 aa, synthetic construct
  source 1..10: note = Seed: FVLWAHGFEL
FALWAHGFEA

SEQ ID NO: 17346 - protein, 10 aa, synthetic construct
  source 1..10: note = Seed: FVLWAHGFEL
FALWAHGFEF

SEQ ID NO: 17347 - protein, 10 aa, synthetic construct
  source 1..10: note = Seed: FVLWAHGFEL
FALWAHGFEI

SEQ ID NO: 17348 - protein, 10 aa, synthetic construct
  source 1..10: note = Seed: FVLWAHGFEL
FALWAHGFEL

SEQ ID NO: 17349 - protein, 11 aa, synthetic construct
  source 1..11: note = Seed: FVLWAHGFELT
FALWAHGFELA

SEQ ID NO: 17350 - protein, 11 aa, synthetic construct
  source 1..11: note = Seed: FVLWAHGFELT
FALWAHGFELC

SEQ ID NO: 17351 - protein, 11 aa, synthetic construct
  source 1..11: note = Seed: FVLWAHGFELT
FALWAHGFELD

SEQ ID NO: 17352 - protein, 11 aa, synthetic construct
  source 1..11: note = Seed: FVLWAHGFELT
FALWAHGFELE

SEQ ID NO: 17353 - protein, 11 aa, synthetic construct
  source 1..11: note = Seed: FVLWAHGFELT
FALWAHGFELF

SEQ ID NO: 17354 - protein, 11 aa, synthetic construct
  source 1..11: note = Seed: FVLWAHGFELT
FALWAHGFELG

SEQ ID NO: 17355 - protein, 11 aa, synthetic construct
  source 1..11: note = Seed: FVLWAHGFELT
FALWAHGFELH

SEQ ID NO: 17356 - protein, 11 aa, synthetic construct
  source 1..11: note = Seed: FVLWAHGFELT
FALWAHGFELI

SEQ ID NO: 17357 - protein, 11 aa, synthetic construct
  source 1..11: note = Seed: FVLWAHGFELT
FALWAHGFELK

SEQ ID NO: 17358 - protein, 11 aa, synthetic construct
  source 1..11: note = Seed: FVLWAHGFELT
FALWAHGFELL

SEQ ID NO: 17359 - protein, 11 aa, synthetic construct
  source 1..11: note = Seed: FVLWAHGFELT
FALWAHGFELM

SEQ ID NO: 17360 - protein, 11 aa, synthetic construct
  source 1..11: note = Seed: FVLWAHGFELT
FALWAHGFELN

SEQ ID NO: 17361 - protein, 11 aa, synthetic construct
  source 1..11: note = Seed: FVLWAHGFELT
FALWAHGFELP

SEQ ID NO: 17362 - protein, 11 aa, synthetic construct
  source 1..11: note = Seed: FVLWAHGFELT
FALWAHGFELQ

SEQ ID NO: 17363 - protein, 11 aa, synthetic construct
  source 1..11: note = Seed: FVLWAHGFELT
FALWAHGFELR

SEQ ID NO: 17364 - protein, 11 aa, synthetic construct
  source 1..11: note = Seed: FVLWAHGFELT
FALWAHGFELS

SEQ ID NO: 17365 - protein, 11 aa, synthetic construct
  source 1..11: note = Seed: FVLWAHGFELT
FALWAHGFELT

SEQ ID NO: 17366 - protein, 11 aa, synthetic construct
  source 1..11: note = Seed: FVLWAHGFELT
FALWAHGFELV

SEQ ID NO: 17367 - protein, 11 aa, synthetic construct
  source 1..11: note = Seed: FVLWAHGFELT
FALWAHGFELW

SEQ ID NO: 17368 - protein, 11 aa, synthetic construct
  source 1..11: note = Seed: FVLWAHGFELT
FALWAHGFELY

SEQ ID NO: 17369 - protein, 10 aa, synthetic construct
  source 1..10: note = Seed: FVLWAHGFEL
FALWAHGFEM

SEQ ID NO: 17370 - protein, 10 aa, synthetic construct
  source 1..10: note = Seed: FVLWAHGFEL
FALWAHGFES

SEQ ID NO: 17371 - protein, 10 aa, synthetic construct
  source 1..10: note = Seed: FVLWAHGFEL
FALWAHGFET

SEQ ID NO: 17372 - protein, 10 aa, synthetic construct
  source 1..10: note = Seed: FVLWAHGFEL
FALWAHGFEV

SEQ ID NO: 17373 - protein, 10 aa, synthetic construct
  source 1..10: note = Seed: FVLWAHGFEL
FALWAHGFEY

SEQ ID NO: 17374 - protein, 9 aa, synthetic construct
  source 1..9: note = Seed: FSLWVYKQF
FALWVYKQF

SEQ ID NO: 17375 - protein, 9 aa, synthetic construct
  source 1..9: note = Seed: FSLWVYKQF
FALWVYKQI

SEQ ID NO: 17376 - protein, 9 aa, synthetic construct
  source 1..9: note = Seed: FSLWVYKQF
FALWVYKQL

SEQ ID NO: 17377 - protein, 9 aa, synthetic construct
  source 1..9: note = Seed: FSLWVYKQF
FALWVYKQM

SEQ ID NO: 17378 - protein, 9 aa, synthetic construct
  source 1..9: note = Seed: FSLWVYKQF
FALWVYKQV

SEQ ID NO: 17379 - protein, 9 aa, synthetic construct
  source 1..9: note = Seed: FSLWVYKQF
FALWVYKQW

SEQ ID NO: 17380 - protein, 9 aa, synthetic construct
  source 1..9: note = Seed: FSLWVYKQF
FALWVYKQY

SEQ ID NO: 17381 - protein, 9 aa, synthetic construct
  source 1..9: note = Seed: FHLYLQYIR
FALYLQYIR

SEQ ID NO: 17382 - protein, 9 aa, synthetic construct
  source 1..9: note = Seed: FAMMFVKHK
FAMMFVKHR

SEQ ID NO: 17383 - protein, 10 aa, synthetic construct
  source 1..10: note = Seed: FSMMILSDDA
FAMMILSDDL

SEQ ID NO: 17384 - protein, 10 aa, synthetic construct
  source 1..10: note = Seed: FSMMILSDDA
FAMMILSDDV

SEQ ID NO: 17385 - protein, 10 aa, synthetic construct
  source 1..10: note = Seed: FKMNYQVNGY
FAMNYQVNGY

SEQ ID NO: 17386 - protein, 9 aa, synthetic construct
  source 1..9: note = Seed: FAMQMAYRF
FAMQMAYRI

SEQ ID NO: 17387 - protein, 9 aa, synthetic construct
  source 1..9: note = Seed: FAMQMAYRF
FAMQMAYRL

SEQ ID NO: 17388 - protein, 9 aa, synthetic construct
  source 1..9: note = Seed: FAMQMAYRF
FAMQMAYRM

SEQ ID NO: 17389 - protein, 9 aa, synthetic construct
  source 1..9: note = Seed: FAMQMAYRF
FAMQMAYRV

SEQ ID NO: 17390 - protein, 9 aa, synthetic construct
  source 1..9: note = Seed: FAMQMAYRF
FAMQMAYRW

SEQ ID NO: 17391 - protein, 9 aa, synthetic construct
  source 1..9: note = Seed: FAMQMAYRF
FAMQMAYRY

SEQ ID NO: 17392 - protein, 8 aa, synthetic construct
  source 1..8: note = Seed: FDMSKFPL
FAMSKFPF

SEQ ID NO: 17393 - protein, 8 aa, synthetic construct
  source 1..8: note = Seed: FDMSKFPL
FAMSKFPI

SEQ ID NO: 17394 - protein, 8 aa, synthetic construct
  source 1..8: note = Seed: FDMSKFPL
FAMSKFPL

SEQ ID NO: 17395 - protein, 10 aa, synthetic construct
  source 1..10: note = Seed: FDMSKFPLKL
FAMSKFPLKA

SEQ ID NO: 17396 - protein, 10 aa, synthetic construct
  source 1..10: note = Seed: FDMSKFPLKL
FAMSKFPLKI

SEQ ID NO: 17397 - protein, 10 aa, synthetic construct
  source 1..10: note = Seed: FDMSKFPLKL
FAMSKFPLKL

SEQ ID NO: 17398 - protein, 10 aa, synthetic construct
  source 1..10: note = Seed: FDMSKFPLKL
FAMSKFPLKV

SEQ ID NO: 17399 - protein, 8 aa, synthetic construct
  source 1..8: note = Seed: FDMSKFPL
FAMSKFPM

SEQ ID NO: 17400 - protein, 8 aa, synthetic construct
  source 1..8: note = Seed: FDMSKFPL
FAMSKFPV

SEQ ID NO: 17401 - protein, 10 aa, synthetic construct
  source 1..10: note = Seed: FNMVYMPASW
FAMVYMPASF

SEQ ID NO: 17402 - protein, 10 aa, synthetic construct
  source 1..10: note = Seed: FNMVYMPASW
FAMVYMPASM

SEQ ID NO: 17403 - protein, 10 aa, synthetic construct
  source 1..10: note = Seed: FNMVYMPASW
FAMVYMPASW

SEQ ID NO: 17404 - protein, 10 aa, synthetic construct
  source 1..10: note = Seed: FNMVYMPASW
FAMVYMPASY

SEQ ID NO: 17405 - protein, 9 aa, synthetic construct
  source 1..9: note = Seed: FENKTTLPV
FANKTTLPF

SEQ ID NO: 17406 - protein, 9 aa, synthetic construct
  source 1..9: note = Seed: FENKTTLPV
FANKTTLPL

SEQ ID NO: 17407 - protein, 9 aa, synthetic construct
  source 1..9: note = Seed: FENKTTLPV
FANKTTLPM

SEQ ID NO: 17408 - protein, 9 aa, synthetic construct
  source 1..9: note = Seed: FENKTTLPV
FANKTTLPY

SEQ ID NO: 17409 - protein, 9 aa, synthetic construct
  source 1..9: note = Seed: FVNLKQLPF
FANLKQLPA

SEQ ID NO: 17410 - protein, 9 aa, synthetic construct
  source 1..9: note = Seed: FVNLKQLPF
FANLKQLPF

SEQ ID NO: 17411 - protein, 10 aa, synthetic construct
  source 1..10: note = Seed: FVNLKQLPFF
FANLKQLPFF

SEQ ID NO: 17412 - protein, 10 aa, synthetic construct
  source 1..10: note = Seed: FVNLKQLPFF
FANLKQLPFY

SEQ ID NO: 17413 - protein, 9 aa, synthetic construct
  source 1..9: note = Seed: FVNLKQLPF
FANLKQLPI

SEQ ID NO: 17414 - protein, 9 aa, synthetic construct
  source 1..9: note = Seed: FVNLKQLPF
FANLKQLPL

SEQ ID NO: 17415 - protein, 9 aa, synthetic construct
  source 1..9: note = Seed: FVNLKQLPF
FANLKQLPM

SEQ ID NO: 17416 - protein, 9 aa, synthetic construct
  source 1..9: note = Seed: FVNLKQLPF
FANLKQLPV

SEQ ID NO: 17417 - protein, 9 aa, synthetic construct
  source 1..9: note = Seed: FVNLKQLPF
FANLKQLPW

SEQ ID NO: 17418 - protein, 9 aa, synthetic construct
  source 1..9: note = Seed: FVNLKQLPF
FANLKQLPY

SEQ ID NO: 17419 - protein, 9 aa, synthetic construct
  source 1..9: note = Seed: FTNVYADSF
FANVYADSF

SEQ ID NO: 17420 - protein, 10 aa, synthetic construct
  source 1..10: note = Seed: FTNVYADSFV
FANVYADSFV

SEQ ID NO: 17421 - protein, 11 aa, synthetic construct
  source 1..11: note = Seed: FTNVYADSFVI
FANVYADSFVV

SEQ ID NO: 17422 - protein, 11 aa, synthetic construct
  source 1..11: note = Seed: FTNVYADSFVI
FANVYADSFVW

SEQ ID NO: 17423 - protein, 9 aa, synthetic construct
  source 1..9: note = Seed: FTNVYADSF
FANVYADSI

SEQ ID NO: 17424 - protein, 9 aa, synthetic construct
  source 1..9: note = Seed: FTNVYADSF
FANVYADSL

SEQ ID NO: 17425 - protein, 9 aa, synthetic construct
  source 1..9: note = Seed: FTNVYADSF
FANVYADSM

SEQ ID NO: 17426 - protein, 9 aa, synthetic construct
  source 1..9: note = Seed: FTNVYADSF
FANVYADSV

SEQ ID NO: 17427 - protein, 9 aa, synthetic construct
  source 1..9: note = Seed: FTNVYADSF
FANVYADSW

SEQ ID NO: 17428 - protein, 9 aa, synthetic construct
  source 1..9: note = Seed: FTNVYADSF
FANVYADSY

SEQ ID NO: 17429 - protein, 9 aa, synthetic construct
  source 1..9: note = Seed: FSNYLKRRV
FANYLKRRF

SEQ ID NO: 17430 - protein, 9 aa, synthetic construct
  source 1..9: note = Seed: FSNYLKRRV
FANYLKRRI

SEQ ID NO: 17431 - protein, 9 aa, synthetic construct
  source 1..9: note = Seed: FSNYLKRRV
FANYLKRRL

SEQ ID NO: 17432 - protein, 9 aa, synthetic construct
  source 1..9: note = Seed: FSNYLKRRV
FANYLKRRM

SEQ ID NO: 17433 - protein, 9 aa, synthetic construct
  source 1..9: note = Seed: FSNYLKRRV
FANYLKRRV

SEQ ID NO: 17434 - protein, 10 aa, synthetic construct
  source 1..10: note = Seed: FSNYLKRRVV
FANYLKRRVF

SEQ ID NO: 17435 - protein, 10 aa, synthetic construct
  source 1..10: note = Seed: FSNYLKRRVV
FANYLKRRVL

SEQ ID NO: 17436 - protein, 10 aa, synthetic construct
  source 1..10: note = Seed: FSNYLKRRVV
FANYLKRRVM

SEQ ID NO: 17437 - protein, 10 aa, synthetic construct
  source 1..10: note = Seed: FSNYLKRRVV
FANYLKRRVY

SEQ ID NO: 17438 - protein, 9 aa, synthetic construct
  source 1..9: note = Seed: FSNYLKRRV
FANYLKRRY

SEQ ID NO: 17439 - protein, 9 aa, synthetic construct
  source 1..9: note = Seed: FNPETNILL
FAPETNILL

SEQ ID NO: 17440 - protein, 9 aa, synthetic construct
  source 1..9: note = Seed: FNPETNILL
FAPETNILM

SEQ ID NO: 17441 - protein, 10 aa, synthetic construct
  source 1..10: note = Seed: FTPFDVVRQC
FAPFDVVRQA

SEQ ID NO: 17442 - protein, 10 aa, synthetic construct
  source 1..10: note = Seed: FLPFFSNVTW
FAPFFSNVTF

SEQ ID NO: 17443 - protein, 10 aa, synthetic construct
  source 1..10: note = Seed: FLPFFSNVTW
FAPFFSNVTH

SEQ ID NO: 17444 - protein, 10 aa, synthetic construct
  source 1..10: note = Seed: FLPFFSNVTW
FAPFFSNVTL

SEQ ID NO: 17445 - protein, 10 aa, synthetic construct
  source 1..10: note = Seed: FLPFFSNVTW
FAPFFSNVTM

SEQ ID NO: 17446 - protein, 10 aa, synthetic construct
  source 1..10: note = Seed: FLPFFSNVTW
FAPFFSNVTW

SEQ ID NO: 17447 - protein, 10 aa, synthetic construct
  source 1..10: note = Seed: FLPFFSNVTW
FAPFFSNVTY

SEQ ID NO: 17448 - protein, 9 aa, synthetic construct
  source 1..9: note = Seed: FLPFQQFGR
FAPFQQFGK

SEQ ID NO: 17449 - protein, 9 aa, synthetic construct
  source 1..9: note = Seed: FLPFQQFGR
FAPFQQFGR

SEQ ID NO: 17450 - protein, 10 aa, synthetic construct
  source 1..10: note = Seed: FTPLVPFWIT
FAPLVPFWIA

SEQ ID NO: 17451 - protein, 11 aa, synthetic construct
  source 1..11: note = Seed: FTPLVPFWITI
FAPLVPFWITV

SEQ ID NO: 17452 - protein, 9 aa, synthetic construct
  source 1..9: note = Seed: FTPLVPFWI
FAPLVPFWV

SEQ ID NO: 17453 - protein, 9 aa, synthetic construct
  source 1..9: note = Seed: FLPRVFSAV
FAPRVFSAA

SEQ ID NO: 17454 - protein, 9 aa, synthetic construct
  source 1..9: note = Seed: FLPRVFSAV
FAPRVFSAF

SEQ ID NO: 17455 - protein, 9 aa, synthetic construct
  source 1..9: note = Seed: FLPRVFSAV
FAPRVFSAI

SEQ ID NO: 17456 - protein, 9 aa, synthetic construct
  source 1..9: note = Seed: FLPRVFSAV
FAPRVFSAL

SEQ ID NO: 17457 - protein, 9 aa, synthetic construct
  source 1..9: note = Seed: FLPRVFSAV
FAPRVFSAM

SEQ ID NO: 17458 - protein, 9 aa, synthetic construct
  source 1..9: note = Seed: FLPRVFSAV
FAPRVFSAV

SEQ ID NO: 17459 - protein, 10 aa, synthetic construct
  source 1..10: note = Seed: FLPRVFSAVG
FAPRVFSAVF

SEQ ID NO: 17460 - protein, 10 aa, synthetic construct
  source 1..10: note = Seed: FLPRVFSAVG
FAPRVFSAVI

SEQ ID NO: 17461 - protein, 10 aa, synthetic construct
  source 1..10: note = Seed: FLPRVFSAVG
FAPRVFSAVL

SEQ ID NO: 17462 - protein, 10 aa, synthetic construct
  source 1..10: note = Seed: FLPRVFSAVG
FAPRVFSAVM

SEQ ID NO: 17463 - protein, 10 aa, synthetic construct
  source 1..10: note = Seed: FLPRVFSAVG
FAPRVFSAVV

SEQ ID NO: 17464 - protein, 9 aa, synthetic construct
  source 1..9: note = Seed: FLPRVFSAV
FAPRVFSAY

SEQ ID NO: 17465 - protein, 9 aa, synthetic construct
  source 1..9: note = Seed: FAPSASAFF
FAPSASAFI

SEQ ID NO: 17466 - protein, 9 aa, synthetic construct
  source 1..9: note = Seed: FAPSASAFF
FAPSASAFL

SEQ ID NO: 17467 - protein, 9 aa, synthetic construct
  source 1..9: note = Seed: FAPSASAFF
FAPSASAFM

SEQ ID NO: 17468 - protein, 9 aa, synthetic construct
  source 1..9: note = Seed: FAPSASAFF
FAPSASAFV

SEQ ID NO: 17469 - protein, 9 aa, synthetic construct
  source 1..9: note = Seed: FAPSASAFF
FAPSASAFY

SEQ ID NO: 17470 - protein, 8 aa, synthetic construct
  source 1..8: note = Seed: FAPSASAF
FAPSASAL

SEQ ID NO: 17471 - protein, 8 aa, synthetic construct
  source 1..8: note = Seed: FAPSASAF
FAPSASAM

SEQ ID NO: 17472 - protein, 8 aa, synthetic construct
  source 1..8: note = Seed: FAPSASAF
FAPSASAY

SEQ ID NO: 17473 - protein, 9 aa, synthetic construct
  source 1..9: note = Seed: FPQSAPHGV
FAQSAPHGF

SEQ ID NO: 17474 - protein, 9 aa, synthetic construct
  source 1..9: note = Seed: FPQSAPHGV
FAQSAPHGM

SEQ ID NO: 17475 - protein, 11 aa, synthetic construct
  source 1..11: note = Seed: FPQSAPHGVVF
FAQSAPHGVVF

SEQ ID NO: 17476 - protein, 11 aa, synthetic construct
  source 1..11: note = Seed: FPQSAPHGVVF
FAQSAPHGVVL

SEQ ID NO: 17477 - protein, 11 aa, synthetic construct
  source 1..11: note = Seed: FPQSAPHGVVF
FAQSAPHGVVM

SEQ ID NO: 17478 - protein, 11 aa, synthetic construct
  source 1..11: note = Seed: FPQSAPHGVVF
FAQSAPHGVVW

SEQ ID NO: 17479 - protein, 11 aa, synthetic construct
  source 1..11: note = Seed: FPQSAPHGVVF
FAQSAPHGVVY

SEQ ID NO: 17480 - protein, 9 aa, synthetic construct
  source 1..9: note = Seed: FPQSAPHGV
FAQSAPHGY

SEQ ID NO: 17481 - protein, 9 aa, synthetic construct
  source 1..9: note = Seed: FLQSINFVR
FAQSINFVK

SEQ ID NO: 17482 - protein, 9 aa, synthetic construct
  source 1..9: note = Seed: FLQSINFVR
FAQSINFVR

SEQ ID NO: 17483 - protein, 10 aa, synthetic construct
  source 1..10: note = Seed: FTQSRNLQEF
FAQSRNLQEF

SEQ ID NO: 17484 - protein, 10 aa, synthetic construct
  source 1..10: note = Seed: FTQSRNLQEF
FAQSRNLQEL

SEQ ID NO: 17485 - protein, 10 aa, synthetic construct
  source 1..10: note = Seed: FTQSRNLQEF
FAQSRNLQEM

SEQ ID NO: 17486 - protein, 10 aa, synthetic construct
  source 1..10: note = Seed: FTQSRNLQEF
FAQSRNLQEY

SEQ ID NO: 17487 - protein, 8 aa, synthetic construct
  source 1..8: note = Seed: FAQVKQIY
FAQVKQIM

SEQ ID NO: 17488 - protein, 9 aa, synthetic construct
  source 1..9: note = Seed: FAQVKQIYK
FAQVKQIYR

SEQ ID NO: 17489 - protein, 9 aa, synthetic construct
  source 1..9: note = Seed: FLRDGWEIV
FARDGWEIF

SEQ ID NO: 17490 - protein, 9 aa, synthetic construct
  source 1..9: note = Seed: FLRDGWEIV
FARDGWEII

SEQ ID NO: 17491 - protein, 9 aa, synthetic construct
  source 1..9: note = Seed: FLRDGWEIV
FARDGWEIL

SEQ ID NO: 17492 - protein, 9 aa, synthetic construct
  source 1..9: note = Seed: FLRDGWEIV
FARDGWEIM

SEQ ID NO: 17493 - protein, 9 aa, synthetic construct
  source 1..9: note = Seed: FLRDGWEIV
FARDGWEIV

SEQ ID NO: 17494 - protein, 9 aa, synthetic construct
  source 1..9: note = Seed: FLRDGWEIV
FARDGWEIY

SEQ ID NO: 17495 - protein, 9 aa, synthetic construct
  source 1..9: note = Seed: FPREGVFVS
FAREGVFVA

SEQ ID NO: 17496 - protein, 9 aa, synthetic construct
  source 1..9: note = Seed: FPREGVFVS
FAREGVFVF

SEQ ID NO: 17497 - protein, 9 aa, synthetic construct
  source 1..9: note = Seed: FPREGVFVS
FAREGVFVM

SEQ ID NO: 17498 - protein, 9 aa, synthetic construct
  source 1..9: note = Seed: FPREGVFVS
FAREGVFVY

SEQ ID NO: 17499 - protein, 10 aa, synthetic construct
  source 1..10: note = Seed: FTRFFYVLGL
FARFFYVLGK

SEQ ID NO: 17500 - protein, 10 aa, synthetic construct
  source 1..10: note = Seed: FTRFFYVLGL
FARFFYVLGL

SEQ ID NO: 17501 - protein, 10 aa, synthetic construct
  source 1..10: note = Seed: FTRFFYVLGL
FARFFYVLGV

SEQ ID NO: 17502 - protein, 9 aa, synthetic construct
  source 1..9: note = Seed: FTRFFYVLG
FARFFYVLK

SEQ ID NO: 17503 - protein, 10 aa, synthetic construct
  source 1..10: note = Seed: FTRGVYYPDK
FARGVYYPDR

SEQ ID NO: 17504 - protein, 9 aa, synthetic construct
  source 1..9: note = Seed: FISAARQGF
FASAARQGF

SEQ ID NO: 17505 - protein, 9 aa, synthetic construct
  source 1..9: note = Seed: FISAARQGF
FASAARQGI

SEQ ID NO: 17506 - protein, 9 aa, synthetic construct
  source 1..9: note = Seed: FISAARQGF
FASAARQGL

SEQ ID NO: 17507 - protein, 9 aa, synthetic construct
  source 1..9: note = Seed: FISAARQGF
FASAARQGM

SEQ ID NO: 17508 - protein, 9 aa, synthetic construct
  source 1..9: note = Seed: FISAARQGF
FASAARQGV

SEQ ID NO: 17509 - protein, 9 aa, synthetic construct
  source 1..9: note = Seed: FISAARQGF
FASAARQGY

SEQ ID NO: 17510 - protein, 9 aa, synthetic construct
  source 1..9: note = Seed: FQSAVKRTI
FASAVKRTA

SEQ ID NO: 17511 - protein, 9 aa, synthetic construct
  source 1..9: note = Seed: FQSAVKRTI
FASAVKRTF

SEQ ID NO: 17512 - protein, 9 aa, synthetic construct
  source 1..9: note = Seed: FQSAVKRTI
FASAVKRTI

SEQ ID NO: 17513 - protein, 9 aa, synthetic construct
  source 1..9: note = Seed: FQSAVKRTI
FASAVKRTL

SEQ ID NO: 17514 - protein, 9 aa, synthetic construct
  source 1..9: note = Seed: FQSAVKRTI
FASAVKRTM

SEQ ID NO: 17515 - protein, 9 aa, synthetic construct
  source 1..9: note = Seed: FQSAVKRTI
FASAVKRTV

SEQ ID NO: 17516 - protein, 9 aa, synthetic construct
  source 1..9: note = Seed: FQSAVKRTI
FASAVKRTY

SEQ ID NO: 17517 - protein, 10 aa, synthetic construct
  source 1..10: note = Seed: FTSDLATNNL
FASDLATNNV

SEQ ID NO: 17518 - protein, 9 aa, synthetic construct
  source 1..9: note = Seed: FTSDYYQLY
FASDYYQLA

SEQ ID NO: 17519 - protein, 9 aa, synthetic construct
  source 1..9: note = Seed: FTSDYYQLY
FASDYYQLF

SEQ ID NO: 17520 - protein, 9 aa, synthetic construct
  source 1..9: note = Seed: FTSDYYQLY
FASDYYQLH

SEQ ID NO: 17521 - protein, 9 aa, synthetic construct
  source 1..9: note = Seed: FTSDYYQLY
FASDYYQLI

SEQ ID NO: 17522 - protein, 9 aa, synthetic construct
  source 1..9: note = Seed: FTSDYYQLY
FASDYYQLK

SEQ ID NO: 17523 - protein, 9 aa, synthetic construct
  source 1..9: note = Seed: FTSDYYQLY
FASDYYQLL

SEQ ID NO: 17524 - protein, 9 aa, synthetic construct
  source 1..9: note = Seed: FTSDYYQLY
FASDYYQLM

SEQ ID NO: 17525 - protein, 9 aa, synthetic construct
  source 1..9: note = Seed: FTSDYYQLY
FASDYYQLR

SEQ ID NO: 17526 - protein, 9 aa, synthetic construct
  source 1..9: note = Seed: FTSDYYQLY
FASDYYQLV

SEQ ID NO: 17527 - protein, 9 aa, synthetic construct
  source 1..9: note = Seed: FTSDYYQLY
FASDYYQLW

SEQ ID NO: 17528 - protein, 9 aa, synthetic construct
  source 1..9: note = Seed: FTSDYYQLY
FASDYYQLY

SEQ ID NO: 17529 - protein, 10 aa, synthetic construct
  source 1..10: note = Seed: FTSDYYQLYS
FASDYYQLYF

SEQ ID NO: 17530 - protein, 10 aa, synthetic construct
  source 1..10: note = Seed: FTSDYYQLYS
FASDYYQLYM

SEQ ID NO: 17531 - protein, 10 aa, synthetic construct
  source 1..10: note = Seed: FTSDYYQLYS
FASDYYQLYY

SEQ ID NO: 17532 - protein, 8 aa, synthetic construct
  source 1..8: note = Seed: FTSDYYQL
FASDYYQM

SEQ ID NO: 17533 - protein, 9 aa, synthetic construct
  source 1..9: note = Seed: FASFYYVWK
FASFYYVWR

SEQ ID NO: 17534 - protein, 9 aa, synthetic construct
  source 1..9: note = Seed: FVSLAIDAY
FASLAIDAF

SEQ ID NO: 17535 - protein, 9 aa, synthetic construct
  source 1..9: note = Seed: FVSLAIDAY
FASLAIDAI

SEQ ID NO: 17536 - protein, 9 aa, synthetic construct
  source 1..9: note = Seed: FVSLAIDAY
FASLAIDAL

SEQ ID NO: 17537 - protein, 9 aa, synthetic construct
  source 1..9: note = Seed: FVSLAIDAY
FASLAIDAM

SEQ ID NO: 17538 - protein, 9 aa, synthetic construct
  source 1..9: note = Seed: FVSLAIDAY
FASLAIDAV

SEQ ID NO: 17539 - protein, 9 aa, synthetic construct
  source 1..9: note = Seed: FVSLAIDAY
FASLAIDAY

SEQ ID NO: 17540 - protein, 9 aa, synthetic construct
  source 1..9: note = Seed: FVSNGTHWF
FASNGTHWF

SEQ ID NO: 17541 - protein, 9 aa, synthetic construct
  source 1..9: note = Seed: FVSNGTHWF
FASNGTHWI

SEQ ID NO: 17542 - protein, 9 aa, synthetic construct
  source 1..9: note = Seed: FVSNGTHWF
FASNGTHWL

SEQ ID NO: 17543 - protein, 9 aa, synthetic construct
  source 1..9: note = Seed: FVSNGTHWF
FASNGTHWM

SEQ ID NO: 17544 - protein, 9 aa, synthetic construct
  source 1..9: note = Seed: FVSNGTHWF
FASNGTHWV

SEQ ID NO: 17545 - protein, 9 aa, synthetic construct
  source 1..9: note = Seed: FVSNGTHWF
FASNGTHWW

SEQ ID NO: 17546 - protein, 9 aa, synthetic construct
  source 1..9: note = Seed: FVSNGTHWF
FASNGTHWY

SEQ ID NO: 17547 - protein, 9 aa, synthetic construct
  source 1..9: note = Seed: FISNSWLMW
FASNSWLMF

SEQ ID NO: 17548 - protein, 9 aa, synthetic construct
  source 1..9: note = Seed: FISNSWLMW
FASNSWLMM

SEQ ID NO: 17549 - protein, 9 aa, synthetic construct
  source 1..9: note = Seed: FISNSWLMW
FASNSWLMW

SEQ ID NO: 17550 - protein, 10 aa, synthetic construct
  source 1..10: note = Seed: FISNSWLMWL
FASNSWLMWV

SEQ ID NO: 17551 - protein, 9 aa, synthetic construct
  source 1..9: note = Seed: FISNSWLMW
FASNSWLMY

SEQ ID NO: 17552 - protein, 8 aa, synthetic construct
  source 1..8: note = Seed: FSSNVANY
FASNVANF

SEQ ID NO: 17553 - protein, 8 aa, synthetic construct
  source 1..8: note = Seed: FSSNVANY
FASNVANM

SEQ ID NO: 17554 - protein, 8 aa, synthetic construct
  source 1..8: note = Seed: FSSNVANY
FASNVANY

SEQ ID NO: 17555 - protein, 9 aa, synthetic construct
  source 1..9: note = Seed: FSSNVANYQ
FASNVANYK

SEQ ID NO: 17556 - protein, 10 aa, synthetic construct
  source 1..10: note = Seed: FSSNVANYQK
FASNVANYQK

SEQ ID NO: 17557 - protein, 10 aa, synthetic construct
  source 1..10: note = Seed: FSSNVANYQK
FASNVANYQR

SEQ ID NO: 17558 - protein, 9 aa, synthetic construct
  source 1..9: note = Seed: FSSNVANYQ
FASNVANYR

SEQ ID NO: 17559 - protein, 9 aa, synthetic construct
  source 1..9: note = Seed: FFSNVTWFH
FASNVTWFK

SEQ ID NO: 17560 - protein, 9 aa, synthetic construct
  source 1..9: note = Seed: FFSNVTWFH
FASNVTWFR

SEQ ID NO: 17561 - protein, 9 aa, synthetic construct
  source 1..9: note = Seed: FFSNVTWFH
FASNVTWFY

SEQ ID NO: 17562 - protein, 11 aa, synthetic construct
  source 1..11: note = Seed: FISPYNSQNAV
FASPYNSQNAA

SEQ ID NO: 17563 - protein, 11 aa, synthetic construct
  source 1..11: note = Seed: FISPYNSQNAV
FASPYNSQNAL

SEQ ID NO: 17564 - protein, 11 aa, synthetic construct
  source 1..11: note = Seed: FISPYNSQNAV
FASPYNSQNAM

SEQ ID NO: 17565 - protein, 9 aa, synthetic construct
  source 1..9: note = Seed: FFSYFAVHF
FASYFAVHF

SEQ ID NO: 17566 - protein, 10 aa, synthetic construct
  source 1..10: note = Seed: FFSYFAVHFI
FASYFAVHFA

SEQ ID NO: 17567 - protein, 10 aa, synthetic construct
  source 1..10: note = Seed: FFSYFAVHFI
FASYFAVHFF

SEQ ID NO: 17568 - protein, 10 aa, synthetic construct
  source 1..10: note = Seed: FFSYFAVHFI
FASYFAVHFI

SEQ ID NO: 17569 - protein, 10 aa, synthetic construct
  source 1..10: note = Seed: FFSYFAVHFI
FASYFAVHFL

SEQ ID NO: 17570 - protein, 10 aa, synthetic construct
  source 1..10: note = Seed: FFSYFAVHFI
FASYFAVHFM

SEQ ID NO: 17571 - protein, 10 aa, synthetic construct
  source 1..10: note = Seed: FFSYFAVHFI
FASYFAVHFV

SEQ ID NO: 17572 - protein, 10 aa, synthetic construct
  source 1..10: note = Seed: FFSYFAVHFI
FASYFAVHFW

SEQ ID NO: 17573 - protein, 10 aa, synthetic construct
  source 1..10: note = Seed: FFSYFAVHFI
FASYFAVHFY

SEQ ID NO: 17574 - protein, 9 aa, synthetic construct
  source 1..9: note = Seed: FFSYFAVHF
FASYFAVHM

SEQ ID NO: 17575 - protein, 9 aa, synthetic construct
  source 1..9: note = Seed: FFSYFAVHF
FASYFAVHY

SEQ ID NO: 17576 - protein, 10 aa, synthetic construct
  source 1..10: note = Seed: FVTDTPKGPK
FATDTPKGPR

SEQ ID NO: 17577 - protein, 9 aa, synthetic construct
  source 1..9: note = Seed: FSTFEEAAL
FATFEEAAF

SEQ ID NO: 17578 - protein, 9 aa, synthetic construct
  source 1..9: note = Seed: FSTFEEAAL
FATFEEAAI

SEQ ID NO: 17579 - protein, 9 aa, synthetic construct
  source 1..9: note = Seed: FSTFEEAAL
FATFEEAAL

SEQ ID NO: 17580 - protein, 9 aa, synthetic construct
  source 1..9: note = Seed: FSTFEEAAL
FATFEEAAM

SEQ ID NO: 17581 - protein, 9 aa, synthetic construct
  source 1..9: note = Seed: FSTFEEAAL
FATFEEAAY

SEQ ID NO: 17582 - protein, 9 aa, synthetic construct
  source 1..9: note = Seed: FSTFKCYGV
FATFKCYGF

SEQ ID NO: 17583 - protein, 9 aa, synthetic construct
  source 1..9: note = Seed: FSTFKCYGV
FATFKCYGL

SEQ ID NO: 17584 - protein, 9 aa, synthetic construct
  source 1..9: note = Seed: FSTFKCYGV
FATFKCYGM

SEQ ID NO: 17585 - protein, 9 aa, synthetic construct
  source 1..9: note = Seed: FSTFKCYGV
FATFKCYGV

SEQ ID NO: 17586 - protein, 9 aa, synthetic construct
  source 1..9: note = Seed: FSTFKCYGV
FATFKCYGY

SEQ ID NO: 17587 - protein, 9 aa, synthetic construct
  source 1..9: note = Seed: FVTHSKGLY
FATHSKGLF

SEQ ID NO: 17588 - protein, 9 aa, synthetic construct
  source 1..9: note = Seed: FVTHSKGLY
FATHSKGLL

SEQ ID NO: 17589 - protein, 9 aa, synthetic construct
  source 1..9: note = Seed: FVTHSKGLY
FATHSKGLM

SEQ ID NO: 17590 - protein, 9 aa, synthetic construct
  source 1..9: note = Seed: FVTHSKGLY
FATHSKGLW

SEQ ID NO: 17591 - protein, 9 aa, synthetic construct
  source 1..9: note = Seed: FVTHSKGLY
FATHSKGLY

SEQ ID NO: 17592 - protein, 10 aa, synthetic construct
  source 1..10: note = Seed: FVTHSKGLYR
FATHSKGLYK

SEQ ID NO: 17593 - protein, 10 aa, synthetic construct
  source 1..10: note = Seed: FVTHSKGLYR
FATHSKGLYR

SEQ ID NO: 17594 - protein, 9 aa, synthetic construct
  source 1..9: note = Seed: FVTNVNASS
FATNVNASI

SEQ ID NO: 17595 - protein, 9 aa, synthetic construct
  source 1..9: note = Seed: FVTNVNASS
FATNVNASL

SEQ ID NO: 17596 - protein, 9 aa, synthetic construct
  source 1..9: note = Seed: FVTNVNASS
FATNVNASV

SEQ ID NO: 17597 - protein, 9 aa, synthetic construct
  source 1..9: note = Seed: FQTRAGCLI
FATRAGCLF

SEQ ID NO: 17598 - protein, 9 aa, synthetic construct
  source 1..9: note = Seed: FQTRAGCLI
FATRAGCLY

SEQ ID NO: 17599 - protein, 9 aa, synthetic construct
  source 1..9: note = Seed: FTTVDNINL
FATVDNINF

SEQ ID NO: 17600 - protein, 9 aa, synthetic construct
  source 1..9: note = Seed: FTTVDNINL
FATVDNINL

SEQ ID NO: 17601 - protein, 9 aa, synthetic construct
  source 1..9: note = Seed: FTTVDNINL
FATVDNINM

SEQ ID NO: 17602 - protein, 9 aa, synthetic construct
  source 1..9: note = Seed: FTTVDNINL
FATVDNINY

SEQ ID NO: 17603 - protein, 10 aa, synthetic construct
  source 1..10: note = Seed: FDTYNLWNTF
FATYNLWNTF

SEQ ID NO: 17604 - protein, 10 aa, synthetic construct
  source 1..10: note = Seed: FDTYNLWNTF
FATYNLWNTL

SEQ ID NO: 17605 - protein, 10 aa, synthetic construct
  source 1..10: note = Seed: FDTYNLWNTF
FATYNLWNTM

SEQ ID NO: 17606 - protein, 10 aa, synthetic construct
  source 1..10: note = Seed: FDTYNLWNTF
FATYNLWNTW

SEQ ID NO: 17607 - protein, 10 aa, synthetic construct
  source 1..10: note = Seed: FDTYNLWNTF
FATYNLWNTY

SEQ ID NO: 17608 - protein, 9 aa, synthetic construct
  source 1..9: note = Seed: FAVDAAKAY
FAVDAAKAF

SEQ ID NO: 17609 - protein, 9 aa, synthetic construct
  source 1..9: note = Seed: FAVDAAKAY
FAVDAAKAH

SEQ ID NO: 17610 - protein, 9 aa, synthetic construct
  source 1..9: note = Seed: FAVDAAKAY
FAVDAAKAI

SEQ ID NO: 17611 - protein, 9 aa, synthetic construct
  source 1..9: note = Seed: FAVDAAKAY
FAVDAAKAL

SEQ ID NO: 17612 - protein, 9 aa, synthetic construct
  source 1..9: note = Seed: FAVDAAKAY
FAVDAAKAM

SEQ ID NO: 17613 - protein, 9 aa, synthetic construct
  source 1..9: note = Seed: FAVDAAKAY
FAVDAAKAV

SEQ ID NO: 17614 - protein, 9 aa, synthetic construct
  source 1..9: note = Seed: FAVDAAKAY
FAVDAAKAW

SEQ ID NO: 17615 - protein, 10 aa, synthetic construct
  source 1..10: note = Seed: FAVDAAKAYK
FAVDAAKAYF

SEQ ID NO: 17616 - protein, 10 aa, synthetic construct
  source 1..10: note = Seed: FAVDAAKAYK
FAVDAAKAYL

SEQ ID NO: 17617 - protein, 10 aa, synthetic construct
  source 1..10: note = Seed: FAVDAAKAYK
FAVDAAKAYM

SEQ ID NO: 17618 - protein, 10 aa, synthetic construct
  source 1..10: note = Seed: FAVDAAKAYK
FAVDAAKAYR

SEQ ID NO: 17619 - protein, 10 aa, synthetic construct
  source 1..10: note = Seed: FAVDAAKAYK
FAVDAAKAYY

SEQ ID NO: 17620 - protein, 9 aa, synthetic construct
  source 1..9: note = Seed: FAVHFISNS
FAVHFISNA

SEQ ID NO: 17621 - protein, 9 aa, synthetic construct
  source 1..9: note = Seed: FAVHFISNS
FAVHFISNI

SEQ ID NO: 17622 - protein, 9 aa, synthetic construct
  source 1..9: note = Seed: FAVHFISNS
FAVHFISNL

SEQ ID NO: 17623 - protein, 10 aa, synthetic construct
  source 1..10: note = Seed: FAVHFISNSW
FAVHFISNSF

SEQ ID NO: 17624 - protein, 10 aa, synthetic construct
  source 1..10: note = Seed: FAVHFISNSW
FAVHFISNSL

SEQ ID NO: 17625 - protein, 10 aa, synthetic construct
  source 1..10: note = Seed: FAVHFISNSW
FAVHFISNSM

SEQ ID NO: 17626 - protein, 10 aa, synthetic construct
  source 1..10: note = Seed: FAVHFISNSW
FAVHFISNSV

SEQ ID NO: 17627 - protein, 10 aa, synthetic construct
  source 1..10: note = Seed: FAVHFISNSW
FAVHFISNSY

SEQ ID NO: 17628 - protein, 9 aa, synthetic construct
  source 1..9: note = Seed: FAVHFISNS
FAVHFISNV

SEQ ID NO: 17629 - protein, 8 aa, synthetic construct
  source 1..8: note = Seed: FVVKRHTF
FAVKRHTF

SEQ ID NO: 17630 - protein, 8 aa, synthetic construct
  source 1..8: note = Seed: FVVKRHTF
FAVKRHTL

SEQ ID NO: 17631 - protein, 8 aa, synthetic construct
  source 1..8: note = Seed: FVVKRHTF
FAVKRHTM

SEQ ID NO: 17632 - protein, 8 aa, synthetic construct
  source 1..8: note = Seed: FVVKRHTF
FAVKRHTY

SEQ ID NO: 17633 - protein, 9 aa, synthetic construct
  source 1..9: note = Seed: FNVLFSTVF
FAVLFSTVF

SEQ ID NO: 17634 - protein, 9 aa, synthetic construct
  source 1..9: note = Seed: FNVLFSTVF
FAVLFSTVH

SEQ ID NO: 17635 - protein, 9 aa, synthetic construct
  source 1..9: note = Seed: FNVLFSTVF
FAVLFSTVI

SEQ ID NO: 17636 - protein, 9 aa, synthetic construct
  source 1..9: note = Seed: FNVLFSTVF
FAVLFSTVL

SEQ ID NO: 17637 - protein, 9 aa, synthetic construct
  source 1..9: note = Seed: FNVLFSTVF
FAVLFSTVM

SEQ ID NO: 17638 - protein, 9 aa, synthetic construct
  source 1..9: note = Seed: FNVLFSTVF
FAVLFSTVV

SEQ ID NO: 17639 - protein, 9 aa, synthetic construct
  source 1..9: note = Seed: FNVLFSTVF
FAVLFSTVW

SEQ ID NO: 17640 - protein, 9 aa, synthetic construct
  source 1..9: note = Seed: FNVLFSTVF
FAVLFSTVY

SEQ ID NO: 17641 - protein, 9 aa, synthetic construct
  source 1..9: note = Seed: FPVLHDIGN
FAVLHDIGF

SEQ ID NO: 17642 - protein, 9 aa, synthetic construct
  source 1..9: note = Seed: FPVLHDIGN
FAVLHDIGM

SEQ ID NO: 17643 - protein, 9 aa, synthetic construct
  source 1..9: note = Seed: FPVLHDIGN
FAVLHDIGY

SEQ ID NO: 17644 - protein, 10 aa, synthetic construct
  source 1..10: note = Seed: FKVSIWNLDY
FAVSIWNLDY

SEQ ID NO: 17645 - protein, 9 aa, synthetic construct
  source 1..9: note = Seed: FVVSTGYHF
FAVSTGYHF

SEQ ID NO: 17646 - protein, 10 aa, synthetic construct
  source 1..10: note = Seed: FVVSTGYHFR
FAVSTGYHFK

SEQ ID NO: 17647 - protein, 10 aa, synthetic construct
  source 1..10: note = Seed: FVVSTGYHFR
FAVSTGYHFR

SEQ ID NO: 17648 - protein, 9 aa, synthetic construct
  source 1..9: note = Seed: FVVSTGYHF
FAVSTGYHI

SEQ ID NO: 17649 - protein, 9 aa, synthetic construct
  source 1..9: note = Seed: FVVSTGYHF
FAVSTGYHL

SEQ ID NO: 17650 - protein, 9 aa, synthetic construct
  source 1..9: note = Seed: FVVSTGYHF
FAVSTGYHM

SEQ ID NO: 17651 - protein, 9 aa, synthetic construct
  source 1..9: note = Seed: FVVSTGYHF
FAVSTGYHV

SEQ ID NO: 17652 - protein, 9 aa, synthetic construct
  source 1..9: note = Seed: FVVSTGYHF
FAVSTGYHW

SEQ ID NO: 17653 - protein, 9 aa, synthetic construct
  source 1..9: note = Seed: FVVSTGYHF
FAVSTGYHY

SEQ ID NO: 17654 - protein, 9 aa, synthetic construct
  source 1..9: note = Seed: FYWFFSNYL
FAWFFSNYA

SEQ ID NO: 17655 - protein, 9 aa, synthetic construct
  source 1..9: note = Seed: FYWFFSNYL
FAWFFSNYI

SEQ ID NO: 17656 - protein, 9 aa, synthetic construct
  source 1..9: note = Seed: FYWFFSNYL
FAWFFSNYL

SEQ ID NO: 17657 - protein, 10 aa, synthetic construct
  source 1..10: note = Seed: FYWFFSNYLK
FAWFFSNYLF

SEQ ID NO: 17658 - protein, 10 aa, synthetic construct
  source 1..10: note = Seed: FYWFFSNYLK
FAWFFSNYLK

SEQ ID NO: 17659 - protein, 11 aa, synthetic construct
  source 1..11: note = Seed: FYWFFSNYLKR
FAWFFSNYLKR

SEQ ID NO: 17660 - protein, 10 aa, synthetic construct
  source 1..10: note = Seed: FYWFFSNYLK
FAWFFSNYLR

SEQ ID NO: 17661 - protein, 10 aa, synthetic construct
  source 1..10: note = Seed: FYWFFSNYLK
FAWFFSNYLY

SEQ ID NO: 17662 - protein, 9 aa, synthetic construct
  source 1..9: note = Seed: FYWFFSNYL
FAWFFSNYM

SEQ ID NO: 17663 - protein, 9 aa, synthetic construct
  source 1..9: note = Seed: FYWFFSNYL
FAWFFSNYV

SEQ ID NO: 17664 - protein, 9 aa, synthetic construct
  source 1..9: note = Seed: FYWFFSNYL
FAWFFSNYY

SEQ ID NO: 17665 - protein, 10 aa, synthetic construct
  source 1..10: note = Seed: FLWLLWPVTL
FAWLLWPVTF

SEQ ID NO: 17666 - protein, 11 aa, synthetic construct
  source 1..11: note = Seed: FLWLLWPVTLA
FAWLLWPVTLI

SEQ ID NO: 17667 - protein, 11 aa, synthetic construct
  source 1..11: note = Seed: FLWLLWPVTLA
FAWLLWPVTLL

SEQ ID NO: 17668 - protein, 11 aa, synthetic construct
  source 1..11: note = Seed: FLWLLWPVTLA
FAWLLWPVTLV

SEQ ID NO: 17669 - protein, 10 aa, synthetic construct
  source 1..10: note = Seed: FLWLLWPVTL
FAWLLWPVTV

SEQ ID NO: 17670 - protein, 9 aa, synthetic construct
  source 1..9: note = Seed: FLWLLWPVT
FAWLLWPVV

SEQ ID NO: 17671 - protein, 8 aa, synthetic construct
  source 1..8: note = Seed: FSYFAVHF
FAYFAVHF

SEQ ID NO: 17672 - protein, 9 aa, synthetic construct
  source 1..9: note = Seed: FSYFAVHFI
FAYFAVHFA

SEQ ID NO: 17673 - protein, 9 aa, synthetic construct
  source 1..9: note = Seed: FSYFAVHFI
FAYFAVHFF

SEQ ID NO: 17674 - protein, 9 aa, synthetic construct
  source 1..9: note = Seed: FSYFAVHFI
FAYFAVHFH

SEQ ID NO: 17675 - protein, 9 aa, synthetic construct
  source 1..9: note = Seed: FSYFAVHFI
FAYFAVHFI

SEQ ID NO: 17676 - protein, 10 aa, synthetic construct
  source 1..10: note = Seed: FSYFAVHFIS
FAYFAVHFIA

SEQ ID NO: 17677 - protein, 10 aa, synthetic construct
  source 1..10: note = Seed: FSYFAVHFIS
FAYFAVHFII

SEQ ID NO: 17678 - protein, 10 aa, synthetic construct
  source 1..10: note = Seed: FSYFAVHFIS
FAYFAVHFIV

SEQ ID NO: 17679 - protein, 9 aa, synthetic construct
  source 1..9: note = Seed: FSYFAVHFI
FAYFAVHFL

SEQ ID NO: 17680 - protein, 9 aa, synthetic construct
  source 1..9: note = Seed: FSYFAVHFI
FAYFAVHFM

SEQ ID NO: 17681 - protein, 9 aa, synthetic construct
  source 1..9: note = Seed: FSYFAVHFI
FAYFAVHFT

SEQ ID NO: 17682 - protein, 9 aa, synthetic construct
  source 1..9: note = Seed: FSYFAVHFI
FAYFAVHFV

SEQ ID NO: 17683 - protein, 9 aa, synthetic construct
  source 1..9: note = Seed: FSYFAVHFI
FAYFAVHFW

SEQ ID NO: 17684 - protein, 9 aa, synthetic construct
  source 1..9: note = Seed: FSYFAVHFI
FAYFAVHFY

SEQ ID NO: 17685 - protein, 8 aa, synthetic construct
  source 1..8: note = Seed: FSYFAVHF
FAYFAVHM

SEQ ID NO: 17686 - protein, 8 aa, synthetic construct
  source 1..8: note = Seed: FSYFAVHF
FAYFAVHY

SEQ ID NO: 17687 - protein, 9 aa, synthetic construct
  source 1..9: note = Seed: FYYLGTGPE
FAYLGTGPF

SEQ ID NO: 17688 - protein, 9 aa, synthetic construct
  source 1..9: note = Seed: FYYLGTGPE
FAYLGTGPL

SEQ ID NO: 17689 - protein, 9 aa, synthetic construct
  source 1..9: note = Seed: FYYLGTGPE
FAYLGTGPM

SEQ ID NO: 17690 - protein, 9 aa, synthetic construct
  source 1..9: note = Seed: FYYLGTGPE
FAYLGTGPY

SEQ ID NO: 17691 - protein, 9 aa, synthetic construct
  source 1..9: note = Seed: FNYLKSPNF
FAYLKSPNF

SEQ ID NO: 17692 - protein, 9 aa, synthetic construct
  source 1..9: note = Seed: FNYLKSPNF
FAYLKSPNI

SEQ ID NO: 17693 - protein, 9 aa, synthetic construct
  source 1..9: note = Seed: FNYLKSPNF
FAYLKSPNL

SEQ ID NO: 17694 - protein, 9 aa, synthetic construct
  source 1..9: note = Seed: FNYLKSPNF
FAYLKSPNM

SEQ ID NO: 17695 - protein, 9 aa, synthetic construct
  source 1..9: note = Seed: FNYLKSPNF
FAYLKSPNV

SEQ ID NO: 17696 - protein, 9 aa, synthetic construct
  source 1..9: note = Seed: FNYLKSPNF
FAYLKSPNW

SEQ ID NO: 17697 - protein, 9 aa, synthetic construct
  source 1..9: note = Seed: FNYLKSPNF
FAYLKSPNY

SEQ ID NO: 17698 - protein, 9 aa, synthetic construct
  source 1..9: note = Seed: FCYMHHMEL
FAYMHHMEA

SEQ ID NO: 17699 - protein, 9 aa, synthetic construct
  source 1..9: note = Seed: FCYMHHMEL
FAYMHHMEC

SEQ ID NO: 17700 - protein, 9 aa, synthetic construct
  source 1..9: note = Seed: FCYMHHMEL
FAYMHHMEF

SEQ ID NO: 17701 - protein, 9 aa, synthetic construct
  source 1..9: note = Seed: FCYMHHMEL
FAYMHHMEG

SEQ ID NO: 17702 - protein, 9 aa, synthetic construct
  source 1..9: note = Seed: FCYMHHMEL
FAYMHHMEH

SEQ ID NO: 17703 - protein, 9 aa, synthetic construct
  source 1..9: note = Seed: FCYMHHMEL
FAYMHHMEI

SEQ ID NO: 17704 - protein, 9 aa, synthetic construct
  source 1..9: note = Seed: FCYMHHMEL
FAYMHHMEK

SEQ ID NO: 17705 - protein, 9 aa, synthetic construct
  source 1..9: note = Seed: FCYMHHMEL
FAYMHHMEL

SEQ ID NO: 17706 - protein, 9 aa, synthetic construct
  source 1..9: note = Seed: FCYMHHMEL
FAYMHHMEM

SEQ ID NO: 17707 - protein, 9 aa, synthetic construct
  source 1..9: note = Seed: FCYMHHMEL
FAYMHHMEQ

SEQ ID NO: 17708 - protein, 9 aa, synthetic construct
  source 1..9: note = Seed: FCYMHHMEL
FAYMHHMES

SEQ ID NO: 17709 - protein, 9 aa, synthetic construct
  source 1..9: note = Seed: FCYMHHMEL
FAYMHHMET

SEQ ID NO: 17710 - protein, 9 aa, synthetic construct
  source 1..9: note = Seed: FCYMHHMEL
FAYMHHMEV

SEQ ID NO: 17711 - protein, 9 aa, synthetic construct
  source 1..9: note = Seed: FCYMHHMEL
FAYMHHMEW

SEQ ID NO: 17712 - protein, 9 aa, synthetic construct
  source 1..9: note = Seed: FCYMHHMEL
FAYMHHMEY

SEQ ID NO: 17713 - protein, 9 aa, synthetic construct
  source 1..9: note = Seed: FRYMNSQGL
FAYMNSQGA

SEQ ID NO: 17714 - protein, 9 aa, synthetic construct
  source 1..9: note = Seed: FRYMNSQGL
FAYMNSQGF

SEQ ID NO: 17715 - protein, 9 aa, synthetic construct
  source 1..9: note = Seed: FRYMNSQGL
FAYMNSQGI

SEQ ID NO: 17716 - protein, 9 aa, synthetic construct
  source 1..9: note = Seed: FRYMNSQGL
FAYMNSQGL

SEQ ID NO: 17717 - protein, 9 aa, synthetic construct
  source 1..9: note = Seed: FRYMNSQGL
FAYMNSQGM

SEQ ID NO: 17718 - protein, 9 aa, synthetic construct
  source 1..9: note = Seed: FRYMNSQGL
FAYMNSQGV

SEQ ID NO: 17719 - protein, 9 aa, synthetic construct
  source 1..9: note = Seed: FRYMNSQGL
FAYMNSQGW

SEQ ID NO: 17720 - protein, 9 aa, synthetic construct
  source 1..9: note = Seed: FRYMNSQGL
FAYMNSQGY

SEQ ID NO: 17721 - protein, 8 aa, synthetic construct
  source 1..8: note = Seed: FEYVSQPF
FAYVSQPF

SEQ ID NO: 17722 - protein, 8 aa, synthetic construct
  source 1..8: note = Seed: FEYVSQPF
FAYVSQPY

SEQ ID NO: 17723 - protein, 9 aa, synthetic construct
  source 1..9: note = Seed: FYYVWKSYV
FAYVWKSYA

SEQ ID NO: 17724 - protein, 9 aa, synthetic construct
  source 1..9: note = Seed: FYYVWKSYV
FAYVWKSYF

SEQ ID NO: 17725 - protein, 9 aa, synthetic construct
  source 1..9: note = Seed: FYYVWKSYV
FAYVWKSYI

SEQ ID NO: 17726 - protein, 9 aa, synthetic construct
  source 1..9: note = Seed: FYYVWKSYV
FAYVWKSYL

SEQ ID NO: 17727 - protein, 9 aa, synthetic construct
  source 1..9: note = Seed: FYYVWKSYV
FAYVWKSYM

SEQ ID NO: 17728 - protein, 9 aa, synthetic construct
  source 1..9: note = Seed: FYYVWKSYV
FAYVWKSYV

SEQ ID NO: 17729 - protein, 10 aa, synthetic construct
  source 1..10: note = Seed: FYYVWKSYVH
FAYVWKSYVM

SEQ ID NO: 17730 - protein, 10 aa, synthetic construct
  source 1..10: note = Seed: FYYVWKSYVH
FAYVWKSYVY

SEQ ID NO: 17731 - protein, 9 aa, synthetic construct
  source 1..9: note = Seed: FYYVWKSYV
FAYVWKSYW

SEQ ID NO: 17732 - protein, 9 aa, synthetic construct
  source 1..9: note = Seed: FYYVWKSYV
FAYVWKSYY

SEQ ID NO: 17733 - protein, 9 aa, synthetic construct
  source 1..9: note = Seed: FFYYSDSPC
FAYYSDSPF

SEQ ID NO: 17734 - protein, 9 aa, synthetic construct
  source 1..9: note = Seed: FFYYSDSPC
FAYYSDSPL

SEQ ID NO: 17735 - protein, 9 aa, synthetic construct
  source 1..9: note = Seed: FFYYSDSPC
FAYYSDSPM

SEQ ID NO: 17736 - protein, 9 aa, synthetic construct
  source 1..9: note = Seed: FFYYSDSPC
FAYYSDSPY

SEQ ID NO: 17737 - protein, 9 aa, synthetic construct
  source 1..9: note = Seed: FVAAIFYLI
FCAAIFYLK

SEQ ID NO: 17738 - protein, 9 aa, synthetic construct
  source 1..9: note = Seed: FVAAIFYLI
FCAAIFYLR

SEQ ID NO: 17739 - protein, 9 aa, synthetic construct
  source 1..9: note = Seed: FVAAIFYLI
FCAAIFYLV

SEQ ID NO: 17740 - protein, 9 aa, synthetic construct
  source 1..9: note = Seed: FVAAIFYLI
FCAAIFYLY

SEQ ID NO: 17741 - protein, 10 aa, synthetic construct
  source 1..10: note = Seed: FCAFAVDAAK
FCAFAVDAAR

SEQ ID NO: 17742 - protein, 9 aa, synthetic construct
  source 1..9: note = Seed: FLAHIQWMV
FCAHIQWMV

SEQ ID NO: 17743 - protein, 10 aa, synthetic construct
  source 1..10: note = Seed: FIASFRLFAR
FCASFRLFAK

SEQ ID NO: 17744 - protein, 10 aa, synthetic construct
  source 1..10: note = Seed: FIASFRLFAR
FCASFRLFAR

SEQ ID NO: 17745 - protein, 10 aa, synthetic construct
  source 1..10: note = Seed: FFASFYYVWK
FCASFYYVWK

SEQ ID NO: 17746 - protein, 10 aa, synthetic construct
  source 1..10: note = Seed: FFASFYYVWK
FCASFYYVWR

SEQ ID NO: 17747 - protein, 9 aa, synthetic construct
  source 1..9: note = Seed: FFASFYYVW
FCASFYYVY

SEQ ID NO: 17748 - protein, 9 aa, synthetic construct
  source 1..9: note = Seed: FNATRFASV
FCATRFASL

SEQ ID NO: 17749 - protein, 9 aa, synthetic construct
  source 1..9: note = Seed: FNATRFASV
FCATRFASM

SEQ ID NO: 17750 - protein, 10 aa, synthetic construct
  source 1..10: note = Seed: FNATRFASVY
FCATRFASVF

SEQ ID NO: 17751 - protein, 10 aa, synthetic construct
  source 1..10: note = Seed: FNATRFASVY
FCATRFASVM

SEQ ID NO: 17752 - protein, 10 aa, synthetic construct
  source 1..10: note = Seed: FNATRFASVY
FCATRFASVY

SEQ ID NO: 17753 - protein, 9 aa, synthetic construct
  source 1..9: note = Seed: FNATRFASV
FCATRFASY

SEQ ID NO: 17754 - protein, 10 aa, synthetic construct
  source 1..10: note = Seed: FSAVGNICYT
FCAVGNICYV

SEQ ID NO: 17755 - protein, 9 aa, synthetic construct
  source 1..9: note = Seed: FLAYILFTR
FCAYILFTR

SEQ ID NO: 17756 - protein, 9 aa, synthetic construct
  source 1..9: note = Seed: FLAYILFTR
FCAYILFTV

SEQ ID NO: 17757 - protein, 9 aa, synthetic construct
  source 1..9: note = Seed: FGDDTVIEV
FCDDTVIEF

SEQ ID NO: 17758 - protein, 9 aa, synthetic construct
  source 1..9: note = Seed: FGDDTVIEV
FCDDTVIEL

SEQ ID NO: 17759 - protein, 9 aa, synthetic construct
  source 1..9: note = Seed: FGDDTVIEV
FCDDTVIEM

SEQ ID NO: 17760 - protein, 9 aa, synthetic construct
  source 1..9: note = Seed: FPDLNGDVV
FCDLNGDVL

SEQ ID NO: 17761 - protein, 9 aa, synthetic construct
  source 1..9: note = Seed: FPDLNGDVV
FCDLNGDVM

SEQ ID NO: 17762 - protein, 11 aa, synthetic construct
  source 1..11: note = Seed: FPDLNGDVVAI
FCDLNGDVVAI

SEQ ID NO: 17763 - protein, 11 aa, synthetic construct
  source 1..11: note = Seed: FPDLNGDVVAI
FCDLNGDVVAL

SEQ ID NO: 17764 - protein, 11 aa, synthetic construct
  source 1..11: note = Seed: FPDLNGDVVAI
FCDLNGDVVAV

SEQ ID NO: 17765 - protein, 10 aa, synthetic construct
  source 1..10: note = Seed: FVFKNIDGYF
FCFKNIDGYY

SEQ ID NO: 17766 - protein, 10 aa, synthetic construct
  source 1..10: note = Seed: FLFVAAIFYL
FCFVAAIFYY

SEQ ID NO: 17767 - protein, 10 aa, synthetic construct
  source 1..10: note = Seed: FKIYSKHTPI
FCIYSKHTPA

SEQ ID NO: 17768 - protein, 10 aa, synthetic construct
  source 1..10: note = Seed: FKIYSKHTPI
FCIYSKHTPF

SEQ ID NO: 17769 - protein, 10 aa, synthetic construct
  source 1..10: note = Seed: FKIYSKHTPI
FCIYSKHTPI

SEQ ID NO: 17770 - protein, 10 aa, synthetic construct
  source 1..10: note = Seed: FKIYSKHTPI
FCIYSKHTPL

SEQ ID NO: 17771 - protein, 10 aa, synthetic construct
  source 1..10: note = Seed: FKIYSKHTPI
FCIYSKHTPV

SEQ ID NO: 17772 - protein, 10 aa, synthetic construct
  source 1..10: note = Seed: FKIYSKHTPI
FCIYSKHTPY

SEQ ID NO: 17773 - protein, 10 aa, synthetic construct
  source 1..10: note = Seed: FKLKDCVMYA
FCLKDCVMYA

SEQ ID NO: 17774 - protein, 10 aa, synthetic construct
  source 1..10: note = Seed: FKLKDCVMYA
FCLKDCVMYI

SEQ ID NO: 17775 - protein, 10 aa, synthetic construct
  source 1..10: note = Seed: FKLKDCVMYA
FCLKDCVMYL

SEQ ID NO: 17776 - protein, 10 aa, synthetic construct
  source 1..10: note = Seed: FKLKDCVMYA
FCLKDCVMYM

SEQ ID NO: 17777 - protein, 10 aa, synthetic construct
  source 1..10: note = Seed: FKLKDCVMYA
FCLKDCVMYS

SEQ ID NO: 17778 - protein, 10 aa, synthetic construct
  source 1..10: note = Seed: FKLKDCVMYA
FCLKDCVMYT

SEQ ID NO: 17779 - protein, 10 aa, synthetic construct
  source 1..10: note = Seed: FKLKDCVMYA
FCLKDCVMYV

SEQ ID NO: 17780 - protein, 10 aa, synthetic construct
  source 1..10: note = Seed: FPLKLRGTAV
FCLKLRGTAF

SEQ ID NO: 17781 - protein, 10 aa, synthetic construct
  source 1..10: note = Seed: FPLKLRGTAV
FCLKLRGTAI

SEQ ID NO: 17782 - protein, 10 aa, synthetic construct
  source 1..10: note = Seed: FPLKLRGTAV
FCLKLRGTAL

SEQ ID NO: 17783 - protein, 10 aa, synthetic construct
  source 1..10: note = Seed: FPLKLRGTAV
FCLKLRGTAM

SEQ ID NO: 17784 - protein, 10 aa, synthetic construct
  source 1..10: note = Seed: FPLKLRGTAV
FCLKLRGTAV

SEQ ID NO: 17785 - protein, 11 aa, synthetic construct
  source 1..11: note = Seed: FPLKLRGTAVM
FCLKLRGTAVF

SEQ ID NO: 17786 - protein, 11 aa, synthetic construct
  source 1..11: note = Seed: FPLKLRGTAVM
FCLKLRGTAVY

SEQ ID NO: 17787 - protein, 10 aa, synthetic construct
  source 1..10: note = Seed: FLLNKEMYLK
FCLNKEMYLA

SEQ ID NO: 17788 - protein, 10 aa, synthetic construct
  source 1..10: note = Seed: FLLNKEMYLK
FCLNKEMYLI

SEQ ID NO: 17789 - protein, 10 aa, synthetic construct
  source 1..10: note = Seed: FLLNKEMYLK
FCLNKEMYLL

SEQ ID NO: 17790 - protein, 10 aa, synthetic construct
  source 1..10: note = Seed: FLLNKEMYLK
FCLNKEMYLM

SEQ ID NO: 17791 - protein, 10 aa, synthetic construct
  source 1..10: note = Seed: FLLNKEMYLK
FCLNKEMYLV

SEQ ID NO: 17792 - protein, 10 aa, synthetic construct
  source 1..10: note = Seed: FYLTNDVSFL
FCLTNDVSFA

SEQ ID NO: 17793 - protein, 10 aa, synthetic construct
  source 1..10: note = Seed: FYLTNDVSFL
FCLTNDVSFI

SEQ ID NO: 17794 - protein, 10 aa, synthetic construct
  source 1..10: note = Seed: FYLTNDVSFL
FCLTNDVSFL

SEQ ID NO: 17795 - protein, 11 aa, synthetic construct
  source 1..11: note = Seed: FYLTNDVSFLA
FCLTNDVSFLL

SEQ ID NO: 17796 - protein, 11 aa, synthetic construct
  source 1..11: note = Seed: FYLTNDVSFLA
FCLTNDVSFLV

SEQ ID NO: 17797 - protein, 10 aa, synthetic construct
  source 1..10: note = Seed: FYLTNDVSFL
FCLTNDVSFM

SEQ ID NO: 17798 - protein, 10 aa, synthetic construct
  source 1..10: note = Seed: FYLTNDVSFL
FCLTNDVSFV

SEQ ID NO: 17799 - protein, 9 aa, synthetic construct
  source 1..9: note = Seed: FYLTNDVSF
FCLTNDVSY

SEQ ID NO: 17800 - protein, 10 aa, synthetic construct
  source 1..10: note = Seed: FQLTPIAVQM
FCLTPIAVQA

SEQ ID NO: 17801 - protein, 10 aa, synthetic construct
  source 1..10: note = Seed: FQLTPIAVQM
FCLTPIAVQI

SEQ ID NO: 17802 - protein, 10 aa, synthetic construct
  source 1..10: note = Seed: FQLTPIAVQM
FCLTPIAVQL

SEQ ID NO: 17803 - protein, 10 aa, synthetic construct
  source 1..10: note = Seed: FQLTPIAVQM
FCLTPIAVQM

SEQ ID NO: 17804 - protein, 10 aa, synthetic construct
  source 1..10: note = Seed: FQLTPIAVQM
FCLTPIAVQV

SEQ ID NO: 17805 - protein, 10 aa, synthetic construct
  source 1..10: note = Seed: FELTSMKYFV
FCLTSMKYFA

SEQ ID NO: 17806 - protein, 10 aa, synthetic construct
  source 1..10: note = Seed: FELTSMKYFV
FCLTSMKYFI

SEQ ID NO: 17807 - protein, 10 aa, synthetic construct
  source 1..10: note = Seed: FELTSMKYFV
FCLTSMKYFL

SEQ ID NO: 17808 - protein, 10 aa, synthetic construct
  source 1..10: note = Seed: FELTSMKYFV
FCLTSMKYFM

SEQ ID NO: 17809 - protein, 10 aa, synthetic construct
  source 1..10: note = Seed: FELTSMKYFV
FCLTSMKYFV

SEQ ID NO: 17810 - protein, 10 aa, synthetic construct
  source 1..10: note = Seed: FGLVAEWFLA
FCLVAEWFLA

SEQ ID NO: 17811 - protein, 10 aa, synthetic construct
  source 1..10: note = Seed: FGLVAEWFLA
FCLVAEWFLI

SEQ ID NO: 17812 - protein, 10 aa, synthetic construct
  source 1..10: note = Seed: FGLVAEWFLA
FCLVAEWFLL

SEQ ID NO: 17813 - protein, 10 aa, synthetic construct
  source 1..10: note = Seed: FGLVAEWFLA
FCLVAEWFLM

SEQ ID NO: 17814 - protein, 10 aa, synthetic construct
  source 1..10: note = Seed: FGLVAEWFLA
FCLVAEWFLV

SEQ ID NO: 17815 - protein, 10 aa, synthetic construct
  source 1..10: note = Seed: FVLWAHGFEL
FCLWAHGFEA

SEQ ID NO: 17816 - protein, 10 aa, synthetic construct
  source 1..10: note = Seed: FVLWAHGFEL
FCLWAHGFEI

SEQ ID NO: 17817 - protein, 10 aa, synthetic construct
  source 1..10: note = Seed: FVLWAHGFEL
FCLWAHGFEL

SEQ ID NO: 17818 - protein, 11 aa, synthetic construct
  source 1..11: note = Seed: FVLWAHGFELT
FCLWAHGFELA

SEQ ID NO: 17819 - protein, 11 aa, synthetic construct
  source 1..11: note = Seed: FVLWAHGFELT
FCLWAHGFELC

SEQ ID NO: 17820 - protein, 11 aa, synthetic construct
  source 1..11: note = Seed: FVLWAHGFELT
FCLWAHGFELD

SEQ ID NO: 17821 - protein, 11 aa, synthetic construct
  source 1..11: note = Seed: FVLWAHGFELT
FCLWAHGFELE

SEQ ID NO: 17822 - protein, 11 aa, synthetic construct
  source 1..11: note = Seed: FVLWAHGFELT
FCLWAHGFELF

SEQ ID NO: 17823 - protein, 11 aa, synthetic construct
  source 1..11: note = Seed: FVLWAHGFELT
FCLWAHGFELG

SEQ ID NO: 17824 - protein, 11 aa, synthetic construct
  source 1..11: note = Seed: FVLWAHGFELT
FCLWAHGFELH

SEQ ID NO: 17825 - protein, 11 aa, synthetic construct
  source 1..11: note = Seed: FVLWAHGFELT
FCLWAHGFELI

SEQ ID NO: 17826 - protein, 11 aa, synthetic construct
  source 1..11: note = Seed: FVLWAHGFELT
FCLWAHGFELK

SEQ ID NO: 17827 - protein, 11 aa, synthetic construct
  source 1..11: note = Seed: FVLWAHGFELT
FCLWAHGFELL

SEQ ID NO: 17828 - protein, 11 aa, synthetic construct
  source 1..11: note = Seed: FVLWAHGFELT
FCLWAHGFELM

SEQ ID NO: 17829 - protein, 11 aa, synthetic construct
  source 1..11: note = Seed: FVLWAHGFELT
FCLWAHGFELN

SEQ ID NO: 17830 - protein, 11 aa, synthetic construct
  source 1..11: note = Seed: FVLWAHGFELT
FCLWAHGFELP

SEQ ID NO: 17831 - protein, 11 aa, synthetic construct
  source 1..11: note = Seed: FVLWAHGFELT
FCLWAHGFELQ

SEQ ID NO: 17832 - protein, 11 aa, synthetic construct
  source 1..11: note = Seed: FVLWAHGFELT
FCLWAHGFELR

SEQ ID NO: 17833 - protein, 11 aa, synthetic construct
  source 1..11: note = Seed: FVLWAHGFELT
FCLWAHGFELS

SEQ ID NO: 17834 - protein, 11 aa, synthetic construct
  source 1..11: note = Seed: FVLWAHGFELT
FCLWAHGFELT

SEQ ID NO: 17835 - protein, 11 aa, synthetic construct
  source 1..11: note = Seed: FVLWAHGFELT
FCLWAHGFELV

SEQ ID NO: 17836 - protein, 11 aa, synthetic construct
  source 1..11: note = Seed: FVLWAHGFELT
FCLWAHGFELW

SEQ ID NO: 17837 - protein, 11 aa, synthetic construct
  source 1..11: note = Seed: FVLWAHGFELT
FCLWAHGFELY

SEQ ID NO: 17838 - protein, 10 aa, synthetic construct
  source 1..10: note = Seed: FVLWAHGFEL
FCLWAHGFEM

SEQ ID NO: 17839 - protein, 10 aa, synthetic construct
  source 1..10: note = Seed: FVLWAHGFEL
FCLWAHGFES

SEQ ID NO: 17840 - protein, 10 aa, synthetic construct
  source 1..10: note = Seed: FVLWAHGFEL
FCLWAHGFET

SEQ ID NO: 17841 - protein, 10 aa, synthetic construct
  source 1..10: note = Seed: FVLWAHGFEL
FCLWAHGFEV

SEQ ID NO: 17842 - protein, 10 aa, synthetic construct
  source 1..10: note = Seed: FSMMILSDDA
FCMMILSDDL

SEQ ID NO: 17843 - protein, 10 aa, synthetic construct
  source 1..10: note = Seed: FSMMILSDDA
FCMMILSDDV

SEQ ID NO: 17844 - protein, 9 aa, synthetic construct
  source 1..9: note = Seed: FAMQMAYRF
FCMQMAYRW

SEQ ID NO: 17845 - protein, 9 aa, synthetic construct
  source 1..9: note = Seed: FAMQMAYRF
FCMQMAYRY

SEQ ID NO: 17846 - protein, 8 aa, synthetic construct
  source 1..8: note = Seed: FDMSKFPL
FCMSKFPL

SEQ ID NO: 17847 - protein, 10 aa, synthetic construct
  source 1..10: note = Seed: FDMSKFPLKL
FCMSKFPLKA

SEQ ID NO: 17848 - protein, 10 aa, synthetic construct
  source 1..10: note = Seed: FDMSKFPLKL
FCMSKFPLKI

SEQ ID NO: 17849 - protein, 10 aa, synthetic construct
  source 1..10: note = Seed: FDMSKFPLKL
FCMSKFPLKL

SEQ ID NO: 17850 - protein, 10 aa, synthetic construct
  source 1..10: note = Seed: FDMSKFPLKL
FCMSKFPLKV

SEQ ID NO: 17851 - protein, 10 aa, synthetic construct
  source 1..10: note = Seed: FNMVYMPASW
FCMVYMPASF

SEQ ID NO: 17852 - protein, 10 aa, synthetic construct
  source 1..10: note = Seed: FNMVYMPASW
FCMVYMPASY

SEQ ID NO: 17853 - protein, 9 aa, synthetic construct
  source 1..9: note = Seed: FENKTTLPV
FCNKTTLPF

SEQ ID NO: 17854 - protein, 9 aa, synthetic construct
  source 1..9: note = Seed: FENKTTLPV
FCNKTTLPY

SEQ ID NO: 17855 - protein, 11 aa, synthetic construct
  source 1..11: note = Seed: FTNVYADSFVI
FCNVYADSFVV

SEQ ID NO: 17856 - protein, 10 aa, synthetic construct
  source 1..10: note = Seed: FTPFDVVRQC
FCPFDVVRQA

SEQ ID NO: 17857 - protein, 10 aa, synthetic construct
  source 1..10: note = Seed: FLPFFSNVTW
FCPFFSNVTF

SEQ ID NO: 17858 - protein, 10 aa, synthetic construct
  source 1..10: note = Seed: FLPFFSNVTW
FCPFFSNVTH

SEQ ID NO: 17859 - protein, 10 aa, synthetic construct
  source 1..10: note = Seed: FLPFFSNVTW
FCPFFSNVTL

SEQ ID NO: 17860 - protein, 10 aa, synthetic construct
  source 1..10: note = Seed: FLPFFSNVTW
FCPFFSNVTM

SEQ ID NO: 17861 - protein, 10 aa, synthetic construct
  source 1..10: note = Seed: FLPFFSNVTW
FCPFFSNVTW

SEQ ID NO: 17862 - protein, 10 aa, synthetic construct
  source 1..10: note = Seed: FLPFFSNVTW
FCPFFSNVTY

SEQ ID NO: 17863 - protein, 10 aa, synthetic construct
  source 1..10: note = Seed: FTPLVPFWIT
FCPLVPFWIA

SEQ ID NO: 17864 - protein, 11 aa, synthetic construct
  source 1..11: note = Seed: FTPLVPFWITI
FCPLVPFWITV

SEQ ID NO: 17865 - protein, 10 aa, synthetic construct
  source 1..10: note = Seed: FLPRVFSAVG
FCPRVFSAVF

SEQ ID NO: 17866 - protein, 10 aa, synthetic construct
  source 1..10: note = Seed: FLPRVFSAVG
FCPRVFSAVI

SEQ ID NO: 17867 - protein, 10 aa, synthetic construct
  source 1..10: note = Seed: FLPRVFSAVG
FCPRVFSAVL

SEQ ID NO: 17868 - protein, 10 aa, synthetic construct
  source 1..10: note = Seed: FLPRVFSAVG
FCPRVFSAVM

SEQ ID NO: 17869 - protein, 10 aa, synthetic construct
  source 1..10: note = Seed: FLPRVFSAVG
FCPRVFSAVV

SEQ ID NO: 17870 - protein, 9 aa, synthetic construct
  source 1..9: note = Seed: FAPSASAFF
FCPSASAFL

SEQ ID NO: 17871 - protein, 11 aa, synthetic construct
  source 1..11: note = Seed: FPQSAPHGVVF
FCQSAPHGVVF

SEQ ID NO: 17872 - protein, 11 aa, synthetic construct
  source 1..11: note = Seed: FPQSAPHGVVF
FCQSAPHGVVL

SEQ ID NO: 17873 - protein, 11 aa, synthetic construct
  source 1..11: note = Seed: FPQSAPHGVVF
FCQSAPHGVVM

SEQ ID NO: 17874 - protein, 11 aa, synthetic construct
  source 1..11: note = Seed: FPQSAPHGVVF
FCQSAPHGVVW

SEQ ID NO: 17875 - protein, 11 aa, synthetic construct
  source 1..11: note = Seed: FPQSAPHGVVF
FCQSAPHGVVY

SEQ ID NO: 17876 - protein, 10 aa, synthetic construct
  source 1..10: note = Seed: FTQSRNLQEF
FCQSRNLQEF

SEQ ID NO: 17877 - protein, 9 aa, synthetic construct
  source 1..9: note = Seed: FPREGVFVS
FCREGVFVY

SEQ ID NO: 17878 - protein, 10 aa, synthetic construct
  source 1..10: note = Seed: FTRFFYVLGL
FCRFFYVLGK

SEQ ID NO: 17879 - protein, 10 aa, synthetic construct
  source 1..10: note = Seed: FTRFFYVLGL
FCRFFYVLGL

SEQ ID NO: 17880 - protein, 9 aa, synthetic construct
  source 1..9: note = Seed: FTSDYYQLY
FCSDYYQLW

SEQ ID NO: 17881 - protein, 10 aa, synthetic construct
  source 1..10: note = Seed: FTSDYYQLYS
FCSDYYQLYF

SEQ ID NO: 17882 - protein, 10 aa, synthetic construct
  source 1..10: note = Seed: FTSDYYQLYS
FCSDYYQLYM

SEQ ID NO: 17883 - protein, 10 aa, synthetic construct
  source 1..10: note = Seed: FTSDYYQLYS
FCSDYYQLYY

SEQ ID NO: 17884 - protein, 9 aa, synthetic construct
  source 1..9: note = Seed: FVSLAIDAY
FCSLAIDAY

SEQ ID NO: 17885 - protein, 9 aa, synthetic construct
  source 1..9: note = Seed: FISNSWLMW
FCSNSWLMW

SEQ ID NO: 17886 - protein, 10 aa, synthetic construct
  source 1..10: note = Seed: FSSNVANYQK
FCSNVANYQR

SEQ ID NO: 17887 - protein, 9 aa, synthetic construct
  source 1..9: note = Seed: FFSNVTWFH
FCSNVTWFR

SEQ ID NO: 17888 - protein, 9 aa, synthetic construct
  source 1..9: note = Seed: FFSNVTWFH
FCSNVTWFY

SEQ ID NO: 17889 - protein, 11 aa, synthetic construct
  source 1..11: note = Seed: FISPYNSQNAV
FCSPYNSQNAA

SEQ ID NO: 17890 - protein, 11 aa, synthetic construct
  source 1..11: note = Seed: FISPYNSQNAV
FCSPYNSQNAL

SEQ ID NO: 17891 - protein, 11 aa, synthetic construct
  source 1..11: note = Seed: FISPYNSQNAV
FCSPYNSQNAM

SEQ ID NO: 17892 - protein, 10 aa, synthetic construct
  source 1..10: note = Seed: FFSYFAVHFI
FCSYFAVHFA

SEQ ID NO: 17893 - protein, 10 aa, synthetic construct
  source 1..10: note = Seed: FFSYFAVHFI
FCSYFAVHFF

SEQ ID NO: 17894 - protein, 10 aa, synthetic construct
  source 1..10: note = Seed: FFSYFAVHFI
FCSYFAVHFI

SEQ ID NO: 17895 - protein, 10 aa, synthetic construct
  source 1..10: note = Seed: FFSYFAVHFI
FCSYFAVHFV

SEQ ID NO: 17896 - protein, 10 aa, synthetic construct
  source 1..10: note = Seed: FFSYFAVHFI
FCSYFAVHFW

SEQ ID NO: 17897 - protein, 10 aa, synthetic construct
  source 1..10: note = Seed: FFSYFAVHFI
FCSYFAVHFY

SEQ ID NO: 17898 - protein, 10 aa, synthetic construct
  source 1..10: note = Seed: FVTHSKGLYR
FCTHSKGLYR

SEQ ID NO: 17899 - protein, 10 aa, synthetic construct
  source 1..10: note = Seed: FDTYNLWNTF
FCTYNLWNTF

SEQ ID NO: 17900 - protein, 10 aa, synthetic construct
  source 1..10: note = Seed: FDTYNLWNTF
FCTYNLWNTW

SEQ ID NO: 17901 - protein, 10 aa, synthetic construct
  source 1..10: note = Seed: FDTYNLWNTF
FCTYNLWNTY

SEQ ID NO: 17902 - protein, 9 aa, synthetic construct
  source 1..9: note = Seed: FAVDAAKAY
FCVDAAKAF

SEQ ID NO: 17903 - protein, 9 aa, synthetic construct
  source 1..9: note = Seed: FAVDAAKAY
FCVDAAKAL

SEQ ID NO: 17904 - protein, 9 aa, synthetic construct
  source 1..9: note = Seed: FAVDAAKAY
FCVDAAKAM

SEQ ID NO: 17905 - protein, 9 aa, synthetic construct
  source 1..9: note = Seed: FAVDAAKAY
FCVDAAKAY

SEQ ID NO: 17906 - protein, 10 aa, synthetic construct
  source 1..10: note = Seed: FAVDAAKAYK
FCVDAAKAYR

SEQ ID NO: 17907 - protein, 10 aa, synthetic construct
  source 1..10: note = Seed: FVVSTGYHFR
FCVSTGYHFK

SEQ ID NO: 17908 - protein, 10 aa, synthetic construct
  source 1..10: note = Seed: FVVSTGYHFR
FCVSTGYHFR

SEQ ID NO: 17909 - protein, 9 aa, synthetic construct
  source 1..9: note = Seed: FVVSTGYHF
FCVSTGYHY

SEQ ID NO: 17910 - protein, 10 aa, synthetic construct
  source 1..10: note = Seed: FYWFFSNYLK
FCWFFSNYLF

SEQ ID NO: 17911 - protein, 10 aa, synthetic construct
  source 1..10: note = Seed: FYWFFSNYLK
FCWFFSNYLK

SEQ ID NO: 17912 - protein, 10 aa, synthetic construct
  source 1..10: note = Seed: FYWFFSNYLK
FCWFFSNYLR

SEQ ID NO: 17913 - protein, 10 aa, synthetic construct
  source 1..10: note = Seed: FYWFFSNYLK
FCWFFSNYLY

SEQ ID NO: 17914 - protein, 10 aa, synthetic construct
  source 1..10: note = Seed: FLWLLWPVTL
FCWLLWPVTF

SEQ ID NO: 17915 - protein, 11 aa, synthetic construct
  source 1..11: note = Seed: FLWLLWPVTLA
FCWLLWPVTLI

SEQ ID NO: 17916 - protein, 11 aa, synthetic construct
  source 1..11: note = Seed: FLWLLWPVTLA
FCWLLWPVTLL

SEQ ID NO: 17917 - protein, 11 aa, synthetic construct
  source 1..11: note = Seed: FLWLLWPVTLA
FCWLLWPVTLV

SEQ ID NO: 17918 - protein, 9 aa, synthetic construct
  source 1..9: note = Seed: FSYFAVHFI
FCYFAVHFV

SEQ ID NO: 17919 - protein, 9 aa, synthetic construct
  source 1..9: note = Seed: FCYMHHMEL
FCYMHHMEF

SEQ ID NO: 17920 - protein, 9 aa, synthetic construct
  source 1..9: note = Seed: FCYMHHMEL
FCYMHHMEM

SEQ ID NO: 17921 - protein, 9 aa, synthetic construct
  source 1..9: note = Seed: FCYMHHMEL
FCYMHHMEV

SEQ ID NO: 17922 - protein, 9 aa, synthetic construct
  source 1..9: note = Seed: FCYMHHMEL
FCYMHHMEY

SEQ ID NO: 17923 - protein, 10 aa, synthetic construct
  source 1..10: note = Seed: FYYVWKSYVH
FCYVWKSYVM

SEQ ID NO: 17924 - protein, 10 aa, synthetic construct
  source 1..10: note = Seed: FYYVWKSYVH
FCYVWKSYVY

SEQ ID NO: 17925 - protein, 9 aa, synthetic construct
  source 1..9: note = Seed: FVAAIFYLI
FDAAIFYLK

SEQ ID NO: 17926 - protein, 9 aa, synthetic construct
  source 1..9: note = Seed: FVAAIFYLI
FDAAIFYLR

SEQ ID NO: 17927 - protein, 9 aa, synthetic construct
  source 1..9: note = Seed: FVAAIFYLI
FDAAIFYLV

SEQ ID NO: 17928 - protein, 9 aa, synthetic construct
  source 1..9: note = Seed: FVAAIFYLI
FDAAIFYLY

SEQ ID NO: 17929 - protein, 10 aa, synthetic construct
  source 1..10: note = Seed: FCAFAVDAAK
FDAFAVDAAK

SEQ ID NO: 17930 - protein, 10 aa, synthetic construct
  source 1..10: note = Seed: FCAFAVDAAK
FDAFAVDAAR

SEQ ID NO: 17931 - protein, 10 aa, synthetic construct
  source 1..10: note = Seed: FIASFRLFAR
FDASFRLFAK

SEQ ID NO: 17932 - protein, 10 aa, synthetic construct
  source 1..10: note = Seed: FIASFRLFAR
FDASFRLFAR

SEQ ID NO: 17933 - protein, 10 aa, synthetic construct
  source 1..10: note = Seed: FFASFYYVWK
FDASFYYVWK

SEQ ID NO: 17934 - protein, 10 aa, synthetic construct
  source 1..10: note = Seed: FFASFYYVWK
FDASFYYVWR

SEQ ID NO: 17935 - protein, 9 aa, synthetic construct
  source 1..9: note = Seed: FFASFYYVW
FDASFYYVY

SEQ ID NO: 17936 - protein, 10 aa, synthetic construct
  source 1..10: note = Seed: FNATRFASVY
FDATRFASVF

SEQ ID NO: 17937 - protein, 10 aa, synthetic construct
  source 1..10: note = Seed: FNATRFASVY
FDATRFASVM

SEQ ID NO: 17938 - protein, 10 aa, synthetic construct
  source 1..10: note = Seed: FNATRFASVY
FDATRFASVY

SEQ ID NO: 17939 - protein, 10 aa, synthetic construct
  source 1..10: note = Seed: FSAVGNICYT
FDAVGNICYV

SEQ ID NO: 17940 - protein, 9 aa, synthetic construct
  source 1..9: note = Seed: FLAYILFTR
FDAYILFTR

SEQ ID NO: 17941 - protein, 10 aa, synthetic construct
  source 1..10: note = Seed: FLAYILFTRF
FDAYILFTRR

SEQ ID NO: 17942 - protein, 11 aa, synthetic construct
  source 1..11: note = Seed: FPDLNGDVVAI
FDDLNGDVVAI

SEQ ID NO: 17943 - protein, 11 aa, synthetic construct
  source 1..11: note = Seed: FPDLNGDVVAI
FDDLNGDVVAL

SEQ ID NO: 17944 - protein, 11 aa, synthetic construct
  source 1..11: note = Seed: FPDLNGDVVAI
FDDLNGDVVAV

SEQ ID NO: 17945 - protein, 10 aa, synthetic construct
  source 1..10: note = Seed: FVFKNIDGYF
FDFKNIDGYY

SEQ ID NO: 17946 - protein, 10 aa, synthetic construct
  source 1..10: note = Seed: FLFVAAIFYL
FDFVAAIFYY

SEQ ID NO: 17947 - protein, 10 aa, synthetic construct
  source 1..10: note = Seed: FLGYFCTCYF
FDGYFCTCYY

SEQ ID NO: 17948 - protein, 10 aa, synthetic construct
  source 1..10: note = Seed: FKIYSKHTPI
FDIYSKHTPA

SEQ ID NO: 17949 - protein, 10 aa, synthetic construct
  source 1..10: note = Seed: FKIYSKHTPI
FDIYSKHTPF

SEQ ID NO: 17950 - protein, 10 aa, synthetic construct
  source 1..10: note = Seed: FKIYSKHTPI
FDIYSKHTPI

SEQ ID NO: 17951 - protein, 10 aa, synthetic construct
  source 1..10: note = Seed: FKIYSKHTPI
FDIYSKHTPL

SEQ ID NO: 17952 - protein, 10 aa, synthetic construct
  source 1..10: note = Seed: FKIYSKHTPI
FDIYSKHTPV

SEQ ID NO: 17953 - protein, 10 aa, synthetic construct
  source 1..10: note = Seed: FKIYSKHTPI
FDIYSKHTPY

SEQ ID NO: 17954 - protein, 10 aa, synthetic construct
  source 1..10: note = Seed: FKLKDCVMYA
FDLKDCVMYA

SEQ ID NO: 17955 - protein, 10 aa, synthetic construct
  source 1..10: note = Seed: FKLKDCVMYA
FDLKDCVMYI

SEQ ID NO: 17956 - protein, 10 aa, synthetic construct
  source 1..10: note = Seed: FKLKDCVMYA
FDLKDCVMYL

SEQ ID NO: 17957 - protein, 10 aa, synthetic construct
  source 1..10: note = Seed: FKLKDCVMYA
FDLKDCVMYM

SEQ ID NO: 17958 - protein, 10 aa, synthetic construct
  source 1..10: note = Seed: FKLKDCVMYA
FDLKDCVMYS

SEQ ID NO: 17959 - protein, 10 aa, synthetic construct
  source 1..10: note = Seed: FKLKDCVMYA
FDLKDCVMYT

SEQ ID NO: 17960 - protein, 10 aa, synthetic construct
  source 1..10: note = Seed: FKLKDCVMYA
FDLKDCVMYV

SEQ ID NO: 17961 - protein, 10 aa, synthetic construct
  source 1..10: note = Seed: FPLKLRGTAV
FDLKLRGTAF

SEQ ID NO: 17962 - protein, 10 aa, synthetic construct
  source 1..10: note = Seed: FPLKLRGTAV
FDLKLRGTAI

SEQ ID NO: 17963 - protein, 10 aa, synthetic construct
  source 1..10: note = Seed: FPLKLRGTAV
FDLKLRGTAL

SEQ ID NO: 17964 - protein, 10 aa, synthetic construct
  source 1..10: note = Seed: FPLKLRGTAV
FDLKLRGTAM

SEQ ID NO: 17965 - protein, 10 aa, synthetic construct
  source 1..10: note = Seed: FPLKLRGTAV
FDLKLRGTAV

SEQ ID NO: 17966 - protein, 11 aa, synthetic construct
  source 1..11: note = Seed: FPLKLRGTAVM
FDLKLRGTAVF

SEQ ID NO: 17967 - protein, 11 aa, synthetic construct
  source 1..11: note = Seed: FPLKLRGTAVM
FDLKLRGTAVY

SEQ ID NO: 17968 - protein, 10 aa, synthetic construct
  source 1..10: note = Seed: FLLNKEMYLK
FDLNKEMYLA

SEQ ID NO: 17969 - protein, 10 aa, synthetic construct
  source 1..10: note = Seed: FLLNKEMYLK
FDLNKEMYLI

SEQ ID NO: 17970 - protein, 10 aa, synthetic construct
  source 1..10: note = Seed: FLLNKEMYLK
FDLNKEMYLL

SEQ ID NO: 17971 - protein, 10 aa, synthetic construct
  source 1..10: note = Seed: FLLNKEMYLK
FDLNKEMYLM

SEQ ID NO: 17972 - protein, 10 aa, synthetic construct
  source 1..10: note = Seed: FLLNKEMYLK
FDLNKEMYLV

SEQ ID NO: 17973 - protein, 10 aa, synthetic construct
  source 1..10: note = Seed: FYLTNDVSFL
FDLTNDVSFA

SEQ ID NO: 17974 - protein, 10 aa, synthetic construct
  source 1..10: note = Seed: FYLTNDVSFL
FDLTNDVSFI

SEQ ID NO: 17975 - protein, 10 aa, synthetic construct
  source 1..10: note = Seed: FYLTNDVSFL
FDLTNDVSFL

SEQ ID NO: 17976 - protein, 11 aa, synthetic construct
  source 1..11: note = Seed: FYLTNDVSFLA
FDLTNDVSFLL

SEQ ID NO: 17977 - protein, 11 aa, synthetic construct
  source 1..11: note = Seed: FYLTNDVSFLA
FDLTNDVSFLV

SEQ ID NO: 17978 - protein, 10 aa, synthetic construct
  source 1..10: note = Seed: FYLTNDVSFL
FDLTNDVSFM

SEQ ID NO: 17979 - protein, 10 aa, synthetic construct
  source 1..10: note = Seed: FYLTNDVSFL
FDLTNDVSFV

SEQ ID NO: 17980 - protein, 10 aa, synthetic construct
  source 1..10: note = Seed: FQLTPIAVQM
FDLTPIAVQA

SEQ ID NO: 17981 - protein, 10 aa, synthetic construct
  source 1..10: note = Seed: FQLTPIAVQM
FDLTPIAVQI

SEQ ID NO: 17982 - protein, 10 aa, synthetic construct
  source 1..10: note = Seed: FQLTPIAVQM
FDLTPIAVQL

SEQ ID NO: 17983 - protein, 10 aa, synthetic construct
  source 1..10: note = Seed: FQLTPIAVQM
FDLTPIAVQM

SEQ ID NO: 17984 - protein, 10 aa, synthetic construct
  source 1..10: note = Seed: FQLTPIAVQM
FDLTPIAVQV

SEQ ID NO: 17985 - protein, 10 aa, synthetic construct
  source 1..10: note = Seed: FELTSMKYFV
FDLTSMKYFA

SEQ ID NO: 17986 - protein, 10 aa, synthetic construct
  source 1..10: note = Seed: FELTSMKYFV
FDLTSMKYFI

SEQ ID NO: 17987 - protein, 10 aa, synthetic construct
  source 1..10: note = Seed: FELTSMKYFV
FDLTSMKYFL

SEQ ID NO: 17988 - protein, 10 aa, synthetic construct
  source 1..10: note = Seed: FELTSMKYFV
FDLTSMKYFM

SEQ ID NO: 17989 - protein, 10 aa, synthetic construct
  source 1..10: note = Seed: FELTSMKYFV
FDLTSMKYFV

SEQ ID NO: 17990 - protein, 10 aa, synthetic construct
  source 1..10: note = Seed: FGLVAEWFLA
FDLVAEWFLA

SEQ ID NO: 17991 - protein, 10 aa, synthetic construct
  source 1..10: note = Seed: FGLVAEWFLA
FDLVAEWFLI

SEQ ID NO: 17992 - protein, 10 aa, synthetic construct
  source 1..10: note = Seed: FGLVAEWFLA
FDLVAEWFLL

SEQ ID NO: 17993 - protein, 10 aa, synthetic construct
  source 1..10: note = Seed: FGLVAEWFLA
FDLVAEWFLM

SEQ ID NO: 17994 - protein, 10 aa, synthetic construct
  source 1..10: note = Seed: FGLVAEWFLA
FDLVAEWFLV

SEQ ID NO: 17995 - protein, 10 aa, synthetic construct
  source 1..10: note = Seed: FVLWAHGFEL
FDLWAHGFEA

SEQ ID NO: 17996 - protein, 10 aa, synthetic construct
  source 1..10: note = Seed: FVLWAHGFEL
FDLWAHGFEI

SEQ ID NO: 17997 - protein, 10 aa, synthetic construct
  source 1..10: note = Seed: FVLWAHGFEL
FDLWAHGFEL

SEQ ID NO: 17998 - protein, 11 aa, synthetic construct
  source 1..11: note = Seed: FVLWAHGFELT
FDLWAHGFELA

SEQ ID NO: 17999 - protein, 11 aa, synthetic construct
  source 1..11: note = Seed: FVLWAHGFELT
FDLWAHGFELC

SEQ ID NO: 18000 - protein, 11 aa, synthetic construct
  source 1..11: note = Seed: FVLWAHGFELT
FDLWAHGFELD

SEQ ID NO: 18001 - protein, 11 aa, synthetic construct
  source 1..11: note = Seed: FVLWAHGFELT
FDLWAHGFELE

SEQ ID NO: 18002 - protein, 11 aa, synthetic construct
  source 1..11: note = Seed: FVLWAHGFELT
FDLWAHGFELF

SEQ ID NO: 18003 - protein, 11 aa, synthetic construct
  source 1..11: note = Seed: FVLWAHGFELT
FDLWAHGFELG

SEQ ID NO: 18004 - protein, 11 aa, synthetic construct
  source 1..11: note = Seed: FVLWAHGFELT
FDLWAHGFELH

SEQ ID NO: 18005 - protein, 11 aa, synthetic construct
  source 1..11: note = Seed: FVLWAHGFELT
FDLWAHGFELI

SEQ ID NO: 18006 - protein, 11 aa, synthetic construct
  source 1..11: note = Seed: FVLWAHGFELT
FDLWAHGFELK

SEQ ID NO: 18007 - protein, 11 aa, synthetic construct
  source 1..11: note = Seed: FVLWAHGFELT
FDLWAHGFELL

SEQ ID NO: 18008 - protein, 11 aa, synthetic construct
  source 1..11: note = Seed: FVLWAHGFELT
FDLWAHGFELM

SEQ ID NO: 18009 - protein, 11 aa, synthetic construct
  source 1..11: note = Seed: FVLWAHGFELT
FDLWAHGFELN

SEQ ID NO: 18010 - protein, 11 aa, synthetic construct
  source 1..11: note = Seed: FVLWAHGFELT
FDLWAHGFELP

SEQ ID NO: 18011 - protein, 11 aa, synthetic construct
  source 1..11: note = Seed: FVLWAHGFELT
FDLWAHGFELQ

SEQ ID NO: 18012 - protein, 11 aa, synthetic construct
  source 1..11: note = Seed: FVLWAHGFELT
FDLWAHGFELR

SEQ ID NO: 18013 - protein, 11 aa, synthetic construct
  source 1..11: note = Seed: FVLWAHGFELT
FDLWAHGFELS

SEQ ID NO: 18014 - protein, 11 aa, synthetic construct
  source 1..11: note = Seed: FVLWAHGFELT
FDLWAHGFELT

SEQ ID NO: 18015 - protein, 11 aa, synthetic construct
  source 1..11: note = Seed: FVLWAHGFELT
FDLWAHGFELV

SEQ ID NO: 18016 - protein, 11 aa, synthetic construct
  source 1..11: note = Seed: FVLWAHGFELT
FDLWAHGFELW

SEQ ID NO: 18017 - protein, 11 aa, synthetic construct
  source 1..11: note = Seed: FVLWAHGFELT
FDLWAHGFELY

SEQ ID NO: 18018 - protein, 10 aa, synthetic construct
  source 1..10: note = Seed: FVLWAHGFEL
FDLWAHGFEM

SEQ ID NO: 18019 - protein, 10 aa, synthetic construct
  source 1..10: note = Seed: FVLWAHGFEL
FDLWAHGFES

SEQ ID NO: 18020 - protein, 10 aa, synthetic construct
  source 1..10: note = Seed: FVLWAHGFEL
FDLWAHGFET

SEQ ID NO: 18021 - protein, 10 aa, synthetic construct
  source 1..10: note = Seed: FVLWAHGFEL
FDLWAHGFEV

SEQ ID NO: 18022 - protein, 10 aa, synthetic construct
  source 1..10: note = Seed: FSMMILSDDA
FDMMILSDDL

SEQ ID NO: 18023 - protein, 10 aa, synthetic construct
  source 1..10: note = Seed: FSMMILSDDA
FDMMILSDDV

SEQ ID NO: 18024 - protein, 9 aa, synthetic construct
  source 1..9: note = Seed: FAMQMAYRF
FDMQMAYRY

SEQ ID NO: 18025 - protein, 10 aa, synthetic construct
  source 1..10: note = Seed: FDMSKFPLKL
FDMSKFPLKA

SEQ ID NO: 18026 - protein, 10 aa, synthetic construct
  source 1..10: note = Seed: FDMSKFPLKL
FDMSKFPLKI

SEQ ID NO: 18027 - protein, 10 aa, synthetic construct
  source 1..10: note = Seed: FDMSKFPLKL
FDMSKFPLKV

SEQ ID NO: 18028 - protein, 10 aa, synthetic construct
  source 1..10: note = Seed: FNMVYMPASW
FDMVYMPASF

SEQ ID NO: 18029 - protein, 10 aa, synthetic construct
  source 1..10: note = Seed: FNMVYMPASW
FDMVYMPASY

SEQ ID NO: 18030 - protein, 11 aa, synthetic construct
  source 1..11: note = Seed: FTNVYADSFVI
FDNVYADSFVV

SEQ ID NO: 18031 - protein, 10 aa, synthetic construct
  source 1..10: note = Seed: FTPFDVVRQC
FDPFDVVRQA

SEQ ID NO: 18032 - protein, 10 aa, synthetic construct
  source 1..10: note = Seed: FLPFFSNVTW
FDPFFSNVTF

SEQ ID NO: 18033 - protein, 10 aa, synthetic construct
  source 1..10: note = Seed: FLPFFSNVTW
FDPFFSNVTH

SEQ ID NO: 18034 - protein, 10 aa, synthetic construct
  source 1..10: note = Seed: FLPFFSNVTW
FDPFFSNVTL

SEQ ID NO: 18035 - protein, 10 aa, synthetic construct
  source 1..10: note = Seed: FLPFFSNVTW
FDPFFSNVTM

SEQ ID NO: 18036 - protein, 10 aa, synthetic construct
  source 1..10: note = Seed: FLPFFSNVTW
FDPFFSNVTW

SEQ ID NO: 18037 - protein, 10 aa, synthetic construct
  source 1..10: note = Seed: FLPFFSNVTW
FDPFFSNVTY

SEQ ID NO: 18038 - protein, 10 aa, synthetic construct
  source 1..10: note = Seed: FTPLVPFWIT
FDPLVPFWIA

SEQ ID NO: 18039 - protein, 11 aa, synthetic construct
  source 1..11: note = Seed: FTPLVPFWITI
FDPLVPFWITV

SEQ ID NO: 18040 - protein, 10 aa, synthetic construct
  source 1..10: note = Seed: FLPRVFSAVG
FDPRVFSAVF

SEQ ID NO: 18041 - protein, 10 aa, synthetic construct
  source 1..10: note = Seed: FLPRVFSAVG
FDPRVFSAVI

SEQ ID NO: 18042 - protein, 10 aa, synthetic construct
  source 1..10: note = Seed: FLPRVFSAVG
FDPRVFSAVL

SEQ ID NO: 18043 - protein, 10 aa, synthetic construct
  source 1..10: note = Seed: FLPRVFSAVG
FDPRVFSAVM

SEQ ID NO: 18044 - protein, 10 aa, synthetic construct
  source 1..10: note = Seed: FLPRVFSAVG
FDPRVFSAVV

SEQ ID NO: 18045 - protein, 11 aa, synthetic construct
  source 1..11: note = Seed: FPQSAPHGVVF
FDQSAPHGVVF

SEQ ID NO: 18046 - protein, 11 aa, synthetic construct
  source 1..11: note = Seed: FPQSAPHGVVF
FDQSAPHGVVL

SEQ ID NO: 18047 - protein, 11 aa, synthetic construct
  source 1..11: note = Seed: FPQSAPHGVVF
FDQSAPHGVVM

SEQ ID NO: 18048 - protein, 11 aa, synthetic construct
  source 1..11: note = Seed: FPQSAPHGVVF
FDQSAPHGVVW

SEQ ID NO: 18049 - protein, 11 aa, synthetic construct
  source 1..11: note = Seed: FPQSAPHGVVF
FDQSAPHGVVY

SEQ ID NO: 18050 - protein, 10 aa, synthetic construct
  source 1..10: note = Seed: FTQSRNLQEF
FDQSRNLQEF

SEQ ID NO: 18051 - protein, 10 aa, synthetic construct
  source 1..10: note = Seed: FTRFFYVLGL
FDRFFYVLGK

SEQ ID NO: 18052 - protein, 10 aa, synthetic construct
  source 1..10: note = Seed: FTRFFYVLGL
FDRFFYVLGL

SEQ ID NO: 18053 - protein, 10 aa, synthetic construct
  source 1..10: note = Seed: FTSDYYQLYS
FDSDYYQLYF

SEQ ID NO: 18054 - protein, 10 aa, synthetic construct
  source 1..10: note = Seed: FTSDYYQLYS
FDSDYYQLYM

SEQ ID NO: 18055 - protein, 10 aa, synthetic construct
  source 1..10: note = Seed: FTSDYYQLYS
FDSDYYQLYY

SEQ ID NO: 18056 - protein, 10 aa, synthetic construct
  source 1..10: note = Seed: FSSNVANYQK
FDSNVANYQR

SEQ ID NO: 18057 - protein, 11 aa, synthetic construct
  source 1..11: note = Seed: FISPYNSQNAV
FDSPYNSQNAA

SEQ ID NO: 18058 - protein, 11 aa, synthetic construct
  source 1..11: note = Seed: FISPYNSQNAV
FDSPYNSQNAL

SEQ ID NO: 18059 - protein, 11 aa, synthetic construct
  source 1..11: note = Seed: FISPYNSQNAV
FDSPYNSQNAM

SEQ ID NO: 18060 - protein, 10 aa, synthetic construct
  source 1..10: note = Seed: FFSYFAVHFI
FDSYFAVHFA

SEQ ID NO: 18061 - protein, 10 aa, synthetic construct
  source 1..10: note = Seed: FFSYFAVHFI
FDSYFAVHFF

SEQ ID NO: 18062 - protein, 10 aa, synthetic construct
  source 1..10: note = Seed: FFSYFAVHFI
FDSYFAVHFI

SEQ ID NO: 18063 - protein, 10 aa, synthetic construct
  source 1..10: note = Seed: FFSYFAVHFI
FDSYFAVHFV

SEQ ID NO: 18064 - protein, 10 aa, synthetic construct
  source 1..10: note = Seed: FFSYFAVHFI
FDSYFAVHFW

SEQ ID NO: 18065 - protein, 10 aa, synthetic construct
  source 1..10: note = Seed: FFSYFAVHFI
FDSYFAVHFY

SEQ ID NO: 18066 - protein, 10 aa, synthetic construct
  source 1..10: note = Seed: FVTHSKGLYR
FDTHSKGLYR

SEQ ID NO: 18067 - protein, 10 aa, synthetic construct
  source 1..10: note = Seed: FDTYNLWNTF
FDTYNLWNTW

SEQ ID NO: 18068 - protein, 10 aa, synthetic construct
  source 1..10: note = Seed: FDTYNLWNTF
FDTYNLWNTY

SEQ ID NO: 18069 - protein, 10 aa, synthetic construct
  source 1..10: note = Seed: FAVDAAKAYK
FDVDAAKAYR

SEQ ID NO: 18070 - protein, 10 aa, synthetic construct
  source 1..10: note = Seed: FVVSTGYHFR
FDVSTGYHFK

SEQ ID NO: 18071 - protein, 10 aa, synthetic construct
  source 1..10: note = Seed: FVVSTGYHFR
FDVSTGYHFR

SEQ ID NO: 18072 - protein, 10 aa, synthetic construct
  source 1..10: note = Seed: FYWFFSNYLK
FDWFFSNYLF

SEQ ID NO: 18073 - protein, 10 aa, synthetic construct
  source 1..10: note = Seed: FYWFFSNYLK
FDWFFSNYLK

SEQ ID NO: 18074 - protein, 10 aa, synthetic construct
  source 1..10: note = Seed: FYWFFSNYLK
FDWFFSNYLR

SEQ ID NO: 18075 - protein, 10 aa, synthetic construct
  source 1..10: note = Seed: FYWFFSNYLK
FDWFFSNYLY

SEQ ID NO: 18076 - protein, 10 aa, synthetic construct
  source 1..10: note = Seed: FLWLLWPVTL
FDWLLWPVTF

SEQ ID NO: 18077 - protein, 11 aa, synthetic construct
  source 1..11: note = Seed: FLWLLWPVTLA
FDWLLWPVTLI

SEQ ID NO: 18078 - protein, 11 aa, synthetic construct
  source 1..11: note = Seed: FLWLLWPVTLA
FDWLLWPVTLL

SEQ ID NO: 18079 - protein, 11 aa, synthetic construct
  source 1..11: note = Seed: FLWLLWPVTLA
FDWLLWPVTLV

SEQ ID NO: 18080 - protein, 9 aa, synthetic construct
  source 1..9: note = Seed: FCYMHHMEL
FDYMHHMEY

SEQ ID NO: 18081 - protein, 10 aa, synthetic construct
  source 1..10: note = Seed: FYYVWKSYVH
FDYVWKSYVM

SEQ ID NO: 18082 - protein, 10 aa, synthetic construct
  source 1..10: note = Seed: FYYVWKSYVH
FDYVWKSYVY

SEQ ID NO: 18083 - protein, 9 aa, synthetic construct
  source 1..9: note = Seed: FVAAIFYLI
FEAAIFYLL

SEQ ID NO: 18084 - protein, 9 aa, synthetic construct
  source 1..9: note = Seed: FVAAIFYLI
FEAAIFYLR

SEQ ID NO: 18085 - protein, 9 aa, synthetic construct
  source 1..9: note = Seed: FVAAIFYLI
FEAAIFYLV

SEQ ID NO: 18086 - protein, 9 aa, synthetic construct
  source 1..9: note = Seed: FVAAIFYLI
FEAAIFYLY

SEQ ID NO: 18087 - protein, 10 aa, synthetic construct
  source 1..10: note = Seed: FCAFAVDAAK
FEAFAVDAAK

SEQ ID NO: 18088 - protein, 10 aa, synthetic construct
  source 1..10: note = Seed: FCAFAVDAAK
FEAFAVDAAR

SEQ ID NO: 18089 - protein, 10 aa, synthetic construct
  source 1..10: note = Seed: FIASFRLFAR
FEASFRLFAK

SEQ ID NO: 18090 - protein, 10 aa, synthetic construct
  source 1..10: note = Seed: FIASFRLFAR
FEASFRLFAR

SEQ ID NO: 18091 - protein, 10 aa, synthetic construct
  source 1..10: note = Seed: FFASFYYVWK
FEASFYYVWK

SEQ ID NO: 18092 - protein, 10 aa, synthetic construct
  source 1..10: note = Seed: FFASFYYVWK
FEASFYYVWR

SEQ ID NO: 18093 - protein, 9 aa, synthetic construct
  source 1..9: note = Seed: FFASFYYVW
FEASFYYVY

SEQ ID NO: 18094 - protein, 10 aa, synthetic construct
  source 1..10: note = Seed: FNATRFASVY
FEATRFASVF

SEQ ID NO: 18095 - protein, 10 aa, synthetic construct
  source 1..10: note = Seed: FNATRFASVY
FEATRFASVM

SEQ ID NO: 18096 - protein, 10 aa, synthetic construct
  source 1..10: note = Seed: FNATRFASVY
FEATRFASVY

SEQ ID NO: 18097 - protein, 10 aa, synthetic construct
  source 1..10: note = Seed: FSAVGNICYT
FEAVGNICYV

SEQ ID NO: 18098 - protein, 11 aa, synthetic construct
  source 1..11: note = Seed: FPDLNGDVVAI
FEDLNGDVVAI

SEQ ID NO: 18099 - protein, 11 aa, synthetic construct
  source 1..11: note = Seed: FPDLNGDVVAI
FEDLNGDVVAL

SEQ ID NO: 18100 - protein, 11 aa, synthetic construct
  source 1..11: note = Seed: FPDLNGDVVAI
FEDLNGDVVAV

SEQ ID NO: 18101 - protein, 9 aa, synthetic construct
  source 1..9: note = Seed: FEEAALCTF
FEEAALCTI

SEQ ID NO: 18102 - protein, 9 aa, synthetic construct
  source 1..9: note = Seed: FEEAALCTF
FEEAALCTL

SEQ ID NO: 18103 - protein, 9 aa, synthetic construct
  source 1..9: note = Seed: FEEAALCTF
FEEAALCTM

SEQ ID NO: 18104 - protein, 9 aa, synthetic construct
  source 1..9: note = Seed: FEEAALCTF
FEEAALCTV

SEQ ID NO: 18105 - protein, 9 aa, synthetic construct
  source 1..9: note = Seed: FEEAALCTF
FEEAALCTY

SEQ ID NO: 18106 - protein, 10 aa, synthetic construct
  source 1..10: note = Seed: FVFKNIDGYF
FEFKNIDGYY

SEQ ID NO: 18107 - protein, 10 aa, synthetic construct
  source 1..10: note = Seed: FLFVAAIFYL
FEFVAAIFYY

SEQ ID NO: 18108 - protein, 9 aa, synthetic construct
  source 1..9: note = Seed: FNGVSFSTF
FEGVSFSTF

SEQ ID NO: 18109 - protein, 9 aa, synthetic construct
  source 1..9: note = Seed: FNGVSFSTF
FEGVSFSTY

SEQ ID NO: 18110 - protein, 10 aa, synthetic construct
  source 1..10: note = Seed: FLGYFCTCYF
FEGYFCTCYY

SEQ ID NO: 18111 - protein, 9 aa, synthetic construct
  source 1..9: note = Seed: FLHFLPRVF
FEHFLPRVF

SEQ ID NO: 18112 - protein, 9 aa, synthetic construct
  source 1..9: note = Seed: FLHFLPRVF
FEHFLPRVM

SEQ ID NO: 18113 - protein, 9 aa, synthetic construct
  source 1..9: note = Seed: FLHFLPRVF
FEHFLPRVY

SEQ ID NO: 18114 - protein, 9 aa, synthetic construct
  source 1..9: note = Seed: FEIKLAKKF
FEIKLAKKL

SEQ ID NO: 18115 - protein, 9 aa, synthetic construct
  source 1..9: note = Seed: FEIKLAKKF
FEIKLAKKW

SEQ ID NO: 18116 - protein, 9 aa, synthetic construct
  source 1..9: note = Seed: FEIKLAKKF
FEIKLAKKY

SEQ ID NO: 18117 - protein, 10 aa, synthetic construct
  source 1..10: note = Seed: FKIYSKHTPI
FEIYSKHTPA

SEQ ID NO: 18118 - protein, 10 aa, synthetic construct
  source 1..10: note = Seed: FKIYSKHTPI
FEIYSKHTPF

SEQ ID NO: 18119 - protein, 10 aa, synthetic construct
  source 1..10: note = Seed: FKIYSKHTPI
FEIYSKHTPI

SEQ ID NO: 18120 - protein, 10 aa, synthetic construct
  source 1..10: note = Seed: FKIYSKHTPI
FEIYSKHTPL

SEQ ID NO: 18121 - protein, 10 aa, synthetic construct
  source 1..10: note = Seed: FKIYSKHTPI
FEIYSKHTPM

SEQ ID NO: 18122 - protein, 10 aa, synthetic construct
  source 1..10: note = Seed: FKIYSKHTPI
FEIYSKHTPV

SEQ ID NO: 18123 - protein, 10 aa, synthetic construct
  source 1..10: note = Seed: FKIYSKHTPI
FEIYSKHTPY

SEQ ID NO: 18124 - protein, 9 aa, synthetic construct
  source 1..9: note = Seed: FEKMVSLLS
FEKMVSLLA

SEQ ID NO: 18125 - protein, 9 aa, synthetic construct
  source 1..9: note = Seed: FRKSNLKPF
FEKSNLKPF

SEQ ID NO: 18126 - protein, 10 aa, synthetic construct
  source 1..10: note = Seed: FPLCANGQVF
FELCANGQVF

SEQ ID NO: 18127 - protein, 10 aa, synthetic construct
  source 1..10: note = Seed: FPLCANGQVF
FELCANGQVY

SEQ ID NO: 18128 - protein, 10 aa, synthetic construct
  source 1..10: note = Seed: FKLKDCVMYA
FELKDCVMYA

SEQ ID NO: 18129 - protein, 10 aa, synthetic construct
  source 1..10: note = Seed: FKLKDCVMYA
FELKDCVMYI

SEQ ID NO: 18130 - protein, 10 aa, synthetic construct
  source 1..10: note = Seed: FKLKDCVMYA
FELKDCVMYL

SEQ ID NO: 18131 - protein, 10 aa, synthetic construct
  source 1..10: note = Seed: FKLKDCVMYA
FELKDCVMYM

SEQ ID NO: 18132 - protein, 10 aa, synthetic construct
  source 1..10: note = Seed: FKLKDCVMYA
FELKDCVMYS

SEQ ID NO: 18133 - protein, 10 aa, synthetic construct
  source 1..10: note = Seed: FKLKDCVMYA
FELKDCVMYT

SEQ ID NO: 18134 - protein, 10 aa, synthetic construct
  source 1..10: note = Seed: FKLKDCVMYA
FELKDCVMYV

SEQ ID NO: 18135 - protein, 10 aa, synthetic construct
  source 1..10: note = Seed: FPLKLRGTAV
FELKLRGTAF

SEQ ID NO: 18136 - protein, 10 aa, synthetic construct
  source 1..10: note = Seed: FPLKLRGTAV
FELKLRGTAI

SEQ ID NO: 18137 - protein, 10 aa, synthetic construct
  source 1..10: note = Seed: FPLKLRGTAV
FELKLRGTAL

SEQ ID NO: 18138 - protein, 10 aa, synthetic construct
  source 1..10: note = Seed: FPLKLRGTAV
FELKLRGTAM

SEQ ID NO: 18139 - protein, 10 aa, synthetic construct
  source 1..10: note = Seed: FPLKLRGTAV
FELKLRGTAV

SEQ ID NO: 18140 - protein, 11 aa, synthetic construct
  source 1..11: note = Seed: FPLKLRGTAVM
FELKLRGTAVF

SEQ ID NO: 18141 - protein, 11 aa, synthetic construct
  source 1..11: note = Seed: FPLKLRGTAVM
FELKLRGTAVY

SEQ ID NO: 18142 - protein, 10 aa, synthetic construct
  source 1..10: note = Seed: FLLNKEMYLK
FELNKEMYLA

SEQ ID NO: 18143 - protein, 10 aa, synthetic construct
  source 1..10: note = Seed: FLLNKEMYLK
FELNKEMYLI

SEQ ID NO: 18144 - protein, 10 aa, synthetic construct
  source 1..10: note = Seed: FLLNKEMYLK
FELNKEMYLL

SEQ ID NO: 18145 - protein, 10 aa, synthetic construct
  source 1..10: note = Seed: FLLNKEMYLK
FELNKEMYLM

SEQ ID NO: 18146 - protein, 10 aa, synthetic construct
  source 1..10: note = Seed: FLLNKEMYLK
FELNKEMYLV

SEQ ID NO: 18147 - protein, 9 aa, synthetic construct
  source 1..9: note = Seed: FYLTNDVSF
FELTNDVSF

SEQ ID NO: 18148 - protein, 10 aa, synthetic construct
  source 1..10: note = Seed: FYLTNDVSFL
FELTNDVSFA

SEQ ID NO: 18149 - protein, 10 aa, synthetic construct
  source 1..10: note = Seed: FYLTNDVSFL
FELTNDVSFI

SEQ ID NO: 18150 - protein, 10 aa, synthetic construct
  source 1..10: note = Seed: FYLTNDVSFL
FELTNDVSFL

SEQ ID NO: 18151 - protein, 11 aa, synthetic construct
  source 1..11: note = Seed: FYLTNDVSFLA
FELTNDVSFLL

SEQ ID NO: 18152 - protein, 11 aa, synthetic construct
  source 1..11: note = Seed: FYLTNDVSFLA
FELTNDVSFLV

SEQ ID NO: 18153 - protein, 10 aa, synthetic construct
  source 1..10: note = Seed: FYLTNDVSFL
FELTNDVSFM

SEQ ID NO: 18154 - protein, 10 aa, synthetic construct
  source 1..10: note = Seed: FYLTNDVSFL
FELTNDVSFV

SEQ ID NO: 18155 - protein, 9 aa, synthetic construct
  source 1..9: note = Seed: FYLTNDVSF
FELTNDVSY

SEQ ID NO: 18156 - protein, 10 aa, synthetic construct
  source 1..10: note = Seed: FQLTPIAVQM
FELTPIAVQA

SEQ ID NO: 18157 - protein, 10 aa, synthetic construct
  source 1..10: note = Seed: FQLTPIAVQM
FELTPIAVQI

SEQ ID NO: 18158 - protein, 10 aa, synthetic construct
  source 1..10: note = Seed: FQLTPIAVQM
FELTPIAVQL

SEQ ID NO: 18159 - protein, 10 aa, synthetic construct
  source 1..10: note = Seed: FQLTPIAVQM
FELTPIAVQM

SEQ ID NO: 18160 - protein, 10 aa, synthetic construct
  source 1..10: note = Seed: FQLTPIAVQM
FELTPIAVQV

SEQ ID NO: 18161 - protein, 10 aa, synthetic construct
  source 1..10: note = Seed: FELTSMKYFV
FELTSMKYFA

SEQ ID NO: 18162 - protein, 10 aa, synthetic construct
  source 1..10: note = Seed: FELTSMKYFV
FELTSMKYFI

SEQ ID NO: 18163 - protein, 10 aa, synthetic construct
  source 1..10: note = Seed: FELTSMKYFV
FELTSMKYFL

SEQ ID NO: 18164 - protein, 10 aa, synthetic construct
  source 1..10: note = Seed: FELTSMKYFV
FELTSMKYFM

SEQ ID NO: 18165 - protein, 9 aa, synthetic construct
  source 1..9: note = Seed: FELTSMKYF
FELTSMKYL

SEQ ID NO: 18166 - protein, 9 aa, synthetic construct
  source 1..9: note = Seed: FELTSMKYF
FELTSMKYW

SEQ ID NO: 18167 - protein, 10 aa, synthetic construct
  source 1..10: note = Seed: FGLVAEWFLA
FELVAEWFLA

SEQ ID NO: 18168 - protein, 10 aa, synthetic construct
  source 1..10: note = Seed: FGLVAEWFLA
FELVAEWFLI

SEQ ID NO: 18169 - protein, 10 aa, synthetic construct
  source 1..10: note = Seed: FGLVAEWFLA
FELVAEWFLL

SEQ ID NO: 18170 - protein, 10 aa, synthetic construct
  source 1..10: note = Seed: FGLVAEWFLA
FELVAEWFLM

SEQ ID NO: 18171 - protein, 10 aa, synthetic construct
  source 1..10: note = Seed: FGLVAEWFLA
FELVAEWFLV

SEQ ID NO: 18172 - protein, 10 aa, synthetic construct
  source 1..10: note = Seed: FVLWAHGFEL
FELWAHGFEA

SEQ ID NO: 18173 - protein, 10 aa, synthetic construct
  source 1..10: note = Seed: FVLWAHGFEL
FELWAHGFEI

SEQ ID NO: 18174 - protein, 10 aa, synthetic construct
  source 1..10: note = Seed: FVLWAHGFEL
FELWAHGFEL

SEQ ID NO: 18175 - protein, 11 aa, synthetic construct
  source 1..11: note = Seed: FVLWAHGFELT
FELWAHGFELA

SEQ ID NO: 18176 - protein, 11 aa, synthetic construct
  source 1..11: note = Seed: FVLWAHGFELT
FELWAHGFELC

SEQ ID NO: 18177 - protein, 11 aa, synthetic construct
  source 1..11: note = Seed: FVLWAHGFELT
FELWAHGFELD

SEQ ID NO: 18178 - protein, 11 aa, synthetic construct
  source 1..11: note = Seed: FVLWAHGFELT
FELWAHGFELE

SEQ ID NO: 18179 - protein, 11 aa, synthetic construct
  source 1..11: note = Seed: FVLWAHGFELT
FELWAHGFELF

SEQ ID NO: 18180 - protein, 11 aa, synthetic construct
  source 1..11: note = Seed: FVLWAHGFELT
FELWAHGFELG

SEQ ID NO: 18181 - protein, 11 aa, synthetic construct
  source 1..11: note = Seed: FVLWAHGFELT
FELWAHGFELH

SEQ ID NO: 18182 - protein, 11 aa, synthetic construct
  source 1..11: note = Seed: FVLWAHGFELT
FELWAHGFELI

SEQ ID NO: 18183 - protein, 11 aa, synthetic construct
  source 1..11: note = Seed: FVLWAHGFELT
FELWAHGFELK

SEQ ID NO: 18184 - protein, 11 aa, synthetic construct
  source 1..11: note = Seed: FVLWAHGFELT
FELWAHGFELL

SEQ ID NO: 18185 - protein, 11 aa, synthetic construct
  source 1..11: note = Seed: FVLWAHGFELT
FELWAHGFELM

SEQ ID NO: 18186 - protein, 11 aa, synthetic construct
  source 1..11: note = Seed: FVLWAHGFELT
FELWAHGFELN

SEQ ID NO: 18187 - protein, 11 aa, synthetic construct
  source 1..11: note = Seed: FVLWAHGFELT
FELWAHGFELP

SEQ ID NO: 18188 - protein, 11 aa, synthetic construct
  source 1..11: note = Seed: FVLWAHGFELT
FELWAHGFELQ

SEQ ID NO: 18189 - protein, 11 aa, synthetic construct
  source 1..11: note = Seed: FVLWAHGFELT
FELWAHGFELR

SEQ ID NO: 18190 - protein, 11 aa, synthetic construct
  source 1..11: note = Seed: FVLWAHGFELT
FELWAHGFELS

SEQ ID NO: 18191 - protein, 11 aa, synthetic construct
  source 1..11: note = Seed: FVLWAHGFELT
FELWAHGFELT

SEQ ID NO: 18192 - protein, 11 aa, synthetic construct
  source 1..11: note = Seed: FVLWAHGFELT
FELWAHGFELV

SEQ ID NO: 18193 - protein, 11 aa, synthetic construct
  source 1..11: note = Seed: FVLWAHGFELT
FELWAHGFELW

SEQ ID NO: 18194 - protein, 11 aa, synthetic construct
  source 1..11: note = Seed: FVLWAHGFELT
FELWAHGFELY

SEQ ID NO: 18195 - protein, 10 aa, synthetic construct
  source 1..10: note = Seed: FVLWAHGFEL
FELWAHGFEM

SEQ ID NO: 18196 - protein, 10 aa, synthetic construct
  source 1..10: note = Seed: FVLWAHGFEL
FELWAHGFES

SEQ ID NO: 18197 - protein, 10 aa, synthetic construct
  source 1..10: note = Seed: FVLWAHGFEL
FELWAHGFET

SEQ ID NO: 18198 - protein, 10 aa, synthetic construct
  source 1..10: note = Seed: FVLWAHGFEL
FELWAHGFEV

SEQ ID NO: 18199 - protein, 9 aa, synthetic construct
  source 1..9: note = Seed: FELWAKRNI
FELWAKRNL

SEQ ID NO: 18200 - protein, 10 aa, synthetic construct
  source 1..10: note = Seed: FSMMILSDDA
FEMMILSDDL

SEQ ID NO: 18201 - protein, 10 aa, synthetic construct
  source 1..10: note = Seed: FSMMILSDDA
FEMMILSDDV

SEQ ID NO: 18202 - protein, 9 aa, synthetic construct
  source 1..9: note = Seed: FAMQMAYRF
FEMQMAYRF

SEQ ID NO: 18203 - protein, 9 aa, synthetic construct
  source 1..9: note = Seed: FAMQMAYRF
FEMQMAYRY

SEQ ID NO: 18204 - protein, 8 aa, synthetic construct
  source 1..8: note = Seed: FDMSKFPL
FEMSKFPF

SEQ ID NO: 18205 - protein, 8 aa, synthetic construct
  source 1..8: note = Seed: FDMSKFPL
FEMSKFPI

SEQ ID NO: 18206 - protein, 8 aa, synthetic construct
  source 1..8: note = Seed: FDMSKFPL
FEMSKFPL

SEQ ID NO: 18207 - protein, 10 aa, synthetic construct
  source 1..10: note = Seed: FDMSKFPLKL
FEMSKFPLKA

SEQ ID NO: 18208 - protein, 10 aa, synthetic construct
  source 1..10: note = Seed: FDMSKFPLKL
FEMSKFPLKI

SEQ ID NO: 18209 - protein, 10 aa, synthetic construct
  source 1..10: note = Seed: FDMSKFPLKL
FEMSKFPLKL

SEQ ID NO: 18210 - protein, 10 aa, synthetic construct
  source 1..10: note = Seed: FDMSKFPLKL
FEMSKFPLKM

SEQ ID NO: 18211 - protein, 10 aa, synthetic construct
  source 1..10: note = Seed: FDMSKFPLKL
FEMSKFPLKV

SEQ ID NO: 18212 - protein, 8 aa, synthetic construct
  source 1..8: note = Seed: FDMSKFPL
FEMSKFPM

SEQ ID NO: 18213 - protein, 8 aa, synthetic construct
  source 1..8: note = Seed: FDMSKFPL
FEMSKFPV

SEQ ID NO: 18214 - protein, 10 aa, synthetic construct
  source 1..10: note = Seed: FNMVYMPASW
FEMVYMPASF

SEQ ID NO: 18215 - protein, 10 aa, synthetic construct
  source 1..10: note = Seed: FNMVYMPASW
FEMVYMPASM

SEQ ID NO: 18216 - protein, 10 aa, synthetic construct
  source 1..10: note = Seed: FNMVYMPASW
FEMVYMPASY

SEQ ID NO: 18217 - protein, 9 aa, synthetic construct
  source 1..9: note = Seed: FENKTTLPV
FENKTTLPA

SEQ ID NO: 18218 - protein, 9 aa, synthetic construct
  source 1..9: note = Seed: FENKTTLPV
FENKTTLPF

SEQ ID NO: 18219 - protein, 9 aa, synthetic construct
  source 1..9: note = Seed: FENKTTLPV
FENKTTLPI

SEQ ID NO: 18220 - protein, 9 aa, synthetic construct
  source 1..9: note = Seed: FENKTTLPV
FENKTTLPL

SEQ ID NO: 18221 - protein, 9 aa, synthetic construct
  source 1..9: note = Seed: FENKTTLPV
FENKTTLPM

SEQ ID NO: 18222 - protein, 9 aa, synthetic construct
  source 1..9: note = Seed: FENKTTLPV
FENKTTLPP

SEQ ID NO: 18223 - protein, 9 aa, synthetic construct
  source 1..9: note = Seed: FENKTTLPV
FENKTTLPY

SEQ ID NO: 18224 - protein, 9 aa, synthetic construct
  source 1..9: note = Seed: FVNLKQLPF
FENLKQLPF

SEQ ID NO: 18225 - protein, 9 aa, synthetic construct
  source 1..9: note = Seed: FVNLKQLPF
FENLKQLPM

SEQ ID NO: 18226 - protein, 9 aa, synthetic construct
  source 1..9: note = Seed: FVNLKQLPF
FENLKQLPY

SEQ ID NO: 18227 - protein, 11 aa, synthetic construct
  source 1..11: note = Seed: FTNVYADSFVI
FENVYADSFVV

SEQ ID NO: 18228 - protein, 10 aa, synthetic construct
  source 1..10: note = Seed: FTPFDVVRQC
FEPFDVVRQA

SEQ ID NO: 18229 - protein, 10 aa, synthetic construct
  source 1..10: note = Seed: FLPFFSNVTW
FEPFFSNVTF

SEQ ID NO: 18230 - protein, 10 aa, synthetic construct
  source 1..10: note = Seed: FLPFFSNVTW
FEPFFSNVTH

SEQ ID NO: 18231 - protein, 10 aa, synthetic construct
  source 1..10: note = Seed: FLPFFSNVTW
FEPFFSNVTL

SEQ ID NO: 18232 - protein, 10 aa, synthetic construct
  source 1..10: note = Seed: FLPFFSNVTW
FEPFFSNVTM

SEQ ID NO: 18233 - protein, 10 aa, synthetic construct
  source 1..10: note = Seed: FLPFFSNVTW
FEPFFSNVTW

SEQ ID NO: 18234 - protein, 10 aa, synthetic construct
  source 1..10: note = Seed: FLPFFSNVTW
FEPFFSNVTY

SEQ ID NO: 18235 - protein, 10 aa, synthetic construct
  source 1..10: note = Seed: FTPLVPFWIT
FEPLVPFWIA

SEQ ID NO: 18236 - protein, 11 aa, synthetic construct
  source 1..11: note = Seed: FTPLVPFWITI
FEPLVPFWITV

SEQ ID NO: 18237 - protein, 10 aa, synthetic construct
  source 1..10: note = Seed: FLPRVFSAVG
FEPRVFSAVF

SEQ ID NO: 18238 - protein, 10 aa, synthetic construct
  source 1..10: note = Seed: FLPRVFSAVG
FEPRVFSAVI

SEQ ID NO: 18239 - protein, 10 aa, synthetic construct
  source 1..10: note = Seed: FLPRVFSAVG
FEPRVFSAVL

SEQ ID NO: 18240 - protein, 10 aa, synthetic construct
  source 1..10: note = Seed: FLPRVFSAVG
FEPRVFSAVM

SEQ ID NO: 18241 - protein, 10 aa, synthetic construct
  source 1..10: note = Seed: FLPRVFSAVG
FEPRVFSAVV

SEQ ID NO: 18242 - protein, 11 aa, synthetic construct
  source 1..11: note = Seed: FPQSAPHGVVF
FEQSAPHGVVF

SEQ ID NO: 18243 - protein, 11 aa, synthetic construct
  source 1..11: note = Seed: FPQSAPHGVVF
FEQSAPHGVVL

SEQ ID NO: 18244 - protein, 11 aa, synthetic construct
  source 1..11: note = Seed: FPQSAPHGVVF
FEQSAPHGVVM

SEQ ID NO: 18245 - protein, 11 aa, synthetic construct
  source 1..11: note = Seed: FPQSAPHGVVF
FEQSAPHGVVW

SEQ ID NO: 18246 - protein, 11 aa, synthetic construct
  source 1..11: note = Seed: FPQSAPHGVVF
FEQSAPHGVVY

SEQ ID NO: 18247 - protein, 10 aa, synthetic construct
  source 1..10: note = Seed: FTQSRNLQEF
FEQSRNLQEF

SEQ ID NO: 18248 - protein, 10 aa, synthetic construct
  source 1..10: note = Seed: FTRFFYVLGL
FERFFYVLGK

SEQ ID NO: 18249 - protein, 10 aa, synthetic construct
  source 1..10: note = Seed: FTRFFYVLGL
FERFFYVLGL

SEQ ID NO: 18250 - protein, 10 aa, synthetic construct
  source 1..10: note = Seed: FTSDYYQLYS
FESDYYQLYF

SEQ ID NO: 18251 - protein, 10 aa, synthetic construct
  source 1..10: note = Seed: FTSDYYQLYS
FESDYYQLYM

SEQ ID NO: 18252 - protein, 10 aa, synthetic construct
  source 1..10: note = Seed: FTSDYYQLYS
FESDYYQLYY

SEQ ID NO: 18253 - protein, 10 aa, synthetic construct
  source 1..10: note = Seed: FSSNVANYQK
FESNVANYQR

SEQ ID NO: 18254 - protein, 9 aa, synthetic construct
  source 1..9: note = Seed: FFSNVTWFH
FESNVTWFY

SEQ ID NO: 18255 - protein, 11 aa, synthetic construct
  source 1..11: note = Seed: FISPYNSQNAV
FESPYNSQNAA

SEQ ID NO: 18256 - protein, 11 aa, synthetic construct
  source 1..11: note = Seed: FISPYNSQNAV
FESPYNSQNAL

SEQ ID NO: 18257 - protein, 11 aa, synthetic construct
  source 1..11: note = Seed: FISPYNSQNAV
FESPYNSQNAM

SEQ ID NO: 18258 - protein, 9 aa, synthetic construct
  source 1..9: note = Seed: FFSYFAVHF
FESYFAVHF

SEQ ID NO: 18259 - protein, 10 aa, synthetic construct
  source 1..10: note = Seed: FFSYFAVHFI
FESYFAVHFA

SEQ ID NO: 18260 - protein, 10 aa, synthetic construct
  source 1..10: note = Seed: FFSYFAVHFI
FESYFAVHFF

SEQ ID NO: 18261 - protein, 10 aa, synthetic construct
  source 1..10: note = Seed: FFSYFAVHFI
FESYFAVHFI

SEQ ID NO: 18262 - protein, 10 aa, synthetic construct
  source 1..10: note = Seed: FFSYFAVHFI
FESYFAVHFV

SEQ ID NO: 18263 - protein, 10 aa, synthetic construct
  source 1..10: note = Seed: FFSYFAVHFI
FESYFAVHFW

SEQ ID NO: 18264 - protein, 10 aa, synthetic construct
  source 1..10: note = Seed: FFSYFAVHFI
FESYFAVHFY

SEQ ID NO: 18265 - protein, 9 aa, synthetic construct
  source 1..9: note = Seed: FFSYFAVHF
FESYFAVHY

SEQ ID NO: 18266 - protein, 10 aa, synthetic construct
  source 1..10: note = Seed: FVTHSKGLYR
FETHSKGLYR

SEQ ID NO: 18267 - protein, 9 aa, synthetic construct
  source 1..9: note = Seed: FQTRAGCLI
FETRAGCLF

SEQ ID NO: 18268 - protein, 10 aa, synthetic construct
  source 1..10: note = Seed: FDTYNLWNTF
FETYNLWNTF

SEQ ID NO: 18269 - protein, 10 aa, synthetic construct
  source 1..10: note = Seed: FDTYNLWNTF
FETYNLWNTW

SEQ ID NO: 18270 - protein, 10 aa, synthetic construct
  source 1..10: note = Seed: FDTYNLWNTF
FETYNLWNTY

SEQ ID NO: 18271 - protein, 10 aa, synthetic construct
  source 1..10: note = Seed: FAVDAAKAYK
FEVDAAKAYR

SEQ ID NO: 18272 - protein, 9 aa, synthetic construct
  source 1..9: note = Seed: FNVLFSTVF
FEVLFSTVF

SEQ ID NO: 18273 - protein, 9 aa, synthetic construct
  source 1..9: note = Seed: FNVLFSTVF
FEVLFSTVM

SEQ ID NO: 18274 - protein, 9 aa, synthetic construct
  source 1..9: note = Seed: FNVLFSTVF
FEVLFSTVY

SEQ ID NO: 18275 - protein, 9 aa, synthetic construct
  source 1..9: note = Seed: FVVSTGYHF
FEVSTGYHF

SEQ ID NO: 18276 - protein, 10 aa, synthetic construct
  source 1..10: note = Seed: FVVSTGYHFR
FEVSTGYHFK

SEQ ID NO: 18277 - protein, 10 aa, synthetic construct
  source 1..10: note = Seed: FVVSTGYHFR
FEVSTGYHFR

SEQ ID NO: 18278 - protein, 10 aa, synthetic construct
  source 1..10: note = Seed: FYWFFSNYLK
FEWFFSNYLF

SEQ ID NO: 18279 - protein, 10 aa, synthetic construct
  source 1..10: note = Seed: FYWFFSNYLK
FEWFFSNYLK

SEQ ID NO: 18280 - protein, 10 aa, synthetic construct
  source 1..10: note = Seed: FYWFFSNYLK
FEWFFSNYLR

SEQ ID NO: 18281 - protein, 10 aa, synthetic construct
  source 1..10: note = Seed: FYWFFSNYLK
FEWFFSNYLY

SEQ ID NO: 18282 - protein, 9 aa, synthetic construct
  source 1..9: note = Seed: FYWFFSNYL
FEWFFSNYY

SEQ ID NO: 18283 - protein, 10 aa, synthetic construct
  source 1..10: note = Seed: FLWLLWPVTL
FEWLLWPVTF

SEQ ID NO: 18284 - protein, 11 aa, synthetic construct
  source 1..11: note = Seed: FLWLLWPVTLA
FEWLLWPVTLI

SEQ ID NO: 18285 - protein, 11 aa, synthetic construct
  source 1..11: note = Seed: FLWLLWPVTLA
FEWLLWPVTLL

SEQ ID NO: 18286 - protein, 11 aa, synthetic construct
  source 1..11: note = Seed: FLWLLWPVTLA
FEWLLWPVTLV

SEQ ID NO: 18287 - protein, 9 aa, synthetic construct
  source 1..9: note = Seed: FSYFAVHFI
FEYFAVHFF

SEQ ID NO: 18288 - protein, 9 aa, synthetic construct
  source 1..9: note = Seed: FSYFAVHFI
FEYFAVHFM

SEQ ID NO: 18289 - protein, 9 aa, synthetic construct
  source 1..9: note = Seed: FSYFAVHFI
FEYFAVHFY

SEQ ID NO: 18290 - protein, 9 aa, synthetic construct
  source 1..9: note = Seed: FNYLKSPNF
FEYLKSPNF

SEQ ID NO: 18291 - protein, 9 aa, synthetic construct
  source 1..9: note = Seed: FNYLKSPNF
FEYLKSPNY

SEQ ID NO: 18292 - protein, 9 aa, synthetic construct
  source 1..9: note = Seed: FCYMHHMEL
FEYMHHMEF

SEQ ID NO: 18293 - protein, 9 aa, synthetic construct
  source 1..9: note = Seed: FCYMHHMEL
FEYMHHMEH

SEQ ID NO: 18294 - protein, 9 aa, synthetic construct
  source 1..9: note = Seed: FCYMHHMEL
FEYMHHMEI

SEQ ID NO: 18295 - protein, 9 aa, synthetic construct
  source 1..9: note = Seed: FCYMHHMEL
FEYMHHMEL

SEQ ID NO: 18296 - protein, 9 aa, synthetic construct
  source 1..9: note = Seed: FCYMHHMEL
FEYMHHMEM

SEQ ID NO: 18297 - protein, 9 aa, synthetic construct
  source 1..9: note = Seed: FCYMHHMEL
FEYMHHMEW

SEQ ID NO: 18298 - protein, 9 aa, synthetic construct
  source 1..9: note = Seed: FCYMHHMEL
FEYMHHMEY

SEQ ID NO: 18299 - protein, 9 aa, synthetic construct
  source 1..9: note = Seed: FRYMNSQGL
FEYMNSQGF

SEQ ID NO: 18300 - protein, 9 aa, synthetic construct
  source 1..9: note = Seed: FRYMNSQGL
FEYMNSQGM

SEQ ID NO: 18301 - protein, 9 aa, synthetic construct
  source 1..9: note = Seed: FRYMNSQGL
FEYMNSQGY

SEQ ID NO: 18302 - protein, 8 aa, synthetic construct
  source 1..8: note = Seed: FEYVSQPF
FEYVSQPI

SEQ ID NO: 18303 - protein, 8 aa, synthetic construct
  source 1..8: note = Seed: FEYVSQPF
FEYVSQPL

SEQ ID NO: 18304 - protein, 8 aa, synthetic construct
  source 1..8: note = Seed: FEYVSQPF
FEYVSQPM

SEQ ID NO: 18305 - protein, 8 aa, synthetic construct
  source 1..8: note = Seed: FEYVSQPF
FEYVSQPY

SEQ ID NO: 18306 - protein, 10 aa, synthetic construct
  source 1..10: note = Seed: FYYVWKSYVH
FEYVWKSYVM

SEQ ID NO: 18307 - protein, 10 aa, synthetic construct
  source 1..10: note = Seed: FYYVWKSYVH
FEYVWKSYVY

SEQ ID NO: 18308 - protein, 9 aa, synthetic construct
  source 1..9: note = Seed: FVAAIFYLI
FFAAIFYLF

SEQ ID NO: 18309 - protein, 9 aa, synthetic construct
  source 1..9: note = Seed: FVAAIFYLI
FFAAIFYLH

SEQ ID NO: 18310 - protein, 9 aa, synthetic construct
  source 1..9: note = Seed: FVAAIFYLI
FFAAIFYLI

SEQ ID NO: 18311 - protein, 9 aa, synthetic construct
  source 1..9: note = Seed: FVAAIFYLI
FFAAIFYLK

SEQ ID NO: 18312 - protein, 9 aa, synthetic construct
  source 1..9: note = Seed: FVAAIFYLI
FFAAIFYLL

SEQ ID NO: 18313 - protein, 9 aa, synthetic construct
  source 1..9: note = Seed: FVAAIFYLI
FFAAIFYLM

SEQ ID NO: 18314 - protein, 9 aa, synthetic construct
  source 1..9: note = Seed: FVAAIFYLI
FFAAIFYLR

SEQ ID NO: 18315 - protein, 9 aa, synthetic construct
  source 1..9: note = Seed: FVAAIFYLI
FFAAIFYLV

SEQ ID NO: 18316 - protein, 9 aa, synthetic construct
  source 1..9: note = Seed: FVAAIFYLI
FFAAIFYLW

SEQ ID NO: 18317 - protein, 9 aa, synthetic construct
  source 1..9: note = Seed: FVAAIFYLI
FFAAIFYLY

SEQ ID NO: 18318 - protein, 10 aa, synthetic construct
  source 1..10: note = Seed: FCAFAVDAAK
FFAFAVDAAK

SEQ ID NO: 18319 - protein, 10 aa, synthetic construct
  source 1..10: note = Seed: FCAFAVDAAK
FFAFAVDAAR

SEQ ID NO: 18320 - protein, 9 aa, synthetic construct
  source 1..9: note = Seed: FLAFVVFLL
FFAFVVFLV

SEQ ID NO: 18321 - protein, 9 aa, synthetic construct
  source 1..9: note = Seed: FLAHIQWMV
FFAHIQWMI

SEQ ID NO: 18322 - protein, 9 aa, synthetic construct
  source 1..9: note = Seed: FLAHIQWMV
FFAHIQWML

SEQ ID NO: 18323 - protein, 9 aa, synthetic construct
  source 1..9: note = Seed: FLAHIQWMV
FFAHIQWMV

SEQ ID NO: 18324 - protein, 10 aa, synthetic construct
  source 1..10: note = Seed: FIASFRLFAR
FFASFRLFAK

SEQ ID NO: 18325 - protein, 10 aa, synthetic construct
  source 1..10: note = Seed: FIASFRLFAR
FFASFRLFAR

SEQ ID NO: 18326 - protein, 9 aa, synthetic construct
  source 1..9: note = Seed: FFASFYYVW
FFASFYYVF

SEQ ID NO: 18327 - protein, 9 aa, synthetic construct
  source 1..9: note = Seed: FFASFYYVW
FFASFYYVI

SEQ ID NO: 18328 - protein, 9 aa, synthetic construct
  source 1..9: note = Seed: FFASFYYVW
FFASFYYVL

SEQ ID NO: 18329 - protein, 10 aa, synthetic construct
  source 1..10: note = Seed: FFASFYYVWK
FFASFYYVWR

SEQ ID NO: 18330 - protein, 9 aa, synthetic construct
  source 1..9: note = Seed: FFASFYYVW
FFASFYYVY

SEQ ID NO: 18331 - protein, 9 aa, synthetic construct
  source 1..9: note = Seed: FNATRFASV
FFATRFASI

SEQ ID NO: 18332 - protein, 9 aa, synthetic construct
  source 1..9: note = Seed: FNATRFASV
FFATRFASL

SEQ ID NO: 18333 - protein, 9 aa, synthetic construct
  source 1..9: note = Seed: FNATRFASV
FFATRFASM

SEQ ID NO: 18334 - protein, 9 aa, synthetic construct
  source 1..9: note = Seed: FNATRFASV
FFATRFASV

SEQ ID NO: 18335 - protein, 10 aa, synthetic construct
  source 1..10: note = Seed: FNATRFASVY
FFATRFASVF

SEQ ID NO: 18336 - protein, 10 aa, synthetic construct
  source 1..10: note = Seed: FNATRFASVY
FFATRFASVM

SEQ ID NO: 18337 - protein, 10 aa, synthetic construct
  source 1..10: note = Seed: FNATRFASVY
FFATRFASVY

SEQ ID NO: 18338 - protein, 9 aa, synthetic construct
  source 1..9: note = Seed: FSAVGNICY
FFAVGNICY

SEQ ID NO: 18339 - protein, 10 aa, synthetic construct
  source 1..10: note = Seed: FSAVGNICYT
FFAVGNICYV

SEQ ID NO: 18340 - protein, 9 aa, synthetic construct
  source 1..9: note = Seed: FLAYILFTR
FFAYILFTK

SEQ ID NO: 18341 - protein, 9 aa, synthetic construct
  source 1..9: note = Seed: FLAYILFTR
FFAYILFTR

SEQ ID NO: 18342 - protein, 10 aa, synthetic construct
  source 1..10: note = Seed: FLAYILFTRF
FFAYILFTRR

SEQ ID NO: 18343 - protein, 9 aa, synthetic construct
  source 1..9: note = Seed: FLAYILFTR
FFAYILFTV

SEQ ID NO: 18344 - protein, 9 aa, synthetic construct
  source 1..9: note = Seed: FLCWHTNCY
FFCWHTNCY

SEQ ID NO: 18345 - protein, 9 aa, synthetic construct
  source 1..9: note = Seed: FGDDTVIEV
FFDDTVIEI

SEQ ID NO: 18346 - protein, 9 aa, synthetic construct
  source 1..9: note = Seed: FGDDTVIEV
FFDDTVIEL

SEQ ID NO: 18347 - protein, 9 aa, synthetic construct
  source 1..9: note = Seed: FGDDTVIEV
FFDDTVIEV

SEQ ID NO: 18348 - protein, 9 aa, synthetic construct
  source 1..9: note = Seed: FVDGVPFVV
FFDGVPFVI

SEQ ID NO: 18349 - protein, 9 aa, synthetic construct
  source 1..9: note = Seed: FVDGVPFVV
FFDGVPFVL

SEQ ID NO: 18350 - protein, 9 aa, synthetic construct
  source 1..9: note = Seed: FVDGVPFVV
FFDGVPFVV

SEQ ID NO: 18351 - protein, 11 aa, synthetic construct
  source 1..11: note = Seed: FPDLNGDVVAI
FFDLNGDVVAI

SEQ ID NO: 18352 - protein, 11 aa, synthetic construct
  source 1..11: note = Seed: FPDLNGDVVAI
FFDLNGDVVAL

SEQ ID NO: 18353 - protein, 11 aa, synthetic construct
  source 1..11: note = Seed: FPDLNGDVVAI
FFDLNGDVVAV

SEQ ID NO: 18354 - protein, 10 aa, synthetic construct
  source 1..10: note = Seed: FVETVKGLDY
FFETVKGLDY

SEQ ID NO: 18355 - protein, 9 aa, synthetic construct
  source 1..9: note = Seed: FVFKNIDGY
FFFKNIDGY

SEQ ID NO: 18356 - protein, 10 aa, synthetic construct
  source 1..10: note = Seed: FVFKNIDGYF
FFFKNIDGYF

SEQ ID NO: 18357 - protein, 11 aa, synthetic construct
  source 1..11: note = Seed: FVFKNIDGYFK
FFFKNIDGYFR

SEQ ID NO: 18358 - protein, 10 aa, synthetic construct
  source 1..10: note = Seed: FVFKNIDGYF
FFFKNIDGYM

SEQ ID NO: 18359 - protein, 10 aa, synthetic construct
  source 1..10: note = Seed: FVFKNIDGYF
FFFKNIDGYY

SEQ ID NO: 18360 - protein, 10 aa, synthetic construct
  source 1..10: note = Seed: FPFNKWGKAR
FFFNKWGKAR

SEQ ID NO: 18361 - protein, 9 aa, synthetic construct
  source 1..9: note = Seed: FLFVAAIFY
FFFVAAIFY

SEQ ID NO: 18362 - protein, 10 aa, synthetic construct
  source 1..10: note = Seed: FLFVAAIFYL
FFFVAAIFYF

SEQ ID NO: 18363 - protein, 10 aa, synthetic construct
  source 1..10: note = Seed: FLFVAAIFYL
FFFVAAIFYV

SEQ ID NO: 18364 - protein, 10 aa, synthetic construct
  source 1..10: note = Seed: FLFVAAIFYL
FFFVAAIFYY

SEQ ID NO: 18365 - protein, 9 aa, synthetic construct
  source 1..9: note = Seed: FGGASCCLY
FFGASCCLY

SEQ ID NO: 18366 - protein, 9 aa, synthetic construct
  source 1..9: note = Seed: FLGYFCTCY
FFGYFCTCY

SEQ ID NO: 18367 - protein, 10 aa, synthetic construct
  source 1..10: note = Seed: FLGYFCTCYF
FFGYFCTCYY

SEQ ID NO: 18368 - protein, 9 aa, synthetic construct
  source 1..9: note = Seed: FLHFLPRVF
FFHFLPRVF

SEQ ID NO: 18369 - protein, 9 aa, synthetic construct
  source 1..9: note = Seed: FLHFLPRVF
FFHFLPRVI

SEQ ID NO: 18370 - protein, 9 aa, synthetic construct
  source 1..9: note = Seed: FLHFLPRVF
FFHFLPRVL

SEQ ID NO: 18371 - protein, 9 aa, synthetic construct
  source 1..9: note = Seed: FLHFLPRVF
FFHFLPRVM

SEQ ID NO: 18372 - protein, 9 aa, synthetic construct
  source 1..9: note = Seed: FLHFLPRVF
FFHFLPRVV

SEQ ID NO: 18373 - protein, 9 aa, synthetic construct
  source 1..9: note = Seed: FLHFLPRVF
FFHFLPRVY

SEQ ID NO: 18374 - protein, 8 aa, synthetic construct
  source 1..8: note = Seed: FYILPSII
FFILPSIL

SEQ ID NO: 18375 - protein, 8 aa, synthetic construct
  source 1..8: note = Seed: FYILPSII
FFILPSIM

SEQ ID NO: 18376 - protein, 9 aa, synthetic construct
  source 1..9: note = Seed: FTINCQEPK
FFINCQEPR

SEQ ID NO: 18377 - protein, 8 aa, synthetic construct
  source 1..8: note = Seed: FFITGNTL
FFITGNTF

SEQ ID NO: 18378 - protein, 8 aa, synthetic construct
  source 1..8: note = Seed: FFITGNTL
FFITGNTM

SEQ ID NO: 18379 - protein, 8 aa, synthetic construct
  source 1..8: note = Seed: FFITGNTL
FFITGNTY

SEQ ID NO: 18380 - protein, 10 aa, synthetic construct
  source 1..10: note = Seed: FKIYSKHTPI
FFIYSKHTPA

SEQ ID NO: 18381 - protein, 10 aa, synthetic construct
  source 1..10: note = Seed: FKIYSKHTPI
FFIYSKHTPF

SEQ ID NO: 18382 - protein, 10 aa, synthetic construct
  source 1..10: note = Seed: FKIYSKHTPI
FFIYSKHTPI

SEQ ID NO: 18383 - protein, 10 aa, synthetic construct
  source 1..10: note = Seed: FKIYSKHTPI
FFIYSKHTPL

SEQ ID NO: 18384 - protein, 10 aa, synthetic construct
  source 1..10: note = Seed: FKIYSKHTPI
FFIYSKHTPV

SEQ ID NO: 18385 - protein, 10 aa, synthetic construct
  source 1..10: note = Seed: FKIYSKHTPI
FFIYSKHTPY

SEQ ID NO: 18386 - protein, 9 aa, synthetic construct
  source 1..9: note = Seed: FYKENSYTT
FFKENSYTF

SEQ ID NO: 18387 - protein, 9 aa, synthetic construct
  source 1..9: note = Seed: FYKENSYTT
FFKENSYTI

SEQ ID NO: 18388 - protein, 9 aa, synthetic construct
  source 1..9: note = Seed: FYKENSYTT
FFKENSYTL

SEQ ID NO: 18389 - protein, 9 aa, synthetic construct
  source 1..9: note = Seed: FYKENSYTT
FFKENSYTM

SEQ ID NO: 18390 - protein, 11 aa, synthetic construct
  source 1..11: note = Seed: FYKENSYTTTI
FFKENSYTTTF

SEQ ID NO: 18391 - protein, 11 aa, synthetic construct
  source 1..11: note = Seed: FYKENSYTTTI
FFKENSYTTTL

SEQ ID NO: 18392 - protein, 11 aa, synthetic construct
  source 1..11: note = Seed: FYKENSYTTTI
FFKENSYTTTM

SEQ ID NO: 18393 - protein, 9 aa, synthetic construct
  source 1..9: note = Seed: FYKENSYTT
FFKENSYTV

SEQ ID NO: 18394 - protein, 9 aa, synthetic construct
  source 1..9: note = Seed: FYKENSYTT
FFKENSYTW

SEQ ID NO: 18395 - protein, 9 aa, synthetic construct
  source 1..9: note = Seed: FYKENSYTT
FFKENSYTY

SEQ ID NO: 18396 - protein, 10 aa, synthetic construct
  source 1..10: note = Seed: FIKGLNNLNR
FFKGLNNLNR

SEQ ID NO: 18397 - protein, 9 aa, synthetic construct
  source 1..9: note = Seed: FVKHKHAFL
FFKHKHAFF

SEQ ID NO: 18398 - protein, 9 aa, synthetic construct
  source 1..9: note = Seed: FVKHKHAFL
FFKHKHAFL

SEQ ID NO: 18399 - protein, 9 aa, synthetic construct
  source 1..9: note = Seed: FVKHKHAFL
FFKHKHAFM

SEQ ID NO: 18400 - protein, 9 aa, synthetic construct
  source 1..9: note = Seed: FVKHKHAFL
FFKHKHAFY

SEQ ID NO: 18401 - protein, 8 aa, synthetic construct
  source 1..8: note = Seed: FVKHKHAF
FFKHKHAL

SEQ ID NO: 18402 - protein, 8 aa, synthetic construct
  source 1..8: note = Seed: FVKHKHAF
FFKHKHAM

SEQ ID NO: 18403 - protein, 9 aa, synthetic construct
  source 1..9: note = Seed: FRKSNLKPF
FFKSNLKPF

SEQ ID NO: 18404 - protein, 9 aa, synthetic construct
  source 1..9: note = Seed: FRKSNLKPF
FFKSNLKPI

SEQ ID NO: 18405 - protein, 9 aa, synthetic construct
  source 1..9: note = Seed: FRKSNLKPF
FFKSNLKPL

SEQ ID NO: 18406 - protein, 9 aa, synthetic construct
  source 1..9: note = Seed: FRKSNLKPF
FFKSNLKPM

SEQ ID NO: 18407 - protein, 9 aa, synthetic construct
  source 1..9: note = Seed: FRKSNLKPF
FFKSNLKPV

SEQ ID NO: 18408 - protein, 9 aa, synthetic construct
  source 1..9: note = Seed: FRKSNLKPF
FFKSNLKPY

SEQ ID NO: 18409 - protein, 9 aa, synthetic construct
  source 1..9: note = Seed: FYLITPVHV
FFLITPVHF

SEQ ID NO: 18410 - protein, 9 aa, synthetic construct
  source 1..9: note = Seed: FYLITPVHV
FFLITPVHL

SEQ ID NO: 18411 - protein, 9 aa, synthetic construct
  source 1..9: note = Seed: FYLITPVHV
FFLITPVHM

SEQ ID NO: 18412 - protein, 9 aa, synthetic construct
  source 1..9: note = Seed: FYLITPVHV
FFLITPVHW

SEQ ID NO: 18413 - protein, 9 aa, synthetic construct
  source 1..9: note = Seed: FYLITPVHV
FFLITPVHY

SEQ ID NO: 18414 - protein, 10 aa, synthetic construct
  source 1..10: note = Seed: FKLKDCVMYA
FFLKDCVMYA

SEQ ID NO: 18415 - protein, 11 aa, synthetic construct
  source 1..11: note = Seed: FKLKDCVMYAS
FFLKDCVMYAV

SEQ ID NO: 18416 - protein, 10 aa, synthetic construct
  source 1..10: note = Seed: FKLKDCVMYA
FFLKDCVMYI

SEQ ID NO: 18417 - protein, 10 aa, synthetic construct
  source 1..10: note = Seed: FKLKDCVMYA
FFLKDCVMYL

SEQ ID NO: 18418 - protein, 10 aa, synthetic construct
  source 1..10: note = Seed: FKLKDCVMYA
FFLKDCVMYM

SEQ ID NO: 18419 - protein, 10 aa, synthetic construct
  source 1..10: note = Seed: FKLKDCVMYA
FFLKDCVMYS

SEQ ID NO: 18420 - protein, 10 aa, synthetic construct
  source 1..10: note = Seed: FKLKDCVMYA
FFLKDCVMYT

SEQ ID NO: 18421 - protein, 10 aa, synthetic construct
  source 1..10: note = Seed: FKLKDCVMYA
FFLKDCVMYV

SEQ ID NO: 18422 - protein, 10 aa, synthetic construct
  source 1..10: note = Seed: FPLKLRGTAV
FFLKLRGTAA

SEQ ID NO: 18423 - protein, 10 aa, synthetic construct
  source 1..10: note = Seed: FPLKLRGTAV
FFLKLRGTAF

SEQ ID NO: 18424 - protein, 10 aa, synthetic construct
  source 1..10: note = Seed: FPLKLRGTAV
FFLKLRGTAI

SEQ ID NO: 18425 - protein, 10 aa, synthetic construct
  source 1..10: note = Seed: FPLKLRGTAV
FFLKLRGTAL

SEQ ID NO: 18426 - protein, 10 aa, synthetic construct
  source 1..10: note = Seed: FPLKLRGTAV
FFLKLRGTAM

SEQ ID NO: 18427 - protein, 10 aa, synthetic construct
  source 1..10: note = Seed: FPLKLRGTAV
FFLKLRGTAV

SEQ ID NO: 18428 - protein, 11 aa, synthetic construct
  source 1..11: note = Seed: FPLKLRGTAVM
FFLKLRGTAVF

SEQ ID NO: 18429 - protein, 11 aa, synthetic construct
  source 1..11: note = Seed: FPLKLRGTAVM
FFLKLRGTAVY

SEQ ID NO: 18430 - protein, 9 aa, synthetic construct
  source 1..9: note = Seed: FLLNKEMYL
FFLNKEMYF

SEQ ID NO: 18431 - protein, 9 aa, synthetic construct
  source 1..9: note = Seed: FLLNKEMYL
FFLNKEMYI

SEQ ID NO: 18432 - protein, 9 aa, synthetic construct
  source 1..9: note = Seed: FLLNKEMYL
FFLNKEMYL

SEQ ID NO: 18433 - protein, 10 aa, synthetic construct
  source 1..10: note = Seed: FLLNKEMYLK
FFLNKEMYLA

SEQ ID NO: 18434 - protein, 10 aa, synthetic construct
  source 1..10: note = Seed: FLLNKEMYLK
FFLNKEMYLI

SEQ ID NO: 18435 - protein, 10 aa, synthetic construct
  source 1..10: note = Seed: FLLNKEMYLK
FFLNKEMYLK

SEQ ID NO: 18436 - protein, 10 aa, synthetic construct
  source 1..10: note = Seed: FLLNKEMYLK
FFLNKEMYLL

SEQ ID NO: 18437 - protein, 10 aa, synthetic construct
  source 1..10: note = Seed: FLLNKEMYLK
FFLNKEMYLM

SEQ ID NO: 18438 - protein, 10 aa, synthetic construct
  source 1..10: note = Seed: FLLNKEMYLK
FFLNKEMYLR

SEQ ID NO: 18439 - protein, 10 aa, synthetic construct
  source 1..10: note = Seed: FLLNKEMYLK
FFLNKEMYLV

SEQ ID NO: 18440 - protein, 9 aa, synthetic construct
  source 1..9: note = Seed: FLLNKEMYL
FFLNKEMYM

SEQ ID NO: 18441 - protein, 9 aa, synthetic construct
  source 1..9: note = Seed: FLLNKEMYL
FFLNKEMYV

SEQ ID NO: 18442 - protein, 9 aa, synthetic construct
  source 1..9: note = Seed: FLLNKEMYL
FFLNKEMYY

SEQ ID NO: 18443 - protein, 10 aa, synthetic construct
  source 1..10: note = Seed: FRLTLGVYDY
FFLTLGVYDY

SEQ ID NO: 18444 - protein, 11 aa, synthetic construct
  source 1..11: note = Seed: FRLTLGVYDYL
FFLTLGVYDYV

SEQ ID NO: 18445 - protein, 9 aa, synthetic construct
  source 1..9: note = Seed: FYLTNDVSF
FFLTNDVSF

SEQ ID NO: 18446 - protein, 10 aa, synthetic construct
  source 1..10: note = Seed: FYLTNDVSFL
FFLTNDVSFA

SEQ ID NO: 18447 - protein, 10 aa, synthetic construct
  source 1..10: note = Seed: FYLTNDVSFL
FFLTNDVSFF

SEQ ID NO: 18448 - protein, 10 aa, synthetic construct
  source 1..10: note = Seed: FYLTNDVSFL
FFLTNDVSFI

SEQ ID NO: 18449 - protein, 10 aa, synthetic construct
  source 1..10: note = Seed: FYLTNDVSFL
FFLTNDVSFL

SEQ ID NO: 18450 - protein, 11 aa, synthetic construct
  source 1..11: note = Seed: FYLTNDVSFLA
FFLTNDVSFLI

SEQ ID NO: 18451 - protein, 11 aa, synthetic construct
  source 1..11: note = Seed: FYLTNDVSFLA
FFLTNDVSFLL

SEQ ID NO: 18452 - protein, 11 aa, synthetic construct
  source 1..11: note = Seed: FYLTNDVSFLA
FFLTNDVSFLM

SEQ ID NO: 18453 - protein, 11 aa, synthetic construct
  source 1..11: note = Seed: FYLTNDVSFLA
FFLTNDVSFLV

SEQ ID NO: 18454 - protein, 10 aa, synthetic construct
  source 1..10: note = Seed: FYLTNDVSFL
FFLTNDVSFM

SEQ ID NO: 18455 - protein, 10 aa, synthetic construct
  source 1..10: note = Seed: FYLTNDVSFL
FFLTNDVSFV

SEQ ID NO: 18456 - protein, 9 aa, synthetic construct
  source 1..9: note = Seed: FYLTNDVSF
FFLTNDVSI

SEQ ID NO: 18457 - protein, 9 aa, synthetic construct
  source 1..9: note = Seed: FYLTNDVSF
FFLTNDVSL

SEQ ID NO: 18458 - protein, 9 aa, synthetic construct
  source 1..9: note = Seed: FYLTNDVSF
FFLTNDVSM

SEQ ID NO: 18459 - protein, 9 aa, synthetic construct
  source 1..9: note = Seed: FYLTNDVSF
FFLTNDVSV

SEQ ID NO: 18460 - protein, 9 aa, synthetic construct
  source 1..9: note = Seed: FYLTNDVSF
FFLTNDVSW

SEQ ID NO: 18461 - protein, 9 aa, synthetic construct
  source 1..9: note = Seed: FYLTNDVSF
FFLTNDVSY

SEQ ID NO: 18462 - protein, 10 aa, synthetic construct
  source 1..10: note = Seed: FQLTPIAVQM
FFLTPIAVQA

SEQ ID NO: 18463 - protein, 10 aa, synthetic construct
  source 1..10: note = Seed: FQLTPIAVQM
FFLTPIAVQI

SEQ ID NO: 18464 - protein, 10 aa, synthetic construct
  source 1..10: note = Seed: FQLTPIAVQM
FFLTPIAVQL

SEQ ID NO: 18465 - protein, 10 aa, synthetic construct
  source 1..10: note = Seed: FQLTPIAVQM
FFLTPIAVQM

SEQ ID NO: 18466 - protein, 10 aa, synthetic construct
  source 1..10: note = Seed: FQLTPIAVQM
FFLTPIAVQV

SEQ ID NO: 18467 - protein, 10 aa, synthetic construct
  source 1..10: note = Seed: FELTSMKYFV
FFLTSMKYFA

SEQ ID NO: 18468 - protein, 10 aa, synthetic construct
  source 1..10: note = Seed: FELTSMKYFV
FFLTSMKYFI

SEQ ID NO: 18469 - protein, 10 aa, synthetic construct
  source 1..10: note = Seed: FELTSMKYFV
FFLTSMKYFL

SEQ ID NO: 18470 - protein, 10 aa, synthetic construct
  source 1..10: note = Seed: FELTSMKYFV
FFLTSMKYFM

SEQ ID NO: 18471 - protein, 10 aa, synthetic construct
  source 1..10: note = Seed: FELTSMKYFV
FFLTSMKYFV

SEQ ID NO: 18472 - protein, 10 aa, synthetic construct
  source 1..10: note = Seed: FGLVAEWFLA
FFLVAEWFLA

SEQ ID NO: 18473 - protein, 11 aa, synthetic construct
  source 1..11: note = Seed: FGLVAEWFLAY
FFLVAEWFLAY

SEQ ID NO: 18474 - protein, 10 aa, synthetic construct
  source 1..10: note = Seed: FGLVAEWFLA
FFLVAEWFLI

SEQ ID NO: 18475 - protein, 10 aa, synthetic construct
  source 1..10: note = Seed: FGLVAEWFLA
FFLVAEWFLL

SEQ ID NO: 18476 - protein, 10 aa, synthetic construct
  source 1..10: note = Seed: FGLVAEWFLA
FFLVAEWFLM

SEQ ID NO: 18477 - protein, 10 aa, synthetic construct
  source 1..10: note = Seed: FGLVAEWFLA
FFLVAEWFLV

SEQ ID NO: 18478 - protein, 9 aa, synthetic construct
  source 1..9: note = Seed: FGLVAEWFL
FFLVAEWFV

SEQ ID NO: 18479 - protein, 10 aa, synthetic construct
  source 1..10: note = Seed: FVLWAHGFEL
FFLWAHGFEA

SEQ ID NO: 18480 - protein, 10 aa, synthetic construct
  source 1..10: note = Seed: FVLWAHGFEL
FFLWAHGFEI

SEQ ID NO: 18481 - protein, 10 aa, synthetic construct
  source 1..10: note = Seed: FVLWAHGFEL
FFLWAHGFEL

SEQ ID NO: 18482 - protein, 11 aa, synthetic construct
  source 1..11: note = Seed: FVLWAHGFELT
FFLWAHGFELA

SEQ ID NO: 18483 - protein, 11 aa, synthetic construct
  source 1..11: note = Seed: FVLWAHGFELT
FFLWAHGFELC

SEQ ID NO: 18484 - protein, 11 aa, synthetic construct
  source 1..11: note = Seed: FVLWAHGFELT
FFLWAHGFELD

SEQ ID NO: 18485 - protein, 11 aa, synthetic construct
  source 1..11: note = Seed: FVLWAHGFELT
FFLWAHGFELE

SEQ ID NO: 18486 - protein, 11 aa, synthetic construct
  source 1..11: note = Seed: FVLWAHGFELT
FFLWAHGFELF

SEQ ID NO: 18487 - protein, 11 aa, synthetic construct
  source 1..11: note = Seed: FVLWAHGFELT
FFLWAHGFELG

SEQ ID NO: 18488 - protein, 11 aa, synthetic construct
  source 1..11: note = Seed: FVLWAHGFELT
FFLWAHGFELH

SEQ ID NO: 18489 - protein, 11 aa, synthetic construct
  source 1..11: note = Seed: FVLWAHGFELT
FFLWAHGFELI

SEQ ID NO: 18490 - protein, 11 aa, synthetic construct
  source 1..11: note = Seed: FVLWAHGFELT
FFLWAHGFELK

SEQ ID NO: 18491 - protein, 11 aa, synthetic construct
  source 1..11: note = Seed: FVLWAHGFELT
FFLWAHGFELL

SEQ ID NO: 18492 - protein, 11 aa, synthetic construct
  source 1..11: note = Seed: FVLWAHGFELT
FFLWAHGFELM

SEQ ID NO: 18493 - protein, 11 aa, synthetic construct
  source 1..11: note = Seed: FVLWAHGFELT
FFLWAHGFELN

SEQ ID NO: 18494 - protein, 11 aa, synthetic construct
  source 1..11: note = Seed: FVLWAHGFELT
FFLWAHGFELP

SEQ ID NO: 18495 - protein, 11 aa, synthetic construct
  source 1..11: note = Seed: FVLWAHGFELT
FFLWAHGFELQ

SEQ ID NO: 18496 - protein, 11 aa, synthetic construct
  source 1..11: note = Seed: FVLWAHGFELT
FFLWAHGFELR

SEQ ID NO: 18497 - protein, 11 aa, synthetic construct
  source 1..11: note = Seed: FVLWAHGFELT
FFLWAHGFELS

SEQ ID NO: 18498 - protein, 11 aa, synthetic construct
  source 1..11: note = Seed: FVLWAHGFELT
FFLWAHGFELT

SEQ ID NO: 18499 - protein, 11 aa, synthetic construct
  source 1..11: note = Seed: FVLWAHGFELT
FFLWAHGFELV

SEQ ID NO: 18500 - protein, 11 aa, synthetic construct
  source 1..11: note = Seed: FVLWAHGFELT
FFLWAHGFELW

SEQ ID NO: 18501 - protein, 11 aa, synthetic construct
  source 1..11: note = Seed: FVLWAHGFELT
FFLWAHGFELY

SEQ ID NO: 18502 - protein, 10 aa, synthetic construct
  source 1..10: note = Seed: FVLWAHGFEL
FFLWAHGFEM

SEQ ID NO: 18503 - protein, 10 aa, synthetic construct
  source 1..10: note = Seed: FVLWAHGFEL
FFLWAHGFES

SEQ ID NO: 18504 - protein, 10 aa, synthetic construct
  source 1..10: note = Seed: FVLWAHGFEL
FFLWAHGFET

SEQ ID NO: 18505 - protein, 10 aa, synthetic construct
  source 1..10: note = Seed: FVLWAHGFEL
FFLWAHGFEV

SEQ ID NO: 18506 - protein, 10 aa, synthetic construct
  source 1..10: note = Seed: FELWAKRNIK
FFLWAKRNIR

SEQ ID NO: 18507 - protein, 9 aa, synthetic construct
  source 1..9: note = Seed: FHLYLQYIR
FFLYLQYIR

SEQ ID NO: 18508 - protein, 9 aa, synthetic construct
  source 1..9: note = Seed: FAMMFVKHK
FFMMFVKHR

SEQ ID NO: 18509 - protein, 10 aa, synthetic construct
  source 1..10: note = Seed: FSMMILSDDA
FFMMILSDDL

SEQ ID NO: 18510 - protein, 10 aa, synthetic construct
  source 1..10: note = Seed: FSMMILSDDA
FFMMILSDDV

SEQ ID NO: 18511 - protein, 10 aa, synthetic construct
  source 1..10: note = Seed: FKMNYQVNGY
FFMNYQVNGY

SEQ ID NO: 18512 - protein, 8 aa, synthetic construct
  source 1..8: note = Seed: FAMQMAYR
FFMQMAYR

SEQ ID NO: 18513 - protein, 9 aa, synthetic construct
  source 1..9: note = Seed: FAMQMAYRF
FFMQMAYRF

SEQ ID NO: 18514 - protein, 9 aa, synthetic construct
  source 1..9: note = Seed: FAMQMAYRF
FFMQMAYRI

SEQ ID NO: 18515 - protein, 9 aa, synthetic construct
  source 1..9: note = Seed: FAMQMAYRF
FFMQMAYRL

SEQ ID NO: 18516 - protein, 9 aa, synthetic construct
  source 1..9: note = Seed: FAMQMAYRF
FFMQMAYRM

SEQ ID NO: 18517 - protein, 9 aa, synthetic construct
  source 1..9: note = Seed: FAMQMAYRF
FFMQMAYRW

SEQ ID NO: 18518 - protein, 9 aa, synthetic construct
  source 1..9: note = Seed: FAMQMAYRF
FFMQMAYRY

SEQ ID NO: 18519 - protein, 8 aa, synthetic construct
  source 1..8: note = Seed: FDMSKFPL
FFMSKFPL

SEQ ID NO: 18520 - protein, 10 aa, synthetic construct
  source 1..10: note = Seed: FDMSKFPLKL
FFMSKFPLKA

SEQ ID NO: 18521 - protein, 10 aa, synthetic construct
  source 1..10: note = Seed: FDMSKFPLKL
FFMSKFPLKI

SEQ ID NO: 18522 - protein, 10 aa, synthetic construct
  source 1..10: note = Seed: FDMSKFPLKL
FFMSKFPLKL

SEQ ID NO: 18523 - protein, 10 aa, synthetic construct
  source 1..10: note = Seed: FDMSKFPLKL
FFMSKFPLKV

SEQ ID NO: 18524 - protein, 8 aa, synthetic construct
  source 1..8: note = Seed: FDMSKFPL
FFMSKFPM

SEQ ID NO: 18525 - protein, 10 aa, synthetic construct
  source 1..10: note = Seed: FNMVYMPASW
FFMVYMPASF

SEQ ID NO: 18526 - protein, 10 aa, synthetic construct
  source 1..10: note = Seed: FNMVYMPASW
FFMVYMPASY

SEQ ID NO: 18527 - protein, 9 aa, synthetic construct
  source 1..9: note = Seed: FWNCNVDRY
FFNCNVDRF

SEQ ID NO: 18528 - protein, 9 aa, synthetic construct
  source 1..9: note = Seed: FWNCNVDRY
FFNCNVDRM

SEQ ID NO: 18529 - protein, 9 aa, synthetic construct
  source 1..9: note = Seed: FENKTTLPV
FFNKTTLPF

SEQ ID NO: 18530 - protein, 9 aa, synthetic construct
  source 1..9: note = Seed: FENKTTLPV
FFNKTTLPM

SEQ ID NO: 18531 - protein, 9 aa, synthetic construct
  source 1..9: note = Seed: FENKTTLPV
FFNKTTLPY

SEQ ID NO: 18532 - protein, 9 aa, synthetic construct
  source 1..9: note = Seed: FVNLKQLPF
FFNLKQLPF

SEQ ID NO: 18533 - protein, 11 aa, synthetic construct
  source 1..11: note = Seed: FVNLKQLPFFY
FFNLKQLPFFY

SEQ ID NO: 18534 - protein, 9 aa, synthetic construct
  source 1..9: note = Seed: FVNLKQLPF
FFNLKQLPI

SEQ ID NO: 18535 - protein, 9 aa, synthetic construct
  source 1..9: note = Seed: FVNLKQLPF
FFNLKQLPL

SEQ ID NO: 18536 - protein, 9 aa, synthetic construct
  source 1..9: note = Seed: FVNLKQLPF
FFNLKQLPM

SEQ ID NO: 18537 - protein, 9 aa, synthetic construct
  source 1..9: note = Seed: FVNLKQLPF
FFNLKQLPV

SEQ ID NO: 18538 - protein, 9 aa, synthetic construct
  source 1..9: note = Seed: FVNLKQLPF
FFNLKQLPY

SEQ ID NO: 18539 - protein, 11 aa, synthetic construct
  source 1..11: note = Seed: FTNVYADSFVI
FFNVYADSFVV

SEQ ID NO: 18540 - protein, 9 aa, synthetic construct
  source 1..9: note = Seed: FFPDLNGDV
FFPDLNGDF

SEQ ID NO: 18541 - protein, 9 aa, synthetic construct
  source 1..9: note = Seed: FFPDLNGDV
FFPDLNGDL

SEQ ID NO: 18542 - protein, 9 aa, synthetic construct
  source 1..9: note = Seed: FFPDLNGDV
FFPDLNGDM

SEQ ID NO: 18543 - protein, 9 aa, synthetic construct
  source 1..9: note = Seed: FFPDLNGDV
FFPDLNGDY

SEQ ID NO: 18544 - protein, 10 aa, synthetic construct
  source 1..10: note = Seed: FTPFDVVRQC
FFPFDVVRQA

SEQ ID NO: 18545 - protein, 10 aa, synthetic construct
  source 1..10: note = Seed: FLPFFSNVTW
FFPFFSNVTF

SEQ ID NO: 18546 - protein, 10 aa, synthetic construct
  source 1..10: note = Seed: FLPFFSNVTW
FFPFFSNVTH

SEQ ID NO: 18547 - protein, 10 aa, synthetic construct
  source 1..10: note = Seed: FLPFFSNVTW
FFPFFSNVTL

SEQ ID NO: 18548 - protein, 10 aa, synthetic construct
  source 1..10: note = Seed: FLPFFSNVTW
FFPFFSNVTM

SEQ ID NO: 18549 - protein, 10 aa, synthetic construct
  source 1..10: note = Seed: FLPFFSNVTW
FFPFFSNVTW

SEQ ID NO: 18550 - protein, 11 aa, synthetic construct
  source 1..11: note = Seed: FLPFFSNVTWF
FFPFFSNVTWW

SEQ ID NO: 18551 - protein, 10 aa, synthetic construct
  source 1..10: note = Seed: FLPFFSNVTW
FFPFFSNVTY

SEQ ID NO: 18552 - protein, 9 aa, synthetic construct
  source 1..9: note = Seed: FLPFQQFGR
FFPFQQFGR

SEQ ID NO: 18553 - protein, 10 aa, synthetic construct
  source 1..10: note = Seed: FTPLVPFWIT
FFPLVPFWIA

SEQ ID NO: 18554 - protein, 11 aa, synthetic construct
  source 1..11: note = Seed: FTPLVPFWITI
FFPLVPFWITV

SEQ ID NO: 18555 - protein, 9 aa, synthetic construct
  source 1..9: note = Seed: FLPRVFSAV
FFPRVFSAA

SEQ ID NO: 18556 - protein, 9 aa, synthetic construct
  source 1..9: note = Seed: FLPRVFSAV
FFPRVFSAF

SEQ ID NO: 18557 - protein, 9 aa, synthetic construct
  source 1..9: note = Seed: FLPRVFSAV
FFPRVFSAH

SEQ ID NO: 18558 - protein, 9 aa, synthetic construct
  source 1..9: note = Seed: FLPRVFSAV
FFPRVFSAI

SEQ ID NO: 18559 - protein, 9 aa, synthetic construct
  source 1..9: note = Seed: FLPRVFSAV
FFPRVFSAL

SEQ ID NO: 18560 - protein, 9 aa, synthetic construct
  source 1..9: note = Seed: FLPRVFSAV
FFPRVFSAM

SEQ ID NO: 18561 - protein, 9 aa, synthetic construct
  source 1..9: note = Seed: FLPRVFSAV
FFPRVFSAV

SEQ ID NO: 18562 - protein, 10 aa, synthetic construct
  source 1..10: note = Seed: FLPRVFSAVG
FFPRVFSAVF

SEQ ID NO: 18563 - protein, 10 aa, synthetic construct
  source 1..10: note = Seed: FLPRVFSAVG
FFPRVFSAVI

SEQ ID NO: 18564 - protein, 10 aa, synthetic construct
  source 1..10: note = Seed: FLPRVFSAVG
FFPRVFSAVL

SEQ ID NO: 18565 - protein, 10 aa, synthetic construct
  source 1..10: note = Seed: FLPRVFSAVG
FFPRVFSAVM

SEQ ID NO: 18566 - protein, 10 aa, synthetic construct
  source 1..10: note = Seed: FLPRVFSAVG
FFPRVFSAVV

SEQ ID NO: 18567 - protein, 9 aa, synthetic construct
  source 1..9: note = Seed: FLPRVFSAV
FFPRVFSAW

SEQ ID NO: 18568 - protein, 9 aa, synthetic construct
  source 1..9: note = Seed: FLPRVFSAV
FFPRVFSAY

SEQ ID NO: 18569 - protein, 8 aa, synthetic construct
  source 1..8: note = Seed: FAPSASAF
FFPSASAF

SEQ ID NO: 18570 - protein, 9 aa, synthetic construct
  source 1..9: note = Seed: FAPSASAFF
FFPSASAFF

SEQ ID NO: 18571 - protein, 9 aa, synthetic construct
  source 1..9: note = Seed: FAPSASAFF
FFPSASAFI

SEQ ID NO: 18572 - protein, 9 aa, synthetic construct
  source 1..9: note = Seed: FAPSASAFF
FFPSASAFL

SEQ ID NO: 18573 - protein, 9 aa, synthetic construct
  source 1..9: note = Seed: FAPSASAFF
FFPSASAFM

SEQ ID NO: 18574 - protein, 9 aa, synthetic construct
  source 1..9: note = Seed: FAPSASAFF
FFPSASAFV

SEQ ID NO: 18575 - protein, 9 aa, synthetic construct
  source 1..9: note = Seed: FAPSASAFF
FFPSASAFW

SEQ ID NO: 18576 - protein, 9 aa, synthetic construct
  source 1..9: note = Seed: FAPSASAFF
FFPSASAFY

SEQ ID NO: 18577 - protein, 8 aa, synthetic construct
  source 1..8: note = Seed: FAPSASAF
FFPSASAI

SEQ ID NO: 18578 - protein, 8 aa, synthetic construct
  source 1..8: note = Seed: FAPSASAF
FFPSASAL

SEQ ID NO: 18579 - protein, 8 aa, synthetic construct
  source 1..8: note = Seed: FAPSASAF
FFPSASAM

SEQ ID NO: 18580 - protein, 8 aa, synthetic construct
  source 1..8: note = Seed: FAPSASAF
FFPSASAY

SEQ ID NO: 18581 - protein, 11 aa, synthetic construct
  source 1..11: note = Seed: FPQSAPHGVVF
FFQSAPHGVVF

SEQ ID NO: 18582 - protein, 11 aa, synthetic construct
  source 1..11: note = Seed: FPQSAPHGVVF
FFQSAPHGVVL

SEQ ID NO: 18583 - protein, 11 aa, synthetic construct
  source 1..11: note = Seed: FPQSAPHGVVF
FFQSAPHGVVM

SEQ ID NO: 18584 - protein, 11 aa, synthetic construct
  source 1..11: note = Seed: FPQSAPHGVVF
FFQSAPHGVVW

SEQ ID NO: 18585 - protein, 11 aa, synthetic construct
  source 1..11: note = Seed: FPQSAPHGVVF
FFQSAPHGVVY

SEQ ID NO: 18586 - protein, 9 aa, synthetic construct
  source 1..9: note = Seed: FLQSINFVR
FFQSINFVK

SEQ ID NO: 18587 - protein, 9 aa, synthetic construct
  source 1..9: note = Seed: FLQSINFVR
FFQSINFVR

SEQ ID NO: 18588 - protein, 10 aa, synthetic construct
  source 1..10: note = Seed: FLQSINFVRI
FFQSINFVRK

SEQ ID NO: 18589 - protein, 10 aa, synthetic construct
  source 1..10: note = Seed: FLQSINFVRI
FFQSINFVRR

SEQ ID NO: 18590 - protein, 10 aa, synthetic construct
  source 1..10: note = Seed: FTQSRNLQEF
FFQSRNLQEF

SEQ ID NO: 18591 - protein, 11 aa, synthetic construct
  source 1..11: note = Seed: FTQSRNLQEFK
FFQSRNLQEFR

SEQ ID NO: 18592 - protein, 9 aa, synthetic construct
  source 1..9: note = Seed: FAQVKQIYK
FFQVKQIYK

SEQ ID NO: 18593 - protein, 9 aa, synthetic construct
  source 1..9: note = Seed: FAQVKQIYK
FFQVKQIYR

SEQ ID NO: 18594 - protein, 10 aa, synthetic construct
  source 1..10: note = Seed: FTRFFYVLGL
FFRFFYVLGK

SEQ ID NO: 18595 - protein, 10 aa, synthetic construct
  source 1..10: note = Seed: FTRFFYVLGL
FFRFFYVLGL

SEQ ID NO: 18596 - protein, 10 aa, synthetic construct
  source 1..10: note = Seed: FTRGVYYPDK
FFRGVYYPDR

SEQ ID NO: 18597 - protein, 9 aa, synthetic construct
  source 1..9: note = Seed: FISAARQGF
FFSAARQGF

SEQ ID NO: 18598 - protein, 9 aa, synthetic construct
  source 1..9: note = Seed: FISAARQGF
FFSAARQGI

SEQ ID NO: 18599 - protein, 9 aa, synthetic construct
  source 1..9: note = Seed: FISAARQGF
FFSAARQGL

SEQ ID NO: 18600 - protein, 9 aa, synthetic construct
  source 1..9: note = Seed: FISAARQGF
FFSAARQGM

SEQ ID NO: 18601 - protein, 9 aa, synthetic construct
  source 1..9: note = Seed: FISAARQGF
FFSAARQGV

SEQ ID NO: 18602 - protein, 9 aa, synthetic construct
  source 1..9: note = Seed: FISAARQGF
FFSAARQGY

SEQ ID NO: 18603 - protein, 9 aa, synthetic construct
  source 1..9: note = Seed: FTSDYYQLY
FFSDYYQLF

SEQ ID NO: 18604 - protein, 9 aa, synthetic construct
  source 1..9: note = Seed: FTSDYYQLY
FFSDYYQLI

SEQ ID NO: 18605 - protein, 9 aa, synthetic construct
  source 1..9: note = Seed: FTSDYYQLY
FFSDYYQLL

SEQ ID NO: 18606 - protein, 9 aa, synthetic construct
  source 1..9: note = Seed: FTSDYYQLY
FFSDYYQLM

SEQ ID NO: 18607 - protein, 9 aa, synthetic construct
  source 1..9: note = Seed: FTSDYYQLY
FFSDYYQLY

SEQ ID NO: 18608 - protein, 10 aa, synthetic construct
  source 1..10: note = Seed: FTSDYYQLYS
FFSDYYQLYF

SEQ ID NO: 18609 - protein, 10 aa, synthetic construct
  source 1..10: note = Seed: FTSDYYQLYS
FFSDYYQLYM

SEQ ID NO: 18610 - protein, 10 aa, synthetic construct
  source 1..10: note = Seed: FTSDYYQLYS
FFSDYYQLYY

SEQ ID NO: 18611 - protein, 9 aa, synthetic construct
  source 1..9: note = Seed: FASFYYVWK
FFSFYYVWR

SEQ ID NO: 18612 - protein, 9 aa, synthetic construct
  source 1..9: note = Seed: FYSKWYIRV
FFSKWYIRF

SEQ ID NO: 18613 - protein, 9 aa, synthetic construct
  source 1..9: note = Seed: FYSKWYIRV
FFSKWYIRM

SEQ ID NO: 18614 - protein, 9 aa, synthetic construct
  source 1..9: note = Seed: FVSLAIDAY
FFSLAIDAY

SEQ ID NO: 18615 - protein, 9 aa, synthetic construct
  source 1..9: note = Seed: FVSNGTHWF
FFSNGTHWF

SEQ ID NO: 18616 - protein, 9 aa, synthetic construct
  source 1..9: note = Seed: FVSNGTHWF
FFSNGTHWI

SEQ ID NO: 18617 - protein, 9 aa, synthetic construct
  source 1..9: note = Seed: FVSNGTHWF
FFSNGTHWL

SEQ ID NO: 18618 - protein, 9 aa, synthetic construct
  source 1..9: note = Seed: FVSNGTHWF
FFSNGTHWM

SEQ ID NO: 18619 - protein, 9 aa, synthetic construct
  source 1..9: note = Seed: FVSNGTHWF
FFSNGTHWW

SEQ ID NO: 18620 - protein, 9 aa, synthetic construct
  source 1..9: note = Seed: FVSNGTHWF
FFSNGTHWY

SEQ ID NO: 18621 - protein, 9 aa, synthetic construct
  source 1..9: note = Seed: FSSNVANYQ
FFSNVANYK

SEQ ID NO: 18622 - protein, 10 aa, synthetic construct
  source 1..10: note = Seed: FSSNVANYQK
FFSNVANYQK

SEQ ID NO: 18623 - protein, 10 aa, synthetic construct
  source 1..10: note = Seed: FSSNVANYQK
FFSNVANYQR

SEQ ID NO: 18624 - protein, 9 aa, synthetic construct
  source 1..9: note = Seed: FSSNVANYQ
FFSNVANYR

SEQ ID NO: 18625 - protein, 9 aa, synthetic construct
  source 1..9: note = Seed: FFSNVTWFH
FFSNVTWFF

SEQ ID NO: 18626 - protein, 9 aa, synthetic construct
  source 1..9: note = Seed: FFSNVTWFH
FFSNVTWFK

SEQ ID NO: 18627 - protein, 9 aa, synthetic construct
  source 1..9: note = Seed: FFSNVTWFH
FFSNVTWFM

SEQ ID NO: 18628 - protein, 9 aa, synthetic construct
  source 1..9: note = Seed: FFSNVTWFH
FFSNVTWFR

SEQ ID NO: 18629 - protein, 9 aa, synthetic construct
  source 1..9: note = Seed: FFSNVTWFH
FFSNVTWFY

SEQ ID NO: 18630 - protein, 11 aa, synthetic construct
  source 1..11: note = Seed: FISPYNSQNAV
FFSPYNSQNAA

SEQ ID NO: 18631 - protein, 11 aa, synthetic construct
  source 1..11: note = Seed: FISPYNSQNAV
FFSPYNSQNAL

SEQ ID NO: 18632 - protein, 11 aa, synthetic construct
  source 1..11: note = Seed: FISPYNSQNAV
FFSPYNSQNAM

SEQ ID NO: 18633 - protein, 10 aa, synthetic construct
  source 1..10: note = Seed: FFSYFAVHFI
FFSYFAVHFA

SEQ ID NO: 18634 - protein, 10 aa, synthetic construct
  source 1..10: note = Seed: FFSYFAVHFI
FFSYFAVHFF

SEQ ID NO: 18635 - protein, 10 aa, synthetic construct
  source 1..10: note = Seed: FFSYFAVHFI
FFSYFAVHFV

SEQ ID NO: 18636 - protein, 10 aa, synthetic construct
  source 1..10: note = Seed: FFSYFAVHFI
FFSYFAVHFW

SEQ ID NO: 18637 - protein, 10 aa, synthetic construct
  source 1..10: note = Seed: FFSYFAVHFI
FFSYFAVHFY

SEQ ID NO: 18638 - protein, 9 aa, synthetic construct
  source 1..9: note = Seed: FFSYFAVHF
FFSYFAVHL

SEQ ID NO: 18639 - protein, 9 aa, synthetic construct
  source 1..9: note = Seed: FFSYFAVHF
FFSYFAVHM

SEQ ID NO: 18640 - protein, 9 aa, synthetic construct
  source 1..9: note = Seed: FFSYFAVHF
FFSYFAVHY

SEQ ID NO: 18641 - protein, 9 aa, synthetic construct
  source 1..9: note = Seed: FVTHSKGLY
FFTHSKGLY

SEQ ID NO: 18642 - protein, 10 aa, synthetic construct
  source 1..10: note = Seed: FVTHSKGLYR
FFTHSKGLYR

SEQ ID NO: 18643 - protein, 10 aa, synthetic construct
  source 1..10: note = Seed: FDTYNLWNTF
FFTYNLWNTF

SEQ ID NO: 18644 - protein, 10 aa, synthetic construct
  source 1..10: note = Seed: FDTYNLWNTF
FFTYNLWNTW

SEQ ID NO: 18645 - protein, 10 aa, synthetic construct
  source 1..10: note = Seed: FDTYNLWNTF
FFTYNLWNTY

SEQ ID NO: 18646 - protein, 9 aa, synthetic construct
  source 1..9: note = Seed: FAVDAAKAY
FFVDAAKAF

SEQ ID NO: 18647 - protein, 9 aa, synthetic construct
  source 1..9: note = Seed: FAVDAAKAY
FFVDAAKAI

SEQ ID NO: 18648 - protein, 9 aa, synthetic construct
  source 1..9: note = Seed: FAVDAAKAY
FFVDAAKAL

SEQ ID NO: 18649 - protein, 9 aa, synthetic construct
  source 1..9: note = Seed: FAVDAAKAY
FFVDAAKAM

SEQ ID NO: 18650 - protein, 9 aa, synthetic construct
  source 1..9: note = Seed: FAVDAAKAY
FFVDAAKAV

SEQ ID NO: 18651 - protein, 9 aa, synthetic construct
  source 1..9: note = Seed: FAVDAAKAY
FFVDAAKAY

SEQ ID NO: 18652 - protein, 10 aa, synthetic construct
  source 1..10: note = Seed: FAVDAAKAYK
FFVDAAKAYR

SEQ ID NO: 18653 - protein, 10 aa, synthetic construct
  source 1..10: note = Seed: FKVSIWNLDY
FFVSIWNLDY

SEQ ID NO: 18654 - protein, 9 aa, synthetic construct
  source 1..9: note = Seed: FVVSTGYHF
FFVSTGYHF

SEQ ID NO: 18655 - protein, 10 aa, synthetic construct
  source 1..10: note = Seed: FVVSTGYHFR
FFVSTGYHFK

SEQ ID NO: 18656 - protein, 10 aa, synthetic construct
  source 1..10: note = Seed: FVVSTGYHFR
FFVSTGYHFR

SEQ ID NO: 18657 - protein, 9 aa, synthetic construct
  source 1..9: note = Seed: FVVSTGYHF
FFVSTGYHI

SEQ ID NO: 18658 - protein, 9 aa, synthetic construct
  source 1..9: note = Seed: FVVSTGYHF
FFVSTGYHL

SEQ ID NO: 18659 - protein, 9 aa, synthetic construct
  source 1..9: note = Seed: FVVSTGYHF
FFVSTGYHM

SEQ ID NO: 18660 - protein, 9 aa, synthetic construct
  source 1..9: note = Seed: FVVSTGYHF
FFVSTGYHV

SEQ ID NO: 18661 - protein, 9 aa, synthetic construct
  source 1..9: note = Seed: FVVSTGYHF
FFVSTGYHW

SEQ ID NO: 18662 - protein, 9 aa, synthetic construct
  source 1..9: note = Seed: FVVSTGYHF
FFVSTGYHY

SEQ ID NO: 18663 - protein, 9 aa, synthetic construct
  source 1..9: note = Seed: FYWFFSNYL
FFWFFSNYF

SEQ ID NO: 18664 - protein, 9 aa, synthetic construct
  source 1..9: note = Seed: FYWFFSNYL
FFWFFSNYL

SEQ ID NO: 18665 - protein, 10 aa, synthetic construct
  source 1..10: note = Seed: FYWFFSNYLK
FFWFFSNYLF

SEQ ID NO: 18666 - protein, 10 aa, synthetic construct
  source 1..10: note = Seed: FYWFFSNYLK
FFWFFSNYLK

SEQ ID NO: 18667 - protein, 11 aa, synthetic construct
  source 1..11: note = Seed: FYWFFSNYLKR
FFWFFSNYLKR

SEQ ID NO: 18668 - protein, 10 aa, synthetic construct
  source 1..10: note = Seed: FYWFFSNYLK
FFWFFSNYLM

SEQ ID NO: 18669 - protein, 10 aa, synthetic construct
  source 1..10: note = Seed: FYWFFSNYLK
FFWFFSNYLR

SEQ ID NO: 18670 - protein, 10 aa, synthetic construct
  source 1..10: note = Seed: FYWFFSNYLK
FFWFFSNYLY

SEQ ID NO: 18671 - protein, 9 aa, synthetic construct
  source 1..9: note = Seed: FYWFFSNYL
FFWFFSNYM

SEQ ID NO: 18672 - protein, 9 aa, synthetic construct
  source 1..9: note = Seed: FYWFFSNYL
FFWFFSNYV

SEQ ID NO: 18673 - protein, 9 aa, synthetic construct
  source 1..9: note = Seed: FYWFFSNYL
FFWFFSNYY

SEQ ID NO: 18674 - protein, 10 aa, synthetic construct
  source 1..10: note = Seed: FLWLLWPVTL
FFWLLWPVTF

SEQ ID NO: 18675 - protein, 11 aa, synthetic construct
  source 1..11: note = Seed: FLWLLWPVTLA
FFWLLWPVTLI

SEQ ID NO: 18676 - protein, 11 aa, synthetic construct
  source 1..11: note = Seed: FLWLLWPVTLA
FFWLLWPVTLL

SEQ ID NO: 18677 - protein, 11 aa, synthetic construct
  source 1..11: note = Seed: FLWLLWPVTLA
FFWLLWPVTLV

SEQ ID NO: 18678 - protein, 9 aa, synthetic construct
  source 1..9: note = Seed: FSYFAVHFI
FFYFAVHFI

SEQ ID NO: 18679 - protein, 9 aa, synthetic construct
  source 1..9: note = Seed: FSYFAVHFI
FFYFAVHFL

SEQ ID NO: 18680 - protein, 9 aa, synthetic construct
  source 1..9: note = Seed: FSYFAVHFI
FFYFAVHFV

SEQ ID NO: 18681 - protein, 9 aa, synthetic construct
  source 1..9: note = Seed: FYYLGTGPE
FFYLGTGPA

SEQ ID NO: 18682 - protein, 9 aa, synthetic construct
  source 1..9: note = Seed: FYYLGTGPE
FFYLGTGPF

SEQ ID NO: 18683 - protein, 9 aa, synthetic construct
  source 1..9: note = Seed: FYYLGTGPE
FFYLGTGPH

SEQ ID NO: 18684 - protein, 9 aa, synthetic construct
  source 1..9: note = Seed: FYYLGTGPE
FFYLGTGPI

SEQ ID NO: 18685 - protein, 9 aa, synthetic construct
  source 1..9: note = Seed: FYYLGTGPE
FFYLGTGPL

SEQ ID NO: 18686 - protein, 9 aa, synthetic construct
  source 1..9: note = Seed: FYYLGTGPE
FFYLGTGPM

SEQ ID NO: 18687 - protein, 9 aa, synthetic construct
  source 1..9: note = Seed: FYYLGTGPE
FFYLGTGPV

SEQ ID NO: 18688 - protein, 9 aa, synthetic construct
  source 1..9: note = Seed: FYYLGTGPE
FFYLGTGPW

SEQ ID NO: 18689 - protein, 9 aa, synthetic construct
  source 1..9: note = Seed: FYYLGTGPE
FFYLGTGPY

SEQ ID NO: 18690 - protein, 9 aa, synthetic construct
  source 1..9: note = Seed: FCYMHHMEL
FFYMHHMEA

SEQ ID NO: 18691 - protein, 9 aa, synthetic construct
  source 1..9: note = Seed: FCYMHHMEL
FFYMHHMEF

SEQ ID NO: 18692 - protein, 9 aa, synthetic construct
  source 1..9: note = Seed: FCYMHHMEL
FFYMHHMEH

SEQ ID NO: 18693 - protein, 9 aa, synthetic construct
  source 1..9: note = Seed: FCYMHHMEL
FFYMHHMEI

SEQ ID NO: 18694 - protein, 9 aa, synthetic construct
  source 1..9: note = Seed: FCYMHHMEL
FFYMHHMEL

SEQ ID NO: 18695 - protein, 9 aa, synthetic construct
  source 1..9: note = Seed: FCYMHHMEL
FFYMHHMEM

SEQ ID NO: 18696 - protein, 9 aa, synthetic construct
  source 1..9: note = Seed: FCYMHHMEL
FFYMHHMET

SEQ ID NO: 18697 - protein, 9 aa, synthetic construct
  source 1..9: note = Seed: FCYMHHMEL
FFYMHHMEV

SEQ ID NO: 18698 - protein, 9 aa, synthetic construct
  source 1..9: note = Seed: FCYMHHMEL
FFYMHHMEW

SEQ ID NO: 18699 - protein, 9 aa, synthetic construct
  source 1..9: note = Seed: FCYMHHMEL
FFYMHHMEY

SEQ ID NO: 18700 - protein, 9 aa, synthetic construct
  source 1..9: note = Seed: FRYMNSQGL
FFYMNSQGF

SEQ ID NO: 18701 - protein, 9 aa, synthetic construct
  source 1..9: note = Seed: FRYMNSQGL
FFYMNSQGI

SEQ ID NO: 18702 - protein, 9 aa, synthetic construct
  source 1..9: note = Seed: FRYMNSQGL
FFYMNSQGL

SEQ ID NO: 18703 - protein, 9 aa, synthetic construct
  source 1..9: note = Seed: FRYMNSQGL
FFYMNSQGM

SEQ ID NO: 18704 - protein, 9 aa, synthetic construct
  source 1..9: note = Seed: FRYMNSQGL
FFYMNSQGV

SEQ ID NO: 18705 - protein, 9 aa, synthetic construct
  source 1..9: note = Seed: FRYMNSQGL
FFYMNSQGW

SEQ ID NO: 18706 - protein, 9 aa, synthetic construct
  source 1..9: note = Seed: FRYMNSQGL
FFYMNSQGY

SEQ ID NO: 18707 - protein, 8 aa, synthetic construct
  source 1..8: note = Seed: FYYVWKSY
FFYVWKSL

SEQ ID NO: 18708 - protein, 8 aa, synthetic construct
  source 1..8: note = Seed: FYYVWKSY
FFYVWKSM

SEQ ID NO: 18709 - protein, 9 aa, synthetic construct
  source 1..9: note = Seed: FYYVWKSYV
FFYVWKSYF

SEQ ID NO: 18710 - protein, 9 aa, synthetic construct
  source 1..9: note = Seed: FYYVWKSYV
FFYVWKSYI

SEQ ID NO: 18711 - protein, 9 aa, synthetic construct
  source 1..9: note = Seed: FYYVWKSYV
FFYVWKSYL

SEQ ID NO: 18712 - protein, 9 aa, synthetic construct
  source 1..9: note = Seed: FYYVWKSYV
FFYVWKSYM

SEQ ID NO: 18713 - protein, 9 aa, synthetic construct
  source 1..9: note = Seed: FYYVWKSYV
FFYVWKSYV

SEQ ID NO: 18714 - protein, 10 aa, synthetic construct
  source 1..10: note = Seed: FYYVWKSYVH
FFYVWKSYVF

SEQ ID NO: 18715 - protein, 10 aa, synthetic construct
  source 1..10: note = Seed: FYYVWKSYVH
FFYVWKSYVL

SEQ ID NO: 18716 - protein, 10 aa, synthetic construct
  source 1..10: note = Seed: FYYVWKSYVH
FFYVWKSYVM

SEQ ID NO: 18717 - protein, 10 aa, synthetic construct
  source 1..10: note = Seed: FYYVWKSYVH
FFYVWKSYVY

SEQ ID NO: 18718 - protein, 9 aa, synthetic construct
  source 1..9: note = Seed: FYYVWKSYV
FFYVWKSYY

SEQ ID NO: 18719 - protein, 9 aa, synthetic construct
  source 1..9: note = Seed: FFYYSDSPC
FFYYSDSPA

SEQ ID NO: 18720 - protein, 9 aa, synthetic construct
  source 1..9: note = Seed: FFYYSDSPC
FFYYSDSPF

SEQ ID NO: 18721 - protein, 9 aa, synthetic construct
  source 1..9: note = Seed: FFYYSDSPC
FFYYSDSPH

SEQ ID NO: 18722 - protein, 9 aa, synthetic construct
  source 1..9: note = Seed: FFYYSDSPC
FFYYSDSPI

SEQ ID NO: 18723 - protein, 9 aa, synthetic construct
  source 1..9: note = Seed: FFYYSDSPC
FFYYSDSPL

SEQ ID NO: 18724 - protein, 9 aa, synthetic construct
  source 1..9: note = Seed: FFYYSDSPC
FFYYSDSPM

SEQ ID NO: 18725 - protein, 9 aa, synthetic construct
  source 1..9: note = Seed: FFYYSDSPC
FFYYSDSPV

SEQ ID NO: 18726 - protein, 9 aa, synthetic construct
  source 1..9: note = Seed: FFYYSDSPC
FFYYSDSPW

SEQ ID NO: 18727 - protein, 9 aa, synthetic construct
  source 1..9: note = Seed: FFYYSDSPC
FFYYSDSPY

SEQ ID NO: 18728 - protein, 9 aa, synthetic construct
  source 1..9: note = Seed: FVAAIFYLI
FGAAIFYLA

SEQ ID NO: 18729 - protein, 9 aa, synthetic construct
  source 1..9: note = Seed: FVAAIFYLI
FGAAIFYLF

SEQ ID NO: 18730 - protein, 9 aa, synthetic construct
  source 1..9: note = Seed: FVAAIFYLI
FGAAIFYLI

SEQ ID NO: 18731 - protein, 9 aa, synthetic construct
  source 1..9: note = Seed: FVAAIFYLI
FGAAIFYLK

SEQ ID NO: 18732 - protein, 9 aa, synthetic construct
  source 1..9: note = Seed: FVAAIFYLI
FGAAIFYLL

SEQ ID NO: 18733 - protein, 9 aa, synthetic construct
  source 1..9: note = Seed: FVAAIFYLI
FGAAIFYLR

SEQ ID NO: 18734 - protein, 9 aa, synthetic construct
  source 1..9: note = Seed: FVAAIFYLI
FGAAIFYLV

SEQ ID NO: 18735 - protein, 9 aa, synthetic construct
  source 1..9: note = Seed: FVAAIFYLI
FGAAIFYLY

SEQ ID NO: 18736 - protein, 10 aa, synthetic construct
  source 1..10: note = Seed: FCAFAVDAAK
FGAFAVDAAK

SEQ ID NO: 18737 - protein, 10 aa, synthetic construct
  source 1..10: note = Seed: FCAFAVDAAK
FGAFAVDAAR

SEQ ID NO: 18738 - protein, 9 aa, synthetic construct
  source 1..9: note = Seed: FLAFVVFLL
FGAFVVFLV

SEQ ID NO: 18739 - protein, 9 aa, synthetic construct
  source 1..9: note = Seed: FGAGAALQI
FGAGAALQL

SEQ ID NO: 18740 - protein, 9 aa, synthetic construct
  source 1..9: note = Seed: FGAGAALQI
FGAGAALQM

SEQ ID NO: 18741 - protein, 9 aa, synthetic construct
  source 1..9: note = Seed: FGAGAALQI
FGAGAALQY

SEQ ID NO: 18742 - protein, 9 aa, synthetic construct
  source 1..9: note = Seed: FIAGLIAIV
FGAGLIAIV

SEQ ID NO: 18743 - protein, 9 aa, synthetic construct
  source 1..9: note = Seed: FLAHIQWMV
FGAHIQWMI

SEQ ID NO: 18744 - protein, 9 aa, synthetic construct
  source 1..9: note = Seed: FLAHIQWMV
FGAHIQWMV

SEQ ID NO: 18745 - protein, 9 aa, synthetic construct
  source 1..9: note = Seed: FTALTQHGK
FGALTQHGR

SEQ ID NO: 18746 - protein, 10 aa, synthetic construct
  source 1..10: note = Seed: FIASFRLFAR
FGASFRLFAK

SEQ ID NO: 18747 - protein, 10 aa, synthetic construct
  source 1..10: note = Seed: FIASFRLFAR
FGASFRLFAR

SEQ ID NO: 18748 - protein, 10 aa, synthetic construct
  source 1..10: note = Seed: FFASFYYVWK
FGASFYYVWK

SEQ ID NO: 18749 - protein, 10 aa, synthetic construct
  source 1..10: note = Seed: FFASFYYVWK
FGASFYYVWR

SEQ ID NO: 18750 - protein, 9 aa, synthetic construct
  source 1..9: note = Seed: FFASFYYVW
FGASFYYVY

SEQ ID NO: 18751 - protein, 9 aa, synthetic construct
  source 1..9: note = Seed: FNATRFASV
FGATRFASF

SEQ ID NO: 18752 - protein, 9 aa, synthetic construct
  source 1..9: note = Seed: FNATRFASV
FGATRFASI

SEQ ID NO: 18753 - protein, 9 aa, synthetic construct
  source 1..9: note = Seed: FNATRFASV
FGATRFASL

SEQ ID NO: 18754 - protein, 9 aa, synthetic construct
  source 1..9: note = Seed: FNATRFASV
FGATRFASM

SEQ ID NO: 18755 - protein, 9 aa, synthetic construct
  source 1..9: note = Seed: FNATRFASV
FGATRFASV

SEQ ID NO: 18756 - protein, 10 aa, synthetic construct
  source 1..10: note = Seed: FNATRFASVY
FGATRFASVF

SEQ ID NO: 18757 - protein, 10 aa, synthetic construct
  source 1..10: note = Seed: FNATRFASVY
FGATRFASVM

SEQ ID NO: 18758 - protein, 10 aa, synthetic construct
  source 1..10: note = Seed: FNATRFASVY
FGATRFASVW

SEQ ID NO: 18759 - protein, 10 aa, synthetic construct
  source 1..10: note = Seed: FNATRFASVY
FGATRFASVY

SEQ ID NO: 18760 - protein, 9 aa, synthetic construct
  source 1..9: note = Seed: FNATRFASV
FGATRFASY

SEQ ID NO: 18761 - protein, 10 aa, synthetic construct
  source 1..10: note = Seed: FSAVGNICYT
FGAVGNICYV

SEQ ID NO: 18762 - protein, 9 aa, synthetic construct
  source 1..9: note = Seed: FLAYILFTR
FGAYILFTK

SEQ ID NO: 18763 - protein, 9 aa, synthetic construct
  source 1..9: note = Seed: FLAYILFTR
FGAYILFTR

SEQ ID NO: 18764 - protein, 10 aa, synthetic construct
  source 1..10: note = Seed: FLAYILFTRF
FGAYILFTRR

SEQ ID NO: 18765 - protein, 9 aa, synthetic construct
  source 1..9: note = Seed: FLAYILFTR
FGAYILFTV

SEQ ID NO: 18766 - protein, 9 aa, synthetic construct
  source 1..9: note = Seed: FGDDTVIEV
FGDDTVIEF

SEQ ID NO: 18767 - protein, 9 aa, synthetic construct
  source 1..9: note = Seed: FGDDTVIEV
FGDDTVIEI

SEQ ID NO: 18768 - protein, 9 aa, synthetic construct
  source 1..9: note = Seed: FGDDTVIEV
FGDDTVIEL

SEQ ID NO: 18769 - protein, 9 aa, synthetic construct
  source 1..9: note = Seed: FGDDTVIEV
FGDDTVIEM

SEQ ID NO: 18770 - protein, 9 aa, synthetic construct
  source 1..9: note = Seed: FVDGVPFVV
FGDGVPFVF

SEQ ID NO: 18771 - protein, 9 aa, synthetic construct
  source 1..9: note = Seed: FVDGVPFVV
FGDGVPFVL

SEQ ID NO: 18772 - protein, 9 aa, synthetic construct
  source 1..9: note = Seed: FVDGVPFVV
FGDGVPFVM

SEQ ID NO: 18773 - protein, 9 aa, synthetic construct
  source 1..9: note = Seed: FPDLNGDVV
FGDLNGDVF

SEQ ID NO: 18774 - protein, 9 aa, synthetic construct
  source 1..9: note = Seed: FPDLNGDVV
FGDLNGDVL

SEQ ID NO: 18775 - protein, 9 aa, synthetic construct
  source 1..9: note = Seed: FPDLNGDVV
FGDLNGDVM

SEQ ID NO: 18776 - protein, 11 aa, synthetic construct
  source 1..11: note = Seed: FPDLNGDVVAI
FGDLNGDVVAI

SEQ ID NO: 18777 - protein, 11 aa, synthetic construct
  source 1..11: note = Seed: FPDLNGDVVAI
FGDLNGDVVAL

SEQ ID NO: 18778 - protein, 11 aa, synthetic construct
  source 1..11: note = Seed: FPDLNGDVVAI
FGDLNGDVVAV

SEQ ID NO: 18779 - protein, 10 aa, synthetic construct
  source 1..10: note = Seed: FVFKNIDGYF
FGFKNIDGYY

SEQ ID NO: 18780 - protein, 9 aa, synthetic construct
  source 1..9: note = Seed: FLFVAAIFY
FGFVAAIFY

SEQ ID NO: 18781 - protein, 10 aa, synthetic construct
  source 1..10: note = Seed: FLFVAAIFYL
FGFVAAIFYV

SEQ ID NO: 18782 - protein, 10 aa, synthetic construct
  source 1..10: note = Seed: FLFVAAIFYL
FGFVAAIFYY

SEQ ID NO: 18783 - protein, 9 aa, synthetic construct
  source 1..9: note = Seed: FLHFLPRVF
FGHFLPRVF

SEQ ID NO: 18784 - protein, 9 aa, synthetic construct
  source 1..9: note = Seed: FLHFLPRVF
FGHFLPRVL

SEQ ID NO: 18785 - protein, 9 aa, synthetic construct
  source 1..9: note = Seed: FLHFLPRVF
FGHFLPRVM

SEQ ID NO: 18786 - protein, 9 aa, synthetic construct
  source 1..9: note = Seed: FLHFLPRVF
FGHFLPRVY

SEQ ID NO: 18787 - protein, 10 aa, synthetic construct
  source 1..10: note = Seed: FKIYSKHTPI
FGIYSKHTPA

SEQ ID NO: 18788 - protein, 10 aa, synthetic construct
  source 1..10: note = Seed: FKIYSKHTPI
FGIYSKHTPF

SEQ ID NO: 18789 - protein, 10 aa, synthetic construct
  source 1..10: note = Seed: FKIYSKHTPI
FGIYSKHTPI

SEQ ID NO: 18790 - protein, 10 aa, synthetic construct
  source 1..10: note = Seed: FKIYSKHTPI
FGIYSKHTPL

SEQ ID NO: 18791 - protein, 10 aa, synthetic construct
  source 1..10: note = Seed: FKIYSKHTPI
FGIYSKHTPV

SEQ ID NO: 18792 - protein, 10 aa, synthetic construct
  source 1..10: note = Seed: FKIYSKHTPI
FGIYSKHTPY

SEQ ID NO: 18793 - protein, 9 aa, synthetic construct
  source 1..9: note = Seed: FVKHKHAFL
FGKHKHAFL

SEQ ID NO: 18794 - protein, 9 aa, synthetic construct
  source 1..9: note = Seed: FVKHKHAFL
FGKHKHAFM

SEQ ID NO: 18795 - protein, 8 aa, synthetic construct
  source 1..8: note = Seed: FVKHKHAF
FGKHKHAL

SEQ ID NO: 18796 - protein, 8 aa, synthetic construct
  source 1..8: note = Seed: FVKHKHAF
FGKHKHAM

SEQ ID NO: 18797 - protein, 10 aa, synthetic construct
  source 1..10: note = Seed: FPLCANGQVF
FGLCANGQVY

SEQ ID NO: 18798 - protein, 10 aa, synthetic construct
  source 1..10: note = Seed: FKLKDCVMYA
FGLKDCVMYA

SEQ ID NO: 18799 - protein, 10 aa, synthetic construct
  source 1..10: note = Seed: FKLKDCVMYA
FGLKDCVMYI

SEQ ID NO: 18800 - protein, 10 aa, synthetic construct
  source 1..10: note = Seed: FKLKDCVMYA
FGLKDCVMYL

SEQ ID NO: 18801 - protein, 10 aa, synthetic construct
  source 1..10: note = Seed: FKLKDCVMYA
FGLKDCVMYM

SEQ ID NO: 18802 - protein, 10 aa, synthetic construct
  source 1..10: note = Seed: FKLKDCVMYA
FGLKDCVMYS

SEQ ID NO: 18803 - protein, 10 aa, synthetic construct
  source 1..10: note = Seed: FKLKDCVMYA
FGLKDCVMYT

SEQ ID NO: 18804 - protein, 10 aa, synthetic construct
  source 1..10: note = Seed: FKLKDCVMYA
FGLKDCVMYV

SEQ ID NO: 18805 - protein, 10 aa, synthetic construct
  source 1..10: note = Seed: FPLKLRGTAV
FGLKLRGTAA

SEQ ID NO: 18806 - protein, 10 aa, synthetic construct
  source 1..10: note = Seed: FPLKLRGTAV
FGLKLRGTAF

SEQ ID NO: 18807 - protein, 10 aa, synthetic construct
  source 1..10: note = Seed: FPLKLRGTAV
FGLKLRGTAI

SEQ ID NO: 18808 - protein, 10 aa, synthetic construct
  source 1..10: note = Seed: FPLKLRGTAV
FGLKLRGTAL

SEQ ID NO: 18809 - protein, 10 aa, synthetic construct
  source 1..10: note = Seed: FPLKLRGTAV
FGLKLRGTAM

SEQ ID NO: 18810 - protein, 10 aa, synthetic construct
  source 1..10: note = Seed: FPLKLRGTAV
FGLKLRGTAV

SEQ ID NO: 18811 - protein, 11 aa, synthetic construct
  source 1..11: note = Seed: FPLKLRGTAVM
FGLKLRGTAVF

SEQ ID NO: 18812 - protein, 11 aa, synthetic construct
  source 1..11: note = Seed: FPLKLRGTAVM
FGLKLRGTAVY

SEQ ID NO: 18813 - protein, 10 aa, synthetic construct
  source 1..10: note = Seed: FLLNKEMYLK
FGLNKEMYLA

SEQ ID NO: 18814 - protein, 10 aa, synthetic construct
  source 1..10: note = Seed: FLLNKEMYLK
FGLNKEMYLI

SEQ ID NO: 18815 - protein, 10 aa, synthetic construct
  source 1..10: note = Seed: FLLNKEMYLK
FGLNKEMYLL

SEQ ID NO: 18816 - protein, 10 aa, synthetic construct
  source 1..10: note = Seed: FLLNKEMYLK
FGLNKEMYLM

SEQ ID NO: 18817 - protein, 10 aa, synthetic construct
  source 1..10: note = Seed: FLLNKEMYLK
FGLNKEMYLR

SEQ ID NO: 18818 - protein, 10 aa, synthetic construct
  source 1..10: note = Seed: FLLNKEMYLK
FGLNKEMYLV

SEQ ID NO: 18819 - protein, 10 aa, synthetic construct
  source 1..10: note = Seed: FYLTNDVSFL
FGLTNDVSFA

SEQ ID NO: 18820 - protein, 10 aa, synthetic construct
  source 1..10: note = Seed: FYLTNDVSFL
FGLTNDVSFI

SEQ ID NO: 18821 - protein, 10 aa, synthetic construct
  source 1..10: note = Seed: FYLTNDVSFL
FGLTNDVSFL

SEQ ID NO: 18822 - protein, 11 aa, synthetic construct
  source 1..11: note = Seed: FYLTNDVSFLA
FGLTNDVSFLL

SEQ ID NO: 18823 - protein, 11 aa, synthetic construct
  source 1..11: note = Seed: FYLTNDVSFLA
FGLTNDVSFLV

SEQ ID NO: 18824 - protein, 10 aa, synthetic construct
  source 1..10: note = Seed: FYLTNDVSFL
FGLTNDVSFM

SEQ ID NO: 18825 - protein, 10 aa, synthetic construct
  source 1..10: note = Seed: FYLTNDVSFL
FGLTNDVSFV

SEQ ID NO: 18826 - protein, 9 aa, synthetic construct
  source 1..9: note = Seed: FYLTNDVSF
FGLTNDVSY

SEQ ID NO: 18827 - protein, 10 aa, synthetic construct
  source 1..10: note = Seed: FQLTPIAVQM
FGLTPIAVQA

SEQ ID NO: 18828 - protein, 10 aa, synthetic construct
  source 1..10: note = Seed: FQLTPIAVQM
FGLTPIAVQI

SEQ ID NO: 18829 - protein, 10 aa, synthetic construct
  source 1..10: note = Seed: FQLTPIAVQM
FGLTPIAVQL

SEQ ID NO: 18830 - protein, 10 aa, synthetic construct
  source 1..10: note = Seed: FQLTPIAVQM
FGLTPIAVQM

SEQ ID NO: 18831 - protein, 10 aa, synthetic construct
  source 1..10: note = Seed: FQLTPIAVQM
FGLTPIAVQV

SEQ ID NO: 18832 - protein, 10 aa, synthetic construct
  source 1..10: note = Seed: FELTSMKYFV
FGLTSMKYFA

SEQ ID NO: 18833 - protein, 10 aa, synthetic construct
  source 1..10: note = Seed: FELTSMKYFV
FGLTSMKYFI

SEQ ID NO: 18834 - protein, 10 aa, synthetic construct
  source 1..10: note = Seed: FELTSMKYFV
FGLTSMKYFL

SEQ ID NO: 18835 - protein, 10 aa, synthetic construct
  source 1..10: note = Seed: FELTSMKYFV
FGLTSMKYFM

SEQ ID NO: 18836 - protein, 10 aa, synthetic construct
  source 1..10: note = Seed: FELTSMKYFV
FGLTSMKYFV

SEQ ID NO: 18837 - protein, 10 aa, synthetic construct
  source 1..10: note = Seed: FGLVAEWFLA
FGLVAEWFLI

SEQ ID NO: 18838 - protein, 10 aa, synthetic construct
  source 1..10: note = Seed: FGLVAEWFLA
FGLVAEWFLL

SEQ ID NO: 18839 - protein, 10 aa, synthetic construct
  source 1..10: note = Seed: FGLVAEWFLA
FGLVAEWFLM

SEQ ID NO: 18840 - protein, 10 aa, synthetic construct
  source 1..10: note = Seed: FGLVAEWFLA
FGLVAEWFLV

SEQ ID NO: 18841 - protein, 10 aa, synthetic construct
  source 1..10: note = Seed: FVLWAHGFEL
FGLWAHGFEA

SEQ ID NO: 18842 - protein, 10 aa, synthetic construct
  source 1..10: note = Seed: FVLWAHGFEL
FGLWAHGFEI

SEQ ID NO: 18843 - protein, 10 aa, synthetic construct
  source 1..10: note = Seed: FVLWAHGFEL
FGLWAHGFEL

SEQ ID NO: 18844 - protein, 11 aa, synthetic construct
  source 1..11: note = Seed: FVLWAHGFELT
FGLWAHGFELA

SEQ ID NO: 18845 - protein, 11 aa, synthetic construct
  source 1..11: note = Seed: FVLWAHGFELT
FGLWAHGFELC

SEQ ID NO: 18846 - protein, 11 aa, synthetic construct
  source 1..11: note = Seed: FVLWAHGFELT
FGLWAHGFELD

SEQ ID NO: 18847 - protein, 11 aa, synthetic construct
  source 1..11: note = Seed: FVLWAHGFELT
FGLWAHGFELE

SEQ ID NO: 18848 - protein, 11 aa, synthetic construct
  source 1..11: note = Seed: FVLWAHGFELT
FGLWAHGFELF

SEQ ID NO: 18849 - protein, 11 aa, synthetic construct
  source 1..11: note = Seed: FVLWAHGFELT
FGLWAHGFELG

SEQ ID NO: 18850 - protein, 11 aa, synthetic construct
  source 1..11: note = Seed: FVLWAHGFELT
FGLWAHGFELH

SEQ ID NO: 18851 - protein, 11 aa, synthetic construct
  source 1..11: note = Seed: FVLWAHGFELT
FGLWAHGFELI

SEQ ID NO: 18852 - protein, 11 aa, synthetic construct
  source 1..11: note = Seed: FVLWAHGFELT
FGLWAHGFELK

SEQ ID NO: 18853 - protein, 11 aa, synthetic construct
  source 1..11: note = Seed: FVLWAHGFELT
FGLWAHGFELL

SEQ ID NO: 18854 - protein, 11 aa, synthetic construct
  source 1..11: note = Seed: FVLWAHGFELT
FGLWAHGFELM

SEQ ID NO: 18855 - protein, 11 aa, synthetic construct
  source 1..11: note = Seed: FVLWAHGFELT
FGLWAHGFELN

SEQ ID NO: 18856 - protein, 11 aa, synthetic construct
  source 1..11: note = Seed: FVLWAHGFELT
FGLWAHGFELP

SEQ ID NO: 18857 - protein, 11 aa, synthetic construct
  source 1..11: note = Seed: FVLWAHGFELT
FGLWAHGFELQ

SEQ ID NO: 18858 - protein, 11 aa, synthetic construct
  source 1..11: note = Seed: FVLWAHGFELT
FGLWAHGFELR

SEQ ID NO: 18859 - protein, 11 aa, synthetic construct
  source 1..11: note = Seed: FVLWAHGFELT
FGLWAHGFELS

SEQ ID NO: 18860 - protein, 11 aa, synthetic construct
  source 1..11: note = Seed: FVLWAHGFELT
FGLWAHGFELT

SEQ ID NO: 18861 - protein, 11 aa, synthetic construct
  source 1..11: note = Seed: FVLWAHGFELT
FGLWAHGFELV

SEQ ID NO: 18862 - protein, 11 aa, synthetic construct
  source 1..11: note = Seed: FVLWAHGFELT
FGLWAHGFELW

SEQ ID NO: 18863 - protein, 11 aa, synthetic construct
  source 1..11: note = Seed: FVLWAHGFELT
FGLWAHGFELY

SEQ ID NO: 18864 - protein, 10 aa, synthetic construct
  source 1..10: note = Seed: FVLWAHGFEL
FGLWAHGFEM

SEQ ID NO: 18865 - protein, 10 aa, synthetic construct
  source 1..10: note = Seed: FVLWAHGFEL
FGLWAHGFES

SEQ ID NO: 18866 - protein, 10 aa, synthetic construct
  source 1..10: note = Seed: FVLWAHGFEL
FGLWAHGFET

SEQ ID NO: 18867 - protein, 10 aa, synthetic construct
  source 1..10: note = Seed: FVLWAHGFEL
FGLWAHGFEV

SEQ ID NO: 18868 - protein, 10 aa, synthetic construct
  source 1..10: note = Seed: FSMMILSDDA
FGMMILSDDL

SEQ ID NO: 18869 - protein, 10 aa, synthetic construct
  source 1..10: note = Seed: FSMMILSDDA
FGMMILSDDV

SEQ ID NO: 18870 - protein, 9 aa, synthetic construct
  source 1..9: note = Seed: FAMQMAYRF
FGMQMAYRW

SEQ ID NO: 18871 - protein, 9 aa, synthetic construct
  source 1..9: note = Seed: FAMQMAYRF
FGMQMAYRY

SEQ ID NO: 18872 - protein, 8 aa, synthetic construct
  source 1..8: note = Seed: FDMSKFPL
FGMSKFPI

SEQ ID NO: 18873 - protein, 8 aa, synthetic construct
  source 1..8: note = Seed: FDMSKFPL
FGMSKFPL

SEQ ID NO: 18874 - protein, 10 aa, synthetic construct
  source 1..10: note = Seed: FDMSKFPLKL
FGMSKFPLKA

SEQ ID NO: 18875 - protein, 10 aa, synthetic construct
  source 1..10: note = Seed: FDMSKFPLKL
FGMSKFPLKI

SEQ ID NO: 18876 - protein, 10 aa, synthetic construct
  source 1..10: note = Seed: FDMSKFPLKL
FGMSKFPLKL

SEQ ID NO: 18877 - protein, 10 aa, synthetic construct
  source 1..10: note = Seed: FDMSKFPLKL
FGMSKFPLKV

SEQ ID NO: 18878 - protein, 8 aa, synthetic construct
  source 1..8: note = Seed: FDMSKFPL
FGMSKFPM

SEQ ID NO: 18879 - protein, 10 aa, synthetic construct
  source 1..10: note = Seed: FNMVYMPASW
FGMVYMPASF

SEQ ID NO: 18880 - protein, 10 aa, synthetic construct
  source 1..10: note = Seed: FNMVYMPASW
FGMVYMPASW

SEQ ID NO: 18881 - protein, 10 aa, synthetic construct
  source 1..10: note = Seed: FNMVYMPASW
FGMVYMPASY

SEQ ID NO: 18882 - protein, 9 aa, synthetic construct
  source 1..9: note = Seed: FENKTTLPV
FGNKTTLPF

SEQ ID NO: 18883 - protein, 9 aa, synthetic construct
  source 1..9: note = Seed: FENKTTLPV
FGNKTTLPM

SEQ ID NO: 18884 - protein, 9 aa, synthetic construct
  source 1..9: note = Seed: FENKTTLPV
FGNKTTLPY

SEQ ID NO: 18885 - protein, 9 aa, synthetic construct
  source 1..9: note = Seed: FVNLKQLPF
FGNLKQLPF

SEQ ID NO: 18886 - protein, 9 aa, synthetic construct
  source 1..9: note = Seed: FVNLKQLPF
FGNLKQLPM

SEQ ID NO: 18887 - protein, 9 aa, synthetic construct
  source 1..9: note = Seed: FVNLKQLPF
FGNLKQLPY

SEQ ID NO: 18888 - protein, 11 aa, synthetic construct
  source 1..11: note = Seed: FTNVYADSFVI
FGNVYADSFVV

SEQ ID NO: 18889 - protein, 9 aa, synthetic construct
  source 1..9: note = Seed: FTNVYADSF
FGNVYADSY

SEQ ID NO: 18890 - protein, 10 aa, synthetic construct
  source 1..10: note = Seed: FTPFDVVRQC
FGPFDVVRQA

SEQ ID NO: 18891 - protein, 10 aa, synthetic construct
  source 1..10: note = Seed: FLPFFSNVTW
FGPFFSNVTF

SEQ ID NO: 18892 - protein, 10 aa, synthetic construct
  source 1..10: note = Seed: FLPFFSNVTW
FGPFFSNVTH

SEQ ID NO: 18893 - protein, 10 aa, synthetic construct
  source 1..10: note = Seed: FLPFFSNVTW
FGPFFSNVTL

SEQ ID NO: 18894 - protein, 10 aa, synthetic construct
  source 1..10: note = Seed: FLPFFSNVTW
FGPFFSNVTM

SEQ ID NO: 18895 - protein, 10 aa, synthetic construct
  source 1..10: note = Seed: FLPFFSNVTW
FGPFFSNVTW

SEQ ID NO: 18896 - protein, 10 aa, synthetic construct
  source 1..10: note = Seed: FLPFFSNVTW
FGPFFSNVTY

SEQ ID NO: 18897 - protein, 10 aa, synthetic construct
  source 1..10: note = Seed: FTPLVPFWIT
FGPLVPFWIA

SEQ ID NO: 18898 - protein, 11 aa, synthetic construct
  source 1..11: note = Seed: FTPLVPFWITI
FGPLVPFWITV

SEQ ID NO: 18899 - protein, 9 aa, synthetic construct
  source 1..9: note = Seed: FLPRVFSAV
FGPRVFSAL

SEQ ID NO: 18900 - protein, 9 aa, synthetic construct
  source 1..9: note = Seed: FLPRVFSAV
FGPRVFSAM

SEQ ID NO: 18901 - protein, 10 aa, synthetic construct
  source 1..10: note = Seed: FLPRVFSAVG
FGPRVFSAVF

SEQ ID NO: 18902 - protein, 10 aa, synthetic construct
  source 1..10: note = Seed: FLPRVFSAVG
FGPRVFSAVI

SEQ ID NO: 18903 - protein, 10 aa, synthetic construct
  source 1..10: note = Seed: FLPRVFSAVG
FGPRVFSAVL

SEQ ID NO: 18904 - protein, 10 aa, synthetic construct
  source 1..10: note = Seed: FLPRVFSAVG
FGPRVFSAVM

SEQ ID NO: 18905 - protein, 10 aa, synthetic construct
  source 1..10: note = Seed: FLPRVFSAVG
FGPRVFSAVV

SEQ ID NO: 18906 - protein, 9 aa, synthetic construct
  source 1..9: note = Seed: FAPSASAFF
FGPSASAFL

SEQ ID NO: 18907 - protein, 9 aa, synthetic construct
  source 1..9: note = Seed: FAPSASAFF
FGPSASAFM

SEQ ID NO: 18908 - protein, 11 aa, synthetic construct
  source 1..11: note = Seed: FPQSAPHGVVF
FGQSAPHGVVF

SEQ ID NO: 18909 - protein, 11 aa, synthetic construct
  source 1..11: note = Seed: FPQSAPHGVVF
FGQSAPHGVVL

SEQ ID NO: 18910 - protein, 11 aa, synthetic construct
  source 1..11: note = Seed: FPQSAPHGVVF
FGQSAPHGVVM

SEQ ID NO: 18911 - protein, 11 aa, synthetic construct
  source 1..11: note = Seed: FPQSAPHGVVF
FGQSAPHGVVW

SEQ ID NO: 18912 - protein, 11 aa, synthetic construct
  source 1..11: note = Seed: FPQSAPHGVVF
FGQSAPHGVVY

SEQ ID NO: 18913 - protein, 10 aa, synthetic construct
  source 1..10: note = Seed: FTQSRNLQEF
FGQSRNLQEF

SEQ ID NO: 18914 - protein, 9 aa, synthetic construct
  source 1..9: note = Seed: FPREGVFVS
FGREGVFVY

SEQ ID NO: 18915 - protein, 10 aa, synthetic construct
  source 1..10: note = Seed: FTRFFYVLGL
FGRFFYVLGK

SEQ ID NO: 18916 - protein, 10 aa, synthetic construct
  source 1..10: note = Seed: FTRFFYVLGL
FGRFFYVLGL

SEQ ID NO: 18917 - protein, 9 aa, synthetic construct
  source 1..9: note = Seed: FTRFFYVLG
FGRFFYVLK

SEQ ID NO: 18918 - protein, 9 aa, synthetic construct
  source 1..9: note = Seed: FTSDYYQLY
FGSDYYQLF

SEQ ID NO: 18919 - protein, 9 aa, synthetic construct
  source 1..9: note = Seed: FTSDYYQLY
FGSDYYQLM

SEQ ID NO: 18920 - protein, 9 aa, synthetic construct
  source 1..9: note = Seed: FTSDYYQLY
FGSDYYQLW

SEQ ID NO: 18921 - protein, 9 aa, synthetic construct
  source 1..9: note = Seed: FTSDYYQLY
FGSDYYQLY

SEQ ID NO: 18922 - protein, 10 aa, synthetic construct
  source 1..10: note = Seed: FTSDYYQLYS
FGSDYYQLYF

SEQ ID NO: 18923 - protein, 10 aa, synthetic construct
  source 1..10: note = Seed: FTSDYYQLYS
FGSDYYQLYM

SEQ ID NO: 18924 - protein, 10 aa, synthetic construct
  source 1..10: note = Seed: FTSDYYQLYS
FGSDYYQLYY

SEQ ID NO: 18925 - protein, 9 aa, synthetic construct
  source 1..9: note = Seed: FASFYYVWK
FGSFYYVWR

SEQ ID NO: 18926 - protein, 9 aa, synthetic construct
  source 1..9: note = Seed: FVSLAIDAY
FGSLAIDAY

SEQ ID NO: 18927 - protein, 9 aa, synthetic construct
  source 1..9: note = Seed: FISNSWLMW
FGSNSWLMW

SEQ ID NO: 18928 - protein, 9 aa, synthetic construct
  source 1..9: note = Seed: FSSNVANYQ
FGSNVANYK

SEQ ID NO: 18929 - protein, 10 aa, synthetic construct
  source 1..10: note = Seed: FSSNVANYQK
FGSNVANYQR

SEQ ID NO: 18930 - protein, 9 aa, synthetic construct
  source 1..9: note = Seed: FSSNVANYQ
FGSNVANYR

SEQ ID NO: 18931 - protein, 9 aa, synthetic construct
  source 1..9: note = Seed: FFSNVTWFH
FGSNVTWFK

SEQ ID NO: 18932 - protein, 9 aa, synthetic construct
  source 1..9: note = Seed: FFSNVTWFH
FGSNVTWFR

SEQ ID NO: 18933 - protein, 9 aa, synthetic construct
  source 1..9: note = Seed: FFSNVTWFH
FGSNVTWFY

SEQ ID NO: 18934 - protein, 11 aa, synthetic construct
  source 1..11: note = Seed: FISPYNSQNAV
FGSPYNSQNAA

SEQ ID NO: 18935 - protein, 11 aa, synthetic construct
  source 1..11: note = Seed: FISPYNSQNAV
FGSPYNSQNAL

SEQ ID NO: 18936 - protein, 11 aa, synthetic construct
  source 1..11: note = Seed: FISPYNSQNAV
FGSPYNSQNAM

SEQ ID NO: 18937 - protein, 10 aa, synthetic construct
  source 1..10: note = Seed: FFSYFAVHFI
FGSYFAVHFA

SEQ ID NO: 18938 - protein, 10 aa, synthetic construct
  source 1..10: note = Seed: FFSYFAVHFI
FGSYFAVHFF

SEQ ID NO: 18939 - protein, 10 aa, synthetic construct
  source 1..10: note = Seed: FFSYFAVHFI
FGSYFAVHFI

SEQ ID NO: 18940 - protein, 10 aa, synthetic construct
  source 1..10: note = Seed: FFSYFAVHFI
FGSYFAVHFV

SEQ ID NO: 18941 - protein, 10 aa, synthetic construct
  source 1..10: note = Seed: FFSYFAVHFI
FGSYFAVHFW

SEQ ID NO: 18942 - protein, 10 aa, synthetic construct
  source 1..10: note = Seed: FFSYFAVHFI
FGSYFAVHFY

SEQ ID NO: 18943 - protein, 9 aa, synthetic construct
  source 1..9: note = Seed: FFSYFAVHF
FGSYFAVHY

SEQ ID NO: 18944 - protein, 10 aa, synthetic construct
  source 1..10: note = Seed: FVTHSKGLYR
FGTHSKGLYR

SEQ ID NO: 18945 - protein, 10 aa, synthetic construct
  source 1..10: note = Seed: FDTYNLWNTF
FGTYNLWNTF

SEQ ID NO: 18946 - protein, 10 aa, synthetic construct
  source 1..10: note = Seed: FDTYNLWNTF
FGTYNLWNTW

SEQ ID NO: 18947 - protein, 10 aa, synthetic construct
  source 1..10: note = Seed: FDTYNLWNTF
FGTYNLWNTY

SEQ ID NO: 18948 - protein, 9 aa, synthetic construct
  source 1..9: note = Seed: FAVDAAKAY
FGVDAAKAF

SEQ ID NO: 18949 - protein, 9 aa, synthetic construct
  source 1..9: note = Seed: FAVDAAKAY
FGVDAAKAL

SEQ ID NO: 18950 - protein, 9 aa, synthetic construct
  source 1..9: note = Seed: FAVDAAKAY
FGVDAAKAM

SEQ ID NO: 18951 - protein, 9 aa, synthetic construct
  source 1..9: note = Seed: FAVDAAKAY
FGVDAAKAY

SEQ ID NO: 18952 - protein, 10 aa, synthetic construct
  source 1..10: note = Seed: FAVDAAKAYK
FGVDAAKAYR

SEQ ID NO: 18953 - protein, 9 aa, synthetic construct
  source 1..9: note = Seed: FAVHFISNS
FGVHFISNV

SEQ ID NO: 18954 - protein, 9 aa, synthetic construct
  source 1..9: note = Seed: FNVLFSTVF
FGVLFSTVF

SEQ ID NO: 18955 - protein, 9 aa, synthetic construct
  source 1..9: note = Seed: FNVLFSTVF
FGVLFSTVM

SEQ ID NO: 18956 - protein, 9 aa, synthetic construct
  source 1..9: note = Seed: FNVLFSTVF
FGVLFSTVY

SEQ ID NO: 18957 - protein, 9 aa, synthetic construct
  source 1..9: note = Seed: FVVSTGYHF
FGVSTGYHF

SEQ ID NO: 18958 - protein, 10 aa, synthetic construct
  source 1..10: note = Seed: FVVSTGYHFR
FGVSTGYHFK

SEQ ID NO: 18959 - protein, 10 aa, synthetic construct
  source 1..10: note = Seed: FVVSTGYHFR
FGVSTGYHFR

SEQ ID NO: 18960 - protein, 9 aa, synthetic construct
  source 1..9: note = Seed: FVVSTGYHF
FGVSTGYHM

SEQ ID NO: 18961 - protein, 9 aa, synthetic construct
  source 1..9: note = Seed: FVVSTGYHF
FGVSTGYHY

SEQ ID NO: 18962 - protein, 10 aa, synthetic construct
  source 1..10: note = Seed: FYWFFSNYLK
FGWFFSNYLF

SEQ ID NO: 18963 - protein, 10 aa, synthetic construct
  source 1..10: note = Seed: FYWFFSNYLK
FGWFFSNYLK

SEQ ID NO: 18964 - protein, 10 aa, synthetic construct
  source 1..10: note = Seed: FYWFFSNYLK
FGWFFSNYLR

SEQ ID NO: 18965 - protein, 10 aa, synthetic construct
  source 1..10: note = Seed: FYWFFSNYLK
FGWFFSNYLY

SEQ ID NO: 18966 - protein, 9 aa, synthetic construct
  source 1..9: note = Seed: FYWFFSNYL
FGWFFSNYV

SEQ ID NO: 18967 - protein, 9 aa, synthetic construct
  source 1..9: note = Seed: FYWFFSNYL
FGWFFSNYY

SEQ ID NO: 18968 - protein, 10 aa, synthetic construct
  source 1..10: note = Seed: FLWLLWPVTL
FGWLLWPVTF

SEQ ID NO: 18969 - protein, 11 aa, synthetic construct
  source 1..11: note = Seed: FLWLLWPVTLA
FGWLLWPVTLI

SEQ ID NO: 18970 - protein, 11 aa, synthetic construct
  source 1..11: note = Seed: FLWLLWPVTLA
FGWLLWPVTLL

SEQ ID NO: 18971 - protein, 11 aa, synthetic construct
  source 1..11: note = Seed: FLWLLWPVTLA
FGWLLWPVTLV

SEQ ID NO: 18972 - protein, 9 aa, synthetic construct
  source 1..9: note = Seed: FSYFAVHFI
FGYFAVHFF

SEQ ID NO: 18973 - protein, 9 aa, synthetic construct
  source 1..9: note = Seed: FSYFAVHFI
FGYFAVHFL

SEQ ID NO: 18974 - protein, 9 aa, synthetic construct
  source 1..9: note = Seed: FSYFAVHFI
FGYFAVHFM

SEQ ID NO: 18975 - protein, 9 aa, synthetic construct
  source 1..9: note = Seed: FSYFAVHFI
FGYFAVHFV

SEQ ID NO: 18976 - protein, 9 aa, synthetic construct
  source 1..9: note = Seed: FSYFAVHFI
FGYFAVHFW

SEQ ID NO: 18977 - protein, 9 aa, synthetic construct
  source 1..9: note = Seed: FSYFAVHFI
FGYFAVHFY

SEQ ID NO: 18978 - protein, 9 aa, synthetic construct
  source 1..9: note = Seed: FYYLGTGPE
FGYLGTGPM

SEQ ID NO: 18979 - protein, 9 aa, synthetic construct
  source 1..9: note = Seed: FNYLKSPNF
FGYLKSPNM

SEQ ID NO: 18980 - protein, 9 aa, synthetic construct
  source 1..9: note = Seed: FNYLKSPNF
FGYLKSPNY

SEQ ID NO: 18981 - protein, 9 aa, synthetic construct
  source 1..9: note = Seed: FCYMHHMEL
FGYMHHMEF

SEQ ID NO: 18982 - protein, 9 aa, synthetic construct
  source 1..9: note = Seed: FCYMHHMEL
FGYMHHMEI

SEQ ID NO: 18983 - protein, 9 aa, synthetic construct
  source 1..9: note = Seed: FCYMHHMEL
FGYMHHMEL

SEQ ID NO: 18984 - protein, 9 aa, synthetic construct
  source 1..9: note = Seed: FCYMHHMEL
FGYMHHMEM

SEQ ID NO: 18985 - protein, 9 aa, synthetic construct
  source 1..9: note = Seed: FCYMHHMEL
FGYMHHMEV

SEQ ID NO: 18986 - protein, 9 aa, synthetic construct
  source 1..9: note = Seed: FCYMHHMEL
FGYMHHMEW

SEQ ID NO: 18987 - protein, 9 aa, synthetic construct
  source 1..9: note = Seed: FCYMHHMEL
FGYMHHMEY

SEQ ID NO: 18988 - protein, 9 aa, synthetic construct
  source 1..9: note = Seed: FRYMNSQGL
FGYMNSQGF

SEQ ID NO: 18989 - protein, 9 aa, synthetic construct
  source 1..9: note = Seed: FRYMNSQGL
FGYMNSQGY

SEQ ID NO: 18990 - protein, 9 aa, synthetic construct
  source 1..9: note = Seed: FYYVWKSYV
FGYVWKSYM

SEQ ID NO: 18991 - protein, 10 aa, synthetic construct
  source 1..10: note = Seed: FYYVWKSYVH
FGYVWKSYVM

SEQ ID NO: 18992 - protein, 10 aa, synthetic construct
  source 1..10: note = Seed: FYYVWKSYVH
FGYVWKSYVY

SEQ ID NO: 18993 - protein, 9 aa, synthetic construct
  source 1..9: note = Seed: FYYVWKSYV
FGYVWKSYY

SEQ ID NO: 18994 - protein, 9 aa, synthetic construct
  source 1..9: note = Seed: FVAAIFYLI
FHAAIFYLF

SEQ ID NO: 18995 - protein, 9 aa, synthetic construct
  source 1..9: note = Seed: FVAAIFYLI
FHAAIFYLR

SEQ ID NO: 18996 - protein, 9 aa, synthetic construct
  source 1..9: note = Seed: FVAAIFYLI
FHAAIFYLW

SEQ ID NO: 18997 - protein, 9 aa, synthetic construct
  source 1..9: note = Seed: FVAAIFYLI
FHAAIFYLY

SEQ ID NO: 18998 - protein, 10 aa, synthetic construct
  source 1..10: note = Seed: FCAFAVDAAK
FHAFAVDAAK

SEQ ID NO: 18999 - protein, 10 aa, synthetic construct
  source 1..10: note = Seed: FCAFAVDAAK
FHAFAVDAAR

SEQ ID NO: 19000 - protein, 10 aa, synthetic construct
  source 1..10: note = Seed: FIASFRLFAR
FHASFRLFAK

SEQ ID NO: 19001 - protein, 10 aa, synthetic construct
  source 1..10: note = Seed: FIASFRLFAR
FHASFRLFAR

SEQ ID NO: 19002 - protein, 9 aa, synthetic construct
  source 1..9: note = Seed: FFASFYYVW
FHASFYYVF

SEQ ID NO: 19003 - protein, 10 aa, synthetic construct
  source 1..10: note = Seed: FFASFYYVWK
FHASFYYVWK

SEQ ID NO: 19004 - protein, 10 aa, synthetic construct
  source 1..10: note = Seed: FFASFYYVWK
FHASFYYVWR

SEQ ID NO: 19005 - protein, 9 aa, synthetic construct
  source 1..9: note = Seed: FFASFYYVW
FHASFYYVY

SEQ ID NO: 19006 - protein, 10 aa, synthetic construct
  source 1..10: note = Seed: FNATRFASVY
FHATRFASVF

SEQ ID NO: 19007 - protein, 10 aa, synthetic construct
  source 1..10: note = Seed: FNATRFASVY
FHATRFASVM

SEQ ID NO: 19008 - protein, 10 aa, synthetic construct
  source 1..10: note = Seed: FNATRFASVY
FHATRFASVY

SEQ ID NO: 19009 - protein, 9 aa, synthetic construct
  source 1..9: note = Seed: FSAVGNICY
FHAVGNICY

SEQ ID NO: 19010 - protein, 10 aa, synthetic construct
  source 1..10: note = Seed: FSAVGNICYT
FHAVGNICYV

SEQ ID NO: 19011 - protein, 9 aa, synthetic construct
  source 1..9: note = Seed: FKDASGKPV
FHDASGKPI

SEQ ID NO: 19012 - protein, 9 aa, synthetic construct
  source 1..9: note = Seed: FKDASGKPV
FHDASGKPL

SEQ ID NO: 19013 - protein, 9 aa, synthetic construct
  source 1..9: note = Seed: FKDASGKPV
FHDASGKPM

SEQ ID NO: 19014 - protein, 9 aa, synthetic construct
  source 1..9: note = Seed: FKDASGKPV
FHDASGKPV

SEQ ID NO: 19015 - protein, 9 aa, synthetic construct
  source 1..9: note = Seed: FPDLNGDVV
FHDLNGDVL

SEQ ID NO: 19016 - protein, 9 aa, synthetic construct
  source 1..9: note = Seed: FPDLNGDVV
FHDLNGDVM

SEQ ID NO: 19017 - protein, 11 aa, synthetic construct
  source 1..11: note = Seed: FPDLNGDVVAI
FHDLNGDVVAI

SEQ ID NO: 19018 - protein, 11 aa, synthetic construct
  source 1..11: note = Seed: FPDLNGDVVAI
FHDLNGDVVAL

SEQ ID NO: 19019 - protein, 11 aa, synthetic construct
  source 1..11: note = Seed: FPDLNGDVVAI
FHDLNGDVVAV

SEQ ID NO: 19020 - protein, 10 aa, synthetic construct
  source 1..10: note = Seed: FVFKNIDGYF
FHFKNIDGYY

SEQ ID NO: 19021 - protein, 9 aa, synthetic construct
  source 1..9: note = Seed: FLFVAAIFY
FHFVAAIFF

SEQ ID NO: 19022 - protein, 9 aa, synthetic construct
  source 1..9: note = Seed: FLFVAAIFY
FHFVAAIFY

SEQ ID NO: 19023 - protein, 10 aa, synthetic construct
  source 1..10: note = Seed: FLFVAAIFYL
FHFVAAIFYY

SEQ ID NO: 19024 - protein, 9 aa, synthetic construct
  source 1..9: note = Seed: FNGVSFSTF
FHGVSFSTF

SEQ ID NO: 19025 - protein, 9 aa, synthetic construct
  source 1..9: note = Seed: FNGVSFSTF
FHGVSFSTY

SEQ ID NO: 19026 - protein, 10 aa, synthetic construct
  source 1..10: note = Seed: FLGYFCTCYF
FHGYFCTCYY

SEQ ID NO: 19027 - protein, 9 aa, synthetic construct
  source 1..9: note = Seed: FLHFLPRVF
FHHFLPRVF

SEQ ID NO: 19028 - protein, 9 aa, synthetic construct
  source 1..9: note = Seed: FLHFLPRVF
FHHFLPRVM

SEQ ID NO: 19029 - protein, 9 aa, synthetic construct
  source 1..9: note = Seed: FLHFLPRVF
FHHFLPRVY

SEQ ID NO: 19030 - protein, 10 aa, synthetic construct
  source 1..10: note = Seed: FKIYSKHTPI
FHIYSKHTPA

SEQ ID NO: 19031 - protein, 10 aa, synthetic construct
  source 1..10: note = Seed: FKIYSKHTPI
FHIYSKHTPF

SEQ ID NO: 19032 - protein, 10 aa, synthetic construct
  source 1..10: note = Seed: FKIYSKHTPI
FHIYSKHTPI

SEQ ID NO: 19033 - protein, 10 aa, synthetic construct
  source 1..10: note = Seed: FKIYSKHTPI
FHIYSKHTPL

SEQ ID NO: 19034 - protein, 10 aa, synthetic construct
  source 1..10: note = Seed: FKIYSKHTPI
FHIYSKHTPM

SEQ ID NO: 19035 - protein, 10 aa, synthetic construct
  source 1..10: note = Seed: FKIYSKHTPI
FHIYSKHTPV

SEQ ID NO: 19036 - protein, 10 aa, synthetic construct
  source 1..10: note = Seed: FKIYSKHTPI
FHIYSKHTPY

SEQ ID NO: 19037 - protein, 9 aa, synthetic construct
  source 1..9: note = Seed: FRKSNLKPF
FHKSNLKPF

SEQ ID NO: 19038 - protein, 9 aa, synthetic construct
  source 1..9: note = Seed: FRKSNLKPF
FHKSNLKPY

SEQ ID NO: 19039 - protein, 10 aa, synthetic construct
  source 1..10: note = Seed: FPLCANGQVF
FHLCANGQVF

SEQ ID NO: 19040 - protein, 10 aa, synthetic construct
  source 1..10: note = Seed: FPLCANGQVF
FHLCANGQVY

SEQ ID NO: 19041 - protein, 10 aa, synthetic construct
  source 1..10: note = Seed: FKLKDCVMYA
FHLKDCVMYA

SEQ ID NO: 19042 - protein, 10 aa, synthetic construct
  source 1..10: note = Seed: FKLKDCVMYA
FHLKDCVMYI

SEQ ID NO: 19043 - protein, 10 aa, synthetic construct
  source 1..10: note = Seed: FKLKDCVMYA
FHLKDCVMYL

SEQ ID NO: 19044 - protein, 10 aa, synthetic construct
  source 1..10: note = Seed: FKLKDCVMYA
FHLKDCVMYM

SEQ ID NO: 19045 - protein, 10 aa, synthetic construct
  source 1..10: note = Seed: FKLKDCVMYA
FHLKDCVMYS

SEQ ID NO: 19046 - protein, 10 aa, synthetic construct
  source 1..10: note = Seed: FKLKDCVMYA
FHLKDCVMYT

SEQ ID NO: 19047 - protein, 10 aa, synthetic construct
  source 1..10: note = Seed: FKLKDCVMYA
FHLKDCVMYV

SEQ ID NO: 19048 - protein, 10 aa, synthetic construct
  source 1..10: note = Seed: FPLKLRGTAV
FHLKLRGTAF

SEQ ID NO: 19049 - protein, 10 aa, synthetic construct
  source 1..10: note = Seed: FPLKLRGTAV
FHLKLRGTAI

SEQ ID NO: 19050 - protein, 10 aa, synthetic construct
  source 1..10: note = Seed: FPLKLRGTAV
FHLKLRGTAL

SEQ ID NO: 19051 - protein, 10 aa, synthetic construct
  source 1..10: note = Seed: FPLKLRGTAV
FHLKLRGTAM

SEQ ID NO: 19052 - protein, 10 aa, synthetic construct
  source 1..10: note = Seed: FPLKLRGTAV
FHLKLRGTAV

SEQ ID NO: 19053 - protein, 11 aa, synthetic construct
  source 1..11: note = Seed: FPLKLRGTAVM
FHLKLRGTAVF

SEQ ID NO: 19054 - protein, 11 aa, synthetic construct
  source 1..11: note = Seed: FPLKLRGTAVM
FHLKLRGTAVY

SEQ ID NO: 19055 - protein, 9 aa, synthetic construct
  source 1..9: note = Seed: FKLNEEIAI
FHLNEEIAL

SEQ ID NO: 19056 - protein, 9 aa, synthetic construct
  source 1..9: note = Seed: FKLNEEIAI
FHLNEEIAM

SEQ ID NO: 19057 - protein, 10 aa, synthetic construct
  source 1..10: note = Seed: FLLNKEMYLK
FHLNKEMYLA

SEQ ID NO: 19058 - protein, 10 aa, synthetic construct
  source 1..10: note = Seed: FLLNKEMYLK
FHLNKEMYLI

SEQ ID NO: 19059 - protein, 10 aa, synthetic construct
  source 1..10: note = Seed: FLLNKEMYLK
FHLNKEMYLL

SEQ ID NO: 19060 - protein, 10 aa, synthetic construct
  source 1..10: note = Seed: FLLNKEMYLK
FHLNKEMYLM

SEQ ID NO: 19061 - protein, 10 aa, synthetic construct
  source 1..10: note = Seed: FLLNKEMYLK
FHLNKEMYLV

SEQ ID NO: 19062 - protein, 9 aa, synthetic construct
  source 1..9: note = Seed: FYLTNDVSF
FHLTNDVSF

SEQ ID NO: 19063 - protein, 10 aa, synthetic construct
  source 1..10: note = Seed: FYLTNDVSFL
FHLTNDVSFA

SEQ ID NO: 19064 - protein, 10 aa, synthetic construct
  source 1..10: note = Seed: FYLTNDVSFL
FHLTNDVSFI

SEQ ID NO: 19065 - protein, 10 aa, synthetic construct
  source 1..10: note = Seed: FYLTNDVSFL
FHLTNDVSFL

SEQ ID NO: 19066 - protein, 11 aa, synthetic construct
  source 1..11: note = Seed: FYLTNDVSFLA
FHLTNDVSFLL

SEQ ID NO: 19067 - protein, 11 aa, synthetic construct
  source 1..11: note = Seed: FYLTNDVSFLA
FHLTNDVSFLV

SEQ ID NO: 19068 - protein, 10 aa, synthetic construct
  source 1..10: note = Seed: FYLTNDVSFL
FHLTNDVSFM

SEQ ID NO: 19069 - protein, 10 aa, synthetic construct
  source 1..10: note = Seed: FYLTNDVSFL
FHLTNDVSFV

SEQ ID NO: 19070 - protein, 9 aa, synthetic construct
  source 1..9: note = Seed: FYLTNDVSF
FHLTNDVSY

SEQ ID NO: 19071 - protein, 10 aa, synthetic construct
  source 1..10: note = Seed: FQLTPIAVQM
FHLTPIAVQA

SEQ ID NO: 19072 - protein, 10 aa, synthetic construct
  source 1..10: note = Seed: FQLTPIAVQM
FHLTPIAVQI

SEQ ID NO: 19073 - protein, 10 aa, synthetic construct
  source 1..10: note = Seed: FQLTPIAVQM
FHLTPIAVQL

SEQ ID NO: 19074 - protein, 10 aa, synthetic construct
  source 1..10: note = Seed: FQLTPIAVQM
FHLTPIAVQM

SEQ ID NO: 19075 - protein, 10 aa, synthetic construct
  source 1..10: note = Seed: FQLTPIAVQM
FHLTPIAVQV

SEQ ID NO: 19076 - protein, 10 aa, synthetic construct
  source 1..10: note = Seed: FELTSMKYFV
FHLTSMKYFA

SEQ ID NO: 19077 - protein, 10 aa, synthetic construct
  source 1..10: note = Seed: FELTSMKYFV
FHLTSMKYFI

SEQ ID NO: 19078 - protein, 10 aa, synthetic construct
  source 1..10: note = Seed: FELTSMKYFV
FHLTSMKYFL

SEQ ID NO: 19079 - protein, 10 aa, synthetic construct
  source 1..10: note = Seed: FELTSMKYFV
FHLTSMKYFM

SEQ ID NO: 19080 - protein, 10 aa, synthetic construct
  source 1..10: note = Seed: FELTSMKYFV
FHLTSMKYFV

SEQ ID NO: 19081 - protein, 10 aa, synthetic construct
  source 1..10: note = Seed: FGLVAEWFLA
FHLVAEWFLA

SEQ ID NO: 19082 - protein, 10 aa, synthetic construct
  source 1..10: note = Seed: FGLVAEWFLA
FHLVAEWFLI

SEQ ID NO: 19083 - protein, 10 aa, synthetic construct
  source 1..10: note = Seed: FGLVAEWFLA
FHLVAEWFLL

SEQ ID NO: 19084 - protein, 10 aa, synthetic construct
  source 1..10: note = Seed: FGLVAEWFLA
FHLVAEWFLM

SEQ ID NO: 19085 - protein, 10 aa, synthetic construct
  source 1..10: note = Seed: FGLVAEWFLA
FHLVAEWFLV

SEQ ID NO: 19086 - protein, 10 aa, synthetic construct
  source 1..10: note = Seed: FVLWAHGFEL
FHLWAHGFEA

SEQ ID NO: 19087 - protein, 10 aa, synthetic construct
  source 1..10: note = Seed: FVLWAHGFEL
FHLWAHGFEI

SEQ ID NO: 19088 - protein, 10 aa, synthetic construct
  source 1..10: note = Seed: FVLWAHGFEL
FHLWAHGFEL

SEQ ID NO: 19089 - protein, 11 aa, synthetic construct
  source 1..11: note = Seed: FVLWAHGFELT
FHLWAHGFELA

SEQ ID NO: 19090 - protein, 11 aa, synthetic construct
  source 1..11: note = Seed: FVLWAHGFELT
FHLWAHGFELC

SEQ ID NO: 19091 - protein, 11 aa, synthetic construct
  source 1..11: note = Seed: FVLWAHGFELT
FHLWAHGFELD

SEQ ID NO: 19092 - protein, 11 aa, synthetic construct
  source 1..11: note = Seed: FVLWAHGFELT
FHLWAHGFELE

SEQ ID NO: 19093 - protein, 11 aa, synthetic construct
  source 1..11: note = Seed: FVLWAHGFELT
FHLWAHGFELF

SEQ ID NO: 19094 - protein, 11 aa, synthetic construct
  source 1..11: note = Seed: FVLWAHGFELT
FHLWAHGFELG

SEQ ID NO: 19095 - protein, 11 aa, synthetic construct
  source 1..11: note = Seed: FVLWAHGFELT
FHLWAHGFELH

SEQ ID NO: 19096 - protein, 11 aa, synthetic construct
  source 1..11: note = Seed: FVLWAHGFELT
FHLWAHGFELI

SEQ ID NO: 19097 - protein, 11 aa, synthetic construct
  source 1..11: note = Seed: FVLWAHGFELT
FHLWAHGFELK

SEQ ID NO: 19098 - protein, 11 aa, synthetic construct
  source 1..11: note = Seed: FVLWAHGFELT
FHLWAHGFELL

SEQ ID NO: 19099 - protein, 11 aa, synthetic construct
  source 1..11: note = Seed: FVLWAHGFELT
FHLWAHGFELM

SEQ ID NO: 19100 - protein, 11 aa, synthetic construct
  source 1..11: note = Seed: FVLWAHGFELT
FHLWAHGFELN

SEQ ID NO: 19101 - protein, 11 aa, synthetic construct
  source 1..11: note = Seed: FVLWAHGFELT
FHLWAHGFELP

SEQ ID NO: 19102 - protein, 11 aa, synthetic construct
  source 1..11: note = Seed: FVLWAHGFELT
FHLWAHGFELQ

SEQ ID NO: 19103 - protein, 11 aa, synthetic construct
  source 1..11: note = Seed: FVLWAHGFELT
FHLWAHGFELR

SEQ ID NO: 19104 - protein, 11 aa, synthetic construct
  source 1..11: note = Seed: FVLWAHGFELT
FHLWAHGFELS

SEQ ID NO: 19105 - protein, 11 aa, synthetic construct
  source 1..11: note = Seed: FVLWAHGFELT
FHLWAHGFELT

SEQ ID NO: 19106 - protein, 11 aa, synthetic construct
  source 1..11: note = Seed: FVLWAHGFELT
FHLWAHGFELV

SEQ ID NO: 19107 - protein, 11 aa, synthetic construct
  source 1..11: note = Seed: FVLWAHGFELT
FHLWAHGFELW

SEQ ID NO: 19108 - protein, 11 aa, synthetic construct
  source 1..11: note = Seed: FVLWAHGFELT
FHLWAHGFELY

SEQ ID NO: 19109 - protein, 10 aa, synthetic construct
  source 1..10: note = Seed: FVLWAHGFEL
FHLWAHGFEM

SEQ ID NO: 19110 - protein, 10 aa, synthetic construct
  source 1..10: note = Seed: FVLWAHGFEL
FHLWAHGFES

SEQ ID NO: 19111 - protein, 10 aa, synthetic construct
  source 1..10: note = Seed: FVLWAHGFEL
FHLWAHGFET

SEQ ID NO: 19112 - protein, 10 aa, synthetic construct
  source 1..10: note = Seed: FVLWAHGFEL
FHLWAHGFEV

SEQ ID NO: 19113 - protein, 10 aa, synthetic construct
  source 1..10: note = Seed: FSMMILSDDA
FHMMILSDDL

SEQ ID NO: 19114 - protein, 10 aa, synthetic construct
  source 1..10: note = Seed: FSMMILSDDA
FHMMILSDDV

SEQ ID NO: 19115 - protein, 10 aa, synthetic construct
  source 1..10: note = Seed: FKMNYQVNGY
FHMNYQVNGY

SEQ ID NO: 19116 - protein, 9 aa, synthetic construct
  source 1..9: note = Seed: FAMQMAYRF
FHMQMAYRF

SEQ ID NO: 19117 - protein, 9 aa, synthetic construct
  source 1..9: note = Seed: FAMQMAYRF
FHMQMAYRY

SEQ ID NO: 19118 - protein, 10 aa, synthetic construct
  source 1..10: note = Seed: FDMSKFPLKL
FHMSKFPLKA

SEQ ID NO: 19119 - protein, 10 aa, synthetic construct
  source 1..10: note = Seed: FDMSKFPLKL
FHMSKFPLKI

SEQ ID NO: 19120 - protein, 10 aa, synthetic construct
  source 1..10: note = Seed: FDMSKFPLKL
FHMSKFPLKL

SEQ ID NO: 19121 - protein, 10 aa, synthetic construct
  source 1..10: note = Seed: FDMSKFPLKL
FHMSKFPLKV

SEQ ID NO: 19122 - protein, 10 aa, synthetic construct
  source 1..10: note = Seed: FNMVYMPASW
FHMVYMPASF

SEQ ID NO: 19123 - protein, 10 aa, synthetic construct
  source 1..10: note = Seed: FNMVYMPASW
FHMVYMPASY

SEQ ID NO: 19124 - protein, 9 aa, synthetic construct
  source 1..9: note = Seed: FENKTTLPV
FHNKTTLPA

SEQ ID NO: 19125 - protein, 9 aa, synthetic construct
  source 1..9: note = Seed: FENKTTLPV
FHNKTTLPF

SEQ ID NO: 19126 - protein, 9 aa, synthetic construct
  source 1..9: note = Seed: FENKTTLPV
FHNKTTLPI

SEQ ID NO: 19127 - protein, 9 aa, synthetic construct
  source 1..9: note = Seed: FENKTTLPV
FHNKTTLPL

SEQ ID NO: 19128 - protein, 9 aa, synthetic construct
  source 1..9: note = Seed: FENKTTLPV
FHNKTTLPM

SEQ ID NO: 19129 - protein, 9 aa, synthetic construct
  source 1..9: note = Seed: FENKTTLPV
FHNKTTLPV

SEQ ID NO: 19130 - protein, 9 aa, synthetic construct
  source 1..9: note = Seed: FENKTTLPV
FHNKTTLPY

SEQ ID NO: 19131 - protein, 9 aa, synthetic construct
  source 1..9: note = Seed: FVNLKQLPF
FHNLKQLPF

SEQ ID NO: 19132 - protein, 9 aa, synthetic construct
  source 1..9: note = Seed: FVNLKQLPF
FHNLKQLPY

SEQ ID NO: 19133 - protein, 11 aa, synthetic construct
  source 1..11: note = Seed: FTNVYADSFVI
FHNVYADSFVV

SEQ ID NO: 19134 - protein, 9 aa, synthetic construct
  source 1..9: note = Seed: FTNVYADSF
FHNVYADSY

SEQ ID NO: 19135 - protein, 10 aa, synthetic construct
  source 1..10: note = Seed: FTPFDVVRQC
FHPFDVVRQA

SEQ ID NO: 19136 - protein, 10 aa, synthetic construct
  source 1..10: note = Seed: FLPFFSNVTW
FHPFFSNVTF

SEQ ID NO: 19137 - protein, 10 aa, synthetic construct
  source 1..10: note = Seed: FLPFFSNVTW
FHPFFSNVTH

SEQ ID NO: 19138 - protein, 10 aa, synthetic construct
  source 1..10: note = Seed: FLPFFSNVTW
FHPFFSNVTL

SEQ ID NO: 19139 - protein, 10 aa, synthetic construct
  source 1..10: note = Seed: FLPFFSNVTW
FHPFFSNVTM

SEQ ID NO: 19140 - protein, 10 aa, synthetic construct
  source 1..10: note = Seed: FLPFFSNVTW
FHPFFSNVTW

SEQ ID NO: 19141 - protein, 10 aa, synthetic construct
  source 1..10: note = Seed: FLPFFSNVTW
FHPFFSNVTY

SEQ ID NO: 19142 - protein, 10 aa, synthetic construct
  source 1..10: note = Seed: FTPLVPFWIT
FHPLVPFWIA

SEQ ID NO: 19143 - protein, 11 aa, synthetic construct
  source 1..11: note = Seed: FTPLVPFWITI
FHPLVPFWITV

SEQ ID NO: 19144 - protein, 9 aa, synthetic construct
  source 1..9: note = Seed: FLPRVFSAV
FHPRVFSAF

SEQ ID NO: 19145 - protein, 9 aa, synthetic construct
  source 1..9: note = Seed: FLPRVFSAV
FHPRVFSAL

SEQ ID NO: 19146 - protein, 9 aa, synthetic construct
  source 1..9: note = Seed: FLPRVFSAV
FHPRVFSAM

SEQ ID NO: 19147 - protein, 10 aa, synthetic construct
  source 1..10: note = Seed: FLPRVFSAVG
FHPRVFSAVF

SEQ ID NO: 19148 - protein, 10 aa, synthetic construct
  source 1..10: note = Seed: FLPRVFSAVG
FHPRVFSAVI

SEQ ID NO: 19149 - protein, 10 aa, synthetic construct
  source 1..10: note = Seed: FLPRVFSAVG
FHPRVFSAVL

SEQ ID NO: 19150 - protein, 10 aa, synthetic construct
  source 1..10: note = Seed: FLPRVFSAVG
FHPRVFSAVM

SEQ ID NO: 19151 - protein, 10 aa, synthetic construct
  source 1..10: note = Seed: FLPRVFSAVG
FHPRVFSAVV

SEQ ID NO: 19152 - protein, 9 aa, synthetic construct
  source 1..9: note = Seed: FLPRVFSAV
FHPRVFSAY

SEQ ID NO: 19153 - protein, 9 aa, synthetic construct
  source 1..9: note = Seed: FAPSASAFF
FHPSASAFM

SEQ ID NO: 19154 - protein, 9 aa, synthetic construct
  source 1..9: note = Seed: FHQKLLKSI
FHQKLLKSL

SEQ ID NO: 19155 - protein, 11 aa, synthetic construct
  source 1..11: note = Seed: FPQSAPHGVVF
FHQSAPHGVVF

SEQ ID NO: 19156 - protein, 11 aa, synthetic construct
  source 1..11: note = Seed: FPQSAPHGVVF
FHQSAPHGVVL

SEQ ID NO: 19157 - protein, 11 aa, synthetic construct
  source 1..11: note = Seed: FPQSAPHGVVF
FHQSAPHGVVM

SEQ ID NO: 19158 - protein, 11 aa, synthetic construct
  source 1..11: note = Seed: FPQSAPHGVVF
FHQSAPHGVVW

SEQ ID NO: 19159 - protein, 11 aa, synthetic construct
  source 1..11: note = Seed: FPQSAPHGVVF
FHQSAPHGVVY

SEQ ID NO: 19160 - protein, 10 aa, synthetic construct
  source 1..10: note = Seed: FTQSRNLQEF
FHQSRNLQEF

SEQ ID NO: 19161 - protein, 10 aa, synthetic construct
  source 1..10: note = Seed: FTQSRNLQEF
FHQSRNLQEY

SEQ ID NO: 19162 - protein, 10 aa, synthetic construct
  source 1..10: note = Seed: FTRFFYVLGL
FHRFFYVLGK

SEQ ID NO: 19163 - protein, 10 aa, synthetic construct
  source 1..10: note = Seed: FTRFFYVLGL
FHRFFYVLGL

SEQ ID NO: 19164 - protein, 9 aa, synthetic construct
  source 1..9: note = Seed: FISAARQGF
FHSAARQGF

SEQ ID NO: 19165 - protein, 9 aa, synthetic construct
  source 1..9: note = Seed: FISAARQGF
FHSAARQGY

SEQ ID NO: 19166 - protein, 9 aa, synthetic construct
  source 1..9: note = Seed: FQSAVKRTI
FHSAVKRTF

SEQ ID NO: 19167 - protein, 9 aa, synthetic construct
  source 1..9: note = Seed: FQSAVKRTI
FHSAVKRTY

SEQ ID NO: 19168 - protein, 9 aa, synthetic construct
  source 1..9: note = Seed: FTSDYYQLY
FHSDYYQLF

SEQ ID NO: 19169 - protein, 9 aa, synthetic construct
  source 1..9: note = Seed: FTSDYYQLY
FHSDYYQLL

SEQ ID NO: 19170 - protein, 9 aa, synthetic construct
  source 1..9: note = Seed: FTSDYYQLY
FHSDYYQLM

SEQ ID NO: 19171 - protein, 9 aa, synthetic construct
  source 1..9: note = Seed: FTSDYYQLY
FHSDYYQLY

SEQ ID NO: 19172 - protein, 10 aa, synthetic construct
  source 1..10: note = Seed: FTSDYYQLYS
FHSDYYQLYF

SEQ ID NO: 19173 - protein, 10 aa, synthetic construct
  source 1..10: note = Seed: FTSDYYQLYS
FHSDYYQLYM

SEQ ID NO: 19174 - protein, 10 aa, synthetic construct
  source 1..10: note = Seed: FTSDYYQLYS
FHSDYYQLYY

SEQ ID NO: 19175 - protein, 10 aa, synthetic construct
  source 1..10: note = Seed: FSSNVANYQK
FHSNVANYQR

SEQ ID NO: 19176 - protein, 9 aa, synthetic construct
  source 1..9: note = Seed: FFSNVTWFH
FHSNVTWFR

SEQ ID NO: 19177 - protein, 9 aa, synthetic construct
  source 1..9: note = Seed: FFSNVTWFH
FHSNVTWFY

SEQ ID NO: 19178 - protein, 11 aa, synthetic construct
  source 1..11: note = Seed: FISPYNSQNAV
FHSPYNSQNAA

SEQ ID NO: 19179 - protein, 11 aa, synthetic construct
  source 1..11: note = Seed: FISPYNSQNAV
FHSPYNSQNAL

SEQ ID NO: 19180 - protein, 11 aa, synthetic construct
  source 1..11: note = Seed: FISPYNSQNAV
FHSPYNSQNAM

SEQ ID NO: 19181 - protein, 9 aa, synthetic construct
  source 1..9: note = Seed: FFSYFAVHF
FHSYFAVHF

SEQ ID NO: 19182 - protein, 10 aa, synthetic construct
  source 1..10: note = Seed: FFSYFAVHFI
FHSYFAVHFA

SEQ ID NO: 19183 - protein, 10 aa, synthetic construct
  source 1..10: note = Seed: FFSYFAVHFI
FHSYFAVHFF

SEQ ID NO: 19184 - protein, 10 aa, synthetic construct
  source 1..10: note = Seed: FFSYFAVHFI
FHSYFAVHFI

SEQ ID NO: 19185 - protein, 10 aa, synthetic construct
  source 1..10: note = Seed: FFSYFAVHFI
FHSYFAVHFV

SEQ ID NO: 19186 - protein, 10 aa, synthetic construct
  source 1..10: note = Seed: FFSYFAVHFI
FHSYFAVHFW

SEQ ID NO: 19187 - protein, 10 aa, synthetic construct
  source 1..10: note = Seed: FFSYFAVHFI
FHSYFAVHFY

SEQ ID NO: 19188 - protein, 9 aa, synthetic construct
  source 1..9: note = Seed: FFSYFAVHF
FHSYFAVHY

SEQ ID NO: 19189 - protein, 10 aa, synthetic construct
  source 1..10: note = Seed: FVTHSKGLYR
FHTHSKGLYR

SEQ ID NO: 19190 - protein, 9 aa, synthetic construct
  source 1..9: note = Seed: FQTRAGCLI
FHTRAGCLF

SEQ ID NO: 19191 - protein, 9 aa, synthetic construct
  source 1..9: note = Seed: FQTRAGCLI
FHTRAGCLY

SEQ ID NO: 19192 - protein, 10 aa, synthetic construct
  source 1..10: note = Seed: FDTYNLWNTF
FHTYNLWNTF

SEQ ID NO: 19193 - protein, 10 aa, synthetic construct
  source 1..10: note = Seed: FDTYNLWNTF
FHTYNLWNTW

SEQ ID NO: 19194 - protein, 10 aa, synthetic construct
  source 1..10: note = Seed: FDTYNLWNTF
FHTYNLWNTY

SEQ ID NO: 19195 - protein, 9 aa, synthetic construct
  source 1..9: note = Seed: FAVDAAKAY
FHVDAAKAF

SEQ ID NO: 19196 - protein, 9 aa, synthetic construct
  source 1..9: note = Seed: FAVDAAKAY
FHVDAAKAY

SEQ ID NO: 19197 - protein, 10 aa, synthetic construct
  source 1..10: note = Seed: FAVDAAKAYK
FHVDAAKAYR

SEQ ID NO: 19198 - protein, 9 aa, synthetic construct
  source 1..9: note = Seed: FNVLFSTVF
FHVLFSTVF

SEQ ID NO: 19199 - protein, 9 aa, synthetic construct
  source 1..9: note = Seed: FNVLFSTVF
FHVLFSTVM

SEQ ID NO: 19200 - protein, 9 aa, synthetic construct
  source 1..9: note = Seed: FNVLFSTVF
FHVLFSTVY

SEQ ID NO: 19201 - protein, 9 aa, synthetic construct
  source 1..9: note = Seed: FVVSTGYHF
FHVSTGYHF

SEQ ID NO: 19202 - protein, 10 aa, synthetic construct
  source 1..10: note = Seed: FVVSTGYHFR
FHVSTGYHFK

SEQ ID NO: 19203 - protein, 10 aa, synthetic construct
  source 1..10: note = Seed: FVVSTGYHFR
FHVSTGYHFR

SEQ ID NO: 19204 - protein, 9 aa, synthetic construct
  source 1..9: note = Seed: FVVSTGYHF
FHVSTGYHM

SEQ ID NO: 19205 - protein, 9 aa, synthetic construct
  source 1..9: note = Seed: FVVSTGYHF
FHVSTGYHY

SEQ ID NO: 19206 - protein, 10 aa, synthetic construct
  source 1..10: note = Seed: FYWFFSNYLK
FHWFFSNYLF

SEQ ID NO: 19207 - protein, 10 aa, synthetic construct
  source 1..10: note = Seed: FYWFFSNYLK
FHWFFSNYLK

SEQ ID NO: 19208 - protein, 10 aa, synthetic construct
  source 1..10: note = Seed: FYWFFSNYLK
FHWFFSNYLR

SEQ ID NO: 19209 - protein, 10 aa, synthetic construct
  source 1..10: note = Seed: FYWFFSNYLK
FHWFFSNYLY

SEQ ID NO: 19210 - protein, 9 aa, synthetic construct
  source 1..9: note = Seed: FYWFFSNYL
FHWFFSNYY

SEQ ID NO: 19211 - protein, 10 aa, synthetic construct
  source 1..10: note = Seed: FLWLLWPVTL
FHWLLWPVTF

SEQ ID NO: 19212 - protein, 11 aa, synthetic construct
  source 1..11: note = Seed: FLWLLWPVTLA
FHWLLWPVTLI

SEQ ID NO: 19213 - protein, 11 aa, synthetic construct
  source 1..11: note = Seed: FLWLLWPVTLA
FHWLLWPVTLL

SEQ ID NO: 19214 - protein, 11 aa, synthetic construct
  source 1..11: note = Seed: FLWLLWPVTLA
FHWLLWPVTLV

SEQ ID NO: 19215 - protein, 9 aa, synthetic construct
  source 1..9: note = Seed: FSYFAVHFI
FHYFAVHFF

SEQ ID NO: 19216 - protein, 9 aa, synthetic construct
  source 1..9: note = Seed: FSYFAVHFI
FHYFAVHFM

SEQ ID NO: 19217 - protein, 9 aa, synthetic construct
  source 1..9: note = Seed: FSYFAVHFI
FHYFAVHFY

SEQ ID NO: 19218 - protein, 9 aa, synthetic construct
  source 1..9: note = Seed: FYYLGTGPE
FHYLGTGPF

SEQ ID NO: 19219 - protein, 9 aa, synthetic construct
  source 1..9: note = Seed: FYYLGTGPE
FHYLGTGPL

SEQ ID NO: 19220 - protein, 9 aa, synthetic construct
  source 1..9: note = Seed: FYYLGTGPE
FHYLGTGPM

SEQ ID NO: 19221 - protein, 9 aa, synthetic construct
  source 1..9: note = Seed: FYYLGTGPE
FHYLGTGPY

SEQ ID NO: 19222 - protein, 9 aa, synthetic construct
  source 1..9: note = Seed: FNYLKSPNF
FHYLKSPNF

SEQ ID NO: 19223 - protein, 9 aa, synthetic construct
  source 1..9: note = Seed: FNYLKSPNF
FHYLKSPNY

SEQ ID NO: 19224 - protein, 9 aa, synthetic construct
  source 1..9: note = Seed: FCYMHHMEL
FHYMHHMEF

SEQ ID NO: 19225 - protein, 9 aa, synthetic construct
  source 1..9: note = Seed: FCYMHHMEL
FHYMHHMEH

SEQ ID NO: 19226 - protein, 9 aa, synthetic construct
  source 1..9: note = Seed: FCYMHHMEL
FHYMHHMEI

SEQ ID NO: 19227 - protein, 9 aa, synthetic construct
  source 1..9: note = Seed: FCYMHHMEL
FHYMHHMEL

SEQ ID NO: 19228 - protein, 9 aa, synthetic construct
  source 1..9: note = Seed: FCYMHHMEL
FHYMHHMEM

SEQ ID NO: 19229 - protein, 9 aa, synthetic construct
  source 1..9: note = Seed: FCYMHHMEL
FHYMHHMEV

SEQ ID NO: 19230 - protein, 9 aa, synthetic construct
  source 1..9: note = Seed: FCYMHHMEL
FHYMHHMEW

SEQ ID NO: 19231 - protein, 9 aa, synthetic construct
  source 1..9: note = Seed: FCYMHHMEL
FHYMHHMEY

SEQ ID NO: 19232 - protein, 9 aa, synthetic construct
  source 1..9: note = Seed: FRYMNSQGL
FHYMNSQGA

SEQ ID NO: 19233 - protein, 9 aa, synthetic construct
  source 1..9: note = Seed: FRYMNSQGL
FHYMNSQGF

SEQ ID NO: 19234 - protein, 9 aa, synthetic construct
  source 1..9: note = Seed: FRYMNSQGL
FHYMNSQGI

SEQ ID NO: 19235 - protein, 9 aa, synthetic construct
  source 1..9: note = Seed: FRYMNSQGL
FHYMNSQGL

SEQ ID NO: 19236 - protein, 9 aa, synthetic construct
  source 1..9: note = Seed: FRYMNSQGL
FHYMNSQGM

SEQ ID NO: 19237 - protein, 9 aa, synthetic construct
  source 1..9: note = Seed: FRYMNSQGL
FHYMNSQGY

SEQ ID NO: 19238 - protein, 8 aa, synthetic construct
  source 1..8: note = Seed: FEYVSQPF
FHYVSQPF

SEQ ID NO: 19239 - protein, 8 aa, synthetic construct
  source 1..8: note = Seed: FEYVSQPF
FHYVSQPY

SEQ ID NO: 19240 - protein, 9 aa, synthetic construct
  source 1..9: note = Seed: FYYVWKSYV
FHYVWKSYM

SEQ ID NO: 19241 - protein, 10 aa, synthetic construct
  source 1..10: note = Seed: FYYVWKSYVH
FHYVWKSYVM

SEQ ID NO: 19242 - protein, 10 aa, synthetic construct
  source 1..10: note = Seed: FYYVWKSYVH
FHYVWKSYVY

SEQ ID NO: 19243 - protein, 9 aa, synthetic construct
  source 1..9: note = Seed: FFYYSDSPC
FHYYSDSPF

SEQ ID NO: 19244 - protein, 9 aa, synthetic construct
  source 1..9: note = Seed: FFYYSDSPC
FHYYSDSPL

SEQ ID NO: 19245 - protein, 9 aa, synthetic construct
  source 1..9: note = Seed: FFYYSDSPC
FHYYSDSPM

SEQ ID NO: 19246 - protein, 9 aa, synthetic construct
  source 1..9: note = Seed: FFYYSDSPC
FHYYSDSPY

SEQ ID NO: 19247 - protein, 8 aa, synthetic construct
  source 1..8: note = Seed: FVAAIFYL
FIAAIFYI

SEQ ID NO: 19248 - protein, 8 aa, synthetic construct
  source 1..8: note = Seed: FVAAIFYL
FIAAIFYL

SEQ ID NO: 19249 - protein, 9 aa, synthetic construct
  source 1..9: note = Seed: FVAAIFYLI
FIAAIFYLA

SEQ ID NO: 19250 - protein, 9 aa, synthetic construct
  source 1..9: note = Seed: FVAAIFYLI
FIAAIFYLF

SEQ ID NO: 19251 - protein, 9 aa, synthetic construct
  source 1..9: note = Seed: FVAAIFYLI
FIAAIFYLI

SEQ ID NO: 19252 - protein, 9 aa, synthetic construct
  source 1..9: note = Seed: FVAAIFYLI
FIAAIFYLK

SEQ ID NO: 19253 - protein, 9 aa, synthetic construct
  source 1..9: note = Seed: FVAAIFYLI
FIAAIFYLL

SEQ ID NO: 19254 - protein, 9 aa, synthetic construct
  source 1..9: note = Seed: FVAAIFYLI
FIAAIFYLM

SEQ ID NO: 19255 - protein, 9 aa, synthetic construct
  source 1..9: note = Seed: FVAAIFYLI
FIAAIFYLR

SEQ ID NO: 19256 - protein, 9 aa, synthetic construct
  source 1..9: note = Seed: FVAAIFYLI
FIAAIFYLS

SEQ ID NO: 19257 - protein, 9 aa, synthetic construct
  source 1..9: note = Seed: FVAAIFYLI
FIAAIFYLT

SEQ ID NO: 19258 - protein, 9 aa, synthetic construct
  source 1..9: note = Seed: FVAAIFYLI
FIAAIFYLV

SEQ ID NO: 19259 - protein, 9 aa, synthetic construct
  source 1..9: note = Seed: FVAAIFYLI
FIAAIFYLY

SEQ ID NO: 19260 - protein, 8 aa, synthetic construct
  source 1..8: note = Seed: FVAAIFYL
FIAAIFYV

SEQ ID NO: 19261 - protein, 10 aa, synthetic construct
  source 1..10: note = Seed: FCAFAVDAAK
FIAFAVDAAK

SEQ ID NO: 19262 - protein, 10 aa, synthetic construct
  source 1..10: note = Seed: FCAFAVDAAK
FIAFAVDAAR

SEQ ID NO: 19263 - protein, 9 aa, synthetic construct
  source 1..9: note = Seed: FLAFVVFLL
FIAFVVFLA

SEQ ID NO: 19264 - protein, 9 aa, synthetic construct
  source 1..9: note = Seed: FLAFVVFLL
FIAFVVFLI

SEQ ID NO: 19265 - protein, 9 aa, synthetic construct
  source 1..9: note = Seed: FLAFVVFLL
FIAFVVFLL

SEQ ID NO: 19266 - protein, 10 aa, synthetic construct
  source 1..10: note = Seed: FLAFVVFLLV
FIAFVVFLLL

SEQ ID NO: 19267 - protein, 10 aa, synthetic construct
  source 1..10: note = Seed: FLAFVVFLLV
FIAFVVFLLV

SEQ ID NO: 19268 - protein, 9 aa, synthetic construct
  source 1..9: note = Seed: FLAFVVFLL
FIAFVVFLM

SEQ ID NO: 19269 - protein, 9 aa, synthetic construct
  source 1..9: note = Seed: FLAFVVFLL
FIAFVVFLT

SEQ ID NO: 19270 - protein, 9 aa, synthetic construct
  source 1..9: note = Seed: FLAFVVFLL
FIAFVVFLV

SEQ ID NO: 19271 - protein, 9 aa, synthetic construct
  source 1..9: note = Seed: FGAGAALQI
FIAGAALQL

SEQ ID NO: 19272 - protein, 9 aa, synthetic construct
  source 1..9: note = Seed: FGAGAALQI
FIAGAALQM

SEQ ID NO: 19273 - protein, 9 aa, synthetic construct
  source 1..9: note = Seed: FIAGLIAIV
FIAGLIAIA

SEQ ID NO: 19274 - protein, 9 aa, synthetic construct
  source 1..9: note = Seed: FIAGLIAIV
FIAGLIAII

SEQ ID NO: 19275 - protein, 9 aa, synthetic construct
  source 1..9: note = Seed: FIAGLIAIV
FIAGLIAIL

SEQ ID NO: 19276 - protein, 9 aa, synthetic construct
  source 1..9: note = Seed: FIAGLIAIV
FIAGLIAIM

SEQ ID NO: 19277 - protein, 9 aa, synthetic construct
  source 1..9: note = Seed: FIAGLIAIV
FIAGLIAIT

SEQ ID NO: 19278 - protein, 8 aa, synthetic construct
  source 1..8: note = Seed: FIAGLIAI
FIAGLIAV

SEQ ID NO: 19279 - protein, 9 aa, synthetic construct
  source 1..9: note = Seed: FLAHIQWMV
FIAHIQWMA

SEQ ID NO: 19280 - protein, 9 aa, synthetic construct
  source 1..9: note = Seed: FLAHIQWMV
FIAHIQWMI

SEQ ID NO: 19281 - protein, 9 aa, synthetic construct
  source 1..9: note = Seed: FLAHIQWMV
FIAHIQWML

SEQ ID NO: 19282 - protein, 9 aa, synthetic construct
  source 1..9: note = Seed: FLAHIQWMV
FIAHIQWMM

SEQ ID NO: 19283 - protein, 9 aa, synthetic construct
  source 1..9: note = Seed: FLAHIQWMV
FIAHIQWMR

SEQ ID NO: 19284 - protein, 9 aa, synthetic construct
  source 1..9: note = Seed: FLAHIQWMV
FIAHIQWMT

SEQ ID NO: 19285 - protein, 9 aa, synthetic construct
  source 1..9: note = Seed: FLAHIQWMV
FIAHIQWMV

SEQ ID NO: 19286 - protein, 8 aa, synthetic construct
  source 1..8: note = Seed: FLAHIQWM
FIAHIQWV

SEQ ID NO: 19287 - protein, 9 aa, synthetic construct
  source 1..9: note = Seed: FLALCADSI
FIALCADSI

SEQ ID NO: 19288 - protein, 10 aa, synthetic construct
  source 1..10: note = Seed: FLALCADSII
FIALCADSIL

SEQ ID NO: 19289 - protein, 10 aa, synthetic construct
  source 1..10: note = Seed: FLALCADSII
FIALCADSIV

SEQ ID NO: 19290 - protein, 9 aa, synthetic construct
  source 1..9: note = Seed: FLALCADSI
FIALCADSL

SEQ ID NO: 19291 - protein, 9 aa, synthetic construct
  source 1..9: note = Seed: FLALCADSI
FIALCADSV

SEQ ID NO: 19292 - protein, 10 aa, synthetic construct
  source 1..10: note = Seed: FSALEPLVDL
FIALEPLVDV

SEQ ID NO: 19293 - protein, 9 aa, synthetic construct
  source 1..9: note = Seed: FTALTQHGK
FIALTQHGK

SEQ ID NO: 19294 - protein, 10 aa, synthetic construct
  source 1..10: note = Seed: FTALTQHGKE
FIALTQHGKR

SEQ ID NO: 19295 - protein, 9 aa, synthetic construct
  source 1..9: note = Seed: FTALTQHGK
FIALTQHGR

SEQ ID NO: 19296 - protein, 10 aa, synthetic construct
  source 1..10: note = Seed: FIASFRLFAR
FIASFRLFAK

SEQ ID NO: 19297 - protein, 9 aa, synthetic construct
  source 1..9: note = Seed: FIASFRLFA
FIASFRLFI

SEQ ID NO: 19298 - protein, 9 aa, synthetic construct
  source 1..9: note = Seed: FIASFRLFA
FIASFRLFL

SEQ ID NO: 19299 - protein, 9 aa, synthetic construct
  source 1..9: note = Seed: FIASFRLFA
FIASFRLFM

SEQ ID NO: 19300 - protein, 9 aa, synthetic construct
  source 1..9: note = Seed: FIASFRLFA
FIASFRLFR

SEQ ID NO: 19301 - protein, 9 aa, synthetic construct
  source 1..9: note = Seed: FIASFRLFA
FIASFRLFV

SEQ ID NO: 19302 - protein, 8 aa, synthetic construct
  source 1..8: note = Seed: FFASFYYV
FIASFYYI

SEQ ID NO: 19303 - protein, 8 aa, synthetic construct
  source 1..8: note = Seed: FFASFYYV
FIASFYYL

SEQ ID NO: 19304 - protein, 8 aa, synthetic construct
  source 1..8: note = Seed: FFASFYYV
FIASFYYV

SEQ ID NO: 19305 - protein, 10 aa, synthetic construct
  source 1..10: note = Seed: FFASFYYVWK
FIASFYYVWK

SEQ ID NO: 19306 - protein, 10 aa, synthetic construct
  source 1..10: note = Seed: FFASFYYVWK
FIASFYYVWR

SEQ ID NO: 19307 - protein, 9 aa, synthetic construct
  source 1..9: note = Seed: FFASFYYVW
FIASFYYVY

SEQ ID NO: 19308 - protein, 9 aa, synthetic construct
  source 1..9: note = Seed: FNATRFASV
FIATRFASA

SEQ ID NO: 19309 - protein, 9 aa, synthetic construct
  source 1..9: note = Seed: FNATRFASV
FIATRFASF

SEQ ID NO: 19310 - protein, 9 aa, synthetic construct
  source 1..9: note = Seed: FNATRFASV
FIATRFASI

SEQ ID NO: 19311 - protein, 9 aa, synthetic construct
  source 1..9: note = Seed: FNATRFASV
FIATRFASL

SEQ ID NO: 19312 - protein, 9 aa, synthetic construct
  source 1..9: note = Seed: FNATRFASV
FIATRFASM

SEQ ID NO: 19313 - protein, 9 aa, synthetic construct
  source 1..9: note = Seed: FNATRFASV
FIATRFAST

SEQ ID NO: 19314 - protein, 9 aa, synthetic construct
  source 1..9: note = Seed: FNATRFASV
FIATRFASV

SEQ ID NO: 19315 - protein, 10 aa, synthetic construct
  source 1..10: note = Seed: FNATRFASVY
FIATRFASVF

SEQ ID NO: 19316 - protein, 10 aa, synthetic construct
  source 1..10: note = Seed: FNATRFASVY
FIATRFASVM

SEQ ID NO: 19317 - protein, 10 aa, synthetic construct
  source 1..10: note = Seed: FNATRFASVY
FIATRFASVW

SEQ ID NO: 19318 - protein, 10 aa, synthetic construct
  source 1..10: note = Seed: FNATRFASVY
FIATRFASVY

SEQ ID NO: 19319 - protein, 9 aa, synthetic construct
  source 1..9: note = Seed: FNATRFASV
FIATRFASY

SEQ ID NO: 19320 - protein, 9 aa, synthetic construct
  source 1..9: note = Seed: FSAVGNICY
FIAVGNICY

SEQ ID NO: 19321 - protein, 10 aa, synthetic construct
  source 1..10: note = Seed: FSAVGNICYT
FIAVGNICYA

SEQ ID NO: 19322 - protein, 10 aa, synthetic construct
  source 1..10: note = Seed: FSAVGNICYT
FIAVGNICYI

SEQ ID NO: 19323 - protein, 10 aa, synthetic construct
  source 1..10: note = Seed: FSAVGNICYT
FIAVGNICYL

SEQ ID NO: 19324 - protein, 10 aa, synthetic construct
  source 1..10: note = Seed: FSAVGNICYT
FIAVGNICYM

SEQ ID NO: 19325 - protein, 10 aa, synthetic construct
  source 1..10: note = Seed: FSAVGNICYT
FIAVGNICYV

SEQ ID NO: 19326 - protein, 9 aa, synthetic construct
  source 1..9: note = Seed: FLAYILFTR
FIAYILFTA

SEQ ID NO: 19327 - protein, 9 aa, synthetic construct
  source 1..9: note = Seed: FLAYILFTR
FIAYILFTI

SEQ ID NO: 19328 - protein, 9 aa, synthetic construct
  source 1..9: note = Seed: FLAYILFTR
FIAYILFTK

SEQ ID NO: 19329 - protein, 9 aa, synthetic construct
  source 1..9: note = Seed: FLAYILFTR
FIAYILFTL

SEQ ID NO: 19330 - protein, 9 aa, synthetic construct
  source 1..9: note = Seed: FLAYILFTR
FIAYILFTM

SEQ ID NO: 19331 - protein, 9 aa, synthetic construct
  source 1..9: note = Seed: FLAYILFTR
FIAYILFTR

SEQ ID NO: 19332 - protein, 10 aa, synthetic construct
  source 1..10: note = Seed: FLAYILFTRF
FIAYILFTRA

SEQ ID NO: 19333 - protein, 10 aa, synthetic construct
  source 1..10: note = Seed: FLAYILFTRF
FIAYILFTRI

SEQ ID NO: 19334 - protein, 10 aa, synthetic construct
  source 1..10: note = Seed: FLAYILFTRF
FIAYILFTRK

SEQ ID NO: 19335 - protein, 10 aa, synthetic construct
  source 1..10: note = Seed: FLAYILFTRF
FIAYILFTRL

SEQ ID NO: 19336 - protein, 10 aa, synthetic construct
  source 1..10: note = Seed: FLAYILFTRF
FIAYILFTRM

SEQ ID NO: 19337 - protein, 10 aa, synthetic construct
  source 1..10: note = Seed: FLAYILFTRF
FIAYILFTRR

SEQ ID NO: 19338 - protein, 10 aa, synthetic construct
  source 1..10: note = Seed: FLAYILFTRF
FIAYILFTRV

SEQ ID NO: 19339 - protein, 9 aa, synthetic construct
  source 1..9: note = Seed: FLAYILFTR
FIAYILFTS

SEQ ID NO: 19340 - protein, 9 aa, synthetic construct
  source 1..9: note = Seed: FLAYILFTR
FIAYILFTT

SEQ ID NO: 19341 - protein, 9 aa, synthetic construct
  source 1..9: note = Seed: FLAYILFTR
FIAYILFTV

SEQ ID NO: 19342 - protein, 8 aa, synthetic construct
  source 1..8: note = Seed: FLAYILFT
FIAYILFV

SEQ ID NO: 19343 - protein, 9 aa, synthetic construct
  source 1..9: note = Seed: FVCDNIKFA
FICDNIKFA

SEQ ID NO: 19344 - protein, 9 aa, synthetic construct
  source 1..9: note = Seed: FVCDNIKFA
FICDNIKFI

SEQ ID NO: 19345 - protein, 9 aa, synthetic construct
  source 1..9: note = Seed: FVCDNIKFA
FICDNIKFL

SEQ ID NO: 19346 - protein, 9 aa, synthetic construct
  source 1..9: note = Seed: FVCDNIKFA
FICDNIKFV

SEQ ID NO: 19347 - protein, 9 aa, synthetic construct
  source 1..9: note = Seed: FLCLFLLPS
FICLFLLPA

SEQ ID NO: 19348 - protein, 9 aa, synthetic construct
  source 1..9: note = Seed: FLCLFLLPS
FICLFLLPI

SEQ ID NO: 19349 - protein, 9 aa, synthetic construct
  source 1..9: note = Seed: FLCLFLLPS
FICLFLLPL

SEQ ID NO: 19350 - protein, 9 aa, synthetic construct
  source 1..9: note = Seed: FLCLFLLPS
FICLFLLPV

SEQ ID NO: 19351 - protein, 9 aa, synthetic construct
  source 1..9: note = Seed: FMCVEYCPI
FICVEYCPV

SEQ ID NO: 19352 - protein, 9 aa, synthetic construct
  source 1..9: note = Seed: FGDDTVIEV
FIDDTVIEA

SEQ ID NO: 19353 - protein, 9 aa, synthetic construct
  source 1..9: note = Seed: FGDDTVIEV
FIDDTVIEC

SEQ ID NO: 19354 - protein, 9 aa, synthetic construct
  source 1..9: note = Seed: FGDDTVIEV
FIDDTVIEF

SEQ ID NO: 19355 - protein, 9 aa, synthetic construct
  source 1..9: note = Seed: FGDDTVIEV
FIDDTVIEI

SEQ ID NO: 19356 - protein, 9 aa, synthetic construct
  source 1..9: note = Seed: FGDDTVIEV
FIDDTVIEL

SEQ ID NO: 19357 - protein, 9 aa, synthetic construct
  source 1..9: note = Seed: FGDDTVIEV
FIDDTVIEM

SEQ ID NO: 19358 - protein, 9 aa, synthetic construct
  source 1..9: note = Seed: FGDDTVIEV
FIDDTVIET

SEQ ID NO: 19359 - protein, 9 aa, synthetic construct
  source 1..9: note = Seed: FGDDTVIEV
FIDDTVIEV

SEQ ID NO: 19360 - protein, 8 aa, synthetic construct
  source 1..8: note = Seed: FVDGVPFV
FIDGVPFV

SEQ ID NO: 19361 - protein, 9 aa, synthetic construct
  source 1..9: note = Seed: FVDGVPFVV
FIDGVPFVA

SEQ ID NO: 19362 - protein, 9 aa, synthetic construct
  source 1..9: note = Seed: FVDGVPFVV
FIDGVPFVF

SEQ ID NO: 19363 - protein, 9 aa, synthetic construct
  source 1..9: note = Seed: FVDGVPFVV
FIDGVPFVI

SEQ ID NO: 19364 - protein, 9 aa, synthetic construct
  source 1..9: note = Seed: FVDGVPFVV
FIDGVPFVL

SEQ ID NO: 19365 - protein, 9 aa, synthetic construct
  source 1..9: note = Seed: FVDGVPFVV
FIDGVPFVM

SEQ ID NO: 19366 - protein, 9 aa, synthetic construct
  source 1..9: note = Seed: FVDGVPFVV
FIDGVPFVT

SEQ ID NO: 19367 - protein, 9 aa, synthetic construct
  source 1..9: note = Seed: FVDGVPFVV
FIDGVPFVV

SEQ ID NO: 19368 - protein, 10 aa, synthetic construct
  source 1..10: note = Seed: FVDGVPFVVS
FIDGVPFVVI

SEQ ID NO: 19369 - protein, 10 aa, synthetic construct
  source 1..10: note = Seed: FVDGVPFVVS
FIDGVPFVVL

SEQ ID NO: 19370 - protein, 10 aa, synthetic construct
  source 1..10: note = Seed: FVDGVPFVVS
FIDGVPFVVV

SEQ ID NO: 19371 - protein, 9 aa, synthetic construct
  source 1..9: note = Seed: FVDGVPFVV
FIDGVPFVY

SEQ ID NO: 19372 - protein, 9 aa, synthetic construct
  source 1..9: note = Seed: FPDLNGDVV
FIDLNGDVF

SEQ ID NO: 19373 - protein, 9 aa, synthetic construct
  source 1..9: note = Seed: FPDLNGDVV
FIDLNGDVI

SEQ ID NO: 19374 - protein, 9 aa, synthetic construct
  source 1..9: note = Seed: FPDLNGDVV
FIDLNGDVL

SEQ ID NO: 19375 - protein, 9 aa, synthetic construct
  source 1..9: note = Seed: FPDLNGDVV
FIDLNGDVM

SEQ ID NO: 19376 - protein, 9 aa, synthetic construct
  source 1..9: note = Seed: FPDLNGDVV
FIDLNGDVV

SEQ ID NO: 19377 - protein, 11 aa, synthetic construct
  source 1..11: note = Seed: FPDLNGDVVAI
FIDLNGDVVAI

SEQ ID NO: 19378 - protein, 11 aa, synthetic construct
  source 1..11: note = Seed: FPDLNGDVVAI
FIDLNGDVVAL

SEQ ID NO: 19379 - protein, 11 aa, synthetic construct
  source 1..11: note = Seed: FPDLNGDVVAI
FIDLNGDVVAV

SEQ ID NO: 19380 - protein, 9 aa, synthetic construct
  source 1..9: note = Seed: FPDLNGDVV
FIDLNGDVY

SEQ ID NO: 19381 - protein, 9 aa, synthetic construct
  source 1..9: note = Seed: FVFKNIDGY
FIFKNIDGF

SEQ ID NO: 19382 - protein, 9 aa, synthetic construct
  source 1..9: note = Seed: FVFKNIDGY
FIFKNIDGK

SEQ ID NO: 19383 - protein, 9 aa, synthetic construct
  source 1..9: note = Seed: FVFKNIDGY
FIFKNIDGR

SEQ ID NO: 19384 - protein, 9 aa, synthetic construct
  source 1..9: note = Seed: FVFKNIDGY
FIFKNIDGY

SEQ ID NO: 19385 - protein, 10 aa, synthetic construct
  source 1..10: note = Seed: FVFKNIDGYF
FIFKNIDGYA

SEQ ID NO: 19386 - protein, 11 aa, synthetic construct
  source 1..11: note = Seed: FVFKNIDGYFK
FIFKNIDGYFR

SEQ ID NO: 19387 - protein, 10 aa, synthetic construct
  source 1..10: note = Seed: FVFKNIDGYF
FIFKNIDGYI

SEQ ID NO: 19388 - protein, 10 aa, synthetic construct
  source 1..10: note = Seed: FVFKNIDGYF
FIFKNIDGYL

SEQ ID NO: 19389 - protein, 10 aa, synthetic construct
  source 1..10: note = Seed: FVFKNIDGYF
FIFKNIDGYV

SEQ ID NO: 19390 - protein, 10 aa, synthetic construct
  source 1..10: note = Seed: FVFKNIDGYF
FIFKNIDGYY

SEQ ID NO: 19391 - protein, 10 aa, synthetic construct
  source 1..10: note = Seed: FLFLTWICLL
FIFLTWICLA

SEQ ID NO: 19392 - protein, 10 aa, synthetic construct
  source 1..10: note = Seed: FLFLTWICLL
FIFLTWICLI

SEQ ID NO: 19393 - protein, 10 aa, synthetic construct
  source 1..10: note = Seed: FLFLTWICLL
FIFLTWICLL

SEQ ID NO: 19394 - protein, 10 aa, synthetic construct
  source 1..10: note = Seed: FLFLTWICLL
FIFLTWICLV

SEQ ID NO: 19395 - protein, 9 aa, synthetic construct
  source 1..9: note = Seed: FLFLTWICL
FIFLTWICV

SEQ ID NO: 19396 - protein, 10 aa, synthetic construct
  source 1..10: note = Seed: FPFNKWGKAR
FIFNKWGKAR

SEQ ID NO: 19397 - protein, 9 aa, synthetic construct
  source 1..9: note = Seed: FLFVAAIFY
FIFVAAIFY

SEQ ID NO: 19398 - protein, 10 aa, synthetic construct
  source 1..10: note = Seed: FLFVAAIFYL
FIFVAAIFYA

SEQ ID NO: 19399 - protein, 10 aa, synthetic construct
  source 1..10: note = Seed: FLFVAAIFYL
FIFVAAIFYI

SEQ ID NO: 19400 - protein, 10 aa, synthetic construct
  source 1..10: note = Seed: FLFVAAIFYL
FIFVAAIFYL

SEQ ID NO: 19401 - protein, 11 aa, synthetic construct
  source 1..11: note = Seed: FLFVAAIFYLI
FIFVAAIFYLV

SEQ ID NO: 19402 - protein, 10 aa, synthetic construct
  source 1..10: note = Seed: FLFVAAIFYL
FIFVAAIFYM

SEQ ID NO: 19403 - protein, 10 aa, synthetic construct
  source 1..10: note = Seed: FLFVAAIFYL
FIFVAAIFYT

SEQ ID NO: 19404 - protein, 10 aa, synthetic construct
  source 1..10: note = Seed: FLFVAAIFYL
FIFVAAIFYV

SEQ ID NO: 19405 - protein, 10 aa, synthetic construct
  source 1..10: note = Seed: FLFVAAIFYL
FIFVAAIFYY

SEQ ID NO: 19406 - protein, 9 aa, synthetic construct
  source 1..9: note = Seed: FGGASCCLY
FIGASCCLY

SEQ ID NO: 19407 - protein, 9 aa, synthetic construct
  source 1..9: note = Seed: FGGCVFSYV
FIGCVFSYA

SEQ ID NO: 19408 - protein, 9 aa, synthetic construct
  source 1..9: note = Seed: FGGCVFSYV
FIGCVFSYI

SEQ ID NO: 19409 - protein, 9 aa, synthetic construct
  source 1..9: note = Seed: FGGCVFSYV
FIGCVFSYL

SEQ ID NO: 19410 - protein, 9 aa, synthetic construct
  source 1..9: note = Seed: FGGCVFSYV
FIGCVFSYM

SEQ ID NO: 19411 - protein, 9 aa, synthetic construct
  source 1..9: note = Seed: FGGCVFSYV
FIGCVFSYT

SEQ ID NO: 19412 - protein, 9 aa, synthetic construct
  source 1..9: note = Seed: FGGCVFSYV
FIGCVFSYV

SEQ ID NO: 19413 - protein, 10 aa, synthetic construct
  source 1..10: note = Seed: FNGIGVTQNV
FIGIGVTQNV

SEQ ID NO: 19414 - protein, 9 aa, synthetic construct
  source 1..9: note = Seed: FLGRYMSAL
FIGRYMSAA

SEQ ID NO: 19415 - protein, 9 aa, synthetic construct
  source 1..9: note = Seed: FLGRYMSAL
FIGRYMSAF

SEQ ID NO: 19416 - protein, 9 aa, synthetic construct
  source 1..9: note = Seed: FLGRYMSAL
FIGRYMSAI

SEQ ID NO: 19417 - protein, 9 aa, synthetic construct
  source 1..9: note = Seed: FLGRYMSAL
FIGRYMSAL

SEQ ID NO: 19418 - protein, 10 aa, synthetic construct
  source 1..10: note = Seed: FLGRYMSALN
FIGRYMSALA

SEQ ID NO: 19419 - protein, 10 aa, synthetic construct
  source 1..10: note = Seed: FLGRYMSALN
FIGRYMSALI

SEQ ID NO: 19420 - protein, 10 aa, synthetic construct
  source 1..10: note = Seed: FLGRYMSALN
FIGRYMSALL

SEQ ID NO: 19421 - protein, 10 aa, synthetic construct
  source 1..10: note = Seed: FLGRYMSALN
FIGRYMSALV

SEQ ID NO: 19422 - protein, 9 aa, synthetic construct
  source 1..9: note = Seed: FLGRYMSAL
FIGRYMSAM

SEQ ID NO: 19423 - protein, 9 aa, synthetic construct
  source 1..9: note = Seed: FLGRYMSAL
FIGRYMSAV

SEQ ID NO: 19424 - protein, 9 aa, synthetic construct
  source 1..9: note = Seed: FLGRYMSAL
FIGRYMSAY

SEQ ID NO: 19425 - protein, 9 aa, synthetic construct
  source 1..9: note = Seed: FNGVSFSTF
FIGVSFSTF

SEQ ID NO: 19426 - protein, 9 aa, synthetic construct
  source 1..9: note = Seed: FNGVSFSTF
FIGVSFSTY

SEQ ID NO: 19427 - protein, 10 aa, synthetic construct
  source 1..10: note = Seed: FLGYFCTCYF
FIGYFCTCYA

SEQ ID NO: 19428 - protein, 10 aa, synthetic construct
  source 1..10: note = Seed: FLGYFCTCYF
FIGYFCTCYI

SEQ ID NO: 19429 - protein, 10 aa, synthetic construct
  source 1..10: note = Seed: FLGYFCTCYF
FIGYFCTCYL

SEQ ID NO: 19430 - protein, 10 aa, synthetic construct
  source 1..10: note = Seed: FLGYFCTCYF
FIGYFCTCYV

SEQ ID NO: 19431 - protein, 10 aa, synthetic construct
  source 1..10: note = Seed: FLGYFCTCYF
FIGYFCTCYY

SEQ ID NO: 19432 - protein, 9 aa, synthetic construct
  source 1..9: note = Seed: FQHANLDSC
FIHANLDSA

SEQ ID NO: 19433 - protein, 9 aa, synthetic construct
  source 1..9: note = Seed: FQHANLDSC
FIHANLDSI

SEQ ID NO: 19434 - protein, 9 aa, synthetic construct
  source 1..9: note = Seed: FQHANLDSC
FIHANLDSL

SEQ ID NO: 19435 - protein, 9 aa, synthetic construct
  source 1..9: note = Seed: FQHANLDSC
FIHANLDSM

SEQ ID NO: 19436 - protein, 9 aa, synthetic construct
  source 1..9: note = Seed: FQHANLDSC
FIHANLDSV

SEQ ID NO: 19437 - protein, 9 aa, synthetic construct
  source 1..9: note = Seed: FLHFLPRVF
FIHFLPRVF

SEQ ID NO: 19438 - protein, 10 aa, synthetic construct
  source 1..10: note = Seed: FLHFLPRVFS
FIHFLPRVFI

SEQ ID NO: 19439 - protein, 10 aa, synthetic construct
  source 1..10: note = Seed: FLHFLPRVFS
FIHFLPRVFL

SEQ ID NO: 19440 - protein, 11 aa, synthetic construct
  source 1..11: note = Seed: FLHFLPRVFSA
FIHFLPRVFSI

SEQ ID NO: 19441 - protein, 11 aa, synthetic construct
  source 1..11: note = Seed: FLHFLPRVFSA
FIHFLPRVFSL

SEQ ID NO: 19442 - protein, 11 aa, synthetic construct
  source 1..11: note = Seed: FLHFLPRVFSA
FIHFLPRVFSV

SEQ ID NO: 19443 - protein, 10 aa, synthetic construct
  source 1..10: note = Seed: FLHFLPRVFS
FIHFLPRVFV

SEQ ID NO: 19444 - protein, 9 aa, synthetic construct
  source 1..9: note = Seed: FLHFLPRVF
FIHFLPRVI

SEQ ID NO: 19445 - protein, 9 aa, synthetic construct
  source 1..9: note = Seed: FLHFLPRVF
FIHFLPRVL

SEQ ID NO: 19446 - protein, 9 aa, synthetic construct
  source 1..9: note = Seed: FLHFLPRVF
FIHFLPRVM

SEQ ID NO: 19447 - protein, 9 aa, synthetic construct
  source 1..9: note = Seed: FLHFLPRVF
FIHFLPRVV

SEQ ID NO: 19448 - protein, 9 aa, synthetic construct
  source 1..9: note = Seed: FLHFLPRVF
FIHFLPRVY

SEQ ID NO: 19449 - protein, 9 aa, synthetic construct
  source 1..9: note = Seed: FSHSQLGGL
FIHSQLGGV

SEQ ID NO: 19450 - protein, 9 aa, synthetic construct
  source 1..9: note = Seed: FLHVTYVPA
FIHVTYVPA

SEQ ID NO: 19451 - protein, 10 aa, synthetic construct
  source 1..10: note = Seed: FLHVTYVPAQ
FIHVTYVPAI

SEQ ID NO: 19452 - protein, 10 aa, synthetic construct
  source 1..10: note = Seed: FLHVTYVPAQ
FIHVTYVPAV

SEQ ID NO: 19453 - protein, 9 aa, synthetic construct
  source 1..9: note = Seed: FLHVTYVPA
FIHVTYVPI

SEQ ID NO: 19454 - protein, 9 aa, synthetic construct
  source 1..9: note = Seed: FLHVTYVPA
FIHVTYVPL

SEQ ID NO: 19455 - protein, 9 aa, synthetic construct
  source 1..9: note = Seed: FLHVTYVPA
FIHVTYVPV

SEQ ID NO: 19456 - protein, 9 aa, synthetic construct
  source 1..9: note = Seed: FTINCQEPK
FIINCQEPK

SEQ ID NO: 19457 - protein, 9 aa, synthetic construct
  source 1..9: note = Seed: FTINCQEPK
FIINCQEPR

SEQ ID NO: 19458 - protein, 9 aa, synthetic construct
  source 1..9: note = Seed: FVIRGDEVR
FIIRGDEVR

SEQ ID NO: 19459 - protein, 10 aa, synthetic construct
  source 1..10: note = Seed: FKIYSKHTPI
FIIYSKHTPA

SEQ ID NO: 19460 - protein, 10 aa, synthetic construct
  source 1..10: note = Seed: FKIYSKHTPI
FIIYSKHTPF

SEQ ID NO: 19461 - protein, 10 aa, synthetic construct
  source 1..10: note = Seed: FKIYSKHTPI
FIIYSKHTPI

SEQ ID NO: 19462 - protein, 10 aa, synthetic construct
  source 1..10: note = Seed: FKIYSKHTPI
FIIYSKHTPL

SEQ ID NO: 19463 - protein, 10 aa, synthetic construct
  source 1..10: note = Seed: FKIYSKHTPI
FIIYSKHTPV

SEQ ID NO: 19464 - protein, 10 aa, synthetic construct
  source 1..10: note = Seed: FKIYSKHTPI
FIIYSKHTPY

SEQ ID NO: 19465 - protein, 8 aa, synthetic construct
  source 1..8: note = Seed: FVKHKHAF
FIKHKHAF

SEQ ID NO: 19466 - protein, 9 aa, synthetic construct
  source 1..9: note = Seed: FVKHKHAFL
FIKHKHAFA

SEQ ID NO: 19467 - protein, 9 aa, synthetic construct
  source 1..9: note = Seed: FVKHKHAFL
FIKHKHAFF

SEQ ID NO: 19468 - protein, 9 aa, synthetic construct
  source 1..9: note = Seed: FVKHKHAFL
FIKHKHAFI

SEQ ID NO: 19469 - protein, 9 aa, synthetic construct
  source 1..9: note = Seed: FVKHKHAFL
FIKHKHAFL

SEQ ID NO: 19470 - protein, 10 aa, synthetic construct
  source 1..10: note = Seed: FVKHKHAFLC
FIKHKHAFLL

SEQ ID NO: 19471 - protein, 9 aa, synthetic construct
  source 1..9: note = Seed: FVKHKHAFL
FIKHKHAFM

SEQ ID NO: 19472 - protein, 9 aa, synthetic construct
  source 1..9: note = Seed: FVKHKHAFL
FIKHKHAFV

SEQ ID NO: 19473 - protein, 8 aa, synthetic construct
  source 1..8: note = Seed: FVKHKHAF
FIKHKHAI

SEQ ID NO: 19474 - protein, 8 aa, synthetic construct
  source 1..8: note = Seed: FVKHKHAF
FIKHKHAL

SEQ ID NO: 19475 - protein, 8 aa, synthetic construct
  source 1..8: note = Seed: FVKHKHAF
FIKHKHAM

SEQ ID NO: 19476 - protein, 8 aa, synthetic construct
  source 1..8: note = Seed: FVKHKHAF
FIKHKHAV

SEQ ID NO: 19477 - protein, 9 aa, synthetic construct
  source 1..9: note = Seed: FRKSNLKPF
FIKSNLKPF

SEQ ID NO: 19478 - protein, 9 aa, synthetic construct
  source 1..9: note = Seed: FVLALLSDL
FILALLSDA

SEQ ID NO: 19479 - protein, 9 aa, synthetic construct
  source 1..9: note = Seed: FVLALLSDL
FILALLSDI

SEQ ID NO: 19480 - protein, 9 aa, synthetic construct
  source 1..9: note = Seed: FVLALLSDL
FILALLSDL

SEQ ID NO: 19481 - protein, 9 aa, synthetic construct
  source 1..9: note = Seed: FVLALLSDL
FILALLSDV

SEQ ID NO: 19482 - protein, 10 aa, synthetic construct
  source 1..10: note = Seed: FPLCANGQVF
FILCANGQVF

SEQ ID NO: 19483 - protein, 10 aa, synthetic construct
  source 1..10: note = Seed: FPLCANGQVF
FILCANGQVY

SEQ ID NO: 19484 - protein, 10 aa, synthetic construct
  source 1..10: note = Seed: FKLKDCVMYA
FILKDCVMYA

SEQ ID NO: 19485 - protein, 10 aa, synthetic construct
  source 1..10: note = Seed: FKLKDCVMYA
FILKDCVMYI

SEQ ID NO: 19486 - protein, 10 aa, synthetic construct
  source 1..10: note = Seed: FKLKDCVMYA
FILKDCVMYL

SEQ ID NO: 19487 - protein, 10 aa, synthetic construct
  source 1..10: note = Seed: FKLKDCVMYA
FILKDCVMYM

SEQ ID NO: 19488 - protein, 10 aa, synthetic construct
  source 1..10: note = Seed: FKLKDCVMYA
FILKDCVMYS

SEQ ID NO: 19489 - protein, 10 aa, synthetic construct
  source 1..10: note = Seed: FKLKDCVMYA
FILKDCVMYT

SEQ ID NO: 19490 - protein, 10 aa, synthetic construct
  source 1..10: note = Seed: FKLKDCVMYA
FILKDCVMYV

SEQ ID NO: 19491 - protein, 10 aa, synthetic construct
  source 1..10: note = Seed: FPLKLRGTAV
FILKLRGTAA

SEQ ID NO: 19492 - protein, 10 aa, synthetic construct
  source 1..10: note = Seed: FPLKLRGTAV
FILKLRGTAF

SEQ ID NO: 19493 - protein, 10 aa, synthetic construct
  source 1..10: note = Seed: FPLKLRGTAV
FILKLRGTAI

SEQ ID NO: 19494 - protein, 10 aa, synthetic construct
  source 1..10: note = Seed: FPLKLRGTAV
FILKLRGTAL

SEQ ID NO: 19495 - protein, 10 aa, synthetic construct
  source 1..10: note = Seed: FPLKLRGTAV
FILKLRGTAM

SEQ ID NO: 19496 - protein, 10 aa, synthetic construct
  source 1..10: note = Seed: FPLKLRGTAV
FILKLRGTAV

SEQ ID NO: 19497 - protein, 11 aa, synthetic construct
  source 1..11: note = Seed: FPLKLRGTAVM
FILKLRGTAVF

SEQ ID NO: 19498 - protein, 11 aa, synthetic construct
  source 1..11: note = Seed: FPLKLRGTAVM
FILKLRGTAVY

SEQ ID NO: 19499 - protein, 9 aa, synthetic construct
  source 1..9: note = Seed: FLLNKEMYL
FILNKEMYA

SEQ ID NO: 19500 - protein, 9 aa, synthetic construct
  source 1..9: note = Seed: FLLNKEMYL
FILNKEMYF

SEQ ID NO: 19501 - protein, 9 aa, synthetic construct
  source 1..9: note = Seed: FLLNKEMYL
FILNKEMYI

SEQ ID NO: 19502 - protein, 9 aa, synthetic construct
  source 1..9: note = Seed: FLLNKEMYL
FILNKEMYL

SEQ ID NO: 19503 - protein, 10 aa, synthetic construct
  source 1..10: note = Seed: FLLNKEMYLK
FILNKEMYLA

SEQ ID NO: 19504 - protein, 10 aa, synthetic construct
  source 1..10: note = Seed: FLLNKEMYLK
FILNKEMYLI

SEQ ID NO: 19505 - protein, 10 aa, synthetic construct
  source 1..10: note = Seed: FLLNKEMYLK
FILNKEMYLK

SEQ ID NO: 19506 - protein, 11 aa, synthetic construct
  source 1..11: note = Seed: FLLNKEMYLKL
FILNKEMYLKV

SEQ ID NO: 19507 - protein, 10 aa, synthetic construct
  source 1..10: note = Seed: FLLNKEMYLK
FILNKEMYLL

SEQ ID NO: 19508 - protein, 10 aa, synthetic construct
  source 1..10: note = Seed: FLLNKEMYLK
FILNKEMYLM

SEQ ID NO: 19509 - protein, 10 aa, synthetic construct
  source 1..10: note = Seed: FLLNKEMYLK
FILNKEMYLR

SEQ ID NO: 19510 - protein, 10 aa, synthetic construct
  source 1..10: note = Seed: FLLNKEMYLK
FILNKEMYLV

SEQ ID NO: 19511 - protein, 9 aa, synthetic construct
  source 1..9: note = Seed: FLLNKEMYL
FILNKEMYM

SEQ ID NO: 19512 - protein, 9 aa, synthetic construct
  source 1..9: note = Seed: FLLNKEMYL
FILNKEMYT

SEQ ID NO: 19513 - protein, 9 aa, synthetic construct
  source 1..9: note = Seed: FLLNKEMYL
FILNKEMYV

SEQ ID NO: 19514 - protein, 9 aa, synthetic construct
  source 1..9: note = Seed: FLLNKEMYL
FILNKEMYY

SEQ ID NO: 19515 - protein, 10 aa, synthetic construct
  source 1..10: note = Seed: FRLTLGVYDY
FILTLGVYDY

SEQ ID NO: 19516 - protein, 11 aa, synthetic construct
  source 1..11: note = Seed: FRLTLGVYDYL
FILTLGVYDYV

SEQ ID NO: 19517 - protein, 9 aa, synthetic construct
  source 1..9: note = Seed: FYLTNDVSF
FILTNDVSF

SEQ ID NO: 19518 - protein, 10 aa, synthetic construct
  source 1..10: note = Seed: FYLTNDVSFL
FILTNDVSFA

SEQ ID NO: 19519 - protein, 10 aa, synthetic construct
  source 1..10: note = Seed: FYLTNDVSFL
FILTNDVSFI

SEQ ID NO: 19520 - protein, 10 aa, synthetic construct
  source 1..10: note = Seed: FYLTNDVSFL
FILTNDVSFL

SEQ ID NO: 19521 - protein, 11 aa, synthetic construct
  source 1..11: note = Seed: FYLTNDVSFLA
FILTNDVSFLI

SEQ ID NO: 19522 - protein, 11 aa, synthetic construct
  source 1..11: note = Seed: FYLTNDVSFLA
FILTNDVSFLL

SEQ ID NO: 19523 - protein, 11 aa, synthetic construct
  source 1..11: note = Seed: FYLTNDVSFLA
FILTNDVSFLV

SEQ ID NO: 19524 - protein, 10 aa, synthetic construct
  source 1..10: note = Seed: FYLTNDVSFL
FILTNDVSFM

SEQ ID NO: 19525 - protein, 10 aa, synthetic construct
  source 1..10: note = Seed: FYLTNDVSFL
FILTNDVSFV

SEQ ID NO: 19526 - protein, 9 aa, synthetic construct
  source 1..9: note = Seed: FYLTNDVSF
FILTNDVSM

SEQ ID NO: 19527 - protein, 9 aa, synthetic construct
  source 1..9: note = Seed: FYLTNDVSF
FILTNDVSY

SEQ ID NO: 19528 - protein, 10 aa, synthetic construct
  source 1..10: note = Seed: FQLTPIAVQM
FILTPIAVQA

SEQ ID NO: 19529 - protein, 10 aa, synthetic construct
  source 1..10: note = Seed: FQLTPIAVQM
FILTPIAVQI

SEQ ID NO: 19530 - protein, 10 aa, synthetic construct
  source 1..10: note = Seed: FQLTPIAVQM
FILTPIAVQL

SEQ ID NO: 19531 - protein, 10 aa, synthetic construct
  source 1..10: note = Seed: FQLTPIAVQM
FILTPIAVQM

SEQ ID NO: 19532 - protein, 10 aa, synthetic construct
  source 1..10: note = Seed: FQLTPIAVQM
FILTPIAVQV

SEQ ID NO: 19533 - protein, 10 aa, synthetic construct
  source 1..10: note = Seed: FQLTPIAVQM
FILTPIAVQY

SEQ ID NO: 19534 - protein, 10 aa, synthetic construct
  source 1..10: note = Seed: FELTSMKYFV
FILTSMKYFA

SEQ ID NO: 19535 - protein, 10 aa, synthetic construct
  source 1..10: note = Seed: FELTSMKYFV
FILTSMKYFI

SEQ ID NO: 19536 - protein, 10 aa, synthetic construct
  source 1..10: note = Seed: FELTSMKYFV
FILTSMKYFL

SEQ ID NO: 19537 - protein, 10 aa, synthetic construct
  source 1..10: note = Seed: FELTSMKYFV
FILTSMKYFM

SEQ ID NO: 19538 - protein, 10 aa, synthetic construct
  source 1..10: note = Seed: FELTSMKYFV
FILTSMKYFV

SEQ ID NO: 19539 - protein, 9 aa, synthetic construct
  source 1..9: note = Seed: FGLVAEWFL
FILVAEWFA

SEQ ID NO: 19540 - protein, 9 aa, synthetic construct
  source 1..9: note = Seed: FGLVAEWFL
FILVAEWFI

SEQ ID NO: 19541 - protein, 9 aa, synthetic construct
  source 1..9: note = Seed: FGLVAEWFL
FILVAEWFL

SEQ ID NO: 19542 - protein, 10 aa, synthetic construct
  source 1..10: note = Seed: FGLVAEWFLA
FILVAEWFLA

SEQ ID NO: 19543 - protein, 10 aa, synthetic construct
  source 1..10: note = Seed: FGLVAEWFLA
FILVAEWFLI

SEQ ID NO: 19544 - protein, 10 aa, synthetic construct
  source 1..10: note = Seed: FGLVAEWFLA
FILVAEWFLL

SEQ ID NO: 19545 - protein, 10 aa, synthetic construct
  source 1..10: note = Seed: FGLVAEWFLA
FILVAEWFLM

SEQ ID NO: 19546 - protein, 10 aa, synthetic construct
  source 1..10: note = Seed: FGLVAEWFLA
FILVAEWFLV

SEQ ID NO: 19547 - protein, 9 aa, synthetic construct
  source 1..9: note = Seed: FGLVAEWFL
FILVAEWFM

SEQ ID NO: 19548 - protein, 9 aa, synthetic construct
  source 1..9: note = Seed: FGLVAEWFL
FILVAEWFV

SEQ ID NO: 19549 - protein, 10 aa, synthetic construct
  source 1..10: note = Seed: FVLWAHGFEL
FILWAHGFEA

SEQ ID NO: 19550 - protein, 10 aa, synthetic construct
  source 1..10: note = Seed: FVLWAHGFEL
FILWAHGFEI

SEQ ID NO: 19551 - protein, 10 aa, synthetic construct
  source 1..10: note = Seed: FVLWAHGFEL
FILWAHGFEL

SEQ ID NO: 19552 - protein, 11 aa, synthetic construct
  source 1..11: note = Seed: FVLWAHGFELT
FILWAHGFELA

SEQ ID NO: 19553 - protein, 11 aa, synthetic construct
  source 1..11: note = Seed: FVLWAHGFELT
FILWAHGFELC

SEQ ID NO: 19554 - protein, 11 aa, synthetic construct
  source 1..11: note = Seed: FVLWAHGFELT
FILWAHGFELD

SEQ ID NO: 19555 - protein, 11 aa, synthetic construct
  source 1..11: note = Seed: FVLWAHGFELT
FILWAHGFELE

SEQ ID NO: 19556 - protein, 11 aa, synthetic construct
  source 1..11: note = Seed: FVLWAHGFELT
FILWAHGFELF

SEQ ID NO: 19557 - protein, 11 aa, synthetic construct
  source 1..11: note = Seed: FVLWAHGFELT
FILWAHGFELG

SEQ ID NO: 19558 - protein, 11 aa, synthetic construct
  source 1..11: note = Seed: FVLWAHGFELT
FILWAHGFELH

SEQ ID NO: 19559 - protein, 11 aa, synthetic construct
  source 1..11: note = Seed: FVLWAHGFELT
FILWAHGFELI

SEQ ID NO: 19560 - protein, 11 aa, synthetic construct
  source 1..11: note = Seed: FVLWAHGFELT
FILWAHGFELK

SEQ ID NO: 19561 - protein, 11 aa, synthetic construct
  source 1..11: note = Seed: FVLWAHGFELT
FILWAHGFELL

SEQ ID NO: 19562 - protein, 11 aa, synthetic construct
  source 1..11: note = Seed: FVLWAHGFELT
FILWAHGFELM

SEQ ID NO: 19563 - protein, 11 aa, synthetic construct
  source 1..11: note = Seed: FVLWAHGFELT
FILWAHGFELN

SEQ ID NO: 19564 - protein, 11 aa, synthetic construct
  source 1..11: note = Seed: FVLWAHGFELT
FILWAHGFELP

SEQ ID NO: 19565 - protein, 11 aa, synthetic construct
  source 1..11: note = Seed: FVLWAHGFELT
FILWAHGFELQ

SEQ ID NO: 19566 - protein, 11 aa, synthetic construct
  source 1..11: note = Seed: FVLWAHGFELT
FILWAHGFELR

SEQ ID NO: 19567 - protein, 11 aa, synthetic construct
  source 1..11: note = Seed: FVLWAHGFELT
FILWAHGFELS

SEQ ID NO: 19568 - protein, 11 aa, synthetic construct
  source 1..11: note = Seed: FVLWAHGFELT
FILWAHGFELT

SEQ ID NO: 19569 - protein, 11 aa, synthetic construct
  source 1..11: note = Seed: FVLWAHGFELT
FILWAHGFELV

SEQ ID NO: 19570 - protein, 11 aa, synthetic construct
  source 1..11: note = Seed: FVLWAHGFELT
FILWAHGFELW

SEQ ID NO: 19571 - protein, 11 aa, synthetic construct
  source 1..11: note = Seed: FVLWAHGFELT
FILWAHGFELY

SEQ ID NO: 19572 - protein, 10 aa, synthetic construct
  source 1..10: note = Seed: FVLWAHGFEL
FILWAHGFEM

SEQ ID NO: 19573 - protein, 10 aa, synthetic construct
  source 1..10: note = Seed: FVLWAHGFEL
FILWAHGFES

SEQ ID NO: 19574 - protein, 10 aa, synthetic construct
  source 1..10: note = Seed: FVLWAHGFEL
FILWAHGFET

SEQ ID NO: 19575 - protein, 10 aa, synthetic construct
  source 1..10: note = Seed: FVLWAHGFEL
FILWAHGFEV

SEQ ID NO: 19576 - protein, 9 aa, synthetic construct
  source 1..9: note = Seed: FHLYLQYIR
FILYLQYIR

SEQ ID NO: 19577 - protein, 9 aa, synthetic construct
  source 1..9: note = Seed: FAMMFVKHK
FIMMFVKHK

SEQ ID NO: 19578 - protein, 9 aa, synthetic construct
  source 1..9: note = Seed: FAMMFVKHK
FIMMFVKHR

SEQ ID NO: 19579 - protein, 11 aa, synthetic construct
  source 1..11: note = Seed: FSMMILSDDAV
FIMMILSDDAV

SEQ ID NO: 19580 - protein, 10 aa, synthetic construct
  source 1..10: note = Seed: FSMMILSDDA
FIMMILSDDI

SEQ ID NO: 19581 - protein, 10 aa, synthetic construct
  source 1..10: note = Seed: FSMMILSDDA
FIMMILSDDL

SEQ ID NO: 19582 - protein, 10 aa, synthetic construct
  source 1..10: note = Seed: FSMMILSDDA
FIMMILSDDV

SEQ ID NO: 19583 - protein, 10 aa, synthetic construct
  source 1..10: note = Seed: FKMNYQVNGY
FIMNYQVNGY

SEQ ID NO: 19584 - protein, 9 aa, synthetic construct
  source 1..9: note = Seed: FAMQMAYRF
FIMQMAYRA

SEQ ID NO: 19585 - protein, 9 aa, synthetic construct
  source 1..9: note = Seed: FAMQMAYRF
FIMQMAYRF

SEQ ID NO: 19586 - protein, 9 aa, synthetic construct
  source 1..9: note = Seed: FAMQMAYRF
FIMQMAYRI

SEQ ID NO: 19587 - protein, 9 aa, synthetic construct
  source 1..9: note = Seed: FAMQMAYRF
FIMQMAYRL

SEQ ID NO: 19588 - protein, 9 aa, synthetic construct
  source 1..9: note = Seed: FAMQMAYRF
FIMQMAYRM

SEQ ID NO: 19589 - protein, 9 aa, synthetic construct
  source 1..9: note = Seed: FAMQMAYRF
FIMQMAYRV

SEQ ID NO: 19590 - protein, 9 aa, synthetic construct
  source 1..9: note = Seed: FAMQMAYRF
FIMQMAYRW

SEQ ID NO: 19591 - protein, 9 aa, synthetic construct
  source 1..9: note = Seed: FAMQMAYRF
FIMQMAYRY

SEQ ID NO: 19592 - protein, 8 aa, synthetic construct
  source 1..8: note = Seed: FDMSKFPL
FIMSKFPF

SEQ ID NO: 19593 - protein, 8 aa, synthetic construct
  source 1..8: note = Seed: FDMSKFPL
FIMSKFPI

SEQ ID NO: 19594 - protein, 8 aa, synthetic construct
  source 1..8: note = Seed: FDMSKFPL
FIMSKFPL

SEQ ID NO: 19595 - protein, 10 aa, synthetic construct
  source 1..10: note = Seed: FDMSKFPLKL
FIMSKFPLKA

SEQ ID NO: 19596 - protein, 10 aa, synthetic construct
  source 1..10: note = Seed: FDMSKFPLKL
FIMSKFPLKI

SEQ ID NO: 19597 - protein, 10 aa, synthetic construct
  source 1..10: note = Seed: FDMSKFPLKL
FIMSKFPLKL

SEQ ID NO: 19598 - protein, 10 aa, synthetic construct
  source 1..10: note = Seed: FDMSKFPLKL
FIMSKFPLKM

SEQ ID NO: 19599 - protein, 10 aa, synthetic construct
  source 1..10: note = Seed: FDMSKFPLKL
FIMSKFPLKV

SEQ ID NO: 19600 - protein, 8 aa, synthetic construct
  source 1..8: note = Seed: FDMSKFPL
FIMSKFPM

SEQ ID NO: 19601 - protein, 8 aa, synthetic construct
  source 1..8: note = Seed: FDMSKFPL
FIMSKFPV

SEQ ID NO: 19602 - protein, 10 aa, synthetic construct
  source 1..10: note = Seed: FNMVYMPASW
FIMVYMPASF

SEQ ID NO: 19603 - protein, 10 aa, synthetic construct
  source 1..10: note = Seed: FNMVYMPASW
FIMVYMPASM

SEQ ID NO: 19604 - protein, 10 aa, synthetic construct
  source 1..10: note = Seed: FNMVYMPASW
FIMVYMPASY

SEQ ID NO: 19605 - protein, 9 aa, synthetic construct
  source 1..9: note = Seed: FENKTTLPV
FINKTTLPF

SEQ ID NO: 19606 - protein, 9 aa, synthetic construct
  source 1..9: note = Seed: FENKTTLPV
FINKTTLPM

SEQ ID NO: 19607 - protein, 9 aa, synthetic construct
  source 1..9: note = Seed: FENKTTLPV
FINKTTLPY

SEQ ID NO: 19608 - protein, 9 aa, synthetic construct
  source 1..9: note = Seed: FVNLKQLPF
FINLKQLPF

SEQ ID NO: 19609 - protein, 9 aa, synthetic construct
  source 1..9: note = Seed: FVNLKQLPF
FINLKQLPL

SEQ ID NO: 19610 - protein, 9 aa, synthetic construct
  source 1..9: note = Seed: FVNLKQLPF
FINLKQLPM

SEQ ID NO: 19611 - protein, 9 aa, synthetic construct
  source 1..9: note = Seed: FVNLKQLPF
FINLKQLPY

SEQ ID NO: 19612 - protein, 9 aa, synthetic construct
  source 1..9: note = Seed: FTNVYADSF
FINVYADSF

SEQ ID NO: 19613 - protein, 10 aa, synthetic construct
  source 1..10: note = Seed: FTNVYADSFV
FINVYADSFI

SEQ ID NO: 19614 - protein, 10 aa, synthetic construct
  source 1..10: note = Seed: FTNVYADSFV
FINVYADSFL

SEQ ID NO: 19615 - protein, 10 aa, synthetic construct
  source 1..10: note = Seed: FTNVYADSFV
FINVYADSFV

SEQ ID NO: 19616 - protein, 11 aa, synthetic construct
  source 1..11: note = Seed: FTNVYADSFVI
FINVYADSFVV

SEQ ID NO: 19617 - protein, 9 aa, synthetic construct
  source 1..9: note = Seed: FTNVYADSF
FINVYADSL

SEQ ID NO: 19618 - protein, 9 aa, synthetic construct
  source 1..9: note = Seed: FTNVYADSF
FINVYADSM

SEQ ID NO: 19619 - protein, 9 aa, synthetic construct
  source 1..9: note = Seed: FTNVYADSF
FINVYADSY

SEQ ID NO: 19620 - protein, 9 aa, synthetic construct
  source 1..9: note = Seed: FNPETNILL
FIPETNILL

SEQ ID NO: 19621 - protein, 10 aa, synthetic construct
  source 1..10: note = Seed: FTPFDVVRQC
FIPFDVVRQA

SEQ ID NO: 19622 - protein, 9 aa, synthetic construct
  source 1..9: note = Seed: FLPFFSNVT
FIPFFSNVL

SEQ ID NO: 19623 - protein, 10 aa, synthetic construct
  source 1..10: note = Seed: FLPFFSNVTW
FIPFFSNVTF

SEQ ID NO: 19624 - protein, 10 aa, synthetic construct
  source 1..10: note = Seed: FLPFFSNVTW
FIPFFSNVTH

SEQ ID NO: 19625 - protein, 10 aa, synthetic construct
  source 1..10: note = Seed: FLPFFSNVTW
FIPFFSNVTL

SEQ ID NO: 19626 - protein, 10 aa, synthetic construct
  source 1..10: note = Seed: FLPFFSNVTW
FIPFFSNVTM

SEQ ID NO: 19627 - protein, 10 aa, synthetic construct
  source 1..10: note = Seed: FLPFFSNVTW
FIPFFSNVTW

SEQ ID NO: 19628 - protein, 10 aa, synthetic construct
  source 1..10: note = Seed: FLPFFSNVTW
FIPFFSNVTY

SEQ ID NO: 19629 - protein, 9 aa, synthetic construct
  source 1..9: note = Seed: FLPFFSNVT
FIPFFSNVV

SEQ ID NO: 19630 - protein, 9 aa, synthetic construct
  source 1..9: note = Seed: FLPFQQFGR
FIPFQQFGK

SEQ ID NO: 19631 - protein, 9 aa, synthetic construct
  source 1..9: note = Seed: FLPFQQFGR
FIPFQQFGR

SEQ ID NO: 19632 - protein, 8 aa, synthetic construct
  source 1..8: note = Seed: FLPGVYSV
FIPGVYSV

SEQ ID NO: 19633 - protein, 9 aa, synthetic construct
  source 1..9: note = Seed: FTPLVPFWI
FIPLVPFWA

SEQ ID NO: 19634 - protein, 9 aa, synthetic construct
  source 1..9: note = Seed: FTPLVPFWI
FIPLVPFWI

SEQ ID NO: 19635 - protein, 10 aa, synthetic construct
  source 1..10: note = Seed: FTPLVPFWIT
FIPLVPFWIA

SEQ ID NO: 19636 - protein, 11 aa, synthetic construct
  source 1..11: note = Seed: FTPLVPFWITI
FIPLVPFWITV

SEQ ID NO: 19637 - protein, 9 aa, synthetic construct
  source 1..9: note = Seed: FTPLVPFWI
FIPLVPFWL

SEQ ID NO: 19638 - protein, 9 aa, synthetic construct
  source 1..9: note = Seed: FTPLVPFWI
FIPLVPFWV

SEQ ID NO: 19639 - protein, 9 aa, synthetic construct
  source 1..9: note = Seed: FLPRVFSAV
FIPRVFSAA

SEQ ID NO: 19640 - protein, 9 aa, synthetic construct
  source 1..9: note = Seed: FLPRVFSAV
FIPRVFSAI

SEQ ID NO: 19641 - protein, 9 aa, synthetic construct
  source 1..9: note = Seed: FLPRVFSAV
FIPRVFSAL

SEQ ID NO: 19642 - protein, 9 aa, synthetic construct
  source 1..9: note = Seed: FLPRVFSAV
FIPRVFSAM

SEQ ID NO: 19643 - protein, 9 aa, synthetic construct
  source 1..9: note = Seed: FLPRVFSAV
FIPRVFSAV

SEQ ID NO: 19644 - protein, 10 aa, synthetic construct
  source 1..10: note = Seed: FLPRVFSAVG
FIPRVFSAVF

SEQ ID NO: 19645 - protein, 10 aa, synthetic construct
  source 1..10: note = Seed: FLPRVFSAVG
FIPRVFSAVI

SEQ ID NO: 19646 - protein, 10 aa, synthetic construct
  source 1..10: note = Seed: FLPRVFSAVG
FIPRVFSAVL

SEQ ID NO: 19647 - protein, 10 aa, synthetic construct
  source 1..10: note = Seed: FLPRVFSAVG
FIPRVFSAVM

SEQ ID NO: 19648 - protein, 10 aa, synthetic construct
  source 1..10: note = Seed: FLPRVFSAVG
FIPRVFSAVV

SEQ ID NO: 19649 - protein, 8 aa, synthetic construct
  source 1..8: note = Seed: FLPRVFSA
FIPRVFSV

SEQ ID NO: 19650 - protein, 9 aa, synthetic construct
  source 1..9: note = Seed: FAPSASAFF
FIPSASAFA

SEQ ID NO: 19651 - protein, 9 aa, synthetic construct
  source 1..9: note = Seed: FAPSASAFF
FIPSASAFI

SEQ ID NO: 19652 - protein, 9 aa, synthetic construct
  source 1..9: note = Seed: FAPSASAFF
FIPSASAFL

SEQ ID NO: 19653 - protein, 9 aa, synthetic construct
  source 1..9: note = Seed: FAPSASAFF
FIPSASAFM

SEQ ID NO: 19654 - protein, 9 aa, synthetic construct
  source 1..9: note = Seed: FAPSASAFF
FIPSASAFV

SEQ ID NO: 19655 - protein, 10 aa, synthetic construct
  source 1..10: note = Seed: FPQSAPHGVV
FIQSAPHGVV

SEQ ID NO: 19656 - protein, 11 aa, synthetic construct
  source 1..11: note = Seed: FPQSAPHGVVF
FIQSAPHGVVF

SEQ ID NO: 19657 - protein, 11 aa, synthetic construct
  source 1..11: note = Seed: FPQSAPHGVVF
FIQSAPHGVVL

SEQ ID NO: 19658 - protein, 11 aa, synthetic construct
  source 1..11: note = Seed: FPQSAPHGVVF
FIQSAPHGVVM

SEQ ID NO: 19659 - protein, 11 aa, synthetic construct
  source 1..11: note = Seed: FPQSAPHGVVF
FIQSAPHGVVW

SEQ ID NO: 19660 - protein, 11 aa, synthetic construct
  source 1..11: note = Seed: FPQSAPHGVVF
FIQSAPHGVVY

SEQ ID NO: 19661 - protein, 9 aa, synthetic construct
  source 1..9: note = Seed: FPQSAPHGV
FIQSAPHGY

SEQ ID NO: 19662 - protein, 9 aa, synthetic construct
  source 1..9: note = Seed: FLQSINFVR
FIQSINFVK

SEQ ID NO: 19663 - protein, 9 aa, synthetic construct
  source 1..9: note = Seed: FLQSINFVR
FIQSINFVR

SEQ ID NO: 19664 - protein, 10 aa, synthetic construct
  source 1..10: note = Seed: FLQSINFVRI
FIQSINFVRI

SEQ ID NO: 19665 - protein, 10 aa, synthetic construct
  source 1..10: note = Seed: FLQSINFVRI
FIQSINFVRL

SEQ ID NO: 19666 - protein, 10 aa, synthetic construct
  source 1..10: note = Seed: FLQSINFVRI
FIQSINFVRR

SEQ ID NO: 19667 - protein, 10 aa, synthetic construct
  source 1..10: note = Seed: FLQSINFVRI
FIQSINFVRV

SEQ ID NO: 19668 - protein, 10 aa, synthetic construct
  source 1..10: note = Seed: FTQSRNLQEF
FIQSRNLQEF

SEQ ID NO: 19669 - protein, 9 aa, synthetic construct
  source 1..9: note = Seed: FAQVKQIYK
FIQVKQIYK

SEQ ID NO: 19670 - protein, 9 aa, synthetic construct
  source 1..9: note = Seed: FAQVKQIYK
FIQVKQIYR

SEQ ID NO: 19671 - protein, 9 aa, synthetic construct
  source 1..9: note = Seed: FLRDGWEIV
FIRDGWEIV

SEQ ID NO: 19672 - protein, 9 aa, synthetic construct
  source 1..9: note = Seed: FPREGVFVS
FIREGVFVF

SEQ ID NO: 19673 - protein, 9 aa, synthetic construct
  source 1..9: note = Seed: FPREGVFVS
FIREGVFVM

SEQ ID NO: 19674 - protein, 9 aa, synthetic construct
  source 1..9: note = Seed: FPREGVFVS
FIREGVFVY

SEQ ID NO: 19675 - protein, 10 aa, synthetic construct
  source 1..10: note = Seed: FTRFFYVLGL
FIRFFYVLGI

SEQ ID NO: 19676 - protein, 10 aa, synthetic construct
  source 1..10: note = Seed: FTRFFYVLGL
FIRFFYVLGK

SEQ ID NO: 19677 - protein, 10 aa, synthetic construct
  source 1..10: note = Seed: FTRFFYVLGL
FIRFFYVLGL

SEQ ID NO: 19678 - protein, 10 aa, synthetic construct
  source 1..10: note = Seed: FTRFFYVLGL
FIRFFYVLGV

SEQ ID NO: 19679 - protein, 10 aa, synthetic construct
  source 1..10: note = Seed: FTRGVYYPDK
FIRGVYYPDR

SEQ ID NO: 19680 - protein, 9 aa, synthetic construct
  source 1..9: note = Seed: FISAARQGF
FISAARQGY

SEQ ID NO: 19681 - protein, 9 aa, synthetic construct
  source 1..9: note = Seed: FQSAVKRTI
FISAVKRTM

SEQ ID NO: 19682 - protein, 9 aa, synthetic construct
  source 1..9: note = Seed: FQSAVKRTI
FISAVKRTV

SEQ ID NO: 19683 - protein, 10 aa, synthetic construct
  source 1..10: note = Seed: FISDEVARDL
FISDEVARDI

SEQ ID NO: 19684 - protein, 10 aa, synthetic construct
  source 1..10: note = Seed: FISDEVARDL
FISDEVARDV

SEQ ID NO: 19685 - protein, 10 aa, synthetic construct
  source 1..10: note = Seed: FTSDLATNNL
FISDLATNNI

SEQ ID NO: 19686 - protein, 10 aa, synthetic construct
  source 1..10: note = Seed: FTSDLATNNL
FISDLATNNL

SEQ ID NO: 19687 - protein, 11 aa, synthetic construct
  source 1..11: note = Seed: FTSDLATNNLV
FISDLATNNLL

SEQ ID NO: 19688 - protein, 11 aa, synthetic construct
  source 1..11: note = Seed: FTSDLATNNLV
FISDLATNNLV

SEQ ID NO: 19689 - protein, 10 aa, synthetic construct
  source 1..10: note = Seed: FTSDLATNNL
FISDLATNNV

SEQ ID NO: 19690 - protein, 9 aa, synthetic construct
  source 1..9: note = Seed: FTSDYYQLY
FISDYYQLF

SEQ ID NO: 19691 - protein, 9 aa, synthetic construct
  source 1..9: note = Seed: FTSDYYQLY
FISDYYQLK

SEQ ID NO: 19692 - protein, 9 aa, synthetic construct
  source 1..9: note = Seed: FTSDYYQLY
FISDYYQLL

SEQ ID NO: 19693 - protein, 9 aa, synthetic construct
  source 1..9: note = Seed: FTSDYYQLY
FISDYYQLM

SEQ ID NO: 19694 - protein, 9 aa, synthetic construct
  source 1..9: note = Seed: FTSDYYQLY
FISDYYQLR

SEQ ID NO: 19695 - protein, 9 aa, synthetic construct
  source 1..9: note = Seed: FTSDYYQLY
FISDYYQLW

SEQ ID NO: 19696 - protein, 9 aa, synthetic construct
  source 1..9: note = Seed: FTSDYYQLY
FISDYYQLY

SEQ ID NO: 19697 - protein, 10 aa, synthetic construct
  source 1..10: note = Seed: FTSDYYQLYS
FISDYYQLYF

SEQ ID NO: 19698 - protein, 10 aa, synthetic construct
  source 1..10: note = Seed: FTSDYYQLYS
FISDYYQLYM

SEQ ID NO: 19699 - protein, 10 aa, synthetic construct
  source 1..10: note = Seed: FTSDYYQLYS
FISDYYQLYY

SEQ ID NO: 19700 - protein, 9 aa, synthetic construct
  source 1..9: note = Seed: FASFYYVWK
FISFYYVWK

SEQ ID NO: 19701 - protein, 9 aa, synthetic construct
  source 1..9: note = Seed: FASFYYVWK
FISFYYVWR

SEQ ID NO: 19702 - protein, 9 aa, synthetic construct
  source 1..9: note = Seed: FVSLAIDAY
FISLAIDAF

SEQ ID NO: 19703 - protein, 9 aa, synthetic construct
  source 1..9: note = Seed: FVSLAIDAY
FISLAIDAM

SEQ ID NO: 19704 - protein, 9 aa, synthetic construct
  source 1..9: note = Seed: FVSLAIDAY
FISLAIDAY

SEQ ID NO: 19705 - protein, 9 aa, synthetic construct
  source 1..9: note = Seed: FVSNGTHWF
FISNGTHWA

SEQ ID NO: 19706 - protein, 9 aa, synthetic construct
  source 1..9: note = Seed: FVSNGTHWF
FISNGTHWF

SEQ ID NO: 19707 - protein, 9 aa, synthetic construct
  source 1..9: note = Seed: FVSNGTHWF
FISNGTHWI

SEQ ID NO: 19708 - protein, 9 aa, synthetic construct
  source 1..9: note = Seed: FVSNGTHWF
FISNGTHWL

SEQ ID NO: 19709 - protein, 9 aa, synthetic construct
  source 1..9: note = Seed: FVSNGTHWF
FISNGTHWM

SEQ ID NO: 19710 - protein, 9 aa, synthetic construct
  source 1..9: note = Seed: FVSNGTHWF
FISNGTHWV

SEQ ID NO: 19711 - protein, 9 aa, synthetic construct
  source 1..9: note = Seed: FVSNGTHWF
FISNGTHWY

SEQ ID NO: 19712 - protein, 10 aa, synthetic construct
  source 1..10: note = Seed: FISNSWLMWL
FISNSWLMWA

SEQ ID NO: 19713 - protein, 10 aa, synthetic construct
  source 1..10: note = Seed: FISNSWLMWL
FISNSWLMWI

SEQ ID NO: 19714 - protein, 11 aa, synthetic construct
  source 1..11: note = Seed: FISNSWLMWLI
FISNSWLMWLL

SEQ ID NO: 19715 - protein, 11 aa, synthetic construct
  source 1..11: note = Seed: FISNSWLMWLI
FISNSWLMWLV

SEQ ID NO: 19716 - protein, 10 aa, synthetic construct
  source 1..10: note = Seed: FISNSWLMWL
FISNSWLMWV

SEQ ID NO: 19717 - protein, 9 aa, synthetic construct
  source 1..9: note = Seed: FSSNVANYQ
FISNVANYK

SEQ ID NO: 19718 - protein, 10 aa, synthetic construct
  source 1..10: note = Seed: FSSNVANYQK
FISNVANYQK

SEQ ID NO: 19719 - protein, 10 aa, synthetic construct
  source 1..10: note = Seed: FSSNVANYQK
FISNVANYQR

SEQ ID NO: 19720 - protein, 9 aa, synthetic construct
  source 1..9: note = Seed: FSSNVANYQ
FISNVANYR

SEQ ID NO: 19721 - protein, 9 aa, synthetic construct
  source 1..9: note = Seed: FFSNVTWFH
FISNVTWFF

SEQ ID NO: 19722 - protein, 9 aa, synthetic construct
  source 1..9: note = Seed: FFSNVTWFH
FISNVTWFK

SEQ ID NO: 19723 - protein, 9 aa, synthetic construct
  source 1..9: note = Seed: FFSNVTWFH
FISNVTWFR

SEQ ID NO: 19724 - protein, 9 aa, synthetic construct
  source 1..9: note = Seed: FFSNVTWFH
FISNVTWFY

SEQ ID NO: 19725 - protein, 11 aa, synthetic construct
  source 1..11: note = Seed: FISPYNSQNAV
FISPYNSQNAA

SEQ ID NO: 19726 - protein, 11 aa, synthetic construct
  source 1..11: note = Seed: FISPYNSQNAV
FISPYNSQNAL

SEQ ID NO: 19727 - protein, 11 aa, synthetic construct
  source 1..11: note = Seed: FISPYNSQNAV
FISPYNSQNAM

SEQ ID NO: 19728 - protein, 10 aa, synthetic construct
  source 1..10: note = Seed: FISPYNSQNA
FISPYNSQNI

SEQ ID NO: 19729 - protein, 10 aa, synthetic construct
  source 1..10: note = Seed: FISPYNSQNA
FISPYNSQNL

SEQ ID NO: 19730 - protein, 10 aa, synthetic construct
  source 1..10: note = Seed: FISPYNSQNA
FISPYNSQNV

SEQ ID NO: 19731 - protein, 9 aa, synthetic construct
  source 1..9: note = Seed: FFSYFAVHF
FISYFAVHF

SEQ ID NO: 19732 - protein, 10 aa, synthetic construct
  source 1..10: note = Seed: FFSYFAVHFI
FISYFAVHFA

SEQ ID NO: 19733 - protein, 10 aa, synthetic construct
  source 1..10: note = Seed: FFSYFAVHFI
FISYFAVHFF

SEQ ID NO: 19734 - protein, 10 aa, synthetic construct
  source 1..10: note = Seed: FFSYFAVHFI
FISYFAVHFI

SEQ ID NO: 19735 - protein, 10 aa, synthetic construct
  source 1..10: note = Seed: FFSYFAVHFI
FISYFAVHFL

SEQ ID NO: 19736 - protein, 10 aa, synthetic construct
  source 1..10: note = Seed: FFSYFAVHFI
FISYFAVHFM

SEQ ID NO: 19737 - protein, 10 aa, synthetic construct
  source 1..10: note = Seed: FFSYFAVHFI
FISYFAVHFV

SEQ ID NO: 19738 - protein, 10 aa, synthetic construct
  source 1..10: note = Seed: FFSYFAVHFI
FISYFAVHFW

SEQ ID NO: 19739 - protein, 10 aa, synthetic construct
  source 1..10: note = Seed: FFSYFAVHFI
FISYFAVHFY

SEQ ID NO: 19740 - protein, 9 aa, synthetic construct
  source 1..9: note = Seed: FFSYFAVHF
FISYFAVHY

SEQ ID NO: 19741 - protein, 9 aa, synthetic construct
  source 1..9: note = Seed: FSTFKCYGV
FITFKCYGI

SEQ ID NO: 19742 - protein, 9 aa, synthetic construct
  source 1..9: note = Seed: FSTFKCYGV
FITFKCYGL

SEQ ID NO: 19743 - protein, 9 aa, synthetic construct
  source 1..9: note = Seed: FSTFKCYGV
FITFKCYGV

SEQ ID NO: 19744 - protein, 10 aa, synthetic construct
  source 1..10: note = Seed: FVTHSKGLYR
FITHSKGLYK

SEQ ID NO: 19745 - protein, 10 aa, synthetic construct
  source 1..10: note = Seed: FVTHSKGLYR
FITHSKGLYR

SEQ ID NO: 19746 - protein, 9 aa, synthetic construct
  source 1..9: note = Seed: FVTNVNASS
FITNVNASI

SEQ ID NO: 19747 - protein, 9 aa, synthetic construct
  source 1..9: note = Seed: FVTNVNASS
FITNVNASV

SEQ ID NO: 19748 - protein, 9 aa, synthetic construct
  source 1..9: note = Seed: FTTVDNINL
FITVDNINV

SEQ ID NO: 19749 - protein, 10 aa, synthetic construct
  source 1..10: note = Seed: FDTYNLWNTF
FITYNLWNTF

SEQ ID NO: 19750 - protein, 10 aa, synthetic construct
  source 1..10: note = Seed: FDTYNLWNTF
FITYNLWNTW

SEQ ID NO: 19751 - protein, 10 aa, synthetic construct
  source 1..10: note = Seed: FDTYNLWNTF
FITYNLWNTY

SEQ ID NO: 19752 - protein, 9 aa, synthetic construct
  source 1..9: note = Seed: FAVDAAKAY
FIVDAAKAF

SEQ ID NO: 19753 - protein, 9 aa, synthetic construct
  source 1..9: note = Seed: FAVDAAKAY
FIVDAAKAI

SEQ ID NO: 19754 - protein, 9 aa, synthetic construct
  source 1..9: note = Seed: FAVDAAKAY
FIVDAAKAL

SEQ ID NO: 19755 - protein, 9 aa, synthetic construct
  source 1..9: note = Seed: FAVDAAKAY
FIVDAAKAM

SEQ ID NO: 19756 - protein, 9 aa, synthetic construct
  source 1..9: note = Seed: FAVDAAKAY
FIVDAAKAY

SEQ ID NO: 19757 - protein, 10 aa, synthetic construct
  source 1..10: note = Seed: FAVDAAKAYK
FIVDAAKAYK

SEQ ID NO: 19758 - protein, 10 aa, synthetic construct
  source 1..10: note = Seed: FAVDAAKAYK
FIVDAAKAYR

SEQ ID NO: 19759 - protein, 9 aa, synthetic construct
  source 1..9: note = Seed: FAVHFISNS
FIVHFISNA

SEQ ID NO: 19760 - protein, 9 aa, synthetic construct
  source 1..9: note = Seed: FAVHFISNS
FIVHFISNI

SEQ ID NO: 19761 - protein, 9 aa, synthetic construct
  source 1..9: note = Seed: FAVHFISNS
FIVHFISNL

SEQ ID NO: 19762 - protein, 9 aa, synthetic construct
  source 1..9: note = Seed: FAVHFISNS
FIVHFISNM

SEQ ID NO: 19763 - protein, 9 aa, synthetic construct
  source 1..9: note = Seed: FAVHFISNS
FIVHFISNT

SEQ ID NO: 19764 - protein, 9 aa, synthetic construct
  source 1..9: note = Seed: FAVHFISNS
FIVHFISNV

SEQ ID NO: 19765 - protein, 8 aa, synthetic construct
  source 1..8: note = Seed: FVVKRHTF
FIVKRHTL

SEQ ID NO: 19766 - protein, 8 aa, synthetic construct
  source 1..8: note = Seed: FVVKRHTF
FIVKRHTM

SEQ ID NO: 19767 - protein, 9 aa, synthetic construct
  source 1..9: note = Seed: FNVLFSTVF
FIVLFSTVF

SEQ ID NO: 19768 - protein, 9 aa, synthetic construct
  source 1..9: note = Seed: FNVLFSTVF
FIVLFSTVM

SEQ ID NO: 19769 - protein, 9 aa, synthetic construct
  source 1..9: note = Seed: FNVLFSTVF
FIVLFSTVY

SEQ ID NO: 19770 - protein, 9 aa, synthetic construct
  source 1..9: note = Seed: FPVLHDIGN
FIVLHDIGY

SEQ ID NO: 19771 - protein, 10 aa, synthetic construct
  source 1..10: note = Seed: FKVSIWNLDY
FIVSIWNLDY

SEQ ID NO: 19772 - protein, 9 aa, synthetic construct
  source 1..9: note = Seed: FVVSTGYHF
FIVSTGYHA

SEQ ID NO: 19773 - protein, 9 aa, synthetic construct
  source 1..9: note = Seed: FVVSTGYHF
FIVSTGYHF

SEQ ID NO: 19774 - protein, 10 aa, synthetic construct
  source 1..10: note = Seed: FVVSTGYHFR
FIVSTGYHFK

SEQ ID NO: 19775 - protein, 10 aa, synthetic construct
  source 1..10: note = Seed: FVVSTGYHFR
FIVSTGYHFR

SEQ ID NO: 19776 - protein, 9 aa, synthetic construct
  source 1..9: note = Seed: FVVSTGYHF
FIVSTGYHI

SEQ ID NO: 19777 - protein, 9 aa, synthetic construct
  source 1..9: note = Seed: FVVSTGYHF
FIVSTGYHL

SEQ ID NO: 19778 - protein, 9 aa, synthetic construct
  source 1..9: note = Seed: FVVSTGYHF
FIVSTGYHM

SEQ ID NO: 19779 - protein, 9 aa, synthetic construct
  source 1..9: note = Seed: FVVSTGYHF
FIVSTGYHV

SEQ ID NO: 19780 - protein, 9 aa, synthetic construct
  source 1..9: note = Seed: FVVSTGYHF
FIVSTGYHW

SEQ ID NO: 19781 - protein, 9 aa, synthetic construct
  source 1..9: note = Seed: FVVSTGYHF
FIVSTGYHY

SEQ ID NO: 19782 - protein, 10 aa, synthetic construct
  source 1..10: note = Seed: FDVVRQCSGV
FIVVRQCSGV

SEQ ID NO: 19783 - protein, 9 aa, synthetic construct
  source 1..9: note = Seed: FYWFFSNYL
FIWFFSNYA

SEQ ID NO: 19784 - protein, 9 aa, synthetic construct
  source 1..9: note = Seed: FYWFFSNYL
FIWFFSNYI

SEQ ID NO: 19785 - protein, 9 aa, synthetic construct
  source 1..9: note = Seed: FYWFFSNYL
FIWFFSNYL

SEQ ID NO: 19786 - protein, 10 aa, synthetic construct
  source 1..10: note = Seed: FYWFFSNYLK
FIWFFSNYLF

SEQ ID NO: 19787 - protein, 10 aa, synthetic construct
  source 1..10: note = Seed: FYWFFSNYLK
FIWFFSNYLK

SEQ ID NO: 19788 - protein, 10 aa, synthetic construct
  source 1..10: note = Seed: FYWFFSNYLK
FIWFFSNYLR

SEQ ID NO: 19789 - protein, 10 aa, synthetic construct
  source 1..10: note = Seed: FYWFFSNYLK
FIWFFSNYLY

SEQ ID NO: 19790 - protein, 9 aa, synthetic construct
  source 1..9: note = Seed: FYWFFSNYL
FIWFFSNYM

SEQ ID NO: 19791 - protein, 9 aa, synthetic construct
  source 1..9: note = Seed: FYWFFSNYL
FIWFFSNYT

SEQ ID NO: 19792 - protein, 9 aa, synthetic construct
  source 1..9: note = Seed: FYWFFSNYL
FIWFFSNYV

SEQ ID NO: 19793 - protein, 9 aa, synthetic construct
  source 1..9: note = Seed: FYWFFSNYL
FIWFFSNYY

SEQ ID NO: 19794 - protein, 8 aa, synthetic construct
  source 1..8: note = Seed: FLWLLWPV
FIWLLWPA

SEQ ID NO: 19795 - protein, 8 aa, synthetic construct
  source 1..8: note = Seed: FLWLLWPV
FIWLLWPI

SEQ ID NO: 19796 - protein, 8 aa, synthetic construct
  source 1..8: note = Seed: FLWLLWPV
FIWLLWPL

SEQ ID NO: 19797 - protein, 8 aa, synthetic construct
  source 1..8: note = Seed: FLWLLWPV
FIWLLWPV

SEQ ID NO: 19798 - protein, 9 aa, synthetic construct
  source 1..9: note = Seed: FLWLLWPVT
FIWLLWPVA

SEQ ID NO: 19799 - protein, 9 aa, synthetic construct
  source 1..9: note = Seed: FLWLLWPVT
FIWLLWPVI

SEQ ID NO: 19800 - protein, 9 aa, synthetic construct
  source 1..9: note = Seed: FLWLLWPVT
FIWLLWPVL

SEQ ID NO: 19801 - protein, 10 aa, synthetic construct
  source 1..10: note = Seed: FLWLLWPVTL
FIWLLWPVTA

SEQ ID NO: 19802 - protein, 10 aa, synthetic construct
  source 1..10: note = Seed: FLWLLWPVTL
FIWLLWPVTF

SEQ ID NO: 19803 - protein, 10 aa, synthetic construct
  source 1..10: note = Seed: FLWLLWPVTL
FIWLLWPVTI

SEQ ID NO: 19804 - protein, 10 aa, synthetic construct
  source 1..10: note = Seed: FLWLLWPVTL
FIWLLWPVTL

SEQ ID NO: 19805 - protein, 11 aa, synthetic construct
  source 1..11: note = Seed: FLWLLWPVTLA
FIWLLWPVTLA

SEQ ID NO: 19806 - protein, 11 aa, synthetic construct
  source 1..11: note = Seed: FLWLLWPVTLA
FIWLLWPVTLI

SEQ ID NO: 19807 - protein, 11 aa, synthetic construct
  source 1..11: note = Seed: FLWLLWPVTLA
FIWLLWPVTLL

SEQ ID NO: 19808 - protein, 11 aa, synthetic construct
  source 1..11: note = Seed: FLWLLWPVTLA
FIWLLWPVTLV

SEQ ID NO: 19809 - protein, 10 aa, synthetic construct
  source 1..10: note = Seed: FLWLLWPVTL
FIWLLWPVTV

SEQ ID NO: 19810 - protein, 9 aa, synthetic construct
  source 1..9: note = Seed: FLWLLWPVT
FIWLLWPVV

SEQ ID NO: 19811 - protein, 9 aa, synthetic construct
  source 1..9: note = Seed: FSYFAVHFI
FIYFAVHFA

SEQ ID NO: 19812 - protein, 9 aa, synthetic construct
  source 1..9: note = Seed: FSYFAVHFI
FIYFAVHFC

SEQ ID NO: 19813 - protein, 9 aa, synthetic construct
  source 1..9: note = Seed: FSYFAVHFI
FIYFAVHFF

SEQ ID NO: 19814 - protein, 9 aa, synthetic construct
  source 1..9: note = Seed: FSYFAVHFI
FIYFAVHFI

SEQ ID NO: 19815 - protein, 10 aa, synthetic construct
  source 1..10: note = Seed: FSYFAVHFIS
FIYFAVHFIV

SEQ ID NO: 19816 - protein, 9 aa, synthetic construct
  source 1..9: note = Seed: FSYFAVHFI
FIYFAVHFL

SEQ ID NO: 19817 - protein, 9 aa, synthetic construct
  source 1..9: note = Seed: FSYFAVHFI
FIYFAVHFM

SEQ ID NO: 19818 - protein, 9 aa, synthetic construct
  source 1..9: note = Seed: FSYFAVHFI
FIYFAVHFS

SEQ ID NO: 19819 - protein, 9 aa, synthetic construct
  source 1..9: note = Seed: FSYFAVHFI
FIYFAVHFT

SEQ ID NO: 19820 - protein, 9 aa, synthetic construct
  source 1..9: note = Seed: FSYFAVHFI
FIYFAVHFV

SEQ ID NO: 19821 - protein, 9 aa, synthetic construct
  source 1..9: note = Seed: FSYFAVHFI
FIYFAVHFY

SEQ ID NO: 19822 - protein, 9 aa, synthetic construct
  source 1..9: note = Seed: FYYLGTGPE
FIYLGTGPF

SEQ ID NO: 19823 - protein, 9 aa, synthetic construct
  source 1..9: note = Seed: FYYLGTGPE
FIYLGTGPL

SEQ ID NO: 19824 - protein, 9 aa, synthetic construct
  source 1..9: note = Seed: FYYLGTGPE
FIYLGTGPM

SEQ ID NO: 19825 - protein, 9 aa, synthetic construct
  source 1..9: note = Seed: FNYLKSPNF
FIYLKSPNF

SEQ ID NO: 19826 - protein, 9 aa, synthetic construct
  source 1..9: note = Seed: FNYLKSPNF
FIYLKSPNM

SEQ ID NO: 19827 - protein, 9 aa, synthetic construct
  source 1..9: note = Seed: FNYLKSPNF
FIYLKSPNY

SEQ ID NO: 19828 - protein, 9 aa, synthetic construct
  source 1..9: note = Seed: FCYMHHMEL
FIYMHHMEA

SEQ ID NO: 19829 - protein, 9 aa, synthetic construct
  source 1..9: note = Seed: FCYMHHMEL
FIYMHHMEF

SEQ ID NO: 19830 - protein, 9 aa, synthetic construct
  source 1..9: note = Seed: FCYMHHMEL
FIYMHHMEI

SEQ ID NO: 19831 - protein, 9 aa, synthetic construct
  source 1..9: note = Seed: FCYMHHMEL
FIYMHHMEL

SEQ ID NO: 19832 - protein, 9 aa, synthetic construct
  source 1..9: note = Seed: FCYMHHMEL
FIYMHHMEM

SEQ ID NO: 19833 - protein, 9 aa, synthetic construct
  source 1..9: note = Seed: FCYMHHMEL
FIYMHHMET

SEQ ID NO: 19834 - protein, 9 aa, synthetic construct
  source 1..9: note = Seed: FCYMHHMEL
FIYMHHMEV

SEQ ID NO: 19835 - protein, 9 aa, synthetic construct
  source 1..9: note = Seed: FCYMHHMEL
FIYMHHMEW

SEQ ID NO: 19836 - protein, 9 aa, synthetic construct
  source 1..9: note = Seed: FCYMHHMEL
FIYMHHMEY

SEQ ID NO: 19837 - protein, 9 aa, synthetic construct
  source 1..9: note = Seed: FRYMNSQGL
FIYMNSQGF

SEQ ID NO: 19838 - protein, 9 aa, synthetic construct
  source 1..9: note = Seed: FRYMNSQGL
FIYMNSQGL

SEQ ID NO: 19839 - protein, 9 aa, synthetic construct
  source 1..9: note = Seed: FRYMNSQGL
FIYMNSQGM

SEQ ID NO: 19840 - protein, 9 aa, synthetic construct
  source 1..9: note = Seed: FRYMNSQGL
FIYMNSQGV

SEQ ID NO: 19841 - protein, 9 aa, synthetic construct
  source 1..9: note = Seed: FRYMNSQGL
FIYMNSQGY

SEQ ID NO: 19842 - protein, 9 aa, synthetic construct
  source 1..9: note = Seed: FYYVWKSYV
FIYVWKSYA

SEQ ID NO: 19843 - protein, 9 aa, synthetic construct
  source 1..9: note = Seed: FYYVWKSYV
FIYVWKSYI

SEQ ID NO: 19844 - protein, 9 aa, synthetic construct
  source 1..9: note = Seed: FYYVWKSYV
FIYVWKSYL

SEQ ID NO: 19845 - protein, 9 aa, synthetic construct
  source 1..9: note = Seed: FYYVWKSYV
FIYVWKSYM

SEQ ID NO: 19846 - protein, 9 aa, synthetic construct
  source 1..9: note = Seed: FYYVWKSYV
FIYVWKSYV

SEQ ID NO: 19847 - protein, 11 aa, synthetic construct
  source 1..11: note = Seed: FYYVWKSYVHV
FIYVWKSYVHV

SEQ ID NO: 19848 - protein, 10 aa, synthetic construct
  source 1..10: note = Seed: FYYVWKSYVH
FIYVWKSYVM

SEQ ID NO: 19849 - protein, 10 aa, synthetic construct
  source 1..10: note = Seed: FYYVWKSYVH
FIYVWKSYVY

SEQ ID NO: 19850 - protein, 9 aa, synthetic construct
  source 1..9: note = Seed: FFYYSDSPC
FIYYSDSPF

SEQ ID NO: 19851 - protein, 9 aa, synthetic construct
  source 1..9: note = Seed: FFYYSDSPC
FIYYSDSPL

SEQ ID NO: 19852 - protein, 9 aa, synthetic construct
  source 1..9: note = Seed: FFYYSDSPC
FIYYSDSPM

SEQ ID NO: 19853 - protein, 9 aa, synthetic construct
  source 1..9: note = Seed: FFYYSDSPC
FIYYSDSPY

SEQ ID NO: 19854 - protein, 9 aa, synthetic construct
  source 1..9: note = Seed: FVAAIFYLI
FKAAIFYLV

SEQ ID NO: 19855 - protein, 9 aa, synthetic construct
  source 1..9: note = Seed: FVAAIFYLI
FKAAIFYLY

SEQ ID NO: 19856 - protein, 10 aa, synthetic construct
  source 1..10: note = Seed: FCAFAVDAAK
FKAFAVDAAK

SEQ ID NO: 19857 - protein, 10 aa, synthetic construct
  source 1..10: note = Seed: FCAFAVDAAK
FKAFAVDAAR

SEQ ID NO: 19858 - protein, 10 aa, synthetic construct
  source 1..10: note = Seed: FIASFRLFAR
FKASFRLFAK

SEQ ID NO: 19859 - protein, 10 aa, synthetic construct
  source 1..10: note = Seed: FIASFRLFAR
FKASFRLFAR

SEQ ID NO: 19860 - protein, 10 aa, synthetic construct
  source 1..10: note = Seed: FFASFYYVWK
FKASFYYVWK

SEQ ID NO: 19861 - protein, 10 aa, synthetic construct
  source 1..10: note = Seed: FFASFYYVWK
FKASFYYVWR

SEQ ID NO: 19862 - protein, 9 aa, synthetic construct
  source 1..9: note = Seed: FNATRFASV
FKATRFASI

SEQ ID NO: 19863 - protein, 9 aa, synthetic construct
  source 1..9: note = Seed: FNATRFASV
FKATRFASL

SEQ ID NO: 19864 - protein, 9 aa, synthetic construct
  source 1..9: note = Seed: FNATRFASV
FKATRFASM

SEQ ID NO: 19865 - protein, 10 aa, synthetic construct
  source 1..10: note = Seed: FNATRFASVY
FKATRFASVF

SEQ ID NO: 19866 - protein, 10 aa, synthetic construct
  source 1..10: note = Seed: FNATRFASVY
FKATRFASVM

SEQ ID NO: 19867 - protein, 10 aa, synthetic construct
  source 1..10: note = Seed: FNATRFASVY
FKATRFASVY

SEQ ID NO: 19868 - protein, 11 aa, synthetic construct
  source 1..11: note = Seed: FNATRFASVYA
FKATRFASVYK

SEQ ID NO: 19869 - protein, 9 aa, synthetic construct
  source 1..9: note = Seed: FSAVGNICY
FKAVGNICF

SEQ ID NO: 19870 - protein, 9 aa, synthetic construct
  source 1..9: note = Seed: FSAVGNICY
FKAVGNICM

SEQ ID NO: 19871 - protein, 9 aa, synthetic construct
  source 1..9: note = Seed: FSAVGNICY
FKAVGNICY

SEQ ID NO: 19872 - protein, 10 aa, synthetic construct
  source 1..10: note = Seed: FSAVGNICYT
FKAVGNICYV

SEQ ID NO: 19873 - protein, 10 aa, synthetic construct
  source 1..10: note = Seed: FLAYILFTRF
FKAYILFTRF

SEQ ID NO: 19874 - protein, 10 aa, synthetic construct
  source 1..10: note = Seed: FLAYILFTRF
FKAYILFTRY

SEQ ID NO: 19875 - protein, 9 aa, synthetic construct
  source 1..9: note = Seed: FMCVEYCPI
FKCVEYCPF

SEQ ID NO: 19876 - protein, 10 aa, synthetic construct
  source 1..10: note = Seed: FMCVEYCPIF
FKCVEYCPIY

SEQ ID NO: 19877 - protein, 9 aa, synthetic construct
  source 1..9: note = Seed: FMCVEYCPI
FKCVEYCPM

SEQ ID NO: 19878 - protein, 9 aa, synthetic construct
  source 1..9: note = Seed: FMCVEYCPI
FKCVEYCPY

SEQ ID NO: 19879 - protein, 9 aa, synthetic construct
  source 1..9: note = Seed: FLCWHTNCY
FKCWHTNCF

SEQ ID NO: 19880 - protein, 9 aa, synthetic construct
  source 1..9: note = Seed: FLCWHTNCY
FKCWHTNCY

SEQ ID NO: 19881 - protein, 9 aa, synthetic construct
  source 1..9: note = Seed: FKDASGKPV
FKDASGKPL

SEQ ID NO: 19882 - protein, 11 aa, synthetic construct
  source 1..11: note = Seed: FPDLNGDVVAI
FKDLNGDVVAI

SEQ ID NO: 19883 - protein, 11 aa, synthetic construct
  source 1..11: note = Seed: FPDLNGDVVAI
FKDLNGDVVAL

SEQ ID NO: 19884 - protein, 11 aa, synthetic construct
  source 1..11: note = Seed: FPDLNGDVVAI
FKDLNGDVVAV

SEQ ID NO: 19885 - protein, 9 aa, synthetic construct
  source 1..9: note = Seed: FEEAALCTF
FKEAALCTF

SEQ ID NO: 19886 - protein, 9 aa, synthetic construct
  source 1..9: note = Seed: FEEAALCTF
FKEAALCTM

SEQ ID NO: 19887 - protein, 9 aa, synthetic construct
  source 1..9: note = Seed: FEEAALCTF
FKEAALCTY

SEQ ID NO: 19888 - protein, 9 aa, synthetic construct
  source 1..9: note = Seed: FVFKNIDGY
FKFKNIDGF

SEQ ID NO: 19889 - protein, 9 aa, synthetic construct
  source 1..9: note = Seed: FVFKNIDGY
FKFKNIDGM

SEQ ID NO: 19890 - protein, 9 aa, synthetic construct
  source 1..9: note = Seed: FVFKNIDGY
FKFKNIDGY

SEQ ID NO: 19891 - protein, 10 aa, synthetic construct
  source 1..10: note = Seed: FVFKNIDGYF
FKFKNIDGYF

SEQ ID NO: 19892 - protein, 11 aa, synthetic construct
  source 1..11: note = Seed: FVFKNIDGYFK
FKFKNIDGYFR

SEQ ID NO: 19893 - protein, 10 aa, synthetic construct
  source 1..10: note = Seed: FVFKNIDGYF
FKFKNIDGYY

SEQ ID NO: 19894 - protein, 9 aa, synthetic construct
  source 1..9: note = Seed: FKFRIDGDM
FKFRIDGDF

SEQ ID NO: 19895 - protein, 9 aa, synthetic construct
  source 1..9: note = Seed: FKFRIDGDM
FKFRIDGDY

SEQ ID NO: 19896 - protein, 8 aa, synthetic construct
  source 1..8: note = Seed: FLFVAAIF
FKFVAAIF

SEQ ID NO: 19897 - protein, 9 aa, synthetic construct
  source 1..9: note = Seed: FLFVAAIFY
FKFVAAIFF

SEQ ID NO: 19898 - protein, 9 aa, synthetic construct
  source 1..9: note = Seed: FLFVAAIFY
FKFVAAIFL

SEQ ID NO: 19899 - protein, 9 aa, synthetic construct
  source 1..9: note = Seed: FLFVAAIFY
FKFVAAIFM

SEQ ID NO: 19900 - protein, 9 aa, synthetic construct
  source 1..9: note = Seed: FLFVAAIFY
FKFVAAIFY

SEQ ID NO: 19901 - protein, 10 aa, synthetic construct
  source 1..10: note = Seed: FLFVAAIFYL
FKFVAAIFYY

SEQ ID NO: 19902 - protein, 8 aa, synthetic construct
  source 1..8: note = Seed: FLFVAAIF
FKFVAAIY

SEQ ID NO: 19903 - protein, 10 aa, synthetic construct
  source 1..10: note = Seed: FKFVCDNIKF
FKFVCDNIKY

SEQ ID NO: 19904 - protein, 9 aa, synthetic construct
  source 1..9: note = Seed: FGGASCCLY
FKGASCCLF

SEQ ID NO: 19905 - protein, 9 aa, synthetic construct
  source 1..9: note = Seed: FGGASCCLY
FKGASCCLY

SEQ ID NO: 19906 - protein, 9 aa, synthetic construct
  source 1..9: note = Seed: FNGVSFSTF
FKGVSFSTF

SEQ ID NO: 19907 - protein, 9 aa, synthetic construct
  source 1..9: note = Seed: FNGVSFSTF
FKGVSFSTL

SEQ ID NO: 19908 - protein, 9 aa, synthetic construct
  source 1..9: note = Seed: FNGVSFSTF
FKGVSFSTM

SEQ ID NO: 19909 - protein, 9 aa, synthetic construct
  source 1..9: note = Seed: FNGVSFSTF
FKGVSFSTY

SEQ ID NO: 19910 - protein, 9 aa, synthetic construct
  source 1..9: note = Seed: FLGYFCTCY
FKGYFCTCF

SEQ ID NO: 19911 - protein, 9 aa, synthetic construct
  source 1..9: note = Seed: FLGYFCTCY
FKGYFCTCY

SEQ ID NO: 19912 - protein, 10 aa, synthetic construct
  source 1..10: note = Seed: FLGYFCTCYF
FKGYFCTCYF

SEQ ID NO: 19913 - protein, 10 aa, synthetic construct
  source 1..10: note = Seed: FLGYFCTCYF
FKGYFCTCYY

SEQ ID NO: 19914 - protein, 9 aa, synthetic construct
  source 1..9: note = Seed: FLHFLPRVF
FKHFLPRVF

SEQ ID NO: 19915 - protein, 9 aa, synthetic construct
  source 1..9: note = Seed: FLHFLPRVF
FKHFLPRVL

SEQ ID NO: 19916 - protein, 9 aa, synthetic construct
  source 1..9: note = Seed: FLHFLPRVF
FKHFLPRVM

SEQ ID NO: 19917 - protein, 9 aa, synthetic construct
  source 1..9: note = Seed: FLHFLPRVF
FKHFLPRVY

SEQ ID NO: 19918 - protein, 9 aa, synthetic construct
  source 1..9: note = Seed: FEIKLAKKF
FKIKLAKKF

SEQ ID NO: 19919 - protein, 9 aa, synthetic construct
  source 1..9: note = Seed: FEIKLAKKF
FKIKLAKKY

SEQ ID NO: 19920 - protein, 10 aa, synthetic construct
  source 1..10: note = Seed: FKIYSKHTPI
FKIYSKHTPA

SEQ ID NO: 19921 - protein, 10 aa, synthetic construct
  source 1..10: note = Seed: FKIYSKHTPI
FKIYSKHTPF

SEQ ID NO: 19922 - protein, 10 aa, synthetic construct
  source 1..10: note = Seed: FKIYSKHTPI
FKIYSKHTPL

SEQ ID NO: 19923 - protein, 10 aa, synthetic construct
  source 1..10: note = Seed: FKIYSKHTPI
FKIYSKHTPM

SEQ ID NO: 19924 - protein, 10 aa, synthetic construct
  source 1..10: note = Seed: FKIYSKHTPI
FKIYSKHTPV

SEQ ID NO: 19925 - protein, 10 aa, synthetic construct
  source 1..10: note = Seed: FKIYSKHTPI
FKIYSKHTPY

SEQ ID NO: 19926 - protein, 9 aa, synthetic construct
  source 1..9: note = Seed: FRKSNLKPF
FKKSNLKPF

SEQ ID NO: 19927 - protein, 9 aa, synthetic construct
  source 1..9: note = Seed: FRKSNLKPF
FKKSNLKPM

SEQ ID NO: 19928 - protein, 9 aa, synthetic construct
  source 1..9: note = Seed: FRKSNLKPF
FKKSNLKPY

SEQ ID NO: 19929 - protein, 9 aa, synthetic construct
  source 1..9: note = Seed: FLKTNCCRF
FKKTNCCRF

SEQ ID NO: 19930 - protein, 9 aa, synthetic construct
  source 1..9: note = Seed: FLKTNCCRF
FKKTNCCRY

SEQ ID NO: 19931 - protein, 10 aa, synthetic construct
  source 1..10: note = Seed: FPLCANGQVF
FKLCANGQVF

SEQ ID NO: 19932 - protein, 10 aa, synthetic construct
  source 1..10: note = Seed: FPLCANGQVF
FKLCANGQVM

SEQ ID NO: 19933 - protein, 10 aa, synthetic construct
  source 1..10: note = Seed: FPLCANGQVF
FKLCANGQVY

SEQ ID NO: 19934 - protein, 9 aa, synthetic construct
  source 1..9: note = Seed: FKLKDCVMY
FKLKDCVMF

SEQ ID NO: 19935 - protein, 10 aa, synthetic construct
  source 1..10: note = Seed: FKLKDCVMYA
FKLKDCVMYI

SEQ ID NO: 19936 - protein, 10 aa, synthetic construct
  source 1..10: note = Seed: FKLKDCVMYA
FKLKDCVMYL

SEQ ID NO: 19937 - protein, 10 aa, synthetic construct
  source 1..10: note = Seed: FKLKDCVMYA
FKLKDCVMYM

SEQ ID NO: 19938 - protein, 10 aa, synthetic construct
  source 1..10: note = Seed: FKLKDCVMYA
FKLKDCVMYS

SEQ ID NO: 19939 - protein, 10 aa, synthetic construct
  source 1..10: note = Seed: FKLKDCVMYA
FKLKDCVMYT

SEQ ID NO: 19940 - protein, 10 aa, synthetic construct
  source 1..10: note = Seed: FKLKDCVMYA
FKLKDCVMYV

SEQ ID NO: 19941 - protein, 10 aa, synthetic construct
  source 1..10: note = Seed: FPLKLRGTAV
FKLKLRGTAF

SEQ ID NO: 19942 - protein, 10 aa, synthetic construct
  source 1..10: note = Seed: FPLKLRGTAV
FKLKLRGTAI

SEQ ID NO: 19943 - protein, 10 aa, synthetic construct
  source 1..10: note = Seed: FPLKLRGTAV
FKLKLRGTAL

SEQ ID NO: 19944 - protein, 10 aa, synthetic construct
  source 1..10: note = Seed: FPLKLRGTAV
FKLKLRGTAM

SEQ ID NO: 19945 - protein, 10 aa, synthetic construct
  source 1..10: note = Seed: FPLKLRGTAV
FKLKLRGTAV

SEQ ID NO: 19946 - protein, 11 aa, synthetic construct
  source 1..11: note = Seed: FPLKLRGTAVM
FKLKLRGTAVF

SEQ ID NO: 19947 - protein, 11 aa, synthetic construct
  source 1..11: note = Seed: FPLKLRGTAVM
FKLKLRGTAVY

SEQ ID NO: 19948 - protein, 9 aa, synthetic construct
  source 1..9: note = Seed: FKLNEEIAI
FKLNEEIAF

SEQ ID NO: 19949 - protein, 9 aa, synthetic construct
  source 1..9: note = Seed: FKLNEEIAI
FKLNEEIAM

SEQ ID NO: 19950 - protein, 9 aa, synthetic construct
  source 1..9: note = Seed: FKLNEEIAI
FKLNEEIAY

SEQ ID NO: 19951 - protein, 10 aa, synthetic construct
  source 1..10: note = Seed: FLLNKEMYLK
FKLNKEMYLA

SEQ ID NO: 19952 - protein, 10 aa, synthetic construct
  source 1..10: note = Seed: FLLNKEMYLK
FKLNKEMYLI

SEQ ID NO: 19953 - protein, 10 aa, synthetic construct
  source 1..10: note = Seed: FLLNKEMYLK
FKLNKEMYLL

SEQ ID NO: 19954 - protein, 10 aa, synthetic construct
  source 1..10: note = Seed: FLLNKEMYLK
FKLNKEMYLM

SEQ ID NO: 19955 - protein, 10 aa, synthetic construct
  source 1..10: note = Seed: FLLNKEMYLK
FKLNKEMYLV

SEQ ID NO: 19956 - protein, 9 aa, synthetic construct
  source 1..9: note = Seed: FYLTNDVSF
FKLTNDVSF

SEQ ID NO: 19957 - protein, 10 aa, synthetic construct
  source 1..10: note = Seed: FYLTNDVSFL
FKLTNDVSFA

SEQ ID NO: 19958 - protein, 10 aa, synthetic construct
  source 1..10: note = Seed: FYLTNDVSFL
FKLTNDVSFI

SEQ ID NO: 19959 - protein, 10 aa, synthetic construct
  source 1..10: note = Seed: FYLTNDVSFL
FKLTNDVSFL

SEQ ID NO: 19960 - protein, 11 aa, synthetic construct
  source 1..11: note = Seed: FYLTNDVSFLA
FKLTNDVSFLL

SEQ ID NO: 19961 - protein, 11 aa, synthetic construct
  source 1..11: note = Seed: FYLTNDVSFLA
FKLTNDVSFLV

SEQ ID NO: 19962 - protein, 10 aa, synthetic construct
  source 1..10: note = Seed: FYLTNDVSFL
FKLTNDVSFM

SEQ ID NO: 19963 - protein, 10 aa, synthetic construct
  source 1..10: note = Seed: FYLTNDVSFL
FKLTNDVSFV

SEQ ID NO: 19964 - protein, 9 aa, synthetic construct
  source 1..9: note = Seed: FYLTNDVSF
FKLTNDVSL

SEQ ID NO: 19965 - protein, 9 aa, synthetic construct
  source 1..9: note = Seed: FYLTNDVSF
FKLTNDVSM

SEQ ID NO: 19966 - protein, 9 aa, synthetic construct
  source 1..9: note = Seed: FYLTNDVSF
FKLTNDVSY

SEQ ID NO: 19967 - protein, 10 aa, synthetic construct
  source 1..10: note = Seed: FQLTPIAVQM
FKLTPIAVQA

SEQ ID NO: 19968 - protein, 10 aa, synthetic construct
  source 1..10: note = Seed: FQLTPIAVQM
FKLTPIAVQF

SEQ ID NO: 19969 - protein, 10 aa, synthetic construct
  source 1..10: note = Seed: FQLTPIAVQM
FKLTPIAVQI

SEQ ID NO: 19970 - protein, 10 aa, synthetic construct
  source 1..10: note = Seed: FQLTPIAVQM
FKLTPIAVQL

SEQ ID NO: 19971 - protein, 10 aa, synthetic construct
  source 1..10: note = Seed: FQLTPIAVQM
FKLTPIAVQM

SEQ ID NO: 19972 - protein, 10 aa, synthetic construct
  source 1..10: note = Seed: FQLTPIAVQM
FKLTPIAVQV

SEQ ID NO: 19973 - protein, 10 aa, synthetic construct
  source 1..10: note = Seed: FQLTPIAVQM
FKLTPIAVQY

SEQ ID NO: 19974 - protein, 9 aa, synthetic construct
  source 1..9: note = Seed: FELTSMKYF
FKLTSMKYF

SEQ ID NO: 19975 - protein, 10 aa, synthetic construct
  source 1..10: note = Seed: FELTSMKYFV
FKLTSMKYFA

SEQ ID NO: 19976 - protein, 10 aa, synthetic construct
  source 1..10: note = Seed: FELTSMKYFV
FKLTSMKYFI

SEQ ID NO: 19977 - protein, 10 aa, synthetic construct
  source 1..10: note = Seed: FELTSMKYFV
FKLTSMKYFL

SEQ ID NO: 19978 - protein, 10 aa, synthetic construct
  source 1..10: note = Seed: FELTSMKYFV
FKLTSMKYFM

SEQ ID NO: 19979 - protein, 10 aa, synthetic construct
  source 1..10: note = Seed: FELTSMKYFV
FKLTSMKYFV

SEQ ID NO: 19980 - protein, 9 aa, synthetic construct
  source 1..9: note = Seed: FELTSMKYF
FKLTSMKYM

SEQ ID NO: 19981 - protein, 9 aa, synthetic construct
  source 1..9: note = Seed: FELTSMKYF
FKLTSMKYY

SEQ ID NO: 19982 - protein, 10 aa, synthetic construct
  source 1..10: note = Seed: FGLVAEWFLA
FKLVAEWFLA

SEQ ID NO: 19983 - protein, 10 aa, synthetic construct
  source 1..10: note = Seed: FGLVAEWFLA
FKLVAEWFLI

SEQ ID NO: 19984 - protein, 10 aa, synthetic construct
  source 1..10: note = Seed: FGLVAEWFLA
FKLVAEWFLL

SEQ ID NO: 19985 - protein, 10 aa, synthetic construct
  source 1..10: note = Seed: FGLVAEWFLA
FKLVAEWFLM

SEQ ID NO: 19986 - protein, 10 aa, synthetic construct
  source 1..10: note = Seed: FGLVAEWFLA
FKLVAEWFLV

SEQ ID NO: 19987 - protein, 10 aa, synthetic construct
  source 1..10: note = Seed: FVLWAHGFEL
FKLWAHGFEA

SEQ ID NO: 19988 - protein, 10 aa, synthetic construct
  source 1..10: note = Seed: FVLWAHGFEL
FKLWAHGFEI

SEQ ID NO: 19989 - protein, 10 aa, synthetic construct
  source 1..10: note = Seed: FVLWAHGFEL
FKLWAHGFEL

SEQ ID NO: 19990 - protein, 11 aa, synthetic construct
  source 1..11: note = Seed: FVLWAHGFELT
FKLWAHGFELA

SEQ ID NO: 19991 - protein, 11 aa, synthetic construct
  source 1..11: note = Seed: FVLWAHGFELT
FKLWAHGFELC

SEQ ID NO: 19992 - protein, 11 aa, synthetic construct
  source 1..11: note = Seed: FVLWAHGFELT
FKLWAHGFELD

SEQ ID NO: 19993 - protein, 11 aa, synthetic construct
  source 1..11: note = Seed: FVLWAHGFELT
FKLWAHGFELE

SEQ ID NO: 19994 - protein, 11 aa, synthetic construct
  source 1..11: note = Seed: FVLWAHGFELT
FKLWAHGFELF

SEQ ID NO: 19995 - protein, 11 aa, synthetic construct
  source 1..11: note = Seed: FVLWAHGFELT
FKLWAHGFELG

SEQ ID NO: 19996 - protein, 11 aa, synthetic construct
  source 1..11: note = Seed: FVLWAHGFELT
FKLWAHGFELH

SEQ ID NO: 19997 - protein, 11 aa, synthetic construct
  source 1..11: note = Seed: FVLWAHGFELT
FKLWAHGFELI

SEQ ID NO: 19998 - protein, 11 aa, synthetic construct
  source 1..11: note = Seed: FVLWAHGFELT
FKLWAHGFELK

SEQ ID NO: 19999 - protein, 11 aa, synthetic construct
  source 1..11: note = Seed: FVLWAHGFELT
FKLWAHGFELL

SEQ ID NO: 20000 - protein, 11 aa, synthetic construct
  source 1..11: note = Seed: FVLWAHGFELT
FKLWAHGFELM

SEQ ID NO: 20001 - protein, 11 aa, synthetic construct
  source 1..11: note = Seed: FVLWAHGFELT
FKLWAHGFELN

SEQ ID NO: 20002 - protein, 11 aa, synthetic construct
  source 1..11: note = Seed: FVLWAHGFELT
FKLWAHGFELP

SEQ ID NO: 20003 - protein, 11 aa, synthetic construct
  source 1..11: note = Seed: FVLWAHGFELT
FKLWAHGFELQ

SEQ ID NO: 20004 - protein, 11 aa, synthetic construct
  source 1..11: note = Seed: FVLWAHGFELT
FKLWAHGFELR

SEQ ID NO: 20005 - protein, 11 aa, synthetic construct
  source 1..11: note = Seed: FVLWAHGFELT
FKLWAHGFELS

SEQ ID NO: 20006 - protein, 11 aa, synthetic construct
  source 1..11: note = Seed: FVLWAHGFELT
FKLWAHGFELT

SEQ ID NO: 20007 - protein, 11 aa, synthetic construct
  source 1..11: note = Seed: FVLWAHGFELT
FKLWAHGFELV

SEQ ID NO: 20008 - protein, 11 aa, synthetic construct
  source 1..11: note = Seed: FVLWAHGFELT
FKLWAHGFELW

SEQ ID NO: 20009 - protein, 11 aa, synthetic construct
  source 1..11: note = Seed: FVLWAHGFELT
FKLWAHGFELY

SEQ ID NO: 20010 - protein, 10 aa, synthetic construct
  source 1..10: note = Seed: FVLWAHGFEL
FKLWAHGFEM

SEQ ID NO: 20011 - protein, 10 aa, synthetic construct
  source 1..10: note = Seed: FVLWAHGFEL
FKLWAHGFES

SEQ ID NO: 20012 - protein, 10 aa, synthetic construct
  source 1..10: note = Seed: FVLWAHGFEL
FKLWAHGFET

SEQ ID NO: 20013 - protein, 10 aa, synthetic construct
  source 1..10: note = Seed: FVLWAHGFEL
FKLWAHGFEV

SEQ ID NO: 20014 - protein, 9 aa, synthetic construct
  source 1..9: note = Seed: FSLWVYKQF
FKLWVYKQY

SEQ ID NO: 20015 - protein, 10 aa, synthetic construct
  source 1..10: note = Seed: FSMMILSDDA
FKMMILSDDL

SEQ ID NO: 20016 - protein, 10 aa, synthetic construct
  source 1..10: note = Seed: FSMMILSDDA
FKMMILSDDV

SEQ ID NO: 20017 - protein, 10 aa, synthetic construct
  source 1..10: note = Seed: FKMNYQVNGY
FKMNYQVNGF

SEQ ID NO: 20018 - protein, 9 aa, synthetic construct
  source 1..9: note = Seed: FAMQMAYRF
FKMQMAYRF

SEQ ID NO: 20019 - protein, 9 aa, synthetic construct
  source 1..9: note = Seed: FAMQMAYRF
FKMQMAYRL

SEQ ID NO: 20020 - protein, 9 aa, synthetic construct
  source 1..9: note = Seed: FAMQMAYRF
FKMQMAYRM

SEQ ID NO: 20021 - protein, 9 aa, synthetic construct
  source 1..9: note = Seed: FAMQMAYRF
FKMQMAYRY

SEQ ID NO: 20022 - protein, 8 aa, synthetic construct
  source 1..8: note = Seed: FDMSKFPL
FKMSKFPL

SEQ ID NO: 20023 - protein, 10 aa, synthetic construct
  source 1..10: note = Seed: FDMSKFPLKL
FKMSKFPLKA

SEQ ID NO: 20024 - protein, 10 aa, synthetic construct
  source 1..10: note = Seed: FDMSKFPLKL
FKMSKFPLKI

SEQ ID NO: 20025 - protein, 10 aa, synthetic construct
  source 1..10: note = Seed: FDMSKFPLKL
FKMSKFPLKL

SEQ ID NO: 20026 - protein, 10 aa, synthetic construct
  source 1..10: note = Seed: FDMSKFPLKL
FKMSKFPLKV

SEQ ID NO: 20027 - protein, 10 aa, synthetic construct
  source 1..10: note = Seed: FNMVYMPASW
FKMVYMPASF

SEQ ID NO: 20028 - protein, 10 aa, synthetic construct
  source 1..10: note = Seed: FNMVYMPASW
FKMVYMPASM

SEQ ID NO: 20029 - protein, 10 aa, synthetic construct
  source 1..10: note = Seed: FNMVYMPASW
FKMVYMPASY

SEQ ID NO: 20030 - protein, 9 aa, synthetic construct
  source 1..9: note = Seed: FENKTTLPV
FKNKTTLPF

SEQ ID NO: 20031 - protein, 9 aa, synthetic construct
  source 1..9: note = Seed: FENKTTLPV
FKNKTTLPH

SEQ ID NO: 20032 - protein, 9 aa, synthetic construct
  source 1..9: note = Seed: FENKTTLPV
FKNKTTLPI

SEQ ID NO: 20033 - protein, 9 aa, synthetic construct
  source 1..9: note = Seed: FENKTTLPV
FKNKTTLPL

SEQ ID NO: 20034 - protein, 9 aa, synthetic construct
  source 1..9: note = Seed: FENKTTLPV
FKNKTTLPM

SEQ ID NO: 20035 - protein, 9 aa, synthetic construct
  source 1..9: note = Seed: FENKTTLPV
FKNKTTLPV

SEQ ID NO: 20036 - protein, 9 aa, synthetic construct
  source 1..9: note = Seed: FENKTTLPV
FKNKTTLPW

SEQ ID NO: 20037 - protein, 9 aa, synthetic construct
  source 1..9: note = Seed: FENKTTLPV
FKNKTTLPY

SEQ ID NO: 20038 - protein, 9 aa, synthetic construct
  source 1..9: note = Seed: FVNLKQLPF
FKNLKQLPF

SEQ ID NO: 20039 - protein, 9 aa, synthetic construct
  source 1..9: note = Seed: FVNLKQLPF
FKNLKQLPL

SEQ ID NO: 20040 - protein, 9 aa, synthetic construct
  source 1..9: note = Seed: FVNLKQLPF
FKNLKQLPM

SEQ ID NO: 20041 - protein, 9 aa, synthetic construct
  source 1..9: note = Seed: FVNLKQLPF
FKNLKQLPY

SEQ ID NO: 20042 - protein, 9 aa, synthetic construct
  source 1..9: note = Seed: FTNVYADSF
FKNVYADSF

SEQ ID NO: 20043 - protein, 11 aa, synthetic construct
  source 1..11: note = Seed: FTNVYADSFVI
FKNVYADSFVV

SEQ ID NO: 20044 - protein, 9 aa, synthetic construct
  source 1..9: note = Seed: FTNVYADSF
FKNVYADSL

SEQ ID NO: 20045 - protein, 9 aa, synthetic construct
  source 1..9: note = Seed: FTNVYADSF
FKNVYADSM

SEQ ID NO: 20046 - protein, 9 aa, synthetic construct
  source 1..9: note = Seed: FTNVYADSF
FKNVYADSY

SEQ ID NO: 20047 - protein, 10 aa, synthetic construct
  source 1..10: note = Seed: FTPFDVVRQC
FKPFDVVRQA

SEQ ID NO: 20048 - protein, 10 aa, synthetic construct
  source 1..10: note = Seed: FLPFFSNVTW
FKPFFSNVTF

SEQ ID NO: 20049 - protein, 10 aa, synthetic construct
  source 1..10: note = Seed: FLPFFSNVTW
FKPFFSNVTH

SEQ ID NO: 20050 - protein, 10 aa, synthetic construct
  source 1..10: note = Seed: FLPFFSNVTW
FKPFFSNVTL

SEQ ID NO: 20051 - protein, 10 aa, synthetic construct
  source 1..10: note = Seed: FLPFFSNVTW
FKPFFSNVTM

SEQ ID NO: 20052 - protein, 10 aa, synthetic construct
  source 1..10: note = Seed: FLPFFSNVTW
FKPFFSNVTW

SEQ ID NO: 20053 - protein, 10 aa, synthetic construct
  source 1..10: note = Seed: FLPFFSNVTW
FKPFFSNVTY

SEQ ID NO: 20054 - protein, 10 aa, synthetic construct
  source 1..10: note = Seed: FTPLVPFWIT
FKPLVPFWIA

SEQ ID NO: 20055 - protein, 11 aa, synthetic construct
  source 1..11: note = Seed: FTPLVPFWITI
FKPLVPFWITV

SEQ ID NO: 20056 - protein, 10 aa, synthetic construct
  source 1..10: note = Seed: FLPRVFSAVG
FKPRVFSAVF

SEQ ID NO: 20057 - protein, 10 aa, synthetic construct
  source 1..10: note = Seed: FLPRVFSAVG
FKPRVFSAVI

SEQ ID NO: 20058 - protein, 10 aa, synthetic construct
  source 1..10: note = Seed: FLPRVFSAVG
FKPRVFSAVL

SEQ ID NO: 20059 - protein, 10 aa, synthetic construct
  source 1..10: note = Seed: FLPRVFSAVG
FKPRVFSAVM

SEQ ID NO: 20060 - protein, 10 aa, synthetic construct
  source 1..10: note = Seed: FLPRVFSAVG
FKPRVFSAVV

SEQ ID NO: 20061 - protein, 9 aa, synthetic construct
  source 1..9: note = Seed: FAPSASAFF
FKPSASAFF

SEQ ID NO: 20062 - protein, 9 aa, synthetic construct
  source 1..9: note = Seed: FAPSASAFF
FKPSASAFY

SEQ ID NO: 20063 - protein, 11 aa, synthetic construct
  source 1..11: note = Seed: FPQSAPHGVVF
FKQSAPHGVVF

SEQ ID NO: 20064 - protein, 11 aa, synthetic construct
  source 1..11: note = Seed: FPQSAPHGVVF
FKQSAPHGVVL

SEQ ID NO: 20065 - protein, 11 aa, synthetic construct
  source 1..11: note = Seed: FPQSAPHGVVF
FKQSAPHGVVM

SEQ ID NO: 20066 - protein, 11 aa, synthetic construct
  source 1..11: note = Seed: FPQSAPHGVVF
FKQSAPHGVVW

SEQ ID NO: 20067 - protein, 11 aa, synthetic construct
  source 1..11: note = Seed: FPQSAPHGVVF
FKQSAPHGVVY

SEQ ID NO: 20068 - protein, 10 aa, synthetic construct
  source 1..10: note = Seed: FTQSRNLQEF
FKQSRNLQEF

SEQ ID NO: 20069 - protein, 10 aa, synthetic construct
  source 1..10: note = Seed: FTQSRNLQEF
FKQSRNLQEY

SEQ ID NO: 20070 - protein, 10 aa, synthetic construct
  source 1..10: note = Seed: FTRFFYVLGL
FKRFFYVLGF

SEQ ID NO: 20071 - protein, 10 aa, synthetic construct
  source 1..10: note = Seed: FTRFFYVLGL
FKRFFYVLGK

SEQ ID NO: 20072 - protein, 10 aa, synthetic construct
  source 1..10: note = Seed: FTRFFYVLGL
FKRFFYVLGL

SEQ ID NO: 20073 - protein, 10 aa, synthetic construct
  source 1..10: note = Seed: FTRFFYVLGL
FKRFFYVLGM

SEQ ID NO: 20074 - protein, 9 aa, synthetic construct
  source 1..9: note = Seed: FISAARQGF
FKSAARQGF

SEQ ID NO: 20075 - protein, 9 aa, synthetic construct
  source 1..9: note = Seed: FISAARQGF
FKSAARQGM

SEQ ID NO: 20076 - protein, 9 aa, synthetic construct
  source 1..9: note = Seed: FISAARQGF
FKSAARQGY

SEQ ID NO: 20077 - protein, 9 aa, synthetic construct
  source 1..9: note = Seed: FQSAVKRTI
FKSAVKRTF

SEQ ID NO: 20078 - protein, 9 aa, synthetic construct
  source 1..9: note = Seed: FQSAVKRTI
FKSAVKRTM

SEQ ID NO: 20079 - protein, 9 aa, synthetic construct
  source 1..9: note = Seed: FQSAVKRTI
FKSAVKRTY

SEQ ID NO: 20080 - protein, 9 aa, synthetic construct
  source 1..9: note = Seed: FTSDYYQLY
FKSDYYQLF

SEQ ID NO: 20081 - protein, 9 aa, synthetic construct
  source 1..9: note = Seed: FTSDYYQLY
FKSDYYQLM

SEQ ID NO: 20082 - protein, 9 aa, synthetic construct
  source 1..9: note = Seed: FTSDYYQLY
FKSDYYQLY

SEQ ID NO: 20083 - protein, 10 aa, synthetic construct
  source 1..10: note = Seed: FTSDYYQLYS
FKSDYYQLYF

SEQ ID NO: 20084 - protein, 10 aa, synthetic construct
  source 1..10: note = Seed: FTSDYYQLYS
FKSDYYQLYM

SEQ ID NO: 20085 - protein, 10 aa, synthetic construct
  source 1..10: note = Seed: FTSDYYQLYS
FKSDYYQLYY

SEQ ID NO: 20086 - protein, 9 aa, synthetic construct
  source 1..9: note = Seed: FVSLAIDAY
FKSLAIDAF

SEQ ID NO: 20087 - protein, 9 aa, synthetic construct
  source 1..9: note = Seed: FVSLAIDAY
FKSLAIDAM

SEQ ID NO: 20088 - protein, 9 aa, synthetic construct
  source 1..9: note = Seed: FVSLAIDAY
FKSLAIDAY

SEQ ID NO: 20089 - protein, 9 aa, synthetic construct
  source 1..9: note = Seed: FVSNGTHWF
FKSNGTHWF

SEQ ID NO: 20090 - protein, 9 aa, synthetic construct
  source 1..9: note = Seed: FVSNGTHWF
FKSNGTHWY

SEQ ID NO: 20091 - protein, 10 aa, synthetic construct
  source 1..10: note = Seed: FSSNVANYQK
FKSNVANYQR

SEQ ID NO: 20092 - protein, 11 aa, synthetic construct
  source 1..11: note = Seed: FISPYNSQNAV
FKSPYNSQNAA

SEQ ID NO: 20093 - protein, 11 aa, synthetic construct
  source 1..11: note = Seed: FISPYNSQNAV
FKSPYNSQNAL

SEQ ID NO: 20094 - protein, 11 aa, synthetic construct
  source 1..11: note = Seed: FISPYNSQNAV
FKSPYNSQNAM

SEQ ID NO: 20095 - protein, 9 aa, synthetic construct
  source 1..9: note = Seed: FFSYFAVHF
FKSYFAVHF

SEQ ID NO: 20096 - protein, 10 aa, synthetic construct
  source 1..10: note = Seed: FFSYFAVHFI
FKSYFAVHFA

SEQ ID NO: 20097 - protein, 10 aa, synthetic construct
  source 1..10: note = Seed: FFSYFAVHFI
FKSYFAVHFF

SEQ ID NO: 20098 - protein, 10 aa, synthetic construct
  source 1..10: note = Seed: FFSYFAVHFI
FKSYFAVHFI

SEQ ID NO: 20099 - protein, 10 aa, synthetic construct
  source 1..10: note = Seed: FFSYFAVHFI
FKSYFAVHFV

SEQ ID NO: 20100 - protein, 10 aa, synthetic construct
  source 1..10: note = Seed: FFSYFAVHFI
FKSYFAVHFW

SEQ ID NO: 20101 - protein, 10 aa, synthetic construct
  source 1..10: note = Seed: FFSYFAVHFI
FKSYFAVHFY

SEQ ID NO: 20102 - protein, 9 aa, synthetic construct
  source 1..9: note = Seed: FFSYFAVHF
FKSYFAVHL

SEQ ID NO: 20103 - protein, 9 aa, synthetic construct
  source 1..9: note = Seed: FFSYFAVHF
FKSYFAVHM

SEQ ID NO: 20104 - protein, 9 aa, synthetic construct
  source 1..9: note = Seed: FFSYFAVHF
FKSYFAVHY

SEQ ID NO: 20105 - protein, 9 aa, synthetic construct
  source 1..9: note = Seed: FVTHSKGLY
FKTHSKGLF

SEQ ID NO: 20106 - protein, 9 aa, synthetic construct
  source 1..9: note = Seed: FVTHSKGLY
FKTHSKGLY

SEQ ID NO: 20107 - protein, 10 aa, synthetic construct
  source 1..10: note = Seed: FVTHSKGLYR
FKTHSKGLYR

SEQ ID NO: 20108 - protein, 9 aa, synthetic construct
  source 1..9: note = Seed: FQTRAGCLI
FKTRAGCLF

SEQ ID NO: 20109 - protein, 9 aa, synthetic construct
  source 1..9: note = Seed: FQTRAGCLI
FKTRAGCLM

SEQ ID NO: 20110 - protein, 9 aa, synthetic construct
  source 1..9: note = Seed: FQTRAGCLI
FKTRAGCLY

SEQ ID NO: 20111 - protein, 10 aa, synthetic construct
  source 1..10: note = Seed: FDTYNLWNTF
FKTYNLWNTF

SEQ ID NO: 20112 - protein, 10 aa, synthetic construct
  source 1..10: note = Seed: FDTYNLWNTF
FKTYNLWNTM

SEQ ID NO: 20113 - protein, 10 aa, synthetic construct
  source 1..10: note = Seed: FDTYNLWNTF
FKTYNLWNTW

SEQ ID NO: 20114 - protein, 10 aa, synthetic construct
  source 1..10: note = Seed: FDTYNLWNTF
FKTYNLWNTY

SEQ ID NO: 20115 - protein, 9 aa, synthetic construct
  source 1..9: note = Seed: FAVDAAKAY
FKVDAAKAF

SEQ ID NO: 20116 - protein, 9 aa, synthetic construct
  source 1..9: note = Seed: FAVDAAKAY
FKVDAAKAM

SEQ ID NO: 20117 - protein, 9 aa, synthetic construct
  source 1..9: note = Seed: FAVDAAKAY
FKVDAAKAY

SEQ ID NO: 20118 - protein, 10 aa, synthetic construct
  source 1..10: note = Seed: FAVDAAKAYK
FKVDAAKAYR

SEQ ID NO: 20119 - protein, 9 aa, synthetic construct
  source 1..9: note = Seed: FNVLFSTVF
FKVLFSTVF

SEQ ID NO: 20120 - protein, 9 aa, synthetic construct
  source 1..9: note = Seed: FNVLFSTVF
FKVLFSTVI

SEQ ID NO: 20121 - protein, 9 aa, synthetic construct
  source 1..9: note = Seed: FNVLFSTVF
FKVLFSTVL

SEQ ID NO: 20122 - protein, 9 aa, synthetic construct
  source 1..9: note = Seed: FNVLFSTVF
FKVLFSTVM

SEQ ID NO: 20123 - protein, 9 aa, synthetic construct
  source 1..9: note = Seed: FNVLFSTVF
FKVLFSTVV

SEQ ID NO: 20124 - protein, 9 aa, synthetic construct
  source 1..9: note = Seed: FNVLFSTVF
FKVLFSTVW

SEQ ID NO: 20125 - protein, 9 aa, synthetic construct
  source 1..9: note = Seed: FNVLFSTVF
FKVLFSTVY

SEQ ID NO: 20126 - protein, 10 aa, synthetic construct
  source 1..10: note = Seed: FKVSIWNLDY
FKVSIWNLDF

SEQ ID NO: 20127 - protein, 9 aa, synthetic construct
  source 1..9: note = Seed: FVVSTGYHF
FKVSTGYHF

SEQ ID NO: 20128 - protein, 10 aa, synthetic construct
  source 1..10: note = Seed: FVVSTGYHFR
FKVSTGYHFK

SEQ ID NO: 20129 - protein, 10 aa, synthetic construct
  source 1..10: note = Seed: FVVSTGYHFR
FKVSTGYHFR

SEQ ID NO: 20130 - protein, 9 aa, synthetic construct
  source 1..9: note = Seed: FVVSTGYHF
FKVSTGYHL

SEQ ID NO: 20131 - protein, 9 aa, synthetic construct
  source 1..9: note = Seed: FVVSTGYHF
FKVSTGYHM

SEQ ID NO: 20132 - protein, 9 aa, synthetic construct
  source 1..9: note = Seed: FVVSTGYHF
FKVSTGYHY

SEQ ID NO: 20133 - protein, 10 aa, synthetic construct
  source 1..10: note = Seed: FYWFFSNYLK
FKWFFSNYLF

SEQ ID NO: 20134 - protein, 10 aa, synthetic construct
  source 1..10: note = Seed: FYWFFSNYLK
FKWFFSNYLK

SEQ ID NO: 20135 - protein, 10 aa, synthetic construct
  source 1..10: note = Seed: FYWFFSNYLK
FKWFFSNYLR

SEQ ID NO: 20136 - protein, 10 aa, synthetic construct
  source 1..10: note = Seed: FYWFFSNYLK
FKWFFSNYLY

SEQ ID NO: 20137 - protein, 10 aa, synthetic construct
  source 1..10: note = Seed: FLWLLWPVTL
FKWLLWPVTF

SEQ ID NO: 20138 - protein, 11 aa, synthetic construct
  source 1..11: note = Seed: FLWLLWPVTLA
FKWLLWPVTLI

SEQ ID NO: 20139 - protein, 11 aa, synthetic construct
  source 1..11: note = Seed: FLWLLWPVTLA
FKWLLWPVTLL

SEQ ID NO: 20140 - protein, 11 aa, synthetic construct
  source 1..11: note = Seed: FLWLLWPVTLA
FKWLLWPVTLV

SEQ ID NO: 20141 - protein, 8 aa, synthetic construct
  source 1..8: note = Seed: FSYFAVHF
FKYFAVHF

SEQ ID NO: 20142 - protein, 9 aa, synthetic construct
  source 1..9: note = Seed: FSYFAVHFI
FKYFAVHFF

SEQ ID NO: 20143 - protein, 9 aa, synthetic construct
  source 1..9: note = Seed: FSYFAVHFI
FKYFAVHFL

SEQ ID NO: 20144 - protein, 9 aa, synthetic construct
  source 1..9: note = Seed: FSYFAVHFI
FKYFAVHFM

SEQ ID NO: 20145 - protein, 9 aa, synthetic construct
  source 1..9: note = Seed: FSYFAVHFI
FKYFAVHFY

SEQ ID NO: 20146 - protein, 8 aa, synthetic construct
  source 1..8: note = Seed: FSYFAVHF
FKYFAVHY

SEQ ID NO: 20147 - protein, 9 aa, synthetic construct
  source 1..9: note = Seed: FNYLKSPNF
FKYLKSPNF

SEQ ID NO: 20148 - protein, 9 aa, synthetic construct
  source 1..9: note = Seed: FNYLKSPNF
FKYLKSPNL

SEQ ID NO: 20149 - protein, 9 aa, synthetic construct
  source 1..9: note = Seed: FNYLKSPNF
FKYLKSPNM

SEQ ID NO: 20150 - protein, 9 aa, synthetic construct
  source 1..9: note = Seed: FNYLKSPNF
FKYLKSPNY

SEQ ID NO: 20151 - protein, 9 aa, synthetic construct
  source 1..9: note = Seed: FCYMHHMEL
FKYMHHMEA

SEQ ID NO: 20152 - protein, 9 aa, synthetic construct
  source 1..9: note = Seed: FCYMHHMEL
FKYMHHMEF

SEQ ID NO: 20153 - protein, 9 aa, synthetic construct
  source 1..9: note = Seed: FCYMHHMEL
FKYMHHMEH

SEQ ID NO: 20154 - protein, 9 aa, synthetic construct
  source 1..9: note = Seed: FCYMHHMEL
FKYMHHMEI

SEQ ID NO: 20155 - protein, 9 aa, synthetic construct
  source 1..9: note = Seed: FCYMHHMEL
FKYMHHMEL

SEQ ID NO: 20156 - protein, 9 aa, synthetic construct
  source 1..9: note = Seed: FCYMHHMEL
FKYMHHMEM

SEQ ID NO: 20157 - protein, 9 aa, synthetic construct
  source 1..9: note = Seed: FCYMHHMEL
FKYMHHMEV

SEQ ID NO: 20158 - protein, 9 aa, synthetic construct
  source 1..9: note = Seed: FCYMHHMEL
FKYMHHMEW

SEQ ID NO: 20159 - protein, 9 aa, synthetic construct
  source 1..9: note = Seed: FCYMHHMEL
FKYMHHMEY

SEQ ID NO: 20160 - protein, 9 aa, synthetic construct
  source 1..9: note = Seed: FRYMNSQGL
FKYMNSQGF

SEQ ID NO: 20161 - protein, 9 aa, synthetic construct
  source 1..9: note = Seed: FRYMNSQGL
FKYMNSQGI

SEQ ID NO: 20162 - protein, 9 aa, synthetic construct
  source 1..9: note = Seed: FRYMNSQGL
FKYMNSQGL

SEQ ID NO: 20163 - protein, 9 aa, synthetic construct
  source 1..9: note = Seed: FRYMNSQGL
FKYMNSQGM

SEQ ID NO: 20164 - protein, 9 aa, synthetic construct
  source 1..9: note = Seed: FRYMNSQGL
FKYMNSQGW

SEQ ID NO: 20165 - protein, 9 aa, synthetic construct
  source 1..9: note = Seed: FRYMNSQGL
FKYMNSQGY

SEQ ID NO: 20166 - protein, 8 aa, synthetic construct
  source 1..8: note = Seed: FEYVSQPF
FKYVSQPF

SEQ ID NO: 20167 - protein, 8 aa, synthetic construct
  source 1..8: note = Seed: FEYVSQPF
FKYVSQPM

SEQ ID NO: 20168 - protein, 8 aa, synthetic construct
  source 1..8: note = Seed: FEYVSQPF
FKYVSQPY

SEQ ID NO: 20169 - protein, 10 aa, synthetic construct
  source 1..10: note = Seed: FYYVWKSYVH
FKYVWKSYVM

SEQ ID NO: 20170 - protein, 10 aa, synthetic construct
  source 1..10: note = Seed: FYYVWKSYVH
FKYVWKSYVY

SEQ ID NO: 20171 - protein, 8 aa, synthetic construct
  source 1..8: note = Seed: FVAAIFYL
FLAAIFYA

SEQ ID NO: 20172 - protein, 8 aa, synthetic construct
  source 1..8: note = Seed: FVAAIFYL
FLAAIFYI

SEQ ID NO: 20173 - protein, 8 aa, synthetic construct
  source 1..8: note = Seed: FVAAIFYL
FLAAIFYL

SEQ ID NO: 20174 - protein, 9 aa, synthetic construct
  source 1..9: note = Seed: FVAAIFYLI
FLAAIFYLA

SEQ ID NO: 20175 - protein, 9 aa, synthetic construct
  source 1..9: note = Seed: FVAAIFYLI
FLAAIFYLC

SEQ ID NO: 20176 - protein, 9 aa, synthetic construct
  source 1..9: note = Seed: FVAAIFYLI
FLAAIFYLF

SEQ ID NO: 20177 - protein, 9 aa, synthetic construct
  source 1..9: note = Seed: FVAAIFYLI
FLAAIFYLG

SEQ ID NO: 20178 - protein, 9 aa, synthetic construct
  source 1..9: note = Seed: FVAAIFYLI
FLAAIFYLI

SEQ ID NO: 20179 - protein, 9 aa, synthetic construct
  source 1..9: note = Seed: FVAAIFYLI
FLAAIFYLK

SEQ ID NO: 20180 - protein, 9 aa, synthetic construct
  source 1..9: note = Seed: FVAAIFYLI
FLAAIFYLL

SEQ ID NO: 20181 - protein, 9 aa, synthetic construct
  source 1..9: note = Seed: FVAAIFYLI
FLAAIFYLM

SEQ ID NO: 20182 - protein, 9 aa, synthetic construct
  source 1..9: note = Seed: FVAAIFYLI
FLAAIFYLP

SEQ ID NO: 20183 - protein, 9 aa, synthetic construct
  source 1..9: note = Seed: FVAAIFYLI
FLAAIFYLR

SEQ ID NO: 20184 - protein, 9 aa, synthetic construct
  source 1..9: note = Seed: FVAAIFYLI
FLAAIFYLS

SEQ ID NO: 20185 - protein, 9 aa, synthetic construct
  source 1..9: note = Seed: FVAAIFYLI
FLAAIFYLT

SEQ ID NO: 20186 - protein, 9 aa, synthetic construct
  source 1..9: note = Seed: FVAAIFYLI
FLAAIFYLV

SEQ ID NO: 20187 - protein, 9 aa, synthetic construct
  source 1..9: note = Seed: FVAAIFYLI
FLAAIFYLY

SEQ ID NO: 20188 - protein, 8 aa, synthetic construct
  source 1..8: note = Seed: FVAAIFYL
FLAAIFYM

SEQ ID NO: 20189 - protein, 8 aa, synthetic construct
  source 1..8: note = Seed: FVAAIFYL
FLAAIFYT

SEQ ID NO: 20190 - protein, 8 aa, synthetic construct
  source 1..8: note = Seed: FVAAIFYL
FLAAIFYV

SEQ ID NO: 20191 - protein, 10 aa, synthetic construct
  source 1..10: note = Seed: FCAFAVDAAK
FLAFAVDAAK

SEQ ID NO: 20192 - protein, 10 aa, synthetic construct
  source 1..10: note = Seed: FCAFAVDAAK
FLAFAVDAAR

SEQ ID NO: 20193 - protein, 8 aa, synthetic construct
  source 1..8: note = Seed: FLAFVVFL
FLAFVVFI

SEQ ID NO: 20194 - protein, 9 aa, synthetic construct
  source 1..9: note = Seed: FLAFVVFLL
FLAFVVFLA

SEQ ID NO: 20195 - protein, 9 aa, synthetic construct
  source 1..9: note = Seed: FLAFVVFLL
FLAFVVFLC

SEQ ID NO: 20196 - protein, 9 aa, synthetic construct
  source 1..9: note = Seed: FLAFVVFLL
FLAFVVFLG

SEQ ID NO: 20197 - protein, 9 aa, synthetic construct
  source 1..9: note = Seed: FLAFVVFLL
FLAFVVFLI

SEQ ID NO: 20198 - protein, 10 aa, synthetic construct
  source 1..10: note = Seed: FLAFVVFLLV
FLAFVVFLLA

SEQ ID NO: 20199 - protein, 10 aa, synthetic construct
  source 1..10: note = Seed: FLAFVVFLLV
FLAFVVFLLC

SEQ ID NO: 20200 - protein, 10 aa, synthetic construct
  source 1..10: note = Seed: FLAFVVFLLV
FLAFVVFLLD

SEQ ID NO: 20201 - protein, 10 aa, synthetic construct
  source 1..10: note = Seed: FLAFVVFLLV
FLAFVVFLLE

SEQ ID NO: 20202 - protein, 10 aa, synthetic construct
  source 1..10: note = Seed: FLAFVVFLLV
FLAFVVFLLF

SEQ ID NO: 20203 - protein, 10 aa, synthetic construct
  source 1..10: note = Seed: FLAFVVFLLV
FLAFVVFLLG

SEQ ID NO: 20204 - protein, 10 aa, synthetic construct
  source 1..10: note = Seed: FLAFVVFLLV
FLAFVVFLLH

SEQ ID NO: 20205 - protein, 10 aa, synthetic construct
  source 1..10: note = Seed: FLAFVVFLLV
FLAFVVFLLI

SEQ ID NO: 20206 - protein, 10 aa, synthetic construct
  source 1..10: note = Seed: FLAFVVFLLV
FLAFVVFLLK

SEQ ID NO: 20207 - protein, 10 aa, synthetic construct
  source 1..10: note = Seed: FLAFVVFLLV
FLAFVVFLLL

SEQ ID NO: 20208 - protein, 10 aa, synthetic construct
  source 1..10: note = Seed: FLAFVVFLLV
FLAFVVFLLM

SEQ ID NO: 20209 - protein, 10 aa, synthetic construct
  source 1..10: note = Seed: FLAFVVFLLV
FLAFVVFLLN

SEQ ID NO: 20210 - protein, 10 aa, synthetic construct
  source 1..10: note = Seed: FLAFVVFLLV
FLAFVVFLLP

SEQ ID NO: 20211 - protein, 10 aa, synthetic construct
  source 1..10: note = Seed: FLAFVVFLLV
FLAFVVFLLQ

SEQ ID NO: 20212 - protein, 10 aa, synthetic construct
  source 1..10: note = Seed: FLAFVVFLLV
FLAFVVFLLR

SEQ ID NO: 20213 - protein, 10 aa, synthetic construct
  source 1..10: note = Seed: FLAFVVFLLV
FLAFVVFLLS

SEQ ID NO: 20214 - protein, 10 aa, synthetic construct
  source 1..10: note = Seed: FLAFVVFLLV
FLAFVVFLLT

SEQ ID NO: 20215 - protein, 10 aa, synthetic construct
  source 1..10: note = Seed: FLAFVVFLLV
FLAFVVFLLW

SEQ ID NO: 20216 - protein, 10 aa, synthetic construct
  source 1..10: note = Seed: FLAFVVFLLV
FLAFVVFLLY

SEQ ID NO: 20217 - protein, 9 aa, synthetic construct
  source 1..9: note = Seed: FLAFVVFLL
FLAFVVFLM

SEQ ID NO: 20218 - protein, 9 aa, synthetic construct
  source 1..9: note = Seed: FLAFVVFLL
FLAFVVFLS

SEQ ID NO: 20219 - protein, 9 aa, synthetic construct
  source 1..9: note = Seed: FLAFVVFLL
FLAFVVFLT

SEQ ID NO: 20220 - protein, 9 aa, synthetic construct
  source 1..9: note = Seed: FLAFVVFLL
FLAFVVFLV

SEQ ID NO: 20221 - protein, 8 aa, synthetic construct
  source 1..8: note = Seed: FLAFVVFL
FLAFVVFV

SEQ ID NO: 20222 - protein, 9 aa, synthetic construct
  source 1..9: note = Seed: FGAGAALQI
FLAGAALQL

SEQ ID NO: 20223 - protein, 9 aa, synthetic construct
  source 1..9: note = Seed: FGAGAALQI
FLAGAALQM

SEQ ID NO: 20224 - protein, 8 aa, synthetic construct
  source 1..8: note = Seed: FIAGLIAI
FLAGLIAA

SEQ ID NO: 20225 - protein, 8 aa, synthetic construct
  source 1..8: note = Seed: FIAGLIAI
FLAGLIAI

SEQ ID NO: 20226 - protein, 9 aa, synthetic construct
  source 1..9: note = Seed: FIAGLIAIV
FLAGLIAIA

SEQ ID NO: 20227 - protein, 9 aa, synthetic construct
  source 1..9: note = Seed: FIAGLIAIV
FLAGLIAIC

SEQ ID NO: 20228 - protein, 9 aa, synthetic construct
  source 1..9: note = Seed: FIAGLIAIV
FLAGLIAIF

SEQ ID NO: 20229 - protein, 9 aa, synthetic construct
  source 1..9: note = Seed: FIAGLIAIV
FLAGLIAIG

SEQ ID NO: 20230 - protein, 9 aa, synthetic construct
  source 1..9: note = Seed: FIAGLIAIV
FLAGLIAII

SEQ ID NO: 20231 - protein, 9 aa, synthetic construct
  source 1..9: note = Seed: FIAGLIAIV
FLAGLIAIL

SEQ ID NO: 20232 - protein, 9 aa, synthetic construct
  source 1..9: note = Seed: FIAGLIAIV
FLAGLIAIM

SEQ ID NO: 20233 - protein, 9 aa, synthetic construct
  source 1..9: note = Seed: FIAGLIAIV
FLAGLIAIS

SEQ ID NO: 20234 - protein, 9 aa, synthetic construct
  source 1..9: note = Seed: FIAGLIAIV
FLAGLIAIT

SEQ ID NO: 20235 - protein, 9 aa, synthetic construct
  source 1..9: note = Seed: FIAGLIAIV
FLAGLIAIV

SEQ ID NO: 20236 - protein, 8 aa, synthetic construct
  source 1..8: note = Seed: FIAGLIAI
FLAGLIAL

SEQ ID NO: 20237 - protein, 8 aa, synthetic construct
  source 1..8: note = Seed: FIAGLIAI
FLAGLIAV

SEQ ID NO: 20238 - protein, 8 aa, synthetic construct
  source 1..8: note = Seed: FLAHIQWM
FLAHIQWA

SEQ ID NO: 20239 - protein, 8 aa, synthetic construct
  source 1..8: note = Seed: FLAHIQWM
FLAHIQWI

SEQ ID NO: 20240 - protein, 8 aa, synthetic construct
  source 1..8: note = Seed: FLAHIQWM
FLAHIQWL

SEQ ID NO: 20241 - protein, 9 aa, synthetic construct
  source 1..9: note = Seed: FLAHIQWMV
FLAHIQWMA

SEQ ID NO: 20242 - protein, 9 aa, synthetic construct
  source 1..9: note = Seed: FLAHIQWMV
FLAHIQWMC

SEQ ID NO: 20243 - protein, 9 aa, synthetic construct
  source 1..9: note = Seed: FLAHIQWMV
FLAHIQWMF

SEQ ID NO: 20244 - protein, 9 aa, synthetic construct
  source 1..9: note = Seed: FLAHIQWMV
FLAHIQWMG

SEQ ID NO: 20245 - protein, 9 aa, synthetic construct
  source 1..9: note = Seed: FLAHIQWMV
FLAHIQWMI

SEQ ID NO: 20246 - protein, 9 aa, synthetic construct
  source 1..9: note = Seed: FLAHIQWMV
FLAHIQWML

SEQ ID NO: 20247 - protein, 9 aa, synthetic construct
  source 1..9: note = Seed: FLAHIQWMV
FLAHIQWMM

SEQ ID NO: 20248 - protein, 9 aa, synthetic construct
  source 1..9: note = Seed: FLAHIQWMV
FLAHIQWMP

SEQ ID NO: 20249 - protein, 9 aa, synthetic construct
  source 1..9: note = Seed: FLAHIQWMV
FLAHIQWMR

SEQ ID NO: 20250 - protein, 9 aa, synthetic construct
  source 1..9: note = Seed: FLAHIQWMV
FLAHIQWMS

SEQ ID NO: 20251 - protein, 9 aa, synthetic construct
  source 1..9: note = Seed: FLAHIQWMV
FLAHIQWMT

SEQ ID NO: 20252 - protein, 8 aa, synthetic construct
  source 1..8: note = Seed: FLAHIQWM
FLAHIQWV

SEQ ID NO: 20253 - protein, 9 aa, synthetic construct
  source 1..9: note = Seed: FLALCADSI
FLALCADSA

SEQ ID NO: 20254 - protein, 10 aa, synthetic construct
  source 1..10: note = Seed: FLALCADSII
FLALCADSIA

SEQ ID NO: 20255 - protein, 11 aa, synthetic construct
  source 1..11: note = Seed: FLALCADSIII
FLALCADSIIL

SEQ ID NO: 20256 - protein, 11 aa, synthetic construct
  source 1..11: note = Seed: FLALCADSIII
FLALCADSIIV

SEQ ID NO: 20257 - protein, 10 aa, synthetic construct
  source 1..10: note = Seed: FLALCADSII
FLALCADSIL

SEQ ID NO: 20258 - protein, 10 aa, synthetic construct
  source 1..10: note = Seed: FLALCADSII
FLALCADSIM

SEQ ID NO: 20259 - protein, 10 aa, synthetic construct
  source 1..10: note = Seed: FLALCADSII
FLALCADSIV

SEQ ID NO: 20260 - protein, 9 aa, synthetic construct
  source 1..9: note = Seed: FLALCADSI
FLALCADSL

SEQ ID NO: 20261 - protein, 9 aa, synthetic construct
  source 1..9: note = Seed: FLALCADSI
FLALCADSM

SEQ ID NO: 20262 - protein, 9 aa, synthetic construct
  source 1..9: note = Seed: FLALCADSI
FLALCADST

SEQ ID NO: 20263 - protein, 9 aa, synthetic construct
  source 1..9: note = Seed: FLALCADSI
FLALCADSV

SEQ ID NO: 20264 - protein, 10 aa, synthetic construct
  source 1..10: note = Seed: FSALEPLVDL
FLALEPLVDI

SEQ ID NO: 20265 - protein, 10 aa, synthetic construct
  source 1..10: note = Seed: FSALEPLVDL
FLALEPLVDL

SEQ ID NO: 20266 - protein, 10 aa, synthetic construct
  source 1..10: note = Seed: FSALEPLVDL
FLALEPLVDV

SEQ ID NO: 20267 - protein, 9 aa, synthetic construct
  source 1..9: note = Seed: FTALTQHGK
FLALTQHGR

SEQ ID NO: 20268 - protein, 9 aa, synthetic construct
  source 1..9: note = Seed: FIASFRLFA
FLASFRLFA

SEQ ID NO: 20269 - protein, 10 aa, synthetic construct
  source 1..10: note = Seed: FIASFRLFAR
FLASFRLFAK

SEQ ID NO: 20270 - protein, 10 aa, synthetic construct
  source 1..10: note = Seed: FIASFRLFAR
FLASFRLFAR

SEQ ID NO: 20271 - protein, 9 aa, synthetic construct
  source 1..9: note = Seed: FIASFRLFA
FLASFRLFG

SEQ ID NO: 20272 - protein, 9 aa, synthetic construct
  source 1..9: note = Seed: FIASFRLFA
FLASFRLFI

SEQ ID NO: 20273 - protein, 9 aa, synthetic construct
  source 1..9: note = Seed: FIASFRLFA
FLASFRLFL

SEQ ID NO: 20274 - protein, 9 aa, synthetic construct
  source 1..9: note = Seed: FIASFRLFA
FLASFRLFM

SEQ ID NO: 20275 - protein, 9 aa, synthetic construct
  source 1..9: note = Seed: FIASFRLFA
FLASFRLFS

SEQ ID NO: 20276 - protein, 9 aa, synthetic construct
  source 1..9: note = Seed: FIASFRLFA
FLASFRLFT

SEQ ID NO: 20277 - protein, 9 aa, synthetic construct
  source 1..9: note = Seed: FIASFRLFA
FLASFRLFV

SEQ ID NO: 20278 - protein, 8 aa, synthetic construct
  source 1..8: note = Seed: FFASFYYV
FLASFYYA

SEQ ID NO: 20279 - protein, 8 aa, synthetic construct
  source 1..8: note = Seed: FFASFYYV
FLASFYYI

SEQ ID NO: 20280 - protein, 8 aa, synthetic construct
  source 1..8: note = Seed: FFASFYYV
FLASFYYL

SEQ ID NO: 20281 - protein, 8 aa, synthetic construct
  source 1..8: note = Seed: FFASFYYV
FLASFYYM

SEQ ID NO: 20282 - protein, 8 aa, synthetic construct
  source 1..8: note = Seed: FFASFYYV
FLASFYYT

SEQ ID NO: 20283 - protein, 8 aa, synthetic construct
  source 1..8: note = Seed: FFASFYYV
FLASFYYV

SEQ ID NO: 20284 - protein, 10 aa, synthetic construct
  source 1..10: note = Seed: FFASFYYVWK
FLASFYYVWK

SEQ ID NO: 20285 - protein, 10 aa, synthetic construct
  source 1..10: note = Seed: FFASFYYVWK
FLASFYYVWR

SEQ ID NO: 20286 - protein, 9 aa, synthetic construct
  source 1..9: note = Seed: FFASFYYVW
FLASFYYVY

SEQ ID NO: 20287 - protein, 9 aa, synthetic construct
  source 1..9: note = Seed: FNATRFASV
FLATRFASA

SEQ ID NO: 20288 - protein, 9 aa, synthetic construct
  source 1..9: note = Seed: FNATRFASV
FLATRFASC

SEQ ID NO: 20289 - protein, 9 aa, synthetic construct
  source 1..9: note = Seed: FNATRFASV
FLATRFASF

SEQ ID NO: 20290 - protein, 9 aa, synthetic construct
  source 1..9: note = Seed: FNATRFASV
FLATRFASG

SEQ ID NO: 20291 - protein, 9 aa, synthetic construct
  source 1..9: note = Seed: FNATRFASV
FLATRFASI

SEQ ID NO: 20292 - protein, 9 aa, synthetic construct
  source 1..9: note = Seed: FNATRFASV
FLATRFASL

SEQ ID NO: 20293 - protein, 9 aa, synthetic construct
  source 1..9: note = Seed: FNATRFASV
FLATRFASM

SEQ ID NO: 20294 - protein, 9 aa, synthetic construct
  source 1..9: note = Seed: FNATRFASV
FLATRFASP

SEQ ID NO: 20295 - protein, 9 aa, synthetic construct
  source 1..9: note = Seed: FNATRFASV
FLATRFASS

SEQ ID NO: 20296 - protein, 9 aa, synthetic construct
  source 1..9: note = Seed: FNATRFASV
FLATRFAST

SEQ ID NO: 20297 - protein, 9 aa, synthetic construct
  source 1..9: note = Seed: FNATRFASV
FLATRFASV

SEQ ID NO: 20298 - protein, 10 aa, synthetic construct
  source 1..10: note = Seed: FNATRFASVY
FLATRFASVF

SEQ ID NO: 20299 - protein, 10 aa, synthetic construct
  source 1..10: note = Seed: FNATRFASVY
FLATRFASVM

SEQ ID NO: 20300 - protein, 10 aa, synthetic construct
  source 1..10: note = Seed: FNATRFASVY
FLATRFASVY

SEQ ID NO: 20301 - protein, 9 aa, synthetic construct
  source 1..9: note = Seed: FNATRFASV
FLATRFASY

SEQ ID NO: 20302 - protein, 9 aa, synthetic construct
  source 1..9: note = Seed: FSAVGNICY
FLAVGNICF

SEQ ID NO: 20303 - protein, 9 aa, synthetic construct
  source 1..9: note = Seed: FSAVGNICY
FLAVGNICY

SEQ ID NO: 20304 - protein, 10 aa, synthetic construct
  source 1..10: note = Seed: FSAVGNICYT
FLAVGNICYA

SEQ ID NO: 20305 - protein, 10 aa, synthetic construct
  source 1..10: note = Seed: FSAVGNICYT
FLAVGNICYI

SEQ ID NO: 20306 - protein, 10 aa, synthetic construct
  source 1..10: note = Seed: FSAVGNICYT
FLAVGNICYL

SEQ ID NO: 20307 - protein, 10 aa, synthetic construct
  source 1..10: note = Seed: FSAVGNICYT
FLAVGNICYM

SEQ ID NO: 20308 - protein, 10 aa, synthetic construct
  source 1..10: note = Seed: FSAVGNICYT
FLAVGNICYV

SEQ ID NO: 20309 - protein, 8 aa, synthetic construct
  source 1..8: note = Seed: FLAYILFT
FLAYILFA

SEQ ID NO: 20310 - protein, 8 aa, synthetic construct
  source 1..8: note = Seed: FLAYILFT
FLAYILFI

SEQ ID NO: 20311 - protein, 8 aa, synthetic construct
  source 1..8: note = Seed: FLAYILFT
FLAYILFL

SEQ ID NO: 20312 - protein, 9 aa, synthetic construct
  source 1..9: note = Seed: FLAYILFTR
FLAYILFTA

SEQ ID NO: 20313 - protein, 9 aa, synthetic construct
  source 1..9: note = Seed: FLAYILFTR
FLAYILFTC

SEQ ID NO: 20314 - protein, 9 aa, synthetic construct
  source 1..9: note = Seed: FLAYILFTR
FLAYILFTF

SEQ ID NO: 20315 - protein, 9 aa, synthetic construct
  source 1..9: note = Seed: FLAYILFTR
FLAYILFTG

SEQ ID NO: 20316 - protein, 9 aa, synthetic construct
  source 1..9: note = Seed: FLAYILFTR
FLAYILFTI

SEQ ID NO: 20317 - protein, 9 aa, synthetic construct
  source 1..9: note = Seed: FLAYILFTR
FLAYILFTK

SEQ ID NO: 20318 - protein, 9 aa, synthetic construct
  source 1..9: note = Seed: FLAYILFTR
FLAYILFTL

SEQ ID NO: 20319 - protein, 9 aa, synthetic construct
  source 1..9: note = Seed: FLAYILFTR
FLAYILFTM

SEQ ID NO: 20320 - protein, 9 aa, synthetic construct
  source 1..9: note = Seed: FLAYILFTR
FLAYILFTP

SEQ ID NO: 20321 - protein, 10 aa, synthetic construct
  source 1..10: note = Seed: FLAYILFTRF
FLAYILFTRA

SEQ ID NO: 20322 - protein, 10 aa, synthetic construct
  source 1..10: note = Seed: FLAYILFTRF
FLAYILFTRI

SEQ ID NO: 20323 - protein, 10 aa, synthetic construct
  source 1..10: note = Seed: FLAYILFTRF
FLAYILFTRK

SEQ ID NO: 20324 - protein, 10 aa, synthetic construct
  source 1..10: note = Seed: FLAYILFTRF
FLAYILFTRL

SEQ ID NO: 20325 - protein, 10 aa, synthetic construct
  source 1..10: note = Seed: FLAYILFTRF
FLAYILFTRM

SEQ ID NO: 20326 - protein, 10 aa, synthetic construct
  source 1..10: note = Seed: FLAYILFTRF
FLAYILFTRR

SEQ ID NO: 20327 - protein, 10 aa, synthetic construct
  source 1..10: note = Seed: FLAYILFTRF
FLAYILFTRS

SEQ ID NO: 20328 - protein, 10 aa, synthetic construct
  source 1..10: note = Seed: FLAYILFTRF
FLAYILFTRT

SEQ ID NO: 20329 - protein, 10 aa, synthetic construct
  source 1..10: note = Seed: FLAYILFTRF
FLAYILFTRV

SEQ ID NO: 20330 - protein, 9 aa, synthetic construct
  source 1..9: note = Seed: FLAYILFTR
FLAYILFTS

SEQ ID NO: 20331 - protein, 9 aa, synthetic construct
  source 1..9: note = Seed: FLAYILFTR
FLAYILFTT

SEQ ID NO: 20332 - protein, 9 aa, synthetic construct
  source 1..9: note = Seed: FLAYILFTR
FLAYILFTV

SEQ ID NO: 20333 - protein, 8 aa, synthetic construct
  source 1..8: note = Seed: FLAYILFT
FLAYILFV

SEQ ID NO: 20334 - protein, 9 aa, synthetic construct
  source 1..9: note = Seed: FVCDNIKFA
FLCDNIKFA

SEQ ID NO: 20335 - protein, 9 aa, synthetic construct
  source 1..9: note = Seed: FVCDNIKFA
FLCDNIKFC

SEQ ID NO: 20336 - protein, 9 aa, synthetic construct
  source 1..9: note = Seed: FVCDNIKFA
FLCDNIKFI

SEQ ID NO: 20337 - protein, 9 aa, synthetic construct
  source 1..9: note = Seed: FVCDNIKFA
FLCDNIKFL

SEQ ID NO: 20338 - protein, 9 aa, synthetic construct
  source 1..9: note = Seed: FVCDNIKFA
FLCDNIKFM

SEQ ID NO: 20339 - protein, 9 aa, synthetic construct
  source 1..9: note = Seed: FVCDNIKFA
FLCDNIKFT

SEQ ID NO: 20340 - protein, 9 aa, synthetic construct
  source 1..9: note = Seed: FVCDNIKFA
FLCDNIKFV

SEQ ID NO: 20341 - protein, 9 aa, synthetic construct
  source 1..9: note = Seed: FLCLFLLPS
FLCLFLLPA

SEQ ID NO: 20342 - protein, 9 aa, synthetic construct
  source 1..9: note = Seed: FLCLFLLPS
FLCLFLLPI

SEQ ID NO: 20343 - protein, 9 aa, synthetic construct
  source 1..9: note = Seed: FLCLFLLPS
FLCLFLLPL

SEQ ID NO: 20344 - protein, 9 aa, synthetic construct
  source 1..9: note = Seed: FLCLFLLPS
FLCLFLLPM

SEQ ID NO: 20345 - protein, 9 aa, synthetic construct
  source 1..9: note = Seed: FLCLFLLPS
FLCLFLLPT

SEQ ID NO: 20346 - protein, 9 aa, synthetic construct
  source 1..9: note = Seed: FLCLFLLPS
FLCLFLLPV

SEQ ID NO: 20347 - protein, 9 aa, synthetic construct
  source 1..9: note = Seed: FMCVEYCPI
FLCVEYCPA

SEQ ID NO: 20348 - protein, 9 aa, synthetic construct
  source 1..9: note = Seed: FMCVEYCPI
FLCVEYCPF

SEQ ID NO: 20349 - protein, 9 aa, synthetic construct
  source 1..9: note = Seed: FMCVEYCPI
FLCVEYCPI

SEQ ID NO: 20350 - protein, 9 aa, synthetic construct
  source 1..9: note = Seed: FMCVEYCPI
FLCVEYCPL

SEQ ID NO: 20351 - protein, 9 aa, synthetic construct
  source 1..9: note = Seed: FMCVEYCPI
FLCVEYCPM

SEQ ID NO: 20352 - protein, 9 aa, synthetic construct
  source 1..9: note = Seed: FMCVEYCPI
FLCVEYCPV

SEQ ID NO: 20353 - protein, 9 aa, synthetic construct
  source 1..9: note = Seed: FMCVEYCPI
FLCVEYCPY

SEQ ID NO: 20354 - protein, 9 aa, synthetic construct
  source 1..9: note = Seed: FGDDTVIEV
FLDDTVIEA

SEQ ID NO: 20355 - protein, 9 aa, synthetic construct
  source 1..9: note = Seed: FGDDTVIEV
FLDDTVIEC

SEQ ID NO: 20356 - protein, 9 aa, synthetic construct
  source 1..9: note = Seed: FGDDTVIEV
FLDDTVIEF

SEQ ID NO: 20357 - protein, 9 aa, synthetic construct
  source 1..9: note = Seed: FGDDTVIEV
FLDDTVIEI

SEQ ID NO: 20358 - protein, 9 aa, synthetic construct
  source 1..9: note = Seed: FGDDTVIEV
FLDDTVIEL

SEQ ID NO: 20359 - protein, 9 aa, synthetic construct
  source 1..9: note = Seed: FGDDTVIEV
FLDDTVIEM

SEQ ID NO: 20360 - protein, 9 aa, synthetic construct
  source 1..9: note = Seed: FGDDTVIEV
FLDDTVIES

SEQ ID NO: 20361 - protein, 9 aa, synthetic construct
  source 1..9: note = Seed: FGDDTVIEV
FLDDTVIET

SEQ ID NO: 20362 - protein, 9 aa, synthetic construct
  source 1..9: note = Seed: FGDDTVIEV
FLDDTVIEV

SEQ ID NO: 20363 - protein, 8 aa, synthetic construct
  source 1..8: note = Seed: FVDGVPFV
FLDGVPFA

SEQ ID NO: 20364 - protein, 8 aa, synthetic construct
  source 1..8: note = Seed: FVDGVPFV
FLDGVPFI

SEQ ID NO: 20365 - protein, 8 aa, synthetic construct
  source 1..8: note = Seed: FVDGVPFV
FLDGVPFL

SEQ ID NO: 20366 - protein, 8 aa, synthetic construct
  source 1..8: note = Seed: FVDGVPFV
FLDGVPFM

SEQ ID NO: 20367 - protein, 8 aa, synthetic construct
  source 1..8: note = Seed: FVDGVPFV
FLDGVPFV

SEQ ID NO: 20368 - protein, 9 aa, synthetic construct
  source 1..9: note = Seed: FVDGVPFVV
FLDGVPFVA

SEQ ID NO: 20369 - protein, 9 aa, synthetic construct
  source 1..9: note = Seed: FVDGVPFVV
FLDGVPFVC

SEQ ID NO: 20370 - protein, 9 aa, synthetic construct
  source 1..9: note = Seed: FVDGVPFVV
FLDGVPFVF

SEQ ID NO: 20371 - protein, 9 aa, synthetic construct
  source 1..9: note = Seed: FVDGVPFVV
FLDGVPFVI

SEQ ID NO: 20372 - protein, 9 aa, synthetic construct
  source 1..9: note = Seed: FVDGVPFVV
FLDGVPFVL

SEQ ID NO: 20373 - protein, 9 aa, synthetic construct
  source 1..9: note = Seed: FVDGVPFVV
FLDGVPFVM

SEQ ID NO: 20374 - protein, 9 aa, synthetic construct
  source 1..9: note = Seed: FVDGVPFVV
FLDGVPFVS

SEQ ID NO: 20375 - protein, 9 aa, synthetic construct
  source 1..9: note = Seed: FVDGVPFVV
FLDGVPFVT

SEQ ID NO: 20376 - protein, 9 aa, synthetic construct
  source 1..9: note = Seed: FVDGVPFVV
FLDGVPFVV

SEQ ID NO: 20377 - protein, 10 aa, synthetic construct
  source 1..10: note = Seed: FVDGVPFVVS
FLDGVPFVVA

SEQ ID NO: 20378 - protein, 10 aa, synthetic construct
  source 1..10: note = Seed: FVDGVPFVVS
FLDGVPFVVC

SEQ ID NO: 20379 - protein, 10 aa, synthetic construct
  source 1..10: note = Seed: FVDGVPFVVS
FLDGVPFVVD

SEQ ID NO: 20380 - protein, 10 aa, synthetic construct
  source 1..10: note = Seed: FVDGVPFVVS
FLDGVPFVVE

SEQ ID NO: 20381 - protein, 10 aa, synthetic construct
  source 1..10: note = Seed: FVDGVPFVVS
FLDGVPFVVF

SEQ ID NO: 20382 - protein, 10 aa, synthetic construct
  source 1..10: note = Seed: FVDGVPFVVS
FLDGVPFVVG

SEQ ID NO: 20383 - protein, 10 aa, synthetic construct
  source 1..10: note = Seed: FVDGVPFVVS
FLDGVPFVVH

SEQ ID NO: 20384 - protein, 10 aa, synthetic construct
  source 1..10: note = Seed: FVDGVPFVVS
FLDGVPFVVI

SEQ ID NO: 20385 - protein, 10 aa, synthetic construct
  source 1..10: note = Seed: FVDGVPFVVS
FLDGVPFVVK

SEQ ID NO: 20386 - protein, 10 aa, synthetic construct
  source 1..10: note = Seed: FVDGVPFVVS
FLDGVPFVVL

SEQ ID NO: 20387 - protein, 10 aa, synthetic construct
  source 1..10: note = Seed: FVDGVPFVVS
FLDGVPFVVM

SEQ ID NO: 20388 - protein, 10 aa, synthetic construct
  source 1..10: note = Seed: FVDGVPFVVS
FLDGVPFVVN

SEQ ID NO: 20389 - protein, 10 aa, synthetic construct
  source 1..10: note = Seed: FVDGVPFVVS
FLDGVPFVVP

SEQ ID NO: 20390 - protein, 10 aa, synthetic construct
  source 1..10: note = Seed: FVDGVPFVVS
FLDGVPFVVQ

SEQ ID NO: 20391 - protein, 10 aa, synthetic construct
  source 1..10: note = Seed: FVDGVPFVVS
FLDGVPFVVR

SEQ ID NO: 20392 - protein, 10 aa, synthetic construct
  source 1..10: note = Seed: FVDGVPFVVS
FLDGVPFVVS

SEQ ID NO: 20393 - protein, 10 aa, synthetic construct
  source 1..10: note = Seed: FVDGVPFVVS
FLDGVPFVVT

SEQ ID NO: 20394 - protein, 10 aa, synthetic construct
  source 1..10: note = Seed: FVDGVPFVVS
FLDGVPFVVV

SEQ ID NO: 20395 - protein, 10 aa, synthetic construct
  source 1..10: note = Seed: FVDGVPFVVS
FLDGVPFVVW

SEQ ID NO: 20396 - protein, 10 aa, synthetic construct
  source 1..10: note = Seed: FVDGVPFVVS
FLDGVPFVVY

SEQ ID NO: 20397 - protein, 9 aa, synthetic construct
  source 1..9: note = Seed: FPDLNGDVV
FLDLNGDVF

SEQ ID NO: 20398 - protein, 9 aa, synthetic construct
  source 1..9: note = Seed: FPDLNGDVV
FLDLNGDVL

SEQ ID NO: 20399 - protein, 9 aa, synthetic construct
  source 1..9: note = Seed: FPDLNGDVV
FLDLNGDVM

SEQ ID NO: 20400 - protein, 11 aa, synthetic construct
  source 1..11: note = Seed: FPDLNGDVVAI
FLDLNGDVVAI

SEQ ID NO: 20401 - protein, 11 aa, synthetic construct
  source 1..11: note = Seed: FPDLNGDVVAI
FLDLNGDVVAL

SEQ ID NO: 20402 - protein, 11 aa, synthetic construct
  source 1..11: note = Seed: FPDLNGDVVAI
FLDLNGDVVAV

SEQ ID NO: 20403 - protein, 9 aa, synthetic construct
  source 1..9: note = Seed: FEEAALCTF
FLEAALCTF

SEQ ID NO: 20404 - protein, 9 aa, synthetic construct
  source 1..9: note = Seed: FTEQPIDLV
FLEQPIDLI

SEQ ID NO: 20405 - protein, 9 aa, synthetic construct
  source 1..9: note = Seed: FTEQPIDLV
FLEQPIDLL

SEQ ID NO: 20406 - protein, 9 aa, synthetic construct
  source 1..9: note = Seed: FTEQPIDLV
FLEQPIDLV

SEQ ID NO: 20407 - protein, 9 aa, synthetic construct
  source 1..9: note = Seed: FVFKNIDGY
FLFKNIDGF

SEQ ID NO: 20408 - protein, 9 aa, synthetic construct
  source 1..9: note = Seed: FVFKNIDGY
FLFKNIDGR

SEQ ID NO: 20409 - protein, 9 aa, synthetic construct
  source 1..9: note = Seed: FVFKNIDGY
FLFKNIDGY

SEQ ID NO: 20410 - protein, 10 aa, synthetic construct
  source 1..10: note = Seed: FVFKNIDGYF
FLFKNIDGYA

SEQ ID NO: 20411 - protein, 10 aa, synthetic construct
  source 1..10: note = Seed: FVFKNIDGYF
FLFKNIDGYF

SEQ ID NO: 20412 - protein, 11 aa, synthetic construct
  source 1..11: note = Seed: FVFKNIDGYFK
FLFKNIDGYFR

SEQ ID NO: 20413 - protein, 10 aa, synthetic construct
  source 1..10: note = Seed: FVFKNIDGYF
FLFKNIDGYI

SEQ ID NO: 20414 - protein, 10 aa, synthetic construct
  source 1..10: note = Seed: FVFKNIDGYF
FLFKNIDGYL

SEQ ID NO: 20415 - protein, 10 aa, synthetic construct
  source 1..10: note = Seed: FVFKNIDGYF
FLFKNIDGYM

SEQ ID NO: 20416 - protein, 10 aa, synthetic construct
  source 1..10: note = Seed: FVFKNIDGYF
FLFKNIDGYV

SEQ ID NO: 20417 - protein, 10 aa, synthetic construct
  source 1..10: note = Seed: FVFKNIDGYF
FLFKNIDGYY

SEQ ID NO: 20418 - protein, 9 aa, synthetic construct
  source 1..9: note = Seed: FLFLTWICL
FLFLTWICA

SEQ ID NO: 20419 - protein, 9 aa, synthetic construct
  source 1..9: note = Seed: FLFLTWICL
FLFLTWICI

SEQ ID NO: 20420 - protein, 10 aa, synthetic construct
  source 1..10: note = Seed: FLFLTWICLL
FLFLTWICLA

SEQ ID NO: 20421 - protein, 10 aa, synthetic construct
  source 1..10: note = Seed: FLFLTWICLL
FLFLTWICLI

SEQ ID NO: 20422 - protein, 11 aa, synthetic construct
  source 1..11: note = Seed: FLFLTWICLLQ
FLFLTWICLLV

SEQ ID NO: 20423 - protein, 10 aa, synthetic construct
  source 1..10: note = Seed: FLFLTWICLL
FLFLTWICLM

SEQ ID NO: 20424 - protein, 10 aa, synthetic construct
  source 1..10: note = Seed: FLFLTWICLL
FLFLTWICLS

SEQ ID NO: 20425 - protein, 10 aa, synthetic construct
  source 1..10: note = Seed: FLFLTWICLL
FLFLTWICLT

SEQ ID NO: 20426 - protein, 10 aa, synthetic construct
  source 1..10: note = Seed: FLFLTWICLL
FLFLTWICLV

SEQ ID NO: 20427 - protein, 9 aa, synthetic construct
  source 1..9: note = Seed: FLFLTWICL
FLFLTWICM

SEQ ID NO: 20428 - protein, 9 aa, synthetic construct
  source 1..9: note = Seed: FLFLTWICL
FLFLTWICT

SEQ ID NO: 20429 - protein, 9 aa, synthetic construct
  source 1..9: note = Seed: FLFLTWICL
FLFLTWICV

SEQ ID NO: 20430 - protein, 10 aa, synthetic construct
  source 1..10: note = Seed: FPFNKWGKAR
FLFNKWGKAR

SEQ ID NO: 20431 - protein, 9 aa, synthetic construct
  source 1..9: note = Seed: FKFRIDGDM
FLFRIDGDF

SEQ ID NO: 20432 - protein, 9 aa, synthetic construct
  source 1..9: note = Seed: FKFRIDGDM
FLFRIDGDY

SEQ ID NO: 20433 - protein, 10 aa, synthetic construct
  source 1..10: note = Seed: FLFVAAIFYL
FLFVAAIFYA

SEQ ID NO: 20434 - protein, 10 aa, synthetic construct
  source 1..10: note = Seed: FLFVAAIFYL
FLFVAAIFYC

SEQ ID NO: 20435 - protein, 10 aa, synthetic construct
  source 1..10: note = Seed: FLFVAAIFYL
FLFVAAIFYF

SEQ ID NO: 20436 - protein, 10 aa, synthetic construct
  source 1..10: note = Seed: FLFVAAIFYL
FLFVAAIFYG

SEQ ID NO: 20437 - protein, 10 aa, synthetic construct
  source 1..10: note = Seed: FLFVAAIFYL
FLFVAAIFYI

SEQ ID NO: 20438 - protein, 11 aa, synthetic construct
  source 1..11: note = Seed: FLFVAAIFYLI
FLFVAAIFYLA

SEQ ID NO: 20439 - protein, 11 aa, synthetic construct
  source 1..11: note = Seed: FLFVAAIFYLI
FLFVAAIFYLC

SEQ ID NO: 20440 - protein, 11 aa, synthetic construct
  source 1..11: note = Seed: FLFVAAIFYLI
FLFVAAIFYLD

SEQ ID NO: 20441 - protein, 11 aa, synthetic construct
  source 1..11: note = Seed: FLFVAAIFYLI
FLFVAAIFYLE

SEQ ID NO: 20442 - protein, 11 aa, synthetic construct
  source 1..11: note = Seed: FLFVAAIFYLI
FLFVAAIFYLF

SEQ ID NO: 20443 - protein, 11 aa, synthetic construct
  source 1..11: note = Seed: FLFVAAIFYLI
FLFVAAIFYLG

SEQ ID NO: 20444 - protein, 11 aa, synthetic construct
  source 1..11: note = Seed: FLFVAAIFYLI
FLFVAAIFYLH

SEQ ID NO: 20445 - protein, 11 aa, synthetic construct
  source 1..11: note = Seed: FLFVAAIFYLI
FLFVAAIFYLK

SEQ ID NO: 20446 - protein, 11 aa, synthetic construct
  source 1..11: note = Seed: FLFVAAIFYLI
FLFVAAIFYLL

SEQ ID NO: 20447 - protein, 11 aa, synthetic construct
  source 1..11: note = Seed: FLFVAAIFYLI
FLFVAAIFYLM

SEQ ID NO: 20448 - protein, 11 aa, synthetic construct
  source 1..11: note = Seed: FLFVAAIFYLI
FLFVAAIFYLN

SEQ ID NO: 20449 - protein, 11 aa, synthetic construct
  source 1..11: note = Seed: FLFVAAIFYLI
FLFVAAIFYLP

SEQ ID NO: 20450 - protein, 11 aa, synthetic construct
  source 1..11: note = Seed: FLFVAAIFYLI
FLFVAAIFYLQ

SEQ ID NO: 20451 - protein, 11 aa, synthetic construct
  source 1..11: note = Seed: FLFVAAIFYLI
FLFVAAIFYLR

SEQ ID NO: 20452 - protein, 11 aa, synthetic construct
  source 1..11: note = Seed: FLFVAAIFYLI
FLFVAAIFYLS

SEQ ID NO: 20453 - protein, 11 aa, synthetic construct
  source 1..11: note = Seed: FLFVAAIFYLI
FLFVAAIFYLT

SEQ ID NO: 20454 - protein, 11 aa, synthetic construct
  source 1..11: note = Seed: FLFVAAIFYLI
FLFVAAIFYLV

SEQ ID NO: 20455 - protein, 11 aa, synthetic construct
  source 1..11: note = Seed: FLFVAAIFYLI
FLFVAAIFYLW

SEQ ID NO: 20456 - protein, 11 aa, synthetic construct
  source 1..11: note = Seed: FLFVAAIFYLI
FLFVAAIFYLY

SEQ ID NO: 20457 - protein, 10 aa, synthetic construct
  source 1..10: note = Seed: FLFVAAIFYL
FLFVAAIFYM

SEQ ID NO: 20458 - protein, 10 aa, synthetic construct
  source 1..10: note = Seed: FLFVAAIFYL
FLFVAAIFYR

SEQ ID NO: 20459 - protein, 10 aa, synthetic construct
  source 1..10: note = Seed: FLFVAAIFYL
FLFVAAIFYS

SEQ ID NO: 20460 - protein, 10 aa, synthetic construct
  source 1..10: note = Seed: FLFVAAIFYL
FLFVAAIFYT

SEQ ID NO: 20461 - protein, 10 aa, synthetic construct
  source 1..10: note = Seed: FLFVAAIFYL
FLFVAAIFYV

SEQ ID NO: 20462 - protein, 10 aa, synthetic construct
  source 1..10: note = Seed: FLFVAAIFYL
FLFVAAIFYY

SEQ ID NO: 20463 - protein, 9 aa, synthetic construct
  source 1..9: note = Seed: FGGASCCLY
FLGASCCLF

SEQ ID NO: 20464 - protein, 9 aa, synthetic construct
  source 1..9: note = Seed: FGGASCCLY
FLGASCCLY

SEQ ID NO: 20465 - protein, 9 aa, synthetic construct
  source 1..9: note = Seed: FGGCVFSYV
FLGCVFSYA

SEQ ID NO: 20466 - protein, 9 aa, synthetic construct
  source 1..9: note = Seed: FGGCVFSYV
FLGCVFSYC

SEQ ID NO: 20467 - protein, 9 aa, synthetic construct
  source 1..9: note = Seed: FGGCVFSYV
FLGCVFSYF

SEQ ID NO: 20468 - protein, 9 aa, synthetic construct
  source 1..9: note = Seed: FGGCVFSYV
FLGCVFSYI

SEQ ID NO: 20469 - protein, 9 aa, synthetic construct
  source 1..9: note = Seed: FGGCVFSYV
FLGCVFSYL

SEQ ID NO: 20470 - protein, 9 aa, synthetic construct
  source 1..9: note = Seed: FGGCVFSYV
FLGCVFSYM

SEQ ID NO: 20471 - protein, 9 aa, synthetic construct
  source 1..9: note = Seed: FGGCVFSYV
FLGCVFSYS

SEQ ID NO: 20472 - protein, 9 aa, synthetic construct
  source 1..9: note = Seed: FGGCVFSYV
FLGCVFSYT

SEQ ID NO: 20473 - protein, 9 aa, synthetic construct
  source 1..9: note = Seed: FGGCVFSYV
FLGCVFSYV

SEQ ID NO: 20474 - protein, 9 aa, synthetic construct
  source 1..9: note = Seed: FLGRYMSAL
FLGRYMSAA

SEQ ID NO: 20475 - protein, 9 aa, synthetic construct
  source 1..9: note = Seed: FLGRYMSAL
FLGRYMSAI

SEQ ID NO: 20476 - protein, 10 aa, synthetic construct
  source 1..10: note = Seed: FLGRYMSALN
FLGRYMSALA

SEQ ID NO: 20477 - protein, 10 aa, synthetic construct
  source 1..10: note = Seed: FLGRYMSALN
FLGRYMSALI

SEQ ID NO: 20478 - protein, 10 aa, synthetic construct
  source 1..10: note = Seed: FLGRYMSALN
FLGRYMSALL

SEQ ID NO: 20479 - protein, 10 aa, synthetic construct
  source 1..10: note = Seed: FLGRYMSALN
FLGRYMSALM

SEQ ID NO: 20480 - protein, 10 aa, synthetic construct
  source 1..10: note = Seed: FLGRYMSALN
FLGRYMSALT

SEQ ID NO: 20481 - protein, 10 aa, synthetic construct
  source 1..10: note = Seed: FLGRYMSALN
FLGRYMSALV

SEQ ID NO: 20482 - protein, 9 aa, synthetic construct
  source 1..9: note = Seed: FLGRYMSAL
FLGRYMSAM

SEQ ID NO: 20483 - protein, 9 aa, synthetic construct
  source 1..9: note = Seed: FLGRYMSAL
FLGRYMSAS

SEQ ID NO: 20484 - protein, 9 aa, synthetic construct
  source 1..9: note = Seed: FLGRYMSAL
FLGRYMSAT

SEQ ID NO: 20485 - protein, 9 aa, synthetic construct
  source 1..9: note = Seed: FLGRYMSAL
FLGRYMSAV

SEQ ID NO: 20486 - protein, 8 aa, synthetic construct
  source 1..8: note = Seed: FLGRYMSA
FLGRYMSV

SEQ ID NO: 20487 - protein, 10 aa, synthetic construct
  source 1..10: note = Seed: FLGTCRRCPA
FLGTCRRCPL

SEQ ID NO: 20488 - protein, 10 aa, synthetic construct
  source 1..10: note = Seed: FLGTCRRCPA
FLGTCRRCPM

SEQ ID NO: 20489 - protein, 10 aa, synthetic construct
  source 1..10: note = Seed: FLGTCRRCPA
FLGTCRRCPV

SEQ ID NO: 20490 - protein, 9 aa, synthetic construct
  source 1..9: note = Seed: FNGVSFSTF
FLGVSFSTF

SEQ ID NO: 20491 - protein, 9 aa, synthetic construct
  source 1..9: note = Seed: FNGVSFSTF
FLGVSFSTY

SEQ ID NO: 20492 - protein, 10 aa, synthetic construct
  source 1..10: note = Seed: FLGYFCTCYF
FLGYFCTCYA

SEQ ID NO: 20493 - protein, 10 aa, synthetic construct
  source 1..10: note = Seed: FLGYFCTCYF
FLGYFCTCYI

SEQ ID NO: 20494 - protein, 10 aa, synthetic construct
  source 1..10: note = Seed: FLGYFCTCYF
FLGYFCTCYL

SEQ ID NO: 20495 - protein, 10 aa, synthetic construct
  source 1..10: note = Seed: FLGYFCTCYF
FLGYFCTCYM

SEQ ID NO: 20496 - protein, 10 aa, synthetic construct
  source 1..10: note = Seed: FLGYFCTCYF
FLGYFCTCYT

SEQ ID NO: 20497 - protein, 10 aa, synthetic construct
  source 1..10: note = Seed: FLGYFCTCYF
FLGYFCTCYV

SEQ ID NO: 20498 - protein, 10 aa, synthetic construct
  source 1..10: note = Seed: FLGYFCTCYF
FLGYFCTCYY

SEQ ID NO: 20499 - protein, 9 aa, synthetic construct
  source 1..9: note = Seed: FQHANLDSC
FLHANLDSA

SEQ ID NO: 20500 - protein, 9 aa, synthetic construct
  source 1..9: note = Seed: FQHANLDSC
FLHANLDSI

SEQ ID NO: 20501 - protein, 9 aa, synthetic construct
  source 1..9: note = Seed: FQHANLDSC
FLHANLDSL

SEQ ID NO: 20502 - protein, 9 aa, synthetic construct
  source 1..9: note = Seed: FQHANLDSC
FLHANLDSM

SEQ ID NO: 20503 - protein, 9 aa, synthetic construct
  source 1..9: note = Seed: FQHANLDSC
FLHANLDSV

SEQ ID NO: 20504 - protein, 10 aa, synthetic construct
  source 1..10: note = Seed: FLHFLPRVFS
FLHFLPRVFA

SEQ ID NO: 20505 - protein, 10 aa, synthetic construct
  source 1..10: note = Seed: FLHFLPRVFS
FLHFLPRVFI

SEQ ID NO: 20506 - protein, 10 aa, synthetic construct
  source 1..10: note = Seed: FLHFLPRVFS
FLHFLPRVFL

SEQ ID NO: 20507 - protein, 10 aa, synthetic construct
  source 1..10: note = Seed: FLHFLPRVFS
FLHFLPRVFM

SEQ ID NO: 20508 - protein, 11 aa, synthetic construct
  source 1..11: note = Seed: FLHFLPRVFSA
FLHFLPRVFSI

SEQ ID NO: 20509 - protein, 11 aa, synthetic construct
  source 1..11: note = Seed: FLHFLPRVFSA
FLHFLPRVFSL

SEQ ID NO: 20510 - protein, 11 aa, synthetic construct
  source 1..11: note = Seed: FLHFLPRVFSA
FLHFLPRVFSM

SEQ ID NO: 20511 - protein, 11 aa, synthetic construct
  source 1..11: note = Seed: FLHFLPRVFSA
FLHFLPRVFST

SEQ ID NO: 20512 - protein, 11 aa, synthetic construct
  source 1..11: note = Seed: FLHFLPRVFSA
FLHFLPRVFSV

SEQ ID NO: 20513 - protein, 10 aa, synthetic construct
  source 1..10: note = Seed: FLHFLPRVFS
FLHFLPRVFV

SEQ ID NO: 20514 - protein, 9 aa, synthetic construct
  source 1..9: note = Seed: FLHFLPRVF
FLHFLPRVM

SEQ ID NO: 20515 - protein, 9 aa, synthetic construct
  source 1..9: note = Seed: FLHFLPRVF
FLHFLPRVY

SEQ ID NO: 20516 - protein, 9 aa, synthetic construct
  source 1..9: note = Seed: FSHSQLGGL
FLHSQLGGL

SEQ ID NO: 20517 - protein, 9 aa, synthetic construct
  source 1..9: note = Seed: FSHSQLGGL
FLHSQLGGV

SEQ ID NO: 20518 - protein, 10 aa, synthetic construct
  source 1..10: note = Seed: FLHVTYVPAQ
FLHVTYVPAA

SEQ ID NO: 20519 - protein, 10 aa, synthetic construct
  source 1..10: note = Seed: FLHVTYVPAQ
FLHVTYVPAI

SEQ ID NO: 20520 - protein, 10 aa, synthetic construct
  source 1..10: note = Seed: FLHVTYVPAQ
FLHVTYVPAL

SEQ ID NO: 20521 - protein, 10 aa, synthetic construct
  source 1..10: note = Seed: FLHVTYVPAQ
FLHVTYVPAM

SEQ ID NO: 20522 - protein, 10 aa, synthetic construct
  source 1..10: note = Seed: FLHVTYVPAQ
FLHVTYVPAT

SEQ ID NO: 20523 - protein, 10 aa, synthetic construct
  source 1..10: note = Seed: FLHVTYVPAQ
FLHVTYVPAV

SEQ ID NO: 20524 - protein, 9 aa, synthetic construct
  source 1..9: note = Seed: FLHVTYVPA
FLHVTYVPI

SEQ ID NO: 20525 - protein, 9 aa, synthetic construct
  source 1..9: note = Seed: FLHVTYVPA
FLHVTYVPL

SEQ ID NO: 20526 - protein, 9 aa, synthetic construct
  source 1..9: note = Seed: FLHVTYVPA
FLHVTYVPM

SEQ ID NO: 20527 - protein, 9 aa, synthetic construct
  source 1..9: note = Seed: FLHVTYVPA
FLHVTYVPT

SEQ ID NO: 20528 - protein, 9 aa, synthetic construct
  source 1..9: note = Seed: FLHVTYVPA
FLHVTYVPV

SEQ ID NO: 20529 - protein, 8 aa, synthetic construct
  source 1..8: note = Seed: FLIGCNYL
FLIGCNYI

SEQ ID NO: 20530 - protein, 8 aa, synthetic construct
  source 1..8: note = Seed: FLIGCNYL
FLIGCNYV

SEQ ID NO: 20531 - protein, 9 aa, synthetic construct
  source 1..9: note = Seed: FTINCQEPK
FLINCQEPR

SEQ ID NO: 20532 - protein, 10 aa, synthetic construct
  source 1..10: note = Seed: FKIYSKHTPI
FLIYSKHTPA

SEQ ID NO: 20533 - protein, 10 aa, synthetic construct
  source 1..10: note = Seed: FKIYSKHTPI
FLIYSKHTPF

SEQ ID NO: 20534 - protein, 10 aa, synthetic construct
  source 1..10: note = Seed: FKIYSKHTPI
FLIYSKHTPI

SEQ ID NO: 20535 - protein, 10 aa, synthetic construct
  source 1..10: note = Seed: FKIYSKHTPI
FLIYSKHTPL

SEQ ID NO: 20536 - protein, 10 aa, synthetic construct
  source 1..10: note = Seed: FKIYSKHTPI
FLIYSKHTPM

SEQ ID NO: 20537 - protein, 10 aa, synthetic construct
  source 1..10: note = Seed: FKIYSKHTPI
FLIYSKHTPT

SEQ ID NO: 20538 - protein, 10 aa, synthetic construct
  source 1..10: note = Seed: FKIYSKHTPI
FLIYSKHTPV

SEQ ID NO: 20539 - protein, 10 aa, synthetic construct
  source 1..10: note = Seed: FKIYSKHTPI
FLIYSKHTPY

SEQ ID NO: 20540 - protein, 9 aa, synthetic construct
  source 1..9: note = Seed: FYKENSYTT
FLKENSYTM

SEQ ID NO: 20541 - protein, 8 aa, synthetic construct
  source 1..8: note = Seed: FVKHKHAF
FLKHKHAA

SEQ ID NO: 20542 - protein, 8 aa, synthetic construct
  source 1..8: note = Seed: FVKHKHAF
FLKHKHAF

SEQ ID NO: 20543 - protein, 9 aa, synthetic construct
  source 1..9: note = Seed: FVKHKHAFL
FLKHKHAFA

SEQ ID NO: 20544 - protein, 9 aa, synthetic construct
  source 1..9: note = Seed: FVKHKHAFL
FLKHKHAFF

SEQ ID NO: 20545 - protein, 9 aa, synthetic construct
  source 1..9: note = Seed: FVKHKHAFL
FLKHKHAFI

SEQ ID NO: 20546 - protein, 9 aa, synthetic construct
  source 1..9: note = Seed: FVKHKHAFL
FLKHKHAFL

SEQ ID NO: 20547 - protein, 11 aa, synthetic construct
  source 1..11: note = Seed: FVKHKHAFLCL
FLKHKHAFLCL

SEQ ID NO: 20548 - protein, 10 aa, synthetic construct
  source 1..10: note = Seed: FVKHKHAFLC
FLKHKHAFLL

SEQ ID NO: 20549 - protein, 10 aa, synthetic construct
  source 1..10: note = Seed: FVKHKHAFLC
FLKHKHAFLM

SEQ ID NO: 20550 - protein, 9 aa, synthetic construct
  source 1..9: note = Seed: FVKHKHAFL
FLKHKHAFM

SEQ ID NO: 20551 - protein, 9 aa, synthetic construct
  source 1..9: note = Seed: FVKHKHAFL
FLKHKHAFT

SEQ ID NO: 20552 - protein, 9 aa, synthetic construct
  source 1..9: note = Seed: FVKHKHAFL
FLKHKHAFV

SEQ ID NO: 20553 - protein, 8 aa, synthetic construct
  source 1..8: note = Seed: FVKHKHAF
FLKHKHAI

SEQ ID NO: 20554 - protein, 8 aa, synthetic construct
  source 1..8: note = Seed: FVKHKHAF
FLKHKHAL

SEQ ID NO: 20555 - protein, 8 aa, synthetic construct
  source 1..8: note = Seed: FVKHKHAF
FLKHKHAM

SEQ ID NO: 20556 - protein, 8 aa, synthetic construct
  source 1..8: note = Seed: FVKHKHAF
FLKHKHAV

SEQ ID NO: 20557 - protein, 9 aa, synthetic construct
  source 1..9: note = Seed: FRKSNLKPF
FLKSNLKPF

SEQ ID NO: 20558 - protein, 9 aa, synthetic construct
  source 1..9: note = Seed: FRKSNLKPF
FLKSNLKPY

SEQ ID NO: 20559 - protein, 9 aa, synthetic construct
  source 1..9: note = Seed: FLKTNCCRF
FLKTNCCRL

SEQ ID NO: 20560 - protein, 9 aa, synthetic construct
  source 1..9: note = Seed: FLKTNCCRF
FLKTNCCRY

SEQ ID NO: 20561 - protein, 9 aa, synthetic construct
  source 1..9: note = Seed: FVLALLSDL
FLLALLSDA

SEQ ID NO: 20562 - protein, 9 aa, synthetic construct
  source 1..9: note = Seed: FVLALLSDL
FLLALLSDI

SEQ ID NO: 20563 - protein, 9 aa, synthetic construct
  source 1..9: note = Seed: FVLALLSDL
FLLALLSDL

SEQ ID NO: 20564 - protein, 9 aa, synthetic construct
  source 1..9: note = Seed: FVLALLSDL
FLLALLSDM

SEQ ID NO: 20565 - protein, 9 aa, synthetic construct
  source 1..9: note = Seed: FVLALLSDL
FLLALLSDT

SEQ ID NO: 20566 - protein, 9 aa, synthetic construct
  source 1..9: note = Seed: FVLALLSDL
FLLALLSDV

SEQ ID NO: 20567 - protein, 10 aa, synthetic construct
  source 1..10: note = Seed: FPLCANGQVF
FLLCANGQVF

SEQ ID NO: 20568 - protein, 10 aa, synthetic construct
  source 1..10: note = Seed: FPLCANGQVF
FLLCANGQVY

SEQ ID NO: 20569 - protein, 10 aa, synthetic construct
  source 1..10: note = Seed: FKLKDCVMYA
FLLKDCVMYA

SEQ ID NO: 20570 - protein, 11 aa, synthetic construct
  source 1..11: note = Seed: FKLKDCVMYAS
FLLKDCVMYAV

SEQ ID NO: 20571 - protein, 10 aa, synthetic construct
  source 1..10: note = Seed: FKLKDCVMYA
FLLKDCVMYC

SEQ ID NO: 20572 - protein, 10 aa, synthetic construct
  source 1..10: note = Seed: FKLKDCVMYA
FLLKDCVMYI

SEQ ID NO: 20573 - protein, 10 aa, synthetic construct
  source 1..10: note = Seed: FKLKDCVMYA
FLLKDCVMYL

SEQ ID NO: 20574 - protein, 10 aa, synthetic construct
  source 1..10: note = Seed: FKLKDCVMYA
FLLKDCVMYM

SEQ ID NO: 20575 - protein, 10 aa, synthetic construct
  source 1..10: note = Seed: FKLKDCVMYA
FLLKDCVMYS

SEQ ID NO: 20576 - protein, 10 aa, synthetic construct
  source 1..10: note = Seed: FKLKDCVMYA
FLLKDCVMYT

SEQ ID NO: 20577 - protein, 10 aa, synthetic construct
  source 1..10: note = Seed: FKLKDCVMYA
FLLKDCVMYV

SEQ ID NO: 20578 - protein, 10 aa, synthetic construct
  source 1..10: note = Seed: FPLKLRGTAV
FLLKLRGTAA

SEQ ID NO: 20579 - protein, 10 aa, synthetic construct
  source 1..10: note = Seed: FPLKLRGTAV
FLLKLRGTAF

SEQ ID NO: 20580 - protein, 10 aa, synthetic construct
  source 1..10: note = Seed: FPLKLRGTAV
FLLKLRGTAI

SEQ ID NO: 20581 - protein, 10 aa, synthetic construct
  source 1..10: note = Seed: FPLKLRGTAV
FLLKLRGTAL

SEQ ID NO: 20582 - protein, 10 aa, synthetic construct
  source 1..10: note = Seed: FPLKLRGTAV
FLLKLRGTAM

SEQ ID NO: 20583 - protein, 10 aa, synthetic construct
  source 1..10: note = Seed: FPLKLRGTAV
FLLKLRGTAV

SEQ ID NO: 20584 - protein, 11 aa, synthetic construct
  source 1..11: note = Seed: FPLKLRGTAVM
FLLKLRGTAVF

SEQ ID NO: 20585 - protein, 11 aa, synthetic construct
  source 1..11: note = Seed: FPLKLRGTAVM
FLLKLRGTAVY

SEQ ID NO: 20586 - protein, 9 aa, synthetic construct
  source 1..9: note = Seed: FKLNEEIAI
FLLNEEIAF

SEQ ID NO: 20587 - protein, 9 aa, synthetic construct
  source 1..9: note = Seed: FKLNEEIAI
FLLNEEIAY

SEQ ID NO: 20588 - protein, 9 aa, synthetic construct
  source 1..9: note = Seed: FLLNKEMYL
FLLNKEMYA

SEQ ID NO: 20589 - protein, 9 aa, synthetic construct
  source 1..9: note = Seed: FLLNKEMYL
FLLNKEMYC

SEQ ID NO: 20590 - protein, 9 aa, synthetic construct
  source 1..9: note = Seed: FLLNKEMYL
FLLNKEMYF

SEQ ID NO: 20591 - protein, 9 aa, synthetic construct
  source 1..9: note = Seed: FLLNKEMYL
FLLNKEMYI

SEQ ID NO: 20592 - protein, 10 aa, synthetic construct
  source 1..10: note = Seed: FLLNKEMYLK
FLLNKEMYLA

SEQ ID NO: 20593 - protein, 10 aa, synthetic construct
  source 1..10: note = Seed: FLLNKEMYLK
FLLNKEMYLC

SEQ ID NO: 20594 - protein, 10 aa, synthetic construct
  source 1..10: note = Seed: FLLNKEMYLK
FLLNKEMYLD

SEQ ID NO: 20595 - protein, 10 aa, synthetic construct
  source 1..10: note = Seed: FLLNKEMYLK
FLLNKEMYLE

SEQ ID NO: 20596 - protein, 10 aa, synthetic construct
  source 1..10: note = Seed: FLLNKEMYLK
FLLNKEMYLF

SEQ ID NO: 20597 - protein, 10 aa, synthetic construct
  source 1..10: note = Seed: FLLNKEMYLK
FLLNKEMYLG

SEQ ID NO: 20598 - protein, 10 aa, synthetic construct
  source 1..10: note = Seed: FLLNKEMYLK
FLLNKEMYLH

SEQ ID NO: 20599 - protein, 10 aa, synthetic construct
  source 1..10: note = Seed: FLLNKEMYLK
FLLNKEMYLI

SEQ ID NO: 20600 - protein, 11 aa, synthetic construct
  source 1..11: note = Seed: FLLNKEMYLKL
FLLNKEMYLKA

SEQ ID NO: 20601 - protein, 11 aa, synthetic construct
  source 1..11: note = Seed: FLLNKEMYLKL
FLLNKEMYLKI

SEQ ID NO: 20602 - protein, 11 aa, synthetic construct
  source 1..11: note = Seed: FLLNKEMYLKL
FLLNKEMYLKM

SEQ ID NO: 20603 - protein, 11 aa, synthetic construct
  source 1..11: note = Seed: FLLNKEMYLKL
FLLNKEMYLKV

SEQ ID NO: 20604 - protein, 10 aa, synthetic construct
  source 1..10: note = Seed: FLLNKEMYLK
FLLNKEMYLL

SEQ ID NO: 20605 - protein, 10 aa, synthetic construct
  source 1..10: note = Seed: FLLNKEMYLK
FLLNKEMYLM

SEQ ID NO: 20606 - protein, 10 aa, synthetic construct
  source 1..10: note = Seed: FLLNKEMYLK
FLLNKEMYLN

SEQ ID NO: 20607 - protein, 10 aa, synthetic construct
  source 1..10: note = Seed: FLLNKEMYLK
FLLNKEMYLP

SEQ ID NO: 20608 - protein, 10 aa, synthetic construct
  source 1..10: note = Seed: FLLNKEMYLK
FLLNKEMYLQ

SEQ ID NO: 20609 - protein, 10 aa, synthetic construct
  source 1..10: note = Seed: FLLNKEMYLK
FLLNKEMYLR

SEQ ID NO: 20610 - protein, 10 aa, synthetic construct
  source 1..10: note = Seed: FLLNKEMYLK
FLLNKEMYLS

SEQ ID NO: 20611 - protein, 10 aa, synthetic construct
  source 1..10: note = Seed: FLLNKEMYLK
FLLNKEMYLT

SEQ ID NO: 20612 - protein, 10 aa, synthetic construct
  source 1..10: note = Seed: FLLNKEMYLK
FLLNKEMYLV

SEQ ID NO: 20613 - protein, 10 aa, synthetic construct
  source 1..10: note = Seed: FLLNKEMYLK
FLLNKEMYLW

SEQ ID NO: 20614 - protein, 10 aa, synthetic construct
  source 1..10: note = Seed: FLLNKEMYLK
FLLNKEMYLY

SEQ ID NO: 20615 - protein, 9 aa, synthetic construct
  source 1..9: note = Seed: FLLNKEMYL
FLLNKEMYM

SEQ ID NO: 20616 - protein, 9 aa, synthetic construct
  source 1..9: note = Seed: FLLNKEMYL
FLLNKEMYR

SEQ ID NO: 20617 - protein, 9 aa, synthetic construct
  source 1..9: note = Seed: FLLNKEMYL
FLLNKEMYS

SEQ ID NO: 20618 - protein, 9 aa, synthetic construct
  source 1..9: note = Seed: FLLNKEMYL
FLLNKEMYT

SEQ ID NO: 20619 - protein, 9 aa, synthetic construct
  source 1..9: note = Seed: FLLNKEMYL
FLLNKEMYV

SEQ ID NO: 20620 - protein, 10 aa, synthetic construct
  source 1..10: note = Seed: FRLTLGVYDY
FLLTLGVYDY

SEQ ID NO: 20621 - protein, 11 aa, synthetic construct
  source 1..11: note = Seed: FRLTLGVYDYL
FLLTLGVYDYA

SEQ ID NO: 20622 - protein, 11 aa, synthetic construct
  source 1..11: note = Seed: FRLTLGVYDYL
FLLTLGVYDYI

SEQ ID NO: 20623 - protein, 11 aa, synthetic construct
  source 1..11: note = Seed: FRLTLGVYDYL
FLLTLGVYDYL

SEQ ID NO: 20624 - protein, 11 aa, synthetic construct
  source 1..11: note = Seed: FRLTLGVYDYL
FLLTLGVYDYV

SEQ ID NO: 20625 - protein, 9 aa, synthetic construct
  source 1..9: note = Seed: FYLTNDVSF
FLLTNDVSF

SEQ ID NO: 20626 - protein, 10 aa, synthetic construct
  source 1..10: note = Seed: FYLTNDVSFL
FLLTNDVSFA

SEQ ID NO: 20627 - protein, 10 aa, synthetic construct
  source 1..10: note = Seed: FYLTNDVSFL
FLLTNDVSFI

SEQ ID NO: 20628 - protein, 10 aa, synthetic construct
  source 1..10: note = Seed: FYLTNDVSFL
FLLTNDVSFL

SEQ ID NO: 20629 - protein, 11 aa, synthetic construct
  source 1..11: note = Seed: FYLTNDVSFLA
FLLTNDVSFLA

SEQ ID NO: 20630 - protein, 11 aa, synthetic construct
  source 1..11: note = Seed: FYLTNDVSFLA
FLLTNDVSFLF

SEQ ID NO: 20631 - protein, 11 aa, synthetic construct
  source 1..11: note = Seed: FYLTNDVSFLA
FLLTNDVSFLI

SEQ ID NO: 20632 - protein, 11 aa, synthetic construct
  source 1..11: note = Seed: FYLTNDVSFLA
FLLTNDVSFLL

SEQ ID NO: 20633 - protein, 11 aa, synthetic construct
  source 1..11: note = Seed: FYLTNDVSFLA
FLLTNDVSFLM

SEQ ID NO: 20634 - protein, 11 aa, synthetic construct
  source 1..11: note = Seed: FYLTNDVSFLA
FLLTNDVSFLS

SEQ ID NO: 20635 - protein, 11 aa, synthetic construct
  source 1..11: note = Seed: FYLTNDVSFLA
FLLTNDVSFLT

SEQ ID NO: 20636 - protein, 11 aa, synthetic construct
  source 1..11: note = Seed: FYLTNDVSFLA
FLLTNDVSFLV

SEQ ID NO: 20637 - protein, 10 aa, synthetic construct
  source 1..10: note = Seed: FYLTNDVSFL
FLLTNDVSFM

SEQ ID NO: 20638 - protein, 10 aa, synthetic construct
  source 1..10: note = Seed: FYLTNDVSFL
FLLTNDVSFT

SEQ ID NO: 20639 - protein, 10 aa, synthetic construct
  source 1..10: note = Seed: FYLTNDVSFL
FLLTNDVSFV

SEQ ID NO: 20640 - protein, 9 aa, synthetic construct
  source 1..9: note = Seed: FYLTNDVSF
FLLTNDVSM

SEQ ID NO: 20641 - protein, 9 aa, synthetic construct
  source 1..9: note = Seed: FYLTNDVSF
FLLTNDVSY

SEQ ID NO: 20642 - protein, 10 aa, synthetic construct
  source 1..10: note = Seed: FQLTPIAVQM
FLLTPIAVQA

SEQ ID NO: 20643 - protein, 10 aa, synthetic construct
  source 1..10: note = Seed: FQLTPIAVQM
FLLTPIAVQF

SEQ ID NO: 20644 - protein, 10 aa, synthetic construct
  source 1..10: note = Seed: FQLTPIAVQM
FLLTPIAVQI

SEQ ID NO: 20645 - protein, 10 aa, synthetic construct
  source 1..10: note = Seed: FQLTPIAVQM
FLLTPIAVQL

SEQ ID NO: 20646 - protein, 10 aa, synthetic construct
  source 1..10: note = Seed: FQLTPIAVQM
FLLTPIAVQM

SEQ ID NO: 20647 - protein, 10 aa, synthetic construct
  source 1..10: note = Seed: FQLTPIAVQM
FLLTPIAVQT

SEQ ID NO: 20648 - protein, 10 aa, synthetic construct
  source 1..10: note = Seed: FQLTPIAVQM
FLLTPIAVQV

SEQ ID NO: 20649 - protein, 10 aa, synthetic construct
  source 1..10: note = Seed: FQLTPIAVQM
FLLTPIAVQY

SEQ ID NO: 20650 - protein, 9 aa, synthetic construct
  source 1..9: note = Seed: FELTSMKYF
FLLTSMKYF

SEQ ID NO: 20651 - protein, 10 aa, synthetic construct
  source 1..10: note = Seed: FELTSMKYFV
FLLTSMKYFA

SEQ ID NO: 20652 - protein, 10 aa, synthetic construct
  source 1..10: note = Seed: FELTSMKYFV
FLLTSMKYFI

SEQ ID NO: 20653 - protein, 10 aa, synthetic construct
  source 1..10: note = Seed: FELTSMKYFV
FLLTSMKYFL

SEQ ID NO: 20654 - protein, 10 aa, synthetic construct
  source 1..10: note = Seed: FELTSMKYFV
FLLTSMKYFM

SEQ ID NO: 20655 - protein, 10 aa, synthetic construct
  source 1..10: note = Seed: FELTSMKYFV
FLLTSMKYFT

SEQ ID NO: 20656 - protein, 10 aa, synthetic construct
  source 1..10: note = Seed: FELTSMKYFV
FLLTSMKYFV

SEQ ID NO: 20657 - protein, 9 aa, synthetic construct
  source 1..9: note = Seed: FGLVAEWFL
FLLVAEWFA

SEQ ID NO: 20658 - protein, 9 aa, synthetic construct
  source 1..9: note = Seed: FGLVAEWFL
FLLVAEWFI

SEQ ID NO: 20659 - protein, 9 aa, synthetic construct
  source 1..9: note = Seed: FGLVAEWFL
FLLVAEWFL

SEQ ID NO: 20660 - protein, 10 aa, synthetic construct
  source 1..10: note = Seed: FGLVAEWFLA
FLLVAEWFLA

SEQ ID NO: 20661 - protein, 10 aa, synthetic construct
  source 1..10: note = Seed: FGLVAEWFLA
FLLVAEWFLC

SEQ ID NO: 20662 - protein, 10 aa, synthetic construct
  source 1..10: note = Seed: FGLVAEWFLA
FLLVAEWFLD

SEQ ID NO: 20663 - protein, 10 aa, synthetic construct
  source 1..10: note = Seed: FGLVAEWFLA
FLLVAEWFLE

SEQ ID NO: 20664 - protein, 10 aa, synthetic construct
  source 1..10: note = Seed: FGLVAEWFLA
FLLVAEWFLF

SEQ ID NO: 20665 - protein, 10 aa, synthetic construct
  source 1..10: note = Seed: FGLVAEWFLA
FLLVAEWFLG

SEQ ID NO: 20666 - protein, 10 aa, synthetic construct
  source 1..10: note = Seed: FGLVAEWFLA
FLLVAEWFLH

SEQ ID NO: 20667 - protein, 10 aa, synthetic construct
  source 1..10: note = Seed: FGLVAEWFLA
FLLVAEWFLI

SEQ ID NO: 20668 - protein, 10 aa, synthetic construct
  source 1..10: note = Seed: FGLVAEWFLA
FLLVAEWFLK

SEQ ID NO: 20669 - protein, 10 aa, synthetic construct
  source 1..10: note = Seed: FGLVAEWFLA
FLLVAEWFLL

SEQ ID NO: 20670 - protein, 10 aa, synthetic construct
  source 1..10: note = Seed: FGLVAEWFLA
FLLVAEWFLM

SEQ ID NO: 20671 - protein, 10 aa, synthetic construct
  source 1..10: note = Seed: FGLVAEWFLA
FLLVAEWFLN

SEQ ID NO: 20672 - protein, 10 aa, synthetic construct
  source 1..10: note = Seed: FGLVAEWFLA
FLLVAEWFLP

SEQ ID NO: 20673 - protein, 10 aa, synthetic construct
  source 1..10: note = Seed: FGLVAEWFLA
FLLVAEWFLQ

SEQ ID NO: 20674 - protein, 10 aa, synthetic construct
  source 1..10: note = Seed: FGLVAEWFLA
FLLVAEWFLR

SEQ ID NO: 20675 - protein, 10 aa, synthetic construct
  source 1..10: note = Seed: FGLVAEWFLA
FLLVAEWFLS

SEQ ID NO: 20676 - protein, 10 aa, synthetic construct
  source 1..10: note = Seed: FGLVAEWFLA
FLLVAEWFLT

SEQ ID NO: 20677 - protein, 10 aa, synthetic construct
  source 1..10: note = Seed: FGLVAEWFLA
FLLVAEWFLV

SEQ ID NO: 20678 - protein, 10 aa, synthetic construct
  source 1..10: note = Seed: FGLVAEWFLA
FLLVAEWFLW

SEQ ID NO: 20679 - protein, 10 aa, synthetic construct
  source 1..10: note = Seed: FGLVAEWFLA
FLLVAEWFLY

SEQ ID NO: 20680 - protein, 9 aa, synthetic construct
  source 1..9: note = Seed: FGLVAEWFL
FLLVAEWFM

SEQ ID NO: 20681 - protein, 9 aa, synthetic construct
  source 1..9: note = Seed: FGLVAEWFL
FLLVAEWFS

SEQ ID NO: 20682 - protein, 9 aa, synthetic construct
  source 1..9: note = Seed: FGLVAEWFL
FLLVAEWFT

SEQ ID NO: 20683 - protein, 9 aa, synthetic construct
  source 1..9: note = Seed: FGLVAEWFL
FLLVAEWFV

SEQ ID NO: 20684 - protein, 10 aa, synthetic construct
  source 1..10: note = Seed: FVLWAHGFEL
FLLWAHGFEA

SEQ ID NO: 20685 - protein, 10 aa, synthetic construct
  source 1..10: note = Seed: FVLWAHGFEL
FLLWAHGFEC

SEQ ID NO: 20686 - protein, 10 aa, synthetic construct
  source 1..10: note = Seed: FVLWAHGFEL
FLLWAHGFEF

SEQ ID NO: 20687 - protein, 10 aa, synthetic construct
  source 1..10: note = Seed: FVLWAHGFEL
FLLWAHGFEI

SEQ ID NO: 20688 - protein, 10 aa, synthetic construct
  source 1..10: note = Seed: FVLWAHGFEL
FLLWAHGFEL

SEQ ID NO: 20689 - protein, 11 aa, synthetic construct
  source 1..11: note = Seed: FVLWAHGFELT
FLLWAHGFELA

SEQ ID NO: 20690 - protein, 11 aa, synthetic construct
  source 1..11: note = Seed: FVLWAHGFELT
FLLWAHGFELC

SEQ ID NO: 20691 - protein, 11 aa, synthetic construct
  source 1..11: note = Seed: FVLWAHGFELT
FLLWAHGFELD

SEQ ID NO: 20692 - protein, 11 aa, synthetic construct
  source 1..11: note = Seed: FVLWAHGFELT
FLLWAHGFELE

SEQ ID NO: 20693 - protein, 11 aa, synthetic construct
  source 1..11: note = Seed: FVLWAHGFELT
FLLWAHGFELF

SEQ ID NO: 20694 - protein, 11 aa, synthetic construct
  source 1..11: note = Seed: FVLWAHGFELT
FLLWAHGFELG

SEQ ID NO: 20695 - protein, 11 aa, synthetic construct
  source 1..11: note = Seed: FVLWAHGFELT
FLLWAHGFELH

SEQ ID NO: 20696 - protein, 11 aa, synthetic construct
  source 1..11: note = Seed: FVLWAHGFELT
FLLWAHGFELI

SEQ ID NO: 20697 - protein, 11 aa, synthetic construct
  source 1..11: note = Seed: FVLWAHGFELT
FLLWAHGFELK

SEQ ID NO: 20698 - protein, 11 aa, synthetic construct
  source 1..11: note = Seed: FVLWAHGFELT
FLLWAHGFELL

SEQ ID NO: 20699 - protein, 11 aa, synthetic construct
  source 1..11: note = Seed: FVLWAHGFELT
FLLWAHGFELM

SEQ ID NO: 20700 - protein, 11 aa, synthetic construct
  source 1..11: note = Seed: FVLWAHGFELT
FLLWAHGFELN

SEQ ID NO: 20701 - protein, 11 aa, synthetic construct
  source 1..11: note = Seed: FVLWAHGFELT
FLLWAHGFELP

SEQ ID NO: 20702 - protein, 11 aa, synthetic construct
  source 1..11: note = Seed: FVLWAHGFELT
FLLWAHGFELQ

SEQ ID NO: 20703 - protein, 11 aa, synthetic construct
  source 1..11: note = Seed: FVLWAHGFELT
FLLWAHGFELR

SEQ ID NO: 20704 - protein, 11 aa, synthetic construct
  source 1..11: note = Seed: FVLWAHGFELT
FLLWAHGFELS

SEQ ID NO: 20705 - protein, 11 aa, synthetic construct
  source 1..11: note = Seed: FVLWAHGFELT
FLLWAHGFELT

SEQ ID NO: 20706 - protein, 11 aa, synthetic construct
  source 1..11: note = Seed: FVLWAHGFELT
FLLWAHGFELV

SEQ ID NO: 20707 - protein, 11 aa, synthetic construct
  source 1..11: note = Seed: FVLWAHGFELT
FLLWAHGFELW

SEQ ID NO: 20708 - protein, 11 aa, synthetic construct
  source 1..11: note = Seed: FVLWAHGFELT
FLLWAHGFELY

SEQ ID NO: 20709 - protein, 10 aa, synthetic construct
  source 1..10: note = Seed: FVLWAHGFEL
FLLWAHGFEM

SEQ ID NO: 20710 - protein, 10 aa, synthetic construct
  source 1..10: note = Seed: FVLWAHGFEL
FLLWAHGFES

SEQ ID NO: 20711 - protein, 10 aa, synthetic construct
  source 1..10: note = Seed: FVLWAHGFEL
FLLWAHGFET

SEQ ID NO: 20712 - protein, 10 aa, synthetic construct
  source 1..10: note = Seed: FVLWAHGFEL
FLLWAHGFEV

SEQ ID NO: 20713 - protein, 9 aa, synthetic construct
  source 1..9: note = Seed: FHLYLQYIR
FLLYLQYIR

SEQ ID NO: 20714 - protein, 10 aa, synthetic construct
  source 1..10: note = Seed: FSMMILSDDA
FLMMILSDDA

SEQ ID NO: 20715 - protein, 11 aa, synthetic construct
  source 1..11: note = Seed: FSMMILSDDAV
FLMMILSDDAA

SEQ ID NO: 20716 - protein, 11 aa, synthetic construct
  source 1..11: note = Seed: FSMMILSDDAV
FLMMILSDDAI

SEQ ID NO: 20717 - protein, 11 aa, synthetic construct
  source 1..11: note = Seed: FSMMILSDDAV
FLMMILSDDAL

SEQ ID NO: 20718 - protein, 11 aa, synthetic construct
  source 1..11: note = Seed: FSMMILSDDAV
FLMMILSDDAV

SEQ ID NO: 20719 - protein, 10 aa, synthetic construct
  source 1..10: note = Seed: FSMMILSDDA
FLMMILSDDI

SEQ ID NO: 20720 - protein, 10 aa, synthetic construct
  source 1..10: note = Seed: FSMMILSDDA
FLMMILSDDL

SEQ ID NO: 20721 - protein, 10 aa, synthetic construct
  source 1..10: note = Seed: FSMMILSDDA
FLMMILSDDM

SEQ ID NO: 20722 - protein, 10 aa, synthetic construct
  source 1..10: note = Seed: FSMMILSDDA
FLMMILSDDV

SEQ ID NO: 20723 - protein, 10 aa, synthetic construct
  source 1..10: note = Seed: FKMNYQVNGY
FLMNYQVNGF

SEQ ID NO: 20724 - protein, 10 aa, synthetic construct
  source 1..10: note = Seed: FKMNYQVNGY
FLMNYQVNGY

SEQ ID NO: 20725 - protein, 9 aa, synthetic construct
  source 1..9: note = Seed: FAMQMAYRF
FLMQMAYRA

SEQ ID NO: 20726 - protein, 9 aa, synthetic construct
  source 1..9: note = Seed: FAMQMAYRF
FLMQMAYRF

SEQ ID NO: 20727 - protein, 9 aa, synthetic construct
  source 1..9: note = Seed: FAMQMAYRF
FLMQMAYRI

SEQ ID NO: 20728 - protein, 9 aa, synthetic construct
  source 1..9: note = Seed: FAMQMAYRF
FLMQMAYRL

SEQ ID NO: 20729 - protein, 9 aa, synthetic construct
  source 1..9: note = Seed: FAMQMAYRF
FLMQMAYRM

SEQ ID NO: 20730 - protein, 9 aa, synthetic construct
  source 1..9: note = Seed: FAMQMAYRF
FLMQMAYRT

SEQ ID NO: 20731 - protein, 9 aa, synthetic construct
  source 1..9: note = Seed: FAMQMAYRF
FLMQMAYRV

SEQ ID NO: 20732 - protein, 9 aa, synthetic construct
  source 1..9: note = Seed: FAMQMAYRF
FLMQMAYRY

SEQ ID NO: 20733 - protein, 8 aa, synthetic construct
  source 1..8: note = Seed: FDMSKFPL
FLMSKFPA

SEQ ID NO: 20734 - protein, 8 aa, synthetic construct
  source 1..8: note = Seed: FDMSKFPL
FLMSKFPF

SEQ ID NO: 20735 - protein, 8 aa, synthetic construct
  source 1..8: note = Seed: FDMSKFPL
FLMSKFPI

SEQ ID NO: 20736 - protein, 8 aa, synthetic construct
  source 1..8: note = Seed: FDMSKFPL
FLMSKFPL

SEQ ID NO: 20737 - protein, 10 aa, synthetic construct
  source 1..10: note = Seed: FDMSKFPLKL
FLMSKFPLKA

SEQ ID NO: 20738 - protein, 10 aa, synthetic construct
  source 1..10: note = Seed: FDMSKFPLKL
FLMSKFPLKC

SEQ ID NO: 20739 - protein, 10 aa, synthetic construct
  source 1..10: note = Seed: FDMSKFPLKL
FLMSKFPLKI

SEQ ID NO: 20740 - protein, 10 aa, synthetic construct
  source 1..10: note = Seed: FDMSKFPLKL
FLMSKFPLKL

SEQ ID NO: 20741 - protein, 10 aa, synthetic construct
  source 1..10: note = Seed: FDMSKFPLKL
FLMSKFPLKM

SEQ ID NO: 20742 - protein, 10 aa, synthetic construct
  source 1..10: note = Seed: FDMSKFPLKL
FLMSKFPLKS

SEQ ID NO: 20743 - protein, 10 aa, synthetic construct
  source 1..10: note = Seed: FDMSKFPLKL
FLMSKFPLKT

SEQ ID NO: 20744 - protein, 10 aa, synthetic construct
  source 1..10: note = Seed: FDMSKFPLKL
FLMSKFPLKV

SEQ ID NO: 20745 - protein, 8 aa, synthetic construct
  source 1..8: note = Seed: FDMSKFPL
FLMSKFPM

SEQ ID NO: 20746 - protein, 8 aa, synthetic construct
  source 1..8: note = Seed: FDMSKFPL
FLMSKFPV

SEQ ID NO: 20747 - protein, 10 aa, synthetic construct
  source 1..10: note = Seed: FNMVYMPASW
FLMVYMPASF

SEQ ID NO: 20748 - protein, 10 aa, synthetic construct
  source 1..10: note = Seed: FNMVYMPASW
FLMVYMPASM

SEQ ID NO: 20749 - protein, 10 aa, synthetic construct
  source 1..10: note = Seed: FNMVYMPASW
FLMVYMPASY

SEQ ID NO: 20750 - protein, 9 aa, synthetic construct
  source 1..9: note = Seed: FENKTTLPV
FLNKTTLPF

SEQ ID NO: 20751 - protein, 9 aa, synthetic construct
  source 1..9: note = Seed: FENKTTLPV
FLNKTTLPL

SEQ ID NO: 20752 - protein, 9 aa, synthetic construct
  source 1..9: note = Seed: FENKTTLPV
FLNKTTLPM

SEQ ID NO: 20753 - protein, 9 aa, synthetic construct
  source 1..9: note = Seed: FENKTTLPV
FLNKTTLPY

SEQ ID NO: 20754 - protein, 9 aa, synthetic construct
  source 1..9: note = Seed: FVNLKQLPF
FLNLKQLPF

SEQ ID NO: 20755 - protein, 11 aa, synthetic construct
  source 1..11: note = Seed: FVNLKQLPFFY
FLNLKQLPFFY

SEQ ID NO: 20756 - protein, 9 aa, synthetic construct
  source 1..9: note = Seed: FVNLKQLPF
FLNLKQLPI

SEQ ID NO: 20757 - protein, 9 aa, synthetic construct
  source 1..9: note = Seed: FVNLKQLPF
FLNLKQLPL

SEQ ID NO: 20758 - protein, 9 aa, synthetic construct
  source 1..9: note = Seed: FVNLKQLPF
FLNLKQLPM

SEQ ID NO: 20759 - protein, 9 aa, synthetic construct
  source 1..9: note = Seed: FVNLKQLPF
FLNLKQLPV

SEQ ID NO: 20760 - protein, 9 aa, synthetic construct
  source 1..9: note = Seed: FVNLKQLPF
FLNLKQLPY

SEQ ID NO: 20761 - protein, 9 aa, synthetic construct
  source 1..9: note = Seed: FTNVYADSF
FLNVYADSF

SEQ ID NO: 20762 - protein, 10 aa, synthetic construct
  source 1..10: note = Seed: FTNVYADSFV
FLNVYADSFA

SEQ ID NO: 20763 - protein, 10 aa, synthetic construct
  source 1..10: note = Seed: FTNVYADSFV
FLNVYADSFI

SEQ ID NO: 20764 - protein, 10 aa, synthetic construct
  source 1..10: note = Seed: FTNVYADSFV
FLNVYADSFL

SEQ ID NO: 20765 - protein, 10 aa, synthetic construct
  source 1..10: note = Seed: FTNVYADSFV
FLNVYADSFM

SEQ ID NO: 20766 - protein, 10 aa, synthetic construct
  source 1..10: note = Seed: FTNVYADSFV
FLNVYADSFV

SEQ ID NO: 20767 - protein, 11 aa, synthetic construct
  source 1..11: note = Seed: FTNVYADSFVI
FLNVYADSFVA

SEQ ID NO: 20768 - protein, 11 aa, synthetic construct
  source 1..11: note = Seed: FTNVYADSFVI
FLNVYADSFVI

SEQ ID NO: 20769 - protein, 11 aa, synthetic construct
  source 1..11: note = Seed: FTNVYADSFVI
FLNVYADSFVL

SEQ ID NO: 20770 - protein, 11 aa, synthetic construct
  source 1..11: note = Seed: FTNVYADSFVI
FLNVYADSFVM

SEQ ID NO: 20771 - protein, 11 aa, synthetic construct
  source 1..11: note = Seed: FTNVYADSFVI
FLNVYADSFVV

SEQ ID NO: 20772 - protein, 9 aa, synthetic construct
  source 1..9: note = Seed: FTNVYADSF
FLNVYADSM

SEQ ID NO: 20773 - protein, 9 aa, synthetic construct
  source 1..9: note = Seed: FTNVYADSF
FLNVYADSY

SEQ ID NO: 20774 - protein, 9 aa, synthetic construct
  source 1..9: note = Seed: FNPETNILL
FLPETNILL

SEQ ID NO: 20775 - protein, 9 aa, synthetic construct
  source 1..9: note = Seed: FNPETNILL
FLPETNILM

SEQ ID NO: 20776 - protein, 10 aa, synthetic construct
  source 1..10: note = Seed: FTPFDVVRQC
FLPFDVVRQA

SEQ ID NO: 20777 - protein, 9 aa, synthetic construct
  source 1..9: note = Seed: FLPFFSNVT
FLPFFSNVA

SEQ ID NO: 20778 - protein, 9 aa, synthetic construct
  source 1..9: note = Seed: FLPFFSNVT
FLPFFSNVI

SEQ ID NO: 20779 - protein, 9 aa, synthetic construct
  source 1..9: note = Seed: FLPFFSNVT
FLPFFSNVL

SEQ ID NO: 20780 - protein, 9 aa, synthetic construct
  source 1..9: note = Seed: FLPFFSNVT
FLPFFSNVM

SEQ ID NO: 20781 - protein, 10 aa, synthetic construct
  source 1..10: note = Seed: FLPFFSNVTW
FLPFFSNVTF

SEQ ID NO: 20782 - protein, 10 aa, synthetic construct
  source 1..10: note = Seed: FLPFFSNVTW
FLPFFSNVTH

SEQ ID NO: 20783 - protein, 10 aa, synthetic construct
  source 1..10: note = Seed: FLPFFSNVTW
FLPFFSNVTL

SEQ ID NO: 20784 - protein, 10 aa, synthetic construct
  source 1..10: note = Seed: FLPFFSNVTW
FLPFFSNVTM

SEQ ID NO: 20785 - protein, 10 aa, synthetic construct
  source 1..10: note = Seed: FLPFFSNVTW
FLPFFSNVTY

SEQ ID NO: 20786 - protein, 9 aa, synthetic construct
  source 1..9: note = Seed: FLPFFSNVT
FLPFFSNVV

SEQ ID NO: 20787 - protein, 11 aa, synthetic construct
  source 1..11: note = Seed: FLPFQQFGRDI
FLPFQQFGRDV

SEQ ID NO: 20788 - protein, 8 aa, synthetic construct
  source 1..8: note = Seed: FLPGVYSV
FLPGVYSA

SEQ ID NO: 20789 - protein, 8 aa, synthetic construct
  source 1..8: note = Seed: FLPGVYSV
FLPGVYSI

SEQ ID NO: 20790 - protein, 8 aa, synthetic construct
  source 1..8: note = Seed: FLPGVYSV
FLPGVYSL

SEQ ID NO: 20791 - protein, 8 aa, synthetic construct
  source 1..8: note = Seed: FLPGVYSV
FLPGVYSM

SEQ ID NO: 20792 - protein, 9 aa, synthetic construct
  source 1..9: note = Seed: FTPLVPFWI
FLPLVPFWA

SEQ ID NO: 20793 - protein, 9 aa, synthetic construct
  source 1..9: note = Seed: FTPLVPFWI
FLPLVPFWI

SEQ ID NO: 20794 - protein, 10 aa, synthetic construct
  source 1..10: note = Seed: FTPLVPFWIT
FLPLVPFWIA

SEQ ID NO: 20795 - protein, 11 aa, synthetic construct
  source 1..11: note = Seed: FTPLVPFWITI
FLPLVPFWITI

SEQ ID NO: 20796 - protein, 11 aa, synthetic construct
  source 1..11: note = Seed: FTPLVPFWITI
FLPLVPFWITL

SEQ ID NO: 20797 - protein, 11 aa, synthetic construct
  source 1..11: note = Seed: FTPLVPFWITI
FLPLVPFWITV

SEQ ID NO: 20798 - protein, 9 aa, synthetic construct
  source 1..9: note = Seed: FTPLVPFWI
FLPLVPFWL

SEQ ID NO: 20799 - protein, 9 aa, synthetic construct
  source 1..9: note = Seed: FTPLVPFWI
FLPLVPFWM

SEQ ID NO: 20800 - protein, 9 aa, synthetic construct
  source 1..9: note = Seed: FTPLVPFWI
FLPLVPFWT

SEQ ID NO: 20801 - protein, 9 aa, synthetic construct
  source 1..9: note = Seed: FTPLVPFWI
FLPLVPFWV

SEQ ID NO: 20802 - protein, 9 aa, synthetic construct
  source 1..9: note = Seed: FLPRVFSAV
FLPRVFSAA

SEQ ID NO: 20803 - protein, 9 aa, synthetic construct
  source 1..9: note = Seed: FLPRVFSAV
FLPRVFSAI

SEQ ID NO: 20804 - protein, 9 aa, synthetic construct
  source 1..9: note = Seed: FLPRVFSAV
FLPRVFSAL

SEQ ID NO: 20805 - protein, 9 aa, synthetic construct
  source 1..9: note = Seed: FLPRVFSAV
FLPRVFSAM

SEQ ID NO: 20806 - protein, 9 aa, synthetic construct
  source 1..9: note = Seed: FLPRVFSAV
FLPRVFSAS

SEQ ID NO: 20807 - protein, 9 aa, synthetic construct
  source 1..9: note = Seed: FLPRVFSAV
FLPRVFSAT

SEQ ID NO: 20808 - protein, 10 aa, synthetic construct
  source 1..10: note = Seed: FLPRVFSAVG
FLPRVFSAVA

SEQ ID NO: 20809 - protein, 10 aa, synthetic construct
  source 1..10: note = Seed: FLPRVFSAVG
FLPRVFSAVC

SEQ ID NO: 20810 - protein, 10 aa, synthetic construct
  source 1..10: note = Seed: FLPRVFSAVG
FLPRVFSAVD

SEQ ID NO: 20811 - protein, 10 aa, synthetic construct
  source 1..10: note = Seed: FLPRVFSAVG
FLPRVFSAVE

SEQ ID NO: 20812 - protein, 10 aa, synthetic construct
  source 1..10: note = Seed: FLPRVFSAVG
FLPRVFSAVF

SEQ ID NO: 20813 - protein, 10 aa, synthetic construct
  source 1..10: note = Seed: FLPRVFSAVG
FLPRVFSAVH

SEQ ID NO: 20814 - protein, 10 aa, synthetic construct
  source 1..10: note = Seed: FLPRVFSAVG
FLPRVFSAVI

SEQ ID NO: 20815 - protein, 10 aa, synthetic construct
  source 1..10: note = Seed: FLPRVFSAVG
FLPRVFSAVK

SEQ ID NO: 20816 - protein, 10 aa, synthetic construct
  source 1..10: note = Seed: FLPRVFSAVG
FLPRVFSAVL

SEQ ID NO: 20817 - protein, 10 aa, synthetic construct
  source 1..10: note = Seed: FLPRVFSAVG
FLPRVFSAVM

SEQ ID NO: 20818 - protein, 10 aa, synthetic construct
  source 1..10: note = Seed: FLPRVFSAVG
FLPRVFSAVN

SEQ ID NO: 20819 - protein, 10 aa, synthetic construct
  source 1..10: note = Seed: FLPRVFSAVG
FLPRVFSAVP

SEQ ID NO: 20820 - protein, 10 aa, synthetic construct
  source 1..10: note = Seed: FLPRVFSAVG
FLPRVFSAVQ

SEQ ID NO: 20821 - protein, 10 aa, synthetic construct
  source 1..10: note = Seed: FLPRVFSAVG
FLPRVFSAVR

SEQ ID NO: 20822 - protein, 10 aa, synthetic construct
  source 1..10: note = Seed: FLPRVFSAVG
FLPRVFSAVS

SEQ ID NO: 20823 - protein, 10 aa, synthetic construct
  source 1..10: note = Seed: FLPRVFSAVG
FLPRVFSAVT

SEQ ID NO: 20824 - protein, 10 aa, synthetic construct
  source 1..10: note = Seed: FLPRVFSAVG
FLPRVFSAVV

SEQ ID NO: 20825 - protein, 10 aa, synthetic construct
  source 1..10: note = Seed: FLPRVFSAVG
FLPRVFSAVW

SEQ ID NO: 20826 - protein, 10 aa, synthetic construct
  source 1..10: note = Seed: FLPRVFSAVG
FLPRVFSAVY

SEQ ID NO: 20827 - protein, 9 aa, synthetic construct
  source 1..9: note = Seed: FLPRVFSAV
FLPRVFSAY

SEQ ID NO: 20828 - protein, 8 aa, synthetic construct
  source 1..8: note = Seed: FLPRVFSA
FLPRVFSI

SEQ ID NO: 20829 - protein, 8 aa, synthetic construct
  source 1..8: note = Seed: FLPRVFSA
FLPRVFSL

SEQ ID NO: 20830 - protein, 8 aa, synthetic construct
  source 1..8: note = Seed: FLPRVFSA
FLPRVFSM

SEQ ID NO: 20831 - protein, 8 aa, synthetic construct
  source 1..8: note = Seed: FLPRVFSA
FLPRVFSV

SEQ ID NO: 20832 - protein, 9 aa, synthetic construct
  source 1..9: note = Seed: FAPSASAFF
FLPSASAFA

SEQ ID NO: 20833 - protein, 9 aa, synthetic construct
  source 1..9: note = Seed: FAPSASAFF
FLPSASAFF

SEQ ID NO: 20834 - protein, 9 aa, synthetic construct
  source 1..9: note = Seed: FAPSASAFF
FLPSASAFI

SEQ ID NO: 20835 - protein, 9 aa, synthetic construct
  source 1..9: note = Seed: FAPSASAFF
FLPSASAFL

SEQ ID NO: 20836 - protein, 9 aa, synthetic construct
  source 1..9: note = Seed: FAPSASAFF
FLPSASAFM

SEQ ID NO: 20837 - protein, 9 aa, synthetic construct
  source 1..9: note = Seed: FAPSASAFF
FLPSASAFV

SEQ ID NO: 20838 - protein, 9 aa, synthetic construct
  source 1..9: note = Seed: FAPSASAFF
FLPSASAFY

SEQ ID NO: 20839 - protein, 8 aa, synthetic construct
  source 1..8: note = Seed: FAPSASAF
FLPSASAL

SEQ ID NO: 20840 - protein, 10 aa, synthetic construct
  source 1..10: note = Seed: FPQSAPHGVV
FLQSAPHGVA

SEQ ID NO: 20841 - protein, 10 aa, synthetic construct
  source 1..10: note = Seed: FPQSAPHGVV
FLQSAPHGVC

SEQ ID NO: 20842 - protein, 10 aa, synthetic construct
  source 1..10: note = Seed: FPQSAPHGVV
FLQSAPHGVD

SEQ ID NO: 20843 - protein, 10 aa, synthetic construct
  source 1..10: note = Seed: FPQSAPHGVV
FLQSAPHGVE

SEQ ID NO: 20844 - protein, 10 aa, synthetic construct
  source 1..10: note = Seed: FPQSAPHGVV
FLQSAPHGVF

SEQ ID NO: 20845 - protein, 10 aa, synthetic construct
  source 1..10: note = Seed: FPQSAPHGVV
FLQSAPHGVG

SEQ ID NO: 20846 - protein, 10 aa, synthetic construct
  source 1..10: note = Seed: FPQSAPHGVV
FLQSAPHGVH

SEQ ID NO: 20847 - protein, 10 aa, synthetic construct
  source 1..10: note = Seed: FPQSAPHGVV
FLQSAPHGVI

SEQ ID NO: 20848 - protein, 10 aa, synthetic construct
  source 1..10: note = Seed: FPQSAPHGVV
FLQSAPHGVK

SEQ ID NO: 20849 - protein, 10 aa, synthetic construct
  source 1..10: note = Seed: FPQSAPHGVV
FLQSAPHGVL

SEQ ID NO: 20850 - protein, 10 aa, synthetic construct
  source 1..10: note = Seed: FPQSAPHGVV
FLQSAPHGVM

SEQ ID NO: 20851 - protein, 10 aa, synthetic construct
  source 1..10: note = Seed: FPQSAPHGVV
FLQSAPHGVN

SEQ ID NO: 20852 - protein, 10 aa, synthetic construct
  source 1..10: note = Seed: FPQSAPHGVV
FLQSAPHGVP

SEQ ID NO: 20853 - protein, 10 aa, synthetic construct
  source 1..10: note = Seed: FPQSAPHGVV
FLQSAPHGVQ

SEQ ID NO: 20854 - protein, 10 aa, synthetic construct
  source 1..10: note = Seed: FPQSAPHGVV
FLQSAPHGVR

SEQ ID NO: 20855 - protein, 10 aa, synthetic construct
  source 1..10: note = Seed: FPQSAPHGVV
FLQSAPHGVS

SEQ ID NO: 20856 - protein, 10 aa, synthetic construct
  source 1..10: note = Seed: FPQSAPHGVV
FLQSAPHGVT

SEQ ID NO: 20857 - protein, 10 aa, synthetic construct
  source 1..10: note = Seed: FPQSAPHGVV
FLQSAPHGVV

SEQ ID NO: 20858 - protein, 11 aa, synthetic construct
  source 1..11: note = Seed: FPQSAPHGVVF
FLQSAPHGVVF

SEQ ID NO: 20859 - protein, 11 aa, synthetic construct
  source 1..11: note = Seed: FPQSAPHGVVF
FLQSAPHGVVL

SEQ ID NO: 20860 - protein, 11 aa, synthetic construct
  source 1..11: note = Seed: FPQSAPHGVVF
FLQSAPHGVVM

SEQ ID NO: 20861 - protein, 11 aa, synthetic construct
  source 1..11: note = Seed: FPQSAPHGVVF
FLQSAPHGVVW

SEQ ID NO: 20862 - protein, 11 aa, synthetic construct
  source 1..11: note = Seed: FPQSAPHGVVF
FLQSAPHGVVY

SEQ ID NO: 20863 - protein, 10 aa, synthetic construct
  source 1..10: note = Seed: FPQSAPHGVV
FLQSAPHGVW

SEQ ID NO: 20864 - protein, 10 aa, synthetic construct
  source 1..10: note = Seed: FPQSAPHGVV
FLQSAPHGVY

SEQ ID NO: 20865 - protein, 8 aa, synthetic construct
  source 1..8: note = Seed: FLQSINFV
FLQSINFI

SEQ ID NO: 20866 - protein, 8 aa, synthetic construct
  source 1..8: note = Seed: FLQSINFV
FLQSINFL

SEQ ID NO: 20867 - protein, 9 aa, synthetic construct
  source 1..9: note = Seed: FLQSINFVR
FLQSINFVK

SEQ ID NO: 20868 - protein, 10 aa, synthetic construct
  source 1..10: note = Seed: FLQSINFVRI
FLQSINFVRA

SEQ ID NO: 20869 - protein, 11 aa, synthetic construct
  source 1..11: note = Seed: FLQSINFVRII
FLQSINFVRIL

SEQ ID NO: 20870 - protein, 11 aa, synthetic construct
  source 1..11: note = Seed: FLQSINFVRII
FLQSINFVRIV

SEQ ID NO: 20871 - protein, 10 aa, synthetic construct
  source 1..10: note = Seed: FLQSINFVRI
FLQSINFVRL

SEQ ID NO: 20872 - protein, 10 aa, synthetic construct
  source 1..10: note = Seed: FLQSINFVRI
FLQSINFVRM

SEQ ID NO: 20873 - protein, 10 aa, synthetic construct
  source 1..10: note = Seed: FLQSINFVRI
FLQSINFVRR

SEQ ID NO: 20874 - protein, 10 aa, synthetic construct
  source 1..10: note = Seed: FLQSINFVRI
FLQSINFVRT

SEQ ID NO: 20875 - protein, 10 aa, synthetic construct
  source 1..10: note = Seed: FLQSINFVRI
FLQSINFVRV

SEQ ID NO: 20876 - protein, 10 aa, synthetic construct
  source 1..10: note = Seed: FTQSRNLQEF
FLQSRNLQEF

SEQ ID NO: 20877 - protein, 10 aa, synthetic construct
  source 1..10: note = Seed: FTQSRNLQEF
FLQSRNLQEY

SEQ ID NO: 20878 - protein, 9 aa, synthetic construct
  source 1..9: note = Seed: FAQVKQIYK
FLQVKQIYK

SEQ ID NO: 20879 - protein, 9 aa, synthetic construct
  source 1..9: note = Seed: FAQVKQIYK
FLQVKQIYR

SEQ ID NO: 20880 - protein, 9 aa, synthetic construct
  source 1..9: note = Seed: FLRDGWEIV
FLRDGWEIA

SEQ ID NO: 20881 - protein, 9 aa, synthetic construct
  source 1..9: note = Seed: FLRDGWEIV
FLRDGWEII

SEQ ID NO: 20882 - protein, 9 aa, synthetic construct
  source 1..9: note = Seed: FLRDGWEIV
FLRDGWEIL

SEQ ID NO: 20883 - protein, 9 aa, synthetic construct
  source 1..9: note = Seed: FLRDGWEIV
FLRDGWEIM

SEQ ID NO: 20884 - protein, 10 aa, synthetic construct
  source 1..10: note = Seed: FLRDGWEIVK
FLRDGWEIVA

SEQ ID NO: 20885 - protein, 10 aa, synthetic construct
  source 1..10: note = Seed: FLRDGWEIVK
FLRDGWEIVI

SEQ ID NO: 20886 - protein, 10 aa, synthetic construct
  source 1..10: note = Seed: FLRDGWEIVK
FLRDGWEIVL

SEQ ID NO: 20887 - protein, 10 aa, synthetic construct
  source 1..10: note = Seed: FLRDGWEIVK
FLRDGWEIVV

SEQ ID NO: 20888 - protein, 8 aa, synthetic construct
  source 1..8: note = Seed: FLRDGWEI
FLRDGWEL

SEQ ID NO: 20889 - protein, 8 aa, synthetic construct
  source 1..8: note = Seed: FLRDGWEI
FLRDGWEV

SEQ ID NO: 20890 - protein, 9 aa, synthetic construct
  source 1..9: note = Seed: FPREGVFVS
FLREGVFVY

SEQ ID NO: 20891 - protein, 10 aa, synthetic construct
  source 1..10: note = Seed: FTRFFYVLGL
FLRFFYVLGA

SEQ ID NO: 20892 - protein, 10 aa, synthetic construct
  source 1..10: note = Seed: FTRFFYVLGL
FLRFFYVLGI

SEQ ID NO: 20893 - protein, 10 aa, synthetic construct
  source 1..10: note = Seed: FTRFFYVLGL
FLRFFYVLGK

SEQ ID NO: 20894 - protein, 10 aa, synthetic construct
  source 1..10: note = Seed: FTRFFYVLGL
FLRFFYVLGL

SEQ ID NO: 20895 - protein, 10 aa, synthetic construct
  source 1..10: note = Seed: FTRFFYVLGL
FLRFFYVLGM

SEQ ID NO: 20896 - protein, 10 aa, synthetic construct
  source 1..10: note = Seed: FTRFFYVLGL
FLRFFYVLGT

SEQ ID NO: 20897 - protein, 10 aa, synthetic construct
  source 1..10: note = Seed: FTRFFYVLGL
FLRFFYVLGV

SEQ ID NO: 20898 - protein, 10 aa, synthetic construct
  source 1..10: note = Seed: FTRGVYYPDK
FLRGVYYPDR

SEQ ID NO: 20899 - protein, 9 aa, synthetic construct
  source 1..9: note = Seed: FISAARQGF
FLSAARQGF

SEQ ID NO: 20900 - protein, 10 aa, synthetic construct
  source 1..10: note = Seed: FISAARQGFV
FLSAARQGFA

SEQ ID NO: 20901 - protein, 10 aa, synthetic construct
  source 1..10: note = Seed: FISAARQGFV
FLSAARQGFI

SEQ ID NO: 20902 - protein, 10 aa, synthetic construct
  source 1..10: note = Seed: FISAARQGFV
FLSAARQGFL

SEQ ID NO: 20903 - protein, 10 aa, synthetic construct
  source 1..10: note = Seed: FISAARQGFV
FLSAARQGFM

SEQ ID NO: 20904 - protein, 10 aa, synthetic construct
  source 1..10: note = Seed: FISAARQGFV
FLSAARQGFV

SEQ ID NO: 20905 - protein, 9 aa, synthetic construct
  source 1..9: note = Seed: FISAARQGF
FLSAARQGY

SEQ ID NO: 20906 - protein, 9 aa, synthetic construct
  source 1..9: note = Seed: FQSAVKRTI
FLSAVKRTA

SEQ ID NO: 20907 - protein, 9 aa, synthetic construct
  source 1..9: note = Seed: FQSAVKRTI
FLSAVKRTF

SEQ ID NO: 20908 - protein, 9 aa, synthetic construct
  source 1..9: note = Seed: FQSAVKRTI
FLSAVKRTI

SEQ ID NO: 20909 - protein, 9 aa, synthetic construct
  source 1..9: note = Seed: FQSAVKRTI
FLSAVKRTL

SEQ ID NO: 20910 - protein, 9 aa, synthetic construct
  source 1..9: note = Seed: FQSAVKRTI
FLSAVKRTM

SEQ ID NO: 20911 - protein, 9 aa, synthetic construct
  source 1..9: note = Seed: FQSAVKRTI
FLSAVKRTV

SEQ ID NO: 20912 - protein, 9 aa, synthetic construct
  source 1..9: note = Seed: FQSAVKRTI
FLSAVKRTY

SEQ ID NO: 20913 - protein, 10 aa, synthetic construct
  source 1..10: note = Seed: FISDEVARDL
FLSDEVARDA

SEQ ID NO: 20914 - protein, 10 aa, synthetic construct
  source 1..10: note = Seed: FISDEVARDL
FLSDEVARDI

SEQ ID NO: 20915 - protein, 10 aa, synthetic construct
  source 1..10: note = Seed: FISDEVARDL
FLSDEVARDL

SEQ ID NO: 20916 - protein, 10 aa, synthetic construct
  source 1..10: note = Seed: FISDEVARDL
FLSDEVARDM

SEQ ID NO: 20917 - protein, 10 aa, synthetic construct
  source 1..10: note = Seed: FISDEVARDL
FLSDEVARDV

SEQ ID NO: 20918 - protein, 10 aa, synthetic construct
  source 1..10: note = Seed: FTSDLATNNL
FLSDLATNNA

SEQ ID NO: 20919 - protein, 10 aa, synthetic construct
  source 1..10: note = Seed: FTSDLATNNL
FLSDLATNNI

SEQ ID NO: 20920 - protein, 10 aa, synthetic construct
  source 1..10: note = Seed: FTSDLATNNL
FLSDLATNNL

SEQ ID NO: 20921 - protein, 11 aa, synthetic construct
  source 1..11: note = Seed: FTSDLATNNLV
FLSDLATNNLA

SEQ ID NO: 20922 - protein, 11 aa, synthetic construct
  source 1..11: note = Seed: FTSDLATNNLV
FLSDLATNNLC

SEQ ID NO: 20923 - protein, 11 aa, synthetic construct
  source 1..11: note = Seed: FTSDLATNNLV
FLSDLATNNLD

SEQ ID NO: 20924 - protein, 11 aa, synthetic construct
  source 1..11: note = Seed: FTSDLATNNLV
FLSDLATNNLE

SEQ ID NO: 20925 - protein, 11 aa, synthetic construct
  source 1..11: note = Seed: FTSDLATNNLV
FLSDLATNNLF

SEQ ID NO: 20926 - protein, 11 aa, synthetic construct
  source 1..11: note = Seed: FTSDLATNNLV
FLSDLATNNLG

SEQ ID NO: 20927 - protein, 11 aa, synthetic construct
  source 1..11: note = Seed: FTSDLATNNLV
FLSDLATNNLH

SEQ ID NO: 20928 - protein, 11 aa, synthetic construct
  source 1..11: note = Seed: FTSDLATNNLV
FLSDLATNNLI

SEQ ID NO: 20929 - protein, 11 aa, synthetic construct
  source 1..11: note = Seed: FTSDLATNNLV
FLSDLATNNLK

SEQ ID NO: 20930 - protein, 11 aa, synthetic construct
  source 1..11: note = Seed: FTSDLATNNLV
FLSDLATNNLL

SEQ ID NO: 20931 - protein, 11 aa, synthetic construct
  source 1..11: note = Seed: FTSDLATNNLV
FLSDLATNNLM

SEQ ID NO: 20932 - protein, 11 aa, synthetic construct
  source 1..11: note = Seed: FTSDLATNNLV
FLSDLATNNLN

SEQ ID NO: 20933 - protein, 11 aa, synthetic construct
  source 1..11: note = Seed: FTSDLATNNLV
FLSDLATNNLP

SEQ ID NO: 20934 - protein, 11 aa, synthetic construct
  source 1..11: note = Seed: FTSDLATNNLV
FLSDLATNNLQ

SEQ ID NO: 20935 - protein, 11 aa, synthetic construct
  source 1..11: note = Seed: FTSDLATNNLV
FLSDLATNNLR

SEQ ID NO: 20936 - protein, 11 aa, synthetic construct
  source 1..11: note = Seed: FTSDLATNNLV
FLSDLATNNLS

SEQ ID NO: 20937 - protein, 11 aa, synthetic construct
  source 1..11: note = Seed: FTSDLATNNLV
FLSDLATNNLT

SEQ ID NO: 20938 - protein, 11 aa, synthetic construct
  source 1..11: note = Seed: FTSDLATNNLV
FLSDLATNNLV

SEQ ID NO: 20939 - protein, 11 aa, synthetic construct
  source 1..11: note = Seed: FTSDLATNNLV
FLSDLATNNLW

SEQ ID NO: 20940 - protein, 11 aa, synthetic construct
  source 1..11: note = Seed: FTSDLATNNLV
FLSDLATNNLY

SEQ ID NO: 20941 - protein, 10 aa, synthetic construct
  source 1..10: note = Seed: FTSDLATNNL
FLSDLATNNM

SEQ ID NO: 20942 - protein, 10 aa, synthetic construct
  source 1..10: note = Seed: FTSDLATNNL
FLSDLATNNT

SEQ ID NO: 20943 - protein, 10 aa, synthetic construct
  source 1..10: note = Seed: FTSDLATNNL
FLSDLATNNV

SEQ ID NO: 20944 - protein, 9 aa, synthetic construct
  source 1..9: note = Seed: FTSDYYQLY
FLSDYYQLF

SEQ ID NO: 20945 - protein, 9 aa, synthetic construct
  source 1..9: note = Seed: FTSDYYQLY
FLSDYYQLM

SEQ ID NO: 20946 - protein, 9 aa, synthetic construct
  source 1..9: note = Seed: FTSDYYQLY
FLSDYYQLR

SEQ ID NO: 20947 - protein, 9 aa, synthetic construct
  source 1..9: note = Seed: FTSDYYQLY
FLSDYYQLY

SEQ ID NO: 20948 - protein, 10 aa, synthetic construct
  source 1..10: note = Seed: FTSDYYQLYS
FLSDYYQLYF

SEQ ID NO: 20949 - protein, 10 aa, synthetic construct
  source 1..10: note = Seed: FTSDYYQLYS
FLSDYYQLYM

SEQ ID NO: 20950 - protein, 10 aa, synthetic construct
  source 1..10: note = Seed: FTSDYYQLYS
FLSDYYQLYY

SEQ ID NO: 20951 - protein, 9 aa, synthetic construct
  source 1..9: note = Seed: FASFYYVWK
FLSFYYVWK

SEQ ID NO: 20952 - protein, 9 aa, synthetic construct
  source 1..9: note = Seed: FASFYYVWK
FLSFYYVWR

SEQ ID NO: 20953 - protein, 9 aa, synthetic construct
  source 1..9: note = Seed: FVSLAIDAY
FLSLAIDAF

SEQ ID NO: 20954 - protein, 9 aa, synthetic construct
  source 1..9: note = Seed: FVSLAIDAY
FLSLAIDAY

SEQ ID NO: 20955 - protein, 9 aa, synthetic construct
  source 1..9: note = Seed: FVSNGTHWF
FLSNGTHWA

SEQ ID NO: 20956 - protein, 9 aa, synthetic construct
  source 1..9: note = Seed: FVSNGTHWF
FLSNGTHWI

SEQ ID NO: 20957 - protein, 9 aa, synthetic construct
  source 1..9: note = Seed: FVSNGTHWF
FLSNGTHWL

SEQ ID NO: 20958 - protein, 9 aa, synthetic construct
  source 1..9: note = Seed: FVSNGTHWF
FLSNGTHWM

SEQ ID NO: 20959 - protein, 9 aa, synthetic construct
  source 1..9: note = Seed: FVSNGTHWF
FLSNGTHWV

SEQ ID NO: 20960 - protein, 9 aa, synthetic construct
  source 1..9: note = Seed: FVSNGTHWF
FLSNGTHWY

SEQ ID NO: 20961 - protein, 9 aa, synthetic construct
  source 1..9: note = Seed: FISNSWLMW
FLSNSWLMW

SEQ ID NO: 20962 - protein, 10 aa, synthetic construct
  source 1..10: note = Seed: FISNSWLMWL
FLSNSWLMWA

SEQ ID NO: 20963 - protein, 10 aa, synthetic construct
  source 1..10: note = Seed: FISNSWLMWL
FLSNSWLMWI

SEQ ID NO: 20964 - protein, 10 aa, synthetic construct
  source 1..10: note = Seed: FISNSWLMWL
FLSNSWLMWL

SEQ ID NO: 20965 - protein, 11 aa, synthetic construct
  source 1..11: note = Seed: FISNSWLMWLI
FLSNSWLMWLA

SEQ ID NO: 20966 - protein, 11 aa, synthetic construct
  source 1..11: note = Seed: FISNSWLMWLI
FLSNSWLMWLI

SEQ ID NO: 20967 - protein, 11 aa, synthetic construct
  source 1..11: note = Seed: FISNSWLMWLI
FLSNSWLMWLL

SEQ ID NO: 20968 - protein, 11 aa, synthetic construct
  source 1..11: note = Seed: FISNSWLMWLI
FLSNSWLMWLM

SEQ ID NO: 20969 - protein, 11 aa, synthetic construct
  source 1..11: note = Seed: FISNSWLMWLI
FLSNSWLMWLT

SEQ ID NO: 20970 - protein, 11 aa, synthetic construct
  source 1..11: note = Seed: FISNSWLMWLI
FLSNSWLMWLV

SEQ ID NO: 20971 - protein, 10 aa, synthetic construct
  source 1..10: note = Seed: FISNSWLMWL
FLSNSWLMWM

SEQ ID NO: 20972 - protein, 10 aa, synthetic construct
  source 1..10: note = Seed: FISNSWLMWL
FLSNSWLMWS

SEQ ID NO: 20973 - protein, 10 aa, synthetic construct
  source 1..10: note = Seed: FISNSWLMWL
FLSNSWLMWT

SEQ ID NO: 20974 - protein, 10 aa, synthetic construct
  source 1..10: note = Seed: FISNSWLMWL
FLSNSWLMWV

SEQ ID NO: 20975 - protein, 9 aa, synthetic construct
  source 1..9: note = Seed: FSSNVANYQ
FLSNVANYK

SEQ ID NO: 20976 - protein, 10 aa, synthetic construct
  source 1..10: note = Seed: FSSNVANYQK
FLSNVANYQK

SEQ ID NO: 20977 - protein, 10 aa, synthetic construct
  source 1..10: note = Seed: FSSNVANYQK
FLSNVANYQR

SEQ ID NO: 20978 - protein, 9 aa, synthetic construct
  source 1..9: note = Seed: FSSNVANYQ
FLSNVANYR

SEQ ID NO: 20979 - protein, 9 aa, synthetic construct
  source 1..9: note = Seed: FFSNVTWFH
FLSNVTWFF

SEQ ID NO: 20980 - protein, 9 aa, synthetic construct
  source 1..9: note = Seed: FFSNVTWFH
FLSNVTWFK

SEQ ID NO: 20981 - protein, 9 aa, synthetic construct
  source 1..9: note = Seed: FFSNVTWFH
FLSNVTWFR

SEQ ID NO: 20982 - protein, 9 aa, synthetic construct
  source 1..9: note = Seed: FFSNVTWFH
FLSNVTWFY

SEQ ID NO: 20983 - protein, 10 aa, synthetic construct
  source 1..10: note = Seed: FISPYNSQNA
FLSPYNSQNA

SEQ ID NO: 20984 - protein, 11 aa, synthetic construct
  source 1..11: note = Seed: FISPYNSQNAV
FLSPYNSQNAA

SEQ ID NO: 20985 - protein, 11 aa, synthetic construct
  source 1..11: note = Seed: FISPYNSQNAV
FLSPYNSQNAI

SEQ ID NO: 20986 - protein, 11 aa, synthetic construct
  source 1..11: note = Seed: FISPYNSQNAV
FLSPYNSQNAL

SEQ ID NO: 20987 - protein, 11 aa, synthetic construct
  source 1..11: note = Seed: FISPYNSQNAV
FLSPYNSQNAM

SEQ ID NO: 20988 - protein, 11 aa, synthetic construct
  source 1..11: note = Seed: FISPYNSQNAV
FLSPYNSQNAV

SEQ ID NO: 20989 - protein, 10 aa, synthetic construct
  source 1..10: note = Seed: FISPYNSQNA
FLSPYNSQNI

SEQ ID NO: 20990 - protein, 10 aa, synthetic construct
  source 1..10: note = Seed: FISPYNSQNA
FLSPYNSQNL

SEQ ID NO: 20991 - protein, 10 aa, synthetic construct
  source 1..10: note = Seed: FISPYNSQNA
FLSPYNSQNM

SEQ ID NO: 20992 - protein, 10 aa, synthetic construct
  source 1..10: note = Seed: FISPYNSQNA
FLSPYNSQNV

SEQ ID NO: 20993 - protein, 9 aa, synthetic construct
  source 1..9: note = Seed: FFSYFAVHF
FLSYFAVHF

SEQ ID NO: 20994 - protein, 10 aa, synthetic construct
  source 1..10: note = Seed: FFSYFAVHFI
FLSYFAVHFA

SEQ ID NO: 20995 - protein, 10 aa, synthetic construct
  source 1..10: note = Seed: FFSYFAVHFI
FLSYFAVHFF

SEQ ID NO: 20996 - protein, 10 aa, synthetic construct
  source 1..10: note = Seed: FFSYFAVHFI
FLSYFAVHFI

SEQ ID NO: 20997 - protein, 10 aa, synthetic construct
  source 1..10: note = Seed: FFSYFAVHFI
FLSYFAVHFL

SEQ ID NO: 20998 - protein, 10 aa, synthetic construct
  source 1..10: note = Seed: FFSYFAVHFI
FLSYFAVHFM

SEQ ID NO: 20999 - protein, 10 aa, synthetic construct
  source 1..10: note = Seed: FFSYFAVHFI
FLSYFAVHFS

SEQ ID NO: 21000 - protein, 10 aa, synthetic construct
  source 1..10: note = Seed: FFSYFAVHFI
FLSYFAVHFT

SEQ ID NO: 21001 - protein, 10 aa, synthetic construct
  source 1..10: note = Seed: FFSYFAVHFI
FLSYFAVHFV

SEQ ID NO: 21002 - protein, 10 aa, synthetic construct
  source 1..10: note = Seed: FFSYFAVHFI
FLSYFAVHFW

SEQ ID NO: 21003 - protein, 10 aa, synthetic construct
  source 1..10: note = Seed: FFSYFAVHFI
FLSYFAVHFY

SEQ ID NO: 21004 - protein, 9 aa, synthetic construct
  source 1..9: note = Seed: FFSYFAVHF
FLSYFAVHY

SEQ ID NO: 21005 - protein, 9 aa, synthetic construct
  source 1..9: note = Seed: FSTFEEAAL
FLTFEEAAL

SEQ ID NO: 21006 - protein, 9 aa, synthetic construct
  source 1..9: note = Seed: FSTFEEAAL
FLTFEEAAV

SEQ ID NO: 21007 - protein, 9 aa, synthetic construct
  source 1..9: note = Seed: FSTFKCYGV
FLTFKCYGA

SEQ ID NO: 21008 - protein, 9 aa, synthetic construct
  source 1..9: note = Seed: FSTFKCYGV
FLTFKCYGI

SEQ ID NO: 21009 - protein, 9 aa, synthetic construct
  source 1..9: note = Seed: FSTFKCYGV
FLTFKCYGL

SEQ ID NO: 21010 - protein, 9 aa, synthetic construct
  source 1..9: note = Seed: FSTFKCYGV
FLTFKCYGM

SEQ ID NO: 21011 - protein, 9 aa, synthetic construct
  source 1..9: note = Seed: FSTFKCYGV
FLTFKCYGT

SEQ ID NO: 21012 - protein, 9 aa, synthetic construct
  source 1..9: note = Seed: FSTFKCYGV
FLTFKCYGV

SEQ ID NO: 21013 - protein, 9 aa, synthetic construct
  source 1..9: note = Seed: FVTHSKGLY
FLTHSKGLY

SEQ ID NO: 21014 - protein, 10 aa, synthetic construct
  source 1..10: note = Seed: FVTHSKGLYR
FLTHSKGLYK

SEQ ID NO: 21015 - protein, 10 aa, synthetic construct
  source 1..10: note = Seed: FVTHSKGLYR
FLTHSKGLYR

SEQ ID NO: 21016 - protein, 9 aa, synthetic construct
  source 1..9: note = Seed: FQTRAGCLI
FLTRAGCLA

SEQ ID NO: 21017 - protein, 9 aa, synthetic construct
  source 1..9: note = Seed: FQTRAGCLI
FLTRAGCLF

SEQ ID NO: 21018 - protein, 9 aa, synthetic construct
  source 1..9: note = Seed: FQTRAGCLI
FLTRAGCLI

SEQ ID NO: 21019 - protein, 11 aa, synthetic construct
  source 1..11: note = Seed: FQTRAGCLIGA
FLTRAGCLIGI

SEQ ID NO: 21020 - protein, 11 aa, synthetic construct
  source 1..11: note = Seed: FQTRAGCLIGA
FLTRAGCLIGL

SEQ ID NO: 21021 - protein, 11 aa, synthetic construct
  source 1..11: note = Seed: FQTRAGCLIGA
FLTRAGCLIGV

SEQ ID NO: 21022 - protein, 9 aa, synthetic construct
  source 1..9: note = Seed: FQTRAGCLI
FLTRAGCLL

SEQ ID NO: 21023 - protein, 9 aa, synthetic construct
  source 1..9: note = Seed: FQTRAGCLI
FLTRAGCLM

SEQ ID NO: 21024 - protein, 9 aa, synthetic construct
  source 1..9: note = Seed: FQTRAGCLI
FLTRAGCLV

SEQ ID NO: 21025 - protein, 9 aa, synthetic construct
  source 1..9: note = Seed: FQTRAGCLI
FLTRAGCLY

SEQ ID NO: 21026 - protein, 9 aa, synthetic construct
  source 1..9: note = Seed: FTTVDNINL
FLTVDNINA

SEQ ID NO: 21027 - protein, 9 aa, synthetic construct
  source 1..9: note = Seed: FTTVDNINL
FLTVDNINI

SEQ ID NO: 21028 - protein, 9 aa, synthetic construct
  source 1..9: note = Seed: FTTVDNINL
FLTVDNINL

SEQ ID NO: 21029 - protein, 9 aa, synthetic construct
  source 1..9: note = Seed: FTTVDNINL
FLTVDNINM

SEQ ID NO: 21030 - protein, 9 aa, synthetic construct
  source 1..9: note = Seed: FTTVDNINL
FLTVDNINV

SEQ ID NO: 21031 - protein, 8 aa, synthetic construct
  source 1..8: note = Seed: FLTWICLL
FLTWICLI

SEQ ID NO: 21032 - protein, 11 aa, synthetic construct
  source 1..11: note = Seed: FLTWICLLQFA
FLTWICLLQFI

SEQ ID NO: 21033 - protein, 11 aa, synthetic construct
  source 1..11: note = Seed: FLTWICLLQFA
FLTWICLLQFL

SEQ ID NO: 21034 - protein, 11 aa, synthetic construct
  source 1..11: note = Seed: FLTWICLLQFA
FLTWICLLQFV

SEQ ID NO: 21035 - protein, 8 aa, synthetic construct
  source 1..8: note = Seed: FLTWICLL
FLTWICLV

SEQ ID NO: 21036 - protein, 10 aa, synthetic construct
  source 1..10: note = Seed: FDTYNLWNTF
FLTYNLWNTF

SEQ ID NO: 21037 - protein, 10 aa, synthetic construct
  source 1..10: note = Seed: FDTYNLWNTF
FLTYNLWNTW

SEQ ID NO: 21038 - protein, 10 aa, synthetic construct
  source 1..10: note = Seed: FDTYNLWNTF
FLTYNLWNTY

SEQ ID NO: 21039 - protein, 9 aa, synthetic construct
  source 1..9: note = Seed: FAVDAAKAY
FLVDAAKAF

SEQ ID NO: 21040 - protein, 9 aa, synthetic construct
  source 1..9: note = Seed: FAVDAAKAY
FLVDAAKAL

SEQ ID NO: 21041 - protein, 9 aa, synthetic construct
  source 1..9: note = Seed: FAVDAAKAY
FLVDAAKAM

SEQ ID NO: 21042 - protein, 9 aa, synthetic construct
  source 1..9: note = Seed: FAVDAAKAY
FLVDAAKAY

SEQ ID NO: 21043 - protein, 10 aa, synthetic construct
  source 1..10: note = Seed: FAVDAAKAYK
FLVDAAKAYK

SEQ ID NO: 21044 - protein, 10 aa, synthetic construct
  source 1..10: note = Seed: FAVDAAKAYK
FLVDAAKAYR

SEQ ID NO: 21045 - protein, 9 aa, synthetic construct
  source 1..9: note = Seed: FAVHFISNS
FLVHFISNA

SEQ ID NO: 21046 - protein, 9 aa, synthetic construct
  source 1..9: note = Seed: FAVHFISNS
FLVHFISNI

SEQ ID NO: 21047 - protein, 9 aa, synthetic construct
  source 1..9: note = Seed: FAVHFISNS
FLVHFISNL

SEQ ID NO: 21048 - protein, 9 aa, synthetic construct
  source 1..9: note = Seed: FAVHFISNS
FLVHFISNM

SEQ ID NO: 21049 - protein, 9 aa, synthetic construct
  source 1..9: note = Seed: FAVHFISNS
FLVHFISNT

SEQ ID NO: 21050 - protein, 9 aa, synthetic construct
  source 1..9: note = Seed: FAVHFISNS
FLVHFISNV

SEQ ID NO: 21051 - protein, 8 aa, synthetic construct
  source 1..8: note = Seed: FVVKRHTF
FLVKRHTF

SEQ ID NO: 21052 - protein, 8 aa, synthetic construct
  source 1..8: note = Seed: FVVKRHTF
FLVKRHTI

SEQ ID NO: 21053 - protein, 8 aa, synthetic construct
  source 1..8: note = Seed: FVVKRHTF
FLVKRHTL

SEQ ID NO: 21054 - protein, 8 aa, synthetic construct
  source 1..8: note = Seed: FVVKRHTF
FLVKRHTM

SEQ ID NO: 21055 - protein, 9 aa, synthetic construct
  source 1..9: note = Seed: FNVLFSTVF
FLVLFSTVF

SEQ ID NO: 21056 - protein, 9 aa, synthetic construct
  source 1..9: note = Seed: FNVLFSTVF
FLVLFSTVY

SEQ ID NO: 21057 - protein, 9 aa, synthetic construct
  source 1..9: note = Seed: FLVLIMLII
FLVLIMLIV

SEQ ID NO: 21058 - protein, 10 aa, synthetic construct
  source 1..10: note = Seed: FKVSIWNLDY
FLVSIWNLDY

SEQ ID NO: 21059 - protein, 9 aa, synthetic construct
  source 1..9: note = Seed: FVVSTGYHF
FLVSTGYHA

SEQ ID NO: 21060 - protein, 9 aa, synthetic construct
  source 1..9: note = Seed: FVVSTGYHF
FLVSTGYHF

SEQ ID NO: 21061 - protein, 10 aa, synthetic construct
  source 1..10: note = Seed: FVVSTGYHFR
FLVSTGYHFK

SEQ ID NO: 21062 - protein, 10 aa, synthetic construct
  source 1..10: note = Seed: FVVSTGYHFR
FLVSTGYHFR

SEQ ID NO: 21063 - protein, 9 aa, synthetic construct
  source 1..9: note = Seed: FVVSTGYHF
FLVSTGYHI

SEQ ID NO: 21064 - protein, 9 aa, synthetic construct
  source 1..9: note = Seed: FVVSTGYHF
FLVSTGYHL

SEQ ID NO: 21065 - protein, 9 aa, synthetic construct
  source 1..9: note = Seed: FVVSTGYHF
FLVSTGYHM

SEQ ID NO: 21066 - protein, 9 aa, synthetic construct
  source 1..9: note = Seed: FVVSTGYHF
FLVSTGYHV

SEQ ID NO: 21067 - protein, 9 aa, synthetic construct
  source 1..9: note = Seed: FVVSTGYHF
FLVSTGYHY

SEQ ID NO: 21068 - protein, 10 aa, synthetic construct
  source 1..10: note = Seed: FDVVRQCSGV
FLVVRQCSGA

SEQ ID NO: 21069 - protein, 10 aa, synthetic construct
  source 1..10: note = Seed: FDVVRQCSGV
FLVVRQCSGI

SEQ ID NO: 21070 - protein, 10 aa, synthetic construct
  source 1..10: note = Seed: FDVVRQCSGV
FLVVRQCSGL

SEQ ID NO: 21071 - protein, 10 aa, synthetic construct
  source 1..10: note = Seed: FDVVRQCSGV
FLVVRQCSGV

SEQ ID NO: 21072 - protein, 9 aa, synthetic construct
  source 1..9: note = Seed: FYWFFSNYL
FLWFFSNYA

SEQ ID NO: 21073 - protein, 9 aa, synthetic construct
  source 1..9: note = Seed: FYWFFSNYL
FLWFFSNYC

SEQ ID NO: 21074 - protein, 9 aa, synthetic construct
  source 1..9: note = Seed: FYWFFSNYL
FLWFFSNYF

SEQ ID NO: 21075 - protein, 9 aa, synthetic construct
  source 1..9: note = Seed: FYWFFSNYL
FLWFFSNYG

SEQ ID NO: 21076 - protein, 9 aa, synthetic construct
  source 1..9: note = Seed: FYWFFSNYL
FLWFFSNYI

SEQ ID NO: 21077 - protein, 9 aa, synthetic construct
  source 1..9: note = Seed: FYWFFSNYL
FLWFFSNYL

SEQ ID NO: 21078 - protein, 10 aa, synthetic construct
  source 1..10: note = Seed: FYWFFSNYLK
FLWFFSNYLF

SEQ ID NO: 21079 - protein, 10 aa, synthetic construct
  source 1..10: note = Seed: FYWFFSNYLK
FLWFFSNYLK

SEQ ID NO: 21080 - protein, 10 aa, synthetic construct
  source 1..10: note = Seed: FYWFFSNYLK
FLWFFSNYLR

SEQ ID NO: 21081 - protein, 10 aa, synthetic construct
  source 1..10: note = Seed: FYWFFSNYLK
FLWFFSNYLY

SEQ ID NO: 21082 - protein, 9 aa, synthetic construct
  source 1..9: note = Seed: FYWFFSNYL
FLWFFSNYM

SEQ ID NO: 21083 - protein, 9 aa, synthetic construct
  source 1..9: note = Seed: FYWFFSNYL
FLWFFSNYS

SEQ ID NO: 21084 - protein, 9 aa, synthetic construct
  source 1..9: note = Seed: FYWFFSNYL
FLWFFSNYT

SEQ ID NO: 21085 - protein, 9 aa, synthetic construct
  source 1..9: note = Seed: FYWFFSNYL
FLWFFSNYV

SEQ ID NO: 21086 - protein, 9 aa, synthetic construct
  source 1..9: note = Seed: FYWFFSNYL
FLWFFSNYY

SEQ ID NO: 21087 - protein, 8 aa, synthetic construct
  source 1..8: note = Seed: FLWLLWPV
FLWLLWPA

SEQ ID NO: 21088 - protein, 8 aa, synthetic construct
  source 1..8: note = Seed: FLWLLWPV
FLWLLWPI

SEQ ID NO: 21089 - protein, 8 aa, synthetic construct
  source 1..8: note = Seed: FLWLLWPV
FLWLLWPL

SEQ ID NO: 21090 - protein, 8 aa, synthetic construct
  source 1..8: note = Seed: FLWLLWPV
FLWLLWPM

SEQ ID NO: 21091 - protein, 8 aa, synthetic construct
  source 1..8: note = Seed: FLWLLWPV
FLWLLWPS

SEQ ID NO: 21092 - protein, 8 aa, synthetic construct
  source 1..8: note = Seed: FLWLLWPV
FLWLLWPT

SEQ ID NO: 21093 - protein, 9 aa, synthetic construct
  source 1..9: note = Seed: FLWLLWPVT
FLWLLWPVA

SEQ ID NO: 21094 - protein, 9 aa, synthetic construct
  source 1..9: note = Seed: FLWLLWPVT
FLWLLWPVI

SEQ ID NO: 21095 - protein, 9 aa, synthetic construct
  source 1..9: note = Seed: FLWLLWPVT
FLWLLWPVL

SEQ ID NO: 21096 - protein, 9 aa, synthetic construct
  source 1..9: note = Seed: FLWLLWPVT
FLWLLWPVM

SEQ ID NO: 21097 - protein, 10 aa, synthetic construct
  source 1..10: note = Seed: FLWLLWPVTL
FLWLLWPVTA

SEQ ID NO: 21098 - protein, 10 aa, synthetic construct
  source 1..10: note = Seed: FLWLLWPVTL
FLWLLWPVTF

SEQ ID NO: 21099 - protein, 10 aa, synthetic construct
  source 1..10: note = Seed: FLWLLWPVTL
FLWLLWPVTI

SEQ ID NO: 21100 - protein, 11 aa, synthetic construct
  source 1..11: note = Seed: FLWLLWPVTLA
FLWLLWPVTLI

SEQ ID NO: 21101 - protein, 11 aa, synthetic construct
  source 1..11: note = Seed: FLWLLWPVTLA
FLWLLWPVTLL

SEQ ID NO: 21102 - protein, 11 aa, synthetic construct
  source 1..11: note = Seed: FLWLLWPVTLA
FLWLLWPVTLM

SEQ ID NO: 21103 - protein, 11 aa, synthetic construct
  source 1..11: note = Seed: FLWLLWPVTLA
FLWLLWPVTLV

SEQ ID NO: 21104 - protein, 10 aa, synthetic construct
  source 1..10: note = Seed: FLWLLWPVTL
FLWLLWPVTM

SEQ ID NO: 21105 - protein, 10 aa, synthetic construct
  source 1..10: note = Seed: FLWLLWPVTL
FLWLLWPVTS

SEQ ID NO: 21106 - protein, 10 aa, synthetic construct
  source 1..10: note = Seed: FLWLLWPVTL
FLWLLWPVTT

SEQ ID NO: 21107 - protein, 10 aa, synthetic construct
  source 1..10: note = Seed: FLWLLWPVTL
FLWLLWPVTV

SEQ ID NO: 21108 - protein, 9 aa, synthetic construct
  source 1..9: note = Seed: FLWLLWPVT
FLWLLWPVV

SEQ ID NO: 21109 - protein, 9 aa, synthetic construct
  source 1..9: note = Seed: FSYFAVHFI
FLYFAVHFA

SEQ ID NO: 21110 - protein, 9 aa, synthetic construct
  source 1..9: note = Seed: FSYFAVHFI
FLYFAVHFC

SEQ ID NO: 21111 - protein, 9 aa, synthetic construct
  source 1..9: note = Seed: FSYFAVHFI
FLYFAVHFF

SEQ ID NO: 21112 - protein, 9 aa, synthetic construct
  source 1..9: note = Seed: FSYFAVHFI
FLYFAVHFG

SEQ ID NO: 21113 - protein, 9 aa, synthetic construct
  source 1..9: note = Seed: FSYFAVHFI
FLYFAVHFI

SEQ ID NO: 21114 - protein, 9 aa, synthetic construct
  source 1..9: note = Seed: FSYFAVHFI
FLYFAVHFL

SEQ ID NO: 21115 - protein, 9 aa, synthetic construct
  source 1..9: note = Seed: FSYFAVHFI
FLYFAVHFM

SEQ ID NO: 21116 - protein, 9 aa, synthetic construct
  source 1..9: note = Seed: FSYFAVHFI
FLYFAVHFP

SEQ ID NO: 21117 - protein, 9 aa, synthetic construct
  source 1..9: note = Seed: FSYFAVHFI
FLYFAVHFS

SEQ ID NO: 21118 - protein, 9 aa, synthetic construct
  source 1..9: note = Seed: FSYFAVHFI
FLYFAVHFT

SEQ ID NO: 21119 - protein, 9 aa, synthetic construct
  source 1..9: note = Seed: FSYFAVHFI
FLYFAVHFV

SEQ ID NO: 21120 - protein, 9 aa, synthetic construct
  source 1..9: note = Seed: FSYFAVHFI
FLYFAVHFY

SEQ ID NO: 21121 - protein, 9 aa, synthetic construct
  source 1..9: note = Seed: FYYLGTGPE
FLYLGTGPF

SEQ ID NO: 21122 - protein, 9 aa, synthetic construct
  source 1..9: note = Seed: FYYLGTGPE
FLYLGTGPL

SEQ ID NO: 21123 - protein, 9 aa, synthetic construct
  source 1..9: note = Seed: FYYLGTGPE
FLYLGTGPM

SEQ ID NO: 21124 - protein, 9 aa, synthetic construct
  source 1..9: note = Seed: FYYLGTGPE
FLYLGTGPY

SEQ ID NO: 21125 - protein, 9 aa, synthetic construct
  source 1..9: note = Seed: FNYLKSPNF
FLYLKSPNF

SEQ ID NO: 21126 - protein, 9 aa, synthetic construct
  source 1..9: note = Seed: FNYLKSPNF
FLYLKSPNY

SEQ ID NO: 21127 - protein, 9 aa, synthetic construct
  source 1..9: note = Seed: FCYMHHMEL
FLYMHHMEA

SEQ ID NO: 21128 - protein, 9 aa, synthetic construct
  source 1..9: note = Seed: FCYMHHMEL
FLYMHHMEC

SEQ ID NO: 21129 - protein, 9 aa, synthetic construct
  source 1..9: note = Seed: FCYMHHMEL
FLYMHHMEF

SEQ ID NO: 21130 - protein, 9 aa, synthetic construct
  source 1..9: note = Seed: FCYMHHMEL
FLYMHHMEH

SEQ ID NO: 21131 - protein, 9 aa, synthetic construct
  source 1..9: note = Seed: FCYMHHMEL
FLYMHHMEI

SEQ ID NO: 21132 - protein, 9 aa, synthetic construct
  source 1..9: note = Seed: FCYMHHMEL
FLYMHHMEL

SEQ ID NO: 21133 - protein, 9 aa, synthetic construct
  source 1..9: note = Seed: FCYMHHMEL
FLYMHHMEM

SEQ ID NO: 21134 - protein, 9 aa, synthetic construct
  source 1..9: note = Seed: FCYMHHMEL
FLYMHHMES

SEQ ID NO: 21135 - protein, 9 aa, synthetic construct
  source 1..9: note = Seed: FCYMHHMEL
FLYMHHMET

SEQ ID NO: 21136 - protein, 9 aa, synthetic construct
  source 1..9: note = Seed: FCYMHHMEL
FLYMHHMEV

SEQ ID NO: 21137 - protein, 9 aa, synthetic construct
  source 1..9: note = Seed: FCYMHHMEL
FLYMHHMEW

SEQ ID NO: 21138 - protein, 9 aa, synthetic construct
  source 1..9: note = Seed: FCYMHHMEL
FLYMHHMEY

SEQ ID NO: 21139 - protein, 9 aa, synthetic construct
  source 1..9: note = Seed: FRYMNSQGL
FLYMNSQGF

SEQ ID NO: 21140 - protein, 9 aa, synthetic construct
  source 1..9: note = Seed: FRYMNSQGL
FLYMNSQGM

SEQ ID NO: 21141 - protein, 9 aa, synthetic construct
  source 1..9: note = Seed: FRYMNSQGL
FLYMNSQGY

SEQ ID NO: 21142 - protein, 8 aa, synthetic construct
  source 1..8: note = Seed: FEYVSQPF
FLYVSQPF

SEQ ID NO: 21143 - protein, 8 aa, synthetic construct
  source 1..8: note = Seed: FEYVSQPF
FLYVSQPY

SEQ ID NO: 21144 - protein, 9 aa, synthetic construct
  source 1..9: note = Seed: FYYVWKSYV
FLYVWKSYA

SEQ ID NO: 21145 - protein, 9 aa, synthetic construct
  source 1..9: note = Seed: FYYVWKSYV
FLYVWKSYC

SEQ ID NO: 21146 - protein, 9 aa, synthetic construct
  source 1..9: note = Seed: FYYVWKSYV
FLYVWKSYF

SEQ ID NO: 21147 - protein, 9 aa, synthetic construct
  source 1..9: note = Seed: FYYVWKSYV
FLYVWKSYI

SEQ ID NO: 21148 - protein, 9 aa, synthetic construct
  source 1..9: note = Seed: FYYVWKSYV
FLYVWKSYL

SEQ ID NO: 21149 - protein, 9 aa, synthetic construct
  source 1..9: note = Seed: FYYVWKSYV
FLYVWKSYM

SEQ ID NO: 21150 - protein, 9 aa, synthetic construct
  source 1..9: note = Seed: FYYVWKSYV
FLYVWKSYS

SEQ ID NO: 21151 - protein, 9 aa, synthetic construct
  source 1..9: note = Seed: FYYVWKSYV
FLYVWKSYT

SEQ ID NO: 21152 - protein, 9 aa, synthetic construct
  source 1..9: note = Seed: FYYVWKSYV
FLYVWKSYV

SEQ ID NO: 21153 - protein, 11 aa, synthetic construct
  source 1..11: note = Seed: FYYVWKSYVHV
FLYVWKSYVHA

SEQ ID NO: 21154 - protein, 11 aa, synthetic construct
  source 1..11: note = Seed: FYYVWKSYVHV
FLYVWKSYVHI

SEQ ID NO: 21155 - protein, 11 aa, synthetic construct
  source 1..11: note = Seed: FYYVWKSYVHV
FLYVWKSYVHL

SEQ ID NO: 21156 - protein, 11 aa, synthetic construct
  source 1..11: note = Seed: FYYVWKSYVHV
FLYVWKSYVHV

SEQ ID NO: 21157 - protein, 10 aa, synthetic construct
  source 1..10: note = Seed: FYYVWKSYVH
FLYVWKSYVM

SEQ ID NO: 21158 - protein, 10 aa, synthetic construct
  source 1..10: note = Seed: FYYVWKSYVH
FLYVWKSYVY

SEQ ID NO: 21159 - protein, 9 aa, synthetic construct
  source 1..9: note = Seed: FFYYSDSPC
FLYYSDSPF

SEQ ID NO: 21160 - protein, 9 aa, synthetic construct
  source 1..9: note = Seed: FFYYSDSPC
FLYYSDSPL

SEQ ID NO: 21161 - protein, 9 aa, synthetic construct
  source 1..9: note = Seed: FFYYSDSPC
FLYYSDSPM

SEQ ID NO: 21162 - protein, 9 aa, synthetic construct
  source 1..9: note = Seed: FFYYSDSPC
FLYYSDSPY

SEQ ID NO: 21163 - protein, 8 aa, synthetic construct
  source 1..8: note = Seed: FVAAIFYL
FMAAIFYA

SEQ ID NO: 21164 - protein, 8 aa, synthetic construct
  source 1..8: note = Seed: FVAAIFYL
FMAAIFYI

SEQ ID NO: 21165 - protein, 8 aa, synthetic construct
  source 1..8: note = Seed: FVAAIFYL
FMAAIFYL

SEQ ID NO: 21166 - protein, 9 aa, synthetic construct
  source 1..9: note = Seed: FVAAIFYLI
FMAAIFYLA

SEQ ID NO: 21167 - protein, 9 aa, synthetic construct
  source 1..9: note = Seed: FVAAIFYLI
FMAAIFYLC

SEQ ID NO: 21168 - protein, 9 aa, synthetic construct
  source 1..9: note = Seed: FVAAIFYLI
FMAAIFYLE

SEQ ID NO: 21169 - protein, 9 aa, synthetic construct
  source 1..9: note = Seed: FVAAIFYLI
FMAAIFYLF

SEQ ID NO: 21170 - protein, 9 aa, synthetic construct
  source 1..9: note = Seed: FVAAIFYLI
FMAAIFYLG

SEQ ID NO: 21171 - protein, 9 aa, synthetic construct
  source 1..9: note = Seed: FVAAIFYLI
FMAAIFYLH

SEQ ID NO: 21172 - protein, 9 aa, synthetic construct
  source 1..9: note = Seed: FVAAIFYLI
FMAAIFYLI

SEQ ID NO: 21173 - protein, 9 aa, synthetic construct
  source 1..9: note = Seed: FVAAIFYLI
FMAAIFYLK

SEQ ID NO: 21174 - protein, 9 aa, synthetic construct
  source 1..9: note = Seed: FVAAIFYLI
FMAAIFYLL

SEQ ID NO: 21175 - protein, 9 aa, synthetic construct
  source 1..9: note = Seed: FVAAIFYLI
FMAAIFYLM

SEQ ID NO: 21176 - protein, 9 aa, synthetic construct
  source 1..9: note = Seed: FVAAIFYLI
FMAAIFYLP

SEQ ID NO: 21177 - protein, 9 aa, synthetic construct
  source 1..9: note = Seed: FVAAIFYLI
FMAAIFYLR

SEQ ID NO: 21178 - protein, 9 aa, synthetic construct
  source 1..9: note = Seed: FVAAIFYLI
FMAAIFYLS

SEQ ID NO: 21179 - protein, 9 aa, synthetic construct
  source 1..9: note = Seed: FVAAIFYLI
FMAAIFYLT

SEQ ID NO: 21180 - protein, 9 aa, synthetic construct
  source 1..9: note = Seed: FVAAIFYLI
FMAAIFYLV

SEQ ID NO: 21181 - protein, 9 aa, synthetic construct
  source 1..9: note = Seed: FVAAIFYLI
FMAAIFYLW

SEQ ID NO: 21182 - protein, 9 aa, synthetic construct
  source 1..9: note = Seed: FVAAIFYLI
FMAAIFYLY

SEQ ID NO: 21183 - protein, 8 aa, synthetic construct
  source 1..8: note = Seed: FVAAIFYL
FMAAIFYM

SEQ ID NO: 21184 - protein, 8 aa, synthetic construct
  source 1..8: note = Seed: FVAAIFYL
FMAAIFYT

SEQ ID NO: 21185 - protein, 8 aa, synthetic construct
  source 1..8: note = Seed: FVAAIFYL
FMAAIFYV

SEQ ID NO: 21186 - protein, 10 aa, synthetic construct
  source 1..10: note = Seed: FCAFAVDAAK
FMAFAVDAAK

SEQ ID NO: 21187 - protein, 10 aa, synthetic construct
  source 1..10: note = Seed: FCAFAVDAAK
FMAFAVDAAR

SEQ ID NO: 21188 - protein, 8 aa, synthetic construct
  source 1..8: note = Seed: FLAFVVFL
FMAFVVFA

SEQ ID NO: 21189 - protein, 8 aa, synthetic construct
  source 1..8: note = Seed: FLAFVVFL
FMAFVVFI

SEQ ID NO: 21190 - protein, 8 aa, synthetic construct
  source 1..8: note = Seed: FLAFVVFL
FMAFVVFL

SEQ ID NO: 21191 - protein, 9 aa, synthetic construct
  source 1..9: note = Seed: FLAFVVFLL
FMAFVVFLA

SEQ ID NO: 21192 - protein, 9 aa, synthetic construct
  source 1..9: note = Seed: FLAFVVFLL
FMAFVVFLC

SEQ ID NO: 21193 - protein, 9 aa, synthetic construct
  source 1..9: note = Seed: FLAFVVFLL
FMAFVVFLF

SEQ ID NO: 21194 - protein, 9 aa, synthetic construct
  source 1..9: note = Seed: FLAFVVFLL
FMAFVVFLG

SEQ ID NO: 21195 - protein, 9 aa, synthetic construct
  source 1..9: note = Seed: FLAFVVFLL
FMAFVVFLI

SEQ ID NO: 21196 - protein, 9 aa, synthetic construct
  source 1..9: note = Seed: FLAFVVFLL
FMAFVVFLL

SEQ ID NO: 21197 - protein, 10 aa, synthetic construct
  source 1..10: note = Seed: FLAFVVFLLV
FMAFVVFLLA

SEQ ID NO: 21198 - protein, 10 aa, synthetic construct
  source 1..10: note = Seed: FLAFVVFLLV
FMAFVVFLLC

SEQ ID NO: 21199 - protein, 10 aa, synthetic construct
  source 1..10: note = Seed: FLAFVVFLLV
FMAFVVFLLD

SEQ ID NO: 21200 - protein, 10 aa, synthetic construct
  source 1..10: note = Seed: FLAFVVFLLV
FMAFVVFLLE

SEQ ID NO: 21201 - protein, 10 aa, synthetic construct
  source 1..10: note = Seed: FLAFVVFLLV
FMAFVVFLLF

SEQ ID NO: 21202 - protein, 10 aa, synthetic construct
  source 1..10: note = Seed: FLAFVVFLLV
FMAFVVFLLG

SEQ ID NO: 21203 - protein, 10 aa, synthetic construct
  source 1..10: note = Seed: FLAFVVFLLV
FMAFVVFLLH

SEQ ID NO: 21204 - protein, 10 aa, synthetic construct
  source 1..10: note = Seed: FLAFVVFLLV
FMAFVVFLLI

SEQ ID NO: 21205 - protein, 10 aa, synthetic construct
  source 1..10: note = Seed: FLAFVVFLLV
FMAFVVFLLK

SEQ ID NO: 21206 - protein, 10 aa, synthetic construct
  source 1..10: note = Seed: FLAFVVFLLV
FMAFVVFLLL

SEQ ID NO: 21207 - protein, 10 aa, synthetic construct
  source 1..10: note = Seed: FLAFVVFLLV
FMAFVVFLLM

SEQ ID NO: 21208 - protein, 10 aa, synthetic construct
  source 1..10: note = Seed: FLAFVVFLLV
FMAFVVFLLN

SEQ ID NO: 21209 - protein, 10 aa, synthetic construct
  source 1..10: note = Seed: FLAFVVFLLV
FMAFVVFLLP

SEQ ID NO: 21210 - protein, 10 aa, synthetic construct
  source 1..10: note = Seed: FLAFVVFLLV
FMAFVVFLLQ

SEQ ID NO: 21211 - protein, 10 aa, synthetic construct
  source 1..10: note = Seed: FLAFVVFLLV
FMAFVVFLLR

SEQ ID NO: 21212 - protein, 10 aa, synthetic construct
  source 1..10: note = Seed: FLAFVVFLLV
FMAFVVFLLS

SEQ ID NO: 21213 - protein, 10 aa, synthetic construct
  source 1..10: note = Seed: FLAFVVFLLV
FMAFVVFLLT

SEQ ID NO: 21214 - protein, 10 aa, synthetic construct
  source 1..10: note = Seed: FLAFVVFLLV
FMAFVVFLLV

SEQ ID NO: 21215 - protein, 10 aa, synthetic construct
  source 1..10: note = Seed: FLAFVVFLLV
FMAFVVFLLW

SEQ ID NO: 21216 - protein, 10 aa, synthetic construct
  source 1..10: note = Seed: FLAFVVFLLV
FMAFVVFLLY

SEQ ID NO: 21217 - protein, 9 aa, synthetic construct
  source 1..9: note = Seed: FLAFVVFLL
FMAFVVFLM

SEQ ID NO: 21218 - protein, 9 aa, synthetic construct
  source 1..9: note = Seed: FLAFVVFLL
FMAFVVFLS

SEQ ID NO: 21219 - protein, 9 aa, synthetic construct
  source 1..9: note = Seed: FLAFVVFLL
FMAFVVFLT

SEQ ID NO: 21220 - protein, 9 aa, synthetic construct
  source 1..9: note = Seed: FLAFVVFLL
FMAFVVFLV

SEQ ID NO: 21221 - protein, 8 aa, synthetic construct
  source 1..8: note = Seed: FLAFVVFL
FMAFVVFV

SEQ ID NO: 21222 - protein, 9 aa, synthetic construct
  source 1..9: note = Seed: FGAGAALQI
FMAGAALQL

SEQ ID NO: 21223 - protein, 9 aa, synthetic construct
  source 1..9: note = Seed: FGAGAALQI
FMAGAALQM

SEQ ID NO: 21224 - protein, 8 aa, synthetic construct
  source 1..8: note = Seed: FIAGLIAI
FMAGLIAA

SEQ ID NO: 21225 - protein, 8 aa, synthetic construct
  source 1..8: note = Seed: FIAGLIAI
FMAGLIAI

SEQ ID NO: 21226 - protein, 9 aa, synthetic construct
  source 1..9: note = Seed: FIAGLIAIV
FMAGLIAIA

SEQ ID NO: 21227 - protein, 9 aa, synthetic construct
  source 1..9: note = Seed: FIAGLIAIV
FMAGLIAIC

SEQ ID NO: 21228 - protein, 9 aa, synthetic construct
  source 1..9: note = Seed: FIAGLIAIV
FMAGLIAIF

SEQ ID NO: 21229 - protein, 9 aa, synthetic construct
  source 1..9: note = Seed: FIAGLIAIV
FMAGLIAIG

SEQ ID NO: 21230 - protein, 9 aa, synthetic construct
  source 1..9: note = Seed: FIAGLIAIV
FMAGLIAII

SEQ ID NO: 21231 - protein, 9 aa, synthetic construct
  source 1..9: note = Seed: FIAGLIAIV
FMAGLIAIL

SEQ ID NO: 21232 - protein, 9 aa, synthetic construct
  source 1..9: note = Seed: FIAGLIAIV
FMAGLIAIM

SEQ ID NO: 21233 - protein, 9 aa, synthetic construct
  source 1..9: note = Seed: FIAGLIAIV
FMAGLIAIP

SEQ ID NO: 21234 - protein, 9 aa, synthetic construct
  source 1..9: note = Seed: FIAGLIAIV
FMAGLIAIS

SEQ ID NO: 21235 - protein, 9 aa, synthetic construct
  source 1..9: note = Seed: FIAGLIAIV
FMAGLIAIT

SEQ ID NO: 21236 - protein, 9 aa, synthetic construct
  source 1..9: note = Seed: FIAGLIAIV
FMAGLIAIV

SEQ ID NO: 21237 - protein, 8 aa, synthetic construct
  source 1..8: note = Seed: FIAGLIAI
FMAGLIAL

SEQ ID NO: 21238 - protein, 8 aa, synthetic construct
  source 1..8: note = Seed: FIAGLIAI
FMAGLIAV

SEQ ID NO: 21239 - protein, 8 aa, synthetic construct
  source 1..8: note = Seed: FLAHIQWM
FMAHIQWA

SEQ ID NO: 21240 - protein, 8 aa, synthetic construct
  source 1..8: note = Seed: FLAHIQWM
FMAHIQWI

SEQ ID NO: 21241 - protein, 8 aa, synthetic construct
  source 1..8: note = Seed: FLAHIQWM
FMAHIQWL

SEQ ID NO: 21242 - protein, 9 aa, synthetic construct
  source 1..9: note = Seed: FLAHIQWMV
FMAHIQWMA

SEQ ID NO: 21243 - protein, 9 aa, synthetic construct
  source 1..9: note = Seed: FLAHIQWMV
FMAHIQWMC

SEQ ID NO: 21244 - protein, 9 aa, synthetic construct
  source 1..9: note = Seed: FLAHIQWMV
FMAHIQWMF

SEQ ID NO: 21245 - protein, 9 aa, synthetic construct
  source 1..9: note = Seed: FLAHIQWMV
FMAHIQWMG

SEQ ID NO: 21246 - protein, 9 aa, synthetic construct
  source 1..9: note = Seed: FLAHIQWMV
FMAHIQWMI

SEQ ID NO: 21247 - protein, 9 aa, synthetic construct
  source 1..9: note = Seed: FLAHIQWMV
FMAHIQWMK

SEQ ID NO: 21248 - protein, 9 aa, synthetic construct
  source 1..9: note = Seed: FLAHIQWMV
FMAHIQWML

SEQ ID NO: 21249 - protein, 9 aa, synthetic construct
  source 1..9: note = Seed: FLAHIQWMV
FMAHIQWMM

SEQ ID NO: 21250 - protein, 9 aa, synthetic construct
  source 1..9: note = Seed: FLAHIQWMV
FMAHIQWMP

SEQ ID NO: 21251 - protein, 9 aa, synthetic construct
  source 1..9: note = Seed: FLAHIQWMV
FMAHIQWMR

SEQ ID NO: 21252 - protein, 9 aa, synthetic construct
  source 1..9: note = Seed: FLAHIQWMV
FMAHIQWMS

SEQ ID NO: 21253 - protein, 9 aa, synthetic construct
  source 1..9: note = Seed: FLAHIQWMV
FMAHIQWMT

SEQ ID NO: 21254 - protein, 9 aa, synthetic construct
  source 1..9: note = Seed: FLAHIQWMV
FMAHIQWMV

SEQ ID NO: 21255 - protein, 8 aa, synthetic construct
  source 1..8: note = Seed: FLAHIQWM
FMAHIQWV

SEQ ID NO: 21256 - protein, 9 aa, synthetic construct
  source 1..9: note = Seed: FLALCADSI
FMALCADSA

SEQ ID NO: 21257 - protein, 9 aa, synthetic construct
  source 1..9: note = Seed: FLALCADSI
FMALCADSI

SEQ ID NO: 21258 - protein, 10 aa, synthetic construct
  source 1..10: note = Seed: FLALCADSII
FMALCADSIA

SEQ ID NO: 21259 - protein, 10 aa, synthetic construct
  source 1..10: note = Seed: FLALCADSII
FMALCADSII

SEQ ID NO: 21260 - protein, 11 aa, synthetic construct
  source 1..11: note = Seed: FLALCADSIII
FMALCADSIII

SEQ ID NO: 21261 - protein, 11 aa, synthetic construct
  source 1..11: note = Seed: FLALCADSIII
FMALCADSIIL

SEQ ID NO: 21262 - protein, 11 aa, synthetic construct
  source 1..11: note = Seed: FLALCADSIII
FMALCADSIIV

SEQ ID NO: 21263 - protein, 10 aa, synthetic construct
  source 1..10: note = Seed: FLALCADSII
FMALCADSIL

SEQ ID NO: 21264 - protein, 10 aa, synthetic construct
  source 1..10: note = Seed: FLALCADSII
FMALCADSIM

SEQ ID NO: 21265 - protein, 10 aa, synthetic construct
  source 1..10: note = Seed: FLALCADSII
FMALCADSIV

SEQ ID NO: 21266 - protein, 9 aa, synthetic construct
  source 1..9: note = Seed: FLALCADSI
FMALCADSL

SEQ ID NO: 21267 - protein, 9 aa, synthetic construct
  source 1..9: note = Seed: FLALCADSI
FMALCADSM

SEQ ID NO: 21268 - protein, 9 aa, synthetic construct
  source 1..9: note = Seed: FLALCADSI
FMALCADST

SEQ ID NO: 21269 - protein, 9 aa, synthetic construct
  source 1..9: note = Seed: FLALCADSI
FMALCADSV

SEQ ID NO: 21270 - protein, 10 aa, synthetic construct
  source 1..10: note = Seed: FSALEPLVDL
FMALEPLVDA

SEQ ID NO: 21271 - protein, 10 aa, synthetic construct
  source 1..10: note = Seed: FSALEPLVDL
FMALEPLVDI

SEQ ID NO: 21272 - protein, 10 aa, synthetic construct
  source 1..10: note = Seed: FSALEPLVDL
FMALEPLVDL

SEQ ID NO: 21273 - protein, 10 aa, synthetic construct
  source 1..10: note = Seed: FSALEPLVDL
FMALEPLVDV

SEQ ID NO: 21274 - protein, 9 aa, synthetic construct
  source 1..9: note = Seed: FTALTQHGK
FMALTQHGR

SEQ ID NO: 21275 - protein, 9 aa, synthetic construct
  source 1..9: note = Seed: FIASFRLFA
FMASFRLFA

SEQ ID NO: 21276 - protein, 10 aa, synthetic construct
  source 1..10: note = Seed: FIASFRLFAR
FMASFRLFAK

SEQ ID NO: 21277 - protein, 10 aa, synthetic construct
  source 1..10: note = Seed: FIASFRLFAR
FMASFRLFAR

SEQ ID NO: 21278 - protein, 9 aa, synthetic construct
  source 1..9: note = Seed: FIASFRLFA
FMASFRLFC

SEQ ID NO: 21279 - protein, 9 aa, synthetic construct
  source 1..9: note = Seed: FIASFRLFA
FMASFRLFF

SEQ ID NO: 21280 - protein, 9 aa, synthetic construct
  source 1..9: note = Seed: FIASFRLFA
FMASFRLFG

SEQ ID NO: 21281 - protein, 9 aa, synthetic construct
  source 1..9: note = Seed: FIASFRLFA
FMASFRLFI

SEQ ID NO: 21282 - protein, 9 aa, synthetic construct
  source 1..9: note = Seed: FIASFRLFA
FMASFRLFL

SEQ ID NO: 21283 - protein, 9 aa, synthetic construct
  source 1..9: note = Seed: FIASFRLFA
FMASFRLFM

SEQ ID NO: 21284 - protein, 9 aa, synthetic construct
  source 1..9: note = Seed: FIASFRLFA
FMASFRLFR

SEQ ID NO: 21285 - protein, 9 aa, synthetic construct
  source 1..9: note = Seed: FIASFRLFA
FMASFRLFS

SEQ ID NO: 21286 - protein, 9 aa, synthetic construct
  source 1..9: note = Seed: FIASFRLFA
FMASFRLFT

SEQ ID NO: 21287 - protein, 9 aa, synthetic construct
  source 1..9: note = Seed: FIASFRLFA
FMASFRLFV

SEQ ID NO: 21288 - protein, 8 aa, synthetic construct
  source 1..8: note = Seed: FFASFYYV
FMASFYYA

SEQ ID NO: 21289 - protein, 8 aa, synthetic construct
  source 1..8: note = Seed: FFASFYYV
FMASFYYI

SEQ ID NO: 21290 - protein, 8 aa, synthetic construct
  source 1..8: note = Seed: FFASFYYV
FMASFYYL

SEQ ID NO: 21291 - protein, 8 aa, synthetic construct
  source 1..8: note = Seed: FFASFYYV
FMASFYYM

SEQ ID NO: 21292 - protein, 8 aa, synthetic construct
  source 1..8: note = Seed: FFASFYYV
FMASFYYV

SEQ ID NO: 21293 - protein, 9 aa, synthetic construct
  source 1..9: note = Seed: FFASFYYVW
FMASFYYVF

SEQ ID NO: 21294 - protein, 9 aa, synthetic construct
  source 1..9: note = Seed: FFASFYYVW
FMASFYYVM

SEQ ID NO: 21295 - protein, 9 aa, synthetic construct
  source 1..9: note = Seed: FFASFYYVW
FMASFYYVW

SEQ ID NO: 21296 - protein, 10 aa, synthetic construct
  source 1..10: note = Seed: FFASFYYVWK
FMASFYYVWK

SEQ ID NO: 21297 - protein, 10 aa, synthetic construct
  source 1..10: note = Seed: FFASFYYVWK
FMASFYYVWR

SEQ ID NO: 21298 - protein, 9 aa, synthetic construct
  source 1..9: note = Seed: FFASFYYVW
FMASFYYVY

SEQ ID NO: 21299 - protein, 9 aa, synthetic construct
  source 1..9: note = Seed: FNATRFASV
FMATRFASA

SEQ ID NO: 21300 - protein, 9 aa, synthetic construct
  source 1..9: note = Seed: FNATRFASV
FMATRFASC

SEQ ID NO: 21301 - protein, 9 aa, synthetic construct
  source 1..9: note = Seed: FNATRFASV
FMATRFASF

SEQ ID NO: 21302 - protein, 9 aa, synthetic construct
  source 1..9: note = Seed: FNATRFASV
FMATRFASG

SEQ ID NO: 21303 - protein, 9 aa, synthetic construct
  source 1..9: note = Seed: FNATRFASV
FMATRFASI

SEQ ID NO: 21304 - protein, 9 aa, synthetic construct
  source 1..9: note = Seed: FNATRFASV
FMATRFASL

SEQ ID NO: 21305 - protein, 9 aa, synthetic construct
  source 1..9: note = Seed: FNATRFASV
FMATRFASM

SEQ ID NO: 21306 - protein, 9 aa, synthetic construct
  source 1..9: note = Seed: FNATRFASV
FMATRFASP

SEQ ID NO: 21307 - protein, 9 aa, synthetic construct
  source 1..9: note = Seed: FNATRFASV
FMATRFASS

SEQ ID NO: 21308 - protein, 9 aa, synthetic construct
  source 1..9: note = Seed: FNATRFASV
FMATRFAST

SEQ ID NO: 21309 - protein, 9 aa, synthetic construct
  source 1..9: note = Seed: FNATRFASV
FMATRFASV

SEQ ID NO: 21310 - protein, 10 aa, synthetic construct
  source 1..10: note = Seed: FNATRFASVY
FMATRFASVF

SEQ ID NO: 21311 - protein, 10 aa, synthetic construct
  source 1..10: note = Seed: FNATRFASVY
FMATRFASVM

SEQ ID NO: 21312 - protein, 10 aa, synthetic construct
  source 1..10: note = Seed: FNATRFASVY
FMATRFASVW

SEQ ID NO: 21313 - protein, 10 aa, synthetic construct
  source 1..10: note = Seed: FNATRFASVY
FMATRFASVY

SEQ ID NO: 21314 - protein, 9 aa, synthetic construct
  source 1..9: note = Seed: FNATRFASV
FMATRFASY

SEQ ID NO: 21315 - protein, 9 aa, synthetic construct
  source 1..9: note = Seed: FSAVGNICY
FMAVGNICF

SEQ ID NO: 21316 - protein, 9 aa, synthetic construct
  source 1..9: note = Seed: FSAVGNICY
FMAVGNICM

SEQ ID NO: 21317 - protein, 9 aa, synthetic construct
  source 1..9: note = Seed: FSAVGNICY
FMAVGNICY

SEQ ID NO: 21318 - protein, 10 aa, synthetic construct
  source 1..10: note = Seed: FSAVGNICYT
FMAVGNICYA

SEQ ID NO: 21319 - protein, 10 aa, synthetic construct
  source 1..10: note = Seed: FSAVGNICYT
FMAVGNICYI

SEQ ID NO: 21320 - protein, 10 aa, synthetic construct
  source 1..10: note = Seed: FSAVGNICYT
FMAVGNICYL

SEQ ID NO: 21321 - protein, 10 aa, synthetic construct
  source 1..10: note = Seed: FSAVGNICYT
FMAVGNICYM

SEQ ID NO: 21322 - protein, 10 aa, synthetic construct
  source 1..10: note = Seed: FSAVGNICYT
FMAVGNICYV

SEQ ID NO: 21323 - protein, 8 aa, synthetic construct
  source 1..8: note = Seed: FLAYILFT
FMAYILFA

SEQ ID NO: 21324 - protein, 8 aa, synthetic construct
  source 1..8: note = Seed: FLAYILFT
FMAYILFI

SEQ ID NO: 21325 - protein, 8 aa, synthetic construct
  source 1..8: note = Seed: FLAYILFT
FMAYILFL

SEQ ID NO: 21326 - protein, 9 aa, synthetic construct
  source 1..9: note = Seed: FLAYILFTR
FMAYILFTA

SEQ ID NO: 21327 - protein, 9 aa, synthetic construct
  source 1..9: note = Seed: FLAYILFTR
FMAYILFTC

SEQ ID NO: 21328 - protein, 9 aa, synthetic construct
  source 1..9: note = Seed: FLAYILFTR
FMAYILFTF

SEQ ID NO: 21329 - protein, 9 aa, synthetic construct
  source 1..9: note = Seed: FLAYILFTR
FMAYILFTG

SEQ ID NO: 21330 - protein, 9 aa, synthetic construct
  source 1..9: note = Seed: FLAYILFTR
FMAYILFTI

SEQ ID NO: 21331 - protein, 9 aa, synthetic construct
  source 1..9: note = Seed: FLAYILFTR
FMAYILFTK

SEQ ID NO: 21332 - protein, 9 aa, synthetic construct
  source 1..9: note = Seed: FLAYILFTR
FMAYILFTL

SEQ ID NO: 21333 - protein, 9 aa, synthetic construct
  source 1..9: note = Seed: FLAYILFTR
FMAYILFTM

SEQ ID NO: 21334 - protein, 9 aa, synthetic construct
  source 1..9: note = Seed: FLAYILFTR
FMAYILFTP

SEQ ID NO: 21335 - protein, 9 aa, synthetic construct
  source 1..9: note = Seed: FLAYILFTR
FMAYILFTR

SEQ ID NO: 21336 - protein, 10 aa, synthetic construct
  source 1..10: note = Seed: FLAYILFTRF
FMAYILFTRA

SEQ ID NO: 21337 - protein, 10 aa, synthetic construct
  source 1..10: note = Seed: FLAYILFTRF
FMAYILFTRF

SEQ ID NO: 21338 - protein, 10 aa, synthetic construct
  source 1..10: note = Seed: FLAYILFTRF
FMAYILFTRI

SEQ ID NO: 21339 - protein, 10 aa, synthetic construct
  source 1..10: note = Seed: FLAYILFTRF
FMAYILFTRK

SEQ ID NO: 21340 - protein, 10 aa, synthetic construct
  source 1..10: note = Seed: FLAYILFTRF
FMAYILFTRL

SEQ ID NO: 21341 - protein, 10 aa, synthetic construct
  source 1..10: note = Seed: FLAYILFTRF
FMAYILFTRM

SEQ ID NO: 21342 - protein, 10 aa, synthetic construct
  source 1..10: note = Seed: FLAYILFTRF
FMAYILFTRR

SEQ ID NO: 21343 - protein, 10 aa, synthetic construct
  source 1..10: note = Seed: FLAYILFTRF
FMAYILFTRS

SEQ ID NO: 21344 - protein, 10 aa, synthetic construct
  source 1..10: note = Seed: FLAYILFTRF
FMAYILFTRT

SEQ ID NO: 21345 - protein, 10 aa, synthetic construct
  source 1..10: note = Seed: FLAYILFTRF
FMAYILFTRV

SEQ ID NO: 21346 - protein, 10 aa, synthetic construct
  source 1..10: note = Seed: FLAYILFTRF
FMAYILFTRY

SEQ ID NO: 21347 - protein, 9 aa, synthetic construct
  source 1..9: note = Seed: FLAYILFTR
FMAYILFTS

SEQ ID NO: 21348 - protein, 9 aa, synthetic construct
  source 1..9: note = Seed: FLAYILFTR
FMAYILFTT

SEQ ID NO: 21349 - protein, 9 aa, synthetic construct
  source 1..9: note = Seed: FLAYILFTR
FMAYILFTV

SEQ ID NO: 21350 - protein, 8 aa, synthetic construct
  source 1..8: note = Seed: FLAYILFT
FMAYILFV

SEQ ID NO: 21351 - protein, 9 aa, synthetic construct
  source 1..9: note = Seed: FVCDNIKFA
FMCDNIKFA

SEQ ID NO: 21352 - protein, 9 aa, synthetic construct
  source 1..9: note = Seed: FVCDNIKFA
FMCDNIKFC

SEQ ID NO: 21353 - protein, 9 aa, synthetic construct
  source 1..9: note = Seed: FVCDNIKFA
FMCDNIKFI

SEQ ID NO: 21354 - protein, 9 aa, synthetic construct
  source 1..9: note = Seed: FVCDNIKFA
FMCDNIKFL

SEQ ID NO: 21355 - protein, 9 aa, synthetic construct
  source 1..9: note = Seed: FVCDNIKFA
FMCDNIKFM

SEQ ID NO: 21356 - protein, 9 aa, synthetic construct
  source 1..9: note = Seed: FVCDNIKFA
FMCDNIKFT

SEQ ID NO: 21357 - protein, 9 aa, synthetic construct
  source 1..9: note = Seed: FVCDNIKFA
FMCDNIKFV

SEQ ID NO: 21358 - protein, 9 aa, synthetic construct
  source 1..9: note = Seed: FLCLFLLPS
FMCLFLLPA

SEQ ID NO: 21359 - protein, 9 aa, synthetic construct
  source 1..9: note = Seed: FLCLFLLPS
FMCLFLLPI

SEQ ID NO: 21360 - protein, 9 aa, synthetic construct
  source 1..9: note = Seed: FLCLFLLPS
FMCLFLLPL

SEQ ID NO: 21361 - protein, 9 aa, synthetic construct
  source 1..9: note = Seed: FLCLFLLPS
FMCLFLLPM

SEQ ID NO: 21362 - protein, 9 aa, synthetic construct
  source 1..9: note = Seed: FLCLFLLPS
FMCLFLLPT

SEQ ID NO: 21363 - protein, 9 aa, synthetic construct
  source 1..9: note = Seed: FLCLFLLPS
FMCLFLLPV

SEQ ID NO: 21364 - protein, 9 aa, synthetic construct
  source 1..9: note = Seed: FMCVEYCPI
FMCVEYCPA

SEQ ID NO: 21365 - protein, 9 aa, synthetic construct
  source 1..9: note = Seed: FMCVEYCPI
FMCVEYCPF

SEQ ID NO: 21366 - protein, 10 aa, synthetic construct
  source 1..10: note = Seed: FMCVEYCPIF
FMCVEYCPIY

SEQ ID NO: 21367 - protein, 9 aa, synthetic construct
  source 1..9: note = Seed: FMCVEYCPI
FMCVEYCPL

SEQ ID NO: 21368 - protein, 9 aa, synthetic construct
  source 1..9: note = Seed: FMCVEYCPI
FMCVEYCPM

SEQ ID NO: 21369 - protein, 9 aa, synthetic construct
  source 1..9: note = Seed: FMCVEYCPI
FMCVEYCPV

SEQ ID NO: 21370 - protein, 9 aa, synthetic construct
  source 1..9: note = Seed: FMCVEYCPI
FMCVEYCPY

SEQ ID NO: 21371 - protein, 9 aa, synthetic construct
  source 1..9: note = Seed: FLCWHTNCY
FMCWHTNCF

SEQ ID NO: 21372 - protein, 9 aa, synthetic construct
  source 1..9: note = Seed: FLCWHTNCY
FMCWHTNCY

SEQ ID NO: 21373 - protein, 9 aa, synthetic construct
  source 1..9: note = Seed: FGDDTVIEV
FMDDTVIEA

SEQ ID NO: 21374 - protein, 9 aa, synthetic construct
  source 1..9: note = Seed: FGDDTVIEV
FMDDTVIEC

SEQ ID NO: 21375 - protein, 9 aa, synthetic construct
  source 1..9: note = Seed: FGDDTVIEV
FMDDTVIEF

SEQ ID NO: 21376 - protein, 9 aa, synthetic construct
  source 1..9: note = Seed: FGDDTVIEV
FMDDTVIEI

SEQ ID NO: 21377 - protein, 9 aa, synthetic construct
  source 1..9: note = Seed: FGDDTVIEV
FMDDTVIEL

SEQ ID NO: 21378 - protein, 9 aa, synthetic construct
  source 1..9: note = Seed: FGDDTVIEV
FMDDTVIEM

SEQ ID NO: 21379 - protein, 9 aa, synthetic construct
  source 1..9: note = Seed: FGDDTVIEV
FMDDTVIES

SEQ ID NO: 21380 - protein, 9 aa, synthetic construct
  source 1..9: note = Seed: FGDDTVIEV
FMDDTVIET

SEQ ID NO: 21381 - protein, 9 aa, synthetic construct
  source 1..9: note = Seed: FGDDTVIEV
FMDDTVIEV

SEQ ID NO: 21382 - protein, 8 aa, synthetic construct
  source 1..8: note = Seed: FVDGVPFV
FMDGVPFA

SEQ ID NO: 21383 - protein, 8 aa, synthetic construct
  source 1..8: note = Seed: FVDGVPFV
FMDGVPFI

SEQ ID NO: 21384 - protein, 8 aa, synthetic construct
  source 1..8: note = Seed: FVDGVPFV
FMDGVPFL

SEQ ID NO: 21385 - protein, 8 aa, synthetic construct
  source 1..8: note = Seed: FVDGVPFV
FMDGVPFM

SEQ ID NO: 21386 - protein, 8 aa, synthetic construct
  source 1..8: note = Seed: FVDGVPFV
FMDGVPFV

SEQ ID NO: 21387 - protein, 9 aa, synthetic construct
  source 1..9: note = Seed: FVDGVPFVV
FMDGVPFVA

SEQ ID NO: 21388 - protein, 9 aa, synthetic construct
  source 1..9: note = Seed: FVDGVPFVV
FMDGVPFVC

SEQ ID NO: 21389 - protein, 9 aa, synthetic construct
  source 1..9: note = Seed: FVDGVPFVV
FMDGVPFVF

SEQ ID NO: 21390 - protein, 9 aa, synthetic construct
  source 1..9: note = Seed: FVDGVPFVV
FMDGVPFVI

SEQ ID NO: 21391 - protein, 9 aa, synthetic construct
  source 1..9: note = Seed: FVDGVPFVV
FMDGVPFVL

SEQ ID NO: 21392 - protein, 9 aa, synthetic construct
  source 1..9: note = Seed: FVDGVPFVV
FMDGVPFVM

SEQ ID NO: 21393 - protein, 9 aa, synthetic construct
  source 1..9: note = Seed: FVDGVPFVV
FMDGVPFVS

SEQ ID NO: 21394 - protein, 9 aa, synthetic construct
  source 1..9: note = Seed: FVDGVPFVV
FMDGVPFVT

SEQ ID NO: 21395 - protein, 9 aa, synthetic construct
  source 1..9: note = Seed: FVDGVPFVV
FMDGVPFVV

SEQ ID NO: 21396 - protein, 10 aa, synthetic construct
  source 1..10: note = Seed: FVDGVPFVVS
FMDGVPFVVA

SEQ ID NO: 21397 - protein, 10 aa, synthetic construct
  source 1..10: note = Seed: FVDGVPFVVS
FMDGVPFVVC

SEQ ID NO: 21398 - protein, 10 aa, synthetic construct
  source 1..10: note = Seed: FVDGVPFVVS
FMDGVPFVVD

SEQ ID NO: 21399 - protein, 10 aa, synthetic construct
  source 1..10: note = Seed: FVDGVPFVVS
FMDGVPFVVE

SEQ ID NO: 21400 - protein, 10 aa, synthetic construct
  source 1..10: note = Seed: FVDGVPFVVS
FMDGVPFVVF

SEQ ID NO: 21401 - protein, 10 aa, synthetic construct
  source 1..10: note = Seed: FVDGVPFVVS
FMDGVPFVVG

SEQ ID NO: 21402 - protein, 10 aa, synthetic construct
  source 1..10: note = Seed: FVDGVPFVVS
FMDGVPFVVH

SEQ ID NO: 21403 - protein, 10 aa, synthetic construct
  source 1..10: note = Seed: FVDGVPFVVS
FMDGVPFVVI

SEQ ID NO: 21404 - protein, 10 aa, synthetic construct
  source 1..10: note = Seed: FVDGVPFVVS
FMDGVPFVVK

SEQ ID NO: 21405 - protein, 10 aa, synthetic construct
  source 1..10: note = Seed: FVDGVPFVVS
FMDGVPFVVL

SEQ ID NO: 21406 - protein, 10 aa, synthetic construct
  source 1..10: note = Seed: FVDGVPFVVS
FMDGVPFVVM

SEQ ID NO: 21407 - protein, 10 aa, synthetic construct
  source 1..10: note = Seed: FVDGVPFVVS
FMDGVPFVVN

SEQ ID NO: 21408 - protein, 10 aa, synthetic construct
  source 1..10: note = Seed: FVDGVPFVVS
FMDGVPFVVP

SEQ ID NO: 21409 - protein, 10 aa, synthetic construct
  source 1..10: note = Seed: FVDGVPFVVS
FMDGVPFVVQ

SEQ ID NO: 21410 - protein, 10 aa, synthetic construct
  source 1..10: note = Seed: FVDGVPFVVS
FMDGVPFVVR

SEQ ID NO: 21411 - protein, 10 aa, synthetic construct
  source 1..10: note = Seed: FVDGVPFVVS
FMDGVPFVVS

SEQ ID NO: 21412 - protein, 10 aa, synthetic construct
  source 1..10: note = Seed: FVDGVPFVVS
FMDGVPFVVT

SEQ ID NO: 21413 - protein, 10 aa, synthetic construct
  source 1..10: note = Seed: FVDGVPFVVS
FMDGVPFVVV

SEQ ID NO: 21414 - protein, 10 aa, synthetic construct
  source 1..10: note = Seed: FVDGVPFVVS
FMDGVPFVVW

SEQ ID NO: 21415 - protein, 10 aa, synthetic construct
  source 1..10: note = Seed: FVDGVPFVVS
FMDGVPFVVY

SEQ ID NO: 21416 - protein, 9 aa, synthetic construct
  source 1..9: note = Seed: FVDGVPFVV
FMDGVPFVY

SEQ ID NO: 21417 - protein, 9 aa, synthetic construct
  source 1..9: note = Seed: FPDLNGDVV
FMDLNGDVF

SEQ ID NO: 21418 - protein, 9 aa, synthetic construct
  source 1..9: note = Seed: FPDLNGDVV
FMDLNGDVI

SEQ ID NO: 21419 - protein, 9 aa, synthetic construct
  source 1..9: note = Seed: FPDLNGDVV
FMDLNGDVL

SEQ ID NO: 21420 - protein, 9 aa, synthetic construct
  source 1..9: note = Seed: FPDLNGDVV
FMDLNGDVM

SEQ ID NO: 21421 - protein, 9 aa, synthetic construct
  source 1..9: note = Seed: FPDLNGDVV
FMDLNGDVV

SEQ ID NO: 21422 - protein, 11 aa, synthetic construct
  source 1..11: note = Seed: FPDLNGDVVAI
FMDLNGDVVAA

SEQ ID NO: 21423 - protein, 11 aa, synthetic construct
  source 1..11: note = Seed: FPDLNGDVVAI
FMDLNGDVVAI

SEQ ID NO: 21424 - protein, 11 aa, synthetic construct
  source 1..11: note = Seed: FPDLNGDVVAI
FMDLNGDVVAL

SEQ ID NO: 21425 - protein, 11 aa, synthetic construct
  source 1..11: note = Seed: FPDLNGDVVAI
FMDLNGDVVAM

SEQ ID NO: 21426 - protein, 11 aa, synthetic construct
  source 1..11: note = Seed: FPDLNGDVVAI
FMDLNGDVVAV

SEQ ID NO: 21427 - protein, 9 aa, synthetic construct
  source 1..9: note = Seed: FPDLNGDVV
FMDLNGDVY

SEQ ID NO: 21428 - protein, 9 aa, synthetic construct
  source 1..9: note = Seed: FEEAALCTF
FMEAALCTF

SEQ ID NO: 21429 - protein, 9 aa, synthetic construct
  source 1..9: note = Seed: FEEAALCTF
FMEAALCTM

SEQ ID NO: 21430 - protein, 9 aa, synthetic construct
  source 1..9: note = Seed: FEEAALCTF
FMEAALCTY

SEQ ID NO: 21431 - protein, 9 aa, synthetic construct
  source 1..9: note = Seed: FTEQPIDLV
FMEQPIDLI

SEQ ID NO: 21432 - protein, 9 aa, synthetic construct
  source 1..9: note = Seed: FTEQPIDLV
FMEQPIDLL

SEQ ID NO: 21433 - protein, 9 aa, synthetic construct
  source 1..9: note = Seed: FTEQPIDLV
FMEQPIDLV

SEQ ID NO: 21434 - protein, 11 aa, synthetic construct
  source 1..11: note = Seed: FIETISLAGSY
FMETISLAGSY

SEQ ID NO: 21435 - protein, 9 aa, synthetic construct
  source 1..9: note = Seed: FVFKNIDGY
FMFKNIDGF

SEQ ID NO: 21436 - protein, 9 aa, synthetic construct
  source 1..9: note = Seed: FVFKNIDGY
FMFKNIDGM

SEQ ID NO: 21437 - protein, 9 aa, synthetic construct
  source 1..9: note = Seed: FVFKNIDGY
FMFKNIDGR

SEQ ID NO: 21438 - protein, 9 aa, synthetic construct
  source 1..9: note = Seed: FVFKNIDGY
FMFKNIDGY

SEQ ID NO: 21439 - protein, 10 aa, synthetic construct
  source 1..10: note = Seed: FVFKNIDGYF
FMFKNIDGYA

SEQ ID NO: 21440 - protein, 10 aa, synthetic construct
  source 1..10: note = Seed: FVFKNIDGYF
FMFKNIDGYF

SEQ ID NO: 21441 - protein, 11 aa, synthetic construct
  source 1..11: note = Seed: FVFKNIDGYFK
FMFKNIDGYFK

SEQ ID NO: 21442 - protein, 11 aa, synthetic construct
  source 1..11: note = Seed: FVFKNIDGYFK
FMFKNIDGYFR

SEQ ID NO: 21443 - protein, 10 aa, synthetic construct
  source 1..10: note = Seed: FVFKNIDGYF
FMFKNIDGYI

SEQ ID NO: 21444 - protein, 10 aa, synthetic construct
  source 1..10: note = Seed: FVFKNIDGYF
FMFKNIDGYL

SEQ ID NO: 21445 - protein, 10 aa, synthetic construct
  source 1..10: note = Seed: FVFKNIDGYF
FMFKNIDGYM

SEQ ID NO: 21446 - protein, 10 aa, synthetic construct
  source 1..10: note = Seed: FVFKNIDGYF
FMFKNIDGYV

SEQ ID NO: 21447 - protein, 10 aa, synthetic construct
  source 1..10: note = Seed: FVFKNIDGYF
FMFKNIDGYW

SEQ ID NO: 21448 - protein, 10 aa, synthetic construct
  source 1..10: note = Seed: FVFKNIDGYF
FMFKNIDGYY

SEQ ID NO: 21449 - protein, 9 aa, synthetic construct
  source 1..9: note = Seed: FLFLTWICL
FMFLTWICA

SEQ ID NO: 21450 - protein, 9 aa, synthetic construct
  source 1..9: note = Seed: FLFLTWICL
FMFLTWICI

SEQ ID NO: 21451 - protein, 9 aa, synthetic construct
  source 1..9: note = Seed: FLFLTWICL
FMFLTWICL

SEQ ID NO: 21452 - protein, 10 aa, synthetic construct
  source 1..10: note = Seed: FLFLTWICLL
FMFLTWICLA

SEQ ID NO: 21453 - protein, 10 aa, synthetic construct
  source 1..10: note = Seed: FLFLTWICLL
FMFLTWICLI

SEQ ID NO: 21454 - protein, 10 aa, synthetic construct
  source 1..10: note = Seed: FLFLTWICLL
FMFLTWICLL

SEQ ID NO: 21455 - protein, 11 aa, synthetic construct
  source 1..11: note = Seed: FLFLTWICLLQ
FMFLTWICLLL

SEQ ID NO: 21456 - protein, 11 aa, synthetic construct
  source 1..11: note = Seed: FLFLTWICLLQ
FMFLTWICLLV

SEQ ID NO: 21457 - protein, 10 aa, synthetic construct
  source 1..10: note = Seed: FLFLTWICLL
FMFLTWICLM

SEQ ID NO: 21458 - protein, 10 aa, synthetic construct
  source 1..10: note = Seed: FLFLTWICLL
FMFLTWICLS

SEQ ID NO: 21459 - protein, 10 aa, synthetic construct
  source 1..10: note = Seed: FLFLTWICLL
FMFLTWICLT

SEQ ID NO: 21460 - protein, 10 aa, synthetic construct
  source 1..10: note = Seed: FLFLTWICLL
FMFLTWICLV

SEQ ID NO: 21461 - protein, 9 aa, synthetic construct
  source 1..9: note = Seed: FLFLTWICL
FMFLTWICM

SEQ ID NO: 21462 - protein, 9 aa, synthetic construct
  source 1..9: note = Seed: FLFLTWICL
FMFLTWICT

SEQ ID NO: 21463 - protein, 9 aa, synthetic construct
  source 1..9: note = Seed: FLFLTWICL
FMFLTWICV

SEQ ID NO: 21464 - protein, 10 aa, synthetic construct
  source 1..10: note = Seed: FPFNKWGKAR
FMFNKWGKAR

SEQ ID NO: 21465 - protein, 9 aa, synthetic construct
  source 1..9: note = Seed: FKFRIDGDM
FMFRIDGDF

SEQ ID NO: 21466 - protein, 9 aa, synthetic construct
  source 1..9: note = Seed: FKFRIDGDM
FMFRIDGDM

SEQ ID NO: 21467 - protein, 9 aa, synthetic construct
  source 1..9: note = Seed: FKFRIDGDM
FMFRIDGDY

SEQ ID NO: 21468 - protein, 8 aa, synthetic construct
  source 1..8: note = Seed: FLFVAAIF
FMFVAAIF

SEQ ID NO: 21469 - protein, 9 aa, synthetic construct
  source 1..9: note = Seed: FLFVAAIFY
FMFVAAIFF

SEQ ID NO: 21470 - protein, 9 aa, synthetic construct
  source 1..9: note = Seed: FLFVAAIFY
FMFVAAIFM

SEQ ID NO: 21471 - protein, 9 aa, synthetic construct
  source 1..9: note = Seed: FLFVAAIFY
FMFVAAIFY

SEQ ID NO: 21472 - protein, 10 aa, synthetic construct
  source 1..10: note = Seed: FLFVAAIFYL
FMFVAAIFYA

SEQ ID NO: 21473 - protein, 10 aa, synthetic construct
  source 1..10: note = Seed: FLFVAAIFYL
FMFVAAIFYC

SEQ ID NO: 21474 - protein, 10 aa, synthetic construct
  source 1..10: note = Seed: FLFVAAIFYL
FMFVAAIFYF

SEQ ID NO: 21475 - protein, 10 aa, synthetic construct
  source 1..10: note = Seed: FLFVAAIFYL
FMFVAAIFYG

SEQ ID NO: 21476 - protein, 10 aa, synthetic construct
  source 1..10: note = Seed: FLFVAAIFYL
FMFVAAIFYI

SEQ ID NO: 21477 - protein, 10 aa, synthetic construct
  source 1..10: note = Seed: FLFVAAIFYL
FMFVAAIFYK

SEQ ID NO: 21478 - protein, 10 aa, synthetic construct
  source 1..10: note = Seed: FLFVAAIFYL
FMFVAAIFYL

SEQ ID NO: 21479 - protein, 11 aa, synthetic construct
  source 1..11: note = Seed: FLFVAAIFYLI
FMFVAAIFYLA

SEQ ID NO: 21480 - protein, 11 aa, synthetic construct
  source 1..11: note = Seed: FLFVAAIFYLI
FMFVAAIFYLC

SEQ ID NO: 21481 - protein, 11 aa, synthetic construct
  source 1..11: note = Seed: FLFVAAIFYLI
FMFVAAIFYLD

SEQ ID NO: 21482 - protein, 11 aa, synthetic construct
  source 1..11: note = Seed: FLFVAAIFYLI
FMFVAAIFYLE

SEQ ID NO: 21483 - protein, 11 aa, synthetic construct
  source 1..11: note = Seed: FLFVAAIFYLI
FMFVAAIFYLF

SEQ ID NO: 21484 - protein, 11 aa, synthetic construct
  source 1..11: note = Seed: FLFVAAIFYLI
FMFVAAIFYLG

SEQ ID NO: 21485 - protein, 11 aa, synthetic construct
  source 1..11: note = Seed: FLFVAAIFYLI
FMFVAAIFYLH

SEQ ID NO: 21486 - protein, 11 aa, synthetic construct
  source 1..11: note = Seed: FLFVAAIFYLI
FMFVAAIFYLI

SEQ ID NO: 21487 - protein, 11 aa, synthetic construct
  source 1..11: note = Seed: FLFVAAIFYLI
FMFVAAIFYLK

SEQ ID NO: 21488 - protein, 11 aa, synthetic construct
  source 1..11: note = Seed: FLFVAAIFYLI
FMFVAAIFYLL

SEQ ID NO: 21489 - protein, 11 aa, synthetic construct
  source 1..11: note = Seed: FLFVAAIFYLI
FMFVAAIFYLM

SEQ ID NO: 21490 - protein, 11 aa, synthetic construct
  source 1..11: note = Seed: FLFVAAIFYLI
FMFVAAIFYLN

SEQ ID NO: 21491 - protein, 11 aa, synthetic construct
  source 1..11: note = Seed: FLFVAAIFYLI
FMFVAAIFYLP

SEQ ID NO: 21492 - protein, 11 aa, synthetic construct
  source 1..11: note = Seed: FLFVAAIFYLI
FMFVAAIFYLQ

SEQ ID NO: 21493 - protein, 11 aa, synthetic construct
  source 1..11: note = Seed: FLFVAAIFYLI
FMFVAAIFYLR

SEQ ID NO: 21494 - protein, 11 aa, synthetic construct
  source 1..11: note = Seed: FLFVAAIFYLI
FMFVAAIFYLS

SEQ ID NO: 21495 - protein, 11 aa, synthetic construct
  source 1..11: note = Seed: FLFVAAIFYLI
FMFVAAIFYLT

SEQ ID NO: 21496 - protein, 11 aa, synthetic construct
  source 1..11: note = Seed: FLFVAAIFYLI
FMFVAAIFYLV

SEQ ID NO: 21497 - protein, 11 aa, synthetic construct
  source 1..11: note = Seed: FLFVAAIFYLI
FMFVAAIFYLW

SEQ ID NO: 21498 - protein, 11 aa, synthetic construct
  source 1..11: note = Seed: FLFVAAIFYLI
FMFVAAIFYLY

SEQ ID NO: 21499 - protein, 10 aa, synthetic construct
  source 1..10: note = Seed: FLFVAAIFYL
FMFVAAIFYM

SEQ ID NO: 21500 - protein, 10 aa, synthetic construct
  source 1..10: note = Seed: FLFVAAIFYL
FMFVAAIFYR

SEQ ID NO: 21501 - protein, 10 aa, synthetic construct
  source 1..10: note = Seed: FLFVAAIFYL
FMFVAAIFYS

SEQ ID NO: 21502 - protein, 10 aa, synthetic construct
  source 1..10: note = Seed: FLFVAAIFYL
FMFVAAIFYT

SEQ ID NO: 21503 - protein, 10 aa, synthetic construct
  source 1..10: note = Seed: FLFVAAIFYL
FMFVAAIFYV

SEQ ID NO: 21504 - protein, 10 aa, synthetic construct
  source 1..10: note = Seed: FLFVAAIFYL
FMFVAAIFYY

SEQ ID NO: 21505 - protein, 8 aa, synthetic construct
  source 1..8: note = Seed: FLFVAAIF
FMFVAAIY

SEQ ID NO: 21506 - protein, 10 aa, synthetic construct
  source 1..10: note = Seed: FKFVCDNIKF
FMFVCDNIKF

SEQ ID NO: 21507 - protein, 10 aa, synthetic construct
  source 1..10: note = Seed: FKFVCDNIKF
FMFVCDNIKY

SEQ ID NO: 21508 - protein, 9 aa, synthetic construct
  source 1..9: note = Seed: FGGASCCLY
FMGASCCLF

SEQ ID NO: 21509 - protein, 9 aa, synthetic construct
  source 1..9: note = Seed: FGGASCCLY
FMGASCCLM

SEQ ID NO: 21510 - protein, 9 aa, synthetic construct
  source 1..9: note = Seed: FGGASCCLY
FMGASCCLY

SEQ ID NO: 21511 - protein, 9 aa, synthetic construct
  source 1..9: note = Seed: FGGCVFSYV
FMGCVFSYA

SEQ ID NO: 21512 - protein, 9 aa, synthetic construct
  source 1..9: note = Seed: FGGCVFSYV
FMGCVFSYC

SEQ ID NO: 21513 - protein, 9 aa, synthetic construct
  source 1..9: note = Seed: FGGCVFSYV
FMGCVFSYF

SEQ ID NO: 21514 - protein, 9 aa, synthetic construct
  source 1..9: note = Seed: FGGCVFSYV
FMGCVFSYI

SEQ ID NO: 21515 - protein, 9 aa, synthetic construct
  source 1..9: note = Seed: FGGCVFSYV
FMGCVFSYL

SEQ ID NO: 21516 - protein, 9 aa, synthetic construct
  source 1..9: note = Seed: FGGCVFSYV
FMGCVFSYM

SEQ ID NO: 21517 - protein, 9 aa, synthetic construct
  source 1..9: note = Seed: FGGCVFSYV
FMGCVFSYS

SEQ ID NO: 21518 - protein, 9 aa, synthetic construct
  source 1..9: note = Seed: FGGCVFSYV
FMGCVFSYT

SEQ ID NO: 21519 - protein, 9 aa, synthetic construct
  source 1..9: note = Seed: FGGCVFSYV
FMGCVFSYV

SEQ ID NO: 21520 - protein, 9 aa, synthetic construct
  source 1..9: note = Seed: FLGRYMSAL
FMGRYMSAA

SEQ ID NO: 21521 - protein, 9 aa, synthetic construct
  source 1..9: note = Seed: FLGRYMSAL
FMGRYMSAF

SEQ ID NO: 21522 - protein, 9 aa, synthetic construct
  source 1..9: note = Seed: FLGRYMSAL
FMGRYMSAI

SEQ ID NO: 21523 - protein, 9 aa, synthetic construct
  source 1..9: note = Seed: FLGRYMSAL
FMGRYMSAL

SEQ ID NO: 21524 - protein, 10 aa, synthetic construct
  source 1..10: note = Seed: FLGRYMSALN
FMGRYMSALA

SEQ ID NO: 21525 - protein, 10 aa, synthetic construct
  source 1..10: note = Seed: FLGRYMSALN
FMGRYMSALI

SEQ ID NO: 21526 - protein, 10 aa, synthetic construct
  source 1..10: note = Seed: FLGRYMSALN
FMGRYMSALL

SEQ ID NO: 21527 - protein, 10 aa, synthetic construct
  source 1..10: note = Seed: FLGRYMSALN
FMGRYMSALM

SEQ ID NO: 21528 - protein, 10 aa, synthetic construct
  source 1..10: note = Seed: FLGRYMSALN
FMGRYMSALV

SEQ ID NO: 21529 - protein, 9 aa, synthetic construct
  source 1..9: note = Seed: FLGRYMSAL
FMGRYMSAM

SEQ ID NO: 21530 - protein, 9 aa, synthetic construct
  source 1..9: note = Seed: FLGRYMSAL
FMGRYMSAS

SEQ ID NO: 21531 - protein, 9 aa, synthetic construct
  source 1..9: note = Seed: FLGRYMSAL
FMGRYMSAT

SEQ ID NO: 21532 - protein, 9 aa, synthetic construct
  source 1..9: note = Seed: FLGRYMSAL
FMGRYMSAV

SEQ ID NO: 21533 - protein, 9 aa, synthetic construct
  source 1..9: note = Seed: FLGRYMSAL
FMGRYMSAY

SEQ ID NO: 21534 - protein, 8 aa, synthetic construct
  source 1..8: note = Seed: FLGRYMSA
FMGRYMSV

SEQ ID NO: 21535 - protein, 10 aa, synthetic construct
  source 1..10: note = Seed: FLGTCRRCPA
FMGTCRRCPL

SEQ ID NO: 21536 - protein, 10 aa, synthetic construct
  source 1..10: note = Seed: FLGTCRRCPA
FMGTCRRCPM

SEQ ID NO: 21537 - protein, 10 aa, synthetic construct
  source 1..10: note = Seed: FLGTCRRCPA
FMGTCRRCPV

SEQ ID NO: 21538 - protein, 9 aa, synthetic construct
  source 1..9: note = Seed: FNGVSFSTF
FMGVSFSTF

SEQ ID NO: 21539 - protein, 9 aa, synthetic construct
  source 1..9: note = Seed: FNGVSFSTF
FMGVSFSTL

SEQ ID NO: 21540 - protein, 9 aa, synthetic construct
  source 1..9: note = Seed: FNGVSFSTF
FMGVSFSTM

SEQ ID NO: 21541 - protein, 9 aa, synthetic construct
  source 1..9: note = Seed: FNGVSFSTF
FMGVSFSTY

SEQ ID NO: 21542 - protein, 9 aa, synthetic construct
  source 1..9: note = Seed: FLGYFCTCY
FMGYFCTCF

SEQ ID NO: 21543 - protein, 9 aa, synthetic construct
  source 1..9: note = Seed: FLGYFCTCY
FMGYFCTCY

SEQ ID NO: 21544 - protein, 10 aa, synthetic construct
  source 1..10: note = Seed: FLGYFCTCYF
FMGYFCTCYA

SEQ ID NO: 21545 - protein, 10 aa, synthetic construct
  source 1..10: note = Seed: FLGYFCTCYF
FMGYFCTCYF

SEQ ID NO: 21546 - protein, 10 aa, synthetic construct
  source 1..10: note = Seed: FLGYFCTCYF
FMGYFCTCYI

SEQ ID NO: 21547 - protein, 10 aa, synthetic construct
  source 1..10: note = Seed: FLGYFCTCYF
FMGYFCTCYL

SEQ ID NO: 21548 - protein, 10 aa, synthetic construct
  source 1..10: note = Seed: FLGYFCTCYF
FMGYFCTCYM

SEQ ID NO: 21549 - protein, 10 aa, synthetic construct
  source 1..10: note = Seed: FLGYFCTCYF
FMGYFCTCYT

SEQ ID NO: 21550 - protein, 10 aa, synthetic construct
  source 1..10: note = Seed: FLGYFCTCYF
FMGYFCTCYV

SEQ ID NO: 21551 - protein, 10 aa, synthetic construct
  source 1..10: note = Seed: FLGYFCTCYF
FMGYFCTCYY

SEQ ID NO: 21552 - protein, 9 aa, synthetic construct
  source 1..9: note = Seed: FQHANLDSC
FMHANLDSA

SEQ ID NO: 21553 - protein, 9 aa, synthetic construct
  source 1..9: note = Seed: FQHANLDSC
FMHANLDSI

SEQ ID NO: 21554 - protein, 9 aa, synthetic construct
  source 1..9: note = Seed: FQHANLDSC
FMHANLDSL

SEQ ID NO: 21555 - protein, 9 aa, synthetic construct
  source 1..9: note = Seed: FQHANLDSC
FMHANLDSM

SEQ ID NO: 21556 - protein, 9 aa, synthetic construct
  source 1..9: note = Seed: FQHANLDSC
FMHANLDSV

SEQ ID NO: 21557 - protein, 8 aa, synthetic construct
  source 1..8: note = Seed: FLHFLPRV
FMHFLPRV

SEQ ID NO: 21558 - protein, 9 aa, synthetic construct
  source 1..9: note = Seed: FLHFLPRVF
FMHFLPRVF

SEQ ID NO: 21559 - protein, 10 aa, synthetic construct
  source 1..10: note = Seed: FLHFLPRVFS
FMHFLPRVFA

SEQ ID NO: 21560 - protein, 10 aa, synthetic construct
  source 1..10: note = Seed: FLHFLPRVFS
FMHFLPRVFI

SEQ ID NO: 21561 - protein, 10 aa, synthetic construct
  source 1..10: note = Seed: FLHFLPRVFS
FMHFLPRVFL

SEQ ID NO: 21562 - protein, 10 aa, synthetic construct
  source 1..10: note = Seed: FLHFLPRVFS
FMHFLPRVFM

SEQ ID NO: 21563 - protein, 11 aa, synthetic construct
  source 1..11: note = Seed: FLHFLPRVFSA
FMHFLPRVFSA

SEQ ID NO: 21564 - protein, 11 aa, synthetic construct
  source 1..11: note = Seed: FLHFLPRVFSA
FMHFLPRVFSI

SEQ ID NO: 21565 - protein, 11 aa, synthetic construct
  source 1..11: note = Seed: FLHFLPRVFSA
FMHFLPRVFSL

SEQ ID NO: 21566 - protein, 11 aa, synthetic construct
  source 1..11: note = Seed: FLHFLPRVFSA
FMHFLPRVFSM

SEQ ID NO: 21567 - protein, 11 aa, synthetic construct
  source 1..11: note = Seed: FLHFLPRVFSA
FMHFLPRVFST

SEQ ID NO: 21568 - protein, 11 aa, synthetic construct
  source 1..11: note = Seed: FLHFLPRVFSA
FMHFLPRVFSV

SEQ ID NO: 21569 - protein, 10 aa, synthetic construct
  source 1..10: note = Seed: FLHFLPRVFS
FMHFLPRVFV

SEQ ID NO: 21570 - protein, 9 aa, synthetic construct
  source 1..9: note = Seed: FLHFLPRVF
FMHFLPRVI

SEQ ID NO: 21571 - protein, 9 aa, synthetic construct
  source 1..9: note = Seed: FLHFLPRVF
FMHFLPRVL

SEQ ID NO: 21572 - protein, 9 aa, synthetic construct
  source 1..9: note = Seed: FLHFLPRVF
FMHFLPRVM

SEQ ID NO: 21573 - protein, 9 aa, synthetic construct
  source 1..9: note = Seed: FLHFLPRVF
FMHFLPRVV

SEQ ID NO: 21574 - protein, 9 aa, synthetic construct
  source 1..9: note = Seed: FLHFLPRVF
FMHFLPRVY

SEQ ID NO: 21575 - protein, 9 aa, synthetic construct
  source 1..9: note = Seed: FSHSQLGGL
FMHSQLGGL

SEQ ID NO: 21576 - protein, 9 aa, synthetic construct
  source 1..9: note = Seed: FSHSQLGGL
FMHSQLGGV

SEQ ID NO: 21577 - protein, 9 aa, synthetic construct
  source 1..9: note = Seed: FLHVTYVPA
FMHVTYVPA

SEQ ID NO: 21578 - protein, 10 aa, synthetic construct
  source 1..10: note = Seed: FLHVTYVPAQ
FMHVTYVPAA

SEQ ID NO: 21579 - protein, 10 aa, synthetic construct
  source 1..10: note = Seed: FLHVTYVPAQ
FMHVTYVPAI

SEQ ID NO: 21580 - protein, 10 aa, synthetic construct
  source 1..10: note = Seed: FLHVTYVPAQ
FMHVTYVPAL

SEQ ID NO: 21581 - protein, 10 aa, synthetic construct
  source 1..10: note = Seed: FLHVTYVPAQ
FMHVTYVPAT

SEQ ID NO: 21582 - protein, 10 aa, synthetic construct
  source 1..10: note = Seed: FLHVTYVPAQ
FMHVTYVPAV

SEQ ID NO: 21583 - protein, 9 aa, synthetic construct
  source 1..9: note = Seed: FLHVTYVPA
FMHVTYVPI

SEQ ID NO: 21584 - protein, 9 aa, synthetic construct
  source 1..9: note = Seed: FLHVTYVPA
FMHVTYVPL

SEQ ID NO: 21585 - protein, 9 aa, synthetic construct
  source 1..9: note = Seed: FLHVTYVPA
FMHVTYVPM

SEQ ID NO: 21586 - protein, 9 aa, synthetic construct
  source 1..9: note = Seed: FLHVTYVPA
FMHVTYVPT

SEQ ID NO: 21587 - protein, 9 aa, synthetic construct
  source 1..9: note = Seed: FLHVTYVPA
FMHVTYVPV

SEQ ID NO: 21588 - protein, 8 aa, synthetic construct
  source 1..8: note = Seed: FLIGCNYL
FMIGCNYI

SEQ ID NO: 21589 - protein, 8 aa, synthetic construct
  source 1..8: note = Seed: FLIGCNYL
FMIGCNYL

SEQ ID NO: 21590 - protein, 8 aa, synthetic construct
  source 1..8: note = Seed: FLIGCNYL
FMIGCNYV

SEQ ID NO: 21591 - protein, 9 aa, synthetic construct
  source 1..9: note = Seed: FEIKLAKKF
FMIKLAKKF

SEQ ID NO: 21592 - protein, 9 aa, synthetic construct
  source 1..9: note = Seed: FEIKLAKKF
FMIKLAKKY

SEQ ID NO: 21593 - protein, 9 aa, synthetic construct
  source 1..9: note = Seed: FTINCQEPK
FMINCQEPR

SEQ ID NO: 21594 - protein, 10 aa, synthetic construct
  source 1..10: note = Seed: FKIYSKHTPI
FMIYSKHTPA

SEQ ID NO: 21595 - protein, 10 aa, synthetic construct
  source 1..10: note = Seed: FKIYSKHTPI
FMIYSKHTPF

SEQ ID NO: 21596 - protein, 10 aa, synthetic construct
  source 1..10: note = Seed: FKIYSKHTPI
FMIYSKHTPI

SEQ ID NO: 21597 - protein, 10 aa, synthetic construct
  source 1..10: note = Seed: FKIYSKHTPI
FMIYSKHTPL

SEQ ID NO: 21598 - protein, 10 aa, synthetic construct
  source 1..10: note = Seed: FKIYSKHTPI
FMIYSKHTPM

SEQ ID NO: 21599 - protein, 10 aa, synthetic construct
  source 1..10: note = Seed: FKIYSKHTPI
FMIYSKHTPT

SEQ ID NO: 21600 - protein, 10 aa, synthetic construct
  source 1..10: note = Seed: FKIYSKHTPI
FMIYSKHTPV

SEQ ID NO: 21601 - protein, 10 aa, synthetic construct
  source 1..10: note = Seed: FKIYSKHTPI
FMIYSKHTPW

SEQ ID NO: 21602 - protein, 10 aa, synthetic construct
  source 1..10: note = Seed: FKIYSKHTPI
FMIYSKHTPY

SEQ ID NO: 21603 - protein, 9 aa, synthetic construct
  source 1..9: note = Seed: FYKENSYTT
FMKENSYTF

SEQ ID NO: 21604 - protein, 9 aa, synthetic construct
  source 1..9: note = Seed: FYKENSYTT
FMKENSYTL

SEQ ID NO: 21605 - protein, 9 aa, synthetic construct
  source 1..9: note = Seed: FYKENSYTT
FMKENSYTM

SEQ ID NO: 21606 - protein, 9 aa, synthetic construct
  source 1..9: note = Seed: FYKENSYTT
FMKENSYTY

SEQ ID NO: 21607 - protein, 8 aa, synthetic construct
  source 1..8: note = Seed: FVKHKHAF
FMKHKHAA

SEQ ID NO: 21608 - protein, 8 aa, synthetic construct
  source 1..8: note = Seed: FVKHKHAF
FMKHKHAF

SEQ ID NO: 21609 - protein, 9 aa, synthetic construct
  source 1..9: note = Seed: FVKHKHAFL
FMKHKHAFA

SEQ ID NO: 21610 - protein, 9 aa, synthetic construct
  source 1..9: note = Seed: FVKHKHAFL
FMKHKHAFC

SEQ ID NO: 21611 - protein, 9 aa, synthetic construct
  source 1..9: note = Seed: FVKHKHAFL
FMKHKHAFF

SEQ ID NO: 21612 - protein, 9 aa, synthetic construct
  source 1..9: note = Seed: FVKHKHAFL
FMKHKHAFI

SEQ ID NO: 21613 - protein, 9 aa, synthetic construct
  source 1..9: note = Seed: FVKHKHAFL
FMKHKHAFL

SEQ ID NO: 21614 - protein, 11 aa, synthetic construct
  source 1..11: note = Seed: FVKHKHAFLCL
FMKHKHAFLCL

SEQ ID NO: 21615 - protein, 11 aa, synthetic construct
  source 1..11: note = Seed: FVKHKHAFLCL
FMKHKHAFLCM

SEQ ID NO: 21616 - protein, 10 aa, synthetic construct
  source 1..10: note = Seed: FVKHKHAFLC
FMKHKHAFLF

SEQ ID NO: 21617 - protein, 10 aa, synthetic construct
  source 1..10: note = Seed: FVKHKHAFLC
FMKHKHAFLI

SEQ ID NO: 21618 - protein, 10 aa, synthetic construct
  source 1..10: note = Seed: FVKHKHAFLC
FMKHKHAFLL

SEQ ID NO: 21619 - protein, 10 aa, synthetic construct
  source 1..10: note = Seed: FVKHKHAFLC
FMKHKHAFLM

SEQ ID NO: 21620 - protein, 10 aa, synthetic construct
  source 1..10: note = Seed: FVKHKHAFLC
FMKHKHAFLV

SEQ ID NO: 21621 - protein, 9 aa, synthetic construct
  source 1..9: note = Seed: FVKHKHAFL
FMKHKHAFM

SEQ ID NO: 21622 - protein, 9 aa, synthetic construct
  source 1..9: note = Seed: FVKHKHAFL
FMKHKHAFV

SEQ ID NO: 21623 - protein, 8 aa, synthetic construct
  source 1..8: note = Seed: FVKHKHAF
FMKHKHAI

SEQ ID NO: 21624 - protein, 8 aa, synthetic construct
  source 1..8: note = Seed: FVKHKHAF
FMKHKHAL

SEQ ID NO: 21625 - protein, 8 aa, synthetic construct
  source 1..8: note = Seed: FVKHKHAF
FMKHKHAM

SEQ ID NO: 21626 - protein, 8 aa, synthetic construct
  source 1..8: note = Seed: FVKHKHAF
FMKHKHAV

SEQ ID NO: 21627 - protein, 9 aa, synthetic construct
  source 1..9: note = Seed: FRKSNLKPF
FMKSNLKPF

SEQ ID NO: 21628 - protein, 9 aa, synthetic construct
  source 1..9: note = Seed: FRKSNLKPF
FMKSNLKPL

SEQ ID NO: 21629 - protein, 9 aa, synthetic construct
  source 1..9: note = Seed: FRKSNLKPF
FMKSNLKPM

SEQ ID NO: 21630 - protein, 9 aa, synthetic construct
  source 1..9: note = Seed: FRKSNLKPF
FMKSNLKPY

SEQ ID NO: 21631 - protein, 9 aa, synthetic construct
  source 1..9: note = Seed: FLKTNCCRF
FMKTNCCRF

SEQ ID NO: 21632 - protein, 9 aa, synthetic construct
  source 1..9: note = Seed: FLKTNCCRF
FMKTNCCRL

SEQ ID NO: 21633 - protein, 9 aa, synthetic construct
  source 1..9: note = Seed: FLKTNCCRF
FMKTNCCRY

SEQ ID NO: 21634 - protein, 9 aa, synthetic construct
  source 1..9: note = Seed: FVLALLSDL
FMLALLSDA

SEQ ID NO: 21635 - protein, 9 aa, synthetic construct
  source 1..9: note = Seed: FVLALLSDL
FMLALLSDI

SEQ ID NO: 21636 - protein, 9 aa, synthetic construct
  source 1..9: note = Seed: FVLALLSDL
FMLALLSDL

SEQ ID NO: 21637 - protein, 9 aa, synthetic construct
  source 1..9: note = Seed: FVLALLSDL
FMLALLSDM

SEQ ID NO: 21638 - protein, 9 aa, synthetic construct
  source 1..9: note = Seed: FVLALLSDL
FMLALLSDT

SEQ ID NO: 21639 - protein, 9 aa, synthetic construct
  source 1..9: note = Seed: FVLALLSDL
FMLALLSDV

SEQ ID NO: 21640 - protein, 10 aa, synthetic construct
  source 1..10: note = Seed: FPLCANGQVF
FMLCANGQVF

SEQ ID NO: 21641 - protein, 10 aa, synthetic construct
  source 1..10: note = Seed: FPLCANGQVF
FMLCANGQVM

SEQ ID NO: 21642 - protein, 10 aa, synthetic construct
  source 1..10: note = Seed: FPLCANGQVF
FMLCANGQVY

SEQ ID NO: 21643 - protein, 9 aa, synthetic construct
  source 1..9: note = Seed: FPLCANGQV
FMLCANGQY

SEQ ID NO: 21644 - protein, 9 aa, synthetic construct
  source 1..9: note = Seed: FKLKDCVMY
FMLKDCVMF

SEQ ID NO: 21645 - protein, 9 aa, synthetic construct
  source 1..9: note = Seed: FKLKDCVMY
FMLKDCVMM

SEQ ID NO: 21646 - protein, 9 aa, synthetic construct
  source 1..9: note = Seed: FKLKDCVMY
FMLKDCVMY

SEQ ID NO: 21647 - protein, 10 aa, synthetic construct
  source 1..10: note = Seed: FKLKDCVMYA
FMLKDCVMYA

SEQ ID NO: 21648 - protein, 11 aa, synthetic construct
  source 1..11: note = Seed: FKLKDCVMYAS
FMLKDCVMYAV

SEQ ID NO: 21649 - protein, 10 aa, synthetic construct
  source 1..10: note = Seed: FKLKDCVMYA
FMLKDCVMYC

SEQ ID NO: 21650 - protein, 10 aa, synthetic construct
  source 1..10: note = Seed: FKLKDCVMYA
FMLKDCVMYF

SEQ ID NO: 21651 - protein, 10 aa, synthetic construct
  source 1..10: note = Seed: FKLKDCVMYA
FMLKDCVMYI

SEQ ID NO: 21652 - protein, 10 aa, synthetic construct
  source 1..10: note = Seed: FKLKDCVMYA
FMLKDCVMYL

SEQ ID NO: 21653 - protein, 10 aa, synthetic construct
  source 1..10: note = Seed: FKLKDCVMYA
FMLKDCVMYM

SEQ ID NO: 21654 - protein, 10 aa, synthetic construct
  source 1..10: note = Seed: FKLKDCVMYA
FMLKDCVMYS

SEQ ID NO: 21655 - protein, 10 aa, synthetic construct
  source 1..10: note = Seed: FKLKDCVMYA
FMLKDCVMYT

SEQ ID NO: 21656 - protein, 10 aa, synthetic construct
  source 1..10: note = Seed: FKLKDCVMYA
FMLKDCVMYV

SEQ ID NO: 21657 - protein, 10 aa, synthetic construct
  source 1..10: note = Seed: FPLKLRGTAV
FMLKLRGTAA

SEQ ID NO: 21658 - protein, 10 aa, synthetic construct
  source 1..10: note = Seed: FPLKLRGTAV
FMLKLRGTAF

SEQ ID NO: 21659 - protein, 10 aa, synthetic construct
  source 1..10: note = Seed: FPLKLRGTAV
FMLKLRGTAI

SEQ ID NO: 21660 - protein, 10 aa, synthetic construct
  source 1..10: note = Seed: FPLKLRGTAV
FMLKLRGTAL

SEQ ID NO: 21661 - protein, 10 aa, synthetic construct
  source 1..10: note = Seed: FPLKLRGTAV
FMLKLRGTAM

SEQ ID NO: 21662 - protein, 10 aa, synthetic construct
  source 1..10: note = Seed: FPLKLRGTAV
FMLKLRGTAV

SEQ ID NO: 21663 - protein, 11 aa, synthetic construct
  source 1..11: note = Seed: FPLKLRGTAVM
FMLKLRGTAVF

SEQ ID NO: 21664 - protein, 11 aa, synthetic construct
  source 1..11: note = Seed: FPLKLRGTAVM
FMLKLRGTAVL

SEQ ID NO: 21665 - protein, 11 aa, synthetic construct
  source 1..11: note = Seed: FPLKLRGTAVM
FMLKLRGTAVY

SEQ ID NO: 21666 - protein, 10 aa, synthetic construct
  source 1..10: note = Seed: FTLLLQLCTF
FMLLLQLCTF

SEQ ID NO: 21667 - protein, 10 aa, synthetic construct
  source 1..10: note = Seed: FTLLLQLCTF
FMLLLQLCTY

SEQ ID NO: 21668 - protein, 9 aa, synthetic construct
  source 1..9: note = Seed: FKLNEEIAI
FMLNEEIAF

SEQ ID NO: 21669 - protein, 9 aa, synthetic construct
  source 1..9: note = Seed: FKLNEEIAI
FMLNEEIAM

SEQ ID NO: 21670 - protein, 9 aa, synthetic construct
  source 1..9: note = Seed: FKLNEEIAI
FMLNEEIAY

SEQ ID NO: 21671 - protein, 9 aa, synthetic construct
  source 1..9: note = Seed: FLLNKEMYL
FMLNKEMYA

SEQ ID NO: 21672 - protein, 9 aa, synthetic construct
  source 1..9: note = Seed: FLLNKEMYL
FMLNKEMYC

SEQ ID NO: 21673 - protein, 9 aa, synthetic construct
  source 1..9: note = Seed: FLLNKEMYL
FMLNKEMYF

SEQ ID NO: 21674 - protein, 9 aa, synthetic construct
  source 1..9: note = Seed: FLLNKEMYL
FMLNKEMYI

SEQ ID NO: 21675 - protein, 9 aa, synthetic construct
  source 1..9: note = Seed: FLLNKEMYL
FMLNKEMYK

SEQ ID NO: 21676 - protein, 9 aa, synthetic construct
  source 1..9: note = Seed: FLLNKEMYL
FMLNKEMYL

SEQ ID NO: 21677 - protein, 10 aa, synthetic construct
  source 1..10: note = Seed: FLLNKEMYLK
FMLNKEMYLA

SEQ ID NO: 21678 - protein, 10 aa, synthetic construct
  source 1..10: note = Seed: FLLNKEMYLK
FMLNKEMYLC

SEQ ID NO: 21679 - protein, 10 aa, synthetic construct
  source 1..10: note = Seed: FLLNKEMYLK
FMLNKEMYLD

SEQ ID NO: 21680 - protein, 10 aa, synthetic construct
  source 1..10: note = Seed: FLLNKEMYLK
FMLNKEMYLE

SEQ ID NO: 21681 - protein, 10 aa, synthetic construct
  source 1..10: note = Seed: FLLNKEMYLK
FMLNKEMYLF

SEQ ID NO: 21682 - protein, 10 aa, synthetic construct
  source 1..10: note = Seed: FLLNKEMYLK
FMLNKEMYLG

SEQ ID NO: 21683 - protein, 10 aa, synthetic construct
  source 1..10: note = Seed: FLLNKEMYLK
FMLNKEMYLH

SEQ ID NO: 21684 - protein, 10 aa, synthetic construct
  source 1..10: note = Seed: FLLNKEMYLK
FMLNKEMYLI

SEQ ID NO: 21685 - protein, 10 aa, synthetic construct
  source 1..10: note = Seed: FLLNKEMYLK
FMLNKEMYLK

SEQ ID NO: 21686 - protein, 11 aa, synthetic construct
  source 1..11: note = Seed: FLLNKEMYLKL
FMLNKEMYLKA

SEQ ID NO: 21687 - protein, 11 aa, synthetic construct
  source 1..11: note = Seed: FLLNKEMYLKL
FMLNKEMYLKI

SEQ ID NO: 21688 - protein, 11 aa, synthetic construct
  source 1..11: note = Seed: FLLNKEMYLKL
FMLNKEMYLKL

SEQ ID NO: 21689 - protein, 11 aa, synthetic construct
  source 1..11: note = Seed: FLLNKEMYLKL
FMLNKEMYLKM

SEQ ID NO: 21690 - protein, 11 aa, synthetic construct
  source 1..11: note = Seed: FLLNKEMYLKL
FMLNKEMYLKV

SEQ ID NO: 21691 - protein, 10 aa, synthetic construct
  source 1..10: note = Seed: FLLNKEMYLK
FMLNKEMYLL

SEQ ID NO: 21692 - protein, 10 aa, synthetic construct
  source 1..10: note = Seed: FLLNKEMYLK
FMLNKEMYLM

SEQ ID NO: 21693 - protein, 10 aa, synthetic construct
  source 1..10: note = Seed: FLLNKEMYLK
FMLNKEMYLN

SEQ ID NO: 21694 - protein, 10 aa, synthetic construct
  source 1..10: note = Seed: FLLNKEMYLK
FMLNKEMYLP

SEQ ID NO: 21695 - protein, 10 aa, synthetic construct
  source 1..10: note = Seed: FLLNKEMYLK
FMLNKEMYLQ

SEQ ID NO: 21696 - protein, 10 aa, synthetic construct
  source 1..10: note = Seed: FLLNKEMYLK
FMLNKEMYLR

SEQ ID NO: 21697 - protein, 10 aa, synthetic construct
  source 1..10: note = Seed: FLLNKEMYLK
FMLNKEMYLS

SEQ ID NO: 21698 - protein, 10 aa, synthetic construct
  source 1..10: note = Seed: FLLNKEMYLK
FMLNKEMYLT

SEQ ID NO: 21699 - protein, 10 aa, synthetic construct
  source 1..10: note = Seed: FLLNKEMYLK
FMLNKEMYLV

SEQ ID NO: 21700 - protein, 10 aa, synthetic construct
  source 1..10: note = Seed: FLLNKEMYLK
FMLNKEMYLW

SEQ ID NO: 21701 - protein, 10 aa, synthetic construct
  source 1..10: note = Seed: FLLNKEMYLK
FMLNKEMYLY

SEQ ID NO: 21702 - protein, 9 aa, synthetic construct
  source 1..9: note = Seed: FLLNKEMYL
FMLNKEMYM

SEQ ID NO: 21703 - protein, 9 aa, synthetic construct
  source 1..9: note = Seed: FLLNKEMYL
FMLNKEMYR

SEQ ID NO: 21704 - protein, 9 aa, synthetic construct
  source 1..9: note = Seed: FLLNKEMYL
FMLNKEMYS

SEQ ID NO: 21705 - protein, 9 aa, synthetic construct
  source 1..9: note = Seed: FLLNKEMYL
FMLNKEMYT

SEQ ID NO: 21706 - protein, 9 aa, synthetic construct
  source 1..9: note = Seed: FLLNKEMYL
FMLNKEMYV

SEQ ID NO: 21707 - protein, 9 aa, synthetic construct
  source 1..9: note = Seed: FLLNKEMYL
FMLNKEMYY

SEQ ID NO: 21708 - protein, 8 aa, synthetic construct
  source 1..8: note = Seed: FRLTLGVY
FMLTLGVF

SEQ ID NO: 21709 - protein, 8 aa, synthetic construct
  source 1..8: note = Seed: FRLTLGVY
FMLTLGVY

SEQ ID NO: 21710 - protein, 10 aa, synthetic construct
  source 1..10: note = Seed: FRLTLGVYDY
FMLTLGVYDY

SEQ ID NO: 21711 - protein, 11 aa, synthetic construct
  source 1..11: note = Seed: FRLTLGVYDYL
FMLTLGVYDYA

SEQ ID NO: 21712 - protein, 11 aa, synthetic construct
  source 1..11: note = Seed: FRLTLGVYDYL
FMLTLGVYDYI

SEQ ID NO: 21713 - protein, 11 aa, synthetic construct
  source 1..11: note = Seed: FRLTLGVYDYL
FMLTLGVYDYL

SEQ ID NO: 21714 - protein, 11 aa, synthetic construct
  source 1..11: note = Seed: FRLTLGVYDYL
FMLTLGVYDYV

SEQ ID NO: 21715 - protein, 9 aa, synthetic construct
  source 1..9: note = Seed: FYLTNDVSF
FMLTNDVSF

SEQ ID NO: 21716 - protein, 10 aa, synthetic construct
  source 1..10: note = Seed: FYLTNDVSFL
FMLTNDVSFA

SEQ ID NO: 21717 - protein, 10 aa, synthetic construct
  source 1..10: note = Seed: FYLTNDVSFL
FMLTNDVSFI

SEQ ID NO: 21718 - protein, 10 aa, synthetic construct
  source 1..10: note = Seed: FYLTNDVSFL
FMLTNDVSFL

SEQ ID NO: 21719 - protein, 11 aa, synthetic construct
  source 1..11: note = Seed: FYLTNDVSFLA
FMLTNDVSFLA

SEQ ID NO: 21720 - protein, 11 aa, synthetic construct
  source 1..11: note = Seed: FYLTNDVSFLA
FMLTNDVSFLF

SEQ ID NO: 21721 - protein, 11 aa, synthetic construct
  source 1..11: note = Seed: FYLTNDVSFLA
FMLTNDVSFLI

SEQ ID NO: 21722 - protein, 11 aa, synthetic construct
  source 1..11: note = Seed: FYLTNDVSFLA
FMLTNDVSFLL

SEQ ID NO: 21723 - protein, 11 aa, synthetic construct
  source 1..11: note = Seed: FYLTNDVSFLA
FMLTNDVSFLM

SEQ ID NO: 21724 - protein, 11 aa, synthetic construct
  source 1..11: note = Seed: FYLTNDVSFLA
FMLTNDVSFLS

SEQ ID NO: 21725 - protein, 11 aa, synthetic construct
  source 1..11: note = Seed: FYLTNDVSFLA
FMLTNDVSFLT

SEQ ID NO: 21726 - protein, 11 aa, synthetic construct
  source 1..11: note = Seed: FYLTNDVSFLA
FMLTNDVSFLV

SEQ ID NO: 21727 - protein, 10 aa, synthetic construct
  source 1..10: note = Seed: FYLTNDVSFL
FMLTNDVSFM

SEQ ID NO: 21728 - protein, 10 aa, synthetic construct
  source 1..10: note = Seed: FYLTNDVSFL
FMLTNDVSFT

SEQ ID NO: 21729 - protein, 10 aa, synthetic construct
  source 1..10: note = Seed: FYLTNDVSFL
FMLTNDVSFV

SEQ ID NO: 21730 - protein, 9 aa, synthetic construct
  source 1..9: note = Seed: FYLTNDVSF
FMLTNDVSL

SEQ ID NO: 21731 - protein, 9 aa, synthetic construct
  source 1..9: note = Seed: FYLTNDVSF
FMLTNDVSM

SEQ ID NO: 21732 - protein, 9 aa, synthetic construct
  source 1..9: note = Seed: FYLTNDVSF
FMLTNDVSW

SEQ ID NO: 21733 - protein, 9 aa, synthetic construct
  source 1..9: note = Seed: FYLTNDVSF
FMLTNDVSY

SEQ ID NO: 21734 - protein, 10 aa, synthetic construct
  source 1..10: note = Seed: FQLTPIAVQM
FMLTPIAVQA

SEQ ID NO: 21735 - protein, 10 aa, synthetic construct
  source 1..10: note = Seed: FQLTPIAVQM
FMLTPIAVQF

SEQ ID NO: 21736 - protein, 10 aa, synthetic construct
  source 1..10: note = Seed: FQLTPIAVQM
FMLTPIAVQI

SEQ ID NO: 21737 - protein, 10 aa, synthetic construct
  source 1..10: note = Seed: FQLTPIAVQM
FMLTPIAVQL

SEQ ID NO: 21738 - protein, 10 aa, synthetic construct
  source 1..10: note = Seed: FQLTPIAVQM
FMLTPIAVQM

SEQ ID NO: 21739 - protein, 10 aa, synthetic construct
  source 1..10: note = Seed: FQLTPIAVQM
FMLTPIAVQT

SEQ ID NO: 21740 - protein, 10 aa, synthetic construct
  source 1..10: note = Seed: FQLTPIAVQM
FMLTPIAVQV

SEQ ID NO: 21741 - protein, 10 aa, synthetic construct
  source 1..10: note = Seed: FQLTPIAVQM
FMLTPIAVQY

SEQ ID NO: 21742 - protein, 9 aa, synthetic construct
  source 1..9: note = Seed: FELTSMKYF
FMLTSMKYF

SEQ ID NO: 21743 - protein, 10 aa, synthetic construct
  source 1..10: note = Seed: FELTSMKYFV
FMLTSMKYFA

SEQ ID NO: 21744 - protein, 10 aa, synthetic construct
  source 1..10: note = Seed: FELTSMKYFV
FMLTSMKYFI

SEQ ID NO: 21745 - protein, 10 aa, synthetic construct
  source 1..10: note = Seed: FELTSMKYFV
FMLTSMKYFL

SEQ ID NO: 21746 - protein, 10 aa, synthetic construct
  source 1..10: note = Seed: FELTSMKYFV
FMLTSMKYFM

SEQ ID NO: 21747 - protein, 10 aa, synthetic construct
  source 1..10: note = Seed: FELTSMKYFV
FMLTSMKYFT

SEQ ID NO: 21748 - protein, 10 aa, synthetic construct
  source 1..10: note = Seed: FELTSMKYFV
FMLTSMKYFV

SEQ ID NO: 21749 - protein, 9 aa, synthetic construct
  source 1..9: note = Seed: FELTSMKYF
FMLTSMKYM

SEQ ID NO: 21750 - protein, 9 aa, synthetic construct
  source 1..9: note = Seed: FELTSMKYF
FMLTSMKYY

SEQ ID NO: 21751 - protein, 9 aa, synthetic construct
  source 1..9: note = Seed: FGLVAEWFL
FMLVAEWFA

SEQ ID NO: 21752 - protein, 9 aa, synthetic construct
  source 1..9: note = Seed: FGLVAEWFL
FMLVAEWFI

SEQ ID NO: 21753 - protein, 9 aa, synthetic construct
  source 1..9: note = Seed: FGLVAEWFL
FMLVAEWFL

SEQ ID NO: 21754 - protein, 10 aa, synthetic construct
  source 1..10: note = Seed: FGLVAEWFLA
FMLVAEWFLA

SEQ ID NO: 21755 - protein, 11 aa, synthetic construct
  source 1..11: note = Seed: FGLVAEWFLAY
FMLVAEWFLAY

SEQ ID NO: 21756 - protein, 10 aa, synthetic construct
  source 1..10: note = Seed: FGLVAEWFLA
FMLVAEWFLC

SEQ ID NO: 21757 - protein, 10 aa, synthetic construct
  source 1..10: note = Seed: FGLVAEWFLA
FMLVAEWFLD

SEQ ID NO: 21758 - protein, 10 aa, synthetic construct
  source 1..10: note = Seed: FGLVAEWFLA
FMLVAEWFLE

SEQ ID NO: 21759 - protein, 10 aa, synthetic construct
  source 1..10: note = Seed: FGLVAEWFLA
FMLVAEWFLF

SEQ ID NO: 21760 - protein, 10 aa, synthetic construct
  source 1..10: note = Seed: FGLVAEWFLA
FMLVAEWFLG

SEQ ID NO: 21761 - protein, 10 aa, synthetic construct
  source 1..10: note = Seed: FGLVAEWFLA
FMLVAEWFLH

SEQ ID NO: 21762 - protein, 10 aa, synthetic construct
  source 1..10: note = Seed: FGLVAEWFLA
FMLVAEWFLI

SEQ ID NO: 21763 - protein, 10 aa, synthetic construct
  source 1..10: note = Seed: FGLVAEWFLA
FMLVAEWFLK

SEQ ID NO: 21764 - protein, 10 aa, synthetic construct
  source 1..10: note = Seed: FGLVAEWFLA
FMLVAEWFLL

SEQ ID NO: 21765 - protein, 10 aa, synthetic construct
  source 1..10: note = Seed: FGLVAEWFLA
FMLVAEWFLM

SEQ ID NO: 21766 - protein, 10 aa, synthetic construct
  source 1..10: note = Seed: FGLVAEWFLA
FMLVAEWFLN

SEQ ID NO: 21767 - protein, 10 aa, synthetic construct
  source 1..10: note = Seed: FGLVAEWFLA
FMLVAEWFLP

SEQ ID NO: 21768 - protein, 10 aa, synthetic construct
  source 1..10: note = Seed: FGLVAEWFLA
FMLVAEWFLQ

SEQ ID NO: 21769 - protein, 10 aa, synthetic construct
  source 1..10: note = Seed: FGLVAEWFLA
FMLVAEWFLR

SEQ ID NO: 21770 - protein, 10 aa, synthetic construct
  source 1..10: note = Seed: FGLVAEWFLA
FMLVAEWFLS

SEQ ID NO: 21771 - protein, 10 aa, synthetic construct
  source 1..10: note = Seed: FGLVAEWFLA
FMLVAEWFLT

SEQ ID NO: 21772 - protein, 10 aa, synthetic construct
  source 1..10: note = Seed: FGLVAEWFLA
FMLVAEWFLV

SEQ ID NO: 21773 - protein, 10 aa, synthetic construct
  source 1..10: note = Seed: FGLVAEWFLA
FMLVAEWFLW

SEQ ID NO: 21774 - protein, 10 aa, synthetic construct
  source 1..10: note = Seed: FGLVAEWFLA
FMLVAEWFLY

SEQ ID NO: 21775 - protein, 9 aa, synthetic construct
  source 1..9: note = Seed: FGLVAEWFL
FMLVAEWFM

SEQ ID NO: 21776 - protein, 9 aa, synthetic construct
  source 1..9: note = Seed: FGLVAEWFL
FMLVAEWFS

SEQ ID NO: 21777 - protein, 9 aa, synthetic construct
  source 1..9: note = Seed: FGLVAEWFL
FMLVAEWFT

SEQ ID NO: 21778 - protein, 9 aa, synthetic construct
  source 1..9: note = Seed: FGLVAEWFL
FMLVAEWFV

SEQ ID NO: 21779 - protein, 10 aa, synthetic construct
  source 1..10: note = Seed: FVLWAHGFEL
FMLWAHGFEA

SEQ ID NO: 21780 - protein, 10 aa, synthetic construct
  source 1..10: note = Seed: FVLWAHGFEL
FMLWAHGFEC

SEQ ID NO: 21781 - protein, 10 aa, synthetic construct
  source 1..10: note = Seed: FVLWAHGFEL
FMLWAHGFEF

SEQ ID NO: 21782 - protein, 10 aa, synthetic construct
  source 1..10: note = Seed: FVLWAHGFEL
FMLWAHGFEI

SEQ ID NO: 21783 - protein, 10 aa, synthetic construct
  source 1..10: note = Seed: FVLWAHGFEL
FMLWAHGFEL

SEQ ID NO: 21784 - protein, 11 aa, synthetic construct
  source 1..11: note = Seed: FVLWAHGFELT
FMLWAHGFELA

SEQ ID NO: 21785 - protein, 11 aa, synthetic construct
  source 1..11: note = Seed: FVLWAHGFELT
FMLWAHGFELC

SEQ ID NO: 21786 - protein, 11 aa, synthetic construct
  source 1..11: note = Seed: FVLWAHGFELT
FMLWAHGFELD

SEQ ID NO: 21787 - protein, 11 aa, synthetic construct
  source 1..11: note = Seed: FVLWAHGFELT
FMLWAHGFELE

SEQ ID NO: 21788 - protein, 11 aa, synthetic construct
  source 1..11: note = Seed: FVLWAHGFELT
FMLWAHGFELF

SEQ ID NO: 21789 - protein, 11 aa, synthetic construct
  source 1..11: note = Seed: FVLWAHGFELT
FMLWAHGFELG

SEQ ID NO: 21790 - protein, 11 aa, synthetic construct
  source 1..11: note = Seed: FVLWAHGFELT
FMLWAHGFELH

SEQ ID NO: 21791 - protein, 11 aa, synthetic construct
  source 1..11: note = Seed: FVLWAHGFELT
FMLWAHGFELI

SEQ ID NO: 21792 - protein, 11 aa, synthetic construct
  source 1..11: note = Seed: FVLWAHGFELT
FMLWAHGFELK

SEQ ID NO: 21793 - protein, 11 aa, synthetic construct
  source 1..11: note = Seed: FVLWAHGFELT
FMLWAHGFELL

SEQ ID NO: 21794 - protein, 11 aa, synthetic construct
  source 1..11: note = Seed: FVLWAHGFELT
FMLWAHGFELM

SEQ ID NO: 21795 - protein, 11 aa, synthetic construct
  source 1..11: note = Seed: FVLWAHGFELT
FMLWAHGFELN

SEQ ID NO: 21796 - protein, 11 aa, synthetic construct
  source 1..11: note = Seed: FVLWAHGFELT
FMLWAHGFELP

SEQ ID NO: 21797 - protein, 11 aa, synthetic construct
  source 1..11: note = Seed: FVLWAHGFELT
FMLWAHGFELQ

SEQ ID NO: 21798 - protein, 11 aa, synthetic construct
  source 1..11: note = Seed: FVLWAHGFELT
FMLWAHGFELR

SEQ ID NO: 21799 - protein, 11 aa, synthetic construct
  source 1..11: note = Seed: FVLWAHGFELT
FMLWAHGFELS

SEQ ID NO: 21800 - protein, 11 aa, synthetic construct
  source 1..11: note = Seed: FVLWAHGFELT
FMLWAHGFELT

SEQ ID NO: 21801 - protein, 11 aa, synthetic construct
  source 1..11: note = Seed: FVLWAHGFELT
FMLWAHGFELV

SEQ ID NO: 21802 - protein, 11 aa, synthetic construct
  source 1..11: note = Seed: FVLWAHGFELT
FMLWAHGFELW

SEQ ID NO: 21803 - protein, 11 aa, synthetic construct
  source 1..11: note = Seed: FVLWAHGFELT
FMLWAHGFELY

SEQ ID NO: 21804 - protein, 10 aa, synthetic construct
  source 1..10: note = Seed: FVLWAHGFEL
FMLWAHGFEM

SEQ ID NO: 21805 - protein, 10 aa, synthetic construct
  source 1..10: note = Seed: FVLWAHGFEL
FMLWAHGFES

SEQ ID NO: 21806 - protein, 10 aa, synthetic construct
  source 1..10: note = Seed: FVLWAHGFEL
FMLWAHGFET

SEQ ID NO: 21807 - protein, 10 aa, synthetic construct
  source 1..10: note = Seed: FVLWAHGFEL
FMLWAHGFEV

SEQ ID NO: 21808 - protein, 10 aa, synthetic construct
  source 1..10: note = Seed: FELWAKRNIK
FMLWAKRNIR

SEQ ID NO: 21809 - protein, 9 aa, synthetic construct
  source 1..9: note = Seed: FSLWVYKQF
FMLWVYKQF

SEQ ID NO: 21810 - protein, 9 aa, synthetic construct
  source 1..9: note = Seed: FSLWVYKQF
FMLWVYKQY

SEQ ID NO: 21811 - protein, 9 aa, synthetic construct
  source 1..9: note = Seed: FHLYLQYIR
FMLYLQYIK

SEQ ID NO: 21812 - protein, 9 aa, synthetic construct
  source 1..9: note = Seed: FHLYLQYIR
FMLYLQYIR

SEQ ID NO: 21813 - protein, 9 aa, synthetic construct
  source 1..9: note = Seed: FAMMFVKHK
FMMMFVKHR

SEQ ID NO: 21814 - protein, 10 aa, synthetic construct
  source 1..10: note = Seed: FSMMILSDDA
FMMMILSDDA

SEQ ID NO: 21815 - protein, 11 aa, synthetic construct
  source 1..11: note = Seed: FSMMILSDDAV
FMMMILSDDAA

SEQ ID NO: 21816 - protein, 11 aa, synthetic construct
  source 1..11: note = Seed: FSMMILSDDAV
FMMMILSDDAI

SEQ ID NO: 21817 - protein, 11 aa, synthetic construct
  source 1..11: note = Seed: FSMMILSDDAV
FMMMILSDDAL

SEQ ID NO: 21818 - protein, 11 aa, synthetic construct
  source 1..11: note = Seed: FSMMILSDDAV
FMMMILSDDAV

SEQ ID NO: 21819 - protein, 10 aa, synthetic construct
  source 1..10: note = Seed: FSMMILSDDA
FMMMILSDDI

SEQ ID NO: 21820 - protein, 10 aa, synthetic construct
  source 1..10: note = Seed: FSMMILSDDA
FMMMILSDDL

SEQ ID NO: 21821 - protein, 10 aa, synthetic construct
  source 1..10: note = Seed: FSMMILSDDA
FMMMILSDDM

SEQ ID NO: 21822 - protein, 10 aa, synthetic construct
  source 1..10: note = Seed: FSMMILSDDA
FMMMILSDDV

SEQ ID NO: 21823 - protein, 10 aa, synthetic construct
  source 1..10: note = Seed: FKMNYQVNGY
FMMNYQVNGF

SEQ ID NO: 21824 - protein, 10 aa, synthetic construct
  source 1..10: note = Seed: FKMNYQVNGY
FMMNYQVNGM

SEQ ID NO: 21825 - protein, 10 aa, synthetic construct
  source 1..10: note = Seed: FKMNYQVNGY
FMMNYQVNGY

SEQ ID NO: 21826 - protein, 9 aa, synthetic construct
  source 1..9: note = Seed: FAMQMAYRF
FMMQMAYRA

SEQ ID NO: 21827 - protein, 9 aa, synthetic construct
  source 1..9: note = Seed: FAMQMAYRF
FMMQMAYRF

SEQ ID NO: 21828 - protein, 9 aa, synthetic construct
  source 1..9: note = Seed: FAMQMAYRF
FMMQMAYRI

SEQ ID NO: 21829 - protein, 9 aa, synthetic construct
  source 1..9: note = Seed: FAMQMAYRF
FMMQMAYRL

SEQ ID NO: 21830 - protein, 9 aa, synthetic construct
  source 1..9: note = Seed: FAMQMAYRF
FMMQMAYRM

SEQ ID NO: 21831 - protein, 9 aa, synthetic construct
  source 1..9: note = Seed: FAMQMAYRF
FMMQMAYRT

SEQ ID NO: 21832 - protein, 9 aa, synthetic construct
  source 1..9: note = Seed: FAMQMAYRF
FMMQMAYRV

SEQ ID NO: 21833 - protein, 9 aa, synthetic construct
  source 1..9: note = Seed: FAMQMAYRF
FMMQMAYRW

SEQ ID NO: 21834 - protein, 9 aa, synthetic construct
  source 1..9: note = Seed: FAMQMAYRF
FMMQMAYRY

SEQ ID NO: 21835 - protein, 8 aa, synthetic construct
  source 1..8: note = Seed: FDMSKFPL
FMMSKFPA

SEQ ID NO: 21836 - protein, 8 aa, synthetic construct
  source 1..8: note = Seed: FDMSKFPL
FMMSKFPF

SEQ ID NO: 21837 - protein, 8 aa, synthetic construct
  source 1..8: note = Seed: FDMSKFPL
FMMSKFPI

SEQ ID NO: 21838 - protein, 8 aa, synthetic construct
  source 1..8: note = Seed: FDMSKFPL
FMMSKFPL

SEQ ID NO: 21839 - protein, 10 aa, synthetic construct
  source 1..10: note = Seed: FDMSKFPLKL
FMMSKFPLKA

SEQ ID NO: 21840 - protein, 10 aa, synthetic construct
  source 1..10: note = Seed: FDMSKFPLKL
FMMSKFPLKC

SEQ ID NO: 21841 - protein, 10 aa, synthetic construct
  source 1..10: note = Seed: FDMSKFPLKL
FMMSKFPLKI

SEQ ID NO: 21842 - protein, 10 aa, synthetic construct
  source 1..10: note = Seed: FDMSKFPLKL
FMMSKFPLKL

SEQ ID NO: 21843 - protein, 10 aa, synthetic construct
  source 1..10: note = Seed: FDMSKFPLKL
FMMSKFPLKM

SEQ ID NO: 21844 - protein, 10 aa, synthetic construct
  source 1..10: note = Seed: FDMSKFPLKL
FMMSKFPLKS

SEQ ID NO: 21845 - protein, 10 aa, synthetic construct
  source 1..10: note = Seed: FDMSKFPLKL
FMMSKFPLKT

SEQ ID NO: 21846 - protein, 10 aa, synthetic construct
  source 1..10: note = Seed: FDMSKFPLKL
FMMSKFPLKV

SEQ ID NO: 21847 - protein, 8 aa, synthetic construct
  source 1..8: note = Seed: FDMSKFPL
FMMSKFPM

SEQ ID NO: 21848 - protein, 8 aa, synthetic construct
  source 1..8: note = Seed: FDMSKFPL
FMMSKFPV

SEQ ID NO: 21849 - protein, 10 aa, synthetic construct
  source 1..10: note = Seed: FNMVYMPASW
FMMVYMPASF

SEQ ID NO: 21850 - protein, 10 aa, synthetic construct
  source 1..10: note = Seed: FNMVYMPASW
FMMVYMPASM

SEQ ID NO: 21851 - protein, 10 aa, synthetic construct
  source 1..10: note = Seed: FNMVYMPASW
FMMVYMPASW

SEQ ID NO: 21852 - protein, 10 aa, synthetic construct
  source 1..10: note = Seed: FNMVYMPASW
FMMVYMPASY

SEQ ID NO: 21853 - protein, 9 aa, synthetic construct
  source 1..9: note = Seed: FENKTTLPV
FMNKTTLPA

SEQ ID NO: 21854 - protein, 9 aa, synthetic construct
  source 1..9: note = Seed: FENKTTLPV
FMNKTTLPF

SEQ ID NO: 21855 - protein, 9 aa, synthetic construct
  source 1..9: note = Seed: FENKTTLPV
FMNKTTLPH

SEQ ID NO: 21856 - protein, 9 aa, synthetic construct
  source 1..9: note = Seed: FENKTTLPV
FMNKTTLPI

SEQ ID NO: 21857 - protein, 9 aa, synthetic construct
  source 1..9: note = Seed: FENKTTLPV
FMNKTTLPL

SEQ ID NO: 21858 - protein, 9 aa, synthetic construct
  source 1..9: note = Seed: FENKTTLPV
FMNKTTLPM

SEQ ID NO: 21859 - protein, 9 aa, synthetic construct
  source 1..9: note = Seed: FENKTTLPV
FMNKTTLPV

SEQ ID NO: 21860 - protein, 9 aa, synthetic construct
  source 1..9: note = Seed: FENKTTLPV
FMNKTTLPW

SEQ ID NO: 21861 - protein, 9 aa, synthetic construct
  source 1..9: note = Seed: FENKTTLPV
FMNKTTLPY

SEQ ID NO: 21862 - protein, 9 aa, synthetic construct
  source 1..9: note = Seed: FVNLKQLPF
FMNLKQLPA

SEQ ID NO: 21863 - protein, 9 aa, synthetic construct
  source 1..9: note = Seed: FVNLKQLPF
FMNLKQLPF

SEQ ID NO: 21864 - protein, 10 aa, synthetic construct
  source 1..10: note = Seed: FVNLKQLPFF
FMNLKQLPFF

SEQ ID NO: 21865 - protein, 11 aa, synthetic construct
  source 1..11: note = Seed: FVNLKQLPFFY
FMNLKQLPFFY

SEQ ID NO: 21866 - protein, 10 aa, synthetic construct
  source 1..10: note = Seed: FVNLKQLPFF
FMNLKQLPFY

SEQ ID NO: 21867 - protein, 9 aa, synthetic construct
  source 1..9: note = Seed: FVNLKQLPF
FMNLKQLPI

SEQ ID NO: 21868 - protein, 9 aa, synthetic construct
  source 1..9: note = Seed: FVNLKQLPF
FMNLKQLPL

SEQ ID NO: 21869 - protein, 9 aa, synthetic construct
  source 1..9: note = Seed: FVNLKQLPF
FMNLKQLPM

SEQ ID NO: 21870 - protein, 9 aa, synthetic construct
  source 1..9: note = Seed: FVNLKQLPF
FMNLKQLPV

SEQ ID NO: 21871 - protein, 9 aa, synthetic construct
  source 1..9: note = Seed: FVNLKQLPF
FMNLKQLPY

SEQ ID NO: 21872 - protein, 9 aa, synthetic construct
  source 1..9: note = Seed: FTNVYADSF
FMNVYADSF

SEQ ID NO: 21873 - protein, 10 aa, synthetic construct
  source 1..10: note = Seed: FTNVYADSFV
FMNVYADSFA

SEQ ID NO: 21874 - protein, 10 aa, synthetic construct
  source 1..10: note = Seed: FTNVYADSFV
FMNVYADSFI

SEQ ID NO: 21875 - protein, 10 aa, synthetic construct
  source 1..10: note = Seed: FTNVYADSFV
FMNVYADSFL

SEQ ID NO: 21876 - protein, 10 aa, synthetic construct
  source 1..10: note = Seed: FTNVYADSFV
FMNVYADSFM

SEQ ID NO: 21877 - protein, 10 aa, synthetic construct
  source 1..10: note = Seed: FTNVYADSFV
FMNVYADSFV

SEQ ID NO: 21878 - protein, 11 aa, synthetic construct
  source 1..11: note = Seed: FTNVYADSFVI
FMNVYADSFVA

SEQ ID NO: 21879 - protein, 11 aa, synthetic construct
  source 1..11: note = Seed: FTNVYADSFVI
FMNVYADSFVI

SEQ ID NO: 21880 - protein, 11 aa, synthetic construct
  source 1..11: note = Seed: FTNVYADSFVI
FMNVYADSFVL

SEQ ID NO: 21881 - protein, 11 aa, synthetic construct
  source 1..11: note = Seed: FTNVYADSFVI
FMNVYADSFVM

SEQ ID NO: 21882 - protein, 11 aa, synthetic construct
  source 1..11: note = Seed: FTNVYADSFVI
FMNVYADSFVV

SEQ ID NO: 21883 - protein, 9 aa, synthetic construct
  source 1..9: note = Seed: FTNVYADSF
FMNVYADSL

SEQ ID NO: 21884 - protein, 9 aa, synthetic construct
  source 1..9: note = Seed: FTNVYADSF
FMNVYADSM

SEQ ID NO: 21885 - protein, 9 aa, synthetic construct
  source 1..9: note = Seed: FTNVYADSF
FMNVYADSW

SEQ ID NO: 21886 - protein, 9 aa, synthetic construct
  source 1..9: note = Seed: FTNVYADSF
FMNVYADSY

SEQ ID NO: 21887 - protein, 9 aa, synthetic construct
  source 1..9: note = Seed: FNPETNILL
FMPETNILI

SEQ ID NO: 21888 - protein, 9 aa, synthetic construct
  source 1..9: note = Seed: FNPETNILL
FMPETNILL

SEQ ID NO: 21889 - protein, 9 aa, synthetic construct
  source 1..9: note = Seed: FNPETNILL
FMPETNILM

SEQ ID NO: 21890 - protein, 10 aa, synthetic construct
  source 1..10: note = Seed: FTPFDVVRQC
FMPFDVVRQA

SEQ ID NO: 21891 - protein, 8 aa, synthetic construct
  source 1..8: note = Seed: FLPFFSNV
FMPFFSNV

SEQ ID NO: 21892 - protein, 9 aa, synthetic construct
  source 1..9: note = Seed: FLPFFSNVT
FMPFFSNVA

SEQ ID NO: 21893 - protein, 9 aa, synthetic construct
  source 1..9: note = Seed: FLPFFSNVT
FMPFFSNVI

SEQ ID NO: 21894 - protein, 9 aa, synthetic construct
  source 1..9: note = Seed: FLPFFSNVT
FMPFFSNVL

SEQ ID NO: 21895 - protein, 9 aa, synthetic construct
  source 1..9: note = Seed: FLPFFSNVT
FMPFFSNVM

SEQ ID NO: 21896 - protein, 10 aa, synthetic construct
  source 1..10: note = Seed: FLPFFSNVTW
FMPFFSNVTF

SEQ ID NO: 21897 - protein, 10 aa, synthetic construct
  source 1..10: note = Seed: FLPFFSNVTW
FMPFFSNVTH

SEQ ID NO: 21898 - protein, 10 aa, synthetic construct
  source 1..10: note = Seed: FLPFFSNVTW
FMPFFSNVTL

SEQ ID NO: 21899 - protein, 10 aa, synthetic construct
  source 1..10: note = Seed: FLPFFSNVTW
FMPFFSNVTM

SEQ ID NO: 21900 - protein, 10 aa, synthetic construct
  source 1..10: note = Seed: FLPFFSNVTW
FMPFFSNVTW

SEQ ID NO: 21901 - protein, 11 aa, synthetic construct
  source 1..11: note = Seed: FLPFFSNVTWF
FMPFFSNVTWW

SEQ ID NO: 21902 - protein, 10 aa, synthetic construct
  source 1..10: note = Seed: FLPFFSNVTW
FMPFFSNVTY

SEQ ID NO: 21903 - protein, 9 aa, synthetic construct
  source 1..9: note = Seed: FLPFFSNVT
FMPFFSNVV

SEQ ID NO: 21904 - protein, 9 aa, synthetic construct
  source 1..9: note = Seed: FLPFQQFGR
FMPFQQFGR

SEQ ID NO: 21905 - protein, 11 aa, synthetic construct
  source 1..11: note = Seed: FLPFQQFGRDI
FMPFQQFGRDV

SEQ ID NO: 21906 - protein, 8 aa, synthetic construct
  source 1..8: note = Seed: FLPGVYSV
FMPGVYSA

SEQ ID NO: 21907 - protein, 8 aa, synthetic construct
  source 1..8: note = Seed: FLPGVYSV
FMPGVYSI

SEQ ID NO: 21908 - protein, 8 aa, synthetic construct
  source 1..8: note = Seed: FLPGVYSV
FMPGVYSL

SEQ ID NO: 21909 - protein, 8 aa, synthetic construct
  source 1..8: note = Seed: FLPGVYSV
FMPGVYSM

SEQ ID NO: 21910 - protein, 8 aa, synthetic construct
  source 1..8: note = Seed: FLPGVYSV
FMPGVYSV

SEQ ID NO: 21911 - protein, 9 aa, synthetic construct
  source 1..9: note = Seed: FTPLVPFWI
FMPLVPFWA

SEQ ID NO: 21912 - protein, 9 aa, synthetic construct
  source 1..9: note = Seed: FTPLVPFWI
FMPLVPFWI

SEQ ID NO: 21913 - protein, 10 aa, synthetic construct
  source 1..10: note = Seed: FTPLVPFWIT
FMPLVPFWIA

SEQ ID NO: 21914 - protein, 11 aa, synthetic construct
  source 1..11: note = Seed: FTPLVPFWITI
FMPLVPFWITI

SEQ ID NO: 21915 - protein, 11 aa, synthetic construct
  source 1..11: note = Seed: FTPLVPFWITI
FMPLVPFWITL

SEQ ID NO: 21916 - protein, 11 aa, synthetic construct
  source 1..11: note = Seed: FTPLVPFWITI
FMPLVPFWITV

SEQ ID NO: 21917 - protein, 9 aa, synthetic construct
  source 1..9: note = Seed: FTPLVPFWI
FMPLVPFWL

SEQ ID NO: 21918 - protein, 9 aa, synthetic construct
  source 1..9: note = Seed: FTPLVPFWI
FMPLVPFWM

SEQ ID NO: 21919 - protein, 9 aa, synthetic construct
  source 1..9: note = Seed: FTPLVPFWI
FMPLVPFWT

SEQ ID NO: 21920 - protein, 9 aa, synthetic construct
  source 1..9: note = Seed: FTPLVPFWI
FMPLVPFWV

SEQ ID NO: 21921 - protein, 8 aa, synthetic construct
  source 1..8: note = Seed: FLPRVFSA
FMPRVFSA

SEQ ID NO: 21922 - protein, 9 aa, synthetic construct
  source 1..9: note = Seed: FLPRVFSAV
FMPRVFSAA

SEQ ID NO: 21923 - protein, 9 aa, synthetic construct
  source 1..9: note = Seed: FLPRVFSAV
FMPRVFSAF

SEQ ID NO: 21924 - protein, 9 aa, synthetic construct
  source 1..9: note = Seed: FLPRVFSAV
FMPRVFSAI

SEQ ID NO: 21925 - protein, 9 aa, synthetic construct
  source 1..9: note = Seed: FLPRVFSAV
FMPRVFSAL

SEQ ID NO: 21926 - protein, 9 aa, synthetic construct
  source 1..9: note = Seed: FLPRVFSAV
FMPRVFSAM

SEQ ID NO: 21927 - protein, 9 aa, synthetic construct
  source 1..9: note = Seed: FLPRVFSAV
FMPRVFSAS

SEQ ID NO: 21928 - protein, 9 aa, synthetic construct
  source 1..9: note = Seed: FLPRVFSAV
FMPRVFSAT

SEQ ID NO: 21929 - protein, 9 aa, synthetic construct
  source 1..9: note = Seed: FLPRVFSAV
FMPRVFSAV

SEQ ID NO: 21930 - protein, 10 aa, synthetic construct
  source 1..10: note = Seed: FLPRVFSAVG
FMPRVFSAVA

SEQ ID NO: 21931 - protein, 10 aa, synthetic construct
  source 1..10: note = Seed: FLPRVFSAVG
FMPRVFSAVF

SEQ ID NO: 21932 - protein, 10 aa, synthetic construct
  source 1..10: note = Seed: FLPRVFSAVG
FMPRVFSAVI

SEQ ID NO: 21933 - protein, 10 aa, synthetic construct
  source 1..10: note = Seed: FLPRVFSAVG
FMPRVFSAVL

SEQ ID NO: 21934 - protein, 10 aa, synthetic construct
  source 1..10: note = Seed: FLPRVFSAVG
FMPRVFSAVM

SEQ ID NO: 21935 - protein, 10 aa, synthetic construct
  source 1..10: note = Seed: FLPRVFSAVG
FMPRVFSAVT

SEQ ID NO: 21936 - protein, 10 aa, synthetic construct
  source 1..10: note = Seed: FLPRVFSAVG
FMPRVFSAVV

SEQ ID NO: 21937 - protein, 9 aa, synthetic construct
  source 1..9: note = Seed: FLPRVFSAV
FMPRVFSAY

SEQ ID NO: 21938 - protein, 8 aa, synthetic construct
  source 1..8: note = Seed: FLPRVFSA
FMPRVFSI

SEQ ID NO: 21939 - protein, 8 aa, synthetic construct
  source 1..8: note = Seed: FLPRVFSA
FMPRVFSL

SEQ ID NO: 21940 - protein, 8 aa, synthetic construct
  source 1..8: note = Seed: FLPRVFSA
FMPRVFSM

SEQ ID NO: 21941 - protein, 8 aa, synthetic construct
  source 1..8: note = Seed: FLPRVFSA
FMPRVFSV

SEQ ID NO: 21942 - protein, 8 aa, synthetic construct
  source 1..8: note = Seed: FAPSASAF
FMPSASAF

SEQ ID NO: 21943 - protein, 9 aa, synthetic construct
  source 1..9: note = Seed: FAPSASAFF
FMPSASAFA

SEQ ID NO: 21944 - protein, 9 aa, synthetic construct
  source 1..9: note = Seed: FAPSASAFF
FMPSASAFF

SEQ ID NO: 21945 - protein, 9 aa, synthetic construct
  source 1..9: note = Seed: FAPSASAFF
FMPSASAFI

SEQ ID NO: 21946 - protein, 9 aa, synthetic construct
  source 1..9: note = Seed: FAPSASAFF
FMPSASAFL

SEQ ID NO: 21947 - protein, 9 aa, synthetic construct
  source 1..9: note = Seed: FAPSASAFF
FMPSASAFM

SEQ ID NO: 21948 - protein, 9 aa, synthetic construct
  source 1..9: note = Seed: FAPSASAFF
FMPSASAFV

SEQ ID NO: 21949 - protein, 9 aa, synthetic construct
  source 1..9: note = Seed: FAPSASAFF
FMPSASAFW

SEQ ID NO: 21950 - protein, 9 aa, synthetic construct
  source 1..9: note = Seed: FAPSASAFF
FMPSASAFY

SEQ ID NO: 21951 - protein, 8 aa, synthetic construct
  source 1..8: note = Seed: FAPSASAF
FMPSASAL

SEQ ID NO: 21952 - protein, 8 aa, synthetic construct
  source 1..8: note = Seed: FAPSASAF
FMPSASAM

SEQ ID NO: 21953 - protein, 8 aa, synthetic construct
  source 1..8: note = Seed: FAPSASAF
FMPSASAY

SEQ ID NO: 21954 - protein, 10 aa, synthetic construct
  source 1..10: note = Seed: FPQSAPHGVV
FMQSAPHGVA

SEQ ID NO: 21955 - protein, 10 aa, synthetic construct
  source 1..10: note = Seed: FPQSAPHGVV
FMQSAPHGVI

SEQ ID NO: 21956 - protein, 10 aa, synthetic construct
  source 1..10: note = Seed: FPQSAPHGVV
FMQSAPHGVL

SEQ ID NO: 21957 - protein, 10 aa, synthetic construct
  source 1..10: note = Seed: FPQSAPHGVV
FMQSAPHGVM

SEQ ID NO: 21958 - protein, 10 aa, synthetic construct
  source 1..10: note = Seed: FPQSAPHGVV
FMQSAPHGVV

SEQ ID NO: 21959 - protein, 11 aa, synthetic construct
  source 1..11: note = Seed: FPQSAPHGVVF
FMQSAPHGVVF

SEQ ID NO: 21960 - protein, 11 aa, synthetic construct
  source 1..11: note = Seed: FPQSAPHGVVF
FMQSAPHGVVL

SEQ ID NO: 21961 - protein, 11 aa, synthetic construct
  source 1..11: note = Seed: FPQSAPHGVVF
FMQSAPHGVVM

SEQ ID NO: 21962 - protein, 11 aa, synthetic construct
  source 1..11: note = Seed: FPQSAPHGVVF
FMQSAPHGVVW

SEQ ID NO: 21963 - protein, 11 aa, synthetic construct
  source 1..11: note = Seed: FPQSAPHGVVF
FMQSAPHGVVY

SEQ ID NO: 21964 - protein, 9 aa, synthetic construct
  source 1..9: note = Seed: FPQSAPHGV
FMQSAPHGY

SEQ ID NO: 21965 - protein, 8 aa, synthetic construct
  source 1..8: note = Seed: FLQSINFV
FMQSINFI

SEQ ID NO: 21966 - protein, 8 aa, synthetic construct
  source 1..8: note = Seed: FLQSINFV
FMQSINFL

SEQ ID NO: 21967 - protein, 8 aa, synthetic construct
  source 1..8: note = Seed: FLQSINFV
FMQSINFV

SEQ ID NO: 21968 - protein, 9 aa, synthetic construct
  source 1..9: note = Seed: FLQSINFVR
FMQSINFVK

SEQ ID NO: 21969 - protein, 9 aa, synthetic construct
  source 1..9: note = Seed: FLQSINFVR
FMQSINFVR

SEQ ID NO: 21970 - protein, 10 aa, synthetic construct
  source 1..10: note = Seed: FLQSINFVRI
FMQSINFVRA

SEQ ID NO: 21971 - protein, 10 aa, synthetic construct
  source 1..10: note = Seed: FLQSINFVRI
FMQSINFVRI

SEQ ID NO: 21972 - protein, 11 aa, synthetic construct
  source 1..11: note = Seed: FLQSINFVRII
FMQSINFVRII

SEQ ID NO: 21973 - protein, 11 aa, synthetic construct
  source 1..11: note = Seed: FLQSINFVRII
FMQSINFVRIL

SEQ ID NO: 21974 - protein, 11 aa, synthetic construct
  source 1..11: note = Seed: FLQSINFVRII
FMQSINFVRIV

SEQ ID NO: 21975 - protein, 10 aa, synthetic construct
  source 1..10: note = Seed: FLQSINFVRI
FMQSINFVRK

SEQ ID NO: 21976 - protein, 10 aa, synthetic construct
  source 1..10: note = Seed: FLQSINFVRI
FMQSINFVRL

SEQ ID NO: 21977 - protein, 10 aa, synthetic construct
  source 1..10: note = Seed: FLQSINFVRI
FMQSINFVRM

SEQ ID NO: 21978 - protein, 10 aa, synthetic construct
  source 1..10: note = Seed: FLQSINFVRI
FMQSINFVRR

SEQ ID NO: 21979 - protein, 10 aa, synthetic construct
  source 1..10: note = Seed: FLQSINFVRI
FMQSINFVRT

SEQ ID NO: 21980 - protein, 10 aa, synthetic construct
  source 1..10: note = Seed: FLQSINFVRI
FMQSINFVRV

SEQ ID NO: 21981 - protein, 10 aa, synthetic construct
  source 1..10: note = Seed: FTQSRNLQEF
FMQSRNLQEF

SEQ ID NO: 21982 - protein, 11 aa, synthetic construct
  source 1..11: note = Seed: FTQSRNLQEFK
FMQSRNLQEFR

SEQ ID NO: 21983 - protein, 10 aa, synthetic construct
  source 1..10: note = Seed: FTQSRNLQEF
FMQSRNLQEY

SEQ ID NO: 21984 - protein, 9 aa, synthetic construct
  source 1..9: note = Seed: FAQVKQIYK
FMQVKQIYK

SEQ ID NO: 21985 - protein, 9 aa, synthetic construct
  source 1..9: note = Seed: FAQVKQIYK
FMQVKQIYR

SEQ ID NO: 21986 - protein, 9 aa, synthetic construct
  source 1..9: note = Seed: FLRDGWEIV
FMRDGWEIA

SEQ ID NO: 21987 - protein, 9 aa, synthetic construct
  source 1..9: note = Seed: FLRDGWEIV
FMRDGWEII

SEQ ID NO: 21988 - protein, 9 aa, synthetic construct
  source 1..9: note = Seed: FLRDGWEIV
FMRDGWEIL

SEQ ID NO: 21989 - protein, 9 aa, synthetic construct
  source 1..9: note = Seed: FLRDGWEIV
FMRDGWEIM

SEQ ID NO: 21990 - protein, 9 aa, synthetic construct
  source 1..9: note = Seed: FLRDGWEIV
FMRDGWEIV

SEQ ID NO: 21991 - protein, 10 aa, synthetic construct
  source 1..10: note = Seed: FLRDGWEIVK
FMRDGWEIVA

SEQ ID NO: 21992 - protein, 10 aa, synthetic construct
  source 1..10: note = Seed: FLRDGWEIVK
FMRDGWEIVI

SEQ ID NO: 21993 - protein, 11 aa, synthetic construct
  source 1..11: note = Seed: FLRDGWEIVKF
FMRDGWEIVKY

SEQ ID NO: 21994 - protein, 10 aa, synthetic construct
  source 1..10: note = Seed: FLRDGWEIVK
FMRDGWEIVL

SEQ ID NO: 21995 - protein, 10 aa, synthetic construct
  source 1..10: note = Seed: FLRDGWEIVK
FMRDGWEIVM

SEQ ID NO: 21996 - protein, 10 aa, synthetic construct
  source 1..10: note = Seed: FLRDGWEIVK
FMRDGWEIVV

SEQ ID NO: 21997 - protein, 8 aa, synthetic construct
  source 1..8: note = Seed: FLRDGWEI
FMRDGWEV

SEQ ID NO: 21998 - protein, 9 aa, synthetic construct
  source 1..9: note = Seed: FPREGVFVS
FMREGVFVF

SEQ ID NO: 21999 - protein, 9 aa, synthetic construct
  source 1..9: note = Seed: FPREGVFVS
FMREGVFVM

SEQ ID NO: 22000 - protein, 9 aa, synthetic construct
  source 1..9: note = Seed: FPREGVFVS
FMREGVFVY

SEQ ID NO: 22001 - protein, 10 aa, synthetic construct
  source 1..10: note = Seed: FTRFFYVLGL
FMRFFYVLGA

SEQ ID NO: 22002 - protein, 10 aa, synthetic construct
  source 1..10: note = Seed: FTRFFYVLGL
FMRFFYVLGI

SEQ ID NO: 22003 - protein, 10 aa, synthetic construct
  source 1..10: note = Seed: FTRFFYVLGL
FMRFFYVLGK

SEQ ID NO: 22004 - protein, 10 aa, synthetic construct
  source 1..10: note = Seed: FTRFFYVLGL
FMRFFYVLGL

SEQ ID NO: 22005 - protein, 10 aa, synthetic construct
  source 1..10: note = Seed: FTRFFYVLGL
FMRFFYVLGM

SEQ ID NO: 22006 - protein, 10 aa, synthetic construct
  source 1..10: note = Seed: FTRFFYVLGL
FMRFFYVLGT

SEQ ID NO: 22007 - protein, 10 aa, synthetic construct
  source 1..10: note = Seed: FTRFFYVLGL
FMRFFYVLGV

SEQ ID NO: 22008 - protein, 9 aa, synthetic construct
  source 1..9: note = Seed: FTRFFYVLG
FMRFFYVLK

SEQ ID NO: 22009 - protein, 10 aa, synthetic construct
  source 1..10: note = Seed: FTRGVYYPDK
FMRGVYYPDR

SEQ ID NO: 22010 - protein, 9 aa, synthetic construct
  source 1..9: note = Seed: FISAARQGF
FMSAARQGF

SEQ ID NO: 22011 - protein, 10 aa, synthetic construct
  source 1..10: note = Seed: FISAARQGFV
FMSAARQGFA

SEQ ID NO: 22012 - protein, 10 aa, synthetic construct
  source 1..10: note = Seed: FISAARQGFV
FMSAARQGFI

SEQ ID NO: 22013 - protein, 10 aa, synthetic construct
  source 1..10: note = Seed: FISAARQGFV
FMSAARQGFL

SEQ ID NO: 22014 - protein, 10 aa, synthetic construct
  source 1..10: note = Seed: FISAARQGFV
FMSAARQGFM

SEQ ID NO: 22015 - protein, 10 aa, synthetic construct
  source 1..10: note = Seed: FISAARQGFV
FMSAARQGFV

SEQ ID NO: 22016 - protein, 9 aa, synthetic construct
  source 1..9: note = Seed: FISAARQGF
FMSAARQGM

SEQ ID NO: 22017 - protein, 9 aa, synthetic construct
  source 1..9: note = Seed: FISAARQGF
FMSAARQGY

SEQ ID NO: 22018 - protein, 9 aa, synthetic construct
  source 1..9: note = Seed: FQSAVKRTI
FMSAVKRTA

SEQ ID NO: 22019 - protein, 9 aa, synthetic construct
  source 1..9: note = Seed: FQSAVKRTI
FMSAVKRTF

SEQ ID NO: 22020 - protein, 9 aa, synthetic construct
  source 1..9: note = Seed: FQSAVKRTI
FMSAVKRTI

SEQ ID NO: 22021 - protein, 9 aa, synthetic construct
  source 1..9: note = Seed: FQSAVKRTI
FMSAVKRTL

SEQ ID NO: 22022 - protein, 9 aa, synthetic construct
  source 1..9: note = Seed: FQSAVKRTI
FMSAVKRTM

SEQ ID NO: 22023 - protein, 9 aa, synthetic construct
  source 1..9: note = Seed: FQSAVKRTI
FMSAVKRTV

SEQ ID NO: 22024 - protein, 9 aa, synthetic construct
  source 1..9: note = Seed: FQSAVKRTI
FMSAVKRTY

SEQ ID NO: 22025 - protein, 10 aa, synthetic construct
  source 1..10: note = Seed: FISDEVARDL
FMSDEVARDA

SEQ ID NO: 22026 - protein, 10 aa, synthetic construct
  source 1..10: note = Seed: FISDEVARDL
FMSDEVARDI

SEQ ID NO: 22027 - protein, 10 aa, synthetic construct
  source 1..10: note = Seed: FISDEVARDL
FMSDEVARDL

SEQ ID NO: 22028 - protein, 10 aa, synthetic construct
  source 1..10: note = Seed: FISDEVARDL
FMSDEVARDM

SEQ ID NO: 22029 - protein, 10 aa, synthetic construct
  source 1..10: note = Seed: FISDEVARDL
FMSDEVARDV

SEQ ID NO: 22030 - protein, 10 aa, synthetic construct
  source 1..10: note = Seed: FTSDLATNNL
FMSDLATNNA

SEQ ID NO: 22031 - protein, 10 aa, synthetic construct
  source 1..10: note = Seed: FTSDLATNNL
FMSDLATNNI

SEQ ID NO: 22032 - protein, 10 aa, synthetic construct
  source 1..10: note = Seed: FTSDLATNNL
FMSDLATNNL

SEQ ID NO: 22033 - protein, 11 aa, synthetic construct
  source 1..11: note = Seed: FTSDLATNNLV
FMSDLATNNLA

SEQ ID NO: 22034 - protein, 11 aa, synthetic construct
  source 1..11: note = Seed: FTSDLATNNLV
FMSDLATNNLC

SEQ ID NO: 22035 - protein, 11 aa, synthetic construct
  source 1..11: note = Seed: FTSDLATNNLV
FMSDLATNNLD

SEQ ID NO: 22036 - protein, 11 aa, synthetic construct
  source 1..11: note = Seed: FTSDLATNNLV
FMSDLATNNLE

SEQ ID NO: 22037 - protein, 11 aa, synthetic construct
  source 1..11: note = Seed: FTSDLATNNLV
FMSDLATNNLF

SEQ ID NO: 22038 - protein, 11 aa, synthetic construct
  source 1..11: note = Seed: FTSDLATNNLV
FMSDLATNNLG

SEQ ID NO: 22039 - protein, 11 aa, synthetic construct
  source 1..11: note = Seed: FTSDLATNNLV
FMSDLATNNLH

SEQ ID NO: 22040 - protein, 11 aa, synthetic construct
  source 1..11: note = Seed: FTSDLATNNLV
FMSDLATNNLI

SEQ ID NO: 22041 - protein, 11 aa, synthetic construct
  source 1..11: note = Seed: FTSDLATNNLV
FMSDLATNNLK

SEQ ID NO: 22042 - protein, 11 aa, synthetic construct
  source 1..11: note = Seed: FTSDLATNNLV
FMSDLATNNLL

SEQ ID NO: 22043 - protein, 11 aa, synthetic construct
  source 1..11: note = Seed: FTSDLATNNLV
FMSDLATNNLM

SEQ ID NO: 22044 - protein, 11 aa, synthetic construct
  source 1..11: note = Seed: FTSDLATNNLV
FMSDLATNNLN

SEQ ID NO: 22045 - protein, 11 aa, synthetic construct
  source 1..11: note = Seed: FTSDLATNNLV
FMSDLATNNLP

SEQ ID NO: 22046 - protein, 11 aa, synthetic construct
  source 1..11: note = Seed: FTSDLATNNLV
FMSDLATNNLQ

SEQ ID NO: 22047 - protein, 11 aa, synthetic construct
  source 1..11: note = Seed: FTSDLATNNLV
FMSDLATNNLR

SEQ ID NO: 22048 - protein, 11 aa, synthetic construct
  source 1..11: note = Seed: FTSDLATNNLV
FMSDLATNNLS

SEQ ID NO: 22049 - protein, 11 aa, synthetic construct
  source 1..11: note = Seed: FTSDLATNNLV
FMSDLATNNLT

SEQ ID NO: 22050 - protein, 11 aa, synthetic construct
  source 1..11: note = Seed: FTSDLATNNLV
FMSDLATNNLV

SEQ ID NO: 22051 - protein, 11 aa, synthetic construct
  source 1..11: note = Seed: FTSDLATNNLV
FMSDLATNNLW

SEQ ID NO: 22052 - protein, 11 aa, synthetic construct
  source 1..11: note = Seed: FTSDLATNNLV
FMSDLATNNLY

SEQ ID NO: 22053 - protein, 10 aa, synthetic construct
  source 1..10: note = Seed: FTSDLATNNL
FMSDLATNNM

SEQ ID NO: 22054 - protein, 10 aa, synthetic construct
  source 1..10: note = Seed: FTSDLATNNL
FMSDLATNNT

SEQ ID NO: 22055 - protein, 10 aa, synthetic construct
  source 1..10: note = Seed: FTSDLATNNL
FMSDLATNNV

SEQ ID NO: 22056 - protein, 9 aa, synthetic construct
  source 1..9: note = Seed: FTSDYYQLY
FMSDYYQLF

SEQ ID NO: 22057 - protein, 9 aa, synthetic construct
  source 1..9: note = Seed: FTSDYYQLY
FMSDYYQLI

SEQ ID NO: 22058 - protein, 9 aa, synthetic construct
  source 1..9: note = Seed: FTSDYYQLY
FMSDYYQLL

SEQ ID NO: 22059 - protein, 9 aa, synthetic construct
  source 1..9: note = Seed: FTSDYYQLY
FMSDYYQLM

SEQ ID NO: 22060 - protein, 9 aa, synthetic construct
  source 1..9: note = Seed: FTSDYYQLY
FMSDYYQLR

SEQ ID NO: 22061 - protein, 9 aa, synthetic construct
  source 1..9: note = Seed: FTSDYYQLY
FMSDYYQLV

SEQ ID NO: 22062 - protein, 9 aa, synthetic construct
  source 1..9: note = Seed: FTSDYYQLY
FMSDYYQLW

SEQ ID NO: 22063 - protein, 9 aa, synthetic construct
  source 1..9: note = Seed: FTSDYYQLY
FMSDYYQLY

SEQ ID NO: 22064 - protein, 10 aa, synthetic construct
  source 1..10: note = Seed: FTSDYYQLYS
FMSDYYQLYF

SEQ ID NO: 22065 - protein, 10 aa, synthetic construct
  source 1..10: note = Seed: FTSDYYQLYS
FMSDYYQLYM

SEQ ID NO: 22066 - protein, 10 aa, synthetic construct
  source 1..10: note = Seed: FTSDYYQLYS
FMSDYYQLYY

SEQ ID NO: 22067 - protein, 9 aa, synthetic construct
  source 1..9: note = Seed: FASFYYVWK
FMSFYYVWK

SEQ ID NO: 22068 - protein, 9 aa, synthetic construct
  source 1..9: note = Seed: FASFYYVWK
FMSFYYVWR

SEQ ID NO: 22069 - protein, 9 aa, synthetic construct
  source 1..9: note = Seed: FVSLAIDAY
FMSLAIDAF

SEQ ID NO: 22070 - protein, 9 aa, synthetic construct
  source 1..9: note = Seed: FVSLAIDAY
FMSLAIDAL

SEQ ID NO: 22071 - protein, 9 aa, synthetic construct
  source 1..9: note = Seed: FVSLAIDAY
FMSLAIDAM

SEQ ID NO: 22072 - protein, 9 aa, synthetic construct
  source 1..9: note = Seed: FVSLAIDAY
FMSLAIDAY

SEQ ID NO: 22073 - protein, 9 aa, synthetic construct
  source 1..9: note = Seed: FVSNGTHWF
FMSNGTHWA

SEQ ID NO: 22074 - protein, 9 aa, synthetic construct
  source 1..9: note = Seed: FVSNGTHWF
FMSNGTHWF

SEQ ID NO: 22075 - protein, 9 aa, synthetic construct
  source 1..9: note = Seed: FVSNGTHWF
FMSNGTHWI

SEQ ID NO: 22076 - protein, 9 aa, synthetic construct
  source 1..9: note = Seed: FVSNGTHWF
FMSNGTHWL

SEQ ID NO: 22077 - protein, 9 aa, synthetic construct
  source 1..9: note = Seed: FVSNGTHWF
FMSNGTHWM

SEQ ID NO: 22078 - protein, 9 aa, synthetic construct
  source 1..9: note = Seed: FVSNGTHWF
FMSNGTHWV

SEQ ID NO: 22079 - protein, 9 aa, synthetic construct
  source 1..9: note = Seed: FVSNGTHWF
FMSNGTHWY

SEQ ID NO: 22080 - protein, 9 aa, synthetic construct
  source 1..9: note = Seed: FISNSWLMW
FMSNSWLMW

SEQ ID NO: 22081 - protein, 10 aa, synthetic construct
  source 1..10: note = Seed: FISNSWLMWL
FMSNSWLMWA

SEQ ID NO: 22082 - protein, 10 aa, synthetic construct
  source 1..10: note = Seed: FISNSWLMWL
FMSNSWLMWI

SEQ ID NO: 22083 - protein, 10 aa, synthetic construct
  source 1..10: note = Seed: FISNSWLMWL
FMSNSWLMWL

SEQ ID NO: 22084 - protein, 11 aa, synthetic construct
  source 1..11: note = Seed: FISNSWLMWLI
FMSNSWLMWLA

SEQ ID NO: 22085 - protein, 11 aa, synthetic construct
  source 1..11: note = Seed: FISNSWLMWLI
FMSNSWLMWLI

SEQ ID NO: 22086 - protein, 11 aa, synthetic construct
  source 1..11: note = Seed: FISNSWLMWLI
FMSNSWLMWLL

SEQ ID NO: 22087 - protein, 11 aa, synthetic construct
  source 1..11: note = Seed: FISNSWLMWLI
FMSNSWLMWLM

SEQ ID NO: 22088 - protein, 11 aa, synthetic construct
  source 1..11: note = Seed: FISNSWLMWLI
FMSNSWLMWLT

SEQ ID NO: 22089 - protein, 11 aa, synthetic construct
  source 1..11: note = Seed: FISNSWLMWLI
FMSNSWLMWLV

SEQ ID NO: 22090 - protein, 10 aa, synthetic construct
  source 1..10: note = Seed: FISNSWLMWL
FMSNSWLMWM

SEQ ID NO: 22091 - protein, 10 aa, synthetic construct
  source 1..10: note = Seed: FISNSWLMWL
FMSNSWLMWT

SEQ ID NO: 22092 - protein, 10 aa, synthetic construct
  source 1..10: note = Seed: FISNSWLMWL
FMSNSWLMWV

SEQ ID NO: 22093 - protein, 9 aa, synthetic construct
  source 1..9: note = Seed: FSSNVANYQ
FMSNVANYK

SEQ ID NO: 22094 - protein, 10 aa, synthetic construct
  source 1..10: note = Seed: FSSNVANYQK
FMSNVANYQK

SEQ ID NO: 22095 - protein, 10 aa, synthetic construct
  source 1..10: note = Seed: FSSNVANYQK
FMSNVANYQR

SEQ ID NO: 22096 - protein, 9 aa, synthetic construct
  source 1..9: note = Seed: FSSNVANYQ
FMSNVANYR

SEQ ID NO: 22097 - protein, 9 aa, synthetic construct
  source 1..9: note = Seed: FFSNVTWFH
FMSNVTWFF

SEQ ID NO: 22098 - protein, 9 aa, synthetic construct
  source 1..9: note = Seed: FFSNVTWFH
FMSNVTWFH

SEQ ID NO: 22099 - protein, 9 aa, synthetic construct
  source 1..9: note = Seed: FFSNVTWFH
FMSNVTWFK

SEQ ID NO: 22100 - protein, 9 aa, synthetic construct
  source 1..9: note = Seed: FFSNVTWFH
FMSNVTWFM

SEQ ID NO: 22101 - protein, 9 aa, synthetic construct
  source 1..9: note = Seed: FFSNVTWFH
FMSNVTWFR

SEQ ID NO: 22102 - protein, 9 aa, synthetic construct
  source 1..9: note = Seed: FFSNVTWFH
FMSNVTWFY

SEQ ID NO: 22103 - protein, 10 aa, synthetic construct
  source 1..10: note = Seed: FISPYNSQNA
FMSPYNSQNA

SEQ ID NO: 22104 - protein, 11 aa, synthetic construct
  source 1..11: note = Seed: FISPYNSQNAV
FMSPYNSQNAA

SEQ ID NO: 22105 - protein, 11 aa, synthetic construct
  source 1..11: note = Seed: FISPYNSQNAV
FMSPYNSQNAI

SEQ ID NO: 22106 - protein, 11 aa, synthetic construct
  source 1..11: note = Seed: FISPYNSQNAV
FMSPYNSQNAL

SEQ ID NO: 22107 - protein, 11 aa, synthetic construct
  source 1..11: note = Seed: FISPYNSQNAV
FMSPYNSQNAM

SEQ ID NO: 22108 - protein, 11 aa, synthetic construct
  source 1..11: note = Seed: FISPYNSQNAV
FMSPYNSQNAV

SEQ ID NO: 22109 - protein, 10 aa, synthetic construct
  source 1..10: note = Seed: FISPYNSQNA
FMSPYNSQNI

SEQ ID NO: 22110 - protein, 10 aa, synthetic construct
  source 1..10: note = Seed: FISPYNSQNA
FMSPYNSQNL

SEQ ID NO: 22111 - protein, 10 aa, synthetic construct
  source 1..10: note = Seed: FISPYNSQNA
FMSPYNSQNM

SEQ ID NO: 22112 - protein, 10 aa, synthetic construct
  source 1..10: note = Seed: FISPYNSQNA
FMSPYNSQNV

SEQ ID NO: 22113 - protein, 9 aa, synthetic construct
  source 1..9: note = Seed: FFSYFAVHF
FMSYFAVHF

SEQ ID NO: 22114 - protein, 10 aa, synthetic construct
  source 1..10: note = Seed: FFSYFAVHFI
FMSYFAVHFA

SEQ ID NO: 22115 - protein, 10 aa, synthetic construct
  source 1..10: note = Seed: FFSYFAVHFI
FMSYFAVHFC

SEQ ID NO: 22116 - protein, 10 aa, synthetic construct
  source 1..10: note = Seed: FFSYFAVHFI
FMSYFAVHFF

SEQ ID NO: 22117 - protein, 10 aa, synthetic construct
  source 1..10: note = Seed: FFSYFAVHFI
FMSYFAVHFI

SEQ ID NO: 22118 - protein, 10 aa, synthetic construct
  source 1..10: note = Seed: FFSYFAVHFI
FMSYFAVHFL

SEQ ID NO: 22119 - protein, 10 aa, synthetic construct
  source 1..10: note = Seed: FFSYFAVHFI
FMSYFAVHFM

SEQ ID NO: 22120 - protein, 10 aa, synthetic construct
  source 1..10: note = Seed: FFSYFAVHFI
FMSYFAVHFS

SEQ ID NO: 22121 - protein, 10 aa, synthetic construct
  source 1..10: note = Seed: FFSYFAVHFI
FMSYFAVHFT

SEQ ID NO: 22122 - protein, 10 aa, synthetic construct
  source 1..10: note = Seed: FFSYFAVHFI
FMSYFAVHFV

SEQ ID NO: 22123 - protein, 10 aa, synthetic construct
  source 1..10: note = Seed: FFSYFAVHFI
FMSYFAVHFW

SEQ ID NO: 22124 - protein, 10 aa, synthetic construct
  source 1..10: note = Seed: FFSYFAVHFI
FMSYFAVHFY

SEQ ID NO: 22125 - protein, 9 aa, synthetic construct
  source 1..9: note = Seed: FFSYFAVHF
FMSYFAVHL

SEQ ID NO: 22126 - protein, 9 aa, synthetic construct
  source 1..9: note = Seed: FFSYFAVHF
FMSYFAVHM

SEQ ID NO: 22127 - protein, 9 aa, synthetic construct
  source 1..9: note = Seed: FFSYFAVHF
FMSYFAVHY

SEQ ID NO: 22128 - protein, 9 aa, synthetic construct
  source 1..9: note = Seed: FSTFEEAAL
FMTFEEAAF

SEQ ID NO: 22129 - protein, 9 aa, synthetic construct
  source 1..9: note = Seed: FSTFEEAAL
FMTFEEAAL

SEQ ID NO: 22130 - protein, 9 aa, synthetic construct
  source 1..9: note = Seed: FSTFEEAAL
FMTFEEAAM

SEQ ID NO: 22131 - protein, 9 aa, synthetic construct
  source 1..9: note = Seed: FSTFEEAAL
FMTFEEAAV

SEQ ID NO: 22132 - protein, 9 aa, synthetic construct
  source 1..9: note = Seed: FSTFEEAAL
FMTFEEAAY

SEQ ID NO: 22133 - protein, 9 aa, synthetic construct
  source 1..9: note = Seed: FSTFKCYGV
FMTFKCYGA

SEQ ID NO: 22134 - protein, 9 aa, synthetic construct
  source 1..9: note = Seed: FSTFKCYGV
FMTFKCYGI

SEQ ID NO: 22135 - protein, 9 aa, synthetic construct
  source 1..9: note = Seed: FSTFKCYGV
FMTFKCYGL

SEQ ID NO: 22136 - protein, 9 aa, synthetic construct
  source 1..9: note = Seed: FSTFKCYGV
FMTFKCYGM

SEQ ID NO: 22137 - protein, 9 aa, synthetic construct
  source 1..9: note = Seed: FSTFKCYGV
FMTFKCYGT

SEQ ID NO: 22138 - protein, 9 aa, synthetic construct
  source 1..9: note = Seed: FSTFKCYGV
FMTFKCYGV

SEQ ID NO: 22139 - protein, 9 aa, synthetic construct
  source 1..9: note = Seed: FVTHSKGLY
FMTHSKGLF

SEQ ID NO: 22140 - protein, 9 aa, synthetic construct
  source 1..9: note = Seed: FVTHSKGLY
FMTHSKGLY

SEQ ID NO: 22141 - protein, 10 aa, synthetic construct
  source 1..10: note = Seed: FVTHSKGLYR
FMTHSKGLYK

SEQ ID NO: 22142 - protein, 10 aa, synthetic construct
  source 1..10: note = Seed: FVTHSKGLYR
FMTHSKGLYR

SEQ ID NO: 22143 - protein, 9 aa, synthetic construct
  source 1..9: note = Seed: FQTRAGCLI
FMTRAGCLA

SEQ ID NO: 22144 - protein, 9 aa, synthetic construct
  source 1..9: note = Seed: FQTRAGCLI
FMTRAGCLF

SEQ ID NO: 22145 - protein, 9 aa, synthetic construct
  source 1..9: note = Seed: FQTRAGCLI
FMTRAGCLI

SEQ ID NO: 22146 - protein, 11 aa, synthetic construct
  source 1..11: note = Seed: FQTRAGCLIGA
FMTRAGCLIGA

SEQ ID NO: 22147 - protein, 11 aa, synthetic construct
  source 1..11: note = Seed: FQTRAGCLIGA
FMTRAGCLIGI

SEQ ID NO: 22148 - protein, 11 aa, synthetic construct
  source 1..11: note = Seed: FQTRAGCLIGA
FMTRAGCLIGL

SEQ ID NO: 22149 - protein, 11 aa, synthetic construct
  source 1..11: note = Seed: FQTRAGCLIGA
FMTRAGCLIGV

SEQ ID NO: 22150 - protein, 9 aa, synthetic construct
  source 1..9: note = Seed: FQTRAGCLI
FMTRAGCLL

SEQ ID NO: 22151 - protein, 9 aa, synthetic construct
  source 1..9: note = Seed: FQTRAGCLI
FMTRAGCLM

SEQ ID NO: 22152 - protein, 9 aa, synthetic construct
  source 1..9: note = Seed: FQTRAGCLI
FMTRAGCLV

SEQ ID NO: 22153 - protein, 9 aa, synthetic construct
  source 1..9: note = Seed: FQTRAGCLI
FMTRAGCLY

SEQ ID NO: 22154 - protein, 9 aa, synthetic construct
  source 1..9: note = Seed: FTTVDNINL
FMTVDNINA

SEQ ID NO: 22155 - protein, 9 aa, synthetic construct
  source 1..9: note = Seed: FTTVDNINL
FMTVDNINI

SEQ ID NO: 22156 - protein, 9 aa, synthetic construct
  source 1..9: note = Seed: FTTVDNINL
FMTVDNINL

SEQ ID NO: 22157 - protein, 9 aa, synthetic construct
  source 1..9: note = Seed: FTTVDNINL
FMTVDNINM

SEQ ID NO: 22158 - protein, 9 aa, synthetic construct
  source 1..9: note = Seed: FTTVDNINL
FMTVDNINV

SEQ ID NO: 22159 - protein, 9 aa, synthetic construct
  source 1..9: note = Seed: FQTVKPGNF
FMTVKPGNF

SEQ ID NO: 22160 - protein, 9 aa, synthetic construct
  source 1..9: note = Seed: FQTVKPGNF
FMTVKPGNY

SEQ ID NO: 22161 - protein, 8 aa, synthetic construct
  source 1..8: note = Seed: FLTWICLL
FMTWICLL

SEQ ID NO: 22162 - protein, 11 aa, synthetic construct
  source 1..11: note = Seed: FLTWICLLQFA
FMTWICLLQFI

SEQ ID NO: 22163 - protein, 11 aa, synthetic construct
  source 1..11: note = Seed: FLTWICLLQFA
FMTWICLLQFL

SEQ ID NO: 22164 - protein, 11 aa, synthetic construct
  source 1..11: note = Seed: FLTWICLLQFA
FMTWICLLQFV

SEQ ID NO: 22165 - protein, 8 aa, synthetic construct
  source 1..8: note = Seed: FLTWICLL
FMTWICLV

SEQ ID NO: 22166 - protein, 10 aa, synthetic construct
  source 1..10: note = Seed: FDTYNLWNTF
FMTYNLWNTF

SEQ ID NO: 22167 - protein, 10 aa, synthetic construct
  source 1..10: note = Seed: FDTYNLWNTF
FMTYNLWNTM

SEQ ID NO: 22168 - protein, 10 aa, synthetic construct
  source 1..10: note = Seed: FDTYNLWNTF
FMTYNLWNTW

SEQ ID NO: 22169 - protein, 10 aa, synthetic construct
  source 1..10: note = Seed: FDTYNLWNTF
FMTYNLWNTY

SEQ ID NO: 22170 - protein, 9 aa, synthetic construct
  source 1..9: note = Seed: FAVDAAKAY
FMVDAAKAF

SEQ ID NO: 22171 - protein, 9 aa, synthetic construct
  source 1..9: note = Seed: FAVDAAKAY
FMVDAAKAI

SEQ ID NO: 22172 - protein, 9 aa, synthetic construct
  source 1..9: note = Seed: FAVDAAKAY
FMVDAAKAL

SEQ ID NO: 22173 - protein, 9 aa, synthetic construct
  source 1..9: note = Seed: FAVDAAKAY
FMVDAAKAM

SEQ ID NO: 22174 - protein, 9 aa, synthetic construct
  source 1..9: note = Seed: FAVDAAKAY
FMVDAAKAV

SEQ ID NO: 22175 - protein, 9 aa, synthetic construct
  source 1..9: note = Seed: FAVDAAKAY
FMVDAAKAY

SEQ ID NO: 22176 - protein, 10 aa, synthetic construct
  source 1..10: note = Seed: FAVDAAKAYK
FMVDAAKAYF

SEQ ID NO: 22177 - protein, 10 aa, synthetic construct
  source 1..10: note = Seed: FAVDAAKAYK
FMVDAAKAYK

SEQ ID NO: 22178 - protein, 10 aa, synthetic construct
  source 1..10: note = Seed: FAVDAAKAYK
FMVDAAKAYR

SEQ ID NO: 22179 - protein, 10 aa, synthetic construct
  source 1..10: note = Seed: FAVDAAKAYK
FMVDAAKAYY

SEQ ID NO: 22180 - protein, 9 aa, synthetic construct
  source 1..9: note = Seed: FAVHFISNS
FMVHFISNA

SEQ ID NO: 22181 - protein, 9 aa, synthetic construct
  source 1..9: note = Seed: FAVHFISNS
FMVHFISNI

SEQ ID NO: 22182 - protein, 9 aa, synthetic construct
  source 1..9: note = Seed: FAVHFISNS
FMVHFISNL

SEQ ID NO: 22183 - protein, 9 aa, synthetic construct
  source 1..9: note = Seed: FAVHFISNS
FMVHFISNM

SEQ ID NO: 22184 - protein, 9 aa, synthetic construct
  source 1..9: note = Seed: FAVHFISNS
FMVHFISNT

SEQ ID NO: 22185 - protein, 9 aa, synthetic construct
  source 1..9: note = Seed: FAVHFISNS
FMVHFISNV

SEQ ID NO: 22186 - protein, 8 aa, synthetic construct
  source 1..8: note = Seed: FVVKRHTF
FMVKRHTF

SEQ ID NO: 22187 - protein, 11 aa, synthetic construct
  source 1..11: note = Seed: FVVKRHTFSNY
FMVKRHTFSNF

SEQ ID NO: 22188 - protein, 11 aa, synthetic construct
  source 1..11: note = Seed: FVVKRHTFSNY
FMVKRHTFSNY

SEQ ID NO: 22189 - protein, 8 aa, synthetic construct
  source 1..8: note = Seed: FVVKRHTF
FMVKRHTI

SEQ ID NO: 22190 - protein, 8 aa, synthetic construct
  source 1..8: note = Seed: FVVKRHTF
FMVKRHTL

SEQ ID NO: 22191 - protein, 8 aa, synthetic construct
  source 1..8: note = Seed: FVVKRHTF
FMVKRHTM

SEQ ID NO: 22192 - protein, 8 aa, synthetic construct
  source 1..8: note = Seed: FVVKRHTF
FMVKRHTV

SEQ ID NO: 22193 - protein, 9 aa, synthetic construct
  source 1..9: note = Seed: FNVLFSTVF
FMVLFSTVF

SEQ ID NO: 22194 - protein, 9 aa, synthetic construct
  source 1..9: note = Seed: FNVLFSTVF
FMVLFSTVI

SEQ ID NO: 22195 - protein, 9 aa, synthetic construct
  source 1..9: note = Seed: FNVLFSTVF
FMVLFSTVL

SEQ ID NO: 22196 - protein, 9 aa, synthetic construct
  source 1..9: note = Seed: FNVLFSTVF
FMVLFSTVM

SEQ ID NO: 22197 - protein, 9 aa, synthetic construct
  source 1..9: note = Seed: FNVLFSTVF
FMVLFSTVW

SEQ ID NO: 22198 - protein, 9 aa, synthetic construct
  source 1..9: note = Seed: FNVLFSTVF
FMVLFSTVY

SEQ ID NO: 22199 - protein, 9 aa, synthetic construct
  source 1..9: note = Seed: FPVLHDIGN
FMVLHDIGY

SEQ ID NO: 22200 - protein, 9 aa, synthetic construct
  source 1..9: note = Seed: FLVLIMLII
FMVLIMLIV

SEQ ID NO: 22201 - protein, 10 aa, synthetic construct
  source 1..10: note = Seed: FKVSIWNLDY
FMVSIWNLDF

SEQ ID NO: 22202 - protein, 10 aa, synthetic construct
  source 1..10: note = Seed: FKVSIWNLDY
FMVSIWNLDY

SEQ ID NO: 22203 - protein, 9 aa, synthetic construct
  source 1..9: note = Seed: FVVSTGYHF
FMVSTGYHA

SEQ ID NO: 22204 - protein, 9 aa, synthetic construct
  source 1..9: note = Seed: FVVSTGYHF
FMVSTGYHF

SEQ ID NO: 22205 - protein, 10 aa, synthetic construct
  source 1..10: note = Seed: FVVSTGYHFR
FMVSTGYHFK

SEQ ID NO: 22206 - protein, 10 aa, synthetic construct
  source 1..10: note = Seed: FVVSTGYHFR
FMVSTGYHFR

SEQ ID NO: 22207 - protein, 9 aa, synthetic construct
  source 1..9: note = Seed: FVVSTGYHF
FMVSTGYHI

SEQ ID NO: 22208 - protein, 9 aa, synthetic construct
  source 1..9: note = Seed: FVVSTGYHF
FMVSTGYHL

SEQ ID NO: 22209 - protein, 9 aa, synthetic construct
  source 1..9: note = Seed: FVVSTGYHF
FMVSTGYHM

SEQ ID NO: 22210 - protein, 9 aa, synthetic construct
  source 1..9: note = Seed: FVVSTGYHF
FMVSTGYHV

SEQ ID NO: 22211 - protein, 9 aa, synthetic construct
  source 1..9: note = Seed: FVVSTGYHF
FMVSTGYHW

SEQ ID NO: 22212 - protein, 9 aa, synthetic construct
  source 1..9: note = Seed: FVVSTGYHF
FMVSTGYHY

SEQ ID NO: 22213 - protein, 10 aa, synthetic construct
  source 1..10: note = Seed: FDVVRQCSGV
FMVVRQCSGA

SEQ ID NO: 22214 - protein, 10 aa, synthetic construct
  source 1..10: note = Seed: FDVVRQCSGV
FMVVRQCSGI

SEQ ID NO: 22215 - protein, 10 aa, synthetic construct
  source 1..10: note = Seed: FDVVRQCSGV
FMVVRQCSGL

SEQ ID NO: 22216 - protein, 10 aa, synthetic construct
  source 1..10: note = Seed: FDVVRQCSGV
FMVVRQCSGV

SEQ ID NO: 22217 - protein, 9 aa, synthetic construct
  source 1..9: note = Seed: FYWFFSNYL
FMWFFSNYA

SEQ ID NO: 22218 - protein, 9 aa, synthetic construct
  source 1..9: note = Seed: FYWFFSNYL
FMWFFSNYC

SEQ ID NO: 22219 - protein, 9 aa, synthetic construct
  source 1..9: note = Seed: FYWFFSNYL
FMWFFSNYF

SEQ ID NO: 22220 - protein, 9 aa, synthetic construct
  source 1..9: note = Seed: FYWFFSNYL
FMWFFSNYG

SEQ ID NO: 22221 - protein, 9 aa, synthetic construct
  source 1..9: note = Seed: FYWFFSNYL
FMWFFSNYI

SEQ ID NO: 22222 - protein, 9 aa, synthetic construct
  source 1..9: note = Seed: FYWFFSNYL
FMWFFSNYL

SEQ ID NO: 22223 - protein, 10 aa, synthetic construct
  source 1..10: note = Seed: FYWFFSNYLK
FMWFFSNYLF

SEQ ID NO: 22224 - protein, 10 aa, synthetic construct
  source 1..10: note = Seed: FYWFFSNYLK
FMWFFSNYLK

SEQ ID NO: 22225 - protein, 11 aa, synthetic construct
  source 1..11: note = Seed: FYWFFSNYLKR
FMWFFSNYLKR

SEQ ID NO: 22226 - protein, 10 aa, synthetic construct
  source 1..10: note = Seed: FYWFFSNYLK
FMWFFSNYLM

SEQ ID NO: 22227 - protein, 10 aa, synthetic construct
  source 1..10: note = Seed: FYWFFSNYLK
FMWFFSNYLR

SEQ ID NO: 22228 - protein, 10 aa, synthetic construct
  source 1..10: note = Seed: FYWFFSNYLK
FMWFFSNYLY

SEQ ID NO: 22229 - protein, 9 aa, synthetic construct
  source 1..9: note = Seed: FYWFFSNYL
FMWFFSNYM

SEQ ID NO: 22230 - protein, 9 aa, synthetic construct
  source 1..9: note = Seed: FYWFFSNYL
FMWFFSNYP

SEQ ID NO: 22231 - protein, 9 aa, synthetic construct
  source 1..9: note = Seed: FYWFFSNYL
FMWFFSNYS

SEQ ID NO: 22232 - protein, 9 aa, synthetic construct
  source 1..9: note = Seed: FYWFFSNYL
FMWFFSNYT

SEQ ID NO: 22233 - protein, 9 aa, synthetic construct
  source 1..9: note = Seed: FYWFFSNYL
FMWFFSNYV

SEQ ID NO: 22234 - protein, 9 aa, synthetic construct
  source 1..9: note = Seed: FYWFFSNYL
FMWFFSNYY

SEQ ID NO: 22235 - protein, 8 aa, synthetic construct
  source 1..8: note = Seed: FLWLLWPV
FMWLLWPA

SEQ ID NO: 22236 - protein, 8 aa, synthetic construct
  source 1..8: note = Seed: FLWLLWPV
FMWLLWPI

SEQ ID NO: 22237 - protein, 8 aa, synthetic construct
  source 1..8: note = Seed: FLWLLWPV
FMWLLWPL

SEQ ID NO: 22238 - protein, 8 aa, synthetic construct
  source 1..8: note = Seed: FLWLLWPV
FMWLLWPM

SEQ ID NO: 22239 - protein, 8 aa, synthetic construct
  source 1..8: note = Seed: FLWLLWPV
FMWLLWPT

SEQ ID NO: 22240 - protein, 8 aa, synthetic construct
  source 1..8: note = Seed: FLWLLWPV
FMWLLWPV

SEQ ID NO: 22241 - protein, 9 aa, synthetic construct
  source 1..9: note = Seed: FLWLLWPVT
FMWLLWPVA

SEQ ID NO: 22242 - protein, 9 aa, synthetic construct
  source 1..9: note = Seed: FLWLLWPVT
FMWLLWPVI

SEQ ID NO: 22243 - protein, 9 aa, synthetic construct
  source 1..9: note = Seed: FLWLLWPVT
FMWLLWPVL

SEQ ID NO: 22244 - protein, 9 aa, synthetic construct
  source 1..9: note = Seed: FLWLLWPVT
FMWLLWPVM

SEQ ID NO: 22245 - protein, 9 aa, synthetic construct
  source 1..9: note = Seed: FLWLLWPVT
FMWLLWPVT

SEQ ID NO: 22246 - protein, 10 aa, synthetic construct
  source 1..10: note = Seed: FLWLLWPVTL
FMWLLWPVTA

SEQ ID NO: 22247 - protein, 10 aa, synthetic construct
  source 1..10: note = Seed: FLWLLWPVTL
FMWLLWPVTF

SEQ ID NO: 22248 - protein, 10 aa, synthetic construct
  source 1..10: note = Seed: FLWLLWPVTL
FMWLLWPVTI

SEQ ID NO: 22249 - protein, 10 aa, synthetic construct
  source 1..10: note = Seed: FLWLLWPVTL
FMWLLWPVTL

SEQ ID NO: 22250 - protein, 11 aa, synthetic construct
  source 1..11: note = Seed: FLWLLWPVTLA
FMWLLWPVTLA

SEQ ID NO: 22251 - protein, 11 aa, synthetic construct
  source 1..11: note = Seed: FLWLLWPVTLA
FMWLLWPVTLI

SEQ ID NO: 22252 - protein, 11 aa, synthetic construct
  source 1..11: note = Seed: FLWLLWPVTLA
FMWLLWPVTLL

SEQ ID NO: 22253 - protein, 11 aa, synthetic construct
  source 1..11: note = Seed: FLWLLWPVTLA
FMWLLWPVTLM

SEQ ID NO: 22254 - protein, 11 aa, synthetic construct
  source 1..11: note = Seed: FLWLLWPVTLA
FMWLLWPVTLV

SEQ ID NO: 22255 - protein, 10 aa, synthetic construct
  source 1..10: note = Seed: FLWLLWPVTL
FMWLLWPVTM

SEQ ID NO: 22256 - protein, 10 aa, synthetic construct
  source 1..10: note = Seed: FLWLLWPVTL
FMWLLWPVTS

SEQ ID NO: 22257 - protein, 10 aa, synthetic construct
  source 1..10: note = Seed: FLWLLWPVTL
FMWLLWPVTT

SEQ ID NO: 22258 - protein, 10 aa, synthetic construct
  source 1..10: note = Seed: FLWLLWPVTL
FMWLLWPVTV

SEQ ID NO: 22259 - protein, 9 aa, synthetic construct
  source 1..9: note = Seed: FLWLLWPVT
FMWLLWPVV

SEQ ID NO: 22260 - protein, 8 aa, synthetic construct
  source 1..8: note = Seed: FSYFAVHF
FMYFAVHF

SEQ ID NO: 22261 - protein, 9 aa, synthetic construct
  source 1..9: note = Seed: FSYFAVHFI
FMYFAVHFA

SEQ ID NO: 22262 - protein, 9 aa, synthetic construct
  source 1..9: note = Seed: FSYFAVHFI
FMYFAVHFC

SEQ ID NO: 22263 - protein, 9 aa, synthetic construct
  source 1..9: note = Seed: FSYFAVHFI
FMYFAVHFE

SEQ ID NO: 22264 - protein, 9 aa, synthetic construct
  source 1..9: note = Seed: FSYFAVHFI
FMYFAVHFF

SEQ ID NO: 22265 - protein, 9 aa, synthetic construct
  source 1..9: note = Seed: FSYFAVHFI
FMYFAVHFG

SEQ ID NO: 22266 - protein, 9 aa, synthetic construct
  source 1..9: note = Seed: FSYFAVHFI
FMYFAVHFI

SEQ ID NO: 22267 - protein, 9 aa, synthetic construct
  source 1..9: note = Seed: FSYFAVHFI
FMYFAVHFL

SEQ ID NO: 22268 - protein, 9 aa, synthetic construct
  source 1..9: note = Seed: FSYFAVHFI
FMYFAVHFM

SEQ ID NO: 22269 - protein, 9 aa, synthetic construct
  source 1..9: note = Seed: FSYFAVHFI
FMYFAVHFP

SEQ ID NO: 22270 - protein, 9 aa, synthetic construct
  source 1..9: note = Seed: FSYFAVHFI
FMYFAVHFS

SEQ ID NO: 22271 - protein, 9 aa, synthetic construct
  source 1..9: note = Seed: FSYFAVHFI
FMYFAVHFT

SEQ ID NO: 22272 - protein, 9 aa, synthetic construct
  source 1..9: note = Seed: FSYFAVHFI
FMYFAVHFV

SEQ ID NO: 22273 - protein, 9 aa, synthetic construct
  source 1..9: note = Seed: FSYFAVHFI
FMYFAVHFW

SEQ ID NO: 22274 - protein, 9 aa, synthetic construct
  source 1..9: note = Seed: FSYFAVHFI
FMYFAVHFY

SEQ ID NO: 22275 - protein, 8 aa, synthetic construct
  source 1..8: note = Seed: FSYFAVHF
FMYFAVHY

SEQ ID NO: 22276 - protein, 9 aa, synthetic construct
  source 1..9: note = Seed: FYYLGTGPE
FMYLGTGPF

SEQ ID NO: 22277 - protein, 9 aa, synthetic construct
  source 1..9: note = Seed: FYYLGTGPE
FMYLGTGPL

SEQ ID NO: 22278 - protein, 9 aa, synthetic construct
  source 1..9: note = Seed: FYYLGTGPE
FMYLGTGPM

SEQ ID NO: 22279 - protein, 9 aa, synthetic construct
  source 1..9: note = Seed: FYYLGTGPE
FMYLGTGPY

SEQ ID NO: 22280 - protein, 9 aa, synthetic construct
  source 1..9: note = Seed: FNYLKSPNF
FMYLKSPNF

SEQ ID NO: 22281 - protein, 9 aa, synthetic construct
  source 1..9: note = Seed: FNYLKSPNF
FMYLKSPNL

SEQ ID NO: 22282 - protein, 9 aa, synthetic construct
  source 1..9: note = Seed: FNYLKSPNF
FMYLKSPNM

SEQ ID NO: 22283 - protein, 9 aa, synthetic construct
  source 1..9: note = Seed: FNYLKSPNF
FMYLKSPNY

SEQ ID NO: 22284 - protein, 9 aa, synthetic construct
  source 1..9: note = Seed: FCYMHHMEL
FMYMHHMEA

SEQ ID NO: 22285 - protein, 9 aa, synthetic construct
  source 1..9: note = Seed: FCYMHHMEL
FMYMHHMEC

SEQ ID NO: 22286 - protein, 9 aa, synthetic construct
  source 1..9: note = Seed: FCYMHHMEL
FMYMHHMEF

SEQ ID NO: 22287 - protein, 9 aa, synthetic construct
  source 1..9: note = Seed: FCYMHHMEL
FMYMHHMEG

SEQ ID NO: 22288 - protein, 9 aa, synthetic construct
  source 1..9: note = Seed: FCYMHHMEL
FMYMHHMEH

SEQ ID NO: 22289 - protein, 9 aa, synthetic construct
  source 1..9: note = Seed: FCYMHHMEL
FMYMHHMEI

SEQ ID NO: 22290 - protein, 9 aa, synthetic construct
  source 1..9: note = Seed: FCYMHHMEL
FMYMHHMEL

SEQ ID NO: 22291 - protein, 9 aa, synthetic construct
  source 1..9: note = Seed: FCYMHHMEL
FMYMHHMEM

SEQ ID NO: 22292 - protein, 9 aa, synthetic construct
  source 1..9: note = Seed: FCYMHHMEL
FMYMHHMES

SEQ ID NO: 22293 - protein, 9 aa, synthetic construct
  source 1..9: note = Seed: FCYMHHMEL
FMYMHHMET

SEQ ID NO: 22294 - protein, 9 aa, synthetic construct
  source 1..9: note = Seed: FCYMHHMEL
FMYMHHMEV

SEQ ID NO: 22295 - protein, 9 aa, synthetic construct
  source 1..9: note = Seed: FCYMHHMEL
FMYMHHMEW

SEQ ID NO: 22296 - protein, 9 aa, synthetic construct
  source 1..9: note = Seed: FCYMHHMEL
FMYMHHMEY

SEQ ID NO: 22297 - protein, 9 aa, synthetic construct
  source 1..9: note = Seed: FRYMNSQGL
FMYMNSQGF

SEQ ID NO: 22298 - protein, 9 aa, synthetic construct
  source 1..9: note = Seed: FRYMNSQGL
FMYMNSQGH

SEQ ID NO: 22299 - protein, 9 aa, synthetic construct
  source 1..9: note = Seed: FRYMNSQGL
FMYMNSQGI

SEQ ID NO: 22300 - protein, 9 aa, synthetic construct
  source 1..9: note = Seed: FRYMNSQGL
FMYMNSQGL

SEQ ID NO: 22301 - protein, 9 aa, synthetic construct
  source 1..9: note = Seed: FRYMNSQGL
FMYMNSQGM

SEQ ID NO: 22302 - protein, 9 aa, synthetic construct
  source 1..9: note = Seed: FRYMNSQGL
FMYMNSQGV

SEQ ID NO: 22303 - protein, 9 aa, synthetic construct
  source 1..9: note = Seed: FRYMNSQGL
FMYMNSQGW

SEQ ID NO: 22304 - protein, 9 aa, synthetic construct
  source 1..9: note = Seed: FRYMNSQGL
FMYMNSQGY

SEQ ID NO: 22305 - protein, 8 aa, synthetic construct
  source 1..8: note = Seed: FEYVSQPF
FMYVSQPF

SEQ ID NO: 22306 - protein, 8 aa, synthetic construct
  source 1..8: note = Seed: FEYVSQPF
FMYVSQPL

SEQ ID NO: 22307 - protein, 8 aa, synthetic construct
  source 1..8: note = Seed: FEYVSQPF
FMYVSQPM

SEQ ID NO: 22308 - protein, 8 aa, synthetic construct
  source 1..8: note = Seed: FEYVSQPF
FMYVSQPY

SEQ ID NO: 22309 - protein, 9 aa, synthetic construct
  source 1..9: note = Seed: FYYVWKSYV
FMYVWKSYA

SEQ ID NO: 22310 - protein, 9 aa, synthetic construct
  source 1..9: note = Seed: FYYVWKSYV
FMYVWKSYC

SEQ ID NO: 22311 - protein, 9 aa, synthetic construct
  source 1..9: note = Seed: FYYVWKSYV
FMYVWKSYF

SEQ ID NO: 22312 - protein, 9 aa, synthetic construct
  source 1..9: note = Seed: FYYVWKSYV
FMYVWKSYI

SEQ ID NO: 22313 - protein, 9 aa, synthetic construct
  source 1..9: note = Seed: FYYVWKSYV
FMYVWKSYL

SEQ ID NO: 22314 - protein, 9 aa, synthetic construct
  source 1..9: note = Seed: FYYVWKSYV
FMYVWKSYM

SEQ ID NO: 22315 - protein, 9 aa, synthetic construct
  source 1..9: note = Seed: FYYVWKSYV
FMYVWKSYS

SEQ ID NO: 22316 - protein, 9 aa, synthetic construct
  source 1..9: note = Seed: FYYVWKSYV
FMYVWKSYT

SEQ ID NO: 22317 - protein, 9 aa, synthetic construct
  source 1..9: note = Seed: FYYVWKSYV
FMYVWKSYV

SEQ ID NO: 22318 - protein, 11 aa, synthetic construct
  source 1..11: note = Seed: FYYVWKSYVHV
FMYVWKSYVHA

SEQ ID NO: 22319 - protein, 11 aa, synthetic construct
  source 1..11: note = Seed: FYYVWKSYVHV
FMYVWKSYVHI

SEQ ID NO: 22320 - protein, 11 aa, synthetic construct
  source 1..11: note = Seed: FYYVWKSYVHV
FMYVWKSYVHL

SEQ ID NO: 22321 - protein, 11 aa, synthetic construct
  source 1..11: note = Seed: FYYVWKSYVHV
FMYVWKSYVHV

SEQ ID NO: 22322 - protein, 10 aa, synthetic construct
  source 1..10: note = Seed: FYYVWKSYVH
FMYVWKSYVM

SEQ ID NO: 22323 - protein, 10 aa, synthetic construct
  source 1..10: note = Seed: FYYVWKSYVH
FMYVWKSYVY

SEQ ID NO: 22324 - protein, 9 aa, synthetic construct
  source 1..9: note = Seed: FYYVWKSYV
FMYVWKSYY

SEQ ID NO: 22325 - protein, 9 aa, synthetic construct
  source 1..9: note = Seed: FFYYSDSPC
FMYYSDSPF

SEQ ID NO: 22326 - protein, 9 aa, synthetic construct
  source 1..9: note = Seed: FFYYSDSPC
FMYYSDSPI

SEQ ID NO: 22327 - protein, 9 aa, synthetic construct
  source 1..9: note = Seed: FFYYSDSPC
FMYYSDSPL

SEQ ID NO: 22328 - protein, 9 aa, synthetic construct
  source 1..9: note = Seed: FFYYSDSPC
FMYYSDSPM

SEQ ID NO: 22329 - protein, 9 aa, synthetic construct
  source 1..9: note = Seed: FFYYSDSPC
FMYYSDSPV

SEQ ID NO: 22330 - protein, 9 aa, synthetic construct
  source 1..9: note = Seed: FFYYSDSPC
FMYYSDSPY

SEQ ID NO: 22331 - protein, 9 aa, synthetic construct
  source 1..9: note = Seed: FVAAIFYLI
FNAAIFYLA

SEQ ID NO: 22332 - protein, 9 aa, synthetic construct
  source 1..9: note = Seed: FVAAIFYLI
FNAAIFYLF

SEQ ID NO: 22333 - protein, 9 aa, synthetic construct
  source 1..9: note = Seed: FVAAIFYLI
FNAAIFYLI

SEQ ID NO: 22334 - protein, 9 aa, synthetic construct
  source 1..9: note = Seed: FVAAIFYLI
FNAAIFYLK

SEQ ID NO: 22335 - protein, 9 aa, synthetic construct
  source 1..9: note = Seed: FVAAIFYLI
FNAAIFYLL

SEQ ID NO: 22336 - protein, 9 aa, synthetic construct
  source 1..9: note = Seed: FVAAIFYLI
FNAAIFYLM

SEQ ID NO: 22337 - protein, 9 aa, synthetic construct
  source 1..9: note = Seed: FVAAIFYLI
FNAAIFYLR

SEQ ID NO: 22338 - protein, 9 aa, synthetic construct
  source 1..9: note = Seed: FVAAIFYLI
FNAAIFYLV

SEQ ID NO: 22339 - protein, 9 aa, synthetic construct
  source 1..9: note = Seed: FVAAIFYLI
FNAAIFYLY

SEQ ID NO: 22340 - protein, 10 aa, synthetic construct
  source 1..10: note = Seed: FCAFAVDAAK
FNAFAVDAAK

SEQ ID NO: 22341 - protein, 10 aa, synthetic construct
  source 1..10: note = Seed: FCAFAVDAAK
FNAFAVDAAR

SEQ ID NO: 22342 - protein, 9 aa, synthetic construct
  source 1..9: note = Seed: FLAFVVFLL
FNAFVVFLA

SEQ ID NO: 22343 - protein, 9 aa, synthetic construct
  source 1..9: note = Seed: FLAFVVFLL
FNAFVVFLI

SEQ ID NO: 22344 - protein, 9 aa, synthetic construct
  source 1..9: note = Seed: FLAFVVFLL
FNAFVVFLL

SEQ ID NO: 22345 - protein, 9 aa, synthetic construct
  source 1..9: note = Seed: FLAFVVFLL
FNAFVVFLV

SEQ ID NO: 22346 - protein, 9 aa, synthetic construct
  source 1..9: note = Seed: FLAHIQWMV
FNAHIQWMI

SEQ ID NO: 22347 - protein, 9 aa, synthetic construct
  source 1..9: note = Seed: FLAHIQWMV
FNAHIQWMV

SEQ ID NO: 22348 - protein, 9 aa, synthetic construct
  source 1..9: note = Seed: FTALTQHGK
FNALTQHGR

SEQ ID NO: 22349 - protein, 10 aa, synthetic construct
  source 1..10: note = Seed: FIASFRLFAR
FNASFRLFAK

SEQ ID NO: 22350 - protein, 10 aa, synthetic construct
  source 1..10: note = Seed: FIASFRLFAR
FNASFRLFAR

SEQ ID NO: 22351 - protein, 9 aa, synthetic construct
  source 1..9: note = Seed: FIASFRLFA
FNASFRLFV

SEQ ID NO: 22352 - protein, 10 aa, synthetic construct
  source 1..10: note = Seed: FFASFYYVWK
FNASFYYVWK

SEQ ID NO: 22353 - protein, 10 aa, synthetic construct
  source 1..10: note = Seed: FFASFYYVWK
FNASFYYVWR

SEQ ID NO: 22354 - protein, 9 aa, synthetic construct
  source 1..9: note = Seed: FFASFYYVW
FNASFYYVY

SEQ ID NO: 22355 - protein, 9 aa, synthetic construct
  source 1..9: note = Seed: FNATRFASV
FNATRFASI

SEQ ID NO: 22356 - protein, 9 aa, synthetic construct
  source 1..9: note = Seed: FNATRFASV
FNATRFASL

SEQ ID NO: 22357 - protein, 9 aa, synthetic construct
  source 1..9: note = Seed: FNATRFASV
FNATRFASM

SEQ ID NO: 22358 - protein, 10 aa, synthetic construct
  source 1..10: note = Seed: FNATRFASVY
FNATRFASVF

SEQ ID NO: 22359 - protein, 10 aa, synthetic construct
  source 1..10: note = Seed: FNATRFASVY
FNATRFASVM

SEQ ID NO: 22360 - protein, 10 aa, synthetic construct
  source 1..10: note = Seed: FSAVGNICYT
FNAVGNICYV

SEQ ID NO: 22361 - protein, 9 aa, synthetic construct
  source 1..9: note = Seed: FLAYILFTR
FNAYILFTK

SEQ ID NO: 22362 - protein, 9 aa, synthetic construct
  source 1..9: note = Seed: FLAYILFTR
FNAYILFTR

SEQ ID NO: 22363 - protein, 10 aa, synthetic construct
  source 1..10: note = Seed: FLAYILFTRF
FNAYILFTRK

SEQ ID NO: 22364 - protein, 10 aa, synthetic construct
  source 1..10: note = Seed: FLAYILFTRF
FNAYILFTRR

SEQ ID NO: 22365 - protein, 9 aa, synthetic construct
  source 1..9: note = Seed: FLAYILFTR
FNAYILFTV

SEQ ID NO: 22366 - protein, 9 aa, synthetic construct
  source 1..9: note = Seed: FGDDTVIEV
FNDDTVIEL

SEQ ID NO: 22367 - protein, 11 aa, synthetic construct
  source 1..11: note = Seed: FPDLNGDVVAI
FNDLNGDVVAI

SEQ ID NO: 22368 - protein, 11 aa, synthetic construct
  source 1..11: note = Seed: FPDLNGDVVAI
FNDLNGDVVAL

SEQ ID NO: 22369 - protein, 11 aa, synthetic construct
  source 1..11: note = Seed: FPDLNGDVVAI
FNDLNGDVVAV

SEQ ID NO: 22370 - protein, 10 aa, synthetic construct
  source 1..10: note = Seed: FVFKNIDGYF
FNFKNIDGYY

SEQ ID NO: 22371 - protein, 9 aa, synthetic construct
  source 1..9: note = Seed: FLFVAAIFY
FNFVAAIFY

SEQ ID NO: 22372 - protein, 10 aa, synthetic construct
  source 1..10: note = Seed: FLFVAAIFYL
FNFVAAIFYV

SEQ ID NO: 22373 - protein, 10 aa, synthetic construct
  source 1..10: note = Seed: FLFVAAIFYL
FNFVAAIFYY

SEQ ID NO: 22374 - protein, 10 aa, synthetic construct
  source 1..10: note = Seed: FLGYFCTCYF
FNGYFCTCYY

SEQ ID NO: 22375 - protein, 9 aa, synthetic construct
  source 1..9: note = Seed: FLHFLPRVF
FNHFLPRVF

SEQ ID NO: 22376 - protein, 9 aa, synthetic construct
  source 1..9: note = Seed: FLHFLPRVF
FNHFLPRVY

SEQ ID NO: 22377 - protein, 10 aa, synthetic construct
  source 1..10: note = Seed: FKIYSKHTPI
FNIYSKHTPA

SEQ ID NO: 22378 - protein, 10 aa, synthetic construct
  source 1..10: note = Seed: FKIYSKHTPI
FNIYSKHTPF

SEQ ID NO: 22379 - protein, 10 aa, synthetic construct
  source 1..10: note = Seed: FKIYSKHTPI
FNIYSKHTPI

SEQ ID NO: 22380 - protein, 10 aa, synthetic construct
  source 1..10: note = Seed: FKIYSKHTPI
FNIYSKHTPL

SEQ ID NO: 22381 - protein, 10 aa, synthetic construct
  source 1..10: note = Seed: FKIYSKHTPI
FNIYSKHTPV

SEQ ID NO: 22382 - protein, 10 aa, synthetic construct
  source 1..10: note = Seed: FKIYSKHTPI
FNIYSKHTPY

SEQ ID NO: 22383 - protein, 9 aa, synthetic construct
  source 1..9: note = Seed: FVKHKHAFL
FNKHKHAFL

SEQ ID NO: 22384 - protein, 8 aa, synthetic construct
  source 1..8: note = Seed: FVKHKHAF
FNKHKHAL

SEQ ID NO: 22385 - protein, 8 aa, synthetic construct
  source 1..8: note = Seed: FVKHKHAF
FNKHKHAM

SEQ ID NO: 22386 - protein, 10 aa, synthetic construct
  source 1..10: note = Seed: FKLKDCVMYA
FNLKDCVMYA

SEQ ID NO: 22387 - protein, 10 aa, synthetic construct
  source 1..10: note = Seed: FKLKDCVMYA
FNLKDCVMYI

SEQ ID NO: 22388 - protein, 10 aa, synthetic construct
  source 1..10: note = Seed: FKLKDCVMYA
FNLKDCVMYL

SEQ ID NO: 22389 - protein, 10 aa, synthetic construct
  source 1..10: note = Seed: FKLKDCVMYA
FNLKDCVMYM

SEQ ID NO: 22390 - protein, 10 aa, synthetic construct
  source 1..10: note = Seed: FKLKDCVMYA
FNLKDCVMYS

SEQ ID NO: 22391 - protein, 10 aa, synthetic construct
  source 1..10: note = Seed: FKLKDCVMYA
FNLKDCVMYT

SEQ ID NO: 22392 - protein, 10 aa, synthetic construct
  source 1..10: note = Seed: FKLKDCVMYA
FNLKDCVMYV

SEQ ID NO: 22393 - protein, 10 aa, synthetic construct
  source 1..10: note = Seed: FPLKLRGTAV
FNLKLRGTAA

SEQ ID NO: 22394 - protein, 10 aa, synthetic construct
  source 1..10: note = Seed: FPLKLRGTAV
FNLKLRGTAF

SEQ ID NO: 22395 - protein, 10 aa, synthetic construct
  source 1..10: note = Seed: FPLKLRGTAV
FNLKLRGTAI

SEQ ID NO: 22396 - protein, 10 aa, synthetic construct
  source 1..10: note = Seed: FPLKLRGTAV
FNLKLRGTAL

SEQ ID NO: 22397 - protein, 10 aa, synthetic construct
  source 1..10: note = Seed: FPLKLRGTAV
FNLKLRGTAM

SEQ ID NO: 22398 - protein, 10 aa, synthetic construct
  source 1..10: note = Seed: FPLKLRGTAV
FNLKLRGTAV

SEQ ID NO: 22399 - protein, 11 aa, synthetic construct
  source 1..11: note = Seed: FPLKLRGTAVM
FNLKLRGTAVF

SEQ ID NO: 22400 - protein, 11 aa, synthetic construct
  source 1..11: note = Seed: FPLKLRGTAVM
FNLKLRGTAVY

SEQ ID NO: 22401 - protein, 10 aa, synthetic construct
  source 1..10: note = Seed: FLLNKEMYLK
FNLNKEMYLA

SEQ ID NO: 22402 - protein, 10 aa, synthetic construct
  source 1..10: note = Seed: FLLNKEMYLK
FNLNKEMYLI

SEQ ID NO: 22403 - protein, 10 aa, synthetic construct
  source 1..10: note = Seed: FLLNKEMYLK
FNLNKEMYLL

SEQ ID NO: 22404 - protein, 10 aa, synthetic construct
  source 1..10: note = Seed: FLLNKEMYLK
FNLNKEMYLM

SEQ ID NO: 22405 - protein, 10 aa, synthetic construct
  source 1..10: note = Seed: FLLNKEMYLK
FNLNKEMYLV

SEQ ID NO: 22406 - protein, 10 aa, synthetic construct
  source 1..10: note = Seed: FYLTNDVSFL
FNLTNDVSFA

SEQ ID NO: 22407 - protein, 10 aa, synthetic construct
  source 1..10: note = Seed: FYLTNDVSFL
FNLTNDVSFI

SEQ ID NO: 22408 - protein, 10 aa, synthetic construct
  source 1..10: note = Seed: FYLTNDVSFL
FNLTNDVSFL

SEQ ID NO: 22409 - protein, 11 aa, synthetic construct
  source 1..11: note = Seed: FYLTNDVSFLA
FNLTNDVSFLL

SEQ ID NO: 22410 - protein, 11 aa, synthetic construct
  source 1..11: note = Seed: FYLTNDVSFLA
FNLTNDVSFLV

SEQ ID NO: 22411 - protein, 10 aa, synthetic construct
  source 1..10: note = Seed: FYLTNDVSFL
FNLTNDVSFM

SEQ ID NO: 22412 - protein, 10 aa, synthetic construct
  source 1..10: note = Seed: FYLTNDVSFL
FNLTNDVSFV

SEQ ID NO: 22413 - protein, 10 aa, synthetic construct
  source 1..10: note = Seed: FQLTPIAVQM
FNLTPIAVQA

SEQ ID NO: 22414 - protein, 10 aa, synthetic construct
  source 1..10: note = Seed: FQLTPIAVQM
FNLTPIAVQI

SEQ ID NO: 22415 - protein, 10 aa, synthetic construct
  source 1..10: note = Seed: FQLTPIAVQM
FNLTPIAVQL

SEQ ID NO: 22416 - protein, 10 aa, synthetic construct
  source 1..10: note = Seed: FQLTPIAVQM
FNLTPIAVQM

SEQ ID NO: 22417 - protein, 10 aa, synthetic construct
  source 1..10: note = Seed: FQLTPIAVQM
FNLTPIAVQV

SEQ ID NO: 22418 - protein, 10 aa, synthetic construct
  source 1..10: note = Seed: FELTSMKYFV
FNLTSMKYFA

SEQ ID NO: 22419 - protein, 10 aa, synthetic construct
  source 1..10: note = Seed: FELTSMKYFV
FNLTSMKYFI

SEQ ID NO: 22420 - protein, 10 aa, synthetic construct
  source 1..10: note = Seed: FELTSMKYFV
FNLTSMKYFL

SEQ ID NO: 22421 - protein, 10 aa, synthetic construct
  source 1..10: note = Seed: FELTSMKYFV
FNLTSMKYFM

SEQ ID NO: 22422 - protein, 10 aa, synthetic construct
  source 1..10: note = Seed: FELTSMKYFV
FNLTSMKYFV

SEQ ID NO: 22423 - protein, 10 aa, synthetic construct
  source 1..10: note = Seed: FGLVAEWFLA
FNLVAEWFLA

SEQ ID NO: 22424 - protein, 10 aa, synthetic construct
  source 1..10: note = Seed: FGLVAEWFLA
FNLVAEWFLI

SEQ ID NO: 22425 - protein, 10 aa, synthetic construct
  source 1..10: note = Seed: FGLVAEWFLA
FNLVAEWFLL

SEQ ID NO: 22426 - protein, 10 aa, synthetic construct
  source 1..10: note = Seed: FGLVAEWFLA
FNLVAEWFLM

SEQ ID NO: 22427 - protein, 10 aa, synthetic construct
  source 1..10: note = Seed: FGLVAEWFLA
FNLVAEWFLV

SEQ ID NO: 22428 - protein, 10 aa, synthetic construct
  source 1..10: note = Seed: FVLWAHGFEL
FNLWAHGFEA

SEQ ID NO: 22429 - protein, 10 aa, synthetic construct
  source 1..10: note = Seed: FVLWAHGFEL
FNLWAHGFEI

SEQ ID NO: 22430 - protein, 10 aa, synthetic construct
  source 1..10: note = Seed: FVLWAHGFEL
FNLWAHGFEL

SEQ ID NO: 22431 - protein, 11 aa, synthetic construct
  source 1..11: note = Seed: FVLWAHGFELT
FNLWAHGFELA

SEQ ID NO: 22432 - protein, 11 aa, synthetic construct
  source 1..11: note = Seed: FVLWAHGFELT
FNLWAHGFELC

SEQ ID NO: 22433 - protein, 11 aa, synthetic construct
  source 1..11: note = Seed: FVLWAHGFELT
FNLWAHGFELD

SEQ ID NO: 22434 - protein, 11 aa, synthetic construct
  source 1..11: note = Seed: FVLWAHGFELT
FNLWAHGFELE

SEQ ID NO: 22435 - protein, 11 aa, synthetic construct
  source 1..11: note = Seed: FVLWAHGFELT
FNLWAHGFELF

SEQ ID NO: 22436 - protein, 11 aa, synthetic construct
  source 1..11: note = Seed: FVLWAHGFELT
FNLWAHGFELG

SEQ ID NO: 22437 - protein, 11 aa, synthetic construct
  source 1..11: note = Seed: FVLWAHGFELT
FNLWAHGFELH

SEQ ID NO: 22438 - protein, 11 aa, synthetic construct
  source 1..11: note = Seed: FVLWAHGFELT
FNLWAHGFELI

SEQ ID NO: 22439 - protein, 11 aa, synthetic construct
  source 1..11: note = Seed: FVLWAHGFELT
FNLWAHGFELK

SEQ ID NO: 22440 - protein, 11 aa, synthetic construct
  source 1..11: note = Seed: FVLWAHGFELT
FNLWAHGFELL

SEQ ID NO: 22441 - protein, 11 aa, synthetic construct
  source 1..11: note = Seed: FVLWAHGFELT
FNLWAHGFELM

SEQ ID NO: 22442 - protein, 11 aa, synthetic construct
  source 1..11: note = Seed: FVLWAHGFELT
FNLWAHGFELN

SEQ ID NO: 22443 - protein, 11 aa, synthetic construct
  source 1..11: note = Seed: FVLWAHGFELT
FNLWAHGFELP

SEQ ID NO: 22444 - protein, 11 aa, synthetic construct
  source 1..11: note = Seed: FVLWAHGFELT
FNLWAHGFELQ

SEQ ID NO: 22445 - protein, 11 aa, synthetic construct
  source 1..11: note = Seed: FVLWAHGFELT
FNLWAHGFELR

SEQ ID NO: 22446 - protein, 11 aa, synthetic construct
  source 1..11: note = Seed: FVLWAHGFELT
FNLWAHGFELS

SEQ ID NO: 22447 - protein, 11 aa, synthetic construct
  source 1..11: note = Seed: FVLWAHGFELT
FNLWAHGFELT

SEQ ID NO: 22448 - protein, 11 aa, synthetic construct
  source 1..11: note = Seed: FVLWAHGFELT
FNLWAHGFELV

SEQ ID NO: 22449 - protein, 11 aa, synthetic construct
  source 1..11: note = Seed: FVLWAHGFELT
FNLWAHGFELW

SEQ ID NO: 22450 - protein, 11 aa, synthetic construct
  source 1..11: note = Seed: FVLWAHGFELT
FNLWAHGFELY

SEQ ID NO: 22451 - protein, 10 aa, synthetic construct
  source 1..10: note = Seed: FVLWAHGFEL
FNLWAHGFEM

SEQ ID NO: 22452 - protein, 10 aa, synthetic construct
  source 1..10: note = Seed: FVLWAHGFEL
FNLWAHGFES

SEQ ID NO: 22453 - protein, 10 aa, synthetic construct
  source 1..10: note = Seed: FVLWAHGFEL
FNLWAHGFET

SEQ ID NO: 22454 - protein, 10 aa, synthetic construct
  source 1..10: note = Seed: FVLWAHGFEL
FNLWAHGFEV

SEQ ID NO: 22455 - protein, 10 aa, synthetic construct
  source 1..10: note = Seed: FSMMILSDDA
FNMMILSDDL

SEQ ID NO: 22456 - protein, 10 aa, synthetic construct
  source 1..10: note = Seed: FSMMILSDDA
FNMMILSDDV

SEQ ID NO: 22457 - protein, 9 aa, synthetic construct
  source 1..9: note = Seed: FAMQMAYRF
FNMQMAYRW

SEQ ID NO: 22458 - protein, 9 aa, synthetic construct
  source 1..9: note = Seed: FAMQMAYRF
FNMQMAYRY

SEQ ID NO: 22459 - protein, 8 aa, synthetic construct
  source 1..8: note = Seed: FDMSKFPL
FNMSKFPI

SEQ ID NO: 22460 - protein, 8 aa, synthetic construct
  source 1..8: note = Seed: FDMSKFPL
FNMSKFPL

SEQ ID NO: 22461 - protein, 10 aa, synthetic construct
  source 1..10: note = Seed: FDMSKFPLKL
FNMSKFPLKA

SEQ ID NO: 22462 - protein, 10 aa, synthetic construct
  source 1..10: note = Seed: FDMSKFPLKL
FNMSKFPLKI

SEQ ID NO: 22463 - protein, 10 aa, synthetic construct
  source 1..10: note = Seed: FDMSKFPLKL
FNMSKFPLKL

SEQ ID NO: 22464 - protein, 10 aa, synthetic construct
  source 1..10: note = Seed: FDMSKFPLKL
FNMSKFPLKV

SEQ ID NO: 22465 - protein, 8 aa, synthetic construct
  source 1..8: note = Seed: FDMSKFPL
FNMSKFPM

SEQ ID NO: 22466 - protein, 10 aa, synthetic construct
  source 1..10: note = Seed: FNMVYMPASW
FNMVYMPASF

SEQ ID NO: 22467 - protein, 10 aa, synthetic construct
  source 1..10: note = Seed: FNMVYMPASW
FNMVYMPASY

SEQ ID NO: 22468 - protein, 9 aa, synthetic construct
  source 1..9: note = Seed: FENKTTLPV
FNNKTTLPF

SEQ ID NO: 22469 - protein, 9 aa, synthetic construct
  source 1..9: note = Seed: FENKTTLPV
FNNKTTLPM

SEQ ID NO: 22470 - protein, 9 aa, synthetic construct
  source 1..9: note = Seed: FENKTTLPV
FNNKTTLPY

SEQ ID NO: 22471 - protein, 9 aa, synthetic construct
  source 1..9: note = Seed: FVNLKQLPF
FNNLKQLPF

SEQ ID NO: 22472 - protein, 11 aa, synthetic construct
  source 1..11: note = Seed: FTNVYADSFVI
FNNVYADSFVV

SEQ ID NO: 22473 - protein, 10 aa, synthetic construct
  source 1..10: note = Seed: FTPFDVVRQC
FNPFDVVRQA

SEQ ID NO: 22474 - protein, 10 aa, synthetic construct
  source 1..10: note = Seed: FLPFFSNVTW
FNPFFSNVTF

SEQ ID NO: 22475 - protein, 10 aa, synthetic construct
  source 1..10: note = Seed: FLPFFSNVTW
FNPFFSNVTH

SEQ ID NO: 22476 - protein, 10 aa, synthetic construct
  source 1..10: note = Seed: FLPFFSNVTW
FNPFFSNVTL

SEQ ID NO: 22477 - protein, 10 aa, synthetic construct
  source 1..10: note = Seed: FLPFFSNVTW
FNPFFSNVTM

SEQ ID NO: 22478 - protein, 10 aa, synthetic construct
  source 1..10: note = Seed: FLPFFSNVTW
FNPFFSNVTW

SEQ ID NO: 22479 - protein, 10 aa, synthetic construct
  source 1..10: note = Seed: FLPFFSNVTW
FNPFFSNVTY

SEQ ID NO: 22480 - protein, 10 aa, synthetic construct
  source 1..10: note = Seed: FTPLVPFWIT
FNPLVPFWIA

SEQ ID NO: 22481 - protein, 11 aa, synthetic construct
  source 1..11: note = Seed: FTPLVPFWITI
FNPLVPFWITV

SEQ ID NO: 22482 - protein, 10 aa, synthetic construct
  source 1..10: note = Seed: FLPRVFSAVG
FNPRVFSAVF

SEQ ID NO: 22483 - protein, 10 aa, synthetic construct
  source 1..10: note = Seed: FLPRVFSAVG
FNPRVFSAVI

SEQ ID NO: 22484 - protein, 10 aa, synthetic construct
  source 1..10: note = Seed: FLPRVFSAVG
FNPRVFSAVL

SEQ ID NO: 22485 - protein, 10 aa, synthetic construct
  source 1..10: note = Seed: FLPRVFSAVG
FNPRVFSAVM

SEQ ID NO: 22486 - protein, 10 aa, synthetic construct
  source 1..10: note = Seed: FLPRVFSAVG
FNPRVFSAVV

SEQ ID NO: 22487 - protein, 11 aa, synthetic construct
  source 1..11: note = Seed: FPQSAPHGVVF
FNQSAPHGVVF

SEQ ID NO: 22488 - protein, 11 aa, synthetic construct
  source 1..11: note = Seed: FPQSAPHGVVF
FNQSAPHGVVL

SEQ ID NO: 22489 - protein, 11 aa, synthetic construct
  source 1..11: note = Seed: FPQSAPHGVVF
FNQSAPHGVVM

SEQ ID NO: 22490 - protein, 11 aa, synthetic construct
  source 1..11: note = Seed: FPQSAPHGVVF
FNQSAPHGVVW

SEQ ID NO: 22491 - protein, 11 aa, synthetic construct
  source 1..11: note = Seed: FPQSAPHGVVF
FNQSAPHGVVY

SEQ ID NO: 22492 - protein, 9 aa, synthetic construct
  source 1..9: note = Seed: FLQSINFVR
FNQSINFVR

SEQ ID NO: 22493 - protein, 10 aa, synthetic construct
  source 1..10: note = Seed: FTQSRNLQEF
FNQSRNLQEF

SEQ ID NO: 22494 - protein, 10 aa, synthetic construct
  source 1..10: note = Seed: FTRFFYVLGL
FNRFFYVLGK

SEQ ID NO: 22495 - protein, 10 aa, synthetic construct
  source 1..10: note = Seed: FTRFFYVLGL
FNRFFYVLGL

SEQ ID NO: 22496 - protein, 9 aa, synthetic construct
  source 1..9: note = Seed: FTSDYYQLY
FNSDYYQLY

SEQ ID NO: 22497 - protein, 10 aa, synthetic construct
  source 1..10: note = Seed: FTSDYYQLYS
FNSDYYQLYF

SEQ ID NO: 22498 - protein, 10 aa, synthetic construct
  source 1..10: note = Seed: FTSDYYQLYS
FNSDYYQLYM

SEQ ID NO: 22499 - protein, 10 aa, synthetic construct
  source 1..10: note = Seed: FTSDYYQLYS
FNSDYYQLYY

SEQ ID NO: 22500 - protein, 9 aa, synthetic construct
  source 1..9: note = Seed: FASFYYVWK
FNSFYYVWR

SEQ ID NO: 22501 - protein, 9 aa, synthetic construct
  source 1..9: note = Seed: FSSNVANYQ
FNSNVANYK

SEQ ID NO: 22502 - protein, 10 aa, synthetic construct
  source 1..10: note = Seed: FSSNVANYQK
FNSNVANYQK

SEQ ID NO: 22503 - protein, 10 aa, synthetic construct
  source 1..10: note = Seed: FSSNVANYQK
FNSNVANYQR

SEQ ID NO: 22504 - protein, 9 aa, synthetic construct
  source 1..9: note = Seed: FSSNVANYQ
FNSNVANYR

SEQ ID NO: 22505 - protein, 9 aa, synthetic construct
  source 1..9: note = Seed: FFSNVTWFH
FNSNVTWFK

SEQ ID NO: 22506 - protein, 9 aa, synthetic construct
  source 1..9: note = Seed: FFSNVTWFH
FNSNVTWFR

SEQ ID NO: 22507 - protein, 9 aa, synthetic construct
  source 1..9: note = Seed: FFSNVTWFH
FNSNVTWFY

SEQ ID NO: 22508 - protein, 11 aa, synthetic construct
  source 1..11: note = Seed: FISPYNSQNAV
FNSPYNSQNAA

SEQ ID NO: 22509 - protein, 11 aa, synthetic construct
  source 1..11: note = Seed: FISPYNSQNAV
FNSPYNSQNAL

SEQ ID NO: 22510 - protein, 11 aa, synthetic construct
  source 1..11: note = Seed: FISPYNSQNAV
FNSPYNSQNAM

SEQ ID NO: 22511 - protein, 10 aa, synthetic construct
  source 1..10: note = Seed: FFSYFAVHFI
FNSYFAVHFA

SEQ ID NO: 22512 - protein, 10 aa, synthetic construct
  source 1..10: note = Seed: FFSYFAVHFI
FNSYFAVHFF

SEQ ID NO: 22513 - protein, 10 aa, synthetic construct
  source 1..10: note = Seed: FFSYFAVHFI
FNSYFAVHFI

SEQ ID NO: 22514 - protein, 10 aa, synthetic construct
  source 1..10: note = Seed: FFSYFAVHFI
FNSYFAVHFV

SEQ ID NO: 22515 - protein, 10 aa, synthetic construct
  source 1..10: note = Seed: FFSYFAVHFI
FNSYFAVHFW

SEQ ID NO: 22516 - protein, 10 aa, synthetic construct
  source 1..10: note = Seed: FFSYFAVHFI
FNSYFAVHFY

SEQ ID NO: 22517 - protein, 9 aa, synthetic construct
  source 1..9: note = Seed: FFSYFAVHF
FNSYFAVHY

SEQ ID NO: 22518 - protein, 10 aa, synthetic construct
  source 1..10: note = Seed: FVTHSKGLYR
FNTHSKGLYR

SEQ ID NO: 22519 - protein, 10 aa, synthetic construct
  source 1..10: note = Seed: FDTYNLWNTF
FNTYNLWNTF

SEQ ID NO: 22520 - protein, 10 aa, synthetic construct
  source 1..10: note = Seed: FDTYNLWNTF
FNTYNLWNTW

SEQ ID NO: 22521 - protein, 10 aa, synthetic construct
  source 1..10: note = Seed: FDTYNLWNTF
FNTYNLWNTY

SEQ ID NO: 22522 - protein, 10 aa, synthetic construct
  source 1..10: note = Seed: FAVDAAKAYK
FNVDAAKAYK

SEQ ID NO: 22523 - protein, 10 aa, synthetic construct
  source 1..10: note = Seed: FAVDAAKAYK
FNVDAAKAYR

SEQ ID NO: 22524 - protein, 9 aa, synthetic construct
  source 1..9: note = Seed: FNVLFSTVF
FNVLFSTVM

SEQ ID NO: 22525 - protein, 9 aa, synthetic construct
  source 1..9: note = Seed: FNVLFSTVF
FNVLFSTVY

SEQ ID NO: 22526 - protein, 10 aa, synthetic construct
  source 1..10: note = Seed: FKVSIWNLDY
FNVSIWNLDY

SEQ ID NO: 22527 - protein, 9 aa, synthetic construct
  source 1..9: note = Seed: FVVSTGYHF
FNVSTGYHF

SEQ ID NO: 22528 - protein, 10 aa, synthetic construct
  source 1..10: note = Seed: FVVSTGYHFR
FNVSTGYHFK

SEQ ID NO: 22529 - protein, 10 aa, synthetic construct
  source 1..10: note = Seed: FVVSTGYHFR
FNVSTGYHFR

SEQ ID NO: 22530 - protein, 10 aa, synthetic construct
  source 1..10: note = Seed: FYWFFSNYLK
FNWFFSNYLF

SEQ ID NO: 22531 - protein, 10 aa, synthetic construct
  source 1..10: note = Seed: FYWFFSNYLK
FNWFFSNYLK

SEQ ID NO: 22532 - protein, 10 aa, synthetic construct
  source 1..10: note = Seed: FYWFFSNYLK
FNWFFSNYLR

SEQ ID NO: 22533 - protein, 10 aa, synthetic construct
  source 1..10: note = Seed: FYWFFSNYLK
FNWFFSNYLY

SEQ ID NO: 22534 - protein, 9 aa, synthetic construct
  source 1..9: note = Seed: FYWFFSNYL
FNWFFSNYY

SEQ ID NO: 22535 - protein, 10 aa, synthetic construct
  source 1..10: note = Seed: FLWLLWPVTL
FNWLLWPVTF

SEQ ID NO: 22536 - protein, 11 aa, synthetic construct
  source 1..11: note = Seed: FLWLLWPVTLA
FNWLLWPVTLI

SEQ ID NO: 22537 - protein, 11 aa, synthetic construct
  source 1..11: note = Seed: FLWLLWPVTLA
FNWLLWPVTLL

SEQ ID NO: 22538 - protein, 11 aa, synthetic construct
  source 1..11: note = Seed: FLWLLWPVTLA
FNWLLWPVTLV

SEQ ID NO: 22539 - protein, 9 aa, synthetic construct
  source 1..9: note = Seed: FSYFAVHFI
FNYFAVHFF

SEQ ID NO: 22540 - protein, 9 aa, synthetic construct
  source 1..9: note = Seed: FSYFAVHFI
FNYFAVHFI

SEQ ID NO: 22541 - protein, 9 aa, synthetic construct
  source 1..9: note = Seed: FSYFAVHFI
FNYFAVHFV

SEQ ID NO: 22542 - protein, 9 aa, synthetic construct
  source 1..9: note = Seed: FSYFAVHFI
FNYFAVHFY

SEQ ID NO: 22543 - protein, 9 aa, synthetic construct
  source 1..9: note = Seed: FNYLKSPNF
FNYLKSPNY

SEQ ID NO: 22544 - protein, 9 aa, synthetic construct
  source 1..9: note = Seed: FCYMHHMEL
FNYMHHMEF

SEQ ID NO: 22545 - protein, 9 aa, synthetic construct
  source 1..9: note = Seed: FCYMHHMEL
FNYMHHMEI

SEQ ID NO: 22546 - protein, 9 aa, synthetic construct
  source 1..9: note = Seed: FCYMHHMEL
FNYMHHMEL

SEQ ID NO: 22547 - protein, 9 aa, synthetic construct
  source 1..9: note = Seed: FCYMHHMEL
FNYMHHMEM

SEQ ID NO: 22548 - protein, 9 aa, synthetic construct
  source 1..9: note = Seed: FCYMHHMEL
FNYMHHMEV

SEQ ID NO: 22549 - protein, 9 aa, synthetic construct
  source 1..9: note = Seed: FCYMHHMEL
FNYMHHMEY

SEQ ID NO: 22550 - protein, 9 aa, synthetic construct
  source 1..9: note = Seed: FRYMNSQGL
FNYMNSQGF

SEQ ID NO: 22551 - protein, 9 aa, synthetic construct
  source 1..9: note = Seed: FRYMNSQGL
FNYMNSQGM

SEQ ID NO: 22552 - protein, 9 aa, synthetic construct
  source 1..9: note = Seed: FRYMNSQGL
FNYMNSQGY

SEQ ID NO: 22553 - protein, 10 aa, synthetic construct
  source 1..10: note = Seed: FYYVWKSYVH
FNYVWKSYVM

SEQ ID NO: 22554 - protein, 10 aa, synthetic construct
  source 1..10: note = Seed: FYYVWKSYVH
FNYVWKSYVY

SEQ ID NO: 22555 - protein, 9 aa, synthetic construct
  source 1..9: note = Seed: FVAAIFYLI
FPAAIFYLA

SEQ ID NO: 22556 - protein, 9 aa, synthetic construct
  source 1..9: note = Seed: FVAAIFYLI
FPAAIFYLI

SEQ ID NO: 22557 - protein, 9 aa, synthetic construct
  source 1..9: note = Seed: FVAAIFYLI
FPAAIFYLK

SEQ ID NO: 22558 - protein, 9 aa, synthetic construct
  source 1..9: note = Seed: FVAAIFYLI
FPAAIFYLL

SEQ ID NO: 22559 - protein, 9 aa, synthetic construct
  source 1..9: note = Seed: FVAAIFYLI
FPAAIFYLR

SEQ ID NO: 22560 - protein, 9 aa, synthetic construct
  source 1..9: note = Seed: FVAAIFYLI
FPAAIFYLV

SEQ ID NO: 22561 - protein, 9 aa, synthetic construct
  source 1..9: note = Seed: FVAAIFYLI
FPAAIFYLY

SEQ ID NO: 22562 - protein, 10 aa, synthetic construct
  source 1..10: note = Seed: FCAFAVDAAK
FPAFAVDAAK

SEQ ID NO: 22563 - protein, 10 aa, synthetic construct
  source 1..10: note = Seed: FCAFAVDAAK
FPAFAVDAAR

SEQ ID NO: 22564 - protein, 9 aa, synthetic construct
  source 1..9: note = Seed: FLAFVVFLL
FPAFVVFLI

SEQ ID NO: 22565 - protein, 9 aa, synthetic construct
  source 1..9: note = Seed: FLAFVVFLL
FPAFVVFLL

SEQ ID NO: 22566 - protein, 9 aa, synthetic construct
  source 1..9: note = Seed: FLAFVVFLL
FPAFVVFLV

SEQ ID NO: 22567 - protein, 9 aa, synthetic construct
  source 1..9: note = Seed: FLAHIQWMV
FPAHIQWMV

SEQ ID NO: 22568 - protein, 9 aa, synthetic construct
  source 1..9: note = Seed: FIASFRLFA
FPASFRLFA

SEQ ID NO: 22569 - protein, 10 aa, synthetic construct
  source 1..10: note = Seed: FIASFRLFAR
FPASFRLFAK

SEQ ID NO: 22570 - protein, 10 aa, synthetic construct
  source 1..10: note = Seed: FIASFRLFAR
FPASFRLFAR

SEQ ID NO: 22571 - protein, 9 aa, synthetic construct
  source 1..9: note = Seed: FIASFRLFA
FPASFRLFC

SEQ ID NO: 22572 - protein, 9 aa, synthetic construct
  source 1..9: note = Seed: FIASFRLFA
FPASFRLFG

SEQ ID NO: 22573 - protein, 9 aa, synthetic construct
  source 1..9: note = Seed: FIASFRLFA
FPASFRLFI

SEQ ID NO: 22574 - protein, 9 aa, synthetic construct
  source 1..9: note = Seed: FIASFRLFA
FPASFRLFL

SEQ ID NO: 22575 - protein, 9 aa, synthetic construct
  source 1..9: note = Seed: FIASFRLFA
FPASFRLFP

SEQ ID NO: 22576 - protein, 9 aa, synthetic construct
  source 1..9: note = Seed: FIASFRLFA
FPASFRLFS

SEQ ID NO: 22577 - protein, 9 aa, synthetic construct
  source 1..9: note = Seed: FIASFRLFA
FPASFRLFT

SEQ ID NO: 22578 - protein, 9 aa, synthetic construct
  source 1..9: note = Seed: FIASFRLFA
FPASFRLFV

SEQ ID NO: 22579 - protein, 10 aa, synthetic construct
  source 1..10: note = Seed: FFASFYYVWK
FPASFYYVWK

SEQ ID NO: 22580 - protein, 10 aa, synthetic construct
  source 1..10: note = Seed: FFASFYYVWK
FPASFYYVWR

SEQ ID NO: 22581 - protein, 9 aa, synthetic construct
  source 1..9: note = Seed: FFASFYYVW
FPASFYYVY

SEQ ID NO: 22582 - protein, 9 aa, synthetic construct
  source 1..9: note = Seed: FNATRFASV
FPATRFASA

SEQ ID NO: 22583 - protein, 9 aa, synthetic construct
  source 1..9: note = Seed: FNATRFASV
FPATRFASF

SEQ ID NO: 22584 - protein, 9 aa, synthetic construct
  source 1..9: note = Seed: FNATRFASV
FPATRFASI

SEQ ID NO: 22585 - protein, 9 aa, synthetic construct
  source 1..9: note = Seed: FNATRFASV
FPATRFASL

SEQ ID NO: 22586 - protein, 9 aa, synthetic construct
  source 1..9: note = Seed: FNATRFASV
FPATRFASM

SEQ ID NO: 22587 - protein, 9 aa, synthetic construct
  source 1..9: note = Seed: FNATRFASV
FPATRFASV

SEQ ID NO: 22588 - protein, 10 aa, synthetic construct
  source 1..10: note = Seed: FNATRFASVY
FPATRFASVF

SEQ ID NO: 22589 - protein, 10 aa, synthetic construct
  source 1..10: note = Seed: FNATRFASVY
FPATRFASVL

SEQ ID NO: 22590 - protein, 10 aa, synthetic construct
  source 1..10: note = Seed: FNATRFASVY
FPATRFASVM

SEQ ID NO: 22591 - protein, 10 aa, synthetic construct
  source 1..10: note = Seed: FNATRFASVY
FPATRFASVY

SEQ ID NO: 22592 - protein, 9 aa, synthetic construct
  source 1..9: note = Seed: FSAVGNICY
FPAVGNICA

SEQ ID NO: 22593 - protein, 9 aa, synthetic construct
  source 1..9: note = Seed: FSAVGNICY
FPAVGNICF

SEQ ID NO: 22594 - protein, 9 aa, synthetic construct
  source 1..9: note = Seed: FSAVGNICY
FPAVGNICH

SEQ ID NO: 22595 - protein, 9 aa, synthetic construct
  source 1..9: note = Seed: FSAVGNICY
FPAVGNICI

SEQ ID NO: 22596 - protein, 9 aa, synthetic construct
  source 1..9: note = Seed: FSAVGNICY
FPAVGNICL

SEQ ID NO: 22597 - protein, 9 aa, synthetic construct
  source 1..9: note = Seed: FSAVGNICY
FPAVGNICM

SEQ ID NO: 22598 - protein, 9 aa, synthetic construct
  source 1..9: note = Seed: FSAVGNICY
FPAVGNICV

SEQ ID NO: 22599 - protein, 9 aa, synthetic construct
  source 1..9: note = Seed: FSAVGNICY
FPAVGNICW

SEQ ID NO: 22600 - protein, 9 aa, synthetic construct
  source 1..9: note = Seed: FSAVGNICY
FPAVGNICY

SEQ ID NO: 22601 - protein, 10 aa, synthetic construct
  source 1..10: note = Seed: FSAVGNICYT
FPAVGNICYV

SEQ ID NO: 22602 - protein, 9 aa, synthetic construct
  source 1..9: note = Seed: FLAYILFTR
FPAYILFTK

SEQ ID NO: 22603 - protein, 9 aa, synthetic construct
  source 1..9: note = Seed: FLAYILFTR
FPAYILFTR

SEQ ID NO: 22604 - protein, 10 aa, synthetic construct
  source 1..10: note = Seed: FLAYILFTRF
FPAYILFTRK

SEQ ID NO: 22605 - protein, 10 aa, synthetic construct
  source 1..10: note = Seed: FLAYILFTRF
FPAYILFTRR

SEQ ID NO: 22606 - protein, 9 aa, synthetic construct
  source 1..9: note = Seed: FLCWHTNCY
FPCWHTNCF

SEQ ID NO: 22607 - protein, 9 aa, synthetic construct
  source 1..9: note = Seed: FLCWHTNCY
FPCWHTNCL

SEQ ID NO: 22608 - protein, 9 aa, synthetic construct
  source 1..9: note = Seed: FLCWHTNCY
FPCWHTNCM

SEQ ID NO: 22609 - protein, 9 aa, synthetic construct
  source 1..9: note = Seed: FLCWHTNCY
FPCWHTNCY

SEQ ID NO: 22610 - protein, 11 aa, synthetic construct
  source 1..11: note = Seed: FKDASGKPVPY
FPDASGKPVPF

SEQ ID NO: 22611 - protein, 11 aa, synthetic construct
  source 1..11: note = Seed: FKDASGKPVPY
FPDASGKPVPM

SEQ ID NO: 22612 - protein, 11 aa, synthetic construct
  source 1..11: note = Seed: FKDASGKPVPY
FPDASGKPVPY

SEQ ID NO: 22613 - protein, 9 aa, synthetic construct
  source 1..9: note = Seed: FPDLNGDVV
FPDLNGDVF

SEQ ID NO: 22614 - protein, 9 aa, synthetic construct
  source 1..9: note = Seed: FPDLNGDVV
FPDLNGDVI

SEQ ID NO: 22615 - protein, 9 aa, synthetic construct
  source 1..9: note = Seed: FPDLNGDVV
FPDLNGDVL

SEQ ID NO: 22616 - protein, 9 aa, synthetic construct
  source 1..9: note = Seed: FPDLNGDVV
FPDLNGDVM

SEQ ID NO: 22617 - protein, 11 aa, synthetic construct
  source 1..11: note = Seed: FPDLNGDVVAI
FPDLNGDVVAL

SEQ ID NO: 22618 - protein, 11 aa, synthetic construct
  source 1..11: note = Seed: FPDLNGDVVAI
FPDLNGDVVAM

SEQ ID NO: 22619 - protein, 11 aa, synthetic construct
  source 1..11: note = Seed: FPDLNGDVVAI
FPDLNGDVVAV

SEQ ID NO: 22620 - protein, 11 aa, synthetic construct
  source 1..11: note = Seed: FPDLNGDVVAI
FPDLNGDVVAW

SEQ ID NO: 22621 - protein, 10 aa, synthetic construct
  source 1..10: note = Seed: FPDLNGDVVA
FPDLNGDVVF

SEQ ID NO: 22622 - protein, 10 aa, synthetic construct
  source 1..10: note = Seed: FPDLNGDVVA
FPDLNGDVVI

SEQ ID NO: 22623 - protein, 10 aa, synthetic construct
  source 1..10: note = Seed: FPDLNGDVVA
FPDLNGDVVL

SEQ ID NO: 22624 - protein, 10 aa, synthetic construct
  source 1..10: note = Seed: FPDLNGDVVA
FPDLNGDVVM

SEQ ID NO: 22625 - protein, 10 aa, synthetic construct
  source 1..10: note = Seed: FPDLNGDVVA
FPDLNGDVVY

SEQ ID NO: 22626 - protein, 9 aa, synthetic construct
  source 1..9: note = Seed: FPDLNGDVV
FPDLNGDVW

SEQ ID NO: 22627 - protein, 9 aa, synthetic construct
  source 1..9: note = Seed: FPDLNGDVV
FPDLNGDVY

SEQ ID NO: 22628 - protein, 9 aa, synthetic construct
  source 1..9: note = Seed: FVFKNIDGY
FPFKNIDGA

SEQ ID NO: 22629 - protein, 9 aa, synthetic construct
  source 1..9: note = Seed: FVFKNIDGY
FPFKNIDGF

SEQ ID NO: 22630 - protein, 9 aa, synthetic construct
  source 1..9: note = Seed: FVFKNIDGY
FPFKNIDGH

SEQ ID NO: 22631 - protein, 9 aa, synthetic construct
  source 1..9: note = Seed: FVFKNIDGY
FPFKNIDGI

SEQ ID NO: 22632 - protein, 9 aa, synthetic construct
  source 1..9: note = Seed: FVFKNIDGY
FPFKNIDGL

SEQ ID NO: 22633 - protein, 9 aa, synthetic construct
  source 1..9: note = Seed: FVFKNIDGY
FPFKNIDGM

SEQ ID NO: 22634 - protein, 9 aa, synthetic construct
  source 1..9: note = Seed: FVFKNIDGY
FPFKNIDGW

SEQ ID NO: 22635 - protein, 9 aa, synthetic construct
  source 1..9: note = Seed: FVFKNIDGY
FPFKNIDGY

SEQ ID NO: 22636 - protein, 10 aa, synthetic construct
  source 1..10: note = Seed: FVFKNIDGYF
FPFKNIDGYF

SEQ ID NO: 22637 - protein, 10 aa, synthetic construct
  source 1..10: note = Seed: FVFKNIDGYF
FPFKNIDGYL

SEQ ID NO: 22638 - protein, 10 aa, synthetic construct
  source 1..10: note = Seed: FVFKNIDGYF
FPFKNIDGYM

SEQ ID NO: 22639 - protein, 10 aa, synthetic construct
  source 1..10: note = Seed: FVFKNIDGYF
FPFKNIDGYW

SEQ ID NO: 22640 - protein, 10 aa, synthetic construct
  source 1..10: note = Seed: FVFKNIDGYF
FPFKNIDGYY

SEQ ID NO: 22641 - protein, 10 aa, synthetic construct
  source 1..10: note = Seed: FPFNKWGKAR
FPFNKWGKAA

SEQ ID NO: 22642 - protein, 10 aa, synthetic construct
  source 1..10: note = Seed: FPFNKWGKAR
FPFNKWGKAC

SEQ ID NO: 22643 - protein, 10 aa, synthetic construct
  source 1..10: note = Seed: FPFNKWGKAR
FPFNKWGKAI

SEQ ID NO: 22644 - protein, 10 aa, synthetic construct
  source 1..10: note = Seed: FPFNKWGKAR
FPFNKWGKAS

SEQ ID NO: 22645 - protein, 10 aa, synthetic construct
  source 1..10: note = Seed: FPFNKWGKAR
FPFNKWGKAT

SEQ ID NO: 22646 - protein, 10 aa, synthetic construct
  source 1..10: note = Seed: FPFNKWGKAR
FPFNKWGKAV

SEQ ID NO: 22647 - protein, 9 aa, synthetic construct
  source 1..9: note = Seed: FPFNKWGKA
FPFNKWGKF

SEQ ID NO: 22648 - protein, 9 aa, synthetic construct
  source 1..9: note = Seed: FPFNKWGKA
FPFNKWGKI

SEQ ID NO: 22649 - protein, 9 aa, synthetic construct
  source 1..9: note = Seed: FPFNKWGKA
FPFNKWGKL

SEQ ID NO: 22650 - protein, 9 aa, synthetic construct
  source 1..9: note = Seed: FPFNKWGKA
FPFNKWGKM

SEQ ID NO: 22651 - protein, 9 aa, synthetic construct
  source 1..9: note = Seed: FPFNKWGKA
FPFNKWGKV

SEQ ID NO: 22652 - protein, 9 aa, synthetic construct
  source 1..9: note = Seed: FPFNKWGKA
FPFNKWGKY

SEQ ID NO: 22653 - protein, 9 aa, synthetic construct
  source 1..9: note = Seed: FLFVAAIFY
FPFVAAIFA

SEQ ID NO: 22654 - protein, 9 aa, synthetic construct
  source 1..9: note = Seed: FLFVAAIFY
FPFVAAIFF

SEQ ID NO: 22655 - protein, 9 aa, synthetic construct
  source 1..9: note = Seed: FLFVAAIFY
FPFVAAIFH

SEQ ID NO: 22656 - protein, 9 aa, synthetic construct
  source 1..9: note = Seed: FLFVAAIFY
FPFVAAIFL

SEQ ID NO: 22657 - protein, 9 aa, synthetic construct
  source 1..9: note = Seed: FLFVAAIFY
FPFVAAIFM

SEQ ID NO: 22658 - protein, 9 aa, synthetic construct
  source 1..9: note = Seed: FLFVAAIFY
FPFVAAIFY

SEQ ID NO: 22659 - protein, 10 aa, synthetic construct
  source 1..10: note = Seed: FLFVAAIFYL
FPFVAAIFYY

SEQ ID NO: 22660 - protein, 9 aa, synthetic construct
  source 1..9: note = Seed: FLGRYMSAL
FPGRYMSAL

SEQ ID NO: 22661 - protein, 10 aa, synthetic construct
  source 1..10: note = Seed: FLGTCRRCPA
FPGTCRRCPL

SEQ ID NO: 22662 - protein, 10 aa, synthetic construct
  source 1..10: note = Seed: FLGYFCTCYF
FPGYFCTCYY

SEQ ID NO: 22663 - protein, 9 aa, synthetic construct
  source 1..9: note = Seed: FLHFLPRVF
FPHFLPRVF

SEQ ID NO: 22664 - protein, 9 aa, synthetic construct
  source 1..9: note = Seed: FLHFLPRVF
FPHFLPRVL

SEQ ID NO: 22665 - protein, 9 aa, synthetic construct
  source 1..9: note = Seed: FLHFLPRVF
FPHFLPRVM

SEQ ID NO: 22666 - protein, 9 aa, synthetic construct
  source 1..9: note = Seed: FLHFLPRVF
FPHFLPRVW

SEQ ID NO: 22667 - protein, 9 aa, synthetic construct
  source 1..9: note = Seed: FLHFLPRVF
FPHFLPRVY

SEQ ID NO: 22668 - protein, 9 aa, synthetic construct
  source 1..9: note = Seed: FLHVTYVPA
FPHVTYVPA

SEQ ID NO: 22669 - protein, 9 aa, synthetic construct
  source 1..9: note = Seed: FLHVTYVPA
FPHVTYVPC

SEQ ID NO: 22670 - protein, 9 aa, synthetic construct
  source 1..9: note = Seed: FLHVTYVPA
FPHVTYVPG

SEQ ID NO: 22671 - protein, 9 aa, synthetic construct
  source 1..9: note = Seed: FLHVTYVPA
FPHVTYVPI

SEQ ID NO: 22672 - protein, 9 aa, synthetic construct
  source 1..9: note = Seed: FLHVTYVPA
FPHVTYVPL

SEQ ID NO: 22673 - protein, 9 aa, synthetic construct
  source 1..9: note = Seed: FLHVTYVPA
FPHVTYVPM

SEQ ID NO: 22674 - protein, 9 aa, synthetic construct
  source 1..9: note = Seed: FLHVTYVPA
FPHVTYVPP

SEQ ID NO: 22675 - protein, 9 aa, synthetic construct
  source 1..9: note = Seed: FLHVTYVPA
FPHVTYVPS

SEQ ID NO: 22676 - protein, 9 aa, synthetic construct
  source 1..9: note = Seed: FLHVTYVPA
FPHVTYVPT

SEQ ID NO: 22677 - protein, 9 aa, synthetic construct
  source 1..9: note = Seed: FLHVTYVPA
FPHVTYVPV

SEQ ID NO: 22678 - protein, 10 aa, synthetic construct
  source 1..10: note = Seed: FKIYSKHTPI
FPIYSKHTPA

SEQ ID NO: 22679 - protein, 10 aa, synthetic construct
  source 1..10: note = Seed: FKIYSKHTPI
FPIYSKHTPF

SEQ ID NO: 22680 - protein, 10 aa, synthetic construct
  source 1..10: note = Seed: FKIYSKHTPI
FPIYSKHTPI

SEQ ID NO: 22681 - protein, 10 aa, synthetic construct
  source 1..10: note = Seed: FKIYSKHTPI
FPIYSKHTPL

SEQ ID NO: 22682 - protein, 10 aa, synthetic construct
  source 1..10: note = Seed: FKIYSKHTPI
FPIYSKHTPM

SEQ ID NO: 22683 - protein, 10 aa, synthetic construct
  source 1..10: note = Seed: FKIYSKHTPI
FPIYSKHTPV

SEQ ID NO: 22684 - protein, 10 aa, synthetic construct
  source 1..10: note = Seed: FKIYSKHTPI
FPIYSKHTPY

SEQ ID NO: 22685 - protein, 8 aa, synthetic construct
  source 1..8: note = Seed: FVKHKHAF
FPKHKHAF

SEQ ID NO: 22686 - protein, 9 aa, synthetic construct
  source 1..9: note = Seed: FVKHKHAFL
FPKHKHAFA

SEQ ID NO: 22687 - protein, 9 aa, synthetic construct
  source 1..9: note = Seed: FVKHKHAFL
FPKHKHAFF

SEQ ID NO: 22688 - protein, 9 aa, synthetic construct
  source 1..9: note = Seed: FVKHKHAFL
FPKHKHAFI

SEQ ID NO: 22689 - protein, 9 aa, synthetic construct
  source 1..9: note = Seed: FVKHKHAFL
FPKHKHAFL

SEQ ID NO: 22690 - protein, 11 aa, synthetic construct
  source 1..11: note = Seed: FVKHKHAFLCL
FPKHKHAFLCL

SEQ ID NO: 22691 - protein, 10 aa, synthetic construct
  source 1..10: note = Seed: FVKHKHAFLC
FPKHKHAFLL

SEQ ID NO: 22692 - protein, 10 aa, synthetic construct
  source 1..10: note = Seed: FVKHKHAFLC
FPKHKHAFLM

SEQ ID NO: 22693 - protein, 9 aa, synthetic construct
  source 1..9: note = Seed: FVKHKHAFL
FPKHKHAFM

SEQ ID NO: 22694 - protein, 9 aa, synthetic construct
  source 1..9: note = Seed: FVKHKHAFL
FPKHKHAFV

SEQ ID NO: 22695 - protein, 8 aa, synthetic construct
  source 1..8: note = Seed: FVKHKHAF
FPKHKHAI

SEQ ID NO: 22696 - protein, 8 aa, synthetic construct
  source 1..8: note = Seed: FVKHKHAF
FPKHKHAL

SEQ ID NO: 22697 - protein, 8 aa, synthetic construct
  source 1..8: note = Seed: FVKHKHAF
FPKHKHAM

SEQ ID NO: 22698 - protein, 8 aa, synthetic construct
  source 1..8: note = Seed: FVKHKHAF
FPKHKHAV

SEQ ID NO: 22699 - protein, 10 aa, synthetic construct
  source 1..10: note = Seed: FPKSDGTGTI
FPKSDGTGTF

SEQ ID NO: 22700 - protein, 10 aa, synthetic construct
  source 1..10: note = Seed: FPKSDGTGTI
FPKSDGTGTL

SEQ ID NO: 22701 - protein, 10 aa, synthetic construct
  source 1..10: note = Seed: FPKSDGTGTI
FPKSDGTGTM

SEQ ID NO: 22702 - protein, 10 aa, synthetic construct
  source 1..10: note = Seed: FPKSDGTGTI
FPKSDGTGTW

SEQ ID NO: 22703 - protein, 9 aa, synthetic construct
  source 1..9: note = Seed: FPLCANGQV
FPLCANGQA

SEQ ID NO: 22704 - protein, 9 aa, synthetic construct
  source 1..9: note = Seed: FPLCANGQV
FPLCANGQF

SEQ ID NO: 22705 - protein, 9 aa, synthetic construct
  source 1..9: note = Seed: FPLCANGQV
FPLCANGQI

SEQ ID NO: 22706 - protein, 9 aa, synthetic construct
  source 1..9: note = Seed: FPLCANGQV
FPLCANGQL

SEQ ID NO: 22707 - protein, 9 aa, synthetic construct
  source 1..9: note = Seed: FPLCANGQV
FPLCANGQM

SEQ ID NO: 22708 - protein, 10 aa, synthetic construct
  source 1..10: note = Seed: FPLCANGQVF
FPLCANGQVI

SEQ ID NO: 22709 - protein, 10 aa, synthetic construct
  source 1..10: note = Seed: FPLCANGQVF
FPLCANGQVL

SEQ ID NO: 22710 - protein, 10 aa, synthetic construct
  source 1..10: note = Seed: FPLCANGQVF
FPLCANGQVM

SEQ ID NO: 22711 - protein, 10 aa, synthetic construct
  source 1..10: note = Seed: FPLCANGQVF
FPLCANGQVV

SEQ ID NO: 22712 - protein, 10 aa, synthetic construct
  source 1..10: note = Seed: FPLCANGQVF
FPLCANGQVW

SEQ ID NO: 22713 - protein, 10 aa, synthetic construct
  source 1..10: note = Seed: FPLCANGQVF
FPLCANGQVY

SEQ ID NO: 22714 - protein, 9 aa, synthetic construct
  source 1..9: note = Seed: FPLCANGQV
FPLCANGQY

SEQ ID NO: 22715 - protein, 10 aa, synthetic construct
  source 1..10: note = Seed: FKLKDCVMYA
FPLKDCVMYA

SEQ ID NO: 22716 - protein, 10 aa, synthetic construct
  source 1..10: note = Seed: FKLKDCVMYA
FPLKDCVMYI

SEQ ID NO: 22717 - protein, 10 aa, synthetic construct
  source 1..10: note = Seed: FKLKDCVMYA
FPLKDCVMYL

SEQ ID NO: 22718 - protein, 10 aa, synthetic construct
  source 1..10: note = Seed: FKLKDCVMYA
FPLKDCVMYM

SEQ ID NO: 22719 - protein, 10 aa, synthetic construct
  source 1..10: note = Seed: FKLKDCVMYA
FPLKDCVMYS

SEQ ID NO: 22720 - protein, 10 aa, synthetic construct
  source 1..10: note = Seed: FKLKDCVMYA
FPLKDCVMYT

SEQ ID NO: 22721 - protein, 10 aa, synthetic construct
  source 1..10: note = Seed: FKLKDCVMYA
FPLKDCVMYV

SEQ ID NO: 22722 - protein, 10 aa, synthetic construct
  source 1..10: note = Seed: FPLKLRGTAV
FPLKLRGTAA

SEQ ID NO: 22723 - protein, 10 aa, synthetic construct
  source 1..10: note = Seed: FPLKLRGTAV
FPLKLRGTAF

SEQ ID NO: 22724 - protein, 10 aa, synthetic construct
  source 1..10: note = Seed: FPLKLRGTAV
FPLKLRGTAI

SEQ ID NO: 22725 - protein, 10 aa, synthetic construct
  source 1..10: note = Seed: FPLKLRGTAV
FPLKLRGTAL

SEQ ID NO: 22726 - protein, 10 aa, synthetic construct
  source 1..10: note = Seed: FPLKLRGTAV
FPLKLRGTAM

SEQ ID NO: 22727 - protein, 11 aa, synthetic construct
  source 1..11: note = Seed: FPLKLRGTAVM
FPLKLRGTAVF

SEQ ID NO: 22728 - protein, 11 aa, synthetic construct
  source 1..11: note = Seed: FPLKLRGTAVM
FPLKLRGTAVL

SEQ ID NO: 22729 - protein, 11 aa, synthetic construct
  source 1..11: note = Seed: FPLKLRGTAVM
FPLKLRGTAVW

SEQ ID NO: 22730 - protein, 11 aa, synthetic construct
  source 1..11: note = Seed: FPLKLRGTAVM
FPLKLRGTAVY

SEQ ID NO: 22731 - protein, 10 aa, synthetic construct
  source 1..10: note = Seed: FPLKLRGTAV
FPLKLRGTAY

SEQ ID NO: 22732 - protein, 9 aa, synthetic construct
  source 1..9: note = Seed: FPLKLRGTA
FPLKLRGTF

SEQ ID NO: 22733 - protein, 9 aa, synthetic construct
  source 1..9: note = Seed: FPLKLRGTA
FPLKLRGTI

SEQ ID NO: 22734 - protein, 9 aa, synthetic construct
  source 1..9: note = Seed: FPLKLRGTA
FPLKLRGTL

SEQ ID NO: 22735 - protein, 9 aa, synthetic construct
  source 1..9: note = Seed: FPLKLRGTA
FPLKLRGTM

SEQ ID NO: 22736 - protein, 9 aa, synthetic construct
  source 1..9: note = Seed: FPLKLRGTA
FPLKLRGTS

SEQ ID NO: 22737 - protein, 9 aa, synthetic construct
  source 1..9: note = Seed: FPLKLRGTA
FPLKLRGTT

SEQ ID NO: 22738 - protein, 9 aa, synthetic construct
  source 1..9: note = Seed: FPLKLRGTA
FPLKLRGTV

SEQ ID NO: 22739 - protein, 9 aa, synthetic construct
  source 1..9: note = Seed: FPLKLRGTA
FPLKLRGTY

SEQ ID NO: 22740 - protein, 10 aa, synthetic construct
  source 1..10: note = Seed: FLLNKEMYLK
FPLNKEMYLA

SEQ ID NO: 22741 - protein, 10 aa, synthetic construct
  source 1..10: note = Seed: FLLNKEMYLK
FPLNKEMYLI

SEQ ID NO: 22742 - protein, 10 aa, synthetic construct
  source 1..10: note = Seed: FLLNKEMYLK
FPLNKEMYLL

SEQ ID NO: 22743 - protein, 10 aa, synthetic construct
  source 1..10: note = Seed: FLLNKEMYLK
FPLNKEMYLM

SEQ ID NO: 22744 - protein, 10 aa, synthetic construct
  source 1..10: note = Seed: FLLNKEMYLK
FPLNKEMYLV

SEQ ID NO: 22745 - protein, 9 aa, synthetic construct
  source 1..9: note = Seed: FYLTNDVSF
FPLTNDVSA

SEQ ID NO: 22746 - protein, 9 aa, synthetic construct
  source 1..9: note = Seed: FYLTNDVSF
FPLTNDVSF

SEQ ID NO: 22747 - protein, 10 aa, synthetic construct
  source 1..10: note = Seed: FYLTNDVSFL
FPLTNDVSFA

SEQ ID NO: 22748 - protein, 10 aa, synthetic construct
  source 1..10: note = Seed: FYLTNDVSFL
FPLTNDVSFI

SEQ ID NO: 22749 - protein, 10 aa, synthetic construct
  source 1..10: note = Seed: FYLTNDVSFL
FPLTNDVSFL

SEQ ID NO: 22750 - protein, 11 aa, synthetic construct
  source 1..11: note = Seed: FYLTNDVSFLA
FPLTNDVSFLL

SEQ ID NO: 22751 - protein, 11 aa, synthetic construct
  source 1..11: note = Seed: FYLTNDVSFLA
FPLTNDVSFLV

SEQ ID NO: 22752 - protein, 10 aa, synthetic construct
  source 1..10: note = Seed: FYLTNDVSFL
FPLTNDVSFM

SEQ ID NO: 22753 - protein, 10 aa, synthetic construct
  source 1..10: note = Seed: FYLTNDVSFL
FPLTNDVSFV

SEQ ID NO: 22754 - protein, 9 aa, synthetic construct
  source 1..9: note = Seed: FYLTNDVSF
FPLTNDVSH

SEQ ID NO: 22755 - protein, 9 aa, synthetic construct
  source 1..9: note = Seed: FYLTNDVSF
FPLTNDVSI

SEQ ID NO: 22756 - protein, 9 aa, synthetic construct
  source 1..9: note = Seed: FYLTNDVSF
FPLTNDVSL

SEQ ID NO: 22757 - protein, 9 aa, synthetic construct
  source 1..9: note = Seed: FYLTNDVSF
FPLTNDVSM

SEQ ID NO: 22758 - protein, 9 aa, synthetic construct
  source 1..9: note = Seed: FYLTNDVSF
FPLTNDVSV

SEQ ID NO: 22759 - protein, 9 aa, synthetic construct
  source 1..9: note = Seed: FYLTNDVSF
FPLTNDVSW

SEQ ID NO: 22760 - protein, 9 aa, synthetic construct
  source 1..9: note = Seed: FYLTNDVSF
FPLTNDVSY

SEQ ID NO: 22761 - protein, 10 aa, synthetic construct
  source 1..10: note = Seed: FQLTPIAVQM
FPLTPIAVQA

SEQ ID NO: 22762 - protein, 10 aa, synthetic construct
  source 1..10: note = Seed: FQLTPIAVQM
FPLTPIAVQI

SEQ ID NO: 22763 - protein, 10 aa, synthetic construct
  source 1..10: note = Seed: FQLTPIAVQM
FPLTPIAVQL

SEQ ID NO: 22764 - protein, 10 aa, synthetic construct
  source 1..10: note = Seed: FQLTPIAVQM
FPLTPIAVQM

SEQ ID NO: 22765 - protein, 10 aa, synthetic construct
  source 1..10: note = Seed: FQLTPIAVQM
FPLTPIAVQV

SEQ ID NO: 22766 - protein, 10 aa, synthetic construct
  source 1..10: note = Seed: FELTSMKYFV
FPLTSMKYFA

SEQ ID NO: 22767 - protein, 10 aa, synthetic construct
  source 1..10: note = Seed: FELTSMKYFV
FPLTSMKYFI

SEQ ID NO: 22768 - protein, 10 aa, synthetic construct
  source 1..10: note = Seed: FELTSMKYFV
FPLTSMKYFL

SEQ ID NO: 22769 - protein, 10 aa, synthetic construct
  source 1..10: note = Seed: FELTSMKYFV
FPLTSMKYFM

SEQ ID NO: 22770 - protein, 10 aa, synthetic construct
  source 1..10: note = Seed: FELTSMKYFV
FPLTSMKYFV

SEQ ID NO: 22771 - protein, 10 aa, synthetic construct
  source 1..10: note = Seed: FGLVAEWFLA
FPLVAEWFLA

SEQ ID NO: 22772 - protein, 11 aa, synthetic construct
  source 1..11: note = Seed: FGLVAEWFLAY
FPLVAEWFLAF

SEQ ID NO: 22773 - protein, 11 aa, synthetic construct
  source 1..11: note = Seed: FGLVAEWFLAY
FPLVAEWFLAL

SEQ ID NO: 22774 - protein, 11 aa, synthetic construct
  source 1..11: note = Seed: FGLVAEWFLAY
FPLVAEWFLAM

SEQ ID NO: 22775 - protein, 11 aa, synthetic construct
  source 1..11: note = Seed: FGLVAEWFLAY
FPLVAEWFLAY

SEQ ID NO: 22776 - protein, 10 aa, synthetic construct
  source 1..10: note = Seed: FGLVAEWFLA
FPLVAEWFLI

SEQ ID NO: 22777 - protein, 10 aa, synthetic construct
  source 1..10: note = Seed: FGLVAEWFLA
FPLVAEWFLL

SEQ ID NO: 22778 - protein, 10 aa, synthetic construct
  source 1..10: note = Seed: FGLVAEWFLA
FPLVAEWFLM

SEQ ID NO: 22779 - protein, 10 aa, synthetic construct
  source 1..10: note = Seed: FGLVAEWFLA
FPLVAEWFLV

SEQ ID NO: 22780 - protein, 10 aa, synthetic construct
  source 1..10: note = Seed: FVLWAHGFEL
FPLWAHGFEA

SEQ ID NO: 22781 - protein, 10 aa, synthetic construct
  source 1..10: note = Seed: FVLWAHGFEL
FPLWAHGFEF

SEQ ID NO: 22782 - protein, 10 aa, synthetic construct
  source 1..10: note = Seed: FVLWAHGFEL
FPLWAHGFEI

SEQ ID NO: 22783 - protein, 10 aa, synthetic construct
  source 1..10: note = Seed: FVLWAHGFEL
FPLWAHGFEL

SEQ ID NO: 22784 - protein, 11 aa, synthetic construct
  source 1..11: note = Seed: FVLWAHGFELT
FPLWAHGFELA

SEQ ID NO: 22785 - protein, 11 aa, synthetic construct
  source 1..11: note = Seed: FVLWAHGFELT
FPLWAHGFELC

SEQ ID NO: 22786 - protein, 11 aa, synthetic construct
  source 1..11: note = Seed: FVLWAHGFELT
FPLWAHGFELD

SEQ ID NO: 22787 - protein, 11 aa, synthetic construct
  source 1..11: note = Seed: FVLWAHGFELT
FPLWAHGFELE

SEQ ID NO: 22788 - protein, 11 aa, synthetic construct
  source 1..11: note = Seed: FVLWAHGFELT
FPLWAHGFELF

SEQ ID NO: 22789 - protein, 11 aa, synthetic construct
  source 1..11: note = Seed: FVLWAHGFELT
FPLWAHGFELG

SEQ ID NO: 22790 - protein, 11 aa, synthetic construct
  source 1..11: note = Seed: FVLWAHGFELT
FPLWAHGFELH

SEQ ID NO: 22791 - protein, 11 aa, synthetic construct
  source 1..11: note = Seed: FVLWAHGFELT
FPLWAHGFELI

SEQ ID NO: 22792 - protein, 11 aa, synthetic construct
  source 1..11: note = Seed: FVLWAHGFELT
FPLWAHGFELK

SEQ ID NO: 22793 - protein, 11 aa, synthetic construct
  source 1..11: note = Seed: FVLWAHGFELT
FPLWAHGFELL

SEQ ID NO: 22794 - protein, 11 aa, synthetic construct
  source 1..11: note = Seed: FVLWAHGFELT
FPLWAHGFELM

SEQ ID NO: 22795 - protein, 11 aa, synthetic construct
  source 1..11: note = Seed: FVLWAHGFELT
FPLWAHGFELN

SEQ ID NO: 22796 - protein, 11 aa, synthetic construct
  source 1..11: note = Seed: FVLWAHGFELT
FPLWAHGFELP

SEQ ID NO: 22797 - protein, 11 aa, synthetic construct
  source 1..11: note = Seed: FVLWAHGFELT
FPLWAHGFELQ

SEQ ID NO: 22798 - protein, 11 aa, synthetic construct
  source 1..11: note = Seed: FVLWAHGFELT
FPLWAHGFELR

SEQ ID NO: 22799 - protein, 11 aa, synthetic construct
  source 1..11: note = Seed: FVLWAHGFELT
FPLWAHGFELS

SEQ ID NO: 22800 - protein, 11 aa, synthetic construct
  source 1..11: note = Seed: FVLWAHGFELT
FPLWAHGFELT

SEQ ID NO: 22801 - protein, 11 aa, synthetic construct
  source 1..11: note = Seed: FVLWAHGFELT
FPLWAHGFELV

SEQ ID NO: 22802 - protein, 11 aa, synthetic construct
  source 1..11: note = Seed: FVLWAHGFELT
FPLWAHGFELW

SEQ ID NO: 22803 - protein, 11 aa, synthetic construct
  source 1..11: note = Seed: FVLWAHGFELT
FPLWAHGFELY

SEQ ID NO: 22804 - protein, 10 aa, synthetic construct
  source 1..10: note = Seed: FVLWAHGFEL
FPLWAHGFEM

SEQ ID NO: 22805 - protein, 10 aa, synthetic construct
  source 1..10: note = Seed: FVLWAHGFEL
FPLWAHGFES

SEQ ID NO: 22806 - protein, 10 aa, synthetic construct
  source 1..10: note = Seed: FVLWAHGFEL
FPLWAHGFET

SEQ ID NO: 22807 - protein, 10 aa, synthetic construct
  source 1..10: note = Seed: FVLWAHGFEL
FPLWAHGFEV

SEQ ID NO: 22808 - protein, 10 aa, synthetic construct
  source 1..10: note = Seed: FSMMILSDDA
FPMMILSDDL

SEQ ID NO: 22809 - protein, 10 aa, synthetic construct
  source 1..10: note = Seed: FSMMILSDDA
FPMMILSDDV

SEQ ID NO: 22810 - protein, 9 aa, synthetic construct
  source 1..9: note = Seed: FAMQMAYRF
FPMQMAYRA

SEQ ID NO: 22811 - protein, 9 aa, synthetic construct
  source 1..9: note = Seed: FAMQMAYRF
FPMQMAYRF

SEQ ID NO: 22812 - protein, 9 aa, synthetic construct
  source 1..9: note = Seed: FAMQMAYRF
FPMQMAYRH

SEQ ID NO: 22813 - protein, 9 aa, synthetic construct
  source 1..9: note = Seed: FAMQMAYRF
FPMQMAYRI

SEQ ID NO: 22814 - protein, 9 aa, synthetic construct
  source 1..9: note = Seed: FAMQMAYRF
FPMQMAYRL

SEQ ID NO: 22815 - protein, 9 aa, synthetic construct
  source 1..9: note = Seed: FAMQMAYRF
FPMQMAYRM

SEQ ID NO: 22816 - protein, 9 aa, synthetic construct
  source 1..9: note = Seed: FAMQMAYRF
FPMQMAYRQ

SEQ ID NO: 22817 - protein, 9 aa, synthetic construct
  source 1..9: note = Seed: FAMQMAYRF
FPMQMAYRS

SEQ ID NO: 22818 - protein, 9 aa, synthetic construct
  source 1..9: note = Seed: FAMQMAYRF
FPMQMAYRT

SEQ ID NO: 22819 - protein, 9 aa, synthetic construct
  source 1..9: note = Seed: FAMQMAYRF
FPMQMAYRV

SEQ ID NO: 22820 - protein, 9 aa, synthetic construct
  source 1..9: note = Seed: FAMQMAYRF
FPMQMAYRW

SEQ ID NO: 22821 - protein, 9 aa, synthetic construct
  source 1..9: note = Seed: FAMQMAYRF
FPMQMAYRY

SEQ ID NO: 22822 - protein, 8 aa, synthetic construct
  source 1..8: note = Seed: FDMSKFPL
FPMSKFPA

SEQ ID NO: 22823 - protein, 8 aa, synthetic construct
  source 1..8: note = Seed: FDMSKFPL
FPMSKFPF

SEQ ID NO: 22824 - protein, 8 aa, synthetic construct
  source 1..8: note = Seed: FDMSKFPL
FPMSKFPI

SEQ ID NO: 22825 - protein, 8 aa, synthetic construct
  source 1..8: note = Seed: FDMSKFPL
FPMSKFPL

SEQ ID NO: 22826 - protein, 10 aa, synthetic construct
  source 1..10: note = Seed: FDMSKFPLKL
FPMSKFPLKA

SEQ ID NO: 22827 - protein, 10 aa, synthetic construct
  source 1..10: note = Seed: FDMSKFPLKL
FPMSKFPLKI

SEQ ID NO: 22828 - protein, 10 aa, synthetic construct
  source 1..10: note = Seed: FDMSKFPLKL
FPMSKFPLKL

SEQ ID NO: 22829 - protein, 10 aa, synthetic construct
  source 1..10: note = Seed: FDMSKFPLKL
FPMSKFPLKV

SEQ ID NO: 22830 - protein, 8 aa, synthetic construct
  source 1..8: note = Seed: FDMSKFPL
FPMSKFPM

SEQ ID NO: 22831 - protein, 8 aa, synthetic construct
  source 1..8: note = Seed: FDMSKFPL
FPMSKFPV

SEQ ID NO: 22832 - protein, 10 aa, synthetic construct
  source 1..10: note = Seed: FNMVYMPASW
FPMVYMPASF

SEQ ID NO: 22833 - protein, 10 aa, synthetic construct
  source 1..10: note = Seed: FNMVYMPASW
FPMVYMPASI

SEQ ID NO: 22834 - protein, 10 aa, synthetic construct
  source 1..10: note = Seed: FNMVYMPASW
FPMVYMPASL

SEQ ID NO: 22835 - protein, 10 aa, synthetic construct
  source 1..10: note = Seed: FNMVYMPASW
FPMVYMPASM

SEQ ID NO: 22836 - protein, 10 aa, synthetic construct
  source 1..10: note = Seed: FNMVYMPASW
FPMVYMPASW

SEQ ID NO: 22837 - protein, 10 aa, synthetic construct
  source 1..10: note = Seed: FNMVYMPASW
FPMVYMPASY

SEQ ID NO: 22838 - protein, 9 aa, synthetic construct
  source 1..9: note = Seed: FENKTTLPV
FPNKTTLPF

SEQ ID NO: 22839 - protein, 9 aa, synthetic construct
  source 1..9: note = Seed: FENKTTLPV
FPNKTTLPL

SEQ ID NO: 22840 - protein, 9 aa, synthetic construct
  source 1..9: note = Seed: FVNLKQLPF
FPNLKQLPA

SEQ ID NO: 22841 - protein, 9 aa, synthetic construct
  source 1..9: note = Seed: FVNLKQLPF
FPNLKQLPF

SEQ ID NO: 22842 - protein, 9 aa, synthetic construct
  source 1..9: note = Seed: FVNLKQLPF
FPNLKQLPH

SEQ ID NO: 22843 - protein, 9 aa, synthetic construct
  source 1..9: note = Seed: FVNLKQLPF
FPNLKQLPI

SEQ ID NO: 22844 - protein, 9 aa, synthetic construct
  source 1..9: note = Seed: FVNLKQLPF
FPNLKQLPL

SEQ ID NO: 22845 - protein, 9 aa, synthetic construct
  source 1..9: note = Seed: FVNLKQLPF
FPNLKQLPM

SEQ ID NO: 22846 - protein, 9 aa, synthetic construct
  source 1..9: note = Seed: FVNLKQLPF
FPNLKQLPV

SEQ ID NO: 22847 - protein, 9 aa, synthetic construct
  source 1..9: note = Seed: FVNLKQLPF
FPNLKQLPW

SEQ ID NO: 22848 - protein, 9 aa, synthetic construct
  source 1..9: note = Seed: FVNLKQLPF
FPNLKQLPY

SEQ ID NO: 22849 - protein, 9 aa, synthetic construct
  source 1..9: note = Seed: FTNVYADSF
FPNVYADSA

SEQ ID NO: 22850 - protein, 9 aa, synthetic construct
  source 1..9: note = Seed: FTNVYADSF
FPNVYADSF

SEQ ID NO: 22851 - protein, 11 aa, synthetic construct
  source 1..11: note = Seed: FTNVYADSFVI
FPNVYADSFVV

SEQ ID NO: 22852 - protein, 9 aa, synthetic construct
  source 1..9: note = Seed: FTNVYADSF
FPNVYADSH

SEQ ID NO: 22853 - protein, 9 aa, synthetic construct
  source 1..9: note = Seed: FTNVYADSF
FPNVYADSI

SEQ ID NO: 22854 - protein, 9 aa, synthetic construct
  source 1..9: note = Seed: FTNVYADSF
FPNVYADSL

SEQ ID NO: 22855 - protein, 9 aa, synthetic construct
  source 1..9: note = Seed: FTNVYADSF
FPNVYADSM

SEQ ID NO: 22856 - protein, 9 aa, synthetic construct
  source 1..9: note = Seed: FTNVYADSF
FPNVYADSV

SEQ ID NO: 22857 - protein, 9 aa, synthetic construct
  source 1..9: note = Seed: FTNVYADSF
FPNVYADSW

SEQ ID NO: 22858 - protein, 9 aa, synthetic construct
  source 1..9: note = Seed: FTNVYADSF
FPNVYADSY

SEQ ID NO: 22859 - protein, 10 aa, synthetic construct
  source 1..10: note = Seed: FFPDLNGDVV
FPPDLNGDVL

SEQ ID NO: 22860 - protein, 10 aa, synthetic construct
  source 1..10: note = Seed: FTPFDVVRQC
FPPFDVVRQA

SEQ ID NO: 22861 - protein, 10 aa, synthetic construct
  source 1..10: note = Seed: FLPFFSNVTW
FPPFFSNVTF

SEQ ID NO: 22862 - protein, 10 aa, synthetic construct
  source 1..10: note = Seed: FLPFFSNVTW
FPPFFSNVTH

SEQ ID NO: 22863 - protein, 10 aa, synthetic construct
  source 1..10: note = Seed: FLPFFSNVTW
FPPFFSNVTL

SEQ ID NO: 22864 - protein, 10 aa, synthetic construct
  source 1..10: note = Seed: FLPFFSNVTW
FPPFFSNVTM

SEQ ID NO: 22865 - protein, 10 aa, synthetic construct
  source 1..10: note = Seed: FLPFFSNVTW
FPPFFSNVTW

SEQ ID NO: 22866 - protein, 11 aa, synthetic construct
  source 1..11: note = Seed: FLPFFSNVTWF
FPPFFSNVTWF

SEQ ID NO: 22867 - protein, 11 aa, synthetic construct
  source 1..11: note = Seed: FLPFFSNVTWF
FPPFFSNVTWW

SEQ ID NO: 22868 - protein, 10 aa, synthetic construct
  source 1..10: note = Seed: FLPFFSNVTW
FPPFFSNVTY

SEQ ID NO: 22869 - protein, 10 aa, synthetic construct
  source 1..10: note = Seed: FTPLVPFWIT
FPPLVPFWIA

SEQ ID NO: 22870 - protein, 11 aa, synthetic construct
  source 1..11: note = Seed: FTPLVPFWITI
FPPLVPFWITV

SEQ ID NO: 22871 - protein, 10 aa, synthetic construct
  source 1..10: note = Seed: FLPRVFSAVG
FPPRVFSAVF

SEQ ID NO: 22872 - protein, 10 aa, synthetic construct
  source 1..10: note = Seed: FLPRVFSAVG
FPPRVFSAVI

SEQ ID NO: 22873 - protein, 10 aa, synthetic construct
  source 1..10: note = Seed: FLPRVFSAVG
FPPRVFSAVL

SEQ ID NO: 22874 - protein, 10 aa, synthetic construct
  source 1..10: note = Seed: FLPRVFSAVG
FPPRVFSAVM

SEQ ID NO: 22875 - protein, 10 aa, synthetic construct
  source 1..10: note = Seed: FLPRVFSAVG
FPPRVFSAVV

SEQ ID NO: 22876 - protein, 9 aa, synthetic construct
  source 1..9: note = Seed: FAPSASAFF
FPPSASAFF

SEQ ID NO: 22877 - protein, 9 aa, synthetic construct
  source 1..9: note = Seed: FAPSASAFF
FPPSASAFM

SEQ ID NO: 22878 - protein, 9 aa, synthetic construct
  source 1..9: note = Seed: FAPSASAFF
FPPSASAFY

SEQ ID NO: 22879 - protein, 8 aa, synthetic construct
  source 1..8: note = Seed: FAPSASAF
FPPSASAY

SEQ ID NO: 22880 - protein, 9 aa, synthetic construct
  source 1..9: note = Seed: FPQSAPHGV
FPQSAPHGA

SEQ ID NO: 22881 - protein, 9 aa, synthetic construct
  source 1..9: note = Seed: FPQSAPHGV
FPQSAPHGF

SEQ ID NO: 22882 - protein, 9 aa, synthetic construct
  source 1..9: note = Seed: FPQSAPHGV
FPQSAPHGI

SEQ ID NO: 22883 - protein, 9 aa, synthetic construct
  source 1..9: note = Seed: FPQSAPHGV
FPQSAPHGL

SEQ ID NO: 22884 - protein, 9 aa, synthetic construct
  source 1..9: note = Seed: FPQSAPHGV
FPQSAPHGM

SEQ ID NO: 22885 - protein, 10 aa, synthetic construct
  source 1..10: note = Seed: FPQSAPHGVV
FPQSAPHGVA

SEQ ID NO: 22886 - protein, 10 aa, synthetic construct
  source 1..10: note = Seed: FPQSAPHGVV
FPQSAPHGVF

SEQ ID NO: 22887 - protein, 10 aa, synthetic construct
  source 1..10: note = Seed: FPQSAPHGVV
FPQSAPHGVI

SEQ ID NO: 22888 - protein, 10 aa, synthetic construct
  source 1..10: note = Seed: FPQSAPHGVV
FPQSAPHGVL

SEQ ID NO: 22889 - protein, 10 aa, synthetic construct
  source 1..10: note = Seed: FPQSAPHGVV
FPQSAPHGVM

SEQ ID NO: 22890 - protein, 11 aa, synthetic construct
  source 1..11: note = Seed: FPQSAPHGVVF
FPQSAPHGVVL

SEQ ID NO: 22891 - protein, 11 aa, synthetic construct
  source 1..11: note = Seed: FPQSAPHGVVF
FPQSAPHGVVM

SEQ ID NO: 22892 - protein, 11 aa, synthetic construct
  source 1..11: note = Seed: FPQSAPHGVVF
FPQSAPHGVVW

SEQ ID NO: 22893 - protein, 11 aa, synthetic construct
  source 1..11: note = Seed: FPQSAPHGVVF
FPQSAPHGVVY

SEQ ID NO: 22894 - protein, 9 aa, synthetic construct
  source 1..9: note = Seed: FPQSAPHGV
FPQSAPHGY

SEQ ID NO: 22895 - protein, 10 aa, synthetic construct
  source 1..10: note = Seed: FTQSRNLQEF
FPQSRNLQEF

SEQ ID NO: 22896 - protein, 8 aa, synthetic construct
  source 1..8: note = Seed: FPREGVFV
FPREGVFL

SEQ ID NO: 22897 - protein, 9 aa, synthetic construct
  source 1..9: note = Seed: FPREGVFVS
FPREGVFVA

SEQ ID NO: 22898 - protein, 9 aa, synthetic construct
  source 1..9: note = Seed: FPREGVFVS
FPREGVFVC

SEQ ID NO: 22899 - protein, 9 aa, synthetic construct
  source 1..9: note = Seed: FPREGVFVS
FPREGVFVF

SEQ ID NO: 22900 - protein, 9 aa, synthetic construct
  source 1..9: note = Seed: FPREGVFVS
FPREGVFVG

SEQ ID NO: 22901 - protein, 9 aa, synthetic construct
  source 1..9: note = Seed: FPREGVFVS
FPREGVFVH

SEQ ID NO: 22902 - protein, 9 aa, synthetic construct
  source 1..9: note = Seed: FPREGVFVS
FPREGVFVI

SEQ ID NO: 22903 - protein, 9 aa, synthetic construct
  source 1..9: note = Seed: FPREGVFVS
FPREGVFVL

SEQ ID NO: 22904 - protein, 9 aa, synthetic construct
  source 1..9: note = Seed: FPREGVFVS
FPREGVFVM

SEQ ID NO: 22905 - protein, 9 aa, synthetic construct
  source 1..9: note = Seed: FPREGVFVS
FPREGVFVP

SEQ ID NO: 22906 - protein, 10 aa, synthetic construct
  source 1..10: note = Seed: FPREGVFVSN
FPREGVFVSA

SEQ ID NO: 22907 - protein, 10 aa, synthetic construct
  source 1..10: note = Seed: FPREGVFVSN
FPREGVFVSC

SEQ ID NO: 22908 - protein, 10 aa, synthetic construct
  source 1..10: note = Seed: FPREGVFVSN
FPREGVFVSI

SEQ ID NO: 22909 - protein, 10 aa, synthetic construct
  source 1..10: note = Seed: FPREGVFVSN
FPREGVFVSP

SEQ ID NO: 22910 - protein, 10 aa, synthetic construct
  source 1..10: note = Seed: FPREGVFVSN
FPREGVFVSS

SEQ ID NO: 22911 - protein, 10 aa, synthetic construct
  source 1..10: note = Seed: FPREGVFVSN
FPREGVFVST

SEQ ID NO: 22912 - protein, 10 aa, synthetic construct
  source 1..10: note = Seed: FPREGVFVSN
FPREGVFVSV

SEQ ID NO: 22913 - protein, 9 aa, synthetic construct
  source 1..9: note = Seed: FPREGVFVS
FPREGVFVT

SEQ ID NO: 22914 - protein, 9 aa, synthetic construct
  source 1..9: note = Seed: FPREGVFVS
FPREGVFVV

SEQ ID NO: 22915 - protein, 9 aa, synthetic construct
  source 1..9: note = Seed: FPREGVFVS
FPREGVFVW

SEQ ID NO: 22916 - protein, 9 aa, synthetic construct
  source 1..9: note = Seed: FPREGVFVS
FPREGVFVY

SEQ ID NO: 22917 - protein, 10 aa, synthetic construct
  source 1..10: note = Seed: FTRFFYVLGL
FPRFFYVLGK

SEQ ID NO: 22918 - protein, 10 aa, synthetic construct
  source 1..10: note = Seed: FTRFFYVLGL
FPRFFYVLGL

SEQ ID NO: 22919 - protein, 9 aa, synthetic construct
  source 1..9: note = Seed: FISAARQGF
FPSAARQGF

SEQ ID NO: 22920 - protein, 9 aa, synthetic construct
  source 1..9: note = Seed: FISAARQGF
FPSAARQGL

SEQ ID NO: 22921 - protein, 9 aa, synthetic construct
  source 1..9: note = Seed: FISAARQGF
FPSAARQGM

SEQ ID NO: 22922 - protein, 9 aa, synthetic construct
  source 1..9: note = Seed: FISAARQGF
FPSAARQGY

SEQ ID NO: 22923 - protein, 9 aa, synthetic construct
  source 1..9: note = Seed: FTSDYYQLY
FPSDYYQLA

SEQ ID NO: 22924 - protein, 9 aa, synthetic construct
  source 1..9: note = Seed: FTSDYYQLY
FPSDYYQLF

SEQ ID NO: 22925 - protein, 9 aa, synthetic construct
  source 1..9: note = Seed: FTSDYYQLY
FPSDYYQLH

SEQ ID NO: 22926 - protein, 9 aa, synthetic construct
  source 1..9: note = Seed: FTSDYYQLY
FPSDYYQLL

SEQ ID NO: 22927 - protein, 9 aa, synthetic construct
  source 1..9: note = Seed: FTSDYYQLY
FPSDYYQLM

SEQ ID NO: 22928 - protein, 9 aa, synthetic construct
  source 1..9: note = Seed: FTSDYYQLY
FPSDYYQLW

SEQ ID NO: 22929 - protein, 9 aa, synthetic construct
  source 1..9: note = Seed: FTSDYYQLY
FPSDYYQLY

SEQ ID NO: 22930 - protein, 10 aa, synthetic construct
  source 1..10: note = Seed: FTSDYYQLYS
FPSDYYQLYF

SEQ ID NO: 22931 - protein, 10 aa, synthetic construct
  source 1..10: note = Seed: FTSDYYQLYS
FPSDYYQLYM

SEQ ID NO: 22932 - protein, 10 aa, synthetic construct
  source 1..10: note = Seed: FTSDYYQLYS
FPSDYYQLYY

SEQ ID NO: 22933 - protein, 8 aa, synthetic construct
  source 1..8: note = Seed: FASFYYVW
FPSFYYVW

SEQ ID NO: 22934 - protein, 9 aa, synthetic construct
  source 1..9: note = Seed: FASFYYVWK
FPSFYYVWR

SEQ ID NO: 22935 - protein, 9 aa, synthetic construct
  source 1..9: note = Seed: FVSLAIDAY
FPSLAIDAA

SEQ ID NO: 22936 - protein, 9 aa, synthetic construct
  source 1..9: note = Seed: FVSLAIDAY
FPSLAIDAF

SEQ ID NO: 22937 - protein, 9 aa, synthetic construct
  source 1..9: note = Seed: FVSLAIDAY
FPSLAIDAG

SEQ ID NO: 22938 - protein, 9 aa, synthetic construct
  source 1..9: note = Seed: FVSLAIDAY
FPSLAIDAH

SEQ ID NO: 22939 - protein, 9 aa, synthetic construct
  source 1..9: note = Seed: FVSLAIDAY
FPSLAIDAI

SEQ ID NO: 22940 - protein, 9 aa, synthetic construct
  source 1..9: note = Seed: FVSLAIDAY
FPSLAIDAL

SEQ ID NO: 22941 - protein, 9 aa, synthetic construct
  source 1..9: note = Seed: FVSLAIDAY
FPSLAIDAM

SEQ ID NO: 22942 - protein, 9 aa, synthetic construct
  source 1..9: note = Seed: FVSLAIDAY
FPSLAIDAQ

SEQ ID NO: 22943 - protein, 9 aa, synthetic construct
  source 1..9: note = Seed: FVSLAIDAY
FPSLAIDAS

SEQ ID NO: 22944 - protein, 9 aa, synthetic construct
  source 1..9: note = Seed: FVSLAIDAY
FPSLAIDAT

SEQ ID NO: 22945 - protein, 9 aa, synthetic construct
  source 1..9: note = Seed: FVSLAIDAY
FPSLAIDAV

SEQ ID NO: 22946 - protein, 9 aa, synthetic construct
  source 1..9: note = Seed: FVSLAIDAY
FPSLAIDAW

SEQ ID NO: 22947 - protein, 9 aa, synthetic construct
  source 1..9: note = Seed: FVSLAIDAY
FPSLAIDAY

SEQ ID NO: 22948 - protein, 9 aa, synthetic construct
  source 1..9: note = Seed: FVSNGTHWF
FPSNGTHWF

SEQ ID NO: 22949 - protein, 9 aa, synthetic construct
  source 1..9: note = Seed: FVSNGTHWF
FPSNGTHWH

SEQ ID NO: 22950 - protein, 9 aa, synthetic construct
  source 1..9: note = Seed: FVSNGTHWF
FPSNGTHWL

SEQ ID NO: 22951 - protein, 9 aa, synthetic construct
  source 1..9: note = Seed: FVSNGTHWF
FPSNGTHWM

SEQ ID NO: 22952 - protein, 9 aa, synthetic construct
  source 1..9: note = Seed: FVSNGTHWF
FPSNGTHWW

SEQ ID NO: 22953 - protein, 9 aa, synthetic construct
  source 1..9: note = Seed: FVSNGTHWF
FPSNGTHWY

SEQ ID NO: 22954 - protein, 9 aa, synthetic construct
  source 1..9: note = Seed: FISNSWLMW
FPSNSWLMF

SEQ ID NO: 22955 - protein, 9 aa, synthetic construct
  source 1..9: note = Seed: FISNSWLMW
FPSNSWLMI

SEQ ID NO: 22956 - protein, 9 aa, synthetic construct
  source 1..9: note = Seed: FISNSWLMW
FPSNSWLML

SEQ ID NO: 22957 - protein, 9 aa, synthetic construct
  source 1..9: note = Seed: FISNSWLMW
FPSNSWLMM

SEQ ID NO: 22958 - protein, 9 aa, synthetic construct
  source 1..9: note = Seed: FISNSWLMW
FPSNSWLMW

SEQ ID NO: 22959 - protein, 9 aa, synthetic construct
  source 1..9: note = Seed: FISNSWLMW
FPSNSWLMY

SEQ ID NO: 22960 - protein, 9 aa, synthetic construct
  source 1..9: note = Seed: FSSNVANYQ
FPSNVANYK

SEQ ID NO: 22961 - protein, 10 aa, synthetic construct
  source 1..10: note = Seed: FSSNVANYQK
FPSNVANYQR

SEQ ID NO: 22962 - protein, 9 aa, synthetic construct
  source 1..9: note = Seed: FSSNVANYQ
FPSNVANYR

SEQ ID NO: 22963 - protein, 9 aa, synthetic construct
  source 1..9: note = Seed: FFSNVTWFH
FPSNVTWFR

SEQ ID NO: 22964 - protein, 9 aa, synthetic construct
  source 1..9: note = Seed: FFSNVTWFH
FPSNVTWFY

SEQ ID NO: 22965 - protein, 11 aa, synthetic construct
  source 1..11: note = Seed: FISPYNSQNAV
FPSPYNSQNAA

SEQ ID NO: 22966 - protein, 11 aa, synthetic construct
  source 1..11: note = Seed: FISPYNSQNAV
FPSPYNSQNAL

SEQ ID NO: 22967 - protein, 11 aa, synthetic construct
  source 1..11: note = Seed: FISPYNSQNAV
FPSPYNSQNAM

SEQ ID NO: 22968 - protein, 10 aa, synthetic construct
  source 1..10: note = Seed: FFSYFAVHFI
FPSYFAVHFA

SEQ ID NO: 22969 - protein, 10 aa, synthetic construct
  source 1..10: note = Seed: FFSYFAVHFI
FPSYFAVHFF

SEQ ID NO: 22970 - protein, 10 aa, synthetic construct
  source 1..10: note = Seed: FFSYFAVHFI
FPSYFAVHFI

SEQ ID NO: 22971 - protein, 10 aa, synthetic construct
  source 1..10: note = Seed: FFSYFAVHFI
FPSYFAVHFV

SEQ ID NO: 22972 - protein, 10 aa, synthetic construct
  source 1..10: note = Seed: FFSYFAVHFI
FPSYFAVHFW

SEQ ID NO: 22973 - protein, 10 aa, synthetic construct
  source 1..10: note = Seed: FFSYFAVHFI
FPSYFAVHFY

SEQ ID NO: 22974 - protein, 9 aa, synthetic construct
  source 1..9: note = Seed: FVTHSKGLY
FPTHSKGLF

SEQ ID NO: 22975 - protein, 9 aa, synthetic construct
  source 1..9: note = Seed: FVTHSKGLY
FPTHSKGLM

SEQ ID NO: 22976 - protein, 9 aa, synthetic construct
  source 1..9: note = Seed: FVTHSKGLY
FPTHSKGLY

SEQ ID NO: 22977 - protein, 10 aa, synthetic construct
  source 1..10: note = Seed: FVTHSKGLYR
FPTHSKGLYR

SEQ ID NO: 22978 - protein, 10 aa, synthetic construct
  source 1..10: note = Seed: FDTYNLWNTF
FPTYNLWNTF

SEQ ID NO: 22979 - protein, 10 aa, synthetic construct
  source 1..10: note = Seed: FDTYNLWNTF
FPTYNLWNTW

SEQ ID NO: 22980 - protein, 10 aa, synthetic construct
  source 1..10: note = Seed: FDTYNLWNTF
FPTYNLWNTY

SEQ ID NO: 22981 - protein, 9 aa, synthetic construct
  source 1..9: note = Seed: FAVDAAKAY
FPVDAAKAA

SEQ ID NO: 22982 - protein, 9 aa, synthetic construct
  source 1..9: note = Seed: FAVDAAKAY
FPVDAAKAF

SEQ ID NO: 22983 - protein, 9 aa, synthetic construct
  source 1..9: note = Seed: FAVDAAKAY
FPVDAAKAH

SEQ ID NO: 22984 - protein, 9 aa, synthetic construct
  source 1..9: note = Seed: FAVDAAKAY
FPVDAAKAI

SEQ ID NO: 22985 - protein, 9 aa, synthetic construct
  source 1..9: note = Seed: FAVDAAKAY
FPVDAAKAL

SEQ ID NO: 22986 - protein, 9 aa, synthetic construct
  source 1..9: note = Seed: FAVDAAKAY
FPVDAAKAM

SEQ ID NO: 22987 - protein, 9 aa, synthetic construct
  source 1..9: note = Seed: FAVDAAKAY
FPVDAAKAV

SEQ ID NO: 22988 - protein, 9 aa, synthetic construct
  source 1..9: note = Seed: FAVDAAKAY
FPVDAAKAW

SEQ ID NO: 22989 - protein, 9 aa, synthetic construct
  source 1..9: note = Seed: FAVDAAKAY
FPVDAAKAY

SEQ ID NO: 22990 - protein, 10 aa, synthetic construct
  source 1..10: note = Seed: FAVDAAKAYK
FPVDAAKAYR

SEQ ID NO: 22991 - protein, 10 aa, synthetic construct
  source 1..10: note = Seed: FAVHFISNSW
FPVHFISNSF

SEQ ID NO: 22992 - protein, 10 aa, synthetic construct
  source 1..10: note = Seed: FAVHFISNSW
FPVHFISNSW

SEQ ID NO: 22993 - protein, 8 aa, synthetic construct
  source 1..8: note = Seed: FVVKRHTF
FPVKRHTI

SEQ ID NO: 22994 - protein, 8 aa, synthetic construct
  source 1..8: note = Seed: FVVKRHTF
FPVKRHTL

SEQ ID NO: 22995 - protein, 8 aa, synthetic construct
  source 1..8: note = Seed: FVVKRHTF
FPVKRHTM

SEQ ID NO: 22996 - protein, 9 aa, synthetic construct
  source 1..9: note = Seed: FPVLHDIGN
FPVLHDIGA

SEQ ID NO: 22997 - protein, 9 aa, synthetic construct
  source 1..9: note = Seed: FPVLHDIGN
FPVLHDIGF

SEQ ID NO: 22998 - protein, 9 aa, synthetic construct
  source 1..9: note = Seed: FPVLHDIGN
FPVLHDIGH

SEQ ID NO: 22999 - protein, 9 aa, synthetic construct
  source 1..9: note = Seed: FPVLHDIGN
FPVLHDIGI

SEQ ID NO: 23000 - protein, 9 aa, synthetic construct
  source 1..9: note = Seed: FPVLHDIGN
FPVLHDIGL

SEQ ID NO: 23001 - protein, 9 aa, synthetic construct
  source 1..9: note = Seed: FPVLHDIGN
FPVLHDIGM

SEQ ID NO: 23002 - protein, 9 aa, synthetic construct
  source 1..9: note = Seed: FPVLHDIGN
FPVLHDIGV

SEQ ID NO: 23003 - protein, 9 aa, synthetic construct
  source 1..9: note = Seed: FPVLHDIGN
FPVLHDIGW

SEQ ID NO: 23004 - protein, 9 aa, synthetic construct
  source 1..9: note = Seed: FPVLHDIGN
FPVLHDIGY

SEQ ID NO: 23005 - protein, 9 aa, synthetic construct
  source 1..9: note = Seed: FVVSTGYHF
FPVSTGYHA

SEQ ID NO: 23006 - protein, 9 aa, synthetic construct
  source 1..9: note = Seed: FVVSTGYHF
FPVSTGYHF

SEQ ID NO: 23007 - protein, 10 aa, synthetic construct
  source 1..10: note = Seed: FVVSTGYHFR
FPVSTGYHFK

SEQ ID NO: 23008 - protein, 10 aa, synthetic construct
  source 1..10: note = Seed: FVVSTGYHFR
FPVSTGYHFR

SEQ ID NO: 23009 - protein, 9 aa, synthetic construct
  source 1..9: note = Seed: FVVSTGYHF
FPVSTGYHH

SEQ ID NO: 23010 - protein, 9 aa, synthetic construct
  source 1..9: note = Seed: FVVSTGYHF
FPVSTGYHI

SEQ ID NO: 23011 - protein, 9 aa, synthetic construct
  source 1..9: note = Seed: FVVSTGYHF
FPVSTGYHL

SEQ ID NO: 23012 - protein, 9 aa, synthetic construct
  source 1..9: note = Seed: FVVSTGYHF
FPVSTGYHM

SEQ ID NO: 23013 - protein, 9 aa, synthetic construct
  source 1..9: note = Seed: FVVSTGYHF
FPVSTGYHV

SEQ ID NO: 23014 - protein, 9 aa, synthetic construct
  source 1..9: note = Seed: FVVSTGYHF
FPVSTGYHW

SEQ ID NO: 23015 - protein, 9 aa, synthetic construct
  source 1..9: note = Seed: FVVSTGYHF
FPVSTGYHY

SEQ ID NO: 23016 - protein, 10 aa, synthetic construct
  source 1..10: note = Seed: FYWFFSNYLK
FPWFFSNYLF

SEQ ID NO: 23017 - protein, 10 aa, synthetic construct
  source 1..10: note = Seed: FYWFFSNYLK
FPWFFSNYLK

SEQ ID NO: 23018 - protein, 10 aa, synthetic construct
  source 1..10: note = Seed: FYWFFSNYLK
FPWFFSNYLR

SEQ ID NO: 23019 - protein, 10 aa, synthetic construct
  source 1..10: note = Seed: FYWFFSNYLK
FPWFFSNYLY

SEQ ID NO: 23020 - protein, 9 aa, synthetic construct
  source 1..9: note = Seed: FYWFFSNYL
FPWFFSNYY

SEQ ID NO: 23021 - protein, 10 aa, synthetic construct
  source 1..10: note = Seed: FLWLLWPVTL
FPWLLWPVTF

SEQ ID NO: 23022 - protein, 11 aa, synthetic construct
  source 1..11: note = Seed: FLWLLWPVTLA
FPWLLWPVTLI

SEQ ID NO: 23023 - protein, 11 aa, synthetic construct
  source 1..11: note = Seed: FLWLLWPVTLA
FPWLLWPVTLL

SEQ ID NO: 23024 - protein, 11 aa, synthetic construct
  source 1..11: note = Seed: FLWLLWPVTLA
FPWLLWPVTLV

SEQ ID NO: 23025 - protein, 9 aa, synthetic construct
  source 1..9: note = Seed: FSYFAVHFI
FPYFAVHFV

SEQ ID NO: 23026 - protein, 9 aa, synthetic construct
  source 1..9: note = Seed: FYYLGTGPE
FPYLGTGPM

SEQ ID NO: 23027 - protein, 9 aa, synthetic construct
  source 1..9: note = Seed: FCYMHHMEL
FPYMHHMEA

SEQ ID NO: 23028 - protein, 9 aa, synthetic construct
  source 1..9: note = Seed: FCYMHHMEL
FPYMHHMEF

SEQ ID NO: 23029 - protein, 9 aa, synthetic construct
  source 1..9: note = Seed: FCYMHHMEL
FPYMHHMEI

SEQ ID NO: 23030 - protein, 9 aa, synthetic construct
  source 1..9: note = Seed: FCYMHHMEL
FPYMHHMEL

SEQ ID NO: 23031 - protein, 9 aa, synthetic construct
  source 1..9: note = Seed: FCYMHHMEL
FPYMHHMEM

SEQ ID NO: 23032 - protein, 9 aa, synthetic construct
  source 1..9: note = Seed: FCYMHHMEL
FPYMHHMET

SEQ ID NO: 23033 - protein, 9 aa, synthetic construct
  source 1..9: note = Seed: FCYMHHMEL
FPYMHHMEV

SEQ ID NO: 23034 - protein, 9 aa, synthetic construct
  source 1..9: note = Seed: FCYMHHMEL
FPYMHHMEY

SEQ ID NO: 23035 - protein, 9 aa, synthetic construct
  source 1..9: note = Seed: FRYMNSQGL
FPYMNSQGF

SEQ ID NO: 23036 - protein, 9 aa, synthetic construct
  source 1..9: note = Seed: FRYMNSQGL
FPYMNSQGY

SEQ ID NO: 23037 - protein, 10 aa, synthetic construct
  source 1..10: note = Seed: FYYVWKSYVH
FPYVWKSYVM

SEQ ID NO: 23038 - protein, 10 aa, synthetic construct
  source 1..10: note = Seed: FYYVWKSYVH
FPYVWKSYVY

SEQ ID NO: 23039 - protein, 8 aa, synthetic construct
  source 1..8: note = Seed: FVAAIFYL
FQAAIFYA

SEQ ID NO: 23040 - protein, 8 aa, synthetic construct
  source 1..8: note = Seed: FVAAIFYL
FQAAIFYI

SEQ ID NO: 23041 - protein, 8 aa, synthetic construct
  source 1..8: note = Seed: FVAAIFYL
FQAAIFYL

SEQ ID NO: 23042 - protein, 9 aa, synthetic construct
  source 1..9: note = Seed: FVAAIFYLI
FQAAIFYLA

SEQ ID NO: 23043 - protein, 9 aa, synthetic construct
  source 1..9: note = Seed: FVAAIFYLI
FQAAIFYLF

SEQ ID NO: 23044 - protein, 9 aa, synthetic construct
  source 1..9: note = Seed: FVAAIFYLI
FQAAIFYLG

SEQ ID NO: 23045 - protein, 9 aa, synthetic construct
  source 1..9: note = Seed: FVAAIFYLI
FQAAIFYLI

SEQ ID NO: 23046 - protein, 9 aa, synthetic construct
  source 1..9: note = Seed: FVAAIFYLI
FQAAIFYLK

SEQ ID NO: 23047 - protein, 9 aa, synthetic construct
  source 1..9: note = Seed: FVAAIFYLI
FQAAIFYLL

SEQ ID NO: 23048 - protein, 9 aa, synthetic construct
  source 1..9: note = Seed: FVAAIFYLI
FQAAIFYLM

SEQ ID NO: 23049 - protein, 9 aa, synthetic construct
  source 1..9: note = Seed: FVAAIFYLI
FQAAIFYLP

SEQ ID NO: 23050 - protein, 9 aa, synthetic construct
  source 1..9: note = Seed: FVAAIFYLI
FQAAIFYLR

SEQ ID NO: 23051 - protein, 9 aa, synthetic construct
  source 1..9: note = Seed: FVAAIFYLI
FQAAIFYLS

SEQ ID NO: 23052 - protein, 9 aa, synthetic construct
  source 1..9: note = Seed: FVAAIFYLI
FQAAIFYLT

SEQ ID NO: 23053 - protein, 9 aa, synthetic construct
  source 1..9: note = Seed: FVAAIFYLI
FQAAIFYLV

SEQ ID NO: 23054 - protein, 9 aa, synthetic construct
  source 1..9: note = Seed: FVAAIFYLI
FQAAIFYLW

SEQ ID NO: 23055 - protein, 9 aa, synthetic construct
  source 1..9: note = Seed: FVAAIFYLI
FQAAIFYLY

SEQ ID NO: 23056 - protein, 8 aa, synthetic construct
  source 1..8: note = Seed: FVAAIFYL
FQAAIFYV

SEQ ID NO: 23057 - protein, 10 aa, synthetic construct
  source 1..10: note = Seed: FCAFAVDAAK
FQAFAVDAAK

SEQ ID NO: 23058 - protein, 10 aa, synthetic construct
  source 1..10: note = Seed: FCAFAVDAAK
FQAFAVDAAR

SEQ ID NO: 23059 - protein, 9 aa, synthetic construct
  source 1..9: note = Seed: FLAFVVFLL
FQAFVVFLA

SEQ ID NO: 23060 - protein, 9 aa, synthetic construct
  source 1..9: note = Seed: FLAFVVFLL
FQAFVVFLI

SEQ ID NO: 23061 - protein, 9 aa, synthetic construct
  source 1..9: note = Seed: FLAFVVFLL
FQAFVVFLL

SEQ ID NO: 23062 - protein, 10 aa, synthetic construct
  source 1..10: note = Seed: FLAFVVFLLV
FQAFVVFLLA

SEQ ID NO: 23063 - protein, 10 aa, synthetic construct
  source 1..10: note = Seed: FLAFVVFLLV
FQAFVVFLLI

SEQ ID NO: 23064 - protein, 10 aa, synthetic construct
  source 1..10: note = Seed: FLAFVVFLLV
FQAFVVFLLL

SEQ ID NO: 23065 - protein, 10 aa, synthetic construct
  source 1..10: note = Seed: FLAFVVFLLV
FQAFVVFLLV

SEQ ID NO: 23066 - protein, 9 aa, synthetic construct
  source 1..9: note = Seed: FLAFVVFLL
FQAFVVFLM

SEQ ID NO: 23067 - protein, 9 aa, synthetic construct
  source 1..9: note = Seed: FLAFVVFLL
FQAFVVFLS

SEQ ID NO: 23068 - protein, 9 aa, synthetic construct
  source 1..9: note = Seed: FLAFVVFLL
FQAFVVFLT

SEQ ID NO: 23069 - protein, 9 aa, synthetic construct
  source 1..9: note = Seed: FLAFVVFLL
FQAFVVFLV

SEQ ID NO: 23070 - protein, 9 aa, synthetic construct
  source 1..9: note = Seed: FGAGAALQI
FQAGAALQL

SEQ ID NO: 23071 - protein, 9 aa, synthetic construct
  source 1..9: note = Seed: FGAGAALQI
FQAGAALQM

SEQ ID NO: 23072 - protein, 9 aa, synthetic construct
  source 1..9: note = Seed: FIAGLIAIV
FQAGLIAIA

SEQ ID NO: 23073 - protein, 9 aa, synthetic construct
  source 1..9: note = Seed: FIAGLIAIV
FQAGLIAIF

SEQ ID NO: 23074 - protein, 9 aa, synthetic construct
  source 1..9: note = Seed: FIAGLIAIV
FQAGLIAII

SEQ ID NO: 23075 - protein, 9 aa, synthetic construct
  source 1..9: note = Seed: FIAGLIAIV
FQAGLIAIL

SEQ ID NO: 23076 - protein, 9 aa, synthetic construct
  source 1..9: note = Seed: FIAGLIAIV
FQAGLIAIM

SEQ ID NO: 23077 - protein, 9 aa, synthetic construct
  source 1..9: note = Seed: FIAGLIAIV
FQAGLIAIT

SEQ ID NO: 23078 - protein, 9 aa, synthetic construct
  source 1..9: note = Seed: FIAGLIAIV
FQAGLIAIV

SEQ ID NO: 23079 - protein, 8 aa, synthetic construct
  source 1..8: note = Seed: FIAGLIAI
FQAGLIAV

SEQ ID NO: 23080 - protein, 9 aa, synthetic construct
  source 1..9: note = Seed: FLAHIQWMV
FQAHIQWMA

SEQ ID NO: 23081 - protein, 9 aa, synthetic construct
  source 1..9: note = Seed: FLAHIQWMV
FQAHIQWMF

SEQ ID NO: 23082 - protein, 9 aa, synthetic construct
  source 1..9: note = Seed: FLAHIQWMV
FQAHIQWMI

SEQ ID NO: 23083 - protein, 9 aa, synthetic construct
  source 1..9: note = Seed: FLAHIQWMV
FQAHIQWML

SEQ ID NO: 23084 - protein, 9 aa, synthetic construct
  source 1..9: note = Seed: FLAHIQWMV
FQAHIQWMM

SEQ ID NO: 23085 - protein, 9 aa, synthetic construct
  source 1..9: note = Seed: FLAHIQWMV
FQAHIQWMS

SEQ ID NO: 23086 - protein, 9 aa, synthetic construct
  source 1..9: note = Seed: FLAHIQWMV
FQAHIQWMT

SEQ ID NO: 23087 - protein, 9 aa, synthetic construct
  source 1..9: note = Seed: FLAHIQWMV
FQAHIQWMV

SEQ ID NO: 23088 - protein, 9 aa, synthetic construct
  source 1..9: note = Seed: FLALCADSI
FQALCADSI

SEQ ID NO: 23089 - protein, 10 aa, synthetic construct
  source 1..10: note = Seed: FLALCADSII
FQALCADSIL

SEQ ID NO: 23090 - protein, 10 aa, synthetic construct
  source 1..10: note = Seed: FLALCADSII
FQALCADSIV

SEQ ID NO: 23091 - protein, 9 aa, synthetic construct
  source 1..9: note = Seed: FLALCADSI
FQALCADSL

SEQ ID NO: 23092 - protein, 9 aa, synthetic construct
  source 1..9: note = Seed: FLALCADSI
FQALCADSM

SEQ ID NO: 23093 - protein, 9 aa, synthetic construct
  source 1..9: note = Seed: FLALCADSI
FQALCADSV

SEQ ID NO: 23094 - protein, 10 aa, synthetic construct
  source 1..10: note = Seed: FSALEPLVDL
FQALEPLVDI

SEQ ID NO: 23095 - protein, 10 aa, synthetic construct
  source 1..10: note = Seed: FSALEPLVDL
FQALEPLVDL

SEQ ID NO: 23096 - protein, 10 aa, synthetic construct
  source 1..10: note = Seed: FSALEPLVDL
FQALEPLVDV

SEQ ID NO: 23097 - protein, 9 aa, synthetic construct
  source 1..9: note = Seed: FIASFRLFA
FQASFRLFA

SEQ ID NO: 23098 - protein, 10 aa, synthetic construct
  source 1..10: note = Seed: FIASFRLFAR
FQASFRLFAK

SEQ ID NO: 23099 - protein, 10 aa, synthetic construct
  source 1..10: note = Seed: FIASFRLFAR
FQASFRLFAR

SEQ ID NO: 23100 - protein, 9 aa, synthetic construct
  source 1..9: note = Seed: FIASFRLFA
FQASFRLFI

SEQ ID NO: 23101 - protein, 9 aa, synthetic construct
  source 1..9: note = Seed: FIASFRLFA
FQASFRLFL

SEQ ID NO: 23102 - protein, 9 aa, synthetic construct
  source 1..9: note = Seed: FIASFRLFA
FQASFRLFM

SEQ ID NO: 23103 - protein, 9 aa, synthetic construct
  source 1..9: note = Seed: FIASFRLFA
FQASFRLFV

SEQ ID NO: 23104 - protein, 8 aa, synthetic construct
  source 1..8: note = Seed: FFASFYYV
FQASFYYV

SEQ ID NO: 23105 - protein, 9 aa, synthetic construct
  source 1..9: note = Seed: FFASFYYVW
FQASFYYVF

SEQ ID NO: 23106 - protein, 9 aa, synthetic construct
  source 1..9: note = Seed: FFASFYYVW
FQASFYYVW

SEQ ID NO: 23107 - protein, 10 aa, synthetic construct
  source 1..10: note = Seed: FFASFYYVWK
FQASFYYVWK

SEQ ID NO: 23108 - protein, 10 aa, synthetic construct
  source 1..10: note = Seed: FFASFYYVWK
FQASFYYVWR

SEQ ID NO: 23109 - protein, 9 aa, synthetic construct
  source 1..9: note = Seed: FFASFYYVW
FQASFYYVY

SEQ ID NO: 23110 - protein, 9 aa, synthetic construct
  source 1..9: note = Seed: FNATRFASV
FQATRFASA

SEQ ID NO: 23111 - protein, 9 aa, synthetic construct
  source 1..9: note = Seed: FNATRFASV
FQATRFASF

SEQ ID NO: 23112 - protein, 9 aa, synthetic construct
  source 1..9: note = Seed: FNATRFASV
FQATRFASI

SEQ ID NO: 23113 - protein, 9 aa, synthetic construct
  source 1..9: note = Seed: FNATRFASV
FQATRFASL

SEQ ID NO: 23114 - protein, 9 aa, synthetic construct
  source 1..9: note = Seed: FNATRFASV
FQATRFASM

SEQ ID NO: 23115 - protein, 9 aa, synthetic construct
  source 1..9: note = Seed: FNATRFASV
FQATRFAST

SEQ ID NO: 23116 - protein, 9 aa, synthetic construct
  source 1..9: note = Seed: FNATRFASV
FQATRFASV

SEQ ID NO: 23117 - protein, 10 aa, synthetic construct
  source 1..10: note = Seed: FNATRFASVY
FQATRFASVF

SEQ ID NO: 23118 - protein, 10 aa, synthetic construct
  source 1..10: note = Seed: FNATRFASVY
FQATRFASVL

SEQ ID NO: 23119 - protein, 10 aa, synthetic construct
  source 1..10: note = Seed: FNATRFASVY
FQATRFASVM

SEQ ID NO: 23120 - protein, 10 aa, synthetic construct
  source 1..10: note = Seed: FNATRFASVY
FQATRFASVW

SEQ ID NO: 23121 - protein, 10 aa, synthetic construct
  source 1..10: note = Seed: FNATRFASVY
FQATRFASVY

SEQ ID NO: 23122 - protein, 9 aa, synthetic construct
  source 1..9: note = Seed: FNATRFASV
FQATRFASY

SEQ ID NO: 23123 - protein, 9 aa, synthetic construct
  source 1..9: note = Seed: FSAVGNICY
FQAVGNICF

SEQ ID NO: 23124 - protein, 9 aa, synthetic construct
  source 1..9: note = Seed: FSAVGNICY
FQAVGNICL

SEQ ID NO: 23125 - protein, 9 aa, synthetic construct
  source 1..9: note = Seed: FSAVGNICY
FQAVGNICM

SEQ ID NO: 23126 - protein, 9 aa, synthetic construct
  source 1..9: note = Seed: FSAVGNICY
FQAVGNICY

SEQ ID NO: 23127 - protein, 10 aa, synthetic construct
  source 1..10: note = Seed: FSAVGNICYT
FQAVGNICYA

SEQ ID NO: 23128 - protein, 10 aa, synthetic construct
  source 1..10: note = Seed: FSAVGNICYT
FQAVGNICYI

SEQ ID NO: 23129 - protein, 10 aa, synthetic construct
  source 1..10: note = Seed: FSAVGNICYT
FQAVGNICYL

SEQ ID NO: 23130 - protein, 10 aa, synthetic construct
  source 1..10: note = Seed: FSAVGNICYT
FQAVGNICYM

SEQ ID NO: 23131 - protein, 10 aa, synthetic construct
  source 1..10: note = Seed: FSAVGNICYT
FQAVGNICYV

SEQ ID NO: 23132 - protein, 9 aa, synthetic construct
  source 1..9: note = Seed: FLAYILFTR
FQAYILFTA

SEQ ID NO: 23133 - protein, 9 aa, synthetic construct
  source 1..9: note = Seed: FLAYILFTR
FQAYILFTI

SEQ ID NO: 23134 - protein, 9 aa, synthetic construct
  source 1..9: note = Seed: FLAYILFTR
FQAYILFTL

SEQ ID NO: 23135 - protein, 9 aa, synthetic construct
  source 1..9: note = Seed: FLAYILFTR
FQAYILFTM

SEQ ID NO: 23136 - protein, 9 aa, synthetic construct
  source 1..9: note = Seed: FLAYILFTR
FQAYILFTR

SEQ ID NO: 23137 - protein, 10 aa, synthetic construct
  source 1..10: note = Seed: FLAYILFTRF
FQAYILFTRA

SEQ ID NO: 23138 - protein, 10 aa, synthetic construct
  source 1..10: note = Seed: FLAYILFTRF
FQAYILFTRF

SEQ ID NO: 23139 - protein, 10 aa, synthetic construct
  source 1..10: note = Seed: FLAYILFTRF
FQAYILFTRI

SEQ ID NO: 23140 - protein, 10 aa, synthetic construct
  source 1..10: note = Seed: FLAYILFTRF
FQAYILFTRL

SEQ ID NO: 23141 - protein, 10 aa, synthetic construct
  source 1..10: note = Seed: FLAYILFTRF
FQAYILFTRM

SEQ ID NO: 23142 - protein, 10 aa, synthetic construct
  source 1..10: note = Seed: FLAYILFTRF
FQAYILFTRR

SEQ ID NO: 23143 - protein, 10 aa, synthetic construct
  source 1..10: note = Seed: FLAYILFTRF
FQAYILFTRV

SEQ ID NO: 23144 - protein, 10 aa, synthetic construct
  source 1..10: note = Seed: FLAYILFTRF
FQAYILFTRY

SEQ ID NO: 23145 - protein, 9 aa, synthetic construct
  source 1..9: note = Seed: FLAYILFTR
FQAYILFTT

SEQ ID NO: 23146 - protein, 9 aa, synthetic construct
  source 1..9: note = Seed: FLAYILFTR
FQAYILFTV

SEQ ID NO: 23147 - protein, 9 aa, synthetic construct
  source 1..9: note = Seed: FVCDNIKFA
FQCDNIKFA

SEQ ID NO: 23148 - protein, 9 aa, synthetic construct
  source 1..9: note = Seed: FVCDNIKFA
FQCDNIKFI

SEQ ID NO: 23149 - protein, 9 aa, synthetic construct
  source 1..9: note = Seed: FVCDNIKFA
FQCDNIKFL

SEQ ID NO: 23150 - protein, 9 aa, synthetic construct
  source 1..9: note = Seed: FVCDNIKFA
FQCDNIKFM

SEQ ID NO: 23151 - protein, 9 aa, synthetic construct
  source 1..9: note = Seed: FVCDNIKFA
FQCDNIKFV

SEQ ID NO: 23152 - protein, 9 aa, synthetic construct
  source 1..9: note = Seed: FLCLFLLPS
FQCLFLLPA

SEQ ID NO: 23153 - protein, 9 aa, synthetic construct
  source 1..9: note = Seed: FLCLFLLPS
FQCLFLLPI

SEQ ID NO: 23154 - protein, 9 aa, synthetic construct
  source 1..9: note = Seed: FLCLFLLPS
FQCLFLLPL

SEQ ID NO: 23155 - protein, 9 aa, synthetic construct
  source 1..9: note = Seed: FLCLFLLPS
FQCLFLLPM

SEQ ID NO: 23156 - protein, 9 aa, synthetic construct
  source 1..9: note = Seed: FLCLFLLPS
FQCLFLLPT

SEQ ID NO: 23157 - protein, 9 aa, synthetic construct
  source 1..9: note = Seed: FLCLFLLPS
FQCLFLLPV

SEQ ID NO: 23158 - protein, 9 aa, synthetic construct
  source 1..9: note = Seed: FMCVEYCPI
FQCVEYCPF

SEQ ID NO: 23159 - protein, 9 aa, synthetic construct
  source 1..9: note = Seed: FMCVEYCPI
FQCVEYCPI

SEQ ID NO: 23160 - protein, 10 aa, synthetic construct
  source 1..10: note = Seed: FMCVEYCPIF
FQCVEYCPIF

SEQ ID NO: 23161 - protein, 10 aa, synthetic construct
  source 1..10: note = Seed: FMCVEYCPIF
FQCVEYCPIM

SEQ ID NO: 23162 - protein, 10 aa, synthetic construct
  source 1..10: note = Seed: FMCVEYCPIF
FQCVEYCPIY

SEQ ID NO: 23163 - protein, 9 aa, synthetic construct
  source 1..9: note = Seed: FMCVEYCPI
FQCVEYCPL

SEQ ID NO: 23164 - protein, 9 aa, synthetic construct
  source 1..9: note = Seed: FMCVEYCPI
FQCVEYCPM

SEQ ID NO: 23165 - protein, 9 aa, synthetic construct
  source 1..9: note = Seed: FMCVEYCPI
FQCVEYCPV

SEQ ID NO: 23166 - protein, 9 aa, synthetic construct
  source 1..9: note = Seed: FMCVEYCPI
FQCVEYCPY

SEQ ID NO: 23167 - protein, 9 aa, synthetic construct
  source 1..9: note = Seed: FLCWHTNCY
FQCWHTNCF

SEQ ID NO: 23168 - protein, 9 aa, synthetic construct
  source 1..9: note = Seed: FLCWHTNCY
FQCWHTNCM

SEQ ID NO: 23169 - protein, 9 aa, synthetic construct
  source 1..9: note = Seed: FLCWHTNCY
FQCWHTNCY

SEQ ID NO: 23170 - protein, 9 aa, synthetic construct
  source 1..9: note = Seed: FKDASGKPV
FQDASGKPL

SEQ ID NO: 23171 - protein, 9 aa, synthetic construct
  source 1..9: note = Seed: FKDASGKPV
FQDASGKPM

SEQ ID NO: 23172 - protein, 11 aa, synthetic construct
  source 1..11: note = Seed: FKDASGKPVPY
FQDASGKPVPF

SEQ ID NO: 23173 - protein, 9 aa, synthetic construct
  source 1..9: note = Seed: FGDDTVIEV
FQDDTVIEA

SEQ ID NO: 23174 - protein, 9 aa, synthetic construct
  source 1..9: note = Seed: FGDDTVIEV
FQDDTVIEF

SEQ ID NO: 23175 - protein, 9 aa, synthetic construct
  source 1..9: note = Seed: FGDDTVIEV
FQDDTVIEI

SEQ ID NO: 23176 - protein, 9 aa, synthetic construct
  source 1..9: note = Seed: FGDDTVIEV
FQDDTVIEL

SEQ ID NO: 23177 - protein, 9 aa, synthetic construct
  source 1..9: note = Seed: FGDDTVIEV
FQDDTVIEM

SEQ ID NO: 23178 - protein, 9 aa, synthetic construct
  source 1..9: note = Seed: FGDDTVIEV
FQDDTVIEV

SEQ ID NO: 23179 - protein, 8 aa, synthetic construct
  source 1..8: note = Seed: FVDGVPFV
FQDGVPFV

SEQ ID NO: 23180 - protein, 9 aa, synthetic construct
  source 1..9: note = Seed: FVDGVPFVV
FQDGVPFVA

SEQ ID NO: 23181 - protein, 9 aa, synthetic construct
  source 1..9: note = Seed: FVDGVPFVV
FQDGVPFVF

SEQ ID NO: 23182 - protein, 9 aa, synthetic construct
  source 1..9: note = Seed: FVDGVPFVV
FQDGVPFVI

SEQ ID NO: 23183 - protein, 9 aa, synthetic construct
  source 1..9: note = Seed: FVDGVPFVV
FQDGVPFVL

SEQ ID NO: 23184 - protein, 9 aa, synthetic construct
  source 1..9: note = Seed: FVDGVPFVV
FQDGVPFVM

SEQ ID NO: 23185 - protein, 9 aa, synthetic construct
  source 1..9: note = Seed: FVDGVPFVV
FQDGVPFVV

SEQ ID NO: 23186 - protein, 10 aa, synthetic construct
  source 1..10: note = Seed: FVDGVPFVVS
FQDGVPFVVV

SEQ ID NO: 23187 - protein, 9 aa, synthetic construct
  source 1..9: note = Seed: FPDLNGDVV
FQDLNGDVL

SEQ ID NO: 23188 - protein, 9 aa, synthetic construct
  source 1..9: note = Seed: FPDLNGDVV
FQDLNGDVM

SEQ ID NO: 23189 - protein, 11 aa, synthetic construct
  source 1..11: note = Seed: FPDLNGDVVAI
FQDLNGDVVAI

SEQ ID NO: 23190 - protein, 11 aa, synthetic construct
  source 1..11: note = Seed: FPDLNGDVVAI
FQDLNGDVVAL

SEQ ID NO: 23191 - protein, 11 aa, synthetic construct
  source 1..11: note = Seed: FPDLNGDVVAI
FQDLNGDVVAV

SEQ ID NO: 23192 - protein, 9 aa, synthetic construct
  source 1..9: note = Seed: FEEAALCTF
FQEAALCTF

SEQ ID NO: 23193 - protein, 9 aa, synthetic construct
  source 1..9: note = Seed: FEEAALCTF
FQEAALCTL

SEQ ID NO: 23194 - protein, 9 aa, synthetic construct
  source 1..9: note = Seed: FEEAALCTF
FQEAALCTM

SEQ ID NO: 23195 - protein, 9 aa, synthetic construct
  source 1..9: note = Seed: FEEAALCTF
FQEAALCTY

SEQ ID NO: 23196 - protein, 11 aa, synthetic construct
  source 1..11: note = Seed: FIETISLAGSY
FQETISLAGSF

SEQ ID NO: 23197 - protein, 11 aa, synthetic construct
  source 1..11: note = Seed: FIETISLAGSY
FQETISLAGSY

SEQ ID NO: 23198 - protein, 9 aa, synthetic construct
  source 1..9: note = Seed: FVFKNIDGY
FQFKNIDGF

SEQ ID NO: 23199 - protein, 9 aa, synthetic construct
  source 1..9: note = Seed: FVFKNIDGY
FQFKNIDGL

SEQ ID NO: 23200 - protein, 9 aa, synthetic construct
  source 1..9: note = Seed: FVFKNIDGY
FQFKNIDGM

SEQ ID NO: 23201 - protein, 9 aa, synthetic construct
  source 1..9: note = Seed: FVFKNIDGY
FQFKNIDGY

SEQ ID NO: 23202 - protein, 10 aa, synthetic construct
  source 1..10: note = Seed: FVFKNIDGYF
FQFKNIDGYA

SEQ ID NO: 23203 - protein, 10 aa, synthetic construct
  source 1..10: note = Seed: FVFKNIDGYF
FQFKNIDGYF

SEQ ID NO: 23204 - protein, 11 aa, synthetic construct
  source 1..11: note = Seed: FVFKNIDGYFK
FQFKNIDGYFR

SEQ ID NO: 23205 - protein, 10 aa, synthetic construct
  source 1..10: note = Seed: FVFKNIDGYF
FQFKNIDGYI

SEQ ID NO: 23206 - protein, 10 aa, synthetic construct
  source 1..10: note = Seed: FVFKNIDGYF
FQFKNIDGYL

SEQ ID NO: 23207 - protein, 10 aa, synthetic construct
  source 1..10: note = Seed: FVFKNIDGYF
FQFKNIDGYM

SEQ ID NO: 23208 - protein, 10 aa, synthetic construct
  source 1..10: note = Seed: FVFKNIDGYF
FQFKNIDGYV

SEQ ID NO: 23209 - protein, 10 aa, synthetic construct
  source 1..10: note = Seed: FVFKNIDGYF
FQFKNIDGYW

SEQ ID NO: 23210 - protein, 10 aa, synthetic construct
  source 1..10: note = Seed: FVFKNIDGYF
FQFKNIDGYY

SEQ ID NO: 23211 - protein, 9 aa, synthetic construct
  source 1..9: note = Seed: FLFLTWICL
FQFLTWICA

SEQ ID NO: 23212 - protein, 9 aa, synthetic construct
  source 1..9: note = Seed: FLFLTWICL
FQFLTWICI

SEQ ID NO: 23213 - protein, 9 aa, synthetic construct
  source 1..9: note = Seed: FLFLTWICL
FQFLTWICL

SEQ ID NO: 23214 - protein, 10 aa, synthetic construct
  source 1..10: note = Seed: FLFLTWICLL
FQFLTWICLA

SEQ ID NO: 23215 - protein, 10 aa, synthetic construct
  source 1..10: note = Seed: FLFLTWICLL
FQFLTWICLI

SEQ ID NO: 23216 - protein, 10 aa, synthetic construct
  source 1..10: note = Seed: FLFLTWICLL
FQFLTWICLL

SEQ ID NO: 23217 - protein, 10 aa, synthetic construct
  source 1..10: note = Seed: FLFLTWICLL
FQFLTWICLV

SEQ ID NO: 23218 - protein, 9 aa, synthetic construct
  source 1..9: note = Seed: FLFLTWICL
FQFLTWICV

SEQ ID NO: 23219 - protein, 9 aa, synthetic construct
  source 1..9: note = Seed: FKFRIDGDM
FQFRIDGDF

SEQ ID NO: 23220 - protein, 9 aa, synthetic construct
  source 1..9: note = Seed: FKFRIDGDM
FQFRIDGDM

SEQ ID NO: 23221 - protein, 9 aa, synthetic construct
  source 1..9: note = Seed: FKFRIDGDM
FQFRIDGDY

SEQ ID NO: 23222 - protein, 8 aa, synthetic construct
  source 1..8: note = Seed: FLFVAAIF
FQFVAAIF

SEQ ID NO: 23223 - protein, 9 aa, synthetic construct
  source 1..9: note = Seed: FLFVAAIFY
FQFVAAIFF

SEQ ID NO: 23224 - protein, 9 aa, synthetic construct
  source 1..9: note = Seed: FLFVAAIFY
FQFVAAIFL

SEQ ID NO: 23225 - protein, 9 aa, synthetic construct
  source 1..9: note = Seed: FLFVAAIFY
FQFVAAIFM

SEQ ID NO: 23226 - protein, 9 aa, synthetic construct
  source 1..9: note = Seed: FLFVAAIFY
FQFVAAIFY

SEQ ID NO: 23227 - protein, 10 aa, synthetic construct
  source 1..10: note = Seed: FLFVAAIFYL
FQFVAAIFYA

SEQ ID NO: 23228 - protein, 10 aa, synthetic construct
  source 1..10: note = Seed: FLFVAAIFYL
FQFVAAIFYI

SEQ ID NO: 23229 - protein, 10 aa, synthetic construct
  source 1..10: note = Seed: FLFVAAIFYL
FQFVAAIFYL

SEQ ID NO: 23230 - protein, 11 aa, synthetic construct
  source 1..11: note = Seed: FLFVAAIFYLI
FQFVAAIFYLI

SEQ ID NO: 23231 - protein, 11 aa, synthetic construct
  source 1..11: note = Seed: FLFVAAIFYLI
FQFVAAIFYLL

SEQ ID NO: 23232 - protein, 11 aa, synthetic construct
  source 1..11: note = Seed: FLFVAAIFYLI
FQFVAAIFYLV

SEQ ID NO: 23233 - protein, 10 aa, synthetic construct
  source 1..10: note = Seed: FLFVAAIFYL
FQFVAAIFYM

SEQ ID NO: 23234 - protein, 10 aa, synthetic construct
  source 1..10: note = Seed: FLFVAAIFYL
FQFVAAIFYS

SEQ ID NO: 23235 - protein, 10 aa, synthetic construct
  source 1..10: note = Seed: FLFVAAIFYL
FQFVAAIFYT

SEQ ID NO: 23236 - protein, 10 aa, synthetic construct
  source 1..10: note = Seed: FLFVAAIFYL
FQFVAAIFYV

SEQ ID NO: 23237 - protein, 10 aa, synthetic construct
  source 1..10: note = Seed: FLFVAAIFYL
FQFVAAIFYY

SEQ ID NO: 23238 - protein, 8 aa, synthetic construct
  source 1..8: note = Seed: FLFVAAIF
FQFVAAIM

SEQ ID NO: 23239 - protein, 8 aa, synthetic construct
  source 1..8: note = Seed: FLFVAAIF
FQFVAAIY

SEQ ID NO: 23240 - protein, 10 aa, synthetic construct
  source 1..10: note = Seed: FKFVCDNIKF
FQFVCDNIKF

SEQ ID NO: 23241 - protein, 10 aa, synthetic construct
  source 1..10: note = Seed: FKFVCDNIKF
FQFVCDNIKM

SEQ ID NO: 23242 - protein, 10 aa, synthetic construct
  source 1..10: note = Seed: FKFVCDNIKF
FQFVCDNIKY

SEQ ID NO: 23243 - protein, 9 aa, synthetic construct
  source 1..9: note = Seed: FGGASCCLY
FQGASCCLF

SEQ ID NO: 23244 - protein, 9 aa, synthetic construct
  source 1..9: note = Seed: FGGASCCLY
FQGASCCLM

SEQ ID NO: 23245 - protein, 9 aa, synthetic construct
  source 1..9: note = Seed: FGGASCCLY
FQGASCCLY

SEQ ID NO: 23246 - protein, 9 aa, synthetic construct
  source 1..9: note = Seed: FGGCVFSYV
FQGCVFSYA

SEQ ID NO: 23247 - protein, 9 aa, synthetic construct
  source 1..9: note = Seed: FGGCVFSYV
FQGCVFSYI

SEQ ID NO: 23248 - protein, 9 aa, synthetic construct
  source 1..9: note = Seed: FGGCVFSYV
FQGCVFSYL

SEQ ID NO: 23249 - protein, 9 aa, synthetic construct
  source 1..9: note = Seed: FGGCVFSYV
FQGCVFSYM

SEQ ID NO: 23250 - protein, 9 aa, synthetic construct
  source 1..9: note = Seed: FGGCVFSYV
FQGCVFSYT

SEQ ID NO: 23251 - protein, 9 aa, synthetic construct
  source 1..9: note = Seed: FGGCVFSYV
FQGCVFSYV

SEQ ID NO: 23252 - protein, 9 aa, synthetic construct
  source 1..9: note = Seed: FLGRYMSAL
FQGRYMSAA

SEQ ID NO: 23253 - protein, 9 aa, synthetic construct
  source 1..9: note = Seed: FLGRYMSAL
FQGRYMSAI

SEQ ID NO: 23254 - protein, 9 aa, synthetic construct
  source 1..9: note = Seed: FLGRYMSAL
FQGRYMSAL

SEQ ID NO: 23255 - protein, 10 aa, synthetic construct
  source 1..10: note = Seed: FLGRYMSALN
FQGRYMSALV

SEQ ID NO: 23256 - protein, 9 aa, synthetic construct
  source 1..9: note = Seed: FLGRYMSAL
FQGRYMSAV

SEQ ID NO: 23257 - protein, 9 aa, synthetic construct
  source 1..9: note = Seed: FNGVSFSTF
FQGVSFSTF

SEQ ID NO: 23258 - protein, 9 aa, synthetic construct
  source 1..9: note = Seed: FNGVSFSTF
FQGVSFSTH

SEQ ID NO: 23259 - protein, 9 aa, synthetic construct
  source 1..9: note = Seed: FNGVSFSTF
FQGVSFSTL

SEQ ID NO: 23260 - protein, 9 aa, synthetic construct
  source 1..9: note = Seed: FNGVSFSTF
FQGVSFSTM

SEQ ID NO: 23261 - protein, 9 aa, synthetic construct
  source 1..9: note = Seed: FNGVSFSTF
FQGVSFSTW

SEQ ID NO: 23262 - protein, 9 aa, synthetic construct
  source 1..9: note = Seed: FNGVSFSTF
FQGVSFSTY

SEQ ID NO: 23263 - protein, 9 aa, synthetic construct
  source 1..9: note = Seed: FLGYFCTCY
FQGYFCTCF

SEQ ID NO: 23264 - protein, 9 aa, synthetic construct
  source 1..9: note = Seed: FLGYFCTCY
FQGYFCTCM

SEQ ID NO: 23265 - protein, 9 aa, synthetic construct
  source 1..9: note = Seed: FLGYFCTCY
FQGYFCTCY

SEQ ID NO: 23266 - protein, 10 aa, synthetic construct
  source 1..10: note = Seed: FLGYFCTCYF
FQGYFCTCYA

SEQ ID NO: 23267 - protein, 10 aa, synthetic construct
  source 1..10: note = Seed: FLGYFCTCYF
FQGYFCTCYF

SEQ ID NO: 23268 - protein, 10 aa, synthetic construct
  source 1..10: note = Seed: FLGYFCTCYF
FQGYFCTCYI

SEQ ID NO: 23269 - protein, 10 aa, synthetic construct
  source 1..10: note = Seed: FLGYFCTCYF
FQGYFCTCYL

SEQ ID NO: 23270 - protein, 10 aa, synthetic construct
  source 1..10: note = Seed: FLGYFCTCYF
FQGYFCTCYM

SEQ ID NO: 23271 - protein, 10 aa, synthetic construct
  source 1..10: note = Seed: FLGYFCTCYF
FQGYFCTCYV

SEQ ID NO: 23272 - protein, 10 aa, synthetic construct
  source 1..10: note = Seed: FLGYFCTCYF
FQGYFCTCYY

SEQ ID NO: 23273 - protein, 9 aa, synthetic construct
  source 1..9: note = Seed: FQHANLDSC
FQHANLDSA

SEQ ID NO: 23274 - protein, 9 aa, synthetic construct
  source 1..9: note = Seed: FQHANLDSC
FQHANLDSI

SEQ ID NO: 23275 - protein, 9 aa, synthetic construct
  source 1..9: note = Seed: FQHANLDSC
FQHANLDSL

SEQ ID NO: 23276 - protein, 9 aa, synthetic construct
  source 1..9: note = Seed: FQHANLDSC
FQHANLDSM

SEQ ID NO: 23277 - protein, 9 aa, synthetic construct
  source 1..9: note = Seed: FQHANLDSC
FQHANLDSV

SEQ ID NO: 23278 - protein, 9 aa, synthetic construct
  source 1..9: note = Seed: FLHFLPRVF
FQHFLPRVF

SEQ ID NO: 23279 - protein, 11 aa, synthetic construct
  source 1..11: note = Seed: FLHFLPRVFSA
FQHFLPRVFSI

SEQ ID NO: 23280 - protein, 11 aa, synthetic construct
  source 1..11: note = Seed: FLHFLPRVFSA
FQHFLPRVFSL

SEQ ID NO: 23281 - protein, 11 aa, synthetic construct
  source 1..11: note = Seed: FLHFLPRVFSA
FQHFLPRVFSV

SEQ ID NO: 23282 - protein, 10 aa, synthetic construct
  source 1..10: note = Seed: FLHFLPRVFS
FQHFLPRVFV

SEQ ID NO: 23283 - protein, 9 aa, synthetic construct
  source 1..9: note = Seed: FLHFLPRVF
FQHFLPRVH

SEQ ID NO: 23284 - protein, 9 aa, synthetic construct
  source 1..9: note = Seed: FLHFLPRVF
FQHFLPRVI

SEQ ID NO: 23285 - protein, 9 aa, synthetic construct
  source 1..9: note = Seed: FLHFLPRVF
FQHFLPRVL

SEQ ID NO: 23286 - protein, 9 aa, synthetic construct
  source 1..9: note = Seed: FLHFLPRVF
FQHFLPRVM

SEQ ID NO: 23287 - protein, 9 aa, synthetic construct
  source 1..9: note = Seed: FLHFLPRVF
FQHFLPRVW

SEQ ID NO: 23288 - protein, 9 aa, synthetic construct
  source 1..9: note = Seed: FLHFLPRVF
FQHFLPRVY

SEQ ID NO: 23289 - protein, 9 aa, synthetic construct
  source 1..9: note = Seed: FSHSQLGGL
FQHSQLGGI

SEQ ID NO: 23290 - protein, 9 aa, synthetic construct
  source 1..9: note = Seed: FSHSQLGGL
FQHSQLGGL

SEQ ID NO: 23291 - protein, 9 aa, synthetic construct
  source 1..9: note = Seed: FSHSQLGGL
FQHSQLGGV

SEQ ID NO: 23292 - protein, 9 aa, synthetic construct
  source 1..9: note = Seed: FLHVTYVPA
FQHVTYVPA

SEQ ID NO: 23293 - protein, 10 aa, synthetic construct
  source 1..10: note = Seed: FLHVTYVPAQ
FQHVTYVPAV

SEQ ID NO: 23294 - protein, 9 aa, synthetic construct
  source 1..9: note = Seed: FLHVTYVPA
FQHVTYVPI

SEQ ID NO: 23295 - protein, 9 aa, synthetic construct
  source 1..9: note = Seed: FLHVTYVPA
FQHVTYVPL

SEQ ID NO: 23296 - protein, 9 aa, synthetic construct
  source 1..9: note = Seed: FLHVTYVPA
FQHVTYVPV

SEQ ID NO: 23297 - protein, 9 aa, synthetic construct
  source 1..9: note = Seed: FEIKLAKKF
FQIKLAKKF

SEQ ID NO: 23298 - protein, 9 aa, synthetic construct
  source 1..9: note = Seed: FEIKLAKKF
FQIKLAKKM

SEQ ID NO: 23299 - protein, 9 aa, synthetic construct
  source 1..9: note = Seed: FEIKLAKKF
FQIKLAKKY

SEQ ID NO: 23300 - protein, 10 aa, synthetic construct
  source 1..10: note = Seed: FKIYSKHTPI
FQIYSKHTPA

SEQ ID NO: 23301 - protein, 10 aa, synthetic construct
  source 1..10: note = Seed: FKIYSKHTPI
FQIYSKHTPF

SEQ ID NO: 23302 - protein, 10 aa, synthetic construct
  source 1..10: note = Seed: FKIYSKHTPI
FQIYSKHTPH

SEQ ID NO: 23303 - protein, 10 aa, synthetic construct
  source 1..10: note = Seed: FKIYSKHTPI
FQIYSKHTPI

SEQ ID NO: 23304 - protein, 10 aa, synthetic construct
  source 1..10: note = Seed: FKIYSKHTPI
FQIYSKHTPL

SEQ ID NO: 23305 - protein, 10 aa, synthetic construct
  source 1..10: note = Seed: FKIYSKHTPI
FQIYSKHTPM

SEQ ID NO: 23306 - protein, 10 aa, synthetic construct
  source 1..10: note = Seed: FKIYSKHTPI
FQIYSKHTPV

SEQ ID NO: 23307 - protein, 10 aa, synthetic construct
  source 1..10: note = Seed: FKIYSKHTPI
FQIYSKHTPW

SEQ ID NO: 23308 - protein, 10 aa, synthetic construct
  source 1..10: note = Seed: FKIYSKHTPI
FQIYSKHTPY

SEQ ID NO: 23309 - protein, 9 aa, synthetic construct
  source 1..9: note = Seed: FVKHKHAFL
FQKHKHAFL

SEQ ID NO: 23310 - protein, 9 aa, synthetic construct
  source 1..9: note = Seed: FVKHKHAFL
FQKHKHAFM

SEQ ID NO: 23311 - protein, 9 aa, synthetic construct
  source 1..9: note = Seed: FVKHKHAFL
FQKHKHAFV

SEQ ID NO: 23312 - protein, 8 aa, synthetic construct
  source 1..8: note = Seed: FVKHKHAF
FQKHKHAI

SEQ ID NO: 23313 - protein, 8 aa, synthetic construct
  source 1..8: note = Seed: FVKHKHAF
FQKHKHAL

SEQ ID NO: 23314 - protein, 8 aa, synthetic construct
  source 1..8: note = Seed: FVKHKHAF
FQKHKHAM

SEQ ID NO: 23315 - protein, 9 aa, synthetic construct
  source 1..9: note = Seed: FRKSNLKPF
FQKSNLKPF

SEQ ID NO: 23316 - protein, 9 aa, synthetic construct
  source 1..9: note = Seed: FRKSNLKPF
FQKSNLKPL

SEQ ID NO: 23317 - protein, 9 aa, synthetic construct
  source 1..9: note = Seed: FRKSNLKPF
FQKSNLKPM

SEQ ID NO: 23318 - protein, 9 aa, synthetic construct
  source 1..9: note = Seed: FRKSNLKPF
FQKSNLKPW

SEQ ID NO: 23319 - protein, 9 aa, synthetic construct
  source 1..9: note = Seed: FRKSNLKPF
FQKSNLKPY

SEQ ID NO: 23320 - protein, 9 aa, synthetic construct
  source 1..9: note = Seed: FLKTNCCRF
FQKTNCCRF

SEQ ID NO: 23321 - protein, 9 aa, synthetic construct
  source 1..9: note = Seed: FLKTNCCRF
FQKTNCCRM

SEQ ID NO: 23322 - protein, 9 aa, synthetic construct
  source 1..9: note = Seed: FLKTNCCRF
FQKTNCCRY

SEQ ID NO: 23323 - protein, 9 aa, synthetic construct
  source 1..9: note = Seed: FVLALLSDL
FQLALLSDA

SEQ ID NO: 23324 - protein, 9 aa, synthetic construct
  source 1..9: note = Seed: FVLALLSDL
FQLALLSDI

SEQ ID NO: 23325 - protein, 9 aa, synthetic construct
  source 1..9: note = Seed: FVLALLSDL
FQLALLSDL

SEQ ID NO: 23326 - protein, 9 aa, synthetic construct
  source 1..9: note = Seed: FVLALLSDL
FQLALLSDM

SEQ ID NO: 23327 - protein, 9 aa, synthetic construct
  source 1..9: note = Seed: FVLALLSDL
FQLALLSDV

SEQ ID NO: 23328 - protein, 10 aa, synthetic construct
  source 1..10: note = Seed: FPLCANGQVF
FQLCANGQVF

SEQ ID NO: 23329 - protein, 10 aa, synthetic construct
  source 1..10: note = Seed: FPLCANGQVF
FQLCANGQVL

SEQ ID NO: 23330 - protein, 10 aa, synthetic construct
  source 1..10: note = Seed: FPLCANGQVF
FQLCANGQVM

SEQ ID NO: 23331 - protein, 10 aa, synthetic construct
  source 1..10: note = Seed: FPLCANGQVF
FQLCANGQVW

SEQ ID NO: 23332 - protein, 10 aa, synthetic construct
  source 1..10: note = Seed: FPLCANGQVF
FQLCANGQVY

SEQ ID NO: 23333 - protein, 9 aa, synthetic construct
  source 1..9: note = Seed: FKLKDCVMY
FQLKDCVMF

SEQ ID NO: 23334 - protein, 9 aa, synthetic construct
  source 1..9: note = Seed: FKLKDCVMY
FQLKDCVMM

SEQ ID NO: 23335 - protein, 9 aa, synthetic construct
  source 1..9: note = Seed: FKLKDCVMY
FQLKDCVMY

SEQ ID NO: 23336 - protein, 10 aa, synthetic construct
  source 1..10: note = Seed: FKLKDCVMYA
FQLKDCVMYA

SEQ ID NO: 23337 - protein, 10 aa, synthetic construct
  source 1..10: note = Seed: FKLKDCVMYA
FQLKDCVMYI

SEQ ID NO: 23338 - protein, 10 aa, synthetic construct
  source 1..10: note = Seed: FKLKDCVMYA
FQLKDCVMYL

SEQ ID NO: 23339 - protein, 10 aa, synthetic construct
  source 1..10: note = Seed: FKLKDCVMYA
FQLKDCVMYM

SEQ ID NO: 23340 - protein, 10 aa, synthetic construct
  source 1..10: note = Seed: FKLKDCVMYA
FQLKDCVMYS

SEQ ID NO: 23341 - protein, 10 aa, synthetic construct
  source 1..10: note = Seed: FKLKDCVMYA
FQLKDCVMYT

SEQ ID NO: 23342 - protein, 10 aa, synthetic construct
  source 1..10: note = Seed: FKLKDCVMYA
FQLKDCVMYV

SEQ ID NO: 23343 - protein, 10 aa, synthetic construct
  source 1..10: note = Seed: FPLKLRGTAV
FQLKLRGTAA

SEQ ID NO: 23344 - protein, 10 aa, synthetic construct
  source 1..10: note = Seed: FPLKLRGTAV
FQLKLRGTAF

SEQ ID NO: 23345 - protein, 10 aa, synthetic construct
  source 1..10: note = Seed: FPLKLRGTAV
FQLKLRGTAI

SEQ ID NO: 23346 - protein, 10 aa, synthetic construct
  source 1..10: note = Seed: FPLKLRGTAV
FQLKLRGTAL

SEQ ID NO: 23347 - protein, 10 aa, synthetic construct
  source 1..10: note = Seed: FPLKLRGTAV
FQLKLRGTAM

SEQ ID NO: 23348 - protein, 10 aa, synthetic construct
  source 1..10: note = Seed: FPLKLRGTAV
FQLKLRGTAV

SEQ ID NO: 23349 - protein, 11 aa, synthetic construct
  source 1..11: note = Seed: FPLKLRGTAVM
FQLKLRGTAVF

SEQ ID NO: 23350 - protein, 11 aa, synthetic construct
  source 1..11: note = Seed: FPLKLRGTAVM
FQLKLRGTAVM

SEQ ID NO: 23351 - protein, 11 aa, synthetic construct
  source 1..11: note = Seed: FPLKLRGTAVM
FQLKLRGTAVY

SEQ ID NO: 23352 - protein, 10 aa, synthetic construct
  source 1..10: note = Seed: FTLLLQLCTF
FQLLLQLCTF

SEQ ID NO: 23353 - protein, 10 aa, synthetic construct
  source 1..10: note = Seed: FTLLLQLCTF
FQLLLQLCTY

SEQ ID NO: 23354 - protein, 9 aa, synthetic construct
  source 1..9: note = Seed: FKLNEEIAI
FQLNEEIAF

SEQ ID NO: 23355 - protein, 9 aa, synthetic construct
  source 1..9: note = Seed: FKLNEEIAI
FQLNEEIAL

SEQ ID NO: 23356 - protein, 9 aa, synthetic construct
  source 1..9: note = Seed: FKLNEEIAI
FQLNEEIAM

SEQ ID NO: 23357 - protein, 9 aa, synthetic construct
  source 1..9: note = Seed: FKLNEEIAI
FQLNEEIAY

SEQ ID NO: 23358 - protein, 9 aa, synthetic construct
  source 1..9: note = Seed: FLLNKEMYL
FQLNKEMYA

SEQ ID NO: 23359 - protein, 9 aa, synthetic construct
  source 1..9: note = Seed: FLLNKEMYL
FQLNKEMYI

SEQ ID NO: 23360 - protein, 9 aa, synthetic construct
  source 1..9: note = Seed: FLLNKEMYL
FQLNKEMYL

SEQ ID NO: 23361 - protein, 10 aa, synthetic construct
  source 1..10: note = Seed: FLLNKEMYLK
FQLNKEMYLA

SEQ ID NO: 23362 - protein, 10 aa, synthetic construct
  source 1..10: note = Seed: FLLNKEMYLK
FQLNKEMYLI

SEQ ID NO: 23363 - protein, 11 aa, synthetic construct
  source 1..11: note = Seed: FLLNKEMYLKL
FQLNKEMYLKV

SEQ ID NO: 23364 - protein, 10 aa, synthetic construct
  source 1..10: note = Seed: FLLNKEMYLK
FQLNKEMYLL

SEQ ID NO: 23365 - protein, 10 aa, synthetic construct
  source 1..10: note = Seed: FLLNKEMYLK
FQLNKEMYLM

SEQ ID NO: 23366 - protein, 10 aa, synthetic construct
  source 1..10: note = Seed: FLLNKEMYLK
FQLNKEMYLR

SEQ ID NO: 23367 - protein, 10 aa, synthetic construct
  source 1..10: note = Seed: FLLNKEMYLK
FQLNKEMYLV

SEQ ID NO: 23368 - protein, 9 aa, synthetic construct
  source 1..9: note = Seed: FLLNKEMYL
FQLNKEMYM

SEQ ID NO: 23369 - protein, 9 aa, synthetic construct
  source 1..9: note = Seed: FLLNKEMYL
FQLNKEMYV

SEQ ID NO: 23370 - protein, 8 aa, synthetic construct
  source 1..8: note = Seed: FRLTLGVY
FQLTLGVF

SEQ ID NO: 23371 - protein, 8 aa, synthetic construct
  source 1..8: note = Seed: FRLTLGVY
FQLTLGVM

SEQ ID NO: 23372 - protein, 8 aa, synthetic construct
  source 1..8: note = Seed: FRLTLGVY
FQLTLGVY

SEQ ID NO: 23373 - protein, 10 aa, synthetic construct
  source 1..10: note = Seed: FRLTLGVYDY
FQLTLGVYDF

SEQ ID NO: 23374 - protein, 10 aa, synthetic construct
  source 1..10: note = Seed: FRLTLGVYDY
FQLTLGVYDY

SEQ ID NO: 23375 - protein, 11 aa, synthetic construct
  source 1..11: note = Seed: FRLTLGVYDYL
FQLTLGVYDYV

SEQ ID NO: 23376 - protein, 9 aa, synthetic construct
  source 1..9: note = Seed: FYLTNDVSF
FQLTNDVSF

SEQ ID NO: 23377 - protein, 10 aa, synthetic construct
  source 1..10: note = Seed: FYLTNDVSFL
FQLTNDVSFA

SEQ ID NO: 23378 - protein, 10 aa, synthetic construct
  source 1..10: note = Seed: FYLTNDVSFL
FQLTNDVSFI

SEQ ID NO: 23379 - protein, 10 aa, synthetic construct
  source 1..10: note = Seed: FYLTNDVSFL
FQLTNDVSFL

SEQ ID NO: 23380 - protein, 11 aa, synthetic construct
  source 1..11: note = Seed: FYLTNDVSFLA
FQLTNDVSFLA

SEQ ID NO: 23381 - protein, 11 aa, synthetic construct
  source 1..11: note = Seed: FYLTNDVSFLA
FQLTNDVSFLI

SEQ ID NO: 23382 - protein, 11 aa, synthetic construct
  source 1..11: note = Seed: FYLTNDVSFLA
FQLTNDVSFLL

SEQ ID NO: 23383 - protein, 11 aa, synthetic construct
  source 1..11: note = Seed: FYLTNDVSFLA
FQLTNDVSFLM

SEQ ID NO: 23384 - protein, 11 aa, synthetic construct
  source 1..11: note = Seed: FYLTNDVSFLA
FQLTNDVSFLV

SEQ ID NO: 23385 - protein, 10 aa, synthetic construct
  source 1..10: note = Seed: FYLTNDVSFL
FQLTNDVSFM

SEQ ID NO: 23386 - protein, 10 aa, synthetic construct
  source 1..10: note = Seed: FYLTNDVSFL
FQLTNDVSFV

SEQ ID NO: 23387 - protein, 9 aa, synthetic construct
  source 1..9: note = Seed: FYLTNDVSF
FQLTNDVSI

SEQ ID NO: 23388 - protein, 9 aa, synthetic construct
  source 1..9: note = Seed: FYLTNDVSF
FQLTNDVSL

SEQ ID NO: 23389 - protein, 9 aa, synthetic construct
  source 1..9: note = Seed: FYLTNDVSF
FQLTNDVSM

SEQ ID NO: 23390 - protein, 9 aa, synthetic construct
  source 1..9: note = Seed: FYLTNDVSF
FQLTNDVSW

SEQ ID NO: 23391 - protein, 9 aa, synthetic construct
  source 1..9: note = Seed: FYLTNDVSF
FQLTNDVSY

SEQ ID NO: 23392 - protein, 10 aa, synthetic construct
  source 1..10: note = Seed: FQLTPIAVQM
FQLTPIAVQA

SEQ ID NO: 23393 - protein, 10 aa, synthetic construct
  source 1..10: note = Seed: FQLTPIAVQM
FQLTPIAVQF

SEQ ID NO: 23394 - protein, 10 aa, synthetic construct
  source 1..10: note = Seed: FQLTPIAVQM
FQLTPIAVQI

SEQ ID NO: 23395 - protein, 10 aa, synthetic construct
  source 1..10: note = Seed: FQLTPIAVQM
FQLTPIAVQL

SEQ ID NO: 23396 - protein, 10 aa, synthetic construct
  source 1..10: note = Seed: FQLTPIAVQM
FQLTPIAVQV

SEQ ID NO: 23397 - protein, 10 aa, synthetic construct
  source 1..10: note = Seed: FQLTPIAVQM
FQLTPIAVQY

SEQ ID NO: 23398 - protein, 9 aa, synthetic construct
  source 1..9: note = Seed: FELTSMKYF
FQLTSMKYF

SEQ ID NO: 23399 - protein, 10 aa, synthetic construct
  source 1..10: note = Seed: FELTSMKYFV
FQLTSMKYFA

SEQ ID NO: 23400 - protein, 10 aa, synthetic construct
  source 1..10: note = Seed: FELTSMKYFV
FQLTSMKYFI

SEQ ID NO: 23401 - protein, 10 aa, synthetic construct
  source 1..10: note = Seed: FELTSMKYFV
FQLTSMKYFL

SEQ ID NO: 23402 - protein, 10 aa, synthetic construct
  source 1..10: note = Seed: FELTSMKYFV
FQLTSMKYFM

SEQ ID NO: 23403 - protein, 10 aa, synthetic construct
  source 1..10: note = Seed: FELTSMKYFV
FQLTSMKYFV

SEQ ID NO: 23404 - protein, 9 aa, synthetic construct
  source 1..9: note = Seed: FELTSMKYF
FQLTSMKYL

SEQ ID NO: 23405 - protein, 9 aa, synthetic construct
  source 1..9: note = Seed: FELTSMKYF
FQLTSMKYM

SEQ ID NO: 23406 - protein, 9 aa, synthetic construct
  source 1..9: note = Seed: FELTSMKYF
FQLTSMKYY

SEQ ID NO: 23407 - protein, 9 aa, synthetic construct
  source 1..9: note = Seed: FGLVAEWFL
FQLVAEWFA

SEQ ID NO: 23408 - protein, 9 aa, synthetic construct
  source 1..9: note = Seed: FGLVAEWFL
FQLVAEWFI

SEQ ID NO: 23409 - protein, 9 aa, synthetic construct
  source 1..9: note = Seed: FGLVAEWFL
FQLVAEWFL

SEQ ID NO: 23410 - protein, 10 aa, synthetic construct
  source 1..10: note = Seed: FGLVAEWFLA
FQLVAEWFLA

SEQ ID NO: 23411 - protein, 11 aa, synthetic construct
  source 1..11: note = Seed: FGLVAEWFLAY
FQLVAEWFLAF

SEQ ID NO: 23412 - protein, 11 aa, synthetic construct
  source 1..11: note = Seed: FGLVAEWFLAY
FQLVAEWFLAY

SEQ ID NO: 23413 - protein, 10 aa, synthetic construct
  source 1..10: note = Seed: FGLVAEWFLA
FQLVAEWFLI

SEQ ID NO: 23414 - protein, 10 aa, synthetic construct
  source 1..10: note = Seed: FGLVAEWFLA
FQLVAEWFLL

SEQ ID NO: 23415 - protein, 10 aa, synthetic construct
  source 1..10: note = Seed: FGLVAEWFLA
FQLVAEWFLM

SEQ ID NO: 23416 - protein, 10 aa, synthetic construct
  source 1..10: note = Seed: FGLVAEWFLA
FQLVAEWFLV

SEQ ID NO: 23417 - protein, 9 aa, synthetic construct
  source 1..9: note = Seed: FGLVAEWFL
FQLVAEWFM

SEQ ID NO: 23418 - protein, 9 aa, synthetic construct
  source 1..9: note = Seed: FGLVAEWFL
FQLVAEWFT

SEQ ID NO: 23419 - protein, 9 aa, synthetic construct
  source 1..9: note = Seed: FGLVAEWFL
FQLVAEWFV

SEQ ID NO: 23420 - protein, 10 aa, synthetic construct
  source 1..10: note = Seed: FVLWAHGFEL
FQLWAHGFEA

SEQ ID NO: 23421 - protein, 10 aa, synthetic construct
  source 1..10: note = Seed: FVLWAHGFEL
FQLWAHGFEI

SEQ ID NO: 23422 - protein, 10 aa, synthetic construct
  source 1..10: note = Seed: FVLWAHGFEL
FQLWAHGFEL

SEQ ID NO: 23423 - protein, 11 aa, synthetic construct
  source 1..11: note = Seed: FVLWAHGFELT
FQLWAHGFELA

SEQ ID NO: 23424 - protein, 11 aa, synthetic construct
  source 1..11: note = Seed: FVLWAHGFELT
FQLWAHGFELC

SEQ ID NO: 23425 - protein, 11 aa, synthetic construct
  source 1..11: note = Seed: FVLWAHGFELT
FQLWAHGFELD

SEQ ID NO: 23426 - protein, 11 aa, synthetic construct
  source 1..11: note = Seed: FVLWAHGFELT
FQLWAHGFELE

SEQ ID NO: 23427 - protein, 11 aa, synthetic construct
  source 1..11: note = Seed: FVLWAHGFELT
FQLWAHGFELF

SEQ ID NO: 23428 - protein, 11 aa, synthetic construct
  source 1..11: note = Seed: FVLWAHGFELT
FQLWAHGFELG

SEQ ID NO: 23429 - protein, 11 aa, synthetic construct
  source 1..11: note = Seed: FVLWAHGFELT
FQLWAHGFELH

SEQ ID NO: 23430 - protein, 11 aa, synthetic construct
  source 1..11: note = Seed: FVLWAHGFELT
FQLWAHGFELI

SEQ ID NO: 23431 - protein, 11 aa, synthetic construct
  source 1..11: note = Seed: FVLWAHGFELT
FQLWAHGFELK

SEQ ID NO: 23432 - protein, 11 aa, synthetic construct
  source 1..11: note = Seed: FVLWAHGFELT
FQLWAHGFELL

SEQ ID NO: 23433 - protein, 11 aa, synthetic construct
  source 1..11: note = Seed: FVLWAHGFELT
FQLWAHGFELM

SEQ ID NO: 23434 - protein, 11 aa, synthetic construct
  source 1..11: note = Seed: FVLWAHGFELT
FQLWAHGFELN

SEQ ID NO: 23435 - protein, 11 aa, synthetic construct
  source 1..11: note = Seed: FVLWAHGFELT
FQLWAHGFELP

SEQ ID NO: 23436 - protein, 11 aa, synthetic construct
  source 1..11: note = Seed: FVLWAHGFELT
FQLWAHGFELQ

SEQ ID NO: 23437 - protein, 11 aa, synthetic construct
  source 1..11: note = Seed: FVLWAHGFELT
FQLWAHGFELR

SEQ ID NO: 23438 - protein, 11 aa, synthetic construct
  source 1..11: note = Seed: FVLWAHGFELT
FQLWAHGFELS

SEQ ID NO: 23439 - protein, 11 aa, synthetic construct
  source 1..11: note = Seed: FVLWAHGFELT
FQLWAHGFELT

SEQ ID NO: 23440 - protein, 11 aa, synthetic construct
  source 1..11: note = Seed: FVLWAHGFELT
FQLWAHGFELV

SEQ ID NO: 23441 - protein, 11 aa, synthetic construct
  source 1..11: note = Seed: FVLWAHGFELT
FQLWAHGFELW

SEQ ID NO: 23442 - protein, 11 aa, synthetic construct
  source 1..11: note = Seed: FVLWAHGFELT
FQLWAHGFELY

SEQ ID NO: 23443 - protein, 10 aa, synthetic construct
  source 1..10: note = Seed: FVLWAHGFEL
FQLWAHGFEM

SEQ ID NO: 23444 - protein, 10 aa, synthetic construct
  source 1..10: note = Seed: FVLWAHGFEL
FQLWAHGFES

SEQ ID NO: 23445 - protein, 10 aa, synthetic construct
  source 1..10: note = Seed: FVLWAHGFEL
FQLWAHGFET

SEQ ID NO: 23446 - protein, 10 aa, synthetic construct
  source 1..10: note = Seed: FVLWAHGFEL
FQLWAHGFEV

SEQ ID NO: 23447 - protein, 9 aa, synthetic construct
  source 1..9: note = Seed: FSLWVYKQF
FQLWVYKQF

SEQ ID NO: 23448 - protein, 9 aa, synthetic construct
  source 1..9: note = Seed: FSLWVYKQF
FQLWVYKQM

SEQ ID NO: 23449 - protein, 9 aa, synthetic construct
  source 1..9: note = Seed: FSLWVYKQF
FQLWVYKQY

SEQ ID NO: 23450 - protein, 9 aa, synthetic construct
  source 1..9: note = Seed: FHLYLQYIR
FQLYLQYIR

SEQ ID NO: 23451 - protein, 11 aa, synthetic construct
  source 1..11: note = Seed: FSMMILSDDAV
FQMMILSDDAI

SEQ ID NO: 23452 - protein, 11 aa, synthetic construct
  source 1..11: note = Seed: FSMMILSDDAV
FQMMILSDDAL

SEQ ID NO: 23453 - protein, 11 aa, synthetic construct
  source 1..11: note = Seed: FSMMILSDDAV
FQMMILSDDAV

SEQ ID NO: 23454 - protein, 10 aa, synthetic construct
  source 1..10: note = Seed: FSMMILSDDA
FQMMILSDDI

SEQ ID NO: 23455 - protein, 10 aa, synthetic construct
  source 1..10: note = Seed: FSMMILSDDA
FQMMILSDDL

SEQ ID NO: 23456 - protein, 10 aa, synthetic construct
  source 1..10: note = Seed: FSMMILSDDA
FQMMILSDDV

SEQ ID NO: 23457 - protein, 10 aa, synthetic construct
  source 1..10: note = Seed: FKMNYQVNGY
FQMNYQVNGF

SEQ ID NO: 23458 - protein, 10 aa, synthetic construct
  source 1..10: note = Seed: FKMNYQVNGY
FQMNYQVNGM

SEQ ID NO: 23459 - protein, 10 aa, synthetic construct
  source 1..10: note = Seed: FKMNYQVNGY
FQMNYQVNGY

SEQ ID NO: 23460 - protein, 9 aa, synthetic construct
  source 1..9: note = Seed: FAMQMAYRF
FQMQMAYRA

SEQ ID NO: 23461 - protein, 9 aa, synthetic construct
  source 1..9: note = Seed: FAMQMAYRF
FQMQMAYRF

SEQ ID NO: 23462 - protein, 9 aa, synthetic construct
  source 1..9: note = Seed: FAMQMAYRF
FQMQMAYRI

SEQ ID NO: 23463 - protein, 9 aa, synthetic construct
  source 1..9: note = Seed: FAMQMAYRF
FQMQMAYRL

SEQ ID NO: 23464 - protein, 9 aa, synthetic construct
  source 1..9: note = Seed: FAMQMAYRF
FQMQMAYRM

SEQ ID NO: 23465 - protein, 9 aa, synthetic construct
  source 1..9: note = Seed: FAMQMAYRF
FQMQMAYRT

SEQ ID NO: 23466 - protein, 9 aa, synthetic construct
  source 1..9: note = Seed: FAMQMAYRF
FQMQMAYRV

SEQ ID NO: 23467 - protein, 9 aa, synthetic construct
  source 1..9: note = Seed: FAMQMAYRF
FQMQMAYRW

SEQ ID NO: 23468 - protein, 9 aa, synthetic construct
  source 1..9: note = Seed: FAMQMAYRF
FQMQMAYRY

SEQ ID NO: 23469 - protein, 8 aa, synthetic construct
  source 1..8: note = Seed: FDMSKFPL
FQMSKFPI

SEQ ID NO: 23470 - protein, 8 aa, synthetic construct
  source 1..8: note = Seed: FDMSKFPL
FQMSKFPL

SEQ ID NO: 23471 - protein, 10 aa, synthetic construct
  source 1..10: note = Seed: FDMSKFPLKL
FQMSKFPLKA

SEQ ID NO: 23472 - protein, 10 aa, synthetic construct
  source 1..10: note = Seed: FDMSKFPLKL
FQMSKFPLKI

SEQ ID NO: 23473 - protein, 10 aa, synthetic construct
  source 1..10: note = Seed: FDMSKFPLKL
FQMSKFPLKL

SEQ ID NO: 23474 - protein, 10 aa, synthetic construct
  source 1..10: note = Seed: FDMSKFPLKL
FQMSKFPLKM

SEQ ID NO: 23475 - protein, 10 aa, synthetic construct
  source 1..10: note = Seed: FDMSKFPLKL
FQMSKFPLKV

SEQ ID NO: 23476 - protein, 8 aa, synthetic construct
  source 1..8: note = Seed: FDMSKFPL
FQMSKFPM

SEQ ID NO: 23477 - protein, 10 aa, synthetic construct
  source 1..10: note = Seed: FNMVYMPASW
FQMVYMPASF

SEQ ID NO: 23478 - protein, 10 aa, synthetic construct
  source 1..10: note = Seed: FNMVYMPASW
FQMVYMPASL

SEQ ID NO: 23479 - protein, 10 aa, synthetic construct
  source 1..10: note = Seed: FNMVYMPASW
FQMVYMPASM

SEQ ID NO: 23480 - protein, 10 aa, synthetic construct
  source 1..10: note = Seed: FNMVYMPASW
FQMVYMPASW

SEQ ID NO: 23481 - protein, 10 aa, synthetic construct
  source 1..10: note = Seed: FNMVYMPASW
FQMVYMPASY

SEQ ID NO: 23482 - protein, 9 aa, synthetic construct
  source 1..9: note = Seed: FENKTTLPV
FQNKTTLPA

SEQ ID NO: 23483 - protein, 9 aa, synthetic construct
  source 1..9: note = Seed: FENKTTLPV
FQNKTTLPF

SEQ ID NO: 23484 - protein, 9 aa, synthetic construct
  source 1..9: note = Seed: FENKTTLPV
FQNKTTLPG

SEQ ID NO: 23485 - protein, 9 aa, synthetic construct
  source 1..9: note = Seed: FENKTTLPV
FQNKTTLPH

SEQ ID NO: 23486 - protein, 9 aa, synthetic construct
  source 1..9: note = Seed: FENKTTLPV
FQNKTTLPI

SEQ ID NO: 23487 - protein, 9 aa, synthetic construct
  source 1..9: note = Seed: FENKTTLPV
FQNKTTLPL

SEQ ID NO: 23488 - protein, 9 aa, synthetic construct
  source 1..9: note = Seed: FENKTTLPV
FQNKTTLPM

SEQ ID NO: 23489 - protein, 9 aa, synthetic construct
  source 1..9: note = Seed: FENKTTLPV
FQNKTTLPV

SEQ ID NO: 23490 - protein, 9 aa, synthetic construct
  source 1..9: note = Seed: FENKTTLPV
FQNKTTLPW

SEQ ID NO: 23491 - protein, 9 aa, synthetic construct
  source 1..9: note = Seed: FENKTTLPV
FQNKTTLPY

SEQ ID NO: 23492 - protein, 9 aa, synthetic construct
  source 1..9: note = Seed: FVNLKQLPF
FQNLKQLPF

SEQ ID NO: 23493 - protein, 10 aa, synthetic construct
  source 1..10: note = Seed: FVNLKQLPFF
FQNLKQLPFF

SEQ ID NO: 23494 - protein, 10 aa, synthetic construct
  source 1..10: note = Seed: FVNLKQLPFF
FQNLKQLPFY

SEQ ID NO: 23495 - protein, 9 aa, synthetic construct
  source 1..9: note = Seed: FVNLKQLPF
FQNLKQLPI

SEQ ID NO: 23496 - protein, 9 aa, synthetic construct
  source 1..9: note = Seed: FVNLKQLPF
FQNLKQLPL

SEQ ID NO: 23497 - protein, 9 aa, synthetic construct
  source 1..9: note = Seed: FVNLKQLPF
FQNLKQLPM

SEQ ID NO: 23498 - protein, 9 aa, synthetic construct
  source 1..9: note = Seed: FVNLKQLPF
FQNLKQLPW

SEQ ID NO: 23499 - protein, 9 aa, synthetic construct
  source 1..9: note = Seed: FVNLKQLPF
FQNLKQLPY

SEQ ID NO: 23500 - protein, 9 aa, synthetic construct
  source 1..9: note = Seed: FTNVYADSF
FQNVYADSF

SEQ ID NO: 23501 - protein, 10 aa, synthetic construct
  source 1..10: note = Seed: FTNVYADSFV
FQNVYADSFL

SEQ ID NO: 23502 - protein, 10 aa, synthetic construct
  source 1..10: note = Seed: FTNVYADSFV
FQNVYADSFV

SEQ ID NO: 23503 - protein, 11 aa, synthetic construct
  source 1..11: note = Seed: FTNVYADSFVI
FQNVYADSFVL

SEQ ID NO: 23504 - protein, 11 aa, synthetic construct
  source 1..11: note = Seed: FTNVYADSFVI
FQNVYADSFVV

SEQ ID NO: 23505 - protein, 9 aa, synthetic construct
  source 1..9: note = Seed: FTNVYADSF
FQNVYADSI

SEQ ID NO: 23506 - protein, 9 aa, synthetic construct
  source 1..9: note = Seed: FTNVYADSF
FQNVYADSL

SEQ ID NO: 23507 - protein, 9 aa, synthetic construct
  source 1..9: note = Seed: FTNVYADSF
FQNVYADSM

SEQ ID NO: 23508 - protein, 9 aa, synthetic construct
  source 1..9: note = Seed: FTNVYADSF
FQNVYADSY

SEQ ID NO: 23509 - protein, 10 aa, synthetic construct
  source 1..10: note = Seed: FTPFDVVRQC
FQPFDVVRQA

SEQ ID NO: 23510 - protein, 9 aa, synthetic construct
  source 1..9: note = Seed: FLPFFSNVT
FQPFFSNVI

SEQ ID NO: 23511 - protein, 9 aa, synthetic construct
  source 1..9: note = Seed: FLPFFSNVT
FQPFFSNVL

SEQ ID NO: 23512 - protein, 10 aa, synthetic construct
  source 1..10: note = Seed: FLPFFSNVTW
FQPFFSNVTF

SEQ ID NO: 23513 - protein, 10 aa, synthetic construct
  source 1..10: note = Seed: FLPFFSNVTW
FQPFFSNVTH

SEQ ID NO: 23514 - protein, 10 aa, synthetic construct
  source 1..10: note = Seed: FLPFFSNVTW
FQPFFSNVTL

SEQ ID NO: 23515 - protein, 10 aa, synthetic construct
  source 1..10: note = Seed: FLPFFSNVTW
FQPFFSNVTM

SEQ ID NO: 23516 - protein, 10 aa, synthetic construct
  source 1..10: note = Seed: FLPFFSNVTW
FQPFFSNVTW

SEQ ID NO: 23517 - protein, 10 aa, synthetic construct
  source 1..10: note = Seed: FLPFFSNVTW
FQPFFSNVTY

SEQ ID NO: 23518 - protein, 9 aa, synthetic construct
  source 1..9: note = Seed: FLPFFSNVT
FQPFFSNVV

SEQ ID NO: 23519 - protein, 9 aa, synthetic construct
  source 1..9: note = Seed: FTPLVPFWI
FQPLVPFWI

SEQ ID NO: 23520 - protein, 10 aa, synthetic construct
  source 1..10: note = Seed: FTPLVPFWIT
FQPLVPFWIA

SEQ ID NO: 23521 - protein, 11 aa, synthetic construct
  source 1..11: note = Seed: FTPLVPFWITI
FQPLVPFWITV

SEQ ID NO: 23522 - protein, 9 aa, synthetic construct
  source 1..9: note = Seed: FTPLVPFWI
FQPLVPFWL

SEQ ID NO: 23523 - protein, 9 aa, synthetic construct
  source 1..9: note = Seed: FTPLVPFWI
FQPLVPFWV

SEQ ID NO: 23524 - protein, 9 aa, synthetic construct
  source 1..9: note = Seed: FLPRVFSAV
FQPRVFSAA

SEQ ID NO: 23525 - protein, 9 aa, synthetic construct
  source 1..9: note = Seed: FLPRVFSAV
FQPRVFSAI

SEQ ID NO: 23526 - protein, 9 aa, synthetic construct
  source 1..9: note = Seed: FLPRVFSAV
FQPRVFSAL

SEQ ID NO: 23527 - protein, 9 aa, synthetic construct
  source 1..9: note = Seed: FLPRVFSAV
FQPRVFSAM

SEQ ID NO: 23528 - protein, 9 aa, synthetic construct
  source 1..9: note = Seed: FLPRVFSAV
FQPRVFSAV

SEQ ID NO: 23529 - protein, 10 aa, synthetic construct
  source 1..10: note = Seed: FLPRVFSAVG
FQPRVFSAVF

SEQ ID NO: 23530 - protein, 10 aa, synthetic construct
  source 1..10: note = Seed: FLPRVFSAVG
FQPRVFSAVI

SEQ ID NO: 23531 - protein, 10 aa, synthetic construct
  source 1..10: note = Seed: FLPRVFSAVG
FQPRVFSAVL

SEQ ID NO: 23532 - protein, 10 aa, synthetic construct
  source 1..10: note = Seed: FLPRVFSAVG
FQPRVFSAVM

SEQ ID NO: 23533 - protein, 10 aa, synthetic construct
  source 1..10: note = Seed: FLPRVFSAVG
FQPRVFSAVV

SEQ ID NO: 23534 - protein, 8 aa, synthetic construct
  source 1..8: note = Seed: FAPSASAF
FQPSASAF

SEQ ID NO: 23535 - protein, 9 aa, synthetic construct
  source 1..9: note = Seed: FAPSASAFF
FQPSASAFA

SEQ ID NO: 23536 - protein, 9 aa, synthetic construct
  source 1..9: note = Seed: FAPSASAFF
FQPSASAFF

SEQ ID NO: 23537 - protein, 9 aa, synthetic construct
  source 1..9: note = Seed: FAPSASAFF
FQPSASAFI

SEQ ID NO: 23538 - protein, 9 aa, synthetic construct
  source 1..9: note = Seed: FAPSASAFF
FQPSASAFL

SEQ ID NO: 23539 - protein, 9 aa, synthetic construct
  source 1..9: note = Seed: FAPSASAFF
FQPSASAFM

SEQ ID NO: 23540 - protein, 9 aa, synthetic construct
  source 1..9: note = Seed: FAPSASAFF
FQPSASAFV

SEQ ID NO: 23541 - protein, 9 aa, synthetic construct
  source 1..9: note = Seed: FAPSASAFF
FQPSASAFY

SEQ ID NO: 23542 - protein, 8 aa, synthetic construct
  source 1..8: note = Seed: FAPSASAF
FQPSASAY

SEQ ID NO: 23543 - protein, 11 aa, synthetic construct
  source 1..11: note = Seed: FPQSAPHGVVF
FQQSAPHGVVF

SEQ ID NO: 23544 - protein, 11 aa, synthetic construct
  source 1..11: note = Seed: FPQSAPHGVVF
FQQSAPHGVVL

SEQ ID NO: 23545 - protein, 11 aa, synthetic construct
  source 1..11: note = Seed: FPQSAPHGVVF
FQQSAPHGVVM

SEQ ID NO: 23546 - protein, 11 aa, synthetic construct
  source 1..11: note = Seed: FPQSAPHGVVF
FQQSAPHGVVW

SEQ ID NO: 23547 - protein, 11 aa, synthetic construct
  source 1..11: note = Seed: FPQSAPHGVVF
FQQSAPHGVVY

SEQ ID NO: 23548 - protein, 9 aa, synthetic construct
  source 1..9: note = Seed: FLQSINFVR
FQQSINFVR

SEQ ID NO: 23549 - protein, 10 aa, synthetic construct
  source 1..10: note = Seed: FLQSINFVRI
FQQSINFVRL

SEQ ID NO: 23550 - protein, 10 aa, synthetic construct
  source 1..10: note = Seed: FLQSINFVRI
FQQSINFVRV

SEQ ID NO: 23551 - protein, 10 aa, synthetic construct
  source 1..10: note = Seed: FTQSRNLQEF
FQQSRNLQEF

SEQ ID NO: 23552 - protein, 10 aa, synthetic construct
  source 1..10: note = Seed: FTQSRNLQEF
FQQSRNLQEM

SEQ ID NO: 23553 - protein, 10 aa, synthetic construct
  source 1..10: note = Seed: FTQSRNLQEF
FQQSRNLQEY

SEQ ID NO: 23554 - protein, 9 aa, synthetic construct
  source 1..9: note = Seed: FAQVKQIYK
FQQVKQIYR

SEQ ID NO: 23555 - protein, 9 aa, synthetic construct
  source 1..9: note = Seed: FLRDGWEIV
FQRDGWEIL

SEQ ID NO: 23556 - protein, 9 aa, synthetic construct
  source 1..9: note = Seed: FLRDGWEIV
FQRDGWEIV

SEQ ID NO: 23557 - protein, 9 aa, synthetic construct
  source 1..9: note = Seed: FPREGVFVS
FQREGVFVY

SEQ ID NO: 23558 - protein, 10 aa, synthetic construct
  source 1..10: note = Seed: FTRFFYVLGL
FQRFFYVLGA

SEQ ID NO: 23559 - protein, 10 aa, synthetic construct
  source 1..10: note = Seed: FTRFFYVLGL
FQRFFYVLGI

SEQ ID NO: 23560 - protein, 10 aa, synthetic construct
  source 1..10: note = Seed: FTRFFYVLGL
FQRFFYVLGK

SEQ ID NO: 23561 - protein, 10 aa, synthetic construct
  source 1..10: note = Seed: FTRFFYVLGL
FQRFFYVLGL

SEQ ID NO: 23562 - protein, 10 aa, synthetic construct
  source 1..10: note = Seed: FTRFFYVLGL
FQRFFYVLGV

SEQ ID NO: 23563 - protein, 9 aa, synthetic construct
  source 1..9: note = Seed: FTRFFYVLG
FQRFFYVLK

SEQ ID NO: 23564 - protein, 10 aa, synthetic construct
  source 1..10: note = Seed: FTRGVYYPDK
FQRGVYYPDR

SEQ ID NO: 23565 - protein, 9 aa, synthetic construct
  source 1..9: note = Seed: FISAARQGF
FQSAARQGF

SEQ ID NO: 23566 - protein, 10 aa, synthetic construct
  source 1..10: note = Seed: FISAARQGFV
FQSAARQGFV

SEQ ID NO: 23567 - protein, 9 aa, synthetic construct
  source 1..9: note = Seed: FISAARQGF
FQSAARQGL

SEQ ID NO: 23568 - protein, 9 aa, synthetic construct
  source 1..9: note = Seed: FISAARQGF
FQSAARQGM

SEQ ID NO: 23569 - protein, 9 aa, synthetic construct
  source 1..9: note = Seed: FISAARQGF
FQSAARQGY

SEQ ID NO: 23570 - protein, 9 aa, synthetic construct
  source 1..9: note = Seed: FQSAVKRTI
FQSAVKRTF

SEQ ID NO: 23571 - protein, 9 aa, synthetic construct
  source 1..9: note = Seed: FQSAVKRTI
FQSAVKRTL

SEQ ID NO: 23572 - protein, 9 aa, synthetic construct
  source 1..9: note = Seed: FQSAVKRTI
FQSAVKRTM

SEQ ID NO: 23573 - protein, 9 aa, synthetic construct
  source 1..9: note = Seed: FQSAVKRTI
FQSAVKRTY

SEQ ID NO: 23574 - protein, 10 aa, synthetic construct
  source 1..10: note = Seed: FISDEVARDL
FQSDEVARDV

SEQ ID NO: 23575 - protein, 10 aa, synthetic construct
  source 1..10: note = Seed: FTSDLATNNL
FQSDLATNNI

SEQ ID NO: 23576 - protein, 10 aa, synthetic construct
  source 1..10: note = Seed: FTSDLATNNL
FQSDLATNNL

SEQ ID NO: 23577 - protein, 10 aa, synthetic construct
  source 1..10: note = Seed: FTSDLATNNL
FQSDLATNNM

SEQ ID NO: 23578 - protein, 10 aa, synthetic construct
  source 1..10: note = Seed: FTSDLATNNL
FQSDLATNNV

SEQ ID NO: 23579 - protein, 9 aa, synthetic construct
  source 1..9: note = Seed: FTSDYYQLY
FQSDYYQLF

SEQ ID NO: 23580 - protein, 9 aa, synthetic construct
  source 1..9: note = Seed: FTSDYYQLY
FQSDYYQLL

SEQ ID NO: 23581 - protein, 9 aa, synthetic construct
  source 1..9: note = Seed: FTSDYYQLY
FQSDYYQLM

SEQ ID NO: 23582 - protein, 9 aa, synthetic construct
  source 1..9: note = Seed: FTSDYYQLY
FQSDYYQLY

SEQ ID NO: 23583 - protein, 10 aa, synthetic construct
  source 1..10: note = Seed: FTSDYYQLYS
FQSDYYQLYF

SEQ ID NO: 23584 - protein, 10 aa, synthetic construct
  source 1..10: note = Seed: FTSDYYQLYS
FQSDYYQLYM

SEQ ID NO: 23585 - protein, 10 aa, synthetic construct
  source 1..10: note = Seed: FTSDYYQLYS
FQSDYYQLYY

SEQ ID NO: 23586 - protein, 9 aa, synthetic construct
  source 1..9: note = Seed: FASFYYVWK
FQSFYYVWR

SEQ ID NO: 23587 - protein, 9 aa, synthetic construct
  source 1..9: note = Seed: FVSLAIDAY
FQSLAIDAF

SEQ ID NO: 23588 - protein, 9 aa, synthetic construct
  source 1..9: note = Seed: FVSLAIDAY
FQSLAIDAL

SEQ ID NO: 23589 - protein, 9 aa, synthetic construct
  source 1..9: note = Seed: FVSLAIDAY
FQSLAIDAM

SEQ ID NO: 23590 - protein, 9 aa, synthetic construct
  source 1..9: note = Seed: FVSLAIDAY
FQSLAIDAY

SEQ ID NO: 23591 - protein, 9 aa, synthetic construct
  source 1..9: note = Seed: FVSNGTHWF
FQSNGTHWA

SEQ ID NO: 23592 - protein, 9 aa, synthetic construct
  source 1..9: note = Seed: FVSNGTHWF
FQSNGTHWF

SEQ ID NO: 23593 - protein, 9 aa, synthetic construct
  source 1..9: note = Seed: FVSNGTHWF
FQSNGTHWI

SEQ ID NO: 23594 - protein, 9 aa, synthetic construct
  source 1..9: note = Seed: FVSNGTHWF
FQSNGTHWL

SEQ ID NO: 23595 - protein, 9 aa, synthetic construct
  source 1..9: note = Seed: FVSNGTHWF
FQSNGTHWM

SEQ ID NO: 23596 - protein, 9 aa, synthetic construct
  source 1..9: note = Seed: FVSNGTHWF
FQSNGTHWV

SEQ ID NO: 23597 - protein, 9 aa, synthetic construct
  source 1..9: note = Seed: FVSNGTHWF
FQSNGTHWY

SEQ ID NO: 23598 - protein, 9 aa, synthetic construct
  source 1..9: note = Seed: FISNSWLMW
FQSNSWLMW

SEQ ID NO: 23599 - protein, 10 aa, synthetic construct
  source 1..10: note = Seed: FISNSWLMWL
FQSNSWLMWA

SEQ ID NO: 23600 - protein, 10 aa, synthetic construct
  source 1..10: note = Seed: FISNSWLMWL
FQSNSWLMWI

SEQ ID NO: 23601 - protein, 10 aa, synthetic construct
  source 1..10: note = Seed: FISNSWLMWL
FQSNSWLMWL

SEQ ID NO: 23602 - protein, 11 aa, synthetic construct
  source 1..11: note = Seed: FISNSWLMWLI
FQSNSWLMWLA

SEQ ID NO: 23603 - protein, 11 aa, synthetic construct
  source 1..11: note = Seed: FISNSWLMWLI
FQSNSWLMWLI

SEQ ID NO: 23604 - protein, 11 aa, synthetic construct
  source 1..11: note = Seed: FISNSWLMWLI
FQSNSWLMWLL

SEQ ID NO: 23605 - protein, 11 aa, synthetic construct
  source 1..11: note = Seed: FISNSWLMWLI
FQSNSWLMWLV

SEQ ID NO: 23606 - protein, 10 aa, synthetic construct
  source 1..10: note = Seed: FISNSWLMWL
FQSNSWLMWM

SEQ ID NO: 23607 - protein, 10 aa, synthetic construct
  source 1..10: note = Seed: FISNSWLMWL
FQSNSWLMWV

SEQ ID NO: 23608 - protein, 10 aa, synthetic construct
  source 1..10: note = Seed: FSSNVANYQK
FQSNVANYQR

SEQ ID NO: 23609 - protein, 9 aa, synthetic construct
  source 1..9: note = Seed: FSSNVANYQ
FQSNVANYR

SEQ ID NO: 23610 - protein, 9 aa, synthetic construct
  source 1..9: note = Seed: FFSNVTWFH
FQSNVTWFK

SEQ ID NO: 23611 - protein, 9 aa, synthetic construct
  source 1..9: note = Seed: FFSNVTWFH
FQSNVTWFR

SEQ ID NO: 23612 - protein, 9 aa, synthetic construct
  source 1..9: note = Seed: FFSNVTWFH
FQSNVTWFY

SEQ ID NO: 23613 - protein, 11 aa, synthetic construct
  source 1..11: note = Seed: FISPYNSQNAV
FQSPYNSQNAA

SEQ ID NO: 23614 - protein, 11 aa, synthetic construct
  source 1..11: note = Seed: FISPYNSQNAV
FQSPYNSQNAL

SEQ ID NO: 23615 - protein, 11 aa, synthetic construct
  source 1..11: note = Seed: FISPYNSQNAV
FQSPYNSQNAM

SEQ ID NO: 23616 - protein, 10 aa, synthetic construct
  source 1..10: note = Seed: FISPYNSQNA
FQSPYNSQNL

SEQ ID NO: 23617 - protein, 10 aa, synthetic construct
  source 1..10: note = Seed: FISPYNSQNA
FQSPYNSQNV

SEQ ID NO: 23618 - protein, 9 aa, synthetic construct
  source 1..9: note = Seed: FFSYFAVHF
FQSYFAVHF

SEQ ID NO: 23619 - protein, 10 aa, synthetic construct
  source 1..10: note = Seed: FFSYFAVHFI
FQSYFAVHFA

SEQ ID NO: 23620 - protein, 10 aa, synthetic construct
  source 1..10: note = Seed: FFSYFAVHFI
FQSYFAVHFF

SEQ ID NO: 23621 - protein, 10 aa, synthetic construct
  source 1..10: note = Seed: FFSYFAVHFI
FQSYFAVHFI

SEQ ID NO: 23622 - protein, 10 aa, synthetic construct
  source 1..10: note = Seed: FFSYFAVHFI
FQSYFAVHFL

SEQ ID NO: 23623 - protein, 10 aa, synthetic construct
  source 1..10: note = Seed: FFSYFAVHFI
FQSYFAVHFM

SEQ ID NO: 23624 - protein, 10 aa, synthetic construct
  source 1..10: note = Seed: FFSYFAVHFI
FQSYFAVHFV

SEQ ID NO: 23625 - protein, 10 aa, synthetic construct
  source 1..10: note = Seed: FFSYFAVHFI
FQSYFAVHFW

SEQ ID NO: 23626 - protein, 10 aa, synthetic construct
  source 1..10: note = Seed: FFSYFAVHFI
FQSYFAVHFY

SEQ ID NO: 23627 - protein, 9 aa, synthetic construct
  source 1..9: note = Seed: FFSYFAVHF
FQSYFAVHH

SEQ ID NO: 23628 - protein, 9 aa, synthetic construct
  source 1..9: note = Seed: FFSYFAVHF
FQSYFAVHI

SEQ ID NO: 23629 - protein, 9 aa, synthetic construct
  source 1..9: note = Seed: FFSYFAVHF
FQSYFAVHL

SEQ ID NO: 23630 - protein, 9 aa, synthetic construct
  source 1..9: note = Seed: FFSYFAVHF
FQSYFAVHM

SEQ ID NO: 23631 - protein, 9 aa, synthetic construct
  source 1..9: note = Seed: FFSYFAVHF
FQSYFAVHW

SEQ ID NO: 23632 - protein, 9 aa, synthetic construct
  source 1..9: note = Seed: FFSYFAVHF
FQSYFAVHY

SEQ ID NO: 23633 - protein, 9 aa, synthetic construct
  source 1..9: note = Seed: FSTFEEAAL
FQTFEEAAV

SEQ ID NO: 23634 - protein, 9 aa, synthetic construct
  source 1..9: note = Seed: FSTFKCYGV
FQTFKCYGI

SEQ ID NO: 23635 - protein, 9 aa, synthetic construct
  source 1..9: note = Seed: FSTFKCYGV
FQTFKCYGL

SEQ ID NO: 23636 - protein, 9 aa, synthetic construct
  source 1..9: note = Seed: FSTFKCYGV
FQTFKCYGV

SEQ ID NO: 23637 - protein, 9 aa, synthetic construct
  source 1..9: note = Seed: FVTHSKGLY
FQTHSKGLF

SEQ ID NO: 23638 - protein, 9 aa, synthetic construct
  source 1..9: note = Seed: FVTHSKGLY
FQTHSKGLM

SEQ ID NO: 23639 - protein, 9 aa, synthetic construct
  source 1..9: note = Seed: FVTHSKGLY
FQTHSKGLY

SEQ ID NO: 23640 - protein, 10 aa, synthetic construct
  source 1..10: note = Seed: FVTHSKGLYR
FQTHSKGLYR

SEQ ID NO: 23641 - protein, 9 aa, synthetic construct
  source 1..9: note = Seed: FQTRAGCLI
FQTRAGCLF

SEQ ID NO: 23642 - protein, 11 aa, synthetic construct
  source 1..11: note = Seed: FQTRAGCLIGA
FQTRAGCLIGI

SEQ ID NO: 23643 - protein, 11 aa, synthetic construct
  source 1..11: note = Seed: FQTRAGCLIGA
FQTRAGCLIGL

SEQ ID NO: 23644 - protein, 11 aa, synthetic construct
  source 1..11: note = Seed: FQTRAGCLIGA
FQTRAGCLIGV

SEQ ID NO: 23645 - protein, 9 aa, synthetic construct
  source 1..9: note = Seed: FQTRAGCLI
FQTRAGCLL

SEQ ID NO: 23646 - protein, 9 aa, synthetic construct
  source 1..9: note = Seed: FQTRAGCLI
FQTRAGCLM

SEQ ID NO: 23647 - protein, 9 aa, synthetic construct
  source 1..9: note = Seed: FQTRAGCLI
FQTRAGCLV

SEQ ID NO: 23648 - protein, 9 aa, synthetic construct
  source 1..9: note = Seed: FQTRAGCLI
FQTRAGCLY

SEQ ID NO: 23649 - protein, 9 aa, synthetic construct
  source 1..9: note = Seed: FTTVDNINL
FQTVDNINV

SEQ ID NO: 23650 - protein, 9 aa, synthetic construct
  source 1..9: note = Seed: FQTVKPGNF
FQTVKPGNY

SEQ ID NO: 23651 - protein, 11 aa, synthetic construct
  source 1..11: note = Seed: FLTWICLLQFA
FQTWICLLQFV

SEQ ID NO: 23652 - protein, 10 aa, synthetic construct
  source 1..10: note = Seed: FDTYNLWNTF
FQTYNLWNTF

SEQ ID NO: 23653 - protein, 10 aa, synthetic construct
  source 1..10: note = Seed: FDTYNLWNTF
FQTYNLWNTL

SEQ ID NO: 23654 - protein, 10 aa, synthetic construct
  source 1..10: note = Seed: FDTYNLWNTF
FQTYNLWNTM

SEQ ID NO: 23655 - protein, 10 aa, synthetic construct
  source 1..10: note = Seed: FDTYNLWNTF
FQTYNLWNTW

SEQ ID NO: 23656 - protein, 10 aa, synthetic construct
  source 1..10: note = Seed: FDTYNLWNTF
FQTYNLWNTY

SEQ ID NO: 23657 - protein, 9 aa, synthetic construct
  source 1..9: note = Seed: FAVDAAKAY
FQVDAAKAF

SEQ ID NO: 23658 - protein, 9 aa, synthetic construct
  source 1..9: note = Seed: FAVDAAKAY
FQVDAAKAI

SEQ ID NO: 23659 - protein, 9 aa, synthetic construct
  source 1..9: note = Seed: FAVDAAKAY
FQVDAAKAL

SEQ ID NO: 23660 - protein, 9 aa, synthetic construct
  source 1..9: note = Seed: FAVDAAKAY
FQVDAAKAM

SEQ ID NO: 23661 - protein, 9 aa, synthetic construct
  source 1..9: note = Seed: FAVDAAKAY
FQVDAAKAW

SEQ ID NO: 23662 - protein, 9 aa, synthetic construct
  source 1..9: note = Seed: FAVDAAKAY
FQVDAAKAY

SEQ ID NO: 23663 - protein, 10 aa, synthetic construct
  source 1..10: note = Seed: FAVDAAKAYK
FQVDAAKAYR

SEQ ID NO: 23664 - protein, 9 aa, synthetic construct
  source 1..9: note = Seed: FAVHFISNS
FQVHFISNA

SEQ ID NO: 23665 - protein, 9 aa, synthetic construct
  source 1..9: note = Seed: FAVHFISNS
FQVHFISNI

SEQ ID NO: 23666 - protein, 9 aa, synthetic construct
  source 1..9: note = Seed: FAVHFISNS
FQVHFISNL

SEQ ID NO: 23667 - protein, 9 aa, synthetic construct
  source 1..9: note = Seed: FAVHFISNS
FQVHFISNM

SEQ ID NO: 23668 - protein, 10 aa, synthetic construct
  source 1..10: note = Seed: FAVHFISNSW
FQVHFISNSW

SEQ ID NO: 23669 - protein, 9 aa, synthetic construct
  source 1..9: note = Seed: FAVHFISNS
FQVHFISNT

SEQ ID NO: 23670 - protein, 9 aa, synthetic construct
  source 1..9: note = Seed: FAVHFISNS
FQVHFISNV

SEQ ID NO: 23671 - protein, 11 aa, synthetic construct
  source 1..11: note = Seed: FVVKRHTFSNY
FQVKRHTFSNF

SEQ ID NO: 23672 - protein, 11 aa, synthetic construct
  source 1..11: note = Seed: FVVKRHTFSNY
FQVKRHTFSNY

SEQ ID NO: 23673 - protein, 9 aa, synthetic construct
  source 1..9: note = Seed: FNVLFSTVF
FQVLFSTVA

SEQ ID NO: 23674 - protein, 9 aa, synthetic construct
  source 1..9: note = Seed: FNVLFSTVF
FQVLFSTVF

SEQ ID NO: 23675 - protein, 9 aa, synthetic construct
  source 1..9: note = Seed: FNVLFSTVF
FQVLFSTVH

SEQ ID NO: 23676 - protein, 9 aa, synthetic construct
  source 1..9: note = Seed: FNVLFSTVF
FQVLFSTVI

SEQ ID NO: 23677 - protein, 9 aa, synthetic construct
  source 1..9: note = Seed: FNVLFSTVF
FQVLFSTVL

SEQ ID NO: 23678 - protein, 9 aa, synthetic construct
  source 1..9: note = Seed: FNVLFSTVF
FQVLFSTVM

SEQ ID NO: 23679 - protein, 9 aa, synthetic construct
  source 1..9: note = Seed: FNVLFSTVF
FQVLFSTVV

SEQ ID NO: 23680 - protein, 9 aa, synthetic construct
  source 1..9: note = Seed: FNVLFSTVF
FQVLFSTVW

SEQ ID NO: 23681 - protein, 9 aa, synthetic construct
  source 1..9: note = Seed: FNVLFSTVF
FQVLFSTVY

SEQ ID NO: 23682 - protein, 10 aa, synthetic construct
  source 1..10: note = Seed: FKVSIWNLDY
FQVSIWNLDF

SEQ ID NO: 23683 - protein, 10 aa, synthetic construct
  source 1..10: note = Seed: FKVSIWNLDY
FQVSIWNLDM

SEQ ID NO: 23684 - protein, 10 aa, synthetic construct
  source 1..10: note = Seed: FKVSIWNLDY
FQVSIWNLDY

SEQ ID NO: 23685 - protein, 9 aa, synthetic construct
  source 1..9: note = Seed: FVVSTGYHF
FQVSTGYHA

SEQ ID NO: 23686 - protein, 9 aa, synthetic construct
  source 1..9: note = Seed: FVVSTGYHF
FQVSTGYHF

SEQ ID NO: 23687 - protein, 10 aa, synthetic construct
  source 1..10: note = Seed: FVVSTGYHFR
FQVSTGYHFK

SEQ ID NO: 23688 - protein, 10 aa, synthetic construct
  source 1..10: note = Seed: FVVSTGYHFR
FQVSTGYHFR

SEQ ID NO: 23689 - protein, 9 aa, synthetic construct
  source 1..9: note = Seed: FVVSTGYHF
FQVSTGYHI

SEQ ID NO: 23690 - protein, 9 aa, synthetic construct
  source 1..9: note = Seed: FVVSTGYHF
FQVSTGYHL

SEQ ID NO: 23691 - protein, 9 aa, synthetic construct
  source 1..9: note = Seed: FVVSTGYHF
FQVSTGYHM

SEQ ID NO: 23692 - protein, 9 aa, synthetic construct
  source 1..9: note = Seed: FVVSTGYHF
FQVSTGYHV

SEQ ID NO: 23693 - protein, 9 aa, synthetic construct
  source 1..9: note = Seed: FVVSTGYHF
FQVSTGYHW

SEQ ID NO: 23694 - protein, 9 aa, synthetic construct
  source 1..9: note = Seed: FVVSTGYHF
FQVSTGYHY

SEQ ID NO: 23695 - protein, 10 aa, synthetic construct
  source 1..10: note = Seed: FDVVRQCSGV
FQVVRQCSGV

SEQ ID NO: 23696 - protein, 9 aa, synthetic construct
  source 1..9: note = Seed: FYWFFSNYL
FQWFFSNYA

SEQ ID NO: 23697 - protein, 9 aa, synthetic construct
  source 1..9: note = Seed: FYWFFSNYL
FQWFFSNYI

SEQ ID NO: 23698 - protein, 9 aa, synthetic construct
  source 1..9: note = Seed: FYWFFSNYL
FQWFFSNYL

SEQ ID NO: 23699 - protein, 10 aa, synthetic construct
  source 1..10: note = Seed: FYWFFSNYLK
FQWFFSNYLF

SEQ ID NO: 23700 - protein, 10 aa, synthetic construct
  source 1..10: note = Seed: FYWFFSNYLK
FQWFFSNYLK

SEQ ID NO: 23701 - protein, 11 aa, synthetic construct
  source 1..11: note = Seed: FYWFFSNYLKR
FQWFFSNYLKR

SEQ ID NO: 23702 - protein, 10 aa, synthetic construct
  source 1..10: note = Seed: FYWFFSNYLK
FQWFFSNYLR

SEQ ID NO: 23703 - protein, 10 aa, synthetic construct
  source 1..10: note = Seed: FYWFFSNYLK
FQWFFSNYLY

SEQ ID NO: 23704 - protein, 9 aa, synthetic construct
  source 1..9: note = Seed: FYWFFSNYL
FQWFFSNYM

SEQ ID NO: 23705 - protein, 9 aa, synthetic construct
  source 1..9: note = Seed: FYWFFSNYL
FQWFFSNYT

SEQ ID NO: 23706 - protein, 9 aa, synthetic construct
  source 1..9: note = Seed: FYWFFSNYL
FQWFFSNYV

SEQ ID NO: 23707 - protein, 9 aa, synthetic construct
  source 1..9: note = Seed: FYWFFSNYL
FQWFFSNYY

SEQ ID NO: 23708 - protein, 8 aa, synthetic construct
  source 1..8: note = Seed: FLWLLWPV
FQWLLWPA

SEQ ID NO: 23709 - protein, 8 aa, synthetic construct
  source 1..8: note = Seed: FLWLLWPV
FQWLLWPI

SEQ ID NO: 23710 - protein, 8 aa, synthetic construct
  source 1..8: note = Seed: FLWLLWPV
FQWLLWPL

SEQ ID NO: 23711 - protein, 8 aa, synthetic construct
  source 1..8: note = Seed: FLWLLWPV
FQWLLWPV

SEQ ID NO: 23712 - protein, 9 aa, synthetic construct
  source 1..9: note = Seed: FLWLLWPVT
FQWLLWPVA

SEQ ID NO: 23713 - protein, 9 aa, synthetic construct
  source 1..9: note = Seed: FLWLLWPVT
FQWLLWPVI

SEQ ID NO: 23714 - protein, 9 aa, synthetic construct
  source 1..9: note = Seed: FLWLLWPVT
FQWLLWPVL

SEQ ID NO: 23715 - protein, 9 aa, synthetic construct
  source 1..9: note = Seed: FLWLLWPVT
FQWLLWPVM

SEQ ID NO: 23716 - protein, 10 aa, synthetic construct
  source 1..10: note = Seed: FLWLLWPVTL
FQWLLWPVTA

SEQ ID NO: 23717 - protein, 10 aa, synthetic construct
  source 1..10: note = Seed: FLWLLWPVTL
FQWLLWPVTF

SEQ ID NO: 23718 - protein, 10 aa, synthetic construct
  source 1..10: note = Seed: FLWLLWPVTL
FQWLLWPVTI

SEQ ID NO: 23719 - protein, 10 aa, synthetic construct
  source 1..10: note = Seed: FLWLLWPVTL
FQWLLWPVTL

SEQ ID NO: 23720 - protein, 11 aa, synthetic construct
  source 1..11: note = Seed: FLWLLWPVTLA
FQWLLWPVTLA

SEQ ID NO: 23721 - protein, 11 aa, synthetic construct
  source 1..11: note = Seed: FLWLLWPVTLA
FQWLLWPVTLI

SEQ ID NO: 23722 - protein, 11 aa, synthetic construct
  source 1..11: note = Seed: FLWLLWPVTLA
FQWLLWPVTLL

SEQ ID NO: 23723 - protein, 11 aa, synthetic construct
  source 1..11: note = Seed: FLWLLWPVTLA
FQWLLWPVTLV

SEQ ID NO: 23724 - protein, 10 aa, synthetic construct
  source 1..10: note = Seed: FLWLLWPVTL
FQWLLWPVTV

SEQ ID NO: 23725 - protein, 9 aa, synthetic construct
  source 1..9: note = Seed: FLWLLWPVT
FQWLLWPVV

SEQ ID NO: 23726 - protein, 8 aa, synthetic construct
  source 1..8: note = Seed: FSYFAVHF
FQYFAVHF

SEQ ID NO: 23727 - protein, 9 aa, synthetic construct
  source 1..9: note = Seed: FSYFAVHFI
FQYFAVHFA

SEQ ID NO: 23728 - protein, 9 aa, synthetic construct
  source 1..9: note = Seed: FSYFAVHFI
FQYFAVHFC

SEQ ID NO: 23729 - protein, 9 aa, synthetic construct
  source 1..9: note = Seed: FSYFAVHFI
FQYFAVHFF

SEQ ID NO: 23730 - protein, 9 aa, synthetic construct
  source 1..9: note = Seed: FSYFAVHFI
FQYFAVHFH

SEQ ID NO: 23731 - protein, 9 aa, synthetic construct
  source 1..9: note = Seed: FSYFAVHFI
FQYFAVHFI

SEQ ID NO: 23732 - protein, 9 aa, synthetic construct
  source 1..9: note = Seed: FSYFAVHFI
FQYFAVHFL

SEQ ID NO: 23733 - protein, 9 aa, synthetic construct
  source 1..9: note = Seed: FSYFAVHFI
FQYFAVHFM

SEQ ID NO: 23734 - protein, 9 aa, synthetic construct
  source 1..9: note = Seed: FSYFAVHFI
FQYFAVHFS

SEQ ID NO: 23735 - protein, 9 aa, synthetic construct
  source 1..9: note = Seed: FSYFAVHFI
FQYFAVHFT

SEQ ID NO: 23736 - protein, 9 aa, synthetic construct
  source 1..9: note = Seed: FSYFAVHFI
FQYFAVHFV

SEQ ID NO: 23737 - protein, 9 aa, synthetic construct
  source 1..9: note = Seed: FSYFAVHFI
FQYFAVHFW

SEQ ID NO: 23738 - protein, 9 aa, synthetic construct
  source 1..9: note = Seed: FSYFAVHFI
FQYFAVHFY

SEQ ID NO: 23739 - protein, 8 aa, synthetic construct
  source 1..8: note = Seed: FSYFAVHF
FQYFAVHM

SEQ ID NO: 23740 - protein, 8 aa, synthetic construct
  source 1..8: note = Seed: FSYFAVHF
FQYFAVHY

SEQ ID NO: 23741 - protein, 9 aa, synthetic construct
  source 1..9: note = Seed: FYYLGTGPE
FQYLGTGPL

SEQ ID NO: 23742 - protein, 9 aa, synthetic construct
  source 1..9: note = Seed: FYYLGTGPE
FQYLGTGPM

SEQ ID NO: 23743 - protein, 9 aa, synthetic construct
  source 1..9: note = Seed: FNYLKSPNF
FQYLKSPNF

SEQ ID NO: 23744 - protein, 9 aa, synthetic construct
  source 1..9: note = Seed: FNYLKSPNF
FQYLKSPNH

SEQ ID NO: 23745 - protein, 9 aa, synthetic construct
  source 1..9: note = Seed: FNYLKSPNF
FQYLKSPNI

SEQ ID NO: 23746 - protein, 9 aa, synthetic construct
  source 1..9: note = Seed: FNYLKSPNF
FQYLKSPNL

SEQ ID NO: 23747 - protein, 9 aa, synthetic construct
  source 1..9: note = Seed: FNYLKSPNF
FQYLKSPNM

SEQ ID NO: 23748 - protein, 9 aa, synthetic construct
  source 1..9: note = Seed: FNYLKSPNF
FQYLKSPNW

SEQ ID NO: 23749 - protein, 9 aa, synthetic construct
  source 1..9: note = Seed: FNYLKSPNF
FQYLKSPNY

SEQ ID NO: 23750 - protein, 9 aa, synthetic construct
  source 1..9: note = Seed: FCYMHHMEL
FQYMHHMEA

SEQ ID NO: 23751 - protein, 9 aa, synthetic construct
  source 1..9: note = Seed: FCYMHHMEL
FQYMHHMEC

SEQ ID NO: 23752 - protein, 9 aa, synthetic construct
  source 1..9: note = Seed: FCYMHHMEL
FQYMHHMEF

SEQ ID NO: 23753 - protein, 9 aa, synthetic construct
  source 1..9: note = Seed: FCYMHHMEL
FQYMHHMEG

SEQ ID NO: 23754 - protein, 9 aa, synthetic construct
  source 1..9: note = Seed: FCYMHHMEL
FQYMHHMEH

SEQ ID NO: 23755 - protein, 9 aa, synthetic construct
  source 1..9: note = Seed: FCYMHHMEL
FQYMHHMEI

SEQ ID NO: 23756 - protein, 9 aa, synthetic construct
  source 1..9: note = Seed: FCYMHHMEL
FQYMHHMEL

SEQ ID NO: 23757 - protein, 9 aa, synthetic construct
  source 1..9: note = Seed: FCYMHHMEL
FQYMHHMEM

SEQ ID NO: 23758 - protein, 9 aa, synthetic construct
  source 1..9: note = Seed: FCYMHHMEL
FQYMHHMEN

SEQ ID NO: 23759 - protein, 9 aa, synthetic construct
  source 1..9: note = Seed: FCYMHHMEL
FQYMHHMEQ

SEQ ID NO: 23760 - protein, 9 aa, synthetic construct
  source 1..9: note = Seed: FCYMHHMEL
FQYMHHMES

SEQ ID NO: 23761 - protein, 9 aa, synthetic construct
  source 1..9: note = Seed: FCYMHHMEL
FQYMHHMET

SEQ ID NO: 23762 - protein, 9 aa, synthetic construct
  source 1..9: note = Seed: FCYMHHMEL
FQYMHHMEV

SEQ ID NO: 23763 - protein, 9 aa, synthetic construct
  source 1..9: note = Seed: FCYMHHMEL
FQYMHHMEW

SEQ ID NO: 23764 - protein, 9 aa, synthetic construct
  source 1..9: note = Seed: FCYMHHMEL
FQYMHHMEY

SEQ ID NO: 23765 - protein, 9 aa, synthetic construct
  source 1..9: note = Seed: FRYMNSQGL
FQYMNSQGA

SEQ ID NO: 23766 - protein, 9 aa, synthetic construct
  source 1..9: note = Seed: FRYMNSQGL
FQYMNSQGF

SEQ ID NO: 23767 - protein, 9 aa, synthetic construct
  source 1..9: note = Seed: FRYMNSQGL
FQYMNSQGH

SEQ ID NO: 23768 - protein, 9 aa, synthetic construct
  source 1..9: note = Seed: FRYMNSQGL
FQYMNSQGI

SEQ ID NO: 23769 - protein, 9 aa, synthetic construct
  source 1..9: note = Seed: FRYMNSQGL
FQYMNSQGL

SEQ ID NO: 23770 - protein, 9 aa, synthetic construct
  source 1..9: note = Seed: FRYMNSQGL
FQYMNSQGM

SEQ ID NO: 23771 - protein, 9 aa, synthetic construct
  source 1..9: note = Seed: FRYMNSQGL
FQYMNSQGV

SEQ ID NO: 23772 - protein, 9 aa, synthetic construct
  source 1..9: note = Seed: FRYMNSQGL
FQYMNSQGW

SEQ ID NO: 23773 - protein, 9 aa, synthetic construct
  source 1..9: note = Seed: FRYMNSQGL
FQYMNSQGY

SEQ ID NO: 23774 - protein, 8 aa, synthetic construct
  source 1..8: note = Seed: FEYVSQPF
FQYVSQPF

SEQ ID NO: 23775 - protein, 8 aa, synthetic construct
  source 1..8: note = Seed: FEYVSQPF
FQYVSQPI

SEQ ID NO: 23776 - protein, 8 aa, synthetic construct
  source 1..8: note = Seed: FEYVSQPF
FQYVSQPL

SEQ ID NO: 23777 - protein, 8 aa, synthetic construct
  source 1..8: note = Seed: FEYVSQPF
FQYVSQPM

SEQ ID NO: 23778 - protein, 8 aa, synthetic construct
  source 1..8: note = Seed: FEYVSQPF
FQYVSQPW

SEQ ID NO: 23779 - protein, 8 aa, synthetic construct
  source 1..8: note = Seed: FEYVSQPF
FQYVSQPY

SEQ ID NO: 23780 - protein, 9 aa, synthetic construct
  source 1..9: note = Seed: FYYVWKSYV
FQYVWKSYA

SEQ ID NO: 23781 - protein, 9 aa, synthetic construct
  source 1..9: note = Seed: FYYVWKSYV
FQYVWKSYI

SEQ ID NO: 23782 - protein, 9 aa, synthetic construct
  source 1..9: note = Seed: FYYVWKSYV
FQYVWKSYL

SEQ ID NO: 23783 - protein, 9 aa, synthetic construct
  source 1..9: note = Seed: FYYVWKSYV
FQYVWKSYM

SEQ ID NO: 23784 - protein, 9 aa, synthetic construct
  source 1..9: note = Seed: FYYVWKSYV
FQYVWKSYV

SEQ ID NO: 23785 - protein, 10 aa, synthetic construct
  source 1..10: note = Seed: FYYVWKSYVH
FQYVWKSYVM

SEQ ID NO: 23786 - protein, 10 aa, synthetic construct
  source 1..10: note = Seed: FYYVWKSYVH
FQYVWKSYVY

SEQ ID NO: 23787 - protein, 9 aa, synthetic construct
  source 1..9: note = Seed: FYYVWKSYV
FQYVWKSYY

SEQ ID NO: 23788 - protein, 9 aa, synthetic construct
  source 1..9: note = Seed: FFYYSDSPC
FQYYSDSPM

SEQ ID NO: 23789 - protein, 9 aa, synthetic construct
  source 1..9: note = Seed: FVAAIFYLI
FRAAIFYLY

SEQ ID NO: 23790 - protein, 10 aa, synthetic construct
  source 1..10: note = Seed: FCAFAVDAAK
FRAFAVDAAK

SEQ ID NO: 23791 - protein, 10 aa, synthetic construct
  source 1..10: note = Seed: FCAFAVDAAK
FRAFAVDAAR

SEQ ID NO: 23792 - protein, 10 aa, synthetic construct
  source 1..10: note = Seed: FIASFRLFAR
FRASFRLFAK

SEQ ID NO: 23793 - protein, 10 aa, synthetic construct
  source 1..10: note = Seed: FIASFRLFAR
FRASFRLFAR

SEQ ID NO: 23794 - protein, 10 aa, synthetic construct
  source 1..10: note = Seed: FFASFYYVWK
FRASFYYVWK

SEQ ID NO: 23795 - protein, 10 aa, synthetic construct
  source 1..10: note = Seed: FFASFYYVWK
FRASFYYVWR

SEQ ID NO: 23796 - protein, 9 aa, synthetic construct
  source 1..9: note = Seed: FNATRFASV
FRATRFASL

SEQ ID NO: 23797 - protein, 9 aa, synthetic construct
  source 1..9: note = Seed: FNATRFASV
FRATRFASM

SEQ ID NO: 23798 - protein, 10 aa, synthetic construct
  source 1..10: note = Seed: FNATRFASVY
FRATRFASVF

SEQ ID NO: 23799 - protein, 10 aa, synthetic construct
  source 1..10: note = Seed: FNATRFASVY
FRATRFASVM

SEQ ID NO: 23800 - protein, 10 aa, synthetic construct
  source 1..10: note = Seed: FNATRFASVY
FRATRFASVY

SEQ ID NO: 23801 - protein, 11 aa, synthetic construct
  source 1..11: note = Seed: FNATRFASVYA
FRATRFASVYA

SEQ ID NO: 23802 - protein, 11 aa, synthetic construct
  source 1..11: note = Seed: FNATRFASVYA
FRATRFASVYK

SEQ ID NO: 23803 - protein, 9 aa, synthetic construct
  source 1..9: note = Seed: FSAVGNICY
FRAVGNICF

SEQ ID NO: 23804 - protein, 9 aa, synthetic construct
  source 1..9: note = Seed: FSAVGNICY
FRAVGNICY

SEQ ID NO: 23805 - protein, 10 aa, synthetic construct
  source 1..10: note = Seed: FSAVGNICYT
FRAVGNICYV

SEQ ID NO: 23806 - protein, 9 aa, synthetic construct
  source 1..9: note = Seed: FKDASGKPV
FRDASGKPL

SEQ ID NO: 23807 - protein, 9 aa, synthetic construct
  source 1..9: note = Seed: FKDASGKPV
FRDASGKPM

SEQ ID NO: 23808 - protein, 9 aa, synthetic construct
  source 1..9: note = Seed: FPDLNGDVV
FRDLNGDVL

SEQ ID NO: 23809 - protein, 9 aa, synthetic construct
  source 1..9: note = Seed: FPDLNGDVV
FRDLNGDVM

SEQ ID NO: 23810 - protein, 11 aa, synthetic construct
  source 1..11: note = Seed: FPDLNGDVVAI
FRDLNGDVVAI

SEQ ID NO: 23811 - protein, 11 aa, synthetic construct
  source 1..11: note = Seed: FPDLNGDVVAI
FRDLNGDVVAL

SEQ ID NO: 23812 - protein, 11 aa, synthetic construct
  source 1..11: note = Seed: FPDLNGDVVAI
FRDLNGDVVAV

SEQ ID NO: 23813 - protein, 11 aa, synthetic construct
  source 1..11: note = Seed: FVFKNIDGYFK
FRFKNIDGYFR

SEQ ID NO: 23814 - protein, 10 aa, synthetic construct
  source 1..10: note = Seed: FVFKNIDGYF
FRFKNIDGYY

SEQ ID NO: 23815 - protein, 9 aa, synthetic construct
  source 1..9: note = Seed: FLFVAAIFY
FRFVAAIFF

SEQ ID NO: 23816 - protein, 9 aa, synthetic construct
  source 1..9: note = Seed: FLFVAAIFY
FRFVAAIFY

SEQ ID NO: 23817 - protein, 10 aa, synthetic construct
  source 1..10: note = Seed: FLFVAAIFYL
FRFVAAIFYY

SEQ ID NO: 23818 - protein, 9 aa, synthetic construct
  source 1..9: note = Seed: FNGVSFSTF
FRGVSFSTF

SEQ ID NO: 23819 - protein, 9 aa, synthetic construct
  source 1..9: note = Seed: FNGVSFSTF
FRGVSFSTY

SEQ ID NO: 23820 - protein, 9 aa, synthetic construct
  source 1..9: note = Seed: FLHFLPRVF
FRHFLPRVF

SEQ ID NO: 23821 - protein, 9 aa, synthetic construct
  source 1..9: note = Seed: FLHFLPRVF
FRHFLPRVI

SEQ ID NO: 23822 - protein, 9 aa, synthetic construct
  source 1..9: note = Seed: FLHFLPRVF
FRHFLPRVL

SEQ ID NO: 23823 - protein, 9 aa, synthetic construct
  source 1..9: note = Seed: FLHFLPRVF
FRHFLPRVM

SEQ ID NO: 23824 - protein, 9 aa, synthetic construct
  source 1..9: note = Seed: FLHFLPRVF
FRHFLPRVV

SEQ ID NO: 23825 - protein, 9 aa, synthetic construct
  source 1..9: note = Seed: FLHFLPRVF
FRHFLPRVY

SEQ ID NO: 23826 - protein, 10 aa, synthetic construct
  source 1..10: note = Seed: FKIYSKHTPI
FRIYSKHTPA

SEQ ID NO: 23827 - protein, 10 aa, synthetic construct
  source 1..10: note = Seed: FKIYSKHTPI
FRIYSKHTPF

SEQ ID NO: 23828 - protein, 10 aa, synthetic construct
  source 1..10: note = Seed: FKIYSKHTPI
FRIYSKHTPI

SEQ ID NO: 23829 - protein, 10 aa, synthetic construct
  source 1..10: note = Seed: FKIYSKHTPI
FRIYSKHTPL

SEQ ID NO: 23830 - protein, 10 aa, synthetic construct
  source 1..10: note = Seed: FKIYSKHTPI
FRIYSKHTPM

SEQ ID NO: 23831 - protein, 10 aa, synthetic construct
  source 1..10: note = Seed: FKIYSKHTPI
FRIYSKHTPV

SEQ ID NO: 23832 - protein, 10 aa, synthetic construct
  source 1..10: note = Seed: FKIYSKHTPI
FRIYSKHTPY

SEQ ID NO: 23833 - protein, 9 aa, synthetic construct
  source 1..9: note = Seed: FVKHKHAFL
FRKHKHAFF

SEQ ID NO: 23834 - protein, 9 aa, synthetic construct
  source 1..9: note = Seed: FVKHKHAFL
FRKHKHAFL

SEQ ID NO: 23835 - protein, 9 aa, synthetic construct
  source 1..9: note = Seed: FVKHKHAFL
FRKHKHAFM

SEQ ID NO: 23836 - protein, 9 aa, synthetic construct
  source 1..9: note = Seed: FRKSNLKPF
FRKSNLKPL

SEQ ID NO: 23837 - protein, 10 aa, synthetic construct
  source 1..10: note = Seed: FPLCANGQVF
FRLCANGQVF

SEQ ID NO: 23838 - protein, 10 aa, synthetic construct
  source 1..10: note = Seed: FPLCANGQVF
FRLCANGQVY

SEQ ID NO: 23839 - protein, 10 aa, synthetic construct
  source 1..10: note = Seed: FKLKDCVMYA
FRLKDCVMYA

SEQ ID NO: 23840 - protein, 10 aa, synthetic construct
  source 1..10: note = Seed: FKLKDCVMYA
FRLKDCVMYI

SEQ ID NO: 23841 - protein, 10 aa, synthetic construct
  source 1..10: note = Seed: FKLKDCVMYA
FRLKDCVMYL

SEQ ID NO: 23842 - protein, 10 aa, synthetic construct
  source 1..10: note = Seed: FKLKDCVMYA
FRLKDCVMYM

SEQ ID NO: 23843 - protein, 10 aa, synthetic construct
  source 1..10: note = Seed: FKLKDCVMYA
FRLKDCVMYS

SEQ ID NO: 23844 - protein, 10 aa, synthetic construct
  source 1..10: note = Seed: FKLKDCVMYA
FRLKDCVMYT

SEQ ID NO: 23845 - protein, 10 aa, synthetic construct
  source 1..10: note = Seed: FKLKDCVMYA
FRLKDCVMYV

SEQ ID NO: 23846 - protein, 10 aa, synthetic construct
  source 1..10: note = Seed: FPLKLRGTAV
FRLKLRGTAF

SEQ ID NO: 23847 - protein, 10 aa, synthetic construct
  source 1..10: note = Seed: FPLKLRGTAV
FRLKLRGTAI

SEQ ID NO: 23848 - protein, 10 aa, synthetic construct
  source 1..10: note = Seed: FPLKLRGTAV
FRLKLRGTAL

SEQ ID NO: 23849 - protein, 10 aa, synthetic construct
  source 1..10: note = Seed: FPLKLRGTAV
FRLKLRGTAM

SEQ ID NO: 23850 - protein, 10 aa, synthetic construct
  source 1..10: note = Seed: FPLKLRGTAV
FRLKLRGTAV

SEQ ID NO: 23851 - protein, 11 aa, synthetic construct
  source 1..11: note = Seed: FPLKLRGTAVM
FRLKLRGTAVF

SEQ ID NO: 23852 - protein, 11 aa, synthetic construct
  source 1..11: note = Seed: FPLKLRGTAVM
FRLKLRGTAVY

SEQ ID NO: 23853 - protein, 9 aa, synthetic construct
  source 1..9: note = Seed: FKLNEEIAI
FRLNEEIAF

SEQ ID NO: 23854 - protein, 9 aa, synthetic construct
  source 1..9: note = Seed: FKLNEEIAI
FRLNEEIAL

SEQ ID NO: 23855 - protein, 9 aa, synthetic construct
  source 1..9: note = Seed: FKLNEEIAI
FRLNEEIAY

SEQ ID NO: 23856 - protein, 9 aa, synthetic construct
  source 1..9: note = Seed: FLLNKEMYL
FRLNKEMYF

SEQ ID NO: 23857 - protein, 9 aa, synthetic construct
  source 1..9: note = Seed: FLLNKEMYL
FRLNKEMYI

SEQ ID NO: 23858 - protein, 9 aa, synthetic construct
  source 1..9: note = Seed: FLLNKEMYL
FRLNKEMYL

SEQ ID NO: 23859 - protein, 10 aa, synthetic construct
  source 1..10: note = Seed: FLLNKEMYLK
FRLNKEMYLA

SEQ ID NO: 23860 - protein, 10 aa, synthetic construct
  source 1..10: note = Seed: FLLNKEMYLK
FRLNKEMYLI

SEQ ID NO: 23861 - protein, 10 aa, synthetic construct
  source 1..10: note = Seed: FLLNKEMYLK
FRLNKEMYLL

SEQ ID NO: 23862 - protein, 10 aa, synthetic construct
  source 1..10: note = Seed: FLLNKEMYLK
FRLNKEMYLM

SEQ ID NO: 23863 - protein, 10 aa, synthetic construct
  source 1..10: note = Seed: FLLNKEMYLK
FRLNKEMYLV

SEQ ID NO: 23864 - protein, 9 aa, synthetic construct
  source 1..9: note = Seed: FLLNKEMYL
FRLNKEMYM

SEQ ID NO: 23865 - protein, 9 aa, synthetic construct
  source 1..9: note = Seed: FLLNKEMYL
FRLNKEMYV

SEQ ID NO: 23866 - protein, 9 aa, synthetic construct
  source 1..9: note = Seed: FLLNKEMYL
FRLNKEMYY

SEQ ID NO: 23867 - protein, 10 aa, synthetic construct
  source 1..10: note = Seed: FRLTLGVYDY
FRLTLGVYDK

SEQ ID NO: 23868 - protein, 9 aa, synthetic construct
  source 1..9: note = Seed: FYLTNDVSF
FRLTNDVSF

SEQ ID NO: 23869 - protein, 10 aa, synthetic construct
  source 1..10: note = Seed: FYLTNDVSFL
FRLTNDVSFA

SEQ ID NO: 23870 - protein, 10 aa, synthetic construct
  source 1..10: note = Seed: FYLTNDVSFL
FRLTNDVSFI

SEQ ID NO: 23871 - protein, 10 aa, synthetic construct
  source 1..10: note = Seed: FYLTNDVSFL
FRLTNDVSFL

SEQ ID NO: 23872 - protein, 11 aa, synthetic construct
  source 1..11: note = Seed: FYLTNDVSFLA
FRLTNDVSFLL

SEQ ID NO: 23873 - protein, 11 aa, synthetic construct
  source 1..11: note = Seed: FYLTNDVSFLA
FRLTNDVSFLV

SEQ ID NO: 23874 - protein, 10 aa, synthetic construct
  source 1..10: note = Seed: FYLTNDVSFL
FRLTNDVSFM

SEQ ID NO: 23875 - protein, 10 aa, synthetic construct
  source 1..10: note = Seed: FYLTNDVSFL
FRLTNDVSFV

SEQ ID NO: 23876 - protein, 9 aa, synthetic construct
  source 1..9: note = Seed: FYLTNDVSF
FRLTNDVSY

SEQ ID NO: 23877 - protein, 10 aa, synthetic construct
  source 1..10: note = Seed: FQLTPIAVQM
FRLTPIAVQA

SEQ ID NO: 23878 - protein, 10 aa, synthetic construct
  source 1..10: note = Seed: FQLTPIAVQM
FRLTPIAVQI

SEQ ID NO: 23879 - protein, 10 aa, synthetic construct
  source 1..10: note = Seed: FQLTPIAVQM
FRLTPIAVQL

SEQ ID NO: 23880 - protein, 10 aa, synthetic construct
  source 1..10: note = Seed: FQLTPIAVQM
FRLTPIAVQM

SEQ ID NO: 23881 - protein, 10 aa, synthetic construct
  source 1..10: note = Seed: FQLTPIAVQM
FRLTPIAVQV

SEQ ID NO: 23882 - protein, 10 aa, synthetic construct
  source 1..10: note = Seed: FELTSMKYFV
FRLTSMKYFA

SEQ ID NO: 23883 - protein, 10 aa, synthetic construct
  source 1..10: note = Seed: FELTSMKYFV
FRLTSMKYFI

SEQ ID NO: 23884 - protein, 10 aa, synthetic construct
  source 1..10: note = Seed: FELTSMKYFV
FRLTSMKYFL

SEQ ID NO: 23885 - protein, 10 aa, synthetic construct
  source 1..10: note = Seed: FELTSMKYFV
FRLTSMKYFM

SEQ ID NO: 23886 - protein, 10 aa, synthetic construct
  source 1..10: note = Seed: FELTSMKYFV
FRLTSMKYFV

SEQ ID NO: 23887 - protein, 10 aa, synthetic construct
  source 1..10: note = Seed: FGLVAEWFLA
FRLVAEWFLA

SEQ ID NO: 23888 - protein, 10 aa, synthetic construct
  source 1..10: note = Seed: FGLVAEWFLA
FRLVAEWFLI

SEQ ID NO: 23889 - protein, 10 aa, synthetic construct
  source 1..10: note = Seed: FGLVAEWFLA
FRLVAEWFLL

SEQ ID NO: 23890 - protein, 10 aa, synthetic construct
  source 1..10: note = Seed: FGLVAEWFLA
FRLVAEWFLM

SEQ ID NO: 23891 - protein, 10 aa, synthetic construct
  source 1..10: note = Seed: FGLVAEWFLA
FRLVAEWFLV

SEQ ID NO: 23892 - protein, 10 aa, synthetic construct
  source 1..10: note = Seed: FVLWAHGFEL
FRLWAHGFEA

SEQ ID NO: 23893 - protein, 10 aa, synthetic construct
  source 1..10: note = Seed: FVLWAHGFEL
FRLWAHGFEI

SEQ ID NO: 23894 - protein, 10 aa, synthetic construct
  source 1..10: note = Seed: FVLWAHGFEL
FRLWAHGFEL

SEQ ID NO: 23895 - protein, 11 aa, synthetic construct
  source 1..11: note = Seed: FVLWAHGFELT
FRLWAHGFELA

SEQ ID NO: 23896 - protein, 11 aa, synthetic construct
  source 1..11: note = Seed: FVLWAHGFELT
FRLWAHGFELC

SEQ ID NO: 23897 - protein, 11 aa, synthetic construct
  source 1..11: note = Seed: FVLWAHGFELT
FRLWAHGFELD

SEQ ID NO: 23898 - protein, 11 aa, synthetic construct
  source 1..11: note = Seed: FVLWAHGFELT
FRLWAHGFELE

SEQ ID NO: 23899 - protein, 11 aa, synthetic construct
  source 1..11: note = Seed: FVLWAHGFELT
FRLWAHGFELF

SEQ ID NO: 23900 - protein, 11 aa, synthetic construct
  source 1..11: note = Seed: FVLWAHGFELT
FRLWAHGFELG

SEQ ID NO: 23901 - protein, 11 aa, synthetic construct
  source 1..11: note = Seed: FVLWAHGFELT
FRLWAHGFELH

SEQ ID NO: 23902 - protein, 11 aa, synthetic construct
  source 1..11: note = Seed: FVLWAHGFELT
FRLWAHGFELI

SEQ ID NO: 23903 - protein, 11 aa, synthetic construct
  source 1..11: note = Seed: FVLWAHGFELT
FRLWAHGFELK

SEQ ID NO: 23904 - protein, 11 aa, synthetic construct
  source 1..11: note = Seed: FVLWAHGFELT
FRLWAHGFELL

SEQ ID NO: 23905 - protein, 11 aa, synthetic construct
  source 1..11: note = Seed: FVLWAHGFELT
FRLWAHGFELM

SEQ ID NO: 23906 - protein, 11 aa, synthetic construct
  source 1..11: note = Seed: FVLWAHGFELT
FRLWAHGFELN

SEQ ID NO: 23907 - protein, 11 aa, synthetic construct
  source 1..11: note = Seed: FVLWAHGFELT
FRLWAHGFELP

SEQ ID NO: 23908 - protein, 11 aa, synthetic construct
  source 1..11: note = Seed: FVLWAHGFELT
FRLWAHGFELQ

SEQ ID NO: 23909 - protein, 11 aa, synthetic construct
  source 1..11: note = Seed: FVLWAHGFELT
FRLWAHGFELR

SEQ ID NO: 23910 - protein, 11 aa, synthetic construct
  source 1..11: note = Seed: FVLWAHGFELT
FRLWAHGFELS

SEQ ID NO: 23911 - protein, 11 aa, synthetic construct
  source 1..11: note = Seed: FVLWAHGFELT
FRLWAHGFELT

SEQ ID NO: 23912 - protein, 11 aa, synthetic construct
  source 1..11: note = Seed: FVLWAHGFELT
FRLWAHGFELV

SEQ ID NO: 23913 - protein, 11 aa, synthetic construct
  source 1..11: note = Seed: FVLWAHGFELT
FRLWAHGFELW

SEQ ID NO: 23914 - protein, 11 aa, synthetic construct
  source 1..11: note = Seed: FVLWAHGFELT
FRLWAHGFELY

SEQ ID NO: 23915 - protein, 10 aa, synthetic construct
  source 1..10: note = Seed: FVLWAHGFEL
FRLWAHGFEM

SEQ ID NO: 23916 - protein, 10 aa, synthetic construct
  source 1..10: note = Seed: FVLWAHGFEL
FRLWAHGFES

SEQ ID NO: 23917 - protein, 10 aa, synthetic construct
  source 1..10: note = Seed: FVLWAHGFEL
FRLWAHGFET

SEQ ID NO: 23918 - protein, 10 aa, synthetic construct
  source 1..10: note = Seed: FVLWAHGFEL
FRLWAHGFEV

SEQ ID NO: 23919 - protein, 10 aa, synthetic construct
  source 1..10: note = Seed: FHLYLQYIRK
FRLYLQYIRK

SEQ ID NO: 23920 - protein, 10 aa, synthetic construct
  source 1..10: note = Seed: FSMMILSDDA
FRMMILSDDL

SEQ ID NO: 23921 - protein, 10 aa, synthetic construct
  source 1..10: note = Seed: FSMMILSDDA
FRMMILSDDV

SEQ ID NO: 23922 - protein, 9 aa, synthetic construct
  source 1..9: note = Seed: FAMQMAYRF
FRMQMAYRF

SEQ ID NO: 23923 - protein, 9 aa, synthetic construct
  source 1..9: note = Seed: FAMQMAYRF
FRMQMAYRY

SEQ ID NO: 23924 - protein, 8 aa, synthetic construct
  source 1..8: note = Seed: FDMSKFPL
FRMSKFPL

SEQ ID NO: 23925 - protein, 10 aa, synthetic construct
  source 1..10: note = Seed: FDMSKFPLKL
FRMSKFPLKA

SEQ ID NO: 23926 - protein, 10 aa, synthetic construct
  source 1..10: note = Seed: FDMSKFPLKL
FRMSKFPLKI

SEQ ID NO: 23927 - protein, 10 aa, synthetic construct
  source 1..10: note = Seed: FDMSKFPLKL
FRMSKFPLKL

SEQ ID NO: 23928 - protein, 10 aa, synthetic construct
  source 1..10: note = Seed: FDMSKFPLKL
FRMSKFPLKV

SEQ ID NO: 23929 - protein, 10 aa, synthetic construct
  source 1..10: note = Seed: FNMVYMPASW
FRMVYMPASF

SEQ ID NO: 23930 - protein, 10 aa, synthetic construct
  source 1..10: note = Seed: FNMVYMPASW
FRMVYMPASM

SEQ ID NO: 23931 - protein, 10 aa, synthetic construct
  source 1..10: note = Seed: FNMVYMPASW
FRMVYMPASY

SEQ ID NO: 23932 - protein, 9 aa, synthetic construct
  source 1..9: note = Seed: FENKTTLPV
FRNKTTLPF

SEQ ID NO: 23933 - protein, 9 aa, synthetic construct
  source 1..9: note = Seed: FENKTTLPV
FRNKTTLPI

SEQ ID NO: 23934 - protein, 9 aa, synthetic construct
  source 1..9: note = Seed: FENKTTLPV
FRNKTTLPL

SEQ ID NO: 23935 - protein, 9 aa, synthetic construct
  source 1..9: note = Seed: FENKTTLPV
FRNKTTLPM

SEQ ID NO: 23936 - protein, 9 aa, synthetic construct
  source 1..9: note = Seed: FENKTTLPV
FRNKTTLPY

SEQ ID NO: 23937 - protein, 9 aa, synthetic construct
  source 1..9: note = Seed: FVNLKQLPF
FRNLKQLPF

SEQ ID NO: 23938 - protein, 9 aa, synthetic construct
  source 1..9: note = Seed: FVNLKQLPF
FRNLKQLPY

SEQ ID NO: 23939 - protein, 9 aa, synthetic construct
  source 1..9: note = Seed: FTNVYADSF
FRNVYADSF

SEQ ID NO: 23940 - protein, 11 aa, synthetic construct
  source 1..11: note = Seed: FTNVYADSFVI
FRNVYADSFVV

SEQ ID NO: 23941 - protein, 9 aa, synthetic construct
  source 1..9: note = Seed: FTNVYADSF
FRNVYADSY

SEQ ID NO: 23942 - protein, 10 aa, synthetic construct
  source 1..10: note = Seed: FTPFDVVRQC
FRPFDVVRQA

SEQ ID NO: 23943 - protein, 10 aa, synthetic construct
  source 1..10: note = Seed: FLPFFSNVTW
FRPFFSNVTF

SEQ ID NO: 23944 - protein, 10 aa, synthetic construct
  source 1..10: note = Seed: FLPFFSNVTW
FRPFFSNVTH

SEQ ID NO: 23945 - protein, 10 aa, synthetic construct
  source 1..10: note = Seed: FLPFFSNVTW
FRPFFSNVTL

SEQ ID NO: 23946 - protein, 10 aa, synthetic construct
  source 1..10: note = Seed: FLPFFSNVTW
FRPFFSNVTM

SEQ ID NO: 23947 - protein, 10 aa, synthetic construct
  source 1..10: note = Seed: FLPFFSNVTW
FRPFFSNVTW

SEQ ID NO: 23948 - protein, 10 aa, synthetic construct
  source 1..10: note = Seed: FLPFFSNVTW
FRPFFSNVTY

SEQ ID NO: 23949 - protein, 10 aa, synthetic construct
  source 1..10: note = Seed: FTPLVPFWIT
FRPLVPFWIA

SEQ ID NO: 23950 - protein, 11 aa, synthetic construct
  source 1..11: note = Seed: FTPLVPFWITI
FRPLVPFWITV

SEQ ID NO: 23951 - protein, 9 aa, synthetic construct
  source 1..9: note = Seed: FLPRVFSAV
FRPRVFSAM

SEQ ID NO: 23952 - protein, 10 aa, synthetic construct
  source 1..10: note = Seed: FLPRVFSAVG
FRPRVFSAVF

SEQ ID NO: 23953 - protein, 10 aa, synthetic construct
  source 1..10: note = Seed: FLPRVFSAVG
FRPRVFSAVI

SEQ ID NO: 23954 - protein, 10 aa, synthetic construct
  source 1..10: note = Seed: FLPRVFSAVG
FRPRVFSAVL

SEQ ID NO: 23955 - protein, 10 aa, synthetic construct
  source 1..10: note = Seed: FLPRVFSAVG
FRPRVFSAVM

SEQ ID NO: 23956 - protein, 10 aa, synthetic construct
  source 1..10: note = Seed: FLPRVFSAVG
FRPRVFSAVV

SEQ ID NO: 23957 - protein, 9 aa, synthetic construct
  source 1..9: note = Seed: FAPSASAFF
FRPSASAFF

SEQ ID NO: 23958 - protein, 9 aa, synthetic construct
  source 1..9: note = Seed: FAPSASAFF
FRPSASAFL

SEQ ID NO: 23959 - protein, 9 aa, synthetic construct
  source 1..9: note = Seed: FAPSASAFF
FRPSASAFM

SEQ ID NO: 23960 - protein, 9 aa, synthetic construct
  source 1..9: note = Seed: FAPSASAFF
FRPSASAFY

SEQ ID NO: 23961 - protein, 11 aa, synthetic construct
  source 1..11: note = Seed: FPQSAPHGVVF
FRQSAPHGVVF

SEQ ID NO: 23962 - protein, 11 aa, synthetic construct
  source 1..11: note = Seed: FPQSAPHGVVF
FRQSAPHGVVL

SEQ ID NO: 23963 - protein, 11 aa, synthetic construct
  source 1..11: note = Seed: FPQSAPHGVVF
FRQSAPHGVVM

SEQ ID NO: 23964 - protein, 11 aa, synthetic construct
  source 1..11: note = Seed: FPQSAPHGVVF
FRQSAPHGVVW

SEQ ID NO: 23965 - protein, 11 aa, synthetic construct
  source 1..11: note = Seed: FPQSAPHGVVF
FRQSAPHGVVY

SEQ ID NO: 23966 - protein, 10 aa, synthetic construct
  source 1..10: note = Seed: FTQSRNLQEF
FRQSRNLQEF

SEQ ID NO: 23967 - protein, 10 aa, synthetic construct
  source 1..10: note = Seed: FTQSRNLQEF
FRQSRNLQEY

SEQ ID NO: 23968 - protein, 10 aa, synthetic construct
  source 1..10: note = Seed: FTRFFYVLGL
FRRFFYVLGF

SEQ ID NO: 23969 - protein, 10 aa, synthetic construct
  source 1..10: note = Seed: FTRFFYVLGL
FRRFFYVLGI

SEQ ID NO: 23970 - protein, 10 aa, synthetic construct
  source 1..10: note = Seed: FTRFFYVLGL
FRRFFYVLGK

SEQ ID NO: 23971 - protein, 10 aa, synthetic construct
  source 1..10: note = Seed: FTRFFYVLGL
FRRFFYVLGL

SEQ ID NO: 23972 - protein, 10 aa, synthetic construct
  source 1..10: note = Seed: FTRFFYVLGL
FRRFFYVLGM

SEQ ID NO: 23973 - protein, 10 aa, synthetic construct
  source 1..10: note = Seed: FTRFFYVLGL
FRRFFYVLGR

SEQ ID NO: 23974 - protein, 10 aa, synthetic construct
  source 1..10: note = Seed: FTRFFYVLGL
FRRFFYVLGY

SEQ ID NO: 23975 - protein, 9 aa, synthetic construct
  source 1..9: note = Seed: FTSDYYQLY
FRSDYYQLF

SEQ ID NO: 23976 - protein, 9 aa, synthetic construct
  source 1..9: note = Seed: FTSDYYQLY
FRSDYYQLI

SEQ ID NO: 23977 - protein, 9 aa, synthetic construct
  source 1..9: note = Seed: FTSDYYQLY
FRSDYYQLL

SEQ ID NO: 23978 - protein, 9 aa, synthetic construct
  source 1..9: note = Seed: FTSDYYQLY
FRSDYYQLM

SEQ ID NO: 23979 - protein, 9 aa, synthetic construct
  source 1..9: note = Seed: FTSDYYQLY
FRSDYYQLV

SEQ ID NO: 23980 - protein, 9 aa, synthetic construct
  source 1..9: note = Seed: FTSDYYQLY
FRSDYYQLY

SEQ ID NO: 23981 - protein, 10 aa, synthetic construct
  source 1..10: note = Seed: FTSDYYQLYS
FRSDYYQLYF

SEQ ID NO: 23982 - protein, 10 aa, synthetic construct
  source 1..10: note = Seed: FTSDYYQLYS
FRSDYYQLYM

SEQ ID NO: 23983 - protein, 10 aa, synthetic construct
  source 1..10: note = Seed: FTSDYYQLYS
FRSDYYQLYY

SEQ ID NO: 23984 - protein, 9 aa, synthetic construct
  source 1..9: note = Seed: FVSLAIDAY
FRSLAIDAF

SEQ ID NO: 23985 - protein, 9 aa, synthetic construct
  source 1..9: note = Seed: FVSLAIDAY
FRSLAIDAY

SEQ ID NO: 23986 - protein, 10 aa, synthetic construct
  source 1..10: note = Seed: FSSNVANYQK
FRSNVANYQR

SEQ ID NO: 23987 - protein, 11 aa, synthetic construct
  source 1..11: note = Seed: FISPYNSQNAV
FRSPYNSQNAA

SEQ ID NO: 23988 - protein, 11 aa, synthetic construct
  source 1..11: note = Seed: FISPYNSQNAV
FRSPYNSQNAL

SEQ ID NO: 23989 - protein, 11 aa, synthetic construct
  source 1..11: note = Seed: FISPYNSQNAV
FRSPYNSQNAM

SEQ ID NO: 23990 - protein, 9 aa, synthetic construct
  source 1..9: note = Seed: FFSYFAVHF
FRSYFAVHF

SEQ ID NO: 23991 - protein, 10 aa, synthetic construct
  source 1..10: note = Seed: FFSYFAVHFI
FRSYFAVHFA

SEQ ID NO: 23992 - protein, 10 aa, synthetic construct
  source 1..10: note = Seed: FFSYFAVHFI
FRSYFAVHFF

SEQ ID NO: 23993 - protein, 10 aa, synthetic construct
  source 1..10: note = Seed: FFSYFAVHFI
FRSYFAVHFI

SEQ ID NO: 23994 - protein, 10 aa, synthetic construct
  source 1..10: note = Seed: FFSYFAVHFI
FRSYFAVHFV

SEQ ID NO: 23995 - protein, 10 aa, synthetic construct
  source 1..10: note = Seed: FFSYFAVHFI
FRSYFAVHFW

SEQ ID NO: 23996 - protein, 10 aa, synthetic construct
  source 1..10: note = Seed: FFSYFAVHFI
FRSYFAVHFY

SEQ ID NO: 23997 - protein, 9 aa, synthetic construct
  source 1..9: note = Seed: FFSYFAVHF
FRSYFAVHY

SEQ ID NO: 23998 - protein, 10 aa, synthetic construct
  source 1..10: note = Seed: FVTHSKGLYR
FRTHSKGLYR

SEQ ID NO: 23999 - protein, 10 aa, synthetic construct
  source 1..10: note = Seed: FDTYNLWNTF
FRTYNLWNTF

SEQ ID NO: 24000 - protein, 10 aa, synthetic construct
  source 1..10: note = Seed: FDTYNLWNTF
FRTYNLWNTW

SEQ ID NO: 24001 - protein, 10 aa, synthetic construct
  source 1..10: note = Seed: FDTYNLWNTF
FRTYNLWNTY

SEQ ID NO: 24002 - protein, 9 aa, synthetic construct
  source 1..9: note = Seed: FAVDAAKAY
FRVDAAKAF

SEQ ID NO: 24003 - protein, 9 aa, synthetic construct
  source 1..9: note = Seed: FAVDAAKAY
FRVDAAKAY

SEQ ID NO: 24004 - protein, 10 aa, synthetic construct
  source 1..10: note = Seed: FAVDAAKAYK
FRVDAAKAYR

SEQ ID NO: 24005 - protein, 9 aa, synthetic construct
  source 1..9: note = Seed: FNVLFSTVF
FRVLFSTVF

SEQ ID NO: 24006 - protein, 9 aa, synthetic construct
  source 1..9: note = Seed: FNVLFSTVF
FRVLFSTVM

SEQ ID NO: 24007 - protein, 9 aa, synthetic construct
  source 1..9: note = Seed: FNVLFSTVF
FRVLFSTVY

SEQ ID NO: 24008 - protein, 9 aa, synthetic construct
  source 1..9: note = Seed: FVVSTGYHF
FRVSTGYHF

SEQ ID NO: 24009 - protein, 10 aa, synthetic construct
  source 1..10: note = Seed: FVVSTGYHFR
FRVSTGYHFK

SEQ ID NO: 24010 - protein, 10 aa, synthetic construct
  source 1..10: note = Seed: FVVSTGYHFR
FRVSTGYHFR

SEQ ID NO: 24011 - protein, 9 aa, synthetic construct
  source 1..9: note = Seed: FVVSTGYHF
FRVSTGYHY

SEQ ID NO: 24012 - protein, 9 aa, synthetic construct
  source 1..9: note = Seed: FYWFFSNYL
FRWFFSNYL

SEQ ID NO: 24013 - protein, 10 aa, synthetic construct
  source 1..10: note = Seed: FYWFFSNYLK
FRWFFSNYLF

SEQ ID NO: 24014 - protein, 10 aa, synthetic construct
  source 1..10: note = Seed: FYWFFSNYLK
FRWFFSNYLK

SEQ ID NO: 24015 - protein, 11 aa, synthetic construct
  source 1..11: note = Seed: FYWFFSNYLKR
FRWFFSNYLKR

SEQ ID NO: 24016 - protein, 10 aa, synthetic construct
  source 1..10: note = Seed: FYWFFSNYLK
FRWFFSNYLR

SEQ ID NO: 24017 - protein, 10 aa, synthetic construct
  source 1..10: note = Seed: FYWFFSNYLK
FRWFFSNYLY

SEQ ID NO: 24018 - protein, 9 aa, synthetic construct
  source 1..9: note = Seed: FYWFFSNYL
FRWFFSNYM

SEQ ID NO: 24019 - protein, 10 aa, synthetic construct
  source 1..10: note = Seed: FLWLLWPVTL
FRWLLWPVTF

SEQ ID NO: 24020 - protein, 11 aa, synthetic construct
  source 1..11: note = Seed: FLWLLWPVTLA
FRWLLWPVTLI

SEQ ID NO: 24021 - protein, 11 aa, synthetic construct
  source 1..11: note = Seed: FLWLLWPVTLA
FRWLLWPVTLL

SEQ ID NO: 24022 - protein, 11 aa, synthetic construct
  source 1..11: note = Seed: FLWLLWPVTLA
FRWLLWPVTLV

SEQ ID NO: 24023 - protein, 9 aa, synthetic construct
  source 1..9: note = Seed: FSYFAVHFI
FRYFAVHFF

SEQ ID NO: 24024 - protein, 9 aa, synthetic construct
  source 1..9: note = Seed: FSYFAVHFI
FRYFAVHFI

SEQ ID NO: 24025 - protein, 9 aa, synthetic construct
  source 1..9: note = Seed: FSYFAVHFI
FRYFAVHFL

SEQ ID NO: 24026 - protein, 9 aa, synthetic construct
  source 1..9: note = Seed: FSYFAVHFI
FRYFAVHFM

SEQ ID NO: 24027 - protein, 9 aa, synthetic construct
  source 1..9: note = Seed: FSYFAVHFI
FRYFAVHFV

SEQ ID NO: 24028 - protein, 9 aa, synthetic construct
  source 1..9: note = Seed: FSYFAVHFI
FRYFAVHFY

SEQ ID NO: 24029 - protein, 9 aa, synthetic construct
  source 1..9: note = Seed: FYYLGTGPE
FRYLGTGPF

SEQ ID NO: 24030 - protein, 9 aa, synthetic construct
  source 1..9: note = Seed: FYYLGTGPE
FRYLGTGPM

SEQ ID NO: 24031 - protein, 9 aa, synthetic construct
  source 1..9: note = Seed: FNYLKSPNF
FRYLKSPNF

SEQ ID NO: 24032 - protein, 9 aa, synthetic construct
  source 1..9: note = Seed: FNYLKSPNF
FRYLKSPNY

SEQ ID NO: 24033 - protein, 9 aa, synthetic construct
  source 1..9: note = Seed: FCYMHHMEL
FRYMHHMEA

SEQ ID NO: 24034 - protein, 9 aa, synthetic construct
  source 1..9: note = Seed: FCYMHHMEL
FRYMHHMEF

SEQ ID NO: 24035 - protein, 9 aa, synthetic construct
  source 1..9: note = Seed: FCYMHHMEL
FRYMHHMEI

SEQ ID NO: 24036 - protein, 9 aa, synthetic construct
  source 1..9: note = Seed: FCYMHHMEL
FRYMHHMEL

SEQ ID NO: 24037 - protein, 9 aa, synthetic construct
  source 1..9: note = Seed: FCYMHHMEL
FRYMHHMEM

SEQ ID NO: 24038 - protein, 9 aa, synthetic construct
  source 1..9: note = Seed: FCYMHHMEL
FRYMHHMEV

SEQ ID NO: 24039 - protein, 9 aa, synthetic construct
  source 1..9: note = Seed: FCYMHHMEL
FRYMHHMEW

SEQ ID NO: 24040 - protein, 9 aa, synthetic construct
  source 1..9: note = Seed: FCYMHHMEL
FRYMHHMEY

SEQ ID NO: 24041 - protein, 9 aa, synthetic construct
  source 1..9: note = Seed: FRYMNSQGL
FRYMNSQGA

SEQ ID NO: 24042 - protein, 9 aa, synthetic construct
  source 1..9: note = Seed: FRYMNSQGL
FRYMNSQGF

SEQ ID NO: 24043 - protein, 9 aa, synthetic construct
  source 1..9: note = Seed: FRYMNSQGL
FRYMNSQGI

SEQ ID NO: 24044 - protein, 9 aa, synthetic construct
  source 1..9: note = Seed: FRYMNSQGL
FRYMNSQGM

SEQ ID NO: 24045 - protein, 9 aa, synthetic construct
  source 1..9: note = Seed: FRYMNSQGL
FRYMNSQGV

SEQ ID NO: 24046 - protein, 9 aa, synthetic construct
  source 1..9: note = Seed: FRYMNSQGL
FRYMNSQGY

SEQ ID NO: 24047 - protein, 8 aa, synthetic construct
  source 1..8: note = Seed: FEYVSQPF
FRYVSQPY

SEQ ID NO: 24048 - protein, 9 aa, synthetic construct
  source 1..9: note = Seed: FYYVWKSYV
FRYVWKSYF

SEQ ID NO: 24049 - protein, 9 aa, synthetic construct
  source 1..9: note = Seed: FYYVWKSYV
FRYVWKSYI

SEQ ID NO: 24050 - protein, 9 aa, synthetic construct
  source 1..9: note = Seed: FYYVWKSYV
FRYVWKSYL

SEQ ID NO: 24051 - protein, 9 aa, synthetic construct
  source 1..9: note = Seed: FYYVWKSYV
FRYVWKSYM

SEQ ID NO: 24052 - protein, 9 aa, synthetic construct
  source 1..9: note = Seed: FYYVWKSYV
FRYVWKSYV

SEQ ID NO: 24053 - protein, 11 aa, synthetic construct
  source 1..11: note = Seed: FYYVWKSYVHV
FRYVWKSYVHF

SEQ ID NO: 24054 - protein, 10 aa, synthetic construct
  source 1..10: note = Seed: FYYVWKSYVH
FRYVWKSYVM

SEQ ID NO: 24055 - protein, 10 aa, synthetic construct
  source 1..10: note = Seed: FYYVWKSYVH
FRYVWKSYVY

SEQ ID NO: 24056 - protein, 9 aa, synthetic construct
  source 1..9: note = Seed: FYYVWKSYV
FRYVWKSYY

SEQ ID NO: 24057 - protein, 9 aa, synthetic construct
  source 1..9: note = Seed: FFYYSDSPC
FRYYSDSPF

SEQ ID NO: 24058 - protein, 9 aa, synthetic construct
  source 1..9: note = Seed: FFYYSDSPC
FRYYSDSPL

SEQ ID NO: 24059 - protein, 9 aa, synthetic construct
  source 1..9: note = Seed: FFYYSDSPC
FRYYSDSPM

SEQ ID NO: 24060 - protein, 9 aa, synthetic construct
  source 1..9: note = Seed: FFYYSDSPC
FRYYSDSPY

SEQ ID NO: 24061 - protein, 9 aa, synthetic construct
  source 1..9: note = Seed: FVAAIFYLI
FSAAIFYLA

SEQ ID NO: 24062 - protein, 9 aa, synthetic construct
  source 1..9: note = Seed: FVAAIFYLI
FSAAIFYLF

SEQ ID NO: 24063 - protein, 9 aa, synthetic construct
  source 1..9: note = Seed: FVAAIFYLI
FSAAIFYLH

SEQ ID NO: 24064 - protein, 9 aa, synthetic construct
  source 1..9: note = Seed: FVAAIFYLI
FSAAIFYLI

SEQ ID NO: 24065 - protein, 9 aa, synthetic construct
  source 1..9: note = Seed: FVAAIFYLI
FSAAIFYLK

SEQ ID NO: 24066 - protein, 9 aa, synthetic construct
  source 1..9: note = Seed: FVAAIFYLI
FSAAIFYLL

SEQ ID NO: 24067 - protein, 9 aa, synthetic construct
  source 1..9: note = Seed: FVAAIFYLI
FSAAIFYLM

SEQ ID NO: 24068 - protein, 9 aa, synthetic construct
  source 1..9: note = Seed: FVAAIFYLI
FSAAIFYLR

SEQ ID NO: 24069 - protein, 9 aa, synthetic construct
  source 1..9: note = Seed: FVAAIFYLI
FSAAIFYLS

SEQ ID NO: 24070 - protein, 9 aa, synthetic construct
  source 1..9: note = Seed: FVAAIFYLI
FSAAIFYLT

SEQ ID NO: 24071 - protein, 9 aa, synthetic construct
  source 1..9: note = Seed: FVAAIFYLI
FSAAIFYLV

SEQ ID NO: 24072 - protein, 9 aa, synthetic construct
  source 1..9: note = Seed: FVAAIFYLI
FSAAIFYLY

SEQ ID NO: 24073 - protein, 10 aa, synthetic construct
  source 1..10: note = Seed: FCAFAVDAAK
FSAFAVDAAK

SEQ ID NO: 24074 - protein, 10 aa, synthetic construct
  source 1..10: note = Seed: FCAFAVDAAK
FSAFAVDAAR

SEQ ID NO: 24075 - protein, 9 aa, synthetic construct
  source 1..9: note = Seed: FLAFVVFLL
FSAFVVFLA

SEQ ID NO: 24076 - protein, 9 aa, synthetic construct
  source 1..9: note = Seed: FLAFVVFLL
FSAFVVFLI

SEQ ID NO: 24077 - protein, 9 aa, synthetic construct
  source 1..9: note = Seed: FLAFVVFLL
FSAFVVFLL

SEQ ID NO: 24078 - protein, 10 aa, synthetic construct
  source 1..10: note = Seed: FLAFVVFLLV
FSAFVVFLLA

SEQ ID NO: 24079 - protein, 10 aa, synthetic construct
  source 1..10: note = Seed: FLAFVVFLLV
FSAFVVFLLI

SEQ ID NO: 24080 - protein, 10 aa, synthetic construct
  source 1..10: note = Seed: FLAFVVFLLV
FSAFVVFLLV

SEQ ID NO: 24081 - protein, 9 aa, synthetic construct
  source 1..9: note = Seed: FLAFVVFLL
FSAFVVFLM

SEQ ID NO: 24082 - protein, 9 aa, synthetic construct
  source 1..9: note = Seed: FLAFVVFLL
FSAFVVFLT

SEQ ID NO: 24083 - protein, 9 aa, synthetic construct
  source 1..9: note = Seed: FLAFVVFLL
FSAFVVFLV

SEQ ID NO: 24084 - protein, 9 aa, synthetic construct
  source 1..9: note = Seed: FGAGAALQI
FSAGAALQF

SEQ ID NO: 24085 - protein, 9 aa, synthetic construct
  source 1..9: note = Seed: FGAGAALQI
FSAGAALQI

SEQ ID NO: 24086 - protein, 9 aa, synthetic construct
  source 1..9: note = Seed: FGAGAALQI
FSAGAALQL

SEQ ID NO: 24087 - protein, 9 aa, synthetic construct
  source 1..9: note = Seed: FGAGAALQI
FSAGAALQM

SEQ ID NO: 24088 - protein, 9 aa, synthetic construct
  source 1..9: note = Seed: FGAGAALQI
FSAGAALQV

SEQ ID NO: 24089 - protein, 9 aa, synthetic construct
  source 1..9: note = Seed: FGAGAALQI
FSAGAALQY

SEQ ID NO: 24090 - protein, 9 aa, synthetic construct
  source 1..9: note = Seed: FIAGLIAIV
FSAGLIAIA

SEQ ID NO: 24091 - protein, 9 aa, synthetic construct
  source 1..9: note = Seed: FIAGLIAIV
FSAGLIAIF

SEQ ID NO: 24092 - protein, 9 aa, synthetic construct
  source 1..9: note = Seed: FIAGLIAIV
FSAGLIAII

SEQ ID NO: 24093 - protein, 9 aa, synthetic construct
  source 1..9: note = Seed: FIAGLIAIV
FSAGLIAIL

SEQ ID NO: 24094 - protein, 9 aa, synthetic construct
  source 1..9: note = Seed: FIAGLIAIV
FSAGLIAIM

SEQ ID NO: 24095 - protein, 9 aa, synthetic construct
  source 1..9: note = Seed: FIAGLIAIV
FSAGLIAIV

SEQ ID NO: 24096 - protein, 9 aa, synthetic construct
  source 1..9: note = Seed: FIAGLIAIV
FSAGLIAIY

SEQ ID NO: 24097 - protein, 9 aa, synthetic construct
  source 1..9: note = Seed: FLAHIQWMV
FSAHIQWMA

SEQ ID NO: 24098 - protein, 9 aa, synthetic construct
  source 1..9: note = Seed: FLAHIQWMV
FSAHIQWMI

SEQ ID NO: 24099 - protein, 9 aa, synthetic construct
  source 1..9: note = Seed: FLAHIQWMV
FSAHIQWML

SEQ ID NO: 24100 - protein, 9 aa, synthetic construct
  source 1..9: note = Seed: FLAHIQWMV
FSAHIQWMM

SEQ ID NO: 24101 - protein, 9 aa, synthetic construct
  source 1..9: note = Seed: FLAHIQWMV
FSAHIQWMT

SEQ ID NO: 24102 - protein, 9 aa, synthetic construct
  source 1..9: note = Seed: FLAHIQWMV
FSAHIQWMV

SEQ ID NO: 24103 - protein, 9 aa, synthetic construct
  source 1..9: note = Seed: FNAIATCDW
FSAIATCDW

SEQ ID NO: 24104 - protein, 8 aa, synthetic construct
  source 1..8: note = Seed: FGAISSVL
FSAISSVF

SEQ ID NO: 24105 - protein, 8 aa, synthetic construct
  source 1..8: note = Seed: FGAISSVL
FSAISSVL

SEQ ID NO: 24106 - protein, 8 aa, synthetic construct
  source 1..8: note = Seed: FGAISSVL
FSAISSVM

SEQ ID NO: 24107 - protein, 8 aa, synthetic construct
  source 1..8: note = Seed: FGAISSVL
FSAISSVY

SEQ ID NO: 24108 - protein, 9 aa, synthetic construct
  source 1..9: note = Seed: FLALCADSI
FSALCADSV

SEQ ID NO: 24109 - protein, 10 aa, synthetic construct
  source 1..10: note = Seed: FSALEPLVDL
FSALEPLVDW

SEQ ID NO: 24110 - protein, 10 aa, synthetic construct
  source 1..10: note = Seed: FSALEPLVDL
FSALEPLVDY

SEQ ID NO: 24111 - protein, 9 aa, synthetic construct
  source 1..9: note = Seed: FTALTQHGK
FSALTQHGK

SEQ ID NO: 24112 - protein, 10 aa, synthetic construct
  source 1..10: note = Seed: FTALTQHGKE
FSALTQHGKR

SEQ ID NO: 24113 - protein, 9 aa, synthetic construct
  source 1..9: note = Seed: FTALTQHGK
FSALTQHGR

SEQ ID NO: 24114 - protein, 9 aa, synthetic construct
  source 1..9: note = Seed: FIASFRLFA
FSASFRLFA

SEQ ID NO: 24115 - protein, 10 aa, synthetic construct
  source 1..10: note = Seed: FIASFRLFAR
FSASFRLFAK

SEQ ID NO: 24116 - protein, 10 aa, synthetic construct
  source 1..10: note = Seed: FIASFRLFAR
FSASFRLFAR

SEQ ID NO: 24117 - protein, 9 aa, synthetic construct
  source 1..9: note = Seed: FIASFRLFA
FSASFRLFI

SEQ ID NO: 24118 - protein, 9 aa, synthetic construct
  source 1..9: note = Seed: FIASFRLFA
FSASFRLFL

SEQ ID NO: 24119 - protein, 9 aa, synthetic construct
  source 1..9: note = Seed: FIASFRLFA
FSASFRLFV

SEQ ID NO: 24120 - protein, 9 aa, synthetic construct
  source 1..9: note = Seed: FFASFYYVW
FSASFYYVF

SEQ ID NO: 24121 - protein, 10 aa, synthetic construct
  source 1..10: note = Seed: FFASFYYVWK
FSASFYYVWK

SEQ ID NO: 24122 - protein, 10 aa, synthetic construct
  source 1..10: note = Seed: FFASFYYVWK
FSASFYYVWR

SEQ ID NO: 24123 - protein, 9 aa, synthetic construct
  source 1..9: note = Seed: FFASFYYVW
FSASFYYVY

SEQ ID NO: 24124 - protein, 9 aa, synthetic construct
  source 1..9: note = Seed: FNATRFASV
FSATRFASA

SEQ ID NO: 24125 - protein, 9 aa, synthetic construct
  source 1..9: note = Seed: FNATRFASV
FSATRFASF

SEQ ID NO: 24126 - protein, 9 aa, synthetic construct
  source 1..9: note = Seed: FNATRFASV
FSATRFASI

SEQ ID NO: 24127 - protein, 9 aa, synthetic construct
  source 1..9: note = Seed: FNATRFASV
FSATRFASL

SEQ ID NO: 24128 - protein, 9 aa, synthetic construct
  source 1..9: note = Seed: FNATRFASV
FSATRFASM

SEQ ID NO: 24129 - protein, 9 aa, synthetic construct
  source 1..9: note = Seed: FNATRFASV
FSATRFASV

SEQ ID NO: 24130 - protein, 10 aa, synthetic construct
  source 1..10: note = Seed: FNATRFASVY
FSATRFASVF

SEQ ID NO: 24131 - protein, 10 aa, synthetic construct
  source 1..10: note = Seed: FNATRFASVY
FSATRFASVL

SEQ ID NO: 24132 - protein, 10 aa, synthetic construct
  source 1..10: note = Seed: FNATRFASVY
FSATRFASVM

SEQ ID NO: 24133 - protein, 10 aa, synthetic construct
  source 1..10: note = Seed: FNATRFASVY
FSATRFASVW

SEQ ID NO: 24134 - protein, 10 aa, synthetic construct
  source 1..10: note = Seed: FNATRFASVY
FSATRFASVY

SEQ ID NO: 24135 - protein, 9 aa, synthetic construct
  source 1..9: note = Seed: FNATRFASV
FSATRFASW

SEQ ID NO: 24136 - protein, 9 aa, synthetic construct
  source 1..9: note = Seed: FNATRFASV
FSATRFASY

SEQ ID NO: 24137 - protein, 9 aa, synthetic construct
  source 1..9: note = Seed: FSAVGNICY
FSAVGNICF

SEQ ID NO: 24138 - protein, 9 aa, synthetic construct
  source 1..9: note = Seed: FSAVGNICY
FSAVGNICL

SEQ ID NO: 24139 - protein, 9 aa, synthetic construct
  source 1..9: note = Seed: FSAVGNICY
FSAVGNICM

SEQ ID NO: 24140 - protein, 9 aa, synthetic construct
  source 1..9: note = Seed: FSAVGNICY
FSAVGNICW

SEQ ID NO: 24141 - protein, 10 aa, synthetic construct
  source 1..10: note = Seed: FSAVGNICYT
FSAVGNICYI

SEQ ID NO: 24142 - protein, 10 aa, synthetic construct
  source 1..10: note = Seed: FSAVGNICYT
FSAVGNICYV

SEQ ID NO: 24143 - protein, 9 aa, synthetic construct
  source 1..9: note = Seed: FLAYILFTR
FSAYILFTA

SEQ ID NO: 24144 - protein, 9 aa, synthetic construct
  source 1..9: note = Seed: FLAYILFTR
FSAYILFTI

SEQ ID NO: 24145 - protein, 9 aa, synthetic construct
  source 1..9: note = Seed: FLAYILFTR
FSAYILFTK

SEQ ID NO: 24146 - protein, 9 aa, synthetic construct
  source 1..9: note = Seed: FLAYILFTR
FSAYILFTL

SEQ ID NO: 24147 - protein, 9 aa, synthetic construct
  source 1..9: note = Seed: FLAYILFTR
FSAYILFTR

SEQ ID NO: 24148 - protein, 10 aa, synthetic construct
  source 1..10: note = Seed: FLAYILFTRF
FSAYILFTRA

SEQ ID NO: 24149 - protein, 10 aa, synthetic construct
  source 1..10: note = Seed: FLAYILFTRF
FSAYILFTRC

SEQ ID NO: 24150 - protein, 10 aa, synthetic construct
  source 1..10: note = Seed: FLAYILFTRF
FSAYILFTRD

SEQ ID NO: 24151 - protein, 10 aa, synthetic construct
  source 1..10: note = Seed: FLAYILFTRF
FSAYILFTRE

SEQ ID NO: 24152 - protein, 10 aa, synthetic construct
  source 1..10: note = Seed: FLAYILFTRF
FSAYILFTRF

SEQ ID NO: 24153 - protein, 10 aa, synthetic construct
  source 1..10: note = Seed: FLAYILFTRF
FSAYILFTRG

SEQ ID NO: 24154 - protein, 10 aa, synthetic construct
  source 1..10: note = Seed: FLAYILFTRF
FSAYILFTRH

SEQ ID NO: 24155 - protein, 10 aa, synthetic construct
  source 1..10: note = Seed: FLAYILFTRF
FSAYILFTRI

SEQ ID NO: 24156 - protein, 10 aa, synthetic construct
  source 1..10: note = Seed: FLAYILFTRF
FSAYILFTRK

SEQ ID NO: 24157 - protein, 10 aa, synthetic construct
  source 1..10: note = Seed: FLAYILFTRF
FSAYILFTRL

SEQ ID NO: 24158 - protein, 10 aa, synthetic construct
  source 1..10: note = Seed: FLAYILFTRF
FSAYILFTRM

SEQ ID NO: 24159 - protein, 10 aa, synthetic construct
  source 1..10: note = Seed: FLAYILFTRF
FSAYILFTRN

SEQ ID NO: 24160 - protein, 10 aa, synthetic construct
  source 1..10: note = Seed: FLAYILFTRF
FSAYILFTRP

SEQ ID NO: 24161 - protein, 10 aa, synthetic construct
  source 1..10: note = Seed: FLAYILFTRF
FSAYILFTRQ

SEQ ID NO: 24162 - protein, 10 aa, synthetic construct
  source 1..10: note = Seed: FLAYILFTRF
FSAYILFTRR

SEQ ID NO: 24163 - protein, 10 aa, synthetic construct
  source 1..10: note = Seed: FLAYILFTRF
FSAYILFTRS

SEQ ID NO: 24164 - protein, 10 aa, synthetic construct
  source 1..10: note = Seed: FLAYILFTRF
FSAYILFTRT

SEQ ID NO: 24165 - protein, 10 aa, synthetic construct
  source 1..10: note = Seed: FLAYILFTRF
FSAYILFTRV

SEQ ID NO: 24166 - protein, 10 aa, synthetic construct
  source 1..10: note = Seed: FLAYILFTRF
FSAYILFTRW

SEQ ID NO: 24167 - protein, 10 aa, synthetic construct
  source 1..10: note = Seed: FLAYILFTRF
FSAYILFTRY

SEQ ID NO: 24168 - protein, 9 aa, synthetic construct
  source 1..9: note = Seed: FLAYILFTR
FSAYILFTV

SEQ ID NO: 24169 - protein, 9 aa, synthetic construct
  source 1..9: note = Seed: FLAYILFTR
FSAYILFTY

SEQ ID NO: 24170 - protein, 9 aa, synthetic construct
  source 1..9: note = Seed: FLCLFLLPS
FSCLFLLPV

SEQ ID NO: 24171 - protein, 9 aa, synthetic construct
  source 1..9: note = Seed: FLCWHTNCY
FSCWHTNCF

SEQ ID NO: 24172 - protein, 9 aa, synthetic construct
  source 1..9: note = Seed: FLCWHTNCY
FSCWHTNCM

SEQ ID NO: 24173 - protein, 9 aa, synthetic construct
  source 1..9: note = Seed: FLCWHTNCY
FSCWHTNCY

SEQ ID NO: 24174 - protein, 9 aa, synthetic construct
  source 1..9: note = Seed: FGDDTVIEV
FSDDTVIEF

SEQ ID NO: 24175 - protein, 9 aa, synthetic construct
  source 1..9: note = Seed: FGDDTVIEV
FSDDTVIEI

SEQ ID NO: 24176 - protein, 9 aa, synthetic construct
  source 1..9: note = Seed: FGDDTVIEV
FSDDTVIEL

SEQ ID NO: 24177 - protein, 9 aa, synthetic construct
  source 1..9: note = Seed: FGDDTVIEV
FSDDTVIEM

SEQ ID NO: 24178 - protein, 9 aa, synthetic construct
  source 1..9: note = Seed: FGDDTVIEV
FSDDTVIEV

SEQ ID NO: 24179 - protein, 8 aa, synthetic construct
  source 1..8: note = Seed: FVDGVPFV
FSDGVPFF

SEQ ID NO: 24180 - protein, 8 aa, synthetic construct
  source 1..8: note = Seed: FVDGVPFV
FSDGVPFL

SEQ ID NO: 24181 - protein, 8 aa, synthetic construct
  source 1..8: note = Seed: FVDGVPFV
FSDGVPFM

SEQ ID NO: 24182 - protein, 9 aa, synthetic construct
  source 1..9: note = Seed: FVDGVPFVV
FSDGVPFVF

SEQ ID NO: 24183 - protein, 9 aa, synthetic construct
  source 1..9: note = Seed: FVDGVPFVV
FSDGVPFVI

SEQ ID NO: 24184 - protein, 9 aa, synthetic construct
  source 1..9: note = Seed: FVDGVPFVV
FSDGVPFVL

SEQ ID NO: 24185 - protein, 9 aa, synthetic construct
  source 1..9: note = Seed: FVDGVPFVV
FSDGVPFVM

SEQ ID NO: 24186 - protein, 9 aa, synthetic construct
  source 1..9: note = Seed: FVDGVPFVV
FSDGVPFVV

SEQ ID NO: 24187 - protein, 9 aa, synthetic construct
  source 1..9: note = Seed: FVDGVPFVV
FSDGVPFVY

SEQ ID NO: 24188 - protein, 9 aa, synthetic construct
  source 1..9: note = Seed: FPDLNGDVV
FSDLNGDVF

SEQ ID NO: 24189 - protein, 9 aa, synthetic construct
  source 1..9: note = Seed: FPDLNGDVV
FSDLNGDVI

SEQ ID NO: 24190 - protein, 9 aa, synthetic construct
  source 1..9: note = Seed: FPDLNGDVV
FSDLNGDVL

SEQ ID NO: 24191 - protein, 9 aa, synthetic construct
  source 1..9: note = Seed: FPDLNGDVV
FSDLNGDVM

SEQ ID NO: 24192 - protein, 9 aa, synthetic construct
  source 1..9: note = Seed: FPDLNGDVV
FSDLNGDVV

SEQ ID NO: 24193 - protein, 11 aa, synthetic construct
  source 1..11: note = Seed: FPDLNGDVVAI
FSDLNGDVVAI

SEQ ID NO: 24194 - protein, 11 aa, synthetic construct
  source 1..11: note = Seed: FPDLNGDVVAI
FSDLNGDVVAL

SEQ ID NO: 24195 - protein, 11 aa, synthetic construct
  source 1..11: note = Seed: FPDLNGDVVAI
FSDLNGDVVAV

SEQ ID NO: 24196 - protein, 9 aa, synthetic construct
  source 1..9: note = Seed: FPDLNGDVV
FSDLNGDVY

SEQ ID NO: 24197 - protein, 9 aa, synthetic construct
  source 1..9: note = Seed: FEEAALCTF
FSEAALCTF

SEQ ID NO: 24198 - protein, 10 aa, synthetic construct
  source 1..10: note = Seed: FIERYKLEGY
FSERYKLEGY

SEQ ID NO: 24199 - protein, 11 aa, synthetic construct
  source 1..11: note = Seed: FIETISLAGSY
FSETISLAGSW

SEQ ID NO: 24200 - protein, 10 aa, synthetic construct
  source 1..10: note = Seed: FVETVKGLDY
FSETVKGLDY

SEQ ID NO: 24201 - protein, 9 aa, synthetic construct
  source 1..9: note = Seed: FVFKNIDGY
FSFKNIDGF

SEQ ID NO: 24202 - protein, 9 aa, synthetic construct
  source 1..9: note = Seed: FVFKNIDGY
FSFKNIDGK

SEQ ID NO: 24203 - protein, 9 aa, synthetic construct
  source 1..9: note = Seed: FVFKNIDGY
FSFKNIDGL

SEQ ID NO: 24204 - protein, 9 aa, synthetic construct
  source 1..9: note = Seed: FVFKNIDGY
FSFKNIDGM

SEQ ID NO: 24205 - protein, 9 aa, synthetic construct
  source 1..9: note = Seed: FVFKNIDGY
FSFKNIDGR

SEQ ID NO: 24206 - protein, 9 aa, synthetic construct
  source 1..9: note = Seed: FVFKNIDGY
FSFKNIDGV

SEQ ID NO: 24207 - protein, 9 aa, synthetic construct
  source 1..9: note = Seed: FVFKNIDGY
FSFKNIDGW

SEQ ID NO: 24208 - protein, 9 aa, synthetic construct
  source 1..9: note = Seed: FVFKNIDGY
FSFKNIDGY

SEQ ID NO: 24209 - protein, 10 aa, synthetic construct
  source 1..10: note = Seed: FVFKNIDGYF
FSFKNIDGYF

SEQ ID NO: 24210 - protein, 11 aa, synthetic construct
  source 1..11: note = Seed: FVFKNIDGYFK
FSFKNIDGYFR

SEQ ID NO: 24211 - protein, 10 aa, synthetic construct
  source 1..10: note = Seed: FVFKNIDGYF
FSFKNIDGYV

SEQ ID NO: 24212 - protein, 10 aa, synthetic construct
  source 1..10: note = Seed: FVFKNIDGYF
FSFKNIDGYW

SEQ ID NO: 24213 - protein, 10 aa, synthetic construct
  source 1..10: note = Seed: FVFKNIDGYF
FSFKNIDGYY

SEQ ID NO: 24214 - protein, 10 aa, synthetic construct
  source 1..10: note = Seed: FLFLTWICLL
FSFLTWICLV

SEQ ID NO: 24215 - protein, 10 aa, synthetic construct
  source 1..10: note = Seed: FPFNKWGKAR
FSFNKWGKAR

SEQ ID NO: 24216 - protein, 9 aa, synthetic construct
  source 1..9: note = Seed: FLFVAAIFY
FSFVAAIFF

SEQ ID NO: 24217 - protein, 9 aa, synthetic construct
  source 1..9: note = Seed: FLFVAAIFY
FSFVAAIFM

SEQ ID NO: 24218 - protein, 9 aa, synthetic construct
  source 1..9: note = Seed: FLFVAAIFY
FSFVAAIFY

SEQ ID NO: 24219 - protein, 10 aa, synthetic construct
  source 1..10: note = Seed: FLFVAAIFYL
FSFVAAIFYA

SEQ ID NO: 24220 - protein, 10 aa, synthetic construct
  source 1..10: note = Seed: FLFVAAIFYL
FSFVAAIFYI

SEQ ID NO: 24221 - protein, 10 aa, synthetic construct
  source 1..10: note = Seed: FLFVAAIFYL
FSFVAAIFYL

SEQ ID NO: 24222 - protein, 11 aa, synthetic construct
  source 1..11: note = Seed: FLFVAAIFYLI
FSFVAAIFYLV

SEQ ID NO: 24223 - protein, 10 aa, synthetic construct
  source 1..10: note = Seed: FLFVAAIFYL
FSFVAAIFYV

SEQ ID NO: 24224 - protein, 10 aa, synthetic construct
  source 1..10: note = Seed: FLFVAAIFYL
FSFVAAIFYY

SEQ ID NO: 24225 - protein, 9 aa, synthetic construct
  source 1..9: note = Seed: FGGASCCLY
FSGASCCLY

SEQ ID NO: 24226 - protein, 9 aa, synthetic construct
  source 1..9: note = Seed: FGGCVFSYV
FSGCVFSYA

SEQ ID NO: 24227 - protein, 9 aa, synthetic construct
  source 1..9: note = Seed: FGGCVFSYV
FSGCVFSYI

SEQ ID NO: 24228 - protein, 9 aa, synthetic construct
  source 1..9: note = Seed: FGGCVFSYV
FSGCVFSYL

SEQ ID NO: 24229 - protein, 9 aa, synthetic construct
  source 1..9: note = Seed: FGGCVFSYV
FSGCVFSYV

SEQ ID NO: 24230 - protein, 10 aa, synthetic construct
  source 1..10: note = Seed: FNGIGVTQNV
FSGIGVTQNV

SEQ ID NO: 24231 - protein, 9 aa, synthetic construct
  source 1..9: note = Seed: FLGRYMSAL
FSGRYMSAF

SEQ ID NO: 24232 - protein, 9 aa, synthetic construct
  source 1..9: note = Seed: FLGRYMSAL
FSGRYMSAL

SEQ ID NO: 24233 - protein, 9 aa, synthetic construct
  source 1..9: note = Seed: FLGRYMSAL
FSGRYMSAM

SEQ ID NO: 24234 - protein, 9 aa, synthetic construct
  source 1..9: note = Seed: FLGRYMSAL
FSGRYMSAV

SEQ ID NO: 24235 - protein, 9 aa, synthetic construct
  source 1..9: note = Seed: FLGRYMSAL
FSGRYMSAY

SEQ ID NO: 24236 - protein, 9 aa, synthetic construct
  source 1..9: note = Seed: FNGVSFSTF
FSGVSFSTF

SEQ ID NO: 24237 - protein, 9 aa, synthetic construct
  source 1..9: note = Seed: FNGVSFSTF
FSGVSFSTY

SEQ ID NO: 24238 - protein, 10 aa, synthetic construct
  source 1..10: note = Seed: FLGYFCTCYF
FSGYFCTCYV

SEQ ID NO: 24239 - protein, 10 aa, synthetic construct
  source 1..10: note = Seed: FLGYFCTCYF
FSGYFCTCYY

SEQ ID NO: 24240 - protein, 9 aa, synthetic construct
  source 1..9: note = Seed: FQHANLDSC
FSHANLDSI

SEQ ID NO: 24241 - protein, 9 aa, synthetic construct
  source 1..9: note = Seed: FQHANLDSC
FSHANLDSL

SEQ ID NO: 24242 - protein, 9 aa, synthetic construct
  source 1..9: note = Seed: FQHANLDSC
FSHANLDSV

SEQ ID NO: 24243 - protein, 9 aa, synthetic construct
  source 1..9: note = Seed: FLHFLPRVF
FSHFLPRVA

SEQ ID NO: 24244 - protein, 9 aa, synthetic construct
  source 1..9: note = Seed: FLHFLPRVF
FSHFLPRVF

SEQ ID NO: 24245 - protein, 9 aa, synthetic construct
  source 1..9: note = Seed: FLHFLPRVF
FSHFLPRVI

SEQ ID NO: 24246 - protein, 9 aa, synthetic construct
  source 1..9: note = Seed: FLHFLPRVF
FSHFLPRVL

SEQ ID NO: 24247 - protein, 9 aa, synthetic construct
  source 1..9: note = Seed: FLHFLPRVF
FSHFLPRVM

SEQ ID NO: 24248 - protein, 9 aa, synthetic construct
  source 1..9: note = Seed: FLHFLPRVF
FSHFLPRVV

SEQ ID NO: 24249 - protein, 9 aa, synthetic construct
  source 1..9: note = Seed: FLHFLPRVF
FSHFLPRVY

SEQ ID NO: 24250 - protein, 9 aa, synthetic construct
  source 1..9: note = Seed: FSHSQLGGL
FSHSQLGGF

SEQ ID NO: 24251 - protein, 11 aa, synthetic construct
  source 1..11: note = Seed: FSHSQLGGLHL
FSHSQLGGLHF

SEQ ID NO: 24252 - protein, 11 aa, synthetic construct
  source 1..11: note = Seed: FSHSQLGGLHL
FSHSQLGGLHW

SEQ ID NO: 24253 - protein, 9 aa, synthetic construct
  source 1..9: note = Seed: FSHSQLGGL
FSHSQLGGM

SEQ ID NO: 24254 - protein, 9 aa, synthetic construct
  source 1..9: note = Seed: FSHSQLGGL
FSHSQLGGW

SEQ ID NO: 24255 - protein, 9 aa, synthetic construct
  source 1..9: note = Seed: FSHSQLGGL
FSHSQLGGY

SEQ ID NO: 24256 - protein, 9 aa, synthetic construct
  source 1..9: note = Seed: FLHVTYVPA
FSHVTYVPV

SEQ ID NO: 24257 - protein, 8 aa, synthetic construct
  source 1..8: note = Seed: FTIKGSFL
FSIKGSFY

SEQ ID NO: 24258 - protein, 9 aa, synthetic construct
  source 1..9: note = Seed: FTINCQEPK
FSINCQEPK

SEQ ID NO: 24259 - protein, 9 aa, synthetic construct
  source 1..9: note = Seed: FTINCQEPK
FSINCQEPR

SEQ ID NO: 24260 - protein, 10 aa, synthetic construct
  source 1..10: note = Seed: FKIYSKHTPI
FSIYSKHTPA

SEQ ID NO: 24261 - protein, 10 aa, synthetic construct
  source 1..10: note = Seed: FKIYSKHTPI
FSIYSKHTPF

SEQ ID NO: 24262 - protein, 10 aa, synthetic construct
  source 1..10: note = Seed: FKIYSKHTPI
FSIYSKHTPI

SEQ ID NO: 24263 - protein, 10 aa, synthetic construct
  source 1..10: note = Seed: FKIYSKHTPI
FSIYSKHTPL

SEQ ID NO: 24264 - protein, 10 aa, synthetic construct
  source 1..10: note = Seed: FKIYSKHTPI
FSIYSKHTPM

SEQ ID NO: 24265 - protein, 10 aa, synthetic construct
  source 1..10: note = Seed: FKIYSKHTPI
FSIYSKHTPV

SEQ ID NO: 24266 - protein, 10 aa, synthetic construct
  source 1..10: note = Seed: FKIYSKHTPI
FSIYSKHTPY

SEQ ID NO: 24267 - protein, 9 aa, synthetic construct
  source 1..9: note = Seed: FVKHKHAFL
FSKHKHAFF

SEQ ID NO: 24268 - protein, 9 aa, synthetic construct
  source 1..9: note = Seed: FVKHKHAFL
FSKHKHAFL

SEQ ID NO: 24269 - protein, 9 aa, synthetic construct
  source 1..9: note = Seed: FVKHKHAFL
FSKHKHAFM

SEQ ID NO: 24270 - protein, 9 aa, synthetic construct
  source 1..9: note = Seed: FVKHKHAFL
FSKHKHAFV

SEQ ID NO: 24271 - protein, 9 aa, synthetic construct
  source 1..9: note = Seed: FVKHKHAFL
FSKHKHAFY

SEQ ID NO: 24272 - protein, 8 aa, synthetic construct
  source 1..8: note = Seed: FVKHKHAF
FSKHKHAI

SEQ ID NO: 24273 - protein, 8 aa, synthetic construct
  source 1..8: note = Seed: FVKHKHAF
FSKHKHAL

SEQ ID NO: 24274 - protein, 8 aa, synthetic construct
  source 1..8: note = Seed: FVKHKHAF
FSKHKHAM

SEQ ID NO: 24275 - protein, 9 aa, synthetic construct
  source 1..9: note = Seed: FRKSNLKPF
FSKSNLKPF

SEQ ID NO: 24276 - protein, 9 aa, synthetic construct
  source 1..9: note = Seed: FRKSNLKPF
FSKSNLKPY

SEQ ID NO: 24277 - protein, 9 aa, synthetic construct
  source 1..9: note = Seed: FVLALLSDL
FSLALLSDF

SEQ ID NO: 24278 - protein, 9 aa, synthetic construct
  source 1..9: note = Seed: FVLALLSDL
FSLALLSDI

SEQ ID NO: 24279 - protein, 9 aa, synthetic construct
  source 1..9: note = Seed: FVLALLSDL
FSLALLSDL

SEQ ID NO: 24280 - protein, 9 aa, synthetic construct
  source 1..9: note = Seed: FVLALLSDL
FSLALLSDM

SEQ ID NO: 24281 - protein, 9 aa, synthetic construct
  source 1..9: note = Seed: FVLALLSDL
FSLALLSDV

SEQ ID NO: 24282 - protein, 9 aa, synthetic construct
  source 1..9: note = Seed: FVLALLSDL
FSLALLSDY

SEQ ID NO: 24283 - protein, 10 aa, synthetic construct
  source 1..10: note = Seed: FPLCANGQVF
FSLCANGQVF

SEQ ID NO: 24284 - protein, 10 aa, synthetic construct
  source 1..10: note = Seed: FPLCANGQVF
FSLCANGQVM

SEQ ID NO: 24285 - protein, 10 aa, synthetic construct
  source 1..10: note = Seed: FPLCANGQVF
FSLCANGQVY

SEQ ID NO: 24286 - protein, 10 aa, synthetic construct
  source 1..10: note = Seed: FKLKDCVMYA
FSLKDCVMYA

SEQ ID NO: 24287 - protein, 10 aa, synthetic construct
  source 1..10: note = Seed: FKLKDCVMYA
FSLKDCVMYI

SEQ ID NO: 24288 - protein, 10 aa, synthetic construct
  source 1..10: note = Seed: FKLKDCVMYA
FSLKDCVMYL

SEQ ID NO: 24289 - protein, 10 aa, synthetic construct
  source 1..10: note = Seed: FKLKDCVMYA
FSLKDCVMYM

SEQ ID NO: 24290 - protein, 10 aa, synthetic construct
  source 1..10: note = Seed: FKLKDCVMYA
FSLKDCVMYS

SEQ ID NO: 24291 - protein, 10 aa, synthetic construct
  source 1..10: note = Seed: FKLKDCVMYA
FSLKDCVMYT

SEQ ID NO: 24292 - protein, 10 aa, synthetic construct
  source 1..10: note = Seed: FKLKDCVMYA
FSLKDCVMYV

SEQ ID NO: 24293 - protein, 10 aa, synthetic construct
  source 1..10: note = Seed: FPLKLRGTAV
FSLKLRGTAA

SEQ ID NO: 24294 - protein, 10 aa, synthetic construct
  source 1..10: note = Seed: FPLKLRGTAV
FSLKLRGTAF

SEQ ID NO: 24295 - protein, 10 aa, synthetic construct
  source 1..10: note = Seed: FPLKLRGTAV
FSLKLRGTAI

SEQ ID NO: 24296 - protein, 10 aa, synthetic construct
  source 1..10: note = Seed: FPLKLRGTAV
FSLKLRGTAL

SEQ ID NO: 24297 - protein, 10 aa, synthetic construct
  source 1..10: note = Seed: FPLKLRGTAV
FSLKLRGTAM

SEQ ID NO: 24298 - protein, 10 aa, synthetic construct
  source 1..10: note = Seed: FPLKLRGTAV
FSLKLRGTAV

SEQ ID NO: 24299 - protein, 11 aa, synthetic construct
  source 1..11: note = Seed: FPLKLRGTAVM
FSLKLRGTAVF

SEQ ID NO: 24300 - protein, 11 aa, synthetic construct
  source 1..11: note = Seed: FPLKLRGTAVM
FSLKLRGTAVY

SEQ ID NO: 24301 - protein, 10 aa, synthetic construct
  source 1..10: note = Seed: FTLLLQLCTF
FSLLLQLCTF

SEQ ID NO: 24302 - protein, 10 aa, synthetic construct
  source 1..10: note = Seed: FTLLLQLCTF
FSLLLQLCTW

SEQ ID NO: 24303 - protein, 10 aa, synthetic construct
  source 1..10: note = Seed: FTLLLQLCTF
FSLLLQLCTY

SEQ ID NO: 24304 - protein, 9 aa, synthetic construct
  source 1..9: note = Seed: FKLNEEIAI
FSLNEEIAF

SEQ ID NO: 24305 - protein, 9 aa, synthetic construct
  source 1..9: note = Seed: FKLNEEIAI
FSLNEEIAY

SEQ ID NO: 24306 - protein, 9 aa, synthetic construct
  source 1..9: note = Seed: FLLNKEMYL
FSLNKEMYF

SEQ ID NO: 24307 - protein, 9 aa, synthetic construct
  source 1..9: note = Seed: FLLNKEMYL
FSLNKEMYI

SEQ ID NO: 24308 - protein, 9 aa, synthetic construct
  source 1..9: note = Seed: FLLNKEMYL
FSLNKEMYL

SEQ ID NO: 24309 - protein, 10 aa, synthetic construct
  source 1..10: note = Seed: FLLNKEMYLK
FSLNKEMYLA

SEQ ID NO: 24310 - protein, 10 aa, synthetic construct
  source 1..10: note = Seed: FLLNKEMYLK
FSLNKEMYLI

SEQ ID NO: 24311 - protein, 10 aa, synthetic construct
  source 1..10: note = Seed: FLLNKEMYLK
FSLNKEMYLK

SEQ ID NO: 24312 - protein, 10 aa, synthetic construct
  source 1..10: note = Seed: FLLNKEMYLK
FSLNKEMYLL

SEQ ID NO: 24313 - protein, 10 aa, synthetic construct
  source 1..10: note = Seed: FLLNKEMYLK
FSLNKEMYLM

SEQ ID NO: 24314 - protein, 10 aa, synthetic construct
  source 1..10: note = Seed: FLLNKEMYLK
FSLNKEMYLR

SEQ ID NO: 24315 - protein, 10 aa, synthetic construct
  source 1..10: note = Seed: FLLNKEMYLK
FSLNKEMYLV

SEQ ID NO: 24316 - protein, 9 aa, synthetic construct
  source 1..9: note = Seed: FLLNKEMYL
FSLNKEMYM

SEQ ID NO: 24317 - protein, 9 aa, synthetic construct
  source 1..9: note = Seed: FLLNKEMYL
FSLNKEMYV

SEQ ID NO: 24318 - protein, 9 aa, synthetic construct
  source 1..9: note = Seed: FLLNKEMYL
FSLNKEMYY

SEQ ID NO: 24319 - protein, 10 aa, synthetic construct
  source 1..10: note = Seed: FRLTLGVYDY
FSLTLGVYDY

SEQ ID NO: 24320 - protein, 9 aa, synthetic construct
  source 1..9: note = Seed: FYLTNDVSF
FSLTNDVSF

SEQ ID NO: 24321 - protein, 10 aa, synthetic construct
  source 1..10: note = Seed: FYLTNDVSFL
FSLTNDVSFA

SEQ ID NO: 24322 - protein, 10 aa, synthetic construct
  source 1..10: note = Seed: FYLTNDVSFL
FSLTNDVSFI

SEQ ID NO: 24323 - protein, 10 aa, synthetic construct
  source 1..10: note = Seed: FYLTNDVSFL
FSLTNDVSFL

SEQ ID NO: 24324 - protein, 11 aa, synthetic construct
  source 1..11: note = Seed: FYLTNDVSFLA
FSLTNDVSFLL

SEQ ID NO: 24325 - protein, 11 aa, synthetic construct
  source 1..11: note = Seed: FYLTNDVSFLA
FSLTNDVSFLV

SEQ ID NO: 24326 - protein, 10 aa, synthetic construct
  source 1..10: note = Seed: FYLTNDVSFL
FSLTNDVSFM

SEQ ID NO: 24327 - protein, 10 aa, synthetic construct
  source 1..10: note = Seed: FYLTNDVSFL
FSLTNDVSFV

SEQ ID NO: 24328 - protein, 9 aa, synthetic construct
  source 1..9: note = Seed: FYLTNDVSF
FSLTNDVSL

SEQ ID NO: 24329 - protein, 9 aa, synthetic construct
  source 1..9: note = Seed: FYLTNDVSF
FSLTNDVSM

SEQ ID NO: 24330 - protein, 9 aa, synthetic construct
  source 1..9: note = Seed: FYLTNDVSF
FSLTNDVSY

SEQ ID NO: 24331 - protein, 10 aa, synthetic construct
  source 1..10: note = Seed: FQLTPIAVQM
FSLTPIAVQA

SEQ ID NO: 24332 - protein, 10 aa, synthetic construct
  source 1..10: note = Seed: FQLTPIAVQM
FSLTPIAVQF

SEQ ID NO: 24333 - protein, 10 aa, synthetic construct
  source 1..10: note = Seed: FQLTPIAVQM
FSLTPIAVQI

SEQ ID NO: 24334 - protein, 10 aa, synthetic construct
  source 1..10: note = Seed: FQLTPIAVQM
FSLTPIAVQL

SEQ ID NO: 24335 - protein, 10 aa, synthetic construct
  source 1..10: note = Seed: FQLTPIAVQM
FSLTPIAVQM

SEQ ID NO: 24336 - protein, 10 aa, synthetic construct
  source 1..10: note = Seed: FQLTPIAVQM
FSLTPIAVQV

SEQ ID NO: 24337 - protein, 10 aa, synthetic construct
  source 1..10: note = Seed: FQLTPIAVQM
FSLTPIAVQY

SEQ ID NO: 24338 - protein, 9 aa, synthetic construct
  source 1..9: note = Seed: FELTSMKYF
FSLTSMKYF

SEQ ID NO: 24339 - protein, 10 aa, synthetic construct
  source 1..10: note = Seed: FELTSMKYFV
FSLTSMKYFA

SEQ ID NO: 24340 - protein, 10 aa, synthetic construct
  source 1..10: note = Seed: FELTSMKYFV
FSLTSMKYFI

SEQ ID NO: 24341 - protein, 10 aa, synthetic construct
  source 1..10: note = Seed: FELTSMKYFV
FSLTSMKYFL

SEQ ID NO: 24342 - protein, 10 aa, synthetic construct
  source 1..10: note = Seed: FELTSMKYFV
FSLTSMKYFM

SEQ ID NO: 24343 - protein, 10 aa, synthetic construct
  source 1..10: note = Seed: FELTSMKYFV
FSLTSMKYFV

SEQ ID NO: 24344 - protein, 9 aa, synthetic construct
  source 1..9: note = Seed: FGLVAEWFL
FSLVAEWFI

SEQ ID NO: 24345 - protein, 9 aa, synthetic construct
  source 1..9: note = Seed: FGLVAEWFL
FSLVAEWFL

SEQ ID NO: 24346 - protein, 10 aa, synthetic construct
  source 1..10: note = Seed: FGLVAEWFLA
FSLVAEWFLA

SEQ ID NO: 24347 - protein, 10 aa, synthetic construct
  source 1..10: note = Seed: FGLVAEWFLA
FSLVAEWFLI

SEQ ID NO: 24348 - protein, 10 aa, synthetic construct
  source 1..10: note = Seed: FGLVAEWFLA
FSLVAEWFLL

SEQ ID NO: 24349 - protein, 10 aa, synthetic construct
  source 1..10: note = Seed: FGLVAEWFLA
FSLVAEWFLM

SEQ ID NO: 24350 - protein, 10 aa, synthetic construct
  source 1..10: note = Seed: FGLVAEWFLA
FSLVAEWFLV

SEQ ID NO: 24351 - protein, 9 aa, synthetic construct
  source 1..9: note = Seed: FGLVAEWFL
FSLVAEWFV

SEQ ID NO: 24352 - protein, 10 aa, synthetic construct
  source 1..10: note = Seed: FVLWAHGFEL
FSLWAHGFEA

SEQ ID NO: 24353 - protein, 10 aa, synthetic construct
  source 1..10: note = Seed: FVLWAHGFEL
FSLWAHGFEF

SEQ ID NO: 24354 - protein, 10 aa, synthetic construct
  source 1..10: note = Seed: FVLWAHGFEL
FSLWAHGFEI

SEQ ID NO: 24355 - protein, 10 aa, synthetic construct
  source 1..10: note = Seed: FVLWAHGFEL
FSLWAHGFEL

SEQ ID NO: 24356 - protein, 11 aa, synthetic construct
  source 1..11: note = Seed: FVLWAHGFELT
FSLWAHGFELA

SEQ ID NO: 24357 - protein, 11 aa, synthetic construct
  source 1..11: note = Seed: FVLWAHGFELT
FSLWAHGFELC

SEQ ID NO: 24358 - protein, 11 aa, synthetic construct
  source 1..11: note = Seed: FVLWAHGFELT
FSLWAHGFELD

SEQ ID NO: 24359 - protein, 11 aa, synthetic construct
  source 1..11: note = Seed: FVLWAHGFELT
FSLWAHGFELE

SEQ ID NO: 24360 - protein, 11 aa, synthetic construct
  source 1..11: note = Seed: FVLWAHGFELT
FSLWAHGFELF

SEQ ID NO: 24361 - protein, 11 aa, synthetic construct
  source 1..11: note = Seed: FVLWAHGFELT
FSLWAHGFELG

SEQ ID NO: 24362 - protein, 11 aa, synthetic construct
  source 1..11: note = Seed: FVLWAHGFELT
FSLWAHGFELH

SEQ ID NO: 24363 - protein, 11 aa, synthetic construct
  source 1..11: note = Seed: FVLWAHGFELT
FSLWAHGFELI

SEQ ID NO: 24364 - protein, 11 aa, synthetic construct
  source 1..11: note = Seed: FVLWAHGFELT
FSLWAHGFELK

SEQ ID NO: 24365 - protein, 11 aa, synthetic construct
  source 1..11: note = Seed: FVLWAHGFELT
FSLWAHGFELL

SEQ ID NO: 24366 - protein, 11 aa, synthetic construct
  source 1..11: note = Seed: FVLWAHGFELT
FSLWAHGFELM

SEQ ID NO: 24367 - protein, 11 aa, synthetic construct
  source 1..11: note = Seed: FVLWAHGFELT
FSLWAHGFELN

SEQ ID NO: 24368 - protein, 11 aa, synthetic construct
  source 1..11: note = Seed: FVLWAHGFELT
FSLWAHGFELP

SEQ ID NO: 24369 - protein, 11 aa, synthetic construct
  source 1..11: note = Seed: FVLWAHGFELT
FSLWAHGFELQ

SEQ ID NO: 24370 - protein, 11 aa, synthetic construct
  source 1..11: note = Seed: FVLWAHGFELT
FSLWAHGFELR

SEQ ID NO: 24371 - protein, 11 aa, synthetic construct
  source 1..11: note = Seed: FVLWAHGFELT
FSLWAHGFELS

SEQ ID NO: 24372 - protein, 11 aa, synthetic construct
  source 1..11: note = Seed: FVLWAHGFELT
FSLWAHGFELT

SEQ ID NO: 24373 - protein, 11 aa, synthetic construct
  source 1..11: note = Seed: FVLWAHGFELT
FSLWAHGFELV

SEQ ID NO: 24374 - protein, 11 aa, synthetic construct
  source 1..11: note = Seed: FVLWAHGFELT
FSLWAHGFELW

SEQ ID NO: 24375 - protein, 11 aa, synthetic construct
  source 1..11: note = Seed: FVLWAHGFELT
FSLWAHGFELY

SEQ ID NO: 24376 - protein, 10 aa, synthetic construct
  source 1..10: note = Seed: FVLWAHGFEL
FSLWAHGFEM

SEQ ID NO: 24377 - protein, 10 aa, synthetic construct
  source 1..10: note = Seed: FVLWAHGFEL
FSLWAHGFES

SEQ ID NO: 24378 - protein, 10 aa, synthetic construct
  source 1..10: note = Seed: FVLWAHGFEL
FSLWAHGFET

SEQ ID NO: 24379 - protein, 10 aa, synthetic construct
  source 1..10: note = Seed: FVLWAHGFEL
FSLWAHGFEV

SEQ ID NO: 24380 - protein, 10 aa, synthetic construct
  source 1..10: note = Seed: FVLWAHGFEL
FSLWAHGFEY

SEQ ID NO: 24381 - protein, 10 aa, synthetic construct
  source 1..10: note = Seed: FELWAKRNIK
FSLWAKRNIR

SEQ ID NO: 24382 - protein, 9 aa, synthetic construct
  source 1..9: note = Seed: FSLWVYKQF
FSLWVYKQM

SEQ ID NO: 24383 - protein, 9 aa, synthetic construct
  source 1..9: note = Seed: FSLWVYKQF
FSLWVYKQW

SEQ ID NO: 24384 - protein, 9 aa, synthetic construct
  source 1..9: note = Seed: FSLWVYKQF
FSLWVYKQY

SEQ ID NO: 24385 - protein, 9 aa, synthetic construct
  source 1..9: note = Seed: FHLYLQYIR
FSLYLQYIR

SEQ ID NO: 24386 - protein, 9 aa, synthetic construct
  source 1..9: note = Seed: FAMMFVKHK
FSMMFVKHK

SEQ ID NO: 24387 - protein, 9 aa, synthetic construct
  source 1..9: note = Seed: FAMMFVKHK
FSMMFVKHR

SEQ ID NO: 24388 - protein, 10 aa, synthetic construct
  source 1..10: note = Seed: FSMMILSDDA
FSMMILSDDL

SEQ ID NO: 24389 - protein, 10 aa, synthetic construct
  source 1..10: note = Seed: FSMMILSDDA
FSMMILSDDV

SEQ ID NO: 24390 - protein, 10 aa, synthetic construct
  source 1..10: note = Seed: FKMNYQVNGY
FSMNYQVNGY

SEQ ID NO: 24391 - protein, 9 aa, synthetic construct
  source 1..9: note = Seed: FAMQMAYRF
FSMQMAYRF

SEQ ID NO: 24392 - protein, 9 aa, synthetic construct
  source 1..9: note = Seed: FAMQMAYRF
FSMQMAYRI

SEQ ID NO: 24393 - protein, 9 aa, synthetic construct
  source 1..9: note = Seed: FAMQMAYRF
FSMQMAYRL

SEQ ID NO: 24394 - protein, 9 aa, synthetic construct
  source 1..9: note = Seed: FAMQMAYRF
FSMQMAYRM

SEQ ID NO: 24395 - protein, 9 aa, synthetic construct
  source 1..9: note = Seed: FAMQMAYRF
FSMQMAYRV

SEQ ID NO: 24396 - protein, 9 aa, synthetic construct
  source 1..9: note = Seed: FAMQMAYRF
FSMQMAYRW

SEQ ID NO: 24397 - protein, 9 aa, synthetic construct
  source 1..9: note = Seed: FAMQMAYRF
FSMQMAYRY

SEQ ID NO: 24398 - protein, 8 aa, synthetic construct
  source 1..8: note = Seed: FDMSKFPL
FSMSKFPL

SEQ ID NO: 24399 - protein, 10 aa, synthetic construct
  source 1..10: note = Seed: FDMSKFPLKL
FSMSKFPLKA

SEQ ID NO: 24400 - protein, 10 aa, synthetic construct
  source 1..10: note = Seed: FDMSKFPLKL
FSMSKFPLKI

SEQ ID NO: 24401 - protein, 10 aa, synthetic construct
  source 1..10: note = Seed: FDMSKFPLKL
FSMSKFPLKL

SEQ ID NO: 24402 - protein, 10 aa, synthetic construct
  source 1..10: note = Seed: FDMSKFPLKL
FSMSKFPLKV

SEQ ID NO: 24403 - protein, 8 aa, synthetic construct
  source 1..8: note = Seed: FDMSKFPL
FSMSKFPM

SEQ ID NO: 24404 - protein, 10 aa, synthetic construct
  source 1..10: note = Seed: FNMVYMPASW
FSMVYMPASF

SEQ ID NO: 24405 - protein, 10 aa, synthetic construct
  source 1..10: note = Seed: FNMVYMPASW
FSMVYMPASM

SEQ ID NO: 24406 - protein, 10 aa, synthetic construct
  source 1..10: note = Seed: FNMVYMPASW
FSMVYMPASW

SEQ ID NO: 24407 - protein, 10 aa, synthetic construct
  source 1..10: note = Seed: FNMVYMPASW
FSMVYMPASY

SEQ ID NO: 24408 - protein, 9 aa, synthetic construct
  source 1..9: note = Seed: FENKTTLPV
FSNKTTLPF

SEQ ID NO: 24409 - protein, 9 aa, synthetic construct
  source 1..9: note = Seed: FENKTTLPV
FSNKTTLPL

SEQ ID NO: 24410 - protein, 9 aa, synthetic construct
  source 1..9: note = Seed: FENKTTLPV
FSNKTTLPM

SEQ ID NO: 24411 - protein, 9 aa, synthetic construct
  source 1..9: note = Seed: FENKTTLPV
FSNKTTLPY

SEQ ID NO: 24412 - protein, 9 aa, synthetic construct
  source 1..9: note = Seed: FVNLKQLPF
FSNLKQLPF

SEQ ID NO: 24413 - protein, 9 aa, synthetic construct
  source 1..9: note = Seed: FVNLKQLPF
FSNLKQLPI

SEQ ID NO: 24414 - protein, 9 aa, synthetic construct
  source 1..9: note = Seed: FVNLKQLPF
FSNLKQLPL

SEQ ID NO: 24415 - protein, 9 aa, synthetic construct
  source 1..9: note = Seed: FVNLKQLPF
FSNLKQLPM

SEQ ID NO: 24416 - protein, 9 aa, synthetic construct
  source 1..9: note = Seed: FVNLKQLPF
FSNLKQLPV

SEQ ID NO: 24417 - protein, 9 aa, synthetic construct
  source 1..9: note = Seed: FVNLKQLPF
FSNLKQLPW

SEQ ID NO: 24418 - protein, 9 aa, synthetic construct
  source 1..9: note = Seed: FVNLKQLPF
FSNLKQLPY

SEQ ID NO: 24419 - protein, 9 aa, synthetic construct
  source 1..9: note = Seed: FTNVYADSF
FSNVYADSF

SEQ ID NO: 24420 - protein, 10 aa, synthetic construct
  source 1..10: note = Seed: FTNVYADSFV
FSNVYADSFV

SEQ ID NO: 24421 - protein, 11 aa, synthetic construct
  source 1..11: note = Seed: FTNVYADSFVI
FSNVYADSFVF

SEQ ID NO: 24422 - protein, 11 aa, synthetic construct
  source 1..11: note = Seed: FTNVYADSFVI
FSNVYADSFVV

SEQ ID NO: 24423 - protein, 11 aa, synthetic construct
  source 1..11: note = Seed: FTNVYADSFVI
FSNVYADSFVW

SEQ ID NO: 24424 - protein, 11 aa, synthetic construct
  source 1..11: note = Seed: FTNVYADSFVI
FSNVYADSFVY

SEQ ID NO: 24425 - protein, 9 aa, synthetic construct
  source 1..9: note = Seed: FTNVYADSF
FSNVYADSI

SEQ ID NO: 24426 - protein, 9 aa, synthetic construct
  source 1..9: note = Seed: FTNVYADSF
FSNVYADSL

SEQ ID NO: 24427 - protein, 9 aa, synthetic construct
  source 1..9: note = Seed: FTNVYADSF
FSNVYADSM

SEQ ID NO: 24428 - protein, 9 aa, synthetic construct
  source 1..9: note = Seed: FTNVYADSF
FSNVYADSV

SEQ ID NO: 24429 - protein, 9 aa, synthetic construct
  source 1..9: note = Seed: FTNVYADSF
FSNVYADSW

SEQ ID NO: 24430 - protein, 9 aa, synthetic construct
  source 1..9: note = Seed: FTNVYADSF
FSNVYADSY

SEQ ID NO: 24431 - protein, 9 aa, synthetic construct
  source 1..9: note = Seed: FSNYLKRRV
FSNYLKRRF

SEQ ID NO: 24432 - protein, 9 aa, synthetic construct
  source 1..9: note = Seed: FSNYLKRRV
FSNYLKRRL

SEQ ID NO: 24433 - protein, 9 aa, synthetic construct
  source 1..9: note = Seed: FSNYLKRRV
FSNYLKRRM

SEQ ID NO: 24434 - protein, 10 aa, synthetic construct
  source 1..10: note = Seed: FSNYLKRRVV
FSNYLKRRVF

SEQ ID NO: 24435 - protein, 10 aa, synthetic construct
  source 1..10: note = Seed: FSNYLKRRVV
FSNYLKRRVM

SEQ ID NO: 24436 - protein, 10 aa, synthetic construct
  source 1..10: note = Seed: FSNYLKRRVV
FSNYLKRRVY

SEQ ID NO: 24437 - protein, 9 aa, synthetic construct
  source 1..9: note = Seed: FSNYLKRRV
FSNYLKRRY

SEQ ID NO: 24438 - protein, 9 aa, synthetic construct
  source 1..9: note = Seed: FNPETNILL
FSPETNILL

SEQ ID NO: 24439 - protein, 10 aa, synthetic construct
  source 1..10: note = Seed: FTPFDVVRQC
FSPFDVVRQA

SEQ ID NO: 24440 - protein, 10 aa, synthetic construct
  source 1..10: note = Seed: FLPFFSNVTW
FSPFFSNVTF

SEQ ID NO: 24441 - protein, 10 aa, synthetic construct
  source 1..10: note = Seed: FLPFFSNVTW
FSPFFSNVTH

SEQ ID NO: 24442 - protein, 10 aa, synthetic construct
  source 1..10: note = Seed: FLPFFSNVTW
FSPFFSNVTL

SEQ ID NO: 24443 - protein, 10 aa, synthetic construct
  source 1..10: note = Seed: FLPFFSNVTW
FSPFFSNVTM

SEQ ID NO: 24444 - protein, 10 aa, synthetic construct
  source 1..10: note = Seed: FLPFFSNVTW
FSPFFSNVTW

SEQ ID NO: 24445 - protein, 10 aa, synthetic construct
  source 1..10: note = Seed: FLPFFSNVTW
FSPFFSNVTY

SEQ ID NO: 24446 - protein, 9 aa, synthetic construct
  source 1..9: note = Seed: FLPFQQFGR
FSPFQQFGK

SEQ ID NO: 24447 - protein, 9 aa, synthetic construct
  source 1..9: note = Seed: FLPFQQFGR
FSPFQQFGR

SEQ ID NO: 24448 - protein, 10 aa, synthetic construct
  source 1..10: note = Seed: FTPLVPFWIT
FSPLVPFWIA

SEQ ID NO: 24449 - protein, 11 aa, synthetic construct
  source 1..11: note = Seed: FTPLVPFWITI
FSPLVPFWITV

SEQ ID NO: 24450 - protein, 9 aa, synthetic construct
  source 1..9: note = Seed: FTPLVPFWI
FSPLVPFWV

SEQ ID NO: 24451 - protein, 9 aa, synthetic construct
  source 1..9: note = Seed: FLPRVFSAV
FSPRVFSAF

SEQ ID NO: 24452 - protein, 9 aa, synthetic construct
  source 1..9: note = Seed: FLPRVFSAV
FSPRVFSAI

SEQ ID NO: 24453 - protein, 9 aa, synthetic construct
  source 1..9: note = Seed: FLPRVFSAV
FSPRVFSAL

SEQ ID NO: 24454 - protein, 9 aa, synthetic construct
  source 1..9: note = Seed: FLPRVFSAV
FSPRVFSAM

SEQ ID NO: 24455 - protein, 9 aa, synthetic construct
  source 1..9: note = Seed: FLPRVFSAV
FSPRVFSAV

SEQ ID NO: 24456 - protein, 10 aa, synthetic construct
  source 1..10: note = Seed: FLPRVFSAVG
FSPRVFSAVF

SEQ ID NO: 24457 - protein, 10 aa, synthetic construct
  source 1..10: note = Seed: FLPRVFSAVG
FSPRVFSAVI

SEQ ID NO: 24458 - protein, 10 aa, synthetic construct
  source 1..10: note = Seed: FLPRVFSAVG
FSPRVFSAVL

SEQ ID NO: 24459 - protein, 10 aa, synthetic construct
  source 1..10: note = Seed: FLPRVFSAVG
FSPRVFSAVM

SEQ ID NO: 24460 - protein, 10 aa, synthetic construct
  source 1..10: note = Seed: FLPRVFSAVG
FSPRVFSAVV

SEQ ID NO: 24461 - protein, 9 aa, synthetic construct
  source 1..9: note = Seed: FLPRVFSAV
FSPRVFSAY

SEQ ID NO: 24462 - protein, 8 aa, synthetic construct
  source 1..8: note = Seed: FAPSASAF
FSPSASAF

SEQ ID NO: 24463 - protein, 9 aa, synthetic construct
  source 1..9: note = Seed: FAPSASAFF
FSPSASAFF

SEQ ID NO: 24464 - protein, 9 aa, synthetic construct
  source 1..9: note = Seed: FAPSASAFF
FSPSASAFI

SEQ ID NO: 24465 - protein, 9 aa, synthetic construct
  source 1..9: note = Seed: FAPSASAFF
FSPSASAFL

SEQ ID NO: 24466 - protein, 9 aa, synthetic construct
  source 1..9: note = Seed: FAPSASAFF
FSPSASAFM

SEQ ID NO: 24467 - protein, 9 aa, synthetic construct
  source 1..9: note = Seed: FAPSASAFF
FSPSASAFV

SEQ ID NO: 24468 - protein, 9 aa, synthetic construct
  source 1..9: note = Seed: FAPSASAFF
FSPSASAFW

SEQ ID NO: 24469 - protein, 9 aa, synthetic construct
  source 1..9: note = Seed: FAPSASAFF
FSPSASAFY

SEQ ID NO: 24470 - protein, 8 aa, synthetic construct
  source 1..8: note = Seed: FAPSASAF
FSPSASAL

SEQ ID NO: 24471 - protein, 8 aa, synthetic construct
  source 1..8: note = Seed: FAPSASAF
FSPSASAY

SEQ ID NO: 24472 - protein, 11 aa, synthetic construct
  source 1..11: note = Seed: FPQSAPHGVVF
FSQSAPHGVVF

SEQ ID NO: 24473 - protein, 11 aa, synthetic construct
  source 1..11: note = Seed: FPQSAPHGVVF
FSQSAPHGVVL

SEQ ID NO: 24474 - protein, 11 aa, synthetic construct
  source 1..11: note = Seed: FPQSAPHGVVF
FSQSAPHGVVM

SEQ ID NO: 24475 - protein, 11 aa, synthetic construct
  source 1..11: note = Seed: FPQSAPHGVVF
FSQSAPHGVVW

SEQ ID NO: 24476 - protein, 11 aa, synthetic construct
  source 1..11: note = Seed: FPQSAPHGVVF
FSQSAPHGVVY

SEQ ID NO: 24477 - protein, 9 aa, synthetic construct
  source 1..9: note = Seed: FLQSINFVR
FSQSINFVK

SEQ ID NO: 24478 - protein, 9 aa, synthetic construct
  source 1..9: note = Seed: FLQSINFVR
FSQSINFVR

SEQ ID NO: 24479 - protein, 10 aa, synthetic construct
  source 1..10: note = Seed: FLQSINFVRI
FSQSINFVRR

SEQ ID NO: 24480 - protein, 10 aa, synthetic construct
  source 1..10: note = Seed: FTQSRNLQEF
FSQSRNLQEF

SEQ ID NO: 24481 - protein, 10 aa, synthetic construct
  source 1..10: note = Seed: FTQSRNLQEF
FSQSRNLQEW

SEQ ID NO: 24482 - protein, 10 aa, synthetic construct
  source 1..10: note = Seed: FTQSRNLQEF
FSQSRNLQEY

SEQ ID NO: 24483 - protein, 9 aa, synthetic construct
  source 1..9: note = Seed: FAQVKQIYK
FSQVKQIYK

SEQ ID NO: 24484 - protein, 9 aa, synthetic construct
  source 1..9: note = Seed: FAQVKQIYK
FSQVKQIYR

SEQ ID NO: 24485 - protein, 9 aa, synthetic construct
  source 1..9: note = Seed: FLRDGWEIV
FSRDGWEIF

SEQ ID NO: 24486 - protein, 9 aa, synthetic construct
  source 1..9: note = Seed: FLRDGWEIV
FSRDGWEIL

SEQ ID NO: 24487 - protein, 9 aa, synthetic construct
  source 1..9: note = Seed: FLRDGWEIV
FSRDGWEIM

SEQ ID NO: 24488 - protein, 9 aa, synthetic construct
  source 1..9: note = Seed: FLRDGWEIV
FSRDGWEIY

SEQ ID NO: 24489 - protein, 9 aa, synthetic construct
  source 1..9: note = Seed: FPREGVFVS
FSREGVFVF

SEQ ID NO: 24490 - protein, 9 aa, synthetic construct
  source 1..9: note = Seed: FPREGVFVS
FSREGVFVM

SEQ ID NO: 24491 - protein, 9 aa, synthetic construct
  source 1..9: note = Seed: FPREGVFVS
FSREGVFVY

SEQ ID NO: 24492 - protein, 9 aa, synthetic construct
  source 1..9: note = Seed: FTRFFYVLG
FSRFFYVLA

SEQ ID NO: 24493 - protein, 10 aa, synthetic construct
  source 1..10: note = Seed: FTRFFYVLGL
FSRFFYVLGK

SEQ ID NO: 24494 - protein, 10 aa, synthetic construct
  source 1..10: note = Seed: FTRFFYVLGL
FSRFFYVLGL

SEQ ID NO: 24495 - protein, 10 aa, synthetic construct
  source 1..10: note = Seed: FTRFFYVLGL
FSRFFYVLGV

SEQ ID NO: 24496 - protein, 9 aa, synthetic construct
  source 1..9: note = Seed: FTRFFYVLG
FSRFFYVLK

SEQ ID NO: 24497 - protein, 10 aa, synthetic construct
  source 1..10: note = Seed: FTRGVYYPDK
FSRGVYYPDR

SEQ ID NO: 24498 - protein, 9 aa, synthetic construct
  source 1..9: note = Seed: FISAARQGF
FSSAARQGF

SEQ ID NO: 24499 - protein, 9 aa, synthetic construct
  source 1..9: note = Seed: FISAARQGF
FSSAARQGL

SEQ ID NO: 24500 - protein, 9 aa, synthetic construct
  source 1..9: note = Seed: FISAARQGF
FSSAARQGM

SEQ ID NO: 24501 - protein, 9 aa, synthetic construct
  source 1..9: note = Seed: FISAARQGF
FSSAARQGY

SEQ ID NO: 24502 - protein, 9 aa, synthetic construct
  source 1..9: note = Seed: FQSAVKRTI
FSSAVKRTF

SEQ ID NO: 24503 - protein, 9 aa, synthetic construct
  source 1..9: note = Seed: FQSAVKRTI
FSSAVKRTI

SEQ ID NO: 24504 - protein, 9 aa, synthetic construct
  source 1..9: note = Seed: FQSAVKRTI
FSSAVKRTL

SEQ ID NO: 24505 - protein, 9 aa, synthetic construct
  source 1..9: note = Seed: FQSAVKRTI
FSSAVKRTM

SEQ ID NO: 24506 - protein, 9 aa, synthetic construct
  source 1..9: note = Seed: FQSAVKRTI
FSSAVKRTV

SEQ ID NO: 24507 - protein, 9 aa, synthetic construct
  source 1..9: note = Seed: FQSAVKRTI
FSSAVKRTY

SEQ ID NO: 24508 - protein, 10 aa, synthetic construct
  source 1..10: note = Seed: FTSDLATNNL
FSSDLATNNV

SEQ ID NO: 24509 - protein, 9 aa, synthetic construct
  source 1..9: note = Seed: FTSDYYQLY
FSSDYYQLF

SEQ ID NO: 24510 - protein, 9 aa, synthetic construct
  source 1..9: note = Seed: FTSDYYQLY
FSSDYYQLI

SEQ ID NO: 24511 - protein, 9 aa, synthetic construct
  source 1..9: note = Seed: FTSDYYQLY
FSSDYYQLK

SEQ ID NO: 24512 - protein, 9 aa, synthetic construct
  source 1..9: note = Seed: FTSDYYQLY
FSSDYYQLL

SEQ ID NO: 24513 - protein, 9 aa, synthetic construct
  source 1..9: note = Seed: FTSDYYQLY
FSSDYYQLM

SEQ ID NO: 24514 - protein, 9 aa, synthetic construct
  source 1..9: note = Seed: FTSDYYQLY
FSSDYYQLR

SEQ ID NO: 24515 - protein, 9 aa, synthetic construct
  source 1..9: note = Seed: FTSDYYQLY
FSSDYYQLV

SEQ ID NO: 24516 - protein, 9 aa, synthetic construct
  source 1..9: note = Seed: FTSDYYQLY
FSSDYYQLW

SEQ ID NO: 24517 - protein, 9 aa, synthetic construct
  source 1..9: note = Seed: FTSDYYQLY
FSSDYYQLY

SEQ ID NO: 24518 - protein, 10 aa, synthetic construct
  source 1..10: note = Seed: FTSDYYQLYS
FSSDYYQLYF

SEQ ID NO: 24519 - protein, 10 aa, synthetic construct
  source 1..10: note = Seed: FTSDYYQLYS
FSSDYYQLYM

SEQ ID NO: 24520 - protein, 10 aa, synthetic construct
  source 1..10: note = Seed: FTSDYYQLYS
FSSDYYQLYY

SEQ ID NO: 24521 - protein, 8 aa, synthetic construct
  source 1..8: note = Seed: FASFYYVW
FSSFYYVW

SEQ ID NO: 24522 - protein, 9 aa, synthetic construct
  source 1..9: note = Seed: FASFYYVWK
FSSFYYVWK

SEQ ID NO: 24523 - protein, 9 aa, synthetic construct
  source 1..9: note = Seed: FASFYYVWK
FSSFYYVWR

SEQ ID NO: 24524 - protein, 9 aa, synthetic construct
  source 1..9: note = Seed: FVSLAIDAY
FSSLAIDAF

SEQ ID NO: 24525 - protein, 9 aa, synthetic construct
  source 1..9: note = Seed: FVSLAIDAY
FSSLAIDAL

SEQ ID NO: 24526 - protein, 9 aa, synthetic construct
  source 1..9: note = Seed: FVSLAIDAY
FSSLAIDAM

SEQ ID NO: 24527 - protein, 9 aa, synthetic construct
  source 1..9: note = Seed: FVSLAIDAY
FSSLAIDAY

SEQ ID NO: 24528 - protein, 9 aa, synthetic construct
  source 1..9: note = Seed: FVSNGTHWF
FSSNGTHWF

SEQ ID NO: 24529 - protein, 9 aa, synthetic construct
  source 1..9: note = Seed: FVSNGTHWF
FSSNGTHWL

SEQ ID NO: 24530 - protein, 9 aa, synthetic construct
  source 1..9: note = Seed: FVSNGTHWF
FSSNGTHWM

SEQ ID NO: 24531 - protein, 9 aa, synthetic construct
  source 1..9: note = Seed: FVSNGTHWF
FSSNGTHWV

SEQ ID NO: 24532 - protein, 9 aa, synthetic construct
  source 1..9: note = Seed: FVSNGTHWF
FSSNGTHWW

SEQ ID NO: 24533 - protein, 9 aa, synthetic construct
  source 1..9: note = Seed: FVSNGTHWF
FSSNGTHWY

SEQ ID NO: 24534 - protein, 9 aa, synthetic construct
  source 1..9: note = Seed: FISNSWLMW
FSSNSWLMF

SEQ ID NO: 24535 - protein, 9 aa, synthetic construct
  source 1..9: note = Seed: FISNSWLMW
FSSNSWLMI

SEQ ID NO: 24536 - protein, 9 aa, synthetic construct
  source 1..9: note = Seed: FISNSWLMW
FSSNSWLML

SEQ ID NO: 24537 - protein, 9 aa, synthetic construct
  source 1..9: note = Seed: FISNSWLMW
FSSNSWLMM

SEQ ID NO: 24538 - protein, 9 aa, synthetic construct
  source 1..9: note = Seed: FISNSWLMW
FSSNSWLMW

SEQ ID NO: 24539 - protein, 9 aa, synthetic construct
  source 1..9: note = Seed: FISNSWLMW
FSSNSWLMY

SEQ ID NO: 24540 - protein, 9 aa, synthetic construct
  source 1..9: note = Seed: FSSNVANYQ
FSSNVANYK

SEQ ID NO: 24541 - protein, 10 aa, synthetic construct
  source 1..10: note = Seed: FSSNVANYQK
FSSNVANYQR

SEQ ID NO: 24542 - protein, 9 aa, synthetic construct
  source 1..9: note = Seed: FSSNVANYQ
FSSNVANYR

SEQ ID NO: 24543 - protein, 9 aa, synthetic construct
  source 1..9: note = Seed: FFSNVTWFH
FSSNVTWFK

SEQ ID NO: 24544 - protein, 9 aa, synthetic construct
  source 1..9: note = Seed: FFSNVTWFH
FSSNVTWFR

SEQ ID NO: 24545 - protein, 9 aa, synthetic construct
  source 1..9: note = Seed: FFSNVTWFH
FSSNVTWFY

SEQ ID NO: 24546 - protein, 11 aa, synthetic construct
  source 1..11: note = Seed: FISPYNSQNAV
FSSPYNSQNAA

SEQ ID NO: 24547 - protein, 11 aa, synthetic construct
  source 1..11: note = Seed: FISPYNSQNAV
FSSPYNSQNAL

SEQ ID NO: 24548 - protein, 11 aa, synthetic construct
  source 1..11: note = Seed: FISPYNSQNAV
FSSPYNSQNAM

SEQ ID NO: 24549 - protein, 9 aa, synthetic construct
  source 1..9: note = Seed: FFSYFAVHF
FSSYFAVHF

SEQ ID NO: 24550 - protein, 10 aa, synthetic construct
  source 1..10: note = Seed: FFSYFAVHFI
FSSYFAVHFA

SEQ ID NO: 24551 - protein, 10 aa, synthetic construct
  source 1..10: note = Seed: FFSYFAVHFI
FSSYFAVHFF

SEQ ID NO: 24552 - protein, 10 aa, synthetic construct
  source 1..10: note = Seed: FFSYFAVHFI
FSSYFAVHFI

SEQ ID NO: 24553 - protein, 10 aa, synthetic construct
  source 1..10: note = Seed: FFSYFAVHFI
FSSYFAVHFL

SEQ ID NO: 24554 - protein, 10 aa, synthetic construct
  source 1..10: note = Seed: FFSYFAVHFI
FSSYFAVHFV

SEQ ID NO: 24555 - protein, 10 aa, synthetic construct
  source 1..10: note = Seed: FFSYFAVHFI
FSSYFAVHFW

SEQ ID NO: 24556 - protein, 10 aa, synthetic construct
  source 1..10: note = Seed: FFSYFAVHFI
FSSYFAVHFY

SEQ ID NO: 24557 - protein, 9 aa, synthetic construct
  source 1..9: note = Seed: FFSYFAVHF
FSSYFAVHY

SEQ ID NO: 24558 - protein, 10 aa, synthetic construct
  source 1..10: note = Seed: FVTDTPKGPK
FSTDTPKGPR

SEQ ID NO: 24559 - protein, 9 aa, synthetic construct
  source 1..9: note = Seed: FSTFEEAAL
FSTFEEAAF

SEQ ID NO: 24560 - protein, 9 aa, synthetic construct
  source 1..9: note = Seed: FSTFEEAAL
FSTFEEAAM

SEQ ID NO: 24561 - protein, 9 aa, synthetic construct
  source 1..9: note = Seed: FSTFEEAAL
FSTFEEAAY

SEQ ID NO: 24562 - protein, 9 aa, synthetic construct
  source 1..9: note = Seed: FSTFKCYGV
FSTFKCYGM

SEQ ID NO: 24563 - protein, 9 aa, synthetic construct
  source 1..9: note = Seed: FVTHSKGLY
FSTHSKGLF

SEQ ID NO: 24564 - protein, 9 aa, synthetic construct
  source 1..9: note = Seed: FVTHSKGLY
FSTHSKGLW

SEQ ID NO: 24565 - protein, 9 aa, synthetic construct
  source 1..9: note = Seed: FVTHSKGLY
FSTHSKGLY

SEQ ID NO: 24566 - protein, 10 aa, synthetic construct
  source 1..10: note = Seed: FVTHSKGLYR
FSTHSKGLYK

SEQ ID NO: 24567 - protein, 10 aa, synthetic construct
  source 1..10: note = Seed: FVTHSKGLYR
FSTHSKGLYR

SEQ ID NO: 24568 - protein, 9 aa, synthetic construct
  source 1..9: note = Seed: FVTNVNASS
FSTNVNASI

SEQ ID NO: 24569 - protein, 9 aa, synthetic construct
  source 1..9: note = Seed: FVTNVNASS
FSTNVNASL

SEQ ID NO: 24570 - protein, 9 aa, synthetic construct
  source 1..9: note = Seed: FVTNVNASS
FSTNVNASV

SEQ ID NO: 24571 - protein, 9 aa, synthetic construct
  source 1..9: note = Seed: FQTRAGCLI
FSTRAGCLF

SEQ ID NO: 24572 - protein, 9 aa, synthetic construct
  source 1..9: note = Seed: FQTRAGCLI
FSTRAGCLY

SEQ ID NO: 24573 - protein, 9 aa, synthetic construct
  source 1..9: note = Seed: FTTVDNINL
FSTVDNINF

SEQ ID NO: 24574 - protein, 9 aa, synthetic construct
  source 1..9: note = Seed: FTTVDNINL
FSTVDNINW

SEQ ID NO: 24575 - protein, 9 aa, synthetic construct
  source 1..9: note = Seed: FTTVDNINL
FSTVDNINY

SEQ ID NO: 24576 - protein, 10 aa, synthetic construct
  source 1..10: note = Seed: FDTYNLWNTF
FSTYNLWNTF

SEQ ID NO: 24577 - protein, 10 aa, synthetic construct
  source 1..10: note = Seed: FDTYNLWNTF
FSTYNLWNTM

SEQ ID NO: 24578 - protein, 10 aa, synthetic construct
  source 1..10: note = Seed: FDTYNLWNTF
FSTYNLWNTW

SEQ ID NO: 24579 - protein, 10 aa, synthetic construct
  source 1..10: note = Seed: FDTYNLWNTF
FSTYNLWNTY

SEQ ID NO: 24580 - protein, 9 aa, synthetic construct
  source 1..9: note = Seed: FAVDAAKAY
FSVDAAKAF

SEQ ID NO: 24581 - protein, 9 aa, synthetic construct
  source 1..9: note = Seed: FAVDAAKAY
FSVDAAKAI

SEQ ID NO: 24582 - protein, 9 aa, synthetic construct
  source 1..9: note = Seed: FAVDAAKAY
FSVDAAKAL

SEQ ID NO: 24583 - protein, 9 aa, synthetic construct
  source 1..9: note = Seed: FAVDAAKAY
FSVDAAKAM

SEQ ID NO: 24584 - protein, 9 aa, synthetic construct
  source 1..9: note = Seed: FAVDAAKAY
FSVDAAKAV

SEQ ID NO: 24585 - protein, 9 aa, synthetic construct
  source 1..9: note = Seed: FAVDAAKAY
FSVDAAKAW

SEQ ID NO: 24586 - protein, 9 aa, synthetic construct
  source 1..9: note = Seed: FAVDAAKAY
FSVDAAKAY

SEQ ID NO: 24587 - protein, 10 aa, synthetic construct
  source 1..10: note = Seed: FAVDAAKAYK
FSVDAAKAYF

SEQ ID NO: 24588 - protein, 10 aa, synthetic construct
  source 1..10: note = Seed: FAVDAAKAYK
FSVDAAKAYK

SEQ ID NO: 24589 - protein, 10 aa, synthetic construct
  source 1..10: note = Seed: FAVDAAKAYK
FSVDAAKAYM

SEQ ID NO: 24590 - protein, 10 aa, synthetic construct
  source 1..10: note = Seed: FAVDAAKAYK
FSVDAAKAYR

SEQ ID NO: 24591 - protein, 10 aa, synthetic construct
  source 1..10: note = Seed: FAVDAAKAYK
FSVDAAKAYY

SEQ ID NO: 24592 - protein, 9 aa, synthetic construct
  source 1..9: note = Seed: FAVHFISNS
FSVHFISNA

SEQ ID NO: 24593 - protein, 9 aa, synthetic construct
  source 1..9: note = Seed: FAVHFISNS
FSVHFISNI

SEQ ID NO: 24594 - protein, 9 aa, synthetic construct
  source 1..9: note = Seed: FAVHFISNS
FSVHFISNL

SEQ ID NO: 24595 - protein, 10 aa, synthetic construct
  source 1..10: note = Seed: FAVHFISNSW
FSVHFISNSF

SEQ ID NO: 24596 - protein, 10 aa, synthetic construct
  source 1..10: note = Seed: FAVHFISNSW
FSVHFISNSM

SEQ ID NO: 24597 - protein, 10 aa, synthetic construct
  source 1..10: note = Seed: FAVHFISNSW
FSVHFISNSW

SEQ ID NO: 24598 - protein, 10 aa, synthetic construct
  source 1..10: note = Seed: FAVHFISNSW
FSVHFISNSY

SEQ ID NO: 24599 - protein, 9 aa, synthetic construct
  source 1..9: note = Seed: FAVHFISNS
FSVHFISNV

SEQ ID NO: 24600 - protein, 8 aa, synthetic construct
  source 1..8: note = Seed: FVVKRHTF
FSVKRHTF

SEQ ID NO: 24601 - protein, 8 aa, synthetic construct
  source 1..8: note = Seed: FVVKRHTF
FSVKRHTL

SEQ ID NO: 24602 - protein, 8 aa, synthetic construct
  source 1..8: note = Seed: FVVKRHTF
FSVKRHTM

SEQ ID NO: 24603 - protein, 8 aa, synthetic construct
  source 1..8: note = Seed: FVVKRHTF
FSVKRHTY

SEQ ID NO: 24604 - protein, 9 aa, synthetic construct
  source 1..9: note = Seed: FNVLFSTVF
FSVLFSTVF

SEQ ID NO: 24605 - protein, 9 aa, synthetic construct
  source 1..9: note = Seed: FNVLFSTVF
FSVLFSTVI

SEQ ID NO: 24606 - protein, 9 aa, synthetic construct
  source 1..9: note = Seed: FNVLFSTVF
FSVLFSTVL

SEQ ID NO: 24607 - protein, 9 aa, synthetic construct
  source 1..9: note = Seed: FNVLFSTVF
FSVLFSTVM

SEQ ID NO: 24608 - protein, 9 aa, synthetic construct
  source 1..9: note = Seed: FNVLFSTVF
FSVLFSTVV

SEQ ID NO: 24609 - protein, 9 aa, synthetic construct
  source 1..9: note = Seed: FNVLFSTVF
FSVLFSTVY

SEQ ID NO: 24610 - protein, 9 aa, synthetic construct
  source 1..9: note = Seed: FPVLHDIGN
FSVLHDIGY

SEQ ID NO: 24611 - protein, 10 aa, synthetic construct
  source 1..10: note = Seed: FKVSIWNLDY
FSVSIWNLDY

SEQ ID NO: 24612 - protein, 9 aa, synthetic construct
  source 1..9: note = Seed: FVVSTGYHF
FSVSTGYHF

SEQ ID NO: 24613 - protein, 10 aa, synthetic construct
  source 1..10: note = Seed: FVVSTGYHFR
FSVSTGYHFK

SEQ ID NO: 24614 - protein, 10 aa, synthetic construct
  source 1..10: note = Seed: FVVSTGYHFR
FSVSTGYHFR

SEQ ID NO: 24615 - protein, 9 aa, synthetic construct
  source 1..9: note = Seed: FVVSTGYHF
FSVSTGYHI

SEQ ID NO: 24616 - protein, 9 aa, synthetic construct
  source 1..9: note = Seed: FVVSTGYHF
FSVSTGYHL

SEQ ID NO: 24617 - protein, 9 aa, synthetic construct
  source 1..9: note = Seed: FVVSTGYHF
FSVSTGYHM

SEQ ID NO: 24618 - protein, 9 aa, synthetic construct
  source 1..9: note = Seed: FVVSTGYHF
FSVSTGYHV

SEQ ID NO: 24619 - protein, 9 aa, synthetic construct
  source 1..9: note = Seed: FVVSTGYHF
FSVSTGYHW

SEQ ID NO: 24620 - protein, 9 aa, synthetic construct
  source 1..9: note = Seed: FVVSTGYHF
FSVSTGYHY

SEQ ID NO: 24621 - protein, 9 aa, synthetic construct
  source 1..9: note = Seed: FYWFFSNYL
FSWFFSNYA

SEQ ID NO: 24622 - protein, 9 aa, synthetic construct
  source 1..9: note = Seed: FYWFFSNYL
FSWFFSNYI

SEQ ID NO: 24623 - protein, 9 aa, synthetic construct
  source 1..9: note = Seed: FYWFFSNYL
FSWFFSNYL

SEQ ID NO: 24624 - protein, 10 aa, synthetic construct
  source 1..10: note = Seed: FYWFFSNYLK
FSWFFSNYLF

SEQ ID NO: 24625 - protein, 10 aa, synthetic construct
  source 1..10: note = Seed: FYWFFSNYLK
FSWFFSNYLK

SEQ ID NO: 24626 - protein, 11 aa, synthetic construct
  source 1..11: note = Seed: FYWFFSNYLKR
FSWFFSNYLKR

SEQ ID NO: 24627 - protein, 10 aa, synthetic construct
  source 1..10: note = Seed: FYWFFSNYLK
FSWFFSNYLR

SEQ ID NO: 24628 - protein, 10 aa, synthetic construct
  source 1..10: note = Seed: FYWFFSNYLK
FSWFFSNYLY

SEQ ID NO: 24629 - protein, 9 aa, synthetic construct
  source 1..9: note = Seed: FYWFFSNYL
FSWFFSNYV

SEQ ID NO: 24630 - protein, 9 aa, synthetic construct
  source 1..9: note = Seed: FYWFFSNYL
FSWFFSNYY

SEQ ID NO: 24631 - protein, 10 aa, synthetic construct
  source 1..10: note = Seed: FLWLLWPVTL
FSWLLWPVTF

SEQ ID NO: 24632 - protein, 11 aa, synthetic construct
  source 1..11: note = Seed: FLWLLWPVTLA
FSWLLWPVTLI

SEQ ID NO: 24633 - protein, 11 aa, synthetic construct
  source 1..11: note = Seed: FLWLLWPVTLA
FSWLLWPVTLL

SEQ ID NO: 24634 - protein, 11 aa, synthetic construct
  source 1..11: note = Seed: FLWLLWPVTLA
FSWLLWPVTLV

SEQ ID NO: 24635 - protein, 10 aa, synthetic construct
  source 1..10: note = Seed: FLWLLWPVTL
FSWLLWPVTV

SEQ ID NO: 24636 - protein, 9 aa, synthetic construct
  source 1..9: note = Seed: FLWLLWPVT
FSWLLWPVV

SEQ ID NO: 24637 - protein, 9 aa, synthetic construct
  source 1..9: note = Seed: FSYFAVHFI
FSYFAVHFA

SEQ ID NO: 24638 - protein, 9 aa, synthetic construct
  source 1..9: note = Seed: FSYFAVHFI
FSYFAVHFF

SEQ ID NO: 24639 - protein, 10 aa, synthetic construct
  source 1..10: note = Seed: FSYFAVHFIS
FSYFAVHFIA

SEQ ID NO: 24640 - protein, 10 aa, synthetic construct
  source 1..10: note = Seed: FSYFAVHFIS
FSYFAVHFII

SEQ ID NO: 24641 - protein, 10 aa, synthetic construct
  source 1..10: note = Seed: FSYFAVHFIS
FSYFAVHFIV

SEQ ID NO: 24642 - protein, 9 aa, synthetic construct
  source 1..9: note = Seed: FSYFAVHFI
FSYFAVHFL

SEQ ID NO: 24643 - protein, 9 aa, synthetic construct
  source 1..9: note = Seed: FSYFAVHFI
FSYFAVHFM

SEQ ID NO: 24644 - protein, 9 aa, synthetic construct
  source 1..9: note = Seed: FSYFAVHFI
FSYFAVHFT

SEQ ID NO: 24645 - protein, 9 aa, synthetic construct
  source 1..9: note = Seed: FSYFAVHFI
FSYFAVHFV

SEQ ID NO: 24646 - protein, 9 aa, synthetic construct
  source 1..9: note = Seed: FSYFAVHFI
FSYFAVHFW

SEQ ID NO: 24647 - protein, 9 aa, synthetic construct
  source 1..9: note = Seed: FSYFAVHFI
FSYFAVHFY

SEQ ID NO: 24648 - protein, 8 aa, synthetic construct
  source 1..8: note = Seed: FSYFAVHF
FSYFAVHW

SEQ ID NO: 24649 - protein, 9 aa, synthetic construct
  source 1..9: note = Seed: FYYLGTGPE
FSYLGTGPF

SEQ ID NO: 24650 - protein, 9 aa, synthetic construct
  source 1..9: note = Seed: FYYLGTGPE
FSYLGTGPL

SEQ ID NO: 24651 - protein, 9 aa, synthetic construct
  source 1..9: note = Seed: FYYLGTGPE
FSYLGTGPM

SEQ ID NO: 24652 - protein, 9 aa, synthetic construct
  source 1..9: note = Seed: FYYLGTGPE
FSYLGTGPY

SEQ ID NO: 24653 - protein, 9 aa, synthetic construct
  source 1..9: note = Seed: FNYLKSPNF
FSYLKSPNF

SEQ ID NO: 24654 - protein, 9 aa, synthetic construct
  source 1..9: note = Seed: FNYLKSPNF
FSYLKSPNI

SEQ ID NO: 24655 - protein, 9 aa, synthetic construct
  source 1..9: note = Seed: FNYLKSPNF
FSYLKSPNL

SEQ ID NO: 24656 - protein, 9 aa, synthetic construct
  source 1..9: note = Seed: FNYLKSPNF
FSYLKSPNM

SEQ ID NO: 24657 - protein, 9 aa, synthetic construct
  source 1..9: note = Seed: FNYLKSPNF
FSYLKSPNV

SEQ ID NO: 24658 - protein, 9 aa, synthetic construct
  source 1..9: note = Seed: FNYLKSPNF
FSYLKSPNY

SEQ ID NO: 24659 - protein, 9 aa, synthetic construct
  source 1..9: note = Seed: FCYMHHMEL
FSYMHHMEA

SEQ ID NO: 24660 - protein, 9 aa, synthetic construct
  source 1..9: note = Seed: FCYMHHMEL
FSYMHHMEC

SEQ ID NO: 24661 - protein, 9 aa, synthetic construct
  source 1..9: note = Seed: FCYMHHMEL
FSYMHHMEF

SEQ ID NO: 24662 - protein, 9 aa, synthetic construct
  source 1..9: note = Seed: FCYMHHMEL
FSYMHHMEH

SEQ ID NO: 24663 - protein, 9 aa, synthetic construct
  source 1..9: note = Seed: FCYMHHMEL
FSYMHHMEI

SEQ ID NO: 24664 - protein, 9 aa, synthetic construct
  source 1..9: note = Seed: FCYMHHMEL
FSYMHHMEL

SEQ ID NO: 24665 - protein, 9 aa, synthetic construct
  source 1..9: note = Seed: FCYMHHMEL
FSYMHHMEM

SEQ ID NO: 24666 - protein, 9 aa, synthetic construct
  source 1..9: note = Seed: FCYMHHMEL
FSYMHHMES

SEQ ID NO: 24667 - protein, 9 aa, synthetic construct
  source 1..9: note = Seed: FCYMHHMEL
FSYMHHMET

SEQ ID NO: 24668 - protein, 9 aa, synthetic construct
  source 1..9: note = Seed: FCYMHHMEL
FSYMHHMEV

SEQ ID NO: 24669 - protein, 9 aa, synthetic construct
  source 1..9: note = Seed: FCYMHHMEL
FSYMHHMEW

SEQ ID NO: 24670 - protein, 9 aa, synthetic construct
  source 1..9: note = Seed: FCYMHHMEL
FSYMHHMEY

SEQ ID NO: 24671 - protein, 9 aa, synthetic construct
  source 1..9: note = Seed: FRYMNSQGL
FSYMNSQGF

SEQ ID NO: 24672 - protein, 9 aa, synthetic construct
  source 1..9: note = Seed: FRYMNSQGL
FSYMNSQGI

SEQ ID NO: 24673 - protein, 9 aa, synthetic construct
  source 1..9: note = Seed: FRYMNSQGL
FSYMNSQGL

SEQ ID NO: 24674 - protein, 9 aa, synthetic construct
  source 1..9: note = Seed: FRYMNSQGL
FSYMNSQGM

SEQ ID NO: 24675 - protein, 9 aa, synthetic construct
  source 1..9: note = Seed: FRYMNSQGL
FSYMNSQGV

SEQ ID NO: 24676 - protein, 9 aa, synthetic construct
  source 1..9: note = Seed: FRYMNSQGL
FSYMNSQGY

SEQ ID NO: 24677 - protein, 8 aa, synthetic construct
  source 1..8: note = Seed: FEYVSQPF
FSYVSQPF

SEQ ID NO: 24678 - protein, 8 aa, synthetic construct
  source 1..8: note = Seed: FEYVSQPF
FSYVSQPY

SEQ ID NO: 24679 - protein, 9 aa, synthetic construct
  source 1..9: note = Seed: FYYVWKSYV
FSYVWKSYA

SEQ ID NO: 24680 - protein, 9 aa, synthetic construct
  source 1..9: note = Seed: FYYVWKSYV
FSYVWKSYF

SEQ ID NO: 24681 - protein, 9 aa, synthetic construct
  source 1..9: note = Seed: FYYVWKSYV
FSYVWKSYI

SEQ ID NO: 24682 - protein, 9 aa, synthetic construct
  source 1..9: note = Seed: FYYVWKSYV
FSYVWKSYL

SEQ ID NO: 24683 - protein, 9 aa, synthetic construct
  source 1..9: note = Seed: FYYVWKSYV
FSYVWKSYM

SEQ ID NO: 24684 - protein, 9 aa, synthetic construct
  source 1..9: note = Seed: FYYVWKSYV
FSYVWKSYV

SEQ ID NO: 24685 - protein, 10 aa, synthetic construct
  source 1..10: note = Seed: FYYVWKSYVH
FSYVWKSYVM

SEQ ID NO: 24686 - protein, 10 aa, synthetic construct
  source 1..10: note = Seed: FYYVWKSYVH
FSYVWKSYVY

SEQ ID NO: 24687 - protein, 9 aa, synthetic construct
  source 1..9: note = Seed: FYYVWKSYV
FSYVWKSYY

SEQ ID NO: 24688 - protein, 9 aa, synthetic construct
  source 1..9: note = Seed: FFYYSDSPC
FSYYSDSPF

SEQ ID NO: 24689 - protein, 9 aa, synthetic construct
  source 1..9: note = Seed: FFYYSDSPC
FSYYSDSPL

SEQ ID NO: 24690 - protein, 9 aa, synthetic construct
  source 1..9: note = Seed: FFYYSDSPC
FSYYSDSPM

SEQ ID NO: 24691 - protein, 9 aa, synthetic construct
  source 1..9: note = Seed: FFYYSDSPC
FSYYSDSPY

SEQ ID NO: 24692 - protein, 8 aa, synthetic construct
  source 1..8: note = Seed: FVAAIFYL
FTAAIFYI

SEQ ID NO: 24693 - protein, 8 aa, synthetic construct
  source 1..8: note = Seed: FVAAIFYL
FTAAIFYL

SEQ ID NO: 24694 - protein, 9 aa, synthetic construct
  source 1..9: note = Seed: FVAAIFYLI
FTAAIFYLA

SEQ ID NO: 24695 - protein, 9 aa, synthetic construct
  source 1..9: note = Seed: FVAAIFYLI
FTAAIFYLE

SEQ ID NO: 24696 - protein, 9 aa, synthetic construct
  source 1..9: note = Seed: FVAAIFYLI
FTAAIFYLF

SEQ ID NO: 24697 - protein, 9 aa, synthetic construct
  source 1..9: note = Seed: FVAAIFYLI
FTAAIFYLG

SEQ ID NO: 24698 - protein, 9 aa, synthetic construct
  source 1..9: note = Seed: FVAAIFYLI
FTAAIFYLH

SEQ ID NO: 24699 - protein, 9 aa, synthetic construct
  source 1..9: note = Seed: FVAAIFYLI
FTAAIFYLI

SEQ ID NO: 24700 - protein, 9 aa, synthetic construct
  source 1..9: note = Seed: FVAAIFYLI
FTAAIFYLK

SEQ ID NO: 24701 - protein, 9 aa, synthetic construct
  source 1..9: note = Seed: FVAAIFYLI
FTAAIFYLL

SEQ ID NO: 24702 - protein, 9 aa, synthetic construct
  source 1..9: note = Seed: FVAAIFYLI
FTAAIFYLM

SEQ ID NO: 24703 - protein, 9 aa, synthetic construct
  source 1..9: note = Seed: FVAAIFYLI
FTAAIFYLP

SEQ ID NO: 24704 - protein, 9 aa, synthetic construct
  source 1..9: note = Seed: FVAAIFYLI
FTAAIFYLQ

SEQ ID NO: 24705 - protein, 9 aa, synthetic construct
  source 1..9: note = Seed: FVAAIFYLI
FTAAIFYLR

SEQ ID NO: 24706 - protein, 9 aa, synthetic construct
  source 1..9: note = Seed: FVAAIFYLI
FTAAIFYLS

SEQ ID NO: 24707 - protein, 9 aa, synthetic construct
  source 1..9: note = Seed: FVAAIFYLI
FTAAIFYLT

SEQ ID NO: 24708 - protein, 9 aa, synthetic construct
  source 1..9: note = Seed: FVAAIFYLI
FTAAIFYLV

SEQ ID NO: 24709 - protein, 9 aa, synthetic construct
  source 1..9: note = Seed: FVAAIFYLI
FTAAIFYLW

SEQ ID NO: 24710 - protein, 9 aa, synthetic construct
  source 1..9: note = Seed: FVAAIFYLI
FTAAIFYLY

SEQ ID NO: 24711 - protein, 8 aa, synthetic construct
  source 1..8: note = Seed: FVAAIFYL
FTAAIFYV

SEQ ID NO: 24712 - protein, 10 aa, synthetic construct
  source 1..10: note = Seed: FCAFAVDAAK
FTAFAVDAAK

SEQ ID NO: 24713 - protein, 10 aa, synthetic construct
  source 1..10: note = Seed: FCAFAVDAAK
FTAFAVDAAR

SEQ ID NO: 24714 - protein, 10 aa, synthetic construct
  source 1..10: note = Seed: FCAFAVDAAK
FTAFAVDAAY

SEQ ID NO: 24715 - protein, 9 aa, synthetic construct
  source 1..9: note = Seed: FLAFVVFLL
FTAFVVFLA

SEQ ID NO: 24716 - protein, 9 aa, synthetic construct
  source 1..9: note = Seed: FLAFVVFLL
FTAFVVFLI

SEQ ID NO: 24717 - protein, 9 aa, synthetic construct
  source 1..9: note = Seed: FLAFVVFLL
FTAFVVFLL

SEQ ID NO: 24718 - protein, 10 aa, synthetic construct
  source 1..10: note = Seed: FLAFVVFLLV
FTAFVVFLLA

SEQ ID NO: 24719 - protein, 10 aa, synthetic construct
  source 1..10: note = Seed: FLAFVVFLLV
FTAFVVFLLI

SEQ ID NO: 24720 - protein, 10 aa, synthetic construct
  source 1..10: note = Seed: FLAFVVFLLV
FTAFVVFLLL

SEQ ID NO: 24721 - protein, 10 aa, synthetic construct
  source 1..10: note = Seed: FLAFVVFLLV
FTAFVVFLLT

SEQ ID NO: 24722 - protein, 10 aa, synthetic construct
  source 1..10: note = Seed: FLAFVVFLLV
FTAFVVFLLV

SEQ ID NO: 24723 - protein, 9 aa, synthetic construct
  source 1..9: note = Seed: FLAFVVFLL
FTAFVVFLM

SEQ ID NO: 24724 - protein, 9 aa, synthetic construct
  source 1..9: note = Seed: FLAFVVFLL
FTAFVVFLS

SEQ ID NO: 24725 - protein, 9 aa, synthetic construct
  source 1..9: note = Seed: FLAFVVFLL
FTAFVVFLT

SEQ ID NO: 24726 - protein, 9 aa, synthetic construct
  source 1..9: note = Seed: FLAFVVFLL
FTAFVVFLV

SEQ ID NO: 24727 - protein, 9 aa, synthetic construct
  source 1..9: note = Seed: FGAGAALQI
FTAGAALQF

SEQ ID NO: 24728 - protein, 9 aa, synthetic construct
  source 1..9: note = Seed: FGAGAALQI
FTAGAALQI

SEQ ID NO: 24729 - protein, 9 aa, synthetic construct
  source 1..9: note = Seed: FGAGAALQI
FTAGAALQL

SEQ ID NO: 24730 - protein, 9 aa, synthetic construct
  source 1..9: note = Seed: FGAGAALQI
FTAGAALQM

SEQ ID NO: 24731 - protein, 9 aa, synthetic construct
  source 1..9: note = Seed: FGAGAALQI
FTAGAALQV

SEQ ID NO: 24732 - protein, 9 aa, synthetic construct
  source 1..9: note = Seed: FGAGAALQI
FTAGAALQY

SEQ ID NO: 24733 - protein, 9 aa, synthetic construct
  source 1..9: note = Seed: FIAGLIAIV
FTAGLIAIA

SEQ ID NO: 24734 - protein, 9 aa, synthetic construct
  source 1..9: note = Seed: FIAGLIAIV
FTAGLIAIF

SEQ ID NO: 24735 - protein, 9 aa, synthetic construct
  source 1..9: note = Seed: FIAGLIAIV
FTAGLIAII

SEQ ID NO: 24736 - protein, 9 aa, synthetic construct
  source 1..9: note = Seed: FIAGLIAIV
FTAGLIAIK

SEQ ID NO: 24737 - protein, 9 aa, synthetic construct
  source 1..9: note = Seed: FIAGLIAIV
FTAGLIAIL

SEQ ID NO: 24738 - protein, 9 aa, synthetic construct
  source 1..9: note = Seed: FIAGLIAIV
FTAGLIAIM

SEQ ID NO: 24739 - protein, 9 aa, synthetic construct
  source 1..9: note = Seed: FIAGLIAIV
FTAGLIAIR

SEQ ID NO: 24740 - protein, 9 aa, synthetic construct
  source 1..9: note = Seed: FIAGLIAIV
FTAGLIAIS

SEQ ID NO: 24741 - protein, 9 aa, synthetic construct
  source 1..9: note = Seed: FIAGLIAIV
FTAGLIAIT

SEQ ID NO: 24742 - protein, 9 aa, synthetic construct
  source 1..9: note = Seed: FIAGLIAIV
FTAGLIAIV

SEQ ID NO: 24743 - protein, 9 aa, synthetic construct
  source 1..9: note = Seed: FIAGLIAIV
FTAGLIAIY

SEQ ID NO: 24744 - protein, 9 aa, synthetic construct
  source 1..9: note = Seed: FLAHIQWMV
FTAHIQWMA

SEQ ID NO: 24745 - protein, 9 aa, synthetic construct
  source 1..9: note = Seed: FLAHIQWMV
FTAHIQWMI

SEQ ID NO: 24746 - protein, 9 aa, synthetic construct
  source 1..9: note = Seed: FLAHIQWMV
FTAHIQWML

SEQ ID NO: 24747 - protein, 9 aa, synthetic construct
  source 1..9: note = Seed: FLAHIQWMV
FTAHIQWMM

SEQ ID NO: 24748 - protein, 9 aa, synthetic construct
  source 1..9: note = Seed: FLAHIQWMV
FTAHIQWMS

SEQ ID NO: 24749 - protein, 9 aa, synthetic construct
  source 1..9: note = Seed: FLAHIQWMV
FTAHIQWMT

SEQ ID NO: 24750 - protein, 9 aa, synthetic construct
  source 1..9: note = Seed: FLAHIQWMV
FTAHIQWMV

SEQ ID NO: 24751 - protein, 9 aa, synthetic construct
  source 1..9: note = Seed: FNAIATCDW
FTAIATCDW

SEQ ID NO: 24752 - protein, 8 aa, synthetic construct
  source 1..8: note = Seed: FGAISSVL
FTAISSVL

SEQ ID NO: 24753 - protein, 8 aa, synthetic construct
  source 1..8: note = Seed: FGAISSVL
FTAISSVM

SEQ ID NO: 24754 - protein, 9 aa, synthetic construct
  source 1..9: note = Seed: FLALCADSI
FTALCADSI

SEQ ID NO: 24755 - protein, 9 aa, synthetic construct
  source 1..9: note = Seed: FLALCADSI
FTALCADSL

SEQ ID NO: 24756 - protein, 9 aa, synthetic construct
  source 1..9: note = Seed: FLALCADSI
FTALCADSV

SEQ ID NO: 24757 - protein, 10 aa, synthetic construct
  source 1..10: note = Seed: FSALEPLVDL
FTALEPLVDV

SEQ ID NO: 24758 - protein, 10 aa, synthetic construct
  source 1..10: note = Seed: FSALEPLVDL
FTALEPLVDW

SEQ ID NO: 24759 - protein, 10 aa, synthetic construct
  source 1..10: note = Seed: FTALTQHGKE
FTALTQHGKK

SEQ ID NO: 24760 - protein, 10 aa, synthetic construct
  source 1..10: note = Seed: FTALTQHGKE
FTALTQHGKR

SEQ ID NO: 24761 - protein, 9 aa, synthetic construct
  source 1..9: note = Seed: FTALTQHGK
FTALTQHGR

SEQ ID NO: 24762 - protein, 9 aa, synthetic construct
  source 1..9: note = Seed: FIASFRLFA
FTASFRLFA

SEQ ID NO: 24763 - protein, 10 aa, synthetic construct
  source 1..10: note = Seed: FIASFRLFAR
FTASFRLFAK

SEQ ID NO: 24764 - protein, 10 aa, synthetic construct
  source 1..10: note = Seed: FIASFRLFAR
FTASFRLFAR

SEQ ID NO: 24765 - protein, 10 aa, synthetic construct
  source 1..10: note = Seed: FIASFRLFAR
FTASFRLFAY

SEQ ID NO: 24766 - protein, 9 aa, synthetic construct
  source 1..9: note = Seed: FIASFRLFA
FTASFRLFI

SEQ ID NO: 24767 - protein, 9 aa, synthetic construct
  source 1..9: note = Seed: FIASFRLFA
FTASFRLFK

SEQ ID NO: 24768 - protein, 9 aa, synthetic construct
  source 1..9: note = Seed: FIASFRLFA
FTASFRLFL

SEQ ID NO: 24769 - protein, 9 aa, synthetic construct
  source 1..9: note = Seed: FIASFRLFA
FTASFRLFM

SEQ ID NO: 24770 - protein, 9 aa, synthetic construct
  source 1..9: note = Seed: FIASFRLFA
FTASFRLFR

SEQ ID NO: 24771 - protein, 9 aa, synthetic construct
  source 1..9: note = Seed: FIASFRLFA
FTASFRLFT

SEQ ID NO: 24772 - protein, 9 aa, synthetic construct
  source 1..9: note = Seed: FIASFRLFA
FTASFRLFV

SEQ ID NO: 24773 - protein, 9 aa, synthetic construct
  source 1..9: note = Seed: FIASFRLFA
FTASFRLFY

SEQ ID NO: 24774 - protein, 8 aa, synthetic construct
  source 1..8: note = Seed: FFASFYYV
FTASFYYV

SEQ ID NO: 24775 - protein, 9 aa, synthetic construct
  source 1..9: note = Seed: FFASFYYVW
FTASFYYVF

SEQ ID NO: 24776 - protein, 10 aa, synthetic construct
  source 1..10: note = Seed: FFASFYYVWK
FTASFYYVWK

SEQ ID NO: 24777 - protein, 10 aa, synthetic construct
  source 1..10: note = Seed: FFASFYYVWK
FTASFYYVWR

SEQ ID NO: 24778 - protein, 9 aa, synthetic construct
  source 1..9: note = Seed: FFASFYYVW
FTASFYYVY

SEQ ID NO: 24779 - protein, 9 aa, synthetic construct
  source 1..9: note = Seed: FNATRFASV
FTATRFASA

SEQ ID NO: 24780 - protein, 9 aa, synthetic construct
  source 1..9: note = Seed: FNATRFASV
FTATRFASF

SEQ ID NO: 24781 - protein, 9 aa, synthetic construct
  source 1..9: note = Seed: FNATRFASV
FTATRFASI

SEQ ID NO: 24782 - protein, 9 aa, synthetic construct
  source 1..9: note = Seed: FNATRFASV
FTATRFASL

SEQ ID NO: 24783 - protein, 9 aa, synthetic construct
  source 1..9: note = Seed: FNATRFASV
FTATRFASM

SEQ ID NO: 24784 - protein, 9 aa, synthetic construct
  source 1..9: note = Seed: FNATRFASV
FTATRFASV

SEQ ID NO: 24785 - protein, 10 aa, synthetic construct
  source 1..10: note = Seed: FNATRFASVY
FTATRFASVF

SEQ ID NO: 24786 - protein, 10 aa, synthetic construct
  source 1..10: note = Seed: FNATRFASVY
FTATRFASVM

SEQ ID NO: 24787 - protein, 10 aa, synthetic construct
  source 1..10: note = Seed: FNATRFASVY
FTATRFASVW

SEQ ID NO: 24788 - protein, 10 aa, synthetic construct
  source 1..10: note = Seed: FNATRFASVY
FTATRFASVY

SEQ ID NO: 24789 - protein, 9 aa, synthetic construct
  source 1..9: note = Seed: FNATRFASV
FTATRFASY

SEQ ID NO: 24790 - protein, 9 aa, synthetic construct
  source 1..9: note = Seed: FSAVGNICY
FTAVGNICF

SEQ ID NO: 24791 - protein, 9 aa, synthetic construct
  source 1..9: note = Seed: FSAVGNICY
FTAVGNICM

SEQ ID NO: 24792 - protein, 9 aa, synthetic construct
  source 1..9: note = Seed: FSAVGNICY
FTAVGNICW

SEQ ID NO: 24793 - protein, 9 aa, synthetic construct
  source 1..9: note = Seed: FSAVGNICY
FTAVGNICY

SEQ ID NO: 24794 - protein, 10 aa, synthetic construct
  source 1..10: note = Seed: FSAVGNICYT
FTAVGNICYA

SEQ ID NO: 24795 - protein, 10 aa, synthetic construct
  source 1..10: note = Seed: FSAVGNICYT
FTAVGNICYI

SEQ ID NO: 24796 - protein, 10 aa, synthetic construct
  source 1..10: note = Seed: FSAVGNICYT
FTAVGNICYL

SEQ ID NO: 24797 - protein, 10 aa, synthetic construct
  source 1..10: note = Seed: FSAVGNICYT
FTAVGNICYM

SEQ ID NO: 24798 - protein, 10 aa, synthetic construct
  source 1..10: note = Seed: FSAVGNICYT
FTAVGNICYV

SEQ ID NO: 24799 - protein, 9 aa, synthetic construct
  source 1..9: note = Seed: FLAYILFTR
FTAYILFTA

SEQ ID NO: 24800 - protein, 9 aa, synthetic construct
  source 1..9: note = Seed: FLAYILFTR
FTAYILFTH

SEQ ID NO: 24801 - protein, 9 aa, synthetic construct
  source 1..9: note = Seed: FLAYILFTR
FTAYILFTI

SEQ ID NO: 24802 - protein, 9 aa, synthetic construct
  source 1..9: note = Seed: FLAYILFTR
FTAYILFTK

SEQ ID NO: 24803 - protein, 9 aa, synthetic construct
  source 1..9: note = Seed: FLAYILFTR
FTAYILFTL

SEQ ID NO: 24804 - protein, 9 aa, synthetic construct
  source 1..9: note = Seed: FLAYILFTR
FTAYILFTM

SEQ ID NO: 24805 - protein, 9 aa, synthetic construct
  source 1..9: note = Seed: FLAYILFTR
FTAYILFTR

SEQ ID NO: 24806 - protein, 10 aa, synthetic construct
  source 1..10: note = Seed: FLAYILFTRF
FTAYILFTRA

SEQ ID NO: 24807 - protein, 10 aa, synthetic construct
  source 1..10: note = Seed: FLAYILFTRF
FTAYILFTRC

SEQ ID NO: 24808 - protein, 10 aa, synthetic construct
  source 1..10: note = Seed: FLAYILFTRF
FTAYILFTRD

SEQ ID NO: 24809 - protein, 10 aa, synthetic construct
  source 1..10: note = Seed: FLAYILFTRF
FTAYILFTRE

SEQ ID NO: 24810 - protein, 10 aa, synthetic construct
  source 1..10: note = Seed: FLAYILFTRF
FTAYILFTRF

SEQ ID NO: 24811 - protein, 10 aa, synthetic construct
  source 1..10: note = Seed: FLAYILFTRF
FTAYILFTRG

SEQ ID NO: 24812 - protein, 10 aa, synthetic construct
  source 1..10: note = Seed: FLAYILFTRF
FTAYILFTRH

SEQ ID NO: 24813 - protein, 10 aa, synthetic construct
  source 1..10: note = Seed: FLAYILFTRF
FTAYILFTRI

SEQ ID NO: 24814 - protein, 10 aa, synthetic construct
  source 1..10: note = Seed: FLAYILFTRF
FTAYILFTRK

SEQ ID NO: 24815 - protein, 10 aa, synthetic construct
  source 1..10: note = Seed: FLAYILFTRF
FTAYILFTRL

SEQ ID NO: 24816 - protein, 10 aa, synthetic construct
  source 1..10: note = Seed: FLAYILFTRF
FTAYILFTRM

SEQ ID NO: 24817 - protein, 10 aa, synthetic construct
  source 1..10: note = Seed: FLAYILFTRF
FTAYILFTRN

SEQ ID NO: 24818 - protein, 10 aa, synthetic construct
  source 1..10: note = Seed: FLAYILFTRF
FTAYILFTRP

SEQ ID NO: 24819 - protein, 10 aa, synthetic construct
  source 1..10: note = Seed: FLAYILFTRF
FTAYILFTRQ

SEQ ID NO: 24820 - protein, 10 aa, synthetic construct
  source 1..10: note = Seed: FLAYILFTRF
FTAYILFTRR

SEQ ID NO: 24821 - protein, 10 aa, synthetic construct
  source 1..10: note = Seed: FLAYILFTRF
FTAYILFTRS

SEQ ID NO: 24822 - protein, 10 aa, synthetic construct
  source 1..10: note = Seed: FLAYILFTRF
FTAYILFTRT

SEQ ID NO: 24823 - protein, 10 aa, synthetic construct
  source 1..10: note = Seed: FLAYILFTRF
FTAYILFTRV

SEQ ID NO: 24824 - protein, 10 aa, synthetic construct
  source 1..10: note = Seed: FLAYILFTRF
FTAYILFTRW

SEQ ID NO: 24825 - protein, 10 aa, synthetic construct
  source 1..10: note = Seed: FLAYILFTRF
FTAYILFTRY

SEQ ID NO: 24826 - protein, 9 aa, synthetic construct
  source 1..9: note = Seed: FLAYILFTR
FTAYILFTT

SEQ ID NO: 24827 - protein, 9 aa, synthetic construct
  source 1..9: note = Seed: FLAYILFTR
FTAYILFTV

SEQ ID NO: 24828 - protein, 9 aa, synthetic construct
  source 1..9: note = Seed: FLAYILFTR
FTAYILFTY

SEQ ID NO: 24829 - protein, 9 aa, synthetic construct
  source 1..9: note = Seed: FVCDNIKFA
FTCDNIKFV

SEQ ID NO: 24830 - protein, 9 aa, synthetic construct
  source 1..9: note = Seed: FLCLFLLPS
FTCLFLLPA

SEQ ID NO: 24831 - protein, 9 aa, synthetic construct
  source 1..9: note = Seed: FLCLFLLPS
FTCLFLLPI

SEQ ID NO: 24832 - protein, 9 aa, synthetic construct
  source 1..9: note = Seed: FLCLFLLPS
FTCLFLLPV

SEQ ID NO: 24833 - protein, 9 aa, synthetic construct
  source 1..9: note = Seed: FMCVEYCPI
FTCVEYCPV

SEQ ID NO: 24834 - protein, 9 aa, synthetic construct
  source 1..9: note = Seed: FLCWHTNCY
FTCWHTNCF

SEQ ID NO: 24835 - protein, 9 aa, synthetic construct
  source 1..9: note = Seed: FLCWHTNCY
FTCWHTNCM

SEQ ID NO: 24836 - protein, 9 aa, synthetic construct
  source 1..9: note = Seed: FLCWHTNCY
FTCWHTNCY

SEQ ID NO: 24837 - protein, 9 aa, synthetic construct
  source 1..9: note = Seed: FGDDTVIEV
FTDDTVIEA

SEQ ID NO: 24838 - protein, 9 aa, synthetic construct
  source 1..9: note = Seed: FGDDTVIEV
FTDDTVIEF

SEQ ID NO: 24839 - protein, 9 aa, synthetic construct
  source 1..9: note = Seed: FGDDTVIEV
FTDDTVIEI

SEQ ID NO: 24840 - protein, 9 aa, synthetic construct
  source 1..9: note = Seed: FGDDTVIEV
FTDDTVIEL

SEQ ID NO: 24841 - protein, 9 aa, synthetic construct
  source 1..9: note = Seed: FGDDTVIEV
FTDDTVIEM

SEQ ID NO: 24842 - protein, 9 aa, synthetic construct
  source 1..9: note = Seed: FGDDTVIEV
FTDDTVIEV

SEQ ID NO: 24843 - protein, 8 aa, synthetic construct
  source 1..8: note = Seed: FVDGVPFV
FTDGVPFL

SEQ ID NO: 24844 - protein, 9 aa, synthetic construct
  source 1..9: note = Seed: FVDGVPFVV
FTDGVPFVA

SEQ ID NO: 24845 - protein, 9 aa, synthetic construct
  source 1..9: note = Seed: FVDGVPFVV
FTDGVPFVF

SEQ ID NO: 24846 - protein, 9 aa, synthetic construct
  source 1..9: note = Seed: FVDGVPFVV
FTDGVPFVI

SEQ ID NO: 24847 - protein, 9 aa, synthetic construct
  source 1..9: note = Seed: FVDGVPFVV
FTDGVPFVL

SEQ ID NO: 24848 - protein, 9 aa, synthetic construct
  source 1..9: note = Seed: FVDGVPFVV
FTDGVPFVM

SEQ ID NO: 24849 - protein, 9 aa, synthetic construct
  source 1..9: note = Seed: FVDGVPFVV
FTDGVPFVV

SEQ ID NO: 24850 - protein, 10 aa, synthetic construct
  source 1..10: note = Seed: FVDGVPFVVS
FTDGVPFVVV

SEQ ID NO: 24851 - protein, 9 aa, synthetic construct
  source 1..9: note = Seed: FVDGVPFVV
FTDGVPFVY

SEQ ID NO: 24852 - protein, 9 aa, synthetic construct
  source 1..9: note = Seed: FPDLNGDVV
FTDLNGDVF

SEQ ID NO: 24853 - protein, 9 aa, synthetic construct
  source 1..9: note = Seed: FPDLNGDVV
FTDLNGDVI

SEQ ID NO: 24854 - protein, 9 aa, synthetic construct
  source 1..9: note = Seed: FPDLNGDVV
FTDLNGDVL

SEQ ID NO: 24855 - protein, 9 aa, synthetic construct
  source 1..9: note = Seed: FPDLNGDVV
FTDLNGDVM

SEQ ID NO: 24856 - protein, 9 aa, synthetic construct
  source 1..9: note = Seed: FPDLNGDVV
FTDLNGDVV

SEQ ID NO: 24857 - protein, 11 aa, synthetic construct
  source 1..11: note = Seed: FPDLNGDVVAI
FTDLNGDVVAI

SEQ ID NO: 24858 - protein, 11 aa, synthetic construct
  source 1..11: note = Seed: FPDLNGDVVAI
FTDLNGDVVAL

SEQ ID NO: 24859 - protein, 11 aa, synthetic construct
  source 1..11: note = Seed: FPDLNGDVVAI
FTDLNGDVVAV

SEQ ID NO: 24860 - protein, 9 aa, synthetic construct
  source 1..9: note = Seed: FPDLNGDVV
FTDLNGDVY

SEQ ID NO: 24861 - protein, 10 aa, synthetic construct
  source 1..10: note = Seed: FIERYKLEGY
FTERYKLEGY

SEQ ID NO: 24862 - protein, 10 aa, synthetic construct
  source 1..10: note = Seed: FVETVKGLDY
FTETVKGLDY

SEQ ID NO: 24863 - protein, 9 aa, synthetic construct
  source 1..9: note = Seed: FVFKNIDGY
FTFKNIDGF

SEQ ID NO: 24864 - protein, 9 aa, synthetic construct
  source 1..9: note = Seed: FVFKNIDGY
FTFKNIDGK

SEQ ID NO: 24865 - protein, 9 aa, synthetic construct
  source 1..9: note = Seed: FVFKNIDGY
FTFKNIDGM

SEQ ID NO: 24866 - protein, 9 aa, synthetic construct
  source 1..9: note = Seed: FVFKNIDGY
FTFKNIDGR

SEQ ID NO: 24867 - protein, 9 aa, synthetic construct
  source 1..9: note = Seed: FVFKNIDGY
FTFKNIDGW

SEQ ID NO: 24868 - protein, 9 aa, synthetic construct
  source 1..9: note = Seed: FVFKNIDGY
FTFKNIDGY

SEQ ID NO: 24869 - protein, 10 aa, synthetic construct
  source 1..10: note = Seed: FVFKNIDGYF
FTFKNIDGYA

SEQ ID NO: 24870 - protein, 10 aa, synthetic construct
  source 1..10: note = Seed: FVFKNIDGYF
FTFKNIDGYF

SEQ ID NO: 24871 - protein, 11 aa, synthetic construct
  source 1..11: note = Seed: FVFKNIDGYFK
FTFKNIDGYFK

SEQ ID NO: 24872 - protein, 11 aa, synthetic construct
  source 1..11: note = Seed: FVFKNIDGYFK
FTFKNIDGYFR

SEQ ID NO: 24873 - protein, 10 aa, synthetic construct
  source 1..10: note = Seed: FVFKNIDGYF
FTFKNIDGYI

SEQ ID NO: 24874 - protein, 10 aa, synthetic construct
  source 1..10: note = Seed: FVFKNIDGYF
FTFKNIDGYL

SEQ ID NO: 24875 - protein, 10 aa, synthetic construct
  source 1..10: note = Seed: FVFKNIDGYF
FTFKNIDGYV

SEQ ID NO: 24876 - protein, 10 aa, synthetic construct
  source 1..10: note = Seed: FVFKNIDGYF
FTFKNIDGYW

SEQ ID NO: 24877 - protein, 10 aa, synthetic construct
  source 1..10: note = Seed: FVFKNIDGYF
FTFKNIDGYY

SEQ ID NO: 24878 - protein, 10 aa, synthetic construct
  source 1..10: note = Seed: FLFLTWICLL
FTFLTWICLI

SEQ ID NO: 24879 - protein, 10 aa, synthetic construct
  source 1..10: note = Seed: FLFLTWICLL
FTFLTWICLV

SEQ ID NO: 24880 - protein, 9 aa, synthetic construct
  source 1..9: note = Seed: FLFLTWICL
FTFLTWICV

SEQ ID NO: 24881 - protein, 10 aa, synthetic construct
  source 1..10: note = Seed: FPFNKWGKAR
FTFNKWGKAK

SEQ ID NO: 24882 - protein, 10 aa, synthetic construct
  source 1..10: note = Seed: FPFNKWGKAR
FTFNKWGKAR

SEQ ID NO: 24883 - protein, 9 aa, synthetic construct
  source 1..9: note = Seed: FLFVAAIFY
FTFVAAIFF

SEQ ID NO: 24884 - protein, 9 aa, synthetic construct
  source 1..9: note = Seed: FLFVAAIFY
FTFVAAIFM

SEQ ID NO: 24885 - protein, 9 aa, synthetic construct
  source 1..9: note = Seed: FLFVAAIFY
FTFVAAIFY

SEQ ID NO: 24886 - protein, 10 aa, synthetic construct
  source 1..10: note = Seed: FLFVAAIFYL
FTFVAAIFYA

SEQ ID NO: 24887 - protein, 10 aa, synthetic construct
  source 1..10: note = Seed: FLFVAAIFYL
FTFVAAIFYI

SEQ ID NO: 24888 - protein, 10 aa, synthetic construct
  source 1..10: note = Seed: FLFVAAIFYL
FTFVAAIFYL

SEQ ID NO: 24889 - protein, 11 aa, synthetic construct
  source 1..11: note = Seed: FLFVAAIFYLI
FTFVAAIFYLV

SEQ ID NO: 24890 - protein, 10 aa, synthetic construct
  source 1..10: note = Seed: FLFVAAIFYL
FTFVAAIFYM

SEQ ID NO: 24891 - protein, 10 aa, synthetic construct
  source 1..10: note = Seed: FLFVAAIFYL
FTFVAAIFYT

SEQ ID NO: 24892 - protein, 10 aa, synthetic construct
  source 1..10: note = Seed: FLFVAAIFYL
FTFVAAIFYV

SEQ ID NO: 24893 - protein, 10 aa, synthetic construct
  source 1..10: note = Seed: FLFVAAIFYL
FTFVAAIFYY

SEQ ID NO: 24894 - protein, 9 aa, synthetic construct
  source 1..9: note = Seed: FGGASCCLY
FTGASCCLY

SEQ ID NO: 24895 - protein, 9 aa, synthetic construct
  source 1..9: note = Seed: FGGCVFSYV
FTGCVFSYA

SEQ ID NO: 24896 - protein, 9 aa, synthetic construct
  source 1..9: note = Seed: FGGCVFSYV
FTGCVFSYI

SEQ ID NO: 24897 - protein, 9 aa, synthetic construct
  source 1..9: note = Seed: FGGCVFSYV
FTGCVFSYL

SEQ ID NO: 24898 - protein, 9 aa, synthetic construct
  source 1..9: note = Seed: FGGCVFSYV
FTGCVFSYM

SEQ ID NO: 24899 - protein, 9 aa, synthetic construct
  source 1..9: note = Seed: FGGCVFSYV
FTGCVFSYT

SEQ ID NO: 24900 - protein, 9 aa, synthetic construct
  source 1..9: note = Seed: FGGCVFSYV
FTGCVFSYV

SEQ ID NO: 24901 - protein, 10 aa, synthetic construct
  source 1..10: note = Seed: FNGIGVTQNV
FTGIGVTQNA

SEQ ID NO: 24902 - protein, 10 aa, synthetic construct
  source 1..10: note = Seed: FNGIGVTQNV
FTGIGVTQNI

SEQ ID NO: 24903 - protein, 10 aa, synthetic construct
  source 1..10: note = Seed: FNGIGVTQNV
FTGIGVTQNL

SEQ ID NO: 24904 - protein, 10 aa, synthetic construct
  source 1..10: note = Seed: FNGIGVTQNV
FTGIGVTQNV

SEQ ID NO: 24905 - protein, 9 aa, synthetic construct
  source 1..9: note = Seed: FLGRYMSAL
FTGRYMSAF

SEQ ID NO: 24906 - protein, 9 aa, synthetic construct
  source 1..9: note = Seed: FLGRYMSAL
FTGRYMSAI

SEQ ID NO: 24907 - protein, 9 aa, synthetic construct
  source 1..9: note = Seed: FLGRYMSAL
FTGRYMSAL

SEQ ID NO: 24908 - protein, 9 aa, synthetic construct
  source 1..9: note = Seed: FLGRYMSAL
FTGRYMSAM

SEQ ID NO: 24909 - protein, 9 aa, synthetic construct
  source 1..9: note = Seed: FLGRYMSAL
FTGRYMSAV

SEQ ID NO: 24910 - protein, 9 aa, synthetic construct
  source 1..9: note = Seed: FLGRYMSAL
FTGRYMSAY

SEQ ID NO: 24911 - protein, 10 aa, synthetic construct
  source 1..10: note = Seed: FLGYFCTCYF
FTGYFCTCYI

SEQ ID NO: 24912 - protein, 10 aa, synthetic construct
  source 1..10: note = Seed: FLGYFCTCYF
FTGYFCTCYL

SEQ ID NO: 24913 - protein, 10 aa, synthetic construct
  source 1..10: note = Seed: FLGYFCTCYF
FTGYFCTCYV

SEQ ID NO: 24914 - protein, 10 aa, synthetic construct
  source 1..10: note = Seed: FLGYFCTCYF
FTGYFCTCYY

SEQ ID NO: 24915 - protein, 9 aa, synthetic construct
  source 1..9: note = Seed: FQHANLDSC
FTHANLDSA

SEQ ID NO: 24916 - protein, 9 aa, synthetic construct
  source 1..9: note = Seed: FQHANLDSC
FTHANLDSI

SEQ ID NO: 24917 - protein, 9 aa, synthetic construct
  source 1..9: note = Seed: FQHANLDSC
FTHANLDSL

SEQ ID NO: 24918 - protein, 9 aa, synthetic construct
  source 1..9: note = Seed: FQHANLDSC
FTHANLDSM

SEQ ID NO: 24919 - protein, 9 aa, synthetic construct
  source 1..9: note = Seed: FQHANLDSC
FTHANLDSV

SEQ ID NO: 24920 - protein, 9 aa, synthetic construct
  source 1..9: note = Seed: FLHFLPRVF
FTHFLPRVF

SEQ ID NO: 24921 - protein, 11 aa, synthetic construct
  source 1..11: note = Seed: FLHFLPRVFSA
FTHFLPRVFSV

SEQ ID NO: 24922 - protein, 9 aa, synthetic construct
  source 1..9: note = Seed: FLHFLPRVF
FTHFLPRVI

SEQ ID NO: 24923 - protein, 9 aa, synthetic construct
  source 1..9: note = Seed: FLHFLPRVF
FTHFLPRVL

SEQ ID NO: 24924 - protein, 9 aa, synthetic construct
  source 1..9: note = Seed: FLHFLPRVF
FTHFLPRVM

SEQ ID NO: 24925 - protein, 9 aa, synthetic construct
  source 1..9: note = Seed: FLHFLPRVF
FTHFLPRVV

SEQ ID NO: 24926 - protein, 9 aa, synthetic construct
  source 1..9: note = Seed: FLHFLPRVF
FTHFLPRVY

SEQ ID NO: 24927 - protein, 9 aa, synthetic construct
  source 1..9: note = Seed: FSHSQLGGL
FTHSQLGGF

SEQ ID NO: 24928 - protein, 11 aa, synthetic construct
  source 1..11: note = Seed: FSHSQLGGLHL
FTHSQLGGLHF

SEQ ID NO: 24929 - protein, 11 aa, synthetic construct
  source 1..11: note = Seed: FSHSQLGGLHL
FTHSQLGGLHW

SEQ ID NO: 24930 - protein, 9 aa, synthetic construct
  source 1..9: note = Seed: FSHSQLGGL
FTHSQLGGV

SEQ ID NO: 24931 - protein, 9 aa, synthetic construct
  source 1..9: note = Seed: FSHSQLGGL
FTHSQLGGW

SEQ ID NO: 24932 - protein, 9 aa, synthetic construct
  source 1..9: note = Seed: FSHSQLGGL
FTHSQLGGY

SEQ ID NO: 24933 - protein, 10 aa, synthetic construct
  source 1..10: note = Seed: FLHVTYVPAQ
FTHVTYVPAV

SEQ ID NO: 24934 - protein, 9 aa, synthetic construct
  source 1..9: note = Seed: FLHVTYVPA
FTHVTYVPV

SEQ ID NO: 24935 - protein, 9 aa, synthetic construct
  source 1..9: note = Seed: FTINCQEPK
FTINCQEPR

SEQ ID NO: 24936 - protein, 9 aa, synthetic construct
  source 1..9: note = Seed: FVIRGDEVR
FTIRGDEVK

SEQ ID NO: 24937 - protein, 9 aa, synthetic construct
  source 1..9: note = Seed: FVIRGDEVR
FTIRGDEVR

SEQ ID NO: 24938 - protein, 10 aa, synthetic construct
  source 1..10: note = Seed: FKIYSKHTPI
FTIYSKHTPA

SEQ ID NO: 24939 - protein, 10 aa, synthetic construct
  source 1..10: note = Seed: FKIYSKHTPI
FTIYSKHTPF

SEQ ID NO: 24940 - protein, 10 aa, synthetic construct
  source 1..10: note = Seed: FKIYSKHTPI
FTIYSKHTPI

SEQ ID NO: 24941 - protein, 10 aa, synthetic construct
  source 1..10: note = Seed: FKIYSKHTPI
FTIYSKHTPL

SEQ ID NO: 24942 - protein, 10 aa, synthetic construct
  source 1..10: note = Seed: FKIYSKHTPI
FTIYSKHTPV

SEQ ID NO: 24943 - protein, 10 aa, synthetic construct
  source 1..10: note = Seed: FKIYSKHTPI
FTIYSKHTPY

SEQ ID NO: 24944 - protein, 10 aa, synthetic construct
  source 1..10: note = Seed: FIKGLNNLNR
FTKGLNNLNK

SEQ ID NO: 24945 - protein, 10 aa, synthetic construct
  source 1..10: note = Seed: FIKGLNNLNR
FTKGLNNLNR

SEQ ID NO: 24946 - protein, 9 aa, synthetic construct
  source 1..9: note = Seed: FVKHKHAFL
FTKHKHAFL

SEQ ID NO: 24947 - protein, 9 aa, synthetic construct
  source 1..9: note = Seed: FVKHKHAFL
FTKHKHAFM

SEQ ID NO: 24948 - protein, 8 aa, synthetic construct
  source 1..8: note = Seed: FVKHKHAF
FTKHKHAL

SEQ ID NO: 24949 - protein, 8 aa, synthetic construct
  source 1..8: note = Seed: FVKHKHAF
FTKHKHAM

SEQ ID NO: 24950 - protein, 11 aa, synthetic construct
  source 1..11: note = Seed: FPKSDGTGTIY
FTKSDGTGTIY

SEQ ID NO: 24951 - protein, 9 aa, synthetic construct
  source 1..9: note = Seed: FVLALLSDL
FTLALLSDA

SEQ ID NO: 24952 - protein, 9 aa, synthetic construct
  source 1..9: note = Seed: FVLALLSDL
FTLALLSDF

SEQ ID NO: 24953 - protein, 9 aa, synthetic construct
  source 1..9: note = Seed: FVLALLSDL
FTLALLSDI

SEQ ID NO: 24954 - protein, 9 aa, synthetic construct
  source 1..9: note = Seed: FVLALLSDL
FTLALLSDL

SEQ ID NO: 24955 - protein, 9 aa, synthetic construct
  source 1..9: note = Seed: FVLALLSDL
FTLALLSDM

SEQ ID NO: 24956 - protein, 9 aa, synthetic construct
  source 1..9: note = Seed: FVLALLSDL
FTLALLSDV

SEQ ID NO: 24957 - protein, 9 aa, synthetic construct
  source 1..9: note = Seed: FVLALLSDL
FTLALLSDY

SEQ ID NO: 24958 - protein, 10 aa, synthetic construct
  source 1..10: note = Seed: FPLCANGQVF
FTLCANGQVF

SEQ ID NO: 24959 - protein, 10 aa, synthetic construct
  source 1..10: note = Seed: FPLCANGQVF
FTLCANGQVM

SEQ ID NO: 24960 - protein, 10 aa, synthetic construct
  source 1..10: note = Seed: FPLCANGQVF
FTLCANGQVY

SEQ ID NO: 24961 - protein, 10 aa, synthetic construct
  source 1..10: note = Seed: FKLKDCVMYA
FTLKDCVMYA

SEQ ID NO: 24962 - protein, 10 aa, synthetic construct
  source 1..10: note = Seed: FKLKDCVMYA
FTLKDCVMYI

SEQ ID NO: 24963 - protein, 10 aa, synthetic construct
  source 1..10: note = Seed: FKLKDCVMYA
FTLKDCVMYL

SEQ ID NO: 24964 - protein, 10 aa, synthetic construct
  source 1..10: note = Seed: FKLKDCVMYA
FTLKDCVMYM

SEQ ID NO: 24965 - protein, 10 aa, synthetic construct
  source 1..10: note = Seed: FKLKDCVMYA
FTLKDCVMYS

SEQ ID NO: 24966 - protein, 10 aa, synthetic construct
  source 1..10: note = Seed: FKLKDCVMYA
FTLKDCVMYT

SEQ ID NO: 24967 - protein, 10 aa, synthetic construct
  source 1..10: note = Seed: FKLKDCVMYA
FTLKDCVMYV

SEQ ID NO: 24968 - protein, 10 aa, synthetic construct
  source 1..10: note = Seed: FPLKLRGTAV
FTLKLRGTAF

SEQ ID NO: 24969 - protein, 10 aa, synthetic construct
  source 1..10: note = Seed: FPLKLRGTAV
FTLKLRGTAI

SEQ ID NO: 24970 - protein, 10 aa, synthetic construct
  source 1..10: note = Seed: FPLKLRGTAV
FTLKLRGTAL

SEQ ID NO: 24971 - protein, 10 aa, synthetic construct
  source 1..10: note = Seed: FPLKLRGTAV
FTLKLRGTAM

SEQ ID NO: 24972 - protein, 10 aa, synthetic construct
  source 1..10: note = Seed: FPLKLRGTAV
FTLKLRGTAV

SEQ ID NO: 24973 - protein, 11 aa, synthetic construct
  source 1..11: note = Seed: FPLKLRGTAVM
FTLKLRGTAVF

SEQ ID NO: 24974 - protein, 11 aa, synthetic construct
  source 1..11: note = Seed: FPLKLRGTAVM
FTLKLRGTAVY

SEQ ID NO: 24975 - protein, 10 aa, synthetic construct
  source 1..10: note = Seed: FTLLLQLCTF
FTLLLQLCTW

SEQ ID NO: 24976 - protein, 10 aa, synthetic construct
  source 1..10: note = Seed: FTLLLQLCTF
FTLLLQLCTY

SEQ ID NO: 24977 - protein, 9 aa, synthetic construct
  source 1..9: note = Seed: FLLNKEMYL
FTLNKEMYA

SEQ ID NO: 24978 - protein, 9 aa, synthetic construct
  source 1..9: note = Seed: FLLNKEMYL
FTLNKEMYF

SEQ ID NO: 24979 - protein, 9 aa, synthetic construct
  source 1..9: note = Seed: FLLNKEMYL
FTLNKEMYI

SEQ ID NO: 24980 - protein, 9 aa, synthetic construct
  source 1..9: note = Seed: FLLNKEMYL
FTLNKEMYL

SEQ ID NO: 24981 - protein, 10 aa, synthetic construct
  source 1..10: note = Seed: FLLNKEMYLK
FTLNKEMYLA

SEQ ID NO: 24982 - protein, 10 aa, synthetic construct
  source 1..10: note = Seed: FLLNKEMYLK
FTLNKEMYLI

SEQ ID NO: 24983 - protein, 10 aa, synthetic construct
  source 1..10: note = Seed: FLLNKEMYLK
FTLNKEMYLK

SEQ ID NO: 24984 - protein, 10 aa, synthetic construct
  source 1..10: note = Seed: FLLNKEMYLK
FTLNKEMYLL

SEQ ID NO: 24985 - protein, 10 aa, synthetic construct
  source 1..10: note = Seed: FLLNKEMYLK
FTLNKEMYLM

SEQ ID NO: 24986 - protein, 10 aa, synthetic construct
  source 1..10: note = Seed: FLLNKEMYLK
FTLNKEMYLR

SEQ ID NO: 24987 - protein, 10 aa, synthetic construct
  source 1..10: note = Seed: FLLNKEMYLK
FTLNKEMYLV

SEQ ID NO: 24988 - protein, 9 aa, synthetic construct
  source 1..9: note = Seed: FLLNKEMYL
FTLNKEMYM

SEQ ID NO: 24989 - protein, 9 aa, synthetic construct
  source 1..9: note = Seed: FLLNKEMYL
FTLNKEMYV

SEQ ID NO: 24990 - protein, 9 aa, synthetic construct
  source 1..9: note = Seed: FLLNKEMYL
FTLNKEMYY

SEQ ID NO: 24991 - protein, 10 aa, synthetic construct
  source 1..10: note = Seed: FRLTLGVYDY
FTLTLGVYDY

SEQ ID NO: 24992 - protein, 9 aa, synthetic construct
  source 1..9: note = Seed: FYLTNDVSF
FTLTNDVSF

SEQ ID NO: 24993 - protein, 10 aa, synthetic construct
  source 1..10: note = Seed: FYLTNDVSFL
FTLTNDVSFA

SEQ ID NO: 24994 - protein, 10 aa, synthetic construct
  source 1..10: note = Seed: FYLTNDVSFL
FTLTNDVSFI

SEQ ID NO: 24995 - protein, 10 aa, synthetic construct
  source 1..10: note = Seed: FYLTNDVSFL
FTLTNDVSFL

SEQ ID NO: 24996 - protein, 11 aa, synthetic construct
  source 1..11: note = Seed: FYLTNDVSFLA
FTLTNDVSFLI

SEQ ID NO: 24997 - protein, 11 aa, synthetic construct
  source 1..11: note = Seed: FYLTNDVSFLA
FTLTNDVSFLL

SEQ ID NO: 24998 - protein, 11 aa, synthetic construct
  source 1..11: note = Seed: FYLTNDVSFLA
FTLTNDVSFLV

SEQ ID NO: 24999 - protein, 10 aa, synthetic construct
  source 1..10: note = Seed: FYLTNDVSFL
FTLTNDVSFM

SEQ ID NO: 25000 - protein, 10 aa, synthetic construct
  source 1..10: note = Seed: FYLTNDVSFL
FTLTNDVSFV

SEQ ID NO: 25001 - protein, 9 aa, synthetic construct
  source 1..9: note = Seed: FYLTNDVSF
FTLTNDVSL

SEQ ID NO: 25002 - protein, 9 aa, synthetic construct
  source 1..9: note = Seed: FYLTNDVSF
FTLTNDVSM

SEQ ID NO: 25003 - protein, 9 aa, synthetic construct
  source 1..9: note = Seed: FYLTNDVSF
FTLTNDVSY

SEQ ID NO: 25004 - protein, 10 aa, synthetic construct
  source 1..10: note = Seed: FQLTPIAVQM
FTLTPIAVQA

SEQ ID NO: 25005 - protein, 10 aa, synthetic construct
  source 1..10: note = Seed: FQLTPIAVQM
FTLTPIAVQI

SEQ ID NO: 25006 - protein, 10 aa, synthetic construct
  source 1..10: note = Seed: FQLTPIAVQM
FTLTPIAVQL

SEQ ID NO: 25007 - protein, 10 aa, synthetic construct
  source 1..10: note = Seed: FQLTPIAVQM
FTLTPIAVQM

SEQ ID NO: 25008 - protein, 10 aa, synthetic construct
  source 1..10: note = Seed: FQLTPIAVQM
FTLTPIAVQV

SEQ ID NO: 25009 - protein, 10 aa, synthetic construct
  source 1..10: note = Seed: FELTSMKYFV
FTLTSMKYFA

SEQ ID NO: 25010 - protein, 10 aa, synthetic construct
  source 1..10: note = Seed: FELTSMKYFV
FTLTSMKYFI

SEQ ID NO: 25011 - protein, 10 aa, synthetic construct
  source 1..10: note = Seed: FELTSMKYFV
FTLTSMKYFL

SEQ ID NO: 25012 - protein, 10 aa, synthetic construct
  source 1..10: note = Seed: FELTSMKYFV
FTLTSMKYFM

SEQ ID NO: 25013 - protein, 10 aa, synthetic construct
  source 1..10: note = Seed: FELTSMKYFV
FTLTSMKYFV

SEQ ID NO: 25014 - protein, 9 aa, synthetic construct
  source 1..9: note = Seed: FGLVAEWFL
FTLVAEWFA

SEQ ID NO: 25015 - protein, 9 aa, synthetic construct
  source 1..9: note = Seed: FGLVAEWFL
FTLVAEWFI

SEQ ID NO: 25016 - protein, 9 aa, synthetic construct
  source 1..9: note = Seed: FGLVAEWFL
FTLVAEWFL

SEQ ID NO: 25017 - protein, 10 aa, synthetic construct
  source 1..10: note = Seed: FGLVAEWFLA
FTLVAEWFLA

SEQ ID NO: 25018 - protein, 10 aa, synthetic construct
  source 1..10: note = Seed: FGLVAEWFLA
FTLVAEWFLI

SEQ ID NO: 25019 - protein, 10 aa, synthetic construct
  source 1..10: note = Seed: FGLVAEWFLA
FTLVAEWFLL

SEQ ID NO: 25020 - protein, 10 aa, synthetic construct
  source 1..10: note = Seed: FGLVAEWFLA
FTLVAEWFLM

SEQ ID NO: 25021 - protein, 10 aa, synthetic construct
  source 1..10: note = Seed: FGLVAEWFLA
FTLVAEWFLV

SEQ ID NO: 25022 - protein, 9 aa, synthetic construct
  source 1..9: note = Seed: FGLVAEWFL
FTLVAEWFM

SEQ ID NO: 25023 - protein, 9 aa, synthetic construct
  source 1..9: note = Seed: FGLVAEWFL
FTLVAEWFV

SEQ ID NO: 25024 - protein, 10 aa, synthetic construct
  source 1..10: note = Seed: FVLWAHGFEL
FTLWAHGFEA

SEQ ID NO: 25025 - protein, 10 aa, synthetic construct
  source 1..10: note = Seed: FVLWAHGFEL
FTLWAHGFEF

SEQ ID NO: 25026 - protein, 10 aa, synthetic construct
  source 1..10: note = Seed: FVLWAHGFEL
FTLWAHGFEI

SEQ ID NO: 25027 - protein, 10 aa, synthetic construct
  source 1..10: note = Seed: FVLWAHGFEL
FTLWAHGFEL

SEQ ID NO: 25028 - protein, 11 aa, synthetic construct
  source 1..11: note = Seed: FVLWAHGFELT
FTLWAHGFELA

SEQ ID NO: 25029 - protein, 11 aa, synthetic construct
  source 1..11: note = Seed: FVLWAHGFELT
FTLWAHGFELC

SEQ ID NO: 25030 - protein, 11 aa, synthetic construct
  source 1..11: note = Seed: FVLWAHGFELT
FTLWAHGFELD

SEQ ID NO: 25031 - protein, 11 aa, synthetic construct
  source 1..11: note = Seed: FVLWAHGFELT
FTLWAHGFELE

SEQ ID NO: 25032 - protein, 11 aa, synthetic construct
  source 1..11: note = Seed: FVLWAHGFELT
FTLWAHGFELF

SEQ ID NO: 25033 - protein, 11 aa, synthetic construct
  source 1..11: note = Seed: FVLWAHGFELT
FTLWAHGFELG

SEQ ID NO: 25034 - protein, 11 aa, synthetic construct
  source 1..11: note = Seed: FVLWAHGFELT
FTLWAHGFELH

SEQ ID NO: 25035 - protein, 11 aa, synthetic construct
  source 1..11: note = Seed: FVLWAHGFELT
FTLWAHGFELI

SEQ ID NO: 25036 - protein, 11 aa, synthetic construct
  source 1..11: note = Seed: FVLWAHGFELT
FTLWAHGFELK

SEQ ID NO: 25037 - protein, 11 aa, synthetic construct
  source 1..11: note = Seed: FVLWAHGFELT
FTLWAHGFELL

SEQ ID NO: 25038 - protein, 11 aa, synthetic construct
  source 1..11: note = Seed: FVLWAHGFELT
FTLWAHGFELM

SEQ ID NO: 25039 - protein, 11 aa, synthetic construct
  source 1..11: note = Seed: FVLWAHGFELT
FTLWAHGFELN

SEQ ID NO: 25040 - protein, 11 aa, synthetic construct
  source 1..11: note = Seed: FVLWAHGFELT
FTLWAHGFELP

SEQ ID NO: 25041 - protein, 11 aa, synthetic construct
  source 1..11: note = Seed: FVLWAHGFELT
FTLWAHGFELQ

SEQ ID NO: 25042 - protein, 11 aa, synthetic construct
  source 1..11: note = Seed: FVLWAHGFELT
FTLWAHGFELR

SEQ ID NO: 25043 - protein, 11 aa, synthetic construct
  source 1..11: note = Seed: FVLWAHGFELT
FTLWAHGFELS

SEQ ID NO: 25044 - protein, 11 aa, synthetic construct
  source 1..11: note = Seed: FVLWAHGFELT
FTLWAHGFELT

SEQ ID NO: 25045 - protein, 11 aa, synthetic construct
  source 1..11: note = Seed: FVLWAHGFELT
FTLWAHGFELV

SEQ ID NO: 25046 - protein, 11 aa, synthetic construct
  source 1..11: note = Seed: FVLWAHGFELT
FTLWAHGFELW

SEQ ID NO: 25047 - protein, 11 aa, synthetic construct
  source 1..11: note = Seed: FVLWAHGFELT
FTLWAHGFELY

SEQ ID NO: 25048 - protein, 10 aa, synthetic construct
  source 1..10: note = Seed: FVLWAHGFEL
FTLWAHGFEM

SEQ ID NO: 25049 - protein, 10 aa, synthetic construct
  source 1..10: note = Seed: FVLWAHGFEL
FTLWAHGFES

SEQ ID NO: 25050 - protein, 10 aa, synthetic construct
  source 1..10: note = Seed: FVLWAHGFEL
FTLWAHGFET

SEQ ID NO: 25051 - protein, 10 aa, synthetic construct
  source 1..10: note = Seed: FVLWAHGFEL
FTLWAHGFEV

SEQ ID NO: 25052 - protein, 10 aa, synthetic construct
  source 1..10: note = Seed: FVLWAHGFEL
FTLWAHGFEY

SEQ ID NO: 25053 - protein, 10 aa, synthetic construct
  source 1..10: note = Seed: FELWAKRNIK
FTLWAKRNIR

SEQ ID NO: 25054 - protein, 9 aa, synthetic construct
  source 1..9: note = Seed: FSLWVYKQF
FTLWVYKQF

SEQ ID NO: 25055 - protein, 9 aa, synthetic construct
  source 1..9: note = Seed: FSLWVYKQF
FTLWVYKQW

SEQ ID NO: 25056 - protein, 9 aa, synthetic construct
  source 1..9: note = Seed: FSLWVYKQF
FTLWVYKQY

SEQ ID NO: 25057 - protein, 9 aa, synthetic construct
  source 1..9: note = Seed: FHLYLQYIR
FTLYLQYIR

SEQ ID NO: 25058 - protein, 9 aa, synthetic construct
  source 1..9: note = Seed: FAMMFVKHK
FTMMFVKHK

SEQ ID NO: 25059 - protein, 9 aa, synthetic construct
  source 1..9: note = Seed: FAMMFVKHK
FTMMFVKHR

SEQ ID NO: 25060 - protein, 11 aa, synthetic construct
  source 1..11: note = Seed: FSMMILSDDAV
FTMMILSDDAV

SEQ ID NO: 25061 - protein, 10 aa, synthetic construct
  source 1..10: note = Seed: FSMMILSDDA
FTMMILSDDL

SEQ ID NO: 25062 - protein, 10 aa, synthetic construct
  source 1..10: note = Seed: FSMMILSDDA
FTMMILSDDV

SEQ ID NO: 25063 - protein, 10 aa, synthetic construct
  source 1..10: note = Seed: FKMNYQVNGY
FTMNYQVNGY

SEQ ID NO: 25064 - protein, 8 aa, synthetic construct
  source 1..8: note = Seed: FAMQMAYR
FTMQMAYR

SEQ ID NO: 25065 - protein, 9 aa, synthetic construct
  source 1..9: note = Seed: FAMQMAYRF
FTMQMAYRA

SEQ ID NO: 25066 - protein, 9 aa, synthetic construct
  source 1..9: note = Seed: FAMQMAYRF
FTMQMAYRF

SEQ ID NO: 25067 - protein, 9 aa, synthetic construct
  source 1..9: note = Seed: FAMQMAYRF
FTMQMAYRI

SEQ ID NO: 25068 - protein, 9 aa, synthetic construct
  source 1..9: note = Seed: FAMQMAYRF
FTMQMAYRL

SEQ ID NO: 25069 - protein, 9 aa, synthetic construct
  source 1..9: note = Seed: FAMQMAYRF
FTMQMAYRM

SEQ ID NO: 25070 - protein, 9 aa, synthetic construct
  source 1..9: note = Seed: FAMQMAYRF
FTMQMAYRV

SEQ ID NO: 25071 - protein, 9 aa, synthetic construct
  source 1..9: note = Seed: FAMQMAYRF
FTMQMAYRW

SEQ ID NO: 25072 - protein, 9 aa, synthetic construct
  source 1..9: note = Seed: FAMQMAYRF
FTMQMAYRY

SEQ ID NO: 25073 - protein, 8 aa, synthetic construct
  source 1..8: note = Seed: FDMSKFPL
FTMSKFPL

SEQ ID NO: 25074 - protein, 10 aa, synthetic construct
  source 1..10: note = Seed: FDMSKFPLKL
FTMSKFPLKA

SEQ ID NO: 25075 - protein, 10 aa, synthetic construct
  source 1..10: note = Seed: FDMSKFPLKL
FTMSKFPLKI

SEQ ID NO: 25076 - protein, 10 aa, synthetic construct
  source 1..10: note = Seed: FDMSKFPLKL
FTMSKFPLKL

SEQ ID NO: 25077 - protein, 10 aa, synthetic construct
  source 1..10: note = Seed: FDMSKFPLKL
FTMSKFPLKV

SEQ ID NO: 25078 - protein, 8 aa, synthetic construct
  source 1..8: note = Seed: FDMSKFPL
FTMSKFPM

SEQ ID NO: 25079 - protein, 10 aa, synthetic construct
  source 1..10: note = Seed: FNMVYMPASW
FTMVYMPASF

SEQ ID NO: 25080 - protein, 10 aa, synthetic construct
  source 1..10: note = Seed: FNMVYMPASW
FTMVYMPASM

SEQ ID NO: 25081 - protein, 10 aa, synthetic construct
  source 1..10: note = Seed: FNMVYMPASW
FTMVYMPASW

SEQ ID NO: 25082 - protein, 10 aa, synthetic construct
  source 1..10: note = Seed: FNMVYMPASW
FTMVYMPASY

SEQ ID NO: 25083 - protein, 9 aa, synthetic construct
  source 1..9: note = Seed: FENKTTLPV
FTNKTTLPF

SEQ ID NO: 25084 - protein, 9 aa, synthetic construct
  source 1..9: note = Seed: FENKTTLPV
FTNKTTLPM

SEQ ID NO: 25085 - protein, 9 aa, synthetic construct
  source 1..9: note = Seed: FENKTTLPV
FTNKTTLPY

SEQ ID NO: 25086 - protein, 9 aa, synthetic construct
  source 1..9: note = Seed: FVNLKQLPF
FTNLKQLPF

SEQ ID NO: 25087 - protein, 9 aa, synthetic construct
  source 1..9: note = Seed: FVNLKQLPF
FTNLKQLPI

SEQ ID NO: 25088 - protein, 9 aa, synthetic construct
  source 1..9: note = Seed: FVNLKQLPF
FTNLKQLPL

SEQ ID NO: 25089 - protein, 9 aa, synthetic construct
  source 1..9: note = Seed: FVNLKQLPF
FTNLKQLPM

SEQ ID NO: 25090 - protein, 9 aa, synthetic construct
  source 1..9: note = Seed: FVNLKQLPF
FTNLKQLPV

SEQ ID NO: 25091 - protein, 9 aa, synthetic construct
  source 1..9: note = Seed: FVNLKQLPF
FTNLKQLPW

SEQ ID NO: 25092 - protein, 9 aa, synthetic construct
  source 1..9: note = Seed: FVNLKQLPF
FTNLKQLPY

SEQ ID NO: 25093 - protein, 10 aa, synthetic construct
  source 1..10: note = Seed: FTNVYADSFV
FTNVYADSFI

SEQ ID NO: 25094 - protein, 10 aa, synthetic construct
  source 1..10: note = Seed: FTNVYADSFV
FTNVYADSFL

SEQ ID NO: 25095 - protein, 11 aa, synthetic construct
  source 1..11: note = Seed: FTNVYADSFVI
FTNVYADSFVF

SEQ ID NO: 25096 - protein, 11 aa, synthetic construct
  source 1..11: note = Seed: FTNVYADSFVI
FTNVYADSFVV

SEQ ID NO: 25097 - protein, 11 aa, synthetic construct
  source 1..11: note = Seed: FTNVYADSFVI
FTNVYADSFVW

SEQ ID NO: 25098 - protein, 11 aa, synthetic construct
  source 1..11: note = Seed: FTNVYADSFVI
FTNVYADSFVY

SEQ ID NO: 25099 - protein, 9 aa, synthetic construct
  source 1..9: note = Seed: FTNVYADSF
FTNVYADSL

SEQ ID NO: 25100 - protein, 9 aa, synthetic construct
  source 1..9: note = Seed: FTNVYADSF
FTNVYADSM

SEQ ID NO: 25101 - protein, 9 aa, synthetic construct
  source 1..9: note = Seed: FTNVYADSF
FTNVYADSW

SEQ ID NO: 25102 - protein, 9 aa, synthetic construct
  source 1..9: note = Seed: FTNVYADSF
FTNVYADSY

SEQ ID NO: 25103 - protein, 9 aa, synthetic construct
  source 1..9: note = Seed: FSNYLKRRV
FTNYLKRRY

SEQ ID NO: 25104 - protein, 9 aa, synthetic construct
  source 1..9: note = Seed: FNPETNILL
FTPETNILL

SEQ ID NO: 25105 - protein, 10 aa, synthetic construct
  source 1..10: note = Seed: FTPFDVVRQC
FTPFDVVRQA

SEQ ID NO: 25106 - protein, 10 aa, synthetic construct
  source 1..10: note = Seed: FLPFFSNVTW
FTPFFSNVTF

SEQ ID NO: 25107 - protein, 10 aa, synthetic construct
  source 1..10: note = Seed: FLPFFSNVTW
FTPFFSNVTH

SEQ ID NO: 25108 - protein, 10 aa, synthetic construct
  source 1..10: note = Seed: FLPFFSNVTW
FTPFFSNVTL

SEQ ID NO: 25109 - protein, 10 aa, synthetic construct
  source 1..10: note = Seed: FLPFFSNVTW
FTPFFSNVTM

SEQ ID NO: 25110 - protein, 10 aa, synthetic construct
  source 1..10: note = Seed: FLPFFSNVTW
FTPFFSNVTW

SEQ ID NO: 25111 - protein, 10 aa, synthetic construct
  source 1..10: note = Seed: FLPFFSNVTW
FTPFFSNVTY

SEQ ID NO: 25112 - protein, 9 aa, synthetic construct
  source 1..9: note = Seed: FLPFFSNVT
FTPFFSNVV

SEQ ID NO: 25113 - protein, 9 aa, synthetic construct
  source 1..9: note = Seed: FLPFQQFGR
FTPFQQFGK

SEQ ID NO: 25114 - protein, 9 aa, synthetic construct
  source 1..9: note = Seed: FLPFQQFGR
FTPFQQFGR

SEQ ID NO: 25115 - protein, 9 aa, synthetic construct
  source 1..9: note = Seed: FTPLVPFWI
FTPLVPFWA

SEQ ID NO: 25116 - protein, 10 aa, synthetic construct
  source 1..10: note = Seed: FTPLVPFWIT
FTPLVPFWIA

SEQ ID NO: 25117 - protein, 11 aa, synthetic construct
  source 1..11: note = Seed: FTPLVPFWITI
FTPLVPFWITV

SEQ ID NO: 25118 - protein, 9 aa, synthetic construct
  source 1..9: note = Seed: FTPLVPFWI
FTPLVPFWV

SEQ ID NO: 25119 - protein, 9 aa, synthetic construct
  source 1..9: note = Seed: FLPRVFSAV
FTPRVFSAA

SEQ ID NO: 25120 - protein, 9 aa, synthetic construct
  source 1..9: note = Seed: FLPRVFSAV
FTPRVFSAF

SEQ ID NO: 25121 - protein, 9 aa, synthetic construct
  source 1..9: note = Seed: FLPRVFSAV
FTPRVFSAI

SEQ ID NO: 25122 - protein, 9 aa, synthetic construct
  source 1..9: note = Seed: FLPRVFSAV
FTPRVFSAL

SEQ ID NO: 25123 - protein, 9 aa, synthetic construct
  source 1..9: note = Seed: FLPRVFSAV
FTPRVFSAM

SEQ ID NO: 25124 - protein, 9 aa, synthetic construct
  source 1..9: note = Seed: FLPRVFSAV
FTPRVFSAV

SEQ ID NO: 25125 - protein, 10 aa, synthetic construct
  source 1..10: note = Seed: FLPRVFSAVG
FTPRVFSAVF

SEQ ID NO: 25126 - protein, 10 aa, synthetic construct
  source 1..10: note = Seed: FLPRVFSAVG
FTPRVFSAVI

SEQ ID NO: 25127 - protein, 10 aa, synthetic construct
  source 1..10: note = Seed: FLPRVFSAVG
FTPRVFSAVL

SEQ ID NO: 25128 - protein, 10 aa, synthetic construct
  source 1..10: note = Seed: FLPRVFSAVG
FTPRVFSAVM

SEQ ID NO: 25129 - protein, 10 aa, synthetic construct
  source 1..10: note = Seed: FLPRVFSAVG
FTPRVFSAVV

SEQ ID NO: 25130 - protein, 9 aa, synthetic construct
  source 1..9: note = Seed: FLPRVFSAV
FTPRVFSAY

SEQ ID NO: 25131 - protein, 9 aa, synthetic construct
  source 1..9: note = Seed: FAPSASAFF
FTPSASAFF

SEQ ID NO: 25132 - protein, 9 aa, synthetic construct
  source 1..9: note = Seed: FAPSASAFF
FTPSASAFI

SEQ ID NO: 25133 - protein, 9 aa, synthetic construct
  source 1..9: note = Seed: FAPSASAFF
FTPSASAFL

SEQ ID NO: 25134 - protein, 9 aa, synthetic construct
  source 1..9: note = Seed: FAPSASAFF
FTPSASAFM

SEQ ID NO: 25135 - protein, 9 aa, synthetic construct
  source 1..9: note = Seed: FAPSASAFF
FTPSASAFV

SEQ ID NO: 25136 - protein, 9 aa, synthetic construct
  source 1..9: note = Seed: FAPSASAFF
FTPSASAFW

SEQ ID NO: 25137 - protein, 9 aa, synthetic construct
  source 1..9: note = Seed: FAPSASAFF
FTPSASAFY

SEQ ID NO: 25138 - protein, 8 aa, synthetic construct
  source 1..8: note = Seed: FAPSASAF
FTPSASAL

SEQ ID NO: 25139 - protein, 11 aa, synthetic construct
  source 1..11: note = Seed: FPQSAPHGVVF
FTQSAPHGVVF

SEQ ID NO: 25140 - protein, 11 aa, synthetic construct
  source 1..11: note = Seed: FPQSAPHGVVF
FTQSAPHGVVL

SEQ ID NO: 25141 - protein, 11 aa, synthetic construct
  source 1..11: note = Seed: FPQSAPHGVVF
FTQSAPHGVVM

SEQ ID NO: 25142 - protein, 11 aa, synthetic construct
  source 1..11: note = Seed: FPQSAPHGVVF
FTQSAPHGVVW

SEQ ID NO: 25143 - protein, 11 aa, synthetic construct
  source 1..11: note = Seed: FPQSAPHGVVF
FTQSAPHGVVY

SEQ ID NO: 25144 - protein, 9 aa, synthetic construct
  source 1..9: note = Seed: FLQSINFVR
FTQSINFVK

SEQ ID NO: 25145 - protein, 9 aa, synthetic construct
  source 1..9: note = Seed: FLQSINFVR
FTQSINFVR

SEQ ID NO: 25146 - protein, 10 aa, synthetic construct
  source 1..10: note = Seed: FLQSINFVRI
FTQSINFVRR

SEQ ID NO: 25147 - protein, 10 aa, synthetic construct
  source 1..10: note = Seed: FLQSINFVRI
FTQSINFVRV

SEQ ID NO: 25148 - protein, 10 aa, synthetic construct
  source 1..10: note = Seed: FTQSRNLQEF
FTQSRNLQEW

SEQ ID NO: 25149 - protein, 9 aa, synthetic construct
  source 1..9: note = Seed: FAQVKQIYK
FTQVKQIYK

SEQ ID NO: 25150 - protein, 9 aa, synthetic construct
  source 1..9: note = Seed: FAQVKQIYK
FTQVKQIYR

SEQ ID NO: 25151 - protein, 9 aa, synthetic construct
  source 1..9: note = Seed: FLRDGWEIV
FTRDGWEIL

SEQ ID NO: 25152 - protein, 9 aa, synthetic construct
  source 1..9: note = Seed: FLRDGWEIV
FTRDGWEIM

SEQ ID NO: 25153 - protein, 9 aa, synthetic construct
  source 1..9: note = Seed: FLRDGWEIV
FTRDGWEIY

SEQ ID NO: 25154 - protein, 9 aa, synthetic construct
  source 1..9: note = Seed: FPREGVFVS
FTREGVFVF

SEQ ID NO: 25155 - protein, 9 aa, synthetic construct
  source 1..9: note = Seed: FPREGVFVS
FTREGVFVY

SEQ ID NO: 25156 - protein, 10 aa, synthetic construct
  source 1..10: note = Seed: FTRFFYVLGL
FTRFFYVLGI

SEQ ID NO: 25157 - protein, 10 aa, synthetic construct
  source 1..10: note = Seed: FTRFFYVLGL
FTRFFYVLGK

SEQ ID NO: 25158 - protein, 10 aa, synthetic construct
  source 1..10: note = Seed: FTRFFYVLGL
FTRFFYVLGV

SEQ ID NO: 25159 - protein, 9 aa, synthetic construct
  source 1..9: note = Seed: FTRFFYVLG
FTRFFYVLK

SEQ ID NO: 25160 - protein, 10 aa, synthetic construct
  source 1..10: note = Seed: FTRGVYYPDK
FTRGVYYPDR

SEQ ID NO: 25161 - protein, 9 aa, synthetic construct
  source 1..9: note = Seed: FISAARQGF
FTSAARQGF

SEQ ID NO: 25162 - protein, 10 aa, synthetic construct
  source 1..10: note = Seed: FISAARQGFV
FTSAARQGFI

SEQ ID NO: 25163 - protein, 10 aa, synthetic construct
  source 1..10: note = Seed: FISAARQGFV
FTSAARQGFV

SEQ ID NO: 25164 - protein, 9 aa, synthetic construct
  source 1..9: note = Seed: FISAARQGF
FTSAARQGL

SEQ ID NO: 25165 - protein, 9 aa, synthetic construct
  source 1..9: note = Seed: FISAARQGF
FTSAARQGM

SEQ ID NO: 25166 - protein, 9 aa, synthetic construct
  source 1..9: note = Seed: FISAARQGF
FTSAARQGY

SEQ ID NO: 25167 - protein, 9 aa, synthetic construct
  source 1..9: note = Seed: FQSAVKRTI
FTSAVKRTF

SEQ ID NO: 25168 - protein, 9 aa, synthetic construct
  source 1..9: note = Seed: FQSAVKRTI
FTSAVKRTI

SEQ ID NO: 25169 - protein, 9 aa, synthetic construct
  source 1..9: note = Seed: FQSAVKRTI
FTSAVKRTL

SEQ ID NO: 25170 - protein, 9 aa, synthetic construct
  source 1..9: note = Seed: FQSAVKRTI
FTSAVKRTM

SEQ ID NO: 25171 - protein, 9 aa, synthetic construct
  source 1..9: note = Seed: FQSAVKRTI
FTSAVKRTV

SEQ ID NO: 25172 - protein, 9 aa, synthetic construct
  source 1..9: note = Seed: FQSAVKRTI
FTSAVKRTY

SEQ ID NO: 25173 - protein, 10 aa, synthetic construct
  source 1..10: note = Seed: FTSDLATNNL
FTSDLATNNI

SEQ ID NO: 25174 - protein, 10 aa, synthetic construct
  source 1..10: note = Seed: FTSDLATNNL
FTSDLATNNV

SEQ ID NO: 25175 - protein, 9 aa, synthetic construct
  source 1..9: note = Seed: FTSDYYQLY
FTSDYYQLF

SEQ ID NO: 25176 - protein, 9 aa, synthetic construct
  source 1..9: note = Seed: FTSDYYQLY
FTSDYYQLI

SEQ ID NO: 25177 - protein, 9 aa, synthetic construct
  source 1..9: note = Seed: FTSDYYQLY
FTSDYYQLK

SEQ ID NO: 25178 - protein, 9 aa, synthetic construct
  source 1..9: note = Seed: FTSDYYQLY
FTSDYYQLL

SEQ ID NO: 25179 - protein, 9 aa, synthetic construct
  source 1..9: note = Seed: FTSDYYQLY
FTSDYYQLM

SEQ ID NO: 25180 - protein, 9 aa, synthetic construct
  source 1..9: note = Seed: FTSDYYQLY
FTSDYYQLR

SEQ ID NO: 25181 - protein, 9 aa, synthetic construct
  source 1..9: note = Seed: FTSDYYQLY
FTSDYYQLV

SEQ ID NO: 25182 - protein, 9 aa, synthetic construct
  source 1..9: note = Seed: FTSDYYQLY
FTSDYYQLW

SEQ ID NO: 25183 - protein, 10 aa, synthetic construct
  source 1..10: note = Seed: FTSDYYQLYS
FTSDYYQLYF

SEQ ID NO: 25184 - protein, 10 aa, synthetic construct
  source 1..10: note = Seed: FTSDYYQLYS
FTSDYYQLYM

SEQ ID NO: 25185 - protein, 10 aa, synthetic construct
  source 1..10: note = Seed: FTSDYYQLYS
FTSDYYQLYV

SEQ ID NO: 25186 - protein, 10 aa, synthetic construct
  source 1..10: note = Seed: FTSDYYQLYS
FTSDYYQLYY

SEQ ID NO: 25187 - protein, 9 aa, synthetic construct
  source 1..9: note = Seed: FASFYYVWK
FTSFYYVWK

SEQ ID NO: 25188 - protein, 9 aa, synthetic construct
  source 1..9: note = Seed: FASFYYVWK
FTSFYYVWR

SEQ ID NO: 25189 - protein, 9 aa, synthetic construct
  source 1..9: note = Seed: FVSLAIDAY
FTSLAIDAF

SEQ ID NO: 25190 - protein, 9 aa, synthetic construct
  source 1..9: note = Seed: FVSLAIDAY
FTSLAIDAL

SEQ ID NO: 25191 - protein, 9 aa, synthetic construct
  source 1..9: note = Seed: FVSLAIDAY
FTSLAIDAM

SEQ ID NO: 25192 - protein, 9 aa, synthetic construct
  source 1..9: note = Seed: FVSLAIDAY
FTSLAIDAY

SEQ ID NO: 25193 - protein, 9 aa, synthetic construct
  source 1..9: note = Seed: FVSNGTHWF
FTSNGTHWF

SEQ ID NO: 25194 - protein, 9 aa, synthetic construct
  source 1..9: note = Seed: FVSNGTHWF
FTSNGTHWI

SEQ ID NO: 25195 - protein, 9 aa, synthetic construct
  source 1..9: note = Seed: FVSNGTHWF
FTSNGTHWL

SEQ ID NO: 25196 - protein, 9 aa, synthetic construct
  source 1..9: note = Seed: FVSNGTHWF
FTSNGTHWM

SEQ ID NO: 25197 - protein, 9 aa, synthetic construct
  source 1..9: note = Seed: FVSNGTHWF
FTSNGTHWV

SEQ ID NO: 25198 - protein, 9 aa, synthetic construct
  source 1..9: note = Seed: FVSNGTHWF
FTSNGTHWW

SEQ ID NO: 25199 - protein, 9 aa, synthetic construct
  source 1..9: note = Seed: FVSNGTHWF
FTSNGTHWY

SEQ ID NO: 25200 - protein, 9 aa, synthetic construct
  source 1..9: note = Seed: FISNSWLMW
FTSNSWLMF

SEQ ID NO: 25201 - protein, 9 aa, synthetic construct
  source 1..9: note = Seed: FISNSWLMW
FTSNSWLMI

SEQ ID NO: 25202 - protein, 9 aa, synthetic construct
  source 1..9: note = Seed: FISNSWLMW
FTSNSWLML

SEQ ID NO: 25203 - protein, 9 aa, synthetic construct
  source 1..9: note = Seed: FISNSWLMW
FTSNSWLMM

SEQ ID NO: 25204 - protein, 9 aa, synthetic construct
  source 1..9: note = Seed: FISNSWLMW
FTSNSWLMW

SEQ ID NO: 25205 - protein, 11 aa, synthetic construct
  source 1..11: note = Seed: FISNSWLMWLI
FTSNSWLMWLV

SEQ ID NO: 25206 - protein, 10 aa, synthetic construct
  source 1..10: note = Seed: FISNSWLMWL
FTSNSWLMWV

SEQ ID NO: 25207 - protein, 9 aa, synthetic construct
  source 1..9: note = Seed: FISNSWLMW
FTSNSWLMY

SEQ ID NO: 25208 - protein, 9 aa, synthetic construct
  source 1..9: note = Seed: FSSNVANYQ
FTSNVANYK

SEQ ID NO: 25209 - protein, 10 aa, synthetic construct
  source 1..10: note = Seed: FSSNVANYQK
FTSNVANYQK

SEQ ID NO: 25210 - protein, 11 aa, synthetic construct
  source 1..11: note = Seed: FSSNVANYQKV
FTSNVANYQKV

SEQ ID NO: 25211 - protein, 10 aa, synthetic construct
  source 1..10: note = Seed: FSSNVANYQK
FTSNVANYQR

SEQ ID NO: 25212 - protein, 10 aa, synthetic construct
  source 1..10: note = Seed: FSSNVANYQK
FTSNVANYQY

SEQ ID NO: 25213 - protein, 9 aa, synthetic construct
  source 1..9: note = Seed: FSSNVANYQ
FTSNVANYR

SEQ ID NO: 25214 - protein, 9 aa, synthetic construct
  source 1..9: note = Seed: FSSNVANYQ
FTSNVANYY

SEQ ID NO: 25215 - protein, 9 aa, synthetic construct
  source 1..9: note = Seed: FFSNVTWFH
FTSNVTWFF

SEQ ID NO: 25216 - protein, 9 aa, synthetic construct
  source 1..9: note = Seed: FFSNVTWFH
FTSNVTWFK

SEQ ID NO: 25217 - protein, 9 aa, synthetic construct
  source 1..9: note = Seed: FFSNVTWFH
FTSNVTWFR

SEQ ID NO: 25218 - protein, 9 aa, synthetic construct
  source 1..9: note = Seed: FFSNVTWFH
FTSNVTWFY

SEQ ID NO: 25219 - protein, 11 aa, synthetic construct
  source 1..11: note = Seed: FISPYNSQNAV
FTSPYNSQNAA

SEQ ID NO: 25220 - protein, 11 aa, synthetic construct
  source 1..11: note = Seed: FISPYNSQNAV
FTSPYNSQNAL

SEQ ID NO: 25221 - protein, 11 aa, synthetic construct
  source 1..11: note = Seed: FISPYNSQNAV
FTSPYNSQNAM

SEQ ID NO: 25222 - protein, 10 aa, synthetic construct
  source 1..10: note = Seed: FISPYNSQNA
FTSPYNSQNV

SEQ ID NO: 25223 - protein, 9 aa, synthetic construct
  source 1..9: note = Seed: FFSYFAVHF
FTSYFAVHF

SEQ ID NO: 25224 - protein, 10 aa, synthetic construct
  source 1..10: note = Seed: FFSYFAVHFI
FTSYFAVHFA

SEQ ID NO: 25225 - protein, 10 aa, synthetic construct
  source 1..10: note = Seed: FFSYFAVHFI
FTSYFAVHFF

SEQ ID NO: 25226 - protein, 10 aa, synthetic construct
  source 1..10: note = Seed: FFSYFAVHFI
FTSYFAVHFI

SEQ ID NO: 25227 - protein, 10 aa, synthetic construct
  source 1..10: note = Seed: FFSYFAVHFI
FTSYFAVHFL

SEQ ID NO: 25228 - protein, 10 aa, synthetic construct
  source 1..10: note = Seed: FFSYFAVHFI
FTSYFAVHFM

SEQ ID NO: 25229 - protein, 10 aa, synthetic construct
  source 1..10: note = Seed: FFSYFAVHFI
FTSYFAVHFT

SEQ ID NO: 25230 - protein, 10 aa, synthetic construct
  source 1..10: note = Seed: FFSYFAVHFI
FTSYFAVHFV

SEQ ID NO: 25231 - protein, 10 aa, synthetic construct
  source 1..10: note = Seed: FFSYFAVHFI
FTSYFAVHFW

SEQ ID NO: 25232 - protein, 10 aa, synthetic construct
  source 1..10: note = Seed: FFSYFAVHFI
FTSYFAVHFY

SEQ ID NO: 25233 - protein, 9 aa, synthetic construct
  source 1..9: note = Seed: FFSYFAVHF
FTSYFAVHY

SEQ ID NO: 25234 - protein, 10 aa, synthetic construct
  source 1..10: note = Seed: FVTDTPKGPK
FTTDTPKGPK

SEQ ID NO: 25235 - protein, 10 aa, synthetic construct
  source 1..10: note = Seed: FVTDTPKGPK
FTTDTPKGPR

SEQ ID NO: 25236 - protein, 9 aa, synthetic construct
  source 1..9: note = Seed: FSTFEEAAL
FTTFEEAAF

SEQ ID NO: 25237 - protein, 9 aa, synthetic construct
  source 1..9: note = Seed: FSTFEEAAL
FTTFEEAAL

SEQ ID NO: 25238 - protein, 9 aa, synthetic construct
  source 1..9: note = Seed: FSTFEEAAL
FTTFEEAAM

SEQ ID NO: 25239 - protein, 9 aa, synthetic construct
  source 1..9: note = Seed: FSTFEEAAL
FTTFEEAAY

SEQ ID NO: 25240 - protein, 9 aa, synthetic construct
  source 1..9: note = Seed: FSTFKCYGV
FTTFKCYGA

SEQ ID NO: 25241 - protein, 9 aa, synthetic construct
  source 1..9: note = Seed: FSTFKCYGV
FTTFKCYGI

SEQ ID NO: 25242 - protein, 9 aa, synthetic construct
  source 1..9: note = Seed: FSTFKCYGV
FTTFKCYGL

SEQ ID NO: 25243 - protein, 9 aa, synthetic construct
  source 1..9: note = Seed: FSTFKCYGV
FTTFKCYGV

SEQ ID NO: 25244 - protein, 9 aa, synthetic construct
  source 1..9: note = Seed: FVTHSKGLY
FTTHSKGLF

SEQ ID NO: 25245 - protein, 9 aa, synthetic construct
  source 1..9: note = Seed: FVTHSKGLY
FTTHSKGLW

SEQ ID NO: 25246 - protein, 9 aa, synthetic construct
  source 1..9: note = Seed: FVTHSKGLY
FTTHSKGLY

SEQ ID NO: 25247 - protein, 10 aa, synthetic construct
  source 1..10: note = Seed: FVTHSKGLYR
FTTHSKGLYK

SEQ ID NO: 25248 - protein, 10 aa, synthetic construct
  source 1..10: note = Seed: FVTHSKGLYR
FTTHSKGLYR

SEQ ID NO: 25249 - protein, 9 aa, synthetic construct
  source 1..9: note = Seed: FVTNVNASS
FTTNVNASA

SEQ ID NO: 25250 - protein, 9 aa, synthetic construct
  source 1..9: note = Seed: FVTNVNASS
FTTNVNASI

SEQ ID NO: 25251 - protein, 9 aa, synthetic construct
  source 1..9: note = Seed: FVTNVNASS
FTTNVNASL

SEQ ID NO: 25252 - protein, 9 aa, synthetic construct
  source 1..9: note = Seed: FVTNVNASS
FTTNVNASM

SEQ ID NO: 25253 - protein, 9 aa, synthetic construct
  source 1..9: note = Seed: FVTNVNASS
FTTNVNAST

SEQ ID NO: 25254 - protein, 9 aa, synthetic construct
  source 1..9: note = Seed: FVTNVNASS
FTTNVNASV

SEQ ID NO: 25255 - protein, 9 aa, synthetic construct
  source 1..9: note = Seed: FTTVDNINL
FTTVDNINF

SEQ ID NO: 25256 - protein, 9 aa, synthetic construct
  source 1..9: note = Seed: FTTVDNINL
FTTVDNINV

SEQ ID NO: 25257 - protein, 9 aa, synthetic construct
  source 1..9: note = Seed: FTTVDNINL
FTTVDNINW

SEQ ID NO: 25258 - protein, 9 aa, synthetic construct
  source 1..9: note = Seed: FTTVDNINL
FTTVDNINY

SEQ ID NO: 25259 - protein, 10 aa, synthetic construct
  source 1..10: note = Seed: FDTYNLWNTF
FTTYNLWNTF

SEQ ID NO: 25260 - protein, 10 aa, synthetic construct
  source 1..10: note = Seed: FDTYNLWNTF
FTTYNLWNTW

SEQ ID NO: 25261 - protein, 10 aa, synthetic construct
  source 1..10: note = Seed: FDTYNLWNTF
FTTYNLWNTY

SEQ ID NO: 25262 - protein, 9 aa, synthetic construct
  source 1..9: note = Seed: FAVDAAKAY
FTVDAAKAF

SEQ ID NO: 25263 - protein, 9 aa, synthetic construct
  source 1..9: note = Seed: FAVDAAKAY
FTVDAAKAI

SEQ ID NO: 25264 - protein, 9 aa, synthetic construct
  source 1..9: note = Seed: FAVDAAKAY
FTVDAAKAL

SEQ ID NO: 25265 - protein, 9 aa, synthetic construct
  source 1..9: note = Seed: FAVDAAKAY
FTVDAAKAM

SEQ ID NO: 25266 - protein, 9 aa, synthetic construct
  source 1..9: note = Seed: FAVDAAKAY
FTVDAAKAV

SEQ ID NO: 25267 - protein, 9 aa, synthetic construct
  source 1..9: note = Seed: FAVDAAKAY
FTVDAAKAW

SEQ ID NO: 25268 - protein, 9 aa, synthetic construct
  source 1..9: note = Seed: FAVDAAKAY
FTVDAAKAY

SEQ ID NO: 25269 - protein, 10 aa, synthetic construct
  source 1..10: note = Seed: FAVDAAKAYK
FTVDAAKAYF

SEQ ID NO: 25270 - protein, 10 aa, synthetic construct
  source 1..10: note = Seed: FAVDAAKAYK
FTVDAAKAYK

SEQ ID NO: 25271 - protein, 10 aa, synthetic construct
  source 1..10: note = Seed: FAVDAAKAYK
FTVDAAKAYR

SEQ ID NO: 25272 - protein, 10 aa, synthetic construct
  source 1..10: note = Seed: FAVDAAKAYK
FTVDAAKAYY

SEQ ID NO: 25273 - protein, 9 aa, synthetic construct
  source 1..9: note = Seed: FAVHFISNS
FTVHFISNA

SEQ ID NO: 25274 - protein, 9 aa, synthetic construct
  source 1..9: note = Seed: FAVHFISNS
FTVHFISNI

SEQ ID NO: 25275 - protein, 9 aa, synthetic construct
  source 1..9: note = Seed: FAVHFISNS
FTVHFISNL

SEQ ID NO: 25276 - protein, 9 aa, synthetic construct
  source 1..9: note = Seed: FAVHFISNS
FTVHFISNM

SEQ ID NO: 25277 - protein, 10 aa, synthetic construct
  source 1..10: note = Seed: FAVHFISNSW
FTVHFISNSF

SEQ ID NO: 25278 - protein, 10 aa, synthetic construct
  source 1..10: note = Seed: FAVHFISNSW
FTVHFISNSM

SEQ ID NO: 25279 - protein, 10 aa, synthetic construct
  source 1..10: note = Seed: FAVHFISNSW
FTVHFISNSW

SEQ ID NO: 25280 - protein, 10 aa, synthetic construct
  source 1..10: note = Seed: FAVHFISNSW
FTVHFISNSY

SEQ ID NO: 25281 - protein, 9 aa, synthetic construct
  source 1..9: note = Seed: FAVHFISNS
FTVHFISNV

SEQ ID NO: 25282 - protein, 8 aa, synthetic construct
  source 1..8: note = Seed: FVVKRHTF
FTVKRHTM

SEQ ID NO: 25283 - protein, 9 aa, synthetic construct
  source 1..9: note = Seed: FNVLFSTVF
FTVLFSTVF

SEQ ID NO: 25284 - protein, 9 aa, synthetic construct
  source 1..9: note = Seed: FNVLFSTVF
FTVLFSTVL

SEQ ID NO: 25285 - protein, 9 aa, synthetic construct
  source 1..9: note = Seed: FNVLFSTVF
FTVLFSTVM

SEQ ID NO: 25286 - protein, 9 aa, synthetic construct
  source 1..9: note = Seed: FNVLFSTVF
FTVLFSTVY

SEQ ID NO: 25287 - protein, 9 aa, synthetic construct
  source 1..9: note = Seed: FPVLHDIGN
FTVLHDIGY

SEQ ID NO: 25288 - protein, 10 aa, synthetic construct
  source 1..10: note = Seed: FKVSIWNLDY
FTVSIWNLDY

SEQ ID NO: 25289 - protein, 9 aa, synthetic construct
  source 1..9: note = Seed: FVVSTGYHF
FTVSTGYHF

SEQ ID NO: 25290 - protein, 10 aa, synthetic construct
  source 1..10: note = Seed: FVVSTGYHFR
FTVSTGYHFK

SEQ ID NO: 25291 - protein, 10 aa, synthetic construct
  source 1..10: note = Seed: FVVSTGYHFR
FTVSTGYHFR

SEQ ID NO: 25292 - protein, 11 aa, synthetic construct
  source 1..11: note = Seed: FVVSTGYHFRE
FTVSTGYHFRR

SEQ ID NO: 25293 - protein, 9 aa, synthetic construct
  source 1..9: note = Seed: FVVSTGYHF
FTVSTGYHI

SEQ ID NO: 25294 - protein, 9 aa, synthetic construct
  source 1..9: note = Seed: FVVSTGYHF
FTVSTGYHL

SEQ ID NO: 25295 - protein, 9 aa, synthetic construct
  source 1..9: note = Seed: FVVSTGYHF
FTVSTGYHM

SEQ ID NO: 25296 - protein, 9 aa, synthetic construct
  source 1..9: note = Seed: FVVSTGYHF
FTVSTGYHV

SEQ ID NO: 25297 - protein, 9 aa, synthetic construct
  source 1..9: note = Seed: FVVSTGYHF
FTVSTGYHW

SEQ ID NO: 25298 - protein, 9 aa, synthetic construct
  source 1..9: note = Seed: FVVSTGYHF
FTVSTGYHY

SEQ ID NO: 25299 - protein, 10 aa, synthetic construct
  source 1..10: note = Seed: FDVVRQCSGV
FTVVRQCSGV

SEQ ID NO: 25300 - protein, 9 aa, synthetic construct
  source 1..9: note = Seed: FYWFFSNYL
FTWFFSNYA

SEQ ID NO: 25301 - protein, 9 aa, synthetic construct
  source 1..9: note = Seed: FYWFFSNYL
FTWFFSNYI

SEQ ID NO: 25302 - protein, 9 aa, synthetic construct
  source 1..9: note = Seed: FYWFFSNYL
FTWFFSNYL

SEQ ID NO: 25303 - protein, 10 aa, synthetic construct
  source 1..10: note = Seed: FYWFFSNYLK
FTWFFSNYLF

SEQ ID NO: 25304 - protein, 10 aa, synthetic construct
  source 1..10: note = Seed: FYWFFSNYLK
FTWFFSNYLK

SEQ ID NO: 25305 - protein, 11 aa, synthetic construct
  source 1..11: note = Seed: FYWFFSNYLKR
FTWFFSNYLKR

SEQ ID NO: 25306 - protein, 10 aa, synthetic construct
  source 1..10: note = Seed: FYWFFSNYLK
FTWFFSNYLR

SEQ ID NO: 25307 - protein, 10 aa, synthetic construct
  source 1..10: note = Seed: FYWFFSNYLK
FTWFFSNYLY

SEQ ID NO: 25308 - protein, 9 aa, synthetic construct
  source 1..9: note = Seed: FYWFFSNYL
FTWFFSNYM

SEQ ID NO: 25309 - protein, 9 aa, synthetic construct
  source 1..9: note = Seed: FYWFFSNYL
FTWFFSNYV

SEQ ID NO: 25310 - protein, 9 aa, synthetic construct
  source 1..9: note = Seed: FYWFFSNYL
FTWFFSNYY

SEQ ID NO: 25311 - protein, 8 aa, synthetic construct
  source 1..8: note = Seed: FLWLLWPV
FTWLLWPV

SEQ ID NO: 25312 - protein, 10 aa, synthetic construct
  source 1..10: note = Seed: FLWLLWPVTL
FTWLLWPVTF

SEQ ID NO: 25313 - protein, 10 aa, synthetic construct
  source 1..10: note = Seed: FLWLLWPVTL
FTWLLWPVTI

SEQ ID NO: 25314 - protein, 11 aa, synthetic construct
  source 1..11: note = Seed: FLWLLWPVTLA
FTWLLWPVTLI

SEQ ID NO: 25315 - protein, 11 aa, synthetic construct
  source 1..11: note = Seed: FLWLLWPVTLA
FTWLLWPVTLL

SEQ ID NO: 25316 - protein, 11 aa, synthetic construct
  source 1..11: note = Seed: FLWLLWPVTLA
FTWLLWPVTLV

SEQ ID NO: 25317 - protein, 10 aa, synthetic construct
  source 1..10: note = Seed: FLWLLWPVTL
FTWLLWPVTV

SEQ ID NO: 25318 - protein, 9 aa, synthetic construct
  source 1..9: note = Seed: FLWLLWPVT
FTWLLWPVV

SEQ ID NO: 25319 - protein, 9 aa, synthetic construct
  source 1..9: note = Seed: FSYFAVHFI
FTYFAVHFA

SEQ ID NO: 25320 - protein, 9 aa, synthetic construct
  source 1..9: note = Seed: FSYFAVHFI
FTYFAVHFF

SEQ ID NO: 25321 - protein, 9 aa, synthetic construct
  source 1..9: note = Seed: FSYFAVHFI
FTYFAVHFI

SEQ ID NO: 25322 - protein, 10 aa, synthetic construct
  source 1..10: note = Seed: FSYFAVHFIS
FTYFAVHFIA

SEQ ID NO: 25323 - protein, 10 aa, synthetic construct
  source 1..10: note = Seed: FSYFAVHFIS
FTYFAVHFII

SEQ ID NO: 25324 - protein, 10 aa, synthetic construct
  source 1..10: note = Seed: FSYFAVHFIS
FTYFAVHFIL

SEQ ID NO: 25325 - protein, 10 aa, synthetic construct
  source 1..10: note = Seed: FSYFAVHFIS
FTYFAVHFIM

SEQ ID NO: 25326 - protein, 10 aa, synthetic construct
  source 1..10: note = Seed: FSYFAVHFIS
FTYFAVHFIT

SEQ ID NO: 25327 - protein, 10 aa, synthetic construct
  source 1..10: note = Seed: FSYFAVHFIS
FTYFAVHFIV

SEQ ID NO: 25328 - protein, 9 aa, synthetic construct
  source 1..9: note = Seed: FSYFAVHFI
FTYFAVHFL

SEQ ID NO: 25329 - protein, 9 aa, synthetic construct
  source 1..9: note = Seed: FSYFAVHFI
FTYFAVHFM

SEQ ID NO: 25330 - protein, 9 aa, synthetic construct
  source 1..9: note = Seed: FSYFAVHFI
FTYFAVHFS

SEQ ID NO: 25331 - protein, 9 aa, synthetic construct
  source 1..9: note = Seed: FSYFAVHFI
FTYFAVHFT

SEQ ID NO: 25332 - protein, 9 aa, synthetic construct
  source 1..9: note = Seed: FSYFAVHFI
FTYFAVHFV

SEQ ID NO: 25333 - protein, 9 aa, synthetic construct
  source 1..9: note = Seed: FSYFAVHFI
FTYFAVHFW

SEQ ID NO: 25334 - protein, 9 aa, synthetic construct
  source 1..9: note = Seed: FSYFAVHFI
FTYFAVHFY

SEQ ID NO: 25335 - protein, 9 aa, synthetic construct
  source 1..9: note = Seed: FYYLGTGPE
FTYLGTGPF

SEQ ID NO: 25336 - protein, 9 aa, synthetic construct
  source 1..9: note = Seed: FYYLGTGPE
FTYLGTGPL

SEQ ID NO: 25337 - protein, 9 aa, synthetic construct
  source 1..9: note = Seed: FYYLGTGPE
FTYLGTGPM

SEQ ID NO: 25338 - protein, 9 aa, synthetic construct
  source 1..9: note = Seed: FYYLGTGPE
FTYLGTGPY

SEQ ID NO: 25339 - protein, 9 aa, synthetic construct
  source 1..9: note = Seed: FNYLKSPNF
FTYLKSPNF

SEQ ID NO: 25340 - protein, 9 aa, synthetic construct
  source 1..9: note = Seed: FNYLKSPNF
FTYLKSPNL

SEQ ID NO: 25341 - protein, 9 aa, synthetic construct
  source 1..9: note = Seed: FNYLKSPNF
FTYLKSPNM

SEQ ID NO: 25342 - protein, 9 aa, synthetic construct
  source 1..9: note = Seed: FNYLKSPNF
FTYLKSPNV

SEQ ID NO: 25343 - protein, 9 aa, synthetic construct
  source 1..9: note = Seed: FNYLKSPNF
FTYLKSPNY

SEQ ID NO: 25344 - protein, 9 aa, synthetic construct
  source 1..9: note = Seed: FCYMHHMEL
FTYMHHMEA

SEQ ID NO: 25345 - protein, 9 aa, synthetic construct
  source 1..9: note = Seed: FCYMHHMEL
FTYMHHMEF

SEQ ID NO: 25346 - protein, 9 aa, synthetic construct
  source 1..9: note = Seed: FCYMHHMEL
FTYMHHMEH

SEQ ID NO: 25347 - protein, 9 aa, synthetic construct
  source 1..9: note = Seed: FCYMHHMEL
FTYMHHMEI

SEQ ID NO: 25348 - protein, 9 aa, synthetic construct
  source 1..9: note = Seed: FCYMHHMEL
FTYMHHMEL

SEQ ID NO: 25349 - protein, 9 aa, synthetic construct
  source 1..9: note = Seed: FCYMHHMEL
FTYMHHMEM

SEQ ID NO: 25350 - protein, 9 aa, synthetic construct
  source 1..9: note = Seed: FCYMHHMEL
FTYMHHMET

SEQ ID NO: 25351 - protein, 9 aa, synthetic construct
  source 1..9: note = Seed: FCYMHHMEL
FTYMHHMEV

SEQ ID NO: 25352 - protein, 9 aa, synthetic construct
  source 1..9: note = Seed: FCYMHHMEL
FTYMHHMEW

SEQ ID NO: 25353 - protein, 9 aa, synthetic construct
  source 1..9: note = Seed: FCYMHHMEL
FTYMHHMEY

SEQ ID NO: 25354 - protein, 9 aa, synthetic construct
  source 1..9: note = Seed: FRYMNSQGL
FTYMNSQGF

SEQ ID NO: 25355 - protein, 9 aa, synthetic construct
  source 1..9: note = Seed: FRYMNSQGL
FTYMNSQGI

SEQ ID NO: 25356 - protein, 9 aa, synthetic construct
  source 1..9: note = Seed: FRYMNSQGL
FTYMNSQGL

SEQ ID NO: 25357 - protein, 9 aa, synthetic construct
  source 1..9: note = Seed: FRYMNSQGL
FTYMNSQGM

SEQ ID NO: 25358 - protein, 9 aa, synthetic construct
  source 1..9: note = Seed: FRYMNSQGL
FTYMNSQGV

SEQ ID NO: 25359 - protein, 9 aa, synthetic construct
  source 1..9: note = Seed: FRYMNSQGL
FTYMNSQGY

SEQ ID NO: 25360 - protein, 8 aa, synthetic construct
  source 1..8: note = Seed: FEYVSQPF
FTYVSQPF

SEQ ID NO: 25361 - protein, 8 aa, synthetic construct
  source 1..8: note = Seed: FEYVSQPF
FTYVSQPY

SEQ ID NO: 25362 - protein, 9 aa, synthetic construct
  source 1..9: note = Seed: FYYVWKSYV
FTYVWKSYA

SEQ ID NO: 25363 - protein, 9 aa, synthetic construct
  source 1..9: note = Seed: FYYVWKSYV
FTYVWKSYF

SEQ ID NO: 25364 - protein, 9 aa, synthetic construct
  source 1..9: note = Seed: FYYVWKSYV
FTYVWKSYI

SEQ ID NO: 25365 - protein, 9 aa, synthetic construct
  source 1..9: note = Seed: FYYVWKSYV
FTYVWKSYL

SEQ ID NO: 25366 - protein, 9 aa, synthetic construct
  source 1..9: note = Seed: FYYVWKSYV
FTYVWKSYM

SEQ ID NO: 25367 - protein, 9 aa, synthetic construct
  source 1..9: note = Seed: FYYVWKSYV
FTYVWKSYV

SEQ ID NO: 25368 - protein, 10 aa, synthetic construct
  source 1..10: note = Seed: FYYVWKSYVH
FTYVWKSYVM

SEQ ID NO: 25369 - protein, 10 aa, synthetic construct
  source 1..10: note = Seed: FYYVWKSYVH
FTYVWKSYVY

SEQ ID NO: 25370 - protein, 9 aa, synthetic construct
  source 1..9: note = Seed: FYYVWKSYV
FTYVWKSYY

SEQ ID NO: 25371 - protein, 9 aa, synthetic construct
  source 1..9: note = Seed: FFYYSDSPC
FTYYSDSPF

SEQ ID NO: 25372 - protein, 9 aa, synthetic construct
  source 1..9: note = Seed: FFYYSDSPC
FTYYSDSPL

SEQ ID NO: 25373 - protein, 9 aa, synthetic construct
  source 1..9: note = Seed: FFYYSDSPC
FTYYSDSPM

SEQ ID NO: 25374 - protein, 9 aa, synthetic construct
  source 1..9: note = Seed: FFYYSDSPC
FTYYSDSPY

SEQ ID NO: 25375 - protein, 8 aa, synthetic construct
  source 1..8: note = Seed: FVAAIFYL
FVAAIFYI

SEQ ID NO: 25376 - protein, 9 aa, synthetic construct
  source 1..9: note = Seed: FVAAIFYLI
FVAAIFYLA

SEQ ID NO: 25377 - protein, 9 aa, synthetic construct
  source 1..9: note = Seed: FVAAIFYLI
FVAAIFYLF

SEQ ID NO: 25378 - protein, 9 aa, synthetic construct
  source 1..9: note = Seed: FVAAIFYLI
FVAAIFYLH

SEQ ID NO: 25379 - protein, 9 aa, synthetic construct
  source 1..9: note = Seed: FVAAIFYLI
FVAAIFYLK

SEQ ID NO: 25380 - protein, 9 aa, synthetic construct
  source 1..9: note = Seed: FVAAIFYLI
FVAAIFYLL

SEQ ID NO: 25381 - protein, 9 aa, synthetic construct
  source 1..9: note = Seed: FVAAIFYLI
FVAAIFYLM

SEQ ID NO: 25382 - protein, 9 aa, synthetic construct
  source 1..9: note = Seed: FVAAIFYLI
FVAAIFYLQ

SEQ ID NO: 25383 - protein, 9 aa, synthetic construct
  source 1..9: note = Seed: FVAAIFYLI
FVAAIFYLR

SEQ ID NO: 25384 - protein, 9 aa, synthetic construct
  source 1..9: note = Seed: FVAAIFYLI
FVAAIFYLS

SEQ ID NO: 25385 - protein, 9 aa, synthetic construct
  source 1..9: note = Seed: FVAAIFYLI
FVAAIFYLT

SEQ ID NO: 25386 - protein, 9 aa, synthetic construct
  source 1..9: note = Seed: FVAAIFYLI
FVAAIFYLV

SEQ ID NO: 25387 - protein, 9 aa, synthetic construct
  source 1..9: note = Seed: FVAAIFYLI
FVAAIFYLY

SEQ ID NO: 25388 - protein, 8 aa, synthetic construct
  source 1..8: note = Seed: FVAAIFYL
FVAAIFYV

SEQ ID NO: 25389 - protein, 10 aa, synthetic construct
  source 1..10: note = Seed: FCAFAVDAAK
FVAFAVDAAK

SEQ ID NO: 25390 - protein, 10 aa, synthetic construct
  source 1..10: note = Seed: FCAFAVDAAK
FVAFAVDAAR

SEQ ID NO: 25391 - protein, 10 aa, synthetic construct
  source 1..10: note = Seed: FCAFAVDAAK
FVAFAVDAAY

SEQ ID NO: 25392 - protein, 9 aa, synthetic construct
  source 1..9: note = Seed: FLAFVVFLL
FVAFVVFLA

SEQ ID NO: 25393 - protein, 9 aa, synthetic construct
  source 1..9: note = Seed: FLAFVVFLL
FVAFVVFLI

SEQ ID NO: 25394 - protein, 9 aa, synthetic construct
  source 1..9: note = Seed: FLAFVVFLL
FVAFVVFLL

SEQ ID NO: 25395 - protein, 10 aa, synthetic construct
  source 1..10: note = Seed: FLAFVVFLLV
FVAFVVFLLV

SEQ ID NO: 25396 - protein, 9 aa, synthetic construct
  source 1..9: note = Seed: FLAFVVFLL
FVAFVVFLM

SEQ ID NO: 25397 - protein, 9 aa, synthetic construct
  source 1..9: note = Seed: FLAFVVFLL
FVAFVVFLT

SEQ ID NO: 25398 - protein, 9 aa, synthetic construct
  source 1..9: note = Seed: FLAFVVFLL
FVAFVVFLV

SEQ ID NO: 25399 - protein, 9 aa, synthetic construct
  source 1..9: note = Seed: FGAGAALQI
FVAGAALQF

SEQ ID NO: 25400 - protein, 9 aa, synthetic construct
  source 1..9: note = Seed: FGAGAALQI
FVAGAALQI

SEQ ID NO: 25401 - protein, 9 aa, synthetic construct
  source 1..9: note = Seed: FGAGAALQI
FVAGAALQL

SEQ ID NO: 25402 - protein, 9 aa, synthetic construct
  source 1..9: note = Seed: FGAGAALQI
FVAGAALQM

SEQ ID NO: 25403 - protein, 9 aa, synthetic construct
  source 1..9: note = Seed: FGAGAALQI
FVAGAALQV

SEQ ID NO: 25404 - protein, 9 aa, synthetic construct
  source 1..9: note = Seed: FGAGAALQI
FVAGAALQY

SEQ ID NO: 25405 - protein, 9 aa, synthetic construct
  source 1..9: note = Seed: FIAGLIAIV
FVAGLIAIA

SEQ ID NO: 25406 - protein, 9 aa, synthetic construct
  source 1..9: note = Seed: FIAGLIAIV
FVAGLIAII

SEQ ID NO: 25407 - protein, 9 aa, synthetic construct
  source 1..9: note = Seed: FIAGLIAIV
FVAGLIAIL

SEQ ID NO: 25408 - protein, 9 aa, synthetic construct
  source 1..9: note = Seed: FIAGLIAIV
FVAGLIAIM

SEQ ID NO: 25409 - protein, 9 aa, synthetic construct
  source 1..9: note = Seed: FIAGLIAIV
FVAGLIAIR

SEQ ID NO: 25410 - protein, 9 aa, synthetic construct
  source 1..9: note = Seed: FIAGLIAIV
FVAGLIAIT

SEQ ID NO: 25411 - protein, 9 aa, synthetic construct
  source 1..9: note = Seed: FIAGLIAIV
FVAGLIAIV

SEQ ID NO: 25412 - protein, 9 aa, synthetic construct
  source 1..9: note = Seed: FIAGLIAIV
FVAGLIAIY

SEQ ID NO: 25413 - protein, 9 aa, synthetic construct
  source 1..9: note = Seed: FLAHIQWMV
FVAHIQWMA

SEQ ID NO: 25414 - protein, 9 aa, synthetic construct
  source 1..9: note = Seed: FLAHIQWMV
FVAHIQWMI

SEQ ID NO: 25415 - protein, 9 aa, synthetic construct
  source 1..9: note = Seed: FLAHIQWMV
FVAHIQWML

SEQ ID NO: 25416 - protein, 9 aa, synthetic construct
  source 1..9: note = Seed: FLAHIQWMV
FVAHIQWMM

SEQ ID NO: 25417 - protein, 9 aa, synthetic construct
  source 1..9: note = Seed: FLAHIQWMV
FVAHIQWMR

SEQ ID NO: 25418 - protein, 9 aa, synthetic construct
  source 1..9: note = Seed: FLAHIQWMV
FVAHIQWMT

SEQ ID NO: 25419 - protein, 9 aa, synthetic construct
  source 1..9: note = Seed: FLAHIQWMV
FVAHIQWMV

SEQ ID NO: 25420 - protein, 9 aa, synthetic construct
  source 1..9: note = Seed: FLALCADSI
FVALCADSI

SEQ ID NO: 25421 - protein, 10 aa, synthetic construct
  source 1..10: note = Seed: FLALCADSII
FVALCADSIV

SEQ ID NO: 25422 - protein, 9 aa, synthetic construct
  source 1..9: note = Seed: FLALCADSI
FVALCADSL

SEQ ID NO: 25423 - protein, 9 aa, synthetic construct
  source 1..9: note = Seed: FLALCADSI
FVALCADSV

SEQ ID NO: 25424 - protein, 10 aa, synthetic construct
  source 1..10: note = Seed: FSALEPLVDL
FVALEPLVDV

SEQ ID NO: 25425 - protein, 9 aa, synthetic construct
  source 1..9: note = Seed: FTALTQHGK
FVALTQHGK

SEQ ID NO: 25426 - protein, 10 aa, synthetic construct
  source 1..10: note = Seed: FTALTQHGKE
FVALTQHGKK

SEQ ID NO: 25427 - protein, 10 aa, synthetic construct
  source 1..10: note = Seed: FTALTQHGKE
FVALTQHGKR

SEQ ID NO: 25428 - protein, 9 aa, synthetic construct
  source 1..9: note = Seed: FTALTQHGK
FVALTQHGR

SEQ ID NO: 25429 - protein, 9 aa, synthetic construct
  source 1..9: note = Seed: FIASFRLFA
FVASFRLFA

SEQ ID NO: 25430 - protein, 10 aa, synthetic construct
  source 1..10: note = Seed: FIASFRLFAR
FVASFRLFAK

SEQ ID NO: 25431 - protein, 10 aa, synthetic construct
  source 1..10: note = Seed: FIASFRLFAR
FVASFRLFAR

SEQ ID NO: 25432 - protein, 9 aa, synthetic construct
  source 1..9: note = Seed: FIASFRLFA
FVASFRLFI

SEQ ID NO: 25433 - protein, 9 aa, synthetic construct
  source 1..9: note = Seed: FIASFRLFA
FVASFRLFK

SEQ ID NO: 25434 - protein, 9 aa, synthetic construct
  source 1..9: note = Seed: FIASFRLFA
FVASFRLFL

SEQ ID NO: 25435 - protein, 9 aa, synthetic construct
  source 1..9: note = Seed: FIASFRLFA
FVASFRLFM

SEQ ID NO: 25436 - protein, 9 aa, synthetic construct
  source 1..9: note = Seed: FIASFRLFA
FVASFRLFR

SEQ ID NO: 25437 - protein, 9 aa, synthetic construct
  source 1..9: note = Seed: FIASFRLFA
FVASFRLFV

SEQ ID NO: 25438 - protein, 9 aa, synthetic construct
  source 1..9: note = Seed: FIASFRLFA
FVASFRLFY

SEQ ID NO: 25439 - protein, 8 aa, synthetic construct
  source 1..8: note = Seed: FFASFYYV
FVASFYYV

SEQ ID NO: 25440 - protein, 10 aa, synthetic construct
  source 1..10: note = Seed: FFASFYYVWK
FVASFYYVWK

SEQ ID NO: 25441 - protein, 10 aa, synthetic construct
  source 1..10: note = Seed: FFASFYYVWK
FVASFYYVWR

SEQ ID NO: 25442 - protein, 9 aa, synthetic construct
  source 1..9: note = Seed: FFASFYYVW
FVASFYYVY

SEQ ID NO: 25443 - protein, 9 aa, synthetic construct
  source 1..9: note = Seed: FNATRFASV
FVATRFASA

SEQ ID NO: 25444 - protein, 9 aa, synthetic construct
  source 1..9: note = Seed: FNATRFASV
FVATRFASF

SEQ ID NO: 25445 - protein, 9 aa, synthetic construct
  source 1..9: note = Seed: FNATRFASV
FVATRFASI

SEQ ID NO: 25446 - protein, 9 aa, synthetic construct
  source 1..9: note = Seed: FNATRFASV
FVATRFASL

SEQ ID NO: 25447 - protein, 9 aa, synthetic construct
  source 1..9: note = Seed: FNATRFASV
FVATRFASM

SEQ ID NO: 25448 - protein, 9 aa, synthetic construct
  source 1..9: note = Seed: FNATRFASV
FVATRFAST

SEQ ID NO: 25449 - protein, 9 aa, synthetic construct
  source 1..9: note = Seed: FNATRFASV
FVATRFASV

SEQ ID NO: 25450 - protein, 10 aa, synthetic construct
  source 1..10: note = Seed: FNATRFASVY
FVATRFASVF

SEQ ID NO: 25451 - protein, 10 aa, synthetic construct
  source 1..10: note = Seed: FNATRFASVY
FVATRFASVM

SEQ ID NO: 25452 - protein, 10 aa, synthetic construct
  source 1..10: note = Seed: FNATRFASVY
FVATRFASVW

SEQ ID NO: 25453 - protein, 10 aa, synthetic construct
  source 1..10: note = Seed: FNATRFASVY
FVATRFASVY

SEQ ID NO: 25454 - protein, 9 aa, synthetic construct
  source 1..9: note = Seed: FNATRFASV
FVATRFASY

SEQ ID NO: 25455 - protein, 9 aa, synthetic construct
  source 1..9: note = Seed: FSAVGNICY
FVAVGNICF

SEQ ID NO: 25456 - protein, 9 aa, synthetic construct
  source 1..9: note = Seed: FSAVGNICY
FVAVGNICM

SEQ ID NO: 25457 - protein, 9 aa, synthetic construct
  source 1..9: note = Seed: FSAVGNICY
FVAVGNICY

SEQ ID NO: 25458 - protein, 10 aa, synthetic construct
  source 1..10: note = Seed: FSAVGNICYT
FVAVGNICYA

SEQ ID NO: 25459 - protein, 10 aa, synthetic construct
  source 1..10: note = Seed: FSAVGNICYT
FVAVGNICYI

SEQ ID NO: 25460 - protein, 10 aa, synthetic construct
  source 1..10: note = Seed: FSAVGNICYT
FVAVGNICYL

SEQ ID NO: 25461 - protein, 10 aa, synthetic construct
  source 1..10: note = Seed: FSAVGNICYT
FVAVGNICYM

SEQ ID NO: 25462 - protein, 10 aa, synthetic construct
  source 1..10: note = Seed: FSAVGNICYT
FVAVGNICYV

SEQ ID NO: 25463 - protein, 9 aa, synthetic construct
  source 1..9: note = Seed: FLAYILFTR
FVAYILFTA

SEQ ID NO: 25464 - protein, 9 aa, synthetic construct
  source 1..9: note = Seed: FLAYILFTR
FVAYILFTI

SEQ ID NO: 25465 - protein, 9 aa, synthetic construct
  source 1..9: note = Seed: FLAYILFTR
FVAYILFTK

SEQ ID NO: 25466 - protein, 9 aa, synthetic construct
  source 1..9: note = Seed: FLAYILFTR
FVAYILFTL

SEQ ID NO: 25467 - protein, 9 aa, synthetic construct
  source 1..9: note = Seed: FLAYILFTR
FVAYILFTM

SEQ ID NO: 25468 - protein, 9 aa, synthetic construct
  source 1..9: note = Seed: FLAYILFTR
FVAYILFTR

SEQ ID NO: 25469 - protein, 10 aa, synthetic construct
  source 1..10: note = Seed: FLAYILFTRF
FVAYILFTRA

SEQ ID NO: 25470 - protein, 10 aa, synthetic construct
  source 1..10: note = Seed: FLAYILFTRF
FVAYILFTRC

SEQ ID NO: 25471 - protein, 10 aa, synthetic construct
  source 1..10: note = Seed: FLAYILFTRF
FVAYILFTRD

SEQ ID NO: 25472 - protein, 10 aa, synthetic construct
  source 1..10: note = Seed: FLAYILFTRF
FVAYILFTRE

SEQ ID NO: 25473 - protein, 10 aa, synthetic construct
  source 1..10: note = Seed: FLAYILFTRF
FVAYILFTRF

SEQ ID NO: 25474 - protein, 10 aa, synthetic construct
  source 1..10: note = Seed: FLAYILFTRF
FVAYILFTRG

SEQ ID NO: 25475 - protein, 10 aa, synthetic construct
  source 1..10: note = Seed: FLAYILFTRF
FVAYILFTRH

SEQ ID NO: 25476 - protein, 10 aa, synthetic construct
  source 1..10: note = Seed: FLAYILFTRF
FVAYILFTRI

SEQ ID NO: 25477 - protein, 10 aa, synthetic construct
  source 1..10: note = Seed: FLAYILFTRF
FVAYILFTRK

SEQ ID NO: 25478 - protein, 10 aa, synthetic construct
  source 1..10: note = Seed: FLAYILFTRF
FVAYILFTRL

SEQ ID NO: 25479 - protein, 10 aa, synthetic construct
  source 1..10: note = Seed: FLAYILFTRF
FVAYILFTRM

SEQ ID NO: 25480 - protein, 10 aa, synthetic construct
  source 1..10: note = Seed: FLAYILFTRF
FVAYILFTRN

SEQ ID NO: 25481 - protein, 10 aa, synthetic construct
  source 1..10: note = Seed: FLAYILFTRF
FVAYILFTRP

SEQ ID NO: 25482 - protein, 10 aa, synthetic construct
  source 1..10: note = Seed: FLAYILFTRF
FVAYILFTRQ

SEQ ID NO: 25483 - protein, 10 aa, synthetic construct
  source 1..10: note = Seed: FLAYILFTRF
FVAYILFTRR

SEQ ID NO: 25484 - protein, 10 aa, synthetic construct
  source 1..10: note = Seed: FLAYILFTRF
FVAYILFTRS

SEQ ID NO: 25485 - protein, 10 aa, synthetic construct
  source 1..10: note = Seed: FLAYILFTRF
FVAYILFTRT

SEQ ID NO: 25486 - protein, 10 aa, synthetic construct
  source 1..10: note = Seed: FLAYILFTRF
FVAYILFTRV

SEQ ID NO: 25487 - protein, 10 aa, synthetic construct
  source 1..10: note = Seed: FLAYILFTRF
FVAYILFTRW

SEQ ID NO: 25488 - protein, 10 aa, synthetic construct
  source 1..10: note = Seed: FLAYILFTRF
FVAYILFTRY

SEQ ID NO: 25489 - protein, 9 aa, synthetic construct
  source 1..9: note = Seed: FLAYILFTR
FVAYILFTT

SEQ ID NO: 25490 - protein, 9 aa, synthetic construct
  source 1..9: note = Seed: FLAYILFTR
FVAYILFTV

SEQ ID NO: 25491 - protein, 9 aa, synthetic construct
  source 1..9: note = Seed: FLAYILFTR
FVAYILFTY

SEQ ID NO: 25492 - protein, 9 aa, synthetic construct
  source 1..9: note = Seed: FVCDNIKFA
FVCDNIKFI

SEQ ID NO: 25493 - protein, 9 aa, synthetic construct
  source 1..9: note = Seed: FVCDNIKFA
FVCDNIKFL

SEQ ID NO: 25494 - protein, 9 aa, synthetic construct
  source 1..9: note = Seed: FVCDNIKFA
FVCDNIKFV

SEQ ID NO: 25495 - protein, 9 aa, synthetic construct
  source 1..9: note = Seed: FLCLFLLPS
FVCLFLLPA

SEQ ID NO: 25496 - protein, 9 aa, synthetic construct
  source 1..9: note = Seed: FLCLFLLPS
FVCLFLLPI

SEQ ID NO: 25497 - protein, 9 aa, synthetic construct
  source 1..9: note = Seed: FLCLFLLPS
FVCLFLLPV

SEQ ID NO: 25498 - protein, 9 aa, synthetic construct
  source 1..9: note = Seed: FMCVEYCPI
FVCVEYCPV

SEQ ID NO: 25499 - protein, 9 aa, synthetic construct
  source 1..9: note = Seed: FMCVEYCPI
FVCVEYCPY

SEQ ID NO: 25500 - protein, 9 aa, synthetic construct
  source 1..9: note = Seed: FLCWHTNCY
FVCWHTNCY

SEQ ID NO: 25501 - protein, 9 aa, synthetic construct
  source 1..9: note = Seed: FGDDTVIEV
FVDDTVIEA

SEQ ID NO: 25502 - protein, 9 aa, synthetic construct
  source 1..9: note = Seed: FGDDTVIEV
FVDDTVIEF

SEQ ID NO: 25503 - protein, 9 aa, synthetic construct
  source 1..9: note = Seed: FGDDTVIEV
FVDDTVIEI

SEQ ID NO: 25504 - protein, 9 aa, synthetic construct
  source 1..9: note = Seed: FGDDTVIEV
FVDDTVIEL

SEQ ID NO: 25505 - protein, 9 aa, synthetic construct
  source 1..9: note = Seed: FGDDTVIEV
FVDDTVIEM

SEQ ID NO: 25506 - protein, 9 aa, synthetic construct
  source 1..9: note = Seed: FGDDTVIEV
FVDDTVIEV

SEQ ID NO: 25507 - protein, 8 aa, synthetic construct
  source 1..8: note = Seed: FVDGVPFV
FVDGVPFL

SEQ ID NO: 25508 - protein, 9 aa, synthetic construct
  source 1..9: note = Seed: FVDGVPFVV
FVDGVPFVA

SEQ ID NO: 25509 - protein, 9 aa, synthetic construct
  source 1..9: note = Seed: FVDGVPFVV
FVDGVPFVF

SEQ ID NO: 25510 - protein, 9 aa, synthetic construct
  source 1..9: note = Seed: FVDGVPFVV
FVDGVPFVI

SEQ ID NO: 25511 - protein, 9 aa, synthetic construct
  source 1..9: note = Seed: FVDGVPFVV
FVDGVPFVL

SEQ ID NO: 25512 - protein, 9 aa, synthetic construct
  source 1..9: note = Seed: FVDGVPFVV
FVDGVPFVM

SEQ ID NO: 25513 - protein, 10 aa, synthetic construct
  source 1..10: note = Seed: FVDGVPFVVS
FVDGVPFVVV

SEQ ID NO: 25514 - protein, 9 aa, synthetic construct
  source 1..9: note = Seed: FVDGVPFVV
FVDGVPFVY

SEQ ID NO: 25515 - protein, 9 aa, synthetic construct
  source 1..9: note = Seed: FPDLNGDVV
FVDLNGDVF

SEQ ID NO: 25516 - protein, 9 aa, synthetic construct
  source 1..9: note = Seed: FPDLNGDVV
FVDLNGDVI

SEQ ID NO: 25517 - protein, 9 aa, synthetic construct
  source 1..9: note = Seed: FPDLNGDVV
FVDLNGDVL

SEQ ID NO: 25518 - protein, 9 aa, synthetic construct
  source 1..9: note = Seed: FPDLNGDVV
FVDLNGDVM

SEQ ID NO: 25519 - protein, 9 aa, synthetic construct
  source 1..9: note = Seed: FPDLNGDVV
FVDLNGDVV

SEQ ID NO: 25520 - protein, 11 aa, synthetic construct
  source 1..11: note = Seed: FPDLNGDVVAI
FVDLNGDVVAI

SEQ ID NO: 25521 - protein, 11 aa, synthetic construct
  source 1..11: note = Seed: FPDLNGDVVAI
FVDLNGDVVAL

SEQ ID NO: 25522 - protein, 11 aa, synthetic construct
  source 1..11: note = Seed: FPDLNGDVVAI
FVDLNGDVVAV

SEQ ID NO: 25523 - protein, 10 aa, synthetic construct
  source 1..10: note = Seed: FPDLNGDVVA
FVDLNGDVVY

SEQ ID NO: 25524 - protein, 9 aa, synthetic construct
  source 1..9: note = Seed: FPDLNGDVV
FVDLNGDVY

SEQ ID NO: 25525 - protein, 9 aa, synthetic construct
  source 1..9: note = Seed: FVFKNIDGY
FVFKNIDGF

SEQ ID NO: 25526 - protein, 9 aa, synthetic construct
  source 1..9: note = Seed: FVFKNIDGY
FVFKNIDGK

SEQ ID NO: 25527 - protein, 9 aa, synthetic construct
  source 1..9: note = Seed: FVFKNIDGY
FVFKNIDGM

SEQ ID NO: 25528 - protein, 9 aa, synthetic construct
  source 1..9: note = Seed: FVFKNIDGY
FVFKNIDGR

SEQ ID NO: 25529 - protein, 9 aa, synthetic construct
  source 1..9: note = Seed: FVFKNIDGY
FVFKNIDGW

SEQ ID NO: 25530 - protein, 10 aa, synthetic construct
  source 1..10: note = Seed: FVFKNIDGYF
FVFKNIDGYA

SEQ ID NO: 25531 - protein, 11 aa, synthetic construct
  source 1..11: note = Seed: FVFKNIDGYFK
FVFKNIDGYFR

SEQ ID NO: 25532 - protein, 10 aa, synthetic construct
  source 1..10: note = Seed: FVFKNIDGYF
FVFKNIDGYI

SEQ ID NO: 25533 - protein, 10 aa, synthetic construct
  source 1..10: note = Seed: FVFKNIDGYF
FVFKNIDGYL

SEQ ID NO: 25534 - protein, 10 aa, synthetic construct
  source 1..10: note = Seed: FVFKNIDGYF
FVFKNIDGYR

SEQ ID NO: 25535 - protein, 10 aa, synthetic construct
  source 1..10: note = Seed: FVFKNIDGYF
FVFKNIDGYV

SEQ ID NO: 25536 - protein, 10 aa, synthetic construct
  source 1..10: note = Seed: FVFKNIDGYF
FVFKNIDGYW

SEQ ID NO: 25537 - protein, 10 aa, synthetic construct
  source 1..10: note = Seed: FVFKNIDGYF
FVFKNIDGYY

SEQ ID NO: 25538 - protein, 10 aa, synthetic construct
  source 1..10: note = Seed: FLFLTWICLL
FVFLTWICLA

SEQ ID NO: 25539 - protein, 10 aa, synthetic construct
  source 1..10: note = Seed: FLFLTWICLL
FVFLTWICLI

SEQ ID NO: 25540 - protein, 10 aa, synthetic construct
  source 1..10: note = Seed: FLFLTWICLL
FVFLTWICLL

SEQ ID NO: 25541 - protein, 10 aa, synthetic construct
  source 1..10: note = Seed: FLFLTWICLL
FVFLTWICLV

SEQ ID NO: 25542 - protein, 9 aa, synthetic construct
  source 1..9: note = Seed: FLFLTWICL
FVFLTWICV

SEQ ID NO: 25543 - protein, 10 aa, synthetic construct
  source 1..10: note = Seed: FPFNKWGKAR
FVFNKWGKAK

SEQ ID NO: 25544 - protein, 10 aa, synthetic construct
  source 1..10: note = Seed: FPFNKWGKAR
FVFNKWGKAR

SEQ ID NO: 25545 - protein, 9 aa, synthetic construct
  source 1..9: note = Seed: FLFVAAIFY
FVFVAAIFY

SEQ ID NO: 25546 - protein, 10 aa, synthetic construct
  source 1..10: note = Seed: FLFVAAIFYL
FVFVAAIFYA

SEQ ID NO: 25547 - protein, 10 aa, synthetic construct
  source 1..10: note = Seed: FLFVAAIFYL
FVFVAAIFYI

SEQ ID NO: 25548 - protein, 10 aa, synthetic construct
  source 1..10: note = Seed: FLFVAAIFYL
FVFVAAIFYL

SEQ ID NO: 25549 - protein, 11 aa, synthetic construct
  source 1..11: note = Seed: FLFVAAIFYLI
FVFVAAIFYLV

SEQ ID NO: 25550 - protein, 10 aa, synthetic construct
  source 1..10: note = Seed: FLFVAAIFYL
FVFVAAIFYM

SEQ ID NO: 25551 - protein, 10 aa, synthetic construct
  source 1..10: note = Seed: FLFVAAIFYL
FVFVAAIFYT

SEQ ID NO: 25552 - protein, 10 aa, synthetic construct
  source 1..10: note = Seed: FLFVAAIFYL
FVFVAAIFYV

SEQ ID NO: 25553 - protein, 10 aa, synthetic construct
  source 1..10: note = Seed: FLFVAAIFYL
FVFVAAIFYY

SEQ ID NO: 25554 - protein, 9 aa, synthetic construct
  source 1..9: note = Seed: FGGASCCLY
FVGASCCLY

SEQ ID NO: 25555 - protein, 9 aa, synthetic construct
  source 1..9: note = Seed: FGGCVFSYV
FVGCVFSYA

SEQ ID NO: 25556 - protein, 9 aa, synthetic construct
  source 1..9: note = Seed: FGGCVFSYV
FVGCVFSYI

SEQ ID NO: 25557 - protein, 9 aa, synthetic construct
  source 1..9: note = Seed: FGGCVFSYV
FVGCVFSYL

SEQ ID NO: 25558 - protein, 9 aa, synthetic construct
  source 1..9: note = Seed: FGGCVFSYV
FVGCVFSYM

SEQ ID NO: 25559 - protein, 9 aa, synthetic construct
  source 1..9: note = Seed: FGGCVFSYV
FVGCVFSYV

SEQ ID NO: 25560 - protein, 10 aa, synthetic construct
  source 1..10: note = Seed: FNGIGVTQNV
FVGIGVTQNI

SEQ ID NO: 25561 - protein, 10 aa, synthetic construct
  source 1..10: note = Seed: FNGIGVTQNV
FVGIGVTQNV

SEQ ID NO: 25562 - protein, 9 aa, synthetic construct
  source 1..9: note = Seed: FLGRYMSAL
FVGRYMSAA

SEQ ID NO: 25563 - protein, 9 aa, synthetic construct
  source 1..9: note = Seed: FLGRYMSAL
FVGRYMSAF

SEQ ID NO: 25564 - protein, 9 aa, synthetic construct
  source 1..9: note = Seed: FLGRYMSAL
FVGRYMSAI

SEQ ID NO: 25565 - protein, 9 aa, synthetic construct
  source 1..9: note = Seed: FLGRYMSAL
FVGRYMSAL

SEQ ID NO: 25566 - protein, 10 aa, synthetic construct
  source 1..10: note = Seed: FLGRYMSALN
FVGRYMSALV

SEQ ID NO: 25567 - protein, 9 aa, synthetic construct
  source 1..9: note = Seed: FLGRYMSAL
FVGRYMSAM

SEQ ID NO: 25568 - protein, 9 aa, synthetic construct
  source 1..9: note = Seed: FLGRYMSAL
FVGRYMSAV

SEQ ID NO: 25569 - protein, 9 aa, synthetic construct
  source 1..9: note = Seed: FLGRYMSAL
FVGRYMSAY

SEQ ID NO: 25570 - protein, 9 aa, synthetic construct
  source 1..9: note = Seed: FNGVSFSTF
FVGVSFSTF

SEQ ID NO: 25571 - protein, 9 aa, synthetic construct
  source 1..9: note = Seed: FNGVSFSTF
FVGVSFSTY

SEQ ID NO: 25572 - protein, 10 aa, synthetic construct
  source 1..10: note = Seed: FLGYFCTCYF
FVGYFCTCYA

SEQ ID NO: 25573 - protein, 10 aa, synthetic construct
  source 1..10: note = Seed: FLGYFCTCYF
FVGYFCTCYI

SEQ ID NO: 25574 - protein, 10 aa, synthetic construct
  source 1..10: note = Seed: FLGYFCTCYF
FVGYFCTCYL

SEQ ID NO: 25575 - protein, 10 aa, synthetic construct
  source 1..10: note = Seed: FLGYFCTCYF
FVGYFCTCYV

SEQ ID NO: 25576 - protein, 10 aa, synthetic construct
  source 1..10: note = Seed: FLGYFCTCYF
FVGYFCTCYY

SEQ ID NO: 25577 - protein, 9 aa, synthetic construct
  source 1..9: note = Seed: FQHANLDSC
FVHANLDSA

SEQ ID NO: 25578 - protein, 9 aa, synthetic construct
  source 1..9: note = Seed: FQHANLDSC
FVHANLDSI

SEQ ID NO: 25579 - protein, 9 aa, synthetic construct
  source 1..9: note = Seed: FQHANLDSC
FVHANLDSL

SEQ ID NO: 25580 - protein, 9 aa, synthetic construct
  source 1..9: note = Seed: FQHANLDSC
FVHANLDSM

SEQ ID NO: 25581 - protein, 9 aa, synthetic construct
  source 1..9: note = Seed: FQHANLDSC
FVHANLDSV

SEQ ID NO: 25582 - protein, 9 aa, synthetic construct
  source 1..9: note = Seed: FLHFLPRVF
FVHFLPRVF

SEQ ID NO: 25583 - protein, 11 aa, synthetic construct
  source 1..11: note = Seed: FLHFLPRVFSA
FVHFLPRVFSV

SEQ ID NO: 25584 - protein, 10 aa, synthetic construct
  source 1..10: note = Seed: FLHFLPRVFS
FVHFLPRVFV

SEQ ID NO: 25585 - protein, 9 aa, synthetic construct
  source 1..9: note = Seed: FLHFLPRVF
FVHFLPRVI

SEQ ID NO: 25586 - protein, 9 aa, synthetic construct
  source 1..9: note = Seed: FLHFLPRVF
FVHFLPRVL

SEQ ID NO: 25587 - protein, 9 aa, synthetic construct
  source 1..9: note = Seed: FLHFLPRVF
FVHFLPRVM

SEQ ID NO: 25588 - protein, 9 aa, synthetic construct
  source 1..9: note = Seed: FLHFLPRVF
FVHFLPRVV

SEQ ID NO: 25589 - protein, 9 aa, synthetic construct
  source 1..9: note = Seed: FLHFLPRVF
FVHFLPRVY

SEQ ID NO: 25590 - protein, 9 aa, synthetic construct
  source 1..9: note = Seed: FSHSQLGGL
FVHSQLGGV

SEQ ID NO: 25591 - protein, 10 aa, synthetic construct
  source 1..10: note = Seed: FLHVTYVPAQ
FVHVTYVPAV

SEQ ID NO: 25592 - protein, 9 aa, synthetic construct
  source 1..9: note = Seed: FLHVTYVPA
FVHVTYVPI

SEQ ID NO: 25593 - protein, 9 aa, synthetic construct
  source 1..9: note = Seed: FLHVTYVPA
FVHVTYVPV

SEQ ID NO: 25594 - protein, 9 aa, synthetic construct
  source 1..9: note = Seed: FTINCQEPK
FVINCQEPK

SEQ ID NO: 25595 - protein, 9 aa, synthetic construct
  source 1..9: note = Seed: FTINCQEPK
FVINCQEPR

SEQ ID NO: 25596 - protein, 10 aa, synthetic construct
  source 1..10: note = Seed: FKIYSKHTPI
FVIYSKHTPA

SEQ ID NO: 25597 - protein, 10 aa, synthetic construct
  source 1..10: note = Seed: FKIYSKHTPI
FVIYSKHTPF

SEQ ID NO: 25598 - protein, 10 aa, synthetic construct
  source 1..10: note = Seed: FKIYSKHTPI
FVIYSKHTPI

SEQ ID NO: 25599 - protein, 10 aa, synthetic construct
  source 1..10: note = Seed: FKIYSKHTPI
FVIYSKHTPL

SEQ ID NO: 25600 - protein, 10 aa, synthetic construct
  source 1..10: note = Seed: FKIYSKHTPI
FVIYSKHTPV

SEQ ID NO: 25601 - protein, 10 aa, synthetic construct
  source 1..10: note = Seed: FKIYSKHTPI
FVIYSKHTPY

SEQ ID NO: 25602 - protein, 9 aa, synthetic construct
  source 1..9: note = Seed: FYKENSYTT
FVKENSYTM

SEQ ID NO: 25603 - protein, 10 aa, synthetic construct
  source 1..10: note = Seed: FIKGLNNLNR
FVKGLNNLNR

SEQ ID NO: 25604 - protein, 9 aa, synthetic construct
  source 1..9: note = Seed: FVKHKHAFL
FVKHKHAFI

SEQ ID NO: 25605 - protein, 9 aa, synthetic construct
  source 1..9: note = Seed: FVKHKHAFL
FVKHKHAFM

SEQ ID NO: 25606 - protein, 9 aa, synthetic construct
  source 1..9: note = Seed: FVKHKHAFL
FVKHKHAFV

SEQ ID NO: 25607 - protein, 8 aa, synthetic construct
  source 1..8: note = Seed: FVKHKHAF
FVKHKHAI

SEQ ID NO: 25608 - protein, 8 aa, synthetic construct
  source 1..8: note = Seed: FVKHKHAF
FVKHKHAL

SEQ ID NO: 25609 - protein, 8 aa, synthetic construct
  source 1..8: note = Seed: FVKHKHAF
FVKHKHAM

SEQ ID NO: 25610 - protein, 8 aa, synthetic construct
  source 1..8: note = Seed: FVKHKHAF
FVKHKHAV

SEQ ID NO: 25611 - protein, 9 aa, synthetic construct
  source 1..9: note = Seed: FRKSNLKPF
FVKSNLKPF

SEQ ID NO: 25612 - protein, 9 aa, synthetic construct
  source 1..9: note = Seed: FVLALLSDL
FVLALLSDA

SEQ ID NO: 25613 - protein, 9 aa, synthetic construct
  source 1..9: note = Seed: FVLALLSDL
FVLALLSDI

SEQ ID NO: 25614 - protein, 9 aa, synthetic construct
  source 1..9: note = Seed: FVLALLSDL
FVLALLSDM

SEQ ID NO: 25615 - protein, 9 aa, synthetic construct
  source 1..9: note = Seed: FVLALLSDL
FVLALLSDV

SEQ ID NO: 25616 - protein, 9 aa, synthetic construct
  source 1..9: note = Seed: FVLALLSDL
FVLALLSDY

SEQ ID NO: 25617 - protein, 10 aa, synthetic construct
  source 1..10: note = Seed: FPLCANGQVF
FVLCANGQVF

SEQ ID NO: 25618 - protein, 10 aa, synthetic construct
  source 1..10: note = Seed: FPLCANGQVF
FVLCANGQVM

SEQ ID NO: 25619 - protein, 10 aa, synthetic construct
  source 1..10: note = Seed: FPLCANGQVF
FVLCANGQVY

SEQ ID NO: 25620 - protein, 9 aa, synthetic construct
  source 1..9: note = Seed: FPLCANGQV
FVLCANGQY

SEQ ID NO: 25621 - protein, 10 aa, synthetic construct
  source 1..10: note = Seed: FKLKDCVMYA
FVLKDCVMYA

SEQ ID NO: 25622 - protein, 10 aa, synthetic construct
  source 1..10: note = Seed: FKLKDCVMYA
FVLKDCVMYI

SEQ ID NO: 25623 - protein, 10 aa, synthetic construct
  source 1..10: note = Seed: FKLKDCVMYA
FVLKDCVMYL

SEQ ID NO: 25624 - protein, 10 aa, synthetic construct
  source 1..10: note = Seed: FKLKDCVMYA
FVLKDCVMYM

SEQ ID NO: 25625 - protein, 10 aa, synthetic construct
  source 1..10: note = Seed: FKLKDCVMYA
FVLKDCVMYS

SEQ ID NO: 25626 - protein, 10 aa, synthetic construct
  source 1..10: note = Seed: FKLKDCVMYA
FVLKDCVMYT

SEQ ID NO: 25627 - protein, 10 aa, synthetic construct
  source 1..10: note = Seed: FKLKDCVMYA
FVLKDCVMYV

SEQ ID NO: 25628 - protein, 10 aa, synthetic construct
  source 1..10: note = Seed: FPLKLRGTAV
FVLKLRGTAA

SEQ ID NO: 25629 - protein, 10 aa, synthetic construct
  source 1..10: note = Seed: FPLKLRGTAV
FVLKLRGTAF

SEQ ID NO: 25630 - protein, 10 aa, synthetic construct
  source 1..10: note = Seed: FPLKLRGTAV
FVLKLRGTAI

SEQ ID NO: 25631 - protein, 10 aa, synthetic construct
  source 1..10: note = Seed: FPLKLRGTAV
FVLKLRGTAL

SEQ ID NO: 25632 - protein, 10 aa, synthetic construct
  source 1..10: note = Seed: FPLKLRGTAV
FVLKLRGTAM

SEQ ID NO: 25633 - protein, 10 aa, synthetic construct
  source 1..10: note = Seed: FPLKLRGTAV
FVLKLRGTAV

SEQ ID NO: 25634 - protein, 11 aa, synthetic construct
  source 1..11: note = Seed: FPLKLRGTAVM
FVLKLRGTAVF

SEQ ID NO: 25635 - protein, 11 aa, synthetic construct
  source 1..11: note = Seed: FPLKLRGTAVM
FVLKLRGTAVY

SEQ ID NO: 25636 - protein, 9 aa, synthetic construct
  source 1..9: note = Seed: FLLNKEMYL
FVLNKEMYA

SEQ ID NO: 25637 - protein, 9 aa, synthetic construct
  source 1..9: note = Seed: FLLNKEMYL
FVLNKEMYF

SEQ ID NO: 25638 - protein, 9 aa, synthetic construct
  source 1..9: note = Seed: FLLNKEMYL
FVLNKEMYI

SEQ ID NO: 25639 - protein, 9 aa, synthetic construct
  source 1..9: note = Seed: FLLNKEMYL
FVLNKEMYL

SEQ ID NO: 25640 - protein, 10 aa, synthetic construct
  source 1..10: note = Seed: FLLNKEMYLK
FVLNKEMYLA

SEQ ID NO: 25641 - protein, 10 aa, synthetic construct
  source 1..10: note = Seed: FLLNKEMYLK
FVLNKEMYLI

SEQ ID NO: 25642 - protein, 10 aa, synthetic construct
  source 1..10: note = Seed: FLLNKEMYLK
FVLNKEMYLK

SEQ ID NO: 25643 - protein, 11 aa, synthetic construct
  source 1..11: note = Seed: FLLNKEMYLKL
FVLNKEMYLKV

SEQ ID NO: 25644 - protein, 10 aa, synthetic construct
  source 1..10: note = Seed: FLLNKEMYLK
FVLNKEMYLL

SEQ ID NO: 25645 - protein, 10 aa, synthetic construct
  source 1..10: note = Seed: FLLNKEMYLK
FVLNKEMYLM

SEQ ID NO: 25646 - protein, 10 aa, synthetic construct
  source 1..10: note = Seed: FLLNKEMYLK
FVLNKEMYLR

SEQ ID NO: 25647 - protein, 10 aa, synthetic construct
  source 1..10: note = Seed: FLLNKEMYLK
FVLNKEMYLV

SEQ ID NO: 25648 - protein, 9 aa, synthetic construct
  source 1..9: note = Seed: FLLNKEMYL
FVLNKEMYM

SEQ ID NO: 25649 - protein, 9 aa, synthetic construct
  source 1..9: note = Seed: FLLNKEMYL
FVLNKEMYV

SEQ ID NO: 25650 - protein, 9 aa, synthetic construct
  source 1..9: note = Seed: FLLNKEMYL
FVLNKEMYY

SEQ ID NO: 25651 - protein, 10 aa, synthetic construct
  source 1..10: note = Seed: FRLTLGVYDY
FVLTLGVYDY

SEQ ID NO: 25652 - protein, 11 aa, synthetic construct
  source 1..11: note = Seed: FRLTLGVYDYL
FVLTLGVYDYV

SEQ ID NO: 25653 - protein, 9 aa, synthetic construct
  source 1..9: note = Seed: FYLTNDVSF
FVLTNDVSF

SEQ ID NO: 25654 - protein, 10 aa, synthetic construct
  source 1..10: note = Seed: FYLTNDVSFL
FVLTNDVSFA

SEQ ID NO: 25655 - protein, 10 aa, synthetic construct
  source 1..10: note = Seed: FYLTNDVSFL
FVLTNDVSFI

SEQ ID NO: 25656 - protein, 10 aa, synthetic construct
  source 1..10: note = Seed: FYLTNDVSFL
FVLTNDVSFL

SEQ ID NO: 25657 - protein, 11 aa, synthetic construct
  source 1..11: note = Seed: FYLTNDVSFLA
FVLTNDVSFLI

SEQ ID NO: 25658 - protein, 11 aa, synthetic construct
  source 1..11: note = Seed: FYLTNDVSFLA
FVLTNDVSFLL

SEQ ID NO: 25659 - protein, 11 aa, synthetic construct
  source 1..11: note = Seed: FYLTNDVSFLA
FVLTNDVSFLV

SEQ ID NO: 25660 - protein, 10 aa, synthetic construct
  source 1..10: note = Seed: FYLTNDVSFL
FVLTNDVSFM

SEQ ID NO: 25661 - protein, 10 aa, synthetic construct
  source 1..10: note = Seed: FYLTNDVSFL
FVLTNDVSFV

SEQ ID NO: 25662 - protein, 9 aa, synthetic construct
  source 1..9: note = Seed: FYLTNDVSF
FVLTNDVSL

SEQ ID NO: 25663 - protein, 9 aa, synthetic construct
  source 1..9: note = Seed: FYLTNDVSF
FVLTNDVSM

SEQ ID NO: 25664 - protein, 9 aa, synthetic construct
  source 1..9: note = Seed: FYLTNDVSF
FVLTNDVSY

SEQ ID NO: 25665 - protein, 10 aa, synthetic construct
  source 1..10: note = Seed: FQLTPIAVQM
FVLTPIAVQA

SEQ ID NO: 25666 - protein, 10 aa, synthetic construct
  source 1..10: note = Seed: FQLTPIAVQM
FVLTPIAVQI

SEQ ID NO: 25667 - protein, 10 aa, synthetic construct
  source 1..10: note = Seed: FQLTPIAVQM
FVLTPIAVQL

SEQ ID NO: 25668 - protein, 10 aa, synthetic construct
  source 1..10: note = Seed: FQLTPIAVQM
FVLTPIAVQM

SEQ ID NO: 25669 - protein, 10 aa, synthetic construct
  source 1..10: note = Seed: FQLTPIAVQM
FVLTPIAVQV

SEQ ID NO: 25670 - protein, 10 aa, synthetic construct
  source 1..10: note = Seed: FQLTPIAVQM
FVLTPIAVQY

SEQ ID NO: 25671 - protein, 10 aa, synthetic construct
  source 1..10: note = Seed: FELTSMKYFV
FVLTSMKYFA

SEQ ID NO: 25672 - protein, 10 aa, synthetic construct
  source 1..10: note = Seed: FELTSMKYFV
FVLTSMKYFI

SEQ ID NO: 25673 - protein, 10 aa, synthetic construct
  source 1..10: note = Seed: FELTSMKYFV
FVLTSMKYFL

SEQ ID NO: 25674 - protein, 10 aa, synthetic construct
  source 1..10: note = Seed: FELTSMKYFV
FVLTSMKYFM

SEQ ID NO: 25675 - protein, 10 aa, synthetic construct
  source 1..10: note = Seed: FELTSMKYFV
FVLTSMKYFV

SEQ ID NO: 25676 - protein, 9 aa, synthetic construct
  source 1..9: note = Seed: FGLVAEWFL
FVLVAEWFA

SEQ ID NO: 25677 - protein, 9 aa, synthetic construct
  source 1..9: note = Seed: FGLVAEWFL
FVLVAEWFI

SEQ ID NO: 25678 - protein, 9 aa, synthetic construct
  source 1..9: note = Seed: FGLVAEWFL
FVLVAEWFL

SEQ ID NO: 25679 - protein, 10 aa, synthetic construct
  source 1..10: note = Seed: FGLVAEWFLA
FVLVAEWFLA

SEQ ID NO: 25680 - protein, 10 aa, synthetic construct
  source 1..10: note = Seed: FGLVAEWFLA
FVLVAEWFLI

SEQ ID NO: 25681 - protein, 10 aa, synthetic construct
  source 1..10: note = Seed: FGLVAEWFLA
FVLVAEWFLL

SEQ ID NO: 25682 - protein, 10 aa, synthetic construct
  source 1..10: note = Seed: FGLVAEWFLA
FVLVAEWFLM

SEQ ID NO: 25683 - protein, 10 aa, synthetic construct
  source 1..10: note = Seed: FGLVAEWFLA
FVLVAEWFLV

SEQ ID NO: 25684 - protein, 9 aa, synthetic construct
  source 1..9: note = Seed: FGLVAEWFL
FVLVAEWFM

SEQ ID NO: 25685 - protein, 9 aa, synthetic construct
  source 1..9: note = Seed: FGLVAEWFL
FVLVAEWFV

SEQ ID NO: 25686 - protein, 10 aa, synthetic construct
  source 1..10: note = Seed: FVLWAHGFEL
FVLWAHGFEA

SEQ ID NO: 25687 - protein, 10 aa, synthetic construct
  source 1..10: note = Seed: FVLWAHGFEL
FVLWAHGFEI

SEQ ID NO: 25688 - protein, 11 aa, synthetic construct
  source 1..11: note = Seed: FVLWAHGFELT
FVLWAHGFELA

SEQ ID NO: 25689 - protein, 11 aa, synthetic construct
  source 1..11: note = Seed: FVLWAHGFELT
FVLWAHGFELC

SEQ ID NO: 25690 - protein, 11 aa, synthetic construct
  source 1..11: note = Seed: FVLWAHGFELT
FVLWAHGFELD

SEQ ID NO: 25691 - protein, 11 aa, synthetic construct
  source 1..11: note = Seed: FVLWAHGFELT
FVLWAHGFELE

SEQ ID NO: 25692 - protein, 11 aa, synthetic construct
  source 1..11: note = Seed: FVLWAHGFELT
FVLWAHGFELF

SEQ ID NO: 25693 - protein, 11 aa, synthetic construct
  source 1..11: note = Seed: FVLWAHGFELT
FVLWAHGFELG

SEQ ID NO: 25694 - protein, 11 aa, synthetic construct
  source 1..11: note = Seed: FVLWAHGFELT
FVLWAHGFELH

SEQ ID NO: 25695 - protein, 11 aa, synthetic construct
  source 1..11: note = Seed: FVLWAHGFELT
FVLWAHGFELI

SEQ ID NO: 25696 - protein, 11 aa, synthetic construct
  source 1..11: note = Seed: FVLWAHGFELT
FVLWAHGFELK

SEQ ID NO: 25697 - protein, 11 aa, synthetic construct
  source 1..11: note = Seed: FVLWAHGFELT
FVLWAHGFELL

SEQ ID NO: 25698 - protein, 11 aa, synthetic construct
  source 1..11: note = Seed: FVLWAHGFELT
FVLWAHGFELM

SEQ ID NO: 25699 - protein, 11 aa, synthetic construct
  source 1..11: note = Seed: FVLWAHGFELT
FVLWAHGFELN

SEQ ID NO: 25700 - protein, 11 aa, synthetic construct
  source 1..11: note = Seed: FVLWAHGFELT
FVLWAHGFELP

SEQ ID NO: 25701 - protein, 11 aa, synthetic construct
  source 1..11: note = Seed: FVLWAHGFELT
FVLWAHGFELQ

SEQ ID NO: 25702 - protein, 11 aa, synthetic construct
  source 1..11: note = Seed: FVLWAHGFELT
FVLWAHGFELR

SEQ ID NO: 25703 - protein, 11 aa, synthetic construct
  source 1..11: note = Seed: FVLWAHGFELT
FVLWAHGFELS

SEQ ID NO: 25704 - protein, 11 aa, synthetic construct
  source 1..11: note = Seed: FVLWAHGFELT
FVLWAHGFELV

SEQ ID NO: 25705 - protein, 11 aa, synthetic construct
  source 1..11: note = Seed: FVLWAHGFELT
FVLWAHGFELW

SEQ ID NO: 25706 - protein, 11 aa, synthetic construct
  source 1..11: note = Seed: FVLWAHGFELT
FVLWAHGFELY

SEQ ID NO: 25707 - protein, 10 aa, synthetic construct
  source 1..10: note = Seed: FVLWAHGFEL
FVLWAHGFEM

SEQ ID NO: 25708 - protein, 10 aa, synthetic construct
  source 1..10: note = Seed: FVLWAHGFEL
FVLWAHGFES

SEQ ID NO: 25709 - protein, 10 aa, synthetic construct
  source 1..10: note = Seed: FVLWAHGFEL
FVLWAHGFET

SEQ ID NO: 25710 - protein, 10 aa, synthetic construct
  source 1..10: note = Seed: FVLWAHGFEL
FVLWAHGFEV

SEQ ID NO: 25711 - protein, 9 aa, synthetic construct
  source 1..9: note = Seed: FHLYLQYIR
FVLYLQYIR

SEQ ID NO: 25712 - protein, 9 aa, synthetic construct
  source 1..9: note = Seed: FAMMFVKHK
FVMMFVKHK

SEQ ID NO: 25713 - protein, 9 aa, synthetic construct
  source 1..9: note = Seed: FAMMFVKHK
FVMMFVKHR

SEQ ID NO: 25714 - protein, 11 aa, synthetic construct
  source 1..11: note = Seed: FSMMILSDDAV
FVMMILSDDAV

SEQ ID NO: 25715 - protein, 10 aa, synthetic construct
  source 1..10: note = Seed: FSMMILSDDA
FVMMILSDDL

SEQ ID NO: 25716 - protein, 10 aa, synthetic construct
  source 1..10: note = Seed: FSMMILSDDA
FVMMILSDDV

SEQ ID NO: 25717 - protein, 10 aa, synthetic construct
  source 1..10: note = Seed: FKMNYQVNGY
FVMNYQVNGY

SEQ ID NO: 25718 - protein, 9 aa, synthetic construct
  source 1..9: note = Seed: FAMQMAYRF
FVMQMAYRA

SEQ ID NO: 25719 - protein, 9 aa, synthetic construct
  source 1..9: note = Seed: FAMQMAYRF
FVMQMAYRF

SEQ ID NO: 25720 - protein, 9 aa, synthetic construct
  source 1..9: note = Seed: FAMQMAYRF
FVMQMAYRI

SEQ ID NO: 25721 - protein, 9 aa, synthetic construct
  source 1..9: note = Seed: FAMQMAYRF
FVMQMAYRL

SEQ ID NO: 25722 - protein, 9 aa, synthetic construct
  source 1..9: note = Seed: FAMQMAYRF
FVMQMAYRM

SEQ ID NO: 25723 - protein, 9 aa, synthetic construct
  source 1..9: note = Seed: FAMQMAYRF
FVMQMAYRV

SEQ ID NO: 25724 - protein, 9 aa, synthetic construct
  source 1..9: note = Seed: FAMQMAYRF
FVMQMAYRW

SEQ ID NO: 25725 - protein, 9 aa, synthetic construct
  source 1..9: note = Seed: FAMQMAYRF
FVMQMAYRY

SEQ ID NO: 25726 - protein, 8 aa, synthetic construct
  source 1..8: note = Seed: FDMSKFPL
FVMSKFPF

SEQ ID NO: 25727 - protein, 8 aa, synthetic construct
  source 1..8: note = Seed: FDMSKFPL
FVMSKFPI

SEQ ID NO: 25728 - protein, 8 aa, synthetic construct
  source 1..8: note = Seed: FDMSKFPL
FVMSKFPL

SEQ ID NO: 25729 - protein, 10 aa, synthetic construct
  source 1..10: note = Seed: FDMSKFPLKL
FVMSKFPLKA

SEQ ID NO: 25730 - protein, 10 aa, synthetic construct
  source 1..10: note = Seed: FDMSKFPLKL
FVMSKFPLKI

SEQ ID NO: 25731 - protein, 10 aa, synthetic construct
  source 1..10: note = Seed: FDMSKFPLKL
FVMSKFPLKL

SEQ ID NO: 25732 - protein, 10 aa, synthetic construct
  source 1..10: note = Seed: FDMSKFPLKL
FVMSKFPLKV

SEQ ID NO: 25733 - protein, 8 aa, synthetic construct
  source 1..8: note = Seed: FDMSKFPL
FVMSKFPM

SEQ ID NO: 25734 - protein, 8 aa, synthetic construct
  source 1..8: note = Seed: FDMSKFPL
FVMSKFPV

SEQ ID NO: 25735 - protein, 10 aa, synthetic construct
  source 1..10: note = Seed: FNMVYMPASW
FVMVYMPASF

SEQ ID NO: 25736 - protein, 10 aa, synthetic construct
  source 1..10: note = Seed: FNMVYMPASW
FVMVYMPASM

SEQ ID NO: 25737 - protein, 10 aa, synthetic construct
  source 1..10: note = Seed: FNMVYMPASW
FVMVYMPASW

SEQ ID NO: 25738 - protein, 10 aa, synthetic construct
  source 1..10: note = Seed: FNMVYMPASW
FVMVYMPASY

SEQ ID NO: 25739 - protein, 9 aa, synthetic construct
  source 1..9: note = Seed: FENKTTLPV
FVNKTTLPF

SEQ ID NO: 25740 - protein, 9 aa, synthetic construct
  source 1..9: note = Seed: FENKTTLPV
FVNKTTLPL

SEQ ID NO: 25741 - protein, 9 aa, synthetic construct
  source 1..9: note = Seed: FENKTTLPV
FVNKTTLPM

SEQ ID NO: 25742 - protein, 9 aa, synthetic construct
  source 1..9: note = Seed: FENKTTLPV
FVNKTTLPY

SEQ ID NO: 25743 - protein, 9 aa, synthetic construct
  source 1..9: note = Seed: FVNLKQLPF
FVNLKQLPL

SEQ ID NO: 25744 - protein, 9 aa, synthetic construct
  source 1..9: note = Seed: FVNLKQLPF
FVNLKQLPM

SEQ ID NO: 25745 - protein, 9 aa, synthetic construct
  source 1..9: note = Seed: FVNLKQLPF
FVNLKQLPW

SEQ ID NO: 25746 - protein, 9 aa, synthetic construct
  source 1..9: note = Seed: FVNLKQLPF
FVNLKQLPY

SEQ ID NO: 25747 - protein, 9 aa, synthetic construct
  source 1..9: note = Seed: FTNVYADSF
FVNVYADSF

SEQ ID NO: 25748 - protein, 10 aa, synthetic construct
  source 1..10: note = Seed: FTNVYADSFV
FVNVYADSFL

SEQ ID NO: 25749 - protein, 10 aa, synthetic construct
  source 1..10: note = Seed: FTNVYADSFV
FVNVYADSFV

SEQ ID NO: 25750 - protein, 11 aa, synthetic construct
  source 1..11: note = Seed: FTNVYADSFVI
FVNVYADSFVV

SEQ ID NO: 25751 - protein, 9 aa, synthetic construct
  source 1..9: note = Seed: FTNVYADSF
FVNVYADSL

SEQ ID NO: 25752 - protein, 9 aa, synthetic construct
  source 1..9: note = Seed: FTNVYADSF
FVNVYADSM

SEQ ID NO: 25753 - protein, 9 aa, synthetic construct
  source 1..9: note = Seed: FTNVYADSF
FVNVYADSW

SEQ ID NO: 25754 - protein, 9 aa, synthetic construct
  source 1..9: note = Seed: FTNVYADSF
FVNVYADSY

SEQ ID NO: 25755 - protein, 9 aa, synthetic construct
  source 1..9: note = Seed: FNPETNILL
FVPETNILL

SEQ ID NO: 25756 - protein, 10 aa, synthetic construct
  source 1..10: note = Seed: FTPFDVVRQC
FVPFDVVRQA

SEQ ID NO: 25757 - protein, 10 aa, synthetic construct
  source 1..10: note = Seed: FLPFFSNVTW
FVPFFSNVTF

SEQ ID NO: 25758 - protein, 10 aa, synthetic construct
  source 1..10: note = Seed: FLPFFSNVTW
FVPFFSNVTH

SEQ ID NO: 25759 - protein, 10 aa, synthetic construct
  source 1..10: note = Seed: FLPFFSNVTW
FVPFFSNVTL

SEQ ID NO: 25760 - protein, 10 aa, synthetic construct
  source 1..10: note = Seed: FLPFFSNVTW
FVPFFSNVTM

SEQ ID NO: 25761 - protein, 10 aa, synthetic construct
  source 1..10: note = Seed: FLPFFSNVTW
FVPFFSNVTW

SEQ ID NO: 25762 - protein, 10 aa, synthetic construct
  source 1..10: note = Seed: FLPFFSNVTW
FVPFFSNVTY

SEQ ID NO: 25763 - protein, 9 aa, synthetic construct
  source 1..9: note = Seed: FLPFFSNVT
FVPFFSNVV

SEQ ID NO: 25764 - protein, 9 aa, synthetic construct
  source 1..9: note = Seed: FLPFQQFGR
FVPFQQFGK

SEQ ID NO: 25765 - protein, 9 aa, synthetic construct
  source 1..9: note = Seed: FLPFQQFGR
FVPFQQFGR

SEQ ID NO: 25766 - protein, 8 aa, synthetic construct
  source 1..8: note = Seed: FLPGVYSV
FVPGVYSV

SEQ ID NO: 25767 - protein, 9 aa, synthetic construct
  source 1..9: note = Seed: FTPLVPFWI
FVPLVPFWA

SEQ ID NO: 25768 - protein, 9 aa, synthetic construct
  source 1..9: note = Seed: FTPLVPFWI
FVPLVPFWI

SEQ ID NO: 25769 - protein, 10 aa, synthetic construct
  source 1..10: note = Seed: FTPLVPFWIT
FVPLVPFWIA

SEQ ID NO: 25770 - protein, 11 aa, synthetic construct
  source 1..11: note = Seed: FTPLVPFWITI
FVPLVPFWITV

SEQ ID NO: 25771 - protein, 9 aa, synthetic construct
  source 1..9: note = Seed: FTPLVPFWI
FVPLVPFWL

SEQ ID NO: 25772 - protein, 9 aa, synthetic construct
  source 1..9: note = Seed: FTPLVPFWI
FVPLVPFWV

SEQ ID NO: 25773 - protein, 9 aa, synthetic construct
  source 1..9: note = Seed: FLPRVFSAV
FVPRVFSAA

SEQ ID NO: 25774 - protein, 9 aa, synthetic construct
  source 1..9: note = Seed: FLPRVFSAV
FVPRVFSAI

SEQ ID NO: 25775 - protein, 9 aa, synthetic construct
  source 1..9: note = Seed: FLPRVFSAV
FVPRVFSAL

SEQ ID NO: 25776 - protein, 9 aa, synthetic construct
  source 1..9: note = Seed: FLPRVFSAV
FVPRVFSAM

SEQ ID NO: 25777 - protein, 9 aa, synthetic construct
  source 1..9: note = Seed: FLPRVFSAV
FVPRVFSAV

SEQ ID NO: 25778 - protein, 10 aa, synthetic construct
  source 1..10: note = Seed: FLPRVFSAVG
FVPRVFSAVF

SEQ ID NO: 25779 - protein, 10 aa, synthetic construct
  source 1..10: note = Seed: FLPRVFSAVG
FVPRVFSAVI

SEQ ID NO: 25780 - protein, 10 aa, synthetic construct
  source 1..10: note = Seed: FLPRVFSAVG
FVPRVFSAVL

SEQ ID NO: 25781 - protein, 10 aa, synthetic construct
  source 1..10: note = Seed: FLPRVFSAVG
FVPRVFSAVM

SEQ ID NO: 25782 - protein, 10 aa, synthetic construct
  source 1..10: note = Seed: FLPRVFSAVG
FVPRVFSAVV

SEQ ID NO: 25783 - protein, 9 aa, synthetic construct
  source 1..9: note = Seed: FLPRVFSAV
FVPRVFSAY

SEQ ID NO: 25784 - protein, 9 aa, synthetic construct
  source 1..9: note = Seed: FAPSASAFF
FVPSASAFA

SEQ ID NO: 25785 - protein, 9 aa, synthetic construct
  source 1..9: note = Seed: FAPSASAFF
FVPSASAFF

SEQ ID NO: 25786 - protein, 9 aa, synthetic construct
  source 1..9: note = Seed: FAPSASAFF
FVPSASAFI

SEQ ID NO: 25787 - protein, 9 aa, synthetic construct
  source 1..9: note = Seed: FAPSASAFF
FVPSASAFL

SEQ ID NO: 25788 - protein, 9 aa, synthetic construct
  source 1..9: note = Seed: FAPSASAFF
FVPSASAFM

SEQ ID NO: 25789 - protein, 9 aa, synthetic construct
  source 1..9: note = Seed: FAPSASAFF
FVPSASAFV

SEQ ID NO: 25790 - protein, 9 aa, synthetic construct
  source 1..9: note = Seed: FAPSASAFF
FVPSASAFY

SEQ ID NO: 25791 - protein, 8 aa, synthetic construct
  source 1..8: note = Seed: FAPSASAF
FVPSASAL

SEQ ID NO: 25792 - protein, 11 aa, synthetic construct
  source 1..11: note = Seed: FPQSAPHGVVF
FVQSAPHGVVF

SEQ ID NO: 25793 - protein, 11 aa, synthetic construct
  source 1..11: note = Seed: FPQSAPHGVVF
FVQSAPHGVVL

SEQ ID NO: 25794 - protein, 11 aa, synthetic construct
  source 1..11: note = Seed: FPQSAPHGVVF
FVQSAPHGVVM

SEQ ID NO: 25795 - protein, 11 aa, synthetic construct
  source 1..11: note = Seed: FPQSAPHGVVF
FVQSAPHGVVW

SEQ ID NO: 25796 - protein, 11 aa, synthetic construct
  source 1..11: note = Seed: FPQSAPHGVVF
FVQSAPHGVVY

SEQ ID NO: 25797 - protein, 9 aa, synthetic construct
  source 1..9: note = Seed: FPQSAPHGV
FVQSAPHGY

SEQ ID NO: 25798 - protein, 9 aa, synthetic construct
  source 1..9: note = Seed: FLQSINFVR
FVQSINFVK

SEQ ID NO: 25799 - protein, 9 aa, synthetic construct
  source 1..9: note = Seed: FLQSINFVR
FVQSINFVR

SEQ ID NO: 25800 - protein, 10 aa, synthetic construct
  source 1..10: note = Seed: FLQSINFVRI
FVQSINFVRR

SEQ ID NO: 25801 - protein, 10 aa, synthetic construct
  source 1..10: note = Seed: FLQSINFVRI
FVQSINFVRV

SEQ ID NO: 25802 - protein, 10 aa, synthetic construct
  source 1..10: note = Seed: FTQSRNLQEF
FVQSRNLQEF

SEQ ID NO: 25803 - protein, 9 aa, synthetic construct
  source 1..9: note = Seed: FAQVKQIYK
FVQVKQIYK

SEQ ID NO: 25804 - protein, 9 aa, synthetic construct
  source 1..9: note = Seed: FAQVKQIYK
FVQVKQIYR

SEQ ID NO: 25805 - protein, 9 aa, synthetic construct
  source 1..9: note = Seed: FLRDGWEIV
FVRDGWEIM

SEQ ID NO: 25806 - protein, 9 aa, synthetic construct
  source 1..9: note = Seed: FPREGVFVS
FVREGVFVF

SEQ ID NO: 25807 - protein, 9 aa, synthetic construct
  source 1..9: note = Seed: FPREGVFVS
FVREGVFVM

SEQ ID NO: 25808 - protein, 9 aa, synthetic construct
  source 1..9: note = Seed: FPREGVFVS
FVREGVFVY

SEQ ID NO: 25809 - protein, 10 aa, synthetic construct
  source 1..10: note = Seed: FTRFFYVLGL
FVRFFYVLGK

SEQ ID NO: 25810 - protein, 10 aa, synthetic construct
  source 1..10: note = Seed: FTRFFYVLGL
FVRFFYVLGL

SEQ ID NO: 25811 - protein, 10 aa, synthetic construct
  source 1..10: note = Seed: FTRFFYVLGL
FVRFFYVLGV

SEQ ID NO: 25812 - protein, 9 aa, synthetic construct
  source 1..9: note = Seed: FTRFFYVLG
FVRFFYVLK

SEQ ID NO: 25813 - protein, 10 aa, synthetic construct
  source 1..10: note = Seed: FTRGVYYPDK
FVRGVYYPDR

SEQ ID NO: 25814 - protein, 9 aa, synthetic construct
  source 1..9: note = Seed: FISAARQGF
FVSAARQGF

SEQ ID NO: 25815 - protein, 10 aa, synthetic construct
  source 1..10: note = Seed: FISAARQGFV
FVSAARQGFV

SEQ ID NO: 25816 - protein, 9 aa, synthetic construct
  source 1..9: note = Seed: FISAARQGF
FVSAARQGL

SEQ ID NO: 25817 - protein, 9 aa, synthetic construct
  source 1..9: note = Seed: FISAARQGF
FVSAARQGM

SEQ ID NO: 25818 - protein, 9 aa, synthetic construct
  source 1..9: note = Seed: FISAARQGF
FVSAARQGY

SEQ ID NO: 25819 - protein, 9 aa, synthetic construct
  source 1..9: note = Seed: FQSAVKRTI
FVSAVKRTF

SEQ ID NO: 25820 - protein, 9 aa, synthetic construct
  source 1..9: note = Seed: FQSAVKRTI
FVSAVKRTI

SEQ ID NO: 25821 - protein, 9 aa, synthetic construct
  source 1..9: note = Seed: FQSAVKRTI
FVSAVKRTL

SEQ ID NO: 25822 - protein, 9 aa, synthetic construct
  source 1..9: note = Seed: FQSAVKRTI
FVSAVKRTM

SEQ ID NO: 25823 - protein, 9 aa, synthetic construct
  source 1..9: note = Seed: FQSAVKRTI
FVSAVKRTV

SEQ ID NO: 25824 - protein, 9 aa, synthetic construct
  source 1..9: note = Seed: FQSAVKRTI
FVSAVKRTY

SEQ ID NO: 25825 - protein, 10 aa, synthetic construct
  source 1..10: note = Seed: FISDEVARDL
FVSDEVARDV

SEQ ID NO: 25826 - protein, 10 aa, synthetic construct
  source 1..10: note = Seed: FTSDLATNNL
FVSDLATNNI

SEQ ID NO: 25827 - protein, 10 aa, synthetic construct
  source 1..10: note = Seed: FTSDLATNNL
FVSDLATNNL

SEQ ID NO: 25828 - protein, 10 aa, synthetic construct
  source 1..10: note = Seed: FTSDLATNNL
FVSDLATNNV

SEQ ID NO: 25829 - protein, 9 aa, synthetic construct
  source 1..9: note = Seed: FTSDYYQLY
FVSDYYQLF

SEQ ID NO: 25830 - protein, 9 aa, synthetic construct
  source 1..9: note = Seed: FTSDYYQLY
FVSDYYQLI

SEQ ID NO: 25831 - protein, 9 aa, synthetic construct
  source 1..9: note = Seed: FTSDYYQLY
FVSDYYQLK

SEQ ID NO: 25832 - protein, 9 aa, synthetic construct
  source 1..9: note = Seed: FTSDYYQLY
FVSDYYQLL

SEQ ID NO: 25833 - protein, 9 aa, synthetic construct
  source 1..9: note = Seed: FTSDYYQLY
FVSDYYQLM

SEQ ID NO: 25834 - protein, 9 aa, synthetic construct
  source 1..9: note = Seed: FTSDYYQLY
FVSDYYQLR

SEQ ID NO: 25835 - protein, 9 aa, synthetic construct
  source 1..9: note = Seed: FTSDYYQLY
FVSDYYQLV

SEQ ID NO: 25836 - protein, 9 aa, synthetic construct
  source 1..9: note = Seed: FTSDYYQLY
FVSDYYQLW

SEQ ID NO: 25837 - protein, 9 aa, synthetic construct
  source 1..9: note = Seed: FTSDYYQLY
FVSDYYQLY

SEQ ID NO: 25838 - protein, 10 aa, synthetic construct
  source 1..10: note = Seed: FTSDYYQLYS
FVSDYYQLYF

SEQ ID NO: 25839 - protein, 10 aa, synthetic construct
  source 1..10: note = Seed: FTSDYYQLYS
FVSDYYQLYM

SEQ ID NO: 25840 - protein, 10 aa, synthetic construct
  source 1..10: note = Seed: FTSDYYQLYS
FVSDYYQLYY

SEQ ID NO: 25841 - protein, 9 aa, synthetic construct
  source 1..9: note = Seed: FASFYYVWK
FVSFYYVWK

SEQ ID NO: 25842 - protein, 9 aa, synthetic construct
  source 1..9: note = Seed: FASFYYVWK
FVSFYYVWR

SEQ ID NO: 25843 - protein, 9 aa, synthetic construct
  source 1..9: note = Seed: FVSLAIDAY
FVSLAIDAF

SEQ ID NO: 25844 - protein, 9 aa, synthetic construct
  source 1..9: note = Seed: FVSLAIDAY
FVSLAIDAM

SEQ ID NO: 25845 - protein, 9 aa, synthetic construct
  source 1..9: note = Seed: FVSNGTHWF
FVSNGTHWA

SEQ ID NO: 25846 - protein, 9 aa, synthetic construct
  source 1..9: note = Seed: FVSNGTHWF
FVSNGTHWI

SEQ ID NO: 25847 - protein, 9 aa, synthetic construct
  source 1..9: note = Seed: FVSNGTHWF
FVSNGTHWL

SEQ ID NO: 25848 - protein, 9 aa, synthetic construct
  source 1..9: note = Seed: FVSNGTHWF
FVSNGTHWM

SEQ ID NO: 25849 - protein, 9 aa, synthetic construct
  source 1..9: note = Seed: FVSNGTHWF
FVSNGTHWV

SEQ ID NO: 25850 - protein, 9 aa, synthetic construct
  source 1..9: note = Seed: FVSNGTHWF
FVSNGTHWY

SEQ ID NO: 25851 - protein, 9 aa, synthetic construct
  source 1..9: note = Seed: FISNSWLMW
FVSNSWLMF

SEQ ID NO: 25852 - protein, 9 aa, synthetic construct
  source 1..9: note = Seed: FISNSWLMW
FVSNSWLMW

SEQ ID NO: 25853 - protein, 10 aa, synthetic construct
  source 1..10: note = Seed: FISNSWLMWL
FVSNSWLMWA

SEQ ID NO: 25854 - protein, 10 aa, synthetic construct
  source 1..10: note = Seed: FISNSWLMWL
FVSNSWLMWI

SEQ ID NO: 25855 - protein, 10 aa, synthetic construct
  source 1..10: note = Seed: FISNSWLMWL
FVSNSWLMWL

SEQ ID NO: 25856 - protein, 11 aa, synthetic construct
  source 1..11: note = Seed: FISNSWLMWLI
FVSNSWLMWLV

SEQ ID NO: 25857 - protein, 10 aa, synthetic construct
  source 1..10: note = Seed: FISNSWLMWL
FVSNSWLMWV

SEQ ID NO: 25858 - protein, 9 aa, synthetic construct
  source 1..9: note = Seed: FISNSWLMW
FVSNSWLMY

SEQ ID NO: 25859 - protein, 9 aa, synthetic construct
  source 1..9: note = Seed: FSSNVANYQ
FVSNVANYK

SEQ ID NO: 25860 - protein, 10 aa, synthetic construct
  source 1..10: note = Seed: FSSNVANYQK
FVSNVANYQK

SEQ ID NO: 25861 - protein, 10 aa, synthetic construct
  source 1..10: note = Seed: FSSNVANYQK
FVSNVANYQR

SEQ ID NO: 25862 - protein, 9 aa, synthetic construct
  source 1..9: note = Seed: FSSNVANYQ
FVSNVANYR

SEQ ID NO: 25863 - protein, 9 aa, synthetic construct
  source 1..9: note = Seed: FSSNVANYQ
FVSNVANYY

SEQ ID NO: 25864 - protein, 9 aa, synthetic construct
  source 1..9: note = Seed: FFSNVTWFH
FVSNVTWFF

SEQ ID NO: 25865 - protein, 9 aa, synthetic construct
  source 1..9: note = Seed: FFSNVTWFH
FVSNVTWFK

SEQ ID NO: 25866 - protein, 9 aa, synthetic construct
  source 1..9: note = Seed: FFSNVTWFH
FVSNVTWFR

SEQ ID NO: 25867 - protein, 9 aa, synthetic construct
  source 1..9: note = Seed: FFSNVTWFH
FVSNVTWFY

SEQ ID NO: 25868 - protein, 11 aa, synthetic construct
  source 1..11: note = Seed: FISPYNSQNAV
FVSPYNSQNAA

SEQ ID NO: 25869 - protein, 11 aa, synthetic construct
  source 1..11: note = Seed: FISPYNSQNAV
FVSPYNSQNAL

SEQ ID NO: 25870 - protein, 11 aa, synthetic construct
  source 1..11: note = Seed: FISPYNSQNAV
FVSPYNSQNAM

SEQ ID NO: 25871 - protein, 10 aa, synthetic construct
  source 1..10: note = Seed: FISPYNSQNA
FVSPYNSQNL

SEQ ID NO: 25872 - protein, 10 aa, synthetic construct
  source 1..10: note = Seed: FISPYNSQNA
FVSPYNSQNV

SEQ ID NO: 25873 - protein, 9 aa, synthetic construct
  source 1..9: note = Seed: FFSYFAVHF
FVSYFAVHF

SEQ ID NO: 25874 - protein, 10 aa, synthetic construct
  source 1..10: note = Seed: FFSYFAVHFI
FVSYFAVHFA

SEQ ID NO: 25875 - protein, 10 aa, synthetic construct
  source 1..10: note = Seed: FFSYFAVHFI
FVSYFAVHFF

SEQ ID NO: 25876 - protein, 10 aa, synthetic construct
  source 1..10: note = Seed: FFSYFAVHFI
FVSYFAVHFI

SEQ ID NO: 25877 - protein, 10 aa, synthetic construct
  source 1..10: note = Seed: FFSYFAVHFI
FVSYFAVHFL

SEQ ID NO: 25878 - protein, 10 aa, synthetic construct
  source 1..10: note = Seed: FFSYFAVHFI
FVSYFAVHFM

SEQ ID NO: 25879 - protein, 10 aa, synthetic construct
  source 1..10: note = Seed: FFSYFAVHFI
FVSYFAVHFV

SEQ ID NO: 25880 - protein, 10 aa, synthetic construct
  source 1..10: note = Seed: FFSYFAVHFI
FVSYFAVHFW

SEQ ID NO: 25881 - protein, 10 aa, synthetic construct
  source 1..10: note = Seed: FFSYFAVHFI
FVSYFAVHFY

SEQ ID NO: 25882 - protein, 9 aa, synthetic construct
  source 1..9: note = Seed: FFSYFAVHF
FVSYFAVHY

SEQ ID NO: 25883 - protein, 10 aa, synthetic construct
  source 1..10: note = Seed: FVTDTPKGPK
FVTDTPKGPR

SEQ ID NO: 25884 - protein, 9 aa, synthetic construct
  source 1..9: note = Seed: FSTFEEAAL
FVTFEEAAF

SEQ ID NO: 25885 - protein, 9 aa, synthetic construct
  source 1..9: note = Seed: FSTFEEAAL
FVTFEEAAL

SEQ ID NO: 25886 - protein, 9 aa, synthetic construct
  source 1..9: note = Seed: FSTFEEAAL
FVTFEEAAM

SEQ ID NO: 25887 - protein, 9 aa, synthetic construct
  source 1..9: note = Seed: FSTFEEAAL
FVTFEEAAV

SEQ ID NO: 25888 - protein, 9 aa, synthetic construct
  source 1..9: note = Seed: FSTFEEAAL
FVTFEEAAY

SEQ ID NO: 25889 - protein, 9 aa, synthetic construct
  source 1..9: note = Seed: FSTFKCYGV
FVTFKCYGI

SEQ ID NO: 25890 - protein, 9 aa, synthetic construct
  source 1..9: note = Seed: FSTFKCYGV
FVTFKCYGL

SEQ ID NO: 25891 - protein, 9 aa, synthetic construct
  source 1..9: note = Seed: FSTFKCYGV
FVTFKCYGV

SEQ ID NO: 25892 - protein, 9 aa, synthetic construct
  source 1..9: note = Seed: FVTHSKGLY
FVTHSKGLW

SEQ ID NO: 25893 - protein, 10 aa, synthetic construct
  source 1..10: note = Seed: FVTHSKGLYR
FVTHSKGLYK

SEQ ID NO: 25894 - protein, 9 aa, synthetic construct
  source 1..9: note = Seed: FVTNVNASS
FVTNVNASA

SEQ ID NO: 25895 - protein, 9 aa, synthetic construct
  source 1..9: note = Seed: FVTNVNASS
FVTNVNASI

SEQ ID NO: 25896 - protein, 9 aa, synthetic construct
  source 1..9: note = Seed: FVTNVNASS
FVTNVNASL

SEQ ID NO: 25897 - protein, 9 aa, synthetic construct
  source 1..9: note = Seed: FVTNVNASS
FVTNVNASV

SEQ ID NO: 25898 - protein, 11 aa, synthetic construct
  source 1..11: note = Seed: FQTRAGCLIGA
FVTRAGCLIGV

SEQ ID NO: 25899 - protein, 9 aa, synthetic construct
  source 1..9: note = Seed: FTTVDNINL
FVTVDNINV

SEQ ID NO: 25900 - protein, 10 aa, synthetic construct
  source 1..10: note = Seed: FDTYNLWNTF
FVTYNLWNTF

SEQ ID NO: 25901 - protein, 10 aa, synthetic construct
  source 1..10: note = Seed: FDTYNLWNTF
FVTYNLWNTW

SEQ ID NO: 25902 - protein, 10 aa, synthetic construct
  source 1..10: note = Seed: FDTYNLWNTF
FVTYNLWNTY

SEQ ID NO: 25903 - protein, 9 aa, synthetic construct
  source 1..9: note = Seed: FAVDAAKAY
FVVDAAKAF

SEQ ID NO: 25904 - protein, 9 aa, synthetic construct
  source 1..9: note = Seed: FAVDAAKAY
FVVDAAKAI

SEQ ID NO: 25905 - protein, 9 aa, synthetic construct
  source 1..9: note = Seed: FAVDAAKAY
FVVDAAKAL

SEQ ID NO: 25906 - protein, 9 aa, synthetic construct
  source 1..9: note = Seed: FAVDAAKAY
FVVDAAKAM

SEQ ID NO: 25907 - protein, 9 aa, synthetic construct
  source 1..9: note = Seed: FAVDAAKAY
FVVDAAKAV

SEQ ID NO: 25908 - protein, 9 aa, synthetic construct
  source 1..9: note = Seed: FAVDAAKAY
FVVDAAKAY

SEQ ID NO: 25909 - protein, 10 aa, synthetic construct
  source 1..10: note = Seed: FAVDAAKAYK
FVVDAAKAYF

SEQ ID NO: 25910 - protein, 10 aa, synthetic construct
  source 1..10: note = Seed: FAVDAAKAYK
FVVDAAKAYK

SEQ ID NO: 25911 - protein, 10 aa, synthetic construct
  source 1..10: note = Seed: FAVDAAKAYK
FVVDAAKAYR

SEQ ID NO: 25912 - protein, 10 aa, synthetic construct
  source 1..10: note = Seed: FAVDAAKAYK
FVVDAAKAYY

SEQ ID NO: 25913 - protein, 9 aa, synthetic construct
  source 1..9: note = Seed: FAVHFISNS
FVVHFISNA

SEQ ID NO: 25914 - protein, 9 aa, synthetic construct
  source 1..9: note = Seed: FAVHFISNS
FVVHFISNI

SEQ ID NO: 25915 - protein, 9 aa, synthetic construct
  source 1..9: note = Seed: FAVHFISNS
FVVHFISNL

SEQ ID NO: 25916 - protein, 9 aa, synthetic construct
  source 1..9: note = Seed: FAVHFISNS
FVVHFISNM

SEQ ID NO: 25917 - protein, 9 aa, synthetic construct
  source 1..9: note = Seed: FAVHFISNS
FVVHFISNT

SEQ ID NO: 25918 - protein, 9 aa, synthetic construct
  source 1..9: note = Seed: FAVHFISNS
FVVHFISNV

SEQ ID NO: 25919 - protein, 8 aa, synthetic construct
  source 1..8: note = Seed: FVVKRHTF
FVVKRHTL

SEQ ID NO: 25920 - protein, 9 aa, synthetic construct
  source 1..9: note = Seed: FNVLFSTVF
FVVLFSTVF

SEQ ID NO: 25921 - protein, 9 aa, synthetic construct
  source 1..9: note = Seed: FNVLFSTVF
FVVLFSTVL

SEQ ID NO: 25922 - protein, 9 aa, synthetic construct
  source 1..9: note = Seed: FNVLFSTVF
FVVLFSTVM

SEQ ID NO: 25923 - protein, 9 aa, synthetic construct
  source 1..9: note = Seed: FNVLFSTVF
FVVLFSTVY

SEQ ID NO: 25924 - protein, 9 aa, synthetic construct
  source 1..9: note = Seed: FPVLHDIGN
FVVLHDIGY

SEQ ID NO: 25925 - protein, 10 aa, synthetic construct
  source 1..10: note = Seed: FKVSIWNLDY
FVVSIWNLDY

SEQ ID NO: 25926 - protein, 10 aa, synthetic construct
  source 1..10: note = Seed: FVVSTGYHFR
FVVSTGYHFK

SEQ ID NO: 25927 - protein, 11 aa, synthetic construct
  source 1..11: note = Seed: FVVSTGYHFRE
FVVSTGYHFRR

SEQ ID NO: 25928 - protein, 9 aa, synthetic construct
  source 1..9: note = Seed: FVVSTGYHF
FVVSTGYHI

SEQ ID NO: 25929 - protein, 9 aa, synthetic construct
  source 1..9: note = Seed: FVVSTGYHF
FVVSTGYHL

SEQ ID NO: 25930 - protein, 9 aa, synthetic construct
  source 1..9: note = Seed: FVVSTGYHF
FVVSTGYHM

SEQ ID NO: 25931 - protein, 9 aa, synthetic construct
  source 1..9: note = Seed: FVVSTGYHF
FVVSTGYHV

SEQ ID NO: 25932 - protein, 9 aa, synthetic construct
  source 1..9: note = Seed: FVVSTGYHF
FVVSTGYHW

SEQ ID NO: 25933 - protein, 9 aa, synthetic construct
  source 1..9: note = Seed: FVVSTGYHF
FVVSTGYHY

SEQ ID NO: 25934 - protein, 9 aa, synthetic construct
  source 1..9: note = Seed: FYWFFSNYL
FVWFFSNYA

SEQ ID NO: 25935 - protein, 9 aa, synthetic construct
  source 1..9: note = Seed: FYWFFSNYL
FVWFFSNYI

SEQ ID NO: 25936 - protein, 9 aa, synthetic construct
  source 1..9: note = Seed: FYWFFSNYL
FVWFFSNYL

SEQ ID NO: 25937 - protein, 10 aa, synthetic construct
  source 1..10: note = Seed: FYWFFSNYLK
FVWFFSNYLF

SEQ ID NO: 25938 - protein, 10 aa, synthetic construct
  source 1..10: note = Seed: FYWFFSNYLK
FVWFFSNYLK

SEQ ID NO: 25939 - protein, 11 aa, synthetic construct
  source 1..11: note = Seed: FYWFFSNYLKR
FVWFFSNYLKR

SEQ ID NO: 25940 - protein, 10 aa, synthetic construct
  source 1..10: note = Seed: FYWFFSNYLK
FVWFFSNYLR

SEQ ID NO: 25941 - protein, 10 aa, synthetic construct
  source 1..10: note = Seed: FYWFFSNYLK
FVWFFSNYLY

SEQ ID NO: 25942 - protein, 9 aa, synthetic construct
  source 1..9: note = Seed: FYWFFSNYL
FVWFFSNYM

SEQ ID NO: 25943 - protein, 9 aa, synthetic construct
  source 1..9: note = Seed: FYWFFSNYL
FVWFFSNYT

SEQ ID NO: 25944 - protein, 9 aa, synthetic construct
  source 1..9: note = Seed: FYWFFSNYL
FVWFFSNYV

SEQ ID NO: 25945 - protein, 9 aa, synthetic construct
  source 1..9: note = Seed: FYWFFSNYL
FVWFFSNYY

SEQ ID NO: 25946 - protein, 8 aa, synthetic construct
  source 1..8: note = Seed: FLWLLWPV
FVWLLWPA

SEQ ID NO: 25947 - protein, 8 aa, synthetic construct
  source 1..8: note = Seed: FLWLLWPV
FVWLLWPI

SEQ ID NO: 25948 - protein, 8 aa, synthetic construct
  source 1..8: note = Seed: FLWLLWPV
FVWLLWPL

SEQ ID NO: 25949 - protein, 8 aa, synthetic construct
  source 1..8: note = Seed: FLWLLWPV
FVWLLWPV

SEQ ID NO: 25950 - protein, 9 aa, synthetic construct
  source 1..9: note = Seed: FLWLLWPVT
FVWLLWPVI

SEQ ID NO: 25951 - protein, 9 aa, synthetic construct
  source 1..9: note = Seed: FLWLLWPVT
FVWLLWPVL

SEQ ID NO: 25952 - protein, 10 aa, synthetic construct
  source 1..10: note = Seed: FLWLLWPVTL
FVWLLWPVTF

SEQ ID NO: 25953 - protein, 10 aa, synthetic construct
  source 1..10: note = Seed: FLWLLWPVTL
FVWLLWPVTI

SEQ ID NO: 25954 - protein, 10 aa, synthetic construct
  source 1..10: note = Seed: FLWLLWPVTL
FVWLLWPVTL

SEQ ID NO: 25955 - protein, 11 aa, synthetic construct
  source 1..11: note = Seed: FLWLLWPVTLA
FVWLLWPVTLI

SEQ ID NO: 25956 - protein, 11 aa, synthetic construct
  source 1..11: note = Seed: FLWLLWPVTLA
FVWLLWPVTLL

SEQ ID NO: 25957 - protein, 11 aa, synthetic construct
  source 1..11: note = Seed: FLWLLWPVTLA
FVWLLWPVTLV

SEQ ID NO: 25958 - protein, 10 aa, synthetic construct
  source 1..10: note = Seed: FLWLLWPVTL
FVWLLWPVTV

SEQ ID NO: 25959 - protein, 9 aa, synthetic construct
  source 1..9: note = Seed: FLWLLWPVT
FVWLLWPVV

SEQ ID NO: 25960 - protein, 9 aa, synthetic construct
  source 1..9: note = Seed: FSYFAVHFI
FVYFAVHFA

SEQ ID NO: 25961 - protein, 9 aa, synthetic construct
  source 1..9: note = Seed: FSYFAVHFI
FVYFAVHFF

SEQ ID NO: 25962 - protein, 9 aa, synthetic construct
  source 1..9: note = Seed: FSYFAVHFI
FVYFAVHFI

SEQ ID NO: 25963 - protein, 10 aa, synthetic construct
  source 1..10: note = Seed: FSYFAVHFIS
FVYFAVHFIA

SEQ ID NO: 25964 - protein, 10 aa, synthetic construct
  source 1..10: note = Seed: FSYFAVHFIS
FVYFAVHFII

SEQ ID NO: 25965 - protein, 10 aa, synthetic construct
  source 1..10: note = Seed: FSYFAVHFIS
FVYFAVHFIL

SEQ ID NO: 25966 - protein, 10 aa, synthetic construct
  source 1..10: note = Seed: FSYFAVHFIS
FVYFAVHFIV

SEQ ID NO: 25967 - protein, 9 aa, synthetic construct
  source 1..9: note = Seed: FSYFAVHFI
FVYFAVHFL

SEQ ID NO: 25968 - protein, 9 aa, synthetic construct
  source 1..9: note = Seed: FSYFAVHFI
FVYFAVHFM

SEQ ID NO: 25969 - protein, 9 aa, synthetic construct
  source 1..9: note = Seed: FSYFAVHFI
FVYFAVHFT

SEQ ID NO: 25970 - protein, 9 aa, synthetic construct
  source 1..9: note = Seed: FSYFAVHFI
FVYFAVHFV

SEQ ID NO: 25971 - protein, 9 aa, synthetic construct
  source 1..9: note = Seed: FSYFAVHFI
FVYFAVHFW

SEQ ID NO: 25972 - protein, 9 aa, synthetic construct
  source 1..9: note = Seed: FSYFAVHFI
FVYFAVHFY

SEQ ID NO: 25973 - protein, 9 aa, synthetic construct
  source 1..9: note = Seed: FYYLGTGPE
FVYLGTGPF

SEQ ID NO: 25974 - protein, 9 aa, synthetic construct
  source 1..9: note = Seed: FYYLGTGPE
FVYLGTGPL

SEQ ID NO: 25975 - protein, 9 aa, synthetic construct
  source 1..9: note = Seed: FYYLGTGPE
FVYLGTGPM

SEQ ID NO: 25976 - protein, 9 aa, synthetic construct
  source 1..9: note = Seed: FYYLGTGPE
FVYLGTGPY

SEQ ID NO: 25977 - protein, 9 aa, synthetic construct
  source 1..9: note = Seed: FNYLKSPNF
FVYLKSPNF

SEQ ID NO: 25978 - protein, 9 aa, synthetic construct
  source 1..9: note = Seed: FNYLKSPNF
FVYLKSPNL

SEQ ID NO: 25979 - protein, 9 aa, synthetic construct
  source 1..9: note = Seed: FNYLKSPNF
FVYLKSPNM

SEQ ID NO: 25980 - protein, 9 aa, synthetic construct
  source 1..9: note = Seed: FNYLKSPNF
FVYLKSPNY

SEQ ID NO: 25981 - protein, 9 aa, synthetic construct
  source 1..9: note = Seed: FCYMHHMEL
FVYMHHMEA

SEQ ID NO: 25982 - protein, 9 aa, synthetic construct
  source 1..9: note = Seed: FCYMHHMEL
FVYMHHMEF

SEQ ID NO: 25983 - protein, 9 aa, synthetic construct
  source 1..9: note = Seed: FCYMHHMEL
FVYMHHMEH

SEQ ID NO: 25984 - protein, 9 aa, synthetic construct
  source 1..9: note = Seed: FCYMHHMEL
FVYMHHMEI

SEQ ID NO: 25985 - protein, 9 aa, synthetic construct
  source 1..9: note = Seed: FCYMHHMEL
FVYMHHMEL

SEQ ID NO: 25986 - protein, 9 aa, synthetic construct
  source 1..9: note = Seed: FCYMHHMEL
FVYMHHMEM

SEQ ID NO: 25987 - protein, 9 aa, synthetic construct
  source 1..9: note = Seed: FCYMHHMEL
FVYMHHMEV

SEQ ID NO: 25988 - protein, 9 aa, synthetic construct
  source 1..9: note = Seed: FCYMHHMEL
FVYMHHMEW

SEQ ID NO: 25989 - protein, 9 aa, synthetic construct
  source 1..9: note = Seed: FCYMHHMEL
FVYMHHMEY

SEQ ID NO: 25990 - protein, 9 aa, synthetic construct
  source 1..9: note = Seed: FRYMNSQGL
FVYMNSQGF

SEQ ID NO: 25991 - protein, 9 aa, synthetic construct
  source 1..9: note = Seed: FRYMNSQGL
FVYMNSQGI

SEQ ID NO: 25992 - protein, 9 aa, synthetic construct
  source 1..9: note = Seed: FRYMNSQGL
FVYMNSQGL

SEQ ID NO: 25993 - protein, 9 aa, synthetic construct
  source 1..9: note = Seed: FRYMNSQGL
FVYMNSQGM

SEQ ID NO: 25994 - protein, 9 aa, synthetic construct
  source 1..9: note = Seed: FRYMNSQGL
FVYMNSQGV

SEQ ID NO: 25995 - protein, 9 aa, synthetic construct
  source 1..9: note = Seed: FRYMNSQGL
FVYMNSQGY

SEQ ID NO: 25996 - protein, 8 aa, synthetic construct
  source 1..8: note = Seed: FEYVSQPF
FVYVSQPF

SEQ ID NO: 25997 - protein, 8 aa, synthetic construct
  source 1..8: note = Seed: FEYVSQPF
FVYVSQPY

SEQ ID NO: 25998 - protein, 9 aa, synthetic construct
  source 1..9: note = Seed: FYYVWKSYV
FVYVWKSYA

SEQ ID NO: 25999 - protein, 9 aa, synthetic construct
  source 1..9: note = Seed: FYYVWKSYV
FVYVWKSYF

SEQ ID NO: 26000 - protein, 9 aa, synthetic construct
  source 1..9: note = Seed: FYYVWKSYV
FVYVWKSYI

SEQ ID NO: 26001 - protein, 9 aa, synthetic construct
  source 1..9: note = Seed: FYYVWKSYV
FVYVWKSYL

SEQ ID NO: 26002 - protein, 9 aa, synthetic construct
  source 1..9: note = Seed: FYYVWKSYV
FVYVWKSYM

SEQ ID NO: 26003 - protein, 9 aa, synthetic construct
  source 1..9: note = Seed: FYYVWKSYV
FVYVWKSYV

SEQ ID NO: 26004 - protein, 10 aa, synthetic construct
  source 1..10: note = Seed: FYYVWKSYVH
FVYVWKSYVM

SEQ ID NO: 26005 - protein, 10 aa, synthetic construct
  source 1..10: note = Seed: FYYVWKSYVH
FVYVWKSYVY

SEQ ID NO: 26006 - protein, 9 aa, synthetic construct
  source 1..9: note = Seed: FYYVWKSYV
FVYVWKSYY

SEQ ID NO: 26007 - protein, 9 aa, synthetic construct
  source 1..9: note = Seed: FFYYSDSPC
FVYYSDSPF

SEQ ID NO: 26008 - protein, 9 aa, synthetic construct
  source 1..9: note = Seed: FFYYSDSPC
FVYYSDSPL

SEQ ID NO: 26009 - protein, 9 aa, synthetic construct
  source 1..9: note = Seed: FFYYSDSPC
FVYYSDSPM

SEQ ID NO: 26010 - protein, 9 aa, synthetic construct
  source 1..9: note = Seed: FFYYSDSPC
FVYYSDSPY

SEQ ID NO: 26011 - protein, 9 aa, synthetic construct
  source 1..9: note = Seed: FVAAIFYLI
FWAAIFYLF

SEQ ID NO: 26012 - protein, 9 aa, synthetic construct
  source 1..9: note = Seed: FVAAIFYLI
FWAAIFYLI

SEQ ID NO: 26013 - protein, 9 aa, synthetic construct
  source 1..9: note = Seed: FVAAIFYLI
FWAAIFYLL

SEQ ID NO: 26014 - protein, 9 aa, synthetic construct
  source 1..9: note = Seed: FVAAIFYLI
FWAAIFYLM

SEQ ID NO: 26015 - protein, 9 aa, synthetic construct
  source 1..9: note = Seed: FVAAIFYLI
FWAAIFYLW

SEQ ID NO: 26016 - protein, 9 aa, synthetic construct
  source 1..9: note = Seed: FVAAIFYLI
FWAAIFYLY

SEQ ID NO: 26017 - protein, 10 aa, synthetic construct
  source 1..10: note = Seed: FCAFAVDAAK
FWAFAVDAAK

SEQ ID NO: 26018 - protein, 10 aa, synthetic construct
  source 1..10: note = Seed: FCAFAVDAAK
FWAFAVDAAR

SEQ ID NO: 26019 - protein, 10 aa, synthetic construct
  source 1..10: note = Seed: FIASFRLFAR
FWASFRLFAK

SEQ ID NO: 26020 - protein, 10 aa, synthetic construct
  source 1..10: note = Seed: FIASFRLFAR
FWASFRLFAR

SEQ ID NO: 26021 - protein, 9 aa, synthetic construct
  source 1..9: note = Seed: FFASFYYVW
FWASFYYVF

SEQ ID NO: 26022 - protein, 9 aa, synthetic construct
  source 1..9: note = Seed: FFASFYYVW
FWASFYYVI

SEQ ID NO: 26023 - protein, 9 aa, synthetic construct
  source 1..9: note = Seed: FFASFYYVW
FWASFYYVL

SEQ ID NO: 26024 - protein, 9 aa, synthetic construct
  source 1..9: note = Seed: FFASFYYVW
FWASFYYVM

SEQ ID NO: 26025 - protein, 9 aa, synthetic construct
  source 1..9: note = Seed: FFASFYYVW
FWASFYYVW

SEQ ID NO: 26026 - protein, 10 aa, synthetic construct
  source 1..10: note = Seed: FFASFYYVWK
FWASFYYVWK

SEQ ID NO: 26027 - protein, 10 aa, synthetic construct
  source 1..10: note = Seed: FFASFYYVWK
FWASFYYVWR

SEQ ID NO: 26028 - protein, 9 aa, synthetic construct
  source 1..9: note = Seed: FFASFYYVW
FWASFYYVY

SEQ ID NO: 26029 - protein, 9 aa, synthetic construct
  source 1..9: note = Seed: FNATRFASV
FWATRFASL

SEQ ID NO: 26030 - protein, 9 aa, synthetic construct
  source 1..9: note = Seed: FNATRFASV
FWATRFASM

SEQ ID NO: 26031 - protein, 10 aa, synthetic construct
  source 1..10: note = Seed: FNATRFASVY
FWATRFASVF

SEQ ID NO: 26032 - protein, 10 aa, synthetic construct
  source 1..10: note = Seed: FNATRFASVY
FWATRFASVM

SEQ ID NO: 26033 - protein, 10 aa, synthetic construct
  source 1..10: note = Seed: FNATRFASVY
FWATRFASVY

SEQ ID NO: 26034 - protein, 9 aa, synthetic construct
  source 1..9: note = Seed: FSAVGNICY
FWAVGNICY

SEQ ID NO: 26035 - protein, 10 aa, synthetic construct
  source 1..10: note = Seed: FSAVGNICYT
FWAVGNICYV

SEQ ID NO: 26036 - protein, 9 aa, synthetic construct
  source 1..9: note = Seed: FLAYILFTR
FWAYILFTR

SEQ ID NO: 26037 - protein, 9 aa, synthetic construct
  source 1..9: note = Seed: FGDDTVIEV
FWDDTVIEV

SEQ ID NO: 26038 - protein, 11 aa, synthetic construct
  source 1..11: note = Seed: FPDLNGDVVAI
FWDLNGDVVAI

SEQ ID NO: 26039 - protein, 11 aa, synthetic construct
  source 1..11: note = Seed: FPDLNGDVVAI
FWDLNGDVVAL

SEQ ID NO: 26040 - protein, 11 aa, synthetic construct
  source 1..11: note = Seed: FPDLNGDVVAI
FWDLNGDVVAV

SEQ ID NO: 26041 - protein, 9 aa, synthetic construct
  source 1..9: note = Seed: FVFKNIDGY
FWFKNIDGY

SEQ ID NO: 26042 - protein, 10 aa, synthetic construct
  source 1..10: note = Seed: FVFKNIDGYF
FWFKNIDGYF

SEQ ID NO: 26043 - protein, 10 aa, synthetic construct
  source 1..10: note = Seed: FVFKNIDGYF
FWFKNIDGYW

SEQ ID NO: 26044 - protein, 10 aa, synthetic construct
  source 1..10: note = Seed: FVFKNIDGYF
FWFKNIDGYY

SEQ ID NO: 26045 - protein, 10 aa, synthetic construct
  source 1..10: note = Seed: FPFNKWGKAR
FWFNKWGKAR

SEQ ID NO: 26046 - protein, 9 aa, synthetic construct
  source 1..9: note = Seed: FLFVAAIFY
FWFVAAIFY

SEQ ID NO: 26047 - protein, 10 aa, synthetic construct
  source 1..10: note = Seed: FLFVAAIFYL
FWFVAAIFYF

SEQ ID NO: 26048 - protein, 10 aa, synthetic construct
  source 1..10: note = Seed: FLFVAAIFYL
FWFVAAIFYY

SEQ ID NO: 26049 - protein, 10 aa, synthetic construct
  source 1..10: note = Seed: FKFVCDNIKF
FWFVCDNIKF

SEQ ID NO: 26050 - protein, 9 aa, synthetic construct
  source 1..9: note = Seed: FGGASCCLY
FWGASCCLY

SEQ ID NO: 26051 - protein, 10 aa, synthetic construct
  source 1..10: note = Seed: FLGYFCTCYF
FWGYFCTCYY

SEQ ID NO: 26052 - protein, 9 aa, synthetic construct
  source 1..9: note = Seed: FLHFLPRVF
FWHFLPRVF

SEQ ID NO: 26053 - protein, 9 aa, synthetic construct
  source 1..9: note = Seed: FLHFLPRVF
FWHFLPRVL

SEQ ID NO: 26054 - protein, 9 aa, synthetic construct
  source 1..9: note = Seed: FLHFLPRVF
FWHFLPRVM

SEQ ID NO: 26055 - protein, 9 aa, synthetic construct
  source 1..9: note = Seed: FLHFLPRVF
FWHFLPRVY

SEQ ID NO: 26056 - protein, 8 aa, synthetic construct
  source 1..8: note = Seed: FFITGNTL
FWITGNTM

SEQ ID NO: 26057 - protein, 10 aa, synthetic construct
  source 1..10: note = Seed: FKIYSKHTPI
FWIYSKHTPA

SEQ ID NO: 26058 - protein, 10 aa, synthetic construct
  source 1..10: note = Seed: FKIYSKHTPI
FWIYSKHTPF

SEQ ID NO: 26059 - protein, 10 aa, synthetic construct
  source 1..10: note = Seed: FKIYSKHTPI
FWIYSKHTPI

SEQ ID NO: 26060 - protein, 10 aa, synthetic construct
  source 1..10: note = Seed: FKIYSKHTPI
FWIYSKHTPL

SEQ ID NO: 26061 - protein, 10 aa, synthetic construct
  source 1..10: note = Seed: FKIYSKHTPI
FWIYSKHTPV

SEQ ID NO: 26062 - protein, 10 aa, synthetic construct
  source 1..10: note = Seed: FKIYSKHTPI
FWIYSKHTPY

SEQ ID NO: 26063 - protein, 9 aa, synthetic construct
  source 1..9: note = Seed: FYKENSYTT
FWKENSYTF

SEQ ID NO: 26064 - protein, 9 aa, synthetic construct
  source 1..9: note = Seed: FYKENSYTT
FWKENSYTI

SEQ ID NO: 26065 - protein, 9 aa, synthetic construct
  source 1..9: note = Seed: FYKENSYTT
FWKENSYTL

SEQ ID NO: 26066 - protein, 9 aa, synthetic construct
  source 1..9: note = Seed: FYKENSYTT
FWKENSYTM

SEQ ID NO: 26067 - protein, 11 aa, synthetic construct
  source 1..11: note = Seed: FYKENSYTTTI
FWKENSYTTTF

SEQ ID NO: 26068 - protein, 11 aa, synthetic construct
  source 1..11: note = Seed: FYKENSYTTTI
FWKENSYTTTW

SEQ ID NO: 26069 - protein, 9 aa, synthetic construct
  source 1..9: note = Seed: FYKENSYTT
FWKENSYTY

SEQ ID NO: 26070 - protein, 9 aa, synthetic construct
  source 1..9: note = Seed: FRKSNLKPF
FWKSNLKPF

SEQ ID NO: 26071 - protein, 9 aa, synthetic construct
  source 1..9: note = Seed: FRKSNLKPF
FWKSNLKPL

SEQ ID NO: 26072 - protein, 9 aa, synthetic construct
  source 1..9: note = Seed: FRKSNLKPF
FWKSNLKPM

SEQ ID NO: 26073 - protein, 9 aa, synthetic construct
  source 1..9: note = Seed: FRKSNLKPF
FWKSNLKPY

SEQ ID NO: 26074 - protein, 9 aa, synthetic construct
  source 1..9: note = Seed: FYLITPVHV
FWLITPVHF

SEQ ID NO: 26075 - protein, 9 aa, synthetic construct
  source 1..9: note = Seed: FYLITPVHV
FWLITPVHI

SEQ ID NO: 26076 - protein, 9 aa, synthetic construct
  source 1..9: note = Seed: FYLITPVHV
FWLITPVHL

SEQ ID NO: 26077 - protein, 9 aa, synthetic construct
  source 1..9: note = Seed: FYLITPVHV
FWLITPVHM

SEQ ID NO: 26078 - protein, 9 aa, synthetic construct
  source 1..9: note = Seed: FYLITPVHV
FWLITPVHW

SEQ ID NO: 26079 - protein, 10 aa, synthetic construct
  source 1..10: note = Seed: FKLKDCVMYA
FWLKDCVMYA

SEQ ID NO: 26080 - protein, 10 aa, synthetic construct
  source 1..10: note = Seed: FKLKDCVMYA
FWLKDCVMYI

SEQ ID NO: 26081 - protein, 10 aa, synthetic construct
  source 1..10: note = Seed: FKLKDCVMYA
FWLKDCVMYL

SEQ ID NO: 26082 - protein, 10 aa, synthetic construct
  source 1..10: note = Seed: FKLKDCVMYA
FWLKDCVMYM

SEQ ID NO: 26083 - protein, 10 aa, synthetic construct
  source 1..10: note = Seed: FKLKDCVMYA
FWLKDCVMYS

SEQ ID NO: 26084 - protein, 10 aa, synthetic construct
  source 1..10: note = Seed: FKLKDCVMYA
FWLKDCVMYT

SEQ ID NO: 26085 - protein, 10 aa, synthetic construct
  source 1..10: note = Seed: FKLKDCVMYA
FWLKDCVMYV

SEQ ID NO: 26086 - protein, 10 aa, synthetic construct
  source 1..10: note = Seed: FPLKLRGTAV
FWLKLRGTAF

SEQ ID NO: 26087 - protein, 10 aa, synthetic construct
  source 1..10: note = Seed: FPLKLRGTAV
FWLKLRGTAI

SEQ ID NO: 26088 - protein, 10 aa, synthetic construct
  source 1..10: note = Seed: FPLKLRGTAV
FWLKLRGTAL

SEQ ID NO: 26089 - protein, 10 aa, synthetic construct
  source 1..10: note = Seed: FPLKLRGTAV
FWLKLRGTAM

SEQ ID NO: 26090 - protein, 10 aa, synthetic construct
  source 1..10: note = Seed: FPLKLRGTAV
FWLKLRGTAV

SEQ ID NO: 26091 - protein, 11 aa, synthetic construct
  source 1..11: note = Seed: FPLKLRGTAVM
FWLKLRGTAVF

SEQ ID NO: 26092 - protein, 11 aa, synthetic construct
  source 1..11: note = Seed: FPLKLRGTAVM
FWLKLRGTAVY

SEQ ID NO: 26093 - protein, 9 aa, synthetic construct
  source 1..9: note = Seed: FLLNKEMYL
FWLNKEMYF

SEQ ID NO: 26094 - protein, 9 aa, synthetic construct
  source 1..9: note = Seed: FLLNKEMYL
FWLNKEMYL

SEQ ID NO: 26095 - protein, 10 aa, synthetic construct
  source 1..10: note = Seed: FLLNKEMYLK
FWLNKEMYLA

SEQ ID NO: 26096 - protein, 10 aa, synthetic construct
  source 1..10: note = Seed: FLLNKEMYLK
FWLNKEMYLI

SEQ ID NO: 26097 - protein, 10 aa, synthetic construct
  source 1..10: note = Seed: FLLNKEMYLK
FWLNKEMYLL

SEQ ID NO: 26098 - protein, 10 aa, synthetic construct
  source 1..10: note = Seed: FLLNKEMYLK
FWLNKEMYLM

SEQ ID NO: 26099 - protein, 10 aa, synthetic construct
  source 1..10: note = Seed: FLLNKEMYLK
FWLNKEMYLR

SEQ ID NO: 26100 - protein, 10 aa, synthetic construct
  source 1..10: note = Seed: FLLNKEMYLK
FWLNKEMYLV

SEQ ID NO: 26101 - protein, 9 aa, synthetic construct
  source 1..9: note = Seed: FLLNKEMYL
FWLNKEMYM

SEQ ID NO: 26102 - protein, 10 aa, synthetic construct
  source 1..10: note = Seed: FRLTLGVYDY
FWLTLGVYDY

SEQ ID NO: 26103 - protein, 9 aa, synthetic construct
  source 1..9: note = Seed: FYLTNDVSF
FWLTNDVSF

SEQ ID NO: 26104 - protein, 10 aa, synthetic construct
  source 1..10: note = Seed: FYLTNDVSFL
FWLTNDVSFA

SEQ ID NO: 26105 - protein, 10 aa, synthetic construct
  source 1..10: note = Seed: FYLTNDVSFL
FWLTNDVSFF

SEQ ID NO: 26106 - protein, 10 aa, synthetic construct
  source 1..10: note = Seed: FYLTNDVSFL
FWLTNDVSFI

SEQ ID NO: 26107 - protein, 10 aa, synthetic construct
  source 1..10: note = Seed: FYLTNDVSFL
FWLTNDVSFL

SEQ ID NO: 26108 - protein, 11 aa, synthetic construct
  source 1..11: note = Seed: FYLTNDVSFLA
FWLTNDVSFLL

SEQ ID NO: 26109 - protein, 11 aa, synthetic construct
  source 1..11: note = Seed: FYLTNDVSFLA
FWLTNDVSFLV

SEQ ID NO: 26110 - protein, 10 aa, synthetic construct
  source 1..10: note = Seed: FYLTNDVSFL
FWLTNDVSFM

SEQ ID NO: 26111 - protein, 10 aa, synthetic construct
  source 1..10: note = Seed: FYLTNDVSFL
FWLTNDVSFV

SEQ ID NO: 26112 - protein, 10 aa, synthetic construct
  source 1..10: note = Seed: FYLTNDVSFL
FWLTNDVSFW

SEQ ID NO: 26113 - protein, 9 aa, synthetic construct
  source 1..9: note = Seed: FYLTNDVSF
FWLTNDVSI

SEQ ID NO: 26114 - protein, 9 aa, synthetic construct
  source 1..9: note = Seed: FYLTNDVSF
FWLTNDVSL

SEQ ID NO: 26115 - protein, 9 aa, synthetic construct
  source 1..9: note = Seed: FYLTNDVSF
FWLTNDVSM

SEQ ID NO: 26116 - protein, 9 aa, synthetic construct
  source 1..9: note = Seed: FYLTNDVSF
FWLTNDVSW

SEQ ID NO: 26117 - protein, 9 aa, synthetic construct
  source 1..9: note = Seed: FYLTNDVSF
FWLTNDVSY

SEQ ID NO: 26118 - protein, 10 aa, synthetic construct
  source 1..10: note = Seed: FQLTPIAVQM
FWLTPIAVQA

SEQ ID NO: 26119 - protein, 10 aa, synthetic construct
  source 1..10: note = Seed: FQLTPIAVQM
FWLTPIAVQI

SEQ ID NO: 26120 - protein, 10 aa, synthetic construct
  source 1..10: note = Seed: FQLTPIAVQM
FWLTPIAVQL

SEQ ID NO: 26121 - protein, 10 aa, synthetic construct
  source 1..10: note = Seed: FQLTPIAVQM
FWLTPIAVQM

SEQ ID NO: 26122 - protein, 10 aa, synthetic construct
  source 1..10: note = Seed: FQLTPIAVQM
FWLTPIAVQV

SEQ ID NO: 26123 - protein, 10 aa, synthetic construct
  source 1..10: note = Seed: FELTSMKYFV
FWLTSMKYFA

SEQ ID NO: 26124 - protein, 10 aa, synthetic construct
  source 1..10: note = Seed: FELTSMKYFV
FWLTSMKYFI

SEQ ID NO: 26125 - protein, 10 aa, synthetic construct
  source 1..10: note = Seed: FELTSMKYFV
FWLTSMKYFL

SEQ ID NO: 26126 - protein, 10 aa, synthetic construct
  source 1..10: note = Seed: FELTSMKYFV
FWLTSMKYFM

SEQ ID NO: 26127 - protein, 10 aa, synthetic construct
  source 1..10: note = Seed: FELTSMKYFV
FWLTSMKYFV

SEQ ID NO: 26128 - protein, 10 aa, synthetic construct
  source 1..10: note = Seed: FGLVAEWFLA
FWLVAEWFLA

SEQ ID NO: 26129 - protein, 10 aa, synthetic construct
  source 1..10: note = Seed: FGLVAEWFLA
FWLVAEWFLI

SEQ ID NO: 26130 - protein, 10 aa, synthetic construct
  source 1..10: note = Seed: FGLVAEWFLA
FWLVAEWFLL

SEQ ID NO: 26131 - protein, 10 aa, synthetic construct
  source 1..10: note = Seed: FGLVAEWFLA
FWLVAEWFLM

SEQ ID NO: 26132 - protein, 10 aa, synthetic construct
  source 1..10: note = Seed: FGLVAEWFLA
FWLVAEWFLV

SEQ ID NO: 26133 - protein, 10 aa, synthetic construct
  source 1..10: note = Seed: FVLWAHGFEL
FWLWAHGFEA

SEQ ID NO: 26134 - protein, 10 aa, synthetic construct
  source 1..10: note = Seed: FVLWAHGFEL
FWLWAHGFEI

SEQ ID NO: 26135 - protein, 10 aa, synthetic construct
  source 1..10: note = Seed: FVLWAHGFEL
FWLWAHGFEL

SEQ ID NO: 26136 - protein, 11 aa, synthetic construct
  source 1..11: note = Seed: FVLWAHGFELT
FWLWAHGFELA

SEQ ID NO: 26137 - protein, 11 aa, synthetic construct
  source 1..11: note = Seed: FVLWAHGFELT
FWLWAHGFELC

SEQ ID NO: 26138 - protein, 11 aa, synthetic construct
  source 1..11: note = Seed: FVLWAHGFELT
FWLWAHGFELD

SEQ ID NO: 26139 - protein, 11 aa, synthetic construct
  source 1..11: note = Seed: FVLWAHGFELT
FWLWAHGFELE

SEQ ID NO: 26140 - protein, 11 aa, synthetic construct
  source 1..11: note = Seed: FVLWAHGFELT
FWLWAHGFELF

SEQ ID NO: 26141 - protein, 11 aa, synthetic construct
  source 1..11: note = Seed: FVLWAHGFELT
FWLWAHGFELG

SEQ ID NO: 26142 - protein, 11 aa, synthetic construct
  source 1..11: note = Seed: FVLWAHGFELT
FWLWAHGFELH

SEQ ID NO: 26143 - protein, 11 aa, synthetic construct
  source 1..11: note = Seed: FVLWAHGFELT
FWLWAHGFELI

SEQ ID NO: 26144 - protein, 11 aa, synthetic construct
  source 1..11: note = Seed: FVLWAHGFELT
FWLWAHGFELK

SEQ ID NO: 26145 - protein, 11 aa, synthetic construct
  source 1..11: note = Seed: FVLWAHGFELT
FWLWAHGFELL

SEQ ID NO: 26146 - protein, 11 aa, synthetic construct
  source 1..11: note = Seed: FVLWAHGFELT
FWLWAHGFELM

SEQ ID NO: 26147 - protein, 11 aa, synthetic construct
  source 1..11: note = Seed: FVLWAHGFELT
FWLWAHGFELN

SEQ ID NO: 26148 - protein, 11 aa, synthetic construct
  source 1..11: note = Seed: FVLWAHGFELT
FWLWAHGFELP

SEQ ID NO: 26149 - protein, 11 aa, synthetic construct
  source 1..11: note = Seed: FVLWAHGFELT
FWLWAHGFELQ

SEQ ID NO: 26150 - protein, 11 aa, synthetic construct
  source 1..11: note = Seed: FVLWAHGFELT
FWLWAHGFELR

SEQ ID NO: 26151 - protein, 11 aa, synthetic construct
  source 1..11: note = Seed: FVLWAHGFELT
FWLWAHGFELS

SEQ ID NO: 26152 - protein, 11 aa, synthetic construct
  source 1..11: note = Seed: FVLWAHGFELT
FWLWAHGFELT

SEQ ID NO: 26153 - protein, 11 aa, synthetic construct
  source 1..11: note = Seed: FVLWAHGFELT
FWLWAHGFELV

SEQ ID NO: 26154 - protein, 11 aa, synthetic construct
  source 1..11: note = Seed: FVLWAHGFELT
FWLWAHGFELW

SEQ ID NO: 26155 - protein, 11 aa, synthetic construct
  source 1..11: note = Seed: FVLWAHGFELT
FWLWAHGFELY

SEQ ID NO: 26156 - protein, 10 aa, synthetic construct
  source 1..10: note = Seed: FVLWAHGFEL
FWLWAHGFEM

SEQ ID NO: 26157 - protein, 10 aa, synthetic construct
  source 1..10: note = Seed: FVLWAHGFEL
FWLWAHGFES

SEQ ID NO: 26158 - protein, 10 aa, synthetic construct
  source 1..10: note = Seed: FVLWAHGFEL
FWLWAHGFET

SEQ ID NO: 26159 - protein, 10 aa, synthetic construct
  source 1..10: note = Seed: FVLWAHGFEL
FWLWAHGFEV

SEQ ID NO: 26160 - protein, 9 aa, synthetic construct
  source 1..9: note = Seed: FHLYLQYIR
FWLYLQYIR

SEQ ID NO: 26161 - protein, 10 aa, synthetic construct
  source 1..10: note = Seed: FSMMILSDDA
FWMMILSDDL

SEQ ID NO: 26162 - protein, 10 aa, synthetic construct
  source 1..10: note = Seed: FSMMILSDDA
FWMMILSDDV

SEQ ID NO: 26163 - protein, 10 aa, synthetic construct
  source 1..10: note = Seed: FKMNYQVNGY
FWMNYQVNGY

SEQ ID NO: 26164 - protein, 9 aa, synthetic construct
  source 1..9: note = Seed: FAMQMAYRF
FWMQMAYRF

SEQ ID NO: 26165 - protein, 9 aa, synthetic construct
  source 1..9: note = Seed: FAMQMAYRF
FWMQMAYRI

SEQ ID NO: 26166 - protein, 9 aa, synthetic construct
  source 1..9: note = Seed: FAMQMAYRF
FWMQMAYRL

SEQ ID NO: 26167 - protein, 9 aa, synthetic construct
  source 1..9: note = Seed: FAMQMAYRF
FWMQMAYRM

SEQ ID NO: 26168 - protein, 9 aa, synthetic construct
  source 1..9: note = Seed: FAMQMAYRF
FWMQMAYRW

SEQ ID NO: 26169 - protein, 9 aa, synthetic construct
  source 1..9: note = Seed: FAMQMAYRF
FWMQMAYRY

SEQ ID NO: 26170 - protein, 10 aa, synthetic construct
  source 1..10: note = Seed: FDMSKFPLKL
FWMSKFPLKA

SEQ ID NO: 26171 - protein, 10 aa, synthetic construct
  source 1..10: note = Seed: FDMSKFPLKL
FWMSKFPLKI

SEQ ID NO: 26172 - protein, 10 aa, synthetic construct
  source 1..10: note = Seed: FDMSKFPLKL
FWMSKFPLKL

SEQ ID NO: 26173 - protein, 10 aa, synthetic construct
  source 1..10: note = Seed: FDMSKFPLKL
FWMSKFPLKV

SEQ ID NO: 26174 - protein, 10 aa, synthetic construct
  source 1..10: note = Seed: FNMVYMPASW
FWMVYMPASF

SEQ ID NO: 26175 - protein, 10 aa, synthetic construct
  source 1..10: note = Seed: FNMVYMPASW
FWMVYMPASY

SEQ ID NO: 26176 - protein, 9 aa, synthetic construct
  source 1..9: note = Seed: FVNLKQLPF
FWNLKQLPF

SEQ ID NO: 26177 - protein, 9 aa, synthetic construct
  source 1..9: note = Seed: FVNLKQLPF
FWNLKQLPL

SEQ ID NO: 26178 - protein, 9 aa, synthetic construct
  source 1..9: note = Seed: FVNLKQLPF
FWNLKQLPM

SEQ ID NO: 26179 - protein, 9 aa, synthetic construct
  source 1..9: note = Seed: FVNLKQLPF
FWNLKQLPY

SEQ ID NO: 26180 - protein, 11 aa, synthetic construct
  source 1..11: note = Seed: FTNVYADSFVI
FWNVYADSFVV

SEQ ID NO: 26181 - protein, 10 aa, synthetic construct
  source 1..10: note = Seed: FTPFDVVRQC
FWPFDVVRQA

SEQ ID NO: 26182 - protein, 10 aa, synthetic construct
  source 1..10: note = Seed: FLPFFSNVTW
FWPFFSNVTF

SEQ ID NO: 26183 - protein, 10 aa, synthetic construct
  source 1..10: note = Seed: FLPFFSNVTW
FWPFFSNVTH

SEQ ID NO: 26184 - protein, 10 aa, synthetic construct
  source 1..10: note = Seed: FLPFFSNVTW
FWPFFSNVTI

SEQ ID NO: 26185 - protein, 10 aa, synthetic construct
  source 1..10: note = Seed: FLPFFSNVTW
FWPFFSNVTL

SEQ ID NO: 26186 - protein, 10 aa, synthetic construct
  source 1..10: note = Seed: FLPFFSNVTW
FWPFFSNVTM

SEQ ID NO: 26187 - protein, 10 aa, synthetic construct
  source 1..10: note = Seed: FLPFFSNVTW
FWPFFSNVTW

SEQ ID NO: 26188 - protein, 11 aa, synthetic construct
  source 1..11: note = Seed: FLPFFSNVTWF
FWPFFSNVTWF

SEQ ID NO: 26189 - protein, 10 aa, synthetic construct
  source 1..10: note = Seed: FLPFFSNVTW
FWPFFSNVTY

SEQ ID NO: 26190 - protein, 10 aa, synthetic construct
  source 1..10: note = Seed: FTPLVPFWIT
FWPLVPFWIA

SEQ ID NO: 26191 - protein, 11 aa, synthetic construct
  source 1..11: note = Seed: FTPLVPFWITI
FWPLVPFWITV

SEQ ID NO: 26192 - protein, 9 aa, synthetic construct
  source 1..9: note = Seed: FLPRVFSAV
FWPRVFSAF

SEQ ID NO: 26193 - protein, 9 aa, synthetic construct
  source 1..9: note = Seed: FLPRVFSAV
FWPRVFSAI

SEQ ID NO: 26194 - protein, 9 aa, synthetic construct
  source 1..9: note = Seed: FLPRVFSAV
FWPRVFSAL

SEQ ID NO: 26195 - protein, 9 aa, synthetic construct
  source 1..9: note = Seed: FLPRVFSAV
FWPRVFSAM

SEQ ID NO: 26196 - protein, 10 aa, synthetic construct
  source 1..10: note = Seed: FLPRVFSAVG
FWPRVFSAVF

SEQ ID NO: 26197 - protein, 10 aa, synthetic construct
  source 1..10: note = Seed: FLPRVFSAVG
FWPRVFSAVI

SEQ ID NO: 26198 - protein, 10 aa, synthetic construct
  source 1..10: note = Seed: FLPRVFSAVG
FWPRVFSAVL

SEQ ID NO: 26199 - protein, 10 aa, synthetic construct
  source 1..10: note = Seed: FLPRVFSAVG
FWPRVFSAVM

SEQ ID NO: 26200 - protein, 10 aa, synthetic construct
  source 1..10: note = Seed: FLPRVFSAVG
FWPRVFSAVV

SEQ ID NO: 26201 - protein, 9 aa, synthetic construct
  source 1..9: note = Seed: FLPRVFSAV
FWPRVFSAY

SEQ ID NO: 26202 - protein, 8 aa, synthetic construct
  source 1..8: note = Seed: FAPSASAF
FWPSASAF

SEQ ID NO: 26203 - protein, 9 aa, synthetic construct
  source 1..9: note = Seed: FAPSASAFF
FWPSASAFF

SEQ ID NO: 26204 - protein, 9 aa, synthetic construct
  source 1..9: note = Seed: FAPSASAFF
FWPSASAFI

SEQ ID NO: 26205 - protein, 9 aa, synthetic construct
  source 1..9: note = Seed: FAPSASAFF
FWPSASAFL

SEQ ID NO: 26206 - protein, 9 aa, synthetic construct
  source 1..9: note = Seed: FAPSASAFF
FWPSASAFM

SEQ ID NO: 26207 - protein, 9 aa, synthetic construct
  source 1..9: note = Seed: FAPSASAFF
FWPSASAFW

SEQ ID NO: 26208 - protein, 9 aa, synthetic construct
  source 1..9: note = Seed: FAPSASAFF
FWPSASAFY

SEQ ID NO: 26209 - protein, 8 aa, synthetic construct
  source 1..8: note = Seed: FAPSASAF
FWPSASAL

SEQ ID NO: 26210 - protein, 8 aa, synthetic construct
  source 1..8: note = Seed: FAPSASAF
FWPSASAM

SEQ ID NO: 26211 - protein, 11 aa, synthetic construct
  source 1..11: note = Seed: FPQSAPHGVVF
FWQSAPHGVVF

SEQ ID NO: 26212 - protein, 11 aa, synthetic construct
  source 1..11: note = Seed: FPQSAPHGVVF
FWQSAPHGVVL

SEQ ID NO: 26213 - protein, 11 aa, synthetic construct
  source 1..11: note = Seed: FPQSAPHGVVF
FWQSAPHGVVM

SEQ ID NO: 26214 - protein, 11 aa, synthetic construct
  source 1..11: note = Seed: FPQSAPHGVVF
FWQSAPHGVVW

SEQ ID NO: 26215 - protein, 11 aa, synthetic construct
  source 1..11: note = Seed: FPQSAPHGVVF
FWQSAPHGVVY

SEQ ID NO: 26216 - protein, 9 aa, synthetic construct
  source 1..9: note = Seed: FLQSINFVR
FWQSINFVR

SEQ ID NO: 26217 - protein, 10 aa, synthetic construct
  source 1..10: note = Seed: FTQSRNLQEF
FWQSRNLQEF

SEQ ID NO: 26218 - protein, 10 aa, synthetic construct
  source 1..10: note = Seed: FTRFFYVLGL
FWRFFYVLGK

SEQ ID NO: 26219 - protein, 10 aa, synthetic construct
  source 1..10: note = Seed: FTRFFYVLGL
FWRFFYVLGL

SEQ ID NO: 26220 - protein, 9 aa, synthetic construct
  source 1..9: note = Seed: FISAARQGF
FWSAARQGF

SEQ ID NO: 26221 - protein, 9 aa, synthetic construct
  source 1..9: note = Seed: FISAARQGF
FWSAARQGL

SEQ ID NO: 26222 - protein, 9 aa, synthetic construct
  source 1..9: note = Seed: FISAARQGF
FWSAARQGM

SEQ ID NO: 26223 - protein, 9 aa, synthetic construct
  source 1..9: note = Seed: FISAARQGF
FWSAARQGY

SEQ ID NO: 26224 - protein, 9 aa, synthetic construct
  source 1..9: note = Seed: FTSDYYQLY
FWSDYYQLF

SEQ ID NO: 26225 - protein, 9 aa, synthetic construct
  source 1..9: note = Seed: FTSDYYQLY
FWSDYYQLL

SEQ ID NO: 26226 - protein, 9 aa, synthetic construct
  source 1..9: note = Seed: FTSDYYQLY
FWSDYYQLM

SEQ ID NO: 26227 - protein, 9 aa, synthetic construct
  source 1..9: note = Seed: FTSDYYQLY
FWSDYYQLY

SEQ ID NO: 26228 - protein, 10 aa, synthetic construct
  source 1..10: note = Seed: FTSDYYQLYS
FWSDYYQLYF

SEQ ID NO: 26229 - protein, 10 aa, synthetic construct
  source 1..10: note = Seed: FTSDYYQLYS
FWSDYYQLYM

SEQ ID NO: 26230 - protein, 10 aa, synthetic construct
  source 1..10: note = Seed: FTSDYYQLYS
FWSDYYQLYY

SEQ ID NO: 26231 - protein, 9 aa, synthetic construct
  source 1..9: note = Seed: FYSKWYIRV
FWSKWYIRF

SEQ ID NO: 26232 - protein, 9 aa, synthetic construct
  source 1..9: note = Seed: FYSKWYIRV
FWSKWYIRW

SEQ ID NO: 26233 - protein, 9 aa, synthetic construct
  source 1..9: note = Seed: FVSNGTHWF
FWSNGTHWF

SEQ ID NO: 26234 - protein, 9 aa, synthetic construct
  source 1..9: note = Seed: FVSNGTHWF
FWSNGTHWI

SEQ ID NO: 26235 - protein, 9 aa, synthetic construct
  source 1..9: note = Seed: FVSNGTHWF
FWSNGTHWL

SEQ ID NO: 26236 - protein, 9 aa, synthetic construct
  source 1..9: note = Seed: FVSNGTHWF
FWSNGTHWM

SEQ ID NO: 26237 - protein, 9 aa, synthetic construct
  source 1..9: note = Seed: FVSNGTHWF
FWSNGTHWW

SEQ ID NO: 26238 - protein, 9 aa, synthetic construct
  source 1..9: note = Seed: FVSNGTHWF
FWSNGTHWY

SEQ ID NO: 26239 - protein, 10 aa, synthetic construct
  source 1..10: note = Seed: FSSNVANYQK
FWSNVANYQR

SEQ ID NO: 26240 - protein, 9 aa, synthetic construct
  source 1..9: note = Seed: FFSNVTWFH
FWSNVTWFF

SEQ ID NO: 26241 - protein, 9 aa, synthetic construct
  source 1..9: note = Seed: FFSNVTWFH
FWSNVTWFK

SEQ ID NO: 26242 - protein, 9 aa, synthetic construct
  source 1..9: note = Seed: FFSNVTWFH
FWSNVTWFR

SEQ ID NO: 26243 - protein, 9 aa, synthetic construct
  source 1..9: note = Seed: FFSNVTWFH
FWSNVTWFY

SEQ ID NO: 26244 - protein, 11 aa, synthetic construct
  source 1..11: note = Seed: FISPYNSQNAV
FWSPYNSQNAA

SEQ ID NO: 26245 - protein, 11 aa, synthetic construct
  source 1..11: note = Seed: FISPYNSQNAV
FWSPYNSQNAL

SEQ ID NO: 26246 - protein, 11 aa, synthetic construct
  source 1..11: note = Seed: FISPYNSQNAV
FWSPYNSQNAM

SEQ ID NO: 26247 - protein, 9 aa, synthetic construct
  source 1..9: note = Seed: FFSYFAVHF
FWSYFAVHF

SEQ ID NO: 26248 - protein, 10 aa, synthetic construct
  source 1..10: note = Seed: FFSYFAVHFI
FWSYFAVHFA

SEQ ID NO: 26249 - protein, 10 aa, synthetic construct
  source 1..10: note = Seed: FFSYFAVHFI
FWSYFAVHFF

SEQ ID NO: 26250 - protein, 10 aa, synthetic construct
  source 1..10: note = Seed: FFSYFAVHFI
FWSYFAVHFI

SEQ ID NO: 26251 - protein, 10 aa, synthetic construct
  source 1..10: note = Seed: FFSYFAVHFI
FWSYFAVHFV

SEQ ID NO: 26252 - protein, 10 aa, synthetic construct
  source 1..10: note = Seed: FFSYFAVHFI
FWSYFAVHFW

SEQ ID NO: 26253 - protein, 10 aa, synthetic construct
  source 1..10: note = Seed: FFSYFAVHFI
FWSYFAVHFY

SEQ ID NO: 26254 - protein, 9 aa, synthetic construct
  source 1..9: note = Seed: FFSYFAVHF
FWSYFAVHM

SEQ ID NO: 26255 - protein, 9 aa, synthetic construct
  source 1..9: note = Seed: FFSYFAVHF
FWSYFAVHY

SEQ ID NO: 26256 - protein, 10 aa, synthetic construct
  source 1..10: note = Seed: FVTHSKGLYR
FWTHSKGLYR

SEQ ID NO: 26257 - protein, 10 aa, synthetic construct
  source 1..10: note = Seed: FDTYNLWNTF
FWTYNLWNTF

SEQ ID NO: 26258 - protein, 10 aa, synthetic construct
  source 1..10: note = Seed: FDTYNLWNTF
FWTYNLWNTL

SEQ ID NO: 26259 - protein, 10 aa, synthetic construct
  source 1..10: note = Seed: FDTYNLWNTF
FWTYNLWNTW

SEQ ID NO: 26260 - protein, 10 aa, synthetic construct
  source 1..10: note = Seed: FDTYNLWNTF
FWTYNLWNTY

SEQ ID NO: 26261 - protein, 9 aa, synthetic construct
  source 1..9: note = Seed: FAVDAAKAY
FWVDAAKAF

SEQ ID NO: 26262 - protein, 9 aa, synthetic construct
  source 1..9: note = Seed: FAVDAAKAY
FWVDAAKAI

SEQ ID NO: 26263 - protein, 9 aa, synthetic construct
  source 1..9: note = Seed: FAVDAAKAY
FWVDAAKAL

SEQ ID NO: 26264 - protein, 9 aa, synthetic construct
  source 1..9: note = Seed: FAVDAAKAY
FWVDAAKAM

SEQ ID NO: 26265 - protein, 9 aa, synthetic construct
  source 1..9: note = Seed: FAVDAAKAY
FWVDAAKAY

SEQ ID NO: 26266 - protein, 10 aa, synthetic construct
  source 1..10: note = Seed: FAVDAAKAYK
FWVDAAKAYR

SEQ ID NO: 26267 - protein, 10 aa, synthetic construct
  source 1..10: note = Seed: FKVSIWNLDY
FWVSIWNLDY

SEQ ID NO: 26268 - protein, 9 aa, synthetic construct
  source 1..9: note = Seed: FVVSTGYHF
FWVSTGYHF

SEQ ID NO: 26269 - protein, 10 aa, synthetic construct
  source 1..10: note = Seed: FVVSTGYHFR
FWVSTGYHFK

SEQ ID NO: 26270 - protein, 10 aa, synthetic construct
  source 1..10: note = Seed: FVVSTGYHFR
FWVSTGYHFR

SEQ ID NO: 26271 - protein, 9 aa, synthetic construct
  source 1..9: note = Seed: FVVSTGYHF
FWVSTGYHI

SEQ ID NO: 26272 - protein, 9 aa, synthetic construct
  source 1..9: note = Seed: FVVSTGYHF
FWVSTGYHL

SEQ ID NO: 26273 - protein, 9 aa, synthetic construct
  source 1..9: note = Seed: FVVSTGYHF
FWVSTGYHM

SEQ ID NO: 26274 - protein, 9 aa, synthetic construct
  source 1..9: note = Seed: FVVSTGYHF
FWVSTGYHW

SEQ ID NO: 26275 - protein, 9 aa, synthetic construct
  source 1..9: note = Seed: FVVSTGYHF
FWVSTGYHY

SEQ ID NO: 26276 - protein, 9 aa, synthetic construct
  source 1..9: note = Seed: FYWFFSNYL
FWWFFSNYF

SEQ ID NO: 26277 - protein, 10 aa, synthetic construct
  source 1..10: note = Seed: FYWFFSNYLK
FWWFFSNYLF

SEQ ID NO: 26278 - protein, 10 aa, synthetic construct
  source 1..10: note = Seed: FYWFFSNYLK
FWWFFSNYLK

SEQ ID NO: 26279 - protein, 10 aa, synthetic construct
  source 1..10: note = Seed: FYWFFSNYLK
FWWFFSNYLR

SEQ ID NO: 26280 - protein, 10 aa, synthetic construct
  source 1..10: note = Seed: FYWFFSNYLK
FWWFFSNYLY

SEQ ID NO: 26281 - protein, 9 aa, synthetic construct
  source 1..9: note = Seed: FYWFFSNYL
FWWFFSNYY

SEQ ID NO: 26282 - protein, 10 aa, synthetic construct
  source 1..10: note = Seed: FLWLLWPVTL
FWWLLWPVTF

SEQ ID NO: 26283 - protein, 11 aa, synthetic construct
  source 1..11: note = Seed: FLWLLWPVTLA
FWWLLWPVTLI

SEQ ID NO: 26284 - protein, 11 aa, synthetic construct
  source 1..11: note = Seed: FLWLLWPVTLA
FWWLLWPVTLL

SEQ ID NO: 26285 - protein, 11 aa, synthetic construct
  source 1..11: note = Seed: FLWLLWPVTLA
FWWLLWPVTLV

SEQ ID NO: 26286 - protein, 9 aa, synthetic construct
  source 1..9: note = Seed: FYYLGTGPE
FWYLGTGPF

SEQ ID NO: 26287 - protein, 9 aa, synthetic construct
  source 1..9: note = Seed: FYYLGTGPE
FWYLGTGPI

SEQ ID NO: 26288 - protein, 9 aa, synthetic construct
  source 1..9: note = Seed: FYYLGTGPE
FWYLGTGPL

SEQ ID NO: 26289 - protein, 9 aa, synthetic construct
  source 1..9: note = Seed: FYYLGTGPE
FWYLGTGPM

SEQ ID NO: 26290 - protein, 9 aa, synthetic construct
  source 1..9: note = Seed: FYYLGTGPE
FWYLGTGPV

SEQ ID NO: 26291 - protein, 9 aa, synthetic construct
  source 1..9: note = Seed: FYYLGTGPE
FWYLGTGPW

SEQ ID NO: 26292 - protein, 9 aa, synthetic construct
  source 1..9: note = Seed: FYYLGTGPE
FWYLGTGPY

SEQ ID NO: 26293 - protein, 9 aa, synthetic construct
  source 1..9: note = Seed: FCYMHHMEL
FWYMHHMEF

SEQ ID NO: 26294 - protein, 9 aa, synthetic construct
  source 1..9: note = Seed: FCYMHHMEL
FWYMHHMEI

SEQ ID NO: 26295 - protein, 9 aa, synthetic construct
  source 1..9: note = Seed: FCYMHHMEL
FWYMHHMEL

SEQ ID NO: 26296 - protein, 9 aa, synthetic construct
  source 1..9: note = Seed: FCYMHHMEL
FWYMHHMEM

SEQ ID NO: 26297 - protein, 9 aa, synthetic construct
  source 1..9: note = Seed: FCYMHHMEL
FWYMHHMEV

SEQ ID NO: 26298 - protein, 9 aa, synthetic construct
  source 1..9: note = Seed: FCYMHHMEL
FWYMHHMEY

SEQ ID NO: 26299 - protein, 9 aa, synthetic construct
  source 1..9: note = Seed: FRYMNSQGL
FWYMNSQGF

SEQ ID NO: 26300 - protein, 9 aa, synthetic construct
  source 1..9: note = Seed: FRYMNSQGL
FWYMNSQGI

SEQ ID NO: 26301 - protein, 9 aa, synthetic construct
  source 1..9: note = Seed: FRYMNSQGL
FWYMNSQGL

SEQ ID NO: 26302 - protein, 9 aa, synthetic construct
  source 1..9: note = Seed: FRYMNSQGL
FWYMNSQGM

SEQ ID NO: 26303 - protein, 9 aa, synthetic construct
  source 1..9: note = Seed: FRYMNSQGL
FWYMNSQGV

SEQ ID NO: 26304 - protein, 9 aa, synthetic construct
  source 1..9: note = Seed: FRYMNSQGL
FWYMNSQGY

SEQ ID NO: 26305 - protein, 9 aa, synthetic construct
  source 1..9: note = Seed: FYYVWKSYV
FWYVWKSYF

SEQ ID NO: 26306 - protein, 9 aa, synthetic construct
  source 1..9: note = Seed: FYYVWKSYV
FWYVWKSYL

SEQ ID NO: 26307 - protein, 9 aa, synthetic construct
  source 1..9: note = Seed: FYYVWKSYV
FWYVWKSYM

SEQ ID NO: 26308 - protein, 10 aa, synthetic construct
  source 1..10: note = Seed: FYYVWKSYVH
FWYVWKSYVM

SEQ ID NO: 26309 - protein, 10 aa, synthetic construct
  source 1..10: note = Seed: FYYVWKSYVH
FWYVWKSYVY

SEQ ID NO: 26310 - protein, 9 aa, synthetic construct
  source 1..9: note = Seed: FYYVWKSYV
FWYVWKSYW

SEQ ID NO: 26311 - protein, 9 aa, synthetic construct
  source 1..9: note = Seed: FYYVWKSYV
FWYVWKSYY

SEQ ID NO: 26312 - protein, 9 aa, synthetic construct
  source 1..9: note = Seed: FFYYSDSPC
FWYYSDSPF

SEQ ID NO: 26313 - protein, 9 aa, synthetic construct
  source 1..9: note = Seed: FFYYSDSPC
FWYYSDSPI

SEQ ID NO: 26314 - protein, 9 aa, synthetic construct
  source 1..9: note = Seed: FFYYSDSPC
FWYYSDSPL

SEQ ID NO: 26315 - protein, 9 aa, synthetic construct
  source 1..9: note = Seed: FFYYSDSPC
FWYYSDSPM

SEQ ID NO: 26316 - protein, 9 aa, synthetic construct
  source 1..9: note = Seed: FFYYSDSPC
FWYYSDSPV

SEQ ID NO: 26317 - protein, 9 aa, synthetic construct
  source 1..9: note = Seed: FFYYSDSPC
FWYYSDSPW

SEQ ID NO: 26318 - protein, 9 aa, synthetic construct
  source 1..9: note = Seed: FFYYSDSPC
FWYYSDSPY

SEQ ID NO: 26319 - protein, 9 aa, synthetic construct
  source 1..9: note = Seed: FVAAIFYLI
FYAAIFYLF

SEQ ID NO: 26320 - protein, 9 aa, synthetic construct
  source 1..9: note = Seed: FVAAIFYLI
FYAAIFYLH

SEQ ID NO: 26321 - protein, 9 aa, synthetic construct
  source 1..9: note = Seed: FVAAIFYLI
FYAAIFYLI

SEQ ID NO: 26322 - protein, 9 aa, synthetic construct
  source 1..9: note = Seed: FVAAIFYLI
FYAAIFYLK

SEQ ID NO: 26323 - protein, 9 aa, synthetic construct
  source 1..9: note = Seed: FVAAIFYLI
FYAAIFYLL

SEQ ID NO: 26324 - protein, 9 aa, synthetic construct
  source 1..9: note = Seed: FVAAIFYLI
FYAAIFYLM

SEQ ID NO: 26325 - protein, 9 aa, synthetic construct
  source 1..9: note = Seed: FVAAIFYLI
FYAAIFYLR

SEQ ID NO: 26326 - protein, 9 aa, synthetic construct
  source 1..9: note = Seed: FVAAIFYLI
FYAAIFYLV

SEQ ID NO: 26327 - protein, 9 aa, synthetic construct
  source 1..9: note = Seed: FVAAIFYLI
FYAAIFYLW

SEQ ID NO: 26328 - protein, 9 aa, synthetic construct
  source 1..9: note = Seed: FVAAIFYLI
FYAAIFYLY

SEQ ID NO: 26329 - protein, 10 aa, synthetic construct
  source 1..10: note = Seed: FCAFAVDAAK
FYAFAVDAAK

SEQ ID NO: 26330 - protein, 10 aa, synthetic construct
  source 1..10: note = Seed: FCAFAVDAAK
FYAFAVDAAR

SEQ ID NO: 26331 - protein, 10 aa, synthetic construct
  source 1..10: note = Seed: FIASFRLFAR
FYASFRLFAK

SEQ ID NO: 26332 - protein, 10 aa, synthetic construct
  source 1..10: note = Seed: FIASFRLFAR
FYASFRLFAR

SEQ ID NO: 26333 - protein, 9 aa, synthetic construct
  source 1..9: note = Seed: FFASFYYVW
FYASFYYVF

SEQ ID NO: 26334 - protein, 9 aa, synthetic construct
  source 1..9: note = Seed: FFASFYYVW
FYASFYYVI

SEQ ID NO: 26335 - protein, 9 aa, synthetic construct
  source 1..9: note = Seed: FFASFYYVW
FYASFYYVL

SEQ ID NO: 26336 - protein, 9 aa, synthetic construct
  source 1..9: note = Seed: FFASFYYVW
FYASFYYVM

SEQ ID NO: 26337 - protein, 9 aa, synthetic construct
  source 1..9: note = Seed: FFASFYYVW
FYASFYYVV

SEQ ID NO: 26338 - protein, 9 aa, synthetic construct
  source 1..9: note = Seed: FFASFYYVW
FYASFYYVW

SEQ ID NO: 26339 - protein, 10 aa, synthetic construct
  source 1..10: note = Seed: FFASFYYVWK
FYASFYYVWK

SEQ ID NO: 26340 - protein, 10 aa, synthetic construct
  source 1..10: note = Seed: FFASFYYVWK
FYASFYYVWR

SEQ ID NO: 26341 - protein, 9 aa, synthetic construct
  source 1..9: note = Seed: FFASFYYVW
FYASFYYVY

SEQ ID NO: 26342 - protein, 9 aa, synthetic construct
  source 1..9: note = Seed: FNATRFASV
FYATRFASL

SEQ ID NO: 26343 - protein, 10 aa, synthetic construct
  source 1..10: note = Seed: FNATRFASVY
FYATRFASVF

SEQ ID NO: 26344 - protein, 10 aa, synthetic construct
  source 1..10: note = Seed: FNATRFASVY
FYATRFASVM

SEQ ID NO: 26345 - protein, 10 aa, synthetic construct
  source 1..10: note = Seed: FNATRFASVY
FYATRFASVY

SEQ ID NO: 26346 - protein, 9 aa, synthetic construct
  source 1..9: note = Seed: FSAVGNICY
FYAVGNICY

SEQ ID NO: 26347 - protein, 10 aa, synthetic construct
  source 1..10: note = Seed: FSAVGNICYT
FYAVGNICYV

SEQ ID NO: 26348 - protein, 9 aa, synthetic construct
  source 1..9: note = Seed: FLAYILFTR
FYAYILFTK

SEQ ID NO: 26349 - protein, 9 aa, synthetic construct
  source 1..9: note = Seed: FLAYILFTR
FYAYILFTR

SEQ ID NO: 26350 - protein, 11 aa, synthetic construct
  source 1..11: note = Seed: FLAYILFTRFF
FYAYILFTRFF

SEQ ID NO: 26351 - protein, 10 aa, synthetic construct
  source 1..10: note = Seed: FLAYILFTRF
FYAYILFTRR

SEQ ID NO: 26352 - protein, 11 aa, synthetic construct
  source 1..11: note = Seed: FPDLNGDVVAI
FYDLNGDVVAI

SEQ ID NO: 26353 - protein, 11 aa, synthetic construct
  source 1..11: note = Seed: FPDLNGDVVAI
FYDLNGDVVAL

SEQ ID NO: 26354 - protein, 11 aa, synthetic construct
  source 1..11: note = Seed: FPDLNGDVVAI
FYDLNGDVVAV

SEQ ID NO: 26355 - protein, 8 aa, synthetic construct
  source 1..8: note = Seed: FYEDFLEY
FYEDFLEM

SEQ ID NO: 26356 - protein, 9 aa, synthetic construct
  source 1..9: note = Seed: FVFKNIDGY
FYFKNIDGY

SEQ ID NO: 26357 - protein, 10 aa, synthetic construct
  source 1..10: note = Seed: FVFKNIDGYF
FYFKNIDGYF

SEQ ID NO: 26358 - protein, 11 aa, synthetic construct
  source 1..11: note = Seed: FVFKNIDGYFK
FYFKNIDGYFR

SEQ ID NO: 26359 - protein, 10 aa, synthetic construct
  source 1..10: note = Seed: FVFKNIDGYF
FYFKNIDGYI

SEQ ID NO: 26360 - protein, 10 aa, synthetic construct
  source 1..10: note = Seed: FVFKNIDGYF
FYFKNIDGYL

SEQ ID NO: 26361 - protein, 10 aa, synthetic construct
  source 1..10: note = Seed: FVFKNIDGYF
FYFKNIDGYM

SEQ ID NO: 26362 - protein, 10 aa, synthetic construct
  source 1..10: note = Seed: FVFKNIDGYF
FYFKNIDGYW

SEQ ID NO: 26363 - protein, 10 aa, synthetic construct
  source 1..10: note = Seed: FVFKNIDGYF
FYFKNIDGYY

SEQ ID NO: 26364 - protein, 10 aa, synthetic construct
  source 1..10: note = Seed: FPFNKWGKAR
FYFNKWGKAR

SEQ ID NO: 26365 - protein, 9 aa, synthetic construct
  source 1..9: note = Seed: FLFVAAIFY
FYFVAAIFY

SEQ ID NO: 26366 - protein, 10 aa, synthetic construct
  source 1..10: note = Seed: FLFVAAIFYL
FYFVAAIFYF

SEQ ID NO: 26367 - protein, 10 aa, synthetic construct
  source 1..10: note = Seed: FLFVAAIFYL
FYFVAAIFYY

SEQ ID NO: 26368 - protein, 10 aa, synthetic construct
  source 1..10: note = Seed: FKFVCDNIKF
FYFVCDNIKF

SEQ ID NO: 26369 - protein, 9 aa, synthetic construct
  source 1..9: note = Seed: FGGASCCLY
FYGASCCLY

SEQ ID NO: 26370 - protein, 9 aa, synthetic construct
  source 1..9: note = Seed: FLGYFCTCY
FYGYFCTCY

SEQ ID NO: 26371 - protein, 10 aa, synthetic construct
  source 1..10: note = Seed: FLGYFCTCYF
FYGYFCTCYY

SEQ ID NO: 26372 - protein, 9 aa, synthetic construct
  source 1..9: note = Seed: FLHFLPRVF
FYHFLPRVF

SEQ ID NO: 26373 - protein, 9 aa, synthetic construct
  source 1..9: note = Seed: FLHFLPRVF
FYHFLPRVI

SEQ ID NO: 26374 - protein, 9 aa, synthetic construct
  source 1..9: note = Seed: FLHFLPRVF
FYHFLPRVL

SEQ ID NO: 26375 - protein, 9 aa, synthetic construct
  source 1..9: note = Seed: FLHFLPRVF
FYHFLPRVM

SEQ ID NO: 26376 - protein, 9 aa, synthetic construct
  source 1..9: note = Seed: FLHFLPRVF
FYHFLPRVV

SEQ ID NO: 26377 - protein, 9 aa, synthetic construct
  source 1..9: note = Seed: FLHFLPRVF
FYHFLPRVY

SEQ ID NO: 26378 - protein, 8 aa, synthetic construct
  source 1..8: note = Seed: FYILPSII
FYILPSIF

SEQ ID NO: 26379 - protein, 8 aa, synthetic construct
  source 1..8: note = Seed: FYILPSII
FYILPSIL

SEQ ID NO: 26380 - protein, 8 aa, synthetic construct
  source 1..8: note = Seed: FYILPSII
FYILPSIM

SEQ ID NO: 26381 - protein, 8 aa, synthetic construct
  source 1..8: note = Seed: FYILPSII
FYILPSIY

SEQ ID NO: 26382 - protein, 9 aa, synthetic construct
  source 1..9: note = Seed: FTINCQEPK
FYINCQEPR

SEQ ID NO: 26383 - protein, 8 aa, synthetic construct
  source 1..8: note = Seed: FFITGNTL
FYITGNTF

SEQ ID NO: 26384 - protein, 8 aa, synthetic construct
  source 1..8: note = Seed: FFITGNTL
FYITGNTI

SEQ ID NO: 26385 - protein, 8 aa, synthetic construct
  source 1..8: note = Seed: FFITGNTL
FYITGNTL

SEQ ID NO: 26386 - protein, 8 aa, synthetic construct
  source 1..8: note = Seed: FFITGNTL
FYITGNTM

SEQ ID NO: 26387 - protein, 8 aa, synthetic construct
  source 1..8: note = Seed: FFITGNTL
FYITGNTV

SEQ ID NO: 26388 - protein, 8 aa, synthetic construct
  source 1..8: note = Seed: FFITGNTL
FYITGNTY

SEQ ID NO: 26389 - protein, 10 aa, synthetic construct
  source 1..10: note = Seed: FKIYSKHTPI
FYIYSKHTPA

SEQ ID NO: 26390 - protein, 10 aa, synthetic construct
  source 1..10: note = Seed: FKIYSKHTPI
FYIYSKHTPF

SEQ ID NO: 26391 - protein, 10 aa, synthetic construct
  source 1..10: note = Seed: FKIYSKHTPI
FYIYSKHTPI

SEQ ID NO: 26392 - protein, 10 aa, synthetic construct
  source 1..10: note = Seed: FKIYSKHTPI
FYIYSKHTPL

SEQ ID NO: 26393 - protein, 10 aa, synthetic construct
  source 1..10: note = Seed: FKIYSKHTPI
FYIYSKHTPV

SEQ ID NO: 26394 - protein, 10 aa, synthetic construct
  source 1..10: note = Seed: FKIYSKHTPI
FYIYSKHTPY

SEQ ID NO: 26395 - protein, 9 aa, synthetic construct
  source 1..9: note = Seed: FYKENSYTT
FYKENSYTA

SEQ ID NO: 26396 - protein, 9 aa, synthetic construct
  source 1..9: note = Seed: FYKENSYTT
FYKENSYTF

SEQ ID NO: 26397 - protein, 9 aa, synthetic construct
  source 1..9: note = Seed: FYKENSYTT
FYKENSYTH

SEQ ID NO: 26398 - protein, 9 aa, synthetic construct
  source 1..9: note = Seed: FYKENSYTT
FYKENSYTI

SEQ ID NO: 26399 - protein, 9 aa, synthetic construct
  source 1..9: note = Seed: FYKENSYTT
FYKENSYTL

SEQ ID NO: 26400 - protein, 9 aa, synthetic construct
  source 1..9: note = Seed: FYKENSYTT
FYKENSYTM

SEQ ID NO: 26401 - protein, 11 aa, synthetic construct
  source 1..11: note = Seed: FYKENSYTTTI
FYKENSYTTTF

SEQ ID NO: 26402 - protein, 11 aa, synthetic construct
  source 1..11: note = Seed: FYKENSYTTTI
FYKENSYTTTL

SEQ ID NO: 26403 - protein, 11 aa, synthetic construct
  source 1..11: note = Seed: FYKENSYTTTI
FYKENSYTTTM

SEQ ID NO: 26404 - protein, 11 aa, synthetic construct
  source 1..11: note = Seed: FYKENSYTTTI
FYKENSYTTTW

SEQ ID NO: 26405 - protein, 11 aa, synthetic construct
  source 1..11: note = Seed: FYKENSYTTTI
FYKENSYTTTY

SEQ ID NO: 26406 - protein, 9 aa, synthetic construct
  source 1..9: note = Seed: FYKENSYTT
FYKENSYTV

SEQ ID NO: 26407 - protein, 9 aa, synthetic construct
  source 1..9: note = Seed: FYKENSYTT
FYKENSYTW

SEQ ID NO: 26408 - protein, 9 aa, synthetic construct
  source 1..9: note = Seed: FYKENSYTT
FYKENSYTY

SEQ ID NO: 26409 - protein, 10 aa, synthetic construct
  source 1..10: note = Seed: FIKGLNNLNR
FYKGLNNLNR

SEQ ID NO: 26410 - protein, 9 aa, synthetic construct
  source 1..9: note = Seed: FVKHKHAFL
FYKHKHAFF

SEQ ID NO: 26411 - protein, 9 aa, synthetic construct
  source 1..9: note = Seed: FVKHKHAFL
FYKHKHAFL

SEQ ID NO: 26412 - protein, 9 aa, synthetic construct
  source 1..9: note = Seed: FVKHKHAFL
FYKHKHAFM

SEQ ID NO: 26413 - protein, 9 aa, synthetic construct
  source 1..9: note = Seed: FVKHKHAFL
FYKHKHAFY

SEQ ID NO: 26414 - protein, 9 aa, synthetic construct
  source 1..9: note = Seed: FRKSNLKPF
FYKSNLKPF

SEQ ID NO: 26415 - protein, 9 aa, synthetic construct
  source 1..9: note = Seed: FRKSNLKPF
FYKSNLKPI

SEQ ID NO: 26416 - protein, 9 aa, synthetic construct
  source 1..9: note = Seed: FRKSNLKPF
FYKSNLKPL

SEQ ID NO: 26417 - protein, 9 aa, synthetic construct
  source 1..9: note = Seed: FRKSNLKPF
FYKSNLKPM

SEQ ID NO: 26418 - protein, 9 aa, synthetic construct
  source 1..9: note = Seed: FRKSNLKPF
FYKSNLKPV

SEQ ID NO: 26419 - protein, 9 aa, synthetic construct
  source 1..9: note = Seed: FRKSNLKPF
FYKSNLKPY

SEQ ID NO: 26420 - protein, 9 aa, synthetic construct
  source 1..9: note = Seed: FYLITPVHV
FYLITPVHF

SEQ ID NO: 26421 - protein, 9 aa, synthetic construct
  source 1..9: note = Seed: FYLITPVHV
FYLITPVHI

SEQ ID NO: 26422 - protein, 9 aa, synthetic construct
  source 1..9: note = Seed: FYLITPVHV
FYLITPVHL

SEQ ID NO: 26423 - protein, 9 aa, synthetic construct
  source 1..9: note = Seed: FYLITPVHV
FYLITPVHM

SEQ ID NO: 26424 - protein, 9 aa, synthetic construct
  source 1..9: note = Seed: FYLITPVHV
FYLITPVHW

SEQ ID NO: 26425 - protein, 9 aa, synthetic construct
  source 1..9: note = Seed: FYLITPVHV
FYLITPVHY

SEQ ID NO: 26426 - protein, 10 aa, synthetic construct
  source 1..10: note = Seed: FKLKDCVMYA
FYLKDCVMYA

SEQ ID NO: 26427 - protein, 11 aa, synthetic construct
  source 1..11: note = Seed: FKLKDCVMYAS
FYLKDCVMYAV

SEQ ID NO: 26428 - protein, 10 aa, synthetic construct
  source 1..10: note = Seed: FKLKDCVMYA
FYLKDCVMYI

SEQ ID NO: 26429 - protein, 10 aa, synthetic construct
  source 1..10: note = Seed: FKLKDCVMYA
FYLKDCVMYL

SEQ ID NO: 26430 - protein, 10 aa, synthetic construct
  source 1..10: note = Seed: FKLKDCVMYA
FYLKDCVMYM

SEQ ID NO: 26431 - protein, 10 aa, synthetic construct
  source 1..10: note = Seed: FKLKDCVMYA
FYLKDCVMYS

SEQ ID NO: 26432 - protein, 10 aa, synthetic construct
  source 1..10: note = Seed: FKLKDCVMYA
FYLKDCVMYT

SEQ ID NO: 26433 - protein, 10 aa, synthetic construct
  source 1..10: note = Seed: FKLKDCVMYA
FYLKDCVMYV

SEQ ID NO: 26434 - protein, 10 aa, synthetic construct
  source 1..10: note = Seed: FPLKLRGTAV
FYLKLRGTAF

SEQ ID NO: 26435 - protein, 10 aa, synthetic construct
  source 1..10: note = Seed: FPLKLRGTAV
FYLKLRGTAI

SEQ ID NO: 26436 - protein, 10 aa, synthetic construct
  source 1..10: note = Seed: FPLKLRGTAV
FYLKLRGTAL

SEQ ID NO: 26437 - protein, 10 aa, synthetic construct
  source 1..10: note = Seed: FPLKLRGTAV
FYLKLRGTAM

SEQ ID NO: 26438 - protein, 10 aa, synthetic construct
  source 1..10: note = Seed: FPLKLRGTAV
FYLKLRGTAV

SEQ ID NO: 26439 - protein, 11 aa, synthetic construct
  source 1..11: note = Seed: FPLKLRGTAVM
FYLKLRGTAVF

SEQ ID NO: 26440 - protein, 11 aa, synthetic construct
  source 1..11: note = Seed: FPLKLRGTAVM
FYLKLRGTAVY

SEQ ID NO: 26441 - protein, 9 aa, synthetic construct
  source 1..9: note = Seed: FLLNKEMYL
FYLNKEMYF

SEQ ID NO: 26442 - protein, 9 aa, synthetic construct
  source 1..9: note = Seed: FLLNKEMYL
FYLNKEMYI

SEQ ID NO: 26443 - protein, 9 aa, synthetic construct
  source 1..9: note = Seed: FLLNKEMYL
FYLNKEMYL

SEQ ID NO: 26444 - protein, 10 aa, synthetic construct
  source 1..10: note = Seed: FLLNKEMYLK
FYLNKEMYLA

SEQ ID NO: 26445 - protein, 10 aa, synthetic construct
  source 1..10: note = Seed: FLLNKEMYLK
FYLNKEMYLI

SEQ ID NO: 26446 - protein, 10 aa, synthetic construct
  source 1..10: note = Seed: FLLNKEMYLK
FYLNKEMYLK

SEQ ID NO: 26447 - protein, 10 aa, synthetic construct
  source 1..10: note = Seed: FLLNKEMYLK
FYLNKEMYLL

SEQ ID NO: 26448 - protein, 10 aa, synthetic construct
  source 1..10: note = Seed: FLLNKEMYLK
FYLNKEMYLM

SEQ ID NO: 26449 - protein, 10 aa, synthetic construct
  source 1..10: note = Seed: FLLNKEMYLK
FYLNKEMYLR

SEQ ID NO: 26450 - protein, 10 aa, synthetic construct
  source 1..10: note = Seed: FLLNKEMYLK
FYLNKEMYLV

SEQ ID NO: 26451 - protein, 9 aa, synthetic construct
  source 1..9: note = Seed: FLLNKEMYL
FYLNKEMYM

SEQ ID NO: 26452 - protein, 9 aa, synthetic construct
  source 1..9: note = Seed: FLLNKEMYL
FYLNKEMYV

SEQ ID NO: 26453 - protein, 9 aa, synthetic construct
  source 1..9: note = Seed: FLLNKEMYL
FYLNKEMYY

SEQ ID NO: 26454 - protein, 10 aa, synthetic construct
  source 1..10: note = Seed: FRLTLGVYDY
FYLTLGVYDY

SEQ ID NO: 26455 - protein, 11 aa, synthetic construct
  source 1..11: note = Seed: FRLTLGVYDYL
FYLTLGVYDYV

SEQ ID NO: 26456 - protein, 10 aa, synthetic construct
  source 1..10: note = Seed: FYLTNDVSFL
FYLTNDVSFA

SEQ ID NO: 26457 - protein, 10 aa, synthetic construct
  source 1..10: note = Seed: FYLTNDVSFL
FYLTNDVSFF

SEQ ID NO: 26458 - protein, 10 aa, synthetic construct
  source 1..10: note = Seed: FYLTNDVSFL
FYLTNDVSFI

SEQ ID NO: 26459 - protein, 11 aa, synthetic construct
  source 1..11: note = Seed: FYLTNDVSFLA
FYLTNDVSFLI

SEQ ID NO: 26460 - protein, 11 aa, synthetic construct
  source 1..11: note = Seed: FYLTNDVSFLA
FYLTNDVSFLL

SEQ ID NO: 26461 - protein, 11 aa, synthetic construct
  source 1..11: note = Seed: FYLTNDVSFLA
FYLTNDVSFLM

SEQ ID NO: 26462 - protein, 11 aa, synthetic construct
  source 1..11: note = Seed: FYLTNDVSFLA
FYLTNDVSFLV

SEQ ID NO: 26463 - protein, 10 aa, synthetic construct
  source 1..10: note = Seed: FYLTNDVSFL
FYLTNDVSFM

SEQ ID NO: 26464 - protein, 10 aa, synthetic construct
  source 1..10: note = Seed: FYLTNDVSFL
FYLTNDVSFV

SEQ ID NO: 26465 - protein, 10 aa, synthetic construct
  source 1..10: note = Seed: FYLTNDVSFL
FYLTNDVSFW

SEQ ID NO: 26466 - protein, 10 aa, synthetic construct
  source 1..10: note = Seed: FYLTNDVSFL
FYLTNDVSFY

SEQ ID NO: 26467 - protein, 9 aa, synthetic construct
  source 1..9: note = Seed: FYLTNDVSF
FYLTNDVSI

SEQ ID NO: 26468 - protein, 9 aa, synthetic construct
  source 1..9: note = Seed: FYLTNDVSF
FYLTNDVSL

SEQ ID NO: 26469 - protein, 9 aa, synthetic construct
  source 1..9: note = Seed: FYLTNDVSF
FYLTNDVSM

SEQ ID NO: 26470 - protein, 9 aa, synthetic construct
  source 1..9: note = Seed: FYLTNDVSF
FYLTNDVSV

SEQ ID NO: 26471 - protein, 9 aa, synthetic construct
  source 1..9: note = Seed: FYLTNDVSF
FYLTNDVSW

SEQ ID NO: 26472 - protein, 9 aa, synthetic construct
  source 1..9: note = Seed: FYLTNDVSF
FYLTNDVSY

SEQ ID NO: 26473 - protein, 10 aa, synthetic construct
  source 1..10: note = Seed: FQLTPIAVQM
FYLTPIAVQA

SEQ ID NO: 26474 - protein, 10 aa, synthetic construct
  source 1..10: note = Seed: FQLTPIAVQM
FYLTPIAVQI

SEQ ID NO: 26475 - protein, 10 aa, synthetic construct
  source 1..10: note = Seed: FQLTPIAVQM
FYLTPIAVQL

SEQ ID NO: 26476 - protein, 10 aa, synthetic construct
  source 1..10: note = Seed: FQLTPIAVQM
FYLTPIAVQM

SEQ ID NO: 26477 - protein, 10 aa, synthetic construct
  source 1..10: note = Seed: FQLTPIAVQM
FYLTPIAVQV

SEQ ID NO: 26478 - protein, 10 aa, synthetic construct
  source 1..10: note = Seed: FELTSMKYFV
FYLTSMKYFA

SEQ ID NO: 26479 - protein, 10 aa, synthetic construct
  source 1..10: note = Seed: FELTSMKYFV
FYLTSMKYFI

SEQ ID NO: 26480 - protein, 10 aa, synthetic construct
  source 1..10: note = Seed: FELTSMKYFV
FYLTSMKYFL

SEQ ID NO: 26481 - protein, 10 aa, synthetic construct
  source 1..10: note = Seed: FELTSMKYFV
FYLTSMKYFM

SEQ ID NO: 26482 - protein, 10 aa, synthetic construct
  source 1..10: note = Seed: FELTSMKYFV
FYLTSMKYFV

SEQ ID NO: 26483 - protein, 10 aa, synthetic construct
  source 1..10: note = Seed: FGLVAEWFLA
FYLVAEWFLA

SEQ ID NO: 26484 - protein, 11 aa, synthetic construct
  source 1..11: note = Seed: FGLVAEWFLAY
FYLVAEWFLAY

SEQ ID NO: 26485 - protein, 10 aa, synthetic construct
  source 1..10: note = Seed: FGLVAEWFLA
FYLVAEWFLI

SEQ ID NO: 26486 - protein, 10 aa, synthetic construct
  source 1..10: note = Seed: FGLVAEWFLA
FYLVAEWFLL

SEQ ID NO: 26487 - protein, 10 aa, synthetic construct
  source 1..10: note = Seed: FGLVAEWFLA
FYLVAEWFLM

SEQ ID NO: 26488 - protein, 10 aa, synthetic construct
  source 1..10: note = Seed: FGLVAEWFLA
FYLVAEWFLV

SEQ ID NO: 26489 - protein, 10 aa, synthetic construct
  source 1..10: note = Seed: FVLWAHGFEL
FYLWAHGFEA

SEQ ID NO: 26490 - protein, 10 aa, synthetic construct
  source 1..10: note = Seed: FVLWAHGFEL
FYLWAHGFEI

SEQ ID NO: 26491 - protein, 10 aa, synthetic construct
  source 1..10: note = Seed: FVLWAHGFEL
FYLWAHGFEL

SEQ ID NO: 26492 - protein, 11 aa, synthetic construct
  source 1..11: note = Seed: FVLWAHGFELT
FYLWAHGFELA

SEQ ID NO: 26493 - protein, 11 aa, synthetic construct
  source 1..11: note = Seed: FVLWAHGFELT
FYLWAHGFELC

SEQ ID NO: 26494 - protein, 11 aa, synthetic construct
  source 1..11: note = Seed: FVLWAHGFELT
FYLWAHGFELD

SEQ ID NO: 26495 - protein, 11 aa, synthetic construct
  source 1..11: note = Seed: FVLWAHGFELT
FYLWAHGFELE

SEQ ID NO: 26496 - protein, 11 aa, synthetic construct
  source 1..11: note = Seed: FVLWAHGFELT
FYLWAHGFELF

SEQ ID NO: 26497 - protein, 11 aa, synthetic construct
  source 1..11: note = Seed: FVLWAHGFELT
FYLWAHGFELG

SEQ ID NO: 26498 - protein, 11 aa, synthetic construct
  source 1..11: note = Seed: FVLWAHGFELT
FYLWAHGFELH

SEQ ID NO: 26499 - protein, 11 aa, synthetic construct
  source 1..11: note = Seed: FVLWAHGFELT
FYLWAHGFELI

SEQ ID NO: 26500 - protein, 11 aa, synthetic construct
  source 1..11: note = Seed: FVLWAHGFELT
FYLWAHGFELK

SEQ ID NO: 26501 - protein, 11 aa, synthetic construct
  source 1..11: note = Seed: FVLWAHGFELT
FYLWAHGFELL

SEQ ID NO: 26502 - protein, 11 aa, synthetic construct
  source 1..11: note = Seed: FVLWAHGFELT
FYLWAHGFELM

SEQ ID NO: 26503 - protein, 11 aa, synthetic construct
  source 1..11: note = Seed: FVLWAHGFELT
FYLWAHGFELN

SEQ ID NO: 26504 - protein, 11 aa, synthetic construct
  source 1..11: note = Seed: FVLWAHGFELT
FYLWAHGFELP

SEQ ID NO: 26505 - protein, 11 aa, synthetic construct
  source 1..11: note = Seed: FVLWAHGFELT
FYLWAHGFELQ

SEQ ID NO: 26506 - protein, 11 aa, synthetic construct
  source 1..11: note = Seed: FVLWAHGFELT
FYLWAHGFELR

SEQ ID NO: 26507 - protein, 11 aa, synthetic construct
  source 1..11: note = Seed: FVLWAHGFELT
FYLWAHGFELS

SEQ ID NO: 26508 - protein, 11 aa, synthetic construct
  source 1..11: note = Seed: FVLWAHGFELT
FYLWAHGFELT

SEQ ID NO: 26509 - protein, 11 aa, synthetic construct
  source 1..11: note = Seed: FVLWAHGFELT
FYLWAHGFELV

SEQ ID NO: 26510 - protein, 11 aa, synthetic construct
  source 1..11: note = Seed: FVLWAHGFELT
FYLWAHGFELW

SEQ ID NO: 26511 - protein, 11 aa, synthetic construct
  source 1..11: note = Seed: FVLWAHGFELT
FYLWAHGFELY

SEQ ID NO: 26512 - protein, 10 aa, synthetic construct
  source 1..10: note = Seed: FVLWAHGFEL
FYLWAHGFEM

SEQ ID NO: 26513 - protein, 10 aa, synthetic construct
  source 1..10: note = Seed: FVLWAHGFEL
FYLWAHGFES

SEQ ID NO: 26514 - protein, 10 aa, synthetic construct
  source 1..10: note = Seed: FVLWAHGFEL
FYLWAHGFET

SEQ ID NO: 26515 - protein, 10 aa, synthetic construct
  source 1..10: note = Seed: FVLWAHGFEL
FYLWAHGFEV

SEQ ID NO: 26516 - protein, 10 aa, synthetic construct
  source 1..10: note = Seed: FELWAKRNIK
FYLWAKRNIR

SEQ ID NO: 26517 - protein, 9 aa, synthetic construct
  source 1..9: note = Seed: FHLYLQYIR
FYLYLQYIR

SEQ ID NO: 26518 - protein, 10 aa, synthetic construct
  source 1..10: note = Seed: FSMMILSDDA
FYMMILSDDL

SEQ ID NO: 26519 - protein, 10 aa, synthetic construct
  source 1..10: note = Seed: FSMMILSDDA
FYMMILSDDV

SEQ ID NO: 26520 - protein, 10 aa, synthetic construct
  source 1..10: note = Seed: FKMNYQVNGY
FYMNYQVNGY

SEQ ID NO: 26521 - protein, 8 aa, synthetic construct
  source 1..8: note = Seed: FAMQMAYR
FYMQMAYR

SEQ ID NO: 26522 - protein, 9 aa, synthetic construct
  source 1..9: note = Seed: FAMQMAYRF
FYMQMAYRF

SEQ ID NO: 26523 - protein, 9 aa, synthetic construct
  source 1..9: note = Seed: FAMQMAYRF
FYMQMAYRI

SEQ ID NO: 26524 - protein, 9 aa, synthetic construct
  source 1..9: note = Seed: FAMQMAYRF
FYMQMAYRL

SEQ ID NO: 26525 - protein, 9 aa, synthetic construct
  source 1..9: note = Seed: FAMQMAYRF
FYMQMAYRM

SEQ ID NO: 26526 - protein, 9 aa, synthetic construct
  source 1..9: note = Seed: FAMQMAYRF
FYMQMAYRV

SEQ ID NO: 26527 - protein, 9 aa, synthetic construct
  source 1..9: note = Seed: FAMQMAYRF
FYMQMAYRW

SEQ ID NO: 26528 - protein, 9 aa, synthetic construct
  source 1..9: note = Seed: FAMQMAYRF
FYMQMAYRY

SEQ ID NO: 26529 - protein, 10 aa, synthetic construct
  source 1..10: note = Seed: FDMSKFPLKL
FYMSKFPLKA

SEQ ID NO: 26530 - protein, 10 aa, synthetic construct
  source 1..10: note = Seed: FDMSKFPLKL
FYMSKFPLKI

SEQ ID NO: 26531 - protein, 10 aa, synthetic construct
  source 1..10: note = Seed: FDMSKFPLKL
FYMSKFPLKL

SEQ ID NO: 26532 - protein, 10 aa, synthetic construct
  source 1..10: note = Seed: FDMSKFPLKL
FYMSKFPLKV

SEQ ID NO: 26533 - protein, 10 aa, synthetic construct
  source 1..10: note = Seed: FNMVYMPASW
FYMVYMPASF

SEQ ID NO: 26534 - protein, 10 aa, synthetic construct
  source 1..10: note = Seed: FNMVYMPASW
FYMVYMPASY

SEQ ID NO: 26535 - protein, 9 aa, synthetic construct
  source 1..9: note = Seed: FWNCNVDRY
FYNCNVDRF

SEQ ID NO: 26536 - protein, 9 aa, synthetic construct
  source 1..9: note = Seed: FWNCNVDRY
FYNCNVDRL

SEQ ID NO: 26537 - protein, 9 aa, synthetic construct
  source 1..9: note = Seed: FWNCNVDRY
FYNCNVDRM

SEQ ID NO: 26538 - protein, 9 aa, synthetic construct
  source 1..9: note = Seed: FENKTTLPV
FYNKTTLPF

SEQ ID NO: 26539 - protein, 9 aa, synthetic construct
  source 1..9: note = Seed: FENKTTLPV
FYNKTTLPM

SEQ ID NO: 26540 - protein, 9 aa, synthetic construct
  source 1..9: note = Seed: FENKTTLPV
FYNKTTLPY

SEQ ID NO: 26541 - protein, 9 aa, synthetic construct
  source 1..9: note = Seed: FVNLKQLPF
FYNLKQLPF

SEQ ID NO: 26542 - protein, 11 aa, synthetic construct
  source 1..11: note = Seed: FVNLKQLPFFY
FYNLKQLPFFY

SEQ ID NO: 26543 - protein, 9 aa, synthetic construct
  source 1..9: note = Seed: FVNLKQLPF
FYNLKQLPI

SEQ ID NO: 26544 - protein, 9 aa, synthetic construct
  source 1..9: note = Seed: FVNLKQLPF
FYNLKQLPL

SEQ ID NO: 26545 - protein, 9 aa, synthetic construct
  source 1..9: note = Seed: FVNLKQLPF
FYNLKQLPM

SEQ ID NO: 26546 - protein, 9 aa, synthetic construct
  source 1..9: note = Seed: FVNLKQLPF
FYNLKQLPV

SEQ ID NO: 26547 - protein, 9 aa, synthetic construct
  source 1..9: note = Seed: FVNLKQLPF
FYNLKQLPY

SEQ ID NO: 26548 - protein, 11 aa, synthetic construct
  source 1..11: note = Seed: FTNVYADSFVI
FYNVYADSFVV

SEQ ID NO: 26549 - protein, 9 aa, synthetic construct
  source 1..9: note = Seed: FFPDLNGDV
FYPDLNGDF

SEQ ID NO: 26550 - protein, 9 aa, synthetic construct
  source 1..9: note = Seed: FFPDLNGDV
FYPDLNGDL

SEQ ID NO: 26551 - protein, 9 aa, synthetic construct
  source 1..9: note = Seed: FFPDLNGDV
FYPDLNGDM

SEQ ID NO: 26552 - protein, 9 aa, synthetic construct
  source 1..9: note = Seed: FFPDLNGDV
FYPDLNGDY

SEQ ID NO: 26553 - protein, 10 aa, synthetic construct
  source 1..10: note = Seed: FTPFDVVRQC
FYPFDVVRQA

SEQ ID NO: 26554 - protein, 10 aa, synthetic construct
  source 1..10: note = Seed: FLPFFSNVTW
FYPFFSNVTF

SEQ ID NO: 26555 - protein, 10 aa, synthetic construct
  source 1..10: note = Seed: FLPFFSNVTW
FYPFFSNVTH

SEQ ID NO: 26556 - protein, 10 aa, synthetic construct
  source 1..10: note = Seed: FLPFFSNVTW
FYPFFSNVTI

SEQ ID NO: 26557 - protein, 10 aa, synthetic construct
  source 1..10: note = Seed: FLPFFSNVTW
FYPFFSNVTL

SEQ ID NO: 26558 - protein, 10 aa, synthetic construct
  source 1..10: note = Seed: FLPFFSNVTW
FYPFFSNVTM

SEQ ID NO: 26559 - protein, 10 aa, synthetic construct
  source 1..10: note = Seed: FLPFFSNVTW
FYPFFSNVTW

SEQ ID NO: 26560 - protein, 11 aa, synthetic construct
  source 1..11: note = Seed: FLPFFSNVTWF
FYPFFSNVTWF

SEQ ID NO: 26561 - protein, 11 aa, synthetic construct
  source 1..11: note = Seed: FLPFFSNVTWF
FYPFFSNVTWI

SEQ ID NO: 26562 - protein, 11 aa, synthetic construct
  source 1..11: note = Seed: FLPFFSNVTWF
FYPFFSNVTWL

SEQ ID NO: 26563 - protein, 11 aa, synthetic construct
  source 1..11: note = Seed: FLPFFSNVTWF
FYPFFSNVTWW

SEQ ID NO: 26564 - protein, 10 aa, synthetic construct
  source 1..10: note = Seed: FLPFFSNVTW
FYPFFSNVTY

SEQ ID NO: 26565 - protein, 10 aa, synthetic construct
  source 1..10: note = Seed: FTPLVPFWIT
FYPLVPFWIA

SEQ ID NO: 26566 - protein, 11 aa, synthetic construct
  source 1..11: note = Seed: FTPLVPFWITI
FYPLVPFWITV

SEQ ID NO: 26567 - protein, 9 aa, synthetic construct
  source 1..9: note = Seed: FLPRVFSAV
FYPRVFSAA

SEQ ID NO: 26568 - protein, 9 aa, synthetic construct
  source 1..9: note = Seed: FLPRVFSAV
FYPRVFSAF

SEQ ID NO: 26569 - protein, 9 aa, synthetic construct
  source 1..9: note = Seed: FLPRVFSAV
FYPRVFSAH

SEQ ID NO: 26570 - protein, 9 aa, synthetic construct
  source 1..9: note = Seed: FLPRVFSAV
FYPRVFSAI

SEQ ID NO: 26571 - protein, 9 aa, synthetic construct
  source 1..9: note = Seed: FLPRVFSAV
FYPRVFSAL

SEQ ID NO: 26572 - protein, 9 aa, synthetic construct
  source 1..9: note = Seed: FLPRVFSAV
FYPRVFSAM

SEQ ID NO: 26573 - protein, 9 aa, synthetic construct
  source 1..9: note = Seed: FLPRVFSAV
FYPRVFSAV

SEQ ID NO: 26574 - protein, 10 aa, synthetic construct
  source 1..10: note = Seed: FLPRVFSAVG
FYPRVFSAVF

SEQ ID NO: 26575 - protein, 10 aa, synthetic construct
  source 1..10: note = Seed: FLPRVFSAVG
FYPRVFSAVI

SEQ ID NO: 26576 - protein, 10 aa, synthetic construct
  source 1..10: note = Seed: FLPRVFSAVG
FYPRVFSAVL

SEQ ID NO: 26577 - protein, 10 aa, synthetic construct
  source 1..10: note = Seed: FLPRVFSAVG
FYPRVFSAVM

SEQ ID NO: 26578 - protein, 10 aa, synthetic construct
  source 1..10: note = Seed: FLPRVFSAVG
FYPRVFSAVV

SEQ ID NO: 26579 - protein, 9 aa, synthetic construct
  source 1..9: note = Seed: FLPRVFSAV
FYPRVFSAW

SEQ ID NO: 26580 - protein, 9 aa, synthetic construct
  source 1..9: note = Seed: FLPRVFSAV
FYPRVFSAY

SEQ ID NO: 26581 - protein, 8 aa, synthetic construct
  source 1..8: note = Seed: FAPSASAF
FYPSASAF

SEQ ID NO: 26582 - protein, 9 aa, synthetic construct
  source 1..9: note = Seed: FAPSASAFF
FYPSASAFA

SEQ ID NO: 26583 - protein, 9 aa, synthetic construct
  source 1..9: note = Seed: FAPSASAFF
FYPSASAFF

SEQ ID NO: 26584 - protein, 9 aa, synthetic construct
  source 1..9: note = Seed: FAPSASAFF
FYPSASAFH

SEQ ID NO: 26585 - protein, 9 aa, synthetic construct
  source 1..9: note = Seed: FAPSASAFF
FYPSASAFI

SEQ ID NO: 26586 - protein, 9 aa, synthetic construct
  source 1..9: note = Seed: FAPSASAFF
FYPSASAFL

SEQ ID NO: 26587 - protein, 9 aa, synthetic construct
  source 1..9: note = Seed: FAPSASAFF
FYPSASAFM

SEQ ID NO: 26588 - protein, 9 aa, synthetic construct
  source 1..9: note = Seed: FAPSASAFF
FYPSASAFV

SEQ ID NO: 26589 - protein, 9 aa, synthetic construct
  source 1..9: note = Seed: FAPSASAFF
FYPSASAFW

SEQ ID NO: 26590 - protein, 9 aa, synthetic construct
  source 1..9: note = Seed: FAPSASAFF
FYPSASAFY

SEQ ID NO: 26591 - protein, 8 aa, synthetic construct
  source 1..8: note = Seed: FAPSASAF
FYPSASAI

SEQ ID NO: 26592 - protein, 8 aa, synthetic construct
  source 1..8: note = Seed: FAPSASAF
FYPSASAL

SEQ ID NO: 26593 - protein, 8 aa, synthetic construct
  source 1..8: note = Seed: FAPSASAF
FYPSASAM

SEQ ID NO: 26594 - protein, 8 aa, synthetic construct
  source 1..8: note = Seed: FAPSASAF
FYPSASAV

SEQ ID NO: 26595 - protein, 8 aa, synthetic construct
  source 1..8: note = Seed: FAPSASAF
FYPSASAY

SEQ ID NO: 26596 - protein, 11 aa, synthetic construct
  source 1..11: note = Seed: FPQSAPHGVVF
FYQSAPHGVVF

SEQ ID NO: 26597 - protein, 11 aa, synthetic construct
  source 1..11: note = Seed: FPQSAPHGVVF
FYQSAPHGVVL

SEQ ID NO: 26598 - protein, 11 aa, synthetic construct
  source 1..11: note = Seed: FPQSAPHGVVF
FYQSAPHGVVM

SEQ ID NO: 26599 - protein, 11 aa, synthetic construct
  source 1..11: note = Seed: FPQSAPHGVVF
FYQSAPHGVVW

SEQ ID NO: 26600 - protein, 11 aa, synthetic construct
  source 1..11: note = Seed: FPQSAPHGVVF
FYQSAPHGVVY

SEQ ID NO: 26601 - protein, 9 aa, synthetic construct
  source 1..9: note = Seed: FLQSINFVR
FYQSINFVK

SEQ ID NO: 26602 - protein, 9 aa, synthetic construct
  source 1..9: note = Seed: FLQSINFVR
FYQSINFVR

SEQ ID NO: 26603 - protein, 10 aa, synthetic construct
  source 1..10: note = Seed: FLQSINFVRI
FYQSINFVRR

SEQ ID NO: 26604 - protein, 10 aa, synthetic construct
  source 1..10: note = Seed: FTQSRNLQEF
FYQSRNLQEF

SEQ ID NO: 26605 - protein, 9 aa, synthetic construct
  source 1..9: note = Seed: FAQVKQIYK
FYQVKQIYR

SEQ ID NO: 26606 - protein, 10 aa, synthetic construct
  source 1..10: note = Seed: FTRFFYVLGL
FYRFFYVLGK

SEQ ID NO: 26607 - protein, 10 aa, synthetic construct
  source 1..10: note = Seed: FTRFFYVLGL
FYRFFYVLGL

SEQ ID NO: 26608 - protein, 9 aa, synthetic construct
  source 1..9: note = Seed: FTRFFYVLG
FYRFFYVLK

SEQ ID NO: 26609 - protein, 10 aa, synthetic construct
  source 1..10: note = Seed: FTRGVYYPDK
FYRGVYYPDR

SEQ ID NO: 26610 - protein, 9 aa, synthetic construct
  source 1..9: note = Seed: FISAARQGF
FYSAARQGF

SEQ ID NO: 26611 - protein, 9 aa, synthetic construct
  source 1..9: note = Seed: FISAARQGF
FYSAARQGI

SEQ ID NO: 26612 - protein, 9 aa, synthetic construct
  source 1..9: note = Seed: FISAARQGF
FYSAARQGL

SEQ ID NO: 26613 - protein, 9 aa, synthetic construct
  source 1..9: note = Seed: FISAARQGF
FYSAARQGM

SEQ ID NO: 26614 - protein, 9 aa, synthetic construct
  source 1..9: note = Seed: FISAARQGF
FYSAARQGV

SEQ ID NO: 26615 - protein, 9 aa, synthetic construct
  source 1..9: note = Seed: FISAARQGF
FYSAARQGY

SEQ ID NO: 26616 - protein, 9 aa, synthetic construct
  source 1..9: note = Seed: FTSDYYQLY
FYSDYYQLF

SEQ ID NO: 26617 - protein, 9 aa, synthetic construct
  source 1..9: note = Seed: FTSDYYQLY
FYSDYYQLI

SEQ ID NO: 26618 - protein, 9 aa, synthetic construct
  source 1..9: note = Seed: FTSDYYQLY
FYSDYYQLL

SEQ ID NO: 26619 - protein, 9 aa, synthetic construct
  source 1..9: note = Seed: FTSDYYQLY
FYSDYYQLM

SEQ ID NO: 26620 - protein, 9 aa, synthetic construct
  source 1..9: note = Seed: FTSDYYQLY
FYSDYYQLV

SEQ ID NO: 26621 - protein, 9 aa, synthetic construct
  source 1..9: note = Seed: FTSDYYQLY
FYSDYYQLY

SEQ ID NO: 26622 - protein, 10 aa, synthetic construct
  source 1..10: note = Seed: FTSDYYQLYS
FYSDYYQLYF

SEQ ID NO: 26623 - protein, 10 aa, synthetic construct
  source 1..10: note = Seed: FTSDYYQLYS
FYSDYYQLYM

SEQ ID NO: 26624 - protein, 10 aa, synthetic construct
  source 1..10: note = Seed: FTSDYYQLYS
FYSDYYQLYY

SEQ ID NO: 26625 - protein, 9 aa, synthetic construct
  source 1..9: note = Seed: FASFYYVWK
FYSFYYVWR

SEQ ID NO: 26626 - protein, 9 aa, synthetic construct
  source 1..9: note = Seed: FYSKWYIRV
FYSKWYIRF

SEQ ID NO: 26627 - protein, 9 aa, synthetic construct
  source 1..9: note = Seed: FYSKWYIRV
FYSKWYIRI

SEQ ID NO: 26628 - protein, 9 aa, synthetic construct
  source 1..9: note = Seed: FYSKWYIRV
FYSKWYIRL

SEQ ID NO: 26629 - protein, 9 aa, synthetic construct
  source 1..9: note = Seed: FYSKWYIRV
FYSKWYIRM

SEQ ID NO: 26630 - protein, 9 aa, synthetic construct
  source 1..9: note = Seed: FYSKWYIRV
FYSKWYIRW

SEQ ID NO: 26631 - protein, 9 aa, synthetic construct
  source 1..9: note = Seed: FYSKWYIRV
FYSKWYIRY

SEQ ID NO: 26632 - protein, 9 aa, synthetic construct
  source 1..9: note = Seed: FVSNGTHWF
FYSNGTHWF

SEQ ID NO: 26633 - protein, 9 aa, synthetic construct
  source 1..9: note = Seed: FVSNGTHWF
FYSNGTHWI

SEQ ID NO: 26634 - protein, 9 aa, synthetic construct
  source 1..9: note = Seed: FVSNGTHWF
FYSNGTHWL

SEQ ID NO: 26635 - protein, 9 aa, synthetic construct
  source 1..9: note = Seed: FVSNGTHWF
FYSNGTHWM

SEQ ID NO: 26636 - protein, 9 aa, synthetic construct
  source 1..9: note = Seed: FVSNGTHWF
FYSNGTHWV

SEQ ID NO: 26637 - protein, 9 aa, synthetic construct
  source 1..9: note = Seed: FVSNGTHWF
FYSNGTHWW

SEQ ID NO: 26638 - protein, 9 aa, synthetic construct
  source 1..9: note = Seed: FVSNGTHWF
FYSNGTHWY

SEQ ID NO: 26639 - protein, 10 aa, synthetic construct
  source 1..10: note = Seed: FSSNVANYQK
FYSNVANYQR

SEQ ID NO: 26640 - protein, 8 aa, synthetic construct
  source 1..8: note = Seed: FFSNVTWF
FYSNVTWF

SEQ ID NO: 26641 - protein, 9 aa, synthetic construct
  source 1..9: note = Seed: FFSNVTWFH
FYSNVTWFF

SEQ ID NO: 26642 - protein, 9 aa, synthetic construct
  source 1..9: note = Seed: FFSNVTWFH
FYSNVTWFK

SEQ ID NO: 26643 - protein, 9 aa, synthetic construct
  source 1..9: note = Seed: FFSNVTWFH
FYSNVTWFR

SEQ ID NO: 26644 - protein, 9 aa, synthetic construct
  source 1..9: note = Seed: FFSNVTWFH
FYSNVTWFY

SEQ ID NO: 26645 - protein, 8 aa, synthetic construct
  source 1..8: note = Seed: FFSNVTWF
FYSNVTWL

SEQ ID NO: 26646 - protein, 8 aa, synthetic construct
  source 1..8: note = Seed: FFSNVTWF
FYSNVTWM

SEQ ID NO: 26647 - protein, 11 aa, synthetic construct
  source 1..11: note = Seed: FISPYNSQNAV
FYSPYNSQNAA

SEQ ID NO: 26648 - protein, 11 aa, synthetic construct
  source 1..11: note = Seed: FISPYNSQNAV
FYSPYNSQNAL

SEQ ID NO: 26649 - protein, 11 aa, synthetic construct
  source 1..11: note = Seed: FISPYNSQNAV
FYSPYNSQNAM

SEQ ID NO: 26650 - protein, 9 aa, synthetic construct
  source 1..9: note = Seed: FFSYFAVHF
FYSYFAVHF

SEQ ID NO: 26651 - protein, 10 aa, synthetic construct
  source 1..10: note = Seed: FFSYFAVHFI
FYSYFAVHFA

SEQ ID NO: 26652 - protein, 10 aa, synthetic construct
  source 1..10: note = Seed: FFSYFAVHFI
FYSYFAVHFF

SEQ ID NO: 26653 - protein, 10 aa, synthetic construct
  source 1..10: note = Seed: FFSYFAVHFI
FYSYFAVHFI

SEQ ID NO: 26654 - protein, 10 aa, synthetic construct
  source 1..10: note = Seed: FFSYFAVHFI
FYSYFAVHFL

SEQ ID NO: 26655 - protein, 10 aa, synthetic construct
  source 1..10: note = Seed: FFSYFAVHFI
FYSYFAVHFM

SEQ ID NO: 26656 - protein, 10 aa, synthetic construct
  source 1..10: note = Seed: FFSYFAVHFI
FYSYFAVHFV

SEQ ID NO: 26657 - protein, 10 aa, synthetic construct
  source 1..10: note = Seed: FFSYFAVHFI
FYSYFAVHFW

SEQ ID NO: 26658 - protein, 10 aa, synthetic construct
  source 1..10: note = Seed: FFSYFAVHFI
FYSYFAVHFY

SEQ ID NO: 26659 - protein, 9 aa, synthetic construct
  source 1..9: note = Seed: FFSYFAVHF
FYSYFAVHI

SEQ ID NO: 26660 - protein, 9 aa, synthetic construct
  source 1..9: note = Seed: FFSYFAVHF
FYSYFAVHL

SEQ ID NO: 26661 - protein, 9 aa, synthetic construct
  source 1..9: note = Seed: FFSYFAVHF
FYSYFAVHM

SEQ ID NO: 26662 - protein, 9 aa, synthetic construct
  source 1..9: note = Seed: FFSYFAVHF
FYSYFAVHW

SEQ ID NO: 26663 - protein, 9 aa, synthetic construct
  source 1..9: note = Seed: FFSYFAVHF
FYSYFAVHY

SEQ ID NO: 26664 - protein, 10 aa, synthetic construct
  source 1..10: note = Seed: FVTHSKGLYR
FYTHSKGLYR

SEQ ID NO: 26665 - protein, 10 aa, synthetic construct
  source 1..10: note = Seed: FDTYNLWNTF
FYTYNLWNTF

SEQ ID NO: 26666 - protein, 10 aa, synthetic construct
  source 1..10: note = Seed: FDTYNLWNTF
FYTYNLWNTI

SEQ ID NO: 26667 - protein, 10 aa, synthetic construct
  source 1..10: note = Seed: FDTYNLWNTF
FYTYNLWNTL

SEQ ID NO: 26668 - protein, 10 aa, synthetic construct
  source 1..10: note = Seed: FDTYNLWNTF
FYTYNLWNTM

SEQ ID NO: 26669 - protein, 10 aa, synthetic construct
  source 1..10: note = Seed: FDTYNLWNTF
FYTYNLWNTW

SEQ ID NO: 26670 - protein, 10 aa, synthetic construct
  source 1..10: note = Seed: FDTYNLWNTF
FYTYNLWNTY

SEQ ID NO: 26671 - protein, 9 aa, synthetic construct
  source 1..9: note = Seed: FAVDAAKAY
FYVDAAKAF

SEQ ID NO: 26672 - protein, 9 aa, synthetic construct
  source 1..9: note = Seed: FAVDAAKAY
FYVDAAKAI

SEQ ID NO: 26673 - protein, 9 aa, synthetic construct
  source 1..9: note = Seed: FAVDAAKAY
FYVDAAKAL

SEQ ID NO: 26674 - protein, 9 aa, synthetic construct
  source 1..9: note = Seed: FAVDAAKAY
FYVDAAKAM

SEQ ID NO: 26675 - protein, 9 aa, synthetic construct
  source 1..9: note = Seed: FAVDAAKAY
FYVDAAKAV

SEQ ID NO: 26676 - protein, 9 aa, synthetic construct
  source 1..9: note = Seed: FAVDAAKAY
FYVDAAKAY

SEQ ID NO: 26677 - protein, 10 aa, synthetic construct
  source 1..10: note = Seed: FAVDAAKAYK
FYVDAAKAYR

SEQ ID NO: 26678 - protein, 10 aa, synthetic construct
  source 1..10: note = Seed: FKVSIWNLDY
FYVSIWNLDY

SEQ ID NO: 26679 - protein, 9 aa, synthetic construct
  source 1..9: note = Seed: FVVSTGYHF
FYVSTGYHF

SEQ ID NO: 26680 - protein, 10 aa, synthetic construct
  source 1..10: note = Seed: FVVSTGYHFR
FYVSTGYHFK

SEQ ID NO: 26681 - protein, 10 aa, synthetic construct
  source 1..10: note = Seed: FVVSTGYHFR
FYVSTGYHFR

SEQ ID NO: 26682 - protein, 9 aa, synthetic construct
  source 1..9: note = Seed: FVVSTGYHF
FYVSTGYHI

SEQ ID NO: 26683 - protein, 9 aa, synthetic construct
  source 1..9: note = Seed: FVVSTGYHF
FYVSTGYHL

SEQ ID NO: 26684 - protein, 9 aa, synthetic construct
  source 1..9: note = Seed: FVVSTGYHF
FYVSTGYHM

SEQ ID NO: 26685 - protein, 9 aa, synthetic construct
  source 1..9: note = Seed: FVVSTGYHF
FYVSTGYHV

SEQ ID NO: 26686 - protein, 9 aa, synthetic construct
  source 1..9: note = Seed: FVVSTGYHF
FYVSTGYHW

SEQ ID NO: 26687 - protein, 9 aa, synthetic construct
  source 1..9: note = Seed: FVVSTGYHF
FYVSTGYHY

SEQ ID NO: 26688 - protein, 9 aa, synthetic construct
  source 1..9: note = Seed: FYWFFSNYL
FYWFFSNYF

SEQ ID NO: 26689 - protein, 9 aa, synthetic construct
  source 1..9: note = Seed: FYWFFSNYL
FYWFFSNYI

SEQ ID NO: 26690 - protein, 10 aa, synthetic construct
  source 1..10: note = Seed: FYWFFSNYLK
FYWFFSNYLF

SEQ ID NO: 26691 - protein, 10 aa, synthetic construct
  source 1..10: note = Seed: FYWFFSNYLK
FYWFFSNYLM

SEQ ID NO: 26692 - protein, 10 aa, synthetic construct
  source 1..10: note = Seed: FYWFFSNYLK
FYWFFSNYLR

SEQ ID NO: 26693 - protein, 10 aa, synthetic construct
  source 1..10: note = Seed: FYWFFSNYLK
FYWFFSNYLY

SEQ ID NO: 26694 - protein, 9 aa, synthetic construct
  source 1..9: note = Seed: FYWFFSNYL
FYWFFSNYM

SEQ ID NO: 26695 - protein, 9 aa, synthetic construct
  source 1..9: note = Seed: FYWFFSNYL
FYWFFSNYW

SEQ ID NO: 26696 - protein, 9 aa, synthetic construct
  source 1..9: note = Seed: FYWFFSNYL
FYWFFSNYY

SEQ ID NO: 26697 - protein, 10 aa, synthetic construct
  source 1..10: note = Seed: FLWLLWPVTL
FYWLLWPVTF

SEQ ID NO: 26698 - protein, 10 aa, synthetic construct
  source 1..10: note = Seed: FLWLLWPVTL
FYWLLWPVTI

SEQ ID NO: 26699 - protein, 10 aa, synthetic construct
  source 1..10: note = Seed: FLWLLWPVTL
FYWLLWPVTL

SEQ ID NO: 26700 - protein, 11 aa, synthetic construct
  source 1..11: note = Seed: FLWLLWPVTLA
FYWLLWPVTLI

SEQ ID NO: 26701 - protein, 11 aa, synthetic construct
  source 1..11: note = Seed: FLWLLWPVTLA
FYWLLWPVTLL

SEQ ID NO: 26702 - protein, 11 aa, synthetic construct
  source 1..11: note = Seed: FLWLLWPVTLA
FYWLLWPVTLV

SEQ ID NO: 26703 - protein, 10 aa, synthetic construct
  source 1..10: note = Seed: FLWLLWPVTL
FYWLLWPVTM

SEQ ID NO: 26704 - protein, 10 aa, synthetic construct
  source 1..10: note = Seed: FLWLLWPVTL
FYWLLWPVTW

SEQ ID NO: 26705 - protein, 9 aa, synthetic construct
  source 1..9: note = Seed: FYYLGTGPE
FYYLGTGPA

SEQ ID NO: 26706 - protein, 9 aa, synthetic construct
  source 1..9: note = Seed: FYYLGTGPE
FYYLGTGPF

SEQ ID NO: 26707 - protein, 9 aa, synthetic construct
  source 1..9: note = Seed: FYYLGTGPE
FYYLGTGPH

SEQ ID NO: 26708 - protein, 9 aa, synthetic construct
  source 1..9: note = Seed: FYYLGTGPE
FYYLGTGPI

SEQ ID NO: 26709 - protein, 9 aa, synthetic construct
  source 1..9: note = Seed: FYYLGTGPE
FYYLGTGPL

SEQ ID NO: 26710 - protein, 9 aa, synthetic construct
  source 1..9: note = Seed: FYYLGTGPE
FYYLGTGPM

SEQ ID NO: 26711 - protein, 9 aa, synthetic construct
  source 1..9: note = Seed: FYYLGTGPE
FYYLGTGPT

SEQ ID NO: 26712 - protein, 9 aa, synthetic construct
  source 1..9: note = Seed: FYYLGTGPE
FYYLGTGPV

SEQ ID NO: 26713 - protein, 9 aa, synthetic construct
  source 1..9: note = Seed: FYYLGTGPE
FYYLGTGPW

SEQ ID NO: 26714 - protein, 9 aa, synthetic construct
  source 1..9: note = Seed: FYYLGTGPE
FYYLGTGPY

SEQ ID NO: 26715 - protein, 9 aa, synthetic construct
  source 1..9: note = Seed: FCYMHHMEL
FYYMHHMEA

SEQ ID NO: 26716 - protein, 9 aa, synthetic construct
  source 1..9: note = Seed: FCYMHHMEL
FYYMHHMEF

SEQ ID NO: 26717 - protein, 9 aa, synthetic construct
  source 1..9: note = Seed: FCYMHHMEL
FYYMHHMEH

SEQ ID NO: 26718 - protein, 9 aa, synthetic construct
  source 1..9: note = Seed: FCYMHHMEL
FYYMHHMEI

SEQ ID NO: 26719 - protein, 9 aa, synthetic construct
  source 1..9: note = Seed: FCYMHHMEL
FYYMHHMEL

SEQ ID NO: 26720 - protein, 9 aa, synthetic construct
  source 1..9: note = Seed: FCYMHHMEL
FYYMHHMEM

SEQ ID NO: 26721 - protein, 9 aa, synthetic construct
  source 1..9: note = Seed: FCYMHHMEL
FYYMHHMEQ

SEQ ID NO: 26722 - protein, 9 aa, synthetic construct
  source 1..9: note = Seed: FCYMHHMEL
FYYMHHMES

SEQ ID NO: 26723 - protein, 9 aa, synthetic construct
  source 1..9: note = Seed: FCYMHHMEL
FYYMHHMET

SEQ ID NO: 26724 - protein, 9 aa, synthetic construct
  source 1..9: note = Seed: FCYMHHMEL
FYYMHHMEV

SEQ ID NO: 26725 - protein, 9 aa, synthetic construct
  source 1..9: note = Seed: FCYMHHMEL
FYYMHHMEW

SEQ ID NO: 26726 - protein, 9 aa, synthetic construct
  source 1..9: note = Seed: FCYMHHMEL
FYYMHHMEY

SEQ ID NO: 26727 - protein, 9 aa, synthetic construct
  source 1..9: note = Seed: FRYMNSQGL
FYYMNSQGA

SEQ ID NO: 26728 - protein, 9 aa, synthetic construct
  source 1..9: note = Seed: FRYMNSQGL
FYYMNSQGF

SEQ ID NO: 26729 - protein, 9 aa, synthetic construct
  source 1..9: note = Seed: FRYMNSQGL
FYYMNSQGH

SEQ ID NO: 26730 - protein, 9 aa, synthetic construct
  source 1..9: note = Seed: FRYMNSQGL
FYYMNSQGI

SEQ ID NO: 26731 - protein, 9 aa, synthetic construct
  source 1..9: note = Seed: FRYMNSQGL
FYYMNSQGL

SEQ ID NO: 26732 - protein, 9 aa, synthetic construct
  source 1..9: note = Seed: FRYMNSQGL
FYYMNSQGM

SEQ ID NO: 26733 - protein, 9 aa, synthetic construct
  source 1..9: note = Seed: FRYMNSQGL
FYYMNSQGV

SEQ ID NO: 26734 - protein, 9 aa, synthetic construct
  source 1..9: note = Seed: FRYMNSQGL
FYYMNSQGW

SEQ ID NO: 26735 - protein, 9 aa, synthetic construct
  source 1..9: note = Seed: FRYMNSQGL
FYYMNSQGY

SEQ ID NO: 26736 - protein, 8 aa, synthetic construct
  source 1..8: note = Seed: FYYVWKSY
FYYVWKSF

SEQ ID NO: 26737 - protein, 8 aa, synthetic construct
  source 1..8: note = Seed: FYYVWKSY
FYYVWKSL

SEQ ID NO: 26738 - protein, 8 aa, synthetic construct
  source 1..8: note = Seed: FYYVWKSY
FYYVWKSM

SEQ ID NO: 26739 - protein, 9 aa, synthetic construct
  source 1..9: note = Seed: FYYVWKSYV
FYYVWKSYA

SEQ ID NO: 26740 - protein, 9 aa, synthetic construct
  source 1..9: note = Seed: FYYVWKSYV
FYYVWKSYF

SEQ ID NO: 26741 - protein, 9 aa, synthetic construct
  source 1..9: note = Seed: FYYVWKSYV
FYYVWKSYH

SEQ ID NO: 26742 - protein, 9 aa, synthetic construct
  source 1..9: note = Seed: FYYVWKSYV
FYYVWKSYI

SEQ ID NO: 26743 - protein, 9 aa, synthetic construct
  source 1..9: note = Seed: FYYVWKSYV
FYYVWKSYL

SEQ ID NO: 26744 - protein, 9 aa, synthetic construct
  source 1..9: note = Seed: FYYVWKSYV
FYYVWKSYM

SEQ ID NO: 26745 - protein, 10 aa, synthetic construct
  source 1..10: note = Seed: FYYVWKSYVH
FYYVWKSYVF

SEQ ID NO: 26746 - protein, 11 aa, synthetic construct
  source 1..11: note = Seed: FYYVWKSYVHV
FYYVWKSYVHF

SEQ ID NO: 26747 - protein, 11 aa, synthetic construct
  source 1..11: note = Seed: FYYVWKSYVHV
FYYVWKSYVHL

SEQ ID NO: 26748 - protein, 11 aa, synthetic construct
  source 1..11: note = Seed: FYYVWKSYVHV
FYYVWKSYVHW

SEQ ID NO: 26749 - protein, 10 aa, synthetic construct
  source 1..10: note = Seed: FYYVWKSYVH
FYYVWKSYVL

SEQ ID NO: 26750 - protein, 10 aa, synthetic construct
  source 1..10: note = Seed: FYYVWKSYVH
FYYVWKSYVM

SEQ ID NO: 26751 - protein, 10 aa, synthetic construct
  source 1..10: note = Seed: FYYVWKSYVH
FYYVWKSYVY

SEQ ID NO: 26752 - protein, 9 aa, synthetic construct
  source 1..9: note = Seed: FYYVWKSYV
FYYVWKSYW

SEQ ID NO: 26753 - protein, 9 aa, synthetic construct
  source 1..9: note = Seed: FYYVWKSYV
FYYVWKSYY

SEQ ID NO: 26754 - protein, 9 aa, synthetic construct
  source 1..9: note = Seed: FFYYSDSPC
FYYYSDSPA

SEQ ID NO: 26755 - protein, 9 aa, synthetic construct
  source 1..9: note = Seed: FFYYSDSPC
FYYYSDSPC

SEQ ID NO: 26756 - protein, 9 aa, synthetic construct
  source 1..9: note = Seed: FFYYSDSPC
FYYYSDSPF

SEQ ID NO: 26757 - protein, 9 aa, synthetic construct
  source 1..9: note = Seed: FFYYSDSPC
FYYYSDSPH

SEQ ID NO: 26758 - protein, 9 aa, synthetic construct
  source 1..9: note = Seed: FFYYSDSPC
FYYYSDSPI

SEQ ID NO: 26759 - protein, 9 aa, synthetic construct
  source 1..9: note = Seed: FFYYSDSPC
FYYYSDSPL

SEQ ID NO: 26760 - protein, 9 aa, synthetic construct
  source 1..9: note = Seed: FFYYSDSPC
FYYYSDSPM

SEQ ID NO: 26761 - protein, 9 aa, synthetic construct
  source 1..9: note = Seed: FFYYSDSPC
FYYYSDSPT

SEQ ID NO: 26762 - protein, 9 aa, synthetic construct
  source 1..9: note = Seed: FFYYSDSPC
FYYYSDSPV

SEQ ID NO: 26763 - protein, 9 aa, synthetic construct
  source 1..9: note = Seed: FFYYSDSPC
FYYYSDSPW

SEQ ID NO: 26764 - protein, 9 aa, synthetic construct
  source 1..9: note = Seed: FFYYSDSPC
FYYYSDSPY

SEQ ID NO: 26765 - protein, 9 aa, synthetic construct
  source 1..9: note = Seed: GEAANFCAL
GAAANFCAF

SEQ ID NO: 26766 - protein, 9 aa, synthetic construct
  source 1..9: note = Seed: GEAANFCAL
GAAANFCAM

SEQ ID NO: 26767 - protein, 9 aa, synthetic construct
  source 1..9: note = Seed: GEAANFCAL
GAAANFCAY

SEQ ID NO: 26768 - protein, 10 aa, synthetic construct
  source 1..10: note = Seed: GGASCCLYCR
GAASCCLYCR

SEQ ID NO: 26769 - protein, 10 aa, synthetic construct
  source 1..10: note = Seed: GFELTSMKYF
GAELTSMKYW

SEQ ID NO: 26770 - protein, 9 aa, synthetic construct
  source 1..9: note = Seed: GDFLHFLPR
GAFLHFLPR

SEQ ID NO: 26771 - protein, 10 aa, synthetic construct
  source 1..10: note = Seed: GVFVSNGTHW
GAFVSNGTHW

SEQ ID NO: 26772 - protein, 11 aa, synthetic construct
  source 1..11: note = Seed: GYHLMSFPQSA
GAHLMSFPQSI

SEQ ID NO: 26773 - protein, 11 aa, synthetic construct
  source 1..11: note = Seed: GYHLMSFPQSA
GAHLMSFPQSL

SEQ ID NO: 26774 - protein, 11 aa, synthetic construct
  source 1..11: note = Seed: GYHLMSFPQSA
GAHLMSFPQSV

SEQ ID NO: 26775 - protein, 10 aa, synthetic construct
  source 1..10: note = Seed: GKIADYNYKL
GAIADYNYKV

SEQ ID NO: 26776 - protein, 11 aa, synthetic construct
  source 1..11: note = Seed: GFKLKDCVMYA
GAKLKDCVMYV

SEQ ID NO: 26777 - protein, 9 aa, synthetic construct
  source 1..9: note = Seed: GALDISASI
GALDISASL

SEQ ID NO: 26778 - protein, 9 aa, synthetic construct
  source 1..9: note = Seed: GALDISASI
GALDISASM

SEQ ID NO: 26779 - protein, 9 aa, synthetic construct
  source 1..9: note = Seed: GALDISASI
GALDISASV

SEQ ID NO: 26780 - protein, 9 aa, synthetic construct
  source 1..9: note = Seed: GTLIVNSVL
GALIVNSVW

SEQ ID NO: 26781 - protein, 11 aa, synthetic construct
  source 1..11: note = Seed: GTLMIERFVSL
GALMIERFVSV

SEQ ID NO: 26782 - protein, 10 aa, synthetic construct
  source 1..10: note = Seed: GYLQPRTFLL
GALQPRTFLV

SEQ ID NO: 26783 - protein, 9 aa, synthetic construct
  source 1..9: note = Seed: GRLQSLQTY
GALQSLQTF

SEQ ID NO: 26784 - protein, 9 aa, synthetic construct
  source 1..9: note = Seed: GRLQSLQTY
GALQSLQTY

SEQ ID NO: 26785 - protein, 10 aa, synthetic construct
  source 1..10: note = Seed: GRLQSLQTYV
GALQSLQTYL

SEQ ID NO: 26786 - protein, 10 aa, synthetic construct
  source 1..10: note = Seed: GRLQSLQTYV
GALQSLQTYV

SEQ ID NO: 26787 - protein, 10 aa, synthetic construct
  source 1..10: note = Seed: GSLYVNKHAF
GALYVNKHAW

SEQ ID NO: 26788 - protein, 9 aa, synthetic construct
  source 1..9: note = Seed: GLMWLSYFI
GAMWLSYFA

SEQ ID NO: 26789 - protein, 9 aa, synthetic construct
  source 1..9: note = Seed: GLMWLSYFI
GAMWLSYFI

SEQ ID NO: 26790 - protein, 10 aa, synthetic construct
  source 1..10: note = Seed: GLMWLSYFIA
GAMWLSYFIV

SEQ ID NO: 26791 - protein, 9 aa, synthetic construct
  source 1..9: note = Seed: GLMWLSYFI
GAMWLSYFL

SEQ ID NO: 26792 - protein, 9 aa, synthetic construct
  source 1..9: note = Seed: GLMWLSYFI
GAMWLSYFV

SEQ ID NO: 26793 - protein, 10 aa, synthetic construct
  source 1..10: note = Seed: GTNLPLQLGF
GANLPLQLGW

SEQ ID NO: 26794 - protein, 9 aa, synthetic construct
  source 1..9: note = Seed: GGNYNYLYR
GANYNYLYR

SEQ ID NO: 26795 - protein, 9 aa, synthetic construct
  source 1..9: note = Seed: GYRVTKNSK
GARVTKNSK

SEQ ID NO: 26796 - protein, 10 aa, synthetic construct
  source 1..10: note = Seed: GDSGFAAYSR
GASGFAAYSR

SEQ ID NO: 26797 - protein, 10 aa, synthetic construct
  source 1..10: note = Seed: GHSMQNCVLK
GASMQNCVLK

SEQ ID NO: 26798 - protein, 9 aa, synthetic construct
  source 1..9: note = Seed: GTTTLNGLW
GATTLNGLW

SEQ ID NO: 26799 - protein, 10 aa, synthetic construct
  source 1..10: note = Seed: GLVAEWFLAY
GAVAEWFLAK

SEQ ID NO: 26800 - protein, 10 aa, synthetic construct
  source 1..10: note = Seed: GLVAEWFLAY
GAVAEWFLAY

SEQ ID NO: 26801 - protein, 9 aa, synthetic construct
  source 1..9: note = Seed: GLVAEWFLA
GAVAEWFLV

SEQ ID NO: 26802 - protein, 9 aa, synthetic construct
  source 1..9: note = Seed: GVVFLHVTY
GAVFLHVTY

SEQ ID NO: 26803 - protein, 10 aa, synthetic construct
  source 1..10: note = Seed: GVVFLHVTYV
GAVFLHVTYV

SEQ ID NO: 26804 - protein, 9 aa, synthetic construct
  source 1..9: note = Seed: GVYDYLVST
GAYDYLVSA

SEQ ID NO: 26805 - protein, 9 aa, synthetic construct
  source 1..9: note = Seed: GVYDYLVST
GAYDYLVSI

SEQ ID NO: 26806 - protein, 9 aa, synthetic construct
  source 1..9: note = Seed: GVYDYLVST
GAYDYLVSL

SEQ ID NO: 26807 - protein, 9 aa, synthetic construct
  source 1..9: note = Seed: GVYDYLVST
GAYDYLVSV

SEQ ID NO: 26808 - protein, 11 aa, synthetic construct
  source 1..11: note = Seed: GNYNYLYRLFR
GAYNYLYRLFR

SEQ ID NO: 26809 - protein, 9 aa, synthetic construct
  source 1..9: note = Seed: GNYQCGHYK
GAYQCGHYK

SEQ ID NO: 26810 - protein, 9 aa, synthetic construct
  source 1..9: note = Seed: GNYQCGHYK
GAYQCGHYR

SEQ ID NO: 26811 - protein, 9 aa, synthetic construct
  source 1..9: note = Seed: GIYQTSNFR
GAYQTSNFK

SEQ ID NO: 26812 - protein, 9 aa, synthetic construct
  source 1..9: note = Seed: GIYQTSNFR
GAYQTSNFR

SEQ ID NO: 26813 - protein, 9 aa, synthetic construct
  source 1..9: note = Seed: GYYRRATRR
GAYRRATRR

SEQ ID NO: 26814 - protein, 10 aa, synthetic construct
  source 1..10: note = Seed: GFELTSMKYF
GCELTSMKYW

SEQ ID NO: 26815 - protein, 11 aa, synthetic construct
  source 1..11: note = Seed: GYHLMSFPQSA
GCHLMSFPQSI

SEQ ID NO: 26816 - protein, 11 aa, synthetic construct
  source 1..11: note = Seed: GYHLMSFPQSA
GCHLMSFPQSL

SEQ ID NO: 26817 - protein, 11 aa, synthetic construct
  source 1..11: note = Seed: GYHLMSFPQSA
GCHLMSFPQSV

SEQ ID NO: 26818 - protein, 10 aa, synthetic construct
  source 1..10: note = Seed: GKIADYNYKL
GCIADYNYKV

SEQ ID NO: 26819 - protein, 11 aa, synthetic construct
  source 1..11: note = Seed: GFKLKDCVMYA
GCKLKDCVMYV

SEQ ID NO: 26820 - protein, 11 aa, synthetic construct
  source 1..11: note = Seed: GTLMIERFVSL
GCLMIERFVSV

SEQ ID NO: 26821 - protein, 10 aa, synthetic construct
  source 1..10: note = Seed: GYLQPRTFLL
GCLQPRTFLV

SEQ ID NO: 26822 - protein, 10 aa, synthetic construct
  source 1..10: note = Seed: GRLQSLQTYV
GCLQSLQTYL

SEQ ID NO: 26823 - protein, 10 aa, synthetic construct
  source 1..10: note = Seed: GRLQSLQTYV
GCLQSLQTYV

SEQ ID NO: 26824 - protein, 10 aa, synthetic construct
  source 1..10: note = Seed: GLVAEWFLAY
GCVAEWFLAK

SEQ ID NO: 26825 - protein, 10 aa, synthetic construct
  source 1..10: note = Seed: GLVAEWFLAY
GCVAEWFLAY

SEQ ID NO: 26826 - protein, 10 aa, synthetic construct
  source 1..10: note = Seed: GVVFLHVTYV
GCVFLHVTYV

SEQ ID NO: 26827 - protein, 10 aa, synthetic construct
  source 1..10: note = Seed: GFELTSMKYF
GDELTSMKYW

SEQ ID NO: 26828 - protein, 11 aa, synthetic construct
  source 1..11: note = Seed: GYHLMSFPQSA
GDHLMSFPQSI

SEQ ID NO: 26829 - protein, 11 aa, synthetic construct
  source 1..11: note = Seed: GYHLMSFPQSA
GDHLMSFPQSL

SEQ ID NO: 26830 - protein, 11 aa, synthetic construct
  source 1..11: note = Seed: GYHLMSFPQSA
GDHLMSFPQSV

SEQ ID NO: 26831 - protein, 10 aa, synthetic construct
  source 1..10: note = Seed: GKIADYNYKL
GDIADYNYKV

SEQ ID NO: 26832 - protein, 11 aa, synthetic construct
  source 1..11: note = Seed: GFKLKDCVMYA
GDKLKDCVMYV

SEQ ID NO: 26833 - protein, 11 aa, synthetic construct
  source 1..11: note = Seed: GTLMIERFVSL
GDLMIERFVSV

SEQ ID NO: 26834 - protein, 10 aa, synthetic construct
  source 1..10: note = Seed: GYLQPRTFLL
GDLQPRTFLV

SEQ ID NO: 26835 - protein, 10 aa, synthetic construct
  source 1..10: note = Seed: GRLQSLQTYV
GDLQSLQTYL

SEQ ID NO: 26836 - protein, 10 aa, synthetic construct
  source 1..10: note = Seed: GRLQSLQTYV
GDLQSLQTYV

SEQ ID NO: 26837 - protein, 10 aa, synthetic construct
  source 1..10: note = Seed: GLVAEWFLAY
GDVAEWFLAK

SEQ ID NO: 26838 - protein, 10 aa, synthetic construct
  source 1..10: note = Seed: GLVAEWFLAY
GDVAEWFLAY

SEQ ID NO: 26839 - protein, 10 aa, synthetic construct
  source 1..10: note = Seed: GVVFLHVTYV
GDVFLHVTYV

SEQ ID NO: 26840 - protein, 9 aa, synthetic construct
  source 1..9: note = Seed: GDAALALLL
GEAALALLF

SEQ ID NO: 26841 - protein, 9 aa, synthetic construct
  source 1..9: note = Seed: GDAALALLL
GEAALALLI

SEQ ID NO: 26842 - protein, 9 aa, synthetic construct
  source 1..9: note = Seed: GDAALALLL
GEAALALLL

SEQ ID NO: 26843 - protein, 9 aa, synthetic construct
  source 1..9: note = Seed: GDAALALLL
GEAALALLM

SEQ ID NO: 26844 - protein, 9 aa, synthetic construct
  source 1..9: note = Seed: GDAALALLL
GEAALALLV

SEQ ID NO: 26845 - protein, 9 aa, synthetic construct
  source 1..9: note = Seed: GEAANFCAL
GEAANFCAA

SEQ ID NO: 26846 - protein, 9 aa, synthetic construct
  source 1..9: note = Seed: GEAANFCAL
GEAANFCAF

SEQ ID NO: 26847 - protein, 9 aa, synthetic construct
  source 1..9: note = Seed: GEAANFCAL
GEAANFCAI

SEQ ID NO: 26848 - protein, 9 aa, synthetic construct
  source 1..9: note = Seed: GEAANFCAL
GEAANFCAM

SEQ ID NO: 26849 - protein, 9 aa, synthetic construct
  source 1..9: note = Seed: GEAANFCAL
GEAANFCAP

SEQ ID NO: 26850 - protein, 9 aa, synthetic construct
  source 1..9: note = Seed: GEAANFCAL
GEAANFCAV

SEQ ID NO: 26851 - protein, 9 aa, synthetic construct
  source 1..9: note = Seed: GEAANFCAL
GEAANFCAW

SEQ ID NO: 26852 - protein, 9 aa, synthetic construct
  source 1..9: note = Seed: GEAANFCAL
GEAANFCAY

SEQ ID NO: 26853 - protein, 10 aa, synthetic construct
  source 1..10: note = Seed: GFELTSMKYF
GEELTSMKYW

SEQ ID NO: 26854 - protein, 9 aa, synthetic construct
  source 1..9: note = Seed: GDFKLNEEI
GEFKLNEEF

SEQ ID NO: 26855 - protein, 9 aa, synthetic construct
  source 1..9: note = Seed: GDFKLNEEI
GEFKLNEEI

SEQ ID NO: 26856 - protein, 9 aa, synthetic construct
  source 1..9: note = Seed: GDFKLNEEI
GEFKLNEEL

SEQ ID NO: 26857 - protein, 9 aa, synthetic construct
  source 1..9: note = Seed: GDFKLNEEI
GEFKLNEEM

SEQ ID NO: 26858 - protein, 9 aa, synthetic construct
  source 1..9: note = Seed: GDFKLNEEI
GEFKLNEEV

SEQ ID NO: 26859 - protein, 10 aa, synthetic construct
  source 1..10: note = Seed: GDFLHFLPRV
GEFLHFLPRF

SEQ ID NO: 26860 - protein, 10 aa, synthetic construct
  source 1..10: note = Seed: GDFLHFLPRV
GEFLHFLPRI

SEQ ID NO: 26861 - protein, 10 aa, synthetic construct
  source 1..10: note = Seed: GDFLHFLPRV
GEFLHFLPRL

SEQ ID NO: 26862 - protein, 10 aa, synthetic construct
  source 1..10: note = Seed: GDFLHFLPRV
GEFLHFLPRM

SEQ ID NO: 26863 - protein, 10 aa, synthetic construct
  source 1..10: note = Seed: GDFLHFLPRV
GEFLHFLPRV

SEQ ID NO: 26864 - protein, 11 aa, synthetic construct
  source 1..11: note = Seed: GYHLMSFPQSA
GEHLMSFPQSI

SEQ ID NO: 26865 - protein, 11 aa, synthetic construct
  source 1..11: note = Seed: GYHLMSFPQSA
GEHLMSFPQSL

SEQ ID NO: 26866 - protein, 11 aa, synthetic construct
  source 1..11: note = Seed: GYHLMSFPQSA
GEHLMSFPQSV

SEQ ID NO: 26867 - protein, 10 aa, synthetic construct
  source 1..10: note = Seed: GKIADYNYKL
GEIADYNYKV

SEQ ID NO: 26868 - protein, 11 aa, synthetic construct
  source 1..11: note = Seed: GFKLKDCVMYA
GEKLKDCVMYV

SEQ ID NO: 26869 - protein, 11 aa, synthetic construct
  source 1..11: note = Seed: GTLMIERFVSL
GELMIERFVSV

SEQ ID NO: 26870 - protein, 10 aa, synthetic construct
  source 1..10: note = Seed: GYLQPRTFLL
GELQPRTFLV

SEQ ID NO: 26871 - protein, 10 aa, synthetic construct
  source 1..10: note = Seed: GRLQSLQTYV
GELQSLQTYL

SEQ ID NO: 26872 - protein, 10 aa, synthetic construct
  source 1..10: note = Seed: GRLQSLQTYV
GELQSLQTYV

SEQ ID NO: 26873 - protein, 9 aa, synthetic construct
  source 1..9: note = Seed: GLMWLSYFI
GEMWLSYFI

SEQ ID NO: 26874 - protein, 9 aa, synthetic construct
  source 1..9: note = Seed: GLMWLSYFI
GEMWLSYFL

SEQ ID NO: 26875 - protein, 10 aa, synthetic construct
  source 1..10: note = Seed: GLVAEWFLAY
GEVAEWFLAK

SEQ ID NO: 26876 - protein, 10 aa, synthetic construct
  source 1..10: note = Seed: GLVAEWFLAY
GEVAEWFLAY

SEQ ID NO: 26877 - protein, 10 aa, synthetic construct
  source 1..10: note = Seed: GVVFLHVTYV
GEVFLHVTYV

SEQ ID NO: 26878 - protein, 10 aa, synthetic construct
  source 1..10: note = Seed: GGASCCLYCR
GFASCCLYCR

SEQ ID NO: 26879 - protein, 10 aa, synthetic construct
  source 1..10: note = Seed: GFELTSMKYF
GFELTSMKYW

SEQ ID NO: 26880 - protein, 9 aa, synthetic construct
  source 1..9: note = Seed: GDFLHFLPR
GFFLHFLPK

SEQ ID NO: 26881 - protein, 9 aa, synthetic construct
  source 1..9: note = Seed: GDFLHFLPR
GFFLHFLPR

SEQ ID NO: 26882 - protein, 11 aa, synthetic construct
  source 1..11: note = Seed: GYHLMSFPQSA
GFHLMSFPQSI

SEQ ID NO: 26883 - protein, 11 aa, synthetic construct
  source 1..11: note = Seed: GYHLMSFPQSA
GFHLMSFPQSL

SEQ ID NO: 26884 - protein, 11 aa, synthetic construct
  source 1..11: note = Seed: GYHLMSFPQSA
GFHLMSFPQSV

SEQ ID NO: 26885 - protein, 10 aa, synthetic construct
  source 1..10: note = Seed: GKIADYNYKL
GFIADYNYKI

SEQ ID NO: 26886 - protein, 10 aa, synthetic construct
  source 1..10: note = Seed: GKIADYNYKL
GFIADYNYKL

SEQ ID NO: 26887 - protein, 10 aa, synthetic construct
  source 1..10: note = Seed: GKIADYNYKL
GFIADYNYKV

SEQ ID NO: 26888 - protein, 11 aa, synthetic construct
  source 1..11: note = Seed: GFKLKDCVMYA
GFKLKDCVMYV

SEQ ID NO: 26889 - protein, 11 aa, synthetic construct
  source 1..11: note = Seed: GFLFLTWICLL
GFLFLTWICLV

SEQ ID NO: 26890 - protein, 10 aa, synthetic construct
  source 1..10: note = Seed: GTLIVNSVLL
GFLIVNSVLV

SEQ ID NO: 26891 - protein, 11 aa, synthetic construct
  source 1..11: note = Seed: GTLMIERFVSL
GFLMIERFVSA

SEQ ID NO: 26892 - protein, 11 aa, synthetic construct
  source 1..11: note = Seed: GTLMIERFVSL
GFLMIERFVSI

SEQ ID NO: 26893 - protein, 11 aa, synthetic construct
  source 1..11: note = Seed: GTLMIERFVSL
GFLMIERFVSL

SEQ ID NO: 26894 - protein, 11 aa, synthetic construct
  source 1..11: note = Seed: GTLMIERFVSL
GFLMIERFVSV

SEQ ID NO: 26895 - protein, 10 aa, synthetic construct
  source 1..10: note = Seed: GYLQPRTFLL
GFLQPRTFLF

SEQ ID NO: 26896 - protein, 10 aa, synthetic construct
  source 1..10: note = Seed: GYLQPRTFLL
GFLQPRTFLI

SEQ ID NO: 26897 - protein, 10 aa, synthetic construct
  source 1..10: note = Seed: GYLQPRTFLL
GFLQPRTFLL

SEQ ID NO: 26898 - protein, 10 aa, synthetic construct
  source 1..10: note = Seed: GYLQPRTFLL
GFLQPRTFLV

SEQ ID NO: 26899 - protein, 10 aa, synthetic construct
  source 1..10: note = Seed: GRLQSLQTYV
GFLQSLQTYI

SEQ ID NO: 26900 - protein, 10 aa, synthetic construct
  source 1..10: note = Seed: GRLQSLQTYV
GFLQSLQTYL

SEQ ID NO: 26901 - protein, 10 aa, synthetic construct
  source 1..10: note = Seed: GRLQSLQTYV
GFLQSLQTYM

SEQ ID NO: 26902 - protein, 10 aa, synthetic construct
  source 1..10: note = Seed: GRLQSLQTYV
GFLQSLQTYV

SEQ ID NO: 26903 - protein, 10 aa, synthetic construct
  source 1..10: note = Seed: GTLSYEQFKK
GFLSYEQFKR

SEQ ID NO: 26904 - protein, 9 aa, synthetic construct
  source 1..9: note = Seed: GTLSYEQFK
GFLSYEQFR

SEQ ID NO: 26905 - protein, 10 aa, synthetic construct
  source 1..10: note = Seed: GLMWLSYFIA
GFMWLSYFIV

SEQ ID NO: 26906 - protein, 9 aa, synthetic construct
  source 1..9: note = Seed: GLMWLSYFI
GFMWLSYFV

SEQ ID NO: 26907 - protein, 9 aa, synthetic construct
  source 1..9: note = Seed: GGNYNYLYR
GFNYNYLYR

SEQ ID NO: 26908 - protein, 10 aa, synthetic construct
  source 1..10: note = Seed: GVPFVVSTGY
GFPFVVSTGY

SEQ ID NO: 26909 - protein, 9 aa, synthetic construct
  source 1..9: note = Seed: GLPNNTASW
GFPNNTASF

SEQ ID NO: 26910 - protein, 9 aa, synthetic construct
  source 1..9: note = Seed: GLPNNTASW
GFPNNTASW

SEQ ID NO: 26911 - protein, 9 aa, synthetic construct
  source 1..9: note = Seed: GGQIVTCAK
GFQIVTCAR

SEQ ID NO: 26912 - protein, 9 aa, synthetic construct
  source 1..9: note = Seed: GYQPYRVVV
GFQPYRVVF

SEQ ID NO: 26913 - protein, 9 aa, synthetic construct
  source 1..9: note = Seed: GYQPYRVVV
GFQPYRVVL

SEQ ID NO: 26914 - protein, 9 aa, synthetic construct
  source 1..9: note = Seed: GYQPYRVVV
GFQPYRVVM

SEQ ID NO: 26915 - protein, 9 aa, synthetic construct
  source 1..9: note = Seed: GYQPYRVVV
GFQPYRVVW

SEQ ID NO: 26916 - protein, 9 aa, synthetic construct
  source 1..9: note = Seed: GYQPYRVVV
GFQPYRVVY

SEQ ID NO: 26917 - protein, 9 aa, synthetic construct
  source 1..9: note = Seed: GASCCLYCR
GFSCCLYCR

SEQ ID NO: 26918 - protein, 10 aa, synthetic construct
  source 1..10: note = Seed: GDSGFAAYSR
GFSGFAAYSR

SEQ ID NO: 26919 - protein, 10 aa, synthetic construct
  source 1..10: note = Seed: GHSMQNCVLK
GFSMQNCVLR

SEQ ID NO: 26920 - protein, 10 aa, synthetic construct
  source 1..10: note = Seed: GQTFSVLACY
GFTFSVLACY

SEQ ID NO: 26921 - protein, 10 aa, synthetic construct
  source 1..10: note = Seed: GLVAEWFLAY
GFVAEWFLAK

SEQ ID NO: 26922 - protein, 10 aa, synthetic construct
  source 1..10: note = Seed: GLVAEWFLAY
GFVAEWFLAY

SEQ ID NO: 26923 - protein, 11 aa, synthetic construct
  source 1..11: note = Seed: GLVAEWFLAYI
GFVAEWFLAYV

SEQ ID NO: 26924 - protein, 9 aa, synthetic construct
  source 1..9: note = Seed: GVVFLHVTY
GFVFLHVTY

SEQ ID NO: 26925 - protein, 10 aa, synthetic construct
  source 1..10: note = Seed: GVVFLHVTYV
GFVFLHVTYA

SEQ ID NO: 26926 - protein, 10 aa, synthetic construct
  source 1..10: note = Seed: GVVFLHVTYV
GFVFLHVTYI

SEQ ID NO: 26927 - protein, 10 aa, synthetic construct
  source 1..10: note = Seed: GVVFLHVTYV
GFVFLHVTYV

SEQ ID NO: 26928 - protein, 11 aa, synthetic construct
  source 1..11: note = Seed: GRWVLNNDYYR
GFWVLNNDYYR

SEQ ID NO: 26929 - protein, 9 aa, synthetic construct
  source 1..9: note = Seed: GVYDYLVST
GFYDYLVSV

SEQ ID NO: 26930 - protein, 10 aa, synthetic construct
  source 1..10: note = Seed: GNYNYLYRLF
GFYNYLYRLF

SEQ ID NO: 26931 - protein, 11 aa, synthetic construct
  source 1..11: note = Seed: GNYNYLYRLFR
GFYNYLYRLFK

SEQ ID NO: 26932 - protein, 11 aa, synthetic construct
  source 1..11: note = Seed: GNYNYLYRLFR
GFYNYLYRLFR

SEQ ID NO: 26933 - protein, 9 aa, synthetic construct
  source 1..9: note = Seed: GNYQCGHYK
GFYQCGHYK

SEQ ID NO: 26934 - protein, 9 aa, synthetic construct
  source 1..9: note = Seed: GNYQCGHYK
GFYQCGHYR

SEQ ID NO: 26935 - protein, 9 aa, synthetic construct
  source 1..9: note = Seed: GIYQTSNFR
GFYQTSNFR

SEQ ID NO: 26936 - protein, 9 aa, synthetic construct
  source 1..9: note = Seed: GYYRRATRR
GFYRRATRR

SEQ ID NO: 26937 - protein, 10 aa, synthetic construct
  source 1..10: note = Seed: GFELTSMKYF
GGELTSMKYW

SEQ ID NO: 26938 - protein, 9 aa, synthetic construct
  source 1..9: note = Seed: GDFLHFLPR
GGFLHFLPR

SEQ ID NO: 26939 - protein, 11 aa, synthetic construct
  source 1..11: note = Seed: GYHLMSFPQSA
GGHLMSFPQSI

SEQ ID NO: 26940 - protein, 11 aa, synthetic construct
  source 1..11: note = Seed: GYHLMSFPQSA
GGHLMSFPQSL

SEQ ID NO: 26941 - protein, 11 aa, synthetic construct
  source 1..11: note = Seed: GYHLMSFPQSA
GGHLMSFPQSV

SEQ ID NO: 26942 - protein, 10 aa, synthetic construct
  source 1..10: note = Seed: GKIADYNYKL
GGIADYNYKV

SEQ ID NO: 26943 - protein, 11 aa, synthetic construct
  source 1..11: note = Seed: GFKLKDCVMYA
GGKLKDCVMYV

SEQ ID NO: 26944 - protein, 11 aa, synthetic construct
  source 1..11: note = Seed: GTLMIERFVSL
GGLMIERFVSV

SEQ ID NO: 26945 - protein, 10 aa, synthetic construct
  source 1..10: note = Seed: GYLQPRTFLL
GGLQPRTFLV

SEQ ID NO: 26946 - protein, 10 aa, synthetic construct
  source 1..10: note = Seed: GRLQSLQTYV
GGLQSLQTYL

SEQ ID NO: 26947 - protein, 10 aa, synthetic construct
  source 1..10: note = Seed: GRLQSLQTYV
GGLQSLQTYV

SEQ ID NO: 26948 - protein, 10 aa, synthetic construct
  source 1..10: note = Seed: GDSGFAAYSR
GGSGFAAYSR

SEQ ID NO: 26949 - protein, 10 aa, synthetic construct
  source 1..10: note = Seed: GLVAEWFLAY
GGVAEWFLAK

SEQ ID NO: 26950 - protein, 10 aa, synthetic construct
  source 1..10: note = Seed: GLVAEWFLAY
GGVAEWFLAY

SEQ ID NO: 26951 - protein, 10 aa, synthetic construct
  source 1..10: note = Seed: GVVFLHVTYV
GGVFLHVTYV

SEQ ID NO: 26952 - protein, 9 aa, synthetic construct
  source 1..9: note = Seed: GVYDYLVST
GGYDYLVSV

SEQ ID NO: 26953 - protein, 11 aa, synthetic construct
  source 1..11: note = Seed: GNYNYLYRLFR
GGYNYLYRLFR

SEQ ID NO: 26954 - protein, 9 aa, synthetic construct
  source 1..9: note = Seed: GNYQCGHYK
GGYQCGHYR

SEQ ID NO: 26955 - protein, 9 aa, synthetic construct
  source 1..9: note = Seed: GEAANFCAL
GHAANFCAF

SEQ ID NO: 26956 - protein, 9 aa, synthetic construct
  source 1..9: note = Seed: GEAANFCAL
GHAANFCAY

SEQ ID NO: 26957 - protein, 10 aa, synthetic construct
  source 1..10: note = Seed: GFELTSMKYF
GHELTSMKYW

SEQ ID NO: 26958 - protein, 9 aa, synthetic construct
  source 1..9: note = Seed: GKGYHLMSF
GHGYHLMSY

SEQ ID NO: 26959 - protein, 11 aa, synthetic construct
  source 1..11: note = Seed: GYHLMSFPQSA
GHHLMSFPQSI

SEQ ID NO: 26960 - protein, 11 aa, synthetic construct
  source 1..11: note = Seed: GYHLMSFPQSA
GHHLMSFPQSL

SEQ ID NO: 26961 - protein, 11 aa, synthetic construct
  source 1..11: note = Seed: GYHLMSFPQSA
GHHLMSFPQSV

SEQ ID NO: 26962 - protein, 10 aa, synthetic construct
  source 1..10: note = Seed: GKIADYNYKL
GHIADYNYKV

SEQ ID NO: 26963 - protein, 11 aa, synthetic construct
  source 1..11: note = Seed: GFKLKDCVMYA
GHKLKDCVMYV

SEQ ID NO: 26964 - protein, 11 aa, synthetic construct
  source 1..11: note = Seed: GTLMIERFVSL
GHLMIERFVSV

SEQ ID NO: 26965 - protein, 10 aa, synthetic construct
  source 1..10: note = Seed: GYLQPRTFLL
GHLQPRTFLV

SEQ ID NO: 26966 - protein, 10 aa, synthetic construct
  source 1..10: note = Seed: GRLQSLQTYV
GHLQSLQTYL

SEQ ID NO: 26967 - protein, 10 aa, synthetic construct
  source 1..10: note = Seed: GRLQSLQTYV
GHLQSLQTYV

SEQ ID NO: 26968 - protein, 9 aa, synthetic construct
  source 1..9: note = Seed: GHMLDMYSV
GHMLDMYSL

SEQ ID NO: 26969 - protein, 10 aa, synthetic construct
  source 1..10: note = Seed: GLVAEWFLAY
GHVAEWFLAK

SEQ ID NO: 26970 - protein, 10 aa, synthetic construct
  source 1..10: note = Seed: GLVAEWFLAY
GHVAEWFLAY

SEQ ID NO: 26971 - protein, 9 aa, synthetic construct
  source 1..9: note = Seed: GVVFLHVTY
GHVFLHVTY

SEQ ID NO: 26972 - protein, 10 aa, synthetic construct
  source 1..10: note = Seed: GVVFLHVTYV
GHVFLHVTYV

SEQ ID NO: 26973 - protein, 9 aa, synthetic construct
  source 1..9: note = Seed: GEAANFCAL
GIAANFCAF

SEQ ID NO: 26974 - protein, 9 aa, synthetic construct
  source 1..9: note = Seed: GEAANFCAL
GIAANFCAY

SEQ ID NO: 26975 - protein, 9 aa, synthetic construct
  source 1..9: note = Seed: GVAGALNKA
GIAGALNKI

SEQ ID NO: 26976 - protein, 9 aa, synthetic construct
  source 1..9: note = Seed: GVAGALNKA
GIAGALNKL

SEQ ID NO: 26977 - protein, 9 aa, synthetic construct
  source 1..9: note = Seed: GVAGALNKA
GIAGALNKV

SEQ ID NO: 26978 - protein, 10 aa, synthetic construct
  source 1..10: note = Seed: GGASCCLYCR
GIASCCLYCR

SEQ ID NO: 26979 - protein, 10 aa, synthetic construct
  source 1..10: note = Seed: GFELTSMKYF
GIELTSMKYW

SEQ ID NO: 26980 - protein, 9 aa, synthetic construct
  source 1..9: note = Seed: GDFLHFLPR
GIFLHFLPR

SEQ ID NO: 26981 - protein, 11 aa, synthetic construct
  source 1..11: note = Seed: GYHLMSFPQSA
GIHLMSFPQSI

SEQ ID NO: 26982 - protein, 11 aa, synthetic construct
  source 1..11: note = Seed: GYHLMSFPQSA
GIHLMSFPQSL

SEQ ID NO: 26983 - protein, 11 aa, synthetic construct
  source 1..11: note = Seed: GYHLMSFPQSA
GIHLMSFPQSV

SEQ ID NO: 26984 - protein, 9 aa, synthetic construct
  source 1..9: note = Seed: GLHPTQAPT
GIHPTQAPV

SEQ ID NO: 26985 - protein, 10 aa, synthetic construct
  source 1..10: note = Seed: GKIADYNYKL
GIIADYNYKV

SEQ ID NO: 26986 - protein, 11 aa, synthetic construct
  source 1..11: note = Seed: GFKLKDCVMYA
GIKLKDCVMYV

SEQ ID NO: 26987 - protein, 9 aa, synthetic construct
  source 1..9: note = Seed: GALDISASI
GILDISASA

SEQ ID NO: 26988 - protein, 9 aa, synthetic construct
  source 1..9: note = Seed: GALDISASI
GILDISASI

SEQ ID NO: 26989 - protein, 9 aa, synthetic construct
  source 1..9: note = Seed: GALDISASI
GILDISASL

SEQ ID NO: 26990 - protein, 9 aa, synthetic construct
  source 1..9: note = Seed: GALDISASI
GILDISASM

SEQ ID NO: 26991 - protein, 9 aa, synthetic construct
  source 1..9: note = Seed: GALDISASI
GILDISASV

SEQ ID NO: 26992 - protein, 10 aa, synthetic construct
  source 1..10: note = Seed: GFLFLTWICL
GILFLTWICV

SEQ ID NO: 26993 - protein, 11 aa, synthetic construct
  source 1..11: note = Seed: GTLMIERFVSL
GILMIERFVSV

SEQ ID NO: 26994 - protein, 10 aa, synthetic construct
  source 1..10: note = Seed: GYLQPRTFLL
GILQPRTFLV

SEQ ID NO: 26995 - protein, 10 aa, synthetic construct
  source 1..10: note = Seed: GRLQSLQTYV
GILQSLQTYL

SEQ ID NO: 26996 - protein, 10 aa, synthetic construct
  source 1..10: note = Seed: GRLQSLQTYV
GILQSLQTYV

SEQ ID NO: 26997 - protein, 9 aa, synthetic construct
  source 1..9: note = Seed: GTLSYEQFK
GILSYEQFK

SEQ ID NO: 26998 - protein, 10 aa, synthetic construct
  source 1..10: note = Seed: GTLSYEQFKK
GILSYEQFKK

SEQ ID NO: 26999 - protein, 10 aa, synthetic construct
  source 1..10: note = Seed: GTLSYEQFKK
GILSYEQFKR

SEQ ID NO: 27000 - protein, 9 aa, synthetic construct
  source 1..9: note = Seed: GTLSYEQFK
GILSYEQFR

SEQ ID NO: 27001 - protein, 9 aa, synthetic construct
  source 1..9: note = Seed: GLMWLSYFI
GIMWLSYFA

SEQ ID NO: 27002 - protein, 9 aa, synthetic construct
  source 1..9: note = Seed: GLMWLSYFI
GIMWLSYFI

SEQ ID NO: 27003 - protein, 11 aa, synthetic construct
  source 1..11: note = Seed: GLMWLSYFIAS
GIMWLSYFIAV

SEQ ID NO: 27004 - protein, 10 aa, synthetic construct
  source 1..10: note = Seed: GLMWLSYFIA
GIMWLSYFII

SEQ ID NO: 27005 - protein, 10 aa, synthetic construct
  source 1..10: note = Seed: GLMWLSYFIA
GIMWLSYFIL

SEQ ID NO: 27006 - protein, 10 aa, synthetic construct
  source 1..10: note = Seed: GLMWLSYFIA
GIMWLSYFIV

SEQ ID NO: 27007 - protein, 9 aa, synthetic construct
  source 1..9: note = Seed: GLMWLSYFI
GIMWLSYFL

SEQ ID NO: 27008 - protein, 9 aa, synthetic construct
  source 1..9: note = Seed: GLMWLSYFI
GIMWLSYFM

SEQ ID NO: 27009 - protein, 9 aa, synthetic construct
  source 1..9: note = Seed: GLMWLSYFI
GIMWLSYFT

SEQ ID NO: 27010 - protein, 9 aa, synthetic construct
  source 1..9: note = Seed: GLMWLSYFI
GIMWLSYFV

SEQ ID NO: 27011 - protein, 9 aa, synthetic construct
  source 1..9: note = Seed: GGNYNYLYR
GINYNYLYR

SEQ ID NO: 27012 - protein, 9 aa, synthetic construct
  source 1..9: note = Seed: GASCCLYCR
GISCCLYCR

SEQ ID NO: 27013 - protein, 10 aa, synthetic construct
  source 1..10: note = Seed: GDSGFAAYSR
GISGFAAYSR

SEQ ID NO: 27014 - protein, 10 aa, synthetic construct
  source 1..10: note = Seed: GHSMQNCVLK
GISMQNCVLK

SEQ ID NO: 27015 - protein, 10 aa, synthetic construct
  source 1..10: note = Seed: GLVAEWFLAY
GIVAEWFLAK

SEQ ID NO: 27016 - protein, 10 aa, synthetic construct
  source 1..10: note = Seed: GLVAEWFLAY
GIVAEWFLAY

SEQ ID NO: 27017 - protein, 11 aa, synthetic construct
  source 1..11: note = Seed: GLVAEWFLAYI
GIVAEWFLAYV

SEQ ID NO: 27018 - protein, 9 aa, synthetic construct
  source 1..9: note = Seed: GLVAEWFLA
GIVAEWFLV

SEQ ID NO: 27019 - protein, 10 aa, synthetic construct
  source 1..10: note = Seed: GVVFLHVTYV
GIVFLHVTYV

SEQ ID NO: 27020 - protein, 9 aa, synthetic construct
  source 1..9: note = Seed: GVVREFLTR
GIVREFLTK

SEQ ID NO: 27021 - protein, 11 aa, synthetic construct
  source 1..11: note = Seed: GRWVLNNDYYR
GIWVLNNDYYR

SEQ ID NO: 27022 - protein, 9 aa, synthetic construct
  source 1..9: note = Seed: GVYDYLVST
GIYDYLVSA

SEQ ID NO: 27023 - protein, 9 aa, synthetic construct
  source 1..9: note = Seed: GVYDYLVST
GIYDYLVSC

SEQ ID NO: 27024 - protein, 9 aa, synthetic construct
  source 1..9: note = Seed: GVYDYLVST
GIYDYLVSI

SEQ ID NO: 27025 - protein, 9 aa, synthetic construct
  source 1..9: note = Seed: GVYDYLVST
GIYDYLVSL

SEQ ID NO: 27026 - protein, 9 aa, synthetic construct
  source 1..9: note = Seed: GVYDYLVST
GIYDYLVSM

SEQ ID NO: 27027 - protein, 9 aa, synthetic construct
  source 1..9: note = Seed: GVYDYLVST
GIYDYLVSS

SEQ ID NO: 27028 - protein, 9 aa, synthetic construct
  source 1..9: note = Seed: GVYDYLVST
GIYDYLVST

SEQ ID NO: 27029 - protein, 9 aa, synthetic construct
  source 1..9: note = Seed: GVYDYLVST
GIYDYLVSV

SEQ ID NO: 27030 - protein, 10 aa, synthetic construct
  source 1..10: note = Seed: GNYNYLYRLF
GIYNYLYRLF

SEQ ID NO: 27031 - protein, 11 aa, synthetic construct
  source 1..11: note = Seed: GNYNYLYRLFR
GIYNYLYRLFR

SEQ ID NO: 27032 - protein, 9 aa, synthetic construct
  source 1..9: note = Seed: GNYQCGHYK
GIYQCGHYK

SEQ ID NO: 27033 - protein, 9 aa, synthetic construct
  source 1..9: note = Seed: GNYQCGHYK
GIYQCGHYR

SEQ ID NO: 27034 - protein, 9 aa, synthetic construct
  source 1..9: note = Seed: GIYQTSNFR
GIYQTSNFK

SEQ ID NO: 27035 - protein, 9 aa, synthetic construct
  source 1..9: note = Seed: GYYRRATRR
GIYRRATRR

SEQ ID NO: 27036 - protein, 9 aa, synthetic construct
  source 1..9: note = Seed: GEAANFCAL
GKAANFCAF

SEQ ID NO: 27037 - protein, 9 aa, synthetic construct
  source 1..9: note = Seed: GEAANFCAL
GKAANFCAI

SEQ ID NO: 27038 - protein, 9 aa, synthetic construct
  source 1..9: note = Seed: GEAANFCAL
GKAANFCAL

SEQ ID NO: 27039 - protein, 9 aa, synthetic construct
  source 1..9: note = Seed: GEAANFCAL
GKAANFCAM

SEQ ID NO: 27040 - protein, 9 aa, synthetic construct
  source 1..9: note = Seed: GEAANFCAL
GKAANFCAY

SEQ ID NO: 27041 - protein, 10 aa, synthetic construct
  source 1..10: note = Seed: GFELTSMKYF
GKELTSMKYW

SEQ ID NO: 27042 - protein, 9 aa, synthetic construct
  source 1..9: note = Seed: GKGYHLMSF
GKGYHLMSM

SEQ ID NO: 27043 - protein, 9 aa, synthetic construct
  source 1..9: note = Seed: GKGYHLMSF
GKGYHLMSY

SEQ ID NO: 27044 - protein, 11 aa, synthetic construct
  source 1..11: note = Seed: GYHLMSFPQSA
GKHLMSFPQSI

SEQ ID NO: 27045 - protein, 11 aa, synthetic construct
  source 1..11: note = Seed: GYHLMSFPQSA
GKHLMSFPQSL

SEQ ID NO: 27046 - protein, 11 aa, synthetic construct
  source 1..11: note = Seed: GYHLMSFPQSA
GKHLMSFPQSV

SEQ ID NO: 27047 - protein, 10 aa, synthetic construct
  source 1..10: note = Seed: GKIADYNYKL
GKIADYNYKV

SEQ ID NO: 27048 - protein, 11 aa, synthetic construct
  source 1..11: note = Seed: GFKLKDCVMYA
GKKLKDCVMYV

SEQ ID NO: 27049 - protein, 11 aa, synthetic construct
  source 1..11: note = Seed: GTLMIERFVSL
GKLMIERFVSI

SEQ ID NO: 27050 - protein, 11 aa, synthetic construct
  source 1..11: note = Seed: GTLMIERFVSL
GKLMIERFVSL

SEQ ID NO: 27051 - protein, 11 aa, synthetic construct
  source 1..11: note = Seed: GTLMIERFVSL
GKLMIERFVSV

SEQ ID NO: 27052 - protein, 10 aa, synthetic construct
  source 1..10: note = Seed: GYLQPRTFLL
GKLQPRTFLV

SEQ ID NO: 27053 - protein, 9 aa, synthetic construct
  source 1..9: note = Seed: GRLQSLQTY
GKLQSLQTF

SEQ ID NO: 27054 - protein, 9 aa, synthetic construct
  source 1..9: note = Seed: GRLQSLQTY
GKLQSLQTM

SEQ ID NO: 27055 - protein, 9 aa, synthetic construct
  source 1..9: note = Seed: GRLQSLQTY
GKLQSLQTY

SEQ ID NO: 27056 - protein, 10 aa, synthetic construct
  source 1..10: note = Seed: GRLQSLQTYV
GKLQSLQTYL

SEQ ID NO: 27057 - protein, 10 aa, synthetic construct
  source 1..10: note = Seed: GRLQSLQTYV
GKLQSLQTYV

SEQ ID NO: 27058 - protein, 10 aa, synthetic construct
  source 1..10: note = Seed: GLMWLSYFIA
GKMWLSYFIV

SEQ ID NO: 27059 - protein, 10 aa, synthetic construct
  source 1..10: note = Seed: GQTFSVLACY
GKTFSVLACF

SEQ ID NO: 27060 - protein, 10 aa, synthetic construct
  source 1..10: note = Seed: GQTFSVLACY
GKTFSVLACY

SEQ ID NO: 27061 - protein, 10 aa, synthetic construct
  source 1..10: note = Seed: GLVAEWFLAY
GKVAEWFLAF

SEQ ID NO: 27062 - protein, 10 aa, synthetic construct
  source 1..10: note = Seed: GLVAEWFLAY
GKVAEWFLAK

SEQ ID NO: 27063 - protein, 10 aa, synthetic construct
  source 1..10: note = Seed: GLVAEWFLAY
GKVAEWFLAY

SEQ ID NO: 27064 - protein, 11 aa, synthetic construct
  source 1..11: note = Seed: GLVAEWFLAYI
GKVAEWFLAYV

SEQ ID NO: 27065 - protein, 9 aa, synthetic construct
  source 1..9: note = Seed: GVVFLHVTY
GKVFLHVTF

SEQ ID NO: 27066 - protein, 9 aa, synthetic construct
  source 1..9: note = Seed: GVVFLHVTY
GKVFLHVTM

SEQ ID NO: 27067 - protein, 9 aa, synthetic construct
  source 1..9: note = Seed: GVVFLHVTY
GKVFLHVTY

SEQ ID NO: 27068 - protein, 10 aa, synthetic construct
  source 1..10: note = Seed: GVVFLHVTYV
GKVFLHVTYV

SEQ ID NO: 27069 - protein, 10 aa, synthetic construct
  source 1..10: note = Seed: GNYNYLYRLF
GKYNYLYRLF

SEQ ID NO: 27070 - protein, 11 aa, synthetic construct
  source 1..11: note = Seed: GNYNYLYRLFR
GKYNYLYRLFR

SEQ ID NO: 27071 - protein, 9 aa, synthetic construct
  source 1..9: note = Seed: GEAANFCAL
GLAANFCAF

SEQ ID NO: 27072 - protein, 9 aa, synthetic construct
  source 1..9: note = Seed: GEAANFCAL
GLAANFCAY

SEQ ID NO: 27073 - protein, 9 aa, synthetic construct
  source 1..9: note = Seed: GVAGALNKA
GLAGALNKA

SEQ ID NO: 27074 - protein, 9 aa, synthetic construct
  source 1..9: note = Seed: GVAGALNKA
GLAGALNKI

SEQ ID NO: 27075 - protein, 9 aa, synthetic construct
  source 1..9: note = Seed: GVAGALNKA
GLAGALNKL

SEQ ID NO: 27076 - protein, 9 aa, synthetic construct
  source 1..9: note = Seed: GVAGALNKA
GLAGALNKM

SEQ ID NO: 27077 - protein, 9 aa, synthetic construct
  source 1..9: note = Seed: GVAGALNKA
GLAGALNKV

SEQ ID NO: 27078 - protein, 10 aa, synthetic construct
  source 1..10: note = Seed: GGASCCLYCR
GLASCCLYCR

SEQ ID NO: 27079 - protein, 9 aa, synthetic construct
  source 1..9: note = Seed: GIATVREVL
GLATVREVL

SEQ ID NO: 27080 - protein, 9 aa, synthetic construct
  source 1..9: note = Seed: GIATVREVL
GLATVREVV

SEQ ID NO: 27081 - protein, 10 aa, synthetic construct
  source 1..10: note = Seed: GVCLFWNCNV
GLCLFWNCNI

SEQ ID NO: 27082 - protein, 10 aa, synthetic construct
  source 1..10: note = Seed: GVCLFWNCNV
GLCLFWNCNL

SEQ ID NO: 27083 - protein, 10 aa, synthetic construct
  source 1..10: note = Seed: GVCLFWNCNV
GLCLFWNCNV

SEQ ID NO: 27084 - protein, 10 aa, synthetic construct
  source 1..10: note = Seed: GFELTSMKYF
GLELTSMKYW

SEQ ID NO: 27085 - protein, 9 aa, synthetic construct
  source 1..9: note = Seed: GLFKDCSKV
GLFKDCSKA

SEQ ID NO: 27086 - protein, 9 aa, synthetic construct
  source 1..9: note = Seed: GDFLHFLPR
GLFLHFLPR

SEQ ID NO: 27087 - protein, 9 aa, synthetic construct
  source 1..9: note = Seed: GVGYQPYRV
GLGYQPYRV

SEQ ID NO: 27088 - protein, 9 aa, synthetic construct
  source 1..9: note = Seed: GLHLLIGLA
GLHLLIGLV

SEQ ID NO: 27089 - protein, 11 aa, synthetic construct
  source 1..11: note = Seed: GYHLMSFPQSA
GLHLMSFPQSI

SEQ ID NO: 27090 - protein, 11 aa, synthetic construct
  source 1..11: note = Seed: GYHLMSFPQSA
GLHLMSFPQSL

SEQ ID NO: 27091 - protein, 11 aa, synthetic construct
  source 1..11: note = Seed: GYHLMSFPQSA
GLHLMSFPQSV

SEQ ID NO: 27092 - protein, 9 aa, synthetic construct
  source 1..9: note = Seed: GLHPTQAPT
GLHPTQAPA

SEQ ID NO: 27093 - protein, 9 aa, synthetic construct
  source 1..9: note = Seed: GLHPTQAPT
GLHPTQAPI

SEQ ID NO: 27094 - protein, 9 aa, synthetic construct
  source 1..9: note = Seed: GLHPTQAPT
GLHPTQAPL

SEQ ID NO: 27095 - protein, 9 aa, synthetic construct
  source 1..9: note = Seed: GLHPTQAPT
GLHPTQAPV

SEQ ID NO: 27096 - protein, 10 aa, synthetic construct
  source 1..10: note = Seed: GKIADYNYKL
GLIADYNYKA

SEQ ID NO: 27097 - protein, 10 aa, synthetic construct
  source 1..10: note = Seed: GKIADYNYKL
GLIADYNYKI

SEQ ID NO: 27098 - protein, 10 aa, synthetic construct
  source 1..10: note = Seed: GKIADYNYKL
GLIADYNYKL

SEQ ID NO: 27099 - protein, 10 aa, synthetic construct
  source 1..10: note = Seed: GKIADYNYKL
GLIADYNYKM

SEQ ID NO: 27100 - protein, 10 aa, synthetic construct
  source 1..10: note = Seed: GKIADYNYKL
GLIADYNYKV

SEQ ID NO: 27101 - protein, 11 aa, synthetic construct
  source 1..11: note = Seed: GFKLKDCVMYA
GLKLKDCVMYV

SEQ ID NO: 27102 - protein, 9 aa, synthetic construct
  source 1..9: note = Seed: GALDISASI
GLLDISASA

SEQ ID NO: 27103 - protein, 9 aa, synthetic construct
  source 1..9: note = Seed: GALDISASI
GLLDISASC

SEQ ID NO: 27104 - protein, 9 aa, synthetic construct
  source 1..9: note = Seed: GALDISASI
GLLDISASF

SEQ ID NO: 27105 - protein, 9 aa, synthetic construct
  source 1..9: note = Seed: GALDISASI
GLLDISASI

SEQ ID NO: 27106 - protein, 10 aa, synthetic construct
  source 1..10: note = Seed: GALDISASIV
GLLDISASIV

SEQ ID NO: 27107 - protein, 9 aa, synthetic construct
  source 1..9: note = Seed: GALDISASI
GLLDISASL

SEQ ID NO: 27108 - protein, 9 aa, synthetic construct
  source 1..9: note = Seed: GALDISASI
GLLDISASM

SEQ ID NO: 27109 - protein, 9 aa, synthetic construct
  source 1..9: note = Seed: GALDISASI
GLLDISAST

SEQ ID NO: 27110 - protein, 9 aa, synthetic construct
  source 1..9: note = Seed: GALDISASI
GLLDISASV

SEQ ID NO: 27111 - protein, 10 aa, synthetic construct
  source 1..10: note = Seed: GFLFLTWICL
GLLFLTWICI

SEQ ID NO: 27112 - protein, 10 aa, synthetic construct
  source 1..10: note = Seed: GFLFLTWICL
GLLFLTWICL

SEQ ID NO: 27113 - protein, 11 aa, synthetic construct
  source 1..11: note = Seed: GFLFLTWICLL
GLLFLTWICLV

SEQ ID NO: 27114 - protein, 10 aa, synthetic construct
  source 1..10: note = Seed: GFLFLTWICL
GLLFLTWICV

SEQ ID NO: 27115 - protein, 10 aa, synthetic construct
  source 1..10: note = Seed: GGLHLLIGLA
GLLHLLIGLV

SEQ ID NO: 27116 - protein, 10 aa, synthetic construct
  source 1..10: note = Seed: GTLIVNSVLL
GLLIVNSVLV

SEQ ID NO: 27117 - protein, 9 aa, synthetic construct
  source 1..9: note = Seed: GTLMIERFV
GLLMIERFI

SEQ ID NO: 27118 - protein, 9 aa, synthetic construct
  source 1..9: note = Seed: GTLMIERFV
GLLMIERFL

SEQ ID NO: 27119 - protein, 9 aa, synthetic construct
  source 1..9: note = Seed: GTLMIERFV
GLLMIERFV

SEQ ID NO: 27120 - protein, 11 aa, synthetic construct
  source 1..11: note = Seed: GTLMIERFVSL
GLLMIERFVSI

SEQ ID NO: 27121 - protein, 11 aa, synthetic construct
  source 1..11: note = Seed: GTLMIERFVSL
GLLMIERFVSL

SEQ ID NO: 27122 - protein, 11 aa, synthetic construct
  source 1..11: note = Seed: GTLMIERFVSL
GLLMIERFVSV

SEQ ID NO: 27123 - protein, 10 aa, synthetic construct
  source 1..10: note = Seed: GYLQPRTFLL
GLLQPRTFLA

SEQ ID NO: 27124 - protein, 10 aa, synthetic construct
  source 1..10: note = Seed: GYLQPRTFLL
GLLQPRTFLI

SEQ ID NO: 27125 - protein, 10 aa, synthetic construct
  source 1..10: note = Seed: GYLQPRTFLL
GLLQPRTFLL

SEQ ID NO: 27126 - protein, 10 aa, synthetic construct
  source 1..10: note = Seed: GYLQPRTFLL
GLLQPRTFLV

SEQ ID NO: 27127 - protein, 9 aa, synthetic construct
  source 1..9: note = Seed: GRLQSLQTY
GLLQSLQTF

SEQ ID NO: 27128 - protein, 10 aa, synthetic construct
  source 1..10: note = Seed: GRLQSLQTYV
GLLQSLQTYA

SEQ ID NO: 27129 - protein, 10 aa, synthetic construct
  source 1..10: note = Seed: GRLQSLQTYV
GLLQSLQTYI

SEQ ID NO: 27130 - protein, 10 aa, synthetic construct
  source 1..10: note = Seed: GRLQSLQTYV
GLLQSLQTYL

SEQ ID NO: 27131 - protein, 10 aa, synthetic construct
  source 1..10: note = Seed: GRLQSLQTYV
GLLQSLQTYV

SEQ ID NO: 27132 - protein, 9 aa, synthetic construct
  source 1..9: note = Seed: GTLSYEQFK
GLLSYEQFK

SEQ ID NO: 27133 - protein, 10 aa, synthetic construct
  source 1..10: note = Seed: GTLSYEQFKK
GLLSYEQFKK

SEQ ID NO: 27134 - protein, 10 aa, synthetic construct
  source 1..10: note = Seed: GTLSYEQFKK
GLLSYEQFKR

SEQ ID NO: 27135 - protein, 9 aa, synthetic construct
  source 1..9: note = Seed: GTLSYEQFK
GLLSYEQFR

SEQ ID NO: 27136 - protein, 9 aa, synthetic construct
  source 1..9: note = Seed: GLMWLSYFI
GLMWLSYFA

SEQ ID NO: 27137 - protein, 9 aa, synthetic construct
  source 1..9: note = Seed: GLMWLSYFI
GLMWLSYFC

SEQ ID NO: 27138 - protein, 9 aa, synthetic construct
  source 1..9: note = Seed: GLMWLSYFI
GLMWLSYFF

SEQ ID NO: 27139 - protein, 11 aa, synthetic construct
  source 1..11: note = Seed: GLMWLSYFIAS
GLMWLSYFIAA

SEQ ID NO: 27140 - protein, 11 aa, synthetic construct
  source 1..11: note = Seed: GLMWLSYFIAS
GLMWLSYFIAI

SEQ ID NO: 27141 - protein, 11 aa, synthetic construct
  source 1..11: note = Seed: GLMWLSYFIAS
GLMWLSYFIAL

SEQ ID NO: 27142 - protein, 11 aa, synthetic construct
  source 1..11: note = Seed: GLMWLSYFIAS
GLMWLSYFIAV

SEQ ID NO: 27143 - protein, 10 aa, synthetic construct
  source 1..10: note = Seed: GLMWLSYFIA
GLMWLSYFIC

SEQ ID NO: 27144 - protein, 10 aa, synthetic construct
  source 1..10: note = Seed: GLMWLSYFIA
GLMWLSYFID

SEQ ID NO: 27145 - protein, 10 aa, synthetic construct
  source 1..10: note = Seed: GLMWLSYFIA
GLMWLSYFIE

SEQ ID NO: 27146 - protein, 10 aa, synthetic construct
  source 1..10: note = Seed: GLMWLSYFIA
GLMWLSYFIF

SEQ ID NO: 27147 - protein, 10 aa, synthetic construct
  source 1..10: note = Seed: GLMWLSYFIA
GLMWLSYFIG

SEQ ID NO: 27148 - protein, 10 aa, synthetic construct
  source 1..10: note = Seed: GLMWLSYFIA
GLMWLSYFIH

SEQ ID NO: 27149 - protein, 10 aa, synthetic construct
  source 1..10: note = Seed: GLMWLSYFIA
GLMWLSYFII

SEQ ID NO: 27150 - protein, 10 aa, synthetic construct
  source 1..10: note = Seed: GLMWLSYFIA
GLMWLSYFIK

SEQ ID NO: 27151 - protein, 10 aa, synthetic construct
  source 1..10: note = Seed: GLMWLSYFIA
GLMWLSYFIL

SEQ ID NO: 27152 - protein, 10 aa, synthetic construct
  source 1..10: note = Seed: GLMWLSYFIA
GLMWLSYFIM

SEQ ID NO: 27153 - protein, 10 aa, synthetic construct
  source 1..10: note = Seed: GLMWLSYFIA
GLMWLSYFIN

SEQ ID NO: 27154 - protein, 10 aa, synthetic construct
  source 1..10: note = Seed: GLMWLSYFIA
GLMWLSYFIP

SEQ ID NO: 27155 - protein, 10 aa, synthetic construct
  source 1..10: note = Seed: GLMWLSYFIA
GLMWLSYFIQ

SEQ ID NO: 27156 - protein, 10 aa, synthetic construct
  source 1..10: note = Seed: GLMWLSYFIA
GLMWLSYFIR

SEQ ID NO: 27157 - protein, 10 aa, synthetic construct
  source 1..10: note = Seed: GLMWLSYFIA
GLMWLSYFIS

SEQ ID NO: 27158 - protein, 10 aa, synthetic construct
  source 1..10: note = Seed: GLMWLSYFIA
GLMWLSYFIT

SEQ ID NO: 27159 - protein, 10 aa, synthetic construct
  source 1..10: note = Seed: GLMWLSYFIA
GLMWLSYFIV

SEQ ID NO: 27160 - protein, 10 aa, synthetic construct
  source 1..10: note = Seed: GLMWLSYFIA
GLMWLSYFIW

SEQ ID NO: 27161 - protein, 10 aa, synthetic construct
  source 1..10: note = Seed: GLMWLSYFIA
GLMWLSYFIY

SEQ ID NO: 27162 - protein, 9 aa, synthetic construct
  source 1..9: note = Seed: GLMWLSYFI
GLMWLSYFL

SEQ ID NO: 27163 - protein, 9 aa, synthetic construct
  source 1..9: note = Seed: GLMWLSYFI
GLMWLSYFM

SEQ ID NO: 27164 - protein, 9 aa, synthetic construct
  source 1..9: note = Seed: GLMWLSYFI
GLMWLSYFS

SEQ ID NO: 27165 - protein, 9 aa, synthetic construct
  source 1..9: note = Seed: GLMWLSYFI
GLMWLSYFT

SEQ ID NO: 27166 - protein, 9 aa, synthetic construct
  source 1..9: note = Seed: GLMWLSYFI
GLMWLSYFV

SEQ ID NO: 27167 - protein, 9 aa, synthetic construct
  source 1..9: note = Seed: GLNNLNRGM
GLNNLNRGV

SEQ ID NO: 27168 - protein, 9 aa, synthetic construct
  source 1..9: note = Seed: GGNYNYLYR
GLNYNYLYR

SEQ ID NO: 27169 - protein, 9 aa, synthetic construct
  source 1..9: note = Seed: GASCCLYCR
GLSCCLYCR

SEQ ID NO: 27170 - protein, 10 aa, synthetic construct
  source 1..10: note = Seed: GDSGFAAYSR
GLSGFAAYSR

SEQ ID NO: 27171 - protein, 9 aa, synthetic construct
  source 1..9: note = Seed: GSTFISDEV
GLTFISDEV

SEQ ID NO: 27172 - protein, 10 aa, synthetic construct
  source 1..10: note = Seed: GLVAEWFLAY
GLVAEWFLAF

SEQ ID NO: 27173 - protein, 10 aa, synthetic construct
  source 1..10: note = Seed: GLVAEWFLAY
GLVAEWFLAK

SEQ ID NO: 27174 - protein, 11 aa, synthetic construct
  source 1..11: note = Seed: GLVAEWFLAYI
GLVAEWFLAYL

SEQ ID NO: 27175 - protein, 11 aa, synthetic construct
  source 1..11: note = Seed: GLVAEWFLAYI
GLVAEWFLAYV

SEQ ID NO: 27176 - protein, 9 aa, synthetic construct
  source 1..9: note = Seed: GLVAEWFLA
GLVAEWFLI

SEQ ID NO: 27177 - protein, 9 aa, synthetic construct
  source 1..9: note = Seed: GLVAEWFLA
GLVAEWFLL

SEQ ID NO: 27178 - protein, 9 aa, synthetic construct
  source 1..9: note = Seed: GLVAEWFLA
GLVAEWFLM

SEQ ID NO: 27179 - protein, 9 aa, synthetic construct
  source 1..9: note = Seed: GLVAEWFLA
GLVAEWFLV

SEQ ID NO: 27180 - protein, 9 aa, synthetic construct
  source 1..9: note = Seed: GLVEVEKGV
GLVEVEKGL

SEQ ID NO: 27181 - protein, 10 aa, synthetic construct
  source 1..10: note = Seed: GVVFLHVTYV
GLVFLHVTYA

SEQ ID NO: 27182 - protein, 10 aa, synthetic construct
  source 1..10: note = Seed: GVVFLHVTYV
GLVFLHVTYI

SEQ ID NO: 27183 - protein, 10 aa, synthetic construct
  source 1..10: note = Seed: GVVFLHVTYV
GLVFLHVTYL

SEQ ID NO: 27184 - protein, 10 aa, synthetic construct
  source 1..10: note = Seed: GVVFLHVTYV
GLVFLHVTYV

SEQ ID NO: 27185 - protein, 11 aa, synthetic construct
  source 1..11: note = Seed: GRWVLNNDYYR
GLWVLNNDYYR

SEQ ID NO: 27186 - protein, 9 aa, synthetic construct
  source 1..9: note = Seed: GVYDYLVST
GLYDYLVSA

SEQ ID NO: 27187 - protein, 9 aa, synthetic construct
  source 1..9: note = Seed: GVYDYLVST
GLYDYLVSC

SEQ ID NO: 27188 - protein, 9 aa, synthetic construct
  source 1..9: note = Seed: GVYDYLVST
GLYDYLVSF

SEQ ID NO: 27189 - protein, 9 aa, synthetic construct
  source 1..9: note = Seed: GVYDYLVST
GLYDYLVSG

SEQ ID NO: 27190 - protein, 9 aa, synthetic construct
  source 1..9: note = Seed: GVYDYLVST
GLYDYLVSI

SEQ ID NO: 27191 - protein, 9 aa, synthetic construct
  source 1..9: note = Seed: GVYDYLVST
GLYDYLVSL

SEQ ID NO: 27192 - protein, 9 aa, synthetic construct
  source 1..9: note = Seed: GVYDYLVST
GLYDYLVSM

SEQ ID NO: 27193 - protein, 9 aa, synthetic construct
  source 1..9: note = Seed: GVYDYLVST
GLYDYLVSP

SEQ ID NO: 27194 - protein, 9 aa, synthetic construct
  source 1..9: note = Seed: GVYDYLVST
GLYDYLVSS

SEQ ID NO: 27195 - protein, 9 aa, synthetic construct
  source 1..9: note = Seed: GVYDYLVST
GLYDYLVST

SEQ ID NO: 27196 - protein, 9 aa, synthetic construct
  source 1..9: note = Seed: GVYDYLVST
GLYDYLVSV

SEQ ID NO: 27197 - protein, 11 aa, synthetic construct
  source 1..11: note = Seed: GNYNYLYRLFR
GLYNYLYRLFR

SEQ ID NO: 27198 - protein, 9 aa, synthetic construct
  source 1..9: note = Seed: GNYQCGHYK
GLYQCGHYK

SEQ ID NO: 27199 - protein, 9 aa, synthetic construct
  source 1..9: note = Seed: GNYQCGHYK
GLYQCGHYR

SEQ ID NO: 27200 - protein, 9 aa, synthetic construct
  source 1..9: note = Seed: GIYQTSNFR
GLYQTSNFK

SEQ ID NO: 27201 - protein, 9 aa, synthetic construct
  source 1..9: note = Seed: GIYQTSNFR
GLYQTSNFR

SEQ ID NO: 27202 - protein, 10 aa, synthetic construct
  source 1..10: note = Seed: GIYQTSNFRV
GLYQTSNFRI

SEQ ID NO: 27203 - protein, 10 aa, synthetic construct
  source 1..10: note = Seed: GIYQTSNFRV
GLYQTSNFRL

SEQ ID NO: 27204 - protein, 10 aa, synthetic construct
  source 1..10: note = Seed: GIYQTSNFRV
GLYQTSNFRV

SEQ ID NO: 27205 - protein, 9 aa, synthetic construct
  source 1..9: note = Seed: GYYRRATRR
GLYRRATRR

SEQ ID NO: 27206 - protein, 9 aa, synthetic construct
  source 1..9: note = Seed: GEAANFCAL
GMAANFCAF

SEQ ID NO: 27207 - protein, 9 aa, synthetic construct
  source 1..9: note = Seed: GEAANFCAL
GMAANFCAL

SEQ ID NO: 27208 - protein, 9 aa, synthetic construct
  source 1..9: note = Seed: GEAANFCAL
GMAANFCAM

SEQ ID NO: 27209 - protein, 9 aa, synthetic construct
  source 1..9: note = Seed: GEAANFCAL
GMAANFCAW

SEQ ID NO: 27210 - protein, 9 aa, synthetic construct
  source 1..9: note = Seed: GEAANFCAL
GMAANFCAY

SEQ ID NO: 27211 - protein, 9 aa, synthetic construct
  source 1..9: note = Seed: GVAGALNKA
GMAGALNKA

SEQ ID NO: 27212 - protein, 9 aa, synthetic construct
  source 1..9: note = Seed: GVAGALNKA
GMAGALNKI

SEQ ID NO: 27213 - protein, 9 aa, synthetic construct
  source 1..9: note = Seed: GVAGALNKA
GMAGALNKL

SEQ ID NO: 27214 - protein, 9 aa, synthetic construct
  source 1..9: note = Seed: GVAGALNKA
GMAGALNKM

SEQ ID NO: 27215 - protein, 9 aa, synthetic construct
  source 1..9: note = Seed: GVAGALNKA
GMAGALNKV

SEQ ID NO: 27216 - protein, 10 aa, synthetic construct
  source 1..10: note = Seed: GGASCCLYCR
GMASCCLYCK

SEQ ID NO: 27217 - protein, 10 aa, synthetic construct
  source 1..10: note = Seed: GGASCCLYCR
GMASCCLYCR

SEQ ID NO: 27218 - protein, 9 aa, synthetic construct
  source 1..9: note = Seed: GIATVREVL
GMATVREVL

SEQ ID NO: 27219 - protein, 9 aa, synthetic construct
  source 1..9: note = Seed: GIATVREVL
GMATVREVV

SEQ ID NO: 27220 - protein, 10 aa, synthetic construct
  source 1..10: note = Seed: GVCLFWNCNV
GMCLFWNCNI

SEQ ID NO: 27221 - protein, 10 aa, synthetic construct
  source 1..10: note = Seed: GVCLFWNCNV
GMCLFWNCNL

SEQ ID NO: 27222 - protein, 10 aa, synthetic construct
  source 1..10: note = Seed: GVCLFWNCNV
GMCLFWNCNV

SEQ ID NO: 27223 - protein, 10 aa, synthetic construct
  source 1..10: note = Seed: GFELTSMKYF
GMELTSMKYW

SEQ ID NO: 27224 - protein, 9 aa, synthetic construct
  source 1..9: note = Seed: GLFKDCSKV
GMFKDCSKA

SEQ ID NO: 27225 - protein, 9 aa, synthetic construct
  source 1..9: note = Seed: GLFKDCSKV
GMFKDCSKV

SEQ ID NO: 27226 - protein, 9 aa, synthetic construct
  source 1..9: note = Seed: GDFLHFLPR
GMFLHFLPK

SEQ ID NO: 27227 - protein, 9 aa, synthetic construct
  source 1..9: note = Seed: GDFLHFLPR
GMFLHFLPR

SEQ ID NO: 27228 - protein, 9 aa, synthetic construct
  source 1..9: note = Seed: GKGYHLMSF
GMGYHLMSF

SEQ ID NO: 27229 - protein, 9 aa, synthetic construct
  source 1..9: note = Seed: GKGYHLMSF
GMGYHLMSY

SEQ ID NO: 27230 - protein, 9 aa, synthetic construct
  source 1..9: note = Seed: GVGYQPYRV
GMGYQPYRV

SEQ ID NO: 27231 - protein, 9 aa, synthetic construct
  source 1..9: note = Seed: GLHLLIGLA
GMHLLIGLA

SEQ ID NO: 27232 - protein, 9 aa, synthetic construct
  source 1..9: note = Seed: GLHLLIGLA
GMHLLIGLV

SEQ ID NO: 27233 - protein, 11 aa, synthetic construct
  source 1..11: note = Seed: GYHLMSFPQSA
GMHLMSFPQSI

SEQ ID NO: 27234 - protein, 11 aa, synthetic construct
  source 1..11: note = Seed: GYHLMSFPQSA
GMHLMSFPQSL

SEQ ID NO: 27235 - protein, 11 aa, synthetic construct
  source 1..11: note = Seed: GYHLMSFPQSA
GMHLMSFPQSV

SEQ ID NO: 27236 - protein, 9 aa, synthetic construct
  source 1..9: note = Seed: GLHPTQAPT
GMHPTQAPA

SEQ ID NO: 27237 - protein, 9 aa, synthetic construct
  source 1..9: note = Seed: GLHPTQAPT
GMHPTQAPI

SEQ ID NO: 27238 - protein, 9 aa, synthetic construct
  source 1..9: note = Seed: GLHPTQAPT
GMHPTQAPL

SEQ ID NO: 27239 - protein, 9 aa, synthetic construct
  source 1..9: note = Seed: GLHPTQAPT
GMHPTQAPV

SEQ ID NO: 27240 - protein, 10 aa, synthetic construct
  source 1..10: note = Seed: GKIADYNYKL
GMIADYNYKA

SEQ ID NO: 27241 - protein, 10 aa, synthetic construct
  source 1..10: note = Seed: GKIADYNYKL
GMIADYNYKI

SEQ ID NO: 27242 - protein, 10 aa, synthetic construct
  source 1..10: note = Seed: GKIADYNYKL
GMIADYNYKL

SEQ ID NO: 27243 - protein, 10 aa, synthetic construct
  source 1..10: note = Seed: GKIADYNYKL
GMIADYNYKM

SEQ ID NO: 27244 - protein, 10 aa, synthetic construct
  source 1..10: note = Seed: GKIADYNYKL
GMIADYNYKV

SEQ ID NO: 27245 - protein, 11 aa, synthetic construct
  source 1..11: note = Seed: GFKLKDCVMYA
GMKLKDCVMYV

SEQ ID NO: 27246 - protein, 9 aa, synthetic construct
  source 1..9: note = Seed: GALDISASI
GMLDISASA

SEQ ID NO: 27247 - protein, 9 aa, synthetic construct
  source 1..9: note = Seed: GALDISASI
GMLDISASC

SEQ ID NO: 27248 - protein, 9 aa, synthetic construct
  source 1..9: note = Seed: GALDISASI
GMLDISASF

SEQ ID NO: 27249 - protein, 9 aa, synthetic construct
  source 1..9: note = Seed: GALDISASI
GMLDISASI

SEQ ID NO: 27250 - protein, 10 aa, synthetic construct
  source 1..10: note = Seed: GALDISASIV
GMLDISASIV

SEQ ID NO: 27251 - protein, 9 aa, synthetic construct
  source 1..9: note = Seed: GALDISASI
GMLDISASL

SEQ ID NO: 27252 - protein, 9 aa, synthetic construct
  source 1..9: note = Seed: GALDISASI
GMLDISASM

SEQ ID NO: 27253 - protein, 9 aa, synthetic construct
  source 1..9: note = Seed: GALDISASI
GMLDISAST

SEQ ID NO: 27254 - protein, 9 aa, synthetic construct
  source 1..9: note = Seed: GALDISASI
GMLDISASV

SEQ ID NO: 27255 - protein, 10 aa, synthetic construct
  source 1..10: note = Seed: GFLFLTWICL
GMLFLTWICI

SEQ ID NO: 27256 - protein, 10 aa, synthetic construct
  source 1..10: note = Seed: GFLFLTWICL
GMLFLTWICL

SEQ ID NO: 27257 - protein, 11 aa, synthetic construct
  source 1..11: note = Seed: GFLFLTWICLL
GMLFLTWICLI

SEQ ID NO: 27258 - protein, 11 aa, synthetic construct
  source 1..11: note = Seed: GFLFLTWICLL
GMLFLTWICLL

SEQ ID NO: 27259 - protein, 11 aa, synthetic construct
  source 1..11: note = Seed: GFLFLTWICLL
GMLFLTWICLV

SEQ ID NO: 27260 - protein, 10 aa, synthetic construct
  source 1..10: note = Seed: GFLFLTWICL
GMLFLTWICV

SEQ ID NO: 27261 - protein, 10 aa, synthetic construct
  source 1..10: note = Seed: GGLHLLIGLA
GMLHLLIGLV

SEQ ID NO: 27262 - protein, 10 aa, synthetic construct
  source 1..10: note = Seed: GTLIVNSVLL
GMLIVNSVLV

SEQ ID NO: 27263 - protein, 9 aa, synthetic construct
  source 1..9: note = Seed: GTLMIERFV
GMLMIERFI

SEQ ID NO: 27264 - protein, 9 aa, synthetic construct
  source 1..9: note = Seed: GTLMIERFV
GMLMIERFL

SEQ ID NO: 27265 - protein, 9 aa, synthetic construct
  source 1..9: note = Seed: GTLMIERFV
GMLMIERFV

SEQ ID NO: 27266 - protein, 11 aa, synthetic construct
  source 1..11: note = Seed: GTLMIERFVSL
GMLMIERFVSI

SEQ ID NO: 27267 - protein, 11 aa, synthetic construct
  source 1..11: note = Seed: GTLMIERFVSL
GMLMIERFVSL

SEQ ID NO: 27268 - protein, 11 aa, synthetic construct
  source 1..11: note = Seed: GTLMIERFVSL
GMLMIERFVSV

SEQ ID NO: 27269 - protein, 10 aa, synthetic construct
  source 1..10: note = Seed: GYLQPRTFLL
GMLQPRTFLA

SEQ ID NO: 27270 - protein, 10 aa, synthetic construct
  source 1..10: note = Seed: GYLQPRTFLL
GMLQPRTFLI

SEQ ID NO: 27271 - protein, 10 aa, synthetic construct
  source 1..10: note = Seed: GYLQPRTFLL
GMLQPRTFLL

SEQ ID NO: 27272 - protein, 11 aa, synthetic construct
  source 1..11: note = Seed: GYLQPRTFLLK
GMLQPRTFLLR

SEQ ID NO: 27273 - protein, 10 aa, synthetic construct
  source 1..10: note = Seed: GYLQPRTFLL
GMLQPRTFLV

SEQ ID NO: 27274 - protein, 9 aa, synthetic construct
  source 1..9: note = Seed: GRLQSLQTY
GMLQSLQTF

SEQ ID NO: 27275 - protein, 9 aa, synthetic construct
  source 1..9: note = Seed: GRLQSLQTY
GMLQSLQTM

SEQ ID NO: 27276 - protein, 9 aa, synthetic construct
  source 1..9: note = Seed: GRLQSLQTY
GMLQSLQTY

SEQ ID NO: 27277 - protein, 10 aa, synthetic construct
  source 1..10: note = Seed: GRLQSLQTYV
GMLQSLQTYA

SEQ ID NO: 27278 - protein, 10 aa, synthetic construct
  source 1..10: note = Seed: GRLQSLQTYV
GMLQSLQTYI

SEQ ID NO: 27279 - protein, 10 aa, synthetic construct
  source 1..10: note = Seed: GRLQSLQTYV
GMLQSLQTYL

SEQ ID NO: 27280 - protein, 10 aa, synthetic construct
  source 1..10: note = Seed: GRLQSLQTYV
GMLQSLQTYV

SEQ ID NO: 27281 - protein, 9 aa, synthetic construct
  source 1..9: note = Seed: GTLSYEQFK
GMLSYEQFK

SEQ ID NO: 27282 - protein, 10 aa, synthetic construct
  source 1..10: note = Seed: GTLSYEQFKK
GMLSYEQFKK

SEQ ID NO: 27283 - protein, 10 aa, synthetic construct
  source 1..10: note = Seed: GTLSYEQFKK
GMLSYEQFKR

SEQ ID NO: 27284 - protein, 9 aa, synthetic construct
  source 1..9: note = Seed: GTLSYEQFK
GMLSYEQFR

SEQ ID NO: 27285 - protein, 10 aa, synthetic construct
  source 1..10: note = Seed: GSLYVNKHAF
GMLYVNKHAF

SEQ ID NO: 27286 - protein, 10 aa, synthetic construct
  source 1..10: note = Seed: GSLYVNKHAF
GMLYVNKHAY

SEQ ID NO: 27287 - protein, 9 aa, synthetic construct
  source 1..9: note = Seed: GLMWLSYFI
GMMWLSYFA

SEQ ID NO: 27288 - protein, 9 aa, synthetic construct
  source 1..9: note = Seed: GLMWLSYFI
GMMWLSYFC

SEQ ID NO: 27289 - protein, 9 aa, synthetic construct
  source 1..9: note = Seed: GLMWLSYFI
GMMWLSYFF

SEQ ID NO: 27290 - protein, 9 aa, synthetic construct
  source 1..9: note = Seed: GLMWLSYFI
GMMWLSYFI

SEQ ID NO: 27291 - protein, 10 aa, synthetic construct
  source 1..10: note = Seed: GLMWLSYFIA
GMMWLSYFIA

SEQ ID NO: 27292 - protein, 11 aa, synthetic construct
  source 1..11: note = Seed: GLMWLSYFIAS
GMMWLSYFIAA

SEQ ID NO: 27293 - protein, 11 aa, synthetic construct
  source 1..11: note = Seed: GLMWLSYFIAS
GMMWLSYFIAI

SEQ ID NO: 27294 - protein, 11 aa, synthetic construct
  source 1..11: note = Seed: GLMWLSYFIAS
GMMWLSYFIAL

SEQ ID NO: 27295 - protein, 11 aa, synthetic construct
  source 1..11: note = Seed: GLMWLSYFIAS
GMMWLSYFIAV

SEQ ID NO: 27296 - protein, 10 aa, synthetic construct
  source 1..10: note = Seed: GLMWLSYFIA
GMMWLSYFIC

SEQ ID NO: 27297 - protein, 10 aa, synthetic construct
  source 1..10: note = Seed: GLMWLSYFIA
GMMWLSYFID

SEQ ID NO: 27298 - protein, 10 aa, synthetic construct
  source 1..10: note = Seed: GLMWLSYFIA
GMMWLSYFIE

SEQ ID NO: 27299 - protein, 10 aa, synthetic construct
  source 1..10: note = Seed: GLMWLSYFIA
GMMWLSYFIF

SEQ ID NO: 27300 - protein, 10 aa, synthetic construct
  source 1..10: note = Seed: GLMWLSYFIA
GMMWLSYFIG

SEQ ID NO: 27301 - protein, 10 aa, synthetic construct
  source 1..10: note = Seed: GLMWLSYFIA
GMMWLSYFIH

SEQ ID NO: 27302 - protein, 10 aa, synthetic construct
  source 1..10: note = Seed: GLMWLSYFIA
GMMWLSYFII

SEQ ID NO: 27303 - protein, 10 aa, synthetic construct
  source 1..10: note = Seed: GLMWLSYFIA
GMMWLSYFIK

SEQ ID NO: 27304 - protein, 10 aa, synthetic construct
  source 1..10: note = Seed: GLMWLSYFIA
GMMWLSYFIL

SEQ ID NO: 27305 - protein, 10 aa, synthetic construct
  source 1..10: note = Seed: GLMWLSYFIA
GMMWLSYFIM

SEQ ID NO: 27306 - protein, 10 aa, synthetic construct
  source 1..10: note = Seed: GLMWLSYFIA
GMMWLSYFIN

SEQ ID NO: 27307 - protein, 10 aa, synthetic construct
  source 1..10: note = Seed: GLMWLSYFIA
GMMWLSYFIP

SEQ ID NO: 27308 - protein, 10 aa, synthetic construct
  source 1..10: note = Seed: GLMWLSYFIA
GMMWLSYFIQ

SEQ ID NO: 27309 - protein, 10 aa, synthetic construct
  source 1..10: note = Seed: GLMWLSYFIA
GMMWLSYFIR

SEQ ID NO: 27310 - protein, 10 aa, synthetic construct
  source 1..10: note = Seed: GLMWLSYFIA
GMMWLSYFIS

SEQ ID NO: 27311 - protein, 10 aa, synthetic construct
  source 1..10: note = Seed: GLMWLSYFIA
GMMWLSYFIT

SEQ ID NO: 27312 - protein, 10 aa, synthetic construct
  source 1..10: note = Seed: GLMWLSYFIA
GMMWLSYFIV

SEQ ID NO: 27313 - protein, 10 aa, synthetic construct
  source 1..10: note = Seed: GLMWLSYFIA
GMMWLSYFIW

SEQ ID NO: 27314 - protein, 10 aa, synthetic construct
  source 1..10: note = Seed: GLMWLSYFIA
GMMWLSYFIY

SEQ ID NO: 27315 - protein, 9 aa, synthetic construct
  source 1..9: note = Seed: GLMWLSYFI
GMMWLSYFL

SEQ ID NO: 27316 - protein, 9 aa, synthetic construct
  source 1..9: note = Seed: GLMWLSYFI
GMMWLSYFM

SEQ ID NO: 27317 - protein, 9 aa, synthetic construct
  source 1..9: note = Seed: GLMWLSYFI
GMMWLSYFP

SEQ ID NO: 27318 - protein, 9 aa, synthetic construct
  source 1..9: note = Seed: GLMWLSYFI
GMMWLSYFS

SEQ ID NO: 27319 - protein, 9 aa, synthetic construct
  source 1..9: note = Seed: GLMWLSYFI
GMMWLSYFT

SEQ ID NO: 27320 - protein, 9 aa, synthetic construct
  source 1..9: note = Seed: GLMWLSYFI
GMMWLSYFV

SEQ ID NO: 27321 - protein, 9 aa, synthetic construct
  source 1..9: note = Seed: GLMWLSYFI
GMMWLSYFW

SEQ ID NO: 27322 - protein, 9 aa, synthetic construct
  source 1..9: note = Seed: GLNNLNRGM
GMNNLNRGV

SEQ ID NO: 27323 - protein, 9 aa, synthetic construct
  source 1..9: note = Seed: GGNYNYLYR
GMNYNYLYK

SEQ ID NO: 27324 - protein, 9 aa, synthetic construct
  source 1..9: note = Seed: GGNYNYLYR
GMNYNYLYR

SEQ ID NO: 27325 - protein, 10 aa, synthetic construct
  source 1..10: note = Seed: GVPFVVSTGY
GMPFVVSTGF

SEQ ID NO: 27326 - protein, 10 aa, synthetic construct
  source 1..10: note = Seed: GVPFVVSTGY
GMPFVVSTGY

SEQ ID NO: 27327 - protein, 9 aa, synthetic construct
  source 1..9: note = Seed: GYPNMFITR
GMPNMFITR

SEQ ID NO: 27328 - protein, 9 aa, synthetic construct
  source 1..9: note = Seed: GGQIVTCAK
GMQIVTCAR

SEQ ID NO: 27329 - protein, 9 aa, synthetic construct
  source 1..9: note = Seed: GLQPSVGPK
GMQPSVGPK

SEQ ID NO: 27330 - protein, 9 aa, synthetic construct
  source 1..9: note = Seed: GLQPSVGPK
GMQPSVGPR

SEQ ID NO: 27331 - protein, 9 aa, synthetic construct
  source 1..9: note = Seed: GYRVTKNSK
GMRVTKNSK

SEQ ID NO: 27332 - protein, 9 aa, synthetic construct
  source 1..9: note = Seed: GASCCLYCR
GMSCCLYCK

SEQ ID NO: 27333 - protein, 9 aa, synthetic construct
  source 1..9: note = Seed: GASCCLYCR
GMSCCLYCR

SEQ ID NO: 27334 - protein, 10 aa, synthetic construct
  source 1..10: note = Seed: GDSGFAAYSR
GMSGFAAYSR

SEQ ID NO: 27335 - protein, 8 aa, synthetic construct
  source 1..8: note = Seed: GFSLWVYK
GMSLWVYR

SEQ ID NO: 27336 - protein, 10 aa, synthetic construct
  source 1..10: note = Seed: GHSMQNCVLK
GMSMQNCVLK

SEQ ID NO: 27337 - protein, 10 aa, synthetic construct
  source 1..10: note = Seed: GHSMQNCVLK
GMSMQNCVLR

SEQ ID NO: 27338 - protein, 9 aa, synthetic construct
  source 1..9: note = Seed: GSTFISDEV
GMTFISDEV

SEQ ID NO: 27339 - protein, 11 aa, synthetic construct
  source 1..11: note = Seed: GSTFISDEVAR
GMTFISDEVAR

SEQ ID NO: 27340 - protein, 10 aa, synthetic construct
  source 1..10: note = Seed: GQTFSVLACY
GMTFSVLACF

SEQ ID NO: 27341 - protein, 10 aa, synthetic construct
  source 1..10: note = Seed: GQTFSVLACY
GMTFSVLACY

SEQ ID NO: 27342 - protein, 9 aa, synthetic construct
  source 1..9: note = Seed: GLVAEWFLA
GMVAEWFLA

SEQ ID NO: 27343 - protein, 10 aa, synthetic construct
  source 1..10: note = Seed: GLVAEWFLAY
GMVAEWFLAF

SEQ ID NO: 27344 - protein, 10 aa, synthetic construct
  source 1..10: note = Seed: GLVAEWFLAY
GMVAEWFLAK

SEQ ID NO: 27345 - protein, 10 aa, synthetic construct
  source 1..10: note = Seed: GLVAEWFLAY
GMVAEWFLAM

SEQ ID NO: 27346 - protein, 10 aa, synthetic construct
  source 1..10: note = Seed: GLVAEWFLAY
GMVAEWFLAY

SEQ ID NO: 27347 - protein, 11 aa, synthetic construct
  source 1..11: note = Seed: GLVAEWFLAYI
GMVAEWFLAYI

SEQ ID NO: 27348 - protein, 11 aa, synthetic construct
  source 1..11: note = Seed: GLVAEWFLAYI
GMVAEWFLAYL

SEQ ID NO: 27349 - protein, 11 aa, synthetic construct
  source 1..11: note = Seed: GLVAEWFLAYI
GMVAEWFLAYV

SEQ ID NO: 27350 - protein, 9 aa, synthetic construct
  source 1..9: note = Seed: GLVAEWFLA
GMVAEWFLI

SEQ ID NO: 27351 - protein, 9 aa, synthetic construct
  source 1..9: note = Seed: GLVAEWFLA
GMVAEWFLL

SEQ ID NO: 27352 - protein, 9 aa, synthetic construct
  source 1..9: note = Seed: GLVAEWFLA
GMVAEWFLM

SEQ ID NO: 27353 - protein, 9 aa, synthetic construct
  source 1..9: note = Seed: GLVAEWFLA
GMVAEWFLV

SEQ ID NO: 27354 - protein, 9 aa, synthetic construct
  source 1..9: note = Seed: GSVAYESLR
GMVAYESLR

SEQ ID NO: 27355 - protein, 9 aa, synthetic construct
  source 1..9: note = Seed: GLVEVEKGV
GMVEVEKGV

SEQ ID NO: 27356 - protein, 9 aa, synthetic construct
  source 1..9: note = Seed: GVVFLHVTY
GMVFLHVTF

SEQ ID NO: 27357 - protein, 9 aa, synthetic construct
  source 1..9: note = Seed: GVVFLHVTY
GMVFLHVTM

SEQ ID NO: 27358 - protein, 9 aa, synthetic construct
  source 1..9: note = Seed: GVVFLHVTY
GMVFLHVTY

SEQ ID NO: 27359 - protein, 10 aa, synthetic construct
  source 1..10: note = Seed: GVVFLHVTYV
GMVFLHVTYA

SEQ ID NO: 27360 - protein, 10 aa, synthetic construct
  source 1..10: note = Seed: GVVFLHVTYV
GMVFLHVTYI

SEQ ID NO: 27361 - protein, 10 aa, synthetic construct
  source 1..10: note = Seed: GVVFLHVTYV
GMVFLHVTYL

SEQ ID NO: 27362 - protein, 10 aa, synthetic construct
  source 1..10: note = Seed: GVVFLHVTYV
GMVFLHVTYM

SEQ ID NO: 27363 - protein, 10 aa, synthetic construct
  source 1..10: note = Seed: GVVFLHVTYV
GMVFLHVTYV

SEQ ID NO: 27364 - protein, 10 aa, synthetic construct
  source 1..10: note = Seed: GVVQQLPETY
GMVQQLPETY

SEQ ID NO: 27365 - protein, 11 aa, synthetic construct
  source 1..11: note = Seed: GRWVLNNDYYR
GMWVLNNDYYR

SEQ ID NO: 27366 - protein, 9 aa, synthetic construct
  source 1..9: note = Seed: GVYDYLVST
GMYDYLVSA

SEQ ID NO: 27367 - protein, 9 aa, synthetic construct
  source 1..9: note = Seed: GVYDYLVST
GMYDYLVSC

SEQ ID NO: 27368 - protein, 9 aa, synthetic construct
  source 1..9: note = Seed: GVYDYLVST
GMYDYLVSF

SEQ ID NO: 27369 - protein, 9 aa, synthetic construct
  source 1..9: note = Seed: GVYDYLVST
GMYDYLVSG

SEQ ID NO: 27370 - protein, 9 aa, synthetic construct
  source 1..9: note = Seed: GVYDYLVST
GMYDYLVSI

SEQ ID NO: 27371 - protein, 9 aa, synthetic construct
  source 1..9: note = Seed: GVYDYLVST
GMYDYLVSL

SEQ ID NO: 27372 - protein, 9 aa, synthetic construct
  source 1..9: note = Seed: GVYDYLVST
GMYDYLVSM

SEQ ID NO: 27373 - protein, 9 aa, synthetic construct
  source 1..9: note = Seed: GVYDYLVST
GMYDYLVSP

SEQ ID NO: 27374 - protein, 9 aa, synthetic construct
  source 1..9: note = Seed: GVYDYLVST
GMYDYLVSS

SEQ ID NO: 27375 - protein, 9 aa, synthetic construct
  source 1..9: note = Seed: GVYDYLVST
GMYDYLVST

SEQ ID NO: 27376 - protein, 9 aa, synthetic construct
  source 1..9: note = Seed: GVYDYLVST
GMYDYLVSV

SEQ ID NO: 27377 - protein, 8 aa, synthetic construct
  source 1..8: note = Seed: GNYNYLYR
GMYNYLYR

SEQ ID NO: 27378 - protein, 10 aa, synthetic construct
  source 1..10: note = Seed: GNYNYLYRLF
GMYNYLYRLF

SEQ ID NO: 27379 - protein, 11 aa, synthetic construct
  source 1..11: note = Seed: GNYNYLYRLFR
GMYNYLYRLFK

SEQ ID NO: 27380 - protein, 11 aa, synthetic construct
  source 1..11: note = Seed: GNYNYLYRLFR
GMYNYLYRLFR

SEQ ID NO: 27381 - protein, 9 aa, synthetic construct
  source 1..9: note = Seed: GNYQCGHYK
GMYQCGHYK

SEQ ID NO: 27382 - protein, 9 aa, synthetic construct
  source 1..9: note = Seed: GNYQCGHYK
GMYQCGHYR

SEQ ID NO: 27383 - protein, 9 aa, synthetic construct
  source 1..9: note = Seed: GIYQTSNFR
GMYQTSNFK

SEQ ID NO: 27384 - protein, 9 aa, synthetic construct
  source 1..9: note = Seed: GIYQTSNFR
GMYQTSNFR

SEQ ID NO: 27385 - protein, 10 aa, synthetic construct
  source 1..10: note = Seed: GIYQTSNFRV
GMYQTSNFRI

SEQ ID NO: 27386 - protein, 10 aa, synthetic construct
  source 1..10: note = Seed: GIYQTSNFRV
GMYQTSNFRL

SEQ ID NO: 27387 - protein, 10 aa, synthetic construct
  source 1..10: note = Seed: GIYQTSNFRV
GMYQTSNFRV

SEQ ID NO: 27388 - protein, 9 aa, synthetic construct
  source 1..9: note = Seed: GYYRRATRR
GMYRRATRR

SEQ ID NO: 27389 - protein, 9 aa, synthetic construct
  source 1..9: note = Seed: GEAANFCAL
GNAANFCAF

SEQ ID NO: 27390 - protein, 9 aa, synthetic construct
  source 1..9: note = Seed: GEAANFCAL
GNAANFCAY

SEQ ID NO: 27391 - protein, 10 aa, synthetic construct
  source 1..10: note = Seed: GFELTSMKYF
GNELTSMKYW

SEQ ID NO: 27392 - protein, 9 aa, synthetic construct
  source 1..9: note = Seed: GDFLHFLPR
GNFLHFLPR

SEQ ID NO: 27393 - protein, 11 aa, synthetic construct
  source 1..11: note = Seed: GYHLMSFPQSA
GNHLMSFPQSI

SEQ ID NO: 27394 - protein, 11 aa, synthetic construct
  source 1..11: note = Seed: GYHLMSFPQSA
GNHLMSFPQSL

SEQ ID NO: 27395 - protein, 11 aa, synthetic construct
  source 1..11: note = Seed: GYHLMSFPQSA
GNHLMSFPQSV

SEQ ID NO: 27396 - protein, 10 aa, synthetic construct
  source 1..10: note = Seed: GKIADYNYKL
GNIADYNYKV

SEQ ID NO: 27397 - protein, 11 aa, synthetic construct
  source 1..11: note = Seed: GFKLKDCVMYA
GNKLKDCVMYV

SEQ ID NO: 27398 - protein, 11 aa, synthetic construct
  source 1..11: note = Seed: GTLMIERFVSL
GNLMIERFVSV

SEQ ID NO: 27399 - protein, 10 aa, synthetic construct
  source 1..10: note = Seed: GYLQPRTFLL
GNLQPRTFLV

SEQ ID NO: 27400 - protein, 10 aa, synthetic construct
  source 1..10: note = Seed: GRLQSLQTYV
GNLQSLQTYL

SEQ ID NO: 27401 - protein, 10 aa, synthetic construct
  source 1..10: note = Seed: GRLQSLQTYV
GNLQSLQTYV

SEQ ID NO: 27402 - protein, 9 aa, synthetic construct
  source 1..9: note = Seed: GGNYNYLYR
GNNYNYLYR

SEQ ID NO: 27403 - protein, 10 aa, synthetic construct
  source 1..10: note = Seed: GLVAEWFLAY
GNVAEWFLAK

SEQ ID NO: 27404 - protein, 10 aa, synthetic construct
  source 1..10: note = Seed: GLVAEWFLAY
GNVAEWFLAY

SEQ ID NO: 27405 - protein, 10 aa, synthetic construct
  source 1..10: note = Seed: GVVFLHVTYV
GNVFLHVTYV

SEQ ID NO: 27406 - protein, 9 aa, synthetic construct
  source 1..9: note = Seed: GNYQCGHYK
GNYQCGHYR

SEQ ID NO: 27407 - protein, 10 aa, synthetic construct
  source 1..10: note = Seed: GFELTSMKYF
GPELTSMKYW

SEQ ID NO: 27408 - protein, 11 aa, synthetic construct
  source 1..11: note = Seed: GYHLMSFPQSA
GPHLMSFPQSI

SEQ ID NO: 27409 - protein, 11 aa, synthetic construct
  source 1..11: note = Seed: GYHLMSFPQSA
GPHLMSFPQSL

SEQ ID NO: 27410 - protein, 11 aa, synthetic construct
  source 1..11: note = Seed: GYHLMSFPQSA
GPHLMSFPQSV

SEQ ID NO: 27411 - protein, 10 aa, synthetic construct
  source 1..10: note = Seed: GKIADYNYKL
GPIADYNYKV

SEQ ID NO: 27412 - protein, 9 aa, synthetic construct
  source 1..9: note = Seed: GPKKSTNLV
GPKKSTNLL

SEQ ID NO: 27413 - protein, 9 aa, synthetic construct
  source 1..9: note = Seed: GPKKSTNLV
GPKKSTNLM

SEQ ID NO: 27414 - protein, 11 aa, synthetic construct
  source 1..11: note = Seed: GFKLKDCVMYA
GPKLKDCVMYV

SEQ ID NO: 27415 - protein, 11 aa, synthetic construct
  source 1..11: note = Seed: GTLMIERFVSL
GPLMIERFVSV

SEQ ID NO: 27416 - protein, 10 aa, synthetic construct
  source 1..10: note = Seed: GYLQPRTFLL
GPLQPRTFLV

SEQ ID NO: 27417 - protein, 10 aa, synthetic construct
  source 1..10: note = Seed: GRLQSLQTYV
GPLQSLQTYL

SEQ ID NO: 27418 - protein, 10 aa, synthetic construct
  source 1..10: note = Seed: GRLQSLQTYV
GPLQSLQTYV

SEQ ID NO: 27419 - protein, 10 aa, synthetic construct
  source 1..10: note = Seed: GLVAEWFLAY
GPVAEWFLAK

SEQ ID NO: 27420 - protein, 10 aa, synthetic construct
  source 1..10: note = Seed: GLVAEWFLAY
GPVAEWFLAY

SEQ ID NO: 27421 - protein, 10 aa, synthetic construct
  source 1..10: note = Seed: GVVFLHVTYV
GPVFLHVTYV

SEQ ID NO: 27422 - protein, 9 aa, synthetic construct
  source 1..9: note = Seed: GEAANFCAL
GQAANFCAF

SEQ ID NO: 27423 - protein, 9 aa, synthetic construct
  source 1..9: note = Seed: GEAANFCAL
GQAANFCAH

SEQ ID NO: 27424 - protein, 9 aa, synthetic construct
  source 1..9: note = Seed: GEAANFCAL
GQAANFCAI

SEQ ID NO: 27425 - protein, 9 aa, synthetic construct
  source 1..9: note = Seed: GEAANFCAL
GQAANFCAL

SEQ ID NO: 27426 - protein, 9 aa, synthetic construct
  source 1..9: note = Seed: GEAANFCAL
GQAANFCAM

SEQ ID NO: 27427 - protein, 9 aa, synthetic construct
  source 1..9: note = Seed: GEAANFCAL
GQAANFCAV

SEQ ID NO: 27428 - protein, 9 aa, synthetic construct
  source 1..9: note = Seed: GEAANFCAL
GQAANFCAW

SEQ ID NO: 27429 - protein, 9 aa, synthetic construct
  source 1..9: note = Seed: GEAANFCAL
GQAANFCAY

SEQ ID NO: 27430 - protein, 9 aa, synthetic construct
  source 1..9: note = Seed: GVAGALNKA
GQAGALNKI

SEQ ID NO: 27431 - protein, 9 aa, synthetic construct
  source 1..9: note = Seed: GVAGALNKA
GQAGALNKL

SEQ ID NO: 27432 - protein, 9 aa, synthetic construct
  source 1..9: note = Seed: GVAGALNKA
GQAGALNKV

SEQ ID NO: 27433 - protein, 10 aa, synthetic construct
  source 1..10: note = Seed: GGASCCLYCR
GQASCCLYCR

SEQ ID NO: 27434 - protein, 10 aa, synthetic construct
  source 1..10: note = Seed: GFELTSMKYF
GQELTSMKYW

SEQ ID NO: 27435 - protein, 9 aa, synthetic construct
  source 1..9: note = Seed: GDFLHFLPR
GQFLHFLPK

SEQ ID NO: 27436 - protein, 9 aa, synthetic construct
  source 1..9: note = Seed: GDFLHFLPR
GQFLHFLPR

SEQ ID NO: 27437 - protein, 9 aa, synthetic construct
  source 1..9: note = Seed: GKGYHLMSF
GQGYHLMSF

SEQ ID NO: 27438 - protein, 9 aa, synthetic construct
  source 1..9: note = Seed: GKGYHLMSF
GQGYHLMSM

SEQ ID NO: 27439 - protein, 9 aa, synthetic construct
  source 1..9: note = Seed: GKGYHLMSF
GQGYHLMSY

SEQ ID NO: 27440 - protein, 11 aa, synthetic construct
  source 1..11: note = Seed: GYHLMSFPQSA
GQHLMSFPQSI

SEQ ID NO: 27441 - protein, 11 aa, synthetic construct
  source 1..11: note = Seed: GYHLMSFPQSA
GQHLMSFPQSL

SEQ ID NO: 27442 - protein, 11 aa, synthetic construct
  source 1..11: note = Seed: GYHLMSFPQSA
GQHLMSFPQSV

SEQ ID NO: 27443 - protein, 10 aa, synthetic construct
  source 1..10: note = Seed: GKIADYNYKL
GQIADYNYKV

SEQ ID NO: 27444 - protein, 11 aa, synthetic construct
  source 1..11: note = Seed: GFKLKDCVMYA
GQKLKDCVMYV

SEQ ID NO: 27445 - protein, 9 aa, synthetic construct
  source 1..9: note = Seed: GALDISASI
GQLDISASA

SEQ ID NO: 27446 - protein, 9 aa, synthetic construct
  source 1..9: note = Seed: GALDISASI
GQLDISASF

SEQ ID NO: 27447 - protein, 9 aa, synthetic construct
  source 1..9: note = Seed: GALDISASI
GQLDISASI

SEQ ID NO: 27448 - protein, 10 aa, synthetic construct
  source 1..10: note = Seed: GALDISASIV
GQLDISASIV

SEQ ID NO: 27449 - protein, 9 aa, synthetic construct
  source 1..9: note = Seed: GALDISASI
GQLDISASL

SEQ ID NO: 27450 - protein, 9 aa, synthetic construct
  source 1..9: note = Seed: GALDISASI
GQLDISASM

SEQ ID NO: 27451 - protein, 9 aa, synthetic construct
  source 1..9: note = Seed: GALDISASI
GQLDISASV

SEQ ID NO: 27452 - protein, 10 aa, synthetic construct
  source 1..10: note = Seed: GFLFLTWICL
GQLFLTWICV

SEQ ID NO: 27453 - protein, 11 aa, synthetic construct
  source 1..11: note = Seed: GTLMIERFVSL
GQLMIERFVSV

SEQ ID NO: 27454 - protein, 10 aa, synthetic construct
  source 1..10: note = Seed: GYLQPRTFLL
GQLQPRTFLV

SEQ ID NO: 27455 - protein, 9 aa, synthetic construct
  source 1..9: note = Seed: GRLQSLQTY
GQLQSLQTF

SEQ ID NO: 27456 - protein, 9 aa, synthetic construct
  source 1..9: note = Seed: GRLQSLQTY
GQLQSLQTL

SEQ ID NO: 27457 - protein, 9 aa, synthetic construct
  source 1..9: note = Seed: GRLQSLQTY
GQLQSLQTM

SEQ ID NO: 27458 - protein, 9 aa, synthetic construct
  source 1..9: note = Seed: GRLQSLQTY
GQLQSLQTY

SEQ ID NO: 27459 - protein, 10 aa, synthetic construct
  source 1..10: note = Seed: GRLQSLQTYV
GQLQSLQTYL

SEQ ID NO: 27460 - protein, 10 aa, synthetic construct
  source 1..10: note = Seed: GRLQSLQTYV
GQLQSLQTYV

SEQ ID NO: 27461 - protein, 9 aa, synthetic construct
  source 1..9: note = Seed: GTLSYEQFK
GQLSYEQFR

SEQ ID NO: 27462 - protein, 10 aa, synthetic construct
  source 1..10: note = Seed: GSLYVNKHAF
GQLYVNKHAF

SEQ ID NO: 27463 - protein, 10 aa, synthetic construct
  source 1..10: note = Seed: GSLYVNKHAF
GQLYVNKHAY

SEQ ID NO: 27464 - protein, 9 aa, synthetic construct
  source 1..9: note = Seed: GLMWLSYFI
GQMWLSYFA

SEQ ID NO: 27465 - protein, 9 aa, synthetic construct
  source 1..9: note = Seed: GLMWLSYFI
GQMWLSYFF

SEQ ID NO: 27466 - protein, 9 aa, synthetic construct
  source 1..9: note = Seed: GLMWLSYFI
GQMWLSYFI

SEQ ID NO: 27467 - protein, 11 aa, synthetic construct
  source 1..11: note = Seed: GLMWLSYFIAS
GQMWLSYFIAV

SEQ ID NO: 27468 - protein, 10 aa, synthetic construct
  source 1..10: note = Seed: GLMWLSYFIA
GQMWLSYFII

SEQ ID NO: 27469 - protein, 10 aa, synthetic construct
  source 1..10: note = Seed: GLMWLSYFIA
GQMWLSYFIL

SEQ ID NO: 27470 - protein, 10 aa, synthetic construct
  source 1..10: note = Seed: GLMWLSYFIA
GQMWLSYFIV

SEQ ID NO: 27471 - protein, 9 aa, synthetic construct
  source 1..9: note = Seed: GLMWLSYFI
GQMWLSYFL

SEQ ID NO: 27472 - protein, 9 aa, synthetic construct
  source 1..9: note = Seed: GLMWLSYFI
GQMWLSYFM

SEQ ID NO: 27473 - protein, 9 aa, synthetic construct
  source 1..9: note = Seed: GLMWLSYFI
GQMWLSYFT

SEQ ID NO: 27474 - protein, 9 aa, synthetic construct
  source 1..9: note = Seed: GLMWLSYFI
GQMWLSYFV

SEQ ID NO: 27475 - protein, 9 aa, synthetic construct
  source 1..9: note = Seed: GLMWLSYFI
GQMWLSYFW

SEQ ID NO: 27476 - protein, 9 aa, synthetic construct
  source 1..9: note = Seed: GGNYNYLYR
GQNYNYLYR

SEQ ID NO: 27477 - protein, 10 aa, synthetic construct
  source 1..10: note = Seed: GVPFVVSTGY
GQPFVVSTGF

SEQ ID NO: 27478 - protein, 10 aa, synthetic construct
  source 1..10: note = Seed: GVPFVVSTGY
GQPFVVSTGY

SEQ ID NO: 27479 - protein, 9 aa, synthetic construct
  source 1..9: note = Seed: GASCCLYCR
GQSCCLYCR

SEQ ID NO: 27480 - protein, 10 aa, synthetic construct
  source 1..10: note = Seed: GDSGFAAYSR
GQSGFAAYSR

SEQ ID NO: 27481 - protein, 10 aa, synthetic construct
  source 1..10: note = Seed: GQTFSVLACY
GQTFSVLACF

SEQ ID NO: 27482 - protein, 9 aa, synthetic construct
  source 1..9: note = Seed: GLVAEWFLA
GQVAEWFLA

SEQ ID NO: 27483 - protein, 10 aa, synthetic construct
  source 1..10: note = Seed: GLVAEWFLAY
GQVAEWFLAF

SEQ ID NO: 27484 - protein, 10 aa, synthetic construct
  source 1..10: note = Seed: GLVAEWFLAY
GQVAEWFLAK

SEQ ID NO: 27485 - protein, 10 aa, synthetic construct
  source 1..10: note = Seed: GLVAEWFLAY
GQVAEWFLAM

SEQ ID NO: 27486 - protein, 10 aa, synthetic construct
  source 1..10: note = Seed: GLVAEWFLAY
GQVAEWFLAY

SEQ ID NO: 27487 - protein, 11 aa, synthetic construct
  source 1..11: note = Seed: GLVAEWFLAYI
GQVAEWFLAYV

SEQ ID NO: 27488 - protein, 9 aa, synthetic construct
  source 1..9: note = Seed: GLVAEWFLA
GQVAEWFLI

SEQ ID NO: 27489 - protein, 9 aa, synthetic construct
  source 1..9: note = Seed: GLVAEWFLA
GQVAEWFLL

SEQ ID NO: 27490 - protein, 9 aa, synthetic construct
  source 1..9: note = Seed: GLVAEWFLA
GQVAEWFLM

SEQ ID NO: 27491 - protein, 9 aa, synthetic construct
  source 1..9: note = Seed: GLVAEWFLA
GQVAEWFLV

SEQ ID NO: 27492 - protein, 9 aa, synthetic construct
  source 1..9: note = Seed: GVVFLHVTY
GQVFLHVTF

SEQ ID NO: 27493 - protein, 9 aa, synthetic construct
  source 1..9: note = Seed: GVVFLHVTY
GQVFLHVTL

SEQ ID NO: 27494 - protein, 9 aa, synthetic construct
  source 1..9: note = Seed: GVVFLHVTY
GQVFLHVTM

SEQ ID NO: 27495 - protein, 9 aa, synthetic construct
  source 1..9: note = Seed: GVVFLHVTY
GQVFLHVTY

SEQ ID NO: 27496 - protein, 10 aa, synthetic construct
  source 1..10: note = Seed: GVVFLHVTYV
GQVFLHVTYV

SEQ ID NO: 27497 - protein, 10 aa, synthetic construct
  source 1..10: note = Seed: GVVQQLPETY
GQVQQLPETY

SEQ ID NO: 27498 - protein, 11 aa, synthetic construct
  source 1..11: note = Seed: GRWVLNNDYYR
GQWVLNNDYYR

SEQ ID NO: 27499 - protein, 9 aa, synthetic construct
  source 1..9: note = Seed: GVYDYLVST
GQYDYLVSA

SEQ ID NO: 27500 - protein, 9 aa, synthetic construct
  source 1..9: note = Seed: GVYDYLVST
GQYDYLVSC

SEQ ID NO: 27501 - protein, 9 aa, synthetic construct
  source 1..9: note = Seed: GVYDYLVST
GQYDYLVSF

SEQ ID NO: 27502 - protein, 9 aa, synthetic construct
  source 1..9: note = Seed: GVYDYLVST
GQYDYLVSI

SEQ ID NO: 27503 - protein, 9 aa, synthetic construct
  source 1..9: note = Seed: GVYDYLVST
GQYDYLVSL

SEQ ID NO: 27504 - protein, 9 aa, synthetic construct
  source 1..9: note = Seed: GVYDYLVST
GQYDYLVSM

SEQ ID NO: 27505 - protein, 9 aa, synthetic construct
  source 1..9: note = Seed: GVYDYLVST
GQYDYLVSS

SEQ ID NO: 27506 - protein, 9 aa, synthetic construct
  source 1..9: note = Seed: GVYDYLVST
GQYDYLVST

SEQ ID NO: 27507 - protein, 9 aa, synthetic construct
  source 1..9: note = Seed: GVYDYLVST
GQYDYLVSV

SEQ ID NO: 27508 - protein, 11 aa, synthetic construct
  source 1..11: note = Seed: GNYNYLYRLFR
GQYNYLYRLFR

SEQ ID NO: 27509 - protein, 9 aa, synthetic construct
  source 1..9: note = Seed: GNYQCGHYK
GQYQCGHYK

SEQ ID NO: 27510 - protein, 9 aa, synthetic construct
  source 1..9: note = Seed: GNYQCGHYK
GQYQCGHYR

SEQ ID NO: 27511 - protein, 9 aa, synthetic construct
  source 1..9: note = Seed: GIYQTSNFR
GQYQTSNFK

SEQ ID NO: 27512 - protein, 9 aa, synthetic construct
  source 1..9: note = Seed: GIYQTSNFR
GQYQTSNFR

SEQ ID NO: 27513 - protein, 9 aa, synthetic construct
  source 1..9: note = Seed: GYYRRATRR
GQYRRATRR

SEQ ID NO: 27514 - protein, 9 aa, synthetic construct
  source 1..9: note = Seed: GEAANFCAL
GRAANFCAF

SEQ ID NO: 27515 - protein, 9 aa, synthetic construct
  source 1..9: note = Seed: GEAANFCAL
GRAANFCAM

SEQ ID NO: 27516 - protein, 9 aa, synthetic construct
  source 1..9: note = Seed: GEAANFCAL
GRAANFCAY

SEQ ID NO: 27517 - protein, 10 aa, synthetic construct
  source 1..10: note = Seed: GFELTSMKYF
GRELTSMKYW

SEQ ID NO: 27518 - protein, 9 aa, synthetic construct
  source 1..9: note = Seed: GRFVLALLS
GRFVLALLA

SEQ ID NO: 27519 - protein, 9 aa, synthetic construct
  source 1..9: note = Seed: GRFVLALLS
GRFVLALLF

SEQ ID NO: 27520 - protein, 9 aa, synthetic construct
  source 1..9: note = Seed: GRFVLALLS
GRFVLALLH

SEQ ID NO: 27521 - protein, 9 aa, synthetic construct
  source 1..9: note = Seed: GRFVLALLS
GRFVLALLI

SEQ ID NO: 27522 - protein, 9 aa, synthetic construct
  source 1..9: note = Seed: GRFVLALLS
GRFVLALLK

SEQ ID NO: 27523 - protein, 9 aa, synthetic construct
  source 1..9: note = Seed: GRFVLALLS
GRFVLALLL

SEQ ID NO: 27524 - protein, 9 aa, synthetic construct
  source 1..9: note = Seed: GRFVLALLS
GRFVLALLM

SEQ ID NO: 27525 - protein, 9 aa, synthetic construct
  source 1..9: note = Seed: GRFVLALLS
GRFVLALLR

SEQ ID NO: 27526 - protein, 9 aa, synthetic construct
  source 1..9: note = Seed: GRFVLALLS
GRFVLALLV

SEQ ID NO: 27527 - protein, 9 aa, synthetic construct
  source 1..9: note = Seed: GRFVLALLS
GRFVLALLY

SEQ ID NO: 27528 - protein, 11 aa, synthetic construct
  source 1..11: note = Seed: GYHLMSFPQSA
GRHLMSFPQSI

SEQ ID NO: 27529 - protein, 11 aa, synthetic construct
  source 1..11: note = Seed: GYHLMSFPQSA
GRHLMSFPQSL

SEQ ID NO: 27530 - protein, 11 aa, synthetic construct
  source 1..11: note = Seed: GYHLMSFPQSA
GRHLMSFPQSV

SEQ ID NO: 27531 - protein, 10 aa, synthetic construct
  source 1..10: note = Seed: GKIADYNYKL
GRIADYNYKV

SEQ ID NO: 27532 - protein, 11 aa, synthetic construct
  source 1..11: note = Seed: GFKLKDCVMYA
GRKLKDCVMYV

SEQ ID NO: 27533 - protein, 11 aa, synthetic construct
  source 1..11: note = Seed: GTLMIERFVSL
GRLMIERFVSI

SEQ ID NO: 27534 - protein, 11 aa, synthetic construct
  source 1..11: note = Seed: GTLMIERFVSL
GRLMIERFVSL

SEQ ID NO: 27535 - protein, 11 aa, synthetic construct
  source 1..11: note = Seed: GTLMIERFVSL
GRLMIERFVSV

SEQ ID NO: 27536 - protein, 11 aa, synthetic construct
  source 1..11: note = Seed: GYLQPRTFLLK
GRLQPRTFLLR

SEQ ID NO: 27537 - protein, 10 aa, synthetic construct
  source 1..10: note = Seed: GYLQPRTFLL
GRLQPRTFLV

SEQ ID NO: 27538 - protein, 10 aa, synthetic construct
  source 1..10: note = Seed: GRLQSLQTYV
GRLQSLQTYF

SEQ ID NO: 27539 - protein, 10 aa, synthetic construct
  source 1..10: note = Seed: GRLQSLQTYV
GRLQSLQTYI

SEQ ID NO: 27540 - protein, 10 aa, synthetic construct
  source 1..10: note = Seed: GRLQSLQTYV
GRLQSLQTYL

SEQ ID NO: 27541 - protein, 10 aa, synthetic construct
  source 1..10: note = Seed: GRLQSLQTYV
GRLQSLQTYM

SEQ ID NO: 27542 - protein, 9 aa, synthetic construct
  source 1..9: note = Seed: GHMLDMYSV
GRMLDMYSL

SEQ ID NO: 27543 - protein, 10 aa, synthetic construct
  source 1..10: note = Seed: GLMWLSYFIA
GRMWLSYFIV

SEQ ID NO: 27544 - protein, 10 aa, synthetic construct
  source 1..10: note = Seed: GHSMQNCVLK
GRSMQNCVLR

SEQ ID NO: 27545 - protein, 10 aa, synthetic construct
  source 1..10: note = Seed: GQTFSVLACY
GRTFSVLACY

SEQ ID NO: 27546 - protein, 10 aa, synthetic construct
  source 1..10: note = Seed: GLVAEWFLAY
GRVAEWFLAK

SEQ ID NO: 27547 - protein, 10 aa, synthetic construct
  source 1..10: note = Seed: GLVAEWFLAY
GRVAEWFLAY

SEQ ID NO: 27548 - protein, 11 aa, synthetic construct
  source 1..11: note = Seed: GLVAEWFLAYI
GRVAEWFLAYV

SEQ ID NO: 27549 - protein, 10 aa, synthetic construct
  source 1..10: note = Seed: GVVFLHVTYV
GRVFLHVTYV

SEQ ID NO: 27550 - protein, 9 aa, synthetic construct
  source 1..9: note = Seed: GRWVLNNDY
GRWVLNNDF

SEQ ID NO: 27551 - protein, 9 aa, synthetic construct
  source 1..9: note = Seed: GRWVLNNDY
GRWVLNNDI

SEQ ID NO: 27552 - protein, 9 aa, synthetic construct
  source 1..9: note = Seed: GRWVLNNDY
GRWVLNNDK

SEQ ID NO: 27553 - protein, 9 aa, synthetic construct
  source 1..9: note = Seed: GRWVLNNDY
GRWVLNNDL

SEQ ID NO: 27554 - protein, 9 aa, synthetic construct
  source 1..9: note = Seed: GRWVLNNDY
GRWVLNNDM

SEQ ID NO: 27555 - protein, 9 aa, synthetic construct
  source 1..9: note = Seed: GRWVLNNDY
GRWVLNNDV

SEQ ID NO: 27556 - protein, 10 aa, synthetic construct
  source 1..10: note = Seed: GRWVLNNDYY
GRWVLNNDYF

SEQ ID NO: 27557 - protein, 10 aa, synthetic construct
  source 1..10: note = Seed: GRWVLNNDYY
GRWVLNNDYK

SEQ ID NO: 27558 - protein, 10 aa, synthetic construct
  source 1..10: note = Seed: GRWVLNNDYY
GRWVLNNDYL

SEQ ID NO: 27559 - protein, 10 aa, synthetic construct
  source 1..10: note = Seed: GRWVLNNDYY
GRWVLNNDYM

SEQ ID NO: 27560 - protein, 10 aa, synthetic construct
  source 1..10: note = Seed: GRWVLNNDYY
GRWVLNNDYR

SEQ ID NO: 27561 - protein, 9 aa, synthetic construct
  source 1..9: note = Seed: GRYMSALNH
GRYMSALNF

SEQ ID NO: 27562 - protein, 9 aa, synthetic construct
  source 1..9: note = Seed: GRYMSALNH
GRYMSALNL

SEQ ID NO: 27563 - protein, 9 aa, synthetic construct
  source 1..9: note = Seed: GRYMSALNH
GRYMSALNM

SEQ ID NO: 27564 - protein, 10 aa, synthetic construct
  source 1..10: note = Seed: GNYNYLYRLF
GRYNYLYRLF

SEQ ID NO: 27565 - protein, 11 aa, synthetic construct
  source 1..11: note = Seed: GNYNYLYRLFR
GRYNYLYRLFR

SEQ ID NO: 27566 - protein, 9 aa, synthetic construct
  source 1..9: note = Seed: GEAANFCAL
GSAANFCAF

SEQ ID NO: 27567 - protein, 9 aa, synthetic construct
  source 1..9: note = Seed: GEAANFCAL
GSAANFCAY

SEQ ID NO: 27568 - protein, 10 aa, synthetic construct
  source 1..10: note = Seed: GGASCCLYCR
GSASCCLYCR

SEQ ID NO: 27569 - protein, 9 aa, synthetic construct
  source 1..9: note = Seed: GTDLEGNFY
GSDLEGNFY

SEQ ID NO: 27570 - protein, 10 aa, synthetic construct
  source 1..10: note = Seed: GTDLEGNFYG
GSDLEGNFYY

SEQ ID NO: 27571 - protein, 10 aa, synthetic construct
  source 1..10: note = Seed: GFELTSMKYF
GSELTSMKYW

SEQ ID NO: 27572 - protein, 9 aa, synthetic construct
  source 1..9: note = Seed: GDFLHFLPR
GSFLHFLPK

SEQ ID NO: 27573 - protein, 9 aa, synthetic construct
  source 1..9: note = Seed: GDFLHFLPR
GSFLHFLPR

SEQ ID NO: 27574 - protein, 10 aa, synthetic construct
  source 1..10: note = Seed: GVFVSNGTHW
GSFVSNGTHF

SEQ ID NO: 27575 - protein, 10 aa, synthetic construct
  source 1..10: note = Seed: GVFVSNGTHW
GSFVSNGTHW

SEQ ID NO: 27576 - protein, 10 aa, synthetic construct
  source 1..10: note = Seed: GVFVSNGTHW
GSFVSNGTHY

SEQ ID NO: 27577 - protein, 11 aa, synthetic construct
  source 1..11: note = Seed: GYHLMSFPQSA
GSHLMSFPQSI

SEQ ID NO: 27578 - protein, 11 aa, synthetic construct
  source 1..11: note = Seed: GYHLMSFPQSA
GSHLMSFPQSL

SEQ ID NO: 27579 - protein, 11 aa, synthetic construct
  source 1..11: note = Seed: GYHLMSFPQSA
GSHLMSFPQSV

SEQ ID NO: 27580 - protein, 10 aa, synthetic construct
  source 1..10: note = Seed: GKIADYNYKL
GSIADYNYKV

SEQ ID NO: 27581 - protein, 9 aa, synthetic construct
  source 1..9: note = Seed: GSIPCSVCL
GSIPCSVCF

SEQ ID NO: 27582 - protein, 9 aa, synthetic construct
  source 1..9: note = Seed: GSIPCSVCL
GSIPCSVCW

SEQ ID NO: 27583 - protein, 9 aa, synthetic construct
  source 1..9: note = Seed: GSIPCSVCL
GSIPCSVCY

SEQ ID NO: 27584 - protein, 11 aa, synthetic construct
  source 1..11: note = Seed: GFKLKDCVMYA
GSKLKDCVMYV

SEQ ID NO: 27585 - protein, 9 aa, synthetic construct
  source 1..9: note = Seed: GALDISASI
GSLDISASV

SEQ ID NO: 27586 - protein, 9 aa, synthetic construct
  source 1..9: note = Seed: GTLIVNSVL
GSLIVNSVF

SEQ ID NO: 27587 - protein, 9 aa, synthetic construct
  source 1..9: note = Seed: GTLIVNSVL
GSLIVNSVM

SEQ ID NO: 27588 - protein, 9 aa, synthetic construct
  source 1..9: note = Seed: GTLIVNSVL
GSLIVNSVW

SEQ ID NO: 27589 - protein, 9 aa, synthetic construct
  source 1..9: note = Seed: GTLIVNSVL
GSLIVNSVY

SEQ ID NO: 27590 - protein, 11 aa, synthetic construct
  source 1..11: note = Seed: GTLMIERFVSL
GSLMIERFVSV

SEQ ID NO: 27591 - protein, 10 aa, synthetic construct
  source 1..10: note = Seed: GYLQPRTFLL
GSLQPRTFLV

SEQ ID NO: 27592 - protein, 10 aa, synthetic construct
  source 1..10: note = Seed: GRLQSLQTYV
GSLQSLQTYL

SEQ ID NO: 27593 - protein, 10 aa, synthetic construct
  source 1..10: note = Seed: GRLQSLQTYV
GSLQSLQTYV

SEQ ID NO: 27594 - protein, 9 aa, synthetic construct
  source 1..9: note = Seed: GTLSYEQFK
GSLSYEQFK

SEQ ID NO: 27595 - protein, 10 aa, synthetic construct
  source 1..10: note = Seed: GTLSYEQFKK
GSLSYEQFKK

SEQ ID NO: 27596 - protein, 10 aa, synthetic construct
  source 1..10: note = Seed: GTLSYEQFKK
GSLSYEQFKR

SEQ ID NO: 27597 - protein, 9 aa, synthetic construct
  source 1..9: note = Seed: GTLSYEQFK
GSLSYEQFR

SEQ ID NO: 27598 - protein, 10 aa, synthetic construct
  source 1..10: note = Seed: GSLYVNKHAF
GSLYVNKHAW

SEQ ID NO: 27599 - protein, 9 aa, synthetic construct
  source 1..9: note = Seed: GLMWLSYFI
GSMWLSYFF

SEQ ID NO: 27600 - protein, 9 aa, synthetic construct
  source 1..9: note = Seed: GLMWLSYFI
GSMWLSYFI

SEQ ID NO: 27601 - protein, 10 aa, synthetic construct
  source 1..10: note = Seed: GLMWLSYFIA
GSMWLSYFIV

SEQ ID NO: 27602 - protein, 9 aa, synthetic construct
  source 1..9: note = Seed: GLMWLSYFI
GSMWLSYFL

SEQ ID NO: 27603 - protein, 9 aa, synthetic construct
  source 1..9: note = Seed: GLMWLSYFI
GSMWLSYFV

SEQ ID NO: 27604 - protein, 9 aa, synthetic construct
  source 1..9: note = Seed: GLMWLSYFI
GSMWLSYFW

SEQ ID NO: 27605 - protein, 9 aa, synthetic construct
  source 1..9: note = Seed: GANKDGIIW
GSNKDGIIW

SEQ ID NO: 27606 - protein, 10 aa, synthetic construct
  source 1..10: note = Seed: GTNLPLQLGF
GSNLPLQLGW

SEQ ID NO: 27607 - protein, 9 aa, synthetic construct
  source 1..9: note = Seed: GGNYNYLYR
GSNYNYLYK

SEQ ID NO: 27608 - protein, 9 aa, synthetic construct
  source 1..9: note = Seed: GGNYNYLYR
GSNYNYLYR

SEQ ID NO: 27609 - protein, 9 aa, synthetic construct
  source 1..9: note = Seed: GGQIVTCAK
GSQIVTCAR

SEQ ID NO: 27610 - protein, 9 aa, synthetic construct
  source 1..9: note = Seed: GLQPSVGPK
GSQPSVGPK

SEQ ID NO: 27611 - protein, 9 aa, synthetic construct
  source 1..9: note = Seed: GLQPSVGPK
GSQPSVGPR

SEQ ID NO: 27612 - protein, 9 aa, synthetic construct
  source 1..9: note = Seed: GYRVTKNSK
GSRVTKNSA

SEQ ID NO: 27613 - protein, 9 aa, synthetic construct
  source 1..9: note = Seed: GYRVTKNSK
GSRVTKNSK

SEQ ID NO: 27614 - protein, 9 aa, synthetic construct
  source 1..9: note = Seed: GASCCLYCR
GSSCCLYCR

SEQ ID NO: 27615 - protein, 10 aa, synthetic construct
  source 1..10: note = Seed: GDSGFAAYSR
GSSGFAAYSR

SEQ ID NO: 27616 - protein, 9 aa, synthetic construct
  source 1..9: note = Seed: GTSKFYGGW
GSSKFYGGF

SEQ ID NO: 27617 - protein, 9 aa, synthetic construct
  source 1..9: note = Seed: GTSKFYGGW
GSSKFYGGW

SEQ ID NO: 27618 - protein, 9 aa, synthetic construct
  source 1..9: note = Seed: GTSKFYGGW
GSSKFYGGY

SEQ ID NO: 27619 - protein, 10 aa, synthetic construct
  source 1..10: note = Seed: GHSMQNCVLK
GSSMQNCVLK

SEQ ID NO: 27620 - protein, 10 aa, synthetic construct
  source 1..10: note = Seed: GQTFSVLACY
GSTFSVLACW

SEQ ID NO: 27621 - protein, 9 aa, synthetic construct
  source 1..9: note = Seed: GTTTLNGLW
GSTTLNGLF

SEQ ID NO: 27622 - protein, 9 aa, synthetic construct
  source 1..9: note = Seed: GTTTLNGLW
GSTTLNGLW

SEQ ID NO: 27623 - protein, 9 aa, synthetic construct
  source 1..9: note = Seed: GTTTLNGLW
GSTTLNGLY

SEQ ID NO: 27624 - protein, 10 aa, synthetic construct
  source 1..10: note = Seed: GLVAEWFLAY
GSVAEWFLAK

SEQ ID NO: 27625 - protein, 10 aa, synthetic construct
  source 1..10: note = Seed: GLVAEWFLAY
GSVAEWFLAY

SEQ ID NO: 27626 - protein, 11 aa, synthetic construct
  source 1..11: note = Seed: GLVAEWFLAYI
GSVAEWFLAYV

SEQ ID NO: 27627 - protein, 9 aa, synthetic construct
  source 1..9: note = Seed: GSVAYESLR
GSVAYESLK

SEQ ID NO: 27628 - protein, 9 aa, synthetic construct
  source 1..9: note = Seed: GVVFLHVTY
GSVFLHVTF

SEQ ID NO: 27629 - protein, 9 aa, synthetic construct
  source 1..9: note = Seed: GVVFLHVTY
GSVFLHVTM

SEQ ID NO: 27630 - protein, 9 aa, synthetic construct
  source 1..9: note = Seed: GVVFLHVTY
GSVFLHVTW

SEQ ID NO: 27631 - protein, 9 aa, synthetic construct
  source 1..9: note = Seed: GVVFLHVTY
GSVFLHVTY

SEQ ID NO: 27632 - protein, 10 aa, synthetic construct
  source 1..10: note = Seed: GVVFLHVTYV
GSVFLHVTYV

SEQ ID NO: 27633 - protein, 9 aa, synthetic construct
  source 1..9: note = Seed: GVVREFLTR
GSVREFLTK

SEQ ID NO: 27634 - protein, 11 aa, synthetic construct
  source 1..11: note = Seed: GRWVLNNDYYR
GSWVLNNDYYR

SEQ ID NO: 27635 - protein, 9 aa, synthetic construct
  source 1..9: note = Seed: GVYDYLVST
GSYDYLVSA

SEQ ID NO: 27636 - protein, 9 aa, synthetic construct
  source 1..9: note = Seed: GVYDYLVST
GSYDYLVSI

SEQ ID NO: 27637 - protein, 9 aa, synthetic construct
  source 1..9: note = Seed: GVYDYLVST
GSYDYLVSL

SEQ ID NO: 27638 - protein, 9 aa, synthetic construct
  source 1..9: note = Seed: GVYDYLVST
GSYDYLVSV

SEQ ID NO: 27639 - protein, 8 aa, synthetic construct
  source 1..8: note = Seed: GNYNYLYR
GSYNYLYR

SEQ ID NO: 27640 - protein, 10 aa, synthetic construct
  source 1..10: note = Seed: GNYNYLYRLF
GSYNYLYRLF

SEQ ID NO: 27641 - protein, 11 aa, synthetic construct
  source 1..11: note = Seed: GNYNYLYRLFR
GSYNYLYRLFK

SEQ ID NO: 27642 - protein, 11 aa, synthetic construct
  source 1..11: note = Seed: GNYNYLYRLFR
GSYNYLYRLFR

SEQ ID NO: 27643 - protein, 9 aa, synthetic construct
  source 1..9: note = Seed: GNYQCGHYK
GSYQCGHYK

SEQ ID NO: 27644 - protein, 9 aa, synthetic construct
  source 1..9: note = Seed: GNYQCGHYK
GSYQCGHYR

SEQ ID NO: 27645 - protein, 9 aa, synthetic construct
  source 1..9: note = Seed: GIYQTSNFR
GSYQTSNFK

SEQ ID NO: 27646 - protein, 9 aa, synthetic construct
  source 1..9: note = Seed: GIYQTSNFR
GSYQTSNFR

SEQ ID NO: 27647 - protein, 9 aa, synthetic construct
  source 1..9: note = Seed: GYYRRATRR
GSYRRATRR

SEQ ID NO: 27648 - protein, 9 aa, synthetic construct
  source 1..9: note = Seed: GEAANFCAL
GTAANFCAF

SEQ ID NO: 27649 - protein, 9 aa, synthetic construct
  source 1..9: note = Seed: GVAGALNKA
GTAGALNKV

SEQ ID NO: 27650 - protein, 10 aa, synthetic construct
  source 1..10: note = Seed: GGASCCLYCR
GTASCCLYCR

SEQ ID NO: 27651 - protein, 9 aa, synthetic construct
  source 1..9: note = Seed: GVCVSTSGR
GTCVSTSGR

SEQ ID NO: 27652 - protein, 10 aa, synthetic construct
  source 1..10: note = Seed: GTDLEGNFYG
GTDLEGNFYY

SEQ ID NO: 27653 - protein, 10 aa, synthetic construct
  source 1..10: note = Seed: GFELTSMKYF
GTELTSMKYW

SEQ ID NO: 27654 - protein, 9 aa, synthetic construct
  source 1..9: note = Seed: GDFLHFLPR
GTFLHFLPK

SEQ ID NO: 27655 - protein, 9 aa, synthetic construct
  source 1..9: note = Seed: GDFLHFLPR
GTFLHFLPR

SEQ ID NO: 27656 - protein, 10 aa, synthetic construct
  source 1..10: note = Seed: GVFVSNGTHW
GTFVSNGTHF

SEQ ID NO: 27657 - protein, 10 aa, synthetic construct
  source 1..10: note = Seed: GVFVSNGTHW
GTFVSNGTHW

SEQ ID NO: 27658 - protein, 10 aa, synthetic construct
  source 1..10: note = Seed: GVFVSNGTHW
GTFVSNGTHY

SEQ ID NO: 27659 - protein, 11 aa, synthetic construct
  source 1..11: note = Seed: GYHLMSFPQSA
GTHLMSFPQSI

SEQ ID NO: 27660 - protein, 11 aa, synthetic construct
  source 1..11: note = Seed: GYHLMSFPQSA
GTHLMSFPQSL

SEQ ID NO: 27661 - protein, 11 aa, synthetic construct
  source 1..11: note = Seed: GYHLMSFPQSA
GTHLMSFPQSV

SEQ ID NO: 27662 - protein, 10 aa, synthetic construct
  source 1..10: note = Seed: GKIADYNYKL
GTIADYNYKV

SEQ ID NO: 27663 - protein, 9 aa, synthetic construct
  source 1..9: note = Seed: GSIPCSVCL
GTIPCSVCF

SEQ ID NO: 27664 - protein, 9 aa, synthetic construct
  source 1..9: note = Seed: GSIPCSVCL
GTIPCSVCW

SEQ ID NO: 27665 - protein, 9 aa, synthetic construct
  source 1..9: note = Seed: GSIPCSVCL
GTIPCSVCY

SEQ ID NO: 27666 - protein, 11 aa, synthetic construct
  source 1..11: note = Seed: GFKLKDCVMYA
GTKLKDCVMYV

SEQ ID NO: 27667 - protein, 9 aa, synthetic construct
  source 1..9: note = Seed: GALDISASI
GTLDISASI

SEQ ID NO: 27668 - protein, 9 aa, synthetic construct
  source 1..9: note = Seed: GALDISASI
GTLDISASL

SEQ ID NO: 27669 - protein, 9 aa, synthetic construct
  source 1..9: note = Seed: GALDISASI
GTLDISASV

SEQ ID NO: 27670 - protein, 9 aa, synthetic construct
  source 1..9: note = Seed: GTLIVNSVL
GTLIVNSVF

SEQ ID NO: 27671 - protein, 9 aa, synthetic construct
  source 1..9: note = Seed: GTLIVNSVL
GTLIVNSVM

SEQ ID NO: 27672 - protein, 9 aa, synthetic construct
  source 1..9: note = Seed: GTLIVNSVL
GTLIVNSVW

SEQ ID NO: 27673 - protein, 9 aa, synthetic construct
  source 1..9: note = Seed: GTLIVNSVL
GTLIVNSVY

SEQ ID NO: 27674 - protein, 11 aa, synthetic construct
  source 1..11: note = Seed: GTLMIERFVSL
GTLMIERFVSV

SEQ ID NO: 27675 - protein, 10 aa, synthetic construct
  source 1..10: note = Seed: GYLQPRTFLL
GTLQPRTFLV

SEQ ID NO: 27676 - protein, 10 aa, synthetic construct
  source 1..10: note = Seed: GRLQSLQTYV
GTLQSLQTYL

SEQ ID NO: 27677 - protein, 10 aa, synthetic construct
  source 1..10: note = Seed: GRLQSLQTYV
GTLQSLQTYV

SEQ ID NO: 27678 - protein, 10 aa, synthetic construct
  source 1..10: note = Seed: GTLSYEQFKK
GTLSYEQFKR

SEQ ID NO: 27679 - protein, 9 aa, synthetic construct
  source 1..9: note = Seed: GTLSYEQFK
GTLSYEQFR

SEQ ID NO: 27680 - protein, 10 aa, synthetic construct
  source 1..10: note = Seed: GSLYVNKHAF
GTLYVNKHAW

SEQ ID NO: 27681 - protein, 9 aa, synthetic construct
  source 1..9: note = Seed: GLMWLSYFI
GTMWLSYFA

SEQ ID NO: 27682 - protein, 9 aa, synthetic construct
  source 1..9: note = Seed: GLMWLSYFI
GTMWLSYFF

SEQ ID NO: 27683 - protein, 9 aa, synthetic construct
  source 1..9: note = Seed: GLMWLSYFI
GTMWLSYFI

SEQ ID NO: 27684 - protein, 10 aa, synthetic construct
  source 1..10: note = Seed: GLMWLSYFIA
GTMWLSYFIV

SEQ ID NO: 27685 - protein, 9 aa, synthetic construct
  source 1..9: note = Seed: GLMWLSYFI
GTMWLSYFL

SEQ ID NO: 27686 - protein, 9 aa, synthetic construct
  source 1..9: note = Seed: GLMWLSYFI
GTMWLSYFM

SEQ ID NO: 27687 - protein, 9 aa, synthetic construct
  source 1..9: note = Seed: GLMWLSYFI
GTMWLSYFV

SEQ ID NO: 27688 - protein, 9 aa, synthetic construct
  source 1..9: note = Seed: GLMWLSYFI
GTMWLSYFW

SEQ ID NO: 27689 - protein, 9 aa, synthetic construct
  source 1..9: note = Seed: GANKDGIIW
GTNKDGIIW

SEQ ID NO: 27690 - protein, 10 aa, synthetic construct
  source 1..10: note = Seed: GTNLPLQLGF
GTNLPLQLGW

SEQ ID NO: 27691 - protein, 9 aa, synthetic construct
  source 1..9: note = Seed: GGNYNYLYR
GTNYNYLYK

SEQ ID NO: 27692 - protein, 9 aa, synthetic construct
  source 1..9: note = Seed: GGNYNYLYR
GTNYNYLYR

SEQ ID NO: 27693 - protein, 9 aa, synthetic construct
  source 1..9: note = Seed: GGQIVTCAK
GTQIVTCAR

SEQ ID NO: 27694 - protein, 9 aa, synthetic construct
  source 1..9: note = Seed: GLQPSVGPK
GTQPSVGPK

SEQ ID NO: 27695 - protein, 9 aa, synthetic construct
  source 1..9: note = Seed: GLQPSVGPK
GTQPSVGPR

SEQ ID NO: 27696 - protein, 9 aa, synthetic construct
  source 1..9: note = Seed: GYRVTKNSK
GTRVTKNSA

SEQ ID NO: 27697 - protein, 9 aa, synthetic construct
  source 1..9: note = Seed: GYRVTKNSK
GTRVTKNSK

SEQ ID NO: 27698 - protein, 9 aa, synthetic construct
  source 1..9: note = Seed: GYRVTKNSK
GTRVTKNSV

SEQ ID NO: 27699 - protein, 9 aa, synthetic construct
  source 1..9: note = Seed: GASCCLYCR
GTSCCLYCR

SEQ ID NO: 27700 - protein, 10 aa, synthetic construct
  source 1..10: note = Seed: GDSGFAAYSR
GTSGFAAYSR

SEQ ID NO: 27701 - protein, 9 aa, synthetic construct
  source 1..9: note = Seed: GTSKFYGGW
GTSKFYGGF

SEQ ID NO: 27702 - protein, 9 aa, synthetic construct
  source 1..9: note = Seed: GTSKFYGGW
GTSKFYGGY

SEQ ID NO: 27703 - protein, 10 aa, synthetic construct
  source 1..10: note = Seed: GHSMQNCVLK
GTSMQNCVLK

SEQ ID NO: 27704 - protein, 9 aa, synthetic construct
  source 1..9: note = Seed: GSTFISDEV
GTTFISDEV

SEQ ID NO: 27705 - protein, 9 aa, synthetic construct
  source 1..9: note = Seed: GTTTLNGLW
GTTTLNGLF

SEQ ID NO: 27706 - protein, 9 aa, synthetic construct
  source 1..9: note = Seed: GTTTLNGLW
GTTTLNGLY

SEQ ID NO: 27707 - protein, 10 aa, synthetic construct
  source 1..10: note = Seed: GLVAEWFLAY
GTVAEWFLAK

SEQ ID NO: 27708 - protein, 10 aa, synthetic construct
  source 1..10: note = Seed: GLVAEWFLAY
GTVAEWFLAY

SEQ ID NO: 27709 - protein, 9 aa, synthetic construct
  source 1..9: note = Seed: GLVAEWFLA
GTVAEWFLV

SEQ ID NO: 27710 - protein, 9 aa, synthetic construct
  source 1..9: note = Seed: GSVAYESLR
GTVAYESLK

SEQ ID NO: 27711 - protein, 9 aa, synthetic construct
  source 1..9: note = Seed: GSVAYESLR
GTVAYESLR

SEQ ID NO: 27712 - protein, 10 aa, synthetic construct
  source 1..10: note = Seed: GVVCTEIDPK
GTVCTEIDPK

SEQ ID NO: 27713 - protein, 9 aa, synthetic construct
  source 1..9: note = Seed: GVVFLHVTY
GTVFLHVTF

SEQ ID NO: 27714 - protein, 9 aa, synthetic construct
  source 1..9: note = Seed: GVVFLHVTY
GTVFLHVTW

SEQ ID NO: 27715 - protein, 9 aa, synthetic construct
  source 1..9: note = Seed: GVVFLHVTY
GTVFLHVTY

SEQ ID NO: 27716 - protein, 10 aa, synthetic construct
  source 1..10: note = Seed: GVVFLHVTYV
GTVFLHVTYV

SEQ ID NO: 27717 - protein, 9 aa, synthetic construct
  source 1..9: note = Seed: GVVREFLTR
GTVREFLTK

SEQ ID NO: 27718 - protein, 11 aa, synthetic construct
  source 1..11: note = Seed: GRWVLNNDYYR
GTWVLNNDYYR

SEQ ID NO: 27719 - protein, 9 aa, synthetic construct
  source 1..9: note = Seed: GVYDYLVST
GTYDYLVSA

SEQ ID NO: 27720 - protein, 9 aa, synthetic construct
  source 1..9: note = Seed: GVYDYLVST
GTYDYLVSI

SEQ ID NO: 27721 - protein, 9 aa, synthetic construct
  source 1..9: note = Seed: GVYDYLVST
GTYDYLVSL

SEQ ID NO: 27722 - protein, 9 aa, synthetic construct
  source 1..9: note = Seed: GVYDYLVST
GTYDYLVSM

SEQ ID NO: 27723 - protein, 9 aa, synthetic construct
  source 1..9: note = Seed: GVYDYLVST
GTYDYLVST

SEQ ID NO: 27724 - protein, 9 aa, synthetic construct
  source 1..9: note = Seed: GVYDYLVST
GTYDYLVSV

SEQ ID NO: 27725 - protein, 8 aa, synthetic construct
  source 1..8: note = Seed: GNYNYLYR
GTYNYLYR

SEQ ID NO: 27726 - protein, 11 aa, synthetic construct
  source 1..11: note = Seed: GNYNYLYRLFR
GTYNYLYRLFK

SEQ ID NO: 27727 - protein, 11 aa, synthetic construct
  source 1..11: note = Seed: GNYNYLYRLFR
GTYNYLYRLFR

SEQ ID NO: 27728 - protein, 9 aa, synthetic construct
  source 1..9: note = Seed: GNYQCGHYK
GTYQCGHYK

SEQ ID NO: 27729 - protein, 9 aa, synthetic construct
  source 1..9: note = Seed: GNYQCGHYK
GTYQCGHYR

SEQ ID NO: 27730 - protein, 9 aa, synthetic construct
  source 1..9: note = Seed: GNYQCGHYK
GTYQCGHYY

SEQ ID NO: 27731 - protein, 9 aa, synthetic construct
  source 1..9: note = Seed: GIYQTSNFR
GTYQTSNFK

SEQ ID NO: 27732 - protein, 9 aa, synthetic construct
  source 1..9: note = Seed: GIYQTSNFR
GTYQTSNFR

SEQ ID NO: 27733 - protein, 9 aa, synthetic construct
  source 1..9: note = Seed: GYYRRATRR
GTYRRATRR

SEQ ID NO: 27734 - protein, 9 aa, synthetic construct
  source 1..9: note = Seed: GEAANFCAL
GVAANFCAF

SEQ ID NO: 27735 - protein, 9 aa, synthetic construct
  source 1..9: note = Seed: GEAANFCAL
GVAANFCAY

SEQ ID NO: 27736 - protein, 9 aa, synthetic construct
  source 1..9: note = Seed: GVAGALNKA
GVAGALNKL

SEQ ID NO: 27737 - protein, 9 aa, synthetic construct
  source 1..9: note = Seed: GVAGALNKA
GVAGALNKV

SEQ ID NO: 27738 - protein, 10 aa, synthetic construct
  source 1..10: note = Seed: GGASCCLYCR
GVASCCLYCR

SEQ ID NO: 27739 - protein, 10 aa, synthetic construct
  source 1..10: note = Seed: GFELTSMKYF
GVELTSMKYW

SEQ ID NO: 27740 - protein, 9 aa, synthetic construct
  source 1..9: note = Seed: GDFLHFLPR
GVFLHFLPK

SEQ ID NO: 27741 - protein, 9 aa, synthetic construct
  source 1..9: note = Seed: GDFLHFLPR
GVFLHFLPR

SEQ ID NO: 27742 - protein, 11 aa, synthetic construct
  source 1..11: note = Seed: GYHLMSFPQSA
GVHLMSFPQSI

SEQ ID NO: 27743 - protein, 11 aa, synthetic construct
  source 1..11: note = Seed: GYHLMSFPQSA
GVHLMSFPQSL

SEQ ID NO: 27744 - protein, 11 aa, synthetic construct
  source 1..11: note = Seed: GYHLMSFPQSA
GVHLMSFPQSV

SEQ ID NO: 27745 - protein, 10 aa, synthetic construct
  source 1..10: note = Seed: GKIADYNYKL
GVIADYNYKV

SEQ ID NO: 27746 - protein, 11 aa, synthetic construct
  source 1..11: note = Seed: GFKLKDCVMYA
GVKLKDCVMYV

SEQ ID NO: 27747 - protein, 9 aa, synthetic construct
  source 1..9: note = Seed: GALDISASI
GVLDISASI

SEQ ID NO: 27748 - protein, 9 aa, synthetic construct
  source 1..9: note = Seed: GALDISASI
GVLDISASL

SEQ ID NO: 27749 - protein, 9 aa, synthetic construct
  source 1..9: note = Seed: GALDISASI
GVLDISASV

SEQ ID NO: 27750 - protein, 10 aa, synthetic construct
  source 1..10: note = Seed: GFLFLTWICL
GVLFLTWICV

SEQ ID NO: 27751 - protein, 11 aa, synthetic construct
  source 1..11: note = Seed: GTLMIERFVSL
GVLMIERFVSV

SEQ ID NO: 27752 - protein, 10 aa, synthetic construct
  source 1..10: note = Seed: GYLQPRTFLL
GVLQPRTFLV

SEQ ID NO: 27753 - protein, 10 aa, synthetic construct
  source 1..10: note = Seed: GRLQSLQTYV
GVLQSLQTYL

SEQ ID NO: 27754 - protein, 10 aa, synthetic construct
  source 1..10: note = Seed: GRLQSLQTYV
GVLQSLQTYV

SEQ ID NO: 27755 - protein, 9 aa, synthetic construct
  source 1..9: note = Seed: GTLSYEQFK
GVLSYEQFK

SEQ ID NO: 27756 - protein, 10 aa, synthetic construct
  source 1..10: note = Seed: GTLSYEQFKK
GVLSYEQFKK

SEQ ID NO: 27757 - protein, 10 aa, synthetic construct
  source 1..10: note = Seed: GTLSYEQFKK
GVLSYEQFKR

SEQ ID NO: 27758 - protein, 9 aa, synthetic construct
  source 1..9: note = Seed: GTLSYEQFK
GVLSYEQFR

SEQ ID NO: 27759 - protein, 9 aa, synthetic construct
  source 1..9: note = Seed: GLMWLSYFI
GVMWLSYFA

SEQ ID NO: 27760 - protein, 9 aa, synthetic construct
  source 1..9: note = Seed: GLMWLSYFI
GVMWLSYFI

SEQ ID NO: 27761 - protein, 11 aa, synthetic construct
  source 1..11: note = Seed: GLMWLSYFIAS
GVMWLSYFIAV

SEQ ID NO: 27762 - protein, 10 aa, synthetic construct
  source 1..10: note = Seed: GLMWLSYFIA
GVMWLSYFIL

SEQ ID NO: 27763 - protein, 10 aa, synthetic construct
  source 1..10: note = Seed: GLMWLSYFIA
GVMWLSYFIV

SEQ ID NO: 27764 - protein, 9 aa, synthetic construct
  source 1..9: note = Seed: GLMWLSYFI
GVMWLSYFL

SEQ ID NO: 27765 - protein, 9 aa, synthetic construct
  source 1..9: note = Seed: GLMWLSYFI
GVMWLSYFM

SEQ ID NO: 27766 - protein, 9 aa, synthetic construct
  source 1..9: note = Seed: GLMWLSYFI
GVMWLSYFV

SEQ ID NO: 27767 - protein, 9 aa, synthetic construct
  source 1..9: note = Seed: GLMWLSYFI
GVMWLSYFW

SEQ ID NO: 27768 - protein, 9 aa, synthetic construct
  source 1..9: note = Seed: GGNYNYLYR
GVNYNYLYR

SEQ ID NO: 27769 - protein, 9 aa, synthetic construct
  source 1..9: note = Seed: GGQIVTCAK
GVQIVTCAR

SEQ ID NO: 27770 - protein, 9 aa, synthetic construct
  source 1..9: note = Seed: GLQPSVGPK
GVQPSVGPK

SEQ ID NO: 27771 - protein, 9 aa, synthetic construct
  source 1..9: note = Seed: GLQPSVGPK
GVQPSVGPR

SEQ ID NO: 27772 - protein, 9 aa, synthetic construct
  source 1..9: note = Seed: GYRVTKNSK
GVRVTKNSK

SEQ ID NO: 27773 - protein, 9 aa, synthetic construct
  source 1..9: note = Seed: GASCCLYCR
GVSCCLYCR

SEQ ID NO: 27774 - protein, 10 aa, synthetic construct
  source 1..10: note = Seed: GDSGFAAYSR
GVSGFAAYSR

SEQ ID NO: 27775 - protein, 10 aa, synthetic construct
  source 1..10: note = Seed: GHSMQNCVLK
GVSMQNCVLK

SEQ ID NO: 27776 - protein, 10 aa, synthetic construct
  source 1..10: note = Seed: GLVAEWFLAY
GVVAEWFLAK

SEQ ID NO: 27777 - protein, 10 aa, synthetic construct
  source 1..10: note = Seed: GLVAEWFLAY
GVVAEWFLAY

SEQ ID NO: 27778 - protein, 9 aa, synthetic construct
  source 1..9: note = Seed: GLVAEWFLA
GVVAEWFLL

SEQ ID NO: 27779 - protein, 9 aa, synthetic construct
  source 1..9: note = Seed: GLVAEWFLA
GVVAEWFLV

SEQ ID NO: 27780 - protein, 9 aa, synthetic construct
  source 1..9: note = Seed: GVVREFLTR
GVVREFLTK

SEQ ID NO: 27781 - protein, 11 aa, synthetic construct
  source 1..11: note = Seed: GRWVLNNDYYR
GVWVLNNDYYR

SEQ ID NO: 27782 - protein, 9 aa, synthetic construct
  source 1..9: note = Seed: GVYDYLVST
GVYDYLVSA

SEQ ID NO: 27783 - protein, 9 aa, synthetic construct
  source 1..9: note = Seed: GVYDYLVST
GVYDYLVSC

SEQ ID NO: 27784 - protein, 9 aa, synthetic construct
  source 1..9: note = Seed: GVYDYLVST
GVYDYLVSI

SEQ ID NO: 27785 - protein, 9 aa, synthetic construct
  source 1..9: note = Seed: GVYDYLVST
GVYDYLVSL

SEQ ID NO: 27786 - protein, 9 aa, synthetic construct
  source 1..9: note = Seed: GVYDYLVST
GVYDYLVSM

SEQ ID NO: 27787 - protein, 9 aa, synthetic construct
  source 1..9: note = Seed: GVYDYLVST
GVYDYLVSS

SEQ ID NO: 27788 - protein, 9 aa, synthetic construct
  source 1..9: note = Seed: GVYDYLVST
GVYDYLVSV

SEQ ID NO: 27789 - protein, 8 aa, synthetic construct
  source 1..8: note = Seed: GNYNYLYR
GVYNYLYR

SEQ ID NO: 27790 - protein, 11 aa, synthetic construct
  source 1..11: note = Seed: GNYNYLYRLFR
GVYNYLYRLFK

SEQ ID NO: 27791 - protein, 11 aa, synthetic construct
  source 1..11: note = Seed: GNYNYLYRLFR
GVYNYLYRLFR

SEQ ID NO: 27792 - protein, 9 aa, synthetic construct
  source 1..9: note = Seed: GNYQCGHYK
GVYQCGHYK

SEQ ID NO: 27793 - protein, 9 aa, synthetic construct
  source 1..9: note = Seed: GNYQCGHYK
GVYQCGHYR

SEQ ID NO: 27794 - protein, 9 aa, synthetic construct
  source 1..9: note = Seed: GIYQTSNFR
GVYQTSNFK

SEQ ID NO: 27795 - protein, 9 aa, synthetic construct
  source 1..9: note = Seed: GIYQTSNFR
GVYQTSNFR

SEQ ID NO: 27796 - protein, 9 aa, synthetic construct
  source 1..9: note = Seed: GYYRRATRR
GVYRRATRR

SEQ ID NO: 27797 - protein, 10 aa, synthetic construct
  source 1..10: note = Seed: GFELTSMKYF
GWELTSMKYW

SEQ ID NO: 27798 - protein, 10 aa, synthetic construct
  source 1..10: note = Seed: GYFCTCYFGL
GWFCTCYFGF

SEQ ID NO: 27799 - protein, 9 aa, synthetic construct
  source 1..9: note = Seed: GDFLHFLPR
GWFLHFLPK

SEQ ID NO: 27800 - protein, 9 aa, synthetic construct
  source 1..9: note = Seed: GDFLHFLPR
GWFLHFLPR

SEQ ID NO: 27801 - protein, 11 aa, synthetic construct
  source 1..11: note = Seed: GYHLMSFPQSA
GWHLMSFPQSI

SEQ ID NO: 27802 - protein, 11 aa, synthetic construct
  source 1..11: note = Seed: GYHLMSFPQSA
GWHLMSFPQSL

SEQ ID NO: 27803 - protein, 11 aa, synthetic construct
  source 1..11: note = Seed: GYHLMSFPQSA
GWHLMSFPQSV

SEQ ID NO: 27804 - protein, 10 aa, synthetic construct
  source 1..10: note = Seed: GKIADYNYKL
GWIADYNYKV

SEQ ID NO: 27805 - protein, 11 aa, synthetic construct
  source 1..11: note = Seed: GFKLKDCVMYA
GWKLKDCVMYV

SEQ ID NO: 27806 - protein, 11 aa, synthetic construct
  source 1..11: note = Seed: GTLMIERFVSL
GWLMIERFVSL

SEQ ID NO: 27807 - protein, 11 aa, synthetic construct
  source 1..11: note = Seed: GTLMIERFVSL
GWLMIERFVSV

SEQ ID NO: 27808 - protein, 9 aa, synthetic construct
  source 1..9: note = Seed: GYLQPRTFL
GWLQPRTFF

SEQ ID NO: 27809 - protein, 10 aa, synthetic construct
  source 1..10: note = Seed: GYLQPRTFLL
GWLQPRTFLF

SEQ ID NO: 27810 - protein, 10 aa, synthetic construct
  source 1..10: note = Seed: GYLQPRTFLL
GWLQPRTFLV

SEQ ID NO: 27811 - protein, 10 aa, synthetic construct
  source 1..10: note = Seed: GYLQPRTFLL
GWLQPRTFLW

SEQ ID NO: 27812 - protein, 10 aa, synthetic construct
  source 1..10: note = Seed: GRLQSLQTYV
GWLQSLQTYL

SEQ ID NO: 27813 - protein, 10 aa, synthetic construct
  source 1..10: note = Seed: GRLQSLQTYV
GWLQSLQTYV

SEQ ID NO: 27814 - protein, 10 aa, synthetic construct
  source 1..10: note = Seed: GLMWLSYFIA
GWMWLSYFIV

SEQ ID NO: 27815 - protein, 9 aa, synthetic construct
  source 1..9: note = Seed: GGNYNYLYR
GWNYNYLYR

SEQ ID NO: 27816 - protein, 9 aa, synthetic construct
  source 1..9: note = Seed: GLPNNTASW
GWPNNTASF

SEQ ID NO: 27817 - protein, 9 aa, synthetic construct
  source 1..9: note = Seed: GLPNNTASW
GWPNNTASW

SEQ ID NO: 27818 - protein, 9 aa, synthetic construct
  source 1..9: note = Seed: GYQPYRVVV
GWQPYRVVF

SEQ ID NO: 27819 - protein, 9 aa, synthetic construct
  source 1..9: note = Seed: GYQPYRVVV
GWQPYRVVM

SEQ ID NO: 27820 - protein, 10 aa, synthetic construct
  source 1..10: note = Seed: GYQPYRVVVL
GWQPYRVVVF

SEQ ID NO: 27821 - protein, 9 aa, synthetic construct
  source 1..9: note = Seed: GYQPYRVVV
GWQPYRVVW

SEQ ID NO: 27822 - protein, 10 aa, synthetic construct
  source 1..10: note = Seed: GDSGFAAYSR
GWSGFAAYSR

SEQ ID NO: 27823 - protein, 10 aa, synthetic construct
  source 1..10: note = Seed: GLVAEWFLAY
GWVAEWFLAK

SEQ ID NO: 27824 - protein, 10 aa, synthetic construct
  source 1..10: note = Seed: GLVAEWFLAY
GWVAEWFLAY

SEQ ID NO: 27825 - protein, 10 aa, synthetic construct
  source 1..10: note = Seed: GVVFLHVTYV
GWVFLHVTYV

SEQ ID NO: 27826 - protein, 10 aa, synthetic construct
  source 1..10: note = Seed: GNYNYLYRLF
GWYNYLYRLF

SEQ ID NO: 27827 - protein, 11 aa, synthetic construct
  source 1..11: note = Seed: GNYNYLYRLFR
GWYNYLYRLFR

SEQ ID NO: 27828 - protein, 9 aa, synthetic construct
  source 1..9: note = Seed: GNYQCGHYK
GWYQCGHYK

SEQ ID NO: 27829 - protein, 9 aa, synthetic construct
  source 1..9: note = Seed: GNYQCGHYK
GWYQCGHYR

SEQ ID NO: 27830 - protein, 10 aa, synthetic construct
  source 1..10: note = Seed: GGASCCLYCR
GYASCCLYCR

SEQ ID NO: 27831 - protein, 10 aa, synthetic construct
  source 1..10: note = Seed: GFELTSMKYF
GYELTSMKYW

SEQ ID NO: 27832 - protein, 10 aa, synthetic construct
  source 1..10: note = Seed: GYFCTCYFGL
GYFCTCYFGF

SEQ ID NO: 27833 - protein, 10 aa, synthetic construct
  source 1..10: note = Seed: GYFCTCYFGL
GYFCTCYFGW

SEQ ID NO: 27834 - protein, 9 aa, synthetic construct
  source 1..9: note = Seed: GDFLHFLPR
GYFLHFLPK

SEQ ID NO: 27835 - protein, 9 aa, synthetic construct
  source 1..9: note = Seed: GDFLHFLPR
GYFLHFLPR

SEQ ID NO: 27836 - protein, 11 aa, synthetic construct
  source 1..11: note = Seed: GYHLMSFPQSA
GYHLMSFPQSI

SEQ ID NO: 27837 - protein, 11 aa, synthetic construct
  source 1..11: note = Seed: GYHLMSFPQSA
GYHLMSFPQSL

SEQ ID NO: 27838 - protein, 11 aa, synthetic construct
  source 1..11: note = Seed: GYHLMSFPQSA
GYHLMSFPQSV

SEQ ID NO: 27839 - protein, 10 aa, synthetic construct
  source 1..10: note = Seed: GKIADYNYKL
GYIADYNYKL

SEQ ID NO: 27840 - protein, 10 aa, synthetic construct
  source 1..10: note = Seed: GKIADYNYKL
GYIADYNYKV

SEQ ID NO: 27841 - protein, 11 aa, synthetic construct
  source 1..11: note = Seed: GFKLKDCVMYA
GYKLKDCVMYV

SEQ ID NO: 27842 - protein, 11 aa, synthetic construct
  source 1..11: note = Seed: GFLFLTWICLL
GYLFLTWICLV

SEQ ID NO: 27843 - protein, 10 aa, synthetic construct
  source 1..10: note = Seed: GTLIVNSVLL
GYLIVNSVLV

SEQ ID NO: 27844 - protein, 11 aa, synthetic construct
  source 1..11: note = Seed: GTLMIERFVSL
GYLMIERFVSA

SEQ ID NO: 27845 - protein, 11 aa, synthetic construct
  source 1..11: note = Seed: GTLMIERFVSL
GYLMIERFVSI

SEQ ID NO: 27846 - protein, 11 aa, synthetic construct
  source 1..11: note = Seed: GTLMIERFVSL
GYLMIERFVSL

SEQ ID NO: 27847 - protein, 11 aa, synthetic construct
  source 1..11: note = Seed: GTLMIERFVSL
GYLMIERFVSV

SEQ ID NO: 27848 - protein, 9 aa, synthetic construct
  source 1..9: note = Seed: GYLQPRTFL
GYLQPRTFF

SEQ ID NO: 27849 - protein, 9 aa, synthetic construct
  source 1..9: note = Seed: GYLQPRTFL
GYLQPRTFI

SEQ ID NO: 27850 - protein, 10 aa, synthetic construct
  source 1..10: note = Seed: GYLQPRTFLL
GYLQPRTFLF

SEQ ID NO: 27851 - protein, 10 aa, synthetic construct
  source 1..10: note = Seed: GYLQPRTFLL
GYLQPRTFLI

SEQ ID NO: 27852 - protein, 10 aa, synthetic construct
  source 1..10: note = Seed: GYLQPRTFLL
GYLQPRTFLM

SEQ ID NO: 27853 - protein, 10 aa, synthetic construct
  source 1..10: note = Seed: GYLQPRTFLL
GYLQPRTFLV

SEQ ID NO: 27854 - protein, 10 aa, synthetic construct
  source 1..10: note = Seed: GYLQPRTFLL
GYLQPRTFLW

SEQ ID NO: 27855 - protein, 9 aa, synthetic construct
  source 1..9: note = Seed: GYLQPRTFL
GYLQPRTFM

SEQ ID NO: 27856 - protein, 9 aa, synthetic construct
  source 1..9: note = Seed: GYLQPRTFL
GYLQPRTFW

SEQ ID NO: 27857 - protein, 10 aa, synthetic construct
  source 1..10: note = Seed: GRLQSLQTYV
GYLQSLQTYI

SEQ ID NO: 27858 - protein, 10 aa, synthetic construct
  source 1..10: note = Seed: GRLQSLQTYV
GYLQSLQTYL

SEQ ID NO: 27859 - protein, 10 aa, synthetic construct
  source 1..10: note = Seed: GRLQSLQTYV
GYLQSLQTYV

SEQ ID NO: 27860 - protein, 10 aa, synthetic construct
  source 1..10: note = Seed: GTLSYEQFKK
GYLSYEQFKR

SEQ ID NO: 27861 - protein, 9 aa, synthetic construct
  source 1..9: note = Seed: GTLSYEQFK
GYLSYEQFR

SEQ ID NO: 27862 - protein, 11 aa, synthetic construct
  source 1..11: note = Seed: GLMWLSYFIAS
GYMWLSYFIAV

SEQ ID NO: 27863 - protein, 10 aa, synthetic construct
  source 1..10: note = Seed: GLMWLSYFIA
GYMWLSYFIV

SEQ ID NO: 27864 - protein, 9 aa, synthetic construct
  source 1..9: note = Seed: GGNYNYLYR
GYNYNYLYR

SEQ ID NO: 27865 - protein, 11 aa, synthetic construct
  source 1..11: note = Seed: GGNYNYLYRLF
GYNYNYLYRLF

SEQ ID NO: 27866 - protein, 9 aa, synthetic construct
  source 1..9: note = Seed: GLPNNTASW
GYPNNTASF

SEQ ID NO: 27867 - protein, 9 aa, synthetic construct
  source 1..9: note = Seed: GLPNNTASW
GYPNNTASI

SEQ ID NO: 27868 - protein, 9 aa, synthetic construct
  source 1..9: note = Seed: GLPNNTASW
GYPNNTASL

SEQ ID NO: 27869 - protein, 9 aa, synthetic construct
  source 1..9: note = Seed: GLPNNTASW
GYPNNTASW

SEQ ID NO: 27870 - protein, 9 aa, synthetic construct
  source 1..9: note = Seed: GGQIVTCAK
GYQIVTCAR

SEQ ID NO: 27871 - protein, 9 aa, synthetic construct
  source 1..9: note = Seed: GYQPYRVVV
GYQPYRVVF

SEQ ID NO: 27872 - protein, 9 aa, synthetic construct
  source 1..9: note = Seed: GYQPYRVVV
GYQPYRVVI

SEQ ID NO: 27873 - protein, 9 aa, synthetic construct
  source 1..9: note = Seed: GYQPYRVVV
GYQPYRVVL

SEQ ID NO: 27874 - protein, 9 aa, synthetic construct
  source 1..9: note = Seed: GYQPYRVVV
GYQPYRVVM

SEQ ID NO: 27875 - protein, 10 aa, synthetic construct
  source 1..10: note = Seed: GYQPYRVVVL
GYQPYRVVVF

SEQ ID NO: 27876 - protein, 10 aa, synthetic construct
  source 1..10: note = Seed: GYQPYRVVVL
GYQPYRVVVW

SEQ ID NO: 27877 - protein, 9 aa, synthetic construct
  source 1..9: note = Seed: GYQPYRVVV
GYQPYRVVW

SEQ ID NO: 27878 - protein, 9 aa, synthetic construct
  source 1..9: note = Seed: GYQPYRVVV
GYQPYRVVY

SEQ ID NO: 27879 - protein, 9 aa, synthetic construct
  source 1..9: note = Seed: GASCCLYCR
GYSCCLYCR

SEQ ID NO: 27880 - protein, 10 aa, synthetic construct
  source 1..10: note = Seed: GDSGFAAYSR
GYSGFAAYSR

SEQ ID NO: 27881 - protein, 10 aa, synthetic construct
  source 1..10: note = Seed: GFSLWVYKQF
GYSLWVYKQF

SEQ ID NO: 27882 - protein, 10 aa, synthetic construct
  source 1..10: note = Seed: GHSMQNCVLK
GYSMQNCVLR

SEQ ID NO: 27883 - protein, 10 aa, synthetic construct
  source 1..10: note = Seed: GQTFSVLACY
GYTFSVLACY

SEQ ID NO: 27884 - protein, 10 aa, synthetic construct
  source 1..10: note = Seed: GLVAEWFLAY
GYVAEWFLAK

SEQ ID NO: 27885 - protein, 10 aa, synthetic construct
  source 1..10: note = Seed: GLVAEWFLAY
GYVAEWFLAY

SEQ ID NO: 27886 - protein, 11 aa, synthetic construct
  source 1..11: note = Seed: GLVAEWFLAYI
GYVAEWFLAYI

SEQ ID NO: 27887 - protein, 11 aa, synthetic construct
  source 1..11: note = Seed: GLVAEWFLAYI
GYVAEWFLAYV

SEQ ID NO: 27888 - protein, 10 aa, synthetic construct
  source 1..10: note = Seed: GVVFLHVTYV
GYVFLHVTYV

SEQ ID NO: 27889 - protein, 11 aa, synthetic construct
  source 1..11: note = Seed: GRWVLNNDYYR
GYWVLNNDYYR

SEQ ID NO: 27890 - protein, 10 aa, synthetic construct
  source 1..10: note = Seed: GNYNYLYRLF
GYYNYLYRLF

SEQ ID NO: 27891 - protein, 11 aa, synthetic construct
  source 1..11: note = Seed: GNYNYLYRLFR
GYYNYLYRLFK

SEQ ID NO: 27892 - protein, 11 aa, synthetic construct
  source 1..11: note = Seed: GNYNYLYRLFR
GYYNYLYRLFR

SEQ ID NO: 27893 - protein, 10 aa, synthetic construct
  source 1..10: note = Seed: GNYNYLYRLF
GYYNYLYRLI

SEQ ID NO: 27894 - protein, 10 aa, synthetic construct
  source 1..10: note = Seed: GNYNYLYRLF
GYYNYLYRLL

SEQ ID NO: 27895 - protein, 10 aa, synthetic construct
  source 1..10: note = Seed: GNYNYLYRLF
GYYNYLYRLW

SEQ ID NO: 27896 - protein, 9 aa, synthetic construct
  source 1..9: note = Seed: GNYQCGHYK
GYYQCGHYK

SEQ ID NO: 27897 - protein, 9 aa, synthetic construct
  source 1..9: note = Seed: GNYQCGHYK
GYYQCGHYR

SEQ ID NO: 27898 - protein, 9 aa, synthetic construct
  source 1..9: note = Seed: GIYQTSNFR
GYYQTSNFR

SEQ ID NO: 27899 - protein, 9 aa, synthetic construct
  source 1..9: note = Seed: HCANFNVLF
HAANFNVLF

SEQ ID NO: 27900 - protein, 9 aa, synthetic construct
  source 1..9: note = Seed: HCANFNVLF
HAANFNVLM

SEQ ID NO: 27901 - protein, 9 aa, synthetic construct
  source 1..9: note = Seed: HCANFNVLF
HAANFNVLY

SEQ ID NO: 27902 - protein, 10 aa, synthetic construct
  source 1..10: note = Seed: HTANKWDLII
HAANKWDLIW

SEQ ID NO: 27903 - protein, 10 aa, synthetic construct
  source 1..10: note = Seed: HAAVDALCEK
HAAVDALCER

SEQ ID NO: 27904 - protein, 9 aa, synthetic construct
  source 1..9: note = Seed: HGFELTSMK
HAFELTSMK

SEQ ID NO: 27905 - protein, 10 aa, synthetic construct
  source 1..10: note = Seed: HGFELTSMKY
HAFELTSMKF

SEQ ID NO: 27906 - protein, 10 aa, synthetic construct
  source 1..10: note = Seed: HGFELTSMKY
HAFELTSMKY

SEQ ID NO: 27907 - protein, 9 aa, synthetic construct
  source 1..9: note = Seed: HGFELTSMK
HAFELTSMR

SEQ ID NO: 27908 - protein, 9 aa, synthetic construct
  source 1..9: note = Seed: HAFLCLFLL
HAFLCLFLI

SEQ ID NO: 27909 - protein, 9 aa, synthetic construct
  source 1..9: note = Seed: HAFLCLFLL
HAFLCLFLV

SEQ ID NO: 27910 - protein, 9 aa, synthetic construct
  source 1..9: note = Seed: HAFLCLFLL
HAFLCLFLW

SEQ ID NO: 27911 - protein, 9 aa, synthetic construct
  source 1..9: note = Seed: HKHAFLCLF
HAHAFLCLF

SEQ ID NO: 27912 - protein, 9 aa, synthetic construct
  source 1..9: note = Seed: HKHAFLCLF
HAHAFLCLM

SEQ ID NO: 27913 - protein, 9 aa, synthetic construct
  source 1..9: note = Seed: HKHAFLCLF
HAHAFLCLY

SEQ ID NO: 27914 - protein, 9 aa, synthetic construct
  source 1..9: note = Seed: HEIAWYTER
HAIAWYTER

SEQ ID NO: 27915 - protein, 11 aa, synthetic construct
  source 1..11: note = Seed: HWLLLTILTSL
HALLLTILTSV

SEQ ID NO: 27916 - protein, 10 aa, synthetic construct
  source 1..10: note = Seed: HFLPRVFSAV
HALPRVFSAV

SEQ ID NO: 27917 - protein, 9 aa, synthetic construct
  source 1..9: note = Seed: HFLPRVFSA
HALPRVFSK

SEQ ID NO: 27918 - protein, 9 aa, synthetic construct
  source 1..9: note = Seed: HFLPRVFSA
HALPRVFSL

SEQ ID NO: 27919 - protein, 9 aa, synthetic construct
  source 1..9: note = Seed: HSMQNCVLK
HAMQNCVLK

SEQ ID NO: 27920 - protein, 9 aa, synthetic construct
  source 1..9: note = Seed: HSMQNCVLK
HAMQNCVLR

SEQ ID NO: 27921 - protein, 10 aa, synthetic construct
  source 1..10: note = Seed: HLMSFPQSAP
HAMSFPQSAV

SEQ ID NO: 27922 - protein, 9 aa, synthetic construct
  source 1..9: note = Seed: HLMSFPQSA
HAMSFPQSF

SEQ ID NO: 27923 - protein, 9 aa, synthetic construct
  source 1..9: note = Seed: HLMSFPQSA
HAMSFPQSL

SEQ ID NO: 27924 - protein, 9 aa, synthetic construct
  source 1..9: note = Seed: HLMSFPQSA
HAMSFPQSM

SEQ ID NO: 27925 - protein, 9 aa, synthetic construct
  source 1..9: note = Seed: HLMSFPQSA
HAMSFPQSY

SEQ ID NO: 27926 - protein, 9 aa, synthetic construct
  source 1..9: note = Seed: HSQLGGLHL
HAQLGGLHF

SEQ ID NO: 27927 - protein, 9 aa, synthetic construct
  source 1..9: note = Seed: HSQLGGLHL
HAQLGGLHL

SEQ ID NO: 27928 - protein, 9 aa, synthetic construct
  source 1..9: note = Seed: HSQLGGLHL
HAQLGGLHM

SEQ ID NO: 27929 - protein, 9 aa, synthetic construct
  source 1..9: note = Seed: HSQLGGLHL
HAQLGGLHW

SEQ ID NO: 27930 - protein, 9 aa, synthetic construct
  source 1..9: note = Seed: HSQLGGLHL
HAQLGGLHY

SEQ ID NO: 27931 - protein, 10 aa, synthetic construct
  source 1..10: note = Seed: HVRAWIGFDV
HARAWIGFDK

SEQ ID NO: 27932 - protein, 10 aa, synthetic construct
  source 1..10: note = Seed: HVRAWIGFDV
HARAWIGFDL

SEQ ID NO: 27933 - protein, 10 aa, synthetic construct
  source 1..10: note = Seed: HSSRLSFKEL
HASRLSFKEK

SEQ ID NO: 27934 - protein, 10 aa, synthetic construct
  source 1..10: note = Seed: HSSRLSFKEL
HASRLSFKEW

SEQ ID NO: 27935 - protein, 9 aa, synthetic construct
  source 1..9: note = Seed: HVTFFIYNK
HATFFIYNK

SEQ ID NO: 27936 - protein, 10 aa, synthetic construct
  source 1..10: note = Seed: HVTFFIYNKI
HATFFIYNKA

SEQ ID NO: 27937 - protein, 10 aa, synthetic construct
  source 1..10: note = Seed: HVTFFIYNKI
HATFFIYNKI

SEQ ID NO: 27938 - protein, 10 aa, synthetic construct
  source 1..10: note = Seed: HVTFFIYNKI
HATFFIYNKK

SEQ ID NO: 27939 - protein, 10 aa, synthetic construct
  source 1..10: note = Seed: HVTFFIYNKI
HATFFIYNKL

SEQ ID NO: 27940 - protein, 10 aa, synthetic construct
  source 1..10: note = Seed: HVTFFIYNKI
HATFFIYNKR

SEQ ID NO: 27941 - protein, 10 aa, synthetic construct
  source 1..10: note = Seed: HVTFFIYNKI
HATFFIYNKV

SEQ ID NO: 27942 - protein, 9 aa, synthetic construct
  source 1..9: note = Seed: HVTFFIYNK
HATFFIYNR

SEQ ID NO: 27943 - protein, 9 aa, synthetic construct
  source 1..9: note = Seed: HVVGPNVNK
HAVGPNVNK

SEQ ID NO: 27944 - protein, 9 aa, synthetic construct
  source 1..9: note = Seed: HVVGPNVNK
HAVGPNVNR

SEQ ID NO: 27945 - protein, 9 aa, synthetic construct
  source 1..9: note = Seed: HFVNLDNLR
HAVNLDNLK

SEQ ID NO: 27946 - protein, 9 aa, synthetic construct
  source 1..9: note = Seed: HFVNLDNLR
HAVNLDNLR

SEQ ID NO: 27947 - protein, 10 aa, synthetic construct
  source 1..10: note = Seed: HGVVFLHVTY
HAVVFLHVTY

SEQ ID NO: 27948 - protein, 9 aa, synthetic construct
  source 1..9: note = Seed: HHWLLLTIL
HAWLLLTIY

SEQ ID NO: 27949 - protein, 9 aa, synthetic construct
  source 1..9: note = Seed: HSYFTSDYY
HAYFTSDYF

SEQ ID NO: 27950 - protein, 9 aa, synthetic construct
  source 1..9: note = Seed: HSYFTSDYY
HAYFTSDYI

SEQ ID NO: 27951 - protein, 9 aa, synthetic construct
  source 1..9: note = Seed: HSYFTSDYY
HAYFTSDYK

SEQ ID NO: 27952 - protein, 9 aa, synthetic construct
  source 1..9: note = Seed: HSYFTSDYY
HAYFTSDYL

SEQ ID NO: 27953 - protein, 9 aa, synthetic construct
  source 1..9: note = Seed: HSYFTSDYY
HAYFTSDYM

SEQ ID NO: 27954 - protein, 9 aa, synthetic construct
  source 1..9: note = Seed: HSYFTSDYY
HAYFTSDYR

SEQ ID NO: 27955 - protein, 9 aa, synthetic construct
  source 1..9: note = Seed: HSYFTSDYY
HAYFTSDYV

SEQ ID NO: 27956 - protein, 9 aa, synthetic construct
  source 1..9: note = Seed: HSYFTSDYY
HAYFTSDYW

SEQ ID NO: 27957 - protein, 9 aa, synthetic construct
  source 1..9: note = Seed: HSYFTSDYY
HAYFTSDYY

SEQ ID NO: 27958 - protein, 10 aa, synthetic construct
  source 1..10: note = Seed: HSYFTSDYYQ
HAYFTSDYYK

SEQ ID NO: 27959 - protein, 11 aa, synthetic construct
  source 1..11: note = Seed: HSYFTSDYYQL
HAYFTSDYYQF

SEQ ID NO: 27960 - protein, 11 aa, synthetic construct
  source 1..11: note = Seed: HSYFTSDYYQL
HAYFTSDYYQW

SEQ ID NO: 27961 - protein, 10 aa, synthetic construct
  source 1..10: note = Seed: HSYFTSDYYQ
HAYFTSDYYR

SEQ ID NO: 27962 - protein, 10 aa, synthetic construct
  source 1..10: note = Seed: HSYFTSDYYQ
HAYFTSDYYY

SEQ ID NO: 27963 - protein, 9 aa, synthetic construct
  source 1..9: note = Seed: HLYLQYIRK
HAYLQYIRK

SEQ ID NO: 27964 - protein, 10 aa, synthetic construct
  source 1..10: note = Seed: HLYLQYIRKL
HAYLQYIRKF

SEQ ID NO: 27965 - protein, 9 aa, synthetic construct
  source 1..9: note = Seed: HLYLQYIRK
HAYLQYIRR

SEQ ID NO: 27966 - protein, 9 aa, synthetic construct
  source 1..9: note = Seed: HFYSKWYIR
HAYSKWYIA

SEQ ID NO: 27967 - protein, 9 aa, synthetic construct
  source 1..9: note = Seed: HFYSKWYIR
HAYSKWYIK

SEQ ID NO: 27968 - protein, 9 aa, synthetic construct
  source 1..9: note = Seed: HFYSKWYIR
HAYSKWYIR

SEQ ID NO: 27969 - protein, 10 aa, synthetic construct
  source 1..10: note = Seed: HFYSKWYIRV
HAYSKWYIRF

SEQ ID NO: 27970 - protein, 10 aa, synthetic construct
  source 1..10: note = Seed: HFYSKWYIRV
HAYSKWYIRK

SEQ ID NO: 27971 - protein, 10 aa, synthetic construct
  source 1..10: note = Seed: HFYSKWYIRV
HAYSKWYIRR

SEQ ID NO: 27972 - protein, 9 aa, synthetic construct
  source 1..9: note = Seed: HFYWFFSNY
HAYWFFSNF

SEQ ID NO: 27973 - protein, 9 aa, synthetic construct
  source 1..9: note = Seed: HFYWFFSNY
HAYWFFSNK

SEQ ID NO: 27974 - protein, 9 aa, synthetic construct
  source 1..9: note = Seed: HFYWFFSNY
HAYWFFSNM

SEQ ID NO: 27975 - protein, 9 aa, synthetic construct
  source 1..9: note = Seed: HFYWFFSNY
HAYWFFSNR

SEQ ID NO: 27976 - protein, 9 aa, synthetic construct
  source 1..9: note = Seed: HFYWFFSNY
HAYWFFSNY

SEQ ID NO: 27977 - protein, 10 aa, synthetic construct
  source 1..10: note = Seed: HFYWFFSNYL
HAYWFFSNYF

SEQ ID NO: 27978 - protein, 10 aa, synthetic construct
  source 1..10: note = Seed: HFYWFFSNYL
HAYWFFSNYI

SEQ ID NO: 27979 - protein, 10 aa, synthetic construct
  source 1..10: note = Seed: HFYWFFSNYL
HAYWFFSNYL

SEQ ID NO: 27980 - protein, 11 aa, synthetic construct
  source 1..11: note = Seed: HFYWFFSNYLK
HAYWFFSNYLK

SEQ ID NO: 27981 - protein, 11 aa, synthetic construct
  source 1..11: note = Seed: HFYWFFSNYLK
HAYWFFSNYLR

SEQ ID NO: 27982 - protein, 10 aa, synthetic construct
  source 1..10: note = Seed: HFYWFFSNYL
HAYWFFSNYW

SEQ ID NO: 27983 - protein, 10 aa, synthetic construct
  source 1..10: note = Seed: HFYWFFSNYL
HAYWFFSNYY

SEQ ID NO: 27984 - protein, 10 aa, synthetic construct
  source 1..10: note = Seed: HAAVDALCEK
HCAVDALCER

SEQ ID NO: 27985 - protein, 9 aa, synthetic construct
  source 1..9: note = Seed: HGFELTSMK
HCFELTSMR

SEQ ID NO: 27986 - protein, 11 aa, synthetic construct
  source 1..11: note = Seed: HAGTDLEGNFY
HCGTDLEGNFY

SEQ ID NO: 27987 - protein, 11 aa, synthetic construct
  source 1..11: note = Seed: HWLLLTILTSL
HCLLLTILTSV

SEQ ID NO: 27988 - protein, 10 aa, synthetic construct
  source 1..10: note = Seed: HFLPRVFSAV
HCLPRVFSAV

SEQ ID NO: 27989 - protein, 9 aa, synthetic construct
  source 1..9: note = Seed: HLMSFPQSA
HCMSFPQSF

SEQ ID NO: 27990 - protein, 9 aa, synthetic construct
  source 1..9: note = Seed: HLMSFPQSA
HCMSFPQSY

SEQ ID NO: 27991 - protein, 10 aa, synthetic construct
  source 1..10: note = Seed: HVRAWIGFDV
HCRAWIGFDL

SEQ ID NO: 27992 - protein, 10 aa, synthetic construct
  source 1..10: note = Seed: HSSRLSFKEL
HCSRLSFKEK

SEQ ID NO: 27993 - protein, 10 aa, synthetic construct
  source 1..10: note = Seed: HVTFFIYNKI
HCTFFIYNKA

SEQ ID NO: 27994 - protein, 10 aa, synthetic construct
  source 1..10: note = Seed: HVTFFIYNKI
HCTFFIYNKI

SEQ ID NO: 27995 - protein, 10 aa, synthetic construct
  source 1..10: note = Seed: HVTFFIYNKI
HCTFFIYNKK

SEQ ID NO: 27996 - protein, 10 aa, synthetic construct
  source 1..10: note = Seed: HVTFFIYNKI
HCTFFIYNKL

SEQ ID NO: 27997 - protein, 10 aa, synthetic construct
  source 1..10: note = Seed: HVTFFIYNKI
HCTFFIYNKR

SEQ ID NO: 27998 - protein, 10 aa, synthetic construct
  source 1..10: note = Seed: HVTFFIYNKI
HCTFFIYNKV

SEQ ID NO: 27999 - protein, 9 aa, synthetic construct
  source 1..9: note = Seed: HSYFTSDYY
HCYFTSDYR

SEQ ID NO: 28000 - protein, 9 aa, synthetic construct
  source 1..9: note = Seed: HSYFTSDYY
HCYFTSDYW

SEQ ID NO: 28001 - protein, 11 aa, synthetic construct
  source 1..11: note = Seed: HSYFTSDYYQL
HCYFTSDYYQF

SEQ ID NO: 28002 - protein, 10 aa, synthetic construct
  source 1..10: note = Seed: HSYFTSDYYQ
HCYFTSDYYR

SEQ ID NO: 28003 - protein, 10 aa, synthetic construct
  source 1..10: note = Seed: HLYLQYIRKL
HCYLQYIRKF

SEQ ID NO: 28004 - protein, 9 aa, synthetic construct
  source 1..9: note = Seed: HFYSKWYIR
HCYSKWYIR

SEQ ID NO: 28005 - protein, 10 aa, synthetic construct
  source 1..10: note = Seed: HFYSKWYIRV
HCYSKWYIRF

SEQ ID NO: 28006 - protein, 9 aa, synthetic construct
  source 1..9: note = Seed: HFYWFFSNY
HCYWFFSNR

SEQ ID NO: 28007 - protein, 10 aa, synthetic construct
  source 1..10: note = Seed: HFYWFFSNYL
HCYWFFSNYF

SEQ ID NO: 28008 - protein, 10 aa, synthetic construct
  source 1..10: note = Seed: HFYWFFSNYL
HCYWFFSNYI

SEQ ID NO: 28009 - protein, 10 aa, synthetic construct
  source 1..10: note = Seed: HFYWFFSNYL
HCYWFFSNYL

SEQ ID NO: 28010 - protein, 11 aa, synthetic construct
  source 1..11: note = Seed: HFYWFFSNYLK
HCYWFFSNYLR

SEQ ID NO: 28011 - protein, 10 aa, synthetic construct
  source 1..10: note = Seed: HFYWFFSNYL
HCYWFFSNYW

SEQ ID NO: 28012 - protein, 10 aa, synthetic construct
  source 1..10: note = Seed: HFYWFFSNYL
HCYWFFSNYY

SEQ ID NO: 28013 - protein, 10 aa, synthetic construct
  source 1..10: note = Seed: HAAVDALCEK
HDAVDALCER

SEQ ID NO: 28014 - protein, 11 aa, synthetic construct
  source 1..11: note = Seed: HAGTDLEGNFY
HDGTDLEGNFY

SEQ ID NO: 28015 - protein, 11 aa, synthetic construct
  source 1..11: note = Seed: HWLLLTILTSL
HDLLLTILTSV

SEQ ID NO: 28016 - protein, 10 aa, synthetic construct
  source 1..10: note = Seed: HFLPRVFSAV
HDLPRVFSAV

SEQ ID NO: 28017 - protein, 10 aa, synthetic construct
  source 1..10: note = Seed: HVRAWIGFDV
HDRAWIGFDL

SEQ ID NO: 28018 - protein, 10 aa, synthetic construct
  source 1..10: note = Seed: HSSRLSFKEL
HDSRLSFKEK

SEQ ID NO: 28019 - protein, 10 aa, synthetic construct
  source 1..10: note = Seed: HVTFFIYNKI
HDTFFIYNKA

SEQ ID NO: 28020 - protein, 10 aa, synthetic construct
  source 1..10: note = Seed: HVTFFIYNKI
HDTFFIYNKI

SEQ ID NO: 28021 - protein, 10 aa, synthetic construct
  source 1..10: note = Seed: HVTFFIYNKI
HDTFFIYNKK

SEQ ID NO: 28022 - protein, 10 aa, synthetic construct
  source 1..10: note = Seed: HVTFFIYNKI
HDTFFIYNKL

SEQ ID NO: 28023 - protein, 10 aa, synthetic construct
  source 1..10: note = Seed: HVTFFIYNKI
HDTFFIYNKR

SEQ ID NO: 28024 - protein, 10 aa, synthetic construct
  source 1..10: note = Seed: HVTFFIYNKI
HDTFFIYNKV

SEQ ID NO: 28025 - protein, 10 aa, synthetic construct
  source 1..10: note = Seed: HLYLQYIRKL
HDYLQYIRKF

SEQ ID NO: 28026 - protein, 10 aa, synthetic construct
  source 1..10: note = Seed: HFYSKWYIRV
HDYSKWYIRF

SEQ ID NO: 28027 - protein, 10 aa, synthetic construct
  source 1..10: note = Seed: HFYWFFSNYL
HDYWFFSNYF

SEQ ID NO: 28028 - protein, 10 aa, synthetic construct
  source 1..10: note = Seed: HFYWFFSNYL
HDYWFFSNYI

SEQ ID NO: 28029 - protein, 10 aa, synthetic construct
  source 1..10: note = Seed: HFYWFFSNYL
HDYWFFSNYL

SEQ ID NO: 28030 - protein, 11 aa, synthetic construct
  source 1..11: note = Seed: HFYWFFSNYLK
HDYWFFSNYLR

SEQ ID NO: 28031 - protein, 10 aa, synthetic construct
  source 1..10: note = Seed: HFYWFFSNYL
HDYWFFSNYW

SEQ ID NO: 28032 - protein, 10 aa, synthetic construct
  source 1..10: note = Seed: HFYWFFSNYL
HDYWFFSNYY

SEQ ID NO: 28033 - protein, 9 aa, synthetic construct
  source 1..9: note = Seed: HCANFNVLF
HEANFNVLY

SEQ ID NO: 28034 - protein, 10 aa, synthetic construct
  source 1..10: note = Seed: HAAVDALCEK
HEAVDALCER

SEQ ID NO: 28035 - protein, 8 aa, synthetic construct
  source 1..8: note = Seed: HDFFKFRI
HEFFKFRL

SEQ ID NO: 28036 - protein, 9 aa, synthetic construct
  source 1..9: note = Seed: HEGKTFYVL
HEGKTFYVA

SEQ ID NO: 28037 - protein, 9 aa, synthetic construct
  source 1..9: note = Seed: HEGKTFYVL
HEGKTFYVF

SEQ ID NO: 28038 - protein, 9 aa, synthetic construct
  source 1..9: note = Seed: HEGKTFYVL
HEGKTFYVI

SEQ ID NO: 28039 - protein, 9 aa, synthetic construct
  source 1..9: note = Seed: HEGKTFYVL
HEGKTFYVM

SEQ ID NO: 28040 - protein, 9 aa, synthetic construct
  source 1..9: note = Seed: HEGKTFYVL
HEGKTFYVV

SEQ ID NO: 28041 - protein, 9 aa, synthetic construct
  source 1..9: note = Seed: HEGKTFYVL
HEGKTFYVY

SEQ ID NO: 28042 - protein, 11 aa, synthetic construct
  source 1..11: note = Seed: HAGTDLEGNFY
HEGTDLEGNFY

SEQ ID NO: 28043 - protein, 9 aa, synthetic construct
  source 1..9: note = Seed: HKHAFLCLF
HEHAFLCLF

SEQ ID NO: 28044 - protein, 9 aa, synthetic construct
  source 1..9: note = Seed: HKHAFLCLF
HEHAFLCLY

SEQ ID NO: 28045 - protein, 9 aa, synthetic construct
  source 1..9: note = Seed: HEHEIAWYT
HEHEIAWYA

SEQ ID NO: 28046 - protein, 9 aa, synthetic construct
  source 1..9: note = Seed: HEHEIAWYT
HEHEIAWYF

SEQ ID NO: 28047 - protein, 9 aa, synthetic construct
  source 1..9: note = Seed: HEHEIAWYT
HEHEIAWYI

SEQ ID NO: 28048 - protein, 9 aa, synthetic construct
  source 1..9: note = Seed: HEHEIAWYT
HEHEIAWYL

SEQ ID NO: 28049 - protein, 9 aa, synthetic construct
  source 1..9: note = Seed: HEHEIAWYT
HEHEIAWYM

SEQ ID NO: 28050 - protein, 9 aa, synthetic construct
  source 1..9: note = Seed: HEHEIAWYT
HEHEIAWYV

SEQ ID NO: 28051 - protein, 9 aa, synthetic construct
  source 1..9: note = Seed: HEHEIAWYT
HEHEIAWYY

SEQ ID NO: 28052 - protein, 11 aa, synthetic construct
  source 1..11: note = Seed: HWLLLTILTSL
HELLLTILTSV

SEQ ID NO: 28053 - protein, 10 aa, synthetic construct
  source 1..10: note = Seed: HFLPRVFSAV
HELPRVFSAV

SEQ ID NO: 28054 - protein, 9 aa, synthetic construct
  source 1..9: note = Seed: HLMSFPQSA
HEMSFPQSF

SEQ ID NO: 28055 - protein, 9 aa, synthetic construct
  source 1..9: note = Seed: HLMSFPQSA
HEMSFPQSM

SEQ ID NO: 28056 - protein, 9 aa, synthetic construct
  source 1..9: note = Seed: HLMSFPQSA
HEMSFPQSY

SEQ ID NO: 28057 - protein, 10 aa, synthetic construct
  source 1..10: note = Seed: HVRAWIGFDV
HERAWIGFDL

SEQ ID NO: 28058 - protein, 10 aa, synthetic construct
  source 1..10: note = Seed: HSSRLSFKEL
HESRLSFKEK

SEQ ID NO: 28059 - protein, 10 aa, synthetic construct
  source 1..10: note = Seed: HVTFFIYNKI
HETFFIYNKA

SEQ ID NO: 28060 - protein, 10 aa, synthetic construct
  source 1..10: note = Seed: HVTFFIYNKI
HETFFIYNKI

SEQ ID NO: 28061 - protein, 10 aa, synthetic construct
  source 1..10: note = Seed: HVTFFIYNKI
HETFFIYNKK

SEQ ID NO: 28062 - protein, 10 aa, synthetic construct
  source 1..10: note = Seed: HVTFFIYNKI
HETFFIYNKL

SEQ ID NO: 28063 - protein, 10 aa, synthetic construct
  source 1..10: note = Seed: HVTFFIYNKI
HETFFIYNKR

SEQ ID NO: 28064 - protein, 10 aa, synthetic construct
  source 1..10: note = Seed: HVTFFIYNKI
HETFFIYNKV

SEQ ID NO: 28065 - protein, 9 aa, synthetic construct
  source 1..9: note = Seed: HSYFTSDYY
HEYFTSDYF

SEQ ID NO: 28066 - protein, 9 aa, synthetic construct
  source 1..9: note = Seed: HSYFTSDYY
HEYFTSDYY

SEQ ID NO: 28067 - protein, 10 aa, synthetic construct
  source 1..10: note = Seed: HLYLQYIRKL
HEYLQYIRKF

SEQ ID NO: 28068 - protein, 10 aa, synthetic construct
  source 1..10: note = Seed: HFYSKWYIRV
HEYSKWYIRF

SEQ ID NO: 28069 - protein, 9 aa, synthetic construct
  source 1..9: note = Seed: HFYWFFSNY
HEYWFFSNF

SEQ ID NO: 28070 - protein, 9 aa, synthetic construct
  source 1..9: note = Seed: HFYWFFSNY
HEYWFFSNM

SEQ ID NO: 28071 - protein, 9 aa, synthetic construct
  source 1..9: note = Seed: HFYWFFSNY
HEYWFFSNY

SEQ ID NO: 28072 - protein, 10 aa, synthetic construct
  source 1..10: note = Seed: HFYWFFSNYL
HEYWFFSNYF

SEQ ID NO: 28073 - protein, 10 aa, synthetic construct
  source 1..10: note = Seed: HFYWFFSNYL
HEYWFFSNYI

SEQ ID NO: 28074 - protein, 10 aa, synthetic construct
  source 1..10: note = Seed: HFYWFFSNYL
HEYWFFSNYL

SEQ ID NO: 28075 - protein, 11 aa, synthetic construct
  source 1..11: note = Seed: HFYWFFSNYLK
HEYWFFSNYLR

SEQ ID NO: 28076 - protein, 10 aa, synthetic construct
  source 1..10: note = Seed: HFYWFFSNYL
HEYWFFSNYW

SEQ ID NO: 28077 - protein, 10 aa, synthetic construct
  source 1..10: note = Seed: HFYWFFSNYL
HEYWFFSNYY

SEQ ID NO: 28078 - protein, 10 aa, synthetic construct
  source 1..10: note = Seed: HAAVDALCEK
HFAVDALCER

SEQ ID NO: 28079 - protein, 10 aa, synthetic construct
  source 1..10: note = Seed: HGFELTSMKY
HFFELTSMKY

SEQ ID NO: 28080 - protein, 9 aa, synthetic construct
  source 1..9: note = Seed: HGFELTSMK
HFFELTSMR

SEQ ID NO: 28081 - protein, 11 aa, synthetic construct
  source 1..11: note = Seed: HAGTDLEGNFY
HFGTDLEGNFY

SEQ ID NO: 28082 - protein, 9 aa, synthetic construct
  source 1..9: note = Seed: HEIAWYTER
HFIAWYTEK

SEQ ID NO: 28083 - protein, 9 aa, synthetic construct
  source 1..9: note = Seed: HEIAWYTER
HFIAWYTER

SEQ ID NO: 28084 - protein, 8 aa, synthetic construct
  source 1..8: note = Seed: HFIETISL
HFIETISM

SEQ ID NO: 28085 - protein, 11 aa, synthetic construct
  source 1..11: note = Seed: HWLLLTILTSL
HFLLLTILTSV

SEQ ID NO: 28086 - protein, 10 aa, synthetic construct
  source 1..10: note = Seed: HFLPRVFSAV
HFLPRVFSAF

SEQ ID NO: 28087 - protein, 10 aa, synthetic construct
  source 1..10: note = Seed: HFLPRVFSAV
HFLPRVFSAL

SEQ ID NO: 28088 - protein, 10 aa, synthetic construct
  source 1..10: note = Seed: HFLPRVFSAV
HFLPRVFSAM

SEQ ID NO: 28089 - protein, 10 aa, synthetic construct
  source 1..10: note = Seed: HFLPRVFSAV
HFLPRVFSAY

SEQ ID NO: 28090 - protein, 9 aa, synthetic construct
  source 1..9: note = Seed: HFLPRVFSA
HFLPRVFSF

SEQ ID NO: 28091 - protein, 9 aa, synthetic construct
  source 1..9: note = Seed: HFLPRVFSA
HFLPRVFSI

SEQ ID NO: 28092 - protein, 9 aa, synthetic construct
  source 1..9: note = Seed: HFLPRVFSA
HFLPRVFSK

SEQ ID NO: 28093 - protein, 9 aa, synthetic construct
  source 1..9: note = Seed: HFLPRVFSA
HFLPRVFSL

SEQ ID NO: 28094 - protein, 9 aa, synthetic construct
  source 1..9: note = Seed: HFLPRVFSA
HFLPRVFSM

SEQ ID NO: 28095 - protein, 9 aa, synthetic construct
  source 1..9: note = Seed: HFLPRVFSA
HFLPRVFSY

SEQ ID NO: 28096 - protein, 9 aa, synthetic construct
  source 1..9: note = Seed: HSMQNCVLK
HFMQNCVLR

SEQ ID NO: 28097 - protein, 10 aa, synthetic construct
  source 1..10: note = Seed: HLMSFPQSAP
HFMSFPQSAI

SEQ ID NO: 28098 - protein, 10 aa, synthetic construct
  source 1..10: note = Seed: HLMSFPQSAP
HFMSFPQSAV

SEQ ID NO: 28099 - protein, 9 aa, synthetic construct
  source 1..9: note = Seed: HLMSFPQSA
HFMSFPQSF

SEQ ID NO: 28100 - protein, 9 aa, synthetic construct
  source 1..9: note = Seed: HLMSFPQSA
HFMSFPQSY

SEQ ID NO: 28101 - protein, 10 aa, synthetic construct
  source 1..10: note = Seed: HVRAWIGFDV
HFRAWIGFDL

SEQ ID NO: 28102 - protein, 9 aa, synthetic construct
  source 1..9: note = Seed: HFRELGVVH
HFRELGVVF

SEQ ID NO: 28103 - protein, 9 aa, synthetic construct
  source 1..9: note = Seed: HFRELGVVH
HFRELGVVL

SEQ ID NO: 28104 - protein, 9 aa, synthetic construct
  source 1..9: note = Seed: HFRELGVVH
HFRELGVVM

SEQ ID NO: 28105 - protein, 9 aa, synthetic construct
  source 1..9: note = Seed: HFRELGVVH
HFRELGVVY

SEQ ID NO: 28106 - protein, 10 aa, synthetic construct
  source 1..10: note = Seed: HSSRLSFKEL
HFSRLSFKEK

SEQ ID NO: 28107 - protein, 9 aa, synthetic construct
  source 1..9: note = Seed: HISRQRLTK
HFSRQRLTR

SEQ ID NO: 28108 - protein, 9 aa, synthetic construct
  source 1..9: note = Seed: HVTFFIYNK
HFTFFIYNK

SEQ ID NO: 28109 - protein, 10 aa, synthetic construct
  source 1..10: note = Seed: HVTFFIYNKI
HFTFFIYNKA

SEQ ID NO: 28110 - protein, 10 aa, synthetic construct
  source 1..10: note = Seed: HVTFFIYNKI
HFTFFIYNKI

SEQ ID NO: 28111 - protein, 10 aa, synthetic construct
  source 1..10: note = Seed: HVTFFIYNKI
HFTFFIYNKK

SEQ ID NO: 28112 - protein, 10 aa, synthetic construct
  source 1..10: note = Seed: HVTFFIYNKI
HFTFFIYNKL

SEQ ID NO: 28113 - protein, 10 aa, synthetic construct
  source 1..10: note = Seed: HVTFFIYNKI
HFTFFIYNKR

SEQ ID NO: 28114 - protein, 10 aa, synthetic construct
  source 1..10: note = Seed: HVTFFIYNKI
HFTFFIYNKV

SEQ ID NO: 28115 - protein, 9 aa, synthetic construct
  source 1..9: note = Seed: HVTFFIYNK
HFTFFIYNR

SEQ ID NO: 28116 - protein, 9 aa, synthetic construct
  source 1..9: note = Seed: HVVGPNVNK
HFVGPNVNR

SEQ ID NO: 28117 - protein, 10 aa, synthetic construct
  source 1..10: note = Seed: HGVVFLHVTY
HFVVFLHVTY

SEQ ID NO: 28118 - protein, 9 aa, synthetic construct
  source 1..9: note = Seed: HSYFTSDYY
HFYFTSDYF

SEQ ID NO: 28119 - protein, 9 aa, synthetic construct
  source 1..9: note = Seed: HSYFTSDYY
HFYFTSDYK

SEQ ID NO: 28120 - protein, 9 aa, synthetic construct
  source 1..9: note = Seed: HSYFTSDYY
HFYFTSDYL

SEQ ID NO: 28121 - protein, 9 aa, synthetic construct
  source 1..9: note = Seed: HSYFTSDYY
HFYFTSDYM

SEQ ID NO: 28122 - protein, 9 aa, synthetic construct
  source 1..9: note = Seed: HSYFTSDYY
HFYFTSDYR

SEQ ID NO: 28123 - protein, 9 aa, synthetic construct
  source 1..9: note = Seed: HSYFTSDYY
HFYFTSDYY

SEQ ID NO: 28124 - protein, 10 aa, synthetic construct
  source 1..10: note = Seed: HSYFTSDYYQ
HFYFTSDYYK

SEQ ID NO: 28125 - protein, 11 aa, synthetic construct
  source 1..11: note = Seed: HSYFTSDYYQL
HFYFTSDYYQF

SEQ ID NO: 28126 - protein, 11 aa, synthetic construct
  source 1..11: note = Seed: HSYFTSDYYQL
HFYFTSDYYQW

SEQ ID NO: 28127 - protein, 10 aa, synthetic construct
  source 1..10: note = Seed: HSYFTSDYYQ
HFYFTSDYYR

SEQ ID NO: 28128 - protein, 10 aa, synthetic construct
  source 1..10: note = Seed: HSYFTSDYYQ
HFYFTSDYYY

SEQ ID NO: 28129 - protein, 10 aa, synthetic construct
  source 1..10: note = Seed: HLYLQYIRKL
HFYLQYIRKF

SEQ ID NO: 28130 - protein, 9 aa, synthetic construct
  source 1..9: note = Seed: HLYLQYIRK
HFYLQYIRR

SEQ ID NO: 28131 - protein, 9 aa, synthetic construct
  source 1..9: note = Seed: HFYSKWYIR
HFYSKWYIK

SEQ ID NO: 28132 - protein, 10 aa, synthetic construct
  source 1..10: note = Seed: HFYSKWYIRV
HFYSKWYIRF

SEQ ID NO: 28133 - protein, 10 aa, synthetic construct
  source 1..10: note = Seed: HFYSKWYIRV
HFYSKWYIRK

SEQ ID NO: 28134 - protein, 10 aa, synthetic construct
  source 1..10: note = Seed: HFYSKWYIRV
HFYSKWYIRR

SEQ ID NO: 28135 - protein, 10 aa, synthetic construct
  source 1..10: note = Seed: HFYSKWYIRV
HFYSKWYIRW

SEQ ID NO: 28136 - protein, 9 aa, synthetic construct
  source 1..9: note = Seed: HFYWFFSNY
HFYWFFSNF

SEQ ID NO: 28137 - protein, 9 aa, synthetic construct
  source 1..9: note = Seed: HFYWFFSNY
HFYWFFSNK

SEQ ID NO: 28138 - protein, 9 aa, synthetic construct
  source 1..9: note = Seed: HFYWFFSNY
HFYWFFSNL

SEQ ID NO: 28139 - protein, 9 aa, synthetic construct
  source 1..9: note = Seed: HFYWFFSNY
HFYWFFSNM

SEQ ID NO: 28140 - protein, 9 aa, synthetic construct
  source 1..9: note = Seed: HFYWFFSNY
HFYWFFSNR

SEQ ID NO: 28141 - protein, 10 aa, synthetic construct
  source 1..10: note = Seed: HFYWFFSNYL
HFYWFFSNYF

SEQ ID NO: 28142 - protein, 10 aa, synthetic construct
  source 1..10: note = Seed: HFYWFFSNYL
HFYWFFSNYI

SEQ ID NO: 28143 - protein, 11 aa, synthetic construct
  source 1..11: note = Seed: HFYWFFSNYLK
HFYWFFSNYLR

SEQ ID NO: 28144 - protein, 10 aa, synthetic construct
  source 1..10: note = Seed: HFYWFFSNYL
HFYWFFSNYM

SEQ ID NO: 28145 - protein, 10 aa, synthetic construct
  source 1..10: note = Seed: HFYWFFSNYL
HFYWFFSNYW

SEQ ID NO: 28146 - protein, 10 aa, synthetic construct
  source 1..10: note = Seed: HFYWFFSNYL
HFYWFFSNYY

SEQ ID NO: 28147 - protein, 10 aa, synthetic construct
  source 1..10: note = Seed: HAAVDALCEK
HGAVDALCER

SEQ ID NO: 28148 - protein, 9 aa, synthetic construct
  source 1..9: note = Seed: HGFELTSMK
HGFELTSMR

SEQ ID NO: 28149 - protein, 9 aa, synthetic construct
  source 1..9: note = Seed: HAFLCLFLL
HGFLCLFLW

SEQ ID NO: 28150 - protein, 11 aa, synthetic construct
  source 1..11: note = Seed: HAGTDLEGNFY
HGGTDLEGNFY

SEQ ID NO: 28151 - protein, 9 aa, synthetic construct
  source 1..9: note = Seed: HEIAWYTER
HGIAWYTER

SEQ ID NO: 28152 - protein, 11 aa, synthetic construct
  source 1..11: note = Seed: HWLLLTILTSL
HGLLLTILTSV

SEQ ID NO: 28153 - protein, 10 aa, synthetic construct
  source 1..10: note = Seed: HFLPRVFSAV
HGLPRVFSAV

SEQ ID NO: 28154 - protein, 9 aa, synthetic construct
  source 1..9: note = Seed: HSMQNCVLK
HGMQNCVLR

SEQ ID NO: 28155 - protein, 9 aa, synthetic construct
  source 1..9: note = Seed: HLMSFPQSA
HGMSFPQSF

SEQ ID NO: 28156 - protein, 9 aa, synthetic construct
  source 1..9: note = Seed: HLMSFPQSA
HGMSFPQSY

SEQ ID NO: 28157 - protein, 10 aa, synthetic construct
  source 1..10: note = Seed: HVRAWIGFDV
HGRAWIGFDL

SEQ ID NO: 28158 - protein, 10 aa, synthetic construct
  source 1..10: note = Seed: HSSRLSFKEL
HGSRLSFKEK

SEQ ID NO: 28159 - protein, 10 aa, synthetic construct
  source 1..10: note = Seed: HSSRLSFKEL
HGSRLSFKEW

SEQ ID NO: 28160 - protein, 9 aa, synthetic construct
  source 1..9: note = Seed: HVTFFIYNK
HGTFFIYNK

SEQ ID NO: 28161 - protein, 10 aa, synthetic construct
  source 1..10: note = Seed: HVTFFIYNKI
HGTFFIYNKA

SEQ ID NO: 28162 - protein, 10 aa, synthetic construct
  source 1..10: note = Seed: HVTFFIYNKI
HGTFFIYNKI

SEQ ID NO: 28163 - protein, 10 aa, synthetic construct
  source 1..10: note = Seed: HVTFFIYNKI
HGTFFIYNKK

SEQ ID NO: 28164 - protein, 10 aa, synthetic construct
  source 1..10: note = Seed: HVTFFIYNKI
HGTFFIYNKL

SEQ ID NO: 28165 - protein, 10 aa, synthetic construct
  source 1..10: note = Seed: HVTFFIYNKI
HGTFFIYNKR

SEQ ID NO: 28166 - protein, 10 aa, synthetic construct
  source 1..10: note = Seed: HVTFFIYNKI
HGTFFIYNKV

SEQ ID NO: 28167 - protein, 9 aa, synthetic construct
  source 1..9: note = Seed: HVTFFIYNK
HGTFFIYNR

SEQ ID NO: 28168 - protein, 9 aa, synthetic construct
  source 1..9: note = Seed: HSYFTSDYY
HGYFTSDYF

SEQ ID NO: 28169 - protein, 9 aa, synthetic construct
  source 1..9: note = Seed: HSYFTSDYY
HGYFTSDYR

SEQ ID NO: 28170 - protein, 9 aa, synthetic construct
  source 1..9: note = Seed: HSYFTSDYY
HGYFTSDYW

SEQ ID NO: 28171 - protein, 9 aa, synthetic construct
  source 1..9: note = Seed: HSYFTSDYY
HGYFTSDYY

SEQ ID NO: 28172 - protein, 10 aa, synthetic construct
  source 1..10: note = Seed: HSYFTSDYYQ
HGYFTSDYYK

SEQ ID NO: 28173 - protein, 10 aa, synthetic construct
  source 1..10: note = Seed: HSYFTSDYYQ
HGYFTSDYYR

SEQ ID NO: 28174 - protein, 10 aa, synthetic construct
  source 1..10: note = Seed: HSYFTSDYYQ
HGYFTSDYYY

SEQ ID NO: 28175 - protein, 10 aa, synthetic construct
  source 1..10: note = Seed: HLYLQYIRKL
HGYLQYIRKF

SEQ ID NO: 28176 - protein, 9 aa, synthetic construct
  source 1..9: note = Seed: HLYLQYIRK
HGYLQYIRR

SEQ ID NO: 28177 - protein, 9 aa, synthetic construct
  source 1..9: note = Seed: HFYSKWYIR
HGYSKWYIK

SEQ ID NO: 28178 - protein, 9 aa, synthetic construct
  source 1..9: note = Seed: HFYSKWYIR
HGYSKWYIR

SEQ ID NO: 28179 - protein, 10 aa, synthetic construct
  source 1..10: note = Seed: HFYSKWYIRV
HGYSKWYIRF

SEQ ID NO: 28180 - protein, 10 aa, synthetic construct
  source 1..10: note = Seed: HFYSKWYIRV
HGYSKWYIRR

SEQ ID NO: 28181 - protein, 9 aa, synthetic construct
  source 1..9: note = Seed: HFYWFFSNY
HGYWFFSNF

SEQ ID NO: 28182 - protein, 9 aa, synthetic construct
  source 1..9: note = Seed: HFYWFFSNY
HGYWFFSNK

SEQ ID NO: 28183 - protein, 9 aa, synthetic construct
  source 1..9: note = Seed: HFYWFFSNY
HGYWFFSNR

SEQ ID NO: 28184 - protein, 9 aa, synthetic construct
  source 1..9: note = Seed: HFYWFFSNY
HGYWFFSNY

SEQ ID NO: 28185 - protein, 10 aa, synthetic construct
  source 1..10: note = Seed: HFYWFFSNYL
HGYWFFSNYF

SEQ ID NO: 28186 - protein, 10 aa, synthetic construct
  source 1..10: note = Seed: HFYWFFSNYL
HGYWFFSNYI

SEQ ID NO: 28187 - protein, 10 aa, synthetic construct
  source 1..10: note = Seed: HFYWFFSNYL
HGYWFFSNYL

SEQ ID NO: 28188 - protein, 11 aa, synthetic construct
  source 1..11: note = Seed: HFYWFFSNYLK
HGYWFFSNYLK

SEQ ID NO: 28189 - protein, 11 aa, synthetic construct
  source 1..11: note = Seed: HFYWFFSNYLK
HGYWFFSNYLR

SEQ ID NO: 28190 - protein, 10 aa, synthetic construct
  source 1..10: note = Seed: HFYWFFSNYL
HGYWFFSNYW

SEQ ID NO: 28191 - protein, 10 aa, synthetic construct
  source 1..10: note = Seed: HFYWFFSNYL
HGYWFFSNYY

SEQ ID NO: 28192 - protein, 9 aa, synthetic construct
  source 1..9: note = Seed: HCANFNVLF
HHANFNVLF

SEQ ID NO: 28193 - protein, 9 aa, synthetic construct
  source 1..9: note = Seed: HCANFNVLF
HHANFNVLY

SEQ ID NO: 28194 - protein, 10 aa, synthetic construct
  source 1..10: note = Seed: HAAVDALCEK
HHAVDALCER

SEQ ID NO: 28195 - protein, 10 aa, synthetic construct
  source 1..10: note = Seed: HGFELTSMKY
HHFELTSMKY

SEQ ID NO: 28196 - protein, 9 aa, synthetic construct
  source 1..9: note = Seed: HEGKTFYVL
HHGKTFYVI

SEQ ID NO: 28197 - protein, 9 aa, synthetic construct
  source 1..9: note = Seed: HEGKTFYVL
HHGKTFYVL

SEQ ID NO: 28198 - protein, 9 aa, synthetic construct
  source 1..9: note = Seed: HEGKTFYVL
HHGKTFYVM

SEQ ID NO: 28199 - protein, 9 aa, synthetic construct
  source 1..9: note = Seed: HEGKTFYVL
HHGKTFYVV

SEQ ID NO: 28200 - protein, 11 aa, synthetic construct
  source 1..11: note = Seed: HAGTDLEGNFY
HHGTDLEGNFY

SEQ ID NO: 28201 - protein, 9 aa, synthetic construct
  source 1..9: note = Seed: HKHAFLCLF
HHHAFLCLF

SEQ ID NO: 28202 - protein, 9 aa, synthetic construct
  source 1..9: note = Seed: HKHAFLCLF
HHHAFLCLY

SEQ ID NO: 28203 - protein, 11 aa, synthetic construct
  source 1..11: note = Seed: HWLLLTILTSL
HHLLLTILTSV

SEQ ID NO: 28204 - protein, 10 aa, synthetic construct
  source 1..10: note = Seed: HFLPRVFSAV
HHLPRVFSAV

SEQ ID NO: 28205 - protein, 9 aa, synthetic construct
  source 1..9: note = Seed: HHMELPTGV
HHMELPTGA

SEQ ID NO: 28206 - protein, 9 aa, synthetic construct
  source 1..9: note = Seed: HHMELPTGV
HHMELPTGI

SEQ ID NO: 28207 - protein, 9 aa, synthetic construct
  source 1..9: note = Seed: HHMELPTGV
HHMELPTGL

SEQ ID NO: 28208 - protein, 9 aa, synthetic construct
  source 1..9: note = Seed: HHMELPTGV
HHMELPTGM

SEQ ID NO: 28209 - protein, 10 aa, synthetic construct
  source 1..10: note = Seed: HHMELPTGVH
HHMELPTGVF

SEQ ID NO: 28210 - protein, 10 aa, synthetic construct
  source 1..10: note = Seed: HHMELPTGVH
HHMELPTGVY

SEQ ID NO: 28211 - protein, 9 aa, synthetic construct
  source 1..9: note = Seed: HLMSFPQSA
HHMSFPQSA

SEQ ID NO: 28212 - protein, 9 aa, synthetic construct
  source 1..9: note = Seed: HLMSFPQSA
HHMSFPQSF

SEQ ID NO: 28213 - protein, 9 aa, synthetic construct
  source 1..9: note = Seed: HLMSFPQSA
HHMSFPQSM

SEQ ID NO: 28214 - protein, 9 aa, synthetic construct
  source 1..9: note = Seed: HLMSFPQSA
HHMSFPQSV

SEQ ID NO: 28215 - protein, 9 aa, synthetic construct
  source 1..9: note = Seed: HLMSFPQSA
HHMSFPQSY

SEQ ID NO: 28216 - protein, 10 aa, synthetic construct
  source 1..10: note = Seed: HVRAWIGFDV
HHRAWIGFDL

SEQ ID NO: 28217 - protein, 10 aa, synthetic construct
  source 1..10: note = Seed: HSSRLSFKEL
HHSRLSFKEK

SEQ ID NO: 28218 - protein, 10 aa, synthetic construct
  source 1..10: note = Seed: HVTFFIYNKI
HHTFFIYNKA

SEQ ID NO: 28219 - protein, 10 aa, synthetic construct
  source 1..10: note = Seed: HVTFFIYNKI
HHTFFIYNKI

SEQ ID NO: 28220 - protein, 10 aa, synthetic construct
  source 1..10: note = Seed: HVTFFIYNKI
HHTFFIYNKK

SEQ ID NO: 28221 - protein, 10 aa, synthetic construct
  source 1..10: note = Seed: HVTFFIYNKI
HHTFFIYNKL

SEQ ID NO: 28222 - protein, 10 aa, synthetic construct
  source 1..10: note = Seed: HVTFFIYNKI
HHTFFIYNKR

SEQ ID NO: 28223 - protein, 10 aa, synthetic construct
  source 1..10: note = Seed: HVTFFIYNKI
HHTFFIYNKV

SEQ ID NO: 28224 - protein, 9 aa, synthetic construct
  source 1..9: note = Seed: HHWLLLTIL
HHWLLLTIA

SEQ ID NO: 28225 - protein, 9 aa, synthetic construct
  source 1..9: note = Seed: HHWLLLTIL
HHWLLLTIY

SEQ ID NO: 28226 - protein, 9 aa, synthetic construct
  source 1..9: note = Seed: HSYFTSDYY
HHYFTSDYF

SEQ ID NO: 28227 - protein, 9 aa, synthetic construct
  source 1..9: note = Seed: HSYFTSDYY
HHYFTSDYY

SEQ ID NO: 28228 - protein, 11 aa, synthetic construct
  source 1..11: note = Seed: HSYFTSDYYQL
HHYFTSDYYQF

SEQ ID NO: 28229 - protein, 10 aa, synthetic construct
  source 1..10: note = Seed: HSYFTSDYYQ
HHYFTSDYYY

SEQ ID NO: 28230 - protein, 10 aa, synthetic construct
  source 1..10: note = Seed: HLYLQYIRKL
HHYLQYIRKF

SEQ ID NO: 28231 - protein, 10 aa, synthetic construct
  source 1..10: note = Seed: HFYSKWYIRV
HHYSKWYIRF

SEQ ID NO: 28232 - protein, 9 aa, synthetic construct
  source 1..9: note = Seed: HFYWFFSNY
HHYWFFSNF

SEQ ID NO: 28233 - protein, 9 aa, synthetic construct
  source 1..9: note = Seed: HFYWFFSNY
HHYWFFSNM

SEQ ID NO: 28234 - protein, 9 aa, synthetic construct
  source 1..9: note = Seed: HFYWFFSNY
HHYWFFSNR

SEQ ID NO: 28235 - protein, 9 aa, synthetic construct
  source 1..9: note = Seed: HFYWFFSNY
HHYWFFSNY

SEQ ID NO: 28236 - protein, 10 aa, synthetic construct
  source 1..10: note = Seed: HFYWFFSNYL
HHYWFFSNYF

SEQ ID NO: 28237 - protein, 10 aa, synthetic construct
  source 1..10: note = Seed: HFYWFFSNYL
HHYWFFSNYI

SEQ ID NO: 28238 - protein, 10 aa, synthetic construct
  source 1..10: note = Seed: HFYWFFSNYL
HHYWFFSNYL

SEQ ID NO: 28239 - protein, 11 aa, synthetic construct
  source 1..11: note = Seed: HFYWFFSNYLK
HHYWFFSNYLK

SEQ ID NO: 28240 - protein, 11 aa, synthetic construct
  source 1..11: note = Seed: HFYWFFSNYLK
HHYWFFSNYLR

SEQ ID NO: 28241 - protein, 10 aa, synthetic construct
  source 1..10: note = Seed: HFYWFFSNYL
HHYWFFSNYW

SEQ ID NO: 28242 - protein, 10 aa, synthetic construct
  source 1..10: note = Seed: HFYWFFSNYL
HHYWFFSNYY

SEQ ID NO: 28243 - protein, 9 aa, synthetic construct
  source 1..9: note = Seed: HCANFNVLF
HIANFNVLF

SEQ ID NO: 28244 - protein, 9 aa, synthetic construct
  source 1..9: note = Seed: HCANFNVLF
HIANFNVLY

SEQ ID NO: 28245 - protein, 10 aa, synthetic construct
  source 1..10: note = Seed: HAAVDALCEK
HIAVDALCER

SEQ ID NO: 28246 - protein, 9 aa, synthetic construct
  source 1..9: note = Seed: HGFELTSMK
HIFELTSMK

SEQ ID NO: 28247 - protein, 10 aa, synthetic construct
  source 1..10: note = Seed: HGFELTSMKY
HIFELTSMKY

SEQ ID NO: 28248 - protein, 9 aa, synthetic construct
  source 1..9: note = Seed: HGFELTSMK
HIFELTSMR

SEQ ID NO: 28249 - protein, 9 aa, synthetic construct
  source 1..9: note = Seed: HAFLCLFLL
HIFLCLFLI

SEQ ID NO: 28250 - protein, 9 aa, synthetic construct
  source 1..9: note = Seed: HAFLCLFLL
HIFLCLFLL

SEQ ID NO: 28251 - protein, 9 aa, synthetic construct
  source 1..9: note = Seed: HAFLCLFLL
HIFLCLFLV

SEQ ID NO: 28252 - protein, 11 aa, synthetic construct
  source 1..11: note = Seed: HAGTDLEGNFY
HIGTDLEGNFY

SEQ ID NO: 28253 - protein, 9 aa, synthetic construct
  source 1..9: note = Seed: HKHAFLCLF
HIHAFLCLF

SEQ ID NO: 28254 - protein, 9 aa, synthetic construct
  source 1..9: note = Seed: HEIAWYTER
HIIAWYTEK

SEQ ID NO: 28255 - protein, 9 aa, synthetic construct
  source 1..9: note = Seed: HEIAWYTER
HIIAWYTER

SEQ ID NO: 28256 - protein, 11 aa, synthetic construct
  source 1..11: note = Seed: HWLLLTILTSL
HILLLTILTSV

SEQ ID NO: 28257 - protein, 10 aa, synthetic construct
  source 1..10: note = Seed: HFLPRVFSAV
HILPRVFSAV

SEQ ID NO: 28258 - protein, 9 aa, synthetic construct
  source 1..9: note = Seed: HFLPRVFSA
HILPRVFSL

SEQ ID NO: 28259 - protein, 9 aa, synthetic construct
  source 1..9: note = Seed: HFLPRVFSA
HILPRVFSM

SEQ ID NO: 28260 - protein, 9 aa, synthetic construct
  source 1..9: note = Seed: HSMQNCVLK
HIMQNCVLK

SEQ ID NO: 28261 - protein, 9 aa, synthetic construct
  source 1..9: note = Seed: HSMQNCVLK
HIMQNCVLR

SEQ ID NO: 28262 - protein, 10 aa, synthetic construct
  source 1..10: note = Seed: HLMSFPQSAP
HIMSFPQSAI

SEQ ID NO: 28263 - protein, 10 aa, synthetic construct
  source 1..10: note = Seed: HLMSFPQSAP
HIMSFPQSAV

SEQ ID NO: 28264 - protein, 9 aa, synthetic construct
  source 1..9: note = Seed: HLMSFPQSA
HIMSFPQSF

SEQ ID NO: 28265 - protein, 9 aa, synthetic construct
  source 1..9: note = Seed: HLMSFPQSA
HIMSFPQSI

SEQ ID NO: 28266 - protein, 9 aa, synthetic construct
  source 1..9: note = Seed: HLMSFPQSA
HIMSFPQSL

SEQ ID NO: 28267 - protein, 9 aa, synthetic construct
  source 1..9: note = Seed: HLMSFPQSA
HIMSFPQSM

SEQ ID NO: 28268 - protein, 9 aa, synthetic construct
  source 1..9: note = Seed: HLMSFPQSA
HIMSFPQSV

SEQ ID NO: 28269 - protein, 9 aa, synthetic construct
  source 1..9: note = Seed: HLMSFPQSA
HIMSFPQSY

SEQ ID NO: 28270 - protein, 10 aa, synthetic construct
  source 1..10: note = Seed: HVRAWIGFDV
HIRAWIGFDL

SEQ ID NO: 28271 - protein, 10 aa, synthetic construct
  source 1..10: note = Seed: HSSRLSFKEL
HISRLSFKEK

SEQ ID NO: 28272 - protein, 9 aa, synthetic construct
  source 1..9: note = Seed: HISRQRLTK
HISRQRLTR

SEQ ID NO: 28273 - protein, 9 aa, synthetic construct
  source 1..9: note = Seed: HVTFFIYNK
HITFFIYNK

SEQ ID NO: 28274 - protein, 10 aa, synthetic construct
  source 1..10: note = Seed: HVTFFIYNKI
HITFFIYNKA

SEQ ID NO: 28275 - protein, 10 aa, synthetic construct
  source 1..10: note = Seed: HVTFFIYNKI
HITFFIYNKI

SEQ ID NO: 28276 - protein, 10 aa, synthetic construct
  source 1..10: note = Seed: HVTFFIYNKI
HITFFIYNKK

SEQ ID NO: 28277 - protein, 10 aa, synthetic construct
  source 1..10: note = Seed: HVTFFIYNKI
HITFFIYNKL

SEQ ID NO: 28278 - protein, 10 aa, synthetic construct
  source 1..10: note = Seed: HVTFFIYNKI
HITFFIYNKR

SEQ ID NO: 28279 - protein, 10 aa, synthetic construct
  source 1..10: note = Seed: HVTFFIYNKI
HITFFIYNKV

SEQ ID NO: 28280 - protein, 9 aa, synthetic construct
  source 1..9: note = Seed: HVTFFIYNK
HITFFIYNR

SEQ ID NO: 28281 - protein, 9 aa, synthetic construct
  source 1..9: note = Seed: HVVGPNVNK
HIVGPNVNK

SEQ ID NO: 28282 - protein, 9 aa, synthetic construct
  source 1..9: note = Seed: HVVGPNVNK
HIVGPNVNR

SEQ ID NO: 28283 - protein, 9 aa, synthetic construct
  source 1..9: note = Seed: HFVNLDNLR
HIVNLDNLK

SEQ ID NO: 28284 - protein, 9 aa, synthetic construct
  source 1..9: note = Seed: HFVNLDNLR
HIVNLDNLR

SEQ ID NO: 28285 - protein, 9 aa, synthetic construct
  source 1..9: note = Seed: HSYFTSDYY
HIYFTSDYF

SEQ ID NO: 28286 - protein, 9 aa, synthetic construct
  source 1..9: note = Seed: HSYFTSDYY
HIYFTSDYK

SEQ ID NO: 28287 - protein, 9 aa, synthetic construct
  source 1..9: note = Seed: HSYFTSDYY
HIYFTSDYR

SEQ ID NO: 28288 - protein, 9 aa, synthetic construct
  source 1..9: note = Seed: HSYFTSDYY
HIYFTSDYW

SEQ ID NO: 28289 - protein, 9 aa, synthetic construct
  source 1..9: note = Seed: HSYFTSDYY
HIYFTSDYY

SEQ ID NO: 28290 - protein, 10 aa, synthetic construct
  source 1..10: note = Seed: HSYFTSDYYQ
HIYFTSDYYK

SEQ ID NO: 28291 - protein, 11 aa, synthetic construct
  source 1..11: note = Seed: HSYFTSDYYQL
HIYFTSDYYQF

SEQ ID NO: 28292 - protein, 10 aa, synthetic construct
  source 1..10: note = Seed: HSYFTSDYYQ
HIYFTSDYYR

SEQ ID NO: 28293 - protein, 10 aa, synthetic construct
  source 1..10: note = Seed: HSYFTSDYYQ
HIYFTSDYYY

SEQ ID NO: 28294 - protein, 9 aa, synthetic construct
  source 1..9: note = Seed: HLYLQYIRK
HIYLQYIRK

SEQ ID NO: 28295 - protein, 10 aa, synthetic construct
  source 1..10: note = Seed: HLYLQYIRKL
HIYLQYIRKF

SEQ ID NO: 28296 - protein, 9 aa, synthetic construct
  source 1..9: note = Seed: HLYLQYIRK
HIYLQYIRR

SEQ ID NO: 28297 - protein, 9 aa, synthetic construct
  source 1..9: note = Seed: HFYSKWYIR
HIYSKWYIK

SEQ ID NO: 28298 - protein, 9 aa, synthetic construct
  source 1..9: note = Seed: HFYSKWYIR
HIYSKWYIR

SEQ ID NO: 28299 - protein, 10 aa, synthetic construct
  source 1..10: note = Seed: HFYSKWYIRV
HIYSKWYIRF

SEQ ID NO: 28300 - protein, 10 aa, synthetic construct
  source 1..10: note = Seed: HFYSKWYIRV
HIYSKWYIRK

SEQ ID NO: 28301 - protein, 10 aa, synthetic construct
  source 1..10: note = Seed: HFYSKWYIRV
HIYSKWYIRR

SEQ ID NO: 28302 - protein, 9 aa, synthetic construct
  source 1..9: note = Seed: HFYWFFSNY
HIYWFFSNF

SEQ ID NO: 28303 - protein, 9 aa, synthetic construct
  source 1..9: note = Seed: HFYWFFSNY
HIYWFFSNK

SEQ ID NO: 28304 - protein, 9 aa, synthetic construct
  source 1..9: note = Seed: HFYWFFSNY
HIYWFFSNR

SEQ ID NO: 28305 - protein, 9 aa, synthetic construct
  source 1..9: note = Seed: HFYWFFSNY
HIYWFFSNY

SEQ ID NO: 28306 - protein, 10 aa, synthetic construct
  source 1..10: note = Seed: HFYWFFSNYL
HIYWFFSNYF

SEQ ID NO: 28307 - protein, 10 aa, synthetic construct
  source 1..10: note = Seed: HFYWFFSNYL
HIYWFFSNYI

SEQ ID NO: 28308 - protein, 10 aa, synthetic construct
  source 1..10: note = Seed: HFYWFFSNYL
HIYWFFSNYL

SEQ ID NO: 28309 - protein, 11 aa, synthetic construct
  source 1..11: note = Seed: HFYWFFSNYLK
HIYWFFSNYLK

SEQ ID NO: 28310 - protein, 11 aa, synthetic construct
  source 1..11: note = Seed: HFYWFFSNYLK
HIYWFFSNYLR

SEQ ID NO: 28311 - protein, 10 aa, synthetic construct
  source 1..10: note = Seed: HFYWFFSNYL
HIYWFFSNYW

SEQ ID NO: 28312 - protein, 10 aa, synthetic construct
  source 1..10: note = Seed: HFYWFFSNYL
HIYWFFSNYY

SEQ ID NO: 28313 - protein, 9 aa, synthetic construct
  source 1..9: note = Seed: HCANFNVLF
HKANFNVLF

SEQ ID NO: 28314 - protein, 9 aa, synthetic construct
  source 1..9: note = Seed: HCANFNVLF
HKANFNVLM

SEQ ID NO: 28315 - protein, 9 aa, synthetic construct
  source 1..9: note = Seed: HCANFNVLF
HKANFNVLY

SEQ ID NO: 28316 - protein, 10 aa, synthetic construct
  source 1..10: note = Seed: HAAVDALCEK
HKAVDALCER

SEQ ID NO: 28317 - protein, 10 aa, synthetic construct
  source 1..10: note = Seed: HGFELTSMKY
HKFELTSMKF

SEQ ID NO: 28318 - protein, 10 aa, synthetic construct
  source 1..10: note = Seed: HGFELTSMKY
HKFELTSMKY

SEQ ID NO: 28319 - protein, 11 aa, synthetic construct
  source 1..11: note = Seed: HAGTDLEGNFY
HKGTDLEGNFY

SEQ ID NO: 28320 - protein, 10 aa, synthetic construct
  source 1..10: note = Seed: HKHAFLCLFL
HKHAFLCLFF

SEQ ID NO: 28321 - protein, 10 aa, synthetic construct
  source 1..10: note = Seed: HKHAFLCLFL
HKHAFLCLFY

SEQ ID NO: 28322 - protein, 9 aa, synthetic construct
  source 1..9: note = Seed: HKHAFLCLF
HKHAFLCLL

SEQ ID NO: 28323 - protein, 9 aa, synthetic construct
  source 1..9: note = Seed: HKHAFLCLF
HKHAFLCLM

SEQ ID NO: 28324 - protein, 9 aa, synthetic construct
  source 1..9: note = Seed: HKHAFLCLF
HKHAFLCLY

SEQ ID NO: 28325 - protein, 11 aa, synthetic construct
  source 1..11: note = Seed: HWLLLTILTSL
HKLLLTILTSV

SEQ ID NO: 28326 - protein, 10 aa, synthetic construct
  source 1..10: note = Seed: HFLPRVFSAV
HKLPRVFSAV

SEQ ID NO: 28327 - protein, 9 aa, synthetic construct
  source 1..9: note = Seed: HHMELPTGV
HKMELPTGL

SEQ ID NO: 28328 - protein, 9 aa, synthetic construct
  source 1..9: note = Seed: HLMSFPQSA
HKMSFPQSA

SEQ ID NO: 28329 - protein, 9 aa, synthetic construct
  source 1..9: note = Seed: HLMSFPQSA
HKMSFPQSF

SEQ ID NO: 28330 - protein, 9 aa, synthetic construct
  source 1..9: note = Seed: HLMSFPQSA
HKMSFPQSI

SEQ ID NO: 28331 - protein, 9 aa, synthetic construct
  source 1..9: note = Seed: HLMSFPQSA
HKMSFPQSL

SEQ ID NO: 28332 - protein, 9 aa, synthetic construct
  source 1..9: note = Seed: HLMSFPQSA
HKMSFPQSM

SEQ ID NO: 28333 - protein, 9 aa, synthetic construct
  source 1..9: note = Seed: HLMSFPQSA
HKMSFPQSV

SEQ ID NO: 28334 - protein, 9 aa, synthetic construct
  source 1..9: note = Seed: HLMSFPQSA
HKMSFPQSW

SEQ ID NO: 28335 - protein, 9 aa, synthetic construct
  source 1..9: note = Seed: HLMSFPQSA
HKMSFPQSY

SEQ ID NO: 28336 - protein, 10 aa, synthetic construct
  source 1..10: note = Seed: HVRAWIGFDV
HKRAWIGFDL

SEQ ID NO: 28337 - protein, 10 aa, synthetic construct
  source 1..10: note = Seed: HSSRLSFKEL
HKSRLSFKEK

SEQ ID NO: 28338 - protein, 10 aa, synthetic construct
  source 1..10: note = Seed: HVTFFIYNKI
HKTFFIYNKA

SEQ ID NO: 28339 - protein, 10 aa, synthetic construct
  source 1..10: note = Seed: HVTFFIYNKI
HKTFFIYNKI

SEQ ID NO: 28340 - protein, 10 aa, synthetic construct
  source 1..10: note = Seed: HVTFFIYNKI
HKTFFIYNKK

SEQ ID NO: 28341 - protein, 10 aa, synthetic construct
  source 1..10: note = Seed: HVTFFIYNKI
HKTFFIYNKL

SEQ ID NO: 28342 - protein, 10 aa, synthetic construct
  source 1..10: note = Seed: HVTFFIYNKI
HKTFFIYNKR

SEQ ID NO: 28343 - protein, 10 aa, synthetic construct
  source 1..10: note = Seed: HVTFFIYNKI
HKTFFIYNKV

SEQ ID NO: 28344 - protein, 10 aa, synthetic construct
  source 1..10: note = Seed: HGVVFLHVTY
HKVVFLHVTF

SEQ ID NO: 28345 - protein, 10 aa, synthetic construct
  source 1..10: note = Seed: HGVVFLHVTY
HKVVFLHVTY

SEQ ID NO: 28346 - protein, 9 aa, synthetic construct
  source 1..9: note = Seed: HHWLLLTIL
HKWLLLTIF

SEQ ID NO: 28347 - protein, 9 aa, synthetic construct
  source 1..9: note = Seed: HHWLLLTIL
HKWLLLTIM

SEQ ID NO: 28348 - protein, 9 aa, synthetic construct
  source 1..9: note = Seed: HHWLLLTIL
HKWLLLTIY

SEQ ID NO: 28349 - protein, 9 aa, synthetic construct
  source 1..9: note = Seed: HSYFTSDYY
HKYFTSDYF

SEQ ID NO: 28350 - protein, 9 aa, synthetic construct
  source 1..9: note = Seed: HSYFTSDYY
HKYFTSDYL

SEQ ID NO: 28351 - protein, 9 aa, synthetic construct
  source 1..9: note = Seed: HSYFTSDYY
HKYFTSDYM

SEQ ID NO: 28352 - protein, 9 aa, synthetic construct
  source 1..9: note = Seed: HSYFTSDYY
HKYFTSDYY

SEQ ID NO: 28353 - protein, 11 aa, synthetic construct
  source 1..11: note = Seed: HSYFTSDYYQL
HKYFTSDYYQF

SEQ ID NO: 28354 - protein, 10 aa, synthetic construct
  source 1..10: note = Seed: HLYLQYIRKL
HKYLQYIRKF

SEQ ID NO: 28355 - protein, 10 aa, synthetic construct
  source 1..10: note = Seed: HFYSKWYIRV
HKYSKWYIRF

SEQ ID NO: 28356 - protein, 9 aa, synthetic construct
  source 1..9: note = Seed: HFYWFFSNY
HKYWFFSNF

SEQ ID NO: 28357 - protein, 9 aa, synthetic construct
  source 1..9: note = Seed: HFYWFFSNY
HKYWFFSNL

SEQ ID NO: 28358 - protein, 9 aa, synthetic construct
  source 1..9: note = Seed: HFYWFFSNY
HKYWFFSNM

SEQ ID NO: 28359 - protein, 9 aa, synthetic construct
  source 1..9: note = Seed: HFYWFFSNY
HKYWFFSNY

SEQ ID NO: 28360 - protein, 10 aa, synthetic construct
  source 1..10: note = Seed: HFYWFFSNYL
HKYWFFSNYF

SEQ ID NO: 28361 - protein, 10 aa, synthetic construct
  source 1..10: note = Seed: HFYWFFSNYL
HKYWFFSNYI

SEQ ID NO: 28362 - protein, 10 aa, synthetic construct
  source 1..10: note = Seed: HFYWFFSNYL
HKYWFFSNYL

SEQ ID NO: 28363 - protein, 11 aa, synthetic construct
  source 1..11: note = Seed: HFYWFFSNYLK
HKYWFFSNYLK

SEQ ID NO: 28364 - protein, 11 aa, synthetic construct
  source 1..11: note = Seed: HFYWFFSNYLK
HKYWFFSNYLR

SEQ ID NO: 28365 - protein, 10 aa, synthetic construct
  source 1..10: note = Seed: HFYWFFSNYL
HKYWFFSNYW

SEQ ID NO: 28366 - protein, 10 aa, synthetic construct
  source 1..10: note = Seed: HFYWFFSNYL
HKYWFFSNYY

SEQ ID NO: 28367 - protein, 9 aa, synthetic construct
  source 1..9: note = Seed: HCANFNVLF
HLANFNVLF

SEQ ID NO: 28368 - protein, 9 aa, synthetic construct
  source 1..9: note = Seed: HCANFNVLF
HLANFNVLY

SEQ ID NO: 28369 - protein, 10 aa, synthetic construct
  source 1..10: note = Seed: HAAVDALCEK
HLAVDALCER

SEQ ID NO: 28370 - protein, 9 aa, synthetic construct
  source 1..9: note = Seed: HGFELTSMK
HLFELTSMK

SEQ ID NO: 28371 - protein, 10 aa, synthetic construct
  source 1..10: note = Seed: HGFELTSMKY
HLFELTSMKF

SEQ ID NO: 28372 - protein, 10 aa, synthetic construct
  source 1..10: note = Seed: HGFELTSMKY
HLFELTSMKY

SEQ ID NO: 28373 - protein, 9 aa, synthetic construct
  source 1..9: note = Seed: HGFELTSMK
HLFELTSMR

SEQ ID NO: 28374 - protein, 9 aa, synthetic construct
  source 1..9: note = Seed: HAFLCLFLL
HLFLCLFLA

SEQ ID NO: 28375 - protein, 9 aa, synthetic construct
  source 1..9: note = Seed: HAFLCLFLL
HLFLCLFLI

SEQ ID NO: 28376 - protein, 9 aa, synthetic construct
  source 1..9: note = Seed: HAFLCLFLL
HLFLCLFLL

SEQ ID NO: 28377 - protein, 9 aa, synthetic construct
  source 1..9: note = Seed: HAFLCLFLL
HLFLCLFLM

SEQ ID NO: 28378 - protein, 9 aa, synthetic construct
  source 1..9: note = Seed: HAFLCLFLL
HLFLCLFLV

SEQ ID NO: 28379 - protein, 11 aa, synthetic construct
  source 1..11: note = Seed: HAGTDLEGNFY
HLGTDLEGNFY

SEQ ID NO: 28380 - protein, 9 aa, synthetic construct
  source 1..9: note = Seed: HKHAFLCLF
HLHAFLCLF

SEQ ID NO: 28381 - protein, 9 aa, synthetic construct
  source 1..9: note = Seed: HKHAFLCLF
HLHAFLCLY

SEQ ID NO: 28382 - protein, 9 aa, synthetic construct
  source 1..9: note = Seed: HEIAWYTER
HLIAWYTEK

SEQ ID NO: 28383 - protein, 9 aa, synthetic construct
  source 1..9: note = Seed: HEIAWYTER
HLIAWYTER

SEQ ID NO: 28384 - protein, 8 aa, synthetic construct
  source 1..8: note = Seed: HMLDMYSV
HLLDMYSV

SEQ ID NO: 28385 - protein, 11 aa, synthetic construct
  source 1..11: note = Seed: HWLLLTILTSL
HLLLLTILTSV

SEQ ID NO: 28386 - protein, 10 aa, synthetic construct
  source 1..10: note = Seed: HFLPRVFSAV
HLLPRVFSAA

SEQ ID NO: 28387 - protein, 10 aa, synthetic construct
  source 1..10: note = Seed: HFLPRVFSAV
HLLPRVFSAI

SEQ ID NO: 28388 - protein, 10 aa, synthetic construct
  source 1..10: note = Seed: HFLPRVFSAV
HLLPRVFSAL

SEQ ID NO: 28389 - protein, 10 aa, synthetic construct
  source 1..10: note = Seed: HFLPRVFSAV
HLLPRVFSAV

SEQ ID NO: 28390 - protein, 9 aa, synthetic construct
  source 1..9: note = Seed: HFLPRVFSA
HLLPRVFSF

SEQ ID NO: 28391 - protein, 9 aa, synthetic construct
  source 1..9: note = Seed: HFLPRVFSA
HLLPRVFSI

SEQ ID NO: 28392 - protein, 9 aa, synthetic construct
  source 1..9: note = Seed: HFLPRVFSA
HLLPRVFSL

SEQ ID NO: 28393 - protein, 9 aa, synthetic construct
  source 1..9: note = Seed: HFLPRVFSA
HLLPRVFSM

SEQ ID NO: 28394 - protein, 9 aa, synthetic construct
  source 1..9: note = Seed: HFLPRVFSA
HLLPRVFSV

SEQ ID NO: 28395 - protein, 9 aa, synthetic construct
  source 1..9: note = Seed: HSMQNCVLK
HLMQNCVLK

SEQ ID NO: 28396 - protein, 9 aa, synthetic construct
  source 1..9: note = Seed: HSMQNCVLK
HLMQNCVLR

SEQ ID NO: 28397 - protein, 10 aa, synthetic construct
  source 1..10: note = Seed: HLMSFPQSAP
HLMSFPQSAA

SEQ ID NO: 28398 - protein, 10 aa, synthetic construct
  source 1..10: note = Seed: HLMSFPQSAP
HLMSFPQSAI

SEQ ID NO: 28399 - protein, 10 aa, synthetic construct
  source 1..10: note = Seed: HLMSFPQSAP
HLMSFPQSAL

SEQ ID NO: 28400 - protein, 10 aa, synthetic construct
  source 1..10: note = Seed: HLMSFPQSAP
HLMSFPQSAV

SEQ ID NO: 28401 - protein, 9 aa, synthetic construct
  source 1..9: note = Seed: HLMSFPQSA
HLMSFPQSC

SEQ ID NO: 28402 - protein, 9 aa, synthetic construct
  source 1..9: note = Seed: HLMSFPQSA
HLMSFPQSF

SEQ ID NO: 28403 - protein, 9 aa, synthetic construct
  source 1..9: note = Seed: HLMSFPQSA
HLMSFPQSI

SEQ ID NO: 28404 - protein, 9 aa, synthetic construct
  source 1..9: note = Seed: HLMSFPQSA
HLMSFPQSL

SEQ ID NO: 28405 - protein, 9 aa, synthetic construct
  source 1..9: note = Seed: HLMSFPQSA
HLMSFPQSM

SEQ ID NO: 28406 - protein, 9 aa, synthetic construct
  source 1..9: note = Seed: HLMSFPQSA
HLMSFPQST

SEQ ID NO: 28407 - protein, 9 aa, synthetic construct
  source 1..9: note = Seed: HLMSFPQSA
HLMSFPQSV

SEQ ID NO: 28408 - protein, 9 aa, synthetic construct
  source 1..9: note = Seed: HLMSFPQSA
HLMSFPQSY

SEQ ID NO: 28409 - protein, 10 aa, synthetic construct
  source 1..10: note = Seed: HVRAWIGFDV
HLRAWIGFDL

SEQ ID NO: 28410 - protein, 10 aa, synthetic construct
  source 1..10: note = Seed: HSSRLSFKEL
HLSRLSFKEK

SEQ ID NO: 28411 - protein, 9 aa, synthetic construct
  source 1..9: note = Seed: HISRQRLTK
HLSRQRLTK

SEQ ID NO: 28412 - protein, 9 aa, synthetic construct
  source 1..9: note = Seed: HISRQRLTK
HLSRQRLTR

SEQ ID NO: 28413 - protein, 9 aa, synthetic construct
  source 1..9: note = Seed: HVTFFIYNK
HLTFFIYNK

SEQ ID NO: 28414 - protein, 10 aa, synthetic construct
  source 1..10: note = Seed: HVTFFIYNKI
HLTFFIYNKA

SEQ ID NO: 28415 - protein, 10 aa, synthetic construct
  source 1..10: note = Seed: HVTFFIYNKI
HLTFFIYNKI

SEQ ID NO: 28416 - protein, 10 aa, synthetic construct
  source 1..10: note = Seed: HVTFFIYNKI
HLTFFIYNKK

SEQ ID NO: 28417 - protein, 10 aa, synthetic construct
  source 1..10: note = Seed: HVTFFIYNKI
HLTFFIYNKL

SEQ ID NO: 28418 - protein, 10 aa, synthetic construct
  source 1..10: note = Seed: HVTFFIYNKI
HLTFFIYNKR

SEQ ID NO: 28419 - protein, 10 aa, synthetic construct
  source 1..10: note = Seed: HVTFFIYNKI
HLTFFIYNKV

SEQ ID NO: 28420 - protein, 9 aa, synthetic construct
  source 1..9: note = Seed: HVTFFIYNK
HLTFFIYNR

SEQ ID NO: 28421 - protein, 9 aa, synthetic construct
  source 1..9: note = Seed: HVVGPNVNK
HLVGPNVNR

SEQ ID NO: 28422 - protein, 9 aa, synthetic construct
  source 1..9: note = Seed: HFVNLDNLR
HLVNLDNLR

SEQ ID NO: 28423 - protein, 11 aa, synthetic construct
  source 1..11: note = Seed: HGVVFLHVTYV
HLVVFLHVTYV

SEQ ID NO: 28424 - protein, 9 aa, synthetic construct
  source 1..9: note = Seed: HSYFTSDYY
HLYFTSDYF

SEQ ID NO: 28425 - protein, 9 aa, synthetic construct
  source 1..9: note = Seed: HSYFTSDYY
HLYFTSDYK

SEQ ID NO: 28426 - protein, 9 aa, synthetic construct
  source 1..9: note = Seed: HSYFTSDYY
HLYFTSDYM

SEQ ID NO: 28427 - protein, 9 aa, synthetic construct
  source 1..9: note = Seed: HSYFTSDYY
HLYFTSDYR

SEQ ID NO: 28428 - protein, 9 aa, synthetic construct
  source 1..9: note = Seed: HSYFTSDYY
HLYFTSDYW

SEQ ID NO: 28429 - protein, 9 aa, synthetic construct
  source 1..9: note = Seed: HSYFTSDYY
HLYFTSDYY

SEQ ID NO: 28430 - protein, 10 aa, synthetic construct
  source 1..10: note = Seed: HSYFTSDYYQ
HLYFTSDYYK

SEQ ID NO: 28431 - protein, 11 aa, synthetic construct
  source 1..11: note = Seed: HSYFTSDYYQL
HLYFTSDYYQF

SEQ ID NO: 28432 - protein, 10 aa, synthetic construct
  source 1..10: note = Seed: HSYFTSDYYQ
HLYFTSDYYR

SEQ ID NO: 28433 - protein, 10 aa, synthetic construct
  source 1..10: note = Seed: HSYFTSDYYQ
HLYFTSDYYY

SEQ ID NO: 28434 - protein, 10 aa, synthetic construct
  source 1..10: note = Seed: HLYLQYIRKL
HLYLQYIRKF

SEQ ID NO: 28435 - protein, 10 aa, synthetic construct
  source 1..10: note = Seed: HLYLQYIRKL
HLYLQYIRKV

SEQ ID NO: 28436 - protein, 9 aa, synthetic construct
  source 1..9: note = Seed: HLYLQYIRK
HLYLQYIRR

SEQ ID NO: 28437 - protein, 9 aa, synthetic construct
  source 1..9: note = Seed: HFYSKWYIR
HLYSKWYIK

SEQ ID NO: 28438 - protein, 9 aa, synthetic construct
  source 1..9: note = Seed: HFYSKWYIR
HLYSKWYIR

SEQ ID NO: 28439 - protein, 10 aa, synthetic construct
  source 1..10: note = Seed: HFYSKWYIRV
HLYSKWYIRF

SEQ ID NO: 28440 - protein, 10 aa, synthetic construct
  source 1..10: note = Seed: HFYSKWYIRV
HLYSKWYIRK

SEQ ID NO: 28441 - protein, 10 aa, synthetic construct
  source 1..10: note = Seed: HFYSKWYIRV
HLYSKWYIRR

SEQ ID NO: 28442 - protein, 9 aa, synthetic construct
  source 1..9: note = Seed: HFYWFFSNY
HLYWFFSNF

SEQ ID NO: 28443 - protein, 9 aa, synthetic construct
  source 1..9: note = Seed: HFYWFFSNY
HLYWFFSNK

SEQ ID NO: 28444 - protein, 9 aa, synthetic construct
  source 1..9: note = Seed: HFYWFFSNY
HLYWFFSNR

SEQ ID NO: 28445 - protein, 9 aa, synthetic construct
  source 1..9: note = Seed: HFYWFFSNY
HLYWFFSNY

SEQ ID NO: 28446 - protein, 10 aa, synthetic construct
  source 1..10: note = Seed: HFYWFFSNYL
HLYWFFSNYF

SEQ ID NO: 28447 - protein, 10 aa, synthetic construct
  source 1..10: note = Seed: HFYWFFSNYL
HLYWFFSNYI

SEQ ID NO: 28448 - protein, 10 aa, synthetic construct
  source 1..10: note = Seed: HFYWFFSNYL
HLYWFFSNYL

SEQ ID NO: 28449 - protein, 11 aa, synthetic construct
  source 1..11: note = Seed: HFYWFFSNYLK
HLYWFFSNYLK

SEQ ID NO: 28450 - protein, 11 aa, synthetic construct
  source 1..11: note = Seed: HFYWFFSNYLK
HLYWFFSNYLR

SEQ ID NO: 28451 - protein, 10 aa, synthetic construct
  source 1..10: note = Seed: HFYWFFSNYL
HLYWFFSNYW

SEQ ID NO: 28452 - protein, 10 aa, synthetic construct
  source 1..10: note = Seed: HFYWFFSNYL
HLYWFFSNYY

SEQ ID NO: 28453 - protein, 9 aa, synthetic construct
  source 1..9: note = Seed: HCANFNVLF
HMANFNVLF

SEQ ID NO: 28454 - protein, 9 aa, synthetic construct
  source 1..9: note = Seed: HCANFNVLF
HMANFNVLL

SEQ ID NO: 28455 - protein, 9 aa, synthetic construct
  source 1..9: note = Seed: HCANFNVLF
HMANFNVLM

SEQ ID NO: 28456 - protein, 9 aa, synthetic construct
  source 1..9: note = Seed: HCANFNVLF
HMANFNVLY

SEQ ID NO: 28457 - protein, 10 aa, synthetic construct
  source 1..10: note = Seed: HAAVDALCEK
HMAVDALCER

SEQ ID NO: 28458 - protein, 9 aa, synthetic construct
  source 1..9: note = Seed: HGFELTSMK
HMFELTSMK

SEQ ID NO: 28459 - protein, 10 aa, synthetic construct
  source 1..10: note = Seed: HGFELTSMKY
HMFELTSMKF

SEQ ID NO: 28460 - protein, 10 aa, synthetic construct
  source 1..10: note = Seed: HGFELTSMKY
HMFELTSMKM

SEQ ID NO: 28461 - protein, 10 aa, synthetic construct
  source 1..10: note = Seed: HGFELTSMKY
HMFELTSMKY

SEQ ID NO: 28462 - protein, 9 aa, synthetic construct
  source 1..9: note = Seed: HGFELTSMK
HMFELTSMR

SEQ ID NO: 28463 - protein, 9 aa, synthetic construct
  source 1..9: note = Seed: HAFLCLFLL
HMFLCLFLA

SEQ ID NO: 28464 - protein, 9 aa, synthetic construct
  source 1..9: note = Seed: HAFLCLFLL
HMFLCLFLI

SEQ ID NO: 28465 - protein, 9 aa, synthetic construct
  source 1..9: note = Seed: HAFLCLFLL
HMFLCLFLL

SEQ ID NO: 28466 - protein, 9 aa, synthetic construct
  source 1..9: note = Seed: HAFLCLFLL
HMFLCLFLM

SEQ ID NO: 28467 - protein, 9 aa, synthetic construct
  source 1..9: note = Seed: HAFLCLFLL
HMFLCLFLT

SEQ ID NO: 28468 - protein, 9 aa, synthetic construct
  source 1..9: note = Seed: HAFLCLFLL
HMFLCLFLV

SEQ ID NO: 28469 - protein, 11 aa, synthetic construct
  source 1..11: note = Seed: HAGTDLEGNFY
HMGTDLEGNFY

SEQ ID NO: 28470 - protein, 9 aa, synthetic construct
  source 1..9: note = Seed: HKHAFLCLF
HMHAFLCLF

SEQ ID NO: 28471 - protein, 10 aa, synthetic construct
  source 1..10: note = Seed: HKHAFLCLFL
HMHAFLCLFF

SEQ ID NO: 28472 - protein, 10 aa, synthetic construct
  source 1..10: note = Seed: HKHAFLCLFL
HMHAFLCLFY

SEQ ID NO: 28473 - protein, 9 aa, synthetic construct
  source 1..9: note = Seed: HKHAFLCLF
HMHAFLCLL

SEQ ID NO: 28474 - protein, 9 aa, synthetic construct
  source 1..9: note = Seed: HKHAFLCLF
HMHAFLCLM

SEQ ID NO: 28475 - protein, 9 aa, synthetic construct
  source 1..9: note = Seed: HKHAFLCLF
HMHAFLCLY

SEQ ID NO: 28476 - protein, 9 aa, synthetic construct
  source 1..9: note = Seed: HEIAWYTER
HMIAWYTEK

SEQ ID NO: 28477 - protein, 9 aa, synthetic construct
  source 1..9: note = Seed: HEIAWYTER
HMIAWYTER

SEQ ID NO: 28478 - protein, 11 aa, synthetic construct
  source 1..11: note = Seed: HWLLLTILTSL
HMLLLTILTSV

SEQ ID NO: 28479 - protein, 9 aa, synthetic construct
  source 1..9: note = Seed: HFLPRVFSA
HMLPRVFSA

SEQ ID NO: 28480 - protein, 10 aa, synthetic construct
  source 1..10: note = Seed: HFLPRVFSAV
HMLPRVFSAA

SEQ ID NO: 28481 - protein, 10 aa, synthetic construct
  source 1..10: note = Seed: HFLPRVFSAV
HMLPRVFSAI

SEQ ID NO: 28482 - protein, 10 aa, synthetic construct
  source 1..10: note = Seed: HFLPRVFSAV
HMLPRVFSAL

SEQ ID NO: 28483 - protein, 10 aa, synthetic construct
  source 1..10: note = Seed: HFLPRVFSAV
HMLPRVFSAV

SEQ ID NO: 28484 - protein, 9 aa, synthetic construct
  source 1..9: note = Seed: HFLPRVFSA
HMLPRVFSF

SEQ ID NO: 28485 - protein, 9 aa, synthetic construct
  source 1..9: note = Seed: HFLPRVFSA
HMLPRVFSI

SEQ ID NO: 28486 - protein, 9 aa, synthetic construct
  source 1..9: note = Seed: HFLPRVFSA
HMLPRVFSK

SEQ ID NO: 28487 - protein, 9 aa, synthetic construct
  source 1..9: note = Seed: HFLPRVFSA
HMLPRVFSL

SEQ ID NO: 28488 - protein, 9 aa, synthetic construct
  source 1..9: note = Seed: HFLPRVFSA
HMLPRVFSM

SEQ ID NO: 28489 - protein, 9 aa, synthetic construct
  source 1..9: note = Seed: HFLPRVFSA
HMLPRVFSV

SEQ ID NO: 28490 - protein, 9 aa, synthetic construct
  source 1..9: note = Seed: HSMQNCVLK
HMMQNCVLK

SEQ ID NO: 28491 - protein, 9 aa, synthetic construct
  source 1..9: note = Seed: HSMQNCVLK
HMMQNCVLR

SEQ ID NO: 28492 - protein, 9 aa, synthetic construct
  source 1..9: note = Seed: HLMSFPQSA
HMMSFPQSA

SEQ ID NO: 28493 - protein, 10 aa, synthetic construct
  source 1..10: note = Seed: HLMSFPQSAP
HMMSFPQSAA

SEQ ID NO: 28494 - protein, 10 aa, synthetic construct
  source 1..10: note = Seed: HLMSFPQSAP
HMMSFPQSAI

SEQ ID NO: 28495 - protein, 10 aa, synthetic construct
  source 1..10: note = Seed: HLMSFPQSAP
HMMSFPQSAL

SEQ ID NO: 28496 - protein, 10 aa, synthetic construct
  source 1..10: note = Seed: HLMSFPQSAP
HMMSFPQSAV

SEQ ID NO: 28497 - protein, 9 aa, synthetic construct
  source 1..9: note = Seed: HLMSFPQSA
HMMSFPQSC

SEQ ID NO: 28498 - protein, 9 aa, synthetic construct
  source 1..9: note = Seed: HLMSFPQSA
HMMSFPQSF

SEQ ID NO: 28499 - protein, 9 aa, synthetic construct
  source 1..9: note = Seed: HLMSFPQSA
HMMSFPQSH

SEQ ID NO: 28500 - protein, 9 aa, synthetic construct
  source 1..9: note = Seed: HLMSFPQSA
HMMSFPQSI

SEQ ID NO: 28501 - protein, 9 aa, synthetic construct
  source 1..9: note = Seed: HLMSFPQSA
HMMSFPQSL

SEQ ID NO: 28502 - protein, 9 aa, synthetic construct
  source 1..9: note = Seed: HLMSFPQSA
HMMSFPQSM

SEQ ID NO: 28503 - protein, 9 aa, synthetic construct
  source 1..9: note = Seed: HLMSFPQSA
HMMSFPQST

SEQ ID NO: 28504 - protein, 9 aa, synthetic construct
  source 1..9: note = Seed: HLMSFPQSA
HMMSFPQSV

SEQ ID NO: 28505 - protein, 9 aa, synthetic construct
  source 1..9: note = Seed: HLMSFPQSA
HMMSFPQSW

SEQ ID NO: 28506 - protein, 9 aa, synthetic construct
  source 1..9: note = Seed: HLMSFPQSA
HMMSFPQSY

SEQ ID NO: 28507 - protein, 10 aa, synthetic construct
  source 1..10: note = Seed: HVRAWIGFDV
HMRAWIGFDL

SEQ ID NO: 28508 - protein, 10 aa, synthetic construct
  source 1..10: note = Seed: HSSRLSFKEL
HMSRLSFKEK

SEQ ID NO: 28509 - protein, 10 aa, synthetic construct
  source 1..10: note = Seed: HSSRLSFKEL
HMSRLSFKEW

SEQ ID NO: 28510 - protein, 9 aa, synthetic construct
  source 1..9: note = Seed: HISRQRLTK
HMSRQRLTK

SEQ ID NO: 28511 - protein, 9 aa, synthetic construct
  source 1..9: note = Seed: HISRQRLTK
HMSRQRLTR

SEQ ID NO: 28512 - protein, 9 aa, synthetic construct
  source 1..9: note = Seed: HVTFFIYNK
HMTFFIYNK

SEQ ID NO: 28513 - protein, 10 aa, synthetic construct
  source 1..10: note = Seed: HVTFFIYNKI
HMTFFIYNKA

SEQ ID NO: 28514 - protein, 10 aa, synthetic construct
  source 1..10: note = Seed: HVTFFIYNKI
HMTFFIYNKI

SEQ ID NO: 28515 - protein, 10 aa, synthetic construct
  source 1..10: note = Seed: HVTFFIYNKI
HMTFFIYNKK

SEQ ID NO: 28516 - protein, 10 aa, synthetic construct
  source 1..10: note = Seed: HVTFFIYNKI
HMTFFIYNKL

SEQ ID NO: 28517 - protein, 10 aa, synthetic construct
  source 1..10: note = Seed: HVTFFIYNKI
HMTFFIYNKR

SEQ ID NO: 28518 - protein, 10 aa, synthetic construct
  source 1..10: note = Seed: HVTFFIYNKI
HMTFFIYNKV

SEQ ID NO: 28519 - protein, 9 aa, synthetic construct
  source 1..9: note = Seed: HVTFFIYNK
HMTFFIYNR

SEQ ID NO: 28520 - protein, 9 aa, synthetic construct
  source 1..9: note = Seed: HVVGPNVNK
HMVGPNVNK

SEQ ID NO: 28521 - protein, 9 aa, synthetic construct
  source 1..9: note = Seed: HVVGPNVNK
HMVGPNVNR

SEQ ID NO: 28522 - protein, 9 aa, synthetic construct
  source 1..9: note = Seed: HFVNLDNLR
HMVNLDNLR

SEQ ID NO: 28523 - protein, 10 aa, synthetic construct
  source 1..10: note = Seed: HGVVFLHVTY
HMVVFLHVTF

SEQ ID NO: 28524 - protein, 10 aa, synthetic construct
  source 1..10: note = Seed: HGVVFLHVTY
HMVVFLHVTY

SEQ ID NO: 28525 - protein, 11 aa, synthetic construct
  source 1..11: note = Seed: HGVVFLHVTYV
HMVVFLHVTYV

SEQ ID NO: 28526 - protein, 9 aa, synthetic construct
  source 1..9: note = Seed: HHWLLLTIL
HMWLLLTIF

SEQ ID NO: 28527 - protein, 9 aa, synthetic construct
  source 1..9: note = Seed: HHWLLLTIL
HMWLLLTIM

SEQ ID NO: 28528 - protein, 9 aa, synthetic construct
  source 1..9: note = Seed: HHWLLLTIL
HMWLLLTIY

SEQ ID NO: 28529 - protein, 8 aa, synthetic construct
  source 1..8: note = Seed: HSYFTSDY
HMYFTSDF

SEQ ID NO: 28530 - protein, 8 aa, synthetic construct
  source 1..8: note = Seed: HSYFTSDY
HMYFTSDY

SEQ ID NO: 28531 - protein, 9 aa, synthetic construct
  source 1..9: note = Seed: HSYFTSDYY
HMYFTSDYF

SEQ ID NO: 28532 - protein, 9 aa, synthetic construct
  source 1..9: note = Seed: HSYFTSDYY
HMYFTSDYI

SEQ ID NO: 28533 - protein, 9 aa, synthetic construct
  source 1..9: note = Seed: HSYFTSDYY
HMYFTSDYK

SEQ ID NO: 28534 - protein, 9 aa, synthetic construct
  source 1..9: note = Seed: HSYFTSDYY
HMYFTSDYL

SEQ ID NO: 28535 - protein, 9 aa, synthetic construct
  source 1..9: note = Seed: HSYFTSDYY
HMYFTSDYM

SEQ ID NO: 28536 - protein, 9 aa, synthetic construct
  source 1..9: note = Seed: HSYFTSDYY
HMYFTSDYR

SEQ ID NO: 28537 - protein, 9 aa, synthetic construct
  source 1..9: note = Seed: HSYFTSDYY
HMYFTSDYW

SEQ ID NO: 28538 - protein, 9 aa, synthetic construct
  source 1..9: note = Seed: HSYFTSDYY
HMYFTSDYY

SEQ ID NO: 28539 - protein, 10 aa, synthetic construct
  source 1..10: note = Seed: HSYFTSDYYQ
HMYFTSDYYK

SEQ ID NO: 28540 - protein, 11 aa, synthetic construct
  source 1..11: note = Seed: HSYFTSDYYQL
HMYFTSDYYQF

SEQ ID NO: 28541 - protein, 10 aa, synthetic construct
  source 1..10: note = Seed: HSYFTSDYYQ
HMYFTSDYYR

SEQ ID NO: 28542 - protein, 10 aa, synthetic construct
  source 1..10: note = Seed: HSYFTSDYYQ
HMYFTSDYYY

SEQ ID NO: 28543 - protein, 9 aa, synthetic construct
  source 1..9: note = Seed: HLYLQYIRK
HMYLQYIRK

SEQ ID NO: 28544 - protein, 10 aa, synthetic construct
  source 1..10: note = Seed: HLYLQYIRKL
HMYLQYIRKF

SEQ ID NO: 28545 - protein, 10 aa, synthetic construct
  source 1..10: note = Seed: HLYLQYIRKL
HMYLQYIRKV

SEQ ID NO: 28546 - protein, 9 aa, synthetic construct
  source 1..9: note = Seed: HLYLQYIRK
HMYLQYIRR

SEQ ID NO: 28547 - protein, 9 aa, synthetic construct
  source 1..9: note = Seed: HFYSKWYIR
HMYSKWYIK

SEQ ID NO: 28548 - protein, 9 aa, synthetic construct
  source 1..9: note = Seed: HFYSKWYIR
HMYSKWYIR

SEQ ID NO: 28549 - protein, 10 aa, synthetic construct
  source 1..10: note = Seed: HFYSKWYIRV
HMYSKWYIRA

SEQ ID NO: 28550 - protein, 10 aa, synthetic construct
  source 1..10: note = Seed: HFYSKWYIRV
HMYSKWYIRC

SEQ ID NO: 28551 - protein, 10 aa, synthetic construct
  source 1..10: note = Seed: HFYSKWYIRV
HMYSKWYIRD

SEQ ID NO: 28552 - protein, 10 aa, synthetic construct
  source 1..10: note = Seed: HFYSKWYIRV
HMYSKWYIRE

SEQ ID NO: 28553 - protein, 10 aa, synthetic construct
  source 1..10: note = Seed: HFYSKWYIRV
HMYSKWYIRF

SEQ ID NO: 28554 - protein, 10 aa, synthetic construct
  source 1..10: note = Seed: HFYSKWYIRV
HMYSKWYIRG

SEQ ID NO: 28555 - protein, 10 aa, synthetic construct
  source 1..10: note = Seed: HFYSKWYIRV
HMYSKWYIRH

SEQ ID NO: 28556 - protein, 10 aa, synthetic construct
  source 1..10: note = Seed: HFYSKWYIRV
HMYSKWYIRI

SEQ ID NO: 28557 - protein, 10 aa, synthetic construct
  source 1..10: note = Seed: HFYSKWYIRV
HMYSKWYIRK

SEQ ID NO: 28558 - protein, 10 aa, synthetic construct
  source 1..10: note = Seed: HFYSKWYIRV
HMYSKWYIRL

SEQ ID NO: 28559 - protein, 10 aa, synthetic construct
  source 1..10: note = Seed: HFYSKWYIRV
HMYSKWYIRM

SEQ ID NO: 28560 - protein, 10 aa, synthetic construct
  source 1..10: note = Seed: HFYSKWYIRV
HMYSKWYIRN

SEQ ID NO: 28561 - protein, 10 aa, synthetic construct
  source 1..10: note = Seed: HFYSKWYIRV
HMYSKWYIRP

SEQ ID NO: 28562 - protein, 10 aa, synthetic construct
  source 1..10: note = Seed: HFYSKWYIRV
HMYSKWYIRQ

SEQ ID NO: 28563 - protein, 10 aa, synthetic construct
  source 1..10: note = Seed: HFYSKWYIRV
HMYSKWYIRR

SEQ ID NO: 28564 - protein, 10 aa, synthetic construct
  source 1..10: note = Seed: HFYSKWYIRV
HMYSKWYIRS

SEQ ID NO: 28565 - protein, 10 aa, synthetic construct
  source 1..10: note = Seed: HFYSKWYIRV
HMYSKWYIRT

SEQ ID NO: 28566 - protein, 10 aa, synthetic construct
  source 1..10: note = Seed: HFYSKWYIRV
HMYSKWYIRV

SEQ ID NO: 28567 - protein, 10 aa, synthetic construct
  source 1..10: note = Seed: HFYSKWYIRV
HMYSKWYIRW

SEQ ID NO: 28568 - protein, 10 aa, synthetic construct
  source 1..10: note = Seed: HFYSKWYIRV
HMYSKWYIRY

SEQ ID NO: 28569 - protein, 9 aa, synthetic construct
  source 1..9: note = Seed: HFYWFFSNY
HMYWFFSNF

SEQ ID NO: 28570 - protein, 9 aa, synthetic construct
  source 1..9: note = Seed: HFYWFFSNY
HMYWFFSNK

SEQ ID NO: 28571 - protein, 9 aa, synthetic construct
  source 1..9: note = Seed: HFYWFFSNY
HMYWFFSNL

SEQ ID NO: 28572 - protein, 9 aa, synthetic construct
  source 1..9: note = Seed: HFYWFFSNY
HMYWFFSNM

SEQ ID NO: 28573 - protein, 9 aa, synthetic construct
  source 1..9: note = Seed: HFYWFFSNY
HMYWFFSNR

SEQ ID NO: 28574 - protein, 9 aa, synthetic construct
  source 1..9: note = Seed: HFYWFFSNY
HMYWFFSNY

SEQ ID NO: 28575 - protein, 10 aa, synthetic construct
  source 1..10: note = Seed: HFYWFFSNYL
HMYWFFSNYF

SEQ ID NO: 28576 - protein, 10 aa, synthetic construct
  source 1..10: note = Seed: HFYWFFSNYL
HMYWFFSNYI

SEQ ID NO: 28577 - protein, 10 aa, synthetic construct
  source 1..10: note = Seed: HFYWFFSNYL
HMYWFFSNYL

SEQ ID NO: 28578 - protein, 11 aa, synthetic construct
  source 1..11: note = Seed: HFYWFFSNYLK
HMYWFFSNYLK

SEQ ID NO: 28579 - protein, 11 aa, synthetic construct
  source 1..11: note = Seed: HFYWFFSNYLK
HMYWFFSNYLR

SEQ ID NO: 28580 - protein, 10 aa, synthetic construct
  source 1..10: note = Seed: HFYWFFSNYL
HMYWFFSNYW

SEQ ID NO: 28581 - protein, 10 aa, synthetic construct
  source 1..10: note = Seed: HFYWFFSNYL
HMYWFFSNYY

SEQ ID NO: 28582 - protein, 10 aa, synthetic construct
  source 1..10: note = Seed: HAAVDALCEK
HNAVDALCER

SEQ ID NO: 28583 - protein, 9 aa, synthetic construct
  source 1..9: note = Seed: HGFELTSMK
HNFELTSMK

SEQ ID NO: 28584 - protein, 9 aa, synthetic construct
  source 1..9: note = Seed: HGFELTSMK
HNFELTSMR

SEQ ID NO: 28585 - protein, 11 aa, synthetic construct
  source 1..11: note = Seed: HAGTDLEGNFY
HNGTDLEGNFY

SEQ ID NO: 28586 - protein, 9 aa, synthetic construct
  source 1..9: note = Seed: HKHAFLCLF
HNHAFLCLF

SEQ ID NO: 28587 - protein, 9 aa, synthetic construct
  source 1..9: note = Seed: HEIAWYTER
HNIAWYTER

SEQ ID NO: 28588 - protein, 11 aa, synthetic construct
  source 1..11: note = Seed: HWLLLTILTSL
HNLLLTILTSV

SEQ ID NO: 28589 - protein, 10 aa, synthetic construct
  source 1..10: note = Seed: HFLPRVFSAV
HNLPRVFSAV

SEQ ID NO: 28590 - protein, 9 aa, synthetic construct
  source 1..9: note = Seed: HLMSFPQSA
HNMSFPQSF

SEQ ID NO: 28591 - protein, 9 aa, synthetic construct
  source 1..9: note = Seed: HLMSFPQSA
HNMSFPQSM

SEQ ID NO: 28592 - protein, 9 aa, synthetic construct
  source 1..9: note = Seed: HLMSFPQSA
HNMSFPQSY

SEQ ID NO: 28593 - protein, 10 aa, synthetic construct
  source 1..10: note = Seed: HVRAWIGFDV
HNRAWIGFDL

SEQ ID NO: 28594 - protein, 10 aa, synthetic construct
  source 1..10: note = Seed: HSSRLSFKEL
HNSRLSFKEK

SEQ ID NO: 28595 - protein, 9 aa, synthetic construct
  source 1..9: note = Seed: HVTFFIYNK
HNTFFIYNK

SEQ ID NO: 28596 - protein, 10 aa, synthetic construct
  source 1..10: note = Seed: HVTFFIYNKI
HNTFFIYNKA

SEQ ID NO: 28597 - protein, 10 aa, synthetic construct
  source 1..10: note = Seed: HVTFFIYNKI
HNTFFIYNKI

SEQ ID NO: 28598 - protein, 10 aa, synthetic construct
  source 1..10: note = Seed: HVTFFIYNKI
HNTFFIYNKK

SEQ ID NO: 28599 - protein, 10 aa, synthetic construct
  source 1..10: note = Seed: HVTFFIYNKI
HNTFFIYNKL

SEQ ID NO: 28600 - protein, 10 aa, synthetic construct
  source 1..10: note = Seed: HVTFFIYNKI
HNTFFIYNKR

SEQ ID NO: 28601 - protein, 10 aa, synthetic construct
  source 1..10: note = Seed: HVTFFIYNKI
HNTFFIYNKV

SEQ ID NO: 28602 - protein, 9 aa, synthetic construct
  source 1..9: note = Seed: HVTFFIYNK
HNTFFIYNR

SEQ ID NO: 28603 - protein, 9 aa, synthetic construct
  source 1..9: note = Seed: HSYFTSDYY
HNYFTSDYF

SEQ ID NO: 28604 - protein, 9 aa, synthetic construct
  source 1..9: note = Seed: HSYFTSDYY
HNYFTSDYK

SEQ ID NO: 28605 - protein, 9 aa, synthetic construct
  source 1..9: note = Seed: HSYFTSDYY
HNYFTSDYR

SEQ ID NO: 28606 - protein, 9 aa, synthetic construct
  source 1..9: note = Seed: HSYFTSDYY
HNYFTSDYY

SEQ ID NO: 28607 - protein, 10 aa, synthetic construct
  source 1..10: note = Seed: HSYFTSDYYQ
HNYFTSDYYK

SEQ ID NO: 28608 - protein, 10 aa, synthetic construct
  source 1..10: note = Seed: HSYFTSDYYQ
HNYFTSDYYR

SEQ ID NO: 28609 - protein, 10 aa, synthetic construct
  source 1..10: note = Seed: HSYFTSDYYQ
HNYFTSDYYY

SEQ ID NO: 28610 - protein, 10 aa, synthetic construct
  source 1..10: note = Seed: HLYLQYIRKL
HNYLQYIRKF

SEQ ID NO: 28611 - protein, 9 aa, synthetic construct
  source 1..9: note = Seed: HFYSKWYIR
HNYSKWYIK

SEQ ID NO: 28612 - protein, 9 aa, synthetic construct
  source 1..9: note = Seed: HFYSKWYIR
HNYSKWYIR

SEQ ID NO: 28613 - protein, 10 aa, synthetic construct
  source 1..10: note = Seed: HFYSKWYIRV
HNYSKWYIRF

SEQ ID NO: 28614 - protein, 10 aa, synthetic construct
  source 1..10: note = Seed: HFYSKWYIRV
HNYSKWYIRR

SEQ ID NO: 28615 - protein, 9 aa, synthetic construct
  source 1..9: note = Seed: HFYWFFSNY
HNYWFFSNF

SEQ ID NO: 28616 - protein, 9 aa, synthetic construct
  source 1..9: note = Seed: HFYWFFSNY
HNYWFFSNK

SEQ ID NO: 28617 - protein, 9 aa, synthetic construct
  source 1..9: note = Seed: HFYWFFSNY
HNYWFFSNR

SEQ ID NO: 28618 - protein, 9 aa, synthetic construct
  source 1..9: note = Seed: HFYWFFSNY
HNYWFFSNY

SEQ ID NO: 28619 - protein, 10 aa, synthetic construct
  source 1..10: note = Seed: HFYWFFSNYL
HNYWFFSNYF

SEQ ID NO: 28620 - protein, 10 aa, synthetic construct
  source 1..10: note = Seed: HFYWFFSNYL
HNYWFFSNYI

SEQ ID NO: 28621 - protein, 10 aa, synthetic construct
  source 1..10: note = Seed: HFYWFFSNYL
HNYWFFSNYL

SEQ ID NO: 28622 - protein, 11 aa, synthetic construct
  source 1..11: note = Seed: HFYWFFSNYLK
HNYWFFSNYLK

SEQ ID NO: 28623 - protein, 11 aa, synthetic construct
  source 1..11: note = Seed: HFYWFFSNYLK
HNYWFFSNYLR

SEQ ID NO: 28624 - protein, 10 aa, synthetic construct
  source 1..10: note = Seed: HFYWFFSNYL
HNYWFFSNYW

SEQ ID NO: 28625 - protein, 10 aa, synthetic construct
  source 1..10: note = Seed: HFYWFFSNYL
HNYWFFSNYY

SEQ ID NO: 28626 - protein, 10 aa, synthetic construct
  source 1..10: note = Seed: HAAVDALCEK
HPAVDALCER

SEQ ID NO: 28627 - protein, 11 aa, synthetic construct
  source 1..11: note = Seed: HAGTDLEGNFY
HPGTDLEGNFY

SEQ ID NO: 28628 - protein, 9 aa, synthetic construct
  source 1..9: note = Seed: HEIAWYTER
HPIAWYTER

SEQ ID NO: 28629 - protein, 11 aa, synthetic construct
  source 1..11: note = Seed: HWLLLTILTSL
HPLLLTILTSV

SEQ ID NO: 28630 - protein, 10 aa, synthetic construct
  source 1..10: note = Seed: HFLPRVFSAV
HPLPRVFSAV

SEQ ID NO: 28631 - protein, 9 aa, synthetic construct
  source 1..9: note = Seed: HFLPRVFSA
HPLPRVFSL

SEQ ID NO: 28632 - protein, 10 aa, synthetic construct
  source 1..10: note = Seed: HVRAWIGFDV
HPRAWIGFDL

SEQ ID NO: 28633 - protein, 10 aa, synthetic construct
  source 1..10: note = Seed: HSSRLSFKEL
HPSRLSFKEK

SEQ ID NO: 28634 - protein, 9 aa, synthetic construct
  source 1..9: note = Seed: HVTFFIYNK
HPTFFIYNK

SEQ ID NO: 28635 - protein, 10 aa, synthetic construct
  source 1..10: note = Seed: HVTFFIYNKI
HPTFFIYNKA

SEQ ID NO: 28636 - protein, 10 aa, synthetic construct
  source 1..10: note = Seed: HVTFFIYNKI
HPTFFIYNKI

SEQ ID NO: 28637 - protein, 10 aa, synthetic construct
  source 1..10: note = Seed: HVTFFIYNKI
HPTFFIYNKK

SEQ ID NO: 28638 - protein, 10 aa, synthetic construct
  source 1..10: note = Seed: HVTFFIYNKI
HPTFFIYNKL

SEQ ID NO: 28639 - protein, 10 aa, synthetic construct
  source 1..10: note = Seed: HVTFFIYNKI
HPTFFIYNKR

SEQ ID NO: 28640 - protein, 10 aa, synthetic construct
  source 1..10: note = Seed: HVTFFIYNKI
HPTFFIYNKV

SEQ ID NO: 28641 - protein, 9 aa, synthetic construct
  source 1..9: note = Seed: HVTFFIYNK
HPTFFIYNR

SEQ ID NO: 28642 - protein, 10 aa, synthetic construct
  source 1..10: note = Seed: HGVVFLHVTY
HPVVFLHVTF

SEQ ID NO: 28643 - protein, 10 aa, synthetic construct
  source 1..10: note = Seed: HGVVFLHVTY
HPVVFLHVTM

SEQ ID NO: 28644 - protein, 10 aa, synthetic construct
  source 1..10: note = Seed: HGVVFLHVTY
HPVVFLHVTY

SEQ ID NO: 28645 - protein, 9 aa, synthetic construct
  source 1..9: note = Seed: HSYFTSDYY
HPYFTSDYF

SEQ ID NO: 28646 - protein, 9 aa, synthetic construct
  source 1..9: note = Seed: HSYFTSDYY
HPYFTSDYH

SEQ ID NO: 28647 - protein, 9 aa, synthetic construct
  source 1..9: note = Seed: HSYFTSDYY
HPYFTSDYK

SEQ ID NO: 28648 - protein, 9 aa, synthetic construct
  source 1..9: note = Seed: HSYFTSDYY
HPYFTSDYL

SEQ ID NO: 28649 - protein, 9 aa, synthetic construct
  source 1..9: note = Seed: HSYFTSDYY
HPYFTSDYM

SEQ ID NO: 28650 - protein, 9 aa, synthetic construct
  source 1..9: note = Seed: HSYFTSDYY
HPYFTSDYR

SEQ ID NO: 28651 - protein, 9 aa, synthetic construct
  source 1..9: note = Seed: HSYFTSDYY
HPYFTSDYW

SEQ ID NO: 28652 - protein, 9 aa, synthetic construct
  source 1..9: note = Seed: HSYFTSDYY
HPYFTSDYY

SEQ ID NO: 28653 - protein, 10 aa, synthetic construct
  source 1..10: note = Seed: HSYFTSDYYQ
HPYFTSDYYK

SEQ ID NO: 28654 - protein, 10 aa, synthetic construct
  source 1..10: note = Seed: HSYFTSDYYQ
HPYFTSDYYR

SEQ ID NO: 28655 - protein, 10 aa, synthetic construct
  source 1..10: note = Seed: HLYLQYIRKL
HPYLQYIRKF

SEQ ID NO: 28656 - protein, 9 aa, synthetic construct
  source 1..9: note = Seed: HFYSKWYIR
HPYSKWYIR

SEQ ID NO: 28657 - protein, 10 aa, synthetic construct
  source 1..10: note = Seed: HFYSKWYIRV
HPYSKWYIRF

SEQ ID NO: 28658 - protein, 10 aa, synthetic construct
  source 1..10: note = Seed: HFYSKWYIRV
HPYSKWYIRR

SEQ ID NO: 28659 - protein, 9 aa, synthetic construct
  source 1..9: note = Seed: HFYWFFSNY
HPYWFFSNY

SEQ ID NO: 28660 - protein, 10 aa, synthetic construct
  source 1..10: note = Seed: HFYWFFSNYL
HPYWFFSNYF

SEQ ID NO: 28661 - protein, 10 aa, synthetic construct
  source 1..10: note = Seed: HFYWFFSNYL
HPYWFFSNYI

SEQ ID NO: 28662 - protein, 10 aa, synthetic construct
  source 1..10: note = Seed: HFYWFFSNYL
HPYWFFSNYL

SEQ ID NO: 28663 - protein, 11 aa, synthetic construct
  source 1..11: note = Seed: HFYWFFSNYLK
HPYWFFSNYLR

SEQ ID NO: 28664 - protein, 10 aa, synthetic construct
  source 1..10: note = Seed: HFYWFFSNYL
HPYWFFSNYW

SEQ ID NO: 28665 - protein, 10 aa, synthetic construct
  source 1..10: note = Seed: HFYWFFSNYL
HPYWFFSNYY

SEQ ID NO: 28666 - protein, 9 aa, synthetic construct
  source 1..9: note = Seed: HCANFNVLF
HQANFNVLF

SEQ ID NO: 28667 - protein, 9 aa, synthetic construct
  source 1..9: note = Seed: HCANFNVLF
HQANFNVLI

SEQ ID NO: 28668 - protein, 9 aa, synthetic construct
  source 1..9: note = Seed: HCANFNVLF
HQANFNVLL

SEQ ID NO: 28669 - protein, 9 aa, synthetic construct
  source 1..9: note = Seed: HCANFNVLF
HQANFNVLM

SEQ ID NO: 28670 - protein, 9 aa, synthetic construct
  source 1..9: note = Seed: HCANFNVLF
HQANFNVLY

SEQ ID NO: 28671 - protein, 10 aa, synthetic construct
  source 1..10: note = Seed: HAAVDALCEK
HQAVDALCER

SEQ ID NO: 28672 - protein, 10 aa, synthetic construct
  source 1..10: note = Seed: HGFELTSMKY
HQFELTSMKF

SEQ ID NO: 28673 - protein, 10 aa, synthetic construct
  source 1..10: note = Seed: HGFELTSMKY
HQFELTSMKL

SEQ ID NO: 28674 - protein, 10 aa, synthetic construct
  source 1..10: note = Seed: HGFELTSMKY
HQFELTSMKM

SEQ ID NO: 28675 - protein, 10 aa, synthetic construct
  source 1..10: note = Seed: HGFELTSMKY
HQFELTSMKY

SEQ ID NO: 28676 - protein, 9 aa, synthetic construct
  source 1..9: note = Seed: HAFLCLFLL
HQFLCLFLA

SEQ ID NO: 28677 - protein, 9 aa, synthetic construct
  source 1..9: note = Seed: HAFLCLFLL
HQFLCLFLI

SEQ ID NO: 28678 - protein, 9 aa, synthetic construct
  source 1..9: note = Seed: HAFLCLFLL
HQFLCLFLL

SEQ ID NO: 28679 - protein, 9 aa, synthetic construct
  source 1..9: note = Seed: HAFLCLFLL
HQFLCLFLM

SEQ ID NO: 28680 - protein, 9 aa, synthetic construct
  source 1..9: note = Seed: HAFLCLFLL
HQFLCLFLV

SEQ ID NO: 28681 - protein, 9 aa, synthetic construct
  source 1..9: note = Seed: HEGKTFYVL
HQGKTFYVL

SEQ ID NO: 28682 - protein, 11 aa, synthetic construct
  source 1..11: note = Seed: HAGTDLEGNFY
HQGTDLEGNFY

SEQ ID NO: 28683 - protein, 9 aa, synthetic construct
  source 1..9: note = Seed: HKHAFLCLF
HQHAFLCLF

SEQ ID NO: 28684 - protein, 10 aa, synthetic construct
  source 1..10: note = Seed: HKHAFLCLFL
HQHAFLCLFF

SEQ ID NO: 28685 - protein, 10 aa, synthetic construct
  source 1..10: note = Seed: HKHAFLCLFL
HQHAFLCLFM

SEQ ID NO: 28686 - protein, 10 aa, synthetic construct
  source 1..10: note = Seed: HKHAFLCLFL
HQHAFLCLFY

SEQ ID NO: 28687 - protein, 9 aa, synthetic construct
  source 1..9: note = Seed: HKHAFLCLF
HQHAFLCLH

SEQ ID NO: 28688 - protein, 9 aa, synthetic construct
  source 1..9: note = Seed: HKHAFLCLF
HQHAFLCLI

SEQ ID NO: 28689 - protein, 9 aa, synthetic construct
  source 1..9: note = Seed: HKHAFLCLF
HQHAFLCLL

SEQ ID NO: 28690 - protein, 9 aa, synthetic construct
  source 1..9: note = Seed: HKHAFLCLF
HQHAFLCLM

SEQ ID NO: 28691 - protein, 9 aa, synthetic construct
  source 1..9: note = Seed: HKHAFLCLF
HQHAFLCLW

SEQ ID NO: 28692 - protein, 9 aa, synthetic construct
  source 1..9: note = Seed: HKHAFLCLF
HQHAFLCLY

SEQ ID NO: 28693 - protein, 9 aa, synthetic construct
  source 1..9: note = Seed: HEIAWYTER
HQIAWYTEK

SEQ ID NO: 28694 - protein, 9 aa, synthetic construct
  source 1..9: note = Seed: HEIAWYTER
HQIAWYTER

SEQ ID NO: 28695 - protein, 11 aa, synthetic construct
  source 1..11: note = Seed: HWLLLTILTSL
HQLLLTILTSV

SEQ ID NO: 28696 - protein, 10 aa, synthetic construct
  source 1..10: note = Seed: HFLPRVFSAV
HQLPRVFSAV

SEQ ID NO: 28697 - protein, 9 aa, synthetic construct
  source 1..9: note = Seed: HHMELPTGV
HQMELPTGL

SEQ ID NO: 28698 - protein, 9 aa, synthetic construct
  source 1..9: note = Seed: HHMELPTGV
HQMELPTGM

SEQ ID NO: 28699 - protein, 9 aa, synthetic construct
  source 1..9: note = Seed: HSMQNCVLK
HQMQNCVLR

SEQ ID NO: 28700 - protein, 9 aa, synthetic construct
  source 1..9: note = Seed: HLMSFPQSA
HQMSFPQSA

SEQ ID NO: 28701 - protein, 10 aa, synthetic construct
  source 1..10: note = Seed: HLMSFPQSAP
HQMSFPQSAV

SEQ ID NO: 28702 - protein, 9 aa, synthetic construct
  source 1..9: note = Seed: HLMSFPQSA
HQMSFPQSF

SEQ ID NO: 28703 - protein, 9 aa, synthetic construct
  source 1..9: note = Seed: HLMSFPQSA
HQMSFPQSG

SEQ ID NO: 28704 - protein, 9 aa, synthetic construct
  source 1..9: note = Seed: HLMSFPQSA
HQMSFPQSH

SEQ ID NO: 28705 - protein, 9 aa, synthetic construct
  source 1..9: note = Seed: HLMSFPQSA
HQMSFPQSI

SEQ ID NO: 28706 - protein, 9 aa, synthetic construct
  source 1..9: note = Seed: HLMSFPQSA
HQMSFPQSL

SEQ ID NO: 28707 - protein, 9 aa, synthetic construct
  source 1..9: note = Seed: HLMSFPQSA
HQMSFPQSM

SEQ ID NO: 28708 - protein, 9 aa, synthetic construct
  source 1..9: note = Seed: HLMSFPQSA
HQMSFPQSV

SEQ ID NO: 28709 - protein, 9 aa, synthetic construct
  source 1..9: note = Seed: HLMSFPQSA
HQMSFPQSW

SEQ ID NO: 28710 - protein, 9 aa, synthetic construct
  source 1..9: note = Seed: HLMSFPQSA
HQMSFPQSY

SEQ ID NO: 28711 - protein, 10 aa, synthetic construct
  source 1..10: note = Seed: HVRAWIGFDV
HQRAWIGFDL

SEQ ID NO: 28712 - protein, 10 aa, synthetic construct
  source 1..10: note = Seed: HSSRLSFKEL
HQSRLSFKEK

SEQ ID NO: 28713 - protein, 9 aa, synthetic construct
  source 1..9: note = Seed: HVTFFIYNK
HQTFFIYNK

SEQ ID NO: 28714 - protein, 10 aa, synthetic construct
  source 1..10: note = Seed: HVTFFIYNKI
HQTFFIYNKA

SEQ ID NO: 28715 - protein, 10 aa, synthetic construct
  source 1..10: note = Seed: HVTFFIYNKI
HQTFFIYNKI

SEQ ID NO: 28716 - protein, 10 aa, synthetic construct
  source 1..10: note = Seed: HVTFFIYNKI
HQTFFIYNKK

SEQ ID NO: 28717 - protein, 10 aa, synthetic construct
  source 1..10: note = Seed: HVTFFIYNKI
HQTFFIYNKL

SEQ ID NO: 28718 - protein, 10 aa, synthetic construct
  source 1..10: note = Seed: HVTFFIYNKI
HQTFFIYNKR

SEQ ID NO: 28719 - protein, 10 aa, synthetic construct
  source 1..10: note = Seed: HVTFFIYNKI
HQTFFIYNKV

SEQ ID NO: 28720 - protein, 9 aa, synthetic construct
  source 1..9: note = Seed: HVTFFIYNK
HQTFFIYNR

SEQ ID NO: 28721 - protein, 10 aa, synthetic construct
  source 1..10: note = Seed: HGVVFLHVTY
HQVVFLHVTF

SEQ ID NO: 28722 - protein, 10 aa, synthetic construct
  source 1..10: note = Seed: HGVVFLHVTY
HQVVFLHVTM

SEQ ID NO: 28723 - protein, 10 aa, synthetic construct
  source 1..10: note = Seed: HGVVFLHVTY
HQVVFLHVTY

SEQ ID NO: 28724 - protein, 9 aa, synthetic construct
  source 1..9: note = Seed: HHWLLLTIL
HQWLLLTIF

SEQ ID NO: 28725 - protein, 9 aa, synthetic construct
  source 1..9: note = Seed: HHWLLLTIL
HQWLLLTIL

SEQ ID NO: 28726 - protein, 9 aa, synthetic construct
  source 1..9: note = Seed: HHWLLLTIL
HQWLLLTIM

SEQ ID NO: 28727 - protein, 9 aa, synthetic construct
  source 1..9: note = Seed: HHWLLLTIL
HQWLLLTIY

SEQ ID NO: 28728 - protein, 8 aa, synthetic construct
  source 1..8: note = Seed: HSYFTSDY
HQYFTSDF

SEQ ID NO: 28729 - protein, 8 aa, synthetic construct
  source 1..8: note = Seed: HSYFTSDY
HQYFTSDM

SEQ ID NO: 28730 - protein, 8 aa, synthetic construct
  source 1..8: note = Seed: HSYFTSDY
HQYFTSDY

SEQ ID NO: 28731 - protein, 9 aa, synthetic construct
  source 1..9: note = Seed: HSYFTSDYY
HQYFTSDYF

SEQ ID NO: 28732 - protein, 9 aa, synthetic construct
  source 1..9: note = Seed: HSYFTSDYY
HQYFTSDYI

SEQ ID NO: 28733 - protein, 9 aa, synthetic construct
  source 1..9: note = Seed: HSYFTSDYY
HQYFTSDYK

SEQ ID NO: 28734 - protein, 9 aa, synthetic construct
  source 1..9: note = Seed: HSYFTSDYY
HQYFTSDYL

SEQ ID NO: 28735 - protein, 9 aa, synthetic construct
  source 1..9: note = Seed: HSYFTSDYY
HQYFTSDYM

SEQ ID NO: 28736 - protein, 9 aa, synthetic construct
  source 1..9: note = Seed: HSYFTSDYY
HQYFTSDYR

SEQ ID NO: 28737 - protein, 9 aa, synthetic construct
  source 1..9: note = Seed: HSYFTSDYY
HQYFTSDYW

SEQ ID NO: 28738 - protein, 9 aa, synthetic construct
  source 1..9: note = Seed: HSYFTSDYY
HQYFTSDYY

SEQ ID NO: 28739 - protein, 11 aa, synthetic construct
  source 1..11: note = Seed: HSYFTSDYYQL
HQYFTSDYYQF

SEQ ID NO: 28740 - protein, 10 aa, synthetic construct
  source 1..10: note = Seed: HSYFTSDYYQ
HQYFTSDYYR

SEQ ID NO: 28741 - protein, 10 aa, synthetic construct
  source 1..10: note = Seed: HSYFTSDYYQ
HQYFTSDYYY

SEQ ID NO: 28742 - protein, 9 aa, synthetic construct
  source 1..9: note = Seed: HLYLQYIRK
HQYLQYIRK

SEQ ID NO: 28743 - protein, 10 aa, synthetic construct
  source 1..10: note = Seed: HLYLQYIRKL
HQYLQYIRKF

SEQ ID NO: 28744 - protein, 9 aa, synthetic construct
  source 1..9: note = Seed: HLYLQYIRK
HQYLQYIRR

SEQ ID NO: 28745 - protein, 9 aa, synthetic construct
  source 1..9: note = Seed: HFYSKWYIR
HQYSKWYIK

SEQ ID NO: 28746 - protein, 9 aa, synthetic construct
  source 1..9: note = Seed: HFYSKWYIR
HQYSKWYIR

SEQ ID NO: 28747 - protein, 10 aa, synthetic construct
  source 1..10: note = Seed: HFYSKWYIRV
HQYSKWYIRF

SEQ ID NO: 28748 - protein, 10 aa, synthetic construct
  source 1..10: note = Seed: HFYSKWYIRV
HQYSKWYIRK

SEQ ID NO: 28749 - protein, 10 aa, synthetic construct
  source 1..10: note = Seed: HFYSKWYIRV
HQYSKWYIRR

SEQ ID NO: 28750 - protein, 9 aa, synthetic construct
  source 1..9: note = Seed: HFYWFFSNY
HQYWFFSNA

SEQ ID NO: 28751 - protein, 9 aa, synthetic construct
  source 1..9: note = Seed: HFYWFFSNY
HQYWFFSNF

SEQ ID NO: 28752 - protein, 9 aa, synthetic construct
  source 1..9: note = Seed: HFYWFFSNY
HQYWFFSNH

SEQ ID NO: 28753 - protein, 9 aa, synthetic construct
  source 1..9: note = Seed: HFYWFFSNY
HQYWFFSNI

SEQ ID NO: 28754 - protein, 9 aa, synthetic construct
  source 1..9: note = Seed: HFYWFFSNY
HQYWFFSNK

SEQ ID NO: 28755 - protein, 9 aa, synthetic construct
  source 1..9: note = Seed: HFYWFFSNY
HQYWFFSNL

SEQ ID NO: 28756 - protein, 9 aa, synthetic construct
  source 1..9: note = Seed: HFYWFFSNY
HQYWFFSNM

SEQ ID NO: 28757 - protein, 9 aa, synthetic construct
  source 1..9: note = Seed: HFYWFFSNY
HQYWFFSNR

SEQ ID NO: 28758 - protein, 9 aa, synthetic construct
  source 1..9: note = Seed: HFYWFFSNY
HQYWFFSNV

SEQ ID NO: 28759 - protein, 9 aa, synthetic construct
  source 1..9: note = Seed: HFYWFFSNY
HQYWFFSNW

SEQ ID NO: 28760 - protein, 9 aa, synthetic construct
  source 1..9: note = Seed: HFYWFFSNY
HQYWFFSNY

SEQ ID NO: 28761 - protein, 10 aa, synthetic construct
  source 1..10: note = Seed: HFYWFFSNYL
HQYWFFSNYF

SEQ ID NO: 28762 - protein, 10 aa, synthetic construct
  source 1..10: note = Seed: HFYWFFSNYL
HQYWFFSNYI

SEQ ID NO: 28763 - protein, 10 aa, synthetic construct
  source 1..10: note = Seed: HFYWFFSNYL
HQYWFFSNYL

SEQ ID NO: 28764 - protein, 11 aa, synthetic construct
  source 1..11: note = Seed: HFYWFFSNYLK
HQYWFFSNYLK

SEQ ID NO: 28765 - protein, 11 aa, synthetic construct
  source 1..11: note = Seed: HFYWFFSNYLK
HQYWFFSNYLR

SEQ ID NO: 28766 - protein, 10 aa, synthetic construct
  source 1..10: note = Seed: HFYWFFSNYL
HQYWFFSNYW

SEQ ID NO: 28767 - protein, 10 aa, synthetic construct
  source 1..10: note = Seed: HFYWFFSNYL
HQYWFFSNYY

SEQ ID NO: 28768 - protein, 9 aa, synthetic construct
  source 1..9: note = Seed: HCANFNVLF
HRANFNVLF

SEQ ID NO: 28769 - protein, 9 aa, synthetic construct
  source 1..9: note = Seed: HCANFNVLF
HRANFNVLY

SEQ ID NO: 28770 - protein, 10 aa, synthetic construct
  source 1..10: note = Seed: HAAVDALCEK
HRAVDALCER

SEQ ID NO: 28771 - protein, 9 aa, synthetic construct
  source 1..9: note = Seed: HEGKTFYVL
HRGKTFYVL

SEQ ID NO: 28772 - protein, 9 aa, synthetic construct
  source 1..9: note = Seed: HEGKTFYVL
HRGKTFYVM

SEQ ID NO: 28773 - protein, 11 aa, synthetic construct
  source 1..11: note = Seed: HAGTDLEGNFY
HRGTDLEGNFY

SEQ ID NO: 28774 - protein, 9 aa, synthetic construct
  source 1..9: note = Seed: HKHAFLCLF
HRHAFLCLF

SEQ ID NO: 28775 - protein, 10 aa, synthetic construct
  source 1..10: note = Seed: HKHAFLCLFL
HRHAFLCLFF

SEQ ID NO: 28776 - protein, 10 aa, synthetic construct
  source 1..10: note = Seed: HKHAFLCLFL
HRHAFLCLFI

SEQ ID NO: 28777 - protein, 10 aa, synthetic construct
  source 1..10: note = Seed: HKHAFLCLFL
HRHAFLCLFL

SEQ ID NO: 28778 - protein, 10 aa, synthetic construct
  source 1..10: note = Seed: HKHAFLCLFL
HRHAFLCLFM

SEQ ID NO: 28779 - protein, 10 aa, synthetic construct
  source 1..10: note = Seed: HKHAFLCLFL
HRHAFLCLFV

SEQ ID NO: 28780 - protein, 9 aa, synthetic construct
  source 1..9: note = Seed: HKHAFLCLF
HRHAFLCLY

SEQ ID NO: 28781 - protein, 11 aa, synthetic construct
  source 1..11: note = Seed: HWLLLTILTSL
HRLLLTILTSV

SEQ ID NO: 28782 - protein, 10 aa, synthetic construct
  source 1..10: note = Seed: HFLPRVFSAV
HRLPRVFSAV

SEQ ID NO: 28783 - protein, 9 aa, synthetic construct
  source 1..9: note = Seed: HHMELPTGV
HRMELPTGA

SEQ ID NO: 28784 - protein, 9 aa, synthetic construct
  source 1..9: note = Seed: HHMELPTGV
HRMELPTGL

SEQ ID NO: 28785 - protein, 9 aa, synthetic construct
  source 1..9: note = Seed: HHMELPTGV
HRMELPTGM

SEQ ID NO: 28786 - protein, 9 aa, synthetic construct
  source 1..9: note = Seed: HLMSFPQSA
HRMSFPQSA

SEQ ID NO: 28787 - protein, 9 aa, synthetic construct
  source 1..9: note = Seed: HLMSFPQSA
HRMSFPQSF

SEQ ID NO: 28788 - protein, 9 aa, synthetic construct
  source 1..9: note = Seed: HLMSFPQSA
HRMSFPQSI

SEQ ID NO: 28789 - protein, 9 aa, synthetic construct
  source 1..9: note = Seed: HLMSFPQSA
HRMSFPQSL

SEQ ID NO: 28790 - protein, 9 aa, synthetic construct
  source 1..9: note = Seed: HLMSFPQSA
HRMSFPQSM

SEQ ID NO: 28791 - protein, 9 aa, synthetic construct
  source 1..9: note = Seed: HLMSFPQSA
HRMSFPQSV

SEQ ID NO: 28792 - protein, 9 aa, synthetic construct
  source 1..9: note = Seed: HLMSFPQSA
HRMSFPQSY

SEQ ID NO: 28793 - protein, 10 aa, synthetic construct
  source 1..10: note = Seed: HVRAWIGFDV
HRRAWIGFDF

SEQ ID NO: 28794 - protein, 10 aa, synthetic construct
  source 1..10: note = Seed: HVRAWIGFDV
HRRAWIGFDK

SEQ ID NO: 28795 - protein, 10 aa, synthetic construct
  source 1..10: note = Seed: HVRAWIGFDV
HRRAWIGFDL

SEQ ID NO: 28796 - protein, 10 aa, synthetic construct
  source 1..10: note = Seed: HVRAWIGFDV
HRRAWIGFDM

SEQ ID NO: 28797 - protein, 10 aa, synthetic construct
  source 1..10: note = Seed: HSSRLSFKEL
HRSRLSFKEK

SEQ ID NO: 28798 - protein, 10 aa, synthetic construct
  source 1..10: note = Seed: HVTFFIYNKI
HRTFFIYNKA

SEQ ID NO: 28799 - protein, 10 aa, synthetic construct
  source 1..10: note = Seed: HVTFFIYNKI
HRTFFIYNKI

SEQ ID NO: 28800 - protein, 10 aa, synthetic construct
  source 1..10: note = Seed: HVTFFIYNKI
HRTFFIYNKK

SEQ ID NO: 28801 - protein, 10 aa, synthetic construct
  source 1..10: note = Seed: HVTFFIYNKI
HRTFFIYNKL

SEQ ID NO: 28802 - protein, 10 aa, synthetic construct
  source 1..10: note = Seed: HVTFFIYNKI
HRTFFIYNKR

SEQ ID NO: 28803 - protein, 10 aa, synthetic construct
  source 1..10: note = Seed: HVTFFIYNKI
HRTFFIYNKV

SEQ ID NO: 28804 - protein, 9 aa, synthetic construct
  source 1..9: note = Seed: HHWLLLTIL
HRWLLLTIA

SEQ ID NO: 28805 - protein, 9 aa, synthetic construct
  source 1..9: note = Seed: HHWLLLTIL
HRWLLLTIL

SEQ ID NO: 28806 - protein, 9 aa, synthetic construct
  source 1..9: note = Seed: HSYFTSDYY
HRYFTSDYF

SEQ ID NO: 28807 - protein, 9 aa, synthetic construct
  source 1..9: note = Seed: HSYFTSDYY
HRYFTSDYY

SEQ ID NO: 28808 - protein, 11 aa, synthetic construct
  source 1..11: note = Seed: HSYFTSDYYQL
HRYFTSDYYQF

SEQ ID NO: 28809 - protein, 11 aa, synthetic construct
  source 1..11: note = Seed: HSYFTSDYYQL
HRYFTSDYYQW

SEQ ID NO: 28810 - protein, 10 aa, synthetic construct
  source 1..10: note = Seed: HSYFTSDYYQ
HRYFTSDYYY

SEQ ID NO: 28811 - protein, 10 aa, synthetic construct
  source 1..10: note = Seed: HLYLQYIRKL
HRYLQYIRKF

SEQ ID NO: 28812 - protein, 10 aa, synthetic construct
  source 1..10: note = Seed: HFYSKWYIRV
HRYSKWYIRF

SEQ ID NO: 28813 - protein, 9 aa, synthetic construct
  source 1..9: note = Seed: HFYWFFSNY
HRYWFFSNF

SEQ ID NO: 28814 - protein, 9 aa, synthetic construct
  source 1..9: note = Seed: HFYWFFSNY
HRYWFFSNY

SEQ ID NO: 28815 - protein, 10 aa, synthetic construct
  source 1..10: note = Seed: HFYWFFSNYL
HRYWFFSNYF

SEQ ID NO: 28816 - protein, 10 aa, synthetic construct
  source 1..10: note = Seed: HFYWFFSNYL
HRYWFFSNYI

SEQ ID NO: 28817 - protein, 10 aa, synthetic construct
  source 1..10: note = Seed: HFYWFFSNYL
HRYWFFSNYL

SEQ ID NO: 28818 - protein, 11 aa, synthetic construct
  source 1..11: note = Seed: HFYWFFSNYLK
HRYWFFSNYLK

SEQ ID NO: 28819 - protein, 11 aa, synthetic construct
  source 1..11: note = Seed: HFYWFFSNYLK
HRYWFFSNYLR

SEQ ID NO: 28820 - protein, 10 aa, synthetic construct
  source 1..10: note = Seed: HFYWFFSNYL
HRYWFFSNYW

SEQ ID NO: 28821 - protein, 10 aa, synthetic construct
  source 1..10: note = Seed: HFYWFFSNYL
HRYWFFSNYY

SEQ ID NO: 28822 - protein, 9 aa, synthetic construct
  source 1..9: note = Seed: HCANFNVLF
HSANFNVLF

SEQ ID NO: 28823 - protein, 9 aa, synthetic construct
  source 1..9: note = Seed: HCANFNVLF
HSANFNVLY

SEQ ID NO: 28824 - protein, 10 aa, synthetic construct
  source 1..10: note = Seed: HTANKWDLII
HSANKWDLIF

SEQ ID NO: 28825 - protein, 10 aa, synthetic construct
  source 1..10: note = Seed: HTANKWDLII
HSANKWDLIW

SEQ ID NO: 28826 - protein, 10 aa, synthetic construct
  source 1..10: note = Seed: HTANKWDLII
HSANKWDLIY

SEQ ID NO: 28827 - protein, 10 aa, synthetic construct
  source 1..10: note = Seed: HAAVDALCEK
HSAVDALCER

SEQ ID NO: 28828 - protein, 9 aa, synthetic construct
  source 1..9: note = Seed: HGFELTSMK
HSFELTSMK

SEQ ID NO: 28829 - protein, 10 aa, synthetic construct
  source 1..10: note = Seed: HGFELTSMKY
HSFELTSMKY

SEQ ID NO: 28830 - protein, 9 aa, synthetic construct
  source 1..9: note = Seed: HGFELTSMK
HSFELTSMR

SEQ ID NO: 28831 - protein, 9 aa, synthetic construct
  source 1..9: note = Seed: HAFLCLFLL
HSFLCLFLF

SEQ ID NO: 28832 - protein, 9 aa, synthetic construct
  source 1..9: note = Seed: HAFLCLFLL
HSFLCLFLM

SEQ ID NO: 28833 - protein, 9 aa, synthetic construct
  source 1..9: note = Seed: HAFLCLFLL
HSFLCLFLV

SEQ ID NO: 28834 - protein, 9 aa, synthetic construct
  source 1..9: note = Seed: HAFLCLFLL
HSFLCLFLW

SEQ ID NO: 28835 - protein, 9 aa, synthetic construct
  source 1..9: note = Seed: HAFLCLFLL
HSFLCLFLY

SEQ ID NO: 28836 - protein, 11 aa, synthetic construct
  source 1..11: note = Seed: HAGTDLEGNFY
HSGTDLEGNFY

SEQ ID NO: 28837 - protein, 9 aa, synthetic construct
  source 1..9: note = Seed: HKHAFLCLF
HSHAFLCLF

SEQ ID NO: 28838 - protein, 9 aa, synthetic construct
  source 1..9: note = Seed: HKHAFLCLF
HSHAFLCLY

SEQ ID NO: 28839 - protein, 9 aa, synthetic construct
  source 1..9: note = Seed: HEIAWYTER
HSIAWYTEK

SEQ ID NO: 28840 - protein, 9 aa, synthetic construct
  source 1..9: note = Seed: HEIAWYTER
HSIAWYTER

SEQ ID NO: 28841 - protein, 11 aa, synthetic construct
  source 1..11: note = Seed: HWLLLTILTSL
HSLLLTILTSV

SEQ ID NO: 28842 - protein, 10 aa, synthetic construct
  source 1..10: note = Seed: HFLPRVFSAV
HSLPRVFSAV

SEQ ID NO: 28843 - protein, 9 aa, synthetic construct
  source 1..9: note = Seed: HFLPRVFSA
HSLPRVFSK

SEQ ID NO: 28844 - protein, 9 aa, synthetic construct
  source 1..9: note = Seed: HSMQNCVLK
HSMQNCVLR

SEQ ID NO: 28845 - protein, 10 aa, synthetic construct
  source 1..10: note = Seed: HLMSFPQSAP
HSMSFPQSAV

SEQ ID NO: 28846 - protein, 9 aa, synthetic construct
  source 1..9: note = Seed: HLMSFPQSA
HSMSFPQSF

SEQ ID NO: 28847 - protein, 9 aa, synthetic construct
  source 1..9: note = Seed: HLMSFPQSA
HSMSFPQSL

SEQ ID NO: 28848 - protein, 9 aa, synthetic construct
  source 1..9: note = Seed: HLMSFPQSA
HSMSFPQSM

SEQ ID NO: 28849 - protein, 9 aa, synthetic construct
  source 1..9: note = Seed: HLMSFPQSA
HSMSFPQSY

SEQ ID NO: 28850 - protein, 9 aa, synthetic construct
  source 1..9: note = Seed: HSQLGGLHL
HSQLGGLHF

SEQ ID NO: 28851 - protein, 9 aa, synthetic construct
  source 1..9: note = Seed: HSQLGGLHL
HSQLGGLHW

SEQ ID NO: 28852 - protein, 9 aa, synthetic construct
  source 1..9: note = Seed: HSQLGGLHL
HSQLGGLHY

SEQ ID NO: 28853 - protein, 10 aa, synthetic construct
  source 1..10: note = Seed: HVRAWIGFDV
HSRAWIGFDK

SEQ ID NO: 28854 - protein, 10 aa, synthetic construct
  source 1..10: note = Seed: HVRAWIGFDV
HSRAWIGFDL

SEQ ID NO: 28855 - protein, 10 aa, synthetic construct
  source 1..10: note = Seed: HSSRLSFKEL
HSSRLSFKEF

SEQ ID NO: 28856 - protein, 10 aa, synthetic construct
  source 1..10: note = Seed: HSSRLSFKEL
HSSRLSFKEK

SEQ ID NO: 28857 - protein, 10 aa, synthetic construct
  source 1..10: note = Seed: HSSRLSFKEL
HSSRLSFKEW

SEQ ID NO: 28858 - protein, 9 aa, synthetic construct
  source 1..9: note = Seed: HISRQRLTK
HSSRQRLTK

SEQ ID NO: 28859 - protein, 9 aa, synthetic construct
  source 1..9: note = Seed: HVTFFIYNK
HSTFFIYNK

SEQ ID NO: 28860 - protein, 10 aa, synthetic construct
  source 1..10: note = Seed: HVTFFIYNKI
HSTFFIYNKA

SEQ ID NO: 28861 - protein, 10 aa, synthetic construct
  source 1..10: note = Seed: HVTFFIYNKI
HSTFFIYNKI

SEQ ID NO: 28862 - protein, 10 aa, synthetic construct
  source 1..10: note = Seed: HVTFFIYNKI
HSTFFIYNKK

SEQ ID NO: 28863 - protein, 10 aa, synthetic construct
  source 1..10: note = Seed: HVTFFIYNKI
HSTFFIYNKL

SEQ ID NO: 28864 - protein, 10 aa, synthetic construct
  source 1..10: note = Seed: HVTFFIYNKI
HSTFFIYNKR

SEQ ID NO: 28865 - protein, 10 aa, synthetic construct
  source 1..10: note = Seed: HVTFFIYNKI
HSTFFIYNKV

SEQ ID NO: 28866 - protein, 9 aa, synthetic construct
  source 1..9: note = Seed: HVTFFIYNK
HSTFFIYNR

SEQ ID NO: 28867 - protein, 9 aa, synthetic construct
  source 1..9: note = Seed: HVVGPNVNK
HSVGPNVNK

SEQ ID NO: 28868 - protein, 9 aa, synthetic construct
  source 1..9: note = Seed: HVVGPNVNK
HSVGPNVNR

SEQ ID NO: 28869 - protein, 9 aa, synthetic construct
  source 1..9: note = Seed: HFVNLDNLR
HSVNLDNLK

SEQ ID NO: 28870 - protein, 9 aa, synthetic construct
  source 1..9: note = Seed: HFVNLDNLR
HSVNLDNLR

SEQ ID NO: 28871 - protein, 9 aa, synthetic construct
  source 1..9: note = Seed: HSYFTSDYY
HSYFTSDYF

SEQ ID NO: 28872 - protein, 9 aa, synthetic construct
  source 1..9: note = Seed: HSYFTSDYY
HSYFTSDYI

SEQ ID NO: 28873 - protein, 9 aa, synthetic construct
  source 1..9: note = Seed: HSYFTSDYY
HSYFTSDYK

SEQ ID NO: 28874 - protein, 9 aa, synthetic construct
  source 1..9: note = Seed: HSYFTSDYY
HSYFTSDYL

SEQ ID NO: 28875 - protein, 9 aa, synthetic construct
  source 1..9: note = Seed: HSYFTSDYY
HSYFTSDYM

SEQ ID NO: 28876 - protein, 9 aa, synthetic construct
  source 1..9: note = Seed: HSYFTSDYY
HSYFTSDYR

SEQ ID NO: 28877 - protein, 9 aa, synthetic construct
  source 1..9: note = Seed: HSYFTSDYY
HSYFTSDYW

SEQ ID NO: 28878 - protein, 10 aa, synthetic construct
  source 1..10: note = Seed: HSYFTSDYYQ
HSYFTSDYYK

SEQ ID NO: 28879 - protein, 11 aa, synthetic construct
  source 1..11: note = Seed: HSYFTSDYYQL
HSYFTSDYYQF

SEQ ID NO: 28880 - protein, 11 aa, synthetic construct
  source 1..11: note = Seed: HSYFTSDYYQL
HSYFTSDYYQW

SEQ ID NO: 28881 - protein, 11 aa, synthetic construct
  source 1..11: note = Seed: HSYFTSDYYQL
HSYFTSDYYQY

SEQ ID NO: 28882 - protein, 10 aa, synthetic construct
  source 1..10: note = Seed: HSYFTSDYYQ
HSYFTSDYYR

SEQ ID NO: 28883 - protein, 10 aa, synthetic construct
  source 1..10: note = Seed: HSYFTSDYYQ
HSYFTSDYYY

SEQ ID NO: 28884 - protein, 9 aa, synthetic construct
  source 1..9: note = Seed: HLYLQYIRK
HSYLQYIRK

SEQ ID NO: 28885 - protein, 10 aa, synthetic construct
  source 1..10: note = Seed: HLYLQYIRKL
HSYLQYIRKF

SEQ ID NO: 28886 - protein, 9 aa, synthetic construct
  source 1..9: note = Seed: HLYLQYIRK
HSYLQYIRR

SEQ ID NO: 28887 - protein, 9 aa, synthetic construct
  source 1..9: note = Seed: HFYSKWYIR
HSYSKWYIA

SEQ ID NO: 28888 - protein, 9 aa, synthetic construct
  source 1..9: note = Seed: HFYSKWYIR
HSYSKWYIK

SEQ ID NO: 28889 - protein, 9 aa, synthetic construct
  source 1..9: note = Seed: HFYSKWYIR
HSYSKWYIR

SEQ ID NO: 28890 - protein, 10 aa, synthetic construct
  source 1..10: note = Seed: HFYSKWYIRV
HSYSKWYIRF

SEQ ID NO: 28891 - protein, 10 aa, synthetic construct
  source 1..10: note = Seed: HFYSKWYIRV
HSYSKWYIRK

SEQ ID NO: 28892 - protein, 10 aa, synthetic construct
  source 1..10: note = Seed: HFYSKWYIRV
HSYSKWYIRR

SEQ ID NO: 28893 - protein, 9 aa, synthetic construct
  source 1..9: note = Seed: HFYSKWYIR
HSYSKWYIV

SEQ ID NO: 28894 - protein, 9 aa, synthetic construct
  source 1..9: note = Seed: HFYWFFSNY
HSYWFFSNF

SEQ ID NO: 28895 - protein, 9 aa, synthetic construct
  source 1..9: note = Seed: HFYWFFSNY
HSYWFFSNK

SEQ ID NO: 28896 - protein, 9 aa, synthetic construct
  source 1..9: note = Seed: HFYWFFSNY
HSYWFFSNM

SEQ ID NO: 28897 - protein, 9 aa, synthetic construct
  source 1..9: note = Seed: HFYWFFSNY
HSYWFFSNR

SEQ ID NO: 28898 - protein, 9 aa, synthetic construct
  source 1..9: note = Seed: HFYWFFSNY
HSYWFFSNY

SEQ ID NO: 28899 - protein, 10 aa, synthetic construct
  source 1..10: note = Seed: HFYWFFSNYL
HSYWFFSNYF

SEQ ID NO: 28900 - protein, 10 aa, synthetic construct
  source 1..10: note = Seed: HFYWFFSNYL
HSYWFFSNYI

SEQ ID NO: 28901 - protein, 10 aa, synthetic construct
  source 1..10: note = Seed: HFYWFFSNYL
HSYWFFSNYL

SEQ ID NO: 28902 - protein, 11 aa, synthetic construct
  source 1..11: note = Seed: HFYWFFSNYLK
HSYWFFSNYLK

SEQ ID NO: 28903 - protein, 11 aa, synthetic construct
  source 1..11: note = Seed: HFYWFFSNYLK
HSYWFFSNYLR

SEQ ID NO: 28904 - protein, 10 aa, synthetic construct
  source 1..10: note = Seed: HFYWFFSNYL
HSYWFFSNYW

SEQ ID NO: 28905 - protein, 10 aa, synthetic construct
  source 1..10: note = Seed: HFYWFFSNYL
HSYWFFSNYY

SEQ ID NO: 28906 - protein, 10 aa, synthetic construct
  source 1..10: note = Seed: HTANKWDLII
HTANKWDLIF

SEQ ID NO: 28907 - protein, 10 aa, synthetic construct
  source 1..10: note = Seed: HTANKWDLII
HTANKWDLIW

SEQ ID NO: 28908 - protein, 10 aa, synthetic construct
  source 1..10: note = Seed: HTANKWDLII
HTANKWDLIY

SEQ ID NO: 28909 - protein, 9 aa, synthetic construct
  source 1..9: note = Seed: HTANKWDLI
HTANKWDLV

SEQ ID NO: 28910 - protein, 10 aa, synthetic construct
  source 1..10: note = Seed: HAAVDALCEK
HTAVDALCEK

SEQ ID NO: 28911 - protein, 10 aa, synthetic construct
  source 1..10: note = Seed: HAAVDALCEK
HTAVDALCER

SEQ ID NO: 28912 - protein, 10 aa, synthetic construct
  source 1..10: note = Seed: HSCNVNRFNV
HTCNVNRFNV

SEQ ID NO: 28913 - protein, 9 aa, synthetic construct
  source 1..9: note = Seed: HGFELTSMK
HTFELTSMK

SEQ ID NO: 28914 - protein, 10 aa, synthetic construct
  source 1..10: note = Seed: HGFELTSMKY
HTFELTSMKY

SEQ ID NO: 28915 - protein, 9 aa, synthetic construct
  source 1..9: note = Seed: HGFELTSMK
HTFELTSMR

SEQ ID NO: 28916 - protein, 9 aa, synthetic construct
  source 1..9: note = Seed: HGFELTSMK
HTFELTSMY

SEQ ID NO: 28917 - protein, 9 aa, synthetic construct
  source 1..9: note = Seed: HAFLCLFLL
HTFLCLFLA

SEQ ID NO: 28918 - protein, 9 aa, synthetic construct
  source 1..9: note = Seed: HAFLCLFLL
HTFLCLFLF

SEQ ID NO: 28919 - protein, 9 aa, synthetic construct
  source 1..9: note = Seed: HAFLCLFLL
HTFLCLFLI

SEQ ID NO: 28920 - protein, 9 aa, synthetic construct
  source 1..9: note = Seed: HAFLCLFLL
HTFLCLFLL

SEQ ID NO: 28921 - protein, 9 aa, synthetic construct
  source 1..9: note = Seed: HAFLCLFLL
HTFLCLFLV

SEQ ID NO: 28922 - protein, 9 aa, synthetic construct
  source 1..9: note = Seed: HAFLCLFLL
HTFLCLFLW

SEQ ID NO: 28923 - protein, 9 aa, synthetic construct
  source 1..9: note = Seed: HAFLCLFLL
HTFLCLFLY

SEQ ID NO: 28924 - protein, 11 aa, synthetic construct
  source 1..11: note = Seed: HAGTDLEGNFY
HTGTDLEGNFY

SEQ ID NO: 28925 - protein, 9 aa, synthetic construct
  source 1..9: note = Seed: HKHAFLCLF
HTHAFLCLF

SEQ ID NO: 28926 - protein, 9 aa, synthetic construct
  source 1..9: note = Seed: HKHAFLCLF
HTHAFLCLY

SEQ ID NO: 28927 - protein, 9 aa, synthetic construct
  source 1..9: note = Seed: HEIAWYTER
HTIAWYTEK

SEQ ID NO: 28928 - protein, 9 aa, synthetic construct
  source 1..9: note = Seed: HEIAWYTER
HTIAWYTER

SEQ ID NO: 28929 - protein, 11 aa, synthetic construct
  source 1..11: note = Seed: HWLLLTILTSL
HTLLLTILTSV

SEQ ID NO: 28930 - protein, 9 aa, synthetic construct
  source 1..9: note = Seed: HFLPRVFSA
HTLPRVFSA

SEQ ID NO: 28931 - protein, 10 aa, synthetic construct
  source 1..10: note = Seed: HFLPRVFSAV
HTLPRVFSAI

SEQ ID NO: 28932 - protein, 10 aa, synthetic construct
  source 1..10: note = Seed: HFLPRVFSAV
HTLPRVFSAV

SEQ ID NO: 28933 - protein, 9 aa, synthetic construct
  source 1..9: note = Seed: HFLPRVFSA
HTLPRVFSK

SEQ ID NO: 28934 - protein, 9 aa, synthetic construct
  source 1..9: note = Seed: HSMQNCVLK
HTMQNCVLK

SEQ ID NO: 28935 - protein, 9 aa, synthetic construct
  source 1..9: note = Seed: HSMQNCVLK
HTMQNCVLR

SEQ ID NO: 28936 - protein, 10 aa, synthetic construct
  source 1..10: note = Seed: HLMSFPQSAP
HTMSFPQSAV

SEQ ID NO: 28937 - protein, 9 aa, synthetic construct
  source 1..9: note = Seed: HLMSFPQSA
HTMSFPQSF

SEQ ID NO: 28938 - protein, 9 aa, synthetic construct
  source 1..9: note = Seed: HLMSFPQSA
HTMSFPQSM

SEQ ID NO: 28939 - protein, 9 aa, synthetic construct
  source 1..9: note = Seed: HLMSFPQSA
HTMSFPQSV

SEQ ID NO: 28940 - protein, 9 aa, synthetic construct
  source 1..9: note = Seed: HLMSFPQSA
HTMSFPQSY

SEQ ID NO: 28941 - protein, 9 aa, synthetic construct
  source 1..9: note = Seed: HANLDSCKR
HTNLDSCKR

SEQ ID NO: 28942 - protein, 9 aa, synthetic construct
  source 1..9: note = Seed: HSQLGGLHL
HTQLGGLHF

SEQ ID NO: 28943 - protein, 9 aa, synthetic construct
  source 1..9: note = Seed: HSQLGGLHL
HTQLGGLHW

SEQ ID NO: 28944 - protein, 9 aa, synthetic construct
  source 1..9: note = Seed: HSQLGGLHL
HTQLGGLHY

SEQ ID NO: 28945 - protein, 10 aa, synthetic construct
  source 1..10: note = Seed: HVRAWIGFDV
HTRAWIGFDK

SEQ ID NO: 28946 - protein, 10 aa, synthetic construct
  source 1..10: note = Seed: HVRAWIGFDV
HTRAWIGFDL

SEQ ID NO: 28947 - protein, 10 aa, synthetic construct
  source 1..10: note = Seed: HVRAWIGFDV
HTRAWIGFDV

SEQ ID NO: 28948 - protein, 10 aa, synthetic construct
  source 1..10: note = Seed: HSSRLSFKEL
HTSRLSFKEF

SEQ ID NO: 28949 - protein, 10 aa, synthetic construct
  source 1..10: note = Seed: HSSRLSFKEL
HTSRLSFKEK

SEQ ID NO: 28950 - protein, 10 aa, synthetic construct
  source 1..10: note = Seed: HSSRLSFKEL
HTSRLSFKEW

SEQ ID NO: 28951 - protein, 9 aa, synthetic construct
  source 1..9: note = Seed: HISRQRLTK
HTSRQRLTK

SEQ ID NO: 28952 - protein, 9 aa, synthetic construct
  source 1..9: note = Seed: HISRQRLTK
HTSRQRLTR

SEQ ID NO: 28953 - protein, 9 aa, synthetic construct
  source 1..9: note = Seed: HVTFFIYNK
HTTFFIYNK

SEQ ID NO: 28954 - protein, 10 aa, synthetic construct
  source 1..10: note = Seed: HVTFFIYNKI
HTTFFIYNKA

SEQ ID NO: 28955 - protein, 10 aa, synthetic construct
  source 1..10: note = Seed: HVTFFIYNKI
HTTFFIYNKI

SEQ ID NO: 28956 - protein, 10 aa, synthetic construct
  source 1..10: note = Seed: HVTFFIYNKI
HTTFFIYNKK

SEQ ID NO: 28957 - protein, 10 aa, synthetic construct
  source 1..10: note = Seed: HVTFFIYNKI
HTTFFIYNKL

SEQ ID NO: 28958 - protein, 10 aa, synthetic construct
  source 1..10: note = Seed: HVTFFIYNKI
HTTFFIYNKR

SEQ ID NO: 28959 - protein, 10 aa, synthetic construct
  source 1..10: note = Seed: HVTFFIYNKI
HTTFFIYNKV

SEQ ID NO: 28960 - protein, 9 aa, synthetic construct
  source 1..9: note = Seed: HVTFFIYNK
HTTFFIYNR

SEQ ID NO: 28961 - protein, 9 aa, synthetic construct
  source 1..9: note = Seed: HVTFFIYNK
HTTFFIYNY

SEQ ID NO: 28962 - protein, 9 aa, synthetic construct
  source 1..9: note = Seed: HVVGPNVNK
HTVGPNVNK

SEQ ID NO: 28963 - protein, 9 aa, synthetic construct
  source 1..9: note = Seed: HVVGPNVNK
HTVGPNVNR

SEQ ID NO: 28964 - protein, 9 aa, synthetic construct
  source 1..9: note = Seed: HFVNLDNLR
HTVNLDNLK

SEQ ID NO: 28965 - protein, 9 aa, synthetic construct
  source 1..9: note = Seed: HFVNLDNLR
HTVNLDNLR

SEQ ID NO: 28966 - protein, 11 aa, synthetic construct
  source 1..11: note = Seed: HGVVFLHVTYV
HTVVFLHVTYV

SEQ ID NO: 28967 - protein, 9 aa, synthetic construct
  source 1..9: note = Seed: HSYFTSDYY
HTYFTSDYF

SEQ ID NO: 28968 - protein, 9 aa, synthetic construct
  source 1..9: note = Seed: HSYFTSDYY
HTYFTSDYI

SEQ ID NO: 28969 - protein, 9 aa, synthetic construct
  source 1..9: note = Seed: HSYFTSDYY
HTYFTSDYK

SEQ ID NO: 28970 - protein, 9 aa, synthetic construct
  source 1..9: note = Seed: HSYFTSDYY
HTYFTSDYL

SEQ ID NO: 28971 - protein, 9 aa, synthetic construct
  source 1..9: note = Seed: HSYFTSDYY
HTYFTSDYM

SEQ ID NO: 28972 - protein, 9 aa, synthetic construct
  source 1..9: note = Seed: HSYFTSDYY
HTYFTSDYR

SEQ ID NO: 28973 - protein, 9 aa, synthetic construct
  source 1..9: note = Seed: HSYFTSDYY
HTYFTSDYW

SEQ ID NO: 28974 - protein, 9 aa, synthetic construct
  source 1..9: note = Seed: HSYFTSDYY
HTYFTSDYY

SEQ ID NO: 28975 - protein, 10 aa, synthetic construct
  source 1..10: note = Seed: HSYFTSDYYQ
HTYFTSDYYK

SEQ ID NO: 28976 - protein, 11 aa, synthetic construct
  source 1..11: note = Seed: HSYFTSDYYQL
HTYFTSDYYQF

SEQ ID NO: 28977 - protein, 11 aa, synthetic construct
  source 1..11: note = Seed: HSYFTSDYYQL
HTYFTSDYYQW

SEQ ID NO: 28978 - protein, 11 aa, synthetic construct
  source 1..11: note = Seed: HSYFTSDYYQL
HTYFTSDYYQY

SEQ ID NO: 28979 - protein, 10 aa, synthetic construct
  source 1..10: note = Seed: HSYFTSDYYQ
HTYFTSDYYR

SEQ ID NO: 28980 - protein, 10 aa, synthetic construct
  source 1..10: note = Seed: HSYFTSDYYQ
HTYFTSDYYY

SEQ ID NO: 28981 - protein, 9 aa, synthetic construct
  source 1..9: note = Seed: HLYLQYIRK
HTYLQYIRK

SEQ ID NO: 28982 - protein, 10 aa, synthetic construct
  source 1..10: note = Seed: HLYLQYIRKL
HTYLQYIRKF

SEQ ID NO: 28983 - protein, 9 aa, synthetic construct
  source 1..9: note = Seed: HLYLQYIRK
HTYLQYIRR

SEQ ID NO: 28984 - protein, 9 aa, synthetic construct
  source 1..9: note = Seed: HFYSKWYIR
HTYSKWYIA

SEQ ID NO: 28985 - protein, 9 aa, synthetic construct
  source 1..9: note = Seed: HFYSKWYIR
HTYSKWYII

SEQ ID NO: 28986 - protein, 9 aa, synthetic construct
  source 1..9: note = Seed: HFYSKWYIR
HTYSKWYIK

SEQ ID NO: 28987 - protein, 9 aa, synthetic construct
  source 1..9: note = Seed: HFYSKWYIR
HTYSKWYIR

SEQ ID NO: 28988 - protein, 10 aa, synthetic construct
  source 1..10: note = Seed: HFYSKWYIRV
HTYSKWYIRF

SEQ ID NO: 28989 - protein, 10 aa, synthetic construct
  source 1..10: note = Seed: HFYSKWYIRV
HTYSKWYIRH

SEQ ID NO: 28990 - protein, 10 aa, synthetic construct
  source 1..10: note = Seed: HFYSKWYIRV
HTYSKWYIRK

SEQ ID NO: 28991 - protein, 10 aa, synthetic construct
  source 1..10: note = Seed: HFYSKWYIRV
HTYSKWYIRR

SEQ ID NO: 28992 - protein, 9 aa, synthetic construct
  source 1..9: note = Seed: HFYSKWYIR
HTYSKWYIV

SEQ ID NO: 28993 - protein, 9 aa, synthetic construct
  source 1..9: note = Seed: HFYSKWYIR
HTYSKWYIY

SEQ ID NO: 28994 - protein, 9 aa, synthetic construct
  source 1..9: note = Seed: HFYWFFSNY
HTYWFFSNF

SEQ ID NO: 28995 - protein, 9 aa, synthetic construct
  source 1..9: note = Seed: HFYWFFSNY
HTYWFFSNK

SEQ ID NO: 28996 - protein, 9 aa, synthetic construct
  source 1..9: note = Seed: HFYWFFSNY
HTYWFFSNR

SEQ ID NO: 28997 - protein, 9 aa, synthetic construct
  source 1..9: note = Seed: HFYWFFSNY
HTYWFFSNY

SEQ ID NO: 28998 - protein, 10 aa, synthetic construct
  source 1..10: note = Seed: HFYWFFSNYL
HTYWFFSNYF

SEQ ID NO: 28999 - protein, 10 aa, synthetic construct
  source 1..10: note = Seed: HFYWFFSNYL
HTYWFFSNYI

SEQ ID NO: 29000 - protein, 10 aa, synthetic construct
  source 1..10: note = Seed: HFYWFFSNYL
HTYWFFSNYL

SEQ ID NO: 29001 - protein, 11 aa, synthetic construct
  source 1..11: note = Seed: HFYWFFSNYLK
HTYWFFSNYLK

SEQ ID NO: 29002 - protein, 11 aa, synthetic construct
  source 1..11: note = Seed: HFYWFFSNYLK
HTYWFFSNYLR

SEQ ID NO: 29003 - protein, 10 aa, synthetic construct
  source 1..10: note = Seed: HFYWFFSNYL
HTYWFFSNYW

SEQ ID NO: 29004 - protein, 10 aa, synthetic construct
  source 1..10: note = Seed: HFYWFFSNYL
HTYWFFSNYY

SEQ ID NO: 29005 - protein, 9 aa, synthetic construct
  source 1..9: note = Seed: HCANFNVLF
HVANFNVLF

SEQ ID NO: 29006 - protein, 9 aa, synthetic construct
  source 1..9: note = Seed: HCANFNVLF
HVANFNVLY

SEQ ID NO: 29007 - protein, 9 aa, synthetic construct
  source 1..9: note = Seed: HTANKWDLI
HVANKWDLV

SEQ ID NO: 29008 - protein, 10 aa, synthetic construct
  source 1..10: note = Seed: HAAVDALCEK
HVAVDALCEK

SEQ ID NO: 29009 - protein, 10 aa, synthetic construct
  source 1..10: note = Seed: HAAVDALCEK
HVAVDALCER

SEQ ID NO: 29010 - protein, 9 aa, synthetic construct
  source 1..9: note = Seed: HGFELTSMK
HVFELTSMK

SEQ ID NO: 29011 - protein, 10 aa, synthetic construct
  source 1..10: note = Seed: HGFELTSMKY
HVFELTSMKY

SEQ ID NO: 29012 - protein, 9 aa, synthetic construct
  source 1..9: note = Seed: HGFELTSMK
HVFELTSMR

SEQ ID NO: 29013 - protein, 9 aa, synthetic construct
  source 1..9: note = Seed: HGFELTSMK
HVFELTSMY

SEQ ID NO: 29014 - protein, 9 aa, synthetic construct
  source 1..9: note = Seed: HAFLCLFLL
HVFLCLFLV

SEQ ID NO: 29015 - protein, 9 aa, synthetic construct
  source 1..9: note = Seed: HAFLCLFLL
HVFLCLFLW

SEQ ID NO: 29016 - protein, 11 aa, synthetic construct
  source 1..11: note = Seed: HAGTDLEGNFY
HVGTDLEGNFY

SEQ ID NO: 29017 - protein, 9 aa, synthetic construct
  source 1..9: note = Seed: HKHAFLCLF
HVHAFLCLF

SEQ ID NO: 29018 - protein, 9 aa, synthetic construct
  source 1..9: note = Seed: HKHAFLCLF
HVHAFLCLY

SEQ ID NO: 29019 - protein, 9 aa, synthetic construct
  source 1..9: note = Seed: HEIAWYTER
HVIAWYTEK

SEQ ID NO: 29020 - protein, 9 aa, synthetic construct
  source 1..9: note = Seed: HEIAWYTER
HVIAWYTER

SEQ ID NO: 29021 - protein, 11 aa, synthetic construct
  source 1..11: note = Seed: HWLLLTILTSL
HVLLLTILTSV

SEQ ID NO: 29022 - protein, 10 aa, synthetic construct
  source 1..10: note = Seed: HFLPRVFSAV
HVLPRVFSAV

SEQ ID NO: 29023 - protein, 9 aa, synthetic construct
  source 1..9: note = Seed: HFLPRVFSA
HVLPRVFSK

SEQ ID NO: 29024 - protein, 9 aa, synthetic construct
  source 1..9: note = Seed: HFLPRVFSA
HVLPRVFSL

SEQ ID NO: 29025 - protein, 9 aa, synthetic construct
  source 1..9: note = Seed: HSMQNCVLK
HVMQNCVLK

SEQ ID NO: 29026 - protein, 9 aa, synthetic construct
  source 1..9: note = Seed: HSMQNCVLK
HVMQNCVLR

SEQ ID NO: 29027 - protein, 10 aa, synthetic construct
  source 1..10: note = Seed: HLMSFPQSAP
HVMSFPQSAV

SEQ ID NO: 29028 - protein, 9 aa, synthetic construct
  source 1..9: note = Seed: HLMSFPQSA
HVMSFPQSF

SEQ ID NO: 29029 - protein, 9 aa, synthetic construct
  source 1..9: note = Seed: HLMSFPQSA
HVMSFPQSI

SEQ ID NO: 29030 - protein, 9 aa, synthetic construct
  source 1..9: note = Seed: HLMSFPQSA
HVMSFPQSL

SEQ ID NO: 29031 - protein, 9 aa, synthetic construct
  source 1..9: note = Seed: HLMSFPQSA
HVMSFPQSM

SEQ ID NO: 29032 - protein, 9 aa, synthetic construct
  source 1..9: note = Seed: HLMSFPQSA
HVMSFPQSV

SEQ ID NO: 29033 - protein, 9 aa, synthetic construct
  source 1..9: note = Seed: HLMSFPQSA
HVMSFPQSY

SEQ ID NO: 29034 - protein, 10 aa, synthetic construct
  source 1..10: note = Seed: HVRAWIGFDV
HVRAWIGFDL

SEQ ID NO: 29035 - protein, 10 aa, synthetic construct
  source 1..10: note = Seed: HSSRLSFKEL
HVSRLSFKEK

SEQ ID NO: 29036 - protein, 10 aa, synthetic construct
  source 1..10: note = Seed: HSSRLSFKEL
HVSRLSFKEW

SEQ ID NO: 29037 - protein, 9 aa, synthetic construct
  source 1..9: note = Seed: HISRQRLTK
HVSRQRLTK

SEQ ID NO: 29038 - protein, 9 aa, synthetic construct
  source 1..9: note = Seed: HISRQRLTK
HVSRQRLTR

SEQ ID NO: 29039 - protein, 10 aa, synthetic construct
  source 1..10: note = Seed: HVTFFIYNKI
HVTFFIYNKA

SEQ ID NO: 29040 - protein, 10 aa, synthetic construct
  source 1..10: note = Seed: HVTFFIYNKI
HVTFFIYNKK

SEQ ID NO: 29041 - protein, 10 aa, synthetic construct
  source 1..10: note = Seed: HVTFFIYNKI
HVTFFIYNKL

SEQ ID NO: 29042 - protein, 10 aa, synthetic construct
  source 1..10: note = Seed: HVTFFIYNKI
HVTFFIYNKR

SEQ ID NO: 29043 - protein, 10 aa, synthetic construct
  source 1..10: note = Seed: HVTFFIYNKI
HVTFFIYNKV

SEQ ID NO: 29044 - protein, 9 aa, synthetic construct
  source 1..9: note = Seed: HVTFFIYNK
HVTFFIYNR

SEQ ID NO: 29045 - protein, 9 aa, synthetic construct
  source 1..9: note = Seed: HVVGPNVNK
HVVGPNVNR

SEQ ID NO: 29046 - protein, 9 aa, synthetic construct
  source 1..9: note = Seed: HFVNLDNLR
HVVNLDNLK

SEQ ID NO: 29047 - protein, 9 aa, synthetic construct
  source 1..9: note = Seed: HFVNLDNLR
HVVNLDNLR

SEQ ID NO: 29048 - protein, 9 aa, synthetic construct
  source 1..9: note = Seed: HSYFTSDYY
HVYFTSDYF

SEQ ID NO: 29049 - protein, 9 aa, synthetic construct
  source 1..9: note = Seed: HSYFTSDYY
HVYFTSDYK

SEQ ID NO: 29050 - protein, 9 aa, synthetic construct
  source 1..9: note = Seed: HSYFTSDYY
HVYFTSDYR

SEQ ID NO: 29051 - protein, 9 aa, synthetic construct
  source 1..9: note = Seed: HSYFTSDYY
HVYFTSDYW

SEQ ID NO: 29052 - protein, 9 aa, synthetic construct
  source 1..9: note = Seed: HSYFTSDYY
HVYFTSDYY

SEQ ID NO: 29053 - protein, 10 aa, synthetic construct
  source 1..10: note = Seed: HSYFTSDYYQ
HVYFTSDYYK

SEQ ID NO: 29054 - protein, 11 aa, synthetic construct
  source 1..11: note = Seed: HSYFTSDYYQL
HVYFTSDYYQF

SEQ ID NO: 29055 - protein, 10 aa, synthetic construct
  source 1..10: note = Seed: HSYFTSDYYQ
HVYFTSDYYR

SEQ ID NO: 29056 - protein, 10 aa, synthetic construct
  source 1..10: note = Seed: HSYFTSDYYQ
HVYFTSDYYY

SEQ ID NO: 29057 - protein, 9 aa, synthetic construct
  source 1..9: note = Seed: HLYLQYIRK
HVYLQYIRK

SEQ ID NO: 29058 - protein, 10 aa, synthetic construct
  source 1..10: note = Seed: HLYLQYIRKL
HVYLQYIRKF

SEQ ID NO: 29059 - protein, 9 aa, synthetic construct
  source 1..9: note = Seed: HLYLQYIRK
HVYLQYIRR

SEQ ID NO: 29060 - protein, 9 aa, synthetic construct
  source 1..9: note = Seed: HFYSKWYIR
HVYSKWYIA

SEQ ID NO: 29061 - protein, 9 aa, synthetic construct
  source 1..9: note = Seed: HFYSKWYIR
HVYSKWYIK

SEQ ID NO: 29062 - protein, 9 aa, synthetic construct
  source 1..9: note = Seed: HFYSKWYIR
HVYSKWYIR

SEQ ID NO: 29063 - protein, 10 aa, synthetic construct
  source 1..10: note = Seed: HFYSKWYIRV
HVYSKWYIRF

SEQ ID NO: 29064 - protein, 10 aa, synthetic construct
  source 1..10: note = Seed: HFYSKWYIRV
HVYSKWYIRK

SEQ ID NO: 29065 - protein, 10 aa, synthetic construct
  source 1..10: note = Seed: HFYSKWYIRV
HVYSKWYIRR

SEQ ID NO: 29066 - protein, 9 aa, synthetic construct
  source 1..9: note = Seed: HFYWFFSNY
HVYWFFSNF

SEQ ID NO: 29067 - protein, 9 aa, synthetic construct
  source 1..9: note = Seed: HFYWFFSNY
HVYWFFSNK

SEQ ID NO: 29068 - protein, 9 aa, synthetic construct
  source 1..9: note = Seed: HFYWFFSNY
HVYWFFSNR

SEQ ID NO: 29069 - protein, 9 aa, synthetic construct
  source 1..9: note = Seed: HFYWFFSNY
HVYWFFSNY

SEQ ID NO: 29070 - protein, 10 aa, synthetic construct
  source 1..10: note = Seed: HFYWFFSNYL
HVYWFFSNYF

SEQ ID NO: 29071 - protein, 10 aa, synthetic construct
  source 1..10: note = Seed: HFYWFFSNYL
HVYWFFSNYI

SEQ ID NO: 29072 - protein, 10 aa, synthetic construct
  source 1..10: note = Seed: HFYWFFSNYL
HVYWFFSNYL

SEQ ID NO: 29073 - protein, 11 aa, synthetic construct
  source 1..11: note = Seed: HFYWFFSNYLK
HVYWFFSNYLK

SEQ ID NO: 29074 - protein, 11 aa, synthetic construct
  source 1..11: note = Seed: HFYWFFSNYLK
HVYWFFSNYLR

SEQ ID NO: 29075 - protein, 10 aa, synthetic construct
  source 1..10: note = Seed: HFYWFFSNYL
HVYWFFSNYW

SEQ ID NO: 29076 - protein, 10 aa, synthetic construct
  source 1..10: note = Seed: HFYWFFSNYL
HVYWFFSNYY

SEQ ID NO: 29077 - protein, 10 aa, synthetic construct
  source 1..10: note = Seed: HAAVDALCEK
HWAVDALCER

SEQ ID NO: 29078 - protein, 10 aa, synthetic construct
  source 1..10: note = Seed: HGFELTSMKY
HWFELTSMKY

SEQ ID NO: 29079 - protein, 9 aa, synthetic construct
  source 1..9: note = Seed: HGFELTSMK
HWFELTSMR

SEQ ID NO: 29080 - protein, 11 aa, synthetic construct
  source 1..11: note = Seed: HAGTDLEGNFY
HWGTDLEGNFY

SEQ ID NO: 29081 - protein, 9 aa, synthetic construct
  source 1..9: note = Seed: HEIAWYTER
HWIAWYTEK

SEQ ID NO: 29082 - protein, 9 aa, synthetic construct
  source 1..9: note = Seed: HEIAWYTER
HWIAWYTER

SEQ ID NO: 29083 - protein, 11 aa, synthetic construct
  source 1..11: note = Seed: HWLLLTILTSL
HWLLLTILTSV

SEQ ID NO: 29084 - protein, 10 aa, synthetic construct
  source 1..10: note = Seed: HFLPRVFSAV
HWLPRVFSAV

SEQ ID NO: 29085 - protein, 9 aa, synthetic construct
  source 1..9: note = Seed: HFLPRVFSA
HWLPRVFSF

SEQ ID NO: 29086 - protein, 9 aa, synthetic construct
  source 1..9: note = Seed: HFLPRVFSA
HWLPRVFSL

SEQ ID NO: 29087 - protein, 9 aa, synthetic construct
  source 1..9: note = Seed: HFLPRVFSA
HWLPRVFSM

SEQ ID NO: 29088 - protein, 10 aa, synthetic construct
  source 1..10: note = Seed: HLMSFPQSAP
HWMSFPQSAV

SEQ ID NO: 29089 - protein, 10 aa, synthetic construct
  source 1..10: note = Seed: HVRAWIGFDV
HWRAWIGFDL

SEQ ID NO: 29090 - protein, 9 aa, synthetic construct
  source 1..9: note = Seed: HFRELGVVH
HWRELGVVF

SEQ ID NO: 29091 - protein, 9 aa, synthetic construct
  source 1..9: note = Seed: HFRELGVVH
HWRELGVVL

SEQ ID NO: 29092 - protein, 9 aa, synthetic construct
  source 1..9: note = Seed: HFRELGVVH
HWRELGVVM

SEQ ID NO: 29093 - protein, 10 aa, synthetic construct
  source 1..10: note = Seed: HSSRLSFKEL
HWSRLSFKEK

SEQ ID NO: 29094 - protein, 9 aa, synthetic construct
  source 1..9: note = Seed: HVTFFIYNK
HWTFFIYNK

SEQ ID NO: 29095 - protein, 10 aa, synthetic construct
  source 1..10: note = Seed: HVTFFIYNKI
HWTFFIYNKA

SEQ ID NO: 29096 - protein, 10 aa, synthetic construct
  source 1..10: note = Seed: HVTFFIYNKI
HWTFFIYNKI

SEQ ID NO: 29097 - protein, 10 aa, synthetic construct
  source 1..10: note = Seed: HVTFFIYNKI
HWTFFIYNKK

SEQ ID NO: 29098 - protein, 10 aa, synthetic construct
  source 1..10: note = Seed: HVTFFIYNKI
HWTFFIYNKL

SEQ ID NO: 29099 - protein, 10 aa, synthetic construct
  source 1..10: note = Seed: HVTFFIYNKI
HWTFFIYNKR

SEQ ID NO: 29100 - protein, 10 aa, synthetic construct
  source 1..10: note = Seed: HVTFFIYNKI
HWTFFIYNKV

SEQ ID NO: 29101 - protein, 9 aa, synthetic construct
  source 1..9: note = Seed: HVTFFIYNK
HWTFFIYNR

SEQ ID NO: 29102 - protein, 9 aa, synthetic construct
  source 1..9: note = Seed: HSYFTSDYY
HWYFTSDYF

SEQ ID NO: 29103 - protein, 9 aa, synthetic construct
  source 1..9: note = Seed: HSYFTSDYY
HWYFTSDYL

SEQ ID NO: 29104 - protein, 9 aa, synthetic construct
  source 1..9: note = Seed: HSYFTSDYY
HWYFTSDYM

SEQ ID NO: 29105 - protein, 9 aa, synthetic construct
  source 1..9: note = Seed: HSYFTSDYY
HWYFTSDYY

SEQ ID NO: 29106 - protein, 11 aa, synthetic construct
  source 1..11: note = Seed: HSYFTSDYYQL
HWYFTSDYYQF

SEQ ID NO: 29107 - protein, 11 aa, synthetic construct
  source 1..11: note = Seed: HSYFTSDYYQL
HWYFTSDYYQW

SEQ ID NO: 29108 - protein, 10 aa, synthetic construct
  source 1..10: note = Seed: HSYFTSDYYQ
HWYFTSDYYY

SEQ ID NO: 29109 - protein, 10 aa, synthetic construct
  source 1..10: note = Seed: HLYLQYIRKL
HWYLQYIRKF

SEQ ID NO: 29110 - protein, 9 aa, synthetic construct
  source 1..9: note = Seed: HFYSKWYIR
HWYSKWYIK

SEQ ID NO: 29111 - protein, 9 aa, synthetic construct
  source 1..9: note = Seed: HFYSKWYIR
HWYSKWYIR

SEQ ID NO: 29112 - protein, 10 aa, synthetic construct
  source 1..10: note = Seed: HFYSKWYIRV
HWYSKWYIRF

SEQ ID NO: 29113 - protein, 10 aa, synthetic construct
  source 1..10: note = Seed: HFYSKWYIRV
HWYSKWYIRI

SEQ ID NO: 29114 - protein, 10 aa, synthetic construct
  source 1..10: note = Seed: HFYSKWYIRV
HWYSKWYIRK

SEQ ID NO: 29115 - protein, 10 aa, synthetic construct
  source 1..10: note = Seed: HFYSKWYIRV
HWYSKWYIRL

SEQ ID NO: 29116 - protein, 10 aa, synthetic construct
  source 1..10: note = Seed: HFYSKWYIRV
HWYSKWYIRR

SEQ ID NO: 29117 - protein, 10 aa, synthetic construct
  source 1..10: note = Seed: HFYSKWYIRV
HWYSKWYIRW

SEQ ID NO: 29118 - protein, 9 aa, synthetic construct
  source 1..9: note = Seed: HFYWFFSNY
HWYWFFSNK

SEQ ID NO: 29119 - protein, 9 aa, synthetic construct
  source 1..9: note = Seed: HFYWFFSNY
HWYWFFSNM

SEQ ID NO: 29120 - protein, 9 aa, synthetic construct
  source 1..9: note = Seed: HFYWFFSNY
HWYWFFSNR

SEQ ID NO: 29121 - protein, 9 aa, synthetic construct
  source 1..9: note = Seed: HFYWFFSNY
HWYWFFSNY

SEQ ID NO: 29122 - protein, 10 aa, synthetic construct
  source 1..10: note = Seed: HFYWFFSNYL
HWYWFFSNYF

SEQ ID NO: 29123 - protein, 10 aa, synthetic construct
  source 1..10: note = Seed: HFYWFFSNYL
HWYWFFSNYI

SEQ ID NO: 29124 - protein, 10 aa, synthetic construct
  source 1..10: note = Seed: HFYWFFSNYL
HWYWFFSNYL

SEQ ID NO: 29125 - protein, 11 aa, synthetic construct
  source 1..11: note = Seed: HFYWFFSNYLK
HWYWFFSNYLK

SEQ ID NO: 29126 - protein, 11 aa, synthetic construct
  source 1..11: note = Seed: HFYWFFSNYLK
HWYWFFSNYLR

SEQ ID NO: 29127 - protein, 10 aa, synthetic construct
  source 1..10: note = Seed: HFYWFFSNYL
HWYWFFSNYW

SEQ ID NO: 29128 - protein, 10 aa, synthetic construct
  source 1..10: note = Seed: HFYWFFSNYL
HWYWFFSNYY

SEQ ID NO: 29129 - protein, 10 aa, synthetic construct
  source 1..10: note = Seed: HAAVDALCEK
HYAVDALCER

SEQ ID NO: 29130 - protein, 10 aa, synthetic construct
  source 1..10: note = Seed: HGFELTSMKY
HYFELTSMKY

SEQ ID NO: 29131 - protein, 9 aa, synthetic construct
  source 1..9: note = Seed: HGFELTSMK
HYFELTSMR

SEQ ID NO: 29132 - protein, 11 aa, synthetic construct
  source 1..11: note = Seed: HAGTDLEGNFY
HYGTDLEGNFY

SEQ ID NO: 29133 - protein, 9 aa, synthetic construct
  source 1..9: note = Seed: HEIAWYTER
HYIAWYTEK

SEQ ID NO: 29134 - protein, 9 aa, synthetic construct
  source 1..9: note = Seed: HEIAWYTER
HYIAWYTER

SEQ ID NO: 29135 - protein, 8 aa, synthetic construct
  source 1..8: note = Seed: HFIETISL
HYIETISF

SEQ ID NO: 29136 - protein, 8 aa, synthetic construct
  source 1..8: note = Seed: HFIETISL
HYIETISL

SEQ ID NO: 29137 - protein, 8 aa, synthetic construct
  source 1..8: note = Seed: HFIETISL
HYIETISM

SEQ ID NO: 29138 - protein, 8 aa, synthetic construct
  source 1..8: note = Seed: HFIETISL
HYIETISY

SEQ ID NO: 29139 - protein, 11 aa, synthetic construct
  source 1..11: note = Seed: HWLLLTILTSL
HYLLLTILTSV

SEQ ID NO: 29140 - protein, 10 aa, synthetic construct
  source 1..10: note = Seed: HFLPRVFSAV
HYLPRVFSAF

SEQ ID NO: 29141 - protein, 10 aa, synthetic construct
  source 1..10: note = Seed: HFLPRVFSAV
HYLPRVFSAL

SEQ ID NO: 29142 - protein, 10 aa, synthetic construct
  source 1..10: note = Seed: HFLPRVFSAV
HYLPRVFSAM

SEQ ID NO: 29143 - protein, 10 aa, synthetic construct
  source 1..10: note = Seed: HFLPRVFSAV
HYLPRVFSAV

SEQ ID NO: 29144 - protein, 10 aa, synthetic construct
  source 1..10: note = Seed: HFLPRVFSAV
HYLPRVFSAY

SEQ ID NO: 29145 - protein, 9 aa, synthetic construct
  source 1..9: note = Seed: HFLPRVFSA
HYLPRVFSF

SEQ ID NO: 29146 - protein, 9 aa, synthetic construct
  source 1..9: note = Seed: HFLPRVFSA
HYLPRVFSI

SEQ ID NO: 29147 - protein, 9 aa, synthetic construct
  source 1..9: note = Seed: HFLPRVFSA
HYLPRVFSK

SEQ ID NO: 29148 - protein, 9 aa, synthetic construct
  source 1..9: note = Seed: HFLPRVFSA
HYLPRVFSL

SEQ ID NO: 29149 - protein, 9 aa, synthetic construct
  source 1..9: note = Seed: HFLPRVFSA
HYLPRVFSM

SEQ ID NO: 29150 - protein, 9 aa, synthetic construct
  source 1..9: note = Seed: HFLPRVFSA
HYLPRVFSV

SEQ ID NO: 29151 - protein, 9 aa, synthetic construct
  source 1..9: note = Seed: HFLPRVFSA
HYLPRVFSY

SEQ ID NO: 29152 - protein, 9 aa, synthetic construct
  source 1..9: note = Seed: HSMQNCVLK
HYMQNCVLR

SEQ ID NO: 29153 - protein, 10 aa, synthetic construct
  source 1..10: note = Seed: HLMSFPQSAP
HYMSFPQSAV

SEQ ID NO: 29154 - protein, 9 aa, synthetic construct
  source 1..9: note = Seed: HLMSFPQSA
HYMSFPQSF

SEQ ID NO: 29155 - protein, 10 aa, synthetic construct
  source 1..10: note = Seed: HVRAWIGFDV
HYRAWIGFDK

SEQ ID NO: 29156 - protein, 10 aa, synthetic construct
  source 1..10: note = Seed: HVRAWIGFDV
HYRAWIGFDL

SEQ ID NO: 29157 - protein, 9 aa, synthetic construct
  source 1..9: note = Seed: HFRELGVVH
HYRELGVVF

SEQ ID NO: 29158 - protein, 9 aa, synthetic construct
  source 1..9: note = Seed: HFRELGVVH
HYRELGVVI

SEQ ID NO: 29159 - protein, 9 aa, synthetic construct
  source 1..9: note = Seed: HFRELGVVH
HYRELGVVL

SEQ ID NO: 29160 - protein, 9 aa, synthetic construct
  source 1..9: note = Seed: HFRELGVVH
HYRELGVVM

SEQ ID NO: 29161 - protein, 9 aa, synthetic construct
  source 1..9: note = Seed: HFRELGVVH
HYRELGVVV

SEQ ID NO: 29162 - protein, 9 aa, synthetic construct
  source 1..9: note = Seed: HFRELGVVH
HYRELGVVY

SEQ ID NO: 29163 - protein, 10 aa, synthetic construct
  source 1..10: note = Seed: HSSRLSFKEL
HYSRLSFKEK

SEQ ID NO: 29164 - protein, 9 aa, synthetic construct
  source 1..9: note = Seed: HVTFFIYNK
HYTFFIYNK

SEQ ID NO: 29165 - protein, 10 aa, synthetic construct
  source 1..10: note = Seed: HVTFFIYNKI
HYTFFIYNKA

SEQ ID NO: 29166 - protein, 10 aa, synthetic construct
  source 1..10: note = Seed: HVTFFIYNKI
HYTFFIYNKI

SEQ ID NO: 29167 - protein, 10 aa, synthetic construct
  source 1..10: note = Seed: HVTFFIYNKI
HYTFFIYNKK

SEQ ID NO: 29168 - protein, 10 aa, synthetic construct
  source 1..10: note = Seed: HVTFFIYNKI
HYTFFIYNKL

SEQ ID NO: 29169 - protein, 10 aa, synthetic construct
  source 1..10: note = Seed: HVTFFIYNKI
HYTFFIYNKR

SEQ ID NO: 29170 - protein, 10 aa, synthetic construct
  source 1..10: note = Seed: HVTFFIYNKI
HYTFFIYNKV

SEQ ID NO: 29171 - protein, 9 aa, synthetic construct
  source 1..9: note = Seed: HVTFFIYNK
HYTFFIYNR

SEQ ID NO: 29172 - protein, 9 aa, synthetic construct
  source 1..9: note = Seed: HSYFTSDYY
HYYFTSDYF

SEQ ID NO: 29173 - protein, 9 aa, synthetic construct
  source 1..9: note = Seed: HSYFTSDYY
HYYFTSDYI

SEQ ID NO: 29174 - protein, 9 aa, synthetic construct
  source 1..9: note = Seed: HSYFTSDYY
HYYFTSDYL

SEQ ID NO: 29175 - protein, 9 aa, synthetic construct
  source 1..9: note = Seed: HSYFTSDYY
HYYFTSDYM

SEQ ID NO: 29176 - protein, 9 aa, synthetic construct
  source 1..9: note = Seed: HSYFTSDYY
HYYFTSDYV

SEQ ID NO: 29177 - protein, 9 aa, synthetic construct
  source 1..9: note = Seed: HSYFTSDYY
HYYFTSDYY

SEQ ID NO: 29178 - protein, 11 aa, synthetic construct
  source 1..11: note = Seed: HSYFTSDYYQL
HYYFTSDYYQF

SEQ ID NO: 29179 - protein, 11 aa, synthetic construct
  source 1..11: note = Seed: HSYFTSDYYQL
HYYFTSDYYQI

SEQ ID NO: 29180 - protein, 11 aa, synthetic construct
  source 1..11: note = Seed: HSYFTSDYYQL
HYYFTSDYYQL

SEQ ID NO: 29181 - protein, 11 aa, synthetic construct
  source 1..11: note = Seed: HSYFTSDYYQL
HYYFTSDYYQM

SEQ ID NO: 29182 - protein, 11 aa, synthetic construct
  source 1..11: note = Seed: HSYFTSDYYQL
HYYFTSDYYQW

SEQ ID NO: 29183 - protein, 10 aa, synthetic construct
  source 1..10: note = Seed: HSYFTSDYYQ
HYYFTSDYYR

SEQ ID NO: 29184 - protein, 10 aa, synthetic construct
  source 1..10: note = Seed: HSYFTSDYYQ
HYYFTSDYYY

SEQ ID NO: 29185 - protein, 10 aa, synthetic construct
  source 1..10: note = Seed: HLYLQYIRKL
HYYLQYIRKF

SEQ ID NO: 29186 - protein, 9 aa, synthetic construct
  source 1..9: note = Seed: HLYLQYIRK
HYYLQYIRR

SEQ ID NO: 29187 - protein, 9 aa, synthetic construct
  source 1..9: note = Seed: HFYSKWYIR
HYYSKWYIK

SEQ ID NO: 29188 - protein, 9 aa, synthetic construct
  source 1..9: note = Seed: HFYSKWYIR
HYYSKWYIR

SEQ ID NO: 29189 - protein, 10 aa, synthetic construct
  source 1..10: note = Seed: HFYSKWYIRV
HYYSKWYIRF

SEQ ID NO: 29190 - protein, 10 aa, synthetic construct
  source 1..10: note = Seed: HFYSKWYIRV
HYYSKWYIRI

SEQ ID NO: 29191 - protein, 10 aa, synthetic construct
  source 1..10: note = Seed: HFYSKWYIRV
HYYSKWYIRK

SEQ ID NO: 29192 - protein, 10 aa, synthetic construct
  source 1..10: note = Seed: HFYSKWYIRV
HYYSKWYIRL

SEQ ID NO: 29193 - protein, 10 aa, synthetic construct
  source 1..10: note = Seed: HFYSKWYIRV
HYYSKWYIRM

SEQ ID NO: 29194 - protein, 10 aa, synthetic construct
  source 1..10: note = Seed: HFYSKWYIRV
HYYSKWYIRR

SEQ ID NO: 29195 - protein, 10 aa, synthetic construct
  source 1..10: note = Seed: HFYSKWYIRV
HYYSKWYIRW

SEQ ID NO: 29196 - protein, 9 aa, synthetic construct
  source 1..9: note = Seed: HFYWFFSNY
HYYWFFSNF

SEQ ID NO: 29197 - protein, 9 aa, synthetic construct
  source 1..9: note = Seed: HFYWFFSNY
HYYWFFSNI

SEQ ID NO: 29198 - protein, 9 aa, synthetic construct
  source 1..9: note = Seed: HFYWFFSNY
HYYWFFSNK

SEQ ID NO: 29199 - protein, 9 aa, synthetic construct
  source 1..9: note = Seed: HFYWFFSNY
HYYWFFSNL

SEQ ID NO: 29200 - protein, 9 aa, synthetic construct
  source 1..9: note = Seed: HFYWFFSNY
HYYWFFSNM

SEQ ID NO: 29201 - protein, 9 aa, synthetic construct
  source 1..9: note = Seed: HFYWFFSNY
HYYWFFSNR

SEQ ID NO: 29202 - protein, 9 aa, synthetic construct
  source 1..9: note = Seed: HFYWFFSNY
HYYWFFSNV

SEQ ID NO: 29203 - protein, 9 aa, synthetic construct
  source 1..9: note = Seed: HFYWFFSNY
HYYWFFSNY

SEQ ID NO: 29204 - protein, 10 aa, synthetic construct
  source 1..10: note = Seed: HFYWFFSNYL
HYYWFFSNYF

SEQ ID NO: 29205 - protein, 10 aa, synthetic construct
  source 1..10: note = Seed: HFYWFFSNYL
HYYWFFSNYI

SEQ ID NO: 29206 - protein, 10 aa, synthetic construct
  source 1..10: note = Seed: HFYWFFSNYL
HYYWFFSNYL

SEQ ID NO: 29207 - protein, 11 aa, synthetic construct
  source 1..11: note = Seed: HFYWFFSNYLK
HYYWFFSNYLK

SEQ ID NO: 29208 - protein, 11 aa, synthetic construct
  source 1..11: note = Seed: HFYWFFSNYLK
HYYWFFSNYLR

SEQ ID NO: 29209 - protein, 10 aa, synthetic construct
  source 1..10: note = Seed: HFYWFFSNYL
HYYWFFSNYM

SEQ ID NO: 29210 - protein, 10 aa, synthetic construct
  source 1..10: note = Seed: HFYWFFSNYL
HYYWFFSNYW

SEQ ID NO: 29211 - protein, 10 aa, synthetic construct
  source 1..10: note = Seed: HFYWFFSNYL
HYYWFFSNYY

SEQ ID NO: 29212 - protein, 9 aa, synthetic construct
  source 1..9: note = Seed: ISAARQGFV
IAAARQGFF

SEQ ID NO: 29213 - protein, 9 aa, synthetic construct
  source 1..9: note = Seed: ISAARQGFV
IAAARQGFL

SEQ ID NO: 29214 - protein, 9 aa, synthetic construct
  source 1..9: note = Seed: ISAARQGFV
IAAARQGFM

SEQ ID NO: 29215 - protein, 9 aa, synthetic construct
  source 1..9: note = Seed: ISAARQGFV
IAAARQGFY

SEQ ID NO: 29216 - protein, 9 aa, synthetic construct
  source 1..9: note = Seed: IGAGICASY
IAAGICASF

SEQ ID NO: 29217 - protein, 9 aa, synthetic construct
  source 1..9: note = Seed: IGAGICASY
IAAGICASI

SEQ ID NO: 29218 - protein, 9 aa, synthetic construct
  source 1..9: note = Seed: IGAGICASY
IAAGICASL

SEQ ID NO: 29219 - protein, 9 aa, synthetic construct
  source 1..9: note = Seed: IGAGICASY
IAAGICASM

SEQ ID NO: 29220 - protein, 9 aa, synthetic construct
  source 1..9: note = Seed: IGAGICASY
IAAGICASV

SEQ ID NO: 29221 - protein, 9 aa, synthetic construct
  source 1..9: note = Seed: IGAGICASY
IAAGICASW

SEQ ID NO: 29222 - protein, 9 aa, synthetic construct
  source 1..9: note = Seed: ISAMVRMYI
IAAMVRMYF

SEQ ID NO: 29223 - protein, 9 aa, synthetic construct
  source 1..9: note = Seed: ISAMVRMYI
IAAMVRMYI

SEQ ID NO: 29224 - protein, 10 aa, synthetic construct
  source 1..10: note = Seed: ISAMVRMYIF
IAAMVRMYIW

SEQ ID NO: 29225 - protein, 9 aa, synthetic construct
  source 1..9: note = Seed: ISAMVRMYI
IAAMVRMYK

SEQ ID NO: 29226 - protein, 9 aa, synthetic construct
  source 1..9: note = Seed: ISAMVRMYI
IAAMVRMYL

SEQ ID NO: 29227 - protein, 9 aa, synthetic construct
  source 1..9: note = Seed: ISAMVRMYI
IAAMVRMYM

SEQ ID NO: 29228 - protein, 9 aa, synthetic construct
  source 1..9: note = Seed: ISAMVRMYI
IAAMVRMYV

SEQ ID NO: 29229 - protein, 9 aa, synthetic construct
  source 1..9: note = Seed: ISAMVRMYI
IAAMVRMYW

SEQ ID NO: 29230 - protein, 9 aa, synthetic construct
  source 1..9: note = Seed: ISAMVRMYI
IAAMVRMYY

SEQ ID NO: 29231 - protein, 10 aa, synthetic construct
  source 1..10: note = Seed: ISASIVAGGI
IAASIVAGGV

SEQ ID NO: 29232 - protein, 9 aa, synthetic construct
  source 1..9: note = Seed: ITDAVDCAL
IADAVDCAF

SEQ ID NO: 29233 - protein, 9 aa, synthetic construct
  source 1..9: note = Seed: ITDAVDCAL
IADAVDCAI

SEQ ID NO: 29234 - protein, 9 aa, synthetic construct
  source 1..9: note = Seed: ITDAVDCAL
IADAVDCAL

SEQ ID NO: 29235 - protein, 9 aa, synthetic construct
  source 1..9: note = Seed: ITDAVDCAL
IADAVDCAM

SEQ ID NO: 29236 - protein, 9 aa, synthetic construct
  source 1..9: note = Seed: ITDAVDCAL
IADAVDCAV

SEQ ID NO: 29237 - protein, 9 aa, synthetic construct
  source 1..9: note = Seed: ISDEVARDL
IADEVARDF

SEQ ID NO: 29238 - protein, 9 aa, synthetic construct
  source 1..9: note = Seed: ISDEVARDL
IADEVARDL

SEQ ID NO: 29239 - protein, 9 aa, synthetic construct
  source 1..9: note = Seed: ISDEVARDL
IADEVARDM

SEQ ID NO: 29240 - protein, 9 aa, synthetic construct
  source 1..9: note = Seed: ILDITPCSF
IADITPCSF

SEQ ID NO: 29241 - protein, 9 aa, synthetic construct
  source 1..9: note = Seed: ILDITPCSF
IADITPCSI

SEQ ID NO: 29242 - protein, 9 aa, synthetic construct
  source 1..9: note = Seed: ILDITPCSF
IADITPCSL

SEQ ID NO: 29243 - protein, 9 aa, synthetic construct
  source 1..9: note = Seed: ILDITPCSF
IADITPCSM

SEQ ID NO: 29244 - protein, 9 aa, synthetic construct
  source 1..9: note = Seed: ILDITPCSF
IADITPCSV

SEQ ID NO: 29245 - protein, 9 aa, synthetic construct
  source 1..9: note = Seed: ILDITPCSF
IADITPCSY

SEQ ID NO: 29246 - protein, 9 aa, synthetic construct
  source 1..9: note = Seed: IADKYVRNL
IADKYVRNM

SEQ ID NO: 29247 - protein, 9 aa, synthetic construct
  source 1..9: note = Seed: INDMILSLL
IADMILSLF

SEQ ID NO: 29248 - protein, 9 aa, synthetic construct
  source 1..9: note = Seed: INDMILSLL
IADMILSLI

SEQ ID NO: 29249 - protein, 9 aa, synthetic construct
  source 1..9: note = Seed: INDMILSLL
IADMILSLL

SEQ ID NO: 29250 - protein, 9 aa, synthetic construct
  source 1..9: note = Seed: INDMILSLL
IADMILSLM

SEQ ID NO: 29251 - protein, 9 aa, synthetic construct
  source 1..9: note = Seed: INDMILSLL
IADMILSLV

SEQ ID NO: 29252 - protein, 9 aa, synthetic construct
  source 1..9: note = Seed: ISDYDYYRY
IADYDYYRY

SEQ ID NO: 29253 - protein, 9 aa, synthetic construct
  source 1..9: note = Seed: IPFAMQMAY
IAFAMQMAA

SEQ ID NO: 29254 - protein, 9 aa, synthetic construct
  source 1..9: note = Seed: IPFAMQMAY
IAFAMQMAF

SEQ ID NO: 29255 - protein, 9 aa, synthetic construct
  source 1..9: note = Seed: IPFAMQMAY
IAFAMQMAI

SEQ ID NO: 29256 - protein, 9 aa, synthetic construct
  source 1..9: note = Seed: IPFAMQMAY
IAFAMQMAL

SEQ ID NO: 29257 - protein, 9 aa, synthetic construct
  source 1..9: note = Seed: IPFAMQMAY
IAFAMQMAM

SEQ ID NO: 29258 - protein, 9 aa, synthetic construct
  source 1..9: note = Seed: IPFAMQMAY
IAFAMQMAV

SEQ ID NO: 29259 - protein, 9 aa, synthetic construct
  source 1..9: note = Seed: IPFAMQMAY
IAFAMQMAW

SEQ ID NO: 29260 - protein, 9 aa, synthetic construct
  source 1..9: note = Seed: IPFAMQMAY
IAFAMQMAY

SEQ ID NO: 29261 - protein, 10 aa, synthetic construct
  source 1..10: note = Seed: IPFAMQMAYR
IAFAMQMAYK

SEQ ID NO: 29262 - protein, 10 aa, synthetic construct
  source 1..10: note = Seed: IPFAMQMAYR
IAFAMQMAYR

SEQ ID NO: 29263 - protein, 11 aa, synthetic construct
  source 1..11: note = Seed: IPFAMQMAYRF
IAFAMQMAYRW

SEQ ID NO: 29264 - protein, 10 aa, synthetic construct
  source 1..10: note = Seed: IPFAMQMAYR
IAFAMQMAYY

SEQ ID NO: 29265 - protein, 9 aa, synthetic construct
  source 1..9: note = Seed: IFFASFYYV
IAFASFYYA

SEQ ID NO: 29266 - protein, 9 aa, synthetic construct
  source 1..9: note = Seed: IFFASFYYV
IAFASFYYF

SEQ ID NO: 29267 - protein, 9 aa, synthetic construct
  source 1..9: note = Seed: IFFASFYYV
IAFASFYYI

SEQ ID NO: 29268 - protein, 9 aa, synthetic construct
  source 1..9: note = Seed: IFFASFYYV
IAFASFYYK

SEQ ID NO: 29269 - protein, 9 aa, synthetic construct
  source 1..9: note = Seed: IFFASFYYV
IAFASFYYL

SEQ ID NO: 29270 - protein, 9 aa, synthetic construct
  source 1..9: note = Seed: IFFASFYYV
IAFASFYYM

SEQ ID NO: 29271 - protein, 9 aa, synthetic construct
  source 1..9: note = Seed: IFFASFYYV
IAFASFYYR

SEQ ID NO: 29272 - protein, 9 aa, synthetic construct
  source 1..9: note = Seed: IFFASFYYV
IAFASFYYV

SEQ ID NO: 29273 - protein, 10 aa, synthetic construct
  source 1..10: note = Seed: IFFASFYYVW
IAFASFYYVF

SEQ ID NO: 29274 - protein, 10 aa, synthetic construct
  source 1..10: note = Seed: IFFASFYYVW
IAFASFYYVW

SEQ ID NO: 29275 - protein, 11 aa, synthetic construct
  source 1..11: note = Seed: IFFASFYYVWK
IAFASFYYVWK

SEQ ID NO: 29276 - protein, 11 aa, synthetic construct
  source 1..11: note = Seed: IFFASFYYVWK
IAFASFYYVWR

SEQ ID NO: 29277 - protein, 10 aa, synthetic construct
  source 1..10: note = Seed: IFFASFYYVW
IAFASFYYVY

SEQ ID NO: 29278 - protein, 9 aa, synthetic construct
  source 1..9: note = Seed: IFFASFYYV
IAFASFYYW

SEQ ID NO: 29279 - protein, 9 aa, synthetic construct
  source 1..9: note = Seed: IFFASFYYV
IAFASFYYY

SEQ ID NO: 29280 - protein, 10 aa, synthetic construct
  source 1..10: note = Seed: IAFGGCVFSY
IAFGGCVFSF

SEQ ID NO: 29281 - protein, 10 aa, synthetic construct
  source 1..10: note = Seed: IAFGGCVFSY
IAFGGCVFSK

SEQ ID NO: 29282 - protein, 10 aa, synthetic construct
  source 1..10: note = Seed: IAFGGCVFSY
IAFGGCVFSM

SEQ ID NO: 29283 - protein, 10 aa, synthetic construct
  source 1..10: note = Seed: IAFGGCVFSY
IAFGGCVFSR

SEQ ID NO: 29284 - protein, 10 aa, synthetic construct
  source 1..10: note = Seed: IAFGGCVFSY
IAFGGCVFSW

SEQ ID NO: 29285 - protein, 8 aa, synthetic construct
  source 1..8: note = Seed: IAFGGCVF
IAFGGCVY

SEQ ID NO: 29286 - protein, 9 aa, synthetic construct
  source 1..9: note = Seed: IFFITGNTL
IAFITGNTF

SEQ ID NO: 29287 - protein, 9 aa, synthetic construct
  source 1..9: note = Seed: IFFITGNTL
IAFITGNTL

SEQ ID NO: 29288 - protein, 9 aa, synthetic construct
  source 1..9: note = Seed: IFFITGNTL
IAFITGNTM

SEQ ID NO: 29289 - protein, 9 aa, synthetic construct
  source 1..9: note = Seed: IFFITGNTL
IAFITGNTY

SEQ ID NO: 29290 - protein, 9 aa, synthetic construct
  source 1..9: note = Seed: ILFTRFFYV
IAFTRFFYA

SEQ ID NO: 29291 - protein, 9 aa, synthetic construct
  source 1..9: note = Seed: ILFTRFFYV
IAFTRFFYF

SEQ ID NO: 29292 - protein, 9 aa, synthetic construct
  source 1..9: note = Seed: ILFTRFFYV
IAFTRFFYI

SEQ ID NO: 29293 - protein, 9 aa, synthetic construct
  source 1..9: note = Seed: ILFTRFFYV
IAFTRFFYK

SEQ ID NO: 29294 - protein, 9 aa, synthetic construct
  source 1..9: note = Seed: ILFTRFFYV
IAFTRFFYL

SEQ ID NO: 29295 - protein, 9 aa, synthetic construct
  source 1..9: note = Seed: ILFTRFFYV
IAFTRFFYM

SEQ ID NO: 29296 - protein, 9 aa, synthetic construct
  source 1..9: note = Seed: ILFTRFFYV
IAFTRFFYR

SEQ ID NO: 29297 - protein, 9 aa, synthetic construct
  source 1..9: note = Seed: ILFTRFFYV
IAFTRFFYV

SEQ ID NO: 29298 - protein, 10 aa, synthetic construct
  source 1..10: note = Seed: ILFTRFFYVL
IAFTRFFYVF

SEQ ID NO: 29299 - protein, 10 aa, synthetic construct
  source 1..10: note = Seed: ILFTRFFYVL
IAFTRFFYVK

SEQ ID NO: 29300 - protein, 10 aa, synthetic construct
  source 1..10: note = Seed: ILFTRFFYVL
IAFTRFFYVR

SEQ ID NO: 29301 - protein, 9 aa, synthetic construct
  source 1..9: note = Seed: ILFTRFFYV
IAFTRFFYY

SEQ ID NO: 29302 - protein, 10 aa, synthetic construct
  source 1..10: note = Seed: IDGYFKIYSK
IAGYFKIYSR

SEQ ID NO: 29303 - protein, 9 aa, synthetic construct
  source 1..9: note = Seed: IPIGAGICA
IAIGAGICF

SEQ ID NO: 29304 - protein, 9 aa, synthetic construct
  source 1..9: note = Seed: IPIGAGICA
IAIGAGICM

SEQ ID NO: 29305 - protein, 9 aa, synthetic construct
  source 1..9: note = Seed: IPIGAGICA
IAIGAGICY

SEQ ID NO: 29306 - protein, 9 aa, synthetic construct
  source 1..9: note = Seed: IAIPTNFTI
IAIPTNFTF

SEQ ID NO: 29307 - protein, 9 aa, synthetic construct
  source 1..9: note = Seed: IAIPTNFTI
IAIPTNFTL

SEQ ID NO: 29308 - protein, 9 aa, synthetic construct
  source 1..9: note = Seed: IAIPTNFTI
IAIPTNFTM

SEQ ID NO: 29309 - protein, 9 aa, synthetic construct
  source 1..9: note = Seed: IAIPTNFTI
IAIPTNFTV

SEQ ID NO: 29310 - protein, 9 aa, synthetic construct
  source 1..9: note = Seed: IAIPTNFTI
IAIPTNFTW

SEQ ID NO: 29311 - protein, 9 aa, synthetic construct
  source 1..9: note = Seed: IAIPTNFTI
IAIPTNFTY

SEQ ID NO: 29312 - protein, 8 aa, synthetic construct
  source 1..8: note = Seed: ITISSFKW
IAISSFKW

SEQ ID NO: 29313 - protein, 9 aa, synthetic construct
  source 1..9: note = Seed: IQITISSFK
IAITISSFK

SEQ ID NO: 29314 - protein, 10 aa, synthetic construct
  source 1..10: note = Seed: IQITISSFKW
IAITISSFKF

SEQ ID NO: 29315 - protein, 10 aa, synthetic construct
  source 1..10: note = Seed: IQITISSFKW
IAITISSFKW

SEQ ID NO: 29316 - protein, 10 aa, synthetic construct
  source 1..10: note = Seed: IQITISSFKW
IAITISSFKY

SEQ ID NO: 29317 - protein, 9 aa, synthetic construct
  source 1..9: note = Seed: IQITISSFK
IAITISSFR

SEQ ID NO: 29318 - protein, 9 aa, synthetic construct
  source 1..9: note = Seed: IGIVNNTVY
IAIVNNTVF

SEQ ID NO: 29319 - protein, 9 aa, synthetic construct
  source 1..9: note = Seed: IGIVNNTVY
IAIVNNTVL

SEQ ID NO: 29320 - protein, 9 aa, synthetic construct
  source 1..9: note = Seed: IGIVNNTVY
IAIVNNTVM

SEQ ID NO: 29321 - protein, 9 aa, synthetic construct
  source 1..9: note = Seed: IGIVNNTVY
IAIVNNTVV

SEQ ID NO: 29322 - protein, 9 aa, synthetic construct
  source 1..9: note = Seed: IGIVNNTVY
IAIVNNTVW

SEQ ID NO: 29323 - protein, 9 aa, synthetic construct
  source 1..9: note = Seed: IGIVNNTVY
IAIVNNTVY

SEQ ID NO: 29324 - protein, 9 aa, synthetic construct
  source 1..9: note = Seed: IVKTDGTLM
IAKTDGTLF

SEQ ID NO: 29325 - protein, 9 aa, synthetic construct
  source 1..9: note = Seed: IVKTDGTLM
IAKTDGTLW

SEQ ID NO: 29326 - protein, 9 aa, synthetic construct
  source 1..9: note = Seed: IVKTDGTLM
IAKTDGTLY

SEQ ID NO: 29327 - protein, 9 aa, synthetic construct
  source 1..9: note = Seed: IIKTIQPRV
IAKTIQPRK

SEQ ID NO: 29328 - protein, 10 aa, synthetic construct
  source 1..10: note = Seed: ISLAGSYKDW
IALAGSYKDW

SEQ ID NO: 29329 - protein, 10 aa, synthetic construct
  source 1..10: note = Seed: ILLAKDTTEA
IALAKDTTEL

SEQ ID NO: 29330 - protein, 10 aa, synthetic construct
  source 1..10: note = Seed: ILLAKDTTEA
IALAKDTTEV

SEQ ID NO: 29331 - protein, 9 aa, synthetic construct
  source 1..9: note = Seed: IALKGGKIV
IALKGGKIM

SEQ ID NO: 29332 - protein, 9 aa, synthetic construct
  source 1..9: note = Seed: IALKGGKIV
IALKGGKIY

SEQ ID NO: 29333 - protein, 10 aa, synthetic construct
  source 1..10: note = Seed: ILLLDQALVS
IALLDQALVV

SEQ ID NO: 29334 - protein, 10 aa, synthetic construct
  source 1..10: note = Seed: IMLVYCFLGY
IALVYCFLGR

SEQ ID NO: 29335 - protein, 9 aa, synthetic construct
  source 1..9: note = Seed: IAMACLVGL
IAMACLVGA

SEQ ID NO: 29336 - protein, 9 aa, synthetic construct
  source 1..9: note = Seed: IAMACLVGL
IAMACLVGF

SEQ ID NO: 29337 - protein, 9 aa, synthetic construct
  source 1..9: note = Seed: IAMACLVGL
IAMACLVGI

SEQ ID NO: 29338 - protein, 10 aa, synthetic construct
  source 1..10: note = Seed: IAMACLVGLM
IAMACLVGLL

SEQ ID NO: 29339 - protein, 10 aa, synthetic construct
  source 1..10: note = Seed: IAMACLVGLM
IAMACLVGLV

SEQ ID NO: 29340 - protein, 10 aa, synthetic construct
  source 1..10: note = Seed: IAMACLVGLM
IAMACLVGLW

SEQ ID NO: 29341 - protein, 10 aa, synthetic construct
  source 1..10: note = Seed: IAMACLVGLM
IAMACLVGLY

SEQ ID NO: 29342 - protein, 9 aa, synthetic construct
  source 1..9: note = Seed: IAMACLVGL
IAMACLVGM

SEQ ID NO: 29343 - protein, 9 aa, synthetic construct
  source 1..9: note = Seed: IAMACLVGL
IAMACLVGV

SEQ ID NO: 29344 - protein, 9 aa, synthetic construct
  source 1..9: note = Seed: IAMACLVGL
IAMACLVGW

SEQ ID NO: 29345 - protein, 9 aa, synthetic construct
  source 1..9: note = Seed: IAMACLVGL
IAMACLVGY

SEQ ID NO: 29346 - protein, 10 aa, synthetic construct
  source 1..10: note = Seed: ISMMGFKMNY
IAMMGFKMNF

SEQ ID NO: 29347 - protein, 10 aa, synthetic construct
  source 1..10: note = Seed: ISMMGFKMNY
IAMMGFKMNK

SEQ ID NO: 29348 - protein, 10 aa, synthetic construct
  source 1..10: note = Seed: ISMMGFKMNY
IAMMGFKMNR

SEQ ID NO: 29349 - protein, 10 aa, synthetic construct
  source 1..10: note = Seed: ISMMGFKMNY
IAMMGFKMNW

SEQ ID NO: 29350 - protein, 10 aa, synthetic construct
  source 1..10: note = Seed: ISMMGFKMNY
IAMMGFKMNY

SEQ ID NO: 29351 - protein, 9 aa, synthetic construct
  source 1..9: note = Seed: ISNEKQEIL
IANEKQEIF

SEQ ID NO: 29352 - protein, 9 aa, synthetic construct
  source 1..9: note = Seed: ISNEKQEIL
IANEKQEIL

SEQ ID NO: 29353 - protein, 9 aa, synthetic construct
  source 1..9: note = Seed: ISNEKQEIL
IANEKQEIM

SEQ ID NO: 29354 - protein, 9 aa, synthetic construct
  source 1..9: note = Seed: ISNEKQEIL
IANEKQEIY

SEQ ID NO: 29355 - protein, 9 aa, synthetic construct
  source 1..9: note = Seed: IKNFKSVLY
IANFKSVLF

SEQ ID NO: 29356 - protein, 9 aa, synthetic construct
  source 1..9: note = Seed: IKNFKSVLY
IANFKSVLY

SEQ ID NO: 29357 - protein, 10 aa, synthetic construct
  source 1..10: note = Seed: IKNFKSVLYY
IANFKSVLYF

SEQ ID NO: 29358 - protein, 10 aa, synthetic construct
  source 1..10: note = Seed: IKNFKSVLYY
IANFKSVLYY

SEQ ID NO: 29359 - protein, 11 aa, synthetic construct
  source 1..11: note = Seed: ITNLCPFGEVF
IANLCPFGEVW

SEQ ID NO: 29360 - protein, 9 aa, synthetic construct
  source 1..9: note = Seed: IVNNWLKQL
IANNWLKQF

SEQ ID NO: 29361 - protein, 9 aa, synthetic construct
  source 1..9: note = Seed: IVNNWLKQL
IANNWLKQL

SEQ ID NO: 29362 - protein, 9 aa, synthetic construct
  source 1..9: note = Seed: IVNNWLKQL
IANNWLKQM

SEQ ID NO: 29363 - protein, 9 aa, synthetic construct
  source 1..9: note = Seed: IVNNWLKQL
IANNWLKQV

SEQ ID NO: 29364 - protein, 9 aa, synthetic construct
  source 1..9: note = Seed: IVNNWLKQL
IANNWLKQY

SEQ ID NO: 29365 - protein, 9 aa, synthetic construct
  source 1..9: note = Seed: IVNSVLLFL
IANSVLLFF

SEQ ID NO: 29366 - protein, 9 aa, synthetic construct
  source 1..9: note = Seed: IVNSVLLFL
IANSVLLFI

SEQ ID NO: 29367 - protein, 9 aa, synthetic construct
  source 1..9: note = Seed: IVNSVLLFL
IANSVLLFL

SEQ ID NO: 29368 - protein, 9 aa, synthetic construct
  source 1..9: note = Seed: IVNSVLLFL
IANSVLLFM

SEQ ID NO: 29369 - protein, 9 aa, synthetic construct
  source 1..9: note = Seed: IVNSVLLFL
IANSVLLFV

SEQ ID NO: 29370 - protein, 9 aa, synthetic construct
  source 1..9: note = Seed: IVNSVLLFL
IANSVLLFW

SEQ ID NO: 29371 - protein, 9 aa, synthetic construct
  source 1..9: note = Seed: IVNSVLLFL
IANSVLLFY

SEQ ID NO: 29372 - protein, 8 aa, synthetic construct
  source 1..8: note = Seed: ISNSWLMW
IANSWLMW

SEQ ID NO: 29373 - protein, 9 aa, synthetic construct
  source 1..9: note = Seed: ISNSWLMWL
IANSWLMWF

SEQ ID NO: 29374 - protein, 9 aa, synthetic construct
  source 1..9: note = Seed: ISNSWLMWL
IANSWLMWL

SEQ ID NO: 29375 - protein, 10 aa, synthetic construct
  source 1..10: note = Seed: ISNSWLMWLI
IANSWLMWLF

SEQ ID NO: 29376 - protein, 10 aa, synthetic construct
  source 1..10: note = Seed: ISNSWLMWLI
IANSWLMWLW

SEQ ID NO: 29377 - protein, 9 aa, synthetic construct
  source 1..9: note = Seed: ISNSWLMWL
IANSWLMWM

SEQ ID NO: 29378 - protein, 9 aa, synthetic construct
  source 1..9: note = Seed: ISNSWLMWL
IANSWLMWV

SEQ ID NO: 29379 - protein, 9 aa, synthetic construct
  source 1..9: note = Seed: ISNSWLMWL
IANSWLMWW

SEQ ID NO: 29380 - protein, 9 aa, synthetic construct
  source 1..9: note = Seed: ISNSWLMWL
IANSWLMWY

SEQ ID NO: 29381 - protein, 10 aa, synthetic construct
  source 1..10: note = Seed: ISPYNSQNAV
IAPYNSQNAA

SEQ ID NO: 29382 - protein, 10 aa, synthetic construct
  source 1..10: note = Seed: ISPYNSQNAV
IAPYNSQNAL

SEQ ID NO: 29383 - protein, 11 aa, synthetic construct
  source 1..11: note = Seed: IAQFAPSASAF
IAQFAPSASAM

SEQ ID NO: 29384 - protein, 11 aa, synthetic construct
  source 1..11: note = Seed: IAQFAPSASAF
IAQFAPSASAY

SEQ ID NO: 29385 - protein, 10 aa, synthetic construct
  source 1..10: note = Seed: IAQFAPSASA
IAQFAPSASF

SEQ ID NO: 29386 - protein, 10 aa, synthetic construct
  source 1..10: note = Seed: IAQFAPSASA
IAQFAPSASL

SEQ ID NO: 29387 - protein, 10 aa, synthetic construct
  source 1..10: note = Seed: IAQFAPSASA
IAQFAPSASM

SEQ ID NO: 29388 - protein, 10 aa, synthetic construct
  source 1..10: note = Seed: IAQFAPSASA
IAQFAPSASW

SEQ ID NO: 29389 - protein, 10 aa, synthetic construct
  source 1..10: note = Seed: IAQFAPSASA
IAQFAPSASY

SEQ ID NO: 29390 - protein, 9 aa, synthetic construct
  source 1..9: note = Seed: IMQLFFSYF
IAQLFFSYF

SEQ ID NO: 29391 - protein, 11 aa, synthetic construct
  source 1..11: note = Seed: IMQLFFSYFAV
IAQLFFSYFAV

SEQ ID NO: 29392 - protein, 10 aa, synthetic construct
  source 1..10: note = Seed: IMQLFFSYFA
IAQLFFSYFV

SEQ ID NO: 29393 - protein, 9 aa, synthetic construct
  source 1..9: note = Seed: IMQLFFSYF
IAQLFFSYY

SEQ ID NO: 29394 - protein, 9 aa, synthetic construct
  source 1..9: note = Seed: IVQLSEISM
IAQLSEISF

SEQ ID NO: 29395 - protein, 9 aa, synthetic construct
  source 1..9: note = Seed: IVQLSEISM
IAQLSEISL

SEQ ID NO: 29396 - protein, 9 aa, synthetic construct
  source 1..9: note = Seed: IVQLSEISM
IAQLSEISM

SEQ ID NO: 29397 - protein, 9 aa, synthetic construct
  source 1..9: note = Seed: IVQLSEISM
IAQLSEISY

SEQ ID NO: 29398 - protein, 9 aa, synthetic construct
  source 1..9: note = Seed: IAQYTSALL
IAQYTSALF

SEQ ID NO: 29399 - protein, 9 aa, synthetic construct
  source 1..9: note = Seed: IAQYTSALL
IAQYTSALM

SEQ ID NO: 29400 - protein, 9 aa, synthetic construct
  source 1..9: note = Seed: IAQYTSALL
IAQYTSALW

SEQ ID NO: 29401 - protein, 9 aa, synthetic construct
  source 1..9: note = Seed: IAQYTSALL
IAQYTSALY

SEQ ID NO: 29402 - protein, 8 aa, synthetic construct
  source 1..8: note = Seed: IAQYTSAL
IAQYTSAM

SEQ ID NO: 29403 - protein, 9 aa, synthetic construct
  source 1..9: note = Seed: IERFVSLAI
IARFVSLAF

SEQ ID NO: 29404 - protein, 9 aa, synthetic construct
  source 1..9: note = Seed: IERFVSLAI
IARFVSLAM

SEQ ID NO: 29405 - protein, 9 aa, synthetic construct
  source 1..9: note = Seed: IERFVSLAI
IARFVSLAY

SEQ ID NO: 29406 - protein, 9 aa, synthetic construct
  source 1..9: note = Seed: IRRPFLCCK
IARPFLCCK

SEQ ID NO: 29407 - protein, 9 aa, synthetic construct
  source 1..9: note = Seed: ISRQRLTKY
IARQRLTKF

SEQ ID NO: 29408 - protein, 9 aa, synthetic construct
  source 1..9: note = Seed: ISRQRLTKY
IARQRLTKK

SEQ ID NO: 29409 - protein, 9 aa, synthetic construct
  source 1..9: note = Seed: ISRQRLTKY
IARQRLTKM

SEQ ID NO: 29410 - protein, 9 aa, synthetic construct
  source 1..9: note = Seed: ISRQRLTKY
IARQRLTKW

SEQ ID NO: 29411 - protein, 10 aa, synthetic construct
  source 1..10: note = Seed: ITSAVLQSGF
IASAVLQSGF

SEQ ID NO: 29412 - protein, 10 aa, synthetic construct
  source 1..10: note = Seed: ITSAVLQSGF
IASAVLQSGW

SEQ ID NO: 29413 - protein, 10 aa, synthetic construct
  source 1..10: note = Seed: ITSAVLQSGF
IASAVLQSGY

SEQ ID NO: 29414 - protein, 8 aa, synthetic construct
  source 1..8: note = Seed: IASEFSSL
IASEFSSM

SEQ ID NO: 29415 - protein, 9 aa, synthetic construct
  source 1..9: note = Seed: IASFRLFAR
IASFRLFAK

SEQ ID NO: 29416 - protein, 9 aa, synthetic construct
  source 1..9: note = Seed: IKSQDLSVV
IASQDLSVF

SEQ ID NO: 29417 - protein, 9 aa, synthetic construct
  source 1..9: note = Seed: IKSQDLSVV
IASQDLSVY

SEQ ID NO: 29418 - protein, 9 aa, synthetic construct
  source 1..9: note = Seed: IVSTIQRKY
IASTIQRKF

SEQ ID NO: 29419 - protein, 9 aa, synthetic construct
  source 1..9: note = Seed: IVSTIQRKY
IASTIQRKL

SEQ ID NO: 29420 - protein, 9 aa, synthetic construct
  source 1..9: note = Seed: IVSTIQRKY
IASTIQRKM

SEQ ID NO: 29421 - protein, 9 aa, synthetic construct
  source 1..9: note = Seed: IVSTIQRKY
IASTIQRKW

SEQ ID NO: 29422 - protein, 9 aa, synthetic construct
  source 1..9: note = Seed: IVSTIQRKY
IASTIQRKY

SEQ ID NO: 29423 - protein, 10 aa, synthetic construct
  source 1..10: note = Seed: ICSTMTNRQF
IASTMTNRQW

SEQ ID NO: 29424 - protein, 9 aa, synthetic construct
  source 1..9: note = Seed: ISSVLNDIL
IASVLNDIW

SEQ ID NO: 29425 - protein, 10 aa, synthetic construct
  source 1..10: note = Seed: ILTALRLCAY
IATALRLCAW

SEQ ID NO: 29426 - protein, 9 aa, synthetic construct
  source 1..9: note = Seed: ISTIGVCSM
IATIGVCSF

SEQ ID NO: 29427 - protein, 9 aa, synthetic construct
  source 1..9: note = Seed: ISTIGVCSM
IATIGVCSI

SEQ ID NO: 29428 - protein, 9 aa, synthetic construct
  source 1..9: note = Seed: ISTIGVCSM
IATIGVCSL

SEQ ID NO: 29429 - protein, 9 aa, synthetic construct
  source 1..9: note = Seed: ISTIGVCSM
IATIGVCSM

SEQ ID NO: 29430 - protein, 9 aa, synthetic construct
  source 1..9: note = Seed: ISTIGVCSM
IATIGVCSV

SEQ ID NO: 29431 - protein, 9 aa, synthetic construct
  source 1..9: note = Seed: ISTIGVCSM
IATIGVCSW

SEQ ID NO: 29432 - protein, 9 aa, synthetic construct
  source 1..9: note = Seed: ISTIGVCSM
IATIGVCSY

SEQ ID NO: 29433 - protein, 10 aa, synthetic construct
  source 1..10: note = Seed: IETISLAGSY
IATISLAGSF

SEQ ID NO: 29434 - protein, 10 aa, synthetic construct
  source 1..10: note = Seed: IETISLAGSY
IATISLAGSW

SEQ ID NO: 29435 - protein, 10 aa, synthetic construct
  source 1..10: note = Seed: IETISLAGSY
IATISLAGSY

SEQ ID NO: 29436 - protein, 10 aa, synthetic construct
  source 1..10: note = Seed: IPTITQMNLK
IATITQMNLK

SEQ ID NO: 29437 - protein, 10 aa, synthetic construct
  source 1..10: note = Seed: IPTITQMNLK
IATITQMNLR

SEQ ID NO: 29438 - protein, 9 aa, synthetic construct
  source 1..9: note = Seed: IPTITQMNL
IATITQMNY

SEQ ID NO: 29439 - protein, 11 aa, synthetic construct
  source 1..11: note = Seed: INTLNDLNETL
IATLNDLNETL

SEQ ID NO: 29440 - protein, 11 aa, synthetic construct
  source 1..11: note = Seed: INTLNDLNETL
IATLNDLNETV

SEQ ID NO: 29441 - protein, 9 aa, synthetic construct
  source 1..9: note = Seed: IPTNFTISV
IATNFTISF

SEQ ID NO: 29442 - protein, 9 aa, synthetic construct
  source 1..9: note = Seed: IPTNFTISV
IATNFTISM

SEQ ID NO: 29443 - protein, 9 aa, synthetic construct
  source 1..9: note = Seed: IPTNFTISV
IATNFTISW

SEQ ID NO: 29444 - protein, 9 aa, synthetic construct
  source 1..9: note = Seed: IPTNFTISV
IATNFTISY

SEQ ID NO: 29445 - protein, 9 aa, synthetic construct
  source 1..9: note = Seed: IATNGPLKV
IATNGPLKF

SEQ ID NO: 29446 - protein, 9 aa, synthetic construct
  source 1..9: note = Seed: IATNGPLKV
IATNGPLKL

SEQ ID NO: 29447 - protein, 9 aa, synthetic construct
  source 1..9: note = Seed: IATNGPLKV
IATNGPLKM

SEQ ID NO: 29448 - protein, 9 aa, synthetic construct
  source 1..9: note = Seed: IATNGPLKV
IATNGPLKY

SEQ ID NO: 29449 - protein, 9 aa, synthetic construct
  source 1..9: note = Seed: IMTRCLAVH
IATRCLAVF

SEQ ID NO: 29450 - protein, 9 aa, synthetic construct
  source 1..9: note = Seed: IMTRCLAVH
IATRCLAVY

SEQ ID NO: 29451 - protein, 10 aa, synthetic construct
  source 1..10: note = Seed: IGTSKFYGGW
IATSKFYGGW

SEQ ID NO: 29452 - protein, 9 aa, synthetic construct
  source 1..9: note = Seed: ILTSLLVLV
IATSLLVLV

SEQ ID NO: 29453 - protein, 8 aa, synthetic construct
  source 1..8: note = Seed: IATVREVL
IATVREVM

SEQ ID NO: 29454 - protein, 9 aa, synthetic construct
  source 1..9: note = Seed: ITTYPGQGL
IATYPGQGF

SEQ ID NO: 29455 - protein, 9 aa, synthetic construct
  source 1..9: note = Seed: ITTYPGQGL
IATYPGQGL

SEQ ID NO: 29456 - protein, 9 aa, synthetic construct
  source 1..9: note = Seed: ITTYPGQGL
IATYPGQGM

SEQ ID NO: 29457 - protein, 9 aa, synthetic construct
  source 1..9: note = Seed: ITTYPGQGL
IATYPGQGW

SEQ ID NO: 29458 - protein, 9 aa, synthetic construct
  source 1..9: note = Seed: ITTYPGQGL
IATYPGQGY

SEQ ID NO: 29459 - protein, 9 aa, synthetic construct
  source 1..9: note = Seed: IFVDGVPFV
IAVDGVPFI

SEQ ID NO: 29460 - protein, 9 aa, synthetic construct
  source 1..9: note = Seed: IFVDGVPFV
IAVDGVPFV

SEQ ID NO: 29461 - protein, 9 aa, synthetic construct
  source 1..9: note = Seed: IVVFDEISM
IAVFDEISF

SEQ ID NO: 29462 - protein, 9 aa, synthetic construct
  source 1..9: note = Seed: IVVFDEISM
IAVFDEISL

SEQ ID NO: 29463 - protein, 9 aa, synthetic construct
  source 1..9: note = Seed: IVVFDEISM
IAVFDEISM

SEQ ID NO: 29464 - protein, 9 aa, synthetic construct
  source 1..9: note = Seed: IVVFDEISM
IAVFDEISW

SEQ ID NO: 29465 - protein, 9 aa, synthetic construct
  source 1..9: note = Seed: IVVFDEISM
IAVFDEISY

SEQ ID NO: 29466 - protein, 9 aa, synthetic construct
  source 1..9: note = Seed: IEVNSFSGY
IAVNSFSGF

SEQ ID NO: 29467 - protein, 9 aa, synthetic construct
  source 1..9: note = Seed: IEVNSFSGY
IAVNSFSGM

SEQ ID NO: 29468 - protein, 9 aa, synthetic construct
  source 1..9: note = Seed: IEVNSFSGY
IAVNSFSGY

SEQ ID NO: 29469 - protein, 9 aa, synthetic construct
  source 1..9: note = Seed: ITVNVLAWL
IAVNVLAWF

SEQ ID NO: 29470 - protein, 10 aa, synthetic construct
  source 1..10: note = Seed: ITVNVLAWLY
IAVNVLAWLF

SEQ ID NO: 29471 - protein, 10 aa, synthetic construct
  source 1..10: note = Seed: ITVNVLAWLY
IAVNVLAWLK

SEQ ID NO: 29472 - protein, 10 aa, synthetic construct
  source 1..10: note = Seed: ITVNVLAWLY
IAVNVLAWLR

SEQ ID NO: 29473 - protein, 10 aa, synthetic construct
  source 1..10: note = Seed: ITVNVLAWLY
IAVNVLAWLW

SEQ ID NO: 29474 - protein, 10 aa, synthetic construct
  source 1..10: note = Seed: ITVNVLAWLY
IAVNVLAWLY

SEQ ID NO: 29475 - protein, 9 aa, synthetic construct
  source 1..9: note = Seed: ITVNVLAWL
IAVNVLAWV

SEQ ID NO: 29476 - protein, 9 aa, synthetic construct
  source 1..9: note = Seed: ITVNVLAWL
IAVNVLAWW

SEQ ID NO: 29477 - protein, 9 aa, synthetic construct
  source 1..9: note = Seed: ITVNVLAWL
IAVNVLAWY

SEQ ID NO: 29478 - protein, 9 aa, synthetic construct
  source 1..9: note = Seed: ITVTPEANM
IAVTPEANF

SEQ ID NO: 29479 - protein, 9 aa, synthetic construct
  source 1..9: note = Seed: ITVTPEANM
IAVTPEANL

SEQ ID NO: 29480 - protein, 9 aa, synthetic construct
  source 1..9: note = Seed: ITVTPEANM
IAVTPEANM

SEQ ID NO: 29481 - protein, 9 aa, synthetic construct
  source 1..9: note = Seed: ITVTPEANM
IAVTPEANW

SEQ ID NO: 29482 - protein, 9 aa, synthetic construct
  source 1..9: note = Seed: ITVTPEANM
IAVTPEANY

SEQ ID NO: 29483 - protein, 9 aa, synthetic construct
  source 1..9: note = Seed: IGVTQNVLY
IAVTQNVLF

SEQ ID NO: 29484 - protein, 9 aa, synthetic construct
  source 1..9: note = Seed: IGVTQNVLY
IAVTQNVLW

SEQ ID NO: 29485 - protein, 9 aa, synthetic construct
  source 1..9: note = Seed: IGVTQNVLY
IAVTQNVLY

SEQ ID NO: 29486 - protein, 10 aa, synthetic construct
  source 1..10: note = Seed: IFYLITPVHV
IAYLITPVHF

SEQ ID NO: 29487 - protein, 10 aa, synthetic construct
  source 1..10: note = Seed: IFYLITPVHV
IAYLITPVHL

SEQ ID NO: 29488 - protein, 10 aa, synthetic construct
  source 1..10: note = Seed: IFYLITPVHV
IAYLITPVHW

SEQ ID NO: 29489 - protein, 10 aa, synthetic construct
  source 1..10: note = Seed: IDYTEISFML
IAYTEISFMF

SEQ ID NO: 29490 - protein, 10 aa, synthetic construct
  source 1..10: note = Seed: IDYTEISFML
IAYTEISFMI

SEQ ID NO: 29491 - protein, 10 aa, synthetic construct
  source 1..10: note = Seed: IDYTEISFML
IAYTEISFML

SEQ ID NO: 29492 - protein, 10 aa, synthetic construct
  source 1..10: note = Seed: IDYTEISFML
IAYTEISFMW

SEQ ID NO: 29493 - protein, 9 aa, synthetic construct
  source 1..9: note = Seed: IAYTMSLGA
IAYTMSLGF

SEQ ID NO: 29494 - protein, 9 aa, synthetic construct
  source 1..9: note = Seed: IAYTMSLGA
IAYTMSLGI

SEQ ID NO: 29495 - protein, 9 aa, synthetic construct
  source 1..9: note = Seed: IAYTMSLGA
IAYTMSLGL

SEQ ID NO: 29496 - protein, 9 aa, synthetic construct
  source 1..9: note = Seed: IAYTMSLGA
IAYTMSLGM

SEQ ID NO: 29497 - protein, 9 aa, synthetic construct
  source 1..9: note = Seed: IAYTMSLGA
IAYTMSLGV

SEQ ID NO: 29498 - protein, 9 aa, synthetic construct
  source 1..9: note = Seed: IAYTMSLGA
IAYTMSLGY

SEQ ID NO: 29499 - protein, 9 aa, synthetic construct
  source 1..9: note = Seed: IGYYRRATR
IAYYRRATR

SEQ ID NO: 29500 - protein, 10 aa, synthetic construct
  source 1..10: note = Seed: IGYYRRATRR
IAYYRRATRR

SEQ ID NO: 29501 - protein, 10 aa, synthetic construct
  source 1..10: note = Seed: ISAMVRMYIF
ICAMVRMYIW

SEQ ID NO: 29502 - protein, 9 aa, synthetic construct
  source 1..9: note = Seed: ISAMVRMYI
ICAMVRMYW

SEQ ID NO: 29503 - protein, 9 aa, synthetic construct
  source 1..9: note = Seed: IPFAMQMAY
ICFAMQMAF

SEQ ID NO: 29504 - protein, 9 aa, synthetic construct
  source 1..9: note = Seed: IPFAMQMAY
ICFAMQMAY

SEQ ID NO: 29505 - protein, 10 aa, synthetic construct
  source 1..10: note = Seed: IPFAMQMAYR
ICFAMQMAYR

SEQ ID NO: 29506 - protein, 11 aa, synthetic construct
  source 1..11: note = Seed: IPFAMQMAYRF
ICFAMQMAYRW

SEQ ID NO: 29507 - protein, 9 aa, synthetic construct
  source 1..9: note = Seed: IFFASFYYV
ICFASFYYK

SEQ ID NO: 29508 - protein, 9 aa, synthetic construct
  source 1..9: note = Seed: IFFASFYYV
ICFASFYYR

SEQ ID NO: 29509 - protein, 9 aa, synthetic construct
  source 1..9: note = Seed: IFFASFYYV
ICFASFYYV

SEQ ID NO: 29510 - protein, 10 aa, synthetic construct
  source 1..10: note = Seed: IFFASFYYVW
ICFASFYYVF

SEQ ID NO: 29511 - protein, 10 aa, synthetic construct
  source 1..10: note = Seed: IFFASFYYVW
ICFASFYYVW

SEQ ID NO: 29512 - protein, 10 aa, synthetic construct
  source 1..10: note = Seed: IFFASFYYVW
ICFASFYYVY

SEQ ID NO: 29513 - protein, 9 aa, synthetic construct
  source 1..9: note = Seed: IFFASFYYV
ICFASFYYY

SEQ ID NO: 29514 - protein, 10 aa, synthetic construct
  source 1..10: note = Seed: IAFGGCVFSY
ICFGGCVFSY

SEQ ID NO: 29515 - protein, 9 aa, synthetic construct
  source 1..9: note = Seed: ILFTRFFYV
ICFTRFFYK

SEQ ID NO: 29516 - protein, 9 aa, synthetic construct
  source 1..9: note = Seed: ILFTRFFYV
ICFTRFFYR

SEQ ID NO: 29517 - protein, 10 aa, synthetic construct
  source 1..10: note = Seed: ILFTRFFYVL
ICFTRFFYVF

SEQ ID NO: 29518 - protein, 10 aa, synthetic construct
  source 1..10: note = Seed: ILFTRFFYVL
ICFTRFFYVR

SEQ ID NO: 29519 - protein, 9 aa, synthetic construct
  source 1..9: note = Seed: ILFTRFFYV
ICFTRFFYY

SEQ ID NO: 29520 - protein, 9 aa, synthetic construct
  source 1..9: note = Seed: IAIPTNFTI
ICIPTNFTF

SEQ ID NO: 29521 - protein, 9 aa, synthetic construct
  source 1..9: note = Seed: IAIPTNFTI
ICIPTNFTW

SEQ ID NO: 29522 - protein, 9 aa, synthetic construct
  source 1..9: note = Seed: IAIPTNFTI
ICIPTNFTY

SEQ ID NO: 29523 - protein, 10 aa, synthetic construct
  source 1..10: note = Seed: IQITISSFKW
ICITISSFKW

SEQ ID NO: 29524 - protein, 10 aa, synthetic construct
  source 1..10: note = Seed: ILLAKDTTEA
ICLAKDTTEL

SEQ ID NO: 29525 - protein, 10 aa, synthetic construct
  source 1..10: note = Seed: ILLAKDTTEA
ICLAKDTTEV

SEQ ID NO: 29526 - protein, 10 aa, synthetic construct
  source 1..10: note = Seed: ILLLDQALVS
ICLLDQALVV

SEQ ID NO: 29527 - protein, 10 aa, synthetic construct
  source 1..10: note = Seed: IAMACLVGLM
ICMACLVGLL

SEQ ID NO: 29528 - protein, 10 aa, synthetic construct
  source 1..10: note = Seed: IAMACLVGLM
ICMACLVGLV

SEQ ID NO: 29529 - protein, 10 aa, synthetic construct
  source 1..10: note = Seed: ISMMGFKMNY
ICMMGFKMNK

SEQ ID NO: 29530 - protein, 10 aa, synthetic construct
  source 1..10: note = Seed: ISMMGFKMNY
ICMMGFKMNR

SEQ ID NO: 29531 - protein, 10 aa, synthetic construct
  source 1..10: note = Seed: ISMMGFKMNY
ICMMGFKMNY

SEQ ID NO: 29532 - protein, 10 aa, synthetic construct
  source 1..10: note = Seed: ISNSWLMWLI
ICNSWLMWLW

SEQ ID NO: 29533 - protein, 10 aa, synthetic construct
  source 1..10: note = Seed: ISPYNSQNAV
ICPYNSQNAA

SEQ ID NO: 29534 - protein, 10 aa, synthetic construct
  source 1..10: note = Seed: ISPYNSQNAV
ICPYNSQNAL

SEQ ID NO: 29535 - protein, 11 aa, synthetic construct
  source 1..11: note = Seed: IAQFAPSASAF
ICQFAPSASAF

SEQ ID NO: 29536 - protein, 11 aa, synthetic construct
  source 1..11: note = Seed: IAQFAPSASAF
ICQFAPSASAY

SEQ ID NO: 29537 - protein, 10 aa, synthetic construct
  source 1..10: note = Seed: IAQFAPSASA
ICQFAPSASF

SEQ ID NO: 29538 - protein, 10 aa, synthetic construct
  source 1..10: note = Seed: IAQFAPSASA
ICQFAPSASL

SEQ ID NO: 29539 - protein, 10 aa, synthetic construct
  source 1..10: note = Seed: IAQFAPSASA
ICQFAPSASM

SEQ ID NO: 29540 - protein, 10 aa, synthetic construct
  source 1..10: note = Seed: IAQFAPSASA
ICQFAPSASW

SEQ ID NO: 29541 - protein, 10 aa, synthetic construct
  source 1..10: note = Seed: IAQFAPSASA
ICQFAPSASY

SEQ ID NO: 29542 - protein, 11 aa, synthetic construct
  source 1..11: note = Seed: IMQLFFSYFAV
ICQLFFSYFAV

SEQ ID NO: 29543 - protein, 10 aa, synthetic construct
  source 1..10: note = Seed: IMQLFFSYFA
ICQLFFSYFV

SEQ ID NO: 29544 - protein, 10 aa, synthetic construct
  source 1..10: note = Seed: ITSAVLQSGF
ICSAVLQSGF

SEQ ID NO: 29545 - protein, 10 aa, synthetic construct
  source 1..10: note = Seed: ITSAVLQSGF
ICSAVLQSGW

SEQ ID NO: 29546 - protein, 10 aa, synthetic construct
  source 1..10: note = Seed: ICSTMTNRQF
ICSTMTNRQW

SEQ ID NO: 29547 - protein, 9 aa, synthetic construct
  source 1..9: note = Seed: ISSVLNDIL
ICSVLNDIW

SEQ ID NO: 29548 - protein, 10 aa, synthetic construct
  source 1..10: note = Seed: IETISLAGSY
ICTISLAGSF

SEQ ID NO: 29549 - protein, 10 aa, synthetic construct
  source 1..10: note = Seed: IETISLAGSY
ICTISLAGSW

SEQ ID NO: 29550 - protein, 10 aa, synthetic construct
  source 1..10: note = Seed: IETISLAGSY
ICTISLAGSY

SEQ ID NO: 29551 - protein, 11 aa, synthetic construct
  source 1..11: note = Seed: INTLNDLNETL
ICTLNDLNETL

SEQ ID NO: 29552 - protein, 11 aa, synthetic construct
  source 1..11: note = Seed: INTLNDLNETL
ICTLNDLNETV

SEQ ID NO: 29553 - protein, 10 aa, synthetic construct
  source 1..10: note = Seed: ITVNVLAWLY
ICVNVLAWLW

SEQ ID NO: 29554 - protein, 10 aa, synthetic construct
  source 1..10: note = Seed: IFYLITPVHV
ICYLITPVHF

SEQ ID NO: 29555 - protein, 10 aa, synthetic construct
  source 1..10: note = Seed: IFYLITPVHV
ICYLITPVHL

SEQ ID NO: 29556 - protein, 10 aa, synthetic construct
  source 1..10: note = Seed: IFYLITPVHV
ICYLITPVHW

SEQ ID NO: 29557 - protein, 10 aa, synthetic construct
  source 1..10: note = Seed: IDYTEISFML
ICYTEISFMF

SEQ ID NO: 29558 - protein, 10 aa, synthetic construct
  source 1..10: note = Seed: IDYTEISFML
ICYTEISFMI

SEQ ID NO: 29559 - protein, 10 aa, synthetic construct
  source 1..10: note = Seed: IDYTEISFML
ICYTEISFML

SEQ ID NO: 29560 - protein, 10 aa, synthetic construct
  source 1..10: note = Seed: IDYTEISFML
ICYTEISFMW

SEQ ID NO: 29561 - protein, 10 aa, synthetic construct
  source 1..10: note = Seed: ISAMVRMYIF
IDAMVRMYIW

SEQ ID NO: 29562 - protein, 10 aa, synthetic construct
  source 1..10: note = Seed: IPFAMQMAYR
IDFAMQMAYR

SEQ ID NO: 29563 - protein, 11 aa, synthetic construct
  source 1..11: note = Seed: IPFAMQMAYRF
IDFAMQMAYRW

SEQ ID NO: 29564 - protein, 9 aa, synthetic construct
  source 1..9: note = Seed: IFFASFYYV
IDFASFYYR

SEQ ID NO: 29565 - protein, 10 aa, synthetic construct
  source 1..10: note = Seed: IFFASFYYVW
IDFASFYYVF

SEQ ID NO: 29566 - protein, 10 aa, synthetic construct
  source 1..10: note = Seed: IFFASFYYVW
IDFASFYYVW

SEQ ID NO: 29567 - protein, 10 aa, synthetic construct
  source 1..10: note = Seed: IFFASFYYVW
IDFASFYYVY

SEQ ID NO: 29568 - protein, 9 aa, synthetic construct
  source 1..9: note = Seed: IFFASFYYV
IDFASFYYY

SEQ ID NO: 29569 - protein, 10 aa, synthetic construct
  source 1..10: note = Seed: IAFGGCVFSY
IDFGGCVFSY

SEQ ID NO: 29570 - protein, 9 aa, synthetic construct
  source 1..9: note = Seed: ILFTRFFYV
IDFTRFFYR

SEQ ID NO: 29571 - protein, 10 aa, synthetic construct
  source 1..10: note = Seed: ILFTRFFYVL
IDFTRFFYVF

SEQ ID NO: 29572 - protein, 9 aa, synthetic construct
  source 1..9: note = Seed: ILFTRFFYV
IDFTRFFYY

SEQ ID NO: 29573 - protein, 10 aa, synthetic construct
  source 1..10: note = Seed: ILLAKDTTEA
IDLAKDTTEL

SEQ ID NO: 29574 - protein, 10 aa, synthetic construct
  source 1..10: note = Seed: ILLAKDTTEA
IDLAKDTTEV

SEQ ID NO: 29575 - protein, 10 aa, synthetic construct
  source 1..10: note = Seed: ILLLDQALVS
IDLLDQALVV

SEQ ID NO: 29576 - protein, 10 aa, synthetic construct
  source 1..10: note = Seed: IAMACLVGLM
IDMACLVGLL

SEQ ID NO: 29577 - protein, 10 aa, synthetic construct
  source 1..10: note = Seed: IAMACLVGLM
IDMACLVGLV

SEQ ID NO: 29578 - protein, 10 aa, synthetic construct
  source 1..10: note = Seed: ISMMGFKMNY
IDMMGFKMNK

SEQ ID NO: 29579 - protein, 10 aa, synthetic construct
  source 1..10: note = Seed: ISMMGFKMNY
IDMMGFKMNR

SEQ ID NO: 29580 - protein, 10 aa, synthetic construct
  source 1..10: note = Seed: ISMMGFKMNY
IDMMGFKMNY

SEQ ID NO: 29581 - protein, 10 aa, synthetic construct
  source 1..10: note = Seed: ISPYNSQNAV
IDPYNSQNAA

SEQ ID NO: 29582 - protein, 10 aa, synthetic construct
  source 1..10: note = Seed: ISPYNSQNAV
IDPYNSQNAL

SEQ ID NO: 29583 - protein, 10 aa, synthetic construct
  source 1..10: note = Seed: IAQFAPSASA
IDQFAPSASF

SEQ ID NO: 29584 - protein, 10 aa, synthetic construct
  source 1..10: note = Seed: IAQFAPSASA
IDQFAPSASL

SEQ ID NO: 29585 - protein, 10 aa, synthetic construct
  source 1..10: note = Seed: IAQFAPSASA
IDQFAPSASM

SEQ ID NO: 29586 - protein, 10 aa, synthetic construct
  source 1..10: note = Seed: IAQFAPSASA
IDQFAPSASW

SEQ ID NO: 29587 - protein, 10 aa, synthetic construct
  source 1..10: note = Seed: IAQFAPSASA
IDQFAPSASY

SEQ ID NO: 29588 - protein, 11 aa, synthetic construct
  source 1..11: note = Seed: IMQLFFSYFAV
IDQLFFSYFAV

SEQ ID NO: 29589 - protein, 10 aa, synthetic construct
  source 1..10: note = Seed: IMQLFFSYFA
IDQLFFSYFV

SEQ ID NO: 29590 - protein, 10 aa, synthetic construct
  source 1..10: note = Seed: ITSAVLQSGF
IDSAVLQSGF

SEQ ID NO: 29591 - protein, 10 aa, synthetic construct
  source 1..10: note = Seed: ITSAVLQSGF
IDSAVLQSGW

SEQ ID NO: 29592 - protein, 10 aa, synthetic construct
  source 1..10: note = Seed: ICSTMTNRQF
IDSTMTNRQW

SEQ ID NO: 29593 - protein, 10 aa, synthetic construct
  source 1..10: note = Seed: IKTIQPRVEK
IDTIQPRVER

SEQ ID NO: 29594 - protein, 10 aa, synthetic construct
  source 1..10: note = Seed: IETISLAGSY
IDTISLAGSF

SEQ ID NO: 29595 - protein, 10 aa, synthetic construct
  source 1..10: note = Seed: IETISLAGSY
IDTISLAGSW

SEQ ID NO: 29596 - protein, 10 aa, synthetic construct
  source 1..10: note = Seed: IETISLAGSY
IDTISLAGSY

SEQ ID NO: 29597 - protein, 10 aa, synthetic construct
  source 1..10: note = Seed: IPTITQMNLK
IDTITQMNLR

SEQ ID NO: 29598 - protein, 11 aa, synthetic construct
  source 1..11: note = Seed: INTLNDLNETL
IDTLNDLNETL

SEQ ID NO: 29599 - protein, 11 aa, synthetic construct
  source 1..11: note = Seed: INTLNDLNETL
IDTLNDLNETV

SEQ ID NO: 29600 - protein, 10 aa, synthetic construct
  source 1..10: note = Seed: IFYLITPVHV
IDYLITPVHF

SEQ ID NO: 29601 - protein, 10 aa, synthetic construct
  source 1..10: note = Seed: IFYLITPVHV
IDYLITPVHL

SEQ ID NO: 29602 - protein, 10 aa, synthetic construct
  source 1..10: note = Seed: IFYLITPVHV
IDYLITPVHW

SEQ ID NO: 29603 - protein, 10 aa, synthetic construct
  source 1..10: note = Seed: IDYTEISFML
IDYTEISFMF

SEQ ID NO: 29604 - protein, 10 aa, synthetic construct
  source 1..10: note = Seed: IDYTEISFML
IDYTEISFMI

SEQ ID NO: 29605 - protein, 10 aa, synthetic construct
  source 1..10: note = Seed: IDYTEISFML
IDYTEISFMW

SEQ ID NO: 29606 - protein, 9 aa, synthetic construct
  source 1..9: note = Seed: IGAGICASY
IEAGICASF

SEQ ID NO: 29607 - protein, 9 aa, synthetic construct
  source 1..9: note = Seed: IGAGICASY
IEAGICASY

SEQ ID NO: 29608 - protein, 10 aa, synthetic construct
  source 1..10: note = Seed: ISAMVRMYIF
IEAMVRMYIW

SEQ ID NO: 29609 - protein, 9 aa, synthetic construct
  source 1..9: note = Seed: IPFAMQMAY
IEFAMQMAF

SEQ ID NO: 29610 - protein, 9 aa, synthetic construct
  source 1..9: note = Seed: IPFAMQMAY
IEFAMQMAL

SEQ ID NO: 29611 - protein, 9 aa, synthetic construct
  source 1..9: note = Seed: IPFAMQMAY
IEFAMQMAM

SEQ ID NO: 29612 - protein, 9 aa, synthetic construct
  source 1..9: note = Seed: IPFAMQMAY
IEFAMQMAY

SEQ ID NO: 29613 - protein, 10 aa, synthetic construct
  source 1..10: note = Seed: IPFAMQMAYR
IEFAMQMAYR

SEQ ID NO: 29614 - protein, 11 aa, synthetic construct
  source 1..11: note = Seed: IPFAMQMAYRF
IEFAMQMAYRW

SEQ ID NO: 29615 - protein, 9 aa, synthetic construct
  source 1..9: note = Seed: IFFASFYYV
IEFASFYYR

SEQ ID NO: 29616 - protein, 10 aa, synthetic construct
  source 1..10: note = Seed: IFFASFYYVW
IEFASFYYVF

SEQ ID NO: 29617 - protein, 10 aa, synthetic construct
  source 1..10: note = Seed: IFFASFYYVW
IEFASFYYVW

SEQ ID NO: 29618 - protein, 10 aa, synthetic construct
  source 1..10: note = Seed: IFFASFYYVW
IEFASFYYVY

SEQ ID NO: 29619 - protein, 9 aa, synthetic construct
  source 1..9: note = Seed: IFFASFYYV
IEFASFYYY

SEQ ID NO: 29620 - protein, 10 aa, synthetic construct
  source 1..10: note = Seed: IAFGGCVFSY
IEFGGCVFSF

SEQ ID NO: 29621 - protein, 10 aa, synthetic construct
  source 1..10: note = Seed: IAFGGCVFSY
IEFGGCVFSY

SEQ ID NO: 29622 - protein, 9 aa, synthetic construct
  source 1..9: note = Seed: IFFITGNTL
IEFITGNTF

SEQ ID NO: 29623 - protein, 9 aa, synthetic construct
  source 1..9: note = Seed: IFFITGNTL
IEFITGNTM

SEQ ID NO: 29624 - protein, 9 aa, synthetic construct
  source 1..9: note = Seed: IFFITGNTL
IEFITGNTY

SEQ ID NO: 29625 - protein, 9 aa, synthetic construct
  source 1..9: note = Seed: ILFTRFFYV
IEFTRFFYK

SEQ ID NO: 29626 - protein, 9 aa, synthetic construct
  source 1..9: note = Seed: ILFTRFFYV
IEFTRFFYR

SEQ ID NO: 29627 - protein, 10 aa, synthetic construct
  source 1..10: note = Seed: ILFTRFFYVL
IEFTRFFYVF

SEQ ID NO: 29628 - protein, 10 aa, synthetic construct
  source 1..10: note = Seed: ILFTRFFYVL
IEFTRFFYVR

SEQ ID NO: 29629 - protein, 9 aa, synthetic construct
  source 1..9: note = Seed: ILFTRFFYV
IEFTRFFYY

SEQ ID NO: 29630 - protein, 9 aa, synthetic construct
  source 1..9: note = Seed: IAIPTNFTI
IEIPTNFTF

SEQ ID NO: 29631 - protein, 9 aa, synthetic construct
  source 1..9: note = Seed: IAIPTNFTI
IEIPTNFTM

SEQ ID NO: 29632 - protein, 9 aa, synthetic construct
  source 1..9: note = Seed: IAIPTNFTI
IEIPTNFTY

SEQ ID NO: 29633 - protein, 9 aa, synthetic construct
  source 1..9: note = Seed: IGIVNNTVY
IEIVNNTVF

SEQ ID NO: 29634 - protein, 9 aa, synthetic construct
  source 1..9: note = Seed: IGIVNNTVY
IEIVNNTVY

SEQ ID NO: 29635 - protein, 10 aa, synthetic construct
  source 1..10: note = Seed: ILLAKDTTEA
IELAKDTTEL

SEQ ID NO: 29636 - protein, 10 aa, synthetic construct
  source 1..10: note = Seed: ILLAKDTTEA
IELAKDTTEV

SEQ ID NO: 29637 - protein, 10 aa, synthetic construct
  source 1..10: note = Seed: ILLLDQALVS
IELLDQALVV

SEQ ID NO: 29638 - protein, 9 aa, synthetic construct
  source 1..9: note = Seed: IAMACLVGL
IEMACLVGF

SEQ ID NO: 29639 - protein, 10 aa, synthetic construct
  source 1..10: note = Seed: IAMACLVGLM
IEMACLVGLL

SEQ ID NO: 29640 - protein, 10 aa, synthetic construct
  source 1..10: note = Seed: IAMACLVGLM
IEMACLVGLV

SEQ ID NO: 29641 - protein, 9 aa, synthetic construct
  source 1..9: note = Seed: IAMACLVGL
IEMACLVGY

SEQ ID NO: 29642 - protein, 10 aa, synthetic construct
  source 1..10: note = Seed: ISMMGFKMNY
IEMMGFKMNF

SEQ ID NO: 29643 - protein, 10 aa, synthetic construct
  source 1..10: note = Seed: ISMMGFKMNY
IEMMGFKMNK

SEQ ID NO: 29644 - protein, 10 aa, synthetic construct
  source 1..10: note = Seed: ISMMGFKMNY
IEMMGFKMNR

SEQ ID NO: 29645 - protein, 10 aa, synthetic construct
  source 1..10: note = Seed: ISMMGFKMNY
IEMMGFKMNY

SEQ ID NO: 29646 - protein, 10 aa, synthetic construct
  source 1..10: note = Seed: ISPYNSQNAV
IEPYNSQNAA

SEQ ID NO: 29647 - protein, 10 aa, synthetic construct
  source 1..10: note = Seed: ISPYNSQNAV
IEPYNSQNAL

SEQ ID NO: 29648 - protein, 10 aa, synthetic construct
  source 1..10: note = Seed: IAQFAPSASA
IEQFAPSASF

SEQ ID NO: 29649 - protein, 10 aa, synthetic construct
  source 1..10: note = Seed: IAQFAPSASA
IEQFAPSASL

SEQ ID NO: 29650 - protein, 10 aa, synthetic construct
  source 1..10: note = Seed: IAQFAPSASA
IEQFAPSASM

SEQ ID NO: 29651 - protein, 10 aa, synthetic construct
  source 1..10: note = Seed: IAQFAPSASA
IEQFAPSASW

SEQ ID NO: 29652 - protein, 10 aa, synthetic construct
  source 1..10: note = Seed: IAQFAPSASA
IEQFAPSASY

SEQ ID NO: 29653 - protein, 11 aa, synthetic construct
  source 1..11: note = Seed: IMQLFFSYFAV
IEQLFFSYFAV

SEQ ID NO: 29654 - protein, 10 aa, synthetic construct
  source 1..10: note = Seed: IMQLFFSYFA
IEQLFFSYFV

SEQ ID NO: 29655 - protein, 9 aa, synthetic construct
  source 1..9: note = Seed: IAQYTSALL
IEQYTSALF

SEQ ID NO: 29656 - protein, 9 aa, synthetic construct
  source 1..9: note = Seed: IAQYTSALL
IEQYTSALY

SEQ ID NO: 29657 - protein, 9 aa, synthetic construct
  source 1..9: note = Seed: IERFVSLAI
IERFVSLAA

SEQ ID NO: 29658 - protein, 9 aa, synthetic construct
  source 1..9: note = Seed: IERFVSLAI
IERFVSLAF

SEQ ID NO: 29659 - protein, 9 aa, synthetic construct
  source 1..9: note = Seed: IERFVSLAI
IERFVSLAL

SEQ ID NO: 29660 - protein, 9 aa, synthetic construct
  source 1..9: note = Seed: IERFVSLAI
IERFVSLAM

SEQ ID NO: 29661 - protein, 9 aa, synthetic construct
  source 1..9: note = Seed: IERFVSLAI
IERFVSLAV

SEQ ID NO: 29662 - protein, 9 aa, synthetic construct
  source 1..9: note = Seed: IERFVSLAI
IERFVSLAY

SEQ ID NO: 29663 - protein, 10 aa, synthetic construct
  source 1..10: note = Seed: ITSAVLQSGF
IESAVLQSGF

SEQ ID NO: 29664 - protein, 10 aa, synthetic construct
  source 1..10: note = Seed: ITSAVLQSGF
IESAVLQSGW

SEQ ID NO: 29665 - protein, 9 aa, synthetic construct
  source 1..9: note = Seed: IKSQDLSVV
IESQDLSVF

SEQ ID NO: 29666 - protein, 10 aa, synthetic construct
  source 1..10: note = Seed: ICSTMTNRQF
IESTMTNRQW

SEQ ID NO: 29667 - protein, 10 aa, synthetic construct
  source 1..10: note = Seed: IKTIQPRVEK
IETIQPRVER

SEQ ID NO: 29668 - protein, 10 aa, synthetic construct
  source 1..10: note = Seed: IETISLAGSY
IETISLAGSF

SEQ ID NO: 29669 - protein, 10 aa, synthetic construct
  source 1..10: note = Seed: IETISLAGSY
IETISLAGSW

SEQ ID NO: 29670 - protein, 11 aa, synthetic construct
  source 1..11: note = Seed: IETISLAGSYK
IETISLAGSYR

SEQ ID NO: 29671 - protein, 10 aa, synthetic construct
  source 1..10: note = Seed: IPTITQMNLK
IETITQMNLR

SEQ ID NO: 29672 - protein, 11 aa, synthetic construct
  source 1..11: note = Seed: INTLNDLNETL
IETLNDLNETL

SEQ ID NO: 29673 - protein, 11 aa, synthetic construct
  source 1..11: note = Seed: INTLNDLNETL
IETLNDLNETV

SEQ ID NO: 29674 - protein, 9 aa, synthetic construct
  source 1..9: note = Seed: IMTRCLAVH
IETRCLAVF

SEQ ID NO: 29675 - protein, 9 aa, synthetic construct
  source 1..9: note = Seed: IEVNSFSGY
IEVNSFSGF

SEQ ID NO: 29676 - protein, 9 aa, synthetic construct
  source 1..9: note = Seed: IEVNSFSGY
IEVNSFSGM

SEQ ID NO: 29677 - protein, 9 aa, synthetic construct
  source 1..9: note = Seed: IEVNSFSGY
IEVNSFSGW

SEQ ID NO: 29678 - protein, 10 aa, synthetic construct
  source 1..10: note = Seed: ITVNVLAWLY
IEVNVLAWLY

SEQ ID NO: 29679 - protein, 10 aa, synthetic construct
  source 1..10: note = Seed: IFYLITPVHV
IEYLITPVHF

SEQ ID NO: 29680 - protein, 10 aa, synthetic construct
  source 1..10: note = Seed: IFYLITPVHV
IEYLITPVHL

SEQ ID NO: 29681 - protein, 10 aa, synthetic construct
  source 1..10: note = Seed: IFYLITPVHV
IEYLITPVHW

SEQ ID NO: 29682 - protein, 10 aa, synthetic construct
  source 1..10: note = Seed: IDYTEISFML
IEYTEISFMF

SEQ ID NO: 29683 - protein, 10 aa, synthetic construct
  source 1..10: note = Seed: IDYTEISFML
IEYTEISFMI

SEQ ID NO: 29684 - protein, 10 aa, synthetic construct
  source 1..10: note = Seed: IDYTEISFML
IEYTEISFML

SEQ ID NO: 29685 - protein, 10 aa, synthetic construct
  source 1..10: note = Seed: IDYTEISFML
IEYTEISFMW

SEQ ID NO: 29686 - protein, 9 aa, synthetic construct
  source 1..9: note = Seed: IGAGICASY
IFAGICASY

SEQ ID NO: 29687 - protein, 10 aa, synthetic construct
  source 1..10: note = Seed: ISAMVRMYIF
IFAMVRMYIW

SEQ ID NO: 29688 - protein, 9 aa, synthetic construct
  source 1..9: note = Seed: ISAMVRMYI
IFAMVRMYK

SEQ ID NO: 29689 - protein, 10 aa, synthetic construct
  source 1..10: note = Seed: IICISTKHFY
IFCISTKHFY

SEQ ID NO: 29690 - protein, 9 aa, synthetic construct
  source 1..9: note = Seed: ISDYDYYRY
IFDYDYYRY

SEQ ID NO: 29691 - protein, 9 aa, synthetic construct
  source 1..9: note = Seed: IPFAMQMAY
IFFAMQMAF

SEQ ID NO: 29692 - protein, 9 aa, synthetic construct
  source 1..9: note = Seed: IPFAMQMAY
IFFAMQMAI

SEQ ID NO: 29693 - protein, 9 aa, synthetic construct
  source 1..9: note = Seed: IPFAMQMAY
IFFAMQMAL

SEQ ID NO: 29694 - protein, 9 aa, synthetic construct
  source 1..9: note = Seed: IPFAMQMAY
IFFAMQMAM

SEQ ID NO: 29695 - protein, 9 aa, synthetic construct
  source 1..9: note = Seed: IPFAMQMAY
IFFAMQMAV

SEQ ID NO: 29696 - protein, 9 aa, synthetic construct
  source 1..9: note = Seed: IPFAMQMAY
IFFAMQMAY

SEQ ID NO: 29697 - protein, 10 aa, synthetic construct
  source 1..10: note = Seed: IPFAMQMAYR
IFFAMQMAYK

SEQ ID NO: 29698 - protein, 10 aa, synthetic construct
  source 1..10: note = Seed: IPFAMQMAYR
IFFAMQMAYR

SEQ ID NO: 29699 - protein, 11 aa, synthetic construct
  source 1..11: note = Seed: IPFAMQMAYRF
IFFAMQMAYRW

SEQ ID NO: 29700 - protein, 9 aa, synthetic construct
  source 1..9: note = Seed: IFFASFYYV
IFFASFYYF

SEQ ID NO: 29701 - protein, 9 aa, synthetic construct
  source 1..9: note = Seed: IFFASFYYV
IFFASFYYH

SEQ ID NO: 29702 - protein, 9 aa, synthetic construct
  source 1..9: note = Seed: IFFASFYYV
IFFASFYYI

SEQ ID NO: 29703 - protein, 9 aa, synthetic construct
  source 1..9: note = Seed: IFFASFYYV
IFFASFYYK

SEQ ID NO: 29704 - protein, 9 aa, synthetic construct
  source 1..9: note = Seed: IFFASFYYV
IFFASFYYL

SEQ ID NO: 29705 - protein, 9 aa, synthetic construct
  source 1..9: note = Seed: IFFASFYYV
IFFASFYYM

SEQ ID NO: 29706 - protein, 9 aa, synthetic construct
  source 1..9: note = Seed: IFFASFYYV
IFFASFYYR

SEQ ID NO: 29707 - protein, 10 aa, synthetic construct
  source 1..10: note = Seed: IFFASFYYVW
IFFASFYYVF

SEQ ID NO: 29708 - protein, 10 aa, synthetic construct
  source 1..10: note = Seed: IFFASFYYVW
IFFASFYYVI

SEQ ID NO: 29709 - protein, 10 aa, synthetic construct
  source 1..10: note = Seed: IFFASFYYVW
IFFASFYYVL

SEQ ID NO: 29710 - protein, 11 aa, synthetic construct
  source 1..11: note = Seed: IFFASFYYVWK
IFFASFYYVWR

SEQ ID NO: 29711 - protein, 10 aa, synthetic construct
  source 1..10: note = Seed: IFFASFYYVW
IFFASFYYVY

SEQ ID NO: 29712 - protein, 9 aa, synthetic construct
  source 1..9: note = Seed: IFFASFYYV
IFFASFYYW

SEQ ID NO: 29713 - protein, 9 aa, synthetic construct
  source 1..9: note = Seed: IFFASFYYV
IFFASFYYY

SEQ ID NO: 29714 - protein, 10 aa, synthetic construct
  source 1..10: note = Seed: IAFGGCVFSY
IFFGGCVFSF

SEQ ID NO: 29715 - protein, 10 aa, synthetic construct
  source 1..10: note = Seed: IAFGGCVFSY
IFFGGCVFSY

SEQ ID NO: 29716 - protein, 9 aa, synthetic construct
  source 1..9: note = Seed: IFFITGNTL
IFFITGNTF

SEQ ID NO: 29717 - protein, 9 aa, synthetic construct
  source 1..9: note = Seed: IFFITGNTL
IFFITGNTI

SEQ ID NO: 29718 - protein, 9 aa, synthetic construct
  source 1..9: note = Seed: IFFITGNTL
IFFITGNTM

SEQ ID NO: 29719 - protein, 9 aa, synthetic construct
  source 1..9: note = Seed: IFFITGNTL
IFFITGNTV

SEQ ID NO: 29720 - protein, 9 aa, synthetic construct
  source 1..9: note = Seed: IFFITGNTL
IFFITGNTW

SEQ ID NO: 29721 - protein, 9 aa, synthetic construct
  source 1..9: note = Seed: IFFITGNTL
IFFITGNTY

SEQ ID NO: 29722 - protein, 8 aa, synthetic construct
  source 1..8: note = Seed: ILFTRFFY
IFFTRFFY

SEQ ID NO: 29723 - protein, 9 aa, synthetic construct
  source 1..9: note = Seed: ILFTRFFYV
IFFTRFFYF

SEQ ID NO: 29724 - protein, 9 aa, synthetic construct
  source 1..9: note = Seed: ILFTRFFYV
IFFTRFFYH

SEQ ID NO: 29725 - protein, 9 aa, synthetic construct
  source 1..9: note = Seed: ILFTRFFYV
IFFTRFFYK

SEQ ID NO: 29726 - protein, 9 aa, synthetic construct
  source 1..9: note = Seed: ILFTRFFYV
IFFTRFFYM

SEQ ID NO: 29727 - protein, 9 aa, synthetic construct
  source 1..9: note = Seed: ILFTRFFYV
IFFTRFFYR

SEQ ID NO: 29728 - protein, 9 aa, synthetic construct
  source 1..9: note = Seed: ILFTRFFYV
IFFTRFFYV

SEQ ID NO: 29729 - protein, 10 aa, synthetic construct
  source 1..10: note = Seed: ILFTRFFYVL
IFFTRFFYVF

SEQ ID NO: 29730 - protein, 10 aa, synthetic construct
  source 1..10: note = Seed: ILFTRFFYVL
IFFTRFFYVK

SEQ ID NO: 29731 - protein, 10 aa, synthetic construct
  source 1..10: note = Seed: ILFTRFFYVL
IFFTRFFYVR

SEQ ID NO: 29732 - protein, 10 aa, synthetic construct
  source 1..10: note = Seed: ILFTRFFYVL
IFFTRFFYVW

SEQ ID NO: 29733 - protein, 9 aa, synthetic construct
  source 1..9: note = Seed: ILFTRFFYV
IFFTRFFYY

SEQ ID NO: 29734 - protein, 10 aa, synthetic construct
  source 1..10: note = Seed: IDGYFKIYSK
IFGYFKIYSK

SEQ ID NO: 29735 - protein, 10 aa, synthetic construct
  source 1..10: note = Seed: IDGYFKIYSK
IFGYFKIYSR

SEQ ID NO: 29736 - protein, 9 aa, synthetic construct
  source 1..9: note = Seed: IAIPTNFTI
IFIPTNFTF

SEQ ID NO: 29737 - protein, 9 aa, synthetic construct
  source 1..9: note = Seed: IAIPTNFTI
IFIPTNFTW

SEQ ID NO: 29738 - protein, 9 aa, synthetic construct
  source 1..9: note = Seed: IQITISSFK
IFITISSFK

SEQ ID NO: 29739 - protein, 9 aa, synthetic construct
  source 1..9: note = Seed: IQITISSFK
IFITISSFR

SEQ ID NO: 29740 - protein, 10 aa, synthetic construct
  source 1..10: note = Seed: ILLAKDTTEA
IFLAKDTTEI

SEQ ID NO: 29741 - protein, 10 aa, synthetic construct
  source 1..10: note = Seed: ILLAKDTTEA
IFLAKDTTEL

SEQ ID NO: 29742 - protein, 10 aa, synthetic construct
  source 1..10: note = Seed: ILLAKDTTEA
IFLAKDTTEV

SEQ ID NO: 29743 - protein, 10 aa, synthetic construct
  source 1..10: note = Seed: ILLLDQALVS
IFLLDQALVL

SEQ ID NO: 29744 - protein, 10 aa, synthetic construct
  source 1..10: note = Seed: ILLLDQALVS
IFLLDQALVV

SEQ ID NO: 29745 - protein, 11 aa, synthetic construct
  source 1..11: note = Seed: ILLNKHIDAYK
IFLNKHIDAYR

SEQ ID NO: 29746 - protein, 10 aa, synthetic construct
  source 1..10: note = Seed: IMLVYCFLGY
IFLVYCFLGR

SEQ ID NO: 29747 - protein, 10 aa, synthetic construct
  source 1..10: note = Seed: IMLVYCFLGY
IFLVYCFLGY

SEQ ID NO: 29748 - protein, 10 aa, synthetic construct
  source 1..10: note = Seed: IAMACLVGLM
IFMACLVGLL

SEQ ID NO: 29749 - protein, 10 aa, synthetic construct
  source 1..10: note = Seed: IAMACLVGLM
IFMACLVGLV

SEQ ID NO: 29750 - protein, 10 aa, synthetic construct
  source 1..10: note = Seed: ISMMGFKMNY
IFMMGFKMNK

SEQ ID NO: 29751 - protein, 10 aa, synthetic construct
  source 1..10: note = Seed: ISMMGFKMNY
IFMMGFKMNR

SEQ ID NO: 29752 - protein, 10 aa, synthetic construct
  source 1..10: note = Seed: ISMMGFKMNY
IFMMGFKMNY

SEQ ID NO: 29753 - protein, 10 aa, synthetic construct
  source 1..10: note = Seed: IKNFKSVLYY
IFNFKSVLYY

SEQ ID NO: 29754 - protein, 10 aa, synthetic construct
  source 1..10: note = Seed: ISPYNSQNAV
IFPYNSQNAA

SEQ ID NO: 29755 - protein, 10 aa, synthetic construct
  source 1..10: note = Seed: ISPYNSQNAV
IFPYNSQNAL

SEQ ID NO: 29756 - protein, 10 aa, synthetic construct
  source 1..10: note = Seed: ISPYNSQNAV
IFPYNSQNAM

SEQ ID NO: 29757 - protein, 11 aa, synthetic construct
  source 1..11: note = Seed: IAQFAPSASAF
IFQFAPSASAF

SEQ ID NO: 29758 - protein, 11 aa, synthetic construct
  source 1..11: note = Seed: IAQFAPSASAF
IFQFAPSASAM

SEQ ID NO: 29759 - protein, 11 aa, synthetic construct
  source 1..11: note = Seed: IAQFAPSASAF
IFQFAPSASAY

SEQ ID NO: 29760 - protein, 10 aa, synthetic construct
  source 1..10: note = Seed: IAQFAPSASA
IFQFAPSASF

SEQ ID NO: 29761 - protein, 10 aa, synthetic construct
  source 1..10: note = Seed: IAQFAPSASA
IFQFAPSASI

SEQ ID NO: 29762 - protein, 10 aa, synthetic construct
  source 1..10: note = Seed: IAQFAPSASA
IFQFAPSASL

SEQ ID NO: 29763 - protein, 10 aa, synthetic construct
  source 1..10: note = Seed: IAQFAPSASA
IFQFAPSASM

SEQ ID NO: 29764 - protein, 10 aa, synthetic construct
  source 1..10: note = Seed: IAQFAPSASA
IFQFAPSASW

SEQ ID NO: 29765 - protein, 10 aa, synthetic construct
  source 1..10: note = Seed: IAQFAPSASA
IFQFAPSASY

SEQ ID NO: 29766 - protein, 9 aa, synthetic construct
  source 1..9: note = Seed: IMQLFFSYF
IFQLFFSYF

SEQ ID NO: 29767 - protein, 11 aa, synthetic construct
  source 1..11: note = Seed: IMQLFFSYFAV
IFQLFFSYFAV

SEQ ID NO: 29768 - protein, 10 aa, synthetic construct
  source 1..10: note = Seed: IMQLFFSYFA
IFQLFFSYFI

SEQ ID NO: 29769 - protein, 10 aa, synthetic construct
  source 1..10: note = Seed: IMQLFFSYFA
IFQLFFSYFV

SEQ ID NO: 29770 - protein, 9 aa, synthetic construct
  source 1..9: note = Seed: IMQLFFSYF
IFQLFFSYY

SEQ ID NO: 29771 - protein, 10 aa, synthetic construct
  source 1..10: note = Seed: IVQMLSDTLK
IFQMLSDTLR

SEQ ID NO: 29772 - protein, 9 aa, synthetic construct
  source 1..9: note = Seed: IYQTSNFRV
IFQTSNFRF

SEQ ID NO: 29773 - protein, 9 aa, synthetic construct
  source 1..9: note = Seed: IYQTSNFRV
IFQTSNFRI

SEQ ID NO: 29774 - protein, 9 aa, synthetic construct
  source 1..9: note = Seed: IYQTSNFRV
IFQTSNFRL

SEQ ID NO: 29775 - protein, 9 aa, synthetic construct
  source 1..9: note = Seed: IYQTSNFRV
IFQTSNFRM

SEQ ID NO: 29776 - protein, 9 aa, synthetic construct
  source 1..9: note = Seed: IYQTSNFRV
IFQTSNFRW

SEQ ID NO: 29777 - protein, 9 aa, synthetic construct
  source 1..9: note = Seed: IAQYTSALL
IFQYTSALF

SEQ ID NO: 29778 - protein, 9 aa, synthetic construct
  source 1..9: note = Seed: IAQYTSALL
IFQYTSALI

SEQ ID NO: 29779 - protein, 9 aa, synthetic construct
  source 1..9: note = Seed: IAQYTSALL
IFQYTSALL

SEQ ID NO: 29780 - protein, 9 aa, synthetic construct
  source 1..9: note = Seed: IAQYTSALL
IFQYTSALM

SEQ ID NO: 29781 - protein, 9 aa, synthetic construct
  source 1..9: note = Seed: IAQYTSALL
IFQYTSALY

SEQ ID NO: 29782 - protein, 9 aa, synthetic construct
  source 1..9: note = Seed: IERFVSLAI
IFRFVSLAF

SEQ ID NO: 29783 - protein, 9 aa, synthetic construct
  source 1..9: note = Seed: IRRPFLCCK
IFRPFLCCK

SEQ ID NO: 29784 - protein, 10 aa, synthetic construct
  source 1..10: note = Seed: ITSAVLQSGF
IFSAVLQSGF

SEQ ID NO: 29785 - protein, 11 aa, synthetic construct
  source 1..11: note = Seed: ITSAVLQSGFR
IFSAVLQSGFR

SEQ ID NO: 29786 - protein, 10 aa, synthetic construct
  source 1..10: note = Seed: ITSAVLQSGF
IFSAVLQSGW

SEQ ID NO: 29787 - protein, 9 aa, synthetic construct
  source 1..9: note = Seed: IASFRLFAR
IFSFRLFAK

SEQ ID NO: 29788 - protein, 9 aa, synthetic construct
  source 1..9: note = Seed: IASFRLFAR
IFSFRLFAR

SEQ ID NO: 29789 - protein, 8 aa, synthetic construct
  source 1..8: note = Seed: IYSKHTPI
IFSKHTPF

SEQ ID NO: 29790 - protein, 10 aa, synthetic construct
  source 1..10: note = Seed: IYSKHTPINL
IFSKHTPINF

SEQ ID NO: 29791 - protein, 11 aa, synthetic construct
  source 1..11: note = Seed: IYSKHTPINLV
IFSKHTPINLF

SEQ ID NO: 29792 - protein, 8 aa, synthetic construct
  source 1..8: note = Seed: IYSKHTPI
IFSKHTPL

SEQ ID NO: 29793 - protein, 8 aa, synthetic construct
  source 1..8: note = Seed: IYSKHTPI
IFSKHTPM

SEQ ID NO: 29794 - protein, 9 aa, synthetic construct
  source 1..9: note = Seed: IVSTIQRKY
IFSTIQRKY

SEQ ID NO: 29795 - protein, 10 aa, synthetic construct
  source 1..10: note = Seed: IVSTIQRKYK
IFSTIQRKYR

SEQ ID NO: 29796 - protein, 10 aa, synthetic construct
  source 1..10: note = Seed: ICSTMTNRQF
IFSTMTNRQW

SEQ ID NO: 29797 - protein, 10 aa, synthetic construct
  source 1..10: note = Seed: ILTALRLCAY
IFTALRLCAY

SEQ ID NO: 29798 - protein, 10 aa, synthetic construct
  source 1..10: note = Seed: IKTIQPRVEK
IFTIQPRVER

SEQ ID NO: 29799 - protein, 10 aa, synthetic construct
  source 1..10: note = Seed: IETISLAGSY
IFTISLAGSF

SEQ ID NO: 29800 - protein, 10 aa, synthetic construct
  source 1..10: note = Seed: IETISLAGSY
IFTISLAGSW

SEQ ID NO: 29801 - protein, 10 aa, synthetic construct
  source 1..10: note = Seed: IETISLAGSY
IFTISLAGSY

SEQ ID NO: 29802 - protein, 11 aa, synthetic construct
  source 1..11: note = Seed: IETISLAGSYK
IFTISLAGSYR

SEQ ID NO: 29803 - protein, 10 aa, synthetic construct
  source 1..10: note = Seed: IPTITQMNLK
IFTITQMNLR

SEQ ID NO: 29804 - protein, 11 aa, synthetic construct
  source 1..11: note = Seed: INTLNDLNETL
IFTLNDLNETL

SEQ ID NO: 29805 - protein, 11 aa, synthetic construct
  source 1..11: note = Seed: INTLNDLNETL
IFTLNDLNETV

SEQ ID NO: 29806 - protein, 9 aa, synthetic construct
  source 1..9: note = Seed: IFVDGVPFV
IFVDGVPFF

SEQ ID NO: 29807 - protein, 9 aa, synthetic construct
  source 1..9: note = Seed: IFVDGVPFV
IFVDGVPFL

SEQ ID NO: 29808 - protein, 9 aa, synthetic construct
  source 1..9: note = Seed: IFVDGVPFV
IFVDGVPFM

SEQ ID NO: 29809 - protein, 9 aa, synthetic construct
  source 1..9: note = Seed: IFVDGVPFV
IFVDGVPFY

SEQ ID NO: 29810 - protein, 8 aa, synthetic construct
  source 1..8: note = Seed: IFVDGVPF
IFVDGVPM

SEQ ID NO: 29811 - protein, 10 aa, synthetic construct
  source 1..10: note = Seed: ITVNVLAWLY
IFVNVLAWLR

SEQ ID NO: 29812 - protein, 10 aa, synthetic construct
  source 1..10: note = Seed: ITVNVLAWLY
IFVNVLAWLY

SEQ ID NO: 29813 - protein, 9 aa, synthetic construct
  source 1..9: note = Seed: IGVTQNVLY
IFVTQNVLY

SEQ ID NO: 29814 - protein, 10 aa, synthetic construct
  source 1..10: note = Seed: IGVVREFLTR
IFVVREFLTR

SEQ ID NO: 29815 - protein, 10 aa, synthetic construct
  source 1..10: note = Seed: IAWYTERSEK
IFWYTERSER

SEQ ID NO: 29816 - protein, 8 aa, synthetic construct
  source 1..8: note = Seed: IFYLITPV
IFYLITPM

SEQ ID NO: 29817 - protein, 9 aa, synthetic construct
  source 1..9: note = Seed: IFYLITPVH
IFYLITPVF

SEQ ID NO: 29818 - protein, 10 aa, synthetic construct
  source 1..10: note = Seed: IFYLITPVHV
IFYLITPVHF

SEQ ID NO: 29819 - protein, 10 aa, synthetic construct
  source 1..10: note = Seed: IFYLITPVHV
IFYLITPVHI

SEQ ID NO: 29820 - protein, 10 aa, synthetic construct
  source 1..10: note = Seed: IFYLITPVHV
IFYLITPVHL

SEQ ID NO: 29821 - protein, 10 aa, synthetic construct
  source 1..10: note = Seed: IFYLITPVHV
IFYLITPVHW

SEQ ID NO: 29822 - protein, 9 aa, synthetic construct
  source 1..9: note = Seed: IFYLITPVH
IFYLITPVL

SEQ ID NO: 29823 - protein, 9 aa, synthetic construct
  source 1..9: note = Seed: IFYLITPVH
IFYLITPVM

SEQ ID NO: 29824 - protein, 9 aa, synthetic construct
  source 1..9: note = Seed: IFYLITPVH
IFYLITPVY

SEQ ID NO: 29825 - protein, 10 aa, synthetic construct
  source 1..10: note = Seed: IDYTEISFML
IFYTEISFMF

SEQ ID NO: 29826 - protein, 10 aa, synthetic construct
  source 1..10: note = Seed: IDYTEISFML
IFYTEISFMI

SEQ ID NO: 29827 - protein, 10 aa, synthetic construct
  source 1..10: note = Seed: IDYTEISFML
IFYTEISFML

SEQ ID NO: 29828 - protein, 10 aa, synthetic construct
  source 1..10: note = Seed: IDYTEISFML
IFYTEISFMW

SEQ ID NO: 29829 - protein, 9 aa, synthetic construct
  source 1..9: note = Seed: IGYYRRATR
IFYYRRATK

SEQ ID NO: 29830 - protein, 9 aa, synthetic construct
  source 1..9: note = Seed: IGYYRRATR
IFYYRRATR

SEQ ID NO: 29831 - protein, 10 aa, synthetic construct
  source 1..10: note = Seed: IGYYRRATRR
IFYYRRATRR

SEQ ID NO: 29832 - protein, 10 aa, synthetic construct
  source 1..10: note = Seed: ISAMVRMYIF
IGAMVRMYIW

SEQ ID NO: 29833 - protein, 9 aa, synthetic construct
  source 1..9: note = Seed: ISAMVRMYI
IGAMVRMYK

SEQ ID NO: 29834 - protein, 9 aa, synthetic construct
  source 1..9: note = Seed: ISAMVRMYI
IGAMVRMYM

SEQ ID NO: 29835 - protein, 9 aa, synthetic construct
  source 1..9: note = Seed: ISAMVRMYI
IGAMVRMYW

SEQ ID NO: 29836 - protein, 9 aa, synthetic construct
  source 1..9: note = Seed: ISAMVRMYI
IGAMVRMYY

SEQ ID NO: 29837 - protein, 9 aa, synthetic construct
  source 1..9: note = Seed: IPFAMQMAY
IGFAMQMAF

SEQ ID NO: 29838 - protein, 9 aa, synthetic construct
  source 1..9: note = Seed: IPFAMQMAY
IGFAMQMAM

SEQ ID NO: 29839 - protein, 9 aa, synthetic construct
  source 1..9: note = Seed: IPFAMQMAY
IGFAMQMAY

SEQ ID NO: 29840 - protein, 10 aa, synthetic construct
  source 1..10: note = Seed: IPFAMQMAYR
IGFAMQMAYK

SEQ ID NO: 29841 - protein, 10 aa, synthetic construct
  source 1..10: note = Seed: IPFAMQMAYR
IGFAMQMAYR

SEQ ID NO: 29842 - protein, 11 aa, synthetic construct
  source 1..11: note = Seed: IPFAMQMAYRF
IGFAMQMAYRW

SEQ ID NO: 29843 - protein, 9 aa, synthetic construct
  source 1..9: note = Seed: IFFASFYYV
IGFASFYYF

SEQ ID NO: 29844 - protein, 9 aa, synthetic construct
  source 1..9: note = Seed: IFFASFYYV
IGFASFYYK

SEQ ID NO: 29845 - protein, 9 aa, synthetic construct
  source 1..9: note = Seed: IFFASFYYV
IGFASFYYR

SEQ ID NO: 29846 - protein, 9 aa, synthetic construct
  source 1..9: note = Seed: IFFASFYYV
IGFASFYYV

SEQ ID NO: 29847 - protein, 10 aa, synthetic construct
  source 1..10: note = Seed: IFFASFYYVW
IGFASFYYVF

SEQ ID NO: 29848 - protein, 10 aa, synthetic construct
  source 1..10: note = Seed: IFFASFYYVW
IGFASFYYVW

SEQ ID NO: 29849 - protein, 11 aa, synthetic construct
  source 1..11: note = Seed: IFFASFYYVWK
IGFASFYYVWR

SEQ ID NO: 29850 - protein, 10 aa, synthetic construct
  source 1..10: note = Seed: IFFASFYYVW
IGFASFYYVY

SEQ ID NO: 29851 - protein, 9 aa, synthetic construct
  source 1..9: note = Seed: IFFASFYYV
IGFASFYYY

SEQ ID NO: 29852 - protein, 10 aa, synthetic construct
  source 1..10: note = Seed: IAFGGCVFSY
IGFGGCVFSW

SEQ ID NO: 29853 - protein, 10 aa, synthetic construct
  source 1..10: note = Seed: IAFGGCVFSY
IGFGGCVFSY

SEQ ID NO: 29854 - protein, 9 aa, synthetic construct
  source 1..9: note = Seed: IFFITGNTL
IGFITGNTF

SEQ ID NO: 29855 - protein, 9 aa, synthetic construct
  source 1..9: note = Seed: IFFITGNTL
IGFITGNTY

SEQ ID NO: 29856 - protein, 9 aa, synthetic construct
  source 1..9: note = Seed: ILFTRFFYV
IGFTRFFYK

SEQ ID NO: 29857 - protein, 9 aa, synthetic construct
  source 1..9: note = Seed: ILFTRFFYV
IGFTRFFYR

SEQ ID NO: 29858 - protein, 9 aa, synthetic construct
  source 1..9: note = Seed: ILFTRFFYV
IGFTRFFYV

SEQ ID NO: 29859 - protein, 10 aa, synthetic construct
  source 1..10: note = Seed: ILFTRFFYVL
IGFTRFFYVF

SEQ ID NO: 29860 - protein, 10 aa, synthetic construct
  source 1..10: note = Seed: ILFTRFFYVL
IGFTRFFYVR

SEQ ID NO: 29861 - protein, 9 aa, synthetic construct
  source 1..9: note = Seed: ILFTRFFYV
IGFTRFFYY

SEQ ID NO: 29862 - protein, 10 aa, synthetic construct
  source 1..10: note = Seed: IDGYFKIYSK
IGGYFKIYSR

SEQ ID NO: 29863 - protein, 9 aa, synthetic construct
  source 1..9: note = Seed: IAIPTNFTI
IGIPTNFTF

SEQ ID NO: 29864 - protein, 9 aa, synthetic construct
  source 1..9: note = Seed: IAIPTNFTI
IGIPTNFTW

SEQ ID NO: 29865 - protein, 9 aa, synthetic construct
  source 1..9: note = Seed: IAIPTNFTI
IGIPTNFTY

SEQ ID NO: 29866 - protein, 10 aa, synthetic construct
  source 1..10: note = Seed: IQITISSFKW
IGITISSFKW

SEQ ID NO: 29867 - protein, 9 aa, synthetic construct
  source 1..9: note = Seed: IQITISSFK
IGITISSFR

SEQ ID NO: 29868 - protein, 10 aa, synthetic construct
  source 1..10: note = Seed: ISLAGSYKDW
IGLAGSYKDW

SEQ ID NO: 29869 - protein, 10 aa, synthetic construct
  source 1..10: note = Seed: ILLAKDTTEA
IGLAKDTTEL

SEQ ID NO: 29870 - protein, 10 aa, synthetic construct
  source 1..10: note = Seed: ILLAKDTTEA
IGLAKDTTEV

SEQ ID NO: 29871 - protein, 10 aa, synthetic construct
  source 1..10: note = Seed: ILLLDQALVS
IGLLDQALVV

SEQ ID NO: 29872 - protein, 10 aa, synthetic construct
  source 1..10: note = Seed: IAMACLVGLM
IGMACLVGLL

SEQ ID NO: 29873 - protein, 10 aa, synthetic construct
  source 1..10: note = Seed: IAMACLVGLM
IGMACLVGLV

SEQ ID NO: 29874 - protein, 10 aa, synthetic construct
  source 1..10: note = Seed: IAMACLVGLM
IGMACLVGLW

SEQ ID NO: 29875 - protein, 9 aa, synthetic construct
  source 1..9: note = Seed: IAMACLVGL
IGMACLVGV

SEQ ID NO: 29876 - protein, 9 aa, synthetic construct
  source 1..9: note = Seed: IAMACLVGL
IGMACLVGW

SEQ ID NO: 29877 - protein, 10 aa, synthetic construct
  source 1..10: note = Seed: ISMMGFKMNY
IGMMGFKMNF

SEQ ID NO: 29878 - protein, 10 aa, synthetic construct
  source 1..10: note = Seed: ISMMGFKMNY
IGMMGFKMNK

SEQ ID NO: 29879 - protein, 10 aa, synthetic construct
  source 1..10: note = Seed: ISMMGFKMNY
IGMMGFKMNR

SEQ ID NO: 29880 - protein, 10 aa, synthetic construct
  source 1..10: note = Seed: ISMMGFKMNY
IGMMGFKMNW

SEQ ID NO: 29881 - protein, 10 aa, synthetic construct
  source 1..10: note = Seed: ISMMGFKMNY
IGMMGFKMNY

SEQ ID NO: 29882 - protein, 10 aa, synthetic construct
  source 1..10: note = Seed: ISNSWLMWLI
IGNSWLMWLW

SEQ ID NO: 29883 - protein, 9 aa, synthetic construct
  source 1..9: note = Seed: ISNSWLMWL
IGNSWLMWW

SEQ ID NO: 29884 - protein, 10 aa, synthetic construct
  source 1..10: note = Seed: ISPYNSQNAV
IGPYNSQNAA

SEQ ID NO: 29885 - protein, 10 aa, synthetic construct
  source 1..10: note = Seed: ISPYNSQNAV
IGPYNSQNAL

SEQ ID NO: 29886 - protein, 11 aa, synthetic construct
  source 1..11: note = Seed: IAQFAPSASAF
IGQFAPSASAF

SEQ ID NO: 29887 - protein, 11 aa, synthetic construct
  source 1..11: note = Seed: IAQFAPSASAF
IGQFAPSASAY

SEQ ID NO: 29888 - protein, 10 aa, synthetic construct
  source 1..10: note = Seed: IAQFAPSASA
IGQFAPSASF

SEQ ID NO: 29889 - protein, 10 aa, synthetic construct
  source 1..10: note = Seed: IAQFAPSASA
IGQFAPSASL

SEQ ID NO: 29890 - protein, 10 aa, synthetic construct
  source 1..10: note = Seed: IAQFAPSASA
IGQFAPSASM

SEQ ID NO: 29891 - protein, 10 aa, synthetic construct
  source 1..10: note = Seed: IAQFAPSASA
IGQFAPSASW

SEQ ID NO: 29892 - protein, 10 aa, synthetic construct
  source 1..10: note = Seed: IAQFAPSASA
IGQFAPSASY

SEQ ID NO: 29893 - protein, 11 aa, synthetic construct
  source 1..11: note = Seed: IMQLFFSYFAV
IGQLFFSYFAV

SEQ ID NO: 29894 - protein, 10 aa, synthetic construct
  source 1..10: note = Seed: IMQLFFSYFA
IGQLFFSYFV

SEQ ID NO: 29895 - protein, 9 aa, synthetic construct
  source 1..9: note = Seed: IAQYTSALL
IGQYTSALW

SEQ ID NO: 29896 - protein, 9 aa, synthetic construct
  source 1..9: note = Seed: IERFVSLAI
IGRFVSLAF

SEQ ID NO: 29897 - protein, 9 aa, synthetic construct
  source 1..9: note = Seed: IERFVSLAI
IGRFVSLAY

SEQ ID NO: 29898 - protein, 10 aa, synthetic construct
  source 1..10: note = Seed: ITSAVLQSGF
IGSAVLQSGF

SEQ ID NO: 29899 - protein, 10 aa, synthetic construct
  source 1..10: note = Seed: ITSAVLQSGF
IGSAVLQSGW

SEQ ID NO: 29900 - protein, 9 aa, synthetic construct
  source 1..9: note = Seed: IASFRLFAR
IGSFRLFAR

SEQ ID NO: 29901 - protein, 10 aa, synthetic construct
  source 1..10: note = Seed: ICSTMTNRQF
IGSTMTNRQW

SEQ ID NO: 29902 - protein, 9 aa, synthetic construct
  source 1..9: note = Seed: ISSVLNDIL
IGSVLNDIW

SEQ ID NO: 29903 - protein, 9 aa, synthetic construct
  source 1..9: note = Seed: ISTIGVCSM
IGTIGVCSW

SEQ ID NO: 29904 - protein, 10 aa, synthetic construct
  source 1..10: note = Seed: IETISLAGSY
IGTISLAGSF

SEQ ID NO: 29905 - protein, 10 aa, synthetic construct
  source 1..10: note = Seed: IETISLAGSY
IGTISLAGSW

SEQ ID NO: 29906 - protein, 10 aa, synthetic construct
  source 1..10: note = Seed: IETISLAGSY
IGTISLAGSY

SEQ ID NO: 29907 - protein, 10 aa, synthetic construct
  source 1..10: note = Seed: IPTITQMNLK
IGTITQMNLK

SEQ ID NO: 29908 - protein, 11 aa, synthetic construct
  source 1..11: note = Seed: INTLNDLNETL
IGTLNDLNETL

SEQ ID NO: 29909 - protein, 11 aa, synthetic construct
  source 1..11: note = Seed: INTLNDLNETL
IGTLNDLNETV

SEQ ID NO: 29910 - protein, 9 aa, synthetic construct
  source 1..9: note = Seed: IEVNSFSGY
IGVNSFSGF

SEQ ID NO: 29911 - protein, 9 aa, synthetic construct
  source 1..9: note = Seed: IEVNSFSGY
IGVNSFSGY

SEQ ID NO: 29912 - protein, 10 aa, synthetic construct
  source 1..10: note = Seed: ITVNVLAWLY
IGVNVLAWLW

SEQ ID NO: 29913 - protein, 10 aa, synthetic construct
  source 1..10: note = Seed: ITVNVLAWLY
IGVNVLAWLY

SEQ ID NO: 29914 - protein, 9 aa, synthetic construct
  source 1..9: note = Seed: ITVNVLAWL
IGVNVLAWW

SEQ ID NO: 29915 - protein, 10 aa, synthetic construct
  source 1..10: note = Seed: IFYLITPVHV
IGYLITPVHF

SEQ ID NO: 29916 - protein, 10 aa, synthetic construct
  source 1..10: note = Seed: IFYLITPVHV
IGYLITPVHL

SEQ ID NO: 29917 - protein, 10 aa, synthetic construct
  source 1..10: note = Seed: IFYLITPVHV
IGYLITPVHW

SEQ ID NO: 29918 - protein, 10 aa, synthetic construct
  source 1..10: note = Seed: IDYTEISFML
IGYTEISFMF

SEQ ID NO: 29919 - protein, 10 aa, synthetic construct
  source 1..10: note = Seed: IDYTEISFML
IGYTEISFMI

SEQ ID NO: 29920 - protein, 10 aa, synthetic construct
  source 1..10: note = Seed: IDYTEISFML
IGYTEISFML

SEQ ID NO: 29921 - protein, 10 aa, synthetic construct
  source 1..10: note = Seed: IDYTEISFML
IGYTEISFMW

SEQ ID NO: 29922 - protein, 9 aa, synthetic construct
  source 1..9: note = Seed: IGAGICASY
IHAGICASF

SEQ ID NO: 29923 - protein, 9 aa, synthetic construct
  source 1..9: note = Seed: IGAGICASY
IHAGICASM

SEQ ID NO: 29924 - protein, 9 aa, synthetic construct
  source 1..9: note = Seed: IGAGICASY
IHAGICASY

SEQ ID NO: 29925 - protein, 10 aa, synthetic construct
  source 1..10: note = Seed: ISAMVRMYIF
IHAMVRMYIW

SEQ ID NO: 29926 - protein, 10 aa, synthetic construct
  source 1..10: note = Seed: ISAMVRMYIF
IHAMVRMYIY

SEQ ID NO: 29927 - protein, 9 aa, synthetic construct
  source 1..9: note = Seed: IPFAMQMAY
IHFAMQMAF

SEQ ID NO: 29928 - protein, 9 aa, synthetic construct
  source 1..9: note = Seed: IPFAMQMAY
IHFAMQMAL

SEQ ID NO: 29929 - protein, 9 aa, synthetic construct
  source 1..9: note = Seed: IPFAMQMAY
IHFAMQMAM

SEQ ID NO: 29930 - protein, 9 aa, synthetic construct
  source 1..9: note = Seed: IPFAMQMAY
IHFAMQMAY

SEQ ID NO: 29931 - protein, 10 aa, synthetic construct
  source 1..10: note = Seed: IPFAMQMAYR
IHFAMQMAYR

SEQ ID NO: 29932 - protein, 11 aa, synthetic construct
  source 1..11: note = Seed: IPFAMQMAYRF
IHFAMQMAYRW

SEQ ID NO: 29933 - protein, 9 aa, synthetic construct
  source 1..9: note = Seed: IFFASFYYV
IHFASFYYF

SEQ ID NO: 29934 - protein, 9 aa, synthetic construct
  source 1..9: note = Seed: IFFASFYYV
IHFASFYYK

SEQ ID NO: 29935 - protein, 9 aa, synthetic construct
  source 1..9: note = Seed: IFFASFYYV
IHFASFYYR

SEQ ID NO: 29936 - protein, 10 aa, synthetic construct
  source 1..10: note = Seed: IFFASFYYVW
IHFASFYYVF

SEQ ID NO: 29937 - protein, 10 aa, synthetic construct
  source 1..10: note = Seed: IFFASFYYVW
IHFASFYYVW

SEQ ID NO: 29938 - protein, 10 aa, synthetic construct
  source 1..10: note = Seed: IFFASFYYVW
IHFASFYYVY

SEQ ID NO: 29939 - protein, 9 aa, synthetic construct
  source 1..9: note = Seed: IFFASFYYV
IHFASFYYW

SEQ ID NO: 29940 - protein, 9 aa, synthetic construct
  source 1..9: note = Seed: IFFASFYYV
IHFASFYYY

SEQ ID NO: 29941 - protein, 10 aa, synthetic construct
  source 1..10: note = Seed: IAFGGCVFSY
IHFGGCVFSF

SEQ ID NO: 29942 - protein, 10 aa, synthetic construct
  source 1..10: note = Seed: IAFGGCVFSY
IHFGGCVFSY

SEQ ID NO: 29943 - protein, 9 aa, synthetic construct
  source 1..9: note = Seed: IFFITGNTL
IHFITGNTF

SEQ ID NO: 29944 - protein, 9 aa, synthetic construct
  source 1..9: note = Seed: IFFITGNTL
IHFITGNTM

SEQ ID NO: 29945 - protein, 9 aa, synthetic construct
  source 1..9: note = Seed: IFFITGNTL
IHFITGNTY

SEQ ID NO: 29946 - protein, 9 aa, synthetic construct
  source 1..9: note = Seed: ILFTRFFYV
IHFTRFFYK

SEQ ID NO: 29947 - protein, 9 aa, synthetic construct
  source 1..9: note = Seed: ILFTRFFYV
IHFTRFFYR

SEQ ID NO: 29948 - protein, 10 aa, synthetic construct
  source 1..10: note = Seed: ILFTRFFYVL
IHFTRFFYVF

SEQ ID NO: 29949 - protein, 10 aa, synthetic construct
  source 1..10: note = Seed: ILFTRFFYVL
IHFTRFFYVR

SEQ ID NO: 29950 - protein, 9 aa, synthetic construct
  source 1..9: note = Seed: ILFTRFFYV
IHFTRFFYY

SEQ ID NO: 29951 - protein, 9 aa, synthetic construct
  source 1..9: note = Seed: IAIPTNFTI
IHIPTNFTF

SEQ ID NO: 29952 - protein, 9 aa, synthetic construct
  source 1..9: note = Seed: IAIPTNFTI
IHIPTNFTM

SEQ ID NO: 29953 - protein, 9 aa, synthetic construct
  source 1..9: note = Seed: IAIPTNFTI
IHIPTNFTY

SEQ ID NO: 29954 - protein, 9 aa, synthetic construct
  source 1..9: note = Seed: IGIVNNTVY
IHIVNNTVF

SEQ ID NO: 29955 - protein, 9 aa, synthetic construct
  source 1..9: note = Seed: IGIVNNTVY
IHIVNNTVY

SEQ ID NO: 29956 - protein, 10 aa, synthetic construct
  source 1..10: note = Seed: ILLAKDTTEA
IHLAKDTTEL

SEQ ID NO: 29957 - protein, 10 aa, synthetic construct
  source 1..10: note = Seed: ILLAKDTTEA
IHLAKDTTEV

SEQ ID NO: 29958 - protein, 10 aa, synthetic construct
  source 1..10: note = Seed: ILLLDQALVS
IHLLDQALVV

SEQ ID NO: 29959 - protein, 9 aa, synthetic construct
  source 1..9: note = Seed: IAMACLVGL
IHMACLVGF

SEQ ID NO: 29960 - protein, 10 aa, synthetic construct
  source 1..10: note = Seed: IAMACLVGLM
IHMACLVGLL

SEQ ID NO: 29961 - protein, 10 aa, synthetic construct
  source 1..10: note = Seed: IAMACLVGLM
IHMACLVGLV

SEQ ID NO: 29962 - protein, 9 aa, synthetic construct
  source 1..9: note = Seed: IAMACLVGL
IHMACLVGY

SEQ ID NO: 29963 - protein, 10 aa, synthetic construct
  source 1..10: note = Seed: ISMMGFKMNY
IHMMGFKMNF

SEQ ID NO: 29964 - protein, 10 aa, synthetic construct
  source 1..10: note = Seed: ISMMGFKMNY
IHMMGFKMNK

SEQ ID NO: 29965 - protein, 10 aa, synthetic construct
  source 1..10: note = Seed: ISMMGFKMNY
IHMMGFKMNR

SEQ ID NO: 29966 - protein, 10 aa, synthetic construct
  source 1..10: note = Seed: ISMMGFKMNY
IHMMGFKMNY

SEQ ID NO: 29967 - protein, 9 aa, synthetic construct
  source 1..9: note = Seed: IKNFKSVLY
IHNFKSVLF

SEQ ID NO: 29968 - protein, 9 aa, synthetic construct
  source 1..9: note = Seed: IKNFKSVLY
IHNFKSVLY

SEQ ID NO: 29969 - protein, 10 aa, synthetic construct
  source 1..10: note = Seed: IKNFKSVLYY
IHNFKSVLYF

SEQ ID NO: 29970 - protein, 10 aa, synthetic construct
  source 1..10: note = Seed: ISPYNSQNAV
IHPYNSQNAA

SEQ ID NO: 29971 - protein, 10 aa, synthetic construct
  source 1..10: note = Seed: ISPYNSQNAV
IHPYNSQNAL

SEQ ID NO: 29972 - protein, 11 aa, synthetic construct
  source 1..11: note = Seed: IAQFAPSASAF
IHQFAPSASAF

SEQ ID NO: 29973 - protein, 11 aa, synthetic construct
  source 1..11: note = Seed: IAQFAPSASAF
IHQFAPSASAM

SEQ ID NO: 29974 - protein, 11 aa, synthetic construct
  source 1..11: note = Seed: IAQFAPSASAF
IHQFAPSASAY

SEQ ID NO: 29975 - protein, 10 aa, synthetic construct
  source 1..10: note = Seed: IAQFAPSASA
IHQFAPSASF

SEQ ID NO: 29976 - protein, 10 aa, synthetic construct
  source 1..10: note = Seed: IAQFAPSASA
IHQFAPSASI

SEQ ID NO: 29977 - protein, 10 aa, synthetic construct
  source 1..10: note = Seed: IAQFAPSASA
IHQFAPSASL

SEQ ID NO: 29978 - protein, 10 aa, synthetic construct
  source 1..10: note = Seed: IAQFAPSASA
IHQFAPSASM

SEQ ID NO: 29979 - protein, 10 aa, synthetic construct
  source 1..10: note = Seed: IAQFAPSASA
IHQFAPSASW

SEQ ID NO: 29980 - protein, 10 aa, synthetic construct
  source 1..10: note = Seed: IAQFAPSASA
IHQFAPSASY

SEQ ID NO: 29981 - protein, 11 aa, synthetic construct
  source 1..11: note = Seed: IMQLFFSYFAV
IHQLFFSYFAV

SEQ ID NO: 29982 - protein, 10 aa, synthetic construct
  source 1..10: note = Seed: IMQLFFSYFA
IHQLFFSYFV

SEQ ID NO: 29983 - protein, 9 aa, synthetic construct
  source 1..9: note = Seed: IAQYTSALL
IHQYTSALF

SEQ ID NO: 29984 - protein, 9 aa, synthetic construct
  source 1..9: note = Seed: IAQYTSALL
IHQYTSALM

SEQ ID NO: 29985 - protein, 9 aa, synthetic construct
  source 1..9: note = Seed: IAQYTSALL
IHQYTSALY

SEQ ID NO: 29986 - protein, 9 aa, synthetic construct
  source 1..9: note = Seed: IERFVSLAI
IHRFVSLAF

SEQ ID NO: 29987 - protein, 9 aa, synthetic construct
  source 1..9: note = Seed: IERFVSLAI
IHRFVSLAL

SEQ ID NO: 29988 - protein, 9 aa, synthetic construct
  source 1..9: note = Seed: IERFVSLAI
IHRFVSLAM

SEQ ID NO: 29989 - protein, 9 aa, synthetic construct
  source 1..9: note = Seed: IERFVSLAI
IHRFVSLAY

SEQ ID NO: 29990 - protein, 10 aa, synthetic construct
  source 1..10: note = Seed: ITSAVLQSGF
IHSAVLQSGF

SEQ ID NO: 29991 - protein, 10 aa, synthetic construct
  source 1..10: note = Seed: ITSAVLQSGF
IHSAVLQSGW

SEQ ID NO: 29992 - protein, 9 aa, synthetic construct
  source 1..9: note = Seed: IKSQDLSVV
IHSQDLSVF

SEQ ID NO: 29993 - protein, 9 aa, synthetic construct
  source 1..9: note = Seed: IKSQDLSVV
IHSQDLSVY

SEQ ID NO: 29994 - protein, 10 aa, synthetic construct
  source 1..10: note = Seed: ICSTMTNRQF
IHSTMTNRQW

SEQ ID NO: 29995 - protein, 9 aa, synthetic construct
  source 1..9: note = Seed: ISTIGVCSM
IHTIGVCSF

SEQ ID NO: 29996 - protein, 9 aa, synthetic construct
  source 1..9: note = Seed: ISTIGVCSM
IHTIGVCSY

SEQ ID NO: 29997 - protein, 10 aa, synthetic construct
  source 1..10: note = Seed: IKTIQPRVEK
IHTIQPRVER

SEQ ID NO: 29998 - protein, 10 aa, synthetic construct
  source 1..10: note = Seed: IETISLAGSY
IHTISLAGSF

SEQ ID NO: 29999 - protein, 10 aa, synthetic construct
  source 1..10: note = Seed: IETISLAGSY
IHTISLAGSW

SEQ ID NO: 30000 - protein, 10 aa, synthetic construct
  source 1..10: note = Seed: IETISLAGSY
IHTISLAGSY

SEQ ID NO: 30001 - protein, 11 aa, synthetic construct
  source 1..11: note = Seed: IETISLAGSYK
IHTISLAGSYR

SEQ ID NO: 30002 - protein, 10 aa, synthetic construct
  source 1..10: note = Seed: IPTITQMNLK
IHTITQMNLR

SEQ ID NO: 30003 - protein, 11 aa, synthetic construct
  source 1..11: note = Seed: INTLNDLNETL
IHTLNDLNETL

SEQ ID NO: 30004 - protein, 11 aa, synthetic construct
  source 1..11: note = Seed: INTLNDLNETL
IHTLNDLNETV

SEQ ID NO: 30005 - protein, 9 aa, synthetic construct
  source 1..9: note = Seed: IMTRCLAVH
IHTRCLAVY

SEQ ID NO: 30006 - protein, 9 aa, synthetic construct
  source 1..9: note = Seed: IEVNSFSGY
IHVNSFSGF

SEQ ID NO: 30007 - protein, 9 aa, synthetic construct
  source 1..9: note = Seed: IEVNSFSGY
IHVNSFSGM

SEQ ID NO: 30008 - protein, 9 aa, synthetic construct
  source 1..9: note = Seed: IEVNSFSGY
IHVNSFSGY

SEQ ID NO: 30009 - protein, 10 aa, synthetic construct
  source 1..10: note = Seed: ITVNVLAWLY
IHVNVLAWLY

SEQ ID NO: 30010 - protein, 10 aa, synthetic construct
  source 1..10: note = Seed: IFYLITPVHV
IHYLITPVHF

SEQ ID NO: 30011 - protein, 10 aa, synthetic construct
  source 1..10: note = Seed: IFYLITPVHV
IHYLITPVHL

SEQ ID NO: 30012 - protein, 10 aa, synthetic construct
  source 1..10: note = Seed: IFYLITPVHV
IHYLITPVHW

SEQ ID NO: 30013 - protein, 10 aa, synthetic construct
  source 1..10: note = Seed: IDYTEISFML
IHYTEISFMF

SEQ ID NO: 30014 - protein, 10 aa, synthetic construct
  source 1..10: note = Seed: IDYTEISFML
IHYTEISFMI

SEQ ID NO: 30015 - protein, 10 aa, synthetic construct
  source 1..10: note = Seed: IDYTEISFML
IHYTEISFML

SEQ ID NO: 30016 - protein, 10 aa, synthetic construct
  source 1..10: note = Seed: IDYTEISFML
IHYTEISFMW

SEQ ID NO: 30017 - protein, 9 aa, synthetic construct
  source 1..9: note = Seed: IGAGICASY
IIAGICASF

SEQ ID NO: 30018 - protein, 9 aa, synthetic construct
  source 1..9: note = Seed: IGAGICASY
IIAGICASY

SEQ ID NO: 30019 - protein, 9 aa, synthetic construct
  source 1..9: note = Seed: ISAMVRMYI
IIAMVRMYI

SEQ ID NO: 30020 - protein, 10 aa, synthetic construct
  source 1..10: note = Seed: ISAMVRMYIF
IIAMVRMYIW

SEQ ID NO: 30021 - protein, 9 aa, synthetic construct
  source 1..9: note = Seed: ISAMVRMYI
IIAMVRMYK

SEQ ID NO: 30022 - protein, 9 aa, synthetic construct
  source 1..9: note = Seed: ISAMVRMYI
IIAMVRMYL

SEQ ID NO: 30023 - protein, 9 aa, synthetic construct
  source 1..9: note = Seed: ISAMVRMYI
IIAMVRMYV

SEQ ID NO: 30024 - protein, 9 aa, synthetic construct
  source 1..9: note = Seed: ISAMVRMYI
IIAMVRMYW

SEQ ID NO: 30025 - protein, 10 aa, synthetic construct
  source 1..10: note = Seed: ISASIVAGGI
IIASIVAGGI

SEQ ID NO: 30026 - protein, 10 aa, synthetic construct
  source 1..10: note = Seed: ISASIVAGGI
IIASIVAGGL

SEQ ID NO: 30027 - protein, 10 aa, synthetic construct
  source 1..10: note = Seed: ISASIVAGGI
IIASIVAGGV

SEQ ID NO: 30028 - protein, 10 aa, synthetic construct
  source 1..10: note = Seed: IIAYTMSLGA
IIAYTMSLGI

SEQ ID NO: 30029 - protein, 10 aa, synthetic construct
  source 1..10: note = Seed: IIAYTMSLGA
IIAYTMSLGV

SEQ ID NO: 30030 - protein, 9 aa, synthetic construct
  source 1..9: note = Seed: ITDAVDCAL
IIDAVDCAL

SEQ ID NO: 30031 - protein, 9 aa, synthetic construct
  source 1..9: note = Seed: ILDITPCSF
IIDITPCSL

SEQ ID NO: 30032 - protein, 9 aa, synthetic construct
  source 1..9: note = Seed: ISDYDYYRY
IIDYDYYRY

SEQ ID NO: 30033 - protein, 9 aa, synthetic construct
  source 1..9: note = Seed: IPFAMQMAY
IIFAMQMAF

SEQ ID NO: 30034 - protein, 9 aa, synthetic construct
  source 1..9: note = Seed: IPFAMQMAY
IIFAMQMAM

SEQ ID NO: 30035 - protein, 9 aa, synthetic construct
  source 1..9: note = Seed: IPFAMQMAY
IIFAMQMAY

SEQ ID NO: 30036 - protein, 10 aa, synthetic construct
  source 1..10: note = Seed: IPFAMQMAYR
IIFAMQMAYK

SEQ ID NO: 30037 - protein, 10 aa, synthetic construct
  source 1..10: note = Seed: IPFAMQMAYR
IIFAMQMAYR

SEQ ID NO: 30038 - protein, 11 aa, synthetic construct
  source 1..11: note = Seed: IPFAMQMAYRF
IIFAMQMAYRW

SEQ ID NO: 30039 - protein, 8 aa, synthetic construct
  source 1..8: note = Seed: IFFASFYY
IIFASFYY

SEQ ID NO: 30040 - protein, 9 aa, synthetic construct
  source 1..9: note = Seed: IFFASFYYV
IIFASFYYA

SEQ ID NO: 30041 - protein, 9 aa, synthetic construct
  source 1..9: note = Seed: IFFASFYYV
IIFASFYYC

SEQ ID NO: 30042 - protein, 9 aa, synthetic construct
  source 1..9: note = Seed: IFFASFYYV
IIFASFYYF

SEQ ID NO: 30043 - protein, 9 aa, synthetic construct
  source 1..9: note = Seed: IFFASFYYV
IIFASFYYH

SEQ ID NO: 30044 - protein, 9 aa, synthetic construct
  source 1..9: note = Seed: IFFASFYYV
IIFASFYYI

SEQ ID NO: 30045 - protein, 9 aa, synthetic construct
  source 1..9: note = Seed: IFFASFYYV
IIFASFYYK

SEQ ID NO: 30046 - protein, 9 aa, synthetic construct
  source 1..9: note = Seed: IFFASFYYV
IIFASFYYL

SEQ ID NO: 30047 - protein, 9 aa, synthetic construct
  source 1..9: note = Seed: IFFASFYYV
IIFASFYYM

SEQ ID NO: 30048 - protein, 9 aa, synthetic construct
  source 1..9: note = Seed: IFFASFYYV
IIFASFYYR

SEQ ID NO: 30049 - protein, 9 aa, synthetic construct
  source 1..9: note = Seed: IFFASFYYV
IIFASFYYT

SEQ ID NO: 30050 - protein, 9 aa, synthetic construct
  source 1..9: note = Seed: IFFASFYYV
IIFASFYYV

SEQ ID NO: 30051 - protein, 10 aa, synthetic construct
  source 1..10: note = Seed: IFFASFYYVW
IIFASFYYVF

SEQ ID NO: 30052 - protein, 10 aa, synthetic construct
  source 1..10: note = Seed: IFFASFYYVW
IIFASFYYVW

SEQ ID NO: 30053 - protein, 11 aa, synthetic construct
  source 1..11: note = Seed: IFFASFYYVWK
IIFASFYYVWK

SEQ ID NO: 30054 - protein, 11 aa, synthetic construct
  source 1..11: note = Seed: IFFASFYYVWK
IIFASFYYVWR

SEQ ID NO: 30055 - protein, 10 aa, synthetic construct
  source 1..10: note = Seed: IFFASFYYVW
IIFASFYYVY

SEQ ID NO: 30056 - protein, 9 aa, synthetic construct
  source 1..9: note = Seed: IFFASFYYV
IIFASFYYW

SEQ ID NO: 30057 - protein, 9 aa, synthetic construct
  source 1..9: note = Seed: IFFASFYYV
IIFASFYYY

SEQ ID NO: 30058 - protein, 10 aa, synthetic construct
  source 1..10: note = Seed: IAFGGCVFSY
IIFGGCVFSF

SEQ ID NO: 30059 - protein, 10 aa, synthetic construct
  source 1..10: note = Seed: IAFGGCVFSY
IIFGGCVFSK

SEQ ID NO: 30060 - protein, 10 aa, synthetic construct
  source 1..10: note = Seed: IAFGGCVFSY
IIFGGCVFSR

SEQ ID NO: 30061 - protein, 10 aa, synthetic construct
  source 1..10: note = Seed: IAFGGCVFSY
IIFGGCVFSY

SEQ ID NO: 30062 - protein, 11 aa, synthetic construct
  source 1..11: note = Seed: IAFGGCVFSYV
IIFGGCVFSYI

SEQ ID NO: 30063 - protein, 11 aa, synthetic construct
  source 1..11: note = Seed: IAFGGCVFSYV
IIFGGCVFSYL

SEQ ID NO: 30064 - protein, 11 aa, synthetic construct
  source 1..11: note = Seed: IAFGGCVFSYV
IIFGGCVFSYV

SEQ ID NO: 30065 - protein, 9 aa, synthetic construct
  source 1..9: note = Seed: IFFITGNTL
IIFITGNTF

SEQ ID NO: 30066 - protein, 9 aa, synthetic construct
  source 1..9: note = Seed: IFFITGNTL
IIFITGNTM

SEQ ID NO: 30067 - protein, 9 aa, synthetic construct
  source 1..9: note = Seed: IFFITGNTL
IIFITGNTY

SEQ ID NO: 30068 - protein, 9 aa, synthetic construct
  source 1..9: note = Seed: ILFTRFFYV
IIFTRFFYA

SEQ ID NO: 30069 - protein, 9 aa, synthetic construct
  source 1..9: note = Seed: ILFTRFFYV
IIFTRFFYF

SEQ ID NO: 30070 - protein, 9 aa, synthetic construct
  source 1..9: note = Seed: ILFTRFFYV
IIFTRFFYH

SEQ ID NO: 30071 - protein, 9 aa, synthetic construct
  source 1..9: note = Seed: ILFTRFFYV
IIFTRFFYI

SEQ ID NO: 30072 - protein, 9 aa, synthetic construct
  source 1..9: note = Seed: ILFTRFFYV
IIFTRFFYK

SEQ ID NO: 30073 - protein, 9 aa, synthetic construct
  source 1..9: note = Seed: ILFTRFFYV
IIFTRFFYL

SEQ ID NO: 30074 - protein, 9 aa, synthetic construct
  source 1..9: note = Seed: ILFTRFFYV
IIFTRFFYM

SEQ ID NO: 30075 - protein, 9 aa, synthetic construct
  source 1..9: note = Seed: ILFTRFFYV
IIFTRFFYR

SEQ ID NO: 30076 - protein, 9 aa, synthetic construct
  source 1..9: note = Seed: ILFTRFFYV
IIFTRFFYT

SEQ ID NO: 30077 - protein, 9 aa, synthetic construct
  source 1..9: note = Seed: ILFTRFFYV
IIFTRFFYV

SEQ ID NO: 30078 - protein, 10 aa, synthetic construct
  source 1..10: note = Seed: ILFTRFFYVL
IIFTRFFYVA

SEQ ID NO: 30079 - protein, 10 aa, synthetic construct
  source 1..10: note = Seed: ILFTRFFYVL
IIFTRFFYVF

SEQ ID NO: 30080 - protein, 10 aa, synthetic construct
  source 1..10: note = Seed: ILFTRFFYVL
IIFTRFFYVI

SEQ ID NO: 30081 - protein, 10 aa, synthetic construct
  source 1..10: note = Seed: ILFTRFFYVL
IIFTRFFYVK

SEQ ID NO: 30082 - protein, 10 aa, synthetic construct
  source 1..10: note = Seed: ILFTRFFYVL
IIFTRFFYVL

SEQ ID NO: 30083 - protein, 11 aa, synthetic construct
  source 1..11: note = Seed: ILFTRFFYVLG
IIFTRFFYVLV

SEQ ID NO: 30084 - protein, 10 aa, synthetic construct
  source 1..10: note = Seed: ILFTRFFYVL
IIFTRFFYVR

SEQ ID NO: 30085 - protein, 10 aa, synthetic construct
  source 1..10: note = Seed: ILFTRFFYVL
IIFTRFFYVV

SEQ ID NO: 30086 - protein, 9 aa, synthetic construct
  source 1..9: note = Seed: ILFTRFFYV
IIFTRFFYW

SEQ ID NO: 30087 - protein, 9 aa, synthetic construct
  source 1..9: note = Seed: ILFTRFFYV
IIFTRFFYY

SEQ ID NO: 30088 - protein, 10 aa, synthetic construct
  source 1..10: note = Seed: IDGYFKIYSK
IIGYFKIYSR

SEQ ID NO: 30089 - protein, 9 aa, synthetic construct
  source 1..9: note = Seed: ILHCANFNV
IIHCANFNI

SEQ ID NO: 30090 - protein, 9 aa, synthetic construct
  source 1..9: note = Seed: ILHCANFNV
IIHCANFNL

SEQ ID NO: 30091 - protein, 9 aa, synthetic construct
  source 1..9: note = Seed: ILHCANFNV
IIHCANFNV

SEQ ID NO: 30092 - protein, 9 aa, synthetic construct
  source 1..9: note = Seed: IAIPTNFTI
IIIPTNFTA

SEQ ID NO: 30093 - protein, 9 aa, synthetic construct
  source 1..9: note = Seed: IAIPTNFTI
IIIPTNFTF

SEQ ID NO: 30094 - protein, 9 aa, synthetic construct
  source 1..9: note = Seed: IAIPTNFTI
IIIPTNFTI

SEQ ID NO: 30095 - protein, 9 aa, synthetic construct
  source 1..9: note = Seed: IAIPTNFTI
IIIPTNFTL

SEQ ID NO: 30096 - protein, 9 aa, synthetic construct
  source 1..9: note = Seed: IAIPTNFTI
IIIPTNFTM

SEQ ID NO: 30097 - protein, 9 aa, synthetic construct
  source 1..9: note = Seed: IAIPTNFTI
IIIPTNFTV

SEQ ID NO: 30098 - protein, 9 aa, synthetic construct
  source 1..9: note = Seed: IAIPTNFTI
IIIPTNFTW

SEQ ID NO: 30099 - protein, 9 aa, synthetic construct
  source 1..9: note = Seed: IAIPTNFTI
IIIPTNFTY

SEQ ID NO: 30100 - protein, 9 aa, synthetic construct
  source 1..9: note = Seed: ICISTKHFY
IIISTKHFY

SEQ ID NO: 30101 - protein, 9 aa, synthetic construct
  source 1..9: note = Seed: IQITISSFK
IIITISSFK

SEQ ID NO: 30102 - protein, 10 aa, synthetic construct
  source 1..10: note = Seed: IQITISSFKW
IIITISSFKW

SEQ ID NO: 30103 - protein, 9 aa, synthetic construct
  source 1..9: note = Seed: IQITISSFK
IIITISSFR

SEQ ID NO: 30104 - protein, 9 aa, synthetic construct
  source 1..9: note = Seed: IGIVNNTVY
IIIVNNTVF

SEQ ID NO: 30105 - protein, 9 aa, synthetic construct
  source 1..9: note = Seed: IGIVNNTVY
IIIVNNTVM

SEQ ID NO: 30106 - protein, 9 aa, synthetic construct
  source 1..9: note = Seed: IGIVNNTVY
IIIVNNTVW

SEQ ID NO: 30107 - protein, 9 aa, synthetic construct
  source 1..9: note = Seed: IGIVNNTVY
IIIVNNTVY

SEQ ID NO: 30108 - protein, 9 aa, synthetic construct
  source 1..9: note = Seed: IVKTDGTLM
IIKTDGTLF

SEQ ID NO: 30109 - protein, 10 aa, synthetic construct
  source 1..10: note = Seed: ILLAKDTTEA
IILAKDTTEL

SEQ ID NO: 30110 - protein, 10 aa, synthetic construct
  source 1..10: note = Seed: ILLAKDTTEA
IILAKDTTEV

SEQ ID NO: 30111 - protein, 9 aa, synthetic construct
  source 1..9: note = Seed: IMLIIFWFS
IILIIFWFI

SEQ ID NO: 30112 - protein, 9 aa, synthetic construct
  source 1..9: note = Seed: IMLIIFWFS
IILIIFWFV

SEQ ID NO: 30113 - protein, 9 aa, synthetic construct
  source 1..9: note = Seed: ILLLDQALV
IILLDQALV

SEQ ID NO: 30114 - protein, 10 aa, synthetic construct
  source 1..10: note = Seed: ILLLDQALVS
IILLDQALVV

SEQ ID NO: 30115 - protein, 11 aa, synthetic construct
  source 1..11: note = Seed: ILLNKHIDAYK
IILNKHIDAYR

SEQ ID NO: 30116 - protein, 10 aa, synthetic construct
  source 1..10: note = Seed: IMLVYCFLGY
IILVYCFLGR

SEQ ID NO: 30117 - protein, 9 aa, synthetic construct
  source 1..9: note = Seed: IAMACLVGL
IIMACLVGA

SEQ ID NO: 30118 - protein, 9 aa, synthetic construct
  source 1..9: note = Seed: IAMACLVGL
IIMACLVGI

SEQ ID NO: 30119 - protein, 9 aa, synthetic construct
  source 1..9: note = Seed: IAMACLVGL
IIMACLVGL

SEQ ID NO: 30120 - protein, 10 aa, synthetic construct
  source 1..10: note = Seed: IAMACLVGLM
IIMACLVGLI

SEQ ID NO: 30121 - protein, 10 aa, synthetic construct
  source 1..10: note = Seed: IAMACLVGLM
IIMACLVGLL

SEQ ID NO: 30122 - protein, 10 aa, synthetic construct
  source 1..10: note = Seed: IAMACLVGLM
IIMACLVGLV

SEQ ID NO: 30123 - protein, 9 aa, synthetic construct
  source 1..9: note = Seed: IAMACLVGL
IIMACLVGM

SEQ ID NO: 30124 - protein, 9 aa, synthetic construct
  source 1..9: note = Seed: IAMACLVGL
IIMACLVGV

SEQ ID NO: 30125 - protein, 9 aa, synthetic construct
  source 1..9: note = Seed: IAMACLVGL
IIMACLVGY

SEQ ID NO: 30126 - protein, 10 aa, synthetic construct
  source 1..10: note = Seed: ISMMGFKMNY
IIMMGFKMNF

SEQ ID NO: 30127 - protein, 10 aa, synthetic construct
  source 1..10: note = Seed: ISMMGFKMNY
IIMMGFKMNK

SEQ ID NO: 30128 - protein, 10 aa, synthetic construct
  source 1..10: note = Seed: ISMMGFKMNY
IIMMGFKMNR

SEQ ID NO: 30129 - protein, 10 aa, synthetic construct
  source 1..10: note = Seed: ISMMGFKMNY
IIMMGFKMNY

SEQ ID NO: 30130 - protein, 9 aa, synthetic construct
  source 1..9: note = Seed: IMMNVAKYT
IIMNVAKYI

SEQ ID NO: 30131 - protein, 9 aa, synthetic construct
  source 1..9: note = Seed: IMMNVAKYT
IIMNVAKYL

SEQ ID NO: 30132 - protein, 9 aa, synthetic construct
  source 1..9: note = Seed: IMMNVAKYT
IIMNVAKYV

SEQ ID NO: 30133 - protein, 10 aa, synthetic construct
  source 1..10: note = Seed: IKNFKSVLYY
IINFKSVLYY

SEQ ID NO: 30134 - protein, 10 aa, synthetic construct
  source 1..10: note = Seed: IVNNTVYDPL
IINNTVYDPV

SEQ ID NO: 30135 - protein, 9 aa, synthetic construct
  source 1..9: note = Seed: IVNNWLKQL
IINNWLKQV

SEQ ID NO: 30136 - protein, 9 aa, synthetic construct
  source 1..9: note = Seed: IVNSVLLFL
IINSVLLFA

SEQ ID NO: 30137 - protein, 9 aa, synthetic construct
  source 1..9: note = Seed: IVNSVLLFL
IINSVLLFI

SEQ ID NO: 30138 - protein, 9 aa, synthetic construct
  source 1..9: note = Seed: IVNSVLLFL
IINSVLLFL

SEQ ID NO: 30139 - protein, 10 aa, synthetic construct
  source 1..10: note = Seed: IVNSVLLFLA
IINSVLLFLI

SEQ ID NO: 30140 - protein, 10 aa, synthetic construct
  source 1..10: note = Seed: IVNSVLLFLA
IINSVLLFLL

SEQ ID NO: 30141 - protein, 10 aa, synthetic construct
  source 1..10: note = Seed: IVNSVLLFLA
IINSVLLFLV

SEQ ID NO: 30142 - protein, 9 aa, synthetic construct
  source 1..9: note = Seed: IVNSVLLFL
IINSVLLFV

SEQ ID NO: 30143 - protein, 9 aa, synthetic construct
  source 1..9: note = Seed: ISNSWLMWL
IINSWLMWA

SEQ ID NO: 30144 - protein, 9 aa, synthetic construct
  source 1..9: note = Seed: ISNSWLMWL
IINSWLMWI

SEQ ID NO: 30145 - protein, 9 aa, synthetic construct
  source 1..9: note = Seed: ISNSWLMWL
IINSWLMWL

SEQ ID NO: 30146 - protein, 10 aa, synthetic construct
  source 1..10: note = Seed: ISNSWLMWLI
IINSWLMWLW

SEQ ID NO: 30147 - protein, 9 aa, synthetic construct
  source 1..9: note = Seed: ISNSWLMWL
IINSWLMWM

SEQ ID NO: 30148 - protein, 9 aa, synthetic construct
  source 1..9: note = Seed: ISNSWLMWL
IINSWLMWV

SEQ ID NO: 30149 - protein, 10 aa, synthetic construct
  source 1..10: note = Seed: ISPYNSQNAV
IIPYNSQNAA

SEQ ID NO: 30150 - protein, 10 aa, synthetic construct
  source 1..10: note = Seed: ISPYNSQNAV
IIPYNSQNAL

SEQ ID NO: 30151 - protein, 11 aa, synthetic construct
  source 1..11: note = Seed: IAQFAPSASAF
IIQFAPSASAF

SEQ ID NO: 30152 - protein, 11 aa, synthetic construct
  source 1..11: note = Seed: IAQFAPSASAF
IIQFAPSASAM

SEQ ID NO: 30153 - protein, 11 aa, synthetic construct
  source 1..11: note = Seed: IAQFAPSASAF
IIQFAPSASAY

SEQ ID NO: 30154 - protein, 10 aa, synthetic construct
  source 1..10: note = Seed: IAQFAPSASA
IIQFAPSASF

SEQ ID NO: 30155 - protein, 10 aa, synthetic construct
  source 1..10: note = Seed: IAQFAPSASA
IIQFAPSASL

SEQ ID NO: 30156 - protein, 10 aa, synthetic construct
  source 1..10: note = Seed: IAQFAPSASA
IIQFAPSASM

SEQ ID NO: 30157 - protein, 10 aa, synthetic construct
  source 1..10: note = Seed: IAQFAPSASA
IIQFAPSASW

SEQ ID NO: 30158 - protein, 10 aa, synthetic construct
  source 1..10: note = Seed: IAQFAPSASA
IIQFAPSASY

SEQ ID NO: 30159 - protein, 11 aa, synthetic construct
  source 1..11: note = Seed: IMQLFFSYFAV
IIQLFFSYFAV

SEQ ID NO: 30160 - protein, 10 aa, synthetic construct
  source 1..10: note = Seed: IMQLFFSYFA
IIQLFFSYFI

SEQ ID NO: 30161 - protein, 10 aa, synthetic construct
  source 1..10: note = Seed: IMQLFFSYFA
IIQLFFSYFL

SEQ ID NO: 30162 - protein, 10 aa, synthetic construct
  source 1..10: note = Seed: IMQLFFSYFA
IIQLFFSYFV

SEQ ID NO: 30163 - protein, 9 aa, synthetic construct
  source 1..9: note = Seed: IMQLFFSYF
IIQLFFSYY

SEQ ID NO: 30164 - protein, 10 aa, synthetic construct
  source 1..10: note = Seed: IVQMLSDTLK
IIQMLSDTLR

SEQ ID NO: 30165 - protein, 10 aa, synthetic construct
  source 1..10: note = Seed: ITQMNLKYAI
IIQMNLKYAV

SEQ ID NO: 30166 - protein, 9 aa, synthetic construct
  source 1..9: note = Seed: IAQYTSALL
IIQYTSALF

SEQ ID NO: 30167 - protein, 9 aa, synthetic construct
  source 1..9: note = Seed: IAQYTSALL
IIQYTSALW

SEQ ID NO: 30168 - protein, 9 aa, synthetic construct
  source 1..9: note = Seed: IAQYTSALL
IIQYTSALY

SEQ ID NO: 30169 - protein, 9 aa, synthetic construct
  source 1..9: note = Seed: IERFVSLAI
IIRFVSLAF

SEQ ID NO: 30170 - protein, 9 aa, synthetic construct
  source 1..9: note = Seed: IERFVSLAI
IIRFVSLAY

SEQ ID NO: 30171 - protein, 9 aa, synthetic construct
  source 1..9: note = Seed: IIRGWIFGT
IIRGWIFGI

SEQ ID NO: 30172 - protein, 9 aa, synthetic construct
  source 1..9: note = Seed: IIRGWIFGT
IIRGWIFGL

SEQ ID NO: 30173 - protein, 9 aa, synthetic construct
  source 1..9: note = Seed: IIRGWIFGT
IIRGWIFGV

SEQ ID NO: 30174 - protein, 9 aa, synthetic construct
  source 1..9: note = Seed: IRRPFLCCK
IIRPFLCCK

SEQ ID NO: 30175 - protein, 10 aa, synthetic construct
  source 1..10: note = Seed: ITSAVLQSGF
IISAVLQSGF

SEQ ID NO: 30176 - protein, 10 aa, synthetic construct
  source 1..10: note = Seed: ITSAVLQSGF
IISAVLQSGW

SEQ ID NO: 30177 - protein, 9 aa, synthetic construct
  source 1..9: note = Seed: IASFRLFAR
IISFRLFAK

SEQ ID NO: 30178 - protein, 9 aa, synthetic construct
  source 1..9: note = Seed: IASFRLFAR
IISFRLFAR

SEQ ID NO: 30179 - protein, 10 aa, synthetic construct
  source 1..10: note = Seed: IVSTIQRKYK
IISTIQRKYR

SEQ ID NO: 30180 - protein, 10 aa, synthetic construct
  source 1..10: note = Seed: ICSTMTNRQF
IISTMTNRQW

SEQ ID NO: 30181 - protein, 9 aa, synthetic construct
  source 1..9: note = Seed: ISSVLNDIL
IISVLNDIW

SEQ ID NO: 30182 - protein, 9 aa, synthetic construct
  source 1..9: note = Seed: ISTIGVCSM
IITIGVCSY

SEQ ID NO: 30183 - protein, 10 aa, synthetic construct
  source 1..10: note = Seed: IETISLAGSY
IITISLAGSF

SEQ ID NO: 30184 - protein, 10 aa, synthetic construct
  source 1..10: note = Seed: IETISLAGSY
IITISLAGSW

SEQ ID NO: 30185 - protein, 10 aa, synthetic construct
  source 1..10: note = Seed: IETISLAGSY
IITISLAGSY

SEQ ID NO: 30186 - protein, 10 aa, synthetic construct
  source 1..10: note = Seed: IPTITQMNLK
IITITQMNLK

SEQ ID NO: 30187 - protein, 11 aa, synthetic construct
  source 1..11: note = Seed: INTLNDLNETL
IITLNDLNETL

SEQ ID NO: 30188 - protein, 11 aa, synthetic construct
  source 1..11: note = Seed: INTLNDLNETL
IITLNDLNETV

SEQ ID NO: 30189 - protein, 9 aa, synthetic construct
  source 1..9: note = Seed: IPTNFTISV
IITNFTISY

SEQ ID NO: 30190 - protein, 9 aa, synthetic construct
  source 1..9: note = Seed: IMTRCLAVH
IITRCLAVY

SEQ ID NO: 30191 - protein, 9 aa, synthetic construct
  source 1..9: note = Seed: ILTSLLVLV
IITSLLVLI

SEQ ID NO: 30192 - protein, 9 aa, synthetic construct
  source 1..9: note = Seed: ILTSLLVLV
IITSLLVLL

SEQ ID NO: 30193 - protein, 9 aa, synthetic construct
  source 1..9: note = Seed: ILTSLLVLV
IITSLLVLV

SEQ ID NO: 30194 - protein, 9 aa, synthetic construct
  source 1..9: note = Seed: IFVDGVPFV
IIVDGVPFA

SEQ ID NO: 30195 - protein, 9 aa, synthetic construct
  source 1..9: note = Seed: IFVDGVPFV
IIVDGVPFI

SEQ ID NO: 30196 - protein, 9 aa, synthetic construct
  source 1..9: note = Seed: IFVDGVPFV
IIVDGVPFL

SEQ ID NO: 30197 - protein, 9 aa, synthetic construct
  source 1..9: note = Seed: IFVDGVPFV
IIVDGVPFM

SEQ ID NO: 30198 - protein, 9 aa, synthetic construct
  source 1..9: note = Seed: IFVDGVPFV
IIVDGVPFV

SEQ ID NO: 30199 - protein, 10 aa, synthetic construct
  source 1..10: note = Seed: IFVDGVPFVV
IIVDGVPFVI

SEQ ID NO: 30200 - protein, 10 aa, synthetic construct
  source 1..10: note = Seed: IFVDGVPFVV
IIVDGVPFVV

SEQ ID NO: 30201 - protein, 9 aa, synthetic construct
  source 1..9: note = Seed: IVVFDEISM
IIVFDEISY

SEQ ID NO: 30202 - protein, 9 aa, synthetic construct
  source 1..9: note = Seed: IEVNSFSGY
IIVNSFSGF

SEQ ID NO: 30203 - protein, 9 aa, synthetic construct
  source 1..9: note = Seed: IEVNSFSGY
IIVNSFSGY

SEQ ID NO: 30204 - protein, 9 aa, synthetic construct
  source 1..9: note = Seed: ITVNVLAWL
IIVNVLAWA

SEQ ID NO: 30205 - protein, 9 aa, synthetic construct
  source 1..9: note = Seed: ITVNVLAWL
IIVNVLAWI

SEQ ID NO: 30206 - protein, 9 aa, synthetic construct
  source 1..9: note = Seed: ITVNVLAWL
IIVNVLAWL

SEQ ID NO: 30207 - protein, 10 aa, synthetic construct
  source 1..10: note = Seed: ITVNVLAWLY
IIVNVLAWLK

SEQ ID NO: 30208 - protein, 10 aa, synthetic construct
  source 1..10: note = Seed: ITVNVLAWLY
IIVNVLAWLR

SEQ ID NO: 30209 - protein, 10 aa, synthetic construct
  source 1..10: note = Seed: ITVNVLAWLY
IIVNVLAWLW

SEQ ID NO: 30210 - protein, 10 aa, synthetic construct
  source 1..10: note = Seed: ITVNVLAWLY
IIVNVLAWLY

SEQ ID NO: 30211 - protein, 9 aa, synthetic construct
  source 1..9: note = Seed: ITVNVLAWL
IIVNVLAWV

SEQ ID NO: 30212 - protein, 9 aa, synthetic construct
  source 1..9: note = Seed: IGVTQNVLY
IIVTQNVLW

SEQ ID NO: 30213 - protein, 9 aa, synthetic construct
  source 1..9: note = Seed: IGVTQNVLY
IIVTQNVLY

SEQ ID NO: 30214 - protein, 10 aa, synthetic construct
  source 1..10: note = Seed: ISVTTEILPV
IIVTTEILPV

SEQ ID NO: 30215 - protein, 10 aa, synthetic construct
  source 1..10: note = Seed: IFYLITPVHV
IIYLITPVHF

SEQ ID NO: 30216 - protein, 10 aa, synthetic construct
  source 1..10: note = Seed: IFYLITPVHV
IIYLITPVHL

SEQ ID NO: 30217 - protein, 10 aa, synthetic construct
  source 1..10: note = Seed: IFYLITPVHV
IIYLITPVHW

SEQ ID NO: 30218 - protein, 10 aa, synthetic construct
  source 1..10: note = Seed: IDYTEISFML
IIYTEISFMF

SEQ ID NO: 30219 - protein, 10 aa, synthetic construct
  source 1..10: note = Seed: IDYTEISFML
IIYTEISFMI

SEQ ID NO: 30220 - protein, 10 aa, synthetic construct
  source 1..10: note = Seed: IDYTEISFML
IIYTEISFML

SEQ ID NO: 30221 - protein, 10 aa, synthetic construct
  source 1..10: note = Seed: IDYTEISFML
IIYTEISFMW

SEQ ID NO: 30222 - protein, 9 aa, synthetic construct
  source 1..9: note = Seed: IGYYRRATR
IIYYRRATR

SEQ ID NO: 30223 - protein, 10 aa, synthetic construct
  source 1..10: note = Seed: IGYYRRATRR
IIYYRRATRR

SEQ ID NO: 30224 - protein, 9 aa, synthetic construct
  source 1..9: note = Seed: IGAGICASY
IKAGICASF

SEQ ID NO: 30225 - protein, 9 aa, synthetic construct
  source 1..9: note = Seed: IGAGICASY
IKAGICASL

SEQ ID NO: 30226 - protein, 9 aa, synthetic construct
  source 1..9: note = Seed: IGAGICASY
IKAGICASM

SEQ ID NO: 30227 - protein, 9 aa, synthetic construct
  source 1..9: note = Seed: IGAGICASY
IKAGICASY

SEQ ID NO: 30228 - protein, 10 aa, synthetic construct
  source 1..10: note = Seed: ISAMVRMYIF
IKAMVRMYIF

SEQ ID NO: 30229 - protein, 10 aa, synthetic construct
  source 1..10: note = Seed: ISAMVRMYIF
IKAMVRMYIW

SEQ ID NO: 30230 - protein, 10 aa, synthetic construct
  source 1..10: note = Seed: ISAMVRMYIF
IKAMVRMYIY

SEQ ID NO: 30231 - protein, 9 aa, synthetic construct
  source 1..9: note = Seed: ILDITPCSF
IKDITPCSF

SEQ ID NO: 30232 - protein, 9 aa, synthetic construct
  source 1..9: note = Seed: ILDITPCSF
IKDITPCSY

SEQ ID NO: 30233 - protein, 9 aa, synthetic construct
  source 1..9: note = Seed: IPFAMQMAY
IKFAMQMAF

SEQ ID NO: 30234 - protein, 9 aa, synthetic construct
  source 1..9: note = Seed: IPFAMQMAY
IKFAMQMAI

SEQ ID NO: 30235 - protein, 9 aa, synthetic construct
  source 1..9: note = Seed: IPFAMQMAY
IKFAMQMAL

SEQ ID NO: 30236 - protein, 9 aa, synthetic construct
  source 1..9: note = Seed: IPFAMQMAY
IKFAMQMAM

SEQ ID NO: 30237 - protein, 9 aa, synthetic construct
  source 1..9: note = Seed: IPFAMQMAY
IKFAMQMAV

SEQ ID NO: 30238 - protein, 9 aa, synthetic construct
  source 1..9: note = Seed: IPFAMQMAY
IKFAMQMAW

SEQ ID NO: 30239 - protein, 9 aa, synthetic construct
  source 1..9: note = Seed: IPFAMQMAY
IKFAMQMAY

SEQ ID NO: 30240 - protein, 10 aa, synthetic construct
  source 1..10: note = Seed: IPFAMQMAYR
IKFAMQMAYR

SEQ ID NO: 30241 - protein, 11 aa, synthetic construct
  source 1..11: note = Seed: IPFAMQMAYRF
IKFAMQMAYRW

SEQ ID NO: 30242 - protein, 9 aa, synthetic construct
  source 1..9: note = Seed: IFFASFYYV
IKFASFYYR

SEQ ID NO: 30243 - protein, 10 aa, synthetic construct
  source 1..10: note = Seed: IFFASFYYVW
IKFASFYYVF

SEQ ID NO: 30244 - protein, 10 aa, synthetic construct
  source 1..10: note = Seed: IFFASFYYVW
IKFASFYYVW

SEQ ID NO: 30245 - protein, 10 aa, synthetic construct
  source 1..10: note = Seed: IFFASFYYVW
IKFASFYYVY

SEQ ID NO: 30246 - protein, 9 aa, synthetic construct
  source 1..9: note = Seed: IFFASFYYV
IKFASFYYY

SEQ ID NO: 30247 - protein, 8 aa, synthetic construct
  source 1..8: note = Seed: IAFGGCVF
IKFGGCVF

SEQ ID NO: 30248 - protein, 10 aa, synthetic construct
  source 1..10: note = Seed: IAFGGCVFSY
IKFGGCVFSF

SEQ ID NO: 30249 - protein, 10 aa, synthetic construct
  source 1..10: note = Seed: IAFGGCVFSY
IKFGGCVFSM

SEQ ID NO: 30250 - protein, 10 aa, synthetic construct
  source 1..10: note = Seed: IAFGGCVFSY
IKFGGCVFSY

SEQ ID NO: 30251 - protein, 8 aa, synthetic construct
  source 1..8: note = Seed: IAFGGCVF
IKFGGCVY

SEQ ID NO: 30252 - protein, 9 aa, synthetic construct
  source 1..9: note = Seed: IFFITGNTL
IKFITGNTF

SEQ ID NO: 30253 - protein, 9 aa, synthetic construct
  source 1..9: note = Seed: IFFITGNTL
IKFITGNTI

SEQ ID NO: 30254 - protein, 9 aa, synthetic construct
  source 1..9: note = Seed: IFFITGNTL
IKFITGNTL

SEQ ID NO: 30255 - protein, 9 aa, synthetic construct
  source 1..9: note = Seed: IFFITGNTL
IKFITGNTM

SEQ ID NO: 30256 - protein, 9 aa, synthetic construct
  source 1..9: note = Seed: IFFITGNTL
IKFITGNTY

SEQ ID NO: 30257 - protein, 9 aa, synthetic construct
  source 1..9: note = Seed: ILFTRFFYV
IKFTRFFYK

SEQ ID NO: 30258 - protein, 9 aa, synthetic construct
  source 1..9: note = Seed: ILFTRFFYV
IKFTRFFYR

SEQ ID NO: 30259 - protein, 10 aa, synthetic construct
  source 1..10: note = Seed: ILFTRFFYVL
IKFTRFFYVF

SEQ ID NO: 30260 - protein, 10 aa, synthetic construct
  source 1..10: note = Seed: ILFTRFFYVL
IKFTRFFYVR

SEQ ID NO: 30261 - protein, 9 aa, synthetic construct
  source 1..9: note = Seed: IAIPTNFTI
IKIPTNFTF

SEQ ID NO: 30262 - protein, 9 aa, synthetic construct
  source 1..9: note = Seed: IAIPTNFTI
IKIPTNFTL

SEQ ID NO: 30263 - protein, 9 aa, synthetic construct
  source 1..9: note = Seed: IAIPTNFTI
IKIPTNFTM

SEQ ID NO: 30264 - protein, 9 aa, synthetic construct
  source 1..9: note = Seed: IAIPTNFTI
IKIPTNFTY

SEQ ID NO: 30265 - protein, 10 aa, synthetic construct
  source 1..10: note = Seed: IKIQEGVVDY
IKIQEGVVDF

SEQ ID NO: 30266 - protein, 8 aa, synthetic construct
  source 1..8: note = Seed: IQITISSF
IKITISSF

SEQ ID NO: 30267 - protein, 10 aa, synthetic construct
  source 1..10: note = Seed: IQITISSFKW
IKITISSFKF

SEQ ID NO: 30268 - protein, 10 aa, synthetic construct
  source 1..10: note = Seed: IQITISSFKW
IKITISSFKY

SEQ ID NO: 30269 - protein, 8 aa, synthetic construct
  source 1..8: note = Seed: IQITISSF
IKITISSY

SEQ ID NO: 30270 - protein, 9 aa, synthetic construct
  source 1..9: note = Seed: IGIVNNTVY
IKIVNNTVF

SEQ ID NO: 30271 - protein, 9 aa, synthetic construct
  source 1..9: note = Seed: IGIVNNTVY
IKIVNNTVL

SEQ ID NO: 30272 - protein, 9 aa, synthetic construct
  source 1..9: note = Seed: IGIVNNTVY
IKIVNNTVM

SEQ ID NO: 30273 - protein, 9 aa, synthetic construct
  source 1..9: note = Seed: IGIVNNTVY
IKIVNNTVY

SEQ ID NO: 30274 - protein, 10 aa, synthetic construct
  source 1..10: note = Seed: ILLAKDTTEA
IKLAKDTTEL

SEQ ID NO: 30275 - protein, 10 aa, synthetic construct
  source 1..10: note = Seed: ILLAKDTTEA
IKLAKDTTEV

SEQ ID NO: 30276 - protein, 10 aa, synthetic construct
  source 1..10: note = Seed: ILLLDQALVS
IKLLDQALVV

SEQ ID NO: 30277 - protein, 10 aa, synthetic construct
  source 1..10: note = Seed: ILLNKHIDAY
IKLNKHIDAF

SEQ ID NO: 30278 - protein, 10 aa, synthetic construct
  source 1..10: note = Seed: ILLNKHIDAY
IKLNKHIDAY

SEQ ID NO: 30279 - protein, 9 aa, synthetic construct
  source 1..9: note = Seed: IAMACLVGL
IKMACLVGF

SEQ ID NO: 30280 - protein, 9 aa, synthetic construct
  source 1..9: note = Seed: IAMACLVGL
IKMACLVGL

SEQ ID NO: 30281 - protein, 10 aa, synthetic construct
  source 1..10: note = Seed: IAMACLVGLM
IKMACLVGLL

SEQ ID NO: 30282 - protein, 10 aa, synthetic construct
  source 1..10: note = Seed: IAMACLVGLM
IKMACLVGLV

SEQ ID NO: 30283 - protein, 9 aa, synthetic construct
  source 1..9: note = Seed: IAMACLVGL
IKMACLVGM

SEQ ID NO: 30284 - protein, 9 aa, synthetic construct
  source 1..9: note = Seed: IAMACLVGL
IKMACLVGY

SEQ ID NO: 30285 - protein, 10 aa, synthetic construct
  source 1..10: note = Seed: ISMMGFKMNY
IKMMGFKMNF

SEQ ID NO: 30286 - protein, 10 aa, synthetic construct
  source 1..10: note = Seed: ISMMGFKMNY
IKMMGFKMNK

SEQ ID NO: 30287 - protein, 10 aa, synthetic construct
  source 1..10: note = Seed: ISMMGFKMNY
IKMMGFKMNM

SEQ ID NO: 30288 - protein, 10 aa, synthetic construct
  source 1..10: note = Seed: ISMMGFKMNY
IKMMGFKMNR

SEQ ID NO: 30289 - protein, 10 aa, synthetic construct
  source 1..10: note = Seed: ISMMGFKMNY
IKMMGFKMNY

SEQ ID NO: 30290 - protein, 9 aa, synthetic construct
  source 1..9: note = Seed: IKNFKSVLY
IKNFKSVLF

SEQ ID NO: 30291 - protein, 9 aa, synthetic construct
  source 1..9: note = Seed: IKNFKSVLY
IKNFKSVLM

SEQ ID NO: 30292 - protein, 10 aa, synthetic construct
  source 1..10: note = Seed: IKNFKSVLYY
IKNFKSVLYF

SEQ ID NO: 30293 - protein, 10 aa, synthetic construct
  source 1..10: note = Seed: IKNFKSVLYY
IKNFKSVLYM

SEQ ID NO: 30294 - protein, 10 aa, synthetic construct
  source 1..10: note = Seed: ISPYNSQNAV
IKPYNSQNAA

SEQ ID NO: 30295 - protein, 10 aa, synthetic construct
  source 1..10: note = Seed: ISPYNSQNAV
IKPYNSQNAL

SEQ ID NO: 30296 - protein, 10 aa, synthetic construct
  source 1..10: note = Seed: ISPYNSQNAV
IKPYNSQNAM

SEQ ID NO: 30297 - protein, 11 aa, synthetic construct
  source 1..11: note = Seed: IAQFAPSASAF
IKQFAPSASAF

SEQ ID NO: 30298 - protein, 11 aa, synthetic construct
  source 1..11: note = Seed: IAQFAPSASAF
IKQFAPSASAM

SEQ ID NO: 30299 - protein, 11 aa, synthetic construct
  source 1..11: note = Seed: IAQFAPSASAF
IKQFAPSASAY

SEQ ID NO: 30300 - protein, 10 aa, synthetic construct
  source 1..10: note = Seed: IAQFAPSASA
IKQFAPSASF

SEQ ID NO: 30301 - protein, 10 aa, synthetic construct
  source 1..10: note = Seed: IAQFAPSASA
IKQFAPSASI

SEQ ID NO: 30302 - protein, 10 aa, synthetic construct
  source 1..10: note = Seed: IAQFAPSASA
IKQFAPSASL

SEQ ID NO: 30303 - protein, 10 aa, synthetic construct
  source 1..10: note = Seed: IAQFAPSASA
IKQFAPSASM

SEQ ID NO: 30304 - protein, 10 aa, synthetic construct
  source 1..10: note = Seed: IAQFAPSASA
IKQFAPSASW

SEQ ID NO: 30305 - protein, 10 aa, synthetic construct
  source 1..10: note = Seed: IAQFAPSASA
IKQFAPSASY

SEQ ID NO: 30306 - protein, 9 aa, synthetic construct
  source 1..9: note = Seed: IMQLFFSYF
IKQLFFSYF

SEQ ID NO: 30307 - protein, 11 aa, synthetic construct
  source 1..11: note = Seed: IMQLFFSYFAV
IKQLFFSYFAV

SEQ ID NO: 30308 - protein, 10 aa, synthetic construct
  source 1..10: note = Seed: IMQLFFSYFA
IKQLFFSYFV

SEQ ID NO: 30309 - protein, 9 aa, synthetic construct
  source 1..9: note = Seed: IMQLFFSYF
IKQLFFSYM

SEQ ID NO: 30310 - protein, 9 aa, synthetic construct
  source 1..9: note = Seed: IMQLFFSYF
IKQLFFSYY

SEQ ID NO: 30311 - protein, 9 aa, synthetic construct
  source 1..9: note = Seed: IAQYTSALL
IKQYTSALF

SEQ ID NO: 30312 - protein, 9 aa, synthetic construct
  source 1..9: note = Seed: IAQYTSALL
IKQYTSALL

SEQ ID NO: 30313 - protein, 9 aa, synthetic construct
  source 1..9: note = Seed: IAQYTSALL
IKQYTSALM

SEQ ID NO: 30314 - protein, 9 aa, synthetic construct
  source 1..9: note = Seed: IAQYTSALL
IKQYTSALY

SEQ ID NO: 30315 - protein, 9 aa, synthetic construct
  source 1..9: note = Seed: IERFVSLAI
IKRFVSLAF

SEQ ID NO: 30316 - protein, 9 aa, synthetic construct
  source 1..9: note = Seed: IERFVSLAI
IKRFVSLAI

SEQ ID NO: 30317 - protein, 9 aa, synthetic construct
  source 1..9: note = Seed: IERFVSLAI
IKRFVSLAL

SEQ ID NO: 30318 - protein, 9 aa, synthetic construct
  source 1..9: note = Seed: IERFVSLAI
IKRFVSLAM

SEQ ID NO: 30319 - protein, 9 aa, synthetic construct
  source 1..9: note = Seed: IERFVSLAI
IKRFVSLAY

SEQ ID NO: 30320 - protein, 10 aa, synthetic construct
  source 1..10: note = Seed: ITSAVLQSGF
IKSAVLQSGF

SEQ ID NO: 30321 - protein, 10 aa, synthetic construct
  source 1..10: note = Seed: ITSAVLQSGF
IKSAVLQSGW

SEQ ID NO: 30322 - protein, 9 aa, synthetic construct
  source 1..9: note = Seed: IKSQDLSVV
IKSQDLSVF

SEQ ID NO: 30323 - protein, 9 aa, synthetic construct
  source 1..9: note = Seed: IKSQDLSVV
IKSQDLSVL

SEQ ID NO: 30324 - protein, 9 aa, synthetic construct
  source 1..9: note = Seed: IKSQDLSVV
IKSQDLSVM

SEQ ID NO: 30325 - protein, 9 aa, synthetic construct
  source 1..9: note = Seed: IKSQDLSVV
IKSQDLSVY

SEQ ID NO: 30326 - protein, 10 aa, synthetic construct
  source 1..10: note = Seed: ICSTMTNRQF
IKSTMTNRQW

SEQ ID NO: 30327 - protein, 10 aa, synthetic construct
  source 1..10: note = Seed: ILTALRLCAY
IKTALRLCAF

SEQ ID NO: 30328 - protein, 10 aa, synthetic construct
  source 1..10: note = Seed: ILTALRLCAY
IKTALRLCAY

SEQ ID NO: 30329 - protein, 9 aa, synthetic construct
  source 1..9: note = Seed: ISTIGVCSM
IKTIGVCSF

SEQ ID NO: 30330 - protein, 9 aa, synthetic construct
  source 1..9: note = Seed: ISTIGVCSM
IKTIGVCSM

SEQ ID NO: 30331 - protein, 9 aa, synthetic construct
  source 1..9: note = Seed: ISTIGVCSM
IKTIGVCSY

SEQ ID NO: 30332 - protein, 10 aa, synthetic construct
  source 1..10: note = Seed: IETISLAGSY
IKTISLAGSF

SEQ ID NO: 30333 - protein, 10 aa, synthetic construct
  source 1..10: note = Seed: IETISLAGSY
IKTISLAGSW

SEQ ID NO: 30334 - protein, 10 aa, synthetic construct
  source 1..10: note = Seed: IETISLAGSY
IKTISLAGSY

SEQ ID NO: 30335 - protein, 10 aa, synthetic construct
  source 1..10: note = Seed: IPTITQMNLK
IKTITQMNLK

SEQ ID NO: 30336 - protein, 11 aa, synthetic construct
  source 1..11: note = Seed: INTLNDLNETL
IKTLNDLNETL

SEQ ID NO: 30337 - protein, 11 aa, synthetic construct
  source 1..11: note = Seed: INTLNDLNETL
IKTLNDLNETV

SEQ ID NO: 30338 - protein, 9 aa, synthetic construct
  source 1..9: note = Seed: IMTRCLAVH
IKTRCLAVF

SEQ ID NO: 30339 - protein, 9 aa, synthetic construct
  source 1..9: note = Seed: IMTRCLAVH
IKTRCLAVM

SEQ ID NO: 30340 - protein, 9 aa, synthetic construct
  source 1..9: note = Seed: IMTRCLAVH
IKTRCLAVY

SEQ ID NO: 30341 - protein, 9 aa, synthetic construct
  source 1..9: note = Seed: IEVNSFSGY
IKVNSFSGF

SEQ ID NO: 30342 - protein, 9 aa, synthetic construct
  source 1..9: note = Seed: IEVNSFSGY
IKVNSFSGL

SEQ ID NO: 30343 - protein, 9 aa, synthetic construct
  source 1..9: note = Seed: IEVNSFSGY
IKVNSFSGM

SEQ ID NO: 30344 - protein, 9 aa, synthetic construct
  source 1..9: note = Seed: IEVNSFSGY
IKVNSFSGY

SEQ ID NO: 30345 - protein, 9 aa, synthetic construct
  source 1..9: note = Seed: IGVTQNVLY
IKVTQNVLF

SEQ ID NO: 30346 - protein, 9 aa, synthetic construct
  source 1..9: note = Seed: IGVTQNVLY
IKVTQNVLM

SEQ ID NO: 30347 - protein, 9 aa, synthetic construct
  source 1..9: note = Seed: IGVTQNVLY
IKVTQNVLY

SEQ ID NO: 30348 - protein, 9 aa, synthetic construct
  source 1..9: note = Seed: IKWADNNCY
IKWADNNCF

SEQ ID NO: 30349 - protein, 9 aa, synthetic construct
  source 1..9: note = Seed: IKWADNNCY
IKWADNNCM

SEQ ID NO: 30350 - protein, 10 aa, synthetic construct
  source 1..10: note = Seed: IKWADNNCYL
IKWADNNCYF

SEQ ID NO: 30351 - protein, 10 aa, synthetic construct
  source 1..10: note = Seed: IKWADNNCYL
IKWADNNCYY

SEQ ID NO: 30352 - protein, 10 aa, synthetic construct
  source 1..10: note = Seed: IFYLITPVHV
IKYLITPVHF

SEQ ID NO: 30353 - protein, 10 aa, synthetic construct
  source 1..10: note = Seed: IFYLITPVHV
IKYLITPVHL

SEQ ID NO: 30354 - protein, 10 aa, synthetic construct
  source 1..10: note = Seed: IFYLITPVHV
IKYLITPVHW

SEQ ID NO: 30355 - protein, 10 aa, synthetic construct
  source 1..10: note = Seed: IDYTEISFML
IKYTEISFMF

SEQ ID NO: 30356 - protein, 10 aa, synthetic construct
  source 1..10: note = Seed: IDYTEISFML
IKYTEISFMI

SEQ ID NO: 30357 - protein, 10 aa, synthetic construct
  source 1..10: note = Seed: IDYTEISFML
IKYTEISFML

SEQ ID NO: 30358 - protein, 10 aa, synthetic construct
  source 1..10: note = Seed: IDYTEISFML
IKYTEISFMM

SEQ ID NO: 30359 - protein, 10 aa, synthetic construct
  source 1..10: note = Seed: IDYTEISFML
IKYTEISFMW

SEQ ID NO: 30360 - protein, 9 aa, synthetic construct
  source 1..9: note = Seed: IGAGICASY
ILAGICASF

SEQ ID NO: 30361 - protein, 9 aa, synthetic construct
  source 1..9: note = Seed: IGAGICASY
ILAGICASM

SEQ ID NO: 30362 - protein, 9 aa, synthetic construct
  source 1..9: note = Seed: IGAGICASY
ILAGICASY

SEQ ID NO: 30363 - protein, 9 aa, synthetic construct
  source 1..9: note = Seed: ISAMVRMYI
ILAMVRMYA

SEQ ID NO: 30364 - protein, 9 aa, synthetic construct
  source 1..9: note = Seed: ISAMVRMYI
ILAMVRMYI

SEQ ID NO: 30365 - protein, 10 aa, synthetic construct
  source 1..10: note = Seed: ISAMVRMYIF
ILAMVRMYIW

SEQ ID NO: 30366 - protein, 9 aa, synthetic construct
  source 1..9: note = Seed: ISAMVRMYI
ILAMVRMYK

SEQ ID NO: 30367 - protein, 9 aa, synthetic construct
  source 1..9: note = Seed: ISAMVRMYI
ILAMVRMYL

SEQ ID NO: 30368 - protein, 9 aa, synthetic construct
  source 1..9: note = Seed: ISAMVRMYI
ILAMVRMYM

SEQ ID NO: 30369 - protein, 9 aa, synthetic construct
  source 1..9: note = Seed: ISAMVRMYI
ILAMVRMYV

SEQ ID NO: 30370 - protein, 9 aa, synthetic construct
  source 1..9: note = Seed: ISAMVRMYI
ILAMVRMYW

SEQ ID NO: 30371 - protein, 10 aa, synthetic construct
  source 1..10: note = Seed: ISASIVAGGI
ILASIVAGGA

SEQ ID NO: 30372 - protein, 10 aa, synthetic construct
  source 1..10: note = Seed: ISASIVAGGI
ILASIVAGGI

SEQ ID NO: 30373 - protein, 10 aa, synthetic construct
  source 1..10: note = Seed: ISASIVAGGI
ILASIVAGGL

SEQ ID NO: 30374 - protein, 10 aa, synthetic construct
  source 1..10: note = Seed: ISASIVAGGI
ILASIVAGGM

SEQ ID NO: 30375 - protein, 10 aa, synthetic construct
  source 1..10: note = Seed: ISASIVAGGI
ILASIVAGGV

SEQ ID NO: 30376 - protein, 10 aa, synthetic construct
  source 1..10: note = Seed: IIAYTMSLGA
ILAYTMSLGA

SEQ ID NO: 30377 - protein, 10 aa, synthetic construct
  source 1..10: note = Seed: IIAYTMSLGA
ILAYTMSLGI

SEQ ID NO: 30378 - protein, 10 aa, synthetic construct
  source 1..10: note = Seed: IIAYTMSLGA
ILAYTMSLGL

SEQ ID NO: 30379 - protein, 10 aa, synthetic construct
  source 1..10: note = Seed: IIAYTMSLGA
ILAYTMSLGV

SEQ ID NO: 30380 - protein, 10 aa, synthetic construct
  source 1..10: note = Seed: IICISTKHFY
ILCISTKHFY

SEQ ID NO: 30381 - protein, 9 aa, synthetic construct
  source 1..9: note = Seed: ITDAVDCAL
ILDAVDCAV

SEQ ID NO: 30382 - protein, 9 aa, synthetic construct
  source 1..9: note = Seed: ISDYDYYRY
ILDYDYYRY

SEQ ID NO: 30383 - protein, 9 aa, synthetic construct
  source 1..9: note = Seed: IPFAMQMAY
ILFAMQMAF

SEQ ID NO: 30384 - protein, 9 aa, synthetic construct
  source 1..9: note = Seed: IPFAMQMAY
ILFAMQMAL

SEQ ID NO: 30385 - protein, 9 aa, synthetic construct
  source 1..9: note = Seed: IPFAMQMAY
ILFAMQMAM

SEQ ID NO: 30386 - protein, 9 aa, synthetic construct
  source 1..9: note = Seed: IPFAMQMAY
ILFAMQMAY

SEQ ID NO: 30387 - protein, 10 aa, synthetic construct
  source 1..10: note = Seed: IPFAMQMAYR
ILFAMQMAYK

SEQ ID NO: 30388 - protein, 10 aa, synthetic construct
  source 1..10: note = Seed: IPFAMQMAYR
ILFAMQMAYR

SEQ ID NO: 30389 - protein, 11 aa, synthetic construct
  source 1..11: note = Seed: IPFAMQMAYRF
ILFAMQMAYRW

SEQ ID NO: 30390 - protein, 8 aa, synthetic construct
  source 1..8: note = Seed: IFFASFYY
ILFASFYY

SEQ ID NO: 30391 - protein, 9 aa, synthetic construct
  source 1..9: note = Seed: IFFASFYYV
ILFASFYYA

SEQ ID NO: 30392 - protein, 9 aa, synthetic construct
  source 1..9: note = Seed: IFFASFYYV
ILFASFYYC

SEQ ID NO: 30393 - protein, 9 aa, synthetic construct
  source 1..9: note = Seed: IFFASFYYV
ILFASFYYF

SEQ ID NO: 30394 - protein, 9 aa, synthetic construct
  source 1..9: note = Seed: IFFASFYYV
ILFASFYYG

SEQ ID NO: 30395 - protein, 9 aa, synthetic construct
  source 1..9: note = Seed: IFFASFYYV
ILFASFYYH

SEQ ID NO: 30396 - protein, 9 aa, synthetic construct
  source 1..9: note = Seed: IFFASFYYV
ILFASFYYI

SEQ ID NO: 30397 - protein, 9 aa, synthetic construct
  source 1..9: note = Seed: IFFASFYYV
ILFASFYYK

SEQ ID NO: 30398 - protein, 9 aa, synthetic construct
  source 1..9: note = Seed: IFFASFYYV
ILFASFYYL

SEQ ID NO: 30399 - protein, 9 aa, synthetic construct
  source 1..9: note = Seed: IFFASFYYV
ILFASFYYM

SEQ ID NO: 30400 - protein, 9 aa, synthetic construct
  source 1..9: note = Seed: IFFASFYYV
ILFASFYYP

SEQ ID NO: 30401 - protein, 9 aa, synthetic construct
  source 1..9: note = Seed: IFFASFYYV
ILFASFYYR

SEQ ID NO: 30402 - protein, 9 aa, synthetic construct
  source 1..9: note = Seed: IFFASFYYV
ILFASFYYS

SEQ ID NO: 30403 - protein, 9 aa, synthetic construct
  source 1..9: note = Seed: IFFASFYYV
ILFASFYYT

SEQ ID NO: 30404 - protein, 9 aa, synthetic construct
  source 1..9: note = Seed: IFFASFYYV
ILFASFYYV

SEQ ID NO: 30405 - protein, 10 aa, synthetic construct
  source 1..10: note = Seed: IFFASFYYVW
ILFASFYYVF

SEQ ID NO: 30406 - protein, 10 aa, synthetic construct
  source 1..10: note = Seed: IFFASFYYVW
ILFASFYYVW

SEQ ID NO: 30407 - protein, 11 aa, synthetic construct
  source 1..11: note = Seed: IFFASFYYVWK
ILFASFYYVWK

SEQ ID NO: 30408 - protein, 11 aa, synthetic construct
  source 1..11: note = Seed: IFFASFYYVWK
ILFASFYYVWR

SEQ ID NO: 30409 - protein, 10 aa, synthetic construct
  source 1..10: note = Seed: IFFASFYYVW
ILFASFYYVY

SEQ ID NO: 30410 - protein, 9 aa, synthetic construct
  source 1..9: note = Seed: IFFASFYYV
ILFASFYYW

SEQ ID NO: 30411 - protein, 9 aa, synthetic construct
  source 1..9: note = Seed: IFFASFYYV
ILFASFYYY

SEQ ID NO: 30412 - protein, 8 aa, synthetic construct
  source 1..8: note = Seed: IAFGGCVF
ILFGGCVF

SEQ ID NO: 30413 - protein, 10 aa, synthetic construct
  source 1..10: note = Seed: IAFGGCVFSY
ILFGGCVFSF

SEQ ID NO: 30414 - protein, 10 aa, synthetic construct
  source 1..10: note = Seed: IAFGGCVFSY
ILFGGCVFSY

SEQ ID NO: 30415 - protein, 11 aa, synthetic construct
  source 1..11: note = Seed: IAFGGCVFSYV
ILFGGCVFSYA

SEQ ID NO: 30416 - protein, 11 aa, synthetic construct
  source 1..11: note = Seed: IAFGGCVFSYV
ILFGGCVFSYI

SEQ ID NO: 30417 - protein, 11 aa, synthetic construct
  source 1..11: note = Seed: IAFGGCVFSYV
ILFGGCVFSYL

SEQ ID NO: 30418 - protein, 11 aa, synthetic construct
  source 1..11: note = Seed: IAFGGCVFSYV
ILFGGCVFSYM

SEQ ID NO: 30419 - protein, 11 aa, synthetic construct
  source 1..11: note = Seed: IAFGGCVFSYV
ILFGGCVFSYV

SEQ ID NO: 30420 - protein, 8 aa, synthetic construct
  source 1..8: note = Seed: IAFGGCVF
ILFGGCVY

SEQ ID NO: 30421 - protein, 9 aa, synthetic construct
  source 1..9: note = Seed: IFFITGNTL
ILFITGNTF

SEQ ID NO: 30422 - protein, 9 aa, synthetic construct
  source 1..9: note = Seed: IFFITGNTL
ILFITGNTM

SEQ ID NO: 30423 - protein, 9 aa, synthetic construct
  source 1..9: note = Seed: IFFITGNTL
ILFITGNTY

SEQ ID NO: 30424 - protein, 9 aa, synthetic construct
  source 1..9: note = Seed: ILFTRFFYV
ILFTRFFYA

SEQ ID NO: 30425 - protein, 9 aa, synthetic construct
  source 1..9: note = Seed: ILFTRFFYV
ILFTRFFYC

SEQ ID NO: 30426 - protein, 9 aa, synthetic construct
  source 1..9: note = Seed: ILFTRFFYV
ILFTRFFYF

SEQ ID NO: 30427 - protein, 9 aa, synthetic construct
  source 1..9: note = Seed: ILFTRFFYV
ILFTRFFYG

SEQ ID NO: 30428 - protein, 9 aa, synthetic construct
  source 1..9: note = Seed: ILFTRFFYV
ILFTRFFYH

SEQ ID NO: 30429 - protein, 9 aa, synthetic construct
  source 1..9: note = Seed: ILFTRFFYV
ILFTRFFYI

SEQ ID NO: 30430 - protein, 9 aa, synthetic construct
  source 1..9: note = Seed: ILFTRFFYV
ILFTRFFYK

SEQ ID NO: 30431 - protein, 9 aa, synthetic construct
  source 1..9: note = Seed: ILFTRFFYV
ILFTRFFYL

SEQ ID NO: 30432 - protein, 9 aa, synthetic construct
  source 1..9: note = Seed: ILFTRFFYV
ILFTRFFYM

SEQ ID NO: 30433 - protein, 9 aa, synthetic construct
  source 1..9: note = Seed: ILFTRFFYV
ILFTRFFYR

SEQ ID NO: 30434 - protein, 9 aa, synthetic construct
  source 1..9: note = Seed: ILFTRFFYV
ILFTRFFYS

SEQ ID NO: 30435 - protein, 9 aa, synthetic construct
  source 1..9: note = Seed: ILFTRFFYV
ILFTRFFYT

SEQ ID NO: 30436 - protein, 10 aa, synthetic construct
  source 1..10: note = Seed: ILFTRFFYVL
ILFTRFFYVA

SEQ ID NO: 30437 - protein, 10 aa, synthetic construct
  source 1..10: note = Seed: ILFTRFFYVL
ILFTRFFYVC

SEQ ID NO: 30438 - protein, 10 aa, synthetic construct
  source 1..10: note = Seed: ILFTRFFYVL
ILFTRFFYVD

SEQ ID NO: 30439 - protein, 10 aa, synthetic construct
  source 1..10: note = Seed: ILFTRFFYVL
ILFTRFFYVE

SEQ ID NO: 30440 - protein, 10 aa, synthetic construct
  source 1..10: note = Seed: ILFTRFFYVL
ILFTRFFYVF

SEQ ID NO: 30441 - protein, 10 aa, synthetic construct
  source 1..10: note = Seed: ILFTRFFYVL
ILFTRFFYVG

SEQ ID NO: 30442 - protein, 10 aa, synthetic construct
  source 1..10: note = Seed: ILFTRFFYVL
ILFTRFFYVH

SEQ ID NO: 30443 - protein, 10 aa, synthetic construct
  source 1..10: note = Seed: ILFTRFFYVL
ILFTRFFYVI

SEQ ID NO: 30444 - protein, 10 aa, synthetic construct
  source 1..10: note = Seed: ILFTRFFYVL
ILFTRFFYVK

SEQ ID NO: 30445 - protein, 11 aa, synthetic construct
  source 1..11: note = Seed: ILFTRFFYVLG
ILFTRFFYVLA

SEQ ID NO: 30446 - protein, 11 aa, synthetic construct
  source 1..11: note = Seed: ILFTRFFYVLG
ILFTRFFYVLI

SEQ ID NO: 30447 - protein, 11 aa, synthetic construct
  source 1..11: note = Seed: ILFTRFFYVLG
ILFTRFFYVLL

SEQ ID NO: 30448 - protein, 11 aa, synthetic construct
  source 1..11: note = Seed: ILFTRFFYVLG
ILFTRFFYVLV

SEQ ID NO: 30449 - protein, 10 aa, synthetic construct
  source 1..10: note = Seed: ILFTRFFYVL
ILFTRFFYVM

SEQ ID NO: 30450 - protein, 10 aa, synthetic construct
  source 1..10: note = Seed: ILFTRFFYVL
ILFTRFFYVN

SEQ ID NO: 30451 - protein, 10 aa, synthetic construct
  source 1..10: note = Seed: ILFTRFFYVL
ILFTRFFYVP

SEQ ID NO: 30452 - protein, 10 aa, synthetic construct
  source 1..10: note = Seed: ILFTRFFYVL
ILFTRFFYVQ

SEQ ID NO: 30453 - protein, 10 aa, synthetic construct
  source 1..10: note = Seed: ILFTRFFYVL
ILFTRFFYVR

SEQ ID NO: 30454 - protein, 10 aa, synthetic construct
  source 1..10: note = Seed: ILFTRFFYVL
ILFTRFFYVS

SEQ ID NO: 30455 - protein, 10 aa, synthetic construct
  source 1..10: note = Seed: ILFTRFFYVL
ILFTRFFYVT

SEQ ID NO: 30456 - protein, 10 aa, synthetic construct
  source 1..10: note = Seed: ILFTRFFYVL
ILFTRFFYVV

SEQ ID NO: 30457 - protein, 10 aa, synthetic construct
  source 1..10: note = Seed: ILFTRFFYVL
ILFTRFFYVW

SEQ ID NO: 30458 - protein, 10 aa, synthetic construct
  source 1..10: note = Seed: ILFTRFFYVL
ILFTRFFYVY

SEQ ID NO: 30459 - protein, 9 aa, synthetic construct
  source 1..9: note = Seed: ILFTRFFYV
ILFTRFFYW

SEQ ID NO: 30460 - protein, 9 aa, synthetic construct
  source 1..9: note = Seed: ILFTRFFYV
ILFTRFFYY

SEQ ID NO: 30461 - protein, 10 aa, synthetic construct
  source 1..10: note = Seed: IDGYFKIYSK
ILGYFKIYSR

SEQ ID NO: 30462 - protein, 9 aa, synthetic construct
  source 1..9: note = Seed: ILHCANFNV
ILHCANFNA

SEQ ID NO: 30463 - protein, 9 aa, synthetic construct
  source 1..9: note = Seed: ILHCANFNV
ILHCANFNI

SEQ ID NO: 30464 - protein, 9 aa, synthetic construct
  source 1..9: note = Seed: ILHCANFNV
ILHCANFNL

SEQ ID NO: 30465 - protein, 9 aa, synthetic construct
  source 1..9: note = Seed: ILHCANFNV
ILHCANFNM

SEQ ID NO: 30466 - protein, 10 aa, synthetic construct
  source 1..10: note = Seed: ILHCANFNVL
ILHCANFNVI

SEQ ID NO: 30467 - protein, 10 aa, synthetic construct
  source 1..10: note = Seed: ILHCANFNVL
ILHCANFNVV

SEQ ID NO: 30468 - protein, 9 aa, synthetic construct
  source 1..9: note = Seed: IAIPTNFTI
ILIPTNFTA

SEQ ID NO: 30469 - protein, 9 aa, synthetic construct
  source 1..9: note = Seed: IAIPTNFTI
ILIPTNFTC

SEQ ID NO: 30470 - protein, 9 aa, synthetic construct
  source 1..9: note = Seed: IAIPTNFTI
ILIPTNFTF

SEQ ID NO: 30471 - protein, 9 aa, synthetic construct
  source 1..9: note = Seed: IAIPTNFTI
ILIPTNFTI

SEQ ID NO: 30472 - protein, 11 aa, synthetic construct
  source 1..11: note = Seed: IAIPTNFTISV
ILIPTNFTISV

SEQ ID NO: 30473 - protein, 9 aa, synthetic construct
  source 1..9: note = Seed: IAIPTNFTI
ILIPTNFTL

SEQ ID NO: 30474 - protein, 9 aa, synthetic construct
  source 1..9: note = Seed: IAIPTNFTI
ILIPTNFTM

SEQ ID NO: 30475 - protein, 9 aa, synthetic construct
  source 1..9: note = Seed: IAIPTNFTI
ILIPTNFTT

SEQ ID NO: 30476 - protein, 9 aa, synthetic construct
  source 1..9: note = Seed: IAIPTNFTI
ILIPTNFTV

SEQ ID NO: 30477 - protein, 9 aa, synthetic construct
  source 1..9: note = Seed: IAIPTNFTI
ILIPTNFTW

SEQ ID NO: 30478 - protein, 9 aa, synthetic construct
  source 1..9: note = Seed: IAIPTNFTI
ILIPTNFTY

SEQ ID NO: 30479 - protein, 9 aa, synthetic construct
  source 1..9: note = Seed: ICISTKHFY
ILISTKHFY

SEQ ID NO: 30480 - protein, 9 aa, synthetic construct
  source 1..9: note = Seed: IQITISSFK
ILITISSFK

SEQ ID NO: 30481 - protein, 10 aa, synthetic construct
  source 1..10: note = Seed: IQITISSFKW
ILITISSFKW

SEQ ID NO: 30482 - protein, 9 aa, synthetic construct
  source 1..9: note = Seed: IQITISSFK
ILITISSFR

SEQ ID NO: 30483 - protein, 9 aa, synthetic construct
  source 1..9: note = Seed: IGIVNNTVY
ILIVNNTVF

SEQ ID NO: 30484 - protein, 9 aa, synthetic construct
  source 1..9: note = Seed: IGIVNNTVY
ILIVNNTVM

SEQ ID NO: 30485 - protein, 9 aa, synthetic construct
  source 1..9: note = Seed: IGIVNNTVY
ILIVNNTVY

SEQ ID NO: 30486 - protein, 11 aa, synthetic construct
  source 1..11: note = Seed: IQKEIDRLNEV
ILKEIDRLNEA

SEQ ID NO: 30487 - protein, 11 aa, synthetic construct
  source 1..11: note = Seed: IQKEIDRLNEV
ILKEIDRLNEI

SEQ ID NO: 30488 - protein, 11 aa, synthetic construct
  source 1..11: note = Seed: IQKEIDRLNEV
ILKEIDRLNEV

SEQ ID NO: 30489 - protein, 9 aa, synthetic construct
  source 1..9: note = Seed: IIKSQDLSV
ILKSQDLSV

SEQ ID NO: 30490 - protein, 10 aa, synthetic construct
  source 1..10: note = Seed: IIKSQDLSVV
ILKSQDLSVV

SEQ ID NO: 30491 - protein, 9 aa, synthetic construct
  source 1..9: note = Seed: IVKTDGTLM
ILKTDGTLF

SEQ ID NO: 30492 - protein, 9 aa, synthetic construct
  source 1..9: note = Seed: IVKTDGTLM
ILKTDGTLY

SEQ ID NO: 30493 - protein, 9 aa, synthetic construct
  source 1..9: note = Seed: IIKTIQPRV
ILKTIQPRV

SEQ ID NO: 30494 - protein, 10 aa, synthetic construct
  source 1..10: note = Seed: ILLAKDTTEA
ILLAKDTTEI

SEQ ID NO: 30495 - protein, 10 aa, synthetic construct
  source 1..10: note = Seed: ILLAKDTTEA
ILLAKDTTEL

SEQ ID NO: 30496 - protein, 10 aa, synthetic construct
  source 1..10: note = Seed: ILLAKDTTEA
ILLAKDTTEV

SEQ ID NO: 30497 - protein, 9 aa, synthetic construct
  source 1..9: note = Seed: IMLIIFWFS
ILLIIFWFA

SEQ ID NO: 30498 - protein, 9 aa, synthetic construct
  source 1..9: note = Seed: IMLIIFWFS
ILLIIFWFI

SEQ ID NO: 30499 - protein, 9 aa, synthetic construct
  source 1..9: note = Seed: IMLIIFWFS
ILLIIFWFL

SEQ ID NO: 30500 - protein, 9 aa, synthetic construct
  source 1..9: note = Seed: IMLIIFWFS
ILLIIFWFV

SEQ ID NO: 30501 - protein, 9 aa, synthetic construct
  source 1..9: note = Seed: ILLLDQALV
ILLLDQALI

SEQ ID NO: 30502 - protein, 9 aa, synthetic construct
  source 1..9: note = Seed: ILLLDQALV
ILLLDQALL

SEQ ID NO: 30503 - protein, 10 aa, synthetic construct
  source 1..10: note = Seed: ILLLDQALVS
ILLLDQALVV

SEQ ID NO: 30504 - protein, 11 aa, synthetic construct
  source 1..11: note = Seed: ILLNKHIDAYK
ILLNKHIDAYR

SEQ ID NO: 30505 - protein, 9 aa, synthetic construct
  source 1..9: note = Seed: ILLNKHIDA
ILLNKHIDI

SEQ ID NO: 30506 - protein, 9 aa, synthetic construct
  source 1..9: note = Seed: ILLNKHIDA
ILLNKHIDL

SEQ ID NO: 30507 - protein, 9 aa, synthetic construct
  source 1..9: note = Seed: ILLNKHIDA
ILLNKHIDV

SEQ ID NO: 30508 - protein, 10 aa, synthetic construct
  source 1..10: note = Seed: IMLVYCFLGY
ILLVYCFLGK

SEQ ID NO: 30509 - protein, 10 aa, synthetic construct
  source 1..10: note = Seed: IMLVYCFLGY
ILLVYCFLGR

SEQ ID NO: 30510 - protein, 9 aa, synthetic construct
  source 1..9: note = Seed: IAMACLVGL
ILMACLVGA

SEQ ID NO: 30511 - protein, 9 aa, synthetic construct
  source 1..9: note = Seed: IAMACLVGL
ILMACLVGF

SEQ ID NO: 30512 - protein, 9 aa, synthetic construct
  source 1..9: note = Seed: IAMACLVGL
ILMACLVGI

SEQ ID NO: 30513 - protein, 9 aa, synthetic construct
  source 1..9: note = Seed: IAMACLVGL
ILMACLVGL

SEQ ID NO: 30514 - protein, 10 aa, synthetic construct
  source 1..10: note = Seed: IAMACLVGLM
ILMACLVGLA

SEQ ID NO: 30515 - protein, 10 aa, synthetic construct
  source 1..10: note = Seed: IAMACLVGLM
ILMACLVGLI

SEQ ID NO: 30516 - protein, 10 aa, synthetic construct
  source 1..10: note = Seed: IAMACLVGLM
ILMACLVGLL

SEQ ID NO: 30517 - protein, 10 aa, synthetic construct
  source 1..10: note = Seed: IAMACLVGLM
ILMACLVGLM

SEQ ID NO: 30518 - protein, 10 aa, synthetic construct
  source 1..10: note = Seed: IAMACLVGLM
ILMACLVGLV

SEQ ID NO: 30519 - protein, 10 aa, synthetic construct
  source 1..10: note = Seed: IAMACLVGLM
ILMACLVGLY

SEQ ID NO: 30520 - protein, 9 aa, synthetic construct
  source 1..9: note = Seed: IAMACLVGL
ILMACLVGM

SEQ ID NO: 30521 - protein, 9 aa, synthetic construct
  source 1..9: note = Seed: IAMACLVGL
ILMACLVGT

SEQ ID NO: 30522 - protein, 9 aa, synthetic construct
  source 1..9: note = Seed: IAMACLVGL
ILMACLVGV

SEQ ID NO: 30523 - protein, 9 aa, synthetic construct
  source 1..9: note = Seed: IAMACLVGL
ILMACLVGY

SEQ ID NO: 30524 - protein, 10 aa, synthetic construct
  source 1..10: note = Seed: ISMMGFKMNY
ILMMGFKMNF

SEQ ID NO: 30525 - protein, 10 aa, synthetic construct
  source 1..10: note = Seed: ISMMGFKMNY
ILMMGFKMNK

SEQ ID NO: 30526 - protein, 10 aa, synthetic construct
  source 1..10: note = Seed: ISMMGFKMNY
ILMMGFKMNR

SEQ ID NO: 30527 - protein, 10 aa, synthetic construct
  source 1..10: note = Seed: ISMMGFKMNY
ILMMGFKMNY

SEQ ID NO: 30528 - protein, 9 aa, synthetic construct
  source 1..9: note = Seed: IMMNVAKYT
ILMNVAKYA

SEQ ID NO: 30529 - protein, 9 aa, synthetic construct
  source 1..9: note = Seed: IMMNVAKYT
ILMNVAKYI

SEQ ID NO: 30530 - protein, 9 aa, synthetic construct
  source 1..9: note = Seed: IMMNVAKYT
ILMNVAKYL

SEQ ID NO: 30531 - protein, 9 aa, synthetic construct
  source 1..9: note = Seed: IMMNVAKYT
ILMNVAKYM

SEQ ID NO: 30532 - protein, 9 aa, synthetic construct
  source 1..9: note = Seed: IMMNVAKYT
ILMNVAKYT

SEQ ID NO: 30533 - protein, 11 aa, synthetic construct
  source 1..11: note = Seed: IMMNVAKYTQL
ILMNVAKYTQI

SEQ ID NO: 30534 - protein, 11 aa, synthetic construct
  source 1..11: note = Seed: IMMNVAKYTQL
ILMNVAKYTQL

SEQ ID NO: 30535 - protein, 11 aa, synthetic construct
  source 1..11: note = Seed: IMMNVAKYTQL
ILMNVAKYTQV

SEQ ID NO: 30536 - protein, 9 aa, synthetic construct
  source 1..9: note = Seed: IMMNVAKYT
ILMNVAKYV

SEQ ID NO: 30537 - protein, 9 aa, synthetic construct
  source 1..9: note = Seed: IKNFKSVLY
ILNFKSVLF

SEQ ID NO: 30538 - protein, 10 aa, synthetic construct
  source 1..10: note = Seed: IKNFKSVLYY
ILNFKSVLYF

SEQ ID NO: 30539 - protein, 10 aa, synthetic construct
  source 1..10: note = Seed: IKNFKSVLYY
ILNFKSVLYY

SEQ ID NO: 30540 - protein, 10 aa, synthetic construct
  source 1..10: note = Seed: ITNLCPFGEV
ILNLCPFGEI

SEQ ID NO: 30541 - protein, 10 aa, synthetic construct
  source 1..10: note = Seed: ITNLCPFGEV
ILNLCPFGEL

SEQ ID NO: 30542 - protein, 10 aa, synthetic construct
  source 1..10: note = Seed: ITNLCPFGEV
ILNLCPFGEV

SEQ ID NO: 30543 - protein, 10 aa, synthetic construct
  source 1..10: note = Seed: IVNNTVYDPL
ILNNTVYDPA

SEQ ID NO: 30544 - protein, 10 aa, synthetic construct
  source 1..10: note = Seed: IVNNTVYDPL
ILNNTVYDPI

SEQ ID NO: 30545 - protein, 10 aa, synthetic construct
  source 1..10: note = Seed: IVNNTVYDPL
ILNNTVYDPL

SEQ ID NO: 30546 - protein, 10 aa, synthetic construct
  source 1..10: note = Seed: IVNNTVYDPL
ILNNTVYDPM

SEQ ID NO: 30547 - protein, 10 aa, synthetic construct
  source 1..10: note = Seed: IVNNTVYDPL
ILNNTVYDPV

SEQ ID NO: 30548 - protein, 9 aa, synthetic construct
  source 1..9: note = Seed: IVNNWLKQL
ILNNWLKQA

SEQ ID NO: 30549 - protein, 9 aa, synthetic construct
  source 1..9: note = Seed: IVNNWLKQL
ILNNWLKQI

SEQ ID NO: 30550 - protein, 9 aa, synthetic construct
  source 1..9: note = Seed: IVNNWLKQL
ILNNWLKQL

SEQ ID NO: 30551 - protein, 9 aa, synthetic construct
  source 1..9: note = Seed: IVNNWLKQL
ILNNWLKQM

SEQ ID NO: 30552 - protein, 9 aa, synthetic construct
  source 1..9: note = Seed: IVNNWLKQL
ILNNWLKQV

SEQ ID NO: 30553 - protein, 9 aa, synthetic construct
  source 1..9: note = Seed: IVNSVLLFL
ILNSVLLFA

SEQ ID NO: 30554 - protein, 9 aa, synthetic construct
  source 1..9: note = Seed: IVNSVLLFL
ILNSVLLFI

SEQ ID NO: 30555 - protein, 9 aa, synthetic construct
  source 1..9: note = Seed: IVNSVLLFL
ILNSVLLFL

SEQ ID NO: 30556 - protein, 10 aa, synthetic construct
  source 1..10: note = Seed: IVNSVLLFLA
ILNSVLLFLA

SEQ ID NO: 30557 - protein, 10 aa, synthetic construct
  source 1..10: note = Seed: IVNSVLLFLA
ILNSVLLFLC

SEQ ID NO: 30558 - protein, 10 aa, synthetic construct
  source 1..10: note = Seed: IVNSVLLFLA
ILNSVLLFLD

SEQ ID NO: 30559 - protein, 10 aa, synthetic construct
  source 1..10: note = Seed: IVNSVLLFLA
ILNSVLLFLE

SEQ ID NO: 30560 - protein, 10 aa, synthetic construct
  source 1..10: note = Seed: IVNSVLLFLA
ILNSVLLFLF

SEQ ID NO: 30561 - protein, 10 aa, synthetic construct
  source 1..10: note = Seed: IVNSVLLFLA
ILNSVLLFLG

SEQ ID NO: 30562 - protein, 10 aa, synthetic construct
  source 1..10: note = Seed: IVNSVLLFLA
ILNSVLLFLH

SEQ ID NO: 30563 - protein, 10 aa, synthetic construct
  source 1..10: note = Seed: IVNSVLLFLA
ILNSVLLFLI

SEQ ID NO: 30564 - protein, 10 aa, synthetic construct
  source 1..10: note = Seed: IVNSVLLFLA
ILNSVLLFLK

SEQ ID NO: 30565 - protein, 10 aa, synthetic construct
  source 1..10: note = Seed: IVNSVLLFLA
ILNSVLLFLL

SEQ ID NO: 30566 - protein, 10 aa, synthetic construct
  source 1..10: note = Seed: IVNSVLLFLA
ILNSVLLFLM

SEQ ID NO: 30567 - protein, 10 aa, synthetic construct
  source 1..10: note = Seed: IVNSVLLFLA
ILNSVLLFLN

SEQ ID NO: 30568 - protein, 10 aa, synthetic construct
  source 1..10: note = Seed: IVNSVLLFLA
ILNSVLLFLP

SEQ ID NO: 30569 - protein, 10 aa, synthetic construct
  source 1..10: note = Seed: IVNSVLLFLA
ILNSVLLFLQ

SEQ ID NO: 30570 - protein, 10 aa, synthetic construct
  source 1..10: note = Seed: IVNSVLLFLA
ILNSVLLFLR

SEQ ID NO: 30571 - protein, 10 aa, synthetic construct
  source 1..10: note = Seed: IVNSVLLFLA
ILNSVLLFLS

SEQ ID NO: 30572 - protein, 10 aa, synthetic construct
  source 1..10: note = Seed: IVNSVLLFLA
ILNSVLLFLT

SEQ ID NO: 30573 - protein, 10 aa, synthetic construct
  source 1..10: note = Seed: IVNSVLLFLA
ILNSVLLFLV

SEQ ID NO: 30574 - protein, 10 aa, synthetic construct
  source 1..10: note = Seed: IVNSVLLFLA
ILNSVLLFLW

SEQ ID NO: 30575 - protein, 10 aa, synthetic construct
  source 1..10: note = Seed: IVNSVLLFLA
ILNSVLLFLY

SEQ ID NO: 30576 - protein, 9 aa, synthetic construct
  source 1..9: note = Seed: IVNSVLLFL
ILNSVLLFM

SEQ ID NO: 30577 - protein, 9 aa, synthetic construct
  source 1..9: note = Seed: IVNSVLLFL
ILNSVLLFT

SEQ ID NO: 30578 - protein, 9 aa, synthetic construct
  source 1..9: note = Seed: IVNSVLLFL
ILNSVLLFV

SEQ ID NO: 30579 - protein, 9 aa, synthetic construct
  source 1..9: note = Seed: ISNSWLMWL
ILNSWLMWA

SEQ ID NO: 30580 - protein, 9 aa, synthetic construct
  source 1..9: note = Seed: ISNSWLMWL
ILNSWLMWC

SEQ ID NO: 30581 - protein, 9 aa, synthetic construct
  source 1..9: note = Seed: ISNSWLMWL
ILNSWLMWI

SEQ ID NO: 30582 - protein, 9 aa, synthetic construct
  source 1..9: note = Seed: ISNSWLMWL
ILNSWLMWL

SEQ ID NO: 30583 - protein, 9 aa, synthetic construct
  source 1..9: note = Seed: ISNSWLMWL
ILNSWLMWM

SEQ ID NO: 30584 - protein, 9 aa, synthetic construct
  source 1..9: note = Seed: ISNSWLMWL
ILNSWLMWS

SEQ ID NO: 30585 - protein, 9 aa, synthetic construct
  source 1..9: note = Seed: ISNSWLMWL
ILNSWLMWT

SEQ ID NO: 30586 - protein, 9 aa, synthetic construct
  source 1..9: note = Seed: ISNSWLMWL
ILNSWLMWV

SEQ ID NO: 30587 - protein, 9 aa, synthetic construct
  source 1..9: note = Seed: ITPCSFGGV
ILPCSFGGI

SEQ ID NO: 30588 - protein, 9 aa, synthetic construct
  source 1..9: note = Seed: ITPCSFGGV
ILPCSFGGV

SEQ ID NO: 30589 - protein, 10 aa, synthetic construct
  source 1..10: note = Seed: ISPYNSQNAV
ILPYNSQNAA

SEQ ID NO: 30590 - protein, 10 aa, synthetic construct
  source 1..10: note = Seed: ISPYNSQNAV
ILPYNSQNAL

SEQ ID NO: 30591 - protein, 11 aa, synthetic construct
  source 1..11: note = Seed: IAQFAPSASAF
ILQFAPSASAF

SEQ ID NO: 30592 - protein, 11 aa, synthetic construct
  source 1..11: note = Seed: IAQFAPSASAF
ILQFAPSASAM

SEQ ID NO: 30593 - protein, 11 aa, synthetic construct
  source 1..11: note = Seed: IAQFAPSASAF
ILQFAPSASAY

SEQ ID NO: 30594 - protein, 10 aa, synthetic construct
  source 1..10: note = Seed: IAQFAPSASA
ILQFAPSASF

SEQ ID NO: 30595 - protein, 10 aa, synthetic construct
  source 1..10: note = Seed: IAQFAPSASA
ILQFAPSASL

SEQ ID NO: 30596 - protein, 10 aa, synthetic construct
  source 1..10: note = Seed: IAQFAPSASA
ILQFAPSASM

SEQ ID NO: 30597 - protein, 10 aa, synthetic construct
  source 1..10: note = Seed: IAQFAPSASA
ILQFAPSASW

SEQ ID NO: 30598 - protein, 10 aa, synthetic construct
  source 1..10: note = Seed: IAQFAPSASA
ILQFAPSASY

SEQ ID NO: 30599 - protein, 10 aa, synthetic construct
  source 1..10: note = Seed: IMQLFFSYFA
ILQLFFSYFA

SEQ ID NO: 30600 - protein, 11 aa, synthetic construct
  source 1..11: note = Seed: IMQLFFSYFAV
ILQLFFSYFAV

SEQ ID NO: 30601 - protein, 10 aa, synthetic construct
  source 1..10: note = Seed: IMQLFFSYFA
ILQLFFSYFI

SEQ ID NO: 30602 - protein, 10 aa, synthetic construct
  source 1..10: note = Seed: IMQLFFSYFA
ILQLFFSYFL

SEQ ID NO: 30603 - protein, 10 aa, synthetic construct
  source 1..10: note = Seed: IMQLFFSYFA
ILQLFFSYFM

SEQ ID NO: 30604 - protein, 10 aa, synthetic construct
  source 1..10: note = Seed: IMQLFFSYFA
ILQLFFSYFV

SEQ ID NO: 30605 - protein, 9 aa, synthetic construct
  source 1..9: note = Seed: IMQLFFSYF
ILQLFFSYY

SEQ ID NO: 30606 - protein, 9 aa, synthetic construct
  source 1..9: note = Seed: IVQLSEISM
ILQLSEISF

SEQ ID NO: 30607 - protein, 9 aa, synthetic construct
  source 1..9: note = Seed: IVQLSEISM
ILQLSEISY

SEQ ID NO: 30608 - protein, 9 aa, synthetic construct
  source 1..9: note = Seed: IVQMLSDTL
ILQMLSDTI

SEQ ID NO: 30609 - protein, 9 aa, synthetic construct
  source 1..9: note = Seed: IVQMLSDTL
ILQMLSDTL

SEQ ID NO: 30610 - protein, 10 aa, synthetic construct
  source 1..10: note = Seed: IVQMLSDTLK
ILQMLSDTLK

SEQ ID NO: 30611 - protein, 10 aa, synthetic construct
  source 1..10: note = Seed: IVQMLSDTLK
ILQMLSDTLR

SEQ ID NO: 30612 - protein, 9 aa, synthetic construct
  source 1..9: note = Seed: IVQMLSDTL
ILQMLSDTV

SEQ ID NO: 30613 - protein, 10 aa, synthetic construct
  source 1..10: note = Seed: ITQMNLKYAI
ILQMNLKYAA

SEQ ID NO: 30614 - protein, 10 aa, synthetic construct
  source 1..10: note = Seed: ITQMNLKYAI
ILQMNLKYAI

SEQ ID NO: 30615 - protein, 10 aa, synthetic construct
  source 1..10: note = Seed: ITQMNLKYAI
ILQMNLKYAL

SEQ ID NO: 30616 - protein, 10 aa, synthetic construct
  source 1..10: note = Seed: ITQMNLKYAI
ILQMNLKYAV

SEQ ID NO: 30617 - protein, 9 aa, synthetic construct
  source 1..9: note = Seed: IAQYTSALL
ILQYTSALF

SEQ ID NO: 30618 - protein, 9 aa, synthetic construct
  source 1..9: note = Seed: IAQYTSALL
ILQYTSALY

SEQ ID NO: 30619 - protein, 9 aa, synthetic construct
  source 1..9: note = Seed: IERFVSLAI
ILRFVSLAF

SEQ ID NO: 30620 - protein, 9 aa, synthetic construct
  source 1..9: note = Seed: IERFVSLAI
ILRFVSLAM

SEQ ID NO: 30621 - protein, 9 aa, synthetic construct
  source 1..9: note = Seed: IERFVSLAI
ILRFVSLAY

SEQ ID NO: 30622 - protein, 9 aa, synthetic construct
  source 1..9: note = Seed: IIRGWIFGT
ILRGWIFGA

SEQ ID NO: 30623 - protein, 9 aa, synthetic construct
  source 1..9: note = Seed: IIRGWIFGT
ILRGWIFGI

SEQ ID NO: 30624 - protein, 9 aa, synthetic construct
  source 1..9: note = Seed: IIRGWIFGT
ILRGWIFGL

SEQ ID NO: 30625 - protein, 9 aa, synthetic construct
  source 1..9: note = Seed: IIRGWIFGT
ILRGWIFGM

SEQ ID NO: 30626 - protein, 9 aa, synthetic construct
  source 1..9: note = Seed: IIRGWIFGT
ILRGWIFGT

SEQ ID NO: 30627 - protein, 9 aa, synthetic construct
  source 1..9: note = Seed: IIRGWIFGT
ILRGWIFGV

SEQ ID NO: 30628 - protein, 9 aa, synthetic construct
  source 1..9: note = Seed: IRRPFLCCK
ILRPFLCCK

SEQ ID NO: 30629 - protein, 9 aa, synthetic construct
  source 1..9: note = Seed: ISRQRLTKY
ILRQRLTKY

SEQ ID NO: 30630 - protein, 10 aa, synthetic construct
  source 1..10: note = Seed: ITSAVLQSGF
ILSAVLQSGF

SEQ ID NO: 30631 - protein, 10 aa, synthetic construct
  source 1..10: note = Seed: ITSAVLQSGF
ILSAVLQSGW

SEQ ID NO: 30632 - protein, 10 aa, synthetic construct
  source 1..10: note = Seed: ITSAVLQSGF
ILSAVLQSGY

SEQ ID NO: 30633 - protein, 9 aa, synthetic construct
  source 1..9: note = Seed: IASFRLFAR
ILSFRLFAK

SEQ ID NO: 30634 - protein, 9 aa, synthetic construct
  source 1..9: note = Seed: IASFRLFAR
ILSFRLFAR

SEQ ID NO: 30635 - protein, 10 aa, synthetic construct
  source 1..10: note = Seed: ILSLLSKGRL
ILSLLSKGRV

SEQ ID NO: 30636 - protein, 9 aa, synthetic construct
  source 1..9: note = Seed: IKSQDLSVV
ILSQDLSVF

SEQ ID NO: 30637 - protein, 9 aa, synthetic construct
  source 1..9: note = Seed: IKSQDLSVV
ILSQDLSVY

SEQ ID NO: 30638 - protein, 10 aa, synthetic construct
  source 1..10: note = Seed: ILSRLDKVEA
ILSRLDKVEL

SEQ ID NO: 30639 - protein, 10 aa, synthetic construct
  source 1..10: note = Seed: ILSRLDKVEA
ILSRLDKVEV

SEQ ID NO: 30640 - protein, 10 aa, synthetic construct
  source 1..10: note = Seed: IVSTIQRKYK
ILSTIQRKYK

SEQ ID NO: 30641 - protein, 10 aa, synthetic construct
  source 1..10: note = Seed: IVSTIQRKYK
ILSTIQRKYR

SEQ ID NO: 30642 - protein, 10 aa, synthetic construct
  source 1..10: note = Seed: ICSTMTNRQF
ILSTMTNRQW

SEQ ID NO: 30643 - protein, 9 aa, synthetic construct
  source 1..9: note = Seed: ISSVLNDIL
ILSVLNDIW

SEQ ID NO: 30644 - protein, 10 aa, synthetic construct
  source 1..10: note = Seed: ILTALRLCAY
ILTALRLCAF

SEQ ID NO: 30645 - protein, 9 aa, synthetic construct
  source 1..9: note = Seed: ILTALRLCA
ILTALRLCI

SEQ ID NO: 30646 - protein, 9 aa, synthetic construct
  source 1..9: note = Seed: ILTALRLCA
ILTALRLCL

SEQ ID NO: 30647 - protein, 9 aa, synthetic construct
  source 1..9: note = Seed: ILTALRLCA
ILTALRLCV

SEQ ID NO: 30648 - protein, 9 aa, synthetic construct
  source 1..9: note = Seed: ISTIGVCSM
ILTIGVCSF

SEQ ID NO: 30649 - protein, 9 aa, synthetic construct
  source 1..9: note = Seed: ISTIGVCSM
ILTIGVCSY

SEQ ID NO: 30650 - protein, 10 aa, synthetic construct
  source 1..10: note = Seed: IETISLAGSY
ILTISLAGSF

SEQ ID NO: 30651 - protein, 10 aa, synthetic construct
  source 1..10: note = Seed: IETISLAGSY
ILTISLAGSW

SEQ ID NO: 30652 - protein, 10 aa, synthetic construct
  source 1..10: note = Seed: IETISLAGSY
ILTISLAGSY

SEQ ID NO: 30653 - protein, 10 aa, synthetic construct
  source 1..10: note = Seed: IPTITQMNLK
ILTITQMNLK

SEQ ID NO: 30654 - protein, 11 aa, synthetic construct
  source 1..11: note = Seed: INTLNDLNETL
ILTLNDLNETL

SEQ ID NO: 30655 - protein, 11 aa, synthetic construct
  source 1..11: note = Seed: INTLNDLNETL
ILTLNDLNETV

SEQ ID NO: 30656 - protein, 9 aa, synthetic construct
  source 1..9: note = Seed: IMTRCLAVH
ILTRCLAVF

SEQ ID NO: 30657 - protein, 9 aa, synthetic construct
  source 1..9: note = Seed: IMTRCLAVH
ILTRCLAVY

SEQ ID NO: 30658 - protein, 9 aa, synthetic construct
  source 1..9: note = Seed: IVTRCLNRV
ILTRCLNRL

SEQ ID NO: 30659 - protein, 9 aa, synthetic construct
  source 1..9: note = Seed: IVTRCLNRV
ILTRCLNRV

SEQ ID NO: 30660 - protein, 9 aa, synthetic construct
  source 1..9: note = Seed: ILTSLLVLV
ILTSLLVLA

SEQ ID NO: 30661 - protein, 9 aa, synthetic construct
  source 1..9: note = Seed: ILTSLLVLV
ILTSLLVLI

SEQ ID NO: 30662 - protein, 9 aa, synthetic construct
  source 1..9: note = Seed: ILTSLLVLV
ILTSLLVLL

SEQ ID NO: 30663 - protein, 9 aa, synthetic construct
  source 1..9: note = Seed: ILTSLLVLV
ILTSLLVLM

SEQ ID NO: 30664 - protein, 10 aa, synthetic construct
  source 1..10: note = Seed: ILTSLLVLVQ
ILTSLLVLVA

SEQ ID NO: 30665 - protein, 10 aa, synthetic construct
  source 1..10: note = Seed: ILTSLLVLVQ
ILTSLLVLVI

SEQ ID NO: 30666 - protein, 10 aa, synthetic construct
  source 1..10: note = Seed: ILTSLLVLVQ
ILTSLLVLVL

SEQ ID NO: 30667 - protein, 10 aa, synthetic construct
  source 1..10: note = Seed: ILTSLLVLVQ
ILTSLLVLVM

SEQ ID NO: 30668 - protein, 10 aa, synthetic construct
  source 1..10: note = Seed: ILTSLLVLVQ
ILTSLLVLVV

SEQ ID NO: 30669 - protein, 9 aa, synthetic construct
  source 1..9: note = Seed: IFVDGVPFV
ILVDGVPFA

SEQ ID NO: 30670 - protein, 9 aa, synthetic construct
  source 1..9: note = Seed: IFVDGVPFV
ILVDGVPFC

SEQ ID NO: 30671 - protein, 9 aa, synthetic construct
  source 1..9: note = Seed: IFVDGVPFV
ILVDGVPFI

SEQ ID NO: 30672 - protein, 9 aa, synthetic construct
  source 1..9: note = Seed: IFVDGVPFV
ILVDGVPFL

SEQ ID NO: 30673 - protein, 9 aa, synthetic construct
  source 1..9: note = Seed: IFVDGVPFV
ILVDGVPFM

SEQ ID NO: 30674 - protein, 9 aa, synthetic construct
  source 1..9: note = Seed: IFVDGVPFV
ILVDGVPFS

SEQ ID NO: 30675 - protein, 9 aa, synthetic construct
  source 1..9: note = Seed: IFVDGVPFV
ILVDGVPFT

SEQ ID NO: 30676 - protein, 9 aa, synthetic construct
  source 1..9: note = Seed: IFVDGVPFV
ILVDGVPFV

SEQ ID NO: 30677 - protein, 10 aa, synthetic construct
  source 1..10: note = Seed: IFVDGVPFVV
ILVDGVPFVA

SEQ ID NO: 30678 - protein, 10 aa, synthetic construct
  source 1..10: note = Seed: IFVDGVPFVV
ILVDGVPFVC

SEQ ID NO: 30679 - protein, 10 aa, synthetic construct
  source 1..10: note = Seed: IFVDGVPFVV
ILVDGVPFVD

SEQ ID NO: 30680 - protein, 10 aa, synthetic construct
  source 1..10: note = Seed: IFVDGVPFVV
ILVDGVPFVE

SEQ ID NO: 30681 - protein, 10 aa, synthetic construct
  source 1..10: note = Seed: IFVDGVPFVV
ILVDGVPFVF

SEQ ID NO: 30682 - protein, 10 aa, synthetic construct
  source 1..10: note = Seed: IFVDGVPFVV
ILVDGVPFVG

SEQ ID NO: 30683 - protein, 10 aa, synthetic construct
  source 1..10: note = Seed: IFVDGVPFVV
ILVDGVPFVH

SEQ ID NO: 30684 - protein, 10 aa, synthetic construct
  source 1..10: note = Seed: IFVDGVPFVV
ILVDGVPFVI

SEQ ID NO: 30685 - protein, 10 aa, synthetic construct
  source 1..10: note = Seed: IFVDGVPFVV
ILVDGVPFVK

SEQ ID NO: 30686 - protein, 10 aa, synthetic construct
  source 1..10: note = Seed: IFVDGVPFVV
ILVDGVPFVL

SEQ ID NO: 30687 - protein, 10 aa, synthetic construct
  source 1..10: note = Seed: IFVDGVPFVV
ILVDGVPFVM

SEQ ID NO: 30688 - protein, 10 aa, synthetic construct
  source 1..10: note = Seed: IFVDGVPFVV
ILVDGVPFVN

SEQ ID NO: 30689 - protein, 10 aa, synthetic construct
  source 1..10: note = Seed: IFVDGVPFVV
ILVDGVPFVP

SEQ ID NO: 30690 - protein, 10 aa, synthetic construct
  source 1..10: note = Seed: IFVDGVPFVV
ILVDGVPFVQ

SEQ ID NO: 30691 - protein, 10 aa, synthetic construct
  source 1..10: note = Seed: IFVDGVPFVV
ILVDGVPFVR

SEQ ID NO: 30692 - protein, 10 aa, synthetic construct
  source 1..10: note = Seed: IFVDGVPFVV
ILVDGVPFVS

SEQ ID NO: 30693 - protein, 10 aa, synthetic construct
  source 1..10: note = Seed: IFVDGVPFVV
ILVDGVPFVT

SEQ ID NO: 30694 - protein, 10 aa, synthetic construct
  source 1..10: note = Seed: IFVDGVPFVV
ILVDGVPFVV

SEQ ID NO: 30695 - protein, 10 aa, synthetic construct
  source 1..10: note = Seed: IFVDGVPFVV
ILVDGVPFVW

SEQ ID NO: 30696 - protein, 10 aa, synthetic construct
  source 1..10: note = Seed: IFVDGVPFVV
ILVDGVPFVY

SEQ ID NO: 30697 - protein, 9 aa, synthetic construct
  source 1..9: note = Seed: IVVFDEISM
ILVFDEISF

SEQ ID NO: 30698 - protein, 9 aa, synthetic construct
  source 1..9: note = Seed: IVVFDEISM
ILVFDEISY

SEQ ID NO: 30699 - protein, 9 aa, synthetic construct
  source 1..9: note = Seed: IEVNSFSGY
ILVNSFSGF

SEQ ID NO: 30700 - protein, 9 aa, synthetic construct
  source 1..9: note = Seed: IEVNSFSGY
ILVNSFSGM

SEQ ID NO: 30701 - protein, 9 aa, synthetic construct
  source 1..9: note = Seed: IEVNSFSGY
ILVNSFSGY

SEQ ID NO: 30702 - protein, 10 aa, synthetic construct
  source 1..10: note = Seed: IEVNSFSGYL
ILVNSFSGYA

SEQ ID NO: 30703 - protein, 10 aa, synthetic construct
  source 1..10: note = Seed: IEVNSFSGYL
ILVNSFSGYI

SEQ ID NO: 30704 - protein, 10 aa, synthetic construct
  source 1..10: note = Seed: IEVNSFSGYL
ILVNSFSGYL

SEQ ID NO: 30705 - protein, 10 aa, synthetic construct
  source 1..10: note = Seed: IEVNSFSGYL
ILVNSFSGYV

SEQ ID NO: 30706 - protein, 9 aa, synthetic construct
  source 1..9: note = Seed: ITVNVLAWL
ILVNVLAWA

SEQ ID NO: 30707 - protein, 9 aa, synthetic construct
  source 1..9: note = Seed: ITVNVLAWL
ILVNVLAWI

SEQ ID NO: 30708 - protein, 9 aa, synthetic construct
  source 1..9: note = Seed: ITVNVLAWL
ILVNVLAWL

SEQ ID NO: 30709 - protein, 10 aa, synthetic construct
  source 1..10: note = Seed: ITVNVLAWLY
ILVNVLAWLY

SEQ ID NO: 30710 - protein, 9 aa, synthetic construct
  source 1..9: note = Seed: ITVNVLAWL
ILVNVLAWM

SEQ ID NO: 30711 - protein, 9 aa, synthetic construct
  source 1..9: note = Seed: ITVNVLAWL
ILVNVLAWT

SEQ ID NO: 30712 - protein, 9 aa, synthetic construct
  source 1..9: note = Seed: ITVNVLAWL
ILVNVLAWV

SEQ ID NO: 30713 - protein, 9 aa, synthetic construct
  source 1..9: note = Seed: IGVTQNVLY
ILVTQNVLF

SEQ ID NO: 30714 - protein, 9 aa, synthetic construct
  source 1..9: note = Seed: IGVTQNVLY
ILVTQNVLY

SEQ ID NO: 30715 - protein, 10 aa, synthetic construct
  source 1..10: note = Seed: ISVTSNYSGV
ILVTSNYSGV

SEQ ID NO: 30716 - protein, 10 aa, synthetic construct
  source 1..10: note = Seed: ISVTTEILPV
ILVTTEILPA

SEQ ID NO: 30717 - protein, 10 aa, synthetic construct
  source 1..10: note = Seed: ISVTTEILPV
ILVTTEILPI

SEQ ID NO: 30718 - protein, 10 aa, synthetic construct
  source 1..10: note = Seed: ISVTTEILPV
ILVTTEILPL

SEQ ID NO: 30719 - protein, 10 aa, synthetic construct
  source 1..10: note = Seed: ISVTTEILPV
ILVTTEILPV

SEQ ID NO: 30720 - protein, 10 aa, synthetic construct
  source 1..10: note = Seed: IFYLITPVHV
ILYLITPVHF

SEQ ID NO: 30721 - protein, 10 aa, synthetic construct
  source 1..10: note = Seed: IFYLITPVHV
ILYLITPVHL

SEQ ID NO: 30722 - protein, 10 aa, synthetic construct
  source 1..10: note = Seed: IFYLITPVHV
ILYLITPVHW

SEQ ID NO: 30723 - protein, 10 aa, synthetic construct
  source 1..10: note = Seed: IDYTEISFML
ILYTEISFMF

SEQ ID NO: 30724 - protein, 10 aa, synthetic construct
  source 1..10: note = Seed: IDYTEISFML
ILYTEISFMI

SEQ ID NO: 30725 - protein, 10 aa, synthetic construct
  source 1..10: note = Seed: IDYTEISFML
ILYTEISFML

SEQ ID NO: 30726 - protein, 10 aa, synthetic construct
  source 1..10: note = Seed: IDYTEISFML
ILYTEISFMW

SEQ ID NO: 30727 - protein, 9 aa, synthetic construct
  source 1..9: note = Seed: IGYYRRATR
ILYYRRATR

SEQ ID NO: 30728 - protein, 10 aa, synthetic construct
  source 1..10: note = Seed: IGYYRRATRR
ILYYRRATRR

SEQ ID NO: 30729 - protein, 9 aa, synthetic construct
  source 1..9: note = Seed: IGAGICASY
IMAGICASF

SEQ ID NO: 30730 - protein, 9 aa, synthetic construct
  source 1..9: note = Seed: IGAGICASY
IMAGICASL

SEQ ID NO: 30731 - protein, 9 aa, synthetic construct
  source 1..9: note = Seed: IGAGICASY
IMAGICASM

SEQ ID NO: 30732 - protein, 9 aa, synthetic construct
  source 1..9: note = Seed: IGAGICASY
IMAGICASY

SEQ ID NO: 30733 - protein, 9 aa, synthetic construct
  source 1..9: note = Seed: ISAMVRMYI
IMAMVRMYA

SEQ ID NO: 30734 - protein, 9 aa, synthetic construct
  source 1..9: note = Seed: ISAMVRMYI
IMAMVRMYF

SEQ ID NO: 30735 - protein, 9 aa, synthetic construct
  source 1..9: note = Seed: ISAMVRMYI
IMAMVRMYI

SEQ ID NO: 30736 - protein, 10 aa, synthetic construct
  source 1..10: note = Seed: ISAMVRMYIF
IMAMVRMYIF

SEQ ID NO: 30737 - protein, 10 aa, synthetic construct
  source 1..10: note = Seed: ISAMVRMYIF
IMAMVRMYIW

SEQ ID NO: 30738 - protein, 10 aa, synthetic construct
  source 1..10: note = Seed: ISAMVRMYIF
IMAMVRMYIY

SEQ ID NO: 30739 - protein, 9 aa, synthetic construct
  source 1..9: note = Seed: ISAMVRMYI
IMAMVRMYK

SEQ ID NO: 30740 - protein, 9 aa, synthetic construct
  source 1..9: note = Seed: ISAMVRMYI
IMAMVRMYL

SEQ ID NO: 30741 - protein, 9 aa, synthetic construct
  source 1..9: note = Seed: ISAMVRMYI
IMAMVRMYM

SEQ ID NO: 30742 - protein, 9 aa, synthetic construct
  source 1..9: note = Seed: ISAMVRMYI
IMAMVRMYT

SEQ ID NO: 30743 - protein, 9 aa, synthetic construct
  source 1..9: note = Seed: ISAMVRMYI
IMAMVRMYV

SEQ ID NO: 30744 - protein, 9 aa, synthetic construct
  source 1..9: note = Seed: ISAMVRMYI
IMAMVRMYW

SEQ ID NO: 30745 - protein, 10 aa, synthetic construct
  source 1..10: note = Seed: ISASIVAGGI
IMASIVAGGA

SEQ ID NO: 30746 - protein, 10 aa, synthetic construct
  source 1..10: note = Seed: ISASIVAGGI
IMASIVAGGI

SEQ ID NO: 30747 - protein, 10 aa, synthetic construct
  source 1..10: note = Seed: ISASIVAGGI
IMASIVAGGL

SEQ ID NO: 30748 - protein, 10 aa, synthetic construct
  source 1..10: note = Seed: ISASIVAGGI
IMASIVAGGM

SEQ ID NO: 30749 - protein, 10 aa, synthetic construct
  source 1..10: note = Seed: ISASIVAGGI
IMASIVAGGV

SEQ ID NO: 30750 - protein, 10 aa, synthetic construct
  source 1..10: note = Seed: IIAYTMSLGA
IMAYTMSLGA

SEQ ID NO: 30751 - protein, 10 aa, synthetic construct
  source 1..10: note = Seed: IIAYTMSLGA
IMAYTMSLGI

SEQ ID NO: 30752 - protein, 10 aa, synthetic construct
  source 1..10: note = Seed: IIAYTMSLGA
IMAYTMSLGL

SEQ ID NO: 30753 - protein, 10 aa, synthetic construct
  source 1..10: note = Seed: IIAYTMSLGA
IMAYTMSLGV

SEQ ID NO: 30754 - protein, 9 aa, synthetic construct
  source 1..9: note = Seed: IICISTKHF
IMCISTKHF

SEQ ID NO: 30755 - protein, 10 aa, synthetic construct
  source 1..10: note = Seed: IICISTKHFY
IMCISTKHFY

SEQ ID NO: 30756 - protein, 9 aa, synthetic construct
  source 1..9: note = Seed: IICISTKHF
IMCISTKHY

SEQ ID NO: 30757 - protein, 9 aa, synthetic construct
  source 1..9: note = Seed: ITDAVDCAL
IMDAVDCAL

SEQ ID NO: 30758 - protein, 9 aa, synthetic construct
  source 1..9: note = Seed: ITDAVDCAL
IMDAVDCAV

SEQ ID NO: 30759 - protein, 9 aa, synthetic construct
  source 1..9: note = Seed: ILDITPCSF
IMDITPCSF

SEQ ID NO: 30760 - protein, 9 aa, synthetic construct
  source 1..9: note = Seed: ILDITPCSF
IMDITPCSL

SEQ ID NO: 30761 - protein, 9 aa, synthetic construct
  source 1..9: note = Seed: ILDITPCSF
IMDITPCSM

SEQ ID NO: 30762 - protein, 9 aa, synthetic construct
  source 1..9: note = Seed: ILDITPCSF
IMDITPCSY

SEQ ID NO: 30763 - protein, 9 aa, synthetic construct
  source 1..9: note = Seed: INDMILSLL
IMDMILSLL

SEQ ID NO: 30764 - protein, 9 aa, synthetic construct
  source 1..9: note = Seed: IPFAMQMAY
IMFAMQMAA

SEQ ID NO: 30765 - protein, 9 aa, synthetic construct
  source 1..9: note = Seed: IPFAMQMAY
IMFAMQMAF

SEQ ID NO: 30766 - protein, 9 aa, synthetic construct
  source 1..9: note = Seed: IPFAMQMAY
IMFAMQMAH

SEQ ID NO: 30767 - protein, 9 aa, synthetic construct
  source 1..9: note = Seed: IPFAMQMAY
IMFAMQMAI

SEQ ID NO: 30768 - protein, 9 aa, synthetic construct
  source 1..9: note = Seed: IPFAMQMAY
IMFAMQMAL

SEQ ID NO: 30769 - protein, 9 aa, synthetic construct
  source 1..9: note = Seed: IPFAMQMAY
IMFAMQMAM

SEQ ID NO: 30770 - protein, 9 aa, synthetic construct
  source 1..9: note = Seed: IPFAMQMAY
IMFAMQMAV

SEQ ID NO: 30771 - protein, 9 aa, synthetic construct
  source 1..9: note = Seed: IPFAMQMAY
IMFAMQMAW

SEQ ID NO: 30772 - protein, 9 aa, synthetic construct
  source 1..9: note = Seed: IPFAMQMAY
IMFAMQMAY

SEQ ID NO: 30773 - protein, 10 aa, synthetic construct
  source 1..10: note = Seed: IPFAMQMAYR
IMFAMQMAYK

SEQ ID NO: 30774 - protein, 10 aa, synthetic construct
  source 1..10: note = Seed: IPFAMQMAYR
IMFAMQMAYR

SEQ ID NO: 30775 - protein, 11 aa, synthetic construct
  source 1..11: note = Seed: IPFAMQMAYRF
IMFAMQMAYRW

SEQ ID NO: 30776 - protein, 8 aa, synthetic construct
  source 1..8: note = Seed: IFFASFYY
IMFASFYY

SEQ ID NO: 30777 - protein, 9 aa, synthetic construct
  source 1..9: note = Seed: IFFASFYYV
IMFASFYYA

SEQ ID NO: 30778 - protein, 9 aa, synthetic construct
  source 1..9: note = Seed: IFFASFYYV
IMFASFYYC

SEQ ID NO: 30779 - protein, 9 aa, synthetic construct
  source 1..9: note = Seed: IFFASFYYV
IMFASFYYF

SEQ ID NO: 30780 - protein, 9 aa, synthetic construct
  source 1..9: note = Seed: IFFASFYYV
IMFASFYYG

SEQ ID NO: 30781 - protein, 9 aa, synthetic construct
  source 1..9: note = Seed: IFFASFYYV
IMFASFYYH

SEQ ID NO: 30782 - protein, 9 aa, synthetic construct
  source 1..9: note = Seed: IFFASFYYV
IMFASFYYI

SEQ ID NO: 30783 - protein, 9 aa, synthetic construct
  source 1..9: note = Seed: IFFASFYYV
IMFASFYYK

SEQ ID NO: 30784 - protein, 9 aa, synthetic construct
  source 1..9: note = Seed: IFFASFYYV
IMFASFYYL

SEQ ID NO: 30785 - protein, 9 aa, synthetic construct
  source 1..9: note = Seed: IFFASFYYV
IMFASFYYM

SEQ ID NO: 30786 - protein, 9 aa, synthetic construct
  source 1..9: note = Seed: IFFASFYYV
IMFASFYYP

SEQ ID NO: 30787 - protein, 9 aa, synthetic construct
  source 1..9: note = Seed: IFFASFYYV
IMFASFYYR

SEQ ID NO: 30788 - protein, 9 aa, synthetic construct
  source 1..9: note = Seed: IFFASFYYV
IMFASFYYS

SEQ ID NO: 30789 - protein, 9 aa, synthetic construct
  source 1..9: note = Seed: IFFASFYYV
IMFASFYYT

SEQ ID NO: 30790 - protein, 9 aa, synthetic construct
  source 1..9: note = Seed: IFFASFYYV
IMFASFYYV

SEQ ID NO: 30791 - protein, 10 aa, synthetic construct
  source 1..10: note = Seed: IFFASFYYVW
IMFASFYYVF

SEQ ID NO: 30792 - protein, 10 aa, synthetic construct
  source 1..10: note = Seed: IFFASFYYVW
IMFASFYYVW

SEQ ID NO: 30793 - protein, 11 aa, synthetic construct
  source 1..11: note = Seed: IFFASFYYVWK
IMFASFYYVWK

SEQ ID NO: 30794 - protein, 11 aa, synthetic construct
  source 1..11: note = Seed: IFFASFYYVWK
IMFASFYYVWR

SEQ ID NO: 30795 - protein, 10 aa, synthetic construct
  source 1..10: note = Seed: IFFASFYYVW
IMFASFYYVY

SEQ ID NO: 30796 - protein, 9 aa, synthetic construct
  source 1..9: note = Seed: IFFASFYYV
IMFASFYYW

SEQ ID NO: 30797 - protein, 9 aa, synthetic construct
  source 1..9: note = Seed: IFFASFYYV
IMFASFYYY

SEQ ID NO: 30798 - protein, 8 aa, synthetic construct
  source 1..8: note = Seed: IAFGGCVF
IMFGGCVF

SEQ ID NO: 30799 - protein, 10 aa, synthetic construct
  source 1..10: note = Seed: IAFGGCVFSY
IMFGGCVFSF

SEQ ID NO: 30800 - protein, 10 aa, synthetic construct
  source 1..10: note = Seed: IAFGGCVFSY
IMFGGCVFSK

SEQ ID NO: 30801 - protein, 10 aa, synthetic construct
  source 1..10: note = Seed: IAFGGCVFSY
IMFGGCVFSM

SEQ ID NO: 30802 - protein, 10 aa, synthetic construct
  source 1..10: note = Seed: IAFGGCVFSY
IMFGGCVFSR

SEQ ID NO: 30803 - protein, 10 aa, synthetic construct
  source 1..10: note = Seed: IAFGGCVFSY
IMFGGCVFSW

(The sequence listing continues in the following parts.)
